United States Patent Application Publication US 2007/0042381 A1 - sequence listing, part 69

SEQ ID NO: 3141995 - RNA, 22 nt, Human
ggaagugugggucugugugugu

SEQ ID NO: 3141996 - RNA, 12 nt, Human
ggaagugugggu

SEQ ID NO: 3141997 - RNA, 17 nt, Human
gcuucuaguucugccag

SEQ ID NO: 3141998 - RNA, 16 nt, Human
gcuucuaguucugcca

SEQ ID NO: 3141999 - RNA, 23 nt, Human
gccuccauccuacccccugugcc

SEQ ID NO: 3142000 - RNA, 22 nt, Human
gcuaauucuuugaccuguuggg

SEQ ID NO: 3142001 - RNA, 19 nt, Human
gcucaggaaccgaggcagg

SEQ ID NO: 3142002 - RNA, 16 nt, Human
gcucaggaaccgaggc

SEQ ID NO: 3142003 - RNA, 21 nt, Human
gcucaggaaccgaggcaggga

SEQ ID NO: 3142004 - RNA, 20 nt, Human
gcucaggaaccgaggcaggg

SEQ ID NO: 3142005 - RNA, 14 nt, Human
aauuuaugugaugg

SEQ ID NO: 3142006 - RNA, 18 nt, Human
aauucuuugaccuguugg

SEQ ID NO: 3142007 - RNA, 22 nt, Human
aauucuuugaccuguugggagu

SEQ ID NO: 3142008 - RNA, 14 nt, Human
uauguguguguguu

SEQ ID NO: 3142009 - RNA, 22 nt, Human
uauguguguguguugugugugg

SEQ ID NO: 3142010 - RNA, 11 nt, Human
uaugugugugu

SEQ ID NO: 3142011 - RNA, 23 nt, Human
uauguguguguguuguguguggg

SEQ ID NO: 3142012 - RNA, 21 nt, Human
acagacacucccacuuggcau

SEQ ID NO: 3142013 - RNA, 17 nt, Human
uauggggauagaugugu

SEQ ID NO: 3142014 - RNA, 18 nt, Human
uauggggauagaugugug

SEQ ID NO: 3142015 - RNA, 19 nt, Human
uauggggauagaugugugg

SEQ ID NO: 3142016 - RNA, 12 nt, Human
acagccuggcug

SEQ ID NO: 3142017 - RNA, 13 nt, Human
uaguucugccagg

SEQ ID NO: 3142018 - RNA, 14 nt, Human
uaguucugccagga

SEQ ID NO: 3142019 - RNA, 20 nt, Human
acaccuaggcuagggugggg

SEQ ID NO: 3142020 - RNA, 23 nt, Human
acaccuaggcuaggguggggaga

SEQ ID NO: 3142021 - RNA, 13 nt, Human
guguguguaugug

SEQ ID NO: 3142022 - RNA, 16 nt, Human
gugugugggagugugu

SEQ ID NO: 3142023 - RNA, 17 nt, Human
guguguguugugugugg

SEQ ID NO: 3142024 - RNA, 14 nt, Human
guguguguaugugg

SEQ ID NO: 3142025 - RNA, 15 nt, Human
gugggggucugugug

SEQ ID NO: 3142026 - RNA, 16 nt, Human
gugggggucugugugu

SEQ ID NO: 3142027 - RNA, 14 nt, Human
gugggggucugugu

SEQ ID NO: 3142028 - RNA, 18 nt, Human
guggcacuggggcagggg

SEQ ID NO: 3142029 - RNA, 17 nt, Human
guggcacuggggcaggg

SEQ ID NO: 3142030 - RNA, 20 nt, Human
guccugcaccggggccuggg

SEQ ID NO: 3142031 - RNA, 19 nt, Human
guccugcaccggggccugg

SEQ ID NO: 3142032 - RNA, 15 nt, Human
guccugcaccggggc

SEQ ID NO: 3142033 - RNA, 14 nt, Human
guugggagaauguc

SEQ ID NO: 3142034 - RNA, 21 nt, Human
guugggagaaugucaguaugu

SEQ ID NO: 3142035 - RNA, 16 nt, Human
guguuuaugugugugu

SEQ ID NO: 3142036 - RNA, 12 nt, Human
guguuuaugugu

SEQ ID NO: 3142037 - RNA, 21 nt, Human
uccugcaccggggccugggca

SEQ ID NO: 3142038 - RNA, 20 nt, Human
uccugcaccggggccugggc

SEQ ID NO: 3142039 - RNA, 23 nt, Human
ucgagaucccaacacugccagca

SEQ ID NO: 3142040 - RNA, 22 nt, Human
ucgagaucccaacacugccagc

SEQ ID NO: 3142041 - RNA, 14 nt, Human
acuggggcaggggc

SEQ ID NO: 3142042 - RNA, 11 nt, Human
uccucagcccc

SEQ ID NO: 3142043 - RNA, 21 nt, Human
acucuggagguuuguuuagaa

SEQ ID NO: 3142044 - RNA, 17 nt, Human
acucaugugacucuuuc

SEQ ID NO: 3142045 - RNA, 16 nt, Human
acucaugugacucuuu

SEQ ID NO: 3142046 - RNA, 15 nt, Human
acucaugugacucuu

SEQ ID NO: 3142047 - RNA, 16 nt, Human
ucagccccgcguggaa

SEQ ID NO: 3142048 - RNA, 22 nt, Human
acccagcuaugguucucucgca

SEQ ID NO: 3142049 - RNA, 22 nt, Human
ucagauuugccuuauuggcagc

SEQ ID NO: 3142050 - RNA, 15 nt, Human
ucaggccgaaggagg

SEQ ID NO: 3142051 - RNA, 18 nt, Human
ucaggaaccgaggcaggg

SEQ ID NO: 3142052 - RNA, 17 nt, Human
ucaggaaccgaggcagg

SEQ ID NO: 3142053 - RNA, 18 nt, Human
accagagaaaaagggagg

SEQ ID NO: 3142054 - RNA, 20 nt, Human
accagagaaaaagggagggg

SEQ ID NO: 3142055 - RNA, 22 nt, Human
ucaugauagaaggcuaugggga

SEQ ID NO: 3142056 - RNA, 18 nt, Human
accugaauaaagaaugaa

SEQ ID NO: 3142057 - RNA, 11 nt, Human
ucuggcccuau

SEQ ID NO: 3142058 - RNA, 14 nt, Human
agacuuaucaacau

SEQ ID NO: 3142059 - RNA, 17 nt, Human
ugaggaagagggacugu

SEQ ID NO: 3142060 - RNA, 22 nt, Human
ugagggugacuauggagcugag

SEQ ID NO: 3142061 - RNA, 18 nt, Human
auaaucacaacccuucag

SEQ ID NO: 3142062 - RNA, 12 nt, Human
uuaugugugugu

SEQ ID NO: 3142063 - RNA, 14 nt, Human
uuaugugugugugu

SEQ ID NO: 3142064 - RNA, 10 nt, Human
uuaugugugu

SEQ ID NO: 3142065 - RNA, 19 nt, Human
auagaaggcuauggggaua

SEQ ID NO: 3142066 - RNA, 14 nt, Human
auagauguguggac

SEQ ID NO: 3142067 - RNA, 12 nt, Human
auagaugugugg

SEQ ID NO: 3142068 - RNA, 13 nt, Human
auagaugugugga

SEQ ID NO: 3142069 - RNA, 11 nt, Human
auagaugugug

SEQ ID NO: 3142070 - RNA, 14 nt, Human
aguauuugugggga

SEQ ID NO: 3142071 - RNA, 16 nt, Human
aguccaucagccucca

SEQ ID NO: 3142072 - RNA, 20 nt, Human
uguagugauuuuuaugccac

SEQ ID NO: 3142073 - RNA, 14 nt, Human
agugaggaugucug

SEQ ID NO: 3142074 - RNA, 21 nt, Human
agugauuuuuaugccaccuga

SEQ ID NO: 3142075 - RNA, 20 nt, Human
agugauuuuuaugccaccug

SEQ ID NO: 3142076 - RNA, 16 nt, Human
agugauuuuuaugcca

SEQ ID NO: 3142077 - RNA, 18 nt, Human
agugccaggauggaauga

SEQ ID NO: 3142078 - RNA, 16 nt, Human
agugggguagguuggg

SEQ ID NO: 3142079 - RNA, 18 nt, Human
uguguguuguguguggga

SEQ ID NO: 3142080 - RNA, 9 nt, Human
aguguguaa

SEQ ID NO: 3142081 - RNA, 17 nt, Human
uggcuguggcauccaga

SEQ ID NO: 3142082 - RNA, 20 nt, Human
uggcuguggccuaaccugcc

SEQ ID NO: 3142083 - RNA, 20 nt, Human
uggaagugugggucugugug

SEQ ID NO: 3142084 - RNA, 13 nt, Human
uggaagugugggu

SEQ ID NO: 3142085 - RNA, 14 nt, Human
uggaaguguggguc

SEQ ID NO: 3142086 - RNA, 16 nt, Human
aggccugacucucagc

SEQ ID NO: 3142087 - RNA, 20 nt, Human
uggcauccagagucccugcc

SEQ ID NO: 3142088 - RNA, 22 nt, Human
uggcauccagagucccugccug

SEQ ID NO: 3142089 - RNA, 21 nt, Human
uggcauccagagucccugccu

SEQ ID NO: 3142090 - RNA, 22 nt, Human
uggcacagccuggcuguggccu

SEQ ID NO: 3142091 - RNA, 14 nt, Human
aggccauucuuucc

SEQ ID NO: 3142092 - RNA, 20 nt, Human
aggcucagaggguguccugc

SEQ ID NO: 3142093 - RNA, 19 nt, Human
aggcucagaggguguccug

SEQ ID NO: 3142094 - RNA, 18 nt, Human
aggcucagaggguguccu

SEQ ID NO: 3142095 - RNA, 18 nt, Human
aggcgaagcguuguccuc

SEQ ID NO: 3142096 - RNA, 19 nt, Human
ugccuugugaaggaauuau

SEQ ID NO: 3142097 - RNA, 17 nt, Human
ugccuugucacgccaga

SEQ ID NO: 3142098 - RNA, 15 nt, Human
agcuggggaugucuc

SEQ ID NO: 3142099 - RNA, 19 nt, Human
agccugacccucaucuuuc

SEQ ID NO: 3142100 - RNA, 12 nt, Human
auuccagaggaa

SEQ ID NO: 3142101 - RNA, 12 nt, Human
auuuuucucaug

SEQ ID NO: 3142102 - RNA, 19 nt, Human
auuuguaaauuuaugugau

SEQ ID NO: 3142103 - RNA, 18 nt, Human
auuuguaaauuuauguga

SEQ ID NO: 3142104 - RNA, 16 nt, Human
auuucccuuccuuccu

SEQ ID NO: 3142105 - RNA, 19 nt, Human
auccauagcaccuccacau

SEQ ID NO: 3142106 - RNA, 13 nt, Human
uucugccaggaga

SEQ ID NO: 3142107 - RNA, 16 nt, Human
auccuacccccugugc

SEQ ID NO: 3142108 - RNA, 14 nt, Human
auccuacccccugu

SEQ ID NO: 3142109 - RNA, 13 nt, Human
aucaggccauugu

SEQ ID NO: 3142110 - RNA, 16 nt, Human
aucaggccauuguccc

SEQ ID NO: 3142111 - RNA, 20 nt, Human
auggggauagauguguggac

SEQ ID NO: 3142112 - RNA, 16 nt, Human
augguucucaggccug

SEQ ID NO: 3142113 - RNA, 16 nt, Human
augucaguauguggaa

SEQ ID NO: 3142114 - RNA, 21 nt, Human
augugacucuuuccaaccggc

SEQ ID NO: 3142115 - RNA, 16 nt, Human
augugacucuuuccaa

SEQ ID NO: 3142116 - RNA, 12 nt, Human
augugacucuuu

SEQ ID NO: 3142117 - RNA, 18 nt, Human
aguucauaaauuuauggu

SEQ ID NO: 3142118 - RNA, 16 nt, Human
aguggcuggaucugug

SEQ ID NO: 3142119 - RNA, 19 nt, Human
augagcuccuuaaggcucu

SEQ ID NO: 3142120 - RNA, 14 nt, Human
aucagccugugcca

SEQ ID NO: 3142121 - RNA, 21 nt, Human
aggagucccugccaucauguu

SEQ ID NO: 3142122 - RNA, 14 nt, Human
agcugagcaggugu

SEQ ID NO: 3142123 - RNA, 18 nt, Human
agcuccuuaaggcucuuu

SEQ ID NO: 3142124 - RNA, 22 nt, Human
agcuccuuaaggcucuuuugua

SEQ ID NO: 3142125 - RNA, 17 nt, Human
agcugcuccccacguca

SEQ ID NO: 3142126 - RNA, 14 nt, Human
agcugcuccccacg

SEQ ID NO: 3142127 - RNA, 20 nt, Human
agaggacaguauuugugggg

SEQ ID NO: 3142128 - RNA, 14 nt, Human
agccgggagccuga

SEQ ID NO: 3142129 - RNA, 11 nt, Human
acacugccagc

SEQ ID NO: 3142130 - RNA, 13 nt, Human
acccccugugccu

SEQ ID NO: 3142131 - RNA, 12 nt, Human
acugccagcauu

SEQ ID NO: 3142132 - RNA, 23 nt, Human
accugccgagaguccaucagccu

SEQ ID NO: 3142133 - RNA, 16 nt, Human
accugccgagagucca

SEQ ID NO: 3142134 - RNA, 13 nt, Human
aaugucaguaugu

SEQ ID NO: 3142135 - RNA, 15 nt, Human
aaugucaguaugugg

SEQ ID NO: 3142136 - RNA, 16 nt, Human
caccccgacuuuuguu

SEQ ID NO: 3142137 - RNA, 19 nt, Human
cuauggggauagaugugug

SEQ ID NO: 3142138 - RNA, 20 nt, Human
cuauggggauagaugugugg

SEQ ID NO: 3142139 - RNA, 21 nt, Human
cuauggggauagaugugugga

SEQ ID NO: 3142140 - RNA, 22 nt, Human
cuacucuggagguuuguuuaga

SEQ ID NO: 3142141 - RNA, 16 nt, Human
cucagaggguguccug

SEQ ID NO: 3142142 - RNA, 17 nt, Human
cucagccccgcguggaa

SEQ ID NO: 3142143 - RNA, 17 nt, Human
cucaggaaccgaggcag

SEQ ID NO: 3142144 - RNA, 19 nt, Human
cucaggaaccgaggcaggg

SEQ ID NO: 3142145 - RNA, 18 nt, Human
cucaggaaccgaggcagg

SEQ ID NO: 3142146 - RNA, 20 nt, Human
cuccccacgucagcugggac

SEQ ID NO: 3142147 - RNA, 16 nt, Human
cuccacucaugugacu

SEQ ID NO: 3142148 - RNA, 22 nt, Human
cuccacucaugugacucuuucc

SEQ ID NO: 3142149 - RNA, 14 nt, Human
ccugccgagagucc

SEQ ID NO: 3142150 - RNA, 23 nt, Human
ccugccgagaguccaucagccuc

SEQ ID NO: 3142151 - RNA, 22 nt, Human
ccugccgagaguccaucagccu

SEQ ID NO: 3142152 - RNA, 19 nt, Human
ccugaagagaagggcaggg

SEQ ID NO: 3142153 - RNA, 15 nt, Human
ccugcaccggggccu

SEQ ID NO: 3142154 - RNA, 17 nt, Human
ccugcaccggggccugg

SEQ ID NO: 3142155 - RNA, 16 nt, Human
cgcggcugggaggagg

SEQ ID NO: 3142156 - RNA, 12 nt, Human
cgcggcugggag

SEQ ID NO: 3142157 - RNA, 11 nt, Human
cgcggcuggga

SEQ ID NO: 3142158 - RNA, 19 nt, Human
cgggacaccuaggcuaggg

SEQ ID NO: 3142159 - RNA, 18 nt, Human
cgggacaccuaggcuagg

SEQ ID NO: 3142160 - RNA, 17 nt, Human
ccugugccuuuugccau

SEQ ID NO: 3142161 - RNA, 21 nt, Human
cgaagcguuguccucagcccc

SEQ ID NO: 3142162 - RNA, 17 nt, Human
cgaagcguuguccucag

SEQ ID NO: 3142163 - RNA, 16 nt, Human
cgaagcguuguccuca

SEQ ID NO: 3142164 - RNA, 15 nt, Human
cgaagcguuguccuc

SEQ ID NO: 3142165 - RNA, 14 nt, Human
ccuuugucccagaa

SEQ ID NO: 3142166 - RNA, 21 nt, Human
ccgagaguccaucagccucca

SEQ ID NO: 3142167 - RNA, 20 nt, Human
ccgagaguccaucagccucc

SEQ ID NO: 3142168 - RNA, 20 nt, Human
ccggggccugggcaggaggg

SEQ ID NO: 3142169 - RNA, 21 nt, Human
ccgggggcagucugagagagg

SEQ ID NO: 3142170 - RNA, 13 nt, Human
ccuaaccugccga

SEQ ID NO: 3142171 - RNA, 12 nt, Human
ccuaaccugccg

SEQ ID NO: 3142172 - RNA, 23 nt, Human
ccguggcuguggcauccagaguc

SEQ ID NO: 3142173 - RNA, 16 nt, Human
ccuaggcuaggguggg

SEQ ID NO: 3142174 - RNA, 14 nt, Human
ccccugugccuugu

SEQ ID NO: 3142175 - RNA, 13 nt, Human
cccaugagcuccu

SEQ ID NO: 3142176 - RNA, 22 nt, Human
cccaugagcuccuuaaggcucu

SEQ ID NO: 3142177 - RNA, 15 nt, Human
cccaugagcuccuua

SEQ ID NO: 3142178 - RNA, 14 nt, Human
cccaugagcuccuu

SEQ ID NO: 3142179 - RNA, 14 nt, Human
cccaacacugccag

SEQ ID NO: 3142180 - RNA, 16 nt, Human
cccaacacugccagca

SEQ ID NO: 3142181 - RNA, 15 nt, Human
cccaacacugccagc

SEQ ID NO: 3142182 - RNA, 15 nt, Human
cccacggcuccucga

SEQ ID NO: 3142183 - RNA, 15 nt, Human
cccacgucagcuggg

SEQ ID NO: 3142184 - RNA, 21 nt, Human
cuggccaguggcuggaucugu

SEQ ID NO: 3142185 - RNA, 12 nt, Human
cuggagguuugu

SEQ ID NO: 3142186 - RNA, 17 nt, Human
cuggagguuuguuuaga

SEQ ID NO: 3142187 - RNA, 18 nt, Human
cuggaccagccucuccac

SEQ ID NO: 3142188 - RNA, 14 nt, Human
cuggaccagccucu

SEQ ID NO: 3142189 - RNA, 22 nt, Human
cugccgagaguccaucagccuc

SEQ ID NO: 3142190 - RNA, 23 nt, Human
cugccgagaguccaucagccucc

SEQ ID NO: 3142191 - RNA, 11 nt, Human
cugcugggcuu

SEQ ID NO: 3142192 - RNA, 21 nt, Human
cugucucccuccucugcccgg

SEQ ID NO: 3142193 - RNA, 19 nt, Human
cugugaggggcucucucau

SEQ ID NO: 3142194 - RNA, 21 nt, Human
cuguguguguguauguggggg

SEQ ID NO: 3142195 - RNA, 16 nt, Human
cuguguguuuaugugu

SEQ ID NO: 3142196 - RNA, 17 nt, Human
cuguguguuuaugugug

SEQ ID NO: 3142197 - RNA, 14 nt, Human
cuuuguggcacugg

SEQ ID NO: 3142198 - RNA, 13 nt, Human
cuugucacgccag

SEQ ID NO: 3142199 - RNA, 16 nt, Human
cuugucacgccagacu

SEQ ID NO: 3142200 - RNA, 22 nt, Human
cuuucuuccaaacaggcucaga

SEQ ID NO: 3142201 - RNA, 15 nt, Human
gaugggucaguugua

SEQ ID NO: 3142202 - RNA, 21 nt, Human
gaugggucaguuguaucagca

SEQ ID NO: 3142203 - RNA, 23 nt, Human
gauugcaggagucccugccauca

SEQ ID NO: 3142204 - RNA, 18 nt, Human
gcacuggggcaggggccg

SEQ ID NO: 3142205 - RNA, 15 nt, Human
gcacuggggcagggg

SEQ ID NO: 3142206 - RNA, 23 nt, Human
gcacuggggcaggggccgggggc

SEQ ID NO: 3142207 - RNA, 14 nt, Human
gagggggagagggc

SEQ ID NO: 3142208 - RNA, 13 nt, Human
gaggguguccugc

SEQ ID NO: 3142209 - RNA, 22 nt, Human
gaggccucucauuccagaggaa

SEQ ID NO: 3142210 - RNA, 20 nt, Human
gaggcgaagcguuguccuca

SEQ ID NO: 3142211 - RNA, 21 nt, Human
gaggcgaagcguuguccucag

SEQ ID NO: 3142212 - RNA, 14 nt, Human
gaggcagggaagga

SEQ ID NO: 3142213 - RNA, 23 nt, Human
gagucccugccuggaccagccuc

SEQ ID NO: 3142214 - RNA, 21 nt, Human
gagucccugccuggaccagcc

SEQ ID NO: 3142215 - RNA, 13 nt, Human
gaguguguaauuu

SEQ ID NO: 3142216 - RNA, 14 nt, Human
gauagaugugugga

SEQ ID NO: 3142217 - RNA, 22 nt, Human
gauagauguguggacacauugg

SEQ ID NO: 3142218 - RNA, 14 nt, Human
gaccagccucucca

SEQ ID NO: 3142219 - RNA, 16 nt, Human
gaaugucaguaugugg

SEQ ID NO: 3142220 - RNA, 18 nt, Human
gaaugucaguauguggaa

SEQ ID NO: 3142221 - RNA, 13 nt, Human
gaaugucaguaug

SEQ ID NO: 3142222 - RNA, 19 nt, Human
gaaugucaguauguggaag

SEQ ID NO: 3142223 - RNA, 13 nt, Human
gagagacgggccc

SEQ ID NO: 3142224 - RNA, 17 nt, Human
gagaaugucaguaugug

SEQ ID NO: 3142225 - RNA, 20 nt, Human
gagaucccaacacugccagc

SEQ ID NO: 3142226 - RNA, 19 nt, Human
gagaucccaacacugccag

SEQ ID NO: 3142227 - RNA, 18 nt, Human
gagaucccaacacugcca

SEQ ID NO: 3142228 - RNA, 23 nt, Human
gcccuggugguggcucgggaggc

SEQ ID NO: 3142229 - RNA, 17 nt, Human
gcuaugagcuggggaug

SEQ ID NO: 3142230 - RNA, 21 nt, Human
gcucagaggguguccugcacc

SEQ ID NO: 3142231 - RNA, 20 nt, Human
ggccauucuuucccaacacc

SEQ ID NO: 3142232 - RNA, 17 nt, Human
ggauggaaugauggguc

SEQ ID NO: 3142233 - RNA, 22 nt, Human
ggccuaaccugccgagagucca

SEQ ID NO: 3142234 - RNA, 21 nt, Human
ggccuaaccugccgagagucc

SEQ ID NO: 3142235 - RNA, 12 nt, Human
ggcccugugccu

SEQ ID NO: 3142236 - RNA, 16 nt, Human
ggcgcggcugggagga

SEQ ID NO: 3142237 - RNA, 14 nt, Human
ggccugggcaggag

SEQ ID NO: 3142238 - RNA, 13 nt, Human
ggccugggcagga

SEQ ID NO: 3142239 - RNA, 21 nt, Human
ggcuauggggauagaugugug

SEQ ID NO: 3142240 - RNA, 16 nt, Human
ggcuaggguggggaga

SEQ ID NO: 3142241 - RNA, 14 nt, Human
gcuuuguggcacug

SEQ ID NO: 3142242 - RNA, 22 nt, Human
gcuuuguggcacuggggcaggg

SEQ ID NO: 3142243 - RNA, 22 nt, Human
ggagaaugucaguauguggaag

SEQ ID NO: 3142244 - RNA, 23 nt, Human
ggaagggacaccaagccuuggcu

SEQ ID NO: 3142245 - RNA, 22 nt, Human
ggaaggaucccaugagcuccuu

SEQ ID NO: 3142246 - RNA, 14 nt, Human
gggcgcggcuggga

SEQ ID NO: 3142247 - RNA, 13 nt, Human
ggggauagaugug

SEQ ID NO: 3142248 - RNA, 18 nt, Human
ggggaguuuagggugggg

SEQ ID NO: 3142249 - RNA, 14 nt, Human
gucccugccuggac

SEQ ID NO: 3142250 - RNA, 21 nt, Human
gucccugccuggaccagccuc

SEQ ID NO: 3142251 - RNA, 20 nt, Human
gucccugccuggaccagccu

SEQ ID NO: 3142252 - RNA, 23 nt, Human
gucccugccuggaccagccucuc

SEQ ID NO: 3142253 - RNA, 22 nt, Human
gucccugccuggaccagccucu

SEQ ID NO: 3142254 - RNA, 12 nt, Human
guccucagcccc

SEQ ID NO: 3142255 - RNA, 20 nt, Human
gucccagaaugccuccugca

SEQ ID NO: 3142256 - RNA, 14 nt, Human
gucacgccagacuu

SEQ ID NO: 3142257 - RNA, 14 nt, Human
guggcauccagagu

SEQ ID NO: 3142258 - RNA, 18 nt, Human
guggcucgggaggcgaag

SEQ ID NO: 3142259 - RNA, 16 nt, Human
guggcucgggaggcga

SEQ ID NO: 3142260 - RNA, 19 nt, Human
gugccuugucacgccagac

SEQ ID NO: 3142261 - RNA, 20 nt, Human
gugcuucuaguucugccagg

SEQ ID NO: 3142262 - RNA, 22 nt, Human
gugcuucuaguucugccaggag

SEQ ID NO: 3142263 - RNA, 21 nt, Human
gugcuucuaguucugccagga

SEQ ID NO: 3142264 - RNA, 12 nt, Human
gugacucuuucc

SEQ ID NO: 3142265 - RNA, 15 nt, Human
gugaggaugucuggg

SEQ ID NO: 3142266 - RNA, 16 nt, Human
gugauuuuuaugccac

SEQ ID NO: 3142267 - RNA, 20 nt, Human
gugauuuuuaugccaccuga

SEQ ID NO: 3142268 - RNA, 19 nt, Human
gugauuuuuaugccaccug

SEQ ID NO: 3142269 - RNA, 17 nt, Human
gugauuuuuaugccacc

SEQ ID NO: 3142270 - RNA, 15 nt, Human
uggaccagccucucc

SEQ ID NO: 3142271 - RNA, 19 nt, Human
uggaucugugaggggcucu

SEQ ID NO: 3142272 - RNA, 15 nt, Human
uggaucugugagggg

SEQ ID NO: 3142273 - RNA, 20 nt, Human
uggcuccauugguguugaca

SEQ ID NO: 3142274 - RNA, 14 nt, Human
ugggggucugugug

SEQ ID NO: 3142275 - RNA, 16 nt, Human
uggggauagaugugug

SEQ ID NO: 3142276 - RNA, 17 nt, Human
uggggauagaugugugg

SEQ ID NO: 3142277 - RNA, 18 nt, Human
uggggauagaugugugga

SEQ ID NO: 3142278 - RNA, 20 nt, Human
uggggauagauguguggaca

SEQ ID NO: 3142279 - RNA, 20 nt, Human
uggggaguuuaggguggggg

SEQ ID NO: 3142280 - RNA, 11 nt, Human
ugggagugugu

SEQ ID NO: 3142281 - RNA, 13 nt, Human
ugggaguguguaa

SEQ ID NO: 3142282 - RNA, 22 nt, Human
ugggagugaggaugucugggcc

SEQ ID NO: 3142283 - RNA, 13 nt, Human
ugggcaggaggga

SEQ ID NO: 3142284 - RNA, 18 nt, Human
ugggcaggagggaggugc

SEQ ID NO: 3142285 - RNA, 16 nt, Human
ugggcaggagggaggu

SEQ ID NO: 3142286 - RNA, 15 nt, Human
ugggcaggagggagg

SEQ ID NO: 3142287 - RNA, 17 nt, Human
ugacauacauccaacau

SEQ ID NO: 3142288 - RNA, 20 nt, Human
ugagcuggggaugucucuca

SEQ ID NO: 3142289 - RNA, 21 nt, Human
ugagcuccuuaaggcucuuuu

SEQ ID NO: 3142290 - RNA, 19 nt, Human
ugagcuccuuaaggcucuu

SEQ ID NO: 3142291 - RNA, 21 nt, Human
uccagagucccugccuggacc

SEQ ID NO: 3142292 - RNA, 20 nt, Human
uccagagucccugccuggac

SEQ ID NO: 3142293 - RNA, 19 nt, Human
uccagagucccugccugga

SEQ ID NO: 3142294 - RNA, 18 nt, Human
uccagagucccugccugg

SEQ ID NO: 3142295 - RNA, 14 nt, Human
uccaaacaggcuca

SEQ ID NO: 3142296 - RNA, 22 nt, Human
ucagucuuuaaucugagaggcc

SEQ ID NO: 3142297 - RNA, 17 nt, Human
uccuacccccugugccu

SEQ ID NO: 3142298 - RNA, 16 nt, Human
uccuacccccugugcc

SEQ ID NO: 3142299 - RNA, 15 nt, Human
uccuacccccugugc

SEQ ID NO: 3142300 - RNA, 13 nt, Human
uccuacccccugu

SEQ ID NO: 3142301 - RNA, 15 nt, Human
uccugucucccuccu

SEQ ID NO: 3142302 - RNA, 23 nt, Human
uccugucucccuccucugcccgg

SEQ ID NO: 3142303 - RNA, 18 nt, Human
ucucccuccucugcccgg

SEQ ID NO: 3142304 - RNA, 16 nt, Human
uaggcuagggugggga

SEQ ID NO: 3142305 - RNA, 15 nt, Human
uaggcuagggugggg

SEQ ID NO: 3142306 - RNA, 23 nt, Human
uaugagcuggggaugucucucau

SEQ ID NO: 3142307 - RNA, 12 nt, Human
uuaacucagucu

SEQ ID NO: 3142308 - RNA, 19 nt, Human
uguuuagaagaaguguguc

SEQ ID NO: 3142309 - RNA, 16 nt, Human
uguuuagaagaagugu

SEQ ID NO: 3142310 - RNA, 13 nt, Human
uuaugccaccuga

SEQ ID NO: 3142311 - RNA, 16 nt, Human
uuaugccaccugaaua

SEQ ID NO: 3142312 - RNA, 16 nt, Human
uuuaaaauugugaugu

SEQ ID NO: 3142313 - RNA, 15 nt, Human
uuguuuagaagaagu

SEQ ID NO: 3142314 - RNA, 18 nt, Human
uuguuuagaagaagugug

SEQ ID NO: 3142315 - RNA, 20 nt, Human
uuuacagaggacaguauuug

SEQ ID NO: 3142316 - RNA, 14 nt, Human
uuuaugccaccuga

SEQ ID NO: 3142317 - RNA, 16 nt, Human
uuggcagcucuacucu

SEQ ID NO: 3142318 - RNA, 11 nt, Human
uuuguggggag

SEQ ID NO: 3142319 - RNA, 12 nt, Human
caacacugccag

SEQ ID NO: 3142320 - RNA, 14 nt, Human
caacacugccagca

SEQ ID NO: 3142321 - RNA, 13 nt, Human
caacacugccagc

SEQ ID NO: 3142322 - RNA, 22 nt, Human
caaccggcuuuguggcacuggg

SEQ ID NO: 3142323 - RNA, 13 nt, Human
caaccggcuuugu

SEQ ID NO: 3142324 - RNA, 17 nt, Human
aauaagugccaggaugg

SEQ ID NO: 3142325 - RNA, 16 nt, Human
aaugucaguaugugga

SEQ ID NO: 3142326 - RNA, 22 nt, Human
aaugucaguauguggaagugug

SEQ ID NO: 3142327 - RNA, 13 nt, Human
acucagucuuuaa

SEQ ID NO: 3142328 - RNA, 22 nt, Human
acgccagacuucccacggcucc

SEQ ID NO: 3142329 - RNA, 16 nt, Human
acgccagacuucccac

SEQ ID NO: 3142330 - RNA, 15 nt, Human
acagguuagcugcuc

SEQ ID NO: 3142331 - RNA, 15 nt, Human
accccgacuuuuguu

SEQ ID NO: 3142332 - RNA, 12 nt, Human
accccgacuuuu

SEQ ID NO: 3142333 - RNA, 13 nt, Human
agccagaggucug

SEQ ID NO: 3142334 - RNA, 16 nt, Human
agaggguguccugcac

SEQ ID NO: 3142335 - RNA, 14 nt, Human
agacgggcccuggu

SEQ ID NO: 3142336 - RNA, 21 nt, Human
aggcuauggggauagaugugu

SEQ ID NO: 3142337 - RNA, 22 nt, Human
aggcuauggggauagaugugug

SEQ ID NO: 3142338 - RNA, 19 nt, Human
aggcuauggggauagaugu

SEQ ID NO: 3142339 - RNA, 22 nt, Human
aggugcuucuaguucugccagg

SEQ ID NO: 3142340 - RNA, 21 nt, Human
aggugcuucuaguucugccag

SEQ ID NO: 3142341 - RNA, 23 nt, Human
aggugcuucuaguucugccagga

SEQ ID NO: 3142342 - RNA, 17 nt, Human
aggggccgggggcaguc

SEQ ID NO: 3142343 - RNA, 20 nt, Human
aguuguaucagcacgugugg

SEQ ID NO: 3142344 - RNA, 23 nt, Human
aguuguaucagcacguguggccu

SEQ ID NO: 3142345 - RNA, 17 nt, Human
augugggggucugugug

SEQ ID NO: 3142346 - RNA, 18 nt, Human
augugggggucugugugu

SEQ ID NO: 3142347 - RNA, 16 nt, Human
augugggggucugugu

SEQ ID NO: 3142348 - RNA, 15 nt, Human
guccaucagccucca

SEQ ID NO: 3142349 - RNA, 22 nt, Human
gucccgggacaccuaggcuagg

SEQ ID NO: 3142350 - RNA, 10 nt, Human
gugauguguc

SEQ ID NO: 3142351 - RNA, 19 nt, Human
aagaagugugucacccuua

SEQ ID NO: 3142352 - RNA, 21 nt, Human
aagucacuggccaguggcugg

SEQ ID NO: 3142353 - RNA, 15 nt, Human
uaaaauugugaugug

SEQ ID NO: 3142354 - RNA, 16 nt, Human
uaaaauugugaugugu

SEQ ID NO: 3142355 - RNA, 20 nt, Human
aagugugggucugugugugu

SEQ ID NO: 3142356 - RNA, 10 nt, Human
aagugugggu

SEQ ID NO: 3142357 - RNA, 17 nt, Human
aagugugggucugugug

SEQ ID NO: 3142358 - RNA, 18 nt, Human
aagugugggucugugugu

SEQ ID NO: 3142359 - RNA, 13 nt, Human
guguauguggggg

SEQ ID NO: 3142360 - RNA, 21 nt, Human
guguaugugggggucugugug

SEQ ID NO: 3142361 - RNA, 20 nt, Human
uauggggauagaugugugga

SEQ ID NO: 3142362 - RNA, 12 nt, Human
uauguggaagug

SEQ ID NO: 3142363 - RNA, 16 nt, Human
uauguggaaguguggg

SEQ ID NO: 3142364 - RNA, 16 nt, Human
acaccucuuggggagu

SEQ ID NO: 3142365 - RNA, 22 nt, Human
uaacuuaaaagaacauguauau

SEQ ID NO: 3142366 - RNA, 19 nt, Human
uccugcaccggggccuggg

SEQ ID NO: 3142367 - RNA, 18 nt, Human
uccugcaccggggccugg

SEQ ID NO: 3142368 - RNA, 23 nt, Human
ucacagcaagucacuggccagug

SEQ ID NO: 3142369 - RNA, 17 nt, Human
accuaggcuaggguggg

SEQ ID NO: 3142370 - RNA, 12 nt, Human
accuaggcuagg

SEQ ID NO: 3142371 - RNA, 17 nt, Human
ucaugugacucuuucca

SEQ ID NO: 3142372 - RNA, 14 nt, Human
ucaugugacucuuu

SEQ ID NO: 3142373 - RNA, 17 nt, Human
ucauguuuacagaggac

SEQ ID NO: 3142374 - RNA, 19 nt, Human
ucaugugacucuuuccaac

SEQ ID NO: 3142375 - RNA, 18 nt, Human
ucaugugacucuuuccaa

SEQ ID NO: 3142376 - RNA, 14 nt, Human
ucaguauguggaag

SEQ ID NO: 3142377 - RNA, 12 nt, Human
ucaguaugugga

SEQ ID NO: 3142378 - RNA, 16 nt, Human
ucauaaauuuaugguu

SEQ ID NO: 3142379 - RNA, 13 nt, Human
accgaggcaggga

SEQ ID NO: 3142380 - RNA, 17 nt, Human
ucagauuugccuuauug

SEQ ID NO: 3142381 - RNA, 14 nt, Human
ucuaguucugccag

SEQ ID NO: 3142382 - RNA, 17 nt, Human
ucuaguucugccaggag

SEQ ID NO: 3142383 - RNA, 16 nt, Human
ucuaguucugccagga

SEQ ID NO: 3142384 - RNA, 15 nt, Human
ucuaguucugccagg

SEQ ID NO: 3142385 - RNA, 14 nt, Human
agaagaaguguguc

SEQ ID NO: 3142386 - RNA, 13 nt, Human
ugagagaggccau

SEQ ID NO: 3142387 - RNA, 22 nt, Human
auguggaagugugggucugugu

SEQ ID NO: 3142388 - RNA, 23 nt, Human
auguggaagugugggucugugug

SEQ ID NO: 3142389 - RNA, 15 nt, Human
auguggaaguguggg

SEQ ID NO: 3142390 - RNA, 16 nt, Human
auguggaagugugggu

SEQ ID NO: 3142391 - RNA, 13 nt, Human
auguggaagugug

SEQ ID NO: 3142392 - RNA, 10 nt, Human
augugugugu

SEQ ID NO: 3142393 - RNA, 16 nt, Human
uuuuguuuaccagaga

SEQ ID NO: 3142394 - RNA, 12 nt, Human
auugguguugac

SEQ ID NO: 3142395 - RNA, 13 nt, Human
auugugauguguc

SEQ ID NO: 3142396 - RNA, 14 nt, Human
auugugaugugucc

SEQ ID NO: 3142397 - RNA, 15 nt, Human
auugugauguguccu

SEQ ID NO: 3142398 - RNA, 20 nt, Human
auuucccuuccuuccucucc

SEQ ID NO: 3142399 - RNA, 16 nt, Human
uucagauuugccuuau

SEQ ID NO: 3142400 - RNA, 20 nt, Human
auccauggggcugauuguau

SEQ ID NO: 3142401 - RNA, 20 nt, Human
aucauuaucagccugugcca

SEQ ID NO: 3142402 - RNA, 18 nt, Human
aucggggagccgggagcc

SEQ ID NO: 3142403 - RNA, 16 nt, Human
aucggggagccgggag

SEQ ID NO: 3142404 - RNA, 20 nt, Human
uugcuaugagcuggggaugu

SEQ ID NO: 3142405 - RNA, 10 nt, Human
uugugugugg

SEQ ID NO: 3142406 - RNA, 13 nt, Human
uugugugugggag

SEQ ID NO: 3142407 - RNA, 16 nt, Human
uugugugugggagugu

SEQ ID NO: 3142408 - RNA, 20 nt, Human
uugucacgccagacuuccca

SEQ ID NO: 3142409 - RNA, 13 nt, Human
uugucacgccaga

SEQ ID NO: 3142410 - RNA, 18 nt, Human
uugucccugaagagaagg

SEQ ID NO: 3142411 - RNA, 22 nt, Human
uuguccucagccccgcguggaa

SEQ ID NO: 3142412 - RNA, 22 nt, Human
uggcugccuugugaaggaauua

SEQ ID NO: 3142413 - RNA, 16 nt, Human
uggccaguggcuggau

SEQ ID NO: 3142414 - RNA, 14 nt, Human
uggccaguggcugg

SEQ ID NO: 3142415 - RNA, 15 nt, Human
uggccaguggcugga

SEQ ID NO: 3142416 - RNA, 19 nt, Human
aggccauucuuucccaaca

SEQ ID NO: 3142417 - RNA, 18 nt, Human
aggccauucuuucccaac

SEQ ID NO: 3142418 - RNA, 17 nt, Human
aggccauucuuucccaa

SEQ ID NO: 3142419 - RNA, 21 nt, Human
aggccucucauuccagaggaa

SEQ ID NO: 3142420 - RNA, 15 nt, Human
aggccauucuuuccc

SEQ ID NO: 3142421 - RNA, 22 nt, Human
uggaccuuuccugaggaagagg

SEQ ID NO: 3142422 - RNA, 22 nt, Human
ugcuauuguagagccagagguc

SEQ ID NO: 3142423 - RNA, 18 nt, Human
ugcuauuguagagccaga

SEQ ID NO: 3142424 - RNA, 13 nt, Human
ugcuccccacguc

SEQ ID NO: 3142425 - RNA, 22 nt, Human
uggaccagccucuccacucaug

SEQ ID NO: 3142426 - RNA, 16 nt, Human
uggaccagccucucca

SEQ ID NO: 3142427 - RNA, 14 nt, Human
agcugccugugccu

SEQ ID NO: 3142428 - RNA, 18 nt, Human
uguugggagugaggaugu

SEQ ID NO: 3142429 - RNA, 14 nt, Human
uuaucaacauuugu

SEQ ID NO: 3142430 - RNA, 15 nt, Human
ugggucugugugugu

SEQ ID NO: 3142431 - RNA, 13 nt, Human
ugggucugugugu

SEQ ID NO: 3142432 - RNA, 23 nt, Human
ugggaauaagugccaggauggaa

SEQ ID NO: 3142433 - RNA, 20 nt, Human
uguaugugggggucugugug

SEQ ID NO: 3142434 - RNA, 21 nt, Human
uguaugugggggucugugugu

SEQ ID NO: 3142435 - RNA, 22 nt, Human
uguaugugggggucuguguguu

SEQ ID NO: 3142436 - RNA, 22 nt, Human
uguauccauccauggggcugau

SEQ ID NO: 3142437 - RNA, 14 nt, Human
aguccaucagccuc

SEQ ID NO: 3142438 - RNA, 13 nt, Human
aguccaucagccu

SEQ ID NO: 3142439 - RNA, 13 nt, Human
agucccugccugg

SEQ ID NO: 3142440 - RNA, 11 nt, Human
ugugauguguc

SEQ ID NO: 3142441 - RNA, 22 nt, Human
gggggcagucugagagaggcca

SEQ ID NO: 3142442 - RNA, 21 nt, Human
gggucaucuguaccucugccu

SEQ ID NO: 3142443 - RNA, 18 nt, Human
gggucauucauggccugg

SEQ ID NO: 3142444 - RNA, 16 nt, Human
gguaggaacugcuggg

SEQ ID NO: 3142445 - RNA, 18 nt, Human
gguaggaacugcugggcu

SEQ ID NO: 3142446 - RNA, 21 nt, Human
ggguguccugcaccggggccu

SEQ ID NO: 3142447 - RNA, 17 nt, Human
ggguguccugcaccggg

SEQ ID NO: 3142448 - RNA, 22 nt, Human
gguggggggggggcgcggcugg

SEQ ID NO: 3142449 - RNA, 22 nt, Human
gguuuguuuagaagaagugugu

SEQ ID NO: 3142450 - RNA, 14 nt, Human
ggcaggagggaggu

SEQ ID NO: 3142451 - RNA, 12 nt, Human
ggcaggggccgg

SEQ ID NO: 3142452 - RNA, 23 nt, Human
ggcaucggggagccgggagccug

SEQ ID NO: 3142453 - RNA, 18 nt, Human
ggcauccagagucccugc

SEQ ID NO: 3142454 - RNA, 16 nt, Human
ggcauccagagucccu

SEQ ID NO: 3142455 - RNA, 22 nt, Human
ggcaucggggagccgggagccu

SEQ ID NO: 3142456 - RNA, 14 nt, Human
ggagggggagaggg

SEQ ID NO: 3142457 - RNA, 11 nt, Human
ggaguguguaa

SEQ ID NO: 3142458 - RNA, 22 nt, Human
ggaguguguaauuuaaaauugu

SEQ ID NO: 3142459 - RNA, 18 nt, Human
gcuaggguggggagagac

SEQ ID NO: 3142460 - RNA, 17 nt, Human
gcuaggguggggagaga

SEQ ID NO: 3142461 - RNA, 19 nt, Human
gcucagaggguguccugca

SEQ ID NO: 3142462 - RNA, 18 nt, Human
gcucagaggguguccugc

SEQ ID NO: 3142463 - RNA, 21 nt, Human
gcguggaacucgugucuggca

SEQ ID NO: 3142464 - RNA, 12 nt, Human
gccauucuuucc

SEQ ID NO: 3142465 - RNA, 19 nt, Human
gccauucuuucccaacacc

SEQ ID NO: 3142466 - RNA, 20 nt, Human
gcugggaauaagugccagga

SEQ ID NO: 3142467 - RNA, 22 nt, Human
gcuuuuccucaaagggagagag

SEQ ID NO: 3142468 - RNA, 16 nt, Human
ggacaccccgacuuuu

SEQ ID NO: 3142469 - RNA, 16 nt, Human
ggacaccuaggcuagg

SEQ ID NO: 3142470 - RNA, 19 nt, Human
ggacaguauuuguggggag

SEQ ID NO: 3142471 - RNA, 18 nt, Human
ggacaguauuugugggga

SEQ ID NO: 3142472 - RNA, 14 nt, Human
cuuuugucccagaa

SEQ ID NO: 3142473 - RNA, 17 nt, Human
cuucuaccucuuggcug

SEQ ID NO: 3142474 - RNA, 19 nt, Human
cuuccucuccugucucccu

SEQ ID NO: 3142475 - RNA, 15 nt, Human
cuuccucuccugucu

SEQ ID NO: 3142476 - RNA, 23 nt, Human
cuggcccuaugcuuccggccucc

SEQ ID NO: 3142477 - RNA, 16 nt, Human
gagacgggcccuggug

SEQ ID NO: 3142478 - RNA, 22 nt, Human
gaggacaguauuuguggggagg

SEQ ID NO: 3142479 - RNA, 13 nt, Human
gauggaaugaugg

SEQ ID NO: 3142480 - RNA, 17 nt, Human
gaucccaacacugccag

SEQ ID NO: 3142481 - RNA, 19 nt, Human
gaucccaacacugccagca

SEQ ID NO: 3142482 - RNA, 18 nt, Human
gaucccaacacugccagc

SEQ ID NO: 3142483 - RNA, 21 nt, Human
gcauccagagucccugccugg

SEQ ID NO: 3142484 - RNA, 23 nt, Human
gcauccagagucccugccuggac

SEQ ID NO: 3142485 - RNA, 22 nt, Human
gcauccagagucccugccugga

SEQ ID NO: 3142486 - RNA, 17 nt, Human
gcaucggggagccggga

SEQ ID NO: 3142487 - RNA, 17 nt, Human
cagaggguguccugcac

SEQ ID NO: 3142488 - RNA, 16 nt, Human
cagggcugaggccucu

SEQ ID NO: 3142489 - RNA, 18 nt, Human
cagggcugaggccucuca

SEQ ID NO: 3142490 - RNA, 17 nt, Human
cagucugagagaggcca

SEQ ID NO: 3142491 - RNA, 15 nt, Human
cacuggggcaggggc

SEQ ID NO: 3142492 - RNA, 13 nt, Human
cacuggggcaggg

SEQ ID NO: 3142493 - RNA, 18 nt, Human
caacaccucuuggggagu

SEQ ID NO: 3142494 - RNA, 19 nt, Human
auucuuugaccuguuggga

SEQ ID NO: 3142495 - RNA, 21 nt, Human
cuaauucuuugaccuguuggg

SEQ ID NO: 3142496 - RNA, 22 nt, Human
cuaauucuuugaccuguuggga

SEQ ID NO: 3142497 - RNA, 18 nt, Human
cucaugugacucuuucca

SEQ ID NO: 3142498 - RNA, 15 nt, Human
cucgugucuggcaca

SEQ ID NO: 3142499 - RNA, 12 nt, Human
cugagaggccac

SEQ ID NO: 3142500 - RNA, 13 nt, Human
cugagagaggcca

SEQ ID NO: 3142501 - RNA, 22 nt, Human
cugagagaggccauucuuuccc

SEQ ID NO: 3142502 - RNA, 21 nt, Human
cugagagaggccauucuuucc

SEQ ID NO: 3142503 - RNA, 14 nt, Human
cugagagaggccau

SEQ ID NO: 3142504 - RNA, 12 nt, Human
cagguguucuuc

SEQ ID NO: 3142505 - RNA, 12 nt, Human
caguauguggaa

SEQ ID NO: 3142506 - RNA, 22 nt, Human
cagucuuuaaucugagaggcca

SEQ ID NO: 3142507 - RNA, 11 nt, Human
caggcucagag

SEQ ID NO: 3142508 - RNA, 15 nt, Human
caggcucagagggug

SEQ ID NO: 3142509 - RNA, 18 nt, Human
cagggaaggaucccauga

SEQ ID NO: 3142510 - RNA, 13 nt, Human
cagggaaggaucc

SEQ ID NO: 3142511 - RNA, 23 nt, Human
caggagacagguuagcugcuccc

SEQ ID NO: 3142512 - RNA, 15 nt, Human
caggagucccugcca

SEQ ID NO: 3142513 - RNA, 21 nt, Human
caggagucccugccaucaugu

SEQ ID NO: 3142514 - RNA, 14 nt, Human
caggagucccugcc

SEQ ID NO: 3142515 - RNA, 21 nt, Human
caggcaucggggagccgggag

SEQ ID NO: 3142516 - RNA, 20 nt, Human
caggcaucggggagccggga

SEQ ID NO: 3142517 - RNA, 21 nt, Human
cagccuccauccuacccccug

SEQ ID NO: 3142518 - RNA, 18 nt, Human
cagccuccauccuacccc

SEQ ID NO: 3142519 - RNA, 23 nt, Human
cagccucuccacucaugugacuc

SEQ ID NO: 3142520 - RNA, 23 nt, Human
cagccuggcuguggccuaaccug

SEQ ID NO: 3142521 - RNA, 18 nt, Human
caggaaccgaggcaggga

SEQ ID NO: 3142522 - RNA, 17 nt, Human
caggaaccgaggcaggg

SEQ ID NO: 3142523 - RNA, 15 nt, Human
caggaaccgaggcag

SEQ ID NO: 3142524 - RNA, 15 nt, Human
cagcauuucccuucc

SEQ ID NO: 3142525 - RNA, 18 nt, Human
cagagucccugccuggac

SEQ ID NO: 3142526 - RNA, 14 nt, Human
cagagucccugccu

SEQ ID NO: 3142527 - RNA, 22 nt, Human
cagaggacaguauuugugggga

SEQ ID NO: 3142528 - RNA, 12 nt, Human
cagagaaaaagg

SEQ ID NO: 3142529 - RNA, 18 nt, Human
cagagaaaaagggagggg

SEQ ID NO: 3142530 - RNA, 17 nt, Human
cagagaaaaagggaggg

SEQ ID NO: 3142531 - RNA, 22 nt, Human
cagacuucccacggcuccucga

SEQ ID NO: 3142532 - RNA, 12 nt, Human
cagacuucccac

SEQ ID NO: 3142533 - RNA, 22 nt, Human
caccggggccugggcaggaggg

SEQ ID NO: 3142534 - RNA, 21 nt, Human
caccggggccugggcaggagg

SEQ ID NO: 3142535 - RNA, 14 nt, Human
caccggggccuggg

SEQ ID NO: 3142536 - RNA, 22 nt, Human
cacucaugugacucuuuccaac

SEQ ID NO: 3142537 - RNA, 16 nt, Human
cacucaugugacucuu

SEQ ID NO: 3142538 - RNA, 22 nt, Human
cacggcuccucgagaucccaac

SEQ ID NO: 3142539 - RNA, 20 nt, Human
cacggcuccucgagauccca

SEQ ID NO: 3142540 - RNA, 19 nt, Human
cacguguggccuguucuuc

SEQ ID NO: 3142541 - RNA, 19 nt, Human
ggagacagguuagcugcuc

SEQ ID NO: 3142542 - RNA, 12 nt, Human
ggaccagccucu

SEQ ID NO: 3142543 - RNA, 21 nt, Human
ggagcucaggaaccgaggcag

SEQ ID NO: 3142544 - RNA, 14 nt, Human
ggagggcaggcauc

SEQ ID NO: 3142545 - RNA, 23 nt, Human
ggcuguggcauccagagucccug

SEQ ID NO: 3142546 - RNA, 21 nt, Human
ggcuguggcauccagaguccc

SEQ ID NO: 3142547 - RNA, 13 nt, Human
ggcugggaggagg

SEQ ID NO: 3142548 - RNA, 21 nt, Human
ggcugggaggagggcaggcau

SEQ ID NO: 3142549 - RNA, 20 nt, Human
ggcugggaggagggcaggca

SEQ ID NO: 3142550 - RNA, 20 nt, Human
gggacaccaagccuuggcuc

SEQ ID NO: 3142551 - RNA, 14 nt, Human
gggacaccuaggcu

SEQ ID NO: 3142552 - RNA, 16 nt, Human
gggaggagggcaggca

SEQ ID NO: 3142553 - RNA, 12 nt, Human
gggaggagggca

SEQ ID NO: 3142554 - RNA, 13 nt, Human
gggagccgggagc

SEQ ID NO: 3142555 - RNA, 23 nt, Human
gggagcucaggaaccgaggcagg

SEQ ID NO: 3142556 - RNA, 22 nt, Human
gggagcucaggaaccgaggcag

SEQ ID NO: 3142557 - RNA, 12 nt, Human
gggagcucagga

SEQ ID NO: 3142558 - RNA, 20 nt, Human
ggccucucauuccagaggaa

SEQ ID NO: 3142559 - RNA, 16 nt, Human
ggccuaaccugccgag

SEQ ID NO: 3142560 - RNA, 15 nt, Human
ggccuaaccugccga

SEQ ID NO: 3142561 - RNA, 16 nt, Human
ggccugacucucagca

SEQ ID NO: 3142562 - RNA, 17 nt, Human
ggccugggcaggaggga

SEQ ID NO: 3142563 - RNA, 15 nt, Human
ggccugggcaggagg

SEQ ID NO: 3142564 - RNA, 19 nt, Human
ggccugggcaggagggagg

SEQ ID NO: 3142565 - RNA, 21 nt, Human
gcuccuuaaggcucuuuugua

SEQ ID NO: 3142566 - RNA, 17 nt, Human
gcuccuuaaggcucuuu

SEQ ID NO: 3142567 - RNA, 15 nt, Human
gcuccuuaaggcucu

SEQ ID NO: 3142568 - RNA, 16 nt, Human
gccugggcaggaggga

SEQ ID NO: 3142569 - RNA, 16 nt, Human
gccuggaccagccucu

SEQ ID NO: 3142570 - RNA, 17 nt, Human
gccuggaccagccucuc

SEQ ID NO: 3142571 - RNA, 17 nt, Human
gccuugucacgccagac

SEQ ID NO: 3142572 - RNA, 16 nt, Human
gccuugucacgccaga

SEQ ID NO: 3142573 - RNA, 15 nt, Human
gccuugucacgccag

SEQ ID NO: 3142574 - RNA, 17 nt, Human
gcgaagcguuguccuca

SEQ ID NO: 3142575 - RNA, 14 nt, Human
gcugauuguauuua

SEQ ID NO: 3142576 - RNA, 20 nt, Human
gcuguggccuaaccugccga

SEQ ID NO: 3142577 - RNA, 19 nt, Human
gcuguggccuaaccugccg

SEQ ID NO: 3142578 - RNA, 14 nt, Human
gcuggggaugucuc

SEQ ID NO: 3142579 - RNA, 22 nt, Human
gcugggcuuggcagcccggguc

SEQ ID NO: 3142580 - RNA, 21 nt, Human
gcugggaggagggcaggcauc

SEQ ID NO: 3142581 - RNA, 22 nt, Human
gcaggcaucggggagccgggag

SEQ ID NO: 3142582 - RNA, 21 nt, Human
gcaggcaucggggagccggga

SEQ ID NO: 3142583 - RNA, 23 nt, Human
gcaggcaucggggagccgggagc

SEQ ID NO: 3142584 - RNA, 15 nt, Human
gccacgauugcagga

SEQ ID NO: 3142585 - RNA, 16 nt, Human
gccaccugaauaaaga

SEQ ID NO: 3142586 - RNA, 21 nt, Human
gccagacuucccacggcuccu

SEQ ID NO: 3142587 - RNA, 15 nt, Human
gaggagggcaggcau

SEQ ID NO: 3142588 - RNA, 14 nt, Human
gaggagggcaggca

SEQ ID NO: 3142589 - RNA, 13 nt, Human
gaggagggcaggc

SEQ ID NO: 3142590 - RNA, 15 nt, Human
gaggaugucugggcc

SEQ ID NO: 3142591 - RNA, 22 nt, Human
gagcucaggaaccgaggcaggg

SEQ ID NO: 3142592 - RNA, 23 nt, Human
gagcucaggaaccgaggcaggga

SEQ ID NO: 3142593 - RNA, 14 nt, Human
gagucccugccauc

SEQ ID NO: 3142594 - RNA, 15 nt, Human
gagucccugccugga

SEQ ID NO: 3142595 - RNA, 14 nt, Human
gagucccugccugg

SEQ ID NO: 3142596 - RNA, 19 nt, Human
gagucccugccuggaccag

SEQ ID NO: 3142597 - RNA, 16 nt, Human
gagucccugccuggac

SEQ ID NO: 3142598 - RNA, 22 nt, Human
gagguuuguuuagaagaagugu

SEQ ID NO: 3142599 - RNA, 21 nt, Human
gauguguccugauaagcugag

SEQ ID NO: 3142600 - RNA, 12 nt, Human
cugagcaggugu

SEQ ID NO: 3142601 - RNA, 14 nt, Human
cucugcccgggagc

SEQ ID NO: 3142602 - RNA, 20 nt, Human
cucugcccgggagcucagga

SEQ ID NO: 3142603 - RNA, 13 nt, Human
cugauuguauuua

SEQ ID NO: 3142604 - RNA, 17 nt, Human
cugccuggaccagccuc

SEQ ID NO: 3142605 - RNA, 23 nt, Human
cucgagaucccaacacugccagc

SEQ ID NO: 3142606 - RNA, 22 nt, Human
cucgagaucccaacacugccag

SEQ ID NO: 3142607 - RNA, 21 nt, Human
cucgagaucccaacacugcca

SEQ ID NO: 3142608 - RNA, 13 nt, Human
cucgagaucccaa

SEQ ID NO: 3142609 - RNA, 14 nt, Human
cuauuguagagcca

SEQ ID NO: 3142610 - RNA, 17 nt, Human
cuuucccaacaccucuu

SEQ ID NO: 3142611 - RNA, 13 nt, Human
cuuucccaacacc

SEQ ID NO: 3142612 - RNA, 13 nt, Human
gaacuauuagagc

SEQ ID NO: 3142613 - RNA, 19 nt, Human
gaaggaucccaugagcucc

SEQ ID NO: 3142614 - RNA, 17 nt, Human
gaauaaagaaugaaugg

SEQ ID NO: 3142615 - RNA, 20 nt, Human
gaauaagugccaggauggaa

SEQ ID NO: 3142616 - RNA, 14 nt, Human
gaaugccuccugca

SEQ ID NO: 3142617 - RNA, 19 nt, Human
cuuccaaacaggcucagag

SEQ ID NO: 3142618 - RNA, 15 nt, Human
cuuaaggcucuuuug

SEQ ID NO: 3142619 - RNA, 22 nt, Human
cuggugguggcucgggaggcga

SEQ ID NO: 3142620 - RNA, 14 nt, Human
cuggugguggcucg

SEQ ID NO: 3142621 - RNA, 18 nt, Human
cuguggccuaaccugccg

SEQ ID NO: 3142622 - RNA, 18 nt, Human
cuguguguguguaugugg

SEQ ID NO: 3142623 - RNA, 20 nt, Human
cuguguguguguaugugggg

SEQ ID NO: 3142624 - RNA, 18 nt, Human
cuguguguuuaugugugu

SEQ ID NO: 3142625 - RNA, 20 nt, Human
cuguguguuuaugugugugu

SEQ ID NO: 3142626 - RNA, 15 nt, Human
cuguguguguguaug

SEQ ID NO: 3142627 - RNA, 16 nt, Human
cuguguguguguaugu

SEQ ID NO: 3142628 - RNA, 14 nt, Human
cuguguguguguau

SEQ ID NO: 3142629 - RNA, 22 nt, Human
ccgggucaucuguaccucugcc

SEQ ID NO: 3142630 - RNA, 20 nt, Human
ccgggacaccuaggcuaggg

SEQ ID NO: 3142631 - RNA, 19 nt, Human
ccgggacaccuaggcuagg

SEQ ID NO: 3142632 - RNA, 15 nt, Human
ccgaggcagggaagg

SEQ ID NO: 3142633 - RNA, 18 nt, Human
ccucucauuccagaggaa

SEQ ID NO: 3142634 - RNA, 18 nt, Human
ccucuccacucaugugac

SEQ ID NO: 3142635 - RNA, 18 nt, Human
ccuugucacgccagacuu

SEQ ID NO: 3142636 - RNA, 15 nt, Human
ccuugucacgccaga

SEQ ID NO: 3142637 - RNA, 13 nt, Human
ccuuaaggcucuu

SEQ ID NO: 3142638 - RNA, 18 nt, Human
ccuuaaggcucuuuugua

SEQ ID NO: 3142639 - RNA, 16 nt, Human
ccuuaaggcucuuuug

SEQ ID NO: 3142640 - RNA, 13 nt, Human
cgagaucccaaca

SEQ ID NO: 3142641 - RNA, 21 nt, Human
cgagaucccaacacugccagc

SEQ ID NO: 3142642 - RNA, 15 nt, Human
cgagaucccaacacu

SEQ ID NO: 3142643 - RNA, 22 nt, Human
cgagaucccaacacugccagca

SEQ ID NO: 3142644 - RNA, 14 nt, Human
ccugggcaggaggg

SEQ ID NO: 3142645 - RNA, 12 nt, Human
ccugggcaggag

SEQ ID NO: 3142646 - RNA, 19 nt, Human
ccugaggaagagggacugu

SEQ ID NO: 3142647 - RNA, 21 nt, Human
ccagcauuucccuuccuuccu

SEQ ID NO: 3142648 - RNA, 16 nt, Human
ccagcauuucccuucc

SEQ ID NO: 3142649 - RNA, 19 nt, Human
ccacucaugugacucuuuc

SEQ ID NO: 3142650 - RNA, 22 nt, Human
ccacucaugugacucuuuccaa

SEQ ID NO: 3142651 - RNA, 20 nt, Human
ccaccugaauaaagaaugaa

SEQ ID NO: 3142652 - RNA, 17 nt, Human
ccauccuacccccugug

SEQ ID NO: 3142653 - RNA, 18 nt, Human
ccauccuacccccugugc

SEQ ID NO: 3142654 - RNA, 13 nt, Human
ccaggagacaggu

SEQ ID NO: 3142655 - RNA, 19 nt, Human
caugaguuggcugggaaua

SEQ ID NO: 3142656 - RNA, 23 nt, Human
caugagcuccuuaaggcucuuuu

SEQ ID NO: 3142657 - RNA, 18 nt, Human
cauccuacccccugugcc

SEQ ID NO: 3142658 - RNA, 15 nt, Human
cauccuacccccugu

SEQ ID NO: 3142659 - RNA, 19 nt, Human
caucauguuuacagaggac

SEQ ID NO: 3142660 - RNA, 21 nt, Human
caucauguuuacagaggacag

SEQ ID NO: 3142661 - RNA, 13 nt, Human
caucauguuuaca

SEQ ID NO: 3142662 - RNA, 20 nt, Human
cauccagagucccugccugg

SEQ ID NO: 3142663 - RNA, 18 nt, Human
cauccagagucccugccu

SEQ ID NO: 3142664 - RNA, 17 nt, Human
cauccagagucccugcc

SEQ ID NO: 3142665 - RNA, 13 nt, Human
cauccagaguccc

SEQ ID NO: 3142666 - RNA, 21 nt, Human
cauccagagucccugccugga

SEQ ID NO: 3142667 - RNA, 14 nt, Human
caugugacucuuuc

SEQ ID NO: 3142668 - RNA, 17 nt, Human
caugugacucuuuccaa

SEQ ID NO: 3142669 - RNA, 16 nt, Human
caugugacucuuucca

SEQ ID NO: 3142670 - RNA, 12 nt, Human
cauucuuuccca

SEQ ID NO: 3142671 - RNA, 14 nt, Human
cauucuuucccaac

SEQ ID NO: 3142672 - RNA, 14 nt, Human
cauuccagaggaag

SEQ ID NO: 3142673 - RNA, 13 nt, Human
cauuccagaggaa

SEQ ID NO: 3142674 - RNA, 21 nt, Human
uuuuauuuuucucaugaugag

SEQ ID NO: 3142675 - RNA, 21 nt, Human
uuccugaggaagagggacugu

SEQ ID NO: 3142676 - RNA, 19 nt, Human
uuuccaaccggcuuugugg

SEQ ID NO: 3142677 - RNA, 18 nt, Human
ugggaggagggcaggcau

SEQ ID NO: 3142678 - RNA, 17 nt, Human
ugggaggagggcaggca

SEQ ID NO: 3142679 - RNA, 14 nt, Human
ugggaggagggcag

SEQ ID NO: 3142680 - RNA, 23 nt, Human
uggccuaaccugccgagagucca

SEQ ID NO: 3142681 - RNA, 16 nt, Human
uggccuaaccugccga

SEQ ID NO: 3142682 - RNA, 17 nt, Human
uguaaauuuaugugaug

SEQ ID NO: 3142683 - RNA, 18 nt, Human
uguccugcaccggggccu

SEQ ID NO: 3142684 - RNA, 13 nt, Human
uguccucagcccc

SEQ ID NO: 3142685 - RNA, 21 nt, Human
ugacccucaucuuucuuccaa

SEQ ID NO: 3142686 - RNA, 14 nt, Human
ugaguuggcuggga

SEQ ID NO: 3142687 - RNA, 16 nt, Human
ugaguuggcugggaau

SEQ ID NO: 3142688 - RNA, 17 nt, Human
ugaguuggcugggaaua

SEQ ID NO: 3142689 - RNA, 17 nt, Human
ugcccgggagcucagga

SEQ ID NO: 3142690 - RNA, 18 nt, Human
ugcccgggagcucaggaa

SEQ ID NO: 3142691 - RNA, 22 nt, Human
ugccaucauguuuacagaggac

SEQ ID NO: 3142692 - RNA, 21 nt, Human
ugcauuauauuuguaaauuua

SEQ ID NO: 3142693 - RNA, 18 nt, Human
ugauuuuuaugccaccug

SEQ ID NO: 3142694 - RNA, 16 nt, Human
ucccuccucugcccgg

SEQ ID NO: 3142695 - RNA, 13 nt, Human
ucccugccuggac

SEQ ID NO: 3142696 - RNA, 19 nt, Human
ucccuuccuuccucuccug

SEQ ID NO: 3142697 - RNA, 16 nt, Human
ucccuuccuuccucuc

SEQ ID NO: 3142698 - RNA, 21 nt, Human
ucgugucuggcacagccuggc

SEQ ID NO: 3142699 - RNA, 14 nt, Human
ucgugucuggcaca

SEQ ID NO: 3142700 - RNA, 15 nt, Human
ucugccaggagacag

SEQ ID NO: 3142701 - RNA, 19 nt, Human
ucagaggguguccugcacc

SEQ ID NO: 3142702 - RNA, 14 nt, Human
ucauuccagaggaa

SEQ ID NO: 3142703 - RNA, 12 nt, Human
uauucccaugag

SEQ ID NO: 3142704 - RNA, 15 nt, Human
cugaaacaacaaaua

SEQ ID NO: 3142705 - RNA, 16 nt, Human
cucuccccuucucugu

SEQ ID NO: 3142706 - RNA, 15 nt, Human
cucuggggugggcag

SEQ ID NO: 3142707 - RNA, 23 nt, Human
cucuggugagucaccacuucagg

SEQ ID NO: 3142708 - RNA, 14 nt, Human
cucuguccagggcc

SEQ ID NO: 3142709 - RNA, 20 nt, Human
cucuguccagggcccugagc

SEQ ID NO: 3142710 - RNA, 21 nt, Human
cucuuagaugcaguucugaag

SEQ ID NO: 3142711 - RNA, 21 nt, Human
cucuguccagggcccugagcu

SEQ ID NO: 3142712 - RNA, 22 nt, Human
cucuuagaugcaguucugaaga

SEQ ID NO: 3142713 - RNA, 14 nt, Human
cucguuaauuugua

SEQ ID NO: 3142714 - RNA, 12 nt, Human
cuccugggcagc

SEQ ID NO: 3142715 - RNA, 22 nt, Human
cuccugggcagcugccuccccu

SEQ ID NO: 3142716 - RNA, 18 nt, Human
cuccugggcagcugccuc

SEQ ID NO: 3142717 - RNA, 19 nt, Human
cuccugggcagcugccucc

SEQ ID NO: 3142718 - RNA, 14 nt, Human
cuccugggcagcug

SEQ ID NO: 3142719 - RNA, 15 nt, Human
cuccugggcagcugc

SEQ ID NO: 3142720 - RNA, 16 nt, Human
cuccugggcagcugcc

SEQ ID NO: 3142721 - RNA, 17 nt, Human
cuccugggcagcugccu

SEQ ID NO: 3142722 - RNA, 21 nt, Human
cuccucugcuugccaucccuc

SEQ ID NO: 3142723 - RNA, 15 nt, Human
cuccucugcuugcca

SEQ ID NO: 3142724 - RNA, 16 nt, Human
cuccucugcuugccau

SEQ ID NO: 3142725 - RNA, 17 nt, Human
cuccucugcuugccauc

SEQ ID NO: 3142726 - RNA, 20 nt, Human
cuccucugcuugccaucccu

SEQ ID NO: 3142727 - RNA, 12 nt, Human
cuccucugcuug

SEQ ID NO: 3142728 - RNA, 14 nt, Human
cuccucugcuugcc

SEQ ID NO: 3142729 - RNA, 22 nt, Human
cuccacuuggucugugagaugc

SEQ ID NO: 3142730 - RNA, 21 nt, Human
cuccacuuggucugugagaug

SEQ ID NO: 3142731 - RNA, 17 nt, Human
cuccacuuggucuguga

SEQ ID NO: 3142732 - RNA, 16 nt, Human
cuccacuuggucugug

SEQ ID NO: 3142733 - RNA, 15 nt, Human
cuccacuuggucugu

SEQ ID NO: 3142734 - RNA, 13 nt, Human
cuccacuuggucu

SEQ ID NO: 3142735 - RNA, 13 nt, Human
cucaguaccccau

SEQ ID NO: 3142736 - RNA, 19 nt, Human
cuccccaugauguuuagaa

SEQ ID NO: 3142737 - RNA, 21 nt, Human
cucccaccugacacaccaggc

SEQ ID NO: 3142738 - RNA, 14 nt, Human
cucccaccugacac

SEQ ID NO: 3142739 - RNA, 20 nt, Human
cucccaccugacacaccagg

SEQ ID NO: 3142740 - RNA, 15 nt, Human
cucccaccugacaca

SEQ ID NO: 3142741 - RNA, 23 nt, Human
cuccacuuggucugugagaugcu

SEQ ID NO: 3142742 - RNA, 11 nt, Human
cuaauaaaaag

SEQ ID NO: 3142743 - RNA, 13 nt, Human
cuaauaaaaaggu

SEQ ID NO: 3142744 - RNA, 14 nt, Human
cuaauaaaaaggug

SEQ ID NO: 3142745 - RNA, 17 nt, Human
cuaaguaaauaggaauu

SEQ ID NO: 3142746 - RNA, 22 nt, Human
cuaaguaaaaccacagcaguug

SEQ ID NO: 3142747 - RNA, 23 nt, Human
cuaaguaaaaccacagcaguuga

SEQ ID NO: 3142748 - RNA, 20 nt, Human
cuaaguaaaaccacagcagu

SEQ ID NO: 3142749 - RNA, 20 nt, Human
cgugugugugcguccugucg

SEQ ID NO: 3142750 - RNA, 18 nt, Human
cuacaugagguacugaga

SEQ ID NO: 3142751 - RNA, 20 nt, Human
cuacaugagguacugagagu

SEQ ID NO: 3142752 - RNA, 18 nt, Human
cuacaaaaacacagcaag

SEQ ID NO: 3142753 - RNA, 16 nt, Human
cuacaaaaacacagca

SEQ ID NO: 3142754 - RNA, 17 nt, Human
cuacaaaaacacagcaa

SEQ ID NO: 3142755 - RNA, 15 nt, Human
cuacaaaaacacagc

SEQ ID NO: 3142756 - RNA, 18 nt, Human
cuacauacuauggaauuu

SEQ ID NO: 3142757 - RNA, 12 nt, Human
cuagaacucccu

SEQ ID NO: 3142758 - RNA, 23 nt, Human
cucaaaauaccaugccauuuaaa

SEQ ID NO: 3142759 - RNA, 17 nt, Human
cucaaaacugcacuguc

SEQ ID NO: 3142760 - RNA, 22 nt, Human
cguggugauuuagcaggaagcu

SEQ ID NO: 3142761 - RNA, 15 nt, Human
cguggugauuuagca

SEQ ID NO: 3142762 - RNA, 22 nt, Human
ccuugcugcaagcacagcccuu

SEQ ID NO: 3142763 - RNA, 22 nt, Human
ccuugcccagggcucagccugg

SEQ ID NO: 3142764 - RNA, 21 nt, Human
ccuugcccagggcucagccug

SEQ ID NO: 3142765 - RNA, 20 nt, Human
ccuugcccagggcucagccu

SEQ ID NO: 3142766 - RNA, 18 nt, Human
ccuuuugacacugcucua

SEQ ID NO: 3142767 - RNA, 15 nt, Human
ccuuuugacacugcu

SEQ ID NO: 3142768 - RNA, 13 nt, Human
ccuuuugacacug

SEQ ID NO: 3142769 - RNA, 17 nt, Human
cgccugaggcaauuaga

SEQ ID NO: 3142770 - RNA, 18 nt, Human
cgcaggcccccaggugcc

SEQ ID NO: 3142771 - RNA, 21 nt, Human
ccucauuuuuauaaugucccu

SEQ ID NO: 3142772 - RNA, 23 nt, Human
ccucauggaauuggagcucgugg

SEQ ID NO: 3142773 - RNA, 21 nt, Human
ccucaugcugccaauauccua

SEQ ID NO: 3142774 - RNA, 20 nt, Human
ccucaugcugccaauauccu

SEQ ID NO: 3142775 - RNA, 16 nt, Human
ccucaaagaaagugua

SEQ ID NO: 3142776 - RNA, 14 nt, Human
ccucaaagaaagug

SEQ ID NO: 3142777 - RNA, 11 nt, Human
ccucagccugu

SEQ ID NO: 3142778 - RNA, 12 nt, Human
ccucagccugug

SEQ ID NO: 3142779 - RNA, 22 nt, Human
ccucagccuuccccuugcccag

SEQ ID NO: 3142780 - RNA, 16 nt, Human
ccucagccugugcugc

SEQ ID NO: 3142781 - RNA, 19 nt, Human
cccugucuccucucucugu

SEQ ID NO: 3142782 - RNA, 21 nt, Human
ccugucugccagccagcagcc

SEQ ID NO: 3142783 - RNA, 23 nt, Human
ccugucugccagccagcagccag

SEQ ID NO: 3142784 - RNA, 15 nt, Human
ccugucucaccugga

SEQ ID NO: 3142785 - RNA, 22 nt, Human
ccugucggagcccugucuccuc

SEQ ID NO: 3142786 - RNA, 14 nt, Human
ccugucugccagcc

SEQ ID NO: 3142787 - RNA, 15 nt, Human
ccugucugccagcca

SEQ ID NO: 3142788 - RNA, 16 nt, Human
ccugucugccagccag

SEQ ID NO: 3142789 - RNA, 17 nt, Human
ccugucugccagccagc

SEQ ID NO: 3142790 - RNA, 19 nt, Human
ccugucugccagccagcag

SEQ ID NO: 3142791 - RNA, 20 nt, Human
ccugucugccagccagcagc

SEQ ID NO: 3142792 - RNA, 12 nt, Human
ccuggggccucg

SEQ ID NO: 3142793 - RNA, 22 nt, Human
ccuggggccucggagccucauc

SEQ ID NO: 3142794 - RNA, 15 nt, Human
ccuguaaucacagcu

SEQ ID NO: 3142795 - RNA, 17 nt, Human
ccugucggagcccuguc

SEQ ID NO: 3142796 - RNA, 21 nt, Human
ccugucggagcccugucuccu

SEQ ID NO: 3142797 - RNA, 16 nt, Human
ccugucggagcccugu

SEQ ID NO: 3142798 - RNA, 14 nt, Human
ccuggugggccucc

SEQ ID NO: 3142799 - RNA, 18 nt, Human
ccuggugggccuccucug

SEQ ID NO: 3142800 - RNA, 20 nt, Human
ccuggugggccuccucuguc

SEQ ID NO: 3142801 - RNA, 14 nt, Human
cccagggcucagcc

SEQ ID NO: 3142802 - RNA, 15 nt, Human
cccagggcucagccu

SEQ ID NO: 3142803 - RNA, 16 nt, Human
cccagggcucagccug

SEQ ID NO: 3142804 - RNA, 17 nt, Human
cccagggcucagccugg

SEQ ID NO: 3142805 - RNA, 18 nt, Human
cccagggcucagccuggu

SEQ ID NO: 3142806 - RNA, 20 nt, Human
cccagggcucagccuggugg

SEQ ID NO: 3142807 - RNA, 18 nt, Human
ccccugcacuccagccug

SEQ ID NO: 3142808 - RNA, 13 nt, Human
ccauacauuugug

SEQ ID NO: 3142809 - RNA, 22 nt, Human
ccauuuaaagcuuauuaaaacu

SEQ ID NO: 3142810 - RNA, 18 nt, Human
ccaguauuuagaagccaa

SEQ ID NO: 3142811 - RNA, 17 nt, Human
ccaguauuuagaagcca

SEQ ID NO: 3142812 - RNA, 17 nt, Human
auucuugccaaauauaa

SEQ ID NO: 3142813 - RNA, 18 nt, Human
auugacuuuuuauggcac

SEQ ID NO: 3142814 - RNA, 16 nt, Human
auucaaggaauuucuu

SEQ ID NO: 3142815 - RNA, 18 nt, Human
auucacaagacccaaaag

SEQ ID NO: 3142816 - RNA, 18 nt, Human
auucaaggaauuucuuaa

SEQ ID NO: 3142817 - RNA, 17 nt, Human
auucaaggaauuucuua

SEQ ID NO: 3142818 - RNA, 19 nt, Human
auucaaggaauuucuuaac

SEQ ID NO: 3142819 - RNA, 17 nt, Human
auucauuuuuuaaauuc

SEQ ID NO: 3142820 - RNA, 15 nt, Human
auuguuuaaaaucau

SEQ ID NO: 3142821 - RNA, 19 nt, Human
auuguuuaaaaucauuucu

SEQ ID NO: 3142822 - RNA, 14 nt, Human
auuguaaaugugcu

SEQ ID NO: 3142823 - RNA, 15 nt, Human
auuguaaaugugcuu

SEQ ID NO: 3142824 - RNA, 17 nt, Human
auuguaaaugugcuuuu

SEQ ID NO: 3142825 - RNA, 14 nt, Human
auuucuaugaaaua

SEQ ID NO: 3142826 - RNA, 18 nt, Human
auuucuaugaaauauuau

SEQ ID NO: 3142827 - RNA, 15 nt, Human
auuucuaugaaauau

SEQ ID NO: 3142828 - RNA, 15 nt, Human
caaauccuugaagau

SEQ ID NO: 3142829 - RNA, 21 nt, Human
caacuaucucauuuccaagca

SEQ ID NO: 3142830 - RNA, 19 nt, Human
caacccaaauguucaucaa

SEQ ID NO: 3142831 - RNA, 20 nt, Human
cacuuggucugugagaugcu

SEQ ID NO: 3142832 - RNA, 17 nt, Human
cacuuggucugugagau

SEQ ID NO: 3142833 - RNA, 23 nt, Human
cacucccaccugacacaccaggc

SEQ ID NO: 3142834 - RNA, 22 nt, Human
cacucccaccugacacaccagg

SEQ ID NO: 3142835 - RNA, 17 nt, Human
cacucccaccugacaca

SEQ ID NO: 3142836 - RNA, 23 nt, Human
caccucaaaauaccaugccauuu

SEQ ID NO: 3142837 - RNA, 21 nt, Human
caccguuggggauuggggaag

SEQ ID NO: 3142838 - RNA, 21 nt, Human
caccuacaugagguacugaga

SEQ ID NO: 3142839 - RNA, 22 nt, Human
caccuugcagcucuccccuucu

SEQ ID NO: 3142840 - RNA, 13 nt, Human
caccuugcagcuc

SEQ ID NO: 3142841 - RNA, 15 nt, Human
caccuugcagcucuc

SEQ ID NO: 3142842 - RNA, 14 nt, Human
caaguauuagaaua

SEQ ID NO: 3142843 - RNA, 20 nt, Human
caaguauuagaauaccacag

SEQ ID NO: 3142844 - RNA, 23 nt, Human
caaugcuguauuuuaaaagaaug

SEQ ID NO: 3142845 - RNA, 14 nt, Human
caaugcuguauuuu

SEQ ID NO: 3142846 - RNA, 20 nt, Human
caauauuucagauaaucaca

SEQ ID NO: 3142847 - RNA, 12 nt, Human
caauauuucaga

SEQ ID NO: 3142848 - RNA, 12 nt, Human
caauuuaaaaaa

SEQ ID NO: 3142849 - RNA, 23 nt, Human
cacaagacccaaaaggcagaagc

SEQ ID NO: 3142850 - RNA, 16 nt, Human
cacaagacugcacauc

SEQ ID NO: 3142851 - RNA, 17 nt, Human
caccaggcgcuaauuca

SEQ ID NO: 3142852 - RNA, 23 nt, Human
caccaggcgcuaauucaaggaau

SEQ ID NO: 3142853 - RNA, 20 nt, Human
cagucugacuguuuccauca

SEQ ID NO: 3142854 - RNA, 19 nt, Human
caggugccaguuauggcua

SEQ ID NO: 3142855 - RNA, 16 nt, Human
cagucaccucauggaa

SEQ ID NO: 3142856 - RNA, 15 nt, Human
cagucacauuccaag

SEQ ID NO: 3142857 - RNA, 19 nt, Human
cagucaccucauggaauug

SEQ ID NO: 3142858 - RNA, 15 nt, Human
cagucaccucaugga

SEQ ID NO: 3142859 - RNA, 15 nt, Human
caggcacacuucuuc

SEQ ID NO: 3142860 - RNA, 16 nt, Human
cagagguugcagugag

SEQ ID NO: 3142861 - RNA, 17 nt, Human
cagagguugcagugagc

SEQ ID NO: 3142862 - RNA, 12 nt, Human
cagauccuggaa

SEQ ID NO: 3142863 - RNA, 22 nt, Human
cagcaguugaaaagacuccaaa

SEQ ID NO: 3142864 - RNA, 13 nt, Human
cagcaguucagag

SEQ ID NO: 3142865 - RNA, 21 nt, Human
cagccagcucucagccaacga

SEQ ID NO: 3142866 - RNA, 17 nt, Human
cagccagcucucagcca

SEQ ID NO: 3142867 - RNA, 18 nt, Human
cagccagcucucagccaa

SEQ ID NO: 3142868 - RNA, 12 nt, Human
cagccagcucuc

SEQ ID NO: 3142869 - RNA, 15 nt, Human
cagccagcucucagc

SEQ ID NO: 3142870 - RNA, 16 nt, Human
cagccagcucucagcc

SEQ ID NO: 3142871 - RNA, 12 nt, Human
cagcuguggcag

SEQ ID NO: 3142872 - RNA, 16 nt, Human
cagcuguggcagaguu

SEQ ID NO: 3142873 - RNA, 21 nt, Human
cagcuccccucggagaagagc

SEQ ID NO: 3142874 - RNA, 22 nt, Human
cagcuccccucggagaagagcu

SEQ ID NO: 3142875 - RNA, 20 nt, Human
cagcuccccucggagaagag

SEQ ID NO: 3142876 - RNA, 20 nt, Human
cagccgcuccugucugccag

SEQ ID NO: 3142877 - RNA, 21 nt, Human
cagccgcuccugucugccagc

SEQ ID NO: 3142878 - RNA, 22 nt, Human
cagccgcuccugucugccagcc

SEQ ID NO: 3142879 - RNA, 23 nt, Human
cagccgcuccugucugccagcca

SEQ ID NO: 3142880 - RNA, 14 nt, Human
cagccgcuccuguc

SEQ ID NO: 3142881 - RNA, 12 nt, Human
cagccgcuccug

SEQ ID NO: 3142882 - RNA, 16 nt, Human
cagccgcuccugucug

SEQ ID NO: 3142883 - RNA, 17 nt, Human
cagccgcuccugucugc

SEQ ID NO: 3142884 - RNA, 18 nt, Human
cagccgcuccugucugcc

SEQ ID NO: 3142885 - RNA, 19 nt, Human
cagccgcuccugucugcca

SEQ ID NO: 3142886 - RNA, 20 nt, Human
cagcccuucuuuccacagaa

SEQ ID NO: 3142887 - RNA, 17 nt, Human
cauuuguauaaaauaau

SEQ ID NO: 3142888 - RNA, 20 nt, Human
cauuuguauaaaauaauuuu

SEQ ID NO: 3142889 - RNA, 19 nt, Human
cauuuguauaaaauaauuu

SEQ ID NO: 3142890 - RNA, 17 nt, Human
ccaaauguucaucaaug

SEQ ID NO: 3142891 - RNA, 12 nt, Human
ccaccaguucuc

SEQ ID NO: 3142892 - RNA, 12 nt, Human
ccacagcaguug

SEQ ID NO: 3142893 - RNA, 17 nt, Human
ccacagcaguugaaaag

SEQ ID NO: 3142894 - RNA, 18 nt, Human
ccacagcaguugaaaaga

SEQ ID NO: 3142895 - RNA, 23 nt, Human
ccacagcaguugaaaagacucca

SEQ ID NO: 3142896 - RNA, 14 nt, Human
caugauguuuagaa

SEQ ID NO: 3142897 - RNA, 24 nt, Human
cauguuaguuaccuuauaguuacu

SEQ ID NO: 3142898 - RNA, 22 nt, Human
cauguuaguuaccuuauaguua

SEQ ID NO: 3142899 - RNA, 21 nt, Human
cauguuaguuaccuuauaguu

SEQ ID NO: 3142900 - RNA, 14 nt, Human
cauguuaguuaccu

SEQ ID NO: 3142901 - RNA, 17 nt, Human
caugucccuacaccccu

SEQ ID NO: 3142902 - RNA, 22 nt, Human
cauguccugccuauuaucuguc

SEQ ID NO: 3142903 - RNA, 13 nt, Human
cauguccugccua

SEQ ID NO: 3142904 - RNA, 22 nt, Human
gcaguuguugcccacagcugua

SEQ ID NO: 3142905 - RNA, 13 nt, Human
gcagugaugucac

SEQ ID NO: 3142906 - RNA, 22 nt, Human
gcagaacagugauuaccaggga

SEQ ID NO: 3142907 - RNA, 18 nt, Human
gcagaacagugauuacca

SEQ ID NO: 3142908 - RNA, 23 nt, Human
gcagaacagccgcuccugucugc

SEQ ID NO: 3142909 - RNA, 13 nt, Human
gcagaacagugau

SEQ ID NO: 3142910 - RNA, 12 nt, Human
gcagaacaguga

SEQ ID NO: 3142911 - RNA, 15 nt, Human
gcagcucuccccuuc

SEQ ID NO: 3142912 - RNA, 15 nt, Human
gcagccagcucucag

SEQ ID NO: 3142913 - RNA, 16 nt, Human
gcagccagcucucagc

SEQ ID NO: 3142914 - RNA, 17 nt, Human
gcagccagcucucagcc

SEQ ID NO: 3142915 - RNA, 18 nt, Human
gcagccagcucucagcca

SEQ ID NO: 3142916 - RNA, 13 nt, Human
gcagccagcucuc

SEQ ID NO: 3142917 - RNA, 17 nt, Human
gauggaaaauucauuuu

SEQ ID NO: 3142918 - RNA, 20 nt, Human
gaggacgcucucuggccuuc

SEQ ID NO: 3142919 - RNA, 21 nt, Human
gaggacgcucucuggccuucg

SEQ ID NO: 3142920 - RNA, 14 nt, Human
gaggagaaacugga

SEQ ID NO: 3142921 - RNA, 12 nt, Human
gaggagaaacug

SEQ ID NO: 3142922 - RNA, 18 nt, Human
gaggggcagaacagccgc

SEQ ID NO: 3142923 - RNA, 12 nt, Human
gaggcuccacuu

SEQ ID NO: 3142924 - RNA, 15 nt, Human
gaggcuccacuuggu

SEQ ID NO: 3142925 - RNA, 17 nt, Human
gaggcuccacuuggucu

SEQ ID NO: 3142926 - RNA, 18 nt, Human
gaggcugagaugggagaa

SEQ ID NO: 3142927 - RNA, 14 nt, Human
gagcagucaggaaa

SEQ ID NO: 3142928 - RNA, 16 nt, Human
gagccccacccucaga

SEQ ID NO: 3142929 - RNA, 17 nt, Human
gagcuguucacagccag

SEQ ID NO: 3142930 - RNA, 20 nt, Human
gagcuguucacagccagacu

SEQ ID NO: 3142931 - RNA, 22 nt, Human
gagcuguucacagccagacugg

SEQ ID NO: 3142932 - RNA, 21 nt, Human
gagacucagggccccagcacu

SEQ ID NO: 3142933 - RNA, 17 nt, Human
gagacucagggccccag

SEQ ID NO: 3142934 - RNA, 16 nt, Human
gagaugcuagaacucc

SEQ ID NO: 3142935 - RNA, 20 nt, Human
gagaugcuagaacucccuuu

SEQ ID NO: 3142936 - RNA, 21 nt, Human
gagauugugccccugcacucc

SEQ ID NO: 3142937 - RNA, 22 nt, Human
gacuuuuuauggcacuaguauu

SEQ ID NO: 3142938 - RNA, 14 nt, Human
gacgcucucuggcc

SEQ ID NO: 3142939 - RNA, 23 nt, Human
gacccucaugcugccaauauccu

SEQ ID NO: 3142940 - RNA, 22 nt, Human
gacccucaugcugccaauaucc

SEQ ID NO: 3142941 - RNA, 21 nt, Human
gacccucaugcugccaauauc

SEQ ID NO: 3142942 - RNA, 18 nt, Human
gacccucaugcugccaau

SEQ ID NO: 3142943 - RNA, 17 nt, Human
gacccucaugcugccaa

SEQ ID NO: 3142944 - RNA, 16 nt, Human
gacccucaugcugcca

SEQ ID NO: 3142945 - RNA, 14 nt, Human
gacccucaugcugc

SEQ ID NO: 3142946 - RNA, 12 nt, Human
gacccucaugcu

SEQ ID NO: 3142947 - RNA, 17 nt, Human
gacauuugcucauggaa

SEQ ID NO: 3142948 - RNA, 12 nt, Human
gacagcucugca

SEQ ID NO: 3142949 - RNA, 18 nt, Human
gacagucaccucauggaa

SEQ ID NO: 3142950 - RNA, 17 nt, Human
gacagucaccucaugga

SEQ ID NO: 3142951 - RNA, 14 nt, Human
gacaugugguggga

SEQ ID NO: 3142952 - RNA, 16 nt, Human
gacauguggugggaca

SEQ ID NO: 3142953 - RNA, 22 nt, Human
gacauguggugggacagggacc

SEQ ID NO: 3142954 - RNA, 21 nt, Human
gacacugcucuaacagcccuc

SEQ ID NO: 3142955 - RNA, 20 nt, Human
gacacugcucuaacagcccu

SEQ ID NO: 3142956 - RNA, 14 nt, Human
gacacugcucuaac

SEQ ID NO: 3142957 - RNA, 23 nt, Human
gaauuaggcuguaacuacuuuau

SEQ ID NO: 3142958 - RNA, 19 nt, Human
gaauuaggcuguaacuacu

SEQ ID NO: 3142959 - RNA, 18 nt, Human
gaauuaggcuguaacuac

SEQ ID NO: 3142960 - RNA, 17 nt, Human
gaauuaggcuguaacua

SEQ ID NO: 3142961 - RNA, 16 nt, Human
gaauuaggcuguaacu

SEQ ID NO: 3142962 - RNA, 15 nt, Human
gaauuaggcuguaac

SEQ ID NO: 3142963 - RNA, 22 nt, Human
gaaugauuaugaauuacauuug

SEQ ID NO: 3142964 - RNA, 14 nt, Human
gaaugauuaugaau

SEQ ID NO: 3142965 - RNA, 15 nt, Human
gaaugaauggcuaag

SEQ ID NO: 3142966 - RNA, 15 nt, Human
gaauuaacacaugau

SEQ ID NO: 3142967 - RNA, 14 nt, Human
gaauuaacacauga

SEQ ID NO: 3142968 - RNA, 13 nt, Human
gaauuacauuugu

SEQ ID NO: 3142969 - RNA, 18 nt, Human
gaauuacauuuguauaaa

SEQ ID NO: 3142970 - RNA, 15 nt, Human
gaauuacauuuguau

SEQ ID NO: 3142971 - RNA, 20 nt, Human
gaauuacauuuguauaaaau

SEQ ID NO: 3142972 - RNA, 14 nt, Human
gaaugaauggcuaa

SEQ ID NO: 3142973 - RNA, 23 nt, Human
cuggaaaaguauguuagugcaaa

SEQ ID NO: 3142974 - RNA, 19 nt, Human
cugccuccccuccucugcu

SEQ ID NO: 3142975 - RNA, 20 nt, Human
cugccuccccuccucugcuu

SEQ ID NO: 3142976 - RNA, 14 nt, Human
cugccuccccuccu

SEQ ID NO: 3142977 - RNA, 17 nt, Human
cugccuccccuccucug

SEQ ID NO: 3142978 - RNA, 18 nt, Human
cugccuccccuccucugc

SEQ ID NO: 3142979 - RNA, 17 nt, Human
cugcuaccucacugggg

SEQ ID NO: 3142980 - RNA, 18 nt, Human
cugcuaccucacuggggu

SEQ ID NO: 3142981 - RNA, 21 nt, Human
cugcuagcacuuggagccaag

SEQ ID NO: 3142982 - RNA, 14 nt, Human
cugcuagcacuugg

SEQ ID NO: 3142983 - RNA, 23 nt, Human
cugugagaugcuagaacucccuu

SEQ ID NO: 3142984 - RNA, 21 nt, Human
cugugagaugcuagaacuccc

SEQ ID NO: 3142985 - RNA, 19 nt, Human
cuguuauaaucuuucacag

SEQ ID NO: 3142986 - RNA, 22 nt, Human
cuguucacagccagacuggcac

SEQ ID NO: 3142987 - RNA, 12 nt, Human
cuguucacagcc

SEQ ID NO: 3142988 - RNA, 19 nt, Human
cuguucacagccagacugg

SEQ ID NO: 3142989 - RNA, 12 nt, Human
cuuaaaaauggu

SEQ ID NO: 3142990 - RNA, 20 nt, Human
cuuaaaaaugguuuaaaugg

SEQ ID NO: 3142991 - RNA, 13 nt, Human
cuuaaaaaugguu

SEQ ID NO: 3142992 - RNA, 20 nt, Human
cuguaagaaaauaucacuug

SEQ ID NO: 3142993 - RNA, 23 nt, Human
cugucggagcccugucuccucuc

SEQ ID NO: 3142994 - RNA, 18 nt, Human
cuguagcauuacaguggg

SEQ ID NO: 3142995 - RNA, 17 nt, Human
cuguagcauuacagugg

SEQ ID NO: 3142996 - RNA, 12 nt, Human
cugucagcugca

SEQ ID NO: 3142997 - RNA, 22 nt, Human
cuucucuguauuccuagaaacu

SEQ ID NO: 3142998 - RNA, 23 nt, Human
cuuggucucagugucaaugcagc

SEQ ID NO: 3142999 - RNA, 15 nt, Human
cuuggcccaggaguu

SEQ ID NO: 3143000 - RNA, 14 nt, Human
cuuggcccaggagu

SEQ ID NO: 3143001 - RNA, 23 nt, Human
cuuggcccaggaguuuggccaga

SEQ ID NO: 3143002 - RNA, 22 nt, Human
cuuggcccaggaguuuggccag

SEQ ID NO: 3143003 - RNA, 20 nt, Human
cuuggcccaggaguuuggcc

SEQ ID NO: 3143004 - RNA, 16 nt, Human
cuuggcccaggaguuu

SEQ ID NO: 3143005 - RNA, 20 nt, Human
cuuuuuuucuguaccaguua

SEQ ID NO: 3143006 - RNA, 20 nt, Human
gaaaagacuccaaagaaaug

SEQ ID NO: 3143007 - RNA, 18 nt, Human
gaaaagacuccaaagaaa

SEQ ID NO: 3143008 - RNA, 21 nt, Human
gaaaagacuccaaagaaaugu

SEQ ID NO: 3143009 - RNA, 23 nt, Human
gaaacuucagcgguuuauauaag

SEQ ID NO: 3143010 - RNA, 16 nt, Human
gaaaucaaauaugcaa

SEQ ID NO: 3143011 - RNA, 21 nt, Human
gaaaucaaauaugcaaagcac

SEQ ID NO: 3143012 - RNA, 22 nt, Human
gaaauauuuauuuuaauaaugu

SEQ ID NO: 3143013 - RNA, 23 nt, Human
gaacaaauuuacagagacagaaa

SEQ ID NO: 3143014 - RNA, 18 nt, Human
gaacaaauuuacagagac

SEQ ID NO: 3143015 - RNA, 17 nt, Human
gaacaaauuuacagaga

SEQ ID NO: 3143016 - RNA, 17 nt, Human
gaaaugaaagcagggac

SEQ ID NO: 3143017 - RNA, 23 nt, Human
gaaaucaaauaugcaaagcacug

SEQ ID NO: 3143018 - RNA, 18 nt, Human
gaaaugaaagcagggacu

SEQ ID NO: 3143019 - RNA, 21 nt, Human
ggacagucaccucauggaauu

SEQ ID NO: 3143020 - RNA, 18 nt, Human
ggacagucaccucaugga

SEQ ID NO: 3143021 - RNA, 17 nt, Human
ggacagucaccucaugg

SEQ ID NO: 3143022 - RNA, 13 nt, Human
ggacaccaggagu

SEQ ID NO: 3143023 - RNA, 19 nt, Human
ggaaaucaggguuaguauu

SEQ ID NO: 3143024 - RNA, 13 nt, Human
ggaaacugccagc

SEQ ID NO: 3143025 - RNA, 16 nt, Human
ggaaaaaauaacaaug

SEQ ID NO: 3143026 - RNA, 16 nt, Human
gcuguuuauuaaucuu

SEQ ID NO: 3143027 - RNA, 13 nt, Human
gcugcugaaacaa

SEQ ID NO: 3143028 - RNA, 18 nt, Human
gcuguauuuuaaaagaau

SEQ ID NO: 3143029 - RNA, 20 nt, Human
gcuguauuuuaaaagaauga

SEQ ID NO: 3143030 - RNA, 21 nt, Human
gcuguauuuuaaaagaaugau

SEQ ID NO: 3143031 - RNA, 21 nt, Human
gcugcccgucuucagccuagc

SEQ ID NO: 3143032 - RNA, 16 nt, Human
gcugcccgucuucagc

SEQ ID NO: 3143033 - RNA, 19 nt, Human
gcugcccgucuucagccua

SEQ ID NO: 3143034 - RNA, 20 nt, Human
gcugcccgucuucagccuag

SEQ ID NO: 3143035 - RNA, 18 nt, Human
gcugcaagcacagcccuu

SEQ ID NO: 3143036 - RNA, 20 nt, Human
gcugcaagguacucugguga

SEQ ID NO: 3143037 - RNA, 12 nt, Human
gcugcaagguac

SEQ ID NO: 3143038 - RNA, 12 nt, Human
gcauuuagaugu

SEQ ID NO: 3143039 - RNA, 13 nt, Human
gcauuuagaugua

SEQ ID NO: 3143040 - RNA, 19 nt, Human
gcauuuaggccaugggaca

SEQ ID NO: 3143041 - RNA, 20 nt, Human
gcccaggaguuuggccagaa

SEQ ID NO: 3143042 - RNA, 19 nt, Human
gcccaggaguuuggccaga

SEQ ID NO: 3143043 - RNA, 18 nt, Human
gcccaggaguuuggccag

SEQ ID NO: 3143044 - RNA, 11 nt, Human
gccccaaaagg

SEQ ID NO: 3143045 - RNA, 22 nt, Human
gccucauguccacugguucuuc

SEQ ID NO: 3143046 - RNA, 22 nt, Human
gccucauccgaggcagggucag

SEQ ID NO: 3143047 - RNA, 12 nt, Human
gccuccauccug

SEQ ID NO: 3143048 - RNA, 13 nt, Human
gccuccucugucc

SEQ ID NO: 3143049 - RNA, 16 nt, Human
gccuccucuguccagg

SEQ ID NO: 3143050 - RNA, 14 nt, Human
gccuccauccugag

SEQ ID NO: 3143051 - RNA, 13 nt, Human
gccuccauccuga

SEQ ID NO: 3143052 - RNA, 17 nt, Human
gcccgucuucagccuag

SEQ ID NO: 3143053 - RNA, 18 nt, Human
gcccgucuucagccuagc

SEQ ID NO: 3143054 - RNA, 14 nt, Human
gcccgucuucagcc

SEQ ID NO: 3143055 - RNA, 15 nt, Human
gcccgucuucagccu

SEQ ID NO: 3143056 - RNA, 16 nt, Human
gcccgucuucagccua

SEQ ID NO: 3143057 - RNA, 20 nt, Human
gccgcuccugucugccagcc

SEQ ID NO: 3143058 - RNA, 21 nt, Human
gccgcuccugucugccagcca

SEQ ID NO: 3143059 - RNA, 15 nt, Human
gccgcuccugucugc

SEQ ID NO: 3143060 - RNA, 19 nt, Human
gccgcuccugucugccagc

SEQ ID NO: 3143061 - RNA, 13 nt, Human
gcgggaaggaggg

SEQ ID NO: 3143062 - RNA, 14 nt, Human
gcgggaaggagggu

SEQ ID NO: 3143063 - RNA, 23 nt, Human
gccuucggccuccauccugaggc

SEQ ID NO: 3143064 - RNA, 14 nt, Human
gccugugcugcccg

SEQ ID NO: 3143065 - RNA, 15 nt, Human
gccugugcugcccgu

SEQ ID NO: 3143066 - RNA, 16 nt, Human
gccugugcugcccguc

SEQ ID NO: 3143067 - RNA, 23 nt, Human
gccugugcugcccgucuucagcc

SEQ ID NO: 3143068 - RNA, 17 nt, Human
ggcucuaauucacagug

SEQ ID NO: 3143069 - RNA, 19 nt, Human
ggcucuaauucacagugcu

SEQ ID NO: 3143070 - RNA, 13 nt, Human
aaaaauacaaaaa

SEQ ID NO: 3143071 - RNA, 16 nt, Human
ggccuucggccuccau

SEQ ID NO: 3143072 - RNA, 18 nt, Human
ggccuucggccuccaucc

SEQ ID NO: 3143073 - RNA, 20 nt, Human
ggcuaagcuucacuguaaaa

SEQ ID NO: 3143074 - RNA, 21 nt, Human
ggccccagcacuaaagcagug

SEQ ID NO: 3143075 - RNA, 13 nt, Human
ggccccagcacua

SEQ ID NO: 3143076 - RNA, 16 nt, Human
ggccccagcacuaaag

SEQ ID NO: 3143077 - RNA, 19 nt, Human
gguuuuauuguuuaaaauc

SEQ ID NO: 3143078 - RNA, 16 nt, Human
gguuucauguuaguua

SEQ ID NO: 3143079 - RNA, 20 nt, Human
aaagggauggcaagaugugg

SEQ ID NO: 3143080 - RNA, 22 nt, Human
aaagggcuguuauaaucuuuca

SEQ ID NO: 3143081 - RNA, 20 nt, Human
aaagggcuguuauaaucuuu

SEQ ID NO: 3143082 - RNA, 19 nt, Human
aaacuuuaugcuaagugaa

SEQ ID NO: 3143083 - RNA, 12 nt, Human
aaacuuuaugcu

SEQ ID NO: 3143084 - RNA, 12 nt, Human
gguggacccagg

SEQ ID NO: 3143085 - RNA, 14 nt, Human
gguggacccaggga

SEQ ID NO: 3143086 - RNA, 16 nt, Human
aaagcagaacagugau

SEQ ID NO: 3143087 - RNA, 13 nt, Human
guaauaaacucau

SEQ ID NO: 3143088 - RNA, 14 nt, Human
guaacuacuuuaua

SEQ ID NO: 3143089 - RNA, 12 nt, Human
guaacuacuuua

SEQ ID NO: 3143090 - RNA, 23 nt, Human
aaaguguauuuggaaauaaaguc

SEQ ID NO: 3143091 - RNA, 20 nt, Human
aaauauguuagcaaagaguu

SEQ ID NO: 3143092 - RNA, 13 nt, Human
aaauaugcaaagc

SEQ ID NO: 3143093 - RNA, 15 nt, Human
aaauaugcaaagcac

SEQ ID NO: 3143094 - RNA, 16 nt, Human
aaauaugcaaagcacu

SEQ ID NO: 3143095 - RNA, 17 nt, Human
aaauaugcaaagcacug

SEQ ID NO: 3143096 - RNA, 18 nt, Human
aaauauaugcuaagucuu

SEQ ID NO: 3143097 - RNA, 22 nt, Human
aaauaucacuugucaauaaaau

SEQ ID NO: 3143098 - RNA, 21 nt, Human
aaauaccaugccauuuaaagc

SEQ ID NO: 3143099 - RNA, 20 nt, Human
ggguuuuauuguuuaaaauc

SEQ ID NO: 3143100 - RNA, 24 nt, Human
gguaacuuuugugaauuaggcugu

SEQ ID NO: 3143101 - RNA, 14 nt, Human
ggucagugcaaaua

SEQ ID NO: 3143102 - RNA, 22 nt, Human
gggguaaaauuccuuagcuuag

SEQ ID NO: 3143103 - RNA, 16 nt, Human
gggcucagccuggugg

SEQ ID NO: 3143104 - RNA, 20 nt, Human
gggcucagccuggugggccu

SEQ ID NO: 3143105 - RNA, 11 nt, Human
gggcucagccu

SEQ ID NO: 3143106 - RNA, 12 nt, Human
gggcucagccug

SEQ ID NO: 3143107 - RNA, 13 nt, Human
gggcucagccugg

SEQ ID NO: 3143108 - RNA, 16 nt, Human
aaaauggguuuuacug

SEQ ID NO: 3143109 - RNA, 18 nt, Human
aaaaugguuuaaaugguc

SEQ ID NO: 3143110 - RNA, 16 nt, Human
aaaaugguuuaaaugg

SEQ ID NO: 3143111 - RNA, 17 nt, Human
gggccucggagccucau

SEQ ID NO: 3143112 - RNA, 15 nt, Human
gggccucggagccuc

SEQ ID NO: 3143113 - RNA, 17 nt, Human
aaaauaauuuuuauauu

SEQ ID NO: 3143114 - RNA, 16 nt, Human
aaaauaauuuuuauau

SEQ ID NO: 3143115 - RNA, 14 nt, Human
aaaauacacacuca

SEQ ID NO: 3143116 - RNA, 11 nt, Human
aaaauaauuuu

SEQ ID NO: 3143117 - RNA, 17 nt, Human
aaaaucucaauauuuca

SEQ ID NO: 3143118 - RNA, 21 nt, Human
agugagcagucaggaaagaga

SEQ ID NO: 3143119 - RNA, 16 nt, Human
agugagccgagauugu

SEQ ID NO: 3143120 - RNA, 22 nt, Human
agugaaagaggcagcuugaaac

SEQ ID NO: 3143121 - RNA, 14 nt, Human
agugagacagcucu

SEQ ID NO: 3143122 - RNA, 16 nt, Human
agugaaagaggcagcu

SEQ ID NO: 3143123 - RNA, 17 nt, Human
agugaaagaaaauaaca

SEQ ID NO: 3143124 - RNA, 14 nt, Human
ugugaagcaaaauu

SEQ ID NO: 3143125 - RNA, 22 nt, Human
ugugagaugcuagaacucccuu

SEQ ID NO: 3143126 - RNA, 23 nt, Human
agucucucuucucuccagcugac

SEQ ID NO: 3143127 - RNA, 21 nt, Human
agucucucuucucuccagcug

SEQ ID NO: 3143128 - RNA, 15 nt, Human
ugucuccucucucug

SEQ ID NO: 3143129 - RNA, 17 nt, Human
ugucucuacuaaaaaua

SEQ ID NO: 3143130 - RNA, 14 nt, Human
ugucuuaauuaaaa

SEQ ID NO: 3143131 - RNA, 12 nt, Human
ugucuuaauuaa

SEQ ID NO: 3143132 - RNA, 14 nt, Human
ugucuucacaacag

SEQ ID NO: 3143133 - RNA, 23 nt, Human
agucaucuugcuaccaguauuua

SEQ ID NO: 3143134 - RNA, 19 nt, Human
agucaucuugcuaccagua

SEQ ID NO: 3143135 - RNA, 13 nt, Human
agucaucuugcua

SEQ ID NO: 3143136 - RNA, 11 nt, Human
agucaucuugc

SEQ ID NO: 3143137 - RNA, 20 nt, Human
agucagauggaaaauucauu

SEQ ID NO: 3143138 - RNA, 23 nt, Human
agucagauggaaaauucauuuuu

SEQ ID NO: 3143139 - RNA, 22 nt, Human
agucagauggaaaauucauuuu

SEQ ID NO: 3143140 - RNA, 20 nt, Human
ugucagcuccccucggagaa

SEQ ID NO: 3143141 - RNA, 21 nt, Human
ugucagcuccccucggagaag

SEQ ID NO: 3143142 - RNA, 23 nt, Human
ugucagcuccccucggagaagag

SEQ ID NO: 3143143 - RNA, 12 nt, Human
ugucccuacacc

SEQ ID NO: 3143144 - RNA, 19 nt, Human
ugucccuacaccccucccc

SEQ ID NO: 3143145 - RNA, 21 nt, Human
aguauguuagugcaaauuguc

SEQ ID NO: 3143146 - RNA, 18 nt, Human
aguauguuagugcaaauu

SEQ ID NO: 3143147 - RNA, 21 nt, Human
aguauuagaauaccacaggaa

SEQ ID NO: 3143148 - RNA, 20 nt, Human
agucacauuccaagccucau

SEQ ID NO: 3143149 - RNA, 16 nt, Human
aguauuguccaggucu

SEQ ID NO: 3143150 - RNA, 15 nt, Human
aguauuguccagguc

SEQ ID NO: 3143151 - RNA, 16 nt, Human
aggggaauugaggaca

SEQ ID NO: 3143152 - RNA, 23 nt, Human
aggguaccuugaacacuggggga

SEQ ID NO: 3143153 - RNA, 19 nt, Human
aggguaccuugaacacugg

SEQ ID NO: 3143154 - RNA, 21 nt, Human
agggugaugggaaagcauugu

SEQ ID NO: 3143155 - RNA, 22 nt, Human
agggugaugggaaagcauugua

SEQ ID NO: 3143156 - RNA, 22 nt, Human
ugguccaugggccauaugaaaa

SEQ ID NO: 3143157 - RNA, 22 nt, Human
uggucugugagaugcuagaacu

SEQ ID NO: 3143158 - RNA, 17 nt, Human
aggguuaugauuaagua

SEQ ID NO: 3143159 - RNA, 16 nt, Human
aggguucagagacuca

SEQ ID NO: 3143160 - RNA, 18 nt, Human
aggguucagagacucagg

SEQ ID NO: 3143161 - RNA, 20 nt, Human
aggguuuauguuuaggaugu

SEQ ID NO: 3143162 - RNA, 15 nt, Human
aggucagugcaaaua

SEQ ID NO: 3143163 - RNA, 21 nt, Human
ugguuuaaagaaaguguauuu

SEQ ID NO: 3143164 - RNA, 15 nt, Human
ugguuucuagcauga

SEQ ID NO: 3143165 - RNA, 15 nt, Human
ugguuucauguuagu

SEQ ID NO: 3143166 - RNA, 12 nt, Human
ugguuucauguu

SEQ ID NO: 3143167 - RNA, 19 nt, Human
ugguuuaaagaaaguguau

SEQ ID NO: 3143168 - RNA, 17 nt, Human
ugguuuaaagaaagugu

SEQ ID NO: 3143169 - RNA, 16 nt, Human
ugguuuaaagaaagug

SEQ ID NO: 3143170 - RNA, 15 nt, Human
ugguuuaaagaaagu

SEQ ID NO: 3143171 - RNA, 23 nt, Human
uggugugaccacugcagaagaca

SEQ ID NO: 3143172 - RNA, 18 nt, Human
uguaagaaaauaucacuu

SEQ ID NO: 3143173 - RNA, 17 nt, Human
uguaagaaaauaucacu

SEQ ID NO: 3143174 - RNA, 20 nt, Human
auacaucccuuaccugggaa

SEQ ID NO: 3143175 - RNA, 21 nt, Human
auacaguucggugagcuacaa

SEQ ID NO: 3143176 - RNA, 19 nt, Human
uuauaacuaacauguccug

SEQ ID NO: 3143177 - RNA, 15 nt, Human
uuauaacuaacaugu

SEQ ID NO: 3143178 - RNA, 21 nt, Human
uuagccguggugauuuagcag

SEQ ID NO: 3143179 - RNA, 18 nt, Human
uuauauaagcuuguauuc

SEQ ID NO: 3143180 - RNA, 19 nt, Human
uuauaguuacuguguaauu

SEQ ID NO: 3143181 - RNA, 15 nt, Human
uuauaguuacugugu

SEQ ID NO: 3143182 - RNA, 14 nt, Human
uuauaguuacugug

SEQ ID NO: 3143183 - RNA, 13 nt, Human
uuauaguuacugu

SEQ ID NO: 3143184 - RNA, 22 nt, Human
auacaaaaaaaaaaaaaaauua

SEQ ID NO: 3143185 - RNA, 22 nt, Human
auaauuuuuauauuugaaauau

SEQ ID NO: 3143186 - RNA, 21 nt, Human
auaauuuuuauauuugaaaua

SEQ ID NO: 3143187 - RNA, 20 nt, Human
auaauuuugugaagcaaaau

SEQ ID NO: 3143188 - RNA, 15 nt, Human
auaauuuugugaagc

SEQ ID NO: 3143189 - RNA, 14 nt, Human
auaauuuugugaag

SEQ ID NO: 3143190 - RNA, 13 nt, Human
auaauuuugugaa

SEQ ID NO: 3143191 - RNA, 19 nt, Human
auaauuuuuauauuugaaa

SEQ ID NO: 3143192 - RNA, 16 nt, Human
auaauuuuuauauuug

SEQ ID NO: 3143193 - RNA, 14 nt, Human
auaauuuuuauauu

SEQ ID NO: 3143194 - RNA, 14 nt, Human
auaaugaauacuuu

SEQ ID NO: 3143195 - RNA, 21 nt, Human
auaaucuuucacaggggacag

SEQ ID NO: 3143196 - RNA, 22 nt, Human
uuagaugcaguucugaagaaga

SEQ ID NO: 3143197 - RNA, 23 nt, Human
uuagaugcaguucugaagaagau

SEQ ID NO: 3143198 - RNA, 20 nt, Human
auaauuggauuuccuaauac

SEQ ID NO: 3143199 - RNA, 18 nt, Human
auaauuggauuuccuaau

SEQ ID NO: 3143200 - RNA, 17 nt, Human
auaauuggauuuccuaa

SEQ ID NO: 3143201 - RNA, 16 nt, Human
auaauuggauuuccua

SEQ ID NO: 3143202 - RNA, 18 nt, Human
uuagcaggaagcugugag

SEQ ID NO: 3143203 - RNA, 18 nt, Human
uuaccuaagauuacaaau

SEQ ID NO: 3143204 - RNA, 14 nt, Human
uuaccuaagauuac

SEQ ID NO: 3143205 - RNA, 19 nt, Human
auaaaugugccuucauuuu

SEQ ID NO: 3143206 - RNA, 12 nt, Human
auaacuggaaac

SEQ ID NO: 3143207 - RNA, 12 nt, Human
aguuuucugaga

SEQ ID NO: 3143208 - RNA, 13 nt, Human
aguuuucugagaa

SEQ ID NO: 3143209 - RNA, 14 nt, Human
aguuuucugagaaa

SEQ ID NO: 3143210 - RNA, 17 nt, Human
aguuuucugagaaagac

SEQ ID NO: 3143211 - RNA, 14 nt, Human
auaaauaaaaauaa

SEQ ID NO: 3143212 - RNA, 15 nt, Human
auaaacucauuucua

SEQ ID NO: 3143213 - RNA, 14 nt, Human
aguucagagcugcc

SEQ ID NO: 3143214 - RNA, 15 nt, Human
aguucagagcugccc

SEQ ID NO: 3143215 - RNA, 16 nt, Human
aguucagagcugcccu

SEQ ID NO: 3143216 - RNA, 17 nt, Human
aguucagagcugcccuc

SEQ ID NO: 3143217 - RNA, 18 nt, Human
aguucagagcugcccucu

SEQ ID NO: 3143218 - RNA, 20 nt, Human
aguucggugagcuacaaaug

SEQ ID NO: 3143219 - RNA, 19 nt, Human
aguuauggcuauaggugcu

SEQ ID NO: 3143220 - RNA, 20 nt, Human
aguuauuauauuuacaaaug

SEQ ID NO: 3143221 - RNA, 22 nt, Human
aguuaccuuauaguuacugugu

SEQ ID NO: 3143222 - RNA, 21 nt, Human
aguuaccuuauaguuacugug

SEQ ID NO: 3143223 - RNA, 20 nt, Human
aguuaccuuauaguuacugu

SEQ ID NO: 3143224 - RNA, 17 nt, Human
aguuaccuuauaguuac

SEQ ID NO: 3143225 - RNA, 16 nt, Human
aguuaccuuauaguua

SEQ ID NO: 3143226 - RNA, 18 nt, Human
uuaaaaaagaaacauuug

SEQ ID NO: 3143227 - RNA, 15 nt, Human
uuaaaaaagaaacau

SEQ ID NO: 3143228 - RNA, 22 nt, Human
aguugcauagguuuaauaauuu

SEQ ID NO: 3143229 - RNA, 20 nt, Human
uuaaaaaugguuuaaauggu

SEQ ID NO: 3143230 - RNA, 12 nt, Human
aguuuggccaga

SEQ ID NO: 3143231 - RNA, 22 nt, Human
uuaaauucccguuuugucacuu

SEQ ID NO: 3143232 - RNA, 19 nt, Human
uuaaauucccguuuuguca

SEQ ID NO: 3143233 - RNA, 16 nt, Human
aguuugguuucuagca

SEQ ID NO: 3143234 - RNA, 11 nt, Human
aguuuggccag

SEQ ID NO: 3143235 - RNA, 14 nt, Human
aguuuggccagaag

SEQ ID NO: 3143236 - RNA, 13 nt, Human
aguuuggccagaa

SEQ ID NO: 3143237 - RNA, 20 nt, Human
uguuuuauaauuuugugaag

SEQ ID NO: 3143238 - RNA, 13 nt, Human
uguuuuauaauuu

SEQ ID NO: 3143239 - RNA, 14 nt, Human
uguuuuaggagcau

SEQ ID NO: 3143240 - RNA, 15 nt, Human
uguuugcuaagcauu

SEQ ID NO: 3143241 - RNA, 19 nt, Human
uguuugcuaagcauuccaa

SEQ ID NO: 3143242 - RNA, 21 nt, Human
aguugauaugccuuuucccaa

SEQ ID NO: 3143243 - RNA, 14 nt, Human
aguucugaagaaga

SEQ ID NO: 3143244 - RNA, 13 nt, Human
aguucugaagaag

SEQ ID NO: 3143245 - RNA, 15 nt, Human
aguucugaagaagau

SEQ ID NO: 3143246 - RNA, 23 nt, Human
aguucugugguuucauguuaguu

SEQ ID NO: 3143247 - RNA, 22 nt, Human
aguucugugguuucauguuagu

SEQ ID NO: 3143248 - RNA, 19 nt, Human
aguucugugguuucauguu

SEQ ID NO: 3143249 - RNA, 16 nt, Human
aguucugugguuucau

SEQ ID NO: 3143250 - RNA, 19 nt, Human
agcugcccucuccugggca

SEQ ID NO: 3143251 - RNA, 20 nt, Human
agcugcccucuccugggcag

SEQ ID NO: 3143252 - RNA, 17 nt, Human
agcugcccucuccuggg

SEQ ID NO: 3143253 - RNA, 18 nt, Human
agcugcccucuccugggc

SEQ ID NO: 3143254 - RNA, 16 nt, Human
agcugcccucuccugg

SEQ ID NO: 3143255 - RNA, 15 nt, Human
ugccucaccccuugc

SEQ ID NO: 3143256 - RNA, 11 nt, Human
ugccuccccuc

SEQ ID NO: 3143257 - RNA, 12 nt, Human
ugccuccccucc

SEQ ID NO: 3143258 - RNA, 13 nt, Human
ugccuccccuccu

SEQ ID NO: 3143259 - RNA, 14 nt, Human
ugccuccccuccuc

SEQ ID NO: 3143260 - RNA, 15 nt, Human
ugccuccccuccucu

SEQ ID NO: 3143261 - RNA, 18 nt, Human
ugccucagaaaacaagga

SEQ ID NO: 3143262 - RNA, 22 nt, Human
ugcccucuccugggcagcugcc

SEQ ID NO: 3143263 - RNA, 23 nt, Human
ugcccucuccugggcagcugccu

SEQ ID NO: 3143264 - RNA, 16 nt, Human
ugcccucuccugggca

SEQ ID NO: 3143265 - RNA, 17 nt, Human
ugcccucuccugggcag

SEQ ID NO: 3143266 - RNA, 18 nt, Human
ugcccucuccugggcagc

SEQ ID NO: 3143267 - RNA, 20 nt, Human
ugcccucuccugggcagcug

SEQ ID NO: 3143268 - RNA, 13 nt, Human
ugcccucuccugg

SEQ ID NO: 3143269 - RNA, 14 nt, Human
ugcccucuccuggg

SEQ ID NO: 3143270 - RNA, 15 nt, Human
ugcccucuccugggc

SEQ ID NO: 3143271 - RNA, 12 nt, Human
ugcccucuccug

SEQ ID NO: 3143272 - RNA, 23 nt, Human
agcucugcccauccugccccuga

SEQ ID NO: 3143273 - RNA, 20 nt, Human
agccuuccccuugcccaggg

SEQ ID NO: 3143274 - RNA, 22 nt, Human
agccuuccccuugcccagggcu

SEQ ID NO: 3143275 - RNA, 22 nt, Human
ugcagcucuccccuucucugua

SEQ ID NO: 3143276 - RNA, 20 nt, Human
ugcagcucuccccuucucug

SEQ ID NO: 3143277 - RNA, 11 nt, Human
ugccagccagc

SEQ ID NO: 3143278 - RNA, 12 nt, Human
ugccagccagca

SEQ ID NO: 3143279 - RNA, 19 nt, Human
agcuauggugucauaggcu

SEQ ID NO: 3143280 - RNA, 22 nt, Human
ugccauuuaaagcuuauuaaaa

SEQ ID NO: 3143281 - RNA, 16 nt, Human
ugccccauucaacauc

SEQ ID NO: 3143282 - RNA, 18 nt, Human
ugccccccuugccagaca

SEQ ID NO: 3143283 - RNA, 14 nt, Human
agccucauccgagg

SEQ ID NO: 3143284 - RNA, 17 nt, Human
agccucauccgaggcag

SEQ ID NO: 3143285 - RNA, 15 nt, Human
ugcagaagacaguau

SEQ ID NO: 3143286 - RNA, 14 nt, Human
ugcagaagacagua

SEQ ID NO: 3143287 - RNA, 11 nt, Human
agcccugucuc

SEQ ID NO: 3143288 - RNA, 18 nt, Human
agcccugucuccucucuc

SEQ ID NO: 3143289 - RNA, 20 nt, Human
ugauuuagcaggaagcugug

SEQ ID NO: 3143290 - RNA, 17 nt, Human
ugauuuagcaggaagcu

SEQ ID NO: 3143291 - RNA, 13 nt, Human
agccagcucucag

SEQ ID NO: 3143292 - RNA, 14 nt, Human
agccagcucucagc

SEQ ID NO: 3143293 - RNA, 15 nt, Human
agccagcucucagcc

SEQ ID NO: 3143294 - RNA, 19 nt, Human
ugaugggaaagcauuguaa

SEQ ID NO: 3143295 - RNA, 14 nt, Human
ugaugggaaagcau

SEQ ID NO: 3143296 - RNA, 11 nt, Human
ugaugaagaag

SEQ ID NO: 3143297 - RNA, 23 nt, Human
ugauuaaguaaugauaacuggaa

SEQ ID NO: 3143298 - RNA, 18 nt, Human
ugauuaaguaaugauaac

SEQ ID NO: 3143299 - RNA, 15 nt, Human
agccagcaguucaga

SEQ ID NO: 3143300 - RNA, 17 nt, Human
agccagcaguucagagc

SEQ ID NO: 3143301 - RNA, 19 nt, Human
agccagcaguucagagcug

SEQ ID NO: 3143302 - RNA, 19 nt, Human
agccagacuggcacaguuu

SEQ ID NO: 3143303 - RNA, 22 nt, Human
agccagcaguucagagcugccc

SEQ ID NO: 3143304 - RNA, 20 nt, Human
agccagcaguucagagcugc

SEQ ID NO: 3143305 - RNA, 21 nt, Human
agccagcaguucagagcugcc

SEQ ID NO: 3143306 - RNA, 20 nt, Human
uggacccagggaugacaugu

SEQ ID NO: 3143307 - RNA, 14 nt, Human
aggcaacugaggca

SEQ ID NO: 3143308 - RNA, 15 nt, Human
aggcaacugaggcag

SEQ ID NO: 3143309 - RNA, 16 nt, Human
aggcaacugaggcaga

SEQ ID NO: 3143310 - RNA, 18 nt, Human
uggaauuggagcucgugg

SEQ ID NO: 3143311 - RNA, 17 nt, Human
aggcaacugaggcagac

SEQ ID NO: 3143312 - RNA, 19 nt, Human
aggcaacugaggcagacag

SEQ ID NO: 3143313 - RNA, 14 nt, Human
aggaguuuggccag

SEQ ID NO: 3143314 - RNA, 13 nt, Human
aggaguuuggcca

SEQ ID NO: 3143315 - RNA, 18 nt, Human
aggaguuuggccagaagu

SEQ ID NO: 3143316 - RNA, 17 nt, Human
aggaguuuggccagaag

SEQ ID NO: 3143317 - RNA, 16 nt, Human
aggaguuuggccagaa

SEQ ID NO: 3143318 - RNA, 15 nt, Human
aggaguuuggccaga

SEQ ID NO: 3143319 - RNA, 11 nt, Human
aggagaaacug

SEQ ID NO: 3143320 - RNA, 17 nt, Human
aggagccaccaguucuc

SEQ ID NO: 3143321 - RNA, 15 nt, Human
aggagccaccaguuc

SEQ ID NO: 3143322 - RNA, 14 nt, Human
aggagccaccaguu

SEQ ID NO: 3143323 - RNA, 15 nt, Human
ugcuugccaucccuc

SEQ ID NO: 3143324 - RNA, 16 nt, Human
ugcuugccaucccucc

SEQ ID NO: 3143325 - RNA, 12 nt, Human
ugcuuggcccag

SEQ ID NO: 3143326 - RNA, 16 nt, Human
ugcuuggcccaggagu

SEQ ID NO: 3143327 - RNA, 15 nt, Human
ugcuuggcccaggag

SEQ ID NO: 3143328 - RNA, 23 nt, Human
ugcuuggcccaggaguuuggcca

SEQ ID NO: 3143329 - RNA, 18 nt, Human
ugcuuggcccaggaguuu

SEQ ID NO: 3143330 - RNA, 17 nt, Human
ugcuuuuaaaaaaaaau

SEQ ID NO: 3143331 - RNA, 18 nt, Human
aggaagcugugagagcag

SEQ ID NO: 3143332 - RNA, 23 nt, Human
aggaauugacccacaagaaauga

SEQ ID NO: 3143333 - RNA, 11 nt, Human
aggaauuuaaa

SEQ ID NO: 3143334 - RNA, 13 nt, Human
aggaauuucuuaa

SEQ ID NO: 3143335 - RNA, 23 nt, Human
ugcuguauuuuaaaagaaugauu

SEQ ID NO: 3143336 - RNA, 14 nt, Human
ugcuggagcucugc

SEQ ID NO: 3143337 - RNA, 13 nt, Human
ugcuggagcucug

SEQ ID NO: 3143338 - RNA, 23 nt, Human
aggaauuucuuaacuucuugcuu

SEQ ID NO: 3143339 - RNA, 19 nt, Human
aggaauuucuuaacuucuu

SEQ ID NO: 3143340 - RNA, 15 nt, Human
aggaauuucuuaacu

SEQ ID NO: 3143341 - RNA, 14 nt, Human
aggacacugauaug

SEQ ID NO: 3143342 - RNA, 23 nt, Human
aggacagcccuucuuuccacaga

SEQ ID NO: 3143343 - RNA, 18 nt, Human
uggacgagaaaacaauaa

SEQ ID NO: 3143344 - RNA, 22 nt, Human
uggcacaguuuucugagaaaga

SEQ ID NO: 3143345 - RNA, 20 nt, Human
uggcacaguuuucugagaaa

SEQ ID NO: 3143346 - RNA, 13 nt, Human
uggcugcuagcac

SEQ ID NO: 3143347 - RNA, 14 nt, Human
uggcugcuagcacu

SEQ ID NO: 3143348 - RNA, 15 nt, Human
uggcugcuagcacuu

SEQ ID NO: 3143349 - RNA, 20 nt, Human
ugggaaagggauuuucagcc

SEQ ID NO: 3143350 - RNA, 21 nt, Human
ugggaaagcauuguaaaugug

SEQ ID NO: 3143351 - RNA, 14 nt, Human
augauaacuggaaa

SEQ ID NO: 3143352 - RNA, 23 nt, Human
augagagacacacugaagaagca

SEQ ID NO: 3143353 - RNA, 18 nt, Human
uugugaagcaaaauuuuu

SEQ ID NO: 3143354 - RNA, 20 nt, Human
uuuaaaaaagaaacauuugg

SEQ ID NO: 3143355 - RNA, 22 nt, Human
uuguuuuuccuuguauuuaaau

SEQ ID NO: 3143356 - RNA, 13 nt, Human
uuguuuuuccuug

SEQ ID NO: 3143357 - RNA, 21 nt, Human
uuguuuuuccuuguauuuaaa

SEQ ID NO: 3143358 - RNA, 12 nt, Human
uugcucauggaa

SEQ ID NO: 3143359 - RNA, 11 nt, Human
uugcucaugga

SEQ ID NO: 3143360 - RNA, 23 nt, Human
uugcuaccaguauuuagaagcca

SEQ ID NO: 3143361 - RNA, 22 nt, Human
uugcuaccaguauuuagaagcc

SEQ ID NO: 3143362 - RNA, 20 nt, Human
uugcuaccaguauuuagaag

SEQ ID NO: 3143363 - RNA, 16 nt, Human
uugcuaccaguauuua

SEQ ID NO: 3143364 - RNA, 15 nt, Human
uugcuaccaguauuu

SEQ ID NO: 3143365 - RNA, 12 nt, Human
uugcuaccagua

SEQ ID NO: 3143366 - RNA, 20 nt, Human
augaaauauuauguuaaaac

SEQ ID NO: 3143367 - RNA, 21 nt, Human
augaaauauuauguuaaaacu

SEQ ID NO: 3143368 - RNA, 23 nt, Human
uuguaguguuggagaagaacuga

SEQ ID NO: 3143369 - RNA, 19 nt, Human
uuguauaaaauaauuuuua

SEQ ID NO: 3143370 - RNA, 13 nt, Human
uuguauaaaauaa

SEQ ID NO: 3143371 - RNA, 20 nt, Human
uuguauaauuggauuuccua

SEQ ID NO: 3143372 - RNA, 12 nt, Human
uuguauaauugg

SEQ ID NO: 3143373 - RNA, 11 nt, Human
uuguauaauug

SEQ ID NO: 3143374 - RNA, 21 nt, Human
uuguauaauuggauuuccuaa

SEQ ID NO: 3143375 - RNA, 21 nt, Human
augaauuaguuuuauaugcuu

SEQ ID NO: 3143376 - RNA, 22 nt, Human
augaauuacauuuguauaaaau

SEQ ID NO: 3143377 - RNA, 23 nt, Human
augaauuaguuuuauaugcuucu

SEQ ID NO: 3143378 - RNA, 17 nt, Human
augaauuacauuuguau

SEQ ID NO: 3143379 - RNA, 19 nt, Human
augaauuacauuuguauaa

SEQ ID NO: 3143380 - RNA, 18 nt, Human
augaauuacauuuguaua

SEQ ID NO: 3143381 - RNA, 20 nt, Human
uuucuaugaaauauuauguu

SEQ ID NO: 3143382 - RNA, 14 nt, Human
uuucuaugaaauau

SEQ ID NO: 3143383 - RNA, 13 nt, Human
uuucuaugaaaua

SEQ ID NO: 3143384 - RNA, 14 nt, Human
uuucugcaucagcu

SEQ ID NO: 3143385 - RNA, 14 nt, Human
uuugaaauauugac

SEQ ID NO: 3143386 - RNA, 11 nt, Human
uuugaaaaugg

SEQ ID NO: 3143387 - RNA, 16 nt, Human
auggcuauaggugcua

SEQ ID NO: 3143388 - RNA, 19 nt, Human
auggcuauaggugcuacaa

SEQ ID NO: 3143389 - RNA, 21 nt, Human
augggacauuugcucauggaa

SEQ ID NO: 3143390 - RNA, 22 nt, Human
augggacauuugcucauggaau

SEQ ID NO: 3143391 - RNA, 21 nt, Human
auggcuauaggugcuacaaaa

SEQ ID NO: 3143392 - RNA, 17 nt, Human
auggaauuucucccagu

SEQ ID NO: 3143393 - RNA, 15 nt, Human
auggcuauaggugcu

SEQ ID NO: 3143394 - RNA, 13 nt, Human
augcuaagugaaa

SEQ ID NO: 3143395 - RNA, 24 nt, Human
uuuaaagcuuauuaaaacucauuu

SEQ ID NO: 3143396 - RNA, 12 nt, Human
uuuaaagaaagu

SEQ ID NO: 3143397 - RNA, 16 nt, Human
uuuauuacuguaagaa

SEQ ID NO: 3143398 - RNA, 17 nt, Human
uuuauaugcuucuguuu

SEQ ID NO: 3143399 - RNA, 19 nt, Human
uuuauuacuguaagaaaau

SEQ ID NO: 3143400 - RNA, 14 nt, Human
augcuguauuuuaa

SEQ ID NO: 3143401 - RNA, 23 nt, Human
augcugucuacacuaagagagaa

SEQ ID NO: 3143402 - RNA, 16 nt, Human
uuuauuuuaauaaugu

SEQ ID NO: 3143403 - RNA, 16 nt, Human
auggaacauaaaauac

SEQ ID NO: 3143404 - RNA, 23 nt, Human
auggaauuggagcucgugggaca

SEQ ID NO: 3143405 - RNA, 18 nt, Human
auccugaggcuccacuug

SEQ ID NO: 3143406 - RNA, 16 nt, Human
auccugaggcuccacu

SEQ ID NO: 3143407 - RNA, 13 nt, Human
auccugaggcucc

SEQ ID NO: 3143408 - RNA, 11 nt, Human
auccugaggcu

SEQ ID NO: 3143409 - RNA, 16 nt, Human
auccugcaauuccacu

SEQ ID NO: 3143410 - RNA, 22 nt, Human
auccugaggcuccacuuggucu

SEQ ID NO: 3143411 - RNA, 13 nt, Human
auccugccccuga

SEQ ID NO: 3143412 - RNA, 23 nt, Human
uugacacugcucuaacagcccuc

SEQ ID NO: 3143413 - RNA, 19 nt, Human
uugacacuuaaaaaugguu

SEQ ID NO: 3143414 - RNA, 17 nt, Human
uugacacuuaaaaaugg

SEQ ID NO: 3143415 - RNA, 22 nt, Human
uugacacugcucuaacagcccu

SEQ ID NO: 3143416 - RNA, 16 nt, Human
uugacacugcucuaac

SEQ ID NO: 3143417 - RNA, 15 nt, Human
uugacacugcucuaa

SEQ ID NO: 3143418 - RNA, 14 nt, Human
uugacacugcucua

SEQ ID NO: 3143419 - RNA, 14 nt, Human
uugaaggaugcugu

SEQ ID NO: 3143420 - RNA, 16 nt, Human
uugaaggaugcugucu

SEQ ID NO: 3143421 - RNA, 17 nt, Human
uugaagggaaauuucag

SEQ ID NO: 3143422 - RNA, 23 nt, Human
aucacuugaacccgggaggcaga

SEQ ID NO: 3143423 - RNA, 14 nt, Human
uucugaagaagaug

SEQ ID NO: 3143424 - RNA, 18 nt, Human
uucuccucacuguaucca

SEQ ID NO: 3143425 - RNA, 14 nt, Human
aucccucccuccac

SEQ ID NO: 3143426 - RNA, 16 nt, Human
aucccucccuccaccu

SEQ ID NO: 3143427 - RNA, 17 nt, Human
aucccucccuccaccuc

SEQ ID NO: 3143428 - RNA, 18 nt, Human
aucccucccuccaccucc

SEQ ID NO: 3143429 - RNA, 20 nt, Human
aucccucccuccaccucccu

SEQ ID NO: 3143430 - RNA, 19 nt, Human
auccagguucccucccaga

SEQ ID NO: 3143431 - RNA, 15 nt, Human
auccagguucccucc

SEQ ID NO: 3143432 - RNA, 16 nt, Human
uucuguuuuauaauuu

SEQ ID NO: 3143433 - RNA, 17 nt, Human
uucuguuuuauaauuuu

SEQ ID NO: 3143434 - RNA, 17 nt, Human
uucagcgguuuauauaa

SEQ ID NO: 3143435 - RNA, 15 nt, Human
uucaucaaugaauga

SEQ ID NO: 3143436 - RNA, 13 nt, Human
auauaugcuaagu

SEQ ID NO: 3143437 - RNA, 16 nt, Human
uucauugacuaucaaa

SEQ ID NO: 3143438 - RNA, 14 nt, Human
uucauuaucucaaa

SEQ ID NO: 3143439 - RNA, 18 nt, Human
uuccaacuacuaauagaa

SEQ ID NO: 3143440 - RNA, 23 nt, Human
auauguaccuaacgaaguauccu

SEQ ID NO: 3143441 - RNA, 13 nt, Human
auaugcaaagcac

SEQ ID NO: 3143442 - RNA, 14 nt, Human
auaugcaaagcacu

SEQ ID NO: 3143443 - RNA, 13 nt, Human
auauuuacaaaug

SEQ ID NO: 3143444 - RNA, 14 nt, Human
auauuguuugcuaa

SEQ ID NO: 3143445 - RNA, 15 nt, Human
aucaaauaugcaaag

SEQ ID NO: 3143446 - RNA, 16 nt, Human
aucaaggguacacugc

SEQ ID NO: 3143447 - RNA, 16 nt, Human
aucaaauaugcaaagc

SEQ ID NO: 3143448 - RNA, 17 nt, Human
aucaaauaugcaaagca

SEQ ID NO: 3143449 - RNA, 18 nt, Human
aucaaauaugcaaagcac

SEQ ID NO: 3143450 - RNA, 14 nt, Human
aucaauuuuucuua

SEQ ID NO: 3143451 - RNA, 13 nt, Human
aucaauuuaaaaa

SEQ ID NO: 3143452 - RNA, 21 nt, Human
aucaaggguacacugccuucu

SEQ ID NO: 3143453 - RNA, 14 nt, Human
auuugaaauauuga

SEQ ID NO: 3143454 - RNA, 12 nt, Human
auuucauuucuu

SEQ ID NO: 3143455 - RNA, 20 nt, Human
auuuauuuuaauaauguuuc

SEQ ID NO: 3143456 - RNA, 19 nt, Human
auuuauuuuaauaauguuu

SEQ ID NO: 3143457 - RNA, 17 nt, Human
auuuauuuuaauaaugu

SEQ ID NO: 3143458 - RNA, 13 nt, Human
auuuagauguaua

SEQ ID NO: 3143459 - RNA, 12 nt, Human
auuuagaagcca

SEQ ID NO: 3143460 - RNA, 23 nt, Human
auuuagaagccaacuaugauuau

SEQ ID NO: 3143461 - RNA, 22 nt, Human
auuuagaagccaacuaugauua

SEQ ID NO: 3143462 - RNA, 21 nt, Human
auuuagaagccaacuaugauu

SEQ ID NO: 3143463 - RNA, 13 nt, Human
auuuagaagccaa

SEQ ID NO: 3143464 - RNA, 15 nt, Human
auuguauuacaaauc

SEQ ID NO: 3143465 - RNA, 18 nt, Human
auugacccacaagaaaug

SEQ ID NO: 3143466 - RNA, 22 nt, Human
auuuucaguuauuauauuuaca

SEQ ID NO: 3143467 - RNA, 17 nt, Human
auuuuaaaagaaugauu

SEQ ID NO: 3143468 - RNA, 18 nt, Human
auuuguauaaaauaauuu

SEQ ID NO: 3143469 - RNA, 15 nt, Human
auuuguauaaaauaa

SEQ ID NO: 3143470 - RNA, 19 nt, Human
auuuguauaaaauaauuuu

SEQ ID NO: 3143471 - RNA, 22 nt, Human
auuuuaaaagaaugauuaugaa

SEQ ID NO: 3143472 - RNA, 18 nt, Human
auuuuaaaagaaugauua

SEQ ID NO: 3143473 - RNA, 17 nt, Human
uuuuuauauuugaaaua

SEQ ID NO: 3143474 - RNA, 19 nt, Human
uuuuuauauuugaaauauu

SEQ ID NO: 3143475 - RNA, 20 nt, Human
auuagugccacuuaauguau

SEQ ID NO: 3143476 - RNA, 19 nt, Human
auuagugccacuuaaugua

SEQ ID NO: 3143477 - RNA, 18 nt, Human
auuagugccacuuaaugu

SEQ ID NO: 3143478 - RNA, 16 nt, Human
auuagugccacuuaau

SEQ ID NO: 3143479 - RNA, 22 nt, Human
auuagugccacuuaauguaugu

SEQ ID NO: 3143480 - RNA, 21 nt, Human
auuagugccacuuaauguaug

SEQ ID NO: 3143481 - RNA, 19 nt, Human
uuuuugugaaaagcuccau

SEQ ID NO: 3143482 - RNA, 23 nt, Human
auuaaguaaugauaacuggaaac

SEQ ID NO: 3143483 - RNA, 21 nt, Human
auuaaguaaugauaacuggaa

SEQ ID NO: 3143484 - RNA, 15 nt, Human
auuacagugggugcc

SEQ ID NO: 3143485 - RNA, 18 nt, Human
auuacauuuguauaaaau

SEQ ID NO: 3143486 - RNA, 17 nt, Human
auuacauuuguauaaaa

SEQ ID NO: 3143487 - RNA, 12 nt, Human
auuaccagggac

SEQ ID NO: 3143488 - RNA, 16 nt, Human
auuacauuuguauaaa

SEQ ID NO: 3143489 - RNA, 14 nt, Human
uuuuaauaauguuu

SEQ ID NO: 3143490 - RNA, 13 nt, Human
uuuuaauaauguu

SEQ ID NO: 3143491 - RNA, 12 nt, Human
uuuuaauaaugu

SEQ ID NO: 3143492 - RNA, 16 nt, Human
uuuuaauaauguuuca

SEQ ID NO: 3143493 - RNA, 19 nt, Human
augugcuaguaauuggaaa

SEQ ID NO: 3143494 - RNA, 15 nt, Human
auguuagcaaagagu

SEQ ID NO: 3143495 - RNA, 18 nt, Human
auguucaucaaugaauga

SEQ ID NO: 3143496 - RNA, 15 nt, Human
uuuucugagaaagac

SEQ ID NO: 3143497 - RNA, 18 nt, Human
uuuucugagaaagacuau

SEQ ID NO: 3143498 - RNA, 14 nt, Human
uuuucucuaggaaa

SEQ ID NO: 3143499 - RNA, 13 nt, Human
uuuucauuuaucu

SEQ ID NO: 3143500 - RNA, 21 nt, Human
uuuucuccucacuguauccag

SEQ ID NO: 3143501 - RNA, 21 nt, Human
auguuuucaggcuagauguau

SEQ ID NO: 3143502 - RNA, 17 nt, Human
auguuuucaggcuagau

SEQ ID NO: 3143503 - RNA, 15 nt, Human
auguuuucaggcuag

SEQ ID NO: 3143504 - RNA, 21 nt, Human
uuuucuguaccaguuaauuuu

SEQ ID NO: 3143505 - RNA, 14 nt, Human
uuuucuguaccagu

SEQ ID NO: 3143506 - RNA, 21 nt, Human
ugagagcaguuugguuucuag

SEQ ID NO: 3143507 - RNA, 23 nt, Human
ugagagcaguuugguuucuagca

SEQ ID NO: 3143508 - RNA, 22 nt, Human
ugagagacacacugaagaagca

SEQ ID NO: 3143509 - RNA, 21 nt, Human
ugagagacacacugaagaagc

SEQ ID NO: 3143510 - RNA, 20 nt, Human
ugagaugcuagaacucccuu

SEQ ID NO: 3143511 - RNA, 13 nt, Human
ugagaugugaaca

SEQ ID NO: 3143512 - RNA, 18 nt, Human
ugagaugugaacacauca

SEQ ID NO: 3143513 - RNA, 19 nt, Human
ugagaugugaacacaucag

SEQ ID NO: 3143514 - RNA, 24 nt, Human
ugagaugugaacacaucagcuugc

SEQ ID NO: 3143515 - RNA, 20 nt, Human
ugagacucugucucagucca

SEQ ID NO: 3143516 - RNA, 20 nt, Human
ugagagacacacugaagaag

SEQ ID NO: 3143517 - RNA, 19 nt, Human
ugagagacacacugaagaa

SEQ ID NO: 3143518 - RNA, 17 nt, Human
ugagagacacacugaag

SEQ ID NO: 3143519 - RNA, 16 nt, Human
ugagagacacacugaa

SEQ ID NO: 3143520 - RNA, 16 nt, Human
agauuuuccugaaaac

SEQ ID NO: 3143521 - RNA, 14 nt, Human
agauuuuccugaaa

SEQ ID NO: 3143522 - RNA, 15 nt, Human
agauuuuccugaaaa

SEQ ID NO: 3143523 - RNA, 20 nt, Human
agcaagggugaugggaaagc

SEQ ID NO: 3143524 - RNA, 22 nt, Human
agcaagggugaugggaaagcau

SEQ ID NO: 3143525 - RNA, 16 nt, Human
agcaagggugauggga

SEQ ID NO: 3143526 - RNA, 13 nt, Human
ugacacugcucua

SEQ ID NO: 3143527 - RNA, 16 nt, Human
ugacacugcucuaaca

SEQ ID NO: 3143528 - RNA, 15 nt, Human
ugacacugcucuaac

SEQ ID NO: 3143529 - RNA, 22 nt, Human
ugacacugcucuaacagcccuc

SEQ ID NO: 3143530 - RNA, 21 nt, Human
ugacacugcucuaacagcccu

SEQ ID NO: 3143531 - RNA, 19 nt, Human
ugacacugcucuaacagcc

SEQ ID NO: 3143532 - RNA, 15 nt, Human
ugacacuuaaaaaug

SEQ ID NO: 3143533 - RNA, 13 nt, Human
agauccuggaaau

SEQ ID NO: 3143534 - RNA, 19 nt, Human
agaugcuagaacucccuuu

SEQ ID NO: 3143535 - RNA, 21 nt, Human
agaugcaguucugaagaagau

SEQ ID NO: 3143536 - RNA, 20 nt, Human
agaugcaguucugaagaaga

SEQ ID NO: 3143537 - RNA, 16 nt, Human
agaugcacaugagcug

SEQ ID NO: 3143538 - RNA, 13 nt, Human
agaugcacaugag

SEQ ID NO: 3143539 - RNA, 15 nt, Human
agaugcuagaacucc

SEQ ID NO: 3143540 - RNA, 21 nt, Human
agaugcuagaacucccuuuca

SEQ ID NO: 3143541 - RNA, 14 nt, Human
agauguaguauuuu

SEQ ID NO: 3143542 - RNA, 20 nt, Human
agauuacaaaucagaaguca

SEQ ID NO: 3143543 - RNA, 21 nt, Human
agauugugccccugcacucca

SEQ ID NO: 3143544 - RNA, 16 nt, Human
ugacuaucaaacugaa

SEQ ID NO: 3143545 - RNA, 22 nt, Human
ugacuaucaaacugaagccaga

SEQ ID NO: 3143546 - RNA, 20 nt, Human
ugacuauugaaguugcagau

SEQ ID NO: 3143547 - RNA, 22 nt, Human
agaugugaacacaucagcuugc

SEQ ID NO: 3143548 - RNA, 22 nt, Human
agauguauguacuucaugcugu

SEQ ID NO: 3143549 - RNA, 17 nt, Human
agaugugaacacaucag

SEQ ID NO: 3143550 - RNA, 17 nt, Human
ugaaagaggaaugaagu

SEQ ID NO: 3143551 - RNA, 18 nt, Human
ugaaagaggaaugaagua

SEQ ID NO: 3143552 - RNA, 13 nt, Human
ugaaagaaaauaa

SEQ ID NO: 3143553 - RNA, 22 nt, Human
ugaaacugagaugugaacacau

SEQ ID NO: 3143554 - RNA, 21 nt, Human
ugaaaauauuuguaucacaaa

SEQ ID NO: 3143555 - RNA, 22 nt, Human
ugaaaauauuuguaucacaaau

SEQ ID NO: 3143556 - RNA, 20 nt, Human
ugaaaaucuuauaauuuaaa

SEQ ID NO: 3143557 - RNA, 16 nt, Human
ugaaaaugggcucaac

SEQ ID NO: 3143558 - RNA, 17 nt, Human
ugaaaauauuuguauca

SEQ ID NO: 3143559 - RNA, 16 nt, Human
agagacacacugaaga

SEQ ID NO: 3143560 - RNA, 14 nt, Human
agagacagaaagca

SEQ ID NO: 3143561 - RNA, 18 nt, Human
agacaggaccugacuauu

SEQ ID NO: 3143562 - RNA, 22 nt, Human
agacuccaaagaaauguaaggg

SEQ ID NO: 3143563 - RNA, 20 nt, Human
agacuggcacaguuuucuga

SEQ ID NO: 3143564 - RNA, 21 nt, Human
agacuggcacaguuuucugag

SEQ ID NO: 3143565 - RNA, 18 nt, Human
agacuggcacaguuuucu

SEQ ID NO: 3143566 - RNA, 23 nt, Human
agacuggcacaguuuucugagaa

SEQ ID NO: 3143567 - RNA, 15 nt, Human
agagcugcccucucc

SEQ ID NO: 3143568 - RNA, 19 nt, Human
agagcugcccucuccuggg

SEQ ID NO: 3143569 - RNA, 20 nt, Human
agagcugcccucuccugggc

SEQ ID NO: 3143570 - RNA, 16 nt, Human
agagcugcccucuccu

SEQ ID NO: 3143571 - RNA, 17 nt, Human
agagcugcccucuccug

SEQ ID NO: 3143572 - RNA, 18 nt, Human
agagcugcccucuccugg

SEQ ID NO: 3143573 - RNA, 13 nt, Human
ugaacaaauuuac

SEQ ID NO: 3143574 - RNA, 18 nt, Human
ugaacccgggaggcagag

SEQ ID NO: 3143575 - RNA, 22 nt, Human
ugaacccauauuuguacaccaa

SEQ ID NO: 3143576 - RNA, 22 nt, Human
ugaagaagcaccaaucaugaau

SEQ ID NO: 3143577 - RNA, 17 nt, Human
ugaaguacucauacaug

SEQ ID NO: 3143578 - RNA, 20 nt, Human
ugaagauuuaccacuugugu

SEQ ID NO: 3143579 - RNA, 17 nt, Human
ugaagauuuaccacuug

SEQ ID NO: 3143580 - RNA, 18 nt, Human
agagcuguucacagccag

SEQ ID NO: 3143581 - RNA, 14 nt, Human
agaagaacugaaau

SEQ ID NO: 3143582 - RNA, 13 nt, Human
agaagaacugaaa

SEQ ID NO: 3143583 - RNA, 18 nt, Human
agaagaugguaccaccag

SEQ ID NO: 3143584 - RNA, 23 nt, Human
agaagccaacuaugauuauuaac

SEQ ID NO: 3143585 - RNA, 18 nt, Human
agaagccaacuaugauua

SEQ ID NO: 3143586 - RNA, 14 nt, Human
ucugcuugccaucc

SEQ ID NO: 3143587 - RNA, 23 nt, Human
ucugcuugccaucccucccucca

SEQ ID NO: 3143588 - RNA, 17 nt, Human
ucugcuugccaucccuc

SEQ ID NO: 3143589 - RNA, 20 nt, Human
ucugcuugccaucccucccu

SEQ ID NO: 3143590 - RNA, 16 nt, Human
ucugcuugccaucccu

SEQ ID NO: 3143591 - RNA, 15 nt, Human
ucugcagauaaacag

SEQ ID NO: 3143592 - RNA, 18 nt, Human
ucugcagauaaacaguag

SEQ ID NO: 3143593 - RNA, 14 nt, Human
agaaaugaaagcag

SEQ ID NO: 3143594 - RNA, 14 nt, Human
ucugugagaugcua

SEQ ID NO: 3143595 - RNA, 22 nt, Human
ucugugagaugcuagaacuccc

SEQ ID NO: 3143596 - RNA, 17 nt, Human
ucugugagaugcuagaa

SEQ ID NO: 3143597 - RNA, 23 nt, Human
ucugugagaugcuagaacucccu

SEQ ID NO: 3143598 - RNA, 24 nt, Human
agacagagccccacccucagaugc

SEQ ID NO: 3143599 - RNA, 22 nt, Human
agacagagccccacccucagau

SEQ ID NO: 3143600 - RNA, 12 nt, Human
agacacacauga

SEQ ID NO: 3143601 - RNA, 15 nt, Human
agaauuaacacauga

SEQ ID NO: 3143602 - RNA, 17 nt, Human
ucuaggaaauauuuauu

SEQ ID NO: 3143603 - RNA, 16 nt, Human
ucuaggaaauauuuau

SEQ ID NO: 3143604 - RNA, 15 nt, Human
acuuaauguauguua

SEQ ID NO: 3143605 - RNA, 13 nt, Human
acuuaauguaugu

SEQ ID NO: 3143606 - RNA, 16 nt, Human
acuuaauguauguuac

SEQ ID NO: 3143607 - RNA, 13 nt, Human
uccugggcagcug

SEQ ID NO: 3143608 - RNA, 12 nt, Human
uccugggcagcu

SEQ ID NO: 3143609 - RNA, 14 nt, Human
ucuaaguaaaacca

SEQ ID NO: 3143610 - RNA, 15 nt, Human
ucuaaguaaaaccac

SEQ ID NO: 3143611 - RNA, 19 nt, Human
ucuaaguaaaaccacagca

SEQ ID NO: 3143612 - RNA, 12 nt, Human
ucucaggaaauc

SEQ ID NO: 3143613 - RNA, 15 nt, Human
ucucagccaacgagu

SEQ ID NO: 3143614 - RNA, 14 nt, Human
ucucaggaaaucaa

SEQ ID NO: 3143615 - RNA, 21 nt, Human
ucucaggaaaucaaauaugca

SEQ ID NO: 3143616 - RNA, 23 nt, Human
ucucaggaaaucaaauaugcaaa

SEQ ID NO: 3143617 - RNA, 15 nt, Human
ucucauuuccaagca

SEQ ID NO: 3143618 - RNA, 17 nt, Human
ucucauggguggcacuc

SEQ ID NO: 3143619 - RNA, 15 nt, Human
acuugucaauaaaau

SEQ ID NO: 3143620 - RNA, 15 nt, Human
ucuccucacuguauc

SEQ ID NO: 3143621 - RNA, 19 nt, Human
accccagacuagauguagu

SEQ ID NO: 3143622 - RNA, 14 nt, Human
ucagcccucagaau

SEQ ID NO: 3143623 - RNA, 13 nt, Human
ucagcccucagaa

SEQ ID NO: 3143624 - RNA, 21 nt, Human
ucagccuuccccuugcccagg

SEQ ID NO: 3143625 - RNA, 22 nt, Human
ucagccuuccccuugcccaggg

SEQ ID NO: 3143626 - RNA, 23 nt, Human
ucagccuuccccuugcccagggc

SEQ ID NO: 3143627 - RNA, 17 nt, Human
ucagccugugcugcccg

SEQ ID NO: 3143628 - RNA, 14 nt, Human
ucagccuggugggc

SEQ ID NO: 3143629 - RNA, 12 nt, Human
ucagccugugcu

SEQ ID NO: 3143630 - RNA, 16 nt, Human
ucagccugugcugccc

SEQ ID NO: 3143631 - RNA, 17 nt, Human
ucagccuggugggccuc

SEQ ID NO: 3143632 - RNA, 18 nt, Human
ucagccuggugggccucc

SEQ ID NO: 3143633 - RNA, 19 nt, Human
ucagccuggugggccuccu

SEQ ID NO: 3143634 - RNA, 17 nt, Human
acccgggaggcagaggu

SEQ ID NO: 3143635 - RNA, 15 nt, Human
acccgggaggcagag

SEQ ID NO: 3143636 - RNA, 17 nt, Human
ucaguuuuugugaaaag

SEQ ID NO: 3143637 - RNA, 15 nt, Human
ucaguuuuugugaaa

SEQ ID NO: 3143638 - RNA, 14 nt, Human
ucaugcagcugugg

SEQ ID NO: 3143639 - RNA, 12 nt, Human
ucaugcagcugu

SEQ ID NO: 3143640 - RNA, 21 nt, Human
ucacaacagauuauuaccuua

SEQ ID NO: 3143641 - RNA, 16 nt, Human
ucaauucuugccaaau

SEQ ID NO: 3143642 - RNA, 23 nt, Human
ucacuugaacccgggaggcagag

SEQ ID NO: 3143643 - RNA, 11 nt, Human
accaguauuua

SEQ ID NO: 3143644 - RNA, 19 nt, Human
accaguauuuagaagccaa

SEQ ID NO: 3143645 - RNA, 18 nt, Human
accaguauuuagaagcca

SEQ ID NO: 3143646 - RNA, 14 nt, Human
accaguauuuagaa

SEQ ID NO: 3143647 - RNA, 14 nt, Human
accagucugacugu

SEQ ID NO: 3143648 - RNA, 13 nt, Human
ucaccucauggaa

SEQ ID NO: 3143649 - RNA, 12 nt, Human
ucaccucaugga

SEQ ID NO: 3143650 - RNA, 23 nt, Human
accaaaaaucucaauauuucaga

SEQ ID NO: 3143651 - RNA, 23 nt, Human
ucaaugaaugaaugaauggcuaa

SEQ ID NO: 3143652 - RNA, 15 nt, Human
ucaauauuucagaua

SEQ ID NO: 3143653 - RNA, 19 nt, Human
ucaauauuucagauaauca

SEQ ID NO: 3143654 - RNA, 22 nt, Human
ucaauaucuuuuuuuuaauaaa

SEQ ID NO: 3143655 - RNA, 23 nt, Human
acaugagguacugagagugaaca

SEQ ID NO: 3143656 - RNA, 20 nt, Human
acaugagguacugagaguga

SEQ ID NO: 3143657 - RNA, 16 nt, Human
acaugagguacugaga

SEQ ID NO: 3143658 - RNA, 16 nt, Human
acaugaaguccaagca

SEQ ID NO: 3143659 - RNA, 20 nt, Human
acaugggacauuugcucaug

SEQ ID NO: 3143660 - RNA, 15 nt, Human
acaugggacauuugc

SEQ ID NO: 3143661 - RNA, 21 nt, Human
acaugggacauuugcucaugg

SEQ ID NO: 3143662 - RNA, 14 nt, Human
acaugggacauuug

SEQ ID NO: 3143663 - RNA, 11 nt, Human
acaugggacau

SEQ ID NO: 3143664 - RNA, 18 nt, Human
ucaaauugugugaaaggu

SEQ ID NO: 3143665 - RNA, 15 nt, Human
ucaaauugugugaaa

SEQ ID NO: 3143666 - RNA, 16 nt, Human
uccuggaaaucagggu

SEQ ID NO: 3143667 - RNA, 22 nt, Human
uccugaaaacccuugccaugug

SEQ ID NO: 3143668 - RNA, 18 nt, Human
acugagagugaacaaauu

SEQ ID NO: 3143669 - RNA, 17 nt, Human
acugagaugugaacaca

SEQ ID NO: 3143670 - RNA, 22 nt, Human
acugagaugugaacacaucagc

SEQ ID NO: 3143671 - RNA, 20 nt, Human
acugacucuuaagaagacug

SEQ ID NO: 3143672 - RNA, 18 nt, Human
acugacucuuaagaagac

SEQ ID NO: 3143673 - RNA, 17 nt, Human
acugacucuuaagaaga

SEQ ID NO: 3143674 - RNA, 13 nt, Human
acugacuucuaag

SEQ ID NO: 3143675 - RNA, 15 nt, Human
acugacuucuaagua

SEQ ID NO: 3143676 - RNA, 16 nt, Human
acugacuucuaaguaa

SEQ ID NO: 3143677 - RNA, 22 nt, Human
acugacuucuaaguaaaaccac

SEQ ID NO: 3143678 - RNA, 16 nt, Human
acugacucuuaagaag

SEQ ID NO: 3143679 - RNA, 15 nt, Human
acugacucuuaagaa

SEQ ID NO: 3143680 - RNA, 14 nt, Human
acugacucuuaaga

SEQ ID NO: 3143681 - RNA, 13 nt, Human
acugacucuuaag

SEQ ID NO: 3143682 - RNA, 21 nt, Human
acucuuaagaagacugcauua

SEQ ID NO: 3143683 - RNA, 20 nt, Human
acucuuaagaagacugcauu

SEQ ID NO: 3143684 - RNA, 19 nt, Human
acuccagugagacagcucu

SEQ ID NO: 3143685 - RNA, 15 nt, Human
acuaucucauuucca

SEQ ID NO: 3143686 - RNA, 14 nt, Human
acuaucaaacugaa

SEQ ID NO: 3143687 - RNA, 19 nt, Human
acuaucaaacugaagccag

SEQ ID NO: 3143688 - RNA, 17 nt, Human
acuaucucauuuccaag

SEQ ID NO: 3143689 - RNA, 16 nt, Human
acuaucucauuuccaa

SEQ ID NO: 3143690 - RNA, 17 nt, Human
acuauauuguuugcuaa

SEQ ID NO: 3143691 - RNA, 22 nt, Human
acuauauuguuugcuaagcauu

SEQ ID NO: 3143692 - RNA, 15 nt, Human
uccauccugaggcuc

SEQ ID NO: 3143693 - RNA, 12 nt, Human
uccauccugagg

SEQ ID NO: 3143694 - RNA, 11 nt, Human
uccauccugag

SEQ ID NO: 3143695 - RNA, 18 nt, Human
acuaaacuuuuuuucugu

SEQ ID NO: 3143696 - RNA, 17 nt, Human
acuaaacuuuuuuucug

SEQ ID NO: 3143697 - RNA, 22 nt, Human
acuaaacuuuuuuucuguacca

SEQ ID NO: 3143698 - RNA, 20 nt, Human
acuaaacuuuuuuucuguac

SEQ ID NO: 3143699 - RNA, 19 nt, Human
acuaaacuuuuuuucugua

SEQ ID NO: 3143700 - RNA, 15 nt, Human
acuaauuuuaaaaug

SEQ ID NO: 3143701 - RNA, 23 nt, Human
ucccagaggagccaccaguucuc

SEQ ID NO: 3143702 - RNA, 16 nt, Human
ucccagaggagccacc

SEQ ID NO: 3143703 - RNA, 21 nt, Human
ucccagaggagccaccaguuc

SEQ ID NO: 3143704 - RNA, 20 nt, Human
ucccagaggagccaccaguu

SEQ ID NO: 3143705 - RNA, 18 nt, Human
uccagugagacagcucug

SEQ ID NO: 3143706 - RNA, 11 nt, Human
acgcucucugg

SEQ ID NO: 3143707 - RNA, 19 nt, Human
acgccugaggcaauuagac

SEQ ID NO: 3143708 - RNA, 15 nt, Human
acgccugaggcaauu

SEQ ID NO: 3143709 - RNA, 19 nt, Human
accuugaaaacuuuaugcu

SEQ ID NO: 3143710 - RNA, 18 nt, Human
accuugaacacuggggga

SEQ ID NO: 3143711 - RNA, 21 nt, Human
accuugaacacugggggaggg

SEQ ID NO: 3143712 - RNA, 20 nt, Human
accuuuuggucuggagggaa

SEQ ID NO: 3143713 - RNA, 22 nt, Human
uccacugguucuucuuggucuc

SEQ ID NO: 3143714 - RNA, 14 nt, Human
uaacuacuuuauaa

SEQ ID NO: 3143715 - RNA, 20 nt, Human
uaacgauaaaagacagugaa

SEQ ID NO: 3143716 - RNA, 23 nt, Human
uaacuacuuuauaacuaacaugu

SEQ ID NO: 3143717 - RNA, 17 nt, Human
uaacuacuuuauaacua

SEQ ID NO: 3143718 - RNA, 16 nt, Human
uaacuacuuuauaacu

SEQ ID NO: 3143719 - RNA, 13 nt, Human
uaacuucuugcuu

SEQ ID NO: 3143720 - RNA, 12 nt, Human
uaacuucuugcu

SEQ ID NO: 3143721 - RNA, 20 nt, Human
uaacuucuugcuucuuucua

SEQ ID NO: 3143722 - RNA, 19 nt, Human
uaacuucuugcuucuuucu

SEQ ID NO: 3143723 - RNA, 15 nt, Human
uaacuucuugcuucu

SEQ ID NO: 3143724 - RNA, 18 nt, Human
uaagaagugaaaaucuac

SEQ ID NO: 3143725 - RNA, 20 nt, Human
aauaucacuugucaauaaaa

SEQ ID NO: 3143726 - RNA, 22 nt, Human
aauaucacuugucaauaaaauc

SEQ ID NO: 3143727 - RNA, 16 nt, Human
aauagucaaauugugu

SEQ ID NO: 3143728 - RNA, 18 nt, Human
aauauuuauuuuaauaau

SEQ ID NO: 3143729 - RNA, 19 nt, Human
aauauuuauuuuaauaaug

SEQ ID NO: 3143730 - RNA, 15 nt, Human
aauauuuauuuuaau

SEQ ID NO: 3143731 - RNA, 24 nt, Human
aauaugccccauucaacaucuagu

SEQ ID NO: 3143732 - RNA, 21 nt, Human
aauaugccccauucaacaucu

SEQ ID NO: 3143733 - RNA, 21 nt, Human
uaagcaaaaugugauauguac

SEQ ID NO: 3143734 - RNA, 22 nt, Human
aaucaggguuaguauuguccag

SEQ ID NO: 3143735 - RNA, 21 nt, Human
aaucaggguuaguauugucca

SEQ ID NO: 3143736 - RNA, 16 nt, Human
aaucaggguuaguauu

SEQ ID NO: 3143737 - RNA, 19 nt, Human
aaucuacacuccagugaga

SEQ ID NO: 3143738 - RNA, 19 nt, Human
aaucuuauaauuuaaaaua

SEQ ID NO: 3143739 - RNA, 23 nt, Human
aaucgcuccaccuugcagcucuc

SEQ ID NO: 3143740 - RNA, 19 nt, Human
uaaguaaaaccacagcagu

SEQ ID NO: 3143741 - RNA, 19 nt, Human
uaaguaaugauaacuggaa

SEQ ID NO: 3143742 - RNA, 16 nt, Human
uaagcuuguauuccuu

SEQ ID NO: 3143743 - RNA, 15 nt, Human
aaucaugaauuaguu

SEQ ID NO: 3143744 - RNA, 12 nt, Human
aaucaugaauua

SEQ ID NO: 3143745 - RNA, 12 nt, Human
uaauaaacucau

SEQ ID NO: 3143746 - RNA, 22 nt, Human
aaugaauggcuaagcaaaaugu

SEQ ID NO: 3143747 - RNA, 16 nt, Human
uaauguauguuaccaa

SEQ ID NO: 3143748 - RNA, 17 nt, Human
uaauguauguuaccaaa

SEQ ID NO: 3143749 - RNA, 16 nt, Human
aaucuuauaauuuaaa

SEQ ID NO: 3143750 - RNA, 21 nt, Human
aaucuuaguguaugauuacug

SEQ ID NO: 3143751 - RNA, 18 nt, Human
aaucuuaguguaugauua

SEQ ID NO: 3143752 - RNA, 13 nt, Human
uaaucuuucacag

SEQ ID NO: 3143753 - RNA, 13 nt, Human
uacuguaagaaaa

SEQ ID NO: 3143754 - RNA, 18 nt, Human
uacuggccuuuuucauuu

SEQ ID NO: 3143755 - RNA, 14 nt, Human
uacuguaagaaaau

SEQ ID NO: 3143756 - RNA, 21 nt, Human
aauugacccacaagaaaugaa

SEQ ID NO: 3143757 - RNA, 22 nt, Human
aauugacccacaagaaaugaaa

SEQ ID NO: 3143758 - RNA, 21 nt, Human
aauucccguuuugucacuuuu

SEQ ID NO: 3143759 - RNA, 20 nt, Human
aauucccguuuugucacuuu

SEQ ID NO: 3143760 - RNA, 15 nt, Human
aauuaggcuguaacu

SEQ ID NO: 3143761 - RNA, 17 nt, Human
aauuaggcuguaacuac

SEQ ID NO: 3143762 - RNA, 16 nt, Human
aauuaggcuguaacua

SEQ ID NO: 3143763 - RNA, 22 nt, Human
aauuaggcuguaacuacuuuau

SEQ ID NO: 3143764 - RNA, 21 nt, Human
aauuaggcuguaacuacuuua

SEQ ID NO: 3143765 - RNA, 19 nt, Human
aauuaggcuguaacuacuu

SEQ ID NO: 3143766 - RNA, 18 nt, Human
aauuaggcuguaacuacu

SEQ ID NO: 3143767 - RNA, 20 nt, Human
aauuagugccacuuaaugua

SEQ ID NO: 3143768 - RNA, 17 nt, Human
aauuagugccacuuaau

SEQ ID NO: 3143769 - RNA, 15 nt, Human
aauuagugccacuua

SEQ ID NO: 3143770 - RNA, 23 nt, Human
aauuaggcuguaacuacuuuaua

SEQ ID NO: 3143771 - RNA, 22 nt, Human
aauuccacuuauaggaauugac

SEQ ID NO: 3143772 - RNA, 18 nt, Human
aauuccaagugauugaaa

SEQ ID NO: 3143773 - RNA, 18 nt, Human
aauucauuuuuuaaauuc

SEQ ID NO: 3143774 - RNA, 20 nt, Human
aauucacagugcucuuuucu

SEQ ID NO: 3143775 - RNA, 16 nt, Human
aaugcuguauuuuaaa

SEQ ID NO: 3143776 - RNA, 14 nt, Human
uacacuaagagaga

SEQ ID NO: 3143777 - RNA, 18 nt, Human
uaccaccagucugacugu

SEQ ID NO: 3143778 - RNA, 21 nt, Human
aauguauguuaccaaaaauaa

SEQ ID NO: 3143779 - RNA, 17 nt, Human
aauguauguuaccaaaa

SEQ ID NO: 3143780 - RNA, 13 nt, Human
aauguauguuacc

SEQ ID NO: 3143781 - RNA, 18 nt, Human
acacucaaaucaagaaac

SEQ ID NO: 3143782 - RNA, 19 nt, Human
acacucaaaucaagaaacu

SEQ ID NO: 3143783 - RNA, 13 nt, Human
acacuaagagaga

SEQ ID NO: 3143784 - RNA, 18 nt, Human
acacaugauccugcaauu

SEQ ID NO: 3143785 - RNA, 15 nt, Human
acacaucagcuugcc

SEQ ID NO: 3143786 - RNA, 15 nt, Human
acacaugaaguccaa

SEQ ID NO: 3143787 - RNA, 23 nt, Human
uaguuaccuuauaguuacugugu

SEQ ID NO: 3143788 - RNA, 22 nt, Human
uaguuaccuuauaguuacugug

SEQ ID NO: 3143789 - RNA, 22 nt, Human
acaaugcuguauuuuaaaagaa

SEQ ID NO: 3143790 - RNA, 18 nt, Human
acaaugcuguauuuuaaa

SEQ ID NO: 3143791 - RNA, 15 nt, Human
acacacucaaaucaa

SEQ ID NO: 3143792 - RNA, 22 nt, Human
uagugaaacucguuaauuugua

SEQ ID NO: 3143793 - RNA, 17 nt, Human
uaguguuggagaagaac

SEQ ID NO: 3143794 - RNA, 23 nt, Human
uaguguuggagaagaacugaaau

SEQ ID NO: 3143795 - RNA, 14 nt, Human
uaguuaccuuauag

SEQ ID NO: 3143796 - RNA, 12 nt, Human
uaguuaccuuau

SEQ ID NO: 3143797 - RNA, 21 nt, Human
uaguuaccuuauaguuacugu

SEQ ID NO: 3143798 - RNA, 19 nt, Human
uaguuaccuuauaguuacu

SEQ ID NO: 3143799 - RNA, 18 nt, Human
uaguuaccuuauaguuac

SEQ ID NO: 3143800 - RNA, 17 nt, Human
uaguuaccuuauaguua

SEQ ID NO: 3143801 - RNA, 12 nt, Human
uaggagcaugag

SEQ ID NO: 3143802 - RNA, 18 nt, Human
uaggaaauauuuauuuua

SEQ ID NO: 3143803 - RNA, 19 nt, Human
uaggaaauauuuauuuuaa

SEQ ID NO: 3143804 - RNA, 14 nt, Human
uagggagagaagau

SEQ ID NO: 3143805 - RNA, 15 nt, Human
uagggagagaagaua

SEQ ID NO: 3143806 - RNA, 14 nt, Human
acaagacugcacau

SEQ ID NO: 3143807 - RNA, 13 nt, Human
acaagacugcaca

SEQ ID NO: 3143808 - RNA, 23 nt, Human
acaauacaucccuuaccugggaa

SEQ ID NO: 3143809 - RNA, 16 nt, Human
uagagcacacuguagc

SEQ ID NO: 3143810 - RNA, 17 nt, Human
uagagcacacuguagca

SEQ ID NO: 3143811 - RNA, 19 nt, Human
uagaggagaaacuggaacu

SEQ ID NO: 3143812 - RNA, 22 nt, Human
uagaggagaaacuggaacucuc

SEQ ID NO: 3143813 - RNA, 15 nt, Human
uagaugcaguucuga

SEQ ID NO: 3143814 - RNA, 19 nt, Human
acaaauuuacagagacaga

SEQ ID NO: 3143815 - RNA, 18 nt, Human
acaaauuuacagagacag

SEQ ID NO: 3143816 - RNA, 20 nt, Human
acaagacccaaaaggcagaa

SEQ ID NO: 3143817 - RNA, 21 nt, Human
uauguuuucaggcuagaugua

SEQ ID NO: 3143818 - RNA, 16 nt, Human
uauuaaaacucauuuu

SEQ ID NO: 3143819 - RNA, 22 nt, Human
acaggaaccacaagacugcaca

SEQ ID NO: 3143820 - RNA, 17 nt, Human
acaggaaguagaggagg

SEQ ID NO: 3143821 - RNA, 21 nt, Human
acagggaggacgcucucuggc

SEQ ID NO: 3143822 - RNA, 20 nt, Human
acagggaggacgcucucugg

SEQ ID NO: 3143823 - RNA, 12 nt, Human
acagggacccac

SEQ ID NO: 3143824 - RNA, 16 nt, Human
acagucaccucaugga

SEQ ID NO: 3143825 - RNA, 18 nt, Human
acagucaccucauggaau

SEQ ID NO: 3143826 - RNA, 17 nt, Human
acagucaccucauggaa

SEQ ID NO: 3143827 - RNA, 14 nt, Human
uauuacuguaagaa

SEQ ID NO: 3143828 - RNA, 15 nt, Human
uauucaaacagucuc

SEQ ID NO: 3143829 - RNA, 23 nt, Human
uauucaaacagucucaggaaauc

SEQ ID NO: 3143830 - RNA, 16 nt, Human
acagccucuuagaugc

SEQ ID NO: 3143831 - RNA, 13 nt, Human
uaugcgguuaauu

SEQ ID NO: 3143832 - RNA, 15 nt, Human
uaugccccauucaac

SEQ ID NO: 3143833 - RNA, 19 nt, Human
uaugccccauucaacaucu

SEQ ID NO: 3143834 - RNA, 20 nt, Human
uaugauuaaguaaugauaac

SEQ ID NO: 3143835 - RNA, 16 nt, Human
uaugauuaaguaauga

SEQ ID NO: 3143836 - RNA, 21 nt, Human
uaugaaauauuauguuaaaac

SEQ ID NO: 3143837 - RNA, 19 nt, Human
acagccgcuccugucugcc

SEQ ID NO: 3143838 - RNA, 20 nt, Human
acagccgcuccugucugcca

SEQ ID NO: 3143839 - RNA, 23 nt, Human
acagccgcuccugucugccagcc

SEQ ID NO: 3143840 - RNA, 24 nt, Human
acagccgcuccugucugccagcca

SEQ ID NO: 3143841 - RNA, 14 nt, Human
acagccgcuccugu

SEQ ID NO: 3143842 - RNA, 18 nt, Human
acagccgcuccugucugc

SEQ ID NO: 3143843 - RNA, 15 nt, Human
uauauuguuugcuaa

SEQ ID NO: 3143844 - RNA, 19 nt, Human
uauaauuuugugaagcaaa

SEQ ID NO: 3143845 - RNA, 19 nt, Human
uauccuaauaaaaagguga

SEQ ID NO: 3143846 - RNA, 18 nt, Human
uauccuaauaaaaaggug

SEQ ID NO: 3143847 - RNA, 15 nt, Human
uauccuaauaaaaag

SEQ ID NO: 3143848 - RNA, 12 nt, Human
uauccuaauaaa

SEQ ID NO: 3143849 - RNA, 19 nt, Human
uauccagguucccucccag

SEQ ID NO: 3143850 - RNA, 17 nt, Human
aagcaacccaaauguuc

SEQ ID NO: 3143851 - RNA, 19 nt, Human
aagauggcauaaccugucu

SEQ ID NO: 3143852 - RNA, 22 nt, Human
gugucuuaauuaaaagaauauu

SEQ ID NO: 3143853 - RNA, 15 nt, Human
aagauagcagggcau

SEQ ID NO: 3143854 - RNA, 14 nt, Human
aagauagcagggca

SEQ ID NO: 3143855 - RNA, 19 nt, Human
aagcauuguaaaugugcuu

SEQ ID NO: 3143856 - RNA, 19 nt, Human
aagcacugacuucuaagua

SEQ ID NO: 3143857 - RNA, 20 nt, Human
aagcacugacuucuaaguaa

SEQ ID NO: 3143858 - RNA, 18 nt, Human
aagcauuguaaaugugcu

SEQ ID NO: 3143859 - RNA, 16 nt, Human
aagcacuaaacaaaga

SEQ ID NO: 3143860 - RNA, 16 nt, Human
aagcacugacuucuaa

SEQ ID NO: 3143861 - RNA, 17 nt, Human
aagcacugacuucuaag

SEQ ID NO: 3143862 - RNA, 13 nt, Human
aagcacagcccuu

SEQ ID NO: 3143863 - RNA, 19 nt, Human
guuauuauauuuacaaaug

SEQ ID NO: 3143864 - RNA, 13 nt, Human
guuacuguguaau

SEQ ID NO: 3143865 - RNA, 17 nt, Human
guuauuauauuuacaaa

SEQ ID NO: 3143866 - RNA, 10 nt, Human
guuauuuaaa

SEQ ID NO: 3143867 - RNA, 17 nt, Human
guuaauuuugaagugcu

SEQ ID NO: 3143868 - RNA, 14 nt, Human
guuaauuuuuccaa

SEQ ID NO: 3143869 - RNA, 22 nt, Human
guuaauuuugaagugcuguuua

SEQ ID NO: 3143870 - RNA, 20 nt, Human
guuaauuuuuccaacuacua

SEQ ID NO: 3143871 - RNA, 18 nt, Human
guucccuugaugaagaag

SEQ ID NO: 3143872 - RNA, 19 nt, Human
aaggaaaaaauaacaauga

SEQ ID NO: 3143873 - RNA, 9 nt, Human
uaaaauggu

SEQ ID NO: 3143874 - RNA, 17 nt, Human
uaaaauggguuuuacug

SEQ ID NO: 3143875 - RNA, 23 nt, Human
aagucagauggaaaauucauuuu

SEQ ID NO: 3143876 - RNA, 20 nt, Human
aagucagauggaaaauucau

SEQ ID NO: 3143877 - RNA, 21 nt, Human
uaaaaaaaaaccugagcccca

SEQ ID NO: 3143878 - RNA, 15 nt, Human
uaaaaaggugaccau

SEQ ID NO: 3143879 - RNA, 13 nt, Human
uaaaaaggugacc

SEQ ID NO: 3143880 - RNA, 14 nt, Human
uaaaaccacagcag

SEQ ID NO: 3143881 - RNA, 15 nt, Human
uaaaaccacagcagu

SEQ ID NO: 3143882 - RNA, 13 nt, Human
uaaaaccacagca

SEQ ID NO: 3143883 - RNA, 13 nt, Human
uaaaagaauauuu

SEQ ID NO: 3143884 - RNA, 21 nt, Human
uaaaauacacacucaaaucaa

SEQ ID NO: 3143885 - RNA, 22 nt, Human
uaaaauaauuuuuauauuugaa

SEQ ID NO: 3143886 - RNA, 20 nt, Human
uaaaauaauuuuuauauuug

SEQ ID NO: 3143887 - RNA, 16 nt, Human
aaguacuguguacaga

SEQ ID NO: 3143888 - RNA, 19 nt, Human
aaguauguuagugcaaauu

SEQ ID NO: 3143889 - RNA, 18 nt, Human
aaguauguuagugcaaau

SEQ ID NO: 3143890 - RNA, 19 nt, Human
aaguaaugauaacuggaaa

SEQ ID NO: 3143891 - RNA, 21 nt, Human
guuuaaagaaaguguauuugg

SEQ ID NO: 3143892 - RNA, 18 nt, Human
guuuaaagaaaguguauu

SEQ ID NO: 3143893 - RNA, 17 nt, Human
guuuaaagaaaguguau

SEQ ID NO: 3143894 - RNA, 16 nt, Human
guuuaaagaaagugua

SEQ ID NO: 3143895 - RNA, 15 nt, Human
guuuaaagaaagugu

SEQ ID NO: 3143896 - RNA, 14 nt, Human
guuuaaagaaagug

SEQ ID NO: 3143897 - RNA, 23 nt, Human
guuuauuaaucuuaguguaugau

SEQ ID NO: 3143898 - RNA, 14 nt, Human
guuuaugauuccac

SEQ ID NO: 3143899 - RNA, 22 nt, Human
guuuauuaaucuuaguguauga

SEQ ID NO: 3143900 - RNA, 17 nt, Human
aaggggaauugaggaca

SEQ ID NO: 3143901 - RNA, 17 nt, Human
aagggcuguuauaaucu

SEQ ID NO: 3143902 - RNA, 15 nt, Human
aagggcuguuauaau

SEQ ID NO: 3143903 - RNA, 18 nt, Human
gugcuaguaauuggaaag

SEQ ID NO: 3143904 - RNA, 21 nt, Human
gugcuacaaaaacacagcaag

SEQ ID NO: 3143905 - RNA, 22 nt, Human
gugcuacaaaaacacagcaagg

SEQ ID NO: 3143906 - RNA, 11 nt, Human
aagaaacauuu

SEQ ID NO: 3143907 - RNA, 13 nt, Human
aagaaagaaaauc

SEQ ID NO: 3143908 - RNA, 14 nt, Human
aagaaagaaaauca

SEQ ID NO: 3143909 - RNA, 16 nt, Human
aagaaagaaaaucagg

SEQ ID NO: 3143910 - RNA, 16 nt, Human
gugauuaccagggacu

SEQ ID NO: 3143911 - RNA, 11 nt, Human
gugauuaccag

SEQ ID NO: 3143912 - RNA, 17 nt, Human
gugauuaccagggacug

SEQ ID NO: 3143913 - RNA, 19 nt, Human
aacuucuugcuucuuucua

SEQ ID NO: 3143914 - RNA, 22 nt, Human
aacuucuugcuucuuucuagaa

SEQ ID NO: 3143915 - RNA, 23 nt, Human
aacuuccuuggacucauuuuaaa

SEQ ID NO: 3143916 - RNA, 20 nt, Human
aacuucgaaagcaucauuau

SEQ ID NO: 3143917 - RNA, 20 nt, Human
aacuucuugcuucuuucuag

SEQ ID NO: 3143918 - RNA, 22 nt, Human
aacuuccuuggacucauuuuaa

SEQ ID NO: 3143919 - RNA, 18 nt, Human
aacuucagcgguuuauau

SEQ ID NO: 3143920 - RNA, 13 nt, Human
aacuucagacaua

SEQ ID NO: 3143921 - RNA, 14 nt, Human
gucuuauuuauuau

SEQ ID NO: 3143922 - RNA, 14 nt, Human
gucuuaauuaaaag

SEQ ID NO: 3143923 - RNA, 19 nt, Human
gucuuauauauuguagaua

SEQ ID NO: 3143924 - RNA, 24 nt, Human
aacucauuuuuguuuucauuaucu

SEQ ID NO: 3143925 - RNA, 21 nt, Human
aacucauuuuuguuuucauua

SEQ ID NO: 3143926 - RNA, 22 nt, Human
guccaugaagauguagaggaga

SEQ ID NO: 3143927 - RNA, 18 nt, Human
aacacagcaagggugaug

SEQ ID NO: 3143928 - RNA, 20 nt, Human
aacacagcaagggugauggg

SEQ ID NO: 3143929 - RNA, 17 nt, Human
aacacaacuauauuguu

SEQ ID NO: 3143930 - RNA, 17 nt, Human
aacacugggggagggga

SEQ ID NO: 3143931 - RNA, 16 nt, Human
aacacugggggagggg

SEQ ID NO: 3143932 - RNA, 13 nt, Human
aacagucucagga

SEQ ID NO: 3143933 - RNA, 14 nt, Human
aacauaaaauacaa

SEQ ID NO: 3143934 - RNA, 14 nt, Human
aacagucucaggaa

SEQ ID NO: 3143935 - RNA, 12 nt, Human
aacauauauaac

SEQ ID NO: 3143936 - RNA, 20 nt, Human
aacauguccugccuauuauc

SEQ ID NO: 3143937 - RNA, 19 nt, Human
aacauguccugccuauuau

SEQ ID NO: 3143938 - RNA, 20 nt, Human
guccuuuugacacugcucua

SEQ ID NO: 3143939 - RNA, 19 nt, Human
guccuuuugacacugcucu

SEQ ID NO: 3143940 - RNA, 17 nt, Human
guccuuuugacacugcu

SEQ ID NO: 3143941 - RNA, 16 nt, Human
guccuuuugacacugc

SEQ ID NO: 3143942 - RNA, 15 nt, Human
guccuuuugacacug

SEQ ID NO: 3143943 - RNA, 13 nt, Human
gucaggaaagaga

SEQ ID NO: 3143944 - RNA, 14 nt, Human
gucaggaaagagaa

SEQ ID NO: 3143945 - RNA, 14 nt, Human
gucacuuuuucuga

SEQ ID NO: 3143946 - RNA, 15 nt, Human
gucacaggaaguaga

SEQ ID NO: 3143947 - RNA, 13 nt, Human
gucacaggaagua

SEQ ID NO: 3143948 - RNA, 21 nt, Human
gucaauuuuguuauguauauu

SEQ ID NO: 3143949 - RNA, 20 nt, Human
gucacaggaaguagaggagg

SEQ ID NO: 3143950 - RNA, 14 nt, Human
guauuuagaagcca

SEQ ID NO: 3143951 - RNA, 17 nt, Human
aaauuccaagugauuga

SEQ ID NO: 3143952 - RNA, 23 nt, Human
aaauuccuuagcuuagaccucag

SEQ ID NO: 3143953 - RNA, 22 nt, Human
aaauuccuuagcuuagaccuca

SEQ ID NO: 3143954 - RNA, 17 nt, Human
aaauuguauuacaaauc

SEQ ID NO: 3143955 - RNA, 18 nt, Human
aaaugugccuucauuuuu

SEQ ID NO: 3143956 - RNA, 15 nt, Human
aaaugugcuuuuaaa

SEQ ID NO: 3143957 - RNA, 15 nt, Human
auguggugggacagg

SEQ ID NO: 3143958 - RNA, 21 nt, Human
auguggugggacagggaccca

SEQ ID NO: 3143959 - RNA, 20 nt, Human
auguaagggaaacugccagc

SEQ ID NO: 3143960 - RNA, 21 nt, Human
auguaagggaaacugccagca

SEQ ID NO: 3143961 - RNA, 22 nt, Human
auguaagggaaacugccagcaa

SEQ ID NO: 3143962 - RNA, 19 nt, Human
augucuuggguaggcggga

SEQ ID NO: 3143963 - RNA, 14 nt, Human
auggagcugggcua

SEQ ID NO: 3143964 - RNA, 16 nt, Human
aucuuauaauuuaaaa

SEQ ID NO: 3143965 - RNA, 22 nt, Human
aucuuauaauuuaaaauaugcu

SEQ ID NO: 3143966 - RNA, 18 nt, Human
aguuguaccgcaauguga

SEQ ID NO: 3143967 - RNA, 19 nt, Human
aguuguaccgcaaugugac

SEQ ID NO: 3143968 - RNA, 16 nt, Human
aguuacaguucugugg

SEQ ID NO: 3143969 - RNA, 15 nt, Human
aguuacaguucugug

SEQ ID NO: 3143970 - RNA, 14 nt, Human
aguuacaguucugu

SEQ ID NO: 3143971 - RNA, 13 nt, Human
aguuacaguucug

SEQ ID NO: 3143972 - RNA, 15 nt, Human
agugauuaccaggga

SEQ ID NO: 3143973 - RNA, 18 nt, Human
agugauuaccagggacug

SEQ ID NO: 3143974 - RNA, 21 nt, Human
agugucuuaauuaaaagaaua

SEQ ID NO: 3143975 - RNA, 16 nt, Human
agucaaggcuuagacc

SEQ ID NO: 3143976 - RNA, 14 nt, Human
agucaaggcuuaga

SEQ ID NO: 3143977 - RNA, 17 nt, Human
agucaaauugugugaaa

SEQ ID NO: 3143978 - RNA, 15 nt, Human
agucaaauuguguga

SEQ ID NO: 3143979 - RNA, 13 nt, Human
agucaaauugugu

SEQ ID NO: 3143980 - RNA, 21 nt, Human
aguccaagcauuuagauguau

SEQ ID NO: 3143981 - RNA, 11 nt, Human
aguccaagcau

SEQ ID NO: 3143982 - RNA, 16 nt, Human
aguccaagcauuuaga

SEQ ID NO: 3143983 - RNA, 14 nt, Human
auaauuacuauguc

SEQ ID NO: 3143984 - RNA, 19 nt, Human
auaaguacuguguacagaa

SEQ ID NO: 3143985 - RNA, 18 nt, Human
auaaguacuguguacaga

SEQ ID NO: 3143986 - RNA, 23 nt, Human
auaugcuucuguuuuauaauuuu

SEQ ID NO: 3143987 - RNA, 15 nt, Human
auaucaauuuaaaaa

SEQ ID NO: 3143988 - RNA, 18 nt, Human
auaucacuugucaauaaa

SEQ ID NO: 3143989 - RNA, 23 nt, Human
auauccuaauaaaaaggugacca

SEQ ID NO: 3143990 - RNA, 20 nt, Human
auauccuaauaaaaagguga

SEQ ID NO: 3143991 - RNA, 19 nt, Human
auauuuauuacuguaagaa

SEQ ID NO: 3143992 - RNA, 14 nt, Human
auauuuauuacugu

SEQ ID NO: 3143993 - RNA, 18 nt, Human
auauuuauuuuaauaaug

SEQ ID NO: 3143994 - RNA, 14 nt, Human
agguucccucccag

SEQ ID NO: 3143995 - RNA, 13 nt, Human
aggcagacagcag

SEQ ID NO: 3143996 - RNA, 14 nt, Human
aggcagacagcagc

SEQ ID NO: 3143997 - RNA, 15 nt, Human
aggcagacagcagcu

SEQ ID NO: 3143998 - RNA, 18 nt, Human
aggcagacagcagcucag

SEQ ID NO: 3143999 - RNA, 19 nt, Human
aggcagacagcagcucagg

SEQ ID NO: 3144000 - RNA, 20 nt, Human
aggcagacagcagcucaggc

SEQ ID NO: 3144001 - RNA, 21 nt, Human
aggcagacagcagcucaggca

SEQ ID NO: 3144002 - RNA, 14 nt, Human
aggggcagaacagc

SEQ ID NO: 3144003 - RNA, 13 nt, Human
aggagaggggcag

SEQ ID NO: 3144004 - RNA, 18 nt, Human
aggagaggggcagaacag

SEQ ID NO: 3144005 - RNA, 19 nt, Human
aggagaggggcagaacagc

SEQ ID NO: 3144006 - RNA, 14 nt, Human
aggauguugaaaaa

SEQ ID NO: 3144007 - RNA, 18 nt, Human
agcuucacuguaaaauaa

SEQ ID NO: 3144008 - RNA, 17 nt, Human
agacugcauuauauuua

SEQ ID NO: 3144009 - RNA, 15 nt, Human
agaggggcagaacag

SEQ ID NO: 3144010 - RNA, 16 nt, Human
agaggggcagaacagc

SEQ ID NO: 3144011 - RNA, 22 nt, Human
agaguuacaguucugugguuuc

SEQ ID NO: 3144012 - RNA, 17 nt, Human
agaguuacaguucugug

SEQ ID NO: 3144013 - RNA, 16 nt, Human
agaguuacaguucugu

SEQ ID NO: 3144014 - RNA, 15 nt, Human
agaguuacaguucug

SEQ ID NO: 3144015 - RNA, 11 nt, Human
agaguuacagu

SEQ ID NO: 3144016 - RNA, 20 nt, Human
agaguuaauauauagaaggg

SEQ ID NO: 3144017 - RNA, 17 nt, Human
agaggagccaccaguuc

SEQ ID NO: 3144018 - RNA, 21 nt, Human
agauaggucagugcaaauacu

SEQ ID NO: 3144019 - RNA, 19 nt, Human
agccagauuuuccugaaaa

SEQ ID NO: 3144020 - RNA, 15 nt, Human
agccagauuuuccug

SEQ ID NO: 3144021 - RNA, 12 nt, Human
agcaugaagaca

SEQ ID NO: 3144022 - RNA, 19 nt, Human
agcaguucagagcugcccu

SEQ ID NO: 3144023 - RNA, 13 nt, Human
agcacuaaagcag

SEQ ID NO: 3144024 - RNA, 14 nt, Human
agcacuaaagcagu

SEQ ID NO: 3144025 - RNA, 16 nt, Human
agcacuaaagcagugg

SEQ ID NO: 3144026 - RNA, 17 nt, Human
agcacuaaagcagugga

SEQ ID NO: 3144027 - RNA, 20 nt, Human
agcacuaaagcaguggacac

SEQ ID NO: 3144028 - RNA, 23 nt, Human
agcacuaaagcaguggacaccag

SEQ ID NO: 3144029 - RNA, 13 nt, Human
agcagccagcucu

SEQ ID NO: 3144030 - RNA, 14 nt, Human
agcagccagcucuc

SEQ ID NO: 3144031 - RNA, 15 nt, Human
agcagccagcucuca

SEQ ID NO: 3144032 - RNA, 16 nt, Human
agcagccagcucucag

SEQ ID NO: 3144033 - RNA, 17 nt, Human
agcagccagcucucagc

SEQ ID NO: 3144034 - RNA, 18 nt, Human
agcagccagcucucagcc

SEQ ID NO: 3144035 - RNA, 19 nt, Human
agcagccagcucucagcca

SEQ ID NO: 3144036 - RNA, 23 nt, Human
agcagccagcucucagccaacga

SEQ ID NO: 3144037 - RNA, 23 nt, Human
agcaguugaaaagacuccaaaga

SEQ ID NO: 3144038 - RNA, 21 nt, Human
agcaguugaaaagacuccaaa

SEQ ID NO: 3144039 - RNA, 16 nt, Human
agcaguucagagcugc

SEQ ID NO: 3144040 - RNA, 15 nt, Human
agcaguucagagcug

SEQ ID NO: 3144041 - RNA, 17 nt, Human
agcaguucagagcugcc

SEQ ID NO: 3144042 - RNA, 18 nt, Human
agcaguucagagcugccc

SEQ ID NO: 3144043 - RNA, 14 nt, Human
agauguagaggaga

SEQ ID NO: 3144044 - RNA, 21 nt, Human
agaugggagaaucacuugaac

SEQ ID NO: 3144045 - RNA, 21 nt, Human
agccgggcgugguggugagug

SEQ ID NO: 3144046 - RNA, 19 nt, Human
agccccacccucagaugca

SEQ ID NO: 3144047 - RNA, 23 nt, Human
agcccaaguucaugcagcugugg

SEQ ID NO: 3144048 - RNA, 21 nt, Human
agcccaaguucaugcagcugu

SEQ ID NO: 3144049 - RNA, 16 nt, Human
acccaaguccaagcau

SEQ ID NO: 3144050 - RNA, 13 nt, Human
acauguuacaaca

SEQ ID NO: 3144051 - RNA, 16 nt, Human
acauuugcucauggaa

SEQ ID NO: 3144052 - RNA, 18 nt, Human
acauuugcucauggaauu

SEQ ID NO: 3144053 - RNA, 20 nt, Human
aauuuugaagugcuguuuau

SEQ ID NO: 3144054 - RNA, 19 nt, Human
aauuuugaagugcuguuua

SEQ ID NO: 3144055 - RNA, 14 nt, Human
aauuuugaagugcu

SEQ ID NO: 3144056 - RNA, 13 nt, Human
acaacuauauugu

SEQ ID NO: 3144057 - RNA, 20 nt, Human
acagcucugcauacucauua

SEQ ID NO: 3144058 - RNA, 15 nt, Human
acagcaguugaaaag

SEQ ID NO: 3144059 - RNA, 13 nt, Human
acagccagacugg

SEQ ID NO: 3144060 - RNA, 15 nt, Human
acagccagacuggca

SEQ ID NO: 3144061 - RNA, 16 nt, Human
acagccagacuggcac

SEQ ID NO: 3144062 - RNA, 14 nt, Human
acacugcucuaaca

SEQ ID NO: 3144063 - RNA, 13 nt, Human
acacugcucuaac

SEQ ID NO: 3144064 - RNA, 19 nt, Human
acacugcucuaacagcccu

SEQ ID NO: 3144065 - RNA, 17 nt, Human
acacugcucuaacagcc

SEQ ID NO: 3144066 - RNA, 20 nt, Human
acacugcucuaacagcccuc

SEQ ID NO: 3144067 - RNA, 16 nt, Human
acgugcacgcacacug

SEQ ID NO: 3144068 - RNA, 16 nt, Human
acuaagagagaaugag

SEQ ID NO: 3144069 - RNA, 15 nt, Human
acuaagagagaauga

SEQ ID NO: 3144070 - RNA, 17 nt, Human
acuaauagaauaaaggc

SEQ ID NO: 3144071 - RNA, 16 nt, Human
acuaauagaauaaagg

SEQ ID NO: 3144072 - RNA, 23 nt, Human
acucagucucucuucucuccagc

SEQ ID NO: 3144073 - RNA, 19 nt, Human
acucagucucucuucucuc

SEQ ID NO: 3144074 - RNA, 13 nt, Human
acucagggcccca

SEQ ID NO: 3144075 - RNA, 14 nt, Human
acucagggccccag

SEQ ID NO: 3144076 - RNA, 17 nt, Human
acucagucucucuucuc

SEQ ID NO: 3144077 - RNA, 14 nt, Human
acuagcuauggugu

SEQ ID NO: 3144078 - RNA, 13 nt, Human
acucccuuucaac

SEQ ID NO: 3144079 - RNA, 12 nt, Human
acucccuuucaa

SEQ ID NO: 3144080 - RNA, 13 nt, Human
acuuggucuguga

SEQ ID NO: 3144081 - RNA, 14 nt, Human
acuuggucugugag

SEQ ID NO: 3144082 - RNA, 15 nt, Human
acuuggucugugaga

SEQ ID NO: 3144083 - RNA, 18 nt, Human
acuuguaaaggaauuuaa

SEQ ID NO: 3144084 - RNA, 20 nt, Human
acuuguaaaggaauuuaaaa

SEQ ID NO: 3144085 - RNA, 19 nt, Human
acuuguaaaggaauuuaaa

SEQ ID NO: 3144086 - RNA, 17 nt, Human
acuucacacacaggcaa

SEQ ID NO: 3144087 - RNA, 19 nt, Human
acuucacacacaggcaacu

SEQ ID NO: 3144088 - RNA, 16 nt, Human
acuucacacacaggca

SEQ ID NO: 3144089 - RNA, 12 nt, Human
acuggaacucuc

SEQ ID NO: 3144090 - RNA, 18 nt, Human
acuuuauaacuaacaugu

SEQ ID NO: 3144091 - RNA, 16 nt, Human
acuuuauaacuaacau

SEQ ID NO: 3144092 - RNA, 19 nt, Human
agaaauaaaguuggugaca

SEQ ID NO: 3144093 - RNA, 21 nt, Human
agaaauaaaguuggugacaga

SEQ ID NO: 3144094 - RNA, 16 nt, Human
aaugggcucaaccaga

SEQ ID NO: 3144095 - RNA, 20 nt, Human
aauuaguuuuauaugcuucu

SEQ ID NO: 3144096 - RNA, 17 nt, Human
aauuaguuuuauaugcu

SEQ ID NO: 3144097 - RNA, 14 nt, Human
aauuaguuuuauau

SEQ ID NO: 3144098 - RNA, 13 nt, Human
aauccauacauuu

SEQ ID NO: 3144099 - RNA, 20 nt, Human
aaugauaacuggaaacuuca

SEQ ID NO: 3144100 - RNA, 17 nt, Human
aaugauaacuggaaacu

SEQ ID NO: 3144101 - RNA, 16 nt, Human
aauauuauguuaaaac

SEQ ID NO: 3144102 - RNA, 13 nt, Human
aaucacaauacau

SEQ ID NO: 3144103 - RNA, 19 nt, Human
aauaaaauggguuuuacug

SEQ ID NO: 3144104 - RNA, 14 nt, Human
aauaaaauggguuu

SEQ ID NO: 3144105 - RNA, 15 nt, Human
aaguuguuucauuga

SEQ ID NO: 3144106 - RNA, 22 nt, Human
aagugcuguuuauuaaucuuag

SEQ ID NO: 3144107 - RNA, 21 nt, Human
aagugcuguuuauuaaucuua

SEQ ID NO: 3144108 - RNA, 21 nt, Human
aauaauccuaaacauaugaau

SEQ ID NO: 3144109 - RNA, 20 nt, Human
aagugcuguuuauuaaucuu

SEQ ID NO: 3144110 - RNA, 18 nt, Human
aagugcuguuuauuaauc

SEQ ID NO: 3144111 - RNA, 17 nt, Human
aagugcuguuuauuaau

SEQ ID NO: 3144112 - RNA, 16 nt, Human
aagugcuguuuauuaa

SEQ ID NO: 3144113 - RNA, 14 nt, Human
aagugcuguuuauu

SEQ ID NO: 3144114 - RNA, 13 nt, Human
aagccagauuuuc

SEQ ID NO: 3144115 - RNA, 16 nt, Human
aagauuuaccacuugu

SEQ ID NO: 3144116 - RNA, 15 nt, Human
aacacgagcaggcua

SEQ ID NO: 3144117 - RNA, 23 nt, Human
aacugacacaugcugaacaucac

SEQ ID NO: 3144118 - RNA, 19 nt, Human
aacuuuugugaauuaggcu

SEQ ID NO: 3144119 - RNA, 13 nt, Human
aacuuuugugaau

SEQ ID NO: 3144120 - RNA, 13 nt, Human
aagaaauguaagg

SEQ ID NO: 3144121 - RNA, 14 nt, Human
aagaaauguaaggg

SEQ ID NO: 3144122 - RNA, 21 nt, Human
aacuuuuuuucuguaccaguu

SEQ ID NO: 3144123 - RNA, 22 nt, Human
aacuuuuuuucuguaccaguua

SEQ ID NO: 3144124 - RNA, 18 nt, Human
aaaucaaauaugcaaagc

SEQ ID NO: 3144125 - RNA, 19 nt, Human
aaaucaaauaugcaaagca

SEQ ID NO: 3144126 - RNA, 16 nt, Human
aaaucaaauaugcaaa

SEQ ID NO: 3144127 - RNA, 12 nt, Human
aaauaacaauga

SEQ ID NO: 3144128 - RNA, 17 nt, Human
aaacugacucuuaagaa

SEQ ID NO: 3144129 - RNA, 14 nt, Human
aaacugccagcaac

SEQ ID NO: 3144130 - RNA, 15 nt, Human
aaacugccagcaacg

SEQ ID NO: 3144131 - RNA, 16 nt, Human
aaacugacucuuaaga

SEQ ID NO: 3144132 - RNA, 14 nt, Human
aaacugaagccaga

SEQ ID NO: 3144133 - RNA, 19 nt, Human
aaacugccagcaacgcagg

SEQ ID NO: 3144134 - RNA, 16 nt, Human
aaagaaaguguauuug

SEQ ID NO: 3144135 - RNA, 13 nt, Human
aaagaaaguguau

SEQ ID NO: 3144136 - RNA, 12 nt, Human
aaagaaagugua

SEQ ID NO: 3144137 - RNA, 10 nt, Human
aaagaaagug

SEQ ID NO: 3144138 - RNA, 13 nt, Human
aaagaugaaaaua

SEQ ID NO: 3144139 - RNA, 16 nt, Human
aaagaugaaaauauuu

SEQ ID NO: 3144140 - RNA, 17 nt, Human
aaagaugaaaauauuug

SEQ ID NO: 3144141 - RNA, 12 nt, Human
aaaauucauuuu

SEQ ID NO: 3144142 - RNA, 14 nt, Human
aaaacaaggaugaa

SEQ ID NO: 3144143 - RNA, 18 nt, Human
aaaacacagcaaggguga

SEQ ID NO: 3144144 - RNA, 12 nt, Human
aaaacacagcaa

SEQ ID NO: 3144145 - RNA, 13 nt, Human
aaaacacagcaag

SEQ ID NO: 3144146 - RNA, 17 nt, Human
aaaacaaggaugaauua

SEQ ID NO: 3144147 - RNA, 22 nt, Human
caacccgucuggcccaccaggg

SEQ ID NO: 3144148 - RNA, 21 nt, Human
caacccgucuggcccaccagg

SEQ ID NO: 3144149 - RNA, 20 nt, Human
caacccgucuggcccaccag

SEQ ID NO: 3144150 - RNA, 22 nt, Human
caacugaggcagacagcagcuc

SEQ ID NO: 3144151 - RNA, 13 nt, Human
caacugaggcaga

SEQ ID NO: 3144152 - RNA, 14 nt, Human
caacugaggcagac

SEQ ID NO: 3144153 - RNA, 16 nt, Human
caacugaggcagacag

SEQ ID NO: 3144154 - RNA, 17 nt, Human
caacugaggcagacagc

SEQ ID NO: 3144155 - RNA, 20 nt, Human
caacugaggcagacagcagc

SEQ ID NO: 3144156 - RNA, 21 nt, Human
caacugaggcagacagcagcu

SEQ ID NO: 3144157 - RNA, 14 nt, Human
caaggcuuagaccc

SEQ ID NO: 3144158 - RNA, 15 nt, Human
caaggcuuagacccu

SEQ ID NO: 3144159 - RNA, 18 nt, Human
caaggaauuucuuaacuu

SEQ ID NO: 3144160 - RNA, 16 nt, Human
caaggaauuucuuaac

SEQ ID NO: 3144161 - RNA, 15 nt, Human
caaggaauuucuuaa

SEQ ID NO: 3144162 - RNA, 12 nt, Human
caaggaauuucu

SEQ ID NO: 3144163 - RNA, 23 nt, Human
caaggaauuucuuaacuucuugc

SEQ ID NO: 3144164 - RNA, 21 nt, Human
caaggaauuucuuaacuucuu

SEQ ID NO: 3144165 - RNA, 17 nt, Human
caaggcugauuaaacca

SEQ ID NO: 3144166 - RNA, 21 nt, Human
caagccagauuuuccugaaaa

SEQ ID NO: 3144167 - RNA, 22 nt, Human
caaugugacuuaaugccacuaa

SEQ ID NO: 3144168 - RNA, 23 nt, Human
caauacaucccuuaccugggaaa

SEQ ID NO: 3144169 - RNA, 15 nt, Human
caaaaacacagcaag

SEQ ID NO: 3144170 - RNA, 17 nt, Human
caaaaacacagcaaggg

SEQ ID NO: 3144171 - RNA, 13 nt, Human
caaaaacacagca

SEQ ID NO: 3144172 - RNA, 14 nt, Human
caaaaacacagcaa

SEQ ID NO: 3144173 - RNA, 13 nt, Human
auuuuccugaaaa

SEQ ID NO: 3144174 - RNA, 19 nt, Human
caaaaaucucaauauuuca

SEQ ID NO: 3144175 - RNA, 23 nt, Human
caaaacuucagacauagaauuaa

SEQ ID NO: 3144176 - RNA, 22 nt, Human
caaaauuuuuucucuaggaaau

SEQ ID NO: 3144177 - RNA, 21 nt, Human
caaaauuuuuucucuaggaaa

SEQ ID NO: 3144178 - RNA, 16 nt, Human
caaaauuuuuucucua

SEQ ID NO: 3144179 - RNA, 19 nt, Human
caaauaugcaaagcacuga

SEQ ID NO: 3144180 - RNA, 21 nt, Human
caaauaugcaaagcacugacu

SEQ ID NO: 3144181 - RNA, 16 nt, Human
cacaguuuucugagaa

SEQ ID NO: 3144182 - RNA, 17 nt, Human
cacaguuuucugagaaa

SEQ ID NO: 3144183 - RNA, 19 nt, Human
cacaguuuucugagaaaga

SEQ ID NO: 3144184 - RNA, 15 nt, Human
cacaguuuucugaga

SEQ ID NO: 3144185 - RNA, 16 nt, Human
uauuauucccauucua

SEQ ID NO: 3144186 - RNA, 22 nt, Human
uauuguuuuuccuuguauuuaa

SEQ ID NO: 3144187 - RNA, 17 nt, Human
uauguacuucaugcugu

SEQ ID NO: 3144188 - RNA, 13 nt, Human
uauguacuucaug

SEQ ID NO: 3144189 - RNA, 18 nt, Human
uauuaaucuuaguguaug

SEQ ID NO: 3144190 - RNA, 17 nt, Human
uauuaaucuuaguguau

SEQ ID NO: 3144191 - RNA, 14 nt, Human
uauuaaucuuagug

SEQ ID NO: 3144192 - RNA, 17 nt, Human
uauuuuuuguauaauug

SEQ ID NO: 3144193 - RNA, 16 nt, Human
uauuuuuuguauaauu

SEQ ID NO: 3144194 - RNA, 14 nt, Human
uauuuuuuguauaa

SEQ ID NO: 3144195 - RNA, 14 nt, Human
ucaaauugugugaa

SEQ ID NO: 3144196 - RNA, 14 nt, Human
ucaaauaugcaaag

SEQ ID NO: 3144197 - RNA, 20 nt, Human
ucaaaucaagaaacuuaagg

SEQ ID NO: 3144198 - RNA, 13 nt, Human
ucacaagacccaa

SEQ ID NO: 3144199 - RNA, 17 nt, Human
ucacaagacccaaaagg

SEQ ID NO: 3144200 - RNA, 16 nt, Human
ucacagucacauucca

SEQ ID NO: 3144201 - RNA, 14 nt, Human
ucaccaaggcugau

SEQ ID NO: 3144202 - RNA, 20 nt, Human
ucacagugcucuuuucuccu

SEQ ID NO: 3144203 - RNA, 18 nt, Human
ucacagugcucuuuucuc

SEQ ID NO: 3144204 - RNA, 17 nt, Human
ucacagugcucuuuucu

SEQ ID NO: 3144205 - RNA, 13 nt, Human
ucaaugcagcccc

SEQ ID NO: 3144206 - RNA, 21 nt, Human
ucaauaaaauccauacauuug

SEQ ID NO: 3144207 - RNA, 14 nt, Human
ucaauaaaauccau

SEQ ID NO: 3144208 - RNA, 23 nt, Human
ucaugcugccaauauccuaauaa

SEQ ID NO: 3144209 - RNA, 21 nt, Human
ucaugcugccaauauccuaau

SEQ ID NO: 3144210 - RNA, 13 nt, Human
ucauuaucucaaa

SEQ ID NO: 3144211 - RNA, 19 nt, Human
ucauuaucucaaaacugca

SEQ ID NO: 3144212 - RNA, 20 nt, Human
ucauuaucucaaaacugcac

SEQ ID NO: 3144213 - RNA, 13 nt, Human
ucauuuccaagca

SEQ ID NO: 3144214 - RNA, 16 nt, Human
ucauuuccaagcaagu

SEQ ID NO: 3144215 - RNA, 20 nt, Human
ucaugcugccaauauccuaa

SEQ ID NO: 3144216 - RNA, 19 nt, Human
ucaugcugccaauauccua

SEQ ID NO: 3144217 - RNA, 17 nt, Human
ucaugcugccaauaucc

SEQ ID NO: 3144218 - RNA, 13 nt, Human
ucaugcugccaau

SEQ ID NO: 3144219 - RNA, 18 nt, Human
ucauaccuaucaucuuaa

SEQ ID NO: 3144220 - RNA, 12 nt, Human
uccaccucccug

SEQ ID NO: 3144221 - RNA, 13 nt, Human
uccaccucccugc

SEQ ID NO: 3144222 - RNA, 14 nt, Human
uccaccucccugca

SEQ ID NO: 3144223 - RNA, 19 nt, Human
uccacagaagcuccaggua

SEQ ID NO: 3144224 - RNA, 15 nt, Human
uccaccucccugcaa

SEQ ID NO: 3144225 - RNA, 16 nt, Human
uccaccucccugcaau

SEQ ID NO: 3144226 - RNA, 17 nt, Human
uccaccucccugcaaua

SEQ ID NO: 3144227 - RNA, 16 nt, Human
uccacuuggucuguga

SEQ ID NO: 3144228 - RNA, 15 nt, Human
uccacuuggucugug

SEQ ID NO: 3144229 - RNA, 14 nt, Human
uccacuuggucugu

SEQ ID NO: 3144230 - RNA, 22 nt, Human
ucagagcugcccucuccugggc

SEQ ID NO: 3144231 - RNA, 18 nt, Human
ucagagcugcccucuccu

SEQ ID NO: 3144232 - RNA, 19 nt, Human
ucagagcugcccucuccug

SEQ ID NO: 3144233 - RNA, 20 nt, Human
ucagagcugcccucuccugg

SEQ ID NO: 3144234 - RNA, 21 nt, Human
ucagagcugcccucuccuggg

SEQ ID NO: 3144235 - RNA, 21 nt, Human
ucacugggguccuggggccuc

SEQ ID NO: 3144236 - RNA, 16 nt, Human
ucacugggguccuggg

SEQ ID NO: 3144237 - RNA, 17 nt, Human
ucacugggguccugggg

SEQ ID NO: 3144238 - RNA, 19 nt, Human
ucacugggguccuggggcc

SEQ ID NO: 3144239 - RNA, 20 nt, Human
ucacugggguccuggggccu

SEQ ID NO: 3144240 - RNA, 17 nt, Human
ucaggcuagauguaugu

SEQ ID NO: 3144241 - RNA, 13 nt, Human
ucaggcuagaugu

SEQ ID NO: 3144242 - RNA, 20 nt, Human
ucagcugcaagguacucugg

SEQ ID NO: 3144243 - RNA, 22 nt, Human
ucagcugcaagguacucuggug

SEQ ID NO: 3144244 - RNA, 21 nt, Human
ucagcugcaagguacucuggu

SEQ ID NO: 3144245 - RNA, 23 nt, Human
ucagggccccagcacuaaagcag

SEQ ID NO: 3144246 - RNA, 14 nt, Human
ucagggccccagca

SEQ ID NO: 3144247 - RNA, 16 nt, Human
ucagggccccagcacu

SEQ ID NO: 3144248 - RNA, 18 nt, Human
ucagcuccccucggagaa

SEQ ID NO: 3144249 - RNA, 17 nt, Human
ucagcuccccucggaga

SEQ ID NO: 3144250 - RNA, 16 nt, Human
ucugccagccagcagc

SEQ ID NO: 3144251 - RNA, 17 nt, Human
ucugccagccagcagcc

SEQ ID NO: 3144252 - RNA, 13 nt, Human
ucugccagccagc

SEQ ID NO: 3144253 - RNA, 15 nt, Human
ucugccagccagcag

SEQ ID NO: 3144254 - RNA, 19 nt, Human
ucugccagccagcagccag

SEQ ID NO: 3144255 - RNA, 20 nt, Human
ucuggugagucaccacuuca

SEQ ID NO: 3144256 - RNA, 17 nt, Human
ucuggugagucaccacu

SEQ ID NO: 3144257 - RNA, 18 nt, Human
ucuggccuucggccucca

SEQ ID NO: 3144258 - RNA, 17 nt, Human
ucuggccuucggccucc

SEQ ID NO: 3144259 - RNA, 10 nt, Human
ucuggccuuc

SEQ ID NO: 3144260 - RNA, 15 nt, Human
ucuggcucuaauuca

SEQ ID NO: 3144261 - RNA, 12 nt, Human
ucuggcucuaau

SEQ ID NO: 3144262 - RNA, 16 nt, Human
ucuggcucuaauucac

SEQ ID NO: 3144263 - RNA, 15 nt, Human
ucugucuucacaaca

SEQ ID NO: 3144264 - RNA, 18 nt, Human
ucuuaagaagacugcauu

SEQ ID NO: 3144265 - RNA, 12 nt, Human
ucuuaagaagac

SEQ ID NO: 3144266 - RNA, 23 nt, Human
ucuuaacuucuugcuucuuucua

SEQ ID NO: 3144267 - RNA, 16 nt, Human
ucuuaacuucuugcuu

SEQ ID NO: 3144268 - RNA, 12 nt, Human
ucuuaacuucuu

SEQ ID NO: 3144269 - RNA, 11 nt, Human
ucuucagccua

SEQ ID NO: 3144270 - RNA, 12 nt, Human
ucuucagccuag

SEQ ID NO: 3144271 - RNA, 23 nt, Human
ucuucagccuagccgaccucagc

SEQ ID NO: 3144272 - RNA, 21 nt, Human
ucuucagccuagccgaccuca

SEQ ID NO: 3144273 - RNA, 22 nt, Human
ucuucagccuagccgaccucag

SEQ ID NO: 3144274 - RNA, 19 nt, Human
ucugcaucagcugcugaaa

SEQ ID NO: 3144275 - RNA, 21 nt, Human
ucugcaucagcugcugaaaca

SEQ ID NO: 3144276 - RNA, 14 nt, Human
ucugcaucagcugc

SEQ ID NO: 3144277 - RNA, 19 nt, Human
ucucuaggaaauauuuauu

SEQ ID NO: 3144278 - RNA, 22 nt, Human
ucucuguaauaaacucauuucu

SEQ ID NO: 3144279 - RNA, 18 nt, Human
ucucuguaauaaacucau

SEQ ID NO: 3144280 - RNA, 23 nt, Human
ucucuggccuucggccuccaucc

SEQ ID NO: 3144281 - RNA, 13 nt, Human
ucguuaauuugua

SEQ ID NO: 3144282 - RNA, 23 nt, Human
ucuaacagcccuccucugcacuc

SEQ ID NO: 3144283 - RNA, 22 nt, Human
ucuaacagcccuccucugcacu

SEQ ID NO: 3144284 - RNA, 21 nt, Human
ucuaacagcccuccucugcac

SEQ ID NO: 3144285 - RNA, 20 nt, Human
ucuaacagcccuccucugca

SEQ ID NO: 3144286 - RNA, 13 nt, Human
ucuaacagcccuc

SEQ ID NO: 3144287 - RNA, 12 nt, Human
ucuaacagcccu

SEQ ID NO: 3144288 - RNA, 17 nt, Human
ucggccuccauccugag

SEQ ID NO: 3144289 - RNA, 18 nt, Human
ucggccuccauccugagg

SEQ ID NO: 3144290 - RNA, 22 nt, Human
ucgugggacagucaccucaugg

SEQ ID NO: 3144291 - RNA, 21 nt, Human
ucguggaacaguuaccucugc

SEQ ID NO: 3144292 - RNA, 19 nt, Human
ucuagaaagagaaacaguu

SEQ ID NO: 3144293 - RNA, 19 nt, Human
ucuagugagcagucaggaa

SEQ ID NO: 3144294 - RNA, 22 nt, Human
ucuagugagcagucaggaaaga

SEQ ID NO: 3144295 - RNA, 16 nt, Human
ucuaauucacagugcu

SEQ ID NO: 3144296 - RNA, 14 nt, Human
ucuaugaaauauua

SEQ ID NO: 3144297 - RNA, 13 nt, Human
ucuaugaaauauu

SEQ ID NO: 3144298 - RNA, 17 nt, Human
ucuaugaaauauuaugu

SEQ ID NO: 3144299 - RNA, 15 nt, Human
ucucaacuccaaacu

SEQ ID NO: 3144300 - RNA, 19 nt, Human
uccugucggagcccugucu

SEQ ID NO: 3144301 - RNA, 19 nt, Human
uccugccuauuaucuguca

SEQ ID NO: 3144302 - RNA, 20 nt, Human
uccugccuaagugcagcccc

SEQ ID NO: 3144303 - RNA, 17 nt, Human
uccuggcaauagucaaa

SEQ ID NO: 3144304 - RNA, 16 nt, Human
uccuuggacucauuuu

SEQ ID NO: 3144305 - RNA, 15 nt, Human
ucccuugaugaagaa

SEQ ID NO: 3144306 - RNA, 16 nt, Human
ucccuugaugaagaag

SEQ ID NO: 3144307 - RNA, 16 nt, Human
ucccugcaauaaaaug

SEQ ID NO: 3144308 - RNA, 20 nt, Human
uccagguucccucccagagg

SEQ ID NO: 3144309 - RNA, 18 nt, Human
uccagguucccucccaga

SEQ ID NO: 3144310 - RNA, 17 nt, Human
uccagguucccucccag

SEQ ID NO: 3144311 - RNA, 15 nt, Human
uccuaauacugucau

SEQ ID NO: 3144312 - RNA, 14 nt, Human
uccuaauacuguca

SEQ ID NO: 3144313 - RNA, 17 nt, Human
uccuaauaaaaagguga

SEQ ID NO: 3144314 - RNA, 16 nt, Human
uccuaauaaaaaggug

SEQ ID NO: 3144315 - RNA, 18 nt, Human
uccuaauaaaaaggugac

SEQ ID NO: 3144316 - RNA, 15 nt, Human
uccuaauaaaaaggu

SEQ ID NO: 3144317 - RNA, 14 nt, Human
uccuaauaaaaagg

SEQ ID NO: 3144318 - RNA, 13 nt, Human
uccuaauaaaaag

SEQ ID NO: 3144319 - RNA, 12 nt, Human
uccuaauaaaaa

SEQ ID NO: 3144320 - RNA, 21 nt, Human
uccucugcuugccaucccucc

SEQ ID NO: 3144321 - RNA, 22 nt, Human
uccucugcuugccaucccuccc

SEQ ID NO: 3144322 - RNA, 20 nt, Human
uccucugcuugccaucccuc

SEQ ID NO: 3144323 - RNA, 19 nt, Human
uccucugcuugccaucccu

SEQ ID NO: 3144324 - RNA, 16 nt, Human
ugcacugucaagauga

SEQ ID NO: 3144325 - RNA, 16 nt, Human
ugcacgcacacugucu

SEQ ID NO: 3144326 - RNA, 21 nt, Human
ugcauuauauuuauuacugua

SEQ ID NO: 3144327 - RNA, 13 nt, Human
ugcagauucauuu

SEQ ID NO: 3144328 - RNA, 17 nt, Human
ugcagauaaacaguagu

SEQ ID NO: 3144329 - RNA, 19 nt, Human
ugcagauaaacaguaguga

SEQ ID NO: 3144330 - RNA, 17 nt, Human
ugcaugguuuagaaagc

SEQ ID NO: 3144331 - RNA, 19 nt, Human
ugcccgucuucagccuagc

SEQ ID NO: 3144332 - RNA, 17 nt, Human
ugcccgucuucagccua

SEQ ID NO: 3144333 - RNA, 18 nt, Human
ugcccgucuucagccuag

SEQ ID NO: 3144334 - RNA, 13 nt, Human
ugcccgucuucag

SEQ ID NO: 3144335 - RNA, 16 nt, Human
ugcccgucuucagccu

SEQ ID NO: 3144336 - RNA, 24 nt, Human
ugauaguuguaccgcaaugugacu

SEQ ID NO: 3144337 - RNA, 12 nt, Human
ugacucuuaaga

SEQ ID NO: 3144338 - RNA, 20 nt, Human
ugagcagucaggaaagagaa

SEQ ID NO: 3144339 - RNA, 15 nt, Human
ugagcagucaggaaa

SEQ ID NO: 3144340 - RNA, 17 nt, Human
ugagcagucaggaaaga

SEQ ID NO: 3144341 - RNA, 16 nt, Human
ugagaugcuagaacuc

SEQ ID NO: 3144342 - RNA, 14 nt, Human
ugagaugcuagaac

SEQ ID NO: 3144343 - RNA, 12 nt, Human
ugagacagcucu

SEQ ID NO: 3144344 - RNA, 16 nt, Human
ugagacagcucugcau

SEQ ID NO: 3144345 - RNA, 14 nt, Human
ugagacagcucugc

SEQ ID NO: 3144346 - RNA, 16 nt, Human
ugagaaagacuauuca

SEQ ID NO: 3144347 - RNA, 17 nt, Human
ugagaaagacuauucaa

SEQ ID NO: 3144348 - RNA, 18 nt, Human
ugagaaagacuauucaaa

SEQ ID NO: 3144349 - RNA, 15 nt, Human
ugagaaagacuauuc

SEQ ID NO: 3144350 - RNA, 23 nt, Human
ugucauccucaaagaaaguguau

SEQ ID NO: 3144351 - RNA, 22 nt, Human
ugucauccucaaagaaagugua

SEQ ID NO: 3144352 - RNA, 21 nt, Human
ugucauccucaaagaaagugu

SEQ ID NO: 3144353 - RNA, 20 nt, Human
ugucauccucaaagaaagug

SEQ ID NO: 3144354 - RNA, 19 nt, Human
ugucauccucaaagaaagu

SEQ ID NO: 3144355 - RNA, 24 nt, Human
uguccugccuauuaucugucagcu

SEQ ID NO: 3144356 - RNA, 17 nt, Human
uguccugccuauuaucu

SEQ ID NO: 3144357 - RNA, 17 nt, Human
ugucuacacuaagagag

SEQ ID NO: 3144358 - RNA, 22 nt, Human
ugucuacacuaagagagaauga

SEQ ID NO: 3144359 - RNA, 16 nt, Human
ugucucaccuggacuu

SEQ ID NO: 3144360 - RNA, 19 nt, Human
uguauuuuaaaagaaugau

SEQ ID NO: 3144361 - RNA, 18 nt, Human
uguauuuuaaaagaauga

SEQ ID NO: 3144362 - RNA, 16 nt, Human
ugucauccucaaagaa

SEQ ID NO: 3144363 - RNA, 21 nt, Human
uguaguguuggagaagaacug

SEQ ID NO: 3144364 - RNA, 20 nt, Human
uguaguguuggagaagaacu

SEQ ID NO: 3144365 - RNA, 19 nt, Human
uguaguguuggagaagaac

SEQ ID NO: 3144366 - RNA, 14 nt, Human
uguauaaaauaauu

SEQ ID NO: 3144367 - RNA, 13 nt, Human
uguauaaaauaau

SEQ ID NO: 3144368 - RNA, 21 nt, Human
uguacagaauucugcuaccuc

SEQ ID NO: 3144369 - RNA, 18 nt, Human
uguacagaauucugcuac

SEQ ID NO: 3144370 - RNA, 11 nt, Human
uguaaaauggu

SEQ ID NO: 3144371 - RNA, 12 nt, Human
uguaaaauggug

SEQ ID NO: 3144372 - RNA, 22 nt, Human
uggugauuuagcaggaagcugu

SEQ ID NO: 3144373 - RNA, 14 nt, Human
uggguagacacaca

SEQ ID NO: 3144374 - RNA, 20 nt, Human
ugguucccuugaugaagaag

SEQ ID NO: 3144375 - RNA, 17 nt, Human
ugguucccuugaugaag

SEQ ID NO: 3144376 - RNA, 16 nt, Human
ugguucccuugaugaa

SEQ ID NO: 3144377 - RNA, 23 nt, Human
uggccuucggccuccauccugag

SEQ ID NO: 3144378 - RNA, 20 nt, Human
uggccuucggccuccauccu

SEQ ID NO: 3144379 - RNA, 22 nt, Human
uggccuucggccuccauccuga

SEQ ID NO: 3144380 - RNA, 21 nt, Human
uggcuugaguuuaaauuguaa

SEQ ID NO: 3144381 - RNA, 14 nt, Human
ugggacagggagga

SEQ ID NO: 3144382 - RNA, 23 nt, Human
ugggcagcugccuccccuccucu

SEQ ID NO: 3144383 - RNA, 20 nt, Human
ugggcagcugccuccccucc

SEQ ID NO: 3144384 - RNA, 22 nt, Human
ugggcagcugccuccccuccuc

SEQ ID NO: 3144385 - RNA, 19 nt, Human
ugggcagcugccuccccuc

SEQ ID NO: 3144386 - RNA, 17 nt, Human
ugcuucuguuuuauaau

SEQ ID NO: 3144387 - RNA, 22 nt, Human
ugcuucuguuuuauaauuuugu

SEQ ID NO: 3144388 - RNA, 12 nt, Human
uuuccaacuacu

SEQ ID NO: 3144389 - RNA, 17 nt, Human
uuucauuuaucuauaau

SEQ ID NO: 3144390 - RNA, 19 nt, Human
uuuccaacuacuaauagaa

SEQ ID NO: 3144391 - RNA, 18 nt, Human
uuuccaacuacuaauaga

SEQ ID NO: 3144392 - RNA, 14 nt, Human
uuucauuuaucuau

SEQ ID NO: 3144393 - RNA, 21 nt, Human
uuucagauaaucacaauacau

SEQ ID NO: 3144394 - RNA, 17 nt, Human
uuuauggcacuaguauu

SEQ ID NO: 3144395 - RNA, 22 nt, Human
uuuauaauuuugugaagcaaaa

SEQ ID NO: 3144396 - RNA, 22 nt, Human
uuuauuguuuaaaaucauuucu

SEQ ID NO: 3144397 - RNA, 19 nt, Human
uuuaacucuauaauguguu

SEQ ID NO: 3144398 - RNA, 13 nt, Human
uuuaauaauguuu

SEQ ID NO: 3144399 - RNA, 13 nt, Human
uuuaccacuugug

SEQ ID NO: 3144400 - RNA, 19 nt, Human
uuggucuuauuuauuauug

SEQ ID NO: 3144401 - RNA, 15 nt, Human
uuggucuuauuuauu

SEQ ID NO: 3144402 - RNA, 16 nt, Human
uuggucugugagaugc

SEQ ID NO: 3144403 - RNA, 15 nt, Human
uuggucugugagaug

SEQ ID NO: 3144404 - RNA, 14 nt, Human
uuguuuaaaaucau

SEQ ID NO: 3144405 - RNA, 20 nt, Human
uuguuucauugacuaucaaa

SEQ ID NO: 3144406 - RNA, 18 nt, Human
uuguguuuugcaagccag

SEQ ID NO: 3144407 - RNA, 12 nt, Human
uugugccccugc

SEQ ID NO: 3144408 - RNA, 18 nt, Human
uucggugagcuacaaaug

SEQ ID NO: 3144409 - RNA, 15 nt, Human
uuccuuguauuuaaa

SEQ ID NO: 3144410 - RNA, 18 nt, Human
uuccuuguauuuaaauau

SEQ ID NO: 3144411 - RNA, 15 nt, Human
uucuacauacuaugg

SEQ ID NO: 3144412 - RNA, 14 nt, Human
uucuaugaaauauu

SEQ ID NO: 3144413 - RNA, 23 nt, Human
uucucuccucuccccaugauguu

SEQ ID NO: 3144414 - RNA, 19 nt, Human
uucugauaaaagauggcca

SEQ ID NO: 3144415 - RNA, 18 nt, Human
uucugauaaaagauggcc

SEQ ID NO: 3144416 - RNA, 16 nt, Human
uucugagaaagacuau

SEQ ID NO: 3144417 - RNA, 21 nt, Human
uucugagaaagacuauucaaa

SEQ ID NO: 3144418 - RNA, 15 nt, Human
uucugcuaccucacu

SEQ ID NO: 3144419 - RNA, 16 nt, Human
uucugcuaccucacug

SEQ ID NO: 3144420 - RNA, 21 nt, Human
uucugcuaccucacugggguc

SEQ ID NO: 3144421 - RNA, 17 nt, Human
uugacccacaagaaaug

SEQ ID NO: 3144422 - RNA, 14 nt, Human
uugacccacaagaa

SEQ ID NO: 3144423 - RNA, 14 nt, Human
uugaugaagaaguu

SEQ ID NO: 3144424 - RNA, 13 nt, Human
uugaugaagaagu

SEQ ID NO: 3144425 - RNA, 23 nt, Human
uugaugaagaaguugauaugccu

SEQ ID NO: 3144426 - RNA, 17 nt, Human
uucugucuucacaacag

SEQ ID NO: 3144427 - RNA, 22 nt, Human
uucugugguuucauguuaguua

SEQ ID NO: 3144428 - RNA, 18 nt, Human
uucugugguuucauguua

SEQ ID NO: 3144429 - RNA, 21 nt, Human
uuauuaacgauguccaacccg

SEQ ID NO: 3144430 - RNA, 18 nt, Human
uuauggcuauaggugcua

SEQ ID NO: 3144431 - RNA, 11 nt, Human
uuaucucaaaa

SEQ ID NO: 3144432 - RNA, 22 nt, Human
uuaugauuaaguaaugauaacu

SEQ ID NO: 3144433 - RNA, 13 nt, Human
uuauauuugaaau

SEQ ID NO: 3144434 - RNA, 20 nt, Human
uuauauuuauuacuguaaga

SEQ ID NO: 3144435 - RNA, 12 nt, Human
uuauauuugaaa

SEQ ID NO: 3144436 - RNA, 16 nt, Human
uuauauuuacaaaugg

SEQ ID NO: 3144437 - RNA, 17 nt, Human
uuauaauuuugugaagc

SEQ ID NO: 3144438 - RNA, 16 nt, Human
uuauaauuuugugaag

SEQ ID NO: 3144439 - RNA, 18 nt, Human
uuauaauuuugugaagca

SEQ ID NO: 3144440 - RNA, 11 nt, Human
uuauaaucuuu

SEQ ID NO: 3144441 - RNA, 15 nt, Human
uuauaauuuugugaa

SEQ ID NO: 3144442 - RNA, 14 nt, Human
uuauaauuuuguga

SEQ ID NO: 3144443 - RNA, 12 nt, Human
uuauaauuuaaa

SEQ ID NO: 3144444 - RNA, 19 nt, Human
uuagugccacuuaauguau

SEQ ID NO: 3144445 - RNA, 18 nt, Human
uuagugccacuuaaugua

SEQ ID NO: 3144446 - RNA, 18 nt, Human
uuaguguaugauuacugg

SEQ ID NO: 3144447 - RNA, 14 nt, Human
uucagagcugcccu

SEQ ID NO: 3144448 - RNA, 15 nt, Human
uucagagcugcccuc

SEQ ID NO: 3144449 - RNA, 17 nt, Human
uucagagcugcccucuc

SEQ ID NO: 3144450 - RNA, 20 nt, Human
uucagauaaucacaauacau

SEQ ID NO: 3144451 - RNA, 20 nt, Human
uucagagcugcccucuccug

SEQ ID NO: 3144452 - RNA, 18 nt, Human
uucagagcugcccucucc

SEQ ID NO: 3144453 - RNA, 19 nt, Human
uucagagcugcccucuccu

SEQ ID NO: 3144454 - RNA, 19 nt, Human
uucacgccugaggcaauua

SEQ ID NO: 3144455 - RNA, 20 nt, Human
uuauuuuaauaauguuucaa

SEQ ID NO: 3144456 - RNA, 19 nt, Human
uuauuuuaauaauguuuca

SEQ ID NO: 3144457 - RNA, 17 nt, Human
uuauuuuaauaauguuu

SEQ ID NO: 3144458 - RNA, 15 nt, Human
uuauuugcagagaca

SEQ ID NO: 3144459 - RNA, 18 nt, Human
uuauuugcagagacagga

SEQ ID NO: 3144460 - RNA, 17 nt, Human
uucaaauccuugaagau

SEQ ID NO: 3144461 - RNA, 18 nt, Human
uuccagauccuggaaauc

SEQ ID NO: 3144462 - RNA, 23 nt, Human
uucaguuauuauauuuacaaaug

SEQ ID NO: 3144463 - RNA, 18 nt, Human
uuuuauauuugaaauauu

SEQ ID NO: 3144464 - RNA, 13 nt, Human
uuuuauauuugaa

SEQ ID NO: 3144465 - RNA, 21 nt, Human
uuuuauaauuuugugaagcaa

SEQ ID NO: 3144466 - RNA, 23 nt, Human
uuuuauaauuuugugaagcaaaa

SEQ ID NO: 3144467 - RNA, 21 nt, Human
uuuuaaaguaacccuacaaaa

SEQ ID NO: 3144468 - RNA, 13 nt, Human
uuuucuuauuuca

SEQ ID NO: 3144469 - RNA, 18 nt, Human
uuuguauaaaauaauuuu

SEQ ID NO: 3144470 - RNA, 16 nt, Human
uuuguauaaaauaauu

SEQ ID NO: 3144471 - RNA, 17 nt, Human
uuuguauaaaauaauuu

SEQ ID NO: 3144472 - RNA, 15 nt, Human
uuuccacagaagcuc

SEQ ID NO: 3144473 - RNA, 23 nt, Human
uuuuuccaacuacuaauagaaua

SEQ ID NO: 3144474 - RNA, 21 nt, Human
uuuuuccaacuacuaauagaa

SEQ ID NO: 3144475 - RNA, 23 nt, Human
uuuuuuaaaaaagaaacauuugg

SEQ ID NO: 3144476 - RNA, 22 nt, Human
cauuccaacuaucucauuucca

SEQ ID NO: 3144477 - RNA, 21 nt, Human
cauuacagugggugccccccu

SEQ ID NO: 3144478 - RNA, 13 nt, Human
cauucuggaauaa

SEQ ID NO: 3144479 - RNA, 21 nt, Human
cauuguaaaugugcuuuuaaa

SEQ ID NO: 3144480 - RNA, 20 nt, Human
caugugcuaguaauuggaaa

SEQ ID NO: 3144481 - RNA, 23 nt, Human
caugggacagggaggacgcucuc

SEQ ID NO: 3144482 - RNA, 15 nt, Human
cauggagcugggcua

SEQ ID NO: 3144483 - RNA, 20 nt, Human
cauggaauuggagcucgugg

SEQ ID NO: 3144484 - RNA, 20 nt, Human
caucccucccuccaccuccc

SEQ ID NO: 3144485 - RNA, 21 nt, Human
caucauuauuugcagagacag

SEQ ID NO: 3144486 - RNA, 22 nt, Human
caucccucccuccaccucccug

SEQ ID NO: 3144487 - RNA, 23 nt, Human
caucccucccuccaccucccugc

SEQ ID NO: 3144488 - RNA, 18 nt, Human
caucccuuaccugggaaa

SEQ ID NO: 3144489 - RNA, 13 nt, Human
cauccgaggcagg

SEQ ID NO: 3144490 - RNA, 14 nt, Human
cauccgaggcaggg

SEQ ID NO: 3144491 - RNA, 15 nt, Human
cauccgaggcagggu

SEQ ID NO: 3144492 - RNA, 23 nt, Human
cauccgaggcagggucaggagag

SEQ ID NO: 3144493 - RNA, 16 nt, Human
cauccgaggcaggguc

SEQ ID NO: 3144494 - RNA, 22 nt, Human
cauccgaggcagggucaggaga

SEQ ID NO: 3144495 - RNA, 23 nt, Human
cagugcucuuuucuccucacugu

SEQ ID NO: 3144496 - RNA, 14 nt, Human
cagugcucuuuucu

SEQ ID NO: 3144497 - RNA, 16 nt, Human
cauagguuuaauaauu

SEQ ID NO: 3144498 - RNA, 13 nt, Human
cauauauaacaau

SEQ ID NO: 3144499 - RNA, 15 nt, Human
cauauauaacaaugc

SEQ ID NO: 3144500 - RNA, 16 nt, Human
caugagguacugagag

SEQ ID NO: 3144501 - RNA, 19 nt, Human
caugagguacugagaguga

SEQ ID NO: 3144502 - RNA, 19 nt, Human
caugaagauguagaggaga

SEQ ID NO: 3144503 - RNA, 18 nt, Human
caugaagauguagaggag

SEQ ID NO: 3144504 - RNA, 16 nt, Human
ccaggcgcuaauucaa

SEQ ID NO: 3144505 - RNA, 14 nt, Human
ccaguuauggcuau

SEQ ID NO: 3144506 - RNA, 18 nt, Human
ccaguuaauuuuuccaac

SEQ ID NO: 3144507 - RNA, 16 nt, Human
ccaguuaauuuuucca

SEQ ID NO: 3144508 - RNA, 19 nt, Human
ccaguguuuuaggagcaug

SEQ ID NO: 3144509 - RNA, 19 nt, Human
ccaugggacagggaggacg

SEQ ID NO: 3144510 - RNA, 16 nt, Human
ccaugggacagggagg

SEQ ID NO: 3144511 - RNA, 17 nt, Human
ccaccugacacaccagg

SEQ ID NO: 3144512 - RNA, 16 nt, Human
ccaccugacacaccag

SEQ ID NO: 3144513 - RNA, 23 nt, Human
ccaccugacacaccaggcgcuaa

SEQ ID NO: 3144514 - RNA, 20 nt, Human
ccaccugacacaccaggcgc

SEQ ID NO: 3144515 - RNA, 22 nt, Human
ccagccagcaguucagagcugc

SEQ ID NO: 3144516 - RNA, 13 nt, Human
ccagccagcagcc

SEQ ID NO: 3144517 - RNA, 15 nt, Human
ccagccagcagccag

SEQ ID NO: 3144518 - RNA, 16 nt, Human
ccagccagcagccagc

SEQ ID NO: 3144519 - RNA, 19 nt, Human
ccagccagcagccagcucu

SEQ ID NO: 3144520 - RNA, 23 nt, Human
ccagccagcagccagcucucagc

SEQ ID NO: 3144521 - RNA, 23 nt, Human
ccagcaguucagagcugcccucu

SEQ ID NO: 3144522 - RNA, 13 nt, Human
ccagcaguucaga

SEQ ID NO: 3144523 - RNA, 18 nt, Human
ccagcaguucagagcugc

SEQ ID NO: 3144524 - RNA, 19 nt, Human
ccagcaguucagagcugcc

SEQ ID NO: 3144525 - RNA, 20 nt, Human
ccagcaguucagagcugccc

SEQ ID NO: 3144526 - RNA, 21 nt, Human
ccagcaguucagagcugcccu

SEQ ID NO: 3144527 - RNA, 22 nt, Human
ccagcaguucagagcugcccuc

SEQ ID NO: 3144528 - RNA, 24 nt, Human
ccagcacuaaagcaguggacacca

SEQ ID NO: 3144529 - RNA, 18 nt, Human
ccagcacuaaagcagugg

SEQ ID NO: 3144530 - RNA, 17 nt, Human
ccagcacuaaagcagug

SEQ ID NO: 3144531 - RNA, 17 nt, Human
ccagaggagccaccagu

SEQ ID NO: 3144532 - RNA, 16 nt, Human
ccagaggagccaccag

SEQ ID NO: 3144533 - RNA, 21 nt, Human
ccagaggagccaccaguucuc

SEQ ID NO: 3144534 - RNA, 19 nt, Human
ccagaggagccaccaguuc

SEQ ID NO: 3144535 - RNA, 11 nt, Human
ccugagcccca

SEQ ID NO: 3144536 - RNA, 17 nt, Human
ccugacacaccaggcgc

SEQ ID NO: 3144537 - RNA, 15 nt, Human
ccugacacaccaggc

SEQ ID NO: 3144538 - RNA, 14 nt, Human
ccugacacaccagg

SEQ ID NO: 3144539 - RNA, 18 nt, Human
ccugacacaccaggcgcu

SEQ ID NO: 3144540 - RNA, 16 nt, Human
ccugcaauaaaauggg

SEQ ID NO: 3144541 - RNA, 22 nt, Human
ccugggcagcugccuccccucc

SEQ ID NO: 3144542 - RNA, 19 nt, Human
ccugccuauuaucugucag

SEQ ID NO: 3144543 - RNA, 23 nt, Human
ccuggaaaucaggguuaguauug

SEQ ID NO: 3144544 - RNA, 18 nt, Human
cgagcaggcuacugucag

SEQ ID NO: 3144545 - RNA, 20 nt, Human
ccuguuaaaagaugaaaaua

SEQ ID NO: 3144546 - RNA, 21 nt, Human
ccuguuaaaagaugaaaauau

SEQ ID NO: 3144547 - RNA, 21 nt, Human
ccuuguauuuaaauauuaaau

SEQ ID NO: 3144548 - RNA, 19 nt, Human
ccuuggggcugaugcaguu

SEQ ID NO: 3144549 - RNA, 14 nt, Human
ccuugaugaagaag

SEQ ID NO: 3144550 - RNA, 20 nt, Human
ccuugaaaacuuuaugcuaa

SEQ ID NO: 3144551 - RNA, 13 nt, Human
ccuugaacacugg

SEQ ID NO: 3144552 - RNA, 20 nt, Human
ccuugaacacugggggaggg

SEQ ID NO: 3144553 - RNA, 20 nt, Human
ccuucggccuccauccugag

SEQ ID NO: 3144554 - RNA, 19 nt, Human
ccuucggccuccauccuga

SEQ ID NO: 3144555 - RNA, 14 nt, Human
ccuucggccuccau

SEQ ID NO: 3144556 - RNA, 18 nt, Human
ccuccucugcuugccauc

SEQ ID NO: 3144557 - RNA, 16 nt, Human
ccuccucugcuugcca

SEQ ID NO: 3144558 - RNA, 13 nt, Human
ccuccucugcuug

SEQ ID NO: 3144559 - RNA, 18 nt, Human
ccuccucuguccagggcc

SEQ ID NO: 3144560 - RNA, 15 nt, Human
ccuccucuguccagg

SEQ ID NO: 3144561 - RNA, 16 nt, Human
ccuccucuguccaggg

SEQ ID NO: 3144562 - RNA, 12 nt, Human
ccuccucugucc

SEQ ID NO: 3144563 - RNA, 17 nt, Human
ccucccuccaccucccu

SEQ ID NO: 3144564 - RNA, 20 nt, Human
ccucccuccaccucccugca

SEQ ID NO: 3144565 - RNA, 14 nt, Human
ccuccauccugagg

SEQ ID NO: 3144566 - RNA, 17 nt, Human
ccuccaccucccugcaa

SEQ ID NO: 3144567 - RNA, 22 nt, Human
ccuccaccucccugcaauaaaa

SEQ ID NO: 3144568 - RNA, 13 nt, Human
ccuccaccucccu

SEQ ID NO: 3144569 - RNA, 14 nt, Human
ccuccaccucccug

SEQ ID NO: 3144570 - RNA, 15 nt, Human
ccuccaccucccugc

SEQ ID NO: 3144571 - RNA, 14 nt, Human
ccucauccgaggca

SEQ ID NO: 3144572 - RNA, 15 nt, Human
ccucauccgaggcag

SEQ ID NO: 3144573 - RNA, 17 nt, Human
ccucauccgaggcaggg

SEQ ID NO: 3144574 - RNA, 20 nt, Human
ccucauccgaggcaggguca

SEQ ID NO: 3144575 - RNA, 20 nt, Human
ccgaggcagggucaggagag

SEQ ID NO: 3144576 - RNA, 14 nt, Human
ccgaggcaggguca

SEQ ID NO: 3144577 - RNA, 16 nt, Human
ccgggcguggugguga

SEQ ID NO: 3144578 - RNA, 13 nt, Human
ccuacaccauucc

SEQ ID NO: 3144579 - RNA, 15 nt, Human
cccgugggguuccuc

SEQ ID NO: 3144580 - RNA, 17 nt, Human
cccgucuggcccaccag

SEQ ID NO: 3144581 - RNA, 18 nt, Human
cccuacaccccuccccug

SEQ ID NO: 3144582 - RNA, 19 nt, Human
cccuccaccucccugcaau

SEQ ID NO: 3144583 - RNA, 15 nt, Human
cccuccaccucccug

SEQ ID NO: 3144584 - RNA, 17 nt, Human
cccuccaccucccugca

SEQ ID NO: 3144585 - RNA, 14 nt, Human
cccuccaccucccu

SEQ ID NO: 3144586 - RNA, 12 nt, Human
cccuccaccucc

SEQ ID NO: 3144587 - RNA, 14 nt, Human
cccucuccugggca

SEQ ID NO: 3144588 - RNA, 11 nt, Human
cccucuccugg

SEQ ID NO: 3144589 - RNA, 12 nt, Human
cccucuccuggg

SEQ ID NO: 3144590 - RNA, 13 nt, Human
cccucuccugggc

SEQ ID NO: 3144591 - RNA, 23 nt, Human
cccugguaauaaguacuguguac

SEQ ID NO: 3144592 - RNA, 13 nt, Human
cccaccagggucc

SEQ ID NO: 3144593 - RNA, 18 nt, Human
cccaccugacacaccagg

SEQ ID NO: 3144594 - RNA, 13 nt, Human
cccacaagaaaug

SEQ ID NO: 3144595 - RNA, 20 nt, Human
cccacaagaaaugaaagcag

SEQ ID NO: 3144596 - RNA, 15 nt, Human
cuguuaaaagaugaa

SEQ ID NO: 3144597 - RNA, 16 nt, Human
cuguuaaaagaugaaa

SEQ ID NO: 3144598 - RNA, 19 nt, Human
cuguuaaaagaugaaaaua

SEQ ID NO: 3144599 - RNA, 18 nt, Human
cugugguuucauguuagu

SEQ ID NO: 3144600 - RNA, 17 nt, Human
cugugguuucauguuag

SEQ ID NO: 3144601 - RNA, 16 nt, Human
cugugguuucauguua

SEQ ID NO: 3144602 - RNA, 15 nt, Human
cugugguuucauguu

SEQ ID NO: 3144603 - RNA, 18 nt, Human
cugucuucacaacagauu

SEQ ID NO: 3144604 - RNA, 14 nt, Human
cugucugccagcca

SEQ ID NO: 3144605 - RNA, 15 nt, Human
cugucugccagccag

SEQ ID NO: 3144606 - RNA, 16 nt, Human
cugucugccagccagc

SEQ ID NO: 3144607 - RNA, 17 nt, Human
cugucugccagccagca

SEQ ID NO: 3144608 - RNA, 20 nt, Human
cugucugccagccagcagcc

SEQ ID NO: 3144609 - RNA, 21 nt, Human
cugucugccagccagcagcca

SEQ ID NO: 3144610 - RNA, 23 nt, Human
cugggguggguggggcagugcuu

SEQ ID NO: 3144611 - RNA, 23 nt, Human
cuuaagaagacugcauuauauuu

SEQ ID NO: 3144612 - RNA, 21 nt, Human
cuuaagaagacugcauuauau

SEQ ID NO: 3144613 - RNA, 16 nt, Human
cuuaauuaaaagaaua

SEQ ID NO: 3144614 - RNA, 17 nt, Human
cuuaauuaaaagaauau

SEQ ID NO: 3144615 - RNA, 19 nt, Human
cuuaauuaaaagaauauuu

SEQ ID NO: 3144616 - RNA, 20 nt, Human
cuuaauuaaaagaauauuuu

SEQ ID NO: 3144617 - RNA, 18 nt, Human
cuuagacccucaugcugc

SEQ ID NO: 3144618 - RNA, 22 nt, Human
cuuagacccucaugcugccaau

SEQ ID NO: 3144619 - RNA, 21 nt, Human
cuuagacccucaugcugccaa

SEQ ID NO: 3144620 - RNA, 20 nt, Human
cuuagacccucaugcugcca

SEQ ID NO: 3144621 - RNA, 19 nt, Human
cuuagacccucaugcugcc

SEQ ID NO: 3144622 - RNA, 23 nt, Human
cuuagacccucaugcugccaaua

SEQ ID NO: 3144623 - RNA, 12 nt, Human
cuuagaccucag

SEQ ID NO: 3144624 - RNA, 13 nt, Human
cuuagaccucagc

SEQ ID NO: 3144625 - RNA, 14 nt, Human
cuuagaccucagcc

SEQ ID NO: 3144626 - RNA, 15 nt, Human
cuuagaccucagccu

SEQ ID NO: 3144627 - RNA, 16 nt, Human
cuuagaccucagccug

SEQ ID NO: 3144628 - RNA, 20 nt, Human
cuuagaccucagccugugcu

SEQ ID NO: 3144629 - RNA, 17 nt, Human
cuuagaccucagccugu

SEQ ID NO: 3144630 - RNA, 18 nt, Human
cuuagaccucagccugug

SEQ ID NO: 3144631 - RNA, 15 nt, Human
cuguuuuauaauuuu

SEQ ID NO: 3144632 - RNA, 14 nt, Human
cuguuuuauaauuu

SEQ ID NO: 3144633 - RNA, 15 nt, Human
cuucagccugaaaga

SEQ ID NO: 3144634 - RNA, 12 nt, Human
cuucacaacaga

SEQ ID NO: 3144635 - RNA, 14 nt, Human
cuucacaacagauu

SEQ ID NO: 3144636 - RNA, 16 nt, Human
cuucacacacaggcaa

SEQ ID NO: 3144637 - RNA, 17 nt, Human
cuucacacacaggcaac

SEQ ID NO: 3144638 - RNA, 17 nt, Human
cuucaaauccuugaaga

SEQ ID NO: 3144639 - RNA, 20 nt, Human
cuuccuuggacucauuuuaa

SEQ ID NO: 3144640 - RNA, 20 nt, Human
cuucggccuccauccugagg

SEQ ID NO: 3144641 - RNA, 19 nt, Human
cuucggccuccauccugag

SEQ ID NO: 3144642 - RNA, 20 nt, Human
gaauaauccuaaacauauga

SEQ ID NO: 3144643 - RNA, 14 nt, Human
gaauacuuuauaaa

SEQ ID NO: 3144644 - RNA, 17 nt, Human
gaauaaaggcaguuuuc

SEQ ID NO: 3144645 - RNA, 16 nt, Human
gaauaaaggcaguuuu

SEQ ID NO: 3144646 - RNA, 15 nt, Human
gaauaaaggcaguuu

SEQ ID NO: 3144647 - RNA, 20 nt, Human
gaauaaaggcaguuuucuaa

SEQ ID NO: 3144648 - RNA, 19 nt, Human
gaauaaaggcaguuuucua

SEQ ID NO: 3144649 - RNA, 21 nt, Human
gaagccuuggggcugaugcag

SEQ ID NO: 3144650 - RNA, 22 nt, Human
gaacuagaguuuagcuggaaaa

SEQ ID NO: 3144651 - RNA, 21 nt, Human
gaacuagaguuuagcuggaaa

SEQ ID NO: 3144652 - RNA, 18 nt, Human
gaacacugggggagggga

SEQ ID NO: 3144653 - RNA, 20 nt, Human
gaacacugggggaggggaca

SEQ ID NO: 3144654 - RNA, 21 nt, Human
gaacuuguaaaggaauuuaaa

SEQ ID NO: 3144655 - RNA, 21 nt, Human
gaagaagcaccaaucaugaau

SEQ ID NO: 3144656 - RNA, 14 nt, Human
gaacucccuuucaa

SEQ ID NO: 3144657 - RNA, 22 nt, Human
gaacuuccagauccuggaaauc

SEQ ID NO: 3144658 - RNA, 16 nt, Human
gaacacugggggaggg

SEQ ID NO: 3144659 - RNA, 17 nt, Human
gaacacugggggagggg

SEQ ID NO: 3144660 - RNA, 18 nt, Human
gaaauuguauuacaaauc

SEQ ID NO: 3144661 - RNA, 16 nt, Human
gaaauauuauguuaaa

SEQ ID NO: 3144662 - RNA, 13 nt, Human
gaaauauuauguu

SEQ ID NO: 3144663 - RNA, 23 nt, Human
gaaacaguugguaacuuuuguga

SEQ ID NO: 3144664 - RNA, 21 nt, Human
gaaacaguugguaacuuuugu

SEQ ID NO: 3144665 - RNA, 20 nt, Human
gaaacaguugguaacuuuug

SEQ ID NO: 3144666 - RNA, 19 nt, Human
gaaacaguugguaacuuuu

SEQ ID NO: 3144667 - RNA, 18 nt, Human
gaaacaguugguaacuuu

SEQ ID NO: 3144668 - RNA, 18 nt, Human
gaaauaaaguuggugaca

SEQ ID NO: 3144669 - RNA, 19 nt, Human
gaaauaaagucagauggaa

SEQ ID NO: 3144670 - RNA, 14 nt, Human
gaaauaaagucaga

SEQ ID NO: 3144671 - RNA, 13 nt, Human
cuuuccacagaag

SEQ ID NO: 3144672 - RNA, 18 nt, Human
cuuuauaacuaacauguc

SEQ ID NO: 3144673 - RNA, 18 nt, Human
cuuuaaagggauggcaag

SEQ ID NO: 3144674 - RNA, 22 nt, Human
cuugccaucccucccuccaccu

SEQ ID NO: 3144675 - RNA, 19 nt, Human
cuugccaucccucccucca

SEQ ID NO: 3144676 - RNA, 21 nt, Human
cuugccaucccucccuccacc

SEQ ID NO: 3144677 - RNA, 16 nt, Human
cuugccagacaugugg

SEQ ID NO: 3144678 - RNA, 18 nt, Human
cuuguaaaggaauuuaaa

SEQ ID NO: 3144679 - RNA, 19 nt, Human
cuuguaaaggaauuuaaaa

SEQ ID NO: 3144680 - RNA, 17 nt, Human
cuuuucuccucacugua

SEQ ID NO: 3144681 - RNA, 12 nt, Human
gaaaauaucacu

SEQ ID NO: 3144682 - RNA, 19 nt, Human
gaaaaucuuauaauuuaaa

SEQ ID NO: 3144683 - RNA, 19 nt, Human
gaaaauaacgauaaaagac

SEQ ID NO: 3144684 - RNA, 19 nt, Human
gaaaauaacaauaaaagac

SEQ ID NO: 3144685 - RNA, 20 nt, Human
gaaaaucuuauaauuuaaaa

SEQ ID NO: 3144686 - RNA, 17 nt, Human
cuuuugacacugcucua

SEQ ID NO: 3144687 - RNA, 12 nt, Human
cuuuugacacug

SEQ ID NO: 3144688 - RNA, 18 nt, Human
cuuuugacacugcucuaa

SEQ ID NO: 3144689 - RNA, 14 nt, Human
gaaaacaaggauga

SEQ ID NO: 3144690 - RNA, 22 nt, Human
gaaaacaauaacgauaaaagac

SEQ ID NO: 3144691 - RNA, 13 nt, Human
cucacauuuauau

SEQ ID NO: 3144692 - RNA, 20 nt, Human
cuauaggugcuacaaaaaca

SEQ ID NO: 3144693 - RNA, 21 nt, Human
cuauaggugcuacaaaaacac

SEQ ID NO: 3144694 - RNA, 22 nt, Human
cuauaggugcuacaaaaacaca

SEQ ID NO: 3144695 - RNA, 15 nt, Human
cuauaggugcuacaa

SEQ ID NO: 3144696 - RNA, 13 nt, Human
cuauaauuuaaau

SEQ ID NO: 3144697 - RNA, 22 nt, Human
cuauaauuuaccuaagauuaca

SEQ ID NO: 3144698 - RNA, 18 nt, Human
cuauucaaacagucucag

SEQ ID NO: 3144699 - RNA, 16 nt, Human
cuauucaaacagucuc

SEQ ID NO: 3144700 - RNA, 23 nt, Human
cuauucaaacagucucaggaaau

SEQ ID NO: 3144701 - RNA, 21 nt, Human
cuagugagcagucaggaaaga

SEQ ID NO: 3144702 - RNA, 18 nt, Human
cuagugaaagaggcagcu

SEQ ID NO: 3144703 - RNA, 19 nt, Human
cuagugaaagaggcagcuu

SEQ ID NO: 3144704 - RNA, 20 nt, Human
cuagugaaacucguuaauuu

SEQ ID NO: 3144705 - RNA, 16 nt, Human
cuaguaauuggaaagg

SEQ ID NO: 3144706 - RNA, 20 nt, Human
cuccccuccucugcuugcca

SEQ ID NO: 3144707 - RNA, 13 nt, Human
cuccauccugagg

SEQ ID NO: 3144708 - RNA, 11 nt, Human
cuccccuccuc

SEQ ID NO: 3144709 - RNA, 13 nt, Human
cuccccuccucug

SEQ ID NO: 3144710 - RNA, 23 nt, Human
cuccaccucccugcaauaaaaug

SEQ ID NO: 3144711 - RNA, 13 nt, Human
cuccaaagaaaug

SEQ ID NO: 3144712 - RNA, 12 nt, Human
cuccaaagaaau

SEQ ID NO: 3144713 - RNA, 21 nt, Human
cuccaaacugacucuuaagaa

SEQ ID NO: 3144714 - RNA, 14 nt, Human
cucauuucuagcag

SEQ ID NO: 3144715 - RNA, 21 nt, Human
cucauuuccaagcaaguauua

SEQ ID NO: 3144716 - RNA, 17 nt, Human
cuccaccuugcagcucu

SEQ ID NO: 3144717 - RNA, 11 nt, Human
cuccauccuga

SEQ ID NO: 3144718 - RNA, 12 nt, Human
cuccauccugag

SEQ ID NO: 3144719 - RNA, 17 nt, Human
cucauccgaggcagggu

SEQ ID NO: 3144720 - RNA, 14 nt, Human
cucauccgaggcag

SEQ ID NO: 3144721 - RNA, 15 nt, Human
cucauccgaggcagg

SEQ ID NO: 3144722 - RNA, 23 nt, Human
cugccuauuaucugucagcugca

SEQ ID NO: 3144723 - RNA, 17 nt, Human
cugccuauuaucuguca

SEQ ID NO: 3144724 - RNA, 20 nt, Human
cugcaucagcugcugaaaca

SEQ ID NO: 3144725 - RNA, 22 nt, Human
cugcaauaaaauggguuuuacu

SEQ ID NO: 3144726 - RNA, 15 nt, Human
cugcaauaaaauggg

SEQ ID NO: 3144727 - RNA, 21 nt, Human
cugaggcuccacuuggucugu

SEQ ID NO: 3144728 - RNA, 15 nt, Human
cugaggcuccacuug

SEQ ID NO: 3144729 - RNA, 22 nt, Human
cucuggccuucggccuccaucc

SEQ ID NO: 3144730 - RNA, 19 nt, Human
cucuggccuucggccucca

SEQ ID NO: 3144731 - RNA, 21 nt, Human
cucuggccuucggccuccauc

SEQ ID NO: 3144732 - RNA, 13 nt, Human
cucuuaagaagac

SEQ ID NO: 3144733 - RNA, 19 nt, Human
cucuuaagaagacugcauu

SEQ ID NO: 3144734 - RNA, 16 nt, Human
cugagcaggauuuuaa

SEQ ID NO: 3144735 - RNA, 16 nt, Human
cugagaugugaacaca

SEQ ID NO: 3144736 - RNA, 20 nt, Human
cugagaugugaacacaucag

SEQ ID NO: 3144737 - RNA, 19 nt, Human
cugagaaagacuauucaaa

SEQ ID NO: 3144738 - RNA, 20 nt, Human
cugagaaagacuauucaaac

SEQ ID NO: 3144739 - RNA, 21 nt, Human
cugagaugugaacacaucagc

SEQ ID NO: 3144740 - RNA, 23 nt, Human
cugacgacuugagugcucaguag

SEQ ID NO: 3144741 - RNA, 12 nt, Human
cugagaaagacu

SEQ ID NO: 3144742 - RNA, 13 nt, Human
cugagaaagacua

SEQ ID NO: 3144743 - RNA, 15 nt, Human
cugagaaagacuauu

SEQ ID NO: 3144744 - RNA, 18 nt, Human
cugagaaagacuauucaa

SEQ ID NO: 3144745 - RNA, 22 nt, Human
cugacuaaacuuuuuuucugua

SEQ ID NO: 3144746 - RNA, 19 nt, Human
cugacuaaacuuuuuuucu

SEQ ID NO: 3144747 - RNA, 15 nt, Human
cugacuaaacuuuuu

SEQ ID NO: 3144748 - RNA, 14 nt, Human
cugacuaaacuuuu

SEQ ID NO: 3144749 - RNA, 17 nt, Human
cugaacaucacagcuua

SEQ ID NO: 3144750 - RNA, 13 nt, Human
gauugugccccug

SEQ ID NO: 3144751 - RNA, 13 nt, Human
gaucuuuaaaaua

SEQ ID NO: 3144752 - RNA, 14 nt, Human
gaucuuuaaaauac

SEQ ID NO: 3144753 - RNA, 18 nt, Human
gaugcaguucugaagaag

SEQ ID NO: 3144754 - RNA, 16 nt, Human
gaugggaaagcauugu

SEQ ID NO: 3144755 - RNA, 22 nt, Human
gaugcuagaacucccuuucaac

SEQ ID NO: 3144756 - RNA, 16 nt, Human
gaguaauuuauuguuu

SEQ ID NO: 3144757 - RNA, 13 nt, Human
gauagcagggcau

SEQ ID NO: 3144758 - RNA, 21 nt, Human
gaguugaaaaucuuauaauuu

SEQ ID NO: 3144759 - RNA, 17 nt, Human
gaguuacaguucugugg

SEQ ID NO: 3144760 - RNA, 19 nt, Human
gagugaacaaauuuacaga

SEQ ID NO: 3144761 - RNA, 22 nt, Human
gagugaacaaauuuacagagac

SEQ ID NO: 3144762 - RNA, 19 nt, Human
gagugucuuaauuaaaaga

SEQ ID NO: 3144763 - RNA, 14 nt, Human
gagcuacaaaugca

SEQ ID NO: 3144764 - RNA, 15 nt, Human
gagcugcccucuccu

SEQ ID NO: 3144765 - RNA, 16 nt, Human
gagcugcccucuccug

SEQ ID NO: 3144766 - RNA, 14 nt, Human
gagcugcccucucc

SEQ ID NO: 3144767 - RNA, 13 nt, Human
gagcuacaaaugc

SEQ ID NO: 3144768 - RNA, 12 nt, Human
gagcuacaaaug

SEQ ID NO: 3144769 - RNA, 13 nt, Human
gagcacacuguag

SEQ ID NO: 3144770 - RNA, 15 nt, Human
gagcacacuguagca

SEQ ID NO: 3144771 - RNA, 13 nt, Human
gagccaccaguuc

SEQ ID NO: 3144772 - RNA, 14 nt, Human
gagccaccaguucu

SEQ ID NO: 3144773 - RNA, 21 nt, Human
gagcaggcuacugucagcucc

SEQ ID NO: 3144774 - RNA, 19 nt, Human
gaggcagagguugcaguga

SEQ ID NO: 3144775 - RNA, 16 nt, Human
gaggcagacagcagcu

SEQ ID NO: 3144776 - RNA, 12 nt, Human
gaggcagacagc

SEQ ID NO: 3144777 - RNA, 15 nt, Human
gaggcagacagcagc

SEQ ID NO: 3144778 - RNA, 21 nt, Human
gaggcaauuagacacuuugga

SEQ ID NO: 3144779 - RNA, 16 nt, Human
gaggagccaccaguuc

SEQ ID NO: 3144780 - RNA, 18 nt, Human
gaggagccaccaguucuc

SEQ ID NO: 3144781 - RNA, 19 nt, Human
gccagacuggcacaguuuu

SEQ ID NO: 3144782 - RNA, 15 nt, Human
gccagacuggcacag

SEQ ID NO: 3144783 - RNA, 18 nt, Human
gccagacuggcacaguuu

SEQ ID NO: 3144784 - RNA, 23 nt, Human
gccaauauccuaauaaaaaggug

SEQ ID NO: 3144785 - RNA, 22 nt, Human
gccaauauccuaauaaaaaggu

SEQ ID NO: 3144786 - RNA, 20 nt, Human
gccaauauccuaauaaaaag

SEQ ID NO: 3144787 - RNA, 19 nt, Human
gccaauauccuaauaaaaa

SEQ ID NO: 3144788 - RNA, 18 nt, Human
gccaauauccuaauaaaa

SEQ ID NO: 3144789 - RNA, 13 nt, Human
gccaauauccuaa

SEQ ID NO: 3144790 - RNA, 17 nt, Human
gccaauauccuaauaaa

SEQ ID NO: 3144791 - RNA, 16 nt, Human
gccaauauccuaauaa

SEQ ID NO: 3144792 - RNA, 15 nt, Human
gccaauauccuaaua

SEQ ID NO: 3144793 - RNA, 14 nt, Human
gccaauauccuaau

SEQ ID NO: 3144794 - RNA, 23 nt, Human
gccaugggacagggaggacgcuc

SEQ ID NO: 3144795 - RNA, 22 nt, Human
gccaugggacagggaggacgcu

SEQ ID NO: 3144796 - RNA, 20 nt, Human
gcccaaguucaugcagcugu

SEQ ID NO: 3144797 - RNA, 19 nt, Human
gcccaaguucaugcagcug

SEQ ID NO: 3144798 - RNA, 14 nt, Human
gcagggucaggaga

SEQ ID NO: 3144799 - RNA, 15 nt, Human
gcagggucaggagag

SEQ ID NO: 3144800 - RNA, 16 nt, Human
gcagggucaggagagg

SEQ ID NO: 3144801 - RNA, 17 nt, Human
gcagggucaggagaggg

SEQ ID NO: 3144802 - RNA, 19 nt, Human
gcaguucagagcugcccuc

SEQ ID NO: 3144803 - RNA, 20 nt, Human
gcaguucagagcugcccucu

SEQ ID NO: 3144804 - RNA, 22 nt, Human
gcaguucagagcugcccucucc

SEQ ID NO: 3144805 - RNA, 23 nt, Human
gcaguucagagcugcccucuccu

SEQ ID NO: 3144806 - RNA, 21 nt, Human
gcaguugaaaagacuccaaag

SEQ ID NO: 3144807 - RNA, 16 nt, Human
gcaguugaaaagacuc

SEQ ID NO: 3144808 - RNA, 19 nt, Human
gcaguugaaaagacuccaa

SEQ ID NO: 3144809 - RNA, 15 nt, Human
gcaguugaaaagacu

SEQ ID NO: 3144810 - RNA, 12 nt, Human
gcaucagcugcu

SEQ ID NO: 3144811 - RNA, 23 nt, Human
gcaucagcugcugaaacaacaaa

SEQ ID NO: 3144812 - RNA, 22 nt, Human
gcaucagcugcugaaacaacaa

SEQ ID NO: 3144813 - RNA, 20 nt, Human
gcaucuagcaugucgucaaa

SEQ ID NO: 3144814 - RNA, 22 nt, Human
gcaucauuauuugcagagacag

SEQ ID NO: 3144815 - RNA, 16 nt, Human
gcaggaagcugugaga

SEQ ID NO: 3144816 - RNA, 18 nt, Human
gcagagguugcagugagc

SEQ ID NO: 3144817 - RNA, 23 nt, Human
gcagagguugcagugagccgaga

SEQ ID NO: 3144818 - RNA, 15 nt, Human
gcacagccucuuaga

SEQ ID NO: 3144819 - RNA, 11 nt, Human
gcacagcccuu

SEQ ID NO: 3144820 - RNA, 20 nt, Human
gcacuaaagcaguggacacc

SEQ ID NO: 3144821 - RNA, 14 nt, Human
gcacuaaagcagug

SEQ ID NO: 3144822 - RNA, 15 nt, Human
gcacgcacacugucu

SEQ ID NO: 3144823 - RNA, 16 nt, Human
gcacgcacacugucug

SEQ ID NO: 3144824 - RNA, 19 nt, Human
gcacuguggguagacacac

SEQ ID NO: 3144825 - RNA, 23 nt, Human
gcuggucccagccagcaguucag

SEQ ID NO: 3144826 - RNA, 18 nt, Human
gcuugcccuguuaaaaga

SEQ ID NO: 3144827 - RNA, 17 nt, Human
gcuuagaccucagccug

SEQ ID NO: 3144828 - RNA, 13 nt, Human
gcuuagaccucag

SEQ ID NO: 3144829 - RNA, 14 nt, Human
gcuuagaccucagc

SEQ ID NO: 3144830 - RNA, 15 nt, Human
gcuuagaccucagcc

SEQ ID NO: 3144831 - RNA, 16 nt, Human
gcuuagaccucagccu

SEQ ID NO: 3144832 - RNA, 21 nt, Human
gcuuagacccucaugcugcca

SEQ ID NO: 3144833 - RNA, 16 nt, Human
gcuuagacccucaugc

SEQ ID NO: 3144834 - RNA, 19 nt, Human
gcuucuguuuuauaauuuu

SEQ ID NO: 3144835 - RNA, 21 nt, Human
gcugauuaaaccaaggcuaga

SEQ ID NO: 3144836 - RNA, 12 nt, Human
gcugcccucucc

SEQ ID NO: 3144837 - RNA, 20 nt, Human
gcugacuaaacuuuuuuucu

SEQ ID NO: 3144838 - RNA, 21 nt, Human
gcuggaaaaguauguuagugc

SEQ ID NO: 3144839 - RNA, 23 nt, Human
gcuggaaaaguauguuagugcaa

SEQ ID NO: 3144840 - RNA, 23 nt, Human
gcugcccucuccugggcagcugc

SEQ ID NO: 3144841 - RNA, 13 nt, Human
gcugcccucuccu

SEQ ID NO: 3144842 - RNA, 14 nt, Human
gcugcccucuccug

SEQ ID NO: 3144843 - RNA, 15 nt, Human
gcugcccucuccugg

SEQ ID NO: 3144844 - RNA, 16 nt, Human
gcugcccucuccuggg

SEQ ID NO: 3144845 - RNA, 17 nt, Human
gcugcccucuccugggc

SEQ ID NO: 3144846 - RNA, 18 nt, Human
gcugcccucuccugggca

SEQ ID NO: 3144847 - RNA, 20 nt, Human
gcugcccucuccugggcagc

SEQ ID NO: 3144848 - RNA, 22 nt, Human
gcugcccucuccugggcagcug

SEQ ID NO: 3144849 - RNA, 18 nt, Human
gccuuggggcugaugcag

SEQ ID NO: 3144850 - RNA, 16 nt, Human
gccuuccccuugccca

SEQ ID NO: 3144851 - RNA, 18 nt, Human
gccuuccccuugcccagg

SEQ ID NO: 3144852 - RNA, 20 nt, Human
gccugagcgacagugagacu

SEQ ID NO: 3144853 - RNA, 17 nt, Human
gccugagcgacagugag

SEQ ID NO: 3144854 - RNA, 14 nt, Human
gcuccugucugcca

SEQ ID NO: 3144855 - RNA, 16 nt, Human
gcuccugucugccagc

SEQ ID NO: 3144856 - RNA, 17 nt, Human
gcuccugucugccagcc

SEQ ID NO: 3144857 - RNA, 18 nt, Human
gcuccugucugccagcca

SEQ ID NO: 3144858 - RNA, 19 nt, Human
gcuccugucugccagccag

SEQ ID NO: 3144859 - RNA, 20 nt, Human
gcuccugucugccagccagc

SEQ ID NO: 3144860 - RNA, 21 nt, Human
gcuccugucugccagccagca

SEQ ID NO: 3144861 - RNA, 20 nt, Human
gcuccauuuuuagugaaaua

SEQ ID NO: 3144862 - RNA, 21 nt, Human
gcuauaggugcuacaaaaaca

SEQ ID NO: 3144863 - RNA, 19 nt, Human
gcuauaggugcuacaaaaa

SEQ ID NO: 3144864 - RNA, 13 nt, Human
gcuagauguaugu

SEQ ID NO: 3144865 - RNA, 14 nt, Human
gcuagauguaugua

SEQ ID NO: 3144866 - RNA, 19 nt, Human
ggccuccucuguccagggc

SEQ ID NO: 3144867 - RNA, 18 nt, Human
ggccuccucuguccaggg

SEQ ID NO: 3144868 - RNA, 20 nt, Human
ggcuaguaucaaaagaaaga

SEQ ID NO: 3144869 - RNA, 23 nt, Human
ggcuauaggugcuacaaaaacac

SEQ ID NO: 3144870 - RNA, 16 nt, Human
ggcuccacuuggucug

SEQ ID NO: 3144871 - RNA, 20 nt, Human
gggaggacgcucucuggccu

SEQ ID NO: 3144872 - RNA, 17 nt, Human
gggaggacgcucucugg

SEQ ID NO: 3144873 - RNA, 21 nt, Human
gggacugaggggaggggagca

SEQ ID NO: 3144874 - RNA, 18 nt, Human
ggcuuagacccucaugcu

SEQ ID NO: 3144875 - RNA, 20 nt, Human
ggcuuagacccucaugcugc

SEQ ID NO: 3144876 - RNA, 23 nt, Human
ggcuuagacccucaugcugccaa

SEQ ID NO: 3144877 - RNA, 22 nt, Human
ggcuuagacccucaugcugcca

SEQ ID NO: 3144878 - RNA, 16 nt, Human
ggaggacgcucucugg

SEQ ID NO: 3144879 - RNA, 19 nt, Human
ggaggggagcaugggaagu

SEQ ID NO: 3144880 - RNA, 21 nt, Human
ggagccucauccgaggcaggg

SEQ ID NO: 3144881 - RNA, 19 nt, Human
ggagccucauccgaggcag

SEQ ID NO: 3144882 - RNA, 20 nt, Human
ggagccucauccgaggcagg

SEQ ID NO: 3144883 - RNA, 18 nt, Human
ggagcccugucuccucuc

SEQ ID NO: 3144884 - RNA, 20 nt, Human
ggacauuugcucauggaauu

SEQ ID NO: 3144885 - RNA, 17 nt, Human
ggacauuugcucaugga

SEQ ID NO: 3144886 - RNA, 16 nt, Human
ggacauuugcucaugg

SEQ ID NO: 3144887 - RNA, 23 nt, Human
ggagaagagcuguucacagccag

SEQ ID NO: 3144888 - RNA, 14 nt, Human
ggagaagaacugaa

SEQ ID NO: 3144889 - RNA, 11 nt, Human
ggagaagaacu

SEQ ID NO: 3144890 - RNA, 15 nt, Human
ggagaagagcuguuc

SEQ ID NO: 3144891 - RNA, 19 nt, Human
ggacgcucucuggccuucg

SEQ ID NO: 3144892 - RNA, 16 nt, Human
ggacgcucucuggccu

SEQ ID NO: 3144893 - RNA, 15 nt, Human
ggacgcucucuggcc

SEQ ID NO: 3144894 - RNA, 15 nt, Human
ggcccaccagggucc

SEQ ID NO: 3144895 - RNA, 14 nt, Human
ggcccaccaggguc

SEQ ID NO: 3144896 - RNA, 18 nt, Human
ggcagaguuacaguucug

SEQ ID NO: 3144897 - RNA, 13 nt, Human
ggcagaguuacag

SEQ ID NO: 3144898 - RNA, 19 nt, Human
ggcagaguuacaguucugu

SEQ ID NO: 3144899 - RNA, 12 nt, Human
ggcagcugccuc

SEQ ID NO: 3144900 - RNA, 13 nt, Human
ggcagcugccucc

SEQ ID NO: 3144901 - RNA, 11 nt, Human
ggcagcugccu

SEQ ID NO: 3144902 - RNA, 15 nt, Human
ggcagggucaggaga

SEQ ID NO: 3144903 - RNA, 17 nt, Human
ggcagggucaggagagg

SEQ ID NO: 3144904 - RNA, 16 nt, Human
ggcagugcuuggccca

SEQ ID NO: 3144905 - RNA, 23 nt, Human
ggcagugcuuggcccaggaguuu

SEQ ID NO: 3144906 - RNA, 22 nt, Human
ggcagugcuuggcccaggaguu

SEQ ID NO: 3144907 - RNA, 21 nt, Human
ggcagugcuuggcccaggagu

SEQ ID NO: 3144908 - RNA, 20 nt, Human
ggcagugcuuggcccaggag

SEQ ID NO: 3144909 - RNA, 19 nt, Human
ggcagugcuuggcccagga

SEQ ID NO: 3144910 - RNA, 18 nt, Human
ggcagugcuuggcccagg

SEQ ID NO: 3144911 - RNA, 17 nt, Human
ggcagugcuuggcccag

SEQ ID NO: 3144912 - RNA, 19 nt, Human
ggauugaaggaugcugucu

SEQ ID NO: 3144913 - RNA, 21 nt, Human
ggcagagguugcagugagccg

SEQ ID NO: 3144914 - RNA, 17 nt, Human
ggauuagggagagaaga

SEQ ID NO: 3144915 - RNA, 22 nt, Human
cacguucuuacuaguuucccuu

SEQ ID NO: 3144916 - RNA, 13 nt, Human
cacuaaacaaaga

SEQ ID NO: 3144917 - RNA, 15 nt, Human
cacgcacacugucug

SEQ ID NO: 3144918 - RNA, 19 nt, Human
cacgagcaggcuacuguca

SEQ ID NO: 3144919 - RNA, 20 nt, Human
cacgagcaggcuacugucag

SEQ ID NO: 3144920 - RNA, 17 nt, Human
cacgagcaggcuacugu

SEQ ID NO: 3144921 - RNA, 22 nt, Human
cacgagcaggcuacugucagcu

SEQ ID NO: 3144922 - RNA, 18 nt, Human
cacucagucucucuucuc

SEQ ID NO: 3144923 - RNA, 21 nt, Human
cacuaaauugacacuuaaaaa

SEQ ID NO: 3144924 - RNA, 13 nt, Human
cacuaaagcagug

SEQ ID NO: 3144925 - RNA, 17 nt, Human
cacuaagagagaaugag

SEQ ID NO: 3144926 - RNA, 19 nt, Human
cacuaguauuucuaugaaa

SEQ ID NO: 3144927 - RNA, 14 nt, Human
cacuaguauuucua

SEQ ID NO: 3144928 - RNA, 16 nt, Human
cacucaaaucaagaaa

SEQ ID NO: 3144929 - RNA, 19 nt, Human
cacuucagggcuuuacucc

SEQ ID NO: 3144930 - RNA, 18 nt, Human
cacuucacacacaggcaa

SEQ ID NO: 3144931 - RNA, 15 nt, Human
cacuuggucugugag

SEQ ID NO: 3144932 - RNA, 12 nt, Human
cacuuggagcca

SEQ ID NO: 3144933 - RNA, 23 nt, Human
cacuugaacccgggaggcagagg

SEQ ID NO: 3144934 - RNA, 21 nt, Human
cacuugaacccgggaggcaga

SEQ ID NO: 3144935 - RNA, 20 nt, Human
cacuugaacccgggaggcag

SEQ ID NO: 3144936 - RNA, 23 nt, Human
cacuucuucuuggucuuauuuau

SEQ ID NO: 3144937 - RNA, 14 nt, Human
cacugucaagauga

SEQ ID NO: 3144938 - RNA, 21 nt, Human
cacuguagcauuacagugggu

SEQ ID NO: 3144939 - RNA, 14 nt, Human
cacuguauccaggu

SEQ ID NO: 3144940 - RNA, 19 nt, Human
cacuguggguagacacaca

SEQ ID NO: 3144941 - RNA, 24 nt, Human
cacuguggguagacacacaugaag

SEQ ID NO: 3144942 - RNA, 22 nt, Human
cacuguggguagacacacauga

SEQ ID NO: 3144943 - RNA, 20 nt, Human
cacugccuucucaacuccaa

SEQ ID NO: 3144944 - RNA, 18 nt, Human
cacugcucuaacagcccu

SEQ ID NO: 3144945 - RNA, 15 nt, Human
cacugcucuaacagc

SEQ ID NO: 3144946 - RNA, 19 nt, Human
cacugcucuaacagcccuc

SEQ ID NO: 3144947 - RNA, 21 nt, Human
cacugacuucuaaguaaaacc

SEQ ID NO: 3144948 - RNA, 14 nt, Human
cacugacuucuaag

SEQ ID NO: 3144949 - RNA, 15 nt, Human
cacugacuucuaagu

SEQ ID NO: 3144950 - RNA, 16 nt, Human
cacugacuucuaagua

SEQ ID NO: 3144951 - RNA, 20 nt, Human
cacugacuucuaaguaaaac

SEQ ID NO: 3144952 - RNA, 14 nt, Human
caccucccugcaau

SEQ ID NO: 3144953 - RNA, 13 nt, Human
caccucccugcaa

SEQ ID NO: 3144954 - RNA, 14 nt, Human
caccucauggaauu

SEQ ID NO: 3144955 - RNA, 12 nt, Human
caccucauggaa

SEQ ID NO: 3144956 - RNA, 11 nt, Human
caccucaugga

SEQ ID NO: 3144957 - RNA, 10 nt, Human
caccucccug

SEQ ID NO: 3144958 - RNA, 17 nt, Human
caccugacacaccaggc

SEQ ID NO: 3144959 - RNA, 16 nt, Human
caccugacacaccagg

SEQ ID NO: 3144960 - RNA, 20 nt, Human
caccugacacaccaggcgcu

SEQ ID NO: 3144961 - RNA, 15 nt, Human
caccccuccccugcc

SEQ ID NO: 3144962 - RNA, 22 nt, Human
caccccuccccugcccuagagc

SEQ ID NO: 3144963 - RNA, 20 nt, Human
cacccucagaugcacaugag

SEQ ID NO: 3144964 - RNA, 21 nt, Human
cagacuagauguaguauuuuu

SEQ ID NO: 3144965 - RNA, 20 nt, Human
cagacuagauguaguauuuu

SEQ ID NO: 3144966 - RNA, 19 nt, Human
cagacuagauguaguauuu

SEQ ID NO: 3144967 - RNA, 15 nt, Human
cagacuagauguagu

SEQ ID NO: 3144968 - RNA, 14 nt, Human
cagacuagauguag

SEQ ID NO: 3144969 - RNA, 21 nt, Human
cagaauucugcuaccucacug

SEQ ID NO: 3144970 - RNA, 23 nt, Human
cagaauucugcuaccucacuggg

SEQ ID NO: 3144971 - RNA, 13 nt, Human
cagaauucugcua

SEQ ID NO: 3144972 - RNA, 14 nt, Human
cagaauucugcuac

SEQ ID NO: 3144973 - RNA, 19 nt, Human
cagacauagaauuaacaca

SEQ ID NO: 3144974 - RNA, 17 nt, Human
cagacauagaauuaaca

SEQ ID NO: 3144975 - RNA, 22 nt, Human
cagacauguggugggacaggga

SEQ ID NO: 3144976 - RNA, 18 nt, Human
cagacauguggugggaca

SEQ ID NO: 3144977 - RNA, 23 nt, Human
cagaaucgcuccaccuugcagcu

SEQ ID NO: 3144978 - RNA, 21 nt, Human
cagaaucgcuccaccuugcag

SEQ ID NO: 3144979 - RNA, 17 nt, Human
cagaagucaaggcuuag

SEQ ID NO: 3144980 - RNA, 16 nt, Human
cagaagucaaggcuua

SEQ ID NO: 3144981 - RNA, 18 nt, Human
cagaagucaaggcuuaga

SEQ ID NO: 3144982 - RNA, 14 nt, Human
cagaagucaucuug

SEQ ID NO: 3144983 - RNA, 22 nt, Human
cagaagucaucuugcuaccagu

SEQ ID NO: 3144984 - RNA, 20 nt, Human
cagaagucaucuugcuacca

SEQ ID NO: 3144985 - RNA, 17 nt, Human
cagaagucaucuugcua

SEQ ID NO: 3144986 - RNA, 16 nt, Human
cagaagucaucuugcu

SEQ ID NO: 3144987 - RNA, 20 nt, Human
cagaagcaacccaaauguuc

SEQ ID NO: 3144988 - RNA, 19 nt, Human
cagaagcaacccaaauguu

SEQ ID NO: 3144989 - RNA, 23 nt, Human
cagaacagugauuaccagggacu

SEQ ID NO: 3144990 - RNA, 18 nt, Human
cagaacagugauuaccag

SEQ ID NO: 3144991 - RNA, 19 nt, Human
cagaaagcagaacagugau

SEQ ID NO: 3144992 - RNA, 18 nt, Human
cagaaagcagaacaguga

SEQ ID NO: 3144993 - RNA, 20 nt, Human
cagaggagccaccaguucuc

SEQ ID NO: 3144994 - RNA, 19 nt, Human
cagaggagccaccaguucu

SEQ ID NO: 3144995 - RNA, 18 nt, Human
cagaggagccaccaguuc

SEQ ID NO: 3144996 - RNA, 20 nt, Human
cagagccccacccucagaug

SEQ ID NO: 3144997 - RNA, 20 nt, Human
cagagacucagggccccagc

SEQ ID NO: 3144998 - RNA, 21 nt, Human
cagagacucagggccccagca

SEQ ID NO: 3144999 - RNA, 22 nt, Human
cagagacucagggccccagcac

SEQ ID NO: 3145000 - RNA, 23 nt, Human
cagagacucagggccccagcacu

SEQ ID NO: 3145001 - RNA, 19 nt, Human
cagagacucagggccccag

SEQ ID NO: 3145002 - RNA, 14 nt, Human
cagauccuggaaau

SEQ ID NO: 3145003 - RNA, 13 nt, Human
cagauccuggaaa

SEQ ID NO: 3145004 - RNA, 17 nt, Human
cagaugcacaugagcug

SEQ ID NO: 3145005 - RNA, 14 nt, Human
cagauaaucacaau

SEQ ID NO: 3145006 - RNA, 14 nt, Human
cagauaaacaguag

SEQ ID NO: 3145007 - RNA, 23 nt, Human
cagauaaauaguuuaugauucca

SEQ ID NO: 3145008 - RNA, 13 nt, Human
cagaguuacaguu

SEQ ID NO: 3145009 - RNA, 12 nt, Human
cagaguuacagu

SEQ ID NO: 3145010 - RNA, 17 nt, Human
cagaguuacaguucugu

SEQ ID NO: 3145011 - RNA, 16 nt, Human
cagaguuacaguucug

SEQ ID NO: 3145012 - RNA, 15 nt, Human
cagaguuacaguucu

SEQ ID NO: 3145013 - RNA, 14 nt, Human
cagaguuacaguuc

SEQ ID NO: 3145014 - RNA, 19 nt, Human
cagaguuacaguucugugg

SEQ ID NO: 3145015 - RNA, 18 nt, Human
cagaguuacaguucugug

SEQ ID NO: 3145016 - RNA, 21 nt, Human
cagccaacgaguaauuuauug

SEQ ID NO: 3145017 - RNA, 12 nt, Human
cagcagcucagg

SEQ ID NO: 3145018 - RNA, 13 nt, Human
cagcagcucaggc

SEQ ID NO: 3145019 - RNA, 14 nt, Human
cagcagcucaggca

SEQ ID NO: 3145020 - RNA, 15 nt, Human
cagcagcucaggcac

SEQ ID NO: 3145021 - RNA, 16 nt, Human
cagcagcucaggcaca

SEQ ID NO: 3145022 - RNA, 20 nt, Human
cagcagccagcucucagcca

SEQ ID NO: 3145023 - RNA, 21 nt, Human
cagcagccagcucucagccaa

SEQ ID NO: 3145024 - RNA, 13 nt, Human
cagcagccagcuc

SEQ ID NO: 3145025 - RNA, 14 nt, Human
cagcagccagcucu

SEQ ID NO: 3145026 - RNA, 15 nt, Human
cagcagccagcucuc

SEQ ID NO: 3145027 - RNA, 17 nt, Human
cagcagccagcucucag

SEQ ID NO: 3145028 - RNA, 18 nt, Human
cagcagccagcucucagc

SEQ ID NO: 3145029 - RNA, 19 nt, Human
cagcagccagcucucagcc

SEQ ID NO: 3145030 - RNA, 22 nt, Human
cagcaagggugaugggaaagca

SEQ ID NO: 3145031 - RNA, 23 nt, Human
cagcaagggugaugggaaagcau

SEQ ID NO: 3145032 - RNA, 19 nt, Human
cagcaagggugaugggaaa

SEQ ID NO: 3145033 - RNA, 23 nt, Human
cagauuuuguuggcauagcucug

SEQ ID NO: 3145034 - RNA, 15 nt, Human
cagauuuuccugaaa

SEQ ID NO: 3145035 - RNA, 14 nt, Human
cagauuuuccugaa

SEQ ID NO: 3145036 - RNA, 23 nt, Human
cagcaacgcaggcccccaggugc

SEQ ID NO: 3145037 - RNA, 15 nt, Human
cagauucauuuuucu

SEQ ID NO: 3145038 - RNA, 21 nt, Human
cagauggaaaauucauuuuuu

SEQ ID NO: 3145039 - RNA, 19 nt, Human
cagauggaaaauucauuuu

SEQ ID NO: 3145040 - RNA, 22 nt, Human
caggaagcugugagagcaguuu

SEQ ID NO: 3145041 - RNA, 13 nt, Human
caggaagcuguga

SEQ ID NO: 3145042 - RNA, 14 nt, Human
caggaagcugugag

SEQ ID NO: 3145043 - RNA, 13 nt, Human
caggaccugacua

SEQ ID NO: 3145044 - RNA, 15 nt, Human
caggaaguagaggag

SEQ ID NO: 3145045 - RNA, 16 nt, Human
caggaaguagaggagg

SEQ ID NO: 3145046 - RNA, 18 nt, Human
cagcuugaaacugagaug

SEQ ID NO: 3145047 - RNA, 23 nt, Human
cagcuuuccucaaaacuucagac

SEQ ID NO: 3145048 - RNA, 18 nt, Human
caggaaccacaagacugc

SEQ ID NO: 3145049 - RNA, 18 nt, Human
cagcuguaugauucccag

SEQ ID NO: 3145050 - RNA, 20 nt, Human
cagcugcugaaacaacaaau

SEQ ID NO: 3145051 - RNA, 21 nt, Human
cagcugcugaaacaacaaaua

SEQ ID NO: 3145052 - RNA, 18 nt, Human
cagcugacuaaacuuuuu

SEQ ID NO: 3145053 - RNA, 13 nt, Human
cagcugacuaaac

SEQ ID NO: 3145054 - RNA, 23 nt, Human
cagcucaggcacacuucuucuug

SEQ ID NO: 3145055 - RNA, 12 nt, Human
cagcucaggcac

SEQ ID NO: 3145056 - RNA, 21 nt, Human
cagcucaggcacacuucuucu

SEQ ID NO: 3145057 - RNA, 20 nt, Human
cagcucugcauacucauuag

SEQ ID NO: 3145058 - RNA, 16 nt, Human
cagcucuccccuucuc

SEQ ID NO: 3145059 - RNA, 12 nt, Human
cagcucucagcc

SEQ ID NO: 3145060 - RNA, 13 nt, Human
cagcucucagcca

SEQ ID NO: 3145061 - RNA, 23 nt, Human
cagccuggugggccuccucuguc

SEQ ID NO: 3145062 - RNA, 16 nt, Human
cagccugugcugcccg

SEQ ID NO: 3145063 - RNA, 14 nt, Human
cagccugugcugcc

SEQ ID NO: 3145064 - RNA, 15 nt, Human
cagccuggugggccu

SEQ ID NO: 3145065 - RNA, 16 nt, Human
cagccuggugggccuc

SEQ ID NO: 3145066 - RNA, 17 nt, Human
cagccuggugggccucc

SEQ ID NO: 3145067 - RNA, 18 nt, Human
cagccuggugggccuccu

SEQ ID NO: 3145068 - RNA, 16 nt, Human
cagccuuccccuugcc

SEQ ID NO: 3145069 - RNA, 21 nt, Human
cagccuuccccuugcccaggg

SEQ ID NO: 3145070 - RNA, 23 nt, Human
cagccuuccccuugcccagggcu

SEQ ID NO: 3145071 - RNA, 19 nt, Human
cagcuacuugggaggcuga

SEQ ID NO: 3145072 - RNA, 16 nt, Human
cagccuaguugaucag

SEQ ID NO: 3145073 - RNA, 18 nt, Human
cagcccuccucugcacuc

SEQ ID NO: 3145074 - RNA, 17 nt, Human
cagcccuccucugcacu

SEQ ID NO: 3145075 - RNA, 19 nt, Human
cagccuagccgaccucagc

SEQ ID NO: 3145076 - RNA, 20 nt, Human
cagccuagccgaccucagcc

SEQ ID NO: 3145077 - RNA, 21 nt, Human
cagccuagccgaccucagccu

SEQ ID NO: 3145078 - RNA, 22 nt, Human
cagccuagccgaccucagccuu

SEQ ID NO: 3145079 - RNA, 17 nt, Human
cagccuagccgaccuca

SEQ ID NO: 3145080 - RNA, 18 nt, Human
cagccuagccgaccucag

SEQ ID NO: 3145081 - RNA, 15 nt, Human
cagccuagccgaccu

SEQ ID NO: 3145082 - RNA, 13 nt, Human
cagcccucagaau

SEQ ID NO: 3145083 - RNA, 16 nt, Human
caggauuuuaaucuuu

SEQ ID NO: 3145084 - RNA, 15 nt, Human
caggcaacugaggca

SEQ ID NO: 3145085 - RNA, 16 nt, Human
caggcaacugaggcag

SEQ ID NO: 3145086 - RNA, 17 nt, Human
caggcaacugaggcaga

SEQ ID NO: 3145087 - RNA, 18 nt, Human
caggcaacugaggcagac

SEQ ID NO: 3145088 - RNA, 19 nt, Human
caggcaacugaggcagaca

SEQ ID NO: 3145089 - RNA, 20 nt, Human
caggcaacugaggcagacag

SEQ ID NO: 3145090 - RNA, 22 nt, Human
caggcaacugaggcagacagca

SEQ ID NO: 3145091 - RNA, 23 nt, Human
caggaugguucccuugaugaaga

SEQ ID NO: 3145092 - RNA, 21 nt, Human
caggaugguucccuugaugaa

SEQ ID NO: 3145093 - RNA, 20 nt, Human
caggcccccaggugccaguu

SEQ ID NO: 3145094 - RNA, 14 nt, Human
caggcccccaggug

SEQ ID NO: 3145095 - RNA, 19 nt, Human
caggcccccaggugccagu

SEQ ID NO: 3145096 - RNA, 13 nt, Human
caggagucccugg

SEQ ID NO: 3145097 - RNA, 14 nt, Human
caggagucccuggu

SEQ ID NO: 3145098 - RNA, 15 nt, Human
caggagucccuggua

SEQ ID NO: 3145099 - RNA, 15 nt, Human
caggagaggggcaga

SEQ ID NO: 3145100 - RNA, 17 nt, Human
caggagaggggcagaac

SEQ ID NO: 3145101 - RNA, 14 nt, Human
caggaguuuggcca

SEQ ID NO: 3145102 - RNA, 13 nt, Human
caggaguuuggcc

SEQ ID NO: 3145103 - RNA, 17 nt, Human
caggaguuuggccagaa

SEQ ID NO: 3145104 - RNA, 16 nt, Human
caggaguuuggccaga

SEQ ID NO: 3145105 - RNA, 15 nt, Human
caggaguuuggccag

SEQ ID NO: 3145106 - RNA, 16 nt, Human
caggggacaggauggu

SEQ ID NO: 3145107 - RNA, 11 nt, Human
caggggacagg

SEQ ID NO: 3145108 - RNA, 18 nt, Human
cagggacaggauaagagg

SEQ ID NO: 3145109 - RNA, 22 nt, Human
cagggacccacuucacacacag

SEQ ID NO: 3145110 - RNA, 17 nt, Human
cagggcauggcugggaa

SEQ ID NO: 3145111 - RNA, 15 nt, Human
cagggcccugagcuc

SEQ ID NO: 3145112 - RNA, 21 nt, Human
cagggcccugagcucggugga

SEQ ID NO: 3145113 - RNA, 16 nt, Human
cagggccccagcacua

SEQ ID NO: 3145114 - RNA, 22 nt, Human
cagggccccagcacuaaagcag

SEQ ID NO: 3145115 - RNA, 14 nt, Human
cagggccccagcac

SEQ ID NO: 3145116 - RNA, 15 nt, Human
cagggccccagcacu

SEQ ID NO: 3145117 - RNA, 19 nt, Human
caggcuagauguauguacu

SEQ ID NO: 3145118 - RNA, 13 nt, Human
caggcuagaugua

SEQ ID NO: 3145119 - RNA, 14 nt, Human
caggcuacugucag

SEQ ID NO: 3145120 - RNA, 20 nt, Human
cagugaaagaaaauaacaau

SEQ ID NO: 3145121 - RNA, 16 nt, Human
cagugaaagaaaauaa

SEQ ID NO: 3145122 - RNA, 15 nt, Human
cagugagacagcucu

SEQ ID NO: 3145123 - RNA, 17 nt, Human
cagugauuaccagggac

SEQ ID NO: 3145124 - RNA, 18 nt, Human
cagugauuaccagggacu

SEQ ID NO: 3145125 - RNA, 18 nt, Human
cagucaggaaagagaacu

SEQ ID NO: 3145126 - RNA, 15 nt, Human
cagucaggaaagaga

SEQ ID NO: 3145127 - RNA, 22 nt, Human
cagucaggaaagagaacuucca

SEQ ID NO: 3145128 - RNA, 13 nt, Human
caguccaugaaga

SEQ ID NO: 3145129 - RNA, 12 nt, Human
caguagugauag

SEQ ID NO: 3145130 - RNA, 12 nt, Human
caguauggcagc

SEQ ID NO: 3145131 - RNA, 17 nt, Human
caguaccccauggagcu

SEQ ID NO: 3145132 - RNA, 23 nt, Human
caguaccccauggagcugggcua

SEQ ID NO: 3145133 - RNA, 23 nt, Human
cagguucccucccagaggagcca

SEQ ID NO: 3145134 - RNA, 18 nt, Human
cagguucccucccagagg

SEQ ID NO: 3145135 - RNA, 16 nt, Human
cagguucccucccaga

SEQ ID NO: 3145136 - RNA, 15 nt, Human
cagguucccucccag

SEQ ID NO: 3145137 - RNA, 21 nt, Human
caggguccuuuugacacugcu

SEQ ID NO: 3145138 - RNA, 19 nt, Human
caggguccuuuugacacug

SEQ ID NO: 3145139 - RNA, 14 nt, Human
caggguccuuuuga

SEQ ID NO: 3145140 - RNA, 23 nt, Human
caggguccuuuugacacugcucu

SEQ ID NO: 3145141 - RNA, 22 nt, Human
caggguccuuuugacacugcuc

SEQ ID NO: 3145142 - RNA, 14 nt, Human
cagggucaggagag

SEQ ID NO: 3145143 - RNA, 14 nt, Human
caaauaugcaaagc

SEQ ID NO: 3145144 - RNA, 22 nt, Human
caaaucagaagucaucuugcua

SEQ ID NO: 3145145 - RNA, 15 nt, Human
caaaucagaagucau

SEQ ID NO: 3145146 - RNA, 14 nt, Human
caaaucagaaguca

SEQ ID NO: 3145147 - RNA, 16 nt, Human
caaauaugcaaagcac

SEQ ID NO: 3145148 - RNA, 17 nt, Human
caaauaugcaaagcacu

SEQ ID NO: 3145149 - RNA, 18 nt, Human
caaauaugcaaagcacug

SEQ ID NO: 3145150 - RNA, 20 nt, Human
caaauguucaucaaugaaug

SEQ ID NO: 3145151 - RNA, 21 nt, Human
caaauguucaucaaugaauga

SEQ ID NO: 3145152 - RNA, 13 nt, Human
caaagaaagugua

SEQ ID NO: 3145153 - RNA, 15 nt, Human
caaauuuacagagac

SEQ ID NO: 3145154 - RNA, 14 nt, Human
caaauuuacagaga

SEQ ID NO: 3145155 - RNA, 15 nt, Human
caaauugugugaaag

SEQ ID NO: 3145156 - RNA, 17 nt, Human
caagcacuaaacaaaga

SEQ ID NO: 3145157 - RNA, 20 nt, Human
caaggaaaaaauaacaauga

SEQ ID NO: 3145158 - RNA, 14 nt, Human
cacaguuuucugag

SEQ ID NO: 3145159 - RNA, 20 nt, Human
cacaggaaccacaagacugc

SEQ ID NO: 3145160 - RNA, 15 nt, Human
cacaggaaguagagg

SEQ ID NO: 3145161 - RNA, 19 nt, Human
cacaggaaccacaagacug

SEQ ID NO: 3145162 - RNA, 22 nt, Human
cacaggcaacugaggcagacag

SEQ ID NO: 3145163 - RNA, 23 nt, Human
cacaggcaacugaggcagacagc

SEQ ID NO: 3145164 - RNA, 20 nt, Human
cacaggcaacugaggcagac

SEQ ID NO: 3145165 - RNA, 22 nt, Human
cacagcaguugaaaagacucca

SEQ ID NO: 3145166 - RNA, 19 nt, Human
cacacucaaaucaagaaac

SEQ ID NO: 3145167 - RNA, 14 nt, Human
cacacugaagaagc

SEQ ID NO: 3145168 - RNA, 23 nt, Human
cacacuguagcauuacagugggu

SEQ ID NO: 3145169 - RNA, 13 nt, Human
cacaacuauauug

SEQ ID NO: 3145170 - RNA, 13 nt, Human
cacacacaggcaa

SEQ ID NO: 3145171 - RNA, 21 nt, Human
cacacacaggcaacugaggca

SEQ ID NO: 3145172 - RNA, 11 nt, Human
cacaacagauu

SEQ ID NO: 3145173 - RNA, 22 nt, Human
caaugaaugaaugaauggcuaa

SEQ ID NO: 3145174 - RNA, 21 nt, Human
caauaucuuuuuuuuaauaaa

SEQ ID NO: 3145175 - RNA, 23 nt, Human
aauguuucaaacauauauaacaa

SEQ ID NO: 3145176 - RNA, 20 nt, Human
aauauaucuaccccagacua

SEQ ID NO: 3145177 - RNA, 16 nt, Human
aauagaauaaaggcag

SEQ ID NO: 3145178 - RNA, 15 nt, Human
aauagaauaaaggca

SEQ ID NO: 3145179 - RNA, 15 nt, Human
aaucaagaaacuuaa

SEQ ID NO: 3145180 - RNA, 21 nt, Human
aaugauuaugaauuacauuug

SEQ ID NO: 3145181 - RNA, 15 nt, Human
aaugauuaugaauua

SEQ ID NO: 3145182 - RNA, 23 nt, Human
aagggaaacugccagcaacgcag

SEQ ID NO: 3145183 - RNA, 16 nt, Human
aagggaaacugccagc

SEQ ID NO: 3145184 - RNA, 17 nt, Human
aagggaaacugccagca

SEQ ID NO: 3145185 - RNA, 21 nt, Human
aaguagggacuucugucuuca

SEQ ID NO: 3145186 - RNA, 17 nt, Human
aaguccaagcauaccaa

SEQ ID NO: 3145187 - RNA, 18 nt, Human
aaguccaagcauuuagau

SEQ ID NO: 3145188 - RNA, 20 nt, Human
aaggcagcucuaaaugucaa

SEQ ID NO: 3145189 - RNA, 20 nt, Human
aagauuacaaaucagaaguc

SEQ ID NO: 3145190 - RNA, 21 nt, Human
aagauuacaaaucagaaguca

SEQ ID NO: 3145191 - RNA, 22 nt, Human
aaccacuggaaaguuuaugguu

SEQ ID NO: 3145192 - RNA, 16 nt, Human
aacccgggaggcagag

SEQ ID NO: 3145193 - RNA, 15 nt, Human
aacccgucuggccca

SEQ ID NO: 3145194 - RNA, 17 nt, Human
aaaucuuauaauuuaaa

SEQ ID NO: 3145195 - RNA, 22 nt, Human
aaauguuguucucuucuuuaaa

SEQ ID NO: 3145196 - RNA, 19 nt, Human
aaauugacacuuaaaaaug

SEQ ID NO: 3145197 - RNA, 18 nt, Human
aacaaauuuacagagaca

SEQ ID NO: 3145198 - RNA, 12 nt, Human
aacacaucagcu

SEQ ID NO: 3145199 - RNA, 16 nt, Human
aacacaucagcuugcc

SEQ ID NO: 3145200 - RNA, 12 nt, Human
aacugaggcaga

SEQ ID NO: 3145201 - RNA, 20 nt, Human
aacugaggcagacagcagcu

SEQ ID NO: 3145202 - RNA, 20 nt, Human
aacugacucuuaagaagacu

SEQ ID NO: 3145203 - RNA, 19 nt, Human
aacugacucuuaagaagac

SEQ ID NO: 3145204 - RNA, 20 nt, Human
aacugagaugugaacacauc

SEQ ID NO: 3145205 - RNA, 18 nt, Human
aacugacucuuaagaaga

SEQ ID NO: 3145206 - RNA, 15 nt, Human
aacugacucuuaaga

SEQ ID NO: 3145207 - RNA, 20 nt, Human
aacuuuaugcuaagugaaau

SEQ ID NO: 3145208 - RNA, 21 nt, Human
aacuuuaugcuaagugaaaua

SEQ ID NO: 3145209 - RNA, 14 nt, Human
aaaggcagaagcaa

SEQ ID NO: 3145210 - RNA, 18 nt, Human
aaauaaaguuggugacag

SEQ ID NO: 3145211 - RNA, 15 nt, Human
aaaucaaauaugcaa

SEQ ID NO: 3145212 - RNA, 12 nt, Human
aaaucaaauaug

SEQ ID NO: 3145213 - RNA, 14 nt, Human
aaaucaaauaugca

SEQ ID NO: 3145214 - RNA, 15 nt, Human
aaauauuuauuuuaa

SEQ ID NO: 3145215 - RNA, 13 nt, Human
aaauauuuauuuu

SEQ ID NO: 3145216 - RNA, 20 nt, Human
aaauauuuauuuuaauaaug

SEQ ID NO: 3145217 - RNA, 15 nt, Human
aaagaaauguaaggg

SEQ ID NO: 3145218 - RNA, 21 nt, Human
aaacugagaugugaacacauc

SEQ ID NO: 3145219 - RNA, 23 nt, Human
aaacugagaugugaacacaucag

SEQ ID NO: 3145220 - RNA, 21 nt, Human
aaaaucuacacuccagugaga

SEQ ID NO: 3145221 - RNA, 18 nt, Human
aaaaguucugcagauaaa

SEQ ID NO: 3145222 - RNA, 16 nt, Human
aaaaagaaacauuugg

SEQ ID NO: 3145223 - RNA, 16 nt, Human
aaaaucucaauauuuc

SEQ ID NO: 3145224 - RNA, 18 nt, Human
accugucucaccuggacu

SEQ ID NO: 3145225 - RNA, 19 nt, Human
acgcaggcccccaggugcc

SEQ ID NO: 3145226 - RNA, 22 nt, Human
acgcaggcccccaggugccagu

SEQ ID NO: 3145227 - RNA, 13 nt, Human
acuaagagagaau

SEQ ID NO: 3145228 - RNA, 21 nt, Human
acuauucaaacagucucagga

SEQ ID NO: 3145229 - RNA, 18 nt, Human
acuauucaaacagucuca

SEQ ID NO: 3145230 - RNA, 19 nt, Human
acuaguauuucuaugaaau

SEQ ID NO: 3145231 - RNA, 20 nt, Human
acuaguauuucuaugaaaua

SEQ ID NO: 3145232 - RNA, 14 nt, Human
acucaaaucaagaa

SEQ ID NO: 3145233 - RNA, 18 nt, Human
acucagggccccagcacu

SEQ ID NO: 3145234 - RNA, 22 nt, Human
acucagggccccagcacuaaag

SEQ ID NO: 3145235 - RNA, 15 nt, Human
acucagggccccagc

SEQ ID NO: 3145236 - RNA, 13 nt, Human
acuagauguagua

SEQ ID NO: 3145237 - RNA, 12 nt, Human
acuagauguagu

SEQ ID NO: 3145238 - RNA, 17 nt, Human
acuagauguaguauuuu

SEQ ID NO: 3145239 - RNA, 16 nt, Human
acuagauguaguauuu

SEQ ID NO: 3145240 - RNA, 17 nt, Human
acucuauguucuaagaa

SEQ ID NO: 3145241 - RNA, 20 nt, Human
acucuggugagucaccacuu

SEQ ID NO: 3145242 - RNA, 13 nt, Human
acugccagcaacg

SEQ ID NO: 3145243 - RNA, 18 nt, Human
acucugucucaguccaug

SEQ ID NO: 3145244 - RNA, 20 nt, Human
acucugucucaguccaugaa

SEQ ID NO: 3145245 - RNA, 13 nt, Human
acuguaagaaaau

SEQ ID NO: 3145246 - RNA, 19 nt, Human
acuguaagaaaauaucacu

SEQ ID NO: 3145247 - RNA, 22 nt, Human
acuguaagaaaauaucacuugu

SEQ ID NO: 3145248 - RNA, 22 nt, Human
acuucugucuucacaacagauu

SEQ ID NO: 3145249 - RNA, 21 nt, Human
acuuggucugugagaugcuag

SEQ ID NO: 3145250 - RNA, 21 nt, Human
acuucugucuucacaacagau

SEQ ID NO: 3145251 - RNA, 11 nt, Human
agaaaguguau

SEQ ID NO: 3145252 - RNA, 16 nt, Human
agaaaguguauuugga

SEQ ID NO: 3145253 - RNA, 13 nt, Human
agaaaguguauuu

SEQ ID NO: 3145254 - RNA, 17 nt, Human
agaaaguguauuuggaa

SEQ ID NO: 3145255 - RNA, 16 nt, Human
agaaaaucaggcuggc

SEQ ID NO: 3145256 - RNA, 14 nt, Human
agaaaauaacaaua

SEQ ID NO: 3145257 - RNA, 22 nt, Human
acuuuauuuucuauaauuuaaa

SEQ ID NO: 3145258 - RNA, 21 nt, Human
acccacaagaaaugaaagcag

SEQ ID NO: 3145259 - RNA, 17 nt, Human
acccacaagaaaugaaa

SEQ ID NO: 3145260 - RNA, 15 nt, Human
acccacaagaaauga

SEQ ID NO: 3145261 - RNA, 22 nt, Human
acccaguguuuuaggagcauga

SEQ ID NO: 3145262 - RNA, 19 nt, Human
acccaguguuuuaggagca

SEQ ID NO: 3145263 - RNA, 21 nt, Human
acauuuguauaaaauaauuuu

SEQ ID NO: 3145264 - RNA, 22 nt, Human
acaggcaacugaggcagacagc

SEQ ID NO: 3145265 - RNA, 21 nt, Human
acagcaguugaaaagacucca

SEQ ID NO: 3145266 - RNA, 22 nt, Human
acagcaguugaaaagacuccaa

SEQ ID NO: 3145267 - RNA, 23 nt, Human
acagcaguugaaaagacuccaaa

SEQ ID NO: 3145268 - RNA, 18 nt, Human
acagcaguugaaaagacu

SEQ ID NO: 3145269 - RNA, 15 nt, Human
acagaauucugcuac

SEQ ID NO: 3145270 - RNA, 17 nt, Human
acagaauucugcuaccu

SEQ ID NO: 3145271 - RNA, 16 nt, Human
acaggcaacugaggca

SEQ ID NO: 3145272 - RNA, 18 nt, Human
acaggcaacugaggcaga

SEQ ID NO: 3145273 - RNA, 19 nt, Human
acaggcaacugaggcagac

SEQ ID NO: 3145274 - RNA, 21 nt, Human
acacgagcaggcuacugucag

SEQ ID NO: 3145275 - RNA, 14 nt, Human
acacgagcaggcua

SEQ ID NO: 3145276 - RNA, 19 nt, Human
acacgagcaggcuacuguc

SEQ ID NO: 3145277 - RNA, 14 nt, Human
agccgcuccugucu

SEQ ID NO: 3145278 - RNA, 22 nt, Human
agccgcuccugucugccagcca

SEQ ID NO: 3145279 - RNA, 16 nt, Human
agccgcuccugucugc

SEQ ID NO: 3145280 - RNA, 17 nt, Human
agccgcuccugucugcc

SEQ ID NO: 3145281 - RNA, 19 nt, Human
agccgcuccugucugccag

SEQ ID NO: 3145282 - RNA, 21 nt, Human
agccgcuccugucugccagcc

SEQ ID NO: 3145283 - RNA, 17 nt, Human
agcccuccucugcacuc

SEQ ID NO: 3145284 - RNA, 16 nt, Human
agcacugacuucuaag

SEQ ID NO: 3145285 - RNA, 14 nt, Human
agcacacuguagca

SEQ ID NO: 3145286 - RNA, 19 nt, Human
agcacacuguagcauuaca

SEQ ID NO: 3145287 - RNA, 21 nt, Human
agcagcucaggcacacuucuu

SEQ ID NO: 3145288 - RNA, 15 nt, Human
agcaugaagacagag

SEQ ID NO: 3145289 - RNA, 13 nt, Human
agcaguugaaaag

SEQ ID NO: 3145290 - RNA, 23 nt, Human
agcaguucagagcugcccucucc

SEQ ID NO: 3145291 - RNA, 20 nt, Human
agcaguucagagcugcccuc

SEQ ID NO: 3145292 - RNA, 16 nt, Human
agcaguugaaaagacu

SEQ ID NO: 3145293 - RNA, 21 nt, Human
agauggcauaaccugucucac

SEQ ID NO: 3145294 - RNA, 21 nt, Human
agacgugcacgcacacugucu

SEQ ID NO: 3145295 - RNA, 22 nt, Human
agacgugcacgcacacugucug

SEQ ID NO: 3145296 - RNA, 17 nt, Human
agagaacuuccagaucc

SEQ ID NO: 3145297 - RNA, 21 nt, Human
agacugcauuauauuuauuac

SEQ ID NO: 3145298 - RNA, 22 nt, Human
agcuccccucggagaagagcug

SEQ ID NO: 3145299 - RNA, 12 nt, Human
aggagucccugg

SEQ ID NO: 3145300 - RNA, 23 nt, Human
aggaugguucccuugaugaagaa

SEQ ID NO: 3145301 - RNA, 17 nt, Human
aggauguugaaaaaguu

SEQ ID NO: 3145302 - RNA, 12 nt, Human
aggcuguaacua

SEQ ID NO: 3145303 - RNA, 16 nt, Human
aggcuagauguaugua

SEQ ID NO: 3145304 - RNA, 15 nt, Human
aggcuagauguaugu

SEQ ID NO: 3145305 - RNA, 15 nt, Human
aggcuguaacuacuu

SEQ ID NO: 3145306 - RNA, 21 nt, Human
aggcuagaaccaccugccuau

SEQ ID NO: 3145307 - RNA, 17 nt, Human
aggcuacugucagcucc

SEQ ID NO: 3145308 - RNA, 20 nt, Human
agguaaaagcaucacaugaa

SEQ ID NO: 3145309 - RNA, 18 nt, Human
aggugcuacaaaaacaca

SEQ ID NO: 3145310 - RNA, 19 nt, Human
aggugcuacaaaaacacag

SEQ ID NO: 3145311 - RNA, 20 nt, Human
aggugcuacaaaaacacagc

SEQ ID NO: 3145312 - RNA, 21 nt, Human
aggugcuacaaaaacacagca

SEQ ID NO: 3145313 - RNA, 22 nt, Human
aggugcuacaaaaacacagcaa

SEQ ID NO: 3145314 - RNA, 23 nt, Human
aggugcuacaaaaacacagcaag

SEQ ID NO: 3145315 - RNA, 24 nt, Human
aggugcuacaaaaacacagcaagg

SEQ ID NO: 3145316 - RNA, 18 nt, Human
agggucaggagaggggca

SEQ ID NO: 3145317 - RNA, 14 nt, Human
agggucaggagagg

SEQ ID NO: 3145318 - RNA, 15 nt, Human
agggucaggagaggg

SEQ ID NO: 3145319 - RNA, 21 nt, Human
aucagcugcugaaacaacaaa

SEQ ID NO: 3145320 - RNA, 15 nt, Human
auauuuauuuuaaua

SEQ ID NO: 3145321 - RNA, 14 nt, Human
auauuuauuuuaau

SEQ ID NO: 3145322 - RNA, 17 nt, Human
auauuuauuuuaauaau

SEQ ID NO: 3145323 - RNA, 22 nt, Human
aucagcugcugaaacaacaaau

SEQ ID NO: 3145324 - RNA, 23 nt, Human
aucagcugcugaaacaacaaaua

SEQ ID NO: 3145325 - RNA, 17 nt, Human
aucagcugcugaaacaa

SEQ ID NO: 3145326 - RNA, 21 nt, Human
auccucaaagaaaguguauug

SEQ ID NO: 3145327 - RNA, 20 nt, Human
auccucaaagaaaguguauu

SEQ ID NO: 3145328 - RNA, 19 nt, Human
auccucaaagaaaguguau

SEQ ID NO: 3145329 - RNA, 18 nt, Human
auccucaaagaaagugua

SEQ ID NO: 3145330 - RNA, 16 nt, Human
auccucaaagaaagug

SEQ ID NO: 3145331 - RNA, 15 nt, Human
auccucaaagaaagu

SEQ ID NO: 3145332 - RNA, 18 nt, Human
augugggcagugauguca

SEQ ID NO: 3145333 - RNA, 17 nt, Human
auguucuaagaagugaa

SEQ ID NO: 3145334 - RNA, 21 nt, Human
auguuucaaacauauauaaca

SEQ ID NO: 3145335 - RNA, 20 nt, Human
auuaaauauguuagcaaaga

SEQ ID NO: 3145336 - RNA, 22 nt, Human
auuaaauauguuagcaaagagu

SEQ ID NO: 3145337 - RNA, 19 nt, Human
auguaagggaaacugccag

SEQ ID NO: 3145338 - RNA, 14 nt, Human
auguaagggaaacu

SEQ ID NO: 3145339 - RNA, 16 nt, Human
auguaagggaaacugc

SEQ ID NO: 3145340 - RNA, 23 nt, Human
augcugccaauauccuaauaaaa

SEQ ID NO: 3145341 - RNA, 22 nt, Human
augcugccaauauccuaauaaa

SEQ ID NO: 3145342 - RNA, 21 nt, Human
augcugccaauauccuaauaa

SEQ ID NO: 3145343 - RNA, 20 nt, Human
augcugccaauauccuaaua

SEQ ID NO: 3145344 - RNA, 13 nt, Human
augcugccaauau

SEQ ID NO: 3145345 - RNA, 19 nt, Human
augcugccaauauccuaau

SEQ ID NO: 3145346 - RNA, 18 nt, Human
augcugccaauauccuaa

SEQ ID NO: 3145347 - RNA, 17 nt, Human
augcugccaauauccua

SEQ ID NO: 3145348 - RNA, 14 nt, Human
augcugccaauauc

SEQ ID NO: 3145349 - RNA, 15 nt, Human
agugucuuaauuaaa

SEQ ID NO: 3145350 - RNA, 19 nt, Human
aguguaugauuacuggccu

SEQ ID NO: 3145351 - RNA, 15 nt, Human
aguguaugauuacug

SEQ ID NO: 3145352 - RNA, 14 nt, Human
aguguaugauuacu

SEQ ID NO: 3145353 - RNA, 23 nt, Human
aguguauuuggaaauaaagucag

SEQ ID NO: 3145354 - RNA, 14 nt, Human
aguguauuuggaaa

SEQ ID NO: 3145355 - RNA, 17 nt, Human
agugucuuaauuaaaag

SEQ ID NO: 3145356 - RNA, 18 nt, Human
agugucuuaauuaaaaga

SEQ ID NO: 3145357 - RNA, 22 nt, Human
aguucaugcagcuguggcagag

SEQ ID NO: 3145358 - RNA, 13 nt, Human
aguucaugcagcu

SEQ ID NO: 3145359 - RNA, 21 nt, Human
aguugaaaagacuccaaagaa

SEQ ID NO: 3145360 - RNA, 22 nt, Human
aguugaaaaucuuauaauuuaa

SEQ ID NO: 3145361 - RNA, 22 nt, Human
aguugaaaagacuccaaagaaa

SEQ ID NO: 3145362 - RNA, 23 nt, Human
aguugaaaaucuuauaauuuaaa

SEQ ID NO: 3145363 - RNA, 13 nt, Human
aguuguuucauug

SEQ ID NO: 3145364 - RNA, 15 nt, Human
aguuguuucauugac

SEQ ID NO: 3145365 - RNA, 16 nt, Human
aguuguuucauugacu

SEQ ID NO: 3145366 - RNA, 19 nt, Human
aguuguuucauugacuauc

SEQ ID NO: 3145367 - RNA, 19 nt, Human
agucaaauugugugaaagg

SEQ ID NO: 3145368 - RNA, 23 nt, Human
agucaaauugugugaaagguacu

SEQ ID NO: 3145369 - RNA, 12 nt, Human
aguccuguaaug

SEQ ID NO: 3145370 - RNA, 18 nt, Human
auauccuaauaaaaaggu

SEQ ID NO: 3145371 - RNA, 16 nt, Human
auauccuaauaaaaag

SEQ ID NO: 3145372 - RNA, 14 nt, Human
auauccuaauaaaa

SEQ ID NO: 3145373 - RNA, 13 nt, Human
auauccuaauaaa

SEQ ID NO: 3145374 - RNA, 12 nt, Human
auauccuaauaa

SEQ ID NO: 3145375 - RNA, 22 nt, Human
auaugcuucuguuuuauaauuu

SEQ ID NO: 3145376 - RNA, 20 nt, Human
auaugcuucuguuuuauaau

SEQ ID NO: 3145377 - RNA, 22 nt, Human
auauuuauuacuguaagaaaau

SEQ ID NO: 3145378 - RNA, 13 nt, Human
auauuuauuuuaa

SEQ ID NO: 3145379 - RNA, 16 nt, Human
auauuauguuaaaacu

SEQ ID NO: 3145380 - RNA, 14 nt, Human
auagucaaauugug

SEQ ID NO: 3145381 - RNA, 15 nt, Human
auagguuuaauaauu

SEQ ID NO: 3145382 - RNA, 14 nt, Human
auaggugcuacaaa

SEQ ID NO: 3145383 - RNA, 15 nt, Human
auaggugcuacaaaa

SEQ ID NO: 3145384 - RNA, 21 nt, Human
auaggugcuacaaaaacacag

SEQ ID NO: 3145385 - RNA, 23 nt, Human
auaggugcuacaaaaacacagca

SEQ ID NO: 3145386 - RNA, 18 nt, Human
auagcagcuuauucacaa

SEQ ID NO: 3145387 - RNA, 23 nt, Human
auaauguuucaaacauauauaac

SEQ ID NO: 3145388 - RNA, 15 nt, Human
auaaugucccuucac

SEQ ID NO: 3145389 - RNA, 17 nt, Human
auacacacucaaaucaa

SEQ ID NO: 3145390 - RNA, 18 nt, Human
auacacacucaaaucaag

SEQ ID NO: 3145391 - RNA, 18 nt, Human
auaaaggauuaaugucaa

SEQ ID NO: 3145392 - RNA, 17 nt, Human
auaaaggcaguuuucua

SEQ ID NO: 3145393 - RNA, 16 nt, Human
auaaaggcaguuuucu

SEQ ID NO: 3145394 - RNA, 18 nt, Human
auaaaggcaguuuucuaa

SEQ ID NO: 3145395 - RNA, 13 nt, Human
aaaaacacagcaa

SEQ ID NO: 3145396 - RNA, 18 nt, Human
aaaaacacagcaagggug

SEQ ID NO: 3145397 - RNA, 12 nt, Human
aaaaacacagca

SEQ ID NO: 3145398 - RNA, 22 nt, Human
uuugugaauuaggcuguaacua

SEQ ID NO: 3145399 - RNA, 15 nt, Human
uuugugaauuaggcu

SEQ ID NO: 3145400 - RNA, 17 nt, Human
uuugugaagcaaaauuu

SEQ ID NO: 3145401 - RNA, 21 nt, Human
uuuguaguguuggagaagaac

SEQ ID NO: 3145402 - RNA, 19 nt, Human
uuuguaguguuggagaaga

SEQ ID NO: 3145403 - RNA, 17 nt, Human
uuuguaguguuggagaa

SEQ ID NO: 3145404 - RNA, 14 nt, Human
auguauguuaccaa

SEQ ID NO: 3145405 - RNA, 13 nt, Human
auguauguuacca

SEQ ID NO: 3145406 - RNA, 12 nt, Human
auguauguuacc

SEQ ID NO: 3145407 - RNA, 17 nt, Human
auguccacugguucuuc

SEQ ID NO: 3145408 - RNA, 16 nt, Human
auguccacugguucuu

SEQ ID NO: 3145409 - RNA, 22 nt, Human
auguccugccuauuaucuguca

SEQ ID NO: 3145410 - RNA, 21 nt, Human
auguccugccuauuaucuguc

SEQ ID NO: 3145411 - RNA, 20 nt, Human
auguccugccuauuaucugu

SEQ ID NO: 3145412 - RNA, 16 nt, Human
auguccugccuauuau

SEQ ID NO: 3145413 - RNA, 16 nt, Human
auguacuucaugcugu

SEQ ID NO: 3145414 - RNA, 13 nt, Human
auguagaggagaa

SEQ ID NO: 3145415 - RNA, 12 nt, Human
auguagaggaga

SEQ ID NO: 3145416 - RNA, 19 nt, Human
auguagaggagaaacugga

SEQ ID NO: 3145417 - RNA, 17 nt, Human
auguagaggagaaacug

SEQ ID NO: 3145418 - RNA, 13 nt, Human
uuugcucauggaa

SEQ ID NO: 3145419 - RNA, 14 nt, Human
uuugcaagccagau

SEQ ID NO: 3145420 - RNA, 21 nt, Human
augguucccuugaugaagaag

SEQ ID NO: 3145421 - RNA, 15 nt, Human
uuugaaauauugacu

SEQ ID NO: 3145422 - RNA, 15 nt, Human
uuucuguaccaguua

SEQ ID NO: 3145423 - RNA, 14 nt, Human
uuucuguaccaguu

SEQ ID NO: 3145424 - RNA, 17 nt, Human
uuucucccagucauuua

SEQ ID NO: 3145425 - RNA, 18 nt, Human
uuucucccagucauuuaa

SEQ ID NO: 3145426 - RNA, 19 nt, Human
auggcuaagcaaaauguga

SEQ ID NO: 3145427 - RNA, 23 nt, Human
auggcuauaggugcuacaaaaac

SEQ ID NO: 3145428 - RNA, 17 nt, Human
auggcauaaccugucuc

SEQ ID NO: 3145429 - RNA, 16 nt, Human
auggcauaaccugucu

SEQ ID NO: 3145430 - RNA, 16 nt, Human
auggcacuaguauuuc

SEQ ID NO: 3145431 - RNA, 14 nt, Human
auggcacuaguauu

SEQ ID NO: 3145432 - RNA, 16 nt, Human
uuucaaacauauauaa

SEQ ID NO: 3145433 - RNA, 19 nt, Human
uuuauuaaucuuaguguau

SEQ ID NO: 3145434 - RNA, 13 nt, Human
uuuauuaaucuua

SEQ ID NO: 3145435 - RNA, 21 nt, Human
augcuagaacucccuuucaac

SEQ ID NO: 3145436 - RNA, 20 nt, Human
augcuagaacucccuuucaa

SEQ ID NO: 3145437 - RNA, 22 nt, Human
augcuagaacucccuuucaaca

SEQ ID NO: 3145438 - RNA, 19 nt, Human
augcuagaacucccuuuca

SEQ ID NO: 3145439 - RNA, 17 nt, Human
augccauuuaaagcuua

SEQ ID NO: 3145440 - RNA, 21 nt, Human
augccauuuaaagcuuauuaa

SEQ ID NO: 3145441 - RNA, 13 nt, Human
augcaguucugaa

SEQ ID NO: 3145442 - RNA, 19 nt, Human
augcgguuaauuuugaagu

SEQ ID NO: 3145443 - RNA, 15 nt, Human
augcagcuguggcag

SEQ ID NO: 3145444 - RNA, 14 nt, Human
augauuaaguaaug

SEQ ID NO: 3145445 - RNA, 18 nt, Human
augauuaaguaaugauaa

SEQ ID NO: 3145446 - RNA, 14 nt, Human
augauuacuggccu

SEQ ID NO: 3145447 - RNA, 15 nt, Human
augauaacuggaaac

SEQ ID NO: 3145448 - RNA, 16 nt, Human
uuuaaagaaaguguau

SEQ ID NO: 3145449 - RNA, 14 nt, Human
uuuaaagaaagugu

SEQ ID NO: 3145450 - RNA, 13 nt, Human
uuuaaagaaagug

SEQ ID NO: 3145451 - RNA, 19 nt, Human
augauuacuggccuuuuuc

SEQ ID NO: 3145452 - RNA, 15 nt, Human
augauuacuggccuu

SEQ ID NO: 3145453 - RNA, 22 nt, Human
augauuacuggccuuuuucauu

SEQ ID NO: 3145454 - RNA, 17 nt, Human
aucaggguuaguauugu

SEQ ID NO: 3145455 - RNA, 19 nt, Human
aucagaagucaucuugcua

SEQ ID NO: 3145456 - RNA, 22 nt, Human
aucacuugucaauaaaauccau

SEQ ID NO: 3145457 - RNA, 18 nt, Human
aucagaagucaucuugcu

SEQ ID NO: 3145458 - RNA, 13 nt, Human
uucuaagaaguga

SEQ ID NO: 3145459 - RNA, 23 nt, Human
uucuaagaagugaaaaucuacac

SEQ ID NO: 3145460 - RNA, 16 nt, Human
uucuaaguaaaaccac

SEQ ID NO: 3145461 - RNA, 15 nt, Human
uucuaaguaaaacca

SEQ ID NO: 3145462 - RNA, 19 nt, Human
uucuagcaugaagacagag

SEQ ID NO: 3145463 - RNA, 17 nt, Human
uucggccccauguaucu

SEQ ID NO: 3145464 - RNA, 15 nt, Human
uucggccuccauccu

SEQ ID NO: 3145465 - RNA, 18 nt, Human
uucggccccauguaucuc

SEQ ID NO: 3145466 - RNA, 14 nt, Human
uucggccuccaucc

SEQ ID NO: 3145467 - RNA, 19 nt, Human
uuccguagguuauuuucag

SEQ ID NO: 3145468 - RNA, 19 nt, Human
uucccucccagaggagcca

SEQ ID NO: 3145469 - RNA, 14 nt, Human
aucaacagauaaau

SEQ ID NO: 3145470 - RNA, 20 nt, Human
auauuuuuuguuaaaugauu

SEQ ID NO: 3145471 - RNA, 18 nt, Human
auauuuuuuguuaaauga

SEQ ID NO: 3145472 - RNA, 13 nt, Human
auccgaggcaggg

SEQ ID NO: 3145473 - RNA, 18 nt, Human
uugaacccgggaggcaga

SEQ ID NO: 3145474 - RNA, 17 nt, Human
uugaaauuguauuacaa

SEQ ID NO: 3145475 - RNA, 19 nt, Human
uugaacccgggaggcagag

SEQ ID NO: 3145476 - RNA, 12 nt, Human
auccgaggcagg

SEQ ID NO: 3145477 - RNA, 17 nt, Human
uucuuaacuucuugcuu

SEQ ID NO: 3145478 - RNA, 16 nt, Human
uucuuaacuucuugcu

SEQ ID NO: 3145479 - RNA, 13 nt, Human
uucuuaacuucuu

SEQ ID NO: 3145480 - RNA, 12 nt, Human
uucucuaggaaa

SEQ ID NO: 3145481 - RNA, 14 nt, Human
auccauacauuugu

SEQ ID NO: 3145482 - RNA, 21 nt, Human
uugaaggaugcugucuucgua

SEQ ID NO: 3145483 - RNA, 19 nt, Human
aucuacacuccagugagac

SEQ ID NO: 3145484 - RNA, 18 nt, Human
aucuacacuccagugaga

SEQ ID NO: 3145485 - RNA, 22 nt, Human
uugcaagccagauuuuccugaa

SEQ ID NO: 3145486 - RNA, 13 nt, Human
uugcaucaauuuu

SEQ ID NO: 3145487 - RNA, 20 nt, Human
uugcuucuuucuagaaagag

SEQ ID NO: 3145488 - RNA, 17 nt, Human
uugcuucuuucuagaaa

SEQ ID NO: 3145489 - RNA, 12 nt, Human
uugcuucuuucu

SEQ ID NO: 3145490 - RNA, 23 nt, Human
aucuugcuaccaguauuuagaag

SEQ ID NO: 3145491 - RNA, 14 nt, Human
aucuugcuaccagu

SEQ ID NO: 3145492 - RNA, 19 nt, Human
aucuugcuaccaguauuua

SEQ ID NO: 3145493 - RNA, 16 nt, Human
aucuugcuaccaguau

SEQ ID NO: 3145494 - RNA, 14 nt, Human
aucuuaguguauga

SEQ ID NO: 3145495 - RNA, 13 nt, Human
aucuuaguguaug

SEQ ID NO: 3145496 - RNA, 19 nt, Human
aucuuaguguaugauuacu

SEQ ID NO: 3145497 - RNA, 16 nt, Human
aucuuaguguaugauu

SEQ ID NO: 3145498 - RNA, 15 nt, Human
aucuuaguguaugau

SEQ ID NO: 3145499 - RNA, 16 nt, Human
augaauuacauuugua

SEQ ID NO: 3145500 - RNA, 15 nt, Human
augaauuacauuugu

SEQ ID NO: 3145501 - RNA, 15 nt, Human
augaauuaaguuuuu

SEQ ID NO: 3145502 - RNA, 23 nt, Human
augaauggcuaagcaaaauguga

SEQ ID NO: 3145503 - RNA, 14 nt, Human
auuuauuuuaauaa

SEQ ID NO: 3145504 - RNA, 14 nt, Human
auuuguauaaaaua

SEQ ID NO: 3145505 - RNA, 22 nt, Human
auuuguaguguuggagaagaac

SEQ ID NO: 3145506 - RNA, 19 nt, Human
auuuguaguguuggagaag

SEQ ID NO: 3145507 - RNA, 23 nt, Human
auuuuaaaagaaugauuaugaau

SEQ ID NO: 3145508 - RNA, 16 nt, Human
auuuuaaaagaaugau

SEQ ID NO: 3145509 - RNA, 23 nt, Human
auuggauuuccuaauacugucau

SEQ ID NO: 3145510 - RNA, 14 nt, Human
auuggauuuccuaa

SEQ ID NO: 3145511 - RNA, 22 nt, Human
auuggauuuccuaauacuguca

SEQ ID NO: 3145512 - RNA, 15 nt, Human
auuggauuuccuaau

SEQ ID NO: 3145513 - RNA, 15 nt, Human
auugguuuaaagaaa

SEQ ID NO: 3145514 - RNA, 18 nt, Human
auugguuuaaagaaagug

SEQ ID NO: 3145515 - RNA, 17 nt, Human
auugguuuaaagaaagu

SEQ ID NO: 3145516 - RNA, 13 nt, Human
auugacuuuuuau

SEQ ID NO: 3145517 - RNA, 19 nt, Human
auuggagcucgugggacag

SEQ ID NO: 3145518 - RNA, 19 nt, Human
auuggacaguaaaauccac

SEQ ID NO: 3145519 - RNA, 13 nt, Human
auugucuagugaa

SEQ ID NO: 3145520 - RNA, 21 nt, Human
auuuuuccaacuacuaauaga

SEQ ID NO: 3145521 - RNA, 13 nt, Human
auuuuuccaacua

SEQ ID NO: 3145522 - RNA, 15 nt, Human
auuuuucuuauuuca

SEQ ID NO: 3145523 - RNA, 19 nt, Human
auuuuucuuauuucauuuc

SEQ ID NO: 3145524 - RNA, 20 nt, Human
auuuuucuuauuucauuucu

SEQ ID NO: 3145525 - RNA, 22 nt, Human
auuuuugugauuuugugauuga

SEQ ID NO: 3145526 - RNA, 13 nt, Human
auuuuuuaaauuc

SEQ ID NO: 3145527 - RNA, 21 nt, Human
auuuuuguuuucauuaucuca

SEQ ID NO: 3145528 - RNA, 18 nt, Human
auuuuuuguuaaaugauu

SEQ ID NO: 3145529 - RNA, 15 nt, Human
auuuuuuguauaauu

SEQ ID NO: 3145530 - RNA, 14 nt, Human
auuuuuuguauaau

SEQ ID NO: 3145531 - RNA, 16 nt, Human
auuuuuuguauaauug

SEQ ID NO: 3145532 - RNA, 23 nt, Human
auuuuuucucuaggaaauauuua

SEQ ID NO: 3145533 - RNA, 20 nt, Human
auuuuuucucuaggaaauau

SEQ ID NO: 3145534 - RNA, 21 nt, Human
auuuuguuggcauagcucugg

SEQ ID NO: 3145535 - RNA, 15 nt, Human
auuuuguuggcauag

SEQ ID NO: 3145536 - RNA, 14 nt, Human
auuuuccugaaaac

SEQ ID NO: 3145537 - RNA, 15 nt, Human
auuuucuauaauuua

SEQ ID NO: 3145538 - RNA, 14 nt, Human
auuuucuauaauuu

SEQ ID NO: 3145539 - RNA, 21 nt, Human
auucccguuuugucacuuuuu

SEQ ID NO: 3145540 - RNA, 18 nt, Human
auucccguuuugucacuu

SEQ ID NO: 3145541 - RNA, 16 nt, Human
auucccguuuugucac

SEQ ID NO: 3145542 - RNA, 23 nt, Human
auucccguuuugucacuuuuucu

SEQ ID NO: 3145543 - RNA, 16 nt, Human
auucaaacagucucag

SEQ ID NO: 3145544 - RNA, 18 nt, Human
auucaaacagucucagga

SEQ ID NO: 3145545 - RNA, 19 nt, Human
auucaaacagucucaggaa

SEQ ID NO: 3145546 - RNA, 20 nt, Human
auucaaacagucucaggaaa

SEQ ID NO: 3145547 - RNA, 21 nt, Human
auuauguuaaaacugggacag

SEQ ID NO: 3145548 - RNA, 18 nt, Human
auuauauuuauuacugua

SEQ ID NO: 3145549 - RNA, 15 nt, Human
auuauauuuauuacu

SEQ ID NO: 3145550 - RNA, 20 nt, Human
auuauuaccuuacagaaguu

SEQ ID NO: 3145551 - RNA, 17 nt, Human
auuauauuuacaaaugg

SEQ ID NO: 3145552 - RNA, 19 nt, Human
auugacacuuaaaaauggu

SEQ ID NO: 3145553 - RNA, 18 nt, Human
auugacuaucaaacugaa

SEQ ID NO: 3145554 - RNA, 21 nt, Human
auugacuaucaaacugaagcc

SEQ ID NO: 3145555 - RNA, 17 nt, Human
auugacacuuaaaaaug

SEQ ID NO: 3145556 - RNA, 15 nt, Human
auugacacuuaaaaa

SEQ ID NO: 3145557 - RNA, 15 nt, Human
auucugcuaccucac

SEQ ID NO: 3145558 - RNA, 19 nt, Human
auucugcuaccucacuggg

SEQ ID NO: 3145559 - RNA, 18 nt, Human
agccugagcgacagugag

SEQ ID NO: 3145560 - RNA, 22 nt, Human
ugcagcuguggcagaguuacag

SEQ ID NO: 3145561 - RNA, 20 nt, Human
ugcagcuguggcagaguuac

SEQ ID NO: 3145562 - RNA, 14 nt, Human
ugcagugagccgag

SEQ ID NO: 3145563 - RNA, 15 nt, Human
ugcacucccaccuga

SEQ ID NO: 3145564 - RNA, 14 nt, Human
ugcacucccaccug

SEQ ID NO: 3145565 - RNA, 17 nt, Human
ugcagagacaggaccug

SEQ ID NO: 3145566 - RNA, 20 nt, Human
ugcagagacaggaccugacu

SEQ ID NO: 3145567 - RNA, 17 nt, Human
agcccuucuuuccacag

SEQ ID NO: 3145568 - RNA, 22 nt, Human
agcccuuaugcgguuaauuuug

SEQ ID NO: 3145569 - RNA, 21 nt, Human
agcccuuaugcgguuaauuuu

SEQ ID NO: 3145570 - RNA, 19 nt, Human
ugcacucccaccugacaca

SEQ ID NO: 3145571 - RNA, 17 nt, Human
ugcacucccaccugaca

SEQ ID NO: 3145572 - RNA, 19 nt, Human
agcccuucuuuccacagaa

SEQ ID NO: 3145573 - RNA, 18 nt, Human
agcccuucuuuccacaga

SEQ ID NO: 3145574 - RNA, 19 nt, Human
agcuacuaauuuuaaaaug

SEQ ID NO: 3145575 - RNA, 14 nt, Human
ugccacuuaaugua

SEQ ID NO: 3145576 - RNA, 18 nt, Human
ugccacuuaauguauguu

SEQ ID NO: 3145577 - RNA, 17 nt, Human
ugccacuuaauguaugu

SEQ ID NO: 3145578 - RNA, 23 nt, Human
ugccacuuaauguauguuaccaa

SEQ ID NO: 3145579 - RNA, 20 nt, Human
ugccacuuaauguauguuac

SEQ ID NO: 3145580 - RNA, 23 nt, Human
ugccaauauccuaauaaaaaggu

SEQ ID NO: 3145581 - RNA, 14 nt, Human
ugccaauauccuaa

SEQ ID NO: 3145582 - RNA, 21 nt, Human
ugccaauauccuaauaaaaag

SEQ ID NO: 3145583 - RNA, 19 nt, Human
ugccaauauccuaauaaaa

SEQ ID NO: 3145584 - RNA, 18 nt, Human
ugccaauauccuaauaaa

SEQ ID NO: 3145585 - RNA, 17 nt, Human
ugccaauauccuaauaa

SEQ ID NO: 3145586 - RNA, 16 nt, Human
ugccaauauccuaaua

SEQ ID NO: 3145587 - RNA, 15 nt, Human
ugccaauauccuaau

SEQ ID NO: 3145588 - RNA, 23 nt, Human
ugcccuagagcacacuguagcau

SEQ ID NO: 3145589 - RNA, 17 nt, Human
ugcccuagagcacacug

SEQ ID NO: 3145590 - RNA, 17 nt, Human
agcugggcuaaguaaau

SEQ ID NO: 3145591 - RNA, 13 nt, Human
agcuggaaaagua

SEQ ID NO: 3145592 - RNA, 17 nt, Human
agcugccuccccuccuc

SEQ ID NO: 3145593 - RNA, 18 nt, Human
agcugccuccccuccucu

SEQ ID NO: 3145594 - RNA, 19 nt, Human
agcugccuccccuccucug

SEQ ID NO: 3145595 - RNA, 20 nt, Human
agcugccuccccuccucugc

SEQ ID NO: 3145596 - RNA, 21 nt, Human
agcugccuccccuccucugcu

SEQ ID NO: 3145597 - RNA, 22 nt, Human
agcugccuccccuccucugcuu

SEQ ID NO: 3145598 - RNA, 23 nt, Human
agcugccuccccuccucugcuug

SEQ ID NO: 3145599 - RNA, 12 nt, Human
agcucucagcca

SEQ ID NO: 3145600 - RNA, 13 nt, Human
agcucucagccaa

SEQ ID NO: 3145601 - RNA, 14 nt, Human
ugcuaccucacugg

SEQ ID NO: 3145602 - RNA, 15 nt, Human
ugcuaccucacuggg

SEQ ID NO: 3145603 - RNA, 16 nt, Human
ugcuaccucacugggg

SEQ ID NO: 3145604 - RNA, 22 nt, Human
ugcuaccucacugggguccugg

SEQ ID NO: 3145605 - RNA, 20 nt, Human
agcuuauuaaaacucauuuu

SEQ ID NO: 3145606 - RNA, 15 nt, Human
agcuuauuaaaacuc

SEQ ID NO: 3145607 - RNA, 21 nt, Human
agcuuauugucuagugaaacu

SEQ ID NO: 3145608 - RNA, 14 nt, Human
ugcuaguaauugga

SEQ ID NO: 3145609 - RNA, 16 nt, Human
ugcuaguaauuggaaa

SEQ ID NO: 3145610 - RNA, 19 nt, Human
aggaaagagaacuuccaga

SEQ ID NO: 3145611 - RNA, 13 nt, Human
aggaaagagaacu

SEQ ID NO: 3145612 - RNA, 19 nt, Human
aggaauugacccacaagaa

SEQ ID NO: 3145613 - RNA, 22 nt, Human
ugcugccaauauccuaauaaaa

SEQ ID NO: 3145614 - RNA, 23 nt, Human
ugcugccaauauccuaauaaaaa

SEQ ID NO: 3145615 - RNA, 13 nt, Human
aggaaauauuuau

SEQ ID NO: 3145616 - RNA, 18 nt, Human
aggaaauauuuauuuuaa

SEQ ID NO: 3145617 - RNA, 14 nt, Human
aggaaauauuuauu

SEQ ID NO: 3145618 - RNA, 22 nt, Human
aggcuccacuuggucugugaga

SEQ ID NO: 3145619 - RNA, 21 nt, Human
aggcuccacuuggucugugag

SEQ ID NO: 3145620 - RNA, 17 nt, Human
aggcuccacuuggucug

SEQ ID NO: 3145621 - RNA, 11 nt, Human
aggcuccacuu

SEQ ID NO: 3145622 - RNA, 11 nt, Human
uggcccaggag

SEQ ID NO: 3145623 - RNA, 12 nt, Human
aggaguuuggcc

SEQ ID NO: 3145624 - RNA, 22 nt, Human
ugcugcccgucuucagccuagc

SEQ ID NO: 3145625 - RNA, 17 nt, Human
ugcugcccgucuucagc

SEQ ID NO: 3145626 - RNA, 20 nt, Human
ugcugcccgucuucagccua

SEQ ID NO: 3145627 - RNA, 21 nt, Human
ugcugcccgucuucagccuag

SEQ ID NO: 3145628 - RNA, 20 nt, Human
uggacaccaggagucccugg

SEQ ID NO: 3145629 - RNA, 21 nt, Human
uggacaccaggagucccuggu

SEQ ID NO: 3145630 - RNA, 22 nt, Human
uggaauuucucccagucauuua

SEQ ID NO: 3145631 - RNA, 21 nt, Human
uggagcucgugggacagucac

SEQ ID NO: 3145632 - RNA, 21 nt, Human
aggcaauuagacacuuuggaa

SEQ ID NO: 3145633 - RNA, 12 nt, Human
aggcaauuagac

SEQ ID NO: 3145634 - RNA, 14 nt, Human
uggagaagaacuga

SEQ ID NO: 3145635 - RNA, 16 nt, Human
uggagaagaacugaaa

SEQ ID NO: 3145636 - RNA, 18 nt, Human
ugggaaacaaaaggauaa

SEQ ID NO: 3145637 - RNA, 17 nt, Human
ugggaaagcauuguaaa

SEQ ID NO: 3145638 - RNA, 18 nt, Human
ugggaaagcauuguaaau

SEQ ID NO: 3145639 - RNA, 14 nt, Human
ugggaaagcauugu

SEQ ID NO: 3145640 - RNA, 16 nt, Human
ugggaaagcauuguaa

SEQ ID NO: 3145641 - RNA, 23 nt, Human
uggcuauaggugcuacaaaaaca

SEQ ID NO: 3145642 - RNA, 18 nt, Human
uggcuaagcaaaauguga

SEQ ID NO: 3145643 - RNA, 15 nt, Human
uggcuauaggugcua

SEQ ID NO: 3145644 - RNA, 19 nt, Human
uggcuauaggugcuacaaa

SEQ ID NO: 3145645 - RNA, 16 nt, Human
agggaaacugccagca

SEQ ID NO: 3145646 - RNA, 19 nt, Human
agggaaacugccagcaacg

SEQ ID NO: 3145647 - RNA, 21 nt, Human
agggaaacugccagcaacgca

SEQ ID NO: 3145648 - RNA, 23 nt, Human
agggaaacugccagcaacgcagg

SEQ ID NO: 3145649 - RNA, 14 nt, Human
agggaaacugccag

SEQ ID NO: 3145650 - RNA, 15 nt, Human
agggaaacugccagc

SEQ ID NO: 3145651 - RNA, 20 nt, Human
ugggaacccaaguccaagca

SEQ ID NO: 3145652 - RNA, 12 nt, Human
agggccccagca

SEQ ID NO: 3145653 - RNA, 14 nt, Human
agggccccagcacu

SEQ ID NO: 3145654 - RNA, 18 nt, Human
agggccccagcacuaaag

SEQ ID NO: 3145655 - RNA, 22 nt, Human
agggcuguuauaaucuuucaca

SEQ ID NO: 3145656 - RNA, 18 nt, Human
ugggcucaaccagaaaag

SEQ ID NO: 3145657 - RNA, 19 nt, Human
ugggaggcugagaugggag

SEQ ID NO: 3145658 - RNA, 13 nt, Human
agggagagaagau

SEQ ID NO: 3145659 - RNA, 14 nt, Human
agggagagaagaua

SEQ ID NO: 3145660 - RNA, 23 nt, Human
agggacuucugucuucacaacag

SEQ ID NO: 3145661 - RNA, 18 nt, Human
uguuccuagugaaagagg

SEQ ID NO: 3145662 - RNA, 22 nt, Human
uguugcccacagcuguaugauu

SEQ ID NO: 3145663 - RNA, 15 nt, Human
uguucuaagaaguga

SEQ ID NO: 3145664 - RNA, 23 nt, Human
aguguuggagaagaacugaaauc

SEQ ID NO: 3145665 - RNA, 17 nt, Human
agugccacuuaauguau

SEQ ID NO: 3145666 - RNA, 21 nt, Human
agugccacuuaauguauguua

SEQ ID NO: 3145667 - RNA, 20 nt, Human
agugccacuuaauguauguu

SEQ ID NO: 3145668 - RNA, 18 nt, Human
agugccacuuaauguaug

SEQ ID NO: 3145669 - RNA, 22 nt, Human
agugcaaauugucacaggacag

SEQ ID NO: 3145670 - RNA, 20 nt, Human
ugugcugcccgucuucagcc

SEQ ID NO: 3145671 - RNA, 16 nt, Human
agucuuucacauuuaa

SEQ ID NO: 3145672 - RNA, 21 nt, Human
agugaacaaauuuacagagac

SEQ ID NO: 3145673 - RNA, 20 nt, Human
agugaacaaauuuacagaga

SEQ ID NO: 3145674 - RNA, 23 nt, Human
agugaacaaauuuacagagacag

SEQ ID NO: 3145675 - RNA, 22 nt, Human
agugaacaaauuuacagagaca

SEQ ID NO: 3145676 - RNA, 16 nt, Human
uguaguguuggagaag

SEQ ID NO: 3145677 - RNA, 18 nt, Human
uguaguguuggagaagaa

SEQ ID NO: 3145678 - RNA, 17 nt, Human
uguaguguuggagaaga

SEQ ID NO: 3145679 - RNA, 13 nt, Human
aguaauuggaaag

SEQ ID NO: 3145680 - RNA, 12 nt, Human
aguaauuggaaa

SEQ ID NO: 3145681 - RNA, 22 nt, Human
aguaauuuauuguuuuuccuug

SEQ ID NO: 3145682 - RNA, 13 nt, Human
aguaauuuauugu

SEQ ID NO: 3145683 - RNA, 16 nt, Human
aguaaaaccacagcag

SEQ ID NO: 3145684 - RNA, 17 nt, Human
aguaaaaccacagcagu

SEQ ID NO: 3145685 - RNA, 19 nt, Human
aguaaaaccacagcaguug

SEQ ID NO: 3145686 - RNA, 14 nt, Human
agguugcagugagc

SEQ ID NO: 3145687 - RNA, 16 nt, Human
aggugcuacaaaaaca

SEQ ID NO: 3145688 - RNA, 19 nt, Human
uguaagggaaacugccagc

SEQ ID NO: 3145689 - RNA, 13 nt, Human
uguaagggaaacu

SEQ ID NO: 3145690 - RNA, 18 nt, Human
uguaagggaaacugccag

SEQ ID NO: 3145691 - RNA, 14 nt, Human
agucaggaaagaga

SEQ ID NO: 3145692 - RNA, 13 nt, Human
agucucaggaaau

SEQ ID NO: 3145693 - RNA, 22 nt, Human
ugucucaguccaugaagaugua

SEQ ID NO: 3145694 - RNA, 15 nt, Human
aguauuuagaagcca

SEQ ID NO: 3145695 - RNA, 19 nt, Human
aguauuuagaagccaacua

SEQ ID NO: 3145696 - RNA, 20 nt, Human
uguccagccccguagacgug

SEQ ID NO: 3145697 - RNA, 18 nt, Human
auagauaggucagugcaa

SEQ ID NO: 3145698 - RNA, 13 nt, Human
auagaaguaaaaa

SEQ ID NO: 3145699 - RNA, 17 nt, Human
auagaauuaacacauga

SEQ ID NO: 3145700 - RNA, 22 nt, Human
auagaauaaaggcaguuuucua

SEQ ID NO: 3145701 - RNA, 20 nt, Human
auagaauaaaggcaguuuuc

SEQ ID NO: 3145702 - RNA, 19 nt, Human
auagaauaaaggcaguuuu

SEQ ID NO: 3145703 - RNA, 18 nt, Human
auagaauaaaggcaguuu

SEQ ID NO: 3145704 - RNA, 17 nt, Human
auagaauaaaggcaguu

SEQ ID NO: 3145705 - RNA, 12 nt, Human
auagaauaaagg

SEQ ID NO: 3145706 - RNA, 16 nt, Human
auacucauuaggaugg

SEQ ID NO: 3145707 - RNA, 15 nt, Human
uuauuauauuuacaa

SEQ ID NO: 3145708 - RNA, 19 nt, Human
uuauguuaaaacugggaca

SEQ ID NO: 3145709 - RNA, 14 nt, Human
uuauuauauuuaca

SEQ ID NO: 3145710 - RNA, 19 nt, Human
uuaugauuaaguaaugaua

SEQ ID NO: 3145711 - RNA, 21 nt, Human
uuaugaauuacauuuguauaa

SEQ ID NO: 3145712 - RNA, 17 nt, Human
uuaugaauuacauuugu

SEQ ID NO: 3145713 - RNA, 16 nt, Human
uuaugaauuacauuug

SEQ ID NO: 3145714 - RNA, 14 nt, Human
uuaugaauuacauu

SEQ ID NO: 3145715 - RNA, 22 nt, Human
auaccacaggaaccacaagacu

SEQ ID NO: 3145716 - RNA, 17 nt, Human
auacuauggaauuucuc

SEQ ID NO: 3145717 - RNA, 19 nt, Human
uuauauuugaaauauugac

SEQ ID NO: 3145718 - RNA, 15 nt, Human
uuauauuugaaauau

SEQ ID NO: 3145719 - RNA, 14 nt, Human
auaaucuuucacag

SEQ ID NO: 3145720 - RNA, 16 nt, Human
uuaggguuaugauuaa

SEQ ID NO: 3145721 - RNA, 14 nt, Human
uuaggguuaugauu

SEQ ID NO: 3145722 - RNA, 14 nt, Human
uuagggagagaaga

SEQ ID NO: 3145723 - RNA, 15 nt, Human
uuagggagagaagau

SEQ ID NO: 3145724 - RNA, 12 nt, Human
uuagggaggggu

SEQ ID NO: 3145725 - RNA, 17 nt, Human
uuacaaaucagaaguca

SEQ ID NO: 3145726 - RNA, 16 nt, Human
uuacaaaucagaaguc

SEQ ID NO: 3145727 - RNA, 22 nt, Human
uuacaaaucagaagucaucuug

SEQ ID NO: 3145728 - RNA, 18 nt, Human
uuaauuuuuccaacuacu

SEQ ID NO: 3145729 - RNA, 14 nt, Human
uuacaguucugugg

SEQ ID NO: 3145730 - RNA, 13 nt, Human
uuacaguucugug

SEQ ID NO: 3145731 - RNA, 22 nt, Human
uuacaguucugugguuucaugu

SEQ ID NO: 3145732 - RNA, 12 nt, Human
uuacaguucugu

SEQ ID NO: 3145733 - RNA, 11 nt, Human
uuacaguucug

SEQ ID NO: 3145734 - RNA, 13 nt, Human
uuacuggccuuuu

SEQ ID NO: 3145735 - RNA, 18 nt, Human
uuacuggccuuuuucauu

SEQ ID NO: 3145736 - RNA, 16 nt, Human
uuacuggccuuuuuca

SEQ ID NO: 3145737 - RNA, 22 nt, Human
aguuuuuugaaaaugggcucaa

SEQ ID NO: 3145738 - RNA, 16 nt, Human
aguuuuauaugcuucu

SEQ ID NO: 3145739 - RNA, 15 nt, Human
uuaauuuuuccaacu

SEQ ID NO: 3145740 - RNA, 13 nt, Human
uuaauuuuuccaa

SEQ ID NO: 3145741 - RNA, 23 nt, Human
uuaauuuugaagugcuguuuauu

SEQ ID NO: 3145742 - RNA, 20 nt, Human
uuaauuuugaagugcuguuu

SEQ ID NO: 3145743 - RNA, 19 nt, Human
uuaauuuugaagugcuguu

SEQ ID NO: 3145744 - RNA, 21 nt, Human
uuaaucuuaguguaugauuac

SEQ ID NO: 3145745 - RNA, 19 nt, Human
uuaaucuuaguguaugauu

SEQ ID NO: 3145746 - RNA, 16 nt, Human
uuaaaaaauggaacau

SEQ ID NO: 3145747 - RNA, 22 nt, Human
uuaaaaucauuucugcaucagc

SEQ ID NO: 3145748 - RNA, 14 nt, Human
uuaaaaucauuucu

SEQ ID NO: 3145749 - RNA, 20 nt, Human
aguuuaaauuguaauaggcg

SEQ ID NO: 3145750 - RNA, 17 nt, Human
aguuuaaauuguaauag

SEQ ID NO: 3145751 - RNA, 15 nt, Human
aguuuagcuggaaaa

SEQ ID NO: 3145752 - RNA, 19 nt, Human
uuaaaaaagaaacauuugg

SEQ ID NO: 3145753 - RNA, 17 nt, Human
ugagguacugagaguga

SEQ ID NO: 3145754 - RNA, 22 nt, Human
ugagguacugagagugaacaaa

SEQ ID NO: 3145755 - RNA, 14 nt, Human
ugagcuacaaaugc

SEQ ID NO: 3145756 - RNA, 13 nt, Human
ugagcuacaaaug

SEQ ID NO: 3145757 - RNA, 16 nt, Human
ugagcuacaaaugcau

SEQ ID NO: 3145758 - RNA, 15 nt, Human
ugaggacacugauau

SEQ ID NO: 3145759 - RNA, 14 nt, Human
agcagaacagugau

SEQ ID NO: 3145760 - RNA, 23 nt, Human
agcacuuggagccaaggguucag

SEQ ID NO: 3145761 - RNA, 20 nt, Human
ugagcgacagugagacucug

SEQ ID NO: 3145762 - RNA, 16 nt, Human
ugagcgacagugagac

SEQ ID NO: 3145763 - RNA, 14 nt, Human
ugagcgacagugag

SEQ ID NO: 3145764 - RNA, 13 nt, Human
ugagcgacaguga

SEQ ID NO: 3145765 - RNA, 16 nt, Human
agcaccaaucaugaau

SEQ ID NO: 3145766 - RNA, 12 nt, Human
agcacagcccuu

SEQ ID NO: 3145767 - RNA, 22 nt, Human
agcacagccucuuagaugcagu

SEQ ID NO: 3145768 - RNA, 14 nt, Human
agcaacgcaggccc

SEQ ID NO: 3145769 - RNA, 19 nt, Human
agaugaugaugaucuuuaa

SEQ ID NO: 3145770 - RNA, 14 nt, Human
agauccuggaaauc

SEQ ID NO: 3145771 - RNA, 22 nt, Human
agauggaaaauucauuuuuuaa

SEQ ID NO: 3145772 - RNA, 18 nt, Human
agauggaaaauucauuuu

SEQ ID NO: 3145773 - RNA, 22 nt, Human
agaugcuagaacucccuuucaa

SEQ ID NO: 3145774 - RNA, 23 nt, Human
agaugcuagaacucccuuucaac

SEQ ID NO: 3145775 - RNA, 24 nt, Human
ugacuucuaaguaaaaccacagca

SEQ ID NO: 3145776 - RNA, 15 nt, Human
ugacuguuuccauca

SEQ ID NO: 3145777 - RNA, 16 nt, Human
agauugugccccugca

SEQ ID NO: 3145778 - RNA, 16 nt, Human
agauuuaccacuugug

SEQ ID NO: 3145779 - RNA, 17 nt, Human
ugaagauguagaggaga

SEQ ID NO: 3145780 - RNA, 18 nt, Human
ugaagauguagaggagaa

SEQ ID NO: 3145781 - RNA, 22 nt, Human
ugaacuuguaaaggaauuuaaa

SEQ ID NO: 3145782 - RNA, 20 nt, Human
ugaagaagcaccaaucauga

SEQ ID NO: 3145783 - RNA, 14 nt, Human
ugaagaagauggua

SEQ ID NO: 3145784 - RNA, 22 nt, Human
agagugaacaaauuuacagaga

SEQ ID NO: 3145785 - RNA, 14 nt, Human
agagugaacaaauu

SEQ ID NO: 3145786 - RNA, 11 nt, Human
agacuguggcu

SEQ ID NO: 3145787 - RNA, 14 nt, Human
agacuguggcugcu

SEQ ID NO: 3145788 - RNA, 20 nt, Human
agacuguggcugcuagcacu

SEQ ID NO: 3145789 - RNA, 14 nt, Human
agacuggcacaguu

SEQ ID NO: 3145790 - RNA, 15 nt, Human
agacuggcacaguuu

SEQ ID NO: 3145791 - RNA, 21 nt, Human
agacuggauaguccgucucug

SEQ ID NO: 3145792 - RNA, 20 nt, Human
agagacacacugaagaagca

SEQ ID NO: 3145793 - RNA, 18 nt, Human
agagacacacugaagaag

SEQ ID NO: 3145794 - RNA, 15 nt, Human
agagaaugagagaca

SEQ ID NO: 3145795 - RNA, 17 nt, Human
agagacacacugaagaa

SEQ ID NO: 3145796 - RNA, 21 nt, Human
ucuuuaaagggauggcaagau

SEQ ID NO: 3145797 - RNA, 17 nt, Human
ucuuuaaaauacacacu

SEQ ID NO: 3145798 - RNA, 20 nt, Human
agacuggauaguccgucucu

SEQ ID NO: 3145799 - RNA, 17 nt, Human
agacauguggugggaca

SEQ ID NO: 3145800 - RNA, 17 nt, Human
agacccucaugcugcca

SEQ ID NO: 3145801 - RNA, 19 nt, Human
agacccucaugcugccaau

SEQ ID NO: 3145802 - RNA, 18 nt, Human
agacccucaugcugccaa

SEQ ID NO: 3145803 - RNA, 21 nt, Human
agacccucaugcugccaauau

SEQ ID NO: 3145804 - RNA, 20 nt, Human
agacccucaugcugccaaua

SEQ ID NO: 3145805 - RNA, 24 nt, Human
agacccucaugcugccaauauccu

SEQ ID NO: 3145806 - RNA, 16 nt, Human
agacuccaaagaaaug

SEQ ID NO: 3145807 - RNA, 19 nt, Human
agacuccaaagaaauguaa

SEQ ID NO: 3145808 - RNA, 21 nt, Human
agacuauucaaacagucucag

SEQ ID NO: 3145809 - RNA, 18 nt, Human
agacuauucaaacagucu

SEQ ID NO: 3145810 - RNA, 20 nt, Human
agacuauucaaacagucuca

SEQ ID NO: 3145811 - RNA, 12 nt, Human
agacuccaaaga

SEQ ID NO: 3145812 - RNA, 13 nt, Human
agacuccaaagaa

SEQ ID NO: 3145813 - RNA, 14 nt, Human
agacuccaaagaaa

SEQ ID NO: 3145814 - RNA, 16 nt, Human
agacuauucaaacagu

SEQ ID NO: 3145815 - RNA, 15 nt, Human
ucuucacaacagauu

SEQ ID NO: 3145816 - RNA, 18 nt, Human
ucuuaauuaaaagaauau

SEQ ID NO: 3145817 - RNA, 21 nt, Human
ucuuaauuaaaagaauauuuu

SEQ ID NO: 3145818 - RNA, 14 nt, Human
ucuuaauuaaaaga

SEQ ID NO: 3145819 - RNA, 14 nt, Human
ucugucagcugcaa

SEQ ID NO: 3145820 - RNA, 13 nt, Human
ucugucagcugca

SEQ ID NO: 3145821 - RNA, 18 nt, Human
ucuguuuuauaauuuugu

SEQ ID NO: 3145822 - RNA, 16 nt, Human
ucuggcccaccagggu

SEQ ID NO: 3145823 - RNA, 14 nt, Human
ucuggcccaccagg

SEQ ID NO: 3145824 - RNA, 12 nt, Human
ucugcuugccau

SEQ ID NO: 3145825 - RNA, 21 nt, Human
agaagaacugaaaucauacuu

SEQ ID NO: 3145826 - RNA, 17 nt, Human
ucugcuaccucacuggg

SEQ ID NO: 3145827 - RNA, 14 nt, Human
ucugcuaccucacu

SEQ ID NO: 3145828 - RNA, 11 nt, Human
ucugcuugcca

SEQ ID NO: 3145829 - RNA, 21 nt, Human
ucugagaaagacuauucaaac

SEQ ID NO: 3145830 - RNA, 22 nt, Human
ucugagaaagacuauucaaaca

SEQ ID NO: 3145831 - RNA, 23 nt, Human
ucugagaaagacuauucaaacag

SEQ ID NO: 3145832 - RNA, 19 nt, Human
agaaagacuauucaaacag

SEQ ID NO: 3145833 - RNA, 18 nt, Human
agaaagacuauucaaaca

SEQ ID NO: 3145834 - RNA, 20 nt, Human
agaaagacuauucaaacagu

SEQ ID NO: 3145835 - RNA, 23 nt, Human
agaaagacuauucaaacagucuc

SEQ ID NO: 3145836 - RNA, 14 nt, Human
ucugagaaagacua

SEQ ID NO: 3145837 - RNA, 15 nt, Human
ucugagaaagacuau

SEQ ID NO: 3145838 - RNA, 19 nt, Human
ucugagaaagacuauucaa

SEQ ID NO: 3145839 - RNA, 20 nt, Human
ucugagaaagacuauucaaa

SEQ ID NO: 3145840 - RNA, 21 nt, Human
ucugacuguuuccaucaaggg

SEQ ID NO: 3145841 - RNA, 14 nt, Human
agaacucccuuuca

SEQ ID NO: 3145842 - RNA, 13 nt, Human
agaaacuggaacu

SEQ ID NO: 3145843 - RNA, 14 nt, Human
agaaagaaaaucag

SEQ ID NO: 3145844 - RNA, 15 nt, Human
agaaacauuugguaa

SEQ ID NO: 3145845 - RNA, 19 nt, Human
agaaaacaaggaugaauua

SEQ ID NO: 3145846 - RNA, 16 nt, Human
agaaaacaaggaugaa

SEQ ID NO: 3145847 - RNA, 13 nt, Human
ucucuucuuuaaa

SEQ ID NO: 3145848 - RNA, 12 nt, Human
ucucuucuuuaa

SEQ ID NO: 3145849 - RNA, 17 nt, Human
ucucuggccuucggccu

SEQ ID NO: 3145850 - RNA, 16 nt, Human
ucucuggccuucggcc

SEQ ID NO: 3145851 - RNA, 13 nt, Human
ucucuggccuucg

SEQ ID NO: 3145852 - RNA, 15 nt, Human
ucuccucucucugua

SEQ ID NO: 3145853 - RNA, 15 nt, Human
ucucccagucauuua

SEQ ID NO: 3145854 - RNA, 22 nt, Human
acuuuuuauggcacuaguauuu

SEQ ID NO: 3145855 - RNA, 11 nt, Human
acuuuuucuga

SEQ ID NO: 3145856 - RNA, 12 nt, Human
acuuuuucugau

SEQ ID NO: 3145857 - RNA, 22 nt, Human
acuuuugugaauuaggcuguaa

SEQ ID NO: 3145858 - RNA, 23 nt, Human
acuuuuuuucuguaccaguuaau

SEQ ID NO: 3145859 - RNA, 21 nt, Human
acuuuuuuucuguaccaguua

SEQ ID NO: 3145860 - RNA, 20 nt, Human
acuuuuuuucuguaccaguu

SEQ ID NO: 3145861 - RNA, 23 nt, Human
uccaacuacuaauagaauaaagg

SEQ ID NO: 3145862 - RNA, 21 nt, Human
uccaacuacuaauagaauaaa

SEQ ID NO: 3145863 - RNA, 20 nt, Human
uccaacuacuaauagaauaa

SEQ ID NO: 3145864 - RNA, 23 nt, Human
accuuauaguuacuguguaauua

SEQ ID NO: 3145865 - RNA, 22 nt, Human
accuuauaguuacuguguaauu

SEQ ID NO: 3145866 - RNA, 20 nt, Human
accuuauaguuacuguguaa

SEQ ID NO: 3145867 - RNA, 19 nt, Human
accuuauaguuacugugua

SEQ ID NO: 3145868 - RNA, 18 nt, Human
accuuauaguuacugugu

SEQ ID NO: 3145869 - RNA, 14 nt, Human
accuuauaguuacu

SEQ ID NO: 3145870 - RNA, 12 nt, Human
accuuauaguua

SEQ ID NO: 3145871 - RNA, 20 nt, Human
uccagccugagcgacaguga

SEQ ID NO: 3145872 - RNA, 21 nt, Human
uccagccugagcgacagugag

SEQ ID NO: 3145873 - RNA, 22 nt, Human
ucaugaauuaguuuuauaugcu

SEQ ID NO: 3145874 - RNA, 21 nt, Human
ucaugaauuaguuuuauaugc

SEQ ID NO: 3145875 - RNA, 23 nt, Human
ucauguuaguuaccuuauaguua

SEQ ID NO: 3145876 - RNA, 19 nt, Human
ucauguuaguuaccuuaua

SEQ ID NO: 3145877 - RNA, 15 nt, Human
ucauguuaguuaccu

SEQ ID NO: 3145878 - RNA, 20 nt, Human
ucauugacuaucaaacugaa

SEQ ID NO: 3145879 - RNA, 21 nt, Human
ucauugacuaucaaacugaag

SEQ ID NO: 3145880 - RNA, 21 nt, Human
accucacugggguccuggggc

SEQ ID NO: 3145881 - RNA, 23 nt, Human
accucacugggguccuggggccu

SEQ ID NO: 3145882 - RNA, 21 nt, Human
accuaagauuacaaaucagaa

SEQ ID NO: 3145883 - RNA, 18 nt, Human
accguuggggauugggga

SEQ ID NO: 3145884 - RNA, 23 nt, Human
accacuuguguuuugcaagccag

SEQ ID NO: 3145885 - RNA, 19 nt, Human
accacuuguguuuugcaag

SEQ ID NO: 3145886 - RNA, 14 nt, Human
ucaccucauggaau

SEQ ID NO: 3145887 - RNA, 17 nt, Human
accaggagucccuggua

SEQ ID NO: 3145888 - RNA, 22 nt, Human
accaggagucccugguaauaag

SEQ ID NO: 3145889 - RNA, 11 nt, Human
accacagcagu

SEQ ID NO: 3145890 - RNA, 12 nt, Human
uauuucauuucu

SEQ ID NO: 3145891 - RNA, 18 nt, Human
accacuuguguuuugcaa

SEQ ID NO: 3145892 - RNA, 19 nt, Human
accacugcagaagacagua

SEQ ID NO: 3145893 - RNA, 14 nt, Human
accacugcagaaga

SEQ ID NO: 3145894 - RNA, 13 nt, Human
accacugcagaag

SEQ ID NO: 3145895 - RNA, 14 nt, Human
accagggacugagg

SEQ ID NO: 3145896 - RNA, 13 nt, Human
accaguuaauuuu

SEQ ID NO: 3145897 - RNA, 12 nt, Human
accaguuaauuu

SEQ ID NO: 3145898 - RNA, 16 nt, Human
accaguucucaugggu

SEQ ID NO: 3145899 - RNA, 16 nt, Human
accaguuaauuuuucc

SEQ ID NO: 3145900 - RNA, 14 nt, Human
accaguuaauuuuu

SEQ ID NO: 3145901 - RNA, 21 nt, Human
accaguucucauggguggcac

SEQ ID NO: 3145902 - RNA, 22 nt, Human
ucaccuggacuuaagcaucugg

SEQ ID NO: 3145903 - RNA, 20 nt, Human
acccaaauguucaucaauga

SEQ ID NO: 3145904 - RNA, 18 nt, Human
acccaaaaggcagaagca

SEQ ID NO: 3145905 - RNA, 21 nt, Human
acccaaauguucaucaaugaa

SEQ ID NO: 3145906 - RNA, 15 nt, Human
acccaaaaggcagaa

SEQ ID NO: 3145907 - RNA, 13 nt, Human
acccaaaaggcag

SEQ ID NO: 3145908 - RNA, 18 nt, Human
ucagaugcacaugagcug

SEQ ID NO: 3145909 - RNA, 19 nt, Human
accccauggagcugggcua

SEQ ID NO: 3145910 - RNA, 21 nt, Human
acuccaaagaaauguaaggga

SEQ ID NO: 3145911 - RNA, 14 nt, Human
uccucacuguaucc

SEQ ID NO: 3145912 - RNA, 20 nt, Human
uccucaaaacuucagacaua

SEQ ID NO: 3145913 - RNA, 15 nt, Human
uccucaaagaaagug

SEQ ID NO: 3145914 - RNA, 18 nt, Human
uccucaaagaaaguguau

SEQ ID NO: 3145915 - RNA, 16 nt, Human
uccucaaagaaagugu

SEQ ID NO: 3145916 - RNA, 19 nt, Human
uccucaaagaaaguguauu

SEQ ID NO: 3145917 - RNA, 13 nt, Human
uccccuugcccag

SEQ ID NO: 3145918 - RNA, 15 nt, Human
uccccuugcccaggg

SEQ ID NO: 3145919 - RNA, 16 nt, Human
uccccuugcccagggc

SEQ ID NO: 3145920 - RNA, 12 nt, Human
uccccuccucug

SEQ ID NO: 3145921 - RNA, 13 nt, Human
acuaaaaauacaa

SEQ ID NO: 3145922 - RNA, 20 nt, Human
acuaaagcaguggacaccag

SEQ ID NO: 3145923 - RNA, 22 nt, Human
acugccuucucaacuccaaacu

SEQ ID NO: 3145924 - RNA, 20 nt, Human
acugccuucucaacuccaaa

SEQ ID NO: 3145925 - RNA, 18 nt, Human
acuggccuuuuucauuua

SEQ ID NO: 3145926 - RNA, 21 nt, Human
acuggcacaguuuucugagaa

SEQ ID NO: 3145927 - RNA, 22 nt, Human
acuggcacaguuuucugagaaa

SEQ ID NO: 3145928 - RNA, 13 nt, Human
uccuucagccuga

SEQ ID NO: 3145929 - RNA, 22 nt, Human
acugaggggaggggagcauggg

SEQ ID NO: 3145930 - RNA, 17 nt, Human
acugaggggaggggagc

SEQ ID NO: 3145931 - RNA, 13 nt, Human
acugaggcagaca

SEQ ID NO: 3145932 - RNA, 15 nt, Human
acugaggcagacagc

SEQ ID NO: 3145933 - RNA, 19 nt, Human
acugaggcagacagcagcu

SEQ ID NO: 3145934 - RNA, 22 nt, Human
acugaggcagacagcagcucag

SEQ ID NO: 3145935 - RNA, 23 nt, Human
acugaggcagacagcagcucagg

SEQ ID NO: 3145936 - RNA, 14 nt, Human
uccugggcagcugc

SEQ ID NO: 3145937 - RNA, 15 nt, Human
uccugggcagcugcc

SEQ ID NO: 3145938 - RNA, 16 nt, Human
uccugggcagcugccu

SEQ ID NO: 3145939 - RNA, 17 nt, Human
uccugggcagcugccuc

SEQ ID NO: 3145940 - RNA, 18 nt, Human
uccugggcagcugccucc

SEQ ID NO: 3145941 - RNA, 19 nt, Human
uccugggcagcugccuccc

SEQ ID NO: 3145942 - RNA, 22 nt, Human
uccugggcagcugccuccccuc

SEQ ID NO: 3145943 - RNA, 23 nt, Human
uccugggcagcugccuccccucc

SEQ ID NO: 3145944 - RNA, 21 nt, Human
uccuggggccucggagccuca

SEQ ID NO: 3145945 - RNA, 22 nt, Human
uccuggggccucggagccucau

SEQ ID NO: 3145946 - RNA, 13 nt, Human
uccuggggccucg

SEQ ID NO: 3145947 - RNA, 22 nt, Human
uccugucugccagccagcagcc

SEQ ID NO: 3145948 - RNA, 16 nt, Human
aaggaaaaaauaacaa

SEQ ID NO: 3145949 - RNA, 19 nt, Human
guucugugguuucauguua

SEQ ID NO: 3145950 - RNA, 16 nt, Human
guucugugguuucaug

SEQ ID NO: 3145951 - RNA, 21 nt, Human
guucugugguuucauguuagu

SEQ ID NO: 3145952 - RNA, 19 nt, Human
guucucauggguggcacuc

SEQ ID NO: 3145953 - RNA, 15 nt, Human
guuuucugagaaaga

SEQ ID NO: 3145954 - RNA, 22 nt, Human
guuuuauaauuuugugaagcaa

SEQ ID NO: 3145955 - RNA, 15 nt, Human
guuuuauaauuuugu

SEQ ID NO: 3145956 - RNA, 11 nt, Human
guuuggccaga

SEQ ID NO: 3145957 - RNA, 23 nt, Human
guuuggccagaagucaaggcuua

SEQ ID NO: 3145958 - RNA, 18 nt, Human
guuuggccagaagucaag

SEQ ID NO: 3145959 - RNA, 12 nt, Human
guuuggccagaa

SEQ ID NO: 3145960 - RNA, 21 nt, Human
aagggugaugggaaagcauug

SEQ ID NO: 3145961 - RNA, 19 nt, Human
aagggugaugggaaagcau

SEQ ID NO: 3145962 - RNA, 15 nt, Human
aaguaaaaccacagc

SEQ ID NO: 3145963 - RNA, 16 nt, Human
aaguaaaaccacagca

SEQ ID NO: 3145964 - RNA, 14 nt, Human
aaguaaaaccacag

SEQ ID NO: 3145965 - RNA, 21 nt, Human
guuucuagcaugaagacagag

SEQ ID NO: 3145966 - RNA, 17 nt, Human
aaguaaaaccacagcag

SEQ ID NO: 3145967 - RNA, 18 nt, Human
aaguaaaaccacagcagu

SEQ ID NO: 3145968 - RNA, 21 nt, Human
aaguauguuagugcaaauugu

SEQ ID NO: 3145969 - RNA, 23 nt, Human
aaguauguuagugcaaauuguca

SEQ ID NO: 3145970 - RNA, 22 nt, Human
guuuucugagaaagacuauuca

SEQ ID NO: 3145971 - RNA, 16 nt, Human
guuuucugagaaagac

SEQ ID NO: 3145972 - RNA, 17 nt, Human
guuuucugagaaagacu

SEQ ID NO: 3145973 - RNA, 22 nt, Human
aagucaaggcuuagacccucau

SEQ ID NO: 3145974 - RNA, 13 nt, Human
aagucaaggcuua

SEQ ID NO: 3145975 - RNA, 23 nt, Human
guuuuuuuuuaaaaaagaaacau

SEQ ID NO: 3145976 - RNA, 23 nt, Human
aagucaucuugcuaccaguauuu

SEQ ID NO: 3145977 - RNA, 20 nt, Human
aagucaucuugcuaccagua

SEQ ID NO: 3145978 - RNA, 14 nt, Human
aagucaucuugcua

SEQ ID NO: 3145979 - RNA, 13 nt, Human
aagucaucuugcu

SEQ ID NO: 3145980 - RNA, 13 nt, Human
uaacaaugcugua

SEQ ID NO: 3145981 - RNA, 17 nt, Human
uaacaaugcuguauuuu

SEQ ID NO: 3145982 - RNA, 15 nt, Human
uaacaaugcuguauu

SEQ ID NO: 3145983 - RNA, 17 nt, Human
uaaaugauuucauucaa

SEQ ID NO: 3145984 - RNA, 15 nt, Human
uaaauguugacaugg

SEQ ID NO: 3145985 - RNA, 14 nt, Human
aauacacacucaaa

SEQ ID NO: 3145986 - RNA, 19 nt, Human
aauaauguuucaaacauau

SEQ ID NO: 3145987 - RNA, 15 nt, Human
aauaaauauaucuac

SEQ ID NO: 3145988 - RNA, 23 nt, Human
aauaaauauaucuaccccagacu

SEQ ID NO: 3145989 - RNA, 12 nt, Human
aauaaaugugcc

SEQ ID NO: 3145990 - RNA, 21 nt, Human
aauaaaugugccuucauuuuu

SEQ ID NO: 3145991 - RNA, 15 nt, Human
aauaacgauaaaaga

SEQ ID NO: 3145992 - RNA, 15 nt, Human
aauaacaauaaaaga

SEQ ID NO: 3145993 - RNA, 17 nt, Human
uaaagucagauggaaaa

SEQ ID NO: 3145994 - RNA, 13 nt, Human
uaaagucagaugg

SEQ ID NO: 3145995 - RNA, 15 nt, Human
uaaagucagauggaa

SEQ ID NO: 3145996 - RNA, 12 nt, Human
aauaaaaauaau

SEQ ID NO: 3145997 - RNA, 15 nt, Human
aauaaaggcaguuuu

SEQ ID NO: 3145998 - RNA, 18 nt, Human
aauaaaggcaguuuucua

SEQ ID NO: 3145999 - RNA, 16 nt, Human
aauaaaggcaguuuuc

SEQ ID NO: 3146000 - RNA, 19 nt, Human
aauaaaggcaguuuucuaa

SEQ ID NO: 3146001 - RNA, 22 nt, Human
aauaaaauccauacauuugugu

SEQ ID NO: 3146002 - RNA, 19 nt, Human
uaaaccaaggcuagaacca

SEQ ID NO: 3146003 - RNA, 12 nt, Human
uaaacucauuuc

SEQ ID NO: 3146004 - RNA, 17 nt, Human
uaaacucauuucuagca

SEQ ID NO: 3146005 - RNA, 13 nt, Human
uaaagaaagugua

SEQ ID NO: 3146006 - RNA, 11 nt, Human
uaaagaaagug

SEQ ID NO: 3146007 - RNA, 17 nt, Human
uaaagaaaguguauuug

SEQ ID NO: 3146008 - RNA, 16 nt, Human
uaaagaaaguguauuu

SEQ ID NO: 3146009 - RNA, 15 nt, Human
uaaagaaaguguauu

SEQ ID NO: 3146010 - RNA, 14 nt, Human
uaaagaaaguguau

SEQ ID NO: 3146011 - RNA, 23 nt, Human
uaaagaaaguguauuuggaaaua

SEQ ID NO: 3146012 - RNA, 20 nt, Human
uaaagaaaguguauuuggaa

SEQ ID NO: 3146013 - RNA, 24 nt, Human
uaaagaaaguguauuuggaaauaa

SEQ ID NO: 3146014 - RNA, 21 nt, Human
guccuuuugacacugcucuaa

SEQ ID NO: 3146015 - RNA, 12 nt, Human
aaccacagcagu

SEQ ID NO: 3146016 - RNA, 23 nt, Human
gucucaguccaugaagauguaga

SEQ ID NO: 3146017 - RNA, 16 nt, Human
aacauauauaacaaug

SEQ ID NO: 3146018 - RNA, 19 nt, Human
aacagauuauuaccuuaca

SEQ ID NO: 3146019 - RNA, 19 nt, Human
aacagucucaggaaaucaa

SEQ ID NO: 3146020 - RNA, 17 nt, Human
aacagucucaggaaauc

SEQ ID NO: 3146021 - RNA, 23 nt, Human
guccaugaagauguagaggagaa

SEQ ID NO: 3146022 - RNA, 20 nt, Human
aacuaucucauuuccaagca

SEQ ID NO: 3146023 - RNA, 13 nt, Human
aacuauauuguuu

SEQ ID NO: 3146024 - RNA, 14 nt, Human
gugagucaccacuu

SEQ ID NO: 3146025 - RNA, 20 nt, Human
aacugaaaucauacuucuua

SEQ ID NO: 3146026 - RNA, 13 nt, Human
aacugaaaucaua

SEQ ID NO: 3146027 - RNA, 11 nt, Human
aacuaacaugu

SEQ ID NO: 3146028 - RNA, 15 nt, Human
aacuaacauguccug

SEQ ID NO: 3146029 - RNA, 14 nt, Human
aacuaacauguccu

SEQ ID NO: 3146030 - RNA, 17 nt, Human
aacuacuuuauaacuaa

SEQ ID NO: 3146031 - RNA, 15 nt, Human
aacuacuuuauaacu

SEQ ID NO: 3146032 - RNA, 13 nt, Human
aacuacuuuauaa

SEQ ID NO: 3146033 - RNA, 13 nt, Human
gucuucacaacag

SEQ ID NO: 3146034 - RNA, 12 nt, Human
gucuucagccua

SEQ ID NO: 3146035 - RNA, 23 nt, Human
gucuucagccuagccgaccucag

SEQ ID NO: 3146036 - RNA, 13 nt, Human
gucuucagccuag

SEQ ID NO: 3146037 - RNA, 15 nt, Human
gucuucagccuagcc

SEQ ID NO: 3146038 - RNA, 15 nt, Human
guggcagaguuacag

SEQ ID NO: 3146039 - RNA, 13 nt, Human
aagaauauuuuaa

SEQ ID NO: 3146040 - RNA, 13 nt, Human
aagacccaaaagg

SEQ ID NO: 3146041 - RNA, 15 nt, Human
guggacaccaggagu

SEQ ID NO: 3146042 - RNA, 21 nt, Human
guggacaccaggagucccugg

SEQ ID NO: 3146043 - RNA, 22 nt, Human
guggacaccaggagucccuggu

SEQ ID NO: 3146044 - RNA, 22 nt, Human
aagaagcaccaaucaugaauua

SEQ ID NO: 3146045 - RNA, 13 nt, Human
aagaaaauaucac

SEQ ID NO: 3146046 - RNA, 18 nt, Human
aagaaaguguauuuggaa

SEQ ID NO: 3146047 - RNA, 15 nt, Human
aagaaaguguauuug

SEQ ID NO: 3146048 - RNA, 12 nt, Human
aagaaaguguau

SEQ ID NO: 3146049 - RNA, 18 nt, Human
gugcacgcacacugucug

SEQ ID NO: 3146050 - RNA, 14 nt, Human
guggguagacacac

SEQ ID NO: 3146051 - RNA, 18 nt, Human
aagagcuguucacagcca

SEQ ID NO: 3146052 - RNA, 13 nt, Human
aagacuauucaaa

SEQ ID NO: 3146053 - RNA, 14 nt, Human
aagacuauucaaac

SEQ ID NO: 3146054 - RNA, 14 nt, Human
aagacuccaaagaa

SEQ ID NO: 3146055 - RNA, 16 nt, Human
aagacuccaaagaaau

SEQ ID NO: 3146056 - RNA, 17 nt, Human
aagacuccaaagaaaug

SEQ ID NO: 3146057 - RNA, 17 nt, Human
aagacugcauuauauuu

SEQ ID NO: 3146058 - RNA, 14 nt, Human
guguguuauuuaaa

SEQ ID NO: 3146059 - RNA, 16 nt, Human
aagcaaguauuagaau

SEQ ID NO: 3146060 - RNA, 19 nt, Human
aagcaaaauuuuuucucua

SEQ ID NO: 3146061 - RNA, 19 nt, Human
aagauguagaggagaaacu

SEQ ID NO: 3146062 - RNA, 13 nt, Human
aagcaaaauguga

SEQ ID NO: 3146063 - RNA, 22 nt, Human
aagauguagaggagaaacugga

SEQ ID NO: 3146064 - RNA, 18 nt, Human
uauaacaaugcuguauuu

SEQ ID NO: 3146065 - RNA, 14 nt, Human
uauaauuuugugaa

SEQ ID NO: 3146066 - RNA, 12 nt, Human
uauaggaauuga

SEQ ID NO: 3146067 - RNA, 13 nt, Human
uauaggaauugac

SEQ ID NO: 3146068 - RNA, 14 nt, Human
uauaggaauugacc

SEQ ID NO: 3146069 - RNA, 21 nt, Human
uauaggugcuacaaaaacaca

SEQ ID NO: 3146070 - RNA, 20 nt, Human
uauaggugcuacaaaaacac

SEQ ID NO: 3146071 - RNA, 23 nt, Human
uauaggugcuacaaaaacacagc

SEQ ID NO: 3146072 - RNA, 16 nt, Human
uaguuuuauaugcuuc

SEQ ID NO: 3146073 - RNA, 15 nt, Human
uaguuuuauaugcuu

SEQ ID NO: 3146074 - RNA, 19 nt, Human
uaguuacuguguaauuagu

SEQ ID NO: 3146075 - RNA, 18 nt, Human
uaguuacuguguaauuag

SEQ ID NO: 3146076 - RNA, 17 nt, Human
uaguuacuguguaauua

SEQ ID NO: 3146077 - RNA, 22 nt, Human
uagugagcagucaggaaagaga

SEQ ID NO: 3146078 - RNA, 22 nt, Human
acacaucagcuugcccuguuaa

SEQ ID NO: 3146079 - RNA, 22 nt, Human
uauaaaauaauuuuuauauuug

SEQ ID NO: 3146080 - RNA, 21 nt, Human
uauaaaauaauuuuuauauuu

SEQ ID NO: 3146081 - RNA, 19 nt, Human
acaccaggagucccuggua

SEQ ID NO: 3146082 - RNA, 17 nt, Human
acaccaggagucccugg

SEQ ID NO: 3146083 - RNA, 17 nt, Human
uauggcuauaggugcua

SEQ ID NO: 3146084 - RNA, 16 nt, Human
uauggcuauaggugcu

SEQ ID NO: 3146085 - RNA, 17 nt, Human
acagcagcucaggcaca

SEQ ID NO: 3146086 - RNA, 15 nt, Human
acagcagcucaggca

SEQ ID NO: 3146087 - RNA, 16 nt, Human
acagcagcucaggcac

SEQ ID NO: 3146088 - RNA, 14 nt, Human
acagcagcucaggc

SEQ ID NO: 3146089 - RNA, 15 nt, Human
uauauuuacaaaugg

SEQ ID NO: 3146090 - RNA, 14 nt, Human
uauauuuacaaaug

SEQ ID NO: 3146091 - RNA, 12 nt, Human
uauuaaaacuca

SEQ ID NO: 3146092 - RNA, 23 nt, Human
uauucauagcagcuuauucacaa

SEQ ID NO: 3146093 - RNA, 15 nt, Human
uauuagaauaccaca

SEQ ID NO: 3146094 - RNA, 15 nt, Human
uauuaccccuuuucg

SEQ ID NO: 3146095 - RNA, 21 nt, Human
acaguauggcagcuuuccuca

SEQ ID NO: 3146096 - RNA, 13 nt, Human
acagucucaggaa

SEQ ID NO: 3146097 - RNA, 14 nt, Human
acagucucaggaaa

SEQ ID NO: 3146098 - RNA, 15 nt, Human
acagucucaggaaau

SEQ ID NO: 3146099 - RNA, 16 nt, Human
acagucucaggaaauc

SEQ ID NO: 3146100 - RNA, 17 nt, Human
acagucucaggaaauca

SEQ ID NO: 3146101 - RNA, 20 nt, Human
acagugaaagaaaauaacaa

SEQ ID NO: 3146102 - RNA, 21 nt, Human
acaguuaccucugccucagaa

SEQ ID NO: 3146103 - RNA, 18 nt, Human
acagugagacucugucuc

SEQ ID NO: 3146104 - RNA, 14 nt, Human
acagugagacucug

SEQ ID NO: 3146105 - RNA, 20 nt, Human
uauugguuuaaagaaagugu

SEQ ID NO: 3146106 - RNA, 23 nt, Human
acaguucggugagcuacaaaugc

SEQ ID NO: 3146107 - RNA, 22 nt, Human
acaguucggugagcuacaaaug

SEQ ID NO: 3146108 - RNA, 19 nt, Human
acaguucggugagcuacaa

SEQ ID NO: 3146109 - RNA, 22 nt, Human
acaguucugugguuucauguua

SEQ ID NO: 3146110 - RNA, 12 nt, Human
acaguucugugg

SEQ ID NO: 3146111 - RNA, 17 nt, Human
uauugucuagugaaacu

SEQ ID NO: 3146112 - RNA, 16 nt, Human
uauuuauuuuaauaau

SEQ ID NO: 3146113 - RNA, 14 nt, Human
uauuuauuuuaaua

SEQ ID NO: 3146114 - RNA, 18 nt, Human
uauuuauuuuaauaaugu

SEQ ID NO: 3146115 - RNA, 19 nt, Human
aauugacccacaagaaaug

SEQ ID NO: 3146116 - RNA, 16 nt, Human
aauugacccacaagaa

SEQ ID NO: 3146117 - RNA, 13 nt, Human
aauugacccacaa

SEQ ID NO: 3146118 - RNA, 21 nt, Human
aauucuugccaaauauaaaua

SEQ ID NO: 3146119 - RNA, 20 nt, Human
aauuucucccagucauuuaa

SEQ ID NO: 3146120 - RNA, 19 nt, Human
aauuucucccagucauuua

SEQ ID NO: 3146121 - RNA, 17 nt, Human
aauuuaccuaagauuac

SEQ ID NO: 3146122 - RNA, 16 nt, Human
aauuuaccuaagauua

SEQ ID NO: 3146123 - RNA, 14 nt, Human
aauuuaccuaagau

SEQ ID NO: 3146124 - RNA, 13 nt, Human
aauuuaccuaaga

SEQ ID NO: 3146125 - RNA, 21 nt, Human
aauuuaccuaagauuacaaau

SEQ ID NO: 3146126 - RNA, 18 nt, Human
aauuuaccuaagauuaca

SEQ ID NO: 3146127 - RNA, 19 nt, Human
uacuucaaauccuugaaga

SEQ ID NO: 3146128 - RNA, 14 nt, Human
uacuucaaauccuu

SEQ ID NO: 3146129 - RNA, 23 nt, Human
aauugugugaaagguacuucaaa

SEQ ID NO: 3146130 - RNA, 19 nt, Human
uagaugcaguucugaagaa

SEQ ID NO: 3146131 - RNA, 17 nt, Human
uagaugcaguucugaag

SEQ ID NO: 3146132 - RNA, 16 nt, Human
uagaugcaguucugaa

SEQ ID NO: 3146133 - RNA, 18 nt, Human
uagcaugucgucaaagcu

SEQ ID NO: 3146134 - RNA, 21 nt, Human
uagcaugucgucaaagcugaa

SEQ ID NO: 3146135 - RNA, 18 nt, Human
acaagcacuaaacaaaga

SEQ ID NO: 3146136 - RNA, 22 nt, Human
acaagaaaugaaagcagggacu

SEQ ID NO: 3146137 - RNA, 21 nt, Human
uacuucaaauccuugaagauu

SEQ ID NO: 3146138 - RNA, 18 nt, Human
uagaacucccuuucaaca

SEQ ID NO: 3146139 - RNA, 16 nt, Human
acaaaaacacagcaag

SEQ ID NO: 3146140 - RNA, 19 nt, Human
aauuuuuucucuaggaaau

SEQ ID NO: 3146141 - RNA, 20 nt, Human
aauuuuuccaacuacuaaua

SEQ ID NO: 3146142 - RNA, 14 nt, Human
aauuuuuccaacua

SEQ ID NO: 3146143 - RNA, 19 nt, Human
aauuuuuauauuugaaaua

SEQ ID NO: 3146144 - RNA, 18 nt, Human
aauguugacaugggacau

SEQ ID NO: 3146145 - RNA, 22 nt, Human
uaccccagacuagauguaguau

SEQ ID NO: 3146146 - RNA, 21 nt, Human
uaccccagacuagauguagua

SEQ ID NO: 3146147 - RNA, 20 nt, Human
uaccccauggagcugggcua

SEQ ID NO: 3146148 - RNA, 16 nt, Human
aaugguuuaaaugguc

SEQ ID NO: 3146149 - RNA, 21 nt, Human
uaauucacagugcucuuuucu

SEQ ID NO: 3146150 - RNA, 14 nt, Human
uaauucacagugcu

SEQ ID NO: 3146151 - RNA, 22 nt, Human
uaauucacagugcucuuuucuc

SEQ ID NO: 3146152 - RNA, 16 nt, Human
uacaaaaacacagcaa

SEQ ID NO: 3146153 - RNA, 17 nt, Human
uacaaaaacacagcaag

SEQ ID NO: 3146154 - RNA, 18 nt, Human
uacaaaaacacagcaagg

SEQ ID NO: 3146155 - RNA, 22 nt, Human
uaauuuaccuaagauuacaaau

SEQ ID NO: 3146156 - RNA, 21 nt, Human
uaauuuaccuaagauuacaaa

SEQ ID NO: 3146157 - RNA, 22 nt, Human
uaauagaauaaaggcaguuuuc

SEQ ID NO: 3146158 - RNA, 20 nt, Human
uaauagaauaaaggcaguuu

SEQ ID NO: 3146159 - RNA, 16 nt, Human
uaauagaauaaaggca

SEQ ID NO: 3146160 - RNA, 14 nt, Human
uaauagaauaaagg

SEQ ID NO: 3146161 - RNA, 15 nt, Human
aaugaaugaaugaau

SEQ ID NO: 3146162 - RNA, 20 nt, Human
aaugaauacuuuauaaagga

SEQ ID NO: 3146163 - RNA, 22 nt, Human
gcuaauucaaggaauuucuuaa

SEQ ID NO: 3146164 - RNA, 17 nt, Human
gcuaauucaaggaauuu

SEQ ID NO: 3146165 - RNA, 16 nt, Human
gcuagaacucccuuuc

SEQ ID NO: 3146166 - RNA, 15 nt, Human
gcuagaacucccuuu

SEQ ID NO: 3146167 - RNA, 14 nt, Human
gcuagaacucccuu

SEQ ID NO: 3146168 - RNA, 13 nt, Human
gcuagaacucccu

SEQ ID NO: 3146169 - RNA, 12 nt, Human
gcuagaacuccc

SEQ ID NO: 3146170 - RNA, 21 nt, Human
gcuccccucggagaagagcug

SEQ ID NO: 3146171 - RNA, 18 nt, Human
gcuccccucggagaagag

SEQ ID NO: 3146172 - RNA, 18 nt, Human
gcuccacuuggucuguga

SEQ ID NO: 3146173 - RNA, 15 nt, Human
gcuccacuuggucug

SEQ ID NO: 3146174 - RNA, 19 nt, Human
gcuccaccuugcagcucuc

SEQ ID NO: 3146175 - RNA, 12 nt, Human
gcucgguggacc

SEQ ID NO: 3146176 - RNA, 14 nt, Human
gcucgguggaccca

SEQ ID NO: 3146177 - RNA, 17 nt, Human
gcucgguggacccaggg

SEQ ID NO: 3146178 - RNA, 18 nt, Human
gcucgguggacccaggga

SEQ ID NO: 3146179 - RNA, 15 nt, Human
gcucuaacagcccuc

SEQ ID NO: 3146180 - RNA, 15 nt, Human
gccucuuagaugcag

SEQ ID NO: 3146181 - RNA, 21 nt, Human
gccuucggccuccauccugag

SEQ ID NO: 3146182 - RNA, 19 nt, Human
gccuucggccuccauccug

SEQ ID NO: 3146183 - RNA, 20 nt, Human
gccuucggccuccauccuga

SEQ ID NO: 3146184 - RNA, 19 nt, Human
gccuagccgaccucagccu

SEQ ID NO: 3146185 - RNA, 20 nt, Human
gccuagccgaccucagccuu

SEQ ID NO: 3146186 - RNA, 15 nt, Human
gccuagccgaccuca

SEQ ID NO: 3146187 - RNA, 16 nt, Human
gccuagccgaccucag

SEQ ID NO: 3146188 - RNA, 17 nt, Human
gccuagccgaccucagc

SEQ ID NO: 3146189 - RNA, 18 nt, Human
gccuagccgaccucagcc

SEQ ID NO: 3146190 - RNA, 19 nt, Human
gcucuggggugggcaguuu

SEQ ID NO: 3146191 - RNA, 21 nt, Human
gcucuggggugggcaguuuuu

SEQ ID NO: 3146192 - RNA, 13 nt, Human
ggagaaacuggaa

SEQ ID NO: 3146193 - RNA, 22 nt, Human
ggacucauuuuaaaaaauggaa

SEQ ID NO: 3146194 - RNA, 10 nt, Human
ggcaguuuuu

SEQ ID NO: 3146195 - RNA, 20 nt, Human
ggcagacagcagcucaggca

SEQ ID NO: 3146196 - RNA, 13 nt, Human
ggcagacagcagc

SEQ ID NO: 3146197 - RNA, 14 nt, Human
ggcagacagcagcu

SEQ ID NO: 3146198 - RNA, 15 nt, Human
ggcagacagcagcuc

SEQ ID NO: 3146199 - RNA, 16 nt, Human
ggcagacagcagcuca

SEQ ID NO: 3146200 - RNA, 17 nt, Human
ggcagacagcagcucag

SEQ ID NO: 3146201 - RNA, 18 nt, Human
ggcagacagcagcucagg

SEQ ID NO: 3146202 - RNA, 19 nt, Human
ggcagacagcagcucaggc

SEQ ID NO: 3146203 - RNA, 21 nt, Human
ggcacaguuuucugagaaaga

SEQ ID NO: 3146204 - RNA, 13 nt, Human
ggccuccauccug

SEQ ID NO: 3146205 - RNA, 15 nt, Human
ggccuccauccugag

SEQ ID NO: 3146206 - RNA, 14 nt, Human
ggccuccauccuga

SEQ ID NO: 3146207 - RNA, 13 nt, Human
ggcucagccuggu

SEQ ID NO: 3146208 - RNA, 20 nt, Human
ggcucagccuggugggccuc

SEQ ID NO: 3146209 - RNA, 14 nt, Human
ggcuccacuugguc

SEQ ID NO: 3146210 - RNA, 21 nt, Human
gggacagucaccucauggaau

SEQ ID NO: 3146211 - RNA, 20 nt, Human
gggacagucaccucauggaa

SEQ ID NO: 3146212 - RNA, 22 nt, Human
gggacagucaccucauggaauu

SEQ ID NO: 3146213 - RNA, 20 nt, Human
gggaacccaaguccaagcau

SEQ ID NO: 3146214 - RNA, 14 nt, Human
aaaaauaacaauga

SEQ ID NO: 3146215 - RNA, 24 nt, Human
aaaaauaaauauaucuaccccaga

SEQ ID NO: 3146216 - RNA, 18 nt, Human
aaaaauaaauauaucuac

SEQ ID NO: 3146217 - RNA, 22 nt, Human
gggagggguaaaauuccuuagc

SEQ ID NO: 3146218 - RNA, 14 nt, Human
aaaaccacagcagu

SEQ ID NO: 3146219 - RNA, 17 nt, Human
aaaaaugguuuaaaugg

SEQ ID NO: 3146220 - RNA, 15 nt, Human
aaaacuucagacaua

SEQ ID NO: 3146221 - RNA, 18 nt, Human
gguccuuuugacacugcu

SEQ ID NO: 3146222 - RNA, 16 nt, Human
gguccuuuugacacug

SEQ ID NO: 3146223 - RNA, 17 nt, Human
aaagcacugacuucuaa

SEQ ID NO: 3146224 - RNA, 21 nt, Human
aaagcacugacuucuaaguaa

SEQ ID NO: 3146225 - RNA, 14 nt, Human
aaagguacuucaaa

SEQ ID NO: 3146226 - RNA, 14 nt, Human
ggguggggcagugc

SEQ ID NO: 3146227 - RNA, 23 nt, Human
aaacuucagcgguuuauauaagc

SEQ ID NO: 3146228 - RNA, 19 nt, Human
aaacuucagacauagaauu

SEQ ID NO: 3146229 - RNA, 13 nt, Human
aaagacagugaaa

SEQ ID NO: 3146230 - RNA, 17 nt, Human
aaagacuauucaaacag

SEQ ID NO: 3146231 - RNA, 18 nt, Human
aaagacuauucaaacagu

SEQ ID NO: 3146232 - RNA, 19 nt, Human
aaagacuauucaaacaguc

SEQ ID NO: 3146233 - RNA, 21 nt, Human
aaagacuauucaaacagucuc

SEQ ID NO: 3146234 - RNA, 15 nt, Human
aaagacuccaaagaa

SEQ ID NO: 3146235 - RNA, 21 nt, Human
aaagacuccaaagaaauguaa

SEQ ID NO: 3146236 - RNA, 14 nt, Human
aaagacuccaaaga

SEQ ID NO: 3146237 - RNA, 15 nt, Human
aaagaggcagcuuga

SEQ ID NO: 3146238 - RNA, 15 nt, Human
aaagaggaaugaagu

SEQ ID NO: 3146239 - RNA, 19 nt, Human
ggguccuuuugacacugcu

SEQ ID NO: 3146240 - RNA, 22 nt, Human
ggguccuuuugacacugcucua

SEQ ID NO: 3146241 - RNA, 12 nt, Human
aaaccacagcag

SEQ ID NO: 3146242 - RNA, 15 nt, Human
aaacucguuaauuug

SEQ ID NO: 3146243 - RNA, 15 nt, Human
aaacagucucaggaa

SEQ ID NO: 3146244 - RNA, 14 nt, Human
aaacaguagugaua

SEQ ID NO: 3146245 - RNA, 19 nt, Human
ggggaauugaggacacuga

SEQ ID NO: 3146246 - RNA, 12 nt, Human
aaacacagcaag

SEQ ID NO: 3146247 - RNA, 14 nt, Human
aaacacagcaaggg

SEQ ID NO: 3146248 - RNA, 11 nt, Human
aaacacagcaa

SEQ ID NO: 3146249 - RNA, 20 nt, Human
guagacgugcacgcacacug

SEQ ID NO: 3146250 - RNA, 23 nt, Human
guagacgugcacgcacacugucu

SEQ ID NO: 3146251 - RNA, 23 nt, Human
guacuguguacagaauucugcua

SEQ ID NO: 3146252 - RNA, 22 nt, Human
guacuucaaauccuugaagauu

SEQ ID NO: 3146253 - RNA, 21 nt, Human
guacuucaaauccuugaagau

SEQ ID NO: 3146254 - RNA, 12 nt, Human
aaaucagaaguc

SEQ ID NO: 3146255 - RNA, 21 nt, Human
aaaucagaagucaucuugcua

SEQ ID NO: 3146256 - RNA, 18 nt, Human
aaaucagaagucaucuug

SEQ ID NO: 3146257 - RNA, 17 nt, Human
aaauauuauguuaaaac

SEQ ID NO: 3146258 - RNA, 12 nt, Human
aaaucauuucug

SEQ ID NO: 3146259 - RNA, 19 nt, Human
aaaucauuucugcaucagc

SEQ ID NO: 3146260 - RNA, 21 nt, Human
aaaucauuucugcaucagcug

SEQ ID NO: 3146261 - RNA, 22 nt, Human
aaaucauuucugcaucagcugc

SEQ ID NO: 3146262 - RNA, 23 nt, Human
aaaucauuucugcaucagcugcu

SEQ ID NO: 3146263 - RNA, 11 nt, Human
aaaucauuucu

SEQ ID NO: 3146264 - RNA, 23 nt, Human
guaccaguuaauuuuuccaacua

SEQ ID NO: 3146265 - RNA, 22 nt, Human
guaccaguuaauuuuuccaacu

SEQ ID NO: 3146266 - RNA, 20 nt, Human
guaccaguuaauuuuuccaa

SEQ ID NO: 3146267 - RNA, 16 nt, Human
guaccaguuaauuuuu

SEQ ID NO: 3146268 - RNA, 11 nt, Human
guaccaguuaa

SEQ ID NO: 3146269 - RNA, 10 nt, Human
guaccaguua

SEQ ID NO: 3146270 - RNA, 15 nt, Human
aaauccauacauuug

SEQ ID NO: 3146271 - RNA, 20 nt, Human
guaauaggcguaacuaauuu

SEQ ID NO: 3146272 - RNA, 23 nt, Human
aaauaauuuuuauauuugaaaua

SEQ ID NO: 3146273 - RNA, 22 nt, Human
aaauaauuuuuauauuugaaau

SEQ ID NO: 3146274 - RNA, 15 nt, Human
aaauacacacucaaa

SEQ ID NO: 3146275 - RNA, 21 nt, Human
aaauaauuuuuauauuugaaa

SEQ ID NO: 3146276 - RNA, 19 nt, Human
aaauacacacucaaaucaa

SEQ ID NO: 3146277 - RNA, 17 nt, Human
aaaguauguuagugcaa

SEQ ID NO: 3146278 - RNA, 23 nt, Human
aaaguucugcagauaaacaguag

SEQ ID NO: 3146279 - RNA, 18 nt, Human
aaaguauguuagugcaaa

SEQ ID NO: 3146280 - RNA, 20 nt, Human
aaagguauuuuaaucaccaa

SEQ ID NO: 3146281 - RNA, 16 nt, Human
aaaguuggugacagau

SEQ ID NO: 3146282 - RNA, 15 nt, Human
gacuauucaaacagu

SEQ ID NO: 3146283 - RNA, 16 nt, Human
gacuauucaaacaguc

SEQ ID NO: 3146284 - RNA, 20 nt, Human
gacagaaagcagaacaguga

SEQ ID NO: 3146285 - RNA, 21 nt, Human
gacagcccuucuuuccacaga

SEQ ID NO: 3146286 - RNA, 14 nt, Human
gacagaaagcagaa

SEQ ID NO: 3146287 - RNA, 15 nt, Human
gagcgacagugagac

SEQ ID NO: 3146288 - RNA, 13 nt, Human
gagcgacagugag

SEQ ID NO: 3146289 - RNA, 18 nt, Human
gccaacuaugauuauuaa

SEQ ID NO: 3146290 - RNA, 16 nt, Human
gcauuguaaaugugcu

SEQ ID NO: 3146291 - RNA, 22 nt, Human
gcaguugaaaagacuccaaaga

SEQ ID NO: 3146292 - RNA, 15 nt, Human
gcagcuuauucacaa

SEQ ID NO: 3146293 - RNA, 21 nt, Human
gaugcugucuucguacuggga

SEQ ID NO: 3146294 - RNA, 17 nt, Human
gcacucccaccugacac

SEQ ID NO: 3146295 - RNA, 22 nt, Human
gcacucccaccugacacaccag

SEQ ID NO: 3146296 - RNA, 18 nt, Human
gcacucccaccugacaca

SEQ ID NO: 3146297 - RNA, 18 nt, Human
gcaauagucaaauugugu

SEQ ID NO: 3146298 - RNA, 16 nt, Human
gcaauaaaauggguuu

SEQ ID NO: 3146299 - RNA, 22 nt, Human
cugugcugcccgucuucagccu

SEQ ID NO: 3146300 - RNA, 13 nt, Human
cuguuauaaucuu

SEQ ID NO: 3146301 - RNA, 19 nt, Human
cuguaacuacuuuauaacu

SEQ ID NO: 3146302 - RNA, 17 nt, Human
cuguaacuacuuuauaa

SEQ ID NO: 3146303 - RNA, 16 nt, Human
cuguaacuacuuuaua

SEQ ID NO: 3146304 - RNA, 17 nt, Human
cugucggagcccugucu

SEQ ID NO: 3146305 - RNA, 21 nt, Human
cugucauccucaaagaaagug

SEQ ID NO: 3146306 - RNA, 20 nt, Human
cugucauccucaaagaaagu

SEQ ID NO: 3146307 - RNA, 23 nt, Human
cugucauccucaaagaaagugua

SEQ ID NO: 3146308 - RNA, 22 nt, Human
cugucauccucaaagaaagugu

SEQ ID NO: 3146309 - RNA, 14 nt, Human
cuuagcuuagaccu

SEQ ID NO: 3146310 - RNA, 15 nt, Human
cuuagcuuagaccuc

SEQ ID NO: 3146311 - RNA, 16 nt, Human
cuuagcuuagaccuca

SEQ ID NO: 3146312 - RNA, 17 nt, Human
cuuagcuuagaccucag

SEQ ID NO: 3146313 - RNA, 18 nt, Human
cuuagcuuagaccucagc

SEQ ID NO: 3146314 - RNA, 19 nt, Human
cuuagcuuagaccucagcc

SEQ ID NO: 3146315 - RNA, 20 nt, Human
cuuagcuuagaccucagccu

SEQ ID NO: 3146316 - RNA, 23 nt, Human
cuuagcuuagaccucagccugug

SEQ ID NO: 3146317 - RNA, 21 nt, Human
cuuagcuuagaccucagccug

SEQ ID NO: 3146318 - RNA, 22 nt, Human
cuuagcuuagaccucagccugu

SEQ ID NO: 3146319 - RNA, 21 nt, Human
cuuaaaaaugguuuaaauggu

SEQ ID NO: 3146320 - RNA, 21 nt, Human
cugccuccccuccucugcuug

SEQ ID NO: 3146321 - RNA, 22 nt, Human
cugcuagcacuuggagccaagg

SEQ ID NO: 3146322 - RNA, 20 nt, Human
cugcuuauccguuagccgug

SEQ ID NO: 3146323 - RNA, 18 nt, Human
cuggauaguccgucucug

SEQ ID NO: 3146324 - RNA, 19 nt, Human
cuggauaguccgucucugc

SEQ ID NO: 3146325 - RNA, 20 nt, Human
cuucucacauuuauauuuuu

SEQ ID NO: 3146326 - RNA, 13 nt, Human
cuucucacauuua

SEQ ID NO: 3146327 - RNA, 21 nt, Human
cuucuaaguaaaaccacagca

SEQ ID NO: 3146328 - RNA, 13 nt, Human
cuucuaaguaaaa

SEQ ID NO: 3146329 - RNA, 17 nt, Human
cuucuaaguaaaaccac

SEQ ID NO: 3146330 - RNA, 13 nt, Human
cuugcuaccagua

SEQ ID NO: 3146331 - RNA, 18 nt, Human
cuugcuaccaguauuuag

SEQ ID NO: 3146332 - RNA, 17 nt, Human
cuugcuaccaguauuua

SEQ ID NO: 3146333 - RNA, 20 nt, Human
cuugcuaccaguauuuagaa

SEQ ID NO: 3146334 - RNA, 16 nt, Human
cuuggucugugagaug

SEQ ID NO: 3146335 - RNA, 19 nt, Human
cuuggucugugagaugcua

SEQ ID NO: 3146336 - RNA, 15 nt, Human
cuuggucuuauuuau

SEQ ID NO: 3146337 - RNA, 15 nt, Human
cuuggguaggcggga

SEQ ID NO: 3146338 - RNA, 16 nt, Human
gaaaagacuccaaaga

SEQ ID NO: 3146339 - RNA, 17 nt, Human
gaaaagacuccaaagaa

SEQ ID NO: 3146340 - RNA, 14 nt, Human
gaaaagacuccaaa

SEQ ID NO: 3146341 - RNA, 21 nt, Human
gaacaaguuguuucauugacu

SEQ ID NO: 3146342 - RNA, 19 nt, Human
gaacaaguuguuucauuga

SEQ ID NO: 3146343 - RNA, 18 nt, Human
gaaagaaaaucaggcugg

SEQ ID NO: 3146344 - RNA, 12 nt, Human
gaaagggauuuu

SEQ ID NO: 3146345 - RNA, 20 nt, Human
gaaagggauuuucagcccuc

SEQ ID NO: 3146346 - RNA, 17 nt, Human
gaacccgggaggcagag

SEQ ID NO: 3146347 - RNA, 16 nt, Human
gaacccaaguccaagc

SEQ ID NO: 3146348 - RNA, 17 nt, Human
gaacccaaguccaagca

SEQ ID NO: 3146349 - RNA, 13 nt, Human
cauagcucugggg

SEQ ID NO: 3146350 - RNA, 12 nt, Human
cauagcucuggg

SEQ ID NO: 3146351 - RNA, 20 nt, Human
cauagcucuggggugggcag

SEQ ID NO: 3146352 - RNA, 12 nt, Human
cauuaucucaaa

SEQ ID NO: 3146353 - RNA, 13 nt, Human
cauuaucucaaaa

SEQ ID NO: 3146354 - RNA, 22 nt, Human
caugcugccaauauccuaauaa

SEQ ID NO: 3146355 - RNA, 18 nt, Human
ccacagaagcuccaggua

SEQ ID NO: 3146356 - RNA, 18 nt, Human
ccaccagucugacuguuu

SEQ ID NO: 3146357 - RNA, 16 nt, Human
ccacagaagcuccagg

SEQ ID NO: 3146358 - RNA, 18 nt, Human
cagggaggacgcucucug

SEQ ID NO: 3146359 - RNA, 17 nt, Human
cagggaggacgcucucu

SEQ ID NO: 3146360 - RNA, 15 nt, Human
caggcgcuaauucaa

SEQ ID NO: 3146361 - RNA, 15 nt, Human
cagucucaggaaauc

SEQ ID NO: 3146362 - RNA, 20 nt, Human
cagcaguugaaaagacucca

SEQ ID NO: 3146363 - RNA, 21 nt, Human
cagcaguugaaaagacuccaa

SEQ ID NO: 3146364 - RNA, 17 nt, Human
cagcaguugaaaagacu

SEQ ID NO: 3146365 - RNA, 14 nt, Human
cagccagcaguuca

SEQ ID NO: 3146366 - RNA, 19 nt, Human
cagccagcagccagcucuc

SEQ ID NO: 3146367 - RNA, 21 nt, Human
cagccagcagccagcucucag

SEQ ID NO: 3146368 - RNA, 15 nt, Human
cagccagcagccagc

SEQ ID NO: 3146369 - RNA, 17 nt, Human
cagccagcagccagcuc

SEQ ID NO: 3146370 - RNA, 18 nt, Human
cagccagcagccagcucu

SEQ ID NO: 3146371 - RNA, 15 nt, Human
cagccagcaguucag

SEQ ID NO: 3146372 - RNA, 21 nt, Human
cagccagcaguucagagcugc

SEQ ID NO: 3146373 - RNA, 13 nt, Human
cagagcugcccuc

SEQ ID NO: 3146374 - RNA, 15 nt, Human
cagagcugcccucuc

SEQ ID NO: 3146375 - RNA, 22 nt, Human
caggaaaucaaauaugcaaagc

SEQ ID NO: 3146376 - RNA, 23 nt, Human
caggaaaucaaauaugcaaagca

SEQ ID NO: 3146377 - RNA, 20 nt, Human
caggaaagagaacuuccaga

SEQ ID NO: 3146378 - RNA, 17 nt, Human
cagcuccccucggagaa

SEQ ID NO: 3146379 - RNA, 18 nt, Human
cagcuccccucggagaag

SEQ ID NO: 3146380 - RNA, 16 nt, Human
cagcuccccucggaga

SEQ ID NO: 3146381 - RNA, 22 nt, Human
cagcugcaagguacucugguga

SEQ ID NO: 3146382 - RNA, 20 nt, Human
cagcugcaagguacucuggu

SEQ ID NO: 3146383 - RNA, 19 nt, Human
cagcugcaagguacucugg

SEQ ID NO: 3146384 - RNA, 20 nt, Human
cagcugccuccccuccucug

SEQ ID NO: 3146385 - RNA, 23 nt, Human
cagcugccuccccuccucugcuu

SEQ ID NO: 3146386 - RNA, 24 nt, Human
cagcugccuccccuccucugcuug

SEQ ID NO: 3146387 - RNA, 21 nt, Human
cagcugccuccccuccucugc

SEQ ID NO: 3146388 - RNA, 22 nt, Human
cagcugccuccccuccucugcu

SEQ ID NO: 3146389 - RNA, 19 nt, Human
cagcccuucuuuccacaga

SEQ ID NO: 3146390 - RNA, 15 nt, Human
cagcccuucuuucca

SEQ ID NO: 3146391 - RNA, 23 nt, Human
cagcccuuaugcgguuaauuuug

SEQ ID NO: 3146392 - RNA, 19 nt, Human
cagccugagcgacagugag

SEQ ID NO: 3146393 - RNA, 18 nt, Human
cagccugagcgacaguga

SEQ ID NO: 3146394 - RNA, 15 nt, Human
auuuuuauauuugaa

SEQ ID NO: 3146395 - RNA, 24 nt, Human
caaacccaguguuuuaggagcaug

SEQ ID NO: 3146396 - RNA, 16 nt, Human
caaacagucucaggaa

SEQ ID NO: 3146397 - RNA, 17 nt, Human
caaacagucucaggaaa

SEQ ID NO: 3146398 - RNA, 15 nt, Human
caaacagucucagga

SEQ ID NO: 3146399 - RNA, 21 nt, Human
caaaaggauaaugaauacuuu

SEQ ID NO: 3146400 - RNA, 21 nt, Human
auuuuauaucaauuuaaaaaa

SEQ ID NO: 3146401 - RNA, 22 nt, Human
auuuugaagugcuguuuauuaa

SEQ ID NO: 3146402 - RNA, 19 nt, Human
auuuugaagugcuguuuau

SEQ ID NO: 3146403 - RNA, 13 nt, Human
auuuugaagugcu

SEQ ID NO: 3146404 - RNA, 21 nt, Human
caaaucuuaacuugaaggagu

SEQ ID NO: 3146405 - RNA, 19 nt, Human
caagacccaaaaggcagaa

SEQ ID NO: 3146406 - RNA, 15 nt, Human
caacuacuaauagaa

SEQ ID NO: 3146407 - RNA, 13 nt, Human
caacuacuaauag

SEQ ID NO: 3146408 - RNA, 21 nt, Human
caacuacuaauagaauaaagg

SEQ ID NO: 3146409 - RNA, 20 nt, Human
auuucuaugaaauauuaugu

SEQ ID NO: 3146410 - RNA, 20 nt, Human
auuucauaccuaucaucuua

SEQ ID NO: 3146411 - RNA, 16 nt, Human
auuuaauaaaugugcc

SEQ ID NO: 3146412 - RNA, 16 nt, Human
auuguguguuauuuaa

SEQ ID NO: 3146413 - RNA, 18 nt, Human
auuguguguuauuuaaau

SEQ ID NO: 3146414 - RNA, 20 nt, Human
auuaugaauuacauuuguau

SEQ ID NO: 3146415 - RNA, 19 nt, Human
auuaugaauuacauuugua

SEQ ID NO: 3146416 - RNA, 23 nt, Human
auuaggcuguaacuacuuuauaa

SEQ ID NO: 3146417 - RNA, 22 nt, Human
auuaggcuguaacuacuuuaua

SEQ ID NO: 3146418 - RNA, 21 nt, Human
auuaggcuguaacuacuuuau

SEQ ID NO: 3146419 - RNA, 17 nt, Human
auuaggcuguaacuacu

SEQ ID NO: 3146420 - RNA, 15 nt, Human
auuaggcuguaacua

SEQ ID NO: 3146421 - RNA, 14 nt, Human
auuaggcuguaacu

SEQ ID NO: 3146422 - RNA, 24 nt, Human
auuccuuagcuuagaccucagccu

SEQ ID NO: 3146423 - RNA, 22 nt, Human
auuccuuagcuuagaccucagc

SEQ ID NO: 3146424 - RNA, 23 nt, Human
auuccuuagcuuagaccucagcc

SEQ ID NO: 3146425 - RNA, 20 nt, Human
auuccuuagcuuagaccuca

SEQ ID NO: 3146426 - RNA, 21 nt, Human
auuccuuagcuuagaccucag

SEQ ID NO: 3146427 - RNA, 15 nt, Human
cacuuaaaaaugguu

SEQ ID NO: 3146428 - RNA, 19 nt, Human
cacugggguccuggggccu

SEQ ID NO: 3146429 - RNA, 20 nt, Human
cacugggguccuggggccuc

SEQ ID NO: 3146430 - RNA, 15 nt, Human
cacuuaauguauguu

SEQ ID NO: 3146431 - RNA, 14 nt, Human
cacuuaauguaugu

SEQ ID NO: 3146432 - RNA, 12 nt, Human
cacuuaauguau

SEQ ID NO: 3146433 - RNA, 20 nt, Human
cagaaauaaaguuggugaca

SEQ ID NO: 3146434 - RNA, 17 nt, Human
cagaacagugauuacca

SEQ ID NO: 3146435 - RNA, 12 nt, Human
cagaacagugau

SEQ ID NO: 3146436 - RNA, 11 nt, Human
cagaacaguga

SEQ ID NO: 3146437 - RNA, 12 nt, Human
cagaacagccgc

SEQ ID NO: 3146438 - RNA, 17 nt, Human
cagaacagccgcuccug

SEQ ID NO: 3146439 - RNA, 20 nt, Human
cagaacagccgcuccugucu

SEQ ID NO: 3146440 - RNA, 12 nt, Human
cacuccagccug

SEQ ID NO: 3146441 - RNA, 13 nt, Human
cacuccagccuga

SEQ ID NO: 3146442 - RNA, 23 nt, Human
cacuccagccugagcgacaguga

SEQ ID NO: 3146443 - RNA, 23 nt, Human
caauaaaauccauacauuugugu

SEQ ID NO: 3146444 - RNA, 20 nt, Human
caauaaaauccauacauuug

SEQ ID NO: 3146445 - RNA, 16 nt, Human
caaguuguuucauuga

SEQ ID NO: 3146446 - RNA, 15 nt, Human
caauaaaauggguuu

SEQ ID NO: 3146447 - RNA, 13 nt, Human
ccucggagccuca

SEQ ID NO: 3146448 - RNA, 14 nt, Human
ccucggagccucau

SEQ ID NO: 3146449 - RNA, 16 nt, Human
ccucggagccucaucc

SEQ ID NO: 3146450 - RNA, 23 nt, Human
ccucggagccucauccgaggcag

SEQ ID NO: 3146451 - RNA, 17 nt, Human
ccugucucuacuaaaaa

SEQ ID NO: 3146452 - RNA, 20 nt, Human
ccuaauaaaaaggugaccau

SEQ ID NO: 3146453 - RNA, 16 nt, Human
ccuaauaaaaagguga

SEQ ID NO: 3146454 - RNA, 15 nt, Human
ccuaauaaaaaggug

SEQ ID NO: 3146455 - RNA, 14 nt, Human
ccuaauaaaaaggu

SEQ ID NO: 3146456 - RNA, 14 nt, Human
ccgucuucagccua

SEQ ID NO: 3146457 - RNA, 15 nt, Human
ccgucuucagccuag

SEQ ID NO: 3146458 - RNA, 16 nt, Human
ccucccuucucuucac

SEQ ID NO: 3146459 - RNA, 12 nt, Human
ccucggagaaga

SEQ ID NO: 3146460 - RNA, 14 nt, Human
ccucggagaagagc

SEQ ID NO: 3146461 - RNA, 13 nt, Human
cccaacuccagaa

SEQ ID NO: 3146462 - RNA, 13 nt, Human
ccaucccucccuc

SEQ ID NO: 3146463 - RNA, 14 nt, Human
ccaucccucccucc

SEQ ID NO: 3146464 - RNA, 15 nt, Human
ccaucccucccucca

SEQ ID NO: 3146465 - RNA, 20 nt, Human
cccauauuuguacaccaaua

SEQ ID NO: 3146466 - RNA, 24 nt, Human
cccagccagcaguucagagcugcc

SEQ ID NO: 3146467 - RNA, 17 nt, Human
cccagcacuaaagcagu

SEQ ID NO: 3146468 - RNA, 16 nt, Human
cccagcacuaaagcag

SEQ ID NO: 3146469 - RNA, 19 nt, Human
ccccauggagcugggcuaa

SEQ ID NO: 3146470 - RNA, 18 nt, Human
cccccuugccagacaugu

SEQ ID NO: 3146471 - RNA, 13 nt, Human
cccuccucugcuu

SEQ ID NO: 3146472 - RNA, 22 nt, Human
cccuccucugcuugccaucccu

SEQ ID NO: 3146473 - RNA, 13 nt, Human
ccccugcacucca

SEQ ID NO: 3146474 - RNA, 17 nt, Human
cuacuaauagaauaaag

SEQ ID NO: 3146475 - RNA, 18 nt, Human
cuacuaauagaauaaagg

SEQ ID NO: 3146476 - RNA, 23 nt, Human
cucagaaaacaaggaugaauuaa

SEQ ID NO: 3146477 - RNA, 19 nt, Human
cucagaaaacaaggaugaa

SEQ ID NO: 3146478 - RNA, 13 nt, Human
cucaccuggacuu

SEQ ID NO: 3146479 - RNA, 12 nt, Human
cucaccuggacu

SEQ ID NO: 3146480 - RNA, 13 nt, Human
cucaaaacugcac

SEQ ID NO: 3146481 - RNA, 13 nt, Human
cucaaagaaagug

SEQ ID NO: 3146482 - RNA, 17 nt, Human
cucaaagaaaguguauu

SEQ ID NO: 3146483 - RNA, 16 nt, Human
cucaaagaaaguguau

SEQ ID NO: 3146484 - RNA, 15 nt, Human
cuaaacuuuuuuucu

SEQ ID NO: 3146485 - RNA, 21 nt, Human
cuaaacuuuuuuucuguacca

SEQ ID NO: 3146486 - RNA, 18 nt, Human
cuaaacuuuuuuucugua

SEQ ID NO: 3146487 - RNA, 17 nt, Human
cuaaacuuuuuuucugu

SEQ ID NO: 3146488 - RNA, 23 nt, Human
cggagaagagcuguucacagcca

SEQ ID NO: 3146489 - RNA, 24 nt, Human
cggagaagagcuguucacagccag

SEQ ID NO: 3146490 - RNA, 15 nt, Human
cgguuuauauaagcu

SEQ ID NO: 3146491 - RNA, 17 nt, Human
cugaaagaggaaugaag

SEQ ID NO: 3146492 - RNA, 13 nt, Human
cugaaagaggaau

SEQ ID NO: 3146493 - RNA, 21 nt, Human
cugacacaugcugaacaucac

SEQ ID NO: 3146494 - RNA, 14 nt, Human
cugacacaccaggc

SEQ ID NO: 3146495 - RNA, 23 nt, Human
cugacacaccaggcgcuaauuca

SEQ ID NO: 3146496 - RNA, 19 nt, Human
cugacacaccaggcgcuaa

SEQ ID NO: 3146497 - RNA, 17 nt, Human
cugacacaccaggcgcu

SEQ ID NO: 3146498 - RNA, 21 nt, Human
cuccagugagacagcucugca

SEQ ID NO: 3146499 - RNA, 19 nt, Human
cucccagaggagccaccag

SEQ ID NO: 3146500 - RNA, 22 nt, Human
cucccagaggagccaccaguuc

SEQ ID NO: 3146501 - RNA, 21 nt, Human
cucccagaggagccaccaguu

SEQ ID NO: 3146502 - RNA, 23 nt, Human
cucccagaggagccaccaguucu

SEQ ID NO: 3146503 - RNA, 17 nt, Human
cucucuggccuucggcc

SEQ ID NO: 3146504 - RNA, 19 nt, Human
cucucuggccuucggccuc

SEQ ID NO: 3146505 - RNA, 14 nt, Human
cucgguggacccag

SEQ ID NO: 3146506 - RNA, 12 nt, Human
uuggauuuccua

SEQ ID NO: 3146507 - RNA, 21 nt, Human
uuggauuuccuaauacuguca

SEQ ID NO: 3146508 - RNA, 14 nt, Human
uuggauuuccuaau

SEQ ID NO: 3146509 - RNA, 22 nt, Human
uuggaagauggcauaaccuguc

SEQ ID NO: 3146510 - RNA, 16 nt, Human
uugcuaagcauuccaa

SEQ ID NO: 3146511 - RNA, 18 nt, Human
uugcuaagcauuccaacu

SEQ ID NO: 3146512 - RNA, 16 nt, Human
uuggcauagcucuggg

SEQ ID NO: 3146513 - RNA, 13 nt, Human
uuguaaaauggug

SEQ ID NO: 3146514 - RNA, 12 nt, Human
uuguaaaauggu

SEQ ID NO: 3146515 - RNA, 20 nt, Human
uugguaaggggaauugagga

SEQ ID NO: 3146516 - RNA, 15 nt, Human
uugguaacuuuugug

SEQ ID NO: 3146517 - RNA, 14 nt, Human
uugguaacuuuugu

SEQ ID NO: 3146518 - RNA, 12 nt, Human
uugguaacuuuu

SEQ ID NO: 3146519 - RNA, 16 nt, Human
uuguaccgcaauguga

SEQ ID NO: 3146520 - RNA, 20 nt, Human
uuguaaaauggugugaccac

SEQ ID NO: 3146521 - RNA, 15 nt, Human
uugucuagugaaacu

SEQ ID NO: 3146522 - RNA, 24 nt, Human
uucuaaguaaaaccacagcaguug

SEQ ID NO: 3146523 - RNA, 21 nt, Human
uucuaaguaaaaccacagcag

SEQ ID NO: 3146524 - RNA, 19 nt, Human
uucuuaggguuaugauuaa

SEQ ID NO: 3146525 - RNA, 18 nt, Human
uucuuuccacagaagcuc

SEQ ID NO: 3146526 - RNA, 21 nt, Human
uugaaaaucuuauaauuuaaa

SEQ ID NO: 3146527 - RNA, 13 nt, Human
uucuuucuagaaa

SEQ ID NO: 3146528 - RNA, 12 nt, Human
uucuuucuagaa

SEQ ID NO: 3146529 - RNA, 20 nt, Human
uugauaugccuuuucccaac

SEQ ID NO: 3146530 - RNA, 22 nt, Human
uugccaucccucccuccaccuc

SEQ ID NO: 3146531 - RNA, 23 nt, Human
uugccaucccucccuccaccucc

SEQ ID NO: 3146532 - RNA, 14 nt, Human
uugccaucccuccc

SEQ ID NO: 3146533 - RNA, 16 nt, Human
uugccaucccucccuc

SEQ ID NO: 3146534 - RNA, 17 nt, Human
uugccaucccucccucc

SEQ ID NO: 3146535 - RNA, 18 nt, Human
uugccaucccucccucca

SEQ ID NO: 3146536 - RNA, 22 nt, Human
uugccagacauguggugggaca

SEQ ID NO: 3146537 - RNA, 13 nt, Human
uugccaucccucc

SEQ ID NO: 3146538 - RNA, 14 nt, Human
uugcagagacagga

SEQ ID NO: 3146539 - RNA, 18 nt, Human
uugcagauucauuuuucu

SEQ ID NO: 3146540 - RNA, 19 nt, Human
uugcagagacaggaccuga

SEQ ID NO: 3146541 - RNA, 23 nt, Human
uugcagcucuccccuucucugua

SEQ ID NO: 3146542 - RNA, 20 nt, Human
uuucauuuaucuauaauuua

SEQ ID NO: 3146543 - RNA, 12 nt, Human
uuucucuaggaa

SEQ ID NO: 3146544 - RNA, 12 nt, Human
uuuccuaauacu

SEQ ID NO: 3146545 - RNA, 18 nt, Human
uuugguaaggggaauuga

SEQ ID NO: 3146546 - RNA, 16 nt, Human
uuugaagugcuguuua

SEQ ID NO: 3146547 - RNA, 15 nt, Human
uuugaagugcuguuu

SEQ ID NO: 3146548 - RNA, 20 nt, Human
uuugaagugcuguuuauuaa

SEQ ID NO: 3146549 - RNA, 14 nt, Human
uuucuuaacuucuu

SEQ ID NO: 3146550 - RNA, 13 nt, Human
uuucuuaacuucu

SEQ ID NO: 3146551 - RNA, 21 nt, Human
uuugaaauuguauuacaaauc

SEQ ID NO: 3146552 - RNA, 13 nt, Human
uuuacagagacag

SEQ ID NO: 3146553 - RNA, 19 nt, Human
uuuaauaauguuucaaaca

SEQ ID NO: 3146554 - RNA, 15 nt, Human
uuuaauaauguuuca

SEQ ID NO: 3146555 - RNA, 14 nt, Human
uuuaauaauguuuc

SEQ ID NO: 3146556 - RNA, 13 nt, Human
uuuaauaaaccau

SEQ ID NO: 3146557 - RNA, 14 nt, Human
uuuauaacuaacau

SEQ ID NO: 3146558 - RNA, 18 nt, Human
uuguuuaaaaucauuucu

SEQ ID NO: 3146559 - RNA, 17 nt, Human
uuguuuaaaaucauuuc

SEQ ID NO: 3146560 - RNA, 12 nt, Human
uuuaaaaugucu

SEQ ID NO: 3146561 - RNA, 19 nt, Human
uuuaaaauacacacucaaa

SEQ ID NO: 3146562 - RNA, 16 nt, Human
uuuaaaaucauuucug

SEQ ID NO: 3146563 - RNA, 14 nt, Human
uuuaaaagaaugau

SEQ ID NO: 3146564 - RNA, 17 nt, Human
uuuaaaagaaugauuau

SEQ ID NO: 3146565 - RNA, 16 nt, Human
uuaugcgguuaauuuu

SEQ ID NO: 3146566 - RNA, 19 nt, Human
uuaugcgguuaauuuugaa

SEQ ID NO: 3146567 - RNA, 21 nt, Human
uuauggcacuaguauuucuau

SEQ ID NO: 3146568 - RNA, 22 nt, Human
uuaucuauaauuuaccuaagau

SEQ ID NO: 3146569 - RNA, 17 nt, Human
uuaucuauaauuuaccu

SEQ ID NO: 3146570 - RNA, 15 nt, Human
uuaucuauaauuuac

SEQ ID NO: 3146571 - RNA, 14 nt, Human
uuaucuauaauuua

SEQ ID NO: 3146572 - RNA, 16 nt, Human
uuaucugucagcugca

SEQ ID NO: 3146573 - RNA, 17 nt, Human
uuauggcuauaggugcu

SEQ ID NO: 3146574 - RNA, 17 nt, Human
uuauuaaucuuagugua

SEQ ID NO: 3146575 - RNA, 18 nt, Human
uuauuacuguaagaaaau

SEQ ID NO: 3146576 - RNA, 17 nt, Human
uuauuacuguaagaaaa

SEQ ID NO: 3146577 - RNA, 16 nt, Human
uuauuacuguaagaaa

SEQ ID NO: 3146578 - RNA, 13 nt, Human
uucagagcugccc

SEQ ID NO: 3146579 - RNA, 16 nt, Human
uucagacauagaauua

SEQ ID NO: 3146580 - RNA, 20 nt, Human
uucagacauagaauuaacac

SEQ ID NO: 3146581 - RNA, 15 nt, Human
uuauugucuagugaa

SEQ ID NO: 3146582 - RNA, 16 nt, Human
uuauuuuaauaauguu

SEQ ID NO: 3146583 - RNA, 15 nt, Human
uuauuuuaauaaugu

SEQ ID NO: 3146584 - RNA, 17 nt, Human
uucccuugaugaagaag

SEQ ID NO: 3146585 - RNA, 22 nt, Human
uucggccuccauccugaggcuc

SEQ ID NO: 3146586 - RNA, 20 nt, Human
uuccuuggacucauuuuaaa

SEQ ID NO: 3146587 - RNA, 17 nt, Human
uuccuuggacucauuuu

SEQ ID NO: 3146588 - RNA, 15 nt, Human
uucaugcagcugugg

SEQ ID NO: 3146589 - RNA, 14 nt, Human
uucaugcagcugug

SEQ ID NO: 3146590 - RNA, 13 nt, Human
uucaugcagcugu

SEQ ID NO: 3146591 - RNA, 19 nt, Human
uuccagauccuggaaauca

SEQ ID NO: 3146592 - RNA, 19 nt, Human
uguuucaaacauauauaac

SEQ ID NO: 3146593 - RNA, 22 nt, Human
uguuucaaacauauauaacaau

SEQ ID NO: 3146594 - RNA, 21 nt, Human
uguuucaaacauauauaacaa

SEQ ID NO: 3146595 - RNA, 19 nt, Human
uuaaaauacacacucaaau

SEQ ID NO: 3146596 - RNA, 15 nt, Human
uuaaaagaugaaaau

SEQ ID NO: 3146597 - RNA, 18 nt, Human
uuaaaagaugaaaauauu

SEQ ID NO: 3146598 - RNA, 17 nt, Human
uuaaagaaaguguauuu

SEQ ID NO: 3146599 - RNA, 12 nt, Human
uuaaagaaagug

SEQ ID NO: 3146600 - RNA, 21 nt, Human
uuaaaagaauauuuuaacuuc

SEQ ID NO: 3146601 - RNA, 22 nt, Human
uuaaaagaauauuuuaacuucc

SEQ ID NO: 3146602 - RNA, 21 nt, Human
uuaacuucuugcuucuuucua

SEQ ID NO: 3146603 - RNA, 17 nt, Human
uuaacuucuugcuucuu

SEQ ID NO: 3146604 - RNA, 14 nt, Human
uuaacuucuugcuu

SEQ ID NO: 3146605 - RNA, 14 nt, Human
uuaacgauguccaa

SEQ ID NO: 3146606 - RNA, 18 nt, Human
uuaauguauguuaccaaa

SEQ ID NO: 3146607 - RNA, 17 nt, Human
uuaauguauguuaccaa

SEQ ID NO: 3146608 - RNA, 15 nt, Human
uuaauguauguuacc

SEQ ID NO: 3146609 - RNA, 13 nt, Human
uuaauguauguua

SEQ ID NO: 3146610 - RNA, 20 nt, Human
uuagacccucaugcugccaa

SEQ ID NO: 3146611 - RNA, 19 nt, Human
uuagacccucaugcugcca

SEQ ID NO: 3146612 - RNA, 11 nt, Human
uuagaccucag

SEQ ID NO: 3146613 - RNA, 12 nt, Human
uuagaccucagc

SEQ ID NO: 3146614 - RNA, 13 nt, Human
uuagaccucagcc

SEQ ID NO: 3146615 - RNA, 16 nt, Human
uuagaccucagccugu

SEQ ID NO: 3146616 - RNA, 14 nt, Human
uuagaccucagccu

SEQ ID NO: 3146617 - RNA, 15 nt, Human
uuagaccucagccug

SEQ ID NO: 3146618 - RNA, 20 nt, Human
uuacuguguaauuagugcca

SEQ ID NO: 3146619 - RNA, 16 nt, Human
uuacuguguaauuagu

SEQ ID NO: 3146620 - RNA, 13 nt, Human
uuacuguguaauu

SEQ ID NO: 3146621 - RNA, 17 nt, Human
uuacuaguuucccuugc

SEQ ID NO: 3146622 - RNA, 21 nt, Human
uuagaugcaguucugaagaag

SEQ ID NO: 3146623 - RNA, 20 nt, Human
uuagaugcaguucugaagaa

SEQ ID NO: 3146624 - RNA, 13 nt, Human
uuagcuggaaaag

SEQ ID NO: 3146625 - RNA, 12 nt, Human
uuagcuggaaaa

SEQ ID NO: 3146626 - RNA, 16 nt, Human
uuagcuuagaccucag

SEQ ID NO: 3146627 - RNA, 17 nt, Human
uuagcuuagaccucagc

SEQ ID NO: 3146628 - RNA, 18 nt, Human
uuagcuuagaccucagcc

SEQ ID NO: 3146629 - RNA, 21 nt, Human
uuagcuuagaccucagccugu

SEQ ID NO: 3146630 - RNA, 22 nt, Human
uuaguuaccuuauaguuacugu

SEQ ID NO: 3146631 - RNA, 21 nt, Human
uuaguuaccuuauaguuacug

SEQ ID NO: 3146632 - RNA, 13 nt, Human
uuaguuaccuuau

SEQ ID NO: 3146633 - RNA, 20 nt, Human
uuaguuaccuuauaguuacu

SEQ ID NO: 3146634 - RNA, 19 nt, Human
uuaguuaccuuauaguuac

SEQ ID NO: 3146635 - RNA, 18 nt, Human
uuaguuaccuuauaguua

SEQ ID NO: 3146636 - RNA, 16 nt, Human
uuaguuaccuuauagu

SEQ ID NO: 3146637 - RNA, 20 nt, Human
uuaggcuguaacuacuuuau

SEQ ID NO: 3146638 - RNA, 17 nt, Human
uuaggcuguaacuacuu

SEQ ID NO: 3146639 - RNA, 14 nt, Human
uuaggcuguaacua

SEQ ID NO: 3146640 - RNA, 18 nt, Human
uuaggauguugaaaaagu

SEQ ID NO: 3146641 - RNA, 15 nt, Human
uaugauuacuggccu

SEQ ID NO: 3146642 - RNA, 21 nt, Human
uaugauuaaguaaugauaacu

SEQ ID NO: 3146643 - RNA, 21 nt, Human
uaugauuauuaacgaugucca

SEQ ID NO: 3146644 - RNA, 12 nt, Human
uaugauuauuaa

SEQ ID NO: 3146645 - RNA, 22 nt, Human
uaugauuacuggccuuuuucau

SEQ ID NO: 3146646 - RNA, 16 nt, Human
uaugauucccagccag

SEQ ID NO: 3146647 - RNA, 15 nt, Human
uaugcaaagcacuga

SEQ ID NO: 3146648 - RNA, 13 nt, Human
uaugcaaagcacu

SEQ ID NO: 3146649 - RNA, 14 nt, Human
uaugcaaagcacug

SEQ ID NO: 3146650 - RNA, 12 nt, Human
uaugcaaagcac

SEQ ID NO: 3146651 - RNA, 16 nt, Human
uaugcuucuguuuuau

SEQ ID NO: 3146652 - RNA, 15 nt, Human
uaugcuucuguuuua

SEQ ID NO: 3146653 - RNA, 22 nt, Human
uaucuaccccagacuagaugua

SEQ ID NO: 3146654 - RNA, 14 nt, Human
uauccuucagccug

SEQ ID NO: 3146655 - RNA, 15 nt, Human
uauccuucagccuga

SEQ ID NO: 3146656 - RNA, 23 nt, Human
uaugaauuacauuuguauaaaau

SEQ ID NO: 3146657 - RNA, 17 nt, Human
uaugaauuacauuugua

SEQ ID NO: 3146658 - RNA, 15 nt, Human
uaucugucagcugca

SEQ ID NO: 3146659 - RNA, 16 nt, Human
uaggucagugcaaaua

SEQ ID NO: 3146660 - RNA, 16 nt, Human
uaggccaugggacagg

SEQ ID NO: 3146661 - RNA, 18 nt, Human
uaggccaugggacaggga

SEQ ID NO: 3146662 - RNA, 12 nt, Human
uaggaauugacc

SEQ ID NO: 3146663 - RNA, 16 nt, Human
uaguauuucuaugaaa

SEQ ID NO: 3146664 - RNA, 19 nt, Human
uaguauuucuaugaaauau

SEQ ID NO: 3146665 - RNA, 18 nt, Human
uaguauuucuaugaaaua

SEQ ID NO: 3146666 - RNA, 18 nt, Human
uaguauuuuuuguauaau

SEQ ID NO: 3146667 - RNA, 13 nt, Human
uaguaucaaaaga

SEQ ID NO: 3146668 - RNA, 15 nt, Human
uagugcaaauuguca

SEQ ID NO: 3146669 - RNA, 14 nt, Human
uagugcaaauuguc

SEQ ID NO: 3146670 - RNA, 13 nt, Human
uagucaaauugug

SEQ ID NO: 3146671 - RNA, 19 nt, Human
uaguauuuuuuguauaauu

SEQ ID NO: 3146672 - RNA, 22 nt, Human
uagugccacuuaauguauguua

SEQ ID NO: 3146673 - RNA, 13 nt, Human
uauaugcuucugu

SEQ ID NO: 3146674 - RNA, 22 nt, Human
uauaguuacuguguaauuagug

SEQ ID NO: 3146675 - RNA, 20 nt, Human
uauaguuacuguguaauuag

SEQ ID NO: 3146676 - RNA, 18 nt, Human
uauaguuacuguguaauu

SEQ ID NO: 3146677 - RNA, 16 nt, Human
uauaguuacuguguaa

SEQ ID NO: 3146678 - RNA, 15 nt, Human
uauaguuacugugua

SEQ ID NO: 3146679 - RNA, 13 nt, Human
uauaguuacugug

SEQ ID NO: 3146680 - RNA, 18 nt, Human
uauaauuggauuuccuaa

SEQ ID NO: 3146681 - RNA, 17 nt, Human
uauaauuggauuuccua

SEQ ID NO: 3146682 - RNA, 20 nt, Human
uauaauuggauuuccuaaua

SEQ ID NO: 3146683 - RNA, 19 nt, Human
uauaauuggauuuccuaau

SEQ ID NO: 3146684 - RNA, 22 nt, Human
uauaauuggauuuccuaauacu

SEQ ID NO: 3146685 - RNA, 22 nt, Human
ucacaagacccaaaaggcagaa

SEQ ID NO: 3146686 - RNA, 18 nt, Human
ucacaagacccaaaaggc

SEQ ID NO: 3146687 - RNA, 20 nt, Human
ucacacacaggcaacugagg

SEQ ID NO: 3146688 - RNA, 21 nt, Human
ucacacacaggcaacugaggc

SEQ ID NO: 3146689 - RNA, 12 nt, Human
ucacauuuaaau

SEQ ID NO: 3146690 - RNA, 23 nt, Human
ucaaggaauuucuuaacuucuug

SEQ ID NO: 3146691 - RNA, 21 nt, Human
ucaaggaauuucuuaacuucu

SEQ ID NO: 3146692 - RNA, 19 nt, Human
ucaaggaauuucuuaacuu

SEQ ID NO: 3146693 - RNA, 16 nt, Human
ucaaggaauuucuuaa

SEQ ID NO: 3146694 - RNA, 22 nt, Human
ucaacuccaaacugacucuuaa

SEQ ID NO: 3146695 - RNA, 19 nt, Human
ucaacuccaaacugacucu

SEQ ID NO: 3146696 - RNA, 16 nt, Human
ucaaauaugcaaagca

SEQ ID NO: 3146697 - RNA, 17 nt, Human
ucaaauaugcaaagcac

SEQ ID NO: 3146698 - RNA, 18 nt, Human
ucaaauaugcaaagcacu

SEQ ID NO: 3146699 - RNA, 19 nt, Human
ucaaauaugcaaagcacug

SEQ ID NO: 3146700 - RNA, 15 nt, Human
ucaaauccuugaaga

SEQ ID NO: 3146701 - RNA, 16 nt, Human
ucaaauccuugaagau

SEQ ID NO: 3146702 - RNA, 22 nt, Human
ucaaacagucucaggaaaucaa

SEQ ID NO: 3146703 - RNA, 17 nt, Human
ucaaacauauauaacaa

SEQ ID NO: 3146704 - RNA, 15 nt, Human
uauuucuaugaaaua

SEQ ID NO: 3146705 - RNA, 14 nt, Human
uauuucuaugaaau

SEQ ID NO: 3146706 - RNA, 14 nt, Human
uauuuauuacugua

SEQ ID NO: 3146707 - RNA, 13 nt, Human
uauuucuaugaaa

SEQ ID NO: 3146708 - RNA, 13 nt, Human
uauuuauuacugu

SEQ ID NO: 3146709 - RNA, 20 nt, Human
uauuguuuaaaaucauuucu

SEQ ID NO: 3146710 - RNA, 22 nt, Human
uauuuaaauauuaaauauguua

SEQ ID NO: 3146711 - RNA, 19 nt, Human
uauuguguguuauuuaaau

SEQ ID NO: 3146712 - RNA, 17 nt, Human
uauuguguguuauuuaa

SEQ ID NO: 3146713 - RNA, 16 nt, Human
uauuguuuaaaaucau

SEQ ID NO: 3146714 - RNA, 17 nt, Human
uauuguuuaaaaucauu

SEQ ID NO: 3146715 - RNA, 15 nt, Human
uauuguuuaaaauca

SEQ ID NO: 3146716 - RNA, 17 nt, Human
uauuauauuuacaaaug

SEQ ID NO: 3146717 - RNA, 14 nt, Human
uauuaucugucagc

SEQ ID NO: 3146718 - RNA, 13 nt, Human
uauuaucugucag

SEQ ID NO: 3146719 - RNA, 16 nt, Human
uauuauguuaaaacug

SEQ ID NO: 3146720 - RNA, 15 nt, Human
uauuauuguguguua

SEQ ID NO: 3146721 - RNA, 15 nt, Human
uauuaacgaugucca

SEQ ID NO: 3146722 - RNA, 17 nt, Human
uauguucuaagaaguga

SEQ ID NO: 3146723 - RNA, 19 nt, Human
uauguuagugcaaauuguc

SEQ ID NO: 3146724 - RNA, 12 nt, Human
uauguuaaaacu

SEQ ID NO: 3146725 - RNA, 19 nt, Human
uauggaggcuuugcauaga

SEQ ID NO: 3146726 - RNA, 15 nt, Human
ucuccagcugacuaa

SEQ ID NO: 3146727 - RNA, 14 nt, Human
ucuccagcugacua

SEQ ID NO: 3146728 - RNA, 12 nt, Human
ucuccagcugac

SEQ ID NO: 3146729 - RNA, 23 nt, Human
ucucaguccaugaagauguagag

SEQ ID NO: 3146730 - RNA, 18 nt, Human
ucuaugaaauauuauguu

SEQ ID NO: 3146731 - RNA, 14 nt, Human
ucggagaagagcug

SEQ ID NO: 3146732 - RNA, 16 nt, Human
ucggagaagagcuguu

SEQ ID NO: 3146733 - RNA, 12 nt, Human
ucggagaagagc

SEQ ID NO: 3146734 - RNA, 21 nt, Human
uccuuagcuuagaccucagcc

SEQ ID NO: 3146735 - RNA, 22 nt, Human
uccuuagcuuagaccucagccu

SEQ ID NO: 3146736 - RNA, 17 nt, Human
uccugucugccagccag

SEQ ID NO: 3146737 - RNA, 21 nt, Human
uccugucugccagccagcagc

SEQ ID NO: 3146738 - RNA, 18 nt, Human
uccuuagcuuagaccuca

SEQ ID NO: 3146739 - RNA, 19 nt, Human
uccuuagcuuagaccucag

SEQ ID NO: 3146740 - RNA, 20 nt, Human
uccuuagcuuagaccucagc

SEQ ID NO: 3146741 - RNA, 12 nt, Human
uccugucugcca

SEQ ID NO: 3146742 - RNA, 13 nt, Human
uccugucugccag

SEQ ID NO: 3146743 - RNA, 14 nt, Human
uccugucugccagc

SEQ ID NO: 3146744 - RNA, 16 nt, Human
uccugucugccagcca

SEQ ID NO: 3146745 - RNA, 22 nt, Human
uccugucggagcccugucuccu

SEQ ID NO: 3146746 - RNA, 20 nt, Human
uccugaggcuccacuugguc

SEQ ID NO: 3146747 - RNA, 19 nt, Human
uccugaggcuccacuuggu

SEQ ID NO: 3146748 - RNA, 17 nt, Human
uccugaggcuccacuug

SEQ ID NO: 3146749 - RNA, 17 nt, Human
uccugccccugagccca

SEQ ID NO: 3146750 - RNA, 18 nt, Human
uccugccccugagcccau

SEQ ID NO: 3146751 - RNA, 14 nt, Human
uccucuguccaggg

SEQ ID NO: 3146752 - RNA, 16 nt, Human
uccucuguccagggcc

SEQ ID NO: 3146753 - RNA, 23 nt, Human
uccucuguccagggcccugagcu

SEQ ID NO: 3146754 - RNA, 14 nt, Human
uccuagugaaagag

SEQ ID NO: 3146755 - RNA, 23 nt, Human
uccuagugaaagaggcagcuuga

SEQ ID NO: 3146756 - RNA, 22 nt, Human
uccucauuuuuauaaugucccu

SEQ ID NO: 3146757 - RNA, 20 nt, Human
ucccuucacaaacccagugu

SEQ ID NO: 3146758 - RNA, 14 nt, Human
uccgaggcaggguc

SEQ ID NO: 3146759 - RNA, 21 nt, Human
ucauuuaucuauaauuuaccu

SEQ ID NO: 3146760 - RNA, 18 nt, Human
ucauuuaucuauaauuua

SEQ ID NO: 3146761 - RNA, 16 nt, Human
ucauuuaucuauaauu

SEQ ID NO: 3146762 - RNA, 12 nt, Human
ucauuuaucuau

SEQ ID NO: 3146763 - RNA, 14 nt, Human
uccaaagaaaugua

SEQ ID NO: 3146764 - RNA, 17 nt, Human
uccaaagaaauguaagg

SEQ ID NO: 3146765 - RNA, 16 nt, Human
ucauuaggauggcuag

SEQ ID NO: 3146766 - RNA, 22 nt, Human
ucaucuugcuaccaguauuuag

SEQ ID NO: 3146767 - RNA, 21 nt, Human
ucaucuugcuaccaguauuua

SEQ ID NO: 3146768 - RNA, 18 nt, Human
ucaucuugcuaccaguau

SEQ ID NO: 3146769 - RNA, 17 nt, Human
ucaucuugcuaccagua

SEQ ID NO: 3146770 - RNA, 11 nt, Human
ucaucuugcua

SEQ ID NO: 3146771 - RNA, 11 nt, Human
ucauagcagcu

SEQ ID NO: 3146772 - RNA, 12 nt, Human
ucauagcagcuu

SEQ ID NO: 3146773 - RNA, 17 nt, Human
ucaucaaugaaugaaug

SEQ ID NO: 3146774 - RNA, 17 nt, Human
uccacuuggucugugag

SEQ ID NO: 3146775 - RNA, 21 nt, Human
uccacuuggucugugagaugc

SEQ ID NO: 3146776 - RNA, 23 nt, Human
uccacuuggucugugagaugcua

SEQ ID NO: 3146777 - RNA, 21 nt, Human
uccagcugacuaaacuuuuuu

SEQ ID NO: 3146778 - RNA, 14 nt, Human
uccagcugacuaaa

SEQ ID NO: 3146779 - RNA, 12 nt, Human
uccauacauuug

SEQ ID NO: 3146780 - RNA, 19 nt, Human
uccagguagagggugugua

SEQ ID NO: 3146781 - RNA, 15 nt, Human
uccauacauuugugu

SEQ ID NO: 3146782 - RNA, 23 nt, Human
ucccaccugacacaccaggcgcu

SEQ ID NO: 3146783 - RNA, 19 nt, Human
ucccaccugacacaccagg

SEQ ID NO: 3146784 - RNA, 13 nt, Human
ucccaccugacac

SEQ ID NO: 3146785 - RNA, 14 nt, Human
ugagcucgguggac

SEQ ID NO: 3146786 - RNA, 20 nt, Human
ugagcucgguggacccaggg

SEQ ID NO: 3146787 - RNA, 21 nt, Human
ugagcucgguggacccaggga

SEQ ID NO: 3146788 - RNA, 13 nt, Human
ugagccccaaaag

SEQ ID NO: 3146789 - RNA, 16 nt, Human
ugagagugaacaaauu

SEQ ID NO: 3146790 - RNA, 20 nt, Human
ugaggcuccacuuggucugu

SEQ ID NO: 3146791 - RNA, 18 nt, Human
ugaggcuccacuuggucu

SEQ ID NO: 3146792 - RNA, 16 nt, Human
ugauaacuggaaacuu

SEQ ID NO: 3146793 - RNA, 16 nt, Human
ugauuaccagggacug

SEQ ID NO: 3146794 - RNA, 19 nt, Human
ugauuaugaauuacauuug

SEQ ID NO: 3146795 - RNA, 17 nt, Human
ugauuaugaauuacauu

SEQ ID NO: 3146796 - RNA, 13 nt, Human
ugauuauauguca

SEQ ID NO: 3146797 - RNA, 21 nt, Human
ugauuacuggccuuuuucauu

SEQ ID NO: 3146798 - RNA, 20 nt, Human
ugauuacuggccuuuuucau

SEQ ID NO: 3146799 - RNA, 23 nt, Human
ugauuacuggccuuuuucauuua

SEQ ID NO: 3146800 - RNA, 22 nt, Human
ugauuaugaauuacauuuguau

SEQ ID NO: 3146801 - RNA, 21 nt, Human
ugauuaugaauuacauuugua

SEQ ID NO: 3146802 - RNA, 20 nt, Human
ugauuauuaacgauguccaa

SEQ ID NO: 3146803 - RNA, 24 nt, Human
ugaucagcuuauugucuagugaaa

SEQ ID NO: 3146804 - RNA, 17 nt, Human
ugaucagcuuauugucu

SEQ ID NO: 3146805 - RNA, 14 nt, Human
ugaucuuuaaaaua

SEQ ID NO: 3146806 - RNA, 15 nt, Human
ugauggugguauguu

SEQ ID NO: 3146807 - RNA, 17 nt, Human
ugaucuuuaaaauacac

SEQ ID NO: 3146808 - RNA, 23 nt, Human
ugaugcuacaggauuugaaauug

SEQ ID NO: 3146809 - RNA, 20 nt, Human
ugaugcuacaggauuugaaa

SEQ ID NO: 3146810 - RNA, 20 nt, Human
ugacaagcucacagaccuuu

SEQ ID NO: 3146811 - RNA, 15 nt, Human
ugacaagcucacaga

SEQ ID NO: 3146812 - RNA, 12 nt, Human
ugacaagcucac

SEQ ID NO: 3146813 - RNA, 17 nt, Human
ugacaugggacauuugc

SEQ ID NO: 3146814 - RNA, 16 nt, Human
ugacaugggacauuug

SEQ ID NO: 3146815 - RNA, 16 nt, Human
ugacaugucccuacac

SEQ ID NO: 3146816 - RNA, 18 nt, Human
ugacaugggacauuugcu

SEQ ID NO: 3146817 - RNA, 20 nt, Human
ugaccacugcagaagacagu

SEQ ID NO: 3146818 - RNA, 18 nt, Human
ugaccacugcagaagaca

SEQ ID NO: 3146819 - RNA, 11 nt, Human
ugaaguccaag

SEQ ID NO: 3146820 - RNA, 22 nt, Human
ugaagugcuguuuauuaaucuu

SEQ ID NO: 3146821 - RNA, 18 nt, Human
ugaagugcuguuuauuaa

SEQ ID NO: 3146822 - RNA, 20 nt, Human
ugaaugaauggcuaagcaaa

SEQ ID NO: 3146823 - RNA, 18 nt, Human
ugaauuacauuuguauaa

SEQ ID NO: 3146824 - RNA, 16 nt, Human
ugaauuacauuuguau

SEQ ID NO: 3146825 - RNA, 15 nt, Human
ugaauuacauuugua

SEQ ID NO: 3146826 - RNA, 14 nt, Human
ugaauuacauuugu

SEQ ID NO: 3146827 - RNA, 22 nt, Human
ugaauuaggcuguaacuacuuu

SEQ ID NO: 3146828 - RNA, 21 nt, Human
ugaauuaggcuguaacuacuu

SEQ ID NO: 3146829 - RNA, 20 nt, Human
ugaauuaggcuguaacuacu

SEQ ID NO: 3146830 - RNA, 17 nt, Human
ugaauuaggcuguaacu

SEQ ID NO: 3146831 - RNA, 15 nt, Human
ugaaagguacuucaa

SEQ ID NO: 3146832 - RNA, 16 nt, Human
ugaaagguacuucaaa

SEQ ID NO: 3146833 - RNA, 23 nt, Human
ugaaagcagggacuugaacccau

SEQ ID NO: 3146834 - RNA, 18 nt, Human
ugaaagaggcagcuugaa

SEQ ID NO: 3146835 - RNA, 22 nt, Human
ugaaacaacaaauaggaauugu

SEQ ID NO: 3146836 - RNA, 19 nt, Human
ugaacaaguuguuucauug

SEQ ID NO: 3146837 - RNA, 20 nt, Human
ugaacaaguuguuucauuga

SEQ ID NO: 3146838 - RNA, 22 nt, Human
ugaacaaguuguuucauugacu

SEQ ID NO: 3146839 - RNA, 16 nt, Human
ugaaauauugacuuuu

SEQ ID NO: 3146840 - RNA, 18 nt, Human
ugaaauauuauguuaaaa

SEQ ID NO: 3146841 - RNA, 19 nt, Human
ugaaauggacuuuuguaca

SEQ ID NO: 3146842 - RNA, 13 nt, Human
ucuugcuaccagu

SEQ ID NO: 3146843 - RNA, 20 nt, Human
ucuugcuaccaguauuuaga

SEQ ID NO: 3146844 - RNA, 14 nt, Human
ucuugcuaccagua

SEQ ID NO: 3146845 - RNA, 11 nt, Human
ucuugcuucuu

SEQ ID NO: 3146846 - RNA, 17 nt, Human
ucuuucacauuuaaaua

SEQ ID NO: 3146847 - RNA, 17 nt, Human
ucuugcuucuuucuaga

SEQ ID NO: 3146848 - RNA, 16 nt, Human
ucuugcuucuuucuag

SEQ ID NO: 3146849 - RNA, 18 nt, Human
ucuugcuucuuucuagaa

SEQ ID NO: 3146850 - RNA, 12 nt, Human
ucuuugccaagu

SEQ ID NO: 3146851 - RNA, 19 nt, Human
ucuuuccacagaagcucca

SEQ ID NO: 3146852 - RNA, 17 nt, Human
ugggcagcugccucccc

SEQ ID NO: 3146853 - RNA, 12 nt, Human
ugggcagcugcc

SEQ ID NO: 3146854 - RNA, 13 nt, Human
ugggcagcugccu

SEQ ID NO: 3146855 - RNA, 14 nt, Human
ugggcagcugccuc

SEQ ID NO: 3146856 - RNA, 15 nt, Human
ugggcagcugccucc

SEQ ID NO: 3146857 - RNA, 13 nt, Human
ugguauguuuuca

SEQ ID NO: 3146858 - RNA, 16 nt, Human
uggucccagccagcag

SEQ ID NO: 3146859 - RNA, 17 nt, Human
uggucacaggaaguaga

SEQ ID NO: 3146860 - RNA, 22 nt, Human
uggucacaggaaguagaggagg

SEQ ID NO: 3146861 - RNA, 16 nt, Human
uggugauuuagcagga

SEQ ID NO: 3146862 - RNA, 20 nt, Human
uggcagaguuacaguucugu

SEQ ID NO: 3146863 - RNA, 19 nt, Human
uggcagaguuacaguucug

SEQ ID NO: 3146864 - RNA, 17 nt, Human
uggcagaguuacaguuc

SEQ ID NO: 3146865 - RNA, 12 nt, Human
uggcagaguuac

SEQ ID NO: 3146866 - RNA, 15 nt, Human
uggcacuaguauuuc

SEQ ID NO: 3146867 - RNA, 20 nt, Human
uggcaauagucaaauugugu

SEQ ID NO: 3146868 - RNA, 23 nt, Human
ugcuguuuauuaaucuuagugua

SEQ ID NO: 3146869 - RNA, 17 nt, Human
ugcuguuuauuaaucuu

SEQ ID NO: 3146870 - RNA, 14 nt, Human
ugcuguuuauuaau

SEQ ID NO: 3146871 - RNA, 21 nt, Human
ugccuauuaucugucagcugc

SEQ ID NO: 3146872 - RNA, 12 nt, Human
ugcaguucugaa

SEQ ID NO: 3146873 - RNA, 22 nt, Human
ugcaucaauuuuucuuauuuca

SEQ ID NO: 3146874 - RNA, 13 nt, Human
ugcaucagcugcu

SEQ ID NO: 3146875 - RNA, 16 nt, Human
ugccacuaaauugaca

SEQ ID NO: 3146876 - RNA, 16 nt, Human
ugcucuaacagcccuc

SEQ ID NO: 3146877 - RNA, 15 nt, Human
ugcucuaacagcccu

SEQ ID NO: 3146878 - RNA, 17 nt, Human
ugcuagaacucccuuuc

SEQ ID NO: 3146879 - RNA, 15 nt, Human
ugcuagaacucccuu

SEQ ID NO: 3146880 - RNA, 14 nt, Human
ugcuagaacucccu

SEQ ID NO: 3146881 - RNA, 13 nt, Human
ugcuagaacuccc

SEQ ID NO: 3146882 - RNA, 21 nt, Human
ugcugccaauauccuaauaaa

SEQ ID NO: 3146883 - RNA, 15 nt, Human
ugcugccaauauccu

SEQ ID NO: 3146884 - RNA, 19 nt, Human
ugcugccaauauccuaaua

SEQ ID NO: 3146885 - RNA, 18 nt, Human
ugcugccaauauccuaau

SEQ ID NO: 3146886 - RNA, 17 nt, Human
ugcugccaauauccuaa

SEQ ID NO: 3146887 - RNA, 16 nt, Human
ugcugccaauauccua

SEQ ID NO: 3146888 - RNA, 20 nt, Human
ugcugggggggauuguaaaa

SEQ ID NO: 3146889 - RNA, 18 nt, Human
gugcaaauugucacagga

SEQ ID NO: 3146890 - RNA, 16 nt, Human
gugagcagucaggaaa

SEQ ID NO: 3146891 - RNA, 14 nt, Human
gugagcuacaaaug

SEQ ID NO: 3146892 - RNA, 22 nt, Human
gugaauuaggcuguaacuacuu

SEQ ID NO: 3146893 - RNA, 21 nt, Human
gugaauuaggcuguaacuacu

SEQ ID NO: 3146894 - RNA, 18 nt, Human
gugaauuaggcuguaacu

SEQ ID NO: 3146895 - RNA, 14 nt, Human
gucugccagccagc

SEQ ID NO: 3146896 - RNA, 15 nt, Human
gucugccagccagca

SEQ ID NO: 3146897 - RNA, 20 nt, Human
gugaaacucguuaauuugua

SEQ ID NO: 3146898 - RNA, 19 nt, Human
gugaaagaaaauaacaaua

SEQ ID NO: 3146899 - RNA, 21 nt, Human
gugcugcccgucuucagccua

SEQ ID NO: 3146900 - RNA, 18 nt, Human
gugcugcccgucuucagc

SEQ ID NO: 3146901 - RNA, 19 nt, Human
gugcugcccgucuucagcc

SEQ ID NO: 3146902 - RNA, 19 nt, Human
gugcuguuuauuaaucuua

SEQ ID NO: 3146903 - RNA, 15 nt, Human
gugcuguuuauuaau

SEQ ID NO: 3146904 - RNA, 24 nt, Human
gugcuuggcccaggaguuuggcca

SEQ ID NO: 3146905 - RNA, 19 nt, Human
gugcuuggcccaggaguuu

SEQ ID NO: 3146906 - RNA, 17 nt, Human
gugcuuggcccaggagu

SEQ ID NO: 3146907 - RNA, 16 nt, Human
gugcuuggcccaggag

SEQ ID NO: 3146908 - RNA, 15 nt, Human
gugcuuggcccagga

SEQ ID NO: 3146909 - RNA, 14 nt, Human
gugcuuggcccagg

SEQ ID NO: 3146910 - RNA, 13 nt, Human
gugcuuggcccag

SEQ ID NO: 3146911 - RNA, 20 nt, Human
gugcucuuuucuccucacug

SEQ ID NO: 3146912 - RNA, 16 nt, Human
gugcucuuuucuccuc

SEQ ID NO: 3146913 - RNA, 14 nt, Human
gugcucuuuucucc

SEQ ID NO: 3146914 - RNA, 22 nt, Human
gucauccucaaagaaaguguau

SEQ ID NO: 3146915 - RNA, 19 nt, Human
gucauccucaaagaaagug

SEQ ID NO: 3146916 - RNA, 22 nt, Human
gucaucuugcuaccaguauuua

SEQ ID NO: 3146917 - RNA, 18 nt, Human
gucaucuugcuaccagua

SEQ ID NO: 3146918 - RNA, 15 nt, Human
gucaucuugcuacca

SEQ ID NO: 3146919 - RNA, 14 nt, Human
gucaucuugcuacc

SEQ ID NO: 3146920 - RNA, 12 nt, Human
gucaucuugcua

SEQ ID NO: 3146921 - RNA, 20 nt, Human
gucccagccagcaguucaga

SEQ ID NO: 3146922 - RNA, 14 nt, Human
guccagggcccuga

SEQ ID NO: 3146923 - RNA, 15 nt, Human
guccagggcccugag

SEQ ID NO: 3146924 - RNA, 16 nt, Human
guccagggcccugagc

SEQ ID NO: 3146925 - RNA, 21 nt, Human
guauuuggaaauaaagucaga

SEQ ID NO: 3146926 - RNA, 20 nt, Human
guauuuggaaauaaagucag

SEQ ID NO: 3146927 - RNA, 19 nt, Human
guauuuggaaauaaaguca

SEQ ID NO: 3146928 - RNA, 22 nt, Human
guauuucuaugaaauauuaugu

SEQ ID NO: 3146929 - RNA, 17 nt, Human
guauuucuaugaaauau

SEQ ID NO: 3146930 - RNA, 13 nt, Human
gucaaggcuuaga

SEQ ID NO: 3146931 - RNA, 17 nt, Human
guauuuuaaaagaauga

SEQ ID NO: 3146932 - RNA, 16 nt, Human
guauuuuaaaagaaug

SEQ ID NO: 3146933 - RNA, 14 nt, Human
gucaccucauggaa

SEQ ID NO: 3146934 - RNA, 15 nt, Human
gucaauaaaauccau

SEQ ID NO: 3146935 - RNA, 21 nt, Human
gucaauaaaauccauacauuu

SEQ ID NO: 3146936 - RNA, 15 nt, Human
gucccugguaauaag

SEQ ID NO: 3146937 - RNA, 22 nt, Human
guccuggggccucggagccuca

SEQ ID NO: 3146938 - RNA, 14 nt, Human
guccuggggccucg

SEQ ID NO: 3146939 - RNA, 18 nt, Human
guccugucggagcccugu

SEQ ID NO: 3146940 - RNA, 20 nt, Human
guccugucggagcccugucu

SEQ ID NO: 3146941 - RNA, 21 nt, Human
guccugucggagcccugucuc

SEQ ID NO: 3146942 - RNA, 17 nt, Human
gucuacacuaagagaga

SEQ ID NO: 3146943 - RNA, 23 nt, Human
gucuacacuaagagagaaugaga

SEQ ID NO: 3146944 - RNA, 17 nt, Human
ggggcagaacagccgcu

SEQ ID NO: 3146945 - RNA, 23 nt, Human
ggguaccuugaacacugggggag

SEQ ID NO: 3146946 - RNA, 22 nt, Human
ggugccccccuugccagacaug

SEQ ID NO: 3146947 - RNA, 19 nt, Human
ggugcuacaaaaacacagc

SEQ ID NO: 3146948 - RNA, 22 nt, Human
gguacuucaaauccuugaagau

SEQ ID NO: 3146949 - RNA, 12 nt, Human
gguaccuugaac

SEQ ID NO: 3146950 - RNA, 18 nt, Human
gguaccuugaacacuggg

SEQ ID NO: 3146951 - RNA, 21 nt, Human
ggguagccacuggacugacga

SEQ ID NO: 3146952 - RNA, 22 nt, Human
gguagacacacaugaaguccaa

SEQ ID NO: 3146953 - RNA, 15 nt, Human
gguagacacacauga

SEQ ID NO: 3146954 - RNA, 20 nt, Human
guaauuagugccacuuaaug

SEQ ID NO: 3146955 - RNA, 21 nt, Human
guaauuagugccacuuaaugu

SEQ ID NO: 3146956 - RNA, 15 nt, Human
guaauuggaaaggca

SEQ ID NO: 3146957 - RNA, 19 nt, Human
guaaugauaacuggaaacu

SEQ ID NO: 3146958 - RNA, 20 nt, Human
guacagaauucugcuaccuc

SEQ ID NO: 3146959 - RNA, 23 nt, Human
guacacugccuucucaacuccaa

SEQ ID NO: 3146960 - RNA, 15 nt, Human
guagaggagaaacug

SEQ ID NO: 3146961 - RNA, 23 nt, Human
guacuuuauuuucuauaauuuaa

SEQ ID NO: 3146962 - RNA, 15 nt, Human
guacuucaugcuguc

SEQ ID NO: 3146963 - RNA, 15 nt, Human
guaccgcaaugugac

SEQ ID NO: 3146964 - RNA, 18 nt, Human
guaccuugaacacugggg

SEQ ID NO: 3146965 - RNA, 23 nt, Human
guaccuugaacacugggggaggg

SEQ ID NO: 3146966 - RNA, 14 nt, Human
guaccuugaacacu

SEQ ID NO: 3146967 - RNA, 18 nt, Human
gguuuaaagaaaguguau

SEQ ID NO: 3146968 - RNA, 16 nt, Human
gguucagagacucagg

SEQ ID NO: 3146969 - RNA, 14 nt, Human
guaaaaccacagca

SEQ ID NO: 3146970 - RNA, 15 nt, Human
guaaaaccacagcag

SEQ ID NO: 3146971 - RNA, 16 nt, Human
guaaaaccacagcagu

SEQ ID NO: 3146972 - RNA, 18 nt, Human
guaaaaccacagcaguug

SEQ ID NO: 3146973 - RNA, 23 nt, Human
guaaaaccacagcaguugaaaag

SEQ ID NO: 3146974 - RNA, 14 nt, Human
guaaauaggaauug

SEQ ID NO: 3146975 - RNA, 18 nt, Human
guaagggaaacugccagc

SEQ ID NO: 3146976 - RNA, 17 nt, Human
guaagggaaacugccag

SEQ ID NO: 3146977 - RNA, 14 nt, Human
guaacuuuugugaa

SEQ ID NO: 3146978 - RNA, 20 nt, Human
ggaagugacgguuuaauggg

SEQ ID NO: 3146979 - RNA, 23 nt, Human
ggaauuucucccagucauuuaau

SEQ ID NO: 3146980 - RNA, 22 nt, Human
ggaauuucuuaacuucuugcuu

SEQ ID NO: 3146981 - RNA, 18 nt, Human
ggaauuucuuaacuucuu

SEQ ID NO: 3146982 - RNA, 22 nt, Human
ggaauuggagcucgugggacag

SEQ ID NO: 3146983 - RNA, 16 nt, Human
ggaauuggagcucgug

SEQ ID NO: 3146984 - RNA, 14 nt, Human
ggacgcucucuggc

SEQ ID NO: 3146985 - RNA, 13 nt, Human
ggacgcucucugg

SEQ ID NO: 3146986 - RNA, 19 nt, Human
ggagaaucacuugaacccg

SEQ ID NO: 3146987 - RNA, 15 nt, Human
ggagaaucacuugaa

SEQ ID NO: 3146988 - RNA, 14 nt, Human
ggaaaauucauuuu

SEQ ID NO: 3146989 - RNA, 23 nt, Human
ggaaagggauuuucagcccucag

SEQ ID NO: 3146990 - RNA, 17 nt, Human
ggaaaucaaauaugcaa

SEQ ID NO: 3146991 - RNA, 16 nt, Human
ggaaaucaaauaugca

SEQ ID NO: 3146992 - RNA, 19 nt, Human
gcuuagaccucagccugug

SEQ ID NO: 3146993 - RNA, 23 nt, Human
gcuuagaccucagccugugcugc

SEQ ID NO: 3146994 - RNA, 18 nt, Human
gcuuagaccucagccugu

SEQ ID NO: 3146995 - RNA, 21 nt, Human
gcugccaauauccuaauaaaa

SEQ ID NO: 3146996 - RNA, 20 nt, Human
gcugccaauauccuaauaaa

SEQ ID NO: 3146997 - RNA, 20 nt, Human
gcugucuacacuaagagaga

SEQ ID NO: 3146998 - RNA, 23 nt, Human
gcugccaauauccuaauaaaaag

SEQ ID NO: 3146999 - RNA, 19 nt, Human
ggccucggagccucauccg

SEQ ID NO: 3147000 - RNA, 22 nt, Human
ggccucggagccucauccgagg

SEQ ID NO: 3147001 - RNA, 13 nt, Human
ggccucggagccu

SEQ ID NO: 3147002 - RNA, 15 nt, Human
ggccucggagccuca

SEQ ID NO: 3147003 - RNA, 14 nt, Human
ggcccugagcucgg

SEQ ID NO: 3147004 - RNA, 19 nt, Human
ggcccugagcucgguggac

SEQ ID NO: 3147005 - RNA, 21 nt, Human
ggcccugagcucgguggaccc

SEQ ID NO: 3147006 - RNA, 12 nt, Human
ggauuggggaag

SEQ ID NO: 3147007 - RNA, 15 nt, Human
ggauuguaaaauggu

SEQ ID NO: 3147008 - RNA, 18 nt, Human
ggauuggggaagacugug

SEQ ID NO: 3147009 - RNA, 19 nt, Human
ggauuggggaagacugugg

SEQ ID NO: 3147010 - RNA, 14 nt, Human
ggcauggcugggaa

SEQ ID NO: 3147011 - RNA, 11 nt, Human
gcucagccugg

SEQ ID NO: 3147012 - RNA, 14 nt, Human
gcucagccuggugg

SEQ ID NO: 3147013 - RNA, 15 nt, Human
gcucagccugguggg

SEQ ID NO: 3147014 - RNA, 17 nt, Human
gcucagccuggugggcc

SEQ ID NO: 3147015 - RNA, 18 nt, Human
gcucagccuggugggccu

SEQ ID NO: 3147016 - RNA, 19 nt, Human
gcucagccuggugggccuc

SEQ ID NO: 3147017 - RNA, 20 nt, Human
gcucagccuggugggccucc

SEQ ID NO: 3147018 - RNA, 17 nt, Human
gcuaagcaaaaugugau

SEQ ID NO: 3147019 - RNA, 14 nt, Human
gcuaagcauuccaa

SEQ ID NO: 3147020 - RNA, 15 nt, Human
gcugccaauauccua

SEQ ID NO: 3147021 - RNA, 14 nt, Human
gcugccaauauccu

SEQ ID NO: 3147022 - RNA, 19 nt, Human
gcugccaauauccuaauaa

SEQ ID NO: 3147023 - RNA, 18 nt, Human
gcugccaauauccuaaua

SEQ ID NO: 3147024 - RNA, 17 nt, Human
gcugccaauauccuaau

SEQ ID NO: 3147025 - RNA, 16 nt, Human
gcugccaauauccuaa

SEQ ID NO: 3147026 - RNA, 11 nt, Human
gcucucuggcc

SEQ ID NO: 3147027 - RNA, 13 nt, Human
gcucucuggccuu

SEQ ID NO: 3147028 - RNA, 12 nt, Human
gcucucuggccu

SEQ ID NO: 3147029 - RNA, 20 nt, Human
gcucucuggccuucggccuc

SEQ ID NO: 3147030 - RNA, 19 nt, Human
gcucucuggccuucggccu

SEQ ID NO: 3147031 - RNA, 15 nt, Human
gcucucuggccuucg

SEQ ID NO: 3147032 - RNA, 14 nt, Human
gcucucuggccuuc

SEQ ID NO: 3147033 - RNA, 22 nt, Human
gcccucuccugggcagcugccu

SEQ ID NO: 3147034 - RNA, 23 nt, Human
gcccucuccugggcagcugccuc

SEQ ID NO: 3147035 - RNA, 12 nt, Human
gcccucuccugg

SEQ ID NO: 3147036 - RNA, 13 nt, Human
gcccucuccuggg

SEQ ID NO: 3147037 - RNA, 21 nt, Human
gcccucuccugggcagcugcc

SEQ ID NO: 3147038 - RNA, 14 nt, Human
gccucggagccuca

SEQ ID NO: 3147039 - RNA, 15 nt, Human
gccucggagccucau

SEQ ID NO: 3147040 - RNA, 17 nt, Human
gccucggagccucaucc

SEQ ID NO: 3147041 - RNA, 23 nt, Human
gccucggagccucauccgaggca

SEQ ID NO: 3147042 - RNA, 23 nt, Human
gccuccccuccucugcuugccau

SEQ ID NO: 3147043 - RNA, 18 nt, Human
gccucauccgaggcaggg

SEQ ID NO: 3147044 - RNA, 19 nt, Human
gccucauccgaggcagggu

SEQ ID NO: 3147045 - RNA, 16 nt, Human
gccucauccgaggcag

SEQ ID NO: 3147046 - RNA, 17 nt, Human
gccucauccgaggcagg

SEQ ID NO: 3147047 - RNA, 17 nt, Human
gccuaagugcagccccg

SEQ ID NO: 3147048 - RNA, 22 nt, Human
gccuauauuuuuuguuaaauga

SEQ ID NO: 3147049 - RNA, 23 nt, Human
gagccaaggguucagagacucag

SEQ ID NO: 3147050 - RNA, 12 nt, Human
gagccaccaguu

SEQ ID NO: 3147051 - RNA, 19 nt, Human
gagccaaggguucagagac

SEQ ID NO: 3147052 - RNA, 16 nt, Human
gagacaggaccugacu

SEQ ID NO: 3147053 - RNA, 20 nt, Human
gagacagcucugcauacuca

SEQ ID NO: 3147054 - RNA, 20 nt, Human
gagaaugagagacacacuga

SEQ ID NO: 3147055 - RNA, 19 nt, Human
gagagacacacugaagaag

SEQ ID NO: 3147056 - RNA, 22 nt, Human
gacuuaagcaucuggcucuaau

SEQ ID NO: 3147057 - RNA, 20 nt, Human
gacuuaagcaucuggcucua

SEQ ID NO: 3147058 - RNA, 17 nt, Human
gacuucuaaguaaaacc

SEQ ID NO: 3147059 - RNA, 18 nt, Human
gacuucuaaguaaaacca

SEQ ID NO: 3147060 - RNA, 16 nt, Human
gacuucuaaguaaaac

SEQ ID NO: 3147061 - RNA, 19 nt, Human
gacuucuaaguaaaaccac

SEQ ID NO: 3147062 - RNA, 23 nt, Human
gacuucuaaguaaaaccacagca

SEQ ID NO: 3147063 - RNA, 24 nt, Human
gacuucuaaguaaaaccacagcag

SEQ ID NO: 3147064 - RNA, 20 nt, Human
gacuucugucuucacaacag

SEQ ID NO: 3147065 - RNA, 23 nt, Human
gacuucugucuucacaacagauu

SEQ ID NO: 3147066 - RNA, 22 nt, Human
gagaaccuagggugauauuaac

SEQ ID NO: 3147067 - RNA, 21 nt, Human
gagaaccuagggugauauuaa

SEQ ID NO: 3147068 - RNA, 17 nt, Human
gagaaugagagacacac

SEQ ID NO: 3147069 - RNA, 23 nt, Human
gagaacuuccagauccuggaaau

SEQ ID NO: 3147070 - RNA, 22 nt, Human
gagaacuuccagauccuggaaa

SEQ ID NO: 3147071 - RNA, 16 nt, Human
gacugcauuauauuua

SEQ ID NO: 3147072 - RNA, 14 nt, Human
gacugcauuauauu

SEQ ID NO: 3147073 - RNA, 21 nt, Human
gacucauuuuaaaaaauggaa

SEQ ID NO: 3147074 - RNA, 11 nt, Human
gacuccaaaga

SEQ ID NO: 3147075 - RNA, 12 nt, Human
gacuccaaagaa

SEQ ID NO: 3147076 - RNA, 15 nt, Human
gacuccaaagaaaug

SEQ ID NO: 3147077 - RNA, 16 nt, Human
gacuccaaagaaaugu

SEQ ID NO: 3147078 - RNA, 18 nt, Human
gacuagauguaguauuuu

SEQ ID NO: 3147079 - RNA, 17 nt, Human
gacuagauguaguauuu

SEQ ID NO: 3147080 - RNA, 21 nt, Human
gaauugacccacaagaaauga

SEQ ID NO: 3147081 - RNA, 16 nt, Human
gaauugacccacaaga

SEQ ID NO: 3147082 - RNA, 16 nt, Human
gaauuggagcucgugg

SEQ ID NO: 3147083 - RNA, 16 nt, Human
gacaaggaaaaaauaa

SEQ ID NO: 3147084 - RNA, 21 nt, Human
gaauuucuuaacuucuugcuu

SEQ ID NO: 3147085 - RNA, 19 nt, Human
gaauuucuuaacuucuugc

SEQ ID NO: 3147086 - RNA, 14 nt, Human
gaauuucuuaacuu

SEQ ID NO: 3147087 - RNA, 13 nt, Human
gaauuucuuaacu

SEQ ID NO: 3147088 - RNA, 18 nt, Human
gaauuucuuaacuucuug

SEQ ID NO: 3147089 - RNA, 17 nt, Human
gaauuucuuaacuucuu

SEQ ID NO: 3147090 - RNA, 16 nt, Human
gaauuucuuaacuucu

SEQ ID NO: 3147091 - RNA, 15 nt, Human
gaauuucuuaacuuc

SEQ ID NO: 3147092 - RNA, 15 nt, Human
gacaagcucacagac

SEQ ID NO: 3147093 - RNA, 18 nt, Human
gaccacugcagaagacag

SEQ ID NO: 3147094 - RNA, 21 nt, Human
gaccacugcagaagacaguau

SEQ ID NO: 3147095 - RNA, 16 nt, Human
gacaugggacauuugc

SEQ ID NO: 3147096 - RNA, 15 nt, Human
gacccacaagaaaug

SEQ ID NO: 3147097 - RNA, 16 nt, Human
gacccaaaaggcagaa

SEQ ID NO: 3147098 - RNA, 20 nt, Human
gacccaaaaggcagaagcaa

SEQ ID NO: 3147099 - RNA, 20 nt, Human
gacauagaauuaacacauga

SEQ ID NO: 3147100 - RNA, 17 nt, Human
gacagggaggacgcucu

SEQ ID NO: 3147101 - RNA, 18 nt, Human
gacagggaggacgcucuc

SEQ ID NO: 3147102 - RNA, 13 nt, Human
gacagggacccac

SEQ ID NO: 3147103 - RNA, 19 nt, Human
gacagggacccacuucaca

SEQ ID NO: 3147104 - RNA, 19 nt, Human
gacaccaggagucccuggu

SEQ ID NO: 3147105 - RNA, 20 nt, Human
gacaccaggagucccuggua

SEQ ID NO: 3147106 - RNA, 16 nt, Human
gaguuacaguucugug

SEQ ID NO: 3147107 - RNA, 15 nt, Human
gaguuacaguucugu

SEQ ID NO: 3147108 - RNA, 14 nt, Human
gaguuacaguucug

SEQ ID NO: 3147109 - RNA, 13 nt, Human
gaguuacaguucu

SEQ ID NO: 3147110 - RNA, 23 nt, Human
gagugaacaaauuuacagagaca

SEQ ID NO: 3147111 - RNA, 14 nt, Human
gaguaauuuauugu

SEQ ID NO: 3147112 - RNA, 19 nt, Human
gaggcagacagcagcucag

SEQ ID NO: 3147113 - RNA, 20 nt, Human
gaggcagacagcagcucagg

SEQ ID NO: 3147114 - RNA, 21 nt, Human
gaggcagacagcagcucaggc

SEQ ID NO: 3147115 - RNA, 22 nt, Human
gaggcagacagcagcucaggca

SEQ ID NO: 3147116 - RNA, 12 nt, Human
gagcccugucuc

SEQ ID NO: 3147117 - RNA, 15 nt, Human
gaggguuagggaggg

SEQ ID NO: 3147118 - RNA, 15 nt, Human
gcacugacuucuaag

SEQ ID NO: 3147119 - RNA, 18 nt, Human
gcacugacuucuaaguaa

SEQ ID NO: 3147120 - RNA, 21 nt, Human
gcagacagcagcucaggcaca

SEQ ID NO: 3147121 - RNA, 13 nt, Human
gcagacagcagcu

SEQ ID NO: 3147122 - RNA, 14 nt, Human
gcagacagcagcuc

SEQ ID NO: 3147123 - RNA, 16 nt, Human
gcagacagcagcucag

SEQ ID NO: 3147124 - RNA, 17 nt, Human
gcagacagcagcucagg

SEQ ID NO: 3147125 - RNA, 18 nt, Human
gcagacagcagcucaggc

SEQ ID NO: 3147126 - RNA, 19 nt, Human
gcagacagcagcucaggca

SEQ ID NO: 3147127 - RNA, 20 nt, Human
gcagacagcagcucaggcac

SEQ ID NO: 3147128 - RNA, 12 nt, Human
gcacacuguagc

SEQ ID NO: 3147129 - RNA, 13 nt, Human
gcacacugucugc

SEQ ID NO: 3147130 - RNA, 20 nt, Human
gauuggggaagacuguggcu

SEQ ID NO: 3147131 - RNA, 13 nt, Human
gauuuccuaauac

SEQ ID NO: 3147132 - RNA, 16 nt, Human
gcaaauugucacagga

SEQ ID NO: 3147133 - RNA, 20 nt, Human
gaugcuagaacucccuuuca

SEQ ID NO: 3147134 - RNA, 18 nt, Human
gaugcuagaacucccuuu

SEQ ID NO: 3147135 - RNA, 19 nt, Human
gauguugaaaaaguucugc

SEQ ID NO: 3147136 - RNA, 23 nt, Human
cuugucaauaaaauccauacauu

SEQ ID NO: 3147137 - RNA, 19 nt, Human
cuugaguuuaaauuguaau

SEQ ID NO: 3147138 - RNA, 18 nt, Human
gaaaauauuuguaucaca

SEQ ID NO: 3147139 - RNA, 22 nt, Human
gaaaaucuacacuccagugaga

SEQ ID NO: 3147140 - RNA, 18 nt, Human
gaaaaucuuauaauuuaa

SEQ ID NO: 3147141 - RNA, 23 nt, Human
gaaacucguuaauuuguaguguu

SEQ ID NO: 3147142 - RNA, 14 nt, Human
gaaacccugucucu

SEQ ID NO: 3147143 - RNA, 16 nt, Human
gaaacacaacuauauu

SEQ ID NO: 3147144 - RNA, 11 nt, Human
gaaacauuugg

SEQ ID NO: 3147145 - RNA, 17 nt, Human
gaaagcagaacagugau

SEQ ID NO: 3147146 - RNA, 14 nt, Human
gaaagcagaacagu

SEQ ID NO: 3147147 - RNA, 22 nt, Human
gaaagcagaacagugauuacca

SEQ ID NO: 3147148 - RNA, 17 nt, Human
gaaagagaacuuccaga

SEQ ID NO: 3147149 - RNA, 20 nt, Human
gaaagaggcagcuugaaacu

SEQ ID NO: 3147150 - RNA, 21 nt, Human
gaaagaggaaugaaguacuca

SEQ ID NO: 3147151 - RNA, 18 nt, Human
gaaagagaaacaguuggu

SEQ ID NO: 3147152 - RNA, 14 nt, Human
gaaagcagggacuu

SEQ ID NO: 3147153 - RNA, 20 nt, Human
cuuagaugcaguucugaaga

SEQ ID NO: 3147154 - RNA, 22 nt, Human
cuuagaugcaguucugaagaag

SEQ ID NO: 3147155 - RNA, 15 nt, Human
cuuaguguaugauua

SEQ ID NO: 3147156 - RNA, 11 nt, Human
cuuaguguaug

SEQ ID NO: 3147157 - RNA, 22 nt, Human
cuucacacacaggcaacugagg

SEQ ID NO: 3147158 - RNA, 21 nt, Human
cuucacacacaggcaacugag

SEQ ID NO: 3147159 - RNA, 13 nt, Human
cuuauuuauuauu

SEQ ID NO: 3147160 - RNA, 14 nt, Human
cuuauuucauuucu

SEQ ID NO: 3147161 - RNA, 15 nt, Human
cuuauuucauuucuu

SEQ ID NO: 3147162 - RNA, 15 nt, Human
cuuauuuccucauuu

SEQ ID NO: 3147163 - RNA, 14 nt, Human
cuucucuccagcug

SEQ ID NO: 3147164 - RNA, 16 nt, Human
cuucucuccagcugac

SEQ ID NO: 3147165 - RNA, 15 nt, Human
cuucucuccagcuga

SEQ ID NO: 3147166 - RNA, 19 nt, Human
cuucucuccagcugacuaa

SEQ ID NO: 3147167 - RNA, 18 nt, Human
cuucucuccagcugacua

SEQ ID NO: 3147168 - RNA, 17 nt, Human
cuucucuccagcugacu

SEQ ID NO: 3147169 - RNA, 18 nt, Human
cuucugucuucacaacag

SEQ ID NO: 3147170 - RNA, 21 nt, Human
cuucugucuucacaacagauu

SEQ ID NO: 3147171 - RNA, 22 nt, Human
cuucugucuucacaacagauua

SEQ ID NO: 3147172 - RNA, 13 nt, Human
cuugaacacuggg

SEQ ID NO: 3147173 - RNA, 15 nt, Human
cuugaacacuggggg

SEQ ID NO: 3147174 - RNA, 16 nt, Human
cuugaacacuggggga

SEQ ID NO: 3147175 - RNA, 20 nt, Human
cuucuuggucuuauuuauua

SEQ ID NO: 3147176 - RNA, 16 nt, Human
cuucuuggucuuauuu

SEQ ID NO: 3147177 - RNA, 21 nt, Human
cuucuugcuucuuucuagaaa

SEQ ID NO: 3147178 - RNA, 20 nt, Human
cuucuugcuucuuucuagaa

SEQ ID NO: 3147179 - RNA, 20 nt, Human
cuguuaaaagaugaaaauau

SEQ ID NO: 3147180 - RNA, 21 nt, Human
cuguuaaaagaugaaaauauu

SEQ ID NO: 3147181 - RNA, 23 nt, Human
cuguuaaaagaugaaaauauuug

SEQ ID NO: 3147182 - RNA, 17 nt, Human
cugucucaccuggacuu

SEQ ID NO: 3147183 - RNA, 14 nt, Human
cugucucaccugga

SEQ ID NO: 3147184 - RNA, 12 nt, Human
cugucucaccug

SEQ ID NO: 3147185 - RNA, 17 nt, Human
cuguggcugcuagcacu

SEQ ID NO: 3147186 - RNA, 18 nt, Human
cuguggcagaguuacagu

SEQ ID NO: 3147187 - RNA, 17 nt, Human
cuguggcagaguuacag

SEQ ID NO: 3147188 - RNA, 23 nt, Human
cuguggcagaguuacaguucugu

SEQ ID NO: 3147189 - RNA, 22 nt, Human
cuguggcagaguuacaguucug

SEQ ID NO: 3147190 - RNA, 19 nt, Human
cuguggcagaguuacaguu

SEQ ID NO: 3147191 - RNA, 23 nt, Human
cuguauccagguucccucccaga

SEQ ID NO: 3147192 - RNA, 19 nt, Human
cuguauuuuaaaagaauga

SEQ ID NO: 3147193 - RNA, 20 nt, Human
cuguauuuuaaaagaaugau

SEQ ID NO: 3147194 - RNA, 22 nt, Human
cuguauuuuaaaagaaugauua

SEQ ID NO: 3147195 - RNA, 20 nt, Human
cugucuacacuaagagagaa

SEQ ID NO: 3147196 - RNA, 19 nt, Human
cuguccagggcccugagcu

SEQ ID NO: 3147197 - RNA, 20 nt, Human
cuguccagggcccugagcuc

SEQ ID NO: 3147198 - RNA, 22 nt, Human
cuguccagggcccugagcucgg

SEQ ID NO: 3147199 - RNA, 23 nt, Human
cuguccagggcccugagcucggu

SEQ ID NO: 3147200 - RNA, 18 nt, Human
cuguccagggcccugagc

SEQ ID NO: 3147201 - RNA, 23 nt, Human
cuguaaucacagcuacuugggag

SEQ ID NO: 3147202 - RNA, 22 nt, Human
cuguaauaaacucauuucuagc

SEQ ID NO: 3147203 - RNA, 22 nt, Human
cugggggggauuguaaaauggu

SEQ ID NO: 3147204 - RNA, 19 nt, Human
cugggguccuggggccucg

SEQ ID NO: 3147205 - RNA, 15 nt, Human
cugggguccuggggc

SEQ ID NO: 3147206 - RNA, 18 nt, Human
cugggguccuggggccuc

SEQ ID NO: 3147207 - RNA, 18 nt, Human
cugcugaaacaacaaaua

SEQ ID NO: 3147208 - RNA, 15 nt, Human
cugcccuagagcaca

SEQ ID NO: 3147209 - RNA, 19 nt, Human
cugcccuagagcacacugu

SEQ ID NO: 3147210 - RNA, 21 nt, Human
cugcccuagagcacacuguag

SEQ ID NO: 3147211 - RNA, 15 nt, Human
cugcccucuccuggg

SEQ ID NO: 3147212 - RNA, 16 nt, Human
cugcccucuccugggc

SEQ ID NO: 3147213 - RNA, 18 nt, Human
cugcccucuccugggcag

SEQ ID NO: 3147214 - RNA, 19 nt, Human
cugcccucuccugggcagc

SEQ ID NO: 3147215 - RNA, 20 nt, Human
cugcccucuccugggcagcu

SEQ ID NO: 3147216 - RNA, 21 nt, Human
cugcccucuccugggcagcug

SEQ ID NO: 3147217 - RNA, 13 nt, Human
cugccuccccucc

SEQ ID NO: 3147218 - RNA, 16 nt, Human
cuggagcucugcccau

SEQ ID NO: 3147219 - RNA, 13 nt, Human
cuggagcucugcc

SEQ ID NO: 3147220 - RNA, 12 nt, Human
cuggagcucugc

SEQ ID NO: 3147221 - RNA, 20 nt, Human
cuggcacaguuuucugagaa

SEQ ID NO: 3147222 - RNA, 21 nt, Human
cuggcacaguuuucugagaaa

SEQ ID NO: 3147223 - RNA, 22 nt, Human
cuggcacaguuuucugagaaag

SEQ ID NO: 3147224 - RNA, 23 nt, Human
cuggccuucggccuccauccuga

SEQ ID NO: 3147225 - RNA, 22 nt, Human
cuggccuucggccuccauccug

SEQ ID NO: 3147226 - RNA, 15 nt, Human
ccagggcccugagcu

SEQ ID NO: 3147227 - RNA, 18 nt, Human
ccagggcccugagcucgg

SEQ ID NO: 3147228 - RNA, 20 nt, Human
ccagguagaggguguguaag

SEQ ID NO: 3147229 - RNA, 12 nt, Human
ccaggugccagu

SEQ ID NO: 3147230 - RNA, 18 nt, Human
ccauccugaggcuccacu

SEQ ID NO: 3147231 - RNA, 20 nt, Human
ccauccugaggcuccacuug

SEQ ID NO: 3147232 - RNA, 16 nt, Human
ccauccugaggcucca

SEQ ID NO: 3147233 - RNA, 19 nt, Human
ccagccugagcgacaguga

SEQ ID NO: 3147234 - RNA, 15 nt, Human
ccacugguucuucuu

SEQ ID NO: 3147235 - RNA, 14 nt, Human
ccagacaucaacag

SEQ ID NO: 3147236 - RNA, 19 nt, Human
ccagacauguggugggaca

SEQ ID NO: 3147237 - RNA, 23 nt, Human
ccagacauguggugggacaggga

SEQ ID NO: 3147238 - RNA, 15 nt, Human
ccaccucccugcaau

SEQ ID NO: 3147239 - RNA, 14 nt, Human
ccaccucccugcaa

SEQ ID NO: 3147240 - RNA, 19 nt, Human
ccaccucccugcaauaaaa

SEQ ID NO: 3147241 - RNA, 21 nt, Human
ccaccucccugcaauaaaaug

SEQ ID NO: 3147242 - RNA, 18 nt, Human
ccccagacuagauguagu

SEQ ID NO: 3147243 - RNA, 15 nt, Human
ccccagacuagaugu

SEQ ID NO: 3147244 - RNA, 15 nt, Human
ccccucggagaagag

SEQ ID NO: 3147245 - RNA, 13 nt, Human
ccccuccucugcu

SEQ ID NO: 3147246 - RNA, 14 nt, Human
ccccuccucugcuu

SEQ ID NO: 3147247 - RNA, 17 nt, Human
ccccuccucugcuugcc

SEQ ID NO: 3147248 - RNA, 20 nt, Human
ccguuggggauuggggaaga

SEQ ID NO: 3147249 - RNA, 14 nt, Human
ccgcuccugucugc

SEQ ID NO: 3147250 - RNA, 15 nt, Human
ccgcuccugucugcc

SEQ ID NO: 3147251 - RNA, 17 nt, Human
ccgcuccugucugccag

SEQ ID NO: 3147252 - RNA, 20 nt, Human
cccucuccugggcagcugcc

SEQ ID NO: 3147253 - RNA, 15 nt, Human
cccucuccugggcag

SEQ ID NO: 3147254 - RNA, 21 nt, Human
cccucuccugggcagcugccu

SEQ ID NO: 3147255 - RNA, 22 nt, Human
cccucuccugggcagcugccuc

SEQ ID NO: 3147256 - RNA, 23 nt, Human
cccucuccugggcagcugccucc

SEQ ID NO: 3147257 - RNA, 16 nt, Human
cccuccccugcccuag

SEQ ID NO: 3147258 - RNA, 13 nt, Human
cccuugccagaca

SEQ ID NO: 3147259 - RNA, 12 nt, Human
cccuugcccagg

SEQ ID NO: 3147260 - RNA, 15 nt, Human
cccuugccagacaug

SEQ ID NO: 3147261 - RNA, 23 nt, Human
cccuugcccagggcucagccugg

SEQ ID NO: 3147262 - RNA, 21 nt, Human
cccuugcccagggcucagccu

SEQ ID NO: 3147263 - RNA, 22 nt, Human
cccuugcccagggcucagccug

SEQ ID NO: 3147264 - RNA, 14 nt, Human
cccuugcccagggc

SEQ ID NO: 3147265 - RNA, 15 nt, Human
cccuugcccagggcu

SEQ ID NO: 3147266 - RNA, 19 nt, Human
cccuugcccagggcucagc

SEQ ID NO: 3147267 - RNA, 20 nt, Human
cccuugcccagggcucagcc

SEQ ID NO: 3147268 - RNA, 19 nt, Human
cccuuaugcgguuaauuuu

SEQ ID NO: 3147269 - RNA, 16 nt, Human
ccuuguauuuaaauau

SEQ ID NO: 3147270 - RNA, 18 nt, Human
ccuucggccuccauccug

SEQ ID NO: 3147271 - RNA, 17 nt, Human
ccuucggccuccauccu

SEQ ID NO: 3147272 - RNA, 16 nt, Human
ccuucggccuccaucc

SEQ ID NO: 3147273 - RNA, 15 nt, Human
ccuuggacucauuuu

SEQ ID NO: 3147274 - RNA, 13 nt, Human
ccuuguauuuaaa

SEQ ID NO: 3147275 - RNA, 14 nt, Human
ccuuguauuuaaau

SEQ ID NO: 3147276 - RNA, 23 nt, Human
cgggaaggaggguuagggagggg

SEQ ID NO: 3147277 - RNA, 12 nt, Human
cgggaaggaggg

SEQ ID NO: 3147278 - RNA, 14 nt, Human
cgggaaggaggguu

SEQ ID NO: 3147279 - RNA, 14 nt, Human
cgaggcagggucag

SEQ ID NO: 3147280 - RNA, 22 nt, Human
cgaggcagggucaggagagggg

SEQ ID NO: 3147281 - RNA, 15 nt, Human
ccugagcucggugga

SEQ ID NO: 3147282 - RNA, 16 nt, Human
ccugagcucgguggac

SEQ ID NO: 3147283 - RNA, 18 nt, Human
ccugagcucgguggaccc

SEQ ID NO: 3147284 - RNA, 19 nt, Human
ccugagcucgguggaccca

SEQ ID NO: 3147285 - RNA, 20 nt, Human
ccugagcucgguggacccag

SEQ ID NO: 3147286 - RNA, 21 nt, Human
ccugagcucgguggacccagg

SEQ ID NO: 3147287 - RNA, 22 nt, Human
ccugagcucgguggacccaggg

SEQ ID NO: 3147288 - RNA, 14 nt, Human
ccugaggcuccacu

SEQ ID NO: 3147289 - RNA, 13 nt, Human
ccugaggcuccac

SEQ ID NO: 3147290 - RNA, 18 nt, Human
ccugcccuagagcacacu

SEQ ID NO: 3147291 - RNA, 19 nt, Human
ccugcccuagagcacacug

SEQ ID NO: 3147292 - RNA, 22 nt, Human
ccugcccuagagcacacuguag

SEQ ID NO: 3147293 - RNA, 24 nt, Human
ccugcccuagagcacacuguagca

SEQ ID NO: 3147294 - RNA, 17 nt, Human
ccugccccugagcccau

SEQ ID NO: 3147295 - RNA, 13 nt, Human
ccugggcagcugc

SEQ ID NO: 3147296 - RNA, 17 nt, Human
cucauuuccaagcaagu

SEQ ID NO: 3147297 - RNA, 12 nt, Human
cucauuuccaag

SEQ ID NO: 3147298 - RNA, 14 nt, Human
cucauuuccaagca

SEQ ID NO: 3147299 - RNA, 13 nt, Human
cucauuuccaagc

SEQ ID NO: 3147300 - RNA, 23 nt, Human
cucauuuuuauaaugucccuuca

SEQ ID NO: 3147301 - RNA, 14 nt, Human
cuccccucggagaa

SEQ ID NO: 3147302 - RNA, 20 nt, Human
cuccagcugacuaaacuuuu

SEQ ID NO: 3147303 - RNA, 22 nt, Human
cucaggaaaucaaauaugcaaa

SEQ ID NO: 3147304 - RNA, 18 nt, Human
cucagggccccagcacua

SEQ ID NO: 3147305 - RNA, 14 nt, Human
cucagggccccagc

SEQ ID NO: 3147306 - RNA, 16 nt, Human
cucagggccccagcac

SEQ ID NO: 3147307 - RNA, 12 nt, Human
cucagggcccca

SEQ ID NO: 3147308 - RNA, 13 nt, Human
cucagggccccag

SEQ ID NO: 3147309 - RNA, 21 nt, Human
cucagaugcacaugagcuggc

SEQ ID NO: 3147310 - RNA, 22 nt, Human
cucacugggguccuggggccuc

SEQ ID NO: 3147311 - RNA, 17 nt, Human
cucacugggguccuggg

SEQ ID NO: 3147312 - RNA, 20 nt, Human
cucacugggguccuggggcc

SEQ ID NO: 3147313 - RNA, 17 nt, Human
cuaccucacuggggucc

SEQ ID NO: 3147314 - RNA, 18 nt, Human
cuagaguuuagcuggaaa

SEQ ID NO: 3147315 - RNA, 19 nt, Human
cuagaguuuagcuggaaaa

SEQ ID NO: 3147316 - RNA, 20 nt, Human
cuaggaaauauuuauuuuaa

SEQ ID NO: 3147317 - RNA, 19 nt, Human
cuaggaaauauuuauuuua

SEQ ID NO: 3147318 - RNA, 15 nt, Human
cuaggaaauauuuau

SEQ ID NO: 3147319 - RNA, 14 nt, Human
cuaggaaauauuua

SEQ ID NO: 3147320 - RNA, 19 nt, Human
cuauuaucugucagcugca

SEQ ID NO: 3147321 - RNA, 14 nt, Human
cuaugauuauuaac

SEQ ID NO: 3147322 - RNA, 19 nt, Human
cuaugaaauauuauguuaa

SEQ ID NO: 3147323 - RNA, 18 nt, Human
cuaugaaauauuauguua

SEQ ID NO: 3147324 - RNA, 12 nt, Human
cuauaauuuaaa

SEQ ID NO: 3147325 - RNA, 23 nt, Human
cuaagauuacaaaucagaaguca

SEQ ID NO: 3147326 - RNA, 22 nt, Human
cuaagauuacaaaucagaaguc

SEQ ID NO: 3147327 - RNA, 21 nt, Human
cuaagauuacaaaucagaagu

SEQ ID NO: 3147328 - RNA, 19 nt, Human
cuaagauuacaaaucagaa

SEQ ID NO: 3147329 - RNA, 21 nt, Human
cuaagcuucacuguaaaauaa

SEQ ID NO: 3147330 - RNA, 21 nt, Human
cuaauagaauaaaggcaguuu

SEQ ID NO: 3147331 - RNA, 20 nt, Human
cuaauagaauaaaggcaguu

SEQ ID NO: 3147332 - RNA, 23 nt, Human
cuaauagaauaaaggcaguuuuc

SEQ ID NO: 3147333 - RNA, 14 nt, Human
cuaaguaaaaccac

SEQ ID NO: 3147334 - RNA, 18 nt, Human
cuaaguaaaaccacagca

SEQ ID NO: 3147335 - RNA, 19 nt, Human
cuaaguaaaaccacagcag

SEQ ID NO: 3147336 - RNA, 22 nt, Human
cuaauucacagugcucuuuucu

SEQ ID NO: 3147337 - RNA, 16 nt, Human
cuaauucacagugcuc

SEQ ID NO: 3147338 - RNA, 15 nt, Human
cuaauucacagugcu

SEQ ID NO: 3147339 - RNA, 14 nt, Human
cuacacuaagagag

SEQ ID NO: 3147340 - RNA, 23 nt, Human
cuacacgagauacagaauuuuau

SEQ ID NO: 3147341 - RNA, 22 nt, Human
cuacaccccuccccugcccuag

SEQ ID NO: 3147342 - RNA, 18 nt, Human
cuaauucaaggaauuucu

SEQ ID NO: 3147343 - RNA, 16 nt, Human
cuaauucaaggaauuu

SEQ ID NO: 3147344 - RNA, 20 nt, Human
cuaauucaaggaauuucuua

SEQ ID NO: 3147345 - RNA, 20 nt, Human
cgggaggcagagguugcagu

SEQ ID NO: 3147346 - RNA, 22 nt, Human
cuaacagcccuccucugcacuc

SEQ ID NO: 3147347 - RNA, 21 nt, Human
cuaacagcccuccucugcacu

SEQ ID NO: 3147348 - RNA, 12 nt, Human
cuaacagcccuc

SEQ ID NO: 3147349 - RNA, 19 nt, Human
cuaaauugacacuuaaaaa

SEQ ID NO: 3147350 - RNA, 15 nt, Human
cuaagagagaaugag

SEQ ID NO: 3147351 - RNA, 14 nt, Human
cuaagagagaauga

SEQ ID NO: 3147352 - RNA, 23 nt, Human
uugugaauuaggcuguaacuacu

SEQ ID NO: 3147353 - RNA, 19 nt, Human
uugugaauuaggcuguaac

SEQ ID NO: 3147354 - RNA, 18 nt, Human
uugugaauuaggcuguaa

SEQ ID NO: 3147355 - RNA, 20 nt, Human
uugucaauaaaauccauaca

SEQ ID NO: 3147356 - RNA, 16 nt, Human
uugucacuuuuucuga

SEQ ID NO: 3147357 - RNA, 14 nt, Human
uugucacuuuuucu

SEQ ID NO: 3147358 - RNA, 15 nt, Human
augagguacugagag

SEQ ID NO: 3147359 - RNA, 18 nt, Human
augagguacugagaguga

SEQ ID NO: 3147360 - RNA, 17 nt, Human
augagguacugagagug

SEQ ID NO: 3147361 - RNA, 13 nt, Human
augauuucauuca

SEQ ID NO: 3147362 - RNA, 18 nt, Human
uuuaaaaaaauuccaagu

SEQ ID NO: 3147363 - RNA, 12 nt, Human
augcaaagcacu

SEQ ID NO: 3147364 - RNA, 13 nt, Human
augcaaagcacug

SEQ ID NO: 3147365 - RNA, 14 nt, Human
augcaaagcacuga

SEQ ID NO: 3147366 - RNA, 21 nt, Human
uuuaaauauaugcuaagucuu

SEQ ID NO: 3147367 - RNA, 18 nt, Human
uuuaaauauaugcuaagu

SEQ ID NO: 3147368 - RNA, 19 nt, Human
uuuauaugcuucuguuuua

SEQ ID NO: 3147369 - RNA, 21 nt, Human
uuuauaugcuucuguuuuaua

SEQ ID NO: 3147370 - RNA, 17 nt, Human
uuuacuccguaacagau

SEQ ID NO: 3147371 - RNA, 15 nt, Human
uuuaccuaagauuac

SEQ ID NO: 3147372 - RNA, 14 nt, Human
augccuuuucccaa

SEQ ID NO: 3147373 - RNA, 22 nt, Human
augccuuuucccaacuccagaa

SEQ ID NO: 3147374 - RNA, 20 nt, Human
augccuuuucccaacuccag

SEQ ID NO: 3147375 - RNA, 18 nt, Human
augcuacaggauuugaaa

SEQ ID NO: 3147376 - RNA, 22 nt, Human
augcuguauuuuaaaagaauga

SEQ ID NO: 3147377 - RNA, 19 nt, Human
augcuguauuuuaaaagaa

SEQ ID NO: 3147378 - RNA, 23 nt, Human
augcuguauuuuaaaagaaugau

SEQ ID NO: 3147379 - RNA, 17 nt, Human
uuucaaacauauauaac

SEQ ID NO: 3147380 - RNA, 19 nt, Human
uuucaaacauauauaacaa

SEQ ID NO: 3147381 - RNA, 20 nt, Human
uuucacgccugaggcaauua

SEQ ID NO: 3147382 - RNA, 14 nt, Human
aucuuauaauuuaa

SEQ ID NO: 3147383 - RNA, 15 nt, Human
aucuuauaauuuaaa

SEQ ID NO: 3147384 - RNA, 15 nt, Human
uuggagaagaacuga

SEQ ID NO: 3147385 - RNA, 22 nt, Human
uuggagaagaacugaaaucaua

SEQ ID NO: 3147386 - RNA, 17 nt, Human
uuggagaagaacugaaa

SEQ ID NO: 3147387 - RNA, 12 nt, Human
aucuuuaaaaua

SEQ ID NO: 3147388 - RNA, 15 nt, Human
aucuuuaaaauacac

SEQ ID NO: 3147389 - RNA, 14 nt, Human
uuggguaggcggga

SEQ ID NO: 3147390 - RNA, 14 nt, Human
uuggcccaggaguu

SEQ ID NO: 3147391 - RNA, 13 nt, Human
uuggcccaggagu

SEQ ID NO: 3147392 - RNA, 22 nt, Human
uuggcccaggaguuuggccaga

SEQ ID NO: 3147393 - RNA, 21 nt, Human
uuggcccaggaguuuggccag

SEQ ID NO: 3147394 - RNA, 20 nt, Human
uuggcccaggaguuuggcca

SEQ ID NO: 3147395 - RNA, 15 nt, Human
uuggcccaggaguuu

SEQ ID NO: 3147396 - RNA, 18 nt, Human
augaacuuguaaaggaau

SEQ ID NO: 3147397 - RNA, 22 nt, Human
aucuaccccagacuagauguag

SEQ ID NO: 3147398 - RNA, 21 nt, Human
aucuaccccagacuagaugua

SEQ ID NO: 3147399 - RNA, 20 nt, Human
aucuaccccagacuagaugu

SEQ ID NO: 3147400 - RNA, 14 nt, Human
aucuaccccagacu

SEQ ID NO: 3147401 - RNA, 19 nt, Human
aucucaaaacugcacuguc

SEQ ID NO: 3147402 - RNA, 20 nt, Human
aucucaaaacugcacuguca

SEQ ID NO: 3147403 - RNA, 15 nt, Human
aucucaaaacugcac

SEQ ID NO: 3147404 - RNA, 12 nt, Human
uugacuuuuuau

SEQ ID NO: 3147405 - RNA, 13 nt, Human
uugacaugggaca

SEQ ID NO: 3147406 - RNA, 17 nt, Human
uugcccagggcucagcc

SEQ ID NO: 3147407 - RNA, 18 nt, Human
uugcccagggcucagccu

SEQ ID NO: 3147408 - RNA, 19 nt, Human
uugcccagggcucagccug

SEQ ID NO: 3147409 - RNA, 20 nt, Human
uugcccagggcucagccugg

SEQ ID NO: 3147410 - RNA, 18 nt, Human
uucucaacuccaaacuga

SEQ ID NO: 3147411 - RNA, 14 nt, Human
uucucaacuccaaa

SEQ ID NO: 3147412 - RNA, 20 nt, Human
aucauuucugcaucagcugc

SEQ ID NO: 3147413 - RNA, 21 nt, Human
uucuguaccaguuaauuuuuc

SEQ ID NO: 3147414 - RNA, 21 nt, Human
aucccucccuccaccucccug

SEQ ID NO: 3147415 - RNA, 23 nt, Human
aucccucccuccaccucccugca

SEQ ID NO: 3147416 - RNA, 11 nt, Human
aucccucccuc

SEQ ID NO: 3147417 - RNA, 13 nt, Human
aucccucccucca

SEQ ID NO: 3147418 - RNA, 14 nt, Human
uucuguaccaguua

SEQ ID NO: 3147419 - RNA, 13 nt, Human
uucuguaccaguu

SEQ ID NO: 3147420 - RNA, 12 nt, Human
uucuguaccagu

SEQ ID NO: 3147421 - RNA, 11 nt, Human
uucuguaccag

SEQ ID NO: 3147422 - RNA, 13 nt, Human
uucugaagaagau

SEQ ID NO: 3147423 - RNA, 12 nt, Human
uucugaagaaga

SEQ ID NO: 3147424 - RNA, 23 nt, Human
uucugcaucagcugcugaaacaa

SEQ ID NO: 3147425 - RNA, 16 nt, Human
uucugcaucagcugcu

SEQ ID NO: 3147426 - RNA, 19 nt, Human
auauuugaaauauugacuu

SEQ ID NO: 3147427 - RNA, 14 nt, Human
auauuugaaauauu

SEQ ID NO: 3147428 - RNA, 23 nt, Human
auauuugaaauauugacuuuuua

SEQ ID NO: 3147429 - RNA, 12 nt, Human
auauuuuaacuu

SEQ ID NO: 3147430 - RNA, 22 nt, Human
auauuuguaucacaaaucuuaa

SEQ ID NO: 3147431 - RNA, 13 nt, Human
auauuugaaauau

SEQ ID NO: 3147432 - RNA, 23 nt, Human
auauuaaauauguuagcaaagag

SEQ ID NO: 3147433 - RNA, 22 nt, Human
uucauguuaguuaccuuauagu

SEQ ID NO: 3147434 - RNA, 18 nt, Human
uucauguuaguuaccuua

SEQ ID NO: 3147435 - RNA, 16 nt, Human
uucauguuaguuaccu

SEQ ID NO: 3147436 - RNA, 13 nt, Human
uucauguuaguua

SEQ ID NO: 3147437 - RNA, 19 nt, Human
aucaauuuuucuuauuuca

SEQ ID NO: 3147438 - RNA, 17 nt, Human
uuauuguuuaaaaucau

SEQ ID NO: 3147439 - RNA, 12 nt, Human
uuauuuaaauga

SEQ ID NO: 3147440 - RNA, 18 nt, Human
auagcuacuaauuuuaaa

SEQ ID NO: 3147441 - RNA, 22 nt, Human
auagcucuggggugggcaguuu

SEQ ID NO: 3147442 - RNA, 19 nt, Human
auagcucuggggugggcag

SEQ ID NO: 3147443 - RNA, 13 nt, Human
auagcucuggggu

SEQ ID NO: 3147444 - RNA, 12 nt, Human
auagcucugggg

SEQ ID NO: 3147445 - RNA, 17 nt, Human
auagcuacuaauuuuaa

SEQ ID NO: 3147446 - RNA, 14 nt, Human
auagcuacuaauuu

SEQ ID NO: 3147447 - RNA, 15 nt, Human
uucacagugcucuuu

SEQ ID NO: 3147448 - RNA, 21 nt, Human
auaggaauugacccacaagaa

SEQ ID NO: 3147449 - RNA, 19 nt, Human
uucaaggaauuucuuaacu

SEQ ID NO: 3147450 - RNA, 17 nt, Human
uucaaggaauuucuuaa

SEQ ID NO: 3147451 - RNA, 16 nt, Human
uucaaggaauuucuua

SEQ ID NO: 3147452 - RNA, 15 nt, Human
uucaaacauauauaa

SEQ ID NO: 3147453 - RNA, 14 nt, Human
uucaaacauauaua

SEQ ID NO: 3147454 - RNA, 16 nt, Human
auaugcaaagcacuga

SEQ ID NO: 3147455 - RNA, 15 nt, Human
auaugcaaagcacug

SEQ ID NO: 3147456 - RNA, 23 nt, Human
auaugcaaagcacugacuucuaa

SEQ ID NO: 3147457 - RNA, 23 nt, Human
auaucuaccccagacuagaugua

SEQ ID NO: 3147458 - RNA, 21 nt, Human
auaucuaccccagacuagaug

SEQ ID NO: 3147459 - RNA, 23 nt, Human
uucagccuagccgaccucagccu

SEQ ID NO: 3147460 - RNA, 20 nt, Human
uucagccuagccgaccucag

SEQ ID NO: 3147461 - RNA, 21 nt, Human
uucagccuagccgaccucagc

SEQ ID NO: 3147462 - RNA, 22 nt, Human
uucagccuagccgaccucagcc

SEQ ID NO: 3147463 - RNA, 15 nt, Human
uucagcccucagaau

SEQ ID NO: 3147464 - RNA, 18 nt, Human
auauauaacaaugcugua

SEQ ID NO: 3147465 - RNA, 17 nt, Human
auauauaacaaugcugu

SEQ ID NO: 3147466 - RNA, 14 nt, Human
auauauaacaaugc

SEQ ID NO: 3147467 - RNA, 19 nt, Human
auauaagcuuguauuccuu

SEQ ID NO: 3147468 - RNA, 15 nt, Human
auauaacaaugcugu

SEQ ID NO: 3147469 - RNA, 12 nt, Human
auauaacaaugc

SEQ ID NO: 3147470 - RNA, 18 nt, Human
auagucaaauugugugaa

SEQ ID NO: 3147471 - RNA, 17 nt, Human
auagucaaauuguguga

SEQ ID NO: 3147472 - RNA, 23 nt, Human
augucgucaaagcugaaauggac

SEQ ID NO: 3147473 - RNA, 19 nt, Human
auguauauuuuauaucaau

SEQ ID NO: 3147474 - RNA, 16 nt, Human
auguccaacccgucug

SEQ ID NO: 3147475 - RNA, 15 nt, Human
uuugacacugcucua

SEQ ID NO: 3147476 - RNA, 20 nt, Human
uuugcuggagcucugcccau

SEQ ID NO: 3147477 - RNA, 20 nt, Human
augugcuaguaauuggaaag

SEQ ID NO: 3147478 - RNA, 21 nt, Human
augugcuaguaauuggaaagg

SEQ ID NO: 3147479 - RNA, 16 nt, Human
uuuucucuaggaaaua

SEQ ID NO: 3147480 - RNA, 20 nt, Human
uuuucaggcuagauguaugu

SEQ ID NO: 3147481 - RNA, 18 nt, Human
uuuuccaacuacuaauag

SEQ ID NO: 3147482 - RNA, 14 nt, Human
uuuuccaacuacua

SEQ ID NO: 3147483 - RNA, 22 nt, Human
uuuuauggcacuaguauuucua

SEQ ID NO: 3147484 - RNA, 17 nt, Human
auuccaagugauugaaa

SEQ ID NO: 3147485 - RNA, 20 nt, Human
auuauauggcuugaguuuaa

SEQ ID NO: 3147486 - RNA, 23 nt, Human
auuauuguguguuauuuaaauga

SEQ ID NO: 3147487 - RNA, 22 nt, Human
auucaaacagucucaggaaauc

SEQ ID NO: 3147488 - RNA, 18 nt, Human
auuagacacuuuggaaga

SEQ ID NO: 3147489 - RNA, 16 nt, Human
auuacuguaagaaaau

SEQ ID NO: 3147490 - RNA, 15 nt, Human
auuacuguaagaaaa

SEQ ID NO: 3147491 - RNA, 14 nt, Human
uuuugugaagcaaa

SEQ ID NO: 3147492 - RNA, 14 nt, Human
uuuugugaauuagg

SEQ ID NO: 3147493 - RNA, 15 nt, Human
uuuuguuuucauuau

SEQ ID NO: 3147494 - RNA, 21 nt, Human
uuuuguuggcauagcucuggg

SEQ ID NO: 3147495 - RNA, 13 nt, Human
uuuuguuggcaua

SEQ ID NO: 3147496 - RNA, 15 nt, Human
uuuuugaagcuguau

SEQ ID NO: 3147497 - RNA, 16 nt, Human
auuuaaauauuaaaua

SEQ ID NO: 3147498 - RNA, 22 nt, Human
auuuaccacuuguguuuugcaa

SEQ ID NO: 3147499 - RNA, 15 nt, Human
auuuaccacuugugu

SEQ ID NO: 3147500 - RNA, 16 nt, Human
auuguaguccuguaau

SEQ ID NO: 3147501 - RNA, 17 nt, Human
auuuaaaaaaaaaccug

SEQ ID NO: 3147502 - RNA, 20 nt, Human
auuuauuacuguaagaaaau

SEQ ID NO: 3147503 - RNA, 19 nt, Human
auuuauuacuguaagaaaa

SEQ ID NO: 3147504 - RNA, 21 nt, Human
auuuauuuuaauaauguuuca

SEQ ID NO: 3147505 - RNA, 21 nt, Human
auuuccuaauacugucauccu

SEQ ID NO: 3147506 - RNA, 17 nt, Human
auuuccuaauacuguca

SEQ ID NO: 3147507 - RNA, 17 nt, Human
auuucuuaacuucuugc

SEQ ID NO: 3147508 - RNA, 14 nt, Human
auuucuuaacuucu

SEQ ID NO: 3147509 - RNA, 19 nt, Human
auuucuuaacuucuugcuu

SEQ ID NO: 3147510 - RNA, 20 nt, Human
auuucuugagguaaaagcau

SEQ ID NO: 3147511 - RNA, 19 nt, Human
auuggggaagacuguggcu

SEQ ID NO: 3147512 - RNA, 17 nt, Human
auuggagcucgugggac

SEQ ID NO: 3147513 - RNA, 16 nt, Human
auuggagcucguggaa

SEQ ID NO: 3147514 - RNA, 17 nt, Human
auugaaggaugcugucu

SEQ ID NO: 3147515 - RNA, 24 nt, Human
auuccuagaaacugacacaugcug

SEQ ID NO: 3147516 - RNA, 22 nt, Human
auugaacaaguuguuucauuga

SEQ ID NO: 3147517 - RNA, 16 nt, Human
ugauuaaguaaugaua

SEQ ID NO: 3147518 - RNA, 15 nt, Human
ugauuaaguaaugau

SEQ ID NO: 3147519 - RNA, 17 nt, Human
ugaugaucuuuaaaaua

SEQ ID NO: 3147520 - RNA, 14 nt, Human
agccaccaguucuc

SEQ ID NO: 3147521 - RNA, 12 nt, Human
agccaccaguuc

SEQ ID NO: 3147522 - RNA, 20 nt, Human
agcaucacaugaacuuguaa

SEQ ID NO: 3147523 - RNA, 21 nt, Human
agcaucauuauuugcagagac

SEQ ID NO: 3147524 - RNA, 22 nt, Human
agcauuuagauguauagguuga

SEQ ID NO: 3147525 - RNA, 20 nt, Human
agcaggaagcugugagagca

SEQ ID NO: 3147526 - RNA, 16 nt, Human
agcaggcuacugucag

SEQ ID NO: 3147527 - RNA, 17 nt, Human
agcaggcuacugucagc

SEQ ID NO: 3147528 - RNA, 19 nt, Human
agcaggcuacugucagcuc

SEQ ID NO: 3147529 - RNA, 20 nt, Human
agcaggcuacugucagcucc

SEQ ID NO: 3147530 - RNA, 14 nt, Human
agcaggcuacuguc

SEQ ID NO: 3147531 - RNA, 19 nt, Human
agcagggcauggcugggaa

SEQ ID NO: 3147532 - RNA, 19 nt, Human
agcauaccaacacgagcag

SEQ ID NO: 3147533 - RNA, 22 nt, Human
agcauaccaacacgagcaggcu

SEQ ID NO: 3147534 - RNA, 13 nt, Human
agcauaccaacac

SEQ ID NO: 3147535 - RNA, 22 nt, Human
agcaguuugguuucuagcauga

SEQ ID NO: 3147536 - RNA, 23 nt, Human
agcaguuugguuucuagcaugaa

SEQ ID NO: 3147537 - RNA, 20 nt, Human
agcaguuugguuucuagcau

SEQ ID NO: 3147538 - RNA, 19 nt, Human
agcagucaggaaagagaac

SEQ ID NO: 3147539 - RNA, 18 nt, Human
agcagucaggaaagagaa

SEQ ID NO: 3147540 - RNA, 17 nt, Human
agcagucaggaaagaga

SEQ ID NO: 3147541 - RNA, 18 nt, Human
ugagugucuuaauuaaaa

SEQ ID NO: 3147542 - RNA, 13 nt, Human
ugcauacucauua

SEQ ID NO: 3147543 - RNA, 19 nt, Human
ugcauacucauuaggaugg

SEQ ID NO: 3147544 - RNA, 20 nt, Human
ugcauagauucccugagcag

SEQ ID NO: 3147545 - RNA, 19 nt, Human
agccugagcgacagugaga

SEQ ID NO: 3147546 - RNA, 23 nt, Human
ugccagccagcagccagcucuca

SEQ ID NO: 3147547 - RNA, 15 nt, Human
ugccagccagcagcc

SEQ ID NO: 3147548 - RNA, 16 nt, Human
ugccagccagcagcca

SEQ ID NO: 3147549 - RNA, 17 nt, Human
ugccagccagcagccag

SEQ ID NO: 3147550 - RNA, 22 nt, Human
ugccagccagcagccagcucuc

SEQ ID NO: 3147551 - RNA, 13 nt, Human
ugccauaauuacu

SEQ ID NO: 3147552 - RNA, 17 nt, Human
ugccaguuauggcuaua

SEQ ID NO: 3147553 - RNA, 17 nt, Human
ugcacuccagccugagc

SEQ ID NO: 3147554 - RNA, 22 nt, Human
ugcagaagacaguauggcagcu

SEQ ID NO: 3147555 - RNA, 15 nt, Human
ugcacuccagccuga

SEQ ID NO: 3147556 - RNA, 13 nt, Human
ugauuucauucaa

SEQ ID NO: 3147557 - RNA, 20 nt, Human
ugcaaagcacugacuucuaa

SEQ ID NO: 3147558 - RNA, 22 nt, Human
ugcaaagcacugacuucuaagu

SEQ ID NO: 3147559 - RNA, 18 nt, Human
ugcaaagcacugacuucu

SEQ ID NO: 3147560 - RNA, 21 nt, Human
ugcaagccagauuuuccugaa

SEQ ID NO: 3147561 - RNA, 15 nt, Human
ugcaagccagauuuu

SEQ ID NO: 3147562 - RNA, 16 nt, Human
ugcaagcacagcccuu

SEQ ID NO: 3147563 - RNA, 15 nt, Human
ugcaagcacagcccu

SEQ ID NO: 3147564 - RNA, 18 nt, Human
ugcaagguacucugguga

SEQ ID NO: 3147565 - RNA, 16 nt, Human
ugcaagguacucuggu

SEQ ID NO: 3147566 - RNA, 17 nt, Human
ugcaauaaaauggguuu

SEQ ID NO: 3147567 - RNA, 21 nt, Human
ugcaauaaaauggguuuuacu

SEQ ID NO: 3147568 - RNA, 20 nt, Human
ugcccuguuaaaagaugaaa

SEQ ID NO: 3147569 - RNA, 19 nt, Human
ugcccuguuaaaagaugaa

SEQ ID NO: 3147570 - RNA, 13 nt, Human
agcugcccucucc

SEQ ID NO: 3147571 - RNA, 14 nt, Human
agcugcccucuccu

SEQ ID NO: 3147572 - RNA, 15 nt, Human
agcugcccucuccug

SEQ ID NO: 3147573 - RNA, 23 nt, Human
agcugcaagguacucuggugagu

SEQ ID NO: 3147574 - RNA, 21 nt, Human
agcugcaagguacucugguga

SEQ ID NO: 3147575 - RNA, 22 nt, Human
agcucuggggugggcaguuuuu

SEQ ID NO: 3147576 - RNA, 21 nt, Human
agcucuggggugggcaguuuu

SEQ ID NO: 3147577 - RNA, 20 nt, Human
agcucuggggugggcaguuu

SEQ ID NO: 3147578 - RNA, 19 nt, Human
agcucuggggugggcaguu

SEQ ID NO: 3147579 - RNA, 14 nt, Human
agcucugggguggg

SEQ ID NO: 3147580 - RNA, 20 nt, Human
agcucgguggacccagggau

SEQ ID NO: 3147581 - RNA, 12 nt, Human
agcucgguggac

SEQ ID NO: 3147582 - RNA, 14 nt, Human
agcucgguggaccc

SEQ ID NO: 3147583 - RNA, 15 nt, Human
agcucgguggaccca

SEQ ID NO: 3147584 - RNA, 16 nt, Human
agcucgguggacccag

SEQ ID NO: 3147585 - RNA, 17 nt, Human
agcucgguggacccagg

SEQ ID NO: 3147586 - RNA, 18 nt, Human
agcucgguggacccaggg

SEQ ID NO: 3147587 - RNA, 19 nt, Human
agcucgguggacccaggga

SEQ ID NO: 3147588 - RNA, 22 nt, Human
agcuguggcagaguuacaguuc

SEQ ID NO: 3147589 - RNA, 21 nt, Human
agcuguggcagaguuacaguu

SEQ ID NO: 3147590 - RNA, 18 nt, Human
agcuguggcagaguuaca

SEQ ID NO: 3147591 - RNA, 21 nt, Human
aggaaaucaaauaugcaaagc

SEQ ID NO: 3147592 - RNA, 22 nt, Human
aggaaaucaaauaugcaaagca

SEQ ID NO: 3147593 - RNA, 20 nt, Human
aggaaaucaaauaugcaaag

SEQ ID NO: 3147594 - RNA, 19 nt, Human
aggaaaucaaauaugcaaa

SEQ ID NO: 3147595 - RNA, 17 nt, Human
ugccuuuucccaacucc

SEQ ID NO: 3147596 - RNA, 19 nt, Human
ugccuuuucccaacuccag

SEQ ID NO: 3147597 - RNA, 22 nt, Human
ugcuaccaguauuuagaagcca

SEQ ID NO: 3147598 - RNA, 18 nt, Human
ugcuaccaguauuuagaa

SEQ ID NO: 3147599 - RNA, 15 nt, Human
ugcuaccaguauuua

SEQ ID NO: 3147600 - RNA, 14 nt, Human
ugcuacaaaaacac

SEQ ID NO: 3147601 - RNA, 20 nt, Human
agcuugcccuggugccucac

SEQ ID NO: 3147602 - RNA, 16 nt, Human
agcuugcccuguuaaa

SEQ ID NO: 3147603 - RNA, 18 nt, Human
agcuugcccuguuaaaag

SEQ ID NO: 3147604 - RNA, 19 nt, Human
agcuugcccuguuaaaaga

SEQ ID NO: 3147605 - RNA, 20 nt, Human
aggacgcucucuggccuucg

SEQ ID NO: 3147606 - RNA, 19 nt, Human
aggacgcucucuggccuuc

SEQ ID NO: 3147607 - RNA, 17 nt, Human
aggacgcucucuggccu

SEQ ID NO: 3147608 - RNA, 16 nt, Human
aggacgcucucuggcc

SEQ ID NO: 3147609 - RNA, 14 nt, Human
aggacgcucucugg

SEQ ID NO: 3147610 - RNA, 13 nt, Human
aggacgcucucug

SEQ ID NO: 3147611 - RNA, 17 nt, Human
aggagaaacuggaacuc

SEQ ID NO: 3147612 - RNA, 19 nt, Human
aggagaaacuggaacucuc

SEQ ID NO: 3147613 - RNA, 18 nt, Human
aggagaaacuggaacucu

SEQ ID NO: 3147614 - RNA, 14 nt, Human
uggaaauaaaguca

SEQ ID NO: 3147615 - RNA, 12 nt, Human
uggaaauaaagu

SEQ ID NO: 3147616 - RNA, 16 nt, Human
uggaaauaaagucaga

SEQ ID NO: 3147617 - RNA, 14 nt, Human
uggaguugaaaauc

SEQ ID NO: 3147618 - RNA, 15 nt, Human
aggcccccaggugcc

SEQ ID NO: 3147619 - RNA, 14 nt, Human
uggagcucguggaa

SEQ ID NO: 3147620 - RNA, 21 nt, Human
uggagcucguggaacaguuac

SEQ ID NO: 3147621 - RNA, 17 nt, Human
uggagcucguggaacag

SEQ ID NO: 3147622 - RNA, 17 nt, Human
uggagccaaggguucag

SEQ ID NO: 3147623 - RNA, 19 nt, Human
uggacuuaagcaucuggcu

SEQ ID NO: 3147624 - RNA, 14 nt, Human
aggcaguuuucuaa

SEQ ID NO: 3147625 - RNA, 13 nt, Human
aggcaguuuucua

SEQ ID NO: 3147626 - RNA, 20 nt, Human
aggcauuuaggccaugggac

SEQ ID NO: 3147627 - RNA, 12 nt, Human
aggcaguuuucu

SEQ ID NO: 3147628 - RNA, 17 nt, Human
aggcagggucaggagag

SEQ ID NO: 3147629 - RNA, 19 nt, Human
aggcagggucaggagaggg

SEQ ID NO: 3147630 - RNA, 14 nt, Human
aggcagggucagga

SEQ ID NO: 3147631 - RNA, 20 nt, Human
aggcagggucaggagagggg

SEQ ID NO: 3147632 - RNA, 23 nt, Human
aggcagggucaggagaggggcag

SEQ ID NO: 3147633 - RNA, 15 nt, Human
aggcagcuugaaacu

SEQ ID NO: 3147634 - RNA, 20 nt, Human
aggcagcucuaaaugucaau

SEQ ID NO: 3147635 - RNA, 12 nt, Human
aggcacacuucu

SEQ ID NO: 3147636 - RNA, 15 nt, Human
aggcacacuucuucu

SEQ ID NO: 3147637 - RNA, 16 nt, Human
aggcacacuucuucuu

SEQ ID NO: 3147638 - RNA, 20 nt, Human
aggcacacuucuucuugguc

SEQ ID NO: 3147639 - RNA, 20 nt, Human
uguaguauuuuuuguauaau

SEQ ID NO: 3147640 - RNA, 19 nt, Human
uguaguauuuuuuguauaa

SEQ ID NO: 3147641 - RNA, 18 nt, Human
uguaguauuuuuuguaua

SEQ ID NO: 3147642 - RNA, 20 nt, Human
aguaaaaccacagcaguuga

SEQ ID NO: 3147643 - RNA, 13 nt, Human
aguaaaauccaca

SEQ ID NO: 3147644 - RNA, 20 nt, Human
aguaaugauaacuggaaacu

SEQ ID NO: 3147645 - RNA, 18 nt, Human
aguaaugauaacuggaaa

SEQ ID NO: 3147646 - RNA, 17 nt, Human
aguaaugauaacuggaa

SEQ ID NO: 3147647 - RNA, 13 nt, Human
aguaaugauaacu

SEQ ID NO: 3147648 - RNA, 15 nt, Human
uguaucacaaaucuu

SEQ ID NO: 3147649 - RNA, 18 nt, Human
uguaucacaaaucuuaac

SEQ ID NO: 3147650 - RNA, 15 nt, Human
uguaguguuggagaa

SEQ ID NO: 3147651 - RNA, 14 nt, Human
uguaguguuggaga

SEQ ID NO: 3147652 - RNA, 22 nt, Human
uguauuacaaauccaaugaaau

SEQ ID NO: 3147653 - RNA, 13 nt, Human
uguauuacaaauc

SEQ ID NO: 3147654 - RNA, 23 nt, Human
ugucaaaaaugucuuggguaggc

SEQ ID NO: 3147655 - RNA, 18 nt, Human
aguauuagaauaccacag

SEQ ID NO: 3147656 - RNA, 15 nt, Human
agucaccucauggaa

SEQ ID NO: 3147657 - RNA, 14 nt, Human
agucaccucaugga

SEQ ID NO: 3147658 - RNA, 17 nt, Human
agucaccucauggaauu

SEQ ID NO: 3147659 - RNA, 18 nt, Human
aguauuucuaugaaauau

SEQ ID NO: 3147660 - RNA, 16 nt, Human
aguauuucuaugaaau

SEQ ID NO: 3147661 - RNA, 17 nt, Human
aguauuucuaugaaaua

SEQ ID NO: 3147662 - RNA, 16 nt, Human
uguaaaggaauuuaaa

SEQ ID NO: 3147663 - RNA, 14 nt, Human
agggcucagccugg

SEQ ID NO: 3147664 - RNA, 15 nt, Human
agggcucagccuggu

SEQ ID NO: 3147665 - RNA, 16 nt, Human
ugggguccuggggccu

SEQ ID NO: 3147666 - RNA, 23 nt, Human
ugggugccccccuugccagacau

SEQ ID NO: 3147667 - RNA, 24 nt, Human
ugguaacuuuugugaauuaggcug

SEQ ID NO: 3147668 - RNA, 16 nt, Human
ugguaacuuuugugaa

SEQ ID NO: 3147669 - RNA, 14 nt, Human
ugguaacuuuugug

SEQ ID NO: 3147670 - RNA, 18 nt, Human
aggggagcaugggaagug

SEQ ID NO: 3147671 - RNA, 22 nt, Human
agggaggacgcucucuggccuu

SEQ ID NO: 3147672 - RNA, 21 nt, Human
agggaggacgcucucuggccu

SEQ ID NO: 3147673 - RNA, 23 nt, Human
agggaggacgcucucuggccuuc

SEQ ID NO: 3147674 - RNA, 13 nt, Human
agggaaauuucag

SEQ ID NO: 3147675 - RNA, 16 nt, Human
agggcccugagcucgg

SEQ ID NO: 3147676 - RNA, 13 nt, Human
agggcucagccug

SEQ ID NO: 3147677 - RNA, 12 nt, Human
agggcucagccu

SEQ ID NO: 3147678 - RNA, 21 nt, Human
aguucugcagauaaacaguag

SEQ ID NO: 3147679 - RNA, 16 nt, Human
aguucugcagauaaac

SEQ ID NO: 3147680 - RNA, 14 nt, Human
uguuuugcaagcca

SEQ ID NO: 3147681 - RNA, 16 nt, Human
aguucugaagaagaug

SEQ ID NO: 3147682 - RNA, 19 nt, Human
uguuuucauuaucucaaaa

SEQ ID NO: 3147683 - RNA, 17 nt, Human
uguuuauuaaucuuagu

SEQ ID NO: 3147684 - RNA, 15 nt, Human
uguuuauuaaucuua

SEQ ID NO: 3147685 - RNA, 14 nt, Human
uguuuauuaaucuu

SEQ ID NO: 3147686 - RNA, 16 nt, Human
aguuuagcuggaaaag

SEQ ID NO: 3147687 - RNA, 13 nt, Human
aguuggugacaga

SEQ ID NO: 3147688 - RNA, 16 nt, Human
aguugcagauucauuu

SEQ ID NO: 3147689 - RNA, 15 nt, Human
uuacuguaagaaaau

SEQ ID NO: 3147690 - RNA, 20 nt, Human
uuacuggccuuuuucauuua

SEQ ID NO: 3147691 - RNA, 12 nt, Human
uuaccugggaaa

SEQ ID NO: 3147692 - RNA, 14 nt, Human
uuaccuuacagaag

SEQ ID NO: 3147693 - RNA, 21 nt, Human
auaaauauaucuaccccagac

SEQ ID NO: 3147694 - RNA, 13 nt, Human
auaaauauaucua

SEQ ID NO: 3147695 - RNA, 18 nt, Human
auaaaguuggugacagau

SEQ ID NO: 3147696 - RNA, 17 nt, Human
auaaaguuggugacaga

SEQ ID NO: 3147697 - RNA, 16 nt, Human
auaaaguuggugacag

SEQ ID NO: 3147698 - RNA, 15 nt, Human
auaacuaacaugucc

SEQ ID NO: 3147699 - RNA, 22 nt, Human
uuaagaagacugcauuauauuu

SEQ ID NO: 3147700 - RNA, 20 nt, Human
uuaagaagacugcauuauau

SEQ ID NO: 3147701 - RNA, 18 nt, Human
uuaaguaaugauaacugg

SEQ ID NO: 3147702 - RNA, 19 nt, Human
auaaaauccauacauuugu

SEQ ID NO: 3147703 - RNA, 18 nt, Human
auaaaauccauacauuug

SEQ ID NO: 3147704 - RNA, 21 nt, Human
auaaaauaauuuuuauauuug

SEQ ID NO: 3147705 - RNA, 16 nt, Human
auaaaauaauuuuuau

SEQ ID NO: 3147706 - RNA, 15 nt, Human
auaaaauaauuuuua

SEQ ID NO: 3147707 - RNA, 16 nt, Human
agucucaggaaaucaa

SEQ ID NO: 3147708 - RNA, 22 nt, Human
agucucaggaaaucaaauaugc

SEQ ID NO: 3147709 - RNA, 19 nt, Human
ugugagaugcuagaacucc

SEQ ID NO: 3147710 - RNA, 15 nt, Human
ugugagaugcuagaa

SEQ ID NO: 3147711 - RNA, 14 nt, Human
agucucucuucucu

SEQ ID NO: 3147712 - RNA, 16 nt, Human
agucucucuucucucc

SEQ ID NO: 3147713 - RNA, 15 nt, Human
agucucucuucucuc

SEQ ID NO: 3147714 - RNA, 18 nt, Human
agucucucuucucuccag

SEQ ID NO: 3147715 - RNA, 20 nt, Human
agugaaacucguuaauuugu

SEQ ID NO: 3147716 - RNA, 18 nt, Human
agucuuucacauuuaaau

SEQ ID NO: 3147717 - RNA, 16 nt, Human
ugucacuuuuucugau

SEQ ID NO: 3147718 - RNA, 21 nt, Human
uguggcagaguuacaguucug

SEQ ID NO: 3147719 - RNA, 16 nt, Human
agugaacaaauuuaca

SEQ ID NO: 3147720 - RNA, 15 nt, Human
agugaaagaaaauaa

SEQ ID NO: 3147721 - RNA, 13 nt, Human
uguguaaguagau

SEQ ID NO: 3147722 - RNA, 20 nt, Human
uguggucacaggaaguagag

SEQ ID NO: 3147723 - RNA, 21 nt, Human
agugcuguuuauuaaucuuag

SEQ ID NO: 3147724 - RNA, 20 nt, Human
agugcuguuuauuaaucuua

SEQ ID NO: 3147725 - RNA, 22 nt, Human
agugcuguuuauuaaucuuagu

SEQ ID NO: 3147726 - RNA, 20 nt, Human
aguggacaccaggagucccu

SEQ ID NO: 3147727 - RNA, 22 nt, Human
aguggacaccaggagucccugg

SEQ ID NO: 3147728 - RNA, 15 nt, Human
uguuauaaucuuuca

SEQ ID NO: 3147729 - RNA, 12 nt, Human
uguuauaaucuu

SEQ ID NO: 3147730 - RNA, 14 nt, Human
uguuccuagugaaa

SEQ ID NO: 3147731 - RNA, 13 nt, Human
ucaaaacugcacu

SEQ ID NO: 3147732 - RNA, 18 nt, Human
ucaaaagaaagaaaauca

SEQ ID NO: 3147733 - RNA, 23 nt, Human
ucaaaauaccaugccauuuaaag

SEQ ID NO: 3147734 - RNA, 21 nt, Human
ucaaaauaugccccauucaac

SEQ ID NO: 3147735 - RNA, 21 nt, Human
ucaaaauaccaugccauuuaa

SEQ ID NO: 3147736 - RNA, 14 nt, Human
ucaaagcugaaaug

SEQ ID NO: 3147737 - RNA, 19 nt, Human
acaugauccugcaauucca

SEQ ID NO: 3147738 - RNA, 14 nt, Human
acaugcugaacauc

SEQ ID NO: 3147739 - RNA, 21 nt, Human
acaugcugaacaucacagcuu

SEQ ID NO: 3147740 - RNA, 23 nt, Human
acauguccugccuauuaucuguc

SEQ ID NO: 3147741 - RNA, 15 nt, Human
acaugucccuacacc

SEQ ID NO: 3147742 - RNA, 22 nt, Human
ucaagaugaugaugaucuuuaa

SEQ ID NO: 3147743 - RNA, 14 nt, Human
ucaaggcuuagacc

SEQ ID NO: 3147744 - RNA, 19 nt, Human
acauauauaacaaugcugu

SEQ ID NO: 3147745 - RNA, 18 nt, Human
acauagaauuaacacaug

SEQ ID NO: 3147746 - RNA, 14 nt, Human
acauagaauuaaca

SEQ ID NO: 3147747 - RNA, 13 nt, Human
acaucaacagaua

SEQ ID NO: 3147748 - RNA, 14 nt, Human
acaguugguaacuu

SEQ ID NO: 3147749 - RNA, 16 nt, Human
acaguugguaacuuuu

SEQ ID NO: 3147750 - RNA, 15 nt, Human
acaguugguaacuuu

SEQ ID NO: 3147751 - RNA, 24 nt, Human
acaguugguaacuuuugugaauua

SEQ ID NO: 3147752 - RNA, 13 nt, Human
uauuucauuucuu

SEQ ID NO: 3147753 - RNA, 18 nt, Human
acaguuuucugagaaaga

SEQ ID NO: 3147754 - RNA, 19 nt, Human
acaguuuucugagaaagac

SEQ ID NO: 3147755 - RNA, 20 nt, Human
acaguuuucugagaaagacu

SEQ ID NO: 3147756 - RNA, 21 nt, Human
acaguuuucugagaaagacua

SEQ ID NO: 3147757 - RNA, 16 nt, Human
acaguuuucugagaaa

SEQ ID NO: 3147758 - RNA, 17 nt, Human
acaguuuucugagaaag

SEQ ID NO: 3147759 - RNA, 15 nt, Human
acaguuuucugagaa

SEQ ID NO: 3147760 - RNA, 23 nt, Human
accauuucuugagguaaaagcau

SEQ ID NO: 3147761 - RNA, 22 nt, Human
ucagaagucaucuugcuaccag

SEQ ID NO: 3147762 - RNA, 18 nt, Human
ucagaagucaucuugcua

SEQ ID NO: 3147763 - RNA, 15 nt, Human
ucagaagucaucuug

SEQ ID NO: 3147764 - RNA, 18 nt, Human
ucagccuagccgaccuca

SEQ ID NO: 3147765 - RNA, 19 nt, Human
ucagccuagccgaccucag

SEQ ID NO: 3147766 - RNA, 20 nt, Human
ucagccuagccgaccucagc

SEQ ID NO: 3147767 - RNA, 21 nt, Human
ucagccuagccgaccucagcc

SEQ ID NO: 3147768 - RNA, 12 nt, Human
ucagagcugccc

SEQ ID NO: 3147769 - RNA, 21 nt, Human
ucagccaacgaguaauuuauu

SEQ ID NO: 3147770 - RNA, 20 nt, Human
ucaggaaaucaaauaugcaa

SEQ ID NO: 3147771 - RNA, 21 nt, Human
ucaggaaaucaaauaugcaaa

SEQ ID NO: 3147772 - RNA, 19 nt, Human
ucaggaaagagaacuucca

SEQ ID NO: 3147773 - RNA, 13 nt, Human
ucaggaaagagaa

SEQ ID NO: 3147774 - RNA, 15 nt, Human
ucaauucuugccaaa

SEQ ID NO: 3147775 - RNA, 20 nt, Human
ucaauuuuucuuauuucauu

SEQ ID NO: 3147776 - RNA, 23 nt, Human
ucaauuuuucuuauuucauuucu

SEQ ID NO: 3147777 - RNA, 15 nt, Human
accaaucaugaauua

SEQ ID NO: 3147778 - RNA, 13 nt, Human
accaaucaugaau

SEQ ID NO: 3147779 - RNA, 17 nt, Human
accagaaaagcccaagu

SEQ ID NO: 3147780 - RNA, 15 nt, Human
accacuucagggcuu

SEQ ID NO: 3147781 - RNA, 14 nt, Human
acgagaaaacaaua

SEQ ID NO: 3147782 - RNA, 19 nt, Human
acgagcaggcuacugucag

SEQ ID NO: 3147783 - RNA, 20 nt, Human
acgagcaggcuacugucagc

SEQ ID NO: 3147784 - RNA, 23 nt, Human
uccaacccgucuggcccaccagg

SEQ ID NO: 3147785 - RNA, 22 nt, Human
uccaacccgucuggcccaccag

SEQ ID NO: 3147786 - RNA, 21 nt, Human
uccaacuaucucauuuccaag

SEQ ID NO: 3147787 - RNA, 16 nt, Human
accuagggugauauua

SEQ ID NO: 3147788 - RNA, 21 nt, Human
accuagggugauauuaaccag

SEQ ID NO: 3147789 - RNA, 22 nt, Human
ucaggaaaucaaauaugcaaag

SEQ ID NO: 3147790 - RNA, 23 nt, Human
ucaggaaaucaaauaugcaaagc

SEQ ID NO: 3147791 - RNA, 16 nt, Human
ucaugaauuaguuuua

SEQ ID NO: 3147792 - RNA, 22 nt, Human
ucauccucaaagaaaguguauu

SEQ ID NO: 3147793 - RNA, 21 nt, Human
ucauccucaaagaaaguguau

SEQ ID NO: 3147794 - RNA, 18 nt, Human
ucauccucaaagaaagug

SEQ ID NO: 3147795 - RNA, 17 nt, Human
ucauccucaaagaaagu

SEQ ID NO: 3147796 - RNA, 23 nt, Human
ucauccucaaagaaaguguauug

SEQ ID NO: 3147797 - RNA, 12 nt, Human
accucccugcaa

SEQ ID NO: 3147798 - RNA, 13 nt, Human
accucccugcaau

SEQ ID NO: 3147799 - RNA, 14 nt, Human
ucauccucaaagaa

SEQ ID NO: 3147800 - RNA, 14 nt, Human
ucauccgaggcagg

SEQ ID NO: 3147801 - RNA, 15 nt, Human
ucauccgaggcaggg

SEQ ID NO: 3147802 - RNA, 20 nt, Human
accugacuauugaaguugca

SEQ ID NO: 3147803 - RNA, 14 nt, Human
acuccaaagaaaug

SEQ ID NO: 3147804 - RNA, 15 nt, Human
acuccaaagaaaugu

SEQ ID NO: 3147805 - RNA, 18 nt, Human
acuccaaagaaauguaag

SEQ ID NO: 3147806 - RNA, 18 nt, Human
acuccagaaagugacaag

SEQ ID NO: 3147807 - RNA, 21 nt, Human
ucccugguaauaaguacugug

SEQ ID NO: 3147808 - RNA, 21 nt, Human
ucccuccaccucccugcaaua

SEQ ID NO: 3147809 - RNA, 23 nt, Human
ucccuccaccucccugcaauaaa

SEQ ID NO: 3147810 - RNA, 13 nt, Human
ucccucccuccac

SEQ ID NO: 3147811 - RNA, 14 nt, Human
ucccucccuccacc

SEQ ID NO: 3147812 - RNA, 15 nt, Human
ucccucccuccaccu

SEQ ID NO: 3147813 - RNA, 16 nt, Human
ucccucccuccaccuc

SEQ ID NO: 3147814 - RNA, 11 nt, Human
ucccugagcag

SEQ ID NO: 3147815 - RNA, 17 nt, Human
uccccucggagaagagc

SEQ ID NO: 3147816 - RNA, 16 nt, Human
uccccucggagaagag

SEQ ID NO: 3147817 - RNA, 20 nt, Human
uccccuugcccagggcucag

SEQ ID NO: 3147818 - RNA, 22 nt, Human
uccccuugcccagggcucagcc

SEQ ID NO: 3147819 - RNA, 24 nt, Human
uccccuugcccagggcucagccug

SEQ ID NO: 3147820 - RNA, 17 nt, Human
uccccuugcccagggcu

SEQ ID NO: 3147821 - RNA, 14 nt, Human
ucccagucauuuaa

SEQ ID NO: 3147822 - RNA, 22 nt, Human
ucccagucauuuaauaaaugug

SEQ ID NO: 3147823 - RNA, 17 nt, Human
ucccagccagcaguuca

SEQ ID NO: 3147824 - RNA, 18 nt, Human
ucccagccagcaguucag

SEQ ID NO: 3147825 - RNA, 17 nt, Human
acuaacauguccugccu

SEQ ID NO: 3147826 - RNA, 21 nt, Human
uccaugaagauguagaggaga

SEQ ID NO: 3147827 - RNA, 13 nt, Human
uccaugaagaugu

SEQ ID NO: 3147828 - RNA, 21 nt, Human
uccauccugaggcuccacuug

SEQ ID NO: 3147829 - RNA, 20 nt, Human
uccauccugaggcuccacuu

SEQ ID NO: 3147830 - RNA, 19 nt, Human
uccauccugaggcuccacu

SEQ ID NO: 3147831 - RNA, 12 nt, Human
ucugaagaagau

SEQ ID NO: 3147832 - RNA, 23 nt, Human
agaaacuuaagguuaccuuuguu

SEQ ID NO: 3147833 - RNA, 19 nt, Human
agaaacaguugguaacuuu

SEQ ID NO: 3147834 - RNA, 18 nt, Human
agaaacaguugguaacuu

SEQ ID NO: 3147835 - RNA, 17 nt, Human
agaaacaguugguaacu

SEQ ID NO: 3147836 - RNA, 22 nt, Human
ucucuggccuucggccuccauc

SEQ ID NO: 3147837 - RNA, 21 nt, Human
ucucuggccuucggccuccau

SEQ ID NO: 3147838 - RNA, 12 nt, Human
ucucuggccuuc

SEQ ID NO: 3147839 - RNA, 16 nt, Human
acuuguguuuugcaag

SEQ ID NO: 3147840 - RNA, 16 nt, Human
acuugucaauaaaauc

SEQ ID NO: 3147841 - RNA, 20 nt, Human
acuugaacccgggaggcaga

SEQ ID NO: 3147842 - RNA, 19 nt, Human
acuugaacccgggaggcag

SEQ ID NO: 3147843 - RNA, 21 nt, Human
acuugaacccauauuuguaca

SEQ ID NO: 3147844 - RNA, 21 nt, Human
acuucuaaguaaaaccacagc

SEQ ID NO: 3147845 - RNA, 23 nt, Human
acuucuaaguaaaaccacagcag

SEQ ID NO: 3147846 - RNA, 24 nt, Human
ucucaccuggacuuaagcaucugg

SEQ ID NO: 3147847 - RNA, 13 nt, Human
ucucaccuggacu

SEQ ID NO: 3147848 - RNA, 15 nt, Human
uccuuguauuuaaau

SEQ ID NO: 3147849 - RNA, 18 nt, Human
ucgcuccaccuugcagcu

SEQ ID NO: 3147850 - RNA, 14 nt, Human
acugcauuauauuu

SEQ ID NO: 3147851 - RNA, 15 nt, Human
acugcauuauauuua

SEQ ID NO: 3147852 - RNA, 18 nt, Human
acugcucuaacagcccuc

SEQ ID NO: 3147853 - RNA, 19 nt, Human
acugccuucucaacuccaa

SEQ ID NO: 3147854 - RNA, 13 nt, Human
acugccuucucaa

SEQ ID NO: 3147855 - RNA, 13 nt, Human
acuggcacaguuu

SEQ ID NO: 3147856 - RNA, 19 nt, Human
acuggcacaguuuucugag

SEQ ID NO: 3147857 - RNA, 20 nt, Human
acuggcacaguuuucugaga

SEQ ID NO: 3147858 - RNA, 22 nt, Human
ucggguuuuauuguuuaaaauc

SEQ ID NO: 3147859 - RNA, 13 nt, Human
acuguguaauuag

SEQ ID NO: 3147860 - RNA, 18 nt, Human
acuguggguagacacaca

SEQ ID NO: 3147861 - RNA, 13 nt, Human
acuguggguagac

SEQ ID NO: 3147862 - RNA, 21 nt, Human
acugucagcuccccucggaga

SEQ ID NO: 3147863 - RNA, 18 nt, Human
acugggacaggggagaac

SEQ ID NO: 3147864 - RNA, 17 nt, Human
acuuaagcaucuggcuc

SEQ ID NO: 3147865 - RNA, 21 nt, Human
acuuaagcaucuggcucuaau

SEQ ID NO: 3147866 - RNA, 20 nt, Human
acuuaagcaucuggcucuaa

SEQ ID NO: 3147867 - RNA, 16 nt, Human
ucuacauacuauggaa

SEQ ID NO: 3147868 - RNA, 23 nt, Human
ucuaaguaaaaccacagcaguug

SEQ ID NO: 3147869 - RNA, 21 nt, Human
ucuaaguaaaaccacagcagu

SEQ ID NO: 3147870 - RNA, 22 nt, Human
ucuaaguaaaaccacagcaguu

SEQ ID NO: 3147871 - RNA, 20 nt, Human
ucuaaguaaaaccacagcag

SEQ ID NO: 3147872 - RNA, 20 nt, Human
ucuaaagccauuguaguccu

SEQ ID NO: 3147873 - RNA, 17 nt, Human
ucuaccaaaaaucucaa

SEQ ID NO: 3147874 - RNA, 15 nt, Human
agagguugcagugag

SEQ ID NO: 3147875 - RNA, 23 nt, Human
ugaacuagaguuuagcuggaaaa

SEQ ID NO: 3147876 - RNA, 18 nt, Human
ugaacaaauuuacagaga

SEQ ID NO: 3147877 - RNA, 20 nt, Human
ugaacaaauuuacagagaca

SEQ ID NO: 3147878 - RNA, 19 nt, Human
ugaacaaauuuacagagac

SEQ ID NO: 3147879 - RNA, 22 nt, Human
agagcugcccucuccugggcag

SEQ ID NO: 3147880 - RNA, 21 nt, Human
agagcuguucacagccagacu

SEQ ID NO: 3147881 - RNA, 19 nt, Human
agagcuguucacagccaga

SEQ ID NO: 3147882 - RNA, 15 nt, Human
ugaaauuguauuaca

SEQ ID NO: 3147883 - RNA, 13 nt, Human
agagcugcccucu

SEQ ID NO: 3147884 - RNA, 14 nt, Human
agagcugcccucuc

SEQ ID NO: 3147885 - RNA, 23 nt, Human
ugaaauaagccagacaucaacag

SEQ ID NO: 3147886 - RNA, 20 nt, Human
ugaaauaagccagacaucaa

SEQ ID NO: 3147887 - RNA, 18 nt, Human
ugaaauaagccagacauc

SEQ ID NO: 3147888 - RNA, 17 nt, Human
ugaaauaagccagacau

SEQ ID NO: 3147889 - RNA, 14 nt, Human
ugaaauaagccaga

SEQ ID NO: 3147890 - RNA, 14 nt, Human
agagcacacuguag

SEQ ID NO: 3147891 - RNA, 17 nt, Human
agaugcaguucugaaga

SEQ ID NO: 3147892 - RNA, 14 nt, Human
agaugcuagaacuc

SEQ ID NO: 3147893 - RNA, 19 nt, Human
agaugcaguucugaagaag

SEQ ID NO: 3147894 - RNA, 18 nt, Human
agaugcaguucugaagaa

SEQ ID NO: 3147895 - RNA, 17 nt, Human
ugacccacaagaaauga

SEQ ID NO: 3147896 - RNA, 22 nt, Human
ugacacaccaggcgcuaauuca

SEQ ID NO: 3147897 - RNA, 16 nt, Human
ugacacaccaggcgcu

SEQ ID NO: 3147898 - RNA, 23 nt, Human
ugacacaccaggcgcuaauucaa

SEQ ID NO: 3147899 - RNA, 17 nt, Human
agaguuuagcuggaaaa

SEQ ID NO: 3147900 - RNA, 16 nt, Human
agaguuuagcuggaaa

SEQ ID NO: 3147901 - RNA, 23 nt, Human
agaauuaacacaugauccugcaa

SEQ ID NO: 3147902 - RNA, 17 nt, Human
ucuggggugggcaguuu

SEQ ID NO: 3147903 - RNA, 13 nt, Human
ucuguccagggcc

SEQ ID NO: 3147904 - RNA, 17 nt, Human
ucuguccagggcccuga

SEQ ID NO: 3147905 - RNA, 19 nt, Human
ucuguccagggcccugagc

SEQ ID NO: 3147906 - RNA, 20 nt, Human
ucuguccagggcccugagcu

SEQ ID NO: 3147907 - RNA, 15 nt, Human
agacacacaugaagu

SEQ ID NO: 3147908 - RNA, 13 nt, Human
agaauucugcuac

SEQ ID NO: 3147909 - RNA, 20 nt, Human
agaauucugcuaccucacug

SEQ ID NO: 3147910 - RNA, 22 nt, Human
agaauucugcuaccucacuggg

SEQ ID NO: 3147911 - RNA, 17 nt, Human
agacacacugaagaagc

SEQ ID NO: 3147912 - RNA, 16 nt, Human
agacacacugaagaag

SEQ ID NO: 3147913 - RNA, 13 nt, Human
agacacuuuggaa

SEQ ID NO: 3147914 - RNA, 23 nt, Human
ucuuagaugcaguucugaagaag

SEQ ID NO: 3147915 - RNA, 22 nt, Human
ucuuagaugcaguucugaagaa

SEQ ID NO: 3147916 - RNA, 15 nt, Human
ucuuauuucauuucu

SEQ ID NO: 3147917 - RNA, 13 nt, Human
ucuuauuuauuau

SEQ ID NO: 3147918 - RNA, 16 nt, Human
ucuuauuucauuucuu

SEQ ID NO: 3147919 - RNA, 11 nt, Human
agaccucagcc

SEQ ID NO: 3147920 - RNA, 12 nt, Human
agaccucagccu

SEQ ID NO: 3147921 - RNA, 13 nt, Human
agaccucagccug

SEQ ID NO: 3147922 - RNA, 14 nt, Human
agaccucagccugu

SEQ ID NO: 3147923 - RNA, 15 nt, Human
agaccucagccugug

SEQ ID NO: 3147924 - RNA, 16 nt, Human
agaccucagccugugc

SEQ ID NO: 3147925 - RNA, 17 nt, Human
agaccucagccugugcu

SEQ ID NO: 3147926 - RNA, 19 nt, Human
agaccucagccugugcugc

SEQ ID NO: 3147927 - RNA, 20 nt, Human
agaccucagccugugcugcc

SEQ ID NO: 3147928 - RNA, 23 nt, Human
agacuauucaaacagucucagga

SEQ ID NO: 3147929 - RNA, 15 nt, Human
agagacagaaagcag

SEQ ID NO: 3147930 - RNA, 24 nt, Human
agagacagaaagcagaacagugau

SEQ ID NO: 3147931 - RNA, 24 nt, Human
guccaagcauaccaacacgagcag

SEQ ID NO: 3147932 - RNA, 21 nt, Human
guccaagcauuuagauguaua

SEQ ID NO: 3147933 - RNA, 15 nt, Human
aacaaggaugaauua

SEQ ID NO: 3147934 - RNA, 21 nt, Human
aacaagccuccuuuuaaagua

SEQ ID NO: 3147935 - RNA, 18 nt, Human
aacauuugguaaggggaa

SEQ ID NO: 3147936 - RNA, 22 nt, Human
aacaguagugauaguuguaccg

SEQ ID NO: 3147937 - RNA, 22 nt, Human
aacaguugguaacuuuugugaa

SEQ ID NO: 3147938 - RNA, 21 nt, Human
aacaguugguaacuuuuguga

SEQ ID NO: 3147939 - RNA, 17 nt, Human
aacaguugguaacuuuu

SEQ ID NO: 3147940 - RNA, 13 nt, Human
aacccaaauguuc

SEQ ID NO: 3147941 - RNA, 18 nt, Human
aacccaaauguucaucaa

SEQ ID NO: 3147942 - RNA, 20 nt, Human
aacccauauuuguacaccaa

SEQ ID NO: 3147943 - RNA, 20 nt, Human
aaccuagggugauauuaacc

SEQ ID NO: 3147944 - RNA, 17 nt, Human
aaccuagggugauauua

SEQ ID NO: 3147945 - RNA, 18 nt, Human
aacucguuaauuuguagu

SEQ ID NO: 3147946 - RNA, 14 nt, Human
aacucccuuucaac

SEQ ID NO: 3147947 - RNA, 13 nt, Human
aacucccuuucaa

SEQ ID NO: 3147948 - RNA, 15 nt, Human
gugaacacaucagcu

SEQ ID NO: 3147949 - RNA, 14 nt, Human
aacuccagaaagug

SEQ ID NO: 3147950 - RNA, 21 nt, Human
aacuccagaaagugacaagcu

SEQ ID NO: 3147951 - RNA, 19 nt, Human
gucuuaauuaaaagaauau

SEQ ID NO: 3147952 - RNA, 21 nt, Human
gucuuaauuaaaagaauauuu

SEQ ID NO: 3147953 - RNA, 22 nt, Human
gucuuaauuaaaagaauauuuu

SEQ ID NO: 3147954 - RNA, 14 nt, Human
guaugauucccagc

SEQ ID NO: 3147955 - RNA, 21 nt, Human
guaugauuacuggccuuuuuc

SEQ ID NO: 3147956 - RNA, 22 nt, Human
aaauguaagggaaacugccagc

SEQ ID NO: 3147957 - RNA, 16 nt, Human
aaauguaagggaaacu

SEQ ID NO: 3147958 - RNA, 17 nt, Human
aaauucccguuuuguca

SEQ ID NO: 3147959 - RNA, 19 nt, Human
aaauucauuuuuuaaauuc

SEQ ID NO: 3147960 - RNA, 13 nt, Human
aaauucauuuuuu

SEQ ID NO: 3147961 - RNA, 18 nt, Human
aaauuucagcagcugcag

SEQ ID NO: 3147962 - RNA, 17 nt, Human
aaauuucagcagcugca

SEQ ID NO: 3147963 - RNA, 18 nt, Human
aaauccauacauuugugu

SEQ ID NO: 3147964 - RNA, 14 nt, Human
aaauccuugaagau

SEQ ID NO: 3147965 - RNA, 19 nt, Human
aaaucuacacuccagugag

SEQ ID NO: 3147966 - RNA, 14 nt, Human
aaaugcauuucuaa

SEQ ID NO: 3147967 - RNA, 18 nt, Human
aaauggcuuccuggcaau

SEQ ID NO: 3147968 - RNA, 19 nt, Human
aaauggcuuccuggcaaua

SEQ ID NO: 3147969 - RNA, 12 nt, Human
aaaugagugugu

SEQ ID NO: 3147970 - RNA, 18 nt, Human
aaaugaguguguuuguca

SEQ ID NO: 3147971 - RNA, 22 nt, Human
aaaugaaagcagggacuugaac

SEQ ID NO: 3147972 - RNA, 21 nt, Human
aaaugaaagcagggacuugaa

SEQ ID NO: 3147973 - RNA, 21 nt, Human
gugugaccacugcagaagaca

SEQ ID NO: 3147974 - RNA, 14 nt, Human
gugguuucauguua

SEQ ID NO: 3147975 - RNA, 18 nt, Human
guggugggacagggaccc

SEQ ID NO: 3147976 - RNA, 21 nt, Human
gugggacagucaccucaugga

SEQ ID NO: 3147977 - RNA, 18 nt, Human
aagacuguggcugcuagc

SEQ ID NO: 3147978 - RNA, 19 nt, Human
aagagcuguucacagccag

SEQ ID NO: 3147979 - RNA, 12 nt, Human
aagacuguggcu

SEQ ID NO: 3147980 - RNA, 15 nt, Human
aagacuguggcugcu

SEQ ID NO: 3147981 - RNA, 22 nt, Human
guggacccagggaugacauguc

SEQ ID NO: 3147982 - RNA, 22 nt, Human
guggcacucagucucucuucuc

SEQ ID NO: 3147983 - RNA, 16 nt, Human
aagaaugauuaugaau

SEQ ID NO: 3147984 - RNA, 18 nt, Human
aagaaugauuaugaauua

SEQ ID NO: 3147985 - RNA, 22 nt, Human
aagaagugaaaaucuacacucc

SEQ ID NO: 3147986 - RNA, 16 nt, Human
aagaagugaaaaucua

SEQ ID NO: 3147987 - RNA, 18 nt, Human
guuguaccgcaaugugac

SEQ ID NO: 3147988 - RNA, 21 nt, Human
guuuauuaaucuuaguguaug

SEQ ID NO: 3147989 - RNA, 20 nt, Human
guuuauuaaucuuaguguau

SEQ ID NO: 3147990 - RNA, 18 nt, Human
guuuauuaaucuuagugu

SEQ ID NO: 3147991 - RNA, 14 nt, Human
guuuauuaaucuua

SEQ ID NO: 3147992 - RNA, 10 nt, Human
guuuaaaauc

SEQ ID NO: 3147993 - RNA, 16 nt, Human
guuuaaaaucauuucu

SEQ ID NO: 3147994 - RNA, 13 nt, Human
guuuaaagaaagu

SEQ ID NO: 3147995 - RNA, 23 nt, Human
guuuucugagaaagacuauucaa

SEQ ID NO: 3147996 - RNA, 21 nt, Human
guuucaaacauauauaacaau

SEQ ID NO: 3147997 - RNA, 11 nt, Human
guuagggaggg

SEQ ID NO: 3147998 - RNA, 13 nt, Human
guuagggaggggu

SEQ ID NO: 3147999 - RNA, 17 nt, Human
guuaguuaccuuauagu

SEQ ID NO: 3148000 - RNA, 23 nt, Human
guuaguuaccuuauaguuacugu

SEQ ID NO: 3148001 - RNA, 22 nt, Human
guuaguuaccuuauaguuacug

SEQ ID NO: 3148002 - RNA, 13 nt, Human
guuauuuaaauga

SEQ ID NO: 3148003 - RNA, 11 nt, Human
guuauuuaaau

SEQ ID NO: 3148004 - RNA, 15 nt, Human
guuauuuaaaugagu

SEQ ID NO: 3148005 - RNA, 18 nt, Human
guugacaugggacauuug

SEQ ID NO: 3148006 - RNA, 14 nt, Human
guugacaugggaca

SEQ ID NO: 3148007 - RNA, 13 nt, Human
guugacaugggac

SEQ ID NO: 3148008 - RNA, 23 nt, Human
aagcuuguauuccuuuuucucuc

SEQ ID NO: 3148009 - RNA, 18 nt, Human
aagcuuauuaaaacucau

SEQ ID NO: 3148010 - RNA, 13 nt, Human
guucccucccaga

SEQ ID NO: 3148011 - RNA, 16 nt, Human
acaccccuccccugcc

SEQ ID NO: 3148012 - RNA, 23 nt, Human
acaccccuccccugcccuagagc

SEQ ID NO: 3148013 - RNA, 17 nt, Human
acacuaagagagaauga

SEQ ID NO: 3148014 - RNA, 18 nt, Human
acacuaagagagaaugag

SEQ ID NO: 3148015 - RNA, 14 nt, Human
acacuaagagagaa

SEQ ID NO: 3148016 - RNA, 14 nt, Human
uauaacuaacaugu

SEQ ID NO: 3148017 - RNA, 18 nt, Human
acacaugcugaacaucac

SEQ ID NO: 3148018 - RNA, 23 nt, Human
uauaaaauaauuuuuauauuuga

SEQ ID NO: 3148019 - RNA, 16 nt, Human
uaguguuggagaagaa

SEQ ID NO: 3148020 - RNA, 12 nt, Human
uaguguuggaga

SEQ ID NO: 3148021 - RNA, 14 nt, Human
acacacugaagaag

SEQ ID NO: 3148022 - RNA, 20 nt, Human
acacaggcaacugaggcaga

SEQ ID NO: 3148023 - RNA, 16 nt, Human
acacaggcaacugagg

SEQ ID NO: 3148024 - RNA, 19 nt, Human
acacaggcaacugaggcag

SEQ ID NO: 3148025 - RNA, 15 nt, Human
acacaggcaacugag

SEQ ID NO: 3148026 - RNA, 17 nt, Human
acacaacuauauuguuu

SEQ ID NO: 3148027 - RNA, 14 nt, Human
acacaacuauauug

SEQ ID NO: 3148028 - RNA, 17 nt, Human
acaaugcuguauuuuaa

SEQ ID NO: 3148029 - RNA, 14 nt, Human
acaaugcuguauuu

SEQ ID NO: 3148030 - RNA, 20 nt, Human
uagcuuagaccucagccugu

SEQ ID NO: 3148031 - RNA, 23 nt, Human
uagcuuagaccucagccugugcu

SEQ ID NO: 3148032 - RNA, 16 nt, Human
uagcuuagaccucagc

SEQ ID NO: 3148033 - RNA, 17 nt, Human
uagcuuagaccucagcc

SEQ ID NO: 3148034 - RNA, 18 nt, Human
uagcuuagaccucagccu

SEQ ID NO: 3148035 - RNA, 19 nt, Human
uagcuuagaccucagccug

SEQ ID NO: 3148036 - RNA, 17 nt, Human
acacacaggcaacugag

SEQ ID NO: 3148037 - RNA, 20 nt, Human
acacacucaaaucaagaaac

SEQ ID NO: 3148038 - RNA, 13 nt, Human
acacacugaagaa

SEQ ID NO: 3148039 - RNA, 14 nt, Human
acacaccaggcgcu

SEQ ID NO: 3148040 - RNA, 17 nt, Human
acacaccaggcgcuaau

SEQ ID NO: 3148041 - RNA, 19 nt, Human
acagcccuucuuuccacag

SEQ ID NO: 3148042 - RNA, 21 nt, Human
acagcccuucuuuccacagaa

SEQ ID NO: 3148043 - RNA, 20 nt, Human
acagcccuucuuuccacaga

SEQ ID NO: 3148044 - RNA, 22 nt, Human
uauccuaauaaaaaggugacca

SEQ ID NO: 3148045 - RNA, 19 nt, Human
uauauuuauuacuguaaga

SEQ ID NO: 3148046 - RNA, 15 nt, Human
uauauuuauuacugu

SEQ ID NO: 3148047 - RNA, 17 nt, Human
uaucucaaaacugcacu

SEQ ID NO: 3148048 - RNA, 12 nt, Human
uauauuuacaaa

SEQ ID NO: 3148049 - RNA, 15 nt, Human
acacuuaaaaauggu

SEQ ID NO: 3148050 - RNA, 13 nt, Human
acacuuaaaaaug

SEQ ID NO: 3148051 - RNA, 14 nt, Human
acacuccagugaga

SEQ ID NO: 3148052 - RNA, 14 nt, Human
acacugaagaagca

SEQ ID NO: 3148053 - RNA, 12 nt, Human
acacugaagaag

SEQ ID NO: 3148054 - RNA, 20 nt, Human
uagaugcaguucugaagaag

SEQ ID NO: 3148055 - RNA, 21 nt, Human
uagaugcaguucugaagaaga

SEQ ID NO: 3148056 - RNA, 17 nt, Human
uagauaggccaugggca

SEQ ID NO: 3148057 - RNA, 22 nt, Human
uagauaggucagugcaaauacu

SEQ ID NO: 3148058 - RNA, 21 nt, Human
aauuuuucuuauuucauuucu

SEQ ID NO: 3148059 - RNA, 22 nt, Human
aauuuuuucucuaggaaauauu

SEQ ID NO: 3148060 - RNA, 15 nt, Human
uagcuuagaccucag

SEQ ID NO: 3148061 - RNA, 16 nt, Human
uagcuacuaauuuuaa

SEQ ID NO: 3148062 - RNA, 17 nt, Human
acaaauuuacagagaca

SEQ ID NO: 3148063 - RNA, 22 nt, Human
acaagcucacagaccuuugaac

SEQ ID NO: 3148064 - RNA, 12 nt, Human
aauuucuuaacu

SEQ ID NO: 3148065 - RNA, 16 nt, Human
aauuucuuaacuucuu

SEQ ID NO: 3148066 - RNA, 15 nt, Human
aauuucuuaacuucu

SEQ ID NO: 3148067 - RNA, 20 nt, Human
aauuucuuaacuucuugcuu

SEQ ID NO: 3148068 - RNA, 18 nt, Human
aauuuacagagacagaaa

SEQ ID NO: 3148069 - RNA, 17 nt, Human
aauuuacagagacagaa

SEQ ID NO: 3148070 - RNA, 19 nt, Human
uacuucuuaggguuaugau

SEQ ID NO: 3148071 - RNA, 16 nt, Human
uacuucaugcugucua

SEQ ID NO: 3148072 - RNA, 18 nt, Human
aauugaggacacugauau

SEQ ID NO: 3148073 - RNA, 23 nt, Human
uacugggaaagggauuuucagcc

SEQ ID NO: 3148074 - RNA, 17 nt, Human
uacugagagugaacaaa

SEQ ID NO: 3148075 - RNA, 14 nt, Human
uacuaaaaauacaa

SEQ ID NO: 3148076 - RNA, 18 nt, Human
uacuaaaaauacaaaaaa

SEQ ID NO: 3148077 - RNA, 20 nt, Human
uaauucaaggaauuucuuaa

SEQ ID NO: 3148078 - RNA, 18 nt, Human
uaauucaaggaauuucuu

SEQ ID NO: 3148079 - RNA, 22 nt, Human
uaauucaaggaauuucuuaacu

SEQ ID NO: 3148080 - RNA, 15 nt, Human
uacaaaaacacagca

SEQ ID NO: 3148081 - RNA, 13 nt, Human
uacaaaaacacag

SEQ ID NO: 3148082 - RNA, 14 nt, Human
uacaaaaacacagc

SEQ ID NO: 3148083 - RNA, 20 nt, Human
uaauuuauuguuuuuccuug

SEQ ID NO: 3148084 - RNA, 19 nt, Human
uacacuaagagagaaugag

SEQ ID NO: 3148085 - RNA, 18 nt, Human
uacacuaagagagaauga

SEQ ID NO: 3148086 - RNA, 19 nt, Human
aauggacuuuuguacauag

SEQ ID NO: 3148087 - RNA, 11 nt, Human
aaugugauaug

SEQ ID NO: 3148088 - RNA, 21 nt, Human
aaugagagacacacugaagaa

SEQ ID NO: 3148089 - RNA, 23 nt, Human
aaucuuaguguaugauuacuggc

SEQ ID NO: 3148090 - RNA, 14 nt, Human
aaucuuauaauuua

SEQ ID NO: 3148091 - RNA, 13 nt, Human
aauccuugaagau

SEQ ID NO: 3148092 - RNA, 14 nt, Human
uaaguacuguguac

SEQ ID NO: 3148093 - RNA, 17 nt, Human
aaucaugaauuaguuuu

SEQ ID NO: 3148094 - RNA, 19 nt, Human
aaucaugaauuaguuuuau

SEQ ID NO: 3148095 - RNA, 23 nt, Human
aaucaugaauuaguuuuauaugc

SEQ ID NO: 3148096 - RNA, 15 nt, Human
aaucaucaagucuuu

SEQ ID NO: 3148097 - RNA, 19 nt, Human
aauauccuaauaaaaaggu

SEQ ID NO: 3148098 - RNA, 15 nt, Human
aauauccuaauaaaa

SEQ ID NO: 3148099 - RNA, 18 nt, Human
uaaccugucucaccugga

SEQ ID NO: 3148100 - RNA, 12 nt, Human
aauaucacuugu

SEQ ID NO: 3148101 - RNA, 15 nt, Human
aauaucacuugucaa

SEQ ID NO: 3148102 - RNA, 14 nt, Human
aauauccuaauaaa

SEQ ID NO: 3148103 - RNA, 13 nt, Human
aauauccuaauaa

SEQ ID NO: 3148104 - RNA, 12 nt, Human
aauauccuaaua

SEQ ID NO: 3148105 - RNA, 18 nt, Human
aauaggcguaacuaauuu

SEQ ID NO: 3148106 - RNA, 16 nt, Human
aauaggaauugguuuc

SEQ ID NO: 3148107 - RNA, 24 nt, Human
aaucagaagucaucuugcuaccag

SEQ ID NO: 3148108 - RNA, 20 nt, Human
aaucagaagucaucuugcua

SEQ ID NO: 3148109 - RNA, 15 nt, Human
aauauuucagauaau

SEQ ID NO: 3148110 - RNA, 14 nt, Human
aauauuucagauaa

SEQ ID NO: 3148111 - RNA, 24 nt, Human
aauaugcaaagcacugacuucuaa

SEQ ID NO: 3148112 - RNA, 15 nt, Human
aauaugcaaagcacu

SEQ ID NO: 3148113 - RNA, 17 nt, Human
aauaugcaaagcacuga

SEQ ID NO: 3148114 - RNA, 16 nt, Human
uaacuaacauguccug

SEQ ID NO: 3148115 - RNA, 13 nt, Human
uaacuacuuuaua

SEQ ID NO: 3148116 - RNA, 19 nt, Human
aauaucuuuuuuuuaauaa

SEQ ID NO: 3148117 - RNA, 21 nt, Human
aauauccuaauaaaaagguga

SEQ ID NO: 3148118 - RNA, 20 nt, Human
aauaauuuuuauauuugaaa

SEQ ID NO: 3148119 - RNA, 16 nt, Human
aauaauuuuuauauuu

SEQ ID NO: 3148120 - RNA, 19 nt, Human
aauaauuuuuauauuugaa

SEQ ID NO: 3148121 - RNA, 17 nt, Human
aauaauuuuuauauuug

SEQ ID NO: 3148122 - RNA, 21 nt, Human
aauaacaaugaaaguugauaa

SEQ ID NO: 3148123 - RNA, 17 nt, Human
aauaaagucagauggaa

SEQ ID NO: 3148124 - RNA, 16 nt, Human
aauaaaaaggugacca

SEQ ID NO: 3148125 - RNA, 13 nt, Human
aauaaaaagguga

SEQ ID NO: 3148126 - RNA, 12 nt, Human
aauaaaaaggug

SEQ ID NO: 3148127 - RNA, 21 nt, Human
cacuccagugagacagcucug

SEQ ID NO: 3148128 - RNA, 16 nt, Human
cacuccagugagacag

SEQ ID NO: 3148129 - RNA, 23 nt, Human
cacugaagaagcaccaaucauga

SEQ ID NO: 3148130 - RNA, 11 nt, Human
cacugaagaag

SEQ ID NO: 3148131 - RNA, 13 nt, Human
cacaucagcuugc

SEQ ID NO: 3148132 - RNA, 23 nt, Human
cacaucagcuugcccuguuaaaa

SEQ ID NO: 3148133 - RNA, 17 nt, Human
caccaggagucccuggu

SEQ ID NO: 3148134 - RNA, 12 nt, Human
caacuccagaaa

SEQ ID NO: 3148135 - RNA, 19 nt, Human
caacuaucucauuuccaag

SEQ ID NO: 3148136 - RNA, 19 nt, Human
caacuauauuguuugcuaa

SEQ ID NO: 3148137 - RNA, 14 nt, Human
caagcaaguauuag

SEQ ID NO: 3148138 - RNA, 14 nt, Human
caagcacagcccuu

SEQ ID NO: 3148139 - RNA, 17 nt, Human
caaguucaugcagcugu

SEQ ID NO: 3148140 - RNA, 17 nt, Human
caaucagccuaguugau

SEQ ID NO: 3148141 - RNA, 21 nt, Human
caauauuucagauaaucacaa

SEQ ID NO: 3148142 - RNA, 19 nt, Human
auuuuuauauuugaaauau

SEQ ID NO: 3148143 - RNA, 16 nt, Human
auuuuuauauuugaaa

SEQ ID NO: 3148144 - RNA, 21 nt, Human
caaaagguauuuuaaucacca

SEQ ID NO: 3148145 - RNA, 17 nt, Human
caaacauauauaacaau

SEQ ID NO: 3148146 - RNA, 15 nt, Human
auuugcagagacagg

SEQ ID NO: 3148147 - RNA, 19 nt, Human
auuugcagagacaggaccu

SEQ ID NO: 3148148 - RNA, 22 nt, Human
auuugcagagacaggaccugac

SEQ ID NO: 3148149 - RNA, 19 nt, Human
auuuucuauaauuuaaaua

SEQ ID NO: 3148150 - RNA, 18 nt, Human
auuuucuauaauuuaaau

SEQ ID NO: 3148151 - RNA, 17 nt, Human
auuuucuauaauuuaaa

SEQ ID NO: 3148152 - RNA, 16 nt, Human
auuucagcagcugcag

SEQ ID NO: 3148153 - RNA, 15 nt, Human
auuuaucuauaauuu

SEQ ID NO: 3148154 - RNA, 11 nt, Human
auuuaucuaua

SEQ ID NO: 3148155 - RNA, 10 nt, Human
auuuaucuau

SEQ ID NO: 3148156 - RNA, 22 nt, Human
auucaaggaauuucuuaacuuc

SEQ ID NO: 3148157 - RNA, 20 nt, Human
auucaaggaauuucuuaacu

SEQ ID NO: 3148158 - RNA, 22 nt, Human
auugaggacacugauauggguc

SEQ ID NO: 3148159 - RNA, 18 nt, Human
caucuggcucuaauucac

SEQ ID NO: 3148160 - RNA, 14 nt, Human
caucuggcucuaau

SEQ ID NO: 3148161 - RNA, 19 nt, Human
cauccugaggcuccacuug

SEQ ID NO: 3148162 - RNA, 18 nt, Human
cauccugaggcuccacuu

SEQ ID NO: 3148163 - RNA, 19 nt, Human
cauagcagcuuauucacaa

SEQ ID NO: 3148164 - RNA, 19 nt, Human
caguuauggcuauaggugc

SEQ ID NO: 3148165 - RNA, 20 nt, Human
caguuauggcuauaggugcu

SEQ ID NO: 3148166 - RNA, 13 nt, Human
caguuauggcuau

SEQ ID NO: 3148167 - RNA, 21 nt, Human
caguuauuauauuuacaaaug

SEQ ID NO: 3148168 - RNA, 17 nt, Human
caguuauuauauuuaca

SEQ ID NO: 3148169 - RNA, 22 nt, Human
cagugauuaccagggacugagg

SEQ ID NO: 3148170 - RNA, 22 nt, Human
cagucucucuucucuccagcug

SEQ ID NO: 3148171 - RNA, 13 nt, Human
cagugggugcccc

SEQ ID NO: 3148172 - RNA, 17 nt, Human
cagucucucuucucucc

SEQ ID NO: 3148173 - RNA, 14 nt, Human
cagucucucuucuc

SEQ ID NO: 3148174 - RNA, 22 nt, Human
caguuauuauauuuacaaaugg

SEQ ID NO: 3148175 - RNA, 15 nt, Human
caguucagagcugcc

SEQ ID NO: 3148176 - RNA, 16 nt, Human
caguucagagcugccc

SEQ ID NO: 3148177 - RNA, 17 nt, Human
caguucagagcugcccu

SEQ ID NO: 3148178 - RNA, 23 nt, Human
caguucagagcugcccucuccug

SEQ ID NO: 3148179 - RNA, 24 nt, Human
caguucagagcugcccucuccugg

SEQ ID NO: 3148180 - RNA, 18 nt, Human
caguucagagcugcccuc

SEQ ID NO: 3148181 - RNA, 19 nt, Human
caguucagagcugcccucu

SEQ ID NO: 3148182 - RNA, 21 nt, Human
caguucagagcugcccucucc

SEQ ID NO: 3148183 - RNA, 22 nt, Human
caguucagagcugcccucuccu

SEQ ID NO: 3148184 - RNA, 19 nt, Human
cauuauauuuauuacugua

SEQ ID NO: 3148185 - RNA, 16 nt, Human
cauuuguauaaaauaa

SEQ ID NO: 3148186 - RNA, 14 nt, Human
cauuuguauaaaau

SEQ ID NO: 3148187 - RNA, 16 nt, Human
cauuuaucuauaauuu

SEQ ID NO: 3148188 - RNA, 14 nt, Human
cauuuaucuauaau

SEQ ID NO: 3148189 - RNA, 22 nt, Human
cauuuaucuauaauuuaccuaa

SEQ ID NO: 3148190 - RNA, 21 nt, Human
cauuuaucuauaauuuaccua

SEQ ID NO: 3148191 - RNA, 14 nt, Human
ccaaaaggcagaag

SEQ ID NO: 3148192 - RNA, 21 nt, Human
ccaacuccagaaagugacaag

SEQ ID NO: 3148193 - RNA, 14 nt, Human
cagccagacuggca

SEQ ID NO: 3148194 - RNA, 14 nt, Human
cagcacuaaagcag

SEQ ID NO: 3148195 - RNA, 17 nt, Human
cagcacuaaagcagugg

SEQ ID NO: 3148196 - RNA, 19 nt, Human
cagcacuaaagcaguggac

SEQ ID NO: 3148197 - RNA, 20 nt, Human
cagcacuaaagcaguggaca

SEQ ID NO: 3148198 - RNA, 15 nt, Human
cagccagacuggcac

SEQ ID NO: 3148199 - RNA, 18 nt, Human
cagccagacuggcacagu

SEQ ID NO: 3148200 - RNA, 22 nt, Human
cagccagcaguucagagcugcc

SEQ ID NO: 3148201 - RNA, 23 nt, Human
cagccagcaguucagagcugccc

SEQ ID NO: 3148202 - RNA, 18 nt, Human
cagagcugcccucuccug

SEQ ID NO: 3148203 - RNA, 19 nt, Human
cagagcugcccucuccugg

SEQ ID NO: 3148204 - RNA, 20 nt, Human
cagagcugcccucuccuggg

SEQ ID NO: 3148205 - RNA, 21 nt, Human
cagagcugcccucuccugggc

SEQ ID NO: 3148206 - RNA, 17 nt, Human
cagagcugcccucuccu

SEQ ID NO: 3148207 - RNA, 13 nt, Human
cagacagcagcuc

SEQ ID NO: 3148208 - RNA, 15 nt, Human
cagacagcagcucag

SEQ ID NO: 3148209 - RNA, 16 nt, Human
cagacagcagcucagg

SEQ ID NO: 3148210 - RNA, 19 nt, Human
cagacagcagcucaggcac

SEQ ID NO: 3148211 - RNA, 17 nt, Human
cagacagcagcucaggc

SEQ ID NO: 3148212 - RNA, 18 nt, Human
cagacagcagcucaggca

SEQ ID NO: 3148213 - RNA, 17 nt, Human
cagacuggcacaguuuu

SEQ ID NO: 3148214 - RNA, 18 nt, Human
cagacuggcacaguuuuc

SEQ ID NO: 3148215 - RNA, 22 nt, Human
cagacuggcacaguuuucugag

SEQ ID NO: 3148216 - RNA, 23 nt, Human
cagacuggcacaguuuucugaga

SEQ ID NO: 3148217 - RNA, 19 nt, Human
cagacuggauaguccgucu

SEQ ID NO: 3148218 - RNA, 11 nt, Human
caggcuacugu

SEQ ID NO: 3148219 - RNA, 22 nt, Human
cagggcuuuacuccguaacaga

SEQ ID NO: 3148220 - RNA, 14 nt, Human
cagggcucagccug

SEQ ID NO: 3148221 - RNA, 12 nt, Human
cagggcucagcc

SEQ ID NO: 3148222 - RNA, 13 nt, Human
cagggcucagccu

SEQ ID NO: 3148223 - RNA, 16 nt, Human
caggaaagagaacuuc

SEQ ID NO: 3148224 - RNA, 14 nt, Human
cagcuuauugucua

SEQ ID NO: 3148225 - RNA, 20 nt, Human
cagcuguaugauucccagcc

SEQ ID NO: 3148226 - RNA, 20 nt, Human
cagcuuauugucuagugaaa

SEQ ID NO: 3148227 - RNA, 17 nt, Human
cagcuuauucacaagac

SEQ ID NO: 3148228 - RNA, 19 nt, Human
cagcuguaugauucccagc

SEQ ID NO: 3148229 - RNA, 18 nt, Human
cagcugccuccccuccuc

SEQ ID NO: 3148230 - RNA, 19 nt, Human
cagcugccuccccuccucu

SEQ ID NO: 3148231 - RNA, 14 nt, Human
cagcugccuccccu

SEQ ID NO: 3148232 - RNA, 15 nt, Human
cagcugccuccccuc

SEQ ID NO: 3148233 - RNA, 16 nt, Human
cagcugccuccccucc

SEQ ID NO: 3148234 - RNA, 17 nt, Human
cagcugccuccccuccu

SEQ ID NO: 3148235 - RNA, 10 nt, Human
cagcugccuc

SEQ ID NO: 3148236 - RNA, 11 nt, Human
cagcugccucc

SEQ ID NO: 3148237 - RNA, 9 nt, Human
cagcugccu

SEQ ID NO: 3148238 - RNA, 22 nt, Human
ccagacuagauguaguauuuuu

SEQ ID NO: 3148239 - RNA, 18 nt, Human
ccagacuagauguaguau

SEQ ID NO: 3148240 - RNA, 19 nt, Human
ccacuuggucugugagaug

SEQ ID NO: 3148241 - RNA, 17 nt, Human
ccacuuggucugugaga

SEQ ID NO: 3148242 - RNA, 16 nt, Human
ccacuuggucugugag

SEQ ID NO: 3148243 - RNA, 15 nt, Human
ccacuuggucuguga

SEQ ID NO: 3148244 - RNA, 22 nt, Human
ccacuuggucugugagaugcua

SEQ ID NO: 3148245 - RNA, 20 nt, Human
ccacuuggucugugagaugc

SEQ ID NO: 3148246 - RNA, 12 nt, Human
ccacuuggucug

SEQ ID NO: 3148247 - RNA, 15 nt, Human
ccaggggccaugaau

SEQ ID NO: 3148248 - RNA, 18 nt, Human
ccaggaguuuggccagaa

SEQ ID NO: 3148249 - RNA, 17 nt, Human
ccaggaguuuggccaga

SEQ ID NO: 3148250 - RNA, 16 nt, Human
ccaggaguuuggccag

SEQ ID NO: 3148251 - RNA, 15 nt, Human
ccaggaguuuggcca

SEQ ID NO: 3148252 - RNA, 14 nt, Human
ccaggaguuuggcc

SEQ ID NO: 3148253 - RNA, 21 nt, Human
ccagcagccagcucucagcca

SEQ ID NO: 3148254 - RNA, 15 nt, Human
ccccauuguggucac

SEQ ID NO: 3148255 - RNA, 22 nt, Human
ccauuguggucacaggaaguag

SEQ ID NO: 3148256 - RNA, 13 nt, Human
ccauuuaaagcuu

SEQ ID NO: 3148257 - RNA, 18 nt, Human
ccaugggcacugugggua

SEQ ID NO: 3148258 - RNA, 21 nt, Human
ccucuccugggcagcugccuc

SEQ ID NO: 3148259 - RNA, 22 nt, Human
ccucuccugggcagcugccucc

SEQ ID NO: 3148260 - RNA, 17 nt, Human
ccucuccugggcagcug

SEQ ID NO: 3148261 - RNA, 18 nt, Human
ccucuccugggcagcugc

SEQ ID NO: 3148262 - RNA, 19 nt, Human
ccucuccugggcagcugcc

SEQ ID NO: 3148263 - RNA, 20 nt, Human
ccucuccugggcagcugccu

SEQ ID NO: 3148264 - RNA, 14 nt, Human
ccucuccugggcag

SEQ ID NO: 3148265 - RNA, 15 nt, Human
ccucuccugggcagc

SEQ ID NO: 3148266 - RNA, 16 nt, Human
ccucuccugggcagcu

SEQ ID NO: 3148267 - RNA, 15 nt, Human
ccucaugcugccaau

SEQ ID NO: 3148268 - RNA, 13 nt, Human
ccucaugcugcca

SEQ ID NO: 3148269 - RNA, 16 nt, Human
ccucaugcugccaaua

SEQ ID NO: 3148270 - RNA, 21 nt, Human
ccucccagaggagccaccagu

SEQ ID NO: 3148271 - RNA, 20 nt, Human
ccucccagaggagccaccag

SEQ ID NO: 3148272 - RNA, 18 nt, Human
ccuagccgaccucagccu

SEQ ID NO: 3148273 - RNA, 19 nt, Human
ccuagccgaccucagccuu

SEQ ID NO: 3148274 - RNA, 20 nt, Human
ccuagccgaccucagccuuc

SEQ ID NO: 3148275 - RNA, 14 nt, Human
ccuagccgaccuca

SEQ ID NO: 3148276 - RNA, 15 nt, Human
ccuagccgaccucag

SEQ ID NO: 3148277 - RNA, 16 nt, Human
ccuagccgaccucagc

SEQ ID NO: 3148278 - RNA, 17 nt, Human
ccuagccgaccucagcc

SEQ ID NO: 3148279 - RNA, 20 nt, Human
ccuaacgaaguauccuucag

SEQ ID NO: 3148280 - RNA, 15 nt, Human
ccuaacgaaguaucc

SEQ ID NO: 3148281 - RNA, 22 nt, Human
cccugagcucgguggacccagg

SEQ ID NO: 3148282 - RNA, 14 nt, Human
cccugagcaggauu

SEQ ID NO: 3148283 - RNA, 12 nt, Human
cccugagcucgg

SEQ ID NO: 3148284 - RNA, 13 nt, Human
cccucggagaaga

SEQ ID NO: 3148285 - RNA, 16 nt, Human
cucaguccaugaagau

SEQ ID NO: 3148286 - RNA, 18 nt, Human
cucaguagucagacugga

SEQ ID NO: 3148287 - RNA, 18 nt, Human
cuaucucauuuccaagca

SEQ ID NO: 3148288 - RNA, 23 nt, Human
cuaugucauuugcuggagcucug

SEQ ID NO: 3148289 - RNA, 18 nt, Human
cuauguucuaagaaguga

SEQ ID NO: 3148290 - RNA, 12 nt, Human
cuccucugcacu

SEQ ID NO: 3148291 - RNA, 13 nt, Human
cuccucugcacuc

SEQ ID NO: 3148292 - RNA, 13 nt, Human
cuccugucugcca

SEQ ID NO: 3148293 - RNA, 14 nt, Human
cuccugucugccag

SEQ ID NO: 3148294 - RNA, 15 nt, Human
cuccugucugccagc

SEQ ID NO: 3148295 - RNA, 22 nt, Human
cuccucugcuugccaucccucc

SEQ ID NO: 3148296 - RNA, 17 nt, Human
cuccucuguccagggcc

SEQ ID NO: 3148297 - RNA, 18 nt, Human
cuccucuguccagggccc

SEQ ID NO: 3148298 - RNA, 14 nt, Human
cuccucuguccagg

SEQ ID NO: 3148299 - RNA, 15 nt, Human
cuccucuguccaggg

SEQ ID NO: 3148300 - RNA, 16 nt, Human
cuccucuguccagggc

SEQ ID NO: 3148301 - RNA, 23 nt, Human
cucauggguggcacucagucucu

SEQ ID NO: 3148302 - RNA, 19 nt, Human
cucauggguggcacucagu

SEQ ID NO: 3148303 - RNA, 15 nt, Human
cucauggguggcacu

SEQ ID NO: 3148304 - RNA, 14 nt, Human
cucauggguggcac

SEQ ID NO: 3148305 - RNA, 15 nt, Human
cucccagaggagcca

SEQ ID NO: 3148306 - RNA, 22 nt, Human
cucccuccaccucccugcaaua

SEQ ID NO: 3148307 - RNA, 20 nt, Human
cucccuccaccucccugcaa

SEQ ID NO: 3148308 - RNA, 21 nt, Human
cucccuccaccucccugcaau

SEQ ID NO: 3148309 - RNA, 19 nt, Human
cucccuccaccucccugca

SEQ ID NO: 3148310 - RNA, 22 nt, Human
cucuguccagggcccugagcuc

SEQ ID NO: 3148311 - RNA, 15 nt, Human
cucuccccaugaugu

SEQ ID NO: 3148312 - RNA, 16 nt, Human
cucuccccaugauguu

SEQ ID NO: 3148313 - RNA, 19 nt, Human
cucuauguucuaagaagug

SEQ ID NO: 3148314 - RNA, 13 nt, Human
cucucuggccuuc

SEQ ID NO: 3148315 - RNA, 16 nt, Human
cucucuggccuucggc

SEQ ID NO: 3148316 - RNA, 14 nt, Human
cucucuggccuucg

SEQ ID NO: 3148317 - RNA, 16 nt, Human
cucucuucucuccagc

SEQ ID NO: 3148318 - RNA, 22 nt, Human
cucucuggccuucggccuccau

SEQ ID NO: 3148319 - RNA, 16 nt, Human
cucucuguaauaaacu

SEQ ID NO: 3148320 - RNA, 21 nt, Human
cucucuguaauaaacucauuu

SEQ ID NO: 3148321 - RNA, 18 nt, Human
cucgguggacccagggau

SEQ ID NO: 3148322 - RNA, 18 nt, Human
cuaaagcaguggacacca

SEQ ID NO: 3148323 - RNA, 11 nt, Human
cuaaagcagug

SEQ ID NO: 3148324 - RNA, 20 nt, Human
cuaacgaaguauccuucagc

SEQ ID NO: 3148325 - RNA, 19 nt, Human
cuaauaaaaaggugaccau

SEQ ID NO: 3148326 - RNA, 15 nt, Human
cuaauaaaaagguga

SEQ ID NO: 3148327 - RNA, 20 nt, Human
cuacaaaaacacagcaaggg

SEQ ID NO: 3148328 - RNA, 12 nt, Human
ccuuuucccaac

SEQ ID NO: 3148329 - RNA, 17 nt, Human
ccuuagcuuagaccuca

SEQ ID NO: 3148330 - RNA, 18 nt, Human
ccuuagcuuagaccucag

SEQ ID NO: 3148331 - RNA, 21 nt, Human
ccuuauaguuacuguguaauu

SEQ ID NO: 3148332 - RNA, 14 nt, Human
ccuuauaguuacug

SEQ ID NO: 3148333 - RNA, 23 nt, Human
ccuuagcuuagaccucagccugu

SEQ ID NO: 3148334 - RNA, 19 nt, Human
ccuuagcuuagaccucagc

SEQ ID NO: 3148335 - RNA, 20 nt, Human
ccuuagcuuagaccucagcc

SEQ ID NO: 3148336 - RNA, 21 nt, Human
ccuuagcuuagaccucagccu

SEQ ID NO: 3148337 - RNA, 22 nt, Human
ccuuagcuuagaccucagccug

SEQ ID NO: 3148338 - RNA, 22 nt, Human
ccuuccccuugcccagggcuca

SEQ ID NO: 3148339 - RNA, 18 nt, Human
ccuuccccuugcccaggg

SEQ ID NO: 3148340 - RNA, 20 nt, Human
ccuuccccuugcccagggcu

SEQ ID NO: 3148341 - RNA, 17 nt, Human
ccuucucuucacaguca

SEQ ID NO: 3148342 - RNA, 13 nt, Human
ccuugccagacau

SEQ ID NO: 3148343 - RNA, 21 nt, Human
gcuaguaauuggaaaggcagc

SEQ ID NO: 3148344 - RNA, 16 nt, Human
gcuaguaucaaaagaa

SEQ ID NO: 3148345 - RNA, 15 nt, Human
gcuccccucggagaa

SEQ ID NO: 3148346 - RNA, 19 nt, Human
gcucuaauucacagugcuc

SEQ ID NO: 3148347 - RNA, 18 nt, Human
gcucuaauucacagugcu

SEQ ID NO: 3148348 - RNA, 16 nt, Human
gcucuaauucacagug

SEQ ID NO: 3148349 - RNA, 15 nt, Human
gcucuaauucacagu

SEQ ID NO: 3148350 - RNA, 21 nt, Human
gcuucuuucuagaaagagaaa

SEQ ID NO: 3148351 - RNA, 15 nt, Human
gcuucuuucuagaaa

SEQ ID NO: 3148352 - RNA, 12 nt, Human
gcuucuuucuag

SEQ ID NO: 3148353 - RNA, 21 nt, Human
gcuguaacuacuuuauaacua

SEQ ID NO: 3148354 - RNA, 17 nt, Human
gcuggagcucugcccau

SEQ ID NO: 3148355 - RNA, 14 nt, Human
gcuggagcucugcc

SEQ ID NO: 3148356 - RNA, 14 nt, Human
gcugccuccccucc

SEQ ID NO: 3148357 - RNA, 16 nt, Human
gcugccuccccuccuc

SEQ ID NO: 3148358 - RNA, 17 nt, Human
gcugccuccccuccucu

SEQ ID NO: 3148359 - RNA, 20 nt, Human
gcugccuccccuccucugcu

SEQ ID NO: 3148360 - RNA, 21 nt, Human
gcugccuccccuccucugcuu

SEQ ID NO: 3148361 - RNA, 22 nt, Human
gcugccuccccuccucugcuug

SEQ ID NO: 3148362 - RNA, 16 nt, Human
gccauaugaaaaggcu

SEQ ID NO: 3148363 - RNA, 14 nt, Human
gccagccagcagcc

SEQ ID NO: 3148364 - RNA, 12 nt, Human
gccagccagcag

SEQ ID NO: 3148365 - RNA, 13 nt, Human
gccagccagcagc

SEQ ID NO: 3148366 - RNA, 21 nt, Human
gccagcaguucagagcugccc

SEQ ID NO: 3148367 - RNA, 22 nt, Human
gccagcaguucagagcugcccu

SEQ ID NO: 3148368 - RNA, 23 nt, Human
gccagcaguucagagcugcccuc

SEQ ID NO: 3148369 - RNA, 16 nt, Human
gccagcagccagcucu

SEQ ID NO: 3148370 - RNA, 17 nt, Human
gccagcagccagcucuc

SEQ ID NO: 3148371 - RNA, 18 nt, Human
gccagcagccagcucuca

SEQ ID NO: 3148372 - RNA, 19 nt, Human
gccagcagccagcucucag

SEQ ID NO: 3148373 - RNA, 20 nt, Human
gccagcagccagcucucagc

SEQ ID NO: 3148374 - RNA, 21 nt, Human
gccagcagccagcucucagcc

SEQ ID NO: 3148375 - RNA, 22 nt, Human
gccagcagccagcucucagcca

SEQ ID NO: 3148376 - RNA, 23 nt, Human
gccagcagccagcucucagccaa

SEQ ID NO: 3148377 - RNA, 12 nt, Human
gccagcagccag

SEQ ID NO: 3148378 - RNA, 13 nt, Human
gccagcagccagc

SEQ ID NO: 3148379 - RNA, 15 nt, Human
gccagcagccagcuc

SEQ ID NO: 3148380 - RNA, 22 nt, Human
gccagacaucaacagauaaaua

SEQ ID NO: 3148381 - RNA, 14 nt, Human
gccagacauguggu

SEQ ID NO: 3148382 - RNA, 23 nt, Human
gccagaagucaaggcuuagaccc

SEQ ID NO: 3148383 - RNA, 22 nt, Human
gccagaagucaaggcuuagacc

SEQ ID NO: 3148384 - RNA, 20 nt, Human
gccagaagucaaggcuuaga

SEQ ID NO: 3148385 - RNA, 16 nt, Human
gccagaagucaaggcu

SEQ ID NO: 3148386 - RNA, 19 nt, Human
gccagauuuuccugaaaac

SEQ ID NO: 3148387 - RNA, 12 nt, Human
gccagaaauaaa

SEQ ID NO: 3148388 - RNA, 16 nt, Human
gccacuuaauguaugu

SEQ ID NO: 3148389 - RNA, 13 nt, Human
gccacuuaaugua

SEQ ID NO: 3148390 - RNA, 19 nt, Human
gccacuuaauguauguuac

SEQ ID NO: 3148391 - RNA, 18 nt, Human
gccacuuaauguauguua

SEQ ID NO: 3148392 - RNA, 19 nt, Human
gccaccaguucucaugggu

SEQ ID NO: 3148393 - RNA, 13 nt, Human
gccaccaguucuc

SEQ ID NO: 3148394 - RNA, 11 nt, Human
gccaccaguuc

SEQ ID NO: 3148395 - RNA, 13 nt, Human
gcacuuggagcca

SEQ ID NO: 3148396 - RNA, 16 nt, Human
gcacuuggagccaagg

SEQ ID NO: 3148397 - RNA, 22 nt, Human
gcacuuggagccaaggguucag

SEQ ID NO: 3148398 - RNA, 16 nt, Human
gcccccaggugccagu

SEQ ID NO: 3148399 - RNA, 19 nt, Human
gcccuagagcacacuguag

SEQ ID NO: 3148400 - RNA, 13 nt, Human
gcccuagagcaca

SEQ ID NO: 3148401 - RNA, 17 nt, Human
gcccuagagcacacugu

SEQ ID NO: 3148402 - RNA, 23 nt, Human
gccgcuccugucugccagccagc

SEQ ID NO: 3148403 - RNA, 22 nt, Human
gccgcuccugucugccagccag

SEQ ID NO: 3148404 - RNA, 14 nt, Human
gcccuguuaaaaga

SEQ ID NO: 3148405 - RNA, 17 nt, Human
gcccuguuaaaagauga

SEQ ID NO: 3148406 - RNA, 13 nt, Human
gcccuguuaaaag

SEQ ID NO: 3148407 - RNA, 23 nt, Human
ggcccaggaguuuggccagaagu

SEQ ID NO: 3148408 - RNA, 22 nt, Human
ggcccaggaguuuggccagaag

SEQ ID NO: 3148409 - RNA, 21 nt, Human
ggcccaggaguuuggccagaa

SEQ ID NO: 3148410 - RNA, 16 nt, Human
ggccuccauccugagg

SEQ ID NO: 3148411 - RNA, 14 nt, Human
ggcagaacagccgc

SEQ ID NO: 3148412 - RNA, 18 nt, Human
ggcagaacagccgcuccu

SEQ ID NO: 3148413 - RNA, 20 nt, Human
ggcagaacagccgcuccugu

SEQ ID NO: 3148414 - RNA, 23 nt, Human
ggaugguucccuugaugaagaag

SEQ ID NO: 3148415 - RNA, 22 nt, Human
ggaugguucccuugaugaagaa

SEQ ID NO: 3148416 - RNA, 22 nt, Human
ggauguugaaaaaguucugcag

SEQ ID NO: 3148417 - RNA, 15 nt, Human
ggaugacaugucccu

SEQ ID NO: 3148418 - RNA, 16 nt, Human
ggaugacaugucccua

SEQ ID NO: 3148419 - RNA, 20 nt, Human
ggaugacaugucccuacacc

SEQ ID NO: 3148420 - RNA, 12 nt, Human
ggauuuucagcc

SEQ ID NO: 3148421 - RNA, 23 nt, Human
ggacuuaagcaucuggcucuaau

SEQ ID NO: 3148422 - RNA, 19 nt, Human
ggaggcugagaugggagaa

SEQ ID NO: 3148423 - RNA, 15 nt, Human
ggaggcugagauggg

SEQ ID NO: 3148424 - RNA, 21 nt, Human
gggauuuucagcccucagaau

SEQ ID NO: 3148425 - RNA, 20 nt, Human
gggcagcugccuccccuccu

SEQ ID NO: 3148426 - RNA, 23 nt, Human
gggcagcugccuccccuccucug

SEQ ID NO: 3148427 - RNA, 12 nt, Human
gggcagcugccu

SEQ ID NO: 3148428 - RNA, 13 nt, Human
gggcagcugccuc

SEQ ID NO: 3148429 - RNA, 14 nt, Human
gggcagcugccucc

SEQ ID NO: 3148430 - RNA, 19 nt, Human
gggcagcugccuccccucc

SEQ ID NO: 3148431 - RNA, 23 nt, Human
aaaauaauuuuuauauuugaaau

SEQ ID NO: 3148432 - RNA, 21 nt, Human
aaaauaauuuuuauauuugaa

SEQ ID NO: 3148433 - RNA, 20 nt, Human
aaaauaauuuuuauauuuga

SEQ ID NO: 3148434 - RNA, 14 nt, Human
aaaauaaauauauc

SEQ ID NO: 3148435 - RNA, 17 nt, Human
aaaauaaauauaucuac

SEQ ID NO: 3148436 - RNA, 21 nt, Human
aaaacuuuaugcuaagugaaa

SEQ ID NO: 3148437 - RNA, 22 nt, Human
aaaagcuccauuuuuagugaaa

SEQ ID NO: 3148438 - RNA, 20 nt, Human
gggaggcagagguugcagug

SEQ ID NO: 3148439 - RNA, 11 nt, Human
gggaggcagag

SEQ ID NO: 3148440 - RNA, 22 nt, Human
aaaaaugucuuggguaggcggg

SEQ ID NO: 3148441 - RNA, 19 nt, Human
aaaauuuuuucucuaggaa

SEQ ID NO: 3148442 - RNA, 17 nt, Human
aaacaaggaugaauuaa

SEQ ID NO: 3148443 - RNA, 21 nt, Human
aaacauauauaacaaugcugu

SEQ ID NO: 3148444 - RNA, 19 nt, Human
aaacauauauaacaaugcu

SEQ ID NO: 3148445 - RNA, 16 nt, Human
aaacauauauaacaau

SEQ ID NO: 3148446 - RNA, 13 nt, Human
aaacauauauaac

SEQ ID NO: 3148447 - RNA, 14 nt, Human
aaacacaacuauau

SEQ ID NO: 3148448 - RNA, 22 nt, Human
aaacaguugguaacuuuuguga

SEQ ID NO: 3148449 - RNA, 19 nt, Human
aaacaguugguaacuuuug

SEQ ID NO: 3148450 - RNA, 18 nt, Human
aaacaguugguaacuuuu

SEQ ID NO: 3148451 - RNA, 16 nt, Human
aaacaguugguaacuu

SEQ ID NO: 3148452 - RNA, 12 nt, Human
ggguaggcggga

SEQ ID NO: 3148453 - RNA, 16 nt, Human
ggguaggcgggaagga

SEQ ID NO: 3148454 - RNA, 14 nt, Human
gggucaggagaggg

SEQ ID NO: 3148455 - RNA, 16 nt, Human
aaaccacagcaguuga

SEQ ID NO: 3148456 - RNA, 15 nt, Human
aaaccacagcaguug

SEQ ID NO: 3148457 - RNA, 16 nt, Human
aaacucauuucuagca

SEQ ID NO: 3148458 - RNA, 20 nt, Human
ggugauuuagcaggaagcug

SEQ ID NO: 3148459 - RNA, 15 nt, Human
ggugccaguuauggc

SEQ ID NO: 3148460 - RNA, 14 nt, Human
ggucugugagaugc

SEQ ID NO: 3148461 - RNA, 13 nt, Human
aaaggaauuuaaa

SEQ ID NO: 3148462 - RNA, 13 nt, Human
aaagcuuauuaaa

SEQ ID NO: 3148463 - RNA, 16 nt, Human
aaagaaugauuaugaa

SEQ ID NO: 3148464 - RNA, 19 nt, Human
aaacuuuuuuucuguacca

SEQ ID NO: 3148465 - RNA, 15 nt, Human
aaacuuuuuuucugu

SEQ ID NO: 3148466 - RNA, 20 nt, Human
aaagaggcagcuugaaacug

SEQ ID NO: 3148467 - RNA, 22 nt, Human
aaagagaaacaguugguaacuu

SEQ ID NO: 3148468 - RNA, 19 nt, Human
aaagagaaacaguugguaa

SEQ ID NO: 3148469 - RNA, 18 nt, Human
aaagagaacuuccagauc

SEQ ID NO: 3148470 - RNA, 13 nt, Human
aaagacuccaaag

SEQ ID NO: 3148471 - RNA, 23 nt, Human
aaagacuauucaaacagucucag

SEQ ID NO: 3148472 - RNA, 22 nt, Human
aaagacuauucaaacagucuca

SEQ ID NO: 3148473 - RNA, 23 nt, Human
gaggcuccacuuggucugugaga

SEQ ID NO: 3148474 - RNA, 18 nt, Human
gaggcuccacuuggucug

SEQ ID NO: 3148475 - RNA, 19 nt, Human
gaggcuccacuuggucugu

SEQ ID NO: 3148476 - RNA, 13 nt, Human
gaggcagggucag

SEQ ID NO: 3148477 - RNA, 15 nt, Human
gaggacgcucucugg

SEQ ID NO: 3148478 - RNA, 20 nt, Human
gcacaguuuucugagaaaga

SEQ ID NO: 3148479 - RNA, 22 nt, Human
gcacaguuuucugagaaagacu

SEQ ID NO: 3148480 - RNA, 23 nt, Human
gcacaguuuucugagaaagacua

SEQ ID NO: 3148481 - RNA, 22 nt, Human
gcaauagucaaauugugugaaa

SEQ ID NO: 3148482 - RNA, 20 nt, Human
gcaaguauuagaauaccaca

SEQ ID NO: 3148483 - RNA, 16 nt, Human
gaugaucuuuaaaaua

SEQ ID NO: 3148484 - RNA, 22 nt, Human
gaugguucccuugaugaagaag

SEQ ID NO: 3148485 - RNA, 18 nt, Human
gauguagaggagaaacug

SEQ ID NO: 3148486 - RNA, 17 nt, Human
gauguagaggagaaacu

SEQ ID NO: 3148487 - RNA, 13 nt, Human
gauguaguauuuu

SEQ ID NO: 3148488 - RNA, 15 nt, Human
gauuuaccacuugug

SEQ ID NO: 3148489 - RNA, 16 nt, Human
gauuuaccacuugugu

SEQ ID NO: 3148490 - RNA, 13 nt, Human
gaacugaaaucau

SEQ ID NO: 3148491 - RNA, 14 nt, Human
gaacugaaaucaua

SEQ ID NO: 3148492 - RNA, 19 nt, Human
gaacccgggaggcagaggu

SEQ ID NO: 3148493 - RNA, 23 nt, Human
gaagcaacccaaauguucaucaa

SEQ ID NO: 3148494 - RNA, 14 nt, Human
gaagcaaaauuuuu

SEQ ID NO: 3148495 - RNA, 12 nt, Human
gacuguggcugc

SEQ ID NO: 3148496 - RNA, 14 nt, Human
gacuguggcugcua

SEQ ID NO: 3148497 - RNA, 15 nt, Human
gacuguggcugcuag

SEQ ID NO: 3148498 - RNA, 18 nt, Human
gacucuuaagaagacugc

SEQ ID NO: 3148499 - RNA, 14 nt, Human
gacucuuaagaaga

SEQ ID NO: 3148500 - RNA, 21 nt, Human
gacucuuaagaagacugcauu

SEQ ID NO: 3148501 - RNA, 17 nt, Human
gacgcucucuggccuuc

SEQ ID NO: 3148502 - RNA, 16 nt, Human
gacgcucucuggccuu

SEQ ID NO: 3148503 - RNA, 15 nt, Human
gacgcucucuggccu

SEQ ID NO: 3148504 - RNA, 15 nt, Human
gaccugacuauugaa

SEQ ID NO: 3148505 - RNA, 14 nt, Human
gacagugaaagaaa

SEQ ID NO: 3148506 - RNA, 21 nt, Human
gacagugagacucugucucag

SEQ ID NO: 3148507 - RNA, 16 nt, Human
gacauuugcucaugga

SEQ ID NO: 3148508 - RNA, 16 nt, Human
gacacacugaagaagc

SEQ ID NO: 3148509 - RNA, 15 nt, Human
gacacacugaagaag

SEQ ID NO: 3148510 - RNA, 14 nt, Human
gacacacugaagaa

SEQ ID NO: 3148511 - RNA, 21 nt, Human
gacagaaagcagaacagugau

SEQ ID NO: 3148512 - RNA, 18 nt, Human
cuggacuuaagcaucugg

SEQ ID NO: 3148513 - RNA, 23 nt, Human
cuggacuuaagcaucuggcucua

SEQ ID NO: 3148514 - RNA, 22 nt, Human
cuggacuuaagcaucuggcucu

SEQ ID NO: 3148515 - RNA, 19 nt, Human
cuggcucuaauucacagug

SEQ ID NO: 3148516 - RNA, 15 nt, Human
cuggcucuaauucac

SEQ ID NO: 3148517 - RNA, 22 nt, Human
cuggcucuaauucacagugcuc

SEQ ID NO: 3148518 - RNA, 20 nt, Human
cuggcucuaauucacagugc

SEQ ID NO: 3148519 - RNA, 23 nt, Human
cuggcucuaauucacagugcucu

SEQ ID NO: 3148520 - RNA, 14 nt, Human
cugggcagcugccu

SEQ ID NO: 3148521 - RNA, 15 nt, Human
cugggcagcugccuc

SEQ ID NO: 3148522 - RNA, 13 nt, Human
cugggcagcugcc

SEQ ID NO: 3148523 - RNA, 20 nt, Human
cuggggccucggagccucau

SEQ ID NO: 3148524 - RNA, 23 nt, Human
cuggggccucggagccucauccg

SEQ ID NO: 3148525 - RNA, 21 nt, Human
cuggugccucaccccuugcca

SEQ ID NO: 3148526 - RNA, 12 nt, Human
cuggugccucac

SEQ ID NO: 3148527 - RNA, 17 nt, Human
cugcaagcacagcccuu

SEQ ID NO: 3148528 - RNA, 14 nt, Human
cugcaagcacagcc

SEQ ID NO: 3148529 - RNA, 19 nt, Human
cugcaagguacucugguga

SEQ ID NO: 3148530 - RNA, 18 nt, Human
cugcaagguacucuggug

SEQ ID NO: 3148531 - RNA, 17 nt, Human
cugcaagguacucuggu

SEQ ID NO: 3148532 - RNA, 16 nt, Human
cugcaagguacucugg

SEQ ID NO: 3148533 - RNA, 16 nt, Human
cugcacuccagccuga

SEQ ID NO: 3148534 - RNA, 20 nt, Human
cugcacuccagccugagcga

SEQ ID NO: 3148535 - RNA, 17 nt, Human
cugcacuccagccugag

SEQ ID NO: 3148536 - RNA, 20 nt, Human
cugugcugcccgucuucagc

SEQ ID NO: 3148537 - RNA, 21 nt, Human
cuguguacagaauucugcuac

SEQ ID NO: 3148538 - RNA, 18 nt, Human
cuguguaauuagugccac

SEQ ID NO: 3148539 - RNA, 23 nt, Human
cuucaugcugucuacacuaagag

SEQ ID NO: 3148540 - RNA, 11 nt, Human
cuucagacaua

SEQ ID NO: 3148541 - RNA, 21 nt, Human
cuuugagugucuuaauuaaaa

SEQ ID NO: 3148542 - RNA, 20 nt, Human
cuuuaaagggauggcaagau

SEQ ID NO: 3148543 - RNA, 13 nt, Human
cuuggcccaggag

SEQ ID NO: 3148544 - RNA, 20 nt, Human
cuucuguuuuauaauuuugu

SEQ ID NO: 3148545 - RNA, 15 nt, Human
cuucuguuuuauaau

SEQ ID NO: 3148546 - RNA, 21 nt, Human
aacagccgcuccugucugcca

SEQ ID NO: 3148547 - RNA, 20 nt, Human
aacagccgcuccugucugcc

SEQ ID NO: 3148548 - RNA, 19 nt, Human
aacagcccuccucugcacu

SEQ ID NO: 3148549 - RNA, 17 nt, Human
aacagcccuccucugca

SEQ ID NO: 3148550 - RNA, 18 nt, Human
aaaucucaauauuucaga

SEQ ID NO: 3148551 - RNA, 21 nt, Human
aaauauuuauuuuaauaaugu

SEQ ID NO: 3148552 - RNA, 22 nt, Human
aaauguugacaugggacauuug

SEQ ID NO: 3148553 - RNA, 13 nt, Human
aaauguucaucaa

SEQ ID NO: 3148554 - RNA, 23 nt, Human
aaauguugacaugggacauuugc

SEQ ID NO: 3148555 - RNA, 17 nt, Human
aaaagaaagaaaaucag

SEQ ID NO: 3148556 - RNA, 12 nt, Human
aaaagaauauuu

SEQ ID NO: 3148557 - RNA, 11 nt, Human
aaaagaaugau

SEQ ID NO: 3148558 - RNA, 13 nt, Human
aaaagacuccaaa

SEQ ID NO: 3148559 - RNA, 13 nt, Human
aaaagaauauuuu

SEQ ID NO: 3148560 - RNA, 20 nt, Human
aaaagacaaggaaaaaauaa

SEQ ID NO: 3148561 - RNA, 11 nt, Human
aaaaucauuuc

SEQ ID NO: 3148562 - RNA, 12 nt, Human
aaaaucauuucu

SEQ ID NO: 3148563 - RNA, 10 nt, Human
aaaaucauuu

SEQ ID NO: 3148564 - RNA, 19 nt, Human
aaacccuugccaugugcua

SEQ ID NO: 3148565 - RNA, 15 nt, Human
aaacugcacugucaa

SEQ ID NO: 3148566 - RNA, 23 nt, Human
aaacuuuuuuucuguaccaguua

SEQ ID NO: 3148567 - RNA, 22 nt, Human
aaacuuuuuuucuguaccaguu

SEQ ID NO: 3148568 - RNA, 21 nt, Human
aaaaucauuucugcaucagcu

SEQ ID NO: 3148569 - RNA, 15 nt, Human
aaagcauuguaaaug

SEQ ID NO: 3148570 - RNA, 17 nt, Human
aaagcauuguaaaugug

SEQ ID NO: 3148571 - RNA, 16 nt, Human
aauauguuagcaaaga

SEQ ID NO: 3148572 - RNA, 16 nt, Human
aaucucaauauuucag

SEQ ID NO: 3148573 - RNA, 15 nt, Human
aaggcaguuuucuaa

SEQ ID NO: 3148574 - RNA, 21 nt, Human
aagccuuggggcugaugcagu

SEQ ID NO: 3148575 - RNA, 22 nt, Human
aagacagagccccacccucaga

SEQ ID NO: 3148576 - RNA, 20 nt, Human
aagagaaacaguugguaacu

SEQ ID NO: 3148577 - RNA, 15 nt, Human
aagaagacugcauua

SEQ ID NO: 3148578 - RNA, 20 nt, Human
aagaagacugcauuauauuu

SEQ ID NO: 3148579 - RNA, 21 nt, Human
aagacaaggaaaaaauaacaa

SEQ ID NO: 3148580 - RNA, 20 nt, Human
aacgcaggcccccaggugcc

SEQ ID NO: 3148581 - RNA, 13 nt, Human
aagaacugaaauc

SEQ ID NO: 3148582 - RNA, 12 nt, Human
aagaacugaaau

SEQ ID NO: 3148583 - RNA, 11 nt, Human
aagaacugaaa

SEQ ID NO: 3148584 - RNA, 15 nt, Human
aagaacugaaaucau

SEQ ID NO: 3148585 - RNA, 16 nt, Human
acccucaugcugccaa

SEQ ID NO: 3148586 - RNA, 14 nt, Human
acccucaugcugcc

SEQ ID NO: 3148587 - RNA, 22 nt, Human
acccucaugcugccaauauccu

SEQ ID NO: 3148588 - RNA, 20 nt, Human
acccucagaugcacaugagc

SEQ ID NO: 3148589 - RNA, 21 nt, Human
acccugucucuacuaaaaaua

SEQ ID NO: 3148590 - RNA, 11 nt, Human
accucagccug

SEQ ID NO: 3148591 - RNA, 12 nt, Human
accucagccugu

SEQ ID NO: 3148592 - RNA, 16 nt, Human
accucagccugugcug

SEQ ID NO: 3148593 - RNA, 17 nt, Human
accucagccugugcugc

SEQ ID NO: 3148594 - RNA, 18 nt, Human
accucagccugugcugcc

SEQ ID NO: 3148595 - RNA, 19 nt, Human
accucagccugugcugccc

SEQ ID NO: 3148596 - RNA, 20 nt, Human
accucagccuuccccuugcc

SEQ ID NO: 3148597 - RNA, 20 nt, Human
accucugccucagaaaacaa

SEQ ID NO: 3148598 - RNA, 23 nt, Human
accuugcugcaagcacagcccuu

SEQ ID NO: 3148599 - RNA, 22 nt, Human
accuugcugcaagcacagcccu

SEQ ID NO: 3148600 - RNA, 14 nt, Human
acgcacacugucug

SEQ ID NO: 3148601 - RNA, 17 nt, Human
acuguaaaauaauaacu

SEQ ID NO: 3148602 - RNA, 20 nt, Human
acuucuugcuucuuucuaga

SEQ ID NO: 3148603 - RNA, 11 nt, Human
acuucuugcuu

SEQ ID NO: 3148604 - RNA, 19 nt, Human
acuucuugcuucuuucuag

SEQ ID NO: 3148605 - RNA, 18 nt, Human
acuucuugcuucuuucua

SEQ ID NO: 3148606 - RNA, 21 nt, Human
acuucagacauagaauuaaca

SEQ ID NO: 3148607 - RNA, 21 nt, Human
acuuaaaaaugguuuaaaugg

SEQ ID NO: 3148608 - RNA, 22 nt, Human
acuuaaaaaugguuuaaauggu

SEQ ID NO: 3148609 - RNA, 18 nt, Human
acuucaaauccuugaaga

SEQ ID NO: 3148610 - RNA, 12 nt, Human
acuucagacaua

SEQ ID NO: 3148611 - RNA, 17 nt, Human
acuucaaauccuugaag

SEQ ID NO: 3148612 - RNA, 19 nt, Human
acugauaugggucuugaua

SEQ ID NO: 3148613 - RNA, 13 nt, Human
acugacacaugcu

SEQ ID NO: 3148614 - RNA, 16 nt, Human
acucccaccugacaca

SEQ ID NO: 3148615 - RNA, 14 nt, Human
acucccaccugaca

SEQ ID NO: 3148616 - RNA, 14 nt, Human
acucccuuucaaca

SEQ ID NO: 3148617 - RNA, 19 nt, Human
acuccguaacagauuuugu

SEQ ID NO: 3148618 - RNA, 19 nt, Human
acucguuaauuuguagugu

SEQ ID NO: 3148619 - RNA, 14 nt, Human
acucguuaauuugu

SEQ ID NO: 3148620 - RNA, 15 nt, Human
acaccaauauucaua

SEQ ID NO: 3148621 - RNA, 19 nt, Human
aauucugcuaccucacugg

SEQ ID NO: 3148622 - RNA, 15 nt, Human
aauucugcuaccuca

SEQ ID NO: 3148623 - RNA, 16 nt, Human
aauucugcuaccucac

SEQ ID NO: 3148624 - RNA, 15 nt, Human
aauuggagcucgugg

SEQ ID NO: 3148625 - RNA, 15 nt, Human
aauuggauuuccuaa

SEQ ID NO: 3148626 - RNA, 11 nt, Human
aauuggauuuc

SEQ ID NO: 3148627 - RNA, 17 nt, Human
aauuggauuuccuaaua

SEQ ID NO: 3148628 - RNA, 13 nt, Human
aauuccuuagcuu

SEQ ID NO: 3148629 - RNA, 23 nt, Human
aauuccuuagcuuagaccucagc

SEQ ID NO: 3148630 - RNA, 11 nt, Human
aauuguaauag

SEQ ID NO: 3148631 - RNA, 22 nt, Human
aauuucauaccuaucaucuuaa

SEQ ID NO: 3148632 - RNA, 15 nt, Human
acauguggugggaca

SEQ ID NO: 3148633 - RNA, 23 nt, Human
acauguggugggacagggaccca

SEQ ID NO: 3148634 - RNA, 19 nt, Human
acauuuguauaaaauaauu

SEQ ID NO: 3148635 - RNA, 16 nt, Human
acauuuguauaaaaua

SEQ ID NO: 3148636 - RNA, 14 nt, Human
acauuuguauaaaa

SEQ ID NO: 3148637 - RNA, 15 nt, Human
acauuugcucaugga

SEQ ID NO: 3148638 - RNA, 22 nt, Human
acaggaugguucccuugaugaa

SEQ ID NO: 3148639 - RNA, 24 nt, Human
acaggaugguucccuugaugaaga

SEQ ID NO: 3148640 - RNA, 19 nt, Human
acagugauuaccagggacu

SEQ ID NO: 3148641 - RNA, 21 nt, Human
acagugcucuuuucuccucac

SEQ ID NO: 3148642 - RNA, 17 nt, Human
acagugcucuuuucucc

SEQ ID NO: 3148643 - RNA, 16 nt, Human
acagugcucuuuucuc

SEQ ID NO: 3148644 - RNA, 15 nt, Human
acagugcucuuuucu

SEQ ID NO: 3148645 - RNA, 16 nt, Human
agagaaacaguuggua

SEQ ID NO: 3148646 - RNA, 13 nt, Human
agagaaacaguug

SEQ ID NO: 3148647 - RNA, 14 nt, Human
agacuagauguagu

SEQ ID NO: 3148648 - RNA, 13 nt, Human
agacuagauguag

SEQ ID NO: 3148649 - RNA, 12 nt, Human
agacuagaugua

SEQ ID NO: 3148650 - RNA, 23 nt, Human
agacuagauguaguauuuuuugu

SEQ ID NO: 3148651 - RNA, 19 nt, Human
agacuagauguaguauuuu

SEQ ID NO: 3148652 - RNA, 16 nt, Human
agacuagauguaguau

SEQ ID NO: 3148653 - RNA, 19 nt, Human
agacaaggaaaaaauaaca

SEQ ID NO: 3148654 - RNA, 21 nt, Human
agaagacugcauuauauuuau

SEQ ID NO: 3148655 - RNA, 18 nt, Human
agaagacugcauuauauu

SEQ ID NO: 3148656 - RNA, 13 nt, Human
agaagagcuguuc

SEQ ID NO: 3148657 - RNA, 20 nt, Human
agaagagcuguucacagcca

SEQ ID NO: 3148658 - RNA, 13 nt, Human
agaagauagcagg

SEQ ID NO: 3148659 - RNA, 19 nt, Human
agaagucaaggcuuagacc

SEQ ID NO: 3148660 - RNA, 18 nt, Human
agaagucaaggcuuagac

SEQ ID NO: 3148661 - RNA, 17 nt, Human
agaagucaaggcuuaga

SEQ ID NO: 3148662 - RNA, 16 nt, Human
agaagucaaggcuuag

SEQ ID NO: 3148663 - RNA, 22 nt, Human
agaacagugauuaccagggacu

SEQ ID NO: 3148664 - RNA, 18 nt, Human
agaacagccgcuccuguc

SEQ ID NO: 3148665 - RNA, 19 nt, Human
agaacagccgcuccugucu

SEQ ID NO: 3148666 - RNA, 20 nt, Human
agaacagccgcuccugucug

SEQ ID NO: 3148667 - RNA, 22 nt, Human
agaacagccgcuccugucugcc

SEQ ID NO: 3148668 - RNA, 23 nt, Human
agaacagccgcuccugucugcca

SEQ ID NO: 3148669 - RNA, 13 nt, Human
agcaucuggcucu

SEQ ID NO: 3148670 - RNA, 18 nt, Human
agcaucuggcucuaauuc

SEQ ID NO: 3148671 - RNA, 16 nt, Human
agcaucuggcucuaau

SEQ ID NO: 3148672 - RNA, 17 nt, Human
agccaacuaugauuauu

SEQ ID NO: 3148673 - RNA, 20 nt, Human
agccaacuaugauuauuaac

SEQ ID NO: 3148674 - RNA, 22 nt, Human
agccaaggguucagagacucag

SEQ ID NO: 3148675 - RNA, 18 nt, Human
agccaaggguucagagac

SEQ ID NO: 3148676 - RNA, 14 nt, Human
agccagcaguucag

SEQ ID NO: 3148677 - RNA, 12 nt, Human
agcaguggacac

SEQ ID NO: 3148678 - RNA, 15 nt, Human
agcaguggacaccag

SEQ ID NO: 3148679 - RNA, 19 nt, Human
agcaguggacaccaggagu

SEQ ID NO: 3148680 - RNA, 19 nt, Human
agcacugacuucuaaguaa

SEQ ID NO: 3148681 - RNA, 17 nt, Human
agcacugacuucuaagu

SEQ ID NO: 3148682 - RNA, 12 nt, Human
agcagcucaggc

SEQ ID NO: 3148683 - RNA, 13 nt, Human
agcagcucaggca

SEQ ID NO: 3148684 - RNA, 14 nt, Human
agcagcucaggcac

SEQ ID NO: 3148685 - RNA, 20 nt, Human
agauagauaggucagugcaa

SEQ ID NO: 3148686 - RNA, 17 nt, Human
aggcuagauguauguac

SEQ ID NO: 3148687 - RNA, 17 nt, Human
agggacaggauaagagg

SEQ ID NO: 3148688 - RNA, 12 nt, Human
aggcuuagaccc

SEQ ID NO: 3148689 - RNA, 21 nt, Human
aggcuuagacccucaugcugc

SEQ ID NO: 3148690 - RNA, 14 nt, Human
aggcuuagacccuc

SEQ ID NO: 3148691 - RNA, 22 nt, Human
aggcuuagacccucaugcugcc

SEQ ID NO: 3148692 - RNA, 20 nt, Human
agggauuagggagagaagau

SEQ ID NO: 3148693 - RNA, 23 nt, Human
aggccaugggcacuguggguaga

SEQ ID NO: 3148694 - RNA, 20 nt, Human
aggcagagguugcagugagc

SEQ ID NO: 3148695 - RNA, 18 nt, Human
aggaggguuagggagggg

SEQ ID NO: 3148696 - RNA, 14 nt, Human
agcuguaugauucc

SEQ ID NO: 3148697 - RNA, 14 nt, Human
agcugcugaaacaa

SEQ ID NO: 3148698 - RNA, 15 nt, Human
agcugcugaaacaac

SEQ ID NO: 3148699 - RNA, 16 nt, Human
agcugcugaaacaaca

SEQ ID NO: 3148700 - RNA, 23 nt, Human
agcugacuaaacuuuuuuucugu

SEQ ID NO: 3148701 - RNA, 18 nt, Human
aggaaaaaauaacaauga

SEQ ID NO: 3148702 - RNA, 18 nt, Human
agcuguaugauucccagc

SEQ ID NO: 3148703 - RNA, 17 nt, Human
agcuguaugauucccag

SEQ ID NO: 3148704 - RNA, 15 nt, Human
agcgacagugagacu

SEQ ID NO: 3148705 - RNA, 13 nt, Human
agcgacagugaga

SEQ ID NO: 3148706 - RNA, 12 nt, Human
agcuacaaaugc

SEQ ID NO: 3148707 - RNA, 13 nt, Human
agcuacaaaugca

SEQ ID NO: 3148708 - RNA, 13 nt, Human
agucauuuaauaa

SEQ ID NO: 3148709 - RNA, 19 nt, Human
agugaugucacuagggcag

SEQ ID NO: 3148710 - RNA, 13 nt, Human
agugauuaccagg

SEQ ID NO: 3148711 - RNA, 13 nt, Human
aguacucauacau

SEQ ID NO: 3148712 - RNA, 20 nt, Human
auacacacucaaaucaagaa

SEQ ID NO: 3148713 - RNA, 16 nt, Human
auaaguacuguguaca

SEQ ID NO: 3148714 - RNA, 13 nt, Human
auaaguacugugu

SEQ ID NO: 3148715 - RNA, 15 nt, Human
auaaaagacagugaa

SEQ ID NO: 3148716 - RNA, 16 nt, Human
auaaaagacagugaaa

SEQ ID NO: 3148717 - RNA, 15 nt, Human
aguuaauuuuuccaa

SEQ ID NO: 3148718 - RNA, 23 nt, Human
aguuaauuuuuccaacuacuaau

SEQ ID NO: 3148719 - RNA, 17 nt, Human
aguuaauuuuuccaacu

SEQ ID NO: 3148720 - RNA, 23 nt, Human
auggcuuccuggcaauagucaaa

SEQ ID NO: 3148721 - RNA, 14 nt, Human
augggaaagcauug

SEQ ID NO: 3148722 - RNA, 20 nt, Human
augggaaagcauuguaaaug

SEQ ID NO: 3148723 - RNA, 20 nt, Human
augggacauuugcucaugga

SEQ ID NO: 3148724 - RNA, 15 nt, Human
augggacagggagga

SEQ ID NO: 3148725 - RNA, 21 nt, Human
augcuucuguuuuauaauuuu

SEQ ID NO: 3148726 - RNA, 21 nt, Human
aucaugaauuaguuuuauaug

SEQ ID NO: 3148727 - RNA, 12 nt, Human
auccuugaagau

SEQ ID NO: 3148728 - RNA, 17 nt, Human
aucaaacugaagccaga

SEQ ID NO: 3148729 - RNA, 15 nt, Human
aucaaacugaagcca

SEQ ID NO: 3148730 - RNA, 16 nt, Human
aucaaacugaagccag

SEQ ID NO: 3148731 - RNA, 14 nt, Human
aucaaacugaagcc

SEQ ID NO: 3148732 - RNA, 14 nt, Human
aucaaaagaaagaa

SEQ ID NO: 3148733 - RNA, 16 nt, Human
caaagaguuaauauau

SEQ ID NO: 3148734 - RNA, 14 nt, Human
caaagaaauguaag

SEQ ID NO: 3148735 - RNA, 16 nt, Human
caaagaaaguguauug

SEQ ID NO: 3148736 - RNA, 14 nt, Human
caaagaaaguguau

SEQ ID NO: 3148737 - RNA, 16 nt, Human
auuuuaauaauguuuc

SEQ ID NO: 3148738 - RNA, 19 nt, Human
auuuuaauaauguuucaaa

SEQ ID NO: 3148739 - RNA, 18 nt, Human
auuuuaauaauguuucaa

SEQ ID NO: 3148740 - RNA, 13 nt, Human
caagaaaugaaag

SEQ ID NO: 3148741 - RNA, 19 nt, Human
caagacugcacaucaaaau

SEQ ID NO: 3148742 - RNA, 16 nt, Human
caagcauaccaacacg

SEQ ID NO: 3148743 - RNA, 21 nt, Human
caagcauaccaacacgagcag

SEQ ID NO: 3148744 - RNA, 19 nt, Human
caagcauuuagauguauag

SEQ ID NO: 3148745 - RNA, 16 nt, Human
caagcauuuagaugua

SEQ ID NO: 3148746 - RNA, 19 nt, Human
caaggguucagagacucag

SEQ ID NO: 3148747 - RNA, 20 nt, Human
caaggguucagagacucagg

SEQ ID NO: 3148748 - RNA, 16 nt, Human
caagguacucugguga

SEQ ID NO: 3148749 - RNA, 14 nt, Human
caagguacucuggu

SEQ ID NO: 3148750 - RNA, 23 nt, Human
caaauuuacagagacagaaagca

SEQ ID NO: 3148751 - RNA, 17 nt, Human
caaauuuacagagacag

SEQ ID NO: 3148752 - RNA, 16 nt, Human
caaauuuacagagaca

SEQ ID NO: 3148753 - RNA, 23 nt, Human
caacugggguggguggggcagug

SEQ ID NO: 3148754 - RNA, 23 nt, Human
cacaagaaaugaaagcagggacu

SEQ ID NO: 3148755 - RNA, 13 nt, Human
cacaagaaaugaa

SEQ ID NO: 3148756 - RNA, 21 nt, Human
cacaagaaaugaaagcaggga

SEQ ID NO: 3148757 - RNA, 15 nt, Human
cacaagaaaugaaag

SEQ ID NO: 3148758 - RNA, 18 nt, Human
cacaccaggcgcuaauuc

SEQ ID NO: 3148759 - RNA, 20 nt, Human
caauauccuaauaaaaaggu

SEQ ID NO: 3148760 - RNA, 19 nt, Human
caauauccuaauaaaaagg

SEQ ID NO: 3148761 - RNA, 18 nt, Human
caauauccuaauaaaaag

SEQ ID NO: 3148762 - RNA, 16 nt, Human
caauauccuaauaaaa

SEQ ID NO: 3148763 - RNA, 15 nt, Human
caauauccuaauaaa

SEQ ID NO: 3148764 - RNA, 14 nt, Human
caauauccuaauaa

SEQ ID NO: 3148765 - RNA, 13 nt, Human
caauauccuaaua

SEQ ID NO: 3148766 - RNA, 12 nt, Human
caauauccuaau

SEQ ID NO: 3148767 - RNA, 20 nt, Human
caccaguucucauggguggc

SEQ ID NO: 3148768 - RNA, 11 nt, Human
caccaguucuc

SEQ ID NO: 3148769 - RNA, 22 nt, Human
caccaggguccuuuugacacug

SEQ ID NO: 3148770 - RNA, 13 nt, Human
cacaggcaacuga

SEQ ID NO: 3148771 - RNA, 14 nt, Human
cacaggcaacugag

SEQ ID NO: 3148772 - RNA, 17 nt, Human
cacaggcaacugaggca

SEQ ID NO: 3148773 - RNA, 18 nt, Human
cacaggcaacugaggcag

SEQ ID NO: 3148774 - RNA, 19 nt, Human
cacaggcaacugaggcaga

SEQ ID NO: 3148775 - RNA, 20 nt, Human
cacaguuuucugagaaagac

SEQ ID NO: 3148776 - RNA, 16 nt, Human
cacaugaaguccaagc

SEQ ID NO: 3148777 - RNA, 20 nt, Human
cacaugaaguccaagcauuu

SEQ ID NO: 3148778 - RNA, 17 nt, Human
cacaugaaguccaagca

SEQ ID NO: 3148779 - RNA, 21 nt, Human
cacaguuuucugagaaagacu

SEQ ID NO: 3148780 - RNA, 22 nt, Human
cacaguuuucugagaaagacua

SEQ ID NO: 3148781 - RNA, 17 nt, Human
ucacuuuuucugauaaa

SEQ ID NO: 3148782 - RNA, 16 nt, Human
ucacuuuuucugauaa

SEQ ID NO: 3148783 - RNA, 14 nt, Human
ucacuuuuucugau

SEQ ID NO: 3148784 - RNA, 13 nt, Human
ucacuuuuucuga

SEQ ID NO: 3148785 - RNA, 17 nt, Human
ucacuugucaauaaaau

SEQ ID NO: 3148786 - RNA, 19 nt, Human
ucagacauagaauuaacac

SEQ ID NO: 3148787 - RNA, 22 nt, Human
ucagacauagaauuaacacaug

SEQ ID NO: 3148788 - RNA, 23 nt, Human
ucagagcugcccucuccugggca

SEQ ID NO: 3148789 - RNA, 21 nt, Human
uauuucuaugaaauauuaugu

SEQ ID NO: 3148790 - RNA, 22 nt, Human
uauuucuaugaaauauuauguu

SEQ ID NO: 3148791 - RNA, 19 nt, Human
uauuuggaaauaaagucag

SEQ ID NO: 3148792 - RNA, 17 nt, Human
uauuuggaaauaaaguc

SEQ ID NO: 3148793 - RNA, 16 nt, Human
uauuuggaaauaaagu

SEQ ID NO: 3148794 - RNA, 14 nt, Human
ucaaagaaagugua

SEQ ID NO: 3148795 - RNA, 12 nt, Human
ucaaagaaagug

SEQ ID NO: 3148796 - RNA, 16 nt, Human
ucaaagaaaguguauu

SEQ ID NO: 3148797 - RNA, 15 nt, Human
ucaaagaaaguguau

SEQ ID NO: 3148798 - RNA, 16 nt, Human
ucaaacugaagccaga

SEQ ID NO: 3148799 - RNA, 23 nt, Human
ucacaggacagcccuucuuucca

SEQ ID NO: 3148800 - RNA, 19 nt, Human
ucacaggaaguagaggagg

SEQ ID NO: 3148801 - RNA, 14 nt, Human
ucacaggaaguaga

SEQ ID NO: 3148802 - RNA, 17 nt, Human
ucccucccuccaccucc

SEQ ID NO: 3148803 - RNA, 16 nt, Human
ucccaaauuucauacc

SEQ ID NO: 3148804 - RNA, 20 nt, Human
uccaugggccauaugaaaag

SEQ ID NO: 3148805 - RNA, 17 nt, Human
uccagauccuggaaauc

SEQ ID NO: 3148806 - RNA, 16 nt, Human
uccagauccuggaaau

SEQ ID NO: 3148807 - RNA, 14 nt, Human
uccagauccuggaa

SEQ ID NO: 3148808 - RNA, 13 nt, Human
uccacuuggucug

SEQ ID NO: 3148809 - RNA, 12 nt, Human
uccacuuggucu

SEQ ID NO: 3148810 - RNA, 23 nt, Human
uccaccucccugcaauaaaaugg

SEQ ID NO: 3148811 - RNA, 14 nt, Human
uccaccuacaugag

SEQ ID NO: 3148812 - RNA, 23 nt, Human
uccaagcauaccaacacgagcag

SEQ ID NO: 3148813 - RNA, 17 nt, Human
uccaagcauuuagaugu

SEQ ID NO: 3148814 - RNA, 23 nt, Human
uccaaacugacucuuaagaagac

SEQ ID NO: 3148815 - RNA, 12 nt, Human
uccaaagaaaug

SEQ ID NO: 3148816 - RNA, 16 nt, Human
ucauuucugcaucagc

SEQ ID NO: 3148817 - RNA, 22 nt, Human
ucauuucugcaucagcugcuga

SEQ ID NO: 3148818 - RNA, 14 nt, Human
ucauuucuuugagu

SEQ ID NO: 3148819 - RNA, 16 nt, Human
ucauuauuugcagaga

SEQ ID NO: 3148820 - RNA, 23 nt, Human
uccugguccccucagcucugccu

SEQ ID NO: 3148821 - RNA, 21 nt, Human
ucuacacuaagagagaaugag

SEQ ID NO: 3148822 - RNA, 17 nt, Human
ucuacacuccagugaga

SEQ ID NO: 3148823 - RNA, 17 nt, Human
ucuacacuaagagagaa

SEQ ID NO: 3148824 - RNA, 18 nt, Human
ucucuucacagucacauu

SEQ ID NO: 3148825 - RNA, 16 nt, Human
ucucuucucuccagcu

SEQ ID NO: 3148826 - RNA, 15 nt, Human
ucucuucucuccagc

SEQ ID NO: 3148827 - RNA, 14 nt, Human
ucucuucucuccag

SEQ ID NO: 3148828 - RNA, 12 nt, Human
ucucuucucucc

SEQ ID NO: 3148829 - RNA, 23 nt, Human
ucucuucucuccagcugacuaaa

SEQ ID NO: 3148830 - RNA, 14 nt, Human
ucuccugggcagcu

SEQ ID NO: 3148831 - RNA, 13 nt, Human
ucuccugggcagc

SEQ ID NO: 3148832 - RNA, 15 nt, Human
ucuccugggcagcug

SEQ ID NO: 3148833 - RNA, 16 nt, Human
ucuccugggcagcugc

SEQ ID NO: 3148834 - RNA, 17 nt, Human
ucuccugggcagcugcc

SEQ ID NO: 3148835 - RNA, 18 nt, Human
ucuccugggcagcugccu

SEQ ID NO: 3148836 - RNA, 21 nt, Human
ucucagugucaaugcagcccc

SEQ ID NO: 3148837 - RNA, 20 nt, Human
ucucaguaccccauggagcu

SEQ ID NO: 3148838 - RNA, 12 nt, Human
ucucucuucucu

SEQ ID NO: 3148839 - RNA, 13 nt, Human
ucucuaggaaaua

SEQ ID NO: 3148840 - RNA, 21 nt, Human
ucuccugggcagcugccuccc

SEQ ID NO: 3148841 - RNA, 19 nt, Human
ucuccugggcagcugccuc

SEQ ID NO: 3148842 - RNA, 20 nt, Human
ucuccugggcagcugccucc

SEQ ID NO: 3148843 - RNA, 15 nt, Human
ugaaaagacuccaaa

SEQ ID NO: 3148844 - RNA, 16 nt, Human
ugaaaagacuccaaag

SEQ ID NO: 3148845 - RNA, 17 nt, Human
ugaaaagacuccaaaga

SEQ ID NO: 3148846 - RNA, 19 nt, Human
ugaaaagacuccaaagaaa

SEQ ID NO: 3148847 - RNA, 19 nt, Human
ugaaaacuuuaugcuaagu

SEQ ID NO: 3148848 - RNA, 19 nt, Human
ugaaagcagggacuugaac

SEQ ID NO: 3148849 - RNA, 18 nt, Human
ugaaagcagggacuugaa

SEQ ID NO: 3148850 - RNA, 18 nt, Human
ugaaacccugucucuacu

SEQ ID NO: 3148851 - RNA, 22 nt, Human
ugaaaagacuccaaagaaaugu

SEQ ID NO: 3148852 - RNA, 22 nt, Human
ugaacacugggggaggggacau

SEQ ID NO: 3148853 - RNA, 14 nt, Human
ugaacacuggggga

SEQ ID NO: 3148854 - RNA, 16 nt, Human
ugaacacugggggagg

SEQ ID NO: 3148855 - RNA, 17 nt, Human
ugaacacugggggaggg

SEQ ID NO: 3148856 - RNA, 14 nt, Human
ugaacacaucagcu

SEQ ID NO: 3148857 - RNA, 22 nt, Human
ugaaguccaagcauuuagaugu

SEQ ID NO: 3148858 - RNA, 21 nt, Human
ugaaguccaagcauuuagaug

SEQ ID NO: 3148859 - RNA, 12 nt, Human
ucuguaccaguu

SEQ ID NO: 3148860 - RNA, 22 nt, Human
ucuguaccaguuaauuuuucca

SEQ ID NO: 3148861 - RNA, 13 nt, Human
ucuguaccaguua

SEQ ID NO: 3148862 - RNA, 22 nt, Human
ucuguuuuauaauuuugugaag

SEQ ID NO: 3148863 - RNA, 20 nt, Human
ucuguuuuauaauuuuguga

SEQ ID NO: 3148864 - RNA, 22 nt, Human
ucuggcucuaauucacagugcu

SEQ ID NO: 3148865 - RNA, 20 nt, Human
ucuggcucuaauucacagug

SEQ ID NO: 3148866 - RNA, 23 nt, Human
ucuggccuucggccuccauccug

SEQ ID NO: 3148867 - RNA, 19 nt, Human
ucuguaauaaacucauuuc

SEQ ID NO: 3148868 - RNA, 23 nt, Human
ucuguaauaaacucauuucuagc

SEQ ID NO: 3148869 - RNA, 24 nt, Human
ucuguaauaaacucauuucuagca

SEQ ID NO: 3148870 - RNA, 14 nt, Human
ucuuaguguaugau

SEQ ID NO: 3148871 - RNA, 16 nt, Human
uaggcgggaaggaggg

SEQ ID NO: 3148872 - RNA, 14 nt, Human
uagucaaauugugu

SEQ ID NO: 3148873 - RNA, 18 nt, Human
uagucaaauugugugaaa

SEQ ID NO: 3148874 - RNA, 21 nt, Human
uaguuguaccgcaaugugacu

SEQ ID NO: 3148875 - RNA, 19 nt, Human
uaguguaugauuacuggcc

SEQ ID NO: 3148876 - RNA, 15 nt, Human
uaguguaugauuacu

SEQ ID NO: 3148877 - RNA, 13 nt, Human
uauauuugaaaua

SEQ ID NO: 3148878 - RNA, 14 nt, Human
uauauuugaaauau

SEQ ID NO: 3148879 - RNA, 23 nt, Human
uauauuuauuacuguaagaaaau

SEQ ID NO: 3148880 - RNA, 20 nt, Human
uauauuuauuacuguaagaa

SEQ ID NO: 3148881 - RNA, 20 nt, Human
uaggaauugacccacaagaa

SEQ ID NO: 3148882 - RNA, 23 nt, Human
uaggaauugacccacaagaaaug

SEQ ID NO: 3148883 - RNA, 13 nt, Human
uaggccaugggac

SEQ ID NO: 3148884 - RNA, 22 nt, Human
uagcucuggggugggcaguuuu

SEQ ID NO: 3148885 - RNA, 11 nt, Human
uagcucugggg

SEQ ID NO: 3148886 - RNA, 23 nt, Human
uagcucuggggugggcaguuuuu

SEQ ID NO: 3148887 - RNA, 14 nt, Human
uagccgaccucagc

SEQ ID NO: 3148888 - RNA, 13 nt, Human
uagccgaccucag

SEQ ID NO: 3148889 - RNA, 20 nt, Human
uagauguauguacuucaugc

SEQ ID NO: 3148890 - RNA, 16 nt, Human
uagauguauguacuuc

SEQ ID NO: 3148891 - RNA, 17 nt, Human
uagauguaguauuuuuu

SEQ ID NO: 3148892 - RNA, 15 nt, Human
uagauguaguauuuu

SEQ ID NO: 3148893 - RNA, 20 nt, Human
uagcagggcauggcugggaa

SEQ ID NO: 3148894 - RNA, 23 nt, Human
uagacccucaugcugccaauauc

SEQ ID NO: 3148895 - RNA, 11 nt, Human
uagaccucagc

SEQ ID NO: 3148896 - RNA, 12 nt, Human
uagaccucagcc

SEQ ID NO: 3148897 - RNA, 13 nt, Human
uagaccucagccu

SEQ ID NO: 3148898 - RNA, 21 nt, Human
uagaccucagccugugcugcc

SEQ ID NO: 3148899 - RNA, 22 nt, Human
uagaccucagccugugcugccc

SEQ ID NO: 3148900 - RNA, 14 nt, Human
uagaccucagccug

SEQ ID NO: 3148901 - RNA, 15 nt, Human
uagaccucagccugu

SEQ ID NO: 3148902 - RNA, 16 nt, Human
uagaccucagccugug

SEQ ID NO: 3148903 - RNA, 20 nt, Human
uagaccucagccugugcugc

SEQ ID NO: 3148904 - RNA, 18 nt, Human
uagaguuuagcuggaaaa

SEQ ID NO: 3148905 - RNA, 17 nt, Human
uagaguuuagcuggaaa

SEQ ID NO: 3148906 - RNA, 22 nt, Human
uaauuuugaagugcuguuuauu

SEQ ID NO: 3148907 - RNA, 18 nt, Human
uaauuuugaagugcuguu

SEQ ID NO: 3148908 - RNA, 21 nt, Human
uacagaauucugcuaccucac

SEQ ID NO: 3148909 - RNA, 18 nt, Human
uacagaauucugcuaccu

SEQ ID NO: 3148910 - RNA, 14 nt, Human
uacaggauuugaaa

SEQ ID NO: 3148911 - RNA, 16 nt, Human
uacauuuguauaaaau

SEQ ID NO: 3148912 - RNA, 11 nt, Human
uacauuugugu

SEQ ID NO: 3148913 - RNA, 17 nt, Human
uacauuuguauaaaaua

SEQ ID NO: 3148914 - RNA, 22 nt, Human
uacaugagguacugagagugaa

SEQ ID NO: 3148915 - RNA, 21 nt, Human
uacaugagguacugagaguga

SEQ ID NO: 3148916 - RNA, 16 nt, Human
uaccaacacgagcagg

SEQ ID NO: 3148917 - RNA, 22 nt, Human
uaccaaaaaucucaauauuuca

SEQ ID NO: 3148918 - RNA, 20 nt, Human
uacaucccuuaccugggaaa

SEQ ID NO: 3148919 - RNA, 23 nt, Human
uaccacaggaaccacaagacugc

SEQ ID NO: 3148920 - RNA, 16 nt, Human
uagaaagagaaacagu

SEQ ID NO: 3148921 - RNA, 23 nt, Human
uacuuuauaacuaacauguccug

SEQ ID NO: 3148922 - RNA, 20 nt, Human
uacuuuauaacuaacauguc

SEQ ID NO: 3148923 - RNA, 19 nt, Human
uacuuuauaacuaacaugu

SEQ ID NO: 3148924 - RNA, 13 nt, Human
uacuguguaauua

SEQ ID NO: 3148925 - RNA, 23 nt, Human
uacuguguacagaauucugcuac

SEQ ID NO: 3148926 - RNA, 14 nt, Human
uacuguguaauuag

SEQ ID NO: 3148927 - RNA, 22 nt, Human
uacuguguacagaauucugcua

SEQ ID NO: 3148928 - RNA, 23 nt, Human
uacuaauagaauaaaggcaguuu

SEQ ID NO: 3148929 - RNA, 20 nt, Human
uacuaauagaauaaaggcag

SEQ ID NO: 3148930 - RNA, 18 nt, Human
uaccuugaacacuggggg

SEQ ID NO: 3148931 - RNA, 19 nt, Human
uacugagagugaacaaauu

SEQ ID NO: 3148932 - RNA, 23 nt, Human
uacugauguuccuagugaaagag

SEQ ID NO: 3148933 - RNA, 20 nt, Human
uaauuaaaagaauauuuuaa

SEQ ID NO: 3148934 - RNA, 15 nt, Human
uaauguuucaaacau

SEQ ID NO: 3148935 - RNA, 14 nt, Human
uaauguuucaaaca

SEQ ID NO: 3148936 - RNA, 23 nt, Human
uaauuuguaguguuggagaagaa

SEQ ID NO: 3148937 - RNA, 20 nt, Human
uaauuuguaguguuggagaa

SEQ ID NO: 3148938 - RNA, 22 nt, Human
uaauuggaaaggcagcucuaaa

SEQ ID NO: 3148939 - RNA, 16 nt, Human
uaauuggauuuccuaa

SEQ ID NO: 3148940 - RNA, 15 nt, Human
uaauuggauuuccua

SEQ ID NO: 3148941 - RNA, 23 nt, Human
uaauuggauuuccuaauacuguc

SEQ ID NO: 3148942 - RNA, 17 nt, Human
uaauuggauuuccuaau

SEQ ID NO: 3148943 - RNA, 23 nt, Human
uaaugauaacuggaaacuucagc

SEQ ID NO: 3148944 - RNA, 19 nt, Human
uaaugccacuaaauugaca

SEQ ID NO: 3148945 - RNA, 15 nt, Human
uaaucuuaguguaug

SEQ ID NO: 3148946 - RNA, 13 nt, Human
uaaucuuagugua

SEQ ID NO: 3148947 - RNA, 18 nt, Human
uaaucuuaguguaugauu

SEQ ID NO: 3148948 - RNA, 14 nt, Human
uaauaauguuucaa

SEQ ID NO: 3148949 - RNA, 15 nt, Human
uaauaauguuucaaa

SEQ ID NO: 3148950 - RNA, 23 nt, Human
uaaauugacacuuaaaaaugguu

SEQ ID NO: 3148951 - RNA, 19 nt, Human
uaacaaugcuguauuuuaa

SEQ ID NO: 3148952 - RNA, 20 nt, Human
uaacagcccuccucugcacu

SEQ ID NO: 3148953 - RNA, 18 nt, Human
uaacagcccuccucugca

SEQ ID NO: 3148954 - RNA, 17 nt, Human
uaacagcccuccucugc

SEQ ID NO: 3148955 - RNA, 11 nt, Human
uaacagcccuc

SEQ ID NO: 3148956 - RNA, 18 nt, Human
uaagcaucuggcucuaau

SEQ ID NO: 3148957 - RNA, 13 nt, Human
uaagccagacauc

SEQ ID NO: 3148958 - RNA, 18 nt, Human
uaagcauuccaacuaucu

SEQ ID NO: 3148959 - RNA, 16 nt, Human
uaagcauuccaacuau

SEQ ID NO: 3148960 - RNA, 20 nt, Human
uaagcauuccaacuaucuca

SEQ ID NO: 3148961 - RNA, 21 nt, Human
uaagccagacaucaacagaua

SEQ ID NO: 3148962 - RNA, 20 nt, Human
uaagccagacaucaacagau

SEQ ID NO: 3148963 - RNA, 23 nt, Human
uaagagggauuagggagagaaga

SEQ ID NO: 3148964 - RNA, 23 nt, Human
uaagagagaaugagagacacacu

SEQ ID NO: 3148965 - RNA, 13 nt, Human
guuuagaaagcuu

SEQ ID NO: 3148966 - RNA, 20 nt, Human
guuuaggauguugaaaaagu

SEQ ID NO: 3148967 - RNA, 11 nt, Human
guuucauugac

SEQ ID NO: 3148968 - RNA, 18 nt, Human
guuuucaggcuagaugua

SEQ ID NO: 3148969 - RNA, 16 nt, Human
guuuucauuaucucaa

SEQ ID NO: 3148970 - RNA, 16 nt, Human
uaaaaaagaaacauuu

SEQ ID NO: 3148971 - RNA, 19 nt, Human
uaaagcaguggacaccagg

SEQ ID NO: 3148972 - RNA, 16 nt, Human
uaaacuuuuuuucugu

SEQ ID NO: 3148973 - RNA, 13 nt, Human
uaaagcaguggac

SEQ ID NO: 3148974 - RNA, 18 nt, Human
uaaacuuuuuuucuguac

SEQ ID NO: 3148975 - RNA, 14 nt, Human
uaaaggaauuuaaa

SEQ ID NO: 3148976 - RNA, 17 nt, Human
uaaauaaaaauaauccu

SEQ ID NO: 3148977 - RNA, 21 nt, Human
uaaauauguuagcaaagaguu

SEQ ID NO: 3148978 - RNA, 18 nt, Human
uaaauauguuagcaaaga

SEQ ID NO: 3148979 - RNA, 20 nt, Human
uaaauauaucuaccccagac

SEQ ID NO: 3148980 - RNA, 18 nt, Human
uaaauauaucuaccccag

SEQ ID NO: 3148981 - RNA, 14 nt, Human
uaaauauaucuacc

SEQ ID NO: 3148982 - RNA, 18 nt, Human
uaaauauaugcuaagucu

SEQ ID NO: 3148983 - RNA, 18 nt, Human
uaaaauccauacauuugu

SEQ ID NO: 3148984 - RNA, 19 nt, Human
uaaaauccauacauuugug

SEQ ID NO: 3148985 - RNA, 14 nt, Human
uaaaagaugaaaau

SEQ ID NO: 3148986 - RNA, 18 nt, Human
uggggcagugcuuggccc

SEQ ID NO: 3148987 - RNA, 22 nt, Human
uggggcagugcuuggcccagga

SEQ ID NO: 3148988 - RNA, 20 nt, Human
uggggcagugcuuggcccag

SEQ ID NO: 3148989 - RNA, 23 nt, Human
uggggcagugcuuggcccaggag

SEQ ID NO: 3148990 - RNA, 16 nt, Human
uggguagacacacaug

SEQ ID NO: 3148991 - RNA, 17 nt, Human
uggguagacacacauga

SEQ ID NO: 3148992 - RNA, 16 nt, Human
ugggcaguuuuuugaa

SEQ ID NO: 3148993 - RNA, 15 nt, Human
ugggcaguuuuuuga

SEQ ID NO: 3148994 - RNA, 18 nt, Human
ugggccuccucuguccag

SEQ ID NO: 3148995 - RNA, 20 nt, Human
ugggccuccucuguccaggg

SEQ ID NO: 3148996 - RNA, 21 nt, Human
ugggacagucaccucauggaa

SEQ ID NO: 3148997 - RNA, 20 nt, Human
ugggacagucaccucaugga

SEQ ID NO: 3148998 - RNA, 18 nt, Human
ugggacagucaccucaug

SEQ ID NO: 3148999 - RNA, 20 nt, Human
ugggacauuugcucauggaa

SEQ ID NO: 3149000 - RNA, 19 nt, Human
ugggacauuugcucaugga

SEQ ID NO: 3149001 - RNA, 18 nt, Human
uggccuucggccuccauc

SEQ ID NO: 3149002 - RNA, 17 nt, Human
uggccuucggccuccau

SEQ ID NO: 3149003 - RNA, 14 nt, Human
uggccuucggccuc

SEQ ID NO: 3149004 - RNA, 22 nt, Human
uggccuuuuucauuuaucuaua

SEQ ID NO: 3149005 - RNA, 20 nt, Human
uggccuuuuucauuuaucua

SEQ ID NO: 3149006 - RNA, 19 nt, Human
uggccuuuuucauuuaucu

SEQ ID NO: 3149007 - RNA, 16 nt, Human
uggccuuuuucauuua

SEQ ID NO: 3149008 - RNA, 19 nt, Human
uggcucuaauucacagugc

SEQ ID NO: 3149009 - RNA, 14 nt, Human
uggaacucucgagc

SEQ ID NO: 3149010 - RNA, 22 nt, Human
uggaaaaguauguuagugcaaa

SEQ ID NO: 3149011 - RNA, 14 nt, Human
ugcuucuguuuuau

SEQ ID NO: 3149012 - RNA, 14 nt, Human
ugcuucuuucuaga

SEQ ID NO: 3149013 - RNA, 15 nt, Human
ugcuucuuucuagaa

SEQ ID NO: 3149014 - RNA, 17 nt, Human
uggccagaagucaaggc

SEQ ID NO: 3149015 - RNA, 21 nt, Human
ugccaucccucccuccaccuc

SEQ ID NO: 3149016 - RNA, 22 nt, Human
ugccaucccucccuccaccucc

SEQ ID NO: 3149017 - RNA, 15 nt, Human
ugccaucccucccuc

SEQ ID NO: 3149018 - RNA, 14 nt, Human
ugccaucccucccu

SEQ ID NO: 3149019 - RNA, 19 nt, Human
ugccaucccucccuccacc

SEQ ID NO: 3149020 - RNA, 20 nt, Human
ugccaucccucccuccaccu

SEQ ID NO: 3149021 - RNA, 19 nt, Human
ugcaucagcugcugaaaca

SEQ ID NO: 3149022 - RNA, 22 nt, Human
ugcaucagcugcugaaacaaca

SEQ ID NO: 3149023 - RNA, 20 nt, Human
ugcauuauauuuauuacugu

SEQ ID NO: 3149024 - RNA, 14 nt, Human
ugcauuauauuuau

SEQ ID NO: 3149025 - RNA, 15 nt, Human
ugcauuauauuuauu

SEQ ID NO: 3149026 - RNA, 16 nt, Human
ugcagauaaacaguag

SEQ ID NO: 3149027 - RNA, 13 nt, Human
ugaaguccaagca

SEQ ID NO: 3149028 - RNA, 15 nt, Human
ugcacaucaaaauau

SEQ ID NO: 3149029 - RNA, 17 nt, Human
ugcccagggcucagccu

SEQ ID NO: 3149030 - RNA, 18 nt, Human
ugcccagggcucagccug

SEQ ID NO: 3149031 - RNA, 11 nt, Human
ugcccagggcu

SEQ ID NO: 3149032 - RNA, 14 nt, Human
ugcccagggcucag

SEQ ID NO: 3149033 - RNA, 15 nt, Human
ugcccagggcucagc

SEQ ID NO: 3149034 - RNA, 16 nt, Human
ugcccagggcucagcc

SEQ ID NO: 3149035 - RNA, 18 nt, Human
ugccuccccuccucugcu

SEQ ID NO: 3149036 - RNA, 19 nt, Human
ugccuccccuccucugcuu

SEQ ID NO: 3149037 - RNA, 22 nt, Human
ugccuccccuccucugcuugcc

SEQ ID NO: 3149038 - RNA, 23 nt, Human
ugccuccccuccucugcuugcca

SEQ ID NO: 3149039 - RNA, 16 nt, Human
ugccuccccuccucug

SEQ ID NO: 3149040 - RNA, 21 nt, Human
ugcgguuaauuuugaagugcu

SEQ ID NO: 3149041 - RNA, 16 nt, Human
ugcgguuaauuuugaa

SEQ ID NO: 3149042 - RNA, 22 nt, Human
ugccuucucaacuccaaacuga

SEQ ID NO: 3149043 - RNA, 17 nt, Human
ugccuucucaacuccaa

SEQ ID NO: 3149044 - RNA, 23 nt, Human
ugcucuuuucuccucacuguauc

SEQ ID NO: 3149045 - RNA, 21 nt, Human
ugcucuuuucuccucacugua

SEQ ID NO: 3149046 - RNA, 15 nt, Human
ugcucuuuucuccuc

SEQ ID NO: 3149047 - RNA, 13 nt, Human
ugcucuuuucucc

SEQ ID NO: 3149048 - RNA, 18 nt, Human
ugcuagaacucccuuuca

SEQ ID NO: 3149049 - RNA, 19 nt, Human
ugcuagaacucccuuucaa

SEQ ID NO: 3149050 - RNA, 20 nt, Human
ugcuagcacuuggagccaag

SEQ ID NO: 3149051 - RNA, 21 nt, Human
ugcuagaacucccuuucaaca

SEQ ID NO: 3149052 - RNA, 20 nt, Human
ugcuagaacucccuuucaac

SEQ ID NO: 3149053 - RNA, 18 nt, Human
ugcuagcacuuggagcca

SEQ ID NO: 3149054 - RNA, 21 nt, Human
uguauuuggaaauaaagucag

SEQ ID NO: 3149055 - RNA, 13 nt, Human
uguauuuggaaau

SEQ ID NO: 3149056 - RNA, 12 nt, Human
uguauuuggaaa

SEQ ID NO: 3149057 - RNA, 21 nt, Human
uguauaauuggauuuccuaau

SEQ ID NO: 3149058 - RNA, 19 nt, Human
uguauaauuggauuuccua

SEQ ID NO: 3149059 - RNA, 18 nt, Human
uguauaauuggauuuccu

SEQ ID NO: 3149060 - RNA, 14 nt, Human
uguauaauuggauu

SEQ ID NO: 3149061 - RNA, 16 nt, Human
uguaugauucccagcc

SEQ ID NO: 3149062 - RNA, 18 nt, Human
uguaacuacuuuauaacu

SEQ ID NO: 3149063 - RNA, 17 nt, Human
uguaacuacuuuauaac

SEQ ID NO: 3149064 - RNA, 16 nt, Human
uguaacuacuuuauaa

SEQ ID NO: 3149065 - RNA, 15 nt, Human
uguaaucacagcuac

SEQ ID NO: 3149066 - RNA, 14 nt, Human
uguaaucacagcua

SEQ ID NO: 3149067 - RNA, 22 nt, Human
ugugaccacugcagaagacagu

SEQ ID NO: 3149068 - RNA, 21 nt, Human
ugucucaguccaugaagaugu

SEQ ID NO: 3149069 - RNA, 15 nt, Human
ugucugccagccagc

SEQ ID NO: 3149070 - RNA, 16 nt, Human
ugucugccagccagca

SEQ ID NO: 3149071 - RNA, 18 nt, Human
ugucugccagccagcagc

SEQ ID NO: 3149072 - RNA, 19 nt, Human
ugucugccagccagcagcc

SEQ ID NO: 3149073 - RNA, 14 nt, Human
uguggcugcuagca

SEQ ID NO: 3149074 - RNA, 14 nt, Human
ugugcguccugucg

SEQ ID NO: 3149075 - RNA, 20 nt, Human
uuacagagacagaaagcaga

SEQ ID NO: 3149076 - RNA, 15 nt, Human
uuacauuuguauaaa

SEQ ID NO: 3149077 - RNA, 14 nt, Human
uuacauuuguauaa

SEQ ID NO: 3149078 - RNA, 21 nt, Human
uuaccacuuguguuuugcaag

SEQ ID NO: 3149079 - RNA, 18 nt, Human
uuaauaauguuucaaaca

SEQ ID NO: 3149080 - RNA, 16 nt, Human
uuaauaauguuucaaa

SEQ ID NO: 3149081 - RNA, 22 nt, Human
uuaaugucaauucuugccaaau

SEQ ID NO: 3149082 - RNA, 20 nt, Human
uuaaagcuuauuaaaacuca

SEQ ID NO: 3149083 - RNA, 19 nt, Human
uuaaaagaaugauuaugaa

SEQ ID NO: 3149084 - RNA, 13 nt, Human
uuaaaagaaugau

SEQ ID NO: 3149085 - RNA, 20 nt, Human
uguuuuuccuuguauuuaaa

SEQ ID NO: 3149086 - RNA, 13 nt, Human
uguuuaaaaucau

SEQ ID NO: 3149087 - RNA, 20 nt, Human
uguuggagaagaacugaaau

SEQ ID NO: 3149088 - RNA, 21 nt, Human
uguuggagaagaacugaaauc

SEQ ID NO: 3149089 - RNA, 23 nt, Human
uguuaccaaaaauaaauauaucu

SEQ ID NO: 3149090 - RNA, 19 nt, Human
uguuaccaaaaauaaauau

SEQ ID NO: 3149091 - RNA, 14 nt, Human
uguuagugcaaauu

SEQ ID NO: 3149092 - RNA, 23 nt, Human
uguuaguuaccuuauaguuacug

SEQ ID NO: 3149093 - RNA, 20 nt, Human
uguuaguuaccuuauaguua

SEQ ID NO: 3149094 - RNA, 16 nt, Human
uguucacagccagacu

SEQ ID NO: 3149095 - RNA, 20 nt, Human
uuuagaaacacaacuauauu

SEQ ID NO: 3149096 - RNA, 22 nt, Human
uuuagaagccaacuaugauuau

SEQ ID NO: 3149097 - RNA, 14 nt, Human
uuuagaagccaacu

SEQ ID NO: 3149098 - RNA, 12 nt, Human
uuuagaaacaca

SEQ ID NO: 3149099 - RNA, 20 nt, Human
uuuaucuauaauuuaccuaa

SEQ ID NO: 3149100 - RNA, 19 nt, Human
uuuaucuauaauuuaccua

SEQ ID NO: 3149101 - RNA, 14 nt, Human
uuuaucuauaauuu

SEQ ID NO: 3149102 - RNA, 15 nt, Human
uuucugagaaagacu

SEQ ID NO: 3149103 - RNA, 22 nt, Human
uuucugagaaagacuauucaaa

SEQ ID NO: 3149104 - RNA, 22 nt, Human
uuucauugacuaucaaacugaa

SEQ ID NO: 3149105 - RNA, 15 nt, Human
uuucagauaaucaca

SEQ ID NO: 3149106 - RNA, 15 nt, Human
uuucagcagcugcag

SEQ ID NO: 3149107 - RNA, 21 nt, Human
uuugcauagauucccugagca

SEQ ID NO: 3149108 - RNA, 17 nt, Human
uuucuuaacuucuugcu

SEQ ID NO: 3149109 - RNA, 21 nt, Human
uuucuuaacuucuugcuucuu

SEQ ID NO: 3149110 - RNA, 18 nt, Human
uuucuuaacuucuugcuu

SEQ ID NO: 3149111 - RNA, 15 nt, Human
uuugucacuuuuucu

SEQ ID NO: 3149112 - RNA, 14 nt, Human
uuugucacuuuuuc

SEQ ID NO: 3149113 - RNA, 19 nt, Human
uuuguauaaaauaauuuuu

SEQ ID NO: 3149114 - RNA, 13 nt, Human
uuuguauaauugg

SEQ ID NO: 3149115 - RNA, 21 nt, Human
uuuguauaauuggauuuccua

SEQ ID NO: 3149116 - RNA, 21 nt, Human
uuuguauaaaauaauuuuuau

SEQ ID NO: 3149117 - RNA, 10 nt, Human
uuuuauauuu

SEQ ID NO: 3149118 - RNA, 20 nt, Human
uuuuauaugcuucuguuuua

SEQ ID NO: 3149119 - RNA, 15 nt, Human
uuuuauaugcuucug

SEQ ID NO: 3149120 - RNA, 20 nt, Human
uuuuauaucaauuuaaaaaa

SEQ ID NO: 3149121 - RNA, 19 nt, Human
uuuucggccccauguaucu

SEQ ID NO: 3149122 - RNA, 16 nt, Human
uuuuucuguaccaguu

SEQ ID NO: 3149123 - RNA, 14 nt, Human
uuuuucuguaccag

SEQ ID NO: 3149124 - RNA, 21 nt, Human
uucuaugaaauauuauguuaa

SEQ ID NO: 3149125 - RNA, 19 nt, Human
uucucuccagcugacuaaa

SEQ ID NO: 3149126 - RNA, 12 nt, Human
uucucuccagcu

SEQ ID NO: 3149127 - RNA, 19 nt, Human
uucggccuccauccugagg

SEQ ID NO: 3149128 - RNA, 18 nt, Human
uucggccuccauccugag

SEQ ID NO: 3149129 - RNA, 18 nt, Human
uucccuugaugaagaagu

SEQ ID NO: 3149130 - RNA, 12 nt, Human
uuccuagugaaa

SEQ ID NO: 3149131 - RNA, 15 nt, Human
uucagagacucaggg

SEQ ID NO: 3149132 - RNA, 20 nt, Human
uucagagacucagggcccca

SEQ ID NO: 3149133 - RNA, 21 nt, Human
uucagagcugcccucuccugg

SEQ ID NO: 3149134 - RNA, 21 nt, Human
uucagagacucagggccccag

SEQ ID NO: 3149135 - RNA, 22 nt, Human
uucagagcugcccucuccuggg

SEQ ID NO: 3149136 - RNA, 23 nt, Human
uucagagcugcccucuccugggc

SEQ ID NO: 3149137 - RNA, 19 nt, Human
uuccacuuauaggaauuga

SEQ ID NO: 3149138 - RNA, 17 nt, Human
uucauuuaucuauaauu

SEQ ID NO: 3149139 - RNA, 18 nt, Human
uucauuuaucuauaauuu

SEQ ID NO: 3149140 - RNA, 20 nt, Human
uugcugcaagcacagcccuu

SEQ ID NO: 3149141 - RNA, 21 nt, Human
uuggaaauaaagucagaugga

SEQ ID NO: 3149142 - RNA, 13 nt, Human
uuggaaauaaagu

SEQ ID NO: 3149143 - RNA, 12 nt, Human
uugggaggcuga

SEQ ID NO: 3149144 - RNA, 20 nt, Human
uuggccagaagucaaggcuu

SEQ ID NO: 3149145 - RNA, 11 nt, Human
uuguaaaugug

SEQ ID NO: 3149146 - RNA, 14 nt, Human
uuguaaaugugcuu

SEQ ID NO: 3149147 - RNA, 18 nt, Human
uuguaaaugugcuuuuaa

SEQ ID NO: 3149148 - RNA, 16 nt, Human
uuguaaaggaauuuaa

SEQ ID NO: 3149149 - RNA, 14 nt, Human
uuguauuacaaauc

SEQ ID NO: 3149150 - RNA, 19 nt, Human
uuguaucacaaaucuuaac

SEQ ID NO: 3149151 - RNA, 23 nt, Human
uugaaacugagaugugaacacau

SEQ ID NO: 3149152 - RNA, 16 nt, Human
uugaaaagacuccaaa

SEQ ID NO: 3149153 - RNA, 18 nt, Human
uugaaaagacuccaaaga

SEQ ID NO: 3149154 - RNA, 22 nt, Human
uugaaaagacuccaaagaaaug

SEQ ID NO: 3149155 - RNA, 23 nt, Human
uugaaaagacuccaaagaaaugu

SEQ ID NO: 3149156 - RNA, 15 nt, Human
uucugagaaagacua

SEQ ID NO: 3149157 - RNA, 14 nt, Human
uucugagcauuuaa

SEQ ID NO: 3149158 - RNA, 15 nt, Human
uucuuauuucauuuc

SEQ ID NO: 3149159 - RNA, 14 nt, Human
uugaggacacugau

SEQ ID NO: 3149160 - RNA, 15 nt, Human
uugaggacacugaua

SEQ ID NO: 3149161 - RNA, 17 nt, Human
uugacuaucaaacugaa

SEQ ID NO: 3149162 - RNA, 18 nt, Human
uugcauagauucccugag

SEQ ID NO: 3149163 - RNA, 12 nt, Human
uugaugaagaag

SEQ ID NO: 3149164 - RNA, 18 nt, Human
ccaucaaggguacacugc

SEQ ID NO: 3149165 - RNA, 14 nt, Human
ccauacauuugugu

SEQ ID NO: 3149166 - RNA, 16 nt, Human
ccaugauguuuagaaa

SEQ ID NO: 3149167 - RNA, 14 nt, Human
ccaugaagauguag

SEQ ID NO: 3149168 - RNA, 13 nt, Human
cccaaaaggcaga

SEQ ID NO: 3149169 - RNA, 18 nt, Human
cccaaaaggcagaagcaa

SEQ ID NO: 3149170 - RNA, 13 nt, Human
ccaggugccaguu

SEQ ID NO: 3149171 - RNA, 17 nt, Human
ccaggugccaguuaugg

SEQ ID NO: 3149172 - RNA, 11 nt, Human
ccagggcucag

SEQ ID NO: 3149173 - RNA, 16 nt, Human
ccagggcucagccugg

SEQ ID NO: 3149174 - RNA, 20 nt, Human
ccagggcucagccugguggg

SEQ ID NO: 3149175 - RNA, 12 nt, Human
ccagggcucagc

SEQ ID NO: 3149176 - RNA, 13 nt, Human
ccagggcucagcc

SEQ ID NO: 3149177 - RNA, 14 nt, Human
ccagggcucagccu

SEQ ID NO: 3149178 - RNA, 15 nt, Human
ccagggcucagccug

SEQ ID NO: 3149179 - RNA, 19 nt, Human
cccaaguucaugcagcugu

SEQ ID NO: 3149180 - RNA, 13 nt, Human
cccaggugccagu

SEQ ID NO: 3149181 - RNA, 16 nt, Human
cccaggaguuuggcca

SEQ ID NO: 3149182 - RNA, 15 nt, Human
cccaggaguuuggcc

SEQ ID NO: 3149183 - RNA, 20 nt, Human
cccaggaguuuggccagaag

SEQ ID NO: 3149184 - RNA, 19 nt, Human
cccaggaguuuggccagaa

SEQ ID NO: 3149185 - RNA, 18 nt, Human
cccaggaguuuggccaga

SEQ ID NO: 3149186 - RNA, 17 nt, Human
cccaggaguuuggccag

SEQ ID NO: 3149187 - RNA, 18 nt, Human
ccagaagucaaggcuuag

SEQ ID NO: 3149188 - RNA, 20 nt, Human
ccacuuaauguauguuacca

SEQ ID NO: 3149189 - RNA, 17 nt, Human
ccacuuaauguauguua

SEQ ID NO: 3149190 - RNA, 15 nt, Human
ccacuuaauguaugu

SEQ ID NO: 3149191 - RNA, 18 nt, Human
ccacugcagaagacagua

SEQ ID NO: 3149192 - RNA, 13 nt, Human
ccacugcagaaga

SEQ ID NO: 3149193 - RNA, 21 nt, Human
ccagaaauaaaguuggugaca

SEQ ID NO: 3149194 - RNA, 23 nt, Human
ccagaaauaaaguuggugacaga

SEQ ID NO: 3149195 - RNA, 20 nt, Human
ccacaggaaccacaagacug

SEQ ID NO: 3149196 - RNA, 16 nt, Human
ccaauauucauagcag

SEQ ID NO: 3149197 - RNA, 19 nt, Human
ccaauauccuaauaaaaag

SEQ ID NO: 3149198 - RNA, 18 nt, Human
ccaauauccuaauaaaaa

SEQ ID NO: 3149199 - RNA, 17 nt, Human
ccaauauccuaauaaaa

SEQ ID NO: 3149200 - RNA, 16 nt, Human
ccaauauccuaauaaa

SEQ ID NO: 3149201 - RNA, 15 nt, Human
ccaauauccuaauaa

SEQ ID NO: 3149202 - RNA, 14 nt, Human
ccaauauccuaaua

SEQ ID NO: 3149203 - RNA, 13 nt, Human
ccaauauccuaau

SEQ ID NO: 3149204 - RNA, 12 nt, Human
ccaauauccuaa

SEQ ID NO: 3149205 - RNA, 17 nt, Human
ccaagcauuuagaugua

SEQ ID NO: 3149206 - RNA, 22 nt, Human
ccaagcauaccaacacgagcag

SEQ ID NO: 3149207 - RNA, 20 nt, Human
ccaaggguucagagacucag

SEQ ID NO: 3149208 - RNA, 23 nt, Human
ccaaggguucagagacucagggc

SEQ ID NO: 3149209 - RNA, 14 nt, Human
ccaagcaaguauua

SEQ ID NO: 3149210 - RNA, 23 nt, Human
ccaaauuucauaccuaucaucuu

SEQ ID NO: 3149211 - RNA, 22 nt, Human
ccaaacugacucuuaagaagac

SEQ ID NO: 3149212 - RNA, 22 nt, Human
ccaacccgucuggcccaccagg

SEQ ID NO: 3149213 - RNA, 18 nt, Human
cauuugcucauggaauug

SEQ ID NO: 3149214 - RNA, 13 nt, Human
cauuugcucaugg

SEQ ID NO: 3149215 - RNA, 17 nt, Human
cauuuaggccaugggac

SEQ ID NO: 3149216 - RNA, 15 nt, Human
cccuugaugaagaag

SEQ ID NO: 3149217 - RNA, 16 nt, Human
cccuugaugaagaagu

SEQ ID NO: 3149218 - RNA, 15 nt, Human
ccuagagcacacugu

SEQ ID NO: 3149219 - RNA, 19 nt, Human
ccguuuugucacuuuuucu

SEQ ID NO: 3149220 - RNA, 14 nt, Human
ccguuuugucacuu

SEQ ID NO: 3149221 - RNA, 22 nt, Human
ccgggaggcagagguugcagug

SEQ ID NO: 3149222 - RNA, 11 nt, Human
ccucuccuggg

SEQ ID NO: 3149223 - RNA, 12 nt, Human
ccucuccugggc

SEQ ID NO: 3149224 - RNA, 13 nt, Human
ccucuccugggca

SEQ ID NO: 3149225 - RNA, 21 nt, Human
ccucugcuugccaucccuccc

SEQ ID NO: 3149226 - RNA, 17 nt, Human
ccucugcuugccauccc

SEQ ID NO: 3149227 - RNA, 20 nt, Human
ccucugcuugccaucccucc

SEQ ID NO: 3149228 - RNA, 16 nt, Human
ccucugcacucccacc

SEQ ID NO: 3149229 - RNA, 21 nt, Human
ccuccucugcacucccaccug

SEQ ID NO: 3149230 - RNA, 11 nt, Human
ccuccucugcu

SEQ ID NO: 3149231 - RNA, 12 nt, Human
ccucccugcaau

SEQ ID NO: 3149232 - RNA, 16 nt, Human
ccucccugcaauaaaa

SEQ ID NO: 3149233 - RNA, 17 nt, Human
ccuccccuccucugcuu

SEQ ID NO: 3149234 - RNA, 18 nt, Human
ccuccccuccucugcuug

SEQ ID NO: 3149235 - RNA, 15 nt, Human
ccuccccuccucugc

SEQ ID NO: 3149236 - RNA, 14 nt, Human
ccuccccuccucug

SEQ ID NO: 3149237 - RNA, 20 nt, Human
ccucagaaaacaaggaugaa

SEQ ID NO: 3149238 - RNA, 20 nt, Human
ccugaggcuccacuuggucu

SEQ ID NO: 3149239 - RNA, 18 nt, Human
ccugaggcuccacuuggu

SEQ ID NO: 3149240 - RNA, 17 nt, Human
ccugaggcuccacuugg

SEQ ID NO: 3149241 - RNA, 23 nt, Human
ccugaaagaggaaugaaguacuc

SEQ ID NO: 3149242 - RNA, 13 nt, Human
ccugaaagaggaa

SEQ ID NO: 3149243 - RNA, 18 nt, Human
ccugaaagaggaaugaag

SEQ ID NO: 3149244 - RNA, 23 nt, Human
ccucuuagaugcaguucugaaga

SEQ ID NO: 3149245 - RNA, 14 nt, Human
ccucuguccagggc

SEQ ID NO: 3149246 - RNA, 15 nt, Human
ccucuguccagggcc

SEQ ID NO: 3149247 - RNA, 18 nt, Human
ccucuguccagggcccug

SEQ ID NO: 3149248 - RNA, 20 nt, Human
ccucuguccagggcccugag

SEQ ID NO: 3149249 - RNA, 21 nt, Human
ccucuguccagggcccugagc

SEQ ID NO: 3149250 - RNA, 23 nt, Human
ccucuguccagggcccugagcuc

SEQ ID NO: 3149251 - RNA, 11 nt, Human
cgcaaugugac

SEQ ID NO: 3149252 - RNA, 17 nt, Human
cggccuccauccugagg

SEQ ID NO: 3149253 - RNA, 16 nt, Human
cggccuccauccugag

SEQ ID NO: 3149254 - RNA, 14 nt, Human
cggccuccauccug

SEQ ID NO: 3149255 - RNA, 21 nt, Human
cgcuccugucugccagccagc

SEQ ID NO: 3149256 - RNA, 17 nt, Human
cgcuccugucugccagc

SEQ ID NO: 3149257 - RNA, 20 nt, Human
cgcuccugucugccagccag

SEQ ID NO: 3149258 - RNA, 16 nt, Human
cgcuccugucugccag

SEQ ID NO: 3149259 - RNA, 14 nt, Human
cgcuccugucugcc

SEQ ID NO: 3149260 - RNA, 17 nt, Human
cgucuggcccaccaggg

SEQ ID NO: 3149261 - RNA, 11 nt, Human
cguuuugucac

SEQ ID NO: 3149262 - RNA, 24 nt, Human
ccuggacuuaagcaucuggcucua

SEQ ID NO: 3149263 - RNA, 20 nt, Human
ccuggacuuaagcaucuggc

SEQ ID NO: 3149264 - RNA, 14 nt, Human
ccugggcagcugcc

SEQ ID NO: 3149265 - RNA, 15 nt, Human
ccugggcagcugccu

SEQ ID NO: 3149266 - RNA, 16 nt, Human
ccugggcagcugccuc

SEQ ID NO: 3149267 - RNA, 17 nt, Human
ccugggcagcugccucc

SEQ ID NO: 3149268 - RNA, 18 nt, Human
ccugggcagcugccuccc

SEQ ID NO: 3149269 - RNA, 22 nt, Human
ccugugcugcccgucuucagcc

SEQ ID NO: 3149270 - RNA, 20 nt, Human
ccugggcagcugccuccccu

SEQ ID NO: 3149271 - RNA, 21 nt, Human
ccugugcugcccgucuucagc

SEQ ID NO: 3149272 - RNA, 23 nt, Human
ccugugcugcccgucuucagccu

SEQ ID NO: 3149273 - RNA, 12 nt, Human
ccuucagccuga

SEQ ID NO: 3149274 - RNA, 15 nt, Human
cugccagcaacgcag

SEQ ID NO: 3149275 - RNA, 12 nt, Human
cugccagccagc

SEQ ID NO: 3149276 - RNA, 13 nt, Human
cugccagccagca

SEQ ID NO: 3149277 - RNA, 14 nt, Human
cugccagccagcag

SEQ ID NO: 3149278 - RNA, 15 nt, Human
cugccagccagcagc

SEQ ID NO: 3149279 - RNA, 16 nt, Human
cugccagccagcagcc

SEQ ID NO: 3149280 - RNA, 18 nt, Human
cugccagccagcagccag

SEQ ID NO: 3149281 - RNA, 19 nt, Human
cugccagccagcagccagc

SEQ ID NO: 3149282 - RNA, 20 nt, Human
cugccagccagcagccagcu

SEQ ID NO: 3149283 - RNA, 23 nt, Human
cugccagccagcagccagcucuc

SEQ ID NO: 3149284 - RNA, 15 nt, Human
cugccuaagugcagc

SEQ ID NO: 3149285 - RNA, 18 nt, Human
cugauaaaagauggccau

SEQ ID NO: 3149286 - RNA, 13 nt, Human
cugauguuccuag

SEQ ID NO: 3149287 - RNA, 18 nt, Human
cugauguuccuagugaaa

SEQ ID NO: 3149288 - RNA, 20 nt, Human
cugauguuccuagugaaaga

SEQ ID NO: 3149289 - RNA, 21 nt, Human
cugauguuccuagugaaagag

SEQ ID NO: 3149290 - RNA, 13 nt, Human
cugcagaagacag

SEQ ID NO: 3149291 - RNA, 23 nt, Human
cugcagaagacaguauggcagcu

SEQ ID NO: 3149292 - RNA, 18 nt, Human
cuggcacaguuuucugag

SEQ ID NO: 3149293 - RNA, 19 nt, Human
cuggcacaguuuucugaga

SEQ ID NO: 3149294 - RNA, 16 nt, Human
cuggccaacgggguga

SEQ ID NO: 3149295 - RNA, 14 nt, Human
cuggcccaccaggg

SEQ ID NO: 3149296 - RNA, 13 nt, Human
cuggcccaccagg

SEQ ID NO: 3149297 - RNA, 13 nt, Human
cugcugaaacaac

SEQ ID NO: 3149298 - RNA, 23 nt, Human
cuggaauaauccuaaacauauga

SEQ ID NO: 3149299 - RNA, 12 nt, Human
cuggugggccuc

SEQ ID NO: 3149300 - RNA, 17 nt, Human
cuggugggccuccucug

SEQ ID NO: 3149301 - RNA, 21 nt, Human
cuggucccagccagcaguuca

SEQ ID NO: 3149302 - RNA, 18 nt, Human
cuggggugggcaguuuuu

SEQ ID NO: 3149303 - RNA, 16 nt, Human
cuggggugggcaguuu

SEQ ID NO: 3149304 - RNA, 22 nt, Human
cugggaacccaaguccaagcau

SEQ ID NO: 3149305 - RNA, 17 nt, Human
cucccagucauuuaaua

SEQ ID NO: 3149306 - RNA, 20 nt, Human
cuccauccugaggcuccacu

SEQ ID NO: 3149307 - RNA, 21 nt, Human
cuccauccugaggcuccacuu

SEQ ID NO: 3149308 - RNA, 23 nt, Human
cuccauccugaggcuccacuugg

SEQ ID NO: 3149309 - RNA, 14 nt, Human
cuccaccucccugc

SEQ ID NO: 3149310 - RNA, 15 nt, Human
cuccaccucccugca

SEQ ID NO: 3149311 - RNA, 16 nt, Human
cuccaccucccugcaa

SEQ ID NO: 3149312 - RNA, 17 nt, Human
cuccaccucccugcaau

SEQ ID NO: 3149313 - RNA, 18 nt, Human
cucauuaggauggcuagu

SEQ ID NO: 3149314 - RNA, 17 nt, Human
cucauuaggauggcuag

SEQ ID NO: 3149315 - RNA, 13 nt, Human
cucggagaagagc

SEQ ID NO: 3149316 - RNA, 20 nt, Human
cucggagaagagcuguucac

SEQ ID NO: 3149317 - RNA, 12 nt, Human
cucggagaagag

SEQ ID NO: 3149318 - RNA, 14 nt, Human
cucuaacagcccuc

SEQ ID NO: 3149319 - RNA, 16 nt, Human
cucccuucucuucaca

SEQ ID NO: 3149320 - RNA, 12 nt, Human
cucccuuucaac

SEQ ID NO: 3149321 - RNA, 13 nt, Human
cucccuuucaaca

SEQ ID NO: 3149322 - RNA, 19 nt, Human
cuccucacuguauccaggu

SEQ ID NO: 3149323 - RNA, 16 nt, Human
cuccucacuguaucca

SEQ ID NO: 3149324 - RNA, 14 nt, Human
cuccucacuguauc

SEQ ID NO: 3149325 - RNA, 15 nt, Human
cucuucucuccagcu

SEQ ID NO: 3149326 - RNA, 14 nt, Human
cucuucucuccagc

SEQ ID NO: 3149327 - RNA, 13 nt, Human
cucuucucuccag

SEQ ID NO: 3149328 - RNA, 22 nt, Human
cucuucucuccagcugacuaaa

SEQ ID NO: 3149329 - RNA, 19 nt, Human
cucuucucuccagcugacu

SEQ ID NO: 3149330 - RNA, 16 nt, Human
cucuaauucacagugc

SEQ ID NO: 3149331 - RNA, 15 nt, Human
cucuaauucacagug

SEQ ID NO: 3149332 - RNA, 18 nt, Human
cucuccagcugacuaaac

SEQ ID NO: 3149333 - RNA, 21 nt, Human
cucuccugggcagcugccucc

SEQ ID NO: 3149334 - RNA, 20 nt, Human
cucuccugggcagcugccuc

SEQ ID NO: 3149335 - RNA, 23 nt, Human
cucugcauacucauuaggauggc

SEQ ID NO: 3149336 - RNA, 19 nt, Human
cuuccuuggacucauuuua

SEQ ID NO: 3149337 - RNA, 20 nt, Human
cuucgaaagcaucauuauuu

SEQ ID NO: 3149338 - RNA, 18 nt, Human
cuucggccuccauccuga

SEQ ID NO: 3149339 - RNA, 17 nt, Human
cuucggccuccauccug

SEQ ID NO: 3149340 - RNA, 19 nt, Human
cuuccccuugcccagggcu

SEQ ID NO: 3149341 - RNA, 23 nt, Human
cuuccccuugcccagggcucagc

SEQ ID NO: 3149342 - RNA, 16 nt, Human
cuuccccuugcccagg

SEQ ID NO: 3149343 - RNA, 19 nt, Human
cuuccagauccuggaaauc

SEQ ID NO: 3149344 - RNA, 16 nt, Human
cuucagcgguuuauau

SEQ ID NO: 3149345 - RNA, 23 nt, Human
cuucagccuagccgaccucagcc

SEQ ID NO: 3149346 - RNA, 18 nt, Human
cuucagcgguuuauauaa

SEQ ID NO: 3149347 - RNA, 13 nt, Human
cuucagccuagcc

SEQ ID NO: 3149348 - RNA, 20 nt, Human
cuucagccuagccgaccuca

SEQ ID NO: 3149349 - RNA, 21 nt, Human
cuucagccuagccgaccucag

SEQ ID NO: 3149350 - RNA, 22 nt, Human
cuucagccuagccgaccucagc

SEQ ID NO: 3149351 - RNA, 23 nt, Human
cuuaagcaucuggcucuaauuca

SEQ ID NO: 3149352 - RNA, 18 nt, Human
cuuaagcaucuggcucua

SEQ ID NO: 3149353 - RNA, 17 nt, Human
cuuaagcaucuggcucu

SEQ ID NO: 3149354 - RNA, 15 nt, Human
cuuaagcaucuggcu

SEQ ID NO: 3149355 - RNA, 22 nt, Human
cuuaacuucuugcuucuuucua

SEQ ID NO: 3149356 - RNA, 21 nt, Human
cuuaacuucuugcuucuuucu

SEQ ID NO: 3149357 - RNA, 18 nt, Human
cuuaacuucuugcuucuu

SEQ ID NO: 3149358 - RNA, 15 nt, Human
cuuaacuucuugcuu

SEQ ID NO: 3149359 - RNA, 14 nt, Human
cuuaacuucuugcu

SEQ ID NO: 3149360 - RNA, 18 nt, Human
cuuaaugccacuaaauug

SEQ ID NO: 3149361 - RNA, 19 nt, Human
cuguuuuauaauuuuguga

SEQ ID NO: 3149362 - RNA, 18 nt, Human
cuguuuauuaaucuuagu

SEQ ID NO: 3149363 - RNA, 16 nt, Human
cuguuuauuaaucuua

SEQ ID NO: 3149364 - RNA, 14 nt, Human
cuguuuauuaaucu

SEQ ID NO: 3149365 - RNA, 21 nt, Human
cuuaggguuaugauuaaguaa

SEQ ID NO: 3149366 - RNA, 13 nt, Human
cuuauaauuuaaa

SEQ ID NO: 3149367 - RNA, 19 nt, Human
cuuauaggaauugacccac

SEQ ID NO: 3149368 - RNA, 14 nt, Human
cuuauaauuuaaaa

SEQ ID NO: 3149369 - RNA, 14 nt, Human
cuuauaguuacugu

SEQ ID NO: 3149370 - RNA, 21 nt, Human
cuuauaguuacuguguaauua

SEQ ID NO: 3149371 - RNA, 19 nt, Human
cuuauaguuacuguguaau

SEQ ID NO: 3149372 - RNA, 18 nt, Human
cuuauaguuacuguguaa

SEQ ID NO: 3149373 - RNA, 16 nt, Human
cuuauaguuacugugu

SEQ ID NO: 3149374 - RNA, 15 nt, Human
cuuauaguuacugug

SEQ ID NO: 3149375 - RNA, 19 nt, Human
cuuacuaguuucccuugca

SEQ ID NO: 3149376 - RNA, 21 nt, Human
cuuaauguauguuaccaaaaa

SEQ ID NO: 3149377 - RNA, 14 nt, Human
cuuaauguauguua

SEQ ID NO: 3149378 - RNA, 17 nt, Human
cuuaauguauguuacca

SEQ ID NO: 3149379 - RNA, 19 nt, Human
cuuagaugcaguucugaag

SEQ ID NO: 3149380 - RNA, 14 nt, Human
cuuagacccucaug

SEQ ID NO: 3149381 - RNA, 14 nt, Human
gaaaaguauguuag

SEQ ID NO: 3149382 - RNA, 20 nt, Human
gaaaaguauguuagugcaaa

SEQ ID NO: 3149383 - RNA, 19 nt, Human
cuuuccucaaaacuucaga

SEQ ID NO: 3149384 - RNA, 21 nt, Human
cuugcugcaagcacagcccuu

SEQ ID NO: 3149385 - RNA, 20 nt, Human
cuugcugcaagcacagcccu

SEQ ID NO: 3149386 - RNA, 19 nt, Human
cuugcuucuuucuagaaag

SEQ ID NO: 3149387 - RNA, 18 nt, Human
cuugcuucuuucuagaaa

SEQ ID NO: 3149388 - RNA, 15 nt, Human
cuugcuucuuucuag

SEQ ID NO: 3149389 - RNA, 14 nt, Human
cuugcuucuuucua

SEQ ID NO: 3149390 - RNA, 20 nt, Human
cuugcuugauuguauggugg

SEQ ID NO: 3149391 - RNA, 22 nt, Human
cuugcccuguuaaaagaugaaa

SEQ ID NO: 3149392 - RNA, 14 nt, Human
cuugccaucccucc

SEQ ID NO: 3149393 - RNA, 14 nt, Human
cuugcccuguuaaa

SEQ ID NO: 3149394 - RNA, 18 nt, Human
cuugcccuggugccucac

SEQ ID NO: 3149395 - RNA, 20 nt, Human
cuugcccagggcucagccug

SEQ ID NO: 3149396 - RNA, 21 nt, Human
cuugcccagggcucagccugg

SEQ ID NO: 3149397 - RNA, 23 nt, Human
cuugcccagggcucagccuggug

SEQ ID NO: 3149398 - RNA, 15 nt, Human
cuugccaucccuccc

SEQ ID NO: 3149399 - RNA, 16 nt, Human
cuugccaucccucccu

SEQ ID NO: 3149400 - RNA, 17 nt, Human
cuugccaucccucccuc

SEQ ID NO: 3149401 - RNA, 13 nt, Human
cuugcccagggcu

SEQ ID NO: 3149402 - RNA, 14 nt, Human
cuugcccagggcuc

SEQ ID NO: 3149403 - RNA, 15 nt, Human
cuugcccagggcuca

SEQ ID NO: 3149404 - RNA, 16 nt, Human
cuugcccagggcucag

SEQ ID NO: 3149405 - RNA, 18 nt, Human
cuugcccagggcucagcc

SEQ ID NO: 3149406 - RNA, 19 nt, Human
cuugcccagggcucagccu

SEQ ID NO: 3149407 - RNA, 23 nt, Human
cuugcaucaauuuuucuuauuuc

SEQ ID NO: 3149408 - RNA, 16 nt, Human
cuuggggcugaugcag

SEQ ID NO: 3149409 - RNA, 18 nt, Human
cuuggggcugaugcaguu

SEQ ID NO: 3149410 - RNA, 17 nt, Human
cuuguacuuuauuuucu

SEQ ID NO: 3149411 - RNA, 16 nt, Human
cuuggacucauuuuaa

SEQ ID NO: 3149412 - RNA, 22 nt, Human
gaaguccaagcauuuagaugua

SEQ ID NO: 3149413 - RNA, 12 nt, Human
gaaguccaagca

SEQ ID NO: 3149414 - RNA, 16 nt, Human
gaaguauccuucagcc

SEQ ID NO: 3149415 - RNA, 18 nt, Human
gaagucaucuugcuacca

SEQ ID NO: 3149416 - RNA, 15 nt, Human
gaagucaucuugcua

SEQ ID NO: 3149417 - RNA, 14 nt, Human
gaaguauccuucag

SEQ ID NO: 3149418 - RNA, 16 nt, Human
gaauauuuuaacuucc

SEQ ID NO: 3149419 - RNA, 19 nt, Human
gaauucugcuaccucacug

SEQ ID NO: 3149420 - RNA, 18 nt, Human
gaauucugcuaccucacu

SEQ ID NO: 3149421 - RNA, 13 nt, Human
gaagacuguggcu

SEQ ID NO: 3149422 - RNA, 17 nt, Human
gaagacugcauuauauu

SEQ ID NO: 3149423 - RNA, 11 nt, Human
gaagacugugg

SEQ ID NO: 3149424 - RNA, 12 nt, Human
gaagacuguggc

SEQ ID NO: 3149425 - RNA, 19 nt, Human
gaagacugcauuauauuua

SEQ ID NO: 3149426 - RNA, 12 nt, Human
gaagaacugaaa

SEQ ID NO: 3149427 - RNA, 18 nt, Human
gaagauguagaggagaaa

SEQ ID NO: 3149428 - RNA, 17 nt, Human
gaagauguagaggagaa

SEQ ID NO: 3149429 - RNA, 16 nt, Human
gaaauuguauuacaaa

SEQ ID NO: 3149430 - RNA, 20 nt, Human
gaacagugauuaccagggac

SEQ ID NO: 3149431 - RNA, 16 nt, Human
gaacagugauuaccag

SEQ ID NO: 3149432 - RNA, 18 nt, Human
gaacagccgcuccugucu

SEQ ID NO: 3149433 - RNA, 15 nt, Human
gaacauaaaauacaa

SEQ ID NO: 3149434 - RNA, 14 nt, Human
gaacaucacagcuu

SEQ ID NO: 3149435 - RNA, 24 nt, Human
gacugcauuauauuuauuacugua

SEQ ID NO: 3149436 - RNA, 16 nt, Human
gacugaggggagggga

SEQ ID NO: 3149437 - RNA, 22 nt, Human
gacuggauaguccgucucugcu

SEQ ID NO: 3149438 - RNA, 18 nt, Human
gacuggcacaguuuucug

SEQ ID NO: 3149439 - RNA, 22 nt, Human
gacuggcacaguuuucugagaa

SEQ ID NO: 3149440 - RNA, 14 nt, Human
gacuggcacaguuu

SEQ ID NO: 3149441 - RNA, 17 nt, Human
gacuggauaguccgucu

SEQ ID NO: 3149442 - RNA, 16 nt, Human
gacuggauaguccguc

SEQ ID NO: 3149443 - RNA, 22 nt, Human
gacuaaacuuuuuuucuguacc

SEQ ID NO: 3149444 - RNA, 20 nt, Human
gacuaaacuuuuuuucugua

SEQ ID NO: 3149445 - RNA, 19 nt, Human
gacuaaacuuuuuuucugu

SEQ ID NO: 3149446 - RNA, 18 nt, Human
gacuaaacuuuuuuucug

SEQ ID NO: 3149447 - RNA, 14 nt, Human
gacaucaacagaua

SEQ ID NO: 3149448 - RNA, 23 nt, Human
gacaggaugguucccuugaugaa

SEQ ID NO: 3149449 - RNA, 15 nt, Human
gacagcagcucaggc

SEQ ID NO: 3149450 - RNA, 16 nt, Human
gacagcagcucaggca

SEQ ID NO: 3149451 - RNA, 18 nt, Human
gacagcagcucaggcaca

SEQ ID NO: 3149452 - RNA, 20 nt, Human
gacagcagcucaggcacacu

SEQ ID NO: 3149453 - RNA, 13 nt, Human
gacagcagcucag

SEQ ID NO: 3149454 - RNA, 14 nt, Human
gacagcagcucagg

SEQ ID NO: 3149455 - RNA, 21 nt, Human
gacagagccccacccucagau

SEQ ID NO: 3149456 - RNA, 19 nt, Human
gacagagccccacccucag

SEQ ID NO: 3149457 - RNA, 23 nt, Human
gacccacuucacacacaggcaac

SEQ ID NO: 3149458 - RNA, 19 nt, Human
gacccaaaaggcagaagca

SEQ ID NO: 3149459 - RNA, 18 nt, Human
gacccaaaaggcagaagc

SEQ ID NO: 3149460 - RNA, 16 nt, Human
gaccacugcagaagac

SEQ ID NO: 3149461 - RNA, 17 nt, Human
gaguguguuugucaccg

SEQ ID NO: 3149462 - RNA, 22 nt, Human
gauaaauggcuuccuggcaaua

SEQ ID NO: 3149463 - RNA, 13 nt, Human
gauaaacaguagu

SEQ ID NO: 3149464 - RNA, 16 nt, Human
gauaaaagauggccau

SEQ ID NO: 3149465 - RNA, 13 nt, Human
gauaaaagauggc

SEQ ID NO: 3149466 - RNA, 23 nt, Human
gaucagcuuauugucuagugaaa

SEQ ID NO: 3149467 - RNA, 13 nt, Human
gauccuggaaauc

SEQ ID NO: 3149468 - RNA, 14 nt, Human
gauccuggaaauca

SEQ ID NO: 3149469 - RNA, 22 nt, Human
gcaacugaggcagacagcagcu

SEQ ID NO: 3149470 - RNA, 19 nt, Human
gcaacugaggcagacagca

SEQ ID NO: 3149471 - RNA, 21 nt, Human
gcaacugaggcagacagcagc

SEQ ID NO: 3149472 - RNA, 13 nt, Human
gcaacugaggcag

SEQ ID NO: 3149473 - RNA, 14 nt, Human
gcaacugaggcaga

SEQ ID NO: 3149474 - RNA, 15 nt, Human
gcaacugaggcagac

SEQ ID NO: 3149475 - RNA, 15 nt, Human
gcaagcacagcccuu

SEQ ID NO: 3149476 - RNA, 12 nt, Human
gcaagauguggg

SEQ ID NO: 3149477 - RNA, 16 nt, Human
gcaagaugugggcagu

SEQ ID NO: 3149478 - RNA, 16 nt, Human
gaugcuagaacucccu

SEQ ID NO: 3149479 - RNA, 22 nt, Human
gauuaaguaaugauaacuggaa

SEQ ID NO: 3149480 - RNA, 14 nt, Human
gauuaaguaaugau

SEQ ID NO: 3149481 - RNA, 17 nt, Human
gauuacaaaucagaagu

SEQ ID NO: 3149482 - RNA, 16 nt, Human
gauuacaaaucagaag

SEQ ID NO: 3149483 - RNA, 23 nt, Human
gauuacaaaucagaagucaucuu

SEQ ID NO: 3149484 - RNA, 21 nt, Human
gauuacaaaucagaagucauc

SEQ ID NO: 3149485 - RNA, 20 nt, Human
gauuacaaaucagaagucau

SEQ ID NO: 3149486 - RNA, 19 nt, Human
gauuacaaaucagaaguca

SEQ ID NO: 3149487 - RNA, 20 nt, Human
gcacagccucuuagaugcag

SEQ ID NO: 3149488 - RNA, 18 nt, Human
gcacagccucuuagaugc

SEQ ID NO: 3149489 - RNA, 14 nt, Human
gcagaagacaguau

SEQ ID NO: 3149490 - RNA, 15 nt, Human
gcacugucaagauga

SEQ ID NO: 3149491 - RNA, 21 nt, Human
gcagaguuacaguucuguggu

SEQ ID NO: 3149492 - RNA, 17 nt, Human
gcagagacaggaccuga

SEQ ID NO: 3149493 - RNA, 17 nt, Human
gcagaguuacaguucug

SEQ ID NO: 3149494 - RNA, 20 nt, Human
gcagaguuacaguucugugg

SEQ ID NO: 3149495 - RNA, 18 nt, Human
gcagaguuacaguucugu

SEQ ID NO: 3149496 - RNA, 13 nt, Human
gcaguucugaaga

SEQ ID NO: 3149497 - RNA, 18 nt, Human
gcauagauucccugagca

SEQ ID NO: 3149498 - RNA, 14 nt, Human
gcauagcucugggg

SEQ ID NO: 3149499 - RNA, 15 nt, Human
gcauagcucuggggu

SEQ ID NO: 3149500 - RNA, 16 nt, Human
gcagugcuuggcccag

SEQ ID NO: 3149501 - RNA, 15 nt, Human
gcaggcuacugucag

SEQ ID NO: 3149502 - RNA, 15 nt, Human
gccgaccucagccuu

SEQ ID NO: 3149503 - RNA, 17 nt, Human
gccgaccucagccuucc

SEQ ID NO: 3149504 - RNA, 12 nt, Human
gccgaccucagc

SEQ ID NO: 3149505 - RNA, 13 nt, Human
gccgaccucagcc

SEQ ID NO: 3149506 - RNA, 14 nt, Human
gccgaccucagccu

SEQ ID NO: 3149507 - RNA, 19 nt, Human
gcccuucuuuccacagaag

SEQ ID NO: 3149508 - RNA, 11 nt, Human
gccuccccucc

SEQ ID NO: 3149509 - RNA, 12 nt, Human
gccuccccuccu

SEQ ID NO: 3149510 - RNA, 13 nt, Human
gccuccccuccuc

SEQ ID NO: 3149511 - RNA, 14 nt, Human
gccuccccuccucu

SEQ ID NO: 3149512 - RNA, 22 nt, Human
gcgacagugagacucugucuca

SEQ ID NO: 3149513 - RNA, 18 nt, Human
gccuucggccuccauccu

SEQ ID NO: 3149514 - RNA, 18 nt, Human
gccuguaaucacagcuac

SEQ ID NO: 3149515 - RNA, 15 nt, Human
gccuggugggccucc

SEQ ID NO: 3149516 - RNA, 19 nt, Human
gcguccugucggagcccug

SEQ ID NO: 3149517 - RNA, 15 nt, Human
gcuaccaguauuuag

SEQ ID NO: 3149518 - RNA, 14 nt, Human
gcuaccaguauuua

SEQ ID NO: 3149519 - RNA, 13 nt, Human
gcuaccaguauuu

SEQ ID NO: 3149520 - RNA, 22 nt, Human
gcuaccaguauuuagaagccaa

SEQ ID NO: 3149521 - RNA, 21 nt, Human
gcuaccaguauuuagaagcca

SEQ ID NO: 3149522 - RNA, 19 nt, Human
gcuaccaguauuuagaagc

SEQ ID NO: 3149523 - RNA, 18 nt, Human
gcuaccaguauuuagaag

SEQ ID NO: 3149524 - RNA, 22 nt, Human
gcguccugucggagcccugucu

SEQ ID NO: 3149525 - RNA, 17 nt, Human
gccccgugggguuccuc

SEQ ID NO: 3149526 - RNA, 19 nt, Human
gccccugcacuccagccug

SEQ ID NO: 3149527 - RNA, 18 nt, Human
gcccucuccugggcagcu

SEQ ID NO: 3149528 - RNA, 19 nt, Human
gcccucuccugggcagcug

SEQ ID NO: 3149529 - RNA, 14 nt, Human
gcccucuccugggc

SEQ ID NO: 3149530 - RNA, 15 nt, Human
gcccucuccugggca

SEQ ID NO: 3149531 - RNA, 16 nt, Human
gcccucuccugggcag

SEQ ID NO: 3149532 - RNA, 16 nt, Human
gcccuccucugcacuc

SEQ ID NO: 3149533 - RNA, 12 nt, Human
gcccagggcuca

SEQ ID NO: 3149534 - RNA, 13 nt, Human
gcccagggcucag

SEQ ID NO: 3149535 - RNA, 14 nt, Human
gcccagggcucagc

SEQ ID NO: 3149536 - RNA, 15 nt, Human
gcccagggcucagcc

SEQ ID NO: 3149537 - RNA, 16 nt, Human
gcccagggcucagccu

SEQ ID NO: 3149538 - RNA, 17 nt, Human
gcccagggcucagccug

SEQ ID NO: 3149539 - RNA, 11 nt, Human
gccaucccucc

SEQ ID NO: 3149540 - RNA, 13 nt, Human
gccaucccucccu

SEQ ID NO: 3149541 - RNA, 14 nt, Human
gccaucccucccuc

SEQ ID NO: 3149542 - RNA, 22 nt, Human
gccauuuaaagcuuauuaaaac

SEQ ID NO: 3149543 - RNA, 19 nt, Human
gccaugggacagggaggac

SEQ ID NO: 3149544 - RNA, 14 nt, Human
gccaugggacaggg

SEQ ID NO: 3149545 - RNA, 15 nt, Human
gccaucccucccucc

SEQ ID NO: 3149546 - RNA, 16 nt, Human
gcccacagcuguauga

SEQ ID NO: 3149547 - RNA, 22 nt, Human
gccacguucuuacuaguuuccc

SEQ ID NO: 3149548 - RNA, 13 nt, Human
gccagcucucagc

SEQ ID NO: 3149549 - RNA, 14 nt, Human
gccagcucucagcc

SEQ ID NO: 3149550 - RNA, 15 nt, Human
gccagcucucagcca

SEQ ID NO: 3149551 - RNA, 23 nt, Human
gcuguucacagccagacuggcac

SEQ ID NO: 3149552 - RNA, 15 nt, Human
gcuguucacagccag

SEQ ID NO: 3149553 - RNA, 16 nt, Human
gcuguucacagccaga

SEQ ID NO: 3149554 - RNA, 16 nt, Human
gcuugccaucccuccc

SEQ ID NO: 3149555 - RNA, 19 nt, Human
gcuugcccuggugccucac

SEQ ID NO: 3149556 - RNA, 17 nt, Human
gcuugcccuggugccuc

SEQ ID NO: 3149557 - RNA, 18 nt, Human
gcuugccaucccucccuc

SEQ ID NO: 3149558 - RNA, 21 nt, Human
gcuugccaucccucccuccac

SEQ ID NO: 3149559 - RNA, 19 nt, Human
gcuuuacuccguaacagau

SEQ ID NO: 3149560 - RNA, 23 nt, Human
gcuuggcccaggaguuuggccag

SEQ ID NO: 3149561 - RNA, 13 nt, Human
gcuuggcccagga

SEQ ID NO: 3149562 - RNA, 22 nt, Human
gcuuggcccaggaguuuggcca

SEQ ID NO: 3149563 - RNA, 16 nt, Human
gcuuggcccaggaguu

SEQ ID NO: 3149564 - RNA, 15 nt, Human
gcuuggcccaggagu

SEQ ID NO: 3149565 - RNA, 14 nt, Human
gcuuggcccaggag

SEQ ID NO: 3149566 - RNA, 20 nt, Human
ggaaaaaauaacaaugaaag

SEQ ID NO: 3149567 - RNA, 17 nt, Human
gcuuuuaaaaaaaaaua

SEQ ID NO: 3149568 - RNA, 18 nt, Human
ggaaauauuuauuuuaau

SEQ ID NO: 3149569 - RNA, 17 nt, Human
ggaaauauuuauuuuaa

SEQ ID NO: 3149570 - RNA, 15 nt, Human
ggaaauauuuauuuu

SEQ ID NO: 3149571 - RNA, 13 nt, Human
ggaaauauuuauu

SEQ ID NO: 3149572 - RNA, 12 nt, Human
ggaaauauuuau

SEQ ID NO: 3149573 - RNA, 17 nt, Human
gcuagcacuuggagcca

SEQ ID NO: 3149574 - RNA, 18 nt, Human
gcuagauguauguacuuc

SEQ ID NO: 3149575 - RNA, 16 nt, Human
gcuagauguauguacu

SEQ ID NO: 3149576 - RNA, 20 nt, Human
gcugcuagcacuuggagcca

SEQ ID NO: 3149577 - RNA, 23 nt, Human
gcugcuagcacuuggagccaagg

SEQ ID NO: 3149578 - RNA, 19 nt, Human
gcugcuagcacuuggagcc

SEQ ID NO: 3149579 - RNA, 22 nt, Human
gcuguauuuuaaaagaaugauu

SEQ ID NO: 3149580 - RNA, 13 nt, Human
ggcaacugaggca

SEQ ID NO: 3149581 - RNA, 14 nt, Human
ggcaacugaggcag

SEQ ID NO: 3149582 - RNA, 15 nt, Human
ggcaacugaggcaga

SEQ ID NO: 3149583 - RNA, 23 nt, Human
ggcaacugaggcagacagcagcu

SEQ ID NO: 3149584 - RNA, 19 nt, Human
ggcaacugaggcagacagc

SEQ ID NO: 3149585 - RNA, 20 nt, Human
ggcaacugaggcagacagca

SEQ ID NO: 3149586 - RNA, 16 nt, Human
ggcagcugccuccccu

SEQ ID NO: 3149587 - RNA, 22 nt, Human
ggcagcugccuccccuccucug

SEQ ID NO: 3149588 - RNA, 18 nt, Human
ggcagcugccuccccucc

SEQ ID NO: 3149589 - RNA, 21 nt, Human
ggcagcugccuccccuccucu

SEQ ID NO: 3149590 - RNA, 22 nt, Human
ggccaugggacagggaggacgc

SEQ ID NO: 3149591 - RNA, 20 nt, Human
ggaaggaggguuagggaggg

SEQ ID NO: 3149592 - RNA, 14 nt, Human
ggacccagggauga

SEQ ID NO: 3149593 - RNA, 23 nt, Human
ggagcccugucuccucucucugu

SEQ ID NO: 3149594 - RNA, 14 nt, Human
ggagaggggcagaa

SEQ ID NO: 3149595 - RNA, 19 nt, Human
ggaggacgcucucuggccu

SEQ ID NO: 3149596 - RNA, 21 nt, Human
ggaggacgcucucuggccuuc

SEQ ID NO: 3149597 - RNA, 20 nt, Human
ggaggacgcucucuggccuu

SEQ ID NO: 3149598 - RNA, 13 nt, Human
gguuagggagggg

SEQ ID NO: 3149599 - RNA, 15 nt, Human
gguuagggaggggua

SEQ ID NO: 3149600 - RNA, 21 nt, Human
ggugcuacaaaaacacagcaa

SEQ ID NO: 3149601 - RNA, 23 nt, Human
ggugcuacaaaaacacagcaagg

SEQ ID NO: 3149602 - RNA, 22 nt, Human
ggguaaaauuccuuagcuuaga

SEQ ID NO: 3149603 - RNA, 23 nt, Human
ggggcagugcuuggcccaggagu

SEQ ID NO: 3149604 - RNA, 21 nt, Human
ggggcagugcuuggcccagga

SEQ ID NO: 3149605 - RNA, 13 nt, Human
ggggcagaacagc

SEQ ID NO: 3149606 - RNA, 21 nt, Human
gggugccccccuugccagaca

SEQ ID NO: 3149607 - RNA, 19 nt, Human
ggguucagagacucagggc

SEQ ID NO: 3149608 - RNA, 22 nt, Human
ggucaggagaggggcagaacag

SEQ ID NO: 3149609 - RNA, 22 nt, Human
gggcagugcuuggcccaggagu

SEQ ID NO: 3149610 - RNA, 20 nt, Human
gggcagugcuuggcccagga

SEQ ID NO: 3149611 - RNA, 19 nt, Human
gggcagugcuuggcccagg

SEQ ID NO: 3149612 - RNA, 18 nt, Human
gggcagugcuuggcccag

SEQ ID NO: 3149613 - RNA, 23 nt, Human
gggcagugcuuggcccaggaguu

SEQ ID NO: 3149614 - RNA, 13 nt, Human
gggcccugagcuc

SEQ ID NO: 3149615 - RNA, 22 nt, Human
gggcccugagcucgguggaccc

SEQ ID NO: 3149616 - RNA, 12 nt, Human
gggcccugagcu

SEQ ID NO: 3149617 - RNA, 22 nt, Human
gggcagaacagccgcuccuguc

SEQ ID NO: 3149618 - RNA, 14 nt, Human
gggaauugaggaca

SEQ ID NO: 3149619 - RNA, 22 nt, Human
ggcuugaguuuaaauuguaaua

SEQ ID NO: 3149620 - RNA, 16 nt, Human
ggcuuagacccucaug

SEQ ID NO: 3149621 - RNA, 18 nt, Human
caaggaaaaaauaacaau

SEQ ID NO: 3149622 - RNA, 21 nt, Human
caauauccuaauaaaaaggug

SEQ ID NO: 3149623 - RNA, 19 nt, Human
caauagucaaauuguguga

SEQ ID NO: 3149624 - RNA, 17 nt, Human
caauagucaaauugugu

SEQ ID NO: 3149625 - RNA, 23 nt, Human
caagggugaugggaaagcauugu

SEQ ID NO: 3149626 - RNA, 21 nt, Human
caagggugaugggaaagcauu

SEQ ID NO: 3149627 - RNA, 22 nt, Human
caaggcuuagacccucaugcug

SEQ ID NO: 3149628 - RNA, 19 nt, Human
caaggcuuagacccucaug

SEQ ID NO: 3149629 - RNA, 18 nt, Human
caaggcuuagacccucau

SEQ ID NO: 3149630 - RNA, 18 nt, Human
cacaagaaaugaaagcag

SEQ ID NO: 3149631 - RNA, 20 nt, Human
cacaagaaaugaaagcaggg

SEQ ID NO: 3149632 - RNA, 22 nt, Human
caauauccuaauaaaaagguga

SEQ ID NO: 3149633 - RNA, 22 nt, Human
caauuuuucuuauuucauuucu

SEQ ID NO: 3149634 - RNA, 23 nt, Human
cacagcccuuaugcgguuaauuu

SEQ ID NO: 3149635 - RNA, 17 nt, Human
cacagccagacuggcac

SEQ ID NO: 3149636 - RNA, 18 nt, Human
cacagccagacuggcaca

SEQ ID NO: 3149637 - RNA, 19 nt, Human
cacagcaguugaaaagacu

SEQ ID NO: 3149638 - RNA, 21 nt, Human
cacagcaguugaaaagacucc

SEQ ID NO: 3149639 - RNA, 13 nt, Human
cacacugaagaag

SEQ ID NO: 3149640 - RNA, 18 nt, Human
caaauguucaucaaugaa

SEQ ID NO: 3149641 - RNA, 14 nt, Human
caaauguucaucaa

SEQ ID NO: 3149642 - RNA, 13 nt, Human
caaauaugcaaag

SEQ ID NO: 3149643 - RNA, 12 nt, Human
caaauaugcaaa

SEQ ID NO: 3149644 - RNA, 19 nt, Human
caagaaaugaaagcaggga

SEQ ID NO: 3149645 - RNA, 17 nt, Human
caagaaaugaaagcagg

SEQ ID NO: 3149646 - RNA, 15 nt, Human
caagaaaugaaagca

SEQ ID NO: 3149647 - RNA, 14 nt, Human
caaaacugcacugu

SEQ ID NO: 3149648 - RNA, 17 nt, Human
caaaacugcacugucaa

SEQ ID NO: 3149649 - RNA, 18 nt, Human
caaaacugcacugucaag

SEQ ID NO: 3149650 - RNA, 16 nt, Human
caaacugacucuuaag

SEQ ID NO: 3149651 - RNA, 15 nt, Human
caaacugaagccaga

SEQ ID NO: 3149652 - RNA, 14 nt, Human
caaacugaagccag

SEQ ID NO: 3149653 - RNA, 21 nt, Human
caaacugacucuuaagaagac

SEQ ID NO: 3149654 - RNA, 17 nt, Human
caaacugacucuuaaga

SEQ ID NO: 3149655 - RNA, 18 nt, Human
cacagugcucuuuucucc

SEQ ID NO: 3149656 - RNA, 16 nt, Human
cacagugcucuuuucu

SEQ ID NO: 3149657 - RNA, 14 nt, Human
cucccugcaauaaa

SEQ ID NO: 3149658 - RNA, 16 nt, Human
cucccugcaauaaaau

SEQ ID NO: 3149659 - RNA, 17 nt, Human
cucagucucucuucucu

SEQ ID NO: 3149660 - RNA, 12 nt, Human
cucagucucucu

SEQ ID NO: 3149661 - RNA, 19 nt, Human
cucagucucucuucucucc

SEQ ID NO: 3149662 - RNA, 12 nt, Human
cucaugcugcca

SEQ ID NO: 3149663 - RNA, 22 nt, Human
cucaugcugccaauauccuaau

SEQ ID NO: 3149664 - RNA, 14 nt, Human
cucaugcugccaau

SEQ ID NO: 3149665 - RNA, 16 nt, Human
cucagccugugcugcc

SEQ ID NO: 3149666 - RNA, 18 nt, Human
cucagccugugcugcccg

SEQ ID NO: 3149667 - RNA, 22 nt, Human
cucagccuuccccuugcccagg

SEQ ID NO: 3149668 - RNA, 23 nt, Human
cucagccuuccccuugcccaggg

SEQ ID NO: 3149669 - RNA, 12 nt, Human
cucagccuggug

SEQ ID NO: 3149670 - RNA, 16 nt, Human
cucagccuggugggcc

SEQ ID NO: 3149671 - RNA, 18 nt, Human
cucagccuggugggccuc

SEQ ID NO: 3149672 - RNA, 19 nt, Human
cucagccuggugggccucc

SEQ ID NO: 3149673 - RNA, 20 nt, Human
cucagccuggugggccuccu

SEQ ID NO: 3149674 - RNA, 13 nt, Human
cucagccugugcu

SEQ ID NO: 3149675 - RNA, 14 nt, Human
cucagccugugcug

SEQ ID NO: 3149676 - RNA, 11 nt, Human
cucucagccaa

SEQ ID NO: 3149677 - RNA, 23 nt, Human
cucucagccaacgaguaauuuau

SEQ ID NO: 3149678 - RNA, 12 nt, Human
cucucuggccuu

SEQ ID NO: 3149679 - RNA, 11 nt, Human
cucucuggccu

SEQ ID NO: 3149680 - RNA, 15 nt, Human
cucuuagaugcaguu

SEQ ID NO: 3149681 - RNA, 23 nt, Human
cucugcacucccaccugacacac

SEQ ID NO: 3149682 - RNA, 20 nt, Human
cucugcacucccaccugaca

SEQ ID NO: 3149683 - RNA, 19 nt, Human
cucugcacucccaccugac

SEQ ID NO: 3149684 - RNA, 20 nt, Human
cucuuagaugcaguucugaa

SEQ ID NO: 3149685 - RNA, 14 nt, Human
cuaacuggacuggu

SEQ ID NO: 3149686 - RNA, 15 nt, Human
cuacaugagguacug

SEQ ID NO: 3149687 - RNA, 23 nt, Human
cuaagugaaauaagccagacauc

SEQ ID NO: 3149688 - RNA, 20 nt, Human
cuaagugaaauaagccagac

SEQ ID NO: 3149689 - RNA, 16 nt, Human
cuagcaugaagacaga

SEQ ID NO: 3149690 - RNA, 13 nt, Human
cuagaacucccuu

SEQ ID NO: 3149691 - RNA, 19 nt, Human
cuagaacucccuuucaaca

SEQ ID NO: 3149692 - RNA, 18 nt, Human
cuagaacucccuuucaac

SEQ ID NO: 3149693 - RNA, 17 nt, Human
cuagaacucccuuucaa

SEQ ID NO: 3149694 - RNA, 16 nt, Human
cuagaacucccuuuca

SEQ ID NO: 3149695 - RNA, 13 nt, Human
cuagccgaccuca

SEQ ID NO: 3149696 - RNA, 14 nt, Human
cuagccgaccucag

SEQ ID NO: 3149697 - RNA, 15 nt, Human
cuagccgaccucagc

SEQ ID NO: 3149698 - RNA, 16 nt, Human
cuagccgaccucagcc

SEQ ID NO: 3149699 - RNA, 17 nt, Human
cuagccgaccucagccu

SEQ ID NO: 3149700 - RNA, 18 nt, Human
cuagccgaccucagccuu

SEQ ID NO: 3149701 - RNA, 19 nt, Human
cuagccgaccucagccuuc

SEQ ID NO: 3149702 - RNA, 20 nt, Human
cuagccgaccucagccuucc

SEQ ID NO: 3149703 - RNA, 23 nt, Human
cuaguugaucagcuuauugucua

SEQ ID NO: 3149704 - RNA, 22 nt, Human
cggagccucauccgaggcaggg

SEQ ID NO: 3149705 - RNA, 20 nt, Human
cggagccucauccgaggcag

SEQ ID NO: 3149706 - RNA, 21 nt, Human
cggagccucauccgaggcagg

SEQ ID NO: 3149707 - RNA, 12 nt, Human
cgaccucagccu

SEQ ID NO: 3149708 - RNA, 13 nt, Human
cgaccucagccuu

SEQ ID NO: 3149709 - RNA, 14 nt, Human
cgaccucagccuuc

SEQ ID NO: 3149710 - RNA, 15 nt, Human
cgaccucagccuucc

SEQ ID NO: 3149711 - RNA, 13 nt, Human
ccuuuuucauuua

SEQ ID NO: 3149712 - RNA, 16 nt, Human
cgacagugagacucug

SEQ ID NO: 3149713 - RNA, 15 nt, Human
cgacagugagacucu

SEQ ID NO: 3149714 - RNA, 15 nt, Human
ccuugcccagggcuc

SEQ ID NO: 3149715 - RNA, 16 nt, Human
ccuugcccagggcuca

SEQ ID NO: 3149716 - RNA, 17 nt, Human
ccuugcccagggcucag

SEQ ID NO: 3149717 - RNA, 18 nt, Human
ccuugcccagggcucagc

SEQ ID NO: 3149718 - RNA, 13 nt, Human
ccuugcccagggc

SEQ ID NO: 3149719 - RNA, 23 nt, Human
cccauuguggucacaggaaguag

SEQ ID NO: 3149720 - RNA, 22 nt, Human
cccauuguggucacaggaagua

SEQ ID NO: 3149721 - RNA, 11 nt, Human
ccccagcacua

SEQ ID NO: 3149722 - RNA, 19 nt, Human
ccccagcacuaaagcagug

SEQ ID NO: 3149723 - RNA, 23 nt, Human
cccgggaggcagagguugcagug

SEQ ID NO: 3149724 - RNA, 23 nt, Human
ccccuugcccagggcucagccug

SEQ ID NO: 3149725 - RNA, 17 nt, Human
ccccuugcccagggcuc

SEQ ID NO: 3149726 - RNA, 20 nt, Human
ccccuugcccagggcucagc

SEQ ID NO: 3149727 - RNA, 21 nt, Human
ccccuugcccagggcucagcc

SEQ ID NO: 3149728 - RNA, 22 nt, Human
ccccuuuucggccccauguauc

SEQ ID NO: 3149729 - RNA, 17 nt, Human
cccagccagcaguucag

SEQ ID NO: 3149730 - RNA, 20 nt, Human
cccagccagcaguucagagc

SEQ ID NO: 3149731 - RNA, 16 nt, Human
cccagccagcaguuca

SEQ ID NO: 3149732 - RNA, 15 nt, Human
ccagauccuggaaau

SEQ ID NO: 3149733 - RNA, 15 nt, Human
ccagcagccagcucu

SEQ ID NO: 3149734 - RNA, 16 nt, Human
ccagcagccagcucuc

SEQ ID NO: 3149735 - RNA, 18 nt, Human
ccagcagccagcucucag

SEQ ID NO: 3149736 - RNA, 19 nt, Human
ccagcagccagcucucagc

SEQ ID NO: 3149737 - RNA, 20 nt, Human
ccagcagccagcucucagcc

SEQ ID NO: 3149738 - RNA, 21 nt, Human
ccaguuauggcuauaggugcu

SEQ ID NO: 3149739 - RNA, 13 nt, Human
ccucugcuugcca

SEQ ID NO: 3149740 - RNA, 13 nt, Human
cccuucucuguau

SEQ ID NO: 3149741 - RNA, 14 nt, Human
ccgaccucagccuu

SEQ ID NO: 3149742 - RNA, 15 nt, Human
ccgaccucagccuuc

SEQ ID NO: 3149743 - RNA, 12 nt, Human
ccgaccucagcc

SEQ ID NO: 3149744 - RNA, 13 nt, Human
ccgaccucagccu

SEQ ID NO: 3149745 - RNA, 24 nt, Human
ccguagacgugcacgcacacuguc

SEQ ID NO: 3149746 - RNA, 16 nt, Human
ccguagguuauuuuca

SEQ ID NO: 3149747 - RNA, 16 nt, Human
ccgucuggcccaccag

SEQ ID NO: 3149748 - RNA, 18 nt, Human
ccgucuggcccaccaggg

SEQ ID NO: 3149749 - RNA, 17 nt, Human
ccgucuggcccaccagg

SEQ ID NO: 3149750 - RNA, 15 nt, Human
ccucauguccacugg

SEQ ID NO: 3149751 - RNA, 20 nt, Human
ccucauguccacugguucuu

SEQ ID NO: 3149752 - RNA, 23 nt, Human
ccucccagaggagccaccaguuc

SEQ ID NO: 3149753 - RNA, 14 nt, Human
cacugggggagggg

SEQ ID NO: 3149754 - RNA, 15 nt, Human
cacugggggagggga

SEQ ID NO: 3149755 - RNA, 18 nt, Human
cacugggggaggggacau

SEQ ID NO: 3149756 - RNA, 21 nt, Human
cacugggggaggggacauuga

SEQ ID NO: 3149757 - RNA, 21 nt, Human
cacugcagaagacaguauggc

SEQ ID NO: 3149758 - RNA, 22 nt, Human
cacugguucuucuuggucucag

SEQ ID NO: 3149759 - RNA, 15 nt, Human
cacugggguccuggg

SEQ ID NO: 3149760 - RNA, 18 nt, Human
cacugggguccuggggcc

SEQ ID NO: 3149761 - RNA, 19 nt, Human
cacuuguguuuugcaagcc

SEQ ID NO: 3149762 - RNA, 16 nt, Human
cacuugucaauaaaau

SEQ ID NO: 3149763 - RNA, 22 nt, Human
cacuuguguuuugcaagccaga

SEQ ID NO: 3149764 - RNA, 17 nt, Human
cacuuguguuuugcaag

SEQ ID NO: 3149765 - RNA, 20 nt, Human
cacuagggcagggacaggau

SEQ ID NO: 3149766 - RNA, 21 nt, Human
cacuagggcagggacaggaua

SEQ ID NO: 3149767 - RNA, 15 nt, Human
caauucuugccaaau

SEQ ID NO: 3149768 - RNA, 15 nt, Human
caaugcuguauuuua

SEQ ID NO: 3149769 - RNA, 17 nt, Human
caaugcuguauuuuaaa

SEQ ID NO: 3149770 - RNA, 16 nt, Human
caaugcuguauuuuaa

SEQ ID NO: 3149771 - RNA, 18 nt, Human
cacaagacugcacaucaa

SEQ ID NO: 3149772 - RNA, 13 nt, Human
cacacaggcaacu

SEQ ID NO: 3149773 - RNA, 20 nt, Human
cacacaggcaacugaggcag

SEQ ID NO: 3149774 - RNA, 16 nt, Human
cacacaggcaacugag

SEQ ID NO: 3149775 - RNA, 19 nt, Human
cacacaggcaacugaggca

SEQ ID NO: 3149776 - RNA, 22 nt, Human
cacacaugaaguccaagcauuu

SEQ ID NO: 3149777 - RNA, 17 nt, Human
cacacaugaaguccaag

SEQ ID NO: 3149778 - RNA, 17 nt, Human
cacagccucuuagaugc

SEQ ID NO: 3149779 - RNA, 21 nt, Human
cacagccucuuagaugcaguu

SEQ ID NO: 3149780 - RNA, 14 nt, Human
caaguccaagcaua

SEQ ID NO: 3149781 - RNA, 23 nt, Human
auuguaauaggcguaacuaauuu

SEQ ID NO: 3149782 - RNA, 14 nt, Human
auuguaaaauggug

SEQ ID NO: 3149783 - RNA, 13 nt, Human
auuguaaaauggu

SEQ ID NO: 3149784 - RNA, 23 nt, Human
auuacaaaucagaagucaucuug

SEQ ID NO: 3149785 - RNA, 22 nt, Human
auuacaaaucagaagucaucuu

SEQ ID NO: 3149786 - RNA, 21 nt, Human
auuacaaaucagaagucaucu

SEQ ID NO: 3149787 - RNA, 19 nt, Human
auuacaaaucagaagucau

SEQ ID NO: 3149788 - RNA, 18 nt, Human
auuacaaaucagaaguca

SEQ ID NO: 3149789 - RNA, 16 nt, Human
auuacaaaucagaagu

SEQ ID NO: 3149790 - RNA, 14 nt, Human
auuacaaaucagaa

SEQ ID NO: 3149791 - RNA, 22 nt, Human
auuaugaauuacauuuguauaa

SEQ ID NO: 3149792 - RNA, 18 nt, Human
auuaugaauuacauuugu

SEQ ID NO: 3149793 - RNA, 19 nt, Human
auucacaagacccaaaagg

SEQ ID NO: 3149794 - RNA, 17 nt, Human
auuaugaauuacauuug

SEQ ID NO: 3149795 - RNA, 14 nt, Human
auuaugaauuacau

SEQ ID NO: 3149796 - RNA, 16 nt, Human
auuagggagagaagau

SEQ ID NO: 3149797 - RNA, 22 nt, Human
auucauagcagcuuauucacaa

SEQ ID NO: 3149798 - RNA, 19 nt, Human
auucauagcagcuuauuca

SEQ ID NO: 3149799 - RNA, 20 nt, Human
auucacagugcucuuuucuc

SEQ ID NO: 3149800 - RNA, 19 nt, Human
auucacagugcucuuuucu

SEQ ID NO: 3149801 - RNA, 21 nt, Human
auucacagugcucuuuucucc

SEQ ID NO: 3149802 - RNA, 17 nt, Human
auuuuauagcuacuaau

SEQ ID NO: 3149803 - RNA, 19 nt, Human
auuuuauagcuacuaauuu

SEQ ID NO: 3149804 - RNA, 15 nt, Human
auuuggaaauaaagu

SEQ ID NO: 3149805 - RNA, 22 nt, Human
auuuggaaauaaagucagaugg

SEQ ID NO: 3149806 - RNA, 17 nt, Human
auuuggaaauaaaguca

SEQ ID NO: 3149807 - RNA, 17 nt, Human
auuugcucauggaauug

SEQ ID NO: 3149808 - RNA, 14 nt, Human
auuugcucauggaa

SEQ ID NO: 3149809 - RNA, 13 nt, Human
caaacccaguguu

SEQ ID NO: 3149810 - RNA, 20 nt, Human
caaaaaaaaaaaaaaauuag

SEQ ID NO: 3149811 - RNA, 15 nt, Human
caaaaggcagaagca

SEQ ID NO: 3149812 - RNA, 15 nt, Human
caacacgagcaggcu

SEQ ID NO: 3149813 - RNA, 23 nt, Human
caacacgagcaggcuacugucag

SEQ ID NO: 3149814 - RNA, 20 nt, Human
caaagcacugacuucuaagu

SEQ ID NO: 3149815 - RNA, 22 nt, Human
caaagcacugacuucuaaguaa

SEQ ID NO: 3149816 - RNA, 19 nt, Human
cagccccgugggguuccuc

SEQ ID NO: 3149817 - RNA, 23 nt, Human
cagccugagcgacagugagacuc

SEQ ID NO: 3149818 - RNA, 22 nt, Human
cagccugagcgacagugagacu

SEQ ID NO: 3149819 - RNA, 21 nt, Human
cagcaguucagagcugcccuc

SEQ ID NO: 3149820 - RNA, 22 nt, Human
cagcaguucagagcugcccucu

SEQ ID NO: 3149821 - RNA, 18 nt, Human
cagcaguucagagcugcc

SEQ ID NO: 3149822 - RNA, 19 nt, Human
cagcaguucagagcugccc

SEQ ID NO: 3149823 - RNA, 20 nt, Human
cagcaguucagagcugcccu

SEQ ID NO: 3149824 - RNA, 20 nt, Human
cagccagacuggcacaguuu

SEQ ID NO: 3149825 - RNA, 22 nt, Human
cagcacagccucuuagaugcag

SEQ ID NO: 3149826 - RNA, 14 nt, Human
cagccagcagccag

SEQ ID NO: 3149827 - RNA, 12 nt, Human
cagccagcagcc

SEQ ID NO: 3149828 - RNA, 11 nt, Human
cagccagcagc

SEQ ID NO: 3149829 - RNA, 23 nt, Human
cagagcugcccucuccugggcag

SEQ ID NO: 3149830 - RNA, 17 nt, Human
caguauuuagaagccaa

SEQ ID NO: 3149831 - RNA, 16 nt, Human
caguauuuagaagcca

SEQ ID NO: 3149832 - RNA, 19 nt, Human
cagggaggacgcucucugg

SEQ ID NO: 3149833 - RNA, 22 nt, Human
cagggaggacgcucucuggccu

SEQ ID NO: 3149834 - RNA, 15 nt, Human
cagggcucagccugg

SEQ ID NO: 3149835 - RNA, 16 nt, Human
cagggcucagccuggu

SEQ ID NO: 3149836 - RNA, 19 nt, Human
cagggcucagccugguggg

SEQ ID NO: 3149837 - RNA, 16 nt, Human
cagcuuauucacaaga

SEQ ID NO: 3149838 - RNA, 17 nt, Human
cagcuguggcagaguua

SEQ ID NO: 3149839 - RNA, 23 nt, Human
cagcuguggcagaguuacaguuc

SEQ ID NO: 3149840 - RNA, 19 nt, Human
cagcuguggcagaguuaca

SEQ ID NO: 3149841 - RNA, 21 nt, Human
caggaaaucaaauaugcaaag

SEQ ID NO: 3149842 - RNA, 19 nt, Human
caggaaaucaaauaugcaa

SEQ ID NO: 3149843 - RNA, 24 nt, Human
caggacagcccuucuuuccacaga

SEQ ID NO: 3149844 - RNA, 23 nt, Human
caggacagcccuucuuuccacag

SEQ ID NO: 3149845 - RNA, 21 nt, Human
caugcugccaauauccuaaua

SEQ ID NO: 3149846 - RNA, 19 nt, Human
caugcugccaauauccuaa

SEQ ID NO: 3149847 - RNA, 17 nt, Human
caugcugccaauauccu

SEQ ID NO: 3149848 - RNA, 15 nt, Human
caugcugccaauauc

SEQ ID NO: 3149849 - RNA, 16 nt, Human
caugaauuaguuuuau

SEQ ID NO: 3149850 - RNA, 20 nt, Human
caucagcuugcccuguuaaa

SEQ ID NO: 3149851 - RNA, 17 nt, Human
caucagcugcugaaaca

SEQ ID NO: 3149852 - RNA, 18 nt, Human
caucagcugcugaaacaa

SEQ ID NO: 3149853 - RNA, 15 nt, Human
caucagcugcugaaa

SEQ ID NO: 3149854 - RNA, 13 nt, Human
caucagcugcuga

SEQ ID NO: 3149855 - RNA, 17 nt, Human
cauagauucccugagca

SEQ ID NO: 3149856 - RNA, 18 nt, Human
cauagauucccugagcag

SEQ ID NO: 3149857 - RNA, 20 nt, Human
cauagcagcuuauucacaag

SEQ ID NO: 3149858 - RNA, 18 nt, Human
ccaaauguucaucaauga

SEQ ID NO: 3149859 - RNA, 22 nt, Human
ccaacuacuaauagaauaaagg

SEQ ID NO: 3149860 - RNA, 14 nt, Human
ccaacuacuaauag

SEQ ID NO: 3149861 - RNA, 14 nt, Human
ccaacuaugauuau

SEQ ID NO: 3149862 - RNA, 15 nt, Human
cauuaggauggcuag

SEQ ID NO: 3149863 - RNA, 16 nt, Human
ccaaaaauaaauauau

SEQ ID NO: 3149864 - RNA, 18 nt, Human
gcuacaaaaacacagcaa

SEQ ID NO: 3149865 - RNA, 19 nt, Human
gcuacaaaaacacagcaag

SEQ ID NO: 3149866 - RNA, 17 nt, Human
gcuacaaaaacacagca

SEQ ID NO: 3149867 - RNA, 15 nt, Human
gcuacugucagcucc

SEQ ID NO: 3149868 - RNA, 17 nt, Human
gcuacuugggaggcuga

SEQ ID NO: 3149869 - RNA, 20 nt, Human
gccuccauccugaggcucca

SEQ ID NO: 3149870 - RNA, 16 nt, Human
gccuccauccugaggc

SEQ ID NO: 3149871 - RNA, 15 nt, Human
gccuccauccugagg

SEQ ID NO: 3149872 - RNA, 20 nt, Human
gccagcaguucagagcugcc

SEQ ID NO: 3149873 - RNA, 16 nt, Human
gccagccagcagccag

SEQ ID NO: 3149874 - RNA, 19 nt, Human
gccagccagcagccagcuc

SEQ ID NO: 3149875 - RNA, 13 nt, Human
gccagcaguucag

SEQ ID NO: 3149876 - RNA, 14 nt, Human
gccagcaguucaga

SEQ ID NO: 3149877 - RNA, 19 nt, Human
gccagcaguucagagcugc

SEQ ID NO: 3149878 - RNA, 22 nt, Human
gccaguuauggcuauaggugcu

SEQ ID NO: 3149879 - RNA, 15 nt, Human
gccccacccucagau

SEQ ID NO: 3149880 - RNA, 18 nt, Human
gccccacccucagaugca

SEQ ID NO: 3149881 - RNA, 21 nt, Human
gcccuagagcacacuguagca

SEQ ID NO: 3149882 - RNA, 17 nt, Human
gcccaggaguuuggcca

SEQ ID NO: 3149883 - RNA, 22 nt, Human
gccaugugcuaguaauuggaaa

SEQ ID NO: 3149884 - RNA, 13 nt, Human
gcccaggaguuug

SEQ ID NO: 3149885 - RNA, 16 nt, Human
gcccaggaguuuggcc

SEQ ID NO: 3149886 - RNA, 15 nt, Human
gcccaggaguuuggc

SEQ ID NO: 3149887 - RNA, 16 nt, Human
gcugaaacaacaaaua

SEQ ID NO: 3149888 - RNA, 12 nt, Human
gcugaacaucac

SEQ ID NO: 3149889 - RNA, 15 nt, Human
gcucugcccauccug

SEQ ID NO: 3149890 - RNA, 21 nt, Human
gcucugcccauccugccccug

SEQ ID NO: 3149891 - RNA, 20 nt, Human
gcuccacuuggucugugaga

SEQ ID NO: 3149892 - RNA, 19 nt, Human
gcuccacuuggucugugag

SEQ ID NO: 3149893 - RNA, 11 nt, Human
gcucucagcca

SEQ ID NO: 3149894 - RNA, 17 nt, Human
gcucucagccaacgagu

SEQ ID NO: 3149895 - RNA, 10 nt, Human
gcucucagcc

SEQ ID NO: 3149896 - RNA, 19 nt, Human
gcuuccuggcaauagucaa

SEQ ID NO: 3149897 - RNA, 13 nt, Human
gcuguauuuuaaa

SEQ ID NO: 3149898 - RNA, 12 nt, Human
gcuguauuuuaa

SEQ ID NO: 3149899 - RNA, 17 nt, Human
gcuuauuuccucauuuu

SEQ ID NO: 3149900 - RNA, 15 nt, Human
ggaaaauucauuuuu

SEQ ID NO: 3149901 - RNA, 13 nt, Human
ggaguuuggccag

SEQ ID NO: 3149902 - RNA, 15 nt, Human
ggaguuuggccagaa

SEQ ID NO: 3149903 - RNA, 14 nt, Human
ggaguuuggccaga

SEQ ID NO: 3149904 - RNA, 12 nt, Human
ggauggcaagau

SEQ ID NO: 3149905 - RNA, 15 nt, Human
ggagccaccaguucu

SEQ ID NO: 3149906 - RNA, 14 nt, Human
ggagccaccaguuc

SEQ ID NO: 3149907 - RNA, 23 nt, Human
ggagccaaggguucagagacuca

SEQ ID NO: 3149908 - RNA, 15 nt, Human
ggccuuuuucauuua

SEQ ID NO: 3149909 - RNA, 23 nt, Human
ggccuucggccuccauccugagg

SEQ ID NO: 3149910 - RNA, 22 nt, Human
ggccuucggccuccauccugag

SEQ ID NO: 3149911 - RNA, 10 nt, Human
ggcucagccu

SEQ ID NO: 3149912 - RNA, 12 nt, Human
ggcucagccugg

SEQ ID NO: 3149913 - RNA, 11 nt, Human
ggcucagccug

SEQ ID NO: 3149914 - RNA, 20 nt, Human
ggcccaggaguuuggccaga

SEQ ID NO: 3149915 - RNA, 19 nt, Human
ggcccaggaguuuggccag

SEQ ID NO: 3149916 - RNA, 18 nt, Human
ggcccaggaguuuggcca

SEQ ID NO: 3149917 - RNA, 13 nt, Human
ggcccaggaguuu

SEQ ID NO: 3149918 - RNA, 11 nt, Human
ggcccaggagu

SEQ ID NO: 3149919 - RNA, 15 nt, Human
ggcauagcucugggg

SEQ ID NO: 3149920 - RNA, 13 nt, Human
ggcauagcucugg

SEQ ID NO: 3149921 - RNA, 17 nt, Human
gggauuguaaaauggug

SEQ ID NO: 3149922 - RNA, 16 nt, Human
gggauuguaaaauggu

SEQ ID NO: 3149923 - RNA, 17 nt, Human
gggauugaaggaugcug

SEQ ID NO: 3149924 - RNA, 20 nt, Human
gggaaggaggguuagggagg

SEQ ID NO: 3149925 - RNA, 19 nt, Human
gggacauuugcucauggaa

SEQ ID NO: 3149926 - RNA, 21 nt, Human
gggacauuugcucauggaauu

SEQ ID NO: 3149927 - RNA, 20 nt, Human
gggacauuugcucauggaau

SEQ ID NO: 3149928 - RNA, 17 nt, Human
aaaagaugaaaauauuu

SEQ ID NO: 3149929 - RNA, 13 nt, Human
aaaacucauuuuu

SEQ ID NO: 3149930 - RNA, 13 nt, Human
aaaaccacagcag

SEQ ID NO: 3149931 - RNA, 12 nt, Human
aaaaccacagca

SEQ ID NO: 3149932 - RNA, 22 nt, Human
aaaaauggaacauaaaauacaa

SEQ ID NO: 3149933 - RNA, 15 nt, Human
aaaaugugauaugua

SEQ ID NO: 3149934 - RNA, 22 nt, Human
aaaauuuuuucucuaggaaaua

SEQ ID NO: 3149935 - RNA, 20 nt, Human
aaacaagcacuaaacaaaga

SEQ ID NO: 3149936 - RNA, 20 nt, Human
aaacagucucaggaaaucaa

SEQ ID NO: 3149937 - RNA, 15 nt, Human
gggcgugguggugag

SEQ ID NO: 3149938 - RNA, 21 nt, Human
gggccuccucuguccagggcc

SEQ ID NO: 3149939 - RNA, 19 nt, Human
aaaaguauguuagugcaaa

SEQ ID NO: 3149940 - RNA, 15 nt, Human
gggugggcaguuuuu

SEQ ID NO: 3149941 - RNA, 19 nt, Human
gguaauaaguacuguguac

SEQ ID NO: 3149942 - RNA, 14 nt, Human
aaagacuauucaaa

SEQ ID NO: 3149943 - RNA, 24 nt, Human
ggucugugagaugcuagaacuccc

SEQ ID NO: 3149944 - RNA, 14 nt, Human
gguccuggggccuc

SEQ ID NO: 3149945 - RNA, 12 nt, Human
gguccuggggcc

SEQ ID NO: 3149946 - RNA, 15 nt, Human
aaagacuauucaaac

SEQ ID NO: 3149947 - RNA, 17 nt, Human
aaagcagggacuugaac

SEQ ID NO: 3149948 - RNA, 18 nt, Human
gguggggcagugcuuggc

SEQ ID NO: 3149949 - RNA, 16 nt, Human
ggugugaccacugcag

SEQ ID NO: 3149950 - RNA, 12 nt, Human
gguuucuagcau

SEQ ID NO: 3149951 - RNA, 16 nt, Human
gguuuagaaagcuugc

SEQ ID NO: 3149952 - RNA, 15 nt, Human
aaauaauuuuuauau

SEQ ID NO: 3149953 - RNA, 20 nt, Human
aaauaauuuuuauauuugaa

SEQ ID NO: 3149954 - RNA, 18 nt, Human
aaauaauuuuuauauuug

SEQ ID NO: 3149955 - RNA, 10 nt, Human
aaaguguauu

SEQ ID NO: 3149956 - RNA, 15 nt, Human
aaaguguauuuggaa

SEQ ID NO: 3149957 - RNA, 14 nt, Human
aaaguguauuugga

SEQ ID NO: 3149958 - RNA, 22 nt, Human
aaaguguauuuggaaauaaagu

SEQ ID NO: 3149959 - RNA, 17 nt, Human
gagccccacccucagau

SEQ ID NO: 3149960 - RNA, 15 nt, Human
gagaaucacuugaac

SEQ ID NO: 3149961 - RNA, 14 nt, Human
gagaaucacuugaa

SEQ ID NO: 3149962 - RNA, 22 nt, Human
gacuauucaaacagucucagga

SEQ ID NO: 3149963 - RNA, 18 nt, Human
gacuaucaaacugaagcc

SEQ ID NO: 3149964 - RNA, 22 nt, Human
gacuaucaaacugaagccagaa

SEQ ID NO: 3149965 - RNA, 16 nt, Human
gacucuuaagaagacu

SEQ ID NO: 3149966 - RNA, 15 nt, Human
gacucuuaagaagac

SEQ ID NO: 3149967 - RNA, 17 nt, Human
gacucuuaagaagacug

SEQ ID NO: 3149968 - RNA, 20 nt, Human
gacaguauggcagcuuuccu

SEQ ID NO: 3149969 - RNA, 16 nt, Human
gacacuuaaaaauggu

SEQ ID NO: 3149970 - RNA, 11 nt, Human
gaauuaguuuu

SEQ ID NO: 3149971 - RNA, 12 nt, Human
gacacacaugaa

SEQ ID NO: 3149972 - RNA, 13 nt, Human
gacacacugaaga

SEQ ID NO: 3149973 - RNA, 15 nt, Human
gacacaccaggcgcu

SEQ ID NO: 3149974 - RNA, 18 nt, Human
gacacaccaggcgcuaau

SEQ ID NO: 3149975 - RNA, 20 nt, Human
gaaugaauggcuaagcaaaa

SEQ ID NO: 3149976 - RNA, 20 nt, Human
gaaugagagacacacugaag

SEQ ID NO: 3149977 - RNA, 23 nt, Human
gaaugagagacacacugaagaag

SEQ ID NO: 3149978 - RNA, 22 nt, Human
gaaugagagacacacugaagaa

SEQ ID NO: 3149979 - RNA, 20 nt, Human
gaagugcuguuuauuaaucu

SEQ ID NO: 3149980 - RNA, 18 nt, Human
gaagugcuguuuauuaau

SEQ ID NO: 3149981 - RNA, 16 nt, Human
gaguuuagcuggaaaa

SEQ ID NO: 3149982 - RNA, 16 nt, Human
gaguuuaaauuguaau

SEQ ID NO: 3149983 - RNA, 21 nt, Human
gagugcucaguagucagacug

SEQ ID NO: 3149984 - RNA, 13 nt, Human
gaguuuggccaga

SEQ ID NO: 3149985 - RNA, 12 nt, Human
gaguuuggccag

SEQ ID NO: 3149986 - RNA, 14 nt, Human
gaguuuggccagaa

SEQ ID NO: 3149987 - RNA, 20 nt, Human
gauauguaccuaacgaagua

SEQ ID NO: 3149988 - RNA, 17 nt, Human
gauuagggagagaagau

SEQ ID NO: 3149989 - RNA, 19 nt, Human
gauuauuaacgauguccaa

SEQ ID NO: 3149990 - RNA, 22 nt, Human
gauuacuggccuuuuucauuua

SEQ ID NO: 3149991 - RNA, 14 nt, Human
gauuaccagggacu

SEQ ID NO: 3149992 - RNA, 14 nt, Human
gaugugaacacauc

SEQ ID NO: 3149993 - RNA, 16 nt, Human
gaugugaacacaucag

SEQ ID NO: 3149994 - RNA, 14 nt, Human
gcacaguuuucuga

SEQ ID NO: 3149995 - RNA, 17 nt, Human
gcacaguuuucugagaa

SEQ ID NO: 3149996 - RNA, 18 nt, Human
gcacaguuuucugagaaa

SEQ ID NO: 3149997 - RNA, 21 nt, Human
gcacaugagcuggcgggauug

SEQ ID NO: 3149998 - RNA, 18 nt, Human
gcagaacagccgcuccug

SEQ ID NO: 3149999 - RNA, 21 nt, Human
gcagaacagccgcuccugucu

SEQ ID NO: 3150000 - RNA, 19 nt, Human
gcagggacuugaacccaua

SEQ ID NO: 3150001 - RNA, 11 nt, Human
gcagcugccuc

SEQ ID NO: 3150002 - RNA, 12 nt, Human
gcagcugccucc

SEQ ID NO: 3150003 - RNA, 13 nt, Human
gcagcugccuccc

SEQ ID NO: 3150004 - RNA, 15 nt, Human
gcagcugccuccccu

SEQ ID NO: 3150005 - RNA, 16 nt, Human
gcagcugccuccccuc

SEQ ID NO: 3150006 - RNA, 17 nt, Human
gcagcugccuccccucc

SEQ ID NO: 3150007 - RNA, 18 nt, Human
gcagcugccuccccuccu

SEQ ID NO: 3150008 - RNA, 22 nt, Human
gcagcugccuccccuccucugc

SEQ ID NO: 3150009 - RNA, 18 nt, Human
gcaguuuuuugaaaaugg

SEQ ID NO: 3150010 - RNA, 12 nt, Human
gcaguuuuuuga

SEQ ID NO: 3150011 - RNA, 14 nt, Human
gcauaaccugucuc

SEQ ID NO: 3150012 - RNA, 19 nt, Human
gcauaaccugucucaccug

SEQ ID NO: 3150013 - RNA, 22 nt, Human
cugccaauauccuaauaaaaag

SEQ ID NO: 3150014 - RNA, 20 nt, Human
cugccaauauccuaauaaaa

SEQ ID NO: 3150015 - RNA, 19 nt, Human
cugccaauauccuaauaaa

SEQ ID NO: 3150016 - RNA, 18 nt, Human
cugccaauauccuaauaa

SEQ ID NO: 3150017 - RNA, 17 nt, Human
cugccaauauccuaaua

SEQ ID NO: 3150018 - RNA, 16 nt, Human
cugccaauauccuaau

SEQ ID NO: 3150019 - RNA, 14 nt, Human
cugccaauauccua

SEQ ID NO: 3150020 - RNA, 13 nt, Human
cugccaauauccu

SEQ ID NO: 3150021 - RNA, 12 nt, Human
cugcuaccucac

SEQ ID NO: 3150022 - RNA, 15 nt, Human
cugcuaccucacugg

SEQ ID NO: 3150023 - RNA, 13 nt, Human
cugcuaccucacu

SEQ ID NO: 3150024 - RNA, 14 nt, Human
cugcuaccucacug

SEQ ID NO: 3150025 - RNA, 21 nt, Human
cuggaaaucaggguuaguauu

SEQ ID NO: 3150026 - RNA, 16 nt, Human
cugggcagcugccucc

SEQ ID NO: 3150027 - RNA, 19 nt, Human
cugggcagcugccuccccu

SEQ ID NO: 3150028 - RNA, 22 nt, Human
cugggcagcugccuccccuccu

SEQ ID NO: 3150029 - RNA, 20 nt, Human
cugggcagcugccuccccuc

SEQ ID NO: 3150030 - RNA, 21 nt, Human
cugggcagcugccuccccucc

SEQ ID NO: 3150031 - RNA, 19 nt, Human
cuggggccucggagccuca

SEQ ID NO: 3150032 - RNA, 24 nt, Human
cuggugagucaccacuucagggcu

SEQ ID NO: 3150033 - RNA, 10 nt, Human
cugggacagg

SEQ ID NO: 3150034 - RNA, 16 nt, Human
cugugagaugcuagaa

SEQ ID NO: 3150035 - RNA, 23 nt, Human
cugucagcuccccucggagaaga

SEQ ID NO: 3150036 - RNA, 21 nt, Human
cugucagcuccccucggagaa

SEQ ID NO: 3150037 - RNA, 17 nt, Human
cuuaugcgguuaauuuu

SEQ ID NO: 3150038 - RNA, 16 nt, Human
cuuaugcgguuaauuu

SEQ ID NO: 3150039 - RNA, 18 nt, Human
cuuaugcgguuaauuuug

SEQ ID NO: 3150040 - RNA, 15 nt, Human
cuucacuguaaaaua

SEQ ID NO: 3150041 - RNA, 13 nt, Human
cuugaugaagaag

SEQ ID NO: 3150042 - RNA, 12 nt, Human
cuugaugaagaa

SEQ ID NO: 3150043 - RNA, 22 nt, Human
cuucuaaguaaaaccacagcag

SEQ ID NO: 3150044 - RNA, 23 nt, Human
cuucuaaguaaaaccacagcagu

SEQ ID NO: 3150045 - RNA, 22 nt, Human
cuuucuagaaagagaaacaguu

SEQ ID NO: 3150046 - RNA, 13 nt, Human
gaaaauucauuuu

SEQ ID NO: 3150047 - RNA, 14 nt, Human
gaaaauucauuuuu

SEQ ID NO: 3150048 - RNA, 21 nt, Human
gaaaacuuuaugcuaagugaa

SEQ ID NO: 3150049 - RNA, 13 nt, Human
cuuuugugaauua

SEQ ID NO: 3150050 - RNA, 19 nt, Human
cuuuuuuucuguaccaguu

SEQ ID NO: 3150051 - RNA, 16 nt, Human
cuuuuuuucuguacca

SEQ ID NO: 3150052 - RNA, 14 nt, Human
cuuuuuuucuguac

SEQ ID NO: 3150053 - RNA, 17 nt, Human
gaaauauuuauuuuaau

SEQ ID NO: 3150054 - RNA, 19 nt, Human
gaaaucaaauaugcaaagc

SEQ ID NO: 3150055 - RNA, 20 nt, Human
gaaaucaaauaugcaaagca

SEQ ID NO: 3150056 - RNA, 18 nt, Human
gaaauauuuauuuuaaua

SEQ ID NO: 3150057 - RNA, 18 nt, Human
gaaaucaaauaugcaaag

SEQ ID NO: 3150058 - RNA, 17 nt, Human
gaaaucaaauaugcaaa

SEQ ID NO: 3150059 - RNA, 17 nt, Human
gaaagacuauucaaaca

SEQ ID NO: 3150060 - RNA, 14 nt, Human
gaaagacuauucaa

SEQ ID NO: 3150061 - RNA, 15 nt, Human
gaaagacuauucaaa

SEQ ID NO: 3150062 - RNA, 21 nt, Human
auugacccacaagaaaugaaa

SEQ ID NO: 3150063 - RNA, 20 nt, Human
auugacacuuaaaaaugguu

SEQ ID NO: 3150064 - RNA, 19 nt, Human
auuuaaagcuuauuaaaac

SEQ ID NO: 3150065 - RNA, 15 nt, Human
auuuaccuaagauua

SEQ ID NO: 3150066 - RNA, 14 nt, Human
auuuaccuaagauu

SEQ ID NO: 3150067 - RNA, 18 nt, Human
auuuaccuaagauuacaa

SEQ ID NO: 3150068 - RNA, 17 nt, Human
auuuaccuaagauuaca

SEQ ID NO: 3150069 - RNA, 16 nt, Human
auuuacaaaugggaaa

SEQ ID NO: 3150070 - RNA, 13 nt, Human
auugugccccugc

SEQ ID NO: 3150071 - RNA, 14 nt, Human
auuguauuacaaau

SEQ ID NO: 3150072 - RNA, 21 nt, Human
auuuguauaaaauaauuuuua

SEQ ID NO: 3150073 - RNA, 15 nt, Human
auuuguaucacaaau

SEQ ID NO: 3150074 - RNA, 14 nt, Human
auuuuaauaauguu

SEQ ID NO: 3150075 - RNA, 12 nt, Human
auuuuaauaaug

SEQ ID NO: 3150076 - RNA, 15 nt, Human
auuuuaauaauguuu

SEQ ID NO: 3150077 - RNA, 23 nt, Human
auuugguaaggggaauugaggac

SEQ ID NO: 3150078 - RNA, 18 nt, Human
auuuguaguguuggagaa

SEQ ID NO: 3150079 - RNA, 22 nt, Human
auuuauuacuguaagaaaauau

SEQ ID NO: 3150080 - RNA, 18 nt, Human
auguuucaaacauauaua

SEQ ID NO: 3150081 - RNA, 15 nt, Human
auuaaaagaauauuu

SEQ ID NO: 3150082 - RNA, 16 nt, Human
auuaaaagaauauuuu

SEQ ID NO: 3150083 - RNA, 15 nt, Human
auuaacgauguccaa

SEQ ID NO: 3150084 - RNA, 23 nt, Human
uuuuauggaggcuuugcauagau

SEQ ID NO: 3150085 - RNA, 19 nt, Human
uuuuauggcacuaguauuu

SEQ ID NO: 3150086 - RNA, 14 nt, Human
uuuuauaauuuugu

SEQ ID NO: 3150087 - RNA, 16 nt, Human
uuuucuauaauuuaaa

SEQ ID NO: 3150088 - RNA, 19 nt, Human
auguucaucaaugaaugaa

SEQ ID NO: 3150089 - RNA, 15 nt, Human
auguugacaugggac

SEQ ID NO: 3150090 - RNA, 23 nt, Human
auguuaguuaccuuauaguuacu

SEQ ID NO: 3150091 - RNA, 22 nt, Human
auguuaguuaccuuauaguuac

SEQ ID NO: 3150092 - RNA, 21 nt, Human
auguuaguuaccuuauaguua

SEQ ID NO: 3150093 - RNA, 20 nt, Human
auguuaguuaccuuauaguu

SEQ ID NO: 3150094 - RNA, 22 nt, Human
auguaguauuuuuuguauaauu

SEQ ID NO: 3150095 - RNA, 21 nt, Human
auguaguauuuuuuguauaau

SEQ ID NO: 3150096 - RNA, 12 nt, Human
auguaguauuuu

SEQ ID NO: 3150097 - RNA, 23 nt, Human
auguaguauuuuuuguauaauug

SEQ ID NO: 3150098 - RNA, 21 nt, Human
augucccuacaccccuccccu

SEQ ID NO: 3150099 - RNA, 12 nt, Human
uuugcucaugga

SEQ ID NO: 3150100 - RNA, 11 nt, Human
uuugcucaugg

SEQ ID NO: 3150101 - RNA, 19 nt, Human
uuugcuaagcauuccaacu

SEQ ID NO: 3150102 - RNA, 14 nt, Human
uuuggccagaaguc

SEQ ID NO: 3150103 - RNA, 12 nt, Human
uuuggccagaag

SEQ ID NO: 3150104 - RNA, 10 nt, Human
uuuggccaga

SEQ ID NO: 3150105 - RNA, 13 nt, Human
uuuuaaaaaagaa

SEQ ID NO: 3150106 - RNA, 14 nt, Human
uuuuaaaagaauga

SEQ ID NO: 3150107 - RNA, 20 nt, Human
auuccacuuauaggaauuga

SEQ ID NO: 3150108 - RNA, 14 nt, Human
auucaaacagucuc

SEQ ID NO: 3150109 - RNA, 15 nt, Human
auucaaacagucuca

SEQ ID NO: 3150110 - RNA, 22 nt, Human
auuacuggccuuuuucauuuau

SEQ ID NO: 3150111 - RNA, 21 nt, Human
auuacuggccuuuuucauuua

SEQ ID NO: 3150112 - RNA, 17 nt, Human
auuacuggccuuuuuca

SEQ ID NO: 3150113 - RNA, 16 nt, Human
auuauauuuacaaaug

SEQ ID NO: 3150114 - RNA, 18 nt, Human
auuaucucaaaacugcac

SEQ ID NO: 3150115 - RNA, 23 nt, Human
auuaucucaaaacugcacuguca

SEQ ID NO: 3150116 - RNA, 15 nt, Human
auuauauuuacaaau

SEQ ID NO: 3150117 - RNA, 15 nt, Human
auuaaguaaugauaa

SEQ ID NO: 3150118 - RNA, 13 nt, Human
auuaaguaaugau

SEQ ID NO: 3150119 - RNA, 22 nt, Human
auuaaucuuaguguaugauuac

SEQ ID NO: 3150120 - RNA, 21 nt, Human
auuaaucuuaguguaugauua

SEQ ID NO: 3150121 - RNA, 20 nt, Human
auuaaucuuaguguaugauu

SEQ ID NO: 3150122 - RNA, 19 nt, Human
auuaaucuuaguguaugau

SEQ ID NO: 3150123 - RNA, 17 nt, Human
auuaaucuuaguguaug

SEQ ID NO: 3150124 - RNA, 16 nt, Human
auuaaucuuaguguau

SEQ ID NO: 3150125 - RNA, 20 nt, Human
auuacauuuguauaaaauaa

SEQ ID NO: 3150126 - RNA, 15 nt, Human
auuacauuuguauaa

SEQ ID NO: 3150127 - RNA, 13 nt, Human
auuacauuuguau

SEQ ID NO: 3150128 - RNA, 13 nt, Human
uugcccuguuaaa

SEQ ID NO: 3150129 - RNA, 19 nt, Human
uugauggugguauguuuuc

SEQ ID NO: 3150130 - RNA, 18 nt, Human
uugauggugguauguuuu

SEQ ID NO: 3150131 - RNA, 21 nt, Human
aucucauuuccaagcaaguau

SEQ ID NO: 3150132 - RNA, 23 nt, Human
aucucauuuccaagcaaguauua

SEQ ID NO: 3150133 - RNA, 14 nt, Human
aucucauuuccaag

SEQ ID NO: 3150134 - RNA, 13 nt, Human
aucucaauauuuc

SEQ ID NO: 3150135 - RNA, 23 nt, Human
uugguuuaaagaaaguguauuug

SEQ ID NO: 3150136 - RNA, 17 nt, Human
uugguuuaaagaaagug

SEQ ID NO: 3150137 - RNA, 22 nt, Human
uugguuuaaagaaaguguauuu

SEQ ID NO: 3150138 - RNA, 18 nt, Human
uugguuuaaagaaagugu

SEQ ID NO: 3150139 - RNA, 15 nt, Human
uuguauaaaauaauu

SEQ ID NO: 3150140 - RNA, 16 nt, Human
uuguauaaaauaauuu

SEQ ID NO: 3150141 - RNA, 16 nt, Human
uuguaucacaaaucuu

SEQ ID NO: 3150142 - RNA, 17 nt, Human
uuguauaaaauaauuuu

SEQ ID NO: 3150143 - RNA, 19 nt, Human
augagagacacacugaaga

SEQ ID NO: 3150144 - RNA, 17 nt, Human
augagagacacacugaa

SEQ ID NO: 3150145 - RNA, 14 nt, Human
augagagacacacu

SEQ ID NO: 3150146 - RNA, 13 nt, Human
augagagacacac

SEQ ID NO: 3150147 - RNA, 13 nt, Human
augaaugaauggc

SEQ ID NO: 3150148 - RNA, 18 nt, Human
augaagauguagaggaga

SEQ ID NO: 3150149 - RNA, 17 nt, Human
augaaauauuauguuaa

SEQ ID NO: 3150150 - RNA, 13 nt, Human
augaaauauuaug

SEQ ID NO: 3150151 - RNA, 18 nt, Human
augaaauauuauguuaaa

SEQ ID NO: 3150152 - RNA, 15 nt, Human
augaaagcagggacu

SEQ ID NO: 3150153 - RNA, 13 nt, Human
aucuuuuucuaac

SEQ ID NO: 3150154 - RNA, 19 nt, Human
uuucauguuaguuaccuua

SEQ ID NO: 3150155 - RNA, 20 nt, Human
auggcuaguaucaaaagaaa

SEQ ID NO: 3150156 - RNA, 13 nt, Human
uuuauauaagcuu

SEQ ID NO: 3150157 - RNA, 22 nt, Human
uuuagcuggaaaaguauguuag

SEQ ID NO: 3150158 - RNA, 20 nt, Human
uuuagcuggaaaaguauguu

SEQ ID NO: 3150159 - RNA, 15 nt, Human
augcuagaacucccu

SEQ ID NO: 3150160 - RNA, 16 nt, Human
augcuagaacucccuu

SEQ ID NO: 3150161 - RNA, 22 nt, Human
augcugucuacacuaagagaga

SEQ ID NO: 3150162 - RNA, 23 nt, Human
uugugugaaagguacuucaaauc

SEQ ID NO: 3150163 - RNA, 15 nt, Human
uuguguguuauuuaa

SEQ ID NO: 3150164 - RNA, 16 nt, Human
uuguguguuauuuaaa

SEQ ID NO: 3150165 - RNA, 20 nt, Human
uuguguguuauuuaaaugag

SEQ ID NO: 3150166 - RNA, 21 nt, Human
uuguguguuauuuaaaugagu

SEQ ID NO: 3150167 - RNA, 16 nt, Human
uuguuggcauagcucu

SEQ ID NO: 3150168 - RNA, 21 nt, Human
augagagacacacugaagaag

SEQ ID NO: 3150169 - RNA, 20 nt, Human
augagagacacacugaagaa

SEQ ID NO: 3150170 - RNA, 15 nt, Human
augcaaagcacugac

SEQ ID NO: 3150171 - RNA, 12 nt, Human
augauucccagc

SEQ ID NO: 3150172 - RNA, 22 nt, Human
augauuaugaauuacauuugua

SEQ ID NO: 3150173 - RNA, 17 nt, Human
augcaguucugaagaag

SEQ ID NO: 3150174 - RNA, 15 nt, Human
augcaguucugaaga

SEQ ID NO: 3150175 - RNA, 17 nt, Human
augccacuaaauugaca

SEQ ID NO: 3150176 - RNA, 15 nt, Human
augccacuaaauuga

SEQ ID NO: 3150177 - RNA, 19 nt, Human
augcaguucugaagaagau

SEQ ID NO: 3150178 - RNA, 18 nt, Human
augcaguucugaagaaga

SEQ ID NO: 3150179 - RNA, 14 nt, Human
uuguuuucauuauc

SEQ ID NO: 3150180 - RNA, 14 nt, Human
uucuauaauuuaaa

SEQ ID NO: 3150181 - RNA, 13 nt, Human
uucuauaauuuaa

SEQ ID NO: 3150182 - RNA, 22 nt, Human
uucuagaaagagaaacaguugg

SEQ ID NO: 3150183 - RNA, 19 nt, Human
uucuagaaagagaaacagu

SEQ ID NO: 3150184 - RNA, 19 nt, Human
uucuaaguaaaaccacagc

SEQ ID NO: 3150185 - RNA, 20 nt, Human
uucuaaguaaaaccacagca

SEQ ID NO: 3150186 - RNA, 17 nt, Human
uucuaaguaaaaccaca

SEQ ID NO: 3150187 - RNA, 22 nt, Human
uuccuuagcuuagaccucagcc

SEQ ID NO: 3150188 - RNA, 23 nt, Human
uuccuuagcuuagaccucagccu

SEQ ID NO: 3150189 - RNA, 20 nt, Human
uuccuuagcuuagaccucag

SEQ ID NO: 3150190 - RNA, 21 nt, Human
uuccuuagcuuagaccucagc

SEQ ID NO: 3150191 - RNA, 20 nt, Human
aucaaauaugcaaagcacug

SEQ ID NO: 3150192 - RNA, 22 nt, Human
uuccccuugcccagggcucagc

SEQ ID NO: 3150193 - RNA, 23 nt, Human
uuccccuugcccagggcucagcc

SEQ ID NO: 3150194 - RNA, 22 nt, Human
auccuaauaaaaaggugaccau

SEQ ID NO: 3150195 - RNA, 18 nt, Human
auccuaauaaaaagguga

SEQ ID NO: 3150196 - RNA, 12 nt, Human
auccuaauaaaa

SEQ ID NO: 3150197 - RNA, 17 nt, Human
auccuaauaaaaaggug

SEQ ID NO: 3150198 - RNA, 16 nt, Human
auccuaauaaaaaggu

SEQ ID NO: 3150199 - RNA, 15 nt, Human
auccuaauaaaaagg

SEQ ID NO: 3150200 - RNA, 14 nt, Human
auccuaauaaaaag

SEQ ID NO: 3150201 - RNA, 13 nt, Human
uugaacacugggg

SEQ ID NO: 3150202 - RNA, 19 nt, Human
uugaaauauugacuuuuua

SEQ ID NO: 3150203 - RNA, 20 nt, Human
uugaacaaguuguuucauug

SEQ ID NO: 3150204 - RNA, 19 nt, Human
uucuugcuucuuucuagaa

SEQ ID NO: 3150205 - RNA, 17 nt, Human
uucuugcuucuuucuag

SEQ ID NO: 3150206 - RNA, 20 nt, Human
auaguuacuguguaauuagu

SEQ ID NO: 3150207 - RNA, 18 nt, Human
auaguuacuguguaauua

SEQ ID NO: 3150208 - RNA, 14 nt, Human
auaguuacugugua

SEQ ID NO: 3150209 - RNA, 13 nt, Human
auaguuacugugu

SEQ ID NO: 3150210 - RNA, 17 nt, Human
auaguuacuguguaauu

SEQ ID NO: 3150211 - RNA, 20 nt, Human
auaguuguaccgcaauguga

SEQ ID NO: 3150212 - RNA, 19 nt, Human
auauauaacaaugcuguau

SEQ ID NO: 3150213 - RNA, 17 nt, Human
auauaacaaugcuguau

SEQ ID NO: 3150214 - RNA, 24 nt, Human
auauaucuaccccagacuagaugu

SEQ ID NO: 3150215 - RNA, 18 nt, Human
uucaaacagucucaggaa

SEQ ID NO: 3150216 - RNA, 22 nt, Human
auaggaauugacccacaagaaa

SEQ ID NO: 3150217 - RNA, 17 nt, Human
auaggcguaacuaauuu

SEQ ID NO: 3150218 - RNA, 23 nt, Human
uucacaagacccaaaaggcagaa

SEQ ID NO: 3150219 - RNA, 22 nt, Human
uucacaagacccaaaaggcaga

SEQ ID NO: 3150220 - RNA, 21 nt, Human
uucacacacaggcaacugagg

SEQ ID NO: 3150221 - RNA, 12 nt, Human
uucccaaauuuc

SEQ ID NO: 3150222 - RNA, 18 nt, Human
uucccaacuccagaaagu

SEQ ID NO: 3150223 - RNA, 23 nt, Human
agcauaaauguugacaugggaca

SEQ ID NO: 3150224 - RNA, 22 nt, Human
ugaguaacugauuuguaacaag

SEQ ID NO: 3150225 - RNA, 12 nt, Human
ugauaugggucu

SEQ ID NO: 3150226 - RNA, 17 nt, Human
agcauuguaaaugugcu

SEQ ID NO: 3150227 - RNA, 18 nt, Human
agcauuguaaaugugcuu

SEQ ID NO: 3150228 - RNA, 20 nt, Human
agcaugucgucaaagcugaa

SEQ ID NO: 3150229 - RNA, 17 nt, Human
agcaugucgucaaagcu

SEQ ID NO: 3150230 - RNA, 14 nt, Human
agccagacuggcac

SEQ ID NO: 3150231 - RNA, 16 nt, Human
agccagcucucagcca

SEQ ID NO: 3150232 - RNA, 19 nt, Human
agccagaaauaaaguuggu

SEQ ID NO: 3150233 - RNA, 23 nt, Human
agccagaaauaaaguuggugaca

SEQ ID NO: 3150234 - RNA, 12 nt, Human
ugauuaaaccaa

SEQ ID NO: 3150235 - RNA, 14 nt, Human
ugauuaccagggac

SEQ ID NO: 3150236 - RNA, 14 nt, Human
ugaugaucuuuaaa

SEQ ID NO: 3150237 - RNA, 22 nt, Human
ugauguuuagaaacacaacuau

SEQ ID NO: 3150238 - RNA, 17 nt, Human
ugaugaagaaguugaua

SEQ ID NO: 3150239 - RNA, 12 nt, Human
ugaugaagaagu

SEQ ID NO: 3150240 - RNA, 22 nt, Human
agccugaaagaggaaugaagua

SEQ ID NO: 3150241 - RNA, 16 nt, Human
agccgaccucagccuu

SEQ ID NO: 3150242 - RNA, 14 nt, Human
agccgaccucagcc

SEQ ID NO: 3150243 - RNA, 15 nt, Human
agccgaccucagccu

SEQ ID NO: 3150244 - RNA, 12 nt, Human
agccgaccucag

SEQ ID NO: 3150245 - RNA, 13 nt, Human
agccgaccucagc

SEQ ID NO: 3150246 - RNA, 15 nt, Human
agccucauguccacu

SEQ ID NO: 3150247 - RNA, 19 nt, Human
agccucauccgaggcaggg

SEQ ID NO: 3150248 - RNA, 18 nt, Human
agccucauccgaggcagg

SEQ ID NO: 3150249 - RNA, 20 nt, Human
agccucauccgaggcagggu

SEQ ID NO: 3150250 - RNA, 20 nt, Human
agccucauguccacugguuc

SEQ ID NO: 3150251 - RNA, 21 nt, Human
agccuagccgaccucagccuu

SEQ ID NO: 3150252 - RNA, 17 nt, Human
agccuagccgaccucag

SEQ ID NO: 3150253 - RNA, 18 nt, Human
agccuagccgaccucagc

SEQ ID NO: 3150254 - RNA, 19 nt, Human
agccuagccgaccucagcc

SEQ ID NO: 3150255 - RNA, 20 nt, Human
agccuagccgaccucagccu

SEQ ID NO: 3150256 - RNA, 18 nt, Human
agcccauggcacucuaug

SEQ ID NO: 3150257 - RNA, 18 nt, Human
agccccgugggguuccuc

SEQ ID NO: 3150258 - RNA, 18 nt, Human
agcuacuugggaggcuga

SEQ ID NO: 3150259 - RNA, 17 nt, Human
agcuacuugggaggcug

SEQ ID NO: 3150260 - RNA, 12 nt, Human
ugccagacaugu

SEQ ID NO: 3150261 - RNA, 13 nt, Human
ugccagacaugug

SEQ ID NO: 3150262 - RNA, 11 nt, Human
agccugguggg

SEQ ID NO: 3150263 - RNA, 14 nt, Human
agccuggugggccu

SEQ ID NO: 3150264 - RNA, 16 nt, Human
agccuggugggccucc

SEQ ID NO: 3150265 - RNA, 18 nt, Human
agccuggugggccuccuc

SEQ ID NO: 3150266 - RNA, 21 nt, Human
agccuggugggccuccucugu

SEQ ID NO: 3150267 - RNA, 22 nt, Human
agccuggugggccuccucuguc

SEQ ID NO: 3150268 - RNA, 20 nt, Human
agccuuggggcugaugcagu

SEQ ID NO: 3150269 - RNA, 16 nt, Human
uggcauagcucugggg

SEQ ID NO: 3150270 - RNA, 15 nt, Human
uggcauagcucuggg

SEQ ID NO: 3150271 - RNA, 14 nt, Human
uggcauagcucugg

SEQ ID NO: 3150272 - RNA, 19 nt, Human
uggcacaguuuucugagaa

SEQ ID NO: 3150273 - RNA, 18 nt, Human
uggcacaguuuucugaga

SEQ ID NO: 3150274 - RNA, 13 nt, Human
uggaaaggcagcu

SEQ ID NO: 3150275 - RNA, 18 nt, Human
uggacaccaggagucccu

SEQ ID NO: 3150276 - RNA, 13 nt, Human
uggagaagaacug

SEQ ID NO: 3150277 - RNA, 13 nt, Human
ugcuguauuuuaa

SEQ ID NO: 3150278 - RNA, 22 nt, Human
ugcuguauuuuaaaagaaugau

SEQ ID NO: 3150279 - RNA, 21 nt, Human
ugcuguauuuuaaaagaauga

SEQ ID NO: 3150280 - RNA, 17 nt, Human
aggacacugauaugggu

SEQ ID NO: 3150281 - RNA, 23 nt, Human
aggaaaucaaauaugcaaagcac

SEQ ID NO: 3150282 - RNA, 12 nt, Human
aggaaauauuua

SEQ ID NO: 3150283 - RNA, 14 nt, Human
ugcucauggaauug

SEQ ID NO: 3150284 - RNA, 11 nt, Human
ugcucauggaa

SEQ ID NO: 3150285 - RNA, 16 nt, Human
agcuguucacagccag

SEQ ID NO: 3150286 - RNA, 19 nt, Human
agcuguucacagccagacu

SEQ ID NO: 3150287 - RNA, 14 nt, Human
agcuguucacagcc

SEQ ID NO: 3150288 - RNA, 16 nt, Human
agcugccuccccuccu

SEQ ID NO: 3150289 - RNA, 15 nt, Human
agcugccuccccucc

SEQ ID NO: 3150290 - RNA, 22 nt, Human
agcugcccucuccugggcagcu

SEQ ID NO: 3150291 - RNA, 21 nt, Human
agcugcccucuccugggcagc

SEQ ID NO: 3150292 - RNA, 15 nt, Human
ugcuacaaaaacaca

SEQ ID NO: 3150293 - RNA, 16 nt, Human
ugcuacaaaaacacag

SEQ ID NO: 3150294 - RNA, 17 nt, Human
ugcuacaaaaacacagc

SEQ ID NO: 3150295 - RNA, 18 nt, Human
ugcuacaaaaacacagca

SEQ ID NO: 3150296 - RNA, 19 nt, Human
ugcuacaaaaacacagcaa

SEQ ID NO: 3150297 - RNA, 20 nt, Human
ugcuacaaaaacacagcaag

SEQ ID NO: 3150298 - RNA, 17 nt, Human
agcuugaaacugagaug

SEQ ID NO: 3150299 - RNA, 14 nt, Human
agcuuagaccucag

SEQ ID NO: 3150300 - RNA, 15 nt, Human
agcuuagaccucagc

SEQ ID NO: 3150301 - RNA, 20 nt, Human
agcuuagaccucagccugug

SEQ ID NO: 3150302 - RNA, 16 nt, Human
agcuuagaccucagcc

SEQ ID NO: 3150303 - RNA, 17 nt, Human
agcuuagaccucagccu

SEQ ID NO: 3150304 - RNA, 18 nt, Human
agcuuagaccucagccug

SEQ ID NO: 3150305 - RNA, 19 nt, Human
agcuuagaccucagccugu

SEQ ID NO: 3150306 - RNA, 20 nt, Human
ugguaaggggaauugaggac

SEQ ID NO: 3150307 - RNA, 13 nt, Human
aggguuagggagg

SEQ ID NO: 3150308 - RNA, 15 nt, Human
aggguuagggagggg

SEQ ID NO: 3150309 - RNA, 16 nt, Human
aggguuagggaggggu

SEQ ID NO: 3150310 - RNA, 23 nt, Human
agguacuucaaauccuugaagau

SEQ ID NO: 3150311 - RNA, 14 nt, Human
uggggaagacugug

SEQ ID NO: 3150312 - RNA, 24 nt, Human
uggggaagacuguggcugcuagca

SEQ ID NO: 3150313 - RNA, 16 nt, Human
uggggaagacuguggc

SEQ ID NO: 3150314 - RNA, 17 nt, Human
uggggaagacuguggcu

SEQ ID NO: 3150315 - RNA, 17 nt, Human
agggcagggacaggaua

SEQ ID NO: 3150316 - RNA, 23 nt, Human
ugucauuugcuggagcucugccc

SEQ ID NO: 3150317 - RNA, 22 nt, Human
ugucagcugcaagguacucugg

SEQ ID NO: 3150318 - RNA, 23 nt, Human
ugucagcugcaagguacucuggu

SEQ ID NO: 3150319 - RNA, 15 nt, Human
aguauuucuaugaaa

SEQ ID NO: 3150320 - RNA, 13 nt, Human
aguauuucuauga

SEQ ID NO: 3150321 - RNA, 22 nt, Human
aguauuucuaugaaauauuaug

SEQ ID NO: 3150322 - RNA, 21 nt, Human
ugucaauaaaauccauacauu

SEQ ID NO: 3150323 - RNA, 20 nt, Human
ugucaaucagccuaguugau

SEQ ID NO: 3150324 - RNA, 13 nt, Human
aguagucagacug

SEQ ID NO: 3150325 - RNA, 15 nt, Human
agucaggaaagagaa

SEQ ID NO: 3150326 - RNA, 16 nt, Human
agucaggaaagagaac

SEQ ID NO: 3150327 - RNA, 23 nt, Human
agucagacuggauaguccgucuc

SEQ ID NO: 3150328 - RNA, 23 nt, Human
uguaccaguuaauuuuuccaacu

SEQ ID NO: 3150329 - RNA, 22 nt, Human
uguaccaguuaauuuuuccaac

SEQ ID NO: 3150330 - RNA, 21 nt, Human
uguaccaguuaauuuuuccaa

SEQ ID NO: 3150331 - RNA, 15 nt, Human
uguaccaguuaauuu

SEQ ID NO: 3150332 - RNA, 14 nt, Human
uguaccaguuaauu

SEQ ID NO: 3150333 - RNA, 12 nt, Human
uguaccaguuaa

SEQ ID NO: 3150334 - RNA, 11 nt, Human
uguaccaguua

SEQ ID NO: 3150335 - RNA, 16 nt, Human
uguagaggagaaacug

SEQ ID NO: 3150336 - RNA, 18 nt, Human
uguagaggagaaacugga

SEQ ID NO: 3150337 - RNA, 15 nt, Human
aguaaaaccacagca

SEQ ID NO: 3150338 - RNA, 19 nt, Human
aguagauaggccaugggca

SEQ ID NO: 3150339 - RNA, 23 nt, Human
aguaauuuauuguuuuuccuugu

SEQ ID NO: 3150340 - RNA, 23 nt, Human
uguaauuagugccacuuaaugua

SEQ ID NO: 3150341 - RNA, 21 nt, Human
uguaauuagugccacuuaaug

SEQ ID NO: 3150342 - RNA, 13 nt, Human
uguguuauuuaaa

SEQ ID NO: 3150343 - RNA, 14 nt, Human
uguguuauuuaaau

SEQ ID NO: 3150344 - RNA, 16 nt, Human
uguguuauuuaaauga

SEQ ID NO: 3150345 - RNA, 22 nt, Human
ugugguuucauguuaguuaccu

SEQ ID NO: 3150346 - RNA, 17 nt, Human
ugugguuucauguuagu

SEQ ID NO: 3150347 - RNA, 20 nt, Human
agugcuuggcccaggaguuu

SEQ ID NO: 3150348 - RNA, 21 nt, Human
agugccuguaaucacagcuac

SEQ ID NO: 3150349 - RNA, 19 nt, Human
agugcuuggcccaggaguu

SEQ ID NO: 3150350 - RNA, 18 nt, Human
agugcuuggcccaggagu

SEQ ID NO: 3150351 - RNA, 16 nt, Human
agugcuuggcccagga

SEQ ID NO: 3150352 - RNA, 15 nt, Human
agugcuuggcccagg

SEQ ID NO: 3150353 - RNA, 14 nt, Human
agugcuuggcccag

SEQ ID NO: 3150354 - RNA, 12 nt, Human
agugcuuggccc

SEQ ID NO: 3150355 - RNA, 20 nt, Human
uguggcagaguuacaguucu

SEQ ID NO: 3150356 - RNA, 19 nt, Human
uguggcagaguuacaguuc

SEQ ID NO: 3150357 - RNA, 15 nt, Human
uguggcagaguuaca

SEQ ID NO: 3150358 - RNA, 14 nt, Human
uguggcagaguuac

SEQ ID NO: 3150359 - RNA, 16 nt, Human
agugccacuuaaugua

SEQ ID NO: 3150360 - RNA, 14 nt, Human
agugccacuuaaug

SEQ ID NO: 3150361 - RNA, 21 nt, Human
agugcaaauugucacaggaca

SEQ ID NO: 3150362 - RNA, 18 nt, Human
agugcaaauugucacagg

SEQ ID NO: 3150363 - RNA, 14 nt, Human
agugcaaauuguca

SEQ ID NO: 3150364 - RNA, 19 nt, Human
aguucggugagcuacaaau

SEQ ID NO: 3150365 - RNA, 15 nt, Human
uguuauuuaaaugag

SEQ ID NO: 3150366 - RNA, 16 nt, Human
aguguuggagaagaac

SEQ ID NO: 3150367 - RNA, 14 nt, Human
aguguuggagaaga

SEQ ID NO: 3150368 - RNA, 18 nt, Human
aguguuggagaagaacug

SEQ ID NO: 3150369 - RNA, 17 nt, Human
aguguuggagaagaacu

SEQ ID NO: 3150370 - RNA, 11 nt, Human
aguuacugugu

SEQ ID NO: 3150371 - RNA, 19 nt, Human
aguuacuguguaauuagug

SEQ ID NO: 3150372 - RNA, 18 nt, Human
aguuacuguguaauuagu

SEQ ID NO: 3150373 - RNA, 16 nt, Human
aguuacuguguaauua

SEQ ID NO: 3150374 - RNA, 15 nt, Human
aguuacuguguaauu

SEQ ID NO: 3150375 - RNA, 14 nt, Human
aguuacuguguaau

SEQ ID NO: 3150376 - RNA, 23 nt, Human
auaauuuaccuaagauuacaaau

SEQ ID NO: 3150377 - RNA, 20 nt, Human
uuagcaaagaguuaauauau

SEQ ID NO: 3150378 - RNA, 13 nt, Human
uuagcaaagaguu

SEQ ID NO: 3150379 - RNA, 19 nt, Human
uuagcaaagaguuaauaua

SEQ ID NO: 3150380 - RNA, 16 nt, Human
auaauuuaccuaagau

SEQ ID NO: 3150381 - RNA, 13 nt, Human
auaauuuaccuaa

SEQ ID NO: 3150382 - RNA, 18 nt, Human
auaauccuaaacauauga

SEQ ID NO: 3150383 - RNA, 15 nt, Human
auaaauaguuuauga

SEQ ID NO: 3150384 - RNA, 13 nt, Human
auaaauaaaaaua

SEQ ID NO: 3150385 - RNA, 22 nt, Human
auaacgauaaaagacagugaaa

SEQ ID NO: 3150386 - RNA, 22 nt, Human
auaaccugucucaccuggacuu

SEQ ID NO: 3150387 - RNA, 18 nt, Human
uuaccuuauaguuacugu

SEQ ID NO: 3150388 - RNA, 19 nt, Human
uuagaaacacaacuauauu

SEQ ID NO: 3150389 - RNA, 15 nt, Human
aguugguaacuuuug

SEQ ID NO: 3150390 - RNA, 13 nt, Human
aguugguaacuuu

SEQ ID NO: 3150391 - RNA, 13 nt, Human
uguuucaaacaua

SEQ ID NO: 3150392 - RNA, 20 nt, Human
aguugguaacuuuugugaau

SEQ ID NO: 3150393 - RNA, 16 nt, Human
aguugguaacuuuugu

SEQ ID NO: 3150394 - RNA, 14 nt, Human
aguuuaaauuguaa

SEQ ID NO: 3150395 - RNA, 16 nt, Human
uuaaucuuaguguaug

SEQ ID NO: 3150396 - RNA, 14 nt, Human
uuaaucuuagugua

SEQ ID NO: 3150397 - RNA, 22 nt, Human
auaaaauaauuuuuauauuuga

SEQ ID NO: 3150398 - RNA, 12 nt, Human
auaaaauaauuu

SEQ ID NO: 3150399 - RNA, 19 nt, Human
aguuuucugagaaagacua

SEQ ID NO: 3150400 - RNA, 18 nt, Human
aguuuucugagaaagacu

SEQ ID NO: 3150401 - RNA, 23 nt, Human
aguuuucugagaaagacuauuca

SEQ ID NO: 3150402 - RNA, 14 nt, Human
uauuuuaaaagaau

SEQ ID NO: 3150403 - RNA, 18 nt, Human
uauuuuaaaagaaugauu

SEQ ID NO: 3150404 - RNA, 22 nt, Human
uauuuuaauaauguuucaaaca

SEQ ID NO: 3150405 - RNA, 19 nt, Human
uauuuuaauaauguuucaa

SEQ ID NO: 3150406 - RNA, 20 nt, Human
ucaaacagucucaggaaauc

SEQ ID NO: 3150407 - RNA, 21 nt, Human
ucaaacagucucaggaaauca

SEQ ID NO: 3150408 - RNA, 13 nt, Human
ucaaacagucuca

SEQ ID NO: 3150409 - RNA, 14 nt, Human
accaacacgagcag

SEQ ID NO: 3150410 - RNA, 19 nt, Human
accaacacgagcaggcuac

SEQ ID NO: 3150411 - RNA, 16 nt, Human
accacaagacugcaca

SEQ ID NO: 3150412 - RNA, 22 nt, Human
ucacagcuuauuuccucauuuu

SEQ ID NO: 3150413 - RNA, 17 nt, Human
ucacagccagacuggca

SEQ ID NO: 3150414 - RNA, 23 nt, Human
ucacagccagacuggcacaguuu

SEQ ID NO: 3150415 - RNA, 16 nt, Human
ucacagaccuuugaac

SEQ ID NO: 3150416 - RNA, 13 nt, Human
ucaauuuaaaaaa

SEQ ID NO: 3150417 - RNA, 12 nt, Human
ucaauuuaaaaa

SEQ ID NO: 3150418 - RNA, 23 nt, Human
ucaauauuucagauaaucacaau

SEQ ID NO: 3150419 - RNA, 13 nt, Human
ucaguagucagac

SEQ ID NO: 3150420 - RNA, 21 nt, Human
accaggguccuuuugacacug

SEQ ID NO: 3150421 - RNA, 16 nt, Human
acccaaauguucauca

SEQ ID NO: 3150422 - RNA, 17 nt, Human
ucagagcugcccucucc

SEQ ID NO: 3150423 - RNA, 15 nt, Human
ucagagcugcccucu

SEQ ID NO: 3150424 - RNA, 16 nt, Human
ucagagcugcccucuc

SEQ ID NO: 3150425 - RNA, 13 nt, Human
ucagagcugcccu

SEQ ID NO: 3150426 - RNA, 14 nt, Human
ucagagcugcccuc

SEQ ID NO: 3150427 - RNA, 14 nt, Human
ucagagacucaggg

SEQ ID NO: 3150428 - RNA, 17 nt, Human
ucagagacucagggccc

SEQ ID NO: 3150429 - RNA, 19 nt, Human
ucagagacucagggcccca

SEQ ID NO: 3150430 - RNA, 20 nt, Human
ucagagacucagggccccag

SEQ ID NO: 3150431 - RNA, 12 nt, Human
ucagcccucaga

SEQ ID NO: 3150432 - RNA, 20 nt, Human
ucagauggaaaauucauuuu

SEQ ID NO: 3150433 - RNA, 19 nt, Human
ucagauggaaaauucauuu

SEQ ID NO: 3150434 - RNA, 12 nt, Human
ucagauggaaaa

SEQ ID NO: 3150435 - RNA, 14 nt, Human
uccagugagacagc

SEQ ID NO: 3150436 - RNA, 22 nt, Human
uccaugaagauguagaggagaa

SEQ ID NO: 3150437 - RNA, 16 nt, Human
acgcucucuggccuuc

SEQ ID NO: 3150438 - RNA, 15 nt, Human
acgcucucuggccuu

SEQ ID NO: 3150439 - RNA, 14 nt, Human
acgcucucuggccu

SEQ ID NO: 3150440 - RNA, 17 nt, Human
acgcucucuggccuucg

SEQ ID NO: 3150441 - RNA, 16 nt, Human
acgaguaauuuauugu

SEQ ID NO: 3150442 - RNA, 22 nt, Human
accuggacuuaagcaucuggcu

SEQ ID NO: 3150443 - RNA, 16 nt, Human
ucauaauaaguugcau

SEQ ID NO: 3150444 - RNA, 17 nt, Human
accugagccccaaaagg

SEQ ID NO: 3150445 - RNA, 12 nt, Human
accugagcccca

SEQ ID NO: 3150446 - RNA, 21 nt, Human
accugacacaccaggcgcuaa

SEQ ID NO: 3150447 - RNA, 19 nt, Human
accugacacaccaggcgcu

SEQ ID NO: 3150448 - RNA, 16 nt, Human
uccucugcacucccac

SEQ ID NO: 3150449 - RNA, 12 nt, Human
uccucugcacuc

SEQ ID NO: 3150450 - RNA, 21 nt, Human
uccugaaaacccuugccaugu

SEQ ID NO: 3150451 - RNA, 17 nt, Human
uccucuccccaugaugu

SEQ ID NO: 3150452 - RNA, 14 nt, Human
acuccagaaaguga

SEQ ID NO: 3150453 - RNA, 14 nt, Human
ucccuccaccuccc

SEQ ID NO: 3150454 - RNA, 15 nt, Human
ucccuccaccucccu

SEQ ID NO: 3150455 - RNA, 17 nt, Human
ucccuccaccucccugc

SEQ ID NO: 3150456 - RNA, 19 nt, Human
ucccuccaccucccugcaa

SEQ ID NO: 3150457 - RNA, 22 nt, Human
ucccucccagaggagccaccag

SEQ ID NO: 3150458 - RNA, 23 nt, Human
ucccucccagaggagccaccagu

SEQ ID NO: 3150459 - RNA, 20 nt, Human
acucauuuuaaaaaauggaa

SEQ ID NO: 3150460 - RNA, 21 nt, Human
acuccaaacugacucuuaaga

SEQ ID NO: 3150461 - RNA, 15 nt, Human
acuaugauuauuaac

SEQ ID NO: 3150462 - RNA, 13 nt, Human
acuauucaaacag

SEQ ID NO: 3150463 - RNA, 14 nt, Human
acuauucaaacagu

SEQ ID NO: 3150464 - RNA, 16 nt, Human
acuauucaaacagucu

SEQ ID NO: 3150465 - RNA, 24 nt, Human
uccccuccucugcuugccaucccu

SEQ ID NO: 3150466 - RNA, 14 nt, Human
uccccuccucugcu

SEQ ID NO: 3150467 - RNA, 15 nt, Human
uccccuccucugcuu

SEQ ID NO: 3150468 - RNA, 18 nt, Human
uccccuccucugcuugcc

SEQ ID NO: 3150469 - RNA, 19 nt, Human
acuacuaauagaauaaagg

SEQ ID NO: 3150470 - RNA, 12 nt, Human
acuacuuuauaa

SEQ ID NO: 3150471 - RNA, 20 nt, Human
acuagaguuuagcuggaaaa

SEQ ID NO: 3150472 - RNA, 18 nt, Human
acugggguccuggggccu

SEQ ID NO: 3150473 - RNA, 20 nt, Human
acugggguccuggggccucg

SEQ ID NO: 3150474 - RNA, 13 nt, Human
acugggggagggg

SEQ ID NO: 3150475 - RNA, 22 nt, Human
acugaagaagcaccaaucauga

SEQ ID NO: 3150476 - RNA, 12 nt, Human
acugaagaagca

SEQ ID NO: 3150477 - RNA, 18 nt, Human
acugaagccagaaauaaa

SEQ ID NO: 3150478 - RNA, 22 nt, Human
acugucauccucaaagaaagug

SEQ ID NO: 3150479 - RNA, 21 nt, Human
acugucauccucaaagaaagu

SEQ ID NO: 3150480 - RNA, 22 nt, Human
acugucagcuccccucggagaa

SEQ ID NO: 3150481 - RNA, 23 nt, Human
acugucagcuccccucggagaag

SEQ ID NO: 3150482 - RNA, 19 nt, Human
acuguggcugcuagcacuu

SEQ ID NO: 3150483 - RNA, 12 nt, Human
acuguggcugcu

SEQ ID NO: 3150484 - RNA, 18 nt, Human
ucuaccccagacuagaug

SEQ ID NO: 3150485 - RNA, 16 nt, Human
ucuaccccagacuaga

SEQ ID NO: 3150486 - RNA, 23 nt, Human
ucuaccccagacuagauguagua

SEQ ID NO: 3150487 - RNA, 21 nt, Human
ucuaccccagacuagauguag

SEQ ID NO: 3150488 - RNA, 20 nt, Human
acuuccagauccuggaaauc

SEQ ID NO: 3150489 - RNA, 13 nt, Human
ucuauaauuuaaa

SEQ ID NO: 3150490 - RNA, 16 nt, Human
ucuauaauuuaccuaa

SEQ ID NO: 3150491 - RNA, 12 nt, Human
ucuauaauuuac

SEQ ID NO: 3150492 - RNA, 12 nt, Human
ucuagcaugaag

SEQ ID NO: 3150493 - RNA, 17 nt, Human
ucucaaaacugcacugu

SEQ ID NO: 3150494 - RNA, 18 nt, Human
acuucuaaguaaaaccac

SEQ ID NO: 3150495 - RNA, 19 nt, Human
acuucuaaguaaaaccaca

SEQ ID NO: 3150496 - RNA, 13 nt, Human
acuucuaaguaaa

SEQ ID NO: 3150497 - RNA, 14 nt, Human
acuuggagccaagg

SEQ ID NO: 3150498 - RNA, 19 nt, Human
acuuggagccaaggguuca

SEQ ID NO: 3150499 - RNA, 11 nt, Human
acuuggagcca

SEQ ID NO: 3150500 - RNA, 23 nt, Human
acuugaacccgggaggcagaggu

SEQ ID NO: 3150501 - RNA, 21 nt, Human
acuugaacccgggaggcagag

SEQ ID NO: 3150502 - RNA, 14 nt, Human
agaagcuccaggua

SEQ ID NO: 3150503 - RNA, 13 nt, Human
agaaguugauaug

SEQ ID NO: 3150504 - RNA, 21 nt, Human
agaauaaaggcaguuuucuaa

SEQ ID NO: 3150505 - RNA, 20 nt, Human
agaauaaaggcaguuuucua

SEQ ID NO: 3150506 - RNA, 18 nt, Human
agaauaaaggcaguuuuc

SEQ ID NO: 3150507 - RNA, 15 nt, Human
agaauaaaggcaguu

SEQ ID NO: 3150508 - RNA, 14 nt, Human
agaauaaaggcagu

SEQ ID NO: 3150509 - RNA, 13 nt, Human
agaauaaaggcag

SEQ ID NO: 3150510 - RNA, 20 nt, Human
ucugcccauccugccccuga

SEQ ID NO: 3150511 - RNA, 19 nt, Human
agaagcaccaaucaugaau

SEQ ID NO: 3150512 - RNA, 19 nt, Human
agaagcaacccaaauguuc

SEQ ID NO: 3150513 - RNA, 16 nt, Human
agaacucccuuucaac

SEQ ID NO: 3150514 - RNA, 15 nt, Human
agaacucccuuucaa

SEQ ID NO: 3150515 - RNA, 17 nt, Human
agaacucccuuucaaca

SEQ ID NO: 3150516 - RNA, 19 nt, Human
ucucuccagcugacuaaac

SEQ ID NO: 3150517 - RNA, 18 nt, Human
ucucuccagcugacuaaa

SEQ ID NO: 3150518 - RNA, 15 nt, Human
ucucuccagcugacu

SEQ ID NO: 3150519 - RNA, 16 nt, Human
agaaacacaacuauau

SEQ ID NO: 3150520 - RNA, 15 nt, Human
agaaacuggaacucu

SEQ ID NO: 3150521 - RNA, 22 nt, Human
agaaacaguugguaacuuuugu

SEQ ID NO: 3150522 - RNA, 21 nt, Human
agaaacaguugguaacuuuug

SEQ ID NO: 3150523 - RNA, 16 nt, Human
agaaagacuauucaaa

SEQ ID NO: 3150524 - RNA, 17 nt, Human
agaaagagaaacaguug

SEQ ID NO: 3150525 - RNA, 20 nt, Human
agaaagcagaacagugauua

SEQ ID NO: 3150526 - RNA, 18 nt, Human
agaaagcagaacagugau

SEQ ID NO: 3150527 - RNA, 17 nt, Human
agaaagcagaacaguga

SEQ ID NO: 3150528 - RNA, 16 nt, Human
ucuuggguaggcggga

SEQ ID NO: 3150529 - RNA, 12 nt, Human
agacucagggcc

SEQ ID NO: 3150530 - RNA, 16 nt, Human
agacucagggccccag

SEQ ID NO: 3150531 - RNA, 17 nt, Human
agacucagggccccagc

SEQ ID NO: 3150532 - RNA, 21 nt, Human
agacucagggccccagcacua

SEQ ID NO: 3150533 - RNA, 18 nt, Human
agacucagggccccagca

SEQ ID NO: 3150534 - RNA, 20 nt, Human
agacucagggccccagcacu

SEQ ID NO: 3150535 - RNA, 12 nt, Human
agacuauucaaa

SEQ ID NO: 3150536 - RNA, 14 nt, Human
agacuauucaaaca

SEQ ID NO: 3150537 - RNA, 15 nt, Human
agacuauucaaacag

SEQ ID NO: 3150538 - RNA, 21 nt, Human
agacauagaauuaacacauga

SEQ ID NO: 3150539 - RNA, 14 nt, Human
agacauagaauuaa

SEQ ID NO: 3150540 - RNA, 18 nt, Human
agacaucaacagauaaau

SEQ ID NO: 3150541 - RNA, 17 nt, Human
agacaucaacagauaaa

SEQ ID NO: 3150542 - RNA, 14 nt, Human
agaaucacuugaac

SEQ ID NO: 3150543 - RNA, 18 nt, Human
ucuucucuccagcugacu

SEQ ID NO: 3150544 - RNA, 14 nt, Human
ucuucucuccagcu

SEQ ID NO: 3150545 - RNA, 19 nt, Human
agagacucagggccccagc

SEQ ID NO: 3150546 - RNA, 20 nt, Human
agagacucagggccccagca

SEQ ID NO: 3150547 - RNA, 21 nt, Human
agagcaguuugguuucuagca

SEQ ID NO: 3150548 - RNA, 23 nt, Human
agagcaguuugguuucuagcaug

SEQ ID NO: 3150549 - RNA, 19 nt, Human
ugaaacucguuaauuugua

SEQ ID NO: 3150550 - RNA, 22 nt, Human
ugaaaaaguucugcagauaaac

SEQ ID NO: 3150551 - RNA, 20 nt, Human
ugaaaagcuccauuuuuagu

SEQ ID NO: 3150552 - RNA, 16 nt, Human
ucuuucugaugucaaa

SEQ ID NO: 3150553 - RNA, 15 nt, Human
ugaauacuuuauaaa

SEQ ID NO: 3150554 - RNA, 23 nt, Human
agcaacgcaggcccccaggugcc

SEQ ID NO: 3150555 - RNA, 15 nt, Human
agauucccugagcag

SEQ ID NO: 3150556 - RNA, 17 nt, Human
agauucauuuuucuuuc

SEQ ID NO: 3150557 - RNA, 12 nt, Human
agauucauuuuu

SEQ ID NO: 3150558 - RNA, 22 nt, Human
ugacuucuaaguaaaaccacag

SEQ ID NO: 3150559 - RNA, 23 nt, Human
ugacuucuaaguaaaaccacagc

SEQ ID NO: 3150560 - RNA, 15 nt, Human
ugacuucuaaguaaa

SEQ ID NO: 3150561 - RNA, 16 nt, Human
ugacacuuaaaaaugg

SEQ ID NO: 3150562 - RNA, 17 nt, Human
ugacacuuaaaaauggu

SEQ ID NO: 3150563 - RNA, 16 nt, Human
agaugcaguucugaag

SEQ ID NO: 3150564 - RNA, 14 nt, Human
aacaguugguaacu

SEQ ID NO: 3150565 - RNA, 23 nt, Human
aacccaaauguucaucaaugaau

SEQ ID NO: 3150566 - RNA, 18 nt, Human
aacccaaguccaagcaua

SEQ ID NO: 3150567 - RNA, 18 nt, Human
aaccugagccccaaaagg

SEQ ID NO: 3150568 - RNA, 20 nt, Human
aaccugagccccaaaaggua

SEQ ID NO: 3150569 - RNA, 15 nt, Human
gucuggcccaccagg

SEQ ID NO: 3150570 - RNA, 16 nt, Human
gucuuucacauuuaaa

SEQ ID NO: 3150571 - RNA, 12 nt, Human
aacucauuucua

SEQ ID NO: 3150572 - RNA, 21 nt, Human
aacuagaguuuagcuggaaaa

SEQ ID NO: 3150573 - RNA, 23 nt, Human
aacuaucucauuuccaagcaagu

SEQ ID NO: 3150574 - RNA, 16 nt, Human
aacuaugauuauuaac

SEQ ID NO: 3150575 - RNA, 18 nt, Human
aaccuugaaaacuuuaug

SEQ ID NO: 3150576 - RNA, 17 nt, Human
aacuacuaauagaauaa

SEQ ID NO: 3150577 - RNA, 21 nt, Human
gugagaugcuagaacucccuu

SEQ ID NO: 3150578 - RNA, 12 nt, Human
aacugaaaucau

SEQ ID NO: 3150579 - RNA, 19 nt, Human
aacugcacugucaagauga

SEQ ID NO: 3150580 - RNA, 19 nt, Human
aacuggacugguucaaaug

SEQ ID NO: 3150581 - RNA, 17 nt, Human
aacugggacaggggaga

SEQ ID NO: 3150582 - RNA, 21 nt, Human
aacuucagcgguuuauauaag

SEQ ID NO: 3150583 - RNA, 18 nt, Human
aacuuccagauccuggaa

SEQ ID NO: 3150584 - RNA, 17 nt, Human
gugaugggaaagcauug

SEQ ID NO: 3150585 - RNA, 18 nt, Human
aacuucuugcuucuuucu

SEQ ID NO: 3150586 - RNA, 12 nt, Human
aacuucuugcuu

SEQ ID NO: 3150587 - RNA, 18 nt, Human
gugccacuuaauguaugu

SEQ ID NO: 3150588 - RNA, 15 nt, Human
gugccacuuaaugua

SEQ ID NO: 3150589 - RNA, 20 nt, Human
aaauuuuuucucuaggaaau

SEQ ID NO: 3150590 - RNA, 15 nt, Human
aacaaugcuguauuu

SEQ ID NO: 3150591 - RNA, 14 nt, Human
aacaaugcuguauu

SEQ ID NO: 3150592 - RNA, 12 nt, Human
aacaauaaaaga

SEQ ID NO: 3150593 - RNA, 22 nt, Human
aacaaugcuguauuuuaaaaga

SEQ ID NO: 3150594 - RNA, 17 nt, Human
aacaaugcuguauuuua

SEQ ID NO: 3150595 - RNA, 16 nt, Human
aacacaacuauauugu

SEQ ID NO: 3150596 - RNA, 15 nt, Human
aacacaacuauauug

SEQ ID NO: 3150597 - RNA, 16 nt, Human
aacagauaaauaguuu

SEQ ID NO: 3150598 - RNA, 22 nt, Human
aacagugauuaccagggacuga

SEQ ID NO: 3150599 - RNA, 15 nt, Human
aacagugauuaccag

SEQ ID NO: 3150600 - RNA, 15 nt, Human
aacacagcaagggug

SEQ ID NO: 3150601 - RNA, 16 nt, Human
gucaaauugugugaaa

SEQ ID NO: 3150602 - RNA, 18 nt, Human
guauguacuucaugcugu

SEQ ID NO: 3150603 - RNA, 20 nt, Human
guauccagguucccucccag

SEQ ID NO: 3150604 - RNA, 16 nt, Human
guauauuuuauaucaa

SEQ ID NO: 3150605 - RNA, 21 nt, Human
guauaaaauaauuuuuauauu

SEQ ID NO: 3150606 - RNA, 15 nt, Human
guauaaaauaauuuu

SEQ ID NO: 3150607 - RNA, 15 nt, Human
aaauggguuuuacug

SEQ ID NO: 3150608 - RNA, 14 nt, Human
aaauggguuuuacu

SEQ ID NO: 3150609 - RNA, 17 nt, Human
guaguguuggagaagaa

SEQ ID NO: 3150610 - RNA, 20 nt, Human
guaguguuggagaagaacug

SEQ ID NO: 3150611 - RNA, 23 nt, Human
aagaggaaugaaguacucauaca

SEQ ID NO: 3150612 - RNA, 16 nt, Human
aagacugcacaucaaa

SEQ ID NO: 3150613 - RNA, 21 nt, Human
guguauuuggaaauaaaguca

SEQ ID NO: 3150614 - RNA, 13 nt, Human
aagauguagagga

SEQ ID NO: 3150615 - RNA, 19 nt, Human
guguauuuggaaauaaagu

SEQ ID NO: 3150616 - RNA, 13 nt, Human
aagaugaaaauau

SEQ ID NO: 3150617 - RNA, 14 nt, Human
aagaugaaaauauu

SEQ ID NO: 3150618 - RNA, 16 nt, Human
aagcauuuagauguau

SEQ ID NO: 3150619 - RNA, 13 nt, Human
aagcauuguaaau

SEQ ID NO: 3150620 - RNA, 19 nt, Human
aagcaucuggcucuaauuc

SEQ ID NO: 3150621 - RNA, 17 nt, Human
aagcaucuggcucuaau

SEQ ID NO: 3150622 - RNA, 13 nt, Human
aagcaucuggcuc

SEQ ID NO: 3150623 - RNA, 22 nt, Human
aagcaucauuauuugcagagac

SEQ ID NO: 3150624 - RNA, 17 nt, Human
aagcaguggacaccagg

SEQ ID NO: 3150625 - RNA, 14 nt, Human
aagcuccagguaga

SEQ ID NO: 3150626 - RNA, 13 nt, Human
aagcuccagguag

SEQ ID NO: 3150627 - RNA, 20 nt, Human
aagcucacagaccuuugaac

SEQ ID NO: 3150628 - RNA, 20 nt, Human
guuauuauauuuacaaaugg

SEQ ID NO: 3150629 - RNA, 13 nt, Human
aagguacuucaaa

SEQ ID NO: 3150630 - RNA, 14 nt, Human
aagguacuucaaau

SEQ ID NO: 3150631 - RNA, 13 nt, Human
aaggauaaugaau

SEQ ID NO: 3150632 - RNA, 18 nt, Human
aaggaggguuagggaggg

SEQ ID NO: 3150633 - RNA, 19 nt, Human
aaggaggguuagggagggg

SEQ ID NO: 3150634 - RNA, 20 nt, Human
uaaaagacagugaaagaaaa

SEQ ID NO: 3150635 - RNA, 16 nt, Human
uaaaagaauauuuuaa

SEQ ID NO: 3150636 - RNA, 23 nt, Human
uaaaagaauauuuuaacuuccuu

SEQ ID NO: 3150637 - RNA, 12 nt, Human
uaaaagaaugau

SEQ ID NO: 3150638 - RNA, 13 nt, Human
aaguauuagaaua

SEQ ID NO: 3150639 - RNA, 14 nt, Human
aaguaaugauaacu

SEQ ID NO: 3150640 - RNA, 19 nt, Human
guuuuuccuuguauuuaaa

SEQ ID NO: 3150641 - RNA, 16 nt, Human
aagucuuucacauuua

SEQ ID NO: 3150642 - RNA, 22 nt, Human
aagucuuauauauuguagauaa

SEQ ID NO: 3150643 - RNA, 14 nt, Human
aauuacauuuguau

SEQ ID NO: 3150644 - RNA, 13 nt, Human
aauuacauuugua

SEQ ID NO: 3150645 - RNA, 17 nt, Human
aauuagacacuuuggaa

SEQ ID NO: 3150646 - RNA, 16 nt, Human
aauuagacacuuugga

SEQ ID NO: 3150647 - RNA, 23 nt, Human
aauucaaggaauuucuuaacuuc

SEQ ID NO: 3150648 - RNA, 17 nt, Human
aauucaaggaauuucuu

SEQ ID NO: 3150649 - RNA, 16 nt, Human
aauucaaggaauuucu

SEQ ID NO: 3150650 - RNA, 19 nt, Human
uaccagggacugaggggag

SEQ ID NO: 3150651 - RNA, 20 nt, Human
uaccaguauuuagaagccaa

SEQ ID NO: 3150652 - RNA, 19 nt, Human
uaccaguauuuagaagcca

SEQ ID NO: 3150653 - RNA, 18 nt, Human
uaccaguauuuagaagcc

SEQ ID NO: 3150654 - RNA, 15 nt, Human
uaccaguauuuagaa

SEQ ID NO: 3150655 - RNA, 12 nt, Human
uaccaguauuua

SEQ ID NO: 3150656 - RNA, 16 nt, Human
uaccaugccauuuaaa

SEQ ID NO: 3150657 - RNA, 19 nt, Human
uaccaguuaauuuuuccaa

SEQ ID NO: 3150658 - RNA, 18 nt, Human
uaccaguuaauuuuucca

SEQ ID NO: 3150659 - RNA, 13 nt, Human
aauguucaucaau

SEQ ID NO: 3150660 - RNA, 20 nt, Human
aauguucaucaaugaaugaa

SEQ ID NO: 3150661 - RNA, 16 nt, Human
aauguucaucaaugaa

SEQ ID NO: 3150662 - RNA, 22 nt, Human
uaauuccguagguuauuuucag

SEQ ID NO: 3150663 - RNA, 18 nt, Human
uaauuuuuauauuugaaa

SEQ ID NO: 3150664 - RNA, 21 nt, Human
uaauuuuuauauuugaaauau

SEQ ID NO: 3150665 - RNA, 19 nt, Human
uaauuuuuauauuugaaau

SEQ ID NO: 3150666 - RNA, 16 nt, Human
aaugauuucauucaau

SEQ ID NO: 3150667 - RNA, 22 nt, Human
aaugagagacacacugaagaag

SEQ ID NO: 3150668 - RNA, 23 nt, Human
aaugauuaugaauuacauuugua

SEQ ID NO: 3150669 - RNA, 17 nt, Human
uacagagacagaaagca

SEQ ID NO: 3150670 - RNA, 13 nt, Human
uacagaauuuuau

SEQ ID NO: 3150671 - RNA, 20 nt, Human
aauguaagggaaacugccag

SEQ ID NO: 3150672 - RNA, 21 nt, Human
uacaaaaaaaaaaaaaaauua

SEQ ID NO: 3150673 - RNA, 17 nt, Human
uaauuuuuauauuugaa

SEQ ID NO: 3150674 - RNA, 13 nt, Human
uaauuuuuccaac

SEQ ID NO: 3150675 - RNA, 14 nt, Human
uaauuuuuccaacu

SEQ ID NO: 3150676 - RNA, 21 nt, Human
aaugcuguauuuuaaaagaau

SEQ ID NO: 3150677 - RNA, 20 nt, Human
aaugcuguauuuuaaaagaa

SEQ ID NO: 3150678 - RNA, 22 nt, Human
aaugcuguauuuuaaaagaaug

SEQ ID NO: 3150679 - RNA, 14 nt, Human
uaagcaaaauguga

SEQ ID NO: 3150680 - RNA, 15 nt, Human
uaagcaaaaugugau

SEQ ID NO: 3150681 - RNA, 19 nt, Human
uaagauuacaaaucagaag

SEQ ID NO: 3150682 - RNA, 22 nt, Human
uaagauuacaaaucagaaguca

SEQ ID NO: 3150683 - RNA, 16 nt, Human
aaucagccuaguugau

SEQ ID NO: 3150684 - RNA, 13 nt, Human
uaaguaaaaccac

SEQ ID NO: 3150685 - RNA, 15 nt, Human
uaaguaaaaccacag

SEQ ID NO: 3150686 - RNA, 18 nt, Human
uaagguuaccuuuguucc

SEQ ID NO: 3150687 - RNA, 20 nt, Human
uaaguaaugauaacuggaaa

SEQ ID NO: 3150688 - RNA, 16 nt, Human
uaaguaaaaccacagc

SEQ ID NO: 3150689 - RNA, 17 nt, Human
uaaguaaaaccacagca

SEQ ID NO: 3150690 - RNA, 18 nt, Human
uaaguaaaaccacagcag

SEQ ID NO: 3150691 - RNA, 18 nt, Human
uaaguuuuuuuuuaaaaa

SEQ ID NO: 3150692 - RNA, 12 nt, Human
uaauaaaaaggu

SEQ ID NO: 3150693 - RNA, 15 nt, Human
uaauaaaaaggugac

SEQ ID NO: 3150694 - RNA, 14 nt, Human
uaauaaaaagguga

SEQ ID NO: 3150695 - RNA, 20 nt, Human
aauccucaguuuuugugaaa

SEQ ID NO: 3150696 - RNA, 22 nt, Human
uaacauguccugccuauuaucu

SEQ ID NO: 3150697 - RNA, 19 nt, Human
aauagucaaauugugugaa

SEQ ID NO: 3150698 - RNA, 21 nt, Human
uaacuuccuuggacucauuuu

SEQ ID NO: 3150699 - RNA, 13 nt, Human
uaagaagugaaaa

SEQ ID NO: 3150700 - RNA, 23 nt, Human
aauaccacaggaaccacaagacu

SEQ ID NO: 3150701 - RNA, 18 nt, Human
aauaccaugccauuuaaa

SEQ ID NO: 3150702 - RNA, 23 nt, Human
aauacaucccuuaccugggaaag

SEQ ID NO: 3150703 - RNA, 16 nt, Human
uaaaugugcuuuuaaa

SEQ ID NO: 3150704 - RNA, 21 nt, Human
aaguguauuuggaaauaaagu

SEQ ID NO: 3150705 - RNA, 15 nt, Human
aaguguauuuggaaa

SEQ ID NO: 3150706 - RNA, 13 nt, Human
aaguguauuugga

SEQ ID NO: 3150707 - RNA, 19 nt, Human
uaucuauaauuuaccuaag

SEQ ID NO: 3150708 - RNA, 16 nt, Human
uaucuauaauuuaccu

SEQ ID NO: 3150709 - RNA, 14 nt, Human
uaucuauaauuuac

SEQ ID NO: 3150710 - RNA, 13 nt, Human
uaucuauaauuua

SEQ ID NO: 3150711 - RNA, 16 nt, Human
uaucaaacugaagcca

SEQ ID NO: 3150712 - RNA, 14 nt, Human
acagaccuuugaac

SEQ ID NO: 3150713 - RNA, 14 nt, Human
uaucacaaaucuua

SEQ ID NO: 3150714 - RNA, 16 nt, Human
uaucacaaaucuuaac

SEQ ID NO: 3150715 - RNA, 20 nt, Human
uaucacaaaucuuaacuuga

SEQ ID NO: 3150716 - RNA, 19 nt, Human
acagaaagcagaacaguga

SEQ ID NO: 3150717 - RNA, 22 nt, Human
acacuucuucuuggucuuauuu

SEQ ID NO: 3150718 - RNA, 19 nt, Human
uauaggaauugacccacaa

SEQ ID NO: 3150719 - RNA, 16 nt, Human
uauaggugcuacaaaa

SEQ ID NO: 3150720 - RNA, 21 nt, Human
uauaucuaccccagacuagau

SEQ ID NO: 3150721 - RNA, 20 nt, Human
uauaauuuaccuaagauuac

SEQ ID NO: 3150722 - RNA, 18 nt, Human
uauaauuuaccuaagauu

SEQ ID NO: 3150723 - RNA, 17 nt, Human
uauaauuuaccuaagau

SEQ ID NO: 3150724 - RNA, 16 nt, Human
uauaauuuaccuaaga

SEQ ID NO: 3150725 - RNA, 14 nt, Human
uauaauuuaccuaa

SEQ ID NO: 3150726 - RNA, 13 nt, Human
acacucaaaucaa

SEQ ID NO: 3150727 - RNA, 19 nt, Human
acacuaagagagaaugaga

SEQ ID NO: 3150728 - RNA, 17 nt, Human
acacucaaaucaagaaa

SEQ ID NO: 3150729 - RNA, 23 nt, Human
acagcccuuaugcgguuaauuuu

SEQ ID NO: 3150730 - RNA, 22 nt, Human
acagcccuuaugcgguuaauuu

SEQ ID NO: 3150731 - RNA, 18 nt, Human
acagcaagggugauggga

SEQ ID NO: 3150732 - RNA, 23 nt, Human
acagcuguaugauucccagccag

SEQ ID NO: 3150733 - RNA, 20 nt, Human
acagcuguaugauucccagc

SEQ ID NO: 3150734 - RNA, 19 nt, Human
acagcuguaugauucccag

SEQ ID NO: 3150735 - RNA, 14 nt, Human
acagcuguaugauu

SEQ ID NO: 3150736 - RNA, 13 nt, Human
uagacacacauga

SEQ ID NO: 3150737 - RNA, 15 nt, Human
uagacacuuuggaag

SEQ ID NO: 3150738 - RNA, 15 nt, Human
uagaacucccuuuca

SEQ ID NO: 3150739 - RNA, 17 nt, Human
uagaacucccuuucaac

SEQ ID NO: 3150740 - RNA, 16 nt, Human
uagaacucccuuucaa

SEQ ID NO: 3150741 - RNA, 15 nt, Human
uagaaacacaacuau

SEQ ID NO: 3150742 - RNA, 14 nt, Human
acaaaaacacagca

SEQ ID NO: 3150743 - RNA, 15 nt, Human
acaaaaacacagcaa

SEQ ID NO: 3150744 - RNA, 13 nt, Human
acaaaaacacagc

SEQ ID NO: 3150745 - RNA, 18 nt, Human
acaaaaggauaaugaaua

SEQ ID NO: 3150746 - RNA, 14 nt, Human
uagaggguguguaa

SEQ ID NO: 3150747 - RNA, 14 nt, Human
acaaaucagaaguc

SEQ ID NO: 3150748 - RNA, 23 nt, Human
acaaaucagaagucaucuugcua

SEQ ID NO: 3150749 - RNA, 16 nt, Human
acaaaucagaagucau

SEQ ID NO: 3150750 - RNA, 15 nt, Human
acaaaucagaaguca

SEQ ID NO: 3150751 - RNA, 13 nt, Human
uaggauguugaaa

SEQ ID NO: 3150752 - RNA, 20 nt, Human
acaaaucagaagucaucuug

SEQ ID NO: 3150753 - RNA, 13 nt, Human
acacaacuauauu

SEQ ID NO: 3150754 - RNA, 21 nt, Human
acacaggcaacugaggcagac

SEQ ID NO: 3150755 - RNA, 19 nt, Human
accaaggcugauuaaacca

SEQ ID NO: 3150756 - RNA, 20 nt, Human
accaaggcugauuaaaccaa

SEQ ID NO: 3150757 - RNA, 20 nt, Human
acaucccuuaccugggaaag

SEQ ID NO: 3150758 - RNA, 20 nt, Human
acagugauuaccagggacug

SEQ ID NO: 3150759 - RNA, 21 nt, Human
acagugauuaccagggacuga

SEQ ID NO: 3150760 - RNA, 14 nt, Human
acagugggugcccc

SEQ ID NO: 3150761 - RNA, 21 nt, Human
acagugggugccccccuugcc

SEQ ID NO: 3150762 - RNA, 16 nt, Human
acagaagcuccaggua

SEQ ID NO: 3150763 - RNA, 15 nt, Human
acacugggggagggg

SEQ ID NO: 3150764 - RNA, 16 nt, Human
acacugggggagggga

SEQ ID NO: 3150765 - RNA, 17 nt, Human
aauuuugugaagcaaaa

SEQ ID NO: 3150766 - RNA, 13 nt, Human
aauuuugugaagc

SEQ ID NO: 3150767 - RNA, 18 nt, Human
aauuuugugaagcaaaau

SEQ ID NO: 3150768 - RNA, 13 nt, Human
acaagaaaugaaa

SEQ ID NO: 3150769 - RNA, 16 nt, Human
acaagaaaugaaagca

SEQ ID NO: 3150770 - RNA, 15 nt, Human
acaagaaaugaaagc

SEQ ID NO: 3150771 - RNA, 21 nt, Human
acaaggaugaauuaaguuuuu

SEQ ID NO: 3150772 - RNA, 18 nt, Human
accucugccucagaaaac

SEQ ID NO: 3150773 - RNA, 17 nt, Human
accucugccucagaaaa

SEQ ID NO: 3150774 - RNA, 19 nt, Human
acggacgaaccuugaaaac

SEQ ID NO: 3150775 - RNA, 20 nt, Human
acuaauagaauaaaggcagu

SEQ ID NO: 3150776 - RNA, 18 nt, Human
acuauugaaguugcagau

SEQ ID NO: 3150777 - RNA, 18 nt, Human
acuaguauuucuaugaaa

SEQ ID NO: 3150778 - RNA, 17 nt, Human
acucugucucaguccau

SEQ ID NO: 3150779 - RNA, 15 nt, Human
acucugucucagucc

SEQ ID NO: 3150780 - RNA, 15 nt, Human
acucuuaagaagacu

SEQ ID NO: 3150781 - RNA, 14 nt, Human
acucuuaagaagac

SEQ ID NO: 3150782 - RNA, 19 nt, Human
acuucaaauccuugaagau

SEQ ID NO: 3150783 - RNA, 14 nt, Human
acuuaaaaaugguu

SEQ ID NO: 3150784 - RNA, 13 nt, Human
acuuaaaaauggu

SEQ ID NO: 3150785 - RNA, 19 nt, Human
acuucagcgguuuauauaa

SEQ ID NO: 3150786 - RNA, 18 nt, Human
acuucagcgguuuauaua

SEQ ID NO: 3150787 - RNA, 17 nt, Human
acuucagcgguuuauau

SEQ ID NO: 3150788 - RNA, 20 nt, Human
acuucaaauccuugaagauu

SEQ ID NO: 3150789 - RNA, 22 nt, Human
acuugggaggcugagaugggag

SEQ ID NO: 3150790 - RNA, 17 nt, Human
acuuuaugcuaagugaa

SEQ ID NO: 3150791 - RNA, 12 nt, Human
acuuuaugcuaa

SEQ ID NO: 3150792 - RNA, 15 nt, Human
aagagaacuuccaga

SEQ ID NO: 3150793 - RNA, 23 nt, Human
aagacagugaaagaaaauaacaa

SEQ ID NO: 3150794 - RNA, 15 nt, Human
aagcagggacuugaa

SEQ ID NO: 3150795 - RNA, 21 nt, Human
aagggauuuucagcccucaga

SEQ ID NO: 3150796 - RNA, 23 nt, Human
aagggauuuucagcccucagaau

SEQ ID NO: 3150797 - RNA, 14 nt, Human
aagggauggcaaga

SEQ ID NO: 3150798 - RNA, 17 nt, Human
aagggauggcaagaugu

SEQ ID NO: 3150799 - RNA, 15 nt, Human
aagggauuuucagcc

SEQ ID NO: 3150800 - RNA, 12 nt, Human
aaguagaggagg

SEQ ID NO: 3150801 - RNA, 19 nt, Human
aagccagauuuuccugaaa

SEQ ID NO: 3150802 - RNA, 14 nt, Human
aaggaauuucuuaa

SEQ ID NO: 3150803 - RNA, 20 nt, Human
aaggaauuucuuaacuucuu

SEQ ID NO: 3150804 - RNA, 19 nt, Human
aaggaauuucuuaacuucu

SEQ ID NO: 3150805 - RNA, 17 nt, Human
aaggaauuucuuaacuu

SEQ ID NO: 3150806 - RNA, 16 nt, Human
aaggaauuucuuaacu

SEQ ID NO: 3150807 - RNA, 23 nt, Human
aaggaauuucuuaacuucuugcu

SEQ ID NO: 3150808 - RNA, 17 nt, Human
aauccauacauuugugu

SEQ ID NO: 3150809 - RNA, 14 nt, Human
aauccauacauuug

SEQ ID NO: 3150810 - RNA, 16 nt, Human
aauccauacauuugug

SEQ ID NO: 3150811 - RNA, 15 nt, Human
aauccaaugaaauga

SEQ ID NO: 3150812 - RNA, 14 nt, Human
aaugauaacuggaa

SEQ ID NO: 3150813 - RNA, 16 nt, Human
aaugauaacuggaaac

SEQ ID NO: 3150814 - RNA, 15 nt, Human
aaugauaacuggaaa

SEQ ID NO: 3150815 - RNA, 15 nt, Human
aaucaaauaugcaaa

SEQ ID NO: 3150816 - RNA, 16 nt, Human
aaucaaauaugcaaag

SEQ ID NO: 3150817 - RNA, 22 nt, Human
aaucaaauaugcaaagcacuga

SEQ ID NO: 3150818 - RNA, 22 nt, Human
aaucauuucugcaucagcugcu

SEQ ID NO: 3150819 - RNA, 10 nt, Human
aauaaaccau

SEQ ID NO: 3150820 - RNA, 17 nt, Human
aaguucugcagauaaac

SEQ ID NO: 3150821 - RNA, 22 nt, Human
aaguugauaugccuuuucccaa

SEQ ID NO: 3150822 - RNA, 12 nt, Human
aauaauguuuca

SEQ ID NO: 3150823 - RNA, 14 nt, Human
aauaauguuucaaa

SEQ ID NO: 3150824 - RNA, 13 nt, Human
aacugaagccaga

SEQ ID NO: 3150825 - RNA, 23 nt, Human
aacugagaugugaacacaucagc

SEQ ID NO: 3150826 - RNA, 22 nt, Human
aaauugacacuuaaaaaugguu

SEQ ID NO: 3150827 - RNA, 20 nt, Human
aaauguucaucaaugaauga

SEQ ID NO: 3150828 - RNA, 17 nt, Human
aaauguucaucaaugaa

SEQ ID NO: 3150829 - RNA, 14 nt, Human
aaaucuuaacuuga

SEQ ID NO: 3150830 - RNA, 19 nt, Human
aaaauccauacauuugugu

SEQ ID NO: 3150831 - RNA, 13 nt, Human
aaaauucauuuuu

SEQ ID NO: 3150832 - RNA, 13 nt, Human
aaagaaacauuug

SEQ ID NO: 3150833 - RNA, 21 nt, Human
aaacccugucucuacuaaaaa

SEQ ID NO: 3150834 - RNA, 19 nt, Human
aaaggcagaagcaacccaa

SEQ ID NO: 3150835 - RNA, 16 nt, Human
aaaggcaguuuucuaa

SEQ ID NO: 3150836 - RNA, 14 nt, Human
aaaggcaguuuucu

SEQ ID NO: 3150837 - RNA, 13 nt, Human
aaaggcaguuuuc

SEQ ID NO: 3150838 - RNA, 19 nt, Human
aaagcauuguaaaugugcu

SEQ ID NO: 3150839 - RNA, 20 nt, Human
aaagcauuguaaaugugcuu

SEQ ID NO: 3150840 - RNA, 13 nt, Human
agaggaaugaagu

SEQ ID NO: 3150841 - RNA, 16 nt, Human
agacuggauaguccgu

SEQ ID NO: 3150842 - RNA, 18 nt, Human
agacucugucucagucca

SEQ ID NO: 3150843 - RNA, 12 nt, Human
agacagcagcuc

SEQ ID NO: 3150844 - RNA, 14 nt, Human
agacagcagcucag

SEQ ID NO: 3150845 - RNA, 16 nt, Human
agacagcagcucaggc

SEQ ID NO: 3150846 - RNA, 19 nt, Human
agacccaaaaggcagaagc

SEQ ID NO: 3150847 - RNA, 17 nt, Human
agacccaaaaggcagaa

SEQ ID NO: 3150848 - RNA, 22 nt, Human
agaagagcuguucacagccaga

SEQ ID NO: 3150849 - RNA, 21 nt, Human
agaagagcuguucacagccag

SEQ ID NO: 3150850 - RNA, 17 nt, Human
agaaugauuaugaauua

SEQ ID NO: 3150851 - RNA, 22 nt, Human
agaaugagagacacacugaaga

SEQ ID NO: 3150852 - RNA, 17 nt, Human
agaaugagagacacacu

SEQ ID NO: 3150853 - RNA, 22 nt, Human
agaagucaucuugcuaccagua

SEQ ID NO: 3150854 - RNA, 16 nt, Human
agaagucaucuugcua

SEQ ID NO: 3150855 - RNA, 15 nt, Human
agaagucaucuugcu

SEQ ID NO: 3150856 - RNA, 21 nt, Human
agaagugaaaaucuacacucc

SEQ ID NO: 3150857 - RNA, 14 nt, Human
agcacuuggagcca

SEQ ID NO: 3150858 - RNA, 17 nt, Human
agcacuuggagccaagg

SEQ ID NO: 3150859 - RNA, 16 nt, Human
agauguagaggagaaa

SEQ ID NO: 3150860 - RNA, 19 nt, Human
agauguagaggagaaacug

SEQ ID NO: 3150861 - RNA, 24 nt, Human
agcaaaauuuuuucucuaggaaau

SEQ ID NO: 3150862 - RNA, 23 nt, Human
agcaaaauuuuuucucuaggaaa

SEQ ID NO: 3150863 - RNA, 11 nt, Human
agccagcagcc

SEQ ID NO: 3150864 - RNA, 13 nt, Human
agccagcagccag

SEQ ID NO: 3150865 - RNA, 14 nt, Human
agccagcagccagc

SEQ ID NO: 3150866 - RNA, 16 nt, Human
agccagcagccagcuc

SEQ ID NO: 3150867 - RNA, 20 nt, Human
agccagcagccagcucucag

SEQ ID NO: 3150868 - RNA, 17 nt, Human
agcuccccucggagaag

SEQ ID NO: 3150869 - RNA, 19 nt, Human
agcuccccucggagaagag

SEQ ID NO: 3150870 - RNA, 20 nt, Human
agcuccccucggagaagagc

SEQ ID NO: 3150871 - RNA, 20 nt, Human
agcugcugaaacaacaaaua

SEQ ID NO: 3150872 - RNA, 17 nt, Human
agcgacagugagacucu

SEQ ID NO: 3150873 - RNA, 13 nt, Human
aggaaguagagga

SEQ ID NO: 3150874 - RNA, 20 nt, Human
agcuuauuuccucauuuuua

SEQ ID NO: 3150875 - RNA, 14 nt, Human
aggcgggaaggagg

SEQ ID NO: 3150876 - RNA, 15 nt, Human
aggcgggaaggaggg

SEQ ID NO: 3150877 - RNA, 15 nt, Human
agggacugaggggag

SEQ ID NO: 3150878 - RNA, 23 nt, Human
aggcuuagacccucaugcugcca

SEQ ID NO: 3150879 - RNA, 24 nt, Human
aggcuuagacccucaugcugccaa

SEQ ID NO: 3150880 - RNA, 21 nt, Human
aggccaugggcacugugggua

SEQ ID NO: 3150881 - RNA, 15 nt, Human
agggauuagggagag

SEQ ID NO: 3150882 - RNA, 17 nt, Human
agggauuuucagcccuc

SEQ ID NO: 3150883 - RNA, 22 nt, Human
agggauuuucagcccucagaau

SEQ ID NO: 3150884 - RNA, 22 nt, Human
aggguccuuuugacacugcucu

SEQ ID NO: 3150885 - RNA, 17 nt, Human
aggguccuuuugacacu

SEQ ID NO: 3150886 - RNA, 20 nt, Human
aguauuuuuuguauaauugg

SEQ ID NO: 3150887 - RNA, 19 nt, Human
aguauuuuuuguauaauug

SEQ ID NO: 3150888 - RNA, 13 nt, Human
aguauuuuuugua

SEQ ID NO: 3150889 - RNA, 22 nt, Human
aguauuuuuuguauaauuggau

SEQ ID NO: 3150890 - RNA, 16 nt, Human
aguacuguguacagaa

SEQ ID NO: 3150891 - RNA, 23 nt, Human
aguucagagcugcccucuccugg

SEQ ID NO: 3150892 - RNA, 21 nt, Human
aguucagagcugcccucuccu

SEQ ID NO: 3150893 - RNA, 22 nt, Human
aguucagagcugcccucuccug

SEQ ID NO: 3150894 - RNA, 20 nt, Human
aguucagagcugcccucucc

SEQ ID NO: 3150895 - RNA, 19 nt, Human
aguucagagcugcccucuc

SEQ ID NO: 3150896 - RNA, 19 nt, Human
aguugaaaagacuccaaag

SEQ ID NO: 3150897 - RNA, 20 nt, Human
aguugaaaagacuccaaaga

SEQ ID NO: 3150898 - RNA, 14 nt, Human
aguugaaaagacuc

SEQ ID NO: 3150899 - RNA, 18 nt, Human
aguugaaaagacuccaaa

SEQ ID NO: 3150900 - RNA, 17 nt, Human
agugcucuuuucuccuc

SEQ ID NO: 3150901 - RNA, 14 nt, Human
agugcucuuuucuc

SEQ ID NO: 3150902 - RNA, 19 nt, Human
agugucaaugcagccccca

SEQ ID NO: 3150903 - RNA, 13 nt, Human
auauuauguuaaa

SEQ ID NO: 3150904 - RNA, 14 nt, Human
auauuauguuaaaa

SEQ ID NO: 3150905 - RNA, 23 nt, Human
auauuucagauaaucacaauaca

SEQ ID NO: 3150906 - RNA, 15 nt, Human
auagcagcuuauuca

SEQ ID NO: 3150907 - RNA, 20 nt, Human
auaacaaugcuguauuuuaa

SEQ ID NO: 3150908 - RNA, 19 nt, Human
auaacaaugcuguauuuua

SEQ ID NO: 3150909 - RNA, 21 nt, Human
auaacaaugcuguauuuuaaa

SEQ ID NO: 3150910 - RNA, 17 nt, Human
auaacaaugcuguauuu

SEQ ID NO: 3150911 - RNA, 15 nt, Human
auaacaaugcuguau

SEQ ID NO: 3150912 - RNA, 14 nt, Human
auaacaaugaaagu

SEQ ID NO: 3150913 - RNA, 18 nt, Human
auaauguuucaaacauau

SEQ ID NO: 3150914 - RNA, 13 nt, Human
auaauguuucaaa

SEQ ID NO: 3150915 - RNA, 14 nt, Human
auaagccagacauc

SEQ ID NO: 3150916 - RNA, 22 nt, Human
auaagccagacaucaacagaua

SEQ ID NO: 3150917 - RNA, 21 nt, Human
auaagccagacaucaacagau

SEQ ID NO: 3150918 - RNA, 19 nt, Human
auccucaguuuuugugaaa

SEQ ID NO: 3150919 - RNA, 17 nt, Human
aucgcuccaccuugcag

SEQ ID NO: 3150920 - RNA, 21 nt, Human
aucgcuccaccuugcagcucu

SEQ ID NO: 3150921 - RNA, 17 nt, Human
aucaugaauuaguuuua

SEQ ID NO: 3150922 - RNA, 22 nt, Human
aucagcuugcccuguuaaaaga

SEQ ID NO: 3150923 - RNA, 13 nt, Human
aucagcuuauugu

SEQ ID NO: 3150924 - RNA, 14 nt, Human
aucaaauaugcaaa

SEQ ID NO: 3150925 - RNA, 13 nt, Human
aucuauaauuuac

SEQ ID NO: 3150926 - RNA, 11 nt, Human
aucuauaauuu

SEQ ID NO: 3150927 - RNA, 23 nt, Human
aucuauaauuuaccuaagauuac

SEQ ID NO: 3150928 - RNA, 16 nt, Human
aucuauaauuuaccua

SEQ ID NO: 3150929 - RNA, 21 nt, Human
augaaguacucauacauguua

SEQ ID NO: 3150930 - RNA, 13 nt, Human
augaaguacucau

SEQ ID NO: 3150931 - RNA, 23 nt, Human
augaaguccaagcauuuagaugu

SEQ ID NO: 3150932 - RNA, 20 nt, Human
augaaguccaagcauuuaga

SEQ ID NO: 3150933 - RNA, 18 nt, Human
augaugaucuuuaaaaua

SEQ ID NO: 3150934 - RNA, 21 nt, Human
augaugaucuuuaaaauacac

SEQ ID NO: 3150935 - RNA, 16 nt, Human
augaucuuuaaaauac

SEQ ID NO: 3150936 - RNA, 21 nt, Human
augucaaucagccuaguugau

SEQ ID NO: 3150937 - RNA, 16 nt, Human
augucaaucagccuag

SEQ ID NO: 3150938 - RNA, 15 nt, Human
augugaacacaucag

SEQ ID NO: 3150939 - RNA, 15 nt, Human
auguuccuagugaaa

SEQ ID NO: 3150940 - RNA, 16 nt, Human
auguuccuagugaaag

SEQ ID NO: 3150941 - RNA, 17 nt, Human
auguuccuagugaaaga

SEQ ID NO: 3150942 - RNA, 15 nt, Human
ugaaugaauggcuaa

SEQ ID NO: 3150943 - RNA, 17 nt, Human
ugaccacugcagaagac

SEQ ID NO: 3150944 - RNA, 16 nt, Human
ugaccacugcagaaga

SEQ ID NO: 3150945 - RNA, 13 nt, Human
ugaauuacauuug

SEQ ID NO: 3150946 - RNA, 14 nt, Human
ugaauuaaguuuuu

SEQ ID NO: 3150947 - RNA, 21 nt, Human
ugacuaaacuuuuuuucugua

SEQ ID NO: 3150948 - RNA, 19 nt, Human
ugacuaaacuuuuuuucug

SEQ ID NO: 3150949 - RNA, 18 nt, Human
ugacuaaacuuuuuuucu

SEQ ID NO: 3150950 - RNA, 12 nt, Human
ugacuaaacuuu

SEQ ID NO: 3150951 - RNA, 13 nt, Human
ugacucuuaagaa

SEQ ID NO: 3150952 - RNA, 15 nt, Human
ugacucuuaagaaga

SEQ ID NO: 3150953 - RNA, 14 nt, Human
ugacucuuaagaag

SEQ ID NO: 3150954 - RNA, 16 nt, Human
ugacucuuaagaagac

SEQ ID NO: 3150955 - RNA, 20 nt, Human
ugagaaagacuauucaaaca

SEQ ID NO: 3150956 - RNA, 20 nt, Human
ugagcaggauuuuaaucuuu

SEQ ID NO: 3150957 - RNA, 15 nt, Human
ugagcaggauuuuaa

SEQ ID NO: 3150958 - RNA, 24 nt, Human
ugaggcagacagcagcucaggcac

SEQ ID NO: 3150959 - RNA, 12 nt, Human
ugaggcagacag

SEQ ID NO: 3150960 - RNA, 13 nt, Human
ugaggcagacagc

SEQ ID NO: 3150961 - RNA, 14 nt, Human
ugaggcagacagca

SEQ ID NO: 3150962 - RNA, 15 nt, Human
ugaggcagacagcag

SEQ ID NO: 3150963 - RNA, 16 nt, Human
ugaggcagacagcagc

SEQ ID NO: 3150964 - RNA, 17 nt, Human
ugaggcagacagcagcu

SEQ ID NO: 3150965 - RNA, 20 nt, Human
ugaggcagacagcagcucag

SEQ ID NO: 3150966 - RNA, 23 nt, Human
ugaggcagacagcagcucaggca

SEQ ID NO: 3150967 - RNA, 17 nt, Human
ucuuuccacagaagcuc

SEQ ID NO: 3150968 - RNA, 22 nt, Human
ucuuaggguuaugauuaaguaa

SEQ ID NO: 3150969 - RNA, 14 nt, Human
ucuuauaauuuaaa

SEQ ID NO: 3150970 - RNA, 13 nt, Human
ucuuauaauuuaa

SEQ ID NO: 3150971 - RNA, 19 nt, Human
ucuugccaaauauaaauaa

SEQ ID NO: 3150972 - RNA, 16 nt, Human
ucuucuuggucucagu

SEQ ID NO: 3150973 - RNA, 21 nt, Human
ucugcacucccaccugacaca

SEQ ID NO: 3150974 - RNA, 18 nt, Human
ucugcacucccaccugac

SEQ ID NO: 3150975 - RNA, 14 nt, Human
ucugucucagucca

SEQ ID NO: 3150976 - RNA, 13 nt, Human
uccagggcccuga

SEQ ID NO: 3150977 - RNA, 20 nt, Human
uccaagcauuuagauguaua

SEQ ID NO: 3150978 - RNA, 20 nt, Human
uccagggcccugagcucggu

SEQ ID NO: 3150979 - RNA, 16 nt, Human
uccagggcccugagcu

SEQ ID NO: 3150980 - RNA, 17 nt, Human
uccagggcccugagcuc

SEQ ID NO: 3150981 - RNA, 19 nt, Human
ucauggaauuggagcucgu

SEQ ID NO: 3150982 - RNA, 21 nt, Human
ucauggaauuggagcucgugg

SEQ ID NO: 3150983 - RNA, 20 nt, Human
ucagucucucuucucuccag

SEQ ID NO: 3150984 - RNA, 18 nt, Human
ucaguccaugaagaugua

SEQ ID NO: 3150985 - RNA, 22 nt, Human
ucagcuccccucggagaagagc

SEQ ID NO: 3150986 - RNA, 21 nt, Human
ucagcuccccucggagaagag

SEQ ID NO: 3150987 - RNA, 20 nt, Human
ucaggagaggggcagaacag

SEQ ID NO: 3150988 - RNA, 15 nt, Human
ucaggagaggggcag

SEQ ID NO: 3150989 - RNA, 17 nt, Human
ucaggagaggggcagaa

SEQ ID NO: 3150990 - RNA, 18 nt, Human
ucaggagaggggcagaac

SEQ ID NO: 3150991 - RNA, 16 nt, Human
ucagcugcugaaacaa

SEQ ID NO: 3150992 - RNA, 22 nt, Human
ucagccuagccgaccucagccu

SEQ ID NO: 3150993 - RNA, 23 nt, Human
ucagccuagccgaccucagccuu

SEQ ID NO: 3150994 - RNA, 23 nt, Human
uccuuagcuuagaccucagccug

SEQ ID NO: 3150995 - RNA, 15 nt, Human
uccuugcaucaauuu

SEQ ID NO: 3150996 - RNA, 17 nt, Human
uccuugcaucaauuuuu

SEQ ID NO: 3150997 - RNA, 18 nt, Human
uccuuuugacacugcucu

SEQ ID NO: 3150998 - RNA, 16 nt, Human
uccuuuugacacugcu

SEQ ID NO: 3150999 - RNA, 14 nt, Human
uccuuuugacacug

SEQ ID NO: 3151000 - RNA, 13 nt, Human
uccuuuugacacu

SEQ ID NO: 3151001 - RNA, 22 nt, Human
uccuuuugacacugcucuaaca

SEQ ID NO: 3151002 - RNA, 20 nt, Human
uccuuuugacacugcucuaa

SEQ ID NO: 3151003 - RNA, 16 nt, Human
ucggccuccauccuga

SEQ ID NO: 3151004 - RNA, 15 nt, Human
ucggccuccauccug

SEQ ID NO: 3151005 - RNA, 14 nt, Human
ucggagcccugucu

SEQ ID NO: 3151006 - RNA, 15 nt, Human
ucggagcccugucuc

SEQ ID NO: 3151007 - RNA, 22 nt, Human
ucggagccucauccgaggcagg

SEQ ID NO: 3151008 - RNA, 23 nt, Human
ucggagccucauccgaggcaggg

SEQ ID NO: 3151009 - RNA, 12 nt, Human
ucuacuaaaaau

SEQ ID NO: 3151010 - RNA, 15 nt, Human
ucuacuaaaaauaca

SEQ ID NO: 3151011 - RNA, 19 nt, Human
ucuacuaaaaauacaaaaa

SEQ ID NO: 3151012 - RNA, 12 nt, Human
uccgaggcaggg

SEQ ID NO: 3151013 - RNA, 13 nt, Human
uccgaggcagggu

SEQ ID NO: 3151014 - RNA, 14 nt, Human
uccucugcuugcca

SEQ ID NO: 3151015 - RNA, 15 nt, Human
uccucugcuugccau

SEQ ID NO: 3151016 - RNA, 16 nt, Human
uccucugcuugccauc

SEQ ID NO: 3151017 - RNA, 17 nt, Human
uccucugcuugccaucc

SEQ ID NO: 3151018 - RNA, 21 nt, Human
uccugaggcuccacuuggucu

SEQ ID NO: 3151019 - RNA, 13 nt, Human
uccucuguccagg

SEQ ID NO: 3151020 - RNA, 16 nt, Human
uccugaggcuccacuu

SEQ ID NO: 3151021 - RNA, 15 nt, Human
uccugaggcuccacu

SEQ ID NO: 3151022 - RNA, 22 nt, Human
uggaauaauccuaaacauauga

SEQ ID NO: 3151023 - RNA, 20 nt, Human
uggaacauaaaauacaaugu

SEQ ID NO: 3151024 - RNA, 21 nt, Human
uggaacauaaaauacaauguu

SEQ ID NO: 3151025 - RNA, 23 nt, Human
uggaaacuucagcgguuuauaua

SEQ ID NO: 3151026 - RNA, 15 nt, Human
uggaaaauucauuuu

SEQ ID NO: 3151027 - RNA, 21 nt, Human
uggauuuccuaauacugucau

SEQ ID NO: 3151028 - RNA, 15 nt, Human
uggauuuccuaauac

SEQ ID NO: 3151029 - RNA, 11 nt, Human
uggagggaagc

SEQ ID NO: 3151030 - RNA, 12 nt, Human
uggcccaggagu

SEQ ID NO: 3151031 - RNA, 22 nt, Human
uggcccaggaguuuggccagaa

SEQ ID NO: 3151032 - RNA, 21 nt, Human
uggcccaggaguuuggccaga

SEQ ID NO: 3151033 - RNA, 20 nt, Human
uggcccaggaguuuggccag

SEQ ID NO: 3151034 - RNA, 13 nt, Human
uggcccaggaguu

SEQ ID NO: 3151035 - RNA, 19 nt, Human
uggcccaggaguuuggcca

SEQ ID NO: 3151036 - RNA, 14 nt, Human
uggcccaggaguuu

SEQ ID NO: 3151037 - RNA, 21 nt, Human
ugguauguuuucaggcuagau

SEQ ID NO: 3151038 - RNA, 14 nt, Human
ugggaguacaaaag

SEQ ID NO: 3151039 - RNA, 16 nt, Human
uggcuuccuggcaaua

SEQ ID NO: 3151040 - RNA, 20 nt, Human
ugccacuaaauugacacuua

SEQ ID NO: 3151041 - RNA, 22 nt, Human
ugccaaauauaaauaaaaauaa

SEQ ID NO: 3151042 - RNA, 19 nt, Human
ugccaaauauaaauaaaaa

SEQ ID NO: 3151043 - RNA, 18 nt, Human
ugccaaauauaaauaaaa

SEQ ID NO: 3151044 - RNA, 17 nt, Human
ugccaaauauaaauaaa

SEQ ID NO: 3151045 - RNA, 23 nt, Human
ugcccagggcucagccugguggg

SEQ ID NO: 3151046 - RNA, 11 nt, Human
ugccaucccuc

SEQ ID NO: 3151047 - RNA, 12 nt, Human
ugccaucccucc

SEQ ID NO: 3151048 - RNA, 19 nt, Human
ugcccagggcucagccugg

SEQ ID NO: 3151049 - RNA, 20 nt, Human
ugcccagggcucagccuggu

SEQ ID NO: 3151050 - RNA, 21 nt, Human
ugcccagggcucagccuggug

SEQ ID NO: 3151051 - RNA, 19 nt, Human
ugcacgcacacugucugcc

SEQ ID NO: 3151052 - RNA, 17 nt, Human
ugcacgcacacugucug

SEQ ID NO: 3151053 - RNA, 19 nt, Human
ugcagugagccgagauugu

SEQ ID NO: 3151054 - RNA, 14 nt, Human
ugcaguucugaaga

SEQ ID NO: 3151055 - RNA, 18 nt, Human
ugcaguucugaagaagau

SEQ ID NO: 3151056 - RNA, 17 nt, Human
ugcaguucugaagaaga

SEQ ID NO: 3151057 - RNA, 16 nt, Human
ugcaguucugaagaag

SEQ ID NO: 3151058 - RNA, 15 nt, Human
ugcaguucugaagaa

SEQ ID NO: 3151059 - RNA, 22 nt, Human
ugcaguucugaagaagauggua

SEQ ID NO: 3151060 - RNA, 19 nt, Human
ugcaguucugaagaagaug

SEQ ID NO: 3151061 - RNA, 18 nt, Human
ugccuguaaucacagcua

SEQ ID NO: 3151062 - RNA, 15 nt, Human
ugccuucucaacucc

SEQ ID NO: 3151063 - RNA, 19 nt, Human
ugcuaagcauuccaacuau

SEQ ID NO: 3151064 - RNA, 15 nt, Human
ugcuaagcauuccaa

SEQ ID NO: 3151065 - RNA, 16 nt, Human
ugcucaguagucagac

SEQ ID NO: 3151066 - RNA, 17 nt, Human
ugcugaaacaacaaaua

SEQ ID NO: 3151067 - RNA, 19 nt, Human
ugcugcaagcacagcccuu

SEQ ID NO: 3151068 - RNA, 17 nt, Human
uguagauaauacaguuc

SEQ ID NO: 3151069 - RNA, 22 nt, Human
uguaguguuggagaagaacuga

SEQ ID NO: 3151070 - RNA, 16 nt, Human
uguaccgcaaugugac

SEQ ID NO: 3151071 - RNA, 15 nt, Human
uguaccgcaauguga

SEQ ID NO: 3151072 - RNA, 20 nt, Human
uguaauaaacucauuucuag

SEQ ID NO: 3151073 - RNA, 13 nt, Human
uguccagggcccu

SEQ ID NO: 3151074 - RNA, 17 nt, Human
uguccagggcccugagc

SEQ ID NO: 3151075 - RNA, 19 nt, Human
uguccagggcccugagcuc

SEQ ID NO: 3151076 - RNA, 13 nt, Human
uguauuuaaauau

SEQ ID NO: 3151077 - RNA, 22 nt, Human
uguaugauuacuggccuuuuuc

SEQ ID NO: 3151078 - RNA, 15 nt, Human
uguaugauucccagc

SEQ ID NO: 3151079 - RNA, 13 nt, Human
uguaugauuacug

SEQ ID NO: 3151080 - RNA, 12 nt, Human
uguaugauuacu

SEQ ID NO: 3151081 - RNA, 24 nt, Human
ugugaauuaggcuguaacuacuuu

SEQ ID NO: 3151082 - RNA, 23 nt, Human
ugugaauuaggcuguaacuacuu

SEQ ID NO: 3151083 - RNA, 22 nt, Human
ugugaauuaggcuguaacuacu

SEQ ID NO: 3151084 - RNA, 19 nt, Human
ugugaauuaggcuguaacu

SEQ ID NO: 3151085 - RNA, 19 nt, Human
ugugcuaguaauuggaaag

SEQ ID NO: 3151086 - RNA, 23 nt, Human
uguguacagaauucugcuaccuc

SEQ ID NO: 3151087 - RNA, 21 nt, Human
uguguacagaauucugcuacc

SEQ ID NO: 3151088 - RNA, 21 nt, Human
uguguaauuagugccacuuaa

SEQ ID NO: 3151089 - RNA, 20 nt, Human
uguugacaugggacauuugc

SEQ ID NO: 3151090 - RNA, 17 nt, Human
uguuuaaaaucauuucu

SEQ ID NO: 3151091 - RNA, 18 nt, Human
uguuuaaaaucauuucug

SEQ ID NO: 3151092 - RNA, 17 nt, Human
uguuggcauagcucugg

SEQ ID NO: 3151093 - RNA, 14 nt, Human
uguuuaaaaucauu

SEQ ID NO: 3151094 - RNA, 19 nt, Human
uguuggagaagaacugaaa

SEQ ID NO: 3151095 - RNA, 17 nt, Human
uguuggagaagaacuga

SEQ ID NO: 3151096 - RNA, 16 nt, Human
uguuggagaagaacug

SEQ ID NO: 3151097 - RNA, 14 nt, Human
uguuggagaagaac

SEQ ID NO: 3151098 - RNA, 19 nt, Human
uguguuuugcaagccagau

SEQ ID NO: 3151099 - RNA, 13 nt, Human
uguguuuugcaag

SEQ ID NO: 3151100 - RNA, 19 nt, Human
ugugugcguccugucggag

SEQ ID NO: 3151101 - RNA, 20 nt, Human
ugugugaaagguacuucaaa

SEQ ID NO: 3151102 - RNA, 22 nt, Human
ugugugaaagguacuucaaauc

SEQ ID NO: 3151103 - RNA, 21 nt, Human
ugugugaaagguacuucaaau

SEQ ID NO: 3151104 - RNA, 21 nt, Human
uguuaaaagaugaaaauauuu

SEQ ID NO: 3151105 - RNA, 22 nt, Human
uuaagcaucuggcucuaauuca

SEQ ID NO: 3151106 - RNA, 20 nt, Human
uuacauuuguauaaaauaau

SEQ ID NO: 3151107 - RNA, 21 nt, Human
uuaaauauguuagcaaagagu

SEQ ID NO: 3151108 - RNA, 18 nt, Human
uuaaaauacacacucaaa

SEQ ID NO: 3151109 - RNA, 22 nt, Human
uuaaaaaaaaaccugagcccca

SEQ ID NO: 3151110 - RNA, 13 nt, Human
uaagugaaauaag

SEQ ID NO: 3151111 - RNA, 22 nt, Human
uaauguuucaaacauauauaac

SEQ ID NO: 3151112 - RNA, 22 nt, Human
uaaugauaacuggaaacuucag

SEQ ID NO: 3151113 - RNA, 17 nt, Human
uaaugauaacuggaaac

SEQ ID NO: 3151114 - RNA, 16 nt, Human
uaaugauaacuggaaa

SEQ ID NO: 3151115 - RNA, 20 nt, Human
uaaauugacacuuaaaaaug

SEQ ID NO: 3151116 - RNA, 18 nt, Human
uaaauucccguuuuguca

SEQ ID NO: 3151117 - RNA, 19 nt, Human
uaaauucccguuuugucac

SEQ ID NO: 3151118 - RNA, 16 nt, Human
uaaaugugccuucauu

SEQ ID NO: 3151119 - RNA, 20 nt, Human
uaaauggcuuccuggcaaua

SEQ ID NO: 3151120 - RNA, 21 nt, Human
uaagaaaauaucacuugucaa

SEQ ID NO: 3151121 - RNA, 13 nt, Human
uaagagagaauga

SEQ ID NO: 3151122 - RNA, 14 nt, Human
uaagagagaaugag

SEQ ID NO: 3151123 - RNA, 12 nt, Human
uaacuuuuguga

SEQ ID NO: 3151124 - RNA, 15 nt, Human
uaacuggaaacuuca

SEQ ID NO: 3151125 - RNA, 22 nt, Human
uaacuuuugugaauuaggcugu

SEQ ID NO: 3151126 - RNA, 16 nt, Human
uaacuuuugugaauua

SEQ ID NO: 3151127 - RNA, 17 nt, Human
uaaccaggggccaugaa

SEQ ID NO: 3151128 - RNA, 17 nt, Human
guuuagaaagcuugccc

SEQ ID NO: 3151129 - RNA, 21 nt, Human
guuuagcuggaaaaguauguu

SEQ ID NO: 3151130 - RNA, 20 nt, Human
guuuagcuggaaaaguaugu

SEQ ID NO: 3151131 - RNA, 20 nt, Human
guuuauauaagcuuguauuc

SEQ ID NO: 3151132 - RNA, 21 nt, Human
guuucauguuaguuaccuuau

SEQ ID NO: 3151133 - RNA, 17 nt, Human
guuucauguuaguuacc

SEQ ID NO: 3151134 - RNA, 17 nt, Human
uaaaggcaguuuucuaa

SEQ ID NO: 3151135 - RNA, 14 nt, Human
uaaaggcaguuuuc

SEQ ID NO: 3151136 - RNA, 14 nt, Human
uaaaguguuugaaa

SEQ ID NO: 3151137 - RNA, 20 nt, Human
uaaacuuuuuuucuguacca

SEQ ID NO: 3151138 - RNA, 19 nt, Human
uaaaaaugguuuaaauggu

SEQ ID NO: 3151139 - RNA, 18 nt, Human
uaaaaaugguuuaaaugg

SEQ ID NO: 3151140 - RNA, 15 nt, Human
uaaaaaugguuuaaa

SEQ ID NO: 3151141 - RNA, 22 nt, Human
uaaaacaagcacuaaacaaaga

SEQ ID NO: 3151142 - RNA, 10 nt, Human
uaaaaucauu

SEQ ID NO: 3151143 - RNA, 13 nt, Human
uaaaaucauuucu

SEQ ID NO: 3151144 - RNA, 18 nt, Human
uaaaaucauuucugcauc

SEQ ID NO: 3151145 - RNA, 22 nt, Human
uaaaaucauuucugcaucagcu

SEQ ID NO: 3151146 - RNA, 17 nt, Human
uaaaauccauacauuug

SEQ ID NO: 3151147 - RNA, 15 nt, Human
uaaaauccauacauu

SEQ ID NO: 3151148 - RNA, 20 nt, Human
uauauuugaaauauugacuu

SEQ ID NO: 3151149 - RNA, 16 nt, Human
uauaugcuucuguuuu

SEQ ID NO: 3151150 - RNA, 14 nt, Human
uauaugcuucuguu

SEQ ID NO: 3151151 - RNA, 19 nt, Human
uauauuuuuuguuaaauga

SEQ ID NO: 3151152 - RNA, 21 nt, Human
uauauuuuuuguuaaaugauu

SEQ ID NO: 3151153 - RNA, 13 nt, Human
uaucaaacugaag

SEQ ID NO: 3151154 - RNA, 14 nt, Human
uaucaaaagaaaga

SEQ ID NO: 3151155 - RNA, 19 nt, Human
uauauaacaaugcuguauu

SEQ ID NO: 3151156 - RNA, 17 nt, Human
uauauaacaaugcugua

SEQ ID NO: 3151157 - RNA, 13 nt, Human
uauauaacaaugc

SEQ ID NO: 3151158 - RNA, 17 nt, Human
uaguauuguccaggucu

SEQ ID NO: 3151159 - RNA, 19 nt, Human
uaggcuguaacuacuuuau

SEQ ID NO: 3151160 - RNA, 21 nt, Human
uaggcuguaacuacuuuauaa

SEQ ID NO: 3151161 - RNA, 20 nt, Human
uaggugcuacaaaaacacag

SEQ ID NO: 3151162 - RNA, 22 nt, Human
uaggugcuacaaaaacacagca

SEQ ID NO: 3151163 - RNA, 23 nt, Human
uaggugcuacaaaaacacagcaa

SEQ ID NO: 3151164 - RNA, 18 nt, Human
uaggugcuacaaaaacac

SEQ ID NO: 3151165 - RNA, 18 nt, Human
uagaauuaacacaugauc

SEQ ID NO: 3151166 - RNA, 16 nt, Human
uagaauuaacacauga

SEQ ID NO: 3151167 - RNA, 15 nt, Human
uagaauuaacacaug

SEQ ID NO: 3151168 - RNA, 23 nt, Human
uagaauaccacaggaaccacaag

SEQ ID NO: 3151169 - RNA, 22 nt, Human
uagaauaaaggcaguuuucuaa

SEQ ID NO: 3151170 - RNA, 21 nt, Human
uagaauaaaggcaguuuucua

SEQ ID NO: 3151171 - RNA, 19 nt, Human
uagaauaaaggcaguuuuc

SEQ ID NO: 3151172 - RNA, 19 nt, Human
uagacccucaugcugccaa

SEQ ID NO: 3151173 - RNA, 18 nt, Human
uagacccucaugcugcca

SEQ ID NO: 3151174 - RNA, 17 nt, Human
uagacccucaugcugcc

SEQ ID NO: 3151175 - RNA, 14 nt, Human
uagauaggccaugg

SEQ ID NO: 3151176 - RNA, 16 nt, Human
uagcaugaagacagag

SEQ ID NO: 3151177 - RNA, 15 nt, Human
uagccgaccucagcc

SEQ ID NO: 3151178 - RNA, 16 nt, Human
uagccgaccucagccu

SEQ ID NO: 3151179 - RNA, 17 nt, Human
uagccgaccucagccuu

SEQ ID NO: 3151180 - RNA, 19 nt, Human
uacaaaucagaagucaucu

SEQ ID NO: 3151181 - RNA, 17 nt, Human
uacaaaucagaagucau

SEQ ID NO: 3151182 - RNA, 16 nt, Human
uacaaaucagaaguca

SEQ ID NO: 3151183 - RNA, 21 nt, Human
uacaaaucagaagucaucuug

SEQ ID NO: 3151184 - RNA, 20 nt, Human
uacaaaucagaagucaucuu

SEQ ID NO: 3151185 - RNA, 22 nt, Human
uacaaaucagaagucaucuugc

SEQ ID NO: 3151186 - RNA, 16 nt, Human
uaauuuuuauauuuga

SEQ ID NO: 3151187 - RNA, 12 nt, Human
uaauuuuuauau

SEQ ID NO: 3151188 - RNA, 18 nt, Human
uaauuuugugaagcaaaa

SEQ ID NO: 3151189 - RNA, 13 nt, Human
uaauuuugugaag

SEQ ID NO: 3151190 - RNA, 22 nt, Human
uaauuagugccacuuaauguau

SEQ ID NO: 3151191 - RNA, 21 nt, Human
uaauuagugccacuuaaugua

SEQ ID NO: 3151192 - RNA, 19 nt, Human
uaauuagugccacuuaaug

SEQ ID NO: 3151193 - RNA, 14 nt, Human
uaauuagugccacu

SEQ ID NO: 3151194 - RNA, 17 nt, Human
uacacacucaaaucaag

SEQ ID NO: 3151195 - RNA, 16 nt, Human
uacacacucaaaucaa

SEQ ID NO: 3151196 - RNA, 14 nt, Human
uacacuccagugag

SEQ ID NO: 3151197 - RNA, 23 nt, Human
uacaguucggugagcuacaaaug

SEQ ID NO: 3151198 - RNA, 15 nt, Human
uacaguucugugguu

SEQ ID NO: 3151199 - RNA, 14 nt, Human
uacaguucuguggu

SEQ ID NO: 3151200 - RNA, 21 nt, Human
uacaguucugugguuucaugu

SEQ ID NO: 3151201 - RNA, 23 nt, Human
uaccuuuguucccaaauuucaua

SEQ ID NO: 3151202 - RNA, 18 nt, Human
uaccuuauaguuacugug

SEQ ID NO: 3151203 - RNA, 17 nt, Human
uaccuuauaguuacugu

SEQ ID NO: 3151204 - RNA, 16 nt, Human
uaccuuauaguuacug

SEQ ID NO: 3151205 - RNA, 15 nt, Human
uaccaaaaauaaaua

SEQ ID NO: 3151206 - RNA, 22 nt, Human
uaccuaacgaaguauccuucag

SEQ ID NO: 3151207 - RNA, 22 nt, Human
uaccuaagauuacaaaucagaa

SEQ ID NO: 3151208 - RNA, 20 nt, Human
uaccuaagauuacaaaucag

SEQ ID NO: 3151209 - RNA, 17 nt, Human
uaccuaagauuacaaau

SEQ ID NO: 3151210 - RNA, 16 nt, Human
uaccuaucaucuuaag

SEQ ID NO: 3151211 - RNA, 15 nt, Human
uaccucacugggguc

SEQ ID NO: 3151212 - RNA, 23 nt, Human
uacugucagcuccccucggagaa

SEQ ID NO: 3151213 - RNA, 23 nt, Human
uacugucauccucaaagaaagug

SEQ ID NO: 3151214 - RNA, 18 nt, Human
guguacagaauucugcua

SEQ ID NO: 3151215 - RNA, 21 nt, Human
guguaaguagauaggccaugg

SEQ ID NO: 3151216 - RNA, 23 nt, Human
guggggcagugcuuggcccagga

SEQ ID NO: 3151217 - RNA, 14 nt, Human
guggggcagugcuu

SEQ ID NO: 3151218 - RNA, 15 nt, Human
guggguggggcagug

SEQ ID NO: 3151219 - RNA, 15 nt, Human
gugggccuccucugu

SEQ ID NO: 3151220 - RNA, 20 nt, Human
gugggccuccucuguccagg

SEQ ID NO: 3151221 - RNA, 23 nt, Human
gugggccuccucuguccagggcc

SEQ ID NO: 3151222 - RNA, 15 nt, Human
gugcuacaaaaacac

SEQ ID NO: 3151223 - RNA, 20 nt, Human
gugcuacaaaaacacagcaa

SEQ ID NO: 3151224 - RNA, 17 nt, Human
guggcugcuagcacuug

SEQ ID NO: 3151225 - RNA, 19 nt, Human
guggcugcuagcacuugga

SEQ ID NO: 3151226 - RNA, 14 nt, Human
gugugcguccuguc

SEQ ID NO: 3151227 - RNA, 16 nt, Human
gugugcguccugucgg

SEQ ID NO: 3151228 - RNA, 20 nt, Human
guuaaaagaugaaaauauuu

SEQ ID NO: 3151229 - RNA, 14 nt, Human
guuaaaagaugaaa

SEQ ID NO: 3151230 - RNA, 16 nt, Human
guuaaaagaugaaaau

SEQ ID NO: 3151231 - RNA, 17 nt, Human
guguuauuuaaaugagu

SEQ ID NO: 3151232 - RNA, 15 nt, Human
guucugaagaagaug

SEQ ID NO: 3151233 - RNA, 14 nt, Human
guucugaagaagau

SEQ ID NO: 3151234 - RNA, 13 nt, Human
guucugaagaaga

SEQ ID NO: 3151235 - RNA, 12 nt, Human
guucugaagaag

SEQ ID NO: 3151236 - RNA, 17 nt, Human
guugaaaagacuccaaa

SEQ ID NO: 3151237 - RNA, 22 nt, Human
guugaaaagacuccaaagaaau

SEQ ID NO: 3151238 - RNA, 23 nt, Human
guugaaaagacuccaaagaaaug

SEQ ID NO: 3151239 - RNA, 20 nt, Human
guugauggugguauguuuuc

SEQ ID NO: 3151240 - RNA, 21 nt, Human
guugauggugguauguuuuca

SEQ ID NO: 3151241 - RNA, 18 nt, Human
guuggcauagcucugggg

SEQ ID NO: 3151242 - RNA, 15 nt, Human
guuggcauagcucug

SEQ ID NO: 3151243 - RNA, 19 nt, Human
guuggcauagcucuggggu

SEQ ID NO: 3151244 - RNA, 16 nt, Human
guucaugcagcugugg

SEQ ID NO: 3151245 - RNA, 15 nt, Human
guucaugcagcugug

SEQ ID NO: 3151246 - RNA, 16 nt, Human
guucaucaaugaauga

SEQ ID NO: 3151247 - RNA, 13 nt, Human
guucagagcugcc

SEQ ID NO: 3151248 - RNA, 14 nt, Human
guucagagcugccc

SEQ ID NO: 3151249 - RNA, 16 nt, Human
guucagagacucaggg

SEQ ID NO: 3151250 - RNA, 17 nt, Human
guucagagacucagggc

SEQ ID NO: 3151251 - RNA, 23 nt, Human
guucagagcugcccucuccuggg

SEQ ID NO: 3151252 - RNA, 22 nt, Human
guucagagacucagggccccag

SEQ ID NO: 3151253 - RNA, 20 nt, Human
guucagagcugcccucuccu

SEQ ID NO: 3151254 - RNA, 22 nt, Human
guucagagcugcccucuccugg

SEQ ID NO: 3151255 - RNA, 15 nt, Human
guucagagcugcccu

SEQ ID NO: 3151256 - RNA, 16 nt, Human
guucagagcugcccuc

SEQ ID NO: 3151257 - RNA, 17 nt, Human
guucagagcugcccucu

SEQ ID NO: 3151258 - RNA, 19 nt, Human
guucagagcugcccucucc

SEQ ID NO: 3151259 - RNA, 23 nt, Human
guuaccucugccucagaaaacaa

SEQ ID NO: 3151260 - RNA, 15 nt, Human
guuacaguucugugg

SEQ ID NO: 3151261 - RNA, 14 nt, Human
guuacaguucugug

SEQ ID NO: 3151262 - RNA, 13 nt, Human
guuacaguucugu

SEQ ID NO: 3151263 - RNA, 22 nt, Human
guuaccuuauaguuacugugua

SEQ ID NO: 3151264 - RNA, 20 nt, Human
guuaccuuauaguuacugug

SEQ ID NO: 3151265 - RNA, 18 nt, Human
guuaccuuauaguuacug

SEQ ID NO: 3151266 - RNA, 15 nt, Human
guuaccuuauaguua

SEQ ID NO: 3151267 - RNA, 23 nt, Human
gucggguuuuauuguuuaaaauc

SEQ ID NO: 3151268 - RNA, 12 nt, Human
gucggagcccug

SEQ ID NO: 3151269 - RNA, 16 nt, Human
gucggagcccugucuc

SEQ ID NO: 3151270 - RNA, 18 nt, Human
gucgucaaagcugaaaug

SEQ ID NO: 3151271 - RNA, 19 nt, Human
gucucaccuggacuuaagc

SEQ ID NO: 3151272 - RNA, 13 nt, Human
gucugacuguuuc

SEQ ID NO: 3151273 - RNA, 14 nt, Human
gucucucuucucuc

SEQ ID NO: 3151274 - RNA, 23 nt, Human
gucucucuucucuccagcugacu

SEQ ID NO: 3151275 - RNA, 20 nt, Human
gucucucuucucuccagcug

SEQ ID NO: 3151276 - RNA, 19 nt, Human
gucucucuucucuccagcu

SEQ ID NO: 3151277 - RNA, 15 nt, Human
gucucucuucucucc

SEQ ID NO: 3151278 - RNA, 16 nt, Human
gucugccagccagcag

SEQ ID NO: 3151279 - RNA, 17 nt, Human
gucugccagccagcagc

SEQ ID NO: 3151280 - RNA, 18 nt, Human
gucugccagccagcagcc

SEQ ID NO: 3151281 - RNA, 23 nt, Human
gucugugagaugcuagaacuccc

SEQ ID NO: 3151282 - RNA, 22 nt, Human
gucugugagaugcuagaacucc

SEQ ID NO: 3151283 - RNA, 21 nt, Human
gucugugagaugcuagaacuc

SEQ ID NO: 3151284 - RNA, 17 nt, Human
gucugugagaugcuaga

SEQ ID NO: 3151285 - RNA, 16 nt, Human
gucugugagaugcuag

SEQ ID NO: 3151286 - RNA, 15 nt, Human
gucugugagaugcua

SEQ ID NO: 3151287 - RNA, 16 nt, Human
gugacaagcucacaga

SEQ ID NO: 3151288 - RNA, 21 nt, Human
gugaacaaauuuacagagaca

SEQ ID NO: 3151289 - RNA, 13 nt, Human
gugaacacaucag

SEQ ID NO: 3151290 - RNA, 13 nt, Human
gugccccccuugc

SEQ ID NO: 3151291 - RNA, 20 nt, Human
gugccccccuugccagacau

SEQ ID NO: 3151292 - RNA, 13 nt, Human
gugcguccugucg

SEQ ID NO: 3151293 - RNA, 23 nt, Human
guaguauuuuuuguauaauugga

SEQ ID NO: 3151294 - RNA, 20 nt, Human
guaguauuuuuuguauaauu

SEQ ID NO: 3151295 - RNA, 19 nt, Human
guaguauuuuuuguauaau

SEQ ID NO: 3151296 - RNA, 15 nt, Human
guaguauuuuuugua

SEQ ID NO: 3151297 - RNA, 15 nt, Human
guaguguuggagaag

SEQ ID NO: 3151298 - RNA, 14 nt, Human
guaguguuggagaa

SEQ ID NO: 3151299 - RNA, 19 nt, Human
guauaauuggauuuccuaa

SEQ ID NO: 3151300 - RNA, 18 nt, Human
guauaauuggauuuccua

SEQ ID NO: 3151301 - RNA, 20 nt, Human
guauaauuggauuuccuaau

SEQ ID NO: 3151302 - RNA, 18 nt, Human
gcuauaggugcuacaaaa

SEQ ID NO: 3151303 - RNA, 15 nt, Human
guagcauuacagugg

SEQ ID NO: 3151304 - RNA, 17 nt, Human
guauguuagugcaaauu

SEQ ID NO: 3151305 - RNA, 21 nt, Human
gucagcuccccucggagaaga

SEQ ID NO: 3151306 - RNA, 22 nt, Human
gucagcuccccucggagaagag

SEQ ID NO: 3151307 - RNA, 23 nt, Human
gucagcuccccucggagaagagc

SEQ ID NO: 3151308 - RNA, 17 nt, Human
guccagggcccugagcu

SEQ ID NO: 3151309 - RNA, 20 nt, Human
guccagggcccugagcucgg

SEQ ID NO: 3151310 - RNA, 16 nt, Human
gucccuacaccccucc

SEQ ID NO: 3151311 - RNA, 21 nt, Human
gucccuacaccccuccccugc

SEQ ID NO: 3151312 - RNA, 20 nt, Human
guauuuuaaaagaaugauua

SEQ ID NO: 3151313 - RNA, 13 nt, Human
guauuuuaaucac

SEQ ID NO: 3151314 - RNA, 18 nt, Human
guauuuuaaaagaaugau

SEQ ID NO: 3151315 - RNA, 15 nt, Human
gucaaugcagccccc

SEQ ID NO: 3151316 - RNA, 22 nt, Human
gucaauaaaauccauacauuug

SEQ ID NO: 3151317 - RNA, 23 nt, Human
gucaauaaaauccauacauuugu

SEQ ID NO: 3151318 - RNA, 18 nt, Human
gucaaggcuuagacccuc

SEQ ID NO: 3151319 - RNA, 16 nt, Human
gucaaggcuuagaccc

SEQ ID NO: 3151320 - RNA, 14 nt, Human
gucaaggcuuagac

SEQ ID NO: 3151321 - RNA, 20 nt, Human
gucaaggcuuagacccucau

SEQ ID NO: 3151322 - RNA, 19 nt, Human
gucagcuccccucggagaa

SEQ ID NO: 3151323 - RNA, 14 nt, Human
uuuguauaaaauaa

SEQ ID NO: 3151324 - RNA, 13 nt, Human
uuuguauaaaaua

SEQ ID NO: 3151325 - RNA, 13 nt, Human
uuugguuucuagc

SEQ ID NO: 3151326 - RNA, 21 nt, Human
uuuuaaaagaaugauuaugaa

SEQ ID NO: 3151327 - RNA, 15 nt, Human
uuuuaaaagaaugau

SEQ ID NO: 3151328 - RNA, 20 nt, Human
uuuuaaauucccguuuuguc

SEQ ID NO: 3151329 - RNA, 20 nt, Human
uuuuaauaauguuucaaaca

SEQ ID NO: 3151330 - RNA, 18 nt, Human
uuugaaucaucaagucuu

SEQ ID NO: 3151331 - RNA, 17 nt, Human
uuucuuauuucauuucu

SEQ ID NO: 3151332 - RNA, 13 nt, Human
uuucuagaaagag

SEQ ID NO: 3151333 - RNA, 13 nt, Human
uuucugagaaaga

SEQ ID NO: 3151334 - RNA, 21 nt, Human
uuaccaaaaauaaauauaucu

SEQ ID NO: 3151335 - RNA, 22 nt, Human
uuuccucaaaacuucagacaua

SEQ ID NO: 3151336 - RNA, 18 nt, Human
uuuccucauuuuuauaau

SEQ ID NO: 3151337 - RNA, 18 nt, Human
uuuuggucuggagggaag

SEQ ID NO: 3151338 - RNA, 14 nt, Human
uuuuccugaaaacc

SEQ ID NO: 3151339 - RNA, 13 nt, Human
uuuuccugaaaac

SEQ ID NO: 3151340 - RNA, 24 nt, Human
uuuuguauaauuggauuuccuaau

SEQ ID NO: 3151341 - RNA, 23 nt, Human
uuuuguauaauuggauuuccuaa

SEQ ID NO: 3151342 - RNA, 16 nt, Human
uuuuguauaauuggau

SEQ ID NO: 3151343 - RNA, 14 nt, Human
uuuuguauaauugg

SEQ ID NO: 3151344 - RNA, 18 nt, Human
uuuugucacuuuuucuga

SEQ ID NO: 3151345 - RNA, 18 nt, Human
uuuuuaaaaaagaaacau

SEQ ID NO: 3151346 - RNA, 17 nt, Human
uuuuuccuuguauuuaa

SEQ ID NO: 3151347 - RNA, 19 nt, Human
uuuuucucuaggaaauauu

SEQ ID NO: 3151348 - RNA, 17 nt, Human
uuuuucugauaaaagau

SEQ ID NO: 3151349 - RNA, 13 nt, Human
uuuuucugauaaa

SEQ ID NO: 3151350 - RNA, 20 nt, Human
cuaccaguauuuagaagcca

SEQ ID NO: 3151351 - RNA, 19 nt, Human
cuaccaguauuuagaagcc

SEQ ID NO: 3151352 - RNA, 13 nt, Human
cuaccaguauuua

SEQ ID NO: 3151353 - RNA, 17 nt, Human
cuacacuccagugagac

SEQ ID NO: 3151354 - RNA, 16 nt, Human
cuacacuccagugaga

SEQ ID NO: 3151355 - RNA, 14 nt, Human
cuaagcaaaaugug

SEQ ID NO: 3151356 - RNA, 17 nt, Human
cuaacauguccugccua

SEQ ID NO: 3151357 - RNA, 18 nt, Human
cuaagcaaaaugugauau

SEQ ID NO: 3151358 - RNA, 15 nt, Human
cuaagcaaaauguga

SEQ ID NO: 3151359 - RNA, 19 nt, Human
cuacuugggaggcugagau

SEQ ID NO: 3151360 - RNA, 18 nt, Human
cuacuuuauaacuaacau

SEQ ID NO: 3151361 - RNA, 14 nt, Human
cuacuuuauaacua

SEQ ID NO: 3151362 - RNA, 19 nt, Human
cuacuuuauaacuaacaug

SEQ ID NO: 3151363 - RNA, 18 nt, Human
cuacuugggaggcugaga

SEQ ID NO: 3151364 - RNA, 15 nt, Human
cuacuugggaggcug

SEQ ID NO: 3151365 - RNA, 22 nt, Human
cuagauguaguauuuuuuguau

SEQ ID NO: 3151366 - RNA, 20 nt, Human
cuagauguaguauuuuuugu

SEQ ID NO: 3151367 - RNA, 23 nt, Human
cuagauguaguauuuuuuguaua

SEQ ID NO: 3151368 - RNA, 16 nt, Human
cuagauguaguauuuu

SEQ ID NO: 3151369 - RNA, 20 nt, Human
cuauauuuuuuguuaaauga

SEQ ID NO: 3151370 - RNA, 19 nt, Human
cuauauuguuugcuaagca

SEQ ID NO: 3151371 - RNA, 18 nt, Human
cuauauuguuugcuaagc

SEQ ID NO: 3151372 - RNA, 13 nt, Human
cuaugaaauauua

SEQ ID NO: 3151373 - RNA, 16 nt, Human
cuaucaaacugaagcc

SEQ ID NO: 3151374 - RNA, 20 nt, Human
cuaucaaacugaagccagaa

SEQ ID NO: 3151375 - RNA, 21 nt, Human
cuaucaaacugaagccagaaa

SEQ ID NO: 3151376 - RNA, 22 nt, Human
cuauauuuuuuguuaaaugauu

SEQ ID NO: 3151377 - RNA, 13 nt, Human
cuaucaaacugaa

SEQ ID NO: 3151378 - RNA, 22 nt, Human
cuaggaaauauuuauuuuaaua

SEQ ID NO: 3151379 - RNA, 16 nt, Human
cuagcacuuggagcca

SEQ ID NO: 3151380 - RNA, 23 nt, Human
cuaguaucaaaagaaagaaaauc

SEQ ID NO: 3151381 - RNA, 17 nt, Human
cuaguaucaaaagaaag

SEQ ID NO: 3151382 - RNA, 15 nt, Human
cuaguaucaaaagaa

SEQ ID NO: 3151383 - RNA, 20 nt, Human
cuaguauuucuaugaaauau

SEQ ID NO: 3151384 - RNA, 19 nt, Human
cuaguauuucuaugaaaua

SEQ ID NO: 3151385 - RNA, 22 nt, Human
cuaguauuucuaugaaauauua

SEQ ID NO: 3151386 - RNA, 17 nt, Human
cucaccccuugccauaa

SEQ ID NO: 3151387 - RNA, 23 nt, Human
cuaaauugacacuuaaaaauggu

SEQ ID NO: 3151388 - RNA, 15 nt, Human
cgucuucagccuagc

SEQ ID NO: 3151389 - RNA, 13 nt, Human
cgucuucagccua

SEQ ID NO: 3151390 - RNA, 14 nt, Human
cgucuucagccuag

SEQ ID NO: 3151391 - RNA, 18 nt, Human
cgugcacgcacacugucu

SEQ ID NO: 3151392 - RNA, 21 nt, Human
cggguuuuauuguuuaaaauc

SEQ ID NO: 3151393 - RNA, 22 nt, Human
cggucggguuuuauuguuuaaa

SEQ ID NO: 3151394 - RNA, 17 nt, Human
cggugagcuacaaaugc

SEQ ID NO: 3151395 - RNA, 12 nt, Human
cggccuccaucc

SEQ ID NO: 3151396 - RNA, 18 nt, Human
cgcucucuggccuucggc

SEQ ID NO: 3151397 - RNA, 23 nt, Human
cgcuaauucaaggaauuucuuaa

SEQ ID NO: 3151398 - RNA, 15 nt, Human
cgcucucuggccuuc

SEQ ID NO: 3151399 - RNA, 14 nt, Human
cgcucucuggccuu

SEQ ID NO: 3151400 - RNA, 22 nt, Human
cucuucuuuaaagggauggcaa

SEQ ID NO: 3151401 - RNA, 14 nt, Human
cugaagaagauggu

SEQ ID NO: 3151402 - RNA, 23 nt, Human
cugaagaagcaccaaucaugaau

SEQ ID NO: 3151403 - RNA, 12 nt, Human
cucuggccuucg

SEQ ID NO: 3151404 - RNA, 12 nt, Human
cucugcuugcca

SEQ ID NO: 3151405 - RNA, 14 nt, Human
cucugcuugccauc

SEQ ID NO: 3151406 - RNA, 17 nt, Human
cucugcuugccaucccu

SEQ ID NO: 3151407 - RNA, 20 nt, Human
cucugcuugccaucccuccc

SEQ ID NO: 3151408 - RNA, 17 nt, Human
cugacucuuaagaagac

SEQ ID NO: 3151409 - RNA, 13 nt, Human
cugacuucuaagu

SEQ ID NO: 3151410 - RNA, 15 nt, Human
cugacuucuaaguaa

SEQ ID NO: 3151411 - RNA, 16 nt, Human
cugacuucuaaguaaa

SEQ ID NO: 3151412 - RNA, 22 nt, Human
cugagaaagacuauucaaacag

SEQ ID NO: 3151413 - RNA, 23 nt, Human
cugagaaagacuauucaaacagu

SEQ ID NO: 3151414 - RNA, 13 nt, Human
cugaggcagacag

SEQ ID NO: 3151415 - RNA, 22 nt, Human
cugagcucgguggacccaggga

SEQ ID NO: 3151416 - RNA, 18 nt, Human
cugaggcagacagcagcu

SEQ ID NO: 3151417 - RNA, 22 nt, Human
cugaggcagacagcagcucagg

SEQ ID NO: 3151418 - RNA, 14 nt, Human
cugaggcagacagc

SEQ ID NO: 3151419 - RNA, 15 nt, Human
cugaggcagacagca

SEQ ID NO: 3151420 - RNA, 16 nt, Human
cugaggcagacagcag

SEQ ID NO: 3151421 - RNA, 17 nt, Human
cugaggcagacagcagc

SEQ ID NO: 3151422 - RNA, 20 nt, Human
cugagcgacagugagacucu

SEQ ID NO: 3151423 - RNA, 16 nt, Human
cugagcgacagugaga

SEQ ID NO: 3151424 - RNA, 17 nt, Human
cugagcucgguggaccc

SEQ ID NO: 3151425 - RNA, 18 nt, Human
cugagcucgguggaccca

SEQ ID NO: 3151426 - RNA, 20 nt, Human
cugagcucgguggacccagg

SEQ ID NO: 3151427 - RNA, 12 nt, Human
cucuccugggca

SEQ ID NO: 3151428 - RNA, 15 nt, Human
cucuccugggcagcu

SEQ ID NO: 3151429 - RNA, 16 nt, Human
cucuccugggcagcug

SEQ ID NO: 3151430 - RNA, 18 nt, Human
cucuccugggcagcugcc

SEQ ID NO: 3151431 - RNA, 19 nt, Human
cucuccugggcagcugccu

SEQ ID NO: 3151432 - RNA, 16 nt, Human
cucuccagcugacuaa

SEQ ID NO: 3151433 - RNA, 15 nt, Human
cucuccagcugacua

SEQ ID NO: 3151434 - RNA, 14 nt, Human
cucuccagcugacu

SEQ ID NO: 3151435 - RNA, 17 nt, Human
cucuaggaaauauuuau

SEQ ID NO: 3151436 - RNA, 15 nt, Human
cucuaggaaauauuu

SEQ ID NO: 3151437 - RNA, 12 nt, Human
cucggagccuca

SEQ ID NO: 3151438 - RNA, 13 nt, Human
cucggagccucau

SEQ ID NO: 3151439 - RNA, 16 nt, Human
cucggagccucauccg

SEQ ID NO: 3151440 - RNA, 22 nt, Human
cucggagccucauccgaggcag

SEQ ID NO: 3151441 - RNA, 23 nt, Human
cucggagccucauccgaggcagg

SEQ ID NO: 3151442 - RNA, 17 nt, Human
cucuaauucacagugcu

SEQ ID NO: 3151443 - RNA, 20 nt, Human
cucuaauucacagugcucuu

SEQ ID NO: 3151444 - RNA, 16 nt, Human
cuccauccugaggcuc

SEQ ID NO: 3151445 - RNA, 14 nt, Human
cuccauccugaggc

SEQ ID NO: 3151446 - RNA, 18 nt, Human
cuccauccugaggcucca

SEQ ID NO: 3151447 - RNA, 17 nt, Human
cucccuccaccucccug

SEQ ID NO: 3151448 - RNA, 15 nt, Human
cucccuccaccuccc

SEQ ID NO: 3151449 - RNA, 16 nt, Human
cuccugucugccagcc

SEQ ID NO: 3151450 - RNA, 17 nt, Human
cuccugucugccagcca

SEQ ID NO: 3151451 - RNA, 19 nt, Human
cuccugucugccagccagc

SEQ ID NO: 3151452 - RNA, 22 nt, Human
cuccugucugccagccagcagc

SEQ ID NO: 3151453 - RNA, 23 nt, Human
cuccugucugccagccagcagcc

SEQ ID NO: 3151454 - RNA, 15 nt, Human
cuguaugauucccag

SEQ ID NO: 3151455 - RNA, 16 nt, Human
cuguauuuuaaaagaa

SEQ ID NO: 3151456 - RNA, 13 nt, Human
cuguauuuuaaaa

SEQ ID NO: 3151457 - RNA, 18 nt, Human
cugucucuacuaaaaaua

SEQ ID NO: 3151458 - RNA, 17 nt, Human
cugucuccucucucugu

SEQ ID NO: 3151459 - RNA, 20 nt, Human
cugucuccucucucuguaau

SEQ ID NO: 3151460 - RNA, 18 nt, Human
cuguaccaguuaauuuuu

SEQ ID NO: 3151461 - RNA, 17 nt, Human
cuguaccaguuaauuuu

SEQ ID NO: 3151462 - RNA, 16 nt, Human
cuguaccaguuaauuu

SEQ ID NO: 3151463 - RNA, 12 nt, Human
cuguaccaguua

SEQ ID NO: 3151464 - RNA, 15 nt, Human
cuggccuucggccuc

SEQ ID NO: 3151465 - RNA, 21 nt, Human
cuggccuucggccuccauccu

SEQ ID NO: 3151466 - RNA, 18 nt, Human
cuggccuucggccuccau

SEQ ID NO: 3151467 - RNA, 17 nt, Human
cuggccuucggccucca

SEQ ID NO: 3151468 - RNA, 16 nt, Human
cuggccuucggccucc

SEQ ID NO: 3151469 - RNA, 21 nt, Human
cuggccuuuuucauuuaucua

SEQ ID NO: 3151470 - RNA, 20 nt, Human
cuggccuuuuucauuuaucu

SEQ ID NO: 3151471 - RNA, 19 nt, Human
cuggccuuuuucauuuauc

SEQ ID NO: 3151472 - RNA, 17 nt, Human
cuggccuuuuucauuua

SEQ ID NO: 3151473 - RNA, 20 nt, Human
cugggaaagggauuuucagc

SEQ ID NO: 3151474 - RNA, 21 nt, Human
cugcccgucuucagccuagcc

SEQ ID NO: 3151475 - RNA, 15 nt, Human
cugcccgucuucagc

SEQ ID NO: 3151476 - RNA, 16 nt, Human
cugcccgucuucagcc

SEQ ID NO: 3151477 - RNA, 17 nt, Human
cugcccgucuucagccu

SEQ ID NO: 3151478 - RNA, 18 nt, Human
cugcccgucuucagccua

SEQ ID NO: 3151479 - RNA, 22 nt, Human
cugcacucccaccugacacacc

SEQ ID NO: 3151480 - RNA, 12 nt, Human
cugcacugucaa

SEQ ID NO: 3151481 - RNA, 19 nt, Human
cugcacucccaccugacac

SEQ ID NO: 3151482 - RNA, 18 nt, Human
cugcacucccaccugaca

SEQ ID NO: 3151483 - RNA, 16 nt, Human
cugcacucccaccuga

SEQ ID NO: 3151484 - RNA, 18 nt, Human
cugcuugccaucccuccc

SEQ ID NO: 3151485 - RNA, 19 nt, Human
cugcuugccaucccucccu

SEQ ID NO: 3151486 - RNA, 20 nt, Human
cugcuugccaucccucccuc

SEQ ID NO: 3151487 - RNA, 22 nt, Human
cugcuugccaucccucccucca

SEQ ID NO: 3151488 - RNA, 16 nt, Human
cugcuugccaucccuc

SEQ ID NO: 3151489 - RNA, 15 nt, Human
cugcuugccaucccu

SEQ ID NO: 3151490 - RNA, 12 nt, Human
cugcccucuccu

SEQ ID NO: 3151491 - RNA, 13 nt, Human
cugcccucuccug

SEQ ID NO: 3151492 - RNA, 14 nt, Human
cugcccucuccugg

SEQ ID NO: 3151493 - RNA, 17 nt, Human
cugcucuaacagcccuc

SEQ ID NO: 3151494 - RNA, 12 nt, Human
cugcucuaacag

SEQ ID NO: 3151495 - RNA, 23 nt, Human
gaagagcuguucacagccagacu

SEQ ID NO: 3151496 - RNA, 15 nt, Human
gaagagcuguucaca

SEQ ID NO: 3151497 - RNA, 20 nt, Human
gaagagcuguucacagccag

SEQ ID NO: 3151498 - RNA, 13 nt, Human
gaagagcuguuca

SEQ ID NO: 3151499 - RNA, 15 nt, Human
gaaccacaagacugc

SEQ ID NO: 3151500 - RNA, 14 nt, Human
gaaccacaagacug

SEQ ID NO: 3151501 - RNA, 16 nt, Human
gaacucccuuucaaca

SEQ ID NO: 3151502 - RNA, 15 nt, Human
gaacucccuuucaac

SEQ ID NO: 3151503 - RNA, 22 nt, Human
gaacuuguaaaggaauuuaaaa

SEQ ID NO: 3151504 - RNA, 14 nt, Human
gaaggaugcugucu

SEQ ID NO: 3151505 - RNA, 19 nt, Human
gaaggaggguuagggaggg

SEQ ID NO: 3151506 - RNA, 23 nt, Human
gaaguccaagcauuuagauguau

SEQ ID NO: 3151507 - RNA, 18 nt, Human
gaagucaaggcuuagacc

SEQ ID NO: 3151508 - RNA, 24 nt, Human
gaacaguuaccucugccucagaaa

SEQ ID NO: 3151509 - RNA, 22 nt, Human
gaaauguaagggaaacugccag

SEQ ID NO: 3151510 - RNA, 13 nt, Human
gaaauauuuauuu

SEQ ID NO: 3151511 - RNA, 16 nt, Human
gaaauauuuauuuuaa

SEQ ID NO: 3151512 - RNA, 15 nt, Human
gaaauauuuauuuua

SEQ ID NO: 3151513 - RNA, 13 nt, Human
gaaacugccagca

SEQ ID NO: 3151514 - RNA, 15 nt, Human
gaaacugccagcaac

SEQ ID NO: 3151515 - RNA, 16 nt, Human
gaaacugacacaugcu

SEQ ID NO: 3151516 - RNA, 13 nt, Human
gaaagcagaacag

SEQ ID NO: 3151517 - RNA, 22 nt, Human
gaaagacuauucaaacagucuc

SEQ ID NO: 3151518 - RNA, 23 nt, Human
gaaagacuauucaaacagucuca

SEQ ID NO: 3151519 - RNA, 19 nt, Human
gaaagacuauucaaacagu

SEQ ID NO: 3151520 - RNA, 21 nt, Human
gaaagcuugcccuggugccuc

SEQ ID NO: 3151521 - RNA, 23 nt, Human
gaaaguguauuuggaaauaaagu

SEQ ID NO: 3151522 - RNA, 15 nt, Human
gaaaguguauuugga

SEQ ID NO: 3151523 - RNA, 11 nt, Human
gaaaguguauu

SEQ ID NO: 3151524 - RNA, 21 nt, Human
cuuuauuuucuauaauuuaaa

SEQ ID NO: 3151525 - RNA, 12 nt, Human
cuuuuucauuua

SEQ ID NO: 3151526 - RNA, 15 nt, Human
cuuuuucauuuaucu

SEQ ID NO: 3151527 - RNA, 13 nt, Human
cuuuuucauuuau

SEQ ID NO: 3151528 - RNA, 23 nt, Human
cuuuuucauuuaucuauaauuua

SEQ ID NO: 3151529 - RNA, 12 nt, Human
cuuguauuuaaa

SEQ ID NO: 3151530 - RNA, 18 nt, Human
cuuguauuuaaauauuaa

SEQ ID NO: 3151531 - RNA, 20 nt, Human
cuuguauuuaaauauuaaau

SEQ ID NO: 3151532 - RNA, 17 nt, Human
cuugccaaauauaaaua

SEQ ID NO: 3151533 - RNA, 14 nt, Human
cuugaacccgggag

SEQ ID NO: 3151534 - RNA, 19 nt, Human
cuugaacccgggaggcaga

SEQ ID NO: 3151535 - RNA, 20 nt, Human
cuugaacccgggaggcagag

SEQ ID NO: 3151536 - RNA, 13 nt, Human
cuucuuuccacag

SEQ ID NO: 3151537 - RNA, 19 nt, Human
cuucuuuccacagaagcuc

SEQ ID NO: 3151538 - RNA, 16 nt, Human
cuucuuucuagaaaga

SEQ ID NO: 3151539 - RNA, 21 nt, Human
cuugcaugguuuagaaagcuu

SEQ ID NO: 3151540 - RNA, 22 nt, Human
cuugcagcucuccccuucucug

SEQ ID NO: 3151541 - RNA, 16 nt, Human
cuugagugcucaguag

SEQ ID NO: 3151542 - RNA, 18 nt, Human
gacuccaaagaaauguaa

SEQ ID NO: 3151543 - RNA, 14 nt, Human
gacucagggcccca

SEQ ID NO: 3151544 - RNA, 15 nt, Human
gacucagggccccag

SEQ ID NO: 3151545 - RNA, 17 nt, Human
gacucagggccccagca

SEQ ID NO: 3151546 - RNA, 18 nt, Human
gacucagggccccagcac

SEQ ID NO: 3151547 - RNA, 20 nt, Human
gacucagggccccagcacua

SEQ ID NO: 3151548 - RNA, 10 nt, Human
gaccucagcc

SEQ ID NO: 3151549 - RNA, 11 nt, Human
gaccucagccu

SEQ ID NO: 3151550 - RNA, 12 nt, Human
gaccucagccug

SEQ ID NO: 3151551 - RNA, 13 nt, Human
gaccucagccugu

SEQ ID NO: 3151552 - RNA, 14 nt, Human
gaccucagccugug

SEQ ID NO: 3151553 - RNA, 16 nt, Human
gaccucagccugugcu

SEQ ID NO: 3151554 - RNA, 19 nt, Human
gaccucagccugugcugcc

SEQ ID NO: 3151555 - RNA, 13 nt, Human
gaccucagccuuc

SEQ ID NO: 3151556 - RNA, 14 nt, Human
gaccucagccuucc

SEQ ID NO: 3151557 - RNA, 20 nt, Human
gaccucagccuuccccuugc

SEQ ID NO: 3151558 - RNA, 23 nt, Human
gaccugauuucugagcauuuaau

SEQ ID NO: 3151559 - RNA, 22 nt, Human
gacccacaagaaaugaaagcag

SEQ ID NO: 3151560 - RNA, 22 nt, Human
gacaugggacauuugcucaugg

SEQ ID NO: 3151561 - RNA, 17 nt, Human
gacaugggacauuugcu

SEQ ID NO: 3151562 - RNA, 15 nt, Human
gacaggaccugacua

SEQ ID NO: 3151563 - RNA, 13 nt, Human
gacaggaccugac

SEQ ID NO: 3151564 - RNA, 15 nt, Human
gagagugaacaaauu

SEQ ID NO: 3151565 - RNA, 19 nt, Human
gagagugaacaaauuuaca

SEQ ID NO: 3151566 - RNA, 17 nt, Human
gagauacagaauuuuau

SEQ ID NO: 3151567 - RNA, 13 nt, Human
gagacagcucugc

SEQ ID NO: 3151568 - RNA, 18 nt, Human
gagacagcucugcauacu

SEQ ID NO: 3151569 - RNA, 15 nt, Human
gagacagcucugcau

SEQ ID NO: 3151570 - RNA, 21 nt, Human
gagaaugagagacacacugaa

SEQ ID NO: 3151571 - RNA, 15 nt, Human
gagaagagcuguuca

SEQ ID NO: 3151572 - RNA, 22 nt, Human
gagaagagcuguucacagccag

SEQ ID NO: 3151573 - RNA, 13 nt, Human
gagaagagcuguu

SEQ ID NO: 3151574 - RNA, 14 nt, Human
gagaagaacugaaa

SEQ ID NO: 3151575 - RNA, 13 nt, Human
gagaagaacugaa

SEQ ID NO: 3151576 - RNA, 16 nt, Human
gagaagaacugaaauc

SEQ ID NO: 3151577 - RNA, 18 nt, Human
gagacacacugaagaagc

SEQ ID NO: 3151578 - RNA, 13 nt, Human
gagaaagacuauu

SEQ ID NO: 3151579 - RNA, 15 nt, Human
gagaaagacuauuca

SEQ ID NO: 3151580 - RNA, 17 nt, Human
gagaaagacuauucaaa

SEQ ID NO: 3151581 - RNA, 18 nt, Human
gagaaagacuauucaaac

SEQ ID NO: 3151582 - RNA, 19 nt, Human
gagaaacaguugguaacuu

SEQ ID NO: 3151583 - RNA, 18 nt, Human
gagaaacaguugguaacu

SEQ ID NO: 3151584 - RNA, 17 nt, Human
gagaaacaguugguaac

SEQ ID NO: 3151585 - RNA, 22 nt, Human
gagaaacaguugguaacuuuug

SEQ ID NO: 3151586 - RNA, 21 nt, Human
gagaaacaguugguaacuuuu

SEQ ID NO: 3151587 - RNA, 17 nt, Human
gagccucauccgaggca

SEQ ID NO: 3151588 - RNA, 18 nt, Human
gagccucauccgaggcag

SEQ ID NO: 3151589 - RNA, 19 nt, Human
gagccucauccgaggcagg

SEQ ID NO: 3151590 - RNA, 20 nt, Human
gagccucauccgaggcaggg

SEQ ID NO: 3151591 - RNA, 16 nt, Human
gagcucgugggacagu

SEQ ID NO: 3151592 - RNA, 15 nt, Human
gagcucgguggaccc

SEQ ID NO: 3151593 - RNA, 17 nt, Human
gagcugcccucuccugg

SEQ ID NO: 3151594 - RNA, 18 nt, Human
gagcugcccucuccuggg

SEQ ID NO: 3151595 - RNA, 19 nt, Human
gagcugcccucuccugggc

SEQ ID NO: 3151596 - RNA, 21 nt, Human
gagcugcccucuccugggcag

SEQ ID NO: 3151597 - RNA, 23 nt, Human
gagcugcccucuccugggcagcu

SEQ ID NO: 3151598 - RNA, 17 nt, Human
gauaggucagugcaaau

SEQ ID NO: 3151599 - RNA, 23 nt, Human
gauagauaggucagugcaaauac

SEQ ID NO: 3151600 - RNA, 22 nt, Human
gauaaauaguuuaugauuccac

SEQ ID NO: 3151601 - RNA, 14 nt, Human
gaugaaaauauuug

SEQ ID NO: 3151602 - RNA, 21 nt, Human
gauggcuaguaucaaaagaaa

SEQ ID NO: 3151603 - RNA, 15 nt, Human
gauuuuccugaaaac

SEQ ID NO: 3151604 - RNA, 11 nt, Human
gauuuucagcc

SEQ ID NO: 3151605 - RNA, 15 nt, Human
gauuuucagcccuca

SEQ ID NO: 3151606 - RNA, 19 nt, Human
gauuuucagcccucagaau

SEQ ID NO: 3151607 - RNA, 23 nt, Human
gcaaagcacugacuucuaaguaa

SEQ ID NO: 3151608 - RNA, 14 nt, Human
gcaagggugauggg

SEQ ID NO: 3151609 - RNA, 10 nt, Human
gcaagccaga

SEQ ID NO: 3151610 - RNA, 17 nt, Human
gcaagguacucugguga

SEQ ID NO: 3151611 - RNA, 15 nt, Human
gcaagguacucuggu

SEQ ID NO: 3151612 - RNA, 13 nt, Human
gcauuauauuuau

SEQ ID NO: 3151613 - RNA, 20 nt, Human
gcagugcuuggcccaggagu

SEQ ID NO: 3151614 - RNA, 19 nt, Human
gcagugcuuggcccaggag

SEQ ID NO: 3151615 - RNA, 18 nt, Human
gcagugcuuggcccagga

SEQ ID NO: 3151616 - RNA, 17 nt, Human
gcagugcuuggcccagg

SEQ ID NO: 3151617 - RNA, 15 nt, Human
gcaguggacaccagg

SEQ ID NO: 3151618 - RNA, 17 nt, Human
gcauagguuuaauaauu

SEQ ID NO: 3151619 - RNA, 16 nt, Human
gcaguucagagcugcc

SEQ ID NO: 3151620 - RNA, 15 nt, Human
gcaguucugaagaag

SEQ ID NO: 3151621 - RNA, 17 nt, Human
gcaguucagagcugccc

SEQ ID NO: 3151622 - RNA, 18 nt, Human
gcaguucagagcugcccu

SEQ ID NO: 3151623 - RNA, 17 nt, Human
gcaguucugaagaagau

SEQ ID NO: 3151624 - RNA, 14 nt, Human
gcaguucugaagaa

SEQ ID NO: 3151625 - RNA, 13 nt, Human
gcauagaaguaaa

SEQ ID NO: 3151626 - RNA, 20 nt, Human
gcagccccgugggguuccuc

SEQ ID NO: 3151627 - RNA, 20 nt, Human
gcagauucauuuuucuuucu

SEQ ID NO: 3151628 - RNA, 19 nt, Human
gcagauucauuuuucuuuc

SEQ ID NO: 3151629 - RNA, 18 nt, Human
gcagauaaacaguaguga

SEQ ID NO: 3151630 - RNA, 14 nt, Human
gccuuuuucauuua

SEQ ID NO: 3151631 - RNA, 19 nt, Human
gccuuuuucauuuaucuau

SEQ ID NO: 3151632 - RNA, 18 nt, Human
gccuuuuucauuuaucua

SEQ ID NO: 3151633 - RNA, 17 nt, Human
gccuuuuucauuuaucu

SEQ ID NO: 3151634 - RNA, 15 nt, Human
gccuuuuucauuuau

SEQ ID NO: 3151635 - RNA, 22 nt, Human
gccuuuuucauuuaucuauaau

SEQ ID NO: 3151636 - RNA, 13 nt, Human
gccuggugggccu

SEQ ID NO: 3151637 - RNA, 22 nt, Human
gcgcuaauucaaggaauuucuu

SEQ ID NO: 3151638 - RNA, 12 nt, Human
gcgacagugaga

SEQ ID NO: 3151639 - RNA, 13 nt, Human
gcuauaggugcua

SEQ ID NO: 3151640 - RNA, 18 nt, Human
gcuagaacucccuuucaa

SEQ ID NO: 3151641 - RNA, 19 nt, Human
gcuagaacucccuuucaac

SEQ ID NO: 3151642 - RNA, 14 nt, Human
gcuaccucacuggg

SEQ ID NO: 3151643 - RNA, 20 nt, Human
gccuccccuccucugcuugc

SEQ ID NO: 3151644 - RNA, 22 nt, Human
gccuccccuccucugcuugcca

SEQ ID NO: 3151645 - RNA, 17 nt, Human
gccuccccuccucugcu

SEQ ID NO: 3151646 - RNA, 19 nt, Human
gccuccccuccucugcuug

SEQ ID NO: 3151647 - RNA, 16 nt, Human
gccuccccuccucugc

SEQ ID NO: 3151648 - RNA, 20 nt, Human
gccgggcgugguggugagug

SEQ ID NO: 3151649 - RNA, 11 nt, Human
gccgaccucag

SEQ ID NO: 3151650 - RNA, 23 nt, Human
gccguggugauuuagcaggaagc

SEQ ID NO: 3151651 - RNA, 22 nt, Human
gccgugugugugcguccugucg

SEQ ID NO: 3151652 - RNA, 21 nt, Human
gccuauuaucugucagcugca

SEQ ID NO: 3151653 - RNA, 16 nt, Human
gccaucccucccucca

SEQ ID NO: 3151654 - RNA, 23 nt, Human
gccaucccucccuccaccucccu

SEQ ID NO: 3151655 - RNA, 18 nt, Human
gccaucccucccuccacc

SEQ ID NO: 3151656 - RNA, 19 nt, Human
gccaugggcacugugggua

SEQ ID NO: 3151657 - RNA, 22 nt, Human
gcccugagcucgguggacccag

SEQ ID NO: 3151658 - RNA, 13 nt, Human
gcccugagcucgg

SEQ ID NO: 3151659 - RNA, 15 nt, Human
gcccugagcucggug

SEQ ID NO: 3151660 - RNA, 16 nt, Human
gcccugagcucggugg

SEQ ID NO: 3151661 - RNA, 12 nt, Human
gccccagcacua

SEQ ID NO: 3151662 - RNA, 17 nt, Human
gccccagcacuaaagca

SEQ ID NO: 3151663 - RNA, 19 nt, Human
gccccagcacuaaagcagu

SEQ ID NO: 3151664 - RNA, 23 nt, Human
gccccagcacuaaagcaguggac

SEQ ID NO: 3151665 - RNA, 18 nt, Human
gcccagggcucagccugg

SEQ ID NO: 3151666 - RNA, 20 nt, Human
cauccucaaagaaaguguau

SEQ ID NO: 3151667 - RNA, 14 nt, Human
cauccucaaagaaa

SEQ ID NO: 3151668 - RNA, 22 nt, Human
cauccucaaagaaaguguauug

SEQ ID NO: 3151669 - RNA, 14 nt, Human
caucuagugagcag

SEQ ID NO: 3151670 - RNA, 22 nt, Human
caucuagugagcagucaggaaa

SEQ ID NO: 3151671 - RNA, 18 nt, Human
caucuugcuaccaguauu

SEQ ID NO: 3151672 - RNA, 17 nt, Human
caucuugcuaccaguau

SEQ ID NO: 3151673 - RNA, 16 nt, Human
caucuugcuaccagua

SEQ ID NO: 3151674 - RNA, 14 nt, Human
caucuugcuaccag

SEQ ID NO: 3151675 - RNA, 22 nt, Human
caucuugcuaccaguauuuaga

SEQ ID NO: 3151676 - RNA, 20 nt, Human
caucuugcuaccaguauuua

SEQ ID NO: 3151677 - RNA, 23 nt, Human
caucuugcuaccaguauuuagaa

SEQ ID NO: 3151678 - RNA, 12 nt, Human
caucuugcuacc

SEQ ID NO: 3151679 - RNA, 14 nt, Human
caucccucccucca

SEQ ID NO: 3151680 - RNA, 12 nt, Human
caucccucccuc

SEQ ID NO: 3151681 - RNA, 13 nt, Human
caucccucccucc

SEQ ID NO: 3151682 - RNA, 20 nt, Human
cauauauaacaaugcuguau

SEQ ID NO: 3151683 - RNA, 22 nt, Human
caucaagucuuucacauuuaaa

SEQ ID NO: 3151684 - RNA, 18 nt, Human
caucaaugaaugaaugaa

SEQ ID NO: 3151685 - RNA, 20 nt, Human
cagugcuuggcccaggaguu

SEQ ID NO: 3151686 - RNA, 19 nt, Human
cagugcuuggcccaggagu

SEQ ID NO: 3151687 - RNA, 18 nt, Human
cagugcuuggcccaggag

SEQ ID NO: 3151688 - RNA, 17 nt, Human
cagugcuuggcccagga

SEQ ID NO: 3151689 - RNA, 12 nt, Human
cagugcuuggcc

SEQ ID NO: 3151690 - RNA, 13 nt, Human
caguggacaccag

SEQ ID NO: 3151691 - RNA, 22 nt, Human
caguggacaccaggagucccug

SEQ ID NO: 3151692 - RNA, 16 nt, Human
cagugcuuggcccagg

SEQ ID NO: 3151693 - RNA, 15 nt, Human
cagugcuuggcccag

SEQ ID NO: 3151694 - RNA, 14 nt, Human
cagugcuuggccca

SEQ ID NO: 3151695 - RNA, 13 nt, Human
cagugcuuggccc

SEQ ID NO: 3151696 - RNA, 14 nt, Human
cagugucaaugcag

SEQ ID NO: 3151697 - RNA, 20 nt, Human
caguguuuuaggagcaugag

SEQ ID NO: 3151698 - RNA, 16 nt, Human
caguguuuuaggagca

SEQ ID NO: 3151699 - RNA, 12 nt, Human
caguuaauuuuu

SEQ ID NO: 3151700 - RNA, 19 nt, Human
caguuaauuuuuccaacua

SEQ ID NO: 3151701 - RNA, 16 nt, Human
caguuaauuuuuccaa

SEQ ID NO: 3151702 - RNA, 14 nt, Human
caguuaauuuuucc

SEQ ID NO: 3151703 - RNA, 13 nt, Human
caguuaauuuuuc

SEQ ID NO: 3151704 - RNA, 21 nt, Human
caguuaccucugccucagaaa

SEQ ID NO: 3151705 - RNA, 22 nt, Human
caguucggugagcuacaaaugc

SEQ ID NO: 3151706 - RNA, 12 nt, Human
caguucugaaga

SEQ ID NO: 3151707 - RNA, 14 nt, Human
caguucugaagaag

SEQ ID NO: 3151708 - RNA, 13 nt, Human
caguucugaagaa

SEQ ID NO: 3151709 - RNA, 16 nt, Human
caguucugaagaagau

SEQ ID NO: 3151710 - RNA, 15 nt, Human
caguucugaagaaga

SEQ ID NO: 3151711 - RNA, 22 nt, Human
caguucugaagaagaugguacc

SEQ ID NO: 3151712 - RNA, 20 nt, Human
caguucucauggguggcacu

SEQ ID NO: 3151713 - RNA, 20 nt, Human
caguucugugguuucauguu

SEQ ID NO: 3151714 - RNA, 17 nt, Human
cauaccaacacgagcag

SEQ ID NO: 3151715 - RNA, 12 nt, Human
cauaaccugucu

SEQ ID NO: 3151716 - RNA, 23 nt, Human
cauaaccugucucaccuggacuu

SEQ ID NO: 3151717 - RNA, 23 nt, Human
caguugaaaagacuccaaagaaa

SEQ ID NO: 3151718 - RNA, 21 nt, Human
caguugaaaagacuccaaaga

SEQ ID NO: 3151719 - RNA, 22 nt, Human
caguugaaaagacuccaaagaa

SEQ ID NO: 3151720 - RNA, 14 nt, Human
caguugaaaagacu

SEQ ID NO: 3151721 - RNA, 18 nt, Human
caguugaaaagacuccaa

SEQ ID NO: 3151722 - RNA, 19 nt, Human
caguuuucugagaaagacu

SEQ ID NO: 3151723 - RNA, 20 nt, Human
caguuuucugagaaagacua

SEQ ID NO: 3151724 - RNA, 14 nt, Human
caguuuucugagaa

SEQ ID NO: 3151725 - RNA, 15 nt, Human
caguuuucugagaaa

SEQ ID NO: 3151726 - RNA, 16 nt, Human
caguugguaacuuuug

SEQ ID NO: 3151727 - RNA, 14 nt, Human
caguugguaacuuu

SEQ ID NO: 3151728 - RNA, 17 nt, Human
caguugguaacuuuugu

SEQ ID NO: 3151729 - RNA, 17 nt, Human
caugggacagggaggac

SEQ ID NO: 3151730 - RNA, 23 nt, Human
caugcugucuacacuaagagaga

SEQ ID NO: 3151731 - RNA, 12 nt, Human
caugugguggga

SEQ ID NO: 3151732 - RNA, 21 nt, Human
cauguggugggacagggaccc

SEQ ID NO: 3151733 - RNA, 19 nt, Human
cauugacuaucaaacugaa

SEQ ID NO: 3151734 - RNA, 22 nt, Human
cauugacuaucaaacugaagcc

SEQ ID NO: 3151735 - RNA, 18 nt, Human
cauugacuaucaaacuga

SEQ ID NO: 3151736 - RNA, 19 nt, Human
cauuuaaagcuuauuaaaa

SEQ ID NO: 3151737 - RNA, 12 nt, Human
cauuuccaagca

SEQ ID NO: 3151738 - RNA, 23 nt, Human
cauuucugcaucagcugcugaaa

SEQ ID NO: 3151739 - RNA, 14 nt, Human
cauuugcucaugga

SEQ ID NO: 3151740 - RNA, 15 nt, Human
cauuugcucauggaa

SEQ ID NO: 3151741 - RNA, 16 nt, Human
cauuugcucauggaau

SEQ ID NO: 3151742 - RNA, 17 nt, Human
ccaaagaaauguaaggg

SEQ ID NO: 3151743 - RNA, 22 nt, Human
ccacaagaaaugaaagcaggga

SEQ ID NO: 3151744 - RNA, 16 nt, Human
ccacaagaaaugaaag

SEQ ID NO: 3151745 - RNA, 19 nt, Human
ccaaggcugauuaaaccaa

SEQ ID NO: 3151746 - RNA, 20 nt, Human
ccaauauucauagcagcuua

SEQ ID NO: 3151747 - RNA, 18 nt, Human
ccaaggcuagaaccaccu

SEQ ID NO: 3151748 - RNA, 14 nt, Human
ccaacacgagcagg

SEQ ID NO: 3151749 - RNA, 21 nt, Human
ccaacacgagcaggcuacugu

SEQ ID NO: 3151750 - RNA, 15 nt, Human
ccauccugaggcucc

SEQ ID NO: 3151751 - RNA, 13 nt, Human
ccagcucucagcc

SEQ ID NO: 3151752 - RNA, 14 nt, Human
ccagcucucagcca

SEQ ID NO: 3151753 - RNA, 15 nt, Human
ccagcucucagccaa

SEQ ID NO: 3151754 - RNA, 12 nt, Human
ccagcucucagc

SEQ ID NO: 3151755 - RNA, 23 nt, Human
ccagcugacuaaacuuuuuuucu

SEQ ID NO: 3151756 - RNA, 17 nt, Human
ccagcugacuaaacuuu

SEQ ID NO: 3151757 - RNA, 14 nt, Human
ccagcugacuaaac

SEQ ID NO: 3151758 - RNA, 20 nt, Human
cccagaggagccaccaguuc

SEQ ID NO: 3151759 - RNA, 23 nt, Human
cccagacuagauguaguauuuuu

SEQ ID NO: 3151760 - RNA, 20 nt, Human
cccagacuagauguaguauu

SEQ ID NO: 3151761 - RNA, 23 nt, Human
ccauggcacucuauguucuaaga

SEQ ID NO: 3151762 - RNA, 16 nt, Human
cccaguguuuuaggag

SEQ ID NO: 3151763 - RNA, 17 nt, Human
cccaguguuuuaggagc

SEQ ID NO: 3151764 - RNA, 14 nt, Human
cccucaugcugcca

SEQ ID NO: 3151765 - RNA, 17 nt, Human
cccucaugcugccaaua

SEQ ID NO: 3151766 - RNA, 20 nt, Human
cccucccuccaccucccugc

SEQ ID NO: 3151767 - RNA, 13 nt, Human
cccucccuccacc

SEQ ID NO: 3151768 - RNA, 12 nt, Human
cccucccuccac

SEQ ID NO: 3151769 - RNA, 13 nt, Human
cccgucuucagcc

SEQ ID NO: 3151770 - RNA, 14 nt, Human
cccgucuucagccu

SEQ ID NO: 3151771 - RNA, 15 nt, Human
cccgucuucagccua

SEQ ID NO: 3151772 - RNA, 16 nt, Human
cccgucuucagccuag

SEQ ID NO: 3151773 - RNA, 17 nt, Human
cccgucuucagccuagc

SEQ ID NO: 3151774 - RNA, 12 nt, Human
cccgucuucagc

SEQ ID NO: 3151775 - RNA, 18 nt, Human
cccgucuucagccuagcc

SEQ ID NO: 3151776 - RNA, 13 nt, Human
cccguuuugucac

SEQ ID NO: 3151777 - RNA, 14 nt, Human
ccccaggugccagu

SEQ ID NO: 3151778 - RNA, 14 nt, Human
cccugcaauaaaau

SEQ ID NO: 3151779 - RNA, 15 nt, Human
cccugcaauaaaaug

SEQ ID NO: 3151780 - RNA, 13 nt, Human
ccuccauccugag

SEQ ID NO: 3151781 - RNA, 12 nt, Human
ccuccauccuga

SEQ ID NO: 3151782 - RNA, 14 nt, Human
ccuccccugcccua

SEQ ID NO: 3151783 - RNA, 12 nt, Human
ccuccccuccuc

SEQ ID NO: 3151784 - RNA, 13 nt, Human
ccuccccuccucu

SEQ ID NO: 3151785 - RNA, 20 nt, Human
ccucagaugcacaugagcug

SEQ ID NO: 3151786 - RNA, 19 nt, Human
ccucacugggguccugggg

SEQ ID NO: 3151787 - RNA, 20 nt, Human
ccucacugggguccuggggc

SEQ ID NO: 3151788 - RNA, 23 nt, Human
ccucacugggguccuggggccuc

SEQ ID NO: 3151789 - RNA, 20 nt, Human
ccucacuguauccagguucc

SEQ ID NO: 3151790 - RNA, 17 nt, Human
ccuauuaucugucagcu

SEQ ID NO: 3151791 - RNA, 17 nt, Human
cccuucuuuccacagaa

SEQ ID NO: 3151792 - RNA, 13 nt, Human
ccuaaacauauga

SEQ ID NO: 3151793 - RNA, 14 nt, Human
cagaagucaaggcu

SEQ ID NO: 3151794 - RNA, 19 nt, Respiratory syncytial virus
aaauccuacaaaaaaaugc

SEQ ID NO: 3151795 - RNA, 12 nt, Respiratory syncytial virus
aauuugaaaaua

SEQ ID NO: 3151796 - RNA, 15 nt, Respiratory syncytial virus
caccuguaagcacuu

SEQ ID NO: 3151797 - RNA, 20 nt, Respiratory syncytial virus
aaugucuuagaaaaagacga

SEQ ID NO: 3151798 - RNA, 15 nt, Respiratory syncytial virus
gauaaauauaaaagu

SEQ ID NO: 3151799 - RNA, 18 nt, Respiratory syncytial virus
uuaaaaauucccauagcu

SEQ ID NO: 3151800 - RNA, 17 nt, Respiratory syncytial virus
uggcacuuuuccuaugc

SEQ ID NO: 3151801 - RNA, 19 nt, Respiratory syncytial virus
caagauuaaauccaacaau

SEQ ID NO: 3151802 - RNA, 15 nt, Respiratory syncytial virus
gaaaacuugaugaaa

SEQ ID NO: 3151803 - RNA, 13 nt, Respiratory syncytial virus
accacaaaaccaa

SEQ ID NO: 3151804 - RNA, 16 nt, Respiratory syncytial virus
cuugauaaaucaugaa

SEQ ID NO: 3151805 - RNA, 20 nt, Respiratory syncytial virus
uacacacuaacacuguauuc

SEQ ID NO: 3151806 - RNA, 17 nt, Respiratory syncytial virus
gcugaacaacucaaaga

SEQ ID NO: 3151807 - RNA, 16 nt, Respiratory syncytial virus
gaccaacaaacaaacc

SEQ ID NO: 3151808 - RNA, 16 nt, Respiratory syncytial virus
cauccaugccagcaga

SEQ ID NO: 3151809 - RNA, 17 nt, Respiratory syncytial virus
agagaugggcagcaauu

SEQ ID NO: 3151810 - RNA, 15 nt, Respiratory syncytial virus
caaugaucuaucacu

SEQ ID NO: 3151811 - RNA, 16 nt, Respiratory syncytial virus
ccuaagauccaucagu

SEQ ID NO: 3151812 - RNA, 23 nt, Respiratory syncytial virus
guuugaacacauuaaauaaaagc

SEQ ID NO: 3151813 - RNA, 18 nt, Respiratory syncytial virus
ucaaccaauggaaaauac

SEQ ID NO: 3151814 - RNA, 23 nt, Respiratory syncytial virus
aucaaaaaacugagggacaauga

SEQ ID NO: 3151815 - RNA, 18 nt, Respiratory syncytial virus
ucagagaaauugaacaac

SEQ ID NO: 3151816 - RNA, 15 nt, Respiratory syncytial virus
augccaucacaaaug

SEQ ID NO: 3151817 - RNA, 17 nt, Respiratory syncytial virus
acacucaacaaagauca

SEQ ID NO: 3151818 - RNA, 18 nt, Respiratory syncytial virus
guaccuaccaccaagccc

SEQ ID NO: 3151819 - RNA, 19 nt, Respiratory syncytial virus
augguugguuuaagagaag

SEQ ID NO: 3151820 - RNA, 21 nt, Respiratory syncytial virus
acccauccaaccaaacaucua

SEQ ID NO: 3151821 - RNA, 18 nt, Respiratory syncytial virus
ugcauguuauuacaagua

SEQ ID NO: 3151822 - RNA, 16 nt, Respiratory syncytial virus
auggacacaacacaca

SEQ ID NO: 3151823 - RNA, 20 nt, Respiratory syncytial virus
ccaguggcauugcuguaucu

SEQ ID NO: 3151824 - RNA, 19 nt, Respiratory syncytial virus
auacauagcauucaccaau

SEQ ID NO: 3151825 - RNA, 23 nt, Respiratory syncytial virus
aaacuaagugauucaacaaugac

SEQ ID NO: 3151826 - RNA, 15 nt, Respiratory syncytial virus
acucucaucuauaaa

SEQ ID NO: 3151827 - RNA, 21 nt, Respiratory syncytial virus
gaaagauggggcaaauacaaa

SEQ ID NO: 3151828 - RNA, 21 nt, Respiratory syncytial virus
ugaaacuacaucacaaaccac

SEQ ID NO: 3151829 - RNA, 14 nt, Respiratory syncytial virus
aguacucaaauaag

SEQ ID NO: 3151830 - RNA, 17 nt, Respiratory syncytial virus
aacaacugaaauucaaa

SEQ ID NO: 3151831 - RNA, 16 nt, Respiratory syncytial virus
uaaaaauacucagaga

SEQ ID NO: 3151832 - RNA, 17 nt, Respiratory syncytial virus
gccucagaucaucccaa

SEQ ID NO: 3151833 - RNA, 16 nt, Respiratory syncytial virus
caagcccaccacaaaa

SEQ ID NO: 3151834 - RNA, 16 nt, Respiratory syncytial virus
aagcacuaaauacaaa

SEQ ID NO: 3151835 - RNA, 15 nt, Respiratory syncytial virus
aagcacacagcuaca

SEQ ID NO: 3151836 - RNA, 15 nt, Respiratory syncytial virus
caaauuggaagcaca

SEQ ID NO: 3151837 - RNA, 15 nt, Respiratory syncytial virus
caaauggagccugaa

SEQ ID NO: 3151838 - RNA, 22 nt, Respiratory syncytial virus
aacacacuauauuucaaucaaa

SEQ ID NO: 3151839 - RNA, 20 nt, Respiratory syncytial virus
aacuagcuaaugucaacaua

SEQ ID NO: 3151840 - RNA, 18 nt, Respiratory syncytial virus
guugaaugauacacucaa

SEQ ID NO: 3151841 - RNA, 23 nt, Respiratory syncytial virus
auucacccaagauaagaguguac

SEQ ID NO: 3151842 - RNA, 12 nt, Respiratory syncytial virus
ccucaaaccaca

SEQ ID NO: 3151843 - RNA, 18 nt, Respiratory syncytial virus
accaaaauaaccauauau

SEQ ID NO: 3151844 - RNA, 14 nt, Respiratory syncytial virus
aaguguuugaaaaa

SEQ ID NO: 3151845 - RNA, 23 nt, Respiratory syncytial virus
aaaacuaagugauucaacaauga

SEQ ID NO: 3151846 - RNA, 16 nt, Respiratory syncytial virus
cucaauccaugaauuu

SEQ ID NO: 3151847 - RNA, 18 nt, Respiratory syncytial virus
auaguuagacagcaaagu

SEQ ID NO: 3151848 - RNA, 14 nt, Respiratory syncytial virus
guucaacuaaucaa

SEQ ID NO: 3151849 - RNA, 15 nt, Respiratory syncytial virus
gacaugauagaaaaa

SEQ ID NO: 3151850 - RNA, 19 nt, Respiratory syncytial virus
uuugauaacaaugaagaag

SEQ ID NO: 3151851 - RNA, 16 nt, Respiratory syncytial virus
aucauaacacacagau

SEQ ID NO: 3151852 - RNA, 15 nt, Respiratory syncytial virus
auaaccauauauacu

SEQ ID NO: 3151853 - RNA, 23 nt, Respiratory syncytial virus
cauuuguaagugaacaacccuca

SEQ ID NO: 3151854 - RNA, 22 nt, Respiratory syncytial virus
caaugagggguucuacauaaua

SEQ ID NO: 3151855 - RNA, 14 nt, Respiratory syncytial virus
aagaaaauggugug

SEQ ID NO: 3151856 - RNA, 15 nt, Respiratory syncytial virus
aucuuauauuaaaaa

SEQ ID NO: 3151857 - RNA, 22 nt, Respiratory syncytial virus
auuaaauucuccaaaaaacuaa

SEQ ID NO: 3151858 - RNA, 14 nt, Respiratory syncytial virus
gcaccuaaucaugu

SEQ ID NO: 3151859 - RNA, 21 nt, Respiratory syncytial virus
aauuuguuugacaaugaugaa

SEQ ID NO: 3151860 - RNA, 17 nt, Respiratory syncytial virus
agaaacacaucaauaag

SEQ ID NO: 3151861 - RNA, 23 nt, Respiratory syncytial virus
ugccagcagacguauugaagaaa

SEQ ID NO: 3151862 - RNA, 20 nt, Respiratory syncytial virus
auccaauuucacaacaaugc

SEQ ID NO: 3151863 - RNA, 15 nt, Respiratory syncytial virus
uuauuaaucacagaa

SEQ ID NO: 3151864 - RNA, 15 nt, Respiratory syncytial virus
caaauacaaaaaugg

SEQ ID NO: 3151865 - RNA, 14 nt, Respiratory syncytial virus
uggauuuucuuaaa

SEQ ID NO: 3151866 - RNA, 17 nt, Respiratory syncytial virus
caaccauggacacaaca

SEQ ID NO: 3151867 - RNA, 21 nt, Respiratory syncytial virus
gaaucgaguauuuugugacac

SEQ ID NO: 3151868 - RNA, 21 nt, Respiratory syncytial virus
acaaaauuuguuugacaauga

SEQ ID NO: 3151869 - RNA, 21 nt, Respiratory syncytial virus
cuggaaagaaaaccaccacca

SEQ ID NO: 3151870 - RNA, 20 nt, Respiratory syncytial virus
aaaugaucagacaaacgaua

SEQ ID NO: 3151871 - RNA, 15 nt, Respiratory syncytial virus
gucaagucaacccug

SEQ ID NO: 3151872 - RNA, 11 nt, Respiratory syncytial virus
uggagccugaa

SEQ ID NO: 3151873 - RNA, 20 nt, Respiratory syncytial virus
caauguaacauuaagcaaga

SEQ ID NO: 3151874 - RNA, 19 nt, Respiratory syncytial virus
aaacccaucuggagccuca

SEQ ID NO: 3151875 - RNA, 12 nt, Respiratory syncytial virus
ccaaaacaaaca

SEQ ID NO: 3151876 - RNA, 22 nt, Respiratory syncytial virus
aaucaaugucacuaacaccauu

SEQ ID NO: 3151877 - RNA, 16 nt, Respiratory syncytial virus
cagaagauaaaaaugg

SEQ ID NO: 3151878 - RNA, 21 nt, Respiratory syncytial virus
aagucauaauaccaacauacc

SEQ ID NO: 3151879 - RNA, 13 nt, Respiratory syncytial virus
aaauaauauugca

SEQ ID NO: 3151880 - RNA, 20 nt, Respiratory syncytial virus
aucacaauaucugucaacau

SEQ ID NO: 3151881 - RNA, 17 nt, Respiratory syncytial virus
guucaaauggagccuga

SEQ ID NO: 3151882 - RNA, 17 nt, Respiratory syncytial virus
caaaaacacaacaacaa

SEQ ID NO: 3151883 - RNA, 14 nt, Respiratory syncytial virus
ugaacuaauccuaa

SEQ ID NO: 3151884 - RNA, 22 nt, Respiratory syncytial virus
acuauguauaaucaaaagaaca

SEQ ID NO: 3151885 - RNA, 16 nt, Respiratory syncytial virus
aauauacaaguaugau

SEQ ID NO: 3151886 - RNA, 14 nt, Respiratory syncytial virus
ucaugauaaacuca

SEQ ID NO: 3151887 - RNA, 15 nt, Respiratory syncytial virus
aguauugauacuccu

SEQ ID NO: 3151888 - RNA, 16 nt, Respiratory syncytial virus
aauccaauuucacaac

SEQ ID NO: 3151889 - RNA, 15 nt, Respiratory syncytial virus
acccaucuggagccu

SEQ ID NO: 3151890 - RNA, 12 nt, Respiratory syncytial virus
aaaacuauacaa

SEQ ID NO: 3151891 - RNA, 22 nt, Respiratory syncytial virus
ucaagaucuauaugaugcugca

SEQ ID NO: 3151892 - RNA, 17 nt, Respiratory syncytial virus
auuuguaagugaacaac

SEQ ID NO: 3151893 - RNA, 19 nt, Respiratory syncytial virus
auccaucuguuaaaaagau

SEQ ID NO: 3151894 - RNA, 14 nt, Respiratory syncytial virus
aaaugauggaauua

SEQ ID NO: 3151895 - RNA, 18 nt, Respiratory syncytial virus
auaaagggcaaauucaca

SEQ ID NO: 3151896 - RNA, 16 nt, Respiratory syncytial virus
uuaaucacagaagaug

SEQ ID NO: 3151897 - RNA, 22 nt, Respiratory syncytial virus
guuuaugaauuauacacucaac

SEQ ID NO: 3151898 - RNA, 12 nt, Respiratory syncytial virus
ccauaacaaaac

SEQ ID NO: 3151899 - RNA, 12 nt, Respiratory syncytial virus
ccaacacaugac

SEQ ID NO: 3151900 - RNA, 21 nt, Respiratory syncytial virus
aaauccagaacacacaaguca

SEQ ID NO: 3151901 - RNA, 17 nt, Respiratory syncytial virus
cacugcucaccaacaau

SEQ ID NO: 3151902 - RNA, 17 nt, Respiratory syncytial virus
cuagcaaaucaauguca

SEQ ID NO: 3151903 - RNA, 15 nt, Respiratory syncytial virus
cuaaucaaacaaaac

SEQ ID NO: 3151904 - RNA, 13 nt, Respiratory syncytial virus
caacagaagacca

SEQ ID NO: 3151905 - RNA, 20 nt, Respiratory syncytial virus
aauacauuuaacuaaugcau

SEQ ID NO: 3151906 - RNA, 16 nt, Respiratory syncytial virus
aaccacugaauucaaa

SEQ ID NO: 3151907 - RNA, 13 nt, Respiratory syncytial virus
aaacauacgugaa

SEQ ID NO: 3151908 - RNA, 15 nt, Respiratory syncytial virus
uaaucacagaagaug

SEQ ID NO: 3151909 - RNA, 17 nt, Respiratory syncytial virus
auaucauguaaaagcaa

SEQ ID NO: 3151910 - RNA, 24 nt, Respiratory syncytial virus
gaaaacacucaacccaacacauga

SEQ ID NO: 3151911 - RNA, 12 nt, Respiratory syncytial virus
aaccagcaaagu

SEQ ID NO: 3151912 - RNA, 22 nt, Respiratory syncytial virus
caaaagaacacacuauauuuca

SEQ ID NO: 3151913 - RNA, 22 nt, Respiratory syncytial virus
acacuaacacuguauucaauua

SEQ ID NO: 3151914 - RNA, 20 nt, Respiratory syncytial virus
aaaaaugcuaaaagaaaugg

SEQ ID NO: 3151915 - RNA, 23 nt, Respiratory syncytial virus
aucauauucauagccucggcaaa

SEQ ID NO: 3151916 - RNA, 23 nt, Respiratory syncytial virus
auauggaaacauacgugaacaaa

SEQ ID NO: 3151917 - RNA, 21 nt, Respiratory syncytial virus
cauacaagaugcaacaagcca

SEQ ID NO: 3151918 - RNA, 13 nt, Respiratory syncytial virus
gccaaaacaaacc

SEQ ID NO: 3151919 - RNA, 13 nt, Respiratory syncytial virus
cauaauauacaag

SEQ ID NO: 3151920 - RNA, 16 nt, Respiratory syncytial virus
agcccacaaaaaaacc

SEQ ID NO: 3151921 - RNA, 20 nt, Respiratory syncytial virus
cagaauacaggcaugacucu

SEQ ID NO: 3151922 - RNA, 22 nt, Respiratory syncytial virus
caacauaccuaagauccaucag

SEQ ID NO: 3151923 - RNA, 23 nt, Respiratory syncytial virus
cacuuauaauugcagccaucaua

SEQ ID NO: 3151924 - RNA, 15 nt, Respiratory syncytial virus
aacacucaauccuaa

SEQ ID NO: 3151925 - RNA, 14 nt, Respiratory syncytial virus
ucaugcauaaccac

SEQ ID NO: 3151926 - RNA, 15 nt, Respiratory syncytial virus
ugaauuugaaaauau

SEQ ID NO: 3151927 - RNA, 22 nt, Respiratory syncytial virus
ucaaaacuauacaaagaaacca

SEQ ID NO: 3151928 - RNA, 16 nt, Respiratory syncytial virus
auaacuauagaauuaa

SEQ ID NO: 3151929 - RNA, 23 nt, Respiratory syncytial virus
aaccacugaauucaaaaaugcca

SEQ ID NO: 3151930 - RNA, 14 nt, Respiratory syncytial virus
acuguauucaauua

SEQ ID NO: 3151931 - RNA, 13 nt, Respiratory syncytial virus
acaauauauauau

SEQ ID NO: 3151932 - RNA, 18 nt, Respiratory syncytial virus
auaugcuaugucuagauu

SEQ ID NO: 3151933 - RNA, 15 nt, Respiratory syncytial virus
agccugaaaauuaua

SEQ ID NO: 3151934 - RNA, 15 nt, Respiratory syncytial virus
caacagucaagacca

SEQ ID NO: 3151935 - RNA, 17 nt, Respiratory syncytial virus
uuaauuuauacacaaaa

SEQ ID NO: 3151936 - RNA, 13 nt, Respiratory syncytial virus
ugcuagcacaaau

SEQ ID NO: 3151937 - RNA, 20 nt, Respiratory syncytial virus
caucuauaaaccaucucacu

SEQ ID NO: 3151938 - RNA, 18 nt, Respiratory syncytial virus
uuagauaaauauaaaagu

SEQ ID NO: 3151939 - RNA, 22 nt, Respiratory syncytial virus
aaaucaaccagaaucaaaauca

SEQ ID NO: 3151940 - RNA, 15 nt, Respiratory syncytial virus
uugauagacaaucau

SEQ ID NO: 3151941 - RNA, 14 nt, Respiratory syncytial virus
caaaacuauacaaa

SEQ ID NO: 3151942 - RNA, 18 nt, Respiratory syncytial virus
ucauagacaacccaucua

SEQ ID NO: 3151943 - RNA, 15 nt, Respiratory syncytial virus
aaauuaauacauuua

SEQ ID NO: 3151944 - RNA, 15 nt, Respiratory syncytial virus
aauccacaacaguca

SEQ ID NO: 3151945 - RNA, 19 nt, Respiratory syncytial virus
acaauugugaaauuaaauu

SEQ ID NO: 3151946 - RNA, 15 nt, Respiratory syncytial virus
guuagauuacaaaau

SEQ ID NO: 3151947 - RNA, 19 nt, Respiratory syncytial virus
uauccauucuggcaaugau

SEQ ID NO: 3151948 - RNA, 21 nt, Respiratory syncytial virus
guaccuaccaccaagcccaca

SEQ ID NO: 3151949 - RNA, 22 nt, Respiratory syncytial virus
caggaaaaacaauaaacaaacu

SEQ ID NO: 3151950 - RNA, 18 nt, Respiratory syncytial virus
gaacaacucaaagaaaau

SEQ ID NO: 3151951 - RNA, 15 nt, Respiratory syncytial virus
gaacaacucaaagaa

SEQ ID NO: 3151952 - RNA, 16 nt, Respiratory syncytial virus
uucauugaguaugaua

SEQ ID NO: 3151953 - RNA, 17 nt, Respiratory syncytial virus
gauggcaauccaagccc

SEQ ID NO: 3151954 - RNA, 22 nt, Respiratory syncytial virus
uaauaauguccuaaaaaaugaa

SEQ ID NO: 3151955 - RNA, 16 nt, Respiratory syncytial virus
gacaaacgauaauaua

SEQ ID NO: 3151956 - RNA, 22 nt, Respiratory syncytial virus
acugaugauauauacacaauau

SEQ ID NO: 3151957 - RNA, 18 nt, Respiratory syncytial virus
aagucaaguugaaugaua

SEQ ID NO: 3151958 - RNA, 21 nt, Respiratory syncytial virus
aacuaagugauucaacaauga

SEQ ID NO: 3151959 - RNA, 22 nt, Respiratory syncytial virus
aagcacacucccauaauauaca

SEQ ID NO: 3151960 - RNA, 16 nt, Respiratory syncytial virus
uuugcccuaauaauaa

SEQ ID NO: 3151961 - RNA, 23 nt, Respiratory syncytial virus
aauauccacauggggcaaauaau

SEQ ID NO: 3151962 - RNA, 22 nt, Respiratory syncytial virus
aaauucccauagcuacacacua

SEQ ID NO: 3151963 - RNA, 19 nt, Respiratory syncytial virus
agcuauucauaugaagaaa

SEQ ID NO: 3151964 - RNA, 14 nt, Respiratory syncytial virus
caagacacuagaaa

SEQ ID NO: 3151965 - RNA, 16 nt, Respiratory syncytial virus
augugaauuugaaaau

SEQ ID NO: 3151966 - RNA, 19 nt, Respiratory syncytial virus
ucuaugacccauuaguguu

SEQ ID NO: 3151967 - RNA, 16 nt, Respiratory syncytial virus
cagccaauccaaaacu

SEQ ID NO: 3151968 - RNA, 16 nt, Respiratory syncytial virus
uagcuaaugucaacau

SEQ ID NO: 3151969 - RNA, 22 nt, Respiratory syncytial virus
accucuuuacaaaaccacauca

SEQ ID NO: 3151970 - RNA, 15 nt, Respiratory syncytial virus
gauuccuaguuuaua

SEQ ID NO: 3151971 - RNA, 16 nt, Respiratory syncytial virus
aguucaaauggagccu

SEQ ID NO: 3151972 - RNA, 16 nt, Respiratory syncytial virus
cucaacaauaccaaaa

SEQ ID NO: 3151973 - RNA, 13 nt, Respiratory syncytial virus
agugaacaacccu

SEQ ID NO: 3151974 - RNA, 19 nt, Respiratory syncytial virus
acacuguauucaauuauag

SEQ ID NO: 3151975 - RNA, 22 nt, Respiratory syncytial virus
aacaucagagaaauugaacaac

SEQ ID NO: 3151976 - RNA, 23 nt, Respiratory syncytial virus
ccagagacaucauaacacacaga

SEQ ID NO: 3151977 - RNA, 18 nt, Respiratory syncytial virus
auuaaacaacauauuaac

SEQ ID NO: 3151978 - RNA, 20 nt, Respiratory syncytial virus
uuaagucuauggauaaaagc

SEQ ID NO: 3151979 - RNA, 20 nt, Respiratory syncytial virus
ucuaacaugccuaaaaucaa

SEQ ID NO: 3151980 - RNA, 20 nt, Respiratory syncytial virus
cuagaggcuaucaaacauca

SEQ ID NO: 3151981 - RNA, 22 nt, Respiratory syncytial virus
aagaacacaaccccaacauacc

SEQ ID NO: 3151982 - RNA, 15 nt, Respiratory syncytial virus
aaauaaagaucugaa

SEQ ID NO: 3151983 - RNA, 18 nt, Respiratory syncytial virus
ucauuguucaucagaucu

SEQ ID NO: 3151984 - RNA, 13 nt, Respiratory syncytial virus
ucugucaacucaa

SEQ ID NO: 3151985 - RNA, 20 nt, Respiratory syncytial virus
aagaugcaaacaacagagcu

SEQ ID NO: 3151986 - RNA, 19 nt, Respiratory syncytial virus
acacaugauaacaacaaua

SEQ ID NO: 3151987 - RNA, 16 nt, Respiratory syncytial virus
ugacaauugugaaauu

SEQ ID NO: 3151988 - RNA, 17 nt, Respiratory syncytial virus
ugauaacaaugaagaag

SEQ ID NO: 3151989 - RNA, 19 nt, Respiratory syncytial virus
acauugagauagaaucuag

SEQ ID NO: 3151990 - RNA, 16 nt, Respiratory syncytial virus
aacauacgugaacaaa

SEQ ID NO: 3151991 - RNA, 20 nt, Respiratory syncytial virus
gauggggcaaauacaaaaau

SEQ ID NO: 3151992 - RNA, 21 nt, Respiratory syncytial virus
aagucaacccugcaauccaca

SEQ ID NO: 3151993 - RNA, 14 nt, Respiratory syncytial virus
cucggcaaaccaca

SEQ ID NO: 3151994 - RNA, 16 nt, Respiratory syncytial virus
accauuaguuaauaua

SEQ ID NO: 3151995 - RNA, 17 nt, Respiratory syncytial virus
agccaugaccaaaucaa

SEQ ID NO: 3151996 - RNA, 15 nt, Respiratory syncytial virus
uggcuaaggcaguga

SEQ ID NO: 3151997 - RNA, 15 nt, Respiratory syncytial virus
aacaucaaaaaaagu

SEQ ID NO: 3151998 - RNA, 20 nt, Respiratory syncytial virus
guuaccaaucuguacaucaa

SEQ ID NO: 3151999 - RNA, 22 nt, Respiratory syncytial virus
acuagcaaaucaaugucacuaa

SEQ ID NO: 3152000 - RNA, 22 nt, Respiratory syncytial virus
acaaagacugaugaucacagac

SEQ ID NO: 3152001 - RNA, 23 nt, Respiratory syncytial virus
aagugcucuacuauccacaaaca

SEQ ID NO: 3152002 - RNA, 15 nt, Respiratory syncytial virus
auacauaaagccaca

SEQ ID NO: 3152003 - RNA, 16 nt, Respiratory syncytial virus
cuugaugaaagacagg

SEQ ID NO: 3152004 - RNA, 23 nt, Respiratory syncytial virus
aaagcccuauaacaucaaauuca

SEQ ID NO: 3152005 - RNA, 13 nt, Respiratory syncytial virus
cuaauaauaauau

SEQ ID NO: 3152006 - RNA, 16 nt, Respiratory syncytial virus
auuacauaauguaaau

SEQ ID NO: 3152007 - RNA, 14 nt, Respiratory syncytial virus
acaaugaucuauca

SEQ ID NO: 3152008 - RNA, 20 nt, Respiratory syncytial virus
uuaccagggaauuuaguguu

SEQ ID NO: 3152009 - RNA, 17 nt, Respiratory syncytial virus
uuucaaaacuauacaaa

SEQ ID NO: 3152010 - RNA, 22 nt, Respiratory syncytial virus
aaacuaagugauucaacaauga

SEQ ID NO: 3152011 - RNA, 23 nt, Respiratory syncytial virus
acaaucugaaauaacaacuucau

SEQ ID NO: 3152012 - RNA, 16 nt, Respiratory syncytial virus
ucaacacacaacacca

SEQ ID NO: 3152013 - RNA, 21 nt, Respiratory syncytial virus
gagaaaacuugaugaaagaca

SEQ ID NO: 3152014 - RNA, 22 nt, Respiratory syncytial virus
aggcuccacauacacagcugcu

SEQ ID NO: 3152015 - RNA, 22 nt, Respiratory syncytial virus
cagacaugagaccauugucacu

SEQ ID NO: 3152016 - RNA, 22 nt, Respiratory syncytial virus
uuugaacacauuaaauaaaagc

SEQ ID NO: 3152017 - RNA, 21 nt, Respiratory syncytial virus
aaauggcucuuagcaaaguca

SEQ ID NO: 3152018 - RNA, 21 nt, Respiratory syncytial virus
ccaacaaaugagacagaugau

SEQ ID NO: 3152019 - RNA, 21 nt, Respiratory syncytial virus
aucaaugucacuaacaccauu

SEQ ID NO: 3152020 - RNA, 15 nt, Respiratory syncytial virus
ccaacacaacaaacc

SEQ ID NO: 3152021 - RNA, 12 nt, Respiratory syncytial virus
agaucaacuucu

SEQ ID NO: 3152022 - RNA, 17 nt, Respiratory syncytial virus
aaaacuaagugauucaa

SEQ ID NO: 3152023 - RNA, 12 nt, Respiratory syncytial virus
agcacaaaucac

SEQ ID NO: 3152024 - RNA, 20 nt, Respiratory syncytial virus
caacccugcaauccacaaca

SEQ ID NO: 3152025 - RNA, 18 nt, Respiratory syncytial virus
ucaacaucucaccaugca

SEQ ID NO: 3152026 - RNA, 23 nt, Respiratory syncytial virus
caguguauuagacuugacagcag

SEQ ID NO: 3152027 - RNA, 21 nt, Respiratory syncytial virus
uggagaagaugcaaacaacag

SEQ ID NO: 3152028 - RNA, 15 nt, Respiratory syncytial virus
acgauuugcaaucaa

SEQ ID NO: 3152029 - RNA, 23 nt, Respiratory syncytial virus
uggaaacauacgugaacaaacuu

SEQ ID NO: 3152030 - RNA, 15 nt, Respiratory syncytial virus
ucaagcuuaacaacu

SEQ ID NO: 3152031 - RNA, 15 nt, Respiratory syncytial virus
cacacuauauuucaa

SEQ ID NO: 3152032 - RNA, 16 nt, Respiratory syncytial virus
acaagagucacacaau

SEQ ID NO: 3152033 - RNA, 17 nt, Respiratory syncytial virus
cuguacaucaacacaca

SEQ ID NO: 3152034 - RNA, 13 nt, Respiratory syncytial virus
caaugacaccaca

SEQ ID NO: 3152035 - RNA, 18 nt, Respiratory syncytial virus
ccaauauuuaucaaucau

SEQ ID NO: 3152036 - RNA, 22 nt, Respiratory syncytial virus
uaugccaauauuuaucaaucau

SEQ ID NO: 3152037 - RNA, 14 nt, Respiratory syncytial virus
aagaccaacaaaca

SEQ ID NO: 3152038 - RNA, 17 nt, Respiratory syncytial virus
gucauaauaccaacaua

SEQ ID NO: 3152039 - RNA, 23 nt, Respiratory syncytial virus
ugaaugauacacucaacaaagau

SEQ ID NO: 3152040 - RNA, 13 nt, Respiratory syncytial virus
aauucaaaaaugc

SEQ ID NO: 3152041 - RNA, 19 nt, Respiratory syncytial virus
aauaucugucaacauagac

SEQ ID NO: 3152042 - RNA, 15 nt, Respiratory syncytial virus
augcaauucaaaauu

SEQ ID NO: 3152043 - RNA, 22 nt, Respiratory syncytial virus
auguauagcggcauuaguaaua

SEQ ID NO: 3152044 - RNA, 13 nt, Respiratory syncytial virus
ucaaaccacaaaa

SEQ ID NO: 3152045 - RNA, 19 nt, Respiratory syncytial virus
ugcucuacuauccacaaac

SEQ ID NO: 3152046 - RNA, 18 nt, Respiratory syncytial virus
uacacaugauaacaacaa

SEQ ID NO: 3152047 - RNA, 20 nt, Respiratory syncytial virus
cauggaaaaguuugcuccug

SEQ ID NO: 3152048 - RNA, 14 nt, Respiratory syncytial virus
aacgccaaaacaaa

SEQ ID NO: 3152049 - RNA, 18 nt, Respiratory syncytial virus
agauggggcaaauacaaa

SEQ ID NO: 3152050 - RNA, 11 nt, Respiratory syncytial virus
ucaauacauag

SEQ ID NO: 3152051 - RNA, 14 nt, Respiratory syncytial virus
auaugcugaacaac

SEQ ID NO: 3152052 - RNA, 20 nt, Respiratory syncytial virus
cauguuauuaaucacagaag

SEQ ID NO: 3152053 - RNA, 14 nt, Respiratory syncytial virus
aaaccacaaaguca

SEQ ID NO: 3152054 - RNA, 21 nt, Respiratory syncytial virus
agcacuaaauacaaaaaauau

SEQ ID NO: 3152055 - RNA, 21 nt, Respiratory syncytial virus
gaauuagauaaauauaaaagu

SEQ ID NO: 3152056 - RNA, 16 nt, Respiratory syncytial virus
uauuaagacuaacaau

SEQ ID NO: 3152057 - RNA, 17 nt, Respiratory syncytial virus
auggaauuaacacacug

SEQ ID NO: 3152058 - RNA, 17 nt, Respiratory syncytial virus
auacuauaguuacaaaa

SEQ ID NO: 3152059 - RNA, 15 nt, Respiratory syncytial virus
auaacuauagaauua

SEQ ID NO: 3152060 - RNA, 23 nt, Respiratory syncytial virus
aaauaucaacuagcaaaucaaug

SEQ ID NO: 3152061 - RNA, 16 nt, Respiratory syncytial virus
ccauagcuacacacua

SEQ ID NO: 3152062 - RNA, 19 nt, Respiratory syncytial virus
uguagaguuacuauguaua

SEQ ID NO: 3152063 - RNA, 18 nt, Respiratory syncytial virus
cuaaaauuaucauuuuga

SEQ ID NO: 3152064 - RNA, 22 nt, Respiratory syncytial virus
gaagaaaaccauaaaaaccaca

SEQ ID NO: 3152065 - RNA, 20 nt, Respiratory syncytial virus
agagaugggcagcaauucau

SEQ ID NO: 3152066 - RNA, 13 nt, Respiratory syncytial virus
aauacaaaaaugg

SEQ ID NO: 3152067 - RNA, 22 nt, Respiratory syncytial virus
accauauauugaacaacccaaa

SEQ ID NO: 3152068 - RNA, 15 nt, Respiratory syncytial virus
cuauaugaugcugca

SEQ ID NO: 3152069 - RNA, 19 nt, Respiratory syncytial virus
ccaacagaagaccaacaaa

SEQ ID NO: 3152070 - RNA, 19 nt, Respiratory syncytial virus
aaaauuuguuugacaauga

SEQ ID NO: 3152071 - RNA, 16 nt, Respiratory syncytial virus
guauuacugaugauau

SEQ ID NO: 3152072 - RNA, 17 nt, Respiratory syncytial virus
acauguccaaaaacaag

SEQ ID NO: 3152073 - RNA, 14 nt, Respiratory syncytial virus
accuguaagcacuu

SEQ ID NO: 3152074 - RNA, 16 nt, Respiratory syncytial virus
cacuaaauacaaaaaa

SEQ ID NO: 3152075 - RNA, 17 nt, Respiratory syncytial virus
guuaaaucuuaaaucua

SEQ ID NO: 3152076 - RNA, 17 nt, Respiratory syncytial virus
uggauguaacaacacau

SEQ ID NO: 3152077 - RNA, 24 nt, Respiratory syncytial virus
uuauauuaaaaauucccauagcua

SEQ ID NO: 3152078 - RNA, 18 nt, Respiratory syncytial virus
ucaaugucacuaacacca

SEQ ID NO: 3152079 - RNA, 11 nt, Respiratory syncytial virus
ggagccucaga

SEQ ID NO: 3152080 - RNA, 17 nt, Respiratory syncytial virus
acccucaccucuuuaca

SEQ ID NO: 3152081 - RNA, 12 nt, Respiratory syncytial virus
uguccaacaaug

SEQ ID NO: 3152082 - RNA, 18 nt, Respiratory syncytial virus
ggaaaauaaguguaaugg

SEQ ID NO: 3152083 - RNA, 18 nt, Respiratory syncytial virus
ucugaaacuacaucacaa

SEQ ID NO: 3152084 - RNA, 23 nt, Respiratory syncytial virus
uaccacaggaaauccagaacaca

SEQ ID NO: 3152085 - RNA, 23 nt, Respiratory syncytial virus
uaaaaauucccauagcuacacac

SEQ ID NO: 3152086 - RNA, 19 nt, Respiratory syncytial virus
uaaguuaauaaaaauaucc

SEQ ID NO: 3152087 - RNA, 15 nt, Respiratory syncytial virus
aaauuuaaauccaaa

SEQ ID NO: 3152088 - RNA, 21 nt, Respiratory syncytial virus
ucaacuaugaaaugaaacuau

SEQ ID NO: 3152089 - RNA, 15 nt, Respiratory syncytial virus
uuuguuugacaauga

SEQ ID NO: 3152090 - RNA, 19 nt, Respiratory syncytial virus
cauagcuacacacuaacac

SEQ ID NO: 3152091 - RNA, 15 nt, Respiratory syncytial virus
ugaaugauacacuca

SEQ ID NO: 3152092 - RNA, 13 nt, Respiratory syncytial virus
aaacaacauauua

SEQ ID NO: 3152093 - RNA, 15 nt, Respiratory syncytial virus
aaggcuccacauaca

SEQ ID NO: 3152094 - RNA, 14 nt, Respiratory syncytial virus
accauucaaugaaa

SEQ ID NO: 3152095 - RNA, 16 nt, Respiratory syncytial virus
uauuaacucaaacaau

SEQ ID NO: 3152096 - RNA, 20 nt, Respiratory syncytial virus
auggccuaauagaugacaau

SEQ ID NO: 3152097 - RNA, 16 nt, Respiratory syncytial virus
auaagaauuugauaag

SEQ ID NO: 3152098 - RNA, 20 nt, Respiratory syncytial virus
uagcuacacacuaacacugu

SEQ ID NO: 3152099 - RNA, 18 nt, Respiratory syncytial virus
auugcaauacugaacaaa

SEQ ID NO: 3152100 - RNA, 13 nt, Respiratory syncytial virus
uucaaauacauaa

SEQ ID NO: 3152101 - RNA, 17 nt, Respiratory syncytial virus
ggaacccuccacucaac

SEQ ID NO: 3152102 - RNA, 20 nt, Respiratory syncytial virus
augauacacucaacaaagau

SEQ ID NO: 3152103 - RNA, 19 nt, Respiratory syncytial virus
uggggcaaauaaaacauca

SEQ ID NO: 3152104 - RNA, 13 nt, Respiratory syncytial virus
uauaguaacauca

SEQ ID NO: 3152105 - RNA, 17 nt, Respiratory syncytial virus
uacauaaagccacaaag

SEQ ID NO: 3152106 - RNA, 12 nt, Respiratory syncytial virus
aaaugaaauuug

SEQ ID NO: 3152107 - RNA, 13 nt, Respiratory syncytial virus
uucaaugaaaucc

SEQ ID NO: 3152108 - RNA, 19 nt, Respiratory syncytial virus
cuggaaagaaaaccaccac

SEQ ID NO: 3152109 - RNA, 23 nt, Respiratory syncytial virus
uauaacaaccacugaauucaaaa

SEQ ID NO: 3152110 - RNA, 15 nt, Respiratory syncytial virus
aaauuuucuacaaca

SEQ ID NO: 3152111 - RNA, 19 nt, Respiratory syncytial virus
ugaacucaacagugaugac

SEQ ID NO: 3152112 - RNA, 18 nt, Respiratory syncytial virus
aucaaaagaacacacuau

SEQ ID NO: 3152113 - RNA, 17 nt, Respiratory syncytial virus
caaggaaucaagaucua

SEQ ID NO: 3152114 - RNA, 20 nt, Respiratory syncytial virus
uacacaugauaacaacaaua

SEQ ID NO: 3152115 - RNA, 20 nt, Respiratory syncytial virus
aagucacacuaacaacugca

SEQ ID NO: 3152116 - RNA, 13 nt, Respiratory syncytial virus
caagcccacaaaa

SEQ ID NO: 3152117 - RNA, 13 nt, Respiratory syncytial virus
gcaaauaaaacau

SEQ ID NO: 3152118 - RNA, 15 nt, Respiratory syncytial virus
ugcuagcacaaaugc

SEQ ID NO: 3152119 - RNA, 15 nt, Respiratory syncytial virus
cagaaucaaaaucaa

SEQ ID NO: 3152120 - RNA, 20 nt, Respiratory syncytial virus
aucugaacacacuugaaaau

SEQ ID NO: 3152121 - RNA, 15 nt, Respiratory syncytial virus
gaaguaaccaaagaa

SEQ ID NO: 3152122 - RNA, 17 nt, Respiratory syncytial virus
gcaagcuggcauaugau

SEQ ID NO: 3152123 - RNA, 17 nt, Respiratory syncytial virus
gauaggauugaugaaaa

SEQ ID NO: 3152124 - RNA, 18 nt, Respiratory syncytial virus
cauaugcugaacaacuca

SEQ ID NO: 3152125 - RNA, 17 nt, Respiratory syncytial virus
gcuacacacuaacacug

SEQ ID NO: 3152126 - RNA, 11 nt, Respiratory syncytial virus
cggagcacagg

SEQ ID NO: 3152127 - RNA, 18 nt, Respiratory syncytial virus
uguuaacauugucaagcu

SEQ ID NO: 3152128 - RNA, 22 nt, Respiratory syncytial virus
ucaagaccaaaaacacaacaac

SEQ ID NO: 3152129 - RNA, 22 nt, Respiratory syncytial virus
gaaauccaacuaaucacaauau

SEQ ID NO: 3152130 - RNA, 15 nt, Respiratory syncytial virus
uaguauuaggcaaug

SEQ ID NO: 3152131 - RNA, 21 nt, Respiratory syncytial virus
aaauuaauacauuuaacuaau

SEQ ID NO: 3152132 - RNA, 19 nt, Respiratory syncytial virus
agauauuaagacuaacaau

SEQ ID NO: 3152133 - RNA, 20 nt, Respiratory syncytial virus
uggcuaaggcagugauacau

SEQ ID NO: 3152134 - RNA, 19 nt, Respiratory syncytial virus
uauuauguuacaacaaauu

SEQ ID NO: 3152135 - RNA, 10 nt, Respiratory syncytial virus
uacaacccag

SEQ ID NO: 3152136 - RNA, 22 nt, Respiratory syncytial virus
ccagaagcacaccagucacacu

SEQ ID NO: 3152137 - RNA, 15 nt, Respiratory syncytial virus
auguggcauguuauu

SEQ ID NO: 3152138 - RNA, 23 nt, Respiratory syncytial virus
caccaaucugauggcacaaaaca

SEQ ID NO: 3152139 - RNA, 15 nt, Respiratory syncytial virus
auuaccgcaauccuu

SEQ ID NO: 3152140 - RNA, 15 nt, Respiratory syncytial virus
aaucagccaauccaa

SEQ ID NO: 3152141 - RNA, 20 nt, Respiratory syncytial virus
auacucaccgaaucaaccau

SEQ ID NO: 3152142 - RNA, 16 nt, Respiratory syncytial virus
cauagcuacacacuaa

SEQ ID NO: 3152143 - RNA, 14 nt, Respiratory syncytial virus
gaauuugaaaauau

SEQ ID NO: 3152144 - RNA, 20 nt, Respiratory syncytial virus
acaucauugcuuuaugugaa

SEQ ID NO: 3152145 - RNA, 11 nt, Respiratory syncytial virus
uauaacuaaac

SEQ ID NO: 3152146 - RNA, 15 nt, Respiratory syncytial virus
ccaauccaaaacuag

SEQ ID NO: 3152147 - RNA, 15 nt, Respiratory syncytial virus
acaacacacaaugac

SEQ ID NO: 3152148 - RNA, 20 nt, Respiratory syncytial virus
ugaaauaaaaauagaagaac

SEQ ID NO: 3152149 - RNA, 24 nt, Respiratory syncytial virus
gcuaaucauaaucuccaucaugau

SEQ ID NO: 3152150 - RNA, 13 nt, Respiratory syncytial virus
aacaacccaaaag

SEQ ID NO: 3152151 - RNA, 14 nt, Respiratory syncytial virus
acacucaacaaaga

SEQ ID NO: 3152152 - RNA, 16 nt, Respiratory syncytial virus
uuguuugacaaugaug

SEQ ID NO: 3152153 - RNA, 17 nt, Respiratory syncytial virus
cuaaagaucccaagaaa

SEQ ID NO: 3152154 - RNA, 14 nt, Respiratory syncytial virus
acucacccauccaa

SEQ ID NO: 3152155 - RNA, 13 nt, Respiratory syncytial virus
augggacaaaaug

SEQ ID NO: 3152156 - RNA, 18 nt, Respiratory syncytial virus
aagaucugaacacacuug

SEQ ID NO: 3152157 - RNA, 15 nt, Respiratory syncytial virus
agucucuauguaaaa

SEQ ID NO: 3152158 - RNA, 13 nt, Respiratory syncytial virus
aaacccaucugga

SEQ ID NO: 3152159 - RNA, 24 nt, Respiratory syncytial virus
cacaaucugaaauaacaacuucau

SEQ ID NO: 3152160 - RNA, 16 nt, Respiratory syncytial virus
acaucaaaaaaaguca

SEQ ID NO: 3152161 - RNA, 14 nt, Respiratory syncytial virus
aucagcuucuccaa

SEQ ID NO: 3152162 - RNA, 11 nt, Respiratory syncytial virus
uuuaauaacuu

SEQ ID NO: 3152163 - RNA, 24 nt, Respiratory syncytial virus
uaccaagagcucgagucaauacau

SEQ ID NO: 3152164 - RNA, 12 nt, Respiratory syncytial virus
uuagaaaaagac

SEQ ID NO: 3152165 - RNA, 15 nt, Respiratory syncytial virus
ucaagaacacaaccc

SEQ ID NO: 3152166 - RNA, 16 nt, Respiratory syncytial virus
acacgccaggcaaaau

SEQ ID NO: 3152167 - RNA, 22 nt, Respiratory syncytial virus
gaaaaccaccaccaagcccaca

SEQ ID NO: 3152168 - RNA, 14 nt, Respiratory syncytial virus
cugaauacaacaca

SEQ ID NO: 3152169 - RNA, 15 nt, Respiratory syncytial virus
acaacccaucuauca

SEQ ID NO: 3152170 - RNA, 15 nt, Respiratory syncytial virus
agaucugaacacacu

SEQ ID NO: 3152171 - RNA, 21 nt, Respiratory syncytial virus
accauggacacaacacacaau

SEQ ID NO: 3152172 - RNA, 18 nt, Respiratory syncytial virus
uuccauggagaagaugca

SEQ ID NO: 3152173 - RNA, 21 nt, Respiratory syncytial virus
agccucggcaaaccacaaagu

SEQ ID NO: 3152174 - RNA, 16 nt, Respiratory syncytial virus
auuaagacuaacaaua

SEQ ID NO: 3152175 - RNA, 11 nt, Respiratory syncytial virus
cugaacaaacu

SEQ ID NO: 3152176 - RNA, 13 nt, Respiratory syncytial virus
uucaccaucauaa

SEQ ID NO: 3152177 - RNA, 20 nt, Respiratory syncytial virus
aaaauaccaauguaacauua

SEQ ID NO: 3152178 - RNA, 15 nt, Respiratory syncytial virus
agaauucucaagcaa

SEQ ID NO: 3152179 - RNA, 18 nt, Respiratory syncytial virus
cauccaaccaaacaucua

SEQ ID NO: 3152180 - RNA, 21 nt, Respiratory syncytial virus
aggggaagugaacaaaaucaa

SEQ ID NO: 3152181 - RNA, 20 nt, Respiratory syncytial virus
ugaucuaggaggaauaaauu

SEQ ID NO: 3152182 - RNA, 20 nt, Respiratory syncytial virus
acauacuagugaaacaaaua

SEQ ID NO: 3152183 - RNA, 24 nt, Respiratory syncytial virus
agaugcuaaucauaaauucacugg

SEQ ID NO: 3152184 - RNA, 13 nt, Respiratory syncytial virus
cugacaaauuaau

SEQ ID NO: 3152185 - RNA, 14 nt, Respiratory syncytial virus
uacacucaacaaag

SEQ ID NO: 3152186 - RNA, 18 nt, Respiratory syncytial virus
uuaacucaaacaauucaa

SEQ ID NO: 3152187 - RNA, 16 nt, Respiratory syncytial virus
aucaaacaaaacccau

SEQ ID NO: 3152188 - RNA, 21 nt, Respiratory syncytial virus
aaagaucugaacacacuugaa

SEQ ID NO: 3152189 - RNA, 18 nt, Respiratory syncytial virus
cacuugaaaauauaacaa

SEQ ID NO: 3152190 - RNA, 15 nt, Respiratory syncytial virus
uaaugggaaagaaau

SEQ ID NO: 3152191 - RNA, 11 nt, Respiratory syncytial virus
ugccaucacaa

SEQ ID NO: 3152192 - RNA, 20 nt, Respiratory syncytial virus
ccaaucugauggcacaaaac

SEQ ID NO: 3152193 - RNA, 11 nt, Respiratory syncytial virus
aguuaauuaaa

SEQ ID NO: 3152194 - RNA, 13 nt, Respiratory syncytial virus
agcagaagaacua

SEQ ID NO: 3152195 - RNA, 18 nt, Respiratory syncytial virus
acaucaaauucaaccauu

SEQ ID NO: 3152196 - RNA, 14 nt, Respiratory syncytial virus
gcaaugauaaucuc

SEQ ID NO: 3152197 - RNA, 18 nt, Respiratory syncytial virus
caauccaugaauuucaac

SEQ ID NO: 3152198 - RNA, 16 nt, Respiratory syncytial virus
accaaacaaaaaaccu

SEQ ID NO: 3152199 - RNA, 15 nt, Respiratory syncytial virus
ugcaagcagaaaugg

SEQ ID NO: 3152200 - RNA, 19 nt, Respiratory syncytial virus
agcucgagucaauacauag

SEQ ID NO: 3152201 - RNA, 22 nt, Respiratory syncytial virus
gauggcaaaagacacaucagau

SEQ ID NO: 3152202 - RNA, 15 nt, Respiratory syncytial virus
auaugcccaaaaauu

SEQ ID NO: 3152203 - RNA, 18 nt, Respiratory syncytial virus
cuuauauguuaacaaaua

SEQ ID NO: 3152204 - RNA, 15 nt, Respiratory syncytial virus
caccaccaagacacu

SEQ ID NO: 3152205 - RNA, 19 nt, Respiratory syncytial virus
agagacaucauaacacaca

SEQ ID NO: 3152206 - RNA, 14 nt, Respiratory syncytial virus
aaucauaaucucca

SEQ ID NO: 3152207 - RNA, 20 nt, Respiratory syncytial virus
auugauaaaacaagaauuag

SEQ ID NO: 3152208 - RNA, 17 nt, Respiratory syncytial virus
acaaugaccaauuauau

SEQ ID NO: 3152209 - RNA, 16 nt, Respiratory syncytial virus
cuagcaaaucaauguc

SEQ ID NO: 3152210 - RNA, 22 nt, Respiratory syncytial virus
ugauacauacaaucaaauugaa

SEQ ID NO: 3152211 - RNA, 21 nt, Respiratory syncytial virus
uggaaauucugcuaaugugua

SEQ ID NO: 3152212 - RNA, 21 nt, Respiratory syncytial virus
aggaaucaagaucuauaugau

SEQ ID NO: 3152213 - RNA, 16 nt, Respiratory syncytial virus
gucuauggauaaaagc

SEQ ID NO: 3152214 - RNA, 20 nt, Respiratory syncytial virus
uagcuauucauaugaagaaa

SEQ ID NO: 3152215 - RNA, 15 nt, Respiratory syncytial virus
auguguucaaugcaa

SEQ ID NO: 3152216 - RNA, 13 nt, Respiratory syncytial virus
ucagaucauccca

SEQ ID NO: 3152217 - RNA, 16 nt, Respiratory syncytial virus
auaaucccuuuucaaa

SEQ ID NO: 3152218 - RNA, 19 nt, Respiratory syncytial virus
gguucuacauaauaaaaga

SEQ ID NO: 3152219 - RNA, 19 nt, Respiratory syncytial virus
uacaaaaccacaucaacau

SEQ ID NO: 3152220 - RNA, 15 nt, Respiratory syncytial virus
aauacaaaaaauaua

SEQ ID NO: 3152221 - RNA, 14 nt, Respiratory syncytial virus
aucaaacuauuaac

SEQ ID NO: 3152222 - RNA, 19 nt, Respiratory syncytial virus
caaagucacacuaacaacu

SEQ ID NO: 3152223 - RNA, 18 nt, Respiratory syncytial virus
ucaucuauaaaccaucuc

SEQ ID NO: 3152224 - RNA, 11 nt, Respiratory syncytial virus
gaauguaaugc

SEQ ID NO: 3152225 - RNA, 23 nt, Respiratory syncytial virus
uagcuacacacuaacacuguauu

SEQ ID NO: 3152226 - RNA, 15 nt, Respiratory syncytial virus
auacacucaacaaua

SEQ ID NO: 3152227 - RNA, 21 nt, Respiratory syncytial virus
agauuaggaagagaagacacc

SEQ ID NO: 3152228 - RNA, 15 nt, Respiratory syncytial virus
ucuuuacaaaaccac

SEQ ID NO: 3152229 - RNA, 13 nt, Respiratory syncytial virus
aagugaacaaaau

SEQ ID NO: 3152230 - RNA, 15 nt, Respiratory syncytial virus
auuauguaucaaaua

SEQ ID NO: 3152231 - RNA, 23 nt, Respiratory syncytial virus
accauauauacucaccgaaucaa

SEQ ID NO: 3152232 - RNA, 11 nt, Respiratory syncytial virus
ccaaacaaaaa

SEQ ID NO: 3152233 - RNA, 22 nt, Respiratory syncytial virus
aucaugauggguucuuagaaug

SEQ ID NO: 3152234 - RNA, 20 nt, Respiratory syncytial virus
uggcauuguauuugugcaug

SEQ ID NO: 3152235 - RNA, 15 nt, Respiratory syncytial virus
uggaaagaaaaccac

SEQ ID NO: 3152236 - RNA, 17 nt, Respiratory syncytial virus
auauuugcccuaauaau

SEQ ID NO: 3152237 - RNA, 19 nt, Respiratory syncytial virus
caagucauuguucaucaga

SEQ ID NO: 3152238 - RNA, 22 nt, Respiratory syncytial virus
uuuucaaaacuauacaaagaaa

SEQ ID NO: 3152239 - RNA, 16 nt, Respiratory syncytial virus
acaucaucaaacuauu

SEQ ID NO: 3152240 - RNA, 21 nt, Respiratory syncytial virus
cuuaaagcagucaaaaaucac

SEQ ID NO: 3152241 - RNA, 21 nt, Respiratory syncytial virus
acaaguaugaucucaauccau

SEQ ID NO: 3152242 - RNA, 22 nt, Respiratory syncytial virus
cagagacaucauaacacacaga

SEQ ID NO: 3152243 - RNA, 21 nt, Respiratory syncytial virus
ucagugaguugauucauacaa

SEQ ID NO: 3152244 - RNA, 23 nt, Respiratory syncytial virus
uuaaccuuuuucuucuacaucag

SEQ ID NO: 3152245 - RNA, 15 nt, Respiratory syncytial virus
aacagagcuaccaaa

SEQ ID NO: 3152246 - RNA, 14 nt, Respiratory syncytial virus
cucuacaaaacaaa

SEQ ID NO: 3152247 - RNA, 16 nt, Respiratory syncytial virus
caauccucaaaacaaa

SEQ ID NO: 3152248 - RNA, 15 nt, Respiratory syncytial virus
cagaaacacaucaau

SEQ ID NO: 3152249 - RNA, 15 nt, Respiratory syncytial virus
gaagcacuaaauaca

SEQ ID NO: 3152250 - RNA, 23 nt, Respiratory syncytial virus
ucaacacaagagucacacaaucu

SEQ ID NO: 3152251 - RNA, 12 nt, Respiratory syncytial virus
cuauacaaagaa

SEQ ID NO: 3152252 - RNA, 20 nt, Respiratory syncytial virus
gaugaaguagcauuguuaaa

SEQ ID NO: 3152253 - RNA, 11 nt, Respiratory syncytial virus
aauugaacaac

SEQ ID NO: 3152254 - RNA, 17 nt, Respiratory syncytial virus
cuaaucauaaauucacu

SEQ ID NO: 3152255 - RNA, 16 nt, Respiratory syncytial virus
auccgaugaauuauua

SEQ ID NO: 3152256 - RNA, 19 nt, Respiratory syncytial virus
aucaugauugcaauacuga

SEQ ID NO: 3152257 - RNA, 12 nt, Respiratory syncytial virus
uacuugauaaau

SEQ ID NO: 3152258 - RNA, 21 nt, Respiratory syncytial virus
uucaacacaagagucacacaa

SEQ ID NO: 3152259 - RNA, 22 nt, Respiratory syncytial virus
ugaaauccaauuucacaacaau

SEQ ID NO: 3152260 - RNA, 10 nt, Respiratory syncytial virus
aucagugagu

SEQ ID NO: 3152261 - RNA, 20 nt, Respiratory syncytial virus
uuaccaagugaaguaaaucu

SEQ ID NO: 3152262 - RNA, 15 nt, Respiratory syncytial virus
aauugauaaaacaag

SEQ ID NO: 3152263 - RNA, 16 nt, Respiratory syncytial virus
caacaggaaaaacaau

SEQ ID NO: 3152264 - RNA, 16 nt, Respiratory syncytial virus
ggagauaguauugaua

SEQ ID NO: 3152265 - RNA, 11 nt, Respiratory syncytial virus
caaaccaccac

SEQ ID NO: 3152266 - RNA, 17 nt, Respiratory syncytial virus
gcuauucauaugaagaa

SEQ ID NO: 3152267 - RNA, 22 nt, Respiratory syncytial virus
cacaaagacugaugaucacaga

SEQ ID NO: 3152268 - RNA, 23 nt, Respiratory syncytial virus
cugugauagaguuccaacaaaag

SEQ ID NO: 3152269 - RNA, 16 nt, Respiratory syncytial virus
ucaaaccucaaaccac

SEQ ID NO: 3152270 - RNA, 16 nt, Respiratory syncytial virus
cacacaaucugaaaua

SEQ ID NO: 3152271 - RNA, 20 nt, Respiratory syncytial virus
ucauagccucggcaaaccac

SEQ ID NO: 3152272 - RNA, 18 nt, Respiratory syncytial virus
accucuuuacaaaaccac

SEQ ID NO: 3152273 - RNA, 12 nt, Respiratory syncytial virus
aaucaaaacaac

SEQ ID NO: 3152274 - RNA, 19 nt, Respiratory syncytial virus
aacaucagcuuaauccaaa

SEQ ID NO: 3152275 - RNA, 23 nt, Respiratory syncytial virus
auugcuuuaugugaauuugaaaa

SEQ ID NO: 3152276 - RNA, 16 nt, Respiratory syncytial virus
uauaauaauaucacua

SEQ ID NO: 3152277 - RNA, 22 nt, Respiratory syncytial virus
ucaacaccaccaaaacaaacau

SEQ ID NO: 3152278 - RNA, 13 nt, Respiratory syncytial virus
caaauaaucauug

SEQ ID NO: 3152279 - RNA, 15 nt, Respiratory syncytial virus
acaucauggaaaagu

SEQ ID NO: 3152280 - RNA, 14 nt, Respiratory syncytial virus
cagauguaagcagc

SEQ ID NO: 3152281 - RNA, 19 nt, Respiratory syncytial virus
cacaaaucacauuauccau

SEQ ID NO: 3152282 - RNA, 15 nt, Respiratory syncytial virus
caaucagccaaucca

SEQ ID NO: 3152283 - RNA, 18 nt, Respiratory syncytial virus
auaucaacuagcaaauca

SEQ ID NO: 3152284 - RNA, 12 nt, Respiratory syncytial virus
ugcaaaaaucau

SEQ ID NO: 3152285 - RNA, 16 nt, Respiratory syncytial virus
gccaucacaaaugcaa

SEQ ID NO: 3152286 - RNA, 14 nt, Respiratory syncytial virus
ucaacacacaacac

SEQ ID NO: 3152287 - RNA, 19 nt, Respiratory syncytial virus
gaacacauuaaauaaaagc

SEQ ID NO: 3152288 - RNA, 16 nt, Respiratory syncytial virus
aacacacuugaaaaua

SEQ ID NO: 3152289 - RNA, 18 nt, Respiratory syncytial virus
auagaguuccaacaaaag

SEQ ID NO: 3152290 - RNA, 17 nt, Respiratory syncytial virus
ucaacuguuagugauau

SEQ ID NO: 3152291 - RNA, 16 nt, Respiratory syncytial virus
agguauguuauaugcu

SEQ ID NO: 3152292 - RNA, 17 nt, Respiratory syncytial virus
agauggcaaaagacaca

SEQ ID NO: 3152293 - RNA, 17 nt, Respiratory syncytial virus
auacgccaaucagccaa

SEQ ID NO: 3152294 - RNA, 16 nt, Respiratory syncytial virus
aucugaaauaacaacu

SEQ ID NO: 3152295 - RNA, 19 nt, Respiratory syncytial virus
aaacaaucagcauguguug

SEQ ID NO: 3152296 - RNA, 14 nt, Respiratory syncytial virus
cuuagaaugcauug

SEQ ID NO: 3152297 - RNA, 14 nt, Respiratory syncytial virus
acagcaaaguuacu

SEQ ID NO: 3152298 - RNA, 23 nt, Respiratory syncytial virus
caaagaucaacuucugucaucca

SEQ ID NO: 3152299 - RNA, 20 nt, Respiratory syncytial virus
uagaaacauuugauaacaau

SEQ ID NO: 3152300 - RNA, 18 nt, Respiratory syncytial virus
cucaccaugcaagccauc

SEQ ID NO: 3152301 - RNA, 12 nt, Respiratory syncytial virus
acacuaauacac

SEQ ID NO: 3152302 - RNA, 20 nt, Respiratory syncytial virus
auacaacacaaaauauggca

SEQ ID NO: 3152303 - RNA, 16 nt, Respiratory syncytial virus
agcuuaauccaaaaga

SEQ ID NO: 3152304 - RNA, 15 nt, Respiratory syncytial virus
caccaccaaaacaaa

SEQ ID NO: 3152305 - RNA, 19 nt, Respiratory syncytial virus
caaucugucugaaacuaca

SEQ ID NO: 3152306 - RNA, 18 nt, Respiratory syncytial virus
auaaaaaucuuauauuaa

SEQ ID NO: 3152307 - RNA, 11 nt, Respiratory syncytial virus
caaugaugaag

SEQ ID NO: 3152308 - RNA, 15 nt, Respiratory syncytial virus
guuggggcaaaugca

SEQ ID NO: 3152309 - RNA, 13 nt, Respiratory syncytial virus
uagugaauuauua

SEQ ID NO: 3152310 - RNA, 19 nt, Respiratory syncytial virus
uuaaucacagaagaugcua

SEQ ID NO: 3152311 - RNA, 21 nt, Respiratory syncytial virus
agaagacccuacgccaaguga

SEQ ID NO: 3152312 - RNA, 13 nt, Respiratory syncytial virus
ugaagaaaaccau

SEQ ID NO: 3152313 - RNA, 15 nt, Respiratory syncytial virus
gaauuacugugacaa

SEQ ID NO: 3152314 - RNA, 19 nt, Respiratory syncytial virus
auaguucaaauggagccug

SEQ ID NO: 3152315 - RNA, 20 nt, Respiratory syncytial virus
auggacacaacacacaauga

SEQ ID NO: 3152316 - RNA, 18 nt, Respiratory syncytial virus
caaaauggaucccauuau

SEQ ID NO: 3152317 - RNA, 23 nt, Respiratory syncytial virus
agucaacacgccaggcaaaauca

SEQ ID NO: 3152318 - RNA, 12 nt, Respiratory syncytial virus
auauugaacaac

SEQ ID NO: 3152319 - RNA, 22 nt, Respiratory syncytial virus
uaaucauaaucuccaucaugau

SEQ ID NO: 3152320 - RNA, 20 nt, Respiratory syncytial virus
gagagacauaagaugaaaga

SEQ ID NO: 3152321 - RNA, 22 nt, Respiratory syncytial virus
aagugaaauacuaggaaugcuu

SEQ ID NO: 3152322 - RNA, 22 nt, Respiratory syncytial virus
acuucaugcauaaccacacucc

SEQ ID NO: 3152323 - RNA, 17 nt, Respiratory syncytial virus
ucucaaaccucaaacca

SEQ ID NO: 3152324 - RNA, 20 nt, Respiratory syncytial virus
ccucuuuacaaaaccacauc

SEQ ID NO: 3152325 - RNA, 16 nt, Respiratory syncytial virus
cacuguauucaauuau

SEQ ID NO: 3152326 - RNA, 17 nt, Respiratory syncytial virus
caaauauggaaacauac

SEQ ID NO: 3152327 - RNA, 17 nt, Respiratory syncytial virus
ucaaaccacaaaaccaa

SEQ ID NO: 3152328 - RNA, 22 nt, Respiratory syncytial virus
uuaaauucuccaaaaaacuaag

SEQ ID NO: 3152329 - RNA, 20 nt, Respiratory syncytial virus
cuaagugauucaacaaugac

SEQ ID NO: 3152330 - RNA, 17 nt, Respiratory syncytial virus
cauacuaauaacaagua

SEQ ID NO: 3152331 - RNA, 23 nt, Respiratory syncytial virus
cugaaauaacaacuucaugcaua

SEQ ID NO: 3152332 - RNA, 15 nt, Respiratory syncytial virus
caagcccacaaaaaa

SEQ ID NO: 3152333 - RNA, 18 nt, Respiratory syncytial virus
cuagcaaaucaaugucac

SEQ ID NO: 3152334 - RNA, 16 nt, Respiratory syncytial virus
acagcagaagaacuag

SEQ ID NO: 3152335 - RNA, 23 nt, Respiratory syncytial virus
guugccaauccucaaaacaaaug

SEQ ID NO: 3152336 - RNA, 14 nt, Respiratory syncytial virus
caucaucaaacuau

SEQ ID NO: 3152337 - RNA, 16 nt, Respiratory syncytial virus
aaaguuagauuacaaa

SEQ ID NO: 3152338 - RNA, 18 nt, Respiratory syncytial virus
ccuggaaagaaaaccacc

SEQ ID NO: 3152339 - RNA, 17 nt, Respiratory syncytial virus
aacuugaugaaagacag

SEQ ID NO: 3152340 - RNA, 17 nt, Respiratory syncytial virus
ugaacaacccucaccuc

SEQ ID NO: 3152341 - RNA, 14 nt, Respiratory syncytial virus
uuugcuaaucauaa

SEQ ID NO: 3152342 - RNA, 20 nt, Respiratory syncytial virus
cacuagcugaaacauguaaa

SEQ ID NO: 3152343 - RNA, 15 nt, Respiratory syncytial virus
cacaauauauauauu

SEQ ID NO: 3152344 - RNA, 18 nt, Respiratory syncytial virus
aaugucuuagaaaaagac

SEQ ID NO: 3152345 - RNA, 15 nt, Respiratory syncytial virus
uauauuucaaucaaa

SEQ ID NO: 3152346 - RNA, 21 nt, Respiratory syncytial virus
aaagaaaugggagagguagcu

SEQ ID NO: 3152347 - RNA, 13 nt, Respiratory syncytial virus
auagaaguaacca

SEQ ID NO: 3152348 - RNA, 18 nt, Respiratory syncytial virus
uugauugaugcaauucaa

SEQ ID NO: 3152349 - RNA, 20 nt, Respiratory syncytial virus
aaagucauaauaccaacaua

SEQ ID NO: 3152350 - RNA, 19 nt, Respiratory syncytial virus
ugcauuggcuaaggcagug

SEQ ID NO: 3152351 - RNA, 17 nt, Respiratory syncytial virus
gcauuaagccuacaaag

SEQ ID NO: 3152352 - RNA, 16 nt, Respiratory syncytial virus
ccauggacacaacaca

SEQ ID NO: 3152353 - RNA, 21 nt, Respiratory syncytial virus
cuguauucaauuauaguuauu

SEQ ID NO: 3152354 - RNA, 22 nt, Respiratory syncytial virus
agagcucgagucaauacauagc

SEQ ID NO: 3152355 - RNA, 14 nt, Respiratory syncytial virus
caccaugcaagcca

SEQ ID NO: 3152356 - RNA, 23 nt, Respiratory syncytial virus
aacuucaugcauaaccacacucc

SEQ ID NO: 3152357 - RNA, 17 nt, Respiratory syncytial virus
agcaaaucaaugucacu

SEQ ID NO: 3152358 - RNA, 14 nt, Respiratory syncytial virus
aaaaagaucucaaa

SEQ ID NO: 3152359 - RNA, 19 nt, Respiratory syncytial virus
aaaaucagaacugaagcau

SEQ ID NO: 3152360 - RNA, 13 nt, Respiratory syncytial virus
accaccaccaagc

SEQ ID NO: 3152361 - RNA, 19 nt, Respiratory syncytial virus
uaacguuggggcaaaugca

SEQ ID NO: 3152362 - RNA, 13 nt, Respiratory syncytial virus
gcaaaccacaaag

SEQ ID NO: 3152363 - RNA, 19 nt, Respiratory syncytial virus
cauuauaaacccaacaaau

SEQ ID NO: 3152364 - RNA, 20 nt, Respiratory syncytial virus
cauccaacggagcacaggag

SEQ ID NO: 3152365 - RNA, 14 nt, Respiratory syncytial virus
auagcuacacacua

SEQ ID NO: 3152366 - RNA, 20 nt, Respiratory syncytial virus
agugucuuaaccagcaaagu

SEQ ID NO: 3152367 - RNA, 21 nt, Respiratory syncytial virus
ugaaauaacaacuucaugcau

SEQ ID NO: 3152368 - RNA, 15 nt, Respiratory syncytial virus
uauugcacaaagugg

SEQ ID NO: 3152369 - RNA, 19 nt, Respiratory syncytial virus
uacauuuaacuaaugcauu

SEQ ID NO: 3152370 - RNA, 13 nt, Respiratory syncytial virus
ccaaaacaaacca

SEQ ID NO: 3152371 - RNA, 17 nt, Respiratory syncytial virus
auacauccauaacaaua

SEQ ID NO: 3152372 - RNA, 16 nt, Respiratory syncytial virus
cuaauggccuaauaga

SEQ ID NO: 3152373 - RNA, 13 nt, Respiratory syncytial virus
caaagaugauaua

SEQ ID NO: 3152374 - RNA, 14 nt, Respiratory syncytial virus
cuaucauuggauuu

SEQ ID NO: 3152375 - RNA, 19 nt, Respiratory syncytial virus
cucucaauccaacaucaga

SEQ ID NO: 3152376 - RNA, 23 nt, Respiratory syncytial virus
aaaaaguuaauguccaacaaugu

SEQ ID NO: 3152377 - RNA, 13 nt, Respiratory syncytial virus
ccauccaaccaaa

SEQ ID NO: 3152378 - RNA, 13 nt, Respiratory syncytial virus
gguacugugacaa

SEQ ID NO: 3152379 - RNA, 22 nt, Respiratory syncytial virus
aguugccaauccucaaaacaaa

SEQ ID NO: 3152380 - RNA, 20 nt, Respiratory syncytial virus
ugaugugcagaaacacauca

SEQ ID NO: 3152381 - RNA, 19 nt, Respiratory syncytial virus
accuaucacaaccuccauc

SEQ ID NO: 3152382 - RNA, 17 nt, Respiratory syncytial virus
acuauuaacucaaacaa

SEQ ID NO: 3152383 - RNA, 12 nt, Respiratory syncytial virus
uucacaacaaug

SEQ ID NO: 3152384 - RNA, 12 nt, Respiratory syncytial virus
caaaaacagaug

SEQ ID NO: 3152385 - RNA, 23 nt, Respiratory syncytial virus
aguuguuaccuauugugaacaag

SEQ ID NO: 3152386 - RNA, 17 nt, Respiratory syncytial virus
gaaauucaaaucaacau

SEQ ID NO: 3152387 - RNA, 18 nt, Respiratory syncytial virus
ucuacuauccacaaacaa

SEQ ID NO: 3152388 - RNA, 14 nt, Respiratory syncytial virus
caccacaaaacaac

SEQ ID NO: 3152389 - RNA, 22 nt, Respiratory syncytial virus
accuggaaagaaaaccaccacc

SEQ ID NO: 3152390 - RNA, 14 nt, Respiratory syncytial virus
uauuaaaaauuccc

SEQ ID NO: 3152391 - RNA, 16 nt, Respiratory syncytial virus
uagcuacacacuaaca

SEQ ID NO: 3152392 - RNA, 13 nt, Respiratory syncytial virus
cacuaauacacau

SEQ ID NO: 3152393 - RNA, 13 nt, Respiratory syncytial virus
ugcagcaacaauc

SEQ ID NO: 3152394 - RNA, 14 nt, Respiratory syncytial virus
uauauauuaguguc

SEQ ID NO: 3152395 - RNA, 20 nt, Respiratory syncytial virus
accacacuccauaguucaaa

SEQ ID NO: 3152396 - RNA, 16 nt, Respiratory syncytial virus
agauggcaaaagacac

SEQ ID NO: 3152397 - RNA, 14 nt, Respiratory syncytial virus
aagugaacaaaauc

SEQ ID NO: 3152398 - RNA, 21 nt, Respiratory syncytial virus
uccacaagagcauaaccauca

SEQ ID NO: 3152399 - RNA, 23 nt, Respiratory syncytial virus
caaaacuuuauguuaaacagaau

SEQ ID NO: 3152400 - RNA, 13 nt, Respiratory syncytial virus
agccaucauccau

SEQ ID NO: 3152401 - RNA, 22 nt, Respiratory syncytial virus
guauuacugaugauauauacac

SEQ ID NO: 3152402 - RNA, 22 nt, Respiratory syncytial virus
agacuugauugaugcaauucaa

SEQ ID NO: 3152403 - RNA, 21 nt, Respiratory syncytial virus
caaccauggacacaacacaca

SEQ ID NO: 3152404 - RNA, 18 nt, Respiratory syncytial virus
aauuuguuugacaaugau

SEQ ID NO: 3152405 - RNA, 15 nt, Respiratory syncytial virus
ucccauagcuacaca

SEQ ID NO: 3152406 - RNA, 13 nt, Respiratory syncytial virus
agguuuaugaaua

SEQ ID NO: 3152407 - RNA, 21 nt, Respiratory syncytial virus
ucugaacuucaucgaaacucu

SEQ ID NO: 3152408 - RNA, 19 nt, Respiratory syncytial virus
ugcuaaucauaaauucacu

SEQ ID NO: 3152409 - RNA, 18 nt, Respiratory syncytial virus
ucagaucuaguacucaaa

SEQ ID NO: 3152410 - RNA, 12 nt, Respiratory syncytial virus
gucuuagaaaaa

SEQ ID NO: 3152411 - RNA, 18 nt, Respiratory syncytial virus
uuccuagaaucaauaaag

SEQ ID NO: 3152412 - RNA, 13 nt, Respiratory syncytial virus
uaaagaucucacu

SEQ ID NO: 3152413 - RNA, 22 nt, Respiratory syncytial virus
uaaugcuuaccacaucaucaaa

SEQ ID NO: 3152414 - RNA, 17 nt, Respiratory syncytial virus
gcuuaacaacugaaauu

SEQ ID NO: 3152415 - RNA, 12 nt, Respiratory syncytial virus
uguauucaauua

SEQ ID NO: 3152416 - RNA, 17 nt, Respiratory syncytial virus
ccucguuagaacagauu

SEQ ID NO: 3152417 - RNA, 21 nt, Respiratory syncytial virus
agaaacauuugauaacaauga

SEQ ID NO: 3152418 - RNA, 16 nt, Respiratory syncytial virus
acaucaacaucucacc

SEQ ID NO: 3152419 - RNA, 12 nt, Respiratory syncytial virus
aaccaaacaucu

SEQ ID NO: 3152420 - RNA, 21 nt, Respiratory syncytial virus
aaaucguggaaucauaaagac

SEQ ID NO: 3152421 - RNA, 17 nt, Respiratory syncytial virus
aaugggaaagaaaugaa

SEQ ID NO: 3152422 - RNA, 20 nt, Respiratory syncytial virus
auuaaggagagacauaagau

SEQ ID NO: 3152423 - RNA, 17 nt, Respiratory syncytial virus
cacaacaacaaccaaaa

SEQ ID NO: 3152424 - RNA, 20 nt, Respiratory syncytial virus
cauuaauagaacacauaaau

SEQ ID NO: 3152425 - RNA, 19 nt, Respiratory syncytial virus
auuuuagucauaauuauuu

SEQ ID NO: 3152426 - RNA, 14 nt, Respiratory syncytial virus
uauguuauaugcua

SEQ ID NO: 3152427 - RNA, 17 nt, Respiratory syncytial virus
cucccuugguuagagau

SEQ ID NO: 3152428 - RNA, 16 nt, Respiratory syncytial virus
ugaugcaauucaaaau

SEQ ID NO: 3152429 - RNA, 20 nt, Respiratory syncytial virus
agaauaccaaacaaaaaacc

SEQ ID NO: 3152430 - RNA, 23 nt, Respiratory syncytial virus
acaucagugaguugauucauaca

SEQ ID NO: 3152431 - RNA, 22 nt, Respiratory syncytial virus
ucugaaacuacaucacaaacca

SEQ ID NO: 3152432 - RNA, 22 nt, Respiratory syncytial virus
agauauuaaugggaaagaaaug

SEQ ID NO: 3152433 - RNA, 15 nt, Respiratory syncytial virus
cgggauaucauguaa

SEQ ID NO: 3152434 - RNA, 17 nt, Respiratory syncytial virus
cuggaaagaaaaccacc

SEQ ID NO: 3152435 - RNA, 24 nt, Respiratory syncytial virus
acauuccuggucaacuaugaaaug

SEQ ID NO: 3152436 - RNA, 22 nt, Respiratory syncytial virus
uauaacaucaaauucaaccauu

SEQ ID NO: 3152437 - RNA, 14 nt, Respiratory syncytial virus
agaucuauaugaug

SEQ ID NO: 3152438 - RNA, 16 nt, Respiratory syncytial virus
cauaguucaaauggag

SEQ ID NO: 3152439 - RNA, 23 nt, Respiratory syncytial virus
acaagagucacacaaucugaaau

SEQ ID NO: 3152440 - RNA, 14 nt, Respiratory syncytial virus
aacaaauauccaca

SEQ ID NO: 3152441 - RNA, 16 nt, Respiratory syncytial virus
aacaccaccaaaacaa

SEQ ID NO: 3152442 - RNA, 17 nt, Respiratory syncytial virus
augaccaauuauaugaa

SEQ ID NO: 3152443 - RNA, 14 nt, Respiratory syncytial virus
accaaacaucuaua

SEQ ID NO: 3152444 - RNA, 15 nt, Respiratory syncytial virus
acaucaauaaguuau

SEQ ID NO: 3152445 - RNA, 20 nt, Respiratory syncytial virus
caaagaaagcccuauaacau

SEQ ID NO: 3152446 - RNA, 19 nt, Respiratory syncytial virus
acucaggaaugaggaaagu

SEQ ID NO: 3152447 - RNA, 23 nt, Respiratory syncytial virus
aaaagugcucuacuauccacaaa

SEQ ID NO: 3152448 - RNA, 13 nt, Respiratory syncytial virus
aacucaaagaaaa

SEQ ID NO: 3152449 - RNA, 14 nt, Respiratory syncytial virus
auuguuuaugaaug

SEQ ID NO: 3152450 - RNA, 16 nt, Respiratory syncytial virus
guccuuggaugaaaga

SEQ ID NO: 3152451 - RNA, 20 nt, Respiratory syncytial virus
agucaacccugcaauccaca

SEQ ID NO: 3152452 - RNA, 19 nt, Respiratory syncytial virus
acaacucaaagaaaauggu

SEQ ID NO: 3152453 - RNA, 17 nt, Respiratory syncytial virus
uaucauuaaucaaugau

SEQ ID NO: 3152454 - RNA, 14 nt, Respiratory syncytial virus
cacagaagaugcua

SEQ ID NO: 3152455 - RNA, 14 nt, Respiratory syncytial virus
ucaauccaacauca

SEQ ID NO: 3152456 - RNA, 13 nt, Respiratory syncytial virus
gagcuaccaaauu

SEQ ID NO: 3152457 - RNA, 18 nt, Respiratory syncytial virus
gacacucucaaucaucua

SEQ ID NO: 3152458 - RNA, 21 nt, Respiratory syncytial virus
caauaaagggcaaauucacau

SEQ ID NO: 3152459 - RNA, 16 nt, Respiratory syncytial virus
ugauagaaaaaaucag

SEQ ID NO: 3152460 - RNA, 18 nt, Respiratory syncytial virus
ugcauuuaguaacuaaau

SEQ ID NO: 3152461 - RNA, 15 nt, Respiratory syncytial virus
acauugacauauuca

SEQ ID NO: 3152462 - RNA, 22 nt, Respiratory syncytial virus
cacaaugacaccacaccacaaa

SEQ ID NO: 3152463 - RNA, 13 nt, Respiratory syncytial virus
acucuugaagaaa

SEQ ID NO: 3152464 - RNA, 13 nt, Respiratory syncytial virus
ucaugaauguaua

SEQ ID NO: 3152465 - RNA, 11 nt, Respiratory syncytial virus
agucaaaacau

SEQ ID NO: 3152466 - RNA, 18 nt, Respiratory syncytial virus
ggggcaaaugcaaacaug

SEQ ID NO: 3152467 - RNA, 14 nt, Respiratory syncytial virus
acaacaauaaucuc

SEQ ID NO: 3152468 - RNA, 23 nt, Respiratory syncytial virus
acaggccacauuuacauuccugg

SEQ ID NO: 3152469 - RNA, 14 nt, Respiratory syncytial virus
ucuauaaaccaucu

SEQ ID NO: 3152470 - RNA, 23 nt, Respiratory syncytial virus
ugacaacaaaggagcauucaaau

SEQ ID NO: 3152471 - RNA, 20 nt, Respiratory syncytial virus
auuauuaucauuaaucaaug

SEQ ID NO: 3152472 - RNA, 13 nt, Respiratory syncytial virus
gcauaaugggaga

SEQ ID NO: 3152473 - RNA, 21 nt, Respiratory syncytial virus
gaugacaauugugaaauuaaa

SEQ ID NO: 3152474 - RNA, 20 nt, Respiratory syncytial virus
ugauacacucaacaaagauc

SEQ ID NO: 3152475 - RNA, 15 nt, Respiratory syncytial virus
guucaaauggagccu

SEQ ID NO: 3152476 - RNA, 18 nt, Respiratory syncytial virus
cacacuccauaguucaaa

SEQ ID NO: 3152477 - RNA, 16 nt, Respiratory syncytial virus
cgaggucauugcuuga

SEQ ID NO: 3152478 - RNA, 23 nt, Respiratory syncytial virus
cagagcuaccaaauuccuagaau

SEQ ID NO: 3152479 - RNA, 19 nt, Respiratory syncytial virus
cucucaucuauaaaccauc

SEQ ID NO: 3152480 - RNA, 13 nt, Respiratory syncytial virus
acaaagaaaccau

SEQ ID NO: 3152481 - RNA, 17 nt, Respiratory syncytial virus
auucaaaucaacauuga

SEQ ID NO: 3152482 - RNA, 17 nt, Respiratory syncytial virus
aaagaucucacuaugaa

SEQ ID NO: 3152483 - RNA, 21 nt, Respiratory syncytial virus
auauuaaugggaaagaaauga

SEQ ID NO: 3152484 - RNA, 20 nt, Respiratory syncytial virus
uguuauuacaaguagugaua

SEQ ID NO: 3152485 - RNA, 20 nt, Respiratory syncytial virus
aucuuaaagcagucaaaaau

SEQ ID NO: 3152486 - RNA, 16 nt, Respiratory syncytial virus
ccauccaaccaaacau

SEQ ID NO: 3152487 - RNA, 12 nt, Respiratory syncytial virus
ucaacaccacca

SEQ ID NO: 3152488 - RNA, 10 nt, Respiratory syncytial virus
gccacccgga

SEQ ID NO: 3152489 - RNA, 16 nt, Respiratory syncytial virus
uaugaaaacacucaac

SEQ ID NO: 3152490 - RNA, 20 nt, Respiratory syncytial virus
auaaugauacuaccugacaa

SEQ ID NO: 3152491 - RNA, 22 nt, Respiratory syncytial virus
uuacaaaaccacaucaacaucu

SEQ ID NO: 3152492 - RNA, 22 nt, Respiratory syncytial virus
cauaucaucgugcuuauacaag

SEQ ID NO: 3152493 - RNA, 22 nt, Respiratory syncytial virus
aaauacaccauccaacggagca

SEQ ID NO: 3152494 - RNA, 21 nt, Respiratory syncytial virus
acagaagauaaaaauggggca

SEQ ID NO: 3152495 - RNA, 14 nt, Respiratory syncytial virus
aaucuuauauuaaa

SEQ ID NO: 3152496 - RNA, 13 nt, Respiratory syncytial virus
ucucaauccauga

SEQ ID NO: 3152497 - RNA, 16 nt, Respiratory syncytial virus
acucaaauaaguuaau

SEQ ID NO: 3152498 - RNA, 13 nt, Respiratory syncytial virus
ucauaugaagaaa

SEQ ID NO: 3152499 - RNA, 20 nt, Respiratory syncytial virus
acuugauugaugcaauucaa

SEQ ID NO: 3152500 - RNA, 15 nt, Respiratory syncytial virus
caaucauccaugcca

SEQ ID NO: 3152501 - RNA, 23 nt, Respiratory syncytial virus
uaaggaacucaaaagaauuacug

SEQ ID NO: 3152502 - RNA, 16 nt, Respiratory syncytial virus
ucuaaagaaacuaaau

SEQ ID NO: 3152503 - RNA, 18 nt, Respiratory syncytial virus
gcauuaguaauaaccaaa

SEQ ID NO: 3152504 - RNA, 14 nt, Respiratory syncytial virus
cuugcugcagucac

SEQ ID NO: 3152505 - RNA, 13 nt, Respiratory syncytial virus
uauaacaaccacu

SEQ ID NO: 3152506 - RNA, 19 nt, Respiratory syncytial virus
uggcauuguauuugugcau

SEQ ID NO: 3152507 - RNA, 21 nt, Respiratory syncytial virus
ucacccagaauccccagcuug

SEQ ID NO: 3152508 - RNA, 15 nt, Respiratory syncytial virus
caaugucacuaacac

SEQ ID NO: 3152509 - RNA, 13 nt, Respiratory syncytial virus
auuucacaacaau

SEQ ID NO: 3152510 - RNA, 23 nt, Respiratory syncytial virus
ucaaagucuaugcuauauugaau

SEQ ID NO: 3152511 - RNA, 12 nt, Respiratory syncytial virus
gugaaacaaaua

SEQ ID NO: 3152512 - RNA, 21 nt, Respiratory syncytial virus
uaucaacuagcaaaucaaugu

SEQ ID NO: 3152513 - RNA, 22 nt, Respiratory syncytial virus
auguaacaacacaucgucaaga

SEQ ID NO: 3152514 - RNA, 12 nt, Respiratory syncytial virus
cagcaagcccac

SEQ ID NO: 3152515 - RNA, 21 nt, Respiratory syncytial virus
acaaugccaguguuacaaaau

SEQ ID NO: 3152516 - RNA, 20 nt, Respiratory syncytial virus
uauuuguaaaaaaugagaac

SEQ ID NO: 3152517 - RNA, 19 nt, Respiratory syncytial virus
agguauuacugaugauaua

SEQ ID NO: 3152518 - RNA, 14 nt, Respiratory syncytial virus
ugauaaaucaugaa

SEQ ID NO: 3152519 - RNA, 13 nt, Respiratory syncytial virus
aguaaccaaagaa

SEQ ID NO: 3152520 - RNA, 14 nt, Respiratory syncytial virus
aguugccaauccuc

SEQ ID NO: 3152521 - RNA, 23 nt, Respiratory syncytial virus
aacaauaccaaaaauaccaaugu

SEQ ID NO: 3152522 - RNA, 22 nt, Respiratory syncytial virus
augcuuaccacaucaucaaacu

SEQ ID NO: 3152523 - RNA, 13 nt, Respiratory syncytial virus
caaauacaaaaau

SEQ ID NO: 3152524 - RNA, 14 nt, Respiratory syncytial virus
augcuaaaagaaau

SEQ ID NO: 3152525 - RNA, 12 nt, Respiratory syncytial virus
aaauaagcaaga

SEQ ID NO: 3152526 - RNA, 12 nt, Respiratory syncytial virus
agacuaacaaua

SEQ ID NO: 3152527 - RNA, 19 nt, Respiratory syncytial virus
agagaagacaugauagaaa

SEQ ID NO: 3152528 - RNA, 22 nt, Respiratory syncytial virus
uaaauucacuggguuaauaggu

SEQ ID NO: 3152529 - RNA, 23 nt, Respiratory syncytial virus
uguuggaucugcaaucgccagug

SEQ ID NO: 3152530 - RNA, 19 nt, Respiratory syncytial virus
aucagugucagaaauaaag

SEQ ID NO: 3152531 - RNA, 14 nt, Respiratory syncytial virus
auuuuaucaaacaa

SEQ ID NO: 3152532 - RNA, 21 nt, Respiratory syncytial virus
aaauauggaaacauacgugaa

SEQ ID NO: 3152533 - RNA, 22 nt, Respiratory syncytial virus
aacauacuagugaaacaaauau

SEQ ID NO: 3152534 - RNA, 16 nt, Respiratory syncytial virus
acaucagugaguugau

SEQ ID NO: 3152535 - RNA, 17 nt, Respiratory syncytial virus
caacaaugaccaauuau

SEQ ID NO: 3152536 - RNA, 12 nt, Respiratory syncytial virus
aaagauggggca

SEQ ID NO: 3152537 - RNA, 13 nt, Respiratory syncytial virus
auacauuuaacua

SEQ ID NO: 3152538 - RNA, 15 nt, Respiratory syncytial virus
auucaaaucaacauu

SEQ ID NO: 3152539 - RNA, 14 nt, Respiratory syncytial virus
gccuauaacaaaug

SEQ ID NO: 3152540 - RNA, 15 nt, Respiratory syncytial virus
uacauuuaacuaaug

SEQ ID NO: 3152541 - RNA, 15 nt, Respiratory syncytial virus
ucaaucaugaugggu

SEQ ID NO: 3152542 - RNA, 19 nt, Respiratory syncytial virus
aaaucuauagcacaaauca

SEQ ID NO: 3152543 - RNA, 14 nt, Respiratory syncytial virus
aucaagaucuauau

SEQ ID NO: 3152544 - RNA, 19 nt, Respiratory syncytial virus
aaaucuuauauuaaaaauu

SEQ ID NO: 3152545 - RNA, 16 nt, Respiratory syncytial virus
uucacaucaccuaaag

SEQ ID NO: 3152546 - RNA, 18 nt, Respiratory syncytial virus
aucaacuagcaaaucaau

SEQ ID NO: 3152547 - RNA, 13 nt, Respiratory syncytial virus
aacaccaacagaa

SEQ ID NO: 3152548 - RNA, 17 nt, Respiratory syncytial virus
auaaacccaacaaauga

SEQ ID NO: 3152549 - RNA, 19 nt, Respiratory syncytial virus
auaacaauagaauucucaa

SEQ ID NO: 3152550 - RNA, 14 nt, Respiratory syncytial virus
ccaggcaaaaucaa

SEQ ID NO: 3152551 - RNA, 21 nt, Respiratory syncytial virus
gaucucaaaccucaaaccaca

SEQ ID NO: 3152552 - RNA, 19 nt, Respiratory syncytial virus
auaacaugcuauacugaca

SEQ ID NO: 3152553 - RNA, 14 nt, Respiratory syncytial virus
cucaaacaauucaa

SEQ ID NO: 3152554 - RNA, 17 nt, Respiratory syncytial virus
ucccauagcuacacacu

SEQ ID NO: 3152555 - RNA, 13 nt, Respiratory syncytial virus
accaagacacuag

SEQ ID NO: 3152556 - RNA, 14 nt, Respiratory syncytial virus
gaauacaacacaaa

SEQ ID NO: 3152557 - RNA, 20 nt, Respiratory syncytial virus
augcuaaucauaaauucacu

SEQ ID NO: 3152558 - RNA, 15 nt, Respiratory syncytial virus
aacuaagugauucaa

SEQ ID NO: 3152559 - RNA, 18 nt, Respiratory syncytial virus
accaacgcaccaccaaga

SEQ ID NO: 3152560 - RNA, 19 nt, Respiratory syncytial virus
augauacacucaacaaaga

SEQ ID NO: 3152561 - RNA, 16 nt, Respiratory syncytial virus
gaauuaacacacugcu

SEQ ID NO: 3152562 - RNA, 17 nt, Respiratory syncytial virus
ccaucacaaaugcaaaa

SEQ ID NO: 3152563 - RNA, 15 nt, Respiratory syncytial virus
caacacacaaugaca

SEQ ID NO: 3152564 - RNA, 18 nt, Respiratory syncytial virus
acacaacacacaaugaca

SEQ ID NO: 3152565 - RNA, 16 nt, Respiratory syncytial virus
caccauuaguuaauau

SEQ ID NO: 3152566 - RNA, 19 nt, Respiratory syncytial virus
cagugauacauacaaucaa

SEQ ID NO: 3152567 - RNA, 16 nt, Respiratory syncytial virus
ccaucuggagccucag

SEQ ID NO: 3152568 - RNA, 14 nt, Respiratory syncytial virus
caauauuuaucaau

SEQ ID NO: 3152569 - RNA, 16 nt, Respiratory syncytial virus
uaaccauauauacuca

SEQ ID NO: 3152570 - RNA, 21 nt, Respiratory syncytial virus
uuucaaucaaaacaaccaaaa

SEQ ID NO: 3152571 - RNA, 13 nt, Respiratory syncytial virus
caggcaaaaucaa

SEQ ID NO: 3152572 - RNA, 15 nt, Respiratory syncytial virus
aauuaaauucuccaa

SEQ ID NO: 3152573 - RNA, 16 nt, Respiratory syncytial virus
aaguugaaugauacac

SEQ ID NO: 3152574 - RNA, 15 nt, Respiratory syncytial virus
augaucacagacaug

SEQ ID NO: 3152575 - RNA, 13 nt, Respiratory syncytial virus
aaacuauugcaca

SEQ ID NO: 3152576 - RNA, 16 nt, Respiratory syncytial virus
gcacuaaauacaaaaa

SEQ ID NO: 3152577 - RNA, 22 nt, Respiratory syncytial virus
gcauguuauuacaaguagugau

SEQ ID NO: 3152578 - RNA, 16 nt, Respiratory syncytial virus
cuuauauuaaaaauuc

SEQ ID NO: 3152579 - RNA, 20 nt, Respiratory syncytial virus
uacuaggaaugcuucacaca

SEQ ID NO: 3152580 - RNA, 15 nt, Respiratory syncytial virus
cuauauuucaaucaa

SEQ ID NO: 3152581 - RNA, 16 nt, Respiratory syncytial virus
gagaagacaugauaga

SEQ ID NO: 3152582 - RNA, 18 nt, Respiratory syncytial virus
uaucauuggauuuucuua

SEQ ID NO: 3152583 - RNA, 21 nt, Respiratory syncytial virus
aaaucaguuaaaaauauuaug

SEQ ID NO: 3152584 - RNA, 16 nt, Respiratory syncytial virus
cauaaaaauacucaga

SEQ ID NO: 3152585 - RNA, 16 nt, Respiratory syncytial virus
caaaauuaaacaacau

SEQ ID NO: 3152586 - RNA, 21 nt, Respiratory syncytial virus
uaauaguaugcucaacaacau

SEQ ID NO: 3152587 - RNA, 18 nt, Respiratory syncytial virus
caagucauuguucaucag

SEQ ID NO: 3152588 - RNA, 18 nt, Respiratory syncytial virus
auaguucaaauggagccu

SEQ ID NO: 3152589 - RNA, 11 nt, Respiratory syncytial virus
acaucagugag

SEQ ID NO: 3152590 - RNA, 19 nt, Respiratory syncytial virus
aguaguuaauuaaaaauaa

SEQ ID NO: 3152591 - RNA, 17 nt, Respiratory syncytial virus
gucugaaacuacaucac

SEQ ID NO: 3152592 - RNA, 20 nt, Respiratory syncytial virus
aauugcagccaucauauuca

SEQ ID NO: 3152593 - RNA, 19 nt, Respiratory syncytial virus
acacaagagucacacaauc

SEQ ID NO: 3152594 - RNA, 13 nt, Respiratory syncytial virus
uguuacaacaaau

SEQ ID NO: 3152595 - RNA, 20 nt, Respiratory syncytial virus
aaaaucacucuacaaaacaa

SEQ ID NO: 3152596 - RNA, 16 nt, Respiratory syncytial virus
uaugaucucaauccau

SEQ ID NO: 3152597 - RNA, 17 nt, Respiratory syncytial virus
ccucaaaacaaaugcaa

SEQ ID NO: 3152598 - RNA, 22 nt, Respiratory syncytial virus
cuccauaguucaaauggagccu

SEQ ID NO: 3152599 - RNA, 20 nt, Respiratory syncytial virus
cucaccgaaucaaccauuca

SEQ ID NO: 3152600 - RNA, 16 nt, Respiratory syncytial virus
acacuguauucaauua

SEQ ID NO: 3152601 - RNA, 15 nt, Respiratory syncytial virus
uuuuaauaacuuuua

SEQ ID NO: 3152602 - RNA, 16 nt, Respiratory syncytial virus
uaagugauucaacaau

SEQ ID NO: 3152603 - RNA, 21 nt, Respiratory syncytial virus
agucacacaaucugaaauaac

SEQ ID NO: 3152604 - RNA, 13 nt, Respiratory syncytial virus
uagcuacacacua

SEQ ID NO: 3152605 - RNA, 19 nt, Respiratory syncytial virus
aagauggggcaaauacaaa

SEQ ID NO: 3152606 - RNA, 23 nt, Respiratory syncytial virus
acuaacaccauuaguuaauauaa

SEQ ID NO: 3152607 - RNA, 20 nt, Respiratory syncytial virus
augcauaaccacacuccaua

SEQ ID NO: 3152608 - RNA, 12 nt, Respiratory syncytial virus
guaaaagcaaau

SEQ ID NO: 3152609 - RNA, 14 nt, Respiratory syncytial virus
accaaaauaaccau

SEQ ID NO: 3152610 - RNA, 15 nt, Respiratory syncytial virus
aacaggaaaaacaau

SEQ ID NO: 3152611 - RNA, 21 nt, Respiratory syncytial virus
auacuugauaaaucaugaaug

SEQ ID NO: 3152612 - RNA, 14 nt, Respiratory syncytial virus
cuacaucacaaacc

SEQ ID NO: 3152613 - RNA, 13 nt, Respiratory syncytial virus
gacaauugugaaa

SEQ ID NO: 3152614 - RNA, 14 nt, Respiratory syncytial virus
ugaaaucaaggcau

SEQ ID NO: 3152615 - RNA, 17 nt, Respiratory syncytial virus
cuuucuaccuacauucu

SEQ ID NO: 3152616 - RNA, 19 nt, Respiratory syncytial virus
aucaucgugcuuauacaag

SEQ ID NO: 3152617 - RNA, 17 nt, Respiratory syncytial virus
uaugaaucaauuaucug

SEQ ID NO: 3152618 - RNA, 14 nt, Respiratory syncytial virus
ccaacgcaccacca

SEQ ID NO: 3152619 - RNA, 14 nt, Respiratory syncytial virus
acaaagcacacucc

SEQ ID NO: 3152620 - RNA, 15 nt, Respiratory syncytial virus
aacucaaacaauuca

SEQ ID NO: 3152621 - RNA, 13 nt, Respiratory syncytial virus
acaucucaccaug

SEQ ID NO: 3152622 - RNA, 19 nt, Respiratory syncytial virus
ugaacacacuugaaaauau

SEQ ID NO: 3152623 - RNA, 23 nt, Respiratory syncytial virus
aguugaaugauacacucaacaaa

SEQ ID NO: 3152624 - RNA, 22 nt, Respiratory syncytial virus
caucauuauugucuuugacuca

SEQ ID NO: 3152625 - RNA, 21 nt, Respiratory syncytial virus
uaaauaucaacuagcaaauca

SEQ ID NO: 3152626 - RNA, 15 nt, Respiratory syncytial virus
aauagguauguuaua

SEQ ID NO: 3152627 - RNA, 18 nt, Respiratory syncytial virus
cuagugaaacaaauaucc

SEQ ID NO: 3152628 - RNA, 21 nt, Respiratory syncytial virus
ucaugauugcaauacugaaca

SEQ ID NO: 3152629 - RNA, 14 nt, Respiratory syncytial virus
gccuacaaagcaca

SEQ ID NO: 3152630 - RNA, 12 nt, Respiratory syncytial virus
aaaucaacauug

SEQ ID NO: 3152631 - RNA, 18 nt, Respiratory syncytial virus
caucaacacacaacacca

SEQ ID NO: 3152632 - RNA, 18 nt, Respiratory syncytial virus
aucucaccaugcaagcca

SEQ ID NO: 3152633 - RNA, 18 nt, Respiratory syncytial virus
acaaugaagaagaaucua

SEQ ID NO: 3152634 - RNA, 15 nt, Respiratory syncytial virus
agcacuaaauacaaa

SEQ ID NO: 3152635 - RNA, 17 nt, Respiratory syncytial virus
cacaaaaaaaccaacca

SEQ ID NO: 3152636 - RNA, 23 nt, Respiratory syncytial virus
auuaaaaauaaucauaacaauga

SEQ ID NO: 3152637 - RNA, 15 nt, Respiratory syncytial virus
acacaacacacaaug

SEQ ID NO: 3152638 - RNA, 17 nt, Respiratory syncytial virus
aauaucaacuagcaaau

SEQ ID NO: 3152639 - RNA, 19 nt, Respiratory syncytial virus
gauaaaaguuagauuacaa

SEQ ID NO: 3152640 - RNA, 15 nt, Respiratory syncytial virus
uccaugccagcagau

SEQ ID NO: 3152641 - RNA, 15 nt, Respiratory syncytial virus
uagcuacacacuaac

SEQ ID NO: 3152642 - RNA, 14 nt, Respiratory syncytial virus
gcaaauaacaaugg

SEQ ID NO: 3152643 - RNA, 14 nt, Respiratory syncytial virus
uacacucaacaaua

SEQ ID NO: 3152644 - RNA, 13 nt, Respiratory syncytial virus
aagugauguuacg

SEQ ID NO: 3152645 - RNA, 23 nt, Respiratory syncytial virus
acaugcagugcagucagcaaagg

SEQ ID NO: 3152646 - RNA, 16 nt, Respiratory syncytial virus
gagguagcuccagaau

SEQ ID NO: 3152647 - RNA, 14 nt, Respiratory syncytial virus
ugacaccacaccac

SEQ ID NO: 3152648 - RNA, 23 nt, Respiratory syncytial virus
accuagaaggggaagugaacaaa

SEQ ID NO: 3152649 - RNA, 17 nt, Respiratory syncytial virus
ucaauccaacaucagag

SEQ ID NO: 3152650 - RNA, 16 nt, Respiratory syncytial virus
aguuacaaaaaaagau

SEQ ID NO: 3152651 - RNA, 18 nt, Respiratory syncytial virus
uacuagugaaacaaauau

SEQ ID NO: 3152652 - RNA, 12 nt, Respiratory syncytial virus
cuaaacaaucag

SEQ ID NO: 3152653 - RNA, 18 nt, Respiratory syncytial virus
aaccaucaauaacccaaa

SEQ ID NO: 3152654 - RNA, 21 nt, Respiratory syncytial virus
cuucaccaucauaaucaccaa

SEQ ID NO: 3152655 - RNA, 18 nt, Respiratory syncytial virus
augccaauauuuaucaau

SEQ ID NO: 3152656 - RNA, 15 nt, Respiratory syncytial virus
gauggcacaaaacag

SEQ ID NO: 3152657 - RNA, 13 nt, Respiratory syncytial virus
caaauaacaaugg

SEQ ID NO: 3152658 - RNA, 17 nt, Respiratory syncytial virus
aacauaccuaagaucca

SEQ ID NO: 3152659 - RNA, 18 nt, Respiratory syncytial virus
cagugauacauacaauca

SEQ ID NO: 3152660 - RNA, 12 nt, Respiratory syncytial virus
aaacaaaaagau

SEQ ID NO: 3152661 - RNA, 18 nt, Respiratory syncytial virus
ucacacaaucugaaauaa

SEQ ID NO: 3152662 - RNA, 15 nt, Respiratory syncytial virus
aagaugcaacaagcc

SEQ ID NO: 3152663 - RNA, 21 nt, Respiratory syncytial virus
auuugugcauguuauuacaag

SEQ ID NO: 3152664 - RNA, 11 nt, Respiratory syncytial virus
aacaaugccag

SEQ ID NO: 3152665 - RNA, 18 nt, Respiratory syncytial virus
uuaucaaagaaaaccucu

SEQ ID NO: 3152666 - RNA, 15 nt, Respiratory syncytial virus
aguuugcuccugaau

SEQ ID NO: 3152667 - RNA, 17 nt, Respiratory syncytial virus
aaguaguuaauuaaaaa

SEQ ID NO: 3152668 - RNA, 16 nt, Respiratory syncytial virus
cugaacucaacaguga

SEQ ID NO: 3152669 - RNA, 22 nt, Respiratory syncytial virus
uauaauaaauaucaacuagcaa

SEQ ID NO: 3152670 - RNA, 16 nt, Respiratory syncytial virus
uauuaauggaaauucu

SEQ ID NO: 3152671 - RNA, 15 nt, Respiratory syncytial virus
aucuguuaaaaagau

SEQ ID NO: 3152672 - RNA, 13 nt, Respiratory syncytial virus
ucacuaacaccau

SEQ ID NO: 3152673 - RNA, 17 nt, Respiratory syncytial virus
caaugacagacuagaag

SEQ ID NO: 3152674 - RNA, 13 nt, Respiratory syncytial virus
cagucagcaaagg

SEQ ID NO: 3152675 - RNA, 23 nt, Respiratory syncytial virus
accaacauaccuaagauccauca

SEQ ID NO: 3152676 - RNA, 15 nt, Respiratory syncytial virus
ccaucacaaaugcaa

SEQ ID NO: 3152677 - RNA, 13 nt, Respiratory syncytial virus
ugcuaaucauaaa

SEQ ID NO: 3152678 - RNA, 18 nt, Respiratory syncytial virus
cauaguucaaauggagcc

SEQ ID NO: 3152679 - RNA, 16 nt, Respiratory syncytial virus
aaauuccauacuaaua

SEQ ID NO: 3152680 - RNA, 14 nt, Respiratory syncytial virus
caaauaaaacauca

SEQ ID NO: 3152681 - RNA, 18 nt, Respiratory syncytial virus
uagcaaaucaaugucacu

SEQ ID NO: 3152682 - RNA, 16 nt, Respiratory syncytial virus
agacguauugaagaaa

SEQ ID NO: 3152683 - RNA, 15 nt, Respiratory syncytial virus
cacaugacaucauug

SEQ ID NO: 3152684 - RNA, 14 nt, Respiratory syncytial virus
cauuugauaacaau

SEQ ID NO: 3152685 - RNA, 18 nt, Respiratory syncytial virus
uuuauauguauauuaacu

SEQ ID NO: 3152686 - RNA, 23 nt, Respiratory syncytial virus
gucaagcuuaacaacugaaauuc

SEQ ID NO: 3152687 - RNA, 19 nt, Respiratory syncytial virus
cugaugauauauacacaau

SEQ ID NO: 3152688 - RNA, 17 nt, Respiratory syncytial virus
ugucauccagcaaauac

SEQ ID NO: 3152689 - RNA, 20 nt, Respiratory syncytial virus
gaaagauggggcaaauacaa

SEQ ID NO: 3152690 - RNA, 17 nt, Respiratory syncytial virus
acaaaugcaaaaaucau

SEQ ID NO: 3152691 - RNA, 19 nt, Respiratory syncytial virus
aacacgccaggcaaaauca

SEQ ID NO: 3152692 - RNA, 16 nt, Respiratory syncytial virus
gugcauguuauuacaa

SEQ ID NO: 3152693 - RNA, 17 nt, Respiratory syncytial virus
ugaaaauauaacaacca

SEQ ID NO: 3152694 - RNA, 18 nt, Respiratory syncytial virus
auaaacccaacaaaugag

SEQ ID NO: 3152695 - RNA, 15 nt, Respiratory syncytial virus
cuauggcaagacuca

SEQ ID NO: 3152696 - RNA, 14 nt, Respiratory syncytial virus
auucauacaaacuu

SEQ ID NO: 3152697 - RNA, 23 nt, Respiratory syncytial virus
caguuaaagaucucacuaugaaa

SEQ ID NO: 3152698 - RNA, 19 nt, Respiratory syncytial virus
auacugacaaauuaauaca

SEQ ID NO: 3152699 - RNA, 22 nt, Respiratory syncytial virus
aauacaaaaaauauacugaaua

SEQ ID NO: 3152700 - RNA, 13 nt, Respiratory syncytial virus
uuacaaaaccaca

SEQ ID NO: 3152701 - RNA, 18 nt, Respiratory syncytial virus
gaacacacuugaaaauau

SEQ ID NO: 3152702 - RNA, 20 nt, Respiratory syncytial virus
caaguaugaucucaauccau

SEQ ID NO: 3152703 - RNA, 12 nt, Respiratory syncytial virus
aaagaaaaagac

SEQ ID NO: 3152704 - RNA, 18 nt, Respiratory syncytial virus
auauuaaugggaaagaaa

SEQ ID NO: 3152705 - RNA, 21 nt, Respiratory syncytial virus
cauaaugggagaauacagagg

SEQ ID NO: 3152706 - RNA, 18 nt, Respiratory syncytial virus
ccaucaagacaaccaaaa

SEQ ID NO: 3152707 - RNA, 12 nt, Respiratory syncytial virus
auauaaaacaau

SEQ ID NO: 3152708 - RNA, 19 nt, Respiratory syncytial virus
ucaacaaagaucaacuucu

SEQ ID NO: 3152709 - RNA, 17 nt, Respiratory syncytial virus
agcuauucauaugaaga

SEQ ID NO: 3152710 - RNA, 20 nt, Respiratory syncytial virus
aaucauuggaggaaauccaa

SEQ ID NO: 3152711 - RNA, 17 nt, Respiratory syncytial virus
guuaaaaauaacaugcu

SEQ ID NO: 3152712 - RNA, 17 nt, Respiratory syncytial virus
agacaucauaacacaca

SEQ ID NO: 3152713 - RNA, 17 nt, Respiratory syncytial virus
ucacacaaucugaaaua

SEQ ID NO: 3152714 - RNA, 17 nt, Respiratory syncytial virus
ggaaauucugcuaaugu

SEQ ID NO: 3152715 - RNA, 15 nt, Respiratory syncytial virus
caaauaaaacaucau

SEQ ID NO: 3152716 - RNA, 14 nt, Respiratory syncytial virus
aaauggagccugaa

SEQ ID NO: 3152717 - RNA, 17 nt, Respiratory syncytial virus
caaaacccaucuggagc

SEQ ID NO: 3152718 - RNA, 15 nt, Respiratory syncytial virus
acauguccaaaaaca

SEQ ID NO: 3152719 - RNA, 13 nt, Respiratory syncytial virus
ugauaacaacaau

SEQ ID NO: 3152720 - RNA, 20 nt, Respiratory syncytial virus
uccugcaccuagaaggggaa

SEQ ID NO: 3152721 - RNA, 21 nt, Respiratory syncytial virus
ucuuaaaucuauagcacaaau

SEQ ID NO: 3152722 - RNA, 13 nt, Respiratory syncytial virus
cacaaucugaaau

SEQ ID NO: 3152723 - RNA, 22 nt, Respiratory syncytial virus
aauauuguuaucauuaauugcc

SEQ ID NO: 3152724 - RNA, 22 nt, Respiratory syncytial virus
aauauacugaauacaacacaaa

SEQ ID NO: 3152725 - RNA, 17 nt, Respiratory syncytial virus
caaugaucuaucacuug

SEQ ID NO: 3152726 - RNA, 16 nt, Respiratory syncytial virus
caaagucacacuaaca

SEQ ID NO: 3152727 - RNA, 14 nt, Respiratory syncytial virus
aaagaaaugggaga

SEQ ID NO: 3152728 - RNA, 16 nt, Respiratory syncytial virus
agugaaauacuaggaa

SEQ ID NO: 3152729 - RNA, 16 nt, Respiratory syncytial virus
uuauuaauggaaauuc

SEQ ID NO: 3152730 - RNA, 16 nt, Respiratory syncytial virus
cagauuuauauacuug

SEQ ID NO: 3152731 - RNA, 14 nt, Respiratory syncytial virus
caaccaacacaaag

SEQ ID NO: 3152732 - RNA, 12 nt, Respiratory syncytial virus
caaaaaaaccaa

SEQ ID NO: 3152733 - RNA, 12 nt, Respiratory syncytial virus
cacaaucugaaa

SEQ ID NO: 3152734 - RNA, 18 nt, Respiratory syncytial virus
uugccaauccucaaaaca

SEQ ID NO: 3152735 - RNA, 21 nt, Respiratory syncytial virus
agcagauuuacuuauaaaaga

SEQ ID NO: 3152736 - RNA, 15 nt, Respiratory syncytial virus
acagcuucuaugaag

SEQ ID NO: 3152737 - RNA, 20 nt, Respiratory syncytial virus
uguaccuugcagcauaugca

SEQ ID NO: 3152738 - RNA, 18 nt, Respiratory syncytial virus
aagugucucucaauccaa

SEQ ID NO: 3152739 - RNA, 14 nt, Respiratory syncytial virus
uagauuccuaguuu

SEQ ID NO: 3152740 - RNA, 14 nt, Respiratory syncytial virus
uaacaacugaaauu

SEQ ID NO: 3152741 - RNA, 20 nt, Respiratory syncytial virus
caugaauuucaacacaagag

SEQ ID NO: 3152742 - RNA, 17 nt, Respiratory syncytial virus
uagaaguaaccaaagaa

SEQ ID NO: 3152743 - RNA, 18 nt, Respiratory syncytial virus
auacuccuaauuaugaug

SEQ ID NO: 3152744 - RNA, 22 nt, Respiratory syncytial virus
aucaagaucuauaugaugcugc

SEQ ID NO: 3152745 - RNA, 13 nt, Respiratory syncytial virus
uugucaagcuuaa

SEQ ID NO: 3152746 - RNA, 16 nt, Respiratory syncytial virus
ugccaucacaaaugca

SEQ ID NO: 3152747 - RNA, 19 nt, Respiratory syncytial virus
uagaggcuaucaaacauca

SEQ ID NO: 3152748 - RNA, 16 nt, Respiratory syncytial virus
gccucggcaaaccaca

SEQ ID NO: 3152749 - RNA, 14 nt, Respiratory syncytial virus
cacauggggcaaau

SEQ ID NO: 3152750 - RNA, 21 nt, Respiratory syncytial virus
uccacaaacaaggcuguaguc

SEQ ID NO: 3152751 - RNA, 21 nt, Respiratory syncytial virus
caugagaccauugucacuuga

SEQ ID NO: 3152752 - RNA, 20 nt, Respiratory syncytial virus
cgaugacccugcaucacuua

SEQ ID NO: 3152753 - RNA, 23 nt, Respiratory syncytial virus
ucuuaaaucuauagcacaaauca

SEQ ID NO: 3152754 - RNA, 14 nt, Respiratory syncytial virus
ucaauccuaaugcu

SEQ ID NO: 3152755 - RNA, 14 nt, Respiratory syncytial virus
aaaagaauaccaaa

SEQ ID NO: 3152756 - RNA, 18 nt, Respiratory syncytial virus
guucuacauaauaaaaga

SEQ ID NO: 3152757 - RNA, 12 nt, Respiratory syncytial virus
ucaaaacaacac

SEQ ID NO: 3152758 - RNA, 21 nt, Respiratory syncytial virus
uucaacuuuguaccuugcagc

SEQ ID NO: 3152759 - RNA, 12 nt, Respiratory syncytial virus
aaaagucauaau

SEQ ID NO: 3152760 - RNA, 16 nt, Respiratory syncytial virus
ugcaauacugaacaaa

SEQ ID NO: 3152761 - RNA, 19 nt, Respiratory syncytial virus
aucagaucuaguacucaaa

SEQ ID NO: 3152762 - RNA, 20 nt, Respiratory syncytial virus
uaacaacugcaaucauacaa

SEQ ID NO: 3152763 - RNA, 17 nt, Respiratory syncytial virus
caaagaaaccauagaaa

SEQ ID NO: 3152764 - RNA, 21 nt, Respiratory syncytial virus
uauuaaugggaaagaaaugaa

SEQ ID NO: 3152765 - RNA, 23 nt, Respiratory syncytial virus
uggcaaugauaaucucaacuuca

SEQ ID NO: 3152766 - RNA, 17 nt, Respiratory syncytial virus
gcaagcccaccacaaaa

SEQ ID NO: 3152767 - RNA, 22 nt, Respiratory syncytial virus
aaaauugauaaaacaagaauua

SEQ ID NO: 3152768 - RNA, 22 nt, Respiratory syncytial virus
aaaugagacagaugauacugua

SEQ ID NO: 3152769 - RNA, 22 nt, Respiratory syncytial virus
gacccugcaucacuuacaauau

SEQ ID NO: 3152770 - RNA, 19 nt, Respiratory syncytial virus
agauauagaaguaaccaaa

SEQ ID NO: 3152771 - RNA, 11 nt, Respiratory syncytial virus
ucagugaguug

SEQ ID NO: 3152772 - RNA, 14 nt, Respiratory syncytial virus
aucaacuagcaaau

SEQ ID NO: 3152773 - RNA, 13 nt, Respiratory syncytial virus
aaaccaaccauca

SEQ ID NO: 3152774 - RNA, 13 nt, Respiratory syncytial virus
ugcagaaacacau

SEQ ID NO: 3152775 - RNA, 13 nt, Respiratory syncytial virus
cucuuagcaaagu

SEQ ID NO: 3152776 - RNA, 19 nt, Respiratory syncytial virus
ugaaagauggggcaaauac

SEQ ID NO: 3152777 - RNA, 14 nt, Respiratory syncytial virus
uaguauaaauucca

SEQ ID NO: 3152778 - RNA, 23 nt, Respiratory syncytial virus
uauaauaaauaucaacuagcaaa

SEQ ID NO: 3152779 - RNA, 22 nt, Respiratory syncytial virus
uccauaguucaaauggagccug

SEQ ID NO: 3152780 - RNA, 16 nt, Respiratory syncytial virus
ccaucagugucagaaa

SEQ ID NO: 3152781 - RNA, 18 nt, Respiratory syncytial virus
caugcauaaccacacucc

SEQ ID NO: 3152782 - RNA, 13 nt, Respiratory syncytial virus
uggacacaacaca

SEQ ID NO: 3152783 - RNA, 16 nt, Respiratory syncytial virus
aagacaaccaaaaaag

SEQ ID NO: 3152784 - RNA, 18 nt, Respiratory syncytial virus
uggagaagaugcaaacaa

SEQ ID NO: 3152785 - RNA, 20 nt, Respiratory syncytial virus
uagcauuuauucguaaaucc

SEQ ID NO: 3152786 - RNA, 19 nt, Respiratory syncytial virus
augcauaaccacacuccau

SEQ ID NO: 3152787 - RNA, 23 nt, Respiratory syncytial virus
uggcauuguauuugugcauguua

SEQ ID NO: 3152788 - RNA, 21 nt, Respiratory syncytial virus
auacucaccgaaucaaccauu

SEQ ID NO: 3152789 - RNA, 17 nt, Respiratory syncytial virus
ccuuguaguauaaauuc

SEQ ID NO: 3152790 - RNA, 19 nt, Respiratory syncytial virus
auccaauuucacaacaaug

SEQ ID NO: 3152791 - RNA, 14 nt, Respiratory syncytial virus
auuuacuuauaaaa

SEQ ID NO: 3152792 - RNA, 18 nt, Respiratory syncytial virus
augaaauuugaaguguua

SEQ ID NO: 3152793 - RNA, 22 nt, Respiratory syncytial virus
uugcaaaaagccaugaccaaau

SEQ ID NO: 3152794 - RNA, 14 nt, Respiratory syncytial virus
uguuauuacaagua

SEQ ID NO: 3152795 - RNA, 12 nt, Respiratory syncytial virus
aauaaccaaauu

SEQ ID NO: 3152796 - RNA, 19 nt, Respiratory syncytial virus
agcuucaacaacaccaagu

SEQ ID NO: 3152797 - RNA, 23 nt, Respiratory syncytial virus
caauccuaaugcuuaccacauca

SEQ ID NO: 3152798 - RNA, 16 nt, Respiratory syncytial virus
aaguaccacuuaaauu

SEQ ID NO: 3152799 - RNA, 19 nt, Respiratory syncytial virus
uauagaaguaaccaaagaa

SEQ ID NO: 3152800 - RNA, 15 nt, Respiratory syncytial virus
auaaaaauauccaca

SEQ ID NO: 3152801 - RNA, 17 nt, Respiratory syncytial virus
uucuacauaauaaaaga

SEQ ID NO: 3152802 - RNA, 18 nt, Respiratory syncytial virus
aaaaugcuaaaagaaaug

SEQ ID NO: 3152803 - RNA, 15 nt, Respiratory syncytial virus
auugaagaaaaccau

SEQ ID NO: 3152804 - RNA, 23 nt, Respiratory syncytial virus
guuaauagguauguuauaugcua

SEQ ID NO: 3152805 - RNA, 20 nt, Respiratory syncytial virus
ugcauuuguaagugaacaac

SEQ ID NO: 3152806 - RNA, 22 nt, Respiratory syncytial virus
auagcuacacacuaacacugua

SEQ ID NO: 3152807 - RNA, 15 nt, Respiratory syncytial virus
auaccaaacaaaaaa

SEQ ID NO: 3152808 - RNA, 19 nt, Respiratory syncytial virus
agcugcuguucaauacaau

SEQ ID NO: 3152809 - RNA, 14 nt, Respiratory syncytial virus
ggcaaauaaaucaa

SEQ ID NO: 3152810 - RNA, 16 nt, Respiratory syncytial virus
gccaguguuacaaaau

SEQ ID NO: 3152811 - RNA, 18 nt, Respiratory syncytial virus
auaugggaaaugauggaa

SEQ ID NO: 3152812 - RNA, 13 nt, Respiratory syncytial virus
aaaaauucccaua

SEQ ID NO: 3152813 - RNA, 21 nt, Respiratory syncytial virus
aaucaauaaagggcaaauuca

SEQ ID NO: 3152814 - RNA, 15 nt, Respiratory syncytial virus
ggcuaaggcagugau

SEQ ID NO: 3152815 - RNA, 11 nt, Respiratory syncytial virus
aaucaaaacaa

SEQ ID NO: 3152816 - RNA, 12 nt, Respiratory syncytial virus
agauaaaaaugg

SEQ ID NO: 3152817 - RNA, 20 nt, Respiratory syncytial virus
ggaugauaauauuauguaua

SEQ ID NO: 3152818 - RNA, 15 nt, Respiratory syncytial virus
caacugaaauucaaa

SEQ ID NO: 3152819 - RNA, 22 nt, Respiratory syncytial virus
aaaaguuaauguccaacaaugu

SEQ ID NO: 3152820 - RNA, 18 nt, Respiratory syncytial virus
ucaaauggaguuaguguc

SEQ ID NO: 3152821 - RNA, 18 nt, Respiratory syncytial virus
ccacaaaaaaaccaacca

SEQ ID NO: 3152822 - RNA, 18 nt, Respiratory syncytial virus
aucgucaagauauuaaug

SEQ ID NO: 3152823 - RNA, 17 nt, Respiratory syncytial virus
cauagcuacacacuaac

SEQ ID NO: 3152824 - RNA, 13 nt, Respiratory syncytial virus
gccaguguuacaa

SEQ ID NO: 3152825 - RNA, 21 nt, Respiratory syncytial virus
caaaauuuucuacaacaucua

SEQ ID NO: 3152826 - RNA, 14 nt, Respiratory syncytial virus
aauuucaacacaag

SEQ ID NO: 3152827 - RNA, 17 nt, Respiratory syncytial virus
gacuucaaaaacagaug

SEQ ID NO: 3152828 - RNA, 16 nt, Respiratory syncytial virus
auggagccugaaaauu

SEQ ID NO: 3152829 - RNA, 15 nt, Respiratory syncytial virus
augauaacaacaaua

SEQ ID NO: 3152830 - RNA, 21 nt, Respiratory syncytial virus
ucaaacuauuaacucaaacaa

SEQ ID NO: 3152831 - RNA, 15 nt, Respiratory syncytial virus
uagucauaauuauuu

SEQ ID NO: 3152832 - RNA, 19 nt, Respiratory syncytial virus
agaucuaguacucaaauaa

SEQ ID NO: 3152833 - RNA, 19 nt, Respiratory syncytial virus
uucuuacaaugguuucaua

SEQ ID NO: 3152834 - RNA, 13 nt, Respiratory syncytial virus
auaugcccaaaaa

SEQ ID NO: 3152835 - RNA, 12 nt, Respiratory syncytial virus
uaaccacacucc

SEQ ID NO: 3152836 - RNA, 20 nt, Respiratory syncytial virus
gauaaaaauggggcaaauaa

SEQ ID NO: 3152837 - RNA, 18 nt, Respiratory syncytial virus
uacuagcuucaacaacac

SEQ ID NO: 3152838 - RNA, 17 nt, Respiratory syncytial virus
uaaaaauucccauagcu

SEQ ID NO: 3152839 - RNA, 20 nt, Respiratory syncytial virus
uguagucagcuuaucaaaug

SEQ ID NO: 3152840 - RNA, 20 nt, Respiratory syncytial virus
auuuauuuugaaucaauaug

SEQ ID NO: 3152841 - RNA, 20 nt, Respiratory syncytial virus
cugcucauagacaacccauc

SEQ ID NO: 3152842 - RNA, 21 nt, Respiratory syncytial virus
ucaauaaagggcaaauucaca

SEQ ID NO: 3152843 - RNA, 11 nt, Respiratory syncytial virus
ucuaacaugcc

SEQ ID NO: 3152844 - RNA, 16 nt, Respiratory syncytial virus
uacuagcuucaacaac

SEQ ID NO: 3152845 - RNA, 17 nt, Respiratory syncytial virus
caagcagaaauggaaca

SEQ ID NO: 3152846 - RNA, 17 nt, Respiratory syncytial virus
gaaguagcauuguuaaa

SEQ ID NO: 3152847 - RNA, 18 nt, Respiratory syncytial virus
acaagcccaauuaucaaa

SEQ ID NO: 3152848 - RNA, 22 nt, Respiratory syncytial virus
cagccaauccaaaacuagccac

SEQ ID NO: 3152849 - RNA, 16 nt, Respiratory syncytial virus
guaaccuugcauuugu

SEQ ID NO: 3152850 - RNA, 23 nt, Respiratory syncytial virus
cauagcuacacacuaacacugua

SEQ ID NO: 3152851 - RNA, 13 nt, Respiratory syncytial virus
uaaauuccauacu

SEQ ID NO: 3152852 - RNA, 23 nt, Respiratory syncytial virus
caagaaaaaagauaguaucauau

SEQ ID NO: 3152853 - RNA, 16 nt, Respiratory syncytial virus
cuacaaagcacacucc

SEQ ID NO: 3152854 - RNA, 23 nt, Respiratory syncytial virus
ugccaauccucaaaacaaaugca

SEQ ID NO: 3152855 - RNA, 13 nt, Respiratory syncytial virus
gacacuagaaaag

SEQ ID NO: 3152856 - RNA, 14 nt, Respiratory syncytial virus
cauaguucaaaugg

SEQ ID NO: 3152857 - RNA, 19 nt, Respiratory syncytial virus
aaccaucaagacaaccaaa

SEQ ID NO: 3152858 - RNA, 19 nt, Respiratory syncytial virus
ucauaaucaccaacccucu

SEQ ID NO: 3152859 - RNA, 19 nt, Respiratory syncytial virus
aacaccaagugucaaguca

SEQ ID NO: 3152860 - RNA, 17 nt, Respiratory syncytial virus
gugcagaaacacaucaa

SEQ ID NO: 3152861 - RNA, 14 nt, Respiratory syncytial virus
caaaauauggcacu

SEQ ID NO: 3152862 - RNA, 19 nt, Respiratory syncytial virus
uaaauccgaugaauuauua

SEQ ID NO: 3152863 - RNA, 15 nt, Respiratory syncytial virus
acccauggaagauua

SEQ ID NO: 3152864 - RNA, 23 nt, Respiratory syncytial virus
uuggcuaaggcagugauacauac

SEQ ID NO: 3152865 - RNA, 15 nt, Respiratory syncytial virus
ggagccugaaaauua

SEQ ID NO: 3152866 - RNA, 18 nt, Respiratory syncytial virus
caucuauaaaccaucuca

SEQ ID NO: 3152867 - RNA, 17 nt, Respiratory syncytial virus
aucagugucagaaauaa

SEQ ID NO: 3152868 - RNA, 20 nt, Respiratory syncytial virus
cagagacaucauaacacaca

SEQ ID NO: 3152869 - RNA, 21 nt, Respiratory syncytial virus
acaucgucaagauauuaaugg

SEQ ID NO: 3152870 - RNA, 22 nt, Respiratory syncytial virus
cauccaacggagcacaggagau

SEQ ID NO: 3152871 - RNA, 12 nt, Respiratory syncytial virus
agugaauuauua

SEQ ID NO: 3152872 - RNA, 14 nt, Respiratory syncytial virus
aaagccaaccauca

SEQ ID NO: 3152873 - RNA, 13 nt, Respiratory syncytial virus
gucaacuaugaaa

SEQ ID NO: 3152874 - RNA, 17 nt, Respiratory syncytial virus
agacauaagaugaaaga

SEQ ID NO: 3152875 - RNA, 18 nt, Respiratory syncytial virus
caugcaagccaucaucca

SEQ ID NO: 3152876 - RNA, 15 nt, Respiratory syncytial virus
uugaucuaggaggaa

SEQ ID NO: 3152877 - RNA, 14 nt, Respiratory syncytial virus
uaguagacaaaauc

SEQ ID NO: 3152878 - RNA, 13 nt, Respiratory syncytial virus
cagaucaagaaca

SEQ ID NO: 3152879 - RNA, 16 nt, Respiratory syncytial virus
gaagcacuaaauacaa

SEQ ID NO: 3152880 - RNA, 13 nt, Respiratory syncytial virus
caaucaaaacaac

SEQ ID NO: 3152881 - RNA, 17 nt, Respiratory syncytial virus
ucaagauauuaauggga

SEQ ID NO: 3152882 - RNA, 15 nt, Respiratory syncytial virus
aauuuucuacaacau

SEQ ID NO: 3152883 - RNA, 20 nt, Respiratory syncytial virus
auaaauuuaaauccaaaucu

SEQ ID NO: 3152884 - RNA, 16 nt, Respiratory syncytial virus
uacugaauacaacaca

SEQ ID NO: 3152885 - RNA, 20 nt, Respiratory syncytial virus
caacuagcaaaucaauguca

SEQ ID NO: 3152886 - RNA, 13 nt, Respiratory syncytial virus
caaccaaacaucu

SEQ ID NO: 3152887 - RNA, 17 nt, Respiratory syncytial virus
auuaaugggaaagaaau

SEQ ID NO: 3152888 - RNA, 12 nt, Respiratory syncytial virus
caaagaaaaugg

SEQ ID NO: 3152889 - RNA, 14 nt, Respiratory syncytial virus
cacacuaagcaagg

SEQ ID NO: 3152890 - RNA, 17 nt, Respiratory syncytial virus
uccaacacaacaaacca

SEQ ID NO: 3152891 - RNA, 14 nt, Respiratory syncytial virus
aaguuacauauuca

SEQ ID NO: 3152892 - RNA, 19 nt, Respiratory syncytial virus
aguaaguuucaaagaagac

SEQ ID NO: 3152893 - RNA, 19 nt, Respiratory syncytial virus
uacaagaugcaacaagcca

SEQ ID NO: 3152894 - RNA, 14 nt, Respiratory syncytial virus
gcuuaacaacugaa

SEQ ID NO: 3152895 - RNA, 21 nt, Respiratory syncytial virus
uggguuaauagguauguuaua

SEQ ID NO: 3152896 - RNA, 19 nt, Respiratory syncytial virus
acagucaagaccaaaaaca

SEQ ID NO: 3152897 - RNA, 19 nt, Respiratory syncytial virus
auucaaaaaugccaucaca

SEQ ID NO: 3152898 - RNA, 14 nt, Respiratory syncytial virus
agaguuccaacaaa

SEQ ID NO: 3152899 - RNA, 19 nt, Respiratory syncytial virus
caagaccaaaaacacaaca

SEQ ID NO: 3152900 - RNA, 11 nt, Respiratory syncytial virus
uggagccucag

SEQ ID NO: 3152901 - RNA, 17 nt, Respiratory syncytial virus
caaaaagauacaaucaa

SEQ ID NO: 3152902 - RNA, 15 nt, Respiratory syncytial virus
ucuuagcaaagucaa

SEQ ID NO: 3152903 - RNA, 18 nt, Respiratory syncytial virus
aaaguuagauuacaaaau

SEQ ID NO: 3152904 - RNA, 19 nt, Respiratory syncytial virus
agcuacacacuaacacugu

SEQ ID NO: 3152905 - RNA, 21 nt, Respiratory syncytial virus
ucaagaccaaaaacacaacaa

SEQ ID NO: 3152906 - RNA, 15 nt, Respiratory syncytial virus
aacguuggggcaaau

SEQ ID NO: 3152907 - RNA, 21 nt, Respiratory syncytial virus
agcaagcccaccacaaaacaa

SEQ ID NO: 3152908 - RNA, 14 nt, Respiratory syncytial virus
agaacacacuauau

SEQ ID NO: 3152909 - RNA, 13 nt, Respiratory syncytial virus
cugaacaacucaa

SEQ ID NO: 3152910 - RNA, 20 nt, Respiratory syncytial virus
aucaaugucacuaacaccau

SEQ ID NO: 3152911 - RNA, 20 nt, Respiratory syncytial virus
aauggagccugaaaauuaua

SEQ ID NO: 3152912 - RNA, 16 nt, Respiratory syncytial virus
cacuuaaauuuaacuc

SEQ ID NO: 3152913 - RNA, 15 nt, Respiratory syncytial virus
ucaaugucacuaaca

SEQ ID NO: 3152914 - RNA, 20 nt, Respiratory syncytial virus
guuacuauguauaaucaaaa

SEQ ID NO: 3152915 - RNA, 16 nt, Respiratory syncytial virus
acaaacgauaauauaa

SEQ ID NO: 3152916 - RNA, 21 nt, Respiratory syncytial virus
cacaaaauuaaacaacauauu

SEQ ID NO: 3152917 - RNA, 18 nt, Respiratory syncytial virus
ccacagaaaagccaacca

SEQ ID NO: 3152918 - RNA, 20 nt, Respiratory syncytial virus
caugagaccauugucacuug

SEQ ID NO: 3152919 - RNA, 12 nt, Respiratory syncytial virus
acaaacaaacca

SEQ ID NO: 3152920 - RNA, 20 nt, Respiratory syncytial virus
gagucacacaaucugaaaua

SEQ ID NO: 3152921 - RNA, 11 nt, Respiratory syncytial virus
gcaagcccacc

SEQ ID NO: 3152922 - RNA, 22 nt, Respiratory syncytial virus
uggaaaauacauccauaacaau

SEQ ID NO: 3152923 - RNA, 21 nt, Respiratory syncytial virus
agauacuauaguuacaaaaaa

SEQ ID NO: 3152924 - RNA, 14 nt, Respiratory syncytial virus
aguguuacaaaaug

SEQ ID NO: 3152925 - RNA, 16 nt, Respiratory syncytial virus
cuacacacuaacacug

SEQ ID NO: 3152926 - RNA, 18 nt, Respiratory syncytial virus
aaguuagauuacaaaauu

SEQ ID NO: 3152927 - RNA, 19 nt, Respiratory syncytial virus
caauagaauucucaagcaa

SEQ ID NO: 3152928 - RNA, 15 nt, Respiratory syncytial virus
acaaagugggaagca

SEQ ID NO: 3152929 - RNA, 22 nt, Respiratory syncytial virus
cauggagaagaugcaaacaaca

SEQ ID NO: 3152930 - RNA, 20 nt, Respiratory syncytial virus
cauggagaagaugcaaacaa

SEQ ID NO: 3152931 - RNA, 14 nt, Respiratory syncytial virus
auuauuacauaaug

SEQ ID NO: 3152932 - RNA, 14 nt, Respiratory syncytial virus
gaaagauggggcaa

SEQ ID NO: 3152933 - RNA, 11 nt, Respiratory syncytial virus
aaaaaaaaugg

SEQ ID NO: 3152934 - RNA, 20 nt, Respiratory syncytial virus
gauaucauguaaaagcaaau

SEQ ID NO: 3152935 - RNA, 18 nt, Respiratory syncytial virus
ggagcuuaccuagaaaaa

SEQ ID NO: 3152936 - RNA, 14 nt, Respiratory syncytial virus
aucaaagaaaaccu

SEQ ID NO: 3152937 - RNA, 19 nt, Respiratory syncytial virus
cacuaacacuguauucaau

SEQ ID NO: 3152938 - RNA, 13 nt, Respiratory syncytial virus
aaaaucaaccaau

SEQ ID NO: 3152939 - RNA, 15 nt, Respiratory syncytial virus
ccaacaaaugagaca

SEQ ID NO: 3152940 - RNA, 13 nt, Respiratory syncytial virus
uauggauaaaagc

SEQ ID NO: 3152941 - RNA, 18 nt, Respiratory syncytial virus
gaacacaaccccaacaua

SEQ ID NO: 3152942 - RNA, 18 nt, Respiratory syncytial virus
ccaauuaucaaagaaaac

SEQ ID NO: 3152943 - RNA, 21 nt, Respiratory syncytial virus
uaaaaaaaauggggcaaauaa

SEQ ID NO: 3152944 - RNA, 15 nt, Respiratory syncytial virus
caaauucacaucacc

SEQ ID NO: 3152945 - RNA, 21 nt, Respiratory syncytial virus
gaaacuacaucacaaaccacc

SEQ ID NO: 3152946 - RNA, 12 nt, Respiratory syncytial virus
auacaaagaaac

SEQ ID NO: 3152947 - RNA, 15 nt, Respiratory syncytial virus
auccauucuggcaau

SEQ ID NO: 3152948 - RNA, 23 nt, Respiratory syncytial virus
cuagaggcuaucaaacaucagcu

SEQ ID NO: 3152949 - RNA, 19 nt, Respiratory syncytial virus
auacacucaacaaagauca

SEQ ID NO: 3152950 - RNA, 19 nt, Respiratory syncytial virus
aucgaaacucucaucuaua

SEQ ID NO: 3152951 - RNA, 23 nt, Respiratory syncytial virus
ccugaaaauuauaguaauuuaaa

SEQ ID NO: 3152952 - RNA, 22 nt, Respiratory syncytial virus
agcccuauaacaucaaauucaa

SEQ ID NO: 3152953 - RNA, 17 nt, Respiratory syncytial virus
agucaaguugaaugaua

SEQ ID NO: 3152954 - RNA, 16 nt, Respiratory syncytial virus
cuaccaccaagcccac

SEQ ID NO: 3152955 - RNA, 15 nt, Respiratory syncytial virus
acagcagaagaacua

SEQ ID NO: 3152956 - RNA, 23 nt, Respiratory syncytial virus
ugaagaauuuuaucaaacaacau

SEQ ID NO: 3152957 - RNA, 22 nt, Respiratory syncytial virus
ucagugaguugauucauacaaa

SEQ ID NO: 3152958 - RNA, 22 nt, Respiratory syncytial virus
cucaacagugaugacaucaaaa

SEQ ID NO: 3152959 - RNA, 14 nt, Respiratory syncytial virus
agugaguugauuca

SEQ ID NO: 3152960 - RNA, 14 nt, Respiratory syncytial virus
aaauucccauagcu

SEQ ID NO: 3152961 - RNA, 23 nt, Respiratory syncytial virus
acaaaugaucagaaaaaguuaau

SEQ ID NO: 3152962 - RNA, 15 nt, Respiratory syncytial virus
caagcagaaauggaa

SEQ ID NO: 3152963 - RNA, 14 nt, Respiratory syncytial virus
ucauguucuuacaa

SEQ ID NO: 3152964 - RNA, 22 nt, Respiratory syncytial virus
agccaauccaaaacuagccacc

SEQ ID NO: 3152965 - RNA, 13 nt, Respiratory syncytial virus
cuauaaaccaucu

SEQ ID NO: 3152966 - RNA, 17 nt, Respiratory syncytial virus
gaagagaagacaccaua

SEQ ID NO: 3152967 - RNA, 16 nt, Respiratory syncytial virus
uauauuaaaaauuccc

SEQ ID NO: 3152968 - RNA, 18 nt, Respiratory syncytial virus
gaguuacuauguauaauc

SEQ ID NO: 3152969 - RNA, 16 nt, Respiratory syncytial virus
caugcagugcagucag

SEQ ID NO: 3152970 - RNA, 17 nt, Respiratory syncytial virus
aucccaagaaaaaagau

SEQ ID NO: 3152971 - RNA, 10 nt, Respiratory syncytial virus
uccaacaaug

SEQ ID NO: 3152972 - RNA, 11 nt, Respiratory syncytial virus
ggcaaaugcaa

SEQ ID NO: 3152973 - RNA, 15 nt, Respiratory syncytial virus
aaauauggaaacaua

SEQ ID NO: 3152974 - RNA, 14 nt, Respiratory syncytial virus
cuuaaagcagucaa

SEQ ID NO: 3152975 - RNA, 20 nt, Respiratory syncytial virus
cuaaucaaacaaaacccauc

SEQ ID NO: 3152976 - RNA, 21 nt, Respiratory syncytial virus
auugcaauacugaacaaacuc

SEQ ID NO: 3152977 - RNA, 17 nt, Respiratory syncytial virus
cauuaaucaaugauaug

SEQ ID NO: 3152978 - RNA, 22 nt, Respiratory syncytial virus
acuaacaacugcaaucauacaa

SEQ ID NO: 3152979 - RNA, 20 nt, Respiratory syncytial virus
acgccaaucagccaauccaa

SEQ ID NO: 3152980 - RNA, 19 nt, Respiratory syncytial virus
ugaaaauauaguaacauca

SEQ ID NO: 3152981 - RNA, 19 nt, Respiratory syncytial virus
auguuauuacaaguaguga

SEQ ID NO: 3152982 - RNA, 20 nt, Respiratory syncytial virus
gugucucucaauccaacauc

SEQ ID NO: 3152983 - RNA, 21 nt, Respiratory syncytial virus
agaacuagcuaaugucaacau

SEQ ID NO: 3152984 - RNA, 20 nt, Respiratory syncytial virus
caucaacaucucaccaugca

SEQ ID NO: 3152985 - RNA, 21 nt, Respiratory syncytial virus
caacuaaucaaacaaaaccca

SEQ ID NO: 3152986 - RNA, 12 nt, Respiratory syncytial virus
agacaaacgaua

SEQ ID NO: 3152987 - RNA, 22 nt, Respiratory syncytial virus
aaucaagaucuauaugaugcug

SEQ ID NO: 3152988 - RNA, 13 nt, Respiratory syncytial virus
cauaucugcucau

SEQ ID NO: 3152989 - RNA, 22 nt, Respiratory syncytial virus
ccuagaaggggaagugaacaaa

SEQ ID NO: 3152990 - RNA, 19 nt, Respiratory syncytial virus
caaccaaaauaaccauaua

SEQ ID NO: 3152991 - RNA, 21 nt, Respiratory syncytial virus
gaaaauacauccauaacaaua

SEQ ID NO: 3152992 - RNA, 17 nt, Respiratory syncytial virus
auagaugacaauuguga

SEQ ID NO: 3152993 - RNA, 21 nt, Respiratory syncytial virus
augauugcaauacugaacaaa

SEQ ID NO: 3152994 - RNA, 20 nt, Respiratory syncytial virus
ucaccucuuuacaaaaccac

SEQ ID NO: 3152995 - RNA, 16 nt, Respiratory syncytial virus
acaccaccaaaacaaa

SEQ ID NO: 3152996 - RNA, 13 nt, Respiratory syncytial virus
uuccauacuaaua

SEQ ID NO: 3152997 - RNA, 14 nt, Respiratory syncytial virus
cagaggaugguacu

SEQ ID NO: 3152998 - RNA, 18 nt, Respiratory syncytial virus
aacaugccuaaaaucaaa

SEQ ID NO: 3152999 - RNA, 22 nt, Respiratory syncytial virus
caacuucaugcauaaccacacu

SEQ ID NO: 3153000 - RNA, 22 nt, Respiratory syncytial virus
auaaggaacucaaaagaauuac

SEQ ID NO: 3153001 - RNA, 20 nt, Respiratory syncytial virus
caccucuuuacaaaaccaca

SEQ ID NO: 3153002 - RNA, 22 nt, Respiratory syncytial virus
uaguucaaauggagccugaaaa

SEQ ID NO: 3153003 - RNA, 22 nt, Respiratory syncytial virus
acaaaaccuuugagcuaccaag

SEQ ID NO: 3153004 - RNA, 15 nt, Respiratory syncytial virus
aucaaauucaaccau

SEQ ID NO: 3153005 - RNA, 22 nt, Respiratory syncytial virus
caaagacugaugaucacagaca

SEQ ID NO: 3153006 - RNA, 13 nt, Respiratory syncytial virus
aguucaaauggag

SEQ ID NO: 3153007 - RNA, 19 nt, Respiratory syncytial virus
accaugcaagccaucaucc

SEQ ID NO: 3153008 - RNA, 18 nt, Respiratory syncytial virus
aucugucaacauagacaa

SEQ ID NO: 3153009 - RNA, 21 nt, Respiratory syncytial virus
aaguguuagaccucaaaaacu

SEQ ID NO: 3153010 - RNA, 19 nt, Respiratory syncytial virus
uucaugcauaaccacacuc

SEQ ID NO: 3153011 - RNA, 18 nt, Respiratory syncytial virus
caaaugcaaaaaucaucc

SEQ ID NO: 3153012 - RNA, 16 nt, Respiratory syncytial virus
gucaacuaugaaauga

SEQ ID NO: 3153013 - RNA, 16 nt, Respiratory syncytial virus
ugaaauaacaacuuca

SEQ ID NO: 3153014 - RNA, 15 nt, Respiratory syncytial virus
cggcaaccaacaauc

SEQ ID NO: 3153015 - RNA, 17 nt, Respiratory syncytial virus
uaaauaucaacuagcaa

SEQ ID NO: 3153016 - RNA, 15 nt, Respiratory syncytial virus
gcaccuaaucauguu

SEQ ID NO: 3153017 - RNA, 12 nt, Respiratory syncytial virus
augauauauaca

SEQ ID NO: 3153018 - RNA, 20 nt, Respiratory syncytial virus
cuacacacuaacacuguauu

SEQ ID NO: 3153019 - RNA, 10 nt, Respiratory syncytial virus
uucaacaaug

SEQ ID NO: 3153020 - RNA, 22 nt, Respiratory syncytial virus
cagacguauugaagaaaaccau

SEQ ID NO: 3153021 - RNA, 22 nt, Respiratory syncytial virus
acaagauuaaauccaacaaugg

SEQ ID NO: 3153022 - RNA, 20 nt, Respiratory syncytial virus
aaugucaacauacuagugaa

SEQ ID NO: 3153023 - RNA, 23 nt, Respiratory syncytial virus
aauagcaccuaaucauguucuua

SEQ ID NO: 3153024 - RNA, 18 nt, Respiratory syncytial virus
auauacuugauaaaucau

SEQ ID NO: 3153025 - RNA, 16 nt, Respiratory syncytial virus
ucaccaacccucugug

SEQ ID NO: 3153026 - RNA, 18 nt, Respiratory syncytial virus
uacuguuagucaucacag

SEQ ID NO: 3153027 - RNA, 23 nt, Respiratory syncytial virus
aaugaaacuauugcacaaagugg

SEQ ID NO: 3153028 - RNA, 11 nt, Respiratory syncytial virus
uccuacaaaaa

SEQ ID NO: 3153029 - RNA, 20 nt, Respiratory syncytial virus
caacgccaaaacaaaccacc

SEQ ID NO: 3153030 - RNA, 13 nt, Respiratory syncytial virus
aaagcaaauggag

SEQ ID NO: 3153031 - RNA, 18 nt, Respiratory syncytial virus
ucacuaugaaaacacuca

SEQ ID NO: 3153032 - RNA, 17 nt, Respiratory syncytial virus
aaaaagucauaauacca

SEQ ID NO: 3153033 - RNA, 14 nt, Respiratory syncytial virus
accuagaaaaagaa

SEQ ID NO: 3153034 - RNA, 15 nt, Respiratory syncytial virus
cuaacacuguauuca

SEQ ID NO: 3153035 - RNA, 19 nt, Respiratory syncytial virus
uaauauuguagugaaaucc

SEQ ID NO: 3153036 - RNA, 16 nt, Respiratory syncytial virus
ccaccaagcccacaaa

SEQ ID NO: 3153037 - RNA, 19 nt, Respiratory syncytial virus
gaccucguuagaacagauu

SEQ ID NO: 3153038 - RNA, 12 nt, Respiratory syncytial virus
caccaagcccac

SEQ ID NO: 3153039 - RNA, 19 nt, Respiratory syncytial virus
uggucaacuaugaaaugaa

SEQ ID NO: 3153040 - RNA, 18 nt, Respiratory syncytial virus
ugaaaauauaacaaccac

SEQ ID NO: 3153041 - RNA, 17 nt, Respiratory syncytial virus
uaaaugcugguaaaucc

SEQ ID NO: 3153042 - RNA, 19 nt, Respiratory syncytial virus
caaccaucaagacaaccaa

SEQ ID NO: 3153043 - RNA, 12 nt, Respiratory syncytial virus
caacaccaccaa

SEQ ID NO: 3153044 - RNA, 21 nt, Respiratory syncytial virus
gauagaaucuagaaaauccua

SEQ ID NO: 3153045 - RNA, 21 nt, Respiratory syncytial virus
cuggucaacuaugaaaugaaa

SEQ ID NO: 3153046 - RNA, 22 nt, Respiratory syncytial virus
augauacuguagggaacaagcc

SEQ ID NO: 3153047 - RNA, 21 nt, Respiratory syncytial virus
caaaauuuguuugacaaugau

SEQ ID NO: 3153048 - RNA, 18 nt, Respiratory syncytial virus
agcccaccacaaaacaac

SEQ ID NO: 3153049 - RNA, 14 nt, Respiratory syncytial virus
ucuucacuucacca

SEQ ID NO: 3153050 - RNA, 14 nt, Respiratory syncytial virus
gcacuaaauacaaa

SEQ ID NO: 3153051 - RNA, 22 nt, Respiratory syncytial virus
uuaacaacugaaauucaaauca

SEQ ID NO: 3153052 - RNA, 22 nt, Respiratory syncytial virus
uaauccaaaagauaaugaugua

SEQ ID NO: 3153053 - RNA, 21 nt, Respiratory syncytial virus
ugauacauacaaucaaauuga

SEQ ID NO: 3153054 - RNA, 16 nt, Respiratory syncytial virus
gcaaauacaccaucca

SEQ ID NO: 3153055 - RNA, 13 nt, Respiratory syncytial virus
agaaucaauaaag

SEQ ID NO: 3153056 - RNA, 21 nt, Respiratory syncytial virus
cacaaucuucuaccagaggug

SEQ ID NO: 3153057 - RNA, 23 nt, Respiratory syncytial virus
caagucauuguucaucagaucua

SEQ ID NO: 3153058 - RNA, 15 nt, Respiratory syncytial virus
caacccugcaaucca

SEQ ID NO: 3153059 - RNA, 22 nt, Respiratory syncytial virus
agcacacucccauaauauacaa

SEQ ID NO: 3153060 - RNA, 22 nt, Respiratory syncytial virus
agucaaaacaucacugaagaau

SEQ ID NO: 3153061 - RNA, 22 nt, Respiratory syncytial virus
uaaauaucaacuagcaaaucaa

SEQ ID NO: 3153062 - RNA, 17 nt, Respiratory syncytial virus
ugaauacaacacaaaau

SEQ ID NO: 3153063 - RNA, 20 nt, Respiratory syncytial virus
ucaaaacaucacugaagaau

SEQ ID NO: 3153064 - RNA, 13 nt, Respiratory syncytial virus
uaauuaugaugug

SEQ ID NO: 3153065 - RNA, 13 nt, Respiratory syncytial virus
acccaacaaauga

SEQ ID NO: 3153066 - RNA, 15 nt, Respiratory syncytial virus
auuaagacuaacaau

SEQ ID NO: 3153067 - RNA, 18 nt, Respiratory syncytial virus
caaauggagccugaaaau

SEQ ID NO: 3153068 - RNA, 23 nt, Respiratory syncytial virus
ucaaaacaacacucuugaagaaa

SEQ ID NO: 3153069 - RNA, 15 nt, Respiratory syncytial virus
uauuaaucacagaag

SEQ ID NO: 3153070 - RNA, 18 nt, Respiratory syncytial virus
uagcuacacacuaacacu

SEQ ID NO: 3153071 - RNA, 19 nt, Respiratory syncytial virus
aauggggcaaauaaaacau

SEQ ID NO: 3153072 - RNA, 12 nt, Respiratory syncytial virus
ggggcaaauaaa

SEQ ID NO: 3153073 - RNA, 12 nt, Respiratory syncytial virus
guauuacugaug

SEQ ID NO: 3153074 - RNA, 21 nt, Respiratory syncytial virus
aguugccaauccucaaaacaa

SEQ ID NO: 3153075 - RNA, 22 nt, Respiratory syncytial virus
agugucauaacacucaauccua

SEQ ID NO: 3153076 - RNA, 21 nt, Respiratory syncytial virus
cuaagauauuaagacuaacaa

SEQ ID NO: 3153077 - RNA, 13 nt, Respiratory syncytial virus
ugaaauaacaacu

SEQ ID NO: 3153078 - RNA, 15 nt, Respiratory syncytial virus
cagaucaagaacaca

SEQ ID NO: 3153079 - RNA, 18 nt, Respiratory syncytial virus
aauguccuaaaaaaugaa

SEQ ID NO: 3153080 - RNA, 16 nt, Respiratory syncytial virus
gcaaaucaaugucacu

SEQ ID NO: 3153081 - RNA, 23 nt, Respiratory syncytial virus
guagaguuacuauguauaaucaa

SEQ ID NO: 3153082 - RNA, 21 nt, Respiratory syncytial virus
aaaaccuggaaagaaaaccac

SEQ ID NO: 3153083 - RNA, 12 nt, Respiratory syncytial virus
uacgugaacaaa

SEQ ID NO: 3153084 - RNA, 16 nt, Respiratory syncytial virus
agaucaucccaaguca

SEQ ID NO: 3153085 - RNA, 16 nt, Respiratory syncytial virus
accuauugugaacaag

SEQ ID NO: 3153086 - RNA, 23 nt, Respiratory syncytial virus
caccaccaagcccacaaaaaaac

SEQ ID NO: 3153087 - RNA, 15 nt, Respiratory syncytial virus
uauuaacucaaacaa

SEQ ID NO: 3153088 - RNA, 18 nt, Respiratory syncytial virus
agagaugcgggauaucau

SEQ ID NO: 3153089 - RNA, 14 nt, Respiratory syncytial virus
caacaauccaaccu

SEQ ID NO: 3153090 - RNA, 17 nt, Respiratory syncytial virus
gaucuaguacucaaaua

SEQ ID NO: 3153091 - RNA, 22 nt, Respiratory syncytial virus
ggacugcuccuauacugcaagg

SEQ ID NO: 3153092 - RNA, 14 nt, Respiratory syncytial virus
aauaaccaaauuag

SEQ ID NO: 3153093 - RNA, 11 nt, Respiratory syncytial virus
aaccaaacauc

SEQ ID NO: 3153094 - RNA, 21 nt, Respiratory syncytial virus
caaggaccaacgcaccaccaa

SEQ ID NO: 3153095 - RNA, 19 nt, Respiratory syncytial virus
uuaaaaucugaacuucauc

SEQ ID NO: 3153096 - RNA, 16 nt, Respiratory syncytial virus
gaaagaaaugaaauuu

SEQ ID NO: 3153097 - RNA, 23 nt, Respiratory syncytial virus
uaucaacuagcaaaucaauguca

SEQ ID NO: 3153098 - RNA, 15 nt, Respiratory syncytial virus
auaacaaugaacuaa

SEQ ID NO: 3153099 - RNA, 21 nt, Respiratory syncytial virus
auuaagccuacaaagcacacu

SEQ ID NO: 3153100 - RNA, 14 nt, Respiratory syncytial virus
aucauauauugaaa

SEQ ID NO: 3153101 - RNA, 18 nt, Respiratory syncytial virus
caucucacuuacauuauu

SEQ ID NO: 3153102 - RNA, 18 nt, Respiratory syncytial virus
ugaaauucaaaucaacau

SEQ ID NO: 3153103 - RNA, 15 nt, Respiratory syncytial virus
aguaaccuugcauuu

SEQ ID NO: 3153104 - RNA, 15 nt, Respiratory syncytial virus
ugccaucacaaaugc

SEQ ID NO: 3153105 - RNA, 16 nt, Respiratory syncytial virus
agcagacguauugaag

SEQ ID NO: 3153106 - RNA, 17 nt, Respiratory syncytial virus
auuaaauccaacaaugg

SEQ ID NO: 3153107 - RNA, 17 nt, Respiratory syncytial virus
acucaagaagugcagug

SEQ ID NO: 3153108 - RNA, 16 nt, Respiratory syncytial virus
auuuacuuaaaaagau

SEQ ID NO: 3153109 - RNA, 23 nt, Respiratory syncytial virus
aaauacauaaagccacaaaguca

SEQ ID NO: 3153110 - RNA, 22 nt, Respiratory syncytial virus
aaggcauguagucuaacaugcc

SEQ ID NO: 3153111 - RNA, 16 nt, Respiratory syncytial virus
uauucauaugaagaaa

SEQ ID NO: 3153112 - RNA, 18 nt, Respiratory syncytial virus
auauuucaaucaaaacaa

SEQ ID NO: 3153113 - RNA, 13 nt, Respiratory syncytial virus
augauacacucaa

SEQ ID NO: 3153114 - RNA, 20 nt, Respiratory syncytial virus
auacauuauauuauguaaau

SEQ ID NO: 3153115 - RNA, 17 nt, Respiratory syncytial virus
aaccacacuccauaguu

SEQ ID NO: 3153116 - RNA, 15 nt, Respiratory syncytial virus
uaacaccauuaguua

SEQ ID NO: 3153117 - RNA, 13 nt, Respiratory syncytial virus
gcaaauacaaaaa

SEQ ID NO: 3153118 - RNA, 22 nt, Respiratory syncytial virus
accaagcccacaaaaaaaccaa

SEQ ID NO: 3153119 - RNA, 23 nt, Respiratory syncytial virus
aauuuuuuaauaacuuuuaguga

SEQ ID NO: 3153120 - RNA, 13 nt, Respiratory syncytial virus
acacuaacacugu

SEQ ID NO: 3153121 - RNA, 20 nt, Respiratory syncytial virus
caacaaagaucaacuucugu

SEQ ID NO: 3153122 - RNA, 16 nt, Respiratory syncytial virus
uucccauagcuacaca

SEQ ID NO: 3153123 - RNA, 16 nt, Respiratory syncytial virus
gauaacaaugaagaag

SEQ ID NO: 3153124 - RNA, 18 nt, Respiratory syncytial virus
agaaaacuugaugaaaga

SEQ ID NO: 3153125 - RNA, 16 nt, Respiratory syncytial virus
augauagugacaauga

SEQ ID NO: 3153126 - RNA, 20 nt, Respiratory syncytial virus
cucaaaccacaaaaccaaag

SEQ ID NO: 3153127 - RNA, 15 nt, Respiratory syncytial virus
acucuacaaaacaaa

SEQ ID NO: 3153128 - RNA, 19 nt, Respiratory syncytial virus
augccaguguuacaaaaug

SEQ ID NO: 3153129 - RNA, 18 nt, Respiratory syncytial virus
uacauaaagccacaaagu

SEQ ID NO: 3153130 - RNA, 21 nt, Respiratory syncytial virus
agaaaauggugugauuaacua

SEQ ID NO: 3153131 - RNA, 22 nt, Respiratory syncytial virus
aaucaacucuggggcaaauaac

SEQ ID NO: 3153132 - RNA, 12 nt, Respiratory syncytial virus
aaagaacaacag

SEQ ID NO: 3153133 - RNA, 23 nt, Respiratory syncytial virus
aguguaguauuaggcaaugcugc

SEQ ID NO: 3153134 - RNA, 12 nt, Respiratory syncytial virus
acaaucugaaau

SEQ ID NO: 3153135 - RNA, 17 nt, Respiratory syncytial virus
ugggcagcaauucauug

SEQ ID NO: 3153136 - RNA, 22 nt, Respiratory syncytial virus
guucaucagaucuaguacucaa

SEQ ID NO: 3153137 - RNA, 16 nt, Respiratory syncytial virus
augugcagaaacacau

SEQ ID NO: 3153138 - RNA, 16 nt, Respiratory syncytial virus
gccaaaacaaaccacc

SEQ ID NO: 3153139 - RNA, 21 nt, Respiratory syncytial virus
aggaaauccaacuaaucacaa

SEQ ID NO: 3153140 - RNA, 23 nt, Respiratory syncytial virus
gcaaauucacaucaccuaaagau

SEQ ID NO: 3153141 - RNA, 16 nt, Respiratory syncytial virus
uacauagcauucacca

SEQ ID NO: 3153142 - RNA, 16 nt, Respiratory syncytial virus
caaauucacaucaccu

SEQ ID NO: 3153143 - RNA, 15 nt, Respiratory syncytial virus
ugucacuaacaccau

SEQ ID NO: 3153144 - RNA, 19 nt, Respiratory syncytial virus
auaaauaucaacuagcaaa

SEQ ID NO: 3153145 - RNA, 16 nt, Respiratory syncytial virus
aaugagacagaugaua

SEQ ID NO: 3153146 - RNA, 20 nt, Respiratory syncytial virus
augucuagauuaggaagaga

SEQ ID NO: 3153147 - RNA, 19 nt, Respiratory syncytial virus
agacuauaauaauaucacu

SEQ ID NO: 3153148 - RNA, 14 nt, Respiratory syncytial virus
caaugucacuaaca

SEQ ID NO: 3153149 - RNA, 16 nt, Respiratory syncytial virus
auuuauacacaaaauu

SEQ ID NO: 3153150 - RNA, 16 nt, Respiratory syncytial virus
ugaugaucacagacau

SEQ ID NO: 3153151 - RNA, 22 nt, Respiratory syncytial virus
gaacaagcccaauuaucaaaga

SEQ ID NO: 3153152 - RNA, 13 nt, Respiratory syncytial virus
cauaaaaaccaca

SEQ ID NO: 3153153 - RNA, 16 nt, Respiratory syncytial virus
uggauguaacaacaca

SEQ ID NO: 3153154 - RNA, 22 nt, Respiratory syncytial virus
uuuuaauaacuuuuagugaacu

SEQ ID NO: 3153155 - RNA, 15 nt, Respiratory syncytial virus
aaaacccaucuggag

SEQ ID NO: 3153156 - RNA, 14 nt, Respiratory syncytial virus
accuaccaccaagc

SEQ ID NO: 3153157 - RNA, 22 nt, Respiratory syncytial virus
aauuaaaaauaaucauaacaau

SEQ ID NO: 3153158 - RNA, 18 nt, Respiratory syncytial virus
uggaaauucugcuaaugu

SEQ ID NO: 3153159 - RNA, 19 nt, Respiratory syncytial virus
gcacaaagugggaagcacu

SEQ ID NO: 3153160 - RNA, 15 nt, Respiratory syncytial virus
ucaacuguuagugau

SEQ ID NO: 3153161 - RNA, 13 nt, Respiratory syncytial virus
aagucauuguuca

SEQ ID NO: 3153162 - RNA, 17 nt, Respiratory syncytial virus
gucauuguucaucagau

SEQ ID NO: 3153163 - RNA, 17 nt, Respiratory syncytial virus
caauauuuaucaaucau

SEQ ID NO: 3153164 - RNA, 13 nt, Respiratory syncytial virus
acuugaugaaaga

SEQ ID NO: 3153165 - RNA, 12 nt, Respiratory syncytial virus
ggcaaugcugcu

SEQ ID NO: 3153166 - RNA, 17 nt, Respiratory syncytial virus
aaaaccauaaaaaccac

SEQ ID NO: 3153167 - RNA, 20 nt, Respiratory syncytial virus
cuaaucauaaucuccaucau

SEQ ID NO: 3153168 - RNA, 17 nt, Respiratory syncytial virus
uaucucaagucaaugag

SEQ ID NO: 3153169 - RNA, 14 nt, Respiratory syncytial virus
cgauaauauaacag

SEQ ID NO: 3153170 - RNA, 16 nt, Respiratory syncytial virus
accuagaaaaagaaag

SEQ ID NO: 3153171 - RNA, 13 nt, Respiratory syncytial virus
aagucaaguugaa

SEQ ID NO: 3153172 - RNA, 13 nt, Respiratory syncytial virus
aucucaccaugca

SEQ ID NO: 3153173 - RNA, 19 nt, Respiratory syncytial virus
ccaaaaauuggguggagaa

SEQ ID NO: 3153174 - RNA, 17 nt, Respiratory syncytial virus
cuugauugaugcaauuc

SEQ ID NO: 3153175 - RNA, 20 nt, Respiratory syncytial virus
cuauugugaacaagcaaagc

SEQ ID NO: 3153176 - RNA, 21 nt, Respiratory syncytial virus
acaacaucuagguauuacuga

SEQ ID NO: 3153177 - RNA, 19 nt, Respiratory syncytial virus
aaaauggcucuuagcaaag

SEQ ID NO: 3153178 - RNA, 13 nt, Respiratory syncytial virus
ucauaucugcuca

SEQ ID NO: 3153179 - RNA, 16 nt, Respiratory syncytial virus
aaguaaccaaagaaag

SEQ ID NO: 3153180 - RNA, 15 nt, Respiratory syncytial virus
cacaaaccaccacca

SEQ ID NO: 3153181 - RNA, 18 nt, Respiratory syncytial virus
gauauuaaugggaaagaa

SEQ ID NO: 3153182 - RNA, 13 nt, Respiratory syncytial virus
uaauauaacagca

SEQ ID NO: 3153183 - RNA, 16 nt, Respiratory syncytial virus
guggcauugcuguauc

SEQ ID NO: 3153184 - RNA, 20 nt, Respiratory syncytial virus
aaucuagcuauucauaugaa

SEQ ID NO: 3153185 - RNA, 14 nt, Respiratory syncytial virus
agccacaaagucaa

SEQ ID NO: 3153186 - RNA, 22 nt, Respiratory syncytial virus
ugauaaguaccacuuaaauuua

SEQ ID NO: 3153187 - RNA, 15 nt, Respiratory syncytial virus
acccauccaaccaaa

SEQ ID NO: 3153188 - RNA, 13 nt, Respiratory syncytial virus
aaaugcaaacaug

SEQ ID NO: 3153189 - RNA, 23 nt, Respiratory syncytial virus
guugaaugauacacucaacaaag

SEQ ID NO: 3153190 - RNA, 18 nt, Respiratory syncytial virus
aauacaaugucuuagaaa

SEQ ID NO: 3153191 - RNA, 17 nt, Respiratory syncytial virus
agcugaaacauguaaag

SEQ ID NO: 3153192 - RNA, 16 nt, Respiratory syncytial virus
guaauuuaaaauuaag

SEQ ID NO: 3153193 - RNA, 13 nt, Respiratory syncytial virus
aaaaguuagauua

SEQ ID NO: 3153194 - RNA, 14 nt, Respiratory syncytial virus
uauaguaauuuaaa

SEQ ID NO: 3153195 - RNA, 18 nt, Respiratory syncytial virus
caaugucacuaacaccau

SEQ ID NO: 3153196 - RNA, 21 nt, Respiratory syncytial virus
gagcuaccaaauuccuagaau

SEQ ID NO: 3153197 - RNA, 14 nt, Respiratory syncytial virus
aaaucagaacugaa

SEQ ID NO: 3153198 - RNA, 20 nt, Respiratory syncytial virus
acacucccauaauauacaag

SEQ ID NO: 3153199 - RNA, 22 nt, Respiratory syncytial virus
agccacccggaaaaaauagaua

SEQ ID NO: 3153200 - RNA, 14 nt, Respiratory syncytial virus
uagaggcuaucaaa

SEQ ID NO: 3153201 - RNA, 16 nt, Respiratory syncytial virus
cugaaacuacaucaca

SEQ ID NO: 3153202 - RNA, 23 nt, Respiratory syncytial virus
acucaggaaugaggaaagugaaa

SEQ ID NO: 3153203 - RNA, 18 nt, Respiratory syncytial virus
acuacaguuaaagaucuc

SEQ ID NO: 3153204 - RNA, 20 nt, Respiratory syncytial virus
ucagagaaauugaacaaccu

SEQ ID NO: 3153205 - RNA, 13 nt, Respiratory syncytial virus
caaauggagccug

SEQ ID NO: 3153206 - RNA, 15 nt, Respiratory syncytial virus
ugaugcaauucaaaa

SEQ ID NO: 3153207 - RNA, 19 nt, Respiratory syncytial virus
gaagauaaaaauggggcaa

SEQ ID NO: 3153208 - RNA, 22 nt, Respiratory syncytial virus
caacgccaaaacaaaccaccaa

SEQ ID NO: 3153209 - RNA, 22 nt, Respiratory syncytial virus
agccuacaaagcacacucccau

SEQ ID NO: 3153210 - RNA, 18 nt, Respiratory syncytial virus
cuaguaaguuucaaagaa

SEQ ID NO: 3153211 - RNA, 20 nt, Respiratory syncytial virus
aacaaugccaguguuacaaa

SEQ ID NO: 3153212 - RNA, 11 nt, Respiratory syncytial virus
gugaacaaacu

SEQ ID NO: 3153213 - RNA, 13 nt, Respiratory syncytial virus
uauuucaaucaaa

SEQ ID NO: 3153214 - RNA, 19 nt, Respiratory syncytial virus
gaaaaccaccaccaagccc

SEQ ID NO: 3153215 - RNA, 19 nt, Respiratory syncytial virus
agaucccaagaaaaaagau

SEQ ID NO: 3153216 - RNA, 18 nt, Respiratory syncytial virus
ucauguaaaagcaaaugg

SEQ ID NO: 3153217 - RNA, 12 nt, Respiratory syncytial virus
ucacccauccaa

SEQ ID NO: 3153218 - RNA, 13 nt, Respiratory syncytial virus
ccaacccucugug

SEQ ID NO: 3153219 - RNA, 17 nt, Respiratory syncytial virus
gacuugauugaugcaau

SEQ ID NO: 3153220 - RNA, 17 nt, Respiratory syncytial virus
caaauaaaucaauucag

SEQ ID NO: 3153221 - RNA, 18 nt, Respiratory syncytial virus
gcuauucauaugaagaaa

SEQ ID NO: 3153222 - RNA, 19 nt, Respiratory syncytial virus
guauucaauuauaguuauu

SEQ ID NO: 3153223 - RNA, 19 nt, Respiratory syncytial virus
cuguagggaacaagcccaa

SEQ ID NO: 3153224 - RNA, 16 nt, Respiratory syncytial virus
gcacaaaucacauuau

SEQ ID NO: 3153225 - RNA, 20 nt, Respiratory syncytial virus
acccuccacucaaccuccuc

SEQ ID NO: 3153226 - RNA, 14 nt, Respiratory syncytial virus
uauuucaaucaaaa

SEQ ID NO: 3153227 - RNA, 12 nt, Respiratory syncytial virus
acuugaugaaag

SEQ ID NO: 3153228 - RNA, 17 nt, Respiratory syncytial virus
gugcuagcacaaaugcc

SEQ ID NO: 3153229 - RNA, 14 nt, Respiratory syncytial virus
agcauaucaaacau

SEQ ID NO: 3153230 - RNA, 13 nt, Respiratory syncytial virus
acuuauaauugca

SEQ ID NO: 3153231 - RNA, 17 nt, Respiratory syncytial virus
auaaucucaacuucacu

SEQ ID NO: 3153232 - RNA, 21 nt, Respiratory syncytial virus
uauaacaucaaauucaaccau

SEQ ID NO: 3153233 - RNA, 17 nt, Respiratory syncytial virus
cacacaacaccaacaga

SEQ ID NO: 3153234 - RNA, 16 nt, Respiratory syncytial virus
acauguccaaaaacaa

SEQ ID NO: 3153235 - RNA, 17 nt, Respiratory syncytial virus
aaggggaagugaacaaa

SEQ ID NO: 3153236 - RNA, 17 nt, Respiratory syncytial virus
aauguccuaaaaaauga

SEQ ID NO: 3153237 - RNA, 15 nt, Respiratory syncytial virus
auaucaacuagcaaa

SEQ ID NO: 3153238 - RNA, 16 nt, Respiratory syncytial virus
caucuggagccucaga

SEQ ID NO: 3153239 - RNA, 22 nt, Respiratory syncytial virus
agcauaugcugaacaacucaaa

SEQ ID NO: 3153240 - RNA, 14 nt, Respiratory syncytial virus
gacaucaaaaaacu

SEQ ID NO: 3153241 - RNA, 21 nt, Respiratory syncytial virus
gaugauauauacacaauauau

SEQ ID NO: 3153242 - RNA, 16 nt, Respiratory syncytial virus
caaaaauaaugauacu

SEQ ID NO: 3153243 - RNA, 23 nt, Respiratory syncytial virus
agcuggcauaugauguaaccaca

SEQ ID NO: 3153244 - RNA, 16 nt, Respiratory syncytial virus
cugucauccagcaaau

SEQ ID NO: 3153245 - RNA, 13 nt, Respiratory syncytial virus
aaauaaagaucug

SEQ ID NO: 3153246 - RNA, 14 nt, Respiratory syncytial virus
ccaaccaaacaucu

SEQ ID NO: 3153247 - RNA, 14 nt, Respiratory syncytial virus
uaacaaugaagaag

SEQ ID NO: 3153248 - RNA, 15 nt, Respiratory syncytial virus
cugaaauaacaacuu

SEQ ID NO: 3153249 - RNA, 18 nt, Respiratory syncytial virus
caaccauggacacaacac

SEQ ID NO: 3153250 - RNA, 13 nt, Respiratory syncytial virus
ucaaaacaaccaa

SEQ ID NO: 3153251 - RNA, 14 nt, Respiratory syncytial virus
agcaacaauccaac

SEQ ID NO: 3153252 - RNA, 13 nt, Respiratory syncytial virus
ucaaggaaaauaa

SEQ ID NO: 3153253 - RNA, 15 nt, Respiratory syncytial virus
uggauguaacaacac

SEQ ID NO: 3153254 - RNA, 16 nt, Respiratory syncytial virus
cugcucaccaacaaua

SEQ ID NO: 3153255 - RNA, 21 nt, Respiratory syncytial virus
aaucauuggaggaaauccaac

SEQ ID NO: 3153256 - RNA, 22 nt, Respiratory syncytial virus
caaaggaaguaccuaccaccaa

SEQ ID NO: 3153257 - RNA, 17 nt, Respiratory syncytial virus
agaggcuaucaaacauc

SEQ ID NO: 3153258 - RNA, 16 nt, Respiratory syncytial virus
uaaauuccauacuaau

SEQ ID NO: 3153259 - RNA, 22 nt, Respiratory syncytial virus
ucaugcuauggcaaaacuaaau

SEQ ID NO: 3153260 - RNA, 18 nt, Respiratory syncytial virus
caacacaagagucacaca

SEQ ID NO: 3153261 - RNA, 15 nt, Respiratory syncytial virus
aauccaauuucacaa

SEQ ID NO: 3153262 - RNA, 17 nt, Respiratory syncytial virus
caccggcaaccaacaau

SEQ ID NO: 3153263 - RNA, 15 nt, Respiratory syncytial virus
gacauaagaugaaag

SEQ ID NO: 3153264 - RNA, 23 nt, Respiratory syncytial virus
auucauaugaagaaauaaaugau

SEQ ID NO: 3153265 - RNA, 18 nt, Respiratory syncytial virus
accacaucaacaucucac

SEQ ID NO: 3153266 - RNA, 13 nt, Respiratory syncytial virus
aacagcaagauua

SEQ ID NO: 3153267 - RNA, 22 nt, Respiratory syncytial virus
agcacuuauauguuaacaaaua

SEQ ID NO: 3153268 - RNA, 24 nt, Respiratory syncytial virus
uauaugaugcugcaaaagcauaug

SEQ ID NO: 3153269 - RNA, 17 nt, Respiratory syncytial virus
aauuuacuuaaaaagau

SEQ ID NO: 3153270 - RNA, 22 nt, Respiratory syncytial virus
cacuaacacuguauucaauuau

SEQ ID NO: 3153271 - RNA, 22 nt, Respiratory syncytial virus
agauaguaucauaucugucaac

SEQ ID NO: 3153272 - RNA, 23 nt, Respiratory syncytial virus
caaaaaaaugcuaaaagaaaugg

SEQ ID NO: 3153273 - RNA, 20 nt, Respiratory syncytial virus
gauauagaaguaaccaaaga

SEQ ID NO: 3153274 - RNA, 17 nt, Respiratory syncytial virus
cauauauugaaagcaac

SEQ ID NO: 3153275 - RNA, 22 nt, Respiratory syncytial virus
gacugaugaucacagacaugag

SEQ ID NO: 3153276 - RNA, 19 nt, Respiratory syncytial virus
cugaaauaacaacuucaug

SEQ ID NO: 3153277 - RNA, 19 nt, Respiratory syncytial virus
acucuugaagaaauuaaug

SEQ ID NO: 3153278 - RNA, 15 nt, Respiratory syncytial virus
gauaacaaugaagaa

SEQ ID NO: 3153279 - RNA, 15 nt, Respiratory syncytial virus
cacuguauucaauua

SEQ ID NO: 3153280 - RNA, 14 nt, Respiratory syncytial virus
uauaguuauuuaaa

SEQ ID NO: 3153281 - RNA, 18 nt, Respiratory syncytial virus
caugaauuucaacacaag

SEQ ID NO: 3153282 - RNA, 18 nt, Respiratory syncytial virus
aaaaauggggcaaauaaa

SEQ ID NO: 3153283 - RNA, 19 nt, Respiratory syncytial virus
uaaaacaauugaauaccag

SEQ ID NO: 3153284 - RNA, 13 nt, Respiratory syncytial virus
cuucacuucacca

SEQ ID NO: 3153285 - RNA, 23 nt, Respiratory syncytial virus
uagaguuacuauguauaaucaaa

SEQ ID NO: 3153286 - RNA, 18 nt, Respiratory syncytial virus
aaguuaauguccaacaau

SEQ ID NO: 3153287 - RNA, 19 nt, Respiratory syncytial virus
acaauauauauauuagugu

SEQ ID NO: 3153288 - RNA, 13 nt, Respiratory syncytial virus
cuucaccaucaua

SEQ ID NO: 3153289 - RNA, 16 nt, Respiratory syncytial virus
caaaagaacacacuau

SEQ ID NO: 3153290 - RNA, 13 nt, Respiratory syncytial virus
auccuacaaaaaa

SEQ ID NO: 3153291 - RNA, 21 nt, Respiratory syncytial virus
acaaguuaaaucuuaaaucua

SEQ ID NO: 3153292 - RNA, 14 nt, Respiratory syncytial virus
cuaauacacaugau

SEQ ID NO: 3153293 - RNA, 16 nt, Respiratory syncytial virus
acacaucgucaagaua

SEQ ID NO: 3153294 - RNA, 14 nt, Respiratory syncytial virus
uagcaaaucaaugu

SEQ ID NO: 3153295 - RNA, 15 nt, Respiratory syncytial virus
aauacaaaaauggcu

SEQ ID NO: 3153296 - RNA, 19 nt, Respiratory syncytial virus
ugccaauauuuaucaauca

SEQ ID NO: 3153297 - RNA, 17 nt, Respiratory syncytial virus
ucuggagccucagauca

SEQ ID NO: 3153298 - RNA, 20 nt, Respiratory syncytial virus
cauaaaaauacucagagaug

SEQ ID NO: 3153299 - RNA, 13 nt, Respiratory syncytial virus
auuaucaaagaaa

SEQ ID NO: 3153300 - RNA, 14 nt, Respiratory syncytial virus
auuaucaaagaaaa

SEQ ID NO: 3153301 - RNA, 16 nt, Respiratory syncytial virus
uaaucaaaagaacaca

SEQ ID NO: 3153302 - RNA, 18 nt, Respiratory syncytial virus
ucacauuauccauucugg

SEQ ID NO: 3153303 - RNA, 15 nt, Respiratory syncytial virus
cgauaguuauuuaaa

SEQ ID NO: 3153304 - RNA, 19 nt, Respiratory syncytial virus
auauaguaacaucaaaaaa

SEQ ID NO: 3153305 - RNA, 19 nt, Respiratory syncytial virus
cauuaccaagugaaguaaa

SEQ ID NO: 3153306 - RNA, 20 nt, Respiratory syncytial virus
cacccugugaaaucaaggca

SEQ ID NO: 3153307 - RNA, 22 nt, Reston Ebola virus (REBOV)
auuuacuugaaugcugaccacu

SEQ ID NO: 3153308 - RNA, 20 nt, Reston Ebola virus (REBOV)
uaacaauggcuaagauuuca

SEQ ID NO: 3153309 - RNA, 16 nt, Reston Ebola virus (REBOV)
ugagucccaccaggaa

SEQ ID NO: 3153310 - RNA, 18 nt, Reston Ebola virus (REBOV)
ucuauaagugauucuuaa

SEQ ID NO: 3153311 - RNA, 14 nt, Reston Ebola virus (REBOV)
cacaacagaacuga

SEQ ID NO: 3153312 - RNA, 19 nt, Reston Ebola virus (REBOV)
aguuaagaucaaaugcaaa

SEQ ID NO: 3153313 - RNA, 17 nt, Reston Ebola virus (REBOV)
auccccgaugacccagg

SEQ ID NO: 3153314 - RNA, 16 nt, Reston Ebola virus (REBOV)
ugcauaaucagaaugg

SEQ ID NO: 3153315 - RNA, 20 nt, Reston Ebola virus (REBOV)
ucucaggguuacucuaagga

SEQ ID NO: 3153316 - RNA, 20 nt, Reston Ebola virus (REBOV)
aaguaagguagcugauucac

SEQ ID NO: 3153317 - RNA, 21 nt, Reston Ebola virus (REBOV)
uuauucugcuaguaauuccga

SEQ ID NO: 3153318 - RNA, 18 nt, Reston Ebola virus (REBOV)
ugaggaagauuaagaaaa

SEQ ID NO: 3153319 - RNA, 14 nt, Reston Ebola virus (REBOV)
uccgauccaaggcu

SEQ ID NO: 3153320 - RNA, 15 nt, Reston Ebola virus (REBOV)
cuuuauuuuaauaac

SEQ ID NO: 3153321 - RNA, 15 nt, Reston Ebola virus (REBOV)
auuaauuaugcauuu

SEQ ID NO: 3153322 - RNA, 19 nt, Reston Ebola virus (REBOV)
guaauaugagugauaaugu

SEQ ID NO: 3153323 - RNA, 13 nt, Reston Ebola virus (REBOV)
uugccccaagucc

SEQ ID NO: 3153324 - RNA, 16 nt, Reston Ebola virus (REBOV)
agcaaucagaaauugg

SEQ ID NO: 3153325 - RNA, 16 nt, Reston Ebola virus (REBOV)
uagacugaaaaugcua

SEQ ID NO: 3153326 - RNA, 16 nt, Reston Ebola virus (REBOV)
agugauucuuaaucua

SEQ ID NO: 3153327 - RNA, 16 nt, Reston Ebola virus (REBOV)
aagcgagguugauaac

SEQ ID NO: 3153328 - RNA, 24 nt, Reston Ebola virus (REBOV)
uguggauugacccauucugcuuaa

SEQ ID NO: 3153329 - RNA, 15 nt, Reston Ebola virus (REBOV)
gcagcaaaccaggaa

SEQ ID NO: 3153330 - RNA, 16 nt, Reston Ebola virus (REBOV)
cuucaguuaaguaaca

SEQ ID NO: 3153331 - RNA, 16 nt, Reston Ebola virus (REBOV)
ugaagacuccccccca

SEQ ID NO: 3153332 - RNA, 21 nt, Reston Ebola virus (REBOV)
auagacuaaaaaucugauugu

SEQ ID NO: 3153333 - RNA, 12 nt, Reston Ebola virus (REBOV)
uaugaauugugc

SEQ ID NO: 3153334 - RNA, 15 nt, Reston Ebola virus (REBOV)
cuuaaaauaaguaca

SEQ ID NO: 3153335 - RNA, 20 nt, Reston Ebola virus (REBOV)
uccaaggcucgaacaacucc

SEQ ID NO: 3153336 - RNA, 24 nt, Reston Ebola virus (REBOV)
aggaaccagcccaggaagcgcagc

SEQ ID NO: 3153337 - RNA, 20 nt, Reston Ebola virus (REBOV)
aaaauauuacugaugaaauu

SEQ ID NO: 3153338 - RNA, 20 nt, Reston Ebola virus (REBOV)
uuugaucaaguaaucaugau

SEQ ID NO: 3153339 - RNA, 21 nt, Reston Ebola virus (REBOV)
uguaacuuuauuuuaauaaca

SEQ ID NO: 3153340 - RNA, 13 nt, Reston Ebola virus (REBOV)
cuaguaauuuuaa

SEQ ID NO: 3153341 - RNA, 12 nt, Reston Ebola virus (REBOV)
augacccaggac

SEQ ID NO: 3153342 - RNA, 18 nt, Reston Ebola virus (REBOV)
ugaacagccgaacaacac

SEQ ID NO: 3153343 - RNA, 14 nt, Reston Ebola virus (REBOV)
cuuuaaauaaugau

SEQ ID NO: 3153344 - RNA, 22 nt, Reston Ebola virus (REBOV)
aaauauaacaagugaugaagau

SEQ ID NO: 3153345 - RNA, 17 nt, Reston Ebola virus (REBOV)
acccaaugacaaccacc

SEQ ID NO: 3153346 - RNA, 20 nt, Reston Ebola virus (REBOV)
uuccauuuaguaauaaugau

SEQ ID NO: 3153347 - RNA, 15 nt, Reston Ebola virus (REBOV)
accaagugaacagcc

SEQ ID NO: 3153348 - RNA, 14 nt, Reston Ebola virus (REBOV)
ucuucaguuaagua

SEQ ID NO: 3153349 - RNA, 15 nt, Reston Ebola virus (REBOV)
aaauguaacccagau

SEQ ID NO: 3153350 - RNA, 22 nt, Reston Ebola virus (REBOV)
acaacuccgcccagagcccaca

SEQ ID NO: 3153351 - RNA, 14 nt, Reston Ebola virus (REBOV)
uuaaauucuccuaa

SEQ ID NO: 3153352 - RNA, 14 nt, Reston Ebola virus (REBOV)
agagacggccaaca

SEQ ID NO: 3153353 - RNA, 23 nt, Reston Ebola virus (REBOV)
auaauuguuuaguaauaugagug

SEQ ID NO: 3153354 - RNA, 17 nt, Reston Ebola virus (REBOV)
auggcuaagauuucaau

SEQ ID NO: 3153355 - RNA, 14 nt, Reston Ebola virus (REBOV)
ucgggauagaacaa

SEQ ID NO: 3153356 - RNA, 20 nt, Reston Ebola virus (REBOV)
acgccagcacccacaacauc

SEQ ID NO: 3153357 - RNA, 12 nt, Reston Ebola virus (REBOV)
uucuucuucaac

SEQ ID NO: 3153358 - RNA, 10 nt, Reston Ebola virus (REBOV)
aaaccaggaa

SEQ ID NO: 3153359 - RNA, 13 nt, Reston Ebola virus (REBOV)
acagcagcaaacc

SEQ ID NO: 3153360 - RNA, 23 nt, Reston Ebola virus (REBOV)
uugacaauccccuaccagaccac

SEQ ID NO: 3153361 - RNA, 21 nt, Reston Ebola virus (REBOV)
gauauuucucuuaauaaugau

SEQ ID NO: 3153362 - RNA, 14 nt, Reston Ebola virus (REBOV)
agugauaauguaaa

SEQ ID NO: 3153363 - RNA, 21 nt, Reston Ebola virus (REBOV)
uaacauagacugaaaaugcua

SEQ ID NO: 3153364 - RNA, 21 nt, Reston Ebola virus (REBOV)
agguggucuuuuugaaaugga

SEQ ID NO: 3153365 - RNA, 19 nt, Reston Ebola virus (REBOV)
caagaccacgccagcaccc

SEQ ID NO: 3153366 - RNA, 22 nt, Reston Ebola virus (REBOV)
acaauguaccaagugaacagcc

SEQ ID NO: 3153367 - RNA, 14 nt, Reston Ebola virus (REBOV)
ccaucggcaagcaa

SEQ ID NO: 3153368 - RNA, 18 nt, Reston Ebola virus (REBOV)
cugaaaaugcuaagaaga

SEQ ID NO: 3153369 - RNA, 13 nt, Reston Ebola virus (REBOV)
aaaugauaaugau

SEQ ID NO: 3153370 - RNA, 21 nt, Reston Ebola virus (REBOV)
auccuaguauuuauuagaaug

SEQ ID NO: 3153371 - RNA, 15 nt, Reston Ebola virus (REBOV)
cccaggcucuucaau

SEQ ID NO: 3153372 - RNA, 17 nt, Reston Ebola virus (REBOV)
aauagcaaaguuaaauu

SEQ ID NO: 3153373 - RNA, 14 nt, Reston Ebola virus (REBOV)
uuaaucuaauuuuc

SEQ ID NO: 3153374 - RNA, 21 nt, Reston Ebola virus (REBOV)
uagcucuuugaauuggaagau

SEQ ID NO: 3153375 - RNA, 22 nt, Reston Ebola virus (REBOV)
aauuuaauuaaacuucaaagug

SEQ ID NO: 3153376 - RNA, 12 nt, Reston Ebola virus (REBOV)
ugcgagauuucc

SEQ ID NO: 3153377 - RNA, 17 nt, Reston Ebola virus (REBOV)
uaugauauuucucuuaa

SEQ ID NO: 3153378 - RNA, 21 nt, Reston Ebola virus (REBOV)
augauuaauauauuaagaaaa

SEQ ID NO: 3153379 - RNA, 22 nt, Reston Ebola virus (REBOV)
ccacgccagcacccacaacauc

SEQ ID NO: 3153380 - RNA, 21 nt, Reston Ebola virus (REBOV)
gauccaaggcucgaacaacuc

SEQ ID NO: 3153381 - RNA, 15 nt, Reston Ebola virus (REBOV)
gaguuuuuuaaucua

SEQ ID NO: 3153382 - RNA, 15 nt, Reston Ebola virus (REBOV)
uucgagcuauuauuc

SEQ ID NO: 3153383 - RNA, 22 nt, Reston Ebola virus (REBOV)
gauuguauagaauuauaaaaga

SEQ ID NO: 3153384 - RNA, 16 nt, Reston Ebola virus (REBOV)
gauuggaguaaaagua

SEQ ID NO: 3153385 - RNA, 15 nt, Reston Ebola virus (REBOV)
acaugacuugaaugu

SEQ ID NO: 3153386 - RNA, 17 nt, Reston Ebola virus (REBOV)
uucggaccugcagcaga

SEQ ID NO: 3153387 - RNA, 23 nt, Reston Ebola virus (REBOV)
gauucacugagucccaccaggaa

SEQ ID NO: 3153388 - RNA, 12 nt, Reston Ebola virus (REBOV)
uauccaaauguu

SEQ ID NO: 3153389 - RNA, 16 nt, Reston Ebola virus (REBOV)
agaucauuccaaacuu

SEQ ID NO: 3153390 - RNA, 22 nt, Reston Ebola virus (REBOV)
aguccaaccaugacaagcgagg

SEQ ID NO: 3153391 - RNA, 18 nt, Reston Ebola virus (REBOV)
auuuagaguguaugaauu

SEQ ID NO: 3153392 - RNA, 20 nt, Reston Ebola virus (REBOV)
accaggaaccagcccaggaa

SEQ ID NO: 3153393 - RNA, 12 nt, Reston Ebola virus (REBOV)
caaaaauaaugu

SEQ ID NO: 3153394 - RNA, 14 nt, Reston Ebola virus (REBOV)
caaguaaucaugau

SEQ ID NO: 3153395 - RNA, 12 nt, Reston Ebola virus (REBOV)
caagcaauauuc

SEQ ID NO: 3153396 - RNA, 20 nt, Reston Ebola virus (REBOV)
ucgagcuauuauucugcuag

SEQ ID NO: 3153397 - RNA, 14 nt, Reston Ebola virus (REBOV)
accaggaaccagcc

SEQ ID NO: 3153398 - RNA, 16 nt, Reston Ebola virus (REBOV)
uacucuaaggagaaau

SEQ ID NO: 3153399 - RNA, 23 nt, Reston Ebola virus (REBOV)
cucaggguuacucuaaggagaaa

SEQ ID NO: 3153400 - RNA, 15 nt, Reston Ebola virus (REBOV)
gaauaagauaaugau

SEQ ID NO: 3153401 - RNA, 17 nt, Reston Ebola virus (REBOV)
aggcaagccacaaccuu

SEQ ID NO: 3153402 - RNA, 19 nt, Reston Ebola virus (REBOV)
acagguuucaccgcgaacc

SEQ ID NO: 3153403 - RNA, 17 nt, Reston Ebola virus (REBOV)
uugacgcuguugaugau

SEQ ID NO: 3153404 - RNA, 15 nt, Reston Ebola virus (REBOV)
ucuauucuaaucaga

SEQ ID NO: 3153405 - RNA, 14 nt, Reston Ebola virus (REBOV)
gcaauuaauaauau

SEQ ID NO: 3153406 - RNA, 18 nt, Reston Ebola virus (REBOV)
cugaggaagauuaagaaa

SEQ ID NO: 3153407 - RNA, 14 nt, Reston Ebola virus (REBOV)
acauuauaagaaug

SEQ ID NO: 3153408 - RNA, 19 nt, Reston Ebola virus (REBOV)
caguuccuaucuuuaaaua

SEQ ID NO: 3153409 - RNA, 19 nt, Reston Ebola virus (REBOV)
ucaaagugauuaaaugaua

SEQ ID NO: 3153410 - RNA, 19 nt, Reston Ebola virus (REBOV)
uagacuaaaaaucugauug

SEQ ID NO: 3153411 - RNA, 12 nt, Reston Ebola virus (REBOV)
uacugaugaaau

SEQ ID NO: 3153412 - RNA, 21 nt, Reston Ebola virus (REBOV)
cuagcuuuaguaguuaagauc

SEQ ID NO: 3153413 - RNA, 16 nt, Reston Ebola virus (REBOV)
aacaagugaugaagau

SEQ ID NO: 3153414 - RNA, 23 nt, Reston Ebola virus (REBOV)
gaacuauugacgcuguugaugau

SEQ ID NO: 3153415 - RNA, 14 nt, Reston Ebola virus (REBOV)
ccaacagcagcaaa

SEQ ID NO: 3153416 - RNA, 23 nt, Reston Ebola virus (REBOV)
gacaauggaucccggcuggaauu

SEQ ID NO: 3153417 - RNA, 18 nt, Reston Ebola virus (REBOV)
accaggaaccagcccagg

SEQ ID NO: 3153418 - RNA, 21 nt, Reston Ebola virus (REBOV)
augaaugagaauuaguugugg

SEQ ID NO: 3153419 - RNA, 15 nt, Reston Ebola virus (REBOV)
gaugacccaggaccc

SEQ ID NO: 3153420 - RNA, 17 nt, Reston Ebola virus (REBOV)
aggaaacaaaagcgauc

SEQ ID NO: 3153421 - RNA, 20 nt, Reston Ebola virus (REBOV)
uuaguaauaaugauucuuaa

SEQ ID NO: 3153422 - RNA, 15 nt, Reston Ebola virus (REBOV)
agcaauauucugaau

SEQ ID NO: 3153423 - RNA, 19 nt, Reston Ebola virus (REBOV)
agucaaaaauaaugucaau

SEQ ID NO: 3153424 - RNA, 14 nt, Reston Ebola virus (REBOV)
uagacugaaaaugc

SEQ ID NO: 3153425 - RNA, 20 nt, Reston Ebola virus (REBOV)
cugauuguauagaauuauaa

SEQ ID NO: 3153426 - RNA, 14 nt, Reston Ebola virus (REBOV)
gcuucuuugcuuga

SEQ ID NO: 3153427 - RNA, 12 nt, Reston Ebola virus (REBOV)
guuuuucugcuu

SEQ ID NO: 3153428 - RNA, 20 nt, Reston Ebola virus (REBOV)
agacuugaccgauucaucua

SEQ ID NO: 3153429 - RNA, 17 nt, Reston Ebola virus (REBOV)
cauuuaguaauaaugau

SEQ ID NO: 3153430 - RNA, 23 nt, Reston Ebola virus (REBOV)
aucuuaaaauaaguacaugaaug

SEQ ID NO: 3153431 - RNA, 22 nt, Reston Ebola virus (REBOV)
aacuauugacgcuguugaugau

SEQ ID NO: 3153432 - RNA, 19 nt, Reston Ebola virus (REBOV)
agccgaacaacacagcauc

SEQ ID NO: 3153433 - RNA, 15 nt, Reston Ebola virus (REBOV)
gagcccacagaccaa

SEQ ID NO: 3153434 - RNA, 20 nt, Reston Ebola virus (REBOV)
uccccgaugacccaggaccc

SEQ ID NO: 3153435 - RNA, 14 nt, Reston Ebola virus (REBOV)
ccagcccaggaagc

SEQ ID NO: 3153436 - RNA, 13 nt, Reston Ebola virus (REBOV)
cugagucccacca

SEQ ID NO: 3153437 - RNA, 12 nt, Reston Ebola virus (REBOV)
gagguauaacaa

SEQ ID NO: 3153438 - RNA, 22 nt, Reston Ebola virus (REBOV)
cagucuugaguaauaaucauuu

SEQ ID NO: 3153439 - RNA, 19 nt, Reston Ebola virus (REBOV)
aggguuacucuaaggagaa

SEQ ID NO: 3153440 - RNA, 15 nt, Reston Ebola virus (REBOV)
acauuauaagaaugu

SEQ ID NO: 3153441 - RNA, 20 nt, Reston Ebola virus (REBOV)
uugaugagggggcagcagua

SEQ ID NO: 3153442 - RNA, 22 nt, Reston Ebola virus (REBOV)
uauuacuuauugauaagaauac

SEQ ID NO: 3153443 - RNA, 14 nt, Reston Ebola virus (REBOV)
uccgcccagagccc

SEQ ID NO: 3153444 - RNA, 18 nt, Reston Ebola virus (REBOV)
gcuaguaauuuuaaucuc

SEQ ID NO: 3153445 - RNA, 18 nt, Human
gaaccccuggcuccaggc

SEQ ID NO: 3153446 - RNA, 22 nt, Human
gaaccccuggcuccaggccagg

SEQ ID NO: 3153447 - RNA, 15 nt, Human
gaacugagcuuggaa

SEQ ID NO: 3153448 - RNA, 16 nt, Human
gaacugagcuuggaag

SEQ ID NO: 3153449 - RNA, 21 nt, Human
gaacugagcuuggaagcuucu

SEQ ID NO: 3153450 - RNA, 22 nt, Human
gaacugagcuuggaagcuucug

SEQ ID NO: 3153451 - RNA, 14 nt, Human
gaacugagcuugga

SEQ ID NO: 3153452 - RNA, 19 nt, Human
gaaaacuuguauuaugugu

SEQ ID NO: 3153453 - RNA, 22 nt, Human
gaaaacuuguauuauguguguu

SEQ ID NO: 3153454 - RNA, 18 nt, Human
gaaaacuuguauuaugug

SEQ ID NO: 3153455 - RNA, 22 nt, Human
gaaaagaaaucuaugauuccag

SEQ ID NO: 3153456 - RNA, 20 nt, Human
gaaaauuauuuuguucauac

SEQ ID NO: 3153457 - RNA, 21 nt, Human
gaaaauuauuuuguucauaca

SEQ ID NO: 3153458 - RNA, 22 nt, Human
gaaaauuauuuuguucauacau

SEQ ID NO: 3153459 - RNA, 23 nt, Human
gaaaauuauuuuguucauacaua

SEQ ID NO: 3153460 - RNA, 11 nt, Human
gaaaugaaaaa

SEQ ID NO: 3153461 - RNA, 20 nt, Human
gaaaucuaugauuccaggug

SEQ ID NO: 3153462 - RNA, 18 nt, Human
gaaaucuaugauuccagg

SEQ ID NO: 3153463 - RNA, 17 nt, Human
cuucuaguucugccagg

SEQ ID NO: 3153464 - RNA, 18 nt, Human
cuucuaguucugccagga

SEQ ID NO: 3153465 - RNA, 16 nt, Human
cuucuaguucugccag

SEQ ID NO: 3153466 - RNA, 13 nt, Human
cuucucacauuua

SEQ ID NO: 3153467 - RNA, 20 nt, Human
cuucucacauuuauauuuuu

SEQ ID NO: 3153468 - RNA, 19 nt, Human
cuucuaguucugccaggag

SEQ ID NO: 3153469 - RNA, 20 nt, Human
cuugauuaagaucucagugg

SEQ ID NO: 3153470 - RNA, 13 nt, Human
cuuuguaaugaaa

SEQ ID NO: 3153471 - RNA, 16 nt, Human
cuuuguaaugaaaacc

SEQ ID NO: 3153472 - RNA, 14 nt, Human
cuuuguaaugaaaa

SEQ ID NO: 3153473 - RNA, 15 nt, Human
cuuuguaaugaaaac

SEQ ID NO: 3153474 - RNA, 14 nt, Human
cuuugaccuguugg

SEQ ID NO: 3153475 - RNA, 13 nt, Human
cuggacuuggagg

SEQ ID NO: 3153476 - RNA, 17 nt, Human
cugccugguccucacac

SEQ ID NO: 3153477 - RNA, 19 nt, Human
cugccugguccucacacuc

SEQ ID NO: 3153478 - RNA, 23 nt, Human
cugccugguccucacacucaccc

SEQ ID NO: 3153479 - RNA, 16 nt, Human
cugccugguccucaca

SEQ ID NO: 3153480 - RNA, 16 nt, Human
cuggggaugucucuca

SEQ ID NO: 3153481 - RNA, 15 nt, Human
cuggggccaggcugg

SEQ ID NO: 3153482 - RNA, 18 nt, Human
cugggaauaagugccagg

SEQ ID NO: 3153483 - RNA, 18 nt, Human
cuggccccugagaucucu

SEQ ID NO: 3153484 - RNA, 22 nt, Human
cuggccccugagaucucugcag

SEQ ID NO: 3153485 - RNA, 23 nt, Human
cuggccccugagaucucugcagg

SEQ ID NO: 3153486 - RNA, 20 nt, Human
cugugccuugucacgccaga

SEQ ID NO: 3153487 - RNA, 16 nt, Human
cugugccuuuugccau

SEQ ID NO: 3153488 - RNA, 15 nt, Human
cuuaggccagcacca

SEQ ID NO: 3153489 - RNA, 14 nt, Human
cuguuuaagagaca

SEQ ID NO: 3153490 - RNA, 12 nt, Human
cuguuuaagaga

SEQ ID NO: 3153491 - RNA, 14 nt, Human
gaugaugacuaugg

SEQ ID NO: 3153492 - RNA, 17 nt, Human
gccaagaggcugcagcc

SEQ ID NO: 3153493 - RNA, 18 nt, Human
gcauggcauauuuuucac

SEQ ID NO: 3153494 - RNA, 19 nt, Human
gccaacuauggccugugga

SEQ ID NO: 3153495 - RNA, 14 nt, Human
gccaacuauggccu

SEQ ID NO: 3153496 - RNA, 15 nt, Human
gccaacuauggccug

SEQ ID NO: 3153497 - RNA, 13 nt, Human
gccaagaggcugc

SEQ ID NO: 3153498 - RNA, 14 nt, Human
gccaagaggcugca

SEQ ID NO: 3153499 - RNA, 12 nt, Human
gccaagaggcug

SEQ ID NO: 3153500 - RNA, 18 nt, Human
gcauuucccuuccuuccu

SEQ ID NO: 3153501 - RNA, 15 nt, Human
gagcagugggccugg

SEQ ID NO: 3153502 - RNA, 17 nt, Human
gagcagugggccuggcc

SEQ ID NO: 3153503 - RNA, 18 nt, Human
gagcagugggccuggcca

SEQ ID NO: 3153504 - RNA, 20 nt, Human
gagcugugcaucagcuagaa

SEQ ID NO: 3153505 - RNA, 21 nt, Human
gagcgagacuugguuucaaaa

SEQ ID NO: 3153506 - RNA, 18 nt, Human
gagguggaauuauuuuaa

SEQ ID NO: 3153507 - RNA, 14 nt, Human
gaggcucuggagcc

SEQ ID NO: 3153508 - RNA, 19 nt, Human
gaggcucuggagcccacug

SEQ ID NO: 3153509 - RNA, 19 nt, Human
gaggcugcagccaggccac

SEQ ID NO: 3153510 - RNA, 18 nt, Human
gacaggggcaggaggaag

SEQ ID NO: 3153511 - RNA, 20 nt, Human
gacaggggcaggaggaaggg

SEQ ID NO: 3153512 - RNA, 22 nt, Human
gacagguuugggaccccuggug

SEQ ID NO: 3153513 - RNA, 19 nt, Human
gacagguuugggaccccug

SEQ ID NO: 3153514 - RNA, 15 nt, Human
gacuauggagcugag

SEQ ID NO: 3153515 - RNA, 15 nt, Human
gacccucaucuuucu

SEQ ID NO: 3153516 - RNA, 19 nt, Human
gacccucaucuuucuucca

SEQ ID NO: 3153517 - RNA, 20 nt, Human
gacccucaucuuucuuccaa

SEQ ID NO: 3153518 - RNA, 14 nt, Human
gacugugugcucag

SEQ ID NO: 3153519 - RNA, 16 nt, Human
gacugugugcucagga

SEQ ID NO: 3153520 - RNA, 17 nt, Human
gacugugugcucaggag

SEQ ID NO: 3153521 - RNA, 20 nt, Human
gacugugugcucaggagccc

SEQ ID NO: 3153522 - RNA, 20 nt, Human
ggcucagaggguguccugca

SEQ ID NO: 3153523 - RNA, 14 nt, Human
ggcucagagugggg

SEQ ID NO: 3153524 - RNA, 21 nt, Human
aaaagauuuucagaaaauauu

SEQ ID NO: 3153525 - RNA, 18 nt, Human
aaaagccaagaggcugca

SEQ ID NO: 3153526 - RNA, 14 nt, Human
aaaaauaacaauga

SEQ ID NO: 3153527 - RNA, 14 nt, Human
ggcugggucgcccu

SEQ ID NO: 3153528 - RNA, 17 nt, Human
ggcugggucgcccugga

SEQ ID NO: 3153529 - RNA, 20 nt, Human
ggcugggucgcccuggacug

SEQ ID NO: 3153530 - RNA, 12 nt, Human
ggcuucauacac

SEQ ID NO: 3153531 - RNA, 9 nt, Human
ggcuucaua

SEQ ID NO: 3153532 - RNA, 11 nt, Human
ggcuucauaca

SEQ ID NO: 3153533 - RNA, 17 nt, Human
gggacaggggcaggagg

SEQ ID NO: 3153534 - RNA, 18 nt, Human
gggacaggggcaggagga

SEQ ID NO: 3153535 - RNA, 22 nt, Human
gggacaccuaggcuaggguggg

SEQ ID NO: 3153536 - RNA, 21 nt, Human
ggccccugccucucugcaggu

SEQ ID NO: 3153537 - RNA, 17 nt, Human
ggccagucccugaggca

SEQ ID NO: 3153538 - RNA, 23 nt, Human
ggccagucccugaggcagguccc

SEQ ID NO: 3153539 - RNA, 15 nt, Human
ggcagggcugaggcc

SEQ ID NO: 3153540 - RNA, 17 nt, Human
aaaguugguaaaccuuu

SEQ ID NO: 3153541 - RNA, 16 nt, Human
aaaguugguaaaccuu

SEQ ID NO: 3153542 - RNA, 14 nt, Human
aaauaaaaauauug

SEQ ID NO: 3153543 - RNA, 20 nt, Human
aaaguuauugauaaguucau

SEQ ID NO: 3153544 - RNA, 20 nt, Human
guaauaggcguaacuaauuu

SEQ ID NO: 3153545 - RNA, 19 nt, Human
guaauagagcaaaauugau

SEQ ID NO: 3153546 - RNA, 22 nt, Human
guaauaacugugaaguuuacau

SEQ ID NO: 3153547 - RNA, 16 nt, Human
guaauaacugugaagu

SEQ ID NO: 3153548 - RNA, 15 nt, Human
guaauaacugugaag

SEQ ID NO: 3153549 - RNA, 20 nt, Human
guaauuuaaaauugugaugu

SEQ ID NO: 3153550 - RNA, 19 nt, Human
guaauuuaaaauugugaug

SEQ ID NO: 3153551 - RNA, 23 nt, Human
guaauuuaaaauugugauguguc

SEQ ID NO: 3153552 - RNA, 21 nt, Human
guaauccaagcaaaugugaau

SEQ ID NO: 3153553 - RNA, 15 nt, Human
guacauuuggagaca

SEQ ID NO: 3153554 - RNA, 20 nt, Human
guaccaagacuacuagggaa

SEQ ID NO: 3153555 - RNA, 23 nt, Human
guaccaagacuacuagggaaaug

SEQ ID NO: 3153556 - RNA, 15 nt, Human
aaauccacuuuaucu

SEQ ID NO: 3153557 - RNA, 14 nt, Human
aaauauuauguguu

SEQ ID NO: 3153558 - RNA, 14 nt, Human
aaaucagacuauga

SEQ ID NO: 3153559 - RNA, 21 nt, Human
aaaucagacuaugaaguuuuu

SEQ ID NO: 3153560 - RNA, 15 nt, Human
aaauauuauguguuu

SEQ ID NO: 3153561 - RNA, 14 nt, Human
guacuuaacuauuc

SEQ ID NO: 3153562 - RNA, 15 nt, Human
guagagccagagguc

SEQ ID NO: 3153563 - RNA, 17 nt, Human
ggggccgggggcagucu

SEQ ID NO: 3153564 - RNA, 18 nt, Human
aaacuaggugcauauuua

SEQ ID NO: 3153565 - RNA, 22 nt, Human
aaacuaggugcauauuuauaaa

SEQ ID NO: 3153566 - RNA, 18 nt, Human
aaaccuuuguuugcaucu

SEQ ID NO: 3153567 - RNA, 18 nt, Human
aaaccuuuuauauuuagu

SEQ ID NO: 3153568 - RNA, 13 nt, Human
gggucgcccugga

SEQ ID NO: 3153569 - RNA, 15 nt, Human
gggucgcccuggacu

SEQ ID NO: 3153570 - RNA, 18 nt, Human
gggggcgcggcugggagg

SEQ ID NO: 3153571 - RNA, 19 nt, Human
gggggugcugggccccugc

SEQ ID NO: 3153572 - RNA, 19 nt, Human
aaagagaugaugaaaauau

SEQ ID NO: 3153573 - RNA, 20 nt, Human
aaagagaugaugaaaauauu

SEQ ID NO: 3153574 - RNA, 22 nt, Human
aaagagaugaugaaaauauuua

SEQ ID NO: 3153575 - RNA, 22 nt, Human
aaagaccuuuggagcaaagcug

SEQ ID NO: 3153576 - RNA, 13 nt, Human
aaagacagugaaa

SEQ ID NO: 3153577 - RNA, 19 nt, Human
ggguggggggcuucauaca

SEQ ID NO: 3153578 - RNA, 18 nt, Human
ggguggggagagacgggc

SEQ ID NO: 3153579 - RNA, 17 nt, Human
ggguggggggcuucaua

SEQ ID NO: 3153580 - RNA, 13 nt, Human
ggguggggagaga

SEQ ID NO: 3153581 - RNA, 14 nt, Human
ggguggggagagac

SEQ ID NO: 3153582 - RNA, 16 nt, Human
aaacuuguauuaugug

SEQ ID NO: 3153583 - RNA, 19 nt, Human
aaacuuguaaauaaaggaa

SEQ ID NO: 3153584 - RNA, 14 nt, Human
aaagguaaaucaga

SEQ ID NO: 3153585 - RNA, 17 nt, Human
aaagggugaaaauuauu

SEQ ID NO: 3153586 - RNA, 20 nt, Human
aaagggacugagaaauuuau

SEQ ID NO: 3153587 - RNA, 14 nt, Human
ggucgcccuggacu

SEQ ID NO: 3153588 - RNA, 13 nt, Human
ggugaaaauuauu

SEQ ID NO: 3153589 - RNA, 14 nt, Human
ggugaaaauuauuu

SEQ ID NO: 3153590 - RNA, 22 nt, Human
ggugaaaauuauuuuguucaua

SEQ ID NO: 3153591 - RNA, 22 nt, Human
ggugcuucuaguucugccagga

SEQ ID NO: 3153592 - RNA, 15 nt, Human
gguggaauuauuuua

SEQ ID NO: 3153593 - RNA, 21 nt, Human
ggugcauauuuauaaaaauaa

SEQ ID NO: 3153594 - RNA, 11 nt, Human
ggugcugggcc

SEQ ID NO: 3153595 - RNA, 13 nt, Human
ggugcugggcccc

SEQ ID NO: 3153596 - RNA, 15 nt, Human
ggugcugggccccug

SEQ ID NO: 3153597 - RNA, 16 nt, Human
ggugcugggccccugc

SEQ ID NO: 3153598 - RNA, 20 nt, Human
ggaacugcugggcuuggcag

SEQ ID NO: 3153599 - RNA, 12 nt, Human
ggaagugugggu

SEQ ID NO: 3153600 - RNA, 22 nt, Human
ggaagugugggucugugugugu

SEQ ID NO: 3153601 - RNA, 21 nt, Human
ggaagugugggucugugugug

SEQ ID NO: 3153602 - RNA, 16 nt, Human
gcuucuaguucugcca

SEQ ID NO: 3153603 - RNA, 17 nt, Human
gcuucuaguucugccag

SEQ ID NO: 3153604 - RNA, 23 nt, Human
gcugggccccugccucucugcag

SEQ ID NO: 3153605 - RNA, 21 nt, Human
gcugggccccugccucucugc

SEQ ID NO: 3153606 - RNA, 22 nt, Human
gcugggccccugccucucugca

SEQ ID NO: 3153607 - RNA, 20 nt, Human
gcugggccccugccucucug

SEQ ID NO: 3153608 - RNA, 11 nt, Human
gccccugccag

SEQ ID NO: 3153609 - RNA, 16 nt, Human
gccccugccagacccc

SEQ ID NO: 3153610 - RNA, 20 nt, Human
gccccugccucucugcaggu

SEQ ID NO: 3153611 - RNA, 23 nt, Human
gccccugccucucugcagguccc

SEQ ID NO: 3153612 - RNA, 17 nt, Human
gccucgacacagagugg

SEQ ID NO: 3153613 - RNA, 23 nt, Human
gccuccauccuacccccugugcc

SEQ ID NO: 3153614 - RNA, 19 nt, Human
gccuggcgacagagcgaga

SEQ ID NO: 3153615 - RNA, 18 nt, Human
gcucccccuccaccugcu

SEQ ID NO: 3153616 - RNA, 17 nt, Human
gcucccccuccaccugc

SEQ ID NO: 3153617 - RNA, 14 nt, Human
gcuaugagggccuu

SEQ ID NO: 3153618 - RNA, 20 nt, Human
gcucaggaaccgaggcaggg

SEQ ID NO: 3153619 - RNA, 21 nt, Human
gcucaggaaccgaggcaggga

SEQ ID NO: 3153620 - RNA, 16 nt, Human
gcucaggaaccgaggc

SEQ ID NO: 3153621 - RNA, 19 nt, Human
gcucaggaaccgaggcagg

SEQ ID NO: 3153622 - RNA, 22 nt, Human
gcuaauucuuugaccuguuggg

SEQ ID NO: 3153623 - RNA, 18 nt, Human
cugacccucaucuuucuu

SEQ ID NO: 3153624 - RNA, 23 nt, Human
cugaggaagagggacuguucuuu

SEQ ID NO: 3153625 - RNA, 18 nt, Human
cugaggaagagggacugu

SEQ ID NO: 3153626 - RNA, 14 nt, Human
cugagcuuggaagc

SEQ ID NO: 3153627 - RNA, 20 nt, Human
cugagcuuggaagcuucugg

SEQ ID NO: 3153628 - RNA, 21 nt, Human
cugagcuuggaagcuucuggu

SEQ ID NO: 3153629 - RNA, 12 nt, Human
cugagcuuggaa

SEQ ID NO: 3153630 - RNA, 21 nt, Human
cugaggugggagauguggaaa

SEQ ID NO: 3153631 - RNA, 21 nt, Human
cugaguaaaaaagcugugugc

SEQ ID NO: 3153632 - RNA, 16 nt, Human
cuccuagccacccacc

SEQ ID NO: 3153633 - RNA, 20 nt, Human
cucucuugauuaagaucuca

SEQ ID NO: 3153634 - RNA, 23 nt, Human
cucaaagugacuauucaguuuuc

SEQ ID NO: 3153635 - RNA, 21 nt, Human
cucacuuaucccaagagaaug

SEQ ID NO: 3153636 - RNA, 12 nt, Human
cucagaauauug

SEQ ID NO: 3153637 - RNA, 20 nt, Human
cuacuagggaaaugccuuug

SEQ ID NO: 3153638 - RNA, 13 nt, Human
cuaguucugccag

SEQ ID NO: 3153639 - RNA, 15 nt, Human
cuaggguggggagag

SEQ ID NO: 3153640 - RNA, 14 nt, Human
cuaguucugccagg

SEQ ID NO: 3153641 - RNA, 15 nt, Human
cuaguucugccagga

SEQ ID NO: 3153642 - RNA, 16 nt, Human
cuaguucugccaggag

SEQ ID NO: 3153643 - RNA, 15 nt, Human
cuaggcuaggguggg

SEQ ID NO: 3153644 - RNA, 10 nt, Human
ccccugccag

SEQ ID NO: 3153645 - RNA, 14 nt, Human
ccauucuuucccaa

SEQ ID NO: 3153646 - RNA, 20 nt, Human
ccauucuuucccaacaccuc

SEQ ID NO: 3153647 - RNA, 12 nt, Human
ccauucuuuccc

SEQ ID NO: 3153648 - RNA, 15 nt, Human
ccagucccugaggca

SEQ ID NO: 3153649 - RNA, 23 nt, Human
ccagggggccagucccugaggca

SEQ ID NO: 3153650 - RNA, 15 nt, Human
ccuccuagccaccca

SEQ ID NO: 3153651 - RNA, 12 nt, Human
ccuaauaaagcu

SEQ ID NO: 3153652 - RNA, 16 nt, Human
ccuagccacccaccac

SEQ ID NO: 3153653 - RNA, 12 nt, Human
ccuagccaccca

SEQ ID NO: 3153654 - RNA, 21 nt, Human
ccugucucccuccucugcccg

SEQ ID NO: 3153655 - RNA, 18 nt, Human
ccuggugguggcucggga

SEQ ID NO: 3153656 - RNA, 21 nt, Human
ccuggugguggcucgggaggc

SEQ ID NO: 3153657 - RNA, 12 nt, Human
ccuggugguuca

SEQ ID NO: 3153658 - RNA, 13 nt, Human
ccuggugguucac

SEQ ID NO: 3153659 - RNA, 22 nt, Human
ccuggugguucacucuuggagc

SEQ ID NO: 3153660 - RNA, 18 nt, Human
ccugacccucaucuuucu

SEQ ID NO: 3153661 - RNA, 19 nt, Human
ccugacccucaucuuucuu

SEQ ID NO: 3153662 - RNA, 17 nt, Human
ccugagaucucugcagg

SEQ ID NO: 3153663 - RNA, 18 nt, Human
ccugagaucucugcagga

SEQ ID NO: 3153664 - RNA, 19 nt, Human
ccugaguuccuagccaccg

SEQ ID NO: 3153665 - RNA, 18 nt, Human
ccugaguuccuagccacc

SEQ ID NO: 3153666 - RNA, 20 nt, Human
ccugaguuccuagccaccgc

SEQ ID NO: 3153667 - RNA, 21 nt, Human
ccugaguuccuagccaccgcc

SEQ ID NO: 3153668 - RNA, 20 nt, Human
ccugccaucauguuuacaga

SEQ ID NO: 3153669 - RNA, 18 nt, Human
ccugccaucauguuuaca

SEQ ID NO: 3153670 - RNA, 14 nt, Human
ccugccucucugca

SEQ ID NO: 3153671 - RNA, 15 nt, Human
ccugccucucugcag

SEQ ID NO: 3153672 - RNA, 13 nt, Human
ccugccucucugc

SEQ ID NO: 3153673 - RNA, 19 nt, Human
cagaaaucuagaagacugu

SEQ ID NO: 3153674 - RNA, 16 nt, Human
cagaaaguuauugaua

SEQ ID NO: 3153675 - RNA, 11 nt, Human
cagaaaguuau

SEQ ID NO: 3153676 - RNA, 19 nt, Human
cacugggagaaaugaaaaa

SEQ ID NO: 3153677 - RNA, 22 nt, Human
cacuguuuugaaucucauaauu

SEQ ID NO: 3153678 - RNA, 20 nt, Human
auuaguacuccccuccuuga

SEQ ID NO: 3153679 - RNA, 14 nt, Human
auuguguugugaau

SEQ ID NO: 3153680 - RNA, 17 nt, Human
auuguguugugaauguu

SEQ ID NO: 3153681 - RNA, 16 nt, Human
auuuaugcauauuauu

SEQ ID NO: 3153682 - RNA, 22 nt, Human
auuuaugcauauuauuuuaugu

SEQ ID NO: 3153683 - RNA, 16 nt, Human
auuucauaugcuguau

SEQ ID NO: 3153684 - RNA, 13 nt, Human
caagaugguucua

SEQ ID NO: 3153685 - RNA, 16 nt, Human
caagaugguucuagca

SEQ ID NO: 3153686 - RNA, 18 nt, Human
caaagggugaaaauuauu

SEQ ID NO: 3153687 - RNA, 14 nt, Human
caaagguaaaucag

SEQ ID NO: 3153688 - RNA, 16 nt, Human
caaagucaagccacau

SEQ ID NO: 3153689 - RNA, 12 nt, Human
auuuuauaucuu

SEQ ID NO: 3153690 - RNA, 14 nt, Human
auuuuauaucuugu

SEQ ID NO: 3153691 - RNA, 16 nt, Human
auuuuauaucuuguag

SEQ ID NO: 3153692 - RNA, 21 nt, Human
caaaaggauaaugaauacuuu

SEQ ID NO: 3153693 - RNA, 14 nt, Human
caaaccaaauaaaa

SEQ ID NO: 3153694 - RNA, 15 nt, Human
caaaccaaauaaaaa

SEQ ID NO: 3153695 - RNA, 21 nt, Human
cagcagguccccagcuuuggc

SEQ ID NO: 3153696 - RNA, 18 nt, Human
cagucugagagaggccau

SEQ ID NO: 3153697 - RNA, 18 nt, Human
cagguuugggaccccugg

SEQ ID NO: 3153698 - RNA, 15 nt, Human
cagguuugggacccc

SEQ ID NO: 3153699 - RNA, 15 nt, Human
caggccugacucuca

SEQ ID NO: 3153700 - RNA, 15 nt, Human
caggagguggucugg

SEQ ID NO: 3153701 - RNA, 13 nt, Human
caggaggaagggg

SEQ ID NO: 3153702 - RNA, 12 nt, Human
caggaccccuga

SEQ ID NO: 3153703 - RNA, 14 nt, Human
caggaccccugagu

SEQ ID NO: 3153704 - RNA, 17 nt, Human
ccaccgccuccuacagc

SEQ ID NO: 3153705 - RNA, 21 nt, Human
cauuuggagacacaacuauuu

SEQ ID NO: 3153706 - RNA, 19 nt, Human
cauuguaaauaguauuuga

SEQ ID NO: 3153707 - RNA, 12 nt, Human
caugcacaaauu

SEQ ID NO: 3153708 - RNA, 13 nt, Human
cauaauuuauaca

SEQ ID NO: 3153709 - RNA, 20 nt, Human
cauaauuuauacaggucaua

SEQ ID NO: 3153710 - RNA, 21 nt, Human
cauauuauuuuauguugcaua

SEQ ID NO: 3153711 - RNA, 19 nt, Human
cauccauggggcugauugu

SEQ ID NO: 3153712 - RNA, 20 nt, Human
aaugaauacuuuauaaagga

SEQ ID NO: 3153713 - RNA, 17 nt, Human
uaauguaauaacuguga

SEQ ID NO: 3153714 - RNA, 15 nt, Human
uaauguaagacaaau

SEQ ID NO: 3153715 - RNA, 18 nt, Human
uaauacuugcuuuggaaa

SEQ ID NO: 3153716 - RNA, 18 nt, Human
uaaucagugugucuaaau

SEQ ID NO: 3153717 - RNA, 17 nt, Human
uaaucagugugucuaaa

SEQ ID NO: 3153718 - RNA, 22 nt, Human
uaauccaagcaaaugugaauca

SEQ ID NO: 3153719 - RNA, 17 nt, Human
uaaucuuuaauuuuaca

SEQ ID NO: 3153720 - RNA, 13 nt, Human
uaauucauguugc

SEQ ID NO: 3153721 - RNA, 13 nt, Human
aauguaagacaaa

SEQ ID NO: 3153722 - RNA, 19 nt, Human
uacauaaguaauucaagaa

SEQ ID NO: 3153723 - RNA, 17 nt, Human
uacauaaguaauucaag

SEQ ID NO: 3153724 - RNA, 16 nt, Human
uacauaaguaauucaa

SEQ ID NO: 3153725 - RNA, 15 nt, Human
uacauaaguaauuca

SEQ ID NO: 3153726 - RNA, 15 nt, Human
aauguaugcuucaua

SEQ ID NO: 3153727 - RNA, 16 nt, Human
aauguaugcuucauac

SEQ ID NO: 3153728 - RNA, 12 nt, Human
aauguagagggg

SEQ ID NO: 3153729 - RNA, 19 nt, Human
aaugugaacagcggcugga

SEQ ID NO: 3153730 - RNA, 19 nt, Human
aauuaacaugaauauuuag

SEQ ID NO: 3153731 - RNA, 22 nt, Human
aauuaaauuuugaguucuacau

SEQ ID NO: 3153732 - RNA, 17 nt, Human
uacauguacugauuacu

SEQ ID NO: 3153733 - RNA, 20 nt, Human
uacauuguacgaagaguauu

SEQ ID NO: 3153734 - RNA, 22 nt, Human
uacauuguacgaagaguauuuu

SEQ ID NO: 3153735 - RNA, 23 nt, Human
uacauuguacgaagaguauuuuu

SEQ ID NO: 3153736 - RNA, 20 nt, Human
acaaaaaaauauauuuaaug

SEQ ID NO: 3153737 - RNA, 17 nt, Human
acaaaaaaauauauuua

SEQ ID NO: 3153738 - RNA, 13 nt, Human
acaaaaaaauaua

SEQ ID NO: 3153739 - RNA, 18 nt, Human
acaagcacuaaacaaaga

SEQ ID NO: 3153740 - RNA, 21 nt, Human
uagcaugucgucaaagcugaa

SEQ ID NO: 3153741 - RNA, 18 nt, Human
uagcaugucgucaaagcu

SEQ ID NO: 3153742 - RNA, 17 nt, Human
uagaucacgagaucaag

SEQ ID NO: 3153743 - RNA, 16 nt, Human
uagaucacgagaucaa

SEQ ID NO: 3153744 - RNA, 15 nt, Human
aauuugaaacacuuu

SEQ ID NO: 3153745 - RNA, 20 nt, Human
aauuugaaacacuuugcaua

SEQ ID NO: 3153746 - RNA, 14 nt, Human
aauuuaugugaugg

SEQ ID NO: 3153747 - RNA, 21 nt, Human
aauucuugccaaauauaaaua

SEQ ID NO: 3153748 - RNA, 21 nt, Human
aauucuugaaggaaaaugaua

SEQ ID NO: 3153749 - RNA, 16 nt, Human
aauucuugaaggaaaa

SEQ ID NO: 3153750 - RNA, 15 nt, Human
aauucuugaaggaaa

SEQ ID NO: 3153751 - RNA, 22 nt, Human
aauucuuugaccuguugggagu

SEQ ID NO: 3153752 - RNA, 18 nt, Human
aauucuuugaccuguugg

SEQ ID NO: 3153753 - RNA, 19 nt, Human
uauuuaguguucauaaaua

SEQ ID NO: 3153754 - RNA, 19 nt, Human
uauuuaaugauaaguaaau

SEQ ID NO: 3153755 - RNA, 14 nt, Human
uauuuaauucaugu

SEQ ID NO: 3153756 - RNA, 19 nt, Human
acaguucggugagcuacaa

SEQ ID NO: 3153757 - RNA, 22 nt, Human
acaguucggugagcuacaaaug

SEQ ID NO: 3153758 - RNA, 23 nt, Human
acaguucggugagcuacaaaugc

SEQ ID NO: 3153759 - RNA, 11 nt, Human
acaguguuccg

SEQ ID NO: 3153760 - RNA, 20 nt, Human
acagugaaagaaaauaacaa

SEQ ID NO: 3153761 - RNA, 14 nt, Human
uauucauaauuauu

SEQ ID NO: 3153762 - RNA, 16 nt, Human
uauucaggagaguaga

SEQ ID NO: 3153763 - RNA, 23 nt, Human
uauguguguguguuguguguggg

SEQ ID NO: 3153764 - RNA, 11 nt, Human
uaugugugugu

SEQ ID NO: 3153765 - RNA, 22 nt, Human
uauguguguguguugugugugg

SEQ ID NO: 3153766 - RNA, 14 nt, Human
uauguguguguguu

SEQ ID NO: 3153767 - RNA, 14 nt, Human
uauauuuacaaaug

SEQ ID NO: 3153768 - RNA, 15 nt, Human
uauauuuacaaaugg

SEQ ID NO: 3153769 - RNA, 21 nt, Human
acagacacucccacuuggcau

SEQ ID NO: 3153770 - RNA, 16 nt, Human
uauauugauccagaaa

SEQ ID NO: 3153771 - RNA, 14 nt, Human
uaucuaguaugaaa

SEQ ID NO: 3153772 - RNA, 16 nt, Human
uaucuaguaugaaauu

SEQ ID NO: 3153773 - RNA, 17 nt, Human
uaucuaguaugaaauua

SEQ ID NO: 3153774 - RNA, 22 nt, Human
acagaguggacuguucccugag

SEQ ID NO: 3153775 - RNA, 13 nt, Human
acagcccaccugg

SEQ ID NO: 3153776 - RNA, 18 nt, Human
uaugagcuuccuucugug

SEQ ID NO: 3153777 - RNA, 15 nt, Human
uaucuugaauaaugu

SEQ ID NO: 3153778 - RNA, 21 nt, Human
uaugagcuuccuucugugaaa

SEQ ID NO: 3153779 - RNA, 22 nt, Human
uauggccugugagcuaggaauu

SEQ ID NO: 3153780 - RNA, 14 nt, Human
uauggccuguggau

SEQ ID NO: 3153781 - RNA, 12 nt, Human
acagccuggcug

SEQ ID NO: 3153782 - RNA, 19 nt, Human
uauggggauagaugugugg

SEQ ID NO: 3153783 - RNA, 18 nt, Human
uauggggauagaugugug

SEQ ID NO: 3153784 - RNA, 17 nt, Human
uauggggauagaugugu

SEQ ID NO: 3153785 - RNA, 14 nt, Human
uauaaaagccuguu

SEQ ID NO: 3153786 - RNA, 17 nt, Human
uauaaaagccuguuuaa

SEQ ID NO: 3153787 - RNA, 12 nt, Human
uauaaaagccug

SEQ ID NO: 3153788 - RNA, 14 nt, Human
uaguucugccagga

SEQ ID NO: 3153789 - RNA, 13 nt, Human
uaguucugccagg

SEQ ID NO: 3153790 - RNA, 16 nt, Human
uauauccuuucuaaca

SEQ ID NO: 3153791 - RNA, 13 nt, Human
uauauaucaaaua

SEQ ID NO: 3153792 - RNA, 23 nt, Human
acaccuaggcuaggguggggaga

SEQ ID NO: 3153793 - RNA, 20 nt, Human
acaccuaggcuagggugggg

SEQ ID NO: 3153794 - RNA, 15 nt, Human
aagaugcaauguaga

SEQ ID NO: 3153795 - RNA, 14 nt, Human
aagcaaaugugaau

SEQ ID NO: 3153796 - RNA, 13 nt, Human
aagcaaaugugaa

SEQ ID NO: 3153797 - RNA, 20 nt, Human
gugguucacucuuggagccu

SEQ ID NO: 3153798 - RNA, 13 nt, Human
guguucugugaua

SEQ ID NO: 3153799 - RNA, 14 nt, Human
guguguguaugugg

SEQ ID NO: 3153800 - RNA, 17 nt, Human
guguguguugugugugg

SEQ ID NO: 3153801 - RNA, 16 nt, Human
gugugugggagugugu

SEQ ID NO: 3153802 - RNA, 13 nt, Human
guguguguaugug

SEQ ID NO: 3153803 - RNA, 20 nt, Human
aagagaugaugaaaauauuu

SEQ ID NO: 3153804 - RNA, 20 nt, Human
guggguagaucacgagauca

SEQ ID NO: 3153805 - RNA, 14 nt, Human
gugggggucugugu

SEQ ID NO: 3153806 - RNA, 16 nt, Human
gugggggucugugugu

SEQ ID NO: 3153807 - RNA, 15 nt, Human
gugggggucugugug

SEQ ID NO: 3153808 - RNA, 18 nt, Human
guggggggggugcugggc

SEQ ID NO: 3153809 - RNA, 17 nt, Human
guggaagagggcugcaa

SEQ ID NO: 3153810 - RNA, 14 nt, Human
guggaagagggcug

SEQ ID NO: 3153811 - RNA, 20 nt, Human
guggaauuauuuuaaaagau

SEQ ID NO: 3153812 - RNA, 19 nt, Human
gugcugggccccugccucu

SEQ ID NO: 3153813 - RNA, 16 nt, Human
gugcugggccccugcc

SEQ ID NO: 3153814 - RNA, 15 nt, Human
aagaauauuugaaug

SEQ ID NO: 3153815 - RNA, 11 nt, Human
aagaauauuug

SEQ ID NO: 3153816 - RNA, 17 nt, Human
guggcacuggggcaggg

SEQ ID NO: 3153817 - RNA, 18 nt, Human
guggcacuggggcagggg

SEQ ID NO: 3153818 - RNA, 21 nt, Human
gugagguggaauuauuuuaaa

SEQ ID NO: 3153819 - RNA, 16 nt, Human
gugaagugaaugaaac

SEQ ID NO: 3153820 - RNA, 12 nt, Human
aacauaauuaaa

SEQ ID NO: 3153821 - RNA, 22 nt, Human
aacauuuguucuauagcuuuuc

SEQ ID NO: 3153822 - RNA, 14 nt, Human
gucgcccuggacug

SEQ ID NO: 3153823 - RNA, 15 nt, Human
guccugcaccggggc

SEQ ID NO: 3153824 - RNA, 19 nt, Human
guccugcaccggggccugg

SEQ ID NO: 3153825 - RNA, 20 nt, Human
guccugcaccggggccuggg

SEQ ID NO: 3153826 - RNA, 16 nt, Human
uaaagacuuuuaugau

SEQ ID NO: 3153827 - RNA, 19 nt, Human
uaaaccucaaaaugucuaa

SEQ ID NO: 3153828 - RNA, 18 nt, Human
uaaaccucaaaaugucua

SEQ ID NO: 3153829 - RNA, 19 nt, Human
uaaaauuuuuaaucuuuaa

SEQ ID NO: 3153830 - RNA, 17 nt, Human
uaaaauuuuuaaucuuu

SEQ ID NO: 3153831 - RNA, 19 nt, Human
aaguuuacauuguaaauag

SEQ ID NO: 3153832 - RNA, 18 nt, Human
aaguuuacauuguaaaua

SEQ ID NO: 3153833 - RNA, 22 nt, Human
aaguuauugauaaguucauaca

SEQ ID NO: 3153834 - RNA, 23 nt, Human
aaguuauugauaaguucauacau

SEQ ID NO: 3153835 - RNA, 12 nt, Human
aaguucauacau

SEQ ID NO: 3153836 - RNA, 13 nt, Human
aaguucauacauu

SEQ ID NO: 3153837 - RNA, 15 nt, Human
aaguucauacauugu

SEQ ID NO: 3153838 - RNA, 19 nt, Human
aaguuauugauaaguucau

SEQ ID NO: 3153839 - RNA, 20 nt, Human
aaguuauugauaaguucaua

SEQ ID NO: 3153840 - RNA, 17 nt, Human
guuuuuuuuuaaagacu

SEQ ID NO: 3153841 - RNA, 12 nt, Human
aauaaaaauaau

SEQ ID NO: 3153842 - RNA, 22 nt, Human
aauaaaaauauuguguugugaa

SEQ ID NO: 3153843 - RNA, 15 nt, Human
aauaacaauaaaaga

SEQ ID NO: 3153844 - RNA, 15 nt, Human
aauaacgauaaaaga

SEQ ID NO: 3153845 - RNA, 18 nt, Human
uaaauaguauuugagagu

SEQ ID NO: 3153846 - RNA, 20 nt, Human
uaaauguuuuuuuuuaaaga

SEQ ID NO: 3153847 - RNA, 23 nt, Human
uaacaaaaaaauauauuuaauga

SEQ ID NO: 3153848 - RNA, 20 nt, Human
uaacaaaaaaauauauuuaa

SEQ ID NO: 3153849 - RNA, 16 nt, Human
uaaauuuugaguucua

SEQ ID NO: 3153850 - RNA, 14 nt, Human
uaaauuuuauaucu

SEQ ID NO: 3153851 - RNA, 15 nt, Human
guuuuuuuuuaaaga

SEQ ID NO: 3153852 - RNA, 13 nt, Human
aaguauucuaaau

SEQ ID NO: 3153853 - RNA, 15 nt, Human
aaguauucuaaauuu

SEQ ID NO: 3153854 - RNA, 22 nt, Human
aaguaaaaacaaagaaauuaug

SEQ ID NO: 3153855 - RNA, 16 nt, Human
aaggaaaaaauaacaa

SEQ ID NO: 3153856 - RNA, 16 nt, Human
aagcuuuuaugugaaa

SEQ ID NO: 3153857 - RNA, 12 nt, Human
guguuuaugugu

SEQ ID NO: 3153858 - RNA, 16 nt, Human
guguuuaugugugugu

SEQ ID NO: 3153859 - RNA, 21 nt, Human
guugggagaaugucaguaugu

SEQ ID NO: 3153860 - RNA, 14 nt, Human
guugggagaauguc

SEQ ID NO: 3153861 - RNA, 14 nt, Human
aaggaucuucaucu

SEQ ID NO: 3153862 - RNA, 11 nt, Human
aaggauaaagu

SEQ ID NO: 3153863 - RNA, 21 nt, Human
aaggauaaaguugguaaaccu

SEQ ID NO: 3153864 - RNA, 23 nt, Human
aaggauaaaguugguaaaccuuu

SEQ ID NO: 3153865 - RNA, 12 nt, Human
aaggaaaaugau

SEQ ID NO: 3153866 - RNA, 14 nt, Human
aaggaaaaugauac

SEQ ID NO: 3153867 - RNA, 22 nt, Human
aaggagcaagucagaauagaaa

SEQ ID NO: 3153868 - RNA, 14 nt, Human
acugaggaucagag

SEQ ID NO: 3153869 - RNA, 13 nt, Human
acugagcuuggaa

SEQ ID NO: 3153870 - RNA, 16 nt, Human
acugagcuuggaagcu

SEQ ID NO: 3153871 - RNA, 12 nt, Human
acugagcuugga

SEQ ID NO: 3153872 - RNA, 17 nt, Human
acugagcuuggaagcuu

SEQ ID NO: 3153873 - RNA, 20 nt, Human
uccugcaccggggccugggc

SEQ ID NO: 3153874 - RNA, 21 nt, Human
uccugcaccggggccugggca

SEQ ID NO: 3153875 - RNA, 14 nt, Human
acuggggcaggggc

SEQ ID NO: 3153876 - RNA, 16 nt, Human
acuguaaggcaaucau

SEQ ID NO: 3153877 - RNA, 17 nt, Human
acugggagaaaugaaaa

SEQ ID NO: 3153878 - RNA, 12 nt, Human
acugggagccua

SEQ ID NO: 3153879 - RNA, 23 nt, Human
acugggagccuacccacccccag

SEQ ID NO: 3153880 - RNA, 20 nt, Human
acuguacagacagaaaaaac

SEQ ID NO: 3153881 - RNA, 22 nt, Human
ucgagaucccaacacugccagc

SEQ ID NO: 3153882 - RNA, 23 nt, Human
ucgagaucccaacacugccagca

SEQ ID NO: 3153883 - RNA, 12 nt, Human
ucgacacagagu

SEQ ID NO: 3153884 - RNA, 12 nt, Human
acuaaaagaucg

SEQ ID NO: 3153885 - RNA, 15 nt, Human
ucccagugaauucuu

SEQ ID NO: 3153886 - RNA, 22 nt, Human
acuaugaaguuuuuuuuauaca

SEQ ID NO: 3153887 - RNA, 11 nt, Human
uccucagcccc

SEQ ID NO: 3153888 - RNA, 21 nt, Human
acucuggagguuuguuuagaa

SEQ ID NO: 3153889 - RNA, 15 nt, Human
acucaugugacucuu

SEQ ID NO: 3153890 - RNA, 16 nt, Human
acucaugugacucuuu

SEQ ID NO: 3153891 - RNA, 17 nt, Human
acucaugugacucuuuc

SEQ ID NO: 3153892 - RNA, 16 nt, Human
acucaucuagguaaau

SEQ ID NO: 3153893 - RNA, 18 nt, Human
acucaucuagguaaauua

SEQ ID NO: 3153894 - RNA, 16 nt, Human
acccccaggaccccug

SEQ ID NO: 3153895 - RNA, 19 nt, Human
ucagccuggcuucaaauug

SEQ ID NO: 3153896 - RNA, 19 nt, Human
accccuggcuccaggccag

SEQ ID NO: 3153897 - RNA, 20 nt, Human
accccuggcuccaggccagg

SEQ ID NO: 3153898 - RNA, 22 nt, Human
accccuggcuccaggccagggg

SEQ ID NO: 3153899 - RNA, 22 nt, Human
ucagauuugccuuauuggcagc

SEQ ID NO: 3153900 - RNA, 22 nt, Human
acccagcuaugguucucucgca

SEQ ID NO: 3153901 - RNA, 16 nt, Human
ucagccccgcguggaa

SEQ ID NO: 3153902 - RNA, 17 nt, Human
ucaggaaccgaggcagg

SEQ ID NO: 3153903 - RNA, 18 nt, Human
ucaggaaccgaggcaggg

SEQ ID NO: 3153904 - RNA, 15 nt, Human
ucaggccgaaggagg

SEQ ID NO: 3153905 - RNA, 14 nt, Human
ucaggcccaaagcc

SEQ ID NO: 3153906 - RNA, 15 nt, Human
acccuccacucuccu

SEQ ID NO: 3153907 - RNA, 23 nt, Human
acccucccucuacugggagccua

SEQ ID NO: 3153908 - RNA, 19 nt, Human
acccacuugcuuuuaaaau

SEQ ID NO: 3153909 - RNA, 20 nt, Human
accagagaaaaagggagggg

SEQ ID NO: 3153910 - RNA, 18 nt, Human
accagagaaaaagggagg

SEQ ID NO: 3153911 - RNA, 19 nt, Human
ucauauuaauauauuucca

SEQ ID NO: 3153912 - RNA, 16 nt, Human
accgccuccuacagcc

SEQ ID NO: 3153913 - RNA, 21 nt, Human
ucauuggauucugagagcugu

SEQ ID NO: 3153914 - RNA, 22 nt, Human
accugaagcuaucguaaaauua

SEQ ID NO: 3153915 - RNA, 14 nt, Human
ucaugugaaaucau

SEQ ID NO: 3153916 - RNA, 22 nt, Human
ucaugauagaaggcuaugggga

SEQ ID NO: 3153917 - RNA, 17 nt, Human
accuuccaagagccuga

SEQ ID NO: 3153918 - RNA, 22 nt, Human
uccaccaagccuggucagccca

SEQ ID NO: 3153919 - RNA, 23 nt, Human
uccaccaagccuggucagcccaa

SEQ ID NO: 3153920 - RNA, 18 nt, Human
uccaccaagccuggucag

SEQ ID NO: 3153921 - RNA, 18 nt, Human
accugaauaaagaaugaa

SEQ ID NO: 3153922 - RNA, 23 nt, Human
uccaaagucucuggaauuugaaa

SEQ ID NO: 3153923 - RNA, 22 nt, Human
acuuuuuuuuuuuaagaguaaa

SEQ ID NO: 3153924 - RNA, 14 nt, Human
acuuuuggcauuuu

SEQ ID NO: 3153925 - RNA, 12 nt, Human
agaaaacagaaa

SEQ ID NO: 3153926 - RNA, 16 nt, Human
agaaaacagaaaacaa

SEQ ID NO: 3153927 - RNA, 12 nt, Human
ucuggauuauau

SEQ ID NO: 3153928 - RNA, 18 nt, Human
ucuggauuauauuaugaa

SEQ ID NO: 3153929 - RNA, 11 nt, Human
ucuggcccuau

SEQ ID NO: 3153930 - RNA, 20 nt, Human
agaauugucuuucugucucu

SEQ ID NO: 3153931 - RNA, 14 nt, Human
ucuugaugccuggc

SEQ ID NO: 3153932 - RNA, 20 nt, Human
ucuugaugccuggcggggug

SEQ ID NO: 3153933 - RNA, 13 nt, Human
ucuuggagccugc

SEQ ID NO: 3153934 - RNA, 14 nt, Human
ucuuggagccugca

SEQ ID NO: 3153935 - RNA, 12 nt, Human
ucuuggagccug

SEQ ID NO: 3153936 - RNA, 15 nt, Human
ucuuggagccugcag

SEQ ID NO: 3153937 - RNA, 18 nt, Human
ucuuggagccugcagagc

SEQ ID NO: 3153938 - RNA, 19 nt, Human
ucuuggagccugcagagcu

SEQ ID NO: 3153939 - RNA, 22 nt, Human
agagaaugaaauugcugaaaga

SEQ ID NO: 3153940 - RNA, 14 nt, Human
agacuuaucaacau

SEQ ID NO: 3153941 - RNA, 18 nt, Human
ugaagguggaaauaaacu

SEQ ID NO: 3153942 - RNA, 19 nt, Human
agauaaucagugugucuaa

SEQ ID NO: 3153943 - RNA, 15 nt, Human
agaucaagagaucaa

SEQ ID NO: 3153944 - RNA, 22 nt, Human
ugaacuuguaaaggaauuuaaa

SEQ ID NO: 3153945 - RNA, 13 nt, Human
ucuuuguaaugaa

SEQ ID NO: 3153946 - RNA, 15 nt, Human
ucuuuguaaugaaaa

SEQ ID NO: 3153947 - RNA, 12 nt, Human
ucuuuguaauga

SEQ ID NO: 3153948 - RNA, 21 nt, Human
agaggcgcaugaauuugugaa

SEQ ID NO: 3153949 - RNA, 24 nt, Human
agaggcaccacuaaaagaucgcag

SEQ ID NO: 3153950 - RNA, 14 nt, Human
agauuuaugcauau

SEQ ID NO: 3153951 - RNA, 12 nt, Human
agauuuucagaa

SEQ ID NO: 3153952 - RNA, 17 nt, Human
agauuuucagaaaauau

SEQ ID NO: 3153953 - RNA, 18 nt, Human
ugacucacuuaucccaag

SEQ ID NO: 3153954 - RNA, 15 nt, Human
agauguguucacaau

SEQ ID NO: 3153955 - RNA, 18 nt, Human
agauguguucacaaugga

SEQ ID NO: 3153956 - RNA, 14 nt, Human
agaucgcaguuugc

SEQ ID NO: 3153957 - RNA, 15 nt, Human
agaucgcaguuugcc

SEQ ID NO: 3153958 - RNA, 12 nt, Human
agaucauuguga

SEQ ID NO: 3153959 - RNA, 21 nt, Human
agaucauugugaaauuauuca

SEQ ID NO: 3153960 - RNA, 17 nt, Human
ugacagguuugggaccc

SEQ ID NO: 3153961 - RNA, 15 nt, Human
agcagaaaucuagaa

SEQ ID NO: 3153962 - RNA, 16 nt, Human
ugagcuacaaaugcau

SEQ ID NO: 3153963 - RNA, 14 nt, Human
ugagcuaggaauug

SEQ ID NO: 3153964 - RNA, 13 nt, Human
ugagcuacaaaug

SEQ ID NO: 3153965 - RNA, 14 nt, Human
ugagcuacaaaugc

SEQ ID NO: 3153966 - RNA, 17 nt, Human
ugaggaagagggacugu

SEQ ID NO: 3153967 - RNA, 22 nt, Human
ugagggugacuauggagcugag

SEQ ID NO: 3153968 - RNA, 21 nt, Human
agcagauggaaugcuguguua

SEQ ID NO: 3153969 - RNA, 17 nt, Human
aguuuaaauuguaauag

SEQ ID NO: 3153970 - RNA, 20 nt, Human
aguuuaaauuguaauaggcg

SEQ ID NO: 3153971 - RNA, 13 nt, Human
aguuuacauugua

SEQ ID NO: 3153972 - RNA, 17 nt, Human
aguuuacauuguaaaua

SEQ ID NO: 3153973 - RNA, 15 nt, Human
aguuuacauuguaaa

SEQ ID NO: 3153974 - RNA, 12 nt, Human
uuaaaaugagaa

SEQ ID NO: 3153975 - RNA, 19 nt, Human
uuaaaaugagaaaucuaaa

SEQ ID NO: 3153976 - RNA, 15 nt, Human
aguuuguugaaacac

SEQ ID NO: 3153977 - RNA, 20 nt, Human
uuaaauuuugaguucuacau

SEQ ID NO: 3153978 - RNA, 15 nt, Human
uuaaauuuugaguuc

SEQ ID NO: 3153979 - RNA, 13 nt, Human
uuaaucuuuaauu

SEQ ID NO: 3153980 - RNA, 17 nt, Human
uuaaucuuuaauuuuac

SEQ ID NO: 3153981 - RNA, 22 nt, Human
uuaagacgaaacauuuguucua

SEQ ID NO: 3153982 - RNA, 15 nt, Human
aguuuuuuuuauaca

SEQ ID NO: 3153983 - RNA, 19 nt, Human
auaaaagccuguuuaagag

SEQ ID NO: 3153984 - RNA, 20 nt, Human
auaaaagccuguuuaagaga

SEQ ID NO: 3153985 - RNA, 19 nt, Human
uuaagacgaaacauuuguu

SEQ ID NO: 3153986 - RNA, 23 nt, Human
uuacuguacagacagaaaaaacu

SEQ ID NO: 3153987 - RNA, 13 nt, Human
uuacaguguuccg

SEQ ID NO: 3153988 - RNA, 14 nt, Human
uuaguaaucauauu

SEQ ID NO: 3153989 - RNA, 13 nt, Human
uuaguaaucauau

SEQ ID NO: 3153990 - RNA, 21 nt, Human
uuauaaaaauaaaaaacacug

SEQ ID NO: 3153991 - RNA, 22 nt, Human
uuauaaaaauaaaaaacacugg

SEQ ID NO: 3153992 - RNA, 15 nt, Human
uuauaaaaauaaaaa

SEQ ID NO: 3153993 - RNA, 19 nt, Human
uuaguacuccccuccuuga

SEQ ID NO: 3153994 - RNA, 23 nt, Human
auaauucacauuguauucagagu

SEQ ID NO: 3153995 - RNA, 19 nt, Human
auaauuuauacaggucaua

SEQ ID NO: 3153996 - RNA, 21 nt, Human
auaauuuauacaggucauauu

SEQ ID NO: 3153997 - RNA, 17 nt, Human
auaauucagaaggaucu

SEQ ID NO: 3153998 - RNA, 14 nt, Human
auaauuuuaaaugu

SEQ ID NO: 3153999 - RNA, 12 nt, Human
auaauuuuaaau

SEQ ID NO: 3154000 - RNA, 13 nt, Human
auaauuuuaaaug

SEQ ID NO: 3154001 - RNA, 18 nt, Human
auaaucacaacccuucag

SEQ ID NO: 3154002 - RNA, 23 nt, Human
auacgcaacauaauuaaauuuug

SEQ ID NO: 3154003 - RNA, 21 nt, Human
auacaggaugaugacuaugga

SEQ ID NO: 3154004 - RNA, 12 nt, Human
uuauaaacuuuu

SEQ ID NO: 3154005 - RNA, 16 nt, Human
uuauaaacuuuuuucu

SEQ ID NO: 3154006 - RNA, 22 nt, Human
uuauaaacuuuuuucuuacugu

SEQ ID NO: 3154007 - RNA, 20 nt, Human
uuaugauacuugaaaauuaa

SEQ ID NO: 3154008 - RNA, 20 nt, Human
uuaugaagcuuuuaugugaa

SEQ ID NO: 3154009 - RNA, 10 nt, Human
uuaugugugu

SEQ ID NO: 3154010 - RNA, 14 nt, Human
uuaugugugugugu

SEQ ID NO: 3154011 - RNA, 12 nt, Human
uuaugugugugu

SEQ ID NO: 3154012 - RNA, 22 nt, Human
uuaugugccagauuuaugcaua

SEQ ID NO: 3154013 - RNA, 15 nt, Human
uuaugugaaacaugu

SEQ ID NO: 3154014 - RNA, 13 nt, Human
uuaugugaaacau

SEQ ID NO: 3154015 - RNA, 14 nt, Human
uuauuauauuuaca

SEQ ID NO: 3154016 - RNA, 15 nt, Human
uuauuauauuuacaa

SEQ ID NO: 3154017 - RNA, 12 nt, Human
uuauucauaauu

SEQ ID NO: 3154018 - RNA, 22 nt, Human
auagaauaaaauuuuuaaucuu

SEQ ID NO: 3154019 - RNA, 14 nt, Human
auagaauaaaauuu

SEQ ID NO: 3154020 - RNA, 19 nt, Human
auagaauaaaauuuuuaau

SEQ ID NO: 3154021 - RNA, 13 nt, Human
auagaaguaaaaa

SEQ ID NO: 3154022 - RNA, 19 nt, Human
auagaaggcuauggggaua

SEQ ID NO: 3154023 - RNA, 18 nt, Human
auagauaggucagugcaa

SEQ ID NO: 3154024 - RNA, 19 nt, Human
auagaguguacuuaacuau

SEQ ID NO: 3154025 - RNA, 14 nt, Human
auagaguguacuua

SEQ ID NO: 3154026 - RNA, 21 nt, Human
auagaguguacuuaacuauuc

SEQ ID NO: 3154027 - RNA, 22 nt, Human
auagagcaaaauugauguguuu

SEQ ID NO: 3154028 - RNA, 21 nt, Human
auagagcaaaauugauguguu

SEQ ID NO: 3154029 - RNA, 17 nt, Human
auagagcaaaauugaug

SEQ ID NO: 3154030 - RNA, 15 nt, Human
auagagcaaaauuga

SEQ ID NO: 3154031 - RNA, 11 nt, Human
auagaugugug

SEQ ID NO: 3154032 - RNA, 13 nt, Human
auagaugugugga

SEQ ID NO: 3154033 - RNA, 12 nt, Human
auagaugugugg

SEQ ID NO: 3154034 - RNA, 14 nt, Human
auagauguguggac

SEQ ID NO: 3154035 - RNA, 14 nt, Human
aguauuugugggga

SEQ ID NO: 3154036 - RNA, 16 nt, Human
aguccaucagccucca

SEQ ID NO: 3154037 - RNA, 14 nt, Human
aggugugcaagaga

SEQ ID NO: 3154038 - RNA, 13 nt, Human
aguaauagagcaa

SEQ ID NO: 3154039 - RNA, 16 nt, Human
aguaaaaacaaagaaa

SEQ ID NO: 3154040 - RNA, 23 nt, Human
aguaaaaacaaagaaauuaugug

SEQ ID NO: 3154041 - RNA, 19 nt, Human
aguacauuuggagacacaa

SEQ ID NO: 3154042 - RNA, 19 nt, Human
aguaauucaagaaaacaac

SEQ ID NO: 3154043 - RNA, 18 nt, Human
uguauauccuuucuaaca

SEQ ID NO: 3154044 - RNA, 20 nt, Human
uguagugauuuuuaugccac

SEQ ID NO: 3154045 - RNA, 16 nt, Human
aguacauuuggagaca

SEQ ID NO: 3154046 - RNA, 16 nt, Human
agucuuucacauuuaa

SEQ ID NO: 3154047 - RNA, 21 nt, Human
ugugcucaggagcccugggag

SEQ ID NO: 3154048 - RNA, 19 nt, Human
ugugcucuccaagcccagu

SEQ ID NO: 3154049 - RNA, 14 nt, Human
ugugcucuccaagc

SEQ ID NO: 3154050 - RNA, 20 nt, Human
ugugcucaggagcccuggga

SEQ ID NO: 3154051 - RNA, 21 nt, Human
uguggaucaaauccagccugc

SEQ ID NO: 3154052 - RNA, 21 nt, Human
agugauuuuuaugccaccuga

SEQ ID NO: 3154053 - RNA, 16 nt, Human
agugauuuuuaugcca

SEQ ID NO: 3154054 - RNA, 20 nt, Human
agugauuuuuaugccaccug

SEQ ID NO: 3154055 - RNA, 14 nt, Human
agugaggaugucug

SEQ ID NO: 3154056 - RNA, 18 nt, Human
agugccaggauggaauga

SEQ ID NO: 3154057 - RNA, 18 nt, Human
aguguguguuuuucauaa

SEQ ID NO: 3154058 - RNA, 21 nt, Human
aguguucauaaauaaaguuug

SEQ ID NO: 3154059 - RNA, 21 nt, Human
aguguuccgugguuaaacucg

SEQ ID NO: 3154060 - RNA, 15 nt, Human
uguugcauagaauaa

SEQ ID NO: 3154061 - RNA, 9 nt, Human
aguguguaa

SEQ ID NO: 3154062 - RNA, 16 nt, Human
aguguggcaguuuggc

SEQ ID NO: 3154063 - RNA, 17 nt, Human
aguguggcaguuuggca

SEQ ID NO: 3154064 - RNA, 18 nt, Human
uguguguuguguguggga

SEQ ID NO: 3154065 - RNA, 22 nt, Human
ugugucuaaauuugaauguuaa

SEQ ID NO: 3154066 - RNA, 19 nt, Human
ugugucuaaauuugaaugu

SEQ ID NO: 3154067 - RNA, 14 nt, Human
uguguaaaauguga

SEQ ID NO: 3154068 - RNA, 16 nt, Human
agugggguagguuggg

SEQ ID NO: 3154069 - RNA, 21 nt, Human
aguggacuguucccugaggug

SEQ ID NO: 3154070 - RNA, 22 nt, Human
uguguuaaguauguguaaaaug

SEQ ID NO: 3154071 - RNA, 23 nt, Human
uguuaagcagauggaaugcugug

SEQ ID NO: 3154072 - RNA, 17 nt, Human
uguuacaaauuguagaa

SEQ ID NO: 3154073 - RNA, 18 nt, Human
uguuacaaauuguagaag

SEQ ID NO: 3154074 - RNA, 14 nt, Human
uguuacaaauugua

SEQ ID NO: 3154075 - RNA, 15 nt, Human
ugggagaaaugaaaa

SEQ ID NO: 3154076 - RNA, 14 nt, Human
ugggaggcucugga

SEQ ID NO: 3154077 - RNA, 17 nt, Human
ugggaggcucuggagcc

SEQ ID NO: 3154078 - RNA, 23 nt, Human
ugggaggcucuggagcccacugu

SEQ ID NO: 3154079 - RNA, 16 nt, Human
ugggagaaaugaaaaa

SEQ ID NO: 3154080 - RNA, 16 nt, Human
ugggauuuggucaaca

SEQ ID NO: 3154081 - RNA, 20 nt, Human
aggcugggucgcccuggacu

SEQ ID NO: 3154082 - RNA, 21 nt, Human
aggcugggucgcccuggacug

SEQ ID NO: 3154083 - RNA, 10 nt, Human
aggcuggguc

SEQ ID NO: 3154084 - RNA, 15 nt, Human
aggcugggucgcccu

SEQ ID NO: 3154085 - RNA, 18 nt, Human
aggcugggucgcccugga

SEQ ID NO: 3154086 - RNA, 15 nt, Human
aggcuuuuuuaucau

SEQ ID NO: 3154087 - RNA, 18 nt, Human
aggcuuuuuuaucaugug

SEQ ID NO: 3154088 - RNA, 21 nt, Human
aggcuuuuuuaucaugugaaa

SEQ ID NO: 3154089 - RNA, 18 nt, Human
ugggaaacaaaaggauaa

SEQ ID NO: 3154090 - RNA, 20 nt, Human
uggcuguggccuaaccugcc

SEQ ID NO: 3154091 - RNA, 17 nt, Human
uggcuguggcauccaga

SEQ ID NO: 3154092 - RNA, 16 nt, Human
uggcuguggagugugg

SEQ ID NO: 3154093 - RNA, 15 nt, Human
uggcugcagagcagu

SEQ ID NO: 3154094 - RNA, 18 nt, Human
uggcugcagagcaguggg

SEQ ID NO: 3154095 - RNA, 22 nt, Human
uggcugcagagcagugggccug

SEQ ID NO: 3154096 - RNA, 16 nt, Human
uggagcccacuguacu

SEQ ID NO: 3154097 - RNA, 19 nt, Human
uggagcccacuguacuugc

SEQ ID NO: 3154098 - RNA, 23 nt, Human
uggagcccacuguacuugcucuu

SEQ ID NO: 3154099 - RNA, 16 nt, Human
uggagccugcagagcu

SEQ ID NO: 3154100 - RNA, 11 nt, Human
uggagccugca

SEQ ID NO: 3154101 - RNA, 16 nt, Human
aggcagguccccagac

SEQ ID NO: 3154102 - RNA, 12 nt, Human
aggcaggucccc

SEQ ID NO: 3154103 - RNA, 13 nt, Human
aggcaggucccca

SEQ ID NO: 3154104 - RNA, 14 nt, Human
aggcagguccccag

SEQ ID NO: 3154105 - RNA, 15 nt, Human
aggcagguccccaga

SEQ ID NO: 3154106 - RNA, 11 nt, Human
aggcagguccc

SEQ ID NO: 3154107 - RNA, 20 nt, Human
aggcaggaguuucguuuuca

SEQ ID NO: 3154108 - RNA, 14 nt, Human
uggaauuugaaaca

SEQ ID NO: 3154109 - RNA, 21 nt, Human
uggaacaagaugguucuagca

SEQ ID NO: 3154110 - RNA, 19 nt, Human
aggaguuucguuuucaaaa

SEQ ID NO: 3154111 - RNA, 14 nt, Human
uggaaguguggguc

SEQ ID NO: 3154112 - RNA, 13 nt, Human
uggaagugugggu

SEQ ID NO: 3154113 - RNA, 14 nt, Human
uggaagugcuaauu

SEQ ID NO: 3154114 - RNA, 20 nt, Human
uggaagugugggucugugug

SEQ ID NO: 3154115 - RNA, 18 nt, Human
aggcucagaggguguccu

SEQ ID NO: 3154116 - RNA, 19 nt, Human
aggcucagaggguguccug

SEQ ID NO: 3154117 - RNA, 20 nt, Human
aggcucagaggguguccugc

SEQ ID NO: 3154118 - RNA, 18 nt, Human
aggcgaagcguuguccuc

SEQ ID NO: 3154119 - RNA, 14 nt, Human
aggccauucuuucc

SEQ ID NO: 3154120 - RNA, 22 nt, Human
uggcacagccuggcuguggccu

SEQ ID NO: 3154121 - RNA, 21 nt, Human
uggcauccagagucccugccu

SEQ ID NO: 3154122 - RNA, 22 nt, Human
uggcauccagagucccugccug

SEQ ID NO: 3154123 - RNA, 20 nt, Human
uggcauccagagucccugcc

SEQ ID NO: 3154124 - RNA, 16 nt, Human
aggccugacucucagc

SEQ ID NO: 3154125 - RNA, 19 nt, Human
ugcucugugcccacccucc

SEQ ID NO: 3154126 - RNA, 22 nt, Human
aggaauuuuauuuuuuucugaa

SEQ ID NO: 3154127 - RNA, 20 nt, Human
aggaauuuuauuuuuuucug

SEQ ID NO: 3154128 - RNA, 23 nt, Human
aggaaaccaguuaggucucaaua

SEQ ID NO: 3154129 - RNA, 19 nt, Human
ugccucucugcaggucccu

SEQ ID NO: 3154130 - RNA, 20 nt, Human
ugccucucugcaggucccua

SEQ ID NO: 3154131 - RNA, 16 nt, Human
ugccucucugcagguc

SEQ ID NO: 3154132 - RNA, 18 nt, Human
ugccucucugcagguccc

SEQ ID NO: 3154133 - RNA, 17 nt, Human
agcuggggccaggcugg

SEQ ID NO: 3154134 - RNA, 15 nt, Human
agcuggggaugucuc

SEQ ID NO: 3154135 - RNA, 20 nt, Human
agcuggggccaggcuggguc

SEQ ID NO: 3154136 - RNA, 17 nt, Human
ugccuugucacgccaga

SEQ ID NO: 3154137 - RNA, 19 nt, Human
ugccuugugaaggaauuau

SEQ ID NO: 3154138 - RNA, 20 nt, Human
agcggcuggaauuggguggg

SEQ ID NO: 3154139 - RNA, 19 nt, Human
agcuacuaauuuuaaaaug

SEQ ID NO: 3154140 - RNA, 17 nt, Human
ugcaggucccuaauaaa

SEQ ID NO: 3154141 - RNA, 18 nt, Human
ugcaggucccuaauaaag

SEQ ID NO: 3154142 - RNA, 19 nt, Human
ugcaggucccuaauaaagc

SEQ ID NO: 3154143 - RNA, 20 nt, Human
ugcaggucccuaauaaagcu

SEQ ID NO: 3154144 - RNA, 15 nt, Human
ugcauaauggucaga

SEQ ID NO: 3154145 - RNA, 19 nt, Human
agccugacccucaucuuuc

SEQ ID NO: 3154146 - RNA, 19 nt, Human
agccugcaauuucauaugc

SEQ ID NO: 3154147 - RNA, 21 nt, Human
agccugcaauuucauaugcug

SEQ ID NO: 3154148 - RNA, 12 nt, Human
agccugcagagc

SEQ ID NO: 3154149 - RNA, 13 nt, Human
agccugcagagcu

SEQ ID NO: 3154150 - RNA, 14 nt, Human
agccugcagagcug

SEQ ID NO: 3154151 - RNA, 15 nt, Human
agccugcagagcugc

SEQ ID NO: 3154152 - RNA, 18 nt, Human
agccugccacucaggccc

SEQ ID NO: 3154153 - RNA, 18 nt, Human
auucuagcuaauguaaua

SEQ ID NO: 3154154 - RNA, 15 nt, Human
auucuagcuaaugua

SEQ ID NO: 3154155 - RNA, 17 nt, Human
auuauauuuacaaaugg

SEQ ID NO: 3154156 - RNA, 14 nt, Human
auuauauuaugaag

SEQ ID NO: 3154157 - RNA, 15 nt, Human
auuauuauuuggccc

SEQ ID NO: 3154158 - RNA, 17 nt, Human
auuauuuuguucauaca

SEQ ID NO: 3154159 - RNA, 18 nt, Human
auuauuuuguucauacau

SEQ ID NO: 3154160 - RNA, 19 nt, Human
auuauuuuguucauacaua

SEQ ID NO: 3154161 - RNA, 15 nt, Human
auuauuuuguucaua

SEQ ID NO: 3154162 - RNA, 16 nt, Human
auuauuuuguucauac

SEQ ID NO: 3154163 - RNA, 14 nt, Human
auucuaaauuuuau

SEQ ID NO: 3154164 - RNA, 12 nt, Human
auuccagaggaa

SEQ ID NO: 3154165 - RNA, 18 nt, Human
auucagaaggaucuucau

SEQ ID NO: 3154166 - RNA, 13 nt, Human
auucacauuguau

SEQ ID NO: 3154167 - RNA, 20 nt, Human
auucacauuguauucagagu

SEQ ID NO: 3154168 - RNA, 24 nt, Human
auucagaaggaucuucaucugacu

SEQ ID NO: 3154169 - RNA, 14 nt, Human
auuuucuauaauuu

SEQ ID NO: 3154170 - RNA, 15 nt, Human
auuuucuauaauuua

SEQ ID NO: 3154171 - RNA, 15 nt, Human
auuuuaauaaacacu

SEQ ID NO: 3154172 - RNA, 16 nt, Human
auuuuaauaaacacuc

SEQ ID NO: 3154173 - RNA, 17 nt, Human
auuuuaauaaacacucu

SEQ ID NO: 3154174 - RNA, 15 nt, Human
auuuugcccuugaca

SEQ ID NO: 3154175 - RNA, 23 nt, Human
auuuugcccuugacaaagucaag

SEQ ID NO: 3154176 - RNA, 12 nt, Human
auuuuguucaua

SEQ ID NO: 3154177 - RNA, 17 nt, Human
auuuuguguuuaggaac

SEQ ID NO: 3154178 - RNA, 14 nt, Human
auuuuguucauaca

SEQ ID NO: 3154179 - RNA, 15 nt, Human
auuuuguucauacau

SEQ ID NO: 3154180 - RNA, 16 nt, Human
auuuuguucauacaua

SEQ ID NO: 3154181 - RNA, 18 nt, Human
auuuuguucauacauauu

SEQ ID NO: 3154182 - RNA, 22 nt, Human
auuuuugugauuuugugauuga

SEQ ID NO: 3154183 - RNA, 20 nt, Human
auuuuuguagcacugacaga

SEQ ID NO: 3154184 - RNA, 21 nt, Human
auuuuuguagcacugacagau

SEQ ID NO: 3154185 - RNA, 12 nt, Human
auuuuugacaga

SEQ ID NO: 3154186 - RNA, 13 nt, Human
auuuuugacagaa

SEQ ID NO: 3154187 - RNA, 14 nt, Human
auuuuugacagaau

SEQ ID NO: 3154188 - RNA, 15 nt, Human
auuuuugacagaaua

SEQ ID NO: 3154189 - RNA, 22 nt, Human
auuuuugacagaauauguuuca

SEQ ID NO: 3154190 - RNA, 15 nt, Human
auuuuuccaaaauaa

SEQ ID NO: 3154191 - RNA, 12 nt, Human
auuuuucucaug

SEQ ID NO: 3154192 - RNA, 18 nt, Human
auuuuucacauaucuagu

SEQ ID NO: 3154193 - RNA, 21 nt, Human
auuuuucacauaucuaguaug

SEQ ID NO: 3154194 - RNA, 15 nt, Human
auuuuucacauaucu

SEQ ID NO: 3154195 - RNA, 16 nt, Human
auuguacgaagaguau

SEQ ID NO: 3154196 - RNA, 19 nt, Human
auuggacaguaaaauccac

SEQ ID NO: 3154197 - RNA, 18 nt, Human
auugcuuuggucauauga

SEQ ID NO: 3154198 - RNA, 14 nt, Human
auugcuuuggucau

SEQ ID NO: 3154199 - RNA, 23 nt, Human
auuggguggggggcuucauacac

SEQ ID NO: 3154200 - RNA, 22 nt, Human
auuggguggggggcuucauaca

SEQ ID NO: 3154201 - RNA, 19 nt, Human
auuggauucugagagcugu

SEQ ID NO: 3154202 - RNA, 22 nt, Human
auuggauucugagagcugugca

SEQ ID NO: 3154203 - RNA, 18 nt, Human
auuugugaagguggaaau

SEQ ID NO: 3154204 - RNA, 21 nt, Human
auuugugaagguggaaauaaa

SEQ ID NO: 3154205 - RNA, 20 nt, Human
auuuuaaaagauaaauauua

SEQ ID NO: 3154206 - RNA, 20 nt, Human
auuuuaaaagaugcaaugua

SEQ ID NO: 3154207 - RNA, 18 nt, Human
auuuguaaauuuauguga

SEQ ID NO: 3154208 - RNA, 19 nt, Human
auuuguaaauuuaugugau

SEQ ID NO: 3154209 - RNA, 16 nt, Human
auuucccuuccuuccu

SEQ ID NO: 3154210 - RNA, 17 nt, Human
auuucccugaaggaacc

SEQ ID NO: 3154211 - RNA, 23 nt, Human
auuucccugaaggaaccaaagcg

SEQ ID NO: 3154212 - RNA, 18 nt, Human
auuugaaacacuuugcau

SEQ ID NO: 3154213 - RNA, 21 nt, Human
augaauauuuaguguucauaa

SEQ ID NO: 3154214 - RNA, 23 nt, Human
uuggggacaggggcaggaggaag

SEQ ID NO: 3154215 - RNA, 21 nt, Human
augaaauuauauaaguauucu

SEQ ID NO: 3154216 - RNA, 19 nt, Human
augaaauuauauaaguauu

SEQ ID NO: 3154217 - RNA, 16 nt, Human
augaauauuuaguguu

SEQ ID NO: 3154218 - RNA, 20 nt, Human
uuggagacacaacuauuuuu

SEQ ID NO: 3154219 - RNA, 18 nt, Human
uuggagacacaacuauuu

SEQ ID NO: 3154220 - RNA, 12 nt, Human
aucuguuuacag

SEQ ID NO: 3154221 - RNA, 15 nt, Human
aucuguuuacagugu

SEQ ID NO: 3154222 - RNA, 17 nt, Human
aucuguuuacaguguuc

SEQ ID NO: 3154223 - RNA, 18 nt, Human
aucuuguagcuuuaucaa

SEQ ID NO: 3154224 - RNA, 19 nt, Human
aucuuguagcuuuaucaaa

SEQ ID NO: 3154225 - RNA, 20 nt, Human
aucuuguagcuuuaucaaag

SEQ ID NO: 3154226 - RNA, 22 nt, Human
uugauuaagaucucagugguua

SEQ ID NO: 3154227 - RNA, 12 nt, Human
aucuagaagacu

SEQ ID NO: 3154228 - RNA, 16 nt, Human
uugagauguguucaca

SEQ ID NO: 3154229 - RNA, 20 nt, Human
uugacagaauauguuucaaa

SEQ ID NO: 3154230 - RNA, 17 nt, Human
uugacagaauauguuuc

SEQ ID NO: 3154231 - RNA, 19 nt, Human
auccauagcaccuccacau

SEQ ID NO: 3154232 - RNA, 18 nt, Human
auccaagcaaaugugaau

SEQ ID NO: 3154233 - RNA, 20 nt, Human
aucauuuuaccuuugacaaa

SEQ ID NO: 3154234 - RNA, 13 nt, Human
uucugccaggaga

SEQ ID NO: 3154235 - RNA, 23 nt, Human
uucuuaaccagaucauugugaaa

SEQ ID NO: 3154236 - RNA, 15 nt, Human
uucuuuguaaugaaa

SEQ ID NO: 3154237 - RNA, 17 nt, Human
uugaaauuguauuacaa

SEQ ID NO: 3154238 - RNA, 14 nt, Human
auccuacccccugu

SEQ ID NO: 3154239 - RNA, 16 nt, Human
auccuacccccugugc

SEQ ID NO: 3154240 - RNA, 12 nt, Human
auauuuuucaca

SEQ ID NO: 3154241 - RNA, 13 nt, Human
auauuuuucacau

SEQ ID NO: 3154242 - RNA, 14 nt, Human
auauuuuucacaua

SEQ ID NO: 3154243 - RNA, 15 nt, Human
auauuuuucacauau

SEQ ID NO: 3154244 - RNA, 19 nt, Human
uuccguagguuauuuucag

SEQ ID NO: 3154245 - RNA, 14 nt, Human
uucuagcauggcau

SEQ ID NO: 3154246 - RNA, 15 nt, Human
uucuagcauggcaua

SEQ ID NO: 3154247 - RNA, 18 nt, Human
uucuagcauggcauauuu

SEQ ID NO: 3154248 - RNA, 20 nt, Human
uucuagcauggcauauuuuu

SEQ ID NO: 3154249 - RNA, 21 nt, Human
uucuagcauggcauauuuuuc

SEQ ID NO: 3154250 - RNA, 17 nt, Human
uucuagcuaauguaaua

SEQ ID NO: 3154251 - RNA, 22 nt, Human
uucuagcauggcauauuuuuca

SEQ ID NO: 3154252 - RNA, 14 nt, Human
uucuaaauuuuaua

SEQ ID NO: 3154253 - RNA, 16 nt, Human
aucaggccauuguccc

SEQ ID NO: 3154254 - RNA, 13 nt, Human
aucaggccauugu

SEQ ID NO: 3154255 - RNA, 17 nt, Human
augauaaguaaaugcua

SEQ ID NO: 3154256 - RNA, 20 nt, Human
uuguguuaaguauguguaaa

SEQ ID NO: 3154257 - RNA, 21 nt, Human
augauacuugaaaauuaacau

SEQ ID NO: 3154258 - RNA, 17 nt, Human
augauacuugaaaauua

SEQ ID NO: 3154259 - RNA, 22 nt, Human
augcagauuuugcccuugacaa

SEQ ID NO: 3154260 - RNA, 18 nt, Human
augcuagguuaauuccaa

SEQ ID NO: 3154261 - RNA, 21 nt, Human
uuuaucaaagggugaaaauua

SEQ ID NO: 3154262 - RNA, 17 nt, Human
uuuaucaugugaaauca

SEQ ID NO: 3154263 - RNA, 18 nt, Human
uuuaucaugugaaaucau

SEQ ID NO: 3154264 - RNA, 22 nt, Human
uuucaaaauuguuacaaauugu

SEQ ID NO: 3154265 - RNA, 20 nt, Human
uuuauuuuguguuuaggaac

SEQ ID NO: 3154266 - RNA, 16 nt, Human
uuuauuuuguguuuag

SEQ ID NO: 3154267 - RNA, 18 nt, Human
auggcauauuuuucacau

SEQ ID NO: 3154268 - RNA, 20 nt, Human
auggcauauuuuucacauau

SEQ ID NO: 3154269 - RNA, 21 nt, Human
auggcauauuuuucacauauc

SEQ ID NO: 3154270 - RNA, 22 nt, Human
auggcauauuuuucacauaucu

SEQ ID NO: 3154271 - RNA, 23 nt, Human
auggcauauuuuucacauaucua

SEQ ID NO: 3154272 - RNA, 14 nt, Human
uuucaaacuuugga

SEQ ID NO: 3154273 - RNA, 20 nt, Human
auggggauagauguguggac

SEQ ID NO: 3154274 - RNA, 16 nt, Human
augguucucaggccug

SEQ ID NO: 3154275 - RNA, 13 nt, Human
augguuguacaua

SEQ ID NO: 3154276 - RNA, 17 nt, Human
auguacauguacugauu

SEQ ID NO: 3154277 - RNA, 19 nt, Human
augguguucaaaaaacuug

SEQ ID NO: 3154278 - RNA, 23 nt, Human
uuuggcaaacucuccaccacacg

SEQ ID NO: 3154279 - RNA, 19 nt, Human
auguagaggggaaaagaga

SEQ ID NO: 3154280 - RNA, 22 nt, Human
uuugacagaauauguuucaaac

SEQ ID NO: 3154281 - RNA, 19 nt, Human
auguagccccucuccugga

SEQ ID NO: 3154282 - RNA, 16 nt, Human
augucaguauguggaa

SEQ ID NO: 3154283 - RNA, 15 nt, Human
auguaugcuucauac

SEQ ID NO: 3154284 - RNA, 14 nt, Human
auguaugcuucaua

SEQ ID NO: 3154285 - RNA, 12 nt, Human
uuuguauaaaag

SEQ ID NO: 3154286 - RNA, 13 nt, Human
uuuguaaugaaaa

SEQ ID NO: 3154287 - RNA, 14 nt, Human
uuuguaaugaaaac

SEQ ID NO: 3154288 - RNA, 20 nt, Human
uuugugaagguggaaauaaa

SEQ ID NO: 3154289 - RNA, 12 nt, Human
augugacucuuu

SEQ ID NO: 3154290 - RNA, 16 nt, Human
augugacucuuuccaa

SEQ ID NO: 3154291 - RNA, 21 nt, Human
augugacucuuuccaaccggc

SEQ ID NO: 3154292 - RNA, 18 nt, Human
auaaaggauuaaugucaa

SEQ ID NO: 3154293 - RNA, 14 nt, Human
auaaaaauauugug

SEQ ID NO: 3154294 - RNA, 20 nt, Human
auaaacuuuuuucuuacugu

SEQ ID NO: 3154295 - RNA, 15 nt, Human
auaaagcaggcagaa

SEQ ID NO: 3154296 - RNA, 18 nt, Human
auaaagcuguguggcagu

SEQ ID NO: 3154297 - RNA, 20 nt, Human
auaauuaaauuuugaguucu

SEQ ID NO: 3154298 - RNA, 15 nt, Human
auagguuuaauaauu

SEQ ID NO: 3154299 - RNA, 21 nt, Human
auaguauuugagaguucuaaa

SEQ ID NO: 3154300 - RNA, 20 nt, Human
auaguauuugagaguucuaa

SEQ ID NO: 3154301 - RNA, 23 nt, Human
auaguauuugagaguucuaaauu

SEQ ID NO: 3154302 - RNA, 23 nt, Human
auauuaugaagcuuuuaugugaa

SEQ ID NO: 3154303 - RNA, 16 nt, Human
auaucaaauauauuca

SEQ ID NO: 3154304 - RNA, 12 nt, Human
aguccuguaaug

SEQ ID NO: 3154305 - RNA, 14 nt, Human
aguaugaaauuaua

SEQ ID NO: 3154306 - RNA, 16 nt, Human
aguaucuuuuuauuca

SEQ ID NO: 3154307 - RNA, 16 nt, Human
aguaugaaauuauaua

SEQ ID NO: 3154308 - RNA, 23 nt, Human
aguugaaaaucuuauaauuuaaa

SEQ ID NO: 3154309 - RNA, 22 nt, Human
aguugaaaaucuuauaauuuaa

SEQ ID NO: 3154310 - RNA, 15 nt, Human
aguucauacauugua

SEQ ID NO: 3154311 - RNA, 18 nt, Human
aguucauaaauuuauggu

SEQ ID NO: 3154312 - RNA, 10 nt, Human
aguucauaca

SEQ ID NO: 3154313 - RNA, 11 nt, Human
aguucauacau

SEQ ID NO: 3154314 - RNA, 16 nt, Human
aguggcuggaucugug

SEQ ID NO: 3154315 - RNA, 16 nt, Human
auggcuguggagugug

SEQ ID NO: 3154316 - RNA, 21 nt, Human
augcauagguuuagcaguaua

SEQ ID NO: 3154317 - RNA, 17 nt, Human
augcauagguuuagcag

SEQ ID NO: 3154318 - RNA, 16 nt, Human
augcauauuauuuuau

SEQ ID NO: 3154319 - RNA, 20 nt, Human
auguauucuagcuaauguaa

SEQ ID NO: 3154320 - RNA, 19 nt, Human
auguauucuagcuaaugua

SEQ ID NO: 3154321 - RNA, 15 nt, Human
augugaaacauguuu

SEQ ID NO: 3154322 - RNA, 14 nt, Human
auguuucaaacuuu

SEQ ID NO: 3154323 - RNA, 17 nt, Human
auguuucaaacuuugga

SEQ ID NO: 3154324 - RNA, 12 nt, Human
auguuucaaacu

SEQ ID NO: 3154325 - RNA, 13 nt, Human
auguuucaaacuu

SEQ ID NO: 3154326 - RNA, 18 nt, Human
auccagaaagaaaacuug

SEQ ID NO: 3154327 - RNA, 16 nt, Human
auccagaaagaaaacu

SEQ ID NO: 3154328 - RNA, 15 nt, Human
aucaugugaaaucau

SEQ ID NO: 3154329 - RNA, 14 nt, Human
aucaugugaaauca

SEQ ID NO: 3154330 - RNA, 16 nt, Human
aucaugugaaaucauu

SEQ ID NO: 3154331 - RNA, 14 nt, Human
aucagccugugcca

SEQ ID NO: 3154332 - RNA, 19 nt, Human
augagcuccuuaaggcucu

SEQ ID NO: 3154333 - RNA, 21 nt, Human
augaagcuuuuaugugaaaca

SEQ ID NO: 3154334 - RNA, 23 nt, Human
augaaaaaauauauaucaaauau

SEQ ID NO: 3154335 - RNA, 19 nt, Human
augaaguuuuuuuuauaca

SEQ ID NO: 3154336 - RNA, 22 nt, Human
augaagcuuuuaugugaaacau

SEQ ID NO: 3154337 - RNA, 18 nt, Human
aucuugaauaauguaaga

SEQ ID NO: 3154338 - RNA, 17 nt, Human
agguggaauuauuuuaa

SEQ ID NO: 3154339 - RNA, 21 nt, Human
agguggaauuauuuuaaaaga

SEQ ID NO: 3154340 - RNA, 13 nt, Human
aggucccuaauaa

SEQ ID NO: 3154341 - RNA, 15 nt, Human
aggucccuaauaaag

SEQ ID NO: 3154342 - RNA, 20 nt, Human
agguaaaagcaucacaugaa

SEQ ID NO: 3154343 - RNA, 18 nt, Human
agguaaaucagacuauga

SEQ ID NO: 3154344 - RNA, 12 nt, Human
aggucccuaaua

SEQ ID NO: 3154345 - RNA, 11 nt, Human
aggucccuaau

SEQ ID NO: 3154346 - RNA, 23 nt, Human
agguaaaucagacuaugaaguuu

SEQ ID NO: 3154347 - RNA, 23 nt, Human
aggcuacuguaaggcaaucaugg

SEQ ID NO: 3154348 - RNA, 21 nt, Human
aggagucccugccaucauguu

SEQ ID NO: 3154349 - RNA, 21 nt, Human
agcuuuucccuuuuuuuaagu

SEQ ID NO: 3154350 - RNA, 22 nt, Human
agcuccuuaaggcucuuuugua

SEQ ID NO: 3154351 - RNA, 18 nt, Human
agcuccuuaaggcucuuu

SEQ ID NO: 3154352 - RNA, 14 nt, Human
agcugagcaggugu

SEQ ID NO: 3154353 - RNA, 14 nt, Human
agcugcuccccacg

SEQ ID NO: 3154354 - RNA, 17 nt, Human
agcugcuccccacguca

SEQ ID NO: 3154355 - RNA, 21 nt, Human
agcuucuggugaccuuccaag

SEQ ID NO: 3154356 - RNA, 22 nt, Human
agcuucuggugaccuuccaaga

SEQ ID NO: 3154357 - RNA, 20 nt, Human
agaggacaguauuugugggg

SEQ ID NO: 3154358 - RNA, 17 nt, Human
agagggaugcauggaga

SEQ ID NO: 3154359 - RNA, 18 nt, Human
agcagugggccuggccag

SEQ ID NO: 3154360 - RNA, 18 nt, Human
agcacugacagauuucca

SEQ ID NO: 3154361 - RNA, 13 nt, Human
agcacugacagau

SEQ ID NO: 3154362 - RNA, 14 nt, Human
agcacugacagauu

SEQ ID NO: 3154363 - RNA, 14 nt, Human
agccgggagccuga

SEQ ID NO: 3154364 - RNA, 21 nt, Human
acaggaugaugacuauggaaa

SEQ ID NO: 3154365 - RNA, 17 nt, Human
acagccaacuauggccu

SEQ ID NO: 3154366 - RNA, 19 nt, Human
acagccaacuauggccugu

SEQ ID NO: 3154367 - RNA, 11 nt, Human
acacugccagc

SEQ ID NO: 3154368 - RNA, 19 nt, Human
acauguuucuuuguaauga

SEQ ID NO: 3154369 - RNA, 22 nt, Human
acauguuucuuuguaaugaaaa

SEQ ID NO: 3154370 - RNA, 19 nt, Human
acauuuguucuauagcuuu

SEQ ID NO: 3154371 - RNA, 13 nt, Human
accagaucauugu

SEQ ID NO: 3154372 - RNA, 13 nt, Human
acccccugugccu

SEQ ID NO: 3154373 - RNA, 22 nt, Human
acuuuauuuucuauaauuuaaa

SEQ ID NO: 3154374 - RNA, 22 nt, Human
acuuuaucuugaauaauguaag

SEQ ID NO: 3154375 - RNA, 12 nt, Human
acuuuuaugaua

SEQ ID NO: 3154376 - RNA, 16 nt, Human
acuuuuaugauacuug

SEQ ID NO: 3154377 - RNA, 14 nt, Human
agaaaauaacaaua

SEQ ID NO: 3154378 - RNA, 23 nt, Human
acuuuuaugauacuugaaaauua

SEQ ID NO: 3154379 - RNA, 20 nt, Human
acuuuauacccagaaaguua

SEQ ID NO: 3154380 - RNA, 22 nt, Human
acuuuauacccagaaaguuauu

SEQ ID NO: 3154381 - RNA, 11 nt, Human
agaaaguuauu

SEQ ID NO: 3154382 - RNA, 23 nt, Human
agaaaguuauugauaaguucaua

SEQ ID NO: 3154383 - RNA, 16 nt, Human
agaaaggauaaaguug

SEQ ID NO: 3154384 - RNA, 22 nt, Human
acugugaaguuuacauuguaaa

SEQ ID NO: 3154385 - RNA, 18 nt, Human
acugguaggaaacuaggu

SEQ ID NO: 3154386 - RNA, 12 nt, Human
acugccagcauu

SEQ ID NO: 3154387 - RNA, 21 nt, Human
acucauaaaaagccugcaauu

SEQ ID NO: 3154388 - RNA, 21 nt, Human
acucagcccucauuggcucuu

SEQ ID NO: 3154389 - RNA, 17 nt, Human
acucagcccucauuggc

SEQ ID NO: 3154390 - RNA, 22 nt, Human
acuauucaggagaguagaacag

SEQ ID NO: 3154391 - RNA, 16 nt, Human
accugccgagagucca

SEQ ID NO: 3154392 - RNA, 23 nt, Human
accugccgagaguccaucagccu

SEQ ID NO: 3154393 - RNA, 14 nt, Human
aaaauugauguguu

SEQ ID NO: 3154394 - RNA, 12 nt, Human
aaaauugaugug

SEQ ID NO: 3154395 - RNA, 21 nt, Human
aaaauugaugggauuugguca

SEQ ID NO: 3154396 - RNA, 21 nt, Human
aaaauugauguguuuauuuau

SEQ ID NO: 3154397 - RNA, 24 nt, Human
aaacacucaguuguucaauaauaa

SEQ ID NO: 3154398 - RNA, 21 nt, Human
aaacacugggagaaaugaaaa

SEQ ID NO: 3154399 - RNA, 22 nt, Human
aaacacugggagaaaugaaaaa

SEQ ID NO: 3154400 - RNA, 17 nt, Human
aaaaucaguuguacagu

SEQ ID NO: 3154401 - RNA, 15 nt, Human
aaagaaauauaccua

SEQ ID NO: 3154402 - RNA, 17 nt, Human
aaagaaauauaccuaaa

SEQ ID NO: 3154403 - RNA, 15 nt, Human
aaagccaaugugaac

SEQ ID NO: 3154404 - RNA, 17 nt, Human
aaagccaaugugaacag

SEQ ID NO: 3154405 - RNA, 22 nt, Human
aacuuuauacccagaaaguuau

SEQ ID NO: 3154406 - RNA, 23 nt, Human
aacuuuauacccagaaaguuauu

SEQ ID NO: 3154407 - RNA, 17 nt, Human
aaaucuuauaauuuaaa

SEQ ID NO: 3154408 - RNA, 15 nt, Human
aaaugccuuuguacu

SEQ ID NO: 3154409 - RNA, 22 nt, Human
aaccacuggaaaguuuaugguu

SEQ ID NO: 3154410 - RNA, 18 nt, Human
aaccaccagaagcccaga

SEQ ID NO: 3154411 - RNA, 19 nt, Human
aaccaccagaagcccagaa

SEQ ID NO: 3154412 - RNA, 20 nt, Human
aagcagauggaaugcugugu

SEQ ID NO: 3154413 - RNA, 19 nt, Human
aagcagauggaaugcugug

SEQ ID NO: 3154414 - RNA, 17 nt, Human
aagcagauggaaugcug

SEQ ID NO: 3154415 - RNA, 21 nt, Human
aagcugugugcucuccaagcc

SEQ ID NO: 3154416 - RNA, 18 nt, Human
aagcuguguggcagucug

SEQ ID NO: 3154417 - RNA, 17 nt, Human
aaguaguguaucacagu

SEQ ID NO: 3154418 - RNA, 14 nt, Human
aagucuccaaaguc

SEQ ID NO: 3154419 - RNA, 20 nt, Human
aaggugaggagcuugaaacc

SEQ ID NO: 3154420 - RNA, 15 nt, Human
aagucuccaaagucu

SEQ ID NO: 3154421 - RNA, 13 nt, Human
aauccagccugcu

SEQ ID NO: 3154422 - RNA, 17 nt, Human
aauccaagcaaauguga

SEQ ID NO: 3154423 - RNA, 18 nt, Human
aauccaagcaaaugugaa

SEQ ID NO: 3154424 - RNA, 15 nt, Human
aaucaccaaaggcuc

SEQ ID NO: 3154425 - RNA, 13 nt, Human
aauauguuucaaa

SEQ ID NO: 3154426 - RNA, 15 nt, Human
aauauguuucaaacu

SEQ ID NO: 3154427 - RNA, 16 nt, Human
aauauguuucaaacuu

SEQ ID NO: 3154428 - RNA, 17 nt, Human
aauauguuucaaacuuu

SEQ ID NO: 3154429 - RNA, 16 nt, Human
aauauauaucaaauau

SEQ ID NO: 3154430 - RNA, 15 nt, Human
aaugucaguaugugg

SEQ ID NO: 3154431 - RNA, 13 nt, Human
aaugucaguaugu

SEQ ID NO: 3154432 - RNA, 21 nt, Human
aaugcuagguuaauuccaauu

SEQ ID NO: 3154433 - RNA, 19 nt, Human
aaugcuagguuaauuccaa

SEQ ID NO: 3154434 - RNA, 18 nt, Human
aaugcuagguuaauucca

SEQ ID NO: 3154435 - RNA, 22 nt, Human
aauguuuuuuuuuaaagacuuu

SEQ ID NO: 3154436 - RNA, 15 nt, Human
aauguuuuuuuuuaa

SEQ ID NO: 3154437 - RNA, 20 nt, Human
aauguuuuuuuuuaaagacu

SEQ ID NO: 3154438 - RNA, 21 nt, Human
cacaaauucugucucuggauu

SEQ ID NO: 3154439 - RNA, 19 nt, Human
cacaacuauuuuuccaaaa

SEQ ID NO: 3154440 - RNA, 14 nt, Human
cacaacuauuuuuc

SEQ ID NO: 3154441 - RNA, 23 nt, Human
cacauaucuaguaugaaauuaua

SEQ ID NO: 3154442 - RNA, 20 nt, Human
caccaagccuggucagccca

SEQ ID NO: 3154443 - RNA, 21 nt, Human
caccaagccuggucagcccaa

SEQ ID NO: 3154444 - RNA, 19 nt, Human
caccaagccuggucagccc

SEQ ID NO: 3154445 - RNA, 18 nt, Human
cacauuggagauguuuag

SEQ ID NO: 3154446 - RNA, 22 nt, Human
caccaagccuggucagcccaaa

SEQ ID NO: 3154447 - RNA, 22 nt, Human
cacauggugacuuuugaaaaga

SEQ ID NO: 3154448 - RNA, 20 nt, Human
caaggaaaaaauaacaauga

SEQ ID NO: 3154449 - RNA, 17 nt, Human
caagcacuaaacaaaga

SEQ ID NO: 3154450 - RNA, 15 nt, Human
caaauucugucucug

SEQ ID NO: 3154451 - RNA, 12 nt, Human
caacuuuauacc

SEQ ID NO: 3154452 - RNA, 18 nt, Human
caagaaaacaacuucaau

SEQ ID NO: 3154453 - RNA, 12 nt, Human
caacuuuguaua

SEQ ID NO: 3154454 - RNA, 11 nt, Human
caacuuuguau

SEQ ID NO: 3154455 - RNA, 23 nt, Human
caaaaaaauauauuuaaugauaa

SEQ ID NO: 3154456 - RNA, 12 nt, Human
caaauauauuca

SEQ ID NO: 3154457 - RNA, 16 nt, Human
caccccgacuuuuguu

SEQ ID NO: 3154458 - RNA, 16 nt, Human
caccagaagcccagaa

SEQ ID NO: 3154459 - RNA, 17 nt, Human
caccagaagcccagaau

SEQ ID NO: 3154460 - RNA, 13 nt, Human
caccagaagccca

SEQ ID NO: 3154461 - RNA, 14 nt, Human
caccagaagcccag

SEQ ID NO: 3154462 - RNA, 15 nt, Human
caccagaagcccaga

SEQ ID NO: 3154463 - RNA, 16 nt, Human
cuaagauaguaacaau

SEQ ID NO: 3154464 - RNA, 15 nt, Human
cuaaauuuuauaucu

SEQ ID NO: 3154465 - RNA, 16 nt, Human
cuaaauuuuauaucuu

SEQ ID NO: 3154466 - RNA, 13 nt, Human
cuaaauuuuauau

SEQ ID NO: 3154467 - RNA, 20 nt, Human
cuaaauuuuauaucuuguag

SEQ ID NO: 3154468 - RNA, 20 nt, Human
cgggaggcagagguugcagu

SEQ ID NO: 3154469 - RNA, 22 nt, Human
cgggaggcagagguugcagugu

SEQ ID NO: 3154470 - RNA, 23 nt, Human
cuacacgagauacagaauuuuau

SEQ ID NO: 3154471 - RNA, 14 nt, Human
cuaauaaagcugug

SEQ ID NO: 3154472 - RNA, 18 nt, Human
cuaauaaucauuggauuc

SEQ ID NO: 3154473 - RNA, 21 nt, Human
cuaagcuucacuguaaaauaa

SEQ ID NO: 3154474 - RNA, 12 nt, Human
cuauaauuuaaa

SEQ ID NO: 3154475 - RNA, 22 nt, Human
cuaugaaguuuuuuuuauacag

SEQ ID NO: 3154476 - RNA, 21 nt, Human
cuauucaggagaguagaacag

SEQ ID NO: 3154477 - RNA, 21 nt, Human
cuauggggauagaugugugga

SEQ ID NO: 3154478 - RNA, 20 nt, Human
cuauggggauagaugugugg

SEQ ID NO: 3154479 - RNA, 19 nt, Human
cuauggggauagaugugug

SEQ ID NO: 3154480 - RNA, 13 nt, Human
cucacacucaccc

SEQ ID NO: 3154481 - RNA, 22 nt, Human
cuagcuaauguaauaacuguga

SEQ ID NO: 3154482 - RNA, 22 nt, Human
cuacucuggagguuuguuuaga

SEQ ID NO: 3154483 - RNA, 18 nt, Human
cuacugggagccuaccca

SEQ ID NO: 3154484 - RNA, 14 nt, Human
cuacugggagccua

SEQ ID NO: 3154485 - RNA, 15 nt, Human
cuacugggagccuac

SEQ ID NO: 3154486 - RNA, 20 nt, Human
cucacugcuaagaauauuug

SEQ ID NO: 3154487 - RNA, 21 nt, Human
cucacugcuaagaauauuuga

SEQ ID NO: 3154488 - RNA, 22 nt, Human
cucacugcuaagaauauuugaa

SEQ ID NO: 3154489 - RNA, 23 nt, Human
cucacugcuaagaauauuugaau

SEQ ID NO: 3154490 - RNA, 16 nt, Human
cucagaggguguccug

SEQ ID NO: 3154491 - RNA, 17 nt, Human
cucagccccgcguggaa

SEQ ID NO: 3154492 - RNA, 24 nt, Human
cucaggagcccugggaggcucugg

SEQ ID NO: 3154493 - RNA, 18 nt, Human
cucaggaaccgaggcagg

SEQ ID NO: 3154494 - RNA, 19 nt, Human
cucaggaaccgaggcaggg

SEQ ID NO: 3154495 - RNA, 17 nt, Human
cucaggaaccgaggcag

SEQ ID NO: 3154496 - RNA, 12 nt, Human
cucaggagcccu

SEQ ID NO: 3154497 - RNA, 13 nt, Human
cucaggagcccug

SEQ ID NO: 3154498 - RNA, 14 nt, Human
cucaggagcccugg

SEQ ID NO: 3154499 - RNA, 15 nt, Human
cucaggagcccuggg

SEQ ID NO: 3154500 - RNA, 16 nt, Human
cucaggagcccuggga

SEQ ID NO: 3154501 - RNA, 17 nt, Human
cucaggagcccugggag

SEQ ID NO: 3154502 - RNA, 20 nt, Human
cucaggagcccugggaggcu

SEQ ID NO: 3154503 - RNA, 21 nt, Human
cucaggagcccugggaggcuc

SEQ ID NO: 3154504 - RNA, 22 nt, Human
cucaggagcccugggaggcucu

SEQ ID NO: 3154505 - RNA, 23 nt, Human
cucaggagcccugggaggcucug

SEQ ID NO: 3154506 - RNA, 20 nt, Human
cuccccacgucagcugggac

SEQ ID NO: 3154507 - RNA, 16 nt, Human
cucaguucucuucacu

SEQ ID NO: 3154508 - RNA, 17 nt, Human
cucaguucucuucacuc

SEQ ID NO: 3154509 - RNA, 22 nt, Human
cuccacucaugugacucuuucc

SEQ ID NO: 3154510 - RNA, 16 nt, Human
cuccacucaugugacu

SEQ ID NO: 3154511 - RNA, 14 nt, Human
cuccacucuccucu

SEQ ID NO: 3154512 - RNA, 20 nt, Human
ccugguccucacacucaccc

SEQ ID NO: 3154513 - RNA, 22 nt, Human
ccugccgagaguccaucagccu

SEQ ID NO: 3154514 - RNA, 23 nt, Human
ccugccgagaguccaucagccuc

SEQ ID NO: 3154515 - RNA, 14 nt, Human
ccugccgagagucc

SEQ ID NO: 3154516 - RNA, 17 nt, Human
ccugcaccggggccugg

SEQ ID NO: 3154517 - RNA, 15 nt, Human
ccugcaccggggccu

SEQ ID NO: 3154518 - RNA, 19 nt, Human
ccugaagagaagggcaggg

SEQ ID NO: 3154519 - RNA, 15 nt, Human
ccucuuccaggcccc

SEQ ID NO: 3154520 - RNA, 18 nt, Human
cgggaauuuucaucuagg

SEQ ID NO: 3154521 - RNA, 18 nt, Human
cgggacaccuaggcuagg

SEQ ID NO: 3154522 - RNA, 19 nt, Human
cgggacaccuaggcuaggg

SEQ ID NO: 3154523 - RNA, 20 nt, Human
cgggaauuuucaucuaggau

SEQ ID NO: 3154524 - RNA, 11 nt, Human
cgcggcuggga

SEQ ID NO: 3154525 - RNA, 12 nt, Human
cgcggcugggag

SEQ ID NO: 3154526 - RNA, 16 nt, Human
cgcggcugggaggagg

SEQ ID NO: 3154527 - RNA, 17 nt, Human
ccugugccuuuugccau

SEQ ID NO: 3154528 - RNA, 18 nt, Human
ccuguggaucaaauccag

SEQ ID NO: 3154529 - RNA, 14 nt, Human
ccuuugucccagaa

SEQ ID NO: 3154530 - RNA, 15 nt, Human
cgaagcguuguccuc

SEQ ID NO: 3154531 - RNA, 16 nt, Human
cgaagcguuguccuca

SEQ ID NO: 3154532 - RNA, 17 nt, Human
cgaagcguuguccucag

SEQ ID NO: 3154533 - RNA, 21 nt, Human
cgaagcguuguccucagcccc

SEQ ID NO: 3154534 - RNA, 23 nt, Human
cgaagaguauuuuugacagaaua

SEQ ID NO: 3154535 - RNA, 18 nt, Human
cgagacuugguuucaaaa

SEQ ID NO: 3154536 - RNA, 21 nt, Human
cccugaggcagguccccagac

SEQ ID NO: 3154537 - RNA, 18 nt, Human
cccugaggcaggucccca

SEQ ID NO: 3154538 - RNA, 20 nt, Human
cccugaggcagguccccaga

SEQ ID NO: 3154539 - RNA, 17 nt, Human
cccugaggcaggucccc

SEQ ID NO: 3154540 - RNA, 13 nt, Human
cccugccucucug

SEQ ID NO: 3154541 - RNA, 14 nt, Human
cccugccucucugc

SEQ ID NO: 3154542 - RNA, 15 nt, Human
cccugccucucugca

SEQ ID NO: 3154543 - RNA, 17 nt, Human
ccgccuccuacagccca

SEQ ID NO: 3154544 - RNA, 21 nt, Human
ccgggggcagucugagagagg

SEQ ID NO: 3154545 - RNA, 20 nt, Human
ccggggccugggcaggaggg

SEQ ID NO: 3154546 - RNA, 20 nt, Human
ccgagaguccaucagccucc

SEQ ID NO: 3154547 - RNA, 21 nt, Human
ccgagaguccaucagccucca

SEQ ID NO: 3154548 - RNA, 12 nt, Human
ccuaaccugccg

SEQ ID NO: 3154549 - RNA, 13 nt, Human
ccuaaccugccga

SEQ ID NO: 3154550 - RNA, 23 nt, Human
ccguggcuguggcauccagaguc

SEQ ID NO: 3154551 - RNA, 13 nt, Human
ccccuccaccugc

SEQ ID NO: 3154552 - RNA, 17 nt, Human
ccccaucauugguaccc

SEQ ID NO: 3154553 - RNA, 14 nt, Human
ccccugugccuugu

SEQ ID NO: 3154554 - RNA, 20 nt, Human
ccccuggcuccaggccaggg

SEQ ID NO: 3154555 - RNA, 12 nt, Human
ccccuggugguu

SEQ ID NO: 3154556 - RNA, 14 nt, Human
ccccugccucucug

SEQ ID NO: 3154557 - RNA, 15 nt, Human
ccccugccucucugc

SEQ ID NO: 3154558 - RNA, 19 nt, Human
ccccugccucucugcaggu

SEQ ID NO: 3154559 - RNA, 16 nt, Human
ccccugccucucugca

SEQ ID NO: 3154560 - RNA, 17 nt, Human
ccccugccucucugcag

SEQ ID NO: 3154561 - RNA, 14 nt, Human
cccaugagcuccuu

SEQ ID NO: 3154562 - RNA, 15 nt, Human
cccaugagcuccuua

SEQ ID NO: 3154563 - RNA, 22 nt, Human
cccaugagcuccuuaaggcucu

SEQ ID NO: 3154564 - RNA, 13 nt, Human
cccaugagcuccu

SEQ ID NO: 3154565 - RNA, 17 nt, Human
cccagaaugaggcugcu

SEQ ID NO: 3154566 - RNA, 16 nt, Human
ccacccccaggacccc

SEQ ID NO: 3154567 - RNA, 18 nt, Human
ccacccccaggaccccug

SEQ ID NO: 3154568 - RNA, 19 nt, Human
ccacccccaggaccccuga

SEQ ID NO: 3154569 - RNA, 15 nt, Human
ccagaaugaggcugc

SEQ ID NO: 3154570 - RNA, 15 nt, Human
ccagaagcccagaau

SEQ ID NO: 3154571 - RNA, 18 nt, Human
ccagaaaccuuuguuugc

SEQ ID NO: 3154572 - RNA, 10 nt, Human
ccagccugcc

SEQ ID NO: 3154573 - RNA, 14 nt, Human
ccagcccugaguuc

SEQ ID NO: 3154574 - RNA, 18 nt, Human
ccagcccugaguuccuag

SEQ ID NO: 3154575 - RNA, 23 nt, Human
ccagugaauucuugaaggaaaau

SEQ ID NO: 3154576 - RNA, 23 nt, Human
ccaggccacuggccccugagauc

SEQ ID NO: 3154577 - RNA, 16 nt, Human
ccaggccacuggcccc

SEQ ID NO: 3154578 - RNA, 12 nt, Human
ccaggcuggguc

SEQ ID NO: 3154579 - RNA, 16 nt, Human
ccaggcugggucgccc

SEQ ID NO: 3154580 - RNA, 21 nt, Human
ccaggcugggucgcccuggac

SEQ ID NO: 3154581 - RNA, 22 nt, Human
ccaggcugggucgcccuggacu

SEQ ID NO: 3154582 - RNA, 23 nt, Human
ccaggcugggucgcccuggacug

SEQ ID NO: 3154583 - RNA, 24 nt, Human
ccaggcugggucgcccuggacugu

SEQ ID NO: 3154584 - RNA, 15 nt, Human
cccacgucagcuggg

SEQ ID NO: 3154585 - RNA, 15 nt, Human
cccacggcuccucga

SEQ ID NO: 3154586 - RNA, 24 nt, Human
cccagaauaaacuggcagcucagc

SEQ ID NO: 3154587 - RNA, 22 nt, Human
cccagaauaaacuggcagcuca

SEQ ID NO: 3154588 - RNA, 16 nt, Human
cccagaaugaggcugc

SEQ ID NO: 3154589 - RNA, 15 nt, Human
cccaacacugccagc

SEQ ID NO: 3154590 - RNA, 16 nt, Human
cccaacacugccagca

SEQ ID NO: 3154591 - RNA, 14 nt, Human
cccaacacugccag

SEQ ID NO: 3154592 - RNA, 23 nt, Human
cuggcugcagagcagugggccug

SEQ ID NO: 3154593 - RNA, 21 nt, Human
cuggccaguggcuggaucugu

SEQ ID NO: 3154594 - RNA, 17 nt, Human
cuggagguuuguuuaga

SEQ ID NO: 3154595 - RNA, 12 nt, Human
cuggagguuugu

SEQ ID NO: 3154596 - RNA, 14 nt, Human
cuggaccagccucu

SEQ ID NO: 3154597 - RNA, 18 nt, Human
cuggaccagccucuccac

SEQ ID NO: 3154598 - RNA, 13 nt, Human
cuggaauuugaaa

SEQ ID NO: 3154599 - RNA, 20 nt, Human
cugccucucugcaggucccu

SEQ ID NO: 3154600 - RNA, 21 nt, Human
cugccucucugcaggucccua

SEQ ID NO: 3154601 - RNA, 22 nt, Human
cugccucucugcaggucccuaa

SEQ ID NO: 3154602 - RNA, 19 nt, Human
cugccucucugcagguccc

SEQ ID NO: 3154603 - RNA, 23 nt, Human
cugccgagaguccaucagccucc

SEQ ID NO: 3154604 - RNA, 22 nt, Human
cugccgagaguccaucagccuc

SEQ ID NO: 3154605 - RNA, 11 nt, Human
cugcugggcuu

SEQ ID NO: 3154606 - RNA, 19 nt, Human
cugugaggggcucucucau

SEQ ID NO: 3154607 - RNA, 21 nt, Human
cugucucccuccucugcccgg

SEQ ID NO: 3154608 - RNA, 17 nt, Human
cuguguguuuaugugug

SEQ ID NO: 3154609 - RNA, 16 nt, Human
cuguguguuuaugugu

SEQ ID NO: 3154610 - RNA, 21 nt, Human
cuguguguguguauguggggg

SEQ ID NO: 3154611 - RNA, 15 nt, Human
cuguguggcagucug

SEQ ID NO: 3154612 - RNA, 23 nt, Human
cugugugcucaggagcccuggga

SEQ ID NO: 3154613 - RNA, 19 nt, Human
cugugugcucaggagcccu

SEQ ID NO: 3154614 - RNA, 16 nt, Human
cugugugcucaggagc

SEQ ID NO: 3154615 - RNA, 20 nt, Human
cugugugcucaggagcccug

SEQ ID NO: 3154616 - RNA, 21 nt, Human
cugugugcucaggagcccugg

SEQ ID NO: 3154617 - RNA, 14 nt, Human
cuucugugaaagua

SEQ ID NO: 3154618 - RNA, 18 nt, Human
cuugaaaauuaacaugaa

SEQ ID NO: 3154619 - RNA, 12 nt, Human
cuugaaaauuaa

SEQ ID NO: 3154620 - RNA, 13 nt, Human
cuugaaaauuaac

SEQ ID NO: 3154621 - RNA, 12 nt, Human
cuugaaaaaugc

SEQ ID NO: 3154622 - RNA, 18 nt, Human
cuugaaaaaugcauguug

SEQ ID NO: 3154623 - RNA, 18 nt, Human
cuucuggugaccuuccaa

SEQ ID NO: 3154624 - RNA, 20 nt, Human
cuucuggugaccuuccaaga

SEQ ID NO: 3154625 - RNA, 21 nt, Human
cuucuggugaccuuccaagag

SEQ ID NO: 3154626 - RNA, 13 nt, Human
cuuauauuaugga

SEQ ID NO: 3154627 - RNA, 13 nt, Human
cuucccuuucugc

SEQ ID NO: 3154628 - RNA, 21 nt, Human
gaaagaguacucuuguuuccu

SEQ ID NO: 3154629 - RNA, 20 nt, Human
gaaaaugauacgcaacauaa

SEQ ID NO: 3154630 - RNA, 21 nt, Human
gaaaauauuauguguuuccau

SEQ ID NO: 3154631 - RNA, 13 nt, Human
gaaaauauuuaaa

SEQ ID NO: 3154632 - RNA, 14 nt, Human
cuuuguggcacugg

SEQ ID NO: 3154633 - RNA, 17 nt, Human
cuuuuuauggccuguga

SEQ ID NO: 3154634 - RNA, 19 nt, Human
cuugaguuuaaauuguaau

SEQ ID NO: 3154635 - RNA, 16 nt, Human
cuugucacgccagacu

SEQ ID NO: 3154636 - RNA, 13 nt, Human
cuugucacgccag

SEQ ID NO: 3154637 - RNA, 21 nt, Human
cuuuaucaaagggugaaaauu

SEQ ID NO: 3154638 - RNA, 22 nt, Human
cuuuaucaaagggugaaaauua

SEQ ID NO: 3154639 - RNA, 23 nt, Human
cuuuaucuugaauaauguaagac

SEQ ID NO: 3154640 - RNA, 18 nt, Human
cuuuaucuugaauaaugu

SEQ ID NO: 3154641 - RNA, 21 nt, Human
cuuuaucuugaauaauguaag

SEQ ID NO: 3154642 - RNA, 22 nt, Human
cuuucuuccaaacaggcucaga

SEQ ID NO: 3154643 - RNA, 16 nt, Human
cuuucugcuuguguua

SEQ ID NO: 3154644 - RNA, 19 nt, Human
cuuuggcuaugagggccuu

SEQ ID NO: 3154645 - RNA, 16 nt, Human
gauguuuaguaaucau

SEQ ID NO: 3154646 - RNA, 24 nt, Human
gaugguguucaaaaaacuuguaaa

SEQ ID NO: 3154647 - RNA, 21 nt, Human
gaugggucaguuguaucagca

SEQ ID NO: 3154648 - RNA, 15 nt, Human
gaugggucaguugua

SEQ ID NO: 3154649 - RNA, 23 nt, Human
gcaaaugugaaucauuuuaccuu

SEQ ID NO: 3154650 - RNA, 21 nt, Human
gcaaagcugaugacaacuucc

SEQ ID NO: 3154651 - RNA, 17 nt, Human
gauugggccccugccag

SEQ ID NO: 3154652 - RNA, 23 nt, Human
gauugcaggagucccugccauca

SEQ ID NO: 3154653 - RNA, 23 nt, Human
gcacaaauucugucucuggauua

SEQ ID NO: 3154654 - RNA, 14 nt, Human
gcaauuucauaugc

SEQ ID NO: 3154655 - RNA, 22 nt, Human
gcaauguagaggggaaaagaga

SEQ ID NO: 3154656 - RNA, 23 nt, Human
gcacuggggcaggggccgggggc

SEQ ID NO: 3154657 - RNA, 15 nt, Human
gcacuggggcagggg

SEQ ID NO: 3154658 - RNA, 18 nt, Human
gcacuggggcaggggccg

SEQ ID NO: 3154659 - RNA, 22 nt, Human
gcaccccagcuggggccaggcu

SEQ ID NO: 3154660 - RNA, 13 nt, Human
gaggguguccugc

SEQ ID NO: 3154661 - RNA, 21 nt, Human
gagguagcuuugagguggaag

SEQ ID NO: 3154662 - RNA, 23 nt, Human
gagggucuugguuccagccugcc

SEQ ID NO: 3154663 - RNA, 14 nt, Human
gagggggagagggc

SEQ ID NO: 3154664 - RNA, 14 nt, Human
gaggcagggaagga

SEQ ID NO: 3154665 - RNA, 21 nt, Human
gaggcgaagcguuguccucag

SEQ ID NO: 3154666 - RNA, 21 nt, Human
gaggcgcaugaauuugugaag

SEQ ID NO: 3154667 - RNA, 20 nt, Human
gaggcgaagcguuguccuca

SEQ ID NO: 3154668 - RNA, 22 nt, Human
gaggccucucauuccagaggaa

SEQ ID NO: 3154669 - RNA, 22 nt, Human
gaguaauccaagcaaaugugaa

SEQ ID NO: 3154670 - RNA, 13 nt, Human
gagguugcagugu

SEQ ID NO: 3154671 - RNA, 21 nt, Human
gagucccugccuggaccagcc

SEQ ID NO: 3154672 - RNA, 23 nt, Human
gagucccugccuggaccagccuc

SEQ ID NO: 3154673 - RNA, 13 nt, Human
gaguguguaauuu

SEQ ID NO: 3154674 - RNA, 18 nt, Human
gaguguacuuaacuauuc

SEQ ID NO: 3154675 - RNA, 22 nt, Human
gauagauguguggacacauugg

SEQ ID NO: 3154676 - RNA, 14 nt, Human
gauagaugugugga

SEQ ID NO: 3154677 - RNA, 15 nt, Human
gauauaagugugugu

SEQ ID NO: 3154678 - RNA, 14 nt, Human
gaccagccucucca

SEQ ID NO: 3154679 - RNA, 22 nt, Human
gaauuggguggggggcuucaua

SEQ ID NO: 3154680 - RNA, 23 nt, Human
gaauuggguggggggcuucauac

SEQ ID NO: 3154681 - RNA, 20 nt, Human
gaauuggguggggggcuuca

SEQ ID NO: 3154682 - RNA, 16 nt, Human
gacaaggaaaaaauaa

SEQ ID NO: 3154683 - RNA, 13 nt, Human
gacacaacuauuu

SEQ ID NO: 3154684 - RNA, 18 nt, Human
gaauucuugaaggaaaau

SEQ ID NO: 3154685 - RNA, 15 nt, Human
gaauguuaagcagau

SEQ ID NO: 3154686 - RNA, 19 nt, Human
gaaugucaguauguggaag

SEQ ID NO: 3154687 - RNA, 14 nt, Human
gaauguuaagcaga

SEQ ID NO: 3154688 - RNA, 13 nt, Human
gaaugucaguaug

SEQ ID NO: 3154689 - RNA, 18 nt, Human
gaaugucaguauguggaa

SEQ ID NO: 3154690 - RNA, 16 nt, Human
gaaugucaguaugugg

SEQ ID NO: 3154691 - RNA, 14 nt, Human
gaaugcuguguuaa

SEQ ID NO: 3154692 - RNA, 13 nt, Human
gaaugcuguguua

SEQ ID NO: 3154693 - RNA, 19 nt, Human
gaaucucauaauuuauaca

SEQ ID NO: 3154694 - RNA, 16 nt, Human
gaaugaaauugcugaa

SEQ ID NO: 3154695 - RNA, 18 nt, Human
gaaucucauaauuuauac

SEQ ID NO: 3154696 - RNA, 23 nt, Human
gacucuaccucauaucaguuugc

SEQ ID NO: 3154697 - RNA, 19 nt, Human
gacucuaccucauaucagu

SEQ ID NO: 3154698 - RNA, 21 nt, Human
gagaaaugaaaaaauauauau

SEQ ID NO: 3154699 - RNA, 12 nt, Human
gagaaaugaaaa

SEQ ID NO: 3154700 - RNA, 13 nt, Human
gagagacgggccc

SEQ ID NO: 3154701 - RNA, 15 nt, Human
gagaguagaacagau

SEQ ID NO: 3154702 - RNA, 17 nt, Human
gagaaugucaguaugug

SEQ ID NO: 3154703 - RNA, 23 nt, Human
gagcccacuguacuugcucuuga

SEQ ID NO: 3154704 - RNA, 18 nt, Human
gagaucccaacacugcca

SEQ ID NO: 3154705 - RNA, 19 nt, Human
gagaucccaacacugccag

SEQ ID NO: 3154706 - RNA, 20 nt, Human
gagaucccaacacugccagc

SEQ ID NO: 3154707 - RNA, 18 nt, Human
gagaugaugaaaauauuu

SEQ ID NO: 3154708 - RNA, 13 nt, Human
gagcaaagcugau

SEQ ID NO: 3154709 - RNA, 19 nt, Human
gccucucugcaggucccua

SEQ ID NO: 3154710 - RNA, 15 nt, Human
gccugcaauuucaua

SEQ ID NO: 3154711 - RNA, 12 nt, Human
gccugcagagcu

SEQ ID NO: 3154712 - RNA, 18 nt, Human
gccugcuuuuuauggccu

SEQ ID NO: 3154713 - RNA, 19 nt, Human
gccugcuuuuuauggccug

SEQ ID NO: 3154714 - RNA, 22 nt, Human
gccugcuuuuuauggccuguga

SEQ ID NO: 3154715 - RNA, 18 nt, Human
gccucucugcaggucccu

SEQ ID NO: 3154716 - RNA, 20 nt, Human
gccucucugcaggucccuaa

SEQ ID NO: 3154717 - RNA, 21 nt, Human
gccucucugcaggucccuaau

SEQ ID NO: 3154718 - RNA, 23 nt, Human
gccuggccagcagguccccagcu

SEQ ID NO: 3154719 - RNA, 12 nt, Human
gcccuggacugu

SEQ ID NO: 3154720 - RNA, 16 nt, Human
gcccuggacugugugc

SEQ ID NO: 3154721 - RNA, 22 nt, Human
gcccuggacugugugcucagga

SEQ ID NO: 3154722 - RNA, 16 nt, Human
gcccugaguuccuagc

SEQ ID NO: 3154723 - RNA, 18 nt, Human
gcccugaguuccuagcca

SEQ ID NO: 3154724 - RNA, 23 nt, Human
gcccuggugguggcucgggaggc

SEQ ID NO: 3154725 - RNA, 13 nt, Human
gcccugggaggcu

SEQ ID NO: 3154726 - RNA, 14 nt, Human
gcccugggaggcuc

SEQ ID NO: 3154727 - RNA, 15 nt, Human
gcccugggaggcucu

SEQ ID NO: 3154728 - RNA, 16 nt, Human
gcccugggaggcucug

SEQ ID NO: 3154729 - RNA, 23 nt, Human
gcccugggaggcucuggagccca

SEQ ID NO: 3154730 - RNA, 17 nt, Human
gcccugggaggcucugg

SEQ ID NO: 3154731 - RNA, 18 nt, Human
gcccugggaggcucugga

SEQ ID NO: 3154732 - RNA, 19 nt, Human
gcccugggaggcucuggag

SEQ ID NO: 3154733 - RNA, 21 nt, Human
gcccugggaggcucuggagcc

SEQ ID NO: 3154734 - RNA, 17 nt, Human
gcucuugaugccuggcg

SEQ ID NO: 3154735 - RNA, 14 nt, Human
gcucuugaugccug

SEQ ID NO: 3154736 - RNA, 15 nt, Human
gcucuugaugccugg

SEQ ID NO: 3154737 - RNA, 16 nt, Human
gcucuugaugccuggc

SEQ ID NO: 3154738 - RNA, 23 nt, Human
gccugugagcuaggaauuguguu

SEQ ID NO: 3154739 - RNA, 22 nt, Human
gcucagugucuggcugcagagc

SEQ ID NO: 3154740 - RNA, 21 nt, Human
gcucagaggguguccugcacc

SEQ ID NO: 3154741 - RNA, 17 nt, Human
gcuaugagcuggggaug

SEQ ID NO: 3154742 - RNA, 20 nt, Human
ggccauucuuucccaacacc

SEQ ID NO: 3154743 - RNA, 12 nt, Human
ggcagcucagcu

SEQ ID NO: 3154744 - RNA, 18 nt, Human
ggauugggccccugccag

SEQ ID NO: 3154745 - RNA, 17 nt, Human
ggauugggccccugcca

SEQ ID NO: 3154746 - RNA, 19 nt, Human
ggcaaucauggugcucaga

SEQ ID NO: 3154747 - RNA, 17 nt, Human
ggauggaaugauggguc

SEQ ID NO: 3154748 - RNA, 16 nt, Human
ggaugcauggagauag

SEQ ID NO: 3154749 - RNA, 12 nt, Human
ggcccugugccu

SEQ ID NO: 3154750 - RNA, 21 nt, Human
ggccuaaccugccgagagucc

SEQ ID NO: 3154751 - RNA, 22 nt, Human
ggccuaaccugccgagagucca

SEQ ID NO: 3154752 - RNA, 16 nt, Human
ggcuaggguggggaga

SEQ ID NO: 3154753 - RNA, 21 nt, Human
ggcuauggggauagaugugug

SEQ ID NO: 3154754 - RNA, 18 nt, Human
ggcuccaggccagggggc

SEQ ID NO: 3154755 - RNA, 14 nt, Human
ggcuccaggccagg

SEQ ID NO: 3154756 - RNA, 16 nt, Human
ggcuccaggccagggg

SEQ ID NO: 3154757 - RNA, 13 nt, Human
ggccugggcagga

SEQ ID NO: 3154758 - RNA, 14 nt, Human
ggccugggcaggag

SEQ ID NO: 3154759 - RNA, 11 nt, Human
ggccugugagc

SEQ ID NO: 3154760 - RNA, 16 nt, Human
ggcgcggcugggagga

SEQ ID NO: 3154761 - RNA, 11 nt, Human
gcuucauacag

SEQ ID NO: 3154762 - RNA, 11 nt, Human
gcuucauacac

SEQ ID NO: 3154763 - RNA, 22 nt, Human
gcuucauacagggaugguguuc

SEQ ID NO: 3154764 - RNA, 21 nt, Human
ggaaccaaagcgaauuuuaaa

SEQ ID NO: 3154765 - RNA, 22 nt, Human
ggaaccaaagcgaauuuuaaaa

SEQ ID NO: 3154766 - RNA, 22 nt, Human
gcuuuguggcacuggggcaggg

SEQ ID NO: 3154767 - RNA, 14 nt, Human
gcuuuguggcacug

SEQ ID NO: 3154768 - RNA, 20 nt, Human
ggaaaagccaagaggcugca

SEQ ID NO: 3154769 - RNA, 22 nt, Human
ggagaaugucaguauguggaag

SEQ ID NO: 3154770 - RNA, 20 nt, Human
ggagauagccccacaggagg

SEQ ID NO: 3154771 - RNA, 21 nt, Human
ggagauagccccacaggaggu

SEQ ID NO: 3154772 - RNA, 12 nt, Human
ggaauuguguuu

SEQ ID NO: 3154773 - RNA, 23 nt, Human
ggaauuggguggggggcuucaua

SEQ ID NO: 3154774 - RNA, 19 nt, Human
ggaauuuucaucuaggauu

SEQ ID NO: 3154775 - RNA, 16 nt, Human
ggaauuauuuuaaaag

SEQ ID NO: 3154776 - RNA, 17 nt, Human
ggaauuauuuuaaaaga

SEQ ID NO: 3154777 - RNA, 14 nt, Human
ggaauuauuuuaaa

SEQ ID NO: 3154778 - RNA, 15 nt, Human
ggaauuauuuuaaaa

SEQ ID NO: 3154779 - RNA, 14 nt, Human
ggaaugcuguguua

SEQ ID NO: 3154780 - RNA, 18 nt, Human
ggaagugcuaauuuugaa

SEQ ID NO: 3154781 - RNA, 22 nt, Human
ggaaggaucccaugagcuccuu

SEQ ID NO: 3154782 - RNA, 23 nt, Human
ggaagggacaccaagccuuggcu

SEQ ID NO: 3154783 - RNA, 15 nt, Human
guaaauaguauuuga

SEQ ID NO: 3154784 - RNA, 17 nt, Human
guaaauaguauuugaga

SEQ ID NO: 3154785 - RNA, 16 nt, Human
guaaauaguauuugag

SEQ ID NO: 3154786 - RNA, 16 nt, Human
guaaauaaaggaacca

SEQ ID NO: 3154787 - RNA, 20 nt, Human
guaaaaacaaagaaauuaug

SEQ ID NO: 3154788 - RNA, 18 nt, Human
guaaaaacaaagaaauua

SEQ ID NO: 3154789 - RNA, 15 nt, Human
guacgaagaguauuu

SEQ ID NO: 3154790 - RNA, 23 nt, Human
guacuuuauuuucuauaauuuaa

SEQ ID NO: 3154791 - RNA, 22 nt, Human
guacuugcucuugaugccuggc

SEQ ID NO: 3154792 - RNA, 15 nt, Human
guacuugcucuugau

SEQ ID NO: 3154793 - RNA, 16 nt, Human
guacuugcucuugaug

SEQ ID NO: 3154794 - RNA, 18 nt, Human
guacuugcucuugaugcc

SEQ ID NO: 3154795 - RNA, 19 nt, Human
guacuugcucuugaugccu

SEQ ID NO: 3154796 - RNA, 14 nt, Human
guacuugcucuuga

SEQ ID NO: 3154797 - RNA, 15 nt, Human
guacagacagaaaaa

SEQ ID NO: 3154798 - RNA, 11 nt, Human
guaaugaaaac

SEQ ID NO: 3154799 - RNA, 13 nt, Human
guaaugaaaacca

SEQ ID NO: 3154800 - RNA, 15 nt, Human
guaaugaaacuugga

SEQ ID NO: 3154801 - RNA, 16 nt, Human
guaaugaaacuuggau

SEQ ID NO: 3154802 - RNA, 14 nt, Human
guaauucaagaaaa

SEQ ID NO: 3154803 - RNA, 13 nt, Human
guaauucaagaaa

SEQ ID NO: 3154804 - RNA, 23 nt, Human
ggucagcccaaaccaccagaagc

SEQ ID NO: 3154805 - RNA, 18 nt, Human
gggugcugggccccugcc

SEQ ID NO: 3154806 - RNA, 19 nt, Human
gggugcugggccccugccu

SEQ ID NO: 3154807 - RNA, 19 nt, Human
ggguuccagcaccacacuc

SEQ ID NO: 3154808 - RNA, 20 nt, Human
ggugcccagaaugaggcugc

SEQ ID NO: 3154809 - RNA, 18 nt, Human
ggucccuaauaaagcugu

SEQ ID NO: 3154810 - RNA, 12 nt, Human
ggucccuaauaa

SEQ ID NO: 3154811 - RNA, 13 nt, Human
ggucccuaauaaa

SEQ ID NO: 3154812 - RNA, 16 nt, Human
ggucccuaauaaagcu

SEQ ID NO: 3154813 - RNA, 17 nt, Human
ggucccuaauaaagcug

SEQ ID NO: 3154814 - RNA, 18 nt, Human
ggggaguuuagggugggg

SEQ ID NO: 3154815 - RNA, 13 nt, Human
ggggauagaugug

SEQ ID NO: 3154816 - RNA, 19 nt, Human
gggcuucauacacaugaga

SEQ ID NO: 3154817 - RNA, 13 nt, Human
gggcuucauacac

SEQ ID NO: 3154818 - RNA, 14 nt, Human
gggcgcggcuggga

SEQ ID NO: 3154819 - RNA, 23 nt, Human
gucuaagauaguaacaaugaaga

SEQ ID NO: 3154820 - RNA, 22 nt, Human
gucccugccuggaccagccucu

SEQ ID NO: 3154821 - RNA, 23 nt, Human
gucccugccuggaccagccucuc

SEQ ID NO: 3154822 - RNA, 20 nt, Human
gucccugccuggaccagccu

SEQ ID NO: 3154823 - RNA, 21 nt, Human
gucccugccuggaccagccuc

SEQ ID NO: 3154824 - RNA, 14 nt, Human
gucccugccuggac

SEQ ID NO: 3154825 - RNA, 12 nt, Human
guccucagcccc

SEQ ID NO: 3154826 - RNA, 13 nt, Human
guccucacacuca

SEQ ID NO: 3154827 - RNA, 21 nt, Human
guauuugagaguucuaaauuu

SEQ ID NO: 3154828 - RNA, 19 nt, Human
guauuugagaguucuaaau

SEQ ID NO: 3154829 - RNA, 15 nt, Human
guauuauguguguuu

SEQ ID NO: 3154830 - RNA, 20 nt, Human
gucccagaaugccuccugca

SEQ ID NO: 3154831 - RNA, 14 nt, Human
gucacgccagacuu

SEQ ID NO: 3154832 - RNA, 23 nt, Human
gucagcccaaaccaccagaagcc

SEQ ID NO: 3154833 - RNA, 22 nt, Human
gucagcccaaaccaccagaagc

SEQ ID NO: 3154834 - RNA, 19 nt, Human
gugccuugucacgccagac

SEQ ID NO: 3154835 - RNA, 23 nt, Human
guggaaaagccaagaggcugcag

SEQ ID NO: 3154836 - RNA, 21 nt, Human
gugcuucuaguucugccagga

SEQ ID NO: 3154837 - RNA, 22 nt, Human
gugcuucuaguucugccaggag

SEQ ID NO: 3154838 - RNA, 20 nt, Human
gugcuucuaguucugccagg

SEQ ID NO: 3154839 - RNA, 16 nt, Human
guggcucgggaggcga

SEQ ID NO: 3154840 - RNA, 18 nt, Human
guggcucgggaggcgaag

SEQ ID NO: 3154841 - RNA, 14 nt, Human
guggcauccagagu

SEQ ID NO: 3154842 - RNA, 15 nt, Human
guggcaguuuggcaa

SEQ ID NO: 3154843 - RNA, 11 nt, Human
guggcagucug

SEQ ID NO: 3154844 - RNA, 19 nt, Human
gugaaagaaaauaacaaua

SEQ ID NO: 3154845 - RNA, 12 nt, Human
gugaaaauuauu

SEQ ID NO: 3154846 - RNA, 15 nt, Human
gugaaaauuauuuug

SEQ ID NO: 3154847 - RNA, 17 nt, Human
gugaaaguacauuugga

SEQ ID NO: 3154848 - RNA, 13 nt, Human
gugaaaucauuca

SEQ ID NO: 3154849 - RNA, 18 nt, Human
gugaaauuauucauaauu

SEQ ID NO: 3154850 - RNA, 20 nt, Human
gugaaauuauucauaauuau

SEQ ID NO: 3154851 - RNA, 14 nt, Human
gugagcuacaaaug

SEQ ID NO: 3154852 - RNA, 12 nt, Human
gugacucuuucc

SEQ ID NO: 3154853 - RNA, 19 nt, Human
gugaccuuccaagagccug

SEQ ID NO: 3154854 - RNA, 20 nt, Human
gugaccuuccaagagccuga

SEQ ID NO: 3154855 - RNA, 17 nt, Human
gugauuuuuaugccacc

SEQ ID NO: 3154856 - RNA, 19 nt, Human
gugauuuuuaugccaccug

SEQ ID NO: 3154857 - RNA, 20 nt, Human
gugauuuuuaugccaccuga

SEQ ID NO: 3154858 - RNA, 16 nt, Human
gugauuuuuaugccac

SEQ ID NO: 3154859 - RNA, 15 nt, Human
gugaggaugucuggg

SEQ ID NO: 3154860 - RNA, 18 nt, Human
ugcuguguuaaauaaacc

SEQ ID NO: 3154861 - RNA, 11 nt, Human
ugcuguguuaa

SEQ ID NO: 3154862 - RNA, 16 nt, Human
ugcuguuaucccugcc

SEQ ID NO: 3154863 - RNA, 13 nt, Human
ugcugguuuuagu

SEQ ID NO: 3154864 - RNA, 15 nt, Human
ugcugccugcuuuuu

SEQ ID NO: 3154865 - RNA, 17 nt, Human
ugcugccugcuuuuuau

SEQ ID NO: 3154866 - RNA, 14 nt, Human
ugcugggccccugc

SEQ ID NO: 3154867 - RNA, 16 nt, Human
ugcugggccccugccu

SEQ ID NO: 3154868 - RNA, 17 nt, Human
ugcugggccccugccuc

SEQ ID NO: 3154869 - RNA, 18 nt, Human
ugcugggccccugccucu

SEQ ID NO: 3154870 - RNA, 19 nt, Human
ugcugggccccugccucuc

SEQ ID NO: 3154871 - RNA, 21 nt, Human
ugcugggccccugccucucug

SEQ ID NO: 3154872 - RNA, 22 nt, Human
ugcugggccccugccucucugc

SEQ ID NO: 3154873 - RNA, 23 nt, Human
ugcugggccccugccucucugca

SEQ ID NO: 3154874 - RNA, 24 nt, Human
ugcugggccccugccucucugcag

SEQ ID NO: 3154875 - RNA, 15 nt, Human
ugcucaggagcccug

SEQ ID NO: 3154876 - RNA, 20 nt, Human
ugcucaggagcccugggagg

SEQ ID NO: 3154877 - RNA, 19 nt, Human
ugcucagugucuggcugca

SEQ ID NO: 3154878 - RNA, 18 nt, Human
ugcucaggagcccuggga

SEQ ID NO: 3154879 - RNA, 19 nt, Human
ugcucaggagcccugggag

SEQ ID NO: 3154880 - RNA, 17 nt, Human
ugcucuugaugccuggc

SEQ ID NO: 3154881 - RNA, 20 nt, Human
ugccuugcauaauggucaga

SEQ ID NO: 3154882 - RNA, 17 nt, Human
ugcuaagaauauuugaa

SEQ ID NO: 3154883 - RNA, 21 nt, Human
ugcuaagaauauuugaaugua

SEQ ID NO: 3154884 - RNA, 22 nt, Human
ugcuaagaauauuugaauguau

SEQ ID NO: 3154885 - RNA, 18 nt, Human
ugcauauuauuuuauguu

SEQ ID NO: 3154886 - RNA, 16 nt, Human
ugcauagguuuagcag

SEQ ID NO: 3154887 - RNA, 19 nt, Human
ugcccagaaugaggcugcu

SEQ ID NO: 3154888 - RNA, 15 nt, Human
uggaccagccucucc

SEQ ID NO: 3154889 - RNA, 19 nt, Human
uggaucugugaggggcucu

SEQ ID NO: 3154890 - RNA, 19 nt, Human
uggcaaacucuccaccaca

SEQ ID NO: 3154891 - RNA, 15 nt, Human
uggaucugugagggg

SEQ ID NO: 3154892 - RNA, 20 nt, Human
uggcuccauugguguugaca

SEQ ID NO: 3154893 - RNA, 15 nt, Human
uggcgggguggggug

SEQ ID NO: 3154894 - RNA, 21 nt, Human
uggugaccuuccaagagccug

SEQ ID NO: 3154895 - RNA, 22 nt, Human
uggugaccuuccaagagccuga

SEQ ID NO: 3154896 - RNA, 14 nt, Human
ugguccucacacuc

SEQ ID NO: 3154897 - RNA, 13 nt, Human
ugggcaggaggga

SEQ ID NO: 3154898 - RNA, 15 nt, Human
ugggcaggagggagg

SEQ ID NO: 3154899 - RNA, 16 nt, Human
ugggcaggagggaggu

SEQ ID NO: 3154900 - RNA, 18 nt, Human
ugggcaggagggaggugc

SEQ ID NO: 3154901 - RNA, 20 nt, Human
ugggccccugccucucugca

SEQ ID NO: 3154902 - RNA, 21 nt, Human
ugggccccugccucucugcag

SEQ ID NO: 3154903 - RNA, 23 nt, Human
ugggccccugccucucugcaggu

SEQ ID NO: 3154904 - RNA, 22 nt, Human
ugggagugaggaugucugggcc

SEQ ID NO: 3154905 - RNA, 13 nt, Human
ugggaguguguaa

SEQ ID NO: 3154906 - RNA, 11 nt, Human
ugggagugugu

SEQ ID NO: 3154907 - RNA, 20 nt, Human
uggggaguuuaggguggggg

SEQ ID NO: 3154908 - RNA, 20 nt, Human
uggggauagauguguggaca

SEQ ID NO: 3154909 - RNA, 18 nt, Human
uggggauagaugugugga

SEQ ID NO: 3154910 - RNA, 17 nt, Human
uggggauagaugugugg

SEQ ID NO: 3154911 - RNA, 16 nt, Human
uggggauagaugugug

SEQ ID NO: 3154912 - RNA, 20 nt, Human
uggggccaggcugggucgcc

SEQ ID NO: 3154913 - RNA, 21 nt, Human
uggggccaggcugggucgccc

SEQ ID NO: 3154914 - RNA, 22 nt, Human
uggggccaggcugggucgcccu

SEQ ID NO: 3154915 - RNA, 14 nt, Human
ugggggucugugug

SEQ ID NO: 3154916 - RNA, 13 nt, Human
uggggggggugcu

SEQ ID NO: 3154917 - RNA, 21 nt, Human
ucuuuccacuccuccuagcca

SEQ ID NO: 3154918 - RNA, 22 nt, Human
ucuuuccacuccuccuagccac

SEQ ID NO: 3154919 - RNA, 12 nt, Human
ucuuugccaagu

SEQ ID NO: 3154920 - RNA, 17 nt, Human
ucuuucacauuuaaaua

SEQ ID NO: 3154921 - RNA, 19 nt, Human
ugaaauggacuuuuguaca

SEQ ID NO: 3154922 - RNA, 12 nt, Human
ugaaauuauuca

SEQ ID NO: 3154923 - RNA, 21 nt, Human
ugaacagcggcuggacuugga

SEQ ID NO: 3154924 - RNA, 22 nt, Human
ugaacagcggcuggacuuggag

SEQ ID NO: 3154925 - RNA, 15 nt, Human
ugaacagcggcugga

SEQ ID NO: 3154926 - RNA, 16 nt, Human
ugaauuauuuucucuc

SEQ ID NO: 3154927 - RNA, 22 nt, Human
ugaaucauuuuaccuuugacaa

SEQ ID NO: 3154928 - RNA, 23 nt, Human
ugaaucauuuuaccuuugacaaa

SEQ ID NO: 3154929 - RNA, 16 nt, Human
ugacagaauauguuuc

SEQ ID NO: 3154930 - RNA, 17 nt, Human
ugacauacauccaacau

SEQ ID NO: 3154931 - RNA, 23 nt, Human
ugacauaaguauuuaauucaugu

SEQ ID NO: 3154932 - RNA, 20 nt, Human
ugaugcuacaggauuugaaa

SEQ ID NO: 3154933 - RNA, 11 nt, Human
ugaugccuggc

SEQ ID NO: 3154934 - RNA, 13 nt, Human
ugaugguuguaca

SEQ ID NO: 3154935 - RNA, 14 nt, Human
ugaugguuguacau

SEQ ID NO: 3154936 - RNA, 21 nt, Human
ugauguauucuagcuaaugua

SEQ ID NO: 3154937 - RNA, 18 nt, Human
ugauguguuuauuuauag

SEQ ID NO: 3154938 - RNA, 14 nt, Human
ugauguguuuauuu

SEQ ID NO: 3154939 - RNA, 13 nt, Human
ugauuauauguca

SEQ ID NO: 3154940 - RNA, 22 nt, Human
ugaguucuacauaaguaauuca

SEQ ID NO: 3154941 - RNA, 14 nt, Human
ugaggugggagaug

SEQ ID NO: 3154942 - RNA, 20 nt, Human
ugagcuggggaugucucuca

SEQ ID NO: 3154943 - RNA, 16 nt, Human
ugaggagcuugaaacc

SEQ ID NO: 3154944 - RNA, 14 nt, Human
ugaggcaggucccc

SEQ ID NO: 3154945 - RNA, 16 nt, Human
ugaggcagguccccag

SEQ ID NO: 3154946 - RNA, 17 nt, Human
ugaggcagguccccaga

SEQ ID NO: 3154947 - RNA, 23 nt, Human
ugagacguuuuuggaagaguagu

SEQ ID NO: 3154948 - RNA, 17 nt, Human
ugagaaauuuauaaacu

SEQ ID NO: 3154949 - RNA, 19 nt, Human
ugagcuccuuaaggcucuu

SEQ ID NO: 3154950 - RNA, 21 nt, Human
ugagcuccuuaaggcucuuuu

SEQ ID NO: 3154951 - RNA, 14 nt, Human
uccagcaccacacu

SEQ ID NO: 3154952 - RNA, 18 nt, Human
uccagagucccugccugg

SEQ ID NO: 3154953 - RNA, 19 nt, Human
uccagagucccugccugga

SEQ ID NO: 3154954 - RNA, 20 nt, Human
uccagagucccugccuggac

SEQ ID NO: 3154955 - RNA, 21 nt, Human
uccagagucccugccuggacc

SEQ ID NO: 3154956 - RNA, 23 nt, Human
uccagaaagaaaacuuguauuau

SEQ ID NO: 3154957 - RNA, 16 nt, Human
ucaucuccccaucauu

SEQ ID NO: 3154958 - RNA, 14 nt, Human
ucauggugcucaga

SEQ ID NO: 3154959 - RNA, 22 nt, Human
uccaaaaagauuuucagaaaau

SEQ ID NO: 3154960 - RNA, 14 nt, Human
uccaaacaggcuca

SEQ ID NO: 3154961 - RNA, 16 nt, Human
uccaaaccaaauaaaa

SEQ ID NO: 3154962 - RNA, 22 nt, Human
ucagucuuuaaucugagaggcc

SEQ ID NO: 3154963 - RNA, 11 nt, Human
ucaggagcccu

SEQ ID NO: 3154964 - RNA, 12 nt, Human
ucaggagcccug

SEQ ID NO: 3154965 - RNA, 14 nt, Human
ucaggagcccuggg

SEQ ID NO: 3154966 - RNA, 15 nt, Human
ucaggagcccuggga

SEQ ID NO: 3154967 - RNA, 13 nt, Human
uccuacccccugu

SEQ ID NO: 3154968 - RNA, 15 nt, Human
uccuacccccugugc

SEQ ID NO: 3154969 - RNA, 16 nt, Human
uccuacccccugugcc

SEQ ID NO: 3154970 - RNA, 17 nt, Human
uccuacccccugugccu

SEQ ID NO: 3154971 - RNA, 15 nt, Human
uccugucucccuccu

SEQ ID NO: 3154972 - RNA, 23 nt, Human
uccugucucccuccucugcccgg

SEQ ID NO: 3154973 - RNA, 16 nt, Human
ucuacugggagccuac

SEQ ID NO: 3154974 - RNA, 19 nt, Human
ucuacugggagccuaccca

SEQ ID NO: 3154975 - RNA, 23 nt, Human
ucucauaauuuauacaggucaua

SEQ ID NO: 3154976 - RNA, 13 nt, Human
uauguguguuuua

SEQ ID NO: 3154977 - RNA, 14 nt, Human
uauggaggcaggag

SEQ ID NO: 3154978 - RNA, 12 nt, Human
uauuauguguuu

SEQ ID NO: 3154979 - RNA, 20 nt, Human
uauuauggaggcaggaguuu

SEQ ID NO: 3154980 - RNA, 17 nt, Human
uauuauauuuacaaaug

SEQ ID NO: 3154981 - RNA, 14 nt, Human
uauugauaaguuca

SEQ ID NO: 3154982 - RNA, 16 nt, Human
uauugauaaguucaua

SEQ ID NO: 3154983 - RNA, 23 nt, Human
uauugauaaguucauacauugua

SEQ ID NO: 3154984 - RNA, 21 nt, Human
uauuugaauguaugcuucaua

SEQ ID NO: 3154985 - RNA, 22 nt, Human
uauuugaauguaugcuucauac

SEQ ID NO: 3154986 - RNA, 23 nt, Human
uauuugaauguaugcuucauaca

SEQ ID NO: 3154987 - RNA, 15 nt, Human
ucaaagagagaaaau

SEQ ID NO: 3154988 - RNA, 20 nt, Human
ucaaagagagaaaauaaaga

SEQ ID NO: 3154989 - RNA, 12 nt, Human
ucacauuuaaau

SEQ ID NO: 3154990 - RNA, 22 nt, Human
ucacauuguauucagaguugau

SEQ ID NO: 3154991 - RNA, 15 nt, Human
uauaauucacauugu

SEQ ID NO: 3154992 - RNA, 20 nt, Human
uaguugcaacuuuguauaaa

SEQ ID NO: 3154993 - RNA, 15 nt, Human
uaguaugaaauuaua

SEQ ID NO: 3154994 - RNA, 23 nt, Human
uaguaugaaauuauauaaguauu

SEQ ID NO: 3154995 - RNA, 13 nt, Human
uaguaugaaauua

SEQ ID NO: 3154996 - RNA, 16 nt, Human
uaggaauuguguuuau

SEQ ID NO: 3154997 - RNA, 16 nt, Human
uaggucagugcaaaua

SEQ ID NO: 3154998 - RNA, 16 nt, Human
uagguaaauuacaguu

SEQ ID NO: 3154999 - RNA, 15 nt, Human
uaggcuagggugggg

SEQ ID NO: 3155000 - RNA, 16 nt, Human
uaggcuagggugggga

SEQ ID NO: 3155001 - RNA, 20 nt, Human
uaugaaguuuuuuuuauaca

SEQ ID NO: 3155002 - RNA, 17 nt, Human
uaucuguuuacaguguu

SEQ ID NO: 3155003 - RNA, 16 nt, Human
uaucuguuuacagugu

SEQ ID NO: 3155004 - RNA, 19 nt, Human
uaugacauaaaaacaacuu

SEQ ID NO: 3155005 - RNA, 22 nt, Human
uaugacauaaaaacaacuuuau

SEQ ID NO: 3155006 - RNA, 23 nt, Human
uaugacauaaaaacaacuuuaua

SEQ ID NO: 3155007 - RNA, 17 nt, Human
uauccuuucuaacaaaa

SEQ ID NO: 3155008 - RNA, 15 nt, Human
uaucguaaaauuaag

SEQ ID NO: 3155009 - RNA, 18 nt, Human
uaucguaaaauuaagaaa

SEQ ID NO: 3155010 - RNA, 12 nt, Human
uaugcuucauac

SEQ ID NO: 3155011 - RNA, 13 nt, Human
uaugcuucauaca

SEQ ID NO: 3155012 - RNA, 14 nt, Human
uaugcuucauacag

SEQ ID NO: 3155013 - RNA, 16 nt, Human
uaugcuucauacaggg

SEQ ID NO: 3155014 - RNA, 20 nt, Human
uaugcauauuauuuuauguu

SEQ ID NO: 3155015 - RNA, 17 nt, Human
uaugcuucauacaggga

SEQ ID NO: 3155016 - RNA, 23 nt, Human
uaugagcuggggaugucucucau

SEQ ID NO: 3155017 - RNA, 14 nt, Human
uuaguguucauaaa

SEQ ID NO: 3155018 - RNA, 21 nt, Human
uuacuaggugcccagaaugag

SEQ ID NO: 3155019 - RNA, 17 nt, Human
uuacugucuuuuuucua

SEQ ID NO: 3155020 - RNA, 19 nt, Human
uuacugucuuuuuucuaaa

SEQ ID NO: 3155021 - RNA, 13 nt, Human
uuaauauauuucc

SEQ ID NO: 3155022 - RNA, 14 nt, Human
uuaauauauuucca

SEQ ID NO: 3155023 - RNA, 21 nt, Human
uuaaugauaaguaaaugcuag

SEQ ID NO: 3155024 - RNA, 17 nt, Human
uuaaugauaaguaaaug

SEQ ID NO: 3155025 - RNA, 21 nt, Human
uuaaauguuuuuuuuuaaaga

SEQ ID NO: 3155026 - RNA, 23 nt, Human
uuaaauguuuuuuuuuaaagacu

SEQ ID NO: 3155027 - RNA, 21 nt, Human
uuaagcagauggaaugcugug

SEQ ID NO: 3155028 - RNA, 12 nt, Human
uuaacucagucu

SEQ ID NO: 3155029 - RNA, 18 nt, Human
uguuuuuuuuuaaagacu

SEQ ID NO: 3155030 - RNA, 21 nt, Human
uuaaaagaugcaauguagagg

SEQ ID NO: 3155031 - RNA, 19 nt, Human
uguuuagaagaaguguguc

SEQ ID NO: 3155032 - RNA, 16 nt, Human
uguuuagaagaagugu

SEQ ID NO: 3155033 - RNA, 16 nt, Human
uuccacuccuccuagc

SEQ ID NO: 3155034 - RNA, 18 nt, Human
uuccacuccuccuagcca

SEQ ID NO: 3155035 - RNA, 21 nt, Human
uuccacuccuccuagccaccc

SEQ ID NO: 3155036 - RNA, 21 nt, Human
uuccaaaauaauuuuaagaaa

SEQ ID NO: 3155037 - RNA, 13 nt, Human
uuccaaaauaauu

SEQ ID NO: 3155038 - RNA, 19 nt, Human
uucaugcauagguuuagca

SEQ ID NO: 3155039 - RNA, 17 nt, Human
uucaugcaaacuuuauu

SEQ ID NO: 3155040 - RNA, 12 nt, Human
uuccaaaauaau

SEQ ID NO: 3155041 - RNA, 20 nt, Human
uuccuucugugaaaguacau

SEQ ID NO: 3155042 - RNA, 12 nt, Human
uucccugaggug

SEQ ID NO: 3155043 - RNA, 16 nt, Human
uucccugaaggaacca

SEQ ID NO: 3155044 - RNA, 20 nt, Human
uuauuuuauguugcauagaa

SEQ ID NO: 3155045 - RNA, 21 nt, Human
uucagaguugaugguuguaca

SEQ ID NO: 3155046 - RNA, 22 nt, Human
uucagaguugaugguuguacau

SEQ ID NO: 3155047 - RNA, 15 nt, Human
uuauugauaaguuca

SEQ ID NO: 3155048 - RNA, 19 nt, Human
uuauugauaaguucauaca

SEQ ID NO: 3155049 - RNA, 20 nt, Human
uuauugauaaguucauacau

SEQ ID NO: 3155050 - RNA, 20 nt, Human
uuaucuugaauaauguaaga

SEQ ID NO: 3155051 - RNA, 13 nt, Human
uuaguugcaacuu

SEQ ID NO: 3155052 - RNA, 20 nt, Human
uuaguugcaacuuuguauaa

SEQ ID NO: 3155053 - RNA, 16 nt, Human
uuaugccaccugaaua

SEQ ID NO: 3155054 - RNA, 13 nt, Human
uuaugccaccuga

SEQ ID NO: 3155055 - RNA, 20 nt, Human
uuuaaaagauaaauauuaua

SEQ ID NO: 3155056 - RNA, 18 nt, Human
uuuaaaagaugcaaugua

SEQ ID NO: 3155057 - RNA, 12 nt, Human
uuuaaaaugucu

SEQ ID NO: 3155058 - RNA, 16 nt, Human
uuuaaaaugagaaauc

SEQ ID NO: 3155059 - RNA, 16 nt, Human
uuuaaaauugugaugu

SEQ ID NO: 3155060 - RNA, 18 nt, Human
uuguuuagaagaagugug

SEQ ID NO: 3155061 - RNA, 15 nt, Human
uuguuuagaagaagu

SEQ ID NO: 3155062 - RNA, 19 nt, Human
uuguucaauaauaaauauu

SEQ ID NO: 3155063 - RNA, 17 nt, Human
uuuaguugcaacuuugu

SEQ ID NO: 3155064 - RNA, 18 nt, Human
uuuaguugcaacuuugua

SEQ ID NO: 3155065 - RNA, 15 nt, Human
uuuauacaggucaua

SEQ ID NO: 3155066 - RNA, 22 nt, Human
uuuaauaaacacucuugaaaaa

SEQ ID NO: 3155067 - RNA, 14 nt, Human
uuuaauaaacacuc

SEQ ID NO: 3155068 - RNA, 15 nt, Human
uuuaauaaacacucu

SEQ ID NO: 3155069 - RNA, 20 nt, Human
uuuacagaggacaguauuug

SEQ ID NO: 3155070 - RNA, 21 nt, Human
uuugaaauuguauuacaaauc

SEQ ID NO: 3155071 - RNA, 18 nt, Human
uuucuuaaccagaucauu

SEQ ID NO: 3155072 - RNA, 16 nt, Human
uuugagaguucuaaau

SEQ ID NO: 3155073 - RNA, 14 nt, Human
uuugagaguucuaa

SEQ ID NO: 3155074 - RNA, 13 nt, Human
uuugaguucuaca

SEQ ID NO: 3155075 - RNA, 12 nt, Human
uuugaguucuac

SEQ ID NO: 3155076 - RNA, 14 nt, Human
uuucuaaaguaaaa

SEQ ID NO: 3155077 - RNA, 22 nt, Human
uuucuaaaguaaaaacaaagaa

SEQ ID NO: 3155078 - RNA, 17 nt, Human
uuucuaaaguaaaaaca

SEQ ID NO: 3155079 - RNA, 20 nt, Human
uuuccuaaauauauuuuaag

SEQ ID NO: 3155080 - RNA, 18 nt, Human
uuuccacuccuccuagcc

SEQ ID NO: 3155081 - RNA, 19 nt, Human
uuuccacuccuccuagcca

SEQ ID NO: 3155082 - RNA, 14 nt, Human
uuuaugccaccuga

SEQ ID NO: 3155083 - RNA, 15 nt, Human
uuucacauaucuagu

SEQ ID NO: 3155084 - RNA, 21 nt, Human
uuucacauaucuaguaugaaa

SEQ ID NO: 3155085 - RNA, 20 nt, Human
uugcaguguggugagaucau

SEQ ID NO: 3155086 - RNA, 16 nt, Human
uugcauaacguauaaa

SEQ ID NO: 3155087 - RNA, 17 nt, Human
uugauccagaaagaaaa

SEQ ID NO: 3155088 - RNA, 18 nt, Human
uugaaaauuaacaugaau

SEQ ID NO: 3155089 - RNA, 21 nt, Human
uugaaaaucuuauaauuuaaa

SEQ ID NO: 3155090 - RNA, 17 nt, Human
uugaauguuaagcagau

SEQ ID NO: 3155091 - RNA, 14 nt, Human
uugaauguuaagca

SEQ ID NO: 3155092 - RNA, 16 nt, Human
uuguacgaagaguauu

SEQ ID NO: 3155093 - RNA, 19 nt, Human
uuguacgaagaguauuuuu

SEQ ID NO: 3155094 - RNA, 14 nt, Human
uuguagcacugaca

SEQ ID NO: 3155095 - RNA, 16 nt, Human
uuguagcacugacaga

SEQ ID NO: 3155096 - RNA, 17 nt, Human
uuguagcacugacagau

SEQ ID NO: 3155097 - RNA, 18 nt, Human
uuguagcacugacagauu

SEQ ID NO: 3155098 - RNA, 22 nt, Human
uuguagcacugacagauuucca

SEQ ID NO: 3155099 - RNA, 18 nt, Human
uuguacuuuagggaagua

SEQ ID NO: 3155100 - RNA, 14 nt, Human
uugggaccccuggu

SEQ ID NO: 3155101 - RNA, 15 nt, Human
uugggaccccuggug

SEQ ID NO: 3155102 - RNA, 16 nt, Human
uugggaccccuggugg

SEQ ID NO: 3155103 - RNA, 20 nt, Human
uugggaccccuggugguuca

SEQ ID NO: 3155104 - RNA, 16 nt, Human
uuggcagcucuacucu

SEQ ID NO: 3155105 - RNA, 11 nt, Human
uuuguggggag

SEQ ID NO: 3155106 - RNA, 12 nt, Human
aaaaacaacuuu

SEQ ID NO: 3155107 - RNA, 12 nt, Human
aaaacaacuuua

SEQ ID NO: 3155108 - RNA, 19 nt, Human
aaaaacuucaguaaguacg

SEQ ID NO: 3155109 - RNA, 21 nt, Human
aaaauuauuuuguucauacau

SEQ ID NO: 3155110 - RNA, 13 nt, Human
aaacacucuugaa

SEQ ID NO: 3155111 - RNA, 14 nt, Human
aaacacucuugaaa

SEQ ID NO: 3155112 - RNA, 17 nt, Human
aaacacucuugaaaaau

SEQ ID NO: 3155113 - RNA, 13 nt, Human
aaagaaauuaugu

SEQ ID NO: 3155114 - RNA, 11 nt, Human
aaagaacaucc

SEQ ID NO: 3155115 - RNA, 15 nt, Human
aaagaaauuaugugc

SEQ ID NO: 3155116 - RNA, 17 nt, Human
aaagaguacucuuguuu

SEQ ID NO: 3155117 - RNA, 12 nt, Human
aaagaguacucu

SEQ ID NO: 3155118 - RNA, 12 nt, Human
aaagaaaacuug

SEQ ID NO: 3155119 - RNA, 20 nt, Human
aaagaaaacuuguauuaugu

SEQ ID NO: 3155120 - RNA, 12 nt, Human
aaauaacaauga

SEQ ID NO: 3155121 - RNA, 13 nt, Human
aaauaaaggaacc

SEQ ID NO: 3155122 - RNA, 20 nt, Human
aaagucucuggaauuugaaa

SEQ ID NO: 3155123 - RNA, 22 nt, Human
aaagucucuggaauuugaaaca

SEQ ID NO: 3155124 - RNA, 19 nt, Human
aaagucucuggaauuugaa

SEQ ID NO: 3155125 - RNA, 16 nt, Human
aaagggacugagaaau

SEQ ID NO: 3155126 - RNA, 14 nt, Human
aaauaguauuugag

SEQ ID NO: 3155127 - RNA, 16 nt, Human
aacuuuggaacaagau

SEQ ID NO: 3155128 - RNA, 15 nt, Human
aacaaagaaauuaug

SEQ ID NO: 3155129 - RNA, 17 nt, Human
aacaaagaaauuaugug

SEQ ID NO: 3155130 - RNA, 21 nt, Human
aaauugauguguuuauuuaua

SEQ ID NO: 3155131 - RNA, 14 nt, Human
aaccagaucauugu

SEQ ID NO: 3155132 - RNA, 12 nt, Human
aaccagaucauu

SEQ ID NO: 3155133 - RNA, 13 nt, Human
aacaugauuuggg

SEQ ID NO: 3155134 - RNA, 22 nt, Human
aagaaauuaugugccagauuua

SEQ ID NO: 3155135 - RNA, 13 nt, Human
aagaaauuaugug

SEQ ID NO: 3155136 - RNA, 21 nt, Human
aauaauccuaaacauaugaau

SEQ ID NO: 3155137 - RNA, 13 nt, Human
aauaaucauugga

SEQ ID NO: 3155138 - RNA, 12 nt, Human
aauaauguaaga

SEQ ID NO: 3155139 - RNA, 19 nt, Human
aauaauguaagacaaauau

SEQ ID NO: 3155140 - RNA, 17 nt, Human
aauaagugccaggaugg

SEQ ID NO: 3155141 - RNA, 19 nt, Human
aauaaacuauuuguaaagu

SEQ ID NO: 3155142 - RNA, 18 nt, Human
aauaaacuggcagcucag

SEQ ID NO: 3155143 - RNA, 19 nt, Human
aagucucuggaauuugaaa

SEQ ID NO: 3155144 - RNA, 14 nt, Human
aaguacuuuuggca

SEQ ID NO: 3155145 - RNA, 15 nt, Human
aaguacuuuuggcau

SEQ ID NO: 3155146 - RNA, 23 nt, Human
aaguccaggcuuuuuuaucaugu

SEQ ID NO: 3155147 - RNA, 14 nt, Human
aauauuauguguuu

SEQ ID NO: 3155148 - RNA, 18 nt, Human
aaugauaaguaaaugcua

SEQ ID NO: 3155149 - RNA, 21 nt, Human
aaugauaaguaaaugcuaggu

SEQ ID NO: 3155150 - RNA, 18 nt, Human
aaucucauaauuuauaca

SEQ ID NO: 3155151 - RNA, 22 nt, Human
aaugucaguauguggaagugug

SEQ ID NO: 3155152 - RNA, 16 nt, Human
aaugucaguaugugga

SEQ ID NO: 3155153 - RNA, 14 nt, Human
aauuaaauuuugag

SEQ ID NO: 3155154 - RNA, 19 nt, Human
acuuuauacccagaaaguu

SEQ ID NO: 3155155 - RNA, 13 nt, Human
acuuuagggaagu

SEQ ID NO: 3155156 - RNA, 23 nt, Human
acuuuagggaaguacuuuuggca

SEQ ID NO: 3155157 - RNA, 23 nt, Human
agaaaauauuauguguuuccaua

SEQ ID NO: 3155158 - RNA, 12 nt, Human
acuguuuugaau

SEQ ID NO: 3155159 - RNA, 19 nt, Human
acuuguaaaggaauuuaaa

SEQ ID NO: 3155160 - RNA, 20 nt, Human
acuuguaaaggaauuuaaaa

SEQ ID NO: 3155161 - RNA, 18 nt, Human
acuuguaaaggaauuuaa

SEQ ID NO: 3155162 - RNA, 22 nt, Human
acuucugccagcauaauacuug

SEQ ID NO: 3155163 - RNA, 22 nt, Human
acucuaccucauaucaguuugc

SEQ ID NO: 3155164 - RNA, 13 nt, Human
acucuaccucaua

SEQ ID NO: 3155165 - RNA, 14 nt, Human
acuagcuauggugu

SEQ ID NO: 3155166 - RNA, 13 nt, Human
acucagucuuuaa

SEQ ID NO: 3155167 - RNA, 17 nt, Human
acucaggcccaaagccu

SEQ ID NO: 3155168 - RNA, 16 nt, Human
acucaggcccaaagcc

SEQ ID NO: 3155169 - RNA, 12 nt, Human
acuccccuccuu

SEQ ID NO: 3155170 - RNA, 16 nt, Human
acgccagacuucccac

SEQ ID NO: 3155171 - RNA, 22 nt, Human
acgccagacuucccacggcucc

SEQ ID NO: 3155172 - RNA, 15 nt, Human
acacugauccagccc

SEQ ID NO: 3155173 - RNA, 16 nt, Human
acagaauauguuucaa

SEQ ID NO: 3155174 - RNA, 17 nt, Human
acagaauauguuucaaa

SEQ ID NO: 3155175 - RNA, 19 nt, Human
acagaauauguuucaaacu

SEQ ID NO: 3155176 - RNA, 21 nt, Human
acagaauauguuucaaacuuu

SEQ ID NO: 3155177 - RNA, 19 nt, Human
acaggucauauuaauauau

SEQ ID NO: 3155178 - RNA, 15 nt, Human
acaggggcaggagga

SEQ ID NO: 3155179 - RNA, 20 nt, Human
aauuuugaguucuacauaag

SEQ ID NO: 3155180 - RNA, 15 nt, Human
aauuuuauaucuugu

SEQ ID NO: 3155181 - RNA, 13 nt, Human
aauuuugaaaaac

SEQ ID NO: 3155182 - RNA, 16 nt, Human
acaacuauuuuuccaa

SEQ ID NO: 3155183 - RNA, 17 nt, Human
acaacuucaauauccaa

SEQ ID NO: 3155184 - RNA, 18 nt, Human
acaacuucccagugaauu

SEQ ID NO: 3155185 - RNA, 13 nt, Human
acaacuuuauacc

SEQ ID NO: 3155186 - RNA, 14 nt, Human
acaacuuuauaccc

SEQ ID NO: 3155187 - RNA, 23 nt, Human
accacuaaaagaucgcaguuugc

SEQ ID NO: 3155188 - RNA, 19 nt, Human
accaagccuggucagccca

SEQ ID NO: 3155189 - RNA, 20 nt, Human
accaagccuggucagcccaa

SEQ ID NO: 3155190 - RNA, 18 nt, Human
accaagccuggucagccc

SEQ ID NO: 3155191 - RNA, 15 nt, Human
acagguuagcugcuc

SEQ ID NO: 3155192 - RNA, 15 nt, Human
acagguuugggaccc

SEQ ID NO: 3155193 - RNA, 18 nt, Human
acagguuugggaccccug

SEQ ID NO: 3155194 - RNA, 12 nt, Human
accccgacuuuu

SEQ ID NO: 3155195 - RNA, 15 nt, Human
accccgacuuuuguu

SEQ ID NO: 3155196 - RNA, 14 nt, Human
agcaugcacaaauu

SEQ ID NO: 3155197 - RNA, 13 nt, Human
agccagaggucug

SEQ ID NO: 3155198 - RNA, 21 nt, Human
agauaggucagugcaaauacu

SEQ ID NO: 3155199 - RNA, 18 nt, Human
agaggggaaaagagauga

SEQ ID NO: 3155200 - RNA, 16 nt, Human
agaggggaaaagagau

SEQ ID NO: 3155201 - RNA, 16 nt, Human
agaggguguccugcac

SEQ ID NO: 3155202 - RNA, 14 nt, Human
agacgggcccuggu

SEQ ID NO: 3155203 - RNA, 14 nt, Human
agacacaacuauuu

SEQ ID NO: 3155204 - RNA, 15 nt, Human
agaccauagugacca

SEQ ID NO: 3155205 - RNA, 18 nt, Human
agcuucacuguaaaauaa

SEQ ID NO: 3155206 - RNA, 19 nt, Human
agcuuccuucugugaaagu

SEQ ID NO: 3155207 - RNA, 15 nt, Human
agcuuuucccuuuuu

SEQ ID NO: 3155208 - RNA, 21 nt, Human
agcuuuuaugugaaacauguu

SEQ ID NO: 3155209 - RNA, 20 nt, Human
aggaaauggcuguggagugu

SEQ ID NO: 3155210 - RNA, 15 nt, Human
aggaacuacugagga

SEQ ID NO: 3155211 - RNA, 19 nt, Human
aggcuauggggauagaugu

SEQ ID NO: 3155212 - RNA, 22 nt, Human
aggcuauggggauagaugugug

SEQ ID NO: 3155213 - RNA, 21 nt, Human
aggcuauggggauagaugugu

SEQ ID NO: 3155214 - RNA, 18 nt, Human
aggcugcagccaggccac

SEQ ID NO: 3155215 - RNA, 17 nt, Human
agguucaugcaaacuuu

SEQ ID NO: 3155216 - RNA, 22 nt, Human
agguuaauuccaauuauaugag

SEQ ID NO: 3155217 - RNA, 15 nt, Human
agguuaauuccaauu

SEQ ID NO: 3155218 - RNA, 23 nt, Human
agguggcaucagugucuuuccac

SEQ ID NO: 3155219 - RNA, 22 nt, Human
agguggcaucagugucuuucca

SEQ ID NO: 3155220 - RNA, 23 nt, Human
aggugcuucuaguucugccagga

SEQ ID NO: 3155221 - RNA, 16 nt, Human
agguggaagagggcug

SEQ ID NO: 3155222 - RNA, 21 nt, Human
aggugcuucuaguucugccag

SEQ ID NO: 3155223 - RNA, 22 nt, Human
aggugcuucuaguucugccagg

SEQ ID NO: 3155224 - RNA, 15 nt, Human
agguggaaauaaacu

SEQ ID NO: 3155225 - RNA, 17 nt, Human
aggggccgggggcaguc

SEQ ID NO: 3155226 - RNA, 17 nt, Human
aggucccuaauaaagcu

SEQ ID NO: 3155227 - RNA, 18 nt, Human
aggucccuaauaaagcug

SEQ ID NO: 3155228 - RNA, 19 nt, Human
aggucccuaauaaagcugu

SEQ ID NO: 3155229 - RNA, 16 nt, Human
aggucccuaauaaagc

SEQ ID NO: 3155230 - RNA, 20 nt, Human
aggucccuaauaaagcugug

SEQ ID NO: 3155231 - RNA, 18 nt, Human
auauuuaguguucauaaa

SEQ ID NO: 3155232 - RNA, 16 nt, Human
auauuuauaaaaauaa

SEQ ID NO: 3155233 - RNA, 16 nt, Human
auauccuuucuaacaa

SEQ ID NO: 3155234 - RNA, 15 nt, Human
auauccuuucuaaca

SEQ ID NO: 3155235 - RNA, 22 nt, Human
auauaaguauucuaaauuuuau

SEQ ID NO: 3155236 - RNA, 19 nt, Human
auauaaguauucuaaauuu

SEQ ID NO: 3155237 - RNA, 15 nt, Human
auauaagugauugcu

SEQ ID NO: 3155238 - RNA, 15 nt, Human
auauaaguguguguu

SEQ ID NO: 3155239 - RNA, 15 nt, Human
auacuugaaaauuaa

SEQ ID NO: 3155240 - RNA, 16 nt, Human
auacuugaaaauuaac

SEQ ID NO: 3155241 - RNA, 19 nt, Human
auaaguauuuaauucaugu

SEQ ID NO: 3155242 - RNA, 19 nt, Human
auaaguguguguuuuucau

SEQ ID NO: 3155243 - RNA, 22 nt, Human
auaaguguguguuuuucauaaa

SEQ ID NO: 3155244 - RNA, 16 nt, Human
agugucuuuccacucc

SEQ ID NO: 3155245 - RNA, 23 nt, Human
aguuguaucagcacguguggccu

SEQ ID NO: 3155246 - RNA, 20 nt, Human
aguuguaucagcacgugugg

SEQ ID NO: 3155247 - RNA, 22 nt, Human
aucuuauaauuuaaaauaugcu

SEQ ID NO: 3155248 - RNA, 16 nt, Human
aucuuauaauuuaaaa

SEQ ID NO: 3155249 - RNA, 20 nt, Human
augaaacacucaguuguuca

SEQ ID NO: 3155250 - RNA, 22 nt, Human
augaaaaaauauauaucaaaua

SEQ ID NO: 3155251 - RNA, 14 nt, Human
augaaaaaauauau

SEQ ID NO: 3155252 - RNA, 17 nt, Human
augaaaaaauauauauc

SEQ ID NO: 3155253 - RNA, 14 nt, Human
augacucagaauau

SEQ ID NO: 3155254 - RNA, 18 nt, Human
augaagcuuuuaugugaa

SEQ ID NO: 3155255 - RNA, 19 nt, Human
augaagcuuuuaugugaaa

SEQ ID NO: 3155256 - RNA, 20 nt, Human
augaagcuuuuaugugaaac

SEQ ID NO: 3155257 - RNA, 13 nt, Human
auccuuucuaaca

SEQ ID NO: 3155258 - RNA, 21 nt, Human
augccuuuguacuuuagggaa

SEQ ID NO: 3155259 - RNA, 17 nt, Human
auguaauaacugugaag

SEQ ID NO: 3155260 - RNA, 23 nt, Human
auggugacuuuugaaaagaggug

SEQ ID NO: 3155261 - RNA, 18 nt, Human
augugggggucugugugu

SEQ ID NO: 3155262 - RNA, 17 nt, Human
augugggggucugugug

SEQ ID NO: 3155263 - RNA, 16 nt, Human
augugggggucugugu

SEQ ID NO: 3155264 - RNA, 18 nt, Human
auguuucuuuguaaugaa

SEQ ID NO: 3155265 - RNA, 13 nt, Human
ggccccugccucu

SEQ ID NO: 3155266 - RNA, 17 nt, Human
ggccccugccucucugc

SEQ ID NO: 3155267 - RNA, 18 nt, Human
ggccccugccucucugca

SEQ ID NO: 3155268 - RNA, 19 nt, Human
ggccccugccucucugcag

SEQ ID NO: 3155269 - RNA, 20 nt, Human
ggcuaagcuucacuguaaaa

SEQ ID NO: 3155270 - RNA, 18 nt, Human
ggcucuugaacugagcuu

SEQ ID NO: 3155271 - RNA, 19 nt, Human
ggcucuugaacugagcuug

SEQ ID NO: 3155272 - RNA, 20 nt, Human
ggcucuugaacugagcuugg

SEQ ID NO: 3155273 - RNA, 23 nt, Human
aaaaagauuuucagaaaauauua

SEQ ID NO: 3155274 - RNA, 14 nt, Human
aaaaauaaaaaaca

SEQ ID NO: 3155275 - RNA, 14 nt, Human
ggagggggagaggg

SEQ ID NO: 3155276 - RNA, 22 nt, Human
ggaguguguaauuuaaaauugu

SEQ ID NO: 3155277 - RNA, 11 nt, Human
ggaguguguaa

SEQ ID NO: 3155278 - RNA, 23 nt, Human
ggaucuucaucugacuaugacau

SEQ ID NO: 3155279 - RNA, 22 nt, Human
ggaucuucaucugacuaugaca

SEQ ID NO: 3155280 - RNA, 14 nt, Human
ggauuguaguccca

SEQ ID NO: 3155281 - RNA, 12 nt, Human
ggcaggggccgg

SEQ ID NO: 3155282 - RNA, 14 nt, Human
ggcaggagggaggu

SEQ ID NO: 3155283 - RNA, 22 nt, Human
ggcaucggggagccgggagccu

SEQ ID NO: 3155284 - RNA, 16 nt, Human
ggcauccagagucccu

SEQ ID NO: 3155285 - RNA, 18 nt, Human
ggcauccagagucccugc

SEQ ID NO: 3155286 - RNA, 23 nt, Human
ggcaucggggagccgggagccug

SEQ ID NO: 3155287 - RNA, 14 nt, Human
aaaauauuuaaagg

SEQ ID NO: 3155288 - RNA, 16 nt, Human
aaaauauauuuaauga

SEQ ID NO: 3155289 - RNA, 15 nt, Human
aaaauauauuuaaug

SEQ ID NO: 3155290 - RNA, 11 nt, Human
aaaaugagaaa

SEQ ID NO: 3155291 - RNA, 12 nt, Human
aaaaugagaaau

SEQ ID NO: 3155292 - RNA, 22 nt, Human
gggggcuucauacacaugagau

SEQ ID NO: 3155293 - RNA, 22 nt, Human
gggggcagucugagagaggcca

SEQ ID NO: 3155294 - RNA, 18 nt, Human
gggucauucauggccugg

SEQ ID NO: 3155295 - RNA, 21 nt, Human
gggucaucuguaccucugccu

SEQ ID NO: 3155296 - RNA, 15 nt, Human
aaaccaccagaagcc

SEQ ID NO: 3155297 - RNA, 18 nt, Human
aaaccaccagaagcccag

SEQ ID NO: 3155298 - RNA, 14 nt, Human
aaaccaccagaagc

SEQ ID NO: 3155299 - RNA, 19 nt, Human
aaaccaccagaagcccaga

SEQ ID NO: 3155300 - RNA, 14 nt, Human
ggucagugcaaaua

SEQ ID NO: 3155301 - RNA, 21 nt, Human
aaacuucccuuucugcuugug

SEQ ID NO: 3155302 - RNA, 16 nt, Human
gguaggaacugcuggg

SEQ ID NO: 3155303 - RNA, 18 nt, Human
gguaggaacugcugggcu

SEQ ID NO: 3155304 - RNA, 17 nt, Human
ggguguccugcaccggg

SEQ ID NO: 3155305 - RNA, 21 nt, Human
ggguguccugcaccggggccu

SEQ ID NO: 3155306 - RNA, 22 nt, Human
gguaaaucagacuaugaaguuu

SEQ ID NO: 3155307 - RNA, 15 nt, Human
aaauauauuuaauga

SEQ ID NO: 3155308 - RNA, 16 nt, Human
aaauauauuuuaagac

SEQ ID NO: 3155309 - RNA, 22 nt, Human
aaauauauuuuaagacgaaaca

SEQ ID NO: 3155310 - RNA, 18 nt, Human
aaauauaugcuaagucuu

SEQ ID NO: 3155311 - RNA, 14 nt, Human
aaauauauaucaaa

SEQ ID NO: 3155312 - RNA, 14 nt, Human
aaauauauuuaaug

SEQ ID NO: 3155313 - RNA, 20 nt, Human
aaauauuguguugugaaugu

SEQ ID NO: 3155314 - RNA, 13 nt, Human
guaaaccuuuuau

SEQ ID NO: 3155315 - RNA, 15 nt, Human
guaauagagcaaaau

SEQ ID NO: 3155316 - RNA, 14 nt, Human
aaagcuguguggca

SEQ ID NO: 3155317 - RNA, 18 nt, Human
aaagguucaugcaaacuu

SEQ ID NO: 3155318 - RNA, 21 nt, Human
aaaguaaaaacaaagaaauua

SEQ ID NO: 3155319 - RNA, 14 nt, Human
gguuugggaccccu

SEQ ID NO: 3155320 - RNA, 22 nt, Human
gguuuguuuagaagaagugugu

SEQ ID NO: 3155321 - RNA, 22 nt, Human
gguggggggggggcgcggcugg

SEQ ID NO: 3155322 - RNA, 16 nt, Human
gguggggggcuucaua

SEQ ID NO: 3155323 - RNA, 18 nt, Human
gguggggggcuucauaca

SEQ ID NO: 3155324 - RNA, 14 nt, Human
gguuccagccugcc

SEQ ID NO: 3155325 - RNA, 15 nt, Human
gguuccagccugcca

SEQ ID NO: 3155326 - RNA, 16 nt, Human
gguuccagccugccac

SEQ ID NO: 3155327 - RNA, 20 nt, Human
gguucuagcauggcauauuu

SEQ ID NO: 3155328 - RNA, 15 nt, Human
gcggcuggacuugga

SEQ ID NO: 3155329 - RNA, 16 nt, Human
gcggcuggacuuggag

SEQ ID NO: 3155330 - RNA, 21 nt, Human
gcguggaacucgugucuggca

SEQ ID NO: 3155331 - RNA, 21 nt, Human
gcuaggaauuguguuuauaau

SEQ ID NO: 3155332 - RNA, 17 nt, Human
gcuaggguggggagaga

SEQ ID NO: 3155333 - RNA, 18 nt, Human
gcuaggguggggagagac

SEQ ID NO: 3155334 - RNA, 18 nt, Human
gcucagaggguguccugc

SEQ ID NO: 3155335 - RNA, 19 nt, Human
gcucagaggguguccugca

SEQ ID NO: 3155336 - RNA, 22 nt, Human
gcucaggagcccugggaggcuc

SEQ ID NO: 3155337 - RNA, 21 nt, Human
gcucaggagcccugggaggcu

SEQ ID NO: 3155338 - RNA, 23 nt, Human
gcucaggagcccugggaggcucu

SEQ ID NO: 3155339 - RNA, 16 nt, Human
gcucagagcaguguuu

SEQ ID NO: 3155340 - RNA, 21 nt, Human
gcucacugcuaagaauauuug

SEQ ID NO: 3155341 - RNA, 19 nt, Human
gccauucuuucccaacacc

SEQ ID NO: 3155342 - RNA, 12 nt, Human
gccauucuuucc

SEQ ID NO: 3155343 - RNA, 22 nt, Human
gcccacuguacuugcucuugau

SEQ ID NO: 3155344 - RNA, 15 nt, Human
gcccacuguacuugc

SEQ ID NO: 3155345 - RNA, 20 nt, Human
gcccacuguacuugcucuug

SEQ ID NO: 3155346 - RNA, 22 nt, Human
gcuuuuccucaaagggagagag

SEQ ID NO: 3155347 - RNA, 21 nt, Human
gcuuuucccuuuuuuuaagua

SEQ ID NO: 3155348 - RNA, 20 nt, Human
gcuuuucccuuuuuuuaagu

SEQ ID NO: 3155349 - RNA, 17 nt, Human
gcuuuucuuucuaccaa

SEQ ID NO: 3155350 - RNA, 16 nt, Human
ggaaaaaauaacaaug

SEQ ID NO: 3155351 - RNA, 21 nt, Human
ggaaacuaggugcauauuuau

SEQ ID NO: 3155352 - RNA, 19 nt, Human
ggacaguauuuguggggag

SEQ ID NO: 3155353 - RNA, 18 nt, Human
ggacaguauuugugggga

SEQ ID NO: 3155354 - RNA, 17 nt, Human
ggacaggggcaggagga

SEQ ID NO: 3155355 - RNA, 16 nt, Human
ggacaccuaggcuagg

SEQ ID NO: 3155356 - RNA, 16 nt, Human
ggacaccccgacuuuu

SEQ ID NO: 3155357 - RNA, 18 nt, Human
ggaaugaagcaaugcuuc

SEQ ID NO: 3155358 - RNA, 13 nt, Human
gcuggacuuggag

SEQ ID NO: 3155359 - RNA, 20 nt, Human
gcugggaauaagugccagga

SEQ ID NO: 3155360 - RNA, 18 nt, Human
gcugggccccugccucuc

SEQ ID NO: 3155361 - RNA, 12 nt, Human
gcugggccccug

SEQ ID NO: 3155362 - RNA, 13 nt, Human
gcugggccccugc

SEQ ID NO: 3155363 - RNA, 14 nt, Human
gcugggccccugcc

SEQ ID NO: 3155364 - RNA, 23 nt, Human
gcugcagccaggccacuggcccc

SEQ ID NO: 3155365 - RNA, 15 nt, Human
gcugcagccaggcca

SEQ ID NO: 3155366 - RNA, 11 nt, Human
gaaacuuggau

SEQ ID NO: 3155367 - RNA, 16 nt, Human
gaacaagaugguucua

SEQ ID NO: 3155368 - RNA, 19 nt, Human
gaaaucaaagagagaaaau

SEQ ID NO: 3155369 - RNA, 18 nt, Human
cuuuuaugugaaacaugu

SEQ ID NO: 3155370 - RNA, 19 nt, Human
cuuuuaugugaaacauguu

SEQ ID NO: 3155371 - RNA, 14 nt, Human
gaaaauuaacauga

SEQ ID NO: 3155372 - RNA, 14 nt, Human
gaaaaaauauauau

SEQ ID NO: 3155373 - RNA, 14 nt, Human
cuuuugucccagaa

SEQ ID NO: 3155374 - RNA, 13 nt, Human
cuugaugccuggc

SEQ ID NO: 3155375 - RNA, 17 nt, Human
cuugguuccagccugcc

SEQ ID NO: 3155376 - RNA, 19 nt, Human
cuugguuccagccugccac

SEQ ID NO: 3155377 - RNA, 20 nt, Human
cuugguuccagccugccacu

SEQ ID NO: 3155378 - RNA, 17 nt, Human
cuucuaccucuuggcug

SEQ ID NO: 3155379 - RNA, 15 nt, Human
cuuccucuccugucu

SEQ ID NO: 3155380 - RNA, 19 nt, Human
cuuccucuccugucucccu

SEQ ID NO: 3155381 - RNA, 23 nt, Human
cuggcccuaugcuuccggccucc

SEQ ID NO: 3155382 - RNA, 23 nt, Human
cugugaaguuuacauuguaaaua

SEQ ID NO: 3155383 - RNA, 18 nt, Human
cugugaaguuuacauugu

SEQ ID NO: 3155384 - RNA, 19 nt, Human
cuguuaucccugccugguc

SEQ ID NO: 3155385 - RNA, 22 nt, Human
cuggugaccuuccaagagccug

SEQ ID NO: 3155386 - RNA, 23 nt, Human
cuggugaccuuccaagagccuga

SEQ ID NO: 3155387 - RNA, 16 nt, Human
cuguacuugcucuuga

SEQ ID NO: 3155388 - RNA, 19 nt, Human
cuguacuugcucuugaugc

SEQ ID NO: 3155389 - RNA, 20 nt, Human
cuguacuugcucuugaugcc

SEQ ID NO: 3155390 - RNA, 15 nt, Human
gacaaagucaagcca

SEQ ID NO: 3155391 - RNA, 13 nt, Human
gaauuauuuuaaa

SEQ ID NO: 3155392 - RNA, 16 nt, Human
gaauuauuuuaaaaga

SEQ ID NO: 3155393 - RNA, 18 nt, Human
gaauuauuuuaaaagaua

SEQ ID NO: 3155394 - RNA, 12 nt, Human
gagcccugggag

SEQ ID NO: 3155395 - RNA, 16 nt, Human
gagcccugggaggcuc

SEQ ID NO: 3155396 - RNA, 18 nt, Human
gagcccugggaggcucug

SEQ ID NO: 3155397 - RNA, 19 nt, Human
gagcccugggaggcucugg

SEQ ID NO: 3155398 - RNA, 20 nt, Human
gagcccugggaggcucugga

SEQ ID NO: 3155399 - RNA, 20 nt, Human
gaggcucuggagcccacugu

SEQ ID NO: 3155400 - RNA, 22 nt, Human
gaggacaguauuuguggggagg

SEQ ID NO: 3155401 - RNA, 16 nt, Human
gagacgggcccuggug

SEQ ID NO: 3155402 - RNA, 18 nt, Human
gaucccaacacugccagc

SEQ ID NO: 3155403 - RNA, 19 nt, Human
gaucccaacacugccagca

SEQ ID NO: 3155404 - RNA, 17 nt, Human
gaucccaacacugccag

SEQ ID NO: 3155405 - RNA, 23 nt, Human
gauccagcccugaguuccuagcc

SEQ ID NO: 3155406 - RNA, 23 nt, Human
gaucucugcaggaaauggcugug

SEQ ID NO: 3155407 - RNA, 12 nt, Human
gaucucugcagg

SEQ ID NO: 3155408 - RNA, 17 nt, Human
gauacuugaaaauuaac

SEQ ID NO: 3155409 - RNA, 13 nt, Human
gauggaaugaugg

SEQ ID NO: 3155410 - RNA, 20 nt, Human
gcagccaggccacuggcccc

SEQ ID NO: 3155411 - RNA, 17 nt, Human
gcagagcugcgggcugg

SEQ ID NO: 3155412 - RNA, 19 nt, Human
gcagagcugcgggcugggu

SEQ ID NO: 3155413 - RNA, 22 nt, Human
gcauccagagucccugccugga

SEQ ID NO: 3155414 - RNA, 23 nt, Human
gcauccagagucccugccuggac

SEQ ID NO: 3155415 - RNA, 21 nt, Human
gcauccagagucccugccugg

SEQ ID NO: 3155416 - RNA, 17 nt, Human
gcaucggggagccggga

SEQ ID NO: 3155417 - RNA, 17 nt, Human
cauggcucccccuccac

SEQ ID NO: 3155418 - RNA, 19 nt, Human
cauauuaauauauuuccau

SEQ ID NO: 3155419 - RNA, 14 nt, Human
cauauuaauauauu

SEQ ID NO: 3155420 - RNA, 15 nt, Human
cauauuaauauauuu

SEQ ID NO: 3155421 - RNA, 23 nt, Human
cauaugcuguauauccuuucuaa

SEQ ID NO: 3155422 - RNA, 21 nt, Human
ccaccacacugauccagcccu

SEQ ID NO: 3155423 - RNA, 13 nt, Human
ccaccgccuccua

SEQ ID NO: 3155424 - RNA, 14 nt, Human
ccacuccuccuagc

SEQ ID NO: 3155425 - RNA, 13 nt, Human
cagcauaauacuu

SEQ ID NO: 3155426 - RNA, 21 nt, Human
cagaguaauccaagcaaaugu

SEQ ID NO: 3155427 - RNA, 17 nt, Human
cagagguugcagugugg

SEQ ID NO: 3155428 - RNA, 17 nt, Human
cagaggguguccugcac

SEQ ID NO: 3155429 - RNA, 18 nt, Human
cagggcugaggccucuca

SEQ ID NO: 3155430 - RNA, 16 nt, Human
cagggcugaggccucu

SEQ ID NO: 3155431 - RNA, 16 nt, Human
cagggaugguguucaa

SEQ ID NO: 3155432 - RNA, 23 nt, Human
cagguuugggaccccuggugguu

SEQ ID NO: 3155433 - RNA, 23 nt, Human
caguaaagaacaucccuccuggg

SEQ ID NO: 3155434 - RNA, 17 nt, Human
cagucugagagaggcca

SEQ ID NO: 3155435 - RNA, 21 nt, Human
cagugggccuggccagcaggu

SEQ ID NO: 3155436 - RNA, 14 nt, Human
cagugggccuggcc

SEQ ID NO: 3155437 - RNA, 15 nt, Human
cagugggccuggcca

SEQ ID NO: 3155438 - RNA, 17 nt, Human
cacucuugaaaaaugca

SEQ ID NO: 3155439 - RNA, 15 nt, Human
cacucuuggagccug

SEQ ID NO: 3155440 - RNA, 16 nt, Human
cacucuuggagccugc

SEQ ID NO: 3155441 - RNA, 14 nt, Human
cacucuuggagccu

SEQ ID NO: 3155442 - RNA, 17 nt, Human
cacucuuggagccugca

SEQ ID NO: 3155443 - RNA, 19 nt, Human
cacucuuggagccugcaga

SEQ ID NO: 3155444 - RNA, 13 nt, Human
cacuggggcaggg

SEQ ID NO: 3155445 - RNA, 23 nt, Human
cacuggggauugggccccugcca

SEQ ID NO: 3155446 - RNA, 15 nt, Human
cacuggggcaggggc

SEQ ID NO: 3155447 - RNA, 15 nt, Human
cacuggggauugggc

SEQ ID NO: 3155448 - RNA, 16 nt, Human
cacuggggauugggcc

SEQ ID NO: 3155449 - RNA, 17 nt, Human
cacuggggauugggccc

SEQ ID NO: 3155450 - RNA, 18 nt, Human
cacuggggauugggcccc

SEQ ID NO: 3155451 - RNA, 13 nt, Human
cagaauauguuuc

SEQ ID NO: 3155452 - RNA, 14 nt, Human
cagaauauguuuca

SEQ ID NO: 3155453 - RNA, 15 nt, Human
cagaauauguuucaa

SEQ ID NO: 3155454 - RNA, 17 nt, Human
cagaauauguuucaaac

SEQ ID NO: 3155455 - RNA, 18 nt, Human
cagaauauguuucaaacu

SEQ ID NO: 3155456 - RNA, 20 nt, Human
cagaauauguuucaaacuuu

SEQ ID NO: 3155457 - RNA, 13 nt, Human
cagaauauugcuu

SEQ ID NO: 3155458 - RNA, 12 nt, Human
cagaauauguuu

SEQ ID NO: 3155459 - RNA, 21 nt, Human
cagaauaaacuggcagcucag

SEQ ID NO: 3155460 - RNA, 20 nt, Human
caacuauuuuuccaaaauaa

SEQ ID NO: 3155461 - RNA, 20 nt, Human
caaauccuugugggaaaaga

SEQ ID NO: 3155462 - RNA, 22 nt, Human
caaauccagccugcugccugcu

SEQ ID NO: 3155463 - RNA, 22 nt, Human
caaaugagggucuugguuccag

SEQ ID NO: 3155464 - RNA, 18 nt, Human
caacaccucuuggggagu

SEQ ID NO: 3155465 - RNA, 18 nt, Human
caaaaaaauauauuuaau

SEQ ID NO: 3155466 - RNA, 15 nt, Human
caaaccaccagaagc

SEQ ID NO: 3155467 - RNA, 16 nt, Human
caaaccaccagaagcc

SEQ ID NO: 3155468 - RNA, 20 nt, Human
caaaccaccagaagcccaga

SEQ ID NO: 3155469 - RNA, 22 nt, Human
caaaccaccagaagcccagaau

SEQ ID NO: 3155470 - RNA, 19 nt, Human
auuuauacaggucauauua

SEQ ID NO: 3155471 - RNA, 22 nt, Human
auuuaaugauaaguaaaugcua

SEQ ID NO: 3155472 - RNA, 18 nt, Human
auuguaagcaugcacaaa

SEQ ID NO: 3155473 - RNA, 22 nt, Human
auugauccagaaagaaaacuug

SEQ ID NO: 3155474 - RNA, 18 nt, Human
auugauccagaaagaaaa

SEQ ID NO: 3155475 - RNA, 19 nt, Human
auugauccagaaagaaaac

SEQ ID NO: 3155476 - RNA, 14 nt, Human
auuguaaauaguau

SEQ ID NO: 3155477 - RNA, 22 nt, Human
auucaagaaaacaacuucaaua

SEQ ID NO: 3155478 - RNA, 18 nt, Human
auuaaauuuugaguucua

SEQ ID NO: 3155479 - RNA, 23 nt, Human
auuaugugccagauuuaugcaua

SEQ ID NO: 3155480 - RNA, 15 nt, Human
auuauguguguuuua

SEQ ID NO: 3155481 - RNA, 20 nt, Human
auuauguguguuuuaaaaug

SEQ ID NO: 3155482 - RNA, 21 nt, Human
auuauguguguuuuaaaauga

SEQ ID NO: 3155483 - RNA, 16 nt, Human
auugauccagaaagaa

SEQ ID NO: 3155484 - RNA, 17 nt, Human
auugauccagaaagaaa

SEQ ID NO: 3155485 - RNA, 17 nt, Human
auucuugccaaauauaa

SEQ ID NO: 3155486 - RNA, 13 nt, Human
auucugagagcug

SEQ ID NO: 3155487 - RNA, 14 nt, Human
auucugagagcugu

SEQ ID NO: 3155488 - RNA, 19 nt, Human
auucuuugaccuguuggga

SEQ ID NO: 3155489 - RNA, 22 nt, Human
ccagggggccagucccugaggc

SEQ ID NO: 3155490 - RNA, 23 nt, Human
cgccacuguuuugaaucucauaa

SEQ ID NO: 3155491 - RNA, 16 nt, Human
cgaauuuuaaaagaug

SEQ ID NO: 3155492 - RNA, 16 nt, Human
cgacagagcgagacuu

SEQ ID NO: 3155493 - RNA, 14 nt, Human
cguaaaauuaagaa

SEQ ID NO: 3155494 - RNA, 19 nt, Human
cuagccaccgccuccuaca

SEQ ID NO: 3155495 - RNA, 17 nt, Human
cuaucguaaaauuaaga

SEQ ID NO: 3155496 - RNA, 18 nt, Human
cuaucguaaaauuaagaa

SEQ ID NO: 3155497 - RNA, 22 nt, Human
cuaauucuuugaccuguuggga

SEQ ID NO: 3155498 - RNA, 21 nt, Human
cuaauucuuugaccuguuggg

SEQ ID NO: 3155499 - RNA, 23 nt, Human
cuccaagcccaguucagcuuggg

SEQ ID NO: 3155500 - RNA, 18 nt, Human
cucaugugacucuuucca

SEQ ID NO: 3155501 - RNA, 14 nt, Human
cucaugugacucuu

SEQ ID NO: 3155502 - RNA, 12 nt, Human
cuccuacagccc

SEQ ID NO: 3155503 - RNA, 15 nt, Human
cucgugucuggcaca

SEQ ID NO: 3155504 - RNA, 13 nt, Human
cucugcagguccc

SEQ ID NO: 3155505 - RNA, 14 nt, Human
cucugcaggucccu

SEQ ID NO: 3155506 - RNA, 15 nt, Human
cucugcaggucccua

SEQ ID NO: 3155507 - RNA, 16 nt, Human
cucugcaggucccuaa

SEQ ID NO: 3155508 - RNA, 17 nt, Human
cucugcaggucccuaau

SEQ ID NO: 3155509 - RNA, 22 nt, Human
cugaaaauugaugggauuuggu

SEQ ID NO: 3155510 - RNA, 13 nt, Human
cugaaacuucccu

SEQ ID NO: 3155511 - RNA, 13 nt, Human
cucuugaugccug

SEQ ID NO: 3155512 - RNA, 15 nt, Human
cucuugaugccuggc

SEQ ID NO: 3155513 - RNA, 16 nt, Human
cucuugaugccuggcg

SEQ ID NO: 3155514 - RNA, 21 nt, Human
cucuugaugccuggcggggug

SEQ ID NO: 3155515 - RNA, 21 nt, Human
cugaagcuaucguaaaauuaa

SEQ ID NO: 3155516 - RNA, 22 nt, Human
cugaagcuaucguaaaauuaag

SEQ ID NO: 3155517 - RNA, 14 nt, Human
cugagagaggccau

SEQ ID NO: 3155518 - RNA, 21 nt, Human
cugagagaggccauucuuucc

SEQ ID NO: 3155519 - RNA, 22 nt, Human
cugagagaggccauucuuuccc

SEQ ID NO: 3155520 - RNA, 13 nt, Human
cugagagaggcca

SEQ ID NO: 3155521 - RNA, 12 nt, Human
cugagaggccac

SEQ ID NO: 3155522 - RNA, 16 nt, Human
cugagaucucugcagg

SEQ ID NO: 3155523 - RNA, 17 nt, Human
cugagaucucugcagga

SEQ ID NO: 3155524 - RNA, 18 nt, Human
cugagaucucugcaggaa

SEQ ID NO: 3155525 - RNA, 23 nt, Human
aaauuaugugccagauuuaugca

SEQ ID NO: 3155526 - RNA, 17 nt, Human
aaauuguauuacaaauc

SEQ ID NO: 3155527 - RNA, 19 nt, Human
aaauucuauuacaguaugu

SEQ ID NO: 3155528 - RNA, 15 nt, Human
aaauucuacaacaca

SEQ ID NO: 3155529 - RNA, 17 nt, Human
aaauuccaagugauuga

SEQ ID NO: 3155530 - RNA, 21 nt, Human
guauucuaaauuuuauaucuu

SEQ ID NO: 3155531 - RNA, 24 nt, Human
guauucuaaauuuuauaucuugua

SEQ ID NO: 3155532 - RNA, 19 nt, Human
guauucuagcuaauguaau

SEQ ID NO: 3155533 - RNA, 16 nt, Human
aaaucauucauuuucu

SEQ ID NO: 3155534 - RNA, 18 nt, Human
gucgcccuggacugugug

SEQ ID NO: 3155535 - RNA, 21 nt, Human
aacacugggagaaaugaaaaa

SEQ ID NO: 3155536 - RNA, 15 nt, Human
guccaucagccucca

SEQ ID NO: 3155537 - RNA, 22 nt, Human
guccccagacuccaccaagccu

SEQ ID NO: 3155538 - RNA, 22 nt, Human
gucccgggacaccuaggcuagg

SEQ ID NO: 3155539 - RNA, 12 nt, Human
gucccuaauaaa

SEQ ID NO: 3155540 - RNA, 23 nt, Human
aacuauucaggagaguagaacag

SEQ ID NO: 3155541 - RNA, 12 nt, Human
aacuauggccug

SEQ ID NO: 3155542 - RNA, 21 nt, Human
aacuaggugcauauuuauaaa

SEQ ID NO: 3155543 - RNA, 19 nt, Human
gucuuauauauuguagaua

SEQ ID NO: 3155544 - RNA, 22 nt, Human
gucuuuccacuccuccuagcca

SEQ ID NO: 3155545 - RNA, 14 nt, Human
gugaaguuuacauu

SEQ ID NO: 3155546 - RNA, 19 nt, Human
aacugugaaguuuacauug

SEQ ID NO: 3155547 - RNA, 17 nt, Human
aacugugaaguuuacau

SEQ ID NO: 3155548 - RNA, 10 nt, Human
gugauguguc

SEQ ID NO: 3155549 - RNA, 23 nt, Human
aagaaagagcaacaauccaucuc

SEQ ID NO: 3155550 - RNA, 14 nt, Human
aagaaaacaacuuc

SEQ ID NO: 3155551 - RNA, 19 nt, Human
gugccagauuuaugcauau

SEQ ID NO: 3155552 - RNA, 19 nt, Human
aagaagugugucacccuua

SEQ ID NO: 3155553 - RNA, 15 nt, Human
gugcucuccaagccc

SEQ ID NO: 3155554 - RNA, 19 nt, Human
gugcucaggagcccuggga

SEQ ID NO: 3155555 - RNA, 18 nt, Human
gugcucaggagcccuggg

SEQ ID NO: 3155556 - RNA, 16 nt, Human
gugcucaggagcccug

SEQ ID NO: 3155557 - RNA, 12 nt, Human
aaguaaaugcua

SEQ ID NO: 3155558 - RNA, 19 nt, Human
aaguauguguaaaauguga

SEQ ID NO: 3155559 - RNA, 18 nt, Human
aaguauguguaaaaugug

SEQ ID NO: 3155560 - RNA, 21 nt, Human
aagucacuggccaguggcugg

SEQ ID NO: 3155561 - RNA, 17 nt, Human
guuuuaaaaugagaaau

SEQ ID NO: 3155562 - RNA, 21 nt, Human
uaaaaauauuguguugugaau

SEQ ID NO: 3155563 - RNA, 14 nt, Human
uaaaaauauugugu

SEQ ID NO: 3155564 - RNA, 22 nt, Human
uaaaaagccugcaauuucauau

SEQ ID NO: 3155565 - RNA, 19 nt, Human
uaaaaagccugcaauuuca

SEQ ID NO: 3155566 - RNA, 11 nt, Human
uaaaaugugaa

SEQ ID NO: 3155567 - RNA, 16 nt, Human
uaaaauugugaugugu

SEQ ID NO: 3155568 - RNA, 15 nt, Human
uaaaauugugaugug

SEQ ID NO: 3155569 - RNA, 13 nt, Human
uaaaaugugaagu

SEQ ID NO: 3155570 - RNA, 18 nt, Human
aagugugggucugugugu

SEQ ID NO: 3155571 - RNA, 17 nt, Human
aagugugggucugugug

SEQ ID NO: 3155572 - RNA, 10 nt, Human
aagugugggu

SEQ ID NO: 3155573 - RNA, 20 nt, Human
aagugugggucugugugugu

SEQ ID NO: 3155574 - RNA, 12 nt, Human
aaguguguguuu

SEQ ID NO: 3155575 - RNA, 16 nt, Human
aaguguguguuuuuca

SEQ ID NO: 3155576 - RNA, 21 nt, Human
aaguguguguuuuucauaaag

SEQ ID NO: 3155577 - RNA, 19 nt, Human
aaggaaaaaauaacaauga

SEQ ID NO: 3155578 - RNA, 19 nt, Human
guucuagcauggcauauuu

SEQ ID NO: 3155579 - RNA, 22 nt, Human
guucuagcauggcauauuuuuc

SEQ ID NO: 3155580 - RNA, 19 nt, Human
aagcuuuuaugugaaacau

SEQ ID NO: 3155581 - RNA, 21 nt, Human
aagcuuuuaugugaaacaugu

SEQ ID NO: 3155582 - RNA, 19 nt, Human
guuaauuccaauuauauga

SEQ ID NO: 3155583 - RNA, 17 nt, Human
guuauuauauuuacaaa

SEQ ID NO: 3155584 - RNA, 18 nt, Human
guuauugauaaguucaua

SEQ ID NO: 3155585 - RNA, 21 nt, Human
guuauugauaaguucauacau

SEQ ID NO: 3155586 - RNA, 22 nt, Human
guuauugauaaguucauacauu

SEQ ID NO: 3155587 - RNA, 19 nt, Human
guuauuauauuuacaaaug

SEQ ID NO: 3155588 - RNA, 12 nt, Human
guucagcuuggg

SEQ ID NO: 3155589 - RNA, 17 nt, Human
aagccuggucagcccaa

SEQ ID NO: 3155590 - RNA, 18 nt, Human
aagccuggucagcccaaa

SEQ ID NO: 3155591 - RNA, 15 nt, Human
aagccuguuuaagag

SEQ ID NO: 3155592 - RNA, 18 nt, Human
aagccuguuuaagagaca

SEQ ID NO: 3155593 - RNA, 16 nt, Human
aagcacuaaacaaaga

SEQ ID NO: 3155594 - RNA, 23 nt, Human
aagcaugcacaaauucugucucu

SEQ ID NO: 3155595 - RNA, 16 nt, Human
aagaggugugcaagag

SEQ ID NO: 3155596 - RNA, 18 nt, Human
aagaggugugcaagagag

SEQ ID NO: 3155597 - RNA, 22 nt, Human
gugguucacucuuggagccugc

SEQ ID NO: 3155598 - RNA, 23 nt, Human
gugguucacucuuggagccugca

SEQ ID NO: 3155599 - RNA, 21 nt, Human
gugguucacucuuggagccug

SEQ ID NO: 3155600 - RNA, 15 nt, Human
guguaaaaugugaag

SEQ ID NO: 3155601 - RNA, 21 nt, Human
guguaugugggggucugugug

SEQ ID NO: 3155602 - RNA, 13 nt, Human
guguauguggggg

SEQ ID NO: 3155603 - RNA, 20 nt, Human
aagcaaaugugaaucauuuu

SEQ ID NO: 3155604 - RNA, 19 nt, Human
uauccaaaccaaauaaaaa

SEQ ID NO: 3155605 - RNA, 17 nt, Human
uauaaguguguguuuuu

SEQ ID NO: 3155606 - RNA, 23 nt, Human
uauaaguguguguuuuucauaaa

SEQ ID NO: 3155607 - RNA, 16 nt, Human
uauauuuaguaucuuu

SEQ ID NO: 3155608 - RNA, 19 nt, Human
uaugaaauuauauaaguau

SEQ ID NO: 3155609 - RNA, 20 nt, Human
acagauuuccauccuaguca

SEQ ID NO: 3155610 - RNA, 19 nt, Human
acagcggcuggacuuggag

SEQ ID NO: 3155611 - RNA, 20 nt, Human
uauggggauagaugugugga

SEQ ID NO: 3155612 - RNA, 15 nt, Human
uauucagcucaugga

SEQ ID NO: 3155613 - RNA, 21 nt, Human
uauucagcucauggacuucug

SEQ ID NO: 3155614 - RNA, 22 nt, Human
acagcggcuggacuuggaggua

SEQ ID NO: 3155615 - RNA, 21 nt, Human
acagcggcuggacuuggaggu

SEQ ID NO: 3155616 - RNA, 17 nt, Human
uauguguaaaaugugaa

SEQ ID NO: 3155617 - RNA, 16 nt, Human
uauguggaaguguggg

SEQ ID NO: 3155618 - RNA, 12 nt, Human
uauguggaagug

SEQ ID NO: 3155619 - RNA, 23 nt, Human
uaugugccagauuuaugcauauu

SEQ ID NO: 3155620 - RNA, 17 nt, Human
uaugugaaacauguuuc

SEQ ID NO: 3155621 - RNA, 14 nt, Human
uaugugaaacaugu

SEQ ID NO: 3155622 - RNA, 21 nt, Human
uagcauggcauauuuuucaca

SEQ ID NO: 3155623 - RNA, 22 nt, Human
uagcauggcauauuuuucacau

SEQ ID NO: 3155624 - RNA, 22 nt, Human
uagagcaaaauugauguguuua

SEQ ID NO: 3155625 - RNA, 21 nt, Human
uagagcaaaauugauguguuu

SEQ ID NO: 3155626 - RNA, 14 nt, Human
uagagcaaaauuga

SEQ ID NO: 3155627 - RNA, 16 nt, Human
aauuguuacaaauugu

SEQ ID NO: 3155628 - RNA, 20 nt, Human
aauuguguuuauaauuuuaa

SEQ ID NO: 3155629 - RNA, 21 nt, Human
aauuguguuuauaauuuuaaa

SEQ ID NO: 3155630 - RNA, 19 nt, Human
uagcuaauguaauaacugu

SEQ ID NO: 3155631 - RNA, 12 nt, Human
uagcuaauguaa

SEQ ID NO: 3155632 - RNA, 18 nt, Human
uaggcaaccuuuauuuuu

SEQ ID NO: 3155633 - RNA, 24 nt, Human
uagugaaaccccaucucuacugaa

SEQ ID NO: 3155634 - RNA, 19 nt, Human
acaauggauaggcacagga

SEQ ID NO: 3155635 - RNA, 19 nt, Human
uauaaaagccuguuuaaga

SEQ ID NO: 3155636 - RNA, 22 nt, Human
uauaaaagggacugagaaauuu

SEQ ID NO: 3155637 - RNA, 19 nt, Human
uauaaaaauaaaaaacacu

SEQ ID NO: 3155638 - RNA, 20 nt, Human
uauaaaagccuguuuaagag

SEQ ID NO: 3155639 - RNA, 15 nt, Human
uauaaguguguguuu

SEQ ID NO: 3155640 - RNA, 16 nt, Human
acaccucuuggggagu

SEQ ID NO: 3155641 - RNA, 23 nt, Human
uacaggucauauuaauauauuuc

SEQ ID NO: 3155642 - RNA, 22 nt, Human
uacauauaagugauugcugguu

SEQ ID NO: 3155643 - RNA, 17 nt, Human
uacauuguaaauaguau

SEQ ID NO: 3155644 - RNA, 20 nt, Human
aauuaagaaaggauaaaguu

SEQ ID NO: 3155645 - RNA, 21 nt, Human
aauuaagaaaggauaaaguug

SEQ ID NO: 3155646 - RNA, 13 nt, Human
aauguuaagcaga

SEQ ID NO: 3155647 - RNA, 12 nt, Human
aaugcuguguua

SEQ ID NO: 3155648 - RNA, 13 nt, Human
aaugcuguguuaa

SEQ ID NO: 3155649 - RNA, 16 nt, Human
aaugcuucaucccuuu

SEQ ID NO: 3155650 - RNA, 18 nt, Human
aauuccaagugauugaaa

SEQ ID NO: 3155651 - RNA, 16 nt, Human
aauuauuauuuggccc

SEQ ID NO: 3155652 - RNA, 21 nt, Human
aauuauuuuguucauacauau

SEQ ID NO: 3155653 - RNA, 22 nt, Human
aauuauuuuguucauacauauu

SEQ ID NO: 3155654 - RNA, 16 nt, Human
aauuauuuuguucaua

SEQ ID NO: 3155655 - RNA, 18 nt, Human
aauuauuuuguucauaca

SEQ ID NO: 3155656 - RNA, 19 nt, Human
aauuauuuuguucauacau

SEQ ID NO: 3155657 - RNA, 20 nt, Human
aauuauuuuguucauacaua

SEQ ID NO: 3155658 - RNA, 19 nt, Human
uacauuguacgaagaguau

SEQ ID NO: 3155659 - RNA, 14 nt, Human
aauugauguguuua

SEQ ID NO: 3155660 - RNA, 13 nt, Human
aauugauguguuu

SEQ ID NO: 3155661 - RNA, 19 nt, Human
aauugaugggauuugguca

SEQ ID NO: 3155662 - RNA, 18 nt, Human
uacuguaaggcaaucaug

SEQ ID NO: 3155663 - RNA, 19 nt, Human
uacuguaaggcaaucaugg

SEQ ID NO: 3155664 - RNA, 16 nt, Human
aaucuuauaauuuaaa

SEQ ID NO: 3155665 - RNA, 21 nt, Human
uaauagagcaaaauugaugug

SEQ ID NO: 3155666 - RNA, 12 nt, Human
uaauagagcaaa

SEQ ID NO: 3155667 - RNA, 18 nt, Human
uaauguaauaacugugaa

SEQ ID NO: 3155668 - RNA, 15 nt, Human
aaucuuuaauuuuac

SEQ ID NO: 3155669 - RNA, 16 nt, Human
aaucuuuaauuuuaca

SEQ ID NO: 3155670 - RNA, 19 nt, Human
aaugaaacacucaguuguu

SEQ ID NO: 3155671 - RNA, 14 nt, Human
aaugaaacuuggau

SEQ ID NO: 3155672 - RNA, 12 nt, Human
uaauaaacacuc

SEQ ID NO: 3155673 - RNA, 18 nt, Human
uaauaaacacucuugaaa

SEQ ID NO: 3155674 - RNA, 13 nt, Human
uaaguaaaugcua

SEQ ID NO: 3155675 - RNA, 14 nt, Human
uaaguucauacauu

SEQ ID NO: 3155676 - RNA, 16 nt, Human
uaaguauucuaaauuu

SEQ ID NO: 3155677 - RNA, 12 nt, Human
aauccgcccauc

SEQ ID NO: 3155678 - RNA, 19 nt, Human
aaucuuauaauuuaaaaua

SEQ ID NO: 3155679 - RNA, 21 nt, Human
aauauuugaauguaugcuuca

SEQ ID NO: 3155680 - RNA, 23 nt, Human
aauauuugaauguaugcuucaua

SEQ ID NO: 3155681 - RNA, 14 nt, Human
aauauuugaaugua

SEQ ID NO: 3155682 - RNA, 12 nt, Human
aauauuuagugu

SEQ ID NO: 3155683 - RNA, 17 nt, Human
aauauuguguugugaau

SEQ ID NO: 3155684 - RNA, 22 nt, Human
aauaguauuugagaguucuaaa

SEQ ID NO: 3155685 - RNA, 20 nt, Human
aauaguauuugagaguucua

SEQ ID NO: 3155686 - RNA, 23 nt, Human
aauaguauuugagaguucuaaau

SEQ ID NO: 3155687 - RNA, 15 nt, Human
aauaguauuugagag

SEQ ID NO: 3155688 - RNA, 14 nt, Human
aauauauuuuaaga

SEQ ID NO: 3155689 - RNA, 15 nt, Human
aauauauuuuaagac

SEQ ID NO: 3155690 - RNA, 13 nt, Human
uaagaauauuuga

SEQ ID NO: 3155691 - RNA, 13 nt, Human
uaagacaaauaug

SEQ ID NO: 3155692 - RNA, 14 nt, Human
uaagaauauuugaa

SEQ ID NO: 3155693 - RNA, 20 nt, Human
uaacgauaaaagacagugaa

SEQ ID NO: 3155694 - RNA, 22 nt, Human
uaacuuaaaagaacauguauau

SEQ ID NO: 3155695 - RNA, 21 nt, Human
uccacuccuccuagccaccca

SEQ ID NO: 3155696 - RNA, 18 nt, Human
accuuuggagcaaagcug

SEQ ID NO: 3155697 - RNA, 22 nt, Human
accuuuguuugcaucugaaaau

SEQ ID NO: 3155698 - RNA, 17 nt, Human
accuuugacaaagguaa

SEQ ID NO: 3155699 - RNA, 18 nt, Human
accuuugacaaagguaaa

SEQ ID NO: 3155700 - RNA, 20 nt, Human
uccagccugcugccugcuuu

SEQ ID NO: 3155701 - RNA, 11 nt, Human
uccagccugcc

SEQ ID NO: 3155702 - RNA, 13 nt, Human
uccagccugccac

SEQ ID NO: 3155703 - RNA, 20 nt, Human
uccagcccugaguuccuagc

SEQ ID NO: 3155704 - RNA, 22 nt, Human
uccagcccugaguuccuagcca

SEQ ID NO: 3155705 - RNA, 15 nt, Human
acuaauuuuaaaaug

SEQ ID NO: 3155706 - RNA, 18 nt, Human
acguaaugaaacuuggau

SEQ ID NO: 3155707 - RNA, 13 nt, Human
ucccuuuuuuuaa

SEQ ID NO: 3155708 - RNA, 16 nt, Human
ucccuuuuuuuaagua

SEQ ID NO: 3155709 - RNA, 21 nt, Human
ucccuuuuuuuaaguaaggaa

SEQ ID NO: 3155710 - RNA, 21 nt, Human
acucuugaaaaaugcauguug

SEQ ID NO: 3155711 - RNA, 22 nt, Human
acucuuggagccugcagagcug

SEQ ID NO: 3155712 - RNA, 23 nt, Human
acucuuggagccugcagagcugc

SEQ ID NO: 3155713 - RNA, 15 nt, Human
acucuuggagccugc

SEQ ID NO: 3155714 - RNA, 16 nt, Human
acucuuggagccugca

SEQ ID NO: 3155715 - RNA, 14 nt, Human
acucuuggagccug

SEQ ID NO: 3155716 - RNA, 12 nt, Human
acugagaaauuu

SEQ ID NO: 3155717 - RNA, 17 nt, Human
acugagaaauuuauaaa

SEQ ID NO: 3155718 - RNA, 21 nt, Human
acugagaaauuuauaaacuuu

SEQ ID NO: 3155719 - RNA, 15 nt, Human
acucuuguuuccuua

SEQ ID NO: 3155720 - RNA, 23 nt, Human
uccuggaagugcuaauuuugaaa

SEQ ID NO: 3155721 - RNA, 18 nt, Human
uccugcaccggggccugg

SEQ ID NO: 3155722 - RNA, 19 nt, Human
uccugcaccggggccuggg

SEQ ID NO: 3155723 - RNA, 20 nt, Human
acaugaauauuuaguguuca

SEQ ID NO: 3155724 - RNA, 18 nt, Human
ucaauauccaaaccaaau

SEQ ID NO: 3155725 - RNA, 17 nt, Human
ucaagaaaacaacuuca

SEQ ID NO: 3155726 - RNA, 19 nt, Human
acauucuuccaaaaagauu

SEQ ID NO: 3155727 - RNA, 19 nt, Human
acauuguacgaagaguauu

SEQ ID NO: 3155728 - RNA, 16 nt, Human
ucaauucuugccaaau

SEQ ID NO: 3155729 - RNA, 16 nt, Human
accaaagcgaauuuua

SEQ ID NO: 3155730 - RNA, 23 nt, Human
ucacagcaagucacuggccagug

SEQ ID NO: 3155731 - RNA, 14 nt, Human
ucacauaucuagua

SEQ ID NO: 3155732 - RNA, 24 nt, Human
accacauuggagauguuuaguaau

SEQ ID NO: 3155733 - RNA, 23 nt, Human
ucaugcaaacuuuauuuuguguu

SEQ ID NO: 3155734 - RNA, 14 nt, Human
ucaugugacucuuu

SEQ ID NO: 3155735 - RNA, 17 nt, Human
ucaugugacucuuucca

SEQ ID NO: 3155736 - RNA, 17 nt, Human
ucaugugaaaucauuca

SEQ ID NO: 3155737 - RNA, 16 nt, Human
ucaugugaaaucauuc

SEQ ID NO: 3155738 - RNA, 18 nt, Human
ucaugugacucuuuccaa

SEQ ID NO: 3155739 - RNA, 19 nt, Human
ucaugugacucuuuccaac

SEQ ID NO: 3155740 - RNA, 17 nt, Human
ucauguuuacagaggac

SEQ ID NO: 3155741 - RNA, 14 nt, Human
ucaugcaaacuuua

SEQ ID NO: 3155742 - RNA, 13 nt, Human
ucaucuaggauuu

SEQ ID NO: 3155743 - RNA, 12 nt, Human
accuaggcuagg

SEQ ID NO: 3155744 - RNA, 17 nt, Human
accuaggcuaggguggg

SEQ ID NO: 3155745 - RNA, 15 nt, Human
ucaguuuuugugaaa

SEQ ID NO: 3155746 - RNA, 17 nt, Human
ucaguuuuugugaaaag

SEQ ID NO: 3155747 - RNA, 22 nt, Human
ucauaaaaagccugcaauuuca

SEQ ID NO: 3155748 - RNA, 12 nt, Human
ucaguaugugga

SEQ ID NO: 3155749 - RNA, 14 nt, Human
ucaguauguggaag

SEQ ID NO: 3155750 - RNA, 13 nt, Human
accgaggcaggga

SEQ ID NO: 3155751 - RNA, 16 nt, Human
ucauaaauuuaugguu

SEQ ID NO: 3155752 - RNA, 16 nt, Human
accccuggugguucac

SEQ ID NO: 3155753 - RNA, 12 nt, Human
ucagcucaugga

SEQ ID NO: 3155754 - RNA, 14 nt, Human
accccugcuucuga

SEQ ID NO: 3155755 - RNA, 17 nt, Human
ucagauuugccuuauug

SEQ ID NO: 3155756 - RNA, 15 nt, Human
acuuuggaacaagau

SEQ ID NO: 3155757 - RNA, 15 nt, Human
acuuguauuaugugu

SEQ ID NO: 3155758 - RNA, 18 nt, Human
acuuguauuauguguguu

SEQ ID NO: 3155759 - RNA, 19 nt, Human
acuuguauuauguguguuu

SEQ ID NO: 3155760 - RNA, 14 nt, Human
acuugcuuuuaaaa

SEQ ID NO: 3155761 - RNA, 16 nt, Human
acuugcucuugaugcc

SEQ ID NO: 3155762 - RNA, 14 nt, Human
acuugcucuugaug

SEQ ID NO: 3155763 - RNA, 20 nt, Human
acuugcucuugaugccuggc

SEQ ID NO: 3155764 - RNA, 17 nt, Human
acuugcucuugaugccu

SEQ ID NO: 3155765 - RNA, 18 nt, Human
acuugcucuugaugccug

SEQ ID NO: 3155766 - RNA, 23 nt, Human
acuuaacuauucaggagaguaga

SEQ ID NO: 3155767 - RNA, 15 nt, Human
ucuaguucugccagg

SEQ ID NO: 3155768 - RNA, 16 nt, Human
ucuaguucugccagga

SEQ ID NO: 3155769 - RNA, 17 nt, Human
ucuaguucugccaggag

SEQ ID NO: 3155770 - RNA, 14 nt, Human
ucuaguucugccag

SEQ ID NO: 3155771 - RNA, 21 nt, Human
ucuagcauggcauauuuuuca

SEQ ID NO: 3155772 - RNA, 18 nt, Human
ucuagcauggcauauuuu

SEQ ID NO: 3155773 - RNA, 22 nt, Human
ucuagcauggcauauuuuucac

SEQ ID NO: 3155774 - RNA, 23 nt, Human
ucuagcauggcauauuuuucaca

SEQ ID NO: 3155775 - RNA, 13 nt, Human
agaauauguuuca

SEQ ID NO: 3155776 - RNA, 17 nt, Human
agaauauguuucaaacu

SEQ ID NO: 3155777 - RNA, 18 nt, Human
agaauauguuucaaacuu

SEQ ID NO: 3155778 - RNA, 19 nt, Human
agaauauguuucaaacuuu

SEQ ID NO: 3155779 - RNA, 21 nt, Human
agaauauguuucaaacuuugg

SEQ ID NO: 3155780 - RNA, 17 nt, Human
agaauaaaauuuuuaau

SEQ ID NO: 3155781 - RNA, 12 nt, Human
agaauaaaauuu

SEQ ID NO: 3155782 - RNA, 14 nt, Human
agaauaaaauuuuu

SEQ ID NO: 3155783 - RNA, 14 nt, Human
ucugcuuguguuaa

SEQ ID NO: 3155784 - RNA, 16 nt, Human
ucugugaaaguacauu

SEQ ID NO: 3155785 - RNA, 14 nt, Human
ucuguuuacagugu

SEQ ID NO: 3155786 - RNA, 15 nt, Human
ucugaauuauuuucu

SEQ ID NO: 3155787 - RNA, 10 nt, Human
ucugaauuau

SEQ ID NO: 3155788 - RNA, 13 nt, Human
ucugcaggucccu

SEQ ID NO: 3155789 - RNA, 11 nt, Human
ucugcaggucc

SEQ ID NO: 3155790 - RNA, 12 nt, Human
ucugcagguccc

SEQ ID NO: 3155791 - RNA, 12 nt, Human
agaagcccagaa

SEQ ID NO: 3155792 - RNA, 13 nt, Human
agaagcccagaau

SEQ ID NO: 3155793 - RNA, 11 nt, Human
agaagcccaga

SEQ ID NO: 3155794 - RNA, 14 nt, Human
agaagaaguguguc

SEQ ID NO: 3155795 - RNA, 18 nt, Human
agaguaauccaagcaaau

SEQ ID NO: 3155796 - RNA, 20 nt, Human
agaguaauccaagcaaaugu

SEQ ID NO: 3155797 - RNA, 16 nt, Human
agaggcugcagccagg

SEQ ID NO: 3155798 - RNA, 23 nt, Human
ugaauaauguaagacaaauaugu

SEQ ID NO: 3155799 - RNA, 18 nt, Human
ugaauauuuaguguucau

SEQ ID NO: 3155800 - RNA, 12 nt, Human
agacuccaccaa

SEQ ID NO: 3155801 - RNA, 16 nt, Human
agacuccaccaagccu

SEQ ID NO: 3155802 - RNA, 16 nt, Human
ucuuuguaaugaaaac

SEQ ID NO: 3155803 - RNA, 21 nt, Human
ucuuuuuucuaaaguaaaaac

SEQ ID NO: 3155804 - RNA, 22 nt, Human
ucuuuuuucuaaaguaaaaaca

SEQ ID NO: 3155805 - RNA, 12 nt, Human
agacuuuuauga

SEQ ID NO: 3155806 - RNA, 15 nt, Human
agacuuuuaugauac

SEQ ID NO: 3155807 - RNA, 20 nt, Human
ugaaaaucuuauaauuuaaa

SEQ ID NO: 3155808 - RNA, 13 nt, Human
ugaaagaaaauaa

SEQ ID NO: 3155809 - RNA, 14 nt, Human
ugacuaugacauaa

SEQ ID NO: 3155810 - RNA, 22 nt, Human
agauguagccccucuccuggaa

SEQ ID NO: 3155811 - RNA, 21 nt, Human
agauguagccccucuccugga

SEQ ID NO: 3155812 - RNA, 15 nt, Human
ugacagguuugggac

SEQ ID NO: 3155813 - RNA, 15 nt, Human
agcaagucagaauag

SEQ ID NO: 3155814 - RNA, 14 nt, Human
ugagauguguucac

SEQ ID NO: 3155815 - RNA, 23 nt, Human
ugagauguagccccucuccugga

SEQ ID NO: 3155816 - RNA, 13 nt, Human
ugagagaggccau

SEQ ID NO: 3155817 - RNA, 17 nt, Human
ugagagcugugcaucag

SEQ ID NO: 3155818 - RNA, 17 nt, Human
auguuuaguaaucauau

SEQ ID NO: 3155819 - RNA, 15 nt, Human
uuuuccaaaauaauu

SEQ ID NO: 3155820 - RNA, 17 nt, Human
auguugcauagaauaaa

SEQ ID NO: 3155821 - RNA, 18 nt, Human
auguugcauagaauaaaa

SEQ ID NO: 3155822 - RNA, 15 nt, Human
auguugcauagaaua

SEQ ID NO: 3155823 - RNA, 20 nt, Human
auguugcccuguugcugccu

SEQ ID NO: 3155824 - RNA, 13 nt, Human
auguuaagcagau

SEQ ID NO: 3155825 - RNA, 14 nt, Human
uuuuaauaaacacu

SEQ ID NO: 3155826 - RNA, 10 nt, Human
augugugugu

SEQ ID NO: 3155827 - RNA, 15 nt, Human
auguguguuuuaaaa

SEQ ID NO: 3155828 - RNA, 23 nt, Human
auguguguuuuaaaaugagaaau

SEQ ID NO: 3155829 - RNA, 13 nt, Human
auguggaagugug

SEQ ID NO: 3155830 - RNA, 16 nt, Human
auguggaagugugggu

SEQ ID NO: 3155831 - RNA, 15 nt, Human
auguggaaguguggg

SEQ ID NO: 3155832 - RNA, 23 nt, Human
auguggaagugugggucugugug

SEQ ID NO: 3155833 - RNA, 22 nt, Human
auguggaagugugggucugugu

SEQ ID NO: 3155834 - RNA, 19 nt, Human
uuuuugugaaaagcuccau

SEQ ID NO: 3155835 - RNA, 20 nt, Human
auuauauaaguauucuaaau

SEQ ID NO: 3155836 - RNA, 14 nt, Human
auuauauaaguauu

SEQ ID NO: 3155837 - RNA, 17 nt, Human
auuauauaaguauucua

SEQ ID NO: 3155838 - RNA, 12 nt, Human
uuuuuaucaugu

SEQ ID NO: 3155839 - RNA, 16 nt, Human
uuuuguuuaccagaga

SEQ ID NO: 3155840 - RNA, 17 nt, Human
uuuuguucauacauauu

SEQ ID NO: 3155841 - RNA, 14 nt, Human
uuuuguucauacau

SEQ ID NO: 3155842 - RNA, 14 nt, Human
uuuugaguucuaca

SEQ ID NO: 3155843 - RNA, 17 nt, Human
auucagaguugaugguu

SEQ ID NO: 3155844 - RNA, 23 nt, Human
auuugugaagguggaaauaaacu

SEQ ID NO: 3155845 - RNA, 22 nt, Human
auuuucaguuauuauauuuaca

SEQ ID NO: 3155846 - RNA, 17 nt, Human
auuuucagaaaauauua

SEQ ID NO: 3155847 - RNA, 14 nt, Human
auuuucagaaaaua

SEQ ID NO: 3155848 - RNA, 21 nt, Human
auuuuauuuuuuucugaauua

SEQ ID NO: 3155849 - RNA, 16 nt, Human
auugggccccugccag

SEQ ID NO: 3155850 - RNA, 15 nt, Human
auugggccccugcca

SEQ ID NO: 3155851 - RNA, 20 nt, Human
auuggguggggggcuucaua

SEQ ID NO: 3155852 - RNA, 21 nt, Human
auuggguggggggcuucauac

SEQ ID NO: 3155853 - RNA, 24 nt, Human
auucugucucuggauuauauuaug

SEQ ID NO: 3155854 - RNA, 15 nt, Human
auuguauuacaaauc

SEQ ID NO: 3155855 - RNA, 12 nt, Human
auugguguugac

SEQ ID NO: 3155856 - RNA, 13 nt, Human
auuguauucagag

SEQ ID NO: 3155857 - RNA, 15 nt, Human
auugugauguguccu

SEQ ID NO: 3155858 - RNA, 14 nt, Human
auugugaugugucc

SEQ ID NO: 3155859 - RNA, 13 nt, Human
auugugauguguc

SEQ ID NO: 3155860 - RNA, 20 nt, Human
auuuaguaucuuuuuauuca

SEQ ID NO: 3155861 - RNA, 13 nt, Human
auuuaguguucau

SEQ ID NO: 3155862 - RNA, 17 nt, Human
auuuauaaaaauaaaaa

SEQ ID NO: 3155863 - RNA, 22 nt, Human
auuuauaaaaauaaaaaacacu

SEQ ID NO: 3155864 - RNA, 20 nt, Human
auuucccuuccuuccucucc

SEQ ID NO: 3155865 - RNA, 15 nt, Human
auauuuuuguagcac

SEQ ID NO: 3155866 - RNA, 16 nt, Human
auauuuuuguagcacu

SEQ ID NO: 3155867 - RNA, 23 nt, Human
auauuuuuguagcacugacagau

SEQ ID NO: 3155868 - RNA, 18 nt, Human
auauuuuucacauaucua

SEQ ID NO: 3155869 - RNA, 17 nt, Human
auauuuuucacauaucu

SEQ ID NO: 3155870 - RNA, 15 nt, Human
uucccuuuuuuuaag

SEQ ID NO: 3155871 - RNA, 21 nt, Human
auauuugaauguaugcuucau

SEQ ID NO: 3155872 - RNA, 20 nt, Human
uuccuaaauauauuuuaaga

SEQ ID NO: 3155873 - RNA, 21 nt, Human
uuccuaaauauauuuuaagac

SEQ ID NO: 3155874 - RNA, 22 nt, Human
auauuuaaaggcccuaucuguu

SEQ ID NO: 3155875 - RNA, 13 nt, Human
auauuuacaaaug

SEQ ID NO: 3155876 - RNA, 23 nt, Human
auauuuaaugauaaguaaaugcu

SEQ ID NO: 3155877 - RNA, 13 nt, Human
auauuuaaugaua

SEQ ID NO: 3155878 - RNA, 12 nt, Human
auauuuaaugau

SEQ ID NO: 3155879 - RNA, 13 nt, Human
auauguuucaaac

SEQ ID NO: 3155880 - RNA, 14 nt, Human
auauguuucaaacu

SEQ ID NO: 3155881 - RNA, 16 nt, Human
auauguuucaaacuuu

SEQ ID NO: 3155882 - RNA, 17 nt, Human
uucccagugaauucuug

SEQ ID NO: 3155883 - RNA, 16 nt, Human
auauguucugacauaa

SEQ ID NO: 3155884 - RNA, 21 nt, Human
auaugagcuuccuucugugaa

SEQ ID NO: 3155885 - RNA, 22 nt, Human
auaugagcuuccuucugugaaa

SEQ ID NO: 3155886 - RNA, 13 nt, Human
auauaugcuaagu

SEQ ID NO: 3155887 - RNA, 15 nt, Human
auauauuuaaugaua

SEQ ID NO: 3155888 - RNA, 16 nt, Human
auauauuuaaugauaa

SEQ ID NO: 3155889 - RNA, 15 nt, Human
auauauuuuaagacg

SEQ ID NO: 3155890 - RNA, 9 nt, Human
auauauuuc

SEQ ID NO: 3155891 - RNA, 16 nt, Human
uucagauuugccuuau

SEQ ID NO: 3155892 - RNA, 22 nt, Human
uucuuaaccagaucauugugaa

SEQ ID NO: 3155893 - RNA, 16 nt, Human
auccaagcaaauguga

SEQ ID NO: 3155894 - RNA, 20 nt, Human
auccauggggcugauuguau

SEQ ID NO: 3155895 - RNA, 19 nt, Human
aucauugugaaauuauuca

SEQ ID NO: 3155896 - RNA, 13 nt, Human
aucauugugaaau

SEQ ID NO: 3155897 - RNA, 15 nt, Human
aucauugugaaauua

SEQ ID NO: 3155898 - RNA, 23 nt, Human
aucagugugucuaaauuugaaug

SEQ ID NO: 3155899 - RNA, 20 nt, Human
aucagugugucuaaauuuga

SEQ ID NO: 3155900 - RNA, 20 nt, Human
aucauuaucagccugugcca

SEQ ID NO: 3155901 - RNA, 22 nt, Human
aucaguuugcuagcagaaaucu

SEQ ID NO: 3155902 - RNA, 17 nt, Human
uugaagggaaauuucag

SEQ ID NO: 3155903 - RNA, 17 nt, Human
uugaaggaaaaugauac

SEQ ID NO: 3155904 - RNA, 14 nt, Human
uugagaguucuaaa

SEQ ID NO: 3155905 - RNA, 17 nt, Human
uugauaaguucauacau

SEQ ID NO: 3155906 - RNA, 16 nt, Human
uugauaaguucauaca

SEQ ID NO: 3155907 - RNA, 16 nt, Human
aucggggagccgggag

SEQ ID NO: 3155908 - RNA, 18 nt, Human
aucggggagccgggagcc

SEQ ID NO: 3155909 - RNA, 12 nt, Human
aucguaaaauua

SEQ ID NO: 3155910 - RNA, 17 nt, Human
aucguaaaauuaagaaa

SEQ ID NO: 3155911 - RNA, 13 nt, Human
aucguaaaauuaa

SEQ ID NO: 3155912 - RNA, 14 nt, Human
aucguaaaauuaag

SEQ ID NO: 3155913 - RNA, 22 nt, Human
uuucagaaaauauuauguguuu

SEQ ID NO: 3155914 - RNA, 12 nt, Human
uuucauaaagca

SEQ ID NO: 3155915 - RNA, 17 nt, Human
uuuauuuuuuucugaau

SEQ ID NO: 3155916 - RNA, 19 nt, Human
augcuguauauccuuucua

SEQ ID NO: 3155917 - RNA, 15 nt, Human
uuuaugugaaacaug

SEQ ID NO: 3155918 - RNA, 14 nt, Human
uuuaugugaaacau

SEQ ID NO: 3155919 - RNA, 17 nt, Human
uuuaaaggcccuaucug

SEQ ID NO: 3155920 - RNA, 17 nt, Human
uuugaaacacuuugcau

SEQ ID NO: 3155921 - RNA, 19 nt, Human
uuugaaacacuuugcauaa

SEQ ID NO: 3155922 - RNA, 22 nt, Human
uuguaagcaugcacaaauucug

SEQ ID NO: 3155923 - RNA, 12 nt, Human
uuguaaugaaaa

SEQ ID NO: 3155924 - RNA, 13 nt, Human
uuguaaugaaaac

SEQ ID NO: 3155925 - RNA, 20 nt, Human
uugcuaugagcuggggaugu

SEQ ID NO: 3155926 - RNA, 14 nt, Human
uugcugaaagaucu

SEQ ID NO: 3155927 - RNA, 16 nt, Human
uugcuuuuaaaaucca

SEQ ID NO: 3155928 - RNA, 22 nt, Human
augcaaacuuuauuuuguguuu

SEQ ID NO: 3155929 - RNA, 17 nt, Human
uugugaagguggaaaua

SEQ ID NO: 3155930 - RNA, 18 nt, Human
uugugaagguggaaauaa

SEQ ID NO: 3155931 - RNA, 16 nt, Human
uugugugugggagugu

SEQ ID NO: 3155932 - RNA, 13 nt, Human
uugugugugggag

SEQ ID NO: 3155933 - RNA, 10 nt, Human
uugugugugg

SEQ ID NO: 3155934 - RNA, 19 nt, Human
augacauaaaaacaacuuu

SEQ ID NO: 3155935 - RNA, 22 nt, Human
uuguccucagccccgcguggaa

SEQ ID NO: 3155936 - RNA, 18 nt, Human
uugucccugaagagaagg

SEQ ID NO: 3155937 - RNA, 13 nt, Human
uugugaaauuauu

SEQ ID NO: 3155938 - RNA, 13 nt, Human
uugucacgccaga

SEQ ID NO: 3155939 - RNA, 20 nt, Human
uugucacgccagacuuccca

SEQ ID NO: 3155940 - RNA, 22 nt, Human
uggcugccuugugaaggaauua

SEQ ID NO: 3155941 - RNA, 16 nt, Human
uggcuaugagggccuu

SEQ ID NO: 3155942 - RNA, 16 nt, Human
uggcucuugaacugag

SEQ ID NO: 3155943 - RNA, 22 nt, Human
uggcucuugaacugagcuugga

SEQ ID NO: 3155944 - RNA, 13 nt, Human
aggcucuggagcc

SEQ ID NO: 3155945 - RNA, 14 nt, Human
aggcucuggagccc

SEQ ID NO: 3155946 - RNA, 15 nt, Human
aggcucuggagccca

SEQ ID NO: 3155947 - RNA, 18 nt, Human
aggcucuggagcccacug

SEQ ID NO: 3155948 - RNA, 19 nt, Human
aggcucuggagcccacugu

SEQ ID NO: 3155949 - RNA, 15 nt, Human
aggcugcuuuccaaa

SEQ ID NO: 3155950 - RNA, 17 nt, Human
aggcugcuuuccaaagc

SEQ ID NO: 3155951 - RNA, 18 nt, Human
aggcugcuuuccaaagcc

SEQ ID NO: 3155952 - RNA, 19 nt, Human
aggcugcuuuccaaagcca

SEQ ID NO: 3155953 - RNA, 21 nt, Human
aggcugcuuuccaaagccaau

SEQ ID NO: 3155954 - RNA, 13 nt, Human
aggcugcuuucca

SEQ ID NO: 3155955 - RNA, 14 nt, Human
aggcugcuuuccaa

SEQ ID NO: 3155956 - RNA, 15 nt, Human
aggccauucuuuccc

SEQ ID NO: 3155957 - RNA, 18 nt, Human
uggacgagaaaacaauaa

SEQ ID NO: 3155958 - RNA, 22 nt, Human
uggaccuuuccugaggaagagg

SEQ ID NO: 3155959 - RNA, 21 nt, Human
aggccucucauuccagaggaa

SEQ ID NO: 3155960 - RNA, 17 nt, Human
aggccauucuuucccaa

SEQ ID NO: 3155961 - RNA, 18 nt, Human
aggccauucuuucccaac

SEQ ID NO: 3155962 - RNA, 19 nt, Human
aggccauucuuucccaaca

SEQ ID NO: 3155963 - RNA, 12 nt, Human
aggcccaaagcc

SEQ ID NO: 3155964 - RNA, 13 nt, Human
aggcccaaagccu

SEQ ID NO: 3155965 - RNA, 15 nt, Human
aggcccaaagccucg

SEQ ID NO: 3155966 - RNA, 15 nt, Human
uggccaguggcugga

SEQ ID NO: 3155967 - RNA, 14 nt, Human
uggccaguggcugg

SEQ ID NO: 3155968 - RNA, 16 nt, Human
uggccaguggcuggau

SEQ ID NO: 3155969 - RNA, 11 nt, Human
ugcuucauaca

SEQ ID NO: 3155970 - RNA, 14 nt, Human
ugcuucauacaggg

SEQ ID NO: 3155971 - RNA, 15 nt, Human
ugcuucauacaggga

SEQ ID NO: 3155972 - RNA, 16 nt, Human
ugcuucauacagggau

SEQ ID NO: 3155973 - RNA, 23 nt, Human
aggaauuguguuuauaauuuuaa

SEQ ID NO: 3155974 - RNA, 11 nt, Human
aggaauuuaaa

SEQ ID NO: 3155975 - RNA, 13 nt, Human
ugcuccccacguc

SEQ ID NO: 3155976 - RNA, 18 nt, Human
ugcuauuguagagccaga

SEQ ID NO: 3155977 - RNA, 22 nt, Human
ugcuauuguagagccagagguc

SEQ ID NO: 3155978 - RNA, 19 nt, Human
aggagcccugggaggcucu

SEQ ID NO: 3155979 - RNA, 18 nt, Human
aggagcccugggaggcuc

SEQ ID NO: 3155980 - RNA, 22 nt, Human
uggaauuggguggggggcuuca

SEQ ID NO: 3155981 - RNA, 16 nt, Human
uggaccagccucucca

SEQ ID NO: 3155982 - RNA, 22 nt, Human
uggaccagccucuccacucaug

SEQ ID NO: 3155983 - RNA, 15 nt, Human
agccacgguguucug

SEQ ID NO: 3155984 - RNA, 14 nt, Human
ugaugggauuuggu

SEQ ID NO: 3155985 - RNA, 14 nt, Human
agcccacuguacuu

SEQ ID NO: 3155986 - RNA, 16 nt, Human
agcccacuguacuugc

SEQ ID NO: 3155987 - RNA, 19 nt, Human
agcuauggugucauaggcu

SEQ ID NO: 3155988 - RNA, 17 nt, Human
agcuaucguaaaauuaa

SEQ ID NO: 3155989 - RNA, 17 nt, Human
agcggcuggacuuggag

SEQ ID NO: 3155990 - RNA, 21 nt, Human
agcggcuggacuuggagguag

SEQ ID NO: 3155991 - RNA, 11 nt, Human
ugccucucugc

SEQ ID NO: 3155992 - RNA, 12 nt, Human
ugccucucugca

SEQ ID NO: 3155993 - RNA, 14 nt, Human
agcugccugugccu

SEQ ID NO: 3155994 - RNA, 15 nt, Human
ugccucucugcaggu

SEQ ID NO: 3155995 - RNA, 23 nt, Human
ugccucucugcaggucccuaaua

SEQ ID NO: 3155996 - RNA, 21 nt, Human
ugccucucugcaggucccuaa

SEQ ID NO: 3155997 - RNA, 19 nt, Human
aguugcaacuuuguauaaa

SEQ ID NO: 3155998 - RNA, 15 nt, Human
uguuugcaucugaaa

SEQ ID NO: 3155999 - RNA, 20 nt, Human
aguucucuucacucaaggau

SEQ ID NO: 3156000 - RNA, 16 nt, Human
aguuucguuuucaaaa

SEQ ID NO: 3156001 - RNA, 15 nt, Human
aguuucguuuucaaa

SEQ ID NO: 3156002 - RNA, 22 nt, Human
aguugcauagguuuaauaauuu

SEQ ID NO: 3156003 - RNA, 20 nt, Human
aguuauuauauuuacaaaug

SEQ ID NO: 3156004 - RNA, 17 nt, Human
aguuauugauaaguuca

SEQ ID NO: 3156005 - RNA, 19 nt, Human
aguuauugauaaguucaua

SEQ ID NO: 3156006 - RNA, 21 nt, Human
aguuauugauaaguucauaca

SEQ ID NO: 3156007 - RNA, 22 nt, Human
aguuauugauaaguucauacau

SEQ ID NO: 3156008 - RNA, 23 nt, Human
aguuauugauaaguucauacauu

SEQ ID NO: 3156009 - RNA, 20 nt, Human
aguucggugagcuacaaaug

SEQ ID NO: 3156010 - RNA, 18 nt, Human
uguugggagugaggaugu

SEQ ID NO: 3156011 - RNA, 15 nt, Human
aguucuaaauuuugu

SEQ ID NO: 3156012 - RNA, 18 nt, Human
auaaacuggcagcucagc

SEQ ID NO: 3156013 - RNA, 14 nt, Human
auaaauaaaaauaa

SEQ ID NO: 3156014 - RNA, 23 nt, Human
auaaacacucuugaaaaaugcau

SEQ ID NO: 3156015 - RNA, 16 nt, Human
auaaaccucaaaaugu

SEQ ID NO: 3156016 - RNA, 18 nt, Human
auaaacacucuugaaaaa

SEQ ID NO: 3156017 - RNA, 13 nt, Human
auaaauaaaguuu

SEQ ID NO: 3156018 - RNA, 19 nt, Human
auaaauaaaguuuguugaa

SEQ ID NO: 3156019 - RNA, 12 nt, Human
auaacugugaag

SEQ ID NO: 3156020 - RNA, 11 nt, Human
auaaguucaua

SEQ ID NO: 3156021 - RNA, 13 nt, Human
auaaguucauaca

SEQ ID NO: 3156022 - RNA, 14 nt, Human
auaaguucauacau

SEQ ID NO: 3156023 - RNA, 15 nt, Human
auaaguucauacauu

SEQ ID NO: 3156024 - RNA, 21 nt, Human
auaaguucauacauuguacga

SEQ ID NO: 3156025 - RNA, 20 nt, Human
auaaucagugugucuaaauu

SEQ ID NO: 3156026 - RNA, 14 nt, Human
auaaugaauacuuu

SEQ ID NO: 3156027 - RNA, 14 nt, Human
uuauauaaguauuc

SEQ ID NO: 3156028 - RNA, 16 nt, Human
uuauauaaguauucua

SEQ ID NO: 3156029 - RNA, 13 nt, Human
uuauauaaguauu

SEQ ID NO: 3156030 - RNA, 21 nt, Human
auaauuuuaagaaaucaaaga

SEQ ID NO: 3156031 - RNA, 15 nt, Human
auaauuuuaagaaau

SEQ ID NO: 3156032 - RNA, 14 nt, Human
auaauuuuaagaaa

SEQ ID NO: 3156033 - RNA, 19 nt, Human
uuauauauauauauauuuc

SEQ ID NO: 3156034 - RNA, 18 nt, Human
uuauacccagaaaguuau

SEQ ID NO: 3156035 - RNA, 19 nt, Human
uuauacccagaaaguuauu

SEQ ID NO: 3156036 - RNA, 23 nt, Human
uuauacccagaaaguuauugaua

SEQ ID NO: 3156037 - RNA, 23 nt, Human
uuauagaguguacuuaacuauuc

SEQ ID NO: 3156038 - RNA, 21 nt, Human
auacaguucggugagcuacaa

SEQ ID NO: 3156039 - RNA, 15 nt, Human
auacaggucauauua

SEQ ID NO: 3156040 - RNA, 21 nt, Human
auacaggucauauuaauauau

SEQ ID NO: 3156041 - RNA, 16 nt, Human
auacagggaugguguu

SEQ ID NO: 3156042 - RNA, 19 nt, Human
auacauauuuuuguagcac

SEQ ID NO: 3156043 - RNA, 14 nt, Human
auacauuguacgaa

SEQ ID NO: 3156044 - RNA, 21 nt, Human
auacauuguacgaagaguauu

SEQ ID NO: 3156045 - RNA, 22 nt, Human
auacauuguacgaagaguauuu

SEQ ID NO: 3156046 - RNA, 14 nt, Human
uuaucaacauuugu

SEQ ID NO: 3156047 - RNA, 22 nt, Human
uuaucaaagggugaaaauuauu

SEQ ID NO: 3156048 - RNA, 22 nt, Human
uuaucaugugaaaucauucauu

SEQ ID NO: 3156049 - RNA, 18 nt, Human
uuaucaugugaaaucauu

SEQ ID NO: 3156050 - RNA, 20 nt, Human
uuaucaugugaaaucauuca

SEQ ID NO: 3156051 - RNA, 17 nt, Human
uuaucaugugaaaucau

SEQ ID NO: 3156052 - RNA, 14 nt, Human
uguacauauaagug

SEQ ID NO: 3156053 - RNA, 15 nt, Human
uguaaggcaaucaug

SEQ ID NO: 3156054 - RNA, 15 nt, Human
uguacuuaacuauuc

SEQ ID NO: 3156055 - RNA, 15 nt, Human
uguacuugcucuuga

SEQ ID NO: 3156056 - RNA, 22 nt, Human
ugguguucaaaaaacuuguaaa

SEQ ID NO: 3156057 - RNA, 21 nt, Human
ugguguucaaaaaacuuguaa

SEQ ID NO: 3156058 - RNA, 20 nt, Human
ugguucacucuuggagccug

SEQ ID NO: 3156059 - RNA, 21 nt, Human
ugguucacucuuggagccugc

SEQ ID NO: 3156060 - RNA, 22 nt, Human
ugguucacucuuggagccugca

SEQ ID NO: 3156061 - RNA, 17 nt, Human
ugguucacucuuggagc

SEQ ID NO: 3156062 - RNA, 18 nt, Human
ugguuuuaguugcaacuu

SEQ ID NO: 3156063 - RNA, 15 nt, Human
aggucagugcaaaua

SEQ ID NO: 3156064 - RNA, 23 nt, Human
agguagcuuugagguggaagagg

SEQ ID NO: 3156065 - RNA, 16 nt, Human
uggucugggacucucu

SEQ ID NO: 3156066 - RNA, 22 nt, Human
ugguccaugggccauaugaaaa

SEQ ID NO: 3156067 - RNA, 15 nt, Human
agggugaaaauuauu

SEQ ID NO: 3156068 - RNA, 13 nt, Human
ugggucugugugu

SEQ ID NO: 3156069 - RNA, 15 nt, Human
ugggucugugugugu

SEQ ID NO: 3156070 - RNA, 22 nt, Human
agggucuugguuccagccugcc

SEQ ID NO: 3156071 - RNA, 21 nt, Human
agggucuugguuccagccugc

SEQ ID NO: 3156072 - RNA, 23 nt, Human
ugggaauaagugccaggauggaa

SEQ ID NO: 3156073 - RNA, 21 nt, Human
aguauuuaauucauguugccu

SEQ ID NO: 3156074 - RNA, 14 nt, Human
aguauguguaaaau

SEQ ID NO: 3156075 - RNA, 22 nt, Human
uguauccauccauggggcugau

SEQ ID NO: 3156076 - RNA, 16 nt, Human
agguuugggaccccug

SEQ ID NO: 3156077 - RNA, 21 nt, Human
agguuugggaccccugguggu

SEQ ID NO: 3156078 - RNA, 22 nt, Human
uguaugugggggucuguguguu

SEQ ID NO: 3156079 - RNA, 21 nt, Human
uguaugugggggucugugugu

SEQ ID NO: 3156080 - RNA, 20 nt, Human
uguaugugggggucugugug

SEQ ID NO: 3156081 - RNA, 22 nt, Human
uguauuacaaauccaaugaaau

SEQ ID NO: 3156082 - RNA, 14 nt, Human
ugucuaagauagua

SEQ ID NO: 3156083 - RNA, 15 nt, Human
ugucuaagauaguaa

SEQ ID NO: 3156084 - RNA, 18 nt, Human
ugucuaaauuugaauguu

SEQ ID NO: 3156085 - RNA, 22 nt, Human
aguccaggcuuuuuuaucaugu

SEQ ID NO: 3156086 - RNA, 13 nt, Human
aguccaucagccu

SEQ ID NO: 3156087 - RNA, 14 nt, Human
aguccaucagccuc

SEQ ID NO: 3156088 - RNA, 22 nt, Human
ugucucuggauuauauuaugaa

SEQ ID NO: 3156089 - RNA, 13 nt, Human
agucccugccugg

SEQ ID NO: 3156090 - RNA, 19 nt, Human
agucuccaaagucucugga

SEQ ID NO: 3156091 - RNA, 17 nt, Human
agugaaagaaaauaaca

SEQ ID NO: 3156092 - RNA, 11 nt, Human
ugugauguguc

SEQ ID NO: 3156093 - RNA, 16 nt, Human
ugugauguauucuagc

SEQ ID NO: 3156094 - RNA, 21 nt, Human
caaauuguaagcaugcacaaa

SEQ ID NO: 3156095 - RNA, 17 nt, Human
caaauuguaagcaugca

SEQ ID NO: 3156096 - RNA, 16 nt, Human
caaaauugauguguuu

SEQ ID NO: 3156097 - RNA, 15 nt, Human
caaaauugauguguu

SEQ ID NO: 3156098 - RNA, 22 nt, Human
caaaauugauguguuuauuuau

SEQ ID NO: 3156099 - RNA, 16 nt, Human
caaaauuguuacaaau

SEQ ID NO: 3156100 - RNA, 19 nt, Human
caaagcugaugacaacuuc

SEQ ID NO: 3156101 - RNA, 20 nt, Human
caaagcgaauuuuaaaagau

SEQ ID NO: 3156102 - RNA, 14 nt, Human
caaagcgaauuuua

SEQ ID NO: 3156103 - RNA, 19 nt, Human
caaagcgaauuuuaaaaga

SEQ ID NO: 3156104 - RNA, 16 nt, Human
caaaaauucucaguuc

SEQ ID NO: 3156105 - RNA, 19 nt, Human
caauguagaggggaaaaga

SEQ ID NO: 3156106 - RNA, 15 nt, Human
caagaaaacaacuuc

SEQ ID NO: 3156107 - RNA, 14 nt, Human
caagaggcugcagc

SEQ ID NO: 3156108 - RNA, 16 nt, Human
caagaggcugcagcca

SEQ ID NO: 3156109 - RNA, 13 nt, Human
caacacugccagc

SEQ ID NO: 3156110 - RNA, 14 nt, Human
caacacugccagca

SEQ ID NO: 3156111 - RNA, 12 nt, Human
caacacugccag

SEQ ID NO: 3156112 - RNA, 13 nt, Human
caaccggcuuugu

SEQ ID NO: 3156113 - RNA, 22 nt, Human
caaccggcuuuguggcacuggg

SEQ ID NO: 3156114 - RNA, 21 nt, Human
caggucauauuaauauauuuc

SEQ ID NO: 3156115 - RNA, 20 nt, Human
caggucauauuaauauauuu

SEQ ID NO: 3156116 - RNA, 13 nt, Human
cagguccccagac

SEQ ID NO: 3156117 - RNA, 18 nt, Human
cagguccccagcuuuggc

SEQ ID NO: 3156118 - RNA, 12 nt, Human
cagguccccaga

SEQ ID NO: 3156119 - RNA, 11 nt, Human
caggucccuaa

SEQ ID NO: 3156120 - RNA, 12 nt, Human
caggucccuaau

SEQ ID NO: 3156121 - RNA, 13 nt, Human
caggucccuaaua

SEQ ID NO: 3156122 - RNA, 14 nt, Human
caggucccuaauaa

SEQ ID NO: 3156123 - RNA, 15 nt, Human
caggucccuaauaaa

SEQ ID NO: 3156124 - RNA, 16 nt, Human
caggucccuaauaaag

SEQ ID NO: 3156125 - RNA, 17 nt, Human
caggucccuaauaaagc

SEQ ID NO: 3156126 - RNA, 18 nt, Human
caggucccuaauaaagcu

SEQ ID NO: 3156127 - RNA, 19 nt, Human
caggucccuaauaaagcug

SEQ ID NO: 3156128 - RNA, 20 nt, Human
caggucccuaauaaagcugu

SEQ ID NO: 3156129 - RNA, 21 nt, Human
caggucccuaauaaagcugug

SEQ ID NO: 3156130 - RNA, 22 nt, Human
caggucccuaauaaagcugugu

SEQ ID NO: 3156131 - RNA, 12 nt, Human
cagguguucuuc

SEQ ID NO: 3156132 - RNA, 22 nt, Human
caguaguagccuccagguuucc

SEQ ID NO: 3156133 - RNA, 12 nt, Human
caguauguggaa

SEQ ID NO: 3156134 - RNA, 20 nt, Human
cagucccugaggcagguccc

SEQ ID NO: 3156135 - RNA, 23 nt, Human
cagucccugaggcagguccccag

SEQ ID NO: 3156136 - RNA, 14 nt, Human
cagucccugaggca

SEQ ID NO: 3156137 - RNA, 12 nt, Human
cagugaauucuu

SEQ ID NO: 3156138 - RNA, 16 nt, Human
cagugaaagaaaauaa

SEQ ID NO: 3156139 - RNA, 20 nt, Human
cagugaaagaaaauaacaau

SEQ ID NO: 3156140 - RNA, 22 nt, Human
cagucuuuaaucugagaggcca

SEQ ID NO: 3156141 - RNA, 15 nt, Human
caggcucagagggug

SEQ ID NO: 3156142 - RNA, 11 nt, Human
caggcucagag

SEQ ID NO: 3156143 - RNA, 21 nt, Human
caggcugggucgcccuggacu

SEQ ID NO: 3156144 - RNA, 23 nt, Human
caggcugggucgcccuggacugu

SEQ ID NO: 3156145 - RNA, 23 nt, Human
caggcuuuuuuaucaugugaaau

SEQ ID NO: 3156146 - RNA, 14 nt, Human
caggggcaggagga

SEQ ID NO: 3156147 - RNA, 22 nt, Human
cagggggccagucccugaggca

SEQ ID NO: 3156148 - RNA, 13 nt, Human
cagggaaggaucc

SEQ ID NO: 3156149 - RNA, 18 nt, Human
cagggaaggaucccauga

SEQ ID NO: 3156150 - RNA, 19 nt, Human
caggaguuucguuuucaaa

SEQ ID NO: 3156151 - RNA, 12 nt, Human
caggagaguaga

SEQ ID NO: 3156152 - RNA, 23 nt, Human
caggagacagguuagcugcuccc

SEQ ID NO: 3156153 - RNA, 14 nt, Human
caggagucccugcc

SEQ ID NO: 3156154 - RNA, 21 nt, Human
caggagucccugccaucaugu

SEQ ID NO: 3156155 - RNA, 15 nt, Human
caggagucccugcca

SEQ ID NO: 3156156 - RNA, 21 nt, Human
caggagcccugggaggcucug

SEQ ID NO: 3156157 - RNA, 11 nt, Human
caggagcccug

SEQ ID NO: 3156158 - RNA, 14 nt, Human
caggagcccuggga

SEQ ID NO: 3156159 - RNA, 16 nt, Human
caggagcccugggagg

SEQ ID NO: 3156160 - RNA, 18 nt, Human
caggagcccugggaggcu

SEQ ID NO: 3156161 - RNA, 19 nt, Human
caggagcccugggaggcuc

SEQ ID NO: 3156162 - RNA, 21 nt, Human
caggcccccagaaccccuggc

SEQ ID NO: 3156163 - RNA, 21 nt, Human
caggccagggggccagucccu

SEQ ID NO: 3156164 - RNA, 22 nt, Human
caggaugaugacuauggaaaga

SEQ ID NO: 3156165 - RNA, 18 nt, Human
caggaugaugacuaugga

SEQ ID NO: 3156166 - RNA, 20 nt, Human
caggaugaugacuauggaaa

SEQ ID NO: 3156167 - RNA, 20 nt, Human
caggcaucggggagccggga

SEQ ID NO: 3156168 - RNA, 21 nt, Human
caggcaucggggagccgggag

SEQ ID NO: 3156169 - RNA, 18 nt, Human
cagcccucauuggcucuu

SEQ ID NO: 3156170 - RNA, 18 nt, Human
cagcccugaguuccuagc

SEQ ID NO: 3156171 - RNA, 19 nt, Human
cagcccugaguuccuagcc

SEQ ID NO: 3156172 - RNA, 21 nt, Human
cagcccugaguuccuagccac

SEQ ID NO: 3156173 - RNA, 18 nt, Human
cagccuccauccuacccc

SEQ ID NO: 3156174 - RNA, 21 nt, Human
cagccuccauccuacccccug

SEQ ID NO: 3156175 - RNA, 23 nt, Human
cagccuggcuguggccuaaccug

SEQ ID NO: 3156176 - RNA, 23 nt, Human
cagccucuccacucaugugacuc

SEQ ID NO: 3156177 - RNA, 21 nt, Human
cagcuggggccaggcuggguc

SEQ ID NO: 3156178 - RNA, 22 nt, Human
cagcuggggccaggcugggucg

SEQ ID NO: 3156179 - RNA, 18 nt, Human
cagcuggggccaggcugg

SEQ ID NO: 3156180 - RNA, 19 nt, Human
cagcuggggccaggcuggg

SEQ ID NO: 3156181 - RNA, 20 nt, Human
cagcuggggccaggcugggu

SEQ ID NO: 3156182 - RNA, 15 nt, Human
caggaaccgaggcag

SEQ ID NO: 3156183 - RNA, 17 nt, Human
caggaaccgaggcaggg

SEQ ID NO: 3156184 - RNA, 18 nt, Human
caggaaccgaggcaggga

SEQ ID NO: 3156185 - RNA, 21 nt, Human
cagauggaaugcuguguuaaa

SEQ ID NO: 3156186 - RNA, 19 nt, Human
cagauggaaugcuguguua

SEQ ID NO: 3156187 - RNA, 17 nt, Human
cagauggaaugcugugu

SEQ ID NO: 3156188 - RNA, 16 nt, Human
cagauggaaugcugug

SEQ ID NO: 3156189 - RNA, 18 nt, Human
cagccaacuauggccugu

SEQ ID NO: 3156190 - RNA, 15 nt, Human
cagcauuucccuucc

SEQ ID NO: 3156191 - RNA, 16 nt, Human
cagcccaccuggcuuu

SEQ ID NO: 3156192 - RNA, 20 nt, Human
cagcccaaaccaccagaagc

SEQ ID NO: 3156193 - RNA, 21 nt, Human
cagcccaaaccaccagaagcc

SEQ ID NO: 3156194 - RNA, 23 nt, Human
cagcccaaaccaccagaagccca

SEQ ID NO: 3156195 - RNA, 16 nt, Human
cagcccaaaccaccag

SEQ ID NO: 3156196 - RNA, 19 nt, Human
cagcccaaaccaccagaag

SEQ ID NO: 3156197 - RNA, 22 nt, Human
cagauaaagguucaugcaaacu

SEQ ID NO: 3156198 - RNA, 14 nt, Human
cagauaaucagugu

SEQ ID NO: 3156199 - RNA, 14 nt, Human
cagagucccugccu

SEQ ID NO: 3156200 - RNA, 18 nt, Human
cagagucccugccuggac

SEQ ID NO: 3156201 - RNA, 23 nt, Human
cagaggcgcaugaauuugugaag

SEQ ID NO: 3156202 - RNA, 22 nt, Human
cagaggacaguauuugugggga

SEQ ID NO: 3156203 - RNA, 15 nt, Human
cagagcagugggccu

SEQ ID NO: 3156204 - RNA, 17 nt, Human
cagagcagugggccugg

SEQ ID NO: 3156205 - RNA, 20 nt, Human
cagagcagugggccuggcca

SEQ ID NO: 3156206 - RNA, 21 nt, Human
cagagcagugggccuggccag

SEQ ID NO: 3156207 - RNA, 22 nt, Human
cagagcagugggccuggccagc

SEQ ID NO: 3156208 - RNA, 19 nt, Human
cagaaaauauuauguguuu

SEQ ID NO: 3156209 - RNA, 12 nt, Human
cacuuugcauaa

SEQ ID NO: 3156210 - RNA, 12 nt, Human
cagaagcccaga

SEQ ID NO: 3156211 - RNA, 14 nt, Human
cagaagcccagaau

SEQ ID NO: 3156212 - RNA, 11 nt, Human
cagaagcccag

SEQ ID NO: 3156213 - RNA, 23 nt, Human
cagaaccccuggcuccaggccag

SEQ ID NO: 3156214 - RNA, 17 nt, Human
cagaaggaucuucaucu

SEQ ID NO: 3156215 - RNA, 14 nt, Human
cagaaugaggcugc

SEQ ID NO: 3156216 - RNA, 15 nt, Human
cagaaugaggcugcu

SEQ ID NO: 3156217 - RNA, 12 nt, Human
cagacuucccac

SEQ ID NO: 3156218 - RNA, 22 nt, Human
cagacuucccacggcuccucga

SEQ ID NO: 3156219 - RNA, 17 nt, Human
cagagaaaaagggaggg

SEQ ID NO: 3156220 - RNA, 18 nt, Human
cagagaaaaagggagggg

SEQ ID NO: 3156221 - RNA, 12 nt, Human
cagagaaaaagg

SEQ ID NO: 3156222 - RNA, 15 nt, Human
cagacccccuggaga

SEQ ID NO: 3156223 - RNA, 14 nt, Human
caccggggccuggg

SEQ ID NO: 3156224 - RNA, 21 nt, Human
caccggggccugggcaggagg

SEQ ID NO: 3156225 - RNA, 22 nt, Human
caccggggccugggcaggaggg

SEQ ID NO: 3156226 - RNA, 17 nt, Human
caccgccuccuacagcc

SEQ ID NO: 3156227 - RNA, 13 nt, Human
cacugacagauuu

SEQ ID NO: 3156228 - RNA, 11 nt, Human
cacugacagau

SEQ ID NO: 3156229 - RNA, 17 nt, Human
cacugacagauuuccau

SEQ ID NO: 3156230 - RNA, 22 nt, Human
cacugacagauuuccauccuag

SEQ ID NO: 3156231 - RNA, 14 nt, Human
cacugauccagccc

SEQ ID NO: 3156232 - RNA, 15 nt, Human
cacugauccagcccu

SEQ ID NO: 3156233 - RNA, 16 nt, Human
cacugauccagcccug

SEQ ID NO: 3156234 - RNA, 18 nt, Human
cacugcuaagaauauuug

SEQ ID NO: 3156235 - RNA, 19 nt, Human
cacuguacuugcucuugau

SEQ ID NO: 3156236 - RNA, 15 nt, Human
cacuguacuugcucu

SEQ ID NO: 3156237 - RNA, 18 nt, Human
cacuguacuugcucuuga

SEQ ID NO: 3156238 - RNA, 17 nt, Human
cacuggccccugagauc

SEQ ID NO: 3156239 - RNA, 19 nt, Human
cacuguucugaaagugacu

SEQ ID NO: 3156240 - RNA, 21 nt, Human
cacuaugaagauguuucaaaa

SEQ ID NO: 3156241 - RNA, 14 nt, Human
cacuaugaagaugu

SEQ ID NO: 3156242 - RNA, 16 nt, Human
cacuaacaugauuugg

SEQ ID NO: 3156243 - RNA, 16 nt, Human
cacucaugugacucuu

SEQ ID NO: 3156244 - RNA, 22 nt, Human
cacucaugugacucuuuccaac

SEQ ID NO: 3156245 - RNA, 18 nt, Human
cacuccuccuagccaccc

SEQ ID NO: 3156246 - RNA, 13 nt, Human
cacuccuccuagc

SEQ ID NO: 3156247 - RNA, 13 nt, Human
cacuaaacaaaga

SEQ ID NO: 3156248 - RNA, 19 nt, Human
cacguguggccuguucuuc

SEQ ID NO: 3156249 - RNA, 16 nt, Human
cacguaaugaaacuug

SEQ ID NO: 3156250 - RNA, 19 nt, Human
cacguaaugaaacuuggau

SEQ ID NO: 3156251 - RNA, 20 nt, Human
cacggcuccucgagauccca

SEQ ID NO: 3156252 - RNA, 22 nt, Human
cacggcuccucgagaucccaac

SEQ ID NO: 3156253 - RNA, 12 nt, Human
ggauuauauuau

SEQ ID NO: 3156254 - RNA, 16 nt, Human
ggauucugagagcugu

SEQ ID NO: 3156255 - RNA, 18 nt, Human
ggaugaugacuauggaaa

SEQ ID NO: 3156256 - RNA, 14 nt, Human
ggacugagaaauuu

SEQ ID NO: 3156257 - RNA, 18 nt, Human
ggacugagaaauuuauaa

SEQ ID NO: 3156258 - RNA, 19 nt, Human
ggagacagguuagcugcuc

SEQ ID NO: 3156259 - RNA, 12 nt, Human
ggaccagccucu

SEQ ID NO: 3156260 - RNA, 21 nt, Human
gcuuuuaugugaaacauguuu

SEQ ID NO: 3156261 - RNA, 19 nt, Human
gcuuuuaugugaaacaugu

SEQ ID NO: 3156262 - RNA, 20 nt, Human
gcuuuuaugugaaacauguu

SEQ ID NO: 3156263 - RNA, 20 nt, Human
ggagcccugggaggcucugg

SEQ ID NO: 3156264 - RNA, 16 nt, Human
ggagccuacccacccc

SEQ ID NO: 3156265 - RNA, 16 nt, Human
ggagcccugggaggcu

SEQ ID NO: 3156266 - RNA, 19 nt, Human
ggagcccugggaggcucug

SEQ ID NO: 3156267 - RNA, 21 nt, Human
ggagcucaggaaccgaggcag

SEQ ID NO: 3156268 - RNA, 17 nt, Human
ggagccugcagagcugc

SEQ ID NO: 3156269 - RNA, 14 nt, Human
ggagggcaggcauc

SEQ ID NO: 3156270 - RNA, 17 nt, Human
ggaggcaggaguuucgu

SEQ ID NO: 3156271 - RNA, 21 nt, Human
ggcuguggcauccagaguccc

SEQ ID NO: 3156272 - RNA, 23 nt, Human
ggcuguggcauccagagucccug

SEQ ID NO: 3156273 - RNA, 20 nt, Human
ggcugggaggagggcaggca

SEQ ID NO: 3156274 - RNA, 21 nt, Human
ggcugggaggagggcaggcau

SEQ ID NO: 3156275 - RNA, 13 nt, Human
ggcugggaggagg

SEQ ID NO: 3156276 - RNA, 23 nt, Human
ggcucuggagcccacuguacuug

SEQ ID NO: 3156277 - RNA, 13 nt, Human
ggcuggacuugga

SEQ ID NO: 3156278 - RNA, 18 nt, Human
ggcuggacuuggagguag

SEQ ID NO: 3156279 - RNA, 15 nt, Human
gggacugagaaauuu

SEQ ID NO: 3156280 - RNA, 14 nt, Human
gggacaccuaggcu

SEQ ID NO: 3156281 - RNA, 20 nt, Human
gggacaccaagccuuggcuc

SEQ ID NO: 3156282 - RNA, 12 nt, Human
gggaggagggca

SEQ ID NO: 3156283 - RNA, 16 nt, Human
gggaggagggcaggca

SEQ ID NO: 3156284 - RNA, 12 nt, Human
gggagcucagga

SEQ ID NO: 3156285 - RNA, 22 nt, Human
gggagcucaggaaccgaggcag

SEQ ID NO: 3156286 - RNA, 23 nt, Human
gggagcucaggaaccgaggcagg

SEQ ID NO: 3156287 - RNA, 13 nt, Human
gggagccgggagc

SEQ ID NO: 3156288 - RNA, 16 nt, Human
ggcucuggagcccacu

SEQ ID NO: 3156289 - RNA, 17 nt, Human
ggcucuggagcccacug

SEQ ID NO: 3156290 - RNA, 19 nt, Human
ggcucuggagcccacugua

SEQ ID NO: 3156291 - RNA, 20 nt, Human
ggccucucauuccagaggaa

SEQ ID NO: 3156292 - RNA, 15 nt, Human
ggccuaaccugccga

SEQ ID NO: 3156293 - RNA, 16 nt, Human
ggccuaaccugccgag

SEQ ID NO: 3156294 - RNA, 19 nt, Human
ggccugggcaggagggagg

SEQ ID NO: 3156295 - RNA, 15 nt, Human
ggccugggcaggagg

SEQ ID NO: 3156296 - RNA, 17 nt, Human
ggccugggcaggaggga

SEQ ID NO: 3156297 - RNA, 16 nt, Human
ggccugacucucagca

SEQ ID NO: 3156298 - RNA, 17 nt, Human
gcuaucguaaaauuaag

SEQ ID NO: 3156299 - RNA, 15 nt, Human
gcuaucguaaaauua

SEQ ID NO: 3156300 - RNA, 16 nt, Human
gcuaucguaaaauuaa

SEQ ID NO: 3156301 - RNA, 18 nt, Human
gcucauggacuucugcca

SEQ ID NO: 3156302 - RNA, 20 nt, Human
gcuccauuuuuagugaaaua

SEQ ID NO: 3156303 - RNA, 18 nt, Human
gcuccaggccagggggcc

SEQ ID NO: 3156304 - RNA, 17 nt, Human
gcuccaggccagggggc

SEQ ID NO: 3156305 - RNA, 15 nt, Human
gcuccuuaaggcucu

SEQ ID NO: 3156306 - RNA, 17 nt, Human
gcuccuuaaggcucuuu

SEQ ID NO: 3156307 - RNA, 21 nt, Human
gcuccuuaaggcucuuuugua

SEQ ID NO: 3156308 - RNA, 17 nt, Human
gccuggaccagccucuc

SEQ ID NO: 3156309 - RNA, 16 nt, Human
gccuggaccagccucu

SEQ ID NO: 3156310 - RNA, 16 nt, Human
gccugggcaggaggga

SEQ ID NO: 3156311 - RNA, 14 nt, Human
gccuggucagccca

SEQ ID NO: 3156312 - RNA, 15 nt, Human
gccuggucagcccaa

SEQ ID NO: 3156313 - RNA, 13 nt, Human
gccuggucagccc

SEQ ID NO: 3156314 - RNA, 15 nt, Human
gccuugucacgccag

SEQ ID NO: 3156315 - RNA, 16 nt, Human
gccuugucacgccaga

SEQ ID NO: 3156316 - RNA, 17 nt, Human
gccuugucacgccagac

SEQ ID NO: 3156317 - RNA, 17 nt, Human
gcgaagcguuguccuca

SEQ ID NO: 3156318 - RNA, 15 nt, Human
gcgaauuuuaaaaga

SEQ ID NO: 3156319 - RNA, 16 nt, Human
gcgaauuuuaaaagau

SEQ ID NO: 3156320 - RNA, 14 nt, Human
gcgaauuuuaaaag

SEQ ID NO: 3156321 - RNA, 15 nt, Human
gcucuccaagcccag

SEQ ID NO: 3156322 - RNA, 19 nt, Human
gcucuugaugccuggcggg

SEQ ID NO: 3156323 - RNA, 14 nt, Human
gcugauuguauuua

SEQ ID NO: 3156324 - RNA, 10 nt, Human
gcuucauaca

SEQ ID NO: 3156325 - RNA, 12 nt, Human
gcuuguguuaag

SEQ ID NO: 3156326 - RNA, 13 nt, Human
gcuuuuaugugaa

SEQ ID NO: 3156327 - RNA, 15 nt, Human
gcuuuuaugugaaac

SEQ ID NO: 3156328 - RNA, 14 nt, Human
gcuuuccaaagcca

SEQ ID NO: 3156329 - RNA, 14 nt, Human
gcuggggaugucuc

SEQ ID NO: 3156330 - RNA, 21 nt, Human
gcugggaggagggcaggcauc

SEQ ID NO: 3156331 - RNA, 22 nt, Human
gcugggcuuggcagcccggguc

SEQ ID NO: 3156332 - RNA, 19 nt, Human
gcuguggccuaaccugccg

SEQ ID NO: 3156333 - RNA, 20 nt, Human
gcuguggccuaaccugccga

SEQ ID NO: 3156334 - RNA, 16 nt, Human
gcuguguggcagucug

SEQ ID NO: 3156335 - RNA, 16 nt, Human
gcugugugcucuccaa

SEQ ID NO: 3156336 - RNA, 18 nt, Human
gcuguguuaaauaaaccu

SEQ ID NO: 3156337 - RNA, 15 nt, Human
gcaccacacucagcc

SEQ ID NO: 3156338 - RNA, 17 nt, Human
gcaccacacucagcccu

SEQ ID NO: 3156339 - RNA, 22 nt, Human
gcagauggaaugcuguguuaaa

SEQ ID NO: 3156340 - RNA, 18 nt, Human
gcaggaaauggcugugga

SEQ ID NO: 3156341 - RNA, 20 nt, Human
gcaucuagcaugucgucaaa

SEQ ID NO: 3156342 - RNA, 23 nt, Human
gcaggucccuaauaaagcugugu

SEQ ID NO: 3156343 - RNA, 20 nt, Human
gcaggucccuaauaaagcug

SEQ ID NO: 3156344 - RNA, 21 nt, Human
gcaggucccuaauaaagcugu

SEQ ID NO: 3156345 - RNA, 16 nt, Human
gcaggucccuaauaaa

SEQ ID NO: 3156346 - RNA, 17 nt, Human
gcaggucccuaauaaag

SEQ ID NO: 3156347 - RNA, 18 nt, Human
gcaggucccuaauaaagc

SEQ ID NO: 3156348 - RNA, 19 nt, Human
gcaggucccuaauaaagcu

SEQ ID NO: 3156349 - RNA, 16 nt, Human
gcagugggccuggcca

SEQ ID NO: 3156350 - RNA, 15 nt, Human
gcagugggccuggcc

SEQ ID NO: 3156351 - RNA, 17 nt, Human
gcagugggccuggccag

SEQ ID NO: 3156352 - RNA, 14 nt, Human
gcaggucccuaaua

SEQ ID NO: 3156353 - RNA, 15 nt, Human
gcaggucccuaauaa

SEQ ID NO: 3156354 - RNA, 23 nt, Human
gcaggcaucggggagccgggagc

SEQ ID NO: 3156355 - RNA, 21 nt, Human
gcaggcaucggggagccggga

SEQ ID NO: 3156356 - RNA, 22 nt, Human
gcaggcaucggggagccgggag

SEQ ID NO: 3156357 - RNA, 21 nt, Human
gcccaaaccaccagaagccca

SEQ ID NO: 3156358 - RNA, 22 nt, Human
gcccaaaccaccagaagcccag

SEQ ID NO: 3156359 - RNA, 23 nt, Human
gcccaaaccaccagaagcccaga

SEQ ID NO: 3156360 - RNA, 13 nt, Human
gccaggcuggguc

SEQ ID NO: 3156361 - RNA, 20 nt, Human
gccaaugugaacagcggcug

SEQ ID NO: 3156362 - RNA, 21 nt, Human
gccagacuucccacggcuccu

SEQ ID NO: 3156363 - RNA, 16 nt, Human
gccaccugaauaaaga

SEQ ID NO: 3156364 - RNA, 19 nt, Human
gccaccgccuccuacagcc

SEQ ID NO: 3156365 - RNA, 15 nt, Human
gccacgauugcagga

SEQ ID NO: 3156366 - RNA, 13 nt, Human
gaggagggcaggc

SEQ ID NO: 3156367 - RNA, 14 nt, Human
gaggagggcaggca

SEQ ID NO: 3156368 - RNA, 15 nt, Human
gaggagggcaggcau

SEQ ID NO: 3156369 - RNA, 15 nt, Human
gaggaugucugggcc

SEQ ID NO: 3156370 - RNA, 12 nt, Human
gagcuacaaaug

SEQ ID NO: 3156371 - RNA, 13 nt, Human
gagcuacaaaugc

SEQ ID NO: 3156372 - RNA, 12 nt, Human
gagccugcagag

SEQ ID NO: 3156373 - RNA, 15 nt, Human
gagccugcagagcug

SEQ ID NO: 3156374 - RNA, 14 nt, Human
gagcuacaaaugca

SEQ ID NO: 3156375 - RNA, 23 nt, Human
gagcucaggaaccgaggcaggga

SEQ ID NO: 3156376 - RNA, 22 nt, Human
gagcucaggaaccgaggcaggg

SEQ ID NO: 3156377 - RNA, 21 nt, Human
gaguugaaaaucuuauaauuu

SEQ ID NO: 3156378 - RNA, 13 nt, Human
gaguuccuagcca

SEQ ID NO: 3156379 - RNA, 17 nt, Human
gauauaaguguguguuu

SEQ ID NO: 3156380 - RNA, 21 nt, Human
gauauaaguguguguuuuuca

SEQ ID NO: 3156381 - RNA, 21 nt, Human
gauaaucagugugucuaaauu

SEQ ID NO: 3156382 - RNA, 22 nt, Human
gagguuuguuuagaagaagugu

SEQ ID NO: 3156383 - RNA, 16 nt, Human
gagucccugccuggac

SEQ ID NO: 3156384 - RNA, 19 nt, Human
gagucccugccuggaccag

SEQ ID NO: 3156385 - RNA, 14 nt, Human
gagucccugccugg

SEQ ID NO: 3156386 - RNA, 15 nt, Human
gagucccugccugga

SEQ ID NO: 3156387 - RNA, 14 nt, Human
gagucccugccauc

SEQ ID NO: 3156388 - RNA, 14 nt, Human
gaguauuuuugaca

SEQ ID NO: 3156389 - RNA, 16 nt, Human
gaguauuuuugacaga

SEQ ID NO: 3156390 - RNA, 17 nt, Human
gaguauuuuugacagaa

SEQ ID NO: 3156391 - RNA, 18 nt, Human
gaguauuuuugacagaau

SEQ ID NO: 3156392 - RNA, 21 nt, Human
gaugccuggcgggguggggug

SEQ ID NO: 3156393 - RNA, 13 nt, Human
gaugcauggagau

SEQ ID NO: 3156394 - RNA, 20 nt, Human
gaugcauggagauagcccca

SEQ ID NO: 3156395 - RNA, 17 nt, Human
gaugcaauguagagggg

SEQ ID NO: 3156396 - RNA, 14 nt, Human
gaugacuauggaaa

SEQ ID NO: 3156397 - RNA, 23 nt, Human
gaucuucaucugacuaugacaua

SEQ ID NO: 3156398 - RNA, 16 nt, Human
gaucuucaucugacua

SEQ ID NO: 3156399 - RNA, 18 nt, Human
gaucgcaguuugccuggu

SEQ ID NO: 3156400 - RNA, 13 nt, Human
gaucgcaguuugc

SEQ ID NO: 3156401 - RNA, 21 nt, Human
gauguguccugauaagcugag

SEQ ID NO: 3156402 - RNA, 21 nt, Human
gauguggaaaagccaagaggc

SEQ ID NO: 3156403 - RNA, 23 nt, Human
gauguggaaaagccaagaggcug

SEQ ID NO: 3156404 - RNA, 22 nt, Human
gauuaagaucucagugguuaag

SEQ ID NO: 3156405 - RNA, 12 nt, Human
cugaauuauuuu

SEQ ID NO: 3156406 - RNA, 12 nt, Human
cugagcaggugu

SEQ ID NO: 3156407 - RNA, 19 nt, Human
cucuggauuauauuaugaa

SEQ ID NO: 3156408 - RNA, 20 nt, Human
cucuggauuauauuaugaag

SEQ ID NO: 3156409 - RNA, 20 nt, Human
cucugcccgggagcucagga

SEQ ID NO: 3156410 - RNA, 14 nt, Human
cucugcccgggagc

SEQ ID NO: 3156411 - RNA, 19 nt, Human
cucugcaggucccuaauaa

SEQ ID NO: 3156412 - RNA, 20 nt, Human
cucugcaggucccuaauaaa

SEQ ID NO: 3156413 - RNA, 21 nt, Human
cucugcaggucccuaauaaag

SEQ ID NO: 3156414 - RNA, 18 nt, Human
cucugcaggucccuaaua

SEQ ID NO: 3156415 - RNA, 15 nt, Human
cugaguuccuagcca

SEQ ID NO: 3156416 - RNA, 16 nt, Human
cugaguuccuagccac

SEQ ID NO: 3156417 - RNA, 17 nt, Human
cugaguuccuagccacc

SEQ ID NO: 3156418 - RNA, 18 nt, Human
cugaguuccuagccaccg

SEQ ID NO: 3156419 - RNA, 13 nt, Human
cugauuguauuua

SEQ ID NO: 3156420 - RNA, 16 nt, Human
cugccacucaggccca

SEQ ID NO: 3156421 - RNA, 23 nt, Human
cugccacucaggcccaaagccuc

SEQ ID NO: 3156422 - RNA, 15 nt, Human
cugccucucugcagg

SEQ ID NO: 3156423 - RNA, 16 nt, Human
cugccucucugcaggu

SEQ ID NO: 3156424 - RNA, 17 nt, Human
cugccucucugcagguc

SEQ ID NO: 3156425 - RNA, 18 nt, Human
cugccucucugcaggucc

SEQ ID NO: 3156426 - RNA, 17 nt, Human
cugccuggaccagccuc

SEQ ID NO: 3156427 - RNA, 15 nt, Human
cucauaucaguuugc

SEQ ID NO: 3156428 - RNA, 13 nt, Human
cuccaccugcucu

SEQ ID NO: 3156429 - RNA, 23 nt, Human
cuccaccaagccuggucagccca

SEQ ID NO: 3156430 - RNA, 21 nt, Human
cuccaaugcuguuaucccugc

SEQ ID NO: 3156431 - RNA, 12 nt, Human
cuccuccuagcc

SEQ ID NO: 3156432 - RNA, 13 nt, Human
cucgagaucccaa

SEQ ID NO: 3156433 - RNA, 21 nt, Human
cucgagaucccaacacugcca

SEQ ID NO: 3156434 - RNA, 22 nt, Human
cucgagaucccaacacugccag

SEQ ID NO: 3156435 - RNA, 23 nt, Human
cucgagaucccaacacugccagc

SEQ ID NO: 3156436 - RNA, 22 nt, Human
cuagguaaauuacaguuccuag

SEQ ID NO: 3156437 - RNA, 13 nt, Human
cuauggccugugg

SEQ ID NO: 3156438 - RNA, 13 nt, Human
cuaugagggccuu

SEQ ID NO: 3156439 - RNA, 16 nt, Human
cuaucuguuuacagug

SEQ ID NO: 3156440 - RNA, 15 nt, Human
cuaugagggccuuga

SEQ ID NO: 3156441 - RNA, 17 nt, Human
cuaugagggccuugagu

SEQ ID NO: 3156442 - RNA, 13 nt, Human
cuauaauuuaaau

SEQ ID NO: 3156443 - RNA, 13 nt, Human
cucacauuuauau

SEQ ID NO: 3156444 - RNA, 14 nt, Human
cuauuguagagcca

SEQ ID NO: 3156445 - RNA, 12 nt, Human
cucaaauuugga

SEQ ID NO: 3156446 - RNA, 22 nt, Human
gaaaacaauaacgauaaaagac

SEQ ID NO: 3156447 - RNA, 14 nt, Human
cuuuuuucuaaagu

SEQ ID NO: 3156448 - RNA, 20 nt, Human
gaaaaucuuauaauuuaaaa

SEQ ID NO: 3156449 - RNA, 16 nt, Human
gaaacacuuugcauaa

SEQ ID NO: 3156450 - RNA, 19 nt, Human
gaaaauaacaauaaaagac

SEQ ID NO: 3156451 - RNA, 19 nt, Human
gaaaauaacgauaaaagac

SEQ ID NO: 3156452 - RNA, 19 nt, Human
gaaaaucuuauaauuuaaa

SEQ ID NO: 3156453 - RNA, 18 nt, Human
gaaaaucuuauaauuuaa

SEQ ID NO: 3156454 - RNA, 17 nt, Human
gaaaauauuauguguuu

SEQ ID NO: 3156455 - RNA, 20 nt, Human
cuuuuacguccaucucuugu

SEQ ID NO: 3156456 - RNA, 19 nt, Human
cuuguaaaggaauuuaaaa

SEQ ID NO: 3156457 - RNA, 18 nt, Human
cuuguaaaggaauuuaaa

SEQ ID NO: 3156458 - RNA, 20 nt, Human
cuuggggacaggggcaggag

SEQ ID NO: 3156459 - RNA, 17 nt, Human
cuuggagguagcuuuga

SEQ ID NO: 3156460 - RNA, 19 nt, Human
cuuguguuaaguaugugua

SEQ ID NO: 3156461 - RNA, 13 nt, Human
cuuucccaacacc

SEQ ID NO: 3156462 - RNA, 17 nt, Human
cuuucccaacaccucuu

SEQ ID NO: 3156463 - RNA, 18 nt, Human
gaaauuguauuacaaauc

SEQ ID NO: 3156464 - RNA, 22 nt, Human
gaacucaucuagguaaauuaca

SEQ ID NO: 3156465 - RNA, 21 nt, Human
gaacuuguaaaggaauuuaaa

SEQ ID NO: 3156466 - RNA, 13 nt, Human
gaacuauuagagc

SEQ ID NO: 3156467 - RNA, 22 nt, Human
gaagcuucuggugaccuuccaa

SEQ ID NO: 3156468 - RNA, 18 nt, Human
gaagcuuuuaugugaaac

SEQ ID NO: 3156469 - RNA, 10 nt, Human
gaagcccaga

SEQ ID NO: 3156470 - RNA, 12 nt, Human
gaagcccagaau

SEQ ID NO: 3156471 - RNA, 22 nt, Human
gaagccacgguguucugugaua

SEQ ID NO: 3156472 - RNA, 19 nt, Human
gaaggaucccaugagcucc

SEQ ID NO: 3156473 - RNA, 14 nt, Human
gaaggaaaaugaua

SEQ ID NO: 3156474 - RNA, 17 nt, Human
gaauaaagaaugaaugg

SEQ ID NO: 3156475 - RNA, 17 nt, Human
gaaguuuacauuguaaa

SEQ ID NO: 3156476 - RNA, 16 nt, Human
gaaguuuacauuguaa

SEQ ID NO: 3156477 - RNA, 12 nt, Human
gaauaaaauuuu

SEQ ID NO: 3156478 - RNA, 14 nt, Human
gaauacuuuauaaa

SEQ ID NO: 3156479 - RNA, 20 nt, Human
gaauaauccuaaacauauga

SEQ ID NO: 3156480 - RNA, 20 nt, Human
gaauaagugccaggauggaa

SEQ ID NO: 3156481 - RNA, 14 nt, Human
gaaugccuccugca

SEQ ID NO: 3156482 - RNA, 19 nt, Human
cuuccaaacaggcucagag

SEQ ID NO: 3156483 - RNA, 17 nt, Human
cuuaaccagaucauugu

SEQ ID NO: 3156484 - RNA, 15 nt, Human
cuuaaggcucuuuug

SEQ ID NO: 3156485 - RNA, 13 nt, Human
cugggucgcccug

SEQ ID NO: 3156486 - RNA, 15 nt, Human
cugggucgcccugga

SEQ ID NO: 3156487 - RNA, 16 nt, Human
cugggggccucuucug

SEQ ID NO: 3156488 - RNA, 19 nt, Human
cugggccccugccucucug

SEQ ID NO: 3156489 - RNA, 20 nt, Human
cugggccccugccucucugc

SEQ ID NO: 3156490 - RNA, 23 nt, Human
cugggccccugccucucugcagg

SEQ ID NO: 3156491 - RNA, 14 nt, Human
cuggugguggcucg

SEQ ID NO: 3156492 - RNA, 22 nt, Human
cuggugguggcucgggaggcga

SEQ ID NO: 3156493 - RNA, 12 nt, Human
cuggugguucac

SEQ ID NO: 3156494 - RNA, 20 nt, Human
cuggugguucacucuuggag

SEQ ID NO: 3156495 - RNA, 21 nt, Human
cuggugguucacucuuggagc

SEQ ID NO: 3156496 - RNA, 23 nt, Human
cuggugguucacucuuggagccu

SEQ ID NO: 3156497 - RNA, 21 nt, Human
cugucuuuuuucuaaaguaaa

SEQ ID NO: 3156498 - RNA, 18 nt, Human
cugugaaaguacauuugg

SEQ ID NO: 3156499 - RNA, 17 nt, Human
cugugcccacccuccac

SEQ ID NO: 3156500 - RNA, 23 nt, Human
cugugcccacccuccacucuccu

SEQ ID NO: 3156501 - RNA, 14 nt, Human
cugugugcucagga

SEQ ID NO: 3156502 - RNA, 14 nt, Human
cuguguguguguau

SEQ ID NO: 3156503 - RNA, 16 nt, Human
cuguguguguguaugu

SEQ ID NO: 3156504 - RNA, 15 nt, Human
cuguguguguguaug

SEQ ID NO: 3156505 - RNA, 20 nt, Human
cuguguguuuaugugugugu

SEQ ID NO: 3156506 - RNA, 18 nt, Human
cuguguguuuaugugugu

SEQ ID NO: 3156507 - RNA, 20 nt, Human
cuguguguguguaugugggg

SEQ ID NO: 3156508 - RNA, 18 nt, Human
cuguguguguguaugugg

SEQ ID NO: 3156509 - RNA, 18 nt, Human
cuguggccuaaccugccg

SEQ ID NO: 3156510 - RNA, 14 nt, Human
cuguggaucaaauc

SEQ ID NO: 3156511 - RNA, 24 nt, Human
cuguggaucaaauccagccugcug

SEQ ID NO: 3156512 - RNA, 21 nt, Human
cccacaggagguggucuggga

SEQ ID NO: 3156513 - RNA, 16 nt, Human
cccacaggaggugguc

SEQ ID NO: 3156514 - RNA, 17 nt, Human
cccaccacacccucccu

SEQ ID NO: 3156515 - RNA, 15 nt, Human
cccuggacugugugc

SEQ ID NO: 3156516 - RNA, 13 nt, Human
cccugccagaccc

SEQ ID NO: 3156517 - RNA, 21 nt, Human
cccugccagacccccuggaga

SEQ ID NO: 3156518 - RNA, 13 nt, Human
cccuccaccugcu

SEQ ID NO: 3156519 - RNA, 23 nt, Human
cccuccacucuccucuuccaggc

SEQ ID NO: 3156520 - RNA, 16 nt, Human
ccuaggcuaggguggg

SEQ ID NO: 3156521 - RNA, 18 nt, Human
ccuaaauauauuuuaaga

SEQ ID NO: 3156522 - RNA, 16 nt, Human
ccuaaauauauuuuaa

SEQ ID NO: 3156523 - RNA, 22 nt, Human
ccgggucaucuguaccucugcc

SEQ ID NO: 3156524 - RNA, 12 nt, Human
ccggguuccagc

SEQ ID NO: 3156525 - RNA, 15 nt, Human
ccggguuccagcacc

SEQ ID NO: 3156526 - RNA, 19 nt, Human
ccgggacaccuaggcuagg

SEQ ID NO: 3156527 - RNA, 20 nt, Human
ccgggacaccuaggcuaggg

SEQ ID NO: 3156528 - RNA, 15 nt, Human
ccgaggcagggaagg

SEQ ID NO: 3156529 - RNA, 21 nt, Human
ccucaucuccccaucauuggu

SEQ ID NO: 3156530 - RNA, 18 nt, Human
ccucuccacucaugugac

SEQ ID NO: 3156531 - RNA, 18 nt, Human
ccucucauuccagaggaa

SEQ ID NO: 3156532 - RNA, 16 nt, Human
ccuuccaagagccuga

SEQ ID NO: 3156533 - RNA, 17 nt, Human
ccuuccaagagccugag

SEQ ID NO: 3156534 - RNA, 15 nt, Human
ccuuccaagagccug

SEQ ID NO: 3156535 - RNA, 13 nt, Human
ccuugaacuagga

SEQ ID NO: 3156536 - RNA, 15 nt, Human
ccuucugugaaagua

SEQ ID NO: 3156537 - RNA, 15 nt, Human
ccuugucacgccaga

SEQ ID NO: 3156538 - RNA, 18 nt, Human
ccuugucacgccagacuu

SEQ ID NO: 3156539 - RNA, 12 nt, Human
ccuguuuaagag

SEQ ID NO: 3156540 - RNA, 15 nt, Human
ccuguuuaagagaca

SEQ ID NO: 3156541 - RNA, 16 nt, Human
ccuuaaggcucuuuug

SEQ ID NO: 3156542 - RNA, 18 nt, Human
ccuuaaggcucuuuugua

SEQ ID NO: 3156543 - RNA, 13 nt, Human
ccuuaaggcucuu

SEQ ID NO: 3156544 - RNA, 22 nt, Human
cgagaucccaacacugccagca

SEQ ID NO: 3156545 - RNA, 15 nt, Human
cgagaucccaacacu

SEQ ID NO: 3156546 - RNA, 21 nt, Human
cgagaucccaacacugccagc

SEQ ID NO: 3156547 - RNA, 13 nt, Human
cgagaucccaaca

SEQ ID NO: 3156548 - RNA, 21 nt, Human
cgaagaguauuuuugacagaa

SEQ ID NO: 3156549 - RNA, 18 nt, Human
ccugccugguccucacac

SEQ ID NO: 3156550 - RNA, 12 nt, Human
ccugggcaggag

SEQ ID NO: 3156551 - RNA, 14 nt, Human
ccugggcaggaggg

SEQ ID NO: 3156552 - RNA, 14 nt, Human
ccuggucagcccaa

SEQ ID NO: 3156553 - RNA, 12 nt, Human
ccuggucagccc

SEQ ID NO: 3156554 - RNA, 19 nt, Human
ccuggagacuaaccccacc

SEQ ID NO: 3156555 - RNA, 15 nt, Human
ccuggcuccaggcca

SEQ ID NO: 3156556 - RNA, 16 nt, Human
ccuggcuccaggccag

SEQ ID NO: 3156557 - RNA, 17 nt, Human
ccuggcuccaggccagg

SEQ ID NO: 3156558 - RNA, 19 nt, Human
ccugcaauuucauaugcug

SEQ ID NO: 3156559 - RNA, 22 nt, Human
ccugccacucaggcccaaagcc

SEQ ID NO: 3156560 - RNA, 23 nt, Human
ccugccacucaggcccaaagccu

SEQ ID NO: 3156561 - RNA, 14 nt, Human
ccugccagaccccc

SEQ ID NO: 3156562 - RNA, 14 nt, Human
ccugccacucaggc

SEQ ID NO: 3156563 - RNA, 19 nt, Human
ccugaggaagagggacugu

SEQ ID NO: 3156564 - RNA, 20 nt, Human
ccacuguacuugcucuugau

SEQ ID NO: 3156565 - RNA, 17 nt, Human
ccacuguacuugcucuu

SEQ ID NO: 3156566 - RNA, 18 nt, Human
ccacuguacuugcucuug

SEQ ID NO: 3156567 - RNA, 19 nt, Human
ccacuguacuugcucuuga

SEQ ID NO: 3156568 - RNA, 18 nt, Human
ccagacccccuggagacu

SEQ ID NO: 3156569 - RNA, 12 nt, Human
ccagacccccug

SEQ ID NO: 3156570 - RNA, 16 nt, Human
ccagacccccuggaga

SEQ ID NO: 3156571 - RNA, 13 nt, Human
ccagauuuaugca

SEQ ID NO: 3156572 - RNA, 22 nt, Human
ccagauuuaugcauauuauuuu

SEQ ID NO: 3156573 - RNA, 23 nt, Human
ccagcauaauacuugcuuuggaa

SEQ ID NO: 3156574 - RNA, 16 nt, Human
ccagcauuucccuucc

SEQ ID NO: 3156575 - RNA, 21 nt, Human
ccagcauuucccuuccuuccu

SEQ ID NO: 3156576 - RNA, 20 nt, Human
ccaccugaauaaagaaugaa

SEQ ID NO: 3156577 - RNA, 15 nt, Human
ccacccuccacucuc

SEQ ID NO: 3156578 - RNA, 22 nt, Human
ccacucaugugacucuuuccaa

SEQ ID NO: 3156579 - RNA, 19 nt, Human
ccacucaugugacucuuuc

SEQ ID NO: 3156580 - RNA, 22 nt, Human
ccacuaaaagaucgcaguuugc

SEQ ID NO: 3156581 - RNA, 20 nt, Human
ccaaaccaccagaagcccag

SEQ ID NO: 3156582 - RNA, 22 nt, Human
ccacacugauccagcccugagu

SEQ ID NO: 3156583 - RNA, 19 nt, Human
ccacacugauccagcccug

SEQ ID NO: 3156584 - RNA, 22 nt, Human
ccaccaagccuggucagcccaa

SEQ ID NO: 3156585 - RNA, 21 nt, Human
ccaccaagccuggucagccca

SEQ ID NO: 3156586 - RNA, 18 nt, Human
ccauccuacccccugugc

SEQ ID NO: 3156587 - RNA, 17 nt, Human
ccauccuacccccugug

SEQ ID NO: 3156588 - RNA, 21 nt, Human
cccaaaacaccggguuccagc

SEQ ID NO: 3156589 - RNA, 19 nt, Human
cccaaaacaccggguucca

SEQ ID NO: 3156590 - RNA, 19 nt, Human
ccaggccagggggccaguc

SEQ ID NO: 3156591 - RNA, 13 nt, Human
ccaggagacaggu

SEQ ID NO: 3156592 - RNA, 18 nt, Human
caugagauaauaugcaga

SEQ ID NO: 3156593 - RNA, 19 nt, Human
caugaguuggcugggaaua

SEQ ID NO: 3156594 - RNA, 23 nt, Human
caugagcuccuuaaggcucuuuu

SEQ ID NO: 3156595 - RNA, 15 nt, Human
cauccuacccccugu

SEQ ID NO: 3156596 - RNA, 18 nt, Human
cauccuacccccugugcc

SEQ ID NO: 3156597 - RNA, 17 nt, Human
caucugacuaugacaua

SEQ ID NO: 3156598 - RNA, 16 nt, Human
caucucuuguuuaaau

SEQ ID NO: 3156599 - RNA, 17 nt, Human
cauaucuaguaugaaau

SEQ ID NO: 3156600 - RNA, 18 nt, Human
cauaucuaguaugaaauu

SEQ ID NO: 3156601 - RNA, 15 nt, Human
cauaucuaguaugaa

SEQ ID NO: 3156602 - RNA, 16 nt, Human
cauauaagugauugcu

SEQ ID NO: 3156603 - RNA, 16 nt, Human
cauagguuuaauaauu

SEQ ID NO: 3156604 - RNA, 21 nt, Human
cauaucuaguaugaaauuaua

SEQ ID NO: 3156605 - RNA, 19 nt, Human
cauauuguuacugguacca

SEQ ID NO: 3156606 - RNA, 13 nt, Human
cauauuguuacug

SEQ ID NO: 3156607 - RNA, 13 nt, Human
caucccuccuggg

SEQ ID NO: 3156608 - RNA, 13 nt, Human
cauccagaguccc

SEQ ID NO: 3156609 - RNA, 17 nt, Human
cauccagagucccugcc

SEQ ID NO: 3156610 - RNA, 18 nt, Human
cauccagagucccugccu

SEQ ID NO: 3156611 - RNA, 20 nt, Human
cauccagagucccugccugg

SEQ ID NO: 3156612 - RNA, 13 nt, Human
caucauguuuaca

SEQ ID NO: 3156613 - RNA, 21 nt, Human
caucauguuuacagaggacag

SEQ ID NO: 3156614 - RNA, 19 nt, Human
caucauguuuacagaggac

SEQ ID NO: 3156615 - RNA, 15 nt, Human
cauggcauauuuuuc

SEQ ID NO: 3156616 - RNA, 19 nt, Human
cauggcauauuuuucacau

SEQ ID NO: 3156617 - RNA, 23 nt, Human
cauggcauauuuuucacauaucu

SEQ ID NO: 3156618 - RNA, 13 nt, Human
cauggcauauuuu

SEQ ID NO: 3156619 - RNA, 16 nt, Human
caugugacucuuucca

SEQ ID NO: 3156620 - RNA, 17 nt, Human
caugugacucuuuccaa

SEQ ID NO: 3156621 - RNA, 14 nt, Human
caugugacucuuuc

SEQ ID NO: 3156622 - RNA, 21 nt, Human
cauuaaaaaaucaguuguaca

SEQ ID NO: 3156623 - RNA, 19 nt, Human
cauuguacgaagaguauuu

SEQ ID NO: 3156624 - RNA, 23 nt, Human
cauuuuaccuuugacaaagguaa

SEQ ID NO: 3156625 - RNA, 17 nt, Human
ccaaaccaccagaagcc

SEQ ID NO: 3156626 - RNA, 13 nt, Human
cauucuggaauaa

SEQ ID NO: 3156627 - RNA, 14 nt, Human
cauucuuucccaac

SEQ ID NO: 3156628 - RNA, 12 nt, Human
cauucuuuccca

SEQ ID NO: 3156629 - RNA, 13 nt, Human
cauuccagaggaa

SEQ ID NO: 3156630 - RNA, 19 nt, Human
cauucauuuucuggguguu

SEQ ID NO: 3156631 - RNA, 14 nt, Human
cauuccagaggaag

SEQ ID NO: 3156632 - RNA, 13 nt, Human
uuuuuaaucuuua

SEQ ID NO: 3156633 - RNA, 23 nt, Human
uuuugacagaauauguuucaaac

SEQ ID NO: 3156634 - RNA, 22 nt, Human
uuuugacagaauauguuucaaa

SEQ ID NO: 3156635 - RNA, 11 nt, Human
uuuugacagaa

SEQ ID NO: 3156636 - RNA, 18 nt, Human
uuugcauaacguauaaaa

SEQ ID NO: 3156637 - RNA, 15 nt, Human
uuuggucaacacuaa

SEQ ID NO: 3156638 - RNA, 14 nt, Human
uuuuaaaauccacu

SEQ ID NO: 3156639 - RNA, 23 nt, Human
uuuuaaaauccacuuuaucuuga

SEQ ID NO: 3156640 - RNA, 21 nt, Human
uuuucuuaaccagaucauugu

SEQ ID NO: 3156641 - RNA, 22 nt, Human
uuuucagaaaauauuauguguu

SEQ ID NO: 3156642 - RNA, 16 nt, Human
uuuucacauaucuagu

SEQ ID NO: 3156643 - RNA, 21 nt, Human
uuuucaaaauuguuacaaauu

SEQ ID NO: 3156644 - RNA, 23 nt, Human
uuuucagaaaauauuauguguuu

SEQ ID NO: 3156645 - RNA, 21 nt, Human
uuuuaaaguaacccuacaaaa

SEQ ID NO: 3156646 - RNA, 19 nt, Human
uuuuacguccaucucuugu

SEQ ID NO: 3156647 - RNA, 21 nt, Human
uuuuauuuuucucaugaugag

SEQ ID NO: 3156648 - RNA, 23 nt, Human
uucaguuauuauauuuacaaaug

SEQ ID NO: 3156649 - RNA, 20 nt, Human
uucauaaauaaaguuuguug

SEQ ID NO: 3156650 - RNA, 20 nt, Human
uucaucugacuaugacauaa

SEQ ID NO: 3156651 - RNA, 13 nt, Human
uucagcuugggga

SEQ ID NO: 3156652 - RNA, 21 nt, Human
uuccaaaaagauuuucagaaa

SEQ ID NO: 3156653 - RNA, 14 nt, Human
uuauuuuguucaua

SEQ ID NO: 3156654 - RNA, 16 nt, Human
uucaauaauaaauauu

SEQ ID NO: 3156655 - RNA, 13 nt, Human
uuauuuuaaaaga

SEQ ID NO: 3156656 - RNA, 12 nt, Human
uuauaauuuaaa

SEQ ID NO: 3156657 - RNA, 12 nt, Human
uuauaauuuuaa

SEQ ID NO: 3156658 - RNA, 17 nt, Human
uuauaauuuuaaauguu

SEQ ID NO: 3156659 - RNA, 21 nt, Human
uuauaauuuuaaauguuuuuu

SEQ ID NO: 3156660 - RNA, 14 nt, Human
uuauacaggucaua

SEQ ID NO: 3156661 - RNA, 22 nt, Human
uuauacaggucauauuaauaua

SEQ ID NO: 3156662 - RNA, 15 nt, Human
uuauaucuuguagcu

SEQ ID NO: 3156663 - RNA, 22 nt, Human
uuauaucuuguagcuuuaucaa

SEQ ID NO: 3156664 - RNA, 16 nt, Human
uuauauuaugaagcuu

SEQ ID NO: 3156665 - RNA, 16 nt, Human
uuauauuuacaaaugg

SEQ ID NO: 3156666 - RNA, 16 nt, Human
uuaucuugaauaaugu

SEQ ID NO: 3156667 - RNA, 14 nt, Human
uuaucuugaauaau

SEQ ID NO: 3156668 - RNA, 17 nt, Human
uuauguugcauagaaua

SEQ ID NO: 3156669 - RNA, 18 nt, Human
uucugcuuguguuaagua

SEQ ID NO: 3156670 - RNA, 17 nt, Human
uucuuccaaaaagauuu

SEQ ID NO: 3156671 - RNA, 13 nt, Human
uugaaaagaggug

SEQ ID NO: 3156672 - RNA, 14 nt, Human
uugaaaagaggugu

SEQ ID NO: 3156673 - RNA, 21 nt, Human
uugaaaagaggugugcaagag

SEQ ID NO: 3156674 - RNA, 19 nt, Human
uugacaaagucaagccaca

SEQ ID NO: 3156675 - RNA, 20 nt, Human
uugacaaagucaagccacau

SEQ ID NO: 3156676 - RNA, 13 nt, Human
uucugagagcugu

SEQ ID NO: 3156677 - RNA, 19 nt, Human
uucugagagcugugcauca

SEQ ID NO: 3156678 - RNA, 22 nt, Human
uucuacauaaguaauucaagaa

SEQ ID NO: 3156679 - RNA, 14 nt, Human
uucuauagcuuuuc

SEQ ID NO: 3156680 - RNA, 18 nt, Human
uucggugagcuacaaaug

SEQ ID NO: 3156681 - RNA, 21 nt, Human
uuccugaggaagagggacugu

SEQ ID NO: 3156682 - RNA, 13 nt, Human
uuguguugugaau

SEQ ID NO: 3156683 - RNA, 17 nt, Human
uuguaaauaguauuuga

SEQ ID NO: 3156684 - RNA, 21 nt, Human
uuguauucagaguugaugguu

SEQ ID NO: 3156685 - RNA, 23 nt, Human
uuguacgaagaguauuuuugaca

SEQ ID NO: 3156686 - RNA, 21 nt, Human
uuguacgaagaguauuuuuga

SEQ ID NO: 3156687 - RNA, 20 nt, Human
uuuacauuguaaauaguauu

SEQ ID NO: 3156688 - RNA, 21 nt, Human
uuuauaaaaauaaaaaacacu

SEQ ID NO: 3156689 - RNA, 23 nt, Human
uuuauaaaaauaaaaaacacugg

SEQ ID NO: 3156690 - RNA, 19 nt, Human
uuuaacucuauaauguguu

SEQ ID NO: 3156691 - RNA, 19 nt, Human
uuuccaaccggcuuugugg

SEQ ID NO: 3156692 - RNA, 12 nt, Human
ugcuuguguuaa

SEQ ID NO: 3156693 - RNA, 15 nt, Human
ugcuuguguuaagua

SEQ ID NO: 3156694 - RNA, 17 nt, Human
ugcuuuggaaaacccag

SEQ ID NO: 3156695 - RNA, 16 nt, Human
uggaaaagccaagagg

SEQ ID NO: 3156696 - RNA, 19 nt, Human
uggaaaagccaagaggcug

SEQ ID NO: 3156697 - RNA, 17 nt, Human
uggagacacaacuauuu

SEQ ID NO: 3156698 - RNA, 19 nt, Human
uggaucaaauccagccugc

SEQ ID NO: 3156699 - RNA, 14 nt, Human
ugggaggagggcag

SEQ ID NO: 3156700 - RNA, 17 nt, Human
ugggaggagggcaggca

SEQ ID NO: 3156701 - RNA, 18 nt, Human
ugggaggagggcaggcau

SEQ ID NO: 3156702 - RNA, 17 nt, Human
uggggggcuucauacac

SEQ ID NO: 3156703 - RNA, 17 nt, Human
uggggccaggcuggguc

SEQ ID NO: 3156704 - RNA, 21 nt, Human
uggcuugaguuuaaauuguaa

SEQ ID NO: 3156705 - RNA, 14 nt, Human
ugggaaugaagcaa

SEQ ID NO: 3156706 - RNA, 15 nt, Human
uggcuccaggccagg

SEQ ID NO: 3156707 - RNA, 16 nt, Human
uggccuaaccugccga

SEQ ID NO: 3156708 - RNA, 14 nt, Human
uggccccugagauc

SEQ ID NO: 3156709 - RNA, 23 nt, Human
uggccuaaccugccgagagucca

SEQ ID NO: 3156710 - RNA, 15 nt, Human
ugguuccagccugcc

SEQ ID NO: 3156711 - RNA, 16 nt, Human
ugguuccagccugcca

SEQ ID NO: 3156712 - RNA, 20 nt, Human
ugguuguacauauaagugau

SEQ ID NO: 3156713 - RNA, 17 nt, Human
uguaaugaaaaccacau

SEQ ID NO: 3156714 - RNA, 11 nt, Human
uguaaugaaaa

SEQ ID NO: 3156715 - RNA, 12 nt, Human
uguaaugaaaac

SEQ ID NO: 3156716 - RNA, 13 nt, Human
uguaaugaaaacc

SEQ ID NO: 3156717 - RNA, 17 nt, Human
uguaaauuuaugugaug

SEQ ID NO: 3156718 - RNA, 22 nt, Human
uguaauaacugugaaguuuaca

SEQ ID NO: 3156719 - RNA, 14 nt, Human
uguaauaacuguga

SEQ ID NO: 3156720 - RNA, 14 nt, Human
uguagcuuuaucaa

SEQ ID NO: 3156721 - RNA, 15 nt, Human
uguagcuuuaucaaa

SEQ ID NO: 3156722 - RNA, 13 nt, Human
uguaugcuucaua

SEQ ID NO: 3156723 - RNA, 14 nt, Human
uguaugcuucauac

SEQ ID NO: 3156724 - RNA, 16 nt, Human
uguaugcuucauacag

SEQ ID NO: 3156725 - RNA, 19 nt, Human
uguaugcuucauacaggga

SEQ ID NO: 3156726 - RNA, 18 nt, Human
uguccugcaccggggccu

SEQ ID NO: 3156727 - RNA, 13 nt, Human
uguccucagcccc

SEQ ID NO: 3156728 - RNA, 13 nt, Human
ugagaaaucuaaa

SEQ ID NO: 3156729 - RNA, 17 nt, Human
ugagaaaucuaaaaaac

SEQ ID NO: 3156730 - RNA, 21 nt, Human
ugacccucaucuuucuuccaa

SEQ ID NO: 3156731 - RNA, 19 nt, Human
ucuugaaggaaaaugauac

SEQ ID NO: 3156732 - RNA, 16 nt, Human
ucuugaauaauguaag

SEQ ID NO: 3156733 - RNA, 17 nt, Human
ugauauaaguguguguu

SEQ ID NO: 3156734 - RNA, 23 nt, Human
ugauauaaguguguguuuuucau

SEQ ID NO: 3156735 - RNA, 20 nt, Human
ugauguauucuagcuaaugu

SEQ ID NO: 3156736 - RNA, 14 nt, Human
ugauguauucuagc

SEQ ID NO: 3156737 - RNA, 13 nt, Human
ugauguauucuag

SEQ ID NO: 3156738 - RNA, 13 nt, Human
ugauguacaugua

SEQ ID NO: 3156739 - RNA, 21 nt, Human
ugaugguuguacauauaagug

SEQ ID NO: 3156740 - RNA, 23 nt, Human
ugaugcuacaggauuugaaauug

SEQ ID NO: 3156741 - RNA, 14 nt, Human
ugaugaaaauauuu

SEQ ID NO: 3156742 - RNA, 17 nt, Human
ugaguuggcugggaaua

SEQ ID NO: 3156743 - RNA, 16 nt, Human
ugaguuggcugggaau

SEQ ID NO: 3156744 - RNA, 14 nt, Human
ugaguuggcuggga

SEQ ID NO: 3156745 - RNA, 19 nt, Human
ugagguggaagagggcugc

SEQ ID NO: 3156746 - RNA, 16 nt, Human
ugaggcugcuuuccaa

SEQ ID NO: 3156747 - RNA, 20 nt, Human
ugaggcugcuuuccaaagcc

SEQ ID NO: 3156748 - RNA, 23 nt, Human
ugaggcugcuuuccaaagccaau

SEQ ID NO: 3156749 - RNA, 18 nt, Human
ugcccgggagcucaggaa

SEQ ID NO: 3156750 - RNA, 17 nt, Human
ugcccgggagcucagga

SEQ ID NO: 3156751 - RNA, 17 nt, Human
ugcccagaaugaggcug

SEQ ID NO: 3156752 - RNA, 18 nt, Human
ugcccagaaugaggcugc

SEQ ID NO: 3156753 - RNA, 17 nt, Human
ugccugguccucacacu

SEQ ID NO: 3156754 - RNA, 21 nt, Human
ugcauuauauuuguaaauuua

SEQ ID NO: 3156755 - RNA, 22 nt, Human
ugccaucauguuuacagaggac

SEQ ID NO: 3156756 - RNA, 20 nt, Human
ugcaauuucauaugcuguau

SEQ ID NO: 3156757 - RNA, 14 nt, Human
ugcaauuucauaug

SEQ ID NO: 3156758 - RNA, 22 nt, Human
ugcaauguagaggggaaaagag

SEQ ID NO: 3156759 - RNA, 17 nt, Human
ugcaaugguuaacaucu

SEQ ID NO: 3156760 - RNA, 18 nt, Human
ugauuuuuaugccaccug

SEQ ID NO: 3156761 - RNA, 18 nt, Human
ugcaacuuuguauaaaag

SEQ ID NO: 3156762 - RNA, 20 nt, Human
uccuaauaaucauuggauuc

SEQ ID NO: 3156763 - RNA, 21 nt, Human
ucccgggacaccuaggcuagg

SEQ ID NO: 3156764 - RNA, 14 nt, Human
ucccuaauaaagcu

SEQ ID NO: 3156765 - RNA, 15 nt, Human
ucccuaauaaagcug

SEQ ID NO: 3156766 - RNA, 16 nt, Human
ucccuccucugcccgg

SEQ ID NO: 3156767 - RNA, 11 nt, Human
ucccuccuggg

SEQ ID NO: 3156768 - RNA, 19 nt, Human
ucccuccugggaaugaagc

SEQ ID NO: 3156769 - RNA, 17 nt, Human
ucccucuacugggagcc

SEQ ID NO: 3156770 - RNA, 15 nt, Human
ucccucuacugggag

SEQ ID NO: 3156771 - RNA, 16 nt, Human
ucccuaauaaagcugu

SEQ ID NO: 3156772 - RNA, 13 nt, Human
ucccugccuggac

SEQ ID NO: 3156773 - RNA, 23 nt, Human
ucccugccugguccucacacuca

SEQ ID NO: 3156774 - RNA, 16 nt, Human
ucccuuccuuccucuc

SEQ ID NO: 3156775 - RNA, 19 nt, Human
ucccuuccuuccucuccug

SEQ ID NO: 3156776 - RNA, 22 nt, Human
ucuaugauuccagguggcauca

SEQ ID NO: 3156777 - RNA, 14 nt, Human
ucgugucuggcaca

SEQ ID NO: 3156778 - RNA, 21 nt, Human
ucgugucuggcacagccuggc

SEQ ID NO: 3156779 - RNA, 15 nt, Human
ucucugcaggucccu

SEQ ID NO: 3156780 - RNA, 16 nt, Human
ucucugcaggucccua

SEQ ID NO: 3156781 - RNA, 13 nt, Human
ucucugcaggucc

SEQ ID NO: 3156782 - RNA, 14 nt, Human
ucucugcagguccc

SEQ ID NO: 3156783 - RNA, 21 nt, Human
ucuccuggaagugcuaauuuu

SEQ ID NO: 3156784 - RNA, 14 nt, Human
ucugaaaauugaug

SEQ ID NO: 3156785 - RNA, 22 nt, Human
ucugaaaauugaugggauuugg

SEQ ID NO: 3156786 - RNA, 15 nt, Human
ucugacauaaguauu

SEQ ID NO: 3156787 - RNA, 19 nt, Human
ucuucaucugacuaugaca

SEQ ID NO: 3156788 - RNA, 13 nt, Human
ucuugaaaaaugc

SEQ ID NO: 3156789 - RNA, 22 nt, Human
ucuuaaccagaucauugugaaa

SEQ ID NO: 3156790 - RNA, 16 nt, Human
ucuuaaccagaucauu

SEQ ID NO: 3156791 - RNA, 17 nt, Human
ucuuaaccagaucauug

SEQ ID NO: 3156792 - RNA, 22 nt, Human
ucugucucuggauuauauuaug

SEQ ID NO: 3156793 - RNA, 15 nt, Human
ucugccaggagacag

SEQ ID NO: 3156794 - RNA, 19 nt, Human
ucaggagcccugggaggcu

SEQ ID NO: 3156795 - RNA, 18 nt, Human
ucaggagcccugggaggc

SEQ ID NO: 3156796 - RNA, 20 nt, Human
ucaggagcccugggaggcuc

SEQ ID NO: 3156797 - RNA, 23 nt, Human
ucaggagcccugggaggcucugg

SEQ ID NO: 3156798 - RNA, 20 nt, Human
ucaggaugauacacuaugaa

SEQ ID NO: 3156799 - RNA, 19 nt, Human
ucacugcuaagaauauuug

SEQ ID NO: 3156800 - RNA, 19 nt, Human
ucagaggguguccugcacc

SEQ ID NO: 3156801 - RNA, 21 nt, Human
ucagaguaauccaagcaaaug

SEQ ID NO: 3156802 - RNA, 22 nt, Human
ucagaguaauccaagcaaaugu

SEQ ID NO: 3156803 - RNA, 14 nt, Human
uccagguggcauca

SEQ ID NO: 3156804 - RNA, 19 nt, Human
uccaaaauaauuuuaagaa

SEQ ID NO: 3156805 - RNA, 15 nt, Human
uccaaaauaauuuua

SEQ ID NO: 3156806 - RNA, 17 nt, Human
ucaucugacuaugacau

SEQ ID NO: 3156807 - RNA, 18 nt, Human
ucaucugacuaugacaua

SEQ ID NO: 3156808 - RNA, 12 nt, Human
ucauugugaaau

SEQ ID NO: 3156809 - RNA, 15 nt, Human
ucauugugaaauuau

SEQ ID NO: 3156810 - RNA, 17 nt, Human
ucauugugaaauuauuc

SEQ ID NO: 3156811 - RNA, 18 nt, Human
ucauugugaaauuauuca

SEQ ID NO: 3156812 - RNA, 14 nt, Human
ucauuccagaggaa

SEQ ID NO: 3156813 - RNA, 21 nt, Human
ucaaauauauucagccuggcu

SEQ ID NO: 3156814 - RNA, 22 nt, Human
ucaaauauauucagccuggcuu

SEQ ID NO: 3156815 - RNA, 23 nt, Human
ucaaauauauucagccuggcuuc

SEQ ID NO: 3156816 - RNA, 14 nt, Human
ucaaaaaacuugua

SEQ ID NO: 3156817 - RNA, 15 nt, Human
ucaaaaaacuuguaa

SEQ ID NO: 3156818 - RNA, 17 nt, Human
ucaaauuguaagcaugc

SEQ ID NO: 3156819 - RNA, 20 nt, Human
ucaaauuguaagcaugcaca

SEQ ID NO: 3156820 - RNA, 22 nt, Human
uauuuuuuucugaauuauuuuc

SEQ ID NO: 3156821 - RNA, 17 nt, Human
uauuuuauguugcauag

SEQ ID NO: 3156822 - RNA, 12 nt, Human
uauuaauauauu

SEQ ID NO: 3156823 - RNA, 13 nt, Human
uauguuucaaacu

SEQ ID NO: 3156824 - RNA, 15 nt, Human
uauguuucaaacuuu

SEQ ID NO: 3156825 - RNA, 16 nt, Human
uauguuucaaacuuug

SEQ ID NO: 3156826 - RNA, 16 nt, Human
uauguugcauagaaua

SEQ ID NO: 3156827 - RNA, 12 nt, Human
uauguugcauag

SEQ ID NO: 3156828 - RNA, 24 nt, Human
uauuuauaaaaauaaaaaacacug

SEQ ID NO: 3156829 - RNA, 14 nt, Human
uauuguguugugaa

SEQ ID NO: 3156830 - RNA, 12 nt, Human
uauucccaugag

SEQ ID NO: 3156831 - RNA, 14 nt, Human
uauucuaaauuuua

SEQ ID NO: 3156832 - RNA, 15 nt, Human
uauucuaaauuuuau

SEQ ID NO: 3156833 - RNA, 19 nt, Human
uauucuaaauuuuauaucu

SEQ ID NO: 3156834 - RNA, 20 nt, Human
uauucuaaauuuuauaucuu

SEQ ID NO: 3156835 - RNA, 19 nt, Human
uauucuagcuaauguaaua

SEQ ID NO: 3156836 - RNA, 15 nt, Human
auguguaaaauguga

SEQ ID NO: 3156837 - RNA, 16 nt, Human
augugaacagcggcug

SEQ ID NO: 3156838 - RNA, 17 nt, Human
augugaaaucauucauu

SEQ ID NO: 3156839 - RNA, 18 nt, Human
augugaaaucauucauuu

SEQ ID NO: 3156840 - RNA, 14 nt, Human
augugaaaucauuc

SEQ ID NO: 3156841 - RNA, 14 nt, Human
augugaaacauguu

SEQ ID NO: 3156842 - RNA, 13 nt, Human
augaugaaaauau

SEQ ID NO: 3156843 - RNA, 15 nt, Human
augaugaaaauauuu

SEQ ID NO: 3156844 - RNA, 19 nt, Human
augaugaaaauauuuaaag

SEQ ID NO: 3156845 - RNA, 16 nt, Human
augaugggucaguugu

SEQ ID NO: 3156846 - RNA, 23 nt, Human
augcacaaauucugucucuggau

SEQ ID NO: 3156847 - RNA, 15 nt, Human
augcacaaauucugu

SEQ ID NO: 3156848 - RNA, 22 nt, Human
augcacaaauucugucucugga

SEQ ID NO: 3156849 - RNA, 17 nt, Human
auggauaggcacaggaa

SEQ ID NO: 3156850 - RNA, 18 nt, Human
auggauaggcacaggaaa

SEQ ID NO: 3156851 - RNA, 13 nt, Human
augagggucuugg

SEQ ID NO: 3156852 - RNA, 12 nt, Human
augaaaauauuu

SEQ ID NO: 3156853 - RNA, 13 nt, Human
augaaaauauuua

SEQ ID NO: 3156854 - RNA, 14 nt, Human
augaaaauauuuaa

SEQ ID NO: 3156855 - RNA, 16 nt, Human
augaaaauauuuaaag

SEQ ID NO: 3156856 - RNA, 15 nt, Human
aucuaguaugaaauu

SEQ ID NO: 3156857 - RNA, 16 nt, Human
aucuaguaugaaauua

SEQ ID NO: 3156858 - RNA, 17 nt, Human
aucuaguaugaaauuau

SEQ ID NO: 3156859 - RNA, 18 nt, Human
aucuaguaugaaauuaua

SEQ ID NO: 3156860 - RNA, 19 nt, Human
aucuaguaugaaauuauau

SEQ ID NO: 3156861 - RNA, 14 nt, Human
aucuaguaugaaau

SEQ ID NO: 3156862 - RNA, 18 nt, Human
aucugggggccucuucug

SEQ ID NO: 3156863 - RNA, 22 nt, Human
aucucugcaggaaauggcugug

SEQ ID NO: 3156864 - RNA, 22 nt, Human
aucaaauauauucagccuggcu

SEQ ID NO: 3156865 - RNA, 21 nt, Human
auauuucccugaaggaaccaa

SEQ ID NO: 3156866 - RNA, 14 nt, Human
aucaaauauauuca

SEQ ID NO: 3156867 - RNA, 12 nt, Human
aucaugugaaau

SEQ ID NO: 3156868 - RNA, 19 nt, Human
auccucaguuuuugugaaa

SEQ ID NO: 3156869 - RNA, 20 nt, Human
auccagagucccugccugga

SEQ ID NO: 3156870 - RNA, 21 nt, Human
auccagagucccugccuggac

SEQ ID NO: 3156871 - RNA, 19 nt, Human
auccagagucccugccugg

SEQ ID NO: 3156872 - RNA, 13 nt, Human
auaauggucagag

SEQ ID NO: 3156873 - RNA, 17 nt, Human
auacccagaaaguuauu

SEQ ID NO: 3156874 - RNA, 14 nt, Human
auaacaaugaaagu

SEQ ID NO: 3156875 - RNA, 22 nt, Human
auaaaaagccugcaauuucaua

SEQ ID NO: 3156876 - RNA, 20 nt, Human
auaaaaagccugcaauuuca

SEQ ID NO: 3156877 - RNA, 18 nt, Human
aguuuggcaaacucucca

SEQ ID NO: 3156878 - RNA, 16 nt, Human
aguuuggcaaacucuc

SEQ ID NO: 3156879 - RNA, 19 nt, Human
auauuucccugaaggaacc

SEQ ID NO: 3156880 - RNA, 14 nt, Human
auauuauuuuaugu

SEQ ID NO: 3156881 - RNA, 15 nt, Human
auauuauuuuauguu

SEQ ID NO: 3156882 - RNA, 22 nt, Human
auauuauuuuauguugcauaga

SEQ ID NO: 3156883 - RNA, 17 nt, Human
auauuauguguuuccau

SEQ ID NO: 3156884 - RNA, 13 nt, Human
auauuauguguuu

SEQ ID NO: 3156885 - RNA, 17 nt, Human
auaugcagauuuugccc

SEQ ID NO: 3156886 - RNA, 13 nt, Human
auaucaguuugcu

SEQ ID NO: 3156887 - RNA, 12 nt, Human
agugucuggcug

SEQ ID NO: 3156888 - RNA, 13 nt, Human
agugucuggcugc

SEQ ID NO: 3156889 - RNA, 14 nt, Human
agugucuggcugca

SEQ ID NO: 3156890 - RNA, 18 nt, Human
agugcuaauuuugaaaaa

SEQ ID NO: 3156891 - RNA, 20 nt, Human
agugcuaauuuugaaaaacu

SEQ ID NO: 3156892 - RNA, 15 nt, Human
agugcuaauuuugaa

SEQ ID NO: 3156893 - RNA, 13 nt, Human
aguucagcuuggg

SEQ ID NO: 3156894 - RNA, 14 nt, Human
aguucagcuugggg

SEQ ID NO: 3156895 - RNA, 22 nt, Human
aguaaaugcuagguuaauucca

SEQ ID NO: 3156896 - RNA, 11 nt, Human
aguaaaugcua

SEQ ID NO: 3156897 - RNA, 23 nt, Human
aguaaaugcuagguuaauuccaa

SEQ ID NO: 3156898 - RNA, 19 nt, Human
aguaacaaugaagauaaaa

SEQ ID NO: 3156899 - RNA, 16 nt, Human
aguauuuuugacagaa

SEQ ID NO: 3156900 - RNA, 17 nt, Human
aguauuuuugacagaau

SEQ ID NO: 3156901 - RNA, 18 nt, Human
aguauuuuugacagaaua

SEQ ID NO: 3156902 - RNA, 13 nt, Human
aguauuuuugaca

SEQ ID NO: 3156903 - RNA, 23 nt, Human
agucugagagaggccauucuuuc

SEQ ID NO: 3156904 - RNA, 16 nt, Human
agucugagagaggcca

SEQ ID NO: 3156905 - RNA, 20 nt, Human
agugaauucuugaaggaaaa

SEQ ID NO: 3156906 - RNA, 12 nt, Human
aggggcaggagg

SEQ ID NO: 3156907 - RNA, 13 nt, Human
aggggcaggagga

SEQ ID NO: 3156908 - RNA, 18 nt, Human
aggggcaggaggaagggg

SEQ ID NO: 3156909 - RNA, 14 nt, Human
agggaugguguuca

SEQ ID NO: 3156910 - RNA, 16 nt, Human
agggaugguguucaaa

SEQ ID NO: 3156911 - RNA, 23 nt, Human
aggucccuaauaaagcugugugg

SEQ ID NO: 3156912 - RNA, 17 nt, Human
agggacugagaaauuua

SEQ ID NO: 3156913 - RNA, 16 nt, Human
aggaacugcugggcuu

SEQ ID NO: 3156914 - RNA, 16 nt, Human
aggaaccgaggcaggg

SEQ ID NO: 3156915 - RNA, 22 nt, Human
aggaacugcugggcuuggcagc

SEQ ID NO: 3156916 - RNA, 13 nt, Human
aggaaccaaagcg

SEQ ID NO: 3156917 - RNA, 15 nt, Human
aggaaccaaagcgaa

SEQ ID NO: 3156918 - RNA, 16 nt, Human
aggaaccauaaucaau

SEQ ID NO: 3156919 - RNA, 15 nt, Human
agcuuuuaugugaaa

SEQ ID NO: 3156920 - RNA, 18 nt, Human
agccuggcuucaaauugu

SEQ ID NO: 3156921 - RNA, 17 nt, Human
agccuggcuucaaauug

SEQ ID NO: 3156922 - RNA, 19 nt, Human
agcuaauucuuugaccugu

SEQ ID NO: 3156923 - RNA, 23 nt, Human
agcuaauguaauaacugugaagu

SEQ ID NO: 3156924 - RNA, 15 nt, Human
agcugcgggcugggu

SEQ ID NO: 3156925 - RNA, 16 nt, Human
agcuccuuaaggcucu

SEQ ID NO: 3156926 - RNA, 17 nt, Human
agcuccuuaaggcucuu

SEQ ID NO: 3156927 - RNA, 15 nt, Human
agccaagaggcugca

SEQ ID NO: 3156928 - RNA, 23 nt, Human
agcaaagcugaugacaacuuccc

SEQ ID NO: 3156929 - RNA, 21 nt, Human
agcaaagcugaugacaacuuc

SEQ ID NO: 3156930 - RNA, 14 nt, Human
agaugguucuagca

SEQ ID NO: 3156931 - RNA, 23 nt, Human
agaugaugaaaauauuuaaaggc

SEQ ID NO: 3156932 - RNA, 18 nt, Human
agaugaugaaaauauuua

SEQ ID NO: 3156933 - RNA, 20 nt, Human
agaaugaaauugcugaaaga

SEQ ID NO: 3156934 - RNA, 22 nt, Human
agacagccaacuauggccugug

SEQ ID NO: 3156935 - RNA, 23 nt, Human
agagaggccauucuuucccaaca

SEQ ID NO: 3156936 - RNA, 15 nt, Human
agagccugagaguga

SEQ ID NO: 3156937 - RNA, 10 nt, Human
agagggcugc

SEQ ID NO: 3156938 - RNA, 15 nt, Human
aaagccaagaggcug

SEQ ID NO: 3156939 - RNA, 20 nt, Human
aaauaaaaauauuguguugu

SEQ ID NO: 3156940 - RNA, 19 nt, Human
aaauaaaccucaaaauguc

SEQ ID NO: 3156941 - RNA, 22 nt, Human
aaaccucaaaaugucuaagaua

SEQ ID NO: 3156942 - RNA, 17 nt, Human
aaaccucaaaaugucua

SEQ ID NO: 3156943 - RNA, 16 nt, Human
aaagauaaauauuaua

SEQ ID NO: 3156944 - RNA, 14 nt, Human
aaagauaaauauua

SEQ ID NO: 3156945 - RNA, 15 nt, Human
aaagauaaauauuau

SEQ ID NO: 3156946 - RNA, 13 nt, Human
aaagauaaauauu

SEQ ID NO: 3156947 - RNA, 13 nt, Human
aaagaggugugca

SEQ ID NO: 3156948 - RNA, 20 nt, Human
aaaauuauuuuguucauaca

SEQ ID NO: 3156949 - RNA, 16 nt, Human
aaaauuauuuuguuca

SEQ ID NO: 3156950 - RNA, 18 nt, Human
aaaauuauuuuguucaua

SEQ ID NO: 3156951 - RNA, 22 nt, Human
aaaauuaacaugaauauuuagu

SEQ ID NO: 3156952 - RNA, 12 nt, Human
aaaauuaagaaa

SEQ ID NO: 3156953 - RNA, 13 nt, Human
aaaauuaagaaag

SEQ ID NO: 3156954 - RNA, 20 nt, Human
aaaauuaagaaaggauaaag

SEQ ID NO: 3156955 - RNA, 15 nt, Human
aaaauaaaaaacacu

SEQ ID NO: 3156956 - RNA, 21 nt, Human
aaaauccacuuuaucuugaau

SEQ ID NO: 3156957 - RNA, 20 nt, Human
aaaugcuagguuaauuccaa

SEQ ID NO: 3156958 - RNA, 17 nt, Human
aaaucugaccaaaacaa

SEQ ID NO: 3156959 - RNA, 18 nt, Human
aaauguuuuuuuuuaaag

SEQ ID NO: 3156960 - RNA, 21 nt, Human
aaauguuuuuuuuuaaagacu

SEQ ID NO: 3156961 - RNA, 22 nt, Human
aaauguuuuuuuuuaaagacuu

SEQ ID NO: 3156962 - RNA, 14 nt, Human
aaauugauguguuu

SEQ ID NO: 3156963 - RNA, 18 nt, Human
aaauugaugggauuuggu

SEQ ID NO: 3156964 - RNA, 17 nt, Human
aacacuaacaugauuug

SEQ ID NO: 3156965 - RNA, 13 nt, Human
aacugagcuugga

SEQ ID NO: 3156966 - RNA, 17 nt, Human
aacugagcuuggaagcu

SEQ ID NO: 3156967 - RNA, 21 nt, Human
aacugagcuuggaagcuucug

SEQ ID NO: 3156968 - RNA, 15 nt, Human
aacguauaaaagccu

SEQ ID NO: 3156969 - RNA, 20 nt, Human
aacagcggcuggacuuggag

SEQ ID NO: 3156970 - RNA, 15 nt, Human
aacaucccuccuggg

SEQ ID NO: 3156971 - RNA, 17 nt, Human
aauaaaccucaaaaugu

SEQ ID NO: 3156972 - RNA, 12 nt, Human
aauaaaauuuuu

SEQ ID NO: 3156973 - RNA, 14 nt, Human
aauaauaaauauuu

SEQ ID NO: 3156974 - RNA, 20 nt, Human
aauaaaccucaaaaugucua

SEQ ID NO: 3156975 - RNA, 11 nt, Human
aauaaagcugu

SEQ ID NO: 3156976 - RNA, 19 nt, Human
aauaaagcuguguggcagu

SEQ ID NO: 3156977 - RNA, 15 nt, Human
aauccaaugaaauga

SEQ ID NO: 3156978 - RNA, 12 nt, Human
aaggaauuuuau

SEQ ID NO: 3156979 - RNA, 13 nt, Human
aagggagggggag

SEQ ID NO: 3156980 - RNA, 15 nt, Human
aagggacugagaaau

SEQ ID NO: 3156981 - RNA, 17 nt, Human
aagggacugagaaauuu

SEQ ID NO: 3156982 - RNA, 13 nt, Human
aagauuuucagaa

SEQ ID NO: 3156983 - RNA, 23 nt, Human
aagacagugaaagaaaauaacaa

SEQ ID NO: 3156984 - RNA, 21 nt, Human
aagacauucuuccaaaaagau

SEQ ID NO: 3156985 - RNA, 15 nt, Human
aagacuuuuaugaua

SEQ ID NO: 3156986 - RNA, 18 nt, Human
aagagaagggcagggcug

SEQ ID NO: 3156987 - RNA, 15 nt, Human
acuuuauuuuguguu

SEQ ID NO: 3156988 - RNA, 14 nt, Human
acugauuacugccu

SEQ ID NO: 3156989 - RNA, 22 nt, Human
acuaggugcccagaaugaggcu

SEQ ID NO: 3156990 - RNA, 19 nt, Human
accggggccugggcaggag

SEQ ID NO: 3156991 - RNA, 12 nt, Human
acaaagaaauua

SEQ ID NO: 3156992 - RNA, 14 nt, Human
acaaagaaauuaug

SEQ ID NO: 3156993 - RNA, 16 nt, Human
acaaagaaauuaugug

SEQ ID NO: 3156994 - RNA, 18 nt, Human
aauuuucaucuaggauuu

SEQ ID NO: 3156995 - RNA, 11 nt, Human
aauugugaugu

SEQ ID NO: 3156996 - RNA, 15 nt, Human
aauugugaugugucc

SEQ ID NO: 3156997 - RNA, 14 nt, Human
aauugugauguguc

SEQ ID NO: 3156998 - RNA, 21 nt, Human
aauuggguggggggcuucaua

SEQ ID NO: 3156999 - RNA, 22 nt, Human
aauuggguggggggcuucauac

SEQ ID NO: 3157000 - RNA, 23 nt, Human
aauuggguggggggcuucauaca

SEQ ID NO: 3157001 - RNA, 20 nt, Human
acacugggagaaaugaaaaa

SEQ ID NO: 3157002 - RNA, 23 nt, Human
acagaggacaguauuugugggga

SEQ ID NO: 3157003 - RNA, 20 nt, Human
acacguaaugaaacuuggau

SEQ ID NO: 3157004 - RNA, 19 nt, Human
acauaauuaaauuuugagu

SEQ ID NO: 3157005 - RNA, 15 nt, Human
acauaaguaauucaa

SEQ ID NO: 3157006 - RNA, 16 nt, Human
acauuuccuaaauaua

SEQ ID NO: 3157007 - RNA, 17 nt, Human
acauuuccuaaauauau

SEQ ID NO: 3157008 - RNA, 14 nt, Human
accaucucuuuacc

SEQ ID NO: 3157009 - RNA, 14 nt, Human
cuuuuaugugaaac

SEQ ID NO: 3157010 - RNA, 15 nt, Human
cuuuuggcauuuuac

SEQ ID NO: 3157011 - RNA, 16 nt, Human
cuugacaaagucaagc

SEQ ID NO: 3157012 - RNA, 19 nt, Human
cuugacaaagucaagccac

SEQ ID NO: 3157013 - RNA, 12 nt, Human
cuugaugccugg

SEQ ID NO: 3157014 - RNA, 18 nt, Human
cuuauuggcagcucuacu

SEQ ID NO: 3157015 - RNA, 15 nt, Human
cuucacuguaaaaua

SEQ ID NO: 3157016 - RNA, 9 nt, Human
cuucauaca

SEQ ID NO: 3157017 - RNA, 10 nt, Human
cuucauacac

SEQ ID NO: 3157018 - RNA, 21 nt, Human
cuucaucugacuaugacauaa

SEQ ID NO: 3157019 - RNA, 19 nt, Human
cuucaucugacuaugacau

SEQ ID NO: 3157020 - RNA, 12 nt, Human
cuucauacaggg

SEQ ID NO: 3157021 - RNA, 13 nt, Human
cuucauacaggga

SEQ ID NO: 3157022 - RNA, 22 nt, Human
cuucauacagggaugguguuca

SEQ ID NO: 3157023 - RNA, 20 nt, Human
cuucaugcauagguuuagca

SEQ ID NO: 3157024 - RNA, 22 nt, Human
cugccaucauguuuacagagga

SEQ ID NO: 3157025 - RNA, 17 nt, Human
cugccaucauguuuaca

SEQ ID NO: 3157026 - RNA, 23 nt, Human
cugccaucauguuuacagaggac

SEQ ID NO: 3157027 - RNA, 17 nt, Human
cugcuuuuuauggccug

SEQ ID NO: 3157028 - RNA, 18 nt, Human
cugcuuuuuauggccugu

SEQ ID NO: 3157029 - RNA, 13 nt, Human
cuggacugugugc

SEQ ID NO: 3157030 - RNA, 22 nt, Human
cuggggaugucucucaugacca

SEQ ID NO: 3157031 - RNA, 17 nt, Human
cuggggaugucucucau

SEQ ID NO: 3157032 - RNA, 18 nt, Human
cuggggauugggccccug

SEQ ID NO: 3157033 - RNA, 22 nt, Human
cuggggauugggccccugccag

SEQ ID NO: 3157034 - RNA, 16 nt, Human
cuggggauugggcccc

SEQ ID NO: 3157035 - RNA, 18 nt, Human
cuggggccaggcuggguc

SEQ ID NO: 3157036 - RNA, 16 nt, Human
cuggcuccaggccagg

SEQ ID NO: 3157037 - RNA, 17 nt, Human
cuggagacuaaccccac

SEQ ID NO: 3157038 - RNA, 16 nt, Human
cuggacugugugcuca

SEQ ID NO: 3157039 - RNA, 21 nt, Human
cuguacuugcucuugaugccu

SEQ ID NO: 3157040 - RNA, 22 nt, Human
cuguacuugcucuugaugccug

SEQ ID NO: 3157041 - RNA, 23 nt, Human
cuguacuugcucuugaugccugg

SEQ ID NO: 3157042 - RNA, 18 nt, Human
gauuacugccuauuuuaa

SEQ ID NO: 3157043 - RNA, 12 nt, Human
gaucccaacacu

SEQ ID NO: 3157044 - RNA, 16 nt, Human
gaucccaacacugcca

SEQ ID NO: 3157045 - RNA, 23 nt, Human
gaucucagugguuaagauuccua

SEQ ID NO: 3157046 - RNA, 13 nt, Human
gaguuggcuggga

SEQ ID NO: 3157047 - RNA, 19 nt, Human
gaguggacuguucccugag

SEQ ID NO: 3157048 - RNA, 16 nt, Human
gaguuuaaauuguaau

SEQ ID NO: 3157049 - RNA, 14 nt, Human
gaguuuaggguggg

SEQ ID NO: 3157050 - RNA, 15 nt, Human
gaguuuagggugggg

SEQ ID NO: 3157051 - RNA, 13 nt, Human
gaguccaucagcc

SEQ ID NO: 3157052 - RNA, 14 nt, Human
gaguccaucagccu

SEQ ID NO: 3157053 - RNA, 15 nt, Human
gaguccaucagccuc

SEQ ID NO: 3157054 - RNA, 16 nt, Human
gaguccaucagccucc

SEQ ID NO: 3157055 - RNA, 18 nt, Human
gagugaggaugucugggc

SEQ ID NO: 3157056 - RNA, 16 nt, Human
gauacuugaaaauuaa

SEQ ID NO: 3157057 - RNA, 13 nt, Human
gauucugagagcu

SEQ ID NO: 3157058 - RNA, 20 nt, Human
gcaauaaccucaaagugacu

SEQ ID NO: 3157059 - RNA, 20 nt, Human
gcaccggggccugggcagga

SEQ ID NO: 3157060 - RNA, 19 nt, Human
gcaccggggccugggcagg

SEQ ID NO: 3157061 - RNA, 15 nt, Human
gcagaaaucuagaag

SEQ ID NO: 3157062 - RNA, 14 nt, Human
gcagaaaucuagaa

SEQ ID NO: 3157063 - RNA, 21 nt, Human
gcagagcagugggccuggcca

SEQ ID NO: 3157064 - RNA, 17 nt, Human
gcacugacagauuucca

SEQ ID NO: 3157065 - RNA, 12 nt, Human
gcacugacagau

SEQ ID NO: 3157066 - RNA, 22 nt, Human
gcauaacguauaaaagccuguu

SEQ ID NO: 3157067 - RNA, 21 nt, Human
gcaguuugccuggugcagugg

SEQ ID NO: 3157068 - RNA, 19 nt, Human
gagcuggggaugucucuca

SEQ ID NO: 3157069 - RNA, 14 nt, Human
gagauguagccccu

SEQ ID NO: 3157070 - RNA, 20 nt, Human
gagaugaugaaaauauuuaa

SEQ ID NO: 3157071 - RNA, 19 nt, Human
gagaugaugaaaauauuua

SEQ ID NO: 3157072 - RNA, 22 nt, Human
gagacguuuuuggaagaguagu

SEQ ID NO: 3157073 - RNA, 23 nt, Human
gagacuaaccccaccacacccuc

SEQ ID NO: 3157074 - RNA, 18 nt, Human
gacuuuugaaaagaggug

SEQ ID NO: 3157075 - RNA, 13 nt, Human
gacuaugacauaa

SEQ ID NO: 3157076 - RNA, 14 nt, Human
gacuauucaguuuu

SEQ ID NO: 3157077 - RNA, 16 nt, Human
gacagaauauguuuca

SEQ ID NO: 3157078 - RNA, 15 nt, Human
gacaguauuuguggg

SEQ ID NO: 3157079 - RNA, 16 nt, Human
gacagguuagcugcuc

SEQ ID NO: 3157080 - RNA, 20 nt, Human
gaauuugugaagguggaaau

SEQ ID NO: 3157081 - RNA, 12 nt, Human
gaauuuuaaaag

SEQ ID NO: 3157082 - RNA, 15 nt, Human
gaauuuuaaaagaug

SEQ ID NO: 3157083 - RNA, 21 nt, Human
gaauuuuaaaagaugcaaugu

SEQ ID NO: 3157084 - RNA, 23 nt, Human
gaauuuuaaaagaugcaauguag

SEQ ID NO: 3157085 - RNA, 18 nt, Human
gaagugugggucugugug

SEQ ID NO: 3157086 - RNA, 17 nt, Human
gaagugugggucugugu

SEQ ID NO: 3157087 - RNA, 19 nt, Human
gaagugugggucugugugu

SEQ ID NO: 3157088 - RNA, 19 nt, Human
gaagggcagggcugaggcc

SEQ ID NO: 3157089 - RNA, 15 nt, Human
gaaggcuauggggau

SEQ ID NO: 3157090 - RNA, 17 nt, Human
ggcccugugccuuggug

SEQ ID NO: 3157091 - RNA, 15 nt, Human
ggcacuggggcaggg

SEQ ID NO: 3157092 - RNA, 15 nt, Human
ggcauauuuuucaca

SEQ ID NO: 3157093 - RNA, 17 nt, Human
ggcauauuuuucacaua

SEQ ID NO: 3157094 - RNA, 22 nt, Human
ggcauccagagucccugccugg

SEQ ID NO: 3157095 - RNA, 18 nt, Human
ggcauuuuacuguacaga

SEQ ID NO: 3157096 - RNA, 19 nt, Human
ggccaguggcuggaucugu

SEQ ID NO: 3157097 - RNA, 20 nt, Human
ggccuguggaucaaauccag

SEQ ID NO: 3157098 - RNA, 22 nt, Human
ggcgaagcguuguccucagccc

SEQ ID NO: 3157099 - RNA, 16 nt, Human
ggccuugaguccccca

SEQ ID NO: 3157100 - RNA, 21 nt, Human
ggagguagcuuugagguggaa

SEQ ID NO: 3157101 - RNA, 22 nt, Human
ggagcccacuguacuugcucuu

SEQ ID NO: 3157102 - RNA, 13 nt, Human
ggcacagccuggc

SEQ ID NO: 3157103 - RNA, 12 nt, Human
ggcacagccugg

SEQ ID NO: 3157104 - RNA, 23 nt, Human
aaaguuauugauaaguucauaca

SEQ ID NO: 3157105 - RNA, 16 nt, Human
aaaguuuguugaaaca

SEQ ID NO: 3157106 - RNA, 17 nt, Human
guaaauuuaugugaugg

SEQ ID NO: 3157107 - RNA, 16 nt, Human
guaaauuuaugugaug

SEQ ID NO: 3157108 - RNA, 17 nt, Human
guaacaaugaagauaaa

SEQ ID NO: 3157109 - RNA, 16 nt, Human
guaaagacuguagaag

SEQ ID NO: 3157110 - RNA, 22 nt, Human
guaaaaugugaagugaaugaaa

SEQ ID NO: 3157111 - RNA, 20 nt, Human
guaaaaugugaagugaauga

SEQ ID NO: 3157112 - RNA, 19 nt, Human
guaaaaugugaagugaaug

SEQ ID NO: 3157113 - RNA, 12 nt, Human
guaaaaugugaa

SEQ ID NO: 3157114 - RNA, 17 nt, Human
gguggggggggugcugg

SEQ ID NO: 3157115 - RNA, 21 nt, Human
gguggggagagacgggcccug

SEQ ID NO: 3157116 - RNA, 16 nt, Human
aaagccuguuuaagag

SEQ ID NO: 3157117 - RNA, 18 nt, Human
aaagccuguuuaagagac

SEQ ID NO: 3157118 - RNA, 19 nt, Human
aaagcaggcagaacucauc

SEQ ID NO: 3157119 - RNA, 17 nt, Human
aaagcaggcagaacuca

SEQ ID NO: 3157120 - RNA, 21 nt, Human
ggugcuucuaguucugccagg

SEQ ID NO: 3157121 - RNA, 21 nt, Human
ggucuguguguguguaugugg

SEQ ID NO: 3157122 - RNA, 20 nt, Human
ggucuguguguguguaugug

SEQ ID NO: 3157123 - RNA, 20 nt, Human
ggugcugggccccugccucu

SEQ ID NO: 3157124 - RNA, 19 nt, Human
ggugcugggccccugccuc

SEQ ID NO: 3157125 - RNA, 13 nt, Human
aaagauuuucaga

SEQ ID NO: 3157126 - RNA, 20 nt, Human
ggucgcccuggacugugugc

SEQ ID NO: 3157127 - RNA, 17 nt, Human
ggucuguguguguguau

SEQ ID NO: 3157128 - RNA, 11 nt, Human
ggucugugugu

SEQ ID NO: 3157129 - RNA, 17 nt, Human
gguagcuuugaggugga

SEQ ID NO: 3157130 - RNA, 23 nt, Human
ggguguccugcaccggggccugg

SEQ ID NO: 3157131 - RNA, 15 nt, Human
ggguggggggggugc

SEQ ID NO: 3157132 - RNA, 18 nt, Human
ggguggggggggugcugg

SEQ ID NO: 3157133 - RNA, 13 nt, Human
gggccaggcuggg

SEQ ID NO: 3157134 - RNA, 21 nt, Human
gggccaggcugggucgcccug

SEQ ID NO: 3157135 - RNA, 14 nt, Human
gggccaggcugggu

SEQ ID NO: 3157136 - RNA, 15 nt, Human
gggccaggcuggguc

SEQ ID NO: 3157137 - RNA, 21 nt, Human
gggccagucccugaggcaggu

SEQ ID NO: 3157138 - RNA, 18 nt, Human
gggccagucccugaggca

SEQ ID NO: 3157139 - RNA, 22 nt, Human
gggcccuggugguggcucggga

SEQ ID NO: 3157140 - RNA, 17 nt, Human
aaacaccggguuccagc

SEQ ID NO: 3157141 - RNA, 20 nt, Human
aaacaagcacuaaacaaaga

SEQ ID NO: 3157142 - RNA, 12 nt, Human
aaaaugugaagu

SEQ ID NO: 3157143 - RNA, 18 nt, Human
gggcucagagugggguag

SEQ ID NO: 3157144 - RNA, 15 nt, Human
aaaacccagauaaag

SEQ ID NO: 3157145 - RNA, 15 nt, Human
aaaaauauauuuaau

SEQ ID NO: 3157146 - RNA, 13 nt, Human
aaaaauauauuua

SEQ ID NO: 3157147 - RNA, 19 nt, Human
aaaaauauauuuaaugaua

SEQ ID NO: 3157148 - RNA, 15 nt, Human
gggauugggccccug

SEQ ID NO: 3157149 - RNA, 14 nt, Human
aaaagggaggggga

SEQ ID NO: 3157150 - RNA, 19 nt, Human
aaaagggacugagaaauuu

SEQ ID NO: 3157151 - RNA, 19 nt, Human
gggagaaugucaguaugug

SEQ ID NO: 3157152 - RNA, 22 nt, Human
gggagaaugucaguauguggaa

SEQ ID NO: 3157153 - RNA, 15 nt, Human
aaaagaugcaaugua

SEQ ID NO: 3157154 - RNA, 14 nt, Human
gggaugucucucau

SEQ ID NO: 3157155 - RNA, 16 nt, Human
gggaugguguucaaaa

SEQ ID NO: 3157156 - RNA, 22 nt, Human
gggaggcucuggagcccacugu

SEQ ID NO: 3157157 - RNA, 15 nt, Human
ggaacugcugggcuu

SEQ ID NO: 3157158 - RNA, 14 nt, Human
ggaacugcugggcu

SEQ ID NO: 3157159 - RNA, 15 nt, Human
gcuuuuuuaucaugu

SEQ ID NO: 3157160 - RNA, 18 nt, Human
gcuuuuuuaucaugugaa

SEQ ID NO: 3157161 - RNA, 20 nt, Human
gcuuuuuuaucaugugaaau

SEQ ID NO: 3157162 - RNA, 19 nt, Human
gcuugaaacccguggcgcu

SEQ ID NO: 3157163 - RNA, 19 nt, Human
gcuuuccucaucaggccau

SEQ ID NO: 3157164 - RNA, 19 nt, Human
gcuuugagguggaagaggg

SEQ ID NO: 3157165 - RNA, 22 nt, Human
gcuuugagguggaagagggcug

SEQ ID NO: 3157166 - RNA, 16 nt, Human
gcuucaaauuguaagc

SEQ ID NO: 3157167 - RNA, 20 nt, Human
gcuguagacauuugcuauga

SEQ ID NO: 3157168 - RNA, 13 nt, Human
gcuggaucuguga

SEQ ID NO: 3157169 - RNA, 21 nt, Human
gcugcagagcagugggccugg

SEQ ID NO: 3157170 - RNA, 20 nt, Human
gcugcagagcagugggccug

SEQ ID NO: 3157171 - RNA, 13 nt, Human
gcugcuccccacg

SEQ ID NO: 3157172 - RNA, 22 nt, Human
gcugcuccccacgucagcuggg

SEQ ID NO: 3157173 - RNA, 15 nt, Human
gcucuggagcccacu

SEQ ID NO: 3157174 - RNA, 16 nt, Human
gcucuggagcccacug

SEQ ID NO: 3157175 - RNA, 17 nt, Human
gcucugugcccacccuc

SEQ ID NO: 3157176 - RNA, 14 nt, Human
gcugaggccucuca

SEQ ID NO: 3157177 - RNA, 18 nt, Human
gcuccucgagaucccaac

SEQ ID NO: 3157178 - RNA, 15 nt, Human
gccccugccucucug

SEQ ID NO: 3157179 - RNA, 16 nt, Human
gccccugccucucugc

SEQ ID NO: 3157180 - RNA, 17 nt, Human
gccccugccucucugca

SEQ ID NO: 3157181 - RNA, 18 nt, Human
gccccugccucucugcag

SEQ ID NO: 3157182 - RNA, 11 nt, Human
gcccuaucugu

SEQ ID NO: 3157183 - RNA, 14 nt, Human
gccaggauggaaug

SEQ ID NO: 3157184 - RNA, 23 nt, Human
gccaguggcuggaucugugaggg

SEQ ID NO: 3157185 - RNA, 14 nt, Human
gccaguggcuggau

SEQ ID NO: 3157186 - RNA, 17 nt, Human
gcggcugggaggagggc

SEQ ID NO: 3157187 - RNA, 18 nt, Human
gcggcugggaggagggca

SEQ ID NO: 3157188 - RNA, 19 nt, Human
gcggcugggaggagggcag

SEQ ID NO: 3157189 - RNA, 22 nt, Human
gcggcugggaggagggcaggca

SEQ ID NO: 3157190 - RNA, 13 nt, Human
gcggcugggagga

SEQ ID NO: 3157191 - RNA, 14 nt, Human
gcggcugggaggag

SEQ ID NO: 3157192 - RNA, 18 nt, Human
gcuacuguaaggcaauca

SEQ ID NO: 3157193 - RNA, 19 nt, Human
gcuacuguaaggcaaucau

SEQ ID NO: 3157194 - RNA, 18 nt, Human
gcuaauuuugaaaaacug

SEQ ID NO: 3157195 - RNA, 19 nt, Human
ccaaaaagauuuucagaaa

SEQ ID NO: 3157196 - RNA, 12 nt, Human
ccaaaacaaaca

SEQ ID NO: 3157197 - RNA, 18 nt, Human
ccaaaacaaacaaacaga

SEQ ID NO: 3157198 - RNA, 22 nt, Human
ccaaaaaauucuacaacacaca

SEQ ID NO: 3157199 - RNA, 20 nt, Human
ccaaaaaauucuacaacaca

SEQ ID NO: 3157200 - RNA, 22 nt, Human
cauuggcucuugaacugagcuu

SEQ ID NO: 3157201 - RNA, 20 nt, Human
cauuggauucugagagcugu

SEQ ID NO: 3157202 - RNA, 22 nt, Human
ccaaaugagggucuugguucca

SEQ ID NO: 3157203 - RNA, 19 nt, Human
ccaaugugaacagcggcug

SEQ ID NO: 3157204 - RNA, 11 nt, Human
ccaccagaagc

SEQ ID NO: 3157205 - RNA, 12 nt, Human
ccaccagaagcc

SEQ ID NO: 3157206 - RNA, 13 nt, Human
ccaccagaagccc

SEQ ID NO: 3157207 - RNA, 14 nt, Human
ccaccagaagccca

SEQ ID NO: 3157208 - RNA, 15 nt, Human
ccaccagaagcccag

SEQ ID NO: 3157209 - RNA, 16 nt, Human
ccaccagaagcccaga

SEQ ID NO: 3157210 - RNA, 18 nt, Human
ccaccagaagcccagaau

SEQ ID NO: 3157211 - RNA, 17 nt, Human
caguuuggcaaacucuc

SEQ ID NO: 3157212 - RNA, 14 nt, Human
caugaauuugugaa

SEQ ID NO: 3157213 - RNA, 15 nt, Human
caguauuugugggga

SEQ ID NO: 3157214 - RNA, 16 nt, Human
cagagcugcgggcugg

SEQ ID NO: 3157215 - RNA, 23 nt, Human
cagaucauuaucagccugugcca

SEQ ID NO: 3157216 - RNA, 22 nt, Human
cagaucauugugaaauuauuca

SEQ ID NO: 3157217 - RNA, 16 nt, Human
cagaucauugugaaau

SEQ ID NO: 3157218 - RNA, 24 nt, Human
cagccucuccacucaugugacucu

SEQ ID NO: 3157219 - RNA, 11 nt, Human
cagccugccac

SEQ ID NO: 3157220 - RNA, 12 nt, Human
cagccugccacu

SEQ ID NO: 3157221 - RNA, 16 nt, Human
cagccugccacucagg

SEQ ID NO: 3157222 - RNA, 17 nt, Human
cagccugccacucaggc

SEQ ID NO: 3157223 - RNA, 17 nt, Human
cagcggcuggaauuggg

SEQ ID NO: 3157224 - RNA, 16 nt, Human
cagcggcuggacuugg

SEQ ID NO: 3157225 - RNA, 18 nt, Human
cagcggcuggacuuggag

SEQ ID NO: 3157226 - RNA, 24 nt, Human
cagccccgcguggaacucgugucu

SEQ ID NO: 3157227 - RNA, 21 nt, Human
caaagucucuggaauuugaaa

SEQ ID NO: 3157228 - RNA, 22 nt, Human
caaagguaaaucagacuaugaa

SEQ ID NO: 3157229 - RNA, 17 nt, Human
caacaaucccaaggccc

SEQ ID NO: 3157230 - RNA, 14 nt, Human
caacacuaacauga

SEQ ID NO: 3157231 - RNA, 14 nt, Human
caaacaggcucaga

SEQ ID NO: 3157232 - RNA, 15 nt, Human
caaacaggcucagag

SEQ ID NO: 3157233 - RNA, 19 nt, Human
auuuuauagcuacuaauuu

SEQ ID NO: 3157234 - RNA, 17 nt, Human
auuuuauagcuacuaau

SEQ ID NO: 3157235 - RNA, 22 nt, Human
auuuguggggagggauuugggg

SEQ ID NO: 3157236 - RNA, 20 nt, Human
auuugcuaugagcuggggau

SEQ ID NO: 3157237 - RNA, 16 nt, Human
auuugcuaugagcugg

SEQ ID NO: 3157238 - RNA, 21 nt, Human
auucauaauuauuauuuggcc

SEQ ID NO: 3157239 - RNA, 23 nt, Human
auuguaauaggcguaacuaauuu

SEQ ID NO: 3157240 - RNA, 13 nt, Human
auucuuucccaac

SEQ ID NO: 3157241 - RNA, 16 nt, Human
auucuuucccaacacc

SEQ ID NO: 3157242 - RNA, 19 nt, Human
auucuuucccaacaccucu

SEQ ID NO: 3157243 - RNA, 18 nt, Human
auucuugaaggaaaauga

SEQ ID NO: 3157244 - RNA, 15 nt, Human
auucuugaaggaaaa

SEQ ID NO: 3157245 - RNA, 22 nt, Human
auugauaaguucauacauugua

SEQ ID NO: 3157246 - RNA, 21 nt, Human
auugauaaguucauacauugu

SEQ ID NO: 3157247 - RNA, 15 nt, Human
caauucuugccaaau

SEQ ID NO: 3157248 - RNA, 21 nt, Human
cacucuuggagccugcagagc

SEQ ID NO: 3157249 - RNA, 22 nt, Human
cacucuuggagccugcagagcu

SEQ ID NO: 3157250 - RNA, 23 nt, Human
cacucuuggagccugcagagcug

SEQ ID NO: 3157251 - RNA, 19 nt, Human
cacuggggcaggggccggg

SEQ ID NO: 3157252 - RNA, 18 nt, Human
cacugggagaaaugaaaa

SEQ ID NO: 3157253 - RNA, 18 nt, Human
cacugccagcauuucccu

SEQ ID NO: 3157254 - RNA, 22 nt, Human
cacugccagcauuucccuuccu

SEQ ID NO: 3157255 - RNA, 15 nt, Human
ccuauuuuaauaaac

SEQ ID NO: 3157256 - RNA, 13 nt, Human
ccuaauaaagcug

SEQ ID NO: 3157257 - RNA, 14 nt, Human
ccuaauaaagcugu

SEQ ID NO: 3157258 - RNA, 23 nt, Human
ccuaauaaagcuguguggcaguc

SEQ ID NO: 3157259 - RNA, 16 nt, Human
ccguagguuauuuuca

SEQ ID NO: 3157260 - RNA, 20 nt, Human
cccugugccuugucacgcca

SEQ ID NO: 3157261 - RNA, 22 nt, Human
cccugugccuugucacgccaga

SEQ ID NO: 3157262 - RNA, 15 nt, Human
cccugugccuuguca

SEQ ID NO: 3157263 - RNA, 24 nt, Human
cccugugccuuggugugcuguauc

SEQ ID NO: 3157264 - RNA, 13 nt, Human
cccuggcuccagg

SEQ ID NO: 3157265 - RNA, 16 nt, Human
cccuggcuccaggcca

SEQ ID NO: 3157266 - RNA, 23 nt, Human
ccucucugcaggucccuaauaaa

SEQ ID NO: 3157267 - RNA, 21 nt, Human
ccucucugcaggucccuaaua

SEQ ID NO: 3157268 - RNA, 22 nt, Human
ccucucugcaggucccuaauaa

SEQ ID NO: 3157269 - RNA, 13 nt, Human
ccucucugcaggu

SEQ ID NO: 3157270 - RNA, 20 nt, Human
ccucucugcaggucccuaau

SEQ ID NO: 3157271 - RNA, 14 nt, Human
ccugacucucagca

SEQ ID NO: 3157272 - RNA, 22 nt, Human
ccugacccucaucuuucuucca

SEQ ID NO: 3157273 - RNA, 22 nt, Human
ccugaguaaaaaagcugugugc

SEQ ID NO: 3157274 - RNA, 15 nt, Human
ccaguucagcuuggg

SEQ ID NO: 3157275 - RNA, 17 nt, Human
ccagagucccugccugg

SEQ ID NO: 3157276 - RNA, 18 nt, Human
ccagagucccugccugga

SEQ ID NO: 3157277 - RNA, 19 nt, Human
ccagagucccugccuggac

SEQ ID NO: 3157278 - RNA, 22 nt, Human
ccagagucccugccuggaccag

SEQ ID NO: 3157279 - RNA, 16 nt, Human
ccagagucccugccug

SEQ ID NO: 3157280 - RNA, 23 nt, Human
cccgggaggcagagguugcagug

SEQ ID NO: 3157281 - RNA, 14 nt, Human
cccgggagcucagg

SEQ ID NO: 3157282 - RNA, 21 nt, Human
ccccagacuccaccaagccug

SEQ ID NO: 3157283 - RNA, 20 nt, Human
ccccagacuccaccaagccu

SEQ ID NO: 3157284 - RNA, 14 nt, Human
ccccgacuuuuguu

SEQ ID NO: 3157285 - RNA, 23 nt, Human
cggcuccucgagaucccaacacu

SEQ ID NO: 3157286 - RNA, 18 nt, Human
cuagccaccgccuccuac

SEQ ID NO: 3157287 - RNA, 22 nt, Human
cuacauaaguaauucaagaaaa

SEQ ID NO: 3157288 - RNA, 23 nt, Human
cuacauaaguaauucaagaaaac

SEQ ID NO: 3157289 - RNA, 19 nt, Human
cuaaccugccgagagucca

SEQ ID NO: 3157290 - RNA, 21 nt, Human
cuaaccugccgagaguccauc

SEQ ID NO: 3157291 - RNA, 12 nt, Human
cuaaccugccga

SEQ ID NO: 3157292 - RNA, 14 nt, Human
cgugucuggcacag

SEQ ID NO: 3157293 - RNA, 13 nt, Human
cgugucuggcaca

SEQ ID NO: 3157294 - RNA, 21 nt, Human
cgugucuggcacagccuggcu

SEQ ID NO: 3157295 - RNA, 14 nt, Human
cucuuggagccugc

SEQ ID NO: 3157296 - RNA, 16 nt, Human
cucaggcccaaagccu

SEQ ID NO: 3157297 - RNA, 16 nt, Human
cuccaaagucucugga

SEQ ID NO: 3157298 - RNA, 16 nt, Human
cucaucuuucuuccaa

SEQ ID NO: 3157299 - RNA, 14 nt, Human
cucccuccucugcc

SEQ ID NO: 3157300 - RNA, 13 nt, Human
cucccuccucugc

SEQ ID NO: 3157301 - RNA, 12 nt, Human
uaguaaucauau

SEQ ID NO: 3157302 - RNA, 19 nt, Human
uagccaccgccuccuacag

SEQ ID NO: 3157303 - RNA, 18 nt, Human
uagccacccaccacacug

SEQ ID NO: 3157304 - RNA, 18 nt, Human
uagccaccgccuccuaca

SEQ ID NO: 3157305 - RNA, 14 nt, Human
uagcacugacagau

SEQ ID NO: 3157306 - RNA, 19 nt, Human
uagcacugacagauuucca

SEQ ID NO: 3157307 - RNA, 24 nt, Human
uagaggggaaaagagaugaugaaa

SEQ ID NO: 3157308 - RNA, 18 nt, Human
acaaaaggauaaugaaua

SEQ ID NO: 3157309 - RNA, 19 nt, Human
acaaaaauucucaguucuc

SEQ ID NO: 3157310 - RNA, 12 nt, Human
aauuuuacauuu

SEQ ID NO: 3157311 - RNA, 14 nt, Human
uagaagaagugugu

SEQ ID NO: 3157312 - RNA, 16 nt, Human
aauuccacacccucac

SEQ ID NO: 3157313 - RNA, 17 nt, Human
aauuccaauuauaugag

SEQ ID NO: 3157314 - RNA, 21 nt, Human
uagacauuugcuaugagcugg

SEQ ID NO: 3157315 - RNA, 16 nt, Human
aauuuggauugcuaau

SEQ ID NO: 3157316 - RNA, 23 nt, Human
uaugaagcuuuuaugugaaacau

SEQ ID NO: 3157317 - RNA, 20 nt, Human
uaugaagcuuuuaugugaaa

SEQ ID NO: 3157318 - RNA, 22 nt, Human
uaugaagcuuuuaugugaaaca

SEQ ID NO: 3157319 - RNA, 21 nt, Human
uaugguaggaacugcugggcu

SEQ ID NO: 3157320 - RNA, 18 nt, Human
acagcggcuggacuugga

SEQ ID NO: 3157321 - RNA, 20 nt, Human
uaugccaccugaauaaagaa

SEQ ID NO: 3157322 - RNA, 17 nt, Human
uaugauacuugaaaauu

SEQ ID NO: 3157323 - RNA, 19 nt, Human
uauaagugauugcugguuu

SEQ ID NO: 3157324 - RNA, 15 nt, Human
uauacaggucauauu

SEQ ID NO: 3157325 - RNA, 16 nt, Human
uauacaggucauauua

SEQ ID NO: 3157326 - RNA, 21 nt, Human
uauacaggucauauuaauaua

SEQ ID NO: 3157327 - RNA, 16 nt, Human
acacucaguuguucaa

SEQ ID NO: 3157328 - RNA, 20 nt, Human
uauauccuuucuaacaaaaa

SEQ ID NO: 3157329 - RNA, 17 nt, Human
uauauccuuucuaacaa

SEQ ID NO: 3157330 - RNA, 11 nt, Human
uauauauuucc

SEQ ID NO: 3157331 - RNA, 18 nt, Human
uaucaaagggugaaaauu

SEQ ID NO: 3157332 - RNA, 19 nt, Human
uaucaaagggugaaaauua

SEQ ID NO: 3157333 - RNA, 22 nt, Human
uaucaaagggugaaaauuauuu

SEQ ID NO: 3157334 - RNA, 14 nt, Human
uaucagcacgugug

SEQ ID NO: 3157335 - RNA, 17 nt, Human
uaacaaugaagauaaaa

SEQ ID NO: 3157336 - RNA, 22 nt, Human
aauagagcaaaauugauguguu

SEQ ID NO: 3157337 - RNA, 20 nt, Human
aauagagcaaaauugaugug

SEQ ID NO: 3157338 - RNA, 13 nt, Human
uaacguauaaaag

SEQ ID NO: 3157339 - RNA, 17 nt, Human
uaacguauaaaagccug

SEQ ID NO: 3157340 - RNA, 14 nt, Human
aauauauuuaauga

SEQ ID NO: 3157341 - RNA, 21 nt, Human
aauauauuuuaagacgaaaca

SEQ ID NO: 3157342 - RNA, 21 nt, Human
aauauauucagccuggcuuca

SEQ ID NO: 3157343 - RNA, 14 nt, Human
uaacaugaauauuu

SEQ ID NO: 3157344 - RNA, 20 nt, Human
uaacaugaauauuuaguguu

SEQ ID NO: 3157345 - RNA, 21 nt, Human
uaacaugaauauuuaguguuc

SEQ ID NO: 3157346 - RNA, 19 nt, Human
uaacaugaauauuuagugu

SEQ ID NO: 3157347 - RNA, 18 nt, Human
aauauauuuuaagacgaa

SEQ ID NO: 3157348 - RNA, 20 nt, Human
aauccucaguuuuugugaaa

SEQ ID NO: 3157349 - RNA, 22 nt, Human
aaucagugugucuaaauuugaa

SEQ ID NO: 3157350 - RNA, 18 nt, Human
aaucagugugucuaaauu

SEQ ID NO: 3157351 - RNA, 17 nt, Human
aaucagugugucuaaau

SEQ ID NO: 3157352 - RNA, 14 nt, Human
aaucagugugucua

SEQ ID NO: 3157353 - RNA, 15 nt, Human
aaucuaugauuccag

SEQ ID NO: 3157354 - RNA, 18 nt, Human
aaucuaugauuccaggug

SEQ ID NO: 3157355 - RNA, 17 nt, Human
uaaguguguguuuuuca

SEQ ID NO: 3157356 - RNA, 16 nt, Human
uaaguaauucaagaaa

SEQ ID NO: 3157357 - RNA, 22 nt, Human
uaagcagauggaaugcuguguu

SEQ ID NO: 3157358 - RNA, 22 nt, Human
uaaggaauuuuauuuuuuucug

SEQ ID NO: 3157359 - RNA, 13 nt, Human
uacagaauuuuau

SEQ ID NO: 3157360 - RNA, 12 nt, Human
aaugagaaaucu

SEQ ID NO: 3157361 - RNA, 22 nt, Human
aaugagaaaucuaaaaaacgaa

SEQ ID NO: 3157362 - RNA, 16 nt, Human
uaauuuauacagguca

SEQ ID NO: 3157363 - RNA, 22 nt, Human
uaauuccguagguuauuuucag

SEQ ID NO: 3157364 - RNA, 20 nt, Human
uaauuuaaaauugugaugug

SEQ ID NO: 3157365 - RNA, 19 nt, Human
uaauuuaaaauugugaugu

SEQ ID NO: 3157366 - RNA, 17 nt, Human
uacagggaugguguuca

SEQ ID NO: 3157367 - RNA, 19 nt, Human
uaccagagaaaaagggagg

SEQ ID NO: 3157368 - RNA, 13 nt, Human
uacauuuccuaaa

SEQ ID NO: 3157369 - RNA, 20 nt, Human
aauucaagaaaacaacuuca

SEQ ID NO: 3157370 - RNA, 12 nt, Human
aauucaagaaaa

SEQ ID NO: 3157371 - RNA, 15 nt, Human
aauuauuuuaaaaga

SEQ ID NO: 3157372 - RNA, 12 nt, Human
aauuauuuuaaa

SEQ ID NO: 3157373 - RNA, 21 nt, Human
aauucagaaggaucuucaucu

SEQ ID NO: 3157374 - RNA, 15 nt, Human
aauucagaaggaucu

SEQ ID NO: 3157375 - RNA, 22 nt, Human
aauuaugugccagauuuaugca

SEQ ID NO: 3157376 - RNA, 15 nt, Human
uacccccugugccuu

SEQ ID NO: 3157377 - RNA, 13 nt, Human
uaccucuuggcug

SEQ ID NO: 3157378 - RNA, 23 nt, Human
uaccugaagcuaucguaaaauua

SEQ ID NO: 3157379 - RNA, 22 nt, Human
aagucuuauauauuguagauaa

SEQ ID NO: 3157380 - RNA, 16 nt, Human
aagucuuucacauuua

SEQ ID NO: 3157381 - RNA, 15 nt, Human
guuuuucauaaagca

SEQ ID NO: 3157382 - RNA, 12 nt, Human
uaaaagaauugu

SEQ ID NO: 3157383 - RNA, 18 nt, Human
uaaaaauaaaaaacacug

SEQ ID NO: 3157384 - RNA, 19 nt, Human
uaaaaauaaaaaacacugg

SEQ ID NO: 3157385 - RNA, 22 nt, Human
uaaaaauauuguguugugaaug

SEQ ID NO: 3157386 - RNA, 21 nt, Human
uaaaaauaaaaaacacuggga

SEQ ID NO: 3157387 - RNA, 20 nt, Human
uaaaagacagugaaagaaaa

SEQ ID NO: 3157388 - RNA, 22 nt, Human
aaggaaccaaagcgaauuuuaa

SEQ ID NO: 3157389 - RNA, 23 nt, Human
aaggaaccaaagcgaauuuuaaa

SEQ ID NO: 3157390 - RNA, 13 nt, Human
aaggauaaugaau

SEQ ID NO: 3157391 - RNA, 22 nt, Human
aaggcccuaucuguuuacagug

SEQ ID NO: 3157392 - RNA, 16 nt, Human
aagggugaaaauuauu

SEQ ID NO: 3157393 - RNA, 15 nt, Human
aagggugaaaauuau

SEQ ID NO: 3157394 - RNA, 14 nt, Human
aaggcucuuuugua

SEQ ID NO: 3157395 - RNA, 16 nt, Human
aaguaaggaauuuuau

SEQ ID NO: 3157396 - RNA, 13 nt, Human
guuuacaguguuc

SEQ ID NO: 3157397 - RNA, 15 nt, Human
guuuacaguguuccg

SEQ ID NO: 3157398 - RNA, 12 nt, Human
guuucaaacuuu

SEQ ID NO: 3157399 - RNA, 20 nt, Human
guuauuauauuuacaaaugg

SEQ ID NO: 3157400 - RNA, 14 nt, Human
guuaagauuccuaa

SEQ ID NO: 3157401 - RNA, 22 nt, Human
aagccugcaauuucauaugcug

SEQ ID NO: 3157402 - RNA, 17 nt, Human
aagccugcaauuucaua

SEQ ID NO: 3157403 - RNA, 18 nt, Human
aagccaagaggcugcagc

SEQ ID NO: 3157404 - RNA, 22 nt, Human
aagccaagaggcugcagccagg

SEQ ID NO: 3157405 - RNA, 18 nt, Human
aagcccaguucagcuugg

SEQ ID NO: 3157406 - RNA, 19 nt, Human
aagcccaguucagcuuggg

SEQ ID NO: 3157407 - RNA, 18 nt, Human
aagaucucagugguuaag

SEQ ID NO: 3157408 - RNA, 19 nt, Human
gugggguagguugggagaa

SEQ ID NO: 3157409 - RNA, 14 nt, Human
aagaggcugcagcc

SEQ ID NO: 3157410 - RNA, 15 nt, Human
guguguauguggggg

SEQ ID NO: 3157411 - RNA, 13 nt, Human
guguguauguggg

SEQ ID NO: 3157412 - RNA, 20 nt, Human
gugugucacccuuaggccag

SEQ ID NO: 3157413 - RNA, 14 nt, Human
gugugggucugugu

SEQ ID NO: 3157414 - RNA, 12 nt, Human
guguguaugugg

SEQ ID NO: 3157415 - RNA, 23 nt, Human
aagaccuugcuuaugauugcaga

SEQ ID NO: 3157416 - RNA, 21 nt, Human
aagaccuuuggagcaaagcug

SEQ ID NO: 3157417 - RNA, 21 nt, Human
guggccuaaccugccgagagu

SEQ ID NO: 3157418 - RNA, 22 nt, Human
guggccuaaccugccgagaguc

SEQ ID NO: 3157419 - RNA, 19 nt, Human
guauaaaagggacugagaa

SEQ ID NO: 3157420 - RNA, 18 nt, Human
guauaaaagggacugaga

SEQ ID NO: 3157421 - RNA, 12 nt, Human
guaugcuucaua

SEQ ID NO: 3157422 - RNA, 13 nt, Human
guaugcuucauac

SEQ ID NO: 3157423 - RNA, 14 nt, Human
guaugcuucauaca

SEQ ID NO: 3157424 - RNA, 15 nt, Human
guaugcuucauacag

SEQ ID NO: 3157425 - RNA, 21 nt, Human
guaugcuucauacagggaugg

SEQ ID NO: 3157426 - RNA, 14 nt, Human
aaauuaagaaagga

SEQ ID NO: 3157427 - RNA, 17 nt, Human
gucaacacuaacaugau

SEQ ID NO: 3157428 - RNA, 12 nt, Human
guauuuuugaca

SEQ ID NO: 3157429 - RNA, 15 nt, Human
guauuuuugacagaa

SEQ ID NO: 3157430 - RNA, 15 nt, Human
aaauuuaugugaugg

SEQ ID NO: 3157431 - RNA, 12 nt, Human
aaauuuauguga

SEQ ID NO: 3157432 - RNA, 12 nt, Human
aaauugugaugu

SEQ ID NO: 3157433 - RNA, 15 nt, Human
aaauugugauguguc

SEQ ID NO: 3157434 - RNA, 20 nt, Human
aaauuguaagcaugcacaaa

SEQ ID NO: 3157435 - RNA, 19 nt, Human
aaauuguaagcaugcacaa

SEQ ID NO: 3157436 - RNA, 18 nt, Human
aaauucugucucuggauu

SEQ ID NO: 3157437 - RNA, 16 nt, Human
aaauucugucucugga

SEQ ID NO: 3157438 - RNA, 13 nt, Human
aacagauaaucag

SEQ ID NO: 3157439 - RNA, 12 nt, Human
aacaauaaaaga

SEQ ID NO: 3157440 - RNA, 19 nt, Human
aacaagaugguucuagcau

SEQ ID NO: 3157441 - RNA, 17 nt, Human
gucaguauguggaagug

SEQ ID NO: 3157442 - RNA, 21 nt, Human
gucaguauguggaaguguggg

SEQ ID NO: 3157443 - RNA, 13 nt, Human
gucaguuguauca

SEQ ID NO: 3157444 - RNA, 13 nt, Human
gucagaauagaaa

SEQ ID NO: 3157445 - RNA, 17 nt, Human
gucagaauagaaauuag

SEQ ID NO: 3157446 - RNA, 12 nt, Human
gugcaagagagg

SEQ ID NO: 3157447 - RNA, 18 nt, Human
aacuucccagugaauucu

SEQ ID NO: 3157448 - RNA, 22 nt, Human
aacucaucuagguaaauuacag

SEQ ID NO: 3157449 - RNA, 16 nt, Human
gucuuucacauuuaaa

SEQ ID NO: 3157450 - RNA, 17 nt, Human
gucuggcacagccuggc

SEQ ID NO: 3157451 - RNA, 19 nt, Human
gucuggcacagccuggcug

SEQ ID NO: 3157452 - RNA, 14 nt, Human
aacccagauaaagg

SEQ ID NO: 3157453 - RNA, 17 nt, Human
aaccccccauuucuucc

SEQ ID NO: 3157454 - RNA, 20 nt, Human
aaccccuggcuccaggccag

SEQ ID NO: 3157455 - RNA, 22 nt, Human
aacccaagguggguagaucacg

SEQ ID NO: 3157456 - RNA, 14 nt, Human
aaccaccagaagcc

SEQ ID NO: 3157457 - RNA, 17 nt, Human
aaccaccagaagcccag

SEQ ID NO: 3157458 - RNA, 19 nt, Human
gucucccuccucugcccgg

SEQ ID NO: 3157459 - RNA, 20 nt, Human
aaccacauuggagauguuua

SEQ ID NO: 3157460 - RNA, 15 nt, Human
agauggaaugcugug

SEQ ID NO: 3157461 - RNA, 13 nt, Human
agauggaaugcug

SEQ ID NO: 3157462 - RNA, 18 nt, Human
agauggaaugcuguguua

SEQ ID NO: 3157463 - RNA, 18 nt, Human
ugaccuuccaagagccug

SEQ ID NO: 3157464 - RNA, 19 nt, Human
ugaccuuccaagagccuga

SEQ ID NO: 3157465 - RNA, 20 nt, Human
ugaccuuccaagagccugag

SEQ ID NO: 3157466 - RNA, 15 nt, Human
ugaauacuuuauaaa

SEQ ID NO: 3157467 - RNA, 17 nt, Human
agaguauuuuugacaga

SEQ ID NO: 3157468 - RNA, 18 nt, Human
agaguauuuuugacagaa

SEQ ID NO: 3157469 - RNA, 14 nt, Human
ugaauguaugcuuc

SEQ ID NO: 3157470 - RNA, 19 nt, Human
ugaauguaugcuucauaca

SEQ ID NO: 3157471 - RNA, 20 nt, Human
ugaauguaugcuucauacag

SEQ ID NO: 3157472 - RNA, 23 nt, Human
ugaauguaugcuucauacaggga

SEQ ID NO: 3157473 - RNA, 22 nt, Human
agagggacuguucuuuuguccc

SEQ ID NO: 3157474 - RNA, 14 nt, Human
ugaaaguacauuug

SEQ ID NO: 3157475 - RNA, 23 nt, Human
ugaaaguacauuuggagacacaa

SEQ ID NO: 3157476 - RNA, 14 nt, Human
agaguauuuuugac

SEQ ID NO: 3157477 - RNA, 15 nt, Human
agaguauuuuugaca

SEQ ID NO: 3157478 - RNA, 22 nt, Human
agaggugugcaagagagggaug

SEQ ID NO: 3157479 - RNA, 23 nt, Human
agaggugugcaagagagggaugc

SEQ ID NO: 3157480 - RNA, 20 nt, Human
ugaagcuaucguaaaauuaa

SEQ ID NO: 3157481 - RNA, 23 nt, Human
ugaauuugugaagguggaaauaa

SEQ ID NO: 3157482 - RNA, 13 nt, Human
ugaauuugugaag

SEQ ID NO: 3157483 - RNA, 21 nt, Human
ugaauuugugaagguggaaau

SEQ ID NO: 3157484 - RNA, 20 nt, Human
agaguauuuuugacagaaua

SEQ ID NO: 3157485 - RNA, 22 nt, Human
ugaaaaagaccuuuggagcaaa

SEQ ID NO: 3157486 - RNA, 23 nt, Human
ugaaaaaauauauaucaaauaua

SEQ ID NO: 3157487 - RNA, 20 nt, Human
ugaaaagcuccauuuuuagu

SEQ ID NO: 3157488 - RNA, 13 nt, Human
ugaaaauauuuaa

SEQ ID NO: 3157489 - RNA, 14 nt, Human
ugaaaauauuuaaa

SEQ ID NO: 3157490 - RNA, 11 nt, Human
ugaaaauauuu

SEQ ID NO: 3157491 - RNA, 12 nt, Human
ugaaaauauuua

SEQ ID NO: 3157492 - RNA, 12 nt, Human
ugaaacuuggau

SEQ ID NO: 3157493 - RNA, 17 nt, Human
agagacgggcccuggug

SEQ ID NO: 3157494 - RNA, 14 nt, Human
agagagaaaauaaa

SEQ ID NO: 3157495 - RNA, 20 nt, Human
agagcaaaauugauguguuu

SEQ ID NO: 3157496 - RNA, 19 nt, Human
agacauucuuccaaaaaga

SEQ ID NO: 3157497 - RNA, 13 nt, Human
agacccccuggag

SEQ ID NO: 3157498 - RNA, 14 nt, Human
agacccccuggaga

SEQ ID NO: 3157499 - RNA, 15 nt, Human
agacccccuggagac

SEQ ID NO: 3157500 - RNA, 19 nt, Human
agacccccuggagacuaac

SEQ ID NO: 3157501 - RNA, 21 nt, Human
ucuugaugccuggcggggugg

SEQ ID NO: 3157502 - RNA, 22 nt, Human
ucuuggggaguuuagggugggg

SEQ ID NO: 3157503 - RNA, 23 nt, Human
ucuuggggaguuuaggguggggg

SEQ ID NO: 3157504 - RNA, 15 nt, Human
ucuuuaacucauaaa

SEQ ID NO: 3157505 - RNA, 12 nt, Human
agaaaugaaaaa

SEQ ID NO: 3157506 - RNA, 14 nt, Human
agaaaucuagaaga

SEQ ID NO: 3157507 - RNA, 13 nt, Human
agaaaugaaaaaa

SEQ ID NO: 3157508 - RNA, 15 nt, Human
agaaaucuaaaaaac

SEQ ID NO: 3157509 - RNA, 18 nt, Human
ucucugcaggucccuaau

SEQ ID NO: 3157510 - RNA, 20 nt, Human
agaaaacaaaaaaaccucua

SEQ ID NO: 3157511 - RNA, 22 nt, Human
ucucugcaggucccuaauaaag

SEQ ID NO: 3157512 - RNA, 19 nt, Human
ucucugcaggucccuaaua

SEQ ID NO: 3157513 - RNA, 20 nt, Human
ucucugcaggucccuaauaa

SEQ ID NO: 3157514 - RNA, 21 nt, Human
ucucugcaggucccuaauaaa

SEQ ID NO: 3157515 - RNA, 19 nt, Human
acuuuguauaaaagggacu

SEQ ID NO: 3157516 - RNA, 21 nt, Human
ucugcaggucccuaauaaagc

SEQ ID NO: 3157517 - RNA, 19 nt, Human
ucugcaggucccuaauaaa

SEQ ID NO: 3157518 - RNA, 22 nt, Human
ucugcaggucccuaauaaagcu

SEQ ID NO: 3157519 - RNA, 23 nt, Human
ucugcaggucccuaauaaagcug

SEQ ID NO: 3157520 - RNA, 13 nt, Human
agaauaaacuggc

SEQ ID NO: 3157521 - RNA, 16 nt, Human
agaaggaucuucaucu

SEQ ID NO: 3157522 - RNA, 22 nt, Human
ucuggcacagccuggcuguggc

SEQ ID NO: 3157523 - RNA, 17 nt, Human
acuugaaaauuaacaug

SEQ ID NO: 3157524 - RNA, 16 nt, Human
acuugaaaauuaacau

SEQ ID NO: 3157525 - RNA, 18 nt, Human
acuugaaaauuaacauga

SEQ ID NO: 3157526 - RNA, 13 nt, Human
acuuguauuaugu

SEQ ID NO: 3157527 - RNA, 14 nt, Human
acuuguauuaugug

SEQ ID NO: 3157528 - RNA, 23 nt, Human
acuugucccgggacaccuaggcu

SEQ ID NO: 3157529 - RNA, 14 nt, Human
acuucccuuucugc

SEQ ID NO: 3157530 - RNA, 22 nt, Human
acuucccuuucugcuuguguua

SEQ ID NO: 3157531 - RNA, 17 nt, Human
ucuagcauggcauauuu

SEQ ID NO: 3157532 - RNA, 17 nt, Human
acuucccagugaauucu

SEQ ID NO: 3157533 - RNA, 13 nt, Human
ucuauaauuuaaa

SEQ ID NO: 3157534 - RNA, 15 nt, Human
ucuaccucuuggcug

SEQ ID NO: 3157535 - RNA, 21 nt, Human
ucuaagauaguaacaaugaag

SEQ ID NO: 3157536 - RNA, 20 nt, Human
ucggggagccgggagccuga

SEQ ID NO: 3157537 - RNA, 18 nt, Human
acuguacagacagaaaaa

SEQ ID NO: 3157538 - RNA, 23 nt, Human
acuguacuugcucuugaugccug

SEQ ID NO: 3157539 - RNA, 15 nt, Human
acuguacuugcucuu

SEQ ID NO: 3157540 - RNA, 18 nt, Human
ucgcccuggacugugugc

SEQ ID NO: 3157541 - RNA, 16 nt, Human
acuggggcaggggccg

SEQ ID NO: 3157542 - RNA, 22 nt, Human
acuaugacauaaaaacaacuuu

SEQ ID NO: 3157543 - RNA, 14 nt, Human
acuccaccaagccu

SEQ ID NO: 3157544 - RNA, 21 nt, Human
acucaucuagguaaauuacag

SEQ ID NO: 3157545 - RNA, 23 nt, Human
acucaucuagguaaauuacaguu

SEQ ID NO: 3157546 - RNA, 14 nt, Human
acucagaauauugc

SEQ ID NO: 3157547 - RNA, 20 nt, Human
uccuagccacccaccacacu

SEQ ID NO: 3157548 - RNA, 21 nt, Human
uccuagccaccgccuccuaca

SEQ ID NO: 3157549 - RNA, 22 nt, Human
acucgugucuggcacagccugg

SEQ ID NO: 3157550 - RNA, 23 nt, Human
acucgugucuggcacagccuggc

SEQ ID NO: 3157551 - RNA, 13 nt, Human
acucuugaaaaau

SEQ ID NO: 3157552 - RNA, 13 nt, Human
uccucuccugucu

SEQ ID NO: 3157553 - RNA, 14 nt, Human
acucuugaaaaaug

SEQ ID NO: 3157554 - RNA, 19 nt, Human
acucuugaaaaaugcaugu

SEQ ID NO: 3157555 - RNA, 16 nt, Human
uccucugcccgggagc

SEQ ID NO: 3157556 - RNA, 22 nt, Human
uccucugcccgggagcucagga

SEQ ID NO: 3157557 - RNA, 13 nt, Human
acugaaacuuccc

SEQ ID NO: 3157558 - RNA, 16 nt, Human
ucauaauaaguugcau

SEQ ID NO: 3157559 - RNA, 19 nt, Human
uccaaaaagauuuucagaa

SEQ ID NO: 3157560 - RNA, 20 nt, Human
uccaaaaagauuuucagaaa

SEQ ID NO: 3157561 - RNA, 20 nt, Human
accuggcuuuucuuucuacc

SEQ ID NO: 3157562 - RNA, 15 nt, Human
accuuccaagagccu

SEQ ID NO: 3157563 - RNA, 16 nt, Human
accuuccaagagccug

SEQ ID NO: 3157564 - RNA, 22 nt, Human
acgaagaguauuuuugacagaa

SEQ ID NO: 3157565 - RNA, 20 nt, Human
acgaagaguauuuuugacag

SEQ ID NO: 3157566 - RNA, 20 nt, Human
uccaucucuuguuuaaauuc

SEQ ID NO: 3157567 - RNA, 16 nt, Human
uccauccuacccccug

SEQ ID NO: 3157568 - RNA, 20 nt, Human
uccauccuacccccugugcc

SEQ ID NO: 3157569 - RNA, 19 nt, Human
accccagcuggggccaggc

SEQ ID NO: 3157570 - RNA, 16 nt, Human
ucagaauagaaauuag

SEQ ID NO: 3157571 - RNA, 21 nt, Human
acccagauaaagguucaugca

SEQ ID NO: 3157572 - RNA, 14 nt, Human
ucacucuuggagcc

SEQ ID NO: 3157573 - RNA, 16 nt, Human
ucacucuuggagccug

SEQ ID NO: 3157574 - RNA, 17 nt, Human
ucacucuuggagccugc

SEQ ID NO: 3157575 - RNA, 18 nt, Human
ucacucuuggagccugca

SEQ ID NO: 3157576 - RNA, 19 nt, Human
ucacuuaucccaagagaau

SEQ ID NO: 3157577 - RNA, 16 nt, Human
ucaguauguggaagug

SEQ ID NO: 3157578 - RNA, 19 nt, Human
ucaguuugcuagcagaaau

SEQ ID NO: 3157579 - RNA, 18 nt, Human
ucauaaauaaaguuuguu

SEQ ID NO: 3157580 - RNA, 24 nt, Human
ucauaaagcaggcagaacucaucu

SEQ ID NO: 3157581 - RNA, 21 nt, Human
acauuguaaauaguauuugag

SEQ ID NO: 3157582 - RNA, 19 nt, Human
acauuguaaauaguauuug

SEQ ID NO: 3157583 - RNA, 17 nt, Human
acauuguaaauaguauu

SEQ ID NO: 3157584 - RNA, 18 nt, Human
accaaauaaaaauauugu

SEQ ID NO: 3157585 - RNA, 16 nt, Human
accaaauaaaaauauu

SEQ ID NO: 3157586 - RNA, 15 nt, Human
uauuuuuguagcacu

SEQ ID NO: 3157587 - RNA, 19 nt, Human
uauuuuuguagcacugaca

SEQ ID NO: 3157588 - RNA, 13 nt, Human
ucaaauauauuca

SEQ ID NO: 3157589 - RNA, 17 nt, Human
uauuuuaauaaacacuc

SEQ ID NO: 3157590 - RNA, 14 nt, Human
uauuuuaauaaaca

SEQ ID NO: 3157591 - RNA, 15 nt, Human
uauuuuguucauaca

SEQ ID NO: 3157592 - RNA, 16 nt, Human
uauuuuguucauacau

SEQ ID NO: 3157593 - RNA, 20 nt, Human
uauuuuguguuuaggaacua

SEQ ID NO: 3157594 - RNA, 17 nt, Human
uauuuuguguuuaggaa

SEQ ID NO: 3157595 - RNA, 12 nt, Human
uauuuuucacau

SEQ ID NO: 3157596 - RNA, 13 nt, Human
uauuuuucacaua

SEQ ID NO: 3157597 - RNA, 13 nt, Human
uauuuuuguagca

SEQ ID NO: 3157598 - RNA, 21 nt, Human
uauuuuaaaagauaaauauua

SEQ ID NO: 3157599 - RNA, 14 nt, Human
uauuuuaagacgaa

SEQ ID NO: 3157600 - RNA, 22 nt, Human
uauuuuaagacgaaacauuugu

SEQ ID NO: 3157601 - RNA, 20 nt, Human
uaugugggggucuguguguu

SEQ ID NO: 3157602 - RNA, 19 nt, Human
uaugugggggucugugugu

SEQ ID NO: 3157603 - RNA, 18 nt, Human
uaugugggggucugugug

SEQ ID NO: 3157604 - RNA, 14 nt, Human
uaugugccagauuu

SEQ ID NO: 3157605 - RNA, 19 nt, Human
uaugugccagauuuaugca

SEQ ID NO: 3157606 - RNA, 14 nt, Human
uauguguaaaaugu

SEQ ID NO: 3157607 - RNA, 18 nt, Human
auaaaagccuguuuaaga

SEQ ID NO: 3157608 - RNA, 13 nt, Human
auaaaagccuguu

SEQ ID NO: 3157609 - RNA, 14 nt, Human
uuaaguauguguaa

SEQ ID NO: 3157610 - RNA, 14 nt, Human
aguuuaaauuguaa

SEQ ID NO: 3157611 - RNA, 13 nt, Human
uuaccuuugacaa

SEQ ID NO: 3157612 - RNA, 20 nt, Human
uuaccuuugacaaagguaaa

SEQ ID NO: 3157613 - RNA, 14 nt, Human
auaacguauaaaag

SEQ ID NO: 3157614 - RNA, 22 nt, Human
auaacgauaaaagacagugaaa

SEQ ID NO: 3157615 - RNA, 13 nt, Human
auaacugugaagu

SEQ ID NO: 3157616 - RNA, 13 nt, Human
auaaauaaaaaua

SEQ ID NO: 3157617 - RNA, 17 nt, Human
auaaagguucaugcaaa

SEQ ID NO: 3157618 - RNA, 15 nt, Human
auaaagguucaugca

SEQ ID NO: 3157619 - RNA, 18 nt, Human
auaaauauuuuugccaua

SEQ ID NO: 3157620 - RNA, 18 nt, Human
auaauccuaaacauauga

SEQ ID NO: 3157621 - RNA, 19 nt, Human
auaauacuugcuuuggaaa

SEQ ID NO: 3157622 - RNA, 16 nt, Human
uuagccuuugucccag

SEQ ID NO: 3157623 - RNA, 19 nt, Human
aguguguguuuuucauaaa

SEQ ID NO: 3157624 - RNA, 23 nt, Human
agugugggucuguguguguguau

SEQ ID NO: 3157625 - RNA, 19 nt, Human
agugugggucugugugugu

SEQ ID NO: 3157626 - RNA, 15 nt, Human
agugugggucugugu

SEQ ID NO: 3157627 - RNA, 17 nt, Human
agugugggucugugugu

SEQ ID NO: 3157628 - RNA, 16 nt, Human
agugugggucugugug

SEQ ID NO: 3157629 - RNA, 19 nt, Human
aguucggugagcuacaaau

SEQ ID NO: 3157630 - RNA, 15 nt, Human
aguucuacauaagua

SEQ ID NO: 3157631 - RNA, 17 nt, Human
aguuccuagccaccgcc

SEQ ID NO: 3157632 - RNA, 16 nt, Human
uguugugugugggagu

SEQ ID NO: 3157633 - RNA, 15 nt, Human
uguugugugugggag

SEQ ID NO: 3157634 - RNA, 14 nt, Human
uguuguguguggga

SEQ ID NO: 3157635 - RNA, 20 nt, Human
uguugugauguauucuagcu

SEQ ID NO: 3157636 - RNA, 14 nt, Human
uguugugauguauu

SEQ ID NO: 3157637 - RNA, 13 nt, Human
uguugugaauguu

SEQ ID NO: 3157638 - RNA, 12 nt, Human
uguugugaaugu

SEQ ID NO: 3157639 - RNA, 13 nt, Human
uguuuaguaauca

SEQ ID NO: 3157640 - RNA, 14 nt, Human
uguuuaguaaucau

SEQ ID NO: 3157641 - RNA, 17 nt, Human
uguuuaguaaucauauu

SEQ ID NO: 3157642 - RNA, 19 nt, Human
uguggcacuggggcagggg

SEQ ID NO: 3157643 - RNA, 13 nt, Human
uguggucuccacu

SEQ ID NO: 3157644 - RNA, 13 nt, Human
uguguugugaaug

SEQ ID NO: 3157645 - RNA, 13 nt, Human
uguguguguguau

SEQ ID NO: 3157646 - RNA, 16 nt, Human
uguguguguguaugug

SEQ ID NO: 3157647 - RNA, 20 nt, Human
uguaauuuaaaauugugaug

SEQ ID NO: 3157648 - RNA, 18 nt, Human
uguaauuuaaaauuguga

SEQ ID NO: 3157649 - RNA, 17 nt, Human
uguaauuuaaaauugug

SEQ ID NO: 3157650 - RNA, 23 nt, Human
agguugggagaaugucaguaugu

SEQ ID NO: 3157651 - RNA, 18 nt, Human
agguccccagcuuuggcu

SEQ ID NO: 3157652 - RNA, 10 nt, Human
aggucccuaa

SEQ ID NO: 3157653 - RNA, 11 nt, Human
agguccccaga

SEQ ID NO: 3157654 - RNA, 17 nt, Human
agguccccagcuuuggc

SEQ ID NO: 3157655 - RNA, 21 nt, Human
aguaauccaagcaaaugugaa

SEQ ID NO: 3157656 - RNA, 15 nt, Human
aguaauccaagcaaa

SEQ ID NO: 3157657 - RNA, 19 nt, Human
aguacuuuuggcauuuuac

SEQ ID NO: 3157658 - RNA, 19 nt, Human
aguagaacagauaaucagu

SEQ ID NO: 3157659 - RNA, 13 nt, Human
aguagaacagaua

SEQ ID NO: 3157660 - RNA, 23 nt, Human
aguaaggaauuuuauuuuuuucu

SEQ ID NO: 3157661 - RNA, 22 nt, Human
uguaauuuaaaauugugaugug

SEQ ID NO: 3157662 - RNA, 21 nt, Human
uguaauuuaaaauugugaugu

SEQ ID NO: 3157663 - RNA, 22 nt, Human
agucccugccuggaccagccuc

SEQ ID NO: 3157664 - RNA, 23 nt, Human
agucccugccuggaccagccucu

SEQ ID NO: 3157665 - RNA, 15 nt, Human
agucccugccuggac

SEQ ID NO: 3157666 - RNA, 21 nt, Human
agucccugccuggaccagccu

SEQ ID NO: 3157667 - RNA, 14 nt, Human
agucccugccugga

SEQ ID NO: 3157668 - RNA, 22 nt, Human
agucccugaggcagguccccag

SEQ ID NO: 3157669 - RNA, 23 nt, Human
agucccugaggcagguccccaga

SEQ ID NO: 3157670 - RNA, 19 nt, Human
agucccugaggcagguccc

SEQ ID NO: 3157671 - RNA, 20 nt, Human
agucccugaggcaggucccc

SEQ ID NO: 3157672 - RNA, 11 nt, Human
uguauuaugug

SEQ ID NO: 3157673 - RNA, 16 nt, Human
aguauuugagaguucu

SEQ ID NO: 3157674 - RNA, 19 nt, Human
aguauguggaagugugggu

SEQ ID NO: 3157675 - RNA, 17 nt, Human
aguauguggaagugugg

SEQ ID NO: 3157676 - RNA, 15 nt, Human
aguauguggaagugu

SEQ ID NO: 3157677 - RNA, 22 nt, Human
ugucaguauguggaaguguggg

SEQ ID NO: 3157678 - RNA, 18 nt, Human
ugucaguauguggaagug

SEQ ID NO: 3157679 - RNA, 20 nt, Human
ugucaguauguggaagugug

SEQ ID NO: 3157680 - RNA, 19 nt, Human
ugucaguauguggaagugu

SEQ ID NO: 3157681 - RNA, 20 nt, Human
uggggacaggggcaggagga

SEQ ID NO: 3157682 - RNA, 22 nt, Human
uggggacaggggcaggaggaag

SEQ ID NO: 3157683 - RNA, 18 nt, Human
uggggaguuuaggguggg

SEQ ID NO: 3157684 - RNA, 19 nt, Human
uggggaguuuagggugggg

SEQ ID NO: 3157685 - RNA, 15 nt, Human
ugggguagguuggga

SEQ ID NO: 3157686 - RNA, 21 nt, Human
ugggguagguugggagaaugu

SEQ ID NO: 3157687 - RNA, 14 nt, Human
uggggcugauugua

SEQ ID NO: 3157688 - RNA, 23 nt, Human
agguauaauucacauuguauuca

SEQ ID NO: 3157689 - RNA, 18 nt, Human
aggucauauuaauauauu

SEQ ID NO: 3157690 - RNA, 19 nt, Human
aggucauauuaauauauuu

SEQ ID NO: 3157691 - RNA, 16 nt, Human
aggucauauuaauaua

SEQ ID NO: 3157692 - RNA, 11 nt, Human
uggucagccca

SEQ ID NO: 3157693 - RNA, 12 nt, Human
uggucagcccaa

SEQ ID NO: 3157694 - RNA, 10 nt, Human
uggucagccc

SEQ ID NO: 3157695 - RNA, 14 nt, Human
uggucuccacuggg

SEQ ID NO: 3157696 - RNA, 16 nt, Human
uggguggggggcuuca

SEQ ID NO: 3157697 - RNA, 20 nt, Human
ugguaggaacugcugggcuu

SEQ ID NO: 3157698 - RNA, 13 nt, Human
ugguaggaacugc

SEQ ID NO: 3157699 - RNA, 12 nt, Human
ugggucugugug

SEQ ID NO: 3157700 - RNA, 21 nt, Human
ugggucgcccuggacugugug

SEQ ID NO: 3157701 - RNA, 15 nt, Human
agggggagagggcug

SEQ ID NO: 3157702 - RNA, 16 nt, Human
agggggagagggcugc

SEQ ID NO: 3157703 - RNA, 23 nt, Human
agcuuggggacaggggcaggagg

SEQ ID NO: 3157704 - RNA, 15 nt, Human
ugccugcccuauucu

SEQ ID NO: 3157705 - RNA, 20 nt, Human
agcugugugcucuccaagcc

SEQ ID NO: 3157706 - RNA, 21 nt, Human
agcugggacaccccgacuuuu

SEQ ID NO: 3157707 - RNA, 18 nt, Human
agcugugugcucuccaag

SEQ ID NO: 3157708 - RNA, 14 nt, Human
agcuguguggcagu

SEQ ID NO: 3157709 - RNA, 16 nt, Human
agcuguguggcagucu

SEQ ID NO: 3157710 - RNA, 23 nt, Human
agcuuuaucaaagggugaaaauu

SEQ ID NO: 3157711 - RNA, 14 nt, Human
ugcuucaucccuuu

SEQ ID NO: 3157712 - RNA, 23 nt, Human
ugcuguauccauccauggggcug

SEQ ID NO: 3157713 - RNA, 15 nt, Human
ugcuguagacauuug

SEQ ID NO: 3157714 - RNA, 15 nt, Human
uggacugugugcuca

SEQ ID NO: 3157715 - RNA, 13 nt, Human
aggcaaucauggu

SEQ ID NO: 3157716 - RNA, 20 nt, Human
uggaauuauuuuaaaagaua

SEQ ID NO: 3157717 - RNA, 19 nt, Human
uggaauuauuuuaaaagau

SEQ ID NO: 3157718 - RNA, 19 nt, Human
aggacaguauuugugggga

SEQ ID NO: 3157719 - RNA, 12 nt, Human
aggacaguauuu

SEQ ID NO: 3157720 - RNA, 19 nt, Human
aggaucccaugagcuccuu

SEQ ID NO: 3157721 - RNA, 20 nt, Human
uggaagcuucuggugaccuu

SEQ ID NO: 3157722 - RNA, 17 nt, Human
uggauuauauuaugaag

SEQ ID NO: 3157723 - RNA, 16 nt, Human
uggcauauuuuucaca

SEQ ID NO: 3157724 - RNA, 17 nt, Human
uggcauauuuuucacau

SEQ ID NO: 3157725 - RNA, 23 nt, Human
uggccaguggcuggaucugugag

SEQ ID NO: 3157726 - RNA, 21 nt, Human
uggccuguucuucuauggguu

SEQ ID NO: 3157727 - RNA, 20 nt, Human
agccuggucagcccaaacca

SEQ ID NO: 3157728 - RNA, 13 nt, Human
agccuguuuaaga

SEQ ID NO: 3157729 - RNA, 15 nt, Human
agccuggucagccca

SEQ ID NO: 3157730 - RNA, 16 nt, Human
agccuggucagcccaa

SEQ ID NO: 3157731 - RNA, 17 nt, Human
ugccagacccccuggag

SEQ ID NO: 3157732 - RNA, 21 nt, Human
agcucaggaaccgaggcaggg

SEQ ID NO: 3157733 - RNA, 22 nt, Human
agcucaggaaccgaggcaggga

SEQ ID NO: 3157734 - RNA, 20 nt, Human
agcucaggaaccgaggcagg

SEQ ID NO: 3157735 - RNA, 18 nt, Human
agcuaggaauuguguuua

SEQ ID NO: 3157736 - RNA, 18 nt, Human
agcccaguucagcuuggg

SEQ ID NO: 3157737 - RNA, 18 nt, Human
agccugacccucaucuuu

SEQ ID NO: 3157738 - RNA, 11 nt, Human
ugcaggucccu

SEQ ID NO: 3157739 - RNA, 22 nt, Human
ugcauaacguauaaaagccugu

SEQ ID NO: 3157740 - RNA, 23 nt, Human
ugcauaacguauaaaagccuguu

SEQ ID NO: 3157741 - RNA, 12 nt, Human
ugcaggucccua

SEQ ID NO: 3157742 - RNA, 14 nt, Human
ugcaggucccuaau

SEQ ID NO: 3157743 - RNA, 15 nt, Human
ugcaggucccuaaua

SEQ ID NO: 3157744 - RNA, 16 nt, Human
ugcaggucccuaauaa

SEQ ID NO: 3157745 - RNA, 15 nt, Human
ugauccagcccugag

SEQ ID NO: 3157746 - RNA, 17 nt, Human
ugauccagcccugaguu

SEQ ID NO: 3157747 - RNA, 18 nt, Human
ugauccagcccugaguuc

SEQ ID NO: 3157748 - RNA, 15 nt, Human
agccaggccacuggc

SEQ ID NO: 3157749 - RNA, 17 nt, Human
agcaugucgucaaagcu

SEQ ID NO: 3157750 - RNA, 20 nt, Human
agcaugucgucaaagcugaa

SEQ ID NO: 3157751 - RNA, 18 nt, Human
agcauggcauauuuuuca

SEQ ID NO: 3157752 - RNA, 19 nt, Human
agcauggcauauuuuucac

SEQ ID NO: 3157753 - RNA, 21 nt, Human
agcauggcauauuuuucacau

SEQ ID NO: 3157754 - RNA, 22 nt, Human
agcauggcauauuuuucacaua

SEQ ID NO: 3157755 - RNA, 17 nt, Human
agcauuucccuuccuuc

SEQ ID NO: 3157756 - RNA, 21 nt, Human
ugauagaaggcuauggggaua

SEQ ID NO: 3157757 - RNA, 22 nt, Human
ugaguaacugauuuguaacaag

SEQ ID NO: 3157758 - RNA, 21 nt, Human
agcauaauacuugcuuuggaa

SEQ ID NO: 3157759 - RNA, 18 nt, Human
ugaguucauaaauuuaug

SEQ ID NO: 3157760 - RNA, 24 nt, Human
ugaguuacuugcugcccugugcuc

SEQ ID NO: 3157761 - RNA, 24 nt, Human
ugauaagcagucauccucagauca

SEQ ID NO: 3157762 - RNA, 12 nt, Human
ugauaaguaaau

SEQ ID NO: 3157763 - RNA, 19 nt, Human
ugauacgcaacauaauuaa

SEQ ID NO: 3157764 - RNA, 23 nt, Human
ugauacacuaugaagauguuuca

SEQ ID NO: 3157765 - RNA, 14 nt, Human
uuccaagagccuga

SEQ ID NO: 3157766 - RNA, 22 nt, Human
uuccaagagccugagagugagg

SEQ ID NO: 3157767 - RNA, 13 nt, Human
uuccaagagccug

SEQ ID NO: 3157768 - RNA, 13 nt, Human
uucauacauugua

SEQ ID NO: 3157769 - RNA, 19 nt, Human
uucauacauuguacgaaga

SEQ ID NO: 3157770 - RNA, 13 nt, Human
uucauaugcugua

SEQ ID NO: 3157771 - RNA, 12 nt, Human
uucauacauauu

SEQ ID NO: 3157772 - RNA, 23 nt, Human
uucauacauauuuuuguagcacu

SEQ ID NO: 3157773 - RNA, 21 nt, Human
uucauacagggaugguguuca

SEQ ID NO: 3157774 - RNA, 19 nt, Human
uucauaauuauuauuuggc

SEQ ID NO: 3157775 - RNA, 13 nt, Human
auauauuuaauga

SEQ ID NO: 3157776 - RNA, 12 nt, Human
auauauuuuaag

SEQ ID NO: 3157777 - RNA, 13 nt, Human
auauauuuuaaga

SEQ ID NO: 3157778 - RNA, 14 nt, Human
auaucuaguaugaa

SEQ ID NO: 3157779 - RNA, 15 nt, Human
auaucuaguaugaaa

SEQ ID NO: 3157780 - RNA, 17 nt, Human
auaucuaguaugaaauu

SEQ ID NO: 3157781 - RNA, 14 nt, Human
auauauuuuaagac

SEQ ID NO: 3157782 - RNA, 13 nt, Human
auaucuuguagcu

SEQ ID NO: 3157783 - RNA, 17 nt, Human
auaggcguaacuaauuu

SEQ ID NO: 3157784 - RNA, 22 nt, Human
auagcuuuucccuuuuuuuaag

SEQ ID NO: 3157785 - RNA, 16 nt, Human
uucaaaauuguuacaa

SEQ ID NO: 3157786 - RNA, 21 nt, Human
uucaaaauuguuacaaauugu

SEQ ID NO: 3157787 - RNA, 17 nt, Human
uuauuuuguucauacau

SEQ ID NO: 3157788 - RNA, 21 nt, Human
uuauuuuguucauacauauuu

SEQ ID NO: 3157789 - RNA, 16 nt, Human
uuauuuuguucauaca

SEQ ID NO: 3157790 - RNA, 13 nt, Human
uuauuuuuuucug

SEQ ID NO: 3157791 - RNA, 17 nt, Human
uuauuuuuuucugaauu

SEQ ID NO: 3157792 - RNA, 15 nt, Human
auauauauauauauu

SEQ ID NO: 3157793 - RNA, 13 nt, Human
auagucuuucagu

SEQ ID NO: 3157794 - RNA, 16 nt, Human
uucuuuguaaugaaaa

SEQ ID NO: 3157795 - RNA, 20 nt, Human
auccuagucacuaccuucau

SEQ ID NO: 3157796 - RNA, 21 nt, Human
aucauuggauucugagagcug

SEQ ID NO: 3157797 - RNA, 22 nt, Human
aucauuggauucugagagcugu

SEQ ID NO: 3157798 - RNA, 14 nt, Human
auauuuuaagacga

SEQ ID NO: 3157799 - RNA, 20 nt, Human
uucuaacaaaaaaauauauu

SEQ ID NO: 3157800 - RNA, 19 nt, Human
uucuaacaaaaaaauauau

SEQ ID NO: 3157801 - RNA, 13 nt, Human
uucuaaaguaaaa

SEQ ID NO: 3157802 - RNA, 15 nt, Human
uucuaaaguaaaaac

SEQ ID NO: 3157803 - RNA, 13 nt, Human
uucuauaauuuaa

SEQ ID NO: 3157804 - RNA, 14 nt, Human
uucuauaauuuaaa

SEQ ID NO: 3157805 - RNA, 15 nt, Human
uucuaguucugccag

SEQ ID NO: 3157806 - RNA, 19 nt, Human
aucagacuaugaaguuuuu

SEQ ID NO: 3157807 - RNA, 14 nt, Human
uuuaaauguuuuuu

SEQ ID NO: 3157808 - RNA, 12 nt, Human
uuuaauuuuaca

SEQ ID NO: 3157809 - RNA, 15 nt, Human
augauuccagguggc

SEQ ID NO: 3157810 - RNA, 16 nt, Human
augauuccagguggca

SEQ ID NO: 3157811 - RNA, 13 nt, Human
augcuucauacag

SEQ ID NO: 3157812 - RNA, 15 nt, Human
augcuucauacaggg

SEQ ID NO: 3157813 - RNA, 16 nt, Human
augcuucauacaggga

SEQ ID NO: 3157814 - RNA, 19 nt, Human
augcuucauacagggaugg

SEQ ID NO: 3157815 - RNA, 11 nt, Human
augcuucauac

SEQ ID NO: 3157816 - RNA, 12 nt, Human
augcuucauaca

SEQ ID NO: 3157817 - RNA, 10 nt, Human
augcuucaua

SEQ ID NO: 3157818 - RNA, 23 nt, Human
augcuucauacagggaugguguu

SEQ ID NO: 3157819 - RNA, 16 nt, Human
uuuaguaucuuuuuau

SEQ ID NO: 3157820 - RNA, 12 nt, Human
uuuaugugaugg

SEQ ID NO: 3157821 - RNA, 13 nt, Human
uuuaugugugugu

SEQ ID NO: 3157822 - RNA, 11 nt, Human
uuuaugugugu

SEQ ID NO: 3157823 - RNA, 16 nt, Human
auggccugggggaugu

SEQ ID NO: 3157824 - RNA, 21 nt, Human
auggaaugaugggucaguugu

SEQ ID NO: 3157825 - RNA, 16 nt, Human
auggaaugcuguguua

SEQ ID NO: 3157826 - RNA, 15 nt, Human
uuucauaugcuguau

SEQ ID NO: 3157827 - RNA, 13 nt, Human
aucuuuuuauuca

SEQ ID NO: 3157828 - RNA, 22 nt, Human
aucuuuaauuuuacauuuccua

SEQ ID NO: 3157829 - RNA, 16 nt, Human
aucuuuaauuuuacau

SEQ ID NO: 3157830 - RNA, 21 nt, Human
aucuuuaauuuuacauuuccu

SEQ ID NO: 3157831 - RNA, 15 nt, Human
augagaaaucuaaaa

SEQ ID NO: 3157832 - RNA, 18 nt, Human
augagaaaucuaaaaaac

SEQ ID NO: 3157833 - RNA, 23 nt, Human
augagaaaucuaaaaaacgaaaa

SEQ ID NO: 3157834 - RNA, 18 nt, Human
aucucauaauuuauacag

SEQ ID NO: 3157835 - RNA, 17 nt, Human
aucucauaauuuauaca

SEQ ID NO: 3157836 - RNA, 23 nt, Human
aucucagugguuaagauuccuaa

SEQ ID NO: 3157837 - RNA, 16 nt, Human
aucuccccaucauugg

SEQ ID NO: 3157838 - RNA, 15 nt, Human
uugaugggauuuggu

SEQ ID NO: 3157839 - RNA, 12 nt, Human
uugaugccuggc

SEQ ID NO: 3157840 - RNA, 11 nt, Human
uugauguguuu

SEQ ID NO: 3157841 - RNA, 14 nt, Human
uugcaucugaaaau

SEQ ID NO: 3157842 - RNA, 20 nt, Human
aucugagaggccacagugca

SEQ ID NO: 3157843 - RNA, 16 nt, Human
aucuguaccucugccu

SEQ ID NO: 3157844 - RNA, 15 nt, Human
auuaauauauuucca

SEQ ID NO: 3157845 - RNA, 16 nt, Human
auuaagaucucagugg

SEQ ID NO: 3157846 - RNA, 15 nt, Human
auuauauuuacaaau

SEQ ID NO: 3157847 - RNA, 18 nt, Human
auuauuuuauguugcaua

SEQ ID NO: 3157848 - RNA, 16 nt, Human
auuauuuuauguugca

SEQ ID NO: 3157849 - RNA, 14 nt, Human
auuauuuuaaaaga

SEQ ID NO: 3157850 - RNA, 13 nt, Human
auuauuuuaaaag

SEQ ID NO: 3157851 - RNA, 16 nt, Human
auuauauuuacaaaug

SEQ ID NO: 3157852 - RNA, 14 nt, Human
auucagcucaugga

SEQ ID NO: 3157853 - RNA, 11 nt, Human
uuuuaagaaau

SEQ ID NO: 3157854 - RNA, 16 nt, Human
uuuuaaguaaggaauu

SEQ ID NO: 3157855 - RNA, 17 nt, Human
uuuguaaauuuauguga

SEQ ID NO: 3157856 - RNA, 19 nt, Human
uuuguagcacugacagauu

SEQ ID NO: 3157857 - RNA, 17 nt, Human
uuuguagcacugacaga

SEQ ID NO: 3157858 - RNA, 19 nt, Human
uuugcuaugagcuggggau

SEQ ID NO: 3157859 - RNA, 23 nt, Human
uuugcucagugucuggcugcaga

SEQ ID NO: 3157860 - RNA, 14 nt, Human
augucaguaugugg

SEQ ID NO: 3157861 - RNA, 13 nt, Human
augucaguaugug

SEQ ID NO: 3157862 - RNA, 17 nt, Human
auguaugcuucauacag

SEQ ID NO: 3157863 - RNA, 16 nt, Human
auguaugcuucauaca

SEQ ID NO: 3157864 - RNA, 20 nt, Human
auguaugcuucauacaggga

SEQ ID NO: 3157865 - RNA, 19 nt, Human
uuuuaguugcaacuuugua

SEQ ID NO: 3157866 - RNA, 16 nt, Human
uuuucuauaauuuaaa

SEQ ID NO: 3157867 - RNA, 21 nt, Human
uuuuauucagcucauggacuu

SEQ ID NO: 3157868 - RNA, 18 nt, Human
uuuuaugugaaacauguu

SEQ ID NO: 3157869 - RNA, 19 nt, Human
uuuuaugugaaacauguuu

SEQ ID NO: 3157870 - RNA, 21 nt, Human
auuaacaugaauauuuagugu

SEQ ID NO: 3157871 - RNA, 20 nt, Human
auuaaaaaaucaguuguaca

SEQ ID NO: 3157872 - RNA, 19 nt, Human
auguuuacagaggacagua

SEQ ID NO: 3157873 - RNA, 17 nt, Human
auguuuacagaggacag

SEQ ID NO: 3157874 - RNA, 15 nt, Human
auguuuacagaggac

SEQ ID NO: 3157875 - RNA, 15 nt, Human
auguugugauguauu

SEQ ID NO: 3157876 - RNA, 20 nt, Human
auuuggagacacaacuauuu

SEQ ID NO: 3157877 - RNA, 22 nt, Human
auuugaauguaugcuucauaca

SEQ ID NO: 3157878 - RNA, 20 nt, Human
auuugaauguaugcuucaua

SEQ ID NO: 3157879 - RNA, 21 nt, Human
auuugaauguaugcuucauac

SEQ ID NO: 3157880 - RNA, 17 nt, Human
auuugaauguaugcuuc

SEQ ID NO: 3157881 - RNA, 18 nt, Human
auuugaauguaugcuuca

SEQ ID NO: 3157882 - RNA, 22 nt, Human
auuuuacuguacagacagaaaa

SEQ ID NO: 3157883 - RNA, 20 nt, Human
auuuuacuguacagacagaa

SEQ ID NO: 3157884 - RNA, 17 nt, Human
auuuuaccuuugacaaa

SEQ ID NO: 3157885 - RNA, 14 nt, Human
auuuuauguugcau

SEQ ID NO: 3157886 - RNA, 21 nt, Human
auuuuauguugcauagaauaa

SEQ ID NO: 3157887 - RNA, 18 nt, Human
auuuuauguugcauagaa

SEQ ID NO: 3157888 - RNA, 14 nt, Human
auuguauuacaaau

SEQ ID NO: 3157889 - RNA, 15 nt, Human
auugugaaauuauuc

SEQ ID NO: 3157890 - RNA, 21 nt, Human
auugcuaaucaccaaaggcuc

SEQ ID NO: 3157891 - RNA, 21 nt, Human
auuggcucuugaacugagcuu

SEQ ID NO: 3157892 - RNA, 16 nt, Human
auuuacaaaugggaaa

SEQ ID NO: 3157893 - RNA, 20 nt, Human
auuuaaaauugugauguguc

SEQ ID NO: 3157894 - RNA, 19 nt, Human
auuuaaaauugugaugugu

SEQ ID NO: 3157895 - RNA, 18 nt, Human
auuuaaaggcccuaucug

SEQ ID NO: 3157896 - RNA, 20 nt, Human
auuuaaaggcccuaucuguu

SEQ ID NO: 3157897 - RNA, 21 nt, Human
auuuaaaggcccuaucuguuu

SEQ ID NO: 3157898 - RNA, 23 nt, Human
auugcaggagucccugccaucau

SEQ ID NO: 3157899 - RNA, 13 nt, Human
cacaggaaaccag

SEQ ID NO: 3157900 - RNA, 22 nt, Human
caaaauaauuuuaagaaaucaa

SEQ ID NO: 3157901 - RNA, 18 nt, Human
caaaauaauuuuaagaaa

SEQ ID NO: 3157902 - RNA, 23 nt, Human
caaauauauucagccuggcuuca

SEQ ID NO: 3157903 - RNA, 18 nt, Human
caaauaaaaauauugugu

SEQ ID NO: 3157904 - RNA, 16 nt, Human
caaauaaaaauauugu

SEQ ID NO: 3157905 - RNA, 15 nt, Human
caaauaaaaauauug

SEQ ID NO: 3157906 - RNA, 16 nt, Human
caaagagagaaaauaa

SEQ ID NO: 3157907 - RNA, 15 nt, Human
caaagaaauuaugug

SEQ ID NO: 3157908 - RNA, 19 nt, Human
caaagagagaaaauaaaga

SEQ ID NO: 3157909 - RNA, 19 nt, Human
caauaauaaauauuuuugc

SEQ ID NO: 3157910 - RNA, 18 nt, Human
caaggaaaaaauaacaau

SEQ ID NO: 3157911 - RNA, 17 nt, Human
caagccuuggcucuacc

SEQ ID NO: 3157912 - RNA, 12 nt, Human
caagccugguca

SEQ ID NO: 3157913 - RNA, 15 nt, Human
caagccuggucagcc

SEQ ID NO: 3157914 - RNA, 16 nt, Human
caagccuggucagccc

SEQ ID NO: 3157915 - RNA, 17 nt, Human
caagccuggucagccca

SEQ ID NO: 3157916 - RNA, 18 nt, Human
caagccuggucagcccaa

SEQ ID NO: 3157917 - RNA, 13 nt, Human
ccuaaacauauga

SEQ ID NO: 3157918 - RNA, 15 nt, Human
ccuacagcccaccug

SEQ ID NO: 3157919 - RNA, 22 nt, Human
ccuagguauaauucacauugua

SEQ ID NO: 3157920 - RNA, 13 nt, Human
cccuggugguuca

SEQ ID NO: 3157921 - RNA, 17 nt, Human
ccggcuuuguggcacug

SEQ ID NO: 3157922 - RNA, 19 nt, Human
ccggcuuuguggcacuggg

SEQ ID NO: 3157923 - RNA, 16 nt, Human
ccggcuuuguggcacu

SEQ ID NO: 3157924 - RNA, 13 nt, Human
ccgggagcucagg

SEQ ID NO: 3157925 - RNA, 15 nt, Human
ccgggagcucaggaa

SEQ ID NO: 3157926 - RNA, 19 nt, Human
ccggggccugggcaggagg

SEQ ID NO: 3157927 - RNA, 15 nt, Human
ccggggccugggcag

SEQ ID NO: 3157928 - RNA, 22 nt, Human
ccuaucuguuuacaguguuccg

SEQ ID NO: 3157929 - RNA, 14 nt, Human
ccucacacucaccc

SEQ ID NO: 3157930 - RNA, 18 nt, Human
ccucagccccgcguggaa

SEQ ID NO: 3157931 - RNA, 17 nt, Human
ccuccauccuacccccu

SEQ ID NO: 3157932 - RNA, 22 nt, Human
ccuccauccuacccccugugcc

SEQ ID NO: 3157933 - RNA, 23 nt, Human
ccuccauccuacccccugugccu

SEQ ID NO: 3157934 - RNA, 13 nt, Human
ccuccacucuccu

SEQ ID NO: 3157935 - RNA, 14 nt, Human
ccucuacugggagc

SEQ ID NO: 3157936 - RNA, 17 nt, Human
cccucuacugggagccu

SEQ ID NO: 3157937 - RNA, 20 nt, Human
cccucuacugggagccuacc

SEQ ID NO: 3157938 - RNA, 20 nt, Human
cccugccaucauguuuacag

SEQ ID NO: 3157939 - RNA, 11 nt, Human
cccugccucuc

SEQ ID NO: 3157940 - RNA, 18 nt, Human
cccugccucucugcaggu

SEQ ID NO: 3157941 - RNA, 12 nt, Human
cccugccuggac

SEQ ID NO: 3157942 - RNA, 13 nt, Human
cccugccuggacc

SEQ ID NO: 3157943 - RNA, 18 nt, Human
cccugccuggaccagccu

SEQ ID NO: 3157944 - RNA, 16 nt, Human
cccugccucucugcag

SEQ ID NO: 3157945 - RNA, 21 nt, Human
cccugccucucugcagguccc

SEQ ID NO: 3157946 - RNA, 22 nt, Human
cccugccucucugcaggucccu

SEQ ID NO: 3157947 - RNA, 21 nt, Human
cccuggacugugugcucagga

SEQ ID NO: 3157948 - RNA, 15 nt, Human
cccugggaggcucug

SEQ ID NO: 3157949 - RNA, 16 nt, Human
cccugggaggcucugg

SEQ ID NO: 3157950 - RNA, 17 nt, Human
cccugggaggcucugga

SEQ ID NO: 3157951 - RNA, 18 nt, Human
cccugggaggcucuggag

SEQ ID NO: 3157952 - RNA, 21 nt, Human
ccccagcuggggccaggcugg

SEQ ID NO: 3157953 - RNA, 22 nt, Human
ccccagcuggggccaggcuggg

SEQ ID NO: 3157954 - RNA, 23 nt, Human
ccccacaggagguggucugggac

SEQ ID NO: 3157955 - RNA, 23 nt, Human
ccccuggugguucacucuuggag

SEQ ID NO: 3157956 - RNA, 12 nt, Human
cccuaauaaagc

SEQ ID NO: 3157957 - RNA, 13 nt, Human
cccuaauaaagcu

SEQ ID NO: 3157958 - RNA, 14 nt, Human
cccuaauaaagcug

SEQ ID NO: 3157959 - RNA, 15 nt, Human
cccuaauaaagcugu

SEQ ID NO: 3157960 - RNA, 18 nt, Human
cccuaauaaagcugugug

SEQ ID NO: 3157961 - RNA, 23 nt, Human
cccucccucuacugggagccuac

SEQ ID NO: 3157962 - RNA, 14 nt, Human
cccucaucuuucuu

SEQ ID NO: 3157963 - RNA, 19 nt, Human
cccucauuggcucuugaac

SEQ ID NO: 3157964 - RNA, 18 nt, Human
cccagaaugccuccugca

SEQ ID NO: 3157965 - RNA, 21 nt, Human
cccagcuaugguucucucgca

SEQ ID NO: 3157966 - RNA, 16 nt, Human
cccaggaccccugagu

SEQ ID NO: 3157967 - RNA, 22 nt, Human
ccaucauguuuacagaggacag

SEQ ID NO: 3157968 - RNA, 20 nt, Human
ccaucauguuuacagaggac

SEQ ID NO: 3157969 - RNA, 12 nt, Human
ccaagagccuga

SEQ ID NO: 3157970 - RNA, 12 nt, Human
ccaagaggcugc

SEQ ID NO: 3157971 - RNA, 13 nt, Human
ccaagaggcugca

SEQ ID NO: 3157972 - RNA, 16 nt, Human
ccaagagccugagagu

SEQ ID NO: 3157973 - RNA, 20 nt, Human
ccaagguggguagaucacga

SEQ ID NO: 3157974 - RNA, 20 nt, Human
cauguuucuuuguaaugaaa

SEQ ID NO: 3157975 - RNA, 21 nt, Human
cauguuucuuuguaaugaaaa

SEQ ID NO: 3157976 - RNA, 22 nt, Human
cauguuucuuuguaaugaaaac

SEQ ID NO: 3157977 - RNA, 20 nt, Human
cauggugacuuuugaaaaga

SEQ ID NO: 3157978 - RNA, 15 nt, Human
caugugaaaucauuc

SEQ ID NO: 3157979 - RNA, 16 nt, Human
caugugaaaucauuca

SEQ ID NO: 3157980 - RNA, 17 nt, Human
caugugaaaucauucau

SEQ ID NO: 3157981 - RNA, 22 nt, Human
cauuaccucagugagaagccag

SEQ ID NO: 3157982 - RNA, 21 nt, Human
cauuaccucagugagaagcca

SEQ ID NO: 3157983 - RNA, 22 nt, Human
cauggacuucugccagcauaau

SEQ ID NO: 3157984 - RNA, 19 nt, Human
cauggggcugauuguauuu

SEQ ID NO: 3157985 - RNA, 21 nt, Human
cauggagauagccccacagga

SEQ ID NO: 3157986 - RNA, 19 nt, Human
caugccacuacacuccagc

SEQ ID NO: 3157987 - RNA, 15 nt, Human
cauaaaaacaacuuu

SEQ ID NO: 3157988 - RNA, 17 nt, Human
cauaaaaacaacuuuau

SEQ ID NO: 3157989 - RNA, 20 nt, Human
cauaaaaacaacuuuauacc

SEQ ID NO: 3157990 - RNA, 21 nt, Human
cauaaaaacaacuuuauaccc

SEQ ID NO: 3157991 - RNA, 23 nt, Human
cauaaaaacaacuuuauacccag

SEQ ID NO: 3157992 - RNA, 23 nt, Human
cauaaaaagccugcaauuucaua

SEQ ID NO: 3157993 - RNA, 14 nt, Human
cauaaagcaggcag

SEQ ID NO: 3157994 - RNA, 16 nt, Human
cauaaagcaggcagaa

SEQ ID NO: 3157995 - RNA, 12 nt, Human
cauacauauuuu

SEQ ID NO: 3157996 - RNA, 19 nt, Human
cauacauauuuuuguagca

SEQ ID NO: 3157997 - RNA, 15 nt, Human
cauacauuguacgaa

SEQ ID NO: 3157998 - RNA, 18 nt, Human
cauaaucacaacccuuca

SEQ ID NO: 3157999 - RNA, 11 nt, Human
cauacauauuu

SEQ ID NO: 3158000 - RNA, 15 nt, Human
cauaauacuugcuuu

SEQ ID NO: 3158001 - RNA, 17 nt, Human
cauaaguaauucaagaa

SEQ ID NO: 3158002 - RNA, 16 nt, Human
cauaaguaauucaaga

SEQ ID NO: 3158003 - RNA, 22 nt, Human
cauaaguaauucaagaaaacaa

SEQ ID NO: 3158004 - RNA, 18 nt, Human
cauaaguaauucaagaaa

SEQ ID NO: 3158005 - RNA, 15 nt, Human
cauaccuggcccugu

SEQ ID NO: 3158006 - RNA, 16 nt, Human
caguucucuucacuca

SEQ ID NO: 3158007 - RNA, 22 nt, Human
caguucggugagcuacaaaugc

SEQ ID NO: 3158008 - RNA, 18 nt, Human
caguguuccgugguuaaa

SEQ ID NO: 3158009 - RNA, 14 nt, Human
cagugugucuaaau

SEQ ID NO: 3158010 - RNA, 23 nt, Human
cagugugucuaaauuugaauguu

SEQ ID NO: 3158011 - RNA, 17 nt, Human
cagugucuggcugcaga

SEQ ID NO: 3158012 - RNA, 19 nt, Human
cagugucuggcugcagagc

SEQ ID NO: 3158013 - RNA, 16 nt, Human
caguggcuggaucugu

SEQ ID NO: 3158014 - RNA, 20 nt, Human
caguggcuggaucugugagg

SEQ ID NO: 3158015 - RNA, 18 nt, Human
caguggcuggaucuguga

SEQ ID NO: 3158016 - RNA, 11 nt, Human
cagugguuaag

SEQ ID NO: 3158017 - RNA, 22 nt, Human
caucaagucuuucacauuuaaa

SEQ ID NO: 3158018 - RNA, 21 nt, Human
cauauuuuucacauaucuagu

SEQ ID NO: 3158019 - RNA, 14 nt, Human
cauauuuuucacau

SEQ ID NO: 3158020 - RNA, 18 nt, Human
cauauuuuucacauaucu

SEQ ID NO: 3158021 - RNA, 12 nt, Human
cauauuuauaaa

SEQ ID NO: 3158022 - RNA, 17 nt, Human
cauauuuauaaaaauaa

SEQ ID NO: 3158023 - RNA, 21 nt, Human
cauaugauguacauguacuga

SEQ ID NO: 3158024 - RNA, 15 nt, Human
cauaugauguacaug

SEQ ID NO: 3158025 - RNA, 17 nt, Human
cauaugauguacaugua

SEQ ID NO: 3158026 - RNA, 14 nt, Human
cauagaauaaaauu

SEQ ID NO: 3158027 - RNA, 20 nt, Human
cauagaauaaaauuuuuaau

SEQ ID NO: 3158028 - RNA, 21 nt, Human
cauccagagucccugccugga

SEQ ID NO: 3158029 - RNA, 18 nt, Human
caucuagguaaauuacag

SEQ ID NO: 3158030 - RNA, 17 nt, Human
caucuagguaaauuaca

SEQ ID NO: 3158031 - RNA, 12 nt, Human
caucuaggauuu

SEQ ID NO: 3158032 - RNA, 19 nt, Human
cauccuacccccugugccu

SEQ ID NO: 3158033 - RNA, 17 nt, Human
gcccgggagcucaggaa

SEQ ID NO: 3158034 - RNA, 19 nt, Human
gcccgggagcucaggaacc

SEQ ID NO: 3158035 - RNA, 15 nt, Human
gcccgggagcucagg

SEQ ID NO: 3158036 - RNA, 16 nt, Human
gccccugagaucucug

SEQ ID NO: 3158037 - RNA, 17 nt, Human
gcccagaaugaggcugc

SEQ ID NO: 3158038 - RNA, 16 nt, Human
gcccagaaugaggcug

SEQ ID NO: 3158039 - RNA, 21 nt, Human
gccaucauguuuacagaggac

SEQ ID NO: 3158040 - RNA, 17 nt, Human
gccaucauguuuacaga

SEQ ID NO: 3158041 - RNA, 16 nt, Human
gccagucccugaggca

SEQ ID NO: 3158042 - RNA, 22 nt, Human
gccagucccugaggcagguccc

SEQ ID NO: 3158043 - RNA, 23 nt, Human
gccaggcugggucgcccuggacu

SEQ ID NO: 3158044 - RNA, 17 nt, Human
gccaggcugggucgccc

SEQ ID NO: 3158045 - RNA, 19 nt, Human
gccucucauuccagaggaa

SEQ ID NO: 3158046 - RNA, 20 nt, Human
gccuccuacagcccaccugg

SEQ ID NO: 3158047 - RNA, 17 nt, Human
gccugacccucaucuuu

SEQ ID NO: 3158048 - RNA, 21 nt, Human
gccucuccacucaugugacuc

SEQ ID NO: 3158049 - RNA, 20 nt, Human
gccucucauuccagaggaag

SEQ ID NO: 3158050 - RNA, 24 nt, Human
gccucuccacucaugugacucuuu

SEQ ID NO: 3158051 - RNA, 17 nt, Human
gcuaagaauauuugaau

SEQ ID NO: 3158052 - RNA, 16 nt, Human
gcuaagaauauuugaa

SEQ ID NO: 3158053 - RNA, 18 nt, Human
gcgcggcugggaggaggg

SEQ ID NO: 3158054 - RNA, 12 nt, Human
gcgcggcuggga

SEQ ID NO: 3158055 - RNA, 12 nt, Human
gccuguuuaaga

SEQ ID NO: 3158056 - RNA, 13 nt, Human
gccuguuuaagag

SEQ ID NO: 3158057 - RNA, 15 nt, Human
gccugccacucaggc

SEQ ID NO: 3158058 - RNA, 23 nt, Human
gccugccacucaggcccaaagcc

SEQ ID NO: 3158059 - RNA, 13 nt, Human
gccuggugcagug

SEQ ID NO: 3158060 - RNA, 17 nt, Human
gccugguccucacacuc

SEQ ID NO: 3158061 - RNA, 18 nt, Human
gccuuuggacuugucccg

SEQ ID NO: 3158062 - RNA, 13 nt, Human
gcauagaaguaaa

SEQ ID NO: 3158063 - RNA, 17 nt, Human
gcauagguuuaauaauu

SEQ ID NO: 3158064 - RNA, 14 nt, Human
gcauauuuuucaca

SEQ ID NO: 3158065 - RNA, 15 nt, Human
gcauauuuuucacau

SEQ ID NO: 3158066 - RNA, 16 nt, Human
gcauauuuuucacaua

SEQ ID NO: 3158067 - RNA, 19 nt, Human
gcauauuuuucacauaucu

SEQ ID NO: 3158068 - RNA, 20 nt, Human
gcauauuuuucacauaucua

SEQ ID NO: 3158069 - RNA, 19 nt, Human
gcauauuuauaaaaauaaa

SEQ ID NO: 3158070 - RNA, 13 nt, Human
gcagguccccaga

SEQ ID NO: 3158071 - RNA, 19 nt, Human
gcaggggccgggggcaguc

SEQ ID NO: 3158072 - RNA, 20 nt, Human
gcaggggccgggggcagucu

SEQ ID NO: 3158073 - RNA, 18 nt, Human
gcauggagauagccccac

SEQ ID NO: 3158074 - RNA, 16 nt, Human
gcaucugaaaauugau

SEQ ID NO: 3158075 - RNA, 18 nt, Human
gcauuauauuuguaaauu

SEQ ID NO: 3158076 - RNA, 17 nt, Human
gcaaaauugauguguuu

SEQ ID NO: 3158077 - RNA, 20 nt, Human
gcaaauccuugugggaaaag

SEQ ID NO: 3158078 - RNA, 22 nt, Human
gcaaauccuugugggaaaagaa

SEQ ID NO: 3158079 - RNA, 20 nt, Human
gauuuggggcucagaguggg

SEQ ID NO: 3158080 - RNA, 23 nt, Human
gauuugcucagugucuggcugca

SEQ ID NO: 3158081 - RNA, 22 nt, Human
gauuuggucaacacuaacauga

SEQ ID NO: 3158082 - RNA, 17 nt, Human
gauuccagguggcauca

SEQ ID NO: 3158083 - RNA, 20 nt, Human
gauggcaaagaaggagagca

SEQ ID NO: 3158084 - RNA, 17 nt, Human
gaugacaacuucccagu

SEQ ID NO: 3158085 - RNA, 17 nt, Human
gaugaaaauauuuaaag

SEQ ID NO: 3158086 - RNA, 15 nt, Human
gaugaaaauauuuaa

SEQ ID NO: 3158087 - RNA, 16 nt, Human
gaugaaaauauuuaaa

SEQ ID NO: 3158088 - RNA, 14 nt, Human
gaugaaaauauuua

SEQ ID NO: 3158089 - RNA, 21 nt, Human
gaucugugaggggcucucuca

SEQ ID NO: 3158090 - RNA, 22 nt, Human
gauaaauauuauauuauauaua

SEQ ID NO: 3158091 - RNA, 15 nt, Human
gauaaauauuauauu

SEQ ID NO: 3158092 - RNA, 14 nt, Human
gauaaguucauaca

SEQ ID NO: 3158093 - RNA, 16 nt, Human
gauaaguucauacauu

SEQ ID NO: 3158094 - RNA, 12 nt, Human
gauaaguucaua

SEQ ID NO: 3158095 - RNA, 19 nt, Human
gauaaaguugguaaaccuu

SEQ ID NO: 3158096 - RNA, 23 nt, Human
gauagauaggucagugcaaauac

SEQ ID NO: 3158097 - RNA, 17 nt, Human
gauaggucagugcaaau

SEQ ID NO: 3158098 - RNA, 13 nt, Human
gauagaugugugg

SEQ ID NO: 3158099 - RNA, 17 nt, Human
gaucccaugagcuccuu

SEQ ID NO: 3158100 - RNA, 15 nt, Human
gaucccaugagcucc

SEQ ID NO: 3158101 - RNA, 14 nt, Human
gaucauuaucagcc

SEQ ID NO: 3158102 - RNA, 14 nt, Human
gaucauugugaaau

SEQ ID NO: 3158103 - RNA, 20 nt, Human
gaucauugugaaauuauuca

SEQ ID NO: 3158104 - RNA, 14 nt, Human
gauagucuuucagu

SEQ ID NO: 3158105 - RNA, 15 nt, Human
gauaguaacaaugaa

SEQ ID NO: 3158106 - RNA, 22 nt, Human
gauagucuuucaguuaaggaga

SEQ ID NO: 3158107 - RNA, 22 nt, Human
gagcuugaaacccguggcgcuu

SEQ ID NO: 3158108 - RNA, 20 nt, Human
gagcuccuuaaggcucuuuu

SEQ ID NO: 3158109 - RNA, 21 nt, Human
gagcucaggaaccgaggcagg

SEQ ID NO: 3158110 - RNA, 20 nt, Human
gagcucaggaaccgaggcag

SEQ ID NO: 3158111 - RNA, 21 nt, Human
gagccugacccucaucuuucu

SEQ ID NO: 3158112 - RNA, 15 nt, Human
gagccuacccacccc

SEQ ID NO: 3158113 - RNA, 17 nt, Human
gagccuacccaccccca

SEQ ID NO: 3158114 - RNA, 18 nt, Human
gagcccacuguacuugcu

SEQ ID NO: 3158115 - RNA, 21 nt, Human
gagcccacuguacuugcucuu

SEQ ID NO: 3158116 - RNA, 14 nt, Human
gagaaauuuauaaa

SEQ ID NO: 3158117 - RNA, 18 nt, Human
gacuugucccgggacacc

SEQ ID NO: 3158118 - RNA, 16 nt, Human
gagacagccaacuaug

SEQ ID NO: 3158119 - RNA, 22 nt, Human
gagaagccagcuuuccucauca

SEQ ID NO: 3158120 - RNA, 17 nt, Human
gagauacagaauuuuau

SEQ ID NO: 3158121 - RNA, 15 nt, Human
gagagugagguggaa

SEQ ID NO: 3158122 - RNA, 13 nt, Human
gagagaggccauu

SEQ ID NO: 3158123 - RNA, 21 nt, Human
gagagaggccauucuuuccca

SEQ ID NO: 3158124 - RNA, 22 nt, Human
gacagccaacuauggccugugg

SEQ ID NO: 3158125 - RNA, 19 nt, Human
gacagccaacuauggccug

SEQ ID NO: 3158126 - RNA, 15 nt, Human
gacaccuaggcuagg

SEQ ID NO: 3158127 - RNA, 16 nt, Human
gacaccuaggcuaggg

SEQ ID NO: 3158128 - RNA, 20 nt, Human
gacaccuaggcuaggguggg

SEQ ID NO: 3158129 - RNA, 23 nt, Human
gaccugauuucugagcauuuaau

SEQ ID NO: 3158130 - RNA, 17 nt, Human
gaccuuuccugaggaag

SEQ ID NO: 3158131 - RNA, 17 nt, Human
cuugaacugagcuugga

SEQ ID NO: 3158132 - RNA, 19 nt, Human
cuugaacugagcuuggaag

SEQ ID NO: 3158133 - RNA, 17 nt, Human
cuugccaaauauaaaua

SEQ ID NO: 3158134 - RNA, 20 nt, Human
cuugcugcccugugcuccuc

SEQ ID NO: 3158135 - RNA, 15 nt, Human
cuugcuuuuaaaauc

SEQ ID NO: 3158136 - RNA, 19 nt, Human
cuuggagccugcagagcug

SEQ ID NO: 3158137 - RNA, 20 nt, Human
cuuggagccugcagagcugc

SEQ ID NO: 3158138 - RNA, 15 nt, Human
cuuggagccugcaga

SEQ ID NO: 3158139 - RNA, 16 nt, Human
cuuggagccugcagag

SEQ ID NO: 3158140 - RNA, 17 nt, Human
cuuggagccugcagagc

SEQ ID NO: 3158141 - RNA, 18 nt, Human
cuuggagccugcagagcu

SEQ ID NO: 3158142 - RNA, 13 nt, Human
cuuggagccugca

SEQ ID NO: 3158143 - RNA, 18 nt, Human
cuuguauuauguguguuu

SEQ ID NO: 3158144 - RNA, 18 nt, Human
cuugucacgccagacuuc

SEQ ID NO: 3158145 - RNA, 23 nt, Human
cuugucacgccagacuucccacg

SEQ ID NO: 3158146 - RNA, 13 nt, Human
cuuguauuaugug

SEQ ID NO: 3158147 - RNA, 20 nt, Human
cuuggggaguuuaggguggg

SEQ ID NO: 3158148 - RNA, 21 nt, Human
cuuggggaguuuagggugggg

SEQ ID NO: 3158149 - RNA, 18 nt, Human
cuuguaaagacuguagaa

SEQ ID NO: 3158150 - RNA, 19 nt, Human
cuuuuuuaucaugugaaau

SEQ ID NO: 3158151 - RNA, 16 nt, Human
cuuuucuuucuaccaa

SEQ ID NO: 3158152 - RNA, 12 nt, Human
cuuuggacuugu

SEQ ID NO: 3158153 - RNA, 16 nt, Human
cuuuggaacaagaugg

SEQ ID NO: 3158154 - RNA, 21 nt, Human
cuuuauuuucuauaauuuaaa

SEQ ID NO: 3158155 - RNA, 19 nt, Human
cuuuauuuuguguuuagga

SEQ ID NO: 3158156 - RNA, 21 nt, Human
cuuuccacuccuccuagccac

SEQ ID NO: 3158157 - RNA, 18 nt, Human
cuuuccacuccuccuagc

SEQ ID NO: 3158158 - RNA, 23 nt, Human
cuuuccaaagccaaugugaacag

SEQ ID NO: 3158159 - RNA, 20 nt, Human
cuuuccaaagccaaugugaa

SEQ ID NO: 3158160 - RNA, 19 nt, Human
cuuucuuccaaacaggcuc

SEQ ID NO: 3158161 - RNA, 13 nt, Human
cuuucuuccaaac

SEQ ID NO: 3158162 - RNA, 23 nt, Human
gaaaguuauugauaaguucauac

SEQ ID NO: 3158163 - RNA, 19 nt, Human
gaaacuaggugcauauuua

SEQ ID NO: 3158164 - RNA, 20 nt, Human
gaaacuaggugcauauuuau

SEQ ID NO: 3158165 - RNA, 14 nt, Human
gaacaucccuccug

SEQ ID NO: 3158166 - RNA, 20 nt, Human
gaaccaaagcgaauuuuaaa

SEQ ID NO: 3158167 - RNA, 23 nt, Human
gaaccaaagcgaauuuuaaaaga

SEQ ID NO: 3158168 - RNA, 11 nt, Human
gaaccaaagcg

SEQ ID NO: 3158169 - RNA, 17 nt, Human
gaaauuauauaaguauu

SEQ ID NO: 3158170 - RNA, 23 nt, Human
gaaauuauauaaguauucuaaau

SEQ ID NO: 3158171 - RNA, 23 nt, Human
gaaauuaguacuccccuccuuga

SEQ ID NO: 3158172 - RNA, 21 nt, Human
gaaggugaggagcuugaaacc

SEQ ID NO: 3158173 - RNA, 21 nt, Human
gaaggaucccaugagcuccuu

SEQ ID NO: 3158174 - RNA, 23 nt, Human
gaaggaaccaaagcgaauuuuaa

SEQ ID NO: 3158175 - RNA, 22 nt, Human
gaacuuguaaaggaauuuaaaa

SEQ ID NO: 3158176 - RNA, 20 nt, Human
gaagaguauuuuugacagaa

SEQ ID NO: 3158177 - RNA, 13 nt, Human
gaagaaguguguc

SEQ ID NO: 3158178 - RNA, 17 nt, Human
gaagauugagauguguu

SEQ ID NO: 3158179 - RNA, 22 nt, Human
gaagauugagauguguucacaa

SEQ ID NO: 3158180 - RNA, 15 nt, Human
cugcucugugcccac

SEQ ID NO: 3158181 - RNA, 14 nt, Human
cugcugccugcuuu

SEQ ID NO: 3158182 - RNA, 23 nt, Human
cugcugccugcuuuuuauggccu

SEQ ID NO: 3158183 - RNA, 22 nt, Human
cugccugcuuuuuauggccugu

SEQ ID NO: 3158184 - RNA, 22 nt, Human
cugcgggcuggguguggucucc

SEQ ID NO: 3158185 - RNA, 23 nt, Human
cugcagagcugcgggcugggugu

SEQ ID NO: 3158186 - RNA, 23 nt, Human
cugcaggucccuaauaaagcugu

SEQ ID NO: 3158187 - RNA, 19 nt, Human
cugcaggucccuaauaaag

SEQ ID NO: 3158188 - RNA, 20 nt, Human
cugcaggucccuaauaaagc

SEQ ID NO: 3158189 - RNA, 21 nt, Human
cugcaggucccuaauaaagcu

SEQ ID NO: 3158190 - RNA, 22 nt, Human
cugcaggucccuaauaaagcug

SEQ ID NO: 3158191 - RNA, 11 nt, Human
cugcagguccc

SEQ ID NO: 3158192 - RNA, 12 nt, Human
cugcaggucccu

SEQ ID NO: 3158193 - RNA, 13 nt, Human
cugcaggucccua

SEQ ID NO: 3158194 - RNA, 14 nt, Human
cugcaggucccuaa

SEQ ID NO: 3158195 - RNA, 15 nt, Human
cugcaggucccuaau

SEQ ID NO: 3158196 - RNA, 16 nt, Human
cugcaggucccuaaua

SEQ ID NO: 3158197 - RNA, 17 nt, Human
cugcaggucccuaauaa

SEQ ID NO: 3158198 - RNA, 18 nt, Human
cugcaggucccuaauaaa

SEQ ID NO: 3158199 - RNA, 19 nt, Human
cugcccgggagcucaggaa

SEQ ID NO: 3158200 - RNA, 18 nt, Human
cugcccgggagcucagga

SEQ ID NO: 3158201 - RNA, 11 nt, Human
cugccaggaga

SEQ ID NO: 3158202 - RNA, 19 nt, Human
cugccagacccccuggaga

SEQ ID NO: 3158203 - RNA, 17 nt, Human
cugccagacccccugga

SEQ ID NO: 3158204 - RNA, 18 nt, Human
cuggcuguggccuaaccu

SEQ ID NO: 3158205 - RNA, 19 nt, Human
cugggaggagggcaggcau

SEQ ID NO: 3158206 - RNA, 19 nt, Human
cugggagccuacccacccc

SEQ ID NO: 3158207 - RNA, 22 nt, Human
cugggagccuacccacccccag

SEQ ID NO: 3158208 - RNA, 16 nt, Human
cugggagccuacccac

SEQ ID NO: 3158209 - RNA, 17 nt, Human
cugggaggcucuggagc

SEQ ID NO: 3158210 - RNA, 18 nt, Human
cugggaggcucuggagcc

SEQ ID NO: 3158211 - RNA, 20 nt, Human
cugggaggcucuggagccca

SEQ ID NO: 3158212 - RNA, 21 nt, Human
cugggaggcucuggagcccac

SEQ ID NO: 3158213 - RNA, 16 nt, Human
cuggcacagccuggcu

SEQ ID NO: 3158214 - RNA, 21 nt, Human
cuggcacagccuggcuguggc

SEQ ID NO: 3158215 - RNA, 15 nt, Human
cuggcacagccuggc

SEQ ID NO: 3158216 - RNA, 23 nt, Human
cuggcacagccuggcuguggccu

SEQ ID NO: 3158217 - RNA, 20 nt, Human
cuggaagugcuaauuuugaa

SEQ ID NO: 3158218 - RNA, 18 nt, Human
cuguaaggcaaucauggu

SEQ ID NO: 3158219 - RNA, 22 nt, Human
cugggucgcccuggacugugug

SEQ ID NO: 3158220 - RNA, 17 nt, Human
cugggucgcccuggacu

SEQ ID NO: 3158221 - RNA, 18 nt, Human
cugggucgcccuggacug

SEQ ID NO: 3158222 - RNA, 16 nt, Human
cugggucgcccuggac

SEQ ID NO: 3158223 - RNA, 12 nt, Human
cuggucagccca

SEQ ID NO: 3158224 - RNA, 13 nt, Human
cuggucagcccaa

SEQ ID NO: 3158225 - RNA, 14 nt, Human
cuguaccucugccu

SEQ ID NO: 3158226 - RNA, 21 nt, Human
cuccucgagaucccaacacug

SEQ ID NO: 3158227 - RNA, 24 nt, Human
cuccucgagaucccaacacugcca

SEQ ID NO: 3158228 - RNA, 17 nt, Human
cuccucgagaucccaac

SEQ ID NO: 3158229 - RNA, 20 nt, Human
cuccauccuacccccugugc

SEQ ID NO: 3158230 - RNA, 22 nt, Human
cuccauccuacccccugugccu

SEQ ID NO: 3158231 - RNA, 23 nt, Human
cuccauccuacccccugugccuu

SEQ ID NO: 3158232 - RNA, 18 nt, Human
cuccauccuacccccugu

SEQ ID NO: 3158233 - RNA, 20 nt, Human
cucuaccucauaucaguuug

SEQ ID NO: 3158234 - RNA, 18 nt, Human
cucuacugggagccuacc

SEQ ID NO: 3158235 - RNA, 21 nt, Human
cucuacugggagccuacccac

SEQ ID NO: 3158236 - RNA, 21 nt, Human
cucuccugauagucuuucagu

SEQ ID NO: 3158237 - RNA, 18 nt, Human
cucuccugucucccuccu

SEQ ID NO: 3158238 - RNA, 15 nt, Human
cucuccugucucccu

SEQ ID NO: 3158239 - RNA, 17 nt, Human
cucuccugucucccucc

SEQ ID NO: 3158240 - RNA, 22 nt, Human
cucuccacucaugugacucuuu

SEQ ID NO: 3158241 - RNA, 21 nt, Human
cucuccacucaugugacucuu

SEQ ID NO: 3158242 - RNA, 14 nt, Human
cugaggcagguccc

SEQ ID NO: 3158243 - RNA, 17 nt, Human
cugaggcagguccccag

SEQ ID NO: 3158244 - RNA, 18 nt, Human
cugaggcagguccccaga

SEQ ID NO: 3158245 - RNA, 19 nt, Human
cugaggcagguccccagac

SEQ ID NO: 3158246 - RNA, 17 nt, Human
cugaggaucagaguaau

SEQ ID NO: 3158247 - RNA, 16 nt, Human
cugaggcaagagaauu

SEQ ID NO: 3158248 - RNA, 19 nt, Human
cugaggaucagaguaaucc

SEQ ID NO: 3158249 - RNA, 11 nt, Human
cugagaaauuu

SEQ ID NO: 3158250 - RNA, 14 nt, Human
cugagaaauuuaua

SEQ ID NO: 3158251 - RNA, 15 nt, Human
cugacuaugacauaa

SEQ ID NO: 3158252 - RNA, 11 nt, Human
cugacagauuu

SEQ ID NO: 3158253 - RNA, 15 nt, Human
cugacagauuuccau

SEQ ID NO: 3158254 - RNA, 19 nt, Human
cucuggagcccacuguacu

SEQ ID NO: 3158255 - RNA, 22 nt, Human
cucugugcccacccuccacucu

SEQ ID NO: 3158256 - RNA, 23 nt, Human
cucuuggggaguuuagggugggg

SEQ ID NO: 3158257 - RNA, 21 nt, Human
cucuuggggaguuuagggugg

SEQ ID NO: 3158258 - RNA, 16 nt, Human
cgcccuggacugugug

SEQ ID NO: 3158259 - RNA, 15 nt, Human
cggcuggacuuggag

SEQ ID NO: 3158260 - RNA, 17 nt, Human
cggugagcuacaaaugc

SEQ ID NO: 3158261 - RNA, 15 nt, Human
cgggucaucuguacc

SEQ ID NO: 3158262 - RNA, 22 nt, Human
cgggucaucuguaccucugccu

SEQ ID NO: 3158263 - RNA, 19 nt, Human
cggggccugggcaggaggg

SEQ ID NO: 3158264 - RNA, 17 nt, Human
cggggccugggcaggag

SEQ ID NO: 3158265 - RNA, 18 nt, Human
cgggggcagucugagaga

SEQ ID NO: 3158266 - RNA, 21 nt, Human
cgggggcagucugagagaggc

SEQ ID NO: 3158267 - RNA, 17 nt, Human
cgggggcagucugagag

SEQ ID NO: 3158268 - RNA, 17 nt, Human
cgggagccugacccuca

SEQ ID NO: 3158269 - RNA, 12 nt, Human
cggcugggagga

SEQ ID NO: 3158270 - RNA, 23 nt, Human
cguggcuguggcauccagagucc

SEQ ID NO: 3158271 - RNA, 23 nt, Human
cuaaauuugaauguuaagcagau

SEQ ID NO: 3158272 - RNA, 15 nt, Human
cuaacaugauuuggg

SEQ ID NO: 3158273 - RNA, 17 nt, Human
cuaaauauauuuuaaga

SEQ ID NO: 3158274 - RNA, 18 nt, Human
cuaaauauauuuuaagac

SEQ ID NO: 3158275 - RNA, 20 nt, Human
cuaaauauauuuuaagacga

SEQ ID NO: 3158276 - RNA, 16 nt, Human
cguuguccucagcccc

SEQ ID NO: 3158277 - RNA, 18 nt, Human
cuauuuuaauaaacacuc

SEQ ID NO: 3158278 - RNA, 22 nt, Human
cuauuuuaauaaacacucuuga

SEQ ID NO: 3158279 - RNA, 21 nt, Human
cuaugacauaaaaacaacuuu

SEQ ID NO: 3158280 - RNA, 16 nt, Human
cuaguaugaaauuaua

SEQ ID NO: 3158281 - RNA, 17 nt, Human
cuagcagaaaucuagaa

SEQ ID NO: 3158282 - RNA, 20 nt, Human
cuaucuguuuacaguguucc

SEQ ID NO: 3158283 - RNA, 17 nt, Human
cuaucuguuuacagugu

SEQ ID NO: 3158284 - RNA, 21 nt, Human
cuaucuguuuacaguguuccg

SEQ ID NO: 3158285 - RNA, 18 nt, Human
cuaugacauaaaaacaac

SEQ ID NO: 3158286 - RNA, 15 nt, Human
cuacuugagaggcug

SEQ ID NO: 3158287 - RNA, 21 nt, Human
cuacuguaaggcaaucauggu

SEQ ID NO: 3158288 - RNA, 13 nt, Human
cuacccccugugc

SEQ ID NO: 3158289 - RNA, 14 nt, Human
cuacccccugugcc

SEQ ID NO: 3158290 - RNA, 19 nt, Human
cuaauguaauaacugugaa

SEQ ID NO: 3158291 - RNA, 13 nt, Human
cuaauaaagcugu

SEQ ID NO: 3158292 - RNA, 12 nt, Human
cuaauaaagcug

SEQ ID NO: 3158293 - RNA, 18 nt, Human
uuuuuaaagacuuuuaug

SEQ ID NO: 3158294 - RNA, 12 nt, Human
uuuuuaaagacu

SEQ ID NO: 3158295 - RNA, 13 nt, Human
uuuuuaaagacuu

SEQ ID NO: 3158296 - RNA, 18 nt, Human
uuuuguagcacugacaga

SEQ ID NO: 3158297 - RNA, 19 nt, Human
uuuuguagcacugacagau

SEQ ID NO: 3158298 - RNA, 18 nt, Human
uuuucuaaaguaaaaaca

SEQ ID NO: 3158299 - RNA, 20 nt, Human
uuuugaaucucauaauuuau

SEQ ID NO: 3158300 - RNA, 12 nt, Human
uuucuaaaguaa

SEQ ID NO: 3158301 - RNA, 18 nt, Human
uuugaaucaucaagucuu

SEQ ID NO: 3158302 - RNA, 16 nt, Human
uuugaaucucauaauu

SEQ ID NO: 3158303 - RNA, 19 nt, Human
uuugaaucucauaauuuau

SEQ ID NO: 3158304 - RNA, 20 nt, Human
uuugaaucucauaauuuaua

SEQ ID NO: 3158305 - RNA, 21 nt, Human
uuugaaucucauaauuuauac

SEQ ID NO: 3158306 - RNA, 22 nt, Human
uuugaaucucauaauuuauaca

SEQ ID NO: 3158307 - RNA, 20 nt, Human
uuuuaaaagaugcaauguag

SEQ ID NO: 3158308 - RNA, 18 nt, Human
uuuuaaagacuuuuauga

SEQ ID NO: 3158309 - RNA, 15 nt, Human
uuugcaucugaaaau

SEQ ID NO: 3158310 - RNA, 17 nt, Human
uuugaauguaugcuuca

SEQ ID NO: 3158311 - RNA, 22 nt, Human
uuugaauguaugcuucauacag

SEQ ID NO: 3158312 - RNA, 18 nt, Human
gucccuaauaaagcugug

SEQ ID NO: 3158313 - RNA, 20 nt, Human
gucccuaauaaagcugugug

SEQ ID NO: 3158314 - RNA, 16 nt, Human
gucccugaagagaagg

SEQ ID NO: 3158315 - RNA, 18 nt, Human
gucccugaggcagguccc

SEQ ID NO: 3158316 - RNA, 22 nt, Human
gucccugaggcagguccccaga

SEQ ID NO: 3158317 - RNA, 15 nt, Human
gucccuaauaaagcu

SEQ ID NO: 3158318 - RNA, 16 nt, Human
gucccuaauaaagcug

SEQ ID NO: 3158319 - RNA, 17 nt, Human
gucccuaauaaagcugu

SEQ ID NO: 3158320 - RNA, 22 nt, Human
gucagcugggacaccccgacuu

SEQ ID NO: 3158321 - RNA, 13 nt, Human
guaugaaauuaua

SEQ ID NO: 3158322 - RNA, 23 nt, Human
guaugaaauuauauaaguauucu

SEQ ID NO: 3158323 - RNA, 14 nt, Human
guagcacugacaga

SEQ ID NO: 3158324 - RNA, 15 nt, Human
guagcacugacagau

SEQ ID NO: 3158325 - RNA, 17 nt, Human
guauaauucacauugua

SEQ ID NO: 3158326 - RNA, 19 nt, Human
guagugauuuuuaugccac

SEQ ID NO: 3158327 - RNA, 14 nt, Human
guagguugggagaa

SEQ ID NO: 3158328 - RNA, 21 nt, Human
gugccaggauggaaugauggg

SEQ ID NO: 3158329 - RNA, 14 nt, Human
gugccuuuugccau

SEQ ID NO: 3158330 - RNA, 21 nt, Human
gugauuuuuaugccaccugaa

SEQ ID NO: 3158331 - RNA, 22 nt, Human
gugaauucuugaaggaaaauga

SEQ ID NO: 3158332 - RNA, 18 nt, Human
gugaauucuugaaggaaa

SEQ ID NO: 3158333 - RNA, 21 nt, Human
gugaccuuccaagagccugag

SEQ ID NO: 3158334 - RNA, 22 nt, Human
gugaccuuccaagagccugaga

SEQ ID NO: 3158335 - RNA, 21 nt, Human
gugacuauggagcugagcagg

SEQ ID NO: 3158336 - RNA, 18 nt, Human
gugaggagcuugaaaccc

SEQ ID NO: 3158337 - RNA, 19 nt, Human
gugauauaaguguguguuu

SEQ ID NO: 3158338 - RNA, 13 nt, Human
gucugagagaggc

SEQ ID NO: 3158339 - RNA, 14 nt, Human
gucugagagaggcc

SEQ ID NO: 3158340 - RNA, 15 nt, Human
gucugagagaggcca

SEQ ID NO: 3158341 - RNA, 18 nt, Human
gucugagagaggccauuc

SEQ ID NO: 3158342 - RNA, 22 nt, Human
gucuguguguuuaugugugugu

SEQ ID NO: 3158343 - RNA, 21 nt, Human
gucuguguguuuaugugugug

SEQ ID NO: 3158344 - RNA, 11 nt, Human
gucuguguguu

SEQ ID NO: 3158345 - RNA, 20 nt, Human
gucuguguguguguaugugg

SEQ ID NO: 3158346 - RNA, 16 nt, Human
gucuguguguguguau

SEQ ID NO: 3158347 - RNA, 12 nt, Human
gucugugugugu

SEQ ID NO: 3158348 - RNA, 11 nt, Human
gucugugugug

SEQ ID NO: 3158349 - RNA, 17 nt, Human
gucuugguuccagccug

SEQ ID NO: 3158350 - RNA, 19 nt, Human
gucuugguuccagccugcc

SEQ ID NO: 3158351 - RNA, 16 nt, Human
gucuugguuccagccu

SEQ ID NO: 3158352 - RNA, 17 nt, Human
gucucuggaauuugaaa

SEQ ID NO: 3158353 - RNA, 21 nt, Human
gucucuggauuauauuaugaa

SEQ ID NO: 3158354 - RNA, 18 nt, Human
gucgucaaagcugaaaug

SEQ ID NO: 3158355 - RNA, 21 nt, Human
gucuaagauaguaacaaugaa

SEQ ID NO: 3158356 - RNA, 13 nt, Human
gucuaaauuugaa

SEQ ID NO: 3158357 - RNA, 13 nt, Human
gucccugccugga

SEQ ID NO: 3158358 - RNA, 18 nt, Human
guucaauaauaaauauuu

SEQ ID NO: 3158359 - RNA, 17 nt, Human
guucacucuuggagccu

SEQ ID NO: 3158360 - RNA, 18 nt, Human
guucacucuuggagccug

SEQ ID NO: 3158361 - RNA, 19 nt, Human
guucacucuuggagccugc

SEQ ID NO: 3158362 - RNA, 20 nt, Human
guucacucuuggagccugca

SEQ ID NO: 3158363 - RNA, 24 nt, Human
guucacucuuggagccugcagagc

SEQ ID NO: 3158364 - RNA, 16 nt, Human
guuccuagccaccgcc

SEQ ID NO: 3158365 - RNA, 15 nt, Human
guuccagccugccac

SEQ ID NO: 3158366 - RNA, 13 nt, Human
guuccagccugcc

SEQ ID NO: 3158367 - RNA, 14 nt, Human
guuccagccugcca

SEQ ID NO: 3158368 - RNA, 14 nt, Human
guuccagcaccaca

SEQ ID NO: 3158369 - RNA, 14 nt, Human
guugcaacuuugua

SEQ ID NO: 3158370 - RNA, 16 nt, Human
guugcaacuuuguaua

SEQ ID NO: 3158371 - RNA, 13 nt, Human
guucugccaggag

SEQ ID NO: 3158372 - RNA, 14 nt, Human
guucugccaggaga

SEQ ID NO: 3158373 - RNA, 12 nt, Human
guucugccagga

SEQ ID NO: 3158374 - RNA, 18 nt, Human
guguuuuucauaaagcag

SEQ ID NO: 3158375 - RNA, 19 nt, Human
guguguuuuaaaaugagaa

SEQ ID NO: 3158376 - RNA, 13 nt, Human
guguguuuuaaaa

SEQ ID NO: 3158377 - RNA, 16 nt, Human
guguguuuuaaaauga

SEQ ID NO: 3158378 - RNA, 14 nt, Human
guguguuuuucaua

SEQ ID NO: 3158379 - RNA, 17 nt, Human
guuaaacucgcucacug

SEQ ID NO: 3158380 - RNA, 16 nt, Human
gugugcucaggagccc

SEQ ID NO: 3158381 - RNA, 17 nt, Human
gugugcucaggagcccu

SEQ ID NO: 3158382 - RNA, 18 nt, Human
gugugcucaggagcccug

SEQ ID NO: 3158383 - RNA, 19 nt, Human
gugugcucaggagcccugg

SEQ ID NO: 3158384 - RNA, 17 nt, Human
guguguuguguguggga

SEQ ID NO: 3158385 - RNA, 14 nt, Human
guguguugugugug

SEQ ID NO: 3158386 - RNA, 12 nt, Human
guguguugugug

SEQ ID NO: 3158387 - RNA, 15 nt, Human
guguguuuaugugug

SEQ ID NO: 3158388 - RNA, 14 nt, Human
guguguuuaugugu

SEQ ID NO: 3158389 - RNA, 16 nt, Human
guguguuuaugugugu

SEQ ID NO: 3158390 - RNA, 12 nt, Human
guguguuuuaaa

SEQ ID NO: 3158391 - RNA, 17 nt, Human
gugugggaguguguaau

SEQ ID NO: 3158392 - RNA, 17 nt, Human
gugucuggcacagccug

SEQ ID NO: 3158393 - RNA, 14 nt, Human
gugucuggcugcag

SEQ ID NO: 3158394 - RNA, 21 nt, Human
guguccugcaccggggccugg

SEQ ID NO: 3158395 - RNA, 13 nt, Human
gugcuaauuuuga

SEQ ID NO: 3158396 - RNA, 15 nt, Human
gugcuaauuuugaaa

SEQ ID NO: 3158397 - RNA, 17 nt, Human
guggcuggaucugugag

SEQ ID NO: 3158398 - RNA, 13 nt, Human
gugggccuggcca

SEQ ID NO: 3158399 - RNA, 21 nt, Human
guggggagagacgggcccugg

SEQ ID NO: 3158400 - RNA, 13 nt, Human
guggugagaucau

SEQ ID NO: 3158401 - RNA, 18 nt, Human
guggucuccacuggggau

SEQ ID NO: 3158402 - RNA, 20 nt, Human
guguaauuuaaaauugugau

SEQ ID NO: 3158403 - RNA, 23 nt, Human
guguaauuuaaaauugugaugug

SEQ ID NO: 3158404 - RNA, 22 nt, Human
guguaauuuaaaauugugaugu

SEQ ID NO: 3158405 - RNA, 15 nt, Human
guguacuuaacuauu

SEQ ID NO: 3158406 - RNA, 13 nt, Human
uacuuaacuauuc

SEQ ID NO: 3158407 - RNA, 13 nt, Human
uacuugcucuuga

SEQ ID NO: 3158408 - RNA, 14 nt, Human
uacuugcucuugau

SEQ ID NO: 3158409 - RNA, 18 nt, Human
uacuugcucuugaugccu

SEQ ID NO: 3158410 - RNA, 19 nt, Human
uacuugcucuugaugccug

SEQ ID NO: 3158411 - RNA, 15 nt, Human
uacuccccuccuuga

SEQ ID NO: 3158412 - RNA, 21 nt, Human
uacugccuauuuuaauaaaca

SEQ ID NO: 3158413 - RNA, 14 nt, Human
uacugccuauuuua

SEQ ID NO: 3158414 - RNA, 14 nt, Human
uacccagaaaguua

SEQ ID NO: 3158415 - RNA, 23 nt, Human
uacaguucggugagcuacaaaug

SEQ ID NO: 3158416 - RNA, 18 nt, Human
uacaguuccuagguauaa

SEQ ID NO: 3158417 - RNA, 20 nt, Human
uacaggaugaugacuaugga

SEQ ID NO: 3158418 - RNA, 16 nt, Human
uagccccucuccugga

SEQ ID NO: 3158419 - RNA, 17 nt, Human
uagcauggcauauuuuu

SEQ ID NO: 3158420 - RNA, 18 nt, Human
uagcauggcauauuuuuc

SEQ ID NO: 3158421 - RNA, 15 nt, Human
uagcauggcauauuu

SEQ ID NO: 3158422 - RNA, 15 nt, Human
uaggucucaauaccu

SEQ ID NO: 3158423 - RNA, 22 nt, Human
uagguuaauuccaauuauauga

SEQ ID NO: 3158424 - RNA, 22 nt, Human
uauaaacaugcuugcauuauau

SEQ ID NO: 3158425 - RNA, 14 nt, Human
uauaucuuguagcu

SEQ ID NO: 3158426 - RNA, 23 nt, Human
uaucaguuugcuagcagaaaucu

SEQ ID NO: 3158427 - RNA, 20 nt, Human
uauauuuguaaauuuaugug

SEQ ID NO: 3158428 - RNA, 17 nt, Human
uaaaagauaaauauuau

SEQ ID NO: 3158429 - RNA, 22 nt, Human
uaaaacaagcacuaaacaaaga

SEQ ID NO: 3158430 - RNA, 21 nt, Human
uaaaaagacauucuuccaaaa

SEQ ID NO: 3158431 - RNA, 18 nt, Human
uaaaaacaacuuuauacc

SEQ ID NO: 3158432 - RNA, 19 nt, Human
uaaaaacaacuuuauaccc

SEQ ID NO: 3158433 - RNA, 13 nt, Human
uaaaaacaacuuu

SEQ ID NO: 3158434 - RNA, 21 nt, Human
uaaaaacaaagaaauuaugug

SEQ ID NO: 3158435 - RNA, 17 nt, Human
uaaaaacaaagaaauua

SEQ ID NO: 3158436 - RNA, 18 nt, Human
uaaacacucuugaaaaau

SEQ ID NO: 3158437 - RNA, 15 nt, Human
uaaacacucuugaaa

SEQ ID NO: 3158438 - RNA, 17 nt, Human
uaaacacucuugaaaaa

SEQ ID NO: 3158439 - RNA, 14 nt, Human
uaaaguguuugaaa

SEQ ID NO: 3158440 - RNA, 21 nt, Human
uaaaggcccuaucuguuuaca

SEQ ID NO: 3158441 - RNA, 18 nt, Human
uaaagcaggcagaacuca

SEQ ID NO: 3158442 - RNA, 19 nt, Human
guuuaggaacuacugagga

SEQ ID NO: 3158443 - RNA, 16 nt, Human
guuuagaagaagugug

SEQ ID NO: 3158444 - RNA, 17 nt, Human
guuguccucagccccgc

SEQ ID NO: 3158445 - RNA, 23 nt, Human
guuguccucagccccgcguggaa

SEQ ID NO: 3158446 - RNA, 22 nt, Human
guugugugugggaguguguaau

SEQ ID NO: 3158447 - RNA, 16 nt, Human
guugugugugggagug

SEQ ID NO: 3158448 - RNA, 14 nt, Human
guugugugugggag

SEQ ID NO: 3158449 - RNA, 13 nt, Human
guuguguguggga

SEQ ID NO: 3158450 - RNA, 12 nt, Human
guuguguguggg

SEQ ID NO: 3158451 - RNA, 14 nt, Human
guugugaauguugu

SEQ ID NO: 3158452 - RNA, 19 nt, Human
guuucuuuguaaugaaaac

SEQ ID NO: 3158453 - RNA, 18 nt, Human
guuucuuuguaaugaaaa

SEQ ID NO: 3158454 - RNA, 20 nt, Human
guuuucaaaauuguuacaaa

SEQ ID NO: 3158455 - RNA, 15 nt, Human
guuuuaaaaugagaa

SEQ ID NO: 3158456 - RNA, 16 nt, Human
guuuuaaaaugagaaa

SEQ ID NO: 3158457 - RNA, 13 nt, Human
uaaccagaucauu

SEQ ID NO: 3158458 - RNA, 17 nt, Human
uaacugugaaguuuaca

SEQ ID NO: 3158459 - RNA, 13 nt, Human
uaacugugaaguu

SEQ ID NO: 3158460 - RNA, 18 nt, Human
uaacugugaaguuuacau

SEQ ID NO: 3158461 - RNA, 19 nt, Human
uaagaaaucaaagagagaa

SEQ ID NO: 3158462 - RNA, 16 nt, Human
uaaaguugguaaaccu

SEQ ID NO: 3158463 - RNA, 17 nt, Human
uaaaguugguaaaccuu

SEQ ID NO: 3158464 - RNA, 13 nt, Human
uaaauuuauguga

SEQ ID NO: 3158465 - RNA, 22 nt, Human
uaaauuugaauguuaagcagau

SEQ ID NO: 3158466 - RNA, 14 nt, Human
uaaauuugaauguu

SEQ ID NO: 3158467 - RNA, 22 nt, Human
uaaucuacuccuuguaaagacu

SEQ ID NO: 3158468 - RNA, 23 nt, Human
uaauaaucauuggauucugagag

SEQ ID NO: 3158469 - RNA, 22 nt, Human
uaagugccaggauggaaugaug

SEQ ID NO: 3158470 - RNA, 22 nt, Human
uaagugauugcugguuuuaguu

SEQ ID NO: 3158471 - RNA, 21 nt, Human
uaauaacugugaaguuuacau

SEQ ID NO: 3158472 - RNA, 11 nt, Human
uaauaaagcug

SEQ ID NO: 3158473 - RNA, 12 nt, Human
uaauaaagcugu

SEQ ID NO: 3158474 - RNA, 19 nt, Human
uguuuccauauuuuauagg

SEQ ID NO: 3158475 - RNA, 13 nt, Human
uuacauuguaaau

SEQ ID NO: 3158476 - RNA, 12 nt, Human
uuacauuguaaa

SEQ ID NO: 3158477 - RNA, 16 nt, Human
uuaaugauaaguaaau

SEQ ID NO: 3158478 - RNA, 12 nt, Human
uuaagaguaaaa

SEQ ID NO: 3158479 - RNA, 14 nt, Human
uguucauacauauu

SEQ ID NO: 3158480 - RNA, 23 nt, Human
uguucauacauauuuuuguagca

SEQ ID NO: 3158481 - RNA, 12 nt, Human
uguucauacaua

SEQ ID NO: 3158482 - RNA, 17 nt, Human
uguucauaaauaaaguu

SEQ ID NO: 3158483 - RNA, 12 nt, Human
uguguauguggg

SEQ ID NO: 3158484 - RNA, 11 nt, Human
uguguaugugg

SEQ ID NO: 3158485 - RNA, 13 nt, Human
ugugugcucucca

SEQ ID NO: 3158486 - RNA, 15 nt, Human
ugugugggagugugu

SEQ ID NO: 3158487 - RNA, 14 nt, Human
ugugugggagugug

SEQ ID NO: 3158488 - RNA, 18 nt, Human
uguguuuuucauaaagca

SEQ ID NO: 3158489 - RNA, 15 nt, Human
uguguuuuucauaaa

SEQ ID NO: 3158490 - RNA, 16 nt, Human
ugugugggagugugua

SEQ ID NO: 3158491 - RNA, 18 nt, Human
uguuggcacaugccugua

SEQ ID NO: 3158492 - RNA, 12 nt, Human
uguuuaagagac

SEQ ID NO: 3158493 - RNA, 12 nt, Human
uguuuacagugu

SEQ ID NO: 3158494 - RNA, 16 nt, Human
uguucuuuugucccag

SEQ ID NO: 3158495 - RNA, 18 nt, Human
uguguaauuuaaaauugu

SEQ ID NO: 3158496 - RNA, 11 nt, Human
uguguaauuua

SEQ ID NO: 3158497 - RNA, 23 nt, Human
uguguaauuuaaaauugugaugu

SEQ ID NO: 3158498 - RNA, 22 nt, Human
uguguaauuuaaaauugugaug

SEQ ID NO: 3158499 - RNA, 19 nt, Human
uguguaauuuaaaauugug

SEQ ID NO: 3158500 - RNA, 15 nt, Human
uguggccuaaccugc

SEQ ID NO: 3158501 - RNA, 15 nt, Human
uguggaagugugggu

SEQ ID NO: 3158502 - RNA, 15 nt, Human
ugugggaguguguaa

SEQ ID NO: 3158503 - RNA, 14 nt, Human
ugugggagugugua

SEQ ID NO: 3158504 - RNA, 16 nt, Human
ugugccuuuugccauc

SEQ ID NO: 3158505 - RNA, 17 nt, Human
ugugcucaggagcccug

SEQ ID NO: 3158506 - RNA, 15 nt, Human
ugugcucaggagccc

SEQ ID NO: 3158507 - RNA, 16 nt, Human
ugugcucaggagcccu

SEQ ID NO: 3158508 - RNA, 17 nt, Human
ugugccuugucacgcca

SEQ ID NO: 3158509 - RNA, 17 nt, Human
ugugccuuggugugcug

SEQ ID NO: 3158510 - RNA, 19 nt, Human
ugugccuugucacgccaga

SEQ ID NO: 3158511 - RNA, 20 nt, Human
ugugccuugucacgccagac

SEQ ID NO: 3158512 - RNA, 21 nt, Human
ugugaauguugugauguauuc

SEQ ID NO: 3158513 - RNA, 18 nt, Human
ugugaagugaaugaaaca

SEQ ID NO: 3158514 - RNA, 13 nt, Human
ugugauauaagug

SEQ ID NO: 3158515 - RNA, 16 nt, Human
ugugauauaagugugu

SEQ ID NO: 3158516 - RNA, 17 nt, Human
ugucuggcacagccugg

SEQ ID NO: 3158517 - RNA, 21 nt, Human
ugucuuuccacuccuccuagc

SEQ ID NO: 3158518 - RNA, 22 nt, Human
uguauaaaagggacugagaaau

SEQ ID NO: 3158519 - RNA, 22 nt, Human
ugucacccuuaggccagcacca

SEQ ID NO: 3158520 - RNA, 21 nt, Human
uguccucagccccgcguggaa

SEQ ID NO: 3158521 - RNA, 18 nt, Human
uguagccccucuccugga

SEQ ID NO: 3158522 - RNA, 17 nt, Human
uguagauaauacaguuc

SEQ ID NO: 3158523 - RNA, 14 nt, Human
uguaccucugccuc

SEQ ID NO: 3158524 - RNA, 14 nt, Human
uguacgaagaguau

SEQ ID NO: 3158525 - RNA, 22 nt, Human
uguacgaagaguauuuuugaca

SEQ ID NO: 3158526 - RNA, 17 nt, Human
ugcucuccaagcccagu

SEQ ID NO: 3158527 - RNA, 17 nt, Human
ugcucagagcaguguuu

SEQ ID NO: 3158528 - RNA, 15 nt, Human
ugccuggcggggugg

SEQ ID NO: 3158529 - RNA, 9 nt, Human
ugccucucu

SEQ ID NO: 3158530 - RNA, 16 nt, Human
ugcaccggggccuggg

SEQ ID NO: 3158531 - RNA, 22 nt, Human
ugcaccggggccugggcaggag

SEQ ID NO: 3158532 - RNA, 12 nt, Human
ugcaccggggcc

SEQ ID NO: 3158533 - RNA, 11 nt, Human
ugcagagcugc

SEQ ID NO: 3158534 - RNA, 22 nt, Human
ugcagagcagugggccuggcca

SEQ ID NO: 3158535 - RNA, 17 nt, Human
ugcccacccuccacucu

SEQ ID NO: 3158536 - RNA, 17 nt, Human
ugccaaauauaaauaaa

SEQ ID NO: 3158537 - RNA, 18 nt, Human
ugccaaauauaaauaaaa

SEQ ID NO: 3158538 - RNA, 20 nt, Human
ugcauauuuauaaaaauaaa

SEQ ID NO: 3158539 - RNA, 21 nt, Human
ugcauauuuauaaaaauaaaa

SEQ ID NO: 3158540 - RNA, 19 nt, Human
ugccaaauauaaauaaaaa

SEQ ID NO: 3158541 - RNA, 22 nt, Human
ugccaaauauaaauaaaaauaa

SEQ ID NO: 3158542 - RNA, 18 nt, Human
ugccaggauggaaugaug

SEQ ID NO: 3158543 - RNA, 14 nt, Human
ugggaguacaaaag

SEQ ID NO: 3158544 - RNA, 21 nt, Human
ugggagugaggaugucugggc

SEQ ID NO: 3158545 - RNA, 21 nt, Human
ugggacaccccgacuuuuguu

SEQ ID NO: 3158546 - RNA, 14 nt, Human
ugggagauguggaa

SEQ ID NO: 3158547 - RNA, 20 nt, Human
uggguggggggcuucauaca

SEQ ID NO: 3158548 - RNA, 21 nt, Human
uggguggggggcuucauacac

SEQ ID NO: 3158549 - RNA, 18 nt, Human
uggguggggggcuucaua

SEQ ID NO: 3158550 - RNA, 11 nt, Human
ugggggaugua

SEQ ID NO: 3158551 - RNA, 15 nt, Human
ugggggucugugugu

SEQ ID NO: 3158552 - RNA, 18 nt, Human
ugggggucuguguguuua

SEQ ID NO: 3158553 - RNA, 20 nt, Human
uggggauugggccccugcca

SEQ ID NO: 3158554 - RNA, 14 nt, Human
uggaaagaguacuc

SEQ ID NO: 3158555 - RNA, 22 nt, Human
uggaauaauccuaaacauauga

SEQ ID NO: 3158556 - RNA, 18 nt, Human
uggaacucgugucuggca

SEQ ID NO: 3158557 - RNA, 20 nt, Human
uggaaugaugggucaguugu

SEQ ID NO: 3158558 - RNA, 16 nt, Human
uggaaugcuguguuaa

SEQ ID NO: 3158559 - RNA, 16 nt, Human
uccucgagaucccaac

SEQ ID NO: 3158560 - RNA, 23 nt, Human
uccucgagaucccaacacugcca

SEQ ID NO: 3158561 - RNA, 23 nt, Human
ucccaugagcuccuuaaggcucu

SEQ ID NO: 3158562 - RNA, 18 nt, Human
ucccucuacugggagccu

SEQ ID NO: 3158563 - RNA, 22 nt, Human
ucccucuacugggagccuaccc

SEQ ID NO: 3158564 - RNA, 23 nt, Human
ucccucuacugggagccuaccca

SEQ ID NO: 3158565 - RNA, 15 nt, Human
ucuagguaaauuaca

SEQ ID NO: 3158566 - RNA, 19 nt, Human
ucuacuccuuguaaagacu

SEQ ID NO: 3158567 - RNA, 16 nt, Human
ucucauaauuuauaca

SEQ ID NO: 3158568 - RNA, 22 nt, Human
ucucauaauuuauacaggucau

SEQ ID NO: 3158569 - RNA, 19 nt, Human
uccugucccucauccauag

SEQ ID NO: 3158570 - RNA, 20 nt, Human
ucagaucauuaucagccugu

SEQ ID NO: 3158571 - RNA, 22 nt, Human
ucaggagaguagaacagauaau

SEQ ID NO: 3158572 - RNA, 23 nt, Human
ucagccuccauccuacccccugu

SEQ ID NO: 3158573 - RNA, 19 nt, Human
ucagugugucuaaauuuga

SEQ ID NO: 3158574 - RNA, 24 nt, Human
ucauggacuucugccagcauaaua

SEQ ID NO: 3158575 - RNA, 12 nt, Human
ucaucuuucuuc

SEQ ID NO: 3158576 - RNA, 14 nt, Human
ucaucuuucuucca

SEQ ID NO: 3158577 - RNA, 17 nt, Human
ucaucuuucuuccaaac

SEQ ID NO: 3158578 - RNA, 17 nt, Human
ucaguucucuucacuca

SEQ ID NO: 3158579 - RNA, 14 nt, Human
ucaguucucuucac

SEQ ID NO: 3158580 - RNA, 14 nt, Human
ucccaacacugcca

SEQ ID NO: 3158581 - RNA, 15 nt, Human
ucccaacacugccag

SEQ ID NO: 3158582 - RNA, 16 nt, Human
ucccaacacugccagc

SEQ ID NO: 3158583 - RNA, 15 nt, Human
uccaagcaaauguga

SEQ ID NO: 3158584 - RNA, 17 nt, Human
uccaagcaaaugugaau

SEQ ID NO: 3158585 - RNA, 14 nt, Human
uccaagagccugag

SEQ ID NO: 3158586 - RNA, 13 nt, Human
uccaagagccuga

SEQ ID NO: 3158587 - RNA, 22 nt, Human
uccaagcccaguucagcuuggg

SEQ ID NO: 3158588 - RNA, 15 nt, Human
uccagagucccugcc

SEQ ID NO: 3158589 - RNA, 17 nt, Human
uccacuuuaucuugaau

SEQ ID NO: 3158590 - RNA, 15 nt, Human
uccacuuuaucuuga

SEQ ID NO: 3158591 - RNA, 18 nt, Human
ucuggugaccuuccaaga

SEQ ID NO: 3158592 - RNA, 23 nt, Human
ucuggugaccuuccaagagccug

SEQ ID NO: 3158593 - RNA, 16 nt, Human
ucuggugaccuuccaa

SEQ ID NO: 3158594 - RNA, 12 nt, Human
ucuggagcccac

SEQ ID NO: 3158595 - RNA, 16 nt, Human
ucuggagcccacugua

SEQ ID NO: 3158596 - RNA, 22 nt, Human
ucuggagcccacuguacuugcu

SEQ ID NO: 3158597 - RNA, 15 nt, Human
ucuggcugcagagca

SEQ ID NO: 3158598 - RNA, 14 nt, Human
ucuggcugcagagc

SEQ ID NO: 3158599 - RNA, 14 nt, Human
ucuggaauuugaaa

SEQ ID NO: 3158600 - RNA, 12 nt, Human
ucugagagcugu

SEQ ID NO: 3158601 - RNA, 17 nt, Human
ucuugaacugagcuugg

SEQ ID NO: 3158602 - RNA, 15 nt, Human
ucuugaacugagcuu

SEQ ID NO: 3158603 - RNA, 18 nt, Human
ucuugaacugagcuugga

SEQ ID NO: 3158604 - RNA, 19 nt, Human
ucuugccaaauauaaauaa

SEQ ID NO: 3158605 - RNA, 18 nt, Human
ucuuguagcuuuaucaaa

SEQ ID NO: 3158606 - RNA, 13 nt, Human
ucuuauaauuuaa

SEQ ID NO: 3158607 - RNA, 14 nt, Human
ucuuauaauuuaaa

SEQ ID NO: 3158608 - RNA, 11 nt, Human
ucugugugugu

SEQ ID NO: 3158609 - RNA, 22 nt, Human
ucuucauuaccucagugagaag

SEQ ID NO: 3158610 - RNA, 19 nt, Human
ucuuuccaaccggcuuugu

SEQ ID NO: 3158611 - RNA, 19 nt, Human
ugaaaauuauuuuguucau

SEQ ID NO: 3158612 - RNA, 14 nt, Human
ugaaaauuaacaug

SEQ ID NO: 3158613 - RNA, 18 nt, Human
ugaaaaccacauuggaga

SEQ ID NO: 3158614 - RNA, 23 nt, Human
ugaaacacucaguuguucaauaa

SEQ ID NO: 3158615 - RNA, 15 nt, Human
ugaaacacuuugcau

SEQ ID NO: 3158616 - RNA, 22 nt, Human
ugaaaauuauuuuguucauaca

SEQ ID NO: 3158617 - RNA, 23 nt, Human
ugaaaauuauuuuguucauacau

SEQ ID NO: 3158618 - RNA, 13 nt, Human
ugaggcagguccc

SEQ ID NO: 3158619 - RNA, 19 nt, Human
ugaggaucagaguaaucca

SEQ ID NO: 3158620 - RNA, 13 nt, Human
ugaggaucagagu

SEQ ID NO: 3158621 - RNA, 17 nt, Human
ugaggaucagaguaauc

SEQ ID NO: 3158622 - RNA, 19 nt, Human
ugacucuuuccaaccggcu

SEQ ID NO: 3158623 - RNA, 13 nt, Human
ugacucuuuccaa

SEQ ID NO: 3158624 - RNA, 14 nt, Human
ugacucuuuccaac

SEQ ID NO: 3158625 - RNA, 16 nt, Human
ugacucuuuccaaccg

SEQ ID NO: 3158626 - RNA, 20 nt, Human
ugacaaagguaaaucagacu

SEQ ID NO: 3158627 - RNA, 22 nt, Human
ugacaacuucccagugaauucu

SEQ ID NO: 3158628 - RNA, 21 nt, Human
ugacagaauauguuucaaacu

SEQ ID NO: 3158629 - RNA, 22 nt, Human
ugacagaauauguuucaaacuu

SEQ ID NO: 3158630 - RNA, 18 nt, Human
ugacagaauauguuucaa

SEQ ID NO: 3158631 - RNA, 23 nt, Human
ugacagaauauguuucaaacuuu

SEQ ID NO: 3158632 - RNA, 13 nt, Human
ugaaucucauaau

SEQ ID NO: 3158633 - RNA, 20 nt, Human
ugaaucucauaauuuauaca

SEQ ID NO: 3158634 - RNA, 20 nt, Human
ugaaguuuacauuguaaaua

SEQ ID NO: 3158635 - RNA, 16 nt, Human
ugaaguuuacauugua

SEQ ID NO: 3158636 - RNA, 14 nt, Human
ugaaguuuacauug

SEQ ID NO: 3158637 - RNA, 22 nt, Human
ugaagagaagggcagggcugag

SEQ ID NO: 3158638 - RNA, 20 nt, Human
ugaagagaagggcagggcug

SEQ ID NO: 3158639 - RNA, 15 nt, Human
ugaaggaaaaugaua

SEQ ID NO: 3158640 - RNA, 16 nt, Human
ugaagcuuuuauguga

SEQ ID NO: 3158641 - RNA, 21 nt, Human
ugaagcuuuuaugugaaacau

SEQ ID NO: 3158642 - RNA, 16 nt, Human
ugaaggaaccaaagcg

SEQ ID NO: 3158643 - RNA, 13 nt, Human
ugaaacauguuuc

SEQ ID NO: 3158644 - RNA, 16 nt, Human
ugaaacacuuugcaua

SEQ ID NO: 3158645 - RNA, 22 nt, Human
cuugacaaagucaagccacaug

SEQ ID NO: 3158646 - RNA, 22 nt, Human
cuuugagguggaagagggcugc

SEQ ID NO: 3158647 - RNA, 16 nt, Human
cuuugagguggaagag

SEQ ID NO: 3158648 - RNA, 17 nt, Human
cuuugagguggaagagg

SEQ ID NO: 3158649 - RNA, 14 nt, Human
cuuugagguggaag

SEQ ID NO: 3158650 - RNA, 18 nt, Human
cuucaucugacuaugaca

SEQ ID NO: 3158651 - RNA, 12 nt, Human
cuucaucugacu

SEQ ID NO: 3158652 - RNA, 17 nt, Human
cugcaggaaauggcugu

SEQ ID NO: 3158653 - RNA, 18 nt, Human
cugcaccggggccugggc

SEQ ID NO: 3158654 - RNA, 19 nt, Human
cugcaccggggccugggca

SEQ ID NO: 3158655 - RNA, 14 nt, Human
cugcaccggggccu

SEQ ID NO: 3158656 - RNA, 16 nt, Human
cugcaccggggccugg

SEQ ID NO: 3158657 - RNA, 16 nt, Human
cugcaaauccuugugg

SEQ ID NO: 3158658 - RNA, 19 nt, Human
cugcaaauccuugugggaa

SEQ ID NO: 3158659 - RNA, 23 nt, Human
cuggacugugugcucaggagccc

SEQ ID NO: 3158660 - RNA, 19 nt, Human
cuggacugugugcucagga

SEQ ID NO: 3158661 - RNA, 22 nt, Human
cuggacugugugcucaggagcc

SEQ ID NO: 3158662 - RNA, 14 nt, Human
cuggaucugugagg

SEQ ID NO: 3158663 - RNA, 17 nt, Human
cugggagaaaugaaaaa

SEQ ID NO: 3158664 - RNA, 16 nt, Human
cugggagaaaugaaaa

SEQ ID NO: 3158665 - RNA, 13 nt, Human
cuggcccugugcc

SEQ ID NO: 3158666 - RNA, 12 nt, Human
cuggugcagugg

SEQ ID NO: 3158667 - RNA, 13 nt, Human
cugggcaggaggg

SEQ ID NO: 3158668 - RNA, 14 nt, Human
gacagugaaagaaa

SEQ ID NO: 3158669 - RNA, 23 nt, Human
gacucacuuaucccaagagaaug

SEQ ID NO: 3158670 - RNA, 22 nt, Human
gacugugugcucaggagcccug

SEQ ID NO: 3158671 - RNA, 12 nt, Human
gaaccgaggcag

SEQ ID NO: 3158672 - RNA, 15 nt, Human
gaaccgaggcaggga

SEQ ID NO: 3158673 - RNA, 20 nt, Human
gaacugcugggcuuggcagc

SEQ ID NO: 3158674 - RNA, 17 nt, Human
gaacugcugggcuuggc

SEQ ID NO: 3158675 - RNA, 20 nt, Human
gaagcaaugcuucaucccuu

SEQ ID NO: 3158676 - RNA, 20 nt, Human
gaagcuaucguaaaauuaag

SEQ ID NO: 3158677 - RNA, 22 nt, Human
gaauauugcuuuggucauauga

SEQ ID NO: 3158678 - RNA, 14 nt, Human
gaauauguuucaaa

SEQ ID NO: 3158679 - RNA, 15 nt, Human
gaauauguuucaaac

SEQ ID NO: 3158680 - RNA, 20 nt, Human
gaauauguuucaaacuuugg

SEQ ID NO: 3158681 - RNA, 24 nt, Human
gaagugugggucugugugugugua

SEQ ID NO: 3158682 - RNA, 21 nt, Human
gaagugugggucugugugugu

SEQ ID NO: 3158683 - RNA, 14 nt, Human
gauucugagagcug

SEQ ID NO: 3158684 - RNA, 14 nt, Human
gauuauauuaugaa

SEQ ID NO: 3158685 - RNA, 14 nt, Human
gaugguucuagcau

SEQ ID NO: 3158686 - RNA, 18 nt, Human
gcaagucagaauagaaau

SEQ ID NO: 3158687 - RNA, 16 nt, Human
gcaccggggccugggc

SEQ ID NO: 3158688 - RNA, 14 nt, Human
gcaccggggccugg

SEQ ID NO: 3158689 - RNA, 17 nt, Human
gaguccaucagccucca

SEQ ID NO: 3158690 - RNA, 18 nt, Human
gagucagggagagcugaa

SEQ ID NO: 3158691 - RNA, 22 nt, Human
gaggugcuucuaguucugccag

SEQ ID NO: 3158692 - RNA, 23 nt, Human
gaggugcuucuaguucugccagg

SEQ ID NO: 3158693 - RNA, 17 nt, Human
gagguggaagagggcug

SEQ ID NO: 3158694 - RNA, 20 nt, Human
gagguggaagagggcugcaa

SEQ ID NO: 3158695 - RNA, 9 nt, Human
gagggcugc

SEQ ID NO: 3158696 - RNA, 16 nt, Human
gagggcugccuuugga

SEQ ID NO: 3158697 - RNA, 18 nt, Human
gaggcugcagccaggcca

SEQ ID NO: 3158698 - RNA, 13 nt, Human
gaggcaggucccc

SEQ ID NO: 3158699 - RNA, 16 nt, Human
gaggcagguccccaga

SEQ ID NO: 3158700 - RNA, 12 nt, Human
gaggcagguccc

SEQ ID NO: 3158701 - RNA, 18 nt, Human
gaggcuacuguaaggcaa

SEQ ID NO: 3158702 - RNA, 21 nt, Human
ggaggcucuggagcccacugu

SEQ ID NO: 3158703 - RNA, 15 nt, Human
ggaggcucuggagcc

SEQ ID NO: 3158704 - RNA, 17 nt, Human
ggaggcucuggagccca

SEQ ID NO: 3158705 - RNA, 20 nt, Human
ggaggcucuggagcccacug

SEQ ID NO: 3158706 - RNA, 18 nt, Human
ggagcccacuguacuugc

SEQ ID NO: 3158707 - RNA, 15 nt, Human
ggagcccacuguacu

SEQ ID NO: 3158708 - RNA, 18 nt, Human
ggaccccuggugguucac

SEQ ID NO: 3158709 - RNA, 15 nt, Human
ggagagacgggcccu

SEQ ID NO: 3158710 - RNA, 17 nt, Human
ggagagacgggcccugg

SEQ ID NO: 3158711 - RNA, 17 nt, Human
ggacugugugcucagga

SEQ ID NO: 3158712 - RNA, 23 nt, Human
ggacugugugcucaggagcccug

SEQ ID NO: 3158713 - RNA, 22 nt, Human
ggacugugugcucaggagcccu

SEQ ID NO: 3158714 - RNA, 18 nt, Human
ggagaaaugaaaaaauau

SEQ ID NO: 3158715 - RNA, 16 nt, Human
ggacuuggagguagcu

SEQ ID NO: 3158716 - RNA, 13 nt, Human
ggaugucugggcc

SEQ ID NO: 3158717 - RNA, 15 nt, Human
ggaugguguucaaaa

SEQ ID NO: 3158718 - RNA, 23 nt, Human
ggcaggcaucggggagccgggag

SEQ ID NO: 3158719 - RNA, 18 nt, Human
ggccagcaccaucucuuu

SEQ ID NO: 3158720 - RNA, 15 nt, Human
aaaaagggaggggga

SEQ ID NO: 3158721 - RNA, 20 nt, Human
aaaaagccugcaauuucaua

SEQ ID NO: 3158722 - RNA, 17 nt, Human
ggcuggaucugugaggg

SEQ ID NO: 3158723 - RNA, 20 nt, Human
ggcuccucgagaucccaaca

SEQ ID NO: 3158724 - RNA, 22 nt, Human
aaaaaucugaccaaaacaaaca

SEQ ID NO: 3158725 - RNA, 19 nt, Human
aaaacugcucauaugaugu

SEQ ID NO: 3158726 - RNA, 20 nt, Human
gggaggcagagguugcagug

SEQ ID NO: 3158727 - RNA, 22 nt, Human
aaaagcuccauuuuuagugaaa

SEQ ID NO: 3158728 - RNA, 19 nt, Human
aaaagccugcaauuucaua

SEQ ID NO: 3158729 - RNA, 16 nt, Human
aaaagccuguuuaaga

SEQ ID NO: 3158730 - RNA, 18 nt, Human
aaaagccuguuuaagaga

SEQ ID NO: 3158731 - RNA, 14 nt, Human
aaaauauauuuaau

SEQ ID NO: 3158732 - RNA, 18 nt, Human
aaaauauauaucaaauau

SEQ ID NO: 3158733 - RNA, 16 nt, Human
aaaagggacugagaaa

SEQ ID NO: 3158734 - RNA, 14 nt, Human
gggagggggagagg

SEQ ID NO: 3158735 - RNA, 15 nt, Human
aaagauuuucagaaa

SEQ ID NO: 3158736 - RNA, 14 nt, Human
aaagauuuucagaa

SEQ ID NO: 3158737 - RNA, 14 nt, Human
aaagaugcaaugua

SEQ ID NO: 3158738 - RNA, 21 nt, Human
ggucauauuaauauauuucca

SEQ ID NO: 3158739 - RNA, 18 nt, Human
ggucauauuaauauauuu

SEQ ID NO: 3158740 - RNA, 13 nt, Human
aaaggaauuuaaa

SEQ ID NO: 3158741 - RNA, 14 nt, Human
aaagcgaauuuuaa

SEQ ID NO: 3158742 - RNA, 21 nt, Human
aaagauuuucagaaaauauua

SEQ ID NO: 3158743 - RNA, 20 nt, Human
ggucuugguuccagccugcc

SEQ ID NO: 3158744 - RNA, 21 nt, Human
ggucuugguuccagccugcca

SEQ ID NO: 3158745 - RNA, 21 nt, Human
aaaccacauuggagauguuua

SEQ ID NO: 3158746 - RNA, 23 nt, Human
ggggucuguguguuuaugugugu

SEQ ID NO: 3158747 - RNA, 15 nt, Human
ggggccugggcagga

SEQ ID NO: 3158748 - RNA, 12 nt, Human
ggggccugggca

SEQ ID NO: 3158749 - RNA, 19 nt, Human
aaacauguuucuuuguaau

SEQ ID NO: 3158750 - RNA, 22 nt, Human
aaacauguuucuuuguaaugaa

SEQ ID NO: 3158751 - RNA, 23 nt, Human
aaacauguuucuuuguaaugaaa

SEQ ID NO: 3158752 - RNA, 16 nt, Human
ggggccaggcuggguc

SEQ ID NO: 3158753 - RNA, 13 nt, Human
ggggccaggcugg

SEQ ID NO: 3158754 - RNA, 14 nt, Human
ggggccaggcuggg

SEQ ID NO: 3158755 - RNA, 19 nt, Human
aaacaacuucaauauccaa

SEQ ID NO: 3158756 - RNA, 13 nt, Human
aaacaaagaaauu

SEQ ID NO: 3158757 - RNA, 19 nt, Human
aaaauuuuuaaucuuuaau

SEQ ID NO: 3158758 - RNA, 16 nt, Human
aaaauugugauguguc

SEQ ID NO: 3158759 - RNA, 15 nt, Human
aaaauuuuuaaucuu

SEQ ID NO: 3158760 - RNA, 16 nt, Human
aaaauuuuuaaucuuu

SEQ ID NO: 3158761 - RNA, 15 nt, Human
aaaauauuauguguu

SEQ ID NO: 3158762 - RNA, 14 nt, Human
aaaauauuaugugu

SEQ ID NO: 3158763 - RNA, 21 nt, Human
aaaauauuauguguuuccaua

SEQ ID NO: 3158764 - RNA, 16 nt, Human
gccuacccacccccag

SEQ ID NO: 3158765 - RNA, 17 nt, Human
gccuacccacccccagg

SEQ ID NO: 3158766 - RNA, 16 nt, Human
gccauaugaaaaggcu

SEQ ID NO: 3158767 - RNA, 19 nt, Human
gccaggccacuggccccug

SEQ ID NO: 3158768 - RNA, 17 nt, Human
gccagacccccuggaga

SEQ ID NO: 3158769 - RNA, 21 nt, Human
gccacuguuuugaaucucaua

SEQ ID NO: 3158770 - RNA, 16 nt, Human
gccaccgccuccuaca

SEQ ID NO: 3158771 - RNA, 19 nt, Human
gcugggucgcccuggacug

SEQ ID NO: 3158772 - RNA, 12 nt, Human
gcugggucgccc

SEQ ID NO: 3158773 - RNA, 16 nt, Human
gcugggucgcccugga

SEQ ID NO: 3158774 - RNA, 17 nt, Human
gcugggucgcccuggac

SEQ ID NO: 3158775 - RNA, 18 nt, Human
gcugggucgcccuggacu

SEQ ID NO: 3158776 - RNA, 22 nt, Human
gcuuccuucugugaaaguacau

SEQ ID NO: 3158777 - RNA, 19 nt, Human
gcuauggggauagaugugu

SEQ ID NO: 3158778 - RNA, 21 nt, Human
gcuauggggauagaugugugg

SEQ ID NO: 3158779 - RNA, 15 nt, Human
gcucaggagcccugg

SEQ ID NO: 3158780 - RNA, 18 nt, Human
gcucaggagcccugggag

SEQ ID NO: 3158781 - RNA, 14 nt, Human
gcucaggagcccug

SEQ ID NO: 3158782 - RNA, 23 nt, Human
gcucuggagcccacuguacuugc

SEQ ID NO: 3158783 - RNA, 17 nt, Human
gcucuggagcccacugu

SEQ ID NO: 3158784 - RNA, 14 nt, Human
ccuugcauaauggu

SEQ ID NO: 3158785 - RNA, 23 nt, Human
cuaaaguaaaaacaaagaaauua

SEQ ID NO: 3158786 - RNA, 20 nt, Human
cucugcaggaaauggcugug

SEQ ID NO: 3158787 - RNA, 13 nt, Human
cucccucuacugg

SEQ ID NO: 3158788 - RNA, 19 nt, Human
cucccucuacugggagccu

SEQ ID NO: 3158789 - RNA, 20 nt, Human
cucccucuacugggagccua

SEQ ID NO: 3158790 - RNA, 14 nt, Human
cuccucuuccaggc

SEQ ID NO: 3158791 - RNA, 16 nt, Human
cuccuuguaaagacug

SEQ ID NO: 3158792 - RNA, 16 nt, Human
cuccugucucccuccu

SEQ ID NO: 3158793 - RNA, 22 nt, Human
cuccucugcccgggagcucagg

SEQ ID NO: 3158794 - RNA, 24 nt, Human
cuccucugcccgggagcucaggaa

SEQ ID NO: 3158795 - RNA, 23 nt, Human
cucaugauagaaggcuaugggga

SEQ ID NO: 3158796 - RNA, 23 nt, Human
cucaggccgaaggaggagucagg

SEQ ID NO: 3158797 - RNA, 20 nt, Human
cucaggccugacucucagca

SEQ ID NO: 3158798 - RNA, 14 nt, Human
cccugaaggaacca

SEQ ID NO: 3158799 - RNA, 18 nt, Human
cccugagaucucugcagg

SEQ ID NO: 3158800 - RNA, 23 nt, Human
ccgaaggugaggagcuugaaacc

SEQ ID NO: 3158801 - RNA, 21 nt, Human
ccucugcccgggagcucagga

SEQ ID NO: 3158802 - RNA, 22 nt, Human
ccucugcccgggagcucaggaa

SEQ ID NO: 3158803 - RNA, 15 nt, Human
ccucucugcaggucc

SEQ ID NO: 3158804 - RNA, 18 nt, Human
ccucucugcaggucccua

SEQ ID NO: 3158805 - RNA, 19 nt, Human
ccucucugcaggucccuaa

SEQ ID NO: 3158806 - RNA, 16 nt, Human
ccucucugcagguccc

SEQ ID NO: 3158807 - RNA, 17 nt, Human
ccucucugcaggucccu

SEQ ID NO: 3158808 - RNA, 22 nt, Human
ccucuuggggaguuuagggugg

SEQ ID NO: 3158809 - RNA, 15 nt, Human
ccucuuggcugccuu

SEQ ID NO: 3158810 - RNA, 23 nt, Human
ccucuuggggaguuuaggguggg

SEQ ID NO: 3158811 - RNA, 12 nt, Human
ccugcagagcug

SEQ ID NO: 3158812 - RNA, 13 nt, Human
ccugcagagcugc

SEQ ID NO: 3158813 - RNA, 14 nt, Human
ccugcagagcugcg

SEQ ID NO: 3158814 - RNA, 17 nt, Human
ccugcagagcugcgggc

SEQ ID NO: 3158815 - RNA, 14 nt, Human
ccugaguuccuagc

SEQ ID NO: 3158816 - RNA, 19 nt, Human
ccugccuggaccagccucu

SEQ ID NO: 3158817 - RNA, 12 nt, Human
ccugccuggacc

SEQ ID NO: 3158818 - RNA, 20 nt, Human
ccugccucucugcagguccc

SEQ ID NO: 3158819 - RNA, 21 nt, Human
ccugccucucugcaggucccu

SEQ ID NO: 3158820 - RNA, 17 nt, Human
ccugccucucugcaggu

SEQ ID NO: 3158821 - RNA, 21 nt, Human
ccaugagcuccuuaaggcucu

SEQ ID NO: 3158822 - RNA, 12 nt, Human
ccaugagcuccu

SEQ ID NO: 3158823 - RNA, 13 nt, Human
ccauugguguuga

SEQ ID NO: 3158824 - RNA, 23 nt, Human
cccacuguacuugcucuugaugc

SEQ ID NO: 3158825 - RNA, 18 nt, Human
cccacuguacuugcucuu

SEQ ID NO: 3158826 - RNA, 19 nt, Human
cccacuguacuugcucuug

SEQ ID NO: 3158827 - RNA, 22 nt, Human
cccccugugccuugucacgcca

SEQ ID NO: 3158828 - RNA, 21 nt, Human
ccccgcguggaacucgugucu

SEQ ID NO: 3158829 - RNA, 20 nt, Human
cccagcuggggccaggcugg

SEQ ID NO: 3158830 - RNA, 22 nt, Human
cccagcuggggccaggcugggu

SEQ ID NO: 3158831 - RNA, 23 nt, Human
cccagcuggggccaggcuggguc

SEQ ID NO: 3158832 - RNA, 14 nt, Human
ccagacuccaccaa

SEQ ID NO: 3158833 - RNA, 18 nt, Human
ccagacuccaccaagccu

SEQ ID NO: 3158834 - RNA, 23 nt, Human
ccagacuucccacggcuccucga

SEQ ID NO: 3158835 - RNA, 18 nt, Human
ccagagaaaaagggaggg

SEQ ID NO: 3158836 - RNA, 18 nt, Human
cagccaggccacuggccc

SEQ ID NO: 3158837 - RNA, 17 nt, Human
cagcacguguggccugu

SEQ ID NO: 3158838 - RNA, 13 nt, Human
cagauuuaugcau

SEQ ID NO: 3158839 - RNA, 16 nt, Human
ccaacuauggccugug

SEQ ID NO: 3158840 - RNA, 14 nt, Human
ccaacuauggccug

SEQ ID NO: 3158841 - RNA, 15 nt, Human
ccaacuauggccugu

SEQ ID NO: 3158842 - RNA, 19 nt, Human
ccaauucgaacuuuuucca

SEQ ID NO: 3158843 - RNA, 22 nt, Human
ccaauuauaugagacguuuuug

SEQ ID NO: 3158844 - RNA, 15 nt, Human
cauuggauucugaga

SEQ ID NO: 3158845 - RNA, 16 nt, Human
cauuggagauguuuag

SEQ ID NO: 3158846 - RNA, 16 nt, Human
caugaauuugugaagg

SEQ ID NO: 3158847 - RNA, 21 nt, Human
caugaauauuuaguguucaua

SEQ ID NO: 3158848 - RNA, 14 nt, Human
caguucagcuuggg

SEQ ID NO: 3158849 - RNA, 15 nt, Human
caguucagcuugggg

SEQ ID NO: 3158850 - RNA, 22 nt, Human
caguuauuauauuuacaaaugg

SEQ ID NO: 3158851 - RNA, 17 nt, Human
caguuauuauauuuaca

SEQ ID NO: 3158852 - RNA, 21 nt, Human
caguuauuauauuuacaaaug

SEQ ID NO: 3158853 - RNA, 19 nt, Human
cauacagggaugguguuca

SEQ ID NO: 3158854 - RNA, 16 nt, Human
cauacagggauggugu

SEQ ID NO: 3158855 - RNA, 18 nt, Human
cauaauuauuauuuggcc

SEQ ID NO: 3158856 - RNA, 23 nt, Human
caguuguucaauaauaaauauuu

SEQ ID NO: 3158857 - RNA, 17 nt, Human
caucuguaccucugccu

SEQ ID NO: 3158858 - RNA, 13 nt, Human
auuaugugccaga

SEQ ID NO: 3158859 - RNA, 21 nt, Human
auuaugugccagauuuaugca

SEQ ID NO: 3158860 - RNA, 17 nt, Human
auucauggccuggggga

SEQ ID NO: 3158861 - RNA, 20 nt, Human
auuaaauuuugaguucuaca

SEQ ID NO: 3158862 - RNA, 16 nt, Human
auuucagcagcugcag

SEQ ID NO: 3158863 - RNA, 16 nt, Human
auugauaaguucauac

SEQ ID NO: 3158864 - RNA, 17 nt, Human
auugauaaguucauaca

SEQ ID NO: 3158865 - RNA, 18 nt, Human
auugauaaguucauacau

SEQ ID NO: 3158866 - RNA, 19 nt, Human
auugauaaguucauacauu

SEQ ID NO: 3158867 - RNA, 12 nt, Human
auugauaaguuc

SEQ ID NO: 3158868 - RNA, 15 nt, Human
auugauaaguucaua

SEQ ID NO: 3158869 - RNA, 17 nt, Human
auuuucuauaauuuaaa

SEQ ID NO: 3158870 - RNA, 18 nt, Human
auuuucuauaauuuaaau

SEQ ID NO: 3158871 - RNA, 19 nt, Human
auuuucuauaauuuaaaua

SEQ ID NO: 3158872 - RNA, 13 nt, Human
auuuugaaaaacu

SEQ ID NO: 3158873 - RNA, 15 nt, Human
auuuugaaaaacugc

SEQ ID NO: 3158874 - RNA, 19 nt, Human
auuuguucuauagcuuuuc

SEQ ID NO: 3158875 - RNA, 17 nt, Human
auuuuuaugccaccuga

SEQ ID NO: 3158876 - RNA, 15 nt, Human
auuuuuuucugaauu

SEQ ID NO: 3158877 - RNA, 15 nt, Human
caagcaaaugugaau

SEQ ID NO: 3158878 - RNA, 17 nt, Human
caagcaaaugugaauca

SEQ ID NO: 3158879 - RNA, 19 nt, Human
caagcaaaugugaaucauu

SEQ ID NO: 3158880 - RNA, 13 nt, Human
caacuauggccug

SEQ ID NO: 3158881 - RNA, 15 nt, Human
caacuauuuuuccaa

SEQ ID NO: 3158882 - RNA, 14 nt, Human
caacuauggccugu

SEQ ID NO: 3158883 - RNA, 18 nt, Human
caccuaggcuaggguggg

SEQ ID NO: 3158884 - RNA, 19 nt, Human
caccuaggcuagggugggg

SEQ ID NO: 3158885 - RNA, 17 nt, Human
caccuaggcuagggugg

SEQ ID NO: 3158886 - RNA, 22 nt, Human
uaaagguucaugcaaacuuuau

SEQ ID NO: 3158887 - RNA, 19 nt, Human
uaaaguaaaaacaaagaaa

SEQ ID NO: 3158888 - RNA, 21 nt, Human
uaaaguaaaaacaaagaaauu

SEQ ID NO: 3158889 - RNA, 22 nt, Human
uaaaguaaaaacaaagaaauua

SEQ ID NO: 3158890 - RNA, 21 nt, Human
aauaacaaugaaaguugauaa

SEQ ID NO: 3158891 - RNA, 13 nt, Human
aauaacugugaag

SEQ ID NO: 3158892 - RNA, 18 nt, Human
aauaaccucaaagugacu

SEQ ID NO: 3158893 - RNA, 21 nt, Human
aauaauuuuaagaaaucaaag

SEQ ID NO: 3158894 - RNA, 16 nt, Human
aauaacugugaaguuu

SEQ ID NO: 3158895 - RNA, 14 nt, Human
aauaacugugaagu

SEQ ID NO: 3158896 - RNA, 20 nt, Human
aauaacugugaaguuuacau

SEQ ID NO: 3158897 - RNA, 12 nt, Human
uaaauaaaguuu

SEQ ID NO: 3158898 - RNA, 21 nt, Human
uaaauaaaguuuguugaaaca

SEQ ID NO: 3158899 - RNA, 17 nt, Human
uaaauuuugaguucuac

SEQ ID NO: 3158900 - RNA, 24 nt, Human
uaaauguuuuuuuuuaaagacuuu

SEQ ID NO: 3158901 - RNA, 23 nt, Human
uaaauguuuuuuuuuaaagacuu

SEQ ID NO: 3158902 - RNA, 15 nt, Human
uaagaauauuugaau

SEQ ID NO: 3158903 - RNA, 18 nt, Human
uaagaauauuugaaugua

SEQ ID NO: 3158904 - RNA, 18 nt, Human
aauauuguguugugaaug

SEQ ID NO: 3158905 - RNA, 20 nt, Human
aauauugcuuuggucauaug

SEQ ID NO: 3158906 - RNA, 18 nt, Human
aauaggcguaacuaauuu

SEQ ID NO: 3158907 - RNA, 19 nt, Human
uaaauuuugaguucuacau

SEQ ID NO: 3158908 - RNA, 18 nt, Human
uaaauuuugaguucuaca

SEQ ID NO: 3158909 - RNA, 20 nt, Human
uaaauuuugucuuuaacuca

SEQ ID NO: 3158910 - RNA, 14 nt, Human
uaacaugauuuggg

SEQ ID NO: 3158911 - RNA, 15 nt, Human
aaucaucaagucuuu

SEQ ID NO: 3158912 - RNA, 17 nt, Human
aaucauggugcucagag

SEQ ID NO: 3158913 - RNA, 20 nt, Human
uaaguauguguaaaauguga

SEQ ID NO: 3158914 - RNA, 14 nt, Human
aaucagacuaugaa

SEQ ID NO: 3158915 - RNA, 17 nt, Human
aaucagacuaugaaguu

SEQ ID NO: 3158916 - RNA, 12 nt, Human
uaaguucauaca

SEQ ID NO: 3158917 - RNA, 13 nt, Human
uaaguucauacau

SEQ ID NO: 3158918 - RNA, 14 nt, Human
aaucuuauaauuua

SEQ ID NO: 3158919 - RNA, 15 nt, Human
aaugaaaaccacauu

SEQ ID NO: 3158920 - RNA, 22 nt, Human
aaugacagguuugggaccccug

SEQ ID NO: 3158921 - RNA, 20 nt, Human
aaugacucagaauauugcuu

SEQ ID NO: 3158922 - RNA, 14 nt, Human
uaaugguguuuuaa

SEQ ID NO: 3158923 - RNA, 23 nt, Human
uaaucagugugucuaaauuugaa

SEQ ID NO: 3158924 - RNA, 15 nt, Human
uaaugaaacuuggau

SEQ ID NO: 3158925 - RNA, 14 nt, Human
uaaugaaacuugga

SEQ ID NO: 3158926 - RNA, 21 nt, Human
aauguaugcuucauacaggga

SEQ ID NO: 3158927 - RNA, 18 nt, Human
aauguaugcuucauacag

SEQ ID NO: 3158928 - RNA, 17 nt, Human
aauguaugcuucauaca

SEQ ID NO: 3158929 - RNA, 17 nt, Human
uacauauuuuuguagca

SEQ ID NO: 3158930 - RNA, 18 nt, Human
uacauauuuuuguagcac

SEQ ID NO: 3158931 - RNA, 19 nt, Human
uacauauaagugauugcug

SEQ ID NO: 3158932 - RNA, 19 nt, Human
aauggacuuuuguacauag

SEQ ID NO: 3158933 - RNA, 18 nt, Human
uacagaggacaguauuug

SEQ ID NO: 3158934 - RNA, 14 nt, Human
uacagaggacagua

SEQ ID NO: 3158935 - RNA, 13 nt, Human
uaauucaagaaaa

SEQ ID NO: 3158936 - RNA, 16 nt, Human
uaauuuaaaauuguga

SEQ ID NO: 3158937 - RNA, 15 nt, Human
uaauuuaaaauugug

SEQ ID NO: 3158938 - RNA, 17 nt, Human
uaauuuauacaggucau

SEQ ID NO: 3158939 - RNA, 18 nt, Human
uacuagggaaaugccuuu

SEQ ID NO: 3158940 - RNA, 16 nt, Human
uacugggagccuaccc

SEQ ID NO: 3158941 - RNA, 19 nt, Human
uacuguacagacagaaaaa

SEQ ID NO: 3158942 - RNA, 23 nt, Human
uacuguacagacagaaaaaacug

SEQ ID NO: 3158943 - RNA, 15 nt, Human
uacuugaaaauuaac

SEQ ID NO: 3158944 - RNA, 16 nt, Human
aauuuauacaggucau

SEQ ID NO: 3158945 - RNA, 17 nt, Human
aauuuauacaggucaua

SEQ ID NO: 3158946 - RNA, 22 nt, Human
aauuuauaaacuuuuuucuuac

SEQ ID NO: 3158947 - RNA, 17 nt, Human
acaagaugguucuagca

SEQ ID NO: 3158948 - RNA, 18 nt, Human
acaaauucugucucugga

SEQ ID NO: 3158949 - RNA, 21 nt, Human
acaaauucugucucuggauua

SEQ ID NO: 3158950 - RNA, 16 nt, Human
uagcuacuaauuuuaa

SEQ ID NO: 3158951 - RNA, 18 nt, Human
acaaugaagauaaaaaga

SEQ ID NO: 3158952 - RNA, 22 nt, Human
aauuuuuaaucuuuaauuuuac

SEQ ID NO: 3158953 - RNA, 22 nt, Human
uagauaggucagugcaaauacu

SEQ ID NO: 3158954 - RNA, 20 nt, Human
acacuguucugaaagugacu

SEQ ID NO: 3158955 - RNA, 14 nt, Human
acacuguucugaaa

SEQ ID NO: 3158956 - RNA, 16 nt, Human
uauaaguauucuaaau

SEQ ID NO: 3158957 - RNA, 16 nt, Human
acacucacccaacaau

SEQ ID NO: 3158958 - RNA, 12 nt, Human
uauauuuacaaa

SEQ ID NO: 3158959 - RNA, 15 nt, Human
uauauuuaaugauaa

SEQ ID NO: 3158960 - RNA, 16 nt, Human
uaucuuguagcuuuau

SEQ ID NO: 3158961 - RNA, 14 nt, Human
acagauaaucagug

SEQ ID NO: 3158962 - RNA, 18 nt, Human
acacaacuauuuuuccaa

SEQ ID NO: 3158963 - RNA, 14 nt, Human
uaguaauagagcaa

SEQ ID NO: 3158964 - RNA, 13 nt, Human
uaguguucauaaa

SEQ ID NO: 3158965 - RNA, 20 nt, Human
uaguaauagagcaaaauuga

SEQ ID NO: 3158966 - RNA, 20 nt, Human
uauaaaaauaaaaaacacug

SEQ ID NO: 3158967 - RNA, 21 nt, Human
uauaaaaauaaaaaacacugg

SEQ ID NO: 3158968 - RNA, 17 nt, Human
acaccccgacuuuuguu

SEQ ID NO: 3158969 - RNA, 17 nt, Human
aagcuaucguaaaauua

SEQ ID NO: 3158970 - RNA, 18 nt, Human
guucuagcauggcauauu

SEQ ID NO: 3158971 - RNA, 10 nt, Human
guucauacau

SEQ ID NO: 3158972 - RNA, 13 nt, Human
guucauacauauu

SEQ ID NO: 3158973 - RNA, 14 nt, Human
guucauacauauuu

SEQ ID NO: 3158974 - RNA, 23 nt, Human
guucauacauauuuuuguagcac

SEQ ID NO: 3158975 - RNA, 9 nt, Human
guucauaca

SEQ ID NO: 3158976 - RNA, 11 nt, Human
guucauacauu

SEQ ID NO: 3158977 - RNA, 14 nt, Human
guucauacauugua

SEQ ID NO: 3158978 - RNA, 15 nt, Human
aagccucgacacaga

SEQ ID NO: 3158979 - RNA, 15 nt, Human
aagccuggucagccc

SEQ ID NO: 3158980 - RNA, 14 nt, Human
guuaaguaugugua

SEQ ID NO: 3158981 - RNA, 18 nt, Human
guguuuuaaaaugagaaa

SEQ ID NO: 3158982 - RNA, 21 nt, Human
aagggguaggauuacuaggug

SEQ ID NO: 3158983 - RNA, 13 nt, Human
aaguaaaaacaaa

SEQ ID NO: 3158984 - RNA, 20 nt, Human
aaguaaaaacaaagaaauua

SEQ ID NO: 3158985 - RNA, 16 nt, Human
guuuucuuaacuuaaa

SEQ ID NO: 3158986 - RNA, 20 nt, Human
guuuucuuaaccagaucauu

SEQ ID NO: 3158987 - RNA, 22 nt, Human
guuugggaccccuggugguuca

SEQ ID NO: 3158988 - RNA, 16 nt, Human
guuugggaccccuggu

SEQ ID NO: 3158989 - RNA, 19 nt, Human
guuugcaucugaaaauuga

SEQ ID NO: 3158990 - RNA, 16 nt, Human
guuuaugugugugugu

SEQ ID NO: 3158991 - RNA, 13 nt, Human
guuuaugugugug

SEQ ID NO: 3158992 - RNA, 18 nt, Human
guuguaucagcacgugug

SEQ ID NO: 3158993 - RNA, 23 nt, Human
aaggcuauggggauagaugugug

SEQ ID NO: 3158994 - RNA, 13 nt, Human
aagaaauauaccu

SEQ ID NO: 3158995 - RNA, 15 nt, Human
aacuuguauuaugug

SEQ ID NO: 3158996 - RNA, 16 nt, Human
aacuuguauuaugugu

SEQ ID NO: 3158997 - RNA, 20 nt, Human
aagaauugucuuucugucuc

SEQ ID NO: 3158998 - RNA, 14 nt, Human
guggcacuggggca

SEQ ID NO: 3158999 - RNA, 22 nt, Human
guggaagugugggucugugugu

SEQ ID NO: 3159000 - RNA, 21 nt, Human
guggaagugugggucugugug

SEQ ID NO: 3159001 - RNA, 16 nt, Human
guggaauuauuuuaaa

SEQ ID NO: 3159002 - RNA, 18 nt, Human
guggaauuauuuuaaaag

SEQ ID NO: 3159003 - RNA, 15 nt, Human
guggaauuauuuuaa

SEQ ID NO: 3159004 - RNA, 19 nt, Human
guggaauuauuuuaaaaga

SEQ ID NO: 3159005 - RNA, 20 nt, Human
guggaagugugggucugugu

SEQ ID NO: 3159006 - RNA, 19 nt, Human
guggaagugugggucugug

SEQ ID NO: 3159007 - RNA, 15 nt, Human
guggaaguguggguc

SEQ ID NO: 3159008 - RNA, 14 nt, Human
guggaagugugggu

SEQ ID NO: 3159009 - RNA, 23 nt, Human
gugcuauuguagagccagagguc

SEQ ID NO: 3159010 - RNA, 15 nt, Human
gugcucaggagcccu

SEQ ID NO: 3159011 - RNA, 14 nt, Human
gugggaguguguaa

SEQ ID NO: 3159012 - RNA, 13 nt, Human
gugggagugugua

SEQ ID NO: 3159013 - RNA, 14 nt, Human
gugguggcucggga

SEQ ID NO: 3159014 - RNA, 16 nt, Human
gugggucugugugugu

SEQ ID NO: 3159015 - RNA, 13 nt, Human
gugggucugugug

SEQ ID NO: 3159016 - RNA, 23 nt, Human
guggggggggggcgcggcuggga

SEQ ID NO: 3159017 - RNA, 16 nt, Human
guggggggcuucauac

SEQ ID NO: 3159018 - RNA, 15 nt, Human
guggggggcuucaua

SEQ ID NO: 3159019 - RNA, 14 nt, Human
guguguaauuuaaa

SEQ ID NO: 3159020 - RNA, 17 nt, Human
gugucuuuccacuccuc

SEQ ID NO: 3159021 - RNA, 15 nt, Human
guguuguguguggga

SEQ ID NO: 3159022 - RNA, 13 nt, Human
guguuuauuuaua

SEQ ID NO: 3159023 - RNA, 18 nt, Human
guguuuccauauuuuaua

SEQ ID NO: 3159024 - RNA, 11 nt, Human
aaaugagaaau

SEQ ID NO: 3159025 - RNA, 9 nt, Human
aaaugaggg

SEQ ID NO: 3159026 - RNA, 16 nt, Human
aaaugagaaaucuaaa

SEQ ID NO: 3159027 - RNA, 13 nt, Human
aaaugagaaaucu

SEQ ID NO: 3159028 - RNA, 14 nt, Human
aaaugagaaaucua

SEQ ID NO: 3159029 - RNA, 14 nt, Human
aaaugcauuucuaa

SEQ ID NO: 3159030 - RNA, 13 nt, Human
aaaugcauguugc

SEQ ID NO: 3159031 - RNA, 14 nt, Human
aaaucuaugauucc

SEQ ID NO: 3159032 - RNA, 16 nt, Human
aaaucuaugauuccag

SEQ ID NO: 3159033 - RNA, 14 nt, Human
aaaugaaaaaauau

SEQ ID NO: 3159034 - RNA, 13 nt, Human
guaggauuacuag

SEQ ID NO: 3159035 - RNA, 16 nt, Human
guaggaacugcugggc

SEQ ID NO: 3159036 - RNA, 17 nt, Human
aaauuucagcagcugca

SEQ ID NO: 3159037 - RNA, 18 nt, Human
aaauuucagcagcugcag

SEQ ID NO: 3159038 - RNA, 20 nt, Human
guauuuuugacagaauaugu

SEQ ID NO: 3159039 - RNA, 16 nt, Human
guauuuuugacagaau

SEQ ID NO: 3159040 - RNA, 20 nt, Human
aaauuauuuuguucauacau

SEQ ID NO: 3159041 - RNA, 21 nt, Human
aaauuauuuuguucauacaua

SEQ ID NO: 3159042 - RNA, 22 nt, Human
aaauuauuuuguucauacauau

SEQ ID NO: 3159043 - RNA, 17 nt, Human
aaauuauuuuguucaua

SEQ ID NO: 3159044 - RNA, 19 nt, Human
aaauuauuuuguucauaca

SEQ ID NO: 3159045 - RNA, 22 nt, Human
aaauuauauaaguauucuaaau

SEQ ID NO: 3159046 - RNA, 16 nt, Human
aaauuauauaaguauu

SEQ ID NO: 3159047 - RNA, 18 nt, Human
aaauuauauaaguauucu

SEQ ID NO: 3159048 - RNA, 16 nt, Human
guauuuaauucauguu

SEQ ID NO: 3159049 - RNA, 17 nt, Human
guauaaaagccuguuua

SEQ ID NO: 3159050 - RNA, 22 nt, Human
guauauugauccagaaagaaaa

SEQ ID NO: 3159051 - RNA, 18 nt, Human
guauaaaagccuguuuaa

SEQ ID NO: 3159052 - RNA, 21 nt, Human
guauaaaagccuguuuaagag

SEQ ID NO: 3159053 - RNA, 15 nt, Human
guauguggaagugug

SEQ ID NO: 3159054 - RNA, 17 nt, Human
guauguggaaguguggg

SEQ ID NO: 3159055 - RNA, 16 nt, Human
guauguggaagugugg

SEQ ID NO: 3159056 - RNA, 20 nt, Human
guaugugggggucugugugu

SEQ ID NO: 3159057 - RNA, 19 nt, Human
guaugugggggucugugug

SEQ ID NO: 3159058 - RNA, 21 nt, Human
guauguggaagugugggucug

SEQ ID NO: 3159059 - RNA, 18 nt, Human
guauguggaagugugggu

SEQ ID NO: 3159060 - RNA, 12 nt, Human
gucuggcugcag

SEQ ID NO: 3159061 - RNA, 13 nt, Human
gucuggcugcaga

SEQ ID NO: 3159062 - RNA, 14 nt, Human
gucuggcugcagag

SEQ ID NO: 3159063 - RNA, 19 nt, Human
aacucgugucuggcacagc

SEQ ID NO: 3159064 - RNA, 17 nt, Human
aaccucaaaaugucuaa

SEQ ID NO: 3159065 - RNA, 15 nt, Human
aaccucaaagugacu

SEQ ID NO: 3159066 - RNA, 12 nt, Human
gucucccuccuc

SEQ ID NO: 3159067 - RNA, 16 nt, Human
gucucccuccucugcc

SEQ ID NO: 3159068 - RNA, 19 nt, Human
aaccaaagcgaauuuuaaa

SEQ ID NO: 3159069 - RNA, 20 nt, Human
aacauuuguucuauagcuuu

SEQ ID NO: 3159070 - RNA, 21 nt, Human
aacaagccuccuuuuaaagua

SEQ ID NO: 3159071 - RNA, 23 nt, Human
aaauuuuuaaucuuuaauuuuac

SEQ ID NO: 3159072 - RNA, 14 nt, Human
aacaaugaagauaa

SEQ ID NO: 3159073 - RNA, 18 nt, Human
aacaaugaagauaaaaag

SEQ ID NO: 3159074 - RNA, 12 nt, Human
aacacugccagc

SEQ ID NO: 3159075 - RNA, 22 nt, Human
aacacugccagcauuucccuuc

SEQ ID NO: 3159076 - RNA, 19 nt, Human
agagaauuguuugaacccg

SEQ ID NO: 3159077 - RNA, 19 nt, Human
agacuucccacggcuccuc

SEQ ID NO: 3159078 - RNA, 21 nt, Human
agacugucagcuuccaaacau

SEQ ID NO: 3159079 - RNA, 13 nt, Human
ucuuucuuccaaa

SEQ ID NO: 3159080 - RNA, 17 nt, Human
ucuugguuccagccugc

SEQ ID NO: 3159081 - RNA, 18 nt, Human
ucuugguuccagccugcc

SEQ ID NO: 3159082 - RNA, 19 nt, Human
ucuugguuccagccugcca

SEQ ID NO: 3159083 - RNA, 13 nt, Human
ucuugguuccagc

SEQ ID NO: 3159084 - RNA, 14 nt, Human
ucuuuaauuuuaca

SEQ ID NO: 3159085 - RNA, 21 nt, Human
agacauuugcuaugagcuggg

SEQ ID NO: 3159086 - RNA, 19 nt, Human
ucuuacugucuuuuuucua

SEQ ID NO: 3159087 - RNA, 12 nt, Human
agacagaaaaaa

SEQ ID NO: 3159088 - RNA, 20 nt, Human
agacacaacuauuuuuccaa

SEQ ID NO: 3159089 - RNA, 19 nt, Human
agacacaacuauuuuucca

SEQ ID NO: 3159090 - RNA, 19 nt, Human
agaaugucaguauguggaa

SEQ ID NO: 3159091 - RNA, 17 nt, Human
agaaugucaguaugugg

SEQ ID NO: 3159092 - RNA, 13 nt, Human
agaaugucaguau

SEQ ID NO: 3159093 - RNA, 16 nt, Human
agaaugucaguaugug

SEQ ID NO: 3159094 - RNA, 15 nt, Human
agaaugucaguaugu

SEQ ID NO: 3159095 - RNA, 22 nt, Human
agaaccccuggcuccaggccag

SEQ ID NO: 3159096 - RNA, 20 nt, Human
agaguugaugguuguacaua

SEQ ID NO: 3159097 - RNA, 14 nt, Human
agagucccugccug

SEQ ID NO: 3159098 - RNA, 17 nt, Human
agagucccugccuggac

SEQ ID NO: 3159099 - RNA, 23 nt, Human
agaguccaucagccuccauccua

SEQ ID NO: 3159100 - RNA, 14 nt, Human
agauaaauauuaua

SEQ ID NO: 3159101 - RNA, 17 nt, Human
agauaaagguucaugca

SEQ ID NO: 3159102 - RNA, 12 nt, Human
agauaaauauua

SEQ ID NO: 3159103 - RNA, 17 nt, Human
ugacauaaaaacaacuu

SEQ ID NO: 3159104 - RNA, 18 nt, Human
ugacauaaaaacaacuuu

SEQ ID NO: 3159105 - RNA, 20 nt, Human
ugacauaaaaacaacuuuau

SEQ ID NO: 3159106 - RNA, 22 nt, Human
agauguggaaaagccaagaggc

SEQ ID NO: 3159107 - RNA, 17 nt, Human
agauguggaaaagccaa

SEQ ID NO: 3159108 - RNA, 19 nt, Human
agaucccaacacugccagc

SEQ ID NO: 3159109 - RNA, 20 nt, Human
agaucccaacacugccagca

SEQ ID NO: 3159110 - RNA, 18 nt, Human
agaucccaacacugccag

SEQ ID NO: 3159111 - RNA, 14 nt, Human
agagcaaaauugau

SEQ ID NO: 3159112 - RNA, 16 nt, Human
agagcagugggccugg

SEQ ID NO: 3159113 - RNA, 11 nt, Human
ugaaagugacu

SEQ ID NO: 3159114 - RNA, 15 nt, Human
ugaaauuguauuaca

SEQ ID NO: 3159115 - RNA, 14 nt, Human
agagcugcgggcug

SEQ ID NO: 3159116 - RNA, 21 nt, Human
ugaacuaggauuguaguccca

SEQ ID NO: 3159117 - RNA, 22 nt, Human
agaguaauccaagcaaauguga

SEQ ID NO: 3159118 - RNA, 21 nt, Human
agaggccauucuuucccaaca

SEQ ID NO: 3159119 - RNA, 22 nt, Human
ucuacauaaguaauucaagaaa

SEQ ID NO: 3159120 - RNA, 16 nt, Human
acuguucccugaggug

SEQ ID NO: 3159121 - RNA, 19 nt, Human
acuguucccugagguggga

SEQ ID NO: 3159122 - RNA, 20 nt, Human
ucuaaagccauuguaguccu

SEQ ID NO: 3159123 - RNA, 20 nt, Human
ucuacauaaguaauucaaga

SEQ ID NO: 3159124 - RNA, 17 nt, Human
ucuacauaaguaauuca

SEQ ID NO: 3159125 - RNA, 16 nt, Human
acugggagaaaugaaa

SEQ ID NO: 3159126 - RNA, 12 nt, Human
acugugugcuca

SEQ ID NO: 3159127 - RNA, 15 nt, Human
acugugugcucagga

SEQ ID NO: 3159128 - RNA, 19 nt, Human
acugugugcucaggagccc

SEQ ID NO: 3159129 - RNA, 20 nt, Human
acugugugcucaggagcccu

SEQ ID NO: 3159130 - RNA, 21 nt, Human
acugugugcucaggagcccug

SEQ ID NO: 3159131 - RNA, 22 nt, Human
ucguuuucaaaauuguuacaaa

SEQ ID NO: 3159132 - RNA, 16 nt, Human
ucguaaaauuaagaaa

SEQ ID NO: 3159133 - RNA, 13 nt, Human
ucguaaaauuaag

SEQ ID NO: 3159134 - RNA, 16 nt, Human
acugcuaagaauauuu

SEQ ID NO: 3159135 - RNA, 18 nt, Human
acugcuaagaauauuuga

SEQ ID NO: 3159136 - RNA, 16 nt, Human
acugccuauuuuaaua

SEQ ID NO: 3159137 - RNA, 21 nt, Human
acugccuauuuuaauaaacac

SEQ ID NO: 3159138 - RNA, 18 nt, Human
ucgagaucccaacacugc

SEQ ID NO: 3159139 - RNA, 21 nt, Human
ucgagaucccaacacugccag

SEQ ID NO: 3159140 - RNA, 17 nt, Human
ucgagaucccaacacug

SEQ ID NO: 3159141 - RNA, 22 nt, Human
uccuuucuaacaaaaaaauaua

SEQ ID NO: 3159142 - RNA, 23 nt, Human
acuggccaguggcuggaucugug

SEQ ID NO: 3159143 - RNA, 16 nt, Human
ucucauuccagaggaa

SEQ ID NO: 3159144 - RNA, 19 nt, Human
ucucuggaauuugaaacac

SEQ ID NO: 3159145 - RNA, 15 nt, Human
ucucuggaauuugaa

SEQ ID NO: 3159146 - RNA, 20 nt, Human
agaaaaagcaauaaccucaa

SEQ ID NO: 3159147 - RNA, 21 nt, Human
agaaaacuuguauuaugugug

SEQ ID NO: 3159148 - RNA, 19 nt, Human
agaaaacuuguauuaugug

SEQ ID NO: 3159149 - RNA, 16 nt, Human
agaaaugaaaaaauau

SEQ ID NO: 3159150 - RNA, 18 nt, Human
agaaaugaaaaaauauau

SEQ ID NO: 3159151 - RNA, 23 nt, Human
agaaaugaaaaaauauauaucaa

SEQ ID NO: 3159152 - RNA, 17 nt, Human
agaaaucaaagagagaa

SEQ ID NO: 3159153 - RNA, 17 nt, Human
agaaaugaaaaaauaua

SEQ ID NO: 3159154 - RNA, 12 nt, Human
agaaaucuaaaa

SEQ ID NO: 3159155 - RNA, 14 nt, Human
ucugagagaggcca

SEQ ID NO: 3159156 - RNA, 20 nt, Human
ucugagagaggccauucuuu

SEQ ID NO: 3159157 - RNA, 14 nt, Human
ucugacuaugacau

SEQ ID NO: 3159158 - RNA, 16 nt, Human
ucugacuaugacauaa

SEQ ID NO: 3159159 - RNA, 15 nt, Human
ucugcaggucccuaa

SEQ ID NO: 3159160 - RNA, 16 nt, Human
ucugcaggucccuaau

SEQ ID NO: 3159161 - RNA, 17 nt, Human
ucugcaggucccuaaua

SEQ ID NO: 3159162 - RNA, 22 nt, Human
agaaauuaugugccagauuuau

SEQ ID NO: 3159163 - RNA, 16 nt, Human
agaaauuuauaaacuu

SEQ ID NO: 3159164 - RNA, 17 nt, Human
agaaauuuauaaacuuu

SEQ ID NO: 3159165 - RNA, 12 nt, Human
agaaauuaugug

SEQ ID NO: 3159166 - RNA, 14 nt, Human
ucugcaggucccua

SEQ ID NO: 3159167 - RNA, 18 nt, Human
ucugcaggucccuaauaa

SEQ ID NO: 3159168 - RNA, 13 nt, Human
agaaauuaugugc

SEQ ID NO: 3159169 - RNA, 21 nt, Human
agaaauuaugugccagauuua

SEQ ID NO: 3159170 - RNA, 22 nt, Human
acguauaaaagccuguuuaaga

SEQ ID NO: 3159171 - RNA, 14 nt, Human
acuacuagggaaau

SEQ ID NO: 3159172 - RNA, 21 nt, Human
acuacuagggaaaugccuuug

SEQ ID NO: 3159173 - RNA, 20 nt, Human
ucccugaggcagguccccag

SEQ ID NO: 3159174 - RNA, 21 nt, Human
ucccugaggcagguccccaga

SEQ ID NO: 3159175 - RNA, 22 nt, Human
ucccugaggcagguccccagac

SEQ ID NO: 3159176 - RNA, 11 nt, Human
ucccugaggca

SEQ ID NO: 3159177 - RNA, 20 nt, Human
ucccugaaggaaccaaagcg

SEQ ID NO: 3159178 - RNA, 19 nt, Human
ucccuuucugcuuguguua

SEQ ID NO: 3159179 - RNA, 19 nt, Human
uccuaaauauauuuuaaga

SEQ ID NO: 3159180 - RNA, 18 nt, Human
acucaugugacucuuucc

SEQ ID NO: 3159181 - RNA, 19 nt, Human
acucaugugacucuuucca

SEQ ID NO: 3159182 - RNA, 14 nt, Human
acuccuccuagcca

SEQ ID NO: 3159183 - RNA, 13 nt, Human
acuccuccuagcc

SEQ ID NO: 3159184 - RNA, 15 nt, Human
acuccuccuagccac

SEQ ID NO: 3159185 - RNA, 16 nt, Human
acuccuccuagccacc

SEQ ID NO: 3159186 - RNA, 18 nt, Human
acuccuccuagccaccca

SEQ ID NO: 3159187 - RNA, 19 nt, Human
acuccagccuggcgacaga

SEQ ID NO: 3159188 - RNA, 14 nt, Human
ucaucuaggauuuu

SEQ ID NO: 3159189 - RNA, 18 nt, Human
ucaucuagguaaauuaca

SEQ ID NO: 3159190 - RNA, 19 nt, Human
accucaaaaugucuaagau

SEQ ID NO: 3159191 - RNA, 16 nt, Human
accucaaaaugucuaa

SEQ ID NO: 3159192 - RNA, 21 nt, Human
uccaaccggcuuuguggcacu

SEQ ID NO: 3159193 - RNA, 19 nt, Human
acgagaucaagagaucaag

SEQ ID NO: 3159194 - RNA, 14 nt, Human
acgagaaaacaaua

SEQ ID NO: 3159195 - RNA, 18 nt, Human
uccaggccagggggccag

SEQ ID NO: 3159196 - RNA, 16 nt, Human
uccaggccagggggcc

SEQ ID NO: 3159197 - RNA, 14 nt, Human
uccacucaugugac

SEQ ID NO: 3159198 - RNA, 21 nt, Human
uccacucaugugacucuuucc

SEQ ID NO: 3159199 - RNA, 15 nt, Human
uccacuccuccuagc

SEQ ID NO: 3159200 - RNA, 18 nt, Human
uccacuccuccuagccac

SEQ ID NO: 3159201 - RNA, 18 nt, Human
uccacuggggauugggcc

SEQ ID NO: 3159202 - RNA, 14 nt, Human
accagaagcccaga

SEQ ID NO: 3159203 - RNA, 16 nt, Human
accagaagcccagaau

SEQ ID NO: 3159204 - RNA, 13 nt, Human
accagaagcccag

SEQ ID NO: 3159205 - RNA, 17 nt, Human
ucacuaccuucaugcau

SEQ ID NO: 3159206 - RNA, 15 nt, Human
ucaauucuugccaaa

SEQ ID NO: 3159207 - RNA, 22 nt, Human
accacacguaaugaaacuugga

SEQ ID NO: 3159208 - RNA, 17 nt, Human
ucacauaucuaguauga

SEQ ID NO: 3159209 - RNA, 21 nt, Human
ucacauaucuaguaugaaauu

SEQ ID NO: 3159210 - RNA, 22 nt, Human
ucacauaucuaguaugaaauua

SEQ ID NO: 3159211 - RNA, 19 nt, Human
ucacaccuguaaucccaac

SEQ ID NO: 3159212 - RNA, 21 nt, Human
ucagcccaaaccaccagaagc

SEQ ID NO: 3159213 - RNA, 22 nt, Human
ucagcccaaaccaccagaagcc

SEQ ID NO: 3159214 - RNA, 23 nt, Human
accccagcuggggccaggcuggg

SEQ ID NO: 3159215 - RNA, 22 nt, Human
accccagcuggggccaggcugg

SEQ ID NO: 3159216 - RNA, 23 nt, Human
accauuucuugagguaaaagcau

SEQ ID NO: 3159217 - RNA, 13 nt, Human
ucacucuuggagc

SEQ ID NO: 3159218 - RNA, 16 nt, Human
acauaaaaacaacuuu

SEQ ID NO: 3159219 - RNA, 19 nt, Human
acauaaaaacaacuuuaua

SEQ ID NO: 3159220 - RNA, 21 nt, Human
acauaaaaacaacuuuauacc

SEQ ID NO: 3159221 - RNA, 21 nt, Human
uauuuccauuaaaaaaucagu

SEQ ID NO: 3159222 - RNA, 22 nt, Human
uauuucccugaaggaaccaaag

SEQ ID NO: 3159223 - RNA, 20 nt, Human
acauaucuaguaugaaauua

SEQ ID NO: 3159224 - RNA, 22 nt, Human
acauaucuaguaugaaauuaua

SEQ ID NO: 3159225 - RNA, 23 nt, Human
acauaucuaguaugaaauuauau

SEQ ID NO: 3159226 - RNA, 17 nt, Human
acauaucuaguaugaaa

SEQ ID NO: 3159227 - RNA, 14 nt, Human
ucaaagcugaaaug

SEQ ID NO: 3159228 - RNA, 17 nt, Human
ucaaagggugaaaauua

SEQ ID NO: 3159229 - RNA, 14 nt, Human
ucaaaaugucuaag

SEQ ID NO: 3159230 - RNA, 16 nt, Human
ucaaaauuguuacaaa

SEQ ID NO: 3159231 - RNA, 19 nt, Human
ucaaaauuguuacaaauug

SEQ ID NO: 3159232 - RNA, 19 nt, Human
uauuuuugacagaauaugu

SEQ ID NO: 3159233 - RNA, 23 nt, Human
uauuuuugacagaauauguuuca

SEQ ID NO: 3159234 - RNA, 14 nt, Human
uauuuuugacagaa

SEQ ID NO: 3159235 - RNA, 15 nt, Human
uauuuuugacagaau

SEQ ID NO: 3159236 - RNA, 13 nt, Human
uauuuuugacaga

SEQ ID NO: 3159237 - RNA, 16 nt, Human
uauuuguaaauuuaug

SEQ ID NO: 3159238 - RNA, 22 nt, Human
uauuuguaaauuuaugugaugg

SEQ ID NO: 3159239 - RNA, 17 nt, Human
uauuuguaaauuuaugu

SEQ ID NO: 3159240 - RNA, 21 nt, Human
uguuccgugguuaaacucgcu

SEQ ID NO: 3159241 - RNA, 14 nt, Human
agugugucuaaauu

SEQ ID NO: 3159242 - RNA, 15 nt, Human
uguucugugauauaa

SEQ ID NO: 3159243 - RNA, 18 nt, Human
uguucugugauauaagug

SEQ ID NO: 3159244 - RNA, 17 nt, Human
aguguacuuaacuauuc

SEQ ID NO: 3159245 - RNA, 20 nt, Human
ugugggucugugugugugua

SEQ ID NO: 3159246 - RNA, 14 nt, Human
uguguguguaugug

SEQ ID NO: 3159247 - RNA, 20 nt, Human
ugugugugggaguguguaau

SEQ ID NO: 3159248 - RNA, 12 nt, Human
ugugugugggag

SEQ ID NO: 3159249 - RNA, 16 nt, Human
uguuaaguauguguaa

SEQ ID NO: 3159250 - RNA, 15 nt, Human
uguuaaguaugugua

SEQ ID NO: 3159251 - RNA, 19 nt, Human
uguguuaaguauguguaaa

SEQ ID NO: 3159252 - RNA, 15 nt, Human
agugaaagaaaauaa

SEQ ID NO: 3159253 - RNA, 14 nt, Human
ugugauguauucua

SEQ ID NO: 3159254 - RNA, 18 nt, Human
ugugccagauuuaugcau

SEQ ID NO: 3159255 - RNA, 20 nt, Human
ugugccagauuuaugcauau

SEQ ID NO: 3159256 - RNA, 14 nt, Human
ugugcccacccucc

SEQ ID NO: 3159257 - RNA, 23 nt, Human
ugugcccacccuccacucuccuc

SEQ ID NO: 3159258 - RNA, 16 nt, Human
uguggcauccagaguc

SEQ ID NO: 3159259 - RNA, 23 nt, Human
uguggcaguuuggcaaacucucc

SEQ ID NO: 3159260 - RNA, 19 nt, Human
uguggcauccagagucccu

SEQ ID NO: 3159261 - RNA, 21 nt, Human
uguggcauccagagucccugc

SEQ ID NO: 3159262 - RNA, 18 nt, Human
agucacuaccuucaugca

SEQ ID NO: 3159263 - RNA, 12 nt, Human
ugugaaauuauu

SEQ ID NO: 3159264 - RNA, 12 nt, Human
ugugacucuuuc

SEQ ID NO: 3159265 - RNA, 14 nt, Human
ugugacucuuucca

SEQ ID NO: 3159266 - RNA, 15 nt, Human
ugugaacagcggcug

SEQ ID NO: 3159267 - RNA, 18 nt, Human
agucuuucacauuuaaau

SEQ ID NO: 3159268 - RNA, 15 nt, Human
ugugacucuuuccaa

SEQ ID NO: 3159269 - RNA, 17 nt, Human
ugugacucuuuccaacc

SEQ ID NO: 3159270 - RNA, 22 nt, Human
auaaaagggacugagaaauuua

SEQ ID NO: 3159271 - RNA, 18 nt, Human
uuaaguaaggaauuuuau

SEQ ID NO: 3159272 - RNA, 17 nt, Human
uuaauuccaauuauaug

SEQ ID NO: 3159273 - RNA, 17 nt, Human
uuaauaaacacucuuga

SEQ ID NO: 3159274 - RNA, 13 nt, Human
uuaauaaacacuc

SEQ ID NO: 3159275 - RNA, 20 nt, Human
auaaaauuuuuaaucuuuaa

SEQ ID NO: 3159276 - RNA, 22 nt, Human
auaaaauucuauuacaguaugu

SEQ ID NO: 3159277 - RNA, 22 nt, Human
auaaauauuauauuauauauau

SEQ ID NO: 3159278 - RNA, 12 nt, Human
auaaauauuaua

SEQ ID NO: 3159279 - RNA, 15 nt, Human
uuagaagaagugugu

SEQ ID NO: 3159280 - RNA, 14 nt, Human
uuagaagaagugug

SEQ ID NO: 3159281 - RNA, 16 nt, Human
uuagaagaaguguguc

SEQ ID NO: 3159282 - RNA, 12 nt, Human
aguuuagggugg

SEQ ID NO: 3159283 - RNA, 13 nt, Human
aguuuaggguggg

SEQ ID NO: 3159284 - RNA, 14 nt, Human
aguuuagggugggg

SEQ ID NO: 3159285 - RNA, 18 nt, Human
uuaaaauugugauguguc

SEQ ID NO: 3159286 - RNA, 13 nt, Human
uuaaaauugugau

SEQ ID NO: 3159287 - RNA, 13 nt, Human
uguuuaugugugu

SEQ ID NO: 3159288 - RNA, 16 nt, Human
uguuuaugugugugug

SEQ ID NO: 3159289 - RNA, 19 nt, Human
uguugccuugcauaauggu

SEQ ID NO: 3159290 - RNA, 24 nt, Human
uguuuauuuauagaguguacuuaa

SEQ ID NO: 3159291 - RNA, 14 nt, Human
uguuuauuuauaga

SEQ ID NO: 3159292 - RNA, 18 nt, Human
uguuucuuuguaaugaaa

SEQ ID NO: 3159293 - RNA, 19 nt, Human
uguuucuuuguaaugaaaa

SEQ ID NO: 3159294 - RNA, 19 nt, Human
uguuuugaaucucauaauu

SEQ ID NO: 3159295 - RNA, 12 nt, Human
aguucugccagg

SEQ ID NO: 3159296 - RNA, 13 nt, Human
aguucugccagga

SEQ ID NO: 3159297 - RNA, 14 nt, Human
aguucugccaggag

SEQ ID NO: 3159298 - RNA, 20 nt, Human
aguucugccaggagacaggu

SEQ ID NO: 3159299 - RNA, 15 nt, Human
ugggccccugccucu

SEQ ID NO: 3159300 - RNA, 19 nt, Human
ugggccccugccucucugc

SEQ ID NO: 3159301 - RNA, 15 nt, Human
ugggccccugccaga

SEQ ID NO: 3159302 - RNA, 13 nt, Human
agggaaauuucag

SEQ ID NO: 3159303 - RNA, 22 nt, Human
aggcccuaucuguuuacagugu

SEQ ID NO: 3159304 - RNA, 23 nt, Human
agggaaggaucccaugagcuccu

SEQ ID NO: 3159305 - RNA, 15 nt, Human
agggaaggaucccau

SEQ ID NO: 3159306 - RNA, 22 nt, Human
agggaaggaucccaugagcucc

SEQ ID NO: 3159307 - RNA, 22 nt, Human
ugggagaaugucaguaugugga

SEQ ID NO: 3159308 - RNA, 20 nt, Human
ugggagaaugucaguaugug

SEQ ID NO: 3159309 - RNA, 19 nt, Human
ugggagaaugucaguaugu

SEQ ID NO: 3159310 - RNA, 16 nt, Human
ugggucgcccuggacu

SEQ ID NO: 3159311 - RNA, 18 nt, Human
ugggucgcccuggacugu

SEQ ID NO: 3159312 - RNA, 21 nt, Human
aggguggggggggggcgcggc

SEQ ID NO: 3159313 - RNA, 14 nt, Human
uggggagggauuug

SEQ ID NO: 3159314 - RNA, 13 nt, Human
uggggagagacgg

SEQ ID NO: 3159315 - RNA, 22 nt, Human
uggggagggauuuggggcucag

SEQ ID NO: 3159316 - RNA, 15 nt, Human
uggggcucagagugg

SEQ ID NO: 3159317 - RNA, 16 nt, Human
uguaaaggaauuuaaa

SEQ ID NO: 3159318 - RNA, 17 nt, Human
uguaaauaaaggaacca

SEQ ID NO: 3159319 - RNA, 16 nt, Human
uguaaauaguauuuga

SEQ ID NO: 3159320 - RNA, 20 nt, Human
aggugcauauuuauaaaaau

SEQ ID NO: 3159321 - RNA, 18 nt, Human
aggugcccagaaugaggc

SEQ ID NO: 3159322 - RNA, 22 nt, Human
aggugcccagaaugaggcugcu

SEQ ID NO: 3159323 - RNA, 16 nt, Human
aguaguaauagagcaa

SEQ ID NO: 3159324 - RNA, 22 nt, Human
uguauucuagcuaauguaauaa

SEQ ID NO: 3159325 - RNA, 13 nt, Human
uguauuacaaauc

SEQ ID NO: 3159326 - RNA, 20 nt, Human
uguauucuagcuaauguaau

SEQ ID NO: 3159327 - RNA, 12 nt, Human
uguauguggggg

SEQ ID NO: 3159328 - RNA, 14 nt, Human
aguaauagagcaaa

SEQ ID NO: 3159329 - RNA, 13 nt, Human
aguaaaauccaca

SEQ ID NO: 3159330 - RNA, 19 nt, Human
agguuuuuguagugauuuu

SEQ ID NO: 3159331 - RNA, 23 nt, Human
agguuuguuuagaagaagugugu

SEQ ID NO: 3159332 - RNA, 19 nt, Human
uguacuugcucuugaugcc

SEQ ID NO: 3159333 - RNA, 22 nt, Human
uguacuugcucuugaugccugg

SEQ ID NO: 3159334 - RNA, 23 nt, Human
uguacuugcucuugaugccuggc

SEQ ID NO: 3159335 - RNA, 21 nt, Human
uguagugauuuuuaugccacc

SEQ ID NO: 3159336 - RNA, 15 nt, Human
aguaauucaagaaaa

SEQ ID NO: 3159337 - RNA, 17 nt, Human
uggacuguucccugagg

SEQ ID NO: 3159338 - RNA, 16 nt, Human
uggacuguucccugag

SEQ ID NO: 3159339 - RNA, 15 nt, Human
uggagcaaagcugau

SEQ ID NO: 3159340 - RNA, 14 nt, Human
uggaguugaaaauc

SEQ ID NO: 3159341 - RNA, 16 nt, Human
uggauucugagagcug

SEQ ID NO: 3159342 - RNA, 17 nt, Human
uggauucugagagcugu

SEQ ID NO: 3159343 - RNA, 16 nt, Human
ugcuuuuuauggccug

SEQ ID NO: 3159344 - RNA, 15 nt, Human
uggaagagggcugca

SEQ ID NO: 3159345 - RNA, 17 nt, Human
aggagaguagaacagau

SEQ ID NO: 3159346 - RNA, 23 nt, Human
aggagcccugggaggcucuggag

SEQ ID NO: 3159347 - RNA, 21 nt, Human
agcuuuggcuaugagggccuu

SEQ ID NO: 3159348 - RNA, 20 nt, Human
agcuuuggcuaugagggccu

SEQ ID NO: 3159349 - RNA, 22 nt, Human
agcuuugagguggaagagggcu

SEQ ID NO: 3159350 - RNA, 16 nt, Human
ugcuaauuuugaaaaa

SEQ ID NO: 3159351 - RNA, 18 nt, Human
ugcuaauuuugaaaaacu

SEQ ID NO: 3159352 - RNA, 19 nt, Human
ugcuaauuuugaaaaacug

SEQ ID NO: 3159353 - RNA, 20 nt, Human
ugcuaauuuugaaaaacugc

SEQ ID NO: 3159354 - RNA, 15 nt, Human
ugccuugucacgcca

SEQ ID NO: 3159355 - RNA, 16 nt, Human
ugccuuggugugcugu

SEQ ID NO: 3159356 - RNA, 16 nt, Human
ugcuaugagcugggga

SEQ ID NO: 3159357 - RNA, 20 nt, Human
ugcuaugagcuggggauguc

SEQ ID NO: 3159358 - RNA, 19 nt, Human
ugcuaugagcuggggaugu

SEQ ID NO: 3159359 - RNA, 22 nt, Human
ugcuaugagcuggggaugucuc

SEQ ID NO: 3159360 - RNA, 22 nt, Human
ugccugcuuuuuauggccugug

SEQ ID NO: 3159361 - RNA, 20 nt, Human
ugccugcuuuuuauggccug

SEQ ID NO: 3159362 - RNA, 21 nt, Human
ugccugcuuuuuauggccugu

SEQ ID NO: 3159363 - RNA, 16 nt, Human
ugccaucauguuuaca

SEQ ID NO: 3159364 - RNA, 22 nt, Human
ugccgagaguccaucagccucc

SEQ ID NO: 3159365 - RNA, 17 nt, Human
agcccugggaggcucug

SEQ ID NO: 3159366 - RNA, 18 nt, Human
agcccugggaggcucugg

SEQ ID NO: 3159367 - RNA, 20 nt, Human
agcccugggaggcucuggag

SEQ ID NO: 3159368 - RNA, 23 nt, Human
agccccgcguggaacucgugucu

SEQ ID NO: 3159369 - RNA, 18 nt, Human
agcccugaguuccuagcc

SEQ ID NO: 3159370 - RNA, 20 nt, Human
agcccugaguuccuagccac

SEQ ID NO: 3159371 - RNA, 23 nt, Human
agcccugaguuccuagccaccgc

SEQ ID NO: 3159372 - RNA, 14 nt, Human
agcccugaguuccu

SEQ ID NO: 3159373 - RNA, 15 nt, Human
agccuguuuaagaga

SEQ ID NO: 3159374 - RNA, 17 nt, Human
ugcauagaauaaaauuu

SEQ ID NO: 3159375 - RNA, 16 nt, Human
agccucuccacucaug

SEQ ID NO: 3159376 - RNA, 17 nt, Human
agccucgacacagagug

SEQ ID NO: 3159377 - RNA, 18 nt, Human
agccucgacacagagugg

SEQ ID NO: 3159378 - RNA, 21 nt, Human
ugcaggucccuaauaaagcug

SEQ ID NO: 3159379 - RNA, 22 nt, Human
ugcaggucccuaauaaagcugu

SEQ ID NO: 3159380 - RNA, 14 nt, Human
ugaguuccuagcca

SEQ ID NO: 3159381 - RNA, 18 nt, Human
ugaguuccuagccaccgc

SEQ ID NO: 3159382 - RNA, 13 nt, Human
ugauaaguucaua

SEQ ID NO: 3159383 - RNA, 15 nt, Human
ugauaaguucauaca

SEQ ID NO: 3159384 - RNA, 17 nt, Human
ugauaaguucauacauu

SEQ ID NO: 3159385 - RNA, 19 nt, Human
ugauaaguucauacauugu

SEQ ID NO: 3159386 - RNA, 16 nt, Human
ugauaaguaaaugcua

SEQ ID NO: 3159387 - RNA, 20 nt, Human
ugaguucuacauaaguaauu

SEQ ID NO: 3159388 - RNA, 15 nt, Human
ugaguucuacauaag

SEQ ID NO: 3159389 - RNA, 21 nt, Human
agcagguccccagcuuuggcu

SEQ ID NO: 3159390 - RNA, 20 nt, Human
agcagguccccagcuuuggc

SEQ ID NO: 3159391 - RNA, 20 nt, Human
agcaucacaugaacuuguaa

SEQ ID NO: 3159392 - RNA, 23 nt, Human
ugauccagaaagaaaacuuguau

SEQ ID NO: 3159393 - RNA, 13 nt, Human
ugauccagaaaga

SEQ ID NO: 3159394 - RNA, 15 nt, Human
ugaugaaaauauuua

SEQ ID NO: 3159395 - RNA, 18 nt, Human
ugaugaaaauauuuaaag

SEQ ID NO: 3159396 - RNA, 15 nt, Human
ugaugggucaguugu

SEQ ID NO: 3159397 - RNA, 12 nt, Human
auugauguguuu

SEQ ID NO: 3159398 - RNA, 18 nt, Human
auugaugggauuugguca

SEQ ID NO: 3159399 - RNA, 19 nt, Human
auugauguguuuauuuaua

SEQ ID NO: 3159400 - RNA, 17 nt, Human
auuguacgaagaguauu

SEQ ID NO: 3159401 - RNA, 20 nt, Human
auuucuugagguaaaagcau

SEQ ID NO: 3159402 - RNA, 18 nt, Human
auuugaauguuaagcaga

SEQ ID NO: 3159403 - RNA, 13 nt, Human
auuugaauguuaa

SEQ ID NO: 3159404 - RNA, 23 nt, Human
auuugaauguaugcuucauacag

SEQ ID NO: 3159405 - RNA, 19 nt, Human
auuugaauguuaagcagau

SEQ ID NO: 3159406 - RNA, 21 nt, Human
auuuggagacacaacuauuuu

SEQ ID NO: 3159407 - RNA, 21 nt, Human
auuuccuaaauauauuuuaag

SEQ ID NO: 3159408 - RNA, 14 nt, Human
auuuccuaaauaua

SEQ ID NO: 3159409 - RNA, 16 nt, Human
auuguaguccuguaau

SEQ ID NO: 3159410 - RNA, 18 nt, Human
auuguagagccagagguc

SEQ ID NO: 3159411 - RNA, 17 nt, Human
auuguagagccagaggu

SEQ ID NO: 3159412 - RNA, 15 nt, Human
auuuaaaauugugau

SEQ ID NO: 3159413 - RNA, 16 nt, Human
auuuaguguucauaaa

SEQ ID NO: 3159414 - RNA, 23 nt, Human
auuuauaaaaauaaaaaacacug

SEQ ID NO: 3159415 - RNA, 17 nt, Human
auuuaguguucauaaau

SEQ ID NO: 3159416 - RNA, 15 nt, Human
auuuauaaacuuuuu

SEQ ID NO: 3159417 - RNA, 15 nt, Human
uuuuugaagcuguau

SEQ ID NO: 3159418 - RNA, 12 nt, Human
uuuuugacagaa

SEQ ID NO: 3159419 - RNA, 13 nt, Human
uuuuugacagaau

SEQ ID NO: 3159420 - RNA, 20 nt, Human
uuuuuguagcacugacagau

SEQ ID NO: 3159421 - RNA, 21 nt, Human
uuuuuguagcacugacagauu

SEQ ID NO: 3159422 - RNA, 17 nt, Human
uuuuuguagcacugaca

SEQ ID NO: 3159423 - RNA, 19 nt, Human
uuuuuguagcacugacaga

SEQ ID NO: 3159424 - RNA, 21 nt, Human
auuauuuuguucauacauauu

SEQ ID NO: 3159425 - RNA, 20 nt, Human
auuauauggcuugaguuuaa

SEQ ID NO: 3159426 - RNA, 17 nt, Human
auuccaagugauugaaa

SEQ ID NO: 3159427 - RNA, 14 nt, Human
auucagccuggcuu

SEQ ID NO: 3159428 - RNA, 22 nt, Human
auucaggagaguagaacagaua

SEQ ID NO: 3159429 - RNA, 21 nt, Human
auucaggagaguagaacagau

SEQ ID NO: 3159430 - RNA, 15 nt, Human
auucagccuggcuuc

SEQ ID NO: 3159431 - RNA, 22 nt, Human
uuuuauguugcauagaauaaaa

SEQ ID NO: 3159432 - RNA, 15 nt, Human
auguuuuuuuuuaaa

SEQ ID NO: 3159433 - RNA, 23 nt, Human
auguguguguguuguguguggga

SEQ ID NO: 3159434 - RNA, 22 nt, Human
auguguguguguuguguguggg

SEQ ID NO: 3159435 - RNA, 18 nt, Human
auguguguguguugugug

SEQ ID NO: 3159436 - RNA, 23 nt, Human
auguggaaaagccaagaggcugc

SEQ ID NO: 3159437 - RNA, 12 nt, Human
auguguuuccau

SEQ ID NO: 3159438 - RNA, 12 nt, Human
auguuaagcaga

SEQ ID NO: 3159439 - RNA, 17 nt, Human
auguauauaaacaugcu

SEQ ID NO: 3159440 - RNA, 18 nt, Human
uuuggcaaacucuccacc

SEQ ID NO: 3159441 - RNA, 18 nt, Human
uuugacaaagguaaauca

SEQ ID NO: 3159442 - RNA, 18 nt, Human
uuugacagaauauguuuc

SEQ ID NO: 3159443 - RNA, 19 nt, Human
uuugacagaauauguuuca

SEQ ID NO: 3159444 - RNA, 20 nt, Human
uuugacagaauauguuucaa

SEQ ID NO: 3159445 - RNA, 21 nt, Human
uuugacagaauauguuucaaa

SEQ ID NO: 3159446 - RNA, 19 nt, Human
uuucccuuccuuccucucc

SEQ ID NO: 3159447 - RNA, 23 nt, Human
uuugaccuguugggagugaggau

SEQ ID NO: 3159448 - RNA, 13 nt, Human
uuugagaguucua

SEQ ID NO: 3159449 - RNA, 23 nt, Human
augucgucaaagcugaaauggac

SEQ ID NO: 3159450 - RNA, 18 nt, Human
uuuguaagguuuuuguag

SEQ ID NO: 3159451 - RNA, 22 nt, Human
uuuguagugauuuuuaugccac

SEQ ID NO: 3159452 - RNA, 15 nt, Human
uuuguagugauuuuu

SEQ ID NO: 3159453 - RNA, 17 nt, Human
auauaaguauucuaaau

SEQ ID NO: 3159454 - RNA, 21 nt, Human
uucagaaaauauuauguguuu

SEQ ID NO: 3159455 - RNA, 20 nt, Human
uucagaaaauauuauguguu

SEQ ID NO: 3159456 - RNA, 14 nt, Human
uucagaaaauauua

SEQ ID NO: 3159457 - RNA, 13 nt, Human
uucagaaaauauu

SEQ ID NO: 3159458 - RNA, 18 nt, Human
auauauucagccuggcuu

SEQ ID NO: 3159459 - RNA, 16 nt, Human
uucaaacuuuggaaca

SEQ ID NO: 3159460 - RNA, 16 nt, Human
uucaaaaaacuuguaa

SEQ ID NO: 3159461 - RNA, 22 nt, Human
uucaagaaaacaacuucaauau

SEQ ID NO: 3159462 - RNA, 17 nt, Human
auaggcacaggaaacca

SEQ ID NO: 3159463 - RNA, 20 nt, Human
uucacauaucuaguaugaaa

SEQ ID NO: 3159464 - RNA, 21 nt, Human
uucacauaucuaguaugaaau

SEQ ID NO: 3159465 - RNA, 19 nt, Human
uucacauuguauucagagu

SEQ ID NO: 3159466 - RNA, 14 nt, Human
auagcuacuaauuu

SEQ ID NO: 3159467 - RNA, 17 nt, Human
auagcuacuaauuuuaa

SEQ ID NO: 3159468 - RNA, 18 nt, Human
auagcuacuaauuuuaaa

SEQ ID NO: 3159469 - RNA, 17 nt, Human
auauguuucaaacuuug

SEQ ID NO: 3159470 - RNA, 15 nt, Human
auauugauccagaaa

SEQ ID NO: 3159471 - RNA, 22 nt, Human
auauugauccagaaagaaaacu

SEQ ID NO: 3159472 - RNA, 18 nt, Human
auauuguguugugaaugu

SEQ ID NO: 3159473 - RNA, 17 nt, Human
auauuguguugugaaug

SEQ ID NO: 3159474 - RNA, 20 nt, Human
auauuuguaaauuuauguga

SEQ ID NO: 3159475 - RNA, 13 nt, Human
uucucuucacuca

SEQ ID NO: 3159476 - RNA, 12 nt, Human
uucugccaggag

SEQ ID NO: 3159477 - RNA, 11 nt, Human
aucccaacacu

SEQ ID NO: 3159478 - RNA, 15 nt, Human
aucccaacacugcca

SEQ ID NO: 3159479 - RNA, 16 nt, Human
aucccaacacugccag

SEQ ID NO: 3159480 - RNA, 17 nt, Human
aucccaacacugccagc

SEQ ID NO: 3159481 - RNA, 16 nt, Human
uucuaguucugccagg

SEQ ID NO: 3159482 - RNA, 17 nt, Human
uucuaguucugccagga

SEQ ID NO: 3159483 - RNA, 23 nt, Human
aucauguuuacagaggacaguau

SEQ ID NO: 3159484 - RNA, 18 nt, Human
aucauguuuacagaggac

SEQ ID NO: 3159485 - RNA, 14 nt, Human
aucauucauuuucu

SEQ ID NO: 3159486 - RNA, 19 nt, Human
aucagugugucuaaauuug

SEQ ID NO: 3159487 - RNA, 16 nt, Human
aucagugucuuuccac

SEQ ID NO: 3159488 - RNA, 16 nt, Human
aucucuuguuuaaauu

SEQ ID NO: 3159489 - RNA, 14 nt, Human
aucugacuaugaca

SEQ ID NO: 3159490 - RNA, 17 nt, Human
aucugacuaugacauaa

SEQ ID NO: 3159491 - RNA, 20 nt, Human
uugauguguuuauuuauaga

SEQ ID NO: 3159492 - RNA, 18 nt, Human
uugcaacuuuguauaaaa

SEQ ID NO: 3159493 - RNA, 16 nt, Human
uugcaacuuuguauaa

SEQ ID NO: 3159494 - RNA, 17 nt, Human
uugcaacuuuguauaaa

SEQ ID NO: 3159495 - RNA, 18 nt, Human
augaacuuguaaaggaau

SEQ ID NO: 3159496 - RNA, 14 nt, Human
augaagcaaugcuu

SEQ ID NO: 3159497 - RNA, 22 nt, Human
augaagauguuucaaaaaaucu

SEQ ID NO: 3159498 - RNA, 15 nt, Human
augaagcaaugcuuc

SEQ ID NO: 3159499 - RNA, 18 nt, Human
uuggagccugcagagcug

SEQ ID NO: 3159500 - RNA, 19 nt, Human
uuguaaauuuaugugaugg

SEQ ID NO: 3159501 - RNA, 18 nt, Human
uugcucuugaugccuggc

SEQ ID NO: 3159502 - RNA, 14 nt, Human
uugcucuugaugcc

SEQ ID NO: 3159503 - RNA, 17 nt, Human
uugcucuugaugccugg

SEQ ID NO: 3159504 - RNA, 16 nt, Human
uuggacuugucccggg

SEQ ID NO: 3159505 - RNA, 15 nt, Human
uuggagccugcagag

SEQ ID NO: 3159506 - RNA, 11 nt, Human
uuggagccugc

SEQ ID NO: 3159507 - RNA, 15 nt, Human
aucuuauaauuuaaa

SEQ ID NO: 3159508 - RNA, 14 nt, Human
aucuuauaauuuaa

SEQ ID NO: 3159509 - RNA, 22 nt, Human
aucugugaggggcucucucaug

SEQ ID NO: 3159510 - RNA, 21 nt, Human
aucugugaggggcucucucau

SEQ ID NO: 3159511 - RNA, 22 nt, Human
uuucacauaucuaguaugaaau

SEQ ID NO: 3159512 - RNA, 17 nt, Human
auggaaugcuguguuaa

SEQ ID NO: 3159513 - RNA, 21 nt, Human
auggaaugcuguguuaaauaa

SEQ ID NO: 3159514 - RNA, 18 nt, Human
augcuacaggauuugaaa

SEQ ID NO: 3159515 - RNA, 18 nt, Human
uuuaaauauaugcuaagu

SEQ ID NO: 3159516 - RNA, 21 nt, Human
uuuaaauauaugcuaagucuu

SEQ ID NO: 3159517 - RNA, 20 nt, Human
uuuaagacgaaacauuuguu

SEQ ID NO: 3159518 - RNA, 14 nt, Human
uuuaagagacagcc

SEQ ID NO: 3159519 - RNA, 18 nt, Human
uuuaaaaaaauuccaagu

SEQ ID NO: 3159520 - RNA, 16 nt, Human
uuguucauacauauuu

SEQ ID NO: 3159521 - RNA, 18 nt, Human
uuguucauacauauuuuu

SEQ ID NO: 3159522 - RNA, 16 nt, Human
uuguagcuuuaucaaa

SEQ ID NO: 3159523 - RNA, 17 nt, Human
uuguagcuuuaucaaag

SEQ ID NO: 3159524 - RNA, 20 nt, Human
augagggucuugguuccagc

SEQ ID NO: 3159525 - RNA, 18 nt, Human
augaguuggcugggaaua

SEQ ID NO: 3159526 - RNA, 12 nt, Human
uugugauguguc

SEQ ID NO: 3159527 - RNA, 13 nt, Human
uuguucauacaua

SEQ ID NO: 3159528 - RNA, 22 nt, Human
uuguucaauaauaaauauuuuu

SEQ ID NO: 3159529 - RNA, 20 nt, Human
uuguucaauaauaaauauuu

SEQ ID NO: 3159530 - RNA, 20 nt, Human
aucaaagggugaaaauuauu

SEQ ID NO: 3159531 - RNA, 18 nt, Human
aucaaagagagaaaauaa

SEQ ID NO: 3159532 - RNA, 21 nt, Human
auccagcccugaguuccuagc

SEQ ID NO: 3159533 - RNA, 23 nt, Human
auccacuuuaucuugaauaaugu

SEQ ID NO: 3159534 - RNA, 23 nt, Human
auggagauagccccacaggaggu

SEQ ID NO: 3159535 - RNA, 20 nt, Human
augcauauuauuuuauguug

SEQ ID NO: 3159536 - RNA, 24 nt, Human
augcauauuauuuuauguugcaua

SEQ ID NO: 3159537 - RNA, 19 nt, Human
aucuaggauuuuaagggaa

SEQ ID NO: 3159538 - RNA, 11 nt, Human
aucuaggauuu

SEQ ID NO: 3159539 - RNA, 13 nt, Human
augaaacuuggau

SEQ ID NO: 3159540 - RNA, 23 nt, Human
augaaguuuuuuuuauacaggau

SEQ ID NO: 3159541 - RNA, 22 nt, Human
augaggcugcuuuccaaagcca

SEQ ID NO: 3159542 - RNA, 20 nt, Human
aguuguucaauaauaaauau

SEQ ID NO: 3159543 - RNA, 16 nt, Human
auaaaagacagugaaa

SEQ ID NO: 3159544 - RNA, 15 nt, Human
auaaaagacagugaa

SEQ ID NO: 3159545 - RNA, 23 nt, Human
auaaaaauauuguguugugaaug

SEQ ID NO: 3159546 - RNA, 22 nt, Human
auaaaaauauuguguugugaau

SEQ ID NO: 3159547 - RNA, 14 nt, Human
auaaaaacaacuuu

SEQ ID NO: 3159548 - RNA, 20 nt, Human
auaaaaagacauucuuccaa

SEQ ID NO: 3159549 - RNA, 23 nt, Human
aguuugcuagcagaaaucuagaa

SEQ ID NO: 3159550 - RNA, 17 nt, Human
auaaguaauucaagaaa

SEQ ID NO: 3159551 - RNA, 15 nt, Human
auaaguaaaugcuag

SEQ ID NO: 3159552 - RNA, 21 nt, Human
auacacuaugaagauguuuca

SEQ ID NO: 3159553 - RNA, 19 nt, Human
auacuugaaaauuaacaug

SEQ ID NO: 3159554 - RNA, 22 nt, Human
aguauauugauccagaaagaaa

SEQ ID NO: 3159555 - RNA, 13 nt, Human
agugaaugaaaca

SEQ ID NO: 3159556 - RNA, 13 nt, Human
agcuacaaaugca

SEQ ID NO: 3159557 - RNA, 12 nt, Human
agcuacaaaugc

SEQ ID NO: 3159558 - RNA, 15 nt, Human
agcgaauuuuaaaag

SEQ ID NO: 3159559 - RNA, 16 nt, Human
agcgaauuuuaaaaga

SEQ ID NO: 3159560 - RNA, 13 nt, Human
agcgaauuuuaaa

SEQ ID NO: 3159561 - RNA, 17 nt, Human
agccugcugccugcuuu

SEQ ID NO: 3159562 - RNA, 18 nt, Human
aggaaaaaauaacaauga

SEQ ID NO: 3159563 - RNA, 15 nt, Human
aggagggcaggcauc

SEQ ID NO: 3159564 - RNA, 15 nt, Human
aggagggaggugcuu

SEQ ID NO: 3159565 - RNA, 13 nt, Human
aggagggcaggca

SEQ ID NO: 3159566 - RNA, 20 nt, Human
aggagacagguuagcugcuc

SEQ ID NO: 3159567 - RNA, 18 nt, Human
aggaguuucguuuucaaa

SEQ ID NO: 3159568 - RNA, 13 nt, Human
aggaugucugggc

SEQ ID NO: 3159569 - RNA, 22 nt, Human
aggcagaacucaucuagguaaa

SEQ ID NO: 3159570 - RNA, 19 nt, Human
aggccagggggccaguccc

SEQ ID NO: 3159571 - RNA, 23 nt, Human
aggccagggggccagucccugag

SEQ ID NO: 3159572 - RNA, 19 nt, Human
aggcaucggggagccggga

SEQ ID NO: 3159573 - RNA, 15 nt, Human
agggaugcauggaga

SEQ ID NO: 3159574 - RNA, 22 nt, Human
agggauuuggggcucagagugg

SEQ ID NO: 3159575 - RNA, 15 nt, Human
agggacugagaaauu

SEQ ID NO: 3159576 - RNA, 13 nt, Human
agggacugagaaa

SEQ ID NO: 3159577 - RNA, 14 nt, Human
agggacugagaaau

SEQ ID NO: 3159578 - RNA, 14 nt, Human
aggcuagggugggg

SEQ ID NO: 3159579 - RNA, 15 nt, Human
aggcuagggugggga

SEQ ID NO: 3159580 - RNA, 16 nt, Human
aggcuaggguggggag

SEQ ID NO: 3159581 - RNA, 19 nt, Human
aggcuaggguggggagaga

SEQ ID NO: 3159582 - RNA, 22 nt, Human
aggcucuggagcccacuguacu

SEQ ID NO: 3159583 - RNA, 20 nt, Human
agauagauaggucagugcaa

SEQ ID NO: 3159584 - RNA, 19 nt, Human
agauagccccacaggaggu

SEQ ID NO: 3159585 - RNA, 19 nt, Human
agagugggguagguuggga

SEQ ID NO: 3159586 - RNA, 17 nt, Human
agauugagauguguuca

SEQ ID NO: 3159587 - RNA, 19 nt, Human
agcaaaauugauguguuua

SEQ ID NO: 3159588 - RNA, 13 nt, Human
agcaaaauugaug

SEQ ID NO: 3159589 - RNA, 23 nt, Human
agcaaaauugauguguuuauuua

SEQ ID NO: 3159590 - RNA, 14 nt, Human
agcagugggccugg

SEQ ID NO: 3159591 - RNA, 17 nt, Human
agcccaaaccaccagaa

SEQ ID NO: 3159592 - RNA, 19 nt, Human
agcccaaaccaccagaagc

SEQ ID NO: 3159593 - RNA, 20 nt, Human
agcccaaaccaccagaagcc

SEQ ID NO: 3159594 - RNA, 22 nt, Human
agcccaaaccaccagaagccca

SEQ ID NO: 3159595 - RNA, 14 nt, Human
agccaagaggcugc

SEQ ID NO: 3159596 - RNA, 17 nt, Human
agccaacuauggccugu

SEQ ID NO: 3159597 - RNA, 13 nt, Human
agcaucucccagu

SEQ ID NO: 3159598 - RNA, 13 nt, Human
agaacaucccucc

SEQ ID NO: 3159599 - RNA, 17 nt, Human
agaacaucccuccuggg

SEQ ID NO: 3159600 - RNA, 19 nt, Human
agaacagauaaucagugug

SEQ ID NO: 3159601 - RNA, 12 nt, Human
agaaugaggcug

SEQ ID NO: 3159602 - RNA, 13 nt, Human
agaaugaggcugc

SEQ ID NO: 3159603 - RNA, 14 nt, Human
agaaugaggcugcu

SEQ ID NO: 3159604 - RNA, 20 nt, Human
agaaugaggcugcuuuccaa

SEQ ID NO: 3159605 - RNA, 19 nt, Human
agacaaggaaaaaauaaca

SEQ ID NO: 3159606 - RNA, 18 nt, Human
agacgaaacauuuguucu

SEQ ID NO: 3159607 - RNA, 12 nt, Human
agagaggccauu

SEQ ID NO: 3159608 - RNA, 22 nt, Human
agagaggccauucuuucccaac

SEQ ID NO: 3159609 - RNA, 13 nt, Human
accaccagaagcc

SEQ ID NO: 3159610 - RNA, 15 nt, Human
accaccagaagccca

SEQ ID NO: 3159611 - RNA, 16 nt, Human
accaccagaagcccag

SEQ ID NO: 3159612 - RNA, 17 nt, Human
accaccagaagcccaga

SEQ ID NO: 3159613 - RNA, 21 nt, Human
acauaaguaauucaagaaaac

SEQ ID NO: 3159614 - RNA, 20 nt, Human
acauaaguauuuaauucaug

SEQ ID NO: 3159615 - RNA, 20 nt, Human
acauaaguaauucaagaaaa

SEQ ID NO: 3159616 - RNA, 23 nt, Human
acauguuucuuuguaaugaaaac

SEQ ID NO: 3159617 - RNA, 11 nt, Human
aauuguaauag

SEQ ID NO: 3159618 - RNA, 18 nt, Human
aauuucauaugcuguaua

SEQ ID NO: 3159619 - RNA, 16 nt, Human
aauuucauaugcugua

SEQ ID NO: 3159620 - RNA, 15 nt, Human
aauuauauaaguauu

SEQ ID NO: 3159621 - RNA, 16 nt, Human
aauuauauaaguauuc

SEQ ID NO: 3159622 - RNA, 17 nt, Human
aauuauauaaguauucu

SEQ ID NO: 3159623 - RNA, 16 nt, Human
acugacagauuuccau

SEQ ID NO: 3159624 - RNA, 16 nt, Human
acugauccagcccuga

SEQ ID NO: 3159625 - RNA, 17 nt, Human
acugauccagcccugag

SEQ ID NO: 3159626 - RNA, 12 nt, Human
acuugaaaauua

SEQ ID NO: 3159627 - RNA, 14 nt, Human
acuugaaaauuaac

SEQ ID NO: 3159628 - RNA, 17 nt, Human
acuguaaaauaauaacu

SEQ ID NO: 3159629 - RNA, 15 nt, Human
acugccuauuuuaau

SEQ ID NO: 3159630 - RNA, 22 nt, Human
acugucuuuuuucuaaaguaaa

SEQ ID NO: 3159631 - RNA, 23 nt, Human
acugucuuuuuucuaaaguaaaa

SEQ ID NO: 3159632 - RNA, 16 nt, Human
acugucuuuuuucuaa

SEQ ID NO: 3159633 - RNA, 13 nt, Human
accggggccuggg

SEQ ID NO: 3159634 - RNA, 16 nt, Human
acccucaucuuucuuc

SEQ ID NO: 3159635 - RNA, 19 nt, Human
acccucaucuuucuuccaa

SEQ ID NO: 3159636 - RNA, 13 nt, Human
acccucaucuuuc

SEQ ID NO: 3159637 - RNA, 14 nt, Human
acccucaucuuucu

SEQ ID NO: 3159638 - RNA, 21 nt, Human
aagacaaggaaaaaauaacaa

SEQ ID NO: 3159639 - RNA, 14 nt, Human
aagagagaaaauaa

SEQ ID NO: 3159640 - RNA, 19 nt, Human
aagaguauuuuugacagaa

SEQ ID NO: 3159641 - RNA, 16 nt, Human
aagaguaguaauagag

SEQ ID NO: 3159642 - RNA, 16 nt, Human
aaucucauaauuuaua

SEQ ID NO: 3159643 - RNA, 14 nt, Human
aaugaagcaaugcu

SEQ ID NO: 3159644 - RNA, 11 nt, Human
aauaaacacuc

SEQ ID NO: 3159645 - RNA, 16 nt, Human
aauaaacacucuugaa

SEQ ID NO: 3159646 - RNA, 19 nt, Human
aauaaacacucuugaaaaa

SEQ ID NO: 3159647 - RNA, 18 nt, Human
aaagccugcaauuucaua

SEQ ID NO: 3159648 - RNA, 13 nt, Human
aaagccugcaauu

SEQ ID NO: 3159649 - RNA, 20 nt, Human
aaaagacaaggaaaaaauaa

SEQ ID NO: 3159650 - RNA, 16 nt, Human
aaaagagaugaugaaa

SEQ ID NO: 3159651 - RNA, 19 nt, Human
aaaagagaugaugaaaaua

SEQ ID NO: 3159652 - RNA, 14 nt, Human
aaaagauaaauauu

SEQ ID NO: 3159653 - RNA, 17 nt, Human
aaaagauaaauauuaua

SEQ ID NO: 3159654 - RNA, 13 nt, Human
aaaagaucgcagu

SEQ ID NO: 3159655 - RNA, 23 nt, Human
aaaucucaaauuuggauugcuaa

SEQ ID NO: 3159656 - RNA, 14 nt, Human
aacaggcucagagg

SEQ ID NO: 3159657 - RNA, 18 nt, Human
aaccuuuguuugcaucug

SEQ ID NO: 3159658 - RNA, 15 nt, Human
cacaugagauaauau

SEQ ID NO: 3159659 - RNA, 16 nt, Human
cacaugagauaauaug

SEQ ID NO: 3159660 - RNA, 19 nt, Human
cacacguaaugaaacuugg

SEQ ID NO: 3159661 - RNA, 20 nt, Human
cacacguaaugaaacuugga

SEQ ID NO: 3159662 - RNA, 14 nt, Human
caccacacucagcc

SEQ ID NO: 3159663 - RNA, 15 nt, Human
caccacacucagccc

SEQ ID NO: 3159664 - RNA, 19 nt, Human
caccacacugauccagccc

SEQ ID NO: 3159665 - RNA, 20 nt, Human
caagcccaguucagcuuggg

SEQ ID NO: 3159666 - RNA, 11 nt, Human
caagagccuga

SEQ ID NO: 3159667 - RNA, 13 nt, Human
caagagccugaga

SEQ ID NO: 3159668 - RNA, 23 nt, Human
caagagccugagagugaggugga

SEQ ID NO: 3159669 - RNA, 13 nt, Human
caaagaaauuaug

SEQ ID NO: 3159670 - RNA, 12 nt, Human
caaagaaauuau

SEQ ID NO: 3159671 - RNA, 18 nt, Human
caaauucugucucuggau

SEQ ID NO: 3159672 - RNA, 22 nt, Human
ggcuugaguuuaaauuguaaua

SEQ ID NO: 3159673 - RNA, 20 nt, Human
gggaccccuggugguucacu

SEQ ID NO: 3159674 - RNA, 15 nt, Human
gggaaggaucccaug

SEQ ID NO: 3159675 - RNA, 13 nt, Human
ggcucuggagccc

SEQ ID NO: 3159676 - RNA, 14 nt, Human
ggcucuggagccca

SEQ ID NO: 3159677 - RNA, 20 nt, Human
ggccccugccagacccccug

SEQ ID NO: 3159678 - RNA, 22 nt, Human
ggcugcagccaggccacuggcc

SEQ ID NO: 3159679 - RNA, 16 nt, Human
ggcugcagccaggcca

SEQ ID NO: 3159680 - RNA, 15 nt, Human
ggcugcuuuccaaag

SEQ ID NO: 3159681 - RNA, 18 nt, Human
gggcagucugagagaggc

SEQ ID NO: 3159682 - RNA, 19 nt, Human
gggcagucugagagaggcc

SEQ ID NO: 3159683 - RNA, 17 nt, Human
gggcagucugagagagg

SEQ ID NO: 3159684 - RNA, 23 nt, Human
gggaggugcuucuaguucugcca

SEQ ID NO: 3159685 - RNA, 13 nt, Human
gggacugagaaau

SEQ ID NO: 3159686 - RNA, 16 nt, Human
gggaguuuaggguggg

SEQ ID NO: 3159687 - RNA, 11 nt, Human
gggagugugua

SEQ ID NO: 3159688 - RNA, 14 nt, Human
gggauagaugugug

SEQ ID NO: 3159689 - RNA, 13 nt, Human
gggauagaugugu

SEQ ID NO: 3159690 - RNA, 22 nt, Human
gggccccugccucucugcaggu

SEQ ID NO: 3159691 - RNA, 13 nt, Human
gggccugggcagg

SEQ ID NO: 3159692 - RNA, 15 nt, Human
gggccugggcaggag

SEQ ID NO: 3159693 - RNA, 12 nt, Human
gggccugggcag

SEQ ID NO: 3159694 - RNA, 13 nt, Human
gggccccugccuc

SEQ ID NO: 3159695 - RNA, 15 nt, Human
gggccccugccucuc

SEQ ID NO: 3159696 - RNA, 13 nt, Human
gggccccugccag

SEQ ID NO: 3159697 - RNA, 17 nt, Human
gggccccugccucucug

SEQ ID NO: 3159698 - RNA, 18 nt, Human
gggccccugccucucugc

SEQ ID NO: 3159699 - RNA, 19 nt, Human
gggccccugccucucugca

SEQ ID NO: 3159700 - RNA, 21 nt, Human
gggccccugccucucugcagg

SEQ ID NO: 3159701 - RNA, 20 nt, Human
gggcagucugagagaggcca

SEQ ID NO: 3159702 - RNA, 21 nt, Human
gggcagucugagagaggccau

SEQ ID NO: 3159703 - RNA, 18 nt, Human
gguagaucacgagaucaa

SEQ ID NO: 3159704 - RNA, 17 nt, Human
gggugcugggccccugc

SEQ ID NO: 3159705 - RNA, 20 nt, Human
gggucuugguuccagccugc

SEQ ID NO: 3159706 - RNA, 19 nt, Human
ggggcagucugagagaggc

SEQ ID NO: 3159707 - RNA, 18 nt, Human
ggggcagucugagagagg

SEQ ID NO: 3159708 - RNA, 15 nt, Human
ggggcagucugagag

SEQ ID NO: 3159709 - RNA, 15 nt, Human
ggggcgcggcuggga

SEQ ID NO: 3159710 - RNA, 16 nt, Human
ggggcgcggcugggag

SEQ ID NO: 3159711 - RNA, 16 nt, Human
gggccugggcaggagg

SEQ ID NO: 3159712 - RNA, 17 nt, Human
gggccugggcaggaggg

SEQ ID NO: 3159713 - RNA, 15 nt, Human
ggggaaaagagauga

SEQ ID NO: 3159714 - RNA, 15 nt, Human
gggggagagggcugc

SEQ ID NO: 3159715 - RNA, 18 nt, Human
ggggugcugggccccugc

SEQ ID NO: 3159716 - RNA, 20 nt, Human
gggguggggggggugcuggg

SEQ ID NO: 3159717 - RNA, 19 nt, Human
ggugaccuuccaagagccu

SEQ ID NO: 3159718 - RNA, 20 nt, Human
ggugaccuuccaagagccug

SEQ ID NO: 3159719 - RNA, 21 nt, Human
ggugaccuuccaagagccuga

SEQ ID NO: 3159720 - RNA, 21 nt, Human
gguguccugcaccggggccug

SEQ ID NO: 3159721 - RNA, 17 nt, Human
gguguuuuaaaaaaucu

SEQ ID NO: 3159722 - RNA, 19 nt, Human
gguucacucuuggagccug

SEQ ID NO: 3159723 - RNA, 20 nt, Human
gguucacucuuggagccugc

SEQ ID NO: 3159724 - RNA, 21 nt, Human
gguucacucuuggagccugca

SEQ ID NO: 3159725 - RNA, 23 nt, Human
gguucacucuuggagccugcaga

SEQ ID NO: 3159726 - RNA, 15 nt, Human
ggugguggcucggga

SEQ ID NO: 3159727 - RNA, 22 nt, Human
ggugguucacucuuggagccug

SEQ ID NO: 3159728 - RNA, 23 nt, Human
ggugguucacucuuggagccugc

SEQ ID NO: 3159729 - RNA, 16 nt, Human
ggagccgggagccuga

SEQ ID NO: 3159730 - RNA, 14 nt, Human
ggaggagggcaggc

SEQ ID NO: 3159731 - RNA, 15 nt, Human
ggaggagggcaggca

SEQ ID NO: 3159732 - RNA, 20 nt, Human
ggaggagggcaggcaucggg

SEQ ID NO: 3159733 - RNA, 13 nt, Human
ggagggcaggcau

SEQ ID NO: 3159734 - RNA, 12 nt, Human
ggagggauuugg

SEQ ID NO: 3159735 - RNA, 15 nt, Human
ggauagaugugugga

SEQ ID NO: 3159736 - RNA, 14 nt, Human
ggauagaugugugg

SEQ ID NO: 3159737 - RNA, 13 nt, Human
ggauagaugugug

SEQ ID NO: 3159738 - RNA, 13 nt, Human
ggagcccugggag

SEQ ID NO: 3159739 - RNA, 12 nt, Human
ggagcccuggga

SEQ ID NO: 3159740 - RNA, 17 nt, Human
ggaaggaucccaugagc

SEQ ID NO: 3159741 - RNA, 17 nt, Human
ggccccugccagacccc

SEQ ID NO: 3159742 - RNA, 19 nt, Human
ggccccugccagacccccu

SEQ ID NO: 3159743 - RNA, 17 nt, Human
ggccccugagaucucug

SEQ ID NO: 3159744 - RNA, 21 nt, Human
ggccccugagaucucugcagg

SEQ ID NO: 3159745 - RNA, 20 nt, Human
ggcagucugagagaggccau

SEQ ID NO: 3159746 - RNA, 18 nt, Human
ggccaggcugggucgccc

SEQ ID NO: 3159747 - RNA, 22 nt, Human
ggccaggcugggucgcccugga

SEQ ID NO: 3159748 - RNA, 14 nt, Human
ggcagguccccaga

SEQ ID NO: 3159749 - RNA, 19 nt, Human
ggcagguccccagacucca

SEQ ID NO: 3159750 - RNA, 20 nt, Human
ggaucccaugagcuccuuaa

SEQ ID NO: 3159751 - RNA, 17 nt, Human
ggaucccaugagcuccu

SEQ ID NO: 3159752 - RNA, 17 nt, Human
gcugggaggagggcagg

SEQ ID NO: 3159753 - RNA, 19 nt, Human
gcugggaggagggcaggca

SEQ ID NO: 3159754 - RNA, 16 nt, Human
gcuggggccaggcugg

SEQ ID NO: 3159755 - RNA, 19 nt, Human
gcuggggccaggcuggguc

SEQ ID NO: 3159756 - RNA, 23 nt, Human
gcuagcagaaaucuagaagacug

SEQ ID NO: 3159757 - RNA, 15 nt, Human
gcugccuuuggacuu

SEQ ID NO: 3159758 - RNA, 20 nt, Human
gcugccuuuggacuuguccc

SEQ ID NO: 3159759 - RNA, 23 nt, Human
gcugggacaccccgacuuuuguu

SEQ ID NO: 3159760 - RNA, 15 nt, Human
ggaaccgaggcaggg

SEQ ID NO: 3159761 - RNA, 16 nt, Human
ggaaccgaggcaggga

SEQ ID NO: 3159762 - RNA, 20 nt, Human
ggaaccgaggcagggaagga

SEQ ID NO: 3159763 - RNA, 17 nt, Human
ggaacucgugucuggca

SEQ ID NO: 3159764 - RNA, 20 nt, Human
ggaaaaaauaacaaugaaag

SEQ ID NO: 3159765 - RNA, 14 nt, Human
gcuuuaucaaaggg

SEQ ID NO: 3159766 - RNA, 19 nt, Human
gcuucuggugaccuuccaa

SEQ ID NO: 3159767 - RNA, 18 nt, Human
gcuucuaguucugccagg

SEQ ID NO: 3159768 - RNA, 19 nt, Human
gcuucuaguucugccagga

SEQ ID NO: 3159769 - RNA, 20 nt, Human
gcuucuaguucugccaggag

SEQ ID NO: 3159770 - RNA, 21 nt, Human
gcuucuaguucugccaggaga

SEQ ID NO: 3159771 - RNA, 22 nt, Human
gccacucaggcccaaagccucg

SEQ ID NO: 3159772 - RNA, 14 nt, Human
gccacucaggccca

SEQ ID NO: 3159773 - RNA, 22 nt, Human
gcccaucugggggccucuucug

SEQ ID NO: 3159774 - RNA, 20 nt, Human
gccccugagaucucugcagg

SEQ ID NO: 3159775 - RNA, 13 nt, Human
gccccgcguggaa

SEQ ID NO: 3159776 - RNA, 14 nt, Human
gcuaagaauauuug

SEQ ID NO: 3159777 - RNA, 23 nt, Human
gccucucugcaggucccuaauaa

SEQ ID NO: 3159778 - RNA, 16 nt, Human
gccucucugcaggucc

SEQ ID NO: 3159779 - RNA, 17 nt, Human
gccucucugcagguccc

SEQ ID NO: 3159780 - RNA, 10 nt, Human
gccucucugc

SEQ ID NO: 3159781 - RNA, 14 nt, Human
gccucucugcaggu

SEQ ID NO: 3159782 - RNA, 20 nt, Human
gccugcagagcugcgggcug

SEQ ID NO: 3159783 - RNA, 15 nt, Human
gccugcagagcugcg

SEQ ID NO: 3159784 - RNA, 21 nt, Human
gccgagaguccaucagccucc

SEQ ID NO: 3159785 - RNA, 19 nt, Human
gccgggagccugacccuca

SEQ ID NO: 3159786 - RNA, 13 nt, Human
gccgggagccuga

SEQ ID NO: 3159787 - RNA, 14 nt, Human
gccgggagccugac

SEQ ID NO: 3159788 - RNA, 17 nt, Human
gccuaaccugccgagag

SEQ ID NO: 3159789 - RNA, 17 nt, Human
gccuauuuuaauaaaca

SEQ ID NO: 3159790 - RNA, 12 nt, Human
gcaggucccuaa

SEQ ID NO: 3159791 - RNA, 13 nt, Human
gcaggucccuaau

SEQ ID NO: 3159792 - RNA, 23 nt, Human
gcagguccccagacuccaccaag

SEQ ID NO: 3159793 - RNA, 10 nt, Human
gcaggucccu

SEQ ID NO: 3159794 - RNA, 11 nt, Human
gcaggucccua

SEQ ID NO: 3159795 - RNA, 14 nt, Human
gcagguccccagac

SEQ ID NO: 3159796 - RNA, 23 nt, Human
gcauauuauuuuauguugcauag

SEQ ID NO: 3159797 - RNA, 18 nt, Human
gcauauuauuuuauguug

SEQ ID NO: 3159798 - RNA, 17 nt, Human
gcauuuuacuguacaga

SEQ ID NO: 3159799 - RNA, 16 nt, Human
gcauuuuacuguacag

SEQ ID NO: 3159800 - RNA, 17 nt, Human
gcaugaauuugugaagg

SEQ ID NO: 3159801 - RNA, 15 nt, Human
gcaugaauuugugaa

SEQ ID NO: 3159802 - RNA, 18 nt, Human
gcagauggaaugcugugu

SEQ ID NO: 3159803 - RNA, 19 nt, Human
gcagauuuugcccuugaca

SEQ ID NO: 3159804 - RNA, 15 nt, Human
gcaggagggaggugc

SEQ ID NO: 3159805 - RNA, 11 nt, Human
gcaggaggaag

SEQ ID NO: 3159806 - RNA, 20 nt, Human
gcaggaguuucguuuucaaa

SEQ ID NO: 3159807 - RNA, 21 nt, Human
gcaggaguuucguuuucaaaa

SEQ ID NO: 3159808 - RNA, 12 nt, Human
gcacagccuggc

SEQ ID NO: 3159809 - RNA, 19 nt, Human
gcacagccuggcuguggcc

SEQ ID NO: 3159810 - RNA, 19 nt, Human
gcacaugccuguaguccca

SEQ ID NO: 3159811 - RNA, 16 nt, Human
gauugggaauccgccc

SEQ ID NO: 3159812 - RNA, 15 nt, Human
gauugggccccugcc

SEQ ID NO: 3159813 - RNA, 22 nt, Human
gcaacuuuguauaaaagggacu

SEQ ID NO: 3159814 - RNA, 12 nt, Human
gcaaaugugaau

SEQ ID NO: 3159815 - RNA, 20 nt, Human
gcaaacuuuauuuuguguuu

SEQ ID NO: 3159816 - RNA, 18 nt, Human
gcaaacuuuauuuugugu

SEQ ID NO: 3159817 - RNA, 11 nt, Human
gaguucuacau

SEQ ID NO: 3159818 - RNA, 18 nt, Human
gacuucccacggcuccuc

SEQ ID NO: 3159819 - RNA, 22 nt, Human
gaguguguaauuuaaaauugug

SEQ ID NO: 3159820 - RNA, 21 nt, Human
gaguguguaauuuaaaauugu

SEQ ID NO: 3159821 - RNA, 12 nt, Human
gacccccuggag

SEQ ID NO: 3159822 - RNA, 17 nt, Human
gacauaaaaacaacuuu

SEQ ID NO: 3159823 - RNA, 18 nt, Human
gacuaaccccaccacacc

SEQ ID NO: 3159824 - RNA, 16 nt, Human
gaccuuccaagagccu

SEQ ID NO: 3159825 - RNA, 17 nt, Human
gaccuuccaagagccug

SEQ ID NO: 3159826 - RNA, 18 nt, Human
gaccuuccaagagccuga

SEQ ID NO: 3159827 - RNA, 13 nt, Human
gacugagaaauuu

SEQ ID NO: 3159828 - RNA, 11 nt, Human
gacugagaaau

SEQ ID NO: 3159829 - RNA, 21 nt, Human
gaacagcggcuggacuuggag

SEQ ID NO: 3159830 - RNA, 18 nt, Human
gaacagauaaucagugug

SEQ ID NO: 3159831 - RNA, 16 nt, Human
gaaauuguauuacaaa

SEQ ID NO: 3159832 - RNA, 16 nt, Human
gaaauuuauaaacuuu

SEQ ID NO: 3159833 - RNA, 17 nt, Human
gaaauuuauaaacuuuu

SEQ ID NO: 3159834 - RNA, 14 nt, Human
gaacuacugaggau

SEQ ID NO: 3159835 - RNA, 12 nt, Human
gaagagggcugc

SEQ ID NO: 3159836 - RNA, 15 nt, Human
gaagauguuucaaaa

SEQ ID NO: 3159837 - RNA, 20 nt, Human
gaagacugucagcuuccaaa

SEQ ID NO: 3159838 - RNA, 21 nt, Human
gaacucaucuagguaaauuac

SEQ ID NO: 3159839 - RNA, 20 nt, Human
gaacucaucuagguaaauua

SEQ ID NO: 3159840 - RNA, 17 nt, Human
gaagagaagggcagggc

SEQ ID NO: 3159841 - RNA, 23 nt, Human
gaauucuugaaggaaaaugauac

SEQ ID NO: 3159842 - RNA, 15 nt, Human
gaauuguguuuauaa

SEQ ID NO: 3159843 - RNA, 23 nt, Human
gaauuguguuuauaauuuuaaau

SEQ ID NO: 3159844 - RNA, 21 nt, Human
gaauguaugcuucauacaggg

SEQ ID NO: 3159845 - RNA, 16 nt, Human
gaauguaugcuucaua

SEQ ID NO: 3159846 - RNA, 18 nt, Human
gaauguaugcuucauaca

SEQ ID NO: 3159847 - RNA, 17 nt, Human
gaauauuugaauguaug

SEQ ID NO: 3159848 - RNA, 20 nt, Human
gaagcguuguccucagcccc

SEQ ID NO: 3159849 - RNA, 13 nt, Human
gaagcguuguccu

SEQ ID NO: 3159850 - RNA, 19 nt, Human
gaagcguuguccucagccc

SEQ ID NO: 3159851 - RNA, 22 nt, Human
gaagggguaggauuacuaggug

SEQ ID NO: 3159852 - RNA, 15 nt, Human
cuuggaagcuucugg

SEQ ID NO: 3159853 - RNA, 17 nt, Human
cuuguacuuuauuuucu

SEQ ID NO: 3159854 - RNA, 19 nt, Human
cuugcucuugaugccuggc

SEQ ID NO: 3159855 - RNA, 17 nt, Human
cuugcucuugaugccug

SEQ ID NO: 3159856 - RNA, 18 nt, Human
cuugcucuugaugccugg

SEQ ID NO: 3159857 - RNA, 20 nt, Human
cuugcuugauuguauggugg

SEQ ID NO: 3159858 - RNA, 17 nt, Human
cuuugacaaagguaaau

SEQ ID NO: 3159859 - RNA, 14 nt, Human
cuuucugucucucu

SEQ ID NO: 3159860 - RNA, 19 nt, Human
cuuugacaaagguaaauca

SEQ ID NO: 3159861 - RNA, 22 nt, Human
cuuugcauaacguauaaaagcc

SEQ ID NO: 3159862 - RNA, 14 nt, Human
cuuauaauuuaaaa

SEQ ID NO: 3159863 - RNA, 13 nt, Human
cuuauaauuuaaa

SEQ ID NO: 3159864 - RNA, 15 nt, Human
cuuaugauugcagau

SEQ ID NO: 3159865 - RNA, 13 nt, Human
cuguuuacagugu

SEQ ID NO: 3159866 - RNA, 15 nt, Human
cuguuuacaguguuc

SEQ ID NO: 3159867 - RNA, 18 nt, Human
cuguuuugaaucucauaa

SEQ ID NO: 3159868 - RNA, 11 nt, Human
cuuaacuauuc

SEQ ID NO: 3159869 - RNA, 15 nt, Human
cuuccaagagccuga

SEQ ID NO: 3159870 - RNA, 14 nt, Human
cuuccaagagccug

SEQ ID NO: 3159871 - RNA, 14 nt, Human
cuuccuuccucucc

SEQ ID NO: 3159872 - RNA, 23 nt, Human
cucugcaggucccuaauaaagcu

SEQ ID NO: 3159873 - RNA, 22 nt, Human
cucugcaggucccuaauaaagc

SEQ ID NO: 3159874 - RNA, 14 nt, Human
cucuggaauuugaa

SEQ ID NO: 3159875 - RNA, 12 nt, Human
cucuggagccca

SEQ ID NO: 3159876 - RNA, 12 nt, Human
cucucugcaggu

SEQ ID NO: 3159877 - RNA, 13 nt, Human
cucucugcagguc

SEQ ID NO: 3159878 - RNA, 14 nt, Human
cucucugcaggucc

SEQ ID NO: 3159879 - RNA, 16 nt, Human
cucucugcaggucccu

SEQ ID NO: 3159880 - RNA, 17 nt, Human
cucucugcaggucccua

SEQ ID NO: 3159881 - RNA, 19 nt, Human
cucucugcaggucccuaau

SEQ ID NO: 3159882 - RNA, 22 nt, Human
cucucugcaggucccuaauaaa

SEQ ID NO: 3159883 - RNA, 19 nt, Human
cucuccacucaugugacuc

SEQ ID NO: 3159884 - RNA, 15 nt, Human
cucuggagcccacug

SEQ ID NO: 3159885 - RNA, 15 nt, Human
cucuuggagccugca

SEQ ID NO: 3159886 - RNA, 22 nt, Human
cucuuggagccugcagagcugc

SEQ ID NO: 3159887 - RNA, 19 nt, Human
cucuugaacugagcuugga

SEQ ID NO: 3159888 - RNA, 16 nt, Human
cucuugaacugagcuu

SEQ ID NO: 3159889 - RNA, 17 nt, Human
cucuugaacugagcuug

SEQ ID NO: 3159890 - RNA, 21 nt, Human
cugaagagaagggcagggcug

SEQ ID NO: 3159891 - RNA, 22 nt, Human
cuccuuaaggcucuuuuguaag

SEQ ID NO: 3159892 - RNA, 13 nt, Human
cuccuuaaggcuc

SEQ ID NO: 3159893 - RNA, 17 nt, Human
cucaucuccccaucauu

SEQ ID NO: 3159894 - RNA, 21 nt, Human
cucaucuagguaaauuacagu

SEQ ID NO: 3159895 - RNA, 15 nt, Human
cucauuccagaggaa

SEQ ID NO: 3159896 - RNA, 17 nt, Human
cucauuccagaggaagg

SEQ ID NO: 3159897 - RNA, 22 nt, Human
cucauaauuuauacaggucaua

SEQ ID NO: 3159898 - RNA, 13 nt, Human
cucauaauuuaua

SEQ ID NO: 3159899 - RNA, 15 nt, Human
cucauaauuuauaca

SEQ ID NO: 3159900 - RNA, 20 nt, Human
cucagugucuggcugcagag

SEQ ID NO: 3159901 - RNA, 21 nt, Human
cucagugucuggcugcagagc

SEQ ID NO: 3159902 - RNA, 22 nt, Human
cucagugucuggcugcagagca

SEQ ID NO: 3159903 - RNA, 21 nt, Human
cucauaaaaagccugcaauuu

SEQ ID NO: 3159904 - RNA, 21 nt, Human
cuccacucuccucuuccaggc

SEQ ID NO: 3159905 - RNA, 17 nt, Human
cuccauugguguugaca

SEQ ID NO: 3159906 - RNA, 22 nt, Human
cugggaggcucuggagcccacu

SEQ ID NO: 3159907 - RNA, 15 nt, Human
cugggaggcucugga

SEQ ID NO: 3159908 - RNA, 16 nt, Human
cugggaggcucuggag

SEQ ID NO: 3159909 - RNA, 10 nt, Human
cugggccccu

SEQ ID NO: 3159910 - RNA, 12 nt, Human
cugggccccugc

SEQ ID NO: 3159911 - RNA, 16 nt, Human
cugggccccugccucu

SEQ ID NO: 3159912 - RNA, 17 nt, Human
cugggccccugccucuc

SEQ ID NO: 3159913 - RNA, 23 nt, Human
cuggaauaauccuaaacauauga

SEQ ID NO: 3159914 - RNA, 21 nt, Human
cuggaagugcuaauuuugaaa

SEQ ID NO: 3159915 - RNA, 15 nt, Human
cugcuuuccaaagcc

SEQ ID NO: 3159916 - RNA, 17 nt, Human
cugcuuuccaaagccaa

SEQ ID NO: 3159917 - RNA, 12 nt, Human
cuggaccagccu

SEQ ID NO: 3159918 - RNA, 21 nt, Human
cuggagcccacuguacuugcu

SEQ ID NO: 3159919 - RNA, 13 nt, Human
cuggagcccacug

SEQ ID NO: 3159920 - RNA, 15 nt, Human
cuggagcccacugua

SEQ ID NO: 3159921 - RNA, 16 nt, Human
cuggagcccacuguac

SEQ ID NO: 3159922 - RNA, 17 nt, Human
cuggagcccacuguacu

SEQ ID NO: 3159923 - RNA, 20 nt, Human
cuggagcccacuguacuugc

SEQ ID NO: 3159924 - RNA, 14 nt, Human
cuggcacagccugg

SEQ ID NO: 3159925 - RNA, 17 nt, Human
cuggauuauauuaugaa

SEQ ID NO: 3159926 - RNA, 12 nt, Human
cugcagagcugc

SEQ ID NO: 3159927 - RNA, 21 nt, Human
cugcagagcugcgggcugggu

SEQ ID NO: 3159928 - RNA, 21 nt, Human
cugcagagcagugggccuggc

SEQ ID NO: 3159929 - RNA, 23 nt, Human
cugcagagcagugggccuggcca

SEQ ID NO: 3159930 - RNA, 18 nt, Human
cugcagagcagugggccu

SEQ ID NO: 3159931 - RNA, 15 nt, Human
cugcagccaggccac

SEQ ID NO: 3159932 - RNA, 16 nt, Human
cugcagccaggccacu

SEQ ID NO: 3159933 - RNA, 17 nt, Human
cugcagccaggccacug

SEQ ID NO: 3159934 - RNA, 22 nt, Human
cugcagccaggccacuggcccc

SEQ ID NO: 3159935 - RNA, 23 nt, Human
cugcagccaggccacuggccccu

SEQ ID NO: 3159936 - RNA, 18 nt, Human
cugcaauuucauaugcug

SEQ ID NO: 3159937 - RNA, 20 nt, Human
cugcaauuucauaugcugua

SEQ ID NO: 3159938 - RNA, 20 nt, Human
cugauccagcccugaguucc

SEQ ID NO: 3159939 - RNA, 13 nt, Human
cugccuauuuuaa

SEQ ID NO: 3159940 - RNA, 14 nt, Human
cugccucucugcag

SEQ ID NO: 3159941 - RNA, 12 nt, Human
cugccucucugc

SEQ ID NO: 3159942 - RNA, 13 nt, Human
cugccucucugca

SEQ ID NO: 3159943 - RNA, 16 nt, Human
cugccaggagacaggu

SEQ ID NO: 3159944 - RNA, 20 nt, Human
cugccagcauuucccuuccu

SEQ ID NO: 3159945 - RNA, 23 nt, Human
ccuugacaaagucaagccacaug

SEQ ID NO: 3159946 - RNA, 21 nt, Human
ccuugacaaagucaagccaca

SEQ ID NO: 3159947 - RNA, 22 nt, Human
ccugugagcuaggaauuguguu

SEQ ID NO: 3159948 - RNA, 13 nt, Human
ccugggaggcucu

SEQ ID NO: 3159949 - RNA, 21 nt, Human
ccugggaggcucuggagccca

SEQ ID NO: 3159950 - RNA, 12 nt, Human
ccuggcggggug

SEQ ID NO: 3159951 - RNA, 15 nt, Human
ccuggaccagccucu

SEQ ID NO: 3159952 - RNA, 16 nt, Human
ccuggaccagccucuc

SEQ ID NO: 3159953 - RNA, 14 nt, Human
ccuggaccagccuc

SEQ ID NO: 3159954 - RNA, 17 nt, Human
ccuggacugugugcuca

SEQ ID NO: 3159955 - RNA, 20 nt, Human
ccuggacugugugcucagga

SEQ ID NO: 3159956 - RNA, 20 nt, Human
ccugcuuuuuauggccugug

SEQ ID NO: 3159957 - RNA, 13 nt, Human
cguuuucaaaauu

SEQ ID NO: 3159958 - RNA, 19 nt, Human
cgucagcugggacaccccg

SEQ ID NO: 3159959 - RNA, 16 nt, Human
cguauaaaagccuguu

SEQ ID NO: 3159960 - RNA, 17 nt, Human
cguauaaaagccuguuu

SEQ ID NO: 3159961 - RNA, 21 nt, Human
cguauaaaagccuguuuaaga

SEQ ID NO: 3159962 - RNA, 22 nt, Human
cguauaaaagccuguuuaagag

SEQ ID NO: 3159963 - RNA, 22 nt, Human
cggcugggaggagggcaggcau

SEQ ID NO: 3159964 - RNA, 18 nt, Human
cggcugggaggagggcag

SEQ ID NO: 3159965 - RNA, 23 nt, Human
cggcugggaggagggcaggcauc

SEQ ID NO: 3159966 - RNA, 16 nt, Human
cgggagcucaggaacc

SEQ ID NO: 3159967 - RNA, 23 nt, Human
cgauugcaggagucccugccauc

SEQ ID NO: 3159968 - RNA, 21 nt, Human
cgauugcaggagucccugcca

SEQ ID NO: 3159969 - RNA, 14 nt, Human
ccuuugacaaaggu

SEQ ID NO: 3159970 - RNA, 20 nt, Human
ccugaagcuaucguaaaauu

SEQ ID NO: 3159971 - RNA, 22 nt, Human
ccugaagcuaucguaaaauuaa

SEQ ID NO: 3159972 - RNA, 23 nt, Human
ccugaagcuaucguaaaauuaag

SEQ ID NO: 3159973 - RNA, 19 nt, Human
ccugaggcagguccccaga

SEQ ID NO: 3159974 - RNA, 18 nt, Human
ccugaggcagguccccag

SEQ ID NO: 3159975 - RNA, 15 nt, Human
ccugaggcagguccc

SEQ ID NO: 3159976 - RNA, 14 nt, Human
ccuccucugcccgg

SEQ ID NO: 3159977 - RNA, 15 nt, Human
ccuccucugcccggg

SEQ ID NO: 3159978 - RNA, 17 nt, Human
ccuccugggaaugaagc

SEQ ID NO: 3159979 - RNA, 23 nt, Human
ccucuccacucaugugacucuuu

SEQ ID NO: 3159980 - RNA, 22 nt, Human
ccgacuuuuguuuaccagagaa

SEQ ID NO: 3159981 - RNA, 15 nt, Human
cauuuccuaaauaua

SEQ ID NO: 3159982 - RNA, 19 nt, Human
cauugucccugaagagaag

SEQ ID NO: 3159983 - RNA, 23 nt, Human
cauuguauucagaguugaugguu

SEQ ID NO: 3159984 - RNA, 20 nt, Human
cauuguacgaagaguauuuu

SEQ ID NO: 3159985 - RNA, 16 nt, Human
ccaaacaggcucagag

SEQ ID NO: 3159986 - RNA, 16 nt, Human
ccaagaggcugcagcc

SEQ ID NO: 3159987 - RNA, 14 nt, Human
ccaagaggcugcag

SEQ ID NO: 3159988 - RNA, 15 nt, Human
ccaagaggcugcagc

SEQ ID NO: 3159989 - RNA, 14 nt, Human
ccaaagccaaugug

SEQ ID NO: 3159990 - RNA, 16 nt, Human
ccaaaggcucucuccu

SEQ ID NO: 3159991 - RNA, 17 nt, Human
ccaaagcgaauuuuaaa

SEQ ID NO: 3159992 - RNA, 14 nt, Human
ccaacacugccagc

SEQ ID NO: 3159993 - RNA, 15 nt, Human
ccaacacugccagca

SEQ ID NO: 3159994 - RNA, 16 nt, Human
ccaacacugccagcau

SEQ ID NO: 3159995 - RNA, 13 nt, Human
ccaacacugccag

SEQ ID NO: 3159996 - RNA, 19 nt, Human
ccaagccuuggcucuaccc

SEQ ID NO: 3159997 - RNA, 19 nt, Human
ccaagccuggucagcccaa

SEQ ID NO: 3159998 - RNA, 20 nt, Human
ccaagccuggucagcccaaa

SEQ ID NO: 3159999 - RNA, 22 nt, Human
ccacacguaaugaaacuuggau

SEQ ID NO: 3160000 - RNA, 20 nt, Human
ccacacagacuugggcaggg

SEQ ID NO: 3160001 - RNA, 16 nt, Human
ccacacccucacugcu

SEQ ID NO: 3160002 - RNA, 14 nt, Human
ccagaagcccagaa

SEQ ID NO: 3160003 - RNA, 22 nt, Human
ccagaauaaacuggcagcucag

SEQ ID NO: 3160004 - RNA, 12 nt, Human
ccagaagcccag

SEQ ID NO: 3160005 - RNA, 13 nt, Human
ccagaagcccaga

SEQ ID NO: 3160006 - RNA, 21 nt, Human
ccacgucagcugggacacccc

SEQ ID NO: 3160007 - RNA, 14 nt, Human
ccacgguguucugu

SEQ ID NO: 3160008 - RNA, 13 nt, Human
cccaacaccucuu

SEQ ID NO: 3160009 - RNA, 20 nt, Human
ccagugaauucuugaaggaa

SEQ ID NO: 3160010 - RNA, 16 nt, Human
ccagugaauucuugaa

SEQ ID NO: 3160011 - RNA, 19 nt, Human
ccaggcuuuuuuaucaugu

SEQ ID NO: 3160012 - RNA, 17 nt, Human
ccagcuggggccaggcu

SEQ ID NO: 3160013 - RNA, 18 nt, Human
ccagcuggggccaggcug

SEQ ID NO: 3160014 - RNA, 19 nt, Human
ccagcuggggccaggcugg

SEQ ID NO: 3160015 - RNA, 20 nt, Human
ccagcuggggccaggcuggg

SEQ ID NO: 3160016 - RNA, 21 nt, Human
ccagcuggggccaggcugggu

SEQ ID NO: 3160017 - RNA, 22 nt, Human
ccagcuggggccaggcuggguc

SEQ ID NO: 3160018 - RNA, 23 nt, Human
ccagcuggggccaggcugggucg

SEQ ID NO: 3160019 - RNA, 22 nt, Human
cccaaaccaccagaagcccaga

SEQ ID NO: 3160020 - RNA, 17 nt, Human
cccaaaccaccagaagc

SEQ ID NO: 3160021 - RNA, 18 nt, Human
cccaaaccaccagaagcc

SEQ ID NO: 3160022 - RNA, 13 nt, Human
ccaucagccucca

SEQ ID NO: 3160023 - RNA, 14 nt, Human
uugcauagaauaaa

SEQ ID NO: 3160024 - RNA, 18 nt, Human
uugaauguaugcuucaua

SEQ ID NO: 3160025 - RNA, 14 nt, Human
uucugagcauuuaa

SEQ ID NO: 3160026 - RNA, 15 nt, Human
uugaaaaaugcaugu

SEQ ID NO: 3160027 - RNA, 21 nt, Human
uugaaucucauaauuuauaca

SEQ ID NO: 3160028 - RNA, 15 nt, Human
uugaaucucauaauu

SEQ ID NO: 3160029 - RNA, 15 nt, Human
uugaacugagcuugg

SEQ ID NO: 3160030 - RNA, 16 nt, Human
uugaacugagcuugga

SEQ ID NO: 3160031 - RNA, 14 nt, Human
uuguauuacaaauc

SEQ ID NO: 3160032 - RNA, 14 nt, Human
uuguauucagaguu

SEQ ID NO: 3160033 - RNA, 16 nt, Human
uuguaaaggaauuuaa

SEQ ID NO: 3160034 - RNA, 18 nt, Human
uuguaaauaaaggaacca

SEQ ID NO: 3160035 - RNA, 23 nt, Human
uuggcaaacucuccaccacacgu

SEQ ID NO: 3160036 - RNA, 17 nt, Human
uuggguggggggcuuca

SEQ ID NO: 3160037 - RNA, 19 nt, Human
uuggguggggggcuucaua

SEQ ID NO: 3160038 - RNA, 20 nt, Human
uuggguggggggcuucauac

SEQ ID NO: 3160039 - RNA, 21 nt, Human
uuggguggggggcuucauaca

SEQ ID NO: 3160040 - RNA, 22 nt, Human
uuggguggggggcuucauacac

SEQ ID NO: 3160041 - RNA, 12 nt, Human
uugguaaaccuu

SEQ ID NO: 3160042 - RNA, 14 nt, Human
uugguaaaccuuuu

SEQ ID NO: 3160043 - RNA, 16 nt, Human
uuggcaaacucuccac

SEQ ID NO: 3160044 - RNA, 20 nt, Human
uuggcaaacucuccaccaca

SEQ ID NO: 3160045 - RNA, 15 nt, Human
uuggauucugagagc

SEQ ID NO: 3160046 - RNA, 17 nt, Human
uuggauucugagagcug

SEQ ID NO: 3160047 - RNA, 17 nt, Human
uucaucugacuaugaca

SEQ ID NO: 3160048 - RNA, 15 nt, Human
uucaucuaggauuuu

SEQ ID NO: 3160049 - RNA, 21 nt, Human
uuccauccuagucacuaccuu

SEQ ID NO: 3160050 - RNA, 16 nt, Human
uuccagccugccacuc

SEQ ID NO: 3160051 - RNA, 12 nt, Human
uuccagccugcc

SEQ ID NO: 3160052 - RNA, 14 nt, Human
uuccagccugccac

SEQ ID NO: 3160053 - RNA, 18 nt, Human
uucacucuuggagccugc

SEQ ID NO: 3160054 - RNA, 19 nt, Human
uucacucuuggagccugca

SEQ ID NO: 3160055 - RNA, 14 nt, Human
uucacucuuggagc

SEQ ID NO: 3160056 - RNA, 23 nt, Human
uucaaauuguaagcaugcacaaa

SEQ ID NO: 3160057 - RNA, 20 nt, Human
uuccuagguauaauucacau

SEQ ID NO: 3160058 - RNA, 22 nt, Human
uuccuagccaccgccuccuaca

SEQ ID NO: 3160059 - RNA, 15 nt, Human
uuccuagccaccgcc

SEQ ID NO: 3160060 - RNA, 21 nt, Human
uuccuagccaccgccuccuac

SEQ ID NO: 3160061 - RNA, 14 nt, Human
uuccuagccaccgc

SEQ ID NO: 3160062 - RNA, 17 nt, Human
uuccuucugugaaagua

SEQ ID NO: 3160063 - RNA, 13 nt, Human
uuuugaaaaacug

SEQ ID NO: 3160064 - RNA, 20 nt, Human
uuuuuuauacaggaugauga

SEQ ID NO: 3160065 - RNA, 16 nt, Human
uuuucagaaaauauua

SEQ ID NO: 3160066 - RNA, 13 nt, Human
uuuucacauaucu

SEQ ID NO: 3160067 - RNA, 15 nt, Human
uuuucagaaaauauu

SEQ ID NO: 3160068 - RNA, 14 nt, Human
uuuuacuguacaga

SEQ ID NO: 3160069 - RNA, 16 nt, Human
uuuuaugauacuugaa

SEQ ID NO: 3160070 - RNA, 20 nt, Human
uuuuaugauacuugaaaauu

SEQ ID NO: 3160071 - RNA, 15 nt, Human
uuuuaaaaugagaaa

SEQ ID NO: 3160072 - RNA, 22 nt, Human
uuuuaaaaugagaaaucuaaaa

SEQ ID NO: 3160073 - RNA, 16 nt, Human
uuuguucauacauauu

SEQ ID NO: 3160074 - RNA, 13 nt, Human
uuuguucauacau

SEQ ID NO: 3160075 - RNA, 22 nt, Human
uuucuuacugucuuuuuucuaa

SEQ ID NO: 3160076 - RNA, 16 nt, Human
uuugagguggaagagg

SEQ ID NO: 3160077 - RNA, 23 nt, Human
uuuggaacaagaugguucuagca

SEQ ID NO: 3160078 - RNA, 19 nt, Human
uuugcauaacguauaaaag

SEQ ID NO: 3160079 - RNA, 23 nt, Human
uuugcauaacguauaaaagccug

SEQ ID NO: 3160080 - RNA, 15 nt, Human
uuucagcagcugcag

SEQ ID NO: 3160081 - RNA, 14 nt, Human
uuuccaaaauaauu

SEQ ID NO: 3160082 - RNA, 21 nt, Human
uuucuaacaaaaaaauauauu

SEQ ID NO: 3160083 - RNA, 22 nt, Human
uuuaugauacuugaaaauuaac

SEQ ID NO: 3160084 - RNA, 14 nt, Human
uuuaugcauauuau

SEQ ID NO: 3160085 - RNA, 13 nt, Human
uuuacauuguaaa

SEQ ID NO: 3160086 - RNA, 15 nt, Human
uuuacauuguaaaua

SEQ ID NO: 3160087 - RNA, 17 nt, Human
uuuagaagaaguguguc

SEQ ID NO: 3160088 - RNA, 19 nt, Human
uuuagaagaagugugucac

SEQ ID NO: 3160089 - RNA, 13 nt, Human
uguguaugugggg

SEQ ID NO: 3160090 - RNA, 14 nt, Human
uguguauguggggg

SEQ ID NO: 3160091 - RNA, 23 nt, Human
uguguaugugggggucugugugu

SEQ ID NO: 3160092 - RNA, 23 nt, Human
uguguugugugugggagugugua

SEQ ID NO: 3160093 - RNA, 14 nt, Human
uguguugugugugg

SEQ ID NO: 3160094 - RNA, 13 nt, Human
uguguuuaugugu

SEQ ID NO: 3160095 - RNA, 22 nt, Human
uguguuuaggaacuacugagga

SEQ ID NO: 3160096 - RNA, 15 nt, Human
uguguuuaugugugu

SEQ ID NO: 3160097 - RNA, 11 nt, Human
uguguguaugu

SEQ ID NO: 3160098 - RNA, 21 nt, Human
uguuuacagaggacaguauuu

SEQ ID NO: 3160099 - RNA, 14 nt, Human
uguuuacagaggac

SEQ ID NO: 3160100 - RNA, 12 nt, Human
uguucuauagcu

SEQ ID NO: 3160101 - RNA, 13 nt, Human
uguucauaaauaa

SEQ ID NO: 3160102 - RNA, 23 nt, Human
uguuuuaaaaugagaaaucuaaa

SEQ ID NO: 3160103 - RNA, 12 nt, Human
uguuuuaaaaaa

SEQ ID NO: 3160104 - RNA, 18 nt, Human
uguuuuaaaaugagaaau

SEQ ID NO: 3160105 - RNA, 18 nt, Human
uuaaaagauaaauauuau

SEQ ID NO: 3160106 - RNA, 14 nt, Human
uuaaagacuuuuau

SEQ ID NO: 3160107 - RNA, 22 nt, Human
uuaaugucaauucuugccaaau

SEQ ID NO: 3160108 - RNA, 14 nt, Human
uuacauuuccuaaa

SEQ ID NO: 3160109 - RNA, 15 nt, Human
uuacagaggacagua

SEQ ID NO: 3160110 - RNA, 16 nt, Human
ugugggucugugugug

SEQ ID NO: 3160111 - RNA, 14 nt, Human
ugugggucugugug

SEQ ID NO: 3160112 - RNA, 16 nt, Human
ugugggggucugugug

SEQ ID NO: 3160113 - RNA, 21 nt, Human
uguggaaaagccaagaggcug

SEQ ID NO: 3160114 - RNA, 23 nt, Human
uguggaaaagccaagaggcugca

SEQ ID NO: 3160115 - RNA, 19 nt, Human
uguggaaaagccaagaggc

SEQ ID NO: 3160116 - RNA, 16 nt, Human
ugucuggcugcagagc

SEQ ID NO: 3160117 - RNA, 17 nt, Human
ugucuggcugcagagca

SEQ ID NO: 3160118 - RNA, 14 nt, Human
ugucuggcugcaga

SEQ ID NO: 3160119 - RNA, 14 nt, Human
ugugaaguuuacau

SEQ ID NO: 3160120 - RNA, 20 nt, Human
ugugaaguuuacauuguaaa

SEQ ID NO: 3160121 - RNA, 13 nt, Human
ugugaaacauguu

SEQ ID NO: 3160122 - RNA, 14 nt, Human
ugucuuuuuucuaa

SEQ ID NO: 3160123 - RNA, 16 nt, Human
ugugaaucauuuuacc

SEQ ID NO: 3160124 - RNA, 18 nt, Human
ugugaggggcucucucau

SEQ ID NO: 3160125 - RNA, 14 nt, Human
ugugcaagagaggg

SEQ ID NO: 3160126 - RNA, 16 nt, Human
uguaaauuuaugugau

SEQ ID NO: 3160127 - RNA, 15 nt, Human
uguaaauuuauguga

SEQ ID NO: 3160128 - RNA, 20 nt, Human
uguaaaaugugaagugaaug

SEQ ID NO: 3160129 - RNA, 16 nt, Human
uguagcacugacagau

SEQ ID NO: 3160130 - RNA, 17 nt, Human
uguagcacugacagauu

SEQ ID NO: 3160131 - RNA, 22 nt, Human
uguagcacugacagauuuccau

SEQ ID NO: 3160132 - RNA, 14 nt, Human
ugucacgccagacu

SEQ ID NO: 3160133 - RNA, 23 nt, Human
ugcuagguuaauuccaauuauau

SEQ ID NO: 3160134 - RNA, 16 nt, Human
ugcuagguuaauucca

SEQ ID NO: 3160135 - RNA, 14 nt, Human
ugcucaggagcccu

SEQ ID NO: 3160136 - RNA, 17 nt, Human
ugcaggaaauggcugug

SEQ ID NO: 3160137 - RNA, 17 nt, Human
uggaauuauuuuaaaag

SEQ ID NO: 3160138 - RNA, 13 nt, Human
uggagauguuuag

SEQ ID NO: 3160139 - RNA, 14 nt, Human
ugcuuuccaaagcc

SEQ ID NO: 3160140 - RNA, 18 nt, Human
ugcuucuaguucugccag

SEQ ID NO: 3160141 - RNA, 19 nt, Human
ugcuucuaguucugccagg

SEQ ID NO: 3160142 - RNA, 20 nt, Human
ugcuucuaguucugccagga

SEQ ID NO: 3160143 - RNA, 23 nt, Human
uggaagugugggucugugugugu

SEQ ID NO: 3160144 - RNA, 21 nt, Human
uggaagugugggucugugugu

SEQ ID NO: 3160145 - RNA, 15 nt, Human
uggaauuauuuuaaa

SEQ ID NO: 3160146 - RNA, 21 nt, Human
ugggguggggggggugcuggg

SEQ ID NO: 3160147 - RNA, 22 nt, Human
ugggguggggggggugcugggc

SEQ ID NO: 3160148 - RNA, 19 nt, Human
ugggguggggggggugcug

SEQ ID NO: 3160149 - RNA, 18 nt, Human
uggggcaggggccggggg

SEQ ID NO: 3160150 - RNA, 16 nt, Human
uggggcaggggccggg

SEQ ID NO: 3160151 - RNA, 16 nt, Human
uaaaagaugcaaugua

SEQ ID NO: 3160152 - RNA, 13 nt, Human
uaaaagaucgcag

SEQ ID NO: 3160153 - RNA, 17 nt, Human
uaaaagggacugagaaa

SEQ ID NO: 3160154 - RNA, 19 nt, Human
uaaaagggacugagaaauu

SEQ ID NO: 3160155 - RNA, 20 nt, Human
uaaaagggacugagaaauuu

SEQ ID NO: 3160156 - RNA, 21 nt, Human
uaaaagggacugagaaauuua

SEQ ID NO: 3160157 - RNA, 15 nt, Human
uaaaaugagaaaucu

SEQ ID NO: 3160158 - RNA, 16 nt, Human
uaaaaugagaaaucua

SEQ ID NO: 3160159 - RNA, 13 nt, Human
uaaaaugagaaau

SEQ ID NO: 3160160 - RNA, 21 nt, Human
uaaacacucuugaaaaaugca

SEQ ID NO: 3160161 - RNA, 18 nt, Human
uaaauauaugcuaagucu

SEQ ID NO: 3160162 - RNA, 16 nt, Human
uaaauauauuuuaaga

SEQ ID NO: 3160163 - RNA, 22 nt, Human
uaaauauauuuuaagacgaaac

SEQ ID NO: 3160164 - RNA, 22 nt, Human
uaaauaaaccucaaaaugucua

SEQ ID NO: 3160165 - RNA, 20 nt, Human
uaaaucagacuaugaaguuu

SEQ ID NO: 3160166 - RNA, 17 nt, Human
uaaauaaaaauaauccu

SEQ ID NO: 3160167 - RNA, 14 nt, Human
uaaaguuuguugaa

SEQ ID NO: 3160168 - RNA, 14 nt, Human
uaaaggaauuuaaa

SEQ ID NO: 3160169 - RNA, 20 nt, Human
uaaacuuuuuucuuacuguc

SEQ ID NO: 3160170 - RNA, 15 nt, Human
uaaaaaagcugugug

SEQ ID NO: 3160171 - RNA, 12 nt, Human
uaaaaaacacug

SEQ ID NO: 3160172 - RNA, 11 nt, Human
uaaaaaacacu

SEQ ID NO: 3160173 - RNA, 16 nt, Human
guuuccuuauauuaug

SEQ ID NO: 3160174 - RNA, 13 nt, Human
guuuagcaguaua

SEQ ID NO: 3160175 - RNA, 16 nt, Human
guuuaguaaucauauu

SEQ ID NO: 3160176 - RNA, 19 nt, Human
gguugggagaaugucagua

SEQ ID NO: 3160177 - RNA, 14 nt, Human
guuucuuuguaaug

SEQ ID NO: 3160178 - RNA, 17 nt, Human
guuucuuuguaaugaaa

SEQ ID NO: 3160179 - RNA, 14 nt, Human
uaaggcaaucaugg

SEQ ID NO: 3160180 - RNA, 15 nt, Human
uaaggcaaucauggu

SEQ ID NO: 3160181 - RNA, 15 nt, Human
uaagcaugcacaaau

SEQ ID NO: 3160182 - RNA, 13 nt, Human
uaagaucucagug

SEQ ID NO: 3160183 - RNA, 19 nt, Human
uaagaucucagugguuaag

SEQ ID NO: 3160184 - RNA, 15 nt, Human
uaauaacugugaagu

SEQ ID NO: 3160185 - RNA, 19 nt, Human
uaauaaauauuuuugccau

SEQ ID NO: 3160186 - RNA, 19 nt, Human
uaaugauaaguaaaugcua

SEQ ID NO: 3160187 - RNA, 14 nt, Human
uaauauauuuccau

SEQ ID NO: 3160188 - RNA, 13 nt, Human
uaauuuuaagaaa

SEQ ID NO: 3160189 - RNA, 23 nt, Human
uaauuaaauuuugaguucuacau

SEQ ID NO: 3160190 - RNA, 19 nt, Human
uaauucuuugaccuguugg

SEQ ID NO: 3160191 - RNA, 19 nt, Human
uaccuuugacaaagguaaa

SEQ ID NO: 3160192 - RNA, 23 nt, Human
uacgaagaguauuuuugacagaa

SEQ ID NO: 3160193 - RNA, 20 nt, Human
uacgaagaguauuuuugaca

SEQ ID NO: 3160194 - RNA, 22 nt, Human
uacgaagaguauuuuugacaga

SEQ ID NO: 3160195 - RNA, 20 nt, Human
uacuugcucuugaugccugg

SEQ ID NO: 3160196 - RNA, 21 nt, Human
uacuugcucuugaugccuggc

SEQ ID NO: 3160197 - RNA, 17 nt, Human
uagaacagauaaucagu

SEQ ID NO: 3160198 - RNA, 23 nt, Human
uacauuuggagacacaacuauuu

SEQ ID NO: 3160199 - RNA, 14 nt, Human
uacaggauuugaaa

SEQ ID NO: 3160200 - RNA, 17 nt, Human
uacagcccaccuggcuu

SEQ ID NO: 3160201 - RNA, 13 nt, Human
uaauuuugaaaaa

SEQ ID NO: 3160202 - RNA, 17 nt, Human
uaauuuugaaaaacugc

SEQ ID NO: 3160203 - RNA, 11 nt, Human
uagaugugugg

SEQ ID NO: 3160204 - RNA, 16 nt, Human
uagccccacaggaggu

SEQ ID NO: 3160205 - RNA, 14 nt, Human
uaggaauuguguuu

SEQ ID NO: 3160206 - RNA, 18 nt, Human
uaggaacugcugggcuug

SEQ ID NO: 3160207 - RNA, 15 nt, Human
uaggaacugcugggc

SEQ ID NO: 3160208 - RNA, 21 nt, Human
uauauuucccugaaggaacca

SEQ ID NO: 3160209 - RNA, 14 nt, Human
uauauuuuaagacg

SEQ ID NO: 3160210 - RNA, 13 nt, Human
uauauuuuaagac

SEQ ID NO: 3160211 - RNA, 18 nt, Human
uauauaaguauucuaaau

SEQ ID NO: 3160212 - RNA, 15 nt, Human
uaucagcacgugugg

SEQ ID NO: 3160213 - RNA, 17 nt, Human
uaucaugugaaaucauu

SEQ ID NO: 3160214 - RNA, 22 nt, Human
uaucaugugaaaucauucauuu

SEQ ID NO: 3160215 - RNA, 13 nt, Human
uaggcuagggugg

SEQ ID NO: 3160216 - RNA, 20 nt, Human
uagugauuuuuaugccaccu

SEQ ID NO: 3160217 - RNA, 21 nt, Human
uagugauuuuuaugccaccug

SEQ ID NO: 3160218 - RNA, 22 nt, Human
uagugauuuuuaugccaccuga

SEQ ID NO: 3160219 - RNA, 16 nt, Human
uauacccagaaaguua

SEQ ID NO: 3160220 - RNA, 21 nt, Human
uauaauucagaaggaucuuca

SEQ ID NO: 3160221 - RNA, 20 nt, Human
uauaauucacauuguauuca

SEQ ID NO: 3160222 - RNA, 23 nt, Human
ucuggagcccacuguacuugcuc

SEQ ID NO: 3160223 - RNA, 20 nt, Human
ucuguguguuuaugugugug

SEQ ID NO: 3160224 - RNA, 19 nt, Human
ucuguguguuuaugugugu

SEQ ID NO: 3160225 - RNA, 22 nt, Human
ucuguguguguguauguggggg

SEQ ID NO: 3160226 - RNA, 16 nt, Human
ucuguguguuuaugug

SEQ ID NO: 3160227 - RNA, 15 nt, Human
ucuguguguuuaugu

SEQ ID NO: 3160228 - RNA, 13 nt, Human
ucugugugugugu

SEQ ID NO: 3160229 - RNA, 21 nt, Human
ucuguguguguguaugugggg

SEQ ID NO: 3160230 - RNA, 19 nt, Human
ucuguguguguguaugugg

SEQ ID NO: 3160231 - RNA, 18 nt, Human
ucuguguguguguaugug

SEQ ID NO: 3160232 - RNA, 15 nt, Human
ucuguguguguguau

SEQ ID NO: 3160233 - RNA, 16 nt, Human
ugaacugagcuuggaa

SEQ ID NO: 3160234 - RNA, 12 nt, Human
ugaacugagcuu

SEQ ID NO: 3160235 - RNA, 15 nt, Human
ugaacugagcuugga

SEQ ID NO: 3160236 - RNA, 13 nt, Human
ugaaaagaggugu

SEQ ID NO: 3160237 - RNA, 22 nt, Human
ugaaaagaggugugcaagagag

SEQ ID NO: 3160238 - RNA, 15 nt, Human
ugaaaucauucauuu

SEQ ID NO: 3160239 - RNA, 19 nt, Human
ucuuuuguaagguuuuugu

SEQ ID NO: 3160240 - RNA, 15 nt, Human
ucucucgugaguaua

SEQ ID NO: 3160241 - RNA, 22 nt, Human
ucucagugguuaagauuccuaa

SEQ ID NO: 3160242 - RNA, 18 nt, Human
ucucccuccucugcccgg

SEQ ID NO: 3160243 - RNA, 11 nt, Human
ucucugcaggu

SEQ ID NO: 3160244 - RNA, 20 nt, Human
ucuagaagacugucagcuuc

SEQ ID NO: 3160245 - RNA, 21 nt, Human
ucuagaagacugucagcuucc

SEQ ID NO: 3160246 - RNA, 18 nt, Human
ucuaaauuuuauaucuug

SEQ ID NO: 3160247 - RNA, 23 nt, Human
ucuaaauuuuauaucuuguagcu

SEQ ID NO: 3160248 - RNA, 23 nt, Human
ucuaaauuugaauguuaagcaga

SEQ ID NO: 3160249 - RNA, 22 nt, Human
ucuaaauuugaauguuaagcag

SEQ ID NO: 3160250 - RNA, 19 nt, Human
ucuaacaaaaaaauauauu

SEQ ID NO: 3160251 - RNA, 17 nt, Human
ucuaaauuugaauguua

SEQ ID NO: 3160252 - RNA, 13 nt, Human
ucuaaauuugaau

SEQ ID NO: 3160253 - RNA, 15 nt, Human
ucuaguaugaaauua

SEQ ID NO: 3160254 - RNA, 17 nt, Human
ucuaguaugaaauuaua

SEQ ID NO: 3160255 - RNA, 21 nt, Human
ucucaaauuuggauugcuaau

SEQ ID NO: 3160256 - RNA, 16 nt, Human
uccuuaaggcucuuuu

SEQ ID NO: 3160257 - RNA, 19 nt, Human
uccuuaaggcucuuuugua

SEQ ID NO: 3160258 - RNA, 20 nt, Human
uccuucugugaaaguacauu

SEQ ID NO: 3160259 - RNA, 15 nt, Human
ucauaauuuauacag

SEQ ID NO: 3160260 - RNA, 15 nt, Human
ucauaauuauuauuu

SEQ ID NO: 3160261 - RNA, 13 nt, Human
ucauacauuguac

SEQ ID NO: 3160262 - RNA, 15 nt, Human
ucauacauuguacga

SEQ ID NO: 3160263 - RNA, 16 nt, Human
ucauacauuguacgaa

SEQ ID NO: 3160264 - RNA, 13 nt, Human
ucaguuguacagu

SEQ ID NO: 3160265 - RNA, 13 nt, Human
uccaagcaaaugu

SEQ ID NO: 3160266 - RNA, 17 nt, Human
uccaaagccaaugugaa

SEQ ID NO: 3160267 - RNA, 20 nt, Human
uccaugggccauaugaaaag

SEQ ID NO: 3160268 - RNA, 22 nt, Human
uccccagacuccaccaagccug

SEQ ID NO: 3160269 - RNA, 13 nt, Human
ucccuaauaaagc

SEQ ID NO: 3160270 - RNA, 11 nt, Human
ucccuaauaaa

SEQ ID NO: 3160271 - RNA, 12 nt, Human
ucccuaauaaag

SEQ ID NO: 3160272 - RNA, 16 nt, Human
ucccccuccaccugcu

SEQ ID NO: 3160273 - RNA, 16 nt, Human
uauuugagaguucuaa

SEQ ID NO: 3160274 - RNA, 15 nt, Human
uauuugagaguucua

SEQ ID NO: 3160275 - RNA, 19 nt, Human
uauuugagaguucuaaauu

SEQ ID NO: 3160276 - RNA, 18 nt, Human
uauuugagaguucuaaau

SEQ ID NO: 3160277 - RNA, 15 nt, Human
uauuuuauguugcau

SEQ ID NO: 3160278 - RNA, 16 nt, Human
uauuuuauguugcaua

SEQ ID NO: 3160279 - RNA, 22 nt, Human
ucagaguugaugguuguacaua

SEQ ID NO: 3160280 - RNA, 17 nt, Human
ucagaaaauauuaugug

SEQ ID NO: 3160281 - RNA, 20 nt, Human
ucagaaaauauuauguguuu

SEQ ID NO: 3160282 - RNA, 19 nt, Human
ucagaaaauauuauguguu

SEQ ID NO: 3160283 - RNA, 18 nt, Human
ucacgccagacuucccac

SEQ ID NO: 3160284 - RNA, 13 nt, Human
uuuuuucuuacug

SEQ ID NO: 3160285 - RNA, 18 nt, Reston Ebola virus [REBOV]
acagcagcaaaccaggaa

SEQ ID NO: 3160286 - RNA, 14 nt, Reston Ebola virus [REBOV]
uacacuuaagacuu

SEQ ID NO: 3160287 - RNA, 16 nt, Reston Ebola virus [REBOV]
acugagucccaccagg

SEQ ID NO: 3160288 - RNA, 22 nt, Reston Ebola virus [REBOV]
cugucgaauccuaggaccaucu

SEQ ID NO: 3160289 - RNA, 16 nt, Reston Ebola virus [REBOV]
ugcaauugucaagagu

SEQ ID NO: 3160290 - RNA, 16 nt, Reston Ebola virus [REBOV]
caaauuaaacaugacu

SEQ ID NO: 3160291 - RNA, 19 nt, Reston Ebola virus [REBOV]
aauuguuagagguaacaag

SEQ ID NO: 3160292 - RNA, 23 nt, Reston Ebola virus [REBOV]
accaccauugccccaaguccaac

SEQ ID NO: 3160293 - RNA, 20 nt, Reston Ebola virus [REBOV]
acuccgcccagagcccacag

SEQ ID NO: 3160294 - RNA, 14 nt, Reston Ebola virus [REBOV]
cugagguauuuugu

SEQ ID NO: 3160295 - RNA, 14 nt, Reston Ebola virus [REBOV]
accacgccagcacc

SEQ ID NO: 3160296 - RNA, 16 nt, Reston Ebola virus [REBOV]
gagagagaaaaaucuc

SEQ ID NO: 3160297 - RNA, 19 nt, Reston Ebola virus [REBOV]
auugauuuucuucuucaac

SEQ ID NO: 3160298 - RNA, 14 nt, Reston Ebola virus [REBOV]
uuucuuuuguaauu

SEQ ID NO: 3160299 - RNA, 19 nt, Reston Ebola virus [REBOV]
guaagauuuuguguugauu

SEQ ID NO: 3160300 - RNA, 16 nt, Reston Ebola virus [REBOV]
cgacaaaacaccgcua

SEQ ID NO: 3160301 - RNA, 18 nt, Reston Ebola virus [REBOV]
auguaaauauaacaagug

SEQ ID NO: 3160302 - RNA, 12 nt, Reston Ebola virus [REBOV]
ucuauucuaauc

SEQ ID NO: 3160303 - RNA, 14 nt, Reston Ebola virus [REBOV]
gagacaauuuacca

SEQ ID NO: 3160304 - RNA, 22 nt, Reston Ebola virus [REBOV]
cagccgaacaacacagcaucca

SEQ ID NO: 3160305 - RNA, 19 nt, Reston Ebola virus [REBOV]
agcuauuaguuauuacuua

SEQ ID NO: 3160306 - RNA, 23 nt, Reston Ebola virus [REBOV]
ucuucaauuauuucugcgggcca

SEQ ID NO: 3160307 - RNA, 23 nt, Reston Ebola virus [REBOV]
auugacaauccccuaccagacca

SEQ ID NO: 3160308 - RNA, 13 nt, Reston Ebola virus [REBOV]
aaucagaaauugg

SEQ ID NO: 3160309 - RNA, 17 nt, Reston Ebola virus [REBOV]
aagagacggccaacagc

SEQ ID NO: 3160310 - RNA, 17 nt, Reston Ebola virus [REBOV]
aggaaccagcccaggaa

SEQ ID NO: 3160311 - RNA, 15 nt, Reston Ebola virus [REBOV]
auaaauaauacuuua

SEQ ID NO: 3160312 - RNA, 20 nt, Reston Ebola virus [REBOV]
cccgcaagagacggccaaca

SEQ ID NO: 3160313 - RNA, 21 nt, Reston Ebola virus [REBOV]
cucguuaacaaucgcuaguaa

SEQ ID NO: 3160314 - RNA, 16 nt, Reston Ebola virus [REBOV]
cugcuucuuugcuuga

SEQ ID NO: 3160315 - RNA, 22 nt, Reston Ebola virus [REBOV]
uuaagaucaaaugcaaacauua

SEQ ID NO: 3160316 - RNA, 12 nt, Reston Ebola virus [REBOV]
ccagcccaggaa

SEQ ID NO: 3160317 - RNA, 18 nt, Reston Ebola virus [REBOV]
caaugaaacuacccaggc

SEQ ID NO: 3160318 - RNA, 17 nt, Reston Ebola virus [REBOV]
aaagcuauugauuuucu

SEQ ID NO: 3160319 - RNA, 15 nt, Reston Ebola virus [REBOV]
ugcauaaucagaaug

SEQ ID NO: 3160320 - RNA, 17 nt, Reston Ebola virus [REBOV]
accaggaaccagcccag

SEQ ID NO: 3160321 - RNA, 23 nt, Reston Ebola virus [REBOV]
ccaagugaacagccgaacaacac

SEQ ID NO: 3160322 - RNA, 19 nt, Reston Ebola virus [REBOV]
uugaaauggagauuaucag

SEQ ID NO: 3160323 - RNA, 12 nt, Reston Ebola virus [REBOV]
agauaaauggac

SEQ ID NO: 3160324 - RNA, 13 nt, Reston Ebola virus [REBOV]
gccagcacccaca

SEQ ID NO: 3160325 - RNA, 13 nt, Reston Ebola virus [REBOV]
ccaaucuuuuccu

SEQ ID NO: 3160326 - RNA, 13 nt, Reston Ebola virus [REBOV]
ccgaugacccagg

SEQ ID NO: 3160327 - RNA, 13 nt, Reston Ebola virus [REBOV]
gaugauaauauau

SEQ ID NO: 3160328 - RNA, 12 nt, Reston Ebola virus [REBOV]
caggcucuucaa

SEQ ID NO: 3160329 - RNA, 22 nt, Reston Ebola virus [REBOV]
aggacuuacucacuucuuaaca

SEQ ID NO: 3160330 - RNA, 20 nt, Reston Ebola virus [REBOV]
ggagagacaaucacagguuu

SEQ ID NO: 3160331 - RNA, 20 nt, Reston Ebola virus [REBOV]
cgcaagagacggccaacagc

SEQ ID NO: 3160332 - RNA, 18 nt, Reston Ebola virus [REBOV]
uaacacaucauaacuuua

SEQ ID NO: 3160333 - RNA, 22 nt, Reston Ebola virus [REBOV]
uacauugaggguguaaugcaua

SEQ ID NO: 3160334 - RNA, 15 nt, Reston Ebola virus [REBOV]
ggucuuuuugaaaug

SEQ ID NO: 3160335 - RNA, 13 nt, Reston Ebola virus [REBOV]
ggaagauuaagaa

SEQ ID NO: 3160336 - RNA, 14 nt, Reston Ebola virus [REBOV]
gaaccagcccagga

SEQ ID NO: 3160337 - RNA, 13 nt, Reston Ebola virus [REBOV]
ugcuugauuuaca

SEQ ID NO: 3160338 - RNA, 20 nt, Reston Ebola virus [REBOV]
aagaguuuaaguaauauaca

SEQ ID NO: 3160339 - RNA, 13 nt, Reston Ebola virus [REBOV]
aaaaaauauuacu

SEQ ID NO: 3160340 - RNA, 21 nt, Reston Ebola virus [REBOV]
uaagaagagauuggaguaaaa

SEQ ID NO: 3160341 - RNA, 18 nt, Reston Ebola virus [REBOV]
aacuaaaccaagcaauau

SEQ ID NO: 3160342 - RNA, 14 nt, Reston Ebola virus [REBOV]
cccaucggcaagca

SEQ ID NO: 3160343 - RNA, 14 nt, Reston Ebola virus [REBOV]
caguuaaguaacau

SEQ ID NO: 3160344 - RNA, 14 nt, Reston Ebola virus [REBOV]
auuucucuuaauaa

SEQ ID NO: 3160345 - RNA, 21 nt, Reston Ebola virus [REBOV]
aagagacggccaacagcagca

SEQ ID NO: 3160346 - RNA, 23 nt, Reston Ebola virus [REBOV]
ggguuacucuaaggagaaauauu

SEQ ID NO: 3160347 - RNA, 20 nt, Reston Ebola virus [REBOV]
cgggccacaacagaacugag

SEQ ID NO: 3160348 - RNA, 21 nt, Reston Ebola virus [REBOV]
uaacauagacugaaaaugcua

SEQ ID NO: 3160349 - RNA, 14 nt, Reston Ebola virus [REBOV]
caggaaccagccca

SEQ ID NO: 3160350 - RNA, 17 nt, Reston Ebola virus [REBOV]
uaauccuaguauuuauu

SEQ ID NO: 3160351 - RNA, 14 nt, Reston Ebola virus [REBOV]
auugauaagaauac

SEQ ID NO: 3160352 - RNA, 16 nt, Reston Ebola virus [REBOV]
agcccacagaccaaga

SEQ ID NO: 3160353 - RNA, 14 nt, Reston Ebola virus [REBOV]
uauucuaaucagag

SEQ ID NO: 3160354 - RNA, 20 nt, Reston Ebola virus [REBOV]
gaucuuuacuauuggacagc

SEQ ID NO: 3160355 - RNA, 17 nt, Reston Ebola virus [REBOV]
cauagacugaaaaugcu

SEQ ID NO: 3160356 - RNA, 18 nt, Reston Ebola virus [REBOV]
uuacgccuagauaacuaa

SEQ ID NO: 3160357 - RNA, 21 nt, Reston Ebola virus [REBOV]
uuaagcgcacacaaaaacauu

SEQ ID NO: 3160358 - RNA, 14 nt, Reston Ebola virus [REBOV]
augaaacuacccag

SEQ ID NO: 3160359 - RNA, 21 nt, Reston Ebola virus [REBOV]
gucagcuagccaaugaaacua

SEQ ID NO: 3160360 - RNA, 17 nt, Reston Ebola virus [REBOV]
ugacuugaauguaauaa

SEQ ID NO: 3160361 - RNA, 14 nt, Reston Ebola virus [REBOV]
gagggggcagcagu

SEQ ID NO: 3160362 - RNA, 17 nt, Reston Ebola virus [REBOV]
agcagcaaaccaggaac

SEQ ID NO: 3160363 - RNA, 21 nt, Reston Ebola virus [REBOV]
augcaaacauuauaagaaugu

SEQ ID NO: 3160364 - RNA, 15 nt, Reston Ebola virus [REBOV]
acuuaucuuaaauga

SEQ ID NO: 3160365 - RNA, 17 nt, Reston Ebola virus [REBOV]
cugagucccaccaggaa

SEQ ID NO: 3160366 - RNA, 15 nt, Reston Ebola virus [REBOV]
gaacagccgaacaac

SEQ ID NO: 3160367 - RNA, 15 nt, Reston Ebola virus [REBOV]
auccgauccaaggcu

SEQ ID NO: 3160368 - RNA, 21 nt, Reston Ebola virus [REBOV]
ggccacaacagaacugaggac

SEQ ID NO: 3160369 - RNA, 15 nt, Reston Ebola virus [REBOV]
uccauuuaguaauaa

SEQ ID NO: 3160370 - RNA, 15 nt, Reston Ebola virus [REBOV]
ccaggaaccagccca

SEQ ID NO: 3160371 - RNA, 20 nt, Reston Ebola virus [REBOV]
ucauauuuugaucaaguaau

SEQ ID NO: 3160372 - RNA, 18 nt, Reston Ebola virus [REBOV]
aauuggagauaaauggac

SEQ ID NO: 3160373 - RNA, 16 nt, Reston Ebola virus [REBOV]
cgaugacccaggaccc

SEQ ID NO: 3160374 - RNA, 15 nt, Reston Ebola virus [REBOV]
cuccgcccagagccc

SEQ ID NO: 3160375 - RNA, 21 nt, Reston Ebola virus [REBOV]
ccauugccccaaguccaacca

SEQ ID NO: 3160376 - RNA, 18 nt, Reston Ebola virus [REBOV]
ugucaaugcuauacuguu

SEQ ID NO: 3160377 - RNA, 12 nt, Reston Ebola virus [REBOV]
ggcucgaacaac

SEQ ID NO: 3160378 - RNA, 21 nt, Reston Ebola virus [REBOV]
aacaugucaaugcuauacugu

SEQ ID NO: 3160379 - RNA, 20 nt, Reston Ebola virus [REBOV]
guauauaaccaaucuuuucc

SEQ ID NO: 3160380 - RNA, 18 nt, Reston Ebola virus [REBOV]
uccccgaugacccaggac

SEQ ID NO: 3160381 - RNA, 16 nt, Reston Ebola virus [REBOV]
auaugagugauaaugu

SEQ ID NO: 3160382 - RNA, 23 nt, Reston Ebola virus [REBOV]
uguugcauugagccacaugauug

SEQ ID NO: 3160383 - RNA, 18 nt, Reston Ebola virus [REBOV]
agguauuuugucuagagu

SEQ ID NO: 3160384 - RNA, 22 nt, Reston Ebola virus [REBOV]
uaaggaguuuuuuaaucuaauu

SEQ ID NO: 3160385 - RNA, 13 nt, Reston Ebola virus [REBOV]
uauuuaacaaggc

SEQ ID NO: 3160386 - RNA, 19 nt, Reston Ebola virus [REBOV]
aaccaggaaccagcccagg

SEQ ID NO: 3160387 - RNA, 15 nt, Reston Ebola virus [REBOV]
caacuccgcccagag

SEQ ID NO: 3160388 - RNA, 15 nt, Reston Ebola virus [REBOV]
cagucaaaacuaaac

SEQ ID NO: 3160389 - RNA, 18 nt, Reston Ebola virus [REBOV]
ugaacagccgaacaacac

SEQ ID NO: 3160390 - RNA, 15 nt, Reston Ebola virus [REBOV]
cuuuuugaaauggag

SEQ ID NO: 3160391 - RNA, 16 nt, Reston Ebola virus [REBOV]
agcuaaauacacuuaa

SEQ ID NO: 3160392 - RNA, 18 nt, Reston Ebola virus [REBOV]
ggcuuccauuuuuacaug

SEQ ID NO: 3160393 - RNA, 18 nt, Reston Ebola virus [REBOV]
uggagauuaucagcauuu

SEQ ID NO: 3160394 - RNA, 12 nt, Reston Ebola virus [REBOV]
ugcagcagaagg

SEQ ID NO: 3160395 - RNA, 20 nt, Reston Ebola virus [REBOV]
ggaagcgcagccggaccaag

SEQ ID NO: 3160396 - RNA, 14 nt, Reston Ebola virus [REBOV]
caauagacuaaaaa

SEQ ID NO: 3160397 - RNA, 18 nt, Reston Ebola virus [REBOV]
aacaaucgcuaguaauuu

SEQ ID NO: 3160398 - RNA, 14 nt, Reston Ebola virus [REBOV]
cgggcuacgucagc

SEQ ID NO: 3160399 - RNA, 21 nt, Reston Ebola virus [REBOV]
auuaucagcauuucuuaaaug

SEQ ID NO: 3160400 - RNA, 15 nt, Reston Ebola virus [REBOV]
gcgggccacaacaga

SEQ ID NO: 3160401 - RNA, 18 nt, Reston Ebola virus [REBOV]
uaucugcaguaaccagaa

SEQ ID NO: 3160402 - RNA, 17 nt, Reston Ebola virus [REBOV]
cagcagcaaaccaggaa

SEQ ID NO: 3160403 - RNA, 16 nt, Reston Ebola virus [REBOV]
caccauugccccaagu

SEQ ID NO: 3160404 - RNA, 10 nt, Reston Ebola virus [REBOV]
ucacagguuu

SEQ ID NO: 3160405 - RNA, 18 nt, Reston Ebola virus [REBOV]
uagacuaaaaaucugauu

SEQ ID NO: 3160406 - RNA, 19 nt, Reston Ebola virus [REBOV]
cggaccaagucagcccgga

SEQ ID NO: 3160407 - RNA, 18 nt, Reston Ebola virus [REBOV]
acugagucccaccaggaa

SEQ ID NO: 3160408 - RNA, 14 nt, Reston Ebola virus [REBOV]
uaagaucaaaugca

SEQ ID NO: 3160409 - RNA, 23 nt, Reston Ebola virus [REBOV]
caucuuguugcauugagccacau

SEQ ID NO: 3160410 - RNA, 20 nt, Reston Ebola virus [REBOV]
caaucacagguuucaccgcg

SEQ ID NO: 3160411 - RNA, 21 nt, Reston Ebola virus [REBOV]
uguguugauuuauucugagau

SEQ ID NO: 3160412 - RNA, 20 nt, Reston Ebola virus [REBOV]
uucaacccagucaaaacuaa

SEQ ID NO: 3160413 - RNA, 18 nt, Reston Ebola virus [REBOV]
cccaaguccaaccaugac

SEQ ID NO: 3160414 - RNA, 20 nt, Reston Ebola virus [REBOV]
caugacuuuauugacaaucc

SEQ ID NO: 3160415 - RNA, 20 nt, Reston Ebola virus [REBOV]
cuccgcccagagcccacaga

SEQ ID NO: 3160416 - RNA, 14 nt, Reston Ebola virus [REBOV]
auaacaugucaaug

SEQ ID NO: 3160417 - RNA, 14 nt, Reston Ebola virus [REBOV]
ugacccaggacccg

SEQ ID NO: 3160418 - RNA, 23 nt, Reston Ebola virus [REBOV]
aaauuuacuugaaugcugaccac

SEQ ID NO: 3160419 - RNA, 23 nt, Reston Ebola virus [REBOV]
acugaggacuuacucacuucuua

SEQ ID NO: 3160420 - RNA, 16 nt, Reston Ebola virus [REBOV]
caggacccgcaagaga

SEQ ID NO: 3160421 - RNA, 16 nt, Reston Ebola virus [REBOV]
aagaccacgccagcac

SEQ ID NO: 3160422 - RNA, 13 nt, Reston Ebola virus [REBOV]
cagcacccacaac

SEQ ID NO: 3160423 - RNA, 15 nt, Reston Ebola virus [REBOV]
agaucauuccaaacu

SEQ ID NO: 3160424 - RNA, 19 nt, Reston Ebola virus [REBOV]
agguagcugauucacugag

SEQ ID NO: 3160425 - RNA, 18 nt, Reston Ebola virus [REBOV]
uaaucuauggacagguug

SEQ ID NO: 3160426 - RNA, 20 nt, Reston Ebola virus [REBOV]
guaauauacauauacacuua

SEQ ID NO: 3160427 - RNA, 19 nt, Reston Ebola virus [REBOV]
gaacccaaugacaaccacc

SEQ ID NO: 3160428 - RNA, 23 nt, Reston Ebola virus [REBOV]
uaaucuaaggccauuaagaguuu

SEQ ID NO: 3160429 - RNA, 19 nt, Reston Ebola virus [REBOV]
acuacccaggcucuucaau

SEQ ID NO: 3160430 - RNA, 16 nt, Reston Ebola virus [REBOV]
aucuauggacagguug

SEQ ID NO: 3160431 - RNA, 14 nt, Reston Ebola virus [REBOV]
uacugaugaaauua

SEQ ID NO: 3160432 - RNA, 19 nt, Reston Ebola virus [REBOV]
cugucgaauccuaggacca

SEQ ID NO: 3160433 - RNA, 17 nt, Reston Ebola virus [REBOV]
agaaaagcuauugauuu

SEQ ID NO: 3160434 - RNA, 16 nt, Reston Ebola virus [REBOV]
cagagcccacagacca

SEQ ID NO: 3160435 - RNA, 19 nt, Reston Ebola virus [REBOV]
cagaucuuuacuauuggac

SEQ ID NO: 3160436 - RNA, 16 nt, Reston Ebola virus [REBOV]
agacuauugaacuauu

SEQ ID NO: 3160437 - RNA, 15 nt, Reston Ebola virus [REBOV]
ccccgaugacccagg

SEQ ID NO: 3160438 - RNA, 17 nt, Reston Ebola virus [REBOV]
uggauccgauccaaggc

SEQ ID NO: 3160439 - RNA, 18 nt, Reston Ebola virus [REBOV]
gacccaggacccgcaaga

SEQ ID NO: 3160440 - RNA, 13 nt, Reston Ebola virus [REBOV]
aacagaaaagcua

SEQ ID NO: 3160441 - RNA, 14 nt, Reston Ebola virus [REBOV]
uacuauuggacagc

SEQ ID NO: 3160442 - RNA, 15 nt, Reston Ebola virus [REBOV]
auaagugauucuuaa

SEQ ID NO: 3160443 - RNA, 19 nt, Reston Ebola virus [REBOV]
uucaccgcgaacccaauga

SEQ ID NO: 3160444 - RNA, 14 nt, Reston Ebola virus [REBOV]
cagagcccacagac

SEQ ID NO: 3160445 - RNA, 18 nt, Reston Ebola virus [REBOV]
aacaacuccgcccagagc

SEQ ID NO: 3160446 - RNA, 22 nt, Reston Ebola virus [REBOV]
guaagguagcugauucacugag

SEQ ID NO: 3160447 - RNA, 15 nt, Reston Ebola virus [REBOV]
gaccaagucagcccg

SEQ ID NO: 3160448 - RNA, 20 nt, Reston Ebola virus [REBOV]
cuaaucagagguauaacaau

SEQ ID NO: 3160449 - RNA, 20 nt, Reston Ebola virus [REBOV]
caggaagcgcagccggacca

SEQ ID NO: 3160450 - RNA, 20 nt, Reston Ebola virus [REBOV]
cgaacaacuccgcccagagc

SEQ ID NO: 3160451 - RNA, 19 nt, Reston Ebola virus [REBOV]
ccagcccaggaagcgcagc

SEQ ID NO: 3160452 - RNA, 22 nt, Reston Ebola virus [REBOV]
aaaaucugauuguauagaauua

SEQ ID NO: 3160453 - RNA, 17 nt, Reston Ebola virus [REBOV]
uacauguguauauaacc

SEQ ID NO: 3160454 - RNA, 22 nt, Reston Ebola virus [REBOV]
agauuuagaguguaugaauugu

SEQ ID NO: 3160455 - RNA, 12 nt, Reston Ebola virus [REBOV]
guuauuacuuau

SEQ ID NO: 3160456 - RNA, 18 nt, Reston Ebola virus [REBOV]
accaggaaccagcccagg

SEQ ID NO: 3160457 - RNA, 15 nt, Reston Ebola virus [REBOV]
ggacagcuguugaug

SEQ ID NO: 3160458 - RNA, 22 nt, Reston Ebola virus [REBOV]
aacauccccgaugacccaggac

SEQ ID NO: 3160459 - RNA, 17 nt, Reston Ebola virus [REBOV]
guggucuuuuugaaaug

SEQ ID NO: 3160460 - RNA, 20 nt, Reston Ebola virus [REBOV]
acuucaaagugauuaaauga

SEQ ID NO: 3160461 - RNA, 11 nt, Reston Ebola virus [REBOV]
ugacccaggac

SEQ ID NO: 3160462 - RNA, 14 nt, Reston Ebola virus [REBOV]
cccaaguccaacca

SEQ ID NO: 3160463 - RNA, 17 nt, Reston Ebola virus [REBOV]
cacugagucccaccagg

SEQ ID NO: 3160464 - RNA, 12 nt, Reston Ebola virus [REBOV]
augacccaggac

SEQ ID NO: 3160465 - RNA, 15 nt, Reston Ebola virus [REBOV]
aguaugccaaucuua

SEQ ID NO: 3160466 - RNA, 16 nt, Reston Ebola virus [REBOV]
ugagucccaccaggaa

SEQ ID NO: 3160467 - RNA, 13 nt, Reston Ebola virus [REBOV]
cgaugacccagga

SEQ ID NO: 3160468 - RNA, 16 nt, Reston Ebola virus [REBOV]
guaccaagugaacagc

SEQ ID NO: 3160469 - RNA, 12 nt, Reston Ebola virus [REBOV]
aagcuaaauaca

SEQ ID NO: 3160470 - RNA, 19 nt, Reston Ebola virus [REBOV]
auauaauguaaauauaaca

SEQ ID NO: 3160471 - RNA, 16 nt, Reston Ebola virus [REBOV]
ugaauugugcagauuu

SEQ ID NO: 3160472 - RNA, 16 nt, Reston Ebola virus [REBOV]
aaugacaaccaccauu

SEQ ID NO: 3160473 - RNA, 21 nt, Reston Ebola virus [REBOV]
caaccaccauugccccaaguc

SEQ ID NO: 3160474 - RNA, 13 nt, Reston Ebola virus [REBOV]
uuguugaguuaac

SEQ ID NO: 3160475 - RNA, 14 nt, Reston Ebola virus [REBOV]
agcgcagccggacc

SEQ ID NO: 3160476 - RNA, 13 nt, Reston Ebola virus [REBOV]
ccauugccccaag

SEQ ID NO: 3160477 - RNA, 13 nt, Reston Ebola virus [REBOV]
aacauagacugaa

SEQ ID NO: 3160478 - RNA, 14 nt, Reston Ebola virus [REBOV]
cggccaacagcagc

SEQ ID NO: 3160479 - RNA, 19 nt, Reston Ebola virus [REBOV]
ccccgaugacccaggaccc

SEQ ID NO: 3160480 - RNA, 15 nt, Reston Ebola virus [REBOV]
ugauaacaauguacc

SEQ ID NO: 3160481 - RNA, 13 nt, Reston Ebola virus [REBOV]
uauuuuaauaaca

SEQ ID NO: 3160482 - RNA, 17 nt, Reston Ebola virus [REBOV]
ucgcauuuaaacaugcu

SEQ ID NO: 3160483 - RNA, 15 nt, Reston Ebola virus [REBOV]
cccacagaccaagac

SEQ ID NO: 3160484 - RNA, 16 nt, Reston Ebola virus [REBOV]
aacaaucgcuaguaau

SEQ ID NO: 3160485 - RNA, 19 nt, Reston Ebola virus [REBOV]
ucuauccaagauguggcuc

SEQ ID NO: 3160486 - RNA, 14 nt, Reston Ebola virus [REBOV]
gcuaaauacacuua

SEQ ID NO: 3160487 - RNA, 20 nt, Reston Ebola virus [REBOV]
acagcagcaaaccaggaacc

SEQ ID NO: 3160488 - RNA, 14 nt, Reston Ebola virus [REBOV]
cuaaucuauuuucg

SEQ ID NO: 3160489 - RNA, 15 nt, Reston Ebola virus [REBOV]
cgcaagagacggcca

SEQ ID NO: 3160490 - RNA, 21 nt, Reston Ebola virus [REBOV]
ugaucuuaaucuauggacagg

SEQ ID NO: 3160491 - RNA, 14 nt, Reston Ebola virus [REBOV]
acaacacagcaucc

SEQ ID NO: 3160492 - RNA, 14 nt, Reston Ebola virus [REBOV]
auugccccaagucc

SEQ ID NO: 3160493 - RNA, 17 nt, Reston Ebola virus [REBOV]
aggcucgaacaacuccg

SEQ ID NO: 3160494 - RNA, 23 nt, Reston Ebola virus [REBOV]
ccuaacuauugggcggcuuccau

SEQ ID NO: 3160495 - RNA, 15 nt, Reston Ebola virus [REBOV]
ucaaagugauuaaau

SEQ ID NO: 3160496 - RNA, 20 nt, Reston Ebola virus [REBOV]
ugauuguguguauuaaauua

SEQ ID NO: 3160497 - RNA, 23 nt, Reston Ebola virus [REBOV]
uaguuaagaucaaaugcaaacau

SEQ ID NO: 3160498 - RNA, 17 nt, Reston Ebola virus [REBOV]
cuaaccucauauuuuga

SEQ ID NO: 3160499 - RNA, 15 nt, Reston Ebola virus [REBOV]
acuuuauuuuaauaa

SEQ ID NO: 3160500 - RNA, 15 nt, Reston Ebola virus [REBOV]
uaagaauacacuuua

SEQ ID NO: 3160501 - RNA, 14 nt, Reston Ebola virus [REBOV]
cggaccaagucagc

SEQ ID NO: 3160502 - RNA, 17 nt, Reston Ebola virus [REBOV]
agcacccacaacauccc

SEQ ID NO: 3160503 - RNA, 20 nt, Reston Ebola virus [REBOV]
auccccgaugacccaggacc

SEQ ID NO: 3160504 - RNA, 20 nt, Reston Ebola virus [REBOV]
uaagaucaaaugcaaacauu

SEQ ID NO: 3160505 - RNA, 20 nt, Reston Ebola virus [REBOV]
caagucagcccggacucacu

SEQ ID NO: 3160506 - RNA, 13 nt, Reston Ebola virus [REBOV]
gucuuuuugaaau

SEQ ID NO: 3160507 - RNA, 14 nt, Reston Ebola virus [REBOV]
ccuaccagaccacg

SEQ ID NO: 3160508 - RNA, 16 nt, Reston Ebola virus [REBOV]
gaaccagcccaggaag

SEQ ID NO: 3160509 - RNA, 21 nt, Reston Ebola virus [REBOV]
uaaaaguauaaaauaaauuua

SEQ ID NO: 3160510 - RNA, 19 nt, Reston Ebola virus [REBOV]
cauccccgaugacccagga

SEQ ID NO: 3160511 - RNA, 16 nt, Reston Ebola virus [REBOV]
aucuucaguuaaguaa

SEQ ID NO: 3160512 - RNA, 21 nt, Reston Ebola virus [REBOV]
agcugauucacugagucccac

SEQ ID NO: 3160513 - RNA, 15 nt, Reston Ebola virus [REBOV]
ucuauggacagguug

SEQ ID NO: 3160514 - RNA, 23 nt, Reston Ebola virus [REBOV]
cacuuuaucauagcguaacacau

SEQ ID NO: 3160515 - RNA, 14 nt, Reston Ebola virus [REBOV]
ccaggaaacaaaag

SEQ ID NO: 3160516 - RNA, 23 nt, Reston Ebola virus [REBOV]
aaaagcuauugauuuucuucuuc

SEQ ID NO: 3160517 - RNA, 16 nt, Reston Ebola virus [REBOV]
cagcagcaaaccagga

SEQ ID NO: 3160518 - RNA, 20 nt, Reston Ebola virus [REBOV]
cagcagcaaaccaggaacca

SEQ ID NO: 3160519 - RNA, 23 nt, Reston Ebola virus [REBOV]
cuagccaaugaaacuacccaggc

SEQ ID NO: 3160520 - RNA, 21 nt, Reston Ebola virus [REBOV]
gcaaaccaggaaccagcccag

SEQ ID NO: 3160521 - RNA, 16 nt, Reston Ebola virus [REBOV]
gaacaacuccgcccag

SEQ ID NO: 3160522 - RNA, 15 nt, Reston Ebola virus [REBOV]
guaaucaugauuuua

SEQ ID NO: 3160523 - RNA, 19 nt, Reston Ebola virus [REBOV]
aacaacuccgcccagagcc

SEQ ID NO: 3160524 - RNA, 14 nt, Reston Ebola virus [REBOV]
cauuuaaacaugcu

SEQ ID NO: 3160525 - RNA, 18 nt, Reston Ebola virus [REBOV]
ugcuucuuugcuugauuu

SEQ ID NO: 3160526 - RNA, 14 nt, Reston Ebola virus [REBOV]
ugacgcuguugaug

SEQ ID NO: 3160527 - RNA, 15 nt, Reston Ebola virus [REBOV]
uagcaaucagaaauu

SEQ ID NO: 3160528 - RNA, 17 nt, Reston Ebola virus [REBOV]
auaugaccucaagucaa

SEQ ID NO: 3160529 - RNA, 16 nt, Reston Ebola virus [REBOV]
cuccgcccagagccca

SEQ ID NO: 3160530 - RNA, 17 nt, Reston Ebola virus [REBOV]
ucaaagugauuaaauga

SEQ ID NO: 3160531 - RNA, 17 nt, Reston Ebola virus [REBOV]
ccagagcccacagacca

SEQ ID NO: 3160532 - RNA, 17 nt, Reston Ebola virus [REBOV]
uguaucacguuaaagau

SEQ ID NO: 3160533 - RNA, 20 nt, Reston Ebola virus [REBOV]
cucaggguuacucuaaggag

SEQ ID NO: 3160534 - RNA, 20 nt, Reston Ebola virus [REBOV]
aggaccaucuuguugcauug

SEQ ID NO: 3160535 - RNA, 16 nt, Reston Ebola virus [REBOV]
caacagcagcaaacca

SEQ ID NO: 3160536 - RNA, 14 nt, Reston Ebola virus [REBOV]
uuacuugaaugcug

SEQ ID NO: 3160537 - RNA, 22 nt, Reston Ebola virus [REBOV]
uauauaaccaaucuuuuccuau

SEQ ID NO: 3160538 - RNA, 15 nt, Reston Ebola virus [REBOV]
cggaccugcagcaga

SEQ ID NO: 3160539 - RNA, 19 nt, Reston Ebola virus [REBOV]
uaauguaaauauaacaagu

SEQ ID NO: 3160540 - RNA, 17 nt, Reston Ebola virus [REBOV]
guacaugaaugagaauu

SEQ ID NO: 3160541 - RNA, 22 nt, Reston Ebola virus [REBOV]
auggucuuauuugaauaugaca

SEQ ID NO: 3160542 - RNA, 18 nt, Reston Ebola virus [REBOV]
auucugcuaguaauuccg

SEQ ID NO: 3160543 - RNA, 15 nt, Reston Ebola virus [REBOV]
aacacagcauccauu

SEQ ID NO: 3160544 - RNA, 18 nt, Reston Ebola virus [REBOV]
uccaaggcucgaacaacu

SEQ ID NO: 3160545 - RNA, 17 nt, Reston Ebola virus [REBOV]
ugcuaauagguuuguau

SEQ ID NO: 3160546 - RNA, 14 nt, Reston Ebola virus [REBOV]
ccgaugacccagga

SEQ ID NO: 3160547 - RNA, 16 nt, Reston Ebola virus [REBOV]
cgcccagagcccacag

SEQ ID NO: 3160548 - RNA, 16 nt, Reston Ebola virus [REBOV]
aacuccgcccagagcc

SEQ ID NO: 3160549 - RNA, 19 nt, Reston Ebola virus [REBOV]
accaggaaccagcccagga

SEQ ID NO: 3160550 - RNA, 12 nt, Reston Ebola virus [REBOV]
aucuuuaaauaa

SEQ ID NO: 3160551 - RNA, 13 nt, Reston Ebola virus [REBOV]
aacuacccaggcu

SEQ ID NO: 3160552 - RNA, 17 nt, Reston Ebola virus [REBOV]
gcucuauagucuauucu

SEQ ID NO: 3160553 - RNA, 18 nt, Reston Ebola virus [REBOV]
agcgcagccggaccaagu

SEQ ID NO: 3160554 - RNA, 21 nt, Reston Ebola virus [REBOV]
auaugaccucaagucaaaaau

SEQ ID NO: 3160555 - RNA, 16 nt, Reston Ebola virus [REBOV]
cccgaugacccaggac

SEQ ID NO: 3160556 - RNA, 13 nt, Reston Ebola virus [REBOV]
uauuaguaauuga

SEQ ID NO: 3160557 - RNA, 20 nt, Reston Ebola virus [REBOV]
agagacggccaacagcagca

SEQ ID NO: 3160558 - RNA, 20 nt, Reston Ebola virus [REBOV]
agaguguaugaauugugcag

SEQ ID NO: 3160559 - RNA, 17 nt, Reston Ebola virus [REBOV]
aagaccacgccagcacc

SEQ ID NO: 3160560 - RNA, 15 nt, Reston Ebola virus [REBOV]
cuuugcuuauauugg

SEQ ID NO: 3160561 - RNA, 13 nt, Reston Ebola virus [REBOV]
gagcuucuacuau

SEQ ID NO: 3160562 - RNA, 17 nt, Reston Ebola virus [REBOV]
aauugggauuauuggag

SEQ ID NO: 3160563 - RNA, 20 nt, Reston Ebola virus [REBOV]
gguguaaugcauaaucagaa

SEQ ID NO: 3160564 - RNA, 16 nt, Reston Ebola virus [REBOV]
gagagacaaucacagg

SEQ ID NO: 3160565 - RNA, 15 nt, Reston Ebola virus [REBOV]
gcagcaaaccaggaa

SEQ ID NO: 3160566 - RNA, 18 nt, Reston Ebola virus [REBOV]
caaugacucguuaacaau

SEQ ID NO: 3160567 - RNA, 18 nt, Reston Ebola virus [REBOV]
cuauuauucugcuaguaa

SEQ ID NO: 3160568 - RNA, 14 nt, Reston Ebola virus [REBOV]
auugcauugagcac

SEQ ID NO: 3160569 - RNA, 11 nt, Reston Ebola virus [REBOV]
acuugaaugcu

SEQ ID NO: 3160570 - RNA, 15 nt, Reston Ebola virus [REBOV]
uuaagaucaaaugca

SEQ ID NO: 3160571 - RNA, 14 nt, Reston Ebola virus [REBOV]
acaaucacagguuu

SEQ ID NO: 3160572 - RNA, 20 nt, Reston Ebola virus [REBOV]
uauuugaauaugacaacauc

SEQ ID NO: 3160573 - RNA, 15 nt, Reston Ebola virus [REBOV]
auuuauuuaacaagg

SEQ ID NO: 3160574 - RNA, 14 nt, Reston Ebola virus [REBOV]
agcauccauugaag

SEQ ID NO: 3160575 - RNA, 19 nt, Reston Ebola virus [REBOV]
cccacagaccaagaccacg

SEQ ID NO: 3160576 - RNA, 21 nt, Reston Ebola virus [REBOV]
agcuauuauucugcuaguaau

SEQ ID NO: 3160577 - RNA, 13 nt, Reston Ebola virus [REBOV]
ggccacaacagaa

SEQ ID NO: 3160578 - RNA, 15 nt, Reston Ebola virus [REBOV]
cagccggaccaaguc

SEQ ID NO: 3160579 - RNA, 16 nt, Reston Ebola virus [REBOV]
cuaaucuauuuucgcu

SEQ ID NO: 3160580 - RNA, 16 nt, Reston Ebola virus [REBOV]
accaagucagcccgga

SEQ ID NO: 3160581 - RNA, 22 nt, Reston Ebola virus [REBOV]
aggaccaucuuguugcauugag

SEQ ID NO: 3160582 - RNA, 22 nt, Reston Ebola virus [REBOV]
uuaagcgcacacaaaaacauua

SEQ ID NO: 3160583 - RNA, 18 nt, Reston Ebola virus [REBOV]
ccugcagcagaaggcauc

SEQ ID NO: 3160584 - RNA, 17 nt, Reston Ebola virus [REBOV]
aaguacaugaaugagaa

SEQ ID NO: 3160585 - RNA, 13 nt, Reston Ebola virus [REBOV]
accaggaaccagc

SEQ ID NO: 3160586 - RNA, 17 nt, Reston Ebola virus [REBOV]
acaauccccuaccagac

SEQ ID NO: 3160587 - RNA, 14 nt, Reston Ebola virus [REBOV]
auugaagacucccc

SEQ ID NO: 3160588 - RNA, 20 nt, Reston Ebola virus [REBOV]
uuuuuacauguguauauaac

SEQ ID NO: 3160589 - RNA, 16 nt, Reston Ebola virus [REBOV]
aacccaaugacaacca

SEQ ID NO: 3160590 - RNA, 13 nt, Reston Ebola virus [REBOV]
auuaagaguuuaa

SEQ ID NO: 3160591 - RNA, 15 nt, Reston Ebola virus [REBOV]
gcacaagauguuaug

SEQ ID NO: 3160592 - RNA, 19 nt, Reston Ebola virus [REBOV]
aacagcagcaaaccaggaa

SEQ ID NO: 3160593 - RNA, 14 nt, Reston Ebola virus [REBOV]
aaucuaacacugaa

SEQ ID NO: 3160594 - RNA, 16 nt, Reston Ebola virus [REBOV]
auuuauuagaauguac

SEQ ID NO: 3160595 - RNA, 22 nt, Reston Ebola virus [REBOV]
agguggucuuuuugaaauggag

SEQ ID NO: 3160596 - RNA, 17 nt, Reston Ebola virus [REBOV]
acggagaugaucuuaau

SEQ ID NO: 3160597 - RNA, 18 nt, Reston Ebola virus [REBOV]
auuggaguaaaaguauaa

SEQ ID NO: 3160598 - RNA, 16 nt, Reston Ebola virus [REBOV]
aacaaugccuaacuau

SEQ ID NO: 3160599 - RNA, 17 nt, Reston Ebola virus [REBOV]
caggacccgcaagagac

SEQ ID NO: 3160600 - RNA, 17 nt, Reston Ebola virus [REBOV]
auccccgaugacccagg

SEQ ID NO: 3160601 - RNA, 21 nt, Reston Ebola virus [REBOV]
cacugagucccaccaggaaac

SEQ ID NO: 3160602 - RNA, 13 nt, Reston Ebola virus [REBOV]
auuugaacauagu

SEQ ID NO: 3160603 - RNA, 24 nt, Reston Ebola virus [REBOV]
aaucgcuaguaauuuuaaucucca

SEQ ID NO: 3160604 - RNA, 18 nt, Reston Ebola virus [REBOV]
uuauuuuuaaaauuuacu

SEQ ID NO: 3160605 - RNA, 21 nt, Reston Ebola virus [REBOV]
acaacuccgcccagagcccac

SEQ ID NO: 3160606 - RNA, 13 nt, Reston Ebola virus [REBOV]
uuuuaaucuaauu

SEQ ID NO: 3160607 - RNA, 20 nt, Reston Ebola virus [REBOV]
gcuucauagguggucuuuuu

SEQ ID NO: 3160608 - RNA, 12 nt, Reston Ebola virus [REBOV]
ucugcuucuuug

SEQ ID NO: 3160609 - RNA, 15 nt, Reston Ebola virus [REBOV]
ugaugaaauuaacca

SEQ ID NO: 3160610 - RNA, 19 nt, Reston Ebola virus [REBOV]
gagcccacagaccaagacc

SEQ ID NO: 3160611 - RNA, 20 nt, Reston Ebola virus [REBOV]
gaucuuaaucuauggacagg

SEQ ID NO: 3160612 - RNA, 17 nt, Reston Ebola virus [REBOV]
uagaguauacucaaaau

SEQ ID NO: 3160613 - RNA, 14 nt, Reston Ebola virus [REBOV]
auucugcuaguaau

SEQ ID NO: 3160614 - RNA, 13 nt, Reston Ebola virus [REBOV]
uaaauaauacuuu

SEQ ID NO: 3160615 - RNA, 14 nt, Reston Ebola virus [REBOV]
cgaugacccaggac

SEQ ID NO: 3160616 - RNA, 17 nt, Reston Ebola virus [REBOV]
uugugggucuuaucuag

SEQ ID NO: 3160617 - RNA, 21 nt, Reston Ebola virus [REBOV]
uaagauuuuguguugauuuau

SEQ ID NO: 3160618 - RNA, 22 nt, Reston Ebola virus [REBOV]
auucacugagucccaccaggaa

SEQ ID NO: 3160619 - RNA, 21 nt, Reston Ebola virus [REBOV]
caugauuuuaugauaauucuu

SEQ ID NO: 3160620 - RNA, 13 nt, Reston Ebola virus [REBOV]
ccuuaugcuucau

SEQ ID NO: 3160621 - RNA, 16 nt, Reston Ebola virus [REBOV]
gaugacccaggacccg

SEQ ID NO: 3160622 - RNA, 15 nt, Reston Ebola virus [REBOV]
cuuugcuugauuuac

SEQ ID NO: 3160623 - RNA, 20 nt, Reston Ebola virus [REBOV]
cuugaguaauaaucauuucu

SEQ ID NO: 3160624 - RNA, 22 nt, Reston Ebola virus [REBOV]
caauagcaaaguuaaauucucc

SEQ ID NO: 3160625 - RNA, 22 nt, Reston Ebola virus [REBOV]
cagaacugaggacuuacucacu

SEQ ID NO: 3160626 - RNA, 16 nt, Reston Ebola virus [REBOV]
augugaucuaauagau

SEQ ID NO: 3160627 - RNA, 14 nt, Reston Ebola virus [REBOV]
auacuguuaagaga

SEQ ID NO: 3160628 - RNA, 14 nt, Reston Ebola virus [REBOV]
ucugauuguggauu

SEQ ID NO: 3160629 - RNA, 22 nt, Human
gaaccaccacacccagcccacu

SEQ ID NO: 3160630 - RNA, 21 nt, Human
gaaccaccacacccagcccac

SEQ ID NO: 3160631 - RNA, 20 nt, Human
gaaccaccacacccagccca

SEQ ID NO: 3160632 - RNA, 18 nt, Human
gaaccaccacacccagcc

SEQ ID NO: 3160633 - RNA, 14 nt, Human
gaacugagcuugga

SEQ ID NO: 3160634 - RNA, 19 nt, Human
gaacucuucucauuacuug

SEQ ID NO: 3160635 - RNA, 15 nt, Human
gaacucuugacagcu

SEQ ID NO: 3160636 - RNA, 22 nt, Human
gaacugaaaggcuuuucaacca

SEQ ID NO: 3160637 - RNA, 22 nt, Human
gaacugagcuuggaagcuucug

SEQ ID NO: 3160638 - RNA, 21 nt, Human
gaacugagcuuggaagcuucu

SEQ ID NO: 3160639 - RNA, 16 nt, Human
gaacugagcuuggaag

SEQ ID NO: 3160640 - RNA, 15 nt, Human
gaacugagcuuggaa

SEQ ID NO: 3160641 - RNA, 17 nt, Human
gaacccgggaggcagag

SEQ ID NO: 3160642 - RNA, 13 nt, Human
gaacuccuggccu

SEQ ID NO: 3160643 - RNA, 14 nt, Human
gaacuccugaccuc

SEQ ID NO: 3160644 - RNA, 14 nt, Human
gaacuccuggccuc

SEQ ID NO: 3160645 - RNA, 14 nt, Human
gaacucuucucauu

SEQ ID NO: 3160646 - RNA, 17 nt, Human
gaacucuucucauuacu

SEQ ID NO: 3160647 - RNA, 22 nt, Human
gaacucuuccuccaaggacaga

SEQ ID NO: 3160648 - RNA, 12 nt, Human
gaacucuuccuc

SEQ ID NO: 3160649 - RNA, 22 nt, Human
gaaccccuggcuccaggccagg

SEQ ID NO: 3160650 - RNA, 18 nt, Human
gaaccccuggcuccaggc

SEQ ID NO: 3160651 - RNA, 20 nt, Human
gaacccauggaaaaaugcca

SEQ ID NO: 3160652 - RNA, 17 nt, Human
gaacccaaguccaagca

SEQ ID NO: 3160653 - RNA, 16 nt, Human
gaacccaaguccaagc

SEQ ID NO: 3160654 - RNA, 22 nt, Human
gaaccauaguugacaguuccaa

SEQ ID NO: 3160655 - RNA, 20 nt, Human
gaaccauaguuacuguaaaa

SEQ ID NO: 3160656 - RNA, 23 nt, Human
gaaccauaguuacuguaaaaugc

SEQ ID NO: 3160657 - RNA, 21 nt, Human
gaaccauaguuacuguaaaau

SEQ ID NO: 3160658 - RNA, 18 nt, Human
gaaccauaaaauguccag

SEQ ID NO: 3160659 - RNA, 19 nt, Human
gaaccauaaaauguccagu

SEQ ID NO: 3160660 - RNA, 14 nt, Human
gaaccauaaaaugu

SEQ ID NO: 3160661 - RNA, 23 nt, Human
gaaccaccacacccagcccacuu

SEQ ID NO: 3160662 - RNA, 13 nt, Human
gaaccacuuguag

SEQ ID NO: 3160663 - RNA, 14 nt, Human
gaaccacuuguaga

SEQ ID NO: 3160664 - RNA, 13 nt, Human
gaaccaccuaccc

SEQ ID NO: 3160665 - RNA, 14 nt, Human
gaaccaccuacccc

SEQ ID NO: 3160666 - RNA, 20 nt, Human
gaaccacuuguagauuugau

SEQ ID NO: 3160667 - RNA, 15 nt, Human
gaaccacuuguagau

SEQ ID NO: 3160668 - RNA, 18 nt, Human
gaaccacuuguagauuug

SEQ ID NO: 3160669 - RNA, 16 nt, Human
gaagacucauucuucu

SEQ ID NO: 3160670 - RNA, 18 nt, Human
gaagacucauucuucugu

SEQ ID NO: 3160671 - RNA, 17 nt, Human
gaagacucauucuucug

SEQ ID NO: 3160672 - RNA, 22 nt, Human
gaagcacaugccucucucaggc

SEQ ID NO: 3160673 - RNA, 14 nt, Human
gaagcacagcuuca

SEQ ID NO: 3160674 - RNA, 13 nt, Human
gaagcacagcuuc

SEQ ID NO: 3160675 - RNA, 16 nt, Human
gaagcaccauaacuuu

SEQ ID NO: 3160676 - RNA, 21 nt, Human
gaagcacaugccucucucagg

SEQ ID NO: 3160677 - RNA, 23 nt, Human
gaagcacaccaaucuuacuuugu

SEQ ID NO: 3160678 - RNA, 17 nt, Human
gaagcaggguuucuuuu

SEQ ID NO: 3160679 - RNA, 19 nt, Human
gaagcaggugugagggcag

SEQ ID NO: 3160680 - RNA, 16 nt, Human
gaagcagguuaaaugu

SEQ ID NO: 3160681 - RNA, 15 nt, Human
gaagcagguuaaaug

SEQ ID NO: 3160682 - RNA, 13 nt, Human
gaagcaguauuuu

SEQ ID NO: 3160683 - RNA, 19 nt, Human
gaagcagguuaaauguuuu

SEQ ID NO: 3160684 - RNA, 18 nt, Human
gaagcagguuaaauguuu

SEQ ID NO: 3160685 - RNA, 17 nt, Human
gaagcagguuaaauguu

SEQ ID NO: 3160686 - RNA, 14 nt, Human
gaagacagcucuua

SEQ ID NO: 3160687 - RNA, 15 nt, Human
gaagacagcucuuau

SEQ ID NO: 3160688 - RNA, 18 nt, Human
gaagaccuaaccagggcc

SEQ ID NO: 3160689 - RNA, 13 nt, Human
gaagaccuaacca

SEQ ID NO: 3160690 - RNA, 23 nt, Human
gaagaccuaaccagggccagaag

SEQ ID NO: 3160691 - RNA, 20 nt, Human
gaagaccuaaccagggccag

SEQ ID NO: 3160692 - RNA, 13 nt, Human
gaagacagagcua

SEQ ID NO: 3160693 - RNA, 15 nt, Human
gaagacagagcuaca

SEQ ID NO: 3160694 - RNA, 12 nt, Human
gaagacagcucu

SEQ ID NO: 3160695 - RNA, 13 nt, Human
gaagacagcucuu

SEQ ID NO: 3160696 - RNA, 21 nt, Human
gaagacacugaugggcaaccc

SEQ ID NO: 3160697 - RNA, 16 nt, Human
gaagacacugaugggc

SEQ ID NO: 3160698 - RNA, 17 nt, Human
gaacugcagucacugca

SEQ ID NO: 3160699 - RNA, 22 nt, Human
gaaaaaaccguguuugucucuu

SEQ ID NO: 3160700 - RNA, 16 nt, Human
gaaaaaagagaaaaga

SEQ ID NO: 3160701 - RNA, 10 nt, Human
gaaaaaagag

SEQ ID NO: 3160702 - RNA, 22 nt, Human
gaaaaaaaugucaaaaguagaa

SEQ ID NO: 3160703 - RNA, 23 nt, Human
gaaaagaaaaaugagccuggcaa

SEQ ID NO: 3160704 - RNA, 15 nt, Human
gaaaagaaaacaaaa

SEQ ID NO: 3160705 - RNA, 16 nt, Human
gaaaagaaaacaaaaa

SEQ ID NO: 3160706 - RNA, 18 nt, Human
gaaaaaagagaaaagaaa

SEQ ID NO: 3160707 - RNA, 17 nt, Human
gaaaaaagagaaaagaa

SEQ ID NO: 3160708 - RNA, 16 nt, Human
gaaaaaauaauuauuu

SEQ ID NO: 3160709 - RNA, 23 nt, Human
gaaaaaaguuguaggcgaaucau

SEQ ID NO: 3160710 - RNA, 22 nt, Human
gaaaaaaguuguaggcgaauca

SEQ ID NO: 3160711 - RNA, 14 nt, Human
gaaaaaaguuguag

SEQ ID NO: 3160712 - RNA, 22 nt, Human
gaaaauuaggauuucaugauuu

SEQ ID NO: 3160713 - RNA, 15 nt, Human
gaaaauguucuucca

SEQ ID NO: 3160714 - RNA, 21 nt, Human
gaaaagauguagauuuauuuc

SEQ ID NO: 3160715 - RNA, 19 nt, Human
gaaaagauguagauuuauu

SEQ ID NO: 3160716 - RNA, 18 nt, Human
gaaaagauguagauuuau

SEQ ID NO: 3160717 - RNA, 17 nt, Human
gaaaagauguagauuua

SEQ ID NO: 3160718 - RNA, 14 nt, Human
gaaaagauguagau

SEQ ID NO: 3160719 - RNA, 12 nt, Human
gaaaaugugugu

SEQ ID NO: 3160720 - RNA, 15 nt, Human
gaaaaugugugugug

SEQ ID NO: 3160721 - RNA, 14 nt, Human
gaaaauguguguuu

SEQ ID NO: 3160722 - RNA, 15 nt, Human
gaaaauguguguuuu

SEQ ID NO: 3160723 - RNA, 22 nt, Human
gaaaagaaaucuaugauuccag

SEQ ID NO: 3160724 - RNA, 15 nt, Human
gaaaagaaggaaaga

SEQ ID NO: 3160725 - RNA, 15 nt, Human
gaaaagaaguagugu

SEQ ID NO: 3160726 - RNA, 24 nt, Human
gaaaagaaaucuauagaaaguguu

SEQ ID NO: 3160727 - RNA, 23 nt, Human
gaaaagaaaucuauagaaagugu

SEQ ID NO: 3160728 - RNA, 22 nt, Human
gaaaagaaaucuauagaaagug

SEQ ID NO: 3160729 - RNA, 21 nt, Human
gaaaagaaaucuauagaaagu

SEQ ID NO: 3160730 - RNA, 22 nt, Human
gaaaagaaacucuauggucuua

SEQ ID NO: 3160731 - RNA, 14 nt, Human
gaaaagaaacucua

SEQ ID NO: 3160732 - RNA, 13 nt, Human
gaaaagaaaucua

SEQ ID NO: 3160733 - RNA, 14 nt, Human
gaaaagacuccaaa

SEQ ID NO: 3160734 - RNA, 17 nt, Human
gaaaagacuaagaucgg

SEQ ID NO: 3160735 - RNA, 14 nt, Human
gaaaagaauagaag

SEQ ID NO: 3160736 - RNA, 11 nt, Human
gaaaagaauuu

SEQ ID NO: 3160737 - RNA, 14 nt, Human
gaaaagaauuuuuu

SEQ ID NO: 3160738 - RNA, 17 nt, Human
gaaaagacuccaaagaa

SEQ ID NO: 3160739 - RNA, 16 nt, Human
gaaaagacuccaaaga

SEQ ID NO: 3160740 - RNA, 19 nt, Human
gaaaagauaaagaccagaa

SEQ ID NO: 3160741 - RNA, 20 nt, Human
gaaaagauaaagaccagaaa

SEQ ID NO: 3160742 - RNA, 22 nt, Human
gaaaagauaaagaccagaaauu

SEQ ID NO: 3160743 - RNA, 24 nt, Human
gaaacaaagcauuugacuuucugu

SEQ ID NO: 3160744 - RNA, 16 nt, Human
gaaacaacauuuauau

SEQ ID NO: 3160745 - RNA, 18 nt, Human
gaaacaacauuuauaugu

SEQ ID NO: 3160746 - RNA, 20 nt, Human
gaacaaguugagcuaugacu

SEQ ID NO: 3160747 - RNA, 21 nt, Human
gaacaaguugagcuaugacuu

SEQ ID NO: 3160748 - RNA, 22 nt, Human
gaacaaguugagcuaugacuua

SEQ ID NO: 3160749 - RNA, 22 nt, Human
gaacaagucccuguaauuguug

SEQ ID NO: 3160750 - RNA, 13 nt, Human
gaacaaaucuucc

SEQ ID NO: 3160751 - RNA, 16 nt, Human
gaacaaagaccaauuu

SEQ ID NO: 3160752 - RNA, 14 nt, Human
gaacaaaucuuccu

SEQ ID NO: 3160753 - RNA, 17 nt, Human
gaacacauaauucagga

SEQ ID NO: 3160754 - RNA, 20 nt, Human
gaacacauaauucaggaagc

SEQ ID NO: 3160755 - RNA, 23 nt, Human
gaacacauuucuuuuuaaaaaaa

SEQ ID NO: 3160756 - RNA, 22 nt, Human
gaacacauuucuuuuuaaaaaa

SEQ ID NO: 3160757 - RNA, 18 nt, Human
gaaaucuaugauuccagg

SEQ ID NO: 3160758 - RNA, 14 nt, Human
gaaaucuauagaaa

SEQ ID NO: 3160759 - RNA, 20 nt, Human
gaaaucuaugauuccaggug

SEQ ID NO: 3160760 - RNA, 23 nt, Human
gaaaucuauagaaaguguucugu

SEQ ID NO: 3160761 - RNA, 19 nt, Human
gaaaucuauagaaaguguu

SEQ ID NO: 3160762 - RNA, 17 nt, Human
gaaaggggauuacaguu

SEQ ID NO: 3160763 - RNA, 14 nt, Human
gaaauccugguucc

SEQ ID NO: 3160764 - RNA, 15 nt, Human
gaaauccugguuccu

SEQ ID NO: 3160765 - RNA, 16 nt, Human
gaaagggcccagagag

SEQ ID NO: 3160766 - RNA, 15 nt, Human
gaaagggcccagaga

SEQ ID NO: 3160767 - RNA, 23 nt, Human
gaaaucugaggaauggacauuuc

SEQ ID NO: 3160768 - RNA, 15 nt, Human
gaaaucucuuugccc

SEQ ID NO: 3160769 - RNA, 14 nt, Human
gaaaucugaacauu

SEQ ID NO: 3160770 - RNA, 14 nt, Human
gaacaaaauuauuu

SEQ ID NO: 3160771 - RNA, 16 nt, Human
gaacaaaauaaauugg

SEQ ID NO: 3160772 - RNA, 15 nt, Human
gaacaaaauaaauug

SEQ ID NO: 3160773 - RNA, 14 nt, Human
gaacaaaauaaauu

SEQ ID NO: 3160774 - RNA, 13 nt, Human
gaaagggcccaga

SEQ ID NO: 3160775 - RNA, 12 nt, Human
gaaaggcuccag

SEQ ID NO: 3160776 - RNA, 20 nt, Human
gaaagaacgcugauuuaaag

SEQ ID NO: 3160777 - RNA, 14 nt, Human
gaaaggcuccagga

SEQ ID NO: 3160778 - RNA, 15 nt, Human
gaaaggcuccaggag

SEQ ID NO: 3160779 - RNA, 13 nt, Human
gaaaggcuccagg

SEQ ID NO: 3160780 - RNA, 15 nt, Human
gaaagaaagaggaaa

SEQ ID NO: 3160781 - RNA, 13 nt, Human
gaaagaaagagga

SEQ ID NO: 3160782 - RNA, 18 nt, Human
gaaagaaaaucaggcugg

SEQ ID NO: 3160783 - RNA, 22 nt, Human
gaaacuggaaauacuagauuug

SEQ ID NO: 3160784 - RNA, 22 nt, Human
cuuggggucagguugacaggag

SEQ ID NO: 3160785 - RNA, 13 nt, Human
cuuggggucaggu

SEQ ID NO: 3160786 - RNA, 17 nt, Human
cuuggucacagccaggc

SEQ ID NO: 3160787 - RNA, 19 nt, Human
cuuggucugugagaugcua

SEQ ID NO: 3160788 - RNA, 16 nt, Human
cuuggucugugagaug

SEQ ID NO: 3160789 - RNA, 14 nt, Human
cuugguccugcugc

SEQ ID NO: 3160790 - RNA, 22 nt, Human
cuugguagaagcccuucuaccu

SEQ ID NO: 3160791 - RNA, 16 nt, Human
cuuggucacagccagg

SEQ ID NO: 3160792 - RNA, 16 nt, Human
cuugguauuuggauau

SEQ ID NO: 3160793 - RNA, 21 nt, Human
cuugguauuuggauaucuguu

SEQ ID NO: 3160794 - RNA, 18 nt, Human
cuugugaaaauaauugac

SEQ ID NO: 3160795 - RNA, 18 nt, Human
cuugucuuuggacccuga

SEQ ID NO: 3160796 - RNA, 13 nt, Human
cuugucuuuggac

SEQ ID NO: 3160797 - RNA, 15 nt, Human
cuugucuuuggaccc

SEQ ID NO: 3160798 - RNA, 21 nt, Human
cuugugaaaauaauugacagg

SEQ ID NO: 3160799 - RNA, 16 nt, Human
cuugucuuucuggggu

SEQ ID NO: 3160800 - RNA, 15 nt, Human
cuugucuuucugggg

SEQ ID NO: 3160801 - RNA, 16 nt, Human
cuugucggcuccaguc

SEQ ID NO: 3160802 - RNA, 14 nt, Human
cuugucggcuccag

SEQ ID NO: 3160803 - RNA, 19 nt, Human
cuuggugucgggcaugaca

SEQ ID NO: 3160804 - RNA, 18 nt, Human
cuuggugcuuauugauau

SEQ ID NO: 3160805 - RNA, 17 nt, Human
cuuggugccucugcagu

SEQ ID NO: 3160806 - RNA, 19 nt, Human
cuuggugccuaauguucca

SEQ ID NO: 3160807 - RNA, 15 nt, Human
cuuucacuauaaugu

SEQ ID NO: 3160808 - RNA, 20 nt, Human
cuuucacuauaaugugaaau

SEQ ID NO: 3160809 - RNA, 20 nt, Human
cuuucacccuuuucuguuug

SEQ ID NO: 3160810 - RNA, 14 nt, Human
cuuucacccuuuuc

SEQ ID NO: 3160811 - RNA, 15 nt, Human
cuuucacccuuuucu

SEQ ID NO: 3160812 - RNA, 14 nt, Human
cuuuaccaugcuca

SEQ ID NO: 3160813 - RNA, 23 nt, Human
cuuuaaugucacaggcaggucca

SEQ ID NO: 3160814 - RNA, 22 nt, Human
cuuuaauuaaaaccugggauua

SEQ ID NO: 3160815 - RNA, 23 nt, Human
cuuuaauuccaugaauguuccug

SEQ ID NO: 3160816 - RNA, 16 nt, Human
cuuuaauuccaugaau

SEQ ID NO: 3160817 - RNA, 15 nt, Human
cuuuaauuccaugaa

SEQ ID NO: 3160818 - RNA, 18 nt, Human
cuuuacauacuuuaucaa

SEQ ID NO: 3160819 - RNA, 15 nt, Human
cuuucagcaggcagc

SEQ ID NO: 3160820 - RNA, 14 nt, Human
cuuucagcaggcag

SEQ ID NO: 3160821 - RNA, 18 nt, Human
cuuucagcaggcagccuu

SEQ ID NO: 3160822 - RNA, 16 nt, Human
cuuucagcaggcagcc

SEQ ID NO: 3160823 - RNA, 14 nt, Human
cuuugaccuguugg

SEQ ID NO: 3160824 - RNA, 16 nt, Human
cuuugacgccauccca

SEQ ID NO: 3160825 - RNA, 17 nt, Human
cuuugacgccaucccag

SEQ ID NO: 3160826 - RNA, 19 nt, Human
cuuugacucuauaagcaaa

SEQ ID NO: 3160827 - RNA, 20 nt, Human
cuuugacucuauaagcaaau

SEQ ID NO: 3160828 - RNA, 16 nt, Human
cuuucuacccagcgag

SEQ ID NO: 3160829 - RNA, 15 nt, Human
cuuucuacccagcga

SEQ ID NO: 3160830 - RNA, 17 nt, Human
cuuucuaaugugugaau

SEQ ID NO: 3160831 - RNA, 21 nt, Human
cuuugguucuggguuguuucc

SEQ ID NO: 3160832 - RNA, 20 nt, Human
cuuuguacacccaugaaaga

SEQ ID NO: 3160833 - RNA, 22 nt, Human
cuuuguacacccaugaaagaaa

SEQ ID NO: 3160834 - RNA, 12 nt, Human
cuuuguaugcac

SEQ ID NO: 3160835 - RNA, 16 nt, Human
cuuugcaaaggagcuc

SEQ ID NO: 3160836 - RNA, 15 nt, Human
cuuugcaaaggagcu

SEQ ID NO: 3160837 - RNA, 16 nt, Human
cuuuguauucugucuu

SEQ ID NO: 3160838 - RNA, 19 nt, Human
cuuuguauucugucuucau

SEQ ID NO: 3160839 - RNA, 20 nt, Human
cuugauuaagaucucagugg

SEQ ID NO: 3160840 - RNA, 13 nt, Human
cuugauuaaauca

SEQ ID NO: 3160841 - RNA, 14 nt, Human
cuugauuaaaucaa

SEQ ID NO: 3160842 - RNA, 15 nt, Human
cuugauuaaaucaac

SEQ ID NO: 3160843 - RNA, 15 nt, Human
cuugauguguuaucu

SEQ ID NO: 3160844 - RNA, 21 nt, Human
cuugaucaguaguuugcauuu

SEQ ID NO: 3160845 - RNA, 20 nt, Human
cuugaucaguaguuugcauu

SEQ ID NO: 3160846 - RNA, 22 nt, Human
cuugaucaguaguuugcauuuc

SEQ ID NO: 3160847 - RNA, 18 nt, Human
cuugauguguuaucucuu

SEQ ID NO: 3160848 - RNA, 22 nt, Human
cuugauauccucuuugagugaa

SEQ ID NO: 3160849 - RNA, 17 nt, Human
cuugauauccucuuuga

SEQ ID NO: 3160850 - RNA, 23 nt, Human
cuugauauuuguauuuauucuuu

SEQ ID NO: 3160851 - RNA, 18 nt, Human
cuugaucaguaguuugca

SEQ ID NO: 3160852 - RNA, 18 nt, Human
cuugauauuuguauuuau

SEQ ID NO: 3160853 - RNA, 16 nt, Human
cuugauauuuguauuu

SEQ ID NO: 3160854 - RNA, 14 nt, Human
cuugauauuuguau

SEQ ID NO: 3160855 - RNA, 13 nt, Human
cuugauauuugua

SEQ ID NO: 3160856 - RNA, 23 nt, Human
cuugaaugaugccaugaggaaca

SEQ ID NO: 3160857 - RNA, 23 nt, Human
cuugaauggcaauguuuugcuuu

SEQ ID NO: 3160858 - RNA, 21 nt, Human
cuugaauggcaauguuuugcu

SEQ ID NO: 3160859 - RNA, 16 nt, Human
cuugacaucaacugca

SEQ ID NO: 3160860 - RNA, 20 nt, Human
cuugacagggcacaccgggc

SEQ ID NO: 3160861 - RNA, 22 nt, Human
cuugcuaccacggccuccuuuc

SEQ ID NO: 3160862 - RNA, 17 nt, Human
cuugcaaaauuccugac

SEQ ID NO: 3160863 - RNA, 16 nt, Human
cuugauuugagauuuu

SEQ ID NO: 3160864 - RNA, 23 nt, Human
cuugauuuuccaucuaaaaauau

SEQ ID NO: 3160865 - RNA, 22 nt, Human
cuugauuuuccaucuaaaaaua

SEQ ID NO: 3160866 - RNA, 14 nt, Human
cuugauuuuccauc

SEQ ID NO: 3160867 - RNA, 13 nt, Human
cuugauuuuccau

SEQ ID NO: 3160868 - RNA, 16 nt, Human
cuugcaaaauuccuga

SEQ ID NO: 3160869 - RNA, 23 nt, Human
cuuggauuguccccgacccuugc

SEQ ID NO: 3160870 - RNA, 24 nt, Human
cuuggauuguccccgacccuugcc

SEQ ID NO: 3160871 - RNA, 22 nt, Human
cuuggauuguccccgacccuug

SEQ ID NO: 3160872 - RNA, 15 nt, Human
cuugcucccugacug

SEQ ID NO: 3160873 - RNA, 13 nt, Human
cuuggccucagag

SEQ ID NO: 3160874 - RNA, 17 nt, Human
cuugcucccugacuggg

SEQ ID NO: 3160875 - RNA, 21 nt, Human
cuuggcaauaaauuuugaaaa

SEQ ID NO: 3160876 - RNA, 20 nt, Human
cuuggccucacccucuggcu

SEQ ID NO: 3160877 - RNA, 20 nt, Human
cuuggcaauaaauuuugaaa

SEQ ID NO: 3160878 - RNA, 21 nt, Human
cuucucacauggaaugagggu

SEQ ID NO: 3160879 - RNA, 21 nt, Human
cuucuaaguaaaaccacagca

SEQ ID NO: 3160880 - RNA, 17 nt, Human
cuucuaaguaaaaccac

SEQ ID NO: 3160881 - RNA, 13 nt, Human
cuucuaaguaaaa

SEQ ID NO: 3160882 - RNA, 13 nt, Human
cuuccugagggga

SEQ ID NO: 3160883 - RNA, 22 nt, Human
cuuccugaggggagacagagca

SEQ ID NO: 3160884 - RNA, 21 nt, Human
cuuccugaggggagacagagc

SEQ ID NO: 3160885 - RNA, 21 nt, Human
cuuccucuuuccaucuacccu

SEQ ID NO: 3160886 - RNA, 16 nt, Human
cuuccucugaggcuga

SEQ ID NO: 3160887 - RNA, 22 nt, Human
cuuccucuuuccaucuacccuc

SEQ ID NO: 3160888 - RNA, 22 nt, Human
cuuccucugaggcugaaauuca

SEQ ID NO: 3160889 - RNA, 14 nt, Human
cuuccucuccacug

SEQ ID NO: 3160890 - RNA, 13 nt, Human
cuuccucuccacu

SEQ ID NO: 3160891 - RNA, 14 nt, Human
cuuccucugagccu

SEQ ID NO: 3160892 - RNA, 15 nt, Human
cuuccucugagccuu

SEQ ID NO: 3160893 - RNA, 13 nt, Human
cuuccuccuggug

SEQ ID NO: 3160894 - RNA, 23 nt, Human
cuucugaacuuggcgcugccccu

SEQ ID NO: 3160895 - RNA, 17 nt, Human
cuucucuuccaggcagc

SEQ ID NO: 3160896 - RNA, 16 nt, Human
cuucucuuccaggcag

SEQ ID NO: 3160897 - RNA, 19 nt, Human
cuucugacauaauccagua

SEQ ID NO: 3160898 - RNA, 13 nt, Human
cuucuucagagac

SEQ ID NO: 3160899 - RNA, 14 nt, Human
cuucuucagagacu

SEQ ID NO: 3160900 - RNA, 14 nt, Human
cugcuucaaauauu

SEQ ID NO: 3160901 - RNA, 20 nt, Human
cugcuucaaggauccugagc

SEQ ID NO: 3160902 - RNA, 20 nt, Human
cugcuuuugucuaugggacu

SEQ ID NO: 3160903 - RNA, 22 nt, Human
cugcuucaaggauccugagcca

SEQ ID NO: 3160904 - RNA, 23 nt, Human
cugcuucaaggauccugagccag

SEQ ID NO: 3160905 - RNA, 19 nt, Human
cugcuucaaauauuucccu

SEQ ID NO: 3160906 - RNA, 12 nt, Human
cugcuucaagga

SEQ ID NO: 3160907 - RNA, 21 nt, Human
cugcuucaaggauccugagcc

SEQ ID NO: 3160908 - RNA, 13 nt, Human
cuggacuuggagg

SEQ ID NO: 3160909 - RNA, 13 nt, Human
cuggagaaaaaua

SEQ ID NO: 3160910 - RNA, 14 nt, Human
cuggagaaaaauau

SEQ ID NO: 3160911 - RNA, 21 nt, Human
cugcuuuugucuaugggacuc

SEQ ID NO: 3160912 - RNA, 19 nt, Human
cugcuuuugucuaugggac

SEQ ID NO: 3160913 - RNA, 19 nt, Human
cuggaagagcuaggcaggg

SEQ ID NO: 3160914 - RNA, 17 nt, Human
cuggaagagcuaggcag

SEQ ID NO: 3160915 - RNA, 16 nt, Human
cuggaguuggggcaga

SEQ ID NO: 3160916 - RNA, 13 nt, Human
cuggauagugaag

SEQ ID NO: 3160917 - RNA, 16 nt, Human
cugccugguccucaca

SEQ ID NO: 3160918 - RNA, 23 nt, Human
cugccugguccucacacucaccc

SEQ ID NO: 3160919 - RNA, 19 nt, Human
cugccugguccucacacuc

SEQ ID NO: 3160920 - RNA, 17 nt, Human
cugccugguccucacac

SEQ ID NO: 3160921 - RNA, 20 nt, Human
cugccuguugggccaggagc

SEQ ID NO: 3160922 - RNA, 19 nt, Human
cugccuguucagcuccagc

SEQ ID NO: 3160923 - RNA, 18 nt, Human
cugccuguucagcuccag

SEQ ID NO: 3160924 - RNA, 17 nt, Human
cugccuguucagcucca

SEQ ID NO: 3160925 - RNA, 23 nt, Human
cugccucucccaucacuucccua

SEQ ID NO: 3160926 - RNA, 22 nt, Human
cugccucucccaucacuucccu

SEQ ID NO: 3160927 - RNA, 15 nt, Human
cugccucucccauca

SEQ ID NO: 3160928 - RNA, 15 nt, Human
cugccuccucuucaa

SEQ ID NO: 3160929 - RNA, 14 nt, Human
cugccuccucuuca

SEQ ID NO: 3160930 - RNA, 13 nt, Human
cugccuccucuuc

SEQ ID NO: 3160931 - RNA, 20 nt, Human
cugaucugaugcaagcaaga

SEQ ID NO: 3160932 - RNA, 14 nt, Human
cugaucuguuauag

SEQ ID NO: 3160933 - RNA, 13 nt, Human
cugaucuguuaua

SEQ ID NO: 3160934 - RNA, 15 nt, Human
cugccuguucagcuc

SEQ ID NO: 3160935 - RNA, 21 nt, Human
cugccuguugggccaggagcc

SEQ ID NO: 3160936 - RNA, 22 nt, Human
cugccuguugggccaggagccu

SEQ ID NO: 3160937 - RNA, 22 nt, Human
cugcuaguguucuuucucuuuc

SEQ ID NO: 3160938 - RNA, 18 nt, Human
cugcugacuguuuucucu

SEQ ID NO: 3160939 - RNA, 21 nt, Human
cugcugacuguuuucucuuga

SEQ ID NO: 3160940 - RNA, 20 nt, Human
cugggcaccggggccucgga

SEQ ID NO: 3160941 - RNA, 12 nt, Human
cugggcagaagg

SEQ ID NO: 3160942 - RNA, 17 nt, Human
cugggcacugcucucac

SEQ ID NO: 3160943 - RNA, 19 nt, Human
cugggcacugcucucaccu

SEQ ID NO: 3160944 - RNA, 18 nt, Human
cugggcacugcucucacc

SEQ ID NO: 3160945 - RNA, 15 nt, Human
cugggcagaaggaag

SEQ ID NO: 3160946 - RNA, 16 nt, Human
cuggggaugucucuca

SEQ ID NO: 3160947 - RNA, 19 nt, Human
cuggggcagccucugggcc

SEQ ID NO: 3160948 - RNA, 14 nt, Human
cuggggcagccucu

SEQ ID NO: 3160949 - RNA, 14 nt, Human
cuggggagaaagua

SEQ ID NO: 3160950 - RNA, 23 nt, Human
cuggggagaauggggcugggccc

SEQ ID NO: 3160951 - RNA, 20 nt, Human
cugggccaggggagguuaca

SEQ ID NO: 3160952 - RNA, 14 nt, Human
cugggccagaauuu

SEQ ID NO: 3160953 - RNA, 12 nt, Human
cugggccagaau

SEQ ID NO: 3160954 - RNA, 17 nt, Human
cuggggcauccaugggg

SEQ ID NO: 3160955 - RNA, 19 nt, Human
cuggggcauccaugggguc

SEQ ID NO: 3160956 - RNA, 15 nt, Human
cuggguucacugcaa

SEQ ID NO: 3160957 - RNA, 20 nt, Human
cuggguucacugcaaccucc

SEQ ID NO: 3160958 - RNA, 18 nt, Human
cuggguucacugcaaccu

SEQ ID NO: 3160959 - RNA, 23 nt, Human
cuggccccugagaucucugcagg

SEQ ID NO: 3160960 - RNA, 22 nt, Human
cuggccccugagaucucugcag

SEQ ID NO: 3160961 - RNA, 18 nt, Human
cuggccccugagaucucu

SEQ ID NO: 3160962 - RNA, 22 nt, Human
cuggccccucagggucccuggu

SEQ ID NO: 3160963 - RNA, 11 nt, Human
cuggcccugcc

SEQ ID NO: 3160964 - RNA, 13 nt, Human
cuggcccugcccu

SEQ ID NO: 3160965 - RNA, 14 nt, Human
cuggcccugcccug

SEQ ID NO: 3160966 - RNA, 21 nt, Human
cuggcccucucugaaggaggc

SEQ ID NO: 3160967 - RNA, 23 nt, Human
cuggcccucucugaaggaggcca

SEQ ID NO: 3160968 - RNA, 22 nt, Human
cuggcccucucugaaggaggcc

SEQ ID NO: 3160969 - RNA, 15 nt, Human
cuggcccugcccugg

SEQ ID NO: 3160970 - RNA, 16 nt, Human
cuggccgggagccuga

SEQ ID NO: 3160971 - RNA, 20 nt, Human
cuggccggugugggggcccc

SEQ ID NO: 3160972 - RNA, 18 nt, Human
cugggaauaagugccagg

SEQ ID NO: 3160973 - RNA, 14 nt, Human
cugggaauguauag

SEQ ID NO: 3160974 - RNA, 23 nt, Human
cugggaauguauaguauuugaaa

SEQ ID NO: 3160975 - RNA, 21 nt, Human
cugggaauguauaguauuuga

SEQ ID NO: 3160976 - RNA, 20 nt, Human
cugggaauguauaguauuug

SEQ ID NO: 3160977 - RNA, 19 nt, Human
cugggaauguauaguauuu

SEQ ID NO: 3160978 - RNA, 13 nt, Human
cugggacugggaa

SEQ ID NO: 3160979 - RNA, 17 nt, Human
cuggcagaguugaagac

SEQ ID NO: 3160980 - RNA, 18 nt, Human
cuggcagaguugaagaca

SEQ ID NO: 3160981 - RNA, 11 nt, Human
cuggcagccca

SEQ ID NO: 3160982 - RNA, 12 nt, Human
cuggcagccccu

SEQ ID NO: 3160983 - RNA, 14 nt, Human
cuggcagaggaggg

SEQ ID NO: 3160984 - RNA, 21 nt, Human
cuggcagcaccgccucuuccc

SEQ ID NO: 3160985 - RNA, 22 nt, Human
cuggcagccgugccuucagcuc

SEQ ID NO: 3160986 - RNA, 21 nt, Human
cuggcagccgugccuucagcu

SEQ ID NO: 3160987 - RNA, 20 nt, Human
cuggcagccgugccuucagc

SEQ ID NO: 3160988 - RNA, 19 nt, Human
cuggcagccgugccuucag

SEQ ID NO: 3160989 - RNA, 16 nt, Human
cugugccuuuugccau

SEQ ID NO: 3160990 - RNA, 18 nt, Human
cugugccucugggacugg

SEQ ID NO: 3160991 - RNA, 21 nt, Human
cugugcgcauaggccugcuuu

SEQ ID NO: 3160992 - RNA, 20 nt, Human
cugugcgcauaggccugcuu

SEQ ID NO: 3160993 - RNA, 20 nt, Human
cugugccuuuuuuauaucuu

SEQ ID NO: 3160994 - RNA, 12 nt, Human
cugugcugcccu

SEQ ID NO: 3160995 - RNA, 13 nt, Human
cugugcugcccug

SEQ ID NO: 3160996 - RNA, 14 nt, Human
cugugcugcccugc

SEQ ID NO: 3160997 - RNA, 17 nt, Human
cuguuagugcacugauu

SEQ ID NO: 3160998 - RNA, 15 nt, Human
cuguguccggcccag

SEQ ID NO: 3160999 - RNA, 15 nt, Human
cugugcugcccugcc

SEQ ID NO: 3161000 - RNA, 17 nt, Human
cugugcugcccugccca

SEQ ID NO: 3161001 - RNA, 18 nt, Human
cugugcugcccugcccac

SEQ ID NO: 3161002 - RNA, 19 nt, Human
cugugcugcccugcccacc

SEQ ID NO: 3161003 - RNA, 17 nt, Human
cugugucagcauagaag

SEQ ID NO: 3161004 - RNA, 19 nt, Human
cugugucagcauagaagua

SEQ ID NO: 3161005 - RNA, 16 nt, Human
cuguguauuuucaguc

SEQ ID NO: 3161006 - RNA, 19 nt, Human
cuggucuuugagcucccac

SEQ ID NO: 3161007 - RNA, 12 nt, Human
cuggucuuugag

SEQ ID NO: 3161008 - RNA, 18 nt, Human
cuggucuuugagcuccca

SEQ ID NO: 3161009 - RNA, 13 nt, Human
cugguuuccugcc

SEQ ID NO: 3161010 - RNA, 14 nt, Human
cugguuuccugccc

SEQ ID NO: 3161011 - RNA, 15 nt, Human
cuguaacgugugcug

SEQ ID NO: 3161012 - RNA, 16 nt, Human
cuguaacgugugcugu

SEQ ID NO: 3161013 - RNA, 12 nt, Human
cuguaacugucc

SEQ ID NO: 3161014 - RNA, 17 nt, Human
cuguaacuguuacagua

SEQ ID NO: 3161015 - RNA, 18 nt, Human
cuguaacaguucuuuuug

SEQ ID NO: 3161016 - RNA, 14 nt, Human
cuguaacaguucuu

SEQ ID NO: 3161017 - RNA, 14 nt, Human
cuguagaaucaauu

SEQ ID NO: 3161018 - RNA, 16 nt, Human
cuguagaaucaauuua

SEQ ID NO: 3161019 - RNA, 14 nt, Human
cuguagacaucugu

SEQ ID NO: 3161020 - RNA, 15 nt, Human
cuguagacaucuguc

SEQ ID NO: 3161021 - RNA, 17 nt, Human
cuguagacaucuguccu

SEQ ID NO: 3161022 - RNA, 13 nt, Human
cuguagaguggga

SEQ ID NO: 3161023 - RNA, 16 nt, Human
cugucgcccagucugg

SEQ ID NO: 3161024 - RNA, 15 nt, Human
cugucgcccagucug

SEQ ID NO: 3161025 - RNA, 14 nt, Human
cuguccuguaacug

SEQ ID NO: 3161026 - RNA, 17 nt, Human
cuguccuguaacuguua

SEQ ID NO: 3161027 - RNA, 15 nt, Human
cugucaucugagaau

SEQ ID NO: 3161028 - RNA, 17 nt, Human
cugucaucugagaauga

SEQ ID NO: 3161029 - RNA, 16 nt, Human
cugucaucugagaaug

SEQ ID NO: 3161030 - RNA, 19 nt, Human
cugucaucugagaaugaac

SEQ ID NO: 3161031 - RNA, 21 nt, Human
cuguccugggagugagcuggu

SEQ ID NO: 3161032 - RNA, 22 nt, Human
cugucaguuaugacauccacaa

SEQ ID NO: 3161033 - RNA, 23 nt, Human
cugucaauuacaggaaguacugg

SEQ ID NO: 3161034 - RNA, 19 nt, Human
cugucaauuacaggaagua

SEQ ID NO: 3161035 - RNA, 20 nt, Human
cugucaauuacaggaaguac

SEQ ID NO: 3161036 - RNA, 16 nt, Human
cuguuauuuucagcau

SEQ ID NO: 3161037 - RNA, 14 nt, Human
cuguuauucuuugc

SEQ ID NO: 3161038 - RNA, 16 nt, Human
cuguuauucuuugcac

SEQ ID NO: 3161039 - RNA, 15 nt, Human
cuguuauucuuugca

SEQ ID NO: 3161040 - RNA, 18 nt, Human
cuguuuaagacacuuccg

SEQ ID NO: 3161041 - RNA, 21 nt, Human
cuguuuaaauugcucacaguu

SEQ ID NO: 3161042 - RNA, 14 nt, Human
cuguuuaaauugcu

SEQ ID NO: 3161043 - RNA, 11 nt, Human
cuguuuaaauu

SEQ ID NO: 3161044 - RNA, 21 nt, Human
cuuaaaaaugguuuaaauggu

SEQ ID NO: 3161045 - RNA, 22 nt, Human
cuguuguauaaauuuauuuacu

SEQ ID NO: 3161046 - RNA, 22 nt, Human
cuguuggcugggggccucagug

SEQ ID NO: 3161047 - RNA, 19 nt, Human
cuguuggcugggggccuca

SEQ ID NO: 3161048 - RNA, 15 nt, Human
cuguuggccagugug

SEQ ID NO: 3161049 - RNA, 14 nt, Human
cuguuggcuggggg

SEQ ID NO: 3161050 - RNA, 20 nt, Human
cuuaaaguugguauuaauaa

SEQ ID NO: 3161051 - RNA, 22 nt, Human
cuuaaaguugguauuaauaaaa

SEQ ID NO: 3161052 - RNA, 19 nt, Human
cuuaaaacaucauuccuuu

SEQ ID NO: 3161053 - RNA, 20 nt, Human
cuuaaaacaucauuccuuuu

SEQ ID NO: 3161054 - RNA, 18 nt, Human
cuuacaaaugauugcuuu

SEQ ID NO: 3161055 - RNA, 16 nt, Human
cuuacaaaugauugcu

SEQ ID NO: 3161056 - RNA, 13 nt, Human
cuuaaaacaucau

SEQ ID NO: 3161057 - RNA, 15 nt, Human
cuuaaaaauuuauua

SEQ ID NO: 3161058 - RNA, 17 nt, Human
cuuaaaacaucauuccu

SEQ ID NO: 3161059 - RNA, 18 nt, Human
cuuaaaacaucauuccuu

SEQ ID NO: 3161060 - RNA, 14 nt, Human
cuuaaaacaacacu

SEQ ID NO: 3161061 - RNA, 15 nt, Human
cuuaccagcagagca

SEQ ID NO: 3161062 - RNA, 22 nt, Human
cuuacauuagcaguuugcuuug

SEQ ID NO: 3161063 - RNA, 21 nt, Human
cuuacauuagcaguuugcuuu

SEQ ID NO: 3161064 - RNA, 22 nt, Human
cuuacaaaugauugcuuuuaaa

SEQ ID NO: 3161065 - RNA, 21 nt, Human
cuuacaaaugauugcuuuuaa

SEQ ID NO: 3161066 - RNA, 20 nt, Human
cuuacaaaugauugcuuuua

SEQ ID NO: 3161067 - RNA, 15 nt, Human
cuuaggccagcacca

SEQ ID NO: 3161068 - RNA, 23 nt, Human
cuuaggcaauggugaacugucau

SEQ ID NO: 3161069 - RNA, 11 nt, Human
cuuagggucuc

SEQ ID NO: 3161070 - RNA, 13 nt, Human
cuuagggucucag

SEQ ID NO: 3161071 - RNA, 16 nt, Human
cuuagggucucagggu

SEQ ID NO: 3161072 - RNA, 17 nt, Human
cuuagggucucagggug

SEQ ID NO: 3161073 - RNA, 14 nt, Human
cuuagcuggagaug

SEQ ID NO: 3161074 - RNA, 13 nt, Human
cuuagcugggaga

SEQ ID NO: 3161075 - RNA, 14 nt, Human
cuuagccuuucuuu

SEQ ID NO: 3161076 - RNA, 16 nt, Human
cuuaccagcagagcac

SEQ ID NO: 3161077 - RNA, 21 nt, Human
cuuagcagggaaacagcuaau

SEQ ID NO: 3161078 - RNA, 12 nt, Human
gcaccuccugcc

SEQ ID NO: 3161079 - RNA, 21 nt, Human
gcaccuccucggcuggcuguc

SEQ ID NO: 3161080 - RNA, 20 nt, Human
gcaccuccucggcuggcugu

SEQ ID NO: 3161081 - RNA, 11 nt, Human
gcaccuccucg

SEQ ID NO: 3161082 - RNA, 20 nt, Human
gcacacaccagagcccaccu

SEQ ID NO: 3161083 - RNA, 23 nt, Human
gcacacagcacgggggccaagga

SEQ ID NO: 3161084 - RNA, 11 nt, Human
gcacacagcac

SEQ ID NO: 3161085 - RNA, 20 nt, Human
gcacacaucaucuguaagcu

SEQ ID NO: 3161086 - RNA, 17 nt, Human
gcacacaucaucuguaa

SEQ ID NO: 3161087 - RNA, 16 nt, Human
gcacacaucaucugua

SEQ ID NO: 3161088 - RNA, 15 nt, Human
gcacacaucaucugu

SEQ ID NO: 3161089 - RNA, 17 nt, Human
gcaccggcuggccuggc

SEQ ID NO: 3161090 - RNA, 15 nt, Human
gcaccggcuggccug

SEQ ID NO: 3161091 - RNA, 16 nt, Human
gcaccggcuggccugg

SEQ ID NO: 3161092 - RNA, 17 nt, Human
gcaccuaccaccacgcc

SEQ ID NO: 3161093 - RNA, 22 nt, Human
gcacuauagccuaggugacaga

SEQ ID NO: 3161094 - RNA, 22 nt, Human
gcacuauaauguaagcucuacu

SEQ ID NO: 3161095 - RNA, 17 nt, Human
gcacuccagccugggug

SEQ ID NO: 3161096 - RNA, 15 nt, Human
gcacuccagccuggg

SEQ ID NO: 3161097 - RNA, 21 nt, Human
gcacucaaaucuuaagaaaua

SEQ ID NO: 3161098 - RNA, 20 nt, Human
gcacucaaaucuuaagaaau

SEQ ID NO: 3161099 - RNA, 18 nt, Human
gcacuauauacaucacgu

SEQ ID NO: 3161100 - RNA, 15 nt, Human
gcacuauugagucuu

SEQ ID NO: 3161101 - RNA, 18 nt, Human
gcacucaaaucuuaagaa

SEQ ID NO: 3161102 - RNA, 18 nt, Human
gcaaccuccgccucuugg

SEQ ID NO: 3161103 - RNA, 22 nt, Human
gcaacccuggugaccagcacca

SEQ ID NO: 3161104 - RNA, 15 nt, Human
gcaaaagaugcuucu

SEQ ID NO: 3161105 - RNA, 21 nt, Human
gcaaaaccagguuuuguuccg

SEQ ID NO: 3161106 - RNA, 19 nt, Human
gcaaaacacaaaacaaauc

SEQ ID NO: 3161107 - RNA, 18 nt, Human
gcaacccccagccugcua

SEQ ID NO: 3161108 - RNA, 14 nt, Human
gcaaccccuggacc

SEQ ID NO: 3161109 - RNA, 13 nt, Human
gcaaccccuggac

SEQ ID NO: 3161110 - RNA, 21 nt, Human
gcaaaagaguguaaaauauuu

SEQ ID NO: 3161111 - RNA, 12 nt, Human
gcaaaagagugu

SEQ ID NO: 3161112 - RNA, 21 nt, Human
gcaaccccuggaccccagccu

SEQ ID NO: 3161113 - RNA, 19 nt, Human
gcaaccccuggaccccagc

SEQ ID NO: 3161114 - RNA, 22 nt, Human
gcaaccccuggaccccagccuc

SEQ ID NO: 3161115 - RNA, 16 nt, Human
gcaaaagaugcuucuc

SEQ ID NO: 3161116 - RNA, 17 nt, Human
gcaacccccagccugcu

SEQ ID NO: 3161117 - RNA, 19 nt, Human
gcaauaaaagcccaggagc

SEQ ID NO: 3161118 - RNA, 18 nt, Human
gcaauaaaagcccaggag

SEQ ID NO: 3161119 - RNA, 17 nt, Human
gcaauaaaagcccagga

SEQ ID NO: 3161120 - RNA, 16 nt, Human
gcaauaaaagcccagg

SEQ ID NO: 3161121 - RNA, 20 nt, Human
gcaaguuuucccugaaguua

SEQ ID NO: 3161122 - RNA, 19 nt, Human
gcaaguuuucccugaaguu

SEQ ID NO: 3161123 - RNA, 23 nt, Human
gcaauaaggggagaguaacccug

SEQ ID NO: 3161124 - RNA, 22 nt, Human
gcaauaaaagcccaggagccca

SEQ ID NO: 3161125 - RNA, 19 nt, Human
gcacacaccagagcccacc

SEQ ID NO: 3161126 - RNA, 18 nt, Human
gcacacaccagagcccac

SEQ ID NO: 3161127 - RNA, 17 nt, Human
gcacacaccagagccca

SEQ ID NO: 3161128 - RNA, 16 nt, Human
gcacacaccagagccc

SEQ ID NO: 3161129 - RNA, 15 nt, Human
gcacacaccagagcc

SEQ ID NO: 3161130 - RNA, 14 nt, Human
gcacacaccagagc

SEQ ID NO: 3161131 - RNA, 12 nt, Human
gcacacaccaga

SEQ ID NO: 3161132 - RNA, 21 nt, Human
gaugaugaaaugaggucagag

SEQ ID NO: 3161133 - RNA, 20 nt, Human
gaugcuugcggcaaaaggaa

SEQ ID NO: 3161134 - RNA, 23 nt, Human
gaugcuugcggcaaaaggaaagc

SEQ ID NO: 3161135 - RNA, 18 nt, Human
gaugcuguagacaucugu

SEQ ID NO: 3161136 - RNA, 14 nt, Human
gaugauugaagaaa

SEQ ID NO: 3161137 - RNA, 15 nt, Human
gaugagcuuucuuuu

SEQ ID NO: 3161138 - RNA, 16 nt, Human
gaugagcuuucuuuuu

SEQ ID NO: 3161139 - RNA, 22 nt, Human
gaugaggaguaaaauucaguuu

SEQ ID NO: 3161140 - RNA, 13 nt, Human
gaugaggcaaccc

SEQ ID NO: 3161141 - RNA, 23 nt, Human
gauggaggaaaaccaagccgugg

SEQ ID NO: 3161142 - RNA, 13 nt, Human
gauguaaagaugu

SEQ ID NO: 3161143 - RNA, 14 nt, Human
gauguaaagauguu

SEQ ID NO: 3161144 - RNA, 19 nt, Human
gauguaauuuuguguaaga

SEQ ID NO: 3161145 - RNA, 17 nt, Human
gaugucagcaguugcug

SEQ ID NO: 3161146 - RNA, 13 nt, Human
gauguaauuuugu

SEQ ID NO: 3161147 - RNA, 12 nt, Human
gauguaaauuuu

SEQ ID NO: 3161148 - RNA, 18 nt, Human
gaugucccaacuuguaaa

SEQ ID NO: 3161149 - RNA, 14 nt, Human
gauguccuguaaac

SEQ ID NO: 3161150 - RNA, 17 nt, Human
gaugucccaacuuguaa

SEQ ID NO: 3161151 - RNA, 19 nt, Human
gaugucagcaguugcuggu

SEQ ID NO: 3161152 - RNA, 18 nt, Human
gaucuggguucacugcaa

SEQ ID NO: 3161153 - RNA, 22 nt, Human
gaugugagaaaaccccuuccca

SEQ ID NO: 3161154 - RNA, 14 nt, Human
gaugugagaaaacc

SEQ ID NO: 3161155 - RNA, 21 nt, Human
gauucuccugccucagccucc

SEQ ID NO: 3161156 - RNA, 20 nt, Human
gauucuccugccucagccuc

SEQ ID NO: 3161157 - RNA, 19 nt, Human
gauucuccugccucagccu

SEQ ID NO: 3161158 - RNA, 20 nt, Human
gauucuucugcuucagccuc

SEQ ID NO: 3161159 - RNA, 21 nt, Human
gauucuucugcuucagccucc

SEQ ID NO: 3161160 - RNA, 23 nt, Human
gauucuuauggacaaugacccag

SEQ ID NO: 3161161 - RNA, 16 nt, Human
gauucuuguuuugcuu

SEQ ID NO: 3161162 - RNA, 15 nt, Human
gauucuuguuuugcu

SEQ ID NO: 3161163 - RNA, 15 nt, Human
gauucuuuagagaag

SEQ ID NO: 3161164 - RNA, 21 nt, Human
gauucuuguuuugcuuccccu

SEQ ID NO: 3161165 - RNA, 20 nt, Human
gauucuuguuuugcuucccc

SEQ ID NO: 3161166 - RNA, 19 nt, Human
gcaaaaaaaguuguaugau

SEQ ID NO: 3161167 - RNA, 12 nt, Human
gcaaaaaaaguu

SEQ ID NO: 3161168 - RNA, 18 nt, Human
gcaaaaaaaguuguauga

SEQ ID NO: 3161169 - RNA, 17 nt, Human
gcaaaaaaaguuguaug

SEQ ID NO: 3161170 - RNA, 23 nt, Human
gauuuuuuuuuccuucagugccu

SEQ ID NO: 3161171 - RNA, 22 nt, Human
gauuuuuuuuuccuucagugcc

SEQ ID NO: 3161172 - RNA, 12 nt, Human
gauuucagaaac

SEQ ID NO: 3161173 - RNA, 17 nt, Human
gauuucacucuccuugg

SEQ ID NO: 3161174 - RNA, 18 nt, Human
gauuucacucuccuuggu

SEQ ID NO: 3161175 - RNA, 17 nt, Human
gauuucagcucacugca

SEQ ID NO: 3161176 - RNA, 20 nt, Human
gauuucagcucacugcaacc

SEQ ID NO: 3161177 - RNA, 15 nt, Human
gauuucagcucacug

SEQ ID NO: 3161178 - RNA, 13 nt, Human
gauuucacucucc

SEQ ID NO: 3161179 - RNA, 16 nt, Human
gauuucacucuccuug

SEQ ID NO: 3161180 - RNA, 19 nt, Human
gcagcugcgguccacccag

SEQ ID NO: 3161181 - RNA, 20 nt, Human
gcagcugcuuuugucuaugg

SEQ ID NO: 3161182 - RNA, 13 nt, Human
gcagcugcuuuug

SEQ ID NO: 3161183 - RNA, 23 nt, Human
gcagcugcgguccacccaggagc

SEQ ID NO: 3161184 - RNA, 22 nt, Human
gcagcugcgguccacccaggag

SEQ ID NO: 3161185 - RNA, 15 nt, Human
gcagcuuauucacaa

SEQ ID NO: 3161186 - RNA, 16 nt, Human
gcagcuugaggguugg

SEQ ID NO: 3161187 - RNA, 20 nt, Human
gcagcuguugucucuucucc

SEQ ID NO: 3161188 - RNA, 10 nt, Human
gcagcuguug

SEQ ID NO: 3161189 - RNA, 16 nt, Human
gcagcuguugucucuu

SEQ ID NO: 3161190 - RNA, 19 nt, Human
gcagcuguugucucuucuc

SEQ ID NO: 3161191 - RNA, 18 nt, Human
gcagcuguugucucuucu

SEQ ID NO: 3161192 - RNA, 22 nt, Human
gcagggaaacagcuaaugggac

SEQ ID NO: 3161193 - RNA, 13 nt, Human
gcagggaaacagc

SEQ ID NO: 3161194 - RNA, 13 nt, Human
gcaggcuggcccu

SEQ ID NO: 3161195 - RNA, 17 nt, Human
gcaggcucucaggccag

SEQ ID NO: 3161196 - RNA, 13 nt, Human
gcaggcucucagg

SEQ ID NO: 3161197 - RNA, 14 nt, Human
gcaggcucucaggc

SEQ ID NO: 3161198 - RNA, 15 nt, Human
gcaggcucucaggcc

SEQ ID NO: 3161199 - RNA, 16 nt, Human
gcaggcucucaggcca

SEQ ID NO: 3161200 - RNA, 22 nt, Human
gcaggcucgggcuccccagccc

SEQ ID NO: 3161201 - RNA, 12 nt, Human
gcaggcucucag

SEQ ID NO: 3161202 - RNA, 21 nt, Human
gcagcuugaggguugggcugg

SEQ ID NO: 3161203 - RNA, 19 nt, Human
gcagcuugaggguugggcu

SEQ ID NO: 3161204 - RNA, 16 nt, Human
gcacuuuguucuggcu

SEQ ID NO: 3161205 - RNA, 23 nt, Human
gcacuuugacagcgcacagcugc

SEQ ID NO: 3161206 - RNA, 18 nt, Human
gcacuuucuucuucccau

SEQ ID NO: 3161207 - RNA, 9 nt, Human
gcacugaag

SEQ ID NO: 3161208 - RNA, 13 nt, Human
gcacucuggcagc

SEQ ID NO: 3161209 - RNA, 14 nt, Human
gcacucuggcagca

SEQ ID NO: 3161210 - RNA, 22 nt, Human
gcaguugaaaagacuccaaaga

SEQ ID NO: 3161211 - RNA, 21 nt, Human
gcaguugagaggacacucccg

SEQ ID NO: 3161212 - RNA, 18 nt, Human
gcaguugaauuuuuauau

SEQ ID NO: 3161213 - RNA, 13 nt, Human
gcagguucaguuu

SEQ ID NO: 3161214 - RNA, 23 nt, Human
gcagguuaaauguuuuguaaacu

SEQ ID NO: 3161215 - RNA, 19 nt, Human
gcagguuaaauguuuugua

SEQ ID NO: 3161216 - RNA, 18 nt, Human
gcagguuaaauguuuugu

SEQ ID NO: 3161217 - RNA, 15 nt, Human
gcagguuaaauguuu

SEQ ID NO: 3161218 - RNA, 14 nt, Human
gcagguuaaauguu

SEQ ID NO: 3161219 - RNA, 13 nt, Human
gcagguuaaaugu

SEQ ID NO: 3161220 - RNA, 18 nt, Human
gcaggugugagggcagug

SEQ ID NO: 3161221 - RNA, 15 nt, Human
gcagggacagggccg

SEQ ID NO: 3161222 - RNA, 18 nt, Human
gcauacaaacaagcauau

SEQ ID NO: 3161223 - RNA, 12 nt, Human
gcauacaaacaa

SEQ ID NO: 3161224 - RNA, 14 nt, Human
gcaguugccaguca

SEQ ID NO: 3161225 - RNA, 23 nt, Human
gcaguugccagucaccccggcca

SEQ ID NO: 3161226 - RNA, 15 nt, Human
gcauaaaaauuagcc

SEQ ID NO: 3161227 - RNA, 14 nt, Human
gcaguugcccagcc

SEQ ID NO: 3161228 - RNA, 19 nt, Human
gcauaaagcucaaaugaaa

SEQ ID NO: 3161229 - RNA, 21 nt, Human
gcauaaagcucaaaugaaaug

SEQ ID NO: 3161230 - RNA, 15 nt, Human
gcauuucccacccug

SEQ ID NO: 3161231 - RNA, 21 nt, Human
gcauuucagaaagccuuucau

SEQ ID NO: 3161232 - RNA, 23 nt, Human
gcauuuaugguaaucauauuaga

SEQ ID NO: 3161233 - RNA, 19 nt, Human
gcauuucacuugaguggag

SEQ ID NO: 3161234 - RNA, 12 nt, Human
gcauuucagaaa

SEQ ID NO: 3161235 - RNA, 22 nt, Human
gcauuuagggaguauucuaaua

SEQ ID NO: 3161236 - RNA, 23 nt, Human
gcauuuagggaguauucuaauaa

SEQ ID NO: 3161237 - RNA, 20 nt, Human
gcauuuaugguaaucauauu

SEQ ID NO: 3161238 - RNA, 18 nt, Human
gcauuuaugguaaucaua

SEQ ID NO: 3161239 - RNA, 19 nt, Human
gcauuuagggaguauucua

SEQ ID NO: 3161240 - RNA, 21 nt, Human
gccaacagguagcauagcucu

SEQ ID NO: 3161241 - RNA, 12 nt, Human
gccaagaggcug

SEQ ID NO: 3161242 - RNA, 14 nt, Human
gccaagaggcugca

SEQ ID NO: 3161243 - RNA, 13 nt, Human
gccaagaggcugc

SEQ ID NO: 3161244 - RNA, 15 nt, Human
gccaagaauuagauu

SEQ ID NO: 3161245 - RNA, 14 nt, Human
gccaagaauucuua

SEQ ID NO: 3161246 - RNA, 18 nt, Human
gccaagaauucuuaaaua

SEQ ID NO: 3161247 - RNA, 21 nt, Human
gccaacuuuccccacguuaaa

SEQ ID NO: 3161248 - RNA, 18 nt, Human
gccaagaaguuuaaggaa

SEQ ID NO: 3161249 - RNA, 18 nt, Human
gccaacggccccagcuuc

SEQ ID NO: 3161250 - RNA, 15 nt, Human
gccaaccucgcucca

SEQ ID NO: 3161251 - RNA, 14 nt, Human
gccaaccucgcucc

SEQ ID NO: 3161252 - RNA, 23 nt, Human
gccaaccucgcuccaacuccaac

SEQ ID NO: 3161253 - RNA, 17 nt, Human
gccaacugaucuguuau

SEQ ID NO: 3161254 - RNA, 14 nt, Human
gcauggcagcccuc

SEQ ID NO: 3161255 - RNA, 13 nt, Human
gcauggccaggug

SEQ ID NO: 3161256 - RNA, 17 nt, Human
gcauggccagguggcca

SEQ ID NO: 3161257 - RNA, 14 nt, Human
gcauggccaggugg

SEQ ID NO: 3161258 - RNA, 23 nt, Human
gcauccuggcacccggccccugc

SEQ ID NO: 3161259 - RNA, 22 nt, Human
gcauccuggcacccggccccug

SEQ ID NO: 3161260 - RNA, 14 nt, Human
gcauccuggcaccc

SEQ ID NO: 3161261 - RNA, 13 nt, Human
gcaucgcaaugua

SEQ ID NO: 3161262 - RNA, 21 nt, Human
gcauccuggcacccggccccu

SEQ ID NO: 3161263 - RNA, 17 nt, Human
gcauccuggcacccggc

SEQ ID NO: 3161264 - RNA, 16 nt, Human
gcauuguaaaugugcu

SEQ ID NO: 3161265 - RNA, 16 nt, Human
gcauugggugaucauu

SEQ ID NO: 3161266 - RNA, 19 nt, Human
gcauuggggauguuuuucu

SEQ ID NO: 3161267 - RNA, 12 nt, Human
gcauuguaagcg

SEQ ID NO: 3161268 - RNA, 21 nt, Human
gcauuguaagcguauggcuuu

SEQ ID NO: 3161269 - RNA, 20 nt, Human
gcauuguaaaagcauuuugu

SEQ ID NO: 3161270 - RNA, 22 nt, Human
gcauuguaagcguauggcuuua

SEQ ID NO: 3161271 - RNA, 20 nt, Human
gcauuguauagauauaauga

SEQ ID NO: 3161272 - RNA, 21 nt, Human
gcauuguauagauauaaugaa

SEQ ID NO: 3161273 - RNA, 17 nt, Human
gcaugugaugagaggaa

SEQ ID NO: 3161274 - RNA, 16 nt, Human
gcaugucuuauuuaaa

SEQ ID NO: 3161275 - RNA, 23 nt, Human
gcaugucccuaccgagucucuuc

SEQ ID NO: 3161276 - RNA, 22 nt, Human
gcaugucccaugugagcugcug

SEQ ID NO: 3161277 - RNA, 13 nt, Human
gcaugggaaugaa

SEQ ID NO: 3161278 - RNA, 16 nt, Human
gcaugggaaugaaugu

SEQ ID NO: 3161279 - RNA, 19 nt, Human
gcaugggaaugaaugucag

SEQ ID NO: 3161280 - RNA, 14 nt, Human
gcaugggccaccac

SEQ ID NO: 3161281 - RNA, 19 nt, Human
gcaugggcaguuucaguuu

SEQ ID NO: 3161282 - RNA, 17 nt, Human
gccaagaggcugcagcc

SEQ ID NO: 3161283 - RNA, 18 nt, Human
gccaagagcccgucugcu

SEQ ID NO: 3161284 - RNA, 22 nt, Human
gccaagagguuuggcuccugcc

SEQ ID NO: 3161285 - RNA, 21 nt, Human
gccaagagguuuggcuccugc

SEQ ID NO: 3161286 - RNA, 22 nt, Human
gccaagaguggccccaccuggc

SEQ ID NO: 3161287 - RNA, 21 nt, Human
gccaagaguggccccaccugg

SEQ ID NO: 3161288 - RNA, 20 nt, Human
gccaagaguggccccaccug

SEQ ID NO: 3161289 - RNA, 18 nt, Human
gccaagaguggccccacc

SEQ ID NO: 3161290 - RNA, 14 nt, Human
gccaagaguggccc

SEQ ID NO: 3161291 - RNA, 22 nt, Human
gccaagcaccuagccucgcucu

SEQ ID NO: 3161292 - RNA, 15 nt, Human
gccaagcuuuaaauu

SEQ ID NO: 3161293 - RNA, 16 nt, Human
gccaagcuuuaaauua

SEQ ID NO: 3161294 - RNA, 17 nt, Human
gccaaggccaaaggaag

SEQ ID NO: 3161295 - RNA, 11 nt, Human
gccaaggccaa

SEQ ID NO: 3161296 - RNA, 18 nt, Human
gagcagugggccuggcca

SEQ ID NO: 3161297 - RNA, 17 nt, Human
gagcagugggccuggcc

SEQ ID NO: 3161298 - RNA, 15 nt, Human
gagcagugggccugg

SEQ ID NO: 3161299 - RNA, 20 nt, Human
gagcaucaggccaggcccuc

SEQ ID NO: 3161300 - RNA, 22 nt, Human
gagcaucaggccaggcccucug

SEQ ID NO: 3161301 - RNA, 20 nt, Human
gagcagugauauucuuuguu

SEQ ID NO: 3161302 - RNA, 22 nt, Human
gagcugugggcaaaagagugua

SEQ ID NO: 3161303 - RNA, 20 nt, Human
gagcugugcaucagcuagaa

SEQ ID NO: 3161304 - RNA, 19 nt, Human
gagcugccuguucagcucc

SEQ ID NO: 3161305 - RNA, 16 nt, Human
gagcugccuguucagc

SEQ ID NO: 3161306 - RNA, 15 nt, Human
gagcugccuguucag

SEQ ID NO: 3161307 - RNA, 13 nt, Human
gagcgacagugag

SEQ ID NO: 3161308 - RNA, 15 nt, Human
gagcgacagugagac

SEQ ID NO: 3161309 - RNA, 12 nt, Human
gagccuuccagg

SEQ ID NO: 3161310 - RNA, 13 nt, Human
gagccuuccaggg

SEQ ID NO: 3161311 - RNA, 17 nt, Human
gagcaucaggccaggcc

SEQ ID NO: 3161312 - RNA, 14 nt, Human
gagccuuaaaacau

SEQ ID NO: 3161313 - RNA, 18 nt, Human
gagguggaauuauuuuaa

SEQ ID NO: 3161314 - RNA, 14 nt, Human
gagucacuggaaca

SEQ ID NO: 3161315 - RNA, 21 nt, Human
gagucacuggaacacuaauga

SEQ ID NO: 3161316 - RNA, 17 nt, Human
gaggugggauccuccag

SEQ ID NO: 3161317 - RNA, 15 nt, Human
gaggugggauccucc

SEQ ID NO: 3161318 - RNA, 16 nt, Human
gaggugggauccucca

SEQ ID NO: 3161319 - RNA, 13 nt, Human
gaggugggauccu

SEQ ID NO: 3161320 - RNA, 18 nt, Human
gagugagacucugucuca

SEQ ID NO: 3161321 - RNA, 14 nt, Human
gagugagacucugu

SEQ ID NO: 3161322 - RNA, 19 nt, Human
gaguccaaacuggaaugag

SEQ ID NO: 3161323 - RNA, 15 nt, Human
gagucauuucugauu

SEQ ID NO: 3161324 - RNA, 14 nt, Human
gagugagacagacu

SEQ ID NO: 3161325 - RNA, 18 nt, Human
gagucagaaguuucugcc

SEQ ID NO: 3161326 - RNA, 14 nt, Human
gagucauuucugau

SEQ ID NO: 3161327 - RNA, 16 nt, Human
gaguccaaacuggaau

SEQ ID NO: 3161328 - RNA, 21 nt, Human
gagucauuuuguguugaagag

SEQ ID NO: 3161329 - RNA, 18 nt, Human
gagugcagugagccgaga

SEQ ID NO: 3161330 - RNA, 13 nt, Human
gagugcagugagc

SEQ ID NO: 3161331 - RNA, 15 nt, Human
gagugagaggggagg

SEQ ID NO: 3161332 - RNA, 18 nt, Human
gagugccaacuucuuuca

SEQ ID NO: 3161333 - RNA, 20 nt, Human
gagugagaggggaggccaag

SEQ ID NO: 3161334 - RNA, 19 nt, Human
gagugagaggggaggccaa

SEQ ID NO: 3161335 - RNA, 18 nt, Human
gagugagaggggaggcca

SEQ ID NO: 3161336 - RNA, 21 nt, Human
gaguugauagcacagacccug

SEQ ID NO: 3161337 - RNA, 19 nt, Human
gagugccgcaucucacagc

SEQ ID NO: 3161338 - RNA, 15 nt, Human
gagucagucgccuuu

SEQ ID NO: 3161339 - RNA, 19 nt, Human
gaggcugcagccaggccac

SEQ ID NO: 3161340 - RNA, 16 nt, Human
gaggcuccaggcagca

SEQ ID NO: 3161341 - RNA, 20 nt, Human
gagggccugggccuggcucc

SEQ ID NO: 3161342 - RNA, 17 nt, Human
gagggccugggccuggc

SEQ ID NO: 3161343 - RNA, 15 nt, Human
gagggccugggccug

SEQ ID NO: 3161344 - RNA, 13 nt, Human
gagggccugggcc

SEQ ID NO: 3161345 - RNA, 12 nt, Human
gagggcuccaga

SEQ ID NO: 3161346 - RNA, 13 nt, Human
gagggcuccagac

SEQ ID NO: 3161347 - RNA, 14 nt, Human
gagggcuccagaca

SEQ ID NO: 3161348 - RNA, 15 nt, Human
gagggcuccagacac

SEQ ID NO: 3161349 - RNA, 12 nt, Human
gaggggaacaga

SEQ ID NO: 3161350 - RNA, 15 nt, Human
gaggcucugcccuug

SEQ ID NO: 3161351 - RNA, 17 nt, Human
gaggcucugcccuuggu

SEQ ID NO: 3161352 - RNA, 12 nt, Human
gaggcucugccc

SEQ ID NO: 3161353 - RNA, 15 nt, Human
gaggcuccaggcagc

SEQ ID NO: 3161354 - RNA, 14 nt, Human
gaggcuccaggcag

SEQ ID NO: 3161355 - RNA, 13 nt, Human
gaggcucugcccu

SEQ ID NO: 3161356 - RNA, 14 nt, Human
gaggcucugcccuu

SEQ ID NO: 3161357 - RNA, 20 nt, Human
gaggccagagacacaagccu

SEQ ID NO: 3161358 - RNA, 19 nt, Human
gaggccagagacacaagcc

SEQ ID NO: 3161359 - RNA, 20 nt, Human
gacaggggcaggaggaaggg

SEQ ID NO: 3161360 - RNA, 21 nt, Human
gacagggguuccuucugggca

SEQ ID NO: 3161361 - RNA, 20 nt, Human
gacagggguuccuucugggc

SEQ ID NO: 3161362 - RNA, 14 nt, Human
gacagggguuccuu

SEQ ID NO: 3161363 - RNA, 17 nt, Human
gacagggggccagaaca

SEQ ID NO: 3161364 - RNA, 18 nt, Human
gacaggggcaggaggaag

SEQ ID NO: 3161365 - RNA, 20 nt, Human
gacaggggagggggcaaagg

SEQ ID NO: 3161366 - RNA, 11 nt, Human
gacagcuccuu

SEQ ID NO: 3161367 - RNA, 15 nt, Human
gacagcuccuucugu

SEQ ID NO: 3161368 - RNA, 14 nt, Human
gacagcuccuucug

SEQ ID NO: 3161369 - RNA, 13 nt, Human
gacagcuccuucu

SEQ ID NO: 3161370 - RNA, 12 nt, Human
gacagccuggca

SEQ ID NO: 3161371 - RNA, 11 nt, Human
gacagccuggc

SEQ ID NO: 3161372 - RNA, 14 nt, Human
gacagaaagcagaa

SEQ ID NO: 3161373 - RNA, 20 nt, Human
gacagaaagcagaacaguga

SEQ ID NO: 3161374 - RNA, 13 nt, Human
gacagcccuccau

SEQ ID NO: 3161375 - RNA, 22 nt, Human
gacagaaaauauguauuaacac

SEQ ID NO: 3161376 - RNA, 17 nt, Human
gacagaaaauauguauu

SEQ ID NO: 3161377 - RNA, 13 nt, Human
gacagaaaauaug

SEQ ID NO: 3161378 - RNA, 14 nt, Human
gacacuuuuucuuu

SEQ ID NO: 3161379 - RNA, 18 nt, Human
gaagcaugaacagugcac

SEQ ID NO: 3161380 - RNA, 12 nt, Human
gaagcagugccc

SEQ ID NO: 3161381 - RNA, 16 nt, Human
gaagcagugcccaggu

SEQ ID NO: 3161382 - RNA, 15 nt, Human
gaagcagugcccagg

SEQ ID NO: 3161383 - RNA, 18 nt, Human
gaagcagugcccaggugg

SEQ ID NO: 3161384 - RNA, 19 nt, Human
gacagguuugggaccccug

SEQ ID NO: 3161385 - RNA, 17 nt, Human
gacaggguuucaccaug

SEQ ID NO: 3161386 - RNA, 22 nt, Human
gacagguuugggaccccuggug

SEQ ID NO: 3161387 - RNA, 20 nt, Human
gaccaggguuggcaccuucc

SEQ ID NO: 3161388 - RNA, 22 nt, Human
gaccagggcuggggcagccucu

SEQ ID NO: 3161389 - RNA, 19 nt, Human
gaccagggcuggggcagcc

SEQ ID NO: 3161390 - RNA, 18 nt, Human
gaccagggcuggggcagc

SEQ ID NO: 3161391 - RNA, 14 nt, Human
gaccaucccugaag

SEQ ID NO: 3161392 - RNA, 15 nt, Human
gaccaucccugaagg

SEQ ID NO: 3161393 - RNA, 16 nt, Human
gacccuauugcugcuu

SEQ ID NO: 3161394 - RNA, 13 nt, Human
gacccggcugcgu

SEQ ID NO: 3161395 - RNA, 12 nt, Human
gacccggcugcg

SEQ ID NO: 3161396 - RNA, 22 nt, Human
gaccccuggcuuuucacugcug

SEQ ID NO: 3161397 - RNA, 21 nt, Human
gaccccuggcuuuucacugcu

SEQ ID NO: 3161398 - RNA, 16 nt, Human
gaccaucccugaaggc

SEQ ID NO: 3161399 - RNA, 17 nt, Human
gaccaucccugaaggcc

SEQ ID NO: 3161400 - RNA, 22 nt, Human
gaccaugcugucuggcacagcc

SEQ ID NO: 3161401 - RNA, 20 nt, Human
gaccaugcugucuggcacag

SEQ ID NO: 3161402 - RNA, 19 nt, Human
gaccaugcugucuggcaca

SEQ ID NO: 3161403 - RNA, 15 nt, Human
gaccaugcugucugg

SEQ ID NO: 3161404 - RNA, 16 nt, Human
gaccauucuccaccug

SEQ ID NO: 3161405 - RNA, 23 nt, Human
gaccaugcugucuggcacagccu

SEQ ID NO: 3161406 - RNA, 13 nt, Human
gaccccuggcuuu

SEQ ID NO: 3161407 - RNA, 15 nt, Human
gacuauggagcugag

SEQ ID NO: 3161408 - RNA, 16 nt, Human
gacuauucaaacaguc

SEQ ID NO: 3161409 - RNA, 15 nt, Human
gacuauucaaacagu

SEQ ID NO: 3161410 - RNA, 18 nt, Human
gacuaugcuuuucucaaa

SEQ ID NO: 3161411 - RNA, 18 nt, Human
gacuaggguccuggggaa

SEQ ID NO: 3161412 - RNA, 17 nt, Human
gacuauagcuguucuaa

SEQ ID NO: 3161413 - RNA, 12 nt, Human
gacuauaaaugu

SEQ ID NO: 3161414 - RNA, 20 nt, Human
gacccuccaaggccaggccu

SEQ ID NO: 3161415 - RNA, 22 nt, Human
gacccuccaaggccaggccuug

SEQ ID NO: 3161416 - RNA, 12 nt, Human
gacgcugugcug

SEQ ID NO: 3161417 - RNA, 22 nt, Human
gacgcucugcugugggcacagg

SEQ ID NO: 3161418 - RNA, 13 nt, Human
gacgcucugcugu

SEQ ID NO: 3161419 - RNA, 13 nt, Human
gacgcugugcugc

SEQ ID NO: 3161420 - RNA, 17 nt, Human
gagaagcggcuggcagc

SEQ ID NO: 3161421 - RNA, 16 nt, Human
gagaagcggcuggcag

SEQ ID NO: 3161422 - RNA, 23 nt, Human
gacugucucaagagggcacuggu

SEQ ID NO: 3161423 - RNA, 22 nt, Human
gacugucucaagagggcacugg

SEQ ID NO: 3161424 - RNA, 21 nt, Human
gacugucucaagagggcacug

SEQ ID NO: 3161425 - RNA, 14 nt, Human
gacucaaugcacug

SEQ ID NO: 3161426 - RNA, 17 nt, Human
gacucaaugcacugaca

SEQ ID NO: 3161427 - RNA, 22 nt, Human
gacuguacaaaguagaagucuu

SEQ ID NO: 3161428 - RNA, 17 nt, Human
gacuguacuccucccag

SEQ ID NO: 3161429 - RNA, 16 nt, Human
gacuguacuccuccca

SEQ ID NO: 3161430 - RNA, 22 nt, Human
gacuuuguuaguuucuccaagc

SEQ ID NO: 3161431 - RNA, 20 nt, Human
gacuuuuccaacccucauca

SEQ ID NO: 3161432 - RNA, 12 nt, Human
gacuuuguuaca

SEQ ID NO: 3161433 - RNA, 15 nt, Human
gacuuuguuacacug

SEQ ID NO: 3161434 - RNA, 21 nt, Human
gacuuuucuguccgagcuuug

SEQ ID NO: 3161435 - RNA, 22 nt, Human
gacuuuuccaauaugugauuuu

SEQ ID NO: 3161436 - RNA, 17 nt, Human
gacuuuuccaauaugug

SEQ ID NO: 3161437 - RNA, 16 nt, Human
gacuguuuucucuuga

SEQ ID NO: 3161438 - RNA, 18 nt, Human
gacuguuuucucuugaga

SEQ ID NO: 3161439 - RNA, 14 nt, Human
gacuuuggaaagac

SEQ ID NO: 3161440 - RNA, 14 nt, Human
gacuuuggaaagag

SEQ ID NO: 3161441 - RNA, 22 nt, Human
gacuuugaugucagcaguugcu

SEQ ID NO: 3161442 - RNA, 18 nt, Human
gacuuugaugucagcagu

SEQ ID NO: 3161443 - RNA, 18 nt, Human
gacuuugaaaauauauac

SEQ ID NO: 3161444 - RNA, 14 nt, Human
ggcucagagugggg

SEQ ID NO: 3161445 - RNA, 18 nt, Human
ggcucagcggggacagcu

SEQ ID NO: 3161446 - RNA, 16 nt, Human
ggcucagauuguaaua

SEQ ID NO: 3161447 - RNA, 15 nt, Human
ggcucaggcugagcu

SEQ ID NO: 3161448 - RNA, 19 nt, Human
ggcucagcggggacagcuc

SEQ ID NO: 3161449 - RNA, 19 nt, Human
ggcucagguggggucacuc

SEQ ID NO: 3161450 - RNA, 20 nt, Human
ggcucagguggggucacucu

SEQ ID NO: 3161451 - RNA, 14 nt, Human
ggcuccacuugguc

SEQ ID NO: 3161452 - RNA, 22 nt, Human
ggcuccacacacacaaaaaaag

SEQ ID NO: 3161453 - RNA, 14 nt, Human
ggcuccacacacac

SEQ ID NO: 3161454 - RNA, 23 nt, Human
ggcuccacacacacaaaaaaaga

SEQ ID NO: 3161455 - RNA, 13 nt, Human
ggcugggagagcc

SEQ ID NO: 3161456 - RNA, 14 nt, Human
ggcugggagagccu

SEQ ID NO: 3161457 - RNA, 15 nt, Human
ggcugggagagccuu

SEQ ID NO: 3161458 - RNA, 16 nt, Human
ggcugggagagccuuc

SEQ ID NO: 3161459 - RNA, 17 nt, Human
ggcugcggggcgggcac

SEQ ID NO: 3161460 - RNA, 11 nt, Human
ggcucucaggc

SEQ ID NO: 3161461 - RNA, 22 nt, Human
ggcuccuuaggguuuucucucu

SEQ ID NO: 3161462 - RNA, 12 nt, Human
ggcucuuccagg

SEQ ID NO: 3161463 - RNA, 13 nt, Human
ggcucuucuccuu

SEQ ID NO: 3161464 - RNA, 12 nt, Human
ggcucuucuccu

SEQ ID NO: 3161465 - RNA, 13 nt, Human
ggcucucaggcca

SEQ ID NO: 3161466 - RNA, 17 nt, Human
ggcucucaaugcuguuu

SEQ ID NO: 3161467 - RNA, 22 nt, Human
ggcugcggaaugaaccacaucu

SEQ ID NO: 3161468 - RNA, 16 nt, Human
ggcugccuuagaaccu

SEQ ID NO: 3161469 - RNA, 12 nt, Human
ggcugcccuggu

SEQ ID NO: 3161470 - RNA, 13 nt, Human
ggcugcccuggug

SEQ ID NO: 3161471 - RNA, 19 nt, Human
ggcugcccuggugcugcca

SEQ ID NO: 3161472 - RNA, 16 nt, Human
ggcugcccuggugcug

SEQ ID NO: 3161473 - RNA, 15 nt, Human
ggcugcccuggugcu

SEQ ID NO: 3161474 - RNA, 14 nt, Human
ggcugcccuggugc

SEQ ID NO: 3161475 - RNA, 19 nt, Human
ggcugccaaugggagcuca

SEQ ID NO: 3161476 - RNA, 20 nt, Human
ggcugccaaugggagcucau

SEQ ID NO: 3161477 - RNA, 22 nt, Human
ggcugcaugcgggcuuccuccu

SEQ ID NO: 3161478 - RNA, 15 nt, Human
ggcucuucuccuuuc

SEQ ID NO: 3161479 - RNA, 14 nt, Human
ggcucuucuccuuu

SEQ ID NO: 3161480 - RNA, 22 nt, Human
ggcugacagacagcccuccauc

SEQ ID NO: 3161481 - RNA, 16 nt, Human
ggcucuucuccuuuca

SEQ ID NO: 3161482 - RNA, 16 nt, Human
ggcugaauguauguaa

SEQ ID NO: 3161483 - RNA, 19 nt, Human
ggcugaauguauguaaaua

SEQ ID NO: 3161484 - RNA, 13 nt, Human
gggacagcuccuu

SEQ ID NO: 3161485 - RNA, 12 nt, Human
gggacagcuccu

SEQ ID NO: 3161486 - RNA, 13 nt, Human
gggacagagcaga

SEQ ID NO: 3161487 - RNA, 18 nt, Human
gggacaggggcaggagga

SEQ ID NO: 3161488 - RNA, 17 nt, Human
gggacaggggcaggagg

SEQ ID NO: 3161489 - RNA, 15 nt, Human
gggacagcuccuucu

SEQ ID NO: 3161490 - RNA, 12 nt, Human
gggacagucuca

SEQ ID NO: 3161491 - RNA, 15 nt, Human
gggacagucucacca

SEQ ID NO: 3161492 - RNA, 22 nt, Human
gggacauccugucaucugagaa

SEQ ID NO: 3161493 - RNA, 20 nt, Human
gggaacccaaguccaagcau

SEQ ID NO: 3161494 - RNA, 13 nt, Human
gggaaccugaccc

SEQ ID NO: 3161495 - RNA, 18 nt, Human
gggaagaagcucucuccu

SEQ ID NO: 3161496 - RNA, 15 nt, Human
gggaacguucucuuu

SEQ ID NO: 3161497 - RNA, 20 nt, Human
gggaacgcccacuucccugg

SEQ ID NO: 3161498 - RNA, 19 nt, Human
gggaacgcccacuucccug

SEQ ID NO: 3161499 - RNA, 16 nt, Human
gggaacgcccacuucc

SEQ ID NO: 3161500 - RNA, 12 nt, Human
gggaacgcccac

SEQ ID NO: 3161501 - RNA, 16 nt, Human
ggcuucugugcccaga

SEQ ID NO: 3161502 - RNA, 19 nt, Human
ggcuucugugcaccugggc

SEQ ID NO: 3161503 - RNA, 22 nt, Human
ggcuucugugcaccugggcucu

SEQ ID NO: 3161504 - RNA, 21 nt, Human
ggcuuccuccugguguggaag

SEQ ID NO: 3161505 - RNA, 22 nt, Human
ggcuucccgcucagcccucccu

SEQ ID NO: 3161506 - RNA, 11 nt, Human
ggcuucauaca

SEQ ID NO: 3161507 - RNA, 9 nt, Human
ggcuucaua

SEQ ID NO: 3161508 - RNA, 18 nt, Human
ggcuucauccuccucaga

SEQ ID NO: 3161509 - RNA, 12 nt, Human
ggcuucauacac

SEQ ID NO: 3161510 - RNA, 14 nt, Human
ggcuucccgcucag

SEQ ID NO: 3161511 - RNA, 22 nt, Human
ggcuucauccuccucagaucuu

SEQ ID NO: 3161512 - RNA, 16 nt, Human
ggcuuccucauaguau

SEQ ID NO: 3161513 - RNA, 21 nt, Human
ggcuucccgcucagcccuccc

SEQ ID NO: 3161514 - RNA, 19 nt, Human
ggcuucccgcucagcccuc

SEQ ID NO: 3161515 - RNA, 18 nt, Human
ggcuucccgcucagcccu

SEQ ID NO: 3161516 - RNA, 17 nt, Human
ggcuucccgcucagccc

SEQ ID NO: 3161517 - RNA, 16 nt, Human
ggcuucccgcucagcc

SEQ ID NO: 3161518 - RNA, 15 nt, Human
ggcuucccgcucagc

SEQ ID NO: 3161519 - RNA, 18 nt, Human
ggcuguaucccaugagcc

SEQ ID NO: 3161520 - RNA, 20 nt, Human
ggcuucaguggcagcugcuu

SEQ ID NO: 3161521 - RNA, 19 nt, Human
ggcuucaguggcagcugcu

SEQ ID NO: 3161522 - RNA, 17 nt, Human
ggcuucaguggcagcug

SEQ ID NO: 3161523 - RNA, 18 nt, Human
ggcuucaguggcagcugc

SEQ ID NO: 3161524 - RNA, 19 nt, Human
ggcuggguucuacccaggu

SEQ ID NO: 3161525 - RNA, 21 nt, Human
ggcuggguucuacccaggugc

SEQ ID NO: 3161526 - RNA, 19 nt, Human
ggcuggguggcaccagcag

SEQ ID NO: 3161527 - RNA, 12 nt, Human
aaaaauaaagca

SEQ ID NO: 3161528 - RNA, 11 nt, Human
aaaaauaaagc

SEQ ID NO: 3161529 - RNA, 19 nt, Human
aaaaauaacuguaauuauu

SEQ ID NO: 3161530 - RNA, 18 nt, Human
aaaaauaacuguaauuau

SEQ ID NO: 3161531 - RNA, 19 nt, Human
ggcugggggccucagugcc

SEQ ID NO: 3161532 - RNA, 17 nt, Human
ggcugggggccucagug

SEQ ID NO: 3161533 - RNA, 16 nt, Human
ggcugggggccucagu

SEQ ID NO: 3161534 - RNA, 15 nt, Human
ggcugggggccucag

SEQ ID NO: 3161535 - RNA, 18 nt, Human
aaaagccaagaggcugca

SEQ ID NO: 3161536 - RNA, 16 nt, Human
aaaagcauuuuguaau

SEQ ID NO: 3161537 - RNA, 15 nt, Human
aaaagcauuuuguaa

SEQ ID NO: 3161538 - RNA, 14 nt, Human
aaaagcauuuugua

SEQ ID NO: 3161539 - RNA, 13 nt, Human
aaaagcccaaccu

SEQ ID NO: 3161540 - RNA, 20 nt, Human
aaaagcccaaccucuuccuc

SEQ ID NO: 3161541 - RNA, 15 nt, Human
aaaagcccaaccucu

SEQ ID NO: 3161542 - RNA, 17 nt, Human
aaaagcccaggagccca

SEQ ID NO: 3161543 - RNA, 14 nt, Human
aaaagcccaggagc

SEQ ID NO: 3161544 - RNA, 22 nt, Human
aaaagccagccaagcuuuaaau

SEQ ID NO: 3161545 - RNA, 23 nt, Human
aaaagccagguuccacagaggac

SEQ ID NO: 3161546 - RNA, 11 nt, Human
aaaaggaaagc

SEQ ID NO: 3161547 - RNA, 13 nt, Human
aaaaggaaagcug

SEQ ID NO: 3161548 - RNA, 19 nt, Human
aaaagcuuuguuuguucuu

SEQ ID NO: 3161549 - RNA, 17 nt, Human
aaaagcuucccucccug

SEQ ID NO: 3161550 - RNA, 13 nt, Human
aaaagcuuuguuu

SEQ ID NO: 3161551 - RNA, 13 nt, Human
aaaagcuuucaug

SEQ ID NO: 3161552 - RNA, 23 nt, Human
gggacuuggaagcuccgcuuucu

SEQ ID NO: 3161553 - RNA, 18 nt, Human
gggacuuggaagcuccgc

SEQ ID NO: 3161554 - RNA, 17 nt, Human
gggacuuggaagcuccg

SEQ ID NO: 3161555 - RNA, 15 nt, Human
gggacuuggaagcuc

SEQ ID NO: 3161556 - RNA, 21 nt, Human
gggagaaccaaaaagaggcua

SEQ ID NO: 3161557 - RNA, 18 nt, Human
gggaggucaaggcugcag

SEQ ID NO: 3161558 - RNA, 15 nt, Human
gggagggagggcucc

SEQ ID NO: 3161559 - RNA, 16 nt, Human
gggagggagggcucca

SEQ ID NO: 3161560 - RNA, 18 nt, Human
gggagggagcugagaaga

SEQ ID NO: 3161561 - RNA, 15 nt, Human
gggagagccuuccag

SEQ ID NO: 3161562 - RNA, 19 nt, Human
gggagagccuuccaggggu

SEQ ID NO: 3161563 - RNA, 23 nt, Human
gggagcaggcucgggcuccccag

SEQ ID NO: 3161564 - RNA, 12 nt, Human
gggagagcugaa

SEQ ID NO: 3161565 - RNA, 13 nt, Human
gggagccaggagg

SEQ ID NO: 3161566 - RNA, 13 nt, Human
gggaggcugacuc

SEQ ID NO: 3161567 - RNA, 20 nt, Human
gggaggcugacuccuggucc

SEQ ID NO: 3161568 - RNA, 23 nt, Human
aaaagauguagauuuauuucauc

SEQ ID NO: 3161569 - RNA, 17 nt, Human
aaaacuucauguaauuu

SEQ ID NO: 3161570 - RNA, 15 nt, Human
aaaacuucagacaua

SEQ ID NO: 3161571 - RNA, 22 nt, Human
aaaagauguagauuuauuucau

SEQ ID NO: 3161572 - RNA, 15 nt, Human
aaaacugaugugaaa

SEQ ID NO: 3161573 - RNA, 22 nt, Human
aaaacuguacuuugauucacau

SEQ ID NO: 3161574 - RNA, 17 nt, Human
aaaacugugaccaagua

SEQ ID NO: 3161575 - RNA, 19 nt, Human
aaaacugugaccaaguaua

SEQ ID NO: 3161576 - RNA, 21 nt, Human
aaaacugugaccaaguauaaa

SEQ ID NO: 3161577 - RNA, 17 nt, Human
aaaacuuaguuugugaa

SEQ ID NO: 3161578 - RNA, 18 nt, Human
aaaacucuccucugcugc

SEQ ID NO: 3161579 - RNA, 21 nt, Human
aaaacucuuuaacuuguaaua

SEQ ID NO: 3161580 - RNA, 12 nt, Human
aaaacucuuuaa

SEQ ID NO: 3161581 - RNA, 13 nt, Human
aaaacucuuuaac

SEQ ID NO: 3161582 - RNA, 16 nt, Human
aaaaccaggcuuucua

SEQ ID NO: 3161583 - RNA, 14 nt, Human
aaaaccaggcuuuc

SEQ ID NO: 3161584 - RNA, 18 nt, Human
aaaaccugggauuauaua

SEQ ID NO: 3161585 - RNA, 17 nt, Human
aaaacgauuuaauuuau

SEQ ID NO: 3161586 - RNA, 16 nt, Human
aaaacgauuuaauuua

SEQ ID NO: 3161587 - RNA, 15 nt, Human
aaaacgauuuaauuu

SEQ ID NO: 3161588 - RNA, 17 nt, Human
aaaaaugguuuaaaugg

SEQ ID NO: 3161589 - RNA, 19 nt, Human
aaaaaugguaucaaaauua

SEQ ID NO: 3161590 - RNA, 21 nt, Human
gggaccacaggugcccgccac

SEQ ID NO: 3161591 - RNA, 12 nt, Human
gggaccagcuug

SEQ ID NO: 3161592 - RNA, 14 nt, Human
gggaccagagcugc

SEQ ID NO: 3161593 - RNA, 20 nt, Human
gggaccagagcugccaccug

SEQ ID NO: 3161594 - RNA, 18 nt, Human
gggacaugggucgcccau

SEQ ID NO: 3161595 - RNA, 22 nt, Human
gggacaugggucgcccaugaga

SEQ ID NO: 3161596 - RNA, 14 nt, Human
aaaaccacagcagu

SEQ ID NO: 3161597 - RNA, 12 nt, Human
aaaacccaagug

SEQ ID NO: 3161598 - RNA, 13 nt, Human
aaaacaucucauc

SEQ ID NO: 3161599 - RNA, 22 nt, Human
aaaacaucauuccuuuuuauuu

SEQ ID NO: 3161600 - RNA, 21 nt, Human
aaaacaucauuccuuuuuauu

SEQ ID NO: 3161601 - RNA, 23 nt, Human
ggccccugcugguucaggguugg

SEQ ID NO: 3161602 - RNA, 13 nt, Human
ggcccggcuccag

SEQ ID NO: 3161603 - RNA, 14 nt, Human
ggccccugcugguu

SEQ ID NO: 3161604 - RNA, 13 nt, Human
ggccccugcuggu

SEQ ID NO: 3161605 - RNA, 19 nt, Human
ggcccuucucuccagcccc

SEQ ID NO: 3161606 - RNA, 20 nt, Human
ggcccuucucuccagccccu

SEQ ID NO: 3161607 - RNA, 21 nt, Human
ggcccuucucuccagccccug

SEQ ID NO: 3161608 - RNA, 15 nt, Human
ggcccggcuccaggc

SEQ ID NO: 3161609 - RNA, 14 nt, Human
ggccuccauccuga

SEQ ID NO: 3161610 - RNA, 15 nt, Human
ggccuccauccugag

SEQ ID NO: 3161611 - RNA, 13 nt, Human
ggccuccauccug

SEQ ID NO: 3161612 - RNA, 22 nt, Human
ggcccuucucuccagccccugg

SEQ ID NO: 3161613 - RNA, 23 nt, Human
ggcccuucucuccagccccugga

SEQ ID NO: 3161614 - RNA, 19 nt, Human
ggccucacuaggcuucugg

SEQ ID NO: 3161615 - RNA, 23 nt, Human
ggccucaagugauucuccugccu

SEQ ID NO: 3161616 - RNA, 23 nt, Human
ggccauaagcaacaauuuucaga

SEQ ID NO: 3161617 - RNA, 13 nt, Human
ggccauaagcaac

SEQ ID NO: 3161618 - RNA, 14 nt, Human
ggccaguugguccc

SEQ ID NO: 3161619 - RNA, 17 nt, Human
ggccaguuggucccccu

SEQ ID NO: 3161620 - RNA, 23 nt, Human
ggccagucccugaggcagguccc

SEQ ID NO: 3161621 - RNA, 17 nt, Human
ggccagucccugaggca

SEQ ID NO: 3161622 - RNA, 20 nt, Human
ggccagugugacaaggauug

SEQ ID NO: 3161623 - RNA, 16 nt, Human
ggcaguugcccagccu

SEQ ID NO: 3161624 - RNA, 15 nt, Human
ggcagggcugaggcc

SEQ ID NO: 3161625 - RNA, 17 nt, Human
ggcagcccgcaucagcu

SEQ ID NO: 3161626 - RNA, 22 nt, Human
ggcagccccuguucuggcagag

SEQ ID NO: 3161627 - RNA, 19 nt, Human
ggcagccgcggugcccaac

SEQ ID NO: 3161628 - RNA, 16 nt, Human
ggagagaagagaaugc

SEQ ID NO: 3161629 - RNA, 15 nt, Human
ggagagaaauauuuu

SEQ ID NO: 3161630 - RNA, 18 nt, Human
ggagagaaauauuuuaau

SEQ ID NO: 3161631 - RNA, 21 nt, Human
ggagacugcuccugagccccc

SEQ ID NO: 3161632 - RNA, 20 nt, Human
ggagacugcuccugagcccc

SEQ ID NO: 3161633 - RNA, 19 nt, Human
ggagacugcuccugagccc

SEQ ID NO: 3161634 - RNA, 18 nt, Human
ggagacugcuccugagcc

SEQ ID NO: 3161635 - RNA, 19 nt, Human
ggagacuuugaugucagca

SEQ ID NO: 3161636 - RNA, 21 nt, Human
ggagacuuugaugucagcagu

SEQ ID NO: 3161637 - RNA, 20 nt, Human
ggcacagaaaauggaagaca

SEQ ID NO: 3161638 - RNA, 21 nt, Human
ggcacagaaaauggaagacag

SEQ ID NO: 3161639 - RNA, 19 nt, Human
ggcacagaaaauggaagac

SEQ ID NO: 3161640 - RNA, 21 nt, Human
ggcacaguuuucugagaaaga

SEQ ID NO: 3161641 - RNA, 20 nt, Human
ggcacagggccuggcccaug

SEQ ID NO: 3161642 - RNA, 20 nt, Human
ggcacucagaagacacugau

SEQ ID NO: 3161643 - RNA, 23 nt, Human
ggcacucagaagacacugauggg

SEQ ID NO: 3161644 - RNA, 19 nt, Human
ggcacugagagagcgcagc

SEQ ID NO: 3161645 - RNA, 15 nt, Human
ggcacuucugccuga

SEQ ID NO: 3161646 - RNA, 13 nt, Human
ggcacuucugccu

SEQ ID NO: 3161647 - RNA, 15 nt, Human
ggcacugguggcccg

SEQ ID NO: 3161648 - RNA, 21 nt, Human
ggcacugccgccgcuagguag

SEQ ID NO: 3161649 - RNA, 21 nt, Human
ggcagacaugguggggucucc

SEQ ID NO: 3161650 - RNA, 16 nt, Human
ggcagacauggugggg

SEQ ID NO: 3161651 - RNA, 11 nt, Human
ggcagccccug

SEQ ID NO: 3161652 - RNA, 23 nt, Human
ggcagccccauucugccugccca

SEQ ID NO: 3161653 - RNA, 12 nt, Human
ggugcaggcagg

SEQ ID NO: 3161654 - RNA, 13 nt, Human
ggugcaggcgccu

SEQ ID NO: 3161655 - RNA, 15 nt, Human
gguggaauuauuuua

SEQ ID NO: 3161656 - RNA, 13 nt, Human
gguggaugccugg

SEQ ID NO: 3161657 - RNA, 10 nt, Human
ggugcuuucc

SEQ ID NO: 3161658 - RNA, 18 nt, Human
ggugcuuuuuauaaaaag

SEQ ID NO: 3161659 - RNA, 21 nt, Human
ggugcuuuuuauaaaaagaua

SEQ ID NO: 3161660 - RNA, 13 nt, Human
ggugaacagaaca

SEQ ID NO: 3161661 - RNA, 14 nt, Human
ggucgcccaugaga

SEQ ID NO: 3161662 - RNA, 18 nt, Human
ggucgcccaugagagcgc

SEQ ID NO: 3161663 - RNA, 13 nt, Human
gguccuuuagaaa

SEQ ID NO: 3161664 - RNA, 13 nt, Human
ggucgaggcagga

SEQ ID NO: 3161665 - RNA, 13 nt, Human
ggugcaaugaccu

SEQ ID NO: 3161666 - RNA, 12 nt, Human
ggugcaaugacc

SEQ ID NO: 3161667 - RNA, 18 nt, Human
ggugcaaaguucccuacu

SEQ ID NO: 3161668 - RNA, 24 nt, Human
ggugauccacccaccucagccucc

SEQ ID NO: 3161669 - RNA, 23 nt, Human
ggugauccacccaccucagccuc

SEQ ID NO: 3161670 - RNA, 18 nt, Human
ggugauccacccaccuca

SEQ ID NO: 3161671 - RNA, 16 nt, Human
aaaggagcaagaacuu

SEQ ID NO: 3161672 - RNA, 22 nt, Human
aaagggacuuggaagcuccgcu

SEQ ID NO: 3161673 - RNA, 22 nt, Human
aaagggucuccgaaaugcuguc

SEQ ID NO: 3161674 - RNA, 15 nt, Human
aaagggaguuuaaaa

SEQ ID NO: 3161675 - RNA, 14 nt, Human
aaagggaguuuuug

SEQ ID NO: 3161676 - RNA, 15 nt, Human
aaagggaguuuuuga

SEQ ID NO: 3161677 - RNA, 21 nt, Human
aaaggagagcuagcagcaggg

SEQ ID NO: 3161678 - RNA, 17 nt, Human
aaaggagagcuagcagc

SEQ ID NO: 3161679 - RNA, 17 nt, Human
aaaggagauuggaagga

SEQ ID NO: 3161680 - RNA, 14 nt, Human
aaaggagaguacuu

SEQ ID NO: 3161681 - RNA, 23 nt, Human
aaaggaagguaguucaagaaaug

SEQ ID NO: 3161682 - RNA, 22 nt, Human
aaaggaaagagggagguaagga

SEQ ID NO: 3161683 - RNA, 15 nt, Human
aaaggaaagcugugu

SEQ ID NO: 3161684 - RNA, 18 nt, Human
aaaggaaagcuguguuua

SEQ ID NO: 3161685 - RNA, 16 nt, Human
aaaggaagacaguucu

SEQ ID NO: 3161686 - RNA, 21 nt, Human
aaagcacugacuucuaaguaa

SEQ ID NO: 3161687 - RNA, 17 nt, Human
aaagcacugacuucuaa

SEQ ID NO: 3161688 - RNA, 23 nt, Human
aaagcaccaaaauaagaaaagau

SEQ ID NO: 3161689 - RNA, 14 nt, Human
aaagcucaaaugaa

SEQ ID NO: 3161690 - RNA, 18 nt, Human
aaagcucaaaugaaaugu

SEQ ID NO: 3161691 - RNA, 19 nt, Human
aaagcucaaaugaaaugua

SEQ ID NO: 3161692 - RNA, 22 nt, Human
aaagcugccagccgagauagcc

SEQ ID NO: 3161693 - RNA, 13 nt, Human
aaagcugcugaca

SEQ ID NO: 3161694 - RNA, 14 nt, Human
aaagcugcugugau

SEQ ID NO: 3161695 - RNA, 12 nt, Human
aaagcugaaaac

SEQ ID NO: 3161696 - RNA, 15 nt, Human
aaagcuuguuaagau

SEQ ID NO: 3161697 - RNA, 23 nt, Human
aaagcuuucaugucccagaacuu

SEQ ID NO: 3161698 - RNA, 20 nt, Human
aaagcuuuguuuguucuugu

SEQ ID NO: 3161699 - RNA, 14 nt, Human
aaagcuuuguuugu

SEQ ID NO: 3161700 - RNA, 19 nt, Human
aaacuuguaaauaaaggaa

SEQ ID NO: 3161701 - RNA, 20 nt, Human
aaacuuggugcuuauugaua

SEQ ID NO: 3161702 - RNA, 12 nt, Human
aaacuuugaaau

SEQ ID NO: 3161703 - RNA, 15 nt, Human
aaacuuucuuaauau

SEQ ID NO: 3161704 - RNA, 21 nt, Human
aaacuuucuacucauuuuaau

SEQ ID NO: 3161705 - RNA, 12 nt, Human
aaacuuuguagu

SEQ ID NO: 3161706 - RNA, 22 nt, Human
aaacuuugagaucuaaaaauaa

SEQ ID NO: 3161707 - RNA, 21 nt, Human
aaacuuugagaucuaaaaaua

SEQ ID NO: 3161708 - RNA, 15 nt, Human
aaacuuugaaauaua

SEQ ID NO: 3161709 - RNA, 13 nt, Human
aaacuuugaaaua

SEQ ID NO: 3161710 - RNA, 20 nt, Human
aaacuuugagaucuaaaaau

SEQ ID NO: 3161711 - RNA, 17 nt, Human
ggguggggggcuucaua

SEQ ID NO: 3161712 - RNA, 19 nt, Human
ggguggggggcuucauaca

SEQ ID NO: 3161713 - RNA, 19 nt, Human
aaacuucagacauagaauu

SEQ ID NO: 3161714 - RNA, 16 nt, Human
aaacuucauguaauuu

SEQ ID NO: 3161715 - RNA, 20 nt, Human
aaacuucauguaauuuuauu

SEQ ID NO: 3161716 - RNA, 21 nt, Human
aaacuucauguaauuuuauuu

SEQ ID NO: 3161717 - RNA, 17 nt, Human
aaacuuccaaagaaagu

SEQ ID NO: 3161718 - RNA, 18 nt, Human
aaacuuccaaagaaaguu

SEQ ID NO: 3161719 - RNA, 14 nt, Human
aaagacaugaaauu

SEQ ID NO: 3161720 - RNA, 14 nt, Human
aaagaccagaaauu

SEQ ID NO: 3161721 - RNA, 22 nt, Human
aaagaccuggggcugcugugaa

SEQ ID NO: 3161722 - RNA, 17 nt, Human
aaagacuauucaaacag

SEQ ID NO: 3161723 - RNA, 19 nt, Human
aaagacuauucaaacaguc

SEQ ID NO: 3161724 - RNA, 18 nt, Human
aaagacuauucaaacagu

SEQ ID NO: 3161725 - RNA, 14 nt, Human
aaagacuccaaaga

SEQ ID NO: 3161726 - RNA, 21 nt, Human
aaagacuccaaagaaauguaa

SEQ ID NO: 3161727 - RNA, 15 nt, Human
aaagacuccaaagaa

SEQ ID NO: 3161728 - RNA, 21 nt, Human
aaagacuauucaaacagucuc

SEQ ID NO: 3161729 - RNA, 22 nt, Human
aaagagaugaugaaaauauuua

SEQ ID NO: 3161730 - RNA, 15 nt, Human
aaagagauuuaaacu

SEQ ID NO: 3161731 - RNA, 20 nt, Human
aaagagaugaugaaaauauu

SEQ ID NO: 3161732 - RNA, 19 nt, Human
aaagagaugaugaaaauau

SEQ ID NO: 3161733 - RNA, 13 nt, Human
aaagacuguacaa

SEQ ID NO: 3161734 - RNA, 11 nt, Human
aaagacuggca

SEQ ID NO: 3161735 - RNA, 14 nt, Human
aaagacugaucuca

SEQ ID NO: 3161736 - RNA, 15 nt, Human
aaagaggaaugaagu

SEQ ID NO: 3161737 - RNA, 21 nt, Human
aaagagauuuaaacucugaau

SEQ ID NO: 3161738 - RNA, 17 nt, Human
aaagaugcuucucacug

SEQ ID NO: 3161739 - RNA, 14 nt, Human
aaagaugcuucuca

SEQ ID NO: 3161740 - RNA, 19 nt, Human
aaagaugcuucucacugcc

SEQ ID NO: 3161741 - RNA, 15 nt, Human
aaagaggcacagagc

SEQ ID NO: 3161742 - RNA, 13 nt, Human
gguccugcucagc

SEQ ID NO: 3161743 - RNA, 12 nt, Human
gguccugcugca

SEQ ID NO: 3161744 - RNA, 11 nt, Human
gguccugcugc

SEQ ID NO: 3161745 - RNA, 22 nt, Human
aaagauggcugugccucugccu

SEQ ID NO: 3161746 - RNA, 21 nt, Human
aaagauggcugugccucugcc

SEQ ID NO: 3161747 - RNA, 23 nt, Human
aaagauggcugugccucugccug

SEQ ID NO: 3161748 - RNA, 12 nt, Human
aaagcaauauug

SEQ ID NO: 3161749 - RNA, 14 nt, Human
aaagcaauauugua

SEQ ID NO: 3161750 - RNA, 20 nt, Human
ggguccaggccuacuccugu

SEQ ID NO: 3161751 - RNA, 22 nt, Human
gggggcuucauacacaugagau

SEQ ID NO: 3161752 - RNA, 11 nt, Human
ggggggcagag

SEQ ID NO: 3161753 - RNA, 10 nt, Human
ggggggaggc

SEQ ID NO: 3161754 - RNA, 13 nt, Human
ggggggcagagcc

SEQ ID NO: 3161755 - RNA, 13 nt, Human
gggucgcccauga

SEQ ID NO: 3161756 - RNA, 14 nt, Human
gggucgccuguccu

SEQ ID NO: 3161757 - RNA, 17 nt, Human
ggguccccuccaggagu

SEQ ID NO: 3161758 - RNA, 16 nt, Human
ggguccccuccaggag

SEQ ID NO: 3161759 - RNA, 16 nt, Human
ggguccccagcccuuc

SEQ ID NO: 3161760 - RNA, 15 nt, Human
aaacgggcucagcaa

SEQ ID NO: 3161761 - RNA, 19 nt, Human
aaaccuuuggcuacacaau

SEQ ID NO: 3161762 - RNA, 21 nt, Human
aaaccuuucuauaauuuuaca

SEQ ID NO: 3161763 - RNA, 18 nt, Human
aaaccuuucuauaauuuu

SEQ ID NO: 3161764 - RNA, 12 nt, Human
aaaccuuucccc

SEQ ID NO: 3161765 - RNA, 12 nt, Human
aaaccacagcag

SEQ ID NO: 3161766 - RNA, 23 nt, Human
aaaccaagucaagugaaaaagga

SEQ ID NO: 3161767 - RNA, 24 nt, Human
aaacauuaguacuuuauagaagaa

SEQ ID NO: 3161768 - RNA, 21 nt, Human
aaacauuaguacuuuauagaa

SEQ ID NO: 3161769 - RNA, 17 nt, Human
aaacauuaguacuuuau

SEQ ID NO: 3161770 - RNA, 15 nt, Human
aaacauuaugaugug

SEQ ID NO: 3161771 - RNA, 19 nt, Human
aaacauucuaucuacugau

SEQ ID NO: 3161772 - RNA, 21 nt, Human
aaacauucuaucuacugauuu

SEQ ID NO: 3161773 - RNA, 16 nt, Human
aaaccaagccguggcu

SEQ ID NO: 3161774 - RNA, 14 nt, Human
aaacauuaauguug

SEQ ID NO: 3161775 - RNA, 14 nt, Human
aaacauuaguacuu

SEQ ID NO: 3161776 - RNA, 24 nt, Human
aaacauuaauguugauuucuaguu

SEQ ID NO: 3161777 - RNA, 22 nt, Human
aaacauuaauguugauuucuag

SEQ ID NO: 3161778 - RNA, 20 nt, Human
aaacauuaauguugauuucu

SEQ ID NO: 3161779 - RNA, 19 nt, Human
aaacauuaauguugauuuc

SEQ ID NO: 3161780 - RNA, 16 nt, Human
aaacauuaauguugau

SEQ ID NO: 3161781 - RNA, 15 nt, Human
aaacauuaauguuga

SEQ ID NO: 3161782 - RNA, 14 nt, Human
aaacuaguuuuucc

SEQ ID NO: 3161783 - RNA, 15 nt, Human
aaacuaguuuuuccu

SEQ ID NO: 3161784 - RNA, 16 nt, Human
aaacuaguuuuuccua

SEQ ID NO: 3161785 - RNA, 15 nt, Human
aaacuaggcuccuuc

SEQ ID NO: 3161786 - RNA, 13 nt, Human
aaacuauguguuu

SEQ ID NO: 3161787 - RNA, 16 nt, Human
aaacuauguguuuuuc

SEQ ID NO: 3161788 - RNA, 17 nt, Human
aaacuauguguuuuucu

SEQ ID NO: 3161789 - RNA, 19 nt, Human
aaacuauguguuuuucuca

SEQ ID NO: 3161790 - RNA, 20 nt, Human
aaacuauguguuuuucucau

SEQ ID NO: 3161791 - RNA, 21 nt, Human
aaacuauguguuuuucucaua

SEQ ID NO: 3161792 - RNA, 17 nt, Human
aaacuaggcauuuguaa

SEQ ID NO: 3161793 - RNA, 19 nt, Human
aaacuaggcauuuguaaau

SEQ ID NO: 3161794 - RNA, 20 nt, Human
aaacuaggcauuuguaaaua

SEQ ID NO: 3161795 - RNA, 18 nt, Human
aaacguauaauauguaca

SEQ ID NO: 3161796 - RNA, 23 nt, Human
aaacggccucacuaggcuucugg

SEQ ID NO: 3161797 - RNA, 12 nt, Human
aaaccuuuuauu

SEQ ID NO: 3161798 - RNA, 15 nt, Human
aaaccuuuuauuaua

SEQ ID NO: 3161799 - RNA, 16 nt, Human
aaaccuuuucuuguau

SEQ ID NO: 3161800 - RNA, 13 nt, Human
aaacucaucugga

SEQ ID NO: 3161801 - RNA, 18 nt, Human
aaacuauuuaaagaaaua

SEQ ID NO: 3161802 - RNA, 22 nt, Human
aaacucaaccaaaugguacaaa

SEQ ID NO: 3161803 - RNA, 17 nt, Human
aaacucaaccaaauggu

SEQ ID NO: 3161804 - RNA, 20 nt, Human
aaacucaaccaaaugguaca

SEQ ID NO: 3161805 - RNA, 18 nt, Human
aaacucaaccaaauggua

SEQ ID NO: 3161806 - RNA, 19 nt, Human
ggguggcaccagcagccug

SEQ ID NO: 3161807 - RNA, 22 nt, Human
aaacuguuaacuuauucaaaga

SEQ ID NO: 3161808 - RNA, 20 nt, Human
ggguggcaucauuccaggcc

SEQ ID NO: 3161809 - RNA, 13 nt, Human
aaacuggaaugag

SEQ ID NO: 3161810 - RNA, 21 nt, Human
aaacugucgugucauacucga

SEQ ID NO: 3161811 - RNA, 14 nt, Human
aaacuggaaugagc

SEQ ID NO: 3161812 - RNA, 21 nt, Human
aaacuggaaauacuagauuug

SEQ ID NO: 3161813 - RNA, 14 nt, Human
aaacuggaaauacu

SEQ ID NO: 3161814 - RNA, 22 nt, Human
aaacugcccccucugcccugcg

SEQ ID NO: 3161815 - RNA, 17 nt, Human
aaacucuauggucuuau

SEQ ID NO: 3161816 - RNA, 13 nt, Human
aaacucuaugguc

SEQ ID NO: 3161817 - RNA, 21 nt, Human
aaacugcccccucugcccugc

SEQ ID NO: 3161818 - RNA, 18 nt, Human
aaacucuauuuagaugca

SEQ ID NO: 3161819 - RNA, 20 nt, Human
aaacugcuuccuuucuugau

SEQ ID NO: 3161820 - RNA, 19 nt, Human
aaacugcuuccuuucuuga

SEQ ID NO: 3161821 - RNA, 20 nt, Human
ggggccuaauaaaacugaug

SEQ ID NO: 3161822 - RNA, 23 nt, Human
ggggccuaauaaaacugauguga

SEQ ID NO: 3161823 - RNA, 18 nt, Human
gggggccucagugccacu

SEQ ID NO: 3161824 - RNA, 17 nt, Human
gggggccucagugccac

SEQ ID NO: 3161825 - RNA, 15 nt, Human
gggggccucagugcc

SEQ ID NO: 3161826 - RNA, 12 nt, Human
gggggccucagu

SEQ ID NO: 3161827 - RNA, 14 nt, Human
ggggacugccaccu

SEQ ID NO: 3161828 - RNA, 17 nt, Human
ggggacugccaccuccc

SEQ ID NO: 3161829 - RNA, 15 nt, Human
ggggacugccaccuc

SEQ ID NO: 3161830 - RNA, 20 nt, Human
ggggacaaccuuggcuuggc

SEQ ID NO: 3161831 - RNA, 12 nt, Human
ggggaaugaggg

SEQ ID NO: 3161832 - RNA, 14 nt, Human
ggggaaugaggggg

SEQ ID NO: 3161833 - RNA, 20 nt, Human
ggggaaugagggggcucagu

SEQ ID NO: 3161834 - RNA, 16 nt, Human
ggggaccagagcugcc

SEQ ID NO: 3161835 - RNA, 15 nt, Human
ggggaccagagcugc

SEQ ID NO: 3161836 - RNA, 15 nt, Human
ggggaccagcuuggc

SEQ ID NO: 3161837 - RNA, 22 nt, Human
ggggaauguuugccucugccuc

SEQ ID NO: 3161838 - RNA, 18 nt, Human
ggggaauguuugccucug

SEQ ID NO: 3161839 - RNA, 13 nt, Human
ggggaaggcaggg

SEQ ID NO: 3161840 - RNA, 14 nt, Human
aaacaguagugaua

SEQ ID NO: 3161841 - RNA, 15 nt, Human
aaacagucucaggaa

SEQ ID NO: 3161842 - RNA, 17 nt, Human
aaacaugguuugacucu

SEQ ID NO: 3161843 - RNA, 11 nt, Human
aaacacagcaa

SEQ ID NO: 3161844 - RNA, 13 nt, Human
aaacaauucaaag

SEQ ID NO: 3161845 - RNA, 18 nt, Human
aaacacaaaacaaauccu

SEQ ID NO: 3161846 - RNA, 15 nt, Human
aaacaaaguuucaga

SEQ ID NO: 3161847 - RNA, 19 nt, Human
aaacaaaguuucagaguau

SEQ ID NO: 3161848 - RNA, 23 nt, Human
aaacaaaguuucagaguauauug

SEQ ID NO: 3161849 - RNA, 17 nt, Human
aaacaaaucuuuccaua

SEQ ID NO: 3161850 - RNA, 14 nt, Human
aaacacagcaaggg

SEQ ID NO: 3161851 - RNA, 12 nt, Human
aaacacagcaag

SEQ ID NO: 3161852 - RNA, 19 nt, Human
aaacacauaauuaacacuu

SEQ ID NO: 3161853 - RNA, 18 nt, Human
aaacacauaauuaacacu

SEQ ID NO: 3161854 - RNA, 14 nt, Human
aaacacauaauuaa

SEQ ID NO: 3161855 - RNA, 13 nt, Human
gggaugagaaagg

SEQ ID NO: 3161856 - RNA, 17 nt, Human
gggaugauugaagaaac

SEQ ID NO: 3161857 - RNA, 16 nt, Human
gggaugauugaagaaa

SEQ ID NO: 3161858 - RNA, 15 nt, Human
gggaugauugaagaa

SEQ ID NO: 3161859 - RNA, 14 nt, Human
aaaauguuuucagc

SEQ ID NO: 3161860 - RNA, 12 nt, Human
aaaauguuuuca

SEQ ID NO: 3161861 - RNA, 19 nt, Human
aaaauuuagaaauauaauu

SEQ ID NO: 3161862 - RNA, 21 nt, Human
aaaauuuacuacaauauguac

SEQ ID NO: 3161863 - RNA, 19 nt, Human
aaaauuuacuacaauaugu

SEQ ID NO: 3161864 - RNA, 13 nt, Human
aaaauuuuaagcu

SEQ ID NO: 3161865 - RNA, 12 nt, Human
aaaauuuuaagc

SEQ ID NO: 3161866 - RNA, 19 nt, Human
aaaauuuuaggcaaguuuu

SEQ ID NO: 3161867 - RNA, 20 nt, Human
aaacaaaggccuaauucuau

SEQ ID NO: 3161868 - RNA, 15 nt, Human
guagagccagagguc

SEQ ID NO: 3161869 - RNA, 23 nt, Human
guagagacaggguuucaccaugu

SEQ ID NO: 3161870 - RNA, 11 nt, Human
guagagccagg

SEQ ID NO: 3161871 - RNA, 10 nt, Human
guagagccag

SEQ ID NO: 3161872 - RNA, 13 nt, Human
guagagacagggu

SEQ ID NO: 3161873 - RNA, 15 nt, Human
guagagccagggucu

SEQ ID NO: 3161874 - RNA, 20 nt, Human
guagccuauuuuuuuagauu

SEQ ID NO: 3161875 - RNA, 21 nt, Human
guagccucaaucgagugagac

SEQ ID NO: 3161876 - RNA, 18 nt, Human
guagacuggccugaacca

SEQ ID NO: 3161877 - RNA, 12 nt, Human
guagacuuuuau

SEQ ID NO: 3161878 - RNA, 14 nt, Human
guagacuacuguuc

SEQ ID NO: 3161879 - RNA, 12 nt, Human
guagagacaggg

SEQ ID NO: 3161880 - RNA, 11 nt, Human
guagagacagg

SEQ ID NO: 3161881 - RNA, 15 nt, Human
guagacaucuguccu

SEQ ID NO: 3161882 - RNA, 15 nt, Human
guagacauuuauaac

SEQ ID NO: 3161883 - RNA, 23 nt, Human
guagaaauaucugaaaauguaug

SEQ ID NO: 3161884 - RNA, 21 nt, Human
guagaaauaucugaaaaugua

SEQ ID NO: 3161885 - RNA, 20 nt, Human
guagaaauaucugaaaaugu

SEQ ID NO: 3161886 - RNA, 16 nt, Human
guagaacgccagggac

SEQ ID NO: 3161887 - RNA, 13 nt, Human
guagaacuuugua

SEQ ID NO: 3161888 - RNA, 22 nt, Human
guagaacgccagggaccccaga

SEQ ID NO: 3161889 - RNA, 14 nt, Human
guagaacuuuguau

SEQ ID NO: 3161890 - RNA, 15 nt, Human
guagaacuuuguaua

SEQ ID NO: 3161891 - RNA, 21 nt, Human
guagaagucuuagauguauau

SEQ ID NO: 3161892 - RNA, 18 nt, Human
guagaagcccuucuaccu

SEQ ID NO: 3161893 - RNA, 21 nt, Human
guagaacuuuguauaguuaug

SEQ ID NO: 3161894 - RNA, 23 nt, Human
guagaaugaccuuguaauguaac

SEQ ID NO: 3161895 - RNA, 18 nt, Human
guagaaugaccuuguaau

SEQ ID NO: 3161896 - RNA, 22 nt, Human
guagaaugaccuuguaauguaa

SEQ ID NO: 3161897 - RNA, 20 nt, Human
guagaaugaccuuguaaugu

SEQ ID NO: 3161898 - RNA, 11 nt, Human
guacugugaau

SEQ ID NO: 3161899 - RNA, 16 nt, Human
guacuggagaaaaugg

SEQ ID NO: 3161900 - RNA, 14 nt, Human
guacuggauuuaac

SEQ ID NO: 3161901 - RNA, 15 nt, Human
guacugguaagauug

SEQ ID NO: 3161902 - RNA, 19 nt, Human
guacugguaagauuguuau

SEQ ID NO: 3161903 - RNA, 14 nt, Human
guacugauuucagu

SEQ ID NO: 3161904 - RNA, 15 nt, Human
guacugauuucagua

SEQ ID NO: 3161905 - RNA, 20 nt, Human
guacugauuucaguaagucu

SEQ ID NO: 3161906 - RNA, 17 nt, Human
guacugagcagugauau

SEQ ID NO: 3161907 - RNA, 18 nt, Human
guacuacaguccucccau

SEQ ID NO: 3161908 - RNA, 19 nt, Human
guacuacaguccucccauc

SEQ ID NO: 3161909 - RNA, 14 nt, Human
guacccacugcucu

SEQ ID NO: 3161910 - RNA, 13 nt, Human
guacccacugcuc

SEQ ID NO: 3161911 - RNA, 13 nt, Human
guacuauguauca

SEQ ID NO: 3161912 - RNA, 19 nt, Human
guacuaucuuaucucagau

SEQ ID NO: 3161913 - RNA, 20 nt, Human
guacuaguggcauggagaau

SEQ ID NO: 3161914 - RNA, 17 nt, Human
guacuacaguccuccca

SEQ ID NO: 3161915 - RNA, 19 nt, Human
guacuaguggcauggagaa

SEQ ID NO: 3161916 - RNA, 14 nt, Human
guacuagagauauu

SEQ ID NO: 3161917 - RNA, 21 nt, Human
guacuagagauauuuuguaaa

SEQ ID NO: 3161918 - RNA, 17 nt, Human
guacuauguaucaauga

SEQ ID NO: 3161919 - RNA, 15 nt, Human
guacuauguaucaau

SEQ ID NO: 3161920 - RNA, 14 nt, Human
guacuccucccagg

SEQ ID NO: 3161921 - RNA, 19 nt, Human
guacuccacauauuucagu

SEQ ID NO: 3161922 - RNA, 13 nt, Human
aaauauuauuugu

SEQ ID NO: 3161923 - RNA, 16 nt, Human
aaauauuauuuguguu

SEQ ID NO: 3161924 - RNA, 21 nt, Human
aaauauuauuuguguuuccua

SEQ ID NO: 3161925 - RNA, 16 nt, Human
aaauauucacaucuuc

SEQ ID NO: 3161926 - RNA, 14 nt, Human
aaaucacuuucaua

SEQ ID NO: 3161927 - RNA, 14 nt, Human
aaauauuagcaaag

SEQ ID NO: 3161928 - RNA, 19 nt, Human
aaauauuaagaaagacuau

SEQ ID NO: 3161929 - RNA, 12 nt, Human
aaauauuaagac

SEQ ID NO: 3161930 - RNA, 21 nt, Human
aaauauacauguuuauguaaa

SEQ ID NO: 3161931 - RNA, 23 nt, Human
aaauauacauguuuauguaaaca

SEQ ID NO: 3161932 - RNA, 16 nt, Human
aaauauaccacucuuu

SEQ ID NO: 3161933 - RNA, 20 nt, Human
aaauauaccacucuuuaccu

SEQ ID NO: 3161934 - RNA, 20 nt, Human
aaauauacauguuuauguaa

SEQ ID NO: 3161935 - RNA, 19 nt, Human
aaauauacauguuuaugua

SEQ ID NO: 3161936 - RNA, 18 nt, Human
aaauauacauguuuaugu

SEQ ID NO: 3161937 - RNA, 17 nt, Human
aaauauacauguuuaug

SEQ ID NO: 3161938 - RNA, 18 nt, Human
aaauccaaauauuguuaa

SEQ ID NO: 3161939 - RNA, 17 nt, Human
aaauccaaauauuguua

SEQ ID NO: 3161940 - RNA, 16 nt, Human
aaauccaaauauuguu

SEQ ID NO: 3161941 - RNA, 14 nt, Human
aaauccaaauauug

SEQ ID NO: 3161942 - RNA, 15 nt, Human
aaauccaaauauugu

SEQ ID NO: 3161943 - RNA, 11 nt, Human
aaaucauuucu

SEQ ID NO: 3161944 - RNA, 22 nt, Human
aaaucauacuccuaugcuuuag

SEQ ID NO: 3161945 - RNA, 23 nt, Human
aaaucauuucugcaucagcugcu

SEQ ID NO: 3161946 - RNA, 22 nt, Human
aaaucauuucugcaucagcugc

SEQ ID NO: 3161947 - RNA, 21 nt, Human
aaaucauuucugcaucagcug

SEQ ID NO: 3161948 - RNA, 19 nt, Human
aaaucauuucugcaucagc

SEQ ID NO: 3161949 - RNA, 12 nt, Human
aaaucauuucug

SEQ ID NO: 3161950 - RNA, 13 nt, Human
aaaucauaaaguc

SEQ ID NO: 3161951 - RNA, 14 nt, Human
aaaucauaaaguca

SEQ ID NO: 3161952 - RNA, 16 nt, Human
aaaucauaaagucagu

SEQ ID NO: 3161953 - RNA, 15 nt, Human
aaaucaguaaacacu

SEQ ID NO: 3161954 - RNA, 19 nt, Human
aaaucagccguguaaccau

SEQ ID NO: 3161955 - RNA, 12 nt, Human
aaaucagccugc

SEQ ID NO: 3161956 - RNA, 18 nt, Human
aaaucagccugcuccagc

SEQ ID NO: 3161957 - RNA, 16 nt, Human
aaaucagcugcuacua

SEQ ID NO: 3161958 - RNA, 17 nt, Human
guaccacugaaucugua

SEQ ID NO: 3161959 - RNA, 22 nt, Human
guaccaaugcagaacucccaag

SEQ ID NO: 3161960 - RNA, 18 nt, Human
guacauuucuaagucaaa

SEQ ID NO: 3161961 - RNA, 15 nt, Human
guacauucucaguuu

SEQ ID NO: 3161962 - RNA, 19 nt, Human
guacauuuuuugaaaugcu

SEQ ID NO: 3161963 - RNA, 20 nt, Human
guacauuuuuugaaaugcug

SEQ ID NO: 3161964 - RNA, 16 nt, Human
guaccaaaauuuuaaa

SEQ ID NO: 3161965 - RNA, 19 nt, Human
guaccaaaauuuuaaaaaa

SEQ ID NO: 3161966 - RNA, 20 nt, Human
guaccaaaauuuuaaaaaag

SEQ ID NO: 3161967 - RNA, 14 nt, Human
guacauuuuuugaa

SEQ ID NO: 3161968 - RNA, 19 nt, Human
guaccacugaaucuguaca

SEQ ID NO: 3161969 - RNA, 18 nt, Human
guaccacugaaucuguac

SEQ ID NO: 3161970 - RNA, 16 nt, Human
guaccagccccacccu

SEQ ID NO: 3161971 - RNA, 13 nt, Human
guaccagccccac

SEQ ID NO: 3161972 - RNA, 21 nt, Human
guaccaguucuuuaagaagau

SEQ ID NO: 3161973 - RNA, 15 nt, Human
guaccauuaaaauau

SEQ ID NO: 3161974 - RNA, 14 nt, Human
guaccauuaaaaua

SEQ ID NO: 3161975 - RNA, 17 nt, Human
guaccauuaaaauaugc

SEQ ID NO: 3161976 - RNA, 16 nt, Human
guaccauuaaaauaug

SEQ ID NO: 3161977 - RNA, 22 nt, Human
guaccauuuaauggggaggaca

SEQ ID NO: 3161978 - RNA, 12 nt, Human
guacccacugcu

SEQ ID NO: 3161979 - RNA, 18 nt, Human
guaccauuaaaauaugca

SEQ ID NO: 3161980 - RNA, 23 nt, Human
guaccauuuaauggggaggacaa

SEQ ID NO: 3161981 - RNA, 23 nt, Human
aaauccagaaacuuguucuucca

SEQ ID NO: 3161982 - RNA, 22 nt, Human
aaauccagaaacuuguucuucc

SEQ ID NO: 3161983 - RNA, 11 nt, Human
aaauccagaaa

SEQ ID NO: 3161984 - RNA, 11 nt, Human
aaauccaggac

SEQ ID NO: 3161985 - RNA, 13 nt, Human
aaauccaggaccc

SEQ ID NO: 3161986 - RNA, 12 nt, Human
aaauccaggacc

SEQ ID NO: 3161987 - RNA, 21 nt, Human
aaauccaggacccugccaggc

SEQ ID NO: 3161988 - RNA, 19 nt, Human
aaauccaggacccugccag

SEQ ID NO: 3161989 - RNA, 19 nt, Human
guacauggaauaacaugua

SEQ ID NO: 3161990 - RNA, 12 nt, Human
guacaugggacu

SEQ ID NO: 3161991 - RNA, 16 nt, Human
guacauguauuaaauu

SEQ ID NO: 3161992 - RNA, 13 nt, Human
guacauguauuaa

SEQ ID NO: 3161993 - RNA, 22 nt, Human
guacaugggacuaugcuuuucu

SEQ ID NO: 3161994 - RNA, 13 nt, Human
guacauuuaaauu

SEQ ID NO: 3161995 - RNA, 14 nt, Human
guacauuuaaauuu

SEQ ID NO: 3161996 - RNA, 12 nt, Human
guaauauauuua

SEQ ID NO: 3161997 - RNA, 23 nt, Human
guaauuuaaaauugugauguguc

SEQ ID NO: 3161998 - RNA, 19 nt, Human
guaauuuaaaauugugaug

SEQ ID NO: 3161999 - RNA, 20 nt, Human
guaauuuaaaauugugaugu

SEQ ID NO: 3162000 - RNA, 23 nt, Human
guaauuguuguuuguauguauaa

SEQ ID NO: 3162001 - RNA, 21 nt, Human
guaauuguuguuuguauguau

SEQ ID NO: 3162002 - RNA, 19 nt, Human
guaauuguuguuuguaugu

SEQ ID NO: 3162003 - RNA, 17 nt, Human
guaauuguuguuuguau

SEQ ID NO: 3162004 - RNA, 21 nt, Human
guaauuguuccagagacaaau

SEQ ID NO: 3162005 - RNA, 12 nt, Human
guaauuguucca

SEQ ID NO: 3162006 - RNA, 20 nt, Human
guaacuguccguaguaucag

SEQ ID NO: 3162007 - RNA, 15 nt, Human
guaauaaagacucua

SEQ ID NO: 3162008 - RNA, 14 nt, Human
guaauauaauacac

SEQ ID NO: 3162009 - RNA, 22 nt, Human
guaauauaauacacaaaaucaa

SEQ ID NO: 3162010 - RNA, 21 nt, Human
guaauauaauacacaaaauca

SEQ ID NO: 3162011 - RNA, 15 nt, Human
guaauauagaaaaaa

SEQ ID NO: 3162012 - RNA, 21 nt, Human
guaaagaaaaauauuuaaugu

SEQ ID NO: 3162013 - RNA, 17 nt, Human
guaaagaaaaauauuua

SEQ ID NO: 3162014 - RNA, 15 nt, Human
guaaagaaaaauauu

SEQ ID NO: 3162015 - RNA, 14 nt, Human
guaaagaaaaauau

SEQ ID NO: 3162016 - RNA, 16 nt, Human
guaaacuuugaaauau

SEQ ID NO: 3162017 - RNA, 14 nt, Human
guaaacuuugaaau

SEQ ID NO: 3162018 - RNA, 22 nt, Human
guaacugcucuugggcaauauu

SEQ ID NO: 3162019 - RNA, 19 nt, Human
aaauacacacucaaaucaa

SEQ ID NO: 3162020 - RNA, 20 nt, Human
aaauacaauuuuuauuucuu

SEQ ID NO: 3162021 - RNA, 21 nt, Human
aaauacaauuuuuauuucuuu

SEQ ID NO: 3162022 - RNA, 17 nt, Human
aaauacagauagauaua

SEQ ID NO: 3162023 - RNA, 20 nt, Human
aaauacaugaugauuucaga

SEQ ID NO: 3162024 - RNA, 14 nt, Human
aaauacaugaugau

SEQ ID NO: 3162025 - RNA, 22 nt, Human
aaauacagauaaaugauucaaa

SEQ ID NO: 3162026 - RNA, 20 nt, Human
aaauacagauaaaugauuca

SEQ ID NO: 3162027 - RNA, 16 nt, Human
aaauacagauaaauga

SEQ ID NO: 3162028 - RNA, 15 nt, Human
aaauacagacuggau

SEQ ID NO: 3162029 - RNA, 18 nt, Human
aaauacauucuuuuugcu

SEQ ID NO: 3162030 - RNA, 13 nt, Human
aaauacauucuuu

SEQ ID NO: 3162031 - RNA, 19 nt, Human
aaauacauucuuuuugcuc

SEQ ID NO: 3162032 - RNA, 17 nt, Human
aaauacauuuaaaacau

SEQ ID NO: 3162033 - RNA, 20 nt, Human
aaauaccacaaucaccgaug

SEQ ID NO: 3162034 - RNA, 23 nt, Human
aaauaccaaaccuucugacuuug

SEQ ID NO: 3162035 - RNA, 14 nt, Human
aaauauaauugaca

SEQ ID NO: 3162036 - RNA, 14 nt, Human
aaauacuguacaau

SEQ ID NO: 3162037 - RNA, 15 nt, Human
aaauauacaaaacuu

SEQ ID NO: 3162038 - RNA, 16 nt, Human
aaauauacauguuuau

SEQ ID NO: 3162039 - RNA, 15 nt, Human
aaauauacauguuua

SEQ ID NO: 3162040 - RNA, 14 nt, Human
aaauauacauguuu

SEQ ID NO: 3162041 - RNA, 13 nt, Human
aaauauacauguu

SEQ ID NO: 3162042 - RNA, 18 nt, Human
guacacccaugaaagaaa

SEQ ID NO: 3162043 - RNA, 17 nt, Human
guacacccaugaaagaa

SEQ ID NO: 3162044 - RNA, 16 nt, Human
guacacccaugaaaga

SEQ ID NO: 3162045 - RNA, 16 nt, Human
guaauuuuauuuuaaa

SEQ ID NO: 3162046 - RNA, 19 nt, Human
guaauuuuauuuuaaaauu

SEQ ID NO: 3162047 - RNA, 20 nt, Human
guaauuuuauuuuaaaauuu

SEQ ID NO: 3162048 - RNA, 23 nt, Human
guaauuuucggaugggagaguuu

SEQ ID NO: 3162049 - RNA, 16 nt, Human
guaauuuuguguaaga

SEQ ID NO: 3162050 - RNA, 14 nt, Human
guaauuuuguguaa

SEQ ID NO: 3162051 - RNA, 21 nt, Human
guaauuuuucuguauagacag

SEQ ID NO: 3162052 - RNA, 13 nt, Human
guaauuuuucugu

SEQ ID NO: 3162053 - RNA, 20 nt, Human
guaauuuuguguaagaaaua

SEQ ID NO: 3162054 - RNA, 16 nt, Human
guaauuuuucuguaua

SEQ ID NO: 3162055 - RNA, 15 nt, Human
guaauuuuucuguau

SEQ ID NO: 3162056 - RNA, 15 nt, Human
aaauacacacucaaa

SEQ ID NO: 3162057 - RNA, 17 nt, Human
guacacugaauuuuuau

SEQ ID NO: 3162058 - RNA, 13 nt, Human
guacacugccugc

SEQ ID NO: 3162059 - RNA, 17 nt, Human
guacacugccugccuua

SEQ ID NO: 3162060 - RNA, 13 nt, Human
aaauacaaaguua

SEQ ID NO: 3162061 - RNA, 16 nt, Human
aaaguuauuaaaauug

SEQ ID NO: 3162062 - RNA, 15 nt, Human
aaaguuauuaaaauu

SEQ ID NO: 3162063 - RNA, 21 nt, Human
aaaguuaccuggaaucaaaua

SEQ ID NO: 3162064 - RNA, 19 nt, Human
aaaguauugccaaacauua

SEQ ID NO: 3162065 - RNA, 23 nt, Human
aaaguucugcagauaaacaguag

SEQ ID NO: 3162066 - RNA, 16 nt, Human
aaaguauguuuuacuu

SEQ ID NO: 3162067 - RNA, 14 nt, Human
aaaguauucucuuu

SEQ ID NO: 3162068 - RNA, 22 nt, Human
aaaguuaccagugccuuaaacu

SEQ ID NO: 3162069 - RNA, 16 nt, Human
aaaguuaccagugccu

SEQ ID NO: 3162070 - RNA, 20 nt, Human
aaaguauuguaaugagugaa

SEQ ID NO: 3162071 - RNA, 18 nt, Human
aaaguauugccaaacauu

SEQ ID NO: 3162072 - RNA, 15 nt, Human
aaaguauugccaaac

SEQ ID NO: 3162073 - RNA, 14 nt, Human
aaaguauugccaaa

SEQ ID NO: 3162074 - RNA, 13 nt, Human
aaaguauugccaa

SEQ ID NO: 3162075 - RNA, 15 nt, Human
aaaguauucuuuuuc

SEQ ID NO: 3162076 - RNA, 16 nt, Human
aaaguauucuuuuucu

SEQ ID NO: 3162077 - RNA, 18 nt, Human
aaaguauucuuuuucuuu

SEQ ID NO: 3162078 - RNA, 16 nt, Human
aaaguauucucuuuuc

SEQ ID NO: 3162079 - RNA, 20 nt, Human
aaagguauuuuaaucaccaa

SEQ ID NO: 3162080 - RNA, 15 nt, Human
aaagguagacuuuua

SEQ ID NO: 3162081 - RNA, 17 nt, Human
aaaggguucuguaaaau

SEQ ID NO: 3162082 - RNA, 24 nt, Human
aaaggucaccucacucagcaccac

SEQ ID NO: 3162083 - RNA, 20 nt, Human
aaaggucaccucacucagca

SEQ ID NO: 3162084 - RNA, 19 nt, Human
aaaggucaccucacucagc

SEQ ID NO: 3162085 - RNA, 16 nt, Human
aaaggucaccucacuc

SEQ ID NO: 3162086 - RNA, 19 nt, Human
aaaguacuucuccacccug

SEQ ID NO: 3162087 - RNA, 18 nt, Human
aaaguacugagcagugau

SEQ ID NO: 3162088 - RNA, 19 nt, Human
aaaguacauuuuuugaaau

SEQ ID NO: 3162089 - RNA, 18 nt, Human
aaaguacauuuuuugaaa

SEQ ID NO: 3162090 - RNA, 15 nt, Human
aaaguacauuuuuug

SEQ ID NO: 3162091 - RNA, 23 nt, Human
aaaggucuuggugccucugcagu

SEQ ID NO: 3162092 - RNA, 16 nt, Human
aaaguacagguacuuu

SEQ ID NO: 3162093 - RNA, 14 nt, Human
aaaguacagguacu

SEQ ID NO: 3162094 - RNA, 13 nt, Human
aaaguacagaauu

SEQ ID NO: 3162095 - RNA, 14 nt, Human
aaaguacagaauuu

SEQ ID NO: 3162096 - RNA, 15 nt, Human
aaaguacagaauuug

SEQ ID NO: 3162097 - RNA, 21 nt, Human
aaaguacagaauuugaauuau

SEQ ID NO: 3162098 - RNA, 22 nt, Human
aaaguacagguacuuugucuaa

SEQ ID NO: 3162099 - RNA, 20 nt, Human
aaaguacagguacuuugucu

SEQ ID NO: 3162100 - RNA, 18 nt, Human
aaaguacagguacuuugu

SEQ ID NO: 3162101 - RNA, 22 nt, Human
aaaguacauucuggggaaacaa

SEQ ID NO: 3162102 - RNA, 21 nt, Human
aaaguacuucuccacccugcu

SEQ ID NO: 3162103 - RNA, 20 nt, Human
aaaguacuucuccacccugc

SEQ ID NO: 3162104 - RNA, 23 nt, Human
aaaguacuucuccacccugcucu

SEQ ID NO: 3162105 - RNA, 18 nt, Human
aaaguauaaauuugugua

SEQ ID NO: 3162106 - RNA, 13 nt, Human
aaaguauaauguu

SEQ ID NO: 3162107 - RNA, 14 nt, Human
aaaguauaauguuu

SEQ ID NO: 3162108 - RNA, 16 nt, Human
aaaguauaauguuuau

SEQ ID NO: 3162109 - RNA, 20 nt, Human
aaaguauaauguuuauuaaa

SEQ ID NO: 3162110 - RNA, 22 nt, Human
aaaguauaauguuuauuaaaug

SEQ ID NO: 3162111 - RNA, 23 nt, Human
aaaguauaauguuuauuaaaugc

SEQ ID NO: 3162112 - RNA, 12 nt, Human
aaaguaguacuu

SEQ ID NO: 3162113 - RNA, 19 nt, Human
aaaguaguacuucuucugu

SEQ ID NO: 3162114 - RNA, 20 nt, Human
aaaguaguacuucuucugua

SEQ ID NO: 3162115 - RNA, 21 nt, Human
aaaguaguacuucuucuguaa

SEQ ID NO: 3162116 - RNA, 21 nt, Human
aaaguacugagcagugauauu

SEQ ID NO: 3162117 - RNA, 20 nt, Human
aaauaaccuaauuaauauau

SEQ ID NO: 3162118 - RNA, 14 nt, Human
aaauaacuaaaaug

SEQ ID NO: 3162119 - RNA, 15 nt, Human
aaauaacuaaaaugu

SEQ ID NO: 3162120 - RNA, 14 nt, Human
aaauaacugaauuu

SEQ ID NO: 3162121 - RNA, 15 nt, Human
aaauaacugaauuug

SEQ ID NO: 3162122 - RNA, 18 nt, Human
aaauaacugaauuuggag

SEQ ID NO: 3162123 - RNA, 22 nt, Human
aaauaacuguaauuauuugaau

SEQ ID NO: 3162124 - RNA, 21 nt, Human
aaauaacuguaauuauuugaa

SEQ ID NO: 3162125 - RNA, 13 nt, Human
aaauaacuguaau

SEQ ID NO: 3162126 - RNA, 16 nt, Human
aaauaacuguaauuau

SEQ ID NO: 3162127 - RNA, 15 nt, Human
aaauaacuguaauua

SEQ ID NO: 3162128 - RNA, 14 nt, Human
aaaguuguacuuua

SEQ ID NO: 3162129 - RNA, 17 nt, Human
aaaguugguauuaauaa

SEQ ID NO: 3162130 - RNA, 18 nt, Human
aaaguugguauuaauaaa

SEQ ID NO: 3162131 - RNA, 17 nt, Human
aaaguuguaugaucugu

SEQ ID NO: 3162132 - RNA, 19 nt, Human
aaaguuguacuuuaaaaau

SEQ ID NO: 3162133 - RNA, 16 nt, Human
aaaguuguacuuuaaa

SEQ ID NO: 3162134 - RNA, 15 nt, Human
aaaguuguacuuuaa

SEQ ID NO: 3162135 - RNA, 19 nt, Human
aaaguuguaugaucugugc

SEQ ID NO: 3162136 - RNA, 18 nt, Human
aaaguuguaugaucugug

SEQ ID NO: 3162137 - RNA, 13 nt, Human
aaauaauaauuuu

SEQ ID NO: 3162138 - RNA, 19 nt, Human
aaauaauaccuuagaaggu

SEQ ID NO: 3162139 - RNA, 18 nt, Human
aaauaauaucucuaauau

SEQ ID NO: 3162140 - RNA, 21 nt, Human
aaauaauucuuuuuuauuaau

SEQ ID NO: 3162141 - RNA, 12 nt, Human
aaauaagaaaag

SEQ ID NO: 3162142 - RNA, 22 nt, Human
aaauaagaaaagauguagauuu

SEQ ID NO: 3162143 - RNA, 13 nt, Human
aaauaagaaaaga

SEQ ID NO: 3162144 - RNA, 14 nt, Human
aaauaauuuuguaa

SEQ ID NO: 3162145 - RNA, 13 nt, Human
aaauaauuuugua

SEQ ID NO: 3162146 - RNA, 16 nt, Human
aaauaauuuacuguga

SEQ ID NO: 3162147 - RNA, 19 nt, Human
aaauaauuuuaucucuuuc

SEQ ID NO: 3162148 - RNA, 12 nt, Human
aaauaauuuugu

SEQ ID NO: 3162149 - RNA, 22 nt, Human
aaauaauucuuuuuuauuaauc

SEQ ID NO: 3162150 - RNA, 15 nt, Human
guaaacaucucagag

SEQ ID NO: 3162151 - RNA, 18 nt, Human
aaauaauuuuauuccaga

SEQ ID NO: 3162152 - RNA, 14 nt, Human
guaaaccugucuga

SEQ ID NO: 3162153 - RNA, 19 nt, Human
ggacaggagaugcugugcc

SEQ ID NO: 3162154 - RNA, 18 nt, Human
ggacaggagaugcugugc

SEQ ID NO: 3162155 - RNA, 11 nt, Human
ggacccugagg

SEQ ID NO: 3162156 - RNA, 17 nt, Human
ggacccuccaaggccag

SEQ ID NO: 3162157 - RNA, 21 nt, Human
ggacccuccaaggccaggccu

SEQ ID NO: 3162158 - RNA, 18 nt, Human
ggacccuccaaggccagg

SEQ ID NO: 3162159 - RNA, 12 nt, Human
ggacccccugaa

SEQ ID NO: 3162160 - RNA, 14 nt, Human
ggaccucaggccug

SEQ ID NO: 3162161 - RNA, 15 nt, Human
ggaccucaggccugg

SEQ ID NO: 3162162 - RNA, 20 nt, Human
ggacguguuaugacuccaga

SEQ ID NO: 3162163 - RNA, 13 nt, Human
ggacguccuccaa

SEQ ID NO: 3162164 - RNA, 13 nt, Human
ggaccucaggccu

SEQ ID NO: 3162165 - RNA, 12 nt, Human
ggaccucaggcc

SEQ ID NO: 3162166 - RNA, 12 nt, Human
ggacccugaggc

SEQ ID NO: 3162167 - RNA, 13 nt, Human
ggacccugaggcc

SEQ ID NO: 3162168 - RNA, 19 nt, Human
ggacccugaggcccagagg

SEQ ID NO: 3162169 - RNA, 17 nt, Human
ggacccugccaggcaca

SEQ ID NO: 3162170 - RNA, 16 nt, Human
ggacccugaaaugugu

SEQ ID NO: 3162171 - RNA, 14 nt, Human
ggacccugaaaugu

SEQ ID NO: 3162172 - RNA, 24 nt, Human
ggacccugccaggcacaggcaggg

SEQ ID NO: 3162173 - RNA, 22 nt, Human
ggacccugccaggcacaggcag

SEQ ID NO: 3162174 - RNA, 21 nt, Human
ggacccugccaggcacaggca

SEQ ID NO: 3162175 - RNA, 20 nt, Human
ggacccugccaggcacaggc

SEQ ID NO: 3162176 - RNA, 18 nt, Human
ggacccugccaggcacag

SEQ ID NO: 3162177 - RNA, 22 nt, Human
ggacucauuuuaaaaaauggaa

SEQ ID NO: 3162178 - RNA, 16 nt, Human
ggacucaaugcacuga

SEQ ID NO: 3162179 - RNA, 24 nt, Human
ggacuaacuugucuuuggacccug

SEQ ID NO: 3162180 - RNA, 14 nt, Human
ggacuacaggugug

SEQ ID NO: 3162181 - RNA, 15 nt, Human
ggacucaaugcacug

SEQ ID NO: 3162182 - RNA, 20 nt, Human
ggacuaacuugucuuuggac

SEQ ID NO: 3162183 - RNA, 10 nt, Human
ggacuaaauu

SEQ ID NO: 3162184 - RNA, 16 nt, Human
ggacguggcaccuccu

SEQ ID NO: 3162185 - RNA, 13 nt, Human
ggagaaacuggaa

SEQ ID NO: 3162186 - RNA, 16 nt, Human
ggagaaaggaagggcu

SEQ ID NO: 3162187 - RNA, 14 nt, Human
ggacuuggaagcuc

SEQ ID NO: 3162188 - RNA, 20 nt, Human
ggaacugcugggcuuggcag

SEQ ID NO: 3162189 - RNA, 15 nt, Human
ggaacacucugagac

SEQ ID NO: 3162190 - RNA, 16 nt, Human
ggaacacucugagacu

SEQ ID NO: 3162191 - RNA, 12 nt, Human
ggaacacucuga

SEQ ID NO: 3162192 - RNA, 14 nt, Human
ggaacacucugaga

SEQ ID NO: 3162193 - RNA, 19 nt, Human
ggaacacuccuucacagau

SEQ ID NO: 3162194 - RNA, 13 nt, Human
ggaagagagaaag

SEQ ID NO: 3162195 - RNA, 13 nt, Human
ggaagagaaaaaa

SEQ ID NO: 3162196 - RNA, 18 nt, Human
ggaagacuuuggaaagag

SEQ ID NO: 3162197 - RNA, 15 nt, Human
ggaagagaaaaaaua

SEQ ID NO: 3162198 - RNA, 13 nt, Human
ggaagacuuugga

SEQ ID NO: 3162199 - RNA, 17 nt, Human
ggaagacuuuggaaaga

SEQ ID NO: 3162200 - RNA, 12 nt, Human
ggaagacuuugg

SEQ ID NO: 3162201 - RNA, 23 nt, Human
ggaagacaguucuacagaaaaac

SEQ ID NO: 3162202 - RNA, 13 nt, Human
ggaagacagcucu

SEQ ID NO: 3162203 - RNA, 14 nt, Human
ggaagacagcucuu

SEQ ID NO: 3162204 - RNA, 22 nt, Human
ggaagacaaugugaaaagaaaa

SEQ ID NO: 3162205 - RNA, 21 nt, Human
ggaagugugggucugugugug

SEQ ID NO: 3162206 - RNA, 22 nt, Human
ggaagugugggucugugugugu

SEQ ID NO: 3162207 - RNA, 12 nt, Human
ggaagugugggu

SEQ ID NO: 3162208 - RNA, 22 nt, Human
ggaaguuaaagggaagaaaaca

SEQ ID NO: 3162209 - RNA, 17 nt, Human
ggaaguuaaagugaggc

SEQ ID NO: 3162210 - RNA, 16 nt, Human
ggaaguuaaaagcaca

SEQ ID NO: 3162211 - RNA, 19 nt, Human
ggaaggaaacccagcucug

SEQ ID NO: 3162212 - RNA, 20 nt, Human
ggaaggaaacccagcucugg

SEQ ID NO: 3162213 - RNA, 16 nt, Human
ggaaggaaacccagcu

SEQ ID NO: 3162214 - RNA, 13 nt, Human
ggaagcugcuacu

SEQ ID NO: 3162215 - RNA, 23 nt, Human
ggaagcucagggccuggcucagg

SEQ ID NO: 3162216 - RNA, 11 nt, Human
ggaagcuccgc

SEQ ID NO: 3162217 - RNA, 22 nt, Human
ggaagcucagggccuggcucag

SEQ ID NO: 3162218 - RNA, 22 nt, Human
ggacaaggaugaucuaggaaga

SEQ ID NO: 3162219 - RNA, 23 nt, Human
ggacaaggaugaucuaggaagac

SEQ ID NO: 3162220 - RNA, 13 nt, Human
ggacaagagcagg

SEQ ID NO: 3162221 - RNA, 13 nt, Human
ggacaagcagugg

SEQ ID NO: 3162222 - RNA, 21 nt, Human
ggaaucuuuguaccaaaauuu

SEQ ID NO: 3162223 - RNA, 22 nt, Human
ggaaucuagccagugaacauaa

SEQ ID NO: 3162224 - RNA, 21 nt, Human
ggaaucuagccagugaacaua

SEQ ID NO: 3162225 - RNA, 18 nt, Human
ggaauaacauguaauuaa

SEQ ID NO: 3162226 - RNA, 16 nt, Human
ggaauccagacccggc

SEQ ID NO: 3162227 - RNA, 20 nt, Human
ggaaucauuguccagagcug

SEQ ID NO: 3162228 - RNA, 17 nt, Human
ggaaucauuguccagag

SEQ ID NO: 3162229 - RNA, 18 nt, Human
ggacacagcucuucucca

SEQ ID NO: 3162230 - RNA, 15 nt, Human
ggacacagcucuucu

SEQ ID NO: 3162231 - RNA, 14 nt, Human
ggacacagcucuuc

SEQ ID NO: 3162232 - RNA, 18 nt, Human
ggacaaggugcaggcagg

SEQ ID NO: 3162233 - RNA, 17 nt, Human
ggacaaggugcaggcag

SEQ ID NO: 3162234 - RNA, 19 nt, Human
ggacaaggacuaggguccu

SEQ ID NO: 3162235 - RNA, 22 nt, Human
ggacaagggaaaauaaaaaaag

SEQ ID NO: 3162236 - RNA, 17 nt, Human
ggacagcuccuucuguc

SEQ ID NO: 3162237 - RNA, 20 nt, Human
ggacagcuccuucuguccua

SEQ ID NO: 3162238 - RNA, 19 nt, Human
ggacagcuccuucuguccu

SEQ ID NO: 3162239 - RNA, 17 nt, Human
ggacacuaaccacgcug

SEQ ID NO: 3162240 - RNA, 18 nt, Human
gcuucacggaagagccuu

SEQ ID NO: 3162241 - RNA, 12 nt, Human
gcuucagccucc

SEQ ID NO: 3162242 - RNA, 19 nt, Human
gcuucagccucccacagug

SEQ ID NO: 3162243 - RNA, 18 nt, Human
gcuucagccucccacagu

SEQ ID NO: 3162244 - RNA, 14 nt, Human
gcuucagccuccca

SEQ ID NO: 3162245 - RNA, 21 nt, Human
gcuucagccucccacagugcu

SEQ ID NO: 3162246 - RNA, 15 nt, Human
gcuuauuacauuuua

SEQ ID NO: 3162247 - RNA, 17 nt, Human
gcuucacggaagagccu

SEQ ID NO: 3162248 - RNA, 15 nt, Human
gcuucacggaagagc

SEQ ID NO: 3162249 - RNA, 20 nt, Human
gcuucaaggauccugagcca

SEQ ID NO: 3162250 - RNA, 21 nt, Human
gcuucaaggauccugagccag

SEQ ID NO: 3162251 - RNA, 19 nt, Human
gcuucaaggauccugagcc

SEQ ID NO: 3162252 - RNA, 18 nt, Human
gcuucaaggauccugagc

SEQ ID NO: 3162253 - RNA, 17 nt, Human
gcuuauuuaauaugcuu

SEQ ID NO: 3162254 - RNA, 19 nt, Human
gcuuugacucuauaagcaa

SEQ ID NO: 3162255 - RNA, 20 nt, Human
gcuuugacucuauaagcaaa

SEQ ID NO: 3162256 - RNA, 23 nt, Human
gcuucuucagagacuccugcagg

SEQ ID NO: 3162257 - RNA, 16 nt, Human
gcuucuucugaggccu

SEQ ID NO: 3162258 - RNA, 15 nt, Human
gcuucuagggaccag

SEQ ID NO: 3162259 - RNA, 22 nt, Human
gcuuccucauaguaugguggcu

SEQ ID NO: 3162260 - RNA, 18 nt, Human
gcuuccuauaauuuugau

SEQ ID NO: 3162261 - RNA, 17 nt, Human
gcuuccuauaauuuuga

SEQ ID NO: 3162262 - RNA, 23 nt, Human
gcuuccuauaauuuugauagugg

SEQ ID NO: 3162263 - RNA, 13 nt, Human
gcuuguaguucuu

SEQ ID NO: 3162264 - RNA, 17 nt, Human
gcuuguaguucuuuaaa

SEQ ID NO: 3162265 - RNA, 16 nt, Human
gcuuguaguucuuuaa

SEQ ID NO: 3162266 - RNA, 17 nt, Human
gcuugucauagccagug

SEQ ID NO: 3162267 - RNA, 16 nt, Human
gcuugucauagccagu

SEQ ID NO: 3162268 - RNA, 18 nt, Human
gcuuucuuuuuaaagcuu

SEQ ID NO: 3162269 - RNA, 22 nt, Human
gcuuucuuuuuaaagcuuuuga

SEQ ID NO: 3162270 - RNA, 21 nt, Human
gcuuucuuucguuuguuuguu

SEQ ID NO: 3162271 - RNA, 20 nt, Human
gcuuucuuucguuuguuugu

SEQ ID NO: 3162272 - RNA, 22 nt, Human
gcuugaccuuuaagagaaauga

SEQ ID NO: 3162273 - RNA, 17 nt, Human
gcuucuucugaggccug

SEQ ID NO: 3162274 - RNA, 14 nt, Human
gcuugagcucagga

SEQ ID NO: 3162275 - RNA, 20 nt, Human
gcuuguaaauagcucaggug

SEQ ID NO: 3162276 - RNA, 23 nt, Human
gcuuguaacuaaaauaauuuugu

SEQ ID NO: 3162277 - RNA, 22 nt, Human
gcuuguaacuaaaauaauuuug

SEQ ID NO: 3162278 - RNA, 17 nt, Human
gcuuguaacuaaaauaa

SEQ ID NO: 3162279 - RNA, 13 nt, Human
gcugcuggcuggu

SEQ ID NO: 3162280 - RNA, 15 nt, Human
gcucugguccauaga

SEQ ID NO: 3162281 - RNA, 16 nt, Human
gcucugguccauagag

SEQ ID NO: 3162282 - RNA, 12 nt, Human
gcugcugaaggc

SEQ ID NO: 3162283 - RNA, 13 nt, Human
gcugcugaaggcu

SEQ ID NO: 3162284 - RNA, 14 nt, Human
gcugcugaaggcuc

SEQ ID NO: 3162285 - RNA, 15 nt, Human
gcugcugaaggcucg

SEQ ID NO: 3162286 - RNA, 15 nt, Human
gcuggaguaaucaga

SEQ ID NO: 3162287 - RNA, 20 nt, Human
gcuggccuggccccucaggg

SEQ ID NO: 3162288 - RNA, 22 nt, Human
gcuggagugcagugagccgaga

SEQ ID NO: 3162289 - RNA, 17 nt, Human
gcuggagugcagugagc

SEQ ID NO: 3162290 - RNA, 18 nt, Human
gcuggagugcagugagcc

SEQ ID NO: 3162291 - RNA, 20 nt, Human
gcuggcgugcaguggugcga

SEQ ID NO: 3162292 - RNA, 18 nt, Human
gcuggccuugugguccaa

SEQ ID NO: 3162293 - RNA, 19 nt, Human
gcuggccuugugguccaaa

SEQ ID NO: 3162294 - RNA, 21 nt, Human
gcuggccuugugguccaaaua

SEQ ID NO: 3162295 - RNA, 20 nt, Human
gcuggccuggggucaggccg

SEQ ID NO: 3162296 - RNA, 16 nt, Human
gcuggcuguuggcugg

SEQ ID NO: 3162297 - RNA, 15 nt, Human
gcuggcuguuggcug

SEQ ID NO: 3162298 - RNA, 22 nt, Human
gcuggcuggccuugugguccaa

SEQ ID NO: 3162299 - RNA, 13 nt, Human
gcuggcuccccug

SEQ ID NO: 3162300 - RNA, 14 nt, Human
gcuggcuccccugc

SEQ ID NO: 3162301 - RNA, 16 nt, Human
gcuggcuccccugcag

SEQ ID NO: 3162302 - RNA, 17 nt, Human
gcuggcuccccugcagc

SEQ ID NO: 3162303 - RNA, 18 nt, Human
gcuggcuccccugcagcc

SEQ ID NO: 3162304 - RNA, 20 nt, Human
gcuggcuccccugcagcccu

SEQ ID NO: 3162305 - RNA, 21 nt, Human
gcuggcuccccugcagcccug

SEQ ID NO: 3162306 - RNA, 22 nt, Human
gcuggcuccccugcagcccugg

SEQ ID NO: 3162307 - RNA, 14 nt, Human
gcuggcuccagccu

SEQ ID NO: 3162308 - RNA, 15 nt, Human
gcuggcuccagccug

SEQ ID NO: 3162309 - RNA, 13 nt, Human
gcugggcucccgu

SEQ ID NO: 3162310 - RNA, 23 nt, Human
gcugggguggggaccucaggccu

SEQ ID NO: 3162311 - RNA, 21 nt, Human
gcuggguggcaccagcagccu

SEQ ID NO: 3162312 - RNA, 22 nt, Human
gcuggguggcaccagcagccug

SEQ ID NO: 3162313 - RNA, 23 nt, Human
gcuggguggcaccagcagccugg

SEQ ID NO: 3162314 - RNA, 18 nt, Human
gcccugcagagggcacag

SEQ ID NO: 3162315 - RNA, 16 nt, Human
gcccugcagagggcac

SEQ ID NO: 3162316 - RNA, 12 nt, Human
gcccugcagcuc

SEQ ID NO: 3162317 - RNA, 15 nt, Human
gcccugcauuuucau

SEQ ID NO: 3162318 - RNA, 19 nt, Human
gcccugcagcucucaugcu

SEQ ID NO: 3162319 - RNA, 13 nt, Human
gcccugcagcucu

SEQ ID NO: 3162320 - RNA, 15 nt, Human
gcccugcccaccugg

SEQ ID NO: 3162321 - RNA, 11 nt, Human
gcccugcccug

SEQ ID NO: 3162322 - RNA, 11 nt, Human
gcccugccucc

SEQ ID NO: 3162323 - RNA, 12 nt, Human
gcccugcccugg

SEQ ID NO: 3162324 - RNA, 16 nt, Human
gcccugcccugguuuc

SEQ ID NO: 3162325 - RNA, 17 nt, Human
gcccugcccaccuggcc

SEQ ID NO: 3162326 - RNA, 20 nt, Human
gcccugcccaccuggccucu

SEQ ID NO: 3162327 - RNA, 21 nt, Human
gcccugcccaccuggccucug

SEQ ID NO: 3162328 - RNA, 22 nt, Human
gcccugcccaccuggccucugc

SEQ ID NO: 3162329 - RNA, 20 nt, Human
gcccuuagcagggaaacagc

SEQ ID NO: 3162330 - RNA, 19 nt, Human
gcccuuagcagggaaacag

SEQ ID NO: 3162331 - RNA, 22 nt, Human
gcccuguccugccuaaggcuga

SEQ ID NO: 3162332 - RNA, 12 nt, Human
gcccugccuccu

SEQ ID NO: 3162333 - RNA, 13 nt, Human
gcccugccuccuu

SEQ ID NO: 3162334 - RNA, 18 nt, Human
gcccugcccugguuuccu

SEQ ID NO: 3162335 - RNA, 22 nt, Human
gcccuuagcagggaaacagcua

SEQ ID NO: 3162336 - RNA, 20 nt, Human
gccgcagcccugcagagggc

SEQ ID NO: 3162337 - RNA, 19 nt, Human
gccgcagcccugcagaggg

SEQ ID NO: 3162338 - RNA, 23 nt, Human
gccgcaucucacagcuaugcaaa

SEQ ID NO: 3162339 - RNA, 15 nt, Human
gccgcaucucacagc

SEQ ID NO: 3162340 - RNA, 18 nt, Human
gccgcaucucacagcuau

SEQ ID NO: 3162341 - RNA, 20 nt, Human
gccuaggugacagagugaga

SEQ ID NO: 3162342 - RNA, 23 nt, Human
gccgccgcuagguagagucugag

SEQ ID NO: 3162343 - RNA, 22 nt, Human
gccgccggcaauaaaagcccag

SEQ ID NO: 3162344 - RNA, 23 nt, Human
gccgccggcaauaaaagcccagg

SEQ ID NO: 3162345 - RNA, 20 nt, Human
gccgccgcuagguagagucu

SEQ ID NO: 3162346 - RNA, 23 nt, Human
gccuaggauucacaccccaccug

SEQ ID NO: 3162347 - RNA, 22 nt, Human
gccuaggauucacaccccaccu

SEQ ID NO: 3162348 - RNA, 21 nt, Human
gccuaggauucacaccccacc

SEQ ID NO: 3162349 - RNA, 18 nt, Human
gccuaggauucacacccc

SEQ ID NO: 3162350 - RNA, 15 nt, Human
gccuaggugacagag

SEQ ID NO: 3162351 - RNA, 14 nt, Human
gccuaggugacaga

SEQ ID NO: 3162352 - RNA, 13 nt, Human
gccuaggugacag

SEQ ID NO: 3162353 - RNA, 21 nt, Human
gccccugccuuggggucaggu

SEQ ID NO: 3162354 - RNA, 17 nt, Human
gccccugcuacugccaa

SEQ ID NO: 3162355 - RNA, 14 nt, Human
gccccugcuacugc

SEQ ID NO: 3162356 - RNA, 19 nt, Human
gcccggugggggggcagag

SEQ ID NO: 3162357 - RNA, 23 nt, Human
gcccgggcucugccucccaucac

SEQ ID NO: 3162358 - RNA, 21 nt, Human
gcccgggcucugccucccauc

SEQ ID NO: 3162359 - RNA, 16 nt, Human
gcccuaaugcgcaggc

SEQ ID NO: 3162360 - RNA, 17 nt, Human
gcccuaaugcgcaggcu

SEQ ID NO: 3162361 - RNA, 19 nt, Human
gcccuaaugcgcaggcugg

SEQ ID NO: 3162362 - RNA, 20 nt, Human
gcccuaaugcgcaggcuggc

SEQ ID NO: 3162363 - RNA, 16 nt, Human
gccccugccagacccc

SEQ ID NO: 3162364 - RNA, 11 nt, Human
gccccugccag

SEQ ID NO: 3162365 - RNA, 16 nt, Human
gccccugccacccugg

SEQ ID NO: 3162366 - RNA, 17 nt, Human
gccccugccacccuggg

SEQ ID NO: 3162367 - RNA, 20 nt, Human
gccugcccaggccccugcca

SEQ ID NO: 3162368 - RNA, 15 nt, Human
gccugcccaggcccc

SEQ ID NO: 3162369 - RNA, 12 nt, Human
gccugcccaggc

SEQ ID NO: 3162370 - RNA, 22 nt, Human
gccugcccaggccccugccacc

SEQ ID NO: 3162371 - RNA, 17 nt, Human
gccucccaaagugcugg

SEQ ID NO: 3162372 - RNA, 13 nt, Human
gccuccugugugu

SEQ ID NO: 3162373 - RNA, 16 nt, Human
gccucccaaagugcug

SEQ ID NO: 3162374 - RNA, 11 nt, Human
gccuccaugcu

SEQ ID NO: 3162375 - RNA, 23 nt, Human
gccuccugugugugcgccuacag

SEQ ID NO: 3162376 - RNA, 19 nt, Human
gccuccugugugugcgccu

SEQ ID NO: 3162377 - RNA, 17 nt, Human
gccucgaacuggcugca

SEQ ID NO: 3162378 - RNA, 22 nt, Human
gccucgaacuggcugcaaaggg

SEQ ID NO: 3162379 - RNA, 20 nt, Human
gccucgaacuggcugcaaag

SEQ ID NO: 3162380 - RNA, 16 nt, Human
gccucuuaugggcugg

SEQ ID NO: 3162381 - RNA, 17 nt, Human
gccucuuaugggcuggg

SEQ ID NO: 3162382 - RNA, 18 nt, Human
gccucuuaugggcugggu

SEQ ID NO: 3162383 - RNA, 21 nt, Human
gccucuuaugggcuggguucu

SEQ ID NO: 3162384 - RNA, 14 nt, Human
gccucuuggguuca

SEQ ID NO: 3162385 - RNA, 20 nt, Human
gccucuucccgccgcccagc

SEQ ID NO: 3162386 - RNA, 12 nt, Human
gccucuugucuu

SEQ ID NO: 3162387 - RNA, 14 nt, Human
gccugcccaggccc

SEQ ID NO: 3162388 - RNA, 13 nt, Human
gccugcccaggcc

SEQ ID NO: 3162389 - RNA, 17 nt, Human
gccucuuucccuuccag

SEQ ID NO: 3162390 - RNA, 14 nt, Human
gccucuuucccuuc

SEQ ID NO: 3162391 - RNA, 12 nt, Human
gccucuuucccu

SEQ ID NO: 3162392 - RNA, 23 nt, Human
gccucuugucuuccuauuucaga

SEQ ID NO: 3162393 - RNA, 16 nt, Human
gccucuugucuuccua

SEQ ID NO: 3162394 - RNA, 23 nt, Human
gccuggcucacacuuggcucuga

SEQ ID NO: 3162395 - RNA, 20 nt, Human
gccuggccugagcugggaug

SEQ ID NO: 3162396 - RNA, 14 nt, Human
gccuggccugagcu

SEQ ID NO: 3162397 - RNA, 18 nt, Human
gccuggccugagcuggga

SEQ ID NO: 3162398 - RNA, 13 nt, Human
gccuggccugagc

SEQ ID NO: 3162399 - RNA, 15 nt, Human
gccuguugggccagg

SEQ ID NO: 3162400 - RNA, 16 nt, Human
gccuguugggccagga

SEQ ID NO: 3162401 - RNA, 18 nt, Human
gccuguugggccaggagc

SEQ ID NO: 3162402 - RNA, 20 nt, Human
gccuguugggccaggagccu

SEQ ID NO: 3162403 - RNA, 14 nt, Human
gccuguugggccag

SEQ ID NO: 3162404 - RNA, 23 nt, Human
gccuguucccauucuugcauggc

SEQ ID NO: 3162405 - RNA, 19 nt, Human
gccuguucccauucuugca

SEQ ID NO: 3162406 - RNA, 17 nt, Human
gccugugccucugggac

SEQ ID NO: 3162407 - RNA, 16 nt, Human
gccugugccucuggga

SEQ ID NO: 3162408 - RNA, 13 nt, Human
gccuggcucaggu

SEQ ID NO: 3162409 - RNA, 18 nt, Human
gccugugccucugggacu

SEQ ID NO: 3162410 - RNA, 20 nt, Human
gccuucggccuccauccuga

SEQ ID NO: 3162411 - RNA, 19 nt, Human
gccuucggccuccauccug

SEQ ID NO: 3162412 - RNA, 21 nt, Human
gccuucggccuccauccugag

SEQ ID NO: 3162413 - RNA, 16 nt, Human
gccuugaccauucucc

SEQ ID NO: 3162414 - RNA, 17 nt, Human
gccuugaccauucucca

SEQ ID NO: 3162415 - RNA, 19 nt, Human
gccuugaccauucuccacc

SEQ ID NO: 3162416 - RNA, 20 nt, Human
gccuugaccauucuccaccu

SEQ ID NO: 3162417 - RNA, 15 nt, Human
gcgagcccugguggc

SEQ ID NO: 3162418 - RNA, 17 nt, Human
gcgagcccugguggcag

SEQ ID NO: 3162419 - RNA, 23 nt, Human
gccuugcccacuccugcucugcu

SEQ ID NO: 3162420 - RNA, 22 nt, Human
gccuugcccacuccugcucugc

SEQ ID NO: 3162421 - RNA, 18 nt, Human
gccuugcccacuccugcu

SEQ ID NO: 3162422 - RNA, 17 nt, Human
gccuugcccacuccugc

SEQ ID NO: 3162423 - RNA, 22 nt, Human
gcgaucuggguucacugcaacc

SEQ ID NO: 3162424 - RNA, 18 nt, Human
gcgcaagggaggcccagc

SEQ ID NO: 3162425 - RNA, 14 nt, Human
gcgcacagcugcuc

SEQ ID NO: 3162426 - RNA, 19 nt, Human
gcgcaagggaggcccagcg

SEQ ID NO: 3162427 - RNA, 23 nt, Human
gcucuaaaauauuuaugaagaaa

SEQ ID NO: 3162428 - RNA, 19 nt, Human
gcucuaaaauauuuaugaa

SEQ ID NO: 3162429 - RNA, 15 nt, Human
gcucuaaaauauuua

SEQ ID NO: 3162430 - RNA, 13 nt, Human
gcucuaaaauauu

SEQ ID NO: 3162431 - RNA, 11 nt, Human
gcucugcccuu

SEQ ID NO: 3162432 - RNA, 22 nt, Human
gcucugccccagcuugggcaga

SEQ ID NO: 3162433 - RNA, 13 nt, Human
gcucugccccagc

SEQ ID NO: 3162434 - RNA, 23 nt, Human
gcucugcaagaauugaagcagga

SEQ ID NO: 3162435 - RNA, 17 nt, Human
gcucugaucauccacug

SEQ ID NO: 3162436 - RNA, 23 nt, Human
gcucugaucauccacugugccau

SEQ ID NO: 3162437 - RNA, 17 nt, Human
gcucccccuccaccugc

SEQ ID NO: 3162438 - RNA, 18 nt, Human
gcuccccucggagaagag

SEQ ID NO: 3162439 - RNA, 21 nt, Human
gcuccccucggagaagagcug

SEQ ID NO: 3162440 - RNA, 15 nt, Human
gcuccccugcagccc

SEQ ID NO: 3162441 - RNA, 16 nt, Human
gcuccccugcagcccu

SEQ ID NO: 3162442 - RNA, 17 nt, Human
gcuccccugcagcccug

SEQ ID NO: 3162443 - RNA, 19 nt, Human
gcuccccugcagcccuggc

SEQ ID NO: 3162444 - RNA, 20 nt, Human
gcuccccuuccccuuccuuc

SEQ ID NO: 3162445 - RNA, 16 nt, Human
gcuccccuuccccuuc

SEQ ID NO: 3162446 - RNA, 13 nt, Human
gcuccccuucccc

SEQ ID NO: 3162447 - RNA, 19 nt, Human
gcucccgccuccaaccccu

SEQ ID NO: 3162448 - RNA, 13 nt, Human
gcucccgccucca

SEQ ID NO: 3162449 - RNA, 16 nt, Human
gcuccugagcccccag

SEQ ID NO: 3162450 - RNA, 12 nt, Human
gcuccugagccc

SEQ ID NO: 3162451 - RNA, 12 nt, Human
gcuccugccacc

SEQ ID NO: 3162452 - RNA, 18 nt, Human
gcuccugccaccacgccc

SEQ ID NO: 3162453 - RNA, 18 nt, Human
gcuccuggcccacugcau

SEQ ID NO: 3162454 - RNA, 19 nt, Human
gcuccuggcccacugcauc

SEQ ID NO: 3162455 - RNA, 20 nt, Human
gcuccuggcccacugcaucg

SEQ ID NO: 3162456 - RNA, 14 nt, Human
gcuccuggcccacu

SEQ ID NO: 3162457 - RNA, 15 nt, Human
gcuccuggcccacug

SEQ ID NO: 3162458 - RNA, 18 nt, Human
gcuccacuuggucuguga

SEQ ID NO: 3162459 - RNA, 18 nt, Human
gcuccagcucaccagccc

SEQ ID NO: 3162460 - RNA, 17 nt, Human
gcuccagcucaccagcc

SEQ ID NO: 3162461 - RNA, 21 nt, Human
gcuccagcucaccagccccag

SEQ ID NO: 3162462 - RNA, 15 nt, Human
gcucccacaggcccu

SEQ ID NO: 3162463 - RNA, 20 nt, Human
gcuccagcucaccagcccca

SEQ ID NO: 3162464 - RNA, 21 nt, Human
gcucccacaggcccuuccucu

SEQ ID NO: 3162465 - RNA, 20 nt, Human
gcucccacaggcccuuccuc

SEQ ID NO: 3162466 - RNA, 17 nt, Human
gcucccacaggcccuuc

SEQ ID NO: 3162467 - RNA, 16 nt, Human
gcucccacaggcccuu

SEQ ID NO: 3162468 - RNA, 13 nt, Human
gcucccaggagcc

SEQ ID NO: 3162469 - RNA, 17 nt, Human
gcucccacuucugccag

SEQ ID NO: 3162470 - RNA, 18 nt, Human
gcucccacuucugccaga

SEQ ID NO: 3162471 - RNA, 22 nt, Human
gcucccacaggcccuuccucuc

SEQ ID NO: 3162472 - RNA, 21 nt, Human
gcucccaggagccugcccagc

SEQ ID NO: 3162473 - RNA, 20 nt, Human
gcucccaggagccugcccag

SEQ ID NO: 3162474 - RNA, 13 nt, Human
gcucccccagcuc

SEQ ID NO: 3162475 - RNA, 20 nt, Human
gcucccccagcuccccccac

SEQ ID NO: 3162476 - RNA, 14 nt, Human
gcucccccagcucc

SEQ ID NO: 3162477 - RNA, 11 nt, Human
gcuccccccag

SEQ ID NO: 3162478 - RNA, 15 nt, Human
gcuccacuuggucug

SEQ ID NO: 3162479 - RNA, 23 nt, Human
gcuccaccccgcaagcaccaucc

SEQ ID NO: 3162480 - RNA, 16 nt, Human
gcuaggccuggccaga

SEQ ID NO: 3162481 - RNA, 23 nt, Human
gcuaggccuggccagaugcacca

SEQ ID NO: 3162482 - RNA, 17 nt, Human
gcuaggccuggccagau

SEQ ID NO: 3162483 - RNA, 16 nt, Human
gcuagucuuaagaacu

SEQ ID NO: 3162484 - RNA, 14 nt, Human
gcuaugagggccuu

SEQ ID NO: 3162485 - RNA, 21 nt, Human
gcuagugugguguuuccuggc

SEQ ID NO: 3162486 - RNA, 22 nt, Human
gcuagugugguguuuccuggca

SEQ ID NO: 3162487 - RNA, 19 nt, Human
gcuauucaguaauaacucu

SEQ ID NO: 3162488 - RNA, 18 nt, Human
gcuaugauguuaguuuuc

SEQ ID NO: 3162489 - RNA, 14 nt, Human
gcucagagagggug

SEQ ID NO: 3162490 - RNA, 13 nt, Human
gcucagagagggu

SEQ ID NO: 3162491 - RNA, 20 nt, Human
gcucacugcauccuccgccu

SEQ ID NO: 3162492 - RNA, 17 nt, Human
gcucacugcagccuccg

SEQ ID NO: 3162493 - RNA, 23 nt, Human
gcucagguggggucacucuggca

SEQ ID NO: 3162494 - RNA, 14 nt, Human
gcucaggugucccu

SEQ ID NO: 3162495 - RNA, 16 nt, Human
gcucaggugucccugc

SEQ ID NO: 3162496 - RNA, 20 nt, Human
gcuauucaguaauaacucua

SEQ ID NO: 3162497 - RNA, 18 nt, Human
gcuauucaguaauaacuc

SEQ ID NO: 3162498 - RNA, 15 nt, Human
gcuauggccugugcg

SEQ ID NO: 3162499 - RNA, 21 nt, Human
gcuauuuuaaaccaauugcag

SEQ ID NO: 3162500 - RNA, 14 nt, Human
gcucacugcagccu

SEQ ID NO: 3162501 - RNA, 13 nt, Human
gcucacugcagcc

SEQ ID NO: 3162502 - RNA, 12 nt, Human
gcucacugcagc

SEQ ID NO: 3162503 - RNA, 11 nt, Human
gcucacugcag

SEQ ID NO: 3162504 - RNA, 16 nt, Human
gcucacugcagccuca

SEQ ID NO: 3162505 - RNA, 15 nt, Human
gcucacugcagccuc

SEQ ID NO: 3162506 - RNA, 17 nt, Human
gcucacugcagccucaa

SEQ ID NO: 3162507 - RNA, 16 nt, Human
gcucacugcauccucc

SEQ ID NO: 3162508 - RNA, 22 nt, Human
gcuaauucuuugaccuguuggg

SEQ ID NO: 3162509 - RNA, 15 nt, Human
gcuaaugggacacua

SEQ ID NO: 3162510 - RNA, 13 nt, Human
gcuaaugggacac

SEQ ID NO: 3162511 - RNA, 17 nt, Human
gcuaaucuugugaaaau

SEQ ID NO: 3162512 - RNA, 19 nt, Human
gcuaaacguguauguuuuu

SEQ ID NO: 3162513 - RNA, 18 nt, Human
gcuaaacguguauguuuu

SEQ ID NO: 3162514 - RNA, 23 nt, Human
gcuaagugauccucccaccucag

SEQ ID NO: 3162515 - RNA, 17 nt, Human
gcuaaaauguuuucagc

SEQ ID NO: 3162516 - RNA, 16 nt, Human
gcuaaaauguuuucag

SEQ ID NO: 3162517 - RNA, 15 nt, Human
gcuaaaauguuuuca

SEQ ID NO: 3162518 - RNA, 14 nt, Human
gcuaaaauguuuuc

SEQ ID NO: 3162519 - RNA, 13 nt, Human
gcuaaaauguuuu

SEQ ID NO: 3162520 - RNA, 12 nt, Human
gcuaaaauguuu

SEQ ID NO: 3162521 - RNA, 14 nt, Human
gcuaagugcuuauu

SEQ ID NO: 3162522 - RNA, 14 nt, Human
gcuaaucagcauuc

SEQ ID NO: 3162523 - RNA, 22 nt, Human
gcuaaucagcauucucacuccu

SEQ ID NO: 3162524 - RNA, 17 nt, Human
gcuaaucagcauucuca

SEQ ID NO: 3162525 - RNA, 16 nt, Human
gcuaaucagcauucuc

SEQ ID NO: 3162526 - RNA, 23 nt, Human
gcgugcacacaccagagcccacc

SEQ ID NO: 3162527 - RNA, 19 nt, Human
gcgugcacacaccagagcc

SEQ ID NO: 3162528 - RNA, 18 nt, Human
gcuaaaaaagcugaauca

SEQ ID NO: 3162529 - RNA, 18 nt, Human
gcuaaaaaugagcuugau

SEQ ID NO: 3162530 - RNA, 22 nt, Human
gcuaaaaaugagcuugauuaaa

SEQ ID NO: 3162531 - RNA, 22 nt, Human
gcgggaggauguucugggacac

SEQ ID NO: 3162532 - RNA, 21 nt, Human
gcgggaggauguucugggaca

SEQ ID NO: 3162533 - RNA, 20 nt, Human
gcgugcacacaccagagccc

SEQ ID NO: 3162534 - RNA, 20 nt, Human
gcgggaggauguucugggac

SEQ ID NO: 3162535 - RNA, 16 nt, Human
gcuagaacucccuuuc

SEQ ID NO: 3162536 - RNA, 20 nt, Human
gcuacugccaaccucgcucc

SEQ ID NO: 3162537 - RNA, 12 nt, Human
gcuagaacuccc

SEQ ID NO: 3162538 - RNA, 13 nt, Human
gcuagaacucccu

SEQ ID NO: 3162539 - RNA, 14 nt, Human
gcuagaacucccuu

SEQ ID NO: 3162540 - RNA, 15 nt, Human
gcuagaacucccuuu

SEQ ID NO: 3162541 - RNA, 19 nt, Human
gcuacucgugagcgccagu

SEQ ID NO: 3162542 - RNA, 19 nt, Human
gcuacugaaaggcaguagu

SEQ ID NO: 3162543 - RNA, 19 nt, Human
cauccauggggcugauugu

SEQ ID NO: 3162544 - RNA, 21 nt, Human
cauccauggggucucucacag

SEQ ID NO: 3162545 - RNA, 20 nt, Human
cauccauggggucucucaca

SEQ ID NO: 3162546 - RNA, 19 nt, Human
cauccauggggucucucac

SEQ ID NO: 3162547 - RNA, 11 nt, Human
cauccaugggg

SEQ ID NO: 3162548 - RNA, 22 nt, Human
cauccauggggucucucacaga

SEQ ID NO: 3162549 - RNA, 17 nt, Human
caucccagccccaauga

SEQ ID NO: 3162550 - RNA, 14 nt, Human
caucaggccaggcc

SEQ ID NO: 3162551 - RNA, 16 nt, Human
caucaggccaggcccu

SEQ ID NO: 3162552 - RNA, 19 nt, Human
caucaggccaggcccucug

SEQ ID NO: 3162553 - RNA, 15 nt, Human
caucaggccaggccc

SEQ ID NO: 3162554 - RNA, 19 nt, Human
caucccauaugccugggca

SEQ ID NO: 3162555 - RNA, 14 nt, Human
cauccccuguagag

SEQ ID NO: 3162556 - RNA, 17 nt, Human
cauccuucccacucugu

SEQ ID NO: 3162557 - RNA, 16 nt, Human
cauccuucccacucug

SEQ ID NO: 3162558 - RNA, 15 nt, Human
cauccuucccacucu

SEQ ID NO: 3162559 - RNA, 20 nt, Human
caucuggguagcuguaaggc

SEQ ID NO: 3162560 - RNA, 18 nt, Human
caucuggguagcuguaag

SEQ ID NO: 3162561 - RNA, 16 nt, Human
caucuggguagcugua

SEQ ID NO: 3162562 - RNA, 20 nt, Human
cauauucaggaagcucaggg

SEQ ID NO: 3162563 - RNA, 14 nt, Human
cauauucaggaagc

SEQ ID NO: 3162564 - RNA, 15 nt, Human
cauauucaggaagcu

SEQ ID NO: 3162565 - RNA, 22 nt, Human
cauaugccugggcagaaggaag

SEQ ID NO: 3162566 - RNA, 13 nt, Human
cauaugccugggc

SEQ ID NO: 3162567 - RNA, 15 nt, Human
cauaugccugggcag

SEQ ID NO: 3162568 - RNA, 20 nt, Human
cauaugccugggcagaagga

SEQ ID NO: 3162569 - RNA, 19 nt, Human
cauaauugccaauugaaac

SEQ ID NO: 3162570 - RNA, 18 nt, Human
cauaauuuaguuguuucu

SEQ ID NO: 3162571 - RNA, 19 nt, Human
cauaauuuaguuguuucua

SEQ ID NO: 3162572 - RNA, 20 nt, Human
cauaauuuaguuguuucuag

SEQ ID NO: 3162573 - RNA, 14 nt, Human
cauaauucuuauua

SEQ ID NO: 3162574 - RNA, 13 nt, Human
cauaauucuuauu

SEQ ID NO: 3162575 - RNA, 22 nt, Human
cauaauucugaaguuauauuuc

SEQ ID NO: 3162576 - RNA, 18 nt, Human
cauaauucugaaguuaua

SEQ ID NO: 3162577 - RNA, 17 nt, Human
cauaauucugaaguuau

SEQ ID NO: 3162578 - RNA, 13 nt, Human
cauacacacgcug

SEQ ID NO: 3162579 - RNA, 19 nt, Human
cauacacacgcugccuucg

SEQ ID NO: 3162580 - RNA, 17 nt, Human
cauacacacgcugccuu

SEQ ID NO: 3162581 - RNA, 16 nt, Human
cauacacacgcugccu

SEQ ID NO: 3162582 - RNA, 14 nt, Human
cauaauuuguuucc

SEQ ID NO: 3162583 - RNA, 16 nt, Human
cauaauuuguuuccag

SEQ ID NO: 3162584 - RNA, 16 nt, Human
cauagcucuguacauc

SEQ ID NO: 3162585 - RNA, 16 nt, Human
cauagcuguacuucuu

SEQ ID NO: 3162586 - RNA, 21 nt, Human
cauagcuguacuucuugaaua

SEQ ID NO: 3162587 - RNA, 22 nt, Human
cauagcagagaaugaaagggcc

SEQ ID NO: 3162588 - RNA, 19 nt, Human
cauagcagagaaugaaagg

SEQ ID NO: 3162589 - RNA, 22 nt, Human
cauagcaccuaacaacauugua

SEQ ID NO: 3162590 - RNA, 22 nt, Human
caugcacacaauuagauuucuc

SEQ ID NO: 3162591 - RNA, 22 nt, Human
caugauguuuuuaaaaucuuau

SEQ ID NO: 3162592 - RNA, 21 nt, Human
caugauguuuuuaaaaucuua

SEQ ID NO: 3162593 - RNA, 20 nt, Human
caugauguuuuuaaaaucuu

SEQ ID NO: 3162594 - RNA, 19 nt, Human
caugauguuuuuaaaaucu

SEQ ID NO: 3162595 - RNA, 18 nt, Human
caugauguuuuuaaaauc

SEQ ID NO: 3162596 - RNA, 14 nt, Human
caugcacacucaug

SEQ ID NO: 3162597 - RNA, 19 nt, Human
caugcacacucaugugcaa

SEQ ID NO: 3162598 - RNA, 22 nt, Human
caugauuaaccacuucagcuga

SEQ ID NO: 3162599 - RNA, 23 nt, Human
caugauuaaccacuucagcugac

SEQ ID NO: 3162600 - RNA, 23 nt, Human
caugacaguucauucagggccga

SEQ ID NO: 3162601 - RNA, 17 nt, Human
caugauguuuuuaaaau

SEQ ID NO: 3162602 - RNA, 14 nt, Human
caugacagaaaaua

SEQ ID NO: 3162603 - RNA, 16 nt, Human
caugacagaaaauaug

SEQ ID NO: 3162604 - RNA, 15 nt, Human
caugacagaaaauau

SEQ ID NO: 3162605 - RNA, 21 nt, Human
caugacagaaaauauguauua

SEQ ID NO: 3162606 - RNA, 19 nt, Human
caugacagaaaauauguau

SEQ ID NO: 3162607 - RNA, 12 nt, Human
caugcugcccug

SEQ ID NO: 3162608 - RNA, 13 nt, Human
caugcugcccugu

SEQ ID NO: 3162609 - RNA, 13 nt, Human
caugcuccuggcc

SEQ ID NO: 3162610 - RNA, 19 nt, Human
caugcuccccugugccagc

SEQ ID NO: 3162611 - RNA, 18 nt, Human
caugcuccccugugccag

SEQ ID NO: 3162612 - RNA, 16 nt, Human
caugcacgugugugca

SEQ ID NO: 3162613 - RNA, 18 nt, Human
caugcuauucacaauuau

SEQ ID NO: 3162614 - RNA, 14 nt, Human
caugcucaaugaaa

SEQ ID NO: 3162615 - RNA, 16 nt, Human
caugcuccccugugcc

SEQ ID NO: 3162616 - RNA, 15 nt, Human
caugcuccccugugc

SEQ ID NO: 3162617 - RNA, 21 nt, Human
caugacacgaauauugcugau

SEQ ID NO: 3162618 - RNA, 23 nt, Human
caugacacgaauauugcugaugg

SEQ ID NO: 3162619 - RNA, 14 nt, Human
caugaaggagugaa

SEQ ID NO: 3162620 - RNA, 22 nt, Human
caugaaggaugccaagaaguuu

SEQ ID NO: 3162621 - RNA, 16 nt, Human
caugcugccccugccu

SEQ ID NO: 3162622 - RNA, 18 nt, Human
cauggcaugcuuaaauuu

SEQ ID NO: 3162623 - RNA, 19 nt, Human
cauggcaugcuuaaauuuu

SEQ ID NO: 3162624 - RNA, 14 nt, Human
caugcugcccugug

SEQ ID NO: 3162625 - RNA, 13 nt, Human
cauggccaggugg

SEQ ID NO: 3162626 - RNA, 13 nt, Human
cauuaucucaaaa

SEQ ID NO: 3162627 - RNA, 21 nt, Human
cauuagugagacauauuuaca

SEQ ID NO: 3162628 - RNA, 12 nt, Human
cauuaucucaaa

SEQ ID NO: 3162629 - RNA, 14 nt, Human
cauuaguacuuuau

SEQ ID NO: 3162630 - RNA, 15 nt, Human
cauuaguacuuuaua

SEQ ID NO: 3162631 - RNA, 22 nt, Human
cauuaguacuuuauagaagaau

SEQ ID NO: 3162632 - RNA, 20 nt, Human
cauuaguacuuuauagaaga

SEQ ID NO: 3162633 - RNA, 19 nt, Human
cauguccaagaagcccagg

SEQ ID NO: 3162634 - RNA, 20 nt, Human
cauguccaagaagcccagga

SEQ ID NO: 3162635 - RNA, 18 nt, Human
cauguccaagaagcccag

SEQ ID NO: 3162636 - RNA, 16 nt, Human
cauguccaagaagccc

SEQ ID NO: 3162637 - RNA, 12 nt, Human
cauguuggccag

SEQ ID NO: 3162638 - RNA, 17 nt, Human
cauguugccaaaauggu

SEQ ID NO: 3162639 - RNA, 12 nt, Human
cauuccuguucc

SEQ ID NO: 3162640 - RNA, 13 nt, Human
cauuagugggaaa

SEQ ID NO: 3162641 - RNA, 22 nt, Human
cauucgcuacuaugauuuaauu

SEQ ID NO: 3162642 - RNA, 18 nt, Human
cauuccuuuuuauuuaua

SEQ ID NO: 3162643 - RNA, 14 nt, Human
cauucuaucuacug

SEQ ID NO: 3162644 - RNA, 15 nt, Human
cauucuaucuacuga

SEQ ID NO: 3162645 - RNA, 18 nt, Human
cauucuaucuacugauuu

SEQ ID NO: 3162646 - RNA, 18 nt, Human
cauucuagguuugcaaga

SEQ ID NO: 3162647 - RNA, 21 nt, Human
cauucgggccccaccugcagc

SEQ ID NO: 3162648 - RNA, 13 nt, Human
cauucucacuccu

SEQ ID NO: 3162649 - RNA, 21 nt, Human
cauucucaagggacguccucc

SEQ ID NO: 3162650 - RNA, 16 nt, Human
cauucucaagggacgu

SEQ ID NO: 3162651 - RNA, 22 nt, Human
cauucucaagggacguccucca

SEQ ID NO: 3162652 - RNA, 14 nt, Human
cauucucaagggac

SEQ ID NO: 3162653 - RNA, 22 nt, Human
cauucgggccccaccugcagcu

SEQ ID NO: 3162654 - RNA, 23 nt, Human
cauuguaaaagcauuuuguaaua

SEQ ID NO: 3162655 - RNA, 22 nt, Human
cauuguaaaagcauuuuguaau

SEQ ID NO: 3162656 - RNA, 15 nt, Human
cauuguaaaagcauu

SEQ ID NO: 3162657 - RNA, 21 nt, Human
cauuguaaaagcauuuuguaa

SEQ ID NO: 3162658 - RNA, 20 nt, Human
cauuguaaaagcauuuugua

SEQ ID NO: 3162659 - RNA, 16 nt, Human
cauuggaaauuucacg

SEQ ID NO: 3162660 - RNA, 14 nt, Human
cauuggaaauuuca

SEQ ID NO: 3162661 - RNA, 19 nt, Human
cauuggaaauuucacguca

SEQ ID NO: 3162662 - RNA, 13 nt, Human
cauuggaaauuuc

SEQ ID NO: 3162663 - RNA, 16 nt, Human
cauugcuucuucugag

SEQ ID NO: 3162664 - RNA, 15 nt, Human
cauugcuucuucuga

SEQ ID NO: 3162665 - RNA, 13 nt, Human
cauugcuucuucu

SEQ ID NO: 3162666 - RNA, 17 nt, Human
cauugcuuuuaaaacua

SEQ ID NO: 3162667 - RNA, 21 nt, Human
cauugcuuuuaaaacuacuua

SEQ ID NO: 3162668 - RNA, 17 nt, Human
cauuuggagggccuggg

SEQ ID NO: 3162669 - RNA, 15 nt, Human
cauuuggauuggaug

SEQ ID NO: 3162670 - RNA, 18 nt, Human
cauuuggagggccugggc

SEQ ID NO: 3162671 - RNA, 17 nt, Human
cauuugucacacacuuu

SEQ ID NO: 3162672 - RNA, 20 nt, Human
cauuugucauuuucauuagc

SEQ ID NO: 3162673 - RNA, 18 nt, Human
cauuugucauuuucauua

SEQ ID NO: 3162674 - RNA, 17 nt, Human
cauuugucauuuucauu

SEQ ID NO: 3162675 - RNA, 15 nt, Human
cauuugucauuuuca

SEQ ID NO: 3162676 - RNA, 14 nt, Human
cauuugucauuuuc

SEQ ID NO: 3162677 - RNA, 12 nt, Human
cauuugucauuu

SEQ ID NO: 3162678 - RNA, 14 nt, Human
cauuugugaaauga

SEQ ID NO: 3162679 - RNA, 14 nt, Human
cauuuauucugcuc

SEQ ID NO: 3162680 - RNA, 19 nt, Human
cauuuaugguaaucauauu

SEQ ID NO: 3162681 - RNA, 16 nt, Human
cauuuaugguaaucau

SEQ ID NO: 3162682 - RNA, 22 nt, Human
cauuuaugguaaucauauuaga

SEQ ID NO: 3162683 - RNA, 20 nt, Human
cauuuaugguaaucauauua

SEQ ID NO: 3162684 - RNA, 22 nt, Human
cauuucauaauuuguuuccagc

SEQ ID NO: 3162685 - RNA, 21 nt, Human
cauuucaguaaaccugucuga

SEQ ID NO: 3162686 - RNA, 16 nt, Human
cauuucauguccugug

SEQ ID NO: 3162687 - RNA, 18 nt, Human
cauuucauguccauaaaa

SEQ ID NO: 3162688 - RNA, 17 nt, Human
cauuucauccuuucacu

SEQ ID NO: 3162689 - RNA, 14 nt, Human
cauuucauccuuuc

SEQ ID NO: 3162690 - RNA, 14 nt, Human
ccaaucuuacuuug

SEQ ID NO: 3162691 - RNA, 15 nt, Human
ccaaucccugauccc

SEQ ID NO: 3162692 - RNA, 20 nt, Human
ccaaucuuacuuuguaaauu

SEQ ID NO: 3162693 - RNA, 21 nt, Human
ccaaucuuacuuuguaaauuc

SEQ ID NO: 3162694 - RNA, 16 nt, Human
ccaaucuuacuuugua

SEQ ID NO: 3162695 - RNA, 17 nt, Human
ccaaucuuacuuuguaa

SEQ ID NO: 3162696 - RNA, 15 nt, Human
ccaaucuuacuuugu

SEQ ID NO: 3162697 - RNA, 13 nt, Human
ccaagaagcccag

SEQ ID NO: 3162698 - RNA, 18 nt, Human
ccaagaaaggaaaccuuu

SEQ ID NO: 3162699 - RNA, 15 nt, Human
ccaacggccccagcu

SEQ ID NO: 3162700 - RNA, 21 nt, Human
ccaaauggaaacagaggacca

SEQ ID NO: 3162701 - RNA, 13 nt, Human
ccaacgucugugc

SEQ ID NO: 3162702 - RNA, 15 nt, Human
ccaacgucugugcca

SEQ ID NO: 3162703 - RNA, 22 nt, Human
ccaaauggaaaugggcagagca

SEQ ID NO: 3162704 - RNA, 17 nt, Human
ccaaauggaaacagagg

SEQ ID NO: 3162705 - RNA, 15 nt, Human
ccaaggccaaaggaa

SEQ ID NO: 3162706 - RNA, 18 nt, Human
ccaaggaugccccguccc

SEQ ID NO: 3162707 - RNA, 14 nt, Human
ccaagaagcccagg

SEQ ID NO: 3162708 - RNA, 19 nt, Human
ccaagcuggucccacucag

SEQ ID NO: 3162709 - RNA, 12 nt, Human
ccaagcuggucc

SEQ ID NO: 3162710 - RNA, 13 nt, Human
ccaaaugcagcuu

SEQ ID NO: 3162711 - RNA, 15 nt, Human
ccaaaugcagcuuua

SEQ ID NO: 3162712 - RNA, 18 nt, Human
ccaaaugcagcuuuaaaa

SEQ ID NO: 3162713 - RNA, 18 nt, Human
ccaaauaucaccaggacu

SEQ ID NO: 3162714 - RNA, 12 nt, Human
ccaaaugcagcu

SEQ ID NO: 3162715 - RNA, 19 nt, Human
ccaaauagugugaaauaua

SEQ ID NO: 3162716 - RNA, 23 nt, Human
ccaaauaauauguuuccuucccu

SEQ ID NO: 3162717 - RNA, 21 nt, Human
ccaaauaauauguuuccuucc

SEQ ID NO: 3162718 - RNA, 18 nt, Human
ccaaauaaaguuaaaagu

SEQ ID NO: 3162719 - RNA, 17 nt, Human
ccaccgccuccuacagc

SEQ ID NO: 3162720 - RNA, 18 nt, Human
ccaccaucugcugucuuu

SEQ ID NO: 3162721 - RNA, 15 nt, Human
ccaccaucugcuguc

SEQ ID NO: 3162722 - RNA, 14 nt, Human
ccaccaucugcugu

SEQ ID NO: 3162723 - RNA, 13 nt, Human
ccaccaucugcug

SEQ ID NO: 3162724 - RNA, 11 nt, Human
ccaccaucugc

SEQ ID NO: 3162725 - RNA, 19 nt, Human
ccaccgggcugggagcucu

SEQ ID NO: 3162726 - RNA, 18 nt, Human
ccaccaucaugucuggcu

SEQ ID NO: 3162727 - RNA, 18 nt, Human
ccaccaucaccagacagg

SEQ ID NO: 3162728 - RNA, 19 nt, Human
ccaccaucaugucuggcua

SEQ ID NO: 3162729 - RNA, 16 nt, Human
ccaccuuggcugcagg

SEQ ID NO: 3162730 - RNA, 15 nt, Human
ccaccuuggcugcag

SEQ ID NO: 3162731 - RNA, 14 nt, Human
ccaccuuggcugca

SEQ ID NO: 3162732 - RNA, 12 nt, Human
ccaccuuggcug

SEQ ID NO: 3162733 - RNA, 19 nt, Human
ccaccuuggcugcagggag

SEQ ID NO: 3162734 - RNA, 18 nt, Human
ccaccuuggcugcaggga

SEQ ID NO: 3162735 - RNA, 15 nt, Human
ccacgagagcgcagc

SEQ ID NO: 3162736 - RNA, 16 nt, Human
ccacgagagcgcagca

SEQ ID NO: 3162737 - RNA, 18 nt, Human
ccacgcuggaccuugaac

SEQ ID NO: 3162738 - RNA, 20 nt, Human
ccacgcugacuacagggccg

SEQ ID NO: 3162739 - RNA, 19 nt, Human
ccacgcugacuacagggcc

SEQ ID NO: 3162740 - RNA, 15 nt, Human
ccacgccuagccuca

SEQ ID NO: 3162741 - RNA, 13 nt, Human
ccacgcugacuac

SEQ ID NO: 3162742 - RNA, 21 nt, Human
ccacacuucaggcucuucucc

SEQ ID NO: 3162743 - RNA, 20 nt, Human
ccacacuucaggcucuucuc

SEQ ID NO: 3162744 - RNA, 16 nt, Human
ccacacuucaggcucu

SEQ ID NO: 3162745 - RNA, 16 nt, Human
ccaccacgccuagccu

SEQ ID NO: 3162746 - RNA, 15 nt, Human
ccaccacgcccggcu

SEQ ID NO: 3162747 - RNA, 22 nt, Human
ccacagagaaaguacuucucca

SEQ ID NO: 3162748 - RNA, 13 nt, Human
ccacagaggacac

SEQ ID NO: 3162749 - RNA, 14 nt, Human
caggaccccugagu

SEQ ID NO: 3162750 - RNA, 12 nt, Human
caggaccccuga

SEQ ID NO: 3162751 - RNA, 20 nt, Human
caggaccccugcaguucccc

SEQ ID NO: 3162752 - RNA, 15 nt, Human
caggaccccugcagu

SEQ ID NO: 3162753 - RNA, 13 nt, Human
caggaggaagggg

SEQ ID NO: 3162754 - RNA, 14 nt, Human
caggaggccagccu

SEQ ID NO: 3162755 - RNA, 15 nt, Human
caggaggccagccuu

SEQ ID NO: 3162756 - RNA, 16 nt, Human
caggaggccagccuug

SEQ ID NO: 3162757 - RNA, 15 nt, Human
caggagguggucugg

SEQ ID NO: 3162758 - RNA, 18 nt, Human
caggcacccaccaucaug

SEQ ID NO: 3162759 - RNA, 23 nt, Human
caggcacccaccaucaugucugg

SEQ ID NO: 3162760 - RNA, 22 nt, Human
caggcacccaccaucaugucug

SEQ ID NO: 3162761 - RNA, 14 nt, Human
caggaguaaaagag

SEQ ID NO: 3162762 - RNA, 17 nt, Human
caggagguuggagggaa

SEQ ID NO: 3162763 - RNA, 17 nt, Human
caggaggccagccuuga

SEQ ID NO: 3162764 - RNA, 12 nt, Human
caggagggacag

SEQ ID NO: 3162765 - RNA, 15 nt, Human
caggagggaggggga

SEQ ID NO: 3162766 - RNA, 19 nt, Human
caggagggacagucucacc

SEQ ID NO: 3162767 - RNA, 17 nt, Human
caggagggacagucuca

SEQ ID NO: 3162768 - RNA, 16 nt, Human
caggagggacagucuc

SEQ ID NO: 3162769 - RNA, 15 nt, Human
caggagggagcagag

SEQ ID NO: 3162770 - RNA, 20 nt, Human
caggagggacagucucacca

SEQ ID NO: 3162771 - RNA, 23 nt, Human
caggagggagggggaaggcaggg

SEQ ID NO: 3162772 - RNA, 21 nt, Human
caggccagagggagugacaga

SEQ ID NO: 3162773 - RNA, 19 nt, Human
caggccagagggagugaca

SEQ ID NO: 3162774 - RNA, 16 nt, Human
caggccagagggagug

SEQ ID NO: 3162775 - RNA, 15 nt, Human
caggccugacucuca

SEQ ID NO: 3162776 - RNA, 18 nt, Human
caggccucccugccagua

SEQ ID NO: 3162777 - RNA, 17 nt, Human
caggccucccugccagu

SEQ ID NO: 3162778 - RNA, 16 nt, Human
caggccucccugccag

SEQ ID NO: 3162779 - RNA, 13 nt, Human
caggccucccugc

SEQ ID NO: 3162780 - RNA, 23 nt, Human
caggcgcaagggaggcccagcgc

SEQ ID NO: 3162781 - RNA, 22 nt, Human
caggcgcaagggaggcccagcg

SEQ ID NO: 3162782 - RNA, 15 nt, Human
caggcgccccuuccc

SEQ ID NO: 3162783 - RNA, 20 nt, Human
caggccugccuguucccauu

SEQ ID NO: 3162784 - RNA, 20 nt, Human
caggccuacuccugucuucu

SEQ ID NO: 3162785 - RNA, 16 nt, Human
caggcgcuagcacagc

SEQ ID NO: 3162786 - RNA, 17 nt, Human
caggcgccccuuccccc

SEQ ID NO: 3162787 - RNA, 22 nt, Human
caggcgcuagcacagcucccuu

SEQ ID NO: 3162788 - RNA, 20 nt, Human
caggcgcuagcacagcuccc

SEQ ID NO: 3162789 - RNA, 18 nt, Human
caggcuggcccugcccug

SEQ ID NO: 3162790 - RNA, 19 nt, Human
caggcuggcccugcccugg

SEQ ID NO: 3162791 - RNA, 17 nt, Human
caggcuggcccugcccu

SEQ ID NO: 3162792 - RNA, 15 nt, Human
caggcugggcuucag

SEQ ID NO: 3162793 - RNA, 16 nt, Human
caggcugggcuucagu

SEQ ID NO: 3162794 - RNA, 20 nt, Human
caggcuggcccugcccuggu

SEQ ID NO: 3162795 - RNA, 21 nt, Human
caggcuggccuggggucaggc

SEQ ID NO: 3162796 - RNA, 17 nt, Human
cagggaggacgcucucu

SEQ ID NO: 3162797 - RNA, 18 nt, Human
cagggaggacgcucucug

SEQ ID NO: 3162798 - RNA, 17 nt, Human
caggcugggcuucagug

SEQ ID NO: 3162799 - RNA, 12 nt, Human
cagggagggccu

SEQ ID NO: 3162800 - RNA, 13 nt, Human
cagggagggccug

SEQ ID NO: 3162801 - RNA, 18 nt, Human
cagggaggugaccccagg

SEQ ID NO: 3162802 - RNA, 14 nt, Human
cagggagggccugg

SEQ ID NO: 3162803 - RNA, 16 nt, Human
cagggagggccugggc

SEQ ID NO: 3162804 - RNA, 22 nt, Human
cagggaguccgaaagggacuug

SEQ ID NO: 3162805 - RNA, 23 nt, Human
cagggaggugugaggcaggagag

SEQ ID NO: 3162806 - RNA, 22 nt, Human
cagggaggugugaggcaggaga

SEQ ID NO: 3162807 - RNA, 20 nt, Human
cagggaggugugaggcagga

SEQ ID NO: 3162808 - RNA, 15 nt, Human
cagguuugggacccc

SEQ ID NO: 3162809 - RNA, 21 nt, Human
cagguuuaaguagauuucaug

SEQ ID NO: 3162810 - RNA, 18 nt, Human
cagguuuaagcuguuacu

SEQ ID NO: 3162811 - RNA, 16 nt, Human
cagguuuaagcuguua

SEQ ID NO: 3162812 - RNA, 18 nt, Human
cagguuugggaccccugg

SEQ ID NO: 3162813 - RNA, 13 nt, Human
caguauuuuuaaa

SEQ ID NO: 3162814 - RNA, 14 nt, Human
caguauuuuuaaag

SEQ ID NO: 3162815 - RNA, 15 nt, Human
caguauuuuuaaagg

SEQ ID NO: 3162816 - RNA, 17 nt, Human
caguauuuuuaaaggca

SEQ ID NO: 3162817 - RNA, 18 nt, Human
caguauuuuuaaaggcau

SEQ ID NO: 3162818 - RNA, 19 nt, Human
caguauuuuuaaaggcauu

SEQ ID NO: 3162819 - RNA, 22 nt, Human
cagucaccccggccaccugcgg

SEQ ID NO: 3162820 - RNA, 20 nt, Human
cagucaccccggccaccugc

SEQ ID NO: 3162821 - RNA, 19 nt, Human
cagucaccccggccaccug

SEQ ID NO: 3162822 - RNA, 22 nt, Human
caggugcacaagcuccaagcuc

SEQ ID NO: 3162823 - RNA, 17 nt, Human
caggugauccacccacc

SEQ ID NO: 3162824 - RNA, 16 nt, Human
caggugauccacccac

SEQ ID NO: 3162825 - RNA, 12 nt, Human
caggguuggccc

SEQ ID NO: 3162826 - RNA, 14 nt, Human
cagguugguggggg

SEQ ID NO: 3162827 - RNA, 18 nt, Human
caggugcuaggaacacuc

SEQ ID NO: 3162828 - RNA, 20 nt, Human
caggugcuaggaacacuccu

SEQ ID NO: 3162829 - RNA, 14 nt, Human
caggugcgaaagga

SEQ ID NO: 3162830 - RNA, 18 nt, Human
cagggucucacucugucg

SEQ ID NO: 3162831 - RNA, 17 nt, Human
cagggucucacucuguc

SEQ ID NO: 3162832 - RNA, 21 nt, Human
cagggucucacucugucgccc

SEQ ID NO: 3162833 - RNA, 23 nt, Human
cagggucucuagugcugugaaaa

SEQ ID NO: 3162834 - RNA, 20 nt, Human
caggguuggcaccuuccccc

SEQ ID NO: 3162835 - RNA, 13 nt, Human
caggguuggcacc

SEQ ID NO: 3162836 - RNA, 24 nt, Human
cagggugucugcccccuccugagu

SEQ ID NO: 3162837 - RNA, 23 nt, Human
cagggugucugcccccuccugag

SEQ ID NO: 3162838 - RNA, 16 nt, Human
cagggugucugccccc

SEQ ID NO: 3162839 - RNA, 19 nt, Human
cagucucccccacccuugu

SEQ ID NO: 3162840 - RNA, 14 nt, Human
cagucucccucccu

SEQ ID NO: 3162841 - RNA, 15 nt, Human
cagucucaggaaauc

SEQ ID NO: 3162842 - RNA, 21 nt, Human
cagucucaccauuuccccagg

SEQ ID NO: 3162843 - RNA, 20 nt, Human
cagucucaccauuuccccag

SEQ ID NO: 3162844 - RNA, 19 nt, Human
cagucgggggaacugaggc

SEQ ID NO: 3162845 - RNA, 23 nt, Human
cagucgccuuucagcaggcagcc

SEQ ID NO: 3162846 - RNA, 22 nt, Human
cagucgccuuucagcaggcagc

SEQ ID NO: 3162847 - RNA, 21 nt, Human
cagucgccuuucagcaggcag

SEQ ID NO: 3162848 - RNA, 19 nt, Human
cagucgccuuucagcaggc

SEQ ID NO: 3162849 - RNA, 22 nt, Human
cagugcaugcugucccuuacgu

SEQ ID NO: 3162850 - RNA, 23 nt, Human
cagugcaugcugucccuuacgug

SEQ ID NO: 3162851 - RNA, 19 nt, Human
cagugcaugcugucccuua

SEQ ID NO: 3162852 - RNA, 15 nt, Human
cagugcaccugggac

SEQ ID NO: 3162853 - RNA, 20 nt, Human
cagucugauucccaagcucu

SEQ ID NO: 3162854 - RNA, 19 nt, Human
cagucugauucccaagcuc

SEQ ID NO: 3162855 - RNA, 12 nt, Human
cagugcccacag

SEQ ID NO: 3162856 - RNA, 16 nt, Human
cagugggacagggcau

SEQ ID NO: 3162857 - RNA, 19 nt, Human
cagugggacagggcauggc

SEQ ID NO: 3162858 - RNA, 11 nt, Human
cagugggagcu

SEQ ID NO: 3162859 - RNA, 15 nt, Human
cagugccaaaaacaa

SEQ ID NO: 3162860 - RNA, 21 nt, Human
cagcagguccccagcuuuggc

SEQ ID NO: 3162861 - RNA, 19 nt, Human
cagcagucuuaugcuucca

SEQ ID NO: 3162862 - RNA, 17 nt, Human
cagcagucuuaugcuuc

SEQ ID NO: 3162863 - RNA, 13 nt, Human
cagcaccgccucu

SEQ ID NO: 3162864 - RNA, 15 nt, Human
cagcaccgccucuuc

SEQ ID NO: 3162865 - RNA, 14 nt, Human
cagcaccgccucuu

SEQ ID NO: 3162866 - RNA, 12 nt, Human
cagccaggccac

SEQ ID NO: 3162867 - RNA, 13 nt, Human
cagccaggccaca

SEQ ID NO: 3162868 - RNA, 17 nt, Human
cagcaguugaaaagacu

SEQ ID NO: 3162869 - RNA, 22 nt, Human
cagcagucuuaugcuuccagaa

SEQ ID NO: 3162870 - RNA, 21 nt, Human
cagcagucuuaugcuuccaga

SEQ ID NO: 3162871 - RNA, 20 nt, Human
cagcagucuuaugcuuccag

SEQ ID NO: 3162872 - RNA, 21 nt, Human
cagcaguugaaaagacuccaa

SEQ ID NO: 3162873 - RNA, 20 nt, Human
cagcaguugaaaagacucca

SEQ ID NO: 3162874 - RNA, 19 nt, Human
cagcauauucaggaagcuc

SEQ ID NO: 3162875 - RNA, 22 nt, Human
cagcauauucaggaagcucagg

SEQ ID NO: 3162876 - RNA, 23 nt, Human
cagcauauucaggaagcucaggg

SEQ ID NO: 3162877 - RNA, 13 nt, Human
cagagcugccagu

SEQ ID NO: 3162878 - RNA, 12 nt, Human
cagagcugccag

SEQ ID NO: 3162879 - RNA, 16 nt, Human
cagagcugccaccugc

SEQ ID NO: 3162880 - RNA, 18 nt, Human
cagagcugccaccugccu

SEQ ID NO: 3162881 - RNA, 20 nt, Human
cagaaguuugagaucagccu

SEQ ID NO: 3162882 - RNA, 23 nt, Human
cagaaguuucugccgcagcccug

SEQ ID NO: 3162883 - RNA, 22 nt, Human
cagaaguuugagaucagccugg

SEQ ID NO: 3162884 - RNA, 22 nt, Human
cagagggccugcaagggaguga

SEQ ID NO: 3162885 - RNA, 18 nt, Human
cagaggggguggccuccc

SEQ ID NO: 3162886 - RNA, 17 nt, Human
cagaggggguggccucc

SEQ ID NO: 3162887 - RNA, 19 nt, Human
cagaggggguggccuccca

SEQ ID NO: 3162888 - RNA, 20 nt, Human
cagaggggguggccucccaa

SEQ ID NO: 3162889 - RNA, 20 nt, Human
cagagucagaaguuucugcc

SEQ ID NO: 3162890 - RNA, 18 nt, Human
cagaguauuuuuguauuc

SEQ ID NO: 3162891 - RNA, 18 nt, Human
cagccugagcgacaguga

SEQ ID NO: 3162892 - RNA, 13 nt, Human
cagccugagaguc

SEQ ID NO: 3162893 - RNA, 20 nt, Human
cagccucuuucccuuccagu

SEQ ID NO: 3162894 - RNA, 19 nt, Human
cagccugagcgacagugag

SEQ ID NO: 3162895 - RNA, 17 nt, Human
cagcggggacagcuccu

SEQ ID NO: 3162896 - RNA, 16 nt, Human
cagcggggacagcucc

SEQ ID NO: 3162897 - RNA, 14 nt, Human
cagcggggacagcu

SEQ ID NO: 3162898 - RNA, 15 nt, Human
cagcggggacagcuc

SEQ ID NO: 3162899 - RNA, 13 nt, Human
cagcccuuccucu

SEQ ID NO: 3162900 - RNA, 16 nt, Human
cagcccuuccucugcu

SEQ ID NO: 3162901 - RNA, 18 nt, Human
cagcccuuccucugcucc

SEQ ID NO: 3162902 - RNA, 17 nt, Human
cagcccuuccucugcuc

SEQ ID NO: 3162903 - RNA, 20 nt, Human
cagccgagauagccaaggcc

SEQ ID NO: 3162904 - RNA, 23 nt, Human
cagcccuuccucugcucccccuu

SEQ ID NO: 3162905 - RNA, 19 nt, Human
cagcccuuccucugcuccc

SEQ ID NO: 3162906 - RNA, 21 nt, Human
cagccgagauagccaaggcca

SEQ ID NO: 3162907 - RNA, 21 nt, Human
cagccgagcuuuuacucccug

SEQ ID NO: 3162908 - RNA, 19 nt, Human
cagccucuuucccuuccag

SEQ ID NO: 3162909 - RNA, 18 nt, Human
cagccucuuucccuucca

SEQ ID NO: 3162910 - RNA, 16 nt, Human
cagccucuuucccuuc

SEQ ID NO: 3162911 - RNA, 15 nt, Human
cagccucuuucccuu

SEQ ID NO: 3162912 - RNA, 12 nt, Human
cagccccuggau

SEQ ID NO: 3162913 - RNA, 13 nt, Human
cagccccuggaug

SEQ ID NO: 3162914 - RNA, 14 nt, Human
cagccccuggaugc

SEQ ID NO: 3162915 - RNA, 17 nt, Human
cagccccuggaugcagc

SEQ ID NO: 3162916 - RNA, 18 nt, Human
cagccccuggaugcagcc

SEQ ID NO: 3162917 - RNA, 19 nt, Human
cagccccuggaugcagccu

SEQ ID NO: 3162918 - RNA, 21 nt, Human
cagccccuggaugcagccuca

SEQ ID NO: 3162919 - RNA, 21 nt, Human
cagcccuuagcagggaaacag

SEQ ID NO: 3162920 - RNA, 16 nt, Human
cagcccuuagcaggga

SEQ ID NO: 3162921 - RNA, 15 nt, Human
cagcccuuagcaggg

SEQ ID NO: 3162922 - RNA, 23 nt, Human
cagcugcaccccuuccugggcac

SEQ ID NO: 3162923 - RNA, 20 nt, Human
cagcugcaccccuuccuggg

SEQ ID NO: 3162924 - RNA, 17 nt, Human
cagcugcaccccuuccu

SEQ ID NO: 3162925 - RNA, 12 nt, Human
cagcugcacccc

SEQ ID NO: 3162926 - RNA, 16 nt, Human
cagcugcaccccuucc

SEQ ID NO: 3162927 - RNA, 14 nt, Human
cagcugcaccccuu

SEQ ID NO: 3162928 - RNA, 16 nt, Human
cagcuccccucggaga

SEQ ID NO: 3162929 - RNA, 18 nt, Human
cagcuccccucggagaag

SEQ ID NO: 3162930 - RNA, 17 nt, Human
cagcuccccucggagaa

SEQ ID NO: 3162931 - RNA, 18 nt, Human
cagcuucauuuccugugu

SEQ ID NO: 3162932 - RNA, 15 nt, Human
cagcuucauuuccug

SEQ ID NO: 3162933 - RNA, 22 nt, Human
cagcuucacuucugacucuucc

SEQ ID NO: 3162934 - RNA, 18 nt, Human
cagcugugcucuggacag

SEQ ID NO: 3162935 - RNA, 16 nt, Human
cagcuucacuucugac

SEQ ID NO: 3162936 - RNA, 23 nt, Human
caggaaaucaaauaugcaaagca

SEQ ID NO: 3162937 - RNA, 22 nt, Human
caggaaaucaaauaugcaaagc

SEQ ID NO: 3162938 - RNA, 23 nt, Human
caggaaaugcugacccaugggca

SEQ ID NO: 3162939 - RNA, 22 nt, Human
caggaaaugcugacccaugggc

SEQ ID NO: 3162940 - RNA, 21 nt, Human
caggaaaugcugacccauggg

SEQ ID NO: 3162941 - RNA, 20 nt, Human
caggaaaugcugacccaugg

SEQ ID NO: 3162942 - RNA, 16 nt, Human
caggaaaugcugaccc

SEQ ID NO: 3162943 - RNA, 14 nt, Human
caggaaaggcucca

SEQ ID NO: 3162944 - RNA, 15 nt, Human
caggaaaggcuccag

SEQ ID NO: 3162945 - RNA, 15 nt, Human
cagcuccagcucacc

SEQ ID NO: 3162946 - RNA, 14 nt, Human
cagcuccagcucac

SEQ ID NO: 3162947 - RNA, 13 nt, Human
cagcuccagcuca

SEQ ID NO: 3162948 - RNA, 20 nt, Human
cagcuccagcucaccagccc

SEQ ID NO: 3162949 - RNA, 18 nt, Human
cagcuccagcucaccagc

SEQ ID NO: 3162950 - RNA, 17 nt, Human
cagcuccagcucaccag

SEQ ID NO: 3162951 - RNA, 16 nt, Human
cagcuccagcucacca

SEQ ID NO: 3162952 - RNA, 22 nt, Human
cagcuccagcucaccagcccca

SEQ ID NO: 3162953 - RNA, 21 nt, Human
cagcucccaaggcucugagca

SEQ ID NO: 3162954 - RNA, 21 nt, Human
caaacauuuucucuuagaaaa

SEQ ID NO: 3162955 - RNA, 20 nt, Human
caaacauuuucucuuagaaa

SEQ ID NO: 3162956 - RNA, 19 nt, Human
caaacauuuucucuuagaa

SEQ ID NO: 3162957 - RNA, 14 nt, Human
caaacauuggaaga

SEQ ID NO: 3162958 - RNA, 19 nt, Human
caaacauuaguacuuuaua

SEQ ID NO: 3162959 - RNA, 18 nt, Human
caaacauuaguacuuuau

SEQ ID NO: 3162960 - RNA, 17 nt, Human
caaacauuaguacuuua

SEQ ID NO: 3162961 - RNA, 16 nt, Human
caaacauuaguacuuu

SEQ ID NO: 3162962 - RNA, 15 nt, Human
caaacauuaguacuu

SEQ ID NO: 3162963 - RNA, 22 nt, Human
caaacauuaauguugauuucua

SEQ ID NO: 3162964 - RNA, 21 nt, Human
caaacauuaauguugauuucu

SEQ ID NO: 3162965 - RNA, 20 nt, Human
caaacauuaauguugauuuc

SEQ ID NO: 3162966 - RNA, 19 nt, Human
caaacauuaauguugauuu

SEQ ID NO: 3162967 - RNA, 18 nt, Human
caaacauuaauguugauu

SEQ ID NO: 3162968 - RNA, 17 nt, Human
caaacauuaauguugau

SEQ ID NO: 3162969 - RNA, 14 nt, Human
caaacccccauucu

SEQ ID NO: 3162970 - RNA, 19 nt, Human
caaacccccauucuguccu

SEQ ID NO: 3162971 - RNA, 18 nt, Human
caaaccccgaccaccugc

SEQ ID NO: 3162972 - RNA, 17 nt, Human
caaacccugucaaacau

SEQ ID NO: 3162973 - RNA, 13 nt, Human
caaacccugucaa

SEQ ID NO: 3162974 - RNA, 21 nt, Human
caaacccugucaaacauuagu

SEQ ID NO: 3162975 - RNA, 18 nt, Human
caaacccugucaaacauu

SEQ ID NO: 3162976 - RNA, 21 nt, Human
caaaccccgaccaccugccca

SEQ ID NO: 3162977 - RNA, 13 nt, Human
caaaccccugacc

SEQ ID NO: 3162978 - RNA, 15 nt, Human
caaacagucucagga

SEQ ID NO: 3162979 - RNA, 11 nt, Human
caaaaggaaag

SEQ ID NO: 3162980 - RNA, 16 nt, Human
caaaaggaaagcugug

SEQ ID NO: 3162981 - RNA, 20 nt, Human
caaaaggaaagcuguguuua

SEQ ID NO: 3162982 - RNA, 20 nt, Human
caaaagcuucccucccugcu

SEQ ID NO: 3162983 - RNA, 13 nt, Human
caaaagcuucccu

SEQ ID NO: 3162984 - RNA, 17 nt, Human
caaacagucucaggaaa

SEQ ID NO: 3162985 - RNA, 16 nt, Human
caaacagucucaggaa

SEQ ID NO: 3162986 - RNA, 14 nt, Human
caaaaggaauagau

SEQ ID NO: 3162987 - RNA, 15 nt, Human
caaacauuaauguug

SEQ ID NO: 3162988 - RNA, 14 nt, Human
caaacauuaauguu

SEQ ID NO: 3162989 - RNA, 16 nt, Human
auuuuuauaccuguuu

SEQ ID NO: 3162990 - RNA, 13 nt, Human
auuuuuuuguaug

SEQ ID NO: 3162991 - RNA, 18 nt, Human
auuuuuuuuuccuucagu

SEQ ID NO: 3162992 - RNA, 16 nt, Human
auuuuuuugagacaga

SEQ ID NO: 3162993 - RNA, 22 nt, Human
auuuuuuugaacucuucucauu

SEQ ID NO: 3162994 - RNA, 23 nt, Human
auuuuuuugaacucuucucauua

SEQ ID NO: 3162995 - RNA, 21 nt, Human
auuuuuuugaacucuucucau

SEQ ID NO: 3162996 - RNA, 20 nt, Human
auuuuuuuuuccuucagugc

SEQ ID NO: 3162997 - RNA, 22 nt, Human
auuuuuuuuuccuucagugccu

SEQ ID NO: 3162998 - RNA, 17 nt, Human
auuuuuuuuuccuucag

SEQ ID NO: 3162999 - RNA, 14 nt, Human
auuuuuuuguauga

SEQ ID NO: 3163000 - RNA, 17 nt, Human
auuuuuuuguaugaaaa

SEQ ID NO: 3163001 - RNA, 19 nt, Human
caaaagcugggcagguugg

SEQ ID NO: 3163002 - RNA, 15 nt, Human
caaaagagaugaaag

SEQ ID NO: 3163003 - RNA, 22 nt, Human
auuuuauguugacauuuguuug

SEQ ID NO: 3163004 - RNA, 20 nt, Human
auuuuauguugacauuuguu

SEQ ID NO: 3163005 - RNA, 19 nt, Human
auuuuauguugacauuugu

SEQ ID NO: 3163006 - RNA, 18 nt, Human
auuuuauguugacauuug

SEQ ID NO: 3163007 - RNA, 17 nt, Human
auuuuauguugacauuu

SEQ ID NO: 3163008 - RNA, 15 nt, Human
auuuuauguugacau

SEQ ID NO: 3163009 - RNA, 14 nt, Human
auuuuauguugaca

SEQ ID NO: 3163010 - RNA, 13 nt, Human
auuuuauguugac

SEQ ID NO: 3163011 - RNA, 15 nt, Human
auuuuauauaaagua

SEQ ID NO: 3163012 - RNA, 16 nt, Human
auuuuauauaaaguau

SEQ ID NO: 3163013 - RNA, 21 nt, Human
auuuuauauaaaguauucuuu

SEQ ID NO: 3163014 - RNA, 21 nt, Human
auuuuauaucaauuuaaaaaa

SEQ ID NO: 3163015 - RNA, 15 nt, Human
auuuuaggcaaguuu

SEQ ID NO: 3163016 - RNA, 15 nt, Human
auuuuagcuaauuua

SEQ ID NO: 3163017 - RNA, 16 nt, Human
auuuuagcuaauuuag

SEQ ID NO: 3163018 - RNA, 11 nt, Human
auuuucugugu

SEQ ID NO: 3163019 - RNA, 12 nt, Human
auuuucugugug

SEQ ID NO: 3163020 - RNA, 13 nt, Human
auuuucugugugu

SEQ ID NO: 3163021 - RNA, 14 nt, Human
auuuucuguguguu

SEQ ID NO: 3163022 - RNA, 15 nt, Human
auuuucuguguguuc

SEQ ID NO: 3163023 - RNA, 16 nt, Human
auuuucuguguguucc

SEQ ID NO: 3163024 - RNA, 17 nt, Human
auuuucuguguguuccu

SEQ ID NO: 3163025 - RNA, 18 nt, Human
auuuucuguguguuccug

SEQ ID NO: 3163026 - RNA, 19 nt, Human
auuuucuguguguuccugg

SEQ ID NO: 3163027 - RNA, 20 nt, Human
auuuucuguguguuccuggc

SEQ ID NO: 3163028 - RNA, 20 nt, Human
auuuugaagugagaaaauga

SEQ ID NO: 3163029 - RNA, 14 nt, Human
auuuuuaagugguu

SEQ ID NO: 3163030 - RNA, 14 nt, Human
auuuuuagacagag

SEQ ID NO: 3163031 - RNA, 22 nt, Human
auuuuuagccugugucauugcc

SEQ ID NO: 3163032 - RNA, 16 nt, Human
auuuuuagccuguguc

SEQ ID NO: 3163033 - RNA, 17 nt, Human
auuuuuaggacaugaaa

SEQ ID NO: 3163034 - RNA, 14 nt, Human
auuuuuauaagaaa

SEQ ID NO: 3163035 - RNA, 18 nt, Human
auuuuuauaacaucuuua

SEQ ID NO: 3163036 - RNA, 16 nt, Human
caaagucaagccacau

SEQ ID NO: 3163037 - RNA, 20 nt, Human
caaagucagaacaaauucag

SEQ ID NO: 3163038 - RNA, 22 nt, Human
caaagucaugauguuuuuaaaa

SEQ ID NO: 3163039 - RNA, 19 nt, Human
caaagucaugauguuuuua

SEQ ID NO: 3163040 - RNA, 18 nt, Human
caaagucaugauguuuuu

SEQ ID NO: 3163041 - RNA, 17 nt, Human
caaagucaugauguuuu

SEQ ID NO: 3163042 - RNA, 15 nt, Human
caaagucaugauguu

SEQ ID NO: 3163043 - RNA, 22 nt, Human
caaaguagaagucuuagaugua

SEQ ID NO: 3163044 - RNA, 21 nt, Human
caaaguaguacuucuucugua

SEQ ID NO: 3163045 - RNA, 22 nt, Human
caaaguaguacuucuucuguaa

SEQ ID NO: 3163046 - RNA, 18 nt, Human
caaaguauaaauuugugu

SEQ ID NO: 3163047 - RNA, 19 nt, Human
caaaguauaaauuugugua

SEQ ID NO: 3163048 - RNA, 20 nt, Human
caaaguauaaauuuguguaa

SEQ ID NO: 3163049 - RNA, 21 nt, Human
caaaguauaaauuuguguaau

SEQ ID NO: 3163050 - RNA, 17 nt, Human
caaagcauggacauuua

SEQ ID NO: 3163051 - RNA, 24 nt, Human
caaagcauggacauuuagaagaaa

SEQ ID NO: 3163052 - RNA, 22 nt, Human
caaagcagugcaugcugucccu

SEQ ID NO: 3163053 - RNA, 15 nt, Human
caaagcaguggagcc

SEQ ID NO: 3163054 - RNA, 14 nt, Human
caaagcaguugaau

SEQ ID NO: 3163055 - RNA, 21 nt, Human
caaagcaguggagcccaggag

SEQ ID NO: 3163056 - RNA, 18 nt, Human
caaagcagugcaugcugu

SEQ ID NO: 3163057 - RNA, 21 nt, Human
caaagcagugcaugcuguccc

SEQ ID NO: 3163058 - RNA, 21 nt, Human
caaaucuuaacuugaaggagu

SEQ ID NO: 3163059 - RNA, 21 nt, Human
caaaucugcuuuuuaaagaau

SEQ ID NO: 3163060 - RNA, 13 nt, Human
caaaucugucugc

SEQ ID NO: 3163061 - RNA, 13 nt, Human
caaaucuuaagaa

SEQ ID NO: 3163062 - RNA, 14 nt, Human
caaaucugucugcu

SEQ ID NO: 3163063 - RNA, 13 nt, Human
caaaucuuccugg

SEQ ID NO: 3163064 - RNA, 14 nt, Human
caaaucuuaagaaa

SEQ ID NO: 3163065 - RNA, 20 nt, Human
caaaucuuuccauauccaua

SEQ ID NO: 3163066 - RNA, 22 nt, Human
caaaucuuccuggucgaaaguu

SEQ ID NO: 3163067 - RNA, 13 nt, Human
caaaugaaaugua

SEQ ID NO: 3163068 - RNA, 18 nt, Human
caaaugaaauguaugcau

SEQ ID NO: 3163069 - RNA, 18 nt, Human
caaaugaauaaugccuuu

SEQ ID NO: 3163070 - RNA, 22 nt, Human
caaaugaauaaugccuuuguaa

SEQ ID NO: 3163071 - RNA, 23 nt, Human
caaaugaauaaugccuuuguaac

SEQ ID NO: 3163072 - RNA, 13 nt, Human
caaaugacuuuau

SEQ ID NO: 3163073 - RNA, 21 nt, Human
caaaugcaucuuugauguguu

SEQ ID NO: 3163074 - RNA, 22 nt, Human
caaaugcaucuuugauguguug

SEQ ID NO: 3163075 - RNA, 16 nt, Human
caaaugcaucuuugau

SEQ ID NO: 3163076 - RNA, 17 nt, Human
caaaugcaucuuugaug

SEQ ID NO: 3163077 - RNA, 15 nt, Human
caaaugcaucuuuga

SEQ ID NO: 3163078 - RNA, 14 nt, Human
caaaugacuuuauu

SEQ ID NO: 3163079 - RNA, 15 nt, Human
caaaugacuuuauua

SEQ ID NO: 3163080 - RNA, 16 nt, Human
caaaugacuuuauuau

SEQ ID NO: 3163081 - RNA, 17 nt, Human
caaaugacuuuauuauu

SEQ ID NO: 3163082 - RNA, 18 nt, Human
caaaugacuuuauuauuu

SEQ ID NO: 3163083 - RNA, 20 nt, Human
caaaugacuuuauuauuuau

SEQ ID NO: 3163084 - RNA, 21 nt, Human
caaaugacuuuauuauuuauu

SEQ ID NO: 3163085 - RNA, 17 nt, Human
caaaugagacagcaguc

SEQ ID NO: 3163086 - RNA, 21 nt, Human
caaaugcuagaaaaauuguua

SEQ ID NO: 3163087 - RNA, 21 nt, Human
caacacacagauuugagcuca

SEQ ID NO: 3163088 - RNA, 22 nt, Human
caacacacagauuugagcucag

SEQ ID NO: 3163089 - RNA, 18 nt, Human
caacaagaauaaaggcag

SEQ ID NO: 3163090 - RNA, 12 nt, Human
caacaagaagaa

SEQ ID NO: 3163091 - RNA, 18 nt, Human
caacaagaagaauuugaa

SEQ ID NO: 3163092 - RNA, 15 nt, Human
caacaccaaaaaaua

SEQ ID NO: 3163093 - RNA, 23 nt, Human
caacaccaaaaaauaucuaguaa

SEQ ID NO: 3163094 - RNA, 17 nt, Human
caacaccaaaaaauauc

SEQ ID NO: 3163095 - RNA, 16 nt, Human
caagauggcacagggc

SEQ ID NO: 3163096 - RNA, 23 nt, Human
caagauggcacagggcaugaaau

SEQ ID NO: 3163097 - RNA, 20 nt, Human
caagauggcacagggcauga

SEQ ID NO: 3163098 - RNA, 13 nt, Human
caagauggcacag

SEQ ID NO: 3163099 - RNA, 19 nt, Human
caagacccaaaaggcagaa

SEQ ID NO: 3163100 - RNA, 14 nt, Human
caacucuccuccag

SEQ ID NO: 3163101 - RNA, 18 nt, Human
caacuccaacauccacuc

SEQ ID NO: 3163102 - RNA, 17 nt, Human
caacuccaacauccacu

SEQ ID NO: 3163103 - RNA, 14 nt, Human
caacucauugcauc

SEQ ID NO: 3163104 - RNA, 22 nt, Human
caagaauugaagcaggacuaaa

SEQ ID NO: 3163105 - RNA, 23 nt, Human
caacucuaaagugcuaauaauaa

SEQ ID NO: 3163106 - RNA, 22 nt, Human
caagaaugaagguuuuuguaaa

SEQ ID NO: 3163107 - RNA, 19 nt, Human
caacuacuaccuguaauga

SEQ ID NO: 3163108 - RNA, 15 nt, Human
caacuaauuuuugua

SEQ ID NO: 3163109 - RNA, 18 nt, Human
caacuaauuuuuguauuu

SEQ ID NO: 3163110 - RNA, 18 nt, Human
caacuacacaaagcaggc

SEQ ID NO: 3163111 - RNA, 22 nt, Human
caaccccuggaccccagccuca

SEQ ID NO: 3163112 - RNA, 18 nt, Human
caaccccuggaccccagc

SEQ ID NO: 3163113 - RNA, 17 nt, Human
caaccccuggaccccag

SEQ ID NO: 3163114 - RNA, 12 nt, Human
caaccccuggac

SEQ ID NO: 3163115 - RNA, 17 nt, Human
caacucaccccagcccc

SEQ ID NO: 3163116 - RNA, 18 nt, Human
caacucaccccagcccca

SEQ ID NO: 3163117 - RNA, 18 nt, Human
caacccccagcucccgcu

SEQ ID NO: 3163118 - RNA, 15 nt, Human
caaccccucgcccag

SEQ ID NO: 3163119 - RNA, 23 nt, Human
caaccccucgcccagucccagca

SEQ ID NO: 3163120 - RNA, 22 nt, Human
caaccccucgcccagucccagc

SEQ ID NO: 3163121 - RNA, 21 nt, Human
caaccccucgcccagucccag

SEQ ID NO: 3163122 - RNA, 17 nt, Human
caaccccucgcccaguc

SEQ ID NO: 3163123 - RNA, 20 nt, Human
auuucauaccuaucaucuua

SEQ ID NO: 3163124 - RNA, 16 nt, Human
auuucauaauuuguuu

SEQ ID NO: 3163125 - RNA, 20 nt, Human
auuucauaauuuguuuccag

SEQ ID NO: 3163126 - RNA, 23 nt, Human
auuucauaauuuguuuccagcau

SEQ ID NO: 3163127 - RNA, 22 nt, Human
auuucaguuauugucccuggcu

SEQ ID NO: 3163128 - RNA, 19 nt, Human
auuucagaaguuuaaauau

SEQ ID NO: 3163129 - RNA, 21 nt, Human
auuucaguuauugucccuggc

SEQ ID NO: 3163130 - RNA, 13 nt, Human
auuucagaaguuu

SEQ ID NO: 3163131 - RNA, 16 nt, Human
auuucagaaguuuaaa

SEQ ID NO: 3163132 - RNA, 15 nt, Human
auuucagaaguuuaa

SEQ ID NO: 3163133 - RNA, 15 nt, Human
auuucugccauuuca

SEQ ID NO: 3163134 - RNA, 16 nt, Human
auuucugccauuucau

SEQ ID NO: 3163135 - RNA, 17 nt, Human
auuucugccauuucaug

SEQ ID NO: 3163136 - RNA, 18 nt, Human
auuucugccauuucaugu

SEQ ID NO: 3163137 - RNA, 19 nt, Human
auuucugccauuucauguc

SEQ ID NO: 3163138 - RNA, 19 nt, Human
auuucugucacaguaaaaa

SEQ ID NO: 3163139 - RNA, 20 nt, Human
auuucugucacaguaaaaau

SEQ ID NO: 3163140 - RNA, 21 nt, Human
auuucugucacaguaaaaaua

SEQ ID NO: 3163141 - RNA, 23 nt, Human
auuucugucacaguaaaaauaaa

SEQ ID NO: 3163142 - RNA, 18 nt, Human
auuucuguguccuguuuu

SEQ ID NO: 3163143 - RNA, 16 nt, Human
auuuauggguggauuu

SEQ ID NO: 3163144 - RNA, 14 nt, Human
auuucacucuccuu

SEQ ID NO: 3163145 - RNA, 14 nt, Human
auuucacugucugu

SEQ ID NO: 3163146 - RNA, 23 nt, Human
auuucacuugaguggagguuuau

SEQ ID NO: 3163147 - RNA, 15 nt, Human
auuucacuugagugg

SEQ ID NO: 3163148 - RNA, 21 nt, Human
auuucagaaauacagauaaau

SEQ ID NO: 3163149 - RNA, 13 nt, Human
auuucagaaauac

SEQ ID NO: 3163150 - RNA, 21 nt, Human
auuucagaaagccuuucauuu

SEQ ID NO: 3163151 - RNA, 11 nt, Human
auuuauaugua

SEQ ID NO: 3163152 - RNA, 14 nt, Human
auuuauauguaugu

SEQ ID NO: 3163153 - RNA, 16 nt, Human
auuuauauguaugugu

SEQ ID NO: 3163154 - RNA, 13 nt, Human
auuuauauguaug

SEQ ID NO: 3163155 - RNA, 21 nt, Human
auuuauauguauguguuuaga

SEQ ID NO: 3163156 - RNA, 17 nt, Human
auuuauauguauguguu

SEQ ID NO: 3163157 - RNA, 18 nt, Human
auuuauauguauguguuu

SEQ ID NO: 3163158 - RNA, 19 nt, Human
auuuaugaagaaaauacuu

SEQ ID NO: 3163159 - RNA, 16 nt, Human
auuuaugaagaaaaua

SEQ ID NO: 3163160 - RNA, 13 nt, Human
auuuaucuuugau

SEQ ID NO: 3163161 - RNA, 23 nt, Human
auuuaucuugaaggaaaaauuca

SEQ ID NO: 3163162 - RNA, 15 nt, Human
auuuaugaagaaaau

SEQ ID NO: 3163163 - RNA, 16 nt, Human
auuuaucuuugauaac

SEQ ID NO: 3163164 - RNA, 14 nt, Human
auuuaucuuugaua

SEQ ID NO: 3163165 - RNA, 16 nt, Human
auuuaucuugaaggaa

SEQ ID NO: 3163166 - RNA, 12 nt, Human
auuuaucuugaa

SEQ ID NO: 3163167 - RNA, 20 nt, Human
auuuaucuugaaggaaaaau

SEQ ID NO: 3163168 - RNA, 19 nt, Human
auuuaucuugaaggaaaaa

SEQ ID NO: 3163169 - RNA, 16 nt, Human
auuuaauaaaugugcc

SEQ ID NO: 3163170 - RNA, 21 nt, Human
auuuaaugaaagacuguacaa

SEQ ID NO: 3163171 - RNA, 20 nt, Human
auuuaaugaaagacuguaca

SEQ ID NO: 3163172 - RNA, 15 nt, Human
auuuaaugaaagacu

SEQ ID NO: 3163173 - RNA, 16 nt, Human
auuuaaugaaagacug

SEQ ID NO: 3163174 - RNA, 15 nt, Human
auuuauaauacagaa

SEQ ID NO: 3163175 - RNA, 17 nt, Human
auuuauaauacagaauc

SEQ ID NO: 3163176 - RNA, 18 nt, Human
auuuauaauacagaaucu

SEQ ID NO: 3163177 - RNA, 19 nt, Human
auuuauaagaaaaauguga

SEQ ID NO: 3163178 - RNA, 12 nt, Human
auuguguuucua

SEQ ID NO: 3163179 - RNA, 22 nt, Human
auuguguuucuaccggagagag

SEQ ID NO: 3163180 - RNA, 15 nt, Human
auuguuaauugcuga

SEQ ID NO: 3163181 - RNA, 19 nt, Human
auuguuaauugcugaggca

SEQ ID NO: 3163182 - RNA, 16 nt, Human
auuguuaauugcugag

SEQ ID NO: 3163183 - RNA, 18 nt, Human
auuguguugacuuuauaa

SEQ ID NO: 3163184 - RNA, 19 nt, Human
auuguguugacuuuauaaa

SEQ ID NO: 3163185 - RNA, 22 nt, Human
auuguguugacuuuauaaauuu

SEQ ID NO: 3163186 - RNA, 21 nt, Human
auuguaagaaauacuguacaa

SEQ ID NO: 3163187 - RNA, 20 nt, Human
auuguaagaaauacuguaca

SEQ ID NO: 3163188 - RNA, 14 nt, Human
auuguaagaaauac

SEQ ID NO: 3163189 - RNA, 12 nt, Human
auuguaagaaau

SEQ ID NO: 3163190 - RNA, 18 nt, Human
auugcuugagcucaggag

SEQ ID NO: 3163191 - RNA, 14 nt, Human
auugcuuucuuuca

SEQ ID NO: 3163192 - RNA, 21 nt, Human
auuguuguuuguauguauaau

SEQ ID NO: 3163193 - RNA, 20 nt, Human
auuguuguuuguauguauaa

SEQ ID NO: 3163194 - RNA, 18 nt, Human
auuguuguuuguauguau

SEQ ID NO: 3163195 - RNA, 17 nt, Human
auuguuguuuguaugua

SEQ ID NO: 3163196 - RNA, 12 nt, Human
auuaguaagauc

SEQ ID NO: 3163197 - RNA, 21 nt, Human
auuaguaagaucucuuucuaa

SEQ ID NO: 3163198 - RNA, 18 nt, Human
auuaguaagcuagcaaau

SEQ ID NO: 3163199 - RNA, 17 nt, Human
auuaguacuggauuauu

SEQ ID NO: 3163200 - RNA, 15 nt, Human
auuaguacuuuauag

SEQ ID NO: 3163201 - RNA, 13 nt, Human
auuaguacuuuau

SEQ ID NO: 3163202 - RNA, 16 nt, Human
auuaggcaugguuuug

SEQ ID NO: 3163203 - RNA, 18 nt, Human
auuaaauuaguuugugaa

SEQ ID NO: 3163204 - RNA, 16 nt, Human
auuaggauuucaugau

SEQ ID NO: 3163205 - RNA, 14 nt, Human
auuaggauuucaug

SEQ ID NO: 3163206 - RNA, 18 nt, Human
auuaaauuacauuuguaa

SEQ ID NO: 3163207 - RNA, 22 nt, Human
auuaaauuacuauagcaaagua

SEQ ID NO: 3163208 - RNA, 17 nt, Human
auuaaaugcccagcccc

SEQ ID NO: 3163209 - RNA, 19 nt, Human
auuaaaugcccagccccuu

SEQ ID NO: 3163210 - RNA, 16 nt, Human
auuaaaugcuucauuu

SEQ ID NO: 3163211 - RNA, 14 nt, Human
auuaaauguagcuu

SEQ ID NO: 3163212 - RNA, 21 nt, Human
auuaaauguagcuucagucau

SEQ ID NO: 3163213 - RNA, 22 nt, Human
auuaaauguagcuucagucauu

SEQ ID NO: 3163214 - RNA, 24 nt, Human
auuaaauguagcuucagucauuaa

SEQ ID NO: 3163215 - RNA, 14 nt, Human
auuaaauuacauuu

SEQ ID NO: 3163216 - RNA, 17 nt, Human
auuaaauuacauuugua

SEQ ID NO: 3163217 - RNA, 15 nt, Human
auuaaauuacauuug

SEQ ID NO: 3163218 - RNA, 12 nt, Human
auuaaauuacau

SEQ ID NO: 3163219 - RNA, 18 nt, Human
auucaacagguuuuccug

SEQ ID NO: 3163220 - RNA, 12 nt, Human
auucaaauuuau

SEQ ID NO: 3163221 - RNA, 13 nt, Human
auucaaauuuauu

SEQ ID NO: 3163222 - RNA, 21 nt, Human
auucaaauuuauuuccaaugu

SEQ ID NO: 3163223 - RNA, 18 nt, Human
auucaacagcaaguguga

SEQ ID NO: 3163224 - RNA, 21 nt, Human
auucaacagcaagugugaaua

SEQ ID NO: 3163225 - RNA, 22 nt, Human
auucaacagcaagugugaauac

SEQ ID NO: 3163226 - RNA, 19 nt, Human
auuaugguaaaauuuugua

SEQ ID NO: 3163227 - RNA, 15 nt, Human
auuauggaaaaauaa

SEQ ID NO: 3163228 - RNA, 19 nt, Human
auuauggaaaaauaaaacu

SEQ ID NO: 3163229 - RNA, 20 nt, Human
auuauggaaaaauaaaacug

SEQ ID NO: 3163230 - RNA, 22 nt, Human
auuauggaaaaauaaaacuguc

SEQ ID NO: 3163231 - RNA, 16 nt, Human
auuaugcuaagaauuu

SEQ ID NO: 3163232 - RNA, 13 nt, Human
auuaugcuaagaa

SEQ ID NO: 3163233 - RNA, 11 nt, Human
auuaugcuaag

SEQ ID NO: 3163234 - RNA, 21 nt, Human
auucaauaguaauauaauaca

SEQ ID NO: 3163235 - RNA, 17 nt, Human
auucaauaguaauauaa

SEQ ID NO: 3163236 - RNA, 19 nt, Human
auuccugcccugcuguuua

SEQ ID NO: 3163237 - RNA, 15 nt, Human
auuccugcauuugug

SEQ ID NO: 3163238 - RNA, 18 nt, Human
auuccugcauuugugaaa

SEQ ID NO: 3163239 - RNA, 18 nt, Human
auuccugcccugcuguuu

SEQ ID NO: 3163240 - RNA, 21 nt, Human
auuccucaacaguguuuucag

SEQ ID NO: 3163241 - RNA, 22 nt, Human
auucuucuguacgucugacagg

SEQ ID NO: 3163242 - RNA, 20 nt, Human
auucuucugcuucagccucc

SEQ ID NO: 3163243 - RNA, 19 nt, Human
auucuucugcuucagccuc

SEQ ID NO: 3163244 - RNA, 17 nt, Human
auucucuguacauauua

SEQ ID NO: 3163245 - RNA, 14 nt, Human
auucucuguacaua

SEQ ID NO: 3163246 - RNA, 11 nt, Human
auucucuguac

SEQ ID NO: 3163247 - RNA, 14 nt, Human
auucuucugcuuca

SEQ ID NO: 3163248 - RNA, 15 nt, Human
cacuuaaaaaugguu

SEQ ID NO: 3163249 - RNA, 16 nt, Human
cacuuaaaacacguuu

SEQ ID NO: 3163250 - RNA, 22 nt, Human
cacuuaaaacacguuuuaagga

SEQ ID NO: 3163251 - RNA, 19 nt, Human
cacuguugcccaggcuggc

SEQ ID NO: 3163252 - RNA, 18 nt, Human
cacuguugcccaggcugg

SEQ ID NO: 3163253 - RNA, 23 nt, Human
cacuguugcccaggcuggcgugc

SEQ ID NO: 3163254 - RNA, 17 nt, Human
cacuguugcccaggcug

SEQ ID NO: 3163255 - RNA, 13 nt, Human
cacugggcuucua

SEQ ID NO: 3163256 - RNA, 14 nt, Human
cacugcagccucaa

SEQ ID NO: 3163257 - RNA, 19 nt, Human
cacugcagccucaaccucc

SEQ ID NO: 3163258 - RNA, 23 nt, Human
cacugcagccucaaccuccuggg

SEQ ID NO: 3163259 - RNA, 22 nt, Human
cacugcagccucaaccuccugg

SEQ ID NO: 3163260 - RNA, 21 nt, Human
cacugcagccucaaccuccug

SEQ ID NO: 3163261 - RNA, 20 nt, Human
cacugcagccucaaccuccu

SEQ ID NO: 3163262 - RNA, 17 nt, Human
cacugccaugccagcuu

SEQ ID NO: 3163263 - RNA, 23 nt, Human
cacugcagccuccgcuucccugg

SEQ ID NO: 3163264 - RNA, 22 nt, Human
cacugcagccuccgcuucccug

SEQ ID NO: 3163265 - RNA, 21 nt, Human
cacugcagccuccgcuucccu

SEQ ID NO: 3163266 - RNA, 19 nt, Human
cacugcagccuccgcuucc

SEQ ID NO: 3163267 - RNA, 22 nt, Human
cacuuaaguuaguuccacugag

SEQ ID NO: 3163268 - RNA, 20 nt, Human
cacuuaaguuaguuccacug

SEQ ID NO: 3163269 - RNA, 13 nt, Human
cacuuaauucugu

SEQ ID NO: 3163270 - RNA, 14 nt, Human
cacuuaauucuguu

SEQ ID NO: 3163271 - RNA, 15 nt, Human
cacuuaauucuguuc

SEQ ID NO: 3163272 - RNA, 18 nt, Human
cacuuguguuaugaagca

SEQ ID NO: 3163273 - RNA, 12 nt, Human
cacuuuaauggg

SEQ ID NO: 3163274 - RNA, 19 nt, Human
cacuuguugauuaauggaa

SEQ ID NO: 3163275 - RNA, 16 nt, Human
cacuuucuagccagag

SEQ ID NO: 3163276 - RNA, 17 nt, Human
cacuuucuagccagagg

SEQ ID NO: 3163277 - RNA, 13 nt, Human
cacuuucuagcca

SEQ ID NO: 3163278 - RNA, 15 nt, Human
cagaaauaauaaaaa

SEQ ID NO: 3163279 - RNA, 14 nt, Human
cagaaauagacaaa

SEQ ID NO: 3163280 - RNA, 16 nt, Human
cagaaauagacaaaaa

SEQ ID NO: 3163281 - RNA, 20 nt, Human
cagaaauagacaaaaaguau

SEQ ID NO: 3163282 - RNA, 21 nt, Human
cagaaauagacaaaaaguaua

SEQ ID NO: 3163283 - RNA, 19 nt, Human
cagaaauacagauaaauga

SEQ ID NO: 3163284 - RNA, 11 nt, Human
cagaaauacag

SEQ ID NO: 3163285 - RNA, 15 nt, Human
cagaaaucugaggaa

SEQ ID NO: 3163286 - RNA, 14 nt, Human
cagaaaucugagga

SEQ ID NO: 3163287 - RNA, 12 nt, Human
cagaacagcugu

SEQ ID NO: 3163288 - RNA, 20 nt, Human
cagaacagcuguugacucua

SEQ ID NO: 3163289 - RNA, 13 nt, Human
cagaacagcuguu

SEQ ID NO: 3163290 - RNA, 22 nt, Human
cagaaaugucccuuucuucucc

SEQ ID NO: 3163291 - RNA, 17 nt, Human
cagaaaugucccuuucu

SEQ ID NO: 3163292 - RNA, 16 nt, Human
cagaaaugucccuuuc

SEQ ID NO: 3163293 - RNA, 23 nt, Human
cagaaaugucaugagauugcugu

SEQ ID NO: 3163294 - RNA, 11 nt, Human
cagaacaguga

SEQ ID NO: 3163295 - RNA, 14 nt, Human
cagaacagcuucau

SEQ ID NO: 3163296 - RNA, 12 nt, Human
cagaacagugau

SEQ ID NO: 3163297 - RNA, 17 nt, Human
cagaacagugauuacca

SEQ ID NO: 3163298 - RNA, 14 nt, Human
cagaaguuucugcc

SEQ ID NO: 3163299 - RNA, 16 nt, Human
cagaaguuucugccgc

SEQ ID NO: 3163300 - RNA, 19 nt, Human
cagaaguuucucagcuccc

SEQ ID NO: 3163301 - RNA, 15 nt, Human
cagaaguuucucagc

SEQ ID NO: 3163302 - RNA, 23 nt, Human
cacuccagccugagcgacaguga

SEQ ID NO: 3163303 - RNA, 16 nt, Human
cacuaccccuugauuu

SEQ ID NO: 3163304 - RNA, 14 nt, Human
cacuccagccuggg

SEQ ID NO: 3163305 - RNA, 13 nt, Human
cacuccagccugg

SEQ ID NO: 3163306 - RNA, 20 nt, Human
cacucugucgcccagucugg

SEQ ID NO: 3163307 - RNA, 13 nt, Human
cacuccagccuga

SEQ ID NO: 3163308 - RNA, 12 nt, Human
cacuccagccug

SEQ ID NO: 3163309 - RNA, 17 nt, Human
cacuaccaaaggacacu

SEQ ID NO: 3163310 - RNA, 22 nt, Human
cacuaccaaaggacacuuaucc

SEQ ID NO: 3163311 - RNA, 15 nt, Human
cacuaccccuugauu

SEQ ID NO: 3163312 - RNA, 12 nt, Human
cacggccaggcc

SEQ ID NO: 3163313 - RNA, 17 nt, Human
cacggccaggccagagg

SEQ ID NO: 3163314 - RNA, 14 nt, Human
cacggcucacugca

SEQ ID NO: 3163315 - RNA, 14 nt, Human
cacggccuccuuuc

SEQ ID NO: 3163316 - RNA, 12 nt, Human
cacggccuccuu

SEQ ID NO: 3163317 - RNA, 22 nt, Human
cacucuuauugcccacgcugga

SEQ ID NO: 3163318 - RNA, 21 nt, Human
cacucuuauugcccacgcugg

SEQ ID NO: 3163319 - RNA, 20 nt, Human
cacucuuauugcccacgcug

SEQ ID NO: 3163320 - RNA, 19 nt, Human
cacucuuauugcccacgcu

SEQ ID NO: 3163321 - RNA, 16 nt, Human
caccuuggcugcaggg

SEQ ID NO: 3163322 - RNA, 15 nt, Human
caccuuggcugcagg

SEQ ID NO: 3163323 - RNA, 18 nt, Human
caccuuggcugcagggag

SEQ ID NO: 3163324 - RNA, 23 nt, Human
caccuuuauucuggcagaggagg

SEQ ID NO: 3163325 - RNA, 14 nt, Human
caccuuggcugcag

SEQ ID NO: 3163326 - RNA, 13 nt, Human
caccugcccaacc

SEQ ID NO: 3163327 - RNA, 19 nt, Human
caccugcccaaccugcucu

SEQ ID NO: 3163328 - RNA, 18 nt, Human
caccugcccaaccugcuc

SEQ ID NO: 3163329 - RNA, 17 nt, Human
caccuuuguccccaccg

SEQ ID NO: 3163330 - RNA, 14 nt, Human
caccuuucccaucu

SEQ ID NO: 3163331 - RNA, 14 nt, Human
caccuuuauucugg

SEQ ID NO: 3163332 - RNA, 16 nt, Human
caccucacucagcacc

SEQ ID NO: 3163333 - RNA, 15 nt, Human
caccucacucagcac

SEQ ID NO: 3163334 - RNA, 14 nt, Human
caccucacucagca

SEQ ID NO: 3163335 - RNA, 13 nt, Human
caccucacucagc

SEQ ID NO: 3163336 - RNA, 16 nt, Human
caccucacucugcuac

SEQ ID NO: 3163337 - RNA, 21 nt, Human
caccucacucagcaccacuca

SEQ ID NO: 3163338 - RNA, 20 nt, Human
caccucacucagcaccacuc

SEQ ID NO: 3163339 - RNA, 19 nt, Human
caccucacucagcaccacu

SEQ ID NO: 3163340 - RNA, 17 nt, Human
caccucacucagcacca

SEQ ID NO: 3163341 - RNA, 12 nt, Human
caccuacugagu

SEQ ID NO: 3163342 - RNA, 20 nt, Human
caauaaaaucuugaaaaugc

SEQ ID NO: 3163343 - RNA, 18 nt, Human
caaguuuucccugaaguu

SEQ ID NO: 3163344 - RNA, 16 nt, Human
caaguuuucccugaag

SEQ ID NO: 3163345 - RNA, 17 nt, Human
caaguuuuccauauuuu

SEQ ID NO: 3163346 - RNA, 13 nt, Human
caaguuuuaaagu

SEQ ID NO: 3163347 - RNA, 14 nt, Human
caaguuuuaaaguu

SEQ ID NO: 3163348 - RNA, 15 nt, Human
caaguuuuaaaguuc

SEQ ID NO: 3163349 - RNA, 14 nt, Human
caauaaaagcccag

SEQ ID NO: 3163350 - RNA, 16 nt, Human
caauaaaagcccagga

SEQ ID NO: 3163351 - RNA, 15 nt, Human
caauaaaagcccagg

SEQ ID NO: 3163352 - RNA, 22 nt, Human
caauaaaagcccaggagcccau

SEQ ID NO: 3163353 - RNA, 19 nt, Human
caauaaaagcccaggagcc

SEQ ID NO: 3163354 - RNA, 18 nt, Human
caauaaaagcccaggagc

SEQ ID NO: 3163355 - RNA, 17 nt, Human
caauaaaagcccaggag

SEQ ID NO: 3163356 - RNA, 15 nt, Human
caaggcgcuaacuug

SEQ ID NO: 3163357 - RNA, 15 nt, Human
caaggcucugagcaa

SEQ ID NO: 3163358 - RNA, 19 nt, Human
caaggccaaaggaagcaca

SEQ ID NO: 3163359 - RNA, 20 nt, Human
caaggccaaaggaagcacau

SEQ ID NO: 3163360 - RNA, 21 nt, Human
caaggccaaaggaagcacaug

SEQ ID NO: 3163361 - RNA, 12 nt, Human
caaggccaccuc

SEQ ID NO: 3163362 - RNA, 20 nt, Human
caaggccaccucuuccuggc

SEQ ID NO: 3163363 - RNA, 19 nt, Human
caaggccaccucuuccugg

SEQ ID NO: 3163364 - RNA, 14 nt, Human
caaggccaccucuu

SEQ ID NO: 3163365 - RNA, 13 nt, Human
caaggccaccucu

SEQ ID NO: 3163366 - RNA, 15 nt, Human
caaggcccccugccu

SEQ ID NO: 3163367 - RNA, 22 nt, Human
caaggccaccucuuccuggccg

SEQ ID NO: 3163368 - RNA, 21 nt, Human
caaggccaccucuuccuggcc

SEQ ID NO: 3163369 - RNA, 20 nt, Human
caaggcccccugccugcccu

SEQ ID NO: 3163370 - RNA, 17 nt, Human
caaggcccccugccugc

SEQ ID NO: 3163371 - RNA, 18 nt, Human
caaggcaaggcugucaau

SEQ ID NO: 3163372 - RNA, 21 nt, Human
caagaaugaagguuuuuguaa

SEQ ID NO: 3163373 - RNA, 17 nt, Human
caaggcaaggcugucaa

SEQ ID NO: 3163374 - RNA, 16 nt, Human
caaggcaaggcuguca

SEQ ID NO: 3163375 - RNA, 16 nt, Human
caagauugucauuagu

SEQ ID NO: 3163376 - RNA, 20 nt, Human
cacaagcuccaagcucccag

SEQ ID NO: 3163377 - RNA, 13 nt, Human
caaugcuggcugu

SEQ ID NO: 3163378 - RNA, 16 nt, Human
caaucccugaucccug

SEQ ID NO: 3163379 - RNA, 23 nt, Human
caaucccaccaacccucagagcc

SEQ ID NO: 3163380 - RNA, 21 nt, Human
caaugcuggcuguuggcuggg

SEQ ID NO: 3163381 - RNA, 20 nt, Human
caaugcuggcuguuggcugg

SEQ ID NO: 3163382 - RNA, 12 nt, Human
caaugcuggcug

SEQ ID NO: 3163383 - RNA, 16 nt, Human
caauggcagccuuggc

SEQ ID NO: 3163384 - RNA, 22 nt, Human
caaucaguagcuuaagaaaaaa

SEQ ID NO: 3163385 - RNA, 21 nt, Human
caaucaguagcuuaagaaaaa

SEQ ID NO: 3163386 - RNA, 17 nt, Human
caaucaguagcuuaaga

SEQ ID NO: 3163387 - RNA, 22 nt, Human
caaucccaccaacccucagagc

SEQ ID NO: 3163388 - RNA, 17 nt, Human
caaucccaccaacccuc

SEQ ID NO: 3163389 - RNA, 16 nt, Human
caaucccaccaacccu

SEQ ID NO: 3163390 - RNA, 16 nt, Human
caauccaucagugcca

SEQ ID NO: 3163391 - RNA, 17 nt, Human
cacaagagcccaggccu

SEQ ID NO: 3163392 - RNA, 20 nt, Human
cacaagagcccaggccuccu

SEQ ID NO: 3163393 - RNA, 18 nt, Human
cacaagcuccaagcuccc

SEQ ID NO: 3163394 - RNA, 19 nt, Human
cacaagcuccaagcuccca

SEQ ID NO: 3163395 - RNA, 18 nt, Human
cacaagagcccaggccuc

SEQ ID NO: 3163396 - RNA, 19 nt, Human
cacaagagcccaggccucc

SEQ ID NO: 3163397 - RNA, 17 nt, Human
caauggcuauuaacaau

SEQ ID NO: 3163398 - RNA, 20 nt, Human
caauggcuauuaacaauuaa

SEQ ID NO: 3163399 - RNA, 14 nt, Human
cacacauuucacug

SEQ ID NO: 3163400 - RNA, 16 nt, Human
cacacauuucacuguc

SEQ ID NO: 3163401 - RNA, 22 nt, Human
cacacauuucacugucugucug

SEQ ID NO: 3163402 - RNA, 19 nt, Human
cacacauuucacugucugu

SEQ ID NO: 3163403 - RNA, 21 nt, Human
cacaccaaucuuacuuuguaa

SEQ ID NO: 3163404 - RNA, 13 nt, Human
cacagaacccuug

SEQ ID NO: 3163405 - RNA, 10 nt, Human
cacagcucuu

SEQ ID NO: 3163406 - RNA, 18 nt, Human
cacagcucuguccuggga

SEQ ID NO: 3163407 - RNA, 16 nt, Human
cacagcucuguccugg

SEQ ID NO: 3163408 - RNA, 15 nt, Human
cacagcucuguccug

SEQ ID NO: 3163409 - RNA, 15 nt, Human
cacagcucuucucca

SEQ ID NO: 3163410 - RNA, 14 nt, Human
cacagcucuucucc

SEQ ID NO: 3163411 - RNA, 17 nt, Human
cacagcucuucuccagg

SEQ ID NO: 3163412 - RNA, 22 nt, Human
cacagcuccuuuuccagagcau

SEQ ID NO: 3163413 - RNA, 14 nt, Human
cacagcucuguccu

SEQ ID NO: 3163414 - RNA, 11 nt, Human
cacagcucugu

SEQ ID NO: 3163415 - RNA, 12 nt, Human
cacagcuccuuu

SEQ ID NO: 3163416 - RNA, 21 nt, Human
cacagcuccuuuuccagagca

SEQ ID NO: 3163417 - RNA, 13 nt, Human
cacagcuccuuuu

SEQ ID NO: 3163418 - RNA, 16 nt, Human
cacagacccugcccug

SEQ ID NO: 3163419 - RNA, 17 nt, Human
cacagacccugcccugu

SEQ ID NO: 3163420 - RNA, 14 nt, Human
cacagacccugccc

SEQ ID NO: 3163421 - RNA, 18 nt, Human
cacaggcugggcugggca

SEQ ID NO: 3163422 - RNA, 17 nt, Human
cacaggcugggcugggc

SEQ ID NO: 3163423 - RNA, 16 nt, Human
cacaggcugggcuggg

SEQ ID NO: 3163424 - RNA, 13 nt, Human
cacaggcugggcu

SEQ ID NO: 3163425 - RNA, 22 nt, Human
cacaggcugggcugggcacugc

SEQ ID NO: 3163426 - RNA, 19 nt, Human
cacaggcugggcugggcac

SEQ ID NO: 3163427 - RNA, 22 nt, Human
cacaggcugagugcaggcccac

SEQ ID NO: 3163428 - RNA, 21 nt, Human
cacaggcugagugcaggccca

SEQ ID NO: 3163429 - RNA, 20 nt, Human
cacaggcugagugcaggccc

SEQ ID NO: 3163430 - RNA, 18 nt, Human
cacaggcugagugcaggc

SEQ ID NO: 3163431 - RNA, 17 nt, Human
cacaggcugagugcagg

SEQ ID NO: 3163432 - RNA, 14 nt, Human
cacaggcugagugc

SEQ ID NO: 3163433 - RNA, 14 nt, Human
caccaacgucugug

SEQ ID NO: 3163434 - RNA, 13 nt, Human
caccaacccucag

SEQ ID NO: 3163435 - RNA, 19 nt, Human
caccaaaauaagaaaagau

SEQ ID NO: 3163436 - RNA, 18 nt, Human
caccaaaauaagaaaaga

SEQ ID NO: 3163437 - RNA, 17 nt, Human
caccaaaauaagaaaag

SEQ ID NO: 3163438 - RNA, 12 nt, Human
caccaaaauaag

SEQ ID NO: 3163439 - RNA, 17 nt, Human
cacccaccucagccucc

SEQ ID NO: 3163440 - RNA, 18 nt, Human
caccagggaaggggacaa

SEQ ID NO: 3163441 - RNA, 21 nt, Human
caccagggaaggggacaagga

SEQ ID NO: 3163442 - RNA, 13 nt, Human
caccagggaaggg

SEQ ID NO: 3163443 - RNA, 13 nt, Human
caccagccccagu

SEQ ID NO: 3163444 - RNA, 16 nt, Human
caccagccccaaucca

SEQ ID NO: 3163445 - RNA, 15 nt, Human
caccagcccagaagu

SEQ ID NO: 3163446 - RNA, 14 nt, Human
caccagcccagaag

SEQ ID NO: 3163447 - RNA, 18 nt, Human
cacccaccucagccuccc

SEQ ID NO: 3163448 - RNA, 16 nt, Human
cacccaggagccccga

SEQ ID NO: 3163449 - RNA, 11 nt, Human
cacccagccug

SEQ ID NO: 3163450 - RNA, 12 nt, Human
cacccagccugg

SEQ ID NO: 3163451 - RNA, 21 nt, Human
ccugccucuccgccccugagc

SEQ ID NO: 3163452 - RNA, 18 nt, Human
ccugccucuccgccccug

SEQ ID NO: 3163453 - RNA, 17 nt, Human
ccugccucuccgccccu

SEQ ID NO: 3163454 - RNA, 16 nt, Human
ccugccucuccgcccc

SEQ ID NO: 3163455 - RNA, 13 nt, Human
ccugccucuccgc

SEQ ID NO: 3163456 - RNA, 17 nt, Human
ccugcccacaccuccug

SEQ ID NO: 3163457 - RNA, 17 nt, Human
ccugccucagccucccg

SEQ ID NO: 3163458 - RNA, 18 nt, Human
ccugcugagucccaggcu

SEQ ID NO: 3163459 - RNA, 15 nt, Human
ccugcugagucccag

SEQ ID NO: 3163460 - RNA, 23 nt, Human
ccugccucuccgccccugagccc

SEQ ID NO: 3163461 - RNA, 22 nt, Human
ccugccucuccgccccugagcc

SEQ ID NO: 3163462 - RNA, 19 nt, Human
ccugcugagucccaggcug

SEQ ID NO: 3163463 - RNA, 20 nt, Human
ccugcugagucccaggcuga

SEQ ID NO: 3163464 - RNA, 18 nt, Human
ccugcccaccuggccucu

SEQ ID NO: 3163465 - RNA, 19 nt, Human
ccugcccaggccccugcca

SEQ ID NO: 3163466 - RNA, 18 nt, Human
ccugcccaggccccugcc

SEQ ID NO: 3163467 - RNA, 21 nt, Human
ccugcccaggccccugccacc

SEQ ID NO: 3163468 - RNA, 15 nt, Human
ccugccucagccucc

SEQ ID NO: 3163469 - RNA, 16 nt, Human
ccugccucagccuccc

SEQ ID NO: 3163470 - RNA, 18 nt, Human
ccugccaucauguuuaca

SEQ ID NO: 3163471 - RNA, 20 nt, Human
ccugccaucauguuuacaga

SEQ ID NO: 3163472 - RNA, 15 nt, Human
ccugcccaccuggcc

SEQ ID NO: 3163473 - RNA, 17 nt, Human
ccugcccaccuggccuc

SEQ ID NO: 3163474 - RNA, 21 nt, Human
ccugaguuccuagccaccgcc

SEQ ID NO: 3163475 - RNA, 20 nt, Human
ccugaguuccuagccaccgc

SEQ ID NO: 3163476 - RNA, 18 nt, Human
ccugaguuccuagccacc

SEQ ID NO: 3163477 - RNA, 14 nt, Human
ccugaguuccugag

SEQ ID NO: 3163478 - RNA, 13 nt, Human
ccugaguuccuga

SEQ ID NO: 3163479 - RNA, 18 nt, Human
ccugaguugaagagggga

SEQ ID NO: 3163480 - RNA, 15 nt, Human
ccugaguugaagagg

SEQ ID NO: 3163481 - RNA, 13 nt, Human
ccugaguugaaga

SEQ ID NO: 3163482 - RNA, 22 nt, Human
ccugaguuccugaggugaugaa

SEQ ID NO: 3163483 - RNA, 22 nt, Human
ccugauauugaaguaaaaaauu

SEQ ID NO: 3163484 - RNA, 12 nt, Human
ccugcaggcagc

SEQ ID NO: 3163485 - RNA, 13 nt, Human
ccugcaggcagcc

SEQ ID NO: 3163486 - RNA, 14 nt, Human
ccugcaggcagcca

SEQ ID NO: 3163487 - RNA, 19 nt, Human
ccugaguuccuagccaccg

SEQ ID NO: 3163488 - RNA, 23 nt, Human
ccugaggugaugaagacagcccg

SEQ ID NO: 3163489 - RNA, 18 nt, Human
ccugagaucucugcagga

SEQ ID NO: 3163490 - RNA, 22 nt, Human
ccugagaugguaugcacaauuc

SEQ ID NO: 3163491 - RNA, 17 nt, Human
ccugagaucucugcagg

SEQ ID NO: 3163492 - RNA, 18 nt, Human
ccugaccccucauagccc

SEQ ID NO: 3163493 - RNA, 16 nt, Human
ccucggauccccuucc

SEQ ID NO: 3163494 - RNA, 20 nt, Human
ccucggaucagcugagccuu

SEQ ID NO: 3163495 - RNA, 17 nt, Human
ccucggaucagcugagc

SEQ ID NO: 3163496 - RNA, 15 nt, Human
ccucggaucagcuga

SEQ ID NO: 3163497 - RNA, 17 nt, Human
ccucggauccccuuccu

SEQ ID NO: 3163498 - RNA, 15 nt, Human
ccucuuugagugaag

SEQ ID NO: 3163499 - RNA, 19 nt, Human
ccucuuucccucccuuccu

SEQ ID NO: 3163500 - RNA, 15 nt, Human
ccucuuucccuucca

SEQ ID NO: 3163501 - RNA, 18 nt, Human
ccucuuucccuuccaguu

SEQ ID NO: 3163502 - RNA, 16 nt, Human
ccucuuucccuuccag

SEQ ID NO: 3163503 - RNA, 16 nt, Human
ccucuuucccucccuu

SEQ ID NO: 3163504 - RNA, 14 nt, Human
ccucuugccacugc

SEQ ID NO: 3163505 - RNA, 22 nt, Human
ccucuugccacugccucuuccu

SEQ ID NO: 3163506 - RNA, 23 nt, Human
ccucuugccacugccucuuccuc

SEQ ID NO: 3163507 - RNA, 22 nt, Human
ccuggugguucacucuuggagc

SEQ ID NO: 3163508 - RNA, 13 nt, Human
ccuggugguucac

SEQ ID NO: 3163509 - RNA, 12 nt, Human
ccuggugguuca

SEQ ID NO: 3163510 - RNA, 13 nt, Human
ccugguguggaag

SEQ ID NO: 3163511 - RNA, 15 nt, Human
ccuggugguuucugu

SEQ ID NO: 3163512 - RNA, 16 nt, Human
ccugguuuccugcccu

SEQ ID NO: 3163513 - RNA, 23 nt, Human
ccugguucaagcgauucucuugc

SEQ ID NO: 3163514 - RNA, 18 nt, Human
ccugguuuccugcccugg

SEQ ID NO: 3163515 - RNA, 19 nt, Human
ccugguuuccugcccuggg

SEQ ID NO: 3163516 - RNA, 20 nt, Human
ccugguuuccugcccuggga

SEQ ID NO: 3163517 - RNA, 21 nt, Human
ccugguuuccugcccugggag

SEQ ID NO: 3163518 - RNA, 15 nt, Human
ccugguggcaguggg

SEQ ID NO: 3163519 - RNA, 19 nt, Human
ccugguggcagugggagcu

SEQ ID NO: 3163520 - RNA, 18 nt, Human
ccugguggcagugggagc

SEQ ID NO: 3163521 - RNA, 15 nt, Human
ccuggggagaaagua

SEQ ID NO: 3163522 - RNA, 22 nt, Human
ccugggcuuuuguuuugcuuuu

SEQ ID NO: 3163523 - RNA, 19 nt, Human
ccuggggcgcgugaggccc

SEQ ID NO: 3163524 - RNA, 22 nt, Human
ccuggggcgcgugaggcccgug

SEQ ID NO: 3163525 - RNA, 18 nt, Human
ccuggggaaccugacccc

SEQ ID NO: 3163526 - RNA, 19 nt, Human
ccugggcucucgcggccuc

SEQ ID NO: 3163527 - RNA, 22 nt, Human
ccuggccuugggauccaggccc

SEQ ID NO: 3163528 - RNA, 20 nt, Human
ccuggccuugggauccaggc

SEQ ID NO: 3163529 - RNA, 17 nt, Human
ccuggccugucucggaa

SEQ ID NO: 3163530 - RNA, 13 nt, Human
ccuggccugucuc

SEQ ID NO: 3163531 - RNA, 17 nt, Human
ccuggccugucugugaa

SEQ ID NO: 3163532 - RNA, 13 nt, Human
ccuggccugucug

SEQ ID NO: 3163533 - RNA, 15 nt, Human
ccuggauggggcugc

SEQ ID NO: 3163534 - RNA, 17 nt, Human
ccuggauggggcugcac

SEQ ID NO: 3163535 - RNA, 18 nt, Human
ccuggauggggcugcacc

SEQ ID NO: 3163536 - RNA, 16 nt, Human
ccuggccccucagggu

SEQ ID NO: 3163537 - RNA, 18 nt, Human
ccuggccccucagggucc

SEQ ID NO: 3163538 - RNA, 20 nt, Human
ccuggccccucagggucccu

SEQ ID NO: 3163539 - RNA, 21 nt, Human
ccuggccccucagggucccug

SEQ ID NO: 3163540 - RNA, 22 nt, Human
ccuggccucaagugauucuccu

SEQ ID NO: 3163541 - RNA, 20 nt, Human
ccuggccugagcugggauga

SEQ ID NO: 3163542 - RNA, 17 nt, Human
ccugucucuacuaaaaa

SEQ ID NO: 3163543 - RNA, 19 nt, Human
ccugguuuuuggauuaaau

SEQ ID NO: 3163544 - RNA, 22 nt, Human
ccugguuuuuggauuaaauuag

SEQ ID NO: 3163545 - RNA, 22 nt, Human
ccugguuuccugcccugggagg

SEQ ID NO: 3163546 - RNA, 13 nt, Human
ccuguaaacacuc

SEQ ID NO: 3163547 - RNA, 16 nt, Human
ccuguaaacacucagc

SEQ ID NO: 3163548 - RNA, 19 nt, Human
ccuguaaacacucagcugu

SEQ ID NO: 3163549 - RNA, 20 nt, Human
ccuguaaacacucagcuguu

SEQ ID NO: 3163550 - RNA, 12 nt, Human
ccuagccaccca

SEQ ID NO: 3163551 - RNA, 17 nt, Human
ccuaauuaauuucagua

SEQ ID NO: 3163552 - RNA, 16 nt, Human
ccuagccacccaccac

SEQ ID NO: 3163553 - RNA, 20 nt, Human
ccuagccugugccucuggga

SEQ ID NO: 3163554 - RNA, 14 nt, Human
ccuaauuaauuuca

SEQ ID NO: 3163555 - RNA, 21 nt, Human
ccuaauuaauauauuaaaauu

SEQ ID NO: 3163556 - RNA, 15 nt, Human
ccuaauggugaugca

SEQ ID NO: 3163557 - RNA, 21 nt, Human
ccuaaugcgcaggcuggcccu

SEQ ID NO: 3163558 - RNA, 20 nt, Human
ccuaaugcgcaggcuggccc

SEQ ID NO: 3163559 - RNA, 12 nt, Human
ccgugagcccuu

SEQ ID NO: 3163560 - RNA, 12 nt, Human
ccuaauaaaacu

SEQ ID NO: 3163561 - RNA, 14 nt, Human
ccuaauaaaacuga

SEQ ID NO: 3163562 - RNA, 15 nt, Human
ccuaauaaaacugau

SEQ ID NO: 3163563 - RNA, 16 nt, Human
ccuaauaaaacugaug

SEQ ID NO: 3163564 - RNA, 18 nt, Human
ccuaauaaaacugaugug

SEQ ID NO: 3163565 - RNA, 19 nt, Human
ccuaauaaaacugauguga

SEQ ID NO: 3163566 - RNA, 21 nt, Human
ccuaauaaaacugaugugaaa

SEQ ID NO: 3163567 - RNA, 22 nt, Human
ccuaauaaaacugaugugaaac

SEQ ID NO: 3163568 - RNA, 23 nt, Human
ccuaauaaaacugaugugaaacu

SEQ ID NO: 3163569 - RNA, 13 nt, Human
ccgucuuccucca

SEQ ID NO: 3163570 - RNA, 17 nt, Human
ccgugaagauacuuugu

SEQ ID NO: 3163571 - RNA, 18 nt, Human
ccgugaagauacuuugua

SEQ ID NO: 3163572 - RNA, 20 nt, Human
ccgugaagauacuuuguauu

SEQ ID NO: 3163573 - RNA, 23 nt, Human
ccuagccugugccucugggacug

SEQ ID NO: 3163574 - RNA, 19 nt, Human
ccuagccuuagaagucaca

SEQ ID NO: 3163575 - RNA, 22 nt, Human
ccuagccuuagaagucacacag

SEQ ID NO: 3163576 - RNA, 18 nt, Human
ccggccaccugcggugcu

SEQ ID NO: 3163577 - RNA, 14 nt, Human
ccggcccaguuuug

SEQ ID NO: 3163578 - RNA, 17 nt, Human
ccggccaggugccuccu

SEQ ID NO: 3163579 - RNA, 18 nt, Human
ccggccaggugccuccug

SEQ ID NO: 3163580 - RNA, 19 nt, Human
ccggccaggugccuccuga

SEQ ID NO: 3163581 - RNA, 20 nt, Human
ccggccaggugccuccugac

SEQ ID NO: 3163582 - RNA, 14 nt, Human
ccggccaguggcgg

SEQ ID NO: 3163583 - RNA, 20 nt, Human
ccggccaguggcggaaguga

SEQ ID NO: 3163584 - RNA, 17 nt, Human
ccggccaccugcggugc

SEQ ID NO: 3163585 - RNA, 23 nt, Human
ccguacgacucuuuuccaaacac

SEQ ID NO: 3163586 - RNA, 16 nt, Human
ccguaaaaacugaagu

SEQ ID NO: 3163587 - RNA, 12 nt, Human
ccguaaaaacug

SEQ ID NO: 3163588 - RNA, 20 nt, Human
ccguaaaaacugaaguucug

SEQ ID NO: 3163589 - RNA, 14 nt, Human
ccgucccccucugg

SEQ ID NO: 3163590 - RNA, 17 nt, Human
ccguccccucccaggga

SEQ ID NO: 3163591 - RNA, 16 nt, Human
ccguccccucccaggg

SEQ ID NO: 3163592 - RNA, 15 nt, Human
ccguccccucccagg

SEQ ID NO: 3163593 - RNA, 14 nt, Human
ccguccccucccag

SEQ ID NO: 3163594 - RNA, 11 nt, Human
ccguccccucc

SEQ ID NO: 3163595 - RNA, 23 nt, Human
ccggcaauaaaagcccaggagcc

SEQ ID NO: 3163596 - RNA, 20 nt, Human
ccggcaauaaaagcccagga

SEQ ID NO: 3163597 - RNA, 19 nt, Human
ccggcaauaaaagcccagg

SEQ ID NO: 3163598 - RNA, 23 nt, Human
ccgcagagaagugacgguuccua

SEQ ID NO: 3163599 - RNA, 17 nt, Human
ccgacagcuuuccagua

SEQ ID NO: 3163600 - RNA, 15 nt, Human
ccgacagcuuuccag

SEQ ID NO: 3163601 - RNA, 22 nt, Human
ccgacagccuggcacagggcag

SEQ ID NO: 3163602 - RNA, 15 nt, Human
ccgacagccuggcac

SEQ ID NO: 3163603 - RNA, 12 nt, Human
ccgacagccugg

SEQ ID NO: 3163604 - RNA, 14 nt, Human
ccgacagccuggca

SEQ ID NO: 3163605 - RNA, 13 nt, Human
ccgacagccuggc

SEQ ID NO: 3163606 - RNA, 23 nt, Human
ccgaaaggucaccucacucagca

SEQ ID NO: 3163607 - RNA, 15 nt, Human
ccgaaaugcugucuu

SEQ ID NO: 3163608 - RNA, 22 nt, Human
ccgaaaggucaccucacucagc

SEQ ID NO: 3163609 - RNA, 18 nt, Human
ccgaacugggcauauuuc

SEQ ID NO: 3163610 - RNA, 17 nt, Human
ccgaacuguuguauaaa

SEQ ID NO: 3163611 - RNA, 14 nt, Human
cccuucucuccagc

SEQ ID NO: 3163612 - RNA, 21 nt, Human
cccuuuuuuggcugcugaagg

SEQ ID NO: 3163613 - RNA, 22 nt, Human
cccuuuuuuggcugcugaaggc

SEQ ID NO: 3163614 - RNA, 23 nt, Human
cccuuuuuuggcugcugaaggcu

SEQ ID NO: 3163615 - RNA, 23 nt, Human
cccugugaguacuacaguccucc

SEQ ID NO: 3163616 - RNA, 15 nt, Human
cccugugauggggcc

SEQ ID NO: 3163617 - RNA, 21 nt, Human
cccugugaguacuacaguccu

SEQ ID NO: 3163618 - RNA, 14 nt, Human
cccuccuuucacca

SEQ ID NO: 3163619 - RNA, 19 nt, Human
cccuccuucccacucuucu

SEQ ID NO: 3163620 - RNA, 13 nt, Human
cccuccuucccac

SEQ ID NO: 3163621 - RNA, 14 nt, Human
ccgcagcccugcag

SEQ ID NO: 3163622 - RNA, 18 nt, Human
ccgcagcccugcagaggg

SEQ ID NO: 3163623 - RNA, 15 nt, Human
ccuccuagccaccca

SEQ ID NO: 3163624 - RNA, 14 nt, Human
ccuccgccucuugg

SEQ ID NO: 3163625 - RNA, 14 nt, Human
ccuccgcuucccug

SEQ ID NO: 3163626 - RNA, 19 nt, Human
ccuccggccaggugccucc

SEQ ID NO: 3163627 - RNA, 20 nt, Human
ccuccggccaggugccuccu

SEQ ID NO: 3163628 - RNA, 21 nt, Human
ccuccggccaggugccuccug

SEQ ID NO: 3163629 - RNA, 15 nt, Human
ccuccgcggcgggcc

SEQ ID NO: 3163630 - RNA, 18 nt, Human
ccuccgcggcgggcccug

SEQ ID NO: 3163631 - RNA, 13 nt, Human
ccuccgccucuug

SEQ ID NO: 3163632 - RNA, 16 nt, Human
ccucccuucucuucac

SEQ ID NO: 3163633 - RNA, 20 nt, Human
ccucccuuggggccuaugca

SEQ ID NO: 3163634 - RNA, 14 nt, Human
ccucggagaagagc

SEQ ID NO: 3163635 - RNA, 12 nt, Human
ccucggagaaga

SEQ ID NO: 3163636 - RNA, 14 nt, Human
ccucgcuucuuuca

SEQ ID NO: 3163637 - RNA, 19 nt, Human
ccucggacuuagcugggag

SEQ ID NO: 3163638 - RNA, 20 nt, Human
ccucggacuuagcugggaga

SEQ ID NO: 3163639 - RNA, 23 nt, Human
ccucgcccagucccagcagccag

SEQ ID NO: 3163640 - RNA, 20 nt, Human
ccucgcccagucccagcagc

SEQ ID NO: 3163641 - RNA, 23 nt, Human
ccucgcaggccucccugccagua

SEQ ID NO: 3163642 - RNA, 22 nt, Human
ccucgcaggccucccugccagu

SEQ ID NO: 3163643 - RNA, 21 nt, Human
ccucgcaggccucccugccag

SEQ ID NO: 3163644 - RNA, 19 nt, Human
ccucgcccagucccagcag

SEQ ID NO: 3163645 - RNA, 18 nt, Human
ccucgcccagucccagca

SEQ ID NO: 3163646 - RNA, 17 nt, Human
ccucgcccagucccagc

SEQ ID NO: 3163647 - RNA, 16 nt, Human
ccucgcccagucccag

SEQ ID NO: 3163648 - RNA, 15 nt, Human
ccucgcccaguccca

SEQ ID NO: 3163649 - RNA, 13 nt, Human
ccucgcccagucc

SEQ ID NO: 3163650 - RNA, 12 nt, Human
ccucgcccaguc

SEQ ID NO: 3163651 - RNA, 18 nt, Human
ccuccuuuucacaguucu

SEQ ID NO: 3163652 - RNA, 19 nt, Human
ccucgcaggccucccugcc

SEQ ID NO: 3163653 - RNA, 16 nt, Human
ccucgaacuccuggca

SEQ ID NO: 3163654 - RNA, 23 nt, Human
ccuccuuugugaggaagccgcug

SEQ ID NO: 3163655 - RNA, 20 nt, Human
ccuccuuugugaggaagccg

SEQ ID NO: 3163656 - RNA, 19 nt, Human
ccuccuaucagaaguuucu

SEQ ID NO: 3163657 - RNA, 16 nt, Human
ccucaacaccucugca

SEQ ID NO: 3163658 - RNA, 23 nt, Human
ccucaaaugaugugccugcuuca

SEQ ID NO: 3163659 - RNA, 17 nt, Human
ccucaacaguguuuuca

SEQ ID NO: 3163660 - RNA, 21 nt, Human
ccucaacucuccuccagaguc

SEQ ID NO: 3163661 - RNA, 23 nt, Human
ccucaacucuccuccagagucag

SEQ ID NO: 3163662 - RNA, 19 nt, Human
ccucaacucuccuccagag

SEQ ID NO: 3163663 - RNA, 15 nt, Human
ccucaaccuccuggg

SEQ ID NO: 3163664 - RNA, 23 nt, Human
ccucaaauccaggacccugccag

SEQ ID NO: 3163665 - RNA, 19 nt, Human
ccucaaauccaggacccug

SEQ ID NO: 3163666 - RNA, 18 nt, Human
ccucaaauccaggacccu

SEQ ID NO: 3163667 - RNA, 17 nt, Human
ccucaaauccaggaccc

SEQ ID NO: 3163668 - RNA, 16 nt, Human
ccucaaauccaggacc

SEQ ID NO: 3163669 - RNA, 19 nt, Human
ccucaaaugaugugccugc

SEQ ID NO: 3163670 - RNA, 24 nt, Human
ccucaaauccaggacccugccagg

SEQ ID NO: 3163671 - RNA, 14 nt, Human
ccucaaauccagga

SEQ ID NO: 3163672 - RNA, 18 nt, Human
ccucauuagcauuuugcu

SEQ ID NO: 3163673 - RNA, 21 nt, Human
ccucauuccaccuucccaugc

SEQ ID NO: 3163674 - RNA, 22 nt, Human
ccucauucccucgucuuuccca

SEQ ID NO: 3163675 - RNA, 21 nt, Human
ccucauucccucgucuuuccc

SEQ ID NO: 3163676 - RNA, 15 nt, Human
ccucauucccucguc

SEQ ID NO: 3163677 - RNA, 12 nt, Human
ccucaggcaggu

SEQ ID NO: 3163678 - RNA, 18 nt, Human
ccucaggcaggugggaug

SEQ ID NO: 3163679 - RNA, 20 nt, Human
ccucaagugauucuccugcc

SEQ ID NO: 3163680 - RNA, 14 nt, Human
ccucaacucugcug

SEQ ID NO: 3163681 - RNA, 15 nt, Human
ccucaacucugcuga

SEQ ID NO: 3163682 - RNA, 16 nt, Human
ccucaacucugcugag

SEQ ID NO: 3163683 - RNA, 18 nt, Human
ccucaacucugcugaggg

SEQ ID NO: 3163684 - RNA, 19 nt, Human
ccucaacucugcugagggu

SEQ ID NO: 3163685 - RNA, 20 nt, Human
ccucaacucugcugaggguc

SEQ ID NO: 3163686 - RNA, 17 nt, Human
ccucccaucacccgcua

SEQ ID NO: 3163687 - RNA, 17 nt, Human
ccuccaagaccuucucc

SEQ ID NO: 3163688 - RNA, 19 nt, Human
ccuccaagaccuucuccuu

SEQ ID NO: 3163689 - RNA, 16 nt, Human
ccuccaagaccuucuc

SEQ ID NO: 3163690 - RNA, 12 nt, Human
ccucccaucacc

SEQ ID NO: 3163691 - RNA, 21 nt, Human
ccucccagggagcaagggcag

SEQ ID NO: 3163692 - RNA, 18 nt, Human
ccucccagggagcaaggg

SEQ ID NO: 3163693 - RNA, 23 nt, Human
ccagggggccagucccugaggca

SEQ ID NO: 3163694 - RNA, 22 nt, Human
ccagggggcuuccugaggggag

SEQ ID NO: 3163695 - RNA, 13 nt, Human
ccagggggcuucc

SEQ ID NO: 3163696 - RNA, 23 nt, Human
ccagggggcuuccugaggggaga

SEQ ID NO: 3163697 - RNA, 22 nt, Human
ccaggggucuugcaaaauuccu

SEQ ID NO: 3163698 - RNA, 14 nt, Human
ccagucaggcucuc

SEQ ID NO: 3163699 - RNA, 15 nt, Human
ccagucccugaggca

SEQ ID NO: 3163700 - RNA, 14 nt, Human
ccaguccccuuccc

SEQ ID NO: 3163701 - RNA, 14 nt, Human
ccagucccccugcc

SEQ ID NO: 3163702 - RNA, 18 nt, Human
ccagucccccugccccag

SEQ ID NO: 3163703 - RNA, 18 nt, Human
ccaguccccuucccguga

SEQ ID NO: 3163704 - RNA, 14 nt, Human
ccaggcaggucuug

SEQ ID NO: 3163705 - RNA, 12 nt, Human
ccaggcaggucu

SEQ ID NO: 3163706 - RNA, 23 nt, Human
ccaggcaggucuugaacuccugg

SEQ ID NO: 3163707 - RNA, 14 nt, Human
ccaggcugcucuca

SEQ ID NO: 3163708 - RNA, 21 nt, Human
ccaggcugcucuugaacuccu

SEQ ID NO: 3163709 - RNA, 12 nt, Human
ccaggcuggcgu

SEQ ID NO: 3163710 - RNA, 23 nt, Human
ccaggcugcucucaaaccccuga

SEQ ID NO: 3163711 - RNA, 21 nt, Human
ccaggggaaaaucagccugcu

SEQ ID NO: 3163712 - RNA, 17 nt, Human
ccaggggaccuccuggg

SEQ ID NO: 3163713 - RNA, 23 nt, Human
ccaggauauauuuuauuuuuaga

SEQ ID NO: 3163714 - RNA, 16 nt, Human
ccaggauauauuuuau

SEQ ID NO: 3163715 - RNA, 23 nt, Human
ccagccccuucugacccaugcug

SEQ ID NO: 3163716 - RNA, 24 nt, Human
ccagccccuucugacccaugcugc

SEQ ID NO: 3163717 - RNA, 18 nt, Human
ccagccccuucugaccca

SEQ ID NO: 3163718 - RNA, 13 nt, Human
ccagcuccacccc

SEQ ID NO: 3163719 - RNA, 12 nt, Human
ccagcuccaccc

SEQ ID NO: 3163720 - RNA, 19 nt, Human
ccagcuccccccaccuccc

SEQ ID NO: 3163721 - RNA, 14 nt, Human
ccagcuccccccac

SEQ ID NO: 3163722 - RNA, 15 nt, Human
ccagcuccaccccgc

SEQ ID NO: 3163723 - RNA, 12 nt, Human
ccagcagagcac

SEQ ID NO: 3163724 - RNA, 13 nt, Human
ccagcagagcacc

SEQ ID NO: 3163725 - RNA, 14 nt, Human
ccagcagagcaccu

SEQ ID NO: 3163726 - RNA, 17 nt, Human
ccagccccagugcccac

SEQ ID NO: 3163727 - RNA, 15 nt, Human
ccagccccauccucu

SEQ ID NO: 3163728 - RNA, 17 nt, Human
ccagccccauccucugu

SEQ ID NO: 3163729 - RNA, 17 nt, Human
ccacuccugcucugcuc

SEQ ID NO: 3163730 - RNA, 16 nt, Human
ccacuccugcucugcu

SEQ ID NO: 3163731 - RNA, 13 nt, Human
ccacuccugcucu

SEQ ID NO: 3163732 - RNA, 17 nt, Human
ccagcacuucaggaggc

SEQ ID NO: 3163733 - RNA, 16 nt, Human
ccagcuuuucauugcu

SEQ ID NO: 3163734 - RNA, 19 nt, Human
ccauucuguccuaccuuua

SEQ ID NO: 3163735 - RNA, 15 nt, Human
cccaacucaccccag

SEQ ID NO: 3163736 - RNA, 16 nt, Human
cccaacucaccccagc

SEQ ID NO: 3163737 - RNA, 21 nt, Human
ccauuucauuugugccagaau

SEQ ID NO: 3163738 - RNA, 22 nt, Human
ccauuucauuugugccagaaug

SEQ ID NO: 3163739 - RNA, 15 nt, Human
ccauuucauguccau

SEQ ID NO: 3163740 - RNA, 15 nt, Human
ccauuuaucuugaag

SEQ ID NO: 3163741 - RNA, 22 nt, Human
ccauuucaguaaaccugucuga

SEQ ID NO: 3163742 - RNA, 21 nt, Human
ccauuucaguaaaccugucug

SEQ ID NO: 3163743 - RNA, 11 nt, Human
ccauuggaaau

SEQ ID NO: 3163744 - RNA, 15 nt, Human
ccauuggaaauuuca

SEQ ID NO: 3163745 - RNA, 14 nt, Human
ccauuggaaauuuc

SEQ ID NO: 3163746 - RNA, 20 nt, Human
cccaacuaauuuuuguauuu

SEQ ID NO: 3163747 - RNA, 17 nt, Human
cccaacucaccccagcc

SEQ ID NO: 3163748 - RNA, 20 nt, Human
cccaacucaccccagcccca

SEQ ID NO: 3163749 - RNA, 12 nt, Human
cccaagcucugc

SEQ ID NO: 3163750 - RNA, 14 nt, Human
cccaagcucugcuc

SEQ ID NO: 3163751 - RNA, 13 nt, Human
cccaagcucugcu

SEQ ID NO: 3163752 - RNA, 13 nt, Human
cccacccagccug

SEQ ID NO: 3163753 - RNA, 22 nt, Human
cccacugcuuuuggucugugug

SEQ ID NO: 3163754 - RNA, 23 nt, Human
cccacugcuuuuggucuguguga

SEQ ID NO: 3163755 - RNA, 14 nt, Human
cccacuccugcucu

SEQ ID NO: 3163756 - RNA, 21 nt, Human
cccacucgugauaagucaaca

SEQ ID NO: 3163757 - RNA, 18 nt, Human
cccacuccugcucugcuc

SEQ ID NO: 3163758 - RNA, 12 nt, Human
cccacuccugcu

SEQ ID NO: 3163759 - RNA, 17 nt, Human
cccacucucagaggccc

SEQ ID NO: 3163760 - RNA, 15 nt, Human
cccacucucagaggc

SEQ ID NO: 3163761 - RNA, 14 nt, Human
cccacucucagagg

SEQ ID NO: 3163762 - RNA, 11 nt, Human
cccacucucag

SEQ ID NO: 3163763 - RNA, 13 nt, Human
cccacucucagag

SEQ ID NO: 3163764 - RNA, 12 nt, Human
cccacucucaga

SEQ ID NO: 3163765 - RNA, 13 nt, Human
cccacucccugca

SEQ ID NO: 3163766 - RNA, 12 nt, Human
cccacucccugc

SEQ ID NO: 3163767 - RNA, 15 nt, Human
cccacccuccccuuc

SEQ ID NO: 3163768 - RNA, 13 nt, Human
cccaccccauccu

SEQ ID NO: 3163769 - RNA, 20 nt, Human
ccaugaggaacaaggcaagg

SEQ ID NO: 3163770 - RNA, 23 nt, Human
ccaugaggaacaaggcaaggcug

SEQ ID NO: 3163771 - RNA, 18 nt, Human
ccaugaguccccuguuug

SEQ ID NO: 3163772 - RNA, 17 nt, Human
ccaugucgccucugcau

SEQ ID NO: 3163773 - RNA, 16 nt, Human
ccaugucgccucugca

SEQ ID NO: 3163774 - RNA, 15 nt, Human
ccaugucgccucugc

SEQ ID NO: 3163775 - RNA, 12 nt, Human
ccaugucgccuc

SEQ ID NO: 3163776 - RNA, 22 nt, Human
ccauccccuguagagugggagc

SEQ ID NO: 3163777 - RNA, 21 nt, Human
ccaucccauaugccugggcag

SEQ ID NO: 3163778 - RNA, 19 nt, Human
ccaucccauaugccugggc

SEQ ID NO: 3163779 - RNA, 20 nt, Human
ccaucccauaugccugggca

SEQ ID NO: 3163780 - RNA, 19 nt, Human
ccauccagguucagcuugu

SEQ ID NO: 3163781 - RNA, 18 nt, Human
ccauccagguucagcuug

SEQ ID NO: 3163782 - RNA, 20 nt, Human
ccauaagcaacaauuuucag

SEQ ID NO: 3163783 - RNA, 16 nt, Human
ccauaauguucugcua

SEQ ID NO: 3163784 - RNA, 21 nt, Human
ccauaaucuggacuccucugu

SEQ ID NO: 3163785 - RNA, 14 nt, Human
ccauaaucuggacu

SEQ ID NO: 3163786 - RNA, 18 nt, Human
ccaguuggucccccuucc

SEQ ID NO: 3163787 - RNA, 20 nt, Human
ccaguuggucccccuuccau

SEQ ID NO: 3163788 - RNA, 13 nt, Human
ccaguuggucccc

SEQ ID NO: 3163789 - RNA, 23 nt, Human
ccaguuggguggaugccuggugg

SEQ ID NO: 3163790 - RNA, 10 nt, Human
ccccugccag

SEQ ID NO: 3163791 - RNA, 16 nt, Human
ccccugccacccuggg

SEQ ID NO: 3163792 - RNA, 14 nt, Human
ccccugccacccug

SEQ ID NO: 3163793 - RNA, 23 nt, Human
ccccugcccagaucagccagaag

SEQ ID NO: 3163794 - RNA, 21 nt, Human
ccccugcaaagcccagcuuga

SEQ ID NO: 3163795 - RNA, 17 nt, Human
ccccugcaaagcccagc

SEQ ID NO: 3163796 - RNA, 18 nt, Human
ccccugcaaagcccagcu

SEQ ID NO: 3163797 - RNA, 20 nt, Human
ccccugcaaagcccagcuug

SEQ ID NO: 3163798 - RNA, 15 nt, Human
ccccugacaacacuc

SEQ ID NO: 3163799 - RNA, 16 nt, Human
ccccucuggcuccagc

SEQ ID NO: 3163800 - RNA, 14 nt, Human
ccccucugcccugc

SEQ ID NO: 3163801 - RNA, 15 nt, Human
ccccucugcccugcg

SEQ ID NO: 3163802 - RNA, 20 nt, Human
ccccucugcccugcggguca

SEQ ID NO: 3163803 - RNA, 23 nt, Human
ccccucugcccugcgggucacag

SEQ ID NO: 3163804 - RNA, 18 nt, Human
cccgggaagggggcuggg

SEQ ID NO: 3163805 - RNA, 21 nt, Human
cccgggaagggggcugggaca

SEQ ID NO: 3163806 - RNA, 16 nt, Human
cccucaacaccucugc

SEQ ID NO: 3163807 - RNA, 15 nt, Human
cccucaaagaggcag

SEQ ID NO: 3163808 - RNA, 16 nt, Human
cccucaacucuccucc

SEQ ID NO: 3163809 - RNA, 16 nt, Human
cccucacccuggggcu

SEQ ID NO: 3163810 - RNA, 15 nt, Human
cccucacccuggggc

SEQ ID NO: 3163811 - RNA, 14 nt, Human
cccucacucucagg

SEQ ID NO: 3163812 - RNA, 13 nt, Human
cccucacucucag

SEQ ID NO: 3163813 - RNA, 15 nt, Human
cccucacucucagga

SEQ ID NO: 3163814 - RNA, 17 nt, Human
cccggccaccugcggug

SEQ ID NO: 3163815 - RNA, 18 nt, Human
cccgaauagcugggacua

SEQ ID NO: 3163816 - RNA, 17 nt, Human
cccgaauagcugggacu

SEQ ID NO: 3163817 - RNA, 16 nt, Human
cccgaauagcugggac

SEQ ID NO: 3163818 - RNA, 14 nt, Human
ccccuucugaccca

SEQ ID NO: 3163819 - RNA, 13 nt, Human
ccccuucugaccc

SEQ ID NO: 3163820 - RNA, 15 nt, Human
cccgggaagggggcu

SEQ ID NO: 3163821 - RNA, 12 nt, Human
cccgggaagggg

SEQ ID NO: 3163822 - RNA, 20 nt, Human
cccggcuaauuuuuguauuu

SEQ ID NO: 3163823 - RNA, 15 nt, Human
cccggccccugcugg

SEQ ID NO: 3163824 - RNA, 16 nt, Human
cccggccccugcuggu

SEQ ID NO: 3163825 - RNA, 16 nt, Human
cccggcccugccugcu

SEQ ID NO: 3163826 - RNA, 16 nt, Human
cccuccucccucccag

SEQ ID NO: 3163827 - RNA, 17 nt, Human
cccuccucugagaggcg

SEQ ID NO: 3163828 - RNA, 16 nt, Human
cccuccucucugcccu

SEQ ID NO: 3163829 - RNA, 15 nt, Human
cccuccucucugccc

SEQ ID NO: 3163830 - RNA, 23 nt, Human
ccccgaggccuucucugaaggac

SEQ ID NO: 3163831 - RNA, 16 nt, Human
cccccuuucuuccuca

SEQ ID NO: 3163832 - RNA, 15 nt, Human
cccccuuucuuccuc

SEQ ID NO: 3163833 - RNA, 14 nt, Human
ccccgcacugggcu

SEQ ID NO: 3163834 - RNA, 24 nt, Human
ccccauggccggcuuucaggagcu

SEQ ID NO: 3163835 - RNA, 19 nt, Human
ccccauggccggcuuucag

SEQ ID NO: 3163836 - RNA, 20 nt, Human
ccccagauugcaacaggcug

SEQ ID NO: 3163837 - RNA, 15 nt, Human
ccccagauugcaaca

SEQ ID NO: 3163838 - RNA, 17 nt, Human
ccccagaggcuggguga

SEQ ID NO: 3163839 - RNA, 15 nt, Human
cccauucugccugcc

SEQ ID NO: 3163840 - RNA, 14 nt, Human
cccauucugccugc

SEQ ID NO: 3163841 - RNA, 19 nt, Human
cccauucugccugcccagg

SEQ ID NO: 3163842 - RNA, 13 nt, Human
cccauucugccug

SEQ ID NO: 3163843 - RNA, 15 nt, Human
cccauuugcuccuuu

SEQ ID NO: 3163844 - RNA, 20 nt, Human
cccauuugggcagagaggcu

SEQ ID NO: 3163845 - RNA, 13 nt, Human
cccauuugggcag

SEQ ID NO: 3163846 - RNA, 19 nt, Human
cccauuuggagggccuggg

SEQ ID NO: 3163847 - RNA, 14 nt, Human
cccauuuggagggc

SEQ ID NO: 3163848 - RNA, 13 nt, Human
ccccagaggcugg

SEQ ID NO: 3163849 - RNA, 12 nt, Human
cccauuuuuccc

SEQ ID NO: 3163850 - RNA, 23 nt, Human
cccagcaagugagagcugggugu

SEQ ID NO: 3163851 - RNA, 16 nt, Human
cccacugguuagaugu

SEQ ID NO: 3163852 - RNA, 13 nt, Human
cccacuggccggc

SEQ ID NO: 3163853 - RNA, 16 nt, Human
cccacuggacucaccu

SEQ ID NO: 3163854 - RNA, 15 nt, Human
cccaggaaaggcucc

SEQ ID NO: 3163855 - RNA, 16 nt, Human
cccaggaaaggcucca

SEQ ID NO: 3163856 - RNA, 20 nt, Human
cccauauuuguacaccaaua

SEQ ID NO: 3163857 - RNA, 18 nt, Human
cccaucagcccaaucccu

SEQ ID NO: 3163858 - RNA, 12 nt, Human
cccaucagccca

SEQ ID NO: 3163859 - RNA, 17 nt, Human
cccaggaaaggcuccag

SEQ ID NO: 3163860 - RNA, 18 nt, Human
cccaggaaaggcuccagg

SEQ ID NO: 3163861 - RNA, 15 nt, Human
cccaggcugagccuc

SEQ ID NO: 3163862 - RNA, 16 nt, Human
cccaggcugagccuca

SEQ ID NO: 3163863 - RNA, 17 nt, Human
cccaggcugagccucag

SEQ ID NO: 3163864 - RNA, 20 nt, Human
cccaggcuuagucacugaga

SEQ ID NO: 3163865 - RNA, 22 nt, Human
cccaggcuuagucacugagaca

SEQ ID NO: 3163866 - RNA, 18 nt, Human
cccaggcugagccucagu

SEQ ID NO: 3163867 - RNA, 13 nt, Human
cccaggcuggagu

SEQ ID NO: 3163868 - RNA, 21 nt, Human
cccauccucuguacagagccc

SEQ ID NO: 3163869 - RNA, 22 nt, Human
cccauccucuguacagagccca

SEQ ID NO: 3163870 - RNA, 20 nt, Human
cccauccucuguacagagcc

SEQ ID NO: 3163871 - RNA, 19 nt, Human
cccauauuuuacuuggaaa

SEQ ID NO: 3163872 - RNA, 12 nt, Human
cuaggcuccuuc

SEQ ID NO: 3163873 - RNA, 14 nt, Human
cuagggaagauaau

SEQ ID NO: 3163874 - RNA, 13 nt, Human
cuaggcuccuuca

SEQ ID NO: 3163875 - RNA, 13 nt, Human
cuaggcuggaagg

SEQ ID NO: 3163876 - RNA, 14 nt, Human
cuaggcuggaagga

SEQ ID NO: 3163877 - RNA, 15 nt, Human
cuaggcuggaaggag

SEQ ID NO: 3163878 - RNA, 16 nt, Human
cuaggcuggaaggagg

SEQ ID NO: 3163879 - RNA, 17 nt, Human
cuaggcuggaaggagga

SEQ ID NO: 3163880 - RNA, 19 nt, Human
cuaggcuggaaggaggaag

SEQ ID NO: 3163881 - RNA, 13 nt, Human
cuaggguccuggg

SEQ ID NO: 3163882 - RNA, 14 nt, Human
cuaggguccugggg

SEQ ID NO: 3163883 - RNA, 15 nt, Human
cuaggguccugggga

SEQ ID NO: 3163884 - RNA, 16 nt, Human
cuauaaaauguaucaa

SEQ ID NO: 3163885 - RNA, 21 nt, Human
cuauaaacacuguuuguucca

SEQ ID NO: 3163886 - RNA, 14 nt, Human
cuauaaacacuguu

SEQ ID NO: 3163887 - RNA, 12 nt, Human
cuauaaacacug

SEQ ID NO: 3163888 - RNA, 19 nt, Human
cuagccagaggagagagga

SEQ ID NO: 3163889 - RNA, 17 nt, Human
cuagccagaggagagag

SEQ ID NO: 3163890 - RNA, 13 nt, Human
cuaggccuggcca

SEQ ID NO: 3163891 - RNA, 19 nt, Human
cuaggccuggccagaugca

SEQ ID NO: 3163892 - RNA, 18 nt, Human
cuaggccuggccagaugc

SEQ ID NO: 3163893 - RNA, 15 nt, Human
cuaggccuggccaga

SEQ ID NO: 3163894 - RNA, 14 nt, Human
cuaggccuggccag

SEQ ID NO: 3163895 - RNA, 12 nt, Human
cuaggccugggg

SEQ ID NO: 3163896 - RNA, 13 nt, Human
cuaggccugggga

SEQ ID NO: 3163897 - RNA, 17 nt, Human
cuagaauguuucauuug

SEQ ID NO: 3163898 - RNA, 16 nt, Human
cuacucaaagcaaaag

SEQ ID NO: 3163899 - RNA, 17 nt, Human
cuacuaccuguaaugac

SEQ ID NO: 3163900 - RNA, 16 nt, Human
cuacuaagaaaauaga

SEQ ID NO: 3163901 - RNA, 23 nt, Human
cuacuaagaaaauagagaugagc

SEQ ID NO: 3163902 - RNA, 22 nt, Human
cuaccuuuaaucagguccugcu

SEQ ID NO: 3163903 - RNA, 21 nt, Human
cuaccuuuggcuuaauuccaa

SEQ ID NO: 3163904 - RNA, 20 nt, Human
cuaccuuuggcuuaauucca

SEQ ID NO: 3163905 - RNA, 18 nt, Human
cuaccuuccaguuccuca

SEQ ID NO: 3163906 - RNA, 14 nt, Human
cuaccuugccccaa

SEQ ID NO: 3163907 - RNA, 16 nt, Human
cuaccuugccccaacc

SEQ ID NO: 3163908 - RNA, 21 nt, Human
cuaccuugccccaacccuucu

SEQ ID NO: 3163909 - RNA, 15 nt, Human
cuaccugaggggccu

SEQ ID NO: 3163910 - RNA, 16 nt, Human
cuaccugaggggccuc

SEQ ID NO: 3163911 - RNA, 19 nt, Human
cuaccugaggggccucuua

SEQ ID NO: 3163912 - RNA, 23 nt, Human
cuaccugaggggccucuuauggg

SEQ ID NO: 3163913 - RNA, 17 nt, Human
cucagaaggucuguuuu

SEQ ID NO: 3163914 - RNA, 18 nt, Human
cucagaaacuccaugaug

SEQ ID NO: 3163915 - RNA, 22 nt, Human
cucagaaaagacgcaccagccc

SEQ ID NO: 3163916 - RNA, 13 nt, Human
cucacuuuuucau

SEQ ID NO: 3163917 - RNA, 16 nt, Human
cucaccuugguuccug

SEQ ID NO: 3163918 - RNA, 18 nt, Human
cucaccugccccucaacu

SEQ ID NO: 3163919 - RNA, 14 nt, Human
cucaccugccccuc

SEQ ID NO: 3163920 - RNA, 16 nt, Human
cucaccugccccucaa

SEQ ID NO: 3163921 - RNA, 13 nt, Human
cucaccugccccu

SEQ ID NO: 3163922 - RNA, 14 nt, Human
cucaccucucccuu

SEQ ID NO: 3163923 - RNA, 15 nt, Human
cucaccucucccuug

SEQ ID NO: 3163924 - RNA, 16 nt, Human
cucaccucucccuugg

SEQ ID NO: 3163925 - RNA, 17 nt, Human
cucaccucucccuugga

SEQ ID NO: 3163926 - RNA, 13 nt, Human
cucaccucucccu

SEQ ID NO: 3163927 - RNA, 16 nt, Human
cucaccucccccaucu

SEQ ID NO: 3163928 - RNA, 14 nt, Human
cucacccuggggcu

SEQ ID NO: 3163929 - RNA, 17 nt, Human
cucaccccuugccauaa

SEQ ID NO: 3163930 - RNA, 15 nt, Human
cucaaagcaaaagug

SEQ ID NO: 3163931 - RNA, 12 nt, Human
cucaaagcaaaa

SEQ ID NO: 3163932 - RNA, 14 nt, Human
cucaaaaagaaauc

SEQ ID NO: 3163933 - RNA, 14 nt, Human
cucaaagaggcagu

SEQ ID NO: 3163934 - RNA, 22 nt, Human
cucaaagccccauuaacugcuu

SEQ ID NO: 3163935 - RNA, 19 nt, Human
cucaaagccccauuaacug

SEQ ID NO: 3163936 - RNA, 22 nt, Human
cucaaaggccagguugcuaaga

SEQ ID NO: 3163937 - RNA, 13 nt, Human
cucaaaacugcac

SEQ ID NO: 3163938 - RNA, 14 nt, Human
cucaaaacaaaggc

SEQ ID NO: 3163939 - RNA, 18 nt, Human
cucaaaaaaagaaaaaga

SEQ ID NO: 3163940 - RNA, 13 nt, Human
cucaaaacaaagg

SEQ ID NO: 3163941 - RNA, 17 nt, Human
cucaaaaaaagaaaaag

SEQ ID NO: 3163942 - RNA, 22 nt, Human
cuauuuuugacauggaaaugaa

SEQ ID NO: 3163943 - RNA, 16 nt, Human
cuauguugcccaggca

SEQ ID NO: 3163944 - RNA, 20 nt, Human
cuaucucccccagccccauc

SEQ ID NO: 3163945 - RNA, 19 nt, Human
cuauguaucaaugaguaac

SEQ ID NO: 3163946 - RNA, 18 nt, Human
cuaucucccccagcccca

SEQ ID NO: 3163947 - RNA, 19 nt, Human
cuaucucuauuauuggaaa

SEQ ID NO: 3163948 - RNA, 17 nt, Human
cuaugugagcacaaagg

SEQ ID NO: 3163949 - RNA, 16 nt, Human
cuauguaucaaugagu

SEQ ID NO: 3163950 - RNA, 13 nt, Human
cuaugucauuuca

SEQ ID NO: 3163951 - RNA, 16 nt, Human
cuaugucauuucaugu

SEQ ID NO: 3163952 - RNA, 14 nt, Human
cuaugucauuucau

SEQ ID NO: 3163953 - RNA, 22 nt, Human
cuauguguagggcgggaggaug

SEQ ID NO: 3163954 - RNA, 17 nt, Human
cuaugugccuuauguug

SEQ ID NO: 3163955 - RNA, 19 nt, Human
cuaugugccuuauguugaa

SEQ ID NO: 3163956 - RNA, 22 nt, Human
cuaugugccuuauguugaaaaa

SEQ ID NO: 3163957 - RNA, 15 nt, Human
cuauguugcccaggc

SEQ ID NO: 3163958 - RNA, 14 nt, Human
cuauguugcccagg

SEQ ID NO: 3163959 - RNA, 14 nt, Human
cuaugugugugcuu

SEQ ID NO: 3163960 - RNA, 14 nt, Human
cuauguguuuuucu

SEQ ID NO: 3163961 - RNA, 17 nt, Human
cuauguguuuuucucau

SEQ ID NO: 3163962 - RNA, 22 nt, Human
cuauguguuuuucucauauuug

SEQ ID NO: 3163963 - RNA, 14 nt, Human
cucacacaugagca

SEQ ID NO: 3163964 - RNA, 14 nt, Human
cucacaaaggaugc

SEQ ID NO: 3163965 - RNA, 21 nt, Human
cucaaauaauauuuuuuuccu

SEQ ID NO: 3163966 - RNA, 12 nt, Human
cucaaauaacua

SEQ ID NO: 3163967 - RNA, 18 nt, Human
cucacaaaugaaaccuga

SEQ ID NO: 3163968 - RNA, 17 nt, Human
cgguuccuacacaggac

SEQ ID NO: 3163969 - RNA, 16 nt, Human
cgguuccuacacagga

SEQ ID NO: 3163970 - RNA, 18 nt, Human
cgguucaaaccugugaag

SEQ ID NO: 3163971 - RNA, 19 nt, Human
cgguucaguguuucugggg

SEQ ID NO: 3163972 - RNA, 13 nt, Human
cgguucaguguuu

SEQ ID NO: 3163973 - RNA, 23 nt, Human
cguaauucuuauuccauauuaga

SEQ ID NO: 3163974 - RNA, 14 nt, Human
cguaauucuuauuc

SEQ ID NO: 3163975 - RNA, 24 nt, Human
cggagaagagcuguucacagccag

SEQ ID NO: 3163976 - RNA, 23 nt, Human
cggagaagagcuguucacagcca

SEQ ID NO: 3163977 - RNA, 14 nt, Human
cgguguccccacca

SEQ ID NO: 3163978 - RNA, 16 nt, Human
cggugggggggcagag

SEQ ID NO: 3163979 - RNA, 22 nt, Human
cgguguccccaccaucugcugu

SEQ ID NO: 3163980 - RNA, 19 nt, Human
cgguguccccaccaucugc

SEQ ID NO: 3163981 - RNA, 16 nt, Human
cgguguccccaccauc

SEQ ID NO: 3163982 - RNA, 15 nt, Human
cgguguccccaccau

SEQ ID NO: 3163983 - RNA, 21 nt, Human
cguacaaguaguucuguauuu

SEQ ID NO: 3163984 - RNA, 22 nt, Human
cguacaaguaguucuguauuug

SEQ ID NO: 3163985 - RNA, 18 nt, Human
cguacaaguaguucugua

SEQ ID NO: 3163986 - RNA, 19 nt, Human
cguacaaguaguucuguau

SEQ ID NO: 3163987 - RNA, 21 nt, Human
cuaaagaagguuucagaaaga

SEQ ID NO: 3163988 - RNA, 14 nt, Human
cuaaagcugccagc

SEQ ID NO: 3163989 - RNA, 15 nt, Human
cuaaagcugccagcc

SEQ ID NO: 3163990 - RNA, 15 nt, Human
cuaaaguuguacuuu

SEQ ID NO: 3163991 - RNA, 20 nt, Human
cuaaaguuguacuuuaaaaa

SEQ ID NO: 3163992 - RNA, 19 nt, Human
cuaaaguuguacuuuaaaa

SEQ ID NO: 3163993 - RNA, 14 nt, Human
cguuaccaggcagg

SEQ ID NO: 3163994 - RNA, 18 nt, Human
cguguuugucucuucugg

SEQ ID NO: 3163995 - RNA, 17 nt, Human
cguguuugucucuucug

SEQ ID NO: 3163996 - RNA, 21 nt, Human
cguuaaaaacagauuuggaaa

SEQ ID NO: 3163997 - RNA, 14 nt, Human
cguuaaaaacagau

SEQ ID NO: 3163998 - RNA, 15 nt, Human
cgugucaaugugugc

SEQ ID NO: 3163999 - RNA, 22 nt, Human
cguguccccuauccuacuuccc

SEQ ID NO: 3164000 - RNA, 16 nt, Human
cguguuugucucuucu

SEQ ID NO: 3164001 - RNA, 17 nt, Human
cguguaggaaccugcac

SEQ ID NO: 3164002 - RNA, 20 nt, Human
cgccuuccaccucugggagc

SEQ ID NO: 3164003 - RNA, 14 nt, Human
cgccuucacagcag

SEQ ID NO: 3164004 - RNA, 12 nt, Human
cgcugcucugcc

SEQ ID NO: 3164005 - RNA, 15 nt, Human
cgcugcucugcccca

SEQ ID NO: 3164006 - RNA, 18 nt, Human
cgcugccccuggcagccc

SEQ ID NO: 3164007 - RNA, 23 nt, Human
cgcuggaccuugaacuggguacu

SEQ ID NO: 3164008 - RNA, 19 nt, Human
cgcuggaccuugaacuggg

SEQ ID NO: 3164009 - RNA, 16 nt, Human
cgcugccccuggcagc

SEQ ID NO: 3164010 - RNA, 17 nt, Human
cgcugccccuggcagcc

SEQ ID NO: 3164011 - RNA, 13 nt, Human
cgcugccccuggc

SEQ ID NO: 3164012 - RNA, 13 nt, Human
cgccuucacagca

SEQ ID NO: 3164013 - RNA, 16 nt, Human
cgccuuaaggauguuc

SEQ ID NO: 3164014 - RNA, 13 nt, Human
cgcaucucacagc

SEQ ID NO: 3164015 - RNA, 16 nt, Human
cgcaucagcugcucag

SEQ ID NO: 3164016 - RNA, 15 nt, Human
cgcaucagcugcuca

SEQ ID NO: 3164017 - RNA, 16 nt, Human
cgcauaggccugcuuu

SEQ ID NO: 3164018 - RNA, 17 nt, Human
cgcuggggccaguuggu

SEQ ID NO: 3164019 - RNA, 20 nt, Human
cgcuggggccaguugguccc

SEQ ID NO: 3164020 - RNA, 17 nt, Human
cggagaaaggaagggcu

SEQ ID NO: 3164021 - RNA, 21 nt, Human
cgauacaccgggccuggagaa

SEQ ID NO: 3164022 - RNA, 20 nt, Human
cgauacaccgggccuggaga

SEQ ID NO: 3164023 - RNA, 18 nt, Human
cgauacaccgggccugga

SEQ ID NO: 3164024 - RNA, 19 nt, Human
cgaguagcugagauuauag

SEQ ID NO: 3164025 - RNA, 20 nt, Human
cgaguaauugcauuugcuuu

SEQ ID NO: 3164026 - RNA, 20 nt, Human
cucucuugauuaagaucuca

SEQ ID NO: 3164027 - RNA, 19 nt, Human
cucucuggccuucggccuc

SEQ ID NO: 3164028 - RNA, 17 nt, Human
cucucuggccuucggcc

SEQ ID NO: 3164029 - RNA, 10 nt, Human
cucuccucug

SEQ ID NO: 3164030 - RNA, 13 nt, Human
cucucccuuggau

SEQ ID NO: 3164031 - RNA, 13 nt, Human
cucuccuccuuuu

SEQ ID NO: 3164032 - RNA, 20 nt, Human
cucuccuccuuuucacaguu

SEQ ID NO: 3164033 - RNA, 16 nt, Human
cucuccgaccagacac

SEQ ID NO: 3164034 - RNA, 16 nt, Human
cucugcacaagcugca

SEQ ID NO: 3164035 - RNA, 16 nt, Human
cuccuagccacccacc

SEQ ID NO: 3164036 - RNA, 22 nt, Human
cuccuagccugugccucuggga

SEQ ID NO: 3164037 - RNA, 17 nt, Human
cuccuuuagcgcccagu

SEQ ID NO: 3164038 - RNA, 16 nt, Human
cuccuuuagcgcccag

SEQ ID NO: 3164039 - RNA, 22 nt, Human
cuccuuuagcgcccaguugggu

SEQ ID NO: 3164040 - RNA, 23 nt, Human
cuccuuugugaggaagccgcugg

SEQ ID NO: 3164041 - RNA, 24 nt, Human
cuccuuuucacaguucucuccuuc

SEQ ID NO: 3164042 - RNA, 17 nt, Human
cuccuuuuccagagcau

SEQ ID NO: 3164043 - RNA, 16 nt, Human
cuccuuuuccagagca

SEQ ID NO: 3164044 - RNA, 17 nt, Human
cuccuuuuguguuccaa

SEQ ID NO: 3164045 - RNA, 13 nt, Human
cuccuuuuguguu

SEQ ID NO: 3164046 - RNA, 19 nt, Human
cuccuuuuccagagcauuc

SEQ ID NO: 3164047 - RNA, 13 nt, Human
cucgaacuccuga

SEQ ID NO: 3164048 - RNA, 16 nt, Human
cucgaacuccugaccu

SEQ ID NO: 3164049 - RNA, 16 nt, Human
cucguauagaagucuu

SEQ ID NO: 3164050 - RNA, 18 nt, Human
cucguauaugucucaggu

SEQ ID NO: 3164051 - RNA, 11 nt, Human
cucggugccuu

SEQ ID NO: 3164052 - RNA, 23 nt, Human
cucgguguggagaagcggcuggc

SEQ ID NO: 3164053 - RNA, 20 nt, Human
cucguauaugucucaggucc

SEQ ID NO: 3164054 - RNA, 23 nt, Human
cucguauagaagucuucaugaaa

SEQ ID NO: 3164055 - RNA, 19 nt, Human
cucccagcaucgcacucug

SEQ ID NO: 3164056 - RNA, 13 nt, Human
cucccagcaucgc

SEQ ID NO: 3164057 - RNA, 13 nt, Human
cucccaccucagc

SEQ ID NO: 3164058 - RNA, 17 nt, Human
cucccaccucagccucc

SEQ ID NO: 3164059 - RNA, 16 nt, Human
cucccaccucagccuc

SEQ ID NO: 3164060 - RNA, 14 nt, Human
cucccaccucagcc

SEQ ID NO: 3164061 - RNA, 20 nt, Human
cuccauacacacgcugccuu

SEQ ID NO: 3164062 - RNA, 19 nt, Human
cuccauacacacgcugccu

SEQ ID NO: 3164063 - RNA, 17 nt, Human
cuccauacacacgcugc

SEQ ID NO: 3164064 - RNA, 21 nt, Human
cuccagugagacagcucugca

SEQ ID NO: 3164065 - RNA, 19 nt, Human
cuccaggugcacaagcucc

SEQ ID NO: 3164066 - RNA, 20 nt, Human
cuccaggugcacaagcucca

SEQ ID NO: 3164067 - RNA, 18 nt, Human
cuccaggugcacaagcuc

SEQ ID NO: 3164068 - RNA, 22 nt, Human
cuccaggcuguaucccaugagc

SEQ ID NO: 3164069 - RNA, 23 nt, Human
cuccaggcuguaucccaugagcc

SEQ ID NO: 3164070 - RNA, 22 nt, Human
cuccagaauuucccaaagcagu

SEQ ID NO: 3164071 - RNA, 11 nt, Human
cuccagacaca

SEQ ID NO: 3164072 - RNA, 17 nt, Human
cucagaaucucaaauaa

SEQ ID NO: 3164073 - RNA, 16 nt, Human
cucagaaucucaaaua

SEQ ID NO: 3164074 - RNA, 21 nt, Human
cuccagaauuucccaaagcag

SEQ ID NO: 3164075 - RNA, 15 nt, Human
cucccucuuucccuc

SEQ ID NO: 3164076 - RNA, 16 nt, Human
cucccucccucuuucc

SEQ ID NO: 3164077 - RNA, 18 nt, Human
cucccagcuccaccccgc

SEQ ID NO: 3164078 - RNA, 19 nt, Human
cucccucuuucccucccuu

SEQ ID NO: 3164079 - RNA, 20 nt, Human
cuccgcuuucuacccagcga

SEQ ID NO: 3164080 - RNA, 21 nt, Human
cuccgcuuucuacccagcgag

SEQ ID NO: 3164081 - RNA, 22 nt, Human
cuccgcuuucuacccagcgagc

SEQ ID NO: 3164082 - RNA, 15 nt, Human
cuccgggucuuccua

SEQ ID NO: 3164083 - RNA, 14 nt, Human
cuccgucacuaccu

SEQ ID NO: 3164084 - RNA, 19 nt, Human
cuccgucacuaccuggcug

SEQ ID NO: 3164085 - RNA, 17 nt, Human
cuccgucacuaccuggc

SEQ ID NO: 3164086 - RNA, 16 nt, Human
cuccgucacuaccugg

SEQ ID NO: 3164087 - RNA, 21 nt, Human
cugaguaaaaaagcugugugc

SEQ ID NO: 3164088 - RNA, 21 nt, Human
cugagguugggagaggugcac

SEQ ID NO: 3164089 - RNA, 20 nt, Human
cugagguugggagaggugca

SEQ ID NO: 3164090 - RNA, 21 nt, Human
cugaggugggagauguggaaa

SEQ ID NO: 3164091 - RNA, 22 nt, Human
cugaggugggaggaucucuuga

SEQ ID NO: 3164092 - RNA, 13 nt, Human
cugaggugggagg

SEQ ID NO: 3164093 - RNA, 12 nt, Human
cugaggugggag

SEQ ID NO: 3164094 - RNA, 14 nt, Human
cugaggguccagaa

SEQ ID NO: 3164095 - RNA, 17 nt, Human
cugaggguccagaagga

SEQ ID NO: 3164096 - RNA, 18 nt, Human
cugaggggagacagagca

SEQ ID NO: 3164097 - RNA, 17 nt, Human
cugaggggagacagagc

SEQ ID NO: 3164098 - RNA, 23 nt, Human
cugaggaauccagacccggcugc

SEQ ID NO: 3164099 - RNA, 14 nt, Human
cugaggggccucuu

SEQ ID NO: 3164100 - RNA, 23 nt, Human
cugaggggcagccugccuugccc

SEQ ID NO: 3164101 - RNA, 19 nt, Human
cugaggggcagccugccuu

SEQ ID NO: 3164102 - RNA, 18 nt, Human
cugaggggcagccugccu

SEQ ID NO: 3164103 - RNA, 17 nt, Human
cugaggggcagccugcc

SEQ ID NO: 3164104 - RNA, 19 nt, Human
cugaggggagacagagcaa

SEQ ID NO: 3164105 - RNA, 16 nt, Human
cugaggggcagccugc

SEQ ID NO: 3164106 - RNA, 15 nt, Human
cugaggggcagccug

SEQ ID NO: 3164107 - RNA, 12 nt, Human
cugagcuuggaa

SEQ ID NO: 3164108 - RNA, 22 nt, Human
cugagcuugcagagaugaggcc

SEQ ID NO: 3164109 - RNA, 21 nt, Human
cugagcuuggaagcuucuggu

SEQ ID NO: 3164110 - RNA, 20 nt, Human
cugagcuuggaagcuucugg

SEQ ID NO: 3164111 - RNA, 14 nt, Human
cugagcuuggaagc

SEQ ID NO: 3164112 - RNA, 18 nt, Human
cugaggaagagggacugu

SEQ ID NO: 3164113 - RNA, 23 nt, Human
cugaggaagagggacuguucuuu

SEQ ID NO: 3164114 - RNA, 21 nt, Human
cugaggaauccagacccggcu

SEQ ID NO: 3164115 - RNA, 19 nt, Human
cugacccugcuucaaauau

SEQ ID NO: 3164116 - RNA, 12 nt, Human
cugagcugggau

SEQ ID NO: 3164117 - RNA, 22 nt, Human
cugagcugggaugauuggaggg

SEQ ID NO: 3164118 - RNA, 16 nt, Human
cugagcuggccucuca

SEQ ID NO: 3164119 - RNA, 14 nt, Human
cugagcuggccucu

SEQ ID NO: 3164120 - RNA, 22 nt, Human
cugagcuggccucucacugccu

SEQ ID NO: 3164121 - RNA, 17 nt, Human
cugagcuggccucucac

SEQ ID NO: 3164122 - RNA, 17 nt, Human
cugaucucucgugauug

SEQ ID NO: 3164123 - RNA, 18 nt, Human
cugaucucucgugauuga

SEQ ID NO: 3164124 - RNA, 14 nt, Human
cugaucucucguga

SEQ ID NO: 3164125 - RNA, 15 nt, Human
cugacacaccugcag

SEQ ID NO: 3164126 - RNA, 16 nt, Human
cugacacaccugcagc

SEQ ID NO: 3164127 - RNA, 21 nt, Human
cugacacaccugcagccuccc

SEQ ID NO: 3164128 - RNA, 23 nt, Human
cugacacaccugcagccucccuc

SEQ ID NO: 3164129 - RNA, 14 nt, Human
cugacaccccacuu

SEQ ID NO: 3164130 - RNA, 18 nt, Human
cugacaccccacuuagcc

SEQ ID NO: 3164131 - RNA, 17 nt, Human
cugacaccccacuuagc

SEQ ID NO: 3164132 - RNA, 23 nt, Human
cugacacacagcucuguccuggg

SEQ ID NO: 3164133 - RNA, 22 nt, Human
cugacacacagcucuguccugg

SEQ ID NO: 3164134 - RNA, 21 nt, Human
cugacacacagcucuguccug

SEQ ID NO: 3164135 - RNA, 20 nt, Human
cugacacacagcucuguccu

SEQ ID NO: 3164136 - RNA, 19 nt, Human
cugacacacagcucugucc

SEQ ID NO: 3164137 - RNA, 18 nt, Human
cugacacacagcucuguc

SEQ ID NO: 3164138 - RNA, 17 nt, Human
cugacacacagcucugu

SEQ ID NO: 3164139 - RNA, 16 nt, Human
cugacacacagcucug

SEQ ID NO: 3164140 - RNA, 15 nt, Human
cugacacacagcucu

SEQ ID NO: 3164141 - RNA, 13 nt, Human
cugacacacagcu

SEQ ID NO: 3164142 - RNA, 18 nt, Human
cugaaagaggccaaacag

SEQ ID NO: 3164143 - RNA, 17 nt, Human
cugaaagagucuuucuu

SEQ ID NO: 3164144 - RNA, 17 nt, Human
cugaccccucauagccc

SEQ ID NO: 3164145 - RNA, 20 nt, Human
cugaccccucauagcccuca

SEQ ID NO: 3164146 - RNA, 21 nt, Human
cugaccccucauagcccucac

SEQ ID NO: 3164147 - RNA, 13 nt, Human
cugaaagaggaau

SEQ ID NO: 3164148 - RNA, 17 nt, Human
cugaaagaggaaugaag

SEQ ID NO: 3164149 - RNA, 15 nt, Human
cucuuuuuuacaaag

SEQ ID NO: 3164150 - RNA, 24 nt, Human
cucuugauucauaaugacuuaagc

SEQ ID NO: 3164151 - RNA, 22 nt, Human
cucuugccacugccucuuccuc

SEQ ID NO: 3164152 - RNA, 19 nt, Human
cucuugccucagcuucccc

SEQ ID NO: 3164153 - RNA, 21 nt, Human
cucuugccucagcuuccccag

SEQ ID NO: 3164154 - RNA, 14 nt, Human
cucuuuuuuacaaa

SEQ ID NO: 3164155 - RNA, 13 nt, Human
cucuuuuuuaagu

SEQ ID NO: 3164156 - RNA, 22 nt, Human
cucuugauucauaaugacuuaa

SEQ ID NO: 3164157 - RNA, 23 nt, Human
cucuugaguuguuuuuguauauu

SEQ ID NO: 3164158 - RNA, 13 nt, Human
cucuugaguuguu

SEQ ID NO: 3164159 - RNA, 16 nt, Human
cucuugaguuguuuuu

SEQ ID NO: 3164160 - RNA, 18 nt, Human
cucuugaguuguuuuugu

SEQ ID NO: 3164161 - RNA, 20 nt, Human
cucuugaguuguuuuuguau

SEQ ID NO: 3164162 - RNA, 21 nt, Human
cucuugaguuguuuuuguaua

SEQ ID NO: 3164163 - RNA, 22 nt, Human
cucuugaguuguuuuuguauau

SEQ ID NO: 3164164 - RNA, 15 nt, Human
cucuugagccuggga

SEQ ID NO: 3164165 - RNA, 13 nt, Human
cucuugagccugg

SEQ ID NO: 3164166 - RNA, 14 nt, Human
cucuugagccuggg

SEQ ID NO: 3164167 - RNA, 17 nt, Human
cucugcacaagcugcac

SEQ ID NO: 3164168 - RNA, 18 nt, Human
cucugcacaagcugcacc

SEQ ID NO: 3164169 - RNA, 15 nt, Human
augugaugagaggaa

SEQ ID NO: 3164170 - RNA, 16 nt, Human
augugaugagaggaaa

SEQ ID NO: 3164171 - RNA, 17 nt, Human
augugaugagaggaaau

SEQ ID NO: 3164172 - RNA, 19 nt, Human
augugaugagaggaaauca

SEQ ID NO: 3164173 - RNA, 15 nt, Human
augugaccauaaugu

SEQ ID NO: 3164174 - RNA, 16 nt, Human
augugaccauaaugua

SEQ ID NO: 3164175 - RNA, 23 nt, Human
augugacauuugucauuuucauu

SEQ ID NO: 3164176 - RNA, 23 nt, Human
augugcacaugcacgugugugca

SEQ ID NO: 3164177 - RNA, 19 nt, Human
uuuguaauaauaaagaaua

SEQ ID NO: 3164178 - RNA, 21 nt, Human
augugcaaacccacucagaga

SEQ ID NO: 3164179 - RNA, 14 nt, Human
augugaugcuggaa

SEQ ID NO: 3164180 - RNA, 23 nt, Human
uuugugaagugaaggauuugugu

SEQ ID NO: 3164181 - RNA, 21 nt, Human
uuugugaaauuuuucauauuu

SEQ ID NO: 3164182 - RNA, 22 nt, Human
uuugugaacaagucccuguaau

SEQ ID NO: 3164183 - RNA, 20 nt, Human
uuugugaaauuuuucauauu

SEQ ID NO: 3164184 - RNA, 18 nt, Human
uuugugaaauuuuucaua

SEQ ID NO: 3164185 - RNA, 17 nt, Human
uuugugaaauuuuucau

SEQ ID NO: 3164186 - RNA, 12 nt, Human
uuugugaaauuu

SEQ ID NO: 3164187 - RNA, 20 nt, Human
uuugugaaacagacuuguau

SEQ ID NO: 3164188 - RNA, 18 nt, Human
uuugugaaacagacuugu

SEQ ID NO: 3164189 - RNA, 22 nt, Human
uuugugaaaugauggugaaagu

SEQ ID NO: 3164190 - RNA, 21 nt, Human
uuuguaauaauaaagaauagc

SEQ ID NO: 3164191 - RNA, 14 nt, Human
auguaugcuucaua

SEQ ID NO: 3164192 - RNA, 17 nt, Human
auguaugcauaauaauc

SEQ ID NO: 3164193 - RNA, 13 nt, Human
auguaugcauaau

SEQ ID NO: 3164194 - RNA, 15 nt, Human
auguaugcuucauac

SEQ ID NO: 3164195 - RNA, 14 nt, Human
auguaugcauucac

SEQ ID NO: 3164196 - RNA, 15 nt, Human
auguauguguaagua

SEQ ID NO: 3164197 - RNA, 15 nt, Human
uuuggcacucugacu

SEQ ID NO: 3164198 - RNA, 18 nt, Human
auguaugagguacaaccu

SEQ ID NO: 3164199 - RNA, 16 nt, Human
augucaguauguggaa

SEQ ID NO: 3164200 - RNA, 12 nt, Human
auguauuauguc

SEQ ID NO: 3164201 - RNA, 20 nt, Human
auguauuauguccugugaga

SEQ ID NO: 3164202 - RNA, 21 nt, Human
auguauuaaauuacauuugua

SEQ ID NO: 3164203 - RNA, 23 nt, Human
auguauuaacacuacucaaagca

SEQ ID NO: 3164204 - RNA, 21 nt, Human
auguauuaagcccacaguaua

SEQ ID NO: 3164205 - RNA, 23 nt, Human
auguauuaagcccacaguauauu

SEQ ID NO: 3164206 - RNA, 16 nt, Human
auguauuaaauuacau

SEQ ID NO: 3164207 - RNA, 12 nt, Human
auguauuaaauu

SEQ ID NO: 3164208 - RNA, 18 nt, Human
auguauguguuuagaauu

SEQ ID NO: 3164209 - RNA, 20 nt, Human
auguauguguuuagaauuga

SEQ ID NO: 3164210 - RNA, 21 nt, Human
auguauguguuuagaauugaa

SEQ ID NO: 3164211 - RNA, 16 nt, Human
auguauguguaaguau

SEQ ID NO: 3164212 - RNA, 12 nt, Human
auguauguguuu

SEQ ID NO: 3164213 - RNA, 14 nt, Human
auguauguguuuag

SEQ ID NO: 3164214 - RNA, 15 nt, Human
auguauguguuuaga

SEQ ID NO: 3164215 - RNA, 16 nt, Human
auguauguguuuagaa

SEQ ID NO: 3164216 - RNA, 17 nt, Human
auguauguguuuagaau

SEQ ID NO: 3164217 - RNA, 16 nt, Human
auguccaguaagauca

SEQ ID NO: 3164218 - RNA, 18 nt, Human
auguccaguaagaucacu

SEQ ID NO: 3164219 - RNA, 19 nt, Human
auguccaguaagaucacug

SEQ ID NO: 3164220 - RNA, 20 nt, Human
auguccaguaagaucacugu

SEQ ID NO: 3164221 - RNA, 13 nt, Human
auguccuguaaac

SEQ ID NO: 3164222 - RNA, 22 nt, Human
auguccuguaaacacucagcug

SEQ ID NO: 3164223 - RNA, 23 nt, Human
auguccuguaaacacucagcugu

SEQ ID NO: 3164224 - RNA, 16 nt, Human
auguccacugguucuu

SEQ ID NO: 3164225 - RNA, 17 nt, Human
auguccacugguucuuc

SEQ ID NO: 3164226 - RNA, 12 nt, Human
augucaguguga

SEQ ID NO: 3164227 - RNA, 13 nt, Human
augucagugugac

SEQ ID NO: 3164228 - RNA, 22 nt, Human
augucucaggucccugcagggc

SEQ ID NO: 3164229 - RNA, 23 nt, Human
augucucagguuuguuuugugaa

SEQ ID NO: 3164230 - RNA, 17 nt, Human
augucucaggucccugc

SEQ ID NO: 3164231 - RNA, 14 nt, Human
augucgccucugca

SEQ ID NO: 3164232 - RNA, 13 nt, Human
augucgccucugc

SEQ ID NO: 3164233 - RNA, 19 nt, Human
auguccugugagaugugua

SEQ ID NO: 3164234 - RNA, 20 nt, Human
auguccugugagauguguau

SEQ ID NO: 3164235 - RNA, 13 nt, Human
auguccuguguca

SEQ ID NO: 3164236 - RNA, 11 nt, Human
auguccugugu

SEQ ID NO: 3164237 - RNA, 20 nt, Human
auguccugugucaguuuaug

SEQ ID NO: 3164238 - RNA, 18 nt, Human
auguccugugucaguuua

SEQ ID NO: 3164239 - RNA, 21 nt, Human
auguccugugucaguuuaugu

SEQ ID NO: 3164240 - RNA, 17 nt, Human
augucucugagcauuag

SEQ ID NO: 3164241 - RNA, 16 nt, Human
auguagccuuuacugu

SEQ ID NO: 3164242 - RNA, 22 nt, Human
auguagccuuuacuguuugaua

SEQ ID NO: 3164243 - RNA, 19 nt, Human
auguagcuucagucauuaa

SEQ ID NO: 3164244 - RNA, 20 nt, Human
auguagcuucagucauuaaa

SEQ ID NO: 3164245 - RNA, 17 nt, Human
auguagauuuauuucau

SEQ ID NO: 3164246 - RNA, 16 nt, Human
auguagauuuauuuca

SEQ ID NO: 3164247 - RNA, 20 nt, Human
auguagauuuauuucaucau

SEQ ID NO: 3164248 - RNA, 20 nt, Human
auguagcaaacccugucaaa

SEQ ID NO: 3164249 - RNA, 23 nt, Human
auguagcaaacccugucaaacau

SEQ ID NO: 3164250 - RNA, 18 nt, Human
uuugacagcgcacagcug

SEQ ID NO: 3164251 - RNA, 16 nt, Human
uuugacauggaaauga

SEQ ID NO: 3164252 - RNA, 19 nt, Human
uuugacagcgcacagcugc

SEQ ID NO: 3164253 - RNA, 19 nt, Human
auguagaggggaaaagaga

SEQ ID NO: 3164254 - RNA, 17 nt, Human
auguagaggagaaacug

SEQ ID NO: 3164255 - RNA, 19 nt, Human
auguagaggagaaacugga

SEQ ID NO: 3164256 - RNA, 12 nt, Human
auguagaggaga

SEQ ID NO: 3164257 - RNA, 13 nt, Human
auguagaggagaa

SEQ ID NO: 3164258 - RNA, 20 nt, Human
auguagagcacaauggaauu

SEQ ID NO: 3164259 - RNA, 16 nt, Human
auguacugauuucagu

SEQ ID NO: 3164260 - RNA, 17 nt, Human
auguacugauuucagua

SEQ ID NO: 3164261 - RNA, 18 nt, Human
auguacugauuucaguaa

SEQ ID NO: 3164262 - RNA, 19 nt, Human
auguacugauuucaguaag

SEQ ID NO: 3164263 - RNA, 17 nt, Human
auguacuauaacauaga

SEQ ID NO: 3164264 - RNA, 14 nt, Human
auguacuauaacau

SEQ ID NO: 3164265 - RNA, 17 nt, Human
auguacauguauuaaau

SEQ ID NO: 3164266 - RNA, 23 nt, Human
uuuggcaaacucuccaccacacg

SEQ ID NO: 3164267 - RNA, 14 nt, Human
uuuggcacucugac

SEQ ID NO: 3164268 - RNA, 14 nt, Human
uuugcugcugauaa

SEQ ID NO: 3164269 - RNA, 18 nt, Human
uuugcugaacauuggaga

SEQ ID NO: 3164270 - RNA, 23 nt, Human
uuugcugacaaccauuaaaguca

SEQ ID NO: 3164271 - RNA, 21 nt, Human
uuugcuccccuuccccuuccu

SEQ ID NO: 3164272 - RNA, 15 nt, Human
uuugcucuaaaauau

SEQ ID NO: 3164273 - RNA, 23 nt, Human
uuugcuccccuuccccuuccuuc

SEQ ID NO: 3164274 - RNA, 22 nt, Human
uuugcuccccuuccccuuccuu

SEQ ID NO: 3164275 - RNA, 19 nt, Human
uuugcucuaaaauauuuau

SEQ ID NO: 3164276 - RNA, 13 nt, Human
uuugccucugccu

SEQ ID NO: 3164277 - RNA, 22 nt, Human
uuugauucagacagcugccugg

SEQ ID NO: 3164278 - RNA, 13 nt, Human
uuugacgccaucc

SEQ ID NO: 3164279 - RNA, 14 nt, Human
uuugacgccauccc

SEQ ID NO: 3164280 - RNA, 16 nt, Human
uuugacgccaucccag

SEQ ID NO: 3164281 - RNA, 19 nt, Human
uuugacgccaucccagccc

SEQ ID NO: 3164282 - RNA, 20 nt, Human
uuugacgccaucccagcccc

SEQ ID NO: 3164283 - RNA, 20 nt, Human
uuugauguaaagauguucug

SEQ ID NO: 3164284 - RNA, 18 nt, Human
uuugauucagacagcugc

SEQ ID NO: 3164285 - RNA, 21 nt, Human
uuugauucagacagcugccug

SEQ ID NO: 3164286 - RNA, 22 nt, Human
uuugauguucuuucacccuuuu

SEQ ID NO: 3164287 - RNA, 20 nt, Human
uuugaugucagcaguugcug

SEQ ID NO: 3164288 - RNA, 21 nt, Human
uuugaugucagcaguugcugg

SEQ ID NO: 3164289 - RNA, 14 nt, Human
uuugaugucagcag

SEQ ID NO: 3164290 - RNA, 16 nt, Human
uuugaugucagcaguu

SEQ ID NO: 3164291 - RNA, 17 nt, Human
uuugaugucagcaguug

SEQ ID NO: 3164292 - RNA, 21 nt, Human
uuugauguguuguucuuggca

SEQ ID NO: 3164293 - RNA, 19 nt, Human
augguguucaaaaaacuug

SEQ ID NO: 3164294 - RNA, 24 nt, Human
auggugguugggacccaguggcag

SEQ ID NO: 3164295 - RNA, 21 nt, Human
augguuaccucugcauaaaua

SEQ ID NO: 3164296 - RNA, 13 nt, Human
augguuaaacauu

SEQ ID NO: 3164297 - RNA, 17 nt, Human
augguggcuggguugga

SEQ ID NO: 3164298 - RNA, 23 nt, Human
augguggggucuccucaggacca

SEQ ID NO: 3164299 - RNA, 16 nt, Human
augguggggucuccuc

SEQ ID NO: 3164300 - RNA, 15 nt, Human
augguggcuggguug

SEQ ID NO: 3164301 - RNA, 13 nt, Human
augguggcugggu

SEQ ID NO: 3164302 - RNA, 12 nt, Human
augguggcuggg

SEQ ID NO: 3164303 - RNA, 19 nt, Human
auggugcaaugaccuuuca

SEQ ID NO: 3164304 - RNA, 19 nt, Human
auggugauuuuaaaugugu

SEQ ID NO: 3164305 - RNA, 17 nt, Human
auggugauuuuaaaugu

SEQ ID NO: 3164306 - RNA, 16 nt, Human
auggugauuuuaaaug

SEQ ID NO: 3164307 - RNA, 15 nt, Human
auggugcauuguaua

SEQ ID NO: 3164308 - RNA, 18 nt, Human
auggugcauuguauagau

SEQ ID NO: 3164309 - RNA, 16 nt, Human
auggugcaaugaccuu

SEQ ID NO: 3164310 - RNA, 17 nt, Human
auggugcaaugaccuuu

SEQ ID NO: 3164311 - RNA, 12 nt, Human
auggugcaauga

SEQ ID NO: 3164312 - RNA, 20 nt, Human
auggugaugcagucuuagau

SEQ ID NO: 3164313 - RNA, 13 nt, Human
auggugauguuga

SEQ ID NO: 3164314 - RNA, 14 nt, Human
auggugauuuuaaa

SEQ ID NO: 3164315 - RNA, 12 nt, Human
auggugauuuua

SEQ ID NO: 3164316 - RNA, 19 nt, Human
auggugaugcagucuuaga

SEQ ID NO: 3164317 - RNA, 13 nt, Human
auggugcaaugac

SEQ ID NO: 3164318 - RNA, 15 nt, Human
auggugcaaugaccu

SEQ ID NO: 3164319 - RNA, 15 nt, Human
augggugcuuggagg

SEQ ID NO: 3164320 - RNA, 20 nt, Human
auggugagggauacccaucc

SEQ ID NO: 3164321 - RNA, 14 nt, Human
auggugaugaaaug

SEQ ID NO: 3164322 - RNA, 17 nt, Human
auggugaugaaauguaa

SEQ ID NO: 3164323 - RNA, 16 nt, Human
auggugaugaaaugua

SEQ ID NO: 3164324 - RNA, 17 nt, Human
auguaaauugacuguac

SEQ ID NO: 3164325 - RNA, 18 nt, Human
auguaaauugacuguacu

SEQ ID NO: 3164326 - RNA, 14 nt, Human
auguacauguauua

SEQ ID NO: 3164327 - RNA, 13 nt, Human
auguacauguauu

SEQ ID NO: 3164328 - RNA, 18 nt, Human
auguaaauagguuucuaa

SEQ ID NO: 3164329 - RNA, 16 nt, Human
auguaaauaauucuuu

SEQ ID NO: 3164330 - RNA, 14 nt, Human
auguaaauaauucu

SEQ ID NO: 3164331 - RNA, 13 nt, Human
auguaaauaauuc

SEQ ID NO: 3164332 - RNA, 21 nt, Human
auguaaagcaaccaaaaagaa

SEQ ID NO: 3164333 - RNA, 22 nt, Human
auguaaacaaaucuuuccauau

SEQ ID NO: 3164334 - RNA, 16 nt, Human
auguaaacaaaucuuu

SEQ ID NO: 3164335 - RNA, 15 nt, Human
auguaaacaaaucuu

SEQ ID NO: 3164336 - RNA, 13 nt, Human
auguaaacaaauc

SEQ ID NO: 3164337 - RNA, 13 nt, Human
auguaaaagccua

SEQ ID NO: 3164338 - RNA, 14 nt, Human
augguuuaaaagaa

SEQ ID NO: 3164339 - RNA, 16 nt, Human
augguucucaggccug

SEQ ID NO: 3164340 - RNA, 20 nt, Human
augguuccccuguucacucu

SEQ ID NO: 3164341 - RNA, 19 nt, Human
augguuccccuguucacuc

SEQ ID NO: 3164342 - RNA, 15 nt, Human
augguuuucaaaaua

SEQ ID NO: 3164343 - RNA, 14 nt, Human
augguuuucaaaau

SEQ ID NO: 3164344 - RNA, 22 nt, Human
augguuuggugcuuuuuauaaa

SEQ ID NO: 3164345 - RNA, 16 nt, Human
augguuuucaaaauaa

SEQ ID NO: 3164346 - RNA, 14 nt, Human
augguuuucuugug

SEQ ID NO: 3164347 - RNA, 11 nt, Human
auguaaaaagg

SEQ ID NO: 3164348 - RNA, 20 nt, Human
auggggauagauguguggac

SEQ ID NO: 3164349 - RNA, 14 nt, Human
auggggcagaaauc

SEQ ID NO: 3164350 - RNA, 20 nt, Human
augggcuggguucuacccag

SEQ ID NO: 3164351 - RNA, 15 nt, Human
augggcucaggaucu

SEQ ID NO: 3164352 - RNA, 12 nt, Human
augggccugagu

SEQ ID NO: 3164353 - RNA, 18 nt, Human
augggccuccugugugug

SEQ ID NO: 3164354 - RNA, 17 nt, Human
augggccuccugugugu

SEQ ID NO: 3164355 - RNA, 13 nt, Human
uuugaaauggaaa

SEQ ID NO: 3164356 - RNA, 20 nt, Human
uuugaaaugcugaaaauugc

SEQ ID NO: 3164357 - RNA, 16 nt, Human
uuugaaaacagaaauu

SEQ ID NO: 3164358 - RNA, 14 nt, Human
uuugaaaacagaaa

SEQ ID NO: 3164359 - RNA, 12 nt, Human
uuugaaaugcug

SEQ ID NO: 3164360 - RNA, 21 nt, Human
uuugaaaucaguaaacacugu

SEQ ID NO: 3164361 - RNA, 20 nt, Human
uuugaaaucaguaaacacug

SEQ ID NO: 3164362 - RNA, 15 nt, Human
uuugaaaucaguaaa

SEQ ID NO: 3164363 - RNA, 14 nt, Human
uuugaaaucaguaa

SEQ ID NO: 3164364 - RNA, 20 nt, Human
uuugaaaaccaacaccauca

SEQ ID NO: 3164365 - RNA, 22 nt, Human
uuugaaaaccaacaccaucaca

SEQ ID NO: 3164366 - RNA, 21 nt, Human
uuucuuuuguuuuuugaagug

SEQ ID NO: 3164367 - RNA, 15 nt, Human
uuucuuuuuaaagcu

SEQ ID NO: 3164368 - RNA, 20 nt, Human
uuucuuuuguuuuuugaagu

SEQ ID NO: 3164369 - RNA, 22 nt, Human
uuucuuugccaucucugcucca

SEQ ID NO: 3164370 - RNA, 16 nt, Human
uuucuuuuugaaucuu

SEQ ID NO: 3164371 - RNA, 19 nt, Human
uuucuuuuugaaucuuuaa

SEQ ID NO: 3164372 - RNA, 17 nt, Human
uuucuuuuugaaucuuu

SEQ ID NO: 3164373 - RNA, 16 nt, Human
uuucuuuuuuaaauua

SEQ ID NO: 3164374 - RNA, 18 nt, Human
uuucuuuuuuaaauuaau

SEQ ID NO: 3164375 - RNA, 20 nt, Human
uuucuuuuugaaucuuuaau

SEQ ID NO: 3164376 - RNA, 12 nt, Human
auggggcugcac

SEQ ID NO: 3164377 - RNA, 24 nt, Human
auggggcugcaccggcuggccugg

SEQ ID NO: 3164378 - RNA, 17 nt, Human
augggggcacugaggac

SEQ ID NO: 3164379 - RNA, 20 nt, Human
auggggggagcacccugagg

SEQ ID NO: 3164380 - RNA, 21 nt, Human
auggggggagcacccugaggg

SEQ ID NO: 3164381 - RNA, 22 nt, Human
auggggggagcacccugagggc

SEQ ID NO: 3164382 - RNA, 21 nt, Human
auggggucucucacagacagg

SEQ ID NO: 3164383 - RNA, 20 nt, Human
auggggucucucacagacag

SEQ ID NO: 3164384 - RNA, 19 nt, Human
auggggucucucacagaca

SEQ ID NO: 3164385 - RNA, 16 nt, Human
auggggucucucacag

SEQ ID NO: 3164386 - RNA, 23 nt, Human
auggguagggcucugacaaagcu

SEQ ID NO: 3164387 - RNA, 22 nt, Human
auggguagggcucugacaaagc

SEQ ID NO: 3164388 - RNA, 15 nt, Human
augggucgcccauga

SEQ ID NO: 3164389 - RNA, 17 nt, Human
augggucgcccaugaga

SEQ ID NO: 3164390 - RNA, 22 nt, Human
augggucgcccaugagagcgca

SEQ ID NO: 3164391 - RNA, 18 nt, Human
uuucucccagucauuuaa

SEQ ID NO: 3164392 - RNA, 17 nt, Human
uuucucccagucauuua

SEQ ID NO: 3164393 - RNA, 15 nt, Human
augggauccuggagu

SEQ ID NO: 3164394 - RNA, 16 nt, Human
augggaugauugaaga

SEQ ID NO: 3164395 - RNA, 18 nt, Human
augggaugauugaagaaa

SEQ ID NO: 3164396 - RNA, 17 nt, Human
augggaugauugaagaa

SEQ ID NO: 3164397 - RNA, 19 nt, Human
augggaugauugaagaaac

SEQ ID NO: 3164398 - RNA, 19 nt, Human
uuucugcagccacuauugu

SEQ ID NO: 3164399 - RNA, 10 nt, Human
uuucuccccc

SEQ ID NO: 3164400 - RNA, 12 nt, Human
uuucuguauaga

SEQ ID NO: 3164401 - RNA, 19 nt, Human
uuucugucacaguaaaaau

SEQ ID NO: 3164402 - RNA, 23 nt, Human
uuucugggcaccggggccucgga

SEQ ID NO: 3164403 - RNA, 19 nt, Human
uuucugggguuuuucuguu

SEQ ID NO: 3164404 - RNA, 22 nt, Human
uuucuggggccuaauaaaacug

SEQ ID NO: 3164405 - RNA, 16 nt, Human
uuucugggguuuuucu

SEQ ID NO: 3164406 - RNA, 11 nt, Human
uuucuuucagu

SEQ ID NO: 3164407 - RNA, 16 nt, Human
uuucuuugaucaugaa

SEQ ID NO: 3164408 - RNA, 19 nt, Human
uuucuuugccaucucugcu

SEQ ID NO: 3164409 - RNA, 15 nt, Human
uuucuuugccaucuc

SEQ ID NO: 3164410 - RNA, 12 nt, Human
uuucuuugauca

SEQ ID NO: 3164411 - RNA, 20 nt, Human
uuucuuugaauuuucauuuu

SEQ ID NO: 3164412 - RNA, 17 nt, Human
uuucuuugaauuuucau

SEQ ID NO: 3164413 - RNA, 16 nt, Human
uuucuuugaauuuuca

SEQ ID NO: 3164414 - RNA, 11 nt, Human
uuucugugugu

SEQ ID NO: 3164415 - RNA, 14 nt, Human
uuucuguuaaaaug

SEQ ID NO: 3164416 - RNA, 13 nt, Human
uuucuguguuuau

SEQ ID NO: 3164417 - RNA, 20 nt, Human
uuucuguucagcguuuugca

SEQ ID NO: 3164418 - RNA, 22 nt, Human
uuucuguucagcguuuugcaag

SEQ ID NO: 3164419 - RNA, 17 nt, Human
uuucuguuaaaaugcau

SEQ ID NO: 3164420 - RNA, 14 nt, Human
uuucuguccuguaa

SEQ ID NO: 3164421 - RNA, 18 nt, Human
uuucuguccuguaacugu

SEQ ID NO: 3164422 - RNA, 14 nt, Human
uuucuguauagaca

SEQ ID NO: 3164423 - RNA, 10 nt, Human
uuucugugug

SEQ ID NO: 3164424 - RNA, 13 nt, Human
uuucuguguguuc

SEQ ID NO: 3164425 - RNA, 14 nt, Human
uuucuguguguucc

SEQ ID NO: 3164426 - RNA, 15 nt, Human
uuucuguguguuccu

SEQ ID NO: 3164427 - RNA, 16 nt, Human
uuucuguguguuccug

SEQ ID NO: 3164428 - RNA, 17 nt, Human
uuucuguguguuccugg

SEQ ID NO: 3164429 - RNA, 18 nt, Human
uuucuguguguuccuggc

SEQ ID NO: 3164430 - RNA, 23 nt, Human
uuucauuagcaaaaaaaguugua

SEQ ID NO: 3164431 - RNA, 21 nt, Human
uuucauuagcaaaaaaaguug

SEQ ID NO: 3164432 - RNA, 19 nt, Human
uuucauuagcaaaaaaagu

SEQ ID NO: 3164433 - RNA, 16 nt, Human
uuucauuagcaaaaaa

SEQ ID NO: 3164434 - RNA, 15 nt, Human
uuucauuagcaaaaa

SEQ ID NO: 3164435 - RNA, 14 nt, Human
uuucauuagcaaaa

SEQ ID NO: 3164436 - RNA, 17 nt, Human
uuucaacaguuucaaaa

SEQ ID NO: 3164437 - RNA, 13 nt, Human
uuucauuagcaaa

SEQ ID NO: 3164438 - RNA, 12 nt, Human
uuucauuagcaa

SEQ ID NO: 3164439 - RNA, 21 nt, Human
uuuccauauuuuuuuccuuac

SEQ ID NO: 3164440 - RNA, 13 nt, Human
uuuccaucuaaaa

SEQ ID NO: 3164441 - RNA, 22 nt, Human
uuuccauauuuuuuuccuuaca

SEQ ID NO: 3164442 - RNA, 17 nt, Human
uuuccaugaguccccug

SEQ ID NO: 3164443 - RNA, 18 nt, Human
uuuccaugaguccccugu

SEQ ID NO: 3164444 - RNA, 17 nt, Human
uuucccccuuggcucuc

SEQ ID NO: 3164445 - RNA, 16 nt, Human
uuuccaucuaaaaaua

SEQ ID NO: 3164446 - RNA, 21 nt, Human
uuucccccuuucuuccucauu

SEQ ID NO: 3164447 - RNA, 18 nt, Human
uuucccccuuucuuccuc

SEQ ID NO: 3164448 - RNA, 17 nt, Human
uuucccccuuucuuccu

SEQ ID NO: 3164449 - RNA, 14 nt, Human
uuucccccuuucuu

SEQ ID NO: 3164450 - RNA, 13 nt, Human
uuucccccuuucu

SEQ ID NO: 3164451 - RNA, 15 nt, Human
auggaauuuuuuugu

SEQ ID NO: 3164452 - RNA, 16 nt, Human
auggaauuuuuuugua

SEQ ID NO: 3164453 - RNA, 17 nt, Human
auggaauuuuuuuguac

SEQ ID NO: 3164454 - RNA, 18 nt, Human
auggaauuuuuuuguacg

SEQ ID NO: 3164455 - RNA, 19 nt, Human
auggacuaacuugucuuug

SEQ ID NO: 3164456 - RNA, 18 nt, Human
auggacucagaaacucca

SEQ ID NO: 3164457 - RNA, 11 nt, Human
auggacuuugu

SEQ ID NO: 3164458 - RNA, 12 nt, Human
auggacuuuguu

SEQ ID NO: 3164459 - RNA, 15 nt, Human
auggagaaccaccua

SEQ ID NO: 3164460 - RNA, 19 nt, Human
auggcaggugauguccugu

SEQ ID NO: 3164461 - RNA, 18 nt, Human
auggagacugucucaaga

SEQ ID NO: 3164462 - RNA, 23 nt, Human
auggcuauaggugcuacaaaaac

SEQ ID NO: 3164463 - RNA, 14 nt, Human
auggcuauuaacaa

SEQ ID NO: 3164464 - RNA, 22 nt, Human
auggcuauuaacaauuaauugu

SEQ ID NO: 3164465 - RNA, 19 nt, Human
auggcuaagcaaaauguga

SEQ ID NO: 3164466 - RNA, 17 nt, Human
augggaggggaaauggg

SEQ ID NO: 3164467 - RNA, 15 nt, Human
augggaggcuggagu

SEQ ID NO: 3164468 - RNA, 13 nt, Human
augggagggagcu

SEQ ID NO: 3164469 - RNA, 19 nt, Human
augggagagaagagaaugc

SEQ ID NO: 3164470 - RNA, 15 nt, Human
augggagagaagaga

SEQ ID NO: 3164471 - RNA, 22 nt, Human
augggagaaauaguguggaaau

SEQ ID NO: 3164472 - RNA, 18 nt, Human
uuuauuuuuaaauuaugu

SEQ ID NO: 3164473 - RNA, 23 nt, Human
uuuauuuuuagaauuuugugaaa

SEQ ID NO: 3164474 - RNA, 19 nt, Human
uuuauuuuuagaauuuugu

SEQ ID NO: 3164475 - RNA, 16 nt, Human
uuuauuuuuagaauuu

SEQ ID NO: 3164476 - RNA, 17 nt, Human
uuuauuuuuaagaaaga

SEQ ID NO: 3164477 - RNA, 16 nt, Human
uuuauuuuuaagaaag

SEQ ID NO: 3164478 - RNA, 24 nt, Human
uuucaaaaaucugaagauuguuua

SEQ ID NO: 3164479 - RNA, 23 nt, Human
uuucaaaaaucugaagauuguuu

SEQ ID NO: 3164480 - RNA, 21 nt, Human
uuucaaaaaucugaagauugu

SEQ ID NO: 3164481 - RNA, 19 nt, Human
uuucaaaaaucugaagauu

SEQ ID NO: 3164482 - RNA, 13 nt, Human
uuuauuuuucugu

SEQ ID NO: 3164483 - RNA, 15 nt, Human
uuuauuuuucuguua

SEQ ID NO: 3164484 - RNA, 13 nt, Human
uuucaaaaaucug

SEQ ID NO: 3164485 - RNA, 18 nt, Human
uuucaaaauaaaauauca

SEQ ID NO: 3164486 - RNA, 14 nt, Human
augcuguguaagcu

SEQ ID NO: 3164487 - RNA, 17 nt, Human
augcuccccugugccag

SEQ ID NO: 3164488 - RNA, 16 nt, Human
augcuccccugugcca

SEQ ID NO: 3164489 - RNA, 13 nt, Human
augcuucucacug

SEQ ID NO: 3164490 - RNA, 13 nt, Human
augcuuccagaaa

SEQ ID NO: 3164491 - RNA, 16 nt, Human
augcuucauuuguaug

SEQ ID NO: 3164492 - RNA, 21 nt, Human
augcuucauuuguaugucaaa

SEQ ID NO: 3164493 - RNA, 22 nt, Human
augcuuccagaaacacccacag

SEQ ID NO: 3164494 - RNA, 14 nt, Human
augcuuccagaaac

SEQ ID NO: 3164495 - RNA, 14 nt, Human
uuuauauuuggaug

SEQ ID NO: 3164496 - RNA, 21 nt, Human
uuuauauuucaaguacacuga

SEQ ID NO: 3164497 - RNA, 20 nt, Human
uuuauauuucaaguacacug

SEQ ID NO: 3164498 - RNA, 18 nt, Human
uuuauauuucaaguacac

SEQ ID NO: 3164499 - RNA, 17 nt, Human
uuuaucaugaaugcuuu

SEQ ID NO: 3164500 - RNA, 19 nt, Human
uuuaucaugaaugcuuuua

SEQ ID NO: 3164501 - RNA, 16 nt, Human
uuuaucaaugugucuu

SEQ ID NO: 3164502 - RNA, 19 nt, Human
uuuaucaaugugucuuucu

SEQ ID NO: 3164503 - RNA, 20 nt, Human
uuuaucaaugugucuuucua

SEQ ID NO: 3164504 - RNA, 21 nt, Human
uuuauauuuauugacucuuga

SEQ ID NO: 3164505 - RNA, 13 nt, Human
uuuauauuucaag

SEQ ID NO: 3164506 - RNA, 15 nt, Human
uuuauauuucaagua

SEQ ID NO: 3164507 - RNA, 14 nt, Human
uuuauauuucaagu

SEQ ID NO: 3164508 - RNA, 16 nt, Human
augcuaagacucagug

SEQ ID NO: 3164509 - RNA, 13 nt, Human
augcuaagaauuu

SEQ ID NO: 3164510 - RNA, 16 nt, Human
augcuaagaauuuuuu

SEQ ID NO: 3164511 - RNA, 20 nt, Human
uuuauauguauguguuuaga

SEQ ID NO: 3164512 - RNA, 21 nt, Human
uuuauauguauguguuuagaa

SEQ ID NO: 3164513 - RNA, 15 nt, Human
uuuauauguaugugu

SEQ ID NO: 3164514 - RNA, 17 nt, Human
augcuaugucauuucau

SEQ ID NO: 3164515 - RNA, 14 nt, Human
augcuaugucauuu

SEQ ID NO: 3164516 - RNA, 19 nt, Human
augcuagaacucccuuuca

SEQ ID NO: 3164517 - RNA, 22 nt, Human
augcuagaacucccuuucaaca

SEQ ID NO: 3164518 - RNA, 20 nt, Human
augcuagaacucccuuucaa

SEQ ID NO: 3164519 - RNA, 21 nt, Human
augcuagaacucccuuucaac

SEQ ID NO: 3164520 - RNA, 19 nt, Human
uuuauuaaucacuguguau

SEQ ID NO: 3164521 - RNA, 21 nt, Human
uuuauuaaucacuguguauau

SEQ ID NO: 3164522 - RNA, 15 nt, Human
uuuauuaaucacugu

SEQ ID NO: 3164523 - RNA, 13 nt, Human
uuuauuaaucacu

SEQ ID NO: 3164524 - RNA, 20 nt, Human
uuuauuaagcacguauuuau

SEQ ID NO: 3164525 - RNA, 20 nt, Human
uuuauuaagcuuuuuggaau

SEQ ID NO: 3164526 - RNA, 22 nt, Human
augcagauuuugcccuugacaa

SEQ ID NO: 3164527 - RNA, 15 nt, Human
augcagaugccuggg

SEQ ID NO: 3164528 - RNA, 16 nt, Human
uuuacaaccuagaagu

SEQ ID NO: 3164529 - RNA, 17 nt, Human
augcagcaucuaaguaa

SEQ ID NO: 3164530 - RNA, 17 nt, Human
augcagccucacagucc

SEQ ID NO: 3164531 - RNA, 18 nt, Human
augcagccacuuaggaca

SEQ ID NO: 3164532 - RNA, 17 nt, Human
augcagccacuuaggac

SEQ ID NO: 3164533 - RNA, 15 nt, Human
augcagcucuuccug

SEQ ID NO: 3164534 - RNA, 16 nt, Human
augcagcucuuccugg

SEQ ID NO: 3164535 - RNA, 22 nt, Human
augcaggagcuucugggagauu

SEQ ID NO: 3164536 - RNA, 18 nt, Human
augcagccucacaguccu

SEQ ID NO: 3164537 - RNA, 14 nt, Human
augcagcucuuccu

SEQ ID NO: 3164538 - RNA, 19 nt, Human
uuuaauuuuuuugagacag

SEQ ID NO: 3164539 - RNA, 23 nt, Human
uuuaauuucaagcuuauuuugga

SEQ ID NO: 3164540 - RNA, 16 nt, Human
uuuaauuugaaauaug

SEQ ID NO: 3164541 - RNA, 20 nt, Human
uuuaauuucaagcuuauuuu

SEQ ID NO: 3164542 - RNA, 13 nt, Human
uuuaauuucaagc

SEQ ID NO: 3164543 - RNA, 23 nt, Human
uuuacaaaggcuguauucagcaa

SEQ ID NO: 3164544 - RNA, 13 nt, Human
uuuacaaaggcug

SEQ ID NO: 3164545 - RNA, 20 nt, Human
uuuacaacacuuuaaugggu

SEQ ID NO: 3164546 - RNA, 19 nt, Human
uuuacaacacuuuaauggg

SEQ ID NO: 3164547 - RNA, 14 nt, Human
uuuacaacacuuua

SEQ ID NO: 3164548 - RNA, 17 nt, Human
uuuacaaacaaaagcau

SEQ ID NO: 3164549 - RNA, 15 nt, Human
uuuaaggucuguuug

SEQ ID NO: 3164550 - RNA, 14 nt, Human
uuuaaguagauuuc

SEQ ID NO: 3164551 - RNA, 17 nt, Human
uuuaaggucuguuugcu

SEQ ID NO: 3164552 - RNA, 14 nt, Human
uuuaagugaaauuu

SEQ ID NO: 3164553 - RNA, 13 nt, Human
uuuaagugaaauu

SEQ ID NO: 3164554 - RNA, 13 nt, Human
uuuaauguugaac

SEQ ID NO: 3164555 - RNA, 23 nt, Human
uuuaauguugaacaaaauaaauu

SEQ ID NO: 3164556 - RNA, 18 nt, Human
uuuaauguugaacaaaau

SEQ ID NO: 3164557 - RNA, 14 nt, Human
uuuaauuaagcaaa

SEQ ID NO: 3164558 - RNA, 21 nt, Human
augcgguguuugguuuuuugu

SEQ ID NO: 3164559 - RNA, 12 nt, Human
augcccagcccc

SEQ ID NO: 3164560 - RNA, 13 nt, Human
augcccagccccu

SEQ ID NO: 3164561 - RNA, 14 nt, Human
augcccagccccuu

SEQ ID NO: 3164562 - RNA, 16 nt, Human
augccucagccuccug

SEQ ID NO: 3164563 - RNA, 14 nt, Human
augcccuggaucca

SEQ ID NO: 3164564 - RNA, 22 nt, Human
augcaguuacaaauuauaaugu

SEQ ID NO: 3164565 - RNA, 19 nt, Human
augcaguguagauuuuaua

SEQ ID NO: 3164566 - RNA, 23 nt, Human
augcaguguagauuuuauagugu

SEQ ID NO: 3164567 - RNA, 20 nt, Human
augcaguuacaaauuauaau

SEQ ID NO: 3164568 - RNA, 19 nt, Human
augcaguuacaaauuauaa

SEQ ID NO: 3164569 - RNA, 13 nt, Human
augcagugcuucc

SEQ ID NO: 3164570 - RNA, 23 nt, Human
augcagugguaugaucacggcuc

SEQ ID NO: 3164571 - RNA, 21 nt, Human
augccaaagaaugaauuucaa

SEQ ID NO: 3164572 - RNA, 13 nt, Human
augcauuuggaac

SEQ ID NO: 3164573 - RNA, 21 nt, Human
augccauuuaaagcuuauuaa

SEQ ID NO: 3164574 - RNA, 17 nt, Human
augccauuuaaagcuua

SEQ ID NO: 3164575 - RNA, 11 nt, Human
augcccagccc

SEQ ID NO: 3164576 - RNA, 13 nt, Human
augccaauuucuc

SEQ ID NO: 3164577 - RNA, 15 nt, Human
augauaguugaaugu

SEQ ID NO: 3164578 - RNA, 17 nt, Human
augauauaacuuuagaa

SEQ ID NO: 3164579 - RNA, 17 nt, Human
augauaugcuuguaacu

SEQ ID NO: 3164580 - RNA, 23 nt, Human
augauaugcuuguaacuaaaaua

SEQ ID NO: 3164581 - RNA, 15 nt, Human
augaucuaggaagac

SEQ ID NO: 3164582 - RNA, 17 nt, Human
augaucuaggaagacuu

SEQ ID NO: 3164583 - RNA, 20 nt, Human
augaucuaggaagacuuugg

SEQ ID NO: 3164584 - RNA, 17 nt, Human
uuggugcuuuuuauaaa

SEQ ID NO: 3164585 - RNA, 19 nt, Human
uuggugcuuuuuauaaaaa

SEQ ID NO: 3164586 - RNA, 21 nt, Human
uuggugcuuuuuauaaaaaga

SEQ ID NO: 3164587 - RNA, 21 nt, Human
uuguuccacaaguuaaauaaa

SEQ ID NO: 3164588 - RNA, 21 nt, Human
uuguucauuucauccuuucac

SEQ ID NO: 3164589 - RNA, 22 nt, Human
uuguugaacuguuagaauguaa

SEQ ID NO: 3164590 - RNA, 11 nt, Human
uuguuccaguu

SEQ ID NO: 3164591 - RNA, 12 nt, Human
uuguuccagaga

SEQ ID NO: 3164592 - RNA, 18 nt, Human
uuguugaacuguuagaau

SEQ ID NO: 3164593 - RNA, 15 nt, Human
uuguugaacuguuag

SEQ ID NO: 3164594 - RNA, 15 nt, Human
uuguugaaagaaagu

SEQ ID NO: 3164595 - RNA, 20 nt, Human
uuguucuuguuuuuaaguuu

SEQ ID NO: 3164596 - RNA, 15 nt, Human
uuguucuuguuuuua

SEQ ID NO: 3164597 - RNA, 19 nt, Human
augauugcagaauuguuua

SEQ ID NO: 3164598 - RNA, 12 nt, Human
augauugcagaa

SEQ ID NO: 3164599 - RNA, 15 nt, Human
augauugcuuuuaaa

SEQ ID NO: 3164600 - RNA, 14 nt, Human
augauugcuuuuaa

SEQ ID NO: 3164601 - RNA, 13 nt, Human
augauugcuuuua

SEQ ID NO: 3164602 - RNA, 21 nt, Human
augauugcagaauuguuuaga

SEQ ID NO: 3164603 - RNA, 13 nt, Human
augauugaagaaa

SEQ ID NO: 3164604 - RNA, 12 nt, Human
augauugaaaau

SEQ ID NO: 3164605 - RNA, 13 nt, Human
augcaagcaguuu

SEQ ID NO: 3164606 - RNA, 23 nt, Human
augcaagcaguuucaauaaaguu

SEQ ID NO: 3164607 - RNA, 22 nt, Human
augcaagcaguuucaauaaagu

SEQ ID NO: 3164608 - RNA, 16 nt, Human
augcaagcaguuucaa

SEQ ID NO: 3164609 - RNA, 15 nt, Human
augcaagcaguuuca

SEQ ID NO: 3164610 - RNA, 17 nt, Human
augauugcuuuuaaaau

SEQ ID NO: 3164611 - RNA, 15 nt, Human
augcaaccauuugaa

SEQ ID NO: 3164612 - RNA, 19 nt, Human
augcacuuuguucuggcuc

SEQ ID NO: 3164613 - RNA, 20 nt, Human
augcacuuuguucuggcucu

SEQ ID NO: 3164614 - RNA, 17 nt, Human
augcacuuuguucuggc

SEQ ID NO: 3164615 - RNA, 16 nt, Human
augcacuuuguucugg

SEQ ID NO: 3164616 - RNA, 14 nt, Human
augcaccagcccuu

SEQ ID NO: 3164617 - RNA, 22 nt, Human
augcaccagcccuuagcaggga

SEQ ID NO: 3164618 - RNA, 13 nt, Human
uuuaaagaaugcu

SEQ ID NO: 3164619 - RNA, 23 nt, Human
uuuaaauaaaaauuacuguguua

SEQ ID NO: 3164620 - RNA, 21 nt, Human
uuuaaagguuucuauuuucuc

SEQ ID NO: 3164621 - RNA, 15 nt, Human
uuuaaaguaugcauu

SEQ ID NO: 3164622 - RNA, 21 nt, Human
uuuaaaguaugcauuauuaaa

SEQ ID NO: 3164623 - RNA, 23 nt, Human
uuuaaaaauacagauagauauau

SEQ ID NO: 3164624 - RNA, 19 nt, Human
uuuaaaaaugguaucaaaa

SEQ ID NO: 3164625 - RNA, 20 nt, Human
uuuaaaaaugguaucaaaau

SEQ ID NO: 3164626 - RNA, 22 nt, Human
uuuaaaaaugguaucaaaauua

SEQ ID NO: 3164627 - RNA, 14 nt, Human
uuuaaaaauuuacu

SEQ ID NO: 3164628 - RNA, 12 nt, Human
uuuaaaaauuua

SEQ ID NO: 3164629 - RNA, 23 nt, Human
uuuaaaaauuagccuaagauaua

SEQ ID NO: 3164630 - RNA, 13 nt, Human
uuguuuugcuucc

SEQ ID NO: 3164631 - RNA, 16 nt, Human
uuguuuugcuuccccu

SEQ ID NO: 3164632 - RNA, 14 nt, Human
uuguuuugcuuccc

SEQ ID NO: 3164633 - RNA, 14 nt, Human
uuguuuugcuuuuu

SEQ ID NO: 3164634 - RNA, 14 nt, Human
uuguuuugaaaaua

SEQ ID NO: 3164635 - RNA, 15 nt, Human
uuguuuugaaaauaa

SEQ ID NO: 3164636 - RNA, 13 nt, Human
aucaggccauugu

SEQ ID NO: 3164637 - RNA, 16 nt, Human
aucaggccauuguccc

SEQ ID NO: 3164638 - RNA, 14 nt, Human
aucaggccaggccc

SEQ ID NO: 3164639 - RNA, 13 nt, Human
aucaggcucccag

SEQ ID NO: 3164640 - RNA, 14 nt, Human
aucaggcucccagg

SEQ ID NO: 3164641 - RNA, 21 nt, Human
aucagguccugcucagcagug

SEQ ID NO: 3164642 - RNA, 19 nt, Human
aucagguccugcucagcag

SEQ ID NO: 3164643 - RNA, 14 nt, Human
aucagguccugcuc

SEQ ID NO: 3164644 - RNA, 13 nt, Human
aucagguccugcu

SEQ ID NO: 3164645 - RNA, 18 nt, Human
aucagggaccaccagagg

SEQ ID NO: 3164646 - RNA, 15 nt, Human
aucaggccaggcccu

SEQ ID NO: 3164647 - RNA, 16 nt, Human
aucaggccaggcccuc

SEQ ID NO: 3164648 - RNA, 18 nt, Human
aucaggccaggcccucug

SEQ ID NO: 3164649 - RNA, 12 nt, Human
aucagaauucuc

SEQ ID NO: 3164650 - RNA, 20 nt, Human
aucagaauaaccuucaaaua

SEQ ID NO: 3164651 - RNA, 18 nt, Human
aucagaauggaagagaga

SEQ ID NO: 3164652 - RNA, 20 nt, Human
aucagaauggaagagagaaa

SEQ ID NO: 3164653 - RNA, 13 nt, Human
aucagcaaagaaa

SEQ ID NO: 3164654 - RNA, 14 nt, Human
aucagcaaagaaaa

SEQ ID NO: 3164655 - RNA, 23 nt, Human
aucagcaaagaaaaaaaaaaaag

SEQ ID NO: 3164656 - RNA, 13 nt, Human
aucagauugcuuu

SEQ ID NO: 3164657 - RNA, 14 nt, Human
aucagauugcuuuu

SEQ ID NO: 3164658 - RNA, 15 nt, Human
aucagauugcuuuug

SEQ ID NO: 3164659 - RNA, 18 nt, Human
aucagauugcuuuugugc

SEQ ID NO: 3164660 - RNA, 19 nt, Human
aucagauugcuuuugugca

SEQ ID NO: 3164661 - RNA, 12 nt, Human
aucacuuucaua

SEQ ID NO: 3164662 - RNA, 18 nt, Human
aucagaaguuucucagcu

SEQ ID NO: 3164663 - RNA, 11 nt, Human
aucagaauucu

SEQ ID NO: 3164664 - RNA, 20 nt, Human
uucucacauggaaugagggu

SEQ ID NO: 3164665 - RNA, 13 nt, Human
uucucaccagcug

SEQ ID NO: 3164666 - RNA, 18 nt, Human
uucucacuccuaccuggu

SEQ ID NO: 3164667 - RNA, 16 nt, Human
uucucacuccuaccug

SEQ ID NO: 3164668 - RNA, 16 nt, Human
uucuaggaccuguguc

SEQ ID NO: 3164669 - RNA, 14 nt, Human
uucucaccagcugu

SEQ ID NO: 3164670 - RNA, 23 nt, Human
uucuaagaagugaaaaucuacac

SEQ ID NO: 3164671 - RNA, 13 nt, Human
uucuaagaaguga

SEQ ID NO: 3164672 - RNA, 15 nt, Human
uucuaaguaaaacca

SEQ ID NO: 3164673 - RNA, 16 nt, Human
uucuaaguaaaaccac

SEQ ID NO: 3164674 - RNA, 16 nt, Human
uucuagcauggcugcc

SEQ ID NO: 3164675 - RNA, 15 nt, Human
uucuagauuaccaug

SEQ ID NO: 3164676 - RNA, 14 nt, Human
uucggccuccaucc

SEQ ID NO: 3164677 - RNA, 13 nt, Human
uucgcuccugugu

SEQ ID NO: 3164678 - RNA, 19 nt, Human
uucgcuccugugucuugca

SEQ ID NO: 3164679 - RNA, 15 nt, Human
uucgcuccugugucu

SEQ ID NO: 3164680 - RNA, 12 nt, Human
uucggcauuuga

SEQ ID NO: 3164681 - RNA, 13 nt, Human
uucccucccugcu

SEQ ID NO: 3164682 - RNA, 23 nt, Human
uucccucccugcugucauugcuu

SEQ ID NO: 3164683 - RNA, 16 nt, Human
uucccucccugcuguc

SEQ ID NO: 3164684 - RNA, 15 nt, Human
uucccucccugcugu

SEQ ID NO: 3164685 - RNA, 19 nt, Human
uuccgucacaucccacccc

SEQ ID NO: 3164686 - RNA, 14 nt, Human
uuccgucacauccc

SEQ ID NO: 3164687 - RNA, 15 nt, Human
uucccuauuagagaa

SEQ ID NO: 3164688 - RNA, 20 nt, Human
uucccucaccuuucccaucu

SEQ ID NO: 3164689 - RNA, 22 nt, Human
uucccgcucagcccucccugcc

SEQ ID NO: 3164690 - RNA, 21 nt, Human
uucccgcucagcccucccugc

SEQ ID NO: 3164691 - RNA, 18 nt, Human
uucccgcucagcccuccc

SEQ ID NO: 3164692 - RNA, 16 nt, Human
uucccgcucagcccuc

SEQ ID NO: 3164693 - RNA, 19 nt, Human
auagauugugaauaaugau

SEQ ID NO: 3164694 - RNA, 15 nt, Human
auagcaaaaucaaga

SEQ ID NO: 3164695 - RNA, 15 nt, Human
uucccgcucagcccu

SEQ ID NO: 3164696 - RNA, 13 nt, Human
uuccucuuuccau

SEQ ID NO: 3164697 - RNA, 19 nt, Human
uuccucugcuaaauugaug

SEQ ID NO: 3164698 - RNA, 16 nt, Human
uuccucugcuaaauug

SEQ ID NO: 3164699 - RNA, 14 nt, Human
uuccucugcuaaau

SEQ ID NO: 3164700 - RNA, 22 nt, Human
uuccucuuuccaucuacccucc

SEQ ID NO: 3164701 - RNA, 17 nt, Human
uuccucuuuccaucuac

SEQ ID NO: 3164702 - RNA, 14 nt, Human
uuccugaaccgaug

SEQ ID NO: 3164703 - RNA, 17 nt, Human
uuccucugcuaaauuga

SEQ ID NO: 3164704 - RNA, 17 nt, Human
uuccuaauccucuagga

SEQ ID NO: 3164705 - RNA, 12 nt, Human
uuccuaaaacag

SEQ ID NO: 3164706 - RNA, 22 nt, Human
uuccguuugauuugucacugcu

SEQ ID NO: 3164707 - RNA, 16 nt, Human
uuccuaauuccacagc

SEQ ID NO: 3164708 - RNA, 17 nt, Human
uuccuaauuccacagcu

SEQ ID NO: 3164709 - RNA, 18 nt, Human
uuccuaauuccacagcug

SEQ ID NO: 3164710 - RNA, 14 nt, Human
uuccucugagccuu

SEQ ID NO: 3164711 - RNA, 17 nt, Human
uuccucugagccuuggg

SEQ ID NO: 3164712 - RNA, 21 nt, Human
uuccucugaggcugaaauuca

SEQ ID NO: 3164713 - RNA, 15 nt, Human
uuccuacacaggaca

SEQ ID NO: 3164714 - RNA, 14 nt, Human
uuccuacacaggac

SEQ ID NO: 3164715 - RNA, 15 nt, Human
auauuuuuaucuaua

SEQ ID NO: 3164716 - RNA, 16 nt, Human
auauuuuuaucuauau

SEQ ID NO: 3164717 - RNA, 22 nt, Human
auauuuuuaucuauauaaaaua

SEQ ID NO: 3164718 - RNA, 16 nt, Human
uuccugugccagguga

SEQ ID NO: 3164719 - RNA, 16 nt, Human
uuccuguguccaugug

SEQ ID NO: 3164720 - RNA, 14 nt, Human
uuccugugccaggu

SEQ ID NO: 3164721 - RNA, 18 nt, Human
auauuuuuuguuaaauga

SEQ ID NO: 3164722 - RNA, 20 nt, Human
auauuuuuuguuaaaugauu

SEQ ID NO: 3164723 - RNA, 17 nt, Human
aucaaauuaauugugug

SEQ ID NO: 3164724 - RNA, 16 nt, Human
aucaaauuaauugugu

SEQ ID NO: 3164725 - RNA, 14 nt, Human
aucaacagauaaau

SEQ ID NO: 3164726 - RNA, 16 nt, Human
aucaacacacauuuua

SEQ ID NO: 3164727 - RNA, 21 nt, Human
aucaagaugugacauguuuua

SEQ ID NO: 3164728 - RNA, 21 nt, Human
aucaaucuuuagaaaaggcau

SEQ ID NO: 3164729 - RNA, 15 nt, Human
aucaaucuuuagaaa

SEQ ID NO: 3164730 - RNA, 14 nt, Human
aucaaugaguguga

SEQ ID NO: 3164731 - RNA, 14 nt, Human
aucaaugaguaaca

SEQ ID NO: 3164732 - RNA, 21 nt, Human
aucaaucuguaaaacuaagaa

SEQ ID NO: 3164733 - RNA, 21 nt, Human
aucaagggccuaucuuggaga

SEQ ID NO: 3164734 - RNA, 15 nt, Human
aucacggcucacugc

SEQ ID NO: 3164735 - RNA, 13 nt, Human
aucacgccacugc

SEQ ID NO: 3164736 - RNA, 18 nt, Human
aucacggcucacugcagc

SEQ ID NO: 3164737 - RNA, 21 nt, Human
auccuacgaguaauugcauuu

SEQ ID NO: 3164738 - RNA, 24 nt, Human
auccuacgaguaauugcauuugcu

SEQ ID NO: 3164739 - RNA, 16 nt, Human
auccuaggcauuugcu

SEQ ID NO: 3164740 - RNA, 16 nt, Human
auccuccucagaucuu

SEQ ID NO: 3164741 - RNA, 14 nt, Human
auccuccucagauc

SEQ ID NO: 3164742 - RNA, 17 nt, Human
auccggggccagcuccg

SEQ ID NO: 3164743 - RNA, 16 nt, Human
auccggggccagcucc

SEQ ID NO: 3164744 - RNA, 12 nt, Human
auccuaagcuau

SEQ ID NO: 3164745 - RNA, 18 nt, Human
auccuaagauguguucuu

SEQ ID NO: 3164746 - RNA, 21 nt, Human
auccuaagauguguucuuauu

SEQ ID NO: 3164747 - RNA, 18 nt, Human
auccuacaagacacagug

SEQ ID NO: 3164748 - RNA, 19 nt, Human
auccuacaagacacaguga

SEQ ID NO: 3164749 - RNA, 14 nt, Human
auccuacaagacac

SEQ ID NO: 3164750 - RNA, 18 nt, Human
uugaacccgggaggcaga

SEQ ID NO: 3164751 - RNA, 19 nt, Human
uugaacccgggaggcagag

SEQ ID NO: 3164752 - RNA, 13 nt, Human
uugaaauucuauu

SEQ ID NO: 3164753 - RNA, 14 nt, Human
uugaaauucuauuu

SEQ ID NO: 3164754 - RNA, 21 nt, Human
uugaaauucuauuuauaauac

SEQ ID NO: 3164755 - RNA, 15 nt, Human
uugaaagugccuuug

SEQ ID NO: 3164756 - RNA, 15 nt, Human
uugaaauggaaauua

SEQ ID NO: 3164757 - RNA, 17 nt, Human
uugaaaugcugaaaauu

SEQ ID NO: 3164758 - RNA, 13 nt, Human
uugaaaugcugaa

SEQ ID NO: 3164759 - RNA, 11 nt, Human
uugaaaugcug

SEQ ID NO: 3164760 - RNA, 21 nt, Human
uucuuuuugcucuaaaauauu

SEQ ID NO: 3164761 - RNA, 20 nt, Human
uucuuuuugcucuaaaauau

SEQ ID NO: 3164762 - RNA, 14 nt, Human
uucuuuuugcucua

SEQ ID NO: 3164763 - RNA, 13 nt, Human
uucuuuuugcucu

SEQ ID NO: 3164764 - RNA, 12 nt, Human
uucuuuuugcuc

SEQ ID NO: 3164765 - RNA, 17 nt, Human
uucuuuuugaucaucuu

SEQ ID NO: 3164766 - RNA, 18 nt, Human
uucuuuuugaaucuuuaa

SEQ ID NO: 3164767 - RNA, 12 nt, Human
uucuuuuugaau

SEQ ID NO: 3164768 - RNA, 17 nt, Human
uugaaagaauguaaagc

SEQ ID NO: 3164769 - RNA, 14 nt, Human
uucuuuuuuuguga

SEQ ID NO: 3164770 - RNA, 16 nt, Human
uugaaagaauguaaag

SEQ ID NO: 3164771 - RNA, 22 nt, Human
uucuuuuuuauuaaucacugug

SEQ ID NO: 3164772 - RNA, 20 nt, Human
uucuuuuuuauuaaucacug

SEQ ID NO: 3164773 - RNA, 21 nt, Human
uucuuuuuuauuaaucacugu

SEQ ID NO: 3164774 - RNA, 17 nt, Human
uucuuuuuuaaauuaau

SEQ ID NO: 3164775 - RNA, 15 nt, Human
uucuuuuuuauuaau

SEQ ID NO: 3164776 - RNA, 16 nt, Human
uucuuuuuuauuaauc

SEQ ID NO: 3164777 - RNA, 14 nt, Human
uucuuuuuuauuaa

SEQ ID NO: 3164778 - RNA, 20 nt, Human
uucuucugcuucagccuccc

SEQ ID NO: 3164779 - RNA, 19 nt, Human
uucuucugaucacugaaau

SEQ ID NO: 3164780 - RNA, 14 nt, Human
uucuucugaggccu

SEQ ID NO: 3164781 - RNA, 13 nt, Human
uucuucuguaaua

SEQ ID NO: 3164782 - RNA, 14 nt, Human
uucuucuguaauau

SEQ ID NO: 3164783 - RNA, 15 nt, Human
uucuucuguaauauu

SEQ ID NO: 3164784 - RNA, 23 nt, Human
uucuucuguaauauuuacaaugu

SEQ ID NO: 3164785 - RNA, 20 nt, Human
uucuucugaucacugaaaua

SEQ ID NO: 3164786 - RNA, 14 nt, Human
uucuuugcccuuua

SEQ ID NO: 3164787 - RNA, 21 nt, Human
uucuuugccaucucugcucca

SEQ ID NO: 3164788 - RNA, 16 nt, Human
uucuuuggaguuaaaa

SEQ ID NO: 3164789 - RNA, 20 nt, Human
uucuuuggaguuaaaaugca

SEQ ID NO: 3164790 - RNA, 16 nt, Human
uucuugaauauaaaaa

SEQ ID NO: 3164791 - RNA, 17 nt, Human
uucuugaauauaaaaaa

SEQ ID NO: 3164792 - RNA, 13 nt, Human
aucccucauccuc

SEQ ID NO: 3164793 - RNA, 21 nt, Human
aucccucauccucauacccac

SEQ ID NO: 3164794 - RNA, 23 nt, Human
aucccucauccucauacccaccc

SEQ ID NO: 3164795 - RNA, 14 nt, Human
aucccucauccuca

SEQ ID NO: 3164796 - RNA, 24 nt, Human
aucccauaugccugggcagaagga

SEQ ID NO: 3164797 - RNA, 17 nt, Human
aucccauaugccugggc

SEQ ID NO: 3164798 - RNA, 13 nt, Human
uucuucucccuca

SEQ ID NO: 3164799 - RNA, 11 nt, Human
uucuucucccu

SEQ ID NO: 3164800 - RNA, 14 nt, Human
uucuuaaucauuuu

SEQ ID NO: 3164801 - RNA, 18 nt, Human
uucuuaauauauagcauu

SEQ ID NO: 3164802 - RNA, 14 nt, Human
uucuucucccucag

SEQ ID NO: 3164803 - RNA, 15 nt, Human
uucuucugcuucagc

SEQ ID NO: 3164804 - RNA, 13 nt, Human
uucuucugcuuca

SEQ ID NO: 3164805 - RNA, 15 nt, Human
uucugccauauucug

SEQ ID NO: 3164806 - RNA, 16 nt, Human
uucugccauuucaugu

SEQ ID NO: 3164807 - RNA, 19 nt, Human
uucugaacuuggcgcugcc

SEQ ID NO: 3164808 - RNA, 22 nt, Human
uucugaacuuggcgcugccccu

SEQ ID NO: 3164809 - RNA, 18 nt, Human
uucugccugcccaggccc

SEQ ID NO: 3164810 - RNA, 17 nt, Human
uucugccugcccaggcc

SEQ ID NO: 3164811 - RNA, 15 nt, Human
uucuggcucuuccag

SEQ ID NO: 3164812 - RNA, 21 nt, Human
uucugccugcccaggccccug

SEQ ID NO: 3164813 - RNA, 16 nt, Human
uucuggcucuuccagg

SEQ ID NO: 3164814 - RNA, 17 nt, Human
uucuggcucuuccaggc

SEQ ID NO: 3164815 - RNA, 20 nt, Human
uucugggcaccacaaaauau

SEQ ID NO: 3164816 - RNA, 23 nt, Human
uucugggcaccacaaaauauaca

SEQ ID NO: 3164817 - RNA, 23 nt, Human
uucucuucuccccuuccauuucu

SEQ ID NO: 3164818 - RNA, 22 nt, Human
uucucuugccucagcuucccca

SEQ ID NO: 3164819 - RNA, 14 nt, Human
uucucuugccucag

SEQ ID NO: 3164820 - RNA, 12 nt, Human
uucucuugccuc

SEQ ID NO: 3164821 - RNA, 19 nt, Human
uucucuucauauucagcuu

SEQ ID NO: 3164822 - RNA, 15 nt, Human
uucucuuccaggcag

SEQ ID NO: 3164823 - RNA, 22 nt, Human
uucucuuccaaccauuuaucuu

SEQ ID NO: 3164824 - RNA, 16 nt, Human
uucucuuccaggcagc

SEQ ID NO: 3164825 - RNA, 19 nt, Human
uucucuucuccccuuccau

SEQ ID NO: 3164826 - RNA, 21 nt, Human
uucucuucuccccuuccauuu

SEQ ID NO: 3164827 - RNA, 20 nt, Human
uucucuucuccccuuccauu

SEQ ID NO: 3164828 - RNA, 20 nt, Human
uucuccuuaagagacaauuu

SEQ ID NO: 3164829 - RNA, 23 nt, Human
aucaguaguuugcauuucagaaa

SEQ ID NO: 3164830 - RNA, 21 nt, Human
aucaguaguuugcauuucaga

SEQ ID NO: 3164831 - RNA, 19 nt, Human
aucaguaguuugcauuuca

SEQ ID NO: 3164832 - RNA, 18 nt, Human
aucaguaguuugcauuuc

SEQ ID NO: 3164833 - RNA, 20 nt, Human
uucuccugcguguucucaga

SEQ ID NO: 3164834 - RNA, 19 nt, Human
aucaggugcugccauccag

SEQ ID NO: 3164835 - RNA, 17 nt, Human
aucagguuaggcaguau

SEQ ID NO: 3164836 - RNA, 13 nt, Human
aucaguaaaauua

SEQ ID NO: 3164837 - RNA, 17 nt, Human
aucaguaaaauuauacu

SEQ ID NO: 3164838 - RNA, 19 nt, Human
aucaguaaaauuauacugu

SEQ ID NO: 3164839 - RNA, 21 nt, Human
aucaguaaaauuauacugugu

SEQ ID NO: 3164840 - RNA, 15 nt, Human
aucaguaaacacugu

SEQ ID NO: 3164841 - RNA, 14 nt, Human
aucaguaaacacug

SEQ ID NO: 3164842 - RNA, 13 nt, Human
aucaguaaacacu

SEQ ID NO: 3164843 - RNA, 22 nt, Human
aucagguuaggcaguauaaaga

SEQ ID NO: 3164844 - RNA, 17 nt, Human
aucaguagcuuaagaaa

SEQ ID NO: 3164845 - RNA, 15 nt, Human
aucaguacuuguuuc

SEQ ID NO: 3164846 - RNA, 19 nt, Human
aucaguaaacacuguguau

SEQ ID NO: 3164847 - RNA, 21 nt, Human
uucuggggccuaauaaaacug

SEQ ID NO: 3164848 - RNA, 22 nt, Human
uucuggggccuaauaaaacuga

SEQ ID NO: 3164849 - RNA, 23 nt, Human
uucuggggccuaauaaaacugau

SEQ ID NO: 3164850 - RNA, 23 nt, Human
uucuggggagcuggacaguggag

SEQ ID NO: 3164851 - RNA, 15 nt, Human
auccaguaucuugaa

SEQ ID NO: 3164852 - RNA, 16 nt, Human
auccaguaucuugaag

SEQ ID NO: 3164853 - RNA, 15 nt, Human
auccacccaccucag

SEQ ID NO: 3164854 - RNA, 13 nt, Human
auccacccaccuc

SEQ ID NO: 3164855 - RNA, 18 nt, Human
auccaagcuggucccacu

SEQ ID NO: 3164856 - RNA, 19 nt, Human
auccauagcaccuccacau

SEQ ID NO: 3164857 - RNA, 21 nt, Human
auccaguaucuugaagacuuu

SEQ ID NO: 3164858 - RNA, 13 nt, Human
auccaucaggcca

SEQ ID NO: 3164859 - RNA, 14 nt, Human
auccaucagugcca

SEQ ID NO: 3164860 - RNA, 13 nt, Human
auccaucagugcc

SEQ ID NO: 3164861 - RNA, 21 nt, Human
auccauacuaacccuuuucca

SEQ ID NO: 3164862 - RNA, 14 nt, Human
auccauagugacuu

SEQ ID NO: 3164863 - RNA, 22 nt, Human
auccauagugacuuuucaagua

SEQ ID NO: 3164864 - RNA, 16 nt, Human
auccauagugacuuuu

SEQ ID NO: 3164865 - RNA, 15 nt, Human
auccauagugacuuu

SEQ ID NO: 3164866 - RNA, 21 nt, Human
auccauauuaaguaagucuca

SEQ ID NO: 3164867 - RNA, 19 nt, Human
auccauauuaaguaagucu

SEQ ID NO: 3164868 - RNA, 19 nt, Human
aucccaaacccuucagugc

SEQ ID NO: 3164869 - RNA, 20 nt, Human
aucccaaacccuucagugcc

SEQ ID NO: 3164870 - RNA, 12 nt, Human
aucccagcccca

SEQ ID NO: 3164871 - RNA, 22 nt, Human
auccauuuuuuauauuucaagu

SEQ ID NO: 3164872 - RNA, 15 nt, Human
auccaucagugccaa

SEQ ID NO: 3164873 - RNA, 18 nt, Human
aucccauaugccugggca

SEQ ID NO: 3164874 - RNA, 22 nt, Human
aucccagcuucggcauuugauc

SEQ ID NO: 3164875 - RNA, 20 nt, Human
aucccagcuucggcauuuga

SEQ ID NO: 3164876 - RNA, 18 nt, Human
uugacacuuuucauauca

SEQ ID NO: 3164877 - RNA, 19 nt, Human
uugacacuuuucauaucau

SEQ ID NO: 3164878 - RNA, 12 nt, Human
uugaauacuuga

SEQ ID NO: 3164879 - RNA, 14 nt, Human
uugaauacuugaac

SEQ ID NO: 3164880 - RNA, 16 nt, Human
uugaauacuugaacca

SEQ ID NO: 3164881 - RNA, 17 nt, Human
uugaauacuugaaccau

SEQ ID NO: 3164882 - RNA, 13 nt, Human
uugaaucacagua

SEQ ID NO: 3164883 - RNA, 15 nt, Human
uugaaggcagaaagc

SEQ ID NO: 3164884 - RNA, 17 nt, Human
uugaaggcagaaagcaa

SEQ ID NO: 3164885 - RNA, 13 nt, Human
uugaagccugcuc

SEQ ID NO: 3164886 - RNA, 16 nt, Human
uugaagccugcuccuu

SEQ ID NO: 3164887 - RNA, 15 nt, Human
uugaagccugcuccu

SEQ ID NO: 3164888 - RNA, 13 nt, Human
uugaagccuuugu

SEQ ID NO: 3164889 - RNA, 19 nt, Human
uugaagccugcuccuuccc

SEQ ID NO: 3164890 - RNA, 23 nt, Human
uugaauaaacaccacuggauuaa

SEQ ID NO: 3164891 - RNA, 21 nt, Human
uugaauaaacaccacuggauu

SEQ ID NO: 3164892 - RNA, 22 nt, Human
uugaauaaacaccacuggauua

SEQ ID NO: 3164893 - RNA, 12 nt, Human
uugaauaaacua

SEQ ID NO: 3164894 - RNA, 18 nt, Human
aucuaaaaauaacuguaa

SEQ ID NO: 3164895 - RNA, 16 nt, Human
aucuaaaaauaacugu

SEQ ID NO: 3164896 - RNA, 20 nt, Human
aucuaaaaauaacuguaauu

SEQ ID NO: 3164897 - RNA, 16 nt, Human
aucuaaaucuguccaa

SEQ ID NO: 3164898 - RNA, 20 nt, Human
aucguugcaaccacugcaau

SEQ ID NO: 3164899 - RNA, 16 nt, Human
auccucuguacagagc

SEQ ID NO: 3164900 - RNA, 17 nt, Human
auccucuguacagagcc

SEQ ID NO: 3164901 - RNA, 15 nt, Human
aucguuaucacugug

SEQ ID NO: 3164902 - RNA, 13 nt, Human
auccuccuccuuc

SEQ ID NO: 3164903 - RNA, 18 nt, Human
auccuccuccuuccuagu

SEQ ID NO: 3164904 - RNA, 17 nt, Human
auccuccuccuuccuag

SEQ ID NO: 3164905 - RNA, 14 nt, Human
auccuccuccuucc

SEQ ID NO: 3164906 - RNA, 23 nt, Human
uugacagagccugccccagcgcu

SEQ ID NO: 3164907 - RNA, 19 nt, Human
uugacagagccugccccag

SEQ ID NO: 3164908 - RNA, 17 nt, Human
uugacagagccugcccc

SEQ ID NO: 3164909 - RNA, 23 nt, Human
uugacagagagagauacucuggg

SEQ ID NO: 3164910 - RNA, 12 nt, Human
uugacagcucag

SEQ ID NO: 3164911 - RNA, 13 nt, Human
uugacuuuauaaa

SEQ ID NO: 3164912 - RNA, 12 nt, Human
uugagacagagu

SEQ ID NO: 3164913 - RNA, 18 nt, Human
uugaguauauuauaauag

SEQ ID NO: 3164914 - RNA, 13 nt, Human
uugagucauuuua

SEQ ID NO: 3164915 - RNA, 16 nt, Human
uugagaucagccuggg

SEQ ID NO: 3164916 - RNA, 15 nt, Human
uugagaucagccugg

SEQ ID NO: 3164917 - RNA, 16 nt, Human
uugagaccgugaagau

SEQ ID NO: 3164918 - RNA, 21 nt, Human
uugagaccgugaagauacuuu

SEQ ID NO: 3164919 - RNA, 22 nt, Human
uugagaccgugaagauacuuug

SEQ ID NO: 3164920 - RNA, 18 nt, Human
aucuacacuccagugaga

SEQ ID NO: 3164921 - RNA, 12 nt, Human
aucuaauuucaa

SEQ ID NO: 3164922 - RNA, 19 nt, Human
aucuacacuccagugagac

SEQ ID NO: 3164923 - RNA, 12 nt, Human
aucuacugcauu

SEQ ID NO: 3164924 - RNA, 13 nt, Human
aucuacugcauuu

SEQ ID NO: 3164925 - RNA, 14 nt, Human
aucuacugcauuua

SEQ ID NO: 3164926 - RNA, 18 nt, Human
aucuaauauguaacaagc

SEQ ID NO: 3164927 - RNA, 20 nt, Human
uugagugaagcugggagaac

SEQ ID NO: 3164928 - RNA, 21 nt, Human
uugagucuuuuuuuuuuaagu

SEQ ID NO: 3164929 - RNA, 11 nt, Human
uugagucuuuu

SEQ ID NO: 3164930 - RNA, 20 nt, Human
uugaguuaagucuaucuggu

SEQ ID NO: 3164931 - RNA, 20 nt, Human
uugaguugauucagcucugc

SEQ ID NO: 3164932 - RNA, 18 nt, Human
uugaguucuuccuguaau

SEQ ID NO: 3164933 - RNA, 23 nt, Human
uugaguucuuccuguaaucuugu

SEQ ID NO: 3164934 - RNA, 17 nt, Human
uugaguuguuuuuguau

SEQ ID NO: 3164935 - RNA, 18 nt, Human
uugaguuguuuuuguaua

SEQ ID NO: 3164936 - RNA, 19 nt, Human
uugaguuguuuuuguauau

SEQ ID NO: 3164937 - RNA, 16 nt, Human
uugauaauuuuccuuu

SEQ ID NO: 3164938 - RNA, 14 nt, Human
uugauaauuuuccu

SEQ ID NO: 3164939 - RNA, 18 nt, Human
uugauaauuuuccuuuaa

SEQ ID NO: 3164940 - RNA, 17 nt, Human
uugauaauuuuccuuua

SEQ ID NO: 3164941 - RNA, 19 nt, Human
aucuagaagagucuauugu

SEQ ID NO: 3164942 - RNA, 20 nt, Human
aucuagaagagucuauuguc

SEQ ID NO: 3164943 - RNA, 21 nt, Human
aucuagaagagucuauugucu

SEQ ID NO: 3164944 - RNA, 18 nt, Human
aucuacugcauuuaggga

SEQ ID NO: 3164945 - RNA, 14 nt, Human
aucucagggccugg

SEQ ID NO: 3164946 - RNA, 16 nt, Human
aucucagggccugguc

SEQ ID NO: 3164947 - RNA, 20 nt, Human
aucucauuguucaauuccca

SEQ ID NO: 3164948 - RNA, 16 nt, Human
aucucccccagcccca

SEQ ID NO: 3164949 - RNA, 17 nt, Human
aucucccccagccccau

SEQ ID NO: 3164950 - RNA, 14 nt, Human
aucucccccagccc

SEQ ID NO: 3164951 - RNA, 21 nt, Human
aucucuucuggguuccuuccu

SEQ ID NO: 3164952 - RNA, 13 nt, Human
aucucuucugugu

SEQ ID NO: 3164953 - RNA, 15 nt, Human
aucucccccagcccc

SEQ ID NO: 3164954 - RNA, 22 nt, Human
aucugaaaauguauguguaagu

SEQ ID NO: 3164955 - RNA, 20 nt, Human
aucugaaaauguauguguaa

SEQ ID NO: 3164956 - RNA, 19 nt, Human
aucugaaaauguaugugua

SEQ ID NO: 3164957 - RNA, 16 nt, Human
aucugaaaauguaugu

SEQ ID NO: 3164958 - RNA, 14 nt, Human
aucugaaaauguau

SEQ ID NO: 3164959 - RNA, 15 nt, Human
aucucuugagccugg

SEQ ID NO: 3164960 - RNA, 15 nt, Human
aucucuucuuauaca

SEQ ID NO: 3164961 - RNA, 17 nt, Human
aucucuucuuauacaga

SEQ ID NO: 3164962 - RNA, 22 nt, Human
uugauuaagaucucagugguua

SEQ ID NO: 3164963 - RNA, 14 nt, Human
uugauuaaagauga

SEQ ID NO: 3164964 - RNA, 13 nt, Human
uugauucacaugu

SEQ ID NO: 3164965 - RNA, 16 nt, Human
uugcaagccuccugau

SEQ ID NO: 3164966 - RNA, 13 nt, Human
uugauuaaagaug

SEQ ID NO: 3164967 - RNA, 23 nt, Human
aucugaaaauguauguguaagua

SEQ ID NO: 3164968 - RNA, 12 nt, Human
aucugaaaaugu

SEQ ID NO: 3164969 - RNA, 16 nt, Human
aucugaauuggaaugc

SEQ ID NO: 3164970 - RNA, 13 nt, Human
uugcaucaauuuu

SEQ ID NO: 3164971 - RNA, 23 nt, Human
uugcauauaacuuauauuguaag

SEQ ID NO: 3164972 - RNA, 14 nt, Human
uugcaauggcagcc

SEQ ID NO: 3164973 - RNA, 22 nt, Human
uugcauauaacuuauauuguaa

SEQ ID NO: 3164974 - RNA, 17 nt, Human
uugcauauaacuuauau

SEQ ID NO: 3164975 - RNA, 14 nt, Human
uugcauauaacuua

SEQ ID NO: 3164976 - RNA, 17 nt, Human
uugcauaguucuagugc

SEQ ID NO: 3164977 - RNA, 13 nt, Human
uugcauugucugu

SEQ ID NO: 3164978 - RNA, 15 nt, Human
uugcauugucugucu

SEQ ID NO: 3164979 - RNA, 22 nt, Human
uugcauauauuucaugaauaca

SEQ ID NO: 3164980 - RNA, 14 nt, Human
uugcaccacugcac

SEQ ID NO: 3164981 - RNA, 15 nt, Human
uugcaccacugcacu

SEQ ID NO: 3164982 - RNA, 16 nt, Human
uugcaccacugcacuc

SEQ ID NO: 3164983 - RNA, 19 nt, Human
uugcaauggcagccuuggc

SEQ ID NO: 3164984 - RNA, 17 nt, Human
uugcaauggcagccuug

SEQ ID NO: 3164985 - RNA, 16 nt, Human
uugcaauggcagccuu

SEQ ID NO: 3164986 - RNA, 18 nt, Human
uugcaagguaaaauuuua

SEQ ID NO: 3164987 - RNA, 23 nt, Human
uugcaagggcggccuuucccacu

SEQ ID NO: 3164988 - RNA, 22 nt, Human
uugcaagggcggccuuucccac

SEQ ID NO: 3164989 - RNA, 21 nt, Human
uugcaagggcggccuuuccca

SEQ ID NO: 3164990 - RNA, 18 nt, Human
aucuugugaaaauaauug

SEQ ID NO: 3164991 - RNA, 15 nt, Human
aucuugugaaaauaa

SEQ ID NO: 3164992 - RNA, 14 nt, Human
aucuugugaaaaua

SEQ ID NO: 3164993 - RNA, 19 nt, Human
aucuugugaaaauaauuga

SEQ ID NO: 3164994 - RNA, 13 nt, Human
uugcuucuucuga

SEQ ID NO: 3164995 - RNA, 21 nt, Human
uugcucucuuuuauucugugc

SEQ ID NO: 3164996 - RNA, 18 nt, Human
uugcucuaaaauauuuau

SEQ ID NO: 3164997 - RNA, 12 nt, Human
uugcuccuugac

SEQ ID NO: 3164998 - RNA, 22 nt, Human
uugcucuaaaauauuuaugaag

SEQ ID NO: 3164999 - RNA, 21 nt, Human
uugcucuaaaauauuuaugaa

SEQ ID NO: 3165000 - RNA, 20 nt, Human
uugcucuaaaauauuuauga

SEQ ID NO: 3165001 - RNA, 21 nt, Human
uugcuaugugccuuauguuga

SEQ ID NO: 3165002 - RNA, 19 nt, Human
uugcucacaguuauuacau

SEQ ID NO: 3165003 - RNA, 23 nt, Human
uugcucaucucaguccucaaagc

SEQ ID NO: 3165004 - RNA, 20 nt, Human
uugcucacaguuauuacaua

SEQ ID NO: 3165005 - RNA, 17 nt, Human
aucuugcucucuuuuau

SEQ ID NO: 3165006 - RNA, 20 nt, Human
aucuuggucagauuugaacu

SEQ ID NO: 3165007 - RNA, 17 nt, Human
aucuguuuacaguguuc

SEQ ID NO: 3165008 - RNA, 15 nt, Human
aucuguuuacagugu

SEQ ID NO: 3165009 - RNA, 12 nt, Human
aucuguuuacag

SEQ ID NO: 3165010 - RNA, 18 nt, Human
aucugugaaaggaaagag

SEQ ID NO: 3165011 - RNA, 21 nt, Human
aucuguuuuauaccuugcuua

SEQ ID NO: 3165012 - RNA, 21 nt, Human
aucuguuuugugguuuggaau

SEQ ID NO: 3165013 - RNA, 22 nt, Human
aucuguuuugugguuuggaaua

SEQ ID NO: 3165014 - RNA, 12 nt, Human
uugcauuuuugc

SEQ ID NO: 3165015 - RNA, 22 nt, Human
uugccaaaacccagcugcaccc

SEQ ID NO: 3165016 - RNA, 21 nt, Human
uugccaaaacccagcugcacc

SEQ ID NO: 3165017 - RNA, 19 nt, Human
uugccaaaacccagcugca

SEQ ID NO: 3165018 - RNA, 18 nt, Human
uugccaaaacccagcugc

SEQ ID NO: 3165019 - RNA, 17 nt, Human
uugccaaaacccagcug

SEQ ID NO: 3165020 - RNA, 13 nt, Human
uugcauuucagaa

SEQ ID NO: 3165021 - RNA, 14 nt, Human
uugcauuugcuuuu

SEQ ID NO: 3165022 - RNA, 20 nt, Human
uugcauuucagaaagccuuu

SEQ ID NO: 3165023 - RNA, 14 nt, Human
uugcauuucagaaa

SEQ ID NO: 3165024 - RNA, 20 nt, Human
uugccaaacauuaauguuga

SEQ ID NO: 3165025 - RNA, 19 nt, Human
uugccaaacauuaauguug

SEQ ID NO: 3165026 - RNA, 13 nt, Human
uugccaaacauua

SEQ ID NO: 3165027 - RNA, 15 nt, Human
uugccaaacauuaau

SEQ ID NO: 3165028 - RNA, 14 nt, Human
uugccaaacauuaa

SEQ ID NO: 3165029 - RNA, 13 nt, Human
uugccaaaauggu

SEQ ID NO: 3165030 - RNA, 23 nt, Human
uugccaaaacccagcugcacccc

SEQ ID NO: 3165031 - RNA, 14 nt, Human
aucuggugauuucu

SEQ ID NO: 3165032 - RNA, 15 nt, Human
aucuggugauuucua

SEQ ID NO: 3165033 - RNA, 17 nt, Human
aucuggugauuucuagc

SEQ ID NO: 3165034 - RNA, 15 nt, Human
aucugguuuucucuc

SEQ ID NO: 3165035 - RNA, 13 nt, Human
aucugguuuucuc

SEQ ID NO: 3165036 - RNA, 15 nt, Human
aucuguauaauacuu

SEQ ID NO: 3165037 - RNA, 16 nt, Human
aucuguauaauacuuu

SEQ ID NO: 3165038 - RNA, 18 nt, Human
aucuguauaauacuuugu

SEQ ID NO: 3165039 - RNA, 20 nt, Human
aucuguauaauacuuuguau

SEQ ID NO: 3165040 - RNA, 21 nt, Human
aucuguauaauacuuuguaua

SEQ ID NO: 3165041 - RNA, 24 nt, Human
aucuguauaauacuuuguauacaa

SEQ ID NO: 3165042 - RNA, 16 nt, Human
aucuggugacuuuccu

SEQ ID NO: 3165043 - RNA, 17 nt, Human
aucuggugacuuuccuc

SEQ ID NO: 3165044 - RNA, 10 nt, Human
aucuggugac

SEQ ID NO: 3165045 - RNA, 17 nt, Human
aucugugaaaggaaaga

SEQ ID NO: 3165046 - RNA, 23 nt, Human
aucugucugcuggucacuucuuc

SEQ ID NO: 3165047 - RNA, 14 nt, Human
aucugucugcuggu

SEQ ID NO: 3165048 - RNA, 11 nt, Human
aucugucugcu

SEQ ID NO: 3165049 - RNA, 22 nt, Human
aucugucauuugagcagggcuc

SEQ ID NO: 3165050 - RNA, 19 nt, Human
aucuguaugauucuaugga

SEQ ID NO: 3165051 - RNA, 15 nt, Human
aucuguaugauucua

SEQ ID NO: 3165052 - RNA, 14 nt, Human
aucuguaugauucu

SEQ ID NO: 3165053 - RNA, 11 nt, Human
uuggagacaga

SEQ ID NO: 3165054 - RNA, 21 nt, Human
uugcuugaagcaaacaguuga

SEQ ID NO: 3165055 - RNA, 14 nt, Human
uuggagggccuggg

SEQ ID NO: 3165056 - RNA, 15 nt, Human
uuggagggccugggc

SEQ ID NO: 3165057 - RNA, 13 nt, Human
uuggccucagagg

SEQ ID NO: 3165058 - RNA, 22 nt, Human
uuggccucugcaaaggaaauac

SEQ ID NO: 3165059 - RNA, 23 nt, Human
uuggcuauuagagaucaaccccu

SEQ ID NO: 3165060 - RNA, 23 nt, Human
uuggccugagaugccuggugagc

SEQ ID NO: 3165061 - RNA, 16 nt, Human
uuggagggugucccaa

SEQ ID NO: 3165062 - RNA, 17 nt, Human
uuggaguagaauguagu

SEQ ID NO: 3165063 - RNA, 14 nt, Human
uuggaguagaaugu

SEQ ID NO: 3165064 - RNA, 18 nt, Human
uuggccccugcccggcug

SEQ ID NO: 3165065 - RNA, 21 nt, Human
uuggcccagggggcuuccuga

SEQ ID NO: 3165066 - RNA, 22 nt, Human
aucuuuucauuuaggugaggaa

SEQ ID NO: 3165067 - RNA, 17 nt, Human
aucuuugcagacaggca

SEQ ID NO: 3165068 - RNA, 18 nt, Human
augaaagggcccagagag

SEQ ID NO: 3165069 - RNA, 15 nt, Human
augaaagggcccaga

SEQ ID NO: 3165070 - RNA, 21 nt, Human
aucuuugauguguuguucuug

SEQ ID NO: 3165071 - RNA, 18 nt, Human
aucuuuucugaaucuucu

SEQ ID NO: 3165072 - RNA, 13 nt, Human
aucuuuucuuauu

SEQ ID NO: 3165073 - RNA, 16 nt, Human
aucuuuucugaaucuu

SEQ ID NO: 3165074 - RNA, 12 nt, Human
aucuuugaugug

SEQ ID NO: 3165075 - RNA, 14 nt, Human
aucuuugauguguu

SEQ ID NO: 3165076 - RNA, 15 nt, Human
aucuuugauguguug

SEQ ID NO: 3165077 - RNA, 16 nt, Human
aucuuugauguguugu

SEQ ID NO: 3165078 - RNA, 17 nt, Human
aucuuugauguguuguu

SEQ ID NO: 3165079 - RNA, 19 nt, Human
aucuuugauguguuguucu

SEQ ID NO: 3165080 - RNA, 22 nt, Human
uuggcucccaucuuuuguuacu

SEQ ID NO: 3165081 - RNA, 17 nt, Human
uuggcucccaucuuuug

SEQ ID NO: 3165082 - RNA, 22 nt, Human
uuggcuccugcccacugauagc

SEQ ID NO: 3165083 - RNA, 16 nt, Human
augaagagcuguugau

SEQ ID NO: 3165084 - RNA, 17 nt, Human
augaagagcuagagaaa

SEQ ID NO: 3165085 - RNA, 18 nt, Human
augaagagcuagagaaau

SEQ ID NO: 3165086 - RNA, 11 nt, Human
augaagaggag

SEQ ID NO: 3165087 - RNA, 16 nt, Human
augaagaauuuaaaga

SEQ ID NO: 3165088 - RNA, 13 nt, Human
augaagaauuuaa

SEQ ID NO: 3165089 - RNA, 15 nt, Human
augaaauguuaacaa

SEQ ID NO: 3165090 - RNA, 19 nt, Human
augaaagggcccagagagg

SEQ ID NO: 3165091 - RNA, 14 nt, Human
augaaaugagguca

SEQ ID NO: 3165092 - RNA, 15 nt, Human
augaaagguauguag

SEQ ID NO: 3165093 - RNA, 16 nt, Human
augaaagucaguuuaa

SEQ ID NO: 3165094 - RNA, 14 nt, Human
augaaaugcuaugu

SEQ ID NO: 3165095 - RNA, 23 nt, Human
augaaaugcuaugucauuucaug

SEQ ID NO: 3165096 - RNA, 22 nt, Human
augaaaugcuaugucauuucau

SEQ ID NO: 3165097 - RNA, 23 nt, Human
uuggggacaggggcaggaggaag

SEQ ID NO: 3165098 - RNA, 18 nt, Human
uuggggaccagagcugcc

SEQ ID NO: 3165099 - RNA, 23 nt, Human
augaauggcuaagcaaaauguga

SEQ ID NO: 3165100 - RNA, 14 nt, Human
augaauaugaugac

SEQ ID NO: 3165101 - RNA, 16 nt, Human
augaaugcuuuuagug

SEQ ID NO: 3165102 - RNA, 13 nt, Human
auuugaaagugcc

SEQ ID NO: 3165103 - RNA, 14 nt, Human
auuugaaagugccu

SEQ ID NO: 3165104 - RNA, 20 nt, Human
auuugaaacauugcuuuuaa

SEQ ID NO: 3165105 - RNA, 19 nt, Human
auuugaaacauugcuuuua

SEQ ID NO: 3165106 - RNA, 17 nt, Human
auuugaaacauugcuuu

SEQ ID NO: 3165107 - RNA, 13 nt, Human
auuugaaacauug

SEQ ID NO: 3165108 - RNA, 16 nt, Human
auuucuuccacaagag

SEQ ID NO: 3165109 - RNA, 18 nt, Human
auuucuaguuauuuauuc

SEQ ID NO: 3165110 - RNA, 23 nt, Human
auuucccugaaggaaccaaagcg

SEQ ID NO: 3165111 - RNA, 17 nt, Human
auuucccugaaggaacc

SEQ ID NO: 3165112 - RNA, 20 nt, Human
auuucuuccacaagagccca

SEQ ID NO: 3165113 - RNA, 23 nt, Human
auuucuuccacaagagcccaggc

SEQ ID NO: 3165114 - RNA, 17 nt, Human
auuucuaguuauuuauu

SEQ ID NO: 3165115 - RNA, 16 nt, Human
auuucuaguuauuuau

SEQ ID NO: 3165116 - RNA, 15 nt, Human
auuucuaguuauuua

SEQ ID NO: 3165117 - RNA, 20 nt, Human
auuuauuucuuuuuugccaa

SEQ ID NO: 3165118 - RNA, 14 nt, Human
auuuauuucaucau

SEQ ID NO: 3165119 - RNA, 18 nt, Human
auuuauuuccaauguuuc

SEQ ID NO: 3165120 - RNA, 19 nt, Human
auuuauuuccaauguuuca

SEQ ID NO: 3165121 - RNA, 14 nt, Human
auuuauuuaaauuu

SEQ ID NO: 3165122 - RNA, 12 nt, Human
auuuauuuaaau

SEQ ID NO: 3165123 - RNA, 19 nt, Human
auuucccaaagcagugcau

SEQ ID NO: 3165124 - RNA, 14 nt, Human
auuuccaauguuuc

SEQ ID NO: 3165125 - RNA, 19 nt, Human
auuucccaacacaaagauu

SEQ ID NO: 3165126 - RNA, 18 nt, Human
auuucccaacacaaagau

SEQ ID NO: 3165127 - RNA, 23 nt, Human
auuucccagcccucuucuucuca

SEQ ID NO: 3165128 - RNA, 19 nt, Human
auuuguaaauuuaugugau

SEQ ID NO: 3165129 - RNA, 18 nt, Human
auuuguaaauuuauguga

SEQ ID NO: 3165130 - RNA, 14 nt, Human
auuugggcagagag

SEQ ID NO: 3165131 - RNA, 22 nt, Human
auuugggagaagggcagaguua

SEQ ID NO: 3165132 - RNA, 18 nt, Human
auuugggagaagggcaga

SEQ ID NO: 3165133 - RNA, 17 nt, Human
auuugggcugaauguau

SEQ ID NO: 3165134 - RNA, 18 nt, Human
auuugggcugaauguaug

SEQ ID NO: 3165135 - RNA, 19 nt, Human
auuugggcugaauguaugu

SEQ ID NO: 3165136 - RNA, 20 nt, Human
auuugggcugaauguaugua

SEQ ID NO: 3165137 - RNA, 21 nt, Human
auuugggcugaauguauguaa

SEQ ID NO: 3165138 - RNA, 22 nt, Human
auuugggcugaauguauguaaa

SEQ ID NO: 3165139 - RNA, 15 nt, Human
auuuguaaauauuaa

SEQ ID NO: 3165140 - RNA, 18 nt, Human
auuugacuuucugucugu

SEQ ID NO: 3165141 - RNA, 15 nt, Human
auuugacuguuauuu

SEQ ID NO: 3165142 - RNA, 13 nt, Human
auuuguaagauau

SEQ ID NO: 3165143 - RNA, 18 nt, Human
auuuguaagauauuugca

SEQ ID NO: 3165144 - RNA, 14 nt, Human
auuugucauuuuca

SEQ ID NO: 3165145 - RNA, 22 nt, Human
auuugucaguguagaucaacuc

SEQ ID NO: 3165146 - RNA, 16 nt, Human
auuugucacugcuuca

SEQ ID NO: 3165147 - RNA, 20 nt, Human
auuuguauuaauuuguaaga

SEQ ID NO: 3165148 - RNA, 17 nt, Human
auuuguauuuauucuuu

SEQ ID NO: 3165149 - RNA, 16 nt, Human
auuuguauuuauucuu

SEQ ID NO: 3165150 - RNA, 20 nt, Human
auuuuaaaagaugcaaugua

SEQ ID NO: 3165151 - RNA, 23 nt, Human
auuuuaaaacuucaucugucugu

SEQ ID NO: 3165152 - RNA, 13 nt, Human
auuuuaaaacaau

SEQ ID NO: 3165153 - RNA, 18 nt, Human
auuuuaaaacaauaggau

SEQ ID NO: 3165154 - RNA, 19 nt, Human
auuuuaaaauaaacuuucu

SEQ ID NO: 3165155 - RNA, 17 nt, Human
auuuuaaaauaaacuuu

SEQ ID NO: 3165156 - RNA, 16 nt, Human
auuuuaaaauaaacuu

SEQ ID NO: 3165157 - RNA, 14 nt, Human
auuuuaaaauaaac

SEQ ID NO: 3165158 - RNA, 20 nt, Human
auuuuaaaagauaaauauua

SEQ ID NO: 3165159 - RNA, 20 nt, Human
auuuuaaaaucuccuaaaug

SEQ ID NO: 3165160 - RNA, 12 nt, Human
auuuuaaaaugu

SEQ ID NO: 3165161 - RNA, 18 nt, Human
auuuuaaaauguacaugu

SEQ ID NO: 3165162 - RNA, 15 nt, Human
auuuuaaaauguaca

SEQ ID NO: 3165163 - RNA, 14 nt, Human
auuuuaaaauguac

SEQ ID NO: 3165164 - RNA, 13 nt, Human
auuuuaaaaugua

SEQ ID NO: 3165165 - RNA, 13 nt, Human
auuuuaacuuaga

SEQ ID NO: 3165166 - RNA, 16 nt, Human
auuuuaacuaaauuuu

SEQ ID NO: 3165167 - RNA, 18 nt, Human
auuuuaacuaaauuuuaa

SEQ ID NO: 3165168 - RNA, 21 nt, Human
auuuuaacuaaauuuuaaagc

SEQ ID NO: 3165169 - RNA, 21 nt, Human
auuugucauuuucauuagcaa

SEQ ID NO: 3165170 - RNA, 17 nt, Human
auuugucauuuucauua

SEQ ID NO: 3165171 - RNA, 15 nt, Human
auuugucauuuucau

SEQ ID NO: 3165172 - RNA, 21 nt, Human
auuugucugaaacauuucaua

SEQ ID NO: 3165173 - RNA, 22 nt, Human
auuuuaaaaauacagauagaua

SEQ ID NO: 3165174 - RNA, 23 nt, Human
auuugugaaaugauggugaaagu

SEQ ID NO: 3165175 - RNA, 22 nt, Human
auuggauucugagagcugugca

SEQ ID NO: 3165176 - RNA, 19 nt, Human
auuggauucugagagcugu

SEQ ID NO: 3165177 - RNA, 13 nt, Human
auuggauuuuaug

SEQ ID NO: 3165178 - RNA, 22 nt, Human
auuggauuuuauguugacauuu

SEQ ID NO: 3165179 - RNA, 21 nt, Human
auuggauuuuauguugacauu

SEQ ID NO: 3165180 - RNA, 18 nt, Human
auuggauuuuauguugac

SEQ ID NO: 3165181 - RNA, 17 nt, Human
auuggauuuuauguuga

SEQ ID NO: 3165182 - RNA, 22 nt, Human
auuggguggggggcuucauaca

SEQ ID NO: 3165183 - RNA, 23 nt, Human
auuggguggggggcuucauacac

SEQ ID NO: 3165184 - RNA, 18 nt, Human
auugguaaagaauggaag

SEQ ID NO: 3165185 - RNA, 17 nt, Human
auugguaccuugcacac

SEQ ID NO: 3165186 - RNA, 15 nt, Human
auugguaccuugcac

SEQ ID NO: 3165187 - RNA, 14 nt, Human
auugguuucucuuc

SEQ ID NO: 3165188 - RNA, 16 nt, Human
auugguuucucuucuc

SEQ ID NO: 3165189 - RNA, 15 nt, Human
auugguuucucuucu

SEQ ID NO: 3165190 - RNA, 14 nt, Human
auugguuuuaugau

SEQ ID NO: 3165191 - RNA, 15 nt, Human
auugguuuuaugaug

SEQ ID NO: 3165192 - RNA, 17 nt, Human
auugguuuuaugaugac

SEQ ID NO: 3165193 - RNA, 18 nt, Human
auugguuuuaugaugacg

SEQ ID NO: 3165194 - RNA, 19 nt, Human
auugguuucucuucucccc

SEQ ID NO: 3165195 - RNA, 18 nt, Human
auugguuucucuucuccc

SEQ ID NO: 3165196 - RNA, 17 nt, Human
auugguuucucuucucc

SEQ ID NO: 3165197 - RNA, 23 nt, Human
auugguacugccuuaaagauaca

SEQ ID NO: 3165198 - RNA, 14 nt, Human
auugguagaggaag

SEQ ID NO: 3165199 - RNA, 19 nt, Human
auugguaccuugcacacau

SEQ ID NO: 3165200 - RNA, 18 nt, Human
auugguaccuugcacaca

SEQ ID NO: 3165201 - RNA, 13 nt, Human
auugcuuuuaaaa

SEQ ID NO: 3165202 - RNA, 12 nt, Human
auugcuuuuaaa

SEQ ID NO: 3165203 - RNA, 14 nt, Human
auugcuuuugugca

SEQ ID NO: 3165204 - RNA, 15 nt, Human
auugcuuuugugcau

SEQ ID NO: 3165205 - RNA, 20 nt, Human
auugcuuuugugcauuggau

SEQ ID NO: 3165206 - RNA, 19 nt, Human
auugcuuuuaaaauuuuaa

SEQ ID NO: 3165207 - RNA, 17 nt, Human
auugcuuuuaaaauuuu

SEQ ID NO: 3165208 - RNA, 16 nt, Human
auugcuuuuaaaauuu

SEQ ID NO: 3165209 - RNA, 18 nt, Human
auugcuuuuaaaacuacu

SEQ ID NO: 3165210 - RNA, 16 nt, Human
auugcuuuuaaaacua

SEQ ID NO: 3165211 - RNA, 15 nt, Human
auugcuuuuaaaacu

SEQ ID NO: 3165212 - RNA, 15 nt, Human
auugauuguauauag

SEQ ID NO: 3165213 - RNA, 14 nt, Human
auugauugcuuuuu

SEQ ID NO: 3165214 - RNA, 21 nt, Human
auugcuuuuuuccaaaacaaa

SEQ ID NO: 3165215 - RNA, 23 nt, Human
auugcuuuuuuccaaaacaaaaa

SEQ ID NO: 3165216 - RNA, 21 nt, Human
auugcuuuuaaaauuuuaagc

SEQ ID NO: 3165217 - RNA, 15 nt, Human
auuggaaaagacuaa

SEQ ID NO: 3165218 - RNA, 20 nt, Human
auuggaguuggaguagaaug

SEQ ID NO: 3165219 - RNA, 15 nt, Human
auuggauaacaccac

SEQ ID NO: 3165220 - RNA, 21 nt, Human
auuggaguuggaguagaaugu

SEQ ID NO: 3165221 - RNA, 16 nt, Human
auuggaucaaguauua

SEQ ID NO: 3165222 - RNA, 19 nt, Human
auugucaaugcuggagaaa

SEQ ID NO: 3165223 - RNA, 16 nt, Human
auugucaccugcuucu

SEQ ID NO: 3165224 - RNA, 21 nt, Human
auugucaaugcuggagaaaaa

SEQ ID NO: 3165225 - RNA, 21 nt, Human
auugucaccugcuucucugcc

SEQ ID NO: 3165226 - RNA, 19 nt, Human
auugucaccugcuucucug

SEQ ID NO: 3165227 - RNA, 17 nt, Human
auugucaccugcuucuc

SEQ ID NO: 3165228 - RNA, 23 nt, Human
auugucaaaguggugagaggcau

SEQ ID NO: 3165229 - RNA, 16 nt, Human
auugucaaagugguga

SEQ ID NO: 3165230 - RNA, 14 nt, Human
auugucauuaguga

SEQ ID NO: 3165231 - RNA, 18 nt, Human
auuguccuauuaguguua

SEQ ID NO: 3165232 - RNA, 20 nt, Human
auuguccuauuaguguuaua

SEQ ID NO: 3165233 - RNA, 21 nt, Human
auuguccuauuaguguuauau

SEQ ID NO: 3165234 - RNA, 23 nt, Human
auuguccuauuaguguuauauga

SEQ ID NO: 3165235 - RNA, 14 nt, Human
auuguccuauuagu

SEQ ID NO: 3165236 - RNA, 18 nt, Human
auugucccuggcuuccuu

SEQ ID NO: 3165237 - RNA, 13 nt, Human
auugugggaaggg

SEQ ID NO: 3165238 - RNA, 14 nt, Human
auugugggaagggg

SEQ ID NO: 3165239 - RNA, 21 nt, Human
auuguuuggggaugagaaagg

SEQ ID NO: 3165240 - RNA, 23 nt, Human
auuuaaagaaauauguauucugu

SEQ ID NO: 3165241 - RNA, 18 nt, Human
auuuaaagaaauauguau

SEQ ID NO: 3165242 - RNA, 18 nt, Human
auuuaaacucugaauuua

SEQ ID NO: 3165243 - RNA, 15 nt, Human
auuuaaacucugaau

SEQ ID NO: 3165244 - RNA, 18 nt, Human
auuuaaagaaaaaaaugu

SEQ ID NO: 3165245 - RNA, 19 nt, Human
auuuaaagaaaaaaauguc

SEQ ID NO: 3165246 - RNA, 23 nt, Human
auuuaaacucugaauuuaucuuu

SEQ ID NO: 3165247 - RNA, 21 nt, Human
auuuaaacucugaauuuaucu

SEQ ID NO: 3165248 - RNA, 14 nt, Human
auuuaaaccuuuua

SEQ ID NO: 3165249 - RNA, 20 nt, Human
auuuaaaccuuuuauuauaa

SEQ ID NO: 3165250 - RNA, 12 nt, Human
auuuuucaauag

SEQ ID NO: 3165251 - RNA, 19 nt, Human
auuuuucaauagcgugugu

SEQ ID NO: 3165252 - RNA, 12 nt, Human
auuuuucucaug

SEQ ID NO: 3165253 - RNA, 19 nt, Human
auuuuucccaggcaaauaa

SEQ ID NO: 3165254 - RNA, 18 nt, Human
auuuuucuacugcucuuu

SEQ ID NO: 3165255 - RNA, 12 nt, Human
auuuuucauauu

SEQ ID NO: 3165256 - RNA, 18 nt, Human
auuuuugacauggaaaug

SEQ ID NO: 3165257 - RNA, 18 nt, Human
auuuuugagcccuuguuu

SEQ ID NO: 3165258 - RNA, 10 nt, Human
auuuuugcuu

SEQ ID NO: 3165259 - RNA, 14 nt, Human
auuuuugcaggagc

SEQ ID NO: 3165260 - RNA, 15 nt, Human
auuuuugcuuuuaga

SEQ ID NO: 3165261 - RNA, 18 nt, Human
auuuuugcuuuuagaaaa

SEQ ID NO: 3165262 - RNA, 20 nt, Human
auuuuugcuuuuagaaaagg

SEQ ID NO: 3165263 - RNA, 15 nt, Human
auuuuugcuuuugau

SEQ ID NO: 3165264 - RNA, 14 nt, Human
auuuuugcuuuuga

SEQ ID NO: 3165265 - RNA, 21 nt, Human
auuuuugcuuuugauaagaaa

SEQ ID NO: 3165266 - RNA, 19 nt, Human
auuuuugguugaauaaacu

SEQ ID NO: 3165267 - RNA, 17 nt, Human
auuuuugguugaauaaa

SEQ ID NO: 3165268 - RNA, 15 nt, Human
auuuuugguugaaua

SEQ ID NO: 3165269 - RNA, 22 nt, Human
auuuuuggugggugaaaggaau

SEQ ID NO: 3165270 - RNA, 19 nt, Human
auuuuuggugggaauccaa

SEQ ID NO: 3165271 - RNA, 20 nt, Human
auuuuucuuaaaaaguaacu

SEQ ID NO: 3165272 - RNA, 18 nt, Human
auuuuugaaacugcauuu

SEQ ID NO: 3165273 - RNA, 20 nt, Human
auuuuugaaacugcauuugu

SEQ ID NO: 3165274 - RNA, 20 nt, Human
auuuuucuuauuucauuucu

SEQ ID NO: 3165275 - RNA, 19 nt, Human
auuuuucuuauuucauuuc

SEQ ID NO: 3165276 - RNA, 15 nt, Human
auuuuucuuauuuca

SEQ ID NO: 3165277 - RNA, 19 nt, Human
auuuuuguagagccagggu

SEQ ID NO: 3165278 - RNA, 18 nt, Human
auuuuuguauucaauuaa

SEQ ID NO: 3165279 - RNA, 19 nt, Human
auuuuuguauucaauuaaa

SEQ ID NO: 3165280 - RNA, 16 nt, Human
auuuuuguuacucucu

SEQ ID NO: 3165281 - RNA, 20 nt, Human
auuuuuguuacucucuucca

SEQ ID NO: 3165282 - RNA, 12 nt, Human
auuuuuguuguu

SEQ ID NO: 3165283 - RNA, 21 nt, Human
auuuuuguuuucauuaucuca

SEQ ID NO: 3165284 - RNA, 18 nt, Human
auuuuuuaaauugaauuc

SEQ ID NO: 3165285 - RNA, 13 nt, Human
auuuuuugaaagu

SEQ ID NO: 3165286 - RNA, 14 nt, Human
auuuuuugaaaguu

SEQ ID NO: 3165287 - RNA, 16 nt, Human
auuuuuuggcacuugc

SEQ ID NO: 3165288 - RNA, 21 nt, Human
auuuuuugaaaugcugaaaau

SEQ ID NO: 3165289 - RNA, 19 nt, Human
auuuuuugaaaugcugaaa

SEQ ID NO: 3165290 - RNA, 16 nt, Human
auuuuuugaaaugcug

SEQ ID NO: 3165291 - RNA, 15 nt, Human
auuuuuugaaaugcu

SEQ ID NO: 3165292 - RNA, 14 nt, Human
auuuuuugaaaugc

SEQ ID NO: 3165293 - RNA, 13 nt, Human
auuuuuugaaaug

SEQ ID NO: 3165294 - RNA, 12 nt, Human
auuuuuugugug

SEQ ID NO: 3165295 - RNA, 15 nt, Human
auuuuuuuaacuuua

SEQ ID NO: 3165296 - RNA, 18 nt, Human
auuuuuugguauuggcca

SEQ ID NO: 3165297 - RNA, 18 nt, Human
auuuuuuguuaaaugauu

SEQ ID NO: 3165298 - RNA, 19 nt, Human
auuuuuuacagcugccugc

SEQ ID NO: 3165299 - RNA, 21 nt, Human
auuuuuuaagugaaaauauag

SEQ ID NO: 3165300 - RNA, 18 nt, Human
auuuuuuauauuucaagu

SEQ ID NO: 3165301 - RNA, 20 nt, Human
auuuuuuauauauaugcaua

SEQ ID NO: 3165302 - RNA, 14 nt, Human
auuuuuuccuguuu

SEQ ID NO: 3165303 - RNA, 18 nt, Human
auuuuguguuuauucuug

SEQ ID NO: 3165304 - RNA, 17 nt, Human
auuuuguguuuauucuu

SEQ ID NO: 3165305 - RNA, 17 nt, Human
auuuuguguugaagagc

SEQ ID NO: 3165306 - RNA, 20 nt, Human
auuuuguguuuauucuugau

SEQ ID NO: 3165307 - RNA, 19 nt, Human
auuuuguguuuauucuuga

SEQ ID NO: 3165308 - RNA, 23 nt, Human
auuuugucauauaagauucauau

SEQ ID NO: 3165309 - RNA, 20 nt, Human
auuuugucugccccaaguuu

SEQ ID NO: 3165310 - RNA, 24 nt, Human
auuuugugaaacagacuuguauau

SEQ ID NO: 3165311 - RNA, 22 nt, Human
auuuugugaaacagacuuguau

SEQ ID NO: 3165312 - RNA, 18 nt, Human
auuuugugaagugaagga

SEQ ID NO: 3165313 - RNA, 19 nt, Human
auuuugugaaacagacuug

SEQ ID NO: 3165314 - RNA, 21 nt, Human
auuuugugaaacagacuugua

SEQ ID NO: 3165315 - RNA, 20 nt, Human
auuuugugaaacagacuugu

SEQ ID NO: 3165316 - RNA, 19 nt, Human
auuuugugcccccauguaa

SEQ ID NO: 3165317 - RNA, 23 nt, Human
auuuugugaguuuguuucuuuga

SEQ ID NO: 3165318 - RNA, 19 nt, Human
auuuugugaguuuguuucu

SEQ ID NO: 3165319 - RNA, 18 nt, Human
auuuugugaguuuguuuc

SEQ ID NO: 3165320 - RNA, 15 nt, Human
auuuugugaguuugu

SEQ ID NO: 3165321 - RNA, 20 nt, Human
auuuuguguaagaaauacag

SEQ ID NO: 3165322 - RNA, 18 nt, Human
auuuuguguaagaaauac

SEQ ID NO: 3165323 - RNA, 17 nt, Human
auuuuguguaagaaaua

SEQ ID NO: 3165324 - RNA, 16 nt, Human
auuuuguguaagaaau

SEQ ID NO: 3165325 - RNA, 16 nt, Human
auuuugcuuuaauuuu

SEQ ID NO: 3165326 - RNA, 12 nt, Human
auuuugcuuuaa

SEQ ID NO: 3165327 - RNA, 20 nt, Human
auuuuggaaaauaaauuauu

SEQ ID NO: 3165328 - RNA, 19 nt, Human
auuuuggaaaauaaauuau

SEQ ID NO: 3165329 - RNA, 14 nt, Human
auuuuggaaaauaa

SEQ ID NO: 3165330 - RNA, 11 nt, Human
auuuugcuuua

SEQ ID NO: 3165331 - RNA, 23 nt, Human
auuuuguaauguaucaaauacau

SEQ ID NO: 3165332 - RNA, 20 nt, Human
auuuuguaauguaucaaaua

SEQ ID NO: 3165333 - RNA, 14 nt, Human
auuuuguaauaaua

SEQ ID NO: 3165334 - RNA, 22 nt, Human
auuuuguaauaauaaagaauag

SEQ ID NO: 3165335 - RNA, 19 nt, Human
auuuuguaauaauaaagaa

SEQ ID NO: 3165336 - RNA, 14 nt, Human
auuuuguaugaaau

SEQ ID NO: 3165337 - RNA, 16 nt, Human
auuuuguaugaaauau

SEQ ID NO: 3165338 - RNA, 21 nt, Human
auuuuguaugaaauauaugug

SEQ ID NO: 3165339 - RNA, 13 nt, Human
auuuuguaugcaa

SEQ ID NO: 3165340 - RNA, 12 nt, Human
auuuuguaugca

SEQ ID NO: 3165341 - RNA, 23 nt, Human
auuuuguaugcaagcaguuucaa

SEQ ID NO: 3165342 - RNA, 20 nt, Human
auuuuguaugcaagcaguuu

SEQ ID NO: 3165343 - RNA, 23 nt, Human
auuuugcccuugacaaagucaag

SEQ ID NO: 3165344 - RNA, 15 nt, Human
auuuugcccuugaca

SEQ ID NO: 3165345 - RNA, 18 nt, Human
auuuugccagugggaacu

SEQ ID NO: 3165346 - RNA, 22 nt, Human
auuuugcagaggcuaugggaag

SEQ ID NO: 3165347 - RNA, 20 nt, Human
auuuugcauauccuuuuagu

SEQ ID NO: 3165348 - RNA, 21 nt, Human
auuuugcugucccuuuuccuu

SEQ ID NO: 3165349 - RNA, 23 nt, Human
auuuugcuaaguaaaucucuucu

SEQ ID NO: 3165350 - RNA, 18 nt, Human
auuuugcgucagagaaau

SEQ ID NO: 3165351 - RNA, 20 nt, Human
auuuugcuaaaugugaauga

SEQ ID NO: 3165352 - RNA, 17 nt, Human
auuuugcgucagagaaa

SEQ ID NO: 3165353 - RNA, 18 nt, Human
auuuugauguaaagaugu

SEQ ID NO: 3165354 - RNA, 17 nt, Human
auuuugauguaaagaug

SEQ ID NO: 3165355 - RNA, 19 nt, Human
auuuugauccaagcugguc

SEQ ID NO: 3165356 - RNA, 20 nt, Human
auuuugaucucacauuuuua

SEQ ID NO: 3165357 - RNA, 18 nt, Human
auuuugauccaagcuggu

SEQ ID NO: 3165358 - RNA, 19 nt, Human
auuuuccuguugucaagaa

SEQ ID NO: 3165359 - RNA, 19 nt, Human
auuuucccccuuggcucuc

SEQ ID NO: 3165360 - RNA, 20 nt, Human
auuuuccaucuaaaaauaua

SEQ ID NO: 3165361 - RNA, 19 nt, Human
auuuuccaucuaaaaauau

SEQ ID NO: 3165362 - RNA, 20 nt, Human
auuuucccacucauucugaa

SEQ ID NO: 3165363 - RNA, 22 nt, Human
auuuucccacucauucugaauu

SEQ ID NO: 3165364 - RNA, 19 nt, Human
auuuucccuauuagagaag

SEQ ID NO: 3165365 - RNA, 16 nt, Human
auuuuccugccaggca

SEQ ID NO: 3165366 - RNA, 22 nt, Human
auuuucccucagaaaaugagua

SEQ ID NO: 3165367 - RNA, 12 nt, Human
auuuuccugaua

SEQ ID NO: 3165368 - RNA, 11 nt, Human
auucagacagc

SEQ ID NO: 3165369 - RNA, 12 nt, Human
auucagacagcu

SEQ ID NO: 3165370 - RNA, 13 nt, Human
auucagacagcug

SEQ ID NO: 3165371 - RNA, 16 nt, Human
auucaccaguacauuc

SEQ ID NO: 3165372 - RNA, 14 nt, Human
auucacauuuagaa

SEQ ID NO: 3165373 - RNA, 15 nt, Human
auucacauuuagaaa

SEQ ID NO: 3165374 - RNA, 21 nt, Human
auucacauguuuucaaaugga

SEQ ID NO: 3165375 - RNA, 14 nt, Human
auucagacagcugc

SEQ ID NO: 3165376 - RNA, 15 nt, Human
auucagacagcugcc

SEQ ID NO: 3165377 - RNA, 16 nt, Human
auucagacagcugccu

SEQ ID NO: 3165378 - RNA, 17 nt, Human
auucagacagcugccug

SEQ ID NO: 3165379 - RNA, 18 nt, Human
auucagacagcugccugg

SEQ ID NO: 3165380 - RNA, 12 nt, Human
auucaggaagcu

SEQ ID NO: 3165381 - RNA, 22 nt, Human
auucaggaagcagcuuucccca

SEQ ID NO: 3165382 - RNA, 12 nt, Human
auuccagaggaa

SEQ ID NO: 3165383 - RNA, 17 nt, Human
auuccagagcugccagu

SEQ ID NO: 3165384 - RNA, 20 nt, Human
auuccagcacuucaggaggc

SEQ ID NO: 3165385 - RNA, 13 nt, Human
auucaggaagcuc

SEQ ID NO: 3165386 - RNA, 19 nt, Human
auuccagagaguggcuccu

SEQ ID NO: 3165387 - RNA, 21 nt, Human
auuccagagaguggcuccucc

SEQ ID NO: 3165388 - RNA, 16 nt, Human
auuccccacccucccc

SEQ ID NO: 3165389 - RNA, 14 nt, Human
auuccccuuccugu

SEQ ID NO: 3165390 - RNA, 18 nt, Human
auucuaagaaauaucugu

SEQ ID NO: 3165391 - RNA, 20 nt, Human
auucuaagaaauaucuguga

SEQ ID NO: 3165392 - RNA, 21 nt, Human
auucuaagaaauaucugugaa

SEQ ID NO: 3165393 - RNA, 23 nt, Human
auucuaagaaauaucugugaaau

SEQ ID NO: 3165394 - RNA, 24 nt, Human
auucuaagaaauaucugugaaaua

SEQ ID NO: 3165395 - RNA, 20 nt, Human
auucuaauaagcuaguugaa

SEQ ID NO: 3165396 - RNA, 14 nt, Human
auucuaauaagcua

SEQ ID NO: 3165397 - RNA, 16 nt, Human
auucuaauaagcuagu

SEQ ID NO: 3165398 - RNA, 19 nt, Human
auucuaauaagcuaguuga

SEQ ID NO: 3165399 - RNA, 20 nt, Human
auucccgggugcagaauugu

SEQ ID NO: 3165400 - RNA, 23 nt, Human
auuccccgucucugguuccuccc

SEQ ID NO: 3165401 - RNA, 15 nt, Human
auuauuuguaagaua

SEQ ID NO: 3165402 - RNA, 17 nt, Human
auuauuuguaagauauu

SEQ ID NO: 3165403 - RNA, 13 nt, Human
auuauuugcaguc

SEQ ID NO: 3165404 - RNA, 16 nt, Human
auuauuugaaugacua

SEQ ID NO: 3165405 - RNA, 15 nt, Human
auuauuauuugcagu

SEQ ID NO: 3165406 - RNA, 15 nt, Human
auuauuucugucaca

SEQ ID NO: 3165407 - RNA, 22 nt, Human
auuauuucugucacaguaaaaa

SEQ ID NO: 3165408 - RNA, 18 nt, Human
auucaaacagucucagga

SEQ ID NO: 3165409 - RNA, 16 nt, Human
auucaaacagucucag

SEQ ID NO: 3165410 - RNA, 19 nt, Human
auucaaacagucucaggaa

SEQ ID NO: 3165411 - RNA, 19 nt, Human
auucacauguuuucaaaug

SEQ ID NO: 3165412 - RNA, 18 nt, Human
auucacauguuuucaaau

SEQ ID NO: 3165413 - RNA, 17 nt, Human
auucacauguuuucaaa

SEQ ID NO: 3165414 - RNA, 16 nt, Human
auucacauguuuucaa

SEQ ID NO: 3165415 - RNA, 15 nt, Human
auucacauguuuuca

SEQ ID NO: 3165416 - RNA, 14 nt, Human
auuauuauucagaa

SEQ ID NO: 3165417 - RNA, 15 nt, Human
auuauuauauacaua

SEQ ID NO: 3165418 - RNA, 12 nt, Human
auuauuacuuuu

SEQ ID NO: 3165419 - RNA, 22 nt, Human
auuauuacuuuuccucuuagaa

SEQ ID NO: 3165420 - RNA, 13 nt, Human
auuauuauaaaaa

SEQ ID NO: 3165421 - RNA, 14 nt, Human
auuauuauaaaaau

SEQ ID NO: 3165422 - RNA, 16 nt, Human
auuauuauaaaaauau

SEQ ID NO: 3165423 - RNA, 20 nt, Human
auuauuaccuuacagaaguu

SEQ ID NO: 3165424 - RNA, 17 nt, Human
auuauauuuggaugcag

SEQ ID NO: 3165425 - RNA, 16 nt, Human
auuauauuuggaugca

SEQ ID NO: 3165426 - RNA, 15 nt, Human
auuauauuuggaugc

SEQ ID NO: 3165427 - RNA, 12 nt, Human
auuauauuugga

SEQ ID NO: 3165428 - RNA, 20 nt, Human
auuauauuccucuugcauuu

SEQ ID NO: 3165429 - RNA, 13 nt, Human
auuauacugugug

SEQ ID NO: 3165430 - RNA, 15 nt, Human
auuauacugugugug

SEQ ID NO: 3165431 - RNA, 16 nt, Human
auuauacuguguguga

SEQ ID NO: 3165432 - RNA, 19 nt, Human
auuauacccccugcaaagc

SEQ ID NO: 3165433 - RNA, 15 nt, Human
auuauaccuguugcu

SEQ ID NO: 3165434 - RNA, 17 nt, Human
auuauacaugaaauuca

SEQ ID NO: 3165435 - RNA, 22 nt, Human
auuauacagaccgaacuguugu

SEQ ID NO: 3165436 - RNA, 11 nt, Human
uuuguggaaaa

SEQ ID NO: 3165437 - RNA, 21 nt, Human
auuaguuuagaacagguuuuu

SEQ ID NO: 3165438 - RNA, 15 nt, Human
auuaguuuagaacag

SEQ ID NO: 3165439 - RNA, 17 nt, Human
auuaguuuagaacaggu

SEQ ID NO: 3165440 - RNA, 12 nt, Human
auuaguuuagaa

SEQ ID NO: 3165441 - RNA, 13 nt, Human
auuaguuuagaac

SEQ ID NO: 3165442 - RNA, 19 nt, Human
auuaguguuauaugaacau

SEQ ID NO: 3165443 - RNA, 21 nt, Human
auuaguguuauaugaacauac

SEQ ID NO: 3165444 - RNA, 18 nt, Human
auuaguuccccaaauaca

SEQ ID NO: 3165445 - RNA, 19 nt, Human
auuaguuccccaaauacaa

SEQ ID NO: 3165446 - RNA, 20 nt, Human
auuaguuccccaaauacaaa

SEQ ID NO: 3165447 - RNA, 16 nt, Human
auuaguguuauaugaa

SEQ ID NO: 3165448 - RNA, 17 nt, Human
auuaguguuauaugaac

SEQ ID NO: 3165449 - RNA, 15 nt, Human
auuaguguuauauga

SEQ ID NO: 3165450 - RNA, 16 nt, Human
auucuaggaccugugu

SEQ ID NO: 3165451 - RNA, 15 nt, Human
auucuagcuuugagc

SEQ ID NO: 3165452 - RNA, 21 nt, Human
auucucaugccucagccuccu

SEQ ID NO: 3165453 - RNA, 17 nt, Human
auucuaggaccuguguc

SEQ ID NO: 3165454 - RNA, 17 nt, Human
auucucauuugucacac

SEQ ID NO: 3165455 - RNA, 22 nt, Human
auucucaugccucagccuccug

SEQ ID NO: 3165456 - RNA, 12 nt, Human
auucucauucuu

SEQ ID NO: 3165457 - RNA, 19 nt, Human
auucugccugcccaggccc

SEQ ID NO: 3165458 - RNA, 18 nt, Human
auucugccugcccaggcc

SEQ ID NO: 3165459 - RNA, 17 nt, Human
auucugccugcccaggc

SEQ ID NO: 3165460 - RNA, 16 nt, Human
auucugccugcccagg

SEQ ID NO: 3165461 - RNA, 15 nt, Human
auucugccugcccag

SEQ ID NO: 3165462 - RNA, 14 nt, Human
auucugccugccca

SEQ ID NO: 3165463 - RNA, 13 nt, Human
auucugccugccc

SEQ ID NO: 3165464 - RNA, 11 nt, Human
auucugccugc

SEQ ID NO: 3165465 - RNA, 17 nt, Human
auucuguaaaagaaaaa

SEQ ID NO: 3165466 - RNA, 15 nt, Human
auucuguaaaagaaa

SEQ ID NO: 3165467 - RNA, 19 nt, Human
auucuguuggccaguguga

SEQ ID NO: 3165468 - RNA, 13 nt, Human
auucuguucugau

SEQ ID NO: 3165469 - RNA, 19 nt, Human
auucuguucugauauuaau

SEQ ID NO: 3165470 - RNA, 14 nt, Human
auucuguuggccag

SEQ ID NO: 3165471 - RNA, 22 nt, Human
auucugcucacauaucugucau

SEQ ID NO: 3165472 - RNA, 21 nt, Human
auucugcucacauaucuguca

SEQ ID NO: 3165473 - RNA, 20 nt, Human
auucugcucacauaucuguc

SEQ ID NO: 3165474 - RNA, 19 nt, Human
auucugcucacauaucugu

SEQ ID NO: 3165475 - RNA, 21 nt, Human
auucugccugcccaggccccu

SEQ ID NO: 3165476 - RNA, 20 nt, Human
auucugccugcccaggcccc

SEQ ID NO: 3165477 - RNA, 18 nt, Human
auucugcucacauaucug

SEQ ID NO: 3165478 - RNA, 15 nt, Human
auugacacuuaaaaa

SEQ ID NO: 3165479 - RNA, 17 nt, Human
auugacacuuaaaaaug

SEQ ID NO: 3165480 - RNA, 12 nt, Human
auugacaaguuu

SEQ ID NO: 3165481 - RNA, 15 nt, Human
auugaacucugagag

SEQ ID NO: 3165482 - RNA, 13 nt, Human
auugacucuugag

SEQ ID NO: 3165483 - RNA, 14 nt, Human
auugacucuugagu

SEQ ID NO: 3165484 - RNA, 15 nt, Human
auugacucuugaguu

SEQ ID NO: 3165485 - RNA, 11 nt, Human
auugacuucuu

SEQ ID NO: 3165486 - RNA, 22 nt, Human
auugacucuugaguuguuuuug

SEQ ID NO: 3165487 - RNA, 16 nt, Human
auugacucuugaguug

SEQ ID NO: 3165488 - RNA, 19 nt, Human
auugacucuugaguuguuu

SEQ ID NO: 3165489 - RNA, 19 nt, Human
auugacacuuaaaaauggu

SEQ ID NO: 3165490 - RNA, 17 nt, Human
auugaccugaggcccuu

SEQ ID NO: 3165491 - RNA, 18 nt, Human
auugacacaguaccauuu

SEQ ID NO: 3165492 - RNA, 14 nt, Human
auugacaaguuuaa

SEQ ID NO: 3165493 - RNA, 15 nt, Human
auugacgucuagcua

SEQ ID NO: 3165494 - RNA, 23 nt, Human
auugacgucuagcuaugcuguau

SEQ ID NO: 3165495 - RNA, 20 nt, Human
auugaccuuuagguauuaca

SEQ ID NO: 3165496 - RNA, 14 nt, Human
auucuuaaauaugu

SEQ ID NO: 3165497 - RNA, 21 nt, Human
auucuucccaacuugccuuug

SEQ ID NO: 3165498 - RNA, 20 nt, Human
auucuucccaacuugccuuu

SEQ ID NO: 3165499 - RNA, 23 nt, Human
auucuucccaacuugccuuugaa

SEQ ID NO: 3165500 - RNA, 17 nt, Human
auugaaaucuuuuugcu

SEQ ID NO: 3165501 - RNA, 18 nt, Human
auugaaaucuuuuugcuu

SEQ ID NO: 3165502 - RNA, 20 nt, Human
auugaaaucuuuuugcuuug

SEQ ID NO: 3165503 - RNA, 12 nt, Human
auugaaaucuuu

SEQ ID NO: 3165504 - RNA, 22 nt, Human
auucuuuuuuauuaaucacugu

SEQ ID NO: 3165505 - RNA, 18 nt, Human
auucuuuuuuucucuaga

SEQ ID NO: 3165506 - RNA, 17 nt, Human
auucuuuuuuauuaauc

SEQ ID NO: 3165507 - RNA, 19 nt, Human
auucuuuuuuauuaaucac

SEQ ID NO: 3165508 - RNA, 20 nt, Human
auucuuuuuuauuaaucacu

SEQ ID NO: 3165509 - RNA, 21 nt, Human
auucuuuuuuauuaaucacug

SEQ ID NO: 3165510 - RNA, 15 nt, Human
auucuuuuuuauuaa

SEQ ID NO: 3165511 - RNA, 16 nt, Human
auucuuuuuuauuaau

SEQ ID NO: 3165512 - RNA, 14 nt, Human
auucuuuuuuauua

SEQ ID NO: 3165513 - RNA, 13 nt, Human
auucuuuuugcuc

SEQ ID NO: 3165514 - RNA, 15 nt, Human
auucuuuuugcucua

SEQ ID NO: 3165515 - RNA, 14 nt, Human
auucuuuuugcucu

SEQ ID NO: 3165516 - RNA, 22 nt, Human
auucuuuuugcucuaaaauauu

SEQ ID NO: 3165517 - RNA, 21 nt, Human
auucuuuuugcucuaaaauau

SEQ ID NO: 3165518 - RNA, 20 nt, Human
auucuuuuugcucuaaaaua

SEQ ID NO: 3165519 - RNA, 19 nt, Human
auucuuuuugcucuaaaau

SEQ ID NO: 3165520 - RNA, 18 nt, Human
agccugccacucaggccc

SEQ ID NO: 3165521 - RNA, 12 nt, Human
agccugcccucc

SEQ ID NO: 3165522 - RNA, 12 nt, Human
agccugcccagc

SEQ ID NO: 3165523 - RNA, 23 nt, Human
agccugcccagcccccuggucuu

SEQ ID NO: 3165524 - RNA, 16 nt, Human
agccugccccagcgcu

SEQ ID NO: 3165525 - RNA, 14 nt, Human
agccugccccagcg

SEQ ID NO: 3165526 - RNA, 16 nt, Human
agccugccucuucucu

SEQ ID NO: 3165527 - RNA, 19 nt, Human
agccugccucuucucuacu

SEQ ID NO: 3165528 - RNA, 23 nt, Human
agccugcaguuauuaacacuaac

SEQ ID NO: 3165529 - RNA, 23 nt, Human
agccugcacuugggggcucagca

SEQ ID NO: 3165530 - RNA, 15 nt, Human
agccugcagagcugc

SEQ ID NO: 3165531 - RNA, 14 nt, Human
agccugcagagcug

SEQ ID NO: 3165532 - RNA, 13 nt, Human
agccugcagagcu

SEQ ID NO: 3165533 - RNA, 12 nt, Human
agccugcagagc

SEQ ID NO: 3165534 - RNA, 20 nt, Human
agccugcacuugggggcuca

SEQ ID NO: 3165535 - RNA, 19 nt, Human
agccugaucaccugcccug

SEQ ID NO: 3165536 - RNA, 16 nt, Human
ugcaugcugucccuua

SEQ ID NO: 3165537 - RNA, 18 nt, Human
agccugaucaccugcccu

SEQ ID NO: 3165538 - RNA, 23 nt, Human
ugcauacaaacaagcauauaaaa

SEQ ID NO: 3165539 - RNA, 22 nt, Human
ugcauacaaacaagcauauaaa

SEQ ID NO: 3165540 - RNA, 12 nt, Human
ugcauacaaaca

SEQ ID NO: 3165541 - RNA, 20 nt, Human
ugcauacaaacaagcauaua

SEQ ID NO: 3165542 - RNA, 13 nt, Human
ugcauacaaacaa

SEQ ID NO: 3165543 - RNA, 15 nt, Human
ugcaucucagcccac

SEQ ID NO: 3165544 - RNA, 19 nt, Human
ugcaucuggguagcuguaa

SEQ ID NO: 3165545 - RNA, 18 nt, Human
ugcaucuggguagcugua

SEQ ID NO: 3165546 - RNA, 21 nt, Human
ugcaucuggguagcuguaagg

SEQ ID NO: 3165547 - RNA, 20 nt, Human
ugcaucuggguagcuguaag

SEQ ID NO: 3165548 - RNA, 21 nt, Human
ugcaugaggcuaguguggugu

SEQ ID NO: 3165549 - RNA, 14 nt, Human
ugcaugcugucccu

SEQ ID NO: 3165550 - RNA, 15 nt, Human
ugcaugcugucccuu

SEQ ID NO: 3165551 - RNA, 13 nt, Human
ugcaugcuguccc

SEQ ID NO: 3165552 - RNA, 15 nt, Human
agccucagcauccug

SEQ ID NO: 3165553 - RNA, 18 nt, Human
agccugagcgacagugag

SEQ ID NO: 3165554 - RNA, 14 nt, Human
agccucagcauccu

SEQ ID NO: 3165555 - RNA, 13 nt, Human
agccucagcaucc

SEQ ID NO: 3165556 - RNA, 18 nt, Human
agccucaaccuccugggc

SEQ ID NO: 3165557 - RNA, 17 nt, Human
agccucaaccuccuggg

SEQ ID NO: 3165558 - RNA, 19 nt, Human
ugcagccucaaccuccugg

SEQ ID NO: 3165559 - RNA, 18 nt, Human
ugcagccucaaccuccug

SEQ ID NO: 3165560 - RNA, 13 nt, Human
agccugagagucu

SEQ ID NO: 3165561 - RNA, 13 nt, Human
ugcagcccuggcc

SEQ ID NO: 3165562 - RNA, 23 nt, Human
ugcauaauucugaaguuauauuu

SEQ ID NO: 3165563 - RNA, 19 nt, Human
ugcauaauucugaaguuau

SEQ ID NO: 3165564 - RNA, 23 nt, Human
ugcauaauaauccugcaaaguac

SEQ ID NO: 3165565 - RNA, 17 nt, Human
ugcauaauagcuacagu

SEQ ID NO: 3165566 - RNA, 11 nt, Human
ugcauaauaau

SEQ ID NO: 3165567 - RNA, 17 nt, Human
ugcauaaguuaacuucc

SEQ ID NO: 3165568 - RNA, 11 nt, Human
ugcauaaaaug

SEQ ID NO: 3165569 - RNA, 15 nt, Human
ugcaguuuuucauuu

SEQ ID NO: 3165570 - RNA, 18 nt, Human
ugcaguuuuucauuuuaa

SEQ ID NO: 3165571 - RNA, 22 nt, Human
ugcagucuuagaucauaguuuu

SEQ ID NO: 3165572 - RNA, 14 nt, Human
ugcagugagccgag

SEQ ID NO: 3165573 - RNA, 23 nt, Human
agccguuuguuccccaagacauu

SEQ ID NO: 3165574 - RNA, 17 nt, Human
agccuaaaaauaaagca

SEQ ID NO: 3165575 - RNA, 16 nt, Human
agccuaaaaauaaagc

SEQ ID NO: 3165576 - RNA, 14 nt, Human
agccuaaaaauaaa

SEQ ID NO: 3165577 - RNA, 13 nt, Human
agccuaaaaauaa

SEQ ID NO: 3165578 - RNA, 19 nt, Human
agccguuuguuccccaaga

SEQ ID NO: 3165579 - RNA, 21 nt, Human
agccuaagauauacuuguuuu

SEQ ID NO: 3165580 - RNA, 18 nt, Human
agccuaagauauacuugu

SEQ ID NO: 3165581 - RNA, 17 nt, Human
agccuaagauauacuug

SEQ ID NO: 3165582 - RNA, 20 nt, Human
agccuaaagauuuugaucuc

SEQ ID NO: 3165583 - RNA, 16 nt, Human
agccuaaagauuuuga

SEQ ID NO: 3165584 - RNA, 12 nt, Human
agccuaaagauu

SEQ ID NO: 3165585 - RNA, 23 nt, Human
agccuaaaaauaaagcacaaacc

SEQ ID NO: 3165586 - RNA, 18 nt, Human
agccuaaaaauaaagcac

SEQ ID NO: 3165587 - RNA, 17 nt, Human
agccuaggugacagagu

SEQ ID NO: 3165588 - RNA, 15 nt, Human
agccuaggugacaga

SEQ ID NO: 3165589 - RNA, 15 nt, Human
agccucaaccuccug

SEQ ID NO: 3165590 - RNA, 22 nt, Human
agccucaaauccaggacccugc

SEQ ID NO: 3165591 - RNA, 21 nt, Human
agccucaaauccaggacccug

SEQ ID NO: 3165592 - RNA, 20 nt, Human
agccucaaauccaggacccu

SEQ ID NO: 3165593 - RNA, 19 nt, Human
agccucaaauccaggaccc

SEQ ID NO: 3165594 - RNA, 18 nt, Human
agccucaaauccaggacc

SEQ ID NO: 3165595 - RNA, 16 nt, Human
agccucaaauccagga

SEQ ID NO: 3165596 - RNA, 20 nt, Human
agccucaaaacaaaggccua

SEQ ID NO: 3165597 - RNA, 17 nt, Human
agccuauuuuuuuagau

SEQ ID NO: 3165598 - RNA, 18 nt, Human
agccucaaaacaaaggcc

SEQ ID NO: 3165599 - RNA, 20 nt, Human
ugcacuuuguucuggcucuu

SEQ ID NO: 3165600 - RNA, 21 nt, Human
ugcacuuuucuaaacuaggcu

SEQ ID NO: 3165601 - RNA, 20 nt, Human
ugcacuuuuucuuaaucauu

SEQ ID NO: 3165602 - RNA, 18 nt, Human
ugcacuuuuuuucuauau

SEQ ID NO: 3165603 - RNA, 14 nt, Human
ugcacuuuuucuua

SEQ ID NO: 3165604 - RNA, 18 nt, Human
ugcagacucuacagaggc

SEQ ID NO: 3165605 - RNA, 16 nt, Human
ugcagaaauagacaaa

SEQ ID NO: 3165606 - RNA, 17 nt, Human
ugcagaaauagacaaaa

SEQ ID NO: 3165607 - RNA, 19 nt, Human
ugcagaaauagacaaaaag

SEQ ID NO: 3165608 - RNA, 20 nt, Human
ugcagaaauagacaaaaagu

SEQ ID NO: 3165609 - RNA, 21 nt, Human
ugcagaaauagacaaaaagua

SEQ ID NO: 3165610 - RNA, 20 nt, Human
ugcagacucuacagaggcca

SEQ ID NO: 3165611 - RNA, 19 nt, Human
ugcagacucuacagaggcc

SEQ ID NO: 3165612 - RNA, 14 nt, Human
agcccuucauuugg

SEQ ID NO: 3165613 - RNA, 13 nt, Human
agcccuucauuug

SEQ ID NO: 3165614 - RNA, 23 nt, Human
agcccuuccaugucgccucugca

SEQ ID NO: 3165615 - RNA, 22 nt, Human
agcccuuccaugucgccucugc

SEQ ID NO: 3165616 - RNA, 19 nt, Human
agcccuuccaugucgccuc

SEQ ID NO: 3165617 - RNA, 22 nt, Human
ugcagacucuacagaggccaug

SEQ ID NO: 3165618 - RNA, 12 nt, Human
ugcacuccccug

SEQ ID NO: 3165619 - RNA, 13 nt, Human
ugcacuccccugc

SEQ ID NO: 3165620 - RNA, 16 nt, Human
ugcacguuuucaucuc

SEQ ID NO: 3165621 - RNA, 16 nt, Human
ugcacuaagucucuuu

SEQ ID NO: 3165622 - RNA, 23 nt, Human
ugcacuaagucucuuuuuuacaa

SEQ ID NO: 3165623 - RNA, 19 nt, Human
ugcacguacacacacauac

SEQ ID NO: 3165624 - RNA, 14 nt, Human
ugcaccacugcacu

SEQ ID NO: 3165625 - RNA, 18 nt, Human
ugcacaagcuccaagcuc

SEQ ID NO: 3165626 - RNA, 20 nt, Human
ugcacaagcuccaagcuccc

SEQ ID NO: 3165627 - RNA, 22 nt, Human
ugcacaagcuccaagcucccag

SEQ ID NO: 3165628 - RNA, 23 nt, Human
ugcacaagcuccaagcucccagg

SEQ ID NO: 3165629 - RNA, 15 nt, Human
ugcacaagcuccaag

SEQ ID NO: 3165630 - RNA, 16 nt, Human
ugcacaagcuccaagc

SEQ ID NO: 3165631 - RNA, 18 nt, Human
agcagcaaggucuugcuc

SEQ ID NO: 3165632 - RNA, 14 nt, Human
agcagcaaggucuu

SEQ ID NO: 3165633 - RNA, 13 nt, Human
agcagcacccauc

SEQ ID NO: 3165634 - RNA, 23 nt, Human
agcagcaaggucuugcucuccua

SEQ ID NO: 3165635 - RNA, 15 nt, Human
ugcacacaccagagc

SEQ ID NO: 3165636 - RNA, 21 nt, Human
ugcacaauuccaugacaauau

SEQ ID NO: 3165637 - RNA, 13 nt, Human
ugcacaauuccau

SEQ ID NO: 3165638 - RNA, 13 nt, Human
ugcacaaguaggg

SEQ ID NO: 3165639 - RNA, 15 nt, Human
ugcacacaauuagau

SEQ ID NO: 3165640 - RNA, 17 nt, Human
ugcacacaauuagauuu

SEQ ID NO: 3165641 - RNA, 14 nt, Human
ugcacacaaauauu

SEQ ID NO: 3165642 - RNA, 18 nt, Human
ugcacacaaauauuauuu

SEQ ID NO: 3165643 - RNA, 12 nt, Human
ugcacaugauuu

SEQ ID NO: 3165644 - RNA, 17 nt, Human
ugcacaugauuucacaa

SEQ ID NO: 3165645 - RNA, 16 nt, Human
ugcacaugauuucaca

SEQ ID NO: 3165646 - RNA, 15 nt, Human
ugcacaugauuucac

SEQ ID NO: 3165647 - RNA, 14 nt, Human
ugcacaugauuuca

SEQ ID NO: 3165648 - RNA, 23 nt, Human
ugcacaugauuucacaaauauua

SEQ ID NO: 3165649 - RNA, 17 nt, Human
ugcacauggauucaguu

SEQ ID NO: 3165650 - RNA, 22 nt, Human
ugcacaugauuucacaaauauu

SEQ ID NO: 3165651 - RNA, 21 nt, Human
ugcacaugauuucacaaauau

SEQ ID NO: 3165652 - RNA, 20 nt, Human
ugcacaugauuucacaaaua

SEQ ID NO: 3165653 - RNA, 19 nt, Human
ugcacaugauuucacaaau

SEQ ID NO: 3165654 - RNA, 18 nt, Human
ugcacaugauuucacaaa

SEQ ID NO: 3165655 - RNA, 23 nt, Human
agcgugguggacaugcacagcua

SEQ ID NO: 3165656 - RNA, 20 nt, Human
agcgugguggacaugcacag

SEQ ID NO: 3165657 - RNA, 15 nt, Human
agcgugcauaaguua

SEQ ID NO: 3165658 - RNA, 16 nt, Human
agcgugagccacugca

SEQ ID NO: 3165659 - RNA, 21 nt, Human
ugccauauucuguuggccagu

SEQ ID NO: 3165660 - RNA, 20 nt, Human
ugccauauucuguuggccag

SEQ ID NO: 3165661 - RNA, 15 nt, Human
agcggggacagcucc

SEQ ID NO: 3165662 - RNA, 17 nt, Human
agcggggacagcuccuu

SEQ ID NO: 3165663 - RNA, 16 nt, Human
agcggggacagcuccu

SEQ ID NO: 3165664 - RNA, 15 nt, Human
agcgugagccacugc

SEQ ID NO: 3165665 - RNA, 13 nt, Human
agcgugagccacu

SEQ ID NO: 3165666 - RNA, 12 nt, Human
ugccacacuuca

SEQ ID NO: 3165667 - RNA, 23 nt, Human
ugccacugccucuuccucccuca

SEQ ID NO: 3165668 - RNA, 15 nt, Human
ugccagucaccccgg

SEQ ID NO: 3165669 - RNA, 16 nt, Human
ugccagucaccccggc

SEQ ID NO: 3165670 - RNA, 18 nt, Human
ugccagucaccccggcca

SEQ ID NO: 3165671 - RNA, 20 nt, Human
ugccagucaccccggccacc

SEQ ID NO: 3165672 - RNA, 15 nt, Human
ugccauauucuguug

SEQ ID NO: 3165673 - RNA, 17 nt, Human
ugccauauucuguuggc

SEQ ID NO: 3165674 - RNA, 16 nt, Human
ugccauauucuguugg

SEQ ID NO: 3165675 - RNA, 22 nt, Human
ugccagucaccccggccaccug

SEQ ID NO: 3165676 - RNA, 23 nt, Human
ugccagucaccccggccaccugc

SEQ ID NO: 3165677 - RNA, 17 nt, Human
ugccagucccccugccc

SEQ ID NO: 3165678 - RNA, 19 nt, Human
ugccagucccccugcccca

SEQ ID NO: 3165679 - RNA, 20 nt, Human
agcggcuggaauuggguggg

SEQ ID NO: 3165680 - RNA, 15 nt, Human
ugcauucuucugauc

SEQ ID NO: 3165681 - RNA, 14 nt, Human
ugcauuuccugaca

SEQ ID NO: 3165682 - RNA, 13 nt, Human
ugcauuuccugac

SEQ ID NO: 3165683 - RNA, 14 nt, Human
agcgcccaguuggg

SEQ ID NO: 3165684 - RNA, 20 nt, Human
agcgcccacuagacccacug

SEQ ID NO: 3165685 - RNA, 19 nt, Human
agccugccccagcgcugac

SEQ ID NO: 3165686 - RNA, 18 nt, Human
agccugccccagcgcuga

SEQ ID NO: 3165687 - RNA, 23 nt, Human
agccugccuugcccacuccugcu

SEQ ID NO: 3165688 - RNA, 15 nt, Human
agccugccuugccca

SEQ ID NO: 3165689 - RNA, 17 nt, Human
agcggcucaagcccagg

SEQ ID NO: 3165690 - RNA, 19 nt, Human
agcggcucaagcccaggag

SEQ ID NO: 3165691 - RNA, 18 nt, Human
agcggcucaagcccagga

SEQ ID NO: 3165692 - RNA, 22 nt, Human
agcgcugacgugucaggaaaac

SEQ ID NO: 3165693 - RNA, 14 nt, Human
agcgcucuggugcu

SEQ ID NO: 3165694 - RNA, 16 nt, Human
agcggauugcaaagca

SEQ ID NO: 3165695 - RNA, 11 nt, Human
agcgcucccuu

SEQ ID NO: 3165696 - RNA, 19 nt, Human
agcgcggacauccccugcu

SEQ ID NO: 3165697 - RNA, 17 nt, Human
agcgcggacauccccug

SEQ ID NO: 3165698 - RNA, 16 nt, Human
ugccccgucccccucu

SEQ ID NO: 3165699 - RNA, 18 nt, Human
ugccccgucccccucugg

SEQ ID NO: 3165700 - RNA, 20 nt, Human
ugccccgucuacagcucccc

SEQ ID NO: 3165701 - RNA, 19 nt, Human
ugccccgucuacagcuccc

SEQ ID NO: 3165702 - RNA, 12 nt, Human
ugccccccagcc

SEQ ID NO: 3165703 - RNA, 15 nt, Human
ugcccaggcaggucu

SEQ ID NO: 3165704 - RNA, 14 nt, Human
ugcccacaggauca

SEQ ID NO: 3165705 - RNA, 15 nt, Human
ugcccacaccuccug

SEQ ID NO: 3165706 - RNA, 16 nt, Human
ugcccacaccuccugg

SEQ ID NO: 3165707 - RNA, 17 nt, Human
ugcccacaccuccuggg

SEQ ID NO: 3165708 - RNA, 15 nt, Human
ugcccaaugaauaau

SEQ ID NO: 3165709 - RNA, 20 nt, Human
ugcccaaugaauaauggaaa

SEQ ID NO: 3165710 - RNA, 11 nt, Human
ugcccaggccc

SEQ ID NO: 3165711 - RNA, 20 nt, Human
ugcccaggcaggucuugaac

SEQ ID NO: 3165712 - RNA, 17 nt, Human
ugcccaggcaggucuug

SEQ ID NO: 3165713 - RNA, 16 nt, Human
ugcccaggcaggucuu

SEQ ID NO: 3165714 - RNA, 22 nt, Human
ugcccaggccccugccacccug

SEQ ID NO: 3165715 - RNA, 20 nt, Human
ugcccaggccccugccaccc

SEQ ID NO: 3165716 - RNA, 12 nt, Human
ugcccaggcccc

SEQ ID NO: 3165717 - RNA, 15 nt, Human
ugcccaggccugccu

SEQ ID NO: 3165718 - RNA, 14 nt, Human
agcucagggccugg

SEQ ID NO: 3165719 - RNA, 15 nt, Human
agcucagggccuggc

SEQ ID NO: 3165720 - RNA, 16 nt, Human
agcucagggccuggcu

SEQ ID NO: 3165721 - RNA, 19 nt, Human
ugccauguuggccaggcug

SEQ ID NO: 3165722 - RNA, 18 nt, Human
ugccauguuggccaggcu

SEQ ID NO: 3165723 - RNA, 17 nt, Human
agcucagggccuggcuc

SEQ ID NO: 3165724 - RNA, 17 nt, Human
ugccauguuggccaggc

SEQ ID NO: 3165725 - RNA, 20 nt, Human
ugccauguuggccaggcugg

SEQ ID NO: 3165726 - RNA, 21 nt, Human
ugccauguuggccaggcuggu

SEQ ID NO: 3165727 - RNA, 20 nt, Human
ugccauuccaaaauauuaug

SEQ ID NO: 3165728 - RNA, 16 nt, Human
ugccauguuggccagg

SEQ ID NO: 3165729 - RNA, 22 nt, Human
ugcccaaccugcucuccucuug

SEQ ID NO: 3165730 - RNA, 18 nt, Human
ugcccaaccugcucuccu

SEQ ID NO: 3165731 - RNA, 24 nt, Human
ugcccaaccugcucuccucuugcc

SEQ ID NO: 3165732 - RNA, 23 nt, Human
ugcccaaccugcucuccucuugc

SEQ ID NO: 3165733 - RNA, 19 nt, Human
agcuaguugaauacuugaa

SEQ ID NO: 3165734 - RNA, 20 nt, Human
agcuaguugaauacuugaac

SEQ ID NO: 3165735 - RNA, 18 nt, Human
agcuaguugaauacuuga

SEQ ID NO: 3165736 - RNA, 16 nt, Human
agcuauaaauuauauu

SEQ ID NO: 3165737 - RNA, 18 nt, Human
agcuauaauuauuauuca

SEQ ID NO: 3165738 - RNA, 22 nt, Human
agcuaguugaauacuugaacca

SEQ ID NO: 3165739 - RNA, 23 nt, Human
agcuaguugaauacuugaaccau

SEQ ID NO: 3165740 - RNA, 24 nt, Human
agcuaguugaauacuugaaccaua

SEQ ID NO: 3165741 - RNA, 18 nt, Human
agcuacuggauucuuauu

SEQ ID NO: 3165742 - RNA, 13 nt, Human
agcuauaggaaau

SEQ ID NO: 3165743 - RNA, 21 nt, Human
agcuaugaagagcuagagaaa

SEQ ID NO: 3165744 - RNA, 12 nt, Human
agcuaugacuua

SEQ ID NO: 3165745 - RNA, 15 nt, Human
agcuaucuucaugua

SEQ ID NO: 3165746 - RNA, 16 nt, Human
agcuaucuucauguaa

SEQ ID NO: 3165747 - RNA, 17 nt, Human
agcuaucuucauguaaa

SEQ ID NO: 3165748 - RNA, 18 nt, Human
agcuaucuucauguaaau

SEQ ID NO: 3165749 - RNA, 20 nt, Human
agcuaucuucauguaaauug

SEQ ID NO: 3165750 - RNA, 20 nt, Human
agcuauggacagcauugcca

SEQ ID NO: 3165751 - RNA, 15 nt, Human
agcuaugcuguaucu

SEQ ID NO: 3165752 - RNA, 17 nt, Human
agcuaugcuguaucugu

SEQ ID NO: 3165753 - RNA, 20 nt, Human
agcuaugcuguaucugugcu

SEQ ID NO: 3165754 - RNA, 22 nt, Human
agcuaugcuguaucugugcuuu

SEQ ID NO: 3165755 - RNA, 16 nt, Human
agcuaugacuuaacau

SEQ ID NO: 3165756 - RNA, 13 nt, Human
agcuaugagagga

SEQ ID NO: 3165757 - RNA, 13 nt, Human
agcuaugcaaaaa

SEQ ID NO: 3165758 - RNA, 17 nt, Human
agcuaugcaaaaagcua

SEQ ID NO: 3165759 - RNA, 19 nt, Human
ugccuugugaaggaauuau

SEQ ID NO: 3165760 - RNA, 21 nt, Human
ugccuuagaaccuuucuuaca

SEQ ID NO: 3165761 - RNA, 17 nt, Human
ugccuuagaaccuuucu

SEQ ID NO: 3165762 - RNA, 14 nt, Human
ugccuuagaaccuu

SEQ ID NO: 3165763 - RNA, 16 nt, Human
ugccuguucagcucca

SEQ ID NO: 3165764 - RNA, 15 nt, Human
ugccuguucagcucc

SEQ ID NO: 3165765 - RNA, 15 nt, Human
agcuggggaugucuc

SEQ ID NO: 3165766 - RNA, 13 nt, Human
ugcgaaaggauga

SEQ ID NO: 3165767 - RNA, 17 nt, Human
ugcggacagccacggcc

SEQ ID NO: 3165768 - RNA, 15 nt, Human
ugcgaggcuaugagu

SEQ ID NO: 3165769 - RNA, 18 nt, Human
ugcggacagccacggcca

SEQ ID NO: 3165770 - RNA, 19 nt, Human
ugcgaaaggaugaaaguga

SEQ ID NO: 3165771 - RNA, 14 nt, Human
agcugggcagguug

SEQ ID NO: 3165772 - RNA, 22 nt, Human
agcugggauuacaggcuccugc

SEQ ID NO: 3165773 - RNA, 23 nt, Human
agcugggauuacaggcuccugcc

SEQ ID NO: 3165774 - RNA, 19 nt, Human
agcugggacuacaggugug

SEQ ID NO: 3165775 - RNA, 17 nt, Human
agcugggacuacaggug

SEQ ID NO: 3165776 - RNA, 16 nt, Human
agcuggagaggagccc

SEQ ID NO: 3165777 - RNA, 15 nt, Human
agcuggagaggagcc

SEQ ID NO: 3165778 - RNA, 19 nt, Human
agcuggagaggagcccugc

SEQ ID NO: 3165779 - RNA, 18 nt, Human
agcuggagaggagcccug

SEQ ID NO: 3165780 - RNA, 17 nt, Human
agcuggagaggagcccu

SEQ ID NO: 3165781 - RNA, 23 nt, Human
agcugggaugauuggagggggga

SEQ ID NO: 3165782 - RNA, 18 nt, Human
agcugggauuacaggcuc

SEQ ID NO: 3165783 - RNA, 21 nt, Human
agcugggauuacaggcuccug

SEQ ID NO: 3165784 - RNA, 22 nt, Human
agcugggaucacauguggacuu

SEQ ID NO: 3165785 - RNA, 19 nt, Human
agcugccugaaaaucaaga

SEQ ID NO: 3165786 - RNA, 17 nt, Human
agcugccugaaaaucaa

SEQ ID NO: 3165787 - RNA, 22 nt, Human
ugccucugacacacagcucugu

SEQ ID NO: 3165788 - RNA, 21 nt, Human
agcugccugggaucccucauc

SEQ ID NO: 3165789 - RNA, 13 nt, Human
agcugccugggau

SEQ ID NO: 3165790 - RNA, 19 nt, Human
agcugccugggaucccuca

SEQ ID NO: 3165791 - RNA, 15 nt, Human
ugccucucucaggcc

SEQ ID NO: 3165792 - RNA, 21 nt, Human
ugccucugacacacagcucug

SEQ ID NO: 3165793 - RNA, 20 nt, Human
ugccucugacacacagcucu

SEQ ID NO: 3165794 - RNA, 13 nt, Human
ugccucccaucac

SEQ ID NO: 3165795 - RNA, 14 nt, Human
ugccucccaucacc

SEQ ID NO: 3165796 - RNA, 13 nt, Human
ugccucucucagg

SEQ ID NO: 3165797 - RNA, 14 nt, Human
ugccucucucaggc

SEQ ID NO: 3165798 - RNA, 17 nt, Human
agcugcaccccuuccug

SEQ ID NO: 3165799 - RNA, 17 nt, Human
agcugcauaucuucauc

SEQ ID NO: 3165800 - RNA, 21 nt, Human
agcugcaccccuuccugggca

SEQ ID NO: 3165801 - RNA, 13 nt, Human
agcugccaccugc

SEQ ID NO: 3165802 - RNA, 15 nt, Human
ugcccuuucugggca

SEQ ID NO: 3165803 - RNA, 21 nt, Human
ugcccuuuacuugucuuucug

SEQ ID NO: 3165804 - RNA, 20 nt, Human
ugcccuuuguccuccugcug

SEQ ID NO: 3165805 - RNA, 19 nt, Human
ugcccuuuguccuccugcu

SEQ ID NO: 3165806 - RNA, 17 nt, Human
ugcccuuuguccuccug

SEQ ID NO: 3165807 - RNA, 15 nt, Human
ugcccuuuguccucc

SEQ ID NO: 3165808 - RNA, 22 nt, Human
ugccuccaagaggaaccucuga

SEQ ID NO: 3165809 - RNA, 18 nt, Human
ugccgggugcagcaucug

SEQ ID NO: 3165810 - RNA, 22 nt, Human
ugccgcugauguuuggccguga

SEQ ID NO: 3165811 - RNA, 13 nt, Human
ugccgcugauguu

SEQ ID NO: 3165812 - RNA, 22 nt, Human
agcucucaugcugccccugccu

SEQ ID NO: 3165813 - RNA, 22 nt, Human
agcucuaucaccaaggagccaa

SEQ ID NO: 3165814 - RNA, 17 nt, Human
agcucuaucaccaagga

SEQ ID NO: 3165815 - RNA, 19 nt, Human
ugcccuccaagaccuucuc

SEQ ID NO: 3165816 - RNA, 20 nt, Human
ugcccuccaagaccuucucc

SEQ ID NO: 3165817 - RNA, 22 nt, Human
ugcccuccaagaccuucuccuu

SEQ ID NO: 3165818 - RNA, 20 nt, Human
agcucugguccauagagagc

SEQ ID NO: 3165819 - RNA, 22 nt, Human
agcucugcuccucuccccagca

SEQ ID NO: 3165820 - RNA, 12 nt, Human
agcucugcuccu

SEQ ID NO: 3165821 - RNA, 11 nt, Human
agcucugccuu

SEQ ID NO: 3165822 - RNA, 12 nt, Human
agcucuguccug

SEQ ID NO: 3165823 - RNA, 17 nt, Human
agcucuucuccaggcug

SEQ ID NO: 3165824 - RNA, 18 nt, Human
agcucuucuccaggcugu

SEQ ID NO: 3165825 - RNA, 18 nt, Human
agcugcacccucaggcag

SEQ ID NO: 3165826 - RNA, 19 nt, Human
agcugcacccucaggcagg

SEQ ID NO: 3165827 - RNA, 20 nt, Human
agcugcacccucaggcaggu

SEQ ID NO: 3165828 - RNA, 22 nt, Human
agcugcacccucaggcaggugg

SEQ ID NO: 3165829 - RNA, 13 nt, Human
agcugcacccuca

SEQ ID NO: 3165830 - RNA, 17 nt, Human
agcugcacccucaggca

SEQ ID NO: 3165831 - RNA, 20 nt, Human
agcugauguguugccacuuu

SEQ ID NO: 3165832 - RNA, 16 nt, Human
aggaaaccuuuucuug

SEQ ID NO: 3165833 - RNA, 17 nt, Human
aggaaaccuuuucuugu

SEQ ID NO: 3165834 - RNA, 21 nt, Human
aggaaacccagcucuggucca

SEQ ID NO: 3165835 - RNA, 18 nt, Human
aggaaacccagcucuggu

SEQ ID NO: 3165836 - RNA, 20 nt, Human
aggaaacccagcucuggucc

SEQ ID NO: 3165837 - RNA, 16 nt, Human
aggaaacccagcucug

SEQ ID NO: 3165838 - RNA, 17 nt, Human
aggaaacccagcucugg

SEQ ID NO: 3165839 - RNA, 15 nt, Human
aggaaacccagcucu

SEQ ID NO: 3165840 - RNA, 17 nt, Human
aggaaaagguugaauaa

SEQ ID NO: 3165841 - RNA, 22 nt, Human
aggaaaagguugaauaauauau

SEQ ID NO: 3165842 - RNA, 16 nt, Human
aggaaaagcugcugac

SEQ ID NO: 3165843 - RNA, 19 nt, Human
agcuuugacucuauaagca

SEQ ID NO: 3165844 - RNA, 12 nt, Human
agcuuugaaaau

SEQ ID NO: 3165845 - RNA, 16 nt, Human
agcuuugaaaauucag

SEQ ID NO: 3165846 - RNA, 18 nt, Human
agcuuugaaaauucagug

SEQ ID NO: 3165847 - RNA, 19 nt, Human
agcuuugaaaauucagugg

SEQ ID NO: 3165848 - RNA, 12 nt, Human
aggaaagaggcu

SEQ ID NO: 3165849 - RNA, 13 nt, Human
aggaaagaggcuc

SEQ ID NO: 3165850 - RNA, 16 nt, Human
ugcuagucuuaagaac

SEQ ID NO: 3165851 - RNA, 21 nt, Human
ugcuauaacuauguugauaaa

SEQ ID NO: 3165852 - RNA, 13 nt, Human
ugcuauaaucugu

SEQ ID NO: 3165853 - RNA, 17 nt, Human
ugcuauaaucuguuuuu

SEQ ID NO: 3165854 - RNA, 18 nt, Human
ugcuauaaucuguuuuua

SEQ ID NO: 3165855 - RNA, 21 nt, Human
ugcuauaaucuguuuuuacgu

SEQ ID NO: 3165856 - RNA, 16 nt, Human
aggaaagaagcauuuc

SEQ ID NO: 3165857 - RNA, 16 nt, Human
aggaaagaggcucugg

SEQ ID NO: 3165858 - RNA, 17 nt, Human
aggaaagcaaaggagau

SEQ ID NO: 3165859 - RNA, 15 nt, Human
agcuuauuaaaacuc

SEQ ID NO: 3165860 - RNA, 20 nt, Human
agcuuauuaaaacucauuuu

SEQ ID NO: 3165861 - RNA, 20 nt, Human
agcuuguaaauagcucaggu

SEQ ID NO: 3165862 - RNA, 19 nt, Human
agcuuguaaauagcucagg

SEQ ID NO: 3165863 - RNA, 16 nt, Human
agcuuggcucaggcug

SEQ ID NO: 3165864 - RNA, 18 nt, Human
agcuuguaaauagcucag

SEQ ID NO: 3165865 - RNA, 22 nt, Human
agcuuucugagcaagaggauuu

SEQ ID NO: 3165866 - RNA, 14 nt, Human
agcuuucugagcaa

SEQ ID NO: 3165867 - RNA, 12 nt, Human
agcuuucuuuuu

SEQ ID NO: 3165868 - RNA, 22 nt, Human
agcuuucuuuuuaaagcuuuug

SEQ ID NO: 3165869 - RNA, 23 nt, Human
agcuuucugagcaagaggauuuu

SEQ ID NO: 3165870 - RNA, 20 nt, Human
ugcggacagccacggccagg

SEQ ID NO: 3165871 - RNA, 14 nt, Human
ugcuaccuugcccc

SEQ ID NO: 3165872 - RNA, 15 nt, Human
ugcuaccuugcccca

SEQ ID NO: 3165873 - RNA, 24 nt, Human
agcuguuugguuuuaaaauacugu

SEQ ID NO: 3165874 - RNA, 23 nt, Human
agcuguuugguuuuaaaauacug

SEQ ID NO: 3165875 - RNA, 20 nt, Human
agcuguuugguuuuaaaaua

SEQ ID NO: 3165876 - RNA, 13 nt, Human
agcuguuuggaaa

SEQ ID NO: 3165877 - RNA, 16 nt, Human
agcuguuuggaaaaga

SEQ ID NO: 3165878 - RNA, 19 nt, Human
agcuguuugguuuuaaaau

SEQ ID NO: 3165879 - RNA, 17 nt, Human
agcuguuugguuuuaaa

SEQ ID NO: 3165880 - RNA, 14 nt, Human
agcuuagggucuca

SEQ ID NO: 3165881 - RNA, 16 nt, Human
agcuuagggucucagg

SEQ ID NO: 3165882 - RNA, 17 nt, Human
agcuuagggucucaggg

SEQ ID NO: 3165883 - RNA, 18 nt, Human
agcuuagggucucagggu

SEQ ID NO: 3165884 - RNA, 12 nt, Human
agcuuaucucag

SEQ ID NO: 3165885 - RNA, 14 nt, Human
agcuuaucucaggg

SEQ ID NO: 3165886 - RNA, 15 nt, Human
agcuuaucucagggg

SEQ ID NO: 3165887 - RNA, 19 nt, Human
aggaauugacccacaagaa

SEQ ID NO: 3165888 - RNA, 15 nt, Human
aggaaugauauugcu

SEQ ID NO: 3165889 - RNA, 16 nt, Human
aggaaugauauugcug

SEQ ID NO: 3165890 - RNA, 16 nt, Human
aggaagcucagggccu

SEQ ID NO: 3165891 - RNA, 20 nt, Human
aggaauccagacccggcugc

SEQ ID NO: 3165892 - RNA, 23 nt, Human
aggaauccagacccggcugcgug

SEQ ID NO: 3165893 - RNA, 15 nt, Human
aggaagacuuuggaa

SEQ ID NO: 3165894 - RNA, 13 nt, Human
aggaaaucaaagu

SEQ ID NO: 3165895 - RNA, 14 nt, Human
aggaagagaaaaaa

SEQ ID NO: 3165896 - RNA, 14 nt, Human
aggaaaucaaagug

SEQ ID NO: 3165897 - RNA, 19 nt, Human
aggaaaucaaagugcuauu

SEQ ID NO: 3165898 - RNA, 18 nt, Human
aggaagcucagggccugg

SEQ ID NO: 3165899 - RNA, 22 nt, Human
aggaagcucagggccuggcuca

SEQ ID NO: 3165900 - RNA, 17 nt, Human
aggaagcucagggccug

SEQ ID NO: 3165901 - RNA, 13 nt, Human
aggaauuuugcua

SEQ ID NO: 3165902 - RNA, 15 nt, Human
ugcugccacacuuca

SEQ ID NO: 3165903 - RNA, 19 nt, Human
ugcugccacacuucaggcu

SEQ ID NO: 3165904 - RNA, 16 nt, Human
ugcugccacacuucag

SEQ ID NO: 3165905 - RNA, 11 nt, Human
ugcugccaucc

SEQ ID NO: 3165906 - RNA, 21 nt, Human
aggacaaaucugcaaagcaug

SEQ ID NO: 3165907 - RNA, 20 nt, Human
aggacaaaucugcaaagcau

SEQ ID NO: 3165908 - RNA, 22 nt, Human
ugcugccacacuucaggcucuu

SEQ ID NO: 3165909 - RNA, 15 nt, Human
ugcugccauccaggu

SEQ ID NO: 3165910 - RNA, 14 nt, Human
ugcugccauccagg

SEQ ID NO: 3165911 - RNA, 13 nt, Human
ugcugccauccag

SEQ ID NO: 3165912 - RNA, 12 nt, Human
ugcugccaucca

SEQ ID NO: 3165913 - RNA, 22 nt, Human
ugcugccauccagguucagcuu

SEQ ID NO: 3165914 - RNA, 21 nt, Human
ugcugccauccagguucagcu

SEQ ID NO: 3165915 - RNA, 17 nt, Human
ugcugccaguaccagcc

SEQ ID NO: 3165916 - RNA, 20 nt, Human
ugcugccaguaccagcccca

SEQ ID NO: 3165917 - RNA, 19 nt, Human
ugcugccaguaccagcccc

SEQ ID NO: 3165918 - RNA, 14 nt, Human
ugcugcccagccuc

SEQ ID NO: 3165919 - RNA, 16 nt, Human
ugcugcccagccucca

SEQ ID NO: 3165920 - RNA, 19 nt, Human
ugcucugugcccacccucc

SEQ ID NO: 3165921 - RNA, 17 nt, Human
ugcugacuguuuucucu

SEQ ID NO: 3165922 - RNA, 18 nt, Human
ugcucugcauguuacaua

SEQ ID NO: 3165923 - RNA, 15 nt, Human
ugcucugcauguuac

SEQ ID NO: 3165924 - RNA, 17 nt, Human
ugcucuggacaggcaug

SEQ ID NO: 3165925 - RNA, 14 nt, Human
ugcucugccccagc

SEQ ID NO: 3165926 - RNA, 15 nt, Human
ugcucugccccagcu

SEQ ID NO: 3165927 - RNA, 22 nt, Human
ugcucugaucauccacugugcc

SEQ ID NO: 3165928 - RNA, 18 nt, Human
ugcucugaugaagaggag

SEQ ID NO: 3165929 - RNA, 19 nt, Human
ugcucugaugaagaggagu

SEQ ID NO: 3165930 - RNA, 19 nt, Human
ugcucugaucauccacugu

SEQ ID NO: 3165931 - RNA, 18 nt, Human
ugcuaucaguuuuauagc

SEQ ID NO: 3165932 - RNA, 15 nt, Human
ugcuaucaguuuuau

SEQ ID NO: 3165933 - RNA, 22 nt, Human
aggaaaggcuccaggagcagcc

SEQ ID NO: 3165934 - RNA, 16 nt, Human
aggaaaggcuccagga

SEQ ID NO: 3165935 - RNA, 20 nt, Human
aggaaaggagaguacuuugg

SEQ ID NO: 3165936 - RNA, 18 nt, Human
aggaaaggcuccaggagc

SEQ ID NO: 3165937 - RNA, 20 nt, Human
aggaaaggcuccaggagcag

SEQ ID NO: 3165938 - RNA, 21 nt, Human
ugcugacuguuuucucuugag

SEQ ID NO: 3165939 - RNA, 24 nt, Human
ugcugacuguuuucucuugagagg

SEQ ID NO: 3165940 - RNA, 16 nt, Human
ugcugacuguuuucuc

SEQ ID NO: 3165941 - RNA, 11 nt, Human
ugcugaggguc

SEQ ID NO: 3165942 - RNA, 12 nt, Human
ugcugagggucc

SEQ ID NO: 3165943 - RNA, 13 nt, Human
ugcugagggucca

SEQ ID NO: 3165944 - RNA, 19 nt, Human
aggaaagcaaaggagauug

SEQ ID NO: 3165945 - RNA, 13 nt, Human
aggaaagcacaga

SEQ ID NO: 3165946 - RNA, 15 nt, Human
ugcugagucccaggc

SEQ ID NO: 3165947 - RNA, 18 nt, Human
ugcugagucccaggcuga

SEQ ID NO: 3165948 - RNA, 22 nt, Human
ugcugagucccaggcugagccu

SEQ ID NO: 3165949 - RNA, 20 nt, Human
ugcugaguccgaccuggccu

SEQ ID NO: 3165950 - RNA, 16 nt, Human
aggccugacucucagc

SEQ ID NO: 3165951 - RNA, 20 nt, Human
aggccugaauccaaaagaaa

SEQ ID NO: 3165952 - RNA, 23 nt, Human
aggccugaauccaaaagaaaaac

SEQ ID NO: 3165953 - RNA, 12 nt, Human
aggccuggccag

SEQ ID NO: 3165954 - RNA, 13 nt, Human
aggccuggccaga

SEQ ID NO: 3165955 - RNA, 21 nt, Human
aggccguugccgcugauguuu

SEQ ID NO: 3165956 - RNA, 18 nt, Human
aggccguugcugacuuag

SEQ ID NO: 3165957 - RNA, 21 nt, Human
aggccguugcugacuuagaau

SEQ ID NO: 3165958 - RNA, 23 nt, Human
aggccguugcugacuuagaaucc

SEQ ID NO: 3165959 - RNA, 19 nt, Human
aggccuaauucuaugccug

SEQ ID NO: 3165960 - RNA, 22 nt, Human
aggccuacaugcuuugugaaca

SEQ ID NO: 3165961 - RNA, 22 nt, Human
aggccuaauucuaugccugucu

SEQ ID NO: 3165962 - RNA, 23 nt, Human
aggccuacaugcuuugugaacaa

SEQ ID NO: 3165963 - RNA, 13 nt, Human
aggccuacuccug

SEQ ID NO: 3165964 - RNA, 15 nt, Human
aggccuacuccuguc

SEQ ID NO: 3165965 - RNA, 14 nt, Human
aggccuacuccugu

SEQ ID NO: 3165966 - RNA, 17 nt, Human
aggccuacuccugucuu

SEQ ID NO: 3165967 - RNA, 17 nt, Human
aggccugaaauccuggu

SEQ ID NO: 3165968 - RNA, 18 nt, Human
aggccugaaauccugguu

SEQ ID NO: 3165969 - RNA, 16 nt, Human
aggcccggcuccaggc

SEQ ID NO: 3165970 - RNA, 15 nt, Human
aggcccggcuccagg

SEQ ID NO: 3165971 - RNA, 14 nt, Human
aggcccggcuccag

SEQ ID NO: 3165972 - RNA, 19 nt, Human
aggccgggcagagcacagc

SEQ ID NO: 3165973 - RNA, 16 nt, Human
aggccgggcagagcac

SEQ ID NO: 3165974 - RNA, 14 nt, Human
aggccgggcagagc

SEQ ID NO: 3165975 - RNA, 13 nt, Human
aggccgggcagag

SEQ ID NO: 3165976 - RNA, 21 nt, Human
aggccccugccacccugggga

SEQ ID NO: 3165977 - RNA, 12 nt, Human
aggccccugcca

SEQ ID NO: 3165978 - RNA, 18 nt, Human
aggccccugccacccugg

SEQ ID NO: 3165979 - RNA, 17 nt, Human
aggccccugccacccug

SEQ ID NO: 3165980 - RNA, 19 nt, Human
aggcccagagggccugcaa

SEQ ID NO: 3165981 - RNA, 20 nt, Human
aggcccagagggccugcaag

SEQ ID NO: 3165982 - RNA, 15 nt, Human
aggccccugccaccc

SEQ ID NO: 3165983 - RNA, 13 nt, Human
aggccccugccac

SEQ ID NO: 3165984 - RNA, 14 nt, Human
uggcacagccugca

SEQ ID NO: 3165985 - RNA, 17 nt, Human
uggcacagccugcacuu

SEQ ID NO: 3165986 - RNA, 15 nt, Human
uggcacagggcagug

SEQ ID NO: 3165987 - RNA, 12 nt, Human
aggcauauuuua

SEQ ID NO: 3165988 - RNA, 19 nt, Human
aggcauaugcuucuuuaaa

SEQ ID NO: 3165989 - RNA, 18 nt, Human
aggcauaugcuucuuuaa

SEQ ID NO: 3165990 - RNA, 17 nt, Human
aggcauaugcuucuuua

SEQ ID NO: 3165991 - RNA, 16 nt, Human
uggcaccagcagccug

SEQ ID NO: 3165992 - RNA, 17 nt, Human
uggcaccagcagccugg

SEQ ID NO: 3165993 - RNA, 13 nt, Human
uggcagaugcagc

SEQ ID NO: 3165994 - RNA, 21 nt, Human
uggcagaugcagcucuuccug

SEQ ID NO: 3165995 - RNA, 17 nt, Human
uggcagaugcagcucuu

SEQ ID NO: 3165996 - RNA, 16 nt, Human
uggcagaugcagcucu

SEQ ID NO: 3165997 - RNA, 15 nt, Human
uggcagaugcagcuc

SEQ ID NO: 3165998 - RNA, 17 nt, Human
uggcagccgugccuuca

SEQ ID NO: 3165999 - RNA, 23 nt, Human
uggcagcaccgccucuucccgcc

SEQ ID NO: 3166000 - RNA, 20 nt, Human
uggcagcaccgccucuuccc

SEQ ID NO: 3166001 - RNA, 20 nt, Human
aggccauuccccgucucugg

SEQ ID NO: 3166002 - RNA, 15 nt, Human
aggcccagagggccu

SEQ ID NO: 3166003 - RNA, 16 nt, Human
aggcccagagggccug

SEQ ID NO: 3166004 - RNA, 13 nt, Human
uggcagcucagag

SEQ ID NO: 3166005 - RNA, 16 nt, Human
uggcagccgugccuuc

SEQ ID NO: 3166006 - RNA, 23 nt, Human
aggccagagacacaagccuucgg

SEQ ID NO: 3166007 - RNA, 18 nt, Human
aggccaugggccuccugu

SEQ ID NO: 3166008 - RNA, 17 nt, Human
aggccaugggccuccug

SEQ ID NO: 3166009 - RNA, 12 nt, Human
aggccagagaca

SEQ ID NO: 3166010 - RNA, 16 nt, Human
uggcagcucagagagg

SEQ ID NO: 3166011 - RNA, 13 nt, Human
aggccagagacac

SEQ ID NO: 3166012 - RNA, 18 nt, Human
aggccagagacacaagcc

SEQ ID NO: 3166013 - RNA, 14 nt, Human
uggcagcucagaga

SEQ ID NO: 3166014 - RNA, 15 nt, Human
uggcagcucagagag

SEQ ID NO: 3166015 - RNA, 21 nt, Human
uggcagccgugccuucagcuc

SEQ ID NO: 3166016 - RNA, 20 nt, Human
uggcagccgugccuucagcu

SEQ ID NO: 3166017 - RNA, 19 nt, Human
uggcagccgugccuucagc

SEQ ID NO: 3166018 - RNA, 18 nt, Human
uggcagccgugccuucag

SEQ ID NO: 3166019 - RNA, 21 nt, Human
aggcgaaagaaaacucuauuu

SEQ ID NO: 3166020 - RNA, 22 nt, Human
aggcgaggaggccguugccgcu

SEQ ID NO: 3166021 - RNA, 23 nt, Human
aggccuuuaguuauaaaggaauc

SEQ ID NO: 3166022 - RNA, 19 nt, Human
aggccuugggcucugcuga

SEQ ID NO: 3166023 - RNA, 18 nt, Human
aggccuugggcucugcug

SEQ ID NO: 3166024 - RNA, 18 nt, Human
aggccuucucugaaggac

SEQ ID NO: 3166025 - RNA, 17 nt, Human
aggccuucucugaagga

SEQ ID NO: 3166026 - RNA, 17 nt, Human
aggccuugggcucugcu

SEQ ID NO: 3166027 - RNA, 14 nt, Human
aggcucaaauuuug

SEQ ID NO: 3166028 - RNA, 15 nt, Human
aggcuauuaaaaaag

SEQ ID NO: 3166029 - RNA, 19 nt, Human
aggcgcaagggaggcccag

SEQ ID NO: 3166030 - RNA, 20 nt, Human
aggcgcaagggaggcccagc

SEQ ID NO: 3166031 - RNA, 14 nt, Human
aggcgccccuuccc

SEQ ID NO: 3166032 - RNA, 19 nt, Human
aggcgcuagcacagcuccc

SEQ ID NO: 3166033 - RNA, 15 nt, Human
aggcgcuagcacagc

SEQ ID NO: 3166034 - RNA, 23 nt, Human
aggcgcuaacuugcuuaaaugug

SEQ ID NO: 3166035 - RNA, 23 nt, Human
aggcgccucaacucugcugaggg

SEQ ID NO: 3166036 - RNA, 15 nt, Human
aggcgcuaacuugcu

SEQ ID NO: 3166037 - RNA, 13 nt, Human
aggcgcuaacuug

SEQ ID NO: 3166038 - RNA, 11 nt, Human
aggcuccacuu

SEQ ID NO: 3166039 - RNA, 17 nt, Human
aggcuccacuuggucug

SEQ ID NO: 3166040 - RNA, 21 nt, Human
aggcuccacuuggucugugag

SEQ ID NO: 3166041 - RNA, 22 nt, Human
aggcuccacuuggucugugaga

SEQ ID NO: 3166042 - RNA, 14 nt, Human
aggcuccaggagca

SEQ ID NO: 3166043 - RNA, 16 nt, Human
aggcuccaggagcagc

SEQ ID NO: 3166044 - RNA, 13 nt, Human
aggcuccaggagc

SEQ ID NO: 3166045 - RNA, 12 nt, Human
uggcccugcccu

SEQ ID NO: 3166046 - RNA, 24 nt, Human
uggcccucucugaaggaggccacc

SEQ ID NO: 3166047 - RNA, 13 nt, Human
uggcccacugcau

SEQ ID NO: 3166048 - RNA, 14 nt, Human
uggcccacugcauc

SEQ ID NO: 3166049 - RNA, 13 nt, Human
uggcccacgcacu

SEQ ID NO: 3166050 - RNA, 19 nt, Human
uggcccacgcacuucggga

SEQ ID NO: 3166051 - RNA, 22 nt, Human
uggcaugggaaugaaugucagu

SEQ ID NO: 3166052 - RNA, 22 nt, Human
uggcauggugguugggacccag

SEQ ID NO: 3166053 - RNA, 21 nt, Human
uggcauggugguugggaccca

SEQ ID NO: 3166054 - RNA, 19 nt, Human
uggccucugcacuccccug

SEQ ID NO: 3166055 - RNA, 18 nt, Human
uggccucugcacuccccu

SEQ ID NO: 3166056 - RNA, 20 nt, Human
uggccucugcacuccccugc

SEQ ID NO: 3166057 - RNA, 21 nt, Human
uggccucugcugauccuccca

SEQ ID NO: 3166058 - RNA, 18 nt, Human
uggccugagcugggauga

SEQ ID NO: 3166059 - RNA, 21 nt, Human
uggccugaugaccaauuuuaa

SEQ ID NO: 3166060 - RNA, 22 nt, Human
uggccugugcgaucccacccgu

SEQ ID NO: 3166061 - RNA, 21 nt, Human
uggccugugcgaucccacccg

SEQ ID NO: 3166062 - RNA, 13 nt, Human
aggaggccaccuc

SEQ ID NO: 3166063 - RNA, 14 nt, Human
aggaggccaccucc

SEQ ID NO: 3166064 - RNA, 15 nt, Human
aggaggccagccuug

SEQ ID NO: 3166065 - RNA, 13 nt, Human
uggaagugugggu

SEQ ID NO: 3166066 - RNA, 14 nt, Human
uggaaguguggguc

SEQ ID NO: 3166067 - RNA, 19 nt, Human
uggaagugaaaacuuugua

SEQ ID NO: 3166068 - RNA, 18 nt, Human
uggaagugaaaacuuugu

SEQ ID NO: 3166069 - RNA, 22 nt, Human
aggaguuucuuuagcugacaga

SEQ ID NO: 3166070 - RNA, 21 nt, Human
aggaguuugagaccaaccugg

SEQ ID NO: 3166071 - RNA, 14 nt, Human
aggauaugccugcu

SEQ ID NO: 3166072 - RNA, 18 nt, Human
aggauauggacacuggug

SEQ ID NO: 3166073 - RNA, 16 nt, Human
aggauauggacacugg

SEQ ID NO: 3166074 - RNA, 17 nt, Human
aggauaugccugcucuu

SEQ ID NO: 3166075 - RNA, 15 nt, Human
ugcugccccugccuu

SEQ ID NO: 3166076 - RNA, 10 nt, Human
ugcugcccug

SEQ ID NO: 3166077 - RNA, 12 nt, Human
uggaacacucug

SEQ ID NO: 3166078 - RNA, 13 nt, Human
uggaagcuccgcu

SEQ ID NO: 3166079 - RNA, 20 nt, Human
uggaaguacuauaauuuacc

SEQ ID NO: 3166080 - RNA, 18 nt, Human
uggaaguacuauaauuua

SEQ ID NO: 3166081 - RNA, 17 nt, Human
uggaagcuguuuggaaa

SEQ ID NO: 3166082 - RNA, 22 nt, Human
uggaauuucucccagucauuua

SEQ ID NO: 3166083 - RNA, 19 nt, Human
aggcaacugcauuggcuuu

SEQ ID NO: 3166084 - RNA, 16 nt, Human
aggcaacuugggaacu

SEQ ID NO: 3166085 - RNA, 14 nt, Human
aggcaagcaccucc

SEQ ID NO: 3166086 - RNA, 16 nt, Human
aggcaagauugauguu

SEQ ID NO: 3166087 - RNA, 16 nt, Human
aggcaagauggcacag

SEQ ID NO: 3166088 - RNA, 13 nt, Human
uggacaagaaagu

SEQ ID NO: 3166089 - RNA, 18 nt, Human
uggaauuuuuuuguacga

SEQ ID NO: 3166090 - RNA, 21 nt, Human
aggauccugagccagauuuca

SEQ ID NO: 3166091 - RNA, 18 nt, Human
aggauccugagccagauu

SEQ ID NO: 3166092 - RNA, 22 nt, Human
aggauugcuacuguccuaccca

SEQ ID NO: 3166093 - RNA, 12 nt, Human
aggcaggauggc

SEQ ID NO: 3166094 - RNA, 15 nt, Human
aggcaggagagacag

SEQ ID NO: 3166095 - RNA, 17 nt, Human
aggcagggcaggaccag

SEQ ID NO: 3166096 - RNA, 16 nt, Human
aggcagggcaggacca

SEQ ID NO: 3166097 - RNA, 15 nt, Human
aggcagggcaggacc

SEQ ID NO: 3166098 - RNA, 12 nt, Human
aggcagggcagg

SEQ ID NO: 3166099 - RNA, 16 nt, Human
aggcagggagggccug

SEQ ID NO: 3166100 - RNA, 21 nt, Human
aggcagccccauucugccugc

SEQ ID NO: 3166101 - RNA, 20 nt, Human
aggcagccccauucugccug

SEQ ID NO: 3166102 - RNA, 19 nt, Human
aggcagccccauucugccu

SEQ ID NO: 3166103 - RNA, 22 nt, Human
aggcagccccauucugccugcc

SEQ ID NO: 3166104 - RNA, 17 nt, Human
aggcagccugagagucu

SEQ ID NO: 3166105 - RNA, 11 nt, Human
aggcagguccc

SEQ ID NO: 3166106 - RNA, 19 nt, Human
aggcagggugucugccccc

SEQ ID NO: 3166107 - RNA, 14 nt, Human
aggcagguccaggg

SEQ ID NO: 3166108 - RNA, 22 nt, Human
aggcagggucucacucugucgc

SEQ ID NO: 3166109 - RNA, 15 nt, Human
aggcagggugucugc

SEQ ID NO: 3166110 - RNA, 22 nt, Human
aggcagggcaggaccagcccac

SEQ ID NO: 3166111 - RNA, 21 nt, Human
aggcagggcaggaccagccca

SEQ ID NO: 3166112 - RNA, 20 nt, Human
aggcagggcaggaccagccc

SEQ ID NO: 3166113 - RNA, 21 nt, Human
aggcagggucucacucugucg

SEQ ID NO: 3166114 - RNA, 20 nt, Human
aggcagggucucacucuguc

SEQ ID NO: 3166115 - RNA, 18 nt, Human
aggcagggucucacucug

SEQ ID NO: 3166116 - RNA, 19 nt, Human
aggcagggucucacucugu

SEQ ID NO: 3166117 - RNA, 15 nt, Human
aggcagguccccaga

SEQ ID NO: 3166118 - RNA, 14 nt, Human
aggcagguccccag

SEQ ID NO: 3166119 - RNA, 13 nt, Human
aggcaggucccca

SEQ ID NO: 3166120 - RNA, 12 nt, Human
aggcaggucccc

SEQ ID NO: 3166121 - RNA, 16 nt, Human
aggcagguccccagac

SEQ ID NO: 3166122 - RNA, 23 nt, Human
aggcaguaggacaaggugcaggc

SEQ ID NO: 3166123 - RNA, 21 nt, Human
aggcaggucuugaacuccugg

SEQ ID NO: 3166124 - RNA, 19 nt, Human
aggcaguugcccagccucu

SEQ ID NO: 3166125 - RNA, 17 nt, Human
aggcaguugcccagccu

SEQ ID NO: 3166126 - RNA, 20 nt, Human
aggcaguugcccagccucuu

SEQ ID NO: 3166127 - RNA, 15 nt, Human
aggcaguuugaggau

SEQ ID NO: 3166128 - RNA, 16 nt, Human
aggcaguauaaagaau

SEQ ID NO: 3166129 - RNA, 11 nt, Human
uggagccugca

SEQ ID NO: 3166130 - RNA, 13 nt, Human
uggagccugacag

SEQ ID NO: 3166131 - RNA, 14 nt, Human
uggagcccaggagu

SEQ ID NO: 3166132 - RNA, 16 nt, Human
uggagccugcagagcu

SEQ ID NO: 3166133 - RNA, 18 nt, Human
uggagccugacagccaga

SEQ ID NO: 3166134 - RNA, 17 nt, Human
uggagccugacagccag

SEQ ID NO: 3166135 - RNA, 21 nt, Human
uggagcugaggacucucacga

SEQ ID NO: 3166136 - RNA, 18 nt, Human
aggcacaggcagggcagg

SEQ ID NO: 3166137 - RNA, 17 nt, Human
aggcacaggcagggcag

SEQ ID NO: 3166138 - RNA, 16 nt, Human
aggcacaggcagggca

SEQ ID NO: 3166139 - RNA, 15 nt, Human
aggcacaggcagggc

SEQ ID NO: 3166140 - RNA, 21 nt, Human
aggcacauggaauauauuuua

SEQ ID NO: 3166141 - RNA, 18 nt, Human
aggcacauggaauauauu

SEQ ID NO: 3166142 - RNA, 16 nt, Human
aggcaaugcuggcugu

SEQ ID NO: 3166143 - RNA, 15 nt, Human
aggcaaugcuggcug

SEQ ID NO: 3166144 - RNA, 23 nt, Human
uggaggaaaaccaagccguggcu

SEQ ID NO: 3166145 - RNA, 21 nt, Human
uggaggaaaaccaagccgugg

SEQ ID NO: 3166146 - RNA, 23 nt, Human
uggagaaaaauaucuguaagagu

SEQ ID NO: 3166147 - RNA, 17 nt, Human
uggagaaaaauaucugu

SEQ ID NO: 3166148 - RNA, 24 nt, Human
uggacuuuguuaguuucuccaagc

SEQ ID NO: 3166149 - RNA, 11 nt, Human
uggacuuuguu

SEQ ID NO: 3166150 - RNA, 22 nt, Human
uggacuuuguuaguuucuccaa

SEQ ID NO: 3166151 - RNA, 16 nt, Human
uggacccugaaaugug

SEQ ID NO: 3166152 - RNA, 12 nt, Human
uggacuuuguua

SEQ ID NO: 3166153 - RNA, 14 nt, Human
uggacuuuguuaca

SEQ ID NO: 3166154 - RNA, 15 nt, Human
uggacuuuguuacac

SEQ ID NO: 3166155 - RNA, 22 nt, Human
uggacuuuguuacacuguuauu

SEQ ID NO: 3166156 - RNA, 15 nt, Human
uggacccugaaaugu

SEQ ID NO: 3166157 - RNA, 14 nt, Human
uggacccugaaaug

SEQ ID NO: 3166158 - RNA, 21 nt, Human
uggaccccaucugugaauaag

SEQ ID NO: 3166159 - RNA, 20 nt, Human
uggaccccaucugugaauaa

SEQ ID NO: 3166160 - RNA, 18 nt, Human
uggaccccaucugugaau

SEQ ID NO: 3166161 - RNA, 16 nt, Human
uggaccccaucuguga

SEQ ID NO: 3166162 - RNA, 15 nt, Human
uggaccccagccuca

SEQ ID NO: 3166163 - RNA, 14 nt, Human
uggaccccagccuc

SEQ ID NO: 3166164 - RNA, 13 nt, Human
uggaccccagccu

SEQ ID NO: 3166165 - RNA, 22 nt, Human
uggcugcagagcagugggccug

SEQ ID NO: 3166166 - RNA, 18 nt, Human
uggcugcagagcaguggg

SEQ ID NO: 3166167 - RNA, 15 nt, Human
uggcugcagagcagu

SEQ ID NO: 3166168 - RNA, 23 nt, Human
uggcugcaaaggguaucaggugc

SEQ ID NO: 3166169 - RNA, 17 nt, Human
uggcugugccucugccu

SEQ ID NO: 3166170 - RNA, 16 nt, Human
uggcugugccucugcc

SEQ ID NO: 3166171 - RNA, 15 nt, Human
uggcugugccucugc

SEQ ID NO: 3166172 - RNA, 14 nt, Human
uggcugugccucug

SEQ ID NO: 3166173 - RNA, 16 nt, Human
uggcuguggagugugg

SEQ ID NO: 3166174 - RNA, 22 nt, Human
uggcugugccucugccugucuc

SEQ ID NO: 3166175 - RNA, 19 nt, Human
uggcugugccucugccugu

SEQ ID NO: 3166176 - RNA, 18 nt, Human
uggcugugccucugccug

SEQ ID NO: 3166177 - RNA, 21 nt, Human
uggcuguggaauaggaacgcu

SEQ ID NO: 3166178 - RNA, 18 nt, Human
uggcuguuggcugggggc

SEQ ID NO: 3166179 - RNA, 16 nt, Human
uggcuguuggcugggg

SEQ ID NO: 3166180 - RNA, 14 nt, Human
uggcuucacggaag

SEQ ID NO: 3166181 - RNA, 23 nt, Human
uggcuguuggcugggggccucag

SEQ ID NO: 3166182 - RNA, 17 nt, Human
uggcuucacggaagagc

SEQ ID NO: 3166183 - RNA, 20 nt, Human
uggcuucacggaagagccuu

SEQ ID NO: 3166184 - RNA, 16 nt, Human
ugggaaagcauuguaa

SEQ ID NO: 3166185 - RNA, 14 nt, Human
ugggaaagcauugu

SEQ ID NO: 3166186 - RNA, 18 nt, Human
ugggaaagcauuguaaau

SEQ ID NO: 3166187 - RNA, 17 nt, Human
ugggaaagcauuguaaa

SEQ ID NO: 3166188 - RNA, 20 nt, Human
ugggaacaccauaggucacc

SEQ ID NO: 3166189 - RNA, 23 nt, Human
ugggaaaugcugauuuaaacuuc

SEQ ID NO: 3166190 - RNA, 17 nt, Human
ugggaaagagauuuaaa

SEQ ID NO: 3166191 - RNA, 15 nt, Human
ugggaaagcauaaag

SEQ ID NO: 3166192 - RNA, 19 nt, Human
uggcuauaggugcuacaaa

SEQ ID NO: 3166193 - RNA, 15 nt, Human
uggcuauaggugcua

SEQ ID NO: 3166194 - RNA, 19 nt, Human
uggcuaauguacugcauau

SEQ ID NO: 3166195 - RNA, 17 nt, Human
uggcuaauguacugcau

SEQ ID NO: 3166196 - RNA, 18 nt, Human
uggcuaagcaaaauguga

SEQ ID NO: 3166197 - RNA, 14 nt, Human
uggcuaaauucaug

SEQ ID NO: 3166198 - RNA, 13 nt, Human
aggcuccaggcag

SEQ ID NO: 3166199 - RNA, 15 nt, Human
aggcuccaggcagca

SEQ ID NO: 3166200 - RNA, 14 nt, Human
aggcuccaggcagc

SEQ ID NO: 3166201 - RNA, 17 nt, Human
aggcuccaggagcagcc

SEQ ID NO: 3166202 - RNA, 18 nt, Human
aggcuccaggagcagcca

SEQ ID NO: 3166203 - RNA, 19 nt, Human
aggcuccaggagcagccac

SEQ ID NO: 3166204 - RNA, 23 nt, Human
aggcuccaggagcagccacauuc

SEQ ID NO: 3166205 - RNA, 23 nt, Human
uggcuauaggugcuacaaaaaca

SEQ ID NO: 3166206 - RNA, 17 nt, Human
uggcucaagucuggccc

SEQ ID NO: 3166207 - RNA, 13 nt, Human
uggcucacgccug

SEQ ID NO: 3166208 - RNA, 23 nt, Human
agggaaaaaucaaguauuauaaa

SEQ ID NO: 3166209 - RNA, 22 nt, Human
agggaaaagauaaagaccagaa

SEQ ID NO: 3166210 - RNA, 15 nt, Human
agggaaacugccagc

SEQ ID NO: 3166211 - RNA, 14 nt, Human
agggaaacugccag

SEQ ID NO: 3166212 - RNA, 23 nt, Human
agggaaaauaaaaaaagaaaaaa

SEQ ID NO: 3166213 - RNA, 22 nt, Human
agggaaaauaaaaaaagaaaaa

SEQ ID NO: 3166214 - RNA, 15 nt, Human
agggaaacuaagauu

SEQ ID NO: 3166215 - RNA, 19 nt, Human
agggaaacuaagauucuuu

SEQ ID NO: 3166216 - RNA, 22 nt, Human
agggaaacuaagauucuuuuaa

SEQ ID NO: 3166217 - RNA, 11 nt, Human
agggaaaccuu

SEQ ID NO: 3166218 - RNA, 12 nt, Human
agggaaaccuuu

SEQ ID NO: 3166219 - RNA, 23 nt, Human
agggaaacugccagcaacgcagg

SEQ ID NO: 3166220 - RNA, 21 nt, Human
agggaaacugccagcaacgca

SEQ ID NO: 3166221 - RNA, 19 nt, Human
agggaaacugccagcaacg

SEQ ID NO: 3166222 - RNA, 16 nt, Human
agggaaacugccagca

SEQ ID NO: 3166223 - RNA, 21 nt, Human
aggcuuagucacugagacagc

SEQ ID NO: 3166224 - RNA, 22 nt, Human
aggcuuagucacugagacagcc

SEQ ID NO: 3166225 - RNA, 23 nt, Human
aggcuuagucacugagacagccc

SEQ ID NO: 3166226 - RNA, 22 nt, Human
aggcuuauauuuguguaauuuu

SEQ ID NO: 3166227 - RNA, 14 nt, Human
aggcuuauauuugu

SEQ ID NO: 3166228 - RNA, 16 nt, Human
aggcuuauaaaacaga

SEQ ID NO: 3166229 - RNA, 14 nt, Human
aggcuuauaaaaca

SEQ ID NO: 3166230 - RNA, 12 nt, Human
aggcuugcagaa

SEQ ID NO: 3166231 - RNA, 15 nt, Human
aggcuugcugcagau

SEQ ID NO: 3166232 - RNA, 21 nt, Human
aggcuugcccaguacauuuaa

SEQ ID NO: 3166233 - RNA, 23 nt, Human
aggcuucugguugaugccuguga

SEQ ID NO: 3166234 - RNA, 22 nt, Human
aggcugggggaagaagcucucu

SEQ ID NO: 3166235 - RNA, 14 nt, Human
aggcuggguucuga

SEQ ID NO: 3166236 - RNA, 17 nt, Human
aggcuggguucugaucc

SEQ ID NO: 3166237 - RNA, 21 nt, Human
aggcugggcuucaguggcagc

SEQ ID NO: 3166238 - RNA, 20 nt, Human
aggcugggcuucaguggcag

SEQ ID NO: 3166239 - RNA, 19 nt, Human
aggcugggcuucaguggca

SEQ ID NO: 3166240 - RNA, 18 nt, Human
aggcugggcuucaguggc

SEQ ID NO: 3166241 - RNA, 23 nt, Human
aggcugggcuucaguggcagcug

SEQ ID NO: 3166242 - RNA, 22 nt, Human
aggcugggcuucaguggcagcu

SEQ ID NO: 3166243 - RNA, 17 nt, Human
aggcugggggaagaagc

SEQ ID NO: 3166244 - RNA, 22 nt, Human
aggcugggcugggcacugcucu

SEQ ID NO: 3166245 - RNA, 21 nt, Human
aggcugggcugggcacugcuc

SEQ ID NO: 3166246 - RNA, 19 nt, Human
aggcugggcugggcacugc

SEQ ID NO: 3166247 - RNA, 20 nt, Human
ugggaacccaaguccaagca

SEQ ID NO: 3166248 - RNA, 19 nt, Human
aggcugggagagccuucca

SEQ ID NO: 3166249 - RNA, 16 nt, Human
aggcugggagagccuu

SEQ ID NO: 3166250 - RNA, 20 nt, Human
aggcugggagagccuuccag

SEQ ID NO: 3166251 - RNA, 21 nt, Human
aggcugggagagccuuccagg

SEQ ID NO: 3166252 - RNA, 22 nt, Human
aggcugggagagccuuccaggg

SEQ ID NO: 3166253 - RNA, 21 nt, Human
aggcugggcucccuucccacc

SEQ ID NO: 3166254 - RNA, 23 nt, Human
aggcugggcucccuucccaccuc

SEQ ID NO: 3166255 - RNA, 14 nt, Human
aggcugggcuucag

SEQ ID NO: 3166256 - RNA, 15 nt, Human
aggcugggcugggca

SEQ ID NO: 3166257 - RNA, 18 nt, Human
aggcugggcugggcacug

SEQ ID NO: 3166258 - RNA, 16 nt, Human
aggcugggcugggcac

SEQ ID NO: 3166259 - RNA, 14 nt, Human
aggcugggcucccu

SEQ ID NO: 3166260 - RNA, 18 nt, Human
aggcugggcucccuuccc

SEQ ID NO: 3166261 - RNA, 13 nt, Human
aggcugggcuccc

SEQ ID NO: 3166262 - RNA, 21 nt, Human
ugggcaacccccagccugcua

SEQ ID NO: 3166263 - RNA, 15 nt, Human
ugggcaaaagagugu

SEQ ID NO: 3166264 - RNA, 16 nt, Human
ugggcagaaggaagac

SEQ ID NO: 3166265 - RNA, 20 nt, Human
ugggcagaaggaagacuuca

SEQ ID NO: 3166266 - RNA, 13 nt, Human
ugggcagaaggaa

SEQ ID NO: 3166267 - RNA, 21 nt, Human
ugggcaauauucucuguacau

SEQ ID NO: 3166268 - RNA, 20 nt, Human
ugggcaauauucucuguaca

SEQ ID NO: 3166269 - RNA, 19 nt, Human
ugggcaauauucucuguac

SEQ ID NO: 3166270 - RNA, 18 nt, Human
ugggcaauauucucugua

SEQ ID NO: 3166271 - RNA, 17 nt, Human
ugggcaauauucucugu

SEQ ID NO: 3166272 - RNA, 13 nt, Human
ugggcaauauucu

SEQ ID NO: 3166273 - RNA, 21 nt, Human
ugggagaaccaaaaagaggcu

SEQ ID NO: 3166274 - RNA, 22 nt, Human
ugggaggaucucuugagccugg

SEQ ID NO: 3166275 - RNA, 18 nt, Human
ugggaggauugcuugagc

SEQ ID NO: 3166276 - RNA, 21 nt, Human
ugggaggauugcuugagcuca

SEQ ID NO: 3166277 - RNA, 19 nt, Human
ugggaggcugagaugggag

SEQ ID NO: 3166278 - RNA, 12 nt, Human
ugggagggagcu

SEQ ID NO: 3166279 - RNA, 19 nt, Human
ugggagggagcugagaaga

SEQ ID NO: 3166280 - RNA, 15 nt, Human
ugggaggcuggaguu

SEQ ID NO: 3166281 - RNA, 14 nt, Human
ugggacuggccucu

SEQ ID NO: 3166282 - RNA, 16 nt, Human
ugggacuggccucugc

SEQ ID NO: 3166283 - RNA, 20 nt, Human
ugggacugggaacagaacuc

SEQ ID NO: 3166284 - RNA, 16 nt, Human
ugggacuacaggugug

SEQ ID NO: 3166285 - RNA, 16 nt, Human
ugggacuacaggcacc

SEQ ID NO: 3166286 - RNA, 13 nt, Human
ugggacuggccuc

SEQ ID NO: 3166287 - RNA, 20 nt, Human
ugggacuaugcuuuucucaa

SEQ ID NO: 3166288 - RNA, 19 nt, Human
ugggacuaugcuuuucuca

SEQ ID NO: 3166289 - RNA, 18 nt, Human
ugggacuacaggcaccca

SEQ ID NO: 3166290 - RNA, 18 nt, Human
agggagcaucagugcccu

SEQ ID NO: 3166291 - RNA, 14 nt, Human
agggagcaguggcu

SEQ ID NO: 3166292 - RNA, 23 nt, Human
agggacuucugucuucacaacag

SEQ ID NO: 3166293 - RNA, 15 nt, Human
agggacuuggaagcu

SEQ ID NO: 3166294 - RNA, 19 nt, Human
agggacuuggaagcuccgc

SEQ ID NO: 3166295 - RNA, 18 nt, Human
agggacuuggaagcuccg

SEQ ID NO: 3166296 - RNA, 12 nt, Human
agggaaagacug

SEQ ID NO: 3166297 - RNA, 16 nt, Human
agggaaagacuggcaa

SEQ ID NO: 3166298 - RNA, 14 nt, Human
agggagagaagaua

SEQ ID NO: 3166299 - RNA, 13 nt, Human
agggagagaagau

SEQ ID NO: 3166300 - RNA, 23 nt, Human
agggagcagacuuuuaaagacuu

SEQ ID NO: 3166301 - RNA, 20 nt, Human
agggacuuggaagcuccgcu

SEQ ID NO: 3166302 - RNA, 19 nt, Human
agggcuguggccucccugc

SEQ ID NO: 3166303 - RNA, 18 nt, Human
agggcuggggcagccucu

SEQ ID NO: 3166304 - RNA, 14 nt, Human
ugggcucccuuccc

SEQ ID NO: 3166305 - RNA, 10 nt, Human
ugggcucagc

SEQ ID NO: 3166306 - RNA, 14 nt, Human
ugggcucagcacau

SEQ ID NO: 3166307 - RNA, 21 nt, Human
ugggcucccuucccaccucuc

SEQ ID NO: 3166308 - RNA, 15 nt, Human
ugggcucucgcggcc

SEQ ID NO: 3166309 - RNA, 16 nt, Human
agggcccaugggaggg

SEQ ID NO: 3166310 - RNA, 17 nt, Human
agggcccaugggaggga

SEQ ID NO: 3166311 - RNA, 18 nt, Human
agggcccaugggagggag

SEQ ID NO: 3166312 - RNA, 19 nt, Human
agggcccaugggagggagc

SEQ ID NO: 3166313 - RNA, 20 nt, Human
agggcuccagacacaugucc

SEQ ID NO: 3166314 - RNA, 15 nt, Human
agggcuccagacaca

SEQ ID NO: 3166315 - RNA, 14 nt, Human
agggcccagagagg

SEQ ID NO: 3166316 - RNA, 17 nt, Human
agggagggcuccagaca

SEQ ID NO: 3166317 - RNA, 19 nt, Human
agggagggcuccagacaca

SEQ ID NO: 3166318 - RNA, 12 nt, Human
agggagggcucc

SEQ ID NO: 3166319 - RNA, 13 nt, Human
agggagggccugg

SEQ ID NO: 3166320 - RNA, 15 nt, Human
agggagggccugggc

SEQ ID NO: 3166321 - RNA, 17 nt, Human
agggagggagggcucca

SEQ ID NO: 3166322 - RNA, 14 nt, Human
ugggcauucucucu

SEQ ID NO: 3166323 - RNA, 22 nt, Human
agggagggcuccagacacaugu

SEQ ID NO: 3166324 - RNA, 20 nt, Human
agggaguccgaaagggacuu

SEQ ID NO: 3166325 - RNA, 19 nt, Human
agggaggugugaggcagga

SEQ ID NO: 3166326 - RNA, 20 nt, Human
agggagugaguugauagcac

SEQ ID NO: 3166327 - RNA, 20 nt, Human
agggagugacagaggcagcc

SEQ ID NO: 3166328 - RNA, 23 nt, Human
agggaguccgaaagggacuugga

SEQ ID NO: 3166329 - RNA, 15 nt, Human
agggaguauucuaau

SEQ ID NO: 3166330 - RNA, 14 nt, Human
agggagucagcugu

SEQ ID NO: 3166331 - RNA, 13 nt, Human
agggcccagagag

SEQ ID NO: 3166332 - RNA, 12 nt, Human
agggcccagaga

SEQ ID NO: 3166333 - RNA, 17 nt, Human
agggcauggccaggugg

SEQ ID NO: 3166334 - RNA, 21 nt, Human
agggccaaaagcuucccuccc

SEQ ID NO: 3166335 - RNA, 19 nt, Human
agggccaaaagcuucccuc

SEQ ID NO: 3166336 - RNA, 18 nt, Human
agggccaaaagcuucccu

SEQ ID NO: 3166337 - RNA, 14 nt, Human
agggccaaaagcuu

SEQ ID NO: 3166338 - RNA, 19 nt, Human
agggcagugcaaggaggga

SEQ ID NO: 3166339 - RNA, 16 nt, Human
agggcagugcaaggag

SEQ ID NO: 3166340 - RNA, 13 nt, Human
agggaguuuuuga

SEQ ID NO: 3166341 - RNA, 17 nt, Human
agggcacugguggcccg

SEQ ID NO: 3166342 - RNA, 12 nt, Human
uguuaauaucac

SEQ ID NO: 3166343 - RNA, 13 nt, Human
uguuaauaucacu

SEQ ID NO: 3166344 - RNA, 17 nt, Human
uguuaauaucacucauu

SEQ ID NO: 3166345 - RNA, 18 nt, Human
uguuaauaucacucauua

SEQ ID NO: 3166346 - RNA, 19 nt, Human
uguuaauaucacucauuaa

SEQ ID NO: 3166347 - RNA, 21 nt, Human
uguuaauaucacucauuaauu

SEQ ID NO: 3166348 - RNA, 22 nt, Human
uguuaauaucacucauuaauua

SEQ ID NO: 3166349 - RNA, 13 nt, Human
uguuaagcaucua

SEQ ID NO: 3166350 - RNA, 22 nt, Human
uguuaaguugauggugaugaaa

SEQ ID NO: 3166351 - RNA, 15 nt, Human
uguuacaauguaacu

SEQ ID NO: 3166352 - RNA, 18 nt, Human
uguuacacuuuuuggaag

SEQ ID NO: 3166353 - RNA, 19 nt, Human
uguguuaaucuuaauguau

SEQ ID NO: 3166354 - RNA, 22 nt, Human
uguuaauaaagugcacugccac

SEQ ID NO: 3166355 - RNA, 14 nt, Human
uguuaacuuauuca

SEQ ID NO: 3166356 - RNA, 15 nt, Human
uguuaacuuauucaa

SEQ ID NO: 3166357 - RNA, 17 nt, Human
uguuaacuuauucaaag

SEQ ID NO: 3166358 - RNA, 18 nt, Human
uguuaacuuauucaaaga

SEQ ID NO: 3166359 - RNA, 23 nt, Human
uguuaacuuauucaaagagaaaa

SEQ ID NO: 3166360 - RNA, 16 nt, Human
uguuaacugagugccu

SEQ ID NO: 3166361 - RNA, 22 nt, Human
uguuaacugagugccuuuuggu

SEQ ID NO: 3166362 - RNA, 14 nt, Human
uguguuaauuuaag

SEQ ID NO: 3166363 - RNA, 18 nt, Human
uguguuaauuuaaguuuu

SEQ ID NO: 3166364 - RNA, 13 nt, Human
uguguuaauuuaa

SEQ ID NO: 3166365 - RNA, 20 nt, Human
aguggacuggaggagcuggg

SEQ ID NO: 3166366 - RNA, 14 nt, Human
uguuacaguaaugu

SEQ ID NO: 3166367 - RNA, 17 nt, Human
uguuacaguaaugucau

SEQ ID NO: 3166368 - RNA, 21 nt, Human
uguuacaguaaugucauaaag

SEQ ID NO: 3166369 - RNA, 21 nt, Human
aguggacccugaaaugugugu

SEQ ID NO: 3166370 - RNA, 19 nt, Human
aguggacccugaaaugugu

SEQ ID NO: 3166371 - RNA, 17 nt, Human
aguggauggaaggggcu

SEQ ID NO: 3166372 - RNA, 19 nt, Human
aguggauugcucaucucag

SEQ ID NO: 3166373 - RNA, 22 nt, Human
aguggcaaagcuguucuuccug

SEQ ID NO: 3166374 - RNA, 21 nt, Human
aguggcaccugucugcuccag

SEQ ID NO: 3166375 - RNA, 17 nt, Human
aguggcaccugucugcu

SEQ ID NO: 3166376 - RNA, 16 nt, Human
aguggcaccugucugc

SEQ ID NO: 3166377 - RNA, 13 nt, Human
aguggcaccuguc

SEQ ID NO: 3166378 - RNA, 22 nt, Human
aguggcaccugucugcuccagc

SEQ ID NO: 3166379 - RNA, 16 nt, Human
agugggguagguuggg

SEQ ID NO: 3166380 - RNA, 22 nt, Human
aguggggggaacgcccacuucc

SEQ ID NO: 3166381 - RNA, 19 nt, Human
aguggggggaacgcccacu

SEQ ID NO: 3166382 - RNA, 18 nt, Human
agugggggaucacagccu

SEQ ID NO: 3166383 - RNA, 18 nt, Human
aguggggggaacgcccac

SEQ ID NO: 3166384 - RNA, 17 nt, Human
aguggggggaacgccca

SEQ ID NO: 3166385 - RNA, 22 nt, Human
agugggcccaaugcacuuuguu

SEQ ID NO: 3166386 - RNA, 14 nt, Human
aguggggaggggcu

SEQ ID NO: 3166387 - RNA, 15 nt, Human
aguggggacagagca

SEQ ID NO: 3166388 - RNA, 15 nt, Human
ugugguuuucuguuu

SEQ ID NO: 3166389 - RNA, 18 nt, Human
ugugguuuucuguuucua

SEQ ID NO: 3166390 - RNA, 12 nt, Human
ugugguuucauu

SEQ ID NO: 3166391 - RNA, 12 nt, Human
ugugguuucuuu

SEQ ID NO: 3166392 - RNA, 16 nt, Human
ugugguuucuuuuuga

SEQ ID NO: 3166393 - RNA, 13 nt, Human
ugugguuuggaau

SEQ ID NO: 3166394 - RNA, 18 nt, Human
ugugguuuggaauauuaa

SEQ ID NO: 3166395 - RNA, 20 nt, Human
ugugucagguggggcagcuu

SEQ ID NO: 3166396 - RNA, 15 nt, Human
ugugucaguuuaugu

SEQ ID NO: 3166397 - RNA, 13 nt, Human
ugugucaguuuau

SEQ ID NO: 3166398 - RNA, 15 nt, Human
uguguaaauuauuga

SEQ ID NO: 3166399 - RNA, 20 nt, Human
ugugucaguuuauguuuugg

SEQ ID NO: 3166400 - RNA, 19 nt, Human
ugugucaguuuauguuuug

SEQ ID NO: 3166401 - RNA, 18 nt, Human
ugugucaguuuauguuuu

SEQ ID NO: 3166402 - RNA, 22 nt, Human
ugugucaucuagcauuagguau

SEQ ID NO: 3166403 - RNA, 23 nt, Human
agugccccgucuacagcuccccc

SEQ ID NO: 3166404 - RNA, 21 nt, Human
agugccccgucuacagcuccc

SEQ ID NO: 3166405 - RNA, 16 nt, Human
agugcccuccaggaua

SEQ ID NO: 3166406 - RNA, 22 nt, Human
ugugucucuugguccugcugca

SEQ ID NO: 3166407 - RNA, 16 nt, Human
ugugucugccacauua

SEQ ID NO: 3166408 - RNA, 18 nt, Human
uguguguuguguguggga

SEQ ID NO: 3166409 - RNA, 18 nt, Human
uguguguugcuuauguug

SEQ ID NO: 3166410 - RNA, 12 nt, Human
uguguguugcuu

SEQ ID NO: 3166411 - RNA, 15 nt, Human
uguguccggcccagu

SEQ ID NO: 3166412 - RNA, 14 nt, Human
uguguccuaguucu

SEQ ID NO: 3166413 - RNA, 15 nt, Human
uguguccaccguugu

SEQ ID NO: 3166414 - RNA, 17 nt, Human
aguguggcaguuuggca

SEQ ID NO: 3166415 - RNA, 16 nt, Human
aguguggcaguuuggc

SEQ ID NO: 3166416 - RNA, 20 nt, Human
agugugguguuuccuggcac

SEQ ID NO: 3166417 - RNA, 18 nt, Human
aguguggccucuucugag

SEQ ID NO: 3166418 - RNA, 21 nt, Human
agugugccugaagucccagau

SEQ ID NO: 3166419 - RNA, 14 nt, Human
agugugcuaaaaau

SEQ ID NO: 3166420 - RNA, 16 nt, Human
agugugcuaaaaauga

SEQ ID NO: 3166421 - RNA, 19 nt, Human
aguguggaaauuaagaaga

SEQ ID NO: 3166422 - RNA, 17 nt, Human
aguguggaaauuaagaa

SEQ ID NO: 3166423 - RNA, 20 nt, Human
agugugccugaagucccaga

SEQ ID NO: 3166424 - RNA, 20 nt, Human
agugugacugaucucucgug

SEQ ID NO: 3166425 - RNA, 9 nt, Human
aguguguaa

SEQ ID NO: 3166426 - RNA, 13 nt, Human
agugugguuucuu

SEQ ID NO: 3166427 - RNA, 21 nt, Human
agugugguuucuuuuugaauc

SEQ ID NO: 3166428 - RNA, 14 nt, Human
agugugguuucuuu

SEQ ID NO: 3166429 - RNA, 22 nt, Human
agugugguguuuccuggcacug

SEQ ID NO: 3166430 - RNA, 22 nt, Human
agugugguuucuuuuugaaucu

SEQ ID NO: 3166431 - RNA, 12 nt, Human
agugugguuuuc

SEQ ID NO: 3166432 - RNA, 16 nt, Human
agugugguuuucuguu

SEQ ID NO: 3166433 - RNA, 17 nt, Human
agugugguuuucuguuu

SEQ ID NO: 3166434 - RNA, 17 nt, Human
uguuaugacuccagaau

SEQ ID NO: 3166435 - RNA, 13 nt, Human
uguuaugacucca

SEQ ID NO: 3166436 - RNA, 18 nt, Human
uguuccuagugaaagagg

SEQ ID NO: 3166437 - RNA, 21 nt, Human
uguuccuauauuccagguuua

SEQ ID NO: 3166438 - RNA, 21 nt, Human
uguuccugccuccuugauauu

SEQ ID NO: 3166439 - RNA, 10 nt, Human
uguuccuggc

SEQ ID NO: 3166440 - RNA, 21 nt, Human
uguucgauuacgucaucaaaa

SEQ ID NO: 3166441 - RNA, 18 nt, Human
uguugcauagguuagaua

SEQ ID NO: 3166442 - RNA, 23 nt, Human
uguugcacugaaguuugauaaau

SEQ ID NO: 3166443 - RNA, 22 nt, Human
uguugcacugaaguuugauaaa

SEQ ID NO: 3166444 - RNA, 19 nt, Human
uguugcacugaaguuugau

SEQ ID NO: 3166445 - RNA, 16 nt, Human
uguugccaagagcccg

SEQ ID NO: 3166446 - RNA, 21 nt, Human
uguugccaaaaugguggccug

SEQ ID NO: 3166447 - RNA, 15 nt, Human
uguucuaagaaguga

SEQ ID NO: 3166448 - RNA, 15 nt, Human
uguugcacugaaguu

SEQ ID NO: 3166449 - RNA, 13 nt, Human
uguugcacugaag

SEQ ID NO: 3166450 - RNA, 18 nt, Human
uguugccacuuuccaagu

SEQ ID NO: 3166451 - RNA, 16 nt, Human
uguugccacuuuccaa

SEQ ID NO: 3166452 - RNA, 20 nt, Human
uguugcccaggcuggcgugc

SEQ ID NO: 3166453 - RNA, 23 nt, Human
uguugcccaggcuggcgugcagu

SEQ ID NO: 3166454 - RNA, 23 nt, Human
uguugccuauaagccaaaauuaa

SEQ ID NO: 3166455 - RNA, 19 nt, Human
agugugugcauaauagcua

SEQ ID NO: 3166456 - RNA, 17 nt, Human
uguugccuauaagccaa

SEQ ID NO: 3166457 - RNA, 18 nt, Human
uguugccuauaagccaaa

SEQ ID NO: 3166458 - RNA, 22 nt, Human
uguugccuauaagccaaaauua

SEQ ID NO: 3166459 - RNA, 21 nt, Human
aguguuccgugguuaaacucg

SEQ ID NO: 3166460 - RNA, 16 nt, Human
aguguucuuucucuuu

SEQ ID NO: 3166461 - RNA, 16 nt, Human
aguguucuguuacaaa

SEQ ID NO: 3166462 - RNA, 18 nt, Human
aguguucuguuacaaaau

SEQ ID NO: 3166463 - RNA, 17 nt, Human
aguguucuguuacaaaa

SEQ ID NO: 3166464 - RNA, 23 nt, Human
aguguucuguuacaaaauguaac

SEQ ID NO: 3166465 - RNA, 22 nt, Human
aguguucuguuacaaaauguaa

SEQ ID NO: 3166466 - RNA, 21 nt, Human
aguguucuguuacaaaaugua

SEQ ID NO: 3166467 - RNA, 20 nt, Human
aguguucuguuacaaaaugu

SEQ ID NO: 3166468 - RNA, 15 nt, Human
aguguucuguuacaa

SEQ ID NO: 3166469 - RNA, 22 nt, Human
aguguugggguuugguuuuguu

SEQ ID NO: 3166470 - RNA, 23 nt, Human
aguuacuaucaugucaaacguga

SEQ ID NO: 3166471 - RNA, 21 nt, Human
aguuagagaacuaaacuaguu

SEQ ID NO: 3166472 - RNA, 17 nt, Human
aguuagauucacuuuga

SEQ ID NO: 3166473 - RNA, 14 nt, Human
aguuagagaaucug

SEQ ID NO: 3166474 - RNA, 23 nt, Human
aguuagccuuuaucuaccaacuu

SEQ ID NO: 3166475 - RNA, 16 nt, Human
aguuagccuuuaucua

SEQ ID NO: 3166476 - RNA, 18 nt, Human
agugccaggauggaauga

SEQ ID NO: 3166477 - RNA, 18 nt, Human
agugcauguacuaucuua

SEQ ID NO: 3166478 - RNA, 14 nt, Human
agugcaugcugucc

SEQ ID NO: 3166479 - RNA, 16 nt, Human
agugcaugcugucccu

SEQ ID NO: 3166480 - RNA, 17 nt, Human
agugcagugagccgaga

SEQ ID NO: 3166481 - RNA, 16 nt, Human
agugcagcagggcagu

SEQ ID NO: 3166482 - RNA, 15 nt, Human
agugcagcagggcag

SEQ ID NO: 3166483 - RNA, 19 nt, Human
agugcaguggcacaaucuu

SEQ ID NO: 3166484 - RNA, 21 nt, Human
agugcaguggcacaaucuugg

SEQ ID NO: 3166485 - RNA, 22 nt, Human
agugcaguggcgaaaucccugc

SEQ ID NO: 3166486 - RNA, 21 nt, Human
agugcauaguuguagacaaag

SEQ ID NO: 3166487 - RNA, 22 nt, Human
agugcauaguuguagacaaagu

SEQ ID NO: 3166488 - RNA, 12 nt, Human
agugcagaacug

SEQ ID NO: 3166489 - RNA, 12 nt, Human
agugcacugauu

SEQ ID NO: 3166490 - RNA, 14 nt, Human
agugaggaugucug

SEQ ID NO: 3166491 - RNA, 12 nt, Human
agugaggccacu

SEQ ID NO: 3166492 - RNA, 16 nt, Human
agugaggccacugaag

SEQ ID NO: 3166493 - RNA, 17 nt, Human
agugaggccacugaaga

SEQ ID NO: 3166494 - RNA, 18 nt, Human
agugaggccacugaagag

SEQ ID NO: 3166495 - RNA, 12 nt, Human
agugaggcucug

SEQ ID NO: 3166496 - RNA, 13 nt, Human
agugaggcucugc

SEQ ID NO: 3166497 - RNA, 16 nt, Human
agugaggaugaaaaaa

SEQ ID NO: 3166498 - RNA, 20 nt, Human
agugaggaaaucaaagugcu

SEQ ID NO: 3166499 - RNA, 17 nt, Human
agugaggaauggcagug

SEQ ID NO: 3166500 - RNA, 15 nt, Human
agugaggaaaucaaa

SEQ ID NO: 3166501 - RNA, 17 nt, Human
agugaggaaaucaaagu

SEQ ID NO: 3166502 - RNA, 14 nt, Human
agugaggaaaucaa

SEQ ID NO: 3166503 - RNA, 12 nt, Human
agugcaaaaggc

SEQ ID NO: 3166504 - RNA, 23 nt, Human
agugcaaaaggcuugcagaacuu

SEQ ID NO: 3166505 - RNA, 14 nt, Human
uguggaugauaaaa

SEQ ID NO: 3166506 - RNA, 15 nt, Human
ugugcuguguuugcu

SEQ ID NO: 3166507 - RNA, 23 nt, Human
agugagcugguuuuuagcggaga

SEQ ID NO: 3166508 - RNA, 18 nt, Human
ugugcugcccugcccacc

SEQ ID NO: 3166509 - RNA, 19 nt, Human
ugugcugcccugcccaccu

SEQ ID NO: 3166510 - RNA, 20 nt, Human
ugugcugcccugcccaccug

SEQ ID NO: 3166511 - RNA, 14 nt, Human
ugugccgagcccuu

SEQ ID NO: 3166512 - RNA, 23 nt, Human
ugugccuaaauaaguuauaaaga

SEQ ID NO: 3166513 - RNA, 16 nt, Human
ugugauucaaugccuc

SEQ ID NO: 3166514 - RNA, 14 nt, Human
ugugauucaaugcc

SEQ ID NO: 3166515 - RNA, 14 nt, Human
ugugcucuccaagc

SEQ ID NO: 3166516 - RNA, 19 nt, Human
ugugcucuccaagcccagu

SEQ ID NO: 3166517 - RNA, 19 nt, Human
ugugcucuggacaggcaug

SEQ ID NO: 3166518 - RNA, 16 nt, Human
ugugcucaucagaaac

SEQ ID NO: 3166519 - RNA, 13 nt, Human
ugugcugcagugc

SEQ ID NO: 3166520 - RNA, 19 nt, Human
ugugcugagucugaaggcu

SEQ ID NO: 3166521 - RNA, 18 nt, Human
ugugcugagucugaaggc

SEQ ID NO: 3166522 - RNA, 20 nt, Human
agugaacaaauuuacagaga

SEQ ID NO: 3166523 - RNA, 21 nt, Human
agugaacaaauuuacagagac

SEQ ID NO: 3166524 - RNA, 18 nt, Human
agucuuuagcuauuacug

SEQ ID NO: 3166525 - RNA, 22 nt, Human
agugaacaaauuuacagagaca

SEQ ID NO: 3166526 - RNA, 23 nt, Human
agugaacaaauuuacagagacag

SEQ ID NO: 3166527 - RNA, 16 nt, Human
agugaacuugggccac

SEQ ID NO: 3166528 - RNA, 20 nt, Human
agugaacauaauucuuauua

SEQ ID NO: 3166529 - RNA, 21 nt, Human
agugacugauggcuaauguac

SEQ ID NO: 3166530 - RNA, 14 nt, Human
agugagcacuaagg

SEQ ID NO: 3166531 - RNA, 14 nt, Human
agugagagcugggu

SEQ ID NO: 3166532 - RNA, 16 nt, Human
agugagaaaaugaaca

SEQ ID NO: 3166533 - RNA, 17 nt, Human
agugagaggggaggcca

SEQ ID NO: 3166534 - RNA, 17 nt, Human
agugagaaaacugugac

SEQ ID NO: 3166535 - RNA, 20 nt, Human
agugacuuuucaaguauuua

SEQ ID NO: 3166536 - RNA, 19 nt, Human
agugacugaacgauccuuc

SEQ ID NO: 3166537 - RNA, 12 nt, Human
agugagcugguu

SEQ ID NO: 3166538 - RNA, 19 nt, Human
agugagaggggaggccaag

SEQ ID NO: 3166539 - RNA, 22 nt, Human
ugugaugaugaaaugaggucag

SEQ ID NO: 3166540 - RNA, 19 nt, Human
ugugaugagaggaaaucac

SEQ ID NO: 3166541 - RNA, 18 nt, Human
ugugaugagaggaaauca

SEQ ID NO: 3166542 - RNA, 16 nt, Human
ugugacugaucucucg

SEQ ID NO: 3166543 - RNA, 19 nt, Human
ugugacuucagcucuguuu

SEQ ID NO: 3166544 - RNA, 18 nt, Human
ugugacuucagcucuguu

SEQ ID NO: 3166545 - RNA, 15 nt, Human
ugucuccuacugagg

SEQ ID NO: 3166546 - RNA, 20 nt, Human
ugugacuuugaaaauauaua

SEQ ID NO: 3166547 - RNA, 14 nt, Human
ugugacuuugaaaa

SEQ ID NO: 3166548 - RNA, 13 nt, Human
ugugacuuugaaa

SEQ ID NO: 3166549 - RNA, 18 nt, Human
ugugacuuccuuggaaau

SEQ ID NO: 3166550 - RNA, 20 nt, Human
ugugagaaaaccccuuccca

SEQ ID NO: 3166551 - RNA, 23 nt, Human
ugugacuuuugcuuuaauuccau

SEQ ID NO: 3166552 - RNA, 17 nt, Human
ugugacuuuugcuuuaa

SEQ ID NO: 3166553 - RNA, 16 nt, Human
ugugacuuuugcuuua

SEQ ID NO: 3166554 - RNA, 14 nt, Human
ugugacuuuugcuu

SEQ ID NO: 3166555 - RNA, 11 nt, Human
ugugaggaagc

SEQ ID NO: 3166556 - RNA, 16 nt, Human
ugugagcugcugccau

SEQ ID NO: 3166557 - RNA, 18 nt, Human
agucucccucccuugggg

SEQ ID NO: 3166558 - RNA, 12 nt, Human
ugugagcugcac

SEQ ID NO: 3166559 - RNA, 20 nt, Human
ugugagcugcaccagguaga

SEQ ID NO: 3166560 - RNA, 15 nt, Human
ugugagcugcaccag

SEQ ID NO: 3166561 - RNA, 22 nt, Human
ugugagaaaaccccuucccauu

SEQ ID NO: 3166562 - RNA, 16 nt, Human
agucuuagauguauau

SEQ ID NO: 3166563 - RNA, 14 nt, Human
agucuuagauguau

SEQ ID NO: 3166564 - RNA, 13 nt, Human
agucuuagaugua

SEQ ID NO: 3166565 - RNA, 21 nt, Human
agucuuagaucauaguuuuau

SEQ ID NO: 3166566 - RNA, 16 nt, Human
agucucuuuuuuacaa

SEQ ID NO: 3166567 - RNA, 18 nt, Human
agucucuuuuuuacaaag

SEQ ID NO: 3166568 - RNA, 17 nt, Human
agucucuuuuuuacaaa

SEQ ID NO: 3166569 - RNA, 22 nt, Human
agucucuuuuuuacaaaggcug

SEQ ID NO: 3166570 - RNA, 21 nt, Human
agucucuuuuuuacaaaggcu

SEQ ID NO: 3166571 - RNA, 20 nt, Human
agucucuuuuuuacaaaggc

SEQ ID NO: 3166572 - RNA, 19 nt, Human
agucucuuuuuuacaaagg

SEQ ID NO: 3166573 - RNA, 16 nt, Human
agucucuugauucaua

SEQ ID NO: 3166574 - RNA, 17 nt, Human
agucucuugauucauaa

SEQ ID NO: 3166575 - RNA, 21 nt, Human
agucucuucuccacuggaugg

SEQ ID NO: 3166576 - RNA, 18 nt, Human
agucucuucuccacugga

SEQ ID NO: 3166577 - RNA, 19 nt, Human
agucucgcucuguugccca

SEQ ID NO: 3166578 - RNA, 23 nt, Human
agucucgcucuguugcccaggcu

SEQ ID NO: 3166579 - RNA, 21 nt, Human
agucucgcucuguugcccagg

SEQ ID NO: 3166580 - RNA, 19 nt, Human
agucucuucuccacuggau

SEQ ID NO: 3166581 - RNA, 15 nt, Human
aguacauuuuuugaa

SEQ ID NO: 3166582 - RNA, 13 nt, Human
aguacauuuuuug

SEQ ID NO: 3166583 - RNA, 22 nt, Human
aguacauuuuuugaaaugcuga

SEQ ID NO: 3166584 - RNA, 21 nt, Human
aguacauuuuuugaaaugcug

SEQ ID NO: 3166585 - RNA, 20 nt, Human
aguacauuuuuugaaaugcu

SEQ ID NO: 3166586 - RNA, 18 nt, Human
aguacauuuuuugaaaug

SEQ ID NO: 3166587 - RNA, 16 nt, Human
aguaccagccccaccc

SEQ ID NO: 3166588 - RNA, 13 nt, Human
aguagauuucaug

SEQ ID NO: 3166589 - RNA, 20 nt, Human
aguagcaaaugagacagcag

SEQ ID NO: 3166590 - RNA, 15 nt, Human
aguagcacaggcuga

SEQ ID NO: 3166591 - RNA, 14 nt, Human
aguagcacaggcug

SEQ ID NO: 3166592 - RNA, 13 nt, Human
aguagcaggcccg

SEQ ID NO: 3166593 - RNA, 22 nt, Human
aguagcacaggcugagugcagg

SEQ ID NO: 3166594 - RNA, 21 nt, Human
aguagcacaggcugagugcag

SEQ ID NO: 3166595 - RNA, 16 nt, Human
aguagcacaggcugag

SEQ ID NO: 3166596 - RNA, 20 nt, Human
uguaguccuagcuacucagg

SEQ ID NO: 3166597 - RNA, 17 nt, Human
uguaggguuauaauaau

SEQ ID NO: 3166598 - RNA, 16 nt, Human
uguaggguuauaauaa

SEQ ID NO: 3166599 - RNA, 13 nt, Human
uguauaucguuau

SEQ ID NO: 3166600 - RNA, 19 nt, Human
uguauaucguuaucacugu

SEQ ID NO: 3166601 - RNA, 18 nt, Human
uguauaugaacuuaacau

SEQ ID NO: 3166602 - RNA, 22 nt, Human
uguauauauuuccuauauuguu

SEQ ID NO: 3166603 - RNA, 18 nt, Human
uguauauauuuccuauau

SEQ ID NO: 3166604 - RNA, 20 nt, Human
uguauauauaccugcgcuug

SEQ ID NO: 3166605 - RNA, 21 nt, Human
uguauaguauuugaaaacaga

SEQ ID NO: 3166606 - RNA, 20 nt, Human
uguauaguauuugaaaacag

SEQ ID NO: 3166607 - RNA, 19 nt, Human
uguauaguauuugaaaaca

SEQ ID NO: 3166608 - RNA, 17 nt, Human
uguauaguauuugaaaa

SEQ ID NO: 3166609 - RNA, 16 nt, Human
uguauaguauuugaaa

SEQ ID NO: 3166610 - RNA, 15 nt, Human
uguauaguauuugaa

SEQ ID NO: 3166611 - RNA, 12 nt, Human
uguauauaaaaa

SEQ ID NO: 3166612 - RNA, 14 nt, Human
uguauauaaaaaug

SEQ ID NO: 3166613 - RNA, 16 nt, Human
uguauauaaaaauggc

SEQ ID NO: 3166614 - RNA, 13 nt, Human
uguauaguuaugu

SEQ ID NO: 3166615 - RNA, 14 nt, Human
uguauaguuaugua

SEQ ID NO: 3166616 - RNA, 15 nt, Human
uguauaguuauguaa

SEQ ID NO: 3166617 - RNA, 16 nt, Human
uguauaguuauguaaa

SEQ ID NO: 3166618 - RNA, 17 nt, Human
uguauaguuauguaaau

SEQ ID NO: 3166619 - RNA, 18 nt, Human
uguauaguuauguaaaua

SEQ ID NO: 3166620 - RNA, 19 nt, Human
uguauaguuauguaaauaa

SEQ ID NO: 3166621 - RNA, 22 nt, Human
aguaauugcauuugcuuuugua

SEQ ID NO: 3166622 - RNA, 18 nt, Human
aguaauugcauuugcuuu

SEQ ID NO: 3166623 - RNA, 17 nt, Human
aguaauugcauuugcuu

SEQ ID NO: 3166624 - RNA, 16 nt, Human
aguaauugcauuugcu

SEQ ID NO: 3166625 - RNA, 13 nt, Human
aguaaucuguaua

SEQ ID NO: 3166626 - RNA, 14 nt, Human
aguaaucuguauaa

SEQ ID NO: 3166627 - RNA, 15 nt, Human
aguaaucuguauaau

SEQ ID NO: 3166628 - RNA, 19 nt, Human
aguaaucuguauaauacuu

SEQ ID NO: 3166629 - RNA, 22 nt, Human
aguaaucuguauaauacuuugu

SEQ ID NO: 3166630 - RNA, 23 nt, Human
aguaaucuguauaauacuuugua

SEQ ID NO: 3166631 - RNA, 12 nt, Human
aguacagaauuu

SEQ ID NO: 3166632 - RNA, 14 nt, Human
aguacagaauuuga

SEQ ID NO: 3166633 - RNA, 16 nt, Human
aguacagaauuugaau

SEQ ID NO: 3166634 - RNA, 17 nt, Human
aguacagaauuugaauu

SEQ ID NO: 3166635 - RNA, 18 nt, Human
aguaauuguuccagagac

SEQ ID NO: 3166636 - RNA, 16 nt, Human
aguaauuguuccagag

SEQ ID NO: 3166637 - RNA, 23 nt, Human
aguaauugguuaucaugggaaag

SEQ ID NO: 3166638 - RNA, 21 nt, Human
uguacauggaauaacauguaa

SEQ ID NO: 3166639 - RNA, 14 nt, Human
agguuuuuuuaaug

SEQ ID NO: 3166640 - RNA, 21 nt, Human
uguacauguauuaaauuacau

SEQ ID NO: 3166641 - RNA, 20 nt, Human
uguacauguauuaaauuaca

SEQ ID NO: 3166642 - RNA, 19 nt, Human
uguacaugggacuaugcuu

SEQ ID NO: 3166643 - RNA, 14 nt, Human
uguacaugggacua

SEQ ID NO: 3166644 - RNA, 14 nt, Human
uguacauguauuaa

SEQ ID NO: 3166645 - RNA, 13 nt, Human
uguacauguauua

SEQ ID NO: 3166646 - RNA, 23 nt, Human
uguacaugggacuaugcuuuucu

SEQ ID NO: 3166647 - RNA, 20 nt, Human
uguacaugggacuaugcuuu

SEQ ID NO: 3166648 - RNA, 14 nt, Human
aguaauaaagacuc

SEQ ID NO: 3166649 - RNA, 15 nt, Human
aguaaguuaauguau

SEQ ID NO: 3166650 - RNA, 19 nt, Human
aguaaguuaauguauauaa

SEQ ID NO: 3166651 - RNA, 15 nt, Human
aguaagucucaaggu

SEQ ID NO: 3166652 - RNA, 23 nt, Human
aguaagucuugccuauauuuucc

SEQ ID NO: 3166653 - RNA, 16 nt, Human
aguaagucucaaggua

SEQ ID NO: 3166654 - RNA, 19 nt, Human
aguaaaaccacagcaguug

SEQ ID NO: 3166655 - RNA, 19 nt, Human
aguaaaaagaaaacaaaac

SEQ ID NO: 3166656 - RNA, 17 nt, Human
aguaaaaccacagcagu

SEQ ID NO: 3166657 - RNA, 16 nt, Human
aguaaaaccacagcag

SEQ ID NO: 3166658 - RNA, 14 nt, Human
aggugugcaagaga

SEQ ID NO: 3166659 - RNA, 13 nt, Human
agguucuuugugu

SEQ ID NO: 3166660 - RNA, 20 nt, Human
agguugaagaccuaaccagg

SEQ ID NO: 3166661 - RNA, 23 nt, Human
agguugaagaccuaaccagggcc

SEQ ID NO: 3166662 - RNA, 22 nt, Human
agguugaagaccuaaccagggc

SEQ ID NO: 3166663 - RNA, 14 nt, Human
agguugcagugagc

SEQ ID NO: 3166664 - RNA, 14 nt, Human
agguugaagcacca

SEQ ID NO: 3166665 - RNA, 15 nt, Human
agguugaauaauaua

SEQ ID NO: 3166666 - RNA, 22 nt, Human
aggugugagucaccaagcccag

SEQ ID NO: 3166667 - RNA, 21 nt, Human
aggugugagucaccaagccca

SEQ ID NO: 3166668 - RNA, 16 nt, Human
aggugucccugcacuu

SEQ ID NO: 3166669 - RNA, 20 nt, Human
aggugugagucaccaagccc

SEQ ID NO: 3166670 - RNA, 12 nt, Human
aggugggaggau

SEQ ID NO: 3166671 - RNA, 15 nt, Human
ugggcugcccuggug

SEQ ID NO: 3166672 - RNA, 14 nt, Human
ugggcugcccuggu

SEQ ID NO: 3166673 - RNA, 13 nt, Human
ugggcugcccugg

SEQ ID NO: 3166674 - RNA, 13 nt, Human
ugggcucugcuga

SEQ ID NO: 3166675 - RNA, 12 nt, Human
ugggcucugcug

SEQ ID NO: 3166676 - RNA, 15 nt, Human
ugggcucugcugagu

SEQ ID NO: 3166677 - RNA, 18 nt, Human
uguaagggaaacugccag

SEQ ID NO: 3166678 - RNA, 13 nt, Human
uguaagggaaacu

SEQ ID NO: 3166679 - RNA, 22 nt, Human
uguaaggccaaguacacugaga

SEQ ID NO: 3166680 - RNA, 14 nt, Human
agguuucuauuuuc

SEQ ID NO: 3166681 - RNA, 20 nt, Human
agguuggcaaaaaggcagga

SEQ ID NO: 3166682 - RNA, 17 nt, Human
agguuuauuuuucuguu

SEQ ID NO: 3166683 - RNA, 19 nt, Human
uguaagggaaacugccagc

SEQ ID NO: 3166684 - RNA, 18 nt, Human
uguaauuaaguacuaugu

SEQ ID NO: 3166685 - RNA, 21 nt, Human
uguaauuaaguacuauguauc

SEQ ID NO: 3166686 - RNA, 19 nt, Human
uguaauuaaguacuaugua

SEQ ID NO: 3166687 - RNA, 17 nt, Human
uguaauuaaguacuaug

SEQ ID NO: 3166688 - RNA, 16 nt, Human
uguaauuauuugaaug

SEQ ID NO: 3166689 - RNA, 15 nt, Human
uguaauuauuugaau

SEQ ID NO: 3166690 - RNA, 13 nt, Human
uguaauugauugu

SEQ ID NO: 3166691 - RNA, 20 nt, Human
uguaauuuuucuguauagac

SEQ ID NO: 3166692 - RNA, 19 nt, Human
uguaauuuuucuguauaga

SEQ ID NO: 3166693 - RNA, 15 nt, Human
uguaauuuuucugua

SEQ ID NO: 3166694 - RNA, 17 nt, Human
uguaauuuuucuguaua

SEQ ID NO: 3166695 - RNA, 16 nt, Human
uguaauuuuucuguau

SEQ ID NO: 3166696 - RNA, 20 nt, Human
uguaauuuuguguaagaaau

SEQ ID NO: 3166697 - RNA, 16 nt, Human
uguaauuuuguguaag

SEQ ID NO: 3166698 - RNA, 15 nt, Human
uguaauuuuguguaa

SEQ ID NO: 3166699 - RNA, 21 nt, Human
agucaguugcucaaaaagaaa

SEQ ID NO: 3166700 - RNA, 23 nt, Human
agucaguugcucaaaaagaaauc

SEQ ID NO: 3166701 - RNA, 16 nt, Human
agucccaccuuggcug

SEQ ID NO: 3166702 - RNA, 15 nt, Human
agucccaccuuggcu

SEQ ID NO: 3166703 - RNA, 19 nt, Human
agucccaccuuggcugcag

SEQ ID NO: 3166704 - RNA, 18 nt, Human
agucccaccuuggcugca

SEQ ID NO: 3166705 - RNA, 16 nt, Human
agucccagcagccagc

SEQ ID NO: 3166706 - RNA, 15 nt, Human
agucccagcagccag

SEQ ID NO: 3166707 - RNA, 14 nt, Human
agucccagcagcca

SEQ ID NO: 3166708 - RNA, 12 nt, Human
agucccagcagc

SEQ ID NO: 3166709 - RNA, 19 nt, Human
agucccagcagccagccaa

SEQ ID NO: 3166710 - RNA, 18 nt, Human
agucccagcagccagcca

SEQ ID NO: 3166711 - RNA, 17 nt, Human
agucccagcagccagcc

SEQ ID NO: 3166712 - RNA, 17 nt, Human
agucccaggcugagccu

SEQ ID NO: 3166713 - RNA, 18 nt, Human
agucccaggcugagccuc

SEQ ID NO: 3166714 - RNA, 14 nt, Human
aguccccccacucc

SEQ ID NO: 3166715 - RNA, 19 nt, Human
agucccaggcugagccuca

SEQ ID NO: 3166716 - RNA, 23 nt, Human
agucagccucgcaggccucccug

SEQ ID NO: 3166717 - RNA, 16 nt, Human
agucagccucgcaggc

SEQ ID NO: 3166718 - RNA, 17 nt, Human
agucagaaacuguuucu

SEQ ID NO: 3166719 - RNA, 19 nt, Human
ugucccuuacgugaguccu

SEQ ID NO: 3166720 - RNA, 23 nt, Human
ugucccuuacgugaguccuggca

SEQ ID NO: 3166721 - RNA, 14 nt, Human
ugucccugcacuug

SEQ ID NO: 3166722 - RNA, 15 nt, Human
ugucccuggcuuccu

SEQ ID NO: 3166723 - RNA, 17 nt, Human
ugucccuggcuuccuua

SEQ ID NO: 3166724 - RNA, 16 nt, Human
ugucccuggcuuccuu

SEQ ID NO: 3166725 - RNA, 13 nt, Human
ugucgccucugca

SEQ ID NO: 3166726 - RNA, 14 nt, Human
ugucgccucugcau

SEQ ID NO: 3166727 - RNA, 22 nt, Human
ugucucaguccaugaagaugua

SEQ ID NO: 3166728 - RNA, 13 nt, Human
agucucaggaaau

SEQ ID NO: 3166729 - RNA, 21 nt, Human
agucucacuguugcccaggcu

SEQ ID NO: 3166730 - RNA, 23 nt, Human
agucucacuguugcccaggcugg

SEQ ID NO: 3166731 - RNA, 13 nt, Human
agucuauugucuc

SEQ ID NO: 3166732 - RNA, 19 nt, Human
agucuaucugguauuaaau

SEQ ID NO: 3166733 - RNA, 23 nt, Human
agucuaucugguauuaaaugcca

SEQ ID NO: 3166734 - RNA, 14 nt, Human
agucuaucauuguu

SEQ ID NO: 3166735 - RNA, 23 nt, Human
agucuaacaacugcccaguuucc

SEQ ID NO: 3166736 - RNA, 20 nt, Human
agucuaaauuuauuauuuaa

SEQ ID NO: 3166737 - RNA, 21 nt, Human
agucuaagaacccauggaaaa

SEQ ID NO: 3166738 - RNA, 14 nt, Human
aguccucccaucuc

SEQ ID NO: 3166739 - RNA, 16 nt, Human
aguccucccaucucac

SEQ ID NO: 3166740 - RNA, 22 nt, Human
aguccuccagaacucuuccucc

SEQ ID NO: 3166741 - RNA, 21 nt, Human
agucgccuuucagcaggcagc

SEQ ID NO: 3166742 - RNA, 22 nt, Human
agucgccuuucagcaggcagcc

SEQ ID NO: 3166743 - RNA, 16 nt, Human
agucggcacagccugg

SEQ ID NO: 3166744 - RNA, 16 nt, Human
aguccuagaauguuuc

SEQ ID NO: 3166745 - RNA, 19 nt, Human
aguccuagaauguuucauu

SEQ ID NO: 3166746 - RNA, 16 nt, Human
aguccccgucugccug

SEQ ID NO: 3166747 - RNA, 17 nt, Human
aguccccgucugccugg

SEQ ID NO: 3166748 - RNA, 16 nt, Human
agucccccugccccag

SEQ ID NO: 3166749 - RNA, 15 nt, Human
aguccucaaagcuuu

SEQ ID NO: 3166750 - RNA, 17 nt, Human
aguccucaaagcuuuuu

SEQ ID NO: 3166751 - RNA, 19 nt, Human
aguccucaaagcuuuuuga

SEQ ID NO: 3166752 - RNA, 20 nt, Human
aguccucaaagcuuuuugaa

SEQ ID NO: 3166753 - RNA, 23 nt, Human
aguccucaaagcuuuuugaaaac

SEQ ID NO: 3166754 - RNA, 12 nt, Human
aguccuccagaa

SEQ ID NO: 3166755 - RNA, 21 nt, Human
aguccuccagaacucuuccuc

SEQ ID NO: 3166756 - RNA, 20 nt, Human
aguccuccagaacucuuccu

SEQ ID NO: 3166757 - RNA, 19 nt, Human
aguccuccagaacucuucc

SEQ ID NO: 3166758 - RNA, 14 nt, Human
aguccuccagaacu

SEQ ID NO: 3166759 - RNA, 14 nt, Human
aguauuugugggga

SEQ ID NO: 3166760 - RNA, 13 nt, Human
aguauuuaugggu

SEQ ID NO: 3166761 - RNA, 19 nt, Human
aguauucuuauuuaaugaa

SEQ ID NO: 3166762 - RNA, 16 nt, Human
aguauucucuuuucaa

SEQ ID NO: 3166763 - RNA, 16 nt, Human
aguauucucauucuuc

SEQ ID NO: 3166764 - RNA, 15 nt, Human
aguauucucauucuu

SEQ ID NO: 3166765 - RNA, 16 nt, Human
aguauucuaauaagcu

SEQ ID NO: 3166766 - RNA, 17 nt, Human
aguauucuaauaagcua

SEQ ID NO: 3166767 - RNA, 21 nt, Human
aguauucuaauaagcuaguug

SEQ ID NO: 3166768 - RNA, 23 nt, Human
aguauucuaauaagcuaguugaa

SEQ ID NO: 3166769 - RNA, 17 nt, Human
agucaccccggccaccu

SEQ ID NO: 3166770 - RNA, 15 nt, Human
agucaccaagcccag

SEQ ID NO: 3166771 - RNA, 14 nt, Human
agucaccaagccca

SEQ ID NO: 3166772 - RNA, 21 nt, Human
aguauuuuccuguugucaaga

SEQ ID NO: 3166773 - RNA, 12 nt, Human
aguauuuuagug

SEQ ID NO: 3166774 - RNA, 21 nt, Human
aguauuuuaguggacccugaa

SEQ ID NO: 3166775 - RNA, 15 nt, Human
uguauauuuguauga

SEQ ID NO: 3166776 - RNA, 16 nt, Human
uguauauuuguaugau

SEQ ID NO: 3166777 - RNA, 17 nt, Human
uguauauuuguaugaua

SEQ ID NO: 3166778 - RNA, 18 nt, Human
uguauauuuguaugauau

SEQ ID NO: 3166779 - RNA, 19 nt, Human
uguauauuuguaugauauu

SEQ ID NO: 3166780 - RNA, 12 nt, Human
uguauauuugau

SEQ ID NO: 3166781 - RNA, 14 nt, Human
uguauauuugauuu

SEQ ID NO: 3166782 - RNA, 16 nt, Human
uguauauuugauuuau

SEQ ID NO: 3166783 - RNA, 17 nt, Human
uguauauuugauuuauu

SEQ ID NO: 3166784 - RNA, 22 nt, Human
uguauauuugauuuauuaacuu

SEQ ID NO: 3166785 - RNA, 12 nt, Human
uguauauuugua

SEQ ID NO: 3166786 - RNA, 19 nt, Human
uguauauuugauuuauuaa

SEQ ID NO: 3166787 - RNA, 21 nt, Human
uguauauugguuuuaugauga

SEQ ID NO: 3166788 - RNA, 13 nt, Human
uguauauugguuu

SEQ ID NO: 3166789 - RNA, 18 nt, Human
uguauauucuauuuuaca

SEQ ID NO: 3166790 - RNA, 14 nt, Human
uguauauugguuuu

SEQ ID NO: 3166791 - RNA, 20 nt, Human
uguauauugguuuuaugaug

SEQ ID NO: 3166792 - RNA, 23 nt, Human
aguauuaucuuguucaggaaaag

SEQ ID NO: 3166793 - RNA, 16 nt, Human
aguauuaauucucuuu

SEQ ID NO: 3166794 - RNA, 17 nt, Human
aguauuacuaaauugac

SEQ ID NO: 3166795 - RNA, 21 nt, Human
aguauuacuaaauugaccuuu

SEQ ID NO: 3166796 - RNA, 17 nt, Human
aguauacucuuaggcca

SEQ ID NO: 3166797 - RNA, 13 nt, Human
uguauauuuguau

SEQ ID NO: 3166798 - RNA, 18 nt, Human
aguauaauguuuauuaaa

SEQ ID NO: 3166799 - RNA, 14 nt, Human
aguauguuuuacuu

SEQ ID NO: 3166800 - RNA, 20 nt, Human
uguccagagcugcuuccccg

SEQ ID NO: 3166801 - RNA, 16 nt, Human
uguccaagaagcccag

SEQ ID NO: 3166802 - RNA, 17 nt, Human
uguccaagaagcccagg

SEQ ID NO: 3166803 - RNA, 18 nt, Human
uguccaagaagcccagga

SEQ ID NO: 3166804 - RNA, 22 nt, Human
uguccaagaagcccaggaaagg

SEQ ID NO: 3166805 - RNA, 23 nt, Human
ugucccugcacuugcagacucua

SEQ ID NO: 3166806 - RNA, 22 nt, Human
ugucccugcacuugcagacucu

SEQ ID NO: 3166807 - RNA, 20 nt, Human
ugucccugcacuugcagacu

SEQ ID NO: 3166808 - RNA, 22 nt, Human
ugucauuugagcagggcucagc

SEQ ID NO: 3166809 - RNA, 21 nt, Human
ugucauuugagcagggcucag

SEQ ID NO: 3166810 - RNA, 20 nt, Human
ugucauuugagcagggcuca

SEQ ID NO: 3166811 - RNA, 20 nt, Human
ugucagguggggcagcuuga

SEQ ID NO: 3166812 - RNA, 18 nt, Human
ugucagguggggcagcuu

SEQ ID NO: 3166813 - RNA, 17 nt, Human
ugucagguggggcagcu

SEQ ID NO: 3166814 - RNA, 14 nt, Human
uguccaagaagccc

SEQ ID NO: 3166815 - RNA, 15 nt, Human
uguccaagaagccca

SEQ ID NO: 3166816 - RNA, 23 nt, Human
uguccaacugagaaguaccuuau

SEQ ID NO: 3166817 - RNA, 16 nt, Human
ugucagguggggcagc

SEQ ID NO: 3166818 - RNA, 20 nt, Human
ugucagcaguugcugguaaa

SEQ ID NO: 3166819 - RNA, 19 nt, Human
ugucauuugagcagggcuc

SEQ ID NO: 3166820 - RNA, 14 nt, Human
auagauguguggac

SEQ ID NO: 3166821 - RNA, 14 nt, Human
auagauuaaaucau

SEQ ID NO: 3166822 - RNA, 12 nt, Human
auagauuaaauc

SEQ ID NO: 3166823 - RNA, 20 nt, Human
auagauuaaaucauacuccu

SEQ ID NO: 3166824 - RNA, 18 nt, Human
auagauugugaauaauga

SEQ ID NO: 3166825 - RNA, 15 nt, Human
auagauugugaauaa

SEQ ID NO: 3166826 - RNA, 13 nt, Human
auagauugugaau

SEQ ID NO: 3166827 - RNA, 12 nt, Human
auagaugugugg

SEQ ID NO: 3166828 - RNA, 13 nt, Human
auagaugugugga

SEQ ID NO: 3166829 - RNA, 11 nt, Human
auagaugugug

SEQ ID NO: 3166830 - RNA, 13 nt, Human
auagauauaauga

SEQ ID NO: 3166831 - RNA, 14 nt, Human
auagauauaaugaa

SEQ ID NO: 3166832 - RNA, 20 nt, Human
auagauauaaugaacaaaau

SEQ ID NO: 3166833 - RNA, 23 nt, Human
auagauauaaugaacaaaauuau

SEQ ID NO: 3166834 - RNA, 15 nt, Human
auagagcagaaauuc

SEQ ID NO: 3166835 - RNA, 14 nt, Human
auagagcagaaauu

SEQ ID NO: 3166836 - RNA, 19 nt, Human
auagagcagaaauucuguu

SEQ ID NO: 3166837 - RNA, 16 nt, Human
auagagcagaaauucu

SEQ ID NO: 3166838 - RNA, 14 nt, Human
auagagagagacca

SEQ ID NO: 3166839 - RNA, 17 nt, Human
auagagaugagcuuucu

SEQ ID NO: 3166840 - RNA, 19 nt, Human
auagagaugagcuuucuuu

SEQ ID NO: 3166841 - RNA, 18 nt, Human
auagacccacaagaggca

SEQ ID NO: 3166842 - RNA, 17 nt, Human
auagaguacacugccug

SEQ ID NO: 3166843 - RNA, 14 nt, Human
auagaguacacugc

SEQ ID NO: 3166844 - RNA, 23 nt, Human
auagaguaaaaagaaaacaaaac

SEQ ID NO: 3166845 - RNA, 19 nt, Human
auagaaggcuauggggaua

SEQ ID NO: 3166846 - RNA, 23 nt, Human
auagaagaaugcaugcuuuccau

SEQ ID NO: 3166847 - RNA, 18 nt, Human
auagaagaaugcaugcuu

SEQ ID NO: 3166848 - RNA, 17 nt, Human
auagaagaaugcaugcu

SEQ ID NO: 3166849 - RNA, 16 nt, Human
auagaagaaugcaugc

SEQ ID NO: 3166850 - RNA, 13 nt, Human
auagaagaaugca

SEQ ID NO: 3166851 - RNA, 12 nt, Human
auagaagaaugc

SEQ ID NO: 3166852 - RNA, 21 nt, Human
auagaagucuucaugaaaugc

SEQ ID NO: 3166853 - RNA, 20 nt, Human
auagaagucuucaugaaaug

SEQ ID NO: 3166854 - RNA, 19 nt, Human
auagaagucuucaugaaau

SEQ ID NO: 3166855 - RNA, 18 nt, Human
auagaagucuucaugaaa

SEQ ID NO: 3166856 - RNA, 13 nt, Human
auagaagucuuca

SEQ ID NO: 3166857 - RNA, 14 nt, Human
auagaagucuucau

SEQ ID NO: 3166858 - RNA, 17 nt, Human
auagaagucuucaugaa

SEQ ID NO: 3166859 - RNA, 15 nt, Human
auagaagucuucaug

SEQ ID NO: 3166860 - RNA, 18 nt, Human
auagaacaacauauacaa

SEQ ID NO: 3166861 - RNA, 14 nt, Human
auagaacaacauau

SEQ ID NO: 3166862 - RNA, 17 nt, Human
auagaaauguuugcuga

SEQ ID NO: 3166863 - RNA, 20 nt, Human
auacuguacaaugacuuuau

SEQ ID NO: 3166864 - RNA, 18 nt, Human
auacuguagauaauuaac

SEQ ID NO: 3166865 - RNA, 13 nt, Human
auagaauagcaug

SEQ ID NO: 3166866 - RNA, 23 nt, Human
auagaagucuucaugaaaugcua

SEQ ID NO: 3166867 - RNA, 17 nt, Human
auagaauuaacacauga

SEQ ID NO: 3166868 - RNA, 18 nt, Human
auagaauugcaaucuaua

SEQ ID NO: 3166869 - RNA, 15 nt, Human
auagacaaaaaguau

SEQ ID NO: 3166870 - RNA, 16 nt, Human
auagacaaaaaguaua

SEQ ID NO: 3166871 - RNA, 22 nt, Human
auagacaggagaagaaagaacu

SEQ ID NO: 3166872 - RNA, 15 nt, Human
auagacagcaugaga

SEQ ID NO: 3166873 - RNA, 20 nt, Human
uuauucacuuuuauuuagca

SEQ ID NO: 3166874 - RNA, 22 nt, Human
uuauucaacagcaagugugaau

SEQ ID NO: 3166875 - RNA, 13 nt, Human
uuauucaaagaga

SEQ ID NO: 3166876 - RNA, 14 nt, Human
uuauucaaagagaa

SEQ ID NO: 3166877 - RNA, 15 nt, Human
uuauucaaagagaaa

SEQ ID NO: 3166878 - RNA, 19 nt, Human
uuauucaaagagaaaacau

SEQ ID NO: 3166879 - RNA, 20 nt, Human
uuauucaaagagaaaacauc

SEQ ID NO: 3166880 - RNA, 23 nt, Human
uuauucaaagagaaaacaucuca

SEQ ID NO: 3166881 - RNA, 12 nt, Human
uuauuauuuauu

SEQ ID NO: 3166882 - RNA, 20 nt, Human
uuauuauuugcagucaugga

SEQ ID NO: 3166883 - RNA, 13 nt, Human
uuauucaacagca

SEQ ID NO: 3166884 - RNA, 14 nt, Human
uuauucaacagcaa

SEQ ID NO: 3166885 - RNA, 17 nt, Human
uuauuaucaaguagacu

SEQ ID NO: 3166886 - RNA, 13 nt, Human
uuauuauaaaaau

SEQ ID NO: 3166887 - RNA, 22 nt, Human
uuauuaucauuguucuuuucaa

SEQ ID NO: 3166888 - RNA, 22 nt, Human
uuauuaguuccccaaauacaaa

SEQ ID NO: 3166889 - RNA, 17 nt, Human
uuauguugacauuuguu

SEQ ID NO: 3166890 - RNA, 16 nt, Human
uuauguugacauuugu

SEQ ID NO: 3166891 - RNA, 15 nt, Human
uuauguugacauuug

SEQ ID NO: 3166892 - RNA, 14 nt, Human
uuauguugacauuu

SEQ ID NO: 3166893 - RNA, 13 nt, Human
uuauguugacauu

SEQ ID NO: 3166894 - RNA, 10 nt, Human
uuauguugac

SEQ ID NO: 3166895 - RNA, 15 nt, Human
uuauguugaaaaaau

SEQ ID NO: 3166896 - RNA, 18 nt, Human
uuauguugaaaaaauuua

SEQ ID NO: 3166897 - RNA, 16 nt, Human
auacucauuaggaugg

SEQ ID NO: 3166898 - RNA, 11 nt, Human
auacucccauc

SEQ ID NO: 3166899 - RNA, 13 nt, Human
auacucauuagaa

SEQ ID NO: 3166900 - RNA, 23 nt, Human
auacucauuagaauuaccauuug

SEQ ID NO: 3166901 - RNA, 20 nt, Human
uuauuccaaaccaaauuuua

SEQ ID NO: 3166902 - RNA, 17 nt, Human
uuauuccauauuagaaa

SEQ ID NO: 3166903 - RNA, 12 nt, Human
uuauuccauauu

SEQ ID NO: 3166904 - RNA, 23 nt, Human
uuauuccauauuagaaaacuuug

SEQ ID NO: 3166905 - RNA, 20 nt, Human
uuauuccauauuagaaaacu

SEQ ID NO: 3166906 - RNA, 19 nt, Human
uuauuccauauuagaaaac

SEQ ID NO: 3166907 - RNA, 14 nt, Human
auacucccaucugu

SEQ ID NO: 3166908 - RNA, 17 nt, Human
auacuccuaugcuuuag

SEQ ID NO: 3166909 - RNA, 16 nt, Human
auacuccuaugcuuua

SEQ ID NO: 3166910 - RNA, 16 nt, Human
auacucugcuuagaau

SEQ ID NO: 3166911 - RNA, 18 nt, Human
auacucuuauagacaaca

SEQ ID NO: 3166912 - RNA, 23 nt, Human
auacugggacaccauuaccaaaa

SEQ ID NO: 3166913 - RNA, 15 nt, Human
auacugccuccccca

SEQ ID NO: 3166914 - RNA, 13 nt, Human
auacugccucccc

SEQ ID NO: 3166915 - RNA, 19 nt, Human
auacugcuugaauaaacac

SEQ ID NO: 3166916 - RNA, 12 nt, Human
auacugaaccac

SEQ ID NO: 3166917 - RNA, 18 nt, Human
auacugaaccacuuguag

SEQ ID NO: 3166918 - RNA, 19 nt, Human
auacugaaccacuuguaga

SEQ ID NO: 3166919 - RNA, 23 nt, Human
auacugaaccacuuguagauuug

SEQ ID NO: 3166920 - RNA, 22 nt, Human
auacugacuccaaccauucaaa

SEQ ID NO: 3166921 - RNA, 13 nt, Human
auacugauggaau

SEQ ID NO: 3166922 - RNA, 14 nt, Human
auacugauggaauu

SEQ ID NO: 3166923 - RNA, 21 nt, Human
auacugcaaacuauuuaaaga

SEQ ID NO: 3166924 - RNA, 22 nt, Human
auacugauggaauuuuuuugua

SEQ ID NO: 3166925 - RNA, 13 nt, Human
auacugauguguu

SEQ ID NO: 3166926 - RNA, 20 nt, Human
uuaugucauucucuuucuca

SEQ ID NO: 3166927 - RNA, 17 nt, Human
uuauguccugugagaug

SEQ ID NO: 3166928 - RNA, 20 nt, Human
uuauguccugugagaugugu

SEQ ID NO: 3166929 - RNA, 22 nt, Human
uuauguccugugagauguguau

SEQ ID NO: 3166930 - RNA, 13 nt, Human
uuauguauauggu

SEQ ID NO: 3166931 - RNA, 15 nt, Human
uuauguaaauaauuc

SEQ ID NO: 3166932 - RNA, 16 nt, Human
uuauguaaauaauucu

SEQ ID NO: 3166933 - RNA, 15 nt, Human
uuaugugcuauuaau

SEQ ID NO: 3166934 - RNA, 21 nt, Human
uuaugugcuauuaauauuugu

SEQ ID NO: 3166935 - RNA, 12 nt, Human
uuaugugugugu

SEQ ID NO: 3166936 - RNA, 14 nt, Human
uuaugugugugugu

SEQ ID NO: 3166937 - RNA, 10 nt, Human
uuaugugugu

SEQ ID NO: 3166938 - RNA, 13 nt, Human
uuauguguaugug

SEQ ID NO: 3166939 - RNA, 20 nt, Human
uuauguguaugugaguauuc

SEQ ID NO: 3166940 - RNA, 22 nt, Human
uuaugaugacguacaaguaguu

SEQ ID NO: 3166941 - RNA, 23 nt, Human
uuaugaugacguacaaguaguuc

SEQ ID NO: 3166942 - RNA, 15 nt, Human
uuaugaugacguaca

SEQ ID NO: 3166943 - RNA, 13 nt, Human
uuaugggcugggu

SEQ ID NO: 3166944 - RNA, 12 nt, Human
uuauguaaauaa

SEQ ID NO: 3166945 - RNA, 13 nt, Human
uuauguaaauaau

SEQ ID NO: 3166946 - RNA, 23 nt, Human
uuauguaaacaaaucuuuccaua

SEQ ID NO: 3166947 - RNA, 22 nt, Human
uuauguaaacaaaucuuuccau

SEQ ID NO: 3166948 - RNA, 22 nt, Human
uuaugggcuggguucuacccag

SEQ ID NO: 3166949 - RNA, 16 nt, Human
uuaugguaaucauauu

SEQ ID NO: 3166950 - RNA, 17 nt, Human
uuauguaaacaaaucuu

SEQ ID NO: 3166951 - RNA, 15 nt, Human
uuauguaaacaaauc

SEQ ID NO: 3166952 - RNA, 18 nt, Human
uuaugguaaucauauuag

SEQ ID NO: 3166953 - RNA, 13 nt, Human
uuaugguagaaaa

SEQ ID NO: 3166954 - RNA, 19 nt, Human
uuaugguagaaaaauuuca

SEQ ID NO: 3166955 - RNA, 23 nt, Human
uuaugaagaugggggccucuuuc

SEQ ID NO: 3166956 - RNA, 22 nt, Human
uuaugaagaaaauacuuaaaug

SEQ ID NO: 3166957 - RNA, 20 nt, Human
uuaugaagaaaauacuuaaa

SEQ ID NO: 3166958 - RNA, 13 nt, Human
uuaugaagaaaau

SEQ ID NO: 3166959 - RNA, 21 nt, Human
uuaugaagaaaaauuugaaaa

SEQ ID NO: 3166960 - RNA, 12 nt, Human
uuaugaagaaaa

SEQ ID NO: 3166961 - RNA, 19 nt, Human
uuaucauuuuuuccuguuu

SEQ ID NO: 3166962 - RNA, 22 nt, Human
uuaugauagcaaauggccucau

SEQ ID NO: 3166963 - RNA, 16 nt, Human
uuaugagauacuuugc

SEQ ID NO: 3166964 - RNA, 13 nt, Human
uuaugagccaggc

SEQ ID NO: 3166965 - RNA, 23 nt, Human
uuaugaagaaaauacuuaaaugu

SEQ ID NO: 3166966 - RNA, 11 nt, Human
uuaugacucca

SEQ ID NO: 3166967 - RNA, 12 nt, Human
uuauaaaggaau

SEQ ID NO: 3166968 - RNA, 17 nt, Human
auacaacaccaaaaaau

SEQ ID NO: 3166969 - RNA, 21 nt, Human
auacaacaccaaaaaauaucu

SEQ ID NO: 3166970 - RNA, 20 nt, Human
auacaacaccaaaaaauauc

SEQ ID NO: 3166971 - RNA, 16 nt, Human
auacagaggcaacugc

SEQ ID NO: 3166972 - RNA, 17 nt, Human
auacagaggcaacugca

SEQ ID NO: 3166973 - RNA, 20 nt, Human
auacagaccgaacuguugua

SEQ ID NO: 3166974 - RNA, 18 nt, Human
auacagaccgaacuguug

SEQ ID NO: 3166975 - RNA, 21 nt, Human
auacagaccgaacuguuguau

SEQ ID NO: 3166976 - RNA, 16 nt, Human
auacaaccuucauuua

SEQ ID NO: 3166977 - RNA, 18 nt, Human
auacaaccuucauuuaaa

SEQ ID NO: 3166978 - RNA, 19 nt, Human
auacaaccuucauuuaaaa

SEQ ID NO: 3166979 - RNA, 18 nt, Human
auacagaaucuuguuuug

SEQ ID NO: 3166980 - RNA, 20 nt, Human
auacagaaucuuguuuugaa

SEQ ID NO: 3166981 - RNA, 20 nt, Human
auacagucucugagaacugg

SEQ ID NO: 3166982 - RNA, 20 nt, Human
auacaggcuggaaaguaagg

SEQ ID NO: 3166983 - RNA, 23 nt, Human
auacaggaaaagcugcugacagu

SEQ ID NO: 3166984 - RNA, 22 nt, Human
auacaggaaaagcugcugacag

SEQ ID NO: 3166985 - RNA, 23 nt, Human
auacagauagauauaugcucugc

SEQ ID NO: 3166986 - RNA, 17 nt, Human
auacagauaaaugauuc

SEQ ID NO: 3166987 - RNA, 13 nt, Human
auacagauaaaug

SEQ ID NO: 3166988 - RNA, 18 nt, Human
auacagauaaaugauuca

SEQ ID NO: 3166989 - RNA, 15 nt, Human
auacaguuauaaaau

SEQ ID NO: 3166990 - RNA, 17 nt, Human
auacaguuauaaaauua

SEQ ID NO: 3166991 - RNA, 18 nt, Human
auacaguuauaaaauuaa

SEQ ID NO: 3166992 - RNA, 19 nt, Human
auacaugaugauuucagaa

SEQ ID NO: 3166993 - RNA, 16 nt, Human
auacaugaugauuuca

SEQ ID NO: 3166994 - RNA, 21 nt, Human
auacauguuuauguaaacaaa

SEQ ID NO: 3166995 - RNA, 19 nt, Human
auacauguuuauguaaaca

SEQ ID NO: 3166996 - RNA, 22 nt, Human
auacauguuuauguaaacaaau

SEQ ID NO: 3166997 - RNA, 16 nt, Human
auacauguuuauguaa

SEQ ID NO: 3166998 - RNA, 14 nt, Human
auacauguuuaugu

SEQ ID NO: 3166999 - RNA, 17 nt, Human
auaccacucuuuaccuu

SEQ ID NO: 3167000 - RNA, 21 nt, Human
auaccacucuuuaccuuuauu

SEQ ID NO: 3167001 - RNA, 20 nt, Human
uuauauuuggaugcagaguu

SEQ ID NO: 3167002 - RNA, 15 nt, Human
uuauauuuggaugca

SEQ ID NO: 3167003 - RNA, 22 nt, Human
uuauauuuggaugcagaguuca

SEQ ID NO: 3167004 - RNA, 14 nt, Human
uuauauuuuucuua

SEQ ID NO: 3167005 - RNA, 16 nt, Human
uuauauuuuucuuaaa

SEQ ID NO: 3167006 - RNA, 15 nt, Human
uuauauuuuucuuaa

SEQ ID NO: 3167007 - RNA, 16 nt, Human
uuaucaauagcccagg

SEQ ID NO: 3167008 - RNA, 21 nt, Human
uuauauuuuucuuaaaaagua

SEQ ID NO: 3167009 - RNA, 20 nt, Human
uuauauuuuucuuaaaaagu

SEQ ID NO: 3167010 - RNA, 17 nt, Human
uuauauuuuucuuaaaa

SEQ ID NO: 3167011 - RNA, 17 nt, Human
uuaucaauagcccagga

SEQ ID NO: 3167012 - RNA, 20 nt, Human
uuaucaaugugucuuucuaa

SEQ ID NO: 3167013 - RNA, 23 nt, Human
uuaucaaugugucuuucuaagaa

SEQ ID NO: 3167014 - RNA, 17 nt, Human
auacuauggaauuucuc

SEQ ID NO: 3167015 - RNA, 18 nt, Human
auacgugucaaugugugc

SEQ ID NO: 3167016 - RNA, 18 nt, Human
auacguuuuucaguuuca

SEQ ID NO: 3167017 - RNA, 21 nt, Human
auacguuucaaaaacaccccc

SEQ ID NO: 3167018 - RNA, 18 nt, Human
auaaucacaacccuucag

SEQ ID NO: 3167019 - RNA, 22 nt, Human
auaaucuggacuccucugucca

SEQ ID NO: 3167020 - RNA, 16 nt, Human
auaaucaagagccuua

SEQ ID NO: 3167021 - RNA, 17 nt, Human
auaaucaagagccuuaa

SEQ ID NO: 3167022 - RNA, 20 nt, Human
auaauauguuuccuucccuc

SEQ ID NO: 3167023 - RNA, 20 nt, Human
auaaucuguuuuuacguaug

SEQ ID NO: 3167024 - RNA, 20 nt, Human
auaaucaagagccuuaaaac

SEQ ID NO: 3167025 - RNA, 21 nt, Human
auaaucaagagccuuaaaaca

SEQ ID NO: 3167026 - RNA, 22 nt, Human
auaaucaagagccuuaaaacau

SEQ ID NO: 3167027 - RNA, 16 nt, Human
auaauaucucuaauau

SEQ ID NO: 3167028 - RNA, 12 nt, Human
auaauauugaaa

SEQ ID NO: 3167029 - RNA, 14 nt, Human
auaauauugaaaau

SEQ ID NO: 3167030 - RNA, 16 nt, Human
auaauauugaaaauug

SEQ ID NO: 3167031 - RNA, 18 nt, Human
auaauauugaaaauugaa

SEQ ID NO: 3167032 - RNA, 19 nt, Human
auaauauugaaaauugaaa

SEQ ID NO: 3167033 - RNA, 21 nt, Human
auaauauugaaaauugaaaag

SEQ ID NO: 3167034 - RNA, 19 nt, Human
auaauauguuuccuucccu

SEQ ID NO: 3167035 - RNA, 18 nt, Human
auaauauguuuccuuccc

SEQ ID NO: 3167036 - RNA, 21 nt, Human
auaagauucauauuuacuucu

SEQ ID NO: 3167037 - RNA, 15 nt, Human
auaagcaguuaugug

SEQ ID NO: 3167038 - RNA, 22 nt, Human
auaagccaaaaaaugcuugcuu

SEQ ID NO: 3167039 - RNA, 15 nt, Human
auaauauauuguguu

SEQ ID NO: 3167040 - RNA, 17 nt, Human
auaauauauuguguuga

SEQ ID NO: 3167041 - RNA, 14 nt, Human
auaagccaaaauua

SEQ ID NO: 3167042 - RNA, 13 nt, Human
auaauuuguuucc

SEQ ID NO: 3167043 - RNA, 14 nt, Human
auaauuuguuucca

SEQ ID NO: 3167044 - RNA, 16 nt, Human
auaauuuguuuccagc

SEQ ID NO: 3167045 - RNA, 18 nt, Human
uuagaugugcugcuuuga

SEQ ID NO: 3167046 - RNA, 18 nt, Human
auaauuugguauccuuau

SEQ ID NO: 3167047 - RNA, 21 nt, Human
auaauuuacugugacuuuauu

SEQ ID NO: 3167048 - RNA, 13 nt, Human
auaauuuacugug

SEQ ID NO: 3167049 - RNA, 18 nt, Human
auaauuuaccugaagucu

SEQ ID NO: 3167050 - RNA, 15 nt, Human
auaauuuaguuguuu

SEQ ID NO: 3167051 - RNA, 18 nt, Human
auaauuuaguuguuucua

SEQ ID NO: 3167052 - RNA, 20 nt, Human
auaauuuaguuguuucuaga

SEQ ID NO: 3167053 - RNA, 19 nt, Human
auaauuauuugucucagau

SEQ ID NO: 3167054 - RNA, 22 nt, Human
auaauuauuuauuacauaauuu

SEQ ID NO: 3167055 - RNA, 13 nt, Human
uuaguagagacag

SEQ ID NO: 3167056 - RNA, 12 nt, Human
uuaguacuuuau

SEQ ID NO: 3167057 - RNA, 19 nt, Human
uuaguacuuuauagaagaa

SEQ ID NO: 3167058 - RNA, 17 nt, Human
uuaguacuuuauagaag

SEQ ID NO: 3167059 - RNA, 16 nt, Human
uuaguacuuuauagaa

SEQ ID NO: 3167060 - RNA, 13 nt, Human
uuaguacuuuaua

SEQ ID NO: 3167061 - RNA, 21 nt, Human
uuaguacuuuauagaagaaug

SEQ ID NO: 3167062 - RNA, 14 nt, Human
uuaguagagacagg

SEQ ID NO: 3167063 - RNA, 22 nt, Human
uuauaaaacguguuuguauugu

SEQ ID NO: 3167064 - RNA, 19 nt, Human
uuauaaaacagaguaaucu

SEQ ID NO: 3167065 - RNA, 22 nt, Human
uuauaaaacagaguaaucuugu

SEQ ID NO: 3167066 - RNA, 13 nt, Human
uuauaaaaauauu

SEQ ID NO: 3167067 - RNA, 16 nt, Human
uuauaaaaauauuaag

SEQ ID NO: 3167068 - RNA, 21 nt, Human
uuauaaaaauauuaagacaau

SEQ ID NO: 3167069 - RNA, 12 nt, Human
uuauaaaaagau

SEQ ID NO: 3167070 - RNA, 14 nt, Human
uuauaaaaagauaa

SEQ ID NO: 3167071 - RNA, 21 nt, Human
uuauaaacaagaaugaagguu

SEQ ID NO: 3167072 - RNA, 20 nt, Human
uuauaaacaagaaugaaggu

SEQ ID NO: 3167073 - RNA, 18 nt, Human
uuauaaacucauuuugcu

SEQ ID NO: 3167074 - RNA, 13 nt, Human
uuauaaacaagaa

SEQ ID NO: 3167075 - RNA, 14 nt, Human
uuauaaaauuaaaa

SEQ ID NO: 3167076 - RNA, 13 nt, Human
uuaguaagucuug

SEQ ID NO: 3167077 - RNA, 14 nt, Human
uuaguaaucuguau

SEQ ID NO: 3167078 - RNA, 15 nt, Human
uuaguaaucuguaua

SEQ ID NO: 3167079 - RNA, 17 nt, Human
uuaguaaucuguauaau

SEQ ID NO: 3167080 - RNA, 19 nt, Human
uuaggugugggggaagcac

SEQ ID NO: 3167081 - RNA, 15 nt, Human
uuaggguuucugauu

SEQ ID NO: 3167082 - RNA, 15 nt, Human
uuagauuaagaaaua

SEQ ID NO: 3167083 - RNA, 15 nt, Human
uuagggagagaagau

SEQ ID NO: 3167084 - RNA, 14 nt, Human
uuagggagagaaga

SEQ ID NO: 3167085 - RNA, 20 nt, Human
uuagaugugcugcuuugaua

SEQ ID NO: 3167086 - RNA, 15 nt, Human
uuagggcucuaauuu

SEQ ID NO: 3167087 - RNA, 18 nt, Human
uuagggaguauucuaaua

SEQ ID NO: 3167088 - RNA, 14 nt, Human
uuagggaguauucu

SEQ ID NO: 3167089 - RNA, 17 nt, Human
uuagggaguauucuaau

SEQ ID NO: 3167090 - RNA, 13 nt, Human
uuacaguguuccg

SEQ ID NO: 3167091 - RNA, 18 nt, Human
uuacagugccuaaaauaa

SEQ ID NO: 3167092 - RNA, 17 nt, Human
uuacaguggauugcuca

SEQ ID NO: 3167093 - RNA, 13 nt, Human
uuacaguuacuuu

SEQ ID NO: 3167094 - RNA, 19 nt, Human
uuacaguuacuuuuccuug

SEQ ID NO: 3167095 - RNA, 18 nt, Human
uuacaguuacuuuuccuu

SEQ ID NO: 3167096 - RNA, 16 nt, Human
uuacaguuacuuuucc

SEQ ID NO: 3167097 - RNA, 14 nt, Human
uuacaguuacuuuu

SEQ ID NO: 3167098 - RNA, 14 nt, Human
uuacagugaagaaa

SEQ ID NO: 3167099 - RNA, 17 nt, Human
uuacagugccuaaaaua

SEQ ID NO: 3167100 - RNA, 20 nt, Human
uuacaggugauuaacuugga

SEQ ID NO: 3167101 - RNA, 14 nt, Human
uuacaguaauguca

SEQ ID NO: 3167102 - RNA, 17 nt, Human
uuacaguaaugucauaa

SEQ ID NO: 3167103 - RNA, 18 nt, Human
uuacaguaaugucauaaa

SEQ ID NO: 3167104 - RNA, 22 nt, Human
uuacaguaaugucauaaaguga

SEQ ID NO: 3167105 - RNA, 16 nt, Human
uuacaguuauagaaag

SEQ ID NO: 3167106 - RNA, 14 nt, Human
uuaccagcagagca

SEQ ID NO: 3167107 - RNA, 18 nt, Human
uuacauaaacaucagguu

SEQ ID NO: 3167108 - RNA, 14 nt, Human
uuacauaaacauca

SEQ ID NO: 3167109 - RNA, 19 nt, Human
uuaccagcagagcaccuua

SEQ ID NO: 3167110 - RNA, 14 nt, Human
uuacaggugugaac

SEQ ID NO: 3167111 - RNA, 15 nt, Human
uuacaggugauuaac

SEQ ID NO: 3167112 - RNA, 13 nt, Human
uuacaggugauua

SEQ ID NO: 3167113 - RNA, 17 nt, Human
uuacagguaccaguucu

SEQ ID NO: 3167114 - RNA, 15 nt, Human
auaacuauguugaua

SEQ ID NO: 3167115 - RNA, 18 nt, Human
auaaauugcuccuugaca

SEQ ID NO: 3167116 - RNA, 15 nt, Human
uuaauuuuugcuuuu

SEQ ID NO: 3167117 - RNA, 22 nt, Human
uuaauuuuugcuuuuagaaaag

SEQ ID NO: 3167118 - RNA, 16 nt, Human
uuacaaaauguaacug

SEQ ID NO: 3167119 - RNA, 17 nt, Human
uuacaaaauguaacugu

SEQ ID NO: 3167120 - RNA, 19 nt, Human
uuacaaaauguaacuguua

SEQ ID NO: 3167121 - RNA, 18 nt, Human
uuacaaaauguaacuguu

SEQ ID NO: 3167122 - RNA, 18 nt, Human
uuacaaaggcuguauuca

SEQ ID NO: 3167123 - RNA, 12 nt, Human
uuacaaaugauu

SEQ ID NO: 3167124 - RNA, 23 nt, Human
uuacaaaugauugcuuuuaaaau

SEQ ID NO: 3167125 - RNA, 21 nt, Human
uuacaaaugauugcuuuuaaa

SEQ ID NO: 3167126 - RNA, 20 nt, Human
uuacaaaugauugcuuuuaa

SEQ ID NO: 3167127 - RNA, 19 nt, Human
uuacaaaugauugcuuuua

SEQ ID NO: 3167128 - RNA, 17 nt, Human
uuacaaaugauugcuuu

SEQ ID NO: 3167129 - RNA, 14 nt, Human
uuacaaaugauugc

SEQ ID NO: 3167130 - RNA, 18 nt, Human
auaaaugauucaaaaagu

SEQ ID NO: 3167131 - RNA, 16 nt, Human
auaaauugcuccuuga

SEQ ID NO: 3167132 - RNA, 13 nt, Human
auaaauugcuccu

SEQ ID NO: 3167133 - RNA, 16 nt, Human
uuacuggauaaauugu

SEQ ID NO: 3167134 - RNA, 22 nt, Human
uuacuggaucucuuaagacagc

SEQ ID NO: 3167135 - RNA, 20 nt, Human
uuacugcuuaauucaaauaa

SEQ ID NO: 3167136 - RNA, 17 nt, Human
uuacugcuuuaaucaga

SEQ ID NO: 3167137 - RNA, 19 nt, Human
uuacugcuuuaaucagaaa

SEQ ID NO: 3167138 - RNA, 15 nt, Human
uuacugcagcuuugu

SEQ ID NO: 3167139 - RNA, 23 nt, Human
uuacuccauauauauauaugugu

SEQ ID NO: 3167140 - RNA, 17 nt, Human
uuaccauaguuuucuca

SEQ ID NO: 3167141 - RNA, 18 nt, Human
uuaccagugccuuaaacu

SEQ ID NO: 3167142 - RNA, 22 nt, Human
uuacuccagguuauugcaauaa

SEQ ID NO: 3167143 - RNA, 21 nt, Human
auaagaaaagauguagauuua

SEQ ID NO: 3167144 - RNA, 18 nt, Human
auaagaaaagauguagau

SEQ ID NO: 3167145 - RNA, 12 nt, Human
auaagaaaagau

SEQ ID NO: 3167146 - RNA, 11 nt, Human
auaagaaaaga

SEQ ID NO: 3167147 - RNA, 14 nt, Human
auaagauucauauu

SEQ ID NO: 3167148 - RNA, 22 nt, Human
auaagaaaagauguagauuuau

SEQ ID NO: 3167149 - RNA, 16 nt, Human
uuagaagucacacagu

SEQ ID NO: 3167150 - RNA, 20 nt, Human
uuacuguccuguugauuaau

SEQ ID NO: 3167151 - RNA, 13 nt, Human
uuagaagguauua

SEQ ID NO: 3167152 - RNA, 18 nt, Human
uuagaagguauuaagauu

SEQ ID NO: 3167153 - RNA, 17 nt, Human
uuagaauuaccauuugu

SEQ ID NO: 3167154 - RNA, 13 nt, Human
uuagaauguugaa

SEQ ID NO: 3167155 - RNA, 18 nt, Human
uuagaauggugauuuuaa

SEQ ID NO: 3167156 - RNA, 21 nt, Human
uuagaauggugauuuuaaaug

SEQ ID NO: 3167157 - RNA, 19 nt, Human
uuagaauggugauuuuaaa

SEQ ID NO: 3167158 - RNA, 23 nt, Human
uuagaaucccuguguuaauuuaa

SEQ ID NO: 3167159 - RNA, 17 nt, Human
uuagaaucccuguguua

SEQ ID NO: 3167160 - RNA, 20 nt, Human
uuagaaucccuguguuaauu

SEQ ID NO: 3167161 - RNA, 22 nt, Human
uuaagacacuuccgucacaucc

SEQ ID NO: 3167162 - RNA, 18 nt, Human
uuaagacauuuuuggaag

SEQ ID NO: 3167163 - RNA, 23 nt, Human
uuaagacauuuuuggaaggggac

SEQ ID NO: 3167164 - RNA, 23 nt, Human
uuaagaaugaguuucuuagacuu

SEQ ID NO: 3167165 - RNA, 22 nt, Human
uuaagaaugaguuucuuagacu

SEQ ID NO: 3167166 - RNA, 20 nt, Human
uuaagaaugaguuucuuaga

SEQ ID NO: 3167167 - RNA, 18 nt, Human
uuaagaaugaguuucuua

SEQ ID NO: 3167168 - RNA, 11 nt, Human
uuaagaaaaaa

SEQ ID NO: 3167169 - RNA, 12 nt, Human
aguuuuucuuaa

SEQ ID NO: 3167170 - RNA, 11 nt, Human
aguuuuucugu

SEQ ID NO: 3167171 - RNA, 13 nt, Human
aguuuuucugucc

SEQ ID NO: 3167172 - RNA, 13 nt, Human
aguuuuugauagu

SEQ ID NO: 3167173 - RNA, 20 nt, Human
aguuuuucauaagauauuuu

SEQ ID NO: 3167174 - RNA, 15 nt, Human
aguuuuucauuuuaa

SEQ ID NO: 3167175 - RNA, 19 nt, Human
aguuuuaggguacaugugc

SEQ ID NO: 3167176 - RNA, 18 nt, Human
aguuuuaggguacaugug

SEQ ID NO: 3167177 - RNA, 19 nt, Human
aguuuuacccuauaucuau

SEQ ID NO: 3167178 - RNA, 17 nt, Human
aguuuuacccuauaucu

SEQ ID NO: 3167179 - RNA, 16 nt, Human
aguuuugugaaauuuu

SEQ ID NO: 3167180 - RNA, 15 nt, Human
aguuuugugaaauuu

SEQ ID NO: 3167181 - RNA, 21 nt, Human
aguuuugugaaauuuuucaua

SEQ ID NO: 3167182 - RNA, 20 nt, Human
aguuuugugaaauuuuucau

SEQ ID NO: 3167183 - RNA, 19 nt, Human
aguuuugugaaauuuuuca

SEQ ID NO: 3167184 - RNA, 18 nt, Human
aguuuugugaaauuuuuc

SEQ ID NO: 3167185 - RNA, 13 nt, Human
uuaaguuugcacu

SEQ ID NO: 3167186 - RNA, 20 nt, Human
uuaaguuuugacaagcuggc

SEQ ID NO: 3167187 - RNA, 13 nt, Human
uuaauaaaaagac

SEQ ID NO: 3167188 - RNA, 14 nt, Human
uuaaucuacugcau

SEQ ID NO: 3167189 - RNA, 15 nt, Human
uuaaucuacugcauu

SEQ ID NO: 3167190 - RNA, 16 nt, Human
uuaaucuacugcauuu

SEQ ID NO: 3167191 - RNA, 12 nt, Human
uuaaucauuuuu

SEQ ID NO: 3167192 - RNA, 15 nt, Human
uuaaucagaagaaaa

SEQ ID NO: 3167193 - RNA, 20 nt, Human
uuaaucacuguguauauuug

SEQ ID NO: 3167194 - RNA, 15 nt, Human
uuaaucacuguguau

SEQ ID NO: 3167195 - RNA, 17 nt, Human
uuaaucacuguguauau

SEQ ID NO: 3167196 - RNA, 13 nt, Human
uuaaucacugugu

SEQ ID NO: 3167197 - RNA, 14 nt, Human
uuaaucacugugua

SEQ ID NO: 3167198 - RNA, 11 nt, Human
uuaaucacugu

SEQ ID NO: 3167199 - RNA, 13 nt, Human
uuaauuuaucaga

SEQ ID NO: 3167200 - RNA, 14 nt, Human
uuaauuuaucagau

SEQ ID NO: 3167201 - RNA, 14 nt, Human
uuaauuucaguaag

SEQ ID NO: 3167202 - RNA, 14 nt, Human
uuaauuucaagcuu

SEQ ID NO: 3167203 - RNA, 15 nt, Human
uuaauuugaaauaug

SEQ ID NO: 3167204 - RNA, 13 nt, Human
uuaauuugaaaua

SEQ ID NO: 3167205 - RNA, 13 nt, Human
uuaauuucugcca

SEQ ID NO: 3167206 - RNA, 20 nt, Human
uuaauuucugccauuucaug

SEQ ID NO: 3167207 - RNA, 21 nt, Human
uuaauuucugccauuucaugu

SEQ ID NO: 3167208 - RNA, 13 nt, Human
uuaauuugugugu

SEQ ID NO: 3167209 - RNA, 21 nt, Human
uuaauuuggaccauuuuccug

SEQ ID NO: 3167210 - RNA, 22 nt, Human
uuaauuuggagcacaaaauuca

SEQ ID NO: 3167211 - RNA, 19 nt, Human
uuaauuuggaccauuuucc

SEQ ID NO: 3167212 - RNA, 11 nt, Human
uuaauuuggaa

SEQ ID NO: 3167213 - RNA, 14 nt, Human
uuaauuuggaaacu

SEQ ID NO: 3167214 - RNA, 16 nt, Human
uuaauuuggaaacuaa

SEQ ID NO: 3167215 - RNA, 20 nt, Human
uuaauuuggaaacuaauaaa

SEQ ID NO: 3167216 - RNA, 18 nt, Human
uuaauuuggaccauuuuc

SEQ ID NO: 3167217 - RNA, 13 nt, Human
uuaauuuggacca

SEQ ID NO: 3167218 - RNA, 16 nt, Human
uuaauuuuuaaaugca

SEQ ID NO: 3167219 - RNA, 15 nt, Human
uuaauuuuuaaaugc

SEQ ID NO: 3167220 - RNA, 12 nt, Human
uuaauuuugucu

SEQ ID NO: 3167221 - RNA, 14 nt, Human
uuaauuuuuaaaug

SEQ ID NO: 3167222 - RNA, 23 nt, Human
uuaauuuugucugccccaaguuu

SEQ ID NO: 3167223 - RNA, 19 nt, Human
uuaauuuugacacugaaau

SEQ ID NO: 3167224 - RNA, 20 nt, Human
uuaauuuugacacugaaaua

SEQ ID NO: 3167225 - RNA, 21 nt, Human
uuaaaguuucaaaaaucugaa

SEQ ID NO: 3167226 - RNA, 20 nt, Human
uuaaaguuucaaaaaucuga

SEQ ID NO: 3167227 - RNA, 19 nt, Human
uuaaaguuucaaaaaucug

SEQ ID NO: 3167228 - RNA, 18 nt, Human
uuaaaguuucaaaaaucu

SEQ ID NO: 3167229 - RNA, 16 nt, Human
uuaaaguuucaaaaau

SEQ ID NO: 3167230 - RNA, 21 nt, Human
uuaaaguugguauuaauaaaa

SEQ ID NO: 3167231 - RNA, 14 nt, Human
uuaaaguucauugc

SEQ ID NO: 3167232 - RNA, 14 nt, Human
uuaaaguuucaaaa

SEQ ID NO: 3167233 - RNA, 13 nt, Human
uuaaaguuucaaa

SEQ ID NO: 3167234 - RNA, 12 nt, Human
uuaaaguuucaa

SEQ ID NO: 3167235 - RNA, 14 nt, Human
uuaaauuuuuuggc

SEQ ID NO: 3167236 - RNA, 17 nt, Human
uuaaauuuuuuuguaug

SEQ ID NO: 3167237 - RNA, 20 nt, Human
uuaaauuuuuuuguaugaaa

SEQ ID NO: 3167238 - RNA, 21 nt, Human
uuaaauuuuuuuguaugaaaa

SEQ ID NO: 3167239 - RNA, 22 nt, Human
uuaaauuuuuuuguaugaaaac

SEQ ID NO: 3167240 - RNA, 18 nt, Human
aguuuaugcagugcugcu

SEQ ID NO: 3167241 - RNA, 19 nt, Human
aguuuaugcagugcugcuu

SEQ ID NO: 3167242 - RNA, 17 nt, Human
aguuuaugucucaguuu

SEQ ID NO: 3167243 - RNA, 23 nt, Human
uuaaauuuuuuuguaugaaaaca

SEQ ID NO: 3167244 - RNA, 20 nt, Human
aguuuguuucuuugaauuuu

SEQ ID NO: 3167245 - RNA, 18 nt, Human
aguuuguuucuuugaauu

SEQ ID NO: 3167246 - RNA, 17 nt, Human
aguuuguuucuuugaau

SEQ ID NO: 3167247 - RNA, 16 nt, Human
aguuuguuucuuugaa

SEQ ID NO: 3167248 - RNA, 11 nt, Human
aguuuuaaagu

SEQ ID NO: 3167249 - RNA, 23 nt, Human
aguuuguuucuuugaauuuucau

SEQ ID NO: 3167250 - RNA, 22 nt, Human
aguuuguuucuuugaauuuuca

SEQ ID NO: 3167251 - RNA, 19 nt, Human
aguuucugccgcagcccug

SEQ ID NO: 3167252 - RNA, 15 nt, Human
aguuucugccgcagc

SEQ ID NO: 3167253 - RNA, 21 nt, Human
aguuucuccaagcaggacaug

SEQ ID NO: 3167254 - RNA, 13 nt, Human
aguuucucagcuc

SEQ ID NO: 3167255 - RNA, 14 nt, Human
aguuucucuuuuca

SEQ ID NO: 3167256 - RNA, 22 nt, Human
aguuuauuccagagcugccagu

SEQ ID NO: 3167257 - RNA, 21 nt, Human
aguuuauuccagagcugccag

SEQ ID NO: 3167258 - RNA, 16 nt, Human
aguuuauuccagagcu

SEQ ID NO: 3167259 - RNA, 16 nt, Human
aguuuauguuuugguc

SEQ ID NO: 3167260 - RNA, 14 nt, Human
aguuuauguuuugg

SEQ ID NO: 3167261 - RNA, 12 nt, Human
aguuuauguuuu

SEQ ID NO: 3167262 - RNA, 21 nt, Human
uuaaaaugcaugauugcagaa

SEQ ID NO: 3167263 - RNA, 19 nt, Human
uuaaaaugauugaaaauaa

SEQ ID NO: 3167264 - RNA, 20 nt, Human
uuaaaaucuuauuaaaguuu

SEQ ID NO: 3167265 - RNA, 19 nt, Human
uuaaaaucuuauuaaaguu

SEQ ID NO: 3167266 - RNA, 16 nt, Human
uuaaaaucuuauuaaa

SEQ ID NO: 3167267 - RNA, 15 nt, Human
uuaaaaucuuauuaa

SEQ ID NO: 3167268 - RNA, 13 nt, Human
uuaaaaucuuauu

SEQ ID NO: 3167269 - RNA, 14 nt, Human
uuaaaauguacaug

SEQ ID NO: 3167270 - RNA, 21 nt, Human
uuaaaauguacauguauuaaa

SEQ ID NO: 3167271 - RNA, 19 nt, Human
uuaaaauguacauguauua

SEQ ID NO: 3167272 - RNA, 17 nt, Human
uuaaaauguacauguau

SEQ ID NO: 3167273 - RNA, 15 nt, Human
uuaaaauguacaugu

SEQ ID NO: 3167274 - RNA, 14 nt, Human
uuaaaaucauuucu

SEQ ID NO: 3167275 - RNA, 22 nt, Human
uuaaaaucauuucugcaucagc

SEQ ID NO: 3167276 - RNA, 17 nt, Human
uuaaaaaugguaucaaa

SEQ ID NO: 3167277 - RNA, 19 nt, Human
uuaaaaaugguaucaaaau

SEQ ID NO: 3167278 - RNA, 20 nt, Human
uuaaaaaugguaucaaaauu

SEQ ID NO: 3167279 - RNA, 22 nt, Human
uuaaaaaugguaucaaaauuac

SEQ ID NO: 3167280 - RNA, 23 nt, Human
uuaaaaaugguaucaaaauuaca

SEQ ID NO: 3167281 - RNA, 24 nt, Human
uuaaaaaugguaucaaaauuacau

SEQ ID NO: 3167282 - RNA, 16 nt, Human
uuaaaaaauggaacau

SEQ ID NO: 3167283 - RNA, 12 nt, Human
aguuuagaacag

SEQ ID NO: 3167284 - RNA, 16 nt, Human
aguuuagaacagguuu

SEQ ID NO: 3167285 - RNA, 17 nt, Human
aguuuagaacagguuuu

SEQ ID NO: 3167286 - RNA, 15 nt, Human
aguuuacugagaaug

SEQ ID NO: 3167287 - RNA, 18 nt, Human
aguuuaccuggcuuauuu

SEQ ID NO: 3167288 - RNA, 19 nt, Human
agcagauggagaccccuug

SEQ ID NO: 3167289 - RNA, 17 nt, Human
agcagaggaaggagagg

SEQ ID NO: 3167290 - RNA, 18 nt, Human
agcagaucuguuuugugg

SEQ ID NO: 3167291 - RNA, 12 nt, Human
agcagaguuaaa

SEQ ID NO: 3167292 - RNA, 14 nt, Human
agcagaguuaaauc

SEQ ID NO: 3167293 - RNA, 18 nt, Human
agcagaguuaaaucucaa

SEQ ID NO: 3167294 - RNA, 22 nt, Human
ugagggugacuauggagcugag

SEQ ID NO: 3167295 - RNA, 20 nt, Human
ugaggguugggcugguguca

SEQ ID NO: 3167296 - RNA, 17 nt, Human
ugagguacugagaguga

SEQ ID NO: 3167297 - RNA, 16 nt, Human
ugaggguuugagagag

SEQ ID NO: 3167298 - RNA, 18 nt, Human
ugaggguuucagagagcc

SEQ ID NO: 3167299 - RNA, 22 nt, Human
ugagguacugagagugaacaaa

SEQ ID NO: 3167300 - RNA, 13 nt, Human
ugaggucagagcc

SEQ ID NO: 3167301 - RNA, 16 nt, Human
ugaggucagagccugc

SEQ ID NO: 3167302 - RNA, 14 nt, Human
ugaggucagagccu

SEQ ID NO: 3167303 - RNA, 18 nt, Human
agcagagaccaucccuga

SEQ ID NO: 3167304 - RNA, 19 nt, Human
agcagagaccaucccugaa

SEQ ID NO: 3167305 - RNA, 17 nt, Human
agcagagaccaucccug

SEQ ID NO: 3167306 - RNA, 17 nt, Human
ugaggucagagccugca

SEQ ID NO: 3167307 - RNA, 20 nt, Human
agcagagcaccuuagacagu

SEQ ID NO: 3167308 - RNA, 20 nt, Human
agcagagaccaucccugaag

SEQ ID NO: 3167309 - RNA, 19 nt, Human
ugagguacaaccuguucug

SEQ ID NO: 3167310 - RNA, 19 nt, Human
agcagagagcauuauaauc

SEQ ID NO: 3167311 - RNA, 13 nt, Human
ugaggggccucuu

SEQ ID NO: 3167312 - RNA, 13 nt, Human
ugagggggcucag

SEQ ID NO: 3167313 - RNA, 14 nt, Human
ugagggggcucagu

SEQ ID NO: 3167314 - RNA, 19 nt, Human
ugagggggcucaguucugg

SEQ ID NO: 3167315 - RNA, 14 nt, Human
ugaggguaaguauu

SEQ ID NO: 3167316 - RNA, 12 nt, Human
ugaggggccucu

SEQ ID NO: 3167317 - RNA, 18 nt, Human
ugaggggcagccugccuu

SEQ ID NO: 3167318 - RNA, 18 nt, Human
ugaggggagccaggaggg

SEQ ID NO: 3167319 - RNA, 15 nt, Human
ugaggggagccagga

SEQ ID NO: 3167320 - RNA, 14 nt, Human
ugaggggagccagg

SEQ ID NO: 3167321 - RNA, 23 nt, Human
ugaggggagacagagcaaccccu

SEQ ID NO: 3167322 - RNA, 13 nt, Human
ugagggcuuguag

SEQ ID NO: 3167323 - RNA, 16 nt, Human
ugagggcggggugucu

SEQ ID NO: 3167324 - RNA, 15 nt, Human
ugagggcagugcaag

SEQ ID NO: 3167325 - RNA, 14 nt, Human
ugagggcagugcaa

SEQ ID NO: 3167326 - RNA, 20 nt, Human
ugaggcccuucucuccagcc

SEQ ID NO: 3167327 - RNA, 22 nt, Human
ugaggcccuucucuccagcccc

SEQ ID NO: 3167328 - RNA, 23 nt, Human
ugaggcccuucucuccagccccu

SEQ ID NO: 3167329 - RNA, 24 nt, Human
ugaggcccuucucuccagccccug

SEQ ID NO: 3167330 - RNA, 18 nt, Human
ugaggcccuucucuccag

SEQ ID NO: 3167331 - RNA, 19 nt, Human
ugaggcccuucucuccagc

SEQ ID NO: 3167332 - RNA, 16 nt, Human
ugaggcccuucucucc

SEQ ID NO: 3167333 - RNA, 19 nt, Human
ugagggauacccaucccau

SEQ ID NO: 3167334 - RNA, 15 nt, Human
ugagggauuaucuuu

SEQ ID NO: 3167335 - RNA, 17 nt, Human
ugaggccguugcugacu

SEQ ID NO: 3167336 - RNA, 19 nt, Human
ugaggccguugcugacuua

SEQ ID NO: 3167337 - RNA, 14 nt, Human
ugaggccguugcug

SEQ ID NO: 3167338 - RNA, 20 nt, Human
ugaggccguugcugacuuag

SEQ ID NO: 3167339 - RNA, 21 nt, Human
ugaggccguugcugacuuaga

SEQ ID NO: 3167340 - RNA, 22 nt, Human
ugaggccguugcugacuuagaa

SEQ ID NO: 3167341 - RNA, 17 nt, Human
ugaggaagagggacugu

SEQ ID NO: 3167342 - RNA, 19 nt, Human
ugaggaagccgcuggggcc

SEQ ID NO: 3167343 - RNA, 21 nt, Human
ugaggaagccgcuggggccag

SEQ ID NO: 3167344 - RNA, 22 nt, Human
ugaggaagcaaaagcaucuaug

SEQ ID NO: 3167345 - RNA, 14 nt, Human
ugaggaagccgcug

SEQ ID NO: 3167346 - RNA, 17 nt, Human
ugaggaagccgcugggg

SEQ ID NO: 3167347 - RNA, 18 nt, Human
ugaggaagccgcuggggc

SEQ ID NO: 3167348 - RNA, 15 nt, Human
ugaggaagcaaaagc

SEQ ID NO: 3167349 - RNA, 22 nt, Human
ugaggaaaucaaagugcuauua

SEQ ID NO: 3167350 - RNA, 14 nt, Human
ugaggaaauuugca

SEQ ID NO: 3167351 - RNA, 16 nt, Human
ugaggaaauuugcagc

SEQ ID NO: 3167352 - RNA, 15 nt, Human
ugaggaaauuugcag

SEQ ID NO: 3167353 - RNA, 16 nt, Human
ugaggaaaucaaagug

SEQ ID NO: 3167354 - RNA, 18 nt, Human
ugaggaaaucaaagugcu

SEQ ID NO: 3167355 - RNA, 15 nt, Human
ugaggaaaucaaagu

SEQ ID NO: 3167356 - RNA, 19 nt, Human
ugaggaaaaauaugugaag

SEQ ID NO: 3167357 - RNA, 18 nt, Human
ugaggaaaaauaugugaa

SEQ ID NO: 3167358 - RNA, 16 nt, Human
ugaggaaaaauaugug

SEQ ID NO: 3167359 - RNA, 15 nt, Human
ugaggaaaaauaugu

SEQ ID NO: 3167360 - RNA, 22 nt, Human
ugagcgacaucucugacuuucu

SEQ ID NO: 3167361 - RNA, 14 nt, Human
ugagccuucugagc

SEQ ID NO: 3167362 - RNA, 14 nt, Human
ugagcuaugacuua

SEQ ID NO: 3167363 - RNA, 15 nt, Human
ugagcuaugacuuaa

SEQ ID NO: 3167364 - RNA, 19 nt, Human
ugagcuaugacuuaacaua

SEQ ID NO: 3167365 - RNA, 19 nt, Human
ugagcuuucuuuuuaaagc

SEQ ID NO: 3167366 - RNA, 18 nt, Human
ugagcuacuggauucuua

SEQ ID NO: 3167367 - RNA, 19 nt, Human
ugagcuacuggauucuuau

SEQ ID NO: 3167368 - RNA, 21 nt, Human
ugaggacacuaaccacgcugg

SEQ ID NO: 3167369 - RNA, 17 nt, Human
ugaggacauaaaucuuc

SEQ ID NO: 3167370 - RNA, 12 nt, Human
ugaggccagaga

SEQ ID NO: 3167371 - RNA, 14 nt, Human
ugaggccacugaag

SEQ ID NO: 3167372 - RNA, 15 nt, Human
ugaggccacugaaga

SEQ ID NO: 3167373 - RNA, 16 nt, Human
ugaggccacugaagag

SEQ ID NO: 3167374 - RNA, 18 nt, Human
ugaggccacugaagagga

SEQ ID NO: 3167375 - RNA, 22 nt, Human
ugaggccacugaagaggaggag

SEQ ID NO: 3167376 - RNA, 22 nt, Human
ugaggacaagagaaaaaagcca

SEQ ID NO: 3167377 - RNA, 13 nt, Human
ugaggacaagaga

SEQ ID NO: 3167378 - RNA, 18 nt, Human
ugaggaauggacauuucu

SEQ ID NO: 3167379 - RNA, 22 nt, Human
ugaggaauccagacccggcugc

SEQ ID NO: 3167380 - RNA, 21 nt, Human
ugaggaauccagacccggcug

SEQ ID NO: 3167381 - RNA, 23 nt, Human
ugaggcccagagggccugcaagg

SEQ ID NO: 3167382 - RNA, 21 nt, Human
ugaggcccagagggccugcaa

SEQ ID NO: 3167383 - RNA, 22 nt, Human
ugaggcccagagggccugcaag

SEQ ID NO: 3167384 - RNA, 15 nt, Human
ugaggcccagagggc

SEQ ID NO: 3167385 - RNA, 17 nt, Human
ugaggcccagagggccu

SEQ ID NO: 3167386 - RNA, 18 nt, Human
ugaggcccagagggccug

SEQ ID NO: 3167387 - RNA, 20 nt, Human
ugaggcccagagggccugca

SEQ ID NO: 3167388 - RNA, 20 nt, Human
ugaggccagagacacaagcc

SEQ ID NO: 3167389 - RNA, 14 nt, Human
ugaggccagagaca

SEQ ID NO: 3167390 - RNA, 16 nt, Human
ugaggccagagacaca

SEQ ID NO: 3167391 - RNA, 12 nt, Human
ugaggcccagag

SEQ ID NO: 3167392 - RNA, 13 nt, Human
ugaggcccagagg

SEQ ID NO: 3167393 - RNA, 20 nt, Human
agcagaaauucuguuuuuaa

SEQ ID NO: 3167394 - RNA, 16 nt, Human
agcagaaauucuguuu

SEQ ID NO: 3167395 - RNA, 14 nt, Human
agcagaaauucugu

SEQ ID NO: 3167396 - RNA, 14 nt, Human
agcagaacagugau

SEQ ID NO: 3167397 - RNA, 21 nt, Human
agcagaaauucuguuuuuaaa

SEQ ID NO: 3167398 - RNA, 13 nt, Human
agcagaaggaagg

SEQ ID NO: 3167399 - RNA, 23 nt, Human
agcacuuugggaggccaaggugg

SEQ ID NO: 3167400 - RNA, 14 nt, Human
agcacuuuuuaaaa

SEQ ID NO: 3167401 - RNA, 22 nt, Human
agcacuuugggaggccaaggug

SEQ ID NO: 3167402 - RNA, 23 nt, Human
agcaccuuagacagucccugcca

SEQ ID NO: 3167403 - RNA, 19 nt, Human
agcaccuuagacagucccu

SEQ ID NO: 3167404 - RNA, 20 nt, Human
agcaccuuagacagucccug

SEQ ID NO: 3167405 - RNA, 21 nt, Human
agcaccuuagacagucccugc

SEQ ID NO: 3167406 - RNA, 22 nt, Human
agcaccuuagacagucccugcc

SEQ ID NO: 3167407 - RNA, 15 nt, Human
agcaccacccuccuu

SEQ ID NO: 3167408 - RNA, 18 nt, Human
agcaccacccuccuuccc

SEQ ID NO: 3167409 - RNA, 16 nt, Human
agcaccacccuccuuc

SEQ ID NO: 3167410 - RNA, 18 nt, Human
agcaccacucaagaccaa

SEQ ID NO: 3167411 - RNA, 10 nt, Human
agcaccaggg

SEQ ID NO: 3167412 - RNA, 12 nt, Human
agcaccagggaa

SEQ ID NO: 3167413 - RNA, 13 nt, Human
agcaccagggaag

SEQ ID NO: 3167414 - RNA, 13 nt, Human
ugagcgacaguga

SEQ ID NO: 3167415 - RNA, 14 nt, Human
ugagcgacagugag

SEQ ID NO: 3167416 - RNA, 16 nt, Human
ugagcgacagugagac

SEQ ID NO: 3167417 - RNA, 20 nt, Human
ugagcgacagugagacucug

SEQ ID NO: 3167418 - RNA, 19 nt, Human
ugagccugggaggucaagg

SEQ ID NO: 3167419 - RNA, 22 nt, Human
ugagccugggaggucaaggcug

SEQ ID NO: 3167420 - RNA, 11 nt, Human
ugagccuggca

SEQ ID NO: 3167421 - RNA, 16 nt, Human
ugagccuggcaagaau

SEQ ID NO: 3167422 - RNA, 14 nt, Human
ugagccugggaggu

SEQ ID NO: 3167423 - RNA, 21 nt, Human
agcagagaaugaaagggccca

SEQ ID NO: 3167424 - RNA, 14 nt, Human
agcagaauucauuc

SEQ ID NO: 3167425 - RNA, 15 nt, Human
agcagaauucauuca

SEQ ID NO: 3167426 - RNA, 16 nt, Human
agcagaauucauucau

SEQ ID NO: 3167427 - RNA, 18 nt, Human
agcagaauugaccgacag

SEQ ID NO: 3167428 - RNA, 19 nt, Human
agcagaauuggaaaagacu

SEQ ID NO: 3167429 - RNA, 17 nt, Human
agcagaauuggaaaaga

SEQ ID NO: 3167430 - RNA, 14 nt, Human
agcagaauuggaaa

SEQ ID NO: 3167431 - RNA, 13 nt, Human
agcagaauuggaa

SEQ ID NO: 3167432 - RNA, 17 nt, Human
agcagacacccuuggag

SEQ ID NO: 3167433 - RNA, 21 nt, Human
agcagagaauucucuuaucca

SEQ ID NO: 3167434 - RNA, 14 nt, Human
agcagagaauucuc

SEQ ID NO: 3167435 - RNA, 23 nt, Human
agcagagaaugaaagggcccaga

SEQ ID NO: 3167436 - RNA, 22 nt, Human
agcagagaaugaaagggcccag

SEQ ID NO: 3167437 - RNA, 15 nt, Human
agcagagaccauccc

SEQ ID NO: 3167438 - RNA, 16 nt, Human
agcagagaccaucccu

SEQ ID NO: 3167439 - RNA, 10 nt, Human
ugagccuggc

SEQ ID NO: 3167440 - RNA, 18 nt, Human
agcagacuuuuaaagacu

SEQ ID NO: 3167441 - RNA, 18 nt, Human
agcaacgaucacaaauga

SEQ ID NO: 3167442 - RNA, 24 nt, Human
agcaaccccuggaccccagccuca

SEQ ID NO: 3167443 - RNA, 23 nt, Human
agcaaccccuggaccccagccuc

SEQ ID NO: 3167444 - RNA, 21 nt, Human
agcaaccccuggaccccagcc

SEQ ID NO: 3167445 - RNA, 15 nt, Human
ugagcaauccugcaa

SEQ ID NO: 3167446 - RNA, 15 nt, Human
ugagcaaauguggcu

SEQ ID NO: 3167447 - RNA, 15 nt, Human
ugagcaacaagaauc

SEQ ID NO: 3167448 - RNA, 19 nt, Human
ugagcaaauguggcuccug

SEQ ID NO: 3167449 - RNA, 18 nt, Human
ugagcaaauguggcuccu

SEQ ID NO: 3167450 - RNA, 16 nt, Human
ugagcaaauguggcuc

SEQ ID NO: 3167451 - RNA, 19 nt, Human
agcaacgaucacaaaugac

SEQ ID NO: 3167452 - RNA, 20 nt, Human
agcaacgaucacaaaugacu

SEQ ID NO: 3167453 - RNA, 21 nt, Human
agcaacgaucacaaaugacuu

SEQ ID NO: 3167454 - RNA, 22 nt, Human
agcaacgaucacaaaugacuuu

SEQ ID NO: 3167455 - RNA, 23 nt, Human
ugagcacuaaggugugcucugau

SEQ ID NO: 3167456 - RNA, 22 nt, Human
ugagcacuaaggugugcucuga

SEQ ID NO: 3167457 - RNA, 21 nt, Human
ugagcacuaaggugugcucug

SEQ ID NO: 3167458 - RNA, 20 nt, Human
ugagcacuaaggugugcucu

SEQ ID NO: 3167459 - RNA, 15 nt, Human
ugagcaagcccagga

SEQ ID NO: 3167460 - RNA, 14 nt, Human
ugagcaagcccagg

SEQ ID NO: 3167461 - RNA, 14 nt, Human
ugagccagauuuca

SEQ ID NO: 3167462 - RNA, 16 nt, Human
ugagccagauuucacu

SEQ ID NO: 3167463 - RNA, 13 nt, Human
ugagccagauuuc

SEQ ID NO: 3167464 - RNA, 23 nt, Human
ugagccacugcaccgggccacag

SEQ ID NO: 3167465 - RNA, 18 nt, Human
ugagccacugcaccgggc

SEQ ID NO: 3167466 - RNA, 21 nt, Human
ugagccacugcaccgggccac

SEQ ID NO: 3167467 - RNA, 18 nt, Human
ugagccaccgugccuggc

SEQ ID NO: 3167468 - RNA, 19 nt, Human
ugagccaccgugccuggcc

SEQ ID NO: 3167469 - RNA, 20 nt, Human
ugagccaccgugccuggcca

SEQ ID NO: 3167470 - RNA, 21 nt, Human
ugagcaucaggccaggcccuc

SEQ ID NO: 3167471 - RNA, 15 nt, Human
ugagcagaauucauu

SEQ ID NO: 3167472 - RNA, 22 nt, Human
ugagcaucaggccaggcccucu

SEQ ID NO: 3167473 - RNA, 24 nt, Human
ugagcaucaggccaggcccucugc

SEQ ID NO: 3167474 - RNA, 15 nt, Human
ugagccaccacgccc

SEQ ID NO: 3167475 - RNA, 14 nt, Human
ugagccaccgugcc

SEQ ID NO: 3167476 - RNA, 14 nt, Human
agcacagcucccuu

SEQ ID NO: 3167477 - RNA, 12 nt, Human
agcacagcuccc

SEQ ID NO: 3167478 - RNA, 18 nt, Human
agcacagucagguugaag

SEQ ID NO: 3167479 - RNA, 16 nt, Human
agcacagcucccuucu

SEQ ID NO: 3167480 - RNA, 15 nt, Human
agcacagcucccuuc

SEQ ID NO: 3167481 - RNA, 17 nt, Human
agcaccaaaauaagaaa

SEQ ID NO: 3167482 - RNA, 16 nt, Human
agcaccaaaauaagaa

SEQ ID NO: 3167483 - RNA, 21 nt, Human
agcaccaaaauaagaaaagau

SEQ ID NO: 3167484 - RNA, 20 nt, Human
agcaccaaaauaagaaaaga

SEQ ID NO: 3167485 - RNA, 19 nt, Human
agcaccaaaauaagaaaag

SEQ ID NO: 3167486 - RNA, 18 nt, Human
agcaccaaaauaagaaaa

SEQ ID NO: 3167487 - RNA, 13 nt, Human
agcacaugccucu

SEQ ID NO: 3167488 - RNA, 14 nt, Human
agcacaugccucuc

SEQ ID NO: 3167489 - RNA, 22 nt, Human
agcaccaaaagcuuaccaaggg

SEQ ID NO: 3167490 - RNA, 17 nt, Human
ugagccagauuucacuc

SEQ ID NO: 3167491 - RNA, 22 nt, Human
ugagccagauuucacucuccuu

SEQ ID NO: 3167492 - RNA, 21 nt, Human
ugagccagauuucacucuccu

SEQ ID NO: 3167493 - RNA, 13 nt, Human
agcaagugagagc

SEQ ID NO: 3167494 - RNA, 16 nt, Human
agcaagugagacccug

SEQ ID NO: 3167495 - RNA, 20 nt, Human
agcaagugagacccugucuc

SEQ ID NO: 3167496 - RNA, 14 nt, Human
agcaagugagagcu

SEQ ID NO: 3167497 - RNA, 18 nt, Human
agcaagugagagcugggu

SEQ ID NO: 3167498 - RNA, 22 nt, Human
agcaagugagagcuggguguca

SEQ ID NO: 3167499 - RNA, 15 nt, Human
agcaagugugaauac

SEQ ID NO: 3167500 - RNA, 21 nt, Human
agcaagugugaauacugcuug

SEQ ID NO: 3167501 - RNA, 23 nt, Human
agcaagugugaauacugcuugaa

SEQ ID NO: 3167502 - RNA, 21 nt, Human
agcacagcagccccugcacaa

SEQ ID NO: 3167503 - RNA, 17 nt, Human
ugacagguuugggaccc

SEQ ID NO: 3167504 - RNA, 16 nt, Human
ugaauuuaucuuugau

SEQ ID NO: 3167505 - RNA, 15 nt, Human
ugaauuuaucuuuga

SEQ ID NO: 3167506 - RNA, 13 nt, Human
ugaauuuaucuuu

SEQ ID NO: 3167507 - RNA, 12 nt, Human
agaucagccaga

SEQ ID NO: 3167508 - RNA, 20 nt, Human
agaucacuguuuagauuugc

SEQ ID NO: 3167509 - RNA, 24 nt, Human
ugacauuuguuugguuauagugca

SEQ ID NO: 3167510 - RNA, 18 nt, Human
ugacauuguagagcuucu

SEQ ID NO: 3167511 - RNA, 17 nt, Human
agaucauuugaguucag

SEQ ID NO: 3167512 - RNA, 12 nt, Human
ugaccacacucc

SEQ ID NO: 3167513 - RNA, 17 nt, Human
ugaccacacuccagcug

SEQ ID NO: 3167514 - RNA, 19 nt, Human
ugaccacacuccagcuggg

SEQ ID NO: 3167515 - RNA, 20 nt, Human
ugaccacacuccagcuggga

SEQ ID NO: 3167516 - RNA, 22 nt, Human
ugaccaaauaucaccaggacug

SEQ ID NO: 3167517 - RNA, 21 nt, Human
ugaccaaauaucaccaggacu

SEQ ID NO: 3167518 - RNA, 19 nt, Human
ugaccaaauaucaccagga

SEQ ID NO: 3167519 - RNA, 16 nt, Human
ugaccaauuuuaacuu

SEQ ID NO: 3167520 - RNA, 13 nt, Human
ugaccaauuuuaa

SEQ ID NO: 3167521 - RNA, 19 nt, Human
agaugaugaugaucuuuaa

SEQ ID NO: 3167522 - RNA, 18 nt, Human
agaucgguuaacaaauaa

SEQ ID NO: 3167523 - RNA, 17 nt, Human
agaucgguuaacaaaua

SEQ ID NO: 3167524 - RNA, 15 nt, Human
agaucgguuaacaaa

SEQ ID NO: 3167525 - RNA, 14 nt, Human
agaucgguuaacaa

SEQ ID NO: 3167526 - RNA, 15 nt, Human
agaugauuuuuugaa

SEQ ID NO: 3167527 - RNA, 17 nt, Human
agaugauuuuuugaaag

SEQ ID NO: 3167528 - RNA, 20 nt, Human
agaugauuuuuugaaaguua

SEQ ID NO: 3167529 - RNA, 21 nt, Human
agauguguaauuuuucuguau

SEQ ID NO: 3167530 - RNA, 22 nt, Human
agauguguaucaguguuuaugu

SEQ ID NO: 3167531 - RNA, 17 nt, Human
agauguguaauuuuucu

SEQ ID NO: 3167532 - RNA, 20 nt, Human
agaugugguuaauuuugcau

SEQ ID NO: 3167533 - RNA, 16 nt, Human
agauguguaauuuuuc

SEQ ID NO: 3167534 - RNA, 15 nt, Human
agauguguucuuauu

SEQ ID NO: 3167535 - RNA, 16 nt, Human
agauguguucuuauuu

SEQ ID NO: 3167536 - RNA, 13 nt, Human
ugaccucugccug

SEQ ID NO: 3167537 - RNA, 19 nt, Human
ugaccccucauagcccuca

SEQ ID NO: 3167538 - RNA, 20 nt, Human
ugaccccucauagcccucac

SEQ ID NO: 3167539 - RNA, 17 nt, Human
ugaccccucauagcccu

SEQ ID NO: 3167540 - RNA, 19 nt, Human
ugacccccccagcuucacu

SEQ ID NO: 3167541 - RNA, 15 nt, Human
ugacccccccagcuu

SEQ ID NO: 3167542 - RNA, 22 nt, Human
ugacccccaaccaaguggcucc

SEQ ID NO: 3167543 - RNA, 14 nt, Human
ugaccucugccuga

SEQ ID NO: 3167544 - RNA, 12 nt, Human
ugaccugaggcc

SEQ ID NO: 3167545 - RNA, 23 nt, Human
agaugcuagaacucccuuucaac

SEQ ID NO: 3167546 - RNA, 22 nt, Human
agaugcuagaacucccuuucaa

SEQ ID NO: 3167547 - RNA, 22 nt, Human
agaugcuugcggcaaaaggaaa

SEQ ID NO: 3167548 - RNA, 18 nt, Human
agaugcuucucacugcca

SEQ ID NO: 3167549 - RNA, 16 nt, Human
agaugcuucucacugc

SEQ ID NO: 3167550 - RNA, 17 nt, Human
agauggauaugaccagu

SEQ ID NO: 3167551 - RNA, 23 nt, Human
agauggcacagggcaugaaauga

SEQ ID NO: 3167552 - RNA, 22 nt, Human
agauggcacagggcaugaaaug

SEQ ID NO: 3167553 - RNA, 16 nt, Human
agauggcacagggcau

SEQ ID NO: 3167554 - RNA, 13 nt, Human
agaugucuuccua

SEQ ID NO: 3167555 - RNA, 14 nt, Human
agaugucucuaaaa

SEQ ID NO: 3167556 - RNA, 20 nt, Human
agaugugggccaccauugca

SEQ ID NO: 3167557 - RNA, 21 nt, Human
agauguccauuuuuacaaguu

SEQ ID NO: 3167558 - RNA, 17 nt, Human
agauguccuaaugguga

SEQ ID NO: 3167559 - RNA, 14 nt, Human
ugaccugaggcccu

SEQ ID NO: 3167560 - RNA, 15 nt, Human
ugaccugaggcccuu

SEQ ID NO: 3167561 - RNA, 17 nt, Human
ugacuccagaauuuccc

SEQ ID NO: 3167562 - RNA, 19 nt, Human
ugacuccagaauuucccaa

SEQ ID NO: 3167563 - RNA, 15 nt, Human
ugacuccaaccauuc

SEQ ID NO: 3167564 - RNA, 16 nt, Human
ugacuccaaccauuca

SEQ ID NO: 3167565 - RNA, 22 nt, Human
ugacuccaaccauucaaaaauu

SEQ ID NO: 3167566 - RNA, 21 nt, Human
ugacugugguagccagcaucg

SEQ ID NO: 3167567 - RNA, 20 nt, Human
ugacuccagaauuucccaaa

SEQ ID NO: 3167568 - RNA, 23 nt, Human
ugacuccagaauuucccaaagca

SEQ ID NO: 3167569 - RNA, 24 nt, Human
ugacuucuaaguaaaaccacagca

SEQ ID NO: 3167570 - RNA, 21 nt, Human
ugacuuccccaauaucuugcu

SEQ ID NO: 3167571 - RNA, 20 nt, Human
ugacuuccccaauaucuugc

SEQ ID NO: 3167572 - RNA, 12 nt, Human
agauuauuuaca

SEQ ID NO: 3167573 - RNA, 14 nt, Human
agauuauuuacaag

SEQ ID NO: 3167574 - RNA, 19 nt, Human
agauuauuuacaagaagaa

SEQ ID NO: 3167575 - RNA, 16 nt, Human
agauucaaucccagga

SEQ ID NO: 3167576 - RNA, 20 nt, Human
agauuauaggcaccuaccac

SEQ ID NO: 3167577 - RNA, 21 nt, Human
ugacuuucaggaauugcccau

SEQ ID NO: 3167578 - RNA, 15 nt, Human
ugacuuucaggaauu

SEQ ID NO: 3167579 - RNA, 16 nt, Human
ugacuuuauuauuuau

SEQ ID NO: 3167580 - RNA, 17 nt, Human
ugacuuuauuauuuauu

SEQ ID NO: 3167581 - RNA, 20 nt, Human
ugacuuuauuauuuauuuuu

SEQ ID NO: 3167582 - RNA, 22 nt, Human
ugacuuucaaaguggaugcaau

SEQ ID NO: 3167583 - RNA, 15 nt, Human
ugacuuuauuauuua

SEQ ID NO: 3167584 - RNA, 12 nt, Human
ugacuuuauaaa

SEQ ID NO: 3167585 - RNA, 14 nt, Human
ugacuuuauaaauu

SEQ ID NO: 3167586 - RNA, 15 nt, Human
ugacuuuauaaauuu

SEQ ID NO: 3167587 - RNA, 17 nt, Human
agcaacaauuuucagau

SEQ ID NO: 3167588 - RNA, 16 nt, Human
agcaacaauuuucaga

SEQ ID NO: 3167589 - RNA, 15 nt, Human
agcaacaauuuucag

SEQ ID NO: 3167590 - RNA, 14 nt, Human
agcaacaauuuuca

SEQ ID NO: 3167591 - RNA, 15 nt, Human
agcaacaucagcuug

SEQ ID NO: 3167592 - RNA, 16 nt, Human
agcaacaucagcuuga

SEQ ID NO: 3167593 - RNA, 14 nt, Human
agcaaccaaaaaga

SEQ ID NO: 3167594 - RNA, 20 nt, Human
agcaaccccuggaccccagc

SEQ ID NO: 3167595 - RNA, 19 nt, Human
agcaaccccuggaccccag

SEQ ID NO: 3167596 - RNA, 18 nt, Human
agcaaccccuggacccca

SEQ ID NO: 3167597 - RNA, 22 nt, Human
agcaaccauauagaaagcuuug

SEQ ID NO: 3167598 - RNA, 14 nt, Human
agauugugaauaau

SEQ ID NO: 3167599 - RNA, 13 nt, Human
agauugugaauaa

SEQ ID NO: 3167600 - RNA, 18 nt, Human
agauugugaauaaugauu

SEQ ID NO: 3167601 - RNA, 16 nt, Human
agauugugccccugca

SEQ ID NO: 3167602 - RNA, 15 nt, Human
agauucacuuugaca

SEQ ID NO: 3167603 - RNA, 17 nt, Human
agauucacuuugacacu

SEQ ID NO: 3167604 - RNA, 17 nt, Human
agauuugaacucuucaa

SEQ ID NO: 3167605 - RNA, 14 nt, Human
agauuugcacaaaa

SEQ ID NO: 3167606 - RNA, 12 nt, Human
agauuugcacaa

SEQ ID NO: 3167607 - RNA, 18 nt, Human
agauuugccauagaguac

SEQ ID NO: 3167608 - RNA, 19 nt, Human
agauuugccauagaguaca

SEQ ID NO: 3167609 - RNA, 17 nt, Human
agauuugcacaaaaaga

SEQ ID NO: 3167610 - RNA, 15 nt, Human
agauuugcacaaaaa

SEQ ID NO: 3167611 - RNA, 12 nt, Human
agauuugggaga

SEQ ID NO: 3167612 - RNA, 21 nt, Human
agauuugccauagaguacacu

SEQ ID NO: 3167613 - RNA, 13 nt, Human
agauuucacucuc

SEQ ID NO: 3167614 - RNA, 14 nt, Human
agauuucacucucc

SEQ ID NO: 3167615 - RNA, 16 nt, Human
agaggcaagcugaaau

SEQ ID NO: 3167616 - RNA, 18 nt, Human
agaggcaagcugaaauuu

SEQ ID NO: 3167617 - RNA, 22 nt, Human
agaggcaagcugaaauuuuaga

SEQ ID NO: 3167618 - RNA, 17 nt, Human
agaggcuaaaauguuuu

SEQ ID NO: 3167619 - RNA, 21 nt, Human
agaggccuuuaguuauaaagg

SEQ ID NO: 3167620 - RNA, 14 nt, Human
agaggcuaaaaugu

SEQ ID NO: 3167621 - RNA, 16 nt, Human
agaggcuaaaauguuu

SEQ ID NO: 3167622 - RNA, 15 nt, Human
agaggcuaaaauguu

SEQ ID NO: 3167623 - RNA, 22 nt, Human
agagggagggagggcuccagac

SEQ ID NO: 3167624 - RNA, 16 nt, Human
agaggugcacuugggg

SEQ ID NO: 3167625 - RNA, 21 nt, Human
agagggagggagggcuccaga

SEQ ID NO: 3167626 - RNA, 20 nt, Human
agagggagggagggcuccag

SEQ ID NO: 3167627 - RNA, 18 nt, Human
ugaagauguagaggagaa

SEQ ID NO: 3167628 - RNA, 17 nt, Human
ugaagauguagaggaga

SEQ ID NO: 3167629 - RNA, 22 nt, Human
agaggugcacuuggggcacagg

SEQ ID NO: 3167630 - RNA, 14 nt, Human
ugaagcaguauuuu

SEQ ID NO: 3167631 - RNA, 15 nt, Human
ugaagcaguauuuug

SEQ ID NO: 3167632 - RNA, 17 nt, Human
ugaagcaggguuucuuu

SEQ ID NO: 3167633 - RNA, 21 nt, Human
ugaagcaggguuucuuuucuu

SEQ ID NO: 3167634 - RNA, 13 nt, Human
ugaagccugcucc

SEQ ID NO: 3167635 - RNA, 17 nt, Human
ugaagccugcuccuucc

SEQ ID NO: 3167636 - RNA, 15 nt, Human
ugaagccugcuccuu

SEQ ID NO: 3167637 - RNA, 18 nt, Human
ugaagccugcuccuuccc

SEQ ID NO: 3167638 - RNA, 14 nt, Human
ucuuuggucuacac

SEQ ID NO: 3167639 - RNA, 21 nt, Human
ucuuuggucuacacugugcug

SEQ ID NO: 3167640 - RNA, 16 nt, Human
ugaagaauuuaaagaa

SEQ ID NO: 3167641 - RNA, 18 nt, Human
agaggcaacugcauuggc

SEQ ID NO: 3167642 - RNA, 17 nt, Human
agaggaaaguacauuuu

SEQ ID NO: 3167643 - RNA, 11 nt, Human
agaggaaauca

SEQ ID NO: 3167644 - RNA, 12 nt, Human
agaggaaaucac

SEQ ID NO: 3167645 - RNA, 12 nt, Human
agaggaaagcaa

SEQ ID NO: 3167646 - RNA, 16 nt, Human
agaggaaagcaaagga

SEQ ID NO: 3167647 - RNA, 18 nt, Human
agaggaaagcaaaggaga

SEQ ID NO: 3167648 - RNA, 19 nt, Human
agaggaaagcaaaggagau

SEQ ID NO: 3167649 - RNA, 19 nt, Human
agagcugggugucaagagg

SEQ ID NO: 3167650 - RNA, 19 nt, Human
agagcuucuguugcugccu

SEQ ID NO: 3167651 - RNA, 20 nt, Human
agagcuucuguugcugccuc

SEQ ID NO: 3167652 - RNA, 21 nt, Human
agagcuucuguugcugccuca

SEQ ID NO: 3167653 - RNA, 15 nt, Human
agagcuucuggcacu

SEQ ID NO: 3167654 - RNA, 15 nt, Human
agaucaacucauguu

SEQ ID NO: 3167655 - RNA, 21 nt, Human
agaucaaccccuucgcuccug

SEQ ID NO: 3167656 - RNA, 15 nt, Human
agaucacuguuuaga

SEQ ID NO: 3167657 - RNA, 16 nt, Human
agaucacuguuuagau

SEQ ID NO: 3167658 - RNA, 17 nt, Human
agaucacuguuuagauu

SEQ ID NO: 3167659 - RNA, 18 nt, Human
agaucacuguuuagauuu

SEQ ID NO: 3167660 - RNA, 19 nt, Human
agaucacuguuuagauuug

SEQ ID NO: 3167661 - RNA, 19 nt, Human
agaucaaccccuucgcucc

SEQ ID NO: 3167662 - RNA, 14 nt, Human
agaucaaccccuuc

SEQ ID NO: 3167663 - RNA, 19 nt, Human
agauacaggaaaagcugcu

SEQ ID NO: 3167664 - RNA, 15 nt, Human
agauacaaucagcug

SEQ ID NO: 3167665 - RNA, 16 nt, Human
agauacaaucagcugc

SEQ ID NO: 3167666 - RNA, 17 nt, Human
agauacaaucagcugcu

SEQ ID NO: 3167667 - RNA, 18 nt, Human
agauacaaucagcugcuu

SEQ ID NO: 3167668 - RNA, 21 nt, Human
agauacaaucagcugcuuugu

SEQ ID NO: 3167669 - RNA, 15 nt, Human
agauaccaagcaugu

SEQ ID NO: 3167670 - RNA, 13 nt, Human
agauauuuuguaa

SEQ ID NO: 3167671 - RNA, 15 nt, Human
agauauuuuguaaaa

SEQ ID NO: 3167672 - RNA, 20 nt, Human
agauauuuuguaaaauguau

SEQ ID NO: 3167673 - RNA, 21 nt, Human
agauauuuuguaaaauguauu

SEQ ID NO: 3167674 - RNA, 22 nt, Human
agauauuuuguaaaauguauua

SEQ ID NO: 3167675 - RNA, 18 nt, Human
agauaccuuaaaauuuga

SEQ ID NO: 3167676 - RNA, 22 nt, Human
agauaccuuaaaauuugaaaca

SEQ ID NO: 3167677 - RNA, 20 nt, Human
agauaccuuaaaauuugaaa

SEQ ID NO: 3167678 - RNA, 22 nt, Human
agauaaguuggaaacacuaaau

SEQ ID NO: 3167679 - RNA, 21 nt, Human
agauaaguuggaaacacuaaa

SEQ ID NO: 3167680 - RNA, 20 nt, Human
agauaaguuggaaacacuaa

SEQ ID NO: 3167681 - RNA, 19 nt, Human
agauaaguuggaaacacua

SEQ ID NO: 3167682 - RNA, 18 nt, Human
agauaaguuggaaacacu

SEQ ID NO: 3167683 - RNA, 16 nt, Human
agauaaguuggaaaca

SEQ ID NO: 3167684 - RNA, 15 nt, Human
agauaaguuggaaac

SEQ ID NO: 3167685 - RNA, 14 nt, Human
agauaaguuggaaa

SEQ ID NO: 3167686 - RNA, 23 nt, Human
agauaaguggccuugacacauua

SEQ ID NO: 3167687 - RNA, 16 nt, Human
agauaaagauugugug

SEQ ID NO: 3167688 - RNA, 15 nt, Human
agauaaguggccuug

SEQ ID NO: 3167689 - RNA, 16 nt, Human
agauaaucucagugcu

SEQ ID NO: 3167690 - RNA, 19 nt, Human
agauaaucucagugcuuuc

SEQ ID NO: 3167691 - RNA, 18 nt, Human
agauaauucuagcuuuga

SEQ ID NO: 3167692 - RNA, 19 nt, Human
agagugagacucugucuca

SEQ ID NO: 3167693 - RNA, 17 nt, Human
agauaaaaaaacagcuu

SEQ ID NO: 3167694 - RNA, 19 nt, Human
agauaaggguaucugguga

SEQ ID NO: 3167695 - RNA, 17 nt, Human
agauaaggguaucuggu

SEQ ID NO: 3167696 - RNA, 17 nt, Human
agauaaagaccagaaau

SEQ ID NO: 3167697 - RNA, 18 nt, Human
agauaaagaccagaaauu

SEQ ID NO: 3167698 - RNA, 19 nt, Human
agauaaagaccagaaauuc

SEQ ID NO: 3167699 - RNA, 21 nt, Human
agauaaacacagcugcuuucu

SEQ ID NO: 3167700 - RNA, 13 nt, Human
agauaaagauugu

SEQ ID NO: 3167701 - RNA, 18 nt, Human
agauaaaaaaacagcuuu

SEQ ID NO: 3167702 - RNA, 19 nt, Human
agauaaaccuagauaaaga

SEQ ID NO: 3167703 - RNA, 18 nt, Human
ugaaggugauaagggaaa

SEQ ID NO: 3167704 - RNA, 19 nt, Human
ugaaggugauaagggaaaa

SEQ ID NO: 3167705 - RNA, 13 nt, Human
ugaauauaaaugu

SEQ ID NO: 3167706 - RNA, 14 nt, Human
ugaauauaaaugug

SEQ ID NO: 3167707 - RNA, 17 nt, Human
ugaauauaaaugugugu

SEQ ID NO: 3167708 - RNA, 18 nt, Human
ugaauauaaaugugugua

SEQ ID NO: 3167709 - RNA, 19 nt, Human
ugaauauaaauguguguau

SEQ ID NO: 3167710 - RNA, 21 nt, Human
ugaauauaaauguguguaugu

SEQ ID NO: 3167711 - RNA, 22 nt, Human
ugaauauaaauguguguaugug

SEQ ID NO: 3167712 - RNA, 15 nt, Human
ugaauauacucauua

SEQ ID NO: 3167713 - RNA, 19 nt, Human
ugaauauacucauuagaau

SEQ ID NO: 3167714 - RNA, 14 nt, Human
ugaaugcauaaaau

SEQ ID NO: 3167715 - RNA, 14 nt, Human
ugaaugcuuuuagu

SEQ ID NO: 3167716 - RNA, 23 nt, Human
ugaaugcuuuuagugugugcaua

SEQ ID NO: 3167717 - RNA, 22 nt, Human
ugaauggacgguuuaggugaaa

SEQ ID NO: 3167718 - RNA, 16 nt, Human
ugaaugcauaaaaugu

SEQ ID NO: 3167719 - RNA, 15 nt, Human
ugaaugcauaaaaug

SEQ ID NO: 3167720 - RNA, 14 nt, Human
agagugaacaaauu

SEQ ID NO: 3167721 - RNA, 20 nt, Human
agagucucacuguugcccag

SEQ ID NO: 3167722 - RNA, 17 nt, Human
agagucuauugucuccu

SEQ ID NO: 3167723 - RNA, 22 nt, Human
agagugaacaaauuuacagaga

SEQ ID NO: 3167724 - RNA, 16 nt, Human
agagugagacucuguc

SEQ ID NO: 3167725 - RNA, 15 nt, Human
agagugagacucugu

SEQ ID NO: 3167726 - RNA, 15 nt, Human
ugaaugucaguguga

SEQ ID NO: 3167727 - RNA, 18 nt, Human
ugaaugucagugugacug

SEQ ID NO: 3167728 - RNA, 14 nt, Human
ugaaugucagugug

SEQ ID NO: 3167729 - RNA, 19 nt, Human
ugaauggcaauguuuugcu

SEQ ID NO: 3167730 - RNA, 14 nt, Human
agacuuaucaacau

SEQ ID NO: 3167731 - RNA, 23 nt, Human
agacuguguuugguccuguagga

SEQ ID NO: 3167732 - RNA, 21 nt, Human
agacuguguuugguccuguag

SEQ ID NO: 3167733 - RNA, 17 nt, Human
agacuguguuugguccu

SEQ ID NO: 3167734 - RNA, 20 nt, Human
agacuguggagacugcuccu

SEQ ID NO: 3167735 - RNA, 19 nt, Human
agacuguggagacugcucc

SEQ ID NO: 3167736 - RNA, 14 nt, Human
agacugucucaaga

SEQ ID NO: 3167737 - RNA, 18 nt, Human
agacuguggagacugcuc

SEQ ID NO: 3167738 - RNA, 15 nt, Human
agacuggcacaguuu

SEQ ID NO: 3167739 - RNA, 14 nt, Human
agacuggcacaguu

SEQ ID NO: 3167740 - RNA, 14 nt, Human
agacuucaucccuc

SEQ ID NO: 3167741 - RNA, 14 nt, Human
agacuucagggagu

SEQ ID NO: 3167742 - RNA, 17 nt, Human
agacuuauuuucacaug

SEQ ID NO: 3167743 - RNA, 17 nt, Human
agacuucaaaauauuga

SEQ ID NO: 3167744 - RNA, 18 nt, Human
agacuucaaaauauugag

SEQ ID NO: 3167745 - RNA, 20 nt, Human
agacuucaaaauauugagca

SEQ ID NO: 3167746 - RNA, 17 nt, Human
agacuucaucccucugg

SEQ ID NO: 3167747 - RNA, 13 nt, Human
agacuucuguuuu

SEQ ID NO: 3167748 - RNA, 22 nt, Human
agacuucagggagucagcuguu

SEQ ID NO: 3167749 - RNA, 11 nt, Human
agacuuugaug

SEQ ID NO: 3167750 - RNA, 13 nt, Human
agacuuugauguc

SEQ ID NO: 3167751 - RNA, 12 nt, Human
agacuugaaaag

SEQ ID NO: 3167752 - RNA, 18 nt, Human
agacuucuguuuucaauc

SEQ ID NO: 3167753 - RNA, 17 nt, Human
agacuucuguuuucaau

SEQ ID NO: 3167754 - RNA, 15 nt, Human
agacuucuguuuuca

SEQ ID NO: 3167755 - RNA, 15 nt, Human
agacuugaaaagaga

SEQ ID NO: 3167756 - RNA, 17 nt, Human
agacuugaaaagagaca

SEQ ID NO: 3167757 - RNA, 18 nt, Human
agacuugaaaagagacag

SEQ ID NO: 3167758 - RNA, 19 nt, Human
agacuugaaaagagacagg

SEQ ID NO: 3167759 - RNA, 22 nt, Human
agacuugaaaagagacaggcag

SEQ ID NO: 3167760 - RNA, 20 nt, Human
agacuugaaaagagacaggc

SEQ ID NO: 3167761 - RNA, 21 nt, Human
agacuugaaaagagacaggca

SEQ ID NO: 3167762 - RNA, 12 nt, Human
agacuuuggaaa

SEQ ID NO: 3167763 - RNA, 18 nt, Human
agacuuugaugucagcag

SEQ ID NO: 3167764 - RNA, 14 nt, Human
agacuuugauguca

SEQ ID NO: 3167765 - RNA, 17 nt, Human
agacuuugaugucagca

SEQ ID NO: 3167766 - RNA, 14 nt, Human
agacuuuggaaaga

SEQ ID NO: 3167767 - RNA, 18 nt, Human
agagaaugaaagggccca

SEQ ID NO: 3167768 - RNA, 13 nt, Human
agagaccaucccu

SEQ ID NO: 3167769 - RNA, 14 nt, Human
agagaccaucccug

SEQ ID NO: 3167770 - RNA, 15 nt, Human
agagaccaucccuga

SEQ ID NO: 3167771 - RNA, 19 nt, Human
ucuuggagccugcagagcu

SEQ ID NO: 3167772 - RNA, 18 nt, Human
ucuuggagccugcagagc

SEQ ID NO: 3167773 - RNA, 15 nt, Human
ucuuggagccugcag

SEQ ID NO: 3167774 - RNA, 16 nt, Human
ucuuggcaauaaauuu

SEQ ID NO: 3167775 - RNA, 24 nt, Human
ucuuggcaauaaauuuugaaaagu

SEQ ID NO: 3167776 - RNA, 17 nt, Human
ucuuggcaauaaauuuu

SEQ ID NO: 3167777 - RNA, 19 nt, Human
ucuuggcaauaaauuuuga

SEQ ID NO: 3167778 - RNA, 20 nt, Human
ucuuggcaauaaauuuugaa

SEQ ID NO: 3167779 - RNA, 22 nt, Human
ucuuggcaauaaauuuugaaaa

SEQ ID NO: 3167780 - RNA, 17 nt, Human
ucuuuaaaauacacacu

SEQ ID NO: 3167781 - RNA, 15 nt, Human
ucuuuaaacugucgu

SEQ ID NO: 3167782 - RNA, 20 nt, Human
ucuuuaaaauuacaacuaag

SEQ ID NO: 3167783 - RNA, 15 nt, Human
ucuuuaaaauuacaa

SEQ ID NO: 3167784 - RNA, 21 nt, Human
ucuuuaaagggauggcaagau

SEQ ID NO: 3167785 - RNA, 15 nt, Human
ucuuuacuucaugga

SEQ ID NO: 3167786 - RNA, 16 nt, Human
ucuuuagaaaaggcau

SEQ ID NO: 3167787 - RNA, 15 nt, Human
ucuuuagaaaaggca

SEQ ID NO: 3167788 - RNA, 18 nt, Human
ucuuuaccuuuauugaua

SEQ ID NO: 3167789 - RNA, 19 nt, Human
agacucuacagaggccaug

SEQ ID NO: 3167790 - RNA, 21 nt, Human
agacucgcgacaaugcaaacc

SEQ ID NO: 3167791 - RNA, 17 nt, Human
agacucuacagaggcca

SEQ ID NO: 3167792 - RNA, 18 nt, Human
agacuccugcaggcagcc

SEQ ID NO: 3167793 - RNA, 19 nt, Human
agacuccugcaggcagcca

SEQ ID NO: 3167794 - RNA, 20 nt, Human
agacuccugcaggcagccag

SEQ ID NO: 3167795 - RNA, 13 nt, Human
ucuuuccugaggc

SEQ ID NO: 3167796 - RNA, 14 nt, Human
ucuuuccugaggcu

SEQ ID NO: 3167797 - RNA, 15 nt, Human
ucuuuccugaggcug

SEQ ID NO: 3167798 - RNA, 12 nt, Human
ucuuuccugagg

SEQ ID NO: 3167799 - RNA, 14 nt, Human
agacuccugcaggc

SEQ ID NO: 3167800 - RNA, 15 nt, Human
agacuccugcaggca

SEQ ID NO: 3167801 - RNA, 16 nt, Human
agacuccugcaggcag

SEQ ID NO: 3167802 - RNA, 17 nt, Human
agacuccugcaggcagc

SEQ ID NO: 3167803 - RNA, 12 nt, Human
ucuuggagccug

SEQ ID NO: 3167804 - RNA, 14 nt, Human
ucuuggagccugca

SEQ ID NO: 3167805 - RNA, 13 nt, Human
ucuuggagccugc

SEQ ID NO: 3167806 - RNA, 18 nt, Human
ucuuggacacuuaauucu

SEQ ID NO: 3167807 - RNA, 19 nt, Human
ucuuggacacuuaauucug

SEQ ID NO: 3167808 - RNA, 21 nt, Human
ucuuggacacuuaauucuguu

SEQ ID NO: 3167809 - RNA, 19 nt, Human
ucuuggaagcuguuuggaa

SEQ ID NO: 3167810 - RNA, 20 nt, Human
ucuuggaagcuguuuggaaa

SEQ ID NO: 3167811 - RNA, 16 nt, Human
ucuugcaauggcagcc

SEQ ID NO: 3167812 - RNA, 13 nt, Human
ucuugcaauggca

SEQ ID NO: 3167813 - RNA, 17 nt, Human
ucuugcaauggcagccu

SEQ ID NO: 3167814 - RNA, 17 nt, Human
ucuugcaaaauuccuga

SEQ ID NO: 3167815 - RNA, 22 nt, Human
ucuugaugaaaagcuuuguuug

SEQ ID NO: 3167816 - RNA, 16 nt, Human
ucuugaugaaaagcuu

SEQ ID NO: 3167817 - RNA, 19 nt, Human
agacuccaaagaaauguaa

SEQ ID NO: 3167818 - RNA, 16 nt, Human
agacuccaaagaaaug

SEQ ID NO: 3167819 - RNA, 15 nt, Human
agacucauucuucug

SEQ ID NO: 3167820 - RNA, 16 nt, Human
agacuauucaaacagu

SEQ ID NO: 3167821 - RNA, 12 nt, Human
agaccugccccu

SEQ ID NO: 3167822 - RNA, 19 nt, Human
agacuaucuaaauguugaa

SEQ ID NO: 3167823 - RNA, 18 nt, Human
agacuaucuaaauguuga

SEQ ID NO: 3167824 - RNA, 17 nt, Human
agacuaucuaaauguug

SEQ ID NO: 3167825 - RNA, 15 nt, Human
agacuaucuaaaugu

SEQ ID NO: 3167826 - RNA, 14 nt, Human
agacuccaaagaaa

SEQ ID NO: 3167827 - RNA, 13 nt, Human
agacuccaaagaa

SEQ ID NO: 3167828 - RNA, 12 nt, Human
agacuccaaaga

SEQ ID NO: 3167829 - RNA, 18 nt, Human
agacucauucuucuguac

SEQ ID NO: 3167830 - RNA, 20 nt, Human
agacuauucaaacagucuca

SEQ ID NO: 3167831 - RNA, 18 nt, Human
agacuauucaaacagucu

SEQ ID NO: 3167832 - RNA, 21 nt, Human
agacuauucaaacagucucag

SEQ ID NO: 3167833 - RNA, 17 nt, Human
agacucauucuucugua

SEQ ID NO: 3167834 - RNA, 13 nt, Human
agacccugcccug

SEQ ID NO: 3167835 - RNA, 14 nt, Human
agacccugcccugu

SEQ ID NO: 3167836 - RNA, 12 nt, Human
agacccugcccu

SEQ ID NO: 3167837 - RNA, 21 nt, Human
agacauguaauuuguguaaau

SEQ ID NO: 3167838 - RNA, 18 nt, Human
agacauguaauuugugua

SEQ ID NO: 3167839 - RNA, 17 nt, Human
agacauguaauuugugu

SEQ ID NO: 3167840 - RNA, 18 nt, Human
agacaugguggggucucc

SEQ ID NO: 3167841 - RNA, 22 nt, Human
ucuuccuacucuucucucugcu

SEQ ID NO: 3167842 - RNA, 16 nt, Human
ucuuccuacucuucuc

SEQ ID NO: 3167843 - RNA, 20 nt, Human
ucuuccuauuucagaaguuu

SEQ ID NO: 3167844 - RNA, 17 nt, Human
ucuuccuauuucagaag

SEQ ID NO: 3167845 - RNA, 16 nt, Human
ucuuccuauuucagaa

SEQ ID NO: 3167846 - RNA, 15 nt, Human
ucuuccuauuucaga

SEQ ID NO: 3167847 - RNA, 14 nt, Human
ucuuccuauuucag

SEQ ID NO: 3167848 - RNA, 22 nt, Human
ucuuccuaucaaaaagauauca

SEQ ID NO: 3167849 - RNA, 17 nt, Human
agaccuaaccagggcca

SEQ ID NO: 3167850 - RNA, 21 nt, Human
agaccgugaagauacuuugua

SEQ ID NO: 3167851 - RNA, 16 nt, Human
agaccuaaccagggcc

SEQ ID NO: 3167852 - RNA, 12 nt, Human
agaccuaaccag

SEQ ID NO: 3167853 - RNA, 19 nt, Human
agaccgugaagauacuuug

SEQ ID NO: 3167854 - RNA, 20 nt, Human
agaccgugaagauacuuugu

SEQ ID NO: 3167855 - RNA, 19 nt, Human
agacccuuguggucccacc

SEQ ID NO: 3167856 - RNA, 20 nt, Human
agacccuuguggucccaccc

SEQ ID NO: 3167857 - RNA, 22 nt, Human
agacccuuguggucccacccca

SEQ ID NO: 3167858 - RNA, 23 nt, Human
agacccuuguggucccaccccac

SEQ ID NO: 3167859 - RNA, 16 nt, Human
agacccugcccugugg

SEQ ID NO: 3167860 - RNA, 19 nt, Human
agacccugcccugugggcc

SEQ ID NO: 3167861 - RNA, 21 nt, Human
agacccugcccugugggcccc

SEQ ID NO: 3167862 - RNA, 23 nt, Human
agacccugcccugugggccccca

SEQ ID NO: 3167863 - RNA, 13 nt, Human
agacccuuguggu

SEQ ID NO: 3167864 - RNA, 15 nt, Human
agacccuuguggucc

SEQ ID NO: 3167865 - RNA, 13 nt, Human
agacccuggagga

SEQ ID NO: 3167866 - RNA, 20 nt, Human
agaauugucuuucugucucu

SEQ ID NO: 3167867 - RNA, 18 nt, Human
agaauuggaaaagacuaa

SEQ ID NO: 3167868 - RNA, 12 nt, Human
agaauuggaaaa

SEQ ID NO: 3167869 - RNA, 14 nt, Human
agaauuguuuagau

SEQ ID NO: 3167870 - RNA, 14 nt, Human
ucuguuugcuguug

SEQ ID NO: 3167871 - RNA, 23 nt, Human
ucuguuggguggcaucauuccag

SEQ ID NO: 3167872 - RNA, 12 nt, Human
ucuguucugaua

SEQ ID NO: 3167873 - RNA, 23 nt, Human
agaauuucccaaagcagugcaug

SEQ ID NO: 3167874 - RNA, 17 nt, Human
agaauuucccaaagcag

SEQ ID NO: 3167875 - RNA, 18 nt, Human
agaauuucccaaagcagu

SEQ ID NO: 3167876 - RNA, 12 nt, Human
agaauuuaaaga

SEQ ID NO: 3167877 - RNA, 13 nt, Human
agaauuuaaagaa

SEQ ID NO: 3167878 - RNA, 15 nt, Human
agaauuguuuagauu

SEQ ID NO: 3167879 - RNA, 21 nt, Human
agaauuuaaagaaaaaaaugu

SEQ ID NO: 3167880 - RNA, 20 nt, Human
ucuguuggccagugugacaa

SEQ ID NO: 3167881 - RNA, 19 nt, Human
ucuguuggccagugugaca

SEQ ID NO: 3167882 - RNA, 18 nt, Human
ucuguuggccagugugac

SEQ ID NO: 3167883 - RNA, 24 nt, Human
ucuguuccauaguuaaagaagaca

SEQ ID NO: 3167884 - RNA, 17 nt, Human
ucuguuccauaguuaaa

SEQ ID NO: 3167885 - RNA, 15 nt, Human
ucugugaaaggaaag

SEQ ID NO: 3167886 - RNA, 21 nt, Human
ucugugaaaggaaagagggag

SEQ ID NO: 3167887 - RNA, 19 nt, Human
ucuguccaacugagaagua

SEQ ID NO: 3167888 - RNA, 20 nt, Human
ucugugccuuuuuuauaucu

SEQ ID NO: 3167889 - RNA, 23 nt, Human
ucuguauagacaggagaagaaag

SEQ ID NO: 3167890 - RNA, 20 nt, Human
ucuguauagacaggagaaga

SEQ ID NO: 3167891 - RNA, 15 nt, Human
ucugucauuugagca

SEQ ID NO: 3167892 - RNA, 23 nt, Human
ucugucauuugagcagggcucag

SEQ ID NO: 3167893 - RNA, 20 nt, Human
ucugucauuugagcagggcu

SEQ ID NO: 3167894 - RNA, 18 nt, Human
ucuguccaacugagaagu

SEQ ID NO: 3167895 - RNA, 16 nt, Human
ucuguauaauacuuug

SEQ ID NO: 3167896 - RNA, 19 nt, Human
ucuguauaauacuuuguau

SEQ ID NO: 3167897 - RNA, 22 nt, Human
ucuguauaauacuuuguauaca

SEQ ID NO: 3167898 - RNA, 20 nt, Human
ucuggucuauaccuuaagaa

SEQ ID NO: 3167899 - RNA, 18 nt, Human
ucugguccauagagagca

SEQ ID NO: 3167900 - RNA, 14 nt, Human
ucugguauuaaaug

SEQ ID NO: 3167901 - RNA, 15 nt, Human
ucugguauuaaaugc

SEQ ID NO: 3167902 - RNA, 17 nt, Human
ucugguauuaaaugcca

SEQ ID NO: 3167903 - RNA, 16 nt, Human
ucuggguucacugcaa

SEQ ID NO: 3167904 - RNA, 14 nt, Human
ucuggguucacugc

SEQ ID NO: 3167905 - RNA, 11 nt, Human
ucuggggcugu

SEQ ID NO: 3167906 - RNA, 22 nt, Human
ucugggugcaggagcgcucccu

SEQ ID NO: 3167907 - RNA, 15 nt, Human
agaaggaaagauggu

SEQ ID NO: 3167908 - RNA, 19 nt, Human
agaaggaaagaugguuaaa

SEQ ID NO: 3167909 - RNA, 14 nt, Human
agaaggaagcaggu

SEQ ID NO: 3167910 - RNA, 15 nt, Human
agaagcuuuauuucu

SEQ ID NO: 3167911 - RNA, 16 nt, Human
agaagcuuuauuucua

SEQ ID NO: 3167912 - RNA, 15 nt, Human
ucuggggaccagcuu

SEQ ID NO: 3167913 - RNA, 17 nt, Human
ucuggggagcuggacag

SEQ ID NO: 3167914 - RNA, 23 nt, Human
ucuggggaccagcuuggcucagg

SEQ ID NO: 3167915 - RNA, 19 nt, Human
ucuggggccuaauaaaacu

SEQ ID NO: 3167916 - RNA, 20 nt, Human
ucuggggccuaauaaaacug

SEQ ID NO: 3167917 - RNA, 21 nt, Human
ucuggggccuaauaaaacuga

SEQ ID NO: 3167918 - RNA, 23 nt, Human
ucuggggccuaauaaaacugaug

SEQ ID NO: 3167919 - RNA, 14 nt, Human
ucuuaauuaaaaga

SEQ ID NO: 3167920 - RNA, 22 nt, Human
ucuuaauauuuuuacaugcaga

SEQ ID NO: 3167921 - RNA, 14 nt, Human
ucuuaauccagucu

SEQ ID NO: 3167922 - RNA, 22 nt, Human
ucuuaaucauuuuuuauauaua

SEQ ID NO: 3167923 - RNA, 20 nt, Human
ucuuaaucauuuuuuauaua

SEQ ID NO: 3167924 - RNA, 14 nt, Human
ucuuaaucauuuuu

SEQ ID NO: 3167925 - RNA, 21 nt, Human
ucuuaauuaaaagaauauuuu

SEQ ID NO: 3167926 - RNA, 18 nt, Human
ucuuaauuaaaagaauau

SEQ ID NO: 3167927 - RNA, 14 nt, Human
ucuuaauuauuaua

SEQ ID NO: 3167928 - RNA, 17 nt, Human
ucuuaauuauuauaaaa

SEQ ID NO: 3167929 - RNA, 18 nt, Human
ucuuaauuauuauaaaaa

SEQ ID NO: 3167930 - RNA, 19 nt, Human
ucuuaauuauuauaaaaau

SEQ ID NO: 3167931 - RNA, 20 nt, Human
ucuuaauuauuauaaaaaua

SEQ ID NO: 3167932 - RNA, 22 nt, Human
ucuuaauuauuauaaaaauauu

SEQ ID NO: 3167933 - RNA, 21 nt, Human
ucuuagaacaguggaaacuau

SEQ ID NO: 3167934 - RNA, 13 nt, Human
ucuuagaagaaua

SEQ ID NO: 3167935 - RNA, 15 nt, Human
ucuuagaagaauauu

SEQ ID NO: 3167936 - RNA, 17 nt, Human
ucuuagaagaauauugu

SEQ ID NO: 3167937 - RNA, 18 nt, Human
ucuuagaagaauauugua

SEQ ID NO: 3167938 - RNA, 19 nt, Human
ucuuagaagaauauuguau

SEQ ID NO: 3167939 - RNA, 20 nt, Human
ucuuagaagaauauuguauu

SEQ ID NO: 3167940 - RNA, 15 nt, Human
ucuuaugggcugggu

SEQ ID NO: 3167941 - RNA, 16 nt, Human
ucuuaugggcuggguu

SEQ ID NO: 3167942 - RNA, 13 nt, Human
ucuuaugggcugg

SEQ ID NO: 3167943 - RNA, 14 nt, Human
ucuuaugggcuggg

SEQ ID NO: 3167944 - RNA, 22 nt, Human
ucuuauugcccacgcuggagug

SEQ ID NO: 3167945 - RNA, 18 nt, Human
ucuuauugcccacgcugg

SEQ ID NO: 3167946 - RNA, 14 nt, Human
ucuuauugcccacg

SEQ ID NO: 3167947 - RNA, 17 nt, Human
ucuuagacuuuuccaau

SEQ ID NO: 3167948 - RNA, 16 nt, Human
ucuuagacuuuuccaa

SEQ ID NO: 3167949 - RNA, 15 nt, Human
ucuucacaacagauu

SEQ ID NO: 3167950 - RNA, 16 nt, Human
ucuucacucaaauuuu

SEQ ID NO: 3167951 - RNA, 22 nt, Human
ucuucaaaauauaaaaugccaa

SEQ ID NO: 3167952 - RNA, 15 nt, Human
ucuucaaauaucucu

SEQ ID NO: 3167953 - RNA, 17 nt, Human
ucuucaaaaugagcccu

SEQ ID NO: 3167954 - RNA, 17 nt, Human
ucuuagaucauaguuuu

SEQ ID NO: 3167955 - RNA, 16 nt, Human
ucuuagaucauaguuu

SEQ ID NO: 3167956 - RNA, 23 nt, Human
ucuuagacuuuuccaauauguga

SEQ ID NO: 3167957 - RNA, 22 nt, Human
ucuuccaggcugggagagccuu

SEQ ID NO: 3167958 - RNA, 21 nt, Human
ucuuccaggcugggagagccu

SEQ ID NO: 3167959 - RNA, 18 nt, Human
ucuuccaguuacuuucca

SEQ ID NO: 3167960 - RNA, 19 nt, Human
ucuuccaguuacuuuccaa

SEQ ID NO: 3167961 - RNA, 22 nt, Human
ucuucccuacaguugaaaaaca

SEQ ID NO: 3167962 - RNA, 18 nt, Human
ucuucccugguaagaaaa

SEQ ID NO: 3167963 - RNA, 20 nt, Human
ucuucccugguaagaaaaag

SEQ ID NO: 3167964 - RNA, 19 nt, Human
ucuucccugguaagaaaaa

SEQ ID NO: 3167965 - RNA, 14 nt, Human
agacagucccugcc

SEQ ID NO: 3167966 - RNA, 14 nt, Human
ucuuaauacuguua

SEQ ID NO: 3167967 - RNA, 18 nt, Human
ucuuaauacuguuauucu

SEQ ID NO: 3167968 - RNA, 15 nt, Human
ucuuaauacuguuau

SEQ ID NO: 3167969 - RNA, 22 nt, Human
ucuuaauacuguuauucuuugc

SEQ ID NO: 3167970 - RNA, 19 nt, Human
ucuuaauacuguuauucuu

SEQ ID NO: 3167971 - RNA, 16 nt, Human
agacagucccugccaa

SEQ ID NO: 3167972 - RNA, 17 nt, Human
agacagucccugccaau

SEQ ID NO: 3167973 - RNA, 15 nt, Human
agacagucccugcca

SEQ ID NO: 3167974 - RNA, 21 nt, Human
agacaggguuuugccauguug

SEQ ID NO: 3167975 - RNA, 15 nt, Human
agacaggaccaggga

SEQ ID NO: 3167976 - RNA, 22 nt, Human
agacaggcaagcaccuccugcc

SEQ ID NO: 3167977 - RNA, 23 nt, Human
agacaggcaagcaccuccugccu

SEQ ID NO: 3167978 - RNA, 20 nt, Human
agacaggcaggugaucugcu

SEQ ID NO: 3167979 - RNA, 19 nt, Human
agaauuugaagacuucaaa

SEQ ID NO: 3167980 - RNA, 21 nt, Human
agaauuugaagacuucaaaau

SEQ ID NO: 3167981 - RNA, 22 nt, Human
agaauuugaagacuucaaaaua

SEQ ID NO: 3167982 - RNA, 14 nt, Human
agaauuugaauuau

SEQ ID NO: 3167983 - RNA, 18 nt, Human
agacacccuuggagcucu

SEQ ID NO: 3167984 - RNA, 17 nt, Human
agacacccuuggagcuc

SEQ ID NO: 3167985 - RNA, 18 nt, Human
agacagaaucucgcucug

SEQ ID NO: 3167986 - RNA, 22 nt, Human
agacagaaucucgcucugucgc

SEQ ID NO: 3167987 - RNA, 14 nt, Human
agacagagacaagu

SEQ ID NO: 3167988 - RNA, 15 nt, Human
agacagagacaagua

SEQ ID NO: 3167989 - RNA, 17 nt, Human
agacagagacaaguaau

SEQ ID NO: 3167990 - RNA, 14 nt, Human
agacagacuagaag

SEQ ID NO: 3167991 - RNA, 16 nt, Human
agacagcugccuggga

SEQ ID NO: 3167992 - RNA, 11 nt, Human
ucuggcccuau

SEQ ID NO: 3167993 - RNA, 21 nt, Human
ucuggccccacaccagcccca

SEQ ID NO: 3167994 - RNA, 15 nt, Human
agaagcggcuggcag

SEQ ID NO: 3167995 - RNA, 16 nt, Human
agaagcggcuggcagc

SEQ ID NO: 3167996 - RNA, 18 nt, Human
agaagcuaagguuuagau

SEQ ID NO: 3167997 - RNA, 13 nt, Human
ucuggaucaguaa

SEQ ID NO: 3167998 - RNA, 15 nt, Human
ucuggaucaguaaaa

SEQ ID NO: 3167999 - RNA, 14 nt, Human
ucuggcagcucaga

SEQ ID NO: 3168000 - RNA, 15 nt, Human
ucuggcagcucagag

SEQ ID NO: 3168001 - RNA, 22 nt, Human
ucuggcagcaccgccucuuccc

SEQ ID NO: 3168002 - RNA, 13 nt, Human
ucuggauucaaau

SEQ ID NO: 3168003 - RNA, 23 nt, Human
ucugcuuuuuaaagaaugcucuu

SEQ ID NO: 3168004 - RNA, 18 nt, Human
ucuggagguacgaaaaga

SEQ ID NO: 3168005 - RNA, 23 nt, Human
ucugcugugggcacaggucaggc

SEQ ID NO: 3168006 - RNA, 13 nt, Human
ucugcuguuaacu

SEQ ID NO: 3168007 - RNA, 22 nt, Human
ucugcugugggcacaggucagg

SEQ ID NO: 3168008 - RNA, 14 nt, Human
ucugcuaccuugcc

SEQ ID NO: 3168009 - RNA, 15 nt, Human
ucugcuaccuugccc

SEQ ID NO: 3168010 - RNA, 17 nt, Human
ucugcuaccuugcccca

SEQ ID NO: 3168011 - RNA, 21 nt, Human
ucugcuaccuugccccaaccc

SEQ ID NO: 3168012 - RNA, 16 nt, Human
ucugcucacauaucug

SEQ ID NO: 3168013 - RNA, 13 nt, Human
ucugccuuugcuc

SEQ ID NO: 3168014 - RNA, 21 nt, Human
ucugccuuuuguucauuucau

SEQ ID NO: 3168015 - RNA, 13 nt, Human
ucugcuagagagu

SEQ ID NO: 3168016 - RNA, 13 nt, Human
agaagaaacuagg

SEQ ID NO: 3168017 - RNA, 15 nt, Human
agaagaaagaacuau

SEQ ID NO: 3168018 - RNA, 13 nt, Human
agaagaaagaacu

SEQ ID NO: 3168019 - RNA, 14 nt, Human
ucugcccuccaaga

SEQ ID NO: 3168020 - RNA, 23 nt, Human
ucugccgcagcccugcagagggc

SEQ ID NO: 3168021 - RNA, 14 nt, Human
agaacucccuuuca

SEQ ID NO: 3168022 - RNA, 19 nt, Human
agaacucgguguccccacc

SEQ ID NO: 3168023 - RNA, 18 nt, Human
agaacucgguguccccac

SEQ ID NO: 3168024 - RNA, 12 nt, Human
agaacucugccu

SEQ ID NO: 3168025 - RNA, 20 nt, Human
agaacucgguguccccacca

SEQ ID NO: 3168026 - RNA, 23 nt, Human
agaacucugccugcccuuugucc

SEQ ID NO: 3168027 - RNA, 17 nt, Human
agaacucugccugcccu

SEQ ID NO: 3168028 - RNA, 14 nt, Human
agaacucugccugc

SEQ ID NO: 3168029 - RNA, 13 nt, Human
agaacucugccug

SEQ ID NO: 3168030 - RNA, 22 nt, Human
agaacucuuccuccaaggacag

SEQ ID NO: 3168031 - RNA, 13 nt, Human
agaacucuuccuc

SEQ ID NO: 3168032 - RNA, 12 nt, Human
agaacucuuccu

SEQ ID NO: 3168033 - RNA, 16 nt, Human
agaacugaaaggcuuu

SEQ ID NO: 3168034 - RNA, 20 nt, Human
agaacugaaaggcuuuucaa

SEQ ID NO: 3168035 - RNA, 18 nt, Human
agaacucaugugauuuac

SEQ ID NO: 3168036 - RNA, 15 nt, Human
agaacucaugugauu

SEQ ID NO: 3168037 - RNA, 19 nt, Human
agaacuaaacuaguuuuuc

SEQ ID NO: 3168038 - RNA, 12 nt, Human
ucugcagagcag

SEQ ID NO: 3168039 - RNA, 14 nt, Human
agaaauugguaccu

SEQ ID NO: 3168040 - RNA, 12 nt, Human
agaaauuaacuu

SEQ ID NO: 3168041 - RNA, 21 nt, Human
agaaauguguagcugcaaaaa

SEQ ID NO: 3168042 - RNA, 19 nt, Human
agaaaugucccuuucuucu

SEQ ID NO: 3168043 - RNA, 23 nt, Human
agaaauugguaccuugcacacau

SEQ ID NO: 3168044 - RNA, 22 nt, Human
agaaauugguaccuugcacaca

SEQ ID NO: 3168045 - RNA, 21 nt, Human
agaaauugguaccuugcacac

SEQ ID NO: 3168046 - RNA, 20 nt, Human
agaaauugguaccuugcaca

SEQ ID NO: 3168047 - RNA, 19 nt, Human
agaaauugguaccuugcac

SEQ ID NO: 3168048 - RNA, 18 nt, Human
agaaauugguaccuugca

SEQ ID NO: 3168049 - RNA, 16 nt, Human
agaaauugguaccuug

SEQ ID NO: 3168050 - RNA, 19 nt, Human
ucugacuuuagccuaccua

SEQ ID NO: 3168051 - RNA, 20 nt, Human
ucugagaaagacuauucaaa

SEQ ID NO: 3168052 - RNA, 19 nt, Human
ucugagaaagacuauucaa

SEQ ID NO: 3168053 - RNA, 15 nt, Human
ucugagaaagacuau

SEQ ID NO: 3168054 - RNA, 14 nt, Human
ucugagaaagacua

SEQ ID NO: 3168055 - RNA, 20 nt, Human
agaaagacuauucaaacagu

SEQ ID NO: 3168056 - RNA, 18 nt, Human
agaaagacuauucaaaca

SEQ ID NO: 3168057 - RNA, 19 nt, Human
agaaagacuauucaaacag

SEQ ID NO: 3168058 - RNA, 19 nt, Human
ucugacccugcuucaaaua

SEQ ID NO: 3168059 - RNA, 23 nt, Human
ucugagaaagacuauucaaacag

SEQ ID NO: 3168060 - RNA, 22 nt, Human
ucugagaaagacuauucaaaca

SEQ ID NO: 3168061 - RNA, 21 nt, Human
ucugagaaagacuauucaaac

SEQ ID NO: 3168062 - RNA, 17 nt, Human
ucugagggcuuguaguu

SEQ ID NO: 3168063 - RNA, 19 nt, Human
ucugagggcuuguaguucu

SEQ ID NO: 3168064 - RNA, 20 nt, Human
ucugagggcuuguaguucuu

SEQ ID NO: 3168065 - RNA, 22 nt, Human
ucugcacuccccugcugggugu

SEQ ID NO: 3168066 - RNA, 18 nt, Human
ucugaucacugaaauaaa

SEQ ID NO: 3168067 - RNA, 21 nt, Human
ucugauucccaagcucugcuc

SEQ ID NO: 3168068 - RNA, 20 nt, Human
ucugauucccaagcucugcu

SEQ ID NO: 3168069 - RNA, 19 nt, Human
ucugauucccaagcucugc

SEQ ID NO: 3168070 - RNA, 18 nt, Human
ucugauucccaagcucug

SEQ ID NO: 3168071 - RNA, 16 nt, Human
ucugaucacugaaaua

SEQ ID NO: 3168072 - RNA, 14 nt, Human
ucugauauguuugu

SEQ ID NO: 3168073 - RNA, 22 nt, Human
ucugauauuaauuuaucagauu

SEQ ID NO: 3168074 - RNA, 19 nt, Human
ucugauacuuuuuugaaau

SEQ ID NO: 3168075 - RNA, 17 nt, Human
ucugauacuuuuuugaa

SEQ ID NO: 3168076 - RNA, 13 nt, Human
ucugauacuuuuu

SEQ ID NO: 3168077 - RNA, 21 nt, Human
agaaaacacuguuaucauuuu

SEQ ID NO: 3168078 - RNA, 18 nt, Human
agaaaacacuguuaucau

SEQ ID NO: 3168079 - RNA, 14 nt, Human
agaaaacacuguua

SEQ ID NO: 3168080 - RNA, 13 nt, Human
agaaaacacuguu

SEQ ID NO: 3168081 - RNA, 19 nt, Human
agaaaaauaugaccacacu

SEQ ID NO: 3168082 - RNA, 13 nt, Human
agaaaaauauuua

SEQ ID NO: 3168083 - RNA, 12 nt, Human
agaaaaauauuu

SEQ ID NO: 3168084 - RNA, 18 nt, Human
agaaaaauaucuguaaga

SEQ ID NO: 3168085 - RNA, 15 nt, Human
agaaaaauaucugua

SEQ ID NO: 3168086 - RNA, 11 nt, Human
agaaaaauauu

SEQ ID NO: 3168087 - RNA, 22 nt, Human
ucucuuuaaugucacaggcagg

SEQ ID NO: 3168088 - RNA, 13 nt, Human
ucucuugagccug

SEQ ID NO: 3168089 - RNA, 14 nt, Human
ucucuugagccugg

SEQ ID NO: 3168090 - RNA, 15 nt, Human
ucucuugagccuggg

SEQ ID NO: 3168091 - RNA, 21 nt, Human
ucucuuuaaugucacaggcag

SEQ ID NO: 3168092 - RNA, 19 nt, Human
agaaaccaggaguaaaaga

SEQ ID NO: 3168093 - RNA, 22 nt, Human
agaaaaccaaacaaaaauguua

SEQ ID NO: 3168094 - RNA, 14 nt, Human
agaaagaaaaucag

SEQ ID NO: 3168095 - RNA, 17 nt, Human
agaaacuggaaauacua

SEQ ID NO: 3168096 - RNA, 14 nt, Human
agaaagaacuaucu

SEQ ID NO: 3168097 - RNA, 16 nt, Human
agaaagaacuaucuuc

SEQ ID NO: 3168098 - RNA, 12 nt, Human
agaaagaaauua

SEQ ID NO: 3168099 - RNA, 13 nt, Human
agaaacuggaacu

SEQ ID NO: 3168100 - RNA, 19 nt, Human
agaaacucuauggucuuau

SEQ ID NO: 3168101 - RNA, 21 nt, Human
agaaacccucauuguguuucu

SEQ ID NO: 3168102 - RNA, 13 nt, Human
ucucuggccuucg

SEQ ID NO: 3168103 - RNA, 16 nt, Human
ucucuggccuucggcc

SEQ ID NO: 3168104 - RNA, 17 nt, Human
ucucuggccuucggccu

SEQ ID NO: 3168105 - RNA, 22 nt, Human
ucucugcccuaaugcgcaggcu

SEQ ID NO: 3168106 - RNA, 11 nt, Human
ucucugcccua

SEQ ID NO: 3168107 - RNA, 19 nt, Human
ucucugcccagcuuuucau

SEQ ID NO: 3168108 - RNA, 15 nt, Human
ucucugcccagcuuu

SEQ ID NO: 3168109 - RNA, 12 nt, Human
ucucuucuuuaa

SEQ ID NO: 3168110 - RNA, 21 nt, Human
ucucuucuggguuccuuccuc

SEQ ID NO: 3168111 - RNA, 14 nt, Human
ucucuucuguguuu

SEQ ID NO: 3168112 - RNA, 13 nt, Human
ucucuucuguguu

SEQ ID NO: 3168113 - RNA, 13 nt, Human
ucucuucuuuaaa

SEQ ID NO: 3168114 - RNA, 14 nt, Human
ucucuugagagggu

SEQ ID NO: 3168115 - RNA, 19 nt, Human
ucucuucuggguuccuucc

SEQ ID NO: 3168116 - RNA, 20 nt, Human
ucucuucuggguuccuuccu

SEQ ID NO: 3168117 - RNA, 18 nt, Human
ucucuucuggguuccuuc

SEQ ID NO: 3168118 - RNA, 13 nt, Human
ucucuccagcccc

SEQ ID NO: 3168119 - RNA, 14 nt, Human
ucucuccagccccu

SEQ ID NO: 3168120 - RNA, 20 nt, Human
ucuccuucaccuuugucccc

SEQ ID NO: 3168121 - RNA, 18 nt, Human
ucuccuucaccuuugucc

SEQ ID NO: 3168122 - RNA, 12 nt, Human
acuuuuuuuagu

SEQ ID NO: 3168123 - RNA, 13 nt, Human
acuuuuuuuagua

SEQ ID NO: 3168124 - RNA, 15 nt, Human
agaaaaaaaaagaaa

SEQ ID NO: 3168125 - RNA, 14 nt, Human
agaaaaaaaaagaa

SEQ ID NO: 3168126 - RNA, 18 nt, Human
acuuuuuuuuuauuuuau

SEQ ID NO: 3168127 - RNA, 15 nt, Human
ucucuccagccccug

SEQ ID NO: 3168128 - RNA, 19 nt, Human
acuuuuucuuaaucauuuu

SEQ ID NO: 3168129 - RNA, 19 nt, Human
acuuuuuuucuauauuauu

SEQ ID NO: 3168130 - RNA, 16 nt, Human
acuuuuuugaaaucag

SEQ ID NO: 3168131 - RNA, 18 nt, Human
acuuuuuugaaaucagua

SEQ ID NO: 3168132 - RNA, 17 nt, Human
acuuuggaaagacuuuu

SEQ ID NO: 3168133 - RNA, 13 nt, Human
acuuuggaaagac

SEQ ID NO: 3168134 - RNA, 14 nt, Human
acuuuggaaagacu

SEQ ID NO: 3168135 - RNA, 12 nt, Human
acuuuggaaaga

SEQ ID NO: 3168136 - RNA, 21 nt, Human
acuuugagaucuaaaaauaac

SEQ ID NO: 3168137 - RNA, 19 nt, Human
acuuugagaucuaaaaaua

SEQ ID NO: 3168138 - RNA, 18 nt, Human
acuuugagaucuaaaaau

SEQ ID NO: 3168139 - RNA, 17 nt, Human
acuuugagaucuaaaaa

SEQ ID NO: 3168140 - RNA, 16 nt, Human
acuuugagaucuaaaa

SEQ ID NO: 3168141 - RNA, 16 nt, Human
acuuguugccuauaag

SEQ ID NO: 3168142 - RNA, 21 nt, Human
acuuguugccuauaagccaaa

SEQ ID NO: 3168143 - RNA, 13 nt, Human
acuuguuuaauaa

SEQ ID NO: 3168144 - RNA, 12 nt, Human
acuuguuucuau

SEQ ID NO: 3168145 - RNA, 14 nt, Human
acuuguuuaauaaa

SEQ ID NO: 3168146 - RNA, 15 nt, Human
ucucccagucauuua

SEQ ID NO: 3168147 - RNA, 11 nt, Human
ucucccuugga

SEQ ID NO: 3168148 - RNA, 18 nt, Human
ucucccuuggauuguccc

SEQ ID NO: 3168149 - RNA, 22 nt, Human
ucuccauuuuggugucuuucuc

SEQ ID NO: 3168150 - RNA, 18 nt, Human
ucucccaaagugcuggga

SEQ ID NO: 3168151 - RNA, 19 nt, Human
ucuccauuuuggugucuuu

SEQ ID NO: 3168152 - RNA, 17 nt, Human
ucuccauuucacuggcu

SEQ ID NO: 3168153 - RNA, 20 nt, Human
acuguauagcucuuuuccua

SEQ ID NO: 3168154 - RNA, 23 nt, Human
acuguagauaauuaaccaaggua

SEQ ID NO: 3168155 - RNA, 12 nt, Human
ucuccucugcug

SEQ ID NO: 3168156 - RNA, 21 nt, Human
ucuccgccccugagcccacug

SEQ ID NO: 3168157 - RNA, 19 nt, Human
ucucccuuggauugucccc

SEQ ID NO: 3168158 - RNA, 23 nt, Human
ucuccgaccagacaccuugacag

SEQ ID NO: 3168159 - RNA, 20 nt, Human
ucuccgccccugagcccacu

SEQ ID NO: 3168160 - RNA, 19 nt, Human
ucuccgccccugagcccac

SEQ ID NO: 3168161 - RNA, 18 nt, Human
ucuccgccccugagccca

SEQ ID NO: 3168162 - RNA, 17 nt, Human
ucuccgccccugagccc

SEQ ID NO: 3168163 - RNA, 16 nt, Human
ucuccgccccugagcc

SEQ ID NO: 3168164 - RNA, 15 nt, Human
ucuccgccccugagc

SEQ ID NO: 3168165 - RNA, 13 nt, Human
ucuccucugcugc

SEQ ID NO: 3168166 - RNA, 14 nt, Human
ucuccucugcugcu

SEQ ID NO: 3168167 - RNA, 15 nt, Human
acuuguugccuauaa

SEQ ID NO: 3168168 - RNA, 14 nt, Human
acuuguugaauuua

SEQ ID NO: 3168169 - RNA, 21 nt, Human
acuuguugauuaauggaaaug

SEQ ID NO: 3168170 - RNA, 19 nt, Human
acuuguugauuaauggaaa

SEQ ID NO: 3168171 - RNA, 21 nt, Human
acuuguucuuccaaagcagag

SEQ ID NO: 3168172 - RNA, 19 nt, Human
acuuguucuuccaaagcag

SEQ ID NO: 3168173 - RNA, 13 nt, Human
acuuguucuucca

SEQ ID NO: 3168174 - RNA, 12 nt, Human
acuuguucuucc

SEQ ID NO: 3168175 - RNA, 13 nt, Human
ucauuuuuuuuaa

SEQ ID NO: 3168176 - RNA, 23 nt, Human
ucauuuuuuccuguuugggaaga

SEQ ID NO: 3168177 - RNA, 17 nt, Human
ucauuuuuuccuguuug

SEQ ID NO: 3168178 - RNA, 13 nt, Human
ucauuuuuuccug

SEQ ID NO: 3168179 - RNA, 12 nt, Human
ucauuuuuuccu

SEQ ID NO: 3168180 - RNA, 23 nt, Human
ucauuuuuuauggcugcauagua

SEQ ID NO: 3168181 - RNA, 22 nt, Human
ucauuuuuuauauauaugcaua

SEQ ID NO: 3168182 - RNA, 21 nt, Human
ucauuuuuuauauauaugcau

SEQ ID NO: 3168183 - RNA, 17 nt, Human
ucauuuucauuagcaaa

SEQ ID NO: 3168184 - RNA, 12 nt, Human
ucauuuucauua

SEQ ID NO: 3168185 - RNA, 11 nt, Human
ucauuuucauu

SEQ ID NO: 3168186 - RNA, 22 nt, Human
ucauuuucaagacugaauucca

SEQ ID NO: 3168187 - RNA, 21 nt, Human
ucauuugagcagggcucagcg

SEQ ID NO: 3168188 - RNA, 14 nt, Human
ucauuugcuuugga

SEQ ID NO: 3168189 - RNA, 18 nt, Human
ucauuugugccagaaugc

SEQ ID NO: 3168190 - RNA, 22 nt, Human
ucauuuuauauaugaaaacuaa

SEQ ID NO: 3168191 - RNA, 22 nt, Human
ucauuuuacaguuacuuuuccu

SEQ ID NO: 3168192 - RNA, 19 nt, Human
ucauuuuacaguuacuuuu

SEQ ID NO: 3168193 - RNA, 14 nt, Human
ucauuuuacaguua

SEQ ID NO: 3168194 - RNA, 13 nt, Human
ucauuuuaaaaag

SEQ ID NO: 3168195 - RNA, 18 nt, Human
accugcggugcuaucucc

SEQ ID NO: 3168196 - RNA, 15 nt, Human
accugaagucuuugu

SEQ ID NO: 3168197 - RNA, 22 nt, Human
accugaagucuuuguacagaca

SEQ ID NO: 3168198 - RNA, 19 nt, Human
accugcggugcuaucuccc

SEQ ID NO: 3168199 - RNA, 22 nt, Human
accugcggugcuaucuccccca

SEQ ID NO: 3168200 - RNA, 23 nt, Human
accugcggugcuaucucccccag

SEQ ID NO: 3168201 - RNA, 17 nt, Human
accugcucuccucuugc

SEQ ID NO: 3168202 - RNA, 18 nt, Human
accugcucuccucuugcc

SEQ ID NO: 3168203 - RNA, 19 nt, Human
ucauuugagcagggcucag

SEQ ID NO: 3168204 - RNA, 19 nt, Human
accuggaaggcccagcacc

SEQ ID NO: 3168205 - RNA, 18 nt, Human
accuggaaggcccagcac

SEQ ID NO: 3168206 - RNA, 14 nt, Human
accugcucugcuga

SEQ ID NO: 3168207 - RNA, 13 nt, Human
accugcucugcug

SEQ ID NO: 3168208 - RNA, 19 nt, Human
accugcucuccucuugcca

SEQ ID NO: 3168209 - RNA, 12 nt, Human
accugcucugcu

SEQ ID NO: 3168210 - RNA, 18 nt, Human
uccaccaagccuggucag

SEQ ID NO: 3168211 - RNA, 23 nt, Human
uccaccaagccuggucagcccaa

SEQ ID NO: 3168212 - RNA, 22 nt, Human
uccaccaagccuggucagccca

SEQ ID NO: 3168213 - RNA, 11 nt, Human
uccaagcuggu

SEQ ID NO: 3168214 - RNA, 22 nt, Human
uccaaguggccuccgucacuac

SEQ ID NO: 3168215 - RNA, 17 nt, Human
uccaauaugugauuuuu

SEQ ID NO: 3168216 - RNA, 16 nt, Human
uccaauaugugauuuu

SEQ ID NO: 3168217 - RNA, 14 nt, Human
uccaauaugugauu

SEQ ID NO: 3168218 - RNA, 12 nt, Human
uccaagcuccca

SEQ ID NO: 3168219 - RNA, 13 nt, Human
uccaagcucccag

SEQ ID NO: 3168220 - RNA, 14 nt, Human
uccaagcucccagg

SEQ ID NO: 3168221 - RNA, 15 nt, Human
uccaagcucccaggc

SEQ ID NO: 3168222 - RNA, 16 nt, Human
uccaagcucccaggca

SEQ ID NO: 3168223 - RNA, 18 nt, Human
uccaagcuccaucuccac

SEQ ID NO: 3168224 - RNA, 22 nt, Human
uccaacgaggcuaaguuaaugc

SEQ ID NO: 3168225 - RNA, 18 nt, Human
uccaaccauucaaaaauu

SEQ ID NO: 3168226 - RNA, 16 nt, Human
uccaaccauuuucauu

SEQ ID NO: 3168227 - RNA, 15 nt, Human
uccaacauccacucu

SEQ ID NO: 3168228 - RNA, 14 nt, Human
uccaaaugcagcuu

SEQ ID NO: 3168229 - RNA, 20 nt, Human
uccaaauaauauguuuccuu

SEQ ID NO: 3168230 - RNA, 17 nt, Human
accuuccaagagccuga

SEQ ID NO: 3168231 - RNA, 12 nt, Human
accuucuccuuc

SEQ ID NO: 3168232 - RNA, 17 nt, Human
accuucuauagcaucac

SEQ ID NO: 3168233 - RNA, 18 nt, Human
accuucuauagcaucacu

SEQ ID NO: 3168234 - RNA, 20 nt, Human
accuucuauagcaucacuua

SEQ ID NO: 3168235 - RNA, 23 nt, Human
accuucucacauggaaugagggu

SEQ ID NO: 3168236 - RNA, 13 nt, Human
accuucuccuuca

SEQ ID NO: 3168237 - RNA, 12 nt, Human
accuucuguggc

SEQ ID NO: 3168238 - RNA, 16 nt, Human
accuucuguggcucac

SEQ ID NO: 3168239 - RNA, 15 nt, Human
accuucuguggcuca

SEQ ID NO: 3168240 - RNA, 13 nt, Human
accuucuguggcu

SEQ ID NO: 3168241 - RNA, 15 nt, Human
accuugaaugaugcc

SEQ ID NO: 3168242 - RNA, 14 nt, Human
accuugacagggca

SEQ ID NO: 3168243 - RNA, 15 nt, Human
accuugacagggcac

SEQ ID NO: 3168244 - RNA, 18 nt, Human
accuucuuauuuaaucuu

SEQ ID NO: 3168245 - RNA, 17 nt, Human
accuuagacagucccug

SEQ ID NO: 3168246 - RNA, 14 nt, Human
accuuagccugccc

SEQ ID NO: 3168247 - RNA, 21 nt, Human
accuuagaagguauuaagauu

SEQ ID NO: 3168248 - RNA, 15 nt, Human
uccaccaucaagcca

SEQ ID NO: 3168249 - RNA, 23 nt, Human
accuggucacaggacucugccuc

SEQ ID NO: 3168250 - RNA, 22 nt, Human
accuggucacaggacucugccu

SEQ ID NO: 3168251 - RNA, 14 nt, Human
accuuaauauuucu

SEQ ID NO: 3168252 - RNA, 15 nt, Human
accuuaauauuucuu

SEQ ID NO: 3168253 - RNA, 21 nt, Human
uccagccugagcgacagugag

SEQ ID NO: 3168254 - RNA, 11 nt, Human
uccagccuggg

SEQ ID NO: 3168255 - RNA, 20 nt, Human
uccagccugagcgacaguga

SEQ ID NO: 3168256 - RNA, 22 nt, Human
uccagccccuggaugcagccuc

SEQ ID NO: 3168257 - RNA, 23 nt, Human
uccagaccccuggcuuuucacug

SEQ ID NO: 3168258 - RNA, 16 nt, Human
uccagccccuggaugc

SEQ ID NO: 3168259 - RNA, 17 nt, Human
uccagccccuggaugca

SEQ ID NO: 3168260 - RNA, 19 nt, Human
uccagccccuggaugcagc

SEQ ID NO: 3168261 - RNA, 21 nt, Human
uccagccccuggaugcagccu

SEQ ID NO: 3168262 - RNA, 15 nt, Human
uccagccccuggaug

SEQ ID NO: 3168263 - RNA, 14 nt, Human
uccagccccuggau

SEQ ID NO: 3168264 - RNA, 18 nt, Human
uccagaccccuggcuuuu

SEQ ID NO: 3168265 - RNA, 17 nt, Human
uccagaccccuggcuuu

SEQ ID NO: 3168266 - RNA, 16 nt, Human
uccagaccccuggcuu

SEQ ID NO: 3168267 - RNA, 15 nt, Human
uccagaccccuggcu

SEQ ID NO: 3168268 - RNA, 18 nt, Human
accuuuggcuuaauucca

SEQ ID NO: 3168269 - RNA, 15 nt, Human
accuuuggcuuaauu

SEQ ID NO: 3168270 - RNA, 22 nt, Human
uccagaaguuugagaucagccu

SEQ ID NO: 3168271 - RNA, 13 nt, Human
uccagaccccugg

SEQ ID NO: 3168272 - RNA, 19 nt, Human
uccagaaugaagaauucag

SEQ ID NO: 3168273 - RNA, 12 nt, Human
uccagaaugaag

SEQ ID NO: 3168274 - RNA, 22 nt, Human
uccacucucucuuguucuuacu

SEQ ID NO: 3168275 - RNA, 22 nt, Human
ucaugauagaaggcuaugggga

SEQ ID NO: 3168276 - RNA, 15 nt, Human
ucaugccaguauuuu

SEQ ID NO: 3168277 - RNA, 12 nt, Human
ucaugaauuuua

SEQ ID NO: 3168278 - RNA, 15 nt, Human
ucaugaauuuuaaag

SEQ ID NO: 3168279 - RNA, 16 nt, Human
ucaugaauuuuaaagu

SEQ ID NO: 3168280 - RNA, 18 nt, Human
ucaugaauuuuaaaguau

SEQ ID NO: 3168281 - RNA, 22 nt, Human
accuccucggcuggcuguccac

SEQ ID NO: 3168282 - RNA, 23 nt, Human
ucauccacugugccaugugccag

SEQ ID NO: 3168283 - RNA, 21 nt, Human
ucauccacugugccaugugcc

SEQ ID NO: 3168284 - RNA, 19 nt, Human
ucauccacugugccaugug

SEQ ID NO: 3168285 - RNA, 13 nt, Human
ucaugucuggcua

SEQ ID NO: 3168286 - RNA, 19 nt, Human
ucauguccugugucaguuu

SEQ ID NO: 3168287 - RNA, 18 nt, Human
ucauguccugugucaguu

SEQ ID NO: 3168288 - RNA, 16 nt, Human
ucauguccugugucag

SEQ ID NO: 3168289 - RNA, 15 nt, Human
ucauguccuguguca

SEQ ID NO: 3168290 - RNA, 20 nt, Human
ucauguccugugucaguuua

SEQ ID NO: 3168291 - RNA, 13 nt, Human
ucaugucuauugu

SEQ ID NO: 3168292 - RNA, 20 nt, Human
ucaugucuauuguccaaagu

SEQ ID NO: 3168293 - RNA, 22 nt, Human
ucauguucaauuauuuccccca

SEQ ID NO: 3168294 - RNA, 19 nt, Human
ucauguucccacuucaaaa

SEQ ID NO: 3168295 - RNA, 23 nt, Human
ucauguucccacuucaaaacaaa

SEQ ID NO: 3168296 - RNA, 22 nt, Human
ucauguucccacuucaaaacaa

SEQ ID NO: 3168297 - RNA, 15 nt, Human
ucauguuaaccucug

SEQ ID NO: 3168298 - RNA, 20 nt, Human
ucauguuaaccucugcuuuu

SEQ ID NO: 3168299 - RNA, 21 nt, Human
ucauguuaaccucugcuuuua

SEQ ID NO: 3168300 - RNA, 18 nt, Human
ucauguuaauugauagaa

SEQ ID NO: 3168301 - RNA, 13 nt, Human
ucauuaaauuacu

SEQ ID NO: 3168302 - RNA, 15 nt, Human
ucauuaaauuacuau

SEQ ID NO: 3168303 - RNA, 22 nt, Human
ucauuaaccuuaucauaaauuc

SEQ ID NO: 3168304 - RNA, 23 nt, Human
accugaagggguuuucuugauaa

SEQ ID NO: 3168305 - RNA, 21 nt, Human
accugaagggguuuucuugau

SEQ ID NO: 3168306 - RNA, 17 nt, Human
accucugauuuauuuug

SEQ ID NO: 3168307 - RNA, 18 nt, Human
accucugauuuauuuugu

SEQ ID NO: 3168308 - RNA, 23 nt, Human
accucugauuuauuuuguaugaa

SEQ ID NO: 3168309 - RNA, 12 nt, Human
accucugcacaa

SEQ ID NO: 3168310 - RNA, 23 nt, Human
accucucccuuggauuguccccg

SEQ ID NO: 3168311 - RNA, 14 nt, Human
accucucucacucc

SEQ ID NO: 3168312 - RNA, 19 nt, Human
accucucucacuccuugaa

SEQ ID NO: 3168313 - RNA, 14 nt, Human
accucucugucaug

SEQ ID NO: 3168314 - RNA, 16 nt, Human
accucucugucaugug

SEQ ID NO: 3168315 - RNA, 13 nt, Human
accucucccuugg

SEQ ID NO: 3168316 - RNA, 14 nt, Human
accucucccuugga

SEQ ID NO: 3168317 - RNA, 15 nt, Human
accucucccuuggau

SEQ ID NO: 3168318 - RNA, 15 nt, Human
accucuagcccugcc

SEQ ID NO: 3168319 - RNA, 19 nt, Human
accucuagaauuuuaagcc

SEQ ID NO: 3168320 - RNA, 13 nt, Human
accucuagaauuu

SEQ ID NO: 3168321 - RNA, 12 nt, Human
accucuagaauu

SEQ ID NO: 3168322 - RNA, 18 nt, Human
accucuagcccugcccgg

SEQ ID NO: 3168323 - RNA, 16 nt, Human
accucuagcccugccc

SEQ ID NO: 3168324 - RNA, 21 nt, Human
ucauuggauucugagagcugu

SEQ ID NO: 3168325 - RNA, 22 nt, Human
ucauugggccauguuuaagugu

SEQ ID NO: 3168326 - RNA, 13 nt, Human
ucauuguaauguu

SEQ ID NO: 3168327 - RNA, 17 nt, Human
accucggugccuuccuc

SEQ ID NO: 3168328 - RNA, 19 nt, Human
accucgcuccaacuccaac

SEQ ID NO: 3168329 - RNA, 18 nt, Human
accucgcuccaacuccaa

SEQ ID NO: 3168330 - RNA, 22 nt, Human
ucauugaccugaggcccuucuc

SEQ ID NO: 3168331 - RNA, 14 nt, Human
ucauugcuucuucu

SEQ ID NO: 3168332 - RNA, 12 nt, Human
ucauugcuucuu

SEQ ID NO: 3168333 - RNA, 17 nt, Human
ucauugcuucuucugag

SEQ ID NO: 3168334 - RNA, 16 nt, Human
ucauugcuucuucuga

SEQ ID NO: 3168335 - RNA, 19 nt, Human
ucauugaccugaggcccuu

SEQ ID NO: 3168336 - RNA, 22 nt, Human
ucauucuaaagauagaguaaaa

SEQ ID NO: 3168337 - RNA, 13 nt, Human
ucauucuaaagau

SEQ ID NO: 3168338 - RNA, 12 nt, Human
ucauucuaaaga

SEQ ID NO: 3168339 - RNA, 20 nt, Human
ucauuccuuuuuauuuauau

SEQ ID NO: 3168340 - RNA, 21 nt, Human
ucauucgggccccaccugcag

SEQ ID NO: 3168341 - RNA, 18 nt, Human
ucauucgggccccaccug

SEQ ID NO: 3168342 - RNA, 18 nt, Human
ucauuccuuuuuauuuau

SEQ ID NO: 3168343 - RNA, 23 nt, Human
ucauucgcuacuaugauuuaauu

SEQ ID NO: 3168344 - RNA, 16 nt, Human
accgccuccuacagcc

SEQ ID NO: 3168345 - RNA, 13 nt, Human
accgccucuuccc

SEQ ID NO: 3168346 - RNA, 14 nt, Human
accgccucuucccg

SEQ ID NO: 3168347 - RNA, 13 nt, Human
accggagagagaa

SEQ ID NO: 3168348 - RNA, 20 nt, Human
accgcagacaggaccaggga

SEQ ID NO: 3168349 - RNA, 20 nt, Human
accgaugcaaacauuggaag

SEQ ID NO: 3168350 - RNA, 24 nt, Human
accgagucucuucuccacuggaug

SEQ ID NO: 3168351 - RNA, 21 nt, Human
accgagucucuucuccacugg

SEQ ID NO: 3168352 - RNA, 20 nt, Human
accgagucucuucuccacug

SEQ ID NO: 3168353 - RNA, 17 nt, Human
accgccaaggcuggggg

SEQ ID NO: 3168354 - RNA, 17 nt, Human
accgcagacaggaccag

SEQ ID NO: 3168355 - RNA, 21 nt, Human
ucauauucaugcaaguauucu

SEQ ID NO: 3168356 - RNA, 14 nt, Human
ucauauucaugcaa

SEQ ID NO: 3168357 - RNA, 15 nt, Human
ucauauucagcuugc

SEQ ID NO: 3168358 - RNA, 22 nt, Human
ucauauuagacuucuguuuuca

SEQ ID NO: 3168359 - RNA, 12 nt, Human
ucauauuauaca

SEQ ID NO: 3168360 - RNA, 20 nt, Human
ucauauuagacuucuguuuu

SEQ ID NO: 3168361 - RNA, 18 nt, Human
ucauauuagacuucuguu

SEQ ID NO: 3168362 - RNA, 13 nt, Human
ucauauuagacuu

SEQ ID NO: 3168363 - RNA, 15 nt, Human
ucauauuacaauauu

SEQ ID NO: 3168364 - RNA, 14 nt, Human
ucauauuacaauau

SEQ ID NO: 3168365 - RNA, 13 nt, Human
ucauauuacaaua

SEQ ID NO: 3168366 - RNA, 10 nt, Human
acccuuuucu

SEQ ID NO: 3168367 - RNA, 15 nt, Human
acccuuuuccauuuu

SEQ ID NO: 3168368 - RNA, 16 nt, Human
ucauauuuacuucuua

SEQ ID NO: 3168369 - RNA, 21 nt, Human
accgaacugggcauauuucua

SEQ ID NO: 3168370 - RNA, 22 nt, Human
ucauauuuacuucuuauacauu

SEQ ID NO: 3168371 - RNA, 21 nt, Human
ucauauuuacuucuuauacau

SEQ ID NO: 3168372 - RNA, 20 nt, Human
ucauauuuacuucuuauaca

SEQ ID NO: 3168373 - RNA, 22 nt, Human
accgacuagacacacaaagcag

SEQ ID NO: 3168374 - RNA, 15 nt, Human
accgacuagacacac

SEQ ID NO: 3168375 - RNA, 18 nt, Human
accgagucucuucuccac

SEQ ID NO: 3168376 - RNA, 11 nt, Human
accgacaagca

SEQ ID NO: 3168377 - RNA, 12 nt, Human
accgaauauuga

SEQ ID NO: 3168378 - RNA, 19 nt, Human
accguguuugucucuucug

SEQ ID NO: 3168379 - RNA, 18 nt, Human
accguguuugucucuucu

SEQ ID NO: 3168380 - RNA, 15 nt, Human
accguguuugucucu

SEQ ID NO: 3168381 - RNA, 13 nt, Human
accuagccuuaga

SEQ ID NO: 3168382 - RNA, 17 nt, Human
accuaugagugagaaua

SEQ ID NO: 3168383 - RNA, 16 nt, Human
accucacacuccuuua

SEQ ID NO: 3168384 - RNA, 20 nt, Human
accuccgccucuuggguuca

SEQ ID NO: 3168385 - RNA, 16 nt, Human
accucccccacuccca

SEQ ID NO: 3168386 - RNA, 11 nt, Human
accucccccac

SEQ ID NO: 3168387 - RNA, 18 nt, Human
ucauccacugugccaugu

SEQ ID NO: 3168388 - RNA, 19 nt, Human
accuccucccacugcccac

SEQ ID NO: 3168389 - RNA, 18 nt, Human
accuccucccacugccca

SEQ ID NO: 3168390 - RNA, 16 nt, Human
accuccucccacugcc

SEQ ID NO: 3168391 - RNA, 15 nt, Human
accuccucccacugc

SEQ ID NO: 3168392 - RNA, 14 nt, Human
accuccucccacug

SEQ ID NO: 3168393 - RNA, 18 nt, Human
accuccuaaaaggcccag

SEQ ID NO: 3168394 - RNA, 17 nt, Human
accuccuaaaaggccca

SEQ ID NO: 3168395 - RNA, 20 nt, Human
accuccggccaggugccucc

SEQ ID NO: 3168396 - RNA, 21 nt, Human
accuccggccaggugccuccu

SEQ ID NO: 3168397 - RNA, 22 nt, Human
accuccggccaggugccuccug

SEQ ID NO: 3168398 - RNA, 23 nt, Human
accuccggccaggugccuccuga

SEQ ID NO: 3168399 - RNA, 21 nt, Human
accuccuaaaaggcccagaga

SEQ ID NO: 3168400 - RNA, 19 nt, Human
accuccuaaaaggcccaga

SEQ ID NO: 3168401 - RNA, 22 nt, Human
accuccuaaaaggcccagagag

SEQ ID NO: 3168402 - RNA, 13 nt, Human
accuccucacauu

SEQ ID NO: 3168403 - RNA, 23 nt, Human
accagacaccuugacagggcaca

SEQ ID NO: 3168404 - RNA, 22 nt, Human
accagacaccuugacagggcac

SEQ ID NO: 3168405 - RNA, 17 nt, Human
accagacaccuugacag

SEQ ID NO: 3168406 - RNA, 17 nt, Human
accagagcccaccuugg

SEQ ID NO: 3168407 - RNA, 22 nt, Human
accagagcccaccuuggcucaa

SEQ ID NO: 3168408 - RNA, 19 nt, Human
accagagcccaccuuggcu

SEQ ID NO: 3168409 - RNA, 23 nt, Human
accagcgcacugauggucacugg

SEQ ID NO: 3168410 - RNA, 19 nt, Human
accaggcaacuugggaacu

SEQ ID NO: 3168411 - RNA, 23 nt, Human
accaggcaccuccccucccgccc

SEQ ID NO: 3168412 - RNA, 15 nt, Human
accaggcaccucccc

SEQ ID NO: 3168413 - RNA, 19 nt, Human
accaggcaccuccccuccc

SEQ ID NO: 3168414 - RNA, 15 nt, Human
accaggccccccugu

SEQ ID NO: 3168415 - RNA, 13 nt, Human
ucaccucccccau

SEQ ID NO: 3168416 - RNA, 15 nt, Human
ucaccucccccaucu

SEQ ID NO: 3168417 - RNA, 19 nt, Human
ucaccugaagacucauucu

SEQ ID NO: 3168418 - RNA, 16 nt, Human
ucaccugaagacucau

SEQ ID NO: 3168419 - RNA, 23 nt, Human
ucaccugaagacucauucuucug

SEQ ID NO: 3168420 - RNA, 13 nt, Human
accacugcagaag

SEQ ID NO: 3168421 - RNA, 14 nt, Human
accacugaaucugu

SEQ ID NO: 3168422 - RNA, 14 nt, Human
accacugcagaaga

SEQ ID NO: 3168423 - RNA, 19 nt, Human
accacugcagaagacagua

SEQ ID NO: 3168424 - RNA, 15 nt, Human
accacuucagcugac

SEQ ID NO: 3168425 - RNA, 13 nt, Human
accacuucagcug

SEQ ID NO: 3168426 - RNA, 14 nt, Human
accacuucagcuga

SEQ ID NO: 3168427 - RNA, 24 nt, Human
accacaucuugcucugcugacaga

SEQ ID NO: 3168428 - RNA, 21 nt, Human
accacaucuugcucugcugac

SEQ ID NO: 3168429 - RNA, 20 nt, Human
accacaucuugcucugcuga

SEQ ID NO: 3168430 - RNA, 16 nt, Human
accacucaagaccaaa

SEQ ID NO: 3168431 - RNA, 12 nt, Human
uauuucauuucu

SEQ ID NO: 3168432 - RNA, 20 nt, Human
uauuucaugaauacauugua

SEQ ID NO: 3168433 - RNA, 22 nt, Human
uauuucauucgggccccaccug

SEQ ID NO: 3168434 - RNA, 20 nt, Human
accacacuugucggcuccag

SEQ ID NO: 3168435 - RNA, 14 nt, Human
uauuucagaaauac

SEQ ID NO: 3168436 - RNA, 13 nt, Human
uauuucagaaaua

SEQ ID NO: 3168437 - RNA, 12 nt, Human
uauuucagaaau

SEQ ID NO: 3168438 - RNA, 20 nt, Human
uauuucacuuuaguuuuuga

SEQ ID NO: 3168439 - RNA, 16 nt, Human
uauuucagcaaacuug

SEQ ID NO: 3168440 - RNA, 23 nt, Human
uauuucagaaguuuaaauauuaa

SEQ ID NO: 3168441 - RNA, 16 nt, Human
uauuucagaaguuuaa

SEQ ID NO: 3168442 - RNA, 14 nt, Human
uauuucagaaguuu

SEQ ID NO: 3168443 - RNA, 19 nt, Human
uauuucaucagaacagcug

SEQ ID NO: 3168444 - RNA, 23 nt, Human
uauuucaguuauugucccuggcu

SEQ ID NO: 3168445 - RNA, 18 nt, Human
uauuucagcaaacuuguu

SEQ ID NO: 3168446 - RNA, 22 nt, Human
uauuucaguuauugucccuggc

SEQ ID NO: 3168447 - RNA, 21 nt, Human
uauuucaucauauuauacaga

SEQ ID NO: 3168448 - RNA, 20 nt, Human
uauuucaucauauuauacag

SEQ ID NO: 3168449 - RNA, 20 nt, Human
uauuucaucagaacagcugu

SEQ ID NO: 3168450 - RNA, 11 nt, Human
accacagcagu

SEQ ID NO: 3168451 - RNA, 22 nt, Human
accacaguguaccauuaaaaua

SEQ ID NO: 3168452 - RNA, 21 nt, Human
accacaguguaccauuaaaau

SEQ ID NO: 3168453 - RNA, 14 nt, Human
accacaucuugcuc

SEQ ID NO: 3168454 - RNA, 18 nt, Human
accacauacguaaaaauc

SEQ ID NO: 3168455 - RNA, 12 nt, Human
accacagacuuu

SEQ ID NO: 3168456 - RNA, 23 nt, Human
accacagcaacgaucacaaauga

SEQ ID NO: 3168457 - RNA, 23 nt, Human
accacagacuuuagcuuucugag

SEQ ID NO: 3168458 - RNA, 21 nt, Human
acccaaauguucaucaaugaa

SEQ ID NO: 3168459 - RNA, 18 nt, Human
acccaaaaggcagaagca

SEQ ID NO: 3168460 - RNA, 20 nt, Human
acccaaauguucaucaauga

SEQ ID NO: 3168461 - RNA, 18 nt, Human
acccagcccacuucugcc

SEQ ID NO: 3168462 - RNA, 15 nt, Human
acccagcccacuucu

SEQ ID NO: 3168463 - RNA, 14 nt, Human
ucagaacaaauuca

SEQ ID NO: 3168464 - RNA, 16 nt, Human
ucagaacagcuguuga

SEQ ID NO: 3168465 - RNA, 14 nt, Human
ucagaacagcuguu

SEQ ID NO: 3168466 - RNA, 16 nt, Human
ucagaacaaauucagg

SEQ ID NO: 3168467 - RNA, 12 nt, Human
ucagaacagcug

SEQ ID NO: 3168468 - RNA, 17 nt, Human
acccagcccacuucugc

SEQ ID NO: 3168469 - RNA, 16 nt, Human
acccagcccacuucug

SEQ ID NO: 3168470 - RNA, 21 nt, Human
acccagaaaaucugaauugga

SEQ ID NO: 3168471 - RNA, 21 nt, Human
acccagaaacgccacaucccc

SEQ ID NO: 3168472 - RNA, 20 nt, Human
acccagaaacgccacauccc

SEQ ID NO: 3168473 - RNA, 13 nt, Human
acccaaaaggcag

SEQ ID NO: 3168474 - RNA, 15 nt, Human
acccaaaaggcagaa

SEQ ID NO: 3168475 - RNA, 23 nt, Human
accauuuugggguacccacugcu

SEQ ID NO: 3168476 - RNA, 15 nt, Human
accauuuuuguuacu

SEQ ID NO: 3168477 - RNA, 16 nt, Human
accauuuuuguuacuc

SEQ ID NO: 3168478 - RNA, 22 nt, Human
accauuuugggguacccacugc

SEQ ID NO: 3168479 - RNA, 16 nt, Human
accauuuccccagggc

SEQ ID NO: 3168480 - RNA, 23 nt, Human
accauuucaguaaaccugucuga

SEQ ID NO: 3168481 - RNA, 19 nt, Human
accauuuccguaauucuua

SEQ ID NO: 3168482 - RNA, 19 nt, Human
accauuuccccagggcacg

SEQ ID NO: 3168483 - RNA, 18 nt, Human
accauuuccccagggcac

SEQ ID NO: 3168484 - RNA, 17 nt, Human
accauuuccccagggca

SEQ ID NO: 3168485 - RNA, 13 nt, Human
accauuuaucuug

SEQ ID NO: 3168486 - RNA, 16 nt, Human
accauuuaucuugaag

SEQ ID NO: 3168487 - RNA, 15 nt, Human
accauuuaucuugaa

SEQ ID NO: 3168488 - RNA, 13 nt, Human
accauucuccacc

SEQ ID NO: 3168489 - RNA, 16 nt, Human
accauucuccaccugc

SEQ ID NO: 3168490 - RNA, 20 nt, Human
accaugaucacuuaucaguu

SEQ ID NO: 3168491 - RNA, 22 nt, Human
accaugauuaaccacuucagcu

SEQ ID NO: 3168492 - RNA, 23 nt, Human
accaugauuaaccacuucagcug

SEQ ID NO: 3168493 - RNA, 12 nt, Human
accauuccccau

SEQ ID NO: 3168494 - RNA, 15 nt, Human
accauuccccauggg

SEQ ID NO: 3168495 - RNA, 23 nt, Human
ucaccugcuucucugcccagcuu

SEQ ID NO: 3168496 - RNA, 22 nt, Human
ucaccugcuucucugcccagcu

SEQ ID NO: 3168497 - RNA, 17 nt, Human
ucaccugcuucucugcc

SEQ ID NO: 3168498 - RNA, 15 nt, Human
ucaccugcuucucug

SEQ ID NO: 3168499 - RNA, 13 nt, Human
ucaccugcuucuc

SEQ ID NO: 3168500 - RNA, 16 nt, Human
ucaccugccccucaac

SEQ ID NO: 3168501 - RNA, 14 nt, Human
ucacugagacagcc

SEQ ID NO: 3168502 - RNA, 15 nt, Human
ucacugagacagccc

SEQ ID NO: 3168503 - RNA, 13 nt, Human
ucacugagacagc

SEQ ID NO: 3168504 - RNA, 16 nt, Human
ucacuguugcccaggc

SEQ ID NO: 3168505 - RNA, 14 nt, Human
ucacugucugucug

SEQ ID NO: 3168506 - RNA, 12 nt, Human
ucacugcagccu

SEQ ID NO: 3168507 - RNA, 15 nt, Human
ucacugcacagugca

SEQ ID NO: 3168508 - RNA, 20 nt, Human
ucacugcacagugcaucuca

SEQ ID NO: 3168509 - RNA, 24 nt, Human
ucacugcacagugcaucucagccc

SEQ ID NO: 3168510 - RNA, 22 nt, Human
ucacugcacagugcaucucagc

SEQ ID NO: 3168511 - RNA, 15 nt, Human
accaguucugggcaa

SEQ ID NO: 3168512 - RNA, 12 nt, Human
accagugccuua

SEQ ID NO: 3168513 - RNA, 14 nt, Human
accagggacugagg

SEQ ID NO: 3168514 - RNA, 18 nt, Human
ucacuguugcccaggcug

SEQ ID NO: 3168515 - RNA, 17 nt, Human
ucacuguugcccaggcu

SEQ ID NO: 3168516 - RNA, 22 nt, Human
accagggccagaaguagcuuug

SEQ ID NO: 3168517 - RNA, 15 nt, Human
accagggccagaagu

SEQ ID NO: 3168518 - RNA, 23 nt, Human
acccucccucuacugggagccua

SEQ ID NO: 3168519 - RNA, 15 nt, Human
acccuccacucuccu

SEQ ID NO: 3168520 - RNA, 20 nt, Human
accccuucgcuccugugucu

SEQ ID NO: 3168521 - RNA, 23 nt, Human
ucaggguuggccccugcccggcu

SEQ ID NO: 3168522 - RNA, 14 nt, Human
accccuugauuuuc

SEQ ID NO: 3168523 - RNA, 14 nt, Human
acccuccaaggcca

SEQ ID NO: 3168524 - RNA, 11 nt, Human
acccuccaagg

SEQ ID NO: 3168525 - RNA, 12 nt, Human
acccuccaaggc

SEQ ID NO: 3168526 - RNA, 15 nt, Human
acccgacuccagucc

SEQ ID NO: 3168527 - RNA, 15 nt, Human
acccgagcugggacc

SEQ ID NO: 3168528 - RNA, 16 nt, Human
acccuuguggucccac

SEQ ID NO: 3168529 - RNA, 17 nt, Human
acccuuguggucccacc

SEQ ID NO: 3168530 - RNA, 19 nt, Human
acccuuguggucccacccc

SEQ ID NO: 3168531 - RNA, 15 nt, Human
acccuugugguccca

SEQ ID NO: 3168532 - RNA, 23 nt, Human
acccuuccaucugauuccagcac

SEQ ID NO: 3168533 - RNA, 11 nt, Human
acccugcccug

SEQ ID NO: 3168534 - RNA, 12 nt, Human
acccugcccugu

SEQ ID NO: 3168535 - RNA, 13 nt, Human
acccugcccugug

SEQ ID NO: 3168536 - RNA, 14 nt, Human
acccucuuagaaaa

SEQ ID NO: 3168537 - RNA, 14 nt, Human
ucaggcccaaagcc

SEQ ID NO: 3168538 - RNA, 22 nt, Human
ucaggcauuuucccccuuggcu

SEQ ID NO: 3168539 - RNA, 15 nt, Human
ucaggccgaaggagg

SEQ ID NO: 3168540 - RNA, 15 nt, Human
ucaggccagcugcuu

SEQ ID NO: 3168541 - RNA, 20 nt, Human
ucaggccagcugcuugggcu

SEQ ID NO: 3168542 - RNA, 11 nt, Human
ucaggccaggc

SEQ ID NO: 3168543 - RNA, 14 nt, Human
ucaggccagcugcu

SEQ ID NO: 3168544 - RNA, 19 nt, Human
accccuucgcuccuguguc

SEQ ID NO: 3168545 - RNA, 16 nt, Human
ucagguaacaggcaga

SEQ ID NO: 3168546 - RNA, 15 nt, Human
ucagguaacaggcag

SEQ ID NO: 3168547 - RNA, 13 nt, Human
ucagguaacaggc

SEQ ID NO: 3168548 - RNA, 14 nt, Human
ucagggucccuggu

SEQ ID NO: 3168549 - RNA, 18 nt, Human
ucagggucccugguggca

SEQ ID NO: 3168550 - RNA, 23 nt, Human
ucaggggugugcggccuuuggcu

SEQ ID NO: 3168551 - RNA, 13 nt, Human
ucagggucccugg

SEQ ID NO: 3168552 - RNA, 17 nt, Human
ucagcggggacagcucc

SEQ ID NO: 3168553 - RNA, 16 nt, Human
ucagcggggacagcuc

SEQ ID NO: 3168554 - RNA, 15 nt, Human
ucagcggggacagcu

SEQ ID NO: 3168555 - RNA, 20 nt, Human
ucaggccaaacucaccugcc

SEQ ID NO: 3168556 - RNA, 23 nt, Human
ucaggccaaacucaccugccccu

SEQ ID NO: 3168557 - RNA, 17 nt, Human
ucaggcauuuucccccu

SEQ ID NO: 3168558 - RNA, 16 nt, Human
ucaggaagcucagggc

SEQ ID NO: 3168559 - RNA, 17 nt, Human
ucaggaagcucagggcc

SEQ ID NO: 3168560 - RNA, 19 nt, Human
ucaggaagcucagggccug

SEQ ID NO: 3168561 - RNA, 20 nt, Human
ucaggaagcucagggccugg

SEQ ID NO: 3168562 - RNA, 18 nt, Human
ucagcccucccugccccu

SEQ ID NO: 3168563 - RNA, 19 nt, Human
ucagcccucccugccccuc

SEQ ID NO: 3168564 - RNA, 17 nt, Human
ucagcccucccugcccc

SEQ ID NO: 3168565 - RNA, 22 nt, Human
acccagcuaugguucucucgca

SEQ ID NO: 3168566 - RNA, 13 nt, Human
acccagcucuggu

SEQ ID NO: 3168567 - RNA, 15 nt, Human
acccagcucuggucc

SEQ ID NO: 3168568 - RNA, 20 nt, Human
acccagguuuugcacucuug

SEQ ID NO: 3168569 - RNA, 20 nt, Human
acccagcugcaccccuuccu

SEQ ID NO: 3168570 - RNA, 14 nt, Human
acccagcugcaccc

SEQ ID NO: 3168571 - RNA, 13 nt, Human
acccagcugcacc

SEQ ID NO: 3168572 - RNA, 16 nt, Human
acccagguguggccua

SEQ ID NO: 3168573 - RNA, 23 nt, Human
acccaggugcuaggaacacuccu

SEQ ID NO: 3168574 - RNA, 22 nt, Human
ucagauuugccuuauuggcagc

SEQ ID NO: 3168575 - RNA, 16 nt, Human
ucagauguuuaaaaca

SEQ ID NO: 3168576 - RNA, 16 nt, Human
ucagauucaggcauuu

SEQ ID NO: 3168577 - RNA, 13 nt, Human
ucagauucaggca

SEQ ID NO: 3168578 - RNA, 15 nt, Human
ucagauguuaaaaua

SEQ ID NO: 3168579 - RNA, 16 nt, Human
ucagauguuaaaauaa

SEQ ID NO: 3168580 - RNA, 17 nt, Human
ucagauguuaaaauaaa

SEQ ID NO: 3168581 - RNA, 18 nt, Human
ucagauguuaaaauaaau

SEQ ID NO: 3168582 - RNA, 20 nt, Human
ucagauguuaaaauaaaugg

SEQ ID NO: 3168583 - RNA, 13 nt, Human
ucagauguuuaaa

SEQ ID NO: 3168584 - RNA, 15 nt, Human
ucagauguuuaaaac

SEQ ID NO: 3168585 - RNA, 17 nt, Human
ucagauguuuaaaacac

SEQ ID NO: 3168586 - RNA, 12 nt, Human
ucagauguuuga

SEQ ID NO: 3168587 - RNA, 14 nt, Human
ucagaagaaauaaa

SEQ ID NO: 3168588 - RNA, 16 nt, Human
ucagaagaaauaaaua

SEQ ID NO: 3168589 - RNA, 14 nt, Human
ucagaagaaaauua

SEQ ID NO: 3168590 - RNA, 13 nt, Human
ucagaagacacug

SEQ ID NO: 3168591 - RNA, 13 nt, Human
ucagaucuucugu

SEQ ID NO: 3168592 - RNA, 15 nt, Human
ucagaacuguuuuug

SEQ ID NO: 3168593 - RNA, 22 nt, Human
accccuggcuccaggccagggg

SEQ ID NO: 3168594 - RNA, 12 nt, Human
accccuggcuuu

SEQ ID NO: 3168595 - RNA, 20 nt, Human
accccuggcuccaggccagg

SEQ ID NO: 3168596 - RNA, 19 nt, Human
accccuggcuccaggccag

SEQ ID NO: 3168597 - RNA, 17 nt, Human
accccuggaccccagcc

SEQ ID NO: 3168598 - RNA, 20 nt, Human
accccuggaccccagccuca

SEQ ID NO: 3168599 - RNA, 18 nt, Human
accccuggaccccagccu

SEQ ID NO: 3168600 - RNA, 23 nt, Human
accccuggaccccagccucaaau

SEQ ID NO: 3168601 - RNA, 17 nt, Human
accccuucccauuccau

SEQ ID NO: 3168602 - RNA, 10 nt, Human
ucagccuggg

SEQ ID NO: 3168603 - RNA, 12 nt, Human
ucagccugggca

SEQ ID NO: 3168604 - RNA, 15 nt, Human
accccuggcuuuuca

SEQ ID NO: 3168605 - RNA, 16 nt, Human
acccccaggaccccug

SEQ ID NO: 3168606 - RNA, 16 nt, Human
acccccauucuguccu

SEQ ID NO: 3168607 - RNA, 15 nt, Human
acccccauucugucc

SEQ ID NO: 3168608 - RNA, 13 nt, Human
acccccagcuccc

SEQ ID NO: 3168609 - RNA, 12 nt, Human
acccccagcucc

SEQ ID NO: 3168610 - RNA, 20 nt, Human
accccauggccggcuuucag

SEQ ID NO: 3168611 - RNA, 14 nt, Human
accccauggccggc

SEQ ID NO: 3168612 - RNA, 18 nt, Human
accccaucugugaauaag

SEQ ID NO: 3168613 - RNA, 16 nt, Human
accccaucugugaaua

SEQ ID NO: 3168614 - RNA, 15 nt, Human
accccaucugugaau

SEQ ID NO: 3168615 - RNA, 14 nt, Human
acccccagccugcu

SEQ ID NO: 3168616 - RNA, 15 nt, Human
acccccagccugcua

SEQ ID NO: 3168617 - RNA, 22 nt, Human
ucccucauccucauacccaccc

SEQ ID NO: 3168618 - RNA, 21 nt, Human
ucccucagucuggcccuuccu

SEQ ID NO: 3168619 - RNA, 20 nt, Human
ucccucagucuggcccuucc

SEQ ID NO: 3168620 - RNA, 22 nt, Human
acucauugaccugaggcccuuc

SEQ ID NO: 3168621 - RNA, 20 nt, Human
acucauugcaucauuuacaa

SEQ ID NO: 3168622 - RNA, 17 nt, Human
acucaugcaugcaaauu

SEQ ID NO: 3168623 - RNA, 21 nt, Human
acuccaaagaaauguaaggga

SEQ ID NO: 3168624 - RNA, 18 nt, Human
acuccaacauccacucuc

SEQ ID NO: 3168625 - RNA, 17 nt, Human
acuccaacauccacucu

SEQ ID NO: 3168626 - RNA, 16 nt, Human
acuccaacauccacuc

SEQ ID NO: 3168627 - RNA, 15 nt, Human
acuccaacauccacu

SEQ ID NO: 3168628 - RNA, 19 nt, Human
acuccaacauccacucucu

SEQ ID NO: 3168629 - RNA, 20 nt, Human
acuccagcuggguuggaaaa

SEQ ID NO: 3168630 - RNA, 14 nt, Human
acuccuaccuggua

SEQ ID NO: 3168631 - RNA, 23 nt, Human
acuccaguagcgagagacggcac

SEQ ID NO: 3168632 - RNA, 14 nt, Human
uccgucacuaccug

SEQ ID NO: 3168633 - RNA, 18 nt, Human
uccgucacuaccuggcug

SEQ ID NO: 3168634 - RNA, 17 nt, Human
uccgucacuaccuggcu

SEQ ID NO: 3168635 - RNA, 16 nt, Human
uccgucacuaccuggc

SEQ ID NO: 3168636 - RNA, 15 nt, Human
uccgucacuaccugg

SEQ ID NO: 3168637 - RNA, 22 nt, Human
ucccuuugacgccaucccagcc

SEQ ID NO: 3168638 - RNA, 23 nt, Human
ucccuuugacgccaucccagccc

SEQ ID NO: 3168639 - RNA, 21 nt, Human
ucccuuugacgccaucccagc

SEQ ID NO: 3168640 - RNA, 14 nt, Human
uccuaggcauuugc

SEQ ID NO: 3168641 - RNA, 21 nt, Human
uccuaaaaggcccagagagaa

SEQ ID NO: 3168642 - RNA, 18 nt, Human
uccuaaaaggcccagaga

SEQ ID NO: 3168643 - RNA, 16 nt, Human
uccuaaaaggcccaga

SEQ ID NO: 3168644 - RNA, 15 nt, Human
uccuaaaaggcccag

SEQ ID NO: 3168645 - RNA, 13 nt, Human
uccuaaaaggccc

SEQ ID NO: 3168646 - RNA, 21 nt, Human
uccguuugauuugucacugcu

SEQ ID NO: 3168647 - RNA, 20 nt, Human
uccguuugauuugucacugc

SEQ ID NO: 3168648 - RNA, 22 nt, Human
ucccuuuccaaaugcccagcuu

SEQ ID NO: 3168649 - RNA, 17 nt, Human
ucccuuucauuugcuau

SEQ ID NO: 3168650 - RNA, 20 nt, Human
ucccuuuagcuguguuauua

SEQ ID NO: 3168651 - RNA, 18 nt, Human
ucccuuuagcuguguuau

SEQ ID NO: 3168652 - RNA, 17 nt, Human
ucccuuuagcuguguua

SEQ ID NO: 3168653 - RNA, 18 nt, Human
ucccuuacgugaguccug

SEQ ID NO: 3168654 - RNA, 22 nt, Human
ucccuuacgugaguccuggcau

SEQ ID NO: 3168655 - RNA, 21 nt, Human
ucccuucaaccauuccccaug

SEQ ID NO: 3168656 - RNA, 11 nt, Human
ucccuucaacc

SEQ ID NO: 3168657 - RNA, 21 nt, Human
ucccuuacuuuaccucucugu

SEQ ID NO: 3168658 - RNA, 17 nt, Human
ucccuuacgugaguccu

SEQ ID NO: 3168659 - RNA, 23 nt, Human
ucccugguggcagcucaccucuc

SEQ ID NO: 3168660 - RNA, 23 nt, Human
acuccugcacacgcuccuuccuc

SEQ ID NO: 3168661 - RNA, 18 nt, Human
ucccugguucaagcgauu

SEQ ID NO: 3168662 - RNA, 14 nt, Human
ucccugguucaagc

SEQ ID NO: 3168663 - RNA, 21 nt, Human
ucccuguaauuguuguuugua

SEQ ID NO: 3168664 - RNA, 20 nt, Human
ucccuguaauuguuguuugu

SEQ ID NO: 3168665 - RNA, 20 nt, Human
ucccuguguuaauuuaaguu

SEQ ID NO: 3168666 - RNA, 17 nt, Human
acucuggaaaaggcaua

SEQ ID NO: 3168667 - RNA, 12 nt, Human
acucuggaaaag

SEQ ID NO: 3168668 - RNA, 13 nt, Human
acucugcagacug

SEQ ID NO: 3168669 - RNA, 18 nt, Human
acucuccucugcugcugg

SEQ ID NO: 3168670 - RNA, 19 nt, Human
acucuccucugcugcuggc

SEQ ID NO: 3168671 - RNA, 16 nt, Human
acucuccucugcugcu

SEQ ID NO: 3168672 - RNA, 19 nt, Human
acucugaauuuaucuuuga

SEQ ID NO: 3168673 - RNA, 18 nt, Human
acucugaauuuaucuuug

SEQ ID NO: 3168674 - RNA, 17 nt, Human
acucugaauuuaucuuu

SEQ ID NO: 3168675 - RNA, 15 nt, Human
acucugaauuuaucu

SEQ ID NO: 3168676 - RNA, 23 nt, Human
acucugaauaagcacuuuuuaaa

SEQ ID NO: 3168677 - RNA, 22 nt, Human
acucugaauaagcacuuuuuaa

SEQ ID NO: 3168678 - RNA, 20 nt, Human
acucugaauaagcacuuuuu

SEQ ID NO: 3168679 - RNA, 17 nt, Human
acucuccucugcugcug

SEQ ID NO: 3168680 - RNA, 18 nt, Human
acucgguguccccaccau

SEQ ID NO: 3168681 - RNA, 14 nt, Human
acucggugucccca

SEQ ID NO: 3168682 - RNA, 23 nt, Human
acucgguguccccaccaucugcu

SEQ ID NO: 3168683 - RNA, 22 nt, Human
acucgguguccccaccaucugc

SEQ ID NO: 3168684 - RNA, 18 nt, Human
acucgcgacaaugcaaac

SEQ ID NO: 3168685 - RNA, 15 nt, Human
uccuaggcuggaagg

SEQ ID NO: 3168686 - RNA, 20 nt, Human
uccuaggcuggaaggaggaa

SEQ ID NO: 3168687 - RNA, 18 nt, Human
uccuaggggaaugagggg

SEQ ID NO: 3168688 - RNA, 19 nt, Human
uccuaggcauuugcugaau

SEQ ID NO: 3168689 - RNA, 20 nt, Human
acucgcgacaaugcaaacca

SEQ ID NO: 3168690 - RNA, 23 nt, Human
acucgcgacaaugcaaaccauca

SEQ ID NO: 3168691 - RNA, 17 nt, Human
acucgcgacaaugcaaa

SEQ ID NO: 3168692 - RNA, 20 nt, Human
uccucagaucuucugugggu

SEQ ID NO: 3168693 - RNA, 15 nt, Human
uccucaacaguguuu

SEQ ID NO: 3168694 - RNA, 20 nt, Human
uccucacaggugucuccaua

SEQ ID NO: 3168695 - RNA, 20 nt, Human
uccucaaaacuucagacaua

SEQ ID NO: 3168696 - RNA, 17 nt, Human
uccucaaaaugggagau

SEQ ID NO: 3168697 - RNA, 16 nt, Human
acucuuauugcccacg

SEQ ID NO: 3168698 - RNA, 14 nt, Human
uccucauacccacc

SEQ ID NO: 3168699 - RNA, 18 nt, Human
uccucauacccaccccca

SEQ ID NO: 3168700 - RNA, 16 nt, Human
uccuccccuccuccug

SEQ ID NO: 3168701 - RNA, 18 nt, Human
uccuccccuccuccugga

SEQ ID NO: 3168702 - RNA, 20 nt, Human
uccuccccuccuccuggacu

SEQ ID NO: 3168703 - RNA, 22 nt, Human
uccuccccuccuccuggacucc

SEQ ID NO: 3168704 - RNA, 15 nt, Human
uccuccccuggacuc

SEQ ID NO: 3168705 - RNA, 14 nt, Human
uccuccccuggacu

SEQ ID NO: 3168706 - RNA, 15 nt, Human
uccucccucccucuu

SEQ ID NO: 3168707 - RNA, 17 nt, Human
uccucccucccucuuuc

SEQ ID NO: 3168708 - RNA, 19 nt, Human
uccucccucccucuuuccc

SEQ ID NO: 3168709 - RNA, 12 nt, Human
uccucuccccag

SEQ ID NO: 3168710 - RNA, 15 nt, Human
uccucuccacugccu

SEQ ID NO: 3168711 - RNA, 14 nt, Human
uccucuccacugcc

SEQ ID NO: 3168712 - RNA, 13 nt, Human
uccucuccacugc

SEQ ID NO: 3168713 - RNA, 12 nt, Human
uccucuccacug

SEQ ID NO: 3168714 - RNA, 13 nt, Human
acuaucuucaucu

SEQ ID NO: 3168715 - RNA, 18 nt, Human
acuauguugcccaggcag

SEQ ID NO: 3168716 - RNA, 17 nt, Human
acuauguugcccaggca

SEQ ID NO: 3168717 - RNA, 18 nt, Human
acuaucccggcugcccuu

SEQ ID NO: 3168718 - RNA, 22 nt, Human
acuaucuuaucucagauauuug

SEQ ID NO: 3168719 - RNA, 16 nt, Human
acuaucccggcugccc

SEQ ID NO: 3168720 - RNA, 17 nt, Human
acuaucccggcugcccu

SEQ ID NO: 3168721 - RNA, 22 nt, Human
acuaucaugucaaacgugaaaa

SEQ ID NO: 3168722 - RNA, 20 nt, Human
acuauguugcccaggcaggu

SEQ ID NO: 3168723 - RNA, 19 nt, Human
acuauguugcccaggcagg

SEQ ID NO: 3168724 - RNA, 23 nt, Human
acuauguugcccaggcaggucuu

SEQ ID NO: 3168725 - RNA, 22 nt, Human
acuauguuuuaucguccaguga

SEQ ID NO: 3168726 - RNA, 14 nt, Human
acucaaauuuuggc

SEQ ID NO: 3168727 - RNA, 23 nt, Human
acucaaauuuuggcgaaucucaa

SEQ ID NO: 3168728 - RNA, 15 nt, Human
acucaaccaaauggu

SEQ ID NO: 3168729 - RNA, 21 nt, Human
acucaaccaaaugguacaaaa

SEQ ID NO: 3168730 - RNA, 16 nt, Human
acucaaccaaauggua

SEQ ID NO: 3168731 - RNA, 23 nt, Human
uccccaggaggccagccuugacc

SEQ ID NO: 3168732 - RNA, 24 nt, Human
uccccaccgcagacaggaccaggg

SEQ ID NO: 3168733 - RNA, 23 nt, Human
uccccaauaucuugcuugaacuu

SEQ ID NO: 3168734 - RNA, 23 nt, Human
acuauaauuuaccugaagucuuu

SEQ ID NO: 3168735 - RNA, 21 nt, Human
acuauaauguaagcucuacug

SEQ ID NO: 3168736 - RNA, 17 nt, Human
acuauagccuaggugac

SEQ ID NO: 3168737 - RNA, 16 nt, Human
acuauagcaaaguagu

SEQ ID NO: 3168738 - RNA, 20 nt, Human
acuauagcaaaguaguacuu

SEQ ID NO: 3168739 - RNA, 22 nt, Human
acuauauacaucacguuaaagu

SEQ ID NO: 3168740 - RNA, 15 nt, Human
acuauaaugugaaau

SEQ ID NO: 3168741 - RNA, 19 nt, Human
acuauaaugugaaauguaa

SEQ ID NO: 3168742 - RNA, 21 nt, Human
acuauaaugugaaauguaacu

SEQ ID NO: 3168743 - RNA, 14 nt, Human
uccccuugcagccg

SEQ ID NO: 3168744 - RNA, 14 nt, Human
uccccuugccagcu

SEQ ID NO: 3168745 - RNA, 22 nt, Human
uccccuugccagcugcugagcc

SEQ ID NO: 3168746 - RNA, 17 nt, Human
uccccuugccagcugcu

SEQ ID NO: 3168747 - RNA, 16 nt, Human
uccccuugccagcugc

SEQ ID NO: 3168748 - RNA, 15 nt, Human
uccccuugccagcug

SEQ ID NO: 3168749 - RNA, 16 nt, Human
ucccgaauagcuggga

SEQ ID NO: 3168750 - RNA, 15 nt, Human
ucccgaauagcuggg

SEQ ID NO: 3168751 - RNA, 18 nt, Human
uccccucagaaggucugu

SEQ ID NO: 3168752 - RNA, 20 nt, Human
ucccgcccaaaccuuucccc

SEQ ID NO: 3168753 - RNA, 19 nt, Human
ucccgcccaaaccuuuccc

SEQ ID NO: 3168754 - RNA, 21 nt, Human
ucccgccuccaaccccucgcc

SEQ ID NO: 3168755 - RNA, 15 nt, Human
ucccgccuccaaccc

SEQ ID NO: 3168756 - RNA, 13 nt, Human
ucccgcucagccc

SEQ ID NO: 3168757 - RNA, 20 nt, Human
ucccgcucagcccucccugc

SEQ ID NO: 3168758 - RNA, 16 nt, Human
ucccgcucagcccucc

SEQ ID NO: 3168759 - RNA, 15 nt, Human
ucccgcucagcccuc

SEQ ID NO: 3168760 - RNA, 14 nt, Human
ucccgcucagcccu

SEQ ID NO: 3168761 - RNA, 20 nt, Human
ucccgaguagcugggacuac

SEQ ID NO: 3168762 - RNA, 18 nt, Human
ucccgcccaaaccuuucc

SEQ ID NO: 3168763 - RNA, 18 nt, Human
ucccuauuagagaagaga

SEQ ID NO: 3168764 - RNA, 16 nt, Human
ucccuauuagagaaga

SEQ ID NO: 3168765 - RNA, 19 nt, Human
ucccagugccgagaaggaa

SEQ ID NO: 3168766 - RNA, 22 nt, Human
ucccagugccgagaaggaagcc

SEQ ID NO: 3168767 - RNA, 16 nt, Human
acuacaguccucccau

SEQ ID NO: 3168768 - RNA, 16 nt, Human
acuacauauugaauag

SEQ ID NO: 3168769 - RNA, 14 nt, Human
ucccaucucacaca

SEQ ID NO: 3168770 - RNA, 19 nt, Human
ucccaucucacacaugagc

SEQ ID NO: 3168771 - RNA, 13 nt, Human
ucccaucucacac

SEQ ID NO: 3168772 - RNA, 15 nt, Human
ucccauaugccuggg

SEQ ID NO: 3168773 - RNA, 20 nt, Human
ucccauaucaaaagacacag

SEQ ID NO: 3168774 - RNA, 22 nt, Human
uccccaccgcagacaggaccag

SEQ ID NO: 3168775 - RNA, 23 nt, Human
uccccaaggcccccugccugccc

SEQ ID NO: 3168776 - RNA, 21 nt, Human
uccccaaggcccccugccugc

SEQ ID NO: 3168777 - RNA, 20 nt, Human
uccccaaggcccccugccug

SEQ ID NO: 3168778 - RNA, 19 nt, Human
uccccaaggcccccugccu

SEQ ID NO: 3168779 - RNA, 15 nt, Human
uccccaagccuggca

SEQ ID NO: 3168780 - RNA, 14 nt, Human
acuaaaauaauuuu

SEQ ID NO: 3168781 - RNA, 16 nt, Human
acuaaaauguaucuaa

SEQ ID NO: 3168782 - RNA, 20 nt, Human
acuaaaauaauuuuguaaug

SEQ ID NO: 3168783 - RNA, 19 nt, Human
acuaaaauaauuuuguaau

SEQ ID NO: 3168784 - RNA, 17 nt, Human
acuaaaauaauuuugua

SEQ ID NO: 3168785 - RNA, 16 nt, Human
acuaaaauaauuuugu

SEQ ID NO: 3168786 - RNA, 15 nt, Human
acuaaaauaauuuug

SEQ ID NO: 3168787 - RNA, 20 nt, Human
acuaaaguuguacuuuaaaa

SEQ ID NO: 3168788 - RNA, 15 nt, Human
acuaaaguuguacuu

SEQ ID NO: 3168789 - RNA, 22 nt, Human
acuaaacucugaauaagcacuu

SEQ ID NO: 3168790 - RNA, 21 nt, Human
acuaaacucugaauaagcacu

SEQ ID NO: 3168791 - RNA, 12 nt, Human
acuaaccacgcu

SEQ ID NO: 3168792 - RNA, 22 nt, Human
acuaaaguuguacuuuaaaaau

SEQ ID NO: 3168793 - RNA, 13 nt, Human
acuaaccacgcug

SEQ ID NO: 3168794 - RNA, 23 nt, Human
acuacaggugugagucaccaagc

SEQ ID NO: 3168795 - RNA, 15 nt, Human
acuacaguccuccca

SEQ ID NO: 3168796 - RNA, 20 nt, Human
acuacagucaagauagaaag

SEQ ID NO: 3168797 - RNA, 13 nt, Human
acuaaaaauacaa

SEQ ID NO: 3168798 - RNA, 18 nt, Human
acguuuuaaggacugacu

SEQ ID NO: 3168799 - RNA, 19 nt, Human
acguuuuaaggacugacug

SEQ ID NO: 3168800 - RNA, 14 nt, Human
uccagcucaccagc

SEQ ID NO: 3168801 - RNA, 24 nt, Human
uccagccugggugacagagcaagu

SEQ ID NO: 3168802 - RNA, 13 nt, Human
uccagccugggug

SEQ ID NO: 3168803 - RNA, 12 nt, Human
ucgacacagagu

SEQ ID NO: 3168804 - RNA, 13 nt, Human
ucgaccugccucg

SEQ ID NO: 3168805 - RNA, 22 nt, Human
ucgacgcccgaguuagccucac

SEQ ID NO: 3168806 - RNA, 14 nt, Human
ucgagcaugccugg

SEQ ID NO: 3168807 - RNA, 13 nt, Human
ucgaggacaggga

SEQ ID NO: 3168808 - RNA, 16 nt, Human
ucgccuuucagcaggc

SEQ ID NO: 3168809 - RNA, 14 nt, Human
ucgccuuucagcag

SEQ ID NO: 3168810 - RNA, 19 nt, Human
ucgccuuccaccucuggga

SEQ ID NO: 3168811 - RNA, 15 nt, Human
ucgccuuccaccucu

SEQ ID NO: 3168812 - RNA, 22 nt, Human
ucgccuuucagcaggcagccuu

SEQ ID NO: 3168813 - RNA, 20 nt, Human
ucgccuuucagcaggcagcc

SEQ ID NO: 3168814 - RNA, 19 nt, Human
ucgccuuucagcaggcagc

SEQ ID NO: 3168815 - RNA, 13 nt, Human
ucgcgacaaugca

SEQ ID NO: 3168816 - RNA, 17 nt, Human
ucgaggacagggaggug

SEQ ID NO: 3168817 - RNA, 14 nt, Human
ucgaggacagggag

SEQ ID NO: 3168818 - RNA, 13 nt, Human
ucgaacuggcugc

SEQ ID NO: 3168819 - RNA, 14 nt, Human
ucgaacuggcugca

SEQ ID NO: 3168820 - RNA, 15 nt, Human
ucgaacuggcugcaa

SEQ ID NO: 3168821 - RNA, 13 nt, Human
uccuuuccaccuu

SEQ ID NO: 3168822 - RNA, 14 nt, Human
uccuuuccaccuuc

SEQ ID NO: 3168823 - RNA, 19 nt, Human
uccuuuccaccuucucaca

SEQ ID NO: 3168824 - RNA, 23 nt, Human
uccuuuagcgcccaguugggugg

SEQ ID NO: 3168825 - RNA, 19 nt, Human
uccuuucacaaccuucugu

SEQ ID NO: 3168826 - RNA, 18 nt, Human
uccuuucacaaccuucug

SEQ ID NO: 3168827 - RNA, 16 nt, Human
uccuuucacaaccuuc

SEQ ID NO: 3168828 - RNA, 15 nt, Human
uccuuucaccacaug

SEQ ID NO: 3168829 - RNA, 20 nt, Human
uccuuucacaaccuucugug

SEQ ID NO: 3168830 - RNA, 16 nt, Human
uccuuucacuucuuuc

SEQ ID NO: 3168831 - RNA, 13 nt, Human
uccuuucacuucu

SEQ ID NO: 3168832 - RNA, 20 nt, Human
uccuuucaguggcuuggacu

SEQ ID NO: 3168833 - RNA, 18 nt, Human
uccuuucacuucuuuccc

SEQ ID NO: 3168834 - RNA, 15 nt, Human
acuguacaaaguaga

SEQ ID NO: 3168835 - RNA, 14 nt, Human
acuguacaaaguag

SEQ ID NO: 3168836 - RNA, 13 nt, Human
acuguacaaagua

SEQ ID NO: 3168837 - RNA, 16 nt, Human
acuguaauuauuugaa

SEQ ID NO: 3168838 - RNA, 20 nt, Human
acuguaauuauuugaaugac

SEQ ID NO: 3168839 - RNA, 18 nt, Human
acuguaauuauuugaaug

SEQ ID NO: 3168840 - RNA, 17 nt, Human
acuguaauuauuugaau

SEQ ID NO: 3168841 - RNA, 14 nt, Human
acuguacuccuccc

SEQ ID NO: 3168842 - RNA, 13 nt, Human
acuguacuccucc

SEQ ID NO: 3168843 - RNA, 21 nt, Human
acuguacaugggacuaugcuu

SEQ ID NO: 3168844 - RNA, 23 nt, Human
acugggagccuacccacccccag

SEQ ID NO: 3168845 - RNA, 12 nt, Human
acugggagccua

SEQ ID NO: 3168846 - RNA, 22 nt, Human
acugggcuuggggaccagagcu

SEQ ID NO: 3168847 - RNA, 13 nt, Human
ucgcuccuguguc

SEQ ID NO: 3168848 - RNA, 12 nt, Human
ucgcuccugugu

SEQ ID NO: 3168849 - RNA, 18 nt, Human
acuggguacuuguggaca

SEQ ID NO: 3168850 - RNA, 23 nt, Human
acuggguacuuguggacacagcu

SEQ ID NO: 3168851 - RNA, 20 nt, Human
acuggguacuuguggacaca

SEQ ID NO: 3168852 - RNA, 19 nt, Human
acuggguacuuguggacac

SEQ ID NO: 3168853 - RNA, 13 nt, Human
uccuucagccuga

SEQ ID NO: 3168854 - RNA, 11 nt, Human
uccuucagugc

SEQ ID NO: 3168855 - RNA, 12 nt, Human
uccuucagugcc

SEQ ID NO: 3168856 - RNA, 13 nt, Human
uccuucagugccu

SEQ ID NO: 3168857 - RNA, 20 nt, Human
uccuucagugccuuauggaa

SEQ ID NO: 3168858 - RNA, 22 nt, Human
uccuucagugccuuauggaaca

SEQ ID NO: 3168859 - RNA, 17 nt, Human
uccuucccuugcuacca

SEQ ID NO: 3168860 - RNA, 16 nt, Human
uccuuccucugagccu

SEQ ID NO: 3168861 - RNA, 17 nt, Human
uccuuccucugagccuu

SEQ ID NO: 3168862 - RNA, 16 nt, Human
uccuuccucugaggcu

SEQ ID NO: 3168863 - RNA, 22 nt, Human
uccuuccuaguucaucccuucu

SEQ ID NO: 3168864 - RNA, 22 nt, Human
acuggcacaguuuucugagaaa

SEQ ID NO: 3168865 - RNA, 21 nt, Human
acuggcacaguuuucugagaa

SEQ ID NO: 3168866 - RNA, 14 nt, Human
acuggcaagaaaag

SEQ ID NO: 3168867 - RNA, 18 nt, Human
acuggcagggauaacaaa

SEQ ID NO: 3168868 - RNA, 16 nt, Human
acuggccucugcugau

SEQ ID NO: 3168869 - RNA, 23 nt, Human
acuggccucugcugauccuccca

SEQ ID NO: 3168870 - RNA, 19 nt, Human
acuggccuucugaugaaau

SEQ ID NO: 3168871 - RNA, 23 nt, Human
acuggccuucugaugaaauguua

SEQ ID NO: 3168872 - RNA, 22 nt, Human
acuggcugcaaaggguaucagg

SEQ ID NO: 3168873 - RNA, 14 nt, Human
uccuucagauauuu

SEQ ID NO: 3168874 - RNA, 17 nt, Human
uccuucagauauuuuua

SEQ ID NO: 3168875 - RNA, 15 nt, Human
uccuucagauauuuu

SEQ ID NO: 3168876 - RNA, 13 nt, Human
acugcagucacug

SEQ ID NO: 3168877 - RNA, 22 nt, Human
acugcucuugggcaauauucuc

SEQ ID NO: 3168878 - RNA, 19 nt, Human
acugcucuugggcaauauu

SEQ ID NO: 3168879 - RNA, 12 nt, Human
acugcucugaug

SEQ ID NO: 3168880 - RNA, 19 nt, Human
acugcuauuuuccuguucu

SEQ ID NO: 3168881 - RNA, 19 nt, Human
acugcuagucuuaagaacu

SEQ ID NO: 3168882 - RNA, 15 nt, Human
acuggauuauucagg

SEQ ID NO: 3168883 - RNA, 14 nt, Human
acuggauucuuauu

SEQ ID NO: 3168884 - RNA, 17 nt, Human
acugcuuccagugaggc

SEQ ID NO: 3168885 - RNA, 13 nt, Human
acugcuggcugcc

SEQ ID NO: 3168886 - RNA, 22 nt, Human
acugcuuccuauaauuuugaua

SEQ ID NO: 3168887 - RNA, 21 nt, Human
acugcuuccuauaauuuugau

SEQ ID NO: 3168888 - RNA, 18 nt, Human
acugcuuccuauaauuuu

SEQ ID NO: 3168889 - RNA, 17 nt, Human
acugcuuccuauaauuu

SEQ ID NO: 3168890 - RNA, 13 nt, Human
acugcuugaauaa

SEQ ID NO: 3168891 - RNA, 18 nt, Human
acugcuuccuuucuugau

SEQ ID NO: 3168892 - RNA, 17 nt, Human
acugcuuccuuucuuga

SEQ ID NO: 3168893 - RNA, 18 nt, Human
acugcuuccagugaggcu

SEQ ID NO: 3168894 - RNA, 21 nt, Human
acugcuuccagugaggcucug

SEQ ID NO: 3168895 - RNA, 22 nt, Human
acugcuuccagugaggcucugc

SEQ ID NO: 3168896 - RNA, 23 nt, Human
acugcuuccagugaggcucugcc

SEQ ID NO: 3168897 - RNA, 20 nt, Human
acugcugcuucauguuugcc

SEQ ID NO: 3168898 - RNA, 12 nt, Human
acugcuggcugc

SEQ ID NO: 3168899 - RNA, 18 nt, Human
acugcugcccagccucca

SEQ ID NO: 3168900 - RNA, 16 nt, Human
acugcugcccagccuc

SEQ ID NO: 3168901 - RNA, 21 nt, Human
acugcugcccagccuccaagc

SEQ ID NO: 3168902 - RNA, 16 nt, Human
uccugcacugacucug

SEQ ID NO: 3168903 - RNA, 21 nt, Human
uccugcacugacucuggaaaa

SEQ ID NO: 3168904 - RNA, 17 nt, Human
uccugcacugacucugg

SEQ ID NO: 3168905 - RNA, 15 nt, Human
uccugcaggcagcca

SEQ ID NO: 3168906 - RNA, 20 nt, Human
uccugauugguuucucuucu

SEQ ID NO: 3168907 - RNA, 23 nt, Human
uccugauugguuucucuucuccc

SEQ ID NO: 3168908 - RNA, 21 nt, Human
uccugauugguuucucuucuc

SEQ ID NO: 3168909 - RNA, 23 nt, Human
uccugcaaccaaacucccaucag

SEQ ID NO: 3168910 - RNA, 20 nt, Human
uccugcaaccaaacucccau

SEQ ID NO: 3168911 - RNA, 18 nt, Human
acugcacagugcaucuca

SEQ ID NO: 3168912 - RNA, 16 nt, Human
acugcacagugcaucu

SEQ ID NO: 3168913 - RNA, 23 nt, Human
uccugaggugaugaagacagccc

SEQ ID NO: 3168914 - RNA, 23 nt, Human
uccugauagcauaugacaaaugu

SEQ ID NO: 3168915 - RNA, 20 nt, Human
uccugaguagcugggauuac

SEQ ID NO: 3168916 - RNA, 16 nt, Human
uccugcaggcagccag

SEQ ID NO: 3168917 - RNA, 17 nt, Human
uccugcaggcagccagg

SEQ ID NO: 3168918 - RNA, 19 nt, Human
uccugcaggcagccaggcc

SEQ ID NO: 3168919 - RNA, 20 nt, Human
uccugcaggcagccaggcca

SEQ ID NO: 3168920 - RNA, 19 nt, Human
uccugccucagccucccaa

SEQ ID NO: 3168921 - RNA, 23 nt, Human
uccugcauugggugaucauucac

SEQ ID NO: 3168922 - RNA, 22 nt, Human
uccugcaggcagccaggccaca

SEQ ID NO: 3168923 - RNA, 20 nt, Human
uccugccucgaacuggcugc

SEQ ID NO: 3168924 - RNA, 17 nt, Human
uccugccucagccuccc

SEQ ID NO: 3168925 - RNA, 21 nt, Human
uccugccuccuugauauuugu

SEQ ID NO: 3168926 - RNA, 15 nt, Human
uccugcguguucuca

SEQ ID NO: 3168927 - RNA, 13 nt, Human
uccugcucugcuc

SEQ ID NO: 3168928 - RNA, 12 nt, Human
uccugcucugcu

SEQ ID NO: 3168929 - RNA, 11 nt, Human
uccugcucugc

SEQ ID NO: 3168930 - RNA, 13 nt, Human
uccugcucagcag

SEQ ID NO: 3168931 - RNA, 17 nt, Human
acugagcuuggaagcuu

SEQ ID NO: 3168932 - RNA, 12 nt, Human
acugagcuugga

SEQ ID NO: 3168933 - RNA, 16 nt, Human
acugagcuuggaagcu

SEQ ID NO: 3168934 - RNA, 13 nt, Human
acugagcuuggaa

SEQ ID NO: 3168935 - RNA, 15 nt, Human
uccucuccccagcaa

SEQ ID NO: 3168936 - RNA, 15 nt, Human
acugaggaccagcca

SEQ ID NO: 3168937 - RNA, 20 nt, Human
acugaggcaguuugaggauu

SEQ ID NO: 3168938 - RNA, 18 nt, Human
acugaggcaguuugagga

SEQ ID NO: 3168939 - RNA, 17 nt, Human
acugaggggaggggagc

SEQ ID NO: 3168940 - RNA, 22 nt, Human
acugaggggaggggagcauggg

SEQ ID NO: 3168941 - RNA, 22 nt, Human
acugcaaccuccgccucuuggg

SEQ ID NO: 3168942 - RNA, 16 nt, Human
acugcaaccuccgccu

SEQ ID NO: 3168943 - RNA, 20 nt, Human
acugcaaccuucgccaccug

SEQ ID NO: 3168944 - RNA, 14 nt, Human
acugcaaccuccgc

SEQ ID NO: 3168945 - RNA, 13 nt, Human
acugcaaccuccg

SEQ ID NO: 3168946 - RNA, 19 nt, Human
acugaguuagaauguugaa

SEQ ID NO: 3168947 - RNA, 16 nt, Human
acugagugccuuuugg

SEQ ID NO: 3168948 - RNA, 15 nt, Human
uccugucuucugcuu

SEQ ID NO: 3168949 - RNA, 14 nt, Human
uccugucuucugcu

SEQ ID NO: 3168950 - RNA, 13 nt, Human
uccugucuucugc

SEQ ID NO: 3168951 - RNA, 12 nt, Human
uccugucuucug

SEQ ID NO: 3168952 - RNA, 19 nt, Human
uccugucuucugcuuuguu

SEQ ID NO: 3168953 - RNA, 17 nt, Human
uccugucuucugcuuug

SEQ ID NO: 3168954 - RNA, 16 nt, Human
uccugucuucugcuuu

SEQ ID NO: 3168955 - RNA, 18 nt, Human
uccuggguucaagugauu

SEQ ID NO: 3168956 - RNA, 21 nt, Human
uccuguggaaggcagagaaau

SEQ ID NO: 3168957 - RNA, 22 nt, Human
uccuguggaaggcagagaaauc

SEQ ID NO: 3168958 - RNA, 23 nt, Human
uccuguggaaggcagagaaaucu

SEQ ID NO: 3168959 - RNA, 13 nt, Human
uccugugccaggu

SEQ ID NO: 3168960 - RNA, 18 nt, Human
uccugugacuucagcucu

SEQ ID NO: 3168961 - RNA, 15 nt, Human
uccugugagaugugu

SEQ ID NO: 3168962 - RNA, 17 nt, Human
uccugugagauguguau

SEQ ID NO: 3168963 - RNA, 22 nt, Human
uccugugagauguguaucagug

SEQ ID NO: 3168964 - RNA, 19 nt, Human
uccuguggccugccaguca

SEQ ID NO: 3168965 - RNA, 17 nt, Human
uccuguggccugccagu

SEQ ID NO: 3168966 - RNA, 22 nt, Human
uccuggggcccaaaugcuggcu

SEQ ID NO: 3168967 - RNA, 20 nt, Human
uccugggcuuuuguuuugcu

SEQ ID NO: 3168968 - RNA, 19 nt, Human
uccuggggcauccaugggg

SEQ ID NO: 3168969 - RNA, 23 nt, Human
uccugggcuuuuguuuugcuuuu

SEQ ID NO: 3168970 - RNA, 18 nt, Human
uccuggggaaccugaccc

SEQ ID NO: 3168971 - RNA, 19 nt, Human
uccuggggaaccugacccc

SEQ ID NO: 3168972 - RNA, 17 nt, Human
uccuggggcgcgugagg

SEQ ID NO: 3168973 - RNA, 23 nt, Human
uccuggggguucuuucuuccucu

SEQ ID NO: 3168974 - RNA, 22 nt, Human
uccuggggguucuuucuuccuc

SEQ ID NO: 3168975 - RNA, 21 nt, Human
uccuggggguucuuucuuccu

SEQ ID NO: 3168976 - RNA, 13 nt, Human
uccugcugcaguu

SEQ ID NO: 3168977 - RNA, 22 nt, Human
acugcagccuccgcuucccugg

SEQ ID NO: 3168978 - RNA, 23 nt, Human
acugcagccucaaccuccugggc

SEQ ID NO: 3168979 - RNA, 18 nt, Human
acugcagggacugccagu

SEQ ID NO: 3168980 - RNA, 17 nt, Human
acugcagggacugccag

SEQ ID NO: 3168981 - RNA, 16 nt, Human
acugcagggacugcca

SEQ ID NO: 3168982 - RNA, 13 nt, Human
acugcacuguuuu

SEQ ID NO: 3168983 - RNA, 22 nt, Human
acugcagccucaaccuccuggg

SEQ ID NO: 3168984 - RNA, 21 nt, Human
acugcagccucaaccuccugg

SEQ ID NO: 3168985 - RNA, 19 nt, Human
acugcagccucaaccuccu

SEQ ID NO: 3168986 - RNA, 16 nt, Human
uccuuaagagacaauu

SEQ ID NO: 3168987 - RNA, 13 nt, Human
uccuuaagagauu

SEQ ID NO: 3168988 - RNA, 12 nt, Human
acugcagaacag

SEQ ID NO: 3168989 - RNA, 24 nt, Human
uccugugucuugcaauggcagccu

SEQ ID NO: 3168990 - RNA, 23 nt, Human
uccugugucuugcaauggcagcc

SEQ ID NO: 3168991 - RNA, 16 nt, Human
uccugugucaguuuau

SEQ ID NO: 3168992 - RNA, 14 nt, Human
uccugugucaguuu

SEQ ID NO: 3168993 - RNA, 14 nt, Human
uccugugugugcgc

SEQ ID NO: 3168994 - RNA, 13 nt, Human
uccugugugugcg

SEQ ID NO: 3168995 - RNA, 18 nt, Human
uccugugugugcgccuac

SEQ ID NO: 3168996 - RNA, 19 nt, Human
uccuguucccaugagauga

SEQ ID NO: 3168997 - RNA, 17 nt, Human
uccuguugucaagaaua

SEQ ID NO: 3168998 - RNA, 23 nt, Human
uccuguuugggaagagcuuagaa

SEQ ID NO: 3168999 - RNA, 20 nt, Human
uccuguuucucagucucaca

SEQ ID NO: 3169000 - RNA, 16 nt, Human
uccuguuucaaguuca

SEQ ID NO: 3169001 - RNA, 14 nt, Human
aaggagacuguguu

SEQ ID NO: 3169002 - RNA, 22 nt, Human
aaggagaaucauguuucuuuga

SEQ ID NO: 3169003 - RNA, 20 nt, Human
aaggagaaucauguuucuuu

SEQ ID NO: 3169004 - RNA, 19 nt, Human
aaggagaaucauguuucuu

SEQ ID NO: 3169005 - RNA, 18 nt, Human
aaggagaaucauguuucu

SEQ ID NO: 3169006 - RNA, 15 nt, Human
aaggaaacccagcuc

SEQ ID NO: 3169007 - RNA, 16 nt, Human
aaggaagguaaaaagu

SEQ ID NO: 3169008 - RNA, 17 nt, Human
aaggaagguaguucaag

SEQ ID NO: 3169009 - RNA, 18 nt, Human
aaggaagguaaaaaguua

SEQ ID NO: 3169010 - RNA, 20 nt, Human
aaggaggaagagaaaaaaua

SEQ ID NO: 3169011 - RNA, 18 nt, Human
aaggaggaagagaaaaaa

SEQ ID NO: 3169012 - RNA, 15 nt, Human
aaggauaaaucauaa

SEQ ID NO: 3169013 - RNA, 19 nt, Human
aaggauaaaucauaaaguc

SEQ ID NO: 3169014 - RNA, 20 nt, Human
aaggauaaaucauaaaguca

SEQ ID NO: 3169015 - RNA, 22 nt, Human
aaggauaaaucauaaagucagu

SEQ ID NO: 3169016 - RNA, 11 nt, Human
aaggauccuga

SEQ ID NO: 3169017 - RNA, 12 nt, Human
aaggauccugag

SEQ ID NO: 3169018 - RNA, 20 nt, Human
aaggauccugagccagauuu

SEQ ID NO: 3169019 - RNA, 22 nt, Human
aaggauccugagccagauuuca

SEQ ID NO: 3169020 - RNA, 14 nt, Human
guugggagaauguc

SEQ ID NO: 3169021 - RNA, 21 nt, Human
guugggagaaugucaguaugu

SEQ ID NO: 3169022 - RNA, 17 nt, Human
guugggcuggugucacc

SEQ ID NO: 3169023 - RNA, 20 nt, Human
guugggacccaguggcaggg

SEQ ID NO: 3169024 - RNA, 16 nt, Human
guugggacccaguggc

SEQ ID NO: 3169025 - RNA, 22 nt, Human
guugggacccaguggcagggca

SEQ ID NO: 3169026 - RNA, 21 nt, Human
guugggacccaguggcagggc

SEQ ID NO: 3169027 - RNA, 23 nt, Human
guugggacccaguggcagggcac

SEQ ID NO: 3169028 - RNA, 21 nt, Human
guugggggaggggagacuuug

SEQ ID NO: 3169029 - RNA, 15 nt, Human
guugggcugguguca

SEQ ID NO: 3169030 - RNA, 22 nt, Human
guugguuccaagucuuugcuau

SEQ ID NO: 3169031 - RNA, 23 nt, Human
guuggcugggggccucagugcca

SEQ ID NO: 3169032 - RNA, 15 nt, Human
guugcugacuuagaa

SEQ ID NO: 3169033 - RNA, 20 nt, Human
guugcugauuuuauucuuga

SEQ ID NO: 3169034 - RNA, 18 nt, Human
guugcugauuuuauucuu

SEQ ID NO: 3169035 - RNA, 14 nt, Human
guugcugauuuuau

SEQ ID NO: 3169036 - RNA, 13 nt, Human
guugcugauuuua

SEQ ID NO: 3169037 - RNA, 15 nt, Human
guugcccaggcuggc

SEQ ID NO: 3169038 - RNA, 20 nt, Human
guugcccaggcuggagugca

SEQ ID NO: 3169039 - RNA, 16 nt, Human
guugcccaggcuggcg

SEQ ID NO: 3169040 - RNA, 14 nt, Human
aaggaugcccaaag

SEQ ID NO: 3169041 - RNA, 22 nt, Human
aaggaugccaagaaguuuaagg

SEQ ID NO: 3169042 - RNA, 20 nt, Human
aaggaugccaagaaguuuaa

SEQ ID NO: 3169043 - RNA, 14 nt, Human
aaggccccgcccag

SEQ ID NO: 3169044 - RNA, 16 nt, Human
aaggccccgcccaggc

SEQ ID NO: 3169045 - RNA, 19 nt, Human
aaggccccgcccaggcuua

SEQ ID NO: 3169046 - RNA, 15 nt, Human
aaggcccccugccug

SEQ ID NO: 3169047 - RNA, 14 nt, Human
aaggcccccugccu

SEQ ID NO: 3169048 - RNA, 19 nt, Human
aaggcccccugccugcccu

SEQ ID NO: 3169049 - RNA, 14 nt, Human
guugcccaggcugg

SEQ ID NO: 3169050 - RNA, 23 nt, Human
aaggcgcuaacuugcuuaaaugu

SEQ ID NO: 3169051 - RNA, 22 nt, Human
aaggcgcuaacuugcuuaaaug

SEQ ID NO: 3169052 - RNA, 18 nt, Human
aaggcgcuaacuugcuua

SEQ ID NO: 3169053 - RNA, 16 nt, Human
guguuuaugugugugu

SEQ ID NO: 3169054 - RNA, 14 nt, Human
guguuuauucuuga

SEQ ID NO: 3169055 - RNA, 16 nt, Human
guguuuaugugcuauu

SEQ ID NO: 3169056 - RNA, 18 nt, Human
guguuuaugugcuauuaa

SEQ ID NO: 3169057 - RNA, 12 nt, Human
guguuuaugugu

SEQ ID NO: 3169058 - RNA, 17 nt, Human
guguuuaucagaaaggg

SEQ ID NO: 3169059 - RNA, 18 nt, Human
guguuuauaucuccuuug

SEQ ID NO: 3169060 - RNA, 22 nt, Human
guguuuaagacauuuuuggaag

SEQ ID NO: 3169061 - RNA, 12 nt, Human
guguuuaacuga

SEQ ID NO: 3169062 - RNA, 15 nt, Human
guguuuagaauugaa

SEQ ID NO: 3169063 - RNA, 18 nt, Human
guguuuagaauugaaggu

SEQ ID NO: 3169064 - RNA, 14 nt, Human
guguuuacagagau

SEQ ID NO: 3169065 - RNA, 15 nt, Human
guguuuauucuugau

SEQ ID NO: 3169066 - RNA, 20 nt, Human
aagcuccaucuccacuccag

SEQ ID NO: 3169067 - RNA, 13 nt, Human
guguuuauuguca

SEQ ID NO: 3169068 - RNA, 11 nt, Human
aagcucccagg

SEQ ID NO: 3169069 - RNA, 16 nt, Human
aagcuccaucuuauuu

SEQ ID NO: 3169070 - RNA, 12 nt, Human
aagcucccaggc

SEQ ID NO: 3169071 - RNA, 22 nt, Human
aagcucccaggcauuccccagg

SEQ ID NO: 3169072 - RNA, 23 nt, Human
aagcucccaggcauuccccagga

SEQ ID NO: 3169073 - RNA, 21 nt, Human
aagcucuacugaggugcuaug

SEQ ID NO: 3169074 - RNA, 13 nt, Human
aagcuuuuuggaa

SEQ ID NO: 3169075 - RNA, 14 nt, Human
aagcuuuuuggaau

SEQ ID NO: 3169076 - RNA, 18 nt, Human
aagcuuuuuggaaucuuu

SEQ ID NO: 3169077 - RNA, 21 nt, Human
guuccccuggaagcagugccc

SEQ ID NO: 3169078 - RNA, 12 nt, Human
guuccccuggaa

SEQ ID NO: 3169079 - RNA, 17 nt, Human
guuccccuguucacucu

SEQ ID NO: 3169080 - RNA, 15 nt, Human
guuccccuguucacu

SEQ ID NO: 3169081 - RNA, 18 nt, Human
aagcuguuacugucuuca

SEQ ID NO: 3169082 - RNA, 13 nt, Human
aagcucugcuccu

SEQ ID NO: 3169083 - RNA, 19 nt, Human
aagcuguuggccucugcaa

SEQ ID NO: 3169084 - RNA, 18 nt, Human
aagcuguugaccaggcac

SEQ ID NO: 3169085 - RNA, 16 nt, Human
aagcuguucuuccugg

SEQ ID NO: 3169086 - RNA, 15 nt, Human
aagcuguucuuccug

SEQ ID NO: 3169087 - RNA, 14 nt, Human
aagcuguucuuccu

SEQ ID NO: 3169088 - RNA, 14 nt, Human
aagcuguuuggaaa

SEQ ID NO: 3169089 - RNA, 17 nt, Human
aagcuguuuggaaaaga

SEQ ID NO: 3169090 - RNA, 21 nt, Human
aagcuguuuggaaaagacagu

SEQ ID NO: 3169091 - RNA, 20 nt, Human
aagcuuugacucuauaagca

SEQ ID NO: 3169092 - RNA, 16 nt, Human
aagcuuuguuuguucu

SEQ ID NO: 3169093 - RNA, 20 nt, Human
aagcuuuguugaaagaaagu

SEQ ID NO: 3169094 - RNA, 18 nt, Human
guuccccuguucacucua

SEQ ID NO: 3169095 - RNA, 24 nt, Human
guuccccuggaagcagugcccagg

SEQ ID NO: 3169096 - RNA, 12 nt, Human
guucucugcccu

SEQ ID NO: 3169097 - RNA, 15 nt, Human
guucuguauuugaaa

SEQ ID NO: 3169098 - RNA, 20 nt, Human
guucuguauuugaaagugcc

SEQ ID NO: 3169099 - RNA, 16 nt, Human
guucugugacuaggaa

SEQ ID NO: 3169100 - RNA, 11 nt, Human
guucucugccc

SEQ ID NO: 3169101 - RNA, 16 nt, Human
guucucugaggacacu

SEQ ID NO: 3169102 - RNA, 14 nt, Human
guucucugaggaca

SEQ ID NO: 3169103 - RNA, 18 nt, Human
guucuguguauuuucagu

SEQ ID NO: 3169104 - RNA, 20 nt, Human
guucuguuacaaaauguaac

SEQ ID NO: 3169105 - RNA, 19 nt, Human
guucuguuacaaaauguaa

SEQ ID NO: 3169106 - RNA, 18 nt, Human
guucuguuacaaaaugua

SEQ ID NO: 3169107 - RNA, 14 nt, Human
guucuguuacaaaa

SEQ ID NO: 3169108 - RNA, 13 nt, Human
guucuguuacaaa

SEQ ID NO: 3169109 - RNA, 22 nt, Human
guucuguuacaaaauguaacug

SEQ ID NO: 3169110 - RNA, 21 nt, Human
guucuguuacaaaauguaacu

SEQ ID NO: 3169111 - RNA, 23 nt, Human
guugauagcacagacccugcccu

SEQ ID NO: 3169112 - RNA, 22 nt, Human
guugauagcacagacccugccc

SEQ ID NO: 3169113 - RNA, 15 nt, Human
guugagcuaugacuu

SEQ ID NO: 3169114 - RNA, 16 nt, Human
guugagcuaugacuua

SEQ ID NO: 3169115 - RNA, 12 nt, Human
guugagcuauga

SEQ ID NO: 3169116 - RNA, 19 nt, Human
guugacaucacuggcaugg

SEQ ID NO: 3169117 - RNA, 14 nt, Human
guugagaggacacu

SEQ ID NO: 3169118 - RNA, 18 nt, Human
guugagaggacacucccg

SEQ ID NO: 3169119 - RNA, 12 nt, Human
aaguaaaauguc

SEQ ID NO: 3169120 - RNA, 14 nt, Human
aaguaaaaugucuu

SEQ ID NO: 3169121 - RNA, 18 nt, Human
aaguaaaaccacagcagu

SEQ ID NO: 3169122 - RNA, 17 nt, Human
aaguaaaaccacagcag

SEQ ID NO: 3169123 - RNA, 16 nt, Human
guuucuagacuauaaa

SEQ ID NO: 3169124 - RNA, 21 nt, Human
guuucuaagguaacaagauga

SEQ ID NO: 3169125 - RNA, 17 nt, Human
guuucuaauuugcugcu

SEQ ID NO: 3169126 - RNA, 18 nt, Human
guuucuaauuugcugcug

SEQ ID NO: 3169127 - RNA, 23 nt, Human
guuucuaccggagagagaaugua

SEQ ID NO: 3169128 - RNA, 16 nt, Human
aaguaaaucucuucug

SEQ ID NO: 3169129 - RNA, 15 nt, Human
aaguaaaucucuucu

SEQ ID NO: 3169130 - RNA, 17 nt, Human
aaguaaaucucuucugu

SEQ ID NO: 3169131 - RNA, 14 nt, Human
aaguaaaaccacag

SEQ ID NO: 3169132 - RNA, 16 nt, Human
aaggguucuguaaaau

SEQ ID NO: 3169133 - RNA, 16 nt, Human
aaguaaaaccacagca

SEQ ID NO: 3169134 - RNA, 15 nt, Human
aaguaaaaccacagc

SEQ ID NO: 3169135 - RNA, 19 nt, Human
aagggugaugggaaagcau

SEQ ID NO: 3169136 - RNA, 21 nt, Human
aagggugaugggaaagcauug

SEQ ID NO: 3169137 - RNA, 13 nt, Human
aagggcccagaga

SEQ ID NO: 3169138 - RNA, 15 nt, Human
aagggcccagagagg

SEQ ID NO: 3169139 - RNA, 19 nt, Human
aaggcugagaggagagaga

SEQ ID NO: 3169140 - RNA, 22 nt, Human
aaggcugagacagugaauuugg

SEQ ID NO: 3169141 - RNA, 23 nt, Human
aaggcugagacagugaauuuggg

SEQ ID NO: 3169142 - RNA, 16 nt, Human
aaggguaucuggugac

SEQ ID NO: 3169143 - RNA, 19 nt, Human
aaggguaucaggugcugcc

SEQ ID NO: 3169144 - RNA, 17 nt, Human
aaggguaucaggugcug

SEQ ID NO: 3169145 - RNA, 14 nt, Human
guuugcuccccuuc

SEQ ID NO: 3169146 - RNA, 16 nt, Human
guuuuaagaggcaggg

SEQ ID NO: 3169147 - RNA, 14 nt, Human
guuuuaagaggcag

SEQ ID NO: 3169148 - RNA, 15 nt, Human
guuuucugagaaaga

SEQ ID NO: 3169149 - RNA, 16 nt, Human
guuuuacugcagcuuu

SEQ ID NO: 3169150 - RNA, 18 nt, Human
guuuuacugcagcuuugu

SEQ ID NO: 3169151 - RNA, 15 nt, Human
guuuuacugcagcuu

SEQ ID NO: 3169152 - RNA, 18 nt, Human
guuuuaaggacugacuga

SEQ ID NO: 3169153 - RNA, 19 nt, Human
guuuuaaggacugacugag

SEQ ID NO: 3169154 - RNA, 21 nt, Human
guuuuauaaggucugacauca

SEQ ID NO: 3169155 - RNA, 18 nt, Human
guuucugccgcagcccug

SEQ ID NO: 3169156 - RNA, 22 nt, Human
guuucugccgcagcccugcaga

SEQ ID NO: 3169157 - RNA, 15 nt, Human
guuucucccgugcuu

SEQ ID NO: 3169158 - RNA, 14 nt, Human
guuucucagcuccc

SEQ ID NO: 3169159 - RNA, 13 nt, Human
guuugcuaaguga

SEQ ID NO: 3169160 - RNA, 13 nt, Human
guuugcuaauguu

SEQ ID NO: 3169161 - RNA, 20 nt, Human
guuugcuaauguuuccauag

SEQ ID NO: 3169162 - RNA, 17 nt, Human
guuugccucugccucug

SEQ ID NO: 3169163 - RNA, 16 nt, Human
guuugccucugccucu

SEQ ID NO: 3169164 - RNA, 23 nt, Human
guuugcacucaaaucuuaagaaa

SEQ ID NO: 3169165 - RNA, 22 nt, Human
guuugcacucaaaucuuaagaa

SEQ ID NO: 3169166 - RNA, 21 nt, Human
guuugcacucaaaucuuaaga

SEQ ID NO: 3169167 - RNA, 19 nt, Human
guuugcacucaaaucuuaa

SEQ ID NO: 3169168 - RNA, 17 nt, Human
guuugcacucaaaucuu

SEQ ID NO: 3169169 - RNA, 13 nt, Human
aaguauucucuuu

SEQ ID NO: 3169170 - RNA, 20 nt, Human
aaguacugguaagauuguua

SEQ ID NO: 3169171 - RNA, 21 nt, Human
aaguacugguaagauuguuau

SEQ ID NO: 3169172 - RNA, 23 nt, Human
aaguacugguaagauuguuauua

SEQ ID NO: 3169173 - RNA, 20 nt, Human
aaguacuucuccacccugcu

SEQ ID NO: 3169174 - RNA, 15 nt, Human
aaguauguuuuacuu

SEQ ID NO: 3169175 - RNA, 23 nt, Human
aaguacuucuccacccugcucuc

SEQ ID NO: 3169176 - RNA, 22 nt, Human
aaguacuucuccacccugcucu

SEQ ID NO: 3169177 - RNA, 17 nt, Human
guuuucugagaaagacu

SEQ ID NO: 3169178 - RNA, 16 nt, Human
guuuucugagaaagac

SEQ ID NO: 3169179 - RNA, 22 nt, Human
guuuucugagaaagacuauuca

SEQ ID NO: 3169180 - RNA, 15 nt, Human
aaguacuauguauca

SEQ ID NO: 3169181 - RNA, 16 nt, Human
aaguacuauguaucaa

SEQ ID NO: 3169182 - RNA, 16 nt, Human
aaguacugagcaguga

SEQ ID NO: 3169183 - RNA, 15 nt, Human
guuuuauauccauuu

SEQ ID NO: 3169184 - RNA, 23 nt, Human
aaguacugagcagugauauucuu

SEQ ID NO: 3169185 - RNA, 15 nt, Human
aaguacuggagaaaa

SEQ ID NO: 3169186 - RNA, 21 nt, Human
aaguacuucuccacccugcuc

SEQ ID NO: 3169187 - RNA, 21 nt, Human
aagucaagugaaaaaggagga

SEQ ID NO: 3169188 - RNA, 24 nt, Human
aagucacacaguauuacuucugcu

SEQ ID NO: 3169189 - RNA, 19 nt, Human
aagucaaggguaggguggg

SEQ ID NO: 3169190 - RNA, 18 nt, Human
aaguauucuuauuuaaug

SEQ ID NO: 3169191 - RNA, 18 nt, Human
aaguauucucuuuucaag

SEQ ID NO: 3169192 - RNA, 13 nt, Human
aagucacacagug

SEQ ID NO: 3169193 - RNA, 13 nt, Human
aagucacaguuaa

SEQ ID NO: 3169194 - RNA, 16 nt, Human
aagucaccaaauagug

SEQ ID NO: 3169195 - RNA, 16 nt, Human
aagucacaguuaagga

SEQ ID NO: 3169196 - RNA, 20 nt, Human
aagucaguugcucaaaaaga

SEQ ID NO: 3169197 - RNA, 22 nt, Human
aagucaguugcucaaaaagaaa

SEQ ID NO: 3169198 - RNA, 19 nt, Human
aagucacaguuaaggagaa

SEQ ID NO: 3169199 - RNA, 12 nt, Human
aagucacugcac

SEQ ID NO: 3169200 - RNA, 22 nt, Human
aagucacugcaaaaccagguuu

SEQ ID NO: 3169201 - RNA, 19 nt, Human
aagucacugcaaaaccagg

SEQ ID NO: 3169202 - RNA, 13 nt, Human
guuuuuuuccagu

SEQ ID NO: 3169203 - RNA, 18 nt, Human
guuuuuuguuuuucugcu

SEQ ID NO: 3169204 - RNA, 13 nt, Human
guuuuuuuaauga

SEQ ID NO: 3169205 - RNA, 20 nt, Human
guuuuuuuaggguuucugau

SEQ ID NO: 3169206 - RNA, 9 nt, Human
guuuuuuga

SEQ ID NO: 3169207 - RNA, 16 nt, Human
guuuuuugaaguguug

SEQ ID NO: 3169208 - RNA, 9 nt, Human
guuuuuugu

SEQ ID NO: 3169209 - RNA, 18 nt, Human
guuuuuuguucuugcgau

SEQ ID NO: 3169210 - RNA, 17 nt, Human
guuuuuugaaguguugg

SEQ ID NO: 3169211 - RNA, 16 nt, Human
guuuuugucuuaaaaa

SEQ ID NO: 3169212 - RNA, 15 nt, Human
guuuuuguaaagauu

SEQ ID NO: 3169213 - RNA, 21 nt, Human
guuuuuguaaagaaaaauauu

SEQ ID NO: 3169214 - RNA, 20 nt, Human
guuuuuguaaagaaaaauau

SEQ ID NO: 3169215 - RNA, 19 nt, Human
guuuuuguaaagaaaaaua

SEQ ID NO: 3169216 - RNA, 15 nt, Human
guuuuuguaaagaaa

SEQ ID NO: 3169217 - RNA, 13 nt, Human
guuuuuguaaaga

SEQ ID NO: 3169218 - RNA, 12 nt, Human
guuuuuguaaag

SEQ ID NO: 3169219 - RNA, 18 nt, Human
guuuuuuaaaaaucugug

SEQ ID NO: 3169220 - RNA, 19 nt, Human
guuuuuguuuuuguuuugu

SEQ ID NO: 3169221 - RNA, 17 nt, Human
guuuuuguuuuguugca

SEQ ID NO: 3169222 - RNA, 14 nt, Human
guuuuuguuuuguu

SEQ ID NO: 3169223 - RNA, 14 nt, Human
guuuuuguauauug

SEQ ID NO: 3169224 - RNA, 22 nt, Human
guuuuuguaaagauuucuguuc

SEQ ID NO: 3169225 - RNA, 16 nt, Human
guuuuucugcuuuaga

SEQ ID NO: 3169226 - RNA, 18 nt, Human
guuuuucugcuuuagacu

SEQ ID NO: 3169227 - RNA, 19 nt, Human
guuuuucugcuuuagacuu

SEQ ID NO: 3169228 - RNA, 22 nt, Human
guuuuucugcuuuagacuugaa

SEQ ID NO: 3169229 - RNA, 14 nt, Human
guuuuucugcuuua

SEQ ID NO: 3169230 - RNA, 15 nt, Human
guuuuucugauaugu

SEQ ID NO: 3169231 - RNA, 17 nt, Human
aagucuuagauguauau

SEQ ID NO: 3169232 - RNA, 23 nt, Human
aagucaugauguuuuuaaaaucu

SEQ ID NO: 3169233 - RNA, 22 nt, Human
aagucaugauguuuuuaaaauc

SEQ ID NO: 3169234 - RNA, 21 nt, Human
aagucaugauguuuuuaaaau

SEQ ID NO: 3169235 - RNA, 19 nt, Human
aagucaugauguuuuuaaa

SEQ ID NO: 3169236 - RNA, 18 nt, Human
aagucaugauguuuuuaa

SEQ ID NO: 3169237 - RNA, 17 nt, Human
aagucaugauguuuuua

SEQ ID NO: 3169238 - RNA, 13 nt, Human
aagucaugauguu

SEQ ID NO: 3169239 - RNA, 19 nt, Human
aagucuuagauguauauau

SEQ ID NO: 3169240 - RNA, 18 nt, Human
aagucuuagauguauaua

SEQ ID NO: 3169241 - RNA, 14 nt, Human
aagugaauugaagu

SEQ ID NO: 3169242 - RNA, 15 nt, Human
aagugaauugaaguu

SEQ ID NO: 3169243 - RNA, 16 nt, Human
aagugaauugaaguuu

SEQ ID NO: 3169244 - RNA, 21 nt, Human
aagugaauugaaguuucaagu

SEQ ID NO: 3169245 - RNA, 18 nt, Human
guuuuucuaggccugggg

SEQ ID NO: 3169246 - RNA, 17 nt, Human
aagugacgguuccuaca

SEQ ID NO: 3169247 - RNA, 15 nt, Human
aagugacgguuccua

SEQ ID NO: 3169248 - RNA, 14 nt, Human
aagugacgguuccu

SEQ ID NO: 3169249 - RNA, 14 nt, Human
aagugagaaaacug

SEQ ID NO: 3169250 - RNA, 18 nt, Human
aagugaccaucauuucac

SEQ ID NO: 3169251 - RNA, 20 nt, Human
aagugaccgcaccucacacu

SEQ ID NO: 3169252 - RNA, 14 nt, Human
uaaauuuugaaaag

SEQ ID NO: 3169253 - RNA, 15 nt, Human
uaaauuuugaaaagu

SEQ ID NO: 3169254 - RNA, 22 nt, Human
uaaauuuugaaaaguaauauuu

SEQ ID NO: 3169255 - RNA, 15 nt, Human
uaaauuuuuuuguau

SEQ ID NO: 3169256 - RNA, 16 nt, Human
uaaauuuuuuuguaug

SEQ ID NO: 3169257 - RNA, 17 nt, Human
uaaauuuuuuuguauga

SEQ ID NO: 3169258 - RNA, 18 nt, Human
uaaauuuuuuuguaugaa

SEQ ID NO: 3169259 - RNA, 17 nt, Human
uaacaaauaacaacuuu

SEQ ID NO: 3169260 - RNA, 21 nt, Human
uaaauuuuuuuguaugaaaac

SEQ ID NO: 3169261 - RNA, 22 nt, Human
uaaauuuuuuuguaugaaaaca

SEQ ID NO: 3169262 - RNA, 18 nt, Human
uaacaaauaacaacuuuu

SEQ ID NO: 3169263 - RNA, 13 nt, Human
uaacaagccaccc

SEQ ID NO: 3169264 - RNA, 15 nt, Human
uaacaacugcccagu

SEQ ID NO: 3169265 - RNA, 22 nt, Human
uaacaacuaugauuuggaaaau

SEQ ID NO: 3169266 - RNA, 21 nt, Human
uaacaacuaugauuuggaaaa

SEQ ID NO: 3169267 - RNA, 16 nt, Human
uaacaacuaugauuug

SEQ ID NO: 3169268 - RNA, 20 nt, Human
uaacaacuuuuuuuucuuuu

SEQ ID NO: 3169269 - RNA, 14 nt, Human
uaacaagaaaauga

SEQ ID NO: 3169270 - RNA, 13 nt, Human
uaacaagaagcaa

SEQ ID NO: 3169271 - RNA, 22 nt, Human
uaaauguuuuguaaacuuugaa

SEQ ID NO: 3169272 - RNA, 21 nt, Human
uaaauguuuuguaaacuuuga

SEQ ID NO: 3169273 - RNA, 19 nt, Human
uaaauguuuuguaaacuuu

SEQ ID NO: 3169274 - RNA, 18 nt, Human
uaaauguuuuguaaacuu

SEQ ID NO: 3169275 - RNA, 16 nt, Human
uaaauguuuuguaaac

SEQ ID NO: 3169276 - RNA, 15 nt, Human
uaaauguuuuguaaa

SEQ ID NO: 3169277 - RNA, 14 nt, Human
uaaauguuuuguaa

SEQ ID NO: 3169278 - RNA, 12 nt, Human
uaaauguuuugu

SEQ ID NO: 3169279 - RNA, 11 nt, Human
uaaauuaauau

SEQ ID NO: 3169280 - RNA, 12 nt, Human
uaaauuaauauc

SEQ ID NO: 3169281 - RNA, 14 nt, Human
uaaauuaauaucuu

SEQ ID NO: 3169282 - RNA, 15 nt, Human
uaaauuaauaucuuu

SEQ ID NO: 3169283 - RNA, 17 nt, Human
uaaauuaauaucuuucu

SEQ ID NO: 3169284 - RNA, 23 nt, Human
uaaauguuuuguaaacuuugaaa

SEQ ID NO: 3169285 - RNA, 18 nt, Human
uaaauuaguacagcacuu

SEQ ID NO: 3169286 - RNA, 21 nt, Human
uaaauuacauuuguaauuuaa

SEQ ID NO: 3169287 - RNA, 16 nt, Human
uaaauuuguguaauau

SEQ ID NO: 3169288 - RNA, 23 nt, Human
uaaauuuguguaauauuacuuua

SEQ ID NO: 3169289 - RNA, 12 nt, Human
uaaauuuuaaag

SEQ ID NO: 3169290 - RNA, 13 nt, Human
uaaauuuuaaagc

SEQ ID NO: 3169291 - RNA, 14 nt, Human
uaaauuuuaaagcc

SEQ ID NO: 3169292 - RNA, 16 nt, Human
uaaauuuuaaagccau

SEQ ID NO: 3169293 - RNA, 17 nt, Human
uaaauuuuaacuaaauu

SEQ ID NO: 3169294 - RNA, 17 nt, Human
uaaauuacauuuguaau

SEQ ID NO: 3169295 - RNA, 16 nt, Human
uaaauuacauuuguaa

SEQ ID NO: 3169296 - RNA, 15 nt, Human
uaaauuacauuugua

SEQ ID NO: 3169297 - RNA, 16 nt, Human
uaaauuacuauagcaa

SEQ ID NO: 3169298 - RNA, 17 nt, Human
uaaauuacuauagcaaa

SEQ ID NO: 3169299 - RNA, 20 nt, Human
uaaauuacuauagcaaagua

SEQ ID NO: 3169300 - RNA, 23 nt, Human
uaaauuacuauagcaaaguagua

SEQ ID NO: 3169301 - RNA, 12 nt, Human
uaaauuagaaaa

SEQ ID NO: 3169302 - RNA, 13 nt, Human
uaaauuagaaaau

SEQ ID NO: 3169303 - RNA, 16 nt, Human
uaaauuagaaaauauu

SEQ ID NO: 3169304 - RNA, 18 nt, Human
uaaauuagaaaauauucu

SEQ ID NO: 3169305 - RNA, 20 nt, Human
uaaauuagaaaauauucucu

SEQ ID NO: 3169306 - RNA, 11 nt, Human
uaaauguuuug

SEQ ID NO: 3169307 - RNA, 17 nt, Human
uaaaugauuucauucaa

SEQ ID NO: 3169308 - RNA, 20 nt, Human
uaaaugauucaaaaagucac

SEQ ID NO: 3169309 - RNA, 15 nt, Human
uaaaugauuuaaauu

SEQ ID NO: 3169310 - RNA, 20 nt, Human
uaaaugauuuaaauuuaagu

SEQ ID NO: 3169311 - RNA, 14 nt, Human
uaaaugauucaaaa

SEQ ID NO: 3169312 - RNA, 19 nt, Human
uaaauaguguuauugagag

SEQ ID NO: 3169313 - RNA, 16 nt, Human
uaaauaguguuauuga

SEQ ID NO: 3169314 - RNA, 15 nt, Human
uaaauaguguuauug

SEQ ID NO: 3169315 - RNA, 12 nt, Human
uaaauaguguua

SEQ ID NO: 3169316 - RNA, 13 nt, Human
uaaaucuaacauu

SEQ ID NO: 3169317 - RNA, 17 nt, Human
uaaauaauucuuuuuua

SEQ ID NO: 3169318 - RNA, 23 nt, Human
uaaauaauucuuuuuuauuaauc

SEQ ID NO: 3169319 - RNA, 20 nt, Human
uaaauaguaaaaauaaaauu

SEQ ID NO: 3169320 - RNA, 19 nt, Human
uaaauaguaaaaauaaaau

SEQ ID NO: 3169321 - RNA, 14 nt, Human
aauacacacucaaa

SEQ ID NO: 3169322 - RNA, 18 nt, Human
aauacaauuuuuauuucu

SEQ ID NO: 3169323 - RNA, 22 nt, Human
aauacaauuuuuauuucuuuua

SEQ ID NO: 3169324 - RNA, 16 nt, Human
aauacacaaaaucaaa

SEQ ID NO: 3169325 - RNA, 13 nt, Human
uaaauaauucuuu

SEQ ID NO: 3169326 - RNA, 19 nt, Human
aauaacauguaauuaagua

SEQ ID NO: 3169327 - RNA, 12 nt, Human
aauaacauguaa

SEQ ID NO: 3169328 - RNA, 13 nt, Human
aauaacagccgcu

SEQ ID NO: 3169329 - RNA, 22 nt, Human
aauaaauuuugaaaaguaauau

SEQ ID NO: 3169330 - RNA, 15 nt, Human
aauaaauuuugaaaa

SEQ ID NO: 3169331 - RNA, 16 nt, Human
aauaaauuuugaaaag

SEQ ID NO: 3169332 - RNA, 18 nt, Human
aauaaauuuugaaaagua

SEQ ID NO: 3169333 - RNA, 20 nt, Human
aauaaauuuugaaaaguaau

SEQ ID NO: 3169334 - RNA, 13 nt, Human
aauaaauuuugaa

SEQ ID NO: 3169335 - RNA, 14 nt, Human
aauaaauuuugaaa

SEQ ID NO: 3169336 - RNA, 12 nt, Human
aauaaauuuuga

SEQ ID NO: 3169337 - RNA, 21 nt, Human
aauaaaugugccuucauuuuu

SEQ ID NO: 3169338 - RNA, 12 nt, Human
aauaaaugugcc

SEQ ID NO: 3169339 - RNA, 12 nt, Human
aauaaauuauuu

SEQ ID NO: 3169340 - RNA, 12 nt, Human
aauaaauauacc

SEQ ID NO: 3169341 - RNA, 19 nt, Human
aauaaaguuugaucuuccu

SEQ ID NO: 3169342 - RNA, 18 nt, Human
aauaaaguuugaucuucc

SEQ ID NO: 3169343 - RNA, 15 nt, Human
aauaaaguuugaucu

SEQ ID NO: 3169344 - RNA, 19 nt, Human
aauaauuacagugccuaaa

SEQ ID NO: 3169345 - RNA, 22 nt, Human
aauaauuacagugccuaaaaua

SEQ ID NO: 3169346 - RNA, 21 nt, Human
aauaagggaaaaaucaaguau

SEQ ID NO: 3169347 - RNA, 23 nt, Human
aauaagcuaguugaauacuugaa

SEQ ID NO: 3169348 - RNA, 20 nt, Human
aauaagcuaguugaauacuu

SEQ ID NO: 3169349 - RNA, 22 nt, Human
aauaagcuaguugaauacuuga

SEQ ID NO: 3169350 - RNA, 17 nt, Human
aauaagcacuuuuuaaa

SEQ ID NO: 3169351 - RNA, 17 nt, Human
aauaagcuaguugaaua

SEQ ID NO: 3169352 - RNA, 18 nt, Human
aauaagcuaguugaauac

SEQ ID NO: 3169353 - RNA, 16 nt, Human
aauaagcuaguugaau

SEQ ID NO: 3169354 - RNA, 15 nt, Human
aauaacuaaaaggua

SEQ ID NO: 3169355 - RNA, 13 nt, Human
aauaacuaaaaug

SEQ ID NO: 3169356 - RNA, 15 nt, Human
aauaacuaaaaugua

SEQ ID NO: 3169357 - RNA, 20 nt, Human
aauaacagccgcuccagagu

SEQ ID NO: 3169358 - RNA, 15 nt, Human
aauaacuagaacaaa

SEQ ID NO: 3169359 - RNA, 19 nt, Human
aauaaaagcccaggagccc

SEQ ID NO: 3169360 - RNA, 17 nt, Human
aauaaaagcccaggagc

SEQ ID NO: 3169361 - RNA, 15 nt, Human
aauaaaagcccagga

SEQ ID NO: 3169362 - RNA, 13 nt, Human
aauaaaaauucua

SEQ ID NO: 3169363 - RNA, 14 nt, Human
aauaaaagcccagg

SEQ ID NO: 3169364 - RNA, 13 nt, Human
aauaaaagcccag

SEQ ID NO: 3169365 - RNA, 16 nt, Human
aauaaaaucuugaaaa

SEQ ID NO: 3169366 - RNA, 11 nt, Human
aauaaaauauu

SEQ ID NO: 3169367 - RNA, 12 nt, Human
aauaaaauauuu

SEQ ID NO: 3169368 - RNA, 14 nt, Human
aauaaaauauuuuc

SEQ ID NO: 3169369 - RNA, 15 nt, Human
aauaaaauauuuucu

SEQ ID NO: 3169370 - RNA, 16 nt, Human
aauaaaauauuuucug

SEQ ID NO: 3169371 - RNA, 17 nt, Human
aauaaaauauuuucugu

SEQ ID NO: 3169372 - RNA, 18 nt, Human
aauaaaauauuuucugug

SEQ ID NO: 3169373 - RNA, 19 nt, Human
aauaaaauauuuucugugu

SEQ ID NO: 3169374 - RNA, 20 nt, Human
aauaaaauauuuucugugug

SEQ ID NO: 3169375 - RNA, 22 nt, Human
aauaaaauauuuucuguguguu

SEQ ID NO: 3169376 - RNA, 23 nt, Human
aauaaaauauuuucuguguguuc

SEQ ID NO: 3169377 - RNA, 23 nt, Human
aauaaaggcagcuguugucucuu

SEQ ID NO: 3169378 - RNA, 14 nt, Human
aauaaaguaauuau

SEQ ID NO: 3169379 - RNA, 16 nt, Human
aauaaaguacaagagc

SEQ ID NO: 3169380 - RNA, 12 nt, Human
aauaaaguauaa

SEQ ID NO: 3169381 - RNA, 15 nt, Human
aauaaaguauaaugu

SEQ ID NO: 3169382 - RNA, 17 nt, Human
uaaagggcaaauaauga

SEQ ID NO: 3169383 - RNA, 18 nt, Human
uaaagggcccaaugaauu

SEQ ID NO: 3169384 - RNA, 23 nt, Human
uaaagggaagaaaacacuguuau

SEQ ID NO: 3169385 - RNA, 21 nt, Human
uaaagucuguugauuaaagau

SEQ ID NO: 3169386 - RNA, 21 nt, Human
uaaagucaguugcucaaaaag

SEQ ID NO: 3169387 - RNA, 13 nt, Human
uaaagucaggggu

SEQ ID NO: 3169388 - RNA, 22 nt, Human
uaaagggaagaaaacacuguua

SEQ ID NO: 3169389 - RNA, 17 nt, Human
uaaagggaagaaaacac

SEQ ID NO: 3169390 - RNA, 14 nt, Human
uaaagggaagaaaa

SEQ ID NO: 3169391 - RNA, 13 nt, Human
uaaagggaagaaa

SEQ ID NO: 3169392 - RNA, 22 nt, Human
uaaagucuguugauuaaagaug

SEQ ID NO: 3169393 - RNA, 19 nt, Human
uaaagugaggccacugaag

SEQ ID NO: 3169394 - RNA, 21 nt, Human
uaaagugaggccacugaagag

SEQ ID NO: 3169395 - RNA, 23 nt, Human
uaaagugaggccacugaagagga

SEQ ID NO: 3169396 - RNA, 17 nt, Human
uaaagugagaaaacugu

SEQ ID NO: 3169397 - RNA, 18 nt, Human
uaaagugagaaaacugug

SEQ ID NO: 3169398 - RNA, 15 nt, Human
aauaaaaaaaagaaa

SEQ ID NO: 3169399 - RNA, 17 nt, Human
aauaaaaaaagaaaaaa

SEQ ID NO: 3169400 - RNA, 18 nt, Human
aauaaaaaaaagaaaaaa

SEQ ID NO: 3169401 - RNA, 17 nt, Human
aauaaaaaaaagaaaaa

SEQ ID NO: 3169402 - RNA, 20 nt, Human
aaguguucuguuacaaaaug

SEQ ID NO: 3169403 - RNA, 19 nt, Human
aaguguucuguuacaaaau

SEQ ID NO: 3169404 - RNA, 17 nt, Human
aaguguucuguuacaaa

SEQ ID NO: 3169405 - RNA, 16 nt, Human
aaguguucuguuacaa

SEQ ID NO: 3169406 - RNA, 14 nt, Human
aaguguuggaaaaa

SEQ ID NO: 3169407 - RNA, 16 nt, Human
aaguguuggaaaaaau

SEQ ID NO: 3169408 - RNA, 20 nt, Human
aaguguuggaaaaaauuugu

SEQ ID NO: 3169409 - RNA, 22 nt, Human
aaguguucuguuacaaaaugua

SEQ ID NO: 3169410 - RNA, 21 nt, Human
aaguguucuguuacaaaaugu

SEQ ID NO: 3169411 - RNA, 23 nt, Human
aaguguucuguuacaaaauguaa

SEQ ID NO: 3169412 - RNA, 23 nt, Human
aaguguugggguuugguuuuguu

SEQ ID NO: 3169413 - RNA, 11 nt, Human
aaguuaaaagu

SEQ ID NO: 3169414 - RNA, 14 nt, Human
aaguuaaauaaauc

SEQ ID NO: 3169415 - RNA, 12 nt, Human
aaguuaaauaaa

SEQ ID NO: 3169416 - RNA, 14 nt, Human
aaguuaaagggaag

SEQ ID NO: 3169417 - RNA, 11 nt, Human
aaguuaaaggg

SEQ ID NO: 3169418 - RNA, 20 nt, Human
aaguucauugcaauuaaacu

SEQ ID NO: 3169419 - RNA, 21 nt, Human
uaaaauuuuaggcaaguuuuc

SEQ ID NO: 3169420 - RNA, 17 nt, Human
uaaaauuuuaggcaagu

SEQ ID NO: 3169421 - RNA, 19 nt, Human
uaaaauuuuaagcuaggaa

SEQ ID NO: 3169422 - RNA, 21 nt, Human
uaaaauuaucaccuuugucag

SEQ ID NO: 3169423 - RNA, 18 nt, Human
uaaaauuuuaagcuagga

SEQ ID NO: 3169424 - RNA, 19 nt, Human
uaaaauuaaagcugaaaac

SEQ ID NO: 3169425 - RNA, 18 nt, Human
uaaaauuaaagcugaaaa

SEQ ID NO: 3169426 - RNA, 16 nt, Human
uaaaauuaaagcugaa

SEQ ID NO: 3169427 - RNA, 23 nt, Human
uaaaauguuuucagcuaggaaca

SEQ ID NO: 3169428 - RNA, 15 nt, Human
uaaaauuaaaaguuu

SEQ ID NO: 3169429 - RNA, 15 nt, Human
uaaaauuauaccugu

SEQ ID NO: 3169430 - RNA, 14 nt, Human
uaaaauuauacugu

SEQ ID NO: 3169431 - RNA, 15 nt, Human
uaaaauuauacugug

SEQ ID NO: 3169432 - RNA, 16 nt, Human
uaaaauuauacugugu

SEQ ID NO: 3169433 - RNA, 19 nt, Human
uaaaauuauacugugugug

SEQ ID NO: 3169434 - RNA, 20 nt, Human
uaaaauuauacuguguguga

SEQ ID NO: 3169435 - RNA, 19 nt, Human
uaaaauuacaacuaaguga

SEQ ID NO: 3169436 - RNA, 18 nt, Human
uaaaauuacaguggauug

SEQ ID NO: 3169437 - RNA, 17 nt, Human
uaaaauuacaacuaagu

SEQ ID NO: 3169438 - RNA, 15 nt, Human
uaaaauuacaacuaa

SEQ ID NO: 3169439 - RNA, 13 nt, Human
uaaaauuacaacu

SEQ ID NO: 3169440 - RNA, 19 nt, Human
uaaaccaaggcuagaacca

SEQ ID NO: 3169441 - RNA, 15 nt, Human
aaguuuugacaagcu

SEQ ID NO: 3169442 - RNA, 19 nt, Human
aaguuuugacaagcuggcu

SEQ ID NO: 3169443 - RNA, 20 nt, Human
aaguuuugacaagcuggcuu

SEQ ID NO: 3169444 - RNA, 12 nt, Human
uaaaauguuuuc

SEQ ID NO: 3169445 - RNA, 21 nt, Human
uaaaauguuuucagcuaggaa

SEQ ID NO: 3169446 - RNA, 16 nt, Human
uaaaauguuuucagcu

SEQ ID NO: 3169447 - RNA, 14 nt, Human
uaaaauguuuucag

SEQ ID NO: 3169448 - RNA, 13 nt, Human
uaaaauguuuuca

SEQ ID NO: 3169449 - RNA, 19 nt, Human
aaguuuuaggguacaugug

SEQ ID NO: 3169450 - RNA, 13 nt, Human
aaguuuuaaaguu

SEQ ID NO: 3169451 - RNA, 15 nt, Human
aaguuuuaaaguuca

SEQ ID NO: 3169452 - RNA, 23 nt, Human
aaguuuucccugaaguuaugugu

SEQ ID NO: 3169453 - RNA, 16 nt, Human
aaguuuucccugaagu

SEQ ID NO: 3169454 - RNA, 11 nt, Human
aaguuugcacu

SEQ ID NO: 3169455 - RNA, 20 nt, Human
aaguuugcacucaaaucuua

SEQ ID NO: 3169456 - RNA, 19 nt, Human
aaguuucaaguuuuaaagu

SEQ ID NO: 3169457 - RNA, 20 nt, Human
aaguuucaaguuuuaaaguu

SEQ ID NO: 3169458 - RNA, 21 nt, Human
aaguuucaaaaaucugaagau

SEQ ID NO: 3169459 - RNA, 17 nt, Human
aaguuucaaaaaucuga

SEQ ID NO: 3169460 - RNA, 16 nt, Human
aaguuucaaaaaucug

SEQ ID NO: 3169461 - RNA, 15 nt, Human
aaguuucaaaaaucu

SEQ ID NO: 3169462 - RNA, 16 nt, Human
aaguuucagaguauau

SEQ ID NO: 3169463 - RNA, 18 nt, Human
aaguuucagaguauauug

SEQ ID NO: 3169464 - RNA, 14 nt, Human
aaguuucaaaaauc

SEQ ID NO: 3169465 - RNA, 14 nt, Human
aaguuuaugucuca

SEQ ID NO: 3169466 - RNA, 22 nt, Human
aaguuuaguuugaggaauucuu

SEQ ID NO: 3169467 - RNA, 16 nt, Human
uaaaccgccaaggcug

SEQ ID NO: 3169468 - RNA, 18 nt, Human
uaaaccgccaaggcuggg

SEQ ID NO: 3169469 - RNA, 18 nt, Human
uaaaccauuuuuguuacu

SEQ ID NO: 3169470 - RNA, 19 nt, Human
uaaaccauuuuuguuacuc

SEQ ID NO: 3169471 - RNA, 23 nt, Human
uaaacguggagaaucacaggcug

SEQ ID NO: 3169472 - RNA, 13 nt, Human
uaaacguggagaa

SEQ ID NO: 3169473 - RNA, 18 nt, Human
uaaacguguauguuuuuc

SEQ ID NO: 3169474 - RNA, 20 nt, Human
uaaacguguauguuuuucag

SEQ ID NO: 3169475 - RNA, 23 nt, Human
uaaacguguauguuuuucaguuc

SEQ ID NO: 3169476 - RNA, 22 nt, Human
uaaacguguauguuuuucaguu

SEQ ID NO: 3169477 - RNA, 19 nt, Human
uaaaccuguagaaucaauu

SEQ ID NO: 3169478 - RNA, 12 nt, Human
uaaaccuuaaua

SEQ ID NO: 3169479 - RNA, 14 nt, Human
uaaaccuuaauauu

SEQ ID NO: 3169480 - RNA, 19 nt, Human
uaaaccuuaauauuucuuc

SEQ ID NO: 3169481 - RNA, 13 nt, Human
uaaagaaaggaaa

SEQ ID NO: 3169482 - RNA, 15 nt, Human
uaaagaaaggaaaag

SEQ ID NO: 3169483 - RNA, 16 nt, Human
uaaagaaaggaaaaga

SEQ ID NO: 3169484 - RNA, 17 nt, Human
uaaagaaaggaaaagaa

SEQ ID NO: 3169485 - RNA, 22 nt, Human
uaaagaaaggaaaagaaaacaa

SEQ ID NO: 3169486 - RNA, 23 nt, Human
uaaagaaaggaaaagaaaacaaa

SEQ ID NO: 3169487 - RNA, 12 nt, Human
uaaacugccccc

SEQ ID NO: 3169488 - RNA, 21 nt, Human
uaaacucugaauuuaucuuug

SEQ ID NO: 3169489 - RNA, 14 nt, Human
uaaacucugaauaa

SEQ ID NO: 3169490 - RNA, 13 nt, Human
uaaacucugaaua

SEQ ID NO: 3169491 - RNA, 18 nt, Human
uaaacucugaauuuaucu

SEQ ID NO: 3169492 - RNA, 17 nt, Human
uaaacucugaauuuauc

SEQ ID NO: 3169493 - RNA, 22 nt, Human
uaaacucugaauaagcacuuuu

SEQ ID NO: 3169494 - RNA, 19 nt, Human
uaaacucugaauaagcacu

SEQ ID NO: 3169495 - RNA, 18 nt, Human
uaaacuaguuuuuccuau

SEQ ID NO: 3169496 - RNA, 11 nt, Human
uaaagacucua

SEQ ID NO: 3169497 - RNA, 15 nt, Human
uaaagacaccuacug

SEQ ID NO: 3169498 - RNA, 15 nt, Human
uaaagaccagaaauu

SEQ ID NO: 3169499 - RNA, 16 nt, Human
uaaagaccagaaauuc

SEQ ID NO: 3169500 - RNA, 14 nt, Human
uaaagaaauaauuu

SEQ ID NO: 3169501 - RNA, 12 nt, Human
uaaagaaauaau

SEQ ID NO: 3169502 - RNA, 14 nt, Human
uaaagaagguuuca

SEQ ID NO: 3169503 - RNA, 15 nt, Human
uaaagaauaggacuu

SEQ ID NO: 3169504 - RNA, 14 nt, Human
uaaagaauaggacu

SEQ ID NO: 3169505 - RNA, 20 nt, Human
uaaagaauuugucacaggaa

SEQ ID NO: 3169506 - RNA, 14 nt, Human
uaaagaauuuguca

SEQ ID NO: 3169507 - RNA, 19 nt, Human
uaaagcaaccaaaaagaaa

SEQ ID NO: 3169508 - RNA, 21 nt, Human
uaaagcaaccaaaaagaaaaa

SEQ ID NO: 3169509 - RNA, 15 nt, Human
uaaagauuucuguuc

SEQ ID NO: 3169510 - RNA, 14 nt, Human
uaaagauuucuguu

SEQ ID NO: 3169511 - RNA, 15 nt, Human
uaaagauuuugaucu

SEQ ID NO: 3169512 - RNA, 14 nt, Human
uaaagauuuugauc

SEQ ID NO: 3169513 - RNA, 21 nt, Human
uaaagauuuugaucucacauu

SEQ ID NO: 3169514 - RNA, 19 nt, Human
uaaagauuuugaucucaca

SEQ ID NO: 3169515 - RNA, 16 nt, Human
uaaagauguagcaaac

SEQ ID NO: 3169516 - RNA, 20 nt, Human
uaaagauguagcaaacccug

SEQ ID NO: 3169517 - RNA, 17 nt, Human
uaaagauuuaggccaau

SEQ ID NO: 3169518 - RNA, 13 nt, Human
uaaagauugugug

SEQ ID NO: 3169519 - RNA, 13 nt, Human
uaaagauuucugu

SEQ ID NO: 3169520 - RNA, 12 nt, Human
uaaagauuucug

SEQ ID NO: 3169521 - RNA, 19 nt, Human
uaaagaugagcuuugucua

SEQ ID NO: 3169522 - RNA, 18 nt, Human
uaaagaguuaguuugagu

SEQ ID NO: 3169523 - RNA, 17 nt, Human
aacauuaguacuuuaua

SEQ ID NO: 3169524 - RNA, 16 nt, Human
aacauuaguacuuuau

SEQ ID NO: 3169525 - RNA, 15 nt, Human
aacauuaguacuuua

SEQ ID NO: 3169526 - RNA, 21 nt, Human
aacauuaggcagguugcuuaa

SEQ ID NO: 3169527 - RNA, 24 nt, Human
aacauuaguacuuuauagaagaau

SEQ ID NO: 3169528 - RNA, 13 nt, Human
aacauuaaaauau

SEQ ID NO: 3169529 - RNA, 20 nt, Human
aacauuaauguugauuucua

SEQ ID NO: 3169530 - RNA, 19 nt, Human
aacauuaauguugauuucu

SEQ ID NO: 3169531 - RNA, 17 nt, Human
aacauuaauguugauuu

SEQ ID NO: 3169532 - RNA, 15 nt, Human
aacauuaauguugau

SEQ ID NO: 3169533 - RNA, 14 nt, Human
aacauuaauguuga

SEQ ID NO: 3169534 - RNA, 12 nt, Human
aacauuaauguu

SEQ ID NO: 3169535 - RNA, 19 nt, Human
aacauuaauccacauguuu

SEQ ID NO: 3169536 - RNA, 18 nt, Human
aacauuaaugccugcuuu

SEQ ID NO: 3169537 - RNA, 23 nt, Human
aacauuaaugccugcuuuuugga

SEQ ID NO: 3169538 - RNA, 13 nt, Human
guccuuuagaaac

SEQ ID NO: 3169539 - RNA, 12 nt, Human
guccuuuagaaa

SEQ ID NO: 3169540 - RNA, 13 nt, Human
guccugcugcagu

SEQ ID NO: 3169541 - RNA, 16 nt, Human
guccugcugcaguugc

SEQ ID NO: 3169542 - RNA, 15 nt, Human
guccugcucagcagu

SEQ ID NO: 3169543 - RNA, 23 nt, Human
gucgcccagucuggaaugcagug

SEQ ID NO: 3169544 - RNA, 20 nt, Human
gucuaccugaggggccucuu

SEQ ID NO: 3169545 - RNA, 16 nt, Human
gucuauaccuuaagaa

SEQ ID NO: 3169546 - RNA, 14 nt, Human
gucuaucauuguug

SEQ ID NO: 3169547 - RNA, 22 nt, Human
gucuauaccuuaagaaugccaa

SEQ ID NO: 3169548 - RNA, 13 nt, Human
gucgaaaguuagu

SEQ ID NO: 3169549 - RNA, 14 nt, Human
gucgaggacaggga

SEQ ID NO: 3169550 - RNA, 13 nt, Human
gucgagcuccccc

SEQ ID NO: 3169551 - RNA, 21 nt, Human
gucgagccugggggcuggagc

SEQ ID NO: 3169552 - RNA, 14 nt, Human
gucgcccagucugg

SEQ ID NO: 3169553 - RNA, 13 nt, Human
gucgcccagucug

SEQ ID NO: 3169554 - RNA, 20 nt, Human
gucgcccaggcuggagugca

SEQ ID NO: 3169555 - RNA, 15 nt, Human
gucgcccaggcugga

SEQ ID NO: 3169556 - RNA, 14 nt, Human
gucgcccaggcugg

SEQ ID NO: 3169557 - RNA, 19 nt, Human
aacauuuucucuuagaaaa

SEQ ID NO: 3169558 - RNA, 18 nt, Human
aacauuuucucuuagaaa

SEQ ID NO: 3169559 - RNA, 17 nt, Human
aacauuuucucuuagaa

SEQ ID NO: 3169560 - RNA, 14 nt, Human
aacauuuucucuua

SEQ ID NO: 3169561 - RNA, 12 nt, Human
aaccacagcagu

SEQ ID NO: 3169562 - RNA, 17 nt, Human
aaccaacaccaucacag

SEQ ID NO: 3169563 - RNA, 19 nt, Human
aaccaacaccaucacagcu

SEQ ID NO: 3169564 - RNA, 22 nt, Human
aaccaacaccaucacagcuugu

SEQ ID NO: 3169565 - RNA, 13 nt, Human
aaccacaucuugc

SEQ ID NO: 3169566 - RNA, 23 nt, Human
aaccaucauugaaaucuuuuugc

SEQ ID NO: 3169567 - RNA, 23 nt, Human
aaccacaguguaccauuaaaaua

SEQ ID NO: 3169568 - RNA, 22 nt, Human
aaccacaguguaccauuaaaau

SEQ ID NO: 3169569 - RNA, 17 nt, Human
aaccacaguguaccauu

SEQ ID NO: 3169570 - RNA, 21 nt, Human
aaccacaguguaccauuaaaa

SEQ ID NO: 3169571 - RNA, 18 nt, Human
aaccacaguguaccauua

SEQ ID NO: 3169572 - RNA, 13 nt, Human
aaccacagcuccu

SEQ ID NO: 3169573 - RNA, 19 nt, Human
aaccacagcuccuuuucca

SEQ ID NO: 3169574 - RNA, 18 nt, Human
aaccacagcuccuuuucc

SEQ ID NO: 3169575 - RNA, 23 nt, Human
gucucaguccaugaagauguaga

SEQ ID NO: 3169576 - RNA, 16 nt, Human
gucucaggucccugca

SEQ ID NO: 3169577 - RNA, 20 nt, Human
gucucagguuuguuuuguga

SEQ ID NO: 3169578 - RNA, 22 nt, Human
gucucagguuuguuuugugaau

SEQ ID NO: 3169579 - RNA, 15 nt, Human
gucucaggucccugc

SEQ ID NO: 3169580 - RNA, 22 nt, Human
gucuccaaaaaaaaaaaaaaua

SEQ ID NO: 3169581 - RNA, 23 nt, Human
gucuccaaaaaaaaaaaaaauac

SEQ ID NO: 3169582 - RNA, 14 nt, Human
gucuaugggacuca

SEQ ID NO: 3169583 - RNA, 20 nt, Human
gucuaucugguauuaaaugc

SEQ ID NO: 3169584 - RNA, 22 nt, Human
gucuaucugguauuaaaugcca

SEQ ID NO: 3169585 - RNA, 22 nt, Human
gucucaaacucuugaccucagg

SEQ ID NO: 3169586 - RNA, 19 nt, Human
gucucaaaaaaagaaaaag

SEQ ID NO: 3169587 - RNA, 14 nt, Human
gucucaaaggccag

SEQ ID NO: 3169588 - RNA, 17 nt, Human
gucucaagagggcacug

SEQ ID NO: 3169589 - RNA, 15 nt, Human
gucucaagagggcac

SEQ ID NO: 3169590 - RNA, 14 nt, Human
gucucaaugaaaua

SEQ ID NO: 3169591 - RNA, 15 nt, Human
gucucaaugaaauag

SEQ ID NO: 3169592 - RNA, 22 nt, Human
gucucaagagggcacugguggc

SEQ ID NO: 3169593 - RNA, 20 nt, Human
gucucaagagggcacuggug

SEQ ID NO: 3169594 - RNA, 15 nt, Human
aacauaauucuuauu

SEQ ID NO: 3169595 - RNA, 20 nt, Human
aacauacucccaucugugaa

SEQ ID NO: 3169596 - RNA, 18 nt, Human
aacauacucccaucugug

SEQ ID NO: 3169597 - RNA, 16 nt, Human
aacauacucccaucug

SEQ ID NO: 3169598 - RNA, 22 nt, Human
aacauagaauugcaaucuauaa

SEQ ID NO: 3169599 - RNA, 21 nt, Human
aacauagaauugcaaucuaua

SEQ ID NO: 3169600 - RNA, 22 nt, Human
aacauguuuuucuucucccuca

SEQ ID NO: 3169601 - RNA, 17 nt, Human
aacagucucaggaaauc

SEQ ID NO: 3169602 - RNA, 14 nt, Human
aacagucucaggaa

SEQ ID NO: 3169603 - RNA, 19 nt, Human
aacagucucaggaaaucaa

SEQ ID NO: 3169604 - RNA, 14 nt, Human
aacagauucuuuua

SEQ ID NO: 3169605 - RNA, 16 nt, Human
aacagauuggauuuua

SEQ ID NO: 3169606 - RNA, 17 nt, Human
aacagauucuuuuaugu

SEQ ID NO: 3169607 - RNA, 18 nt, Human
aacagauuggauuuuaug

SEQ ID NO: 3169608 - RNA, 17 nt, Human
aacagauuggauuuuau

SEQ ID NO: 3169609 - RNA, 23 nt, Human
aacagauuggauuuuauguugac

SEQ ID NO: 3169610 - RNA, 19 nt, Human
aacagauuauuaccuuaca

SEQ ID NO: 3169611 - RNA, 19 nt, Human
aacagaugaccccugccca

SEQ ID NO: 3169612 - RNA, 14 nt, Human
aacagaugcucuga

SEQ ID NO: 3169613 - RNA, 17 nt, Human
aacagaugcucugagag

SEQ ID NO: 3169614 - RNA, 20 nt, Human
aacagaggaccagcacacuc

SEQ ID NO: 3169615 - RNA, 18 nt, Human
aacagaggaccagcacac

SEQ ID NO: 3169616 - RNA, 12 nt, Human
aacagaggauau

SEQ ID NO: 3169617 - RNA, 18 nt, Human
aacagaugaccccugccc

SEQ ID NO: 3169618 - RNA, 14 nt, Human
aacagauaaagauu

SEQ ID NO: 3169619 - RNA, 16 nt, Human
aacagaguaaucuugu

SEQ ID NO: 3169620 - RNA, 21 nt, Human
aacagaggaccagcacacucc

SEQ ID NO: 3169621 - RNA, 20 nt, Human
aacagacuggaagcacagcu

SEQ ID NO: 3169622 - RNA, 13 nt, Human
guccuacccaccc

SEQ ID NO: 3169623 - RNA, 13 nt, Human
aacagaggaccag

SEQ ID NO: 3169624 - RNA, 12 nt, Human
aacagaggacca

SEQ ID NO: 3169625 - RNA, 21 nt, Human
guccuaauggugaugcagucu

SEQ ID NO: 3169626 - RNA, 20 nt, Human
guccuaagugcuaagugcuu

SEQ ID NO: 3169627 - RNA, 23 nt, Human
guccaugaagauguagaggagaa

SEQ ID NO: 3169628 - RNA, 16 nt, Human
guagcuaacuuuuauu

SEQ ID NO: 3169629 - RNA, 22 nt, Human
guagccucaaucgagugagaca

SEQ ID NO: 3169630 - RNA, 18 nt, Human
gucccaccuuggcugcag

SEQ ID NO: 3169631 - RNA, 17 nt, Human
gucccaccuuggcugca

SEQ ID NO: 3169632 - RNA, 13 nt, Human
guccauucucaag

SEQ ID NO: 3169633 - RNA, 19 nt, Human
gucccaccuuggcugcagg

SEQ ID NO: 3169634 - RNA, 12 nt, Human
gucccccucugg

SEQ ID NO: 3169635 - RNA, 14 nt, Human
gucccccucuggcu

SEQ ID NO: 3169636 - RNA, 17 nt, Human
guccccccacucccagc

SEQ ID NO: 3169637 - RNA, 13 nt, Human
gucccuuuuccuu

SEQ ID NO: 3169638 - RNA, 21 nt, Human
guccgaaagggacuuggaagc

SEQ ID NO: 3169639 - RNA, 22 nt, Human
guccgaaagggacuuggaagcu

SEQ ID NO: 3169640 - RNA, 20 nt, Human
guccgaccuggccugucugu

SEQ ID NO: 3169641 - RNA, 13 nt, Human
guccuaaugguga

SEQ ID NO: 3169642 - RNA, 13 nt, Human
gucccccugacaa

SEQ ID NO: 3169643 - RNA, 15 nt, Human
guccccgcacugggc

SEQ ID NO: 3169644 - RNA, 16 nt, Human
guccccgcacugggcu

SEQ ID NO: 3169645 - RNA, 23 nt, Human
guccccuguuuguuucugaaagg

SEQ ID NO: 3169646 - RNA, 12 nt, Human
guccccuucccg

SEQ ID NO: 3169647 - RNA, 12 nt, Human
guccccucccag

SEQ ID NO: 3169648 - RNA, 13 nt, Human
gugaagauacuuu

SEQ ID NO: 3169649 - RNA, 15 nt, Human
gugaagauacuuugu

SEQ ID NO: 3169650 - RNA, 18 nt, Human
gugaagauacuuuguauu

SEQ ID NO: 3169651 - RNA, 20 nt, Human
gugaagauacuuuguauugu

SEQ ID NO: 3169652 - RNA, 16 nt, Human
gugaagccagggcccg

SEQ ID NO: 3169653 - RNA, 21 nt, Human
gugaaggaggcuccaggcagc

SEQ ID NO: 3169654 - RNA, 21 nt, Human
gugaaggauuauggaaaaaua

SEQ ID NO: 3169655 - RNA, 22 nt, Human
gugaaggauuauggaaaaauaa

SEQ ID NO: 3169656 - RNA, 17 nt, Human
gugaaggaggcuccagg

SEQ ID NO: 3169657 - RNA, 16 nt, Human
gugaaggaggcuccag

SEQ ID NO: 3169658 - RNA, 23 nt, Human
gugaaggaccuucacucuaagau

SEQ ID NO: 3169659 - RNA, 21 nt, Human
gugaaggaccuucacucuaag

SEQ ID NO: 3169660 - RNA, 16 nt, Human
gugaagagcaagagag

SEQ ID NO: 3169661 - RNA, 16 nt, Human
gugaagacuccagaaa

SEQ ID NO: 3169662 - RNA, 22 nt, Human
gugaagaaagccuguuguuuaa

SEQ ID NO: 3169663 - RNA, 14 nt, Human
gugaagacuccaga

SEQ ID NO: 3169664 - RNA, 19 nt, Human
gugacagaggcagccccau

SEQ ID NO: 3169665 - RNA, 18 nt, Human
gugacagaggcagcccca

SEQ ID NO: 3169666 - RNA, 16 nt, Human
gugacagaggcagccc

SEQ ID NO: 3169667 - RNA, 20 nt, Human
gugacaucucuauuccccac

SEQ ID NO: 3169668 - RNA, 22 nt, Human
gugacauccacaaaugcaguuu

SEQ ID NO: 3169669 - RNA, 20 nt, Human
gugacauuugucauuuucau

SEQ ID NO: 3169670 - RNA, 17 nt, Human
gugaccaaugaugguca

SEQ ID NO: 3169671 - RNA, 23 nt, Human
gugacauuugucauuuucauuag

SEQ ID NO: 3169672 - RNA, 18 nt, Human
gugaccagcaccaucucu

SEQ ID NO: 3169673 - RNA, 21 nt, Human
gugaccagcaccaucucuccu

SEQ ID NO: 3169674 - RNA, 18 nt, Human
gugaccauguuuuguuua

SEQ ID NO: 3169675 - RNA, 21 nt, Human
gugagguggaauuauuuuaaa

SEQ ID NO: 3169676 - RNA, 15 nt, Human
gugagcaggcuguga

SEQ ID NO: 3169677 - RNA, 17 nt, Human
gugaguacuacaguccu

SEQ ID NO: 3169678 - RNA, 21 nt, Human
gugagcacuaaggugugcucu

SEQ ID NO: 3169679 - RNA, 16 nt, Human
gugagaggggaacaga

SEQ ID NO: 3169680 - RNA, 13 nt, Human
gugagagcugggu

SEQ ID NO: 3169681 - RNA, 15 nt, Human
gugagcaauccugca

SEQ ID NO: 3169682 - RNA, 17 nt, Human
gugagaggggaggccaa

SEQ ID NO: 3169683 - RNA, 12 nt, Human
gugagacagacu

SEQ ID NO: 3169684 - RNA, 12 nt, Human
gugaccccaggu

SEQ ID NO: 3169685 - RNA, 18 nt, Human
gugacuuuucaaguauuu

SEQ ID NO: 3169686 - RNA, 12 nt, Human
gugagagcuggg

SEQ ID NO: 3169687 - RNA, 15 nt, Human
gugagaaaacuguga

SEQ ID NO: 3169688 - RNA, 15 nt, Human
gugacuuuugcuuua

SEQ ID NO: 3169689 - RNA, 13 nt, Human
gugacuuuugcuu

SEQ ID NO: 3169690 - RNA, 14 nt, Human
gugaguccuccaga

SEQ ID NO: 3169691 - RNA, 17 nt, Human
gugaguccuggcauggg

SEQ ID NO: 3169692 - RNA, 19 nt, Human
gugaguacuacaguccucc

SEQ ID NO: 3169693 - RNA, 19 nt, Human
gugagucaccaagcccagu

SEQ ID NO: 3169694 - RNA, 20 nt, Human
gugaguccuggcaugggaau

SEQ ID NO: 3169695 - RNA, 17 nt, Human
gugaguccuccagaacu

SEQ ID NO: 3169696 - RNA, 16 nt, Human
gugaguccuccagaac

SEQ ID NO: 3169697 - RNA, 18 nt, Human
gugaguccuccagaacuc

SEQ ID NO: 3169698 - RNA, 12 nt, Human
aacucugccugc

SEQ ID NO: 3169699 - RNA, 15 nt, Human
aacucugcugagggu

SEQ ID NO: 3169700 - RNA, 21 nt, Human
aacucugcugaggguccagaa

SEQ ID NO: 3169701 - RNA, 13 nt, Human
gucuucacaacag

SEQ ID NO: 3169702 - RNA, 15 nt, Human
gucuggggaccagcu

SEQ ID NO: 3169703 - RNA, 23 nt, Human
gucuggaugcgggcauggcagcc

SEQ ID NO: 3169704 - RNA, 14 nt, Human
gucuggaucaguaa

SEQ ID NO: 3169705 - RNA, 19 nt, Human
gucuggaucaguaaaauua

SEQ ID NO: 3169706 - RNA, 23 nt, Human
gucugacaggcaaugcuggcugu

SEQ ID NO: 3169707 - RNA, 22 nt, Human
gucugacaggcaaugcuggcug

SEQ ID NO: 3169708 - RNA, 21 nt, Human
gucugacaggcaaugcuggcu

SEQ ID NO: 3169709 - RNA, 19 nt, Human
gucugaagucacugcacag

SEQ ID NO: 3169710 - RNA, 17 nt, Human
gucugaagucacugcac

SEQ ID NO: 3169711 - RNA, 18 nt, Human
gucuggaaugcaguggua

SEQ ID NO: 3169712 - RNA, 24 nt, Human
gucugacaucagagguaucuuacu

SEQ ID NO: 3169713 - RNA, 18 nt, Human
gucuggaggaccugcccg

SEQ ID NO: 3169714 - RNA, 13 nt, Human
gucucuugguccu

SEQ ID NO: 3169715 - RNA, 20 nt, Human
gucucuugguccugcugcag

SEQ ID NO: 3169716 - RNA, 18 nt, Human
gucucuugguccugcugc

SEQ ID NO: 3169717 - RNA, 19 nt, Human
gucucuugguccugcugca

SEQ ID NO: 3169718 - RNA, 17 nt, Human
gucucuugguccugcug

SEQ ID NO: 3169719 - RNA, 22 nt, Human
gucucuuuaaugucacaggcag

SEQ ID NO: 3169720 - RNA, 19 nt, Human
gucugaaggcuggguucug

SEQ ID NO: 3169721 - RNA, 14 nt, Human
gucugaaggcuggg

SEQ ID NO: 3169722 - RNA, 16 nt, Human
gucugaagucacugca

SEQ ID NO: 3169723 - RNA, 20 nt, Human
gucucuuuaaugucacaggc

SEQ ID NO: 3169724 - RNA, 19 nt, Human
gucucuuuaaugucacagg

SEQ ID NO: 3169725 - RNA, 18 nt, Human
gucucuuuaaugucacag

SEQ ID NO: 3169726 - RNA, 10 nt, Human
aacuaauaaa

SEQ ID NO: 3169727 - RNA, 11 nt, Human
aacuaauaaaa

SEQ ID NO: 3169728 - RNA, 12 nt, Human
aacuaauaaaau

SEQ ID NO: 3169729 - RNA, 13 nt, Human
aacuaauaaaaua

SEQ ID NO: 3169730 - RNA, 14 nt, Human
aacuaauaaaauau

SEQ ID NO: 3169731 - RNA, 16 nt, Human
aacuaauaaaauauuu

SEQ ID NO: 3169732 - RNA, 19 nt, Human
aacuaauaaaauauuuucu

SEQ ID NO: 3169733 - RNA, 20 nt, Human
aacuaauaaaauauuuucug

SEQ ID NO: 3169734 - RNA, 21 nt, Human
aacuaauaaaauauuuucugu

SEQ ID NO: 3169735 - RNA, 13 nt, Human
aacuagaacaaau

SEQ ID NO: 3169736 - RNA, 15 nt, Human
aacuaagaaacuuaa

SEQ ID NO: 3169737 - RNA, 19 nt, Human
aacuaagaaacuuaaauuu

SEQ ID NO: 3169738 - RNA, 14 nt, Human
aacuaagauucuuu

SEQ ID NO: 3169739 - RNA, 15 nt, Human
aacuaagauucuuuu

SEQ ID NO: 3169740 - RNA, 16 nt, Human
aacuaagauucuuuua

SEQ ID NO: 3169741 - RNA, 17 nt, Human
aacuaagauucuuuuaa

SEQ ID NO: 3169742 - RNA, 22 nt, Human
aacuaagauucuuuuaaauuag

SEQ ID NO: 3169743 - RNA, 23 nt, Human
aacguggcugcuucaaggauccu

SEQ ID NO: 3169744 - RNA, 16 nt, Human
aaccuuucuauaauuu

SEQ ID NO: 3169745 - RNA, 14 nt, Human
aacguguauguuuu

SEQ ID NO: 3169746 - RNA, 19 nt, Human
aacgugugcuguguuugcu

SEQ ID NO: 3169747 - RNA, 16 nt, Human
aacgugugcuguguuu

SEQ ID NO: 3169748 - RNA, 22 nt, Human
aacguguauguuuuucaguuca

SEQ ID NO: 3169749 - RNA, 20 nt, Human
aacguguauguuuuucaguu

SEQ ID NO: 3169750 - RNA, 18 nt, Human
aaccuuguuuauuaaauu

SEQ ID NO: 3169751 - RNA, 19 nt, Human
aaccuuguuuauuaaauug

SEQ ID NO: 3169752 - RNA, 20 nt, Human
aaccuuguuuauuaaauugc

SEQ ID NO: 3169753 - RNA, 13 nt, Human
aaccuuuccccca

SEQ ID NO: 3169754 - RNA, 11 nt, Human
aaccuuucccc

SEQ ID NO: 3169755 - RNA, 16 nt, Human
gucuucaguaagccgu

SEQ ID NO: 3169756 - RNA, 18 nt, Human
gucuucauccccucagaa

SEQ ID NO: 3169757 - RNA, 13 nt, Human
gucuucaugaaau

SEQ ID NO: 3169758 - RNA, 17 nt, Human
gucuucauguucccacu

SEQ ID NO: 3169759 - RNA, 23 nt, Human
gucuucaugaaaugcuaugucau

SEQ ID NO: 3169760 - RNA, 16 nt, Human
gucuucaugaaaugcu

SEQ ID NO: 3169761 - RNA, 15 nt, Human
gucuucaugaaaugc

SEQ ID NO: 3169762 - RNA, 15 nt, Human
gucuuuguacagaca

SEQ ID NO: 3169763 - RNA, 16 nt, Human
gucuuuguacagacaa

SEQ ID NO: 3169764 - RNA, 17 nt, Human
gucuuuuaaaaaguauu

SEQ ID NO: 3169765 - RNA, 15 nt, Human
gucuuuuaaaaagua

SEQ ID NO: 3169766 - RNA, 14 nt, Human
gucuuuuaaaaagu

SEQ ID NO: 3169767 - RNA, 10 nt, Human
gucuuuuaaa

SEQ ID NO: 3169768 - RNA, 12 nt, Human
aaccugugucuc

SEQ ID NO: 3169769 - RNA, 13 nt, Human
aaccuguucugcu

SEQ ID NO: 3169770 - RNA, 17 nt, Human
aaccuguucugcuuucc

SEQ ID NO: 3169771 - RNA, 12 nt, Human
aaccuuaauauu

SEQ ID NO: 3169772 - RNA, 18 nt, Human
aaccuuaauauuucuuca

SEQ ID NO: 3169773 - RNA, 19 nt, Human
aaccugauugugucucuug

SEQ ID NO: 3169774 - RNA, 18 nt, Human
aaccugauugugucucuu

SEQ ID NO: 3169775 - RNA, 23 nt, Human
gucuuuuaaaaaguauugccaaa

SEQ ID NO: 3169776 - RNA, 19 nt, Human
gucuuuuaaaaaguauugc

SEQ ID NO: 3169777 - RNA, 13 nt, Human
guggcaccagcag

SEQ ID NO: 3169778 - RNA, 14 nt, Human
guggcaccagcagc

SEQ ID NO: 3169779 - RNA, 22 nt, Human
guggcagcucaccucucccuug

SEQ ID NO: 3169780 - RNA, 14 nt, Human
guggcagcugcggu

SEQ ID NO: 3169781 - RNA, 22 nt, Human
guggcaaagcuguucuuccugg

SEQ ID NO: 3169782 - RNA, 11 nt, Human
aagaauauuug

SEQ ID NO: 3169783 - RNA, 11 nt, Human
aagaauauugu

SEQ ID NO: 3169784 - RNA, 12 nt, Human
aagaauauugua

SEQ ID NO: 3169785 - RNA, 13 nt, Human
aagaauauuguau

SEQ ID NO: 3169786 - RNA, 18 nt, Human
aagaauauuguauuguua

SEQ ID NO: 3169787 - RNA, 20 nt, Human
guggcagcucaccucucccu

SEQ ID NO: 3169788 - RNA, 17 nt, Human
guggcagcugcggucca

SEQ ID NO: 3169789 - RNA, 15 nt, Human
aagaauauuugaaug

SEQ ID NO: 3169790 - RNA, 13 nt, Human
aagaauauuuuaa

SEQ ID NO: 3169791 - RNA, 21 nt, Human
aagaaucaccuaauuaauuuc

SEQ ID NO: 3169792 - RNA, 13 nt, Human
aagacccaaaagg

SEQ ID NO: 3169793 - RNA, 20 nt, Human
aagaauuuuuuauuuuuugg

SEQ ID NO: 3169794 - RNA, 16 nt, Human
aagaauuuuuuauuuu

SEQ ID NO: 3169795 - RNA, 14 nt, Human
aagaauuuuuuauu

SEQ ID NO: 3169796 - RNA, 17 nt, Human
aagaauuugaagacuuc

SEQ ID NO: 3169797 - RNA, 20 nt, Human
aagaauuugaagacuucaaa

SEQ ID NO: 3169798 - RNA, 14 nt, Human
aagaauucagauug

SEQ ID NO: 3169799 - RNA, 13 nt, Human
gugcugcuuugau

SEQ ID NO: 3169800 - RNA, 21 nt, Human
gugcugcccugcccaccuggc

SEQ ID NO: 3169801 - RNA, 12 nt, Human
gugcugcuuuga

SEQ ID NO: 3169802 - RNA, 19 nt, Human
gugcugcccugcccaccug

SEQ ID NO: 3169803 - RNA, 20 nt, Human
gugcugcccugcccaccugg

SEQ ID NO: 3169804 - RNA, 18 nt, Human
gugcugcccugcccaccu

SEQ ID NO: 3169805 - RNA, 23 nt, Human
aagaagguuucagaaagaagugg

SEQ ID NO: 3169806 - RNA, 20 nt, Human
guggaauuauuuuaaaagau

SEQ ID NO: 3169807 - RNA, 17 nt, Human
guggaaggcagagaaau

SEQ ID NO: 3169808 - RNA, 14 nt, Human
guggaagagggcug

SEQ ID NO: 3169809 - RNA, 17 nt, Human
guggaagagggcugcaa

SEQ ID NO: 3169810 - RNA, 12 nt, Human
gugcugugaaaa

SEQ ID NO: 3169811 - RNA, 19 nt, Human
guggaauuauuuuaaaaga

SEQ ID NO: 3169812 - RNA, 24 nt, Human
guggacacagcucuucuccaggcu

SEQ ID NO: 3169813 - RNA, 23 nt, Human
guggacacagcucuucuccaggc

SEQ ID NO: 3169814 - RNA, 15 nt, Human
guggacacagcucuu

SEQ ID NO: 3169815 - RNA, 14 nt, Human
guggacacagcucu

SEQ ID NO: 3169816 - RNA, 23 nt, Human
gugcacaagcuccaagcucccag

SEQ ID NO: 3169817 - RNA, 17 nt, Human
gugcacacaccagagcc

SEQ ID NO: 3169818 - RNA, 18 nt, Human
gugcacguacacacacau

SEQ ID NO: 3169819 - RNA, 14 nt, Human
gugcacacaccaga

SEQ ID NO: 3169820 - RNA, 12 nt, Human
gugcacacacca

SEQ ID NO: 3169821 - RNA, 16 nt, Human
aacugcagucacugca

SEQ ID NO: 3169822 - RNA, 14 nt, Human
gugccaagcagagg

SEQ ID NO: 3169823 - RNA, 15 nt, Human
gugccucugggacug

SEQ ID NO: 3169824 - RNA, 14 nt, Human
gugccucugggacu

SEQ ID NO: 3169825 - RNA, 12 nt, Human
gugccugcuuca

SEQ ID NO: 3169826 - RNA, 21 nt, Human
gugccugcuucagccucccac

SEQ ID NO: 3169827 - RNA, 13 nt, Human
gugccugcuucag

SEQ ID NO: 3169828 - RNA, 16 nt, Human
gugccuggccacgccc

SEQ ID NO: 3169829 - RNA, 23 nt, Human
gugccugcuucagccucccacag

SEQ ID NO: 3169830 - RNA, 23 nt, Human
aacuugguucccauuugcuccuu

SEQ ID NO: 3169831 - RNA, 22 nt, Human
aacuugucuuuggacccugagg

SEQ ID NO: 3169832 - RNA, 15 nt, Human
aacuuguaaaugugg

SEQ ID NO: 3169833 - RNA, 14 nt, Human
aacuuggcgcugcc

SEQ ID NO: 3169834 - RNA, 16 nt, Human
aacuuggaugaguuuu

SEQ ID NO: 3169835 - RNA, 17 nt, Human
aacuuggaugaguuuug

SEQ ID NO: 3169836 - RNA, 21 nt, Human
aacuugcuuaaaugugaauua

SEQ ID NO: 3169837 - RNA, 20 nt, Human
aacuugcuuaaaugugaauu

SEQ ID NO: 3169838 - RNA, 19 nt, Human
aacuugcuuaaaugugaau

SEQ ID NO: 3169839 - RNA, 18 nt, Human
aacuugcuuaaaugugaa

SEQ ID NO: 3169840 - RNA, 16 nt, Human
aagaaaguucuacagu

SEQ ID NO: 3169841 - RNA, 17 nt, Human
aagaaaggguucuguaa

SEQ ID NO: 3169842 - RNA, 12 nt, Human
aagaagcauuuc

SEQ ID NO: 3169843 - RNA, 16 nt, Human
aagaagcccaggaaag

SEQ ID NO: 3169844 - RNA, 17 nt, Human
aagaagcccaggaaagg

SEQ ID NO: 3169845 - RNA, 14 nt, Human
aagaagcucucucc

SEQ ID NO: 3169846 - RNA, 15 nt, Human
aagaagcucucuccu

SEQ ID NO: 3169847 - RNA, 18 nt, Human
aacuuguaauaaacccuu

SEQ ID NO: 3169848 - RNA, 16 nt, Human
aacuuguuuaauaaag

SEQ ID NO: 3169849 - RNA, 16 nt, Human
aacuuguugaauuuau

SEQ ID NO: 3169850 - RNA, 20 nt, Human
aacuuguucuuccaaagcag

SEQ ID NO: 3169851 - RNA, 19 nt, Human
aacuuguucuuccaaagca

SEQ ID NO: 3169852 - RNA, 13 nt, Human
aagaaaaauauuu

SEQ ID NO: 3169853 - RNA, 12 nt, Human
aagaaaaauauu

SEQ ID NO: 3169854 - RNA, 11 nt, Human
aagaaaaauau

SEQ ID NO: 3169855 - RNA, 13 nt, Human
aagaaaaccaaac

SEQ ID NO: 3169856 - RNA, 13 nt, Human
aagaaaauaaaaa

SEQ ID NO: 3169857 - RNA, 21 nt, Human
aagaaaauaaaaaaaagaaaa

SEQ ID NO: 3169858 - RNA, 18 nt, Human
aagaaaauaaaaaaaaga

SEQ ID NO: 3169859 - RNA, 23 nt, Human
aagaaaauaaaaaaaagaaaaaa

SEQ ID NO: 3169860 - RNA, 22 nt, Human
aagaaaauaaaaaaaagaaaaa

SEQ ID NO: 3169861 - RNA, 15 nt, Human
gugggggucugugug

SEQ ID NO: 3169862 - RNA, 16 nt, Human
gugggggucugugugu

SEQ ID NO: 3169863 - RNA, 14 nt, Human
gugggggucugugu

SEQ ID NO: 3169864 - RNA, 16 nt, Human
gugggcaaaagagugu

SEQ ID NO: 3169865 - RNA, 21 nt, Human
gugggucaugaugcucuuucc

SEQ ID NO: 3169866 - RNA, 15 nt, Human
gugguguuuccuggc

SEQ ID NO: 3169867 - RNA, 16 nt, Human
gugguguuuccuggca

SEQ ID NO: 3169868 - RNA, 13 nt, Human
guggccucccaac

SEQ ID NO: 3169869 - RNA, 14 nt, Human
guggccucccaacu

SEQ ID NO: 3169870 - RNA, 21 nt, Human
guggcuucccgcucagcccuc

SEQ ID NO: 3169871 - RNA, 13 nt, Human
gugggauccucca

SEQ ID NO: 3169872 - RNA, 15 nt, Human
gugggauccuccagg

SEQ ID NO: 3169873 - RNA, 18 nt, Human
gugggauccuccaggugc

SEQ ID NO: 3169874 - RNA, 12 nt, Human
gugggagcugag

SEQ ID NO: 3169875 - RNA, 20 nt, Human
aagagaugaugaaaauauuu

SEQ ID NO: 3169876 - RNA, 23 nt, Human
aagagauggcuuacaaaaagaaa

SEQ ID NO: 3169877 - RNA, 16 nt, Human
aagagauugugguuuc

SEQ ID NO: 3169878 - RNA, 19 nt, Human
aagagauugugguuucauu

SEQ ID NO: 3169879 - RNA, 12 nt, Human
aagagcccaggc

SEQ ID NO: 3169880 - RNA, 14 nt, Human
aagagcccaggccu

SEQ ID NO: 3169881 - RNA, 16 nt, Human
aagagcccaggccucc

SEQ ID NO: 3169882 - RNA, 12 nt, Human
aagagccccacu

SEQ ID NO: 3169883 - RNA, 18 nt, Human
aagagcuguucacagcca

SEQ ID NO: 3169884 - RNA, 22 nt, Human
aagagcuaggcagggugucugc

SEQ ID NO: 3169885 - RNA, 13 nt, Human
aagagccccacuc

SEQ ID NO: 3169886 - RNA, 17 nt, Human
aagagccccacucucag

SEQ ID NO: 3169887 - RNA, 16 nt, Human
aagagccccacucuca

SEQ ID NO: 3169888 - RNA, 19 nt, Human
aagagccccacucucagag

SEQ ID NO: 3169889 - RNA, 18 nt, Human
aagagccccacucucaga

SEQ ID NO: 3169890 - RNA, 15 nt, Human
aagagcuagagaaau

SEQ ID NO: 3169891 - RNA, 16 nt, Human
aagagcuaggcagggu

SEQ ID NO: 3169892 - RNA, 13 nt, Human
aagagcuaggcag

SEQ ID NO: 3169893 - RNA, 13 nt, Human
guggccccaccug

SEQ ID NO: 3169894 - RNA, 22 nt, Human
guggccccaccuggcccucucu

SEQ ID NO: 3169895 - RNA, 16 nt, Human
guggcccgacagccug

SEQ ID NO: 3169896 - RNA, 14 nt, Human
aagacuccagaaau

SEQ ID NO: 3169897 - RNA, 13 nt, Human
aagacuccagaaa

SEQ ID NO: 3169898 - RNA, 12 nt, Human
aagacuccagaa

SEQ ID NO: 3169899 - RNA, 17 nt, Human
aagacuccaaagaaaug

SEQ ID NO: 3169900 - RNA, 16 nt, Human
aagacuccaaagaaau

SEQ ID NO: 3169901 - RNA, 14 nt, Human
aagacuccaaagaa

SEQ ID NO: 3169902 - RNA, 17 nt, Human
aagacucauucuucugu

SEQ ID NO: 3169903 - RNA, 14 nt, Human
aagacuauucaaac

SEQ ID NO: 3169904 - RNA, 13 nt, Human
aagacuauucaaa

SEQ ID NO: 3169905 - RNA, 20 nt, Human
aagacgcugugcugcccugc

SEQ ID NO: 3169906 - RNA, 23 nt, Human
aagacgcugugcugcccugccca

SEQ ID NO: 3169907 - RNA, 21 nt, Human
aagacgcugugcugcccugcc

SEQ ID NO: 3169908 - RNA, 22 nt, Human
aagacgcugugcugcccugccc

SEQ ID NO: 3169909 - RNA, 12 nt, Human
aagaccagucca

SEQ ID NO: 3169910 - RNA, 13 nt, Human
guguguguaugug

SEQ ID NO: 3169911 - RNA, 16 nt, Human
gugugugggagugugu

SEQ ID NO: 3169912 - RNA, 21 nt, Human
guguguaagaugucuuccuau

SEQ ID NO: 3169913 - RNA, 19 nt, Human
gugugguguuuccuggcac

SEQ ID NO: 3169914 - RNA, 17 nt, Human
guguguguugugugugg

SEQ ID NO: 3169915 - RNA, 14 nt, Human
guguguguaugugg

SEQ ID NO: 3169916 - RNA, 19 nt, Human
guguguguaugcgugugug

SEQ ID NO: 3169917 - RNA, 11 nt, Human
guguguuccug

SEQ ID NO: 3169918 - RNA, 12 nt, Human
guguguuccugg

SEQ ID NO: 3169919 - RNA, 13 nt, Human
guguguuccuggc

SEQ ID NO: 3169920 - RNA, 19 nt, Human
guguguuacaauguaacuu

SEQ ID NO: 3169921 - RNA, 15 nt, Human
guguguuacaaugua

SEQ ID NO: 3169922 - RNA, 13 nt, Human
guguguuacaaug

SEQ ID NO: 3169923 - RNA, 13 nt, Human
guguguguguugc

SEQ ID NO: 3169924 - RNA, 19 nt, Human
guguucuguuacaaaaugu

SEQ ID NO: 3169925 - RNA, 18 nt, Human
guguucuguuacaaaaug

SEQ ID NO: 3169926 - RNA, 17 nt, Human
guguucuguuacaaaau

SEQ ID NO: 3169927 - RNA, 15 nt, Human
guguucuguuacaaa

SEQ ID NO: 3169928 - RNA, 14 nt, Human
guguucuguuacaa

SEQ ID NO: 3169929 - RNA, 13 nt, Human
guguucuguuaca

SEQ ID NO: 3169930 - RNA, 18 nt, Human
guguugacuuuauaaauu

SEQ ID NO: 3169931 - RNA, 21 nt, Human
guguugaagagcagcuccuuc

SEQ ID NO: 3169932 - RNA, 15 nt, Human
guguuguguguggga

SEQ ID NO: 3169933 - RNA, 13 nt, Human
guguuuaagacau

SEQ ID NO: 3169934 - RNA, 14 nt, Human
guguuuaagacauu

SEQ ID NO: 3169935 - RNA, 19 nt, Human
gugucuugcaauggcagcc

SEQ ID NO: 3169936 - RNA, 15 nt, Human
gugugguguuuccug

SEQ ID NO: 3169937 - RNA, 18 nt, Human
gugugagucaccaagccc

SEQ ID NO: 3169938 - RNA, 13 nt, Human
gugugagucacca

SEQ ID NO: 3169939 - RNA, 21 nt, Human
gugucuugcaauggcagccuu

SEQ ID NO: 3169940 - RNA, 20 nt, Human
gugguucacucuuggagccu

SEQ ID NO: 3169941 - RNA, 14 nt, Human
aagaguaggaagac

SEQ ID NO: 3169942 - RNA, 18 nt, Human
gugguuauggagagggug

SEQ ID NO: 3169943 - RNA, 19 nt, Human
gugguguuuccuggcacug

SEQ ID NO: 3169944 - RNA, 16 nt, Human
aagaguaggaagacuu

SEQ ID NO: 3169945 - RNA, 18 nt, Human
aagaguaggaagacuuug

SEQ ID NO: 3169946 - RNA, 19 nt, Human
aagaguaggaagacuuugg

SEQ ID NO: 3169947 - RNA, 12 nt, Human
aagaucacuguu

SEQ ID NO: 3169948 - RNA, 14 nt, Human
aagaucacuguuua

SEQ ID NO: 3169949 - RNA, 20 nt, Human
aagaucacuguuuagauuug

SEQ ID NO: 3169950 - RNA, 12 nt, Human
aagcaaaugucu

SEQ ID NO: 3169951 - RNA, 15 nt, Human
aagaugcaauguaga

SEQ ID NO: 3169952 - RNA, 16 nt, Human
aagauguagauuuauu

SEQ ID NO: 3169953 - RNA, 22 nt, Human
aagauguagaggagaaacugga

SEQ ID NO: 3169954 - RNA, 13 nt, Human
aagcaaaauguga

SEQ ID NO: 3169955 - RNA, 22 nt, Human
aagauguagauuuauuucauca

SEQ ID NO: 3169956 - RNA, 19 nt, Human
aagauguagauuuauuuca

SEQ ID NO: 3169957 - RNA, 23 nt, Human
aagauguagcaaacccugucaaa

SEQ ID NO: 3169958 - RNA, 18 nt, Human
aagauguagcaaacccug

SEQ ID NO: 3169959 - RNA, 14 nt, Human
aagauguagcaaac

SEQ ID NO: 3169960 - RNA, 13 nt, Human
aagauguagcaaa

SEQ ID NO: 3169961 - RNA, 19 nt, Human
aagauguagaggagaaacu

SEQ ID NO: 3169962 - RNA, 22 nt, Human
aagaugagaacagauaaagauu

SEQ ID NO: 3169963 - RNA, 20 nt, Human
aagaugagaacagauaaaga

SEQ ID NO: 3169964 - RNA, 19 nt, Human
aagaugagaacagauaaag

SEQ ID NO: 3169965 - RNA, 20 nt, Human
acaccucaacuaaauccaaa

SEQ ID NO: 3169966 - RNA, 17 nt, Human
acaccucacucugcuac

SEQ ID NO: 3169967 - RNA, 18 nt, Human
acaccucacucugcuacc

SEQ ID NO: 3169968 - RNA, 20 nt, Human
acaccucacucugcuaccuu

SEQ ID NO: 3169969 - RNA, 21 nt, Human
uauaauuuaccugaagucuuu

SEQ ID NO: 3169970 - RNA, 21 nt, Human
uauaagcccuugauuggaagg

SEQ ID NO: 3169971 - RNA, 18 nt, Human
uauaagccaaaauuaagg

SEQ ID NO: 3169972 - RNA, 19 nt, Human
uauaagccaaaauuaaggu

SEQ ID NO: 3169973 - RNA, 21 nt, Human
uauaagccaaaauuaaggugu

SEQ ID NO: 3169974 - RNA, 22 nt, Human
uauaagccaaaauuaagguguu

SEQ ID NO: 3169975 - RNA, 23 nt, Human
uauaagccaaaauuaagguguuu

SEQ ID NO: 3169976 - RNA, 19 nt, Human
uauaagcaaauugcuuuuu

SEQ ID NO: 3169977 - RNA, 22 nt, Human
uauaagagcuuccaauuuuccu

SEQ ID NO: 3169978 - RNA, 17 nt, Human
uauaccauuuccguaau

SEQ ID NO: 3169979 - RNA, 13 nt, Human
uauaccauuuccg

SEQ ID NO: 3169980 - RNA, 14 nt, Human
uauacauuugauaa

SEQ ID NO: 3169981 - RNA, 20 nt, Human
uauacauguuuauguaaaca

SEQ ID NO: 3169982 - RNA, 16 nt, Human
uauacaguuauaaaau

SEQ ID NO: 3169983 - RNA, 18 nt, Human
uauacaguuauaaaauua

SEQ ID NO: 3169984 - RNA, 19 nt, Human
uauacaguuauaaaauuaa

SEQ ID NO: 3169985 - RNA, 20 nt, Human
uauacaguuauaaaauuaaa

SEQ ID NO: 3169986 - RNA, 22 nt, Human
uauacaguuauaaaauuaaaag

SEQ ID NO: 3169987 - RNA, 23 nt, Human
uauacaguuauaaaauuaaaagu

SEQ ID NO: 3169988 - RNA, 16 nt, Human
uauaccaaauuaaaaa

SEQ ID NO: 3169989 - RNA, 13 nt, Human
uauacaaguacug

SEQ ID NO: 3169990 - RNA, 16 nt, Human
uauacaaguacuggua

SEQ ID NO: 3169991 - RNA, 19 nt, Human
uauacaaguacugguaaga

SEQ ID NO: 3169992 - RNA, 23 nt, Human
uauacaaguacugguaagauugu

SEQ ID NO: 3169993 - RNA, 17 nt, Human
uauacaaccuucauuua

SEQ ID NO: 3169994 - RNA, 18 nt, Human
uauacaaccuucauuuaa

SEQ ID NO: 3169995 - RNA, 19 nt, Human
uauacaaccuucauuuaaa

SEQ ID NO: 3169996 - RNA, 20 nt, Human
uauacaaccuucauuuaaaa

SEQ ID NO: 3169997 - RNA, 14 nt, Human
uauaauuuugauag

SEQ ID NO: 3169998 - RNA, 15 nt, Human
uauaauuuugauagu

SEQ ID NO: 3169999 - RNA, 13 nt, Human
uauauauauaucu

SEQ ID NO: 3170000 - RNA, 15 nt, Human
uauauauaugcauau

SEQ ID NO: 3170001 - RNA, 14 nt, Human
uauauauaugcaua

SEQ ID NO: 3170002 - RNA, 13 nt, Human
uauauauaugcau

SEQ ID NO: 3170003 - RNA, 13 nt, Human
uauauauaucugu

SEQ ID NO: 3170004 - RNA, 13 nt, Human
uauauauaugugu

SEQ ID NO: 3170005 - RNA, 15 nt, Human
uauaucagacugcuu

SEQ ID NO: 3170006 - RNA, 21 nt, Human
uauaucagacugcuuugagaa

SEQ ID NO: 3170007 - RNA, 19 nt, Human
acacucauugaccugaggc

SEQ ID NO: 3170008 - RNA, 19 nt, Human
uauaucccugauaaauauu

SEQ ID NO: 3170009 - RNA, 16 nt, Human
uauaucccugauaaau

SEQ ID NO: 3170010 - RNA, 17 nt, Human
uauaucauucuaaagau

SEQ ID NO: 3170011 - RNA, 16 nt, Human
uauaucauucuaaaga

SEQ ID NO: 3170012 - RNA, 21 nt, Human
acacucauugaccugaggccc

SEQ ID NO: 3170013 - RNA, 23 nt, Human
acacucauugaccugaggcccuu

SEQ ID NO: 3170014 - RNA, 11 nt, Human
acacuccaacg

SEQ ID NO: 3170015 - RNA, 23 nt, Human
uauaggugcuacaaaaacacagc

SEQ ID NO: 3170016 - RNA, 20 nt, Human
uauaggugcuacaaaaacac

SEQ ID NO: 3170017 - RNA, 21 nt, Human
uauaggugcuacaaaaacaca

SEQ ID NO: 3170018 - RNA, 14 nt, Human
uauaggaauugacc

SEQ ID NO: 3170019 - RNA, 13 nt, Human
uauaggaauugac

SEQ ID NO: 3170020 - RNA, 12 nt, Human
uauaggaauuga

SEQ ID NO: 3170021 - RNA, 20 nt, Human
uauagccuaggugacagagu

SEQ ID NO: 3170022 - RNA, 18 nt, Human
uauagccuaggugacaga

SEQ ID NO: 3170023 - RNA, 22 nt, Human
uaguucuagugcagcugaaauu

SEQ ID NO: 3170024 - RNA, 23 nt, Human
uaguucuagugcagcugaaauug

SEQ ID NO: 3170025 - RNA, 12 nt, Human
uaguucuguauu

SEQ ID NO: 3170026 - RNA, 14 nt, Human
uaguucuguauuug

SEQ ID NO: 3170027 - RNA, 15 nt, Human
uaguucuguauuuga

SEQ ID NO: 3170028 - RNA, 9 nt, Human
uaguucugu

SEQ ID NO: 3170029 - RNA, 20 nt, Human
uaguuacuguaaaaugcaaa

SEQ ID NO: 3170030 - RNA, 14 nt, Human
uaguuacuguaaaa

SEQ ID NO: 3170031 - RNA, 12 nt, Human
uaguuacuguaa

SEQ ID NO: 3170032 - RNA, 19 nt, Human
uagugacuuuucaaguauu

SEQ ID NO: 3170033 - RNA, 11 nt, Human
uagugacuuuu

SEQ ID NO: 3170034 - RNA, 20 nt, Human
uaguuccucauuagcauuuu

SEQ ID NO: 3170035 - RNA, 21 nt, Human
uagucugaagugaaguacaga

SEQ ID NO: 3170036 - RNA, 21 nt, Human
uagucagcgcaggaaugcaca

SEQ ID NO: 3170037 - RNA, 17 nt, Human
uagucauuuucaagacu

SEQ ID NO: 3170038 - RNA, 19 nt, Human
acaagcugcacccucaggc

SEQ ID NO: 3170039 - RNA, 21 nt, Human
acaagcugcacccucaggcag

SEQ ID NO: 3170040 - RNA, 22 nt, Human
acaagcugcacccucaggcagg

SEQ ID NO: 3170041 - RNA, 23 nt, Human
acaagcugcacccucaggcaggu

SEQ ID NO: 3170042 - RNA, 21 nt, Human
uagucaggugccucaagagaa

SEQ ID NO: 3170043 - RNA, 20 nt, Human
uagucacugagacagcccgg

SEQ ID NO: 3170044 - RNA, 19 nt, Human
acaaggaagaaauuaacuu

SEQ ID NO: 3170045 - RNA, 14 nt, Human
acaaggaagaaauu

SEQ ID NO: 3170046 - RNA, 19 nt, Human
acaagcuggcuuacacugg

SEQ ID NO: 3170047 - RNA, 20 nt, Human
acaagcuguugaccaggcac

SEQ ID NO: 3170048 - RNA, 22 nt, Human
acaagcuguugaccaggcaccu

SEQ ID NO: 3170049 - RNA, 13 nt, Human
acaagcuggcuua

SEQ ID NO: 3170050 - RNA, 23 nt, Human
uaguuuuauuuucuaaaguacug

SEQ ID NO: 3170051 - RNA, 13 nt, Human
uaguuuucucagc

SEQ ID NO: 3170052 - RNA, 14 nt, Human
uaguuuuauuuaua

SEQ ID NO: 3170053 - RNA, 15 nt, Human
uaguuuuauuuauau

SEQ ID NO: 3170054 - RNA, 21 nt, Human
uaguuuuauuuauauuuauug

SEQ ID NO: 3170055 - RNA, 22 nt, Human
uaguuuuauuuauauuuauuga

SEQ ID NO: 3170056 - RNA, 15 nt, Human
uaguuuuauuuucua

SEQ ID NO: 3170057 - RNA, 19 nt, Human
uaguuuuauuuucuaaagu

SEQ ID NO: 3170058 - RNA, 17 nt, Human
uaguuuuauuuucuaaa

SEQ ID NO: 3170059 - RNA, 22 nt, Human
acacaucagcuugcccuguuaa

SEQ ID NO: 3170060 - RNA, 14 nt, Human
acacaucaucugua

SEQ ID NO: 3170061 - RNA, 12 nt, Human
uauaaaauaacu

SEQ ID NO: 3170062 - RNA, 15 nt, Human
uauaaaauaacuaaa

SEQ ID NO: 3170063 - RNA, 19 nt, Human
uauaaaauaacuaaaaugu

SEQ ID NO: 3170064 - RNA, 16 nt, Human
acacaucaucuguaag

SEQ ID NO: 3170065 - RNA, 15 nt, Human
acacaucaucuguaa

SEQ ID NO: 3170066 - RNA, 21 nt, Human
acacccagcccacuucugcca

SEQ ID NO: 3170067 - RNA, 20 nt, Human
acacccagcccacuucugcc

SEQ ID NO: 3170068 - RNA, 19 nt, Human
acacccagcccacuucugc

SEQ ID NO: 3170069 - RNA, 12 nt, Human
acacccugugau

SEQ ID NO: 3170070 - RNA, 18 nt, Human
acacccugugauggggcc

SEQ ID NO: 3170071 - RNA, 11 nt, Human
acacccuguga

SEQ ID NO: 3170072 - RNA, 16 nt, Human
acaccgggccuggaga

SEQ ID NO: 3170073 - RNA, 17 nt, Human
uauggggauagaugugu

SEQ ID NO: 3170074 - RNA, 18 nt, Human
uauggggauagaugugug

SEQ ID NO: 3170075 - RNA, 19 nt, Human
uauggggauagaugugugg

SEQ ID NO: 3170076 - RNA, 14 nt, Human
acagccuggcacag

SEQ ID NO: 3170077 - RNA, 15 nt, Human
acagccuggcacagg

SEQ ID NO: 3170078 - RNA, 17 nt, Human
uauggcuauaggugcua

SEQ ID NO: 3170079 - RNA, 21 nt, Human
uauggcugcauaguauuccau

SEQ ID NO: 3170080 - RNA, 10 nt, Human
uaugggagag

SEQ ID NO: 3170081 - RNA, 21 nt, Human
uauggcuuuauuuuuuugaac

SEQ ID NO: 3170082 - RNA, 14 nt, Human
acagcuaacaugga

SEQ ID NO: 3170083 - RNA, 15 nt, Human
acagcuaacauggaa

SEQ ID NO: 3170084 - RNA, 12 nt, Human
acagccuggcac

SEQ ID NO: 3170085 - RNA, 21 nt, Human
acagccuggucgccuuccacc

SEQ ID NO: 3170086 - RNA, 20 nt, Human
acagccuggucgccuuccac

SEQ ID NO: 3170087 - RNA, 17 nt, Human
acagcuaacauggaagu

SEQ ID NO: 3170088 - RNA, 20 nt, Human
acagcuaaucagcauucuca

SEQ ID NO: 3170089 - RNA, 16 nt, Human
uauggcuauaggugcu

SEQ ID NO: 3170090 - RNA, 19 nt, Human
uaugcucugcauguuacau

SEQ ID NO: 3170091 - RNA, 17 nt, Human
uaugauuaaaaauauca

SEQ ID NO: 3170092 - RNA, 21 nt, Human
uaugauuaaaaauaucaaauu

SEQ ID NO: 3170093 - RNA, 21 nt, Human
uaugaugacguacaaguaguu

SEQ ID NO: 3170094 - RNA, 14 nt, Human
uaugcucugcaugu

SEQ ID NO: 3170095 - RNA, 12 nt, Human
uaugauuaaaaa

SEQ ID NO: 3170096 - RNA, 14 nt, Human
uaugauuaaaaaua

SEQ ID NO: 3170097 - RNA, 20 nt, Human
uaugauguuaguuuuccuua

SEQ ID NO: 3170098 - RNA, 18 nt, Human
uaugcucugcauguuaca

SEQ ID NO: 3170099 - RNA, 19 nt, Human
uaugauguuaguuuuccuu

SEQ ID NO: 3170100 - RNA, 15 nt, Human
uaucuugaagacuuu

SEQ ID NO: 3170101 - RNA, 20 nt, Human
uaucuugcuugaacuuacag

SEQ ID NO: 3170102 - RNA, 13 nt, Human
uaucuugcuugaa

SEQ ID NO: 3170103 - RNA, 17 nt, Human
uaucuugaaggaaaaau

SEQ ID NO: 3170104 - RNA, 14 nt, Human
uaucuugaaggaaa

SEQ ID NO: 3170105 - RNA, 13 nt, Human
uaugauaaauuug

SEQ ID NO: 3170106 - RNA, 23 nt, Human
uaugaucacggcucacugcagcc

SEQ ID NO: 3170107 - RNA, 21 nt, Human
uaugaucacggcucacugcag

SEQ ID NO: 3170108 - RNA, 14 nt, Human
uaugaucacggcuc

SEQ ID NO: 3170109 - RNA, 13 nt, Human
acagcccaccugg

SEQ ID NO: 3170110 - RNA, 14 nt, Human
uaucuugaagacuu

SEQ ID NO: 3170111 - RNA, 17 nt, Human
acagcagccccugcaca

SEQ ID NO: 3170112 - RNA, 18 nt, Human
acagcagccccugcacaa

SEQ ID NO: 3170113 - RNA, 18 nt, Human
acagaguuuucacucuua

SEQ ID NO: 3170114 - RNA, 20 nt, Human
acagaguuuucacucuuauu

SEQ ID NO: 3170115 - RNA, 13 nt, Human
acagauaaagauu

SEQ ID NO: 3170116 - RNA, 14 nt, Human
acagauaaaugauu

SEQ ID NO: 3170117 - RNA, 17 nt, Human
acagauaaagauugugu

SEQ ID NO: 3170118 - RNA, 22 nt, Human
acagaguggacuguucccugag

SEQ ID NO: 3170119 - RNA, 22 nt, Human
acagagugccaacuucuuucau

SEQ ID NO: 3170120 - RNA, 21 nt, Human
acagagugagacucugucuca

SEQ ID NO: 3170121 - RNA, 16 nt, Human
acagagcuacacaggg

SEQ ID NO: 3170122 - RNA, 15 nt, Human
acagagccugcccca

SEQ ID NO: 3170123 - RNA, 12 nt, Human
acagagccugcc

SEQ ID NO: 3170124 - RNA, 19 nt, Human
acagagccugccccagcgc

SEQ ID NO: 3170125 - RNA, 17 nt, Human
acagagcgacagagcag

SEQ ID NO: 3170126 - RNA, 16 nt, Human
acagagcgacagagca

SEQ ID NO: 3170127 - RNA, 20 nt, Human
acagagcccacgcccccacu

SEQ ID NO: 3170128 - RNA, 17 nt, Human
acagagccguaaaaacu

SEQ ID NO: 3170129 - RNA, 22 nt, Human
acagacuggaagcacagcuuca

SEQ ID NO: 3170130 - RNA, 20 nt, Human
acagacuggauguaccacca

SEQ ID NO: 3170131 - RNA, 14 nt, Human
acagacuucugaaa

SEQ ID NO: 3170132 - RNA, 12 nt, Human
acagacuuguau

SEQ ID NO: 3170133 - RNA, 13 nt, Human
acagacuucugaa

SEQ ID NO: 3170134 - RNA, 20 nt, Human
acagagagagauacucuggg

SEQ ID NO: 3170135 - RNA, 19 nt, Human
acagagagagauacucugg

SEQ ID NO: 3170136 - RNA, 20 nt, Human
acagacuuuagcuuucugag

SEQ ID NO: 3170137 - RNA, 19 nt, Human
acagacuuuagcuuucuga

SEQ ID NO: 3170138 - RNA, 17 nt, Human
acagacuuuagcuuucu

SEQ ID NO: 3170139 - RNA, 16 nt, Human
acagacuuuagcuuuc

SEQ ID NO: 3170140 - RNA, 14 nt, Human
acagacuuguauau

SEQ ID NO: 3170141 - RNA, 14 nt, Human
uaucuaguaauaua

SEQ ID NO: 3170142 - RNA, 15 nt, Human
uaucuagauguaaau

SEQ ID NO: 3170143 - RNA, 13 nt, Human
uaucuagauguaa

SEQ ID NO: 3170144 - RNA, 17 nt, Human
uaucuagauguaaauuu

SEQ ID NO: 3170145 - RNA, 18 nt, Human
uaucuagcugcauaucuu

SEQ ID NO: 3170146 - RNA, 13 nt, Human
uaucuagcugcau

SEQ ID NO: 3170147 - RNA, 16 nt, Human
uaucucccccagcccc

SEQ ID NO: 3170148 - RNA, 18 nt, Human
uaucucccccagccccau

SEQ ID NO: 3170149 - RNA, 17 nt, Human
uaucucccccagcccca

SEQ ID NO: 3170150 - RNA, 23 nt, Human
uaucuaguaauauauuuaaaggg

SEQ ID NO: 3170151 - RNA, 16 nt, Human
uaucuaguguuugauu

SEQ ID NO: 3170152 - RNA, 15 nt, Human
uaucuaguguuugau

SEQ ID NO: 3170153 - RNA, 13 nt, Human
uaucuacuugugu

SEQ ID NO: 3170154 - RNA, 14 nt, Human
acagacuggaagca

SEQ ID NO: 3170155 - RNA, 17 nt, Human
uauauucuauuuuacaa

SEQ ID NO: 3170156 - RNA, 18 nt, Human
acagacccugcccugugg

SEQ ID NO: 3170157 - RNA, 20 nt, Human
acagacccugcccugugggc

SEQ ID NO: 3170158 - RNA, 21 nt, Human
acagacacucccacuuggcau

SEQ ID NO: 3170159 - RNA, 13 nt, Human
acagacagcccuc

SEQ ID NO: 3170160 - RNA, 17 nt, Human
acagacccugcccugug

SEQ ID NO: 3170161 - RNA, 16 nt, Human
acagacccugcccugu

SEQ ID NO: 3170162 - RNA, 11 nt, Human
acacuccuuca

SEQ ID NO: 3170163 - RNA, 23 nt, Human
acagacacaggcccggcuccagg

SEQ ID NO: 3170164 - RNA, 22 nt, Human
acagacacaggcccggcuccag

SEQ ID NO: 3170165 - RNA, 18 nt, Human
uauauuuacaacacuuua

SEQ ID NO: 3170166 - RNA, 15 nt, Human
uauauugguuuuaug

SEQ ID NO: 3170167 - RNA, 16 nt, Human
uauauugguuuuauga

SEQ ID NO: 3170168 - RNA, 17 nt, Human
uauauugguuuuaugau

SEQ ID NO: 3170169 - RNA, 19 nt, Human
uauauugcacaauuauaaa

SEQ ID NO: 3170170 - RNA, 13 nt, Human
uaucacucauuaa

SEQ ID NO: 3170171 - RNA, 19 nt, Human
uaucacucauuaauuaacc

SEQ ID NO: 3170172 - RNA, 20 nt, Human
uaucacugugcaguugcugu

SEQ ID NO: 3170173 - RNA, 12 nt, Human
uaucaauguguc

SEQ ID NO: 3170174 - RNA, 15 nt, Human
uaucaaugugucuuu

SEQ ID NO: 3170175 - RNA, 16 nt, Human
uaucaaugugucuuuc

SEQ ID NO: 3170176 - RNA, 14 nt, Human
uauguguguguguu

SEQ ID NO: 3170177 - RNA, 22 nt, Human
uauguguguguguugugugugg

SEQ ID NO: 3170178 - RNA, 11 nt, Human
uaugugugugu

SEQ ID NO: 3170179 - RNA, 13 nt, Human
acagcugcuuucu

SEQ ID NO: 3170180 - RNA, 16 nt, Human
acagcucccccagcuc

SEQ ID NO: 3170181 - RNA, 12 nt, Human
acagcuccccca

SEQ ID NO: 3170182 - RNA, 23 nt, Human
uauguguguguguuguguguggg

SEQ ID NO: 3170183 - RNA, 19 nt, Human
uauguuuuaagaggcaggg

SEQ ID NO: 3170184 - RNA, 17 nt, Human
uauguuuuaagaggcag

SEQ ID NO: 3170185 - RNA, 12 nt, Human
uauuaaaacuca

SEQ ID NO: 3170186 - RNA, 18 nt, Human
uauuaaaauuguuguccg

SEQ ID NO: 3170187 - RNA, 12 nt, Human
uauuaaacaaag

SEQ ID NO: 3170188 - RNA, 13 nt, Human
uauuaaacaaagu

SEQ ID NO: 3170189 - RNA, 17 nt, Human
uauuaaacaaaguuuca

SEQ ID NO: 3170190 - RNA, 18 nt, Human
uauuaaacaaaguuucag

SEQ ID NO: 3170191 - RNA, 19 nt, Human
uauuaaacaaaguuucaga

SEQ ID NO: 3170192 - RNA, 17 nt, Human
uauuaaaccauaagaug

SEQ ID NO: 3170193 - RNA, 20 nt, Human
uauuaaaccauaagauggca

SEQ ID NO: 3170194 - RNA, 13 nt, Human
uauuaaaguuuca

SEQ ID NO: 3170195 - RNA, 18 nt, Human
uauuaaaguuucaaaaau

SEQ ID NO: 3170196 - RNA, 16 nt, Human
uauuaaaguuucaaaa

SEQ ID NO: 3170197 - RNA, 15 nt, Human
uauuaaaguuucaaa

SEQ ID NO: 3170198 - RNA, 14 nt, Human
uauuaaaguuucaa

SEQ ID NO: 3170199 - RNA, 22 nt, Human
uauuaaaguuucaaaaaucuga

SEQ ID NO: 3170200 - RNA, 21 nt, Human
uauuaaaguuucaaaaaucug

SEQ ID NO: 3170201 - RNA, 19 nt, Human
uauucaggggaaacuugau

SEQ ID NO: 3170202 - RNA, 15 nt, Human
uauucaggcuuuagg

SEQ ID NO: 3170203 - RNA, 22 nt, Human
uauucagcaaggcgcuaacuug

SEQ ID NO: 3170204 - RNA, 23 nt, Human
uauucagcaaggcgcuaacuugc

SEQ ID NO: 3170205 - RNA, 18 nt, Human
uauucaggaagcucaggg

SEQ ID NO: 3170206 - RNA, 22 nt, Human
uauucaggaagcucagggccug

SEQ ID NO: 3170207 - RNA, 17 nt, Human
uauucauaguagaacuu

SEQ ID NO: 3170208 - RNA, 23 nt, Human
uauucauagcagcuuauucacaa

SEQ ID NO: 3170209 - RNA, 15 nt, Human
uauucauauuuguac

SEQ ID NO: 3170210 - RNA, 13 nt, Human
uauucauauuugu

SEQ ID NO: 3170211 - RNA, 23 nt, Human
uauucauauuuguacuuucuguu

SEQ ID NO: 3170212 - RNA, 22 nt, Human
uauucauauuuguacuuucugu

SEQ ID NO: 3170213 - RNA, 17 nt, Human
uauucauauuuguacuu

SEQ ID NO: 3170214 - RNA, 16 nt, Human
uauucauauuuguacu

SEQ ID NO: 3170215 - RNA, 17 nt, Human
uauucaccuucaguuuu

SEQ ID NO: 3170216 - RNA, 16 nt, Human
uauucaggaagcucag

SEQ ID NO: 3170217 - RNA, 20 nt, Human
uauuaccaccaucccgugcu

SEQ ID NO: 3170218 - RNA, 12 nt, Human
uauuagagaaga

SEQ ID NO: 3170219 - RNA, 20 nt, Human
uauuacgaaguucaagauca

SEQ ID NO: 3170220 - RNA, 21 nt, Human
uauuacgaaguucaagaucaa

SEQ ID NO: 3170221 - RNA, 22 nt, Human
uauuagaucaaauaguugcaua

SEQ ID NO: 3170222 - RNA, 23 nt, Human
uauuagacuucuguuuucaaucu

SEQ ID NO: 3170223 - RNA, 21 nt, Human
uauuagacuucuguuuucaau

SEQ ID NO: 3170224 - RNA, 20 nt, Human
uauuagacuucuguuuucaa

SEQ ID NO: 3170225 - RNA, 17 nt, Human
uauuagacuucuguuuu

SEQ ID NO: 3170226 - RNA, 20 nt, Human
uauuagcgacaacagauugg

SEQ ID NO: 3170227 - RNA, 18 nt, Human
uauuagcgacaacagauu

SEQ ID NO: 3170228 - RNA, 16 nt, Human
uauuagcccugcauuu

SEQ ID NO: 3170229 - RNA, 17 nt, Human
uauuagcccugcauuuu

SEQ ID NO: 3170230 - RNA, 20 nt, Human
uauuagcccugcauuuucau

SEQ ID NO: 3170231 - RNA, 22 nt, Human
uauuagcccugcauuuucauag

SEQ ID NO: 3170232 - RNA, 23 nt, Human
uauuagcagcugacuuucaaagu

SEQ ID NO: 3170233 - RNA, 23 nt, Human
uauuaguguuauaugaacauaca

SEQ ID NO: 3170234 - RNA, 13 nt, Human
uauuauaaaaaua

SEQ ID NO: 3170235 - RNA, 17 nt, Human
uauuauaaaaauauuaa

SEQ ID NO: 3170236 - RNA, 23 nt, Human
uauuauaaacaagaaugaagguu

SEQ ID NO: 3170237 - RNA, 19 nt, Human
uauuauaaacaagaaugaa

SEQ ID NO: 3170238 - RNA, 13 nt, Human
uauuauaaacaag

SEQ ID NO: 3170239 - RNA, 23 nt, Human
uauuagcgacaacagauuggauu

SEQ ID NO: 3170240 - RNA, 21 nt, Human
uauuagcgacaacagauugga

SEQ ID NO: 3170241 - RNA, 21 nt, Human
uauuagugaccucagcuuuga

SEQ ID NO: 3170242 - RNA, 22 nt, Human
uauuaguuccccaaauacaaag

SEQ ID NO: 3170243 - RNA, 18 nt, Human
uauuaguguuauaugaac

SEQ ID NO: 3170244 - RNA, 21 nt, Human
uauuaguguuauaugaacaua

SEQ ID NO: 3170245 - RNA, 13 nt, Human
uauuaguguuaua

SEQ ID NO: 3170246 - RNA, 14 nt, Human
uauuaguguuauau

SEQ ID NO: 3170247 - RNA, 16 nt, Human
uauuaguguuauauga

SEQ ID NO: 3170248 - RNA, 17 nt, Human
uauuaguguuauaugaa

SEQ ID NO: 3170249 - RNA, 17 nt, Human
acagucucaggaaauca

SEQ ID NO: 3170250 - RNA, 18 nt, Human
acagucucugagaacugg

SEQ ID NO: 3170251 - RNA, 13 nt, Human
acagucuccccca

SEQ ID NO: 3170252 - RNA, 22 nt, Human
acagucucaccauuuccccagg

SEQ ID NO: 3170253 - RNA, 18 nt, Human
acagucucaccauuuccc

SEQ ID NO: 3170254 - RNA, 12 nt, Human
acagucucacca

SEQ ID NO: 3170255 - RNA, 14 nt, Human
acagucuucauuuu

SEQ ID NO: 3170256 - RNA, 23 nt, Human
acagucuucauuuuuuuuaauug

SEQ ID NO: 3170257 - RNA, 16 nt, Human
acagucucaggaaauc

SEQ ID NO: 3170258 - RNA, 15 nt, Human
acagucucaggaaau

SEQ ID NO: 3170259 - RNA, 14 nt, Human
acagucucaggaaa

SEQ ID NO: 3170260 - RNA, 13 nt, Human
acagucucaggaa

SEQ ID NO: 3170261 - RNA, 21 nt, Human
acaguccuuaccagcagagca

SEQ ID NO: 3170262 - RNA, 22 nt, Human
acaguccuuaccagcagagcac

SEQ ID NO: 3170263 - RNA, 11 nt, Human
acaguguuccg

SEQ ID NO: 3170264 - RNA, 16 nt, Human
acaguguugagaacua

SEQ ID NO: 3170265 - RNA, 18 nt, Human
acaguuaaggagaaucau

SEQ ID NO: 3170266 - RNA, 15 nt, Human
acaguuaagagaaau

SEQ ID NO: 3170267 - RNA, 14 nt, Human
acaguguuuucaga

SEQ ID NO: 3170268 - RNA, 16 nt, Human
acaguguuuucagaag

SEQ ID NO: 3170269 - RNA, 14 nt, Human
acagugagacucug

SEQ ID NO: 3170270 - RNA, 18 nt, Human
acagugagacucugucuc

SEQ ID NO: 3170271 - RNA, 14 nt, Human
acagugugauuuug

SEQ ID NO: 3170272 - RNA, 21 nt, Human
acaguauggcagcuuuccuca

SEQ ID NO: 3170273 - RNA, 13 nt, Human
acaguauauuuua

SEQ ID NO: 3170274 - RNA, 15 nt, Human
acaguauauuuuauu

SEQ ID NO: 3170275 - RNA, 17 nt, Human
acaguauauuuuauuuc

SEQ ID NO: 3170276 - RNA, 18 nt, Human
acaguauauuuuauuuca

SEQ ID NO: 3170277 - RNA, 21 nt, Human
acaguauauuuuauuucaaug

SEQ ID NO: 3170278 - RNA, 23 nt, Human
acaguauauuuuauuucaaugua

SEQ ID NO: 3170279 - RNA, 13 nt, Human
acaguaaaaauaa

SEQ ID NO: 3170280 - RNA, 14 nt, Human
acaguaaaaauaaa

SEQ ID NO: 3170281 - RNA, 16 nt, Human
acaguaaaaauaaaau

SEQ ID NO: 3170282 - RNA, 16 nt, Human
acagggcaugaaauga

SEQ ID NO: 3170283 - RNA, 17 nt, Human
acaggcugggcuucagu

SEQ ID NO: 3170284 - RNA, 14 nt, Human
acaggcugggcuuc

SEQ ID NO: 3170285 - RNA, 20 nt, Human
acagggcacaccgggcacuc

SEQ ID NO: 3170286 - RNA, 17 nt, Human
acaggcugggcugggca

SEQ ID NO: 3170287 - RNA, 15 nt, Human
acaggcugggcuggg

SEQ ID NO: 3170288 - RNA, 12 nt, Human
acaggcugggcu

SEQ ID NO: 3170289 - RNA, 22 nt, Human
acagguuuuccugaagaauuga

SEQ ID NO: 3170290 - RNA, 22 nt, Human
acagggcacaccgggcacucag

SEQ ID NO: 3170291 - RNA, 21 nt, Human
acaggcugggcugggcacugc

SEQ ID NO: 3170292 - RNA, 12 nt, Human
acagucccugcc

SEQ ID NO: 3170293 - RNA, 13 nt, Human
acagucccugcca

SEQ ID NO: 3170294 - RNA, 16 nt, Human
acagucaagauagaaa

SEQ ID NO: 3170295 - RNA, 19 nt, Human
acaguauuacuucugcuac

SEQ ID NO: 3170296 - RNA, 17 nt, Human
acaguauuacuucugcu

SEQ ID NO: 3170297 - RNA, 16 nt, Human
acaguauuacuucugc

SEQ ID NO: 3170298 - RNA, 15 nt, Human
acaguauuacuucug

SEQ ID NO: 3170299 - RNA, 15 nt, Human
acagucccugccaau

SEQ ID NO: 3170300 - RNA, 13 nt, Human
acaguccucccau

SEQ ID NO: 3170301 - RNA, 14 nt, Human
acaguccucccauc

SEQ ID NO: 3170302 - RNA, 15 nt, Human
acaguccucccaucu

SEQ ID NO: 3170303 - RNA, 18 nt, Human
acaguccuuaccagcaga

SEQ ID NO: 3170304 - RNA, 20 nt, Human
acaguccuuaccagcagagc

SEQ ID NO: 3170305 - RNA, 17 nt, Human
acaguccucccaucuca

SEQ ID NO: 3170306 - RNA, 22 nt, Human
acaguccuauuuagacauguaa

SEQ ID NO: 3170307 - RNA, 16 nt, Human
acaguucucuccuucu

SEQ ID NO: 3170308 - RNA, 19 nt, Human
acaguuccaaucaguagcu

SEQ ID NO: 3170309 - RNA, 20 nt, Human
acaguucaauucucauuugu

SEQ ID NO: 3170310 - RNA, 19 nt, Human
acaguucauucagggccga

SEQ ID NO: 3170311 - RNA, 23 nt, Human
acaguuacuuuuccuugcauaca

SEQ ID NO: 3170312 - RNA, 20 nt, Human
acaguuacuuuuccuugcau

SEQ ID NO: 3170313 - RNA, 16 nt, Human
acaguuacuuuuccuu

SEQ ID NO: 3170314 - RNA, 15 nt, Human
acaguuacuuuuccu

SEQ ID NO: 3170315 - RNA, 14 nt, Human
acaguuacuuuucc

SEQ ID NO: 3170316 - RNA, 13 nt, Human
acaguuacuuuuc

SEQ ID NO: 3170317 - RNA, 12 nt, Human
acaguuacuuuu

SEQ ID NO: 3170318 - RNA, 14 nt, Human
acaguuauaaaauu

SEQ ID NO: 3170319 - RNA, 17 nt, Human
acaguuauaaaauuaaa

SEQ ID NO: 3170320 - RNA, 19 nt, Human
acaguuauaaaauuaaaag

SEQ ID NO: 3170321 - RNA, 16 nt, Human
acaguuauagaaagca

SEQ ID NO: 3170322 - RNA, 13 nt, Human
acaguuauuacau

SEQ ID NO: 3170323 - RNA, 17 nt, Human
acaguucucuccuucuu

SEQ ID NO: 3170324 - RNA, 16 nt, Human
uauucucuguacauau

SEQ ID NO: 3170325 - RNA, 15 nt, Human
uauucucuguacaua

SEQ ID NO: 3170326 - RNA, 14 nt, Human
uauucucuguacau

SEQ ID NO: 3170327 - RNA, 13 nt, Human
uauucucuguaca

SEQ ID NO: 3170328 - RNA, 16 nt, Human
uauucuguuggccagu

SEQ ID NO: 3170329 - RNA, 22 nt, Human
uauucugugcuguuacaguuuu

SEQ ID NO: 3170330 - RNA, 15 nt, Human
uauucuuauuuaaug

SEQ ID NO: 3170331 - RNA, 18 nt, Human
uauucucuguacauauua

SEQ ID NO: 3170332 - RNA, 18 nt, Human
acaguucuacagaaaaac

SEQ ID NO: 3170333 - RNA, 13 nt, Human
uauucucuuuuca

SEQ ID NO: 3170334 - RNA, 15 nt, Human
uauucugucuucauc

SEQ ID NO: 3170335 - RNA, 16 nt, Human
uauucugggaauguau

SEQ ID NO: 3170336 - RNA, 19 nt, Human
uauucugggaauguauagu

SEQ ID NO: 3170337 - RNA, 17 nt, Human
uauucugggaauguaua

SEQ ID NO: 3170338 - RNA, 23 nt, Human
uauucugggaauguauaguauuu

SEQ ID NO: 3170339 - RNA, 20 nt, Human
uauucugggcaccacaaaau

SEQ ID NO: 3170340 - RNA, 22 nt, Human
uauucugggcaccacaaaauau

SEQ ID NO: 3170341 - RNA, 21 nt, Human
uauucugggaauguauaguau

SEQ ID NO: 3170342 - RNA, 17 nt, Human
uauugguguaagguacu

SEQ ID NO: 3170343 - RNA, 15 nt, Human
uauugguuuuaugau

SEQ ID NO: 3170344 - RNA, 13 nt, Human
uauugguuuuaug

SEQ ID NO: 3170345 - RNA, 14 nt, Human
uauugguuuuauga

SEQ ID NO: 3170346 - RNA, 19 nt, Human
uauuguaagaaauacugua

SEQ ID NO: 3170347 - RNA, 17 nt, Human
uauuguaagaaauacug

SEQ ID NO: 3170348 - RNA, 11 nt, Human
uauuguaagaa

SEQ ID NO: 3170349 - RNA, 16 nt, Human
uauuguaacuauguuu

SEQ ID NO: 3170350 - RNA, 19 nt, Human
uauugguauauccuuuucu

SEQ ID NO: 3170351 - RNA, 17 nt, Human
uauugguauauccuuuu

SEQ ID NO: 3170352 - RNA, 14 nt, Human
uauugguauauccu

SEQ ID NO: 3170353 - RNA, 15 nt, Human
uauugguauacuguu

SEQ ID NO: 3170354 - RNA, 19 nt, Human
uauugaguuccaguugaag

SEQ ID NO: 3170355 - RNA, 21 nt, Human
uauugaguuccaguugaaguu

SEQ ID NO: 3170356 - RNA, 20 nt, Human
uauugagggaaauguuuuca

SEQ ID NO: 3170357 - RNA, 22 nt, Human
uauugaggaaaaauaugugaag

SEQ ID NO: 3170358 - RNA, 21 nt, Human
uauugaggaaaaauaugugaa

SEQ ID NO: 3170359 - RNA, 19 nt, Human
uauugaggaaaaauaugug

SEQ ID NO: 3170360 - RNA, 17 nt, Human
uauugacaguugugcag

SEQ ID NO: 3170361 - RNA, 19 nt, Human
uauugagcaauaugucagu

SEQ ID NO: 3170362 - RNA, 17 nt, Human
uauugagcagaauucau

SEQ ID NO: 3170363 - RNA, 18 nt, Human
uauugagcagaauucauu

SEQ ID NO: 3170364 - RNA, 19 nt, Human
uauugagcagaauucauuc

SEQ ID NO: 3170365 - RNA, 21 nt, Human
uauugagcagaauucauucau

SEQ ID NO: 3170366 - RNA, 16 nt, Human
uauugagagagaugug

SEQ ID NO: 3170367 - RNA, 17 nt, Human
uauugaggaaaaauaug

SEQ ID NO: 3170368 - RNA, 15 nt, Human
uauugaggaaaaaua

SEQ ID NO: 3170369 - RNA, 22 nt, Human
uauugagagagauguguaauuu

SEQ ID NO: 3170370 - RNA, 19 nt, Human
uauugagagagauguguaa

SEQ ID NO: 3170371 - RNA, 13 nt, Human
uauugaaauucua

SEQ ID NO: 3170372 - RNA, 17 nt, Human
uauucuuuuuuucucua

SEQ ID NO: 3170373 - RNA, 14 nt, Human
uauugaaaauugaa

SEQ ID NO: 3170374 - RNA, 19 nt, Human
uauugaaaauugaaaagua

SEQ ID NO: 3170375 - RNA, 20 nt, Human
uauugaaaauugaaaaguac

SEQ ID NO: 3170376 - RNA, 19 nt, Human
uauucuuuguuaauuugga

SEQ ID NO: 3170377 - RNA, 17 nt, Human
uauucuuuguuaauuug

SEQ ID NO: 3170378 - RNA, 15 nt, Human
uauucuuuguuaauu

SEQ ID NO: 3170379 - RNA, 13 nt, Human
uauucuuuguuaa

SEQ ID NO: 3170380 - RNA, 19 nt, Human
uauucuugaugaaaagcuu

SEQ ID NO: 3170381 - RNA, 15 nt, Human
uauucuugaugaaaa

SEQ ID NO: 3170382 - RNA, 14 nt, Human
uauucuugaugaaa

SEQ ID NO: 3170383 - RNA, 23 nt, Human
uauucuugaucaguaguuugcau

SEQ ID NO: 3170384 - RNA, 22 nt, Human
uauucuugaucaguaguuugca

SEQ ID NO: 3170385 - RNA, 19 nt, Human
uauucuugaucaguaguuu

SEQ ID NO: 3170386 - RNA, 16 nt, Human
uauucuuucuccuuuu

SEQ ID NO: 3170387 - RNA, 12 nt, Human
uauucuuucucc

SEQ ID NO: 3170388 - RNA, 12 nt, Human
uauucuuuguua

SEQ ID NO: 3170389 - RNA, 22 nt, Human
uauucuuugcacuuuuucuuaa

SEQ ID NO: 3170390 - RNA, 16 nt, Human
uauucuuugcacuuuu

SEQ ID NO: 3170391 - RNA, 14 nt, Human
uauucuuugcacuu

SEQ ID NO: 3170392 - RNA, 12 nt, Human
uauugacaguug

SEQ ID NO: 3170393 - RNA, 23 nt, Human
uauuuaauuuuuuugagacagag

SEQ ID NO: 3170394 - RNA, 15 nt, Human
uauuuacacaauuua

SEQ ID NO: 3170395 - RNA, 20 nt, Human
uauuuacaacacuuuaaugg

SEQ ID NO: 3170396 - RNA, 16 nt, Human
uauuuacaaccuagaa

SEQ ID NO: 3170397 - RNA, 11 nt, Human
uauuuacaaga

SEQ ID NO: 3170398 - RNA, 15 nt, Human
uauuuacaagaagaa

SEQ ID NO: 3170399 - RNA, 16 nt, Human
uauuuacaagaagaac

SEQ ID NO: 3170400 - RNA, 14 nt, Human
uauuuacaauguau

SEQ ID NO: 3170401 - RNA, 15 nt, Human
uauuuacaauguauu

SEQ ID NO: 3170402 - RNA, 16 nt, Human
uauuuacaauguauua

SEQ ID NO: 3170403 - RNA, 17 nt, Human
uauuuacaauguauuaa

SEQ ID NO: 3170404 - RNA, 13 nt, Human
uauuuaauguuga

SEQ ID NO: 3170405 - RNA, 12 nt, Human
uauuuaauguug

SEQ ID NO: 3170406 - RNA, 18 nt, Human
uauuuaauguugaacaaa

SEQ ID NO: 3170407 - RNA, 17 nt, Human
uauuuaauguugaacaa

SEQ ID NO: 3170408 - RNA, 15 nt, Human
uauuuaauguugaac

SEQ ID NO: 3170409 - RNA, 14 nt, Human
uauuuaauguugaa

SEQ ID NO: 3170410 - RNA, 23 nt, Human
uauuuaauguugaacaaaauaaa

SEQ ID NO: 3170411 - RNA, 20 nt, Human
uauuuaauguugaacaaaau

SEQ ID NO: 3170412 - RNA, 18 nt, Human
uauuuacuucuuauacau

SEQ ID NO: 3170413 - RNA, 20 nt, Human
uauuuagcaccagggaaggg

SEQ ID NO: 3170414 - RNA, 20 nt, Human
uauuuagaugcauauuacug

SEQ ID NO: 3170415 - RNA, 13 nt, Human
uauuuauuuaaau

SEQ ID NO: 3170416 - RNA, 14 nt, Human
uauuuauuuaaauu

SEQ ID NO: 3170417 - RNA, 14 nt, Human
uauuuauuuaguau

SEQ ID NO: 3170418 - RNA, 19 nt, Human
uauuucaaguacacugaau

SEQ ID NO: 3170419 - RNA, 15 nt, Human
uauuucaauguaauu

SEQ ID NO: 3170420 - RNA, 16 nt, Human
uauuucaauguaauua

SEQ ID NO: 3170421 - RNA, 19 nt, Human
uauuucaauguaauuaaac

SEQ ID NO: 3170422 - RNA, 20 nt, Human
uauuuauuuuuuuuaauugu

SEQ ID NO: 3170423 - RNA, 22 nt, Human
uauuuauuuuuuuuaauuguau

SEQ ID NO: 3170424 - RNA, 20 nt, Human
uauugucccuggcuuccuua

SEQ ID NO: 3170425 - RNA, 22 nt, Human
uauuguccuauuaguguuauau

SEQ ID NO: 3170426 - RNA, 13 nt, Human
uauugucuguaaa

SEQ ID NO: 3170427 - RNA, 14 nt, Human
uauugucuguaaau

SEQ ID NO: 3170428 - RNA, 16 nt, Human
uauugucuguaaaucu

SEQ ID NO: 3170429 - RNA, 22 nt, Human
uauugucuguaaaucuaacauu

SEQ ID NO: 3170430 - RNA, 17 nt, Human
uauuguccuauuagugu

SEQ ID NO: 3170431 - RNA, 18 nt, Human
uauuguccuauuaguguu

SEQ ID NO: 3170432 - RNA, 22 nt, Human
uauugucccuggcuuccuuacu

SEQ ID NO: 3170433 - RNA, 21 nt, Human
uauugucccuggcuuccuuac

SEQ ID NO: 3170434 - RNA, 21 nt, Human
uauuuaaugaaagacuguaca

SEQ ID NO: 3170435 - RNA, 15 nt, Human
uauuuaaugaaagac

SEQ ID NO: 3170436 - RNA, 15 nt, Human
uauuuaauaugcuua

SEQ ID NO: 3170437 - RNA, 24 nt, Human
uauuuaagccuaaagauuuugauc

SEQ ID NO: 3170438 - RNA, 17 nt, Human
uauuuaagccuaaagau

SEQ ID NO: 3170439 - RNA, 22 nt, Human
uauuuaagccuaaagauuuuga

SEQ ID NO: 3170440 - RNA, 18 nt, Human
uauuuaagccuaaagauu

SEQ ID NO: 3170441 - RNA, 11 nt, Human
uauuguaauau

SEQ ID NO: 3170442 - RNA, 23 nt, Human
uauuguaauauagaaaaaaacau

SEQ ID NO: 3170443 - RNA, 18 nt, Human
uauuguaaugagugaauu

SEQ ID NO: 3170444 - RNA, 21 nt, Human
uauuguaaugagugaauugaa

SEQ ID NO: 3170445 - RNA, 13 nt, Human
uauugucaaagug

SEQ ID NO: 3170446 - RNA, 17 nt, Human
uauugucaaagugguga

SEQ ID NO: 3170447 - RNA, 16 nt, Human
uauuguauuguuagau

SEQ ID NO: 3170448 - RNA, 17 nt, Human
uauuguauuguuagaug

SEQ ID NO: 3170449 - RNA, 18 nt, Human
uauuguauuguuagaugu

SEQ ID NO: 3170450 - RNA, 22 nt, Human
uauuguaucaaucuuuagaaaa

SEQ ID NO: 3170451 - RNA, 18 nt, Human
aauucuuugaccuguugg

SEQ ID NO: 3170452 - RNA, 22 nt, Human
aauucuuugaccuguugggagu

SEQ ID NO: 3170453 - RNA, 15 nt, Human
aauugaaaagaagua

SEQ ID NO: 3170454 - RNA, 16 nt, Human
aauugaaaagaaguag

SEQ ID NO: 3170455 - RNA, 14 nt, Human
aauugaaaaguaca

SEQ ID NO: 3170456 - RNA, 14 nt, Human
aauugaaaaguuau

SEQ ID NO: 3170457 - RNA, 18 nt, Human
aauucuuuuuuauuaauc

SEQ ID NO: 3170458 - RNA, 21 nt, Human
aauucuuuuuuauuaaucacu

SEQ ID NO: 3170459 - RNA, 22 nt, Human
aauucuuuuuuauuaaucacug

SEQ ID NO: 3170460 - RNA, 23 nt, Human
aauucuuuuuuauuaaucacugu

SEQ ID NO: 3170461 - RNA, 18 nt, Human
aauucuuugcaaaaaucc

SEQ ID NO: 3170462 - RNA, 17 nt, Human
aauucuuugcaaaaauc

SEQ ID NO: 3170463 - RNA, 13 nt, Human
aauucuuuuuuau

SEQ ID NO: 3170464 - RNA, 14 nt, Human
aauucuuuuuuauu

SEQ ID NO: 3170465 - RNA, 16 nt, Human
aauucuuuuuuauuaa

SEQ ID NO: 3170466 - RNA, 17 nt, Human
aauucuuuuuuauuaau

SEQ ID NO: 3170467 - RNA, 17 nt, Human
aauucuuuaaaauuaca

SEQ ID NO: 3170468 - RNA, 22 nt, Human
aauucuuuaaaauuacaacuaa

SEQ ID NO: 3170469 - RNA, 13 nt, Human
aauugacccacaa

SEQ ID NO: 3170470 - RNA, 16 nt, Human
aauugaagguuuuuga

SEQ ID NO: 3170471 - RNA, 18 nt, Human
aauugaagguuuuugaua

SEQ ID NO: 3170472 - RNA, 19 nt, Human
aauugaagguuuuugauag

SEQ ID NO: 3170473 - RNA, 16 nt, Human
aauugacccacaagaa

SEQ ID NO: 3170474 - RNA, 19 nt, Human
aauugacccacaagaaaug

SEQ ID NO: 3170475 - RNA, 21 nt, Human
aauugaagguuuuugauagca

SEQ ID NO: 3170476 - RNA, 22 nt, Human
aauucuucuccacuuucuagcc

SEQ ID NO: 3170477 - RNA, 13 nt, Human
aauucuuaaauau

SEQ ID NO: 3170478 - RNA, 16 nt, Human
uacccuuuuucuugaa

SEQ ID NO: 3170479 - RNA, 23 nt, Human
aauucuuauuccauauuagaaaa

SEQ ID NO: 3170480 - RNA, 22 nt, Human
aauucuuauuccauauuagaaa

SEQ ID NO: 3170481 - RNA, 19 nt, Human
aauucuuauuccauauuag

SEQ ID NO: 3170482 - RNA, 18 nt, Human
aauucuuauuccauauua

SEQ ID NO: 3170483 - RNA, 21 nt, Human
aauucuuauuacuagacugcc

SEQ ID NO: 3170484 - RNA, 21 nt, Human
uacucugugucagguggggca

SEQ ID NO: 3170485 - RNA, 14 nt, Human
uacucacagccagc

SEQ ID NO: 3170486 - RNA, 22 nt, Human
uacucuucaguuaagccuuugg

SEQ ID NO: 3170487 - RNA, 18 nt, Human
uacucuucucucugcucu

SEQ ID NO: 3170488 - RNA, 17 nt, Human
uacucuucucucugcuc

SEQ ID NO: 3170489 - RNA, 16 nt, Human
uacucuucucucugcu

SEQ ID NO: 3170490 - RNA, 13 nt, Human
uacucuucucucu

SEQ ID NO: 3170491 - RNA, 18 nt, Human
uacucuuauagacaacau

SEQ ID NO: 3170492 - RNA, 20 nt, Human
uacuguaaaaugcaaaaaau

SEQ ID NO: 3170493 - RNA, 19 nt, Human
uacugaaugaagcaguauu

SEQ ID NO: 3170494 - RNA, 21 nt, Human
uacugaaugaagcaguauuuu

SEQ ID NO: 3170495 - RNA, 14 nt, Human
uacucuugggacau

SEQ ID NO: 3170496 - RNA, 19 nt, Human
uacucuucucucugcucug

SEQ ID NO: 3170497 - RNA, 23 nt, Human
uacugaaccacuuguagauuuga

SEQ ID NO: 3170498 - RNA, 19 nt, Human
uacugaaccacuuguagau

SEQ ID NO: 3170499 - RNA, 22 nt, Human
uacugaaccacuuguagauuug

SEQ ID NO: 3170500 - RNA, 16 nt, Human
uacugaaccacuugua

SEQ ID NO: 3170501 - RNA, 17 nt, Human
uacugaaccacuuguag

SEQ ID NO: 3170502 - RNA, 12 nt, Human
uacguaguucua

SEQ ID NO: 3170503 - RNA, 14 nt, Human
uacgugucaaugug

SEQ ID NO: 3170504 - RNA, 16 nt, Human
uacgugucaaugugug

SEQ ID NO: 3170505 - RNA, 17 nt, Human
uacgugucaaugugugc

SEQ ID NO: 3170506 - RNA, 14 nt, Human
uacguuaccaggca

SEQ ID NO: 3170507 - RNA, 14 nt, Human
uacgugugcaugug

SEQ ID NO: 3170508 - RNA, 16 nt, Human
uacuauaauuuaccug

SEQ ID NO: 3170509 - RNA, 16 nt, Human
uacuauguaucaauga

SEQ ID NO: 3170510 - RNA, 21 nt, Human
uacuauaacauagaauugcaa

SEQ ID NO: 3170511 - RNA, 16 nt, Human
uacuauagcaaaguag

SEQ ID NO: 3170512 - RNA, 17 nt, Human
uacuauagcaaaguagu

SEQ ID NO: 3170513 - RNA, 14 nt, Human
uacuauguaucaau

SEQ ID NO: 3170514 - RNA, 16 nt, Human
aauuuaucuuugauaa

SEQ ID NO: 3170515 - RNA, 15 nt, Human
aauuuaucuuugaua

SEQ ID NO: 3170516 - RNA, 19 nt, Human
aauuucucccagucauuua

SEQ ID NO: 3170517 - RNA, 20 nt, Human
aauuucucccagucauuuaa

SEQ ID NO: 3170518 - RNA, 17 nt, Human
aauuuagaaauauaauu

SEQ ID NO: 3170519 - RNA, 13 nt, Human
aauuuaucuuuga

SEQ ID NO: 3170520 - RNA, 13 nt, Human
aauuugaaacauu

SEQ ID NO: 3170521 - RNA, 12 nt, Human
aauuugaaacau

SEQ ID NO: 3170522 - RNA, 21 nt, Human
aauuugaaacauugcuuuuaa

SEQ ID NO: 3170523 - RNA, 15 nt, Human
aauuugaaacauugc

SEQ ID NO: 3170524 - RNA, 14 nt, Human
aauuugaaacauug

SEQ ID NO: 3170525 - RNA, 23 nt, Human
aauuucucuuaaguacugaaaua

SEQ ID NO: 3170526 - RNA, 14 nt, Human
aauuucugccauuu

SEQ ID NO: 3170527 - RNA, 17 nt, Human
aauuucugccauuucau

SEQ ID NO: 3170528 - RNA, 18 nt, Human
aauuucugccauuucaug

SEQ ID NO: 3170529 - RNA, 20 nt, Human
aauuucugccauuucauguc

SEQ ID NO: 3170530 - RNA, 22 nt, Human
aauuugaauuaucagcaaagaa

SEQ ID NO: 3170531 - RNA, 17 nt, Human
aauuugaagacuucaaa

SEQ ID NO: 3170532 - RNA, 18 nt, Human
aauuugaagacuucaaaa

SEQ ID NO: 3170533 - RNA, 15 nt, Human
aauugugugaacuug

SEQ ID NO: 3170534 - RNA, 18 nt, Human
aauugugugaacuuggaa

SEQ ID NO: 3170535 - RNA, 15 nt, Human
aauugugugauauuu

SEQ ID NO: 3170536 - RNA, 23 nt, Human
aauugugugauauuucagaaaua

SEQ ID NO: 3170537 - RNA, 22 nt, Human
aauugugugauauuucagaaau

SEQ ID NO: 3170538 - RNA, 21 nt, Human
aauugugugauauuucagaaa

SEQ ID NO: 3170539 - RNA, 19 nt, Human
aauugugugauauuucaga

SEQ ID NO: 3170540 - RNA, 22 nt, Human
aauugcucacaguuauuacaua

SEQ ID NO: 3170541 - RNA, 13 nt, Human
aauugcugaggca

SEQ ID NO: 3170542 - RNA, 23 nt, Human
uacuguaaaaugcaaaaaaucuu

SEQ ID NO: 3170543 - RNA, 21 nt, Human
aauugcucacaguuauuacau

SEQ ID NO: 3170544 - RNA, 17 nt, Human
aauugcucacaguuauu

SEQ ID NO: 3170545 - RNA, 12 nt, Human
aauugcuccuug

SEQ ID NO: 3170546 - RNA, 13 nt, Human
aauugcucacagu

SEQ ID NO: 3170547 - RNA, 22 nt, Human
aauuguuuggggaugagaaagg

SEQ ID NO: 3170548 - RNA, 22 nt, Human
aauuguuuagauuuuguguuua

SEQ ID NO: 3170549 - RNA, 14 nt, Human
aauuguuuagauuu

SEQ ID NO: 3170550 - RNA, 13 nt, Human
aauuguuguuugu

SEQ ID NO: 3170551 - RNA, 17 nt, Human
aauuguuguuuguaugu

SEQ ID NO: 3170552 - RNA, 14 nt, Human
aauuguuguuugua

SEQ ID NO: 3170553 - RNA, 23 nt, Human
aauuguuguuuguauguauaauu

SEQ ID NO: 3170554 - RNA, 22 nt, Human
aauuguuguuuguauguauaau

SEQ ID NO: 3170555 - RNA, 21 nt, Human
aauuguuguuuguauguauaa

SEQ ID NO: 3170556 - RNA, 19 nt, Human
aauuguuguuuguauguau

SEQ ID NO: 3170557 - RNA, 23 nt, Human
aauuguuguccgguuuacuuuaa

SEQ ID NO: 3170558 - RNA, 22 nt, Human
aauuguuguccgguuuacuuua

SEQ ID NO: 3170559 - RNA, 20 nt, Human
aauuguuguccgguuuacuu

SEQ ID NO: 3170560 - RNA, 13 nt, Human
aauuuaaaagucu

SEQ ID NO: 3170561 - RNA, 17 nt, Human
aauuuaaaaagcccaac

SEQ ID NO: 3170562 - RNA, 15 nt, Human
aauuuaaaaguaaaa

SEQ ID NO: 3170563 - RNA, 16 nt, Human
aauuuaaaaguaaaau

SEQ ID NO: 3170564 - RNA, 21 nt, Human
aauuuaaaaguaaaaugucuu

SEQ ID NO: 3170565 - RNA, 20 nt, Human
aauuuaaagaaaaaaauguc

SEQ ID NO: 3170566 - RNA, 13 nt, Human
aauuuaaaauaua

SEQ ID NO: 3170567 - RNA, 19 nt, Human
aauuuacauacucugcuua

SEQ ID NO: 3170568 - RNA, 15 nt, Human
aauuuacauacucug

SEQ ID NO: 3170569 - RNA, 18 nt, Human
aauuuaaguguuggaaaa

SEQ ID NO: 3170570 - RNA, 12 nt, Human
aauuuaaguuuu

SEQ ID NO: 3170571 - RNA, 15 nt, Human
aauuuaaguuuugac

SEQ ID NO: 3170572 - RNA, 17 nt, Human
aauuuaaguuuugacaa

SEQ ID NO: 3170573 - RNA, 24 nt, Human
aauuuaaguuuugacaagcuggcu

SEQ ID NO: 3170574 - RNA, 20 nt, Human
aauuuaaguuuugacaagcu

SEQ ID NO: 3170575 - RNA, 23 nt, Human
aauuuaaguuuugacaagcuggc

SEQ ID NO: 3170576 - RNA, 22 nt, Human
uagaucaacucauguuaauuga

SEQ ID NO: 3170577 - RNA, 18 nt, Human
uagaucaaauaguugcau

SEQ ID NO: 3170578 - RNA, 20 nt, Human
uagaucaaauaguugcauag

SEQ ID NO: 3170579 - RNA, 13 nt, Human
uagaucauaguuu

SEQ ID NO: 3170580 - RNA, 15 nt, Human
uagagcagaaauucu

SEQ ID NO: 3170581 - RNA, 14 nt, Human
uagagcagaaauuc

SEQ ID NO: 3170582 - RNA, 13 nt, Human
uagagcagaaauu

SEQ ID NO: 3170583 - RNA, 20 nt, Human
acaaaaagauaccuuaaaau

SEQ ID NO: 3170584 - RNA, 16 nt, Human
acaaaaagaugucuca

SEQ ID NO: 3170585 - RNA, 12 nt, Human
uagagcagaaau

SEQ ID NO: 3170586 - RNA, 15 nt, Human
uagagcuucuggcac

SEQ ID NO: 3170587 - RNA, 16 nt, Human
uagcaccagggaaggg

SEQ ID NO: 3170588 - RNA, 24 nt, Human
uagcacagacccugcccugugggc

SEQ ID NO: 3170589 - RNA, 23 nt, Human
uagauuuuguguuuauucuugau

SEQ ID NO: 3170590 - RNA, 22 nt, Human
uagauuuuguguuuauucuuga

SEQ ID NO: 3170591 - RNA, 21 nt, Human
uagauuuuguguuuauucuug

SEQ ID NO: 3170592 - RNA, 15 nt, Human
uagauuuuguguuua

SEQ ID NO: 3170593 - RNA, 12 nt, Human
uagcacagcucc

SEQ ID NO: 3170594 - RNA, 20 nt, Human
uagcacagcguuaugugucu

SEQ ID NO: 3170595 - RNA, 13 nt, Human
uagcaccagggaa

SEQ ID NO: 3170596 - RNA, 14 nt, Human
uagcaccagggaag

SEQ ID NO: 3170597 - RNA, 21 nt, Human
uagcacaggcugagugcaggc

SEQ ID NO: 3170598 - RNA, 20 nt, Human
uagcacaggcugagugcagg

SEQ ID NO: 3170599 - RNA, 19 nt, Human
uagcacaggcugagugcag

SEQ ID NO: 3170600 - RNA, 15 nt, Human
uagcacaggcugagu

SEQ ID NO: 3170601 - RNA, 13 nt, Human
uagcacaggcuga

SEQ ID NO: 3170602 - RNA, 12 nt, Human
uagcacaggcug

SEQ ID NO: 3170603 - RNA, 14 nt, Human
uagcacagcucccu

SEQ ID NO: 3170604 - RNA, 13 nt, Human
uagcacagcuccc

SEQ ID NO: 3170605 - RNA, 16 nt, Human
uagcacagacccugcc

SEQ ID NO: 3170606 - RNA, 17 nt, Human
uagcacagacccugccc

SEQ ID NO: 3170607 - RNA, 18 nt, Human
uagcacagacccugcccu

SEQ ID NO: 3170608 - RNA, 19 nt, Human
uagcacagacccugcccug

SEQ ID NO: 3170609 - RNA, 22 nt, Human
uagauuuuagacccuauugcug

SEQ ID NO: 3170610 - RNA, 17 nt, Human
uagaucauaguuuuauu

SEQ ID NO: 3170611 - RNA, 19 nt, Human
uagaucauaguuuuauuua

SEQ ID NO: 3170612 - RNA, 13 nt, Human
uagauuuuauagu

SEQ ID NO: 3170613 - RNA, 15 nt, Human
uagauuuuauagugu

SEQ ID NO: 3170614 - RNA, 19 nt, Human
uagauuuuauaguguguug

SEQ ID NO: 3170615 - RNA, 15 nt, Human
acaagcauauaaaau

SEQ ID NO: 3170616 - RNA, 19 nt, Human
acaagcauauaaaauggca

SEQ ID NO: 3170617 - RNA, 17 nt, Human
acaagcauauaaaaugg

SEQ ID NO: 3170618 - RNA, 17 nt, Human
acaagacaacauuguaa

SEQ ID NO: 3170619 - RNA, 17 nt, Human
acaagagcccaggccuc

SEQ ID NO: 3170620 - RNA, 15 nt, Human
acaagacaacauugu

SEQ ID NO: 3170621 - RNA, 12 nt, Human
acaagccacccc

SEQ ID NO: 3170622 - RNA, 21 nt, Human
acaagcgugagccacugcacc

SEQ ID NO: 3170623 - RNA, 20 nt, Human
acaagcgugagccacugcac

SEQ ID NO: 3170624 - RNA, 13 nt, Human
acaagcugcaccc

SEQ ID NO: 3170625 - RNA, 18 nt, Human
acaagcgugagccacugc

SEQ ID NO: 3170626 - RNA, 22 nt, Human
acaagaaaugaaagcagggacu

SEQ ID NO: 3170627 - RNA, 19 nt, Human
acaagaagaauuugaagac

SEQ ID NO: 3170628 - RNA, 19 nt, Human
acaacaccaaaaaauaucu

SEQ ID NO: 3170629 - RNA, 23 nt, Human
acaagaaugaagguuuuuguaaa

SEQ ID NO: 3170630 - RNA, 15 nt, Human
acaagaaugaagguu

SEQ ID NO: 3170631 - RNA, 18 nt, Human
acaagaauaaaggcagcu

SEQ ID NO: 3170632 - RNA, 17 nt, Human
acaagaauaaaggcagc

SEQ ID NO: 3170633 - RNA, 15 nt, Human
acaacaacaaaauga

SEQ ID NO: 3170634 - RNA, 15 nt, Human
acaacaaccugguca

SEQ ID NO: 3170635 - RNA, 12 nt, Human
acaacacucaca

SEQ ID NO: 3170636 - RNA, 13 nt, Human
acaaauguuucua

SEQ ID NO: 3170637 - RNA, 15 nt, Human
uagcauuuggugcuu

SEQ ID NO: 3170638 - RNA, 21 nt, Human
acaaauuaugcuaagaauuuu

SEQ ID NO: 3170639 - RNA, 18 nt, Human
acaaauuaugcuaagaau

SEQ ID NO: 3170640 - RNA, 20 nt, Human
acaaauuauaauguauucau

SEQ ID NO: 3170641 - RNA, 15 nt, Human
acaaauuauaaugua

SEQ ID NO: 3170642 - RNA, 17 nt, Human
acaaauuauaauguauu

SEQ ID NO: 3170643 - RNA, 16 nt, Human
acaaauuauaauguau

SEQ ID NO: 3170644 - RNA, 22 nt, Human
uagcauugucuauuuuucucuu

SEQ ID NO: 3170645 - RNA, 22 nt, Human
uagcauuuaugguaaucauauu

SEQ ID NO: 3170646 - RNA, 15 nt, Human
uagcauuuaugguaa

SEQ ID NO: 3170647 - RNA, 14 nt, Human
uagcauucuuugga

SEQ ID NO: 3170648 - RNA, 17 nt, Human
uagcauucuuuggaguu

SEQ ID NO: 3170649 - RNA, 20 nt, Human
uagcauucuuuggaguuaaa

SEQ ID NO: 3170650 - RNA, 13 nt, Human
uagcauguuguag

SEQ ID NO: 3170651 - RNA, 15 nt, Human
uagcauguuguagau

SEQ ID NO: 3170652 - RNA, 22 nt, Human
uagcauuguaagcguauggcuu

SEQ ID NO: 3170653 - RNA, 19 nt, Human
uagcauuguaaaagcauuu

SEQ ID NO: 3170654 - RNA, 18 nt, Human
uagcauuguaaaagcauu

SEQ ID NO: 3170655 - RNA, 14 nt, Human
aauuuuuuuguaug

SEQ ID NO: 3170656 - RNA, 17 nt, Human
aauuuuuuugagacaga

SEQ ID NO: 3170657 - RNA, 16 nt, Human
acaaaaacacagcaag

SEQ ID NO: 3170658 - RNA, 14 nt, Human
aauuuuucauauuu

SEQ ID NO: 3170659 - RNA, 13 nt, Human
aauuuuucauauu

SEQ ID NO: 3170660 - RNA, 18 nt, Human
aauuuuucuguauagaca

SEQ ID NO: 3170661 - RNA, 14 nt, Human
aauuuuucuguaua

SEQ ID NO: 3170662 - RNA, 13 nt, Human
aauuuuucuguau

SEQ ID NO: 3170663 - RNA, 12 nt, Human
aauuuuucugua

SEQ ID NO: 3170664 - RNA, 14 nt, Human
aauuuuuguauuuu

SEQ ID NO: 3170665 - RNA, 21 nt, Human
aauuuuuuaagugaaaauaua

SEQ ID NO: 3170666 - RNA, 23 nt, Human
aauuuuaagcuaggaaaagaaau

SEQ ID NO: 3170667 - RNA, 18 nt, Human
aauuuuaagcuaggaaaa

SEQ ID NO: 3170668 - RNA, 23 nt, Human
aauuuuaagccuuuguugaacug

SEQ ID NO: 3170669 - RNA, 20 nt, Human
aauuuuaagccuuuguugaa

SEQ ID NO: 3170670 - RNA, 12 nt, Human
aauuuuaaagcc

SEQ ID NO: 3170671 - RNA, 13 nt, Human
aauuuuaaagcca

SEQ ID NO: 3170672 - RNA, 15 nt, Human
aauuuuaaagccauu

SEQ ID NO: 3170673 - RNA, 12 nt, Human
aauuuuaaagua

SEQ ID NO: 3170674 - RNA, 13 nt, Human
aauuuuaaaguau

SEQ ID NO: 3170675 - RNA, 14 nt, Human
aauuuuaaaguaug

SEQ ID NO: 3170676 - RNA, 16 nt, Human
aauuuuaaaguaugca

SEQ ID NO: 3170677 - RNA, 18 nt, Human
aauuuuaaaguaugcauu

SEQ ID NO: 3170678 - RNA, 18 nt, Human
aauuuuuauuaaauuaug

SEQ ID NO: 3170679 - RNA, 17 nt, Human
aauuuuuauuaaauuau

SEQ ID NO: 3170680 - RNA, 14 nt, Human
aauuuuuaugugug

SEQ ID NO: 3170681 - RNA, 13 nt, Human
aauuuuuaugugu

SEQ ID NO: 3170682 - RNA, 14 nt, Human
aauuuuuauuucuu

SEQ ID NO: 3170683 - RNA, 15 nt, Human
aauuuuuauuucuuu

SEQ ID NO: 3170684 - RNA, 12 nt, Human
uagacagucccu

SEQ ID NO: 3170685 - RNA, 14 nt, Human
uagacagucccugc

SEQ ID NO: 3170686 - RNA, 19 nt, Human
uagacaggagaagaaagaa

SEQ ID NO: 3170687 - RNA, 18 nt, Human
uagacaggagaagaaaga

SEQ ID NO: 3170688 - RNA, 15 nt, Human
uagacaggagaagaa

SEQ ID NO: 3170689 - RNA, 17 nt, Human
aauuuguaccauuucag

SEQ ID NO: 3170690 - RNA, 12 nt, Human
aauuuuaaaaaa

SEQ ID NO: 3170691 - RNA, 23 nt, Human
aauuuuaaaaaagggaguuuuug

SEQ ID NO: 3170692 - RNA, 18 nt, Human
uagaacucccuuucaaca

SEQ ID NO: 3170693 - RNA, 15 nt, Human
uagaagucacacagu

SEQ ID NO: 3170694 - RNA, 17 nt, Human
uagaagagucuauuguc

SEQ ID NO: 3170695 - RNA, 22 nt, Human
uacuucaaaaguuuguuugcuu

SEQ ID NO: 3170696 - RNA, 17 nt, Human
uacuucaaaaguuuguu

SEQ ID NO: 3170697 - RNA, 23 nt, Human
uagaacgccagggaccccagaau

SEQ ID NO: 3170698 - RNA, 19 nt, Human
uagaagucuuagauguaua

SEQ ID NO: 3170699 - RNA, 18 nt, Human
uagaagucuuagauguau

SEQ ID NO: 3170700 - RNA, 23 nt, Human
uagaauugaagguuuuugauagc

SEQ ID NO: 3170701 - RNA, 20 nt, Human
uagaauugaagguuuuugau

SEQ ID NO: 3170702 - RNA, 21 nt, Human
uagaauugaagguuuuugaua

SEQ ID NO: 3170703 - RNA, 17 nt, Human
uagaauugcaaucuaua

SEQ ID NO: 3170704 - RNA, 19 nt, Human
uagaauugaagguuuuuga

SEQ ID NO: 3170705 - RNA, 18 nt, Human
uagaauugaagguuuuug

SEQ ID NO: 3170706 - RNA, 17 nt, Human
uagaagucuuagaugua

SEQ ID NO: 3170707 - RNA, 16 nt, Human
uagaagucuuagaugu

SEQ ID NO: 3170708 - RNA, 16 nt, Human
uagaagucacacagua

SEQ ID NO: 3170709 - RNA, 18 nt, Human
uagacaauauaagagcuu

SEQ ID NO: 3170710 - RNA, 21 nt, Human
uagacagagucucacuguugc

SEQ ID NO: 3170711 - RNA, 14 nt, Human
uagacagcaugaga

SEQ ID NO: 3170712 - RNA, 22 nt, Human
uagacaggaaaagcaugucuua

SEQ ID NO: 3170713 - RNA, 20 nt, Human
uagaauugcaaucuauaaua

SEQ ID NO: 3170714 - RNA, 18 nt, Human
uagaauugcaaucuauaa

SEQ ID NO: 3170715 - RNA, 20 nt, Human
uacauuagcaguuugcuuug

SEQ ID NO: 3170716 - RNA, 19 nt, Human
uacauuagcaguuugcuuu

SEQ ID NO: 3170717 - RNA, 14 nt, Human
uacauguuuaugua

SEQ ID NO: 3170718 - RNA, 18 nt, Human
uacauguuuauguaaaca

SEQ ID NO: 3170719 - RNA, 15 nt, Human
uacauguuuauguaa

SEQ ID NO: 3170720 - RNA, 21 nt, Human
uacauguuuauguaaacaaau

SEQ ID NO: 3170721 - RNA, 19 nt, Human
uacauguuuauguaaacaa

SEQ ID NO: 3170722 - RNA, 17 nt, Human
uacauguauuaaauuac

SEQ ID NO: 3170723 - RNA, 19 nt, Human
uacauguaucaagccuaga

SEQ ID NO: 3170724 - RNA, 23 nt, Human
uacauguauuaaauuacauuugu

SEQ ID NO: 3170725 - RNA, 20 nt, Human
uacauguauuaaauuacauu

SEQ ID NO: 3170726 - RNA, 19 nt, Human
uacauguauuaaauuacau

SEQ ID NO: 3170727 - RNA, 18 nt, Human
uacauguauuaaauuaca

SEQ ID NO: 3170728 - RNA, 20 nt, Human
aauuaagguguuugaaaaua

SEQ ID NO: 3170729 - RNA, 18 nt, Human
uacaugggacuaugcuuu

SEQ ID NO: 3170730 - RNA, 13 nt, Human
uacaugggacuau

SEQ ID NO: 3170731 - RNA, 19 nt, Human
uacaugggacuaugcuuuu

SEQ ID NO: 3170732 - RNA, 15 nt, Human
aauuaagguguuuga

SEQ ID NO: 3170733 - RNA, 16 nt, Human
aauuaagguguuugaa

SEQ ID NO: 3170734 - RNA, 17 nt, Human
aauuaagguguuugaaa

SEQ ID NO: 3170735 - RNA, 18 nt, Human
aauuaagguguuugaaaa

SEQ ID NO: 3170736 - RNA, 13 nt, Human
aauuaagguguuu

SEQ ID NO: 3170737 - RNA, 17 nt, Human
aauuaacacuuaagguu

SEQ ID NO: 3170738 - RNA, 19 nt, Human
aaugugaacagcggcugga

SEQ ID NO: 3170739 - RNA, 15 nt, Human
aaugucaaaugugaa

SEQ ID NO: 3170740 - RNA, 16 nt, Human
aaugugaaauguaacu

SEQ ID NO: 3170741 - RNA, 17 nt, Human
aaugugaauuacuaacu

SEQ ID NO: 3170742 - RNA, 12 nt, Human
aaugugaauuac

SEQ ID NO: 3170743 - RNA, 23 nt, Human
aauguugaagaacucaugugauu

SEQ ID NO: 3170744 - RNA, 16 nt, Human
aauguugaagaacuca

SEQ ID NO: 3170745 - RNA, 22 nt, Human
aauguugaacaaaauaaauugg

SEQ ID NO: 3170746 - RNA, 21 nt, Human
aauguugaacaaaauaaauug

SEQ ID NO: 3170747 - RNA, 17 nt, Human
aauguugaacaaaauaa

SEQ ID NO: 3170748 - RNA, 16 nt, Human
aauguugaacaaaaua

SEQ ID NO: 3170749 - RNA, 12 nt, Human
aauguugauuuc

SEQ ID NO: 3170750 - RNA, 16 nt, Human
aauguugauuucuagu

SEQ ID NO: 3170751 - RNA, 15 nt, Human
aauguugauuucuag

SEQ ID NO: 3170752 - RNA, 14 nt, Human
aauguugauuucua

SEQ ID NO: 3170753 - RNA, 13 nt, Human
aauguugauuucu

SEQ ID NO: 3170754 - RNA, 21 nt, Human
aauguugauuucuaguuauuu

SEQ ID NO: 3170755 - RNA, 20 nt, Human
aauguugauuucuaguuauu

SEQ ID NO: 3170756 - RNA, 18 nt, Human
aauguugauuucuaguua

SEQ ID NO: 3170757 - RNA, 17 nt, Human
aauguugauuucuaguu

SEQ ID NO: 3170758 - RNA, 23 nt, Human
aauguugauuucuaguuauuuau

SEQ ID NO: 3170759 - RNA, 20 nt, Human
aauguugcuaugugccuuau

SEQ ID NO: 3170760 - RNA, 22 nt, Human
aauguugauuucuaguuauuua

SEQ ID NO: 3170761 - RNA, 16 nt, Human
uaccccauggaccaug

SEQ ID NO: 3170762 - RNA, 17 nt, Human
uaccauccccuguagag

SEQ ID NO: 3170763 - RNA, 19 nt, Human
uaccccaagcgcccuggcc

SEQ ID NO: 3170764 - RNA, 18 nt, Human
uaccacugaaucuguaca

SEQ ID NO: 3170765 - RNA, 16 nt, Human
uaccacugaaucugua

SEQ ID NO: 3170766 - RNA, 15 nt, Human
uaccacugaaucugu

SEQ ID NO: 3170767 - RNA, 11 nt, Human
uaccacugaau

SEQ ID NO: 3170768 - RNA, 20 nt, Human
uaccacugaaucuguacaga

SEQ ID NO: 3170769 - RNA, 19 nt, Human
uaccacugaaucuguacag

SEQ ID NO: 3170770 - RNA, 15 nt, Human
uaccacuuuagauga

SEQ ID NO: 3170771 - RNA, 14 nt, Human
uacauuuaaauuuu

SEQ ID NO: 3170772 - RNA, 23 nt, Human
uacauuuaaaccuuuuauuauaa

SEQ ID NO: 3170773 - RNA, 20 nt, Human
uacauuuaaaacauuaaaau

SEQ ID NO: 3170774 - RNA, 15 nt, Human
uacauuuaaaacauu

SEQ ID NO: 3170775 - RNA, 19 nt, Human
uacauuuaaaacauuaaaa

SEQ ID NO: 3170776 - RNA, 16 nt, Human
uacauuuaaaacauua

SEQ ID NO: 3170777 - RNA, 22 nt, Human
uacccuggcacuauaauguaag

SEQ ID NO: 3170778 - RNA, 20 nt, Human
uacccuggcacuauaaugua

SEQ ID NO: 3170779 - RNA, 23 nt, Human
uaccccucccggcccugccugcu

SEQ ID NO: 3170780 - RNA, 19 nt, Human
uaccccugacuucuguuua

SEQ ID NO: 3170781 - RNA, 20 nt, Human
uacccgggaagggggcuggg

SEQ ID NO: 3170782 - RNA, 22 nt, Human
uaccccucccggcccugccugc

SEQ ID NO: 3170783 - RNA, 21 nt, Human
uaccccucccggcccugccug

SEQ ID NO: 3170784 - RNA, 12 nt, Human
aauguagagggg

SEQ ID NO: 3170785 - RNA, 17 nt, Human
aauguagcuucagucau

SEQ ID NO: 3170786 - RNA, 22 nt, Human
aauguagcuucagucauuaaau

SEQ ID NO: 3170787 - RNA, 20 nt, Human
aauguaggggaaaguuucau

SEQ ID NO: 3170788 - RNA, 15 nt, Human
uacauacuuuaucaa

SEQ ID NO: 3170789 - RNA, 19 nt, Human
uacauacuuuaucaaugug

SEQ ID NO: 3170790 - RNA, 23 nt, Human
uacauacuuuaucaaugugucuu

SEQ ID NO: 3170791 - RNA, 15 nt, Human
uacauacugcaucuu

SEQ ID NO: 3170792 - RNA, 16 nt, Human
aauguaugcuucauac

SEQ ID NO: 3170793 - RNA, 15 nt, Human
aauguaugcuucaua

SEQ ID NO: 3170794 - RNA, 13 nt, Human
aauguaucuaaga

SEQ ID NO: 3170795 - RNA, 14 nt, Human
aauguaucuaagaa

SEQ ID NO: 3170796 - RNA, 14 nt, Human
aaugucacaggcag

SEQ ID NO: 3170797 - RNA, 13 nt, Human
aaugucacaggca

SEQ ID NO: 3170798 - RNA, 18 nt, Human
aaugucaaaaauauuuag

SEQ ID NO: 3170799 - RNA, 20 nt, Human
aauguaugcauucacauuua

SEQ ID NO: 3170800 - RNA, 14 nt, Human
aaugucaaaaguag

SEQ ID NO: 3170801 - RNA, 15 nt, Human
aaugucaaaaguaga

SEQ ID NO: 3170802 - RNA, 19 nt, Human
aaugucaaaaguagaacuu

SEQ ID NO: 3170803 - RNA, 23 nt, Human
aaugucaaaaguagaacuuugua

SEQ ID NO: 3170804 - RNA, 20 nt, Human
uacauaauacugaaccacuu

SEQ ID NO: 3170805 - RNA, 23 nt, Human
uacauaauacugaaccacuugua

SEQ ID NO: 3170806 - RNA, 16 nt, Human
uacaguggauugcuca

SEQ ID NO: 3170807 - RNA, 22 nt, Human
uacaguggauugcucaucucag

SEQ ID NO: 3170808 - RNA, 16 nt, Human
uacagugccuaaaaua

SEQ ID NO: 3170809 - RNA, 22 nt, Human
uacagugcauaguuguagacaa

SEQ ID NO: 3170810 - RNA, 18 nt, Human
uacaguaucucagggccu

SEQ ID NO: 3170811 - RNA, 12 nt, Human
uacaguccuccc

SEQ ID NO: 3170812 - RNA, 15 nt, Human
uacaguccucccauc

SEQ ID NO: 3170813 - RNA, 17 nt, Human
uacaguccucccaucuc

SEQ ID NO: 3170814 - RNA, 18 nt, Human
uacaguccucccaucuca

SEQ ID NO: 3170815 - RNA, 18 nt, Human
uacagucaagauagaaag

SEQ ID NO: 3170816 - RNA, 23 nt, Human
aauguaaaaaggaauaugaaagu

SEQ ID NO: 3170817 - RNA, 15 nt, Human
aauguaagcucuacu

SEQ ID NO: 3170818 - RNA, 13 nt, Human
aauguaagcucua

SEQ ID NO: 3170819 - RNA, 17 nt, Human
aaugguuuucuugugug

SEQ ID NO: 3170820 - RNA, 18 nt, Human
aaugguuuucuugugugu

SEQ ID NO: 3170821 - RNA, 22 nt, Human
aaugguuuucuuguguguuuau

SEQ ID NO: 3170822 - RNA, 16 nt, Human
aaugguuuucuugugu

SEQ ID NO: 3170823 - RNA, 16 nt, Human
aaugguuuaaaugguc

SEQ ID NO: 3170824 - RNA, 17 nt, Human
uacaauauuugugugcu

SEQ ID NO: 3170825 - RNA, 16 nt, Human
uacaauauguacauuu

SEQ ID NO: 3170826 - RNA, 15 nt, Human
uacaauauguacauu

SEQ ID NO: 3170827 - RNA, 21 nt, Human
uacaauauguacauuucuaag

SEQ ID NO: 3170828 - RNA, 13 nt, Human
uacaaucagcugc

SEQ ID NO: 3170829 - RNA, 14 nt, Human
uacaaucagcugcu

SEQ ID NO: 3170830 - RNA, 15 nt, Human
uacaaucagcugcuu

SEQ ID NO: 3170831 - RNA, 16 nt, Human
uacaaucagcugcuuu

SEQ ID NO: 3170832 - RNA, 18 nt, Human
uacaaucagcugcuuugu

SEQ ID NO: 3170833 - RNA, 19 nt, Human
uacaaucagcugcuuuguu

SEQ ID NO: 3170834 - RNA, 20 nt, Human
uacaaucagcugcuuuguua

SEQ ID NO: 3170835 - RNA, 22 nt, Human
uacaaucagcugcuuuguuacc

SEQ ID NO: 3170836 - RNA, 23 nt, Human
uacaaucagcugcuuuguuaccu

SEQ ID NO: 3170837 - RNA, 19 nt, Human
uacagacuggauguaccac

SEQ ID NO: 3170838 - RNA, 16 nt, Human
uacagagaaagaaauu

SEQ ID NO: 3170839 - RNA, 15 nt, Human
uacagagaaagaaau

SEQ ID NO: 3170840 - RNA, 14 nt, Human
aauguacauguauu

SEQ ID NO: 3170841 - RNA, 20 nt, Human
aauguacauguauuaaauua

SEQ ID NO: 3170842 - RNA, 16 nt, Human
aauguacauguauuaa

SEQ ID NO: 3170843 - RNA, 22 nt, Human
uacacgguucaaaccugugaag

SEQ ID NO: 3170844 - RNA, 17 nt, Human
uaauucaggcauauuuu

SEQ ID NO: 3170845 - RNA, 19 nt, Human
uaauucaggcauauuuuaa

SEQ ID NO: 3170846 - RNA, 14 nt, Human
uaauuuaaguuuug

SEQ ID NO: 3170847 - RNA, 15 nt, Human
uaauuuaaguuuuga

SEQ ID NO: 3170848 - RNA, 20 nt, Human
uaauuuaaguuuugacaagc

SEQ ID NO: 3170849 - RNA, 17 nt, Human
uaauuuccuuaaagcaa

SEQ ID NO: 3170850 - RNA, 17 nt, Human
uaauuuaccugaagucu

SEQ ID NO: 3170851 - RNA, 18 nt, Human
uaauuuaccugaagucuu

SEQ ID NO: 3170852 - RNA, 18 nt, Human
uaauuucugccauuucau

SEQ ID NO: 3170853 - RNA, 19 nt, Human
uaauuucugccauuucaug

SEQ ID NO: 3170854 - RNA, 13 nt, Human
uaauuugcugcug

SEQ ID NO: 3170855 - RNA, 14 nt, Human
uaauuugcugcuga

SEQ ID NO: 3170856 - RNA, 11 nt, Human
uaauuuggaaa

SEQ ID NO: 3170857 - RNA, 15 nt, Human
uaauuuggaaacuaa

SEQ ID NO: 3170858 - RNA, 21 nt, Human
uaauuuuuguauuuuuaguag

SEQ ID NO: 3170859 - RNA, 18 nt, Human
uacaaaaacacagcaagg

SEQ ID NO: 3170860 - RNA, 17 nt, Human
uacaaaaacacagcaag

SEQ ID NO: 3170861 - RNA, 16 nt, Human
uacaaaaacacagcaa

SEQ ID NO: 3170862 - RNA, 20 nt, Human
uacaagcgugagccacugca

SEQ ID NO: 3170863 - RNA, 19 nt, Human
uacaagcgugagccacugc

SEQ ID NO: 3170864 - RNA, 18 nt, Human
uacaagcgugagccacug

SEQ ID NO: 3170865 - RNA, 16 nt, Human
uacaagcgugagccac

SEQ ID NO: 3170866 - RNA, 20 nt, Human
uacaauaaaaucuugaaaau

SEQ ID NO: 3170867 - RNA, 16 nt, Human
uacaaguuauaguacu

SEQ ID NO: 3170868 - RNA, 15 nt, Human
uaauuauaaucucuu

SEQ ID NO: 3170869 - RNA, 19 nt, Human
aaugcacaaacagaggccg

SEQ ID NO: 3170870 - RNA, 20 nt, Human
aaugcacaaacagaggccgc

SEQ ID NO: 3170871 - RNA, 13 nt, Human
aaugcacuuuguu

SEQ ID NO: 3170872 - RNA, 16 nt, Human
aaugcacuuuguucug

SEQ ID NO: 3170873 - RNA, 19 nt, Human
aaugcacuuuguucuggcu

SEQ ID NO: 3170874 - RNA, 23 nt, Human
uaauuaguuccucauuagcauuu

SEQ ID NO: 3170875 - RNA, 20 nt, Human
uaauuauacccccugcaaag

SEQ ID NO: 3170876 - RNA, 15 nt, Human
aaugcaauaugugaa

SEQ ID NO: 3170877 - RNA, 13 nt, Human
aaugaccuuucaa

SEQ ID NO: 3170878 - RNA, 14 nt, Human
aaugaccuuucaau

SEQ ID NO: 3170879 - RNA, 14 nt, Human
aaugcaaaccauca

SEQ ID NO: 3170880 - RNA, 16 nt, Human
aaugcaaaccaucauu

SEQ ID NO: 3170881 - RNA, 20 nt, Human
aaugaaugucagugugacug

SEQ ID NO: 3170882 - RNA, 21 nt, Human
aaugaaugucagugugacuga

SEQ ID NO: 3170883 - RNA, 18 nt, Human
aaugaccuuguaauguaa

SEQ ID NO: 3170884 - RNA, 16 nt, Human
aaugaccuuguaaugu

SEQ ID NO: 3170885 - RNA, 14 nt, Human
aaugaccuuguaau

SEQ ID NO: 3170886 - RNA, 13 nt, Human
aaugaccuuguaa

SEQ ID NO: 3170887 - RNA, 18 nt, Human
aaugcacaaacagaggcc

SEQ ID NO: 3170888 - RNA, 13 nt, Human
aaugcaaccauuu

SEQ ID NO: 3170889 - RNA, 18 nt, Human
aaugcaaccauuugaaac

SEQ ID NO: 3170890 - RNA, 17 nt, Human
aaugcaaccauuugaaa

SEQ ID NO: 3170891 - RNA, 22 nt, Human
aaugcaaaccaucauugaaauc

SEQ ID NO: 3170892 - RNA, 23 nt, Human
aaugcaaaccaucauugaaaucu

SEQ ID NO: 3170893 - RNA, 22 nt, Human
aaugaccuuguaauguaacugc

SEQ ID NO: 3170894 - RNA, 21 nt, Human
aaugaccuuguaauguaacug

SEQ ID NO: 3170895 - RNA, 20 nt, Human
aaugaccuuguaauguaacu

SEQ ID NO: 3170896 - RNA, 19 nt, Human
aaugaccuuguaauguaac

SEQ ID NO: 3170897 - RNA, 12 nt, Human
uaaucauuuuuu

SEQ ID NO: 3170898 - RNA, 15 nt, Human
uaaucaugaaccaau

SEQ ID NO: 3170899 - RNA, 13 nt, Human
uaaucaugaauau

SEQ ID NO: 3170900 - RNA, 20 nt, Human
uaaucagggaccaccagagg

SEQ ID NO: 3170901 - RNA, 17 nt, Human
uaauauugaaaauugaa

SEQ ID NO: 3170902 - RNA, 20 nt, Human
uaauauugaaaauugaaaag

SEQ ID NO: 3170903 - RNA, 21 nt, Human
uaauauugaaaauugaaaagu

SEQ ID NO: 3170904 - RNA, 22 nt, Human
uaauauugaaaauugaaaagua

SEQ ID NO: 3170905 - RNA, 21 nt, Human
uaauauugauaugcuuauaca

SEQ ID NO: 3170906 - RNA, 17 nt, Human
uaauacuguuauucuuu

SEQ ID NO: 3170907 - RNA, 16 nt, Human
uaauacuguuauucuu

SEQ ID NO: 3170908 - RNA, 15 nt, Human
uaauacuguuauucu

SEQ ID NO: 3170909 - RNA, 13 nt, Human
uaauacuguuauu

SEQ ID NO: 3170910 - RNA, 22 nt, Human
uaauacuguuauucuuugcacu

SEQ ID NO: 3170911 - RNA, 20 nt, Human
uaauacuguuauucuuugca

SEQ ID NO: 3170912 - RNA, 13 nt, Human
uaauacuuuguau

SEQ ID NO: 3170913 - RNA, 20 nt, Human
uaauacuuuguauacaagua

SEQ ID NO: 3170914 - RNA, 13 nt, Human
uaauaccucccuu

SEQ ID NO: 3170915 - RNA, 21 nt, Human
aauacauaugauaaauuugac

SEQ ID NO: 3170916 - RNA, 20 nt, Human
aauacaguaucucagggccu

SEQ ID NO: 3170917 - RNA, 17 nt, Human
uaauguaagcucuacug

SEQ ID NO: 3170918 - RNA, 16 nt, Human
uaauguaagcucuacu

SEQ ID NO: 3170919 - RNA, 14 nt, Human
uaaugaacaaaauu

SEQ ID NO: 3170920 - RNA, 17 nt, Human
uaaugaacaaaauuauu

SEQ ID NO: 3170921 - RNA, 16 nt, Human
uaaucuugugaaaaua

SEQ ID NO: 3170922 - RNA, 19 nt, Human
uaaucuugugaaaauaauu

SEQ ID NO: 3170923 - RNA, 17 nt, Human
uaaucuuguugauaaaa

SEQ ID NO: 3170924 - RNA, 19 nt, Human
uaaucuuguugauaaaaau

SEQ ID NO: 3170925 - RNA, 22 nt, Human
uaauguaacugcucuugggcaa

SEQ ID NO: 3170926 - RNA, 15 nt, Human
uaaugucacaggcag

SEQ ID NO: 3170927 - RNA, 17 nt, Human
uaaugucacaggcaggu

SEQ ID NO: 3170928 - RNA, 16 nt, Human
uaaugucacaggcagg

SEQ ID NO: 3170929 - RNA, 22 nt, Human
aaucuuuucugaaucuucugaa

SEQ ID NO: 3170930 - RNA, 13 nt, Human
aaucuuuucuuau

SEQ ID NO: 3170931 - RNA, 14 nt, Human
aaucuuuucuuauu

SEQ ID NO: 3170932 - RNA, 15 nt, Human
aaucuuuucuuauuu

SEQ ID NO: 3170933 - RNA, 14 nt, Human
aaucuuuucugaau

SEQ ID NO: 3170934 - RNA, 15 nt, Human
aaugaaugaaugaau

SEQ ID NO: 3170935 - RNA, 14 nt, Human
aaugaaugaaacau

SEQ ID NO: 3170936 - RNA, 15 nt, Human
aaugaaugucagugu

SEQ ID NO: 3170937 - RNA, 14 nt, Human
aaugaaugucagug

SEQ ID NO: 3170938 - RNA, 23 nt, Human
aaucuucugaacuuggcgcugcc

SEQ ID NO: 3170939 - RNA, 13 nt, Human
uaaugugaaaugu

SEQ ID NO: 3170940 - RNA, 14 nt, Human
uaaugugaaaugua

SEQ ID NO: 3170941 - RNA, 19 nt, Human
uaaugugaaauguaacugu

SEQ ID NO: 3170942 - RNA, 23 nt, Human
uaaugugaaauguaacuguccgu

SEQ ID NO: 3170943 - RNA, 13 nt, Human
aaucuugaaaaug

SEQ ID NO: 3170944 - RNA, 13 nt, Human
uaauguggcuucu

SEQ ID NO: 3170945 - RNA, 12 nt, Human
aaaaacacagca

SEQ ID NO: 3170946 - RNA, 18 nt, Human
aaaaacacagcaagggug

SEQ ID NO: 3170947 - RNA, 13 nt, Human
aaaaacacagcaa

SEQ ID NO: 3170948 - RNA, 21 nt, Human
aaaaaauucagugaugugccu

SEQ ID NO: 3170949 - RNA, 22 nt, Human
aaaaaccguguuugucucuucu

SEQ ID NO: 3170950 - RNA, 18 nt, Human
aaaaacagauuuggaaag

SEQ ID NO: 3170951 - RNA, 22 nt, Human
aaaaacucaaccaaaugguaca

SEQ ID NO: 3170952 - RNA, 18 nt, Human
aaaaacucaaccaaaugg

SEQ ID NO: 3170953 - RNA, 15 nt, Human
aaaaaauauuuuccu

SEQ ID NO: 3170954 - RNA, 22 nt, Human
aaaaaaugcugaacauugcaua

SEQ ID NO: 3170955 - RNA, 20 nt, Human
aaaaaaugcugaacauugca

SEQ ID NO: 3170956 - RNA, 12 nt, Human
aaaaaauaucua

SEQ ID NO: 3170957 - RNA, 16 nt, Human
aauuaaaaaaaaauug

SEQ ID NO: 3170958 - RNA, 17 nt, Human
aauuaaaaaaaaauugu

SEQ ID NO: 3170959 - RNA, 18 nt, Human
aauuaaaaaaaaauugua

SEQ ID NO: 3170960 - RNA, 16 nt, Human
aaugcggccuuuucau

SEQ ID NO: 3170961 - RNA, 22 nt, Human
aaugcgcaggcuggcccugccc

SEQ ID NO: 3170962 - RNA, 21 nt, Human
aaugcgcaggcuggcccugcc

SEQ ID NO: 3170963 - RNA, 13 nt, Human
aaugccuuuguaa

SEQ ID NO: 3170964 - RNA, 23 nt, Human
aaugccuuuguaaccacaacuuu

SEQ ID NO: 3170965 - RNA, 20 nt, Human
aaugccugcuuuuuggaaag

SEQ ID NO: 3170966 - RNA, 21 nt, Human
aaugccugcuuuuuggaaagu

SEQ ID NO: 3170967 - RNA, 23 nt, Human
aaugcuauaacuauguugauaaa

SEQ ID NO: 3170968 - RNA, 18 nt, Human
aaugcuaugucauuucau

SEQ ID NO: 3170969 - RNA, 17 nt, Human
aaugcuaugucauuuca

SEQ ID NO: 3170970 - RNA, 16 nt, Human
aaugcuaugucauuuc

SEQ ID NO: 3170971 - RNA, 15 nt, Human
aaugcuaugucauuu

SEQ ID NO: 3170972 - RNA, 13 nt, Human
aaugcugauuuaa

SEQ ID NO: 3170973 - RNA, 23 nt, Human
aaugcugacccaugggcaggaga

SEQ ID NO: 3170974 - RNA, 22 nt, Human
aaugcugacccaugggcaggag

SEQ ID NO: 3170975 - RNA, 17 nt, Human
aaugcugacccaugggc

SEQ ID NO: 3170976 - RNA, 15 nt, Human
aaugcugacccaugg

SEQ ID NO: 3170977 - RNA, 15 nt, Human
aaugcugaaaauugc

SEQ ID NO: 3170978 - RNA, 18 nt, Human
aaugcugaacauugcaua

SEQ ID NO: 3170979 - RNA, 21 nt, Human
aaugcuaugucauuucauguc

SEQ ID NO: 3170980 - RNA, 22 nt, Human
aaugcuggagaaaaauaucugu

SEQ ID NO: 3170981 - RNA, 20 nt, Human
aaugcuggcuggccuugugg

SEQ ID NO: 3170982 - RNA, 23 nt, Human
aaugcuggcuggccuuguggucc

SEQ ID NO: 3170983 - RNA, 13 nt, Human
aaugucaguaugu

SEQ ID NO: 3170984 - RNA, 15 nt, Human
aaugucaguaugugg

SEQ ID NO: 3170985 - RNA, 21 nt, Human
aaugucauaaagugagaaaac

SEQ ID NO: 3170986 - RNA, 23 nt, Human
aaugucauaaagugagaaaacug

SEQ ID NO: 3170987 - RNA, 17 nt, Human
aauguccaguaagauca

SEQ ID NO: 3170988 - RNA, 16 nt, Human
aauguuuauuaaaugc

SEQ ID NO: 3170989 - RNA, 22 nt, Human
aauguuuacagauccccaagcc

SEQ ID NO: 3170990 - RNA, 12 nt, Human
aauguuuacaaa

SEQ ID NO: 3170991 - RNA, 15 nt, Human
aauguuugccucugc

SEQ ID NO: 3170992 - RNA, 12 nt, Human
aauguuucuaag

SEQ ID NO: 3170993 - RNA, 15 nt, Human
aauguuucauuugca

SEQ ID NO: 3170994 - RNA, 15 nt, Human
aaugugaaaagaaaa

SEQ ID NO: 3170995 - RNA, 20 nt, Human
aauguuuaagcagaauugga

SEQ ID NO: 3170996 - RNA, 15 nt, Human
aauguuuaagcagaa

SEQ ID NO: 3170997 - RNA, 22 nt, Human
aauguuuaagcagaauuggaaa

SEQ ID NO: 3170998 - RNA, 21 nt, Human
aauguuuaagcagaauuggaa

SEQ ID NO: 3170999 - RNA, 15 nt, Human
aaugugaaaaaucug

SEQ ID NO: 3171000 - RNA, 18 nt, Human
aaugugaaaaaucugcug

SEQ ID NO: 3171001 - RNA, 15 nt, Human
aaugucuuuccaaau

SEQ ID NO: 3171002 - RNA, 23 nt, Human
aaugucuuuccaaauuauuucuu

SEQ ID NO: 3171003 - RNA, 19 nt, Human
aauguccaguaagaucacu

SEQ ID NO: 3171004 - RNA, 20 nt, Human
aauguccaguaagaucacug

SEQ ID NO: 3171005 - RNA, 22 nt, Human
aauguccaguaagaucacuguu

SEQ ID NO: 3171006 - RNA, 13 nt, Human
aauauuaaaaaac

SEQ ID NO: 3171007 - RNA, 21 nt, Human
aauauuaaaaaacuucaugua

SEQ ID NO: 3171008 - RNA, 20 nt, Human
aauauaugccuuguauaaua

SEQ ID NO: 3171009 - RNA, 21 nt, Human
aauauaugccuuguauaauau

SEQ ID NO: 3171010 - RNA, 15 nt, Human
aauagacaaaaagua

SEQ ID NO: 3171011 - RNA, 17 nt, Human
aauagacaaaaaguaua

SEQ ID NO: 3171012 - RNA, 18 nt, Human
aauagacaaaaaguauau

SEQ ID NO: 3171013 - RNA, 20 nt, Human
aauauacucauuagaauuac

SEQ ID NO: 3171014 - RNA, 20 nt, Human
aauauacauguuuauguaaa

SEQ ID NO: 3171015 - RNA, 18 nt, Human
aauauacauguuuaugua

SEQ ID NO: 3171016 - RNA, 16 nt, Human
aaucacccuaccaacu

SEQ ID NO: 3171017 - RNA, 14 nt, Human
aaucaccgaaaacg

SEQ ID NO: 3171018 - RNA, 19 nt, Human
aaucacauucgaguguuuc

SEQ ID NO: 3171019 - RNA, 17 nt, Human
aaucaaguauuauaaac

SEQ ID NO: 3171020 - RNA, 14 nt, Human
aaucaaguaaugaa

SEQ ID NO: 3171021 - RNA, 15 nt, Human
aaucaaguaaugaau

SEQ ID NO: 3171022 - RNA, 20 nt, Human
aaucaccagggccaaaagcu

SEQ ID NO: 3171023 - RNA, 15 nt, Human
aaucaagaaacuuaa

SEQ ID NO: 3171024 - RNA, 17 nt, Human
aaucaagagccuuaaaa

SEQ ID NO: 3171025 - RNA, 19 nt, Human
aaucaagagccuuaaaaca

SEQ ID NO: 3171026 - RNA, 13 nt, Human
aauauuauauuug

SEQ ID NO: 3171027 - RNA, 19 nt, Human
aauauuauauuuggaugca

SEQ ID NO: 3171028 - RNA, 17 nt, Human
aauauuauauuuggaug

SEQ ID NO: 3171029 - RNA, 21 nt, Human
aaucaagagccuuaaaacauc

SEQ ID NO: 3171030 - RNA, 22 nt, Human
aaucaagagccuuaaaacauca

SEQ ID NO: 3171031 - RNA, 21 nt, Human
aauauuagugaccucagcuuu

SEQ ID NO: 3171032 - RNA, 20 nt, Human
aauauuaaaaagucuuuuaa

SEQ ID NO: 3171033 - RNA, 21 nt, Human
aauauuaaaaagucuuuuaaa

SEQ ID NO: 3171034 - RNA, 12 nt, Human
aauauuaaaaga

SEQ ID NO: 3171035 - RNA, 13 nt, Human
aauauuaaaagaa

SEQ ID NO: 3171036 - RNA, 19 nt, Human
aauauuaaaaagucuuuua

SEQ ID NO: 3171037 - RNA, 17 nt, Human
aauauuaaaaagucuuu

SEQ ID NO: 3171038 - RNA, 16 nt, Human
aauauuaaaaagucuu

SEQ ID NO: 3171039 - RNA, 13 nt, Human
aauauuaaaaagu

SEQ ID NO: 3171040 - RNA, 20 nt, Human
aauacucuacccucuuagaa

SEQ ID NO: 3171041 - RNA, 22 nt, Human
aauacucuacccucuuagaaaa

SEQ ID NO: 3171042 - RNA, 13 nt, Human
aauacugaaccac

SEQ ID NO: 3171043 - RNA, 14 nt, Human
aauacugaaccacu

SEQ ID NO: 3171044 - RNA, 15 nt, Human
aauacugaaccacuu

SEQ ID NO: 3171045 - RNA, 12 nt, Human
aauacucuauuu

SEQ ID NO: 3171046 - RNA, 17 nt, Human
aauacucuauuuuuaca

SEQ ID NO: 3171047 - RNA, 18 nt, Human
aauacucuauuuuuacau

SEQ ID NO: 3171048 - RNA, 23 nt, Human
aauacuuugcagcacagcugaga

SEQ ID NO: 3171049 - RNA, 12 nt, Human
aauacuuuguau

SEQ ID NO: 3171050 - RNA, 17 nt, Human
aauacuuuguauacaag

SEQ ID NO: 3171051 - RNA, 23 nt, Human
aauacuuuguauacaaguacugg

SEQ ID NO: 3171052 - RNA, 18 nt, Human
aauacugaaccacuugua

SEQ ID NO: 3171053 - RNA, 18 nt, Human
aauacugauggaauuuuu

SEQ ID NO: 3171054 - RNA, 20 nt, Human
aauacugaaccacuuguaga

SEQ ID NO: 3171055 - RNA, 23 nt, Human
aauacugacuccaaccauucaaa

SEQ ID NO: 3171056 - RNA, 13 nt, Human
aauacugcuugaa

SEQ ID NO: 3171057 - RNA, 22 nt, Human
aauacuguacaaugacuuuauu

SEQ ID NO: 3171058 - RNA, 15 nt, Human
aauacuguuauucuu

SEQ ID NO: 3171059 - RNA, 14 nt, Human
aauacuguuauucu

SEQ ID NO: 3171060 - RNA, 17 nt, Human
aauccagacccggcugc

SEQ ID NO: 3171061 - RNA, 19 nt, Human
aauccagacccggcugcgu

SEQ ID NO: 3171062 - RNA, 22 nt, Human
aaucucaacaugucuccuacug

SEQ ID NO: 3171063 - RNA, 23 nt, Human
aauccaggacccugccaggcaca

SEQ ID NO: 3171064 - RNA, 19 nt, Human
aauccaggacccugccagg

SEQ ID NO: 3171065 - RNA, 16 nt, Human
aaucucuucuguguuu

SEQ ID NO: 3171066 - RNA, 19 nt, Human
aaucucuucuuauacagau

SEQ ID NO: 3171067 - RNA, 12 nt, Human
aaucucuucugu

SEQ ID NO: 3171068 - RNA, 11 nt, Human
aaucucuucug

SEQ ID NO: 3171069 - RNA, 17 nt, Human
aaugaucgaaaaaauaa

SEQ ID NO: 3171070 - RNA, 18 nt, Human
aaugaucgaaaaaauaau

SEQ ID NO: 3171071 - RNA, 21 nt, Human
aaugaucgaaaaaauaauuau

SEQ ID NO: 3171072 - RNA, 23 nt, Human
aaugaucgaaaaaauaauuauuu

SEQ ID NO: 3171073 - RNA, 16 nt, Human
aaugauuaauuaaaac

SEQ ID NO: 3171074 - RNA, 22 nt, Human
aaugaagguuuuuguaaagauu

SEQ ID NO: 3171075 - RNA, 20 nt, Human
aaugaagguuuuuguaaaga

SEQ ID NO: 3171076 - RNA, 19 nt, Human
aaugaagguuuuuguaaag

SEQ ID NO: 3171077 - RNA, 19 nt, Human
aaugaaauaggagggaaac

SEQ ID NO: 3171078 - RNA, 23 nt, Human
aaugaaauaggagggaaaccuuu

SEQ ID NO: 3171079 - RNA, 15 nt, Human
aaugaagguuuuugu

SEQ ID NO: 3171080 - RNA, 20 nt, Human
aagucucauagguuaaaaaa

SEQ ID NO: 3171081 - RNA, 21 nt, Human
aagucucauagguuaaaaaaa

SEQ ID NO: 3171082 - RNA, 16 nt, Human
aagucucuuuuuuaca

SEQ ID NO: 3171083 - RNA, 15 nt, Human
aagucucuuuuuuac

SEQ ID NO: 3171084 - RNA, 14 nt, Human
aagucucuuuuuua

SEQ ID NO: 3171085 - RNA, 18 nt, Human
aagucucuuuuuuacaaa

SEQ ID NO: 3171086 - RNA, 20 nt, Human
aagucuguugauuaaagaug

SEQ ID NO: 3171087 - RNA, 18 nt, Human
aaguugaguauauuauaa

SEQ ID NO: 3171088 - RNA, 16 nt, Human
aaguugaguauauuau

SEQ ID NO: 3171089 - RNA, 19 nt, Human
aaguugagcuaugacuuaa

SEQ ID NO: 3171090 - RNA, 20 nt, Human
aaguugagcuaugacuuaac

SEQ ID NO: 3171091 - RNA, 16 nt, Human
aaguugagcuaugacu

SEQ ID NO: 3171092 - RNA, 18 nt, Human
aaguugagcuaugacuua

SEQ ID NO: 3171093 - RNA, 21 nt, Human
aaguugacucugcucuugcau

SEQ ID NO: 3171094 - RNA, 20 nt, Human
aaguugacucugcucuugca

SEQ ID NO: 3171095 - RNA, 15 nt, Human
aaguguacuggauuu

SEQ ID NO: 3171096 - RNA, 19 nt, Human
aaguggaaaaauagccugc

SEQ ID NO: 3171097 - RNA, 21 nt, Human
aaguggaaaaauagccugccu

SEQ ID NO: 3171098 - RNA, 15 nt, Human
aaggugauaaaauca

SEQ ID NO: 3171099 - RNA, 13 nt, Human
aaggugauguugu

SEQ ID NO: 3171100 - RNA, 17 nt, Human
aaggugagcauaaauca

SEQ ID NO: 3171101 - RNA, 20 nt, Human
aaguagaagucuuagaugua

SEQ ID NO: 3171102 - RNA, 19 nt, Human
aaguagaagucuuagaugu

SEQ ID NO: 3171103 - RNA, 14 nt, Human
aaggugcaggcagg

SEQ ID NO: 3171104 - RNA, 22 nt, Human
aaggugauaaaaucauaaguau

SEQ ID NO: 3171105 - RNA, 19 nt, Human
aaggugauaagggaaaaga

SEQ ID NO: 3171106 - RNA, 17 nt, Human
aaguagaacuuuguaua

SEQ ID NO: 3171107 - RNA, 18 nt, Human
aaguagaacuuuguauag

SEQ ID NO: 3171108 - RNA, 21 nt, Human
aaguagggacuucugucuuca

SEQ ID NO: 3171109 - RNA, 20 nt, Human
aaguaggggaagaauaauuu

SEQ ID NO: 3171110 - RNA, 19 nt, Human
aaguaggggaagaauaauu

SEQ ID NO: 3171111 - RNA, 17 nt, Human
aaguaggggaagaauaa

SEQ ID NO: 3171112 - RNA, 21 nt, Human
aaguagaagucuuagauguau

SEQ ID NO: 3171113 - RNA, 21 nt, Human
aaguagaacuuuguauaguua

SEQ ID NO: 3171114 - RNA, 23 nt, Human
aaguagaacuuuguauaguuaug

SEQ ID NO: 3171115 - RNA, 18 nt, Human
aagucuaucugguauuaa

SEQ ID NO: 3171116 - RNA, 13 nt, Human
aagucucaaggua

SEQ ID NO: 3171117 - RNA, 17 nt, Human
aagucucaaugaaauag

SEQ ID NO: 3171118 - RNA, 22 nt, Human
aaguccucuuuucugagaggac

SEQ ID NO: 3171119 - RNA, 20 nt, Human
aaguccuuugagcuccuggg

SEQ ID NO: 3171120 - RNA, 22 nt, Human
aaguccuuggcuugccauuuuu

SEQ ID NO: 3171121 - RNA, 18 nt, Human
aaguccuuugagcuccug

SEQ ID NO: 3171122 - RNA, 16 nt, Human
aagucgguuaaaaugg

SEQ ID NO: 3171123 - RNA, 18 nt, Human
aaguaguacuucuucugu

SEQ ID NO: 3171124 - RNA, 19 nt, Human
aaguaguacuucuucugua

SEQ ID NO: 3171125 - RNA, 20 nt, Human
aaguaguacuucuucuguaa

SEQ ID NO: 3171126 - RNA, 22 nt, Human
aaguaguacuucuucuguaaua

SEQ ID NO: 3171127 - RNA, 17 nt, Human
aaguccaagcauaccaa

SEQ ID NO: 3171128 - RNA, 21 nt, Human
aaguauccugagagcccagaa

SEQ ID NO: 3171129 - RNA, 22 nt, Human
aaguagugucuggaucaguaaa

SEQ ID NO: 3171130 - RNA, 18 nt, Human
aaguccucuuuucugaga

SEQ ID NO: 3171131 - RNA, 22 nt, Human
aagucccuguaauuguuguuug

SEQ ID NO: 3171132 - RNA, 17 nt, Human
aagggaaacugccagca

SEQ ID NO: 3171133 - RNA, 16 nt, Human
aagggaaacugccagc

SEQ ID NO: 3171134 - RNA, 20 nt, Human
aagggaaaaaucaaguauua

SEQ ID NO: 3171135 - RNA, 23 nt, Human
aagggaaacugccagcaacgcag

SEQ ID NO: 3171136 - RNA, 21 nt, Human
aagggaauagaaauguuugcu

SEQ ID NO: 3171137 - RNA, 16 nt, Human
aagggaggcccagcgc

SEQ ID NO: 3171138 - RNA, 18 nt, Human
aagggagcuggcuccagc

SEQ ID NO: 3171139 - RNA, 21 nt, Human
aagggaccagggagaugccac

SEQ ID NO: 3171140 - RNA, 21 nt, Human
aagcugugucugcccaaugaa

SEQ ID NO: 3171141 - RNA, 23 nt, Human
aagcugugucugcccaaugaaua

SEQ ID NO: 3171142 - RNA, 21 nt, Human
aagcuggucccacucagucca

SEQ ID NO: 3171143 - RNA, 18 nt, Human
aagcuggucccacucagu

SEQ ID NO: 3171144 - RNA, 15 nt, Human
aagcugggcagguug

SEQ ID NO: 3171145 - RNA, 21 nt, Human
aagcugugugcucuccaagcc

SEQ ID NO: 3171146 - RNA, 13 nt, Human
aaggacacuagaa

SEQ ID NO: 3171147 - RNA, 13 nt, Human
aaggacagccccu

SEQ ID NO: 3171148 - RNA, 19 nt, Human
aaggacagccccuccucca

SEQ ID NO: 3171149 - RNA, 21 nt, Human
aaggacaguccuauuuagaca

SEQ ID NO: 3171150 - RNA, 13 nt, Human
aaggacuuccuga

SEQ ID NO: 3171151 - RNA, 21 nt, Human
aaggcagcuguugucucuucu

SEQ ID NO: 3171152 - RNA, 18 nt, Human
aaggcagcuguugucucu

SEQ ID NO: 3171153 - RNA, 22 nt, Human
aaggcagcuguugucucuucuc

SEQ ID NO: 3171154 - RNA, 12 nt, Human
aaggcagggagg

SEQ ID NO: 3171155 - RNA, 15 nt, Human
aaggauugcuacugu

SEQ ID NO: 3171156 - RNA, 22 nt, Human
aaggacuuccugauugguuucu

SEQ ID NO: 3171157 - RNA, 15 nt, Human
aaggauguucuagca

SEQ ID NO: 3171158 - RNA, 16 nt, Human
aaggauuauggaaaaa

SEQ ID NO: 3171159 - RNA, 19 nt, Human
aaggauuauggaaaaauaa

SEQ ID NO: 3171160 - RNA, 20 nt, Human
aaggauuauggaaaaauaaa

SEQ ID NO: 3171161 - RNA, 17 nt, Human
aagcgauucuucugcuu

SEQ ID NO: 3171162 - RNA, 19 nt, Human
aagcgcccuggcccccaca

SEQ ID NO: 3171163 - RNA, 15 nt, Human
aagcgcccuggcccc

SEQ ID NO: 3171164 - RNA, 14 nt, Human
aagcgcccuggccc

SEQ ID NO: 3171165 - RNA, 13 nt, Human
aagcgcccuggcc

SEQ ID NO: 3171166 - RNA, 21 nt, Human
aagcgauucuucugcuucagc

SEQ ID NO: 3171167 - RNA, 21 nt, Human
aagcgcccuggcccccacaug

SEQ ID NO: 3171168 - RNA, 17 nt, Human
aagcagcauaaagaauu

SEQ ID NO: 3171169 - RNA, 19 nt, Human
aagccagcaggcucucagg

SEQ ID NO: 3171170 - RNA, 20 nt, Human
aagccagcaggcucucaggc

SEQ ID NO: 3171171 - RNA, 23 nt, Human
aagccagcaggcucucaggccag

SEQ ID NO: 3171172 - RNA, 20 nt, Human
aagccagccaagcuuuaaau

SEQ ID NO: 3171173 - RNA, 22 nt, Human
aagccagccaagcuuuaaauua

SEQ ID NO: 3171174 - RNA, 20 nt, Human
aagauguucuggauaccauu

SEQ ID NO: 3171175 - RNA, 15 nt, Human
aagauguucuggaua

SEQ ID NO: 3171176 - RNA, 15 nt, Human
aagauguguucuuau

SEQ ID NO: 3171177 - RNA, 16 nt, Human
aagauguguucuuauu

SEQ ID NO: 3171178 - RNA, 17 nt, Human
aagauguguucuuauuu

SEQ ID NO: 3171179 - RNA, 18 nt, Human
aagauguguucuuauuuu

SEQ ID NO: 3171180 - RNA, 14 nt, Human
aagauguuauauuu

SEQ ID NO: 3171181 - RNA, 12 nt, Human
aagauguuauau

SEQ ID NO: 3171182 - RNA, 22 nt, Human
aagauguuauauuuuucuuaaa

SEQ ID NO: 3171183 - RNA, 18 nt, Human
aagauguuauauuuuucu

SEQ ID NO: 3171184 - RNA, 16 nt, Human
aagauguuauauuuuu

SEQ ID NO: 3171185 - RNA, 13 nt, Human
aagauaaaugugc

SEQ ID NO: 3171186 - RNA, 12 nt, Human
aagauaaaugug

SEQ ID NO: 3171187 - RNA, 18 nt, Human
aagauaaaaaaacagcuu

SEQ ID NO: 3171188 - RNA, 21 nt, Human
aagauaccuuuuuuuuucuuu

SEQ ID NO: 3171189 - RNA, 20 nt, Human
aagauaccuuuuuuuuucuu

SEQ ID NO: 3171190 - RNA, 18 nt, Human
aagauaccuuuuuuuuuc

SEQ ID NO: 3171191 - RNA, 23 nt, Human
aagauaccuuaaaauuugaaaca

SEQ ID NO: 3171192 - RNA, 21 nt, Human
aagauaccuuaaaauuugaaa

SEQ ID NO: 3171193 - RNA, 20 nt, Human
aagauaccuuaaaauuugaa

SEQ ID NO: 3171194 - RNA, 19 nt, Human
aagauaccuuaaaauuuga

SEQ ID NO: 3171195 - RNA, 18 nt, Human
aagauaccuuaaaauuug

SEQ ID NO: 3171196 - RNA, 17 nt, Human
aagauaccuuaaaauuu

SEQ ID NO: 3171197 - RNA, 16 nt, Human
aagauaccuuaaaauu

SEQ ID NO: 3171198 - RNA, 15 nt, Human
aagauaccuuaaaau

SEQ ID NO: 3171199 - RNA, 14 nt, Human
aagauaccuuaaaa

SEQ ID NO: 3171200 - RNA, 18 nt, Human
aagauaaagaccagaaau

SEQ ID NO: 3171201 - RNA, 15 nt, Human
aagaguggccccacc

SEQ ID NO: 3171202 - RNA, 22 nt, Human
aagaguggcagcuauaggaaau

SEQ ID NO: 3171203 - RNA, 21 nt, Human
aagaguggccccaccuggccc

SEQ ID NO: 3171204 - RNA, 19 nt, Human
aagaguggccccaccuggc

SEQ ID NO: 3171205 - RNA, 17 nt, Human
aagaguggccccaccug

SEQ ID NO: 3171206 - RNA, 16 nt, Human
aagaguggccccaccu

SEQ ID NO: 3171207 - RNA, 22 nt, Human
aagaguggccccaccuggcccu

SEQ ID NO: 3171208 - RNA, 17 nt, Human
aagaguguaaaauauuu

SEQ ID NO: 3171209 - RNA, 15 nt, Human
aagaguguaaaauau

SEQ ID NO: 3171210 - RNA, 19 nt, Human
aagaguuugccuuauaaau

SEQ ID NO: 3171211 - RNA, 17 nt, Human
aagagucuggggaccag

SEQ ID NO: 3171212 - RNA, 16 nt, Human
aagagucuuucuucuu

SEQ ID NO: 3171213 - RNA, 13 nt, Human
aagagucuuucuu

SEQ ID NO: 3171214 - RNA, 22 nt, Human
aagagugaaauaccauuauuau

SEQ ID NO: 3171215 - RNA, 15 nt, Human
aagagucuauugucu

SEQ ID NO: 3171216 - RNA, 16 nt, Human
aagagucuauugucuc

SEQ ID NO: 3171217 - RNA, 19 nt, Human
aacuuucaagaacuuguuu

SEQ ID NO: 3171218 - RNA, 16 nt, Human
aacuuucaagaacuug

SEQ ID NO: 3171219 - RNA, 22 nt, Human
aacuuucacuauaaugugaaau

SEQ ID NO: 3171220 - RNA, 21 nt, Human
aacuuucaagaacuuguuuaa

SEQ ID NO: 3171221 - RNA, 19 nt, Human
aaccaccagaagcccagaa

SEQ ID NO: 3171222 - RNA, 18 nt, Human
aaccaccagaagcccaga

SEQ ID NO: 3171223 - RNA, 16 nt, Human
aacauccacucucucu

SEQ ID NO: 3171224 - RNA, 13 nt, Human
aaccacgcuggac

SEQ ID NO: 3171225 - RNA, 15 nt, Human
aacauccacucucuc

SEQ ID NO: 3171226 - RNA, 13 nt, Human
aacauccacucuc

SEQ ID NO: 3171227 - RNA, 16 nt, Human
aacauccaaguggccu

SEQ ID NO: 3171228 - RNA, 24 nt, Human
aacauccaaguggccuccgucacu

SEQ ID NO: 3171229 - RNA, 17 nt, Human
aacauccaaguggccuc

SEQ ID NO: 3171230 - RNA, 15 nt, Human
aacagcuucauguuc

SEQ ID NO: 3171231 - RNA, 15 nt, Human
aacagcuguugacuc

SEQ ID NO: 3171232 - RNA, 14 nt, Human
aacaucauuccuuu

SEQ ID NO: 3171233 - RNA, 22 nt, Human
aacagcuucauguucccaaaau

SEQ ID NO: 3171234 - RNA, 17 nt, Human
aacaucauuccuuuuua

SEQ ID NO: 3171235 - RNA, 20 nt, Human
aacaucauuccuuuuuauuu

SEQ ID NO: 3171236 - RNA, 21 nt, Human
aacaucauuccuuuuuauuua

SEQ ID NO: 3171237 - RNA, 22 nt, Human
aacaucauuccuuuuuauuuau

SEQ ID NO: 3171238 - RNA, 15 nt, Human
aaccaccuaccccug

SEQ ID NO: 3171239 - RNA, 16 nt, Human
aaccaccuauuuuuga

SEQ ID NO: 3171240 - RNA, 15 nt, Human
aaccacuucagcuga

SEQ ID NO: 3171241 - RNA, 12 nt, Human
aaccagacacaa

SEQ ID NO: 3171242 - RNA, 22 nt, Human
aaccacuuguagauuugauuuu

SEQ ID NO: 3171243 - RNA, 17 nt, Human
aaccacuuguagauuug

SEQ ID NO: 3171244 - RNA, 18 nt, Human
aaccacuuguagauuuga

SEQ ID NO: 3171245 - RNA, 20 nt, Human
aaccacuuguagauuugauu

SEQ ID NO: 3171246 - RNA, 21 nt, Human
aaccacuuguagauuugauuu

SEQ ID NO: 3171247 - RNA, 12 nt, Human
aaccacuuguag

SEQ ID NO: 3171248 - RNA, 16 nt, Human
aacccgggaggcagag

SEQ ID NO: 3171249 - RNA, 16 nt, Human
aacccuugccaggucc

SEQ ID NO: 3171250 - RNA, 21 nt, Human
aacccuuggagccaauggaga

SEQ ID NO: 3171251 - RNA, 16 nt, Human
aacccuucuucauguu

SEQ ID NO: 3171252 - RNA, 15 nt, Human
aacccuauugguaaa

SEQ ID NO: 3171253 - RNA, 14 nt, Human
aaccuaauuaauau

SEQ ID NO: 3171254 - RNA, 18 nt, Human
aaccuaauuaauauauua

SEQ ID NO: 3171255 - RNA, 18 nt, Human
aacagcaguuucagguag

SEQ ID NO: 3171256 - RNA, 15 nt, Human
aacagcaagugugaa

SEQ ID NO: 3171257 - RNA, 16 nt, Human
aacagcaagugugaau

SEQ ID NO: 3171258 - RNA, 16 nt, Human
aaaucuuauuaaaguu

SEQ ID NO: 3171259 - RNA, 14 nt, Human
aaaucuuauuaaag

SEQ ID NO: 3171260 - RNA, 12 nt, Human
aaaucuuauuaa

SEQ ID NO: 3171261 - RNA, 23 nt, Human
aaaucuuaauacuguuauucuuu

SEQ ID NO: 3171262 - RNA, 19 nt, Human
aaaucuuaauacuguuauu

SEQ ID NO: 3171263 - RNA, 22 nt, Human
aaauguuguucucuucuuuaaa

SEQ ID NO: 3171264 - RNA, 12 nt, Human
aaauguuucuaa

SEQ ID NO: 3171265 - RNA, 19 nt, Human
aaauugacacuuaaaaaug

SEQ ID NO: 3171266 - RNA, 21 nt, Human
aaauugccuuucuguguuuau

SEQ ID NO: 3171267 - RNA, 20 nt, Human
aaauugccuuucuguguuua

SEQ ID NO: 3171268 - RNA, 19 nt, Human
aaauugccuuucuguguuu

SEQ ID NO: 3171269 - RNA, 16 nt, Human
aaauugccuuucugug

SEQ ID NO: 3171270 - RNA, 14 nt, Human
aaauugccuuucug

SEQ ID NO: 3171271 - RNA, 20 nt, Human
aaauuuuuuuguaugaaaac

SEQ ID NO: 3171272 - RNA, 14 nt, Human
aaauugcuccuuga

SEQ ID NO: 3171273 - RNA, 23 nt, Human
aaauugcucacaguuauuacaua

SEQ ID NO: 3171274 - RNA, 18 nt, Human
aaauugcucacaguuauu

SEQ ID NO: 3171275 - RNA, 15 nt, Human
aaauugcucacaguu

SEQ ID NO: 3171276 - RNA, 13 nt, Human
aaauugcuccuug

SEQ ID NO: 3171277 - RNA, 17 nt, Human
aaauuaaagcugaaaac

SEQ ID NO: 3171278 - RNA, 13 nt, Human
aaauuaaagcuga

SEQ ID NO: 3171279 - RNA, 14 nt, Human
aaauugaaaaguua

SEQ ID NO: 3171280 - RNA, 21 nt, Human
aaauugaaaaguuauuucccu

SEQ ID NO: 3171281 - RNA, 16 nt, Human
aacacaucagcuugcc

SEQ ID NO: 3171282 - RNA, 12 nt, Human
aacacaucagcu

SEQ ID NO: 3171283 - RNA, 18 nt, Human
aacaaauuuacagagaca

SEQ ID NO: 3171284 - RNA, 20 nt, Human
aacaacagucuucauuuuuu

SEQ ID NO: 3171285 - RNA, 14 nt, Human
aacaacauauacaa

SEQ ID NO: 3171286 - RNA, 17 nt, Human
aacaacauuuauaugua

SEQ ID NO: 3171287 - RNA, 23 nt, Human
aaauuuuuuuucaugcuuuauca

SEQ ID NO: 3171288 - RNA, 12 nt, Human
aacacauuucuu

SEQ ID NO: 3171289 - RNA, 22 nt, Human
aacacauuucuuuuuaaaaaaa

SEQ ID NO: 3171290 - RNA, 15 nt, Human
aacacauuucuuuuu

SEQ ID NO: 3171291 - RNA, 18 nt, Human
aacaccaucacagcuugu

SEQ ID NO: 3171292 - RNA, 15 nt, Human
aacacccacaggcau

SEQ ID NO: 3171293 - RNA, 13 nt, Human
aacacuaaauguu

SEQ ID NO: 3171294 - RNA, 15 nt, Human
aacacuaaauguuaa

SEQ ID NO: 3171295 - RNA, 14 nt, Human
aacacuaaauguua

SEQ ID NO: 3171296 - RNA, 13 nt, Human
aacacguuuuaag

SEQ ID NO: 3171297 - RNA, 22 nt, Human
aacacuaaauguuaaagaugua

SEQ ID NO: 3171298 - RNA, 21 nt, Human
aacacuaaauguuaaagaugu

SEQ ID NO: 3171299 - RNA, 19 nt, Human
aacacuaaauguuaaagau

SEQ ID NO: 3171300 - RNA, 18 nt, Human
aacacuaaauguuaaaga

SEQ ID NO: 3171301 - RNA, 16 nt, Human
aacacuaaauguuaaa

SEQ ID NO: 3171302 - RNA, 20 nt, Human
aacuuuaugcuaagugaaau

SEQ ID NO: 3171303 - RNA, 21 nt, Human
aacuuuaugcuaagugaaaua

SEQ ID NO: 3171304 - RNA, 22 nt, Human
aacuuuaucagggaaacuaaga

SEQ ID NO: 3171305 - RNA, 20 nt, Human
aacugagaugugaacacauc

SEQ ID NO: 3171306 - RNA, 19 nt, Human
aacugaccagccuccaugc

SEQ ID NO: 3171307 - RNA, 13 nt, Human
aacugacuugcug

SEQ ID NO: 3171308 - RNA, 16 nt, Human
aacugagugccuuuug

SEQ ID NO: 3171309 - RNA, 19 nt, Human
aacuuaaauuuuaguucuu

SEQ ID NO: 3171310 - RNA, 12 nt, Human
aacuuaacaugc

SEQ ID NO: 3171311 - RNA, 13 nt, Human
aacuuaacaugcu

SEQ ID NO: 3171312 - RNA, 15 nt, Human
aacuuaacaugcugu

SEQ ID NO: 3171313 - RNA, 15 nt, Human
aacuuaauaaucaag

SEQ ID NO: 3171314 - RNA, 17 nt, Human
aacuuaauaaucaagag

SEQ ID NO: 3171315 - RNA, 13 nt, Human
aacuuaauaauca

SEQ ID NO: 3171316 - RNA, 20 nt, Human
aacuuaauaaucaagagccu

SEQ ID NO: 3171317 - RNA, 15 nt, Human
aacgauccuucaaag

SEQ ID NO: 3171318 - RNA, 22 nt, Human
aacgaucacaaaugacuuuauu

SEQ ID NO: 3171319 - RNA, 15 nt, Human
aacgauuuaauuuau

SEQ ID NO: 3171320 - RNA, 11 nt, Human
aacgcagcccu

SEQ ID NO: 3171321 - RNA, 15 nt, Human
aacgcugauuuaaag

SEQ ID NO: 3171322 - RNA, 17 nt, Human
aacuauuuaaagaaaua

SEQ ID NO: 3171323 - RNA, 15 nt, Human
aacuauuuaaagaaa

SEQ ID NO: 3171324 - RNA, 14 nt, Human
aacggccccagcuu

SEQ ID NO: 3171325 - RNA, 17 nt, Human
aacggccccagcuucuc

SEQ ID NO: 3171326 - RNA, 15 nt, Human
aacggccccagcuuc

SEQ ID NO: 3171327 - RNA, 17 nt, Human
aaagccaaugugaacag

SEQ ID NO: 3171328 - RNA, 15 nt, Human
aaagccaaugugaac

SEQ ID NO: 3171329 - RNA, 23 nt, Human
aaagcccuuccaugucgccucug

SEQ ID NO: 3171330 - RNA, 22 nt, Human
aaagcccuuccaugucgccucu

SEQ ID NO: 3171331 - RNA, 16 nt, Human
aaaggcaaacauuuga

SEQ ID NO: 3171332 - RNA, 14 nt, Human
aaaggcagaagcaa

SEQ ID NO: 3171333 - RNA, 21 nt, Human
aaaggcacauggaauauauuu

SEQ ID NO: 3171334 - RNA, 20 nt, Human
aaaggcacauggaauauauu

SEQ ID NO: 3171335 - RNA, 12 nt, Human
aaaggcccagag

SEQ ID NO: 3171336 - RNA, 15 nt, Human
aaaggcuccaggagc

SEQ ID NO: 3171337 - RNA, 16 nt, Human
aaaggcuccaggagca

SEQ ID NO: 3171338 - RNA, 21 nt, Human
aaaggccuaauucuaugccug

SEQ ID NO: 3171339 - RNA, 12 nt, Human
aaauaaaacugu

SEQ ID NO: 3171340 - RNA, 22 nt, Human
aaaguggcaccugucugcucca

SEQ ID NO: 3171341 - RNA, 20 nt, Human
aaaguggcaccugucugcuc

SEQ ID NO: 3171342 - RNA, 18 nt, Human
aaaguggcaccugucugc

SEQ ID NO: 3171343 - RNA, 13 nt, Human
aaaguggaaaaau

SEQ ID NO: 3171344 - RNA, 14 nt, Human
aaagugcugggauu

SEQ ID NO: 3171345 - RNA, 18 nt, Human
aaagucucaaugaaauag

SEQ ID NO: 3171346 - RNA, 21 nt, Human
aaaguccauaccuuauauaug

SEQ ID NO: 3171347 - RNA, 19 nt, Human
aaaggcuccaggagcagcc

SEQ ID NO: 3171348 - RNA, 20 nt, Human
aaaggcuccaggagcagcca

SEQ ID NO: 3171349 - RNA, 17 nt, Human
aaauaaaucuacuguuu

SEQ ID NO: 3171350 - RNA, 21 nt, Human
aaauaaaugguuuggugcuuu

SEQ ID NO: 3171351 - RNA, 13 nt, Human
aaauaaauauacc

SEQ ID NO: 3171352 - RNA, 12 nt, Human
aaauaguuuauu

SEQ ID NO: 3171353 - RNA, 17 nt, Human
aaauaguuuauuuuaaa

SEQ ID NO: 3171354 - RNA, 20 nt, Human
aaauaguuuauuuuaaaaca

SEQ ID NO: 3171355 - RNA, 13 nt, Human
aaaucaaagugcu

SEQ ID NO: 3171356 - RNA, 21 nt, Human
aaauaguuuauuuuaaaacaa

SEQ ID NO: 3171357 - RNA, 14 nt, Human
aaaucaaauaugca

SEQ ID NO: 3171358 - RNA, 12 nt, Human
aaaucaaauaug

SEQ ID NO: 3171359 - RNA, 15 nt, Human
aaaucaaauaugcaa

SEQ ID NO: 3171360 - RNA, 14 nt, Human
aaaucaaagugcua

SEQ ID NO: 3171361 - RNA, 15 nt, Human
aaaucaaagugcuau

SEQ ID NO: 3171362 - RNA, 17 nt, Human
aaaucaaguauuauaaa

SEQ ID NO: 3171363 - RNA, 22 nt, Human
aaaucaaauaauaccuuagaag

SEQ ID NO: 3171364 - RNA, 17 nt, Human
aaaucuuaauacuguua

SEQ ID NO: 3171365 - RNA, 16 nt, Human
aaaucuuaauacuguu

SEQ ID NO: 3171366 - RNA, 15 nt, Human
aaaucuuaauacugu

SEQ ID NO: 3171367 - RNA, 16 nt, Human
aaaucuuaagaaauaa

SEQ ID NO: 3171368 - RNA, 14 nt, Human
aaaucugucugcug

SEQ ID NO: 3171369 - RNA, 12 nt, Human
aaaucugucugc

SEQ ID NO: 3171370 - RNA, 18 nt, Human
aaaucugcuuuuuaaaga

SEQ ID NO: 3171371 - RNA, 19 nt, Human
aaaucaaugcuauaacuau

SEQ ID NO: 3171372 - RNA, 17 nt, Human
aaaucaauaugcagaau

SEQ ID NO: 3171373 - RNA, 16 nt, Human
aaaucaauaugcagaa

SEQ ID NO: 3171374 - RNA, 20 nt, Human
aaaucaaucuguaaaacuaa

SEQ ID NO: 3171375 - RNA, 15 nt, Human
aaaucaauaguugaa

SEQ ID NO: 3171376 - RNA, 17 nt, Human
aaaucaauaguugaauu

SEQ ID NO: 3171377 - RNA, 23 nt, Human
aaaucaaguauuauaaacaagaa

SEQ ID NO: 3171378 - RNA, 24 nt, Human
aaauagcucaggugucccugcacu

SEQ ID NO: 3171379 - RNA, 19 nt, Human
aaauaggcuauuaaaaaag

SEQ ID NO: 3171380 - RNA, 14 nt, Human
aaauaggcuuuuua

SEQ ID NO: 3171381 - RNA, 13 nt, Human
aaauagugugaaa

SEQ ID NO: 3171382 - RNA, 15 nt, Human
aaauagugugaaaua

SEQ ID NO: 3171383 - RNA, 18 nt, Human
aaauagugugaaauauau

SEQ ID NO: 3171384 - RNA, 20 nt, Human
aaauaguguggaaauuaaga

SEQ ID NO: 3171385 - RNA, 21 nt, Human
aaauaguguggaaauuaagaa

SEQ ID NO: 3171386 - RNA, 19 nt, Human
aaauaguguuauugagaga

SEQ ID NO: 3171387 - RNA, 20 nt, Human
aaauaguugcauagcaguau

SEQ ID NO: 3171388 - RNA, 22 nt, Human
aaauaguugcauagcaguauau

SEQ ID NO: 3171389 - RNA, 23 nt, Human
aaauaguugcauagcaguauaug

SEQ ID NO: 3171390 - RNA, 23 nt, Human
aaauaguucugugacuaggaaaa

SEQ ID NO: 3171391 - RNA, 22 nt, Human
aaauaguucugugacuaggaaa

SEQ ID NO: 3171392 - RNA, 16 nt, Human
aaauaguucugugacu

SEQ ID NO: 3171393 - RNA, 18 nt, Human
aaauaggagggaaaccuu

SEQ ID NO: 3171394 - RNA, 19 nt, Human
aaauaggagggaaaccuuu

SEQ ID NO: 3171395 - RNA, 22 nt, Human
aaagaaaucuauagaaaguguu

SEQ ID NO: 3171396 - RNA, 21 nt, Human
aaagaaaucuauagaaagugu

SEQ ID NO: 3171397 - RNA, 18 nt, Human
aaagaaaucuauagaaag

SEQ ID NO: 3171398 - RNA, 15 nt, Human
aaagaaaucuauaga

SEQ ID NO: 3171399 - RNA, 23 nt, Human
aaacugagaugugaacacaucag

SEQ ID NO: 3171400 - RNA, 21 nt, Human
aaacugagaugugaacacauc

SEQ ID NO: 3171401 - RNA, 17 nt, Human
aaacucugaauuuaucu

SEQ ID NO: 3171402 - RNA, 15 nt, Human
aaacucugaauuuau

SEQ ID NO: 3171403 - RNA, 18 nt, Human
aaacucugaauuuaucuu

SEQ ID NO: 3171404 - RNA, 23 nt, Human
aaagaaaucuauagaaaguguuc

SEQ ID NO: 3171405 - RNA, 14 nt, Human
aaagaguaggaaga

SEQ ID NO: 3171406 - RNA, 20 nt, Human
aaagaagguuucagaaagaa

SEQ ID NO: 3171407 - RNA, 14 nt, Human
aaagagucuuucuu

SEQ ID NO: 3171408 - RNA, 17 nt, Human
aaagaaggaaagauggu

SEQ ID NO: 3171409 - RNA, 15 nt, Human
aaagauaaagaccag

SEQ ID NO: 3171410 - RNA, 16 nt, Human
aaagaguguaaaauau

SEQ ID NO: 3171411 - RNA, 18 nt, Human
aaagaguguaaaauauuu

SEQ ID NO: 3171412 - RNA, 18 nt, Human
aaaccccuguaggccuca

SEQ ID NO: 3171413 - RNA, 16 nt, Human
aaacccuauugguaaa

SEQ ID NO: 3171414 - RNA, 18 nt, Human
aaacucuccucugcugcu

SEQ ID NO: 3171415 - RNA, 15 nt, Human
aaacccugucaaaca

SEQ ID NO: 3171416 - RNA, 13 nt, Human
aaacucuccucug

SEQ ID NO: 3171417 - RNA, 18 nt, Human
aaacccucauuguguuuc

SEQ ID NO: 3171418 - RNA, 14 nt, Human
aaacccugucaaac

SEQ ID NO: 3171419 - RNA, 18 nt, Human
aaaccaucauugaaaucu

SEQ ID NO: 3171420 - RNA, 14 nt, Human
aaaauaaacuuucu

SEQ ID NO: 3171421 - RNA, 22 nt, Human
aaaauaaacuuucuuaauauuu

SEQ ID NO: 3171422 - RNA, 17 nt, Human
aaaaucaugccaguauu

SEQ ID NO: 3171423 - RNA, 18 nt, Human
aaaaucaugccaguauuu

SEQ ID NO: 3171424 - RNA, 19 nt, Human
aaaaucaugccaguauuuu

SEQ ID NO: 3171425 - RNA, 21 nt, Human
aaaaucuacacuccagugaga

SEQ ID NO: 3171426 - RNA, 22 nt, Human
aaaaucccuuaccucggugccu

SEQ ID NO: 3171427 - RNA, 18 nt, Human
aaaaguucugcagauaaa

SEQ ID NO: 3171428 - RNA, 17 nt, Human
aaaaguuauuaaaauug

SEQ ID NO: 3171429 - RNA, 15 nt, Human
aaaaguuauuaaaau

SEQ ID NO: 3171430 - RNA, 18 nt, Human
aaaaguugaagaucguga

SEQ ID NO: 3171431 - RNA, 15 nt, Human
aaaauaaaauaaaua

SEQ ID NO: 3171432 - RNA, 17 nt, Human
aaaauaaaauacuuuga

SEQ ID NO: 3171433 - RNA, 19 nt, Human
aaaauaaaauuaaagcuga

SEQ ID NO: 3171434 - RNA, 15 nt, Human
aaaaagaaaggaggg

SEQ ID NO: 3171435 - RNA, 20 nt, Human
aaaaacucuuuaacuuguaa

SEQ ID NO: 3171436 - RNA, 19 nt, Human
aaaaacucuuuaacuugua

SEQ ID NO: 3171437 - RNA, 13 nt, Human
aaaaagaaaaaag

SEQ ID NO: 3171438 - RNA, 11 nt, Human
aaaaagaaaaa

SEQ ID NO: 3171439 - RNA, 12 nt, Human
aaaaacugaagu

SEQ ID NO: 3171440 - RNA, 18 nt, Human
aaaaagaaagaaagagga

SEQ ID NO: 3171441 - RNA, 22 nt, Human
aaaagugcugcagggcuuuaaa

SEQ ID NO: 3171442 - RNA, 16 nt, Human
aaacacuguucucugc

SEQ ID NO: 3171443 - RNA, 20 nt, Human
aaacacuugugacuuuugcu

SEQ ID NO: 3171444 - RNA, 16 nt, Human
aaacacuugugacuuu

SEQ ID NO: 3171445 - RNA, 14 nt, Human
aaacacucagcugu

SEQ ID NO: 3171446 - RNA, 15 nt, Human
aaacacucagcuguu

SEQ ID NO: 3171447 - RNA, 16 nt, Human
aaacacucagcuguuc

SEQ ID NO: 3171448 - RNA, 17 nt, Human
aaacacguuuuaaggac

SEQ ID NO: 3171449 - RNA, 18 nt, Human
aaacacguuuuaaggacu

SEQ ID NO: 3171450 - RNA, 22 nt, Human
aaacacguuuuaaggacugacu

SEQ ID NO: 3171451 - RNA, 13 nt, Human
aaacacuaaaugu

SEQ ID NO: 3171452 - RNA, 22 nt, Human
aaacacuaaauguuaaagaugu

SEQ ID NO: 3171453 - RNA, 21 nt, Human
aaacacuaaauguuaaagaug

SEQ ID NO: 3171454 - RNA, 20 nt, Human
aaacacuaaauguuaaagau

SEQ ID NO: 3171455 - RNA, 19 nt, Human
aaacacuaaauguuaaaga

SEQ ID NO: 3171456 - RNA, 17 nt, Human
aaacacuaaauguuaaa

SEQ ID NO: 3171457 - RNA, 16 nt, Human
aaacacuaaauguuaa

SEQ ID NO: 3171458 - RNA, 15 nt, Human
aaacacuaaauguua

SEQ ID NO: 3171459 - RNA, 14 nt, Human
aaacacuaaauguu

SEQ ID NO: 3171460 - RNA, 14 nt, Human
aaacaccuucuaua

SEQ ID NO: 3171461 - RNA, 22 nt, Human
aaaauugaguucuuccuguaau

SEQ ID NO: 3171462 - RNA, 23 nt, Human
aaaauugaguucuuccuguaauc

SEQ ID NO: 3171463 - RNA, 14 nt, Human
aaacagaaauuggu

SEQ ID NO: 3171464 - RNA, 15 nt, Human
aaacagaaauuggua

SEQ ID NO: 3171465 - RNA, 20 nt, Human
accugcccugcugaguccca

SEQ ID NO: 3171466 - RNA, 14 nt, Human
accucugggagcug

SEQ ID NO: 3171467 - RNA, 13 nt, Human
accucugggagcu

SEQ ID NO: 3171468 - RNA, 15 nt, Human
accucugcuuuuauc

SEQ ID NO: 3171469 - RNA, 19 nt, Human
accucugcuuuuaucucag

SEQ ID NO: 3171470 - RNA, 24 nt, Human
accucugcuuuuaucucagauguu

SEQ ID NO: 3171471 - RNA, 20 nt, Human
accugucugcuccagcucug

SEQ ID NO: 3171472 - RNA, 17 nt, Human
accuguuaaaauuauac

SEQ ID NO: 3171473 - RNA, 19 nt, Human
accugucugcuccagcucu

SEQ ID NO: 3171474 - RNA, 14 nt, Human
accugucugcucca

SEQ ID NO: 3171475 - RNA, 13 nt, Human
accugucugcucc

SEQ ID NO: 3171476 - RNA, 11 nt, Human
accugucugcu

SEQ ID NO: 3171477 - RNA, 12 nt, Human
accugucccccu

SEQ ID NO: 3171478 - RNA, 15 nt, Human
accugucccccugac

SEQ ID NO: 3171479 - RNA, 16 nt, Human
accugucccccugaca

SEQ ID NO: 3171480 - RNA, 15 nt, Human
accuuuaagagaaau

SEQ ID NO: 3171481 - RNA, 20 nt, Human
accuuguuuauuaaauugca

SEQ ID NO: 3171482 - RNA, 16 nt, Human
accuuuaaucuguuuu

SEQ ID NO: 3171483 - RNA, 22 nt, Human
accuuuaaucagguccugcuca

SEQ ID NO: 3171484 - RNA, 18 nt, Human
accuuucccaucuuccaa

SEQ ID NO: 3171485 - RNA, 13 nt, Human
accuuucccaucu

SEQ ID NO: 3171486 - RNA, 17 nt, Human
accuuggcugcagggag

SEQ ID NO: 3171487 - RNA, 14 nt, Human
accuuggcugcagg

SEQ ID NO: 3171488 - RNA, 21 nt, Human
accuuggcuuggcccuggcag

SEQ ID NO: 3171489 - RNA, 20 nt, Human
accuuggcuuggcccuggca

SEQ ID NO: 3171490 - RNA, 17 nt, Human
accuuggcuuggcccug

SEQ ID NO: 3171491 - RNA, 12 nt, Human
accuuggcuugg

SEQ ID NO: 3171492 - RNA, 18 nt, Human
accuuggcugcagggagu

SEQ ID NO: 3171493 - RNA, 15 nt, Human
accuugguuggaagg

SEQ ID NO: 3171494 - RNA, 15 nt, Human
accuugguuccuggg

SEQ ID NO: 3171495 - RNA, 13 nt, Human
accuugguuccug

SEQ ID NO: 3171496 - RNA, 14 nt, Human
accuuguaauguaa

SEQ ID NO: 3171497 - RNA, 23 nt, Human
accucugccugaagucacacagu

SEQ ID NO: 3171498 - RNA, 19 nt, Human
accucugccuuugugguga

SEQ ID NO: 3171499 - RNA, 22 nt, Human
acuaacuucuaaaacuguacuu

SEQ ID NO: 3171500 - RNA, 19 nt, Human
acuaacuucuaaaacugua

SEQ ID NO: 3171501 - RNA, 18 nt, Human
acuaacuucuaaaacugu

SEQ ID NO: 3171502 - RNA, 21 nt, Human
acgugaugugcucaucagaaa

SEQ ID NO: 3171503 - RNA, 17 nt, Human
acuaacuucuaaaacug

SEQ ID NO: 3171504 - RNA, 11 nt, Human
acgugaguccu

SEQ ID NO: 3171505 - RNA, 22 nt, Human
acgucuauuucaucagaacagc

SEQ ID NO: 3171506 - RNA, 21 nt, Human
acgucuauuucaucagaacag

SEQ ID NO: 3171507 - RNA, 23 nt, Human
acuaagucucuuuuuuacaaagg

SEQ ID NO: 3171508 - RNA, 22 nt, Human
acuaagucucuuuuuuacaaag

SEQ ID NO: 3171509 - RNA, 15 nt, Human
acuaagucucuuuuu

SEQ ID NO: 3171510 - RNA, 21 nt, Human
acuaagucucuuuuuuacaaa

SEQ ID NO: 3171511 - RNA, 20 nt, Human
acuaagucucuuuuuuacaa

SEQ ID NO: 3171512 - RNA, 19 nt, Human
acuaagucucuuuuuuaca

SEQ ID NO: 3171513 - RNA, 18 nt, Human
acuaagucucuuuuuuac

SEQ ID NO: 3171514 - RNA, 22 nt, Human
acgcaggcccccaggugccagu

SEQ ID NO: 3171515 - RNA, 19 nt, Human
acgcaggcccccaggugcc

SEQ ID NO: 3171516 - RNA, 12 nt, Human
acgcugugcugc

SEQ ID NO: 3171517 - RNA, 14 nt, Human
acgcugugcugccc

SEQ ID NO: 3171518 - RNA, 11 nt, Human
acgcugugcug

SEQ ID NO: 3171519 - RNA, 15 nt, Human
acgccacauccccca

SEQ ID NO: 3171520 - RNA, 12 nt, Human
acgccacauccc

SEQ ID NO: 3171521 - RNA, 14 nt, Human
acgucugacaggca

SEQ ID NO: 3171522 - RNA, 17 nt, Human
acgucuagcuaugcugu

SEQ ID NO: 3171523 - RNA, 19 nt, Human
acgucuagcuaugcuguau

SEQ ID NO: 3171524 - RNA, 23 nt, Human
acgucuagcuaugcuguaucugu

SEQ ID NO: 3171525 - RNA, 18 nt, Human
acgucuauuucaucagaa

SEQ ID NO: 3171526 - RNA, 13 nt, Human
acgucugacaggc

SEQ ID NO: 3171527 - RNA, 18 nt, Human
acuauucaaacagucuca

SEQ ID NO: 3171528 - RNA, 21 nt, Human
acuauucaaacagucucagga

SEQ ID NO: 3171529 - RNA, 16 nt, Human
acuaguauuuguugag

SEQ ID NO: 3171530 - RNA, 14 nt, Human
acucaaaucaagaa

SEQ ID NO: 3171531 - RNA, 13 nt, Human
acucaaaagcugg

SEQ ID NO: 3171532 - RNA, 17 nt, Human
acucagcccucauuggc

SEQ ID NO: 3171533 - RNA, 21 nt, Human
acucagcccucauuggcucuu

SEQ ID NO: 3171534 - RNA, 18 nt, Human
acucaaaucuuaagaaau

SEQ ID NO: 3171535 - RNA, 22 nt, Human
acucaaaucuuaagaaauaaau

SEQ ID NO: 3171536 - RNA, 19 nt, Human
acucaguccauagcagaga

SEQ ID NO: 3171537 - RNA, 18 nt, Human
acuagauuacauucaguu

SEQ ID NO: 3171538 - RNA, 13 nt, Human
acuagauuacauu

SEQ ID NO: 3171539 - RNA, 15 nt, Human
acuagauuugggaga

SEQ ID NO: 3171540 - RNA, 13 nt, Human
acucuauggucuu

SEQ ID NO: 3171541 - RNA, 19 nt, Human
acucugucgcccagucugg

SEQ ID NO: 3171542 - RNA, 17 nt, Human
acucuauguucuaagaa

SEQ ID NO: 3171543 - RNA, 17 nt, Human
acucuaguacugugaau

SEQ ID NO: 3171544 - RNA, 16 nt, Human
acucuaguacugugaa

SEQ ID NO: 3171545 - RNA, 18 nt, Human
acucuaggauguauauuu

SEQ ID NO: 3171546 - RNA, 20 nt, Human
acucuaggauguauauuuua

SEQ ID NO: 3171547 - RNA, 21 nt, Human
acucuaggauguauauuuuau

SEQ ID NO: 3171548 - RNA, 22 nt, Human
acucuaggauguauauuuuaua

SEQ ID NO: 3171549 - RNA, 15 nt, Human
acucuagggaaaaac

SEQ ID NO: 3171550 - RNA, 17 nt, Human
acucuagggaaaaacca

SEQ ID NO: 3171551 - RNA, 22 nt, Human
acucauauccccuauuuaacag

SEQ ID NO: 3171552 - RNA, 13 nt, Human
acugccagcaacg

SEQ ID NO: 3171553 - RNA, 20 nt, Human
acucugucucaguccaugaa

SEQ ID NO: 3171554 - RNA, 18 nt, Human
acucugucucaguccaug

SEQ ID NO: 3171555 - RNA, 17 nt, Human
acucugucucaguccau

SEQ ID NO: 3171556 - RNA, 21 nt, Human
acucugucgagccugggggcu

SEQ ID NO: 3171557 - RNA, 13 nt, Human
acugguccaucug

SEQ ID NO: 3171558 - RNA, 14 nt, Human
acuggagaaaaugg

SEQ ID NO: 3171559 - RNA, 15 nt, Human
acuggagaaaaugga

SEQ ID NO: 3171560 - RNA, 17 nt, Human
acuggaagcacagcuuc

SEQ ID NO: 3171561 - RNA, 16 nt, Human
acugcccccucugccc

SEQ ID NO: 3171562 - RNA, 17 nt, Human
acugcccccucugcccu

SEQ ID NO: 3171563 - RNA, 19 nt, Human
acuggaagcacagcuucau

SEQ ID NO: 3171564 - RNA, 16 nt, Human
acuggaagcacagcuu

SEQ ID NO: 3171565 - RNA, 14 nt, Human
acugcccccucugc

SEQ ID NO: 3171566 - RNA, 15 nt, Human
acugcccccucugcc

SEQ ID NO: 3171567 - RNA, 16 nt, Human
acugccagcucuuccu

SEQ ID NO: 3171568 - RNA, 12 nt, Human
acugccagcucu

SEQ ID NO: 3171569 - RNA, 17 nt, Human
acugccagcucuuccua

SEQ ID NO: 3171570 - RNA, 14 nt, Human
acugugacaucucu

SEQ ID NO: 3171571 - RNA, 16 nt, Human
acugugaccaaguaua

SEQ ID NO: 3171572 - RNA, 22 nt, Human
acugugaccaaguauaaacuuu

SEQ ID NO: 3171573 - RNA, 22 nt, Human
acugugcgcauaggccugcuuu

SEQ ID NO: 3171574 - RNA, 16 nt, Human
acugugaagagaacca

SEQ ID NO: 3171575 - RNA, 15 nt, Human
acugugaagagcugg

SEQ ID NO: 3171576 - RNA, 12 nt, Human
acugugaagagc

SEQ ID NO: 3171577 - RNA, 21 nt, Human
acugucucaagagggcacugg

SEQ ID NO: 3171578 - RNA, 20 nt, Human
acugucucaagagggcacug

SEQ ID NO: 3171579 - RNA, 23 nt, Human
acugucucaagagggcacuggug

SEQ ID NO: 3171580 - RNA, 19 nt, Human
acugucucaagagggcacu

SEQ ID NO: 3171581 - RNA, 14 nt, Human
acugguuauuuaaa

SEQ ID NO: 3171582 - RNA, 21 nt, Human
acuucugucuucacaacagau

SEQ ID NO: 3171583 - RNA, 19 nt, Human
acuucaaaacaaacagaug

SEQ ID NO: 3171584 - RNA, 16 nt, Human
acuuauuucacuuuag

SEQ ID NO: 3171585 - RNA, 22 nt, Human
acuguuugauauaccaaauuaa

SEQ ID NO: 3171586 - RNA, 23 nt, Human
acuguuugauauaccaaauuaaa

SEQ ID NO: 3171587 - RNA, 21 nt, Human
acuuggucugugagaugcuag

SEQ ID NO: 3171588 - RNA, 22 nt, Human
acuuggugcuuauugauauucu

SEQ ID NO: 3171589 - RNA, 16 nt, Human
acuugguuuuuaaaaa

SEQ ID NO: 3171590 - RNA, 22 nt, Human
acuucugucuucacaacagauu

SEQ ID NO: 3171591 - RNA, 18 nt, Human
acuucuuauacauuugau

SEQ ID NO: 3171592 - RNA, 11 nt, Human
acuucuucugu

SEQ ID NO: 3171593 - RNA, 13 nt, Human
acuucuucuguaa

SEQ ID NO: 3171594 - RNA, 14 nt, Human
acuucuucuguaau

SEQ ID NO: 3171595 - RNA, 16 nt, Human
acuucuucuguaauau

SEQ ID NO: 3171596 - RNA, 21 nt, Human
acuucuucuguaauauuuaca

SEQ ID NO: 3171597 - RNA, 14 nt, Human
acuugggccacugu

SEQ ID NO: 3171598 - RNA, 20 nt, Human
acuucuucuguccaagcaga

SEQ ID NO: 3171599 - RNA, 15 nt, Human
acuugggccacugug

SEQ ID NO: 3171600 - RNA, 20 nt, Human
acugugcugagucugaaggc

SEQ ID NO: 3171601 - RNA, 23 nt, Human
acugugcguggggcucccgccuc

SEQ ID NO: 3171602 - RNA, 17 nt, Human
acugugcguggggcucc

SEQ ID NO: 3171603 - RNA, 23 nt, Human
agaaaaucugaauuggaaugcac

SEQ ID NO: 3171604 - RNA, 23 nt, Human
agaaaguacuucuccacccugcu

SEQ ID NO: 3171605 - RNA, 17 nt, Human
agaaaguaaauaaaagg

SEQ ID NO: 3171606 - RNA, 22 nt, Human
agaaaguaaggugcuuggaguu

SEQ ID NO: 3171607 - RNA, 22 nt, Human
agaaaguacuucuccacccugc

SEQ ID NO: 3171608 - RNA, 19 nt, Human
agaaaggguucuguaaaau

SEQ ID NO: 3171609 - RNA, 20 nt, Human
agaaaguguucuguuacaaa

SEQ ID NO: 3171610 - RNA, 19 nt, Human
agaaaguguucuguuacaa

SEQ ID NO: 3171611 - RNA, 23 nt, Human
agaaaguguucuguuacaaaaug

SEQ ID NO: 3171612 - RNA, 14 nt, Human
agaaauaaauauac

SEQ ID NO: 3171613 - RNA, 21 nt, Human
agaaauaaauccacccauguu

SEQ ID NO: 3171614 - RNA, 14 nt, Human
agaaaguguucugu

SEQ ID NO: 3171615 - RNA, 18 nt, Human
agaaaguguucuguuaca

SEQ ID NO: 3171616 - RNA, 16 nt, Human
agaaaguguucuguua

SEQ ID NO: 3171617 - RNA, 17 nt, Human
agaaauaaauuuauuuc

SEQ ID NO: 3171618 - RNA, 14 nt, Human
agaaauaauaaaaa

SEQ ID NO: 3171619 - RNA, 19 nt, Human
acuuuaucaaugugucuuu

SEQ ID NO: 3171620 - RNA, 18 nt, Human
acuuuauagaagaaugca

SEQ ID NO: 3171621 - RNA, 17 nt, Human
acuuuauagaagaaugc

SEQ ID NO: 3171622 - RNA, 22 nt, Human
acuuuuagaugugguuaauuuu

SEQ ID NO: 3171623 - RNA, 23 nt, Human
acuuuuauuuccagugaaaucag

SEQ ID NO: 3171624 - RNA, 20 nt, Human
acuuuucauaaccuagccuu

SEQ ID NO: 3171625 - RNA, 16 nt, Human
acuuuucuuucagcca

SEQ ID NO: 3171626 - RNA, 16 nt, Human
acuuuucaaguauuua

SEQ ID NO: 3171627 - RNA, 17 nt, Human
acuuuucauaucauuuc

SEQ ID NO: 3171628 - RNA, 18 nt, Human
acuuuucauaucauuucu

SEQ ID NO: 3171629 - RNA, 20 nt, Human
acuuuuccaauaugugauuu

SEQ ID NO: 3171630 - RNA, 17 nt, Human
acuuuuccaauauguga

SEQ ID NO: 3171631 - RNA, 19 nt, Human
acuuuuccaguauuuuagu

SEQ ID NO: 3171632 - RNA, 18 nt, Human
acuuuuccaguauuuuag

SEQ ID NO: 3171633 - RNA, 16 nt, Human
acuuuuccaguauuuu

SEQ ID NO: 3171634 - RNA, 15 nt, Human
acuuuuccaguauuu

SEQ ID NO: 3171635 - RNA, 14 nt, Human
acuuuuccaguauu

SEQ ID NO: 3171636 - RNA, 11 nt, Human
acuuuuccagu

SEQ ID NO: 3171637 - RNA, 21 nt, Human
acuuuuccaauaugugauuuu

SEQ ID NO: 3171638 - RNA, 12 nt, Human
acuuuugcuuua

SEQ ID NO: 3171639 - RNA, 13 nt, Human
acuuuugcuuuaa

SEQ ID NO: 3171640 - RNA, 14 nt, Human
acuuuucuuugugg

SEQ ID NO: 3171641 - RNA, 16 nt, Human
agaaaaucaggcuggc

SEQ ID NO: 3171642 - RNA, 18 nt, Human
agaaaauacuuaaauguu

SEQ ID NO: 3171643 - RNA, 17 nt, Human
agaaaauacuuaaaugu

SEQ ID NO: 3171644 - RNA, 19 nt, Human
agaaaauacuuaaauguua

SEQ ID NO: 3171645 - RNA, 19 nt, Human
agaaaauagagaugagcuu

SEQ ID NO: 3171646 - RNA, 12 nt, Human
acuuuuagaugu

SEQ ID NO: 3171647 - RNA, 19 nt, Human
acuuuguucuggcucuucc

SEQ ID NO: 3171648 - RNA, 18 nt, Human
acuuuuaaggauaaauca

SEQ ID NO: 3171649 - RNA, 19 nt, Human
acuuuuaaggauaaaucau

SEQ ID NO: 3171650 - RNA, 20 nt, Human
acuuuuaaggauaaaucaua

SEQ ID NO: 3171651 - RNA, 13 nt, Human
acuuuaucaugaa

SEQ ID NO: 3171652 - RNA, 16 nt, Human
acuuuaucaugaaugc

SEQ ID NO: 3171653 - RNA, 18 nt, Human
acuuuaucaugaaugcuu

SEQ ID NO: 3171654 - RNA, 17 nt, Human
acuuuauugccaaaacc

SEQ ID NO: 3171655 - RNA, 13 nt, Human
acuuuauugcauc

SEQ ID NO: 3171656 - RNA, 16 nt, Human
acuuuauuagcagcug

SEQ ID NO: 3171657 - RNA, 16 nt, Human
acuuuguucuggcucu

SEQ ID NO: 3171658 - RNA, 17 nt, Human
acuuuguucuggcucuu

SEQ ID NO: 3171659 - RNA, 20 nt, Human
accccucaacaccucugcac

SEQ ID NO: 3171660 - RNA, 19 nt, Human
accccuccaugugggcuag

SEQ ID NO: 3171661 - RNA, 16 nt, Human
accccuccaugugggc

SEQ ID NO: 3171662 - RNA, 17 nt, Human
accccucauagcccuca

SEQ ID NO: 3171663 - RNA, 21 nt, Human
accccucccggcccugccugc

SEQ ID NO: 3171664 - RNA, 20 nt, Human
accccucccggcccugccug

SEQ ID NO: 3171665 - RNA, 19 nt, Human
accccucccggcccugccu

SEQ ID NO: 3171666 - RNA, 18 nt, Human
accccucccggcccugcc

SEQ ID NO: 3171667 - RNA, 19 nt, Human
acccaguggcagggcacag

SEQ ID NO: 3171668 - RNA, 18 nt, Human
acccaguggcagggcaca

SEQ ID NO: 3171669 - RNA, 17 nt, Human
acccaguggcagggcac

SEQ ID NO: 3171670 - RNA, 16 nt, Human
acccaguggcagggca

SEQ ID NO: 3171671 - RNA, 15 nt, Human
acccaguggcagggc

SEQ ID NO: 3171672 - RNA, 14 nt, Human
acccaguggcaggg

SEQ ID NO: 3171673 - RNA, 13 nt, Human
acccaguggcagg

SEQ ID NO: 3171674 - RNA, 11 nt, Human
acccaguggca

SEQ ID NO: 3171675 - RNA, 22 nt, Human
acccaguggcagggcacagggc

SEQ ID NO: 3171676 - RNA, 20 nt, Human
acccaguggcagggcacagg

SEQ ID NO: 3171677 - RNA, 24 nt, Human
acccaguggcagggcacagggccu

SEQ ID NO: 3171678 - RNA, 17 nt, Human
acccaugggcaggagac

SEQ ID NO: 3171679 - RNA, 16 nt, Human
acccaugggcaggaga

SEQ ID NO: 3171680 - RNA, 14 nt, Human
acccaugggcagga

SEQ ID NO: 3171681 - RNA, 16 nt, Human
acccaccucagccucc

SEQ ID NO: 3171682 - RNA, 11 nt, Human
acccccugaau

SEQ ID NO: 3171683 - RNA, 14 nt, Human
acccccugcaaagc

SEQ ID NO: 3171684 - RNA, 17 nt, Human
acccccugcaaagccca

SEQ ID NO: 3171685 - RNA, 22 nt, Human
acccccugcaaagcccagcuug

SEQ ID NO: 3171686 - RNA, 18 nt, Human
acccccugcaaagcccag

SEQ ID NO: 3171687 - RNA, 20 nt, Human
acccccugcaaagcccagcu

SEQ ID NO: 3171688 - RNA, 18 nt, Human
acccaugggcaggagacu

SEQ ID NO: 3171689 - RNA, 15 nt, Human
acccacaagaaauga

SEQ ID NO: 3171690 - RNA, 17 nt, Human
acccacaagaaaugaaa

SEQ ID NO: 3171691 - RNA, 21 nt, Human
acccacaagaaaugaaagcag

SEQ ID NO: 3171692 - RNA, 15 nt, Human
acccaccucagccuc

SEQ ID NO: 3171693 - RNA, 14 nt, Human
acccaccucagccu

SEQ ID NO: 3171694 - RNA, 13 nt, Human
acccaccucagcc

SEQ ID NO: 3171695 - RNA, 19 nt, Human
acccaagggccuggccuga

SEQ ID NO: 3171696 - RNA, 22 nt, Human
acccaagggccuggccugagcu

SEQ ID NO: 3171697 - RNA, 18 nt, Human
acccaagggccuggccug

SEQ ID NO: 3171698 - RNA, 13 nt, Human
accagaugagaau

SEQ ID NO: 3171699 - RNA, 16 nt, Human
accagaugagaauuag

SEQ ID NO: 3171700 - RNA, 18 nt, Human
accagaugagaauuaggc

SEQ ID NO: 3171701 - RNA, 19 nt, Human
accagagcugccaccugcc

SEQ ID NO: 3171702 - RNA, 13 nt, Human
accaccuaccccu

SEQ ID NO: 3171703 - RNA, 14 nt, Human
accagaugugacag

SEQ ID NO: 3171704 - RNA, 13 nt, Human
accagcacacucc

SEQ ID NO: 3171705 - RNA, 18 nt, Human
accagcacacucccgaga

SEQ ID NO: 3171706 - RNA, 17 nt, Human
accagcacacucccgag

SEQ ID NO: 3171707 - RNA, 16 nt, Human
accagcacacucccga

SEQ ID NO: 3171708 - RNA, 15 nt, Human
accagcacacucccg

SEQ ID NO: 3171709 - RNA, 14 nt, Human
accagcacacuccc

SEQ ID NO: 3171710 - RNA, 11 nt, Human
accagcccacg

SEQ ID NO: 3171711 - RNA, 21 nt, Human
accagcccacgcugacuacag

SEQ ID NO: 3171712 - RNA, 17 nt, Human
accagcccacgcugacu

SEQ ID NO: 3171713 - RNA, 19 nt, Human
accagccagggaaagacug

SEQ ID NO: 3171714 - RNA, 19 nt, Human
accagccccaauccaaaac

SEQ ID NO: 3171715 - RNA, 22 nt, Human
accagcccacgcugacuacagg

SEQ ID NO: 3171716 - RNA, 23 nt, Human
acauuugucauuuucauuagcaa

SEQ ID NO: 3171717 - RNA, 22 nt, Human
acauuugucauuuucauuagca

SEQ ID NO: 3171718 - RNA, 19 nt, Human
acauuugucauuuucauua

SEQ ID NO: 3171719 - RNA, 18 nt, Human
acauuugucauuuucauu

SEQ ID NO: 3171720 - RNA, 17 nt, Human
acauuugucauuuucau

SEQ ID NO: 3171721 - RNA, 23 nt, Human
acauuuguuugguuauagugcaa

SEQ ID NO: 3171722 - RNA, 22 nt, Human
acauuucacugucugucugguc

SEQ ID NO: 3171723 - RNA, 23 nt, Human
acauuucauaauuuguuuccagc

SEQ ID NO: 3171724 - RNA, 11 nt, Human
acauuugucau

SEQ ID NO: 3171725 - RNA, 16 nt, Human
acauuugucauuuuca

SEQ ID NO: 3171726 - RNA, 14 nt, Human
acauuugucauuuu

SEQ ID NO: 3171727 - RNA, 16 nt, Human
acauuucacauuauuc

SEQ ID NO: 3171728 - RNA, 16 nt, Human
acauuucacugucugu

SEQ ID NO: 3171729 - RNA, 15 nt, Human
acauuucacugucug

SEQ ID NO: 3171730 - RNA, 15 nt, Human
acauuuauucugcuc

SEQ ID NO: 3171731 - RNA, 20 nt, Human
accaaggcugauuaaaccaa

SEQ ID NO: 3171732 - RNA, 20 nt, Human
accaagguagaaugaccuug

SEQ ID NO: 3171733 - RNA, 18 nt, Human
accaagugugcuaaaaau

SEQ ID NO: 3171734 - RNA, 23 nt, Human
accaagguagaaugaccuuguaa

SEQ ID NO: 3171735 - RNA, 17 nt, Human
accaauaaaauaauuuu

SEQ ID NO: 3171736 - RNA, 14 nt, Human
acauuuauucugcu

SEQ ID NO: 3171737 - RNA, 12 nt, Human
acauguuucaga

SEQ ID NO: 3171738 - RNA, 14 nt, Human
acauguuuauguaa

SEQ ID NO: 3171739 - RNA, 23 nt, Human
acauguuuauguaaacaaaucuu

SEQ ID NO: 3171740 - RNA, 21 nt, Human
acauguuuauguaaacaaauc

SEQ ID NO: 3171741 - RNA, 18 nt, Human
acaugugcacaugcacgu

SEQ ID NO: 3171742 - RNA, 16 nt, Human
acaugugcacaugcac

SEQ ID NO: 3171743 - RNA, 19 nt, Human
acaugaucuucuuuauaau

SEQ ID NO: 3171744 - RNA, 22 nt, Human
acaugauuucacaaauauuaaa

SEQ ID NO: 3171745 - RNA, 21 nt, Human
acaugauuucacaaauauuaa

SEQ ID NO: 3171746 - RNA, 20 nt, Human
acaugauuucacaaauauua

SEQ ID NO: 3171747 - RNA, 19 nt, Human
acaugauuucacaaauauu

SEQ ID NO: 3171748 - RNA, 18 nt, Human
acaugauuucacaaauau

SEQ ID NO: 3171749 - RNA, 17 nt, Human
acaugauuucacaaaua

SEQ ID NO: 3171750 - RNA, 16 nt, Human
acaugaugauuucaga

SEQ ID NO: 3171751 - RNA, 15 nt, Human
acaugauuucacaaa

SEQ ID NO: 3171752 - RNA, 14 nt, Human
acaugauuucacaa

SEQ ID NO: 3171753 - RNA, 13 nt, Human
acaugauuucaca

SEQ ID NO: 3171754 - RNA, 12 nt, Human
acaugauuucac

SEQ ID NO: 3171755 - RNA, 23 nt, Human
acagggucucuagugcugugaaa

SEQ ID NO: 3171756 - RNA, 23 nt, Human
acaggcaaugcuggcuguuggcu

SEQ ID NO: 3171757 - RNA, 19 nt, Human
acaggcaaugcuggcuguu

SEQ ID NO: 3171758 - RNA, 19 nt, Human
acaggguuuugccauguug

SEQ ID NO: 3171759 - RNA, 21 nt, Human
acacugccaacugaucuguua

SEQ ID NO: 3171760 - RNA, 21 nt, Human
acacuggcaaugguaguuucu

SEQ ID NO: 3171761 - RNA, 20 nt, Human
acacuggcaaugguaguuuc

SEQ ID NO: 3171762 - RNA, 18 nt, Human
acagcaguugaaaagacu

SEQ ID NO: 3171763 - RNA, 16 nt, Human
acagcaguuucaggua

SEQ ID NO: 3171764 - RNA, 23 nt, Human
acagcaguugaaaagacuccaaa

SEQ ID NO: 3171765 - RNA, 22 nt, Human
acagcaguugaaaagacuccaa

SEQ ID NO: 3171766 - RNA, 21 nt, Human
acagcaguugaaaagacucca

SEQ ID NO: 3171767 - RNA, 19 nt, Human
acagagugagacucugucu

SEQ ID NO: 3171768 - RNA, 15 nt, Human
acagagugagacucu

SEQ ID NO: 3171769 - RNA, 23 nt, Human
acagagucucacuguugcccagg

SEQ ID NO: 3171770 - RNA, 13 nt, Human
acagaauuugaau

SEQ ID NO: 3171771 - RNA, 23 nt, Human
acagaauuugaauuaucagcaaa

SEQ ID NO: 3171772 - RNA, 11 nt, Human
acagacacagg

SEQ ID NO: 3171773 - RNA, 15 nt, Human
acacuguacugcaau

SEQ ID NO: 3171774 - RNA, 18 nt, Human
acagaaucuuguuuugaa

SEQ ID NO: 3171775 - RNA, 19 nt, Human
acagaaucuuguuuugaaa

SEQ ID NO: 3171776 - RNA, 15 nt, Human
acagaggcagcccca

SEQ ID NO: 3171777 - RNA, 14 nt, Human
acagaggcagcccc

SEQ ID NO: 3171778 - RNA, 14 nt, Human
acagacacaggccc

SEQ ID NO: 3171779 - RNA, 13 nt, Human
acagacacaggcc

SEQ ID NO: 3171780 - RNA, 23 nt, Human
acagaggccaugggccuccugug

SEQ ID NO: 3171781 - RNA, 19 nt, Human
acagaggcagccccauucu

SEQ ID NO: 3171782 - RNA, 14 nt, Human
acaggauuauugga

SEQ ID NO: 3171783 - RNA, 23 nt, Human
acaggcaaauccgaaaucagcag

SEQ ID NO: 3171784 - RNA, 15 nt, Human
acaggcaaacauuuu

SEQ ID NO: 3171785 - RNA, 14 nt, Human
acaggcaaacauuu

SEQ ID NO: 3171786 - RNA, 12 nt, Human
acaggcaagcac

SEQ ID NO: 3171787 - RNA, 18 nt, Human
acaggcaaugcuggcugu

SEQ ID NO: 3171788 - RNA, 15 nt, Human
acaggaucagucuga

SEQ ID NO: 3171789 - RNA, 17 nt, Human
acagcucuucuccaggc

SEQ ID NO: 3171790 - RNA, 16 nt, Human
acagcucuucuccagg

SEQ ID NO: 3171791 - RNA, 17 nt, Human
acagcucuguccuggga

SEQ ID NO: 3171792 - RNA, 15 nt, Human
acagccacggccagg

SEQ ID NO: 3171793 - RNA, 17 nt, Human
acagccacggccaggcc

SEQ ID NO: 3171794 - RNA, 16 nt, Human
acagccacggccaggc

SEQ ID NO: 3171795 - RNA, 18 nt, Human
acagccacggccaggcca

SEQ ID NO: 3171796 - RNA, 19 nt, Human
acacgagcaggcuacuguc

SEQ ID NO: 3171797 - RNA, 14 nt, Human
acacgagcaggcua

SEQ ID NO: 3171798 - RNA, 19 nt, Human
acaccaaaaaaauccagaa

SEQ ID NO: 3171799 - RNA, 15 nt, Human
acaccaaaaaauauc

SEQ ID NO: 3171800 - RNA, 14 nt, Human
acaccaaaaaauau

SEQ ID NO: 3171801 - RNA, 21 nt, Human
acacgagcaggcuacugucag

SEQ ID NO: 3171802 - RNA, 17 nt, Human
acacgcgugcacacacc

SEQ ID NO: 3171803 - RNA, 15 nt, Human
acacgcgugcacaca

SEQ ID NO: 3171804 - RNA, 14 nt, Human
acacgcuccuuccu

SEQ ID NO: 3171805 - RNA, 11 nt, Human
acacagcucuu

SEQ ID NO: 3171806 - RNA, 19 nt, Human
acacagaggcugccucucc

SEQ ID NO: 3171807 - RNA, 14 nt, Human
acacagcucugucc

SEQ ID NO: 3171808 - RNA, 17 nt, Human
acacagauuugagcuca

SEQ ID NO: 3171809 - RNA, 20 nt, Human
acacagcucuguccugggag

SEQ ID NO: 3171810 - RNA, 21 nt, Human
acaauucucccgggacucugc

SEQ ID NO: 3171811 - RNA, 10 nt, Human
acaagaaaau

SEQ ID NO: 3171812 - RNA, 20 nt, Human
acaacuuuuuuuucuuuuuu

SEQ ID NO: 3171813 - RNA, 18 nt, Human
acaacuuuuuuuucuuuu

SEQ ID NO: 3171814 - RNA, 15 nt, Human
acaacuuuuuuuucu

SEQ ID NO: 3171815 - RNA, 10 nt, Human
acaacuaagu

SEQ ID NO: 3171816 - RNA, 22 nt, Human
acaacuaagugauuuguauguc

SEQ ID NO: 3171817 - RNA, 12 nt, Human
acaaggcaaggc

SEQ ID NO: 3171818 - RNA, 14 nt, Human
acaaggcaaggcug

SEQ ID NO: 3171819 - RNA, 17 nt, Human
acaaggauugcuacugu

SEQ ID NO: 3171820 - RNA, 20 nt, Human
acaaaauguaggguuauaau

SEQ ID NO: 3171821 - RNA, 22 nt, Human
acaaaauguaggguuauaauaa

SEQ ID NO: 3171822 - RNA, 11 nt, Human
acaaacaaaag

SEQ ID NO: 3171823 - RNA, 16 nt, Human
acaaaauucuuucugg

SEQ ID NO: 3171824 - RNA, 14 nt, Human
acaaaauuauuugu

SEQ ID NO: 3171825 - RNA, 16 nt, Human
acaaaauuauuuguaa

SEQ ID NO: 3171826 - RNA, 13 nt, Human
acaaaauucaaag

SEQ ID NO: 3171827 - RNA, 18 nt, Human
acaaaauucaaagcaugg

SEQ ID NO: 3171828 - RNA, 18 nt, Human
acaaccuucuguggcuca

SEQ ID NO: 3171829 - RNA, 16 nt, Human
acaacgagccuuuuca

SEQ ID NO: 3171830 - RNA, 23 nt, Human
acaaccuuggcuuggcccuggca

SEQ ID NO: 3171831 - RNA, 14 nt, Human
acaaacaaaagcau

SEQ ID NO: 3171832 - RNA, 13 nt, Human
acaaacaaaagca

SEQ ID NO: 3171833 - RNA, 20 nt, Human
acaaggcaaggcugucaauu

SEQ ID NO: 3171834 - RNA, 17 nt, Human
acaaggcaaaaacaaag

SEQ ID NO: 3171835 - RNA, 15 nt, Human
acaaggcaaaaacaa

SEQ ID NO: 3171836 - RNA, 23 nt, Human
acaagggaaaauaaaaaaagaaa

SEQ ID NO: 3171837 - RNA, 22 nt, Human
acaaggcuugcugcagauacua

SEQ ID NO: 3171838 - RNA, 17 nt, Human
acaaggcuugcugcaga

SEQ ID NO: 3171839 - RNA, 22 nt, Human
aauuuuguguaagaaauacaga

SEQ ID NO: 3171840 - RNA, 18 nt, Human
aauuuuguguaagaaaua

SEQ ID NO: 3171841 - RNA, 16 nt, Human
aauuuugugcccccau

SEQ ID NO: 3171842 - RNA, 17 nt, Human
aauuuuguguaagaaau

SEQ ID NO: 3171843 - RNA, 15 nt, Human
aauuuuguguaagaa

SEQ ID NO: 3171844 - RNA, 23 nt, Human
aauuuugugaaacagacuuguau

SEQ ID NO: 3171845 - RNA, 14 nt, Human
aauuuuguguaaga

SEQ ID NO: 3171846 - RNA, 18 nt, Human
aauuuuguaauguaucaa

SEQ ID NO: 3171847 - RNA, 22 nt, Human
aauuuugucugccccaaguuuu

SEQ ID NO: 3171848 - RNA, 21 nt, Human
aauuuugucugccccaaguuu

SEQ ID NO: 3171849 - RNA, 23 nt, Human
aauuuuccuuuaauaugaaauuu

SEQ ID NO: 3171850 - RNA, 15 nt, Human
aauuuucuaaaagcu

SEQ ID NO: 3171851 - RNA, 16 nt, Human
aauuuucuaaaagcuu

SEQ ID NO: 3171852 - RNA, 21 nt, Human
aauuuucuaaaagcuuucaug

SEQ ID NO: 3171853 - RNA, 20 nt, Human
aauuuuccuuuaauaugaaa

SEQ ID NO: 3171854 - RNA, 11 nt, Human
aauuuuccuuu

SEQ ID NO: 3171855 - RNA, 20 nt, Human
aauuuuccuucagauauuuu

SEQ ID NO: 3171856 - RNA, 13 nt, Human
agccgcuggggcc

SEQ ID NO: 3171857 - RNA, 13 nt, Human
agccgcuccagag

SEQ ID NO: 3171858 - RNA, 22 nt, Human
agccgcggugcccaaccacacu

SEQ ID NO: 3171859 - RNA, 16 nt, Human
agccgccuucacagca

SEQ ID NO: 3171860 - RNA, 17 nt, Human
agccgccuucacagcag

SEQ ID NO: 3171861 - RNA, 21 nt, Human
agccgccaugcuccuggccca

SEQ ID NO: 3171862 - RNA, 19 nt, Human
agccucccgaguagcuggg

SEQ ID NO: 3171863 - RNA, 18 nt, Human
agccucccgaguagcugg

SEQ ID NO: 3171864 - RNA, 20 nt, Human
agccucccgaguagcuggga

SEQ ID NO: 3171865 - RNA, 14 nt, Human
agccuccuccagcc

SEQ ID NO: 3171866 - RNA, 22 nt, Human
agccuccgcuucccugguucaa

SEQ ID NO: 3171867 - RNA, 20 nt, Human
agccuccgcuucccugguuc

SEQ ID NO: 3171868 - RNA, 18 nt, Human
agccuccgcuucccuggu

SEQ ID NO: 3171869 - RNA, 17 nt, Human
agccuccgcuucccugg

SEQ ID NO: 3171870 - RNA, 16 nt, Human
agccuccgcuucccug

SEQ ID NO: 3171871 - RNA, 20 nt, Human
agccucccaaagugcuggga

SEQ ID NO: 3171872 - RNA, 17 nt, Human
agccgugccuucagcuc

SEQ ID NO: 3171873 - RNA, 21 nt, Human
agccucccaaagugcugggau

SEQ ID NO: 3171874 - RNA, 22 nt, Human
agccucccacgacugcccggca

SEQ ID NO: 3171875 - RNA, 18 nt, Human
agccucccacagugcugg

SEQ ID NO: 3171876 - RNA, 14 nt, Human
agccucccacagug

SEQ ID NO: 3171877 - RNA, 16 nt, Human
agccgugccuucagcu

SEQ ID NO: 3171878 - RNA, 15 nt, Human
agccgugccuucagc

SEQ ID NO: 3171879 - RNA, 18 nt, Human
agccagcaggcucucagg

SEQ ID NO: 3171880 - RNA, 19 nt, Human
agccagcaggcucucaggc

SEQ ID NO: 3171881 - RNA, 17 nt, Human
agccagcaggcucucag

SEQ ID NO: 3171882 - RNA, 20 nt, Human
agccagcaggcucucaggcc

SEQ ID NO: 3171883 - RNA, 15 nt, Human
agccccagugcccac

SEQ ID NO: 3171884 - RNA, 14 nt, Human
agccccagugccca

SEQ ID NO: 3171885 - RNA, 15 nt, Human
agccccauuaacugc

SEQ ID NO: 3171886 - RNA, 14 nt, Human
agccccauuaacug

SEQ ID NO: 3171887 - RNA, 13 nt, Human
agccccagugccc

SEQ ID NO: 3171888 - RNA, 21 nt, Human
agcccgggcucugccucccau

SEQ ID NO: 3171889 - RNA, 16 nt, Human
agccccauucugccug

SEQ ID NO: 3171890 - RNA, 13 nt, Human
agccccauucugc

SEQ ID NO: 3171891 - RNA, 16 nt, Human
agcccuauuucuugau

SEQ ID NO: 3171892 - RNA, 17 nt, Human
agcccucacccuggggc

SEQ ID NO: 3171893 - RNA, 18 nt, Human
agcacugaaccugggaaa

SEQ ID NO: 3171894 - RNA, 16 nt, Human
agcacugaaccuggga

SEQ ID NO: 3171895 - RNA, 20 nt, Human
agcacugaaaguauguuuua

SEQ ID NO: 3171896 - RNA, 18 nt, Human
agcacagacccugcccug

SEQ ID NO: 3171897 - RNA, 19 nt, Human
agcacagacccugcccugu

SEQ ID NO: 3171898 - RNA, 20 nt, Human
agcacagacccugcccugug

SEQ ID NO: 3171899 - RNA, 17 nt, Human
agcacagacccugcccu

SEQ ID NO: 3171900 - RNA, 23 nt, Human
agcacacuugacaucaacugcau

SEQ ID NO: 3171901 - RNA, 22 nt, Human
agcacaccaaucuuacuuugua

SEQ ID NO: 3171902 - RNA, 19 nt, Human
agcacaccaaucuuacuuu

SEQ ID NO: 3171903 - RNA, 21 nt, Human
agcacaccaaucuuacuuugu

SEQ ID NO: 3171904 - RNA, 22 nt, Human
agcagcuccuuccuagccuugc

SEQ ID NO: 3171905 - RNA, 21 nt, Human
agcagcuccuuccuagccuug

SEQ ID NO: 3171906 - RNA, 18 nt, Human
agcagugcaugcuguccc

SEQ ID NO: 3171907 - RNA, 13 nt, Human
agcagugcccagg

SEQ ID NO: 3171908 - RNA, 12 nt, Human
agcagugcccag

SEQ ID NO: 3171909 - RNA, 14 nt, Human
agcagugggccugg

SEQ ID NO: 3171910 - RNA, 23 nt, Human
agcagugcccagguggcugugga

SEQ ID NO: 3171911 - RNA, 20 nt, Human
agcagugcccagguggcugu

SEQ ID NO: 3171912 - RNA, 16 nt, Human
agcagugcccaggugg

SEQ ID NO: 3171913 - RNA, 14 nt, Human
agcagugcccaggu

SEQ ID NO: 3171914 - RNA, 19 nt, Human
agcagugcaugcugucccu

SEQ ID NO: 3171915 - RNA, 20 nt, Human
agcagugcaugcugucccuu

SEQ ID NO: 3171916 - RNA, 19 nt, Human
agcagcugacuuucaaagu

SEQ ID NO: 3171917 - RNA, 18 nt, Human
agcagugggccuggccag

SEQ ID NO: 3171918 - RNA, 22 nt, Human
agcagugggucaugaugcucuu

SEQ ID NO: 3171919 - RNA, 21 nt, Human
agcaguuaugugaccucacgu

SEQ ID NO: 3171920 - RNA, 16 nt, Human
agcaguugaaaagacu

SEQ ID NO: 3171921 - RNA, 21 nt, Human
agcaguucuuaacccaguguc

SEQ ID NO: 3171922 - RNA, 13 nt, Human
agcaguugaaaag

SEQ ID NO: 3171923 - RNA, 22 nt, Human
agcaugaagauaaacacagcug

SEQ ID NO: 3171924 - RNA, 19 nt, Human
agcaucgcacucuggcagc

SEQ ID NO: 3171925 - RNA, 14 nt, Human
agcaucgcacucug

SEQ ID NO: 3171926 - RNA, 21 nt, Human
agcaugacagaaaauauguau

SEQ ID NO: 3171927 - RNA, 18 nt, Human
agcaugacagaaaauaug

SEQ ID NO: 3171928 - RNA, 23 nt, Human
agcaugacagaaaauauguauua

SEQ ID NO: 3171929 - RNA, 14 nt, Human
agcaugacagaaaa

SEQ ID NO: 3171930 - RNA, 23 nt, Human
agcauccuggcacccggccccug

SEQ ID NO: 3171931 - RNA, 22 nt, Human
agcauccuggcacccggccccu

SEQ ID NO: 3171932 - RNA, 18 nt, Human
agcauccuggcacccggc

SEQ ID NO: 3171933 - RNA, 23 nt, Human
agccaagugugguagagugugcc

SEQ ID NO: 3171934 - RNA, 20 nt, Human
agcaugccuggauggggcug

SEQ ID NO: 3171935 - RNA, 23 nt, Human
agcaugccuggauggggcugcac

SEQ ID NO: 3171936 - RNA, 15 nt, Human
agcaugccuucaaau

SEQ ID NO: 3171937 - RNA, 14 nt, Human
agcauggacauuua

SEQ ID NO: 3171938 - RNA, 17 nt, Human
agcauggacauuuagaa

SEQ ID NO: 3171939 - RNA, 18 nt, Human
agcauggacauuuagaag

SEQ ID NO: 3171940 - RNA, 20 nt, Human
agcauggacauuuagaagaa

SEQ ID NO: 3171941 - RNA, 23 nt, Human
agccaaagcuaggccuggccaga

SEQ ID NO: 3171942 - RNA, 17 nt, Human
agagggaugcauggaga

SEQ ID NO: 3171943 - RNA, 12 nt, Human
agagggcacaga

SEQ ID NO: 3171944 - RNA, 22 nt, Human
agagggccauugaacucugaga

SEQ ID NO: 3171945 - RNA, 22 nt, Human
agaggguggugaccucugccug

SEQ ID NO: 3171946 - RNA, 20 nt, Human
agaggguggugaccucugcc

SEQ ID NO: 3171947 - RNA, 19 nt, Human
agaggguggugaccucugc

SEQ ID NO: 3171948 - RNA, 14 nt, Human
agagugugccugaa

SEQ ID NO: 3171949 - RNA, 13 nt, Human
agaguuacuugau

SEQ ID NO: 3171950 - RNA, 19 nt, Human
agaguggggauaugauuua

SEQ ID NO: 3171951 - RNA, 23 nt, Human
agaguggcuccucccggugccca

SEQ ID NO: 3171952 - RNA, 11 nt, Human
agagugggagc

SEQ ID NO: 3171953 - RNA, 19 nt, Human
agaguggcuccucccggug

SEQ ID NO: 3171954 - RNA, 15 nt, Human
agaguggcuccuccc

SEQ ID NO: 3171955 - RNA, 20 nt, Human
agaggacaguauuugugggg

SEQ ID NO: 3171956 - RNA, 12 nt, Human
agaggaccagca

SEQ ID NO: 3171957 - RNA, 15 nt, Human
agaggagagaggacc

SEQ ID NO: 3171958 - RNA, 16 nt, Human
agaggagagaggaccc

SEQ ID NO: 3171959 - RNA, 23 nt, Human
agaggacuuuucuuuguggcuuc

SEQ ID NO: 3171960 - RNA, 20 nt, Human
agaggagaacuugcugccuc

SEQ ID NO: 3171961 - RNA, 19 nt, Human
agaggagaacuugcugccu

SEQ ID NO: 3171962 - RNA, 21 nt, Human
agaggaaaucaccgaaaacgu

SEQ ID NO: 3171963 - RNA, 20 nt, Human
agaggaaccucugauuuauu

SEQ ID NO: 3171964 - RNA, 16 nt, Human
agaggaaggagaggag

SEQ ID NO: 3171965 - RNA, 15 nt, Human
agagcccaggccucc

SEQ ID NO: 3171966 - RNA, 13 nt, Human
agagcccaggccu

SEQ ID NO: 3171967 - RNA, 14 nt, Human
agagcccaggccuc

SEQ ID NO: 3171968 - RNA, 14 nt, Human
agauggcugugccu

SEQ ID NO: 3171969 - RNA, 14 nt, Human
agaucuucuguggg

SEQ ID NO: 3171970 - RNA, 19 nt, Human
agauauaugcucugcaugu

SEQ ID NO: 3171971 - RNA, 17 nt, Human
agauauccacuuaccug

SEQ ID NO: 3171972 - RNA, 18 nt, Human
agaguucagggaagauaa

SEQ ID NO: 3171973 - RNA, 16 nt, Human
agaguucagggaagau

SEQ ID NO: 3171974 - RNA, 17 nt, Human
agaguuacuugauaagg

SEQ ID NO: 3171975 - RNA, 14 nt, Human
agaguuacuugaua

SEQ ID NO: 3171976 - RNA, 22 nt, Human
agacugccagcucuuccuagcu

SEQ ID NO: 3171977 - RNA, 18 nt, Human
agacugccagcucuuccu

SEQ ID NO: 3171978 - RNA, 14 nt, Human
agacugccagcucu

SEQ ID NO: 3171979 - RNA, 13 nt, Human
agacugccagcuc

SEQ ID NO: 3171980 - RNA, 12 nt, Human
agacugccagcu

SEQ ID NO: 3171981 - RNA, 11 nt, Human
agacugccagc

SEQ ID NO: 3171982 - RNA, 22 nt, Human
agacugccacaaggaagaaauu

SEQ ID NO: 3171983 - RNA, 15 nt, Human
agacugccacaagga

SEQ ID NO: 3171984 - RNA, 17 nt, Human
agacugcuccugagccc

SEQ ID NO: 3171985 - RNA, 16 nt, Human
agacugcuccugagcc

SEQ ID NO: 3171986 - RNA, 23 nt, Human
agacugcuccugagcccccagcu

SEQ ID NO: 3171987 - RNA, 21 nt, Human
agacugcuccugagcccccag

SEQ ID NO: 3171988 - RNA, 20 nt, Human
agacugcuccugagccccca

SEQ ID NO: 3171989 - RNA, 19 nt, Human
agacugcuccugagccccc

SEQ ID NO: 3171990 - RNA, 16 nt, Human
agacuggaagcacagc

SEQ ID NO: 3171991 - RNA, 17 nt, Human
agacuggaagcacagcu

SEQ ID NO: 3171992 - RNA, 19 nt, Human
agacuggaagcacagcuuc

SEQ ID NO: 3171993 - RNA, 21 nt, Human
agagaaaagaaaaaaaaagaa

SEQ ID NO: 3171994 - RNA, 15 nt, Human
agagaaaagaaaaaa

SEQ ID NO: 3171995 - RNA, 14 nt, Human
agagaaaagaaaaa

SEQ ID NO: 3171996 - RNA, 13 nt, Human
agagaaaagaaaa

SEQ ID NO: 3171997 - RNA, 12 nt, Human
agagaaaagaaa

SEQ ID NO: 3171998 - RNA, 11 nt, Human
agagaaaagaa

SEQ ID NO: 3171999 - RNA, 10 nt, Human
agagaaaaga

SEQ ID NO: 3172000 - RNA, 23 nt, Human
agagagcaagacgcugugcugcc

SEQ ID NO: 3172001 - RNA, 22 nt, Human
agagagcgcagccgccuucaca

SEQ ID NO: 3172002 - RNA, 20 nt, Human
agagagcgcagccgccuuca

SEQ ID NO: 3172003 - RNA, 13 nt, Human
agagagcgcagcc

SEQ ID NO: 3172004 - RNA, 21 nt, Human
agagaggguggugaccucugc

SEQ ID NO: 3172005 - RNA, 20 nt, Human
agagaggguggugaccucug

SEQ ID NO: 3172006 - RNA, 22 nt, Human
agagaggguggugaccucugcc

SEQ ID NO: 3172007 - RNA, 13 nt, Human
agagcccaccuug

SEQ ID NO: 3172008 - RNA, 16 nt, Human
agagcccacgccccca

SEQ ID NO: 3172009 - RNA, 23 nt, Human
agagagggugaguccuccagaac

SEQ ID NO: 3172010 - RNA, 13 nt, Human
agagcccacgccc

SEQ ID NO: 3172011 - RNA, 19 nt, Human
agagcccaccuuggcucaa

SEQ ID NO: 3172012 - RNA, 20 nt, Human
agacgcugugcugcccugcc

SEQ ID NO: 3172013 - RNA, 22 nt, Human
agacgcugugcugcccugccca

SEQ ID NO: 3172014 - RNA, 21 nt, Human
agacgcugugcugcccugccc

SEQ ID NO: 3172015 - RNA, 11 nt, Human
agacagcucuu

SEQ ID NO: 3172016 - RNA, 12 nt, Human
agacagcucuua

SEQ ID NO: 3172017 - RNA, 12 nt, Human
agacagcugccu

SEQ ID NO: 3172018 - RNA, 14 nt, Human
agacagcccgggcu

SEQ ID NO: 3172019 - RNA, 15 nt, Human
agacagcccgggcuc

SEQ ID NO: 3172020 - RNA, 22 nt, Human
agacagcccgauccuccccugg

SEQ ID NO: 3172021 - RNA, 23 nt, Human
agacagagucucacuguugccca

SEQ ID NO: 3172022 - RNA, 15 nt, Human
agacaaccaaguaug

SEQ ID NO: 3172023 - RNA, 22 nt, Human
agcuucuggugaccuuccaaga

SEQ ID NO: 3172024 - RNA, 21 nt, Human
agcuucuggugaccuuccaag

SEQ ID NO: 3172025 - RNA, 19 nt, Human
agcuucuguugcugccuca

SEQ ID NO: 3172026 - RNA, 19 nt, Human
agcuucugggagauuuuuu

SEQ ID NO: 3172027 - RNA, 22 nt, Human
agcuucugggagauuuuuuuga

SEQ ID NO: 3172028 - RNA, 19 nt, Human
agcuuccagcaggagggac

SEQ ID NO: 3172029 - RNA, 17 nt, Human
agcuuccagcaggaggg

SEQ ID NO: 3172030 - RNA, 16 nt, Human
agcuuccagcaggagg

SEQ ID NO: 3172031 - RNA, 14 nt, Human
agcuuccagcagga

SEQ ID NO: 3172032 - RNA, 13 nt, Human
agcuuccagcagg

SEQ ID NO: 3172033 - RNA, 12 nt, Human
agcuuccagcag

SEQ ID NO: 3172034 - RNA, 18 nt, Human
agcuuccaauuuuccuuc

SEQ ID NO: 3172035 - RNA, 17 nt, Human
agcuuccaauuuuccuu

SEQ ID NO: 3172036 - RNA, 18 nt, Human
agcuucccucccugcugu

SEQ ID NO: 3172037 - RNA, 12 nt, Human
agcuucccuccc

SEQ ID NO: 3172038 - RNA, 16 nt, Human
agcuucccucccugcu

SEQ ID NO: 3172039 - RNA, 15 nt, Human
agcuucccucccugc

SEQ ID NO: 3172040 - RNA, 18 nt, Human
agcuuccccaguagcugg

SEQ ID NO: 3172041 - RNA, 19 nt, Human
agcugcucagaucccacuu

SEQ ID NO: 3172042 - RNA, 23 nt, Human
agcugcgguccacccaggagccc

SEQ ID NO: 3172043 - RNA, 18 nt, Human
agcugcggugucucccug

SEQ ID NO: 3172044 - RNA, 21 nt, Human
agcugcuacucgugagcgcca

SEQ ID NO: 3172045 - RNA, 14 nt, Human
agcugagcaggugu

SEQ ID NO: 3172046 - RNA, 21 nt, Human
agcugcgguccacccaggagc

SEQ ID NO: 3172047 - RNA, 20 nt, Human
agcugagcacccagcucugu

SEQ ID NO: 3172048 - RNA, 23 nt, Human
agcugagauuauaggcaccuacc

SEQ ID NO: 3172049 - RNA, 11 nt, Human
agcugagaaga

SEQ ID NO: 3172050 - RNA, 13 nt, Human
agcugagaagacu

SEQ ID NO: 3172051 - RNA, 21 nt, Human
agcugagaagacucaaguccc

SEQ ID NO: 3172052 - RNA, 21 nt, Human
agcugacuuuucuguccgagc

SEQ ID NO: 3172053 - RNA, 15 nt, Human
agcucuuuuccuaga

SEQ ID NO: 3172054 - RNA, 19 nt, Human
agcugaaauugaaaaguua

SEQ ID NO: 3172055 - RNA, 13 nt, Human
agcugaaauuuua

SEQ ID NO: 3172056 - RNA, 17 nt, Human
agcugaaauuuuagaaa

SEQ ID NO: 3172057 - RNA, 20 nt, Human
agcugaaauuuuagaaauau

SEQ ID NO: 3172058 - RNA, 16 nt, Human
agcugaaauugaaaag

SEQ ID NO: 3172059 - RNA, 13 nt, Human
agcugaaauugaa

SEQ ID NO: 3172060 - RNA, 12 nt, Human
agcugaaauuga

SEQ ID NO: 3172061 - RNA, 19 nt, Human
agcuccggcguguguucag

SEQ ID NO: 3172062 - RNA, 23 nt, Human
agcuccgcuuucuacccagcgag

SEQ ID NO: 3172063 - RNA, 21 nt, Human
agcuccgcuuucuacccagcg

SEQ ID NO: 3172064 - RNA, 20 nt, Human
agcuccgcuuucuacccagc

SEQ ID NO: 3172065 - RNA, 19 nt, Human
agcuccuuccuagccuugc

SEQ ID NO: 3172066 - RNA, 12 nt, Human
agcuccuucugu

SEQ ID NO: 3172067 - RNA, 22 nt, Human
agcuccccucggagaagagcug

SEQ ID NO: 3172068 - RNA, 20 nt, Human
agcucccucaaagaggcagu

SEQ ID NO: 3172069 - RNA, 18 nt, Human
agcucccgcuccgggcuc

SEQ ID NO: 3172070 - RNA, 12 nt, Human
agcuuuugaugu

SEQ ID NO: 3172071 - RNA, 15 nt, Human
agcuuuuugaaaacc

SEQ ID NO: 3172072 - RNA, 13 nt, Human
agcuuuuuggaau

SEQ ID NO: 3172073 - RNA, 14 nt, Human
agcuuuuuggaauc

SEQ ID NO: 3172074 - RNA, 12 nt, Human
agcuuuuuaauu

SEQ ID NO: 3172075 - RNA, 17 nt, Human
agcuuuuuaauuaagca

SEQ ID NO: 3172076 - RNA, 21 nt, Human
aggaaucaugugccaagcaga

SEQ ID NO: 3172077 - RNA, 17 nt, Human
aggaauccagacccggc

SEQ ID NO: 3172078 - RNA, 18 nt, Human
aggacccugccaggcaca

SEQ ID NO: 3172079 - RNA, 23 nt, Human
aggacccugccaggcacaggcag

SEQ ID NO: 3172080 - RNA, 22 nt, Human
aggacccugccaggcacaggca

SEQ ID NO: 3172081 - RNA, 21 nt, Human
aggacccugccaggcacaggc

SEQ ID NO: 3172082 - RNA, 19 nt, Human
aggacccugccaggcacag

SEQ ID NO: 3172083 - RNA, 21 nt, Human
aggagucccugccaucauguu

SEQ ID NO: 3172084 - RNA, 22 nt, Human
aggagucccacuccaagccagc

SEQ ID NO: 3172085 - RNA, 21 nt, Human
aggagucccacuccaagccag

SEQ ID NO: 3172086 - RNA, 23 nt, Human
aggagucccacuccaagccagca

SEQ ID NO: 3172087 - RNA, 19 nt, Human
aggagugguuuuucuuuuc

SEQ ID NO: 3172088 - RNA, 13 nt, Human
aggaccucaggug

SEQ ID NO: 3172089 - RNA, 20 nt, Human
aggagaauagccugaaccug

SEQ ID NO: 3172090 - RNA, 19 nt, Human
aggagaaucauguuucuuu

SEQ ID NO: 3172091 - RNA, 17 nt, Human
aggagaaucauguuucu

SEQ ID NO: 3172092 - RNA, 17 nt, Human
aggauguugaaaaaguu

SEQ ID NO: 3172093 - RNA, 14 nt, Human
aggauuaaauaaug

SEQ ID NO: 3172094 - RNA, 14 nt, Human
aggauuauuggaaa

SEQ ID NO: 3172095 - RNA, 20 nt, Human
aggauuaaauaauguaaaua

SEQ ID NO: 3172096 - RNA, 17 nt, Human
aggauuaguuuagaaca

SEQ ID NO: 3172097 - RNA, 14 nt, Human
aggauucacacccc

SEQ ID NO: 3172098 - RNA, 15 nt, Human
aggauuaguuuagaa

SEQ ID NO: 3172099 - RNA, 16 nt, Human
aggauuaguuuagaac

SEQ ID NO: 3172100 - RNA, 18 nt, Human
aggauuaguuuagaacag

SEQ ID NO: 3172101 - RNA, 12 nt, Human
aggauuauggaa

SEQ ID NO: 3172102 - RNA, 15 nt, Human
aggauuauggaaaaa

SEQ ID NO: 3172103 - RNA, 22 nt, Human
aggauguucuagcauggcugcc

SEQ ID NO: 3172104 - RNA, 16 nt, Human
aggauguauauuuuau

SEQ ID NO: 3172105 - RNA, 20 nt, Human
aggauguauauuuuauauaa

SEQ ID NO: 3172106 - RNA, 21 nt, Human
aggauguauauuuuauauaaa

SEQ ID NO: 3172107 - RNA, 22 nt, Human
aggauguacaaggacagccccu

SEQ ID NO: 3172108 - RNA, 16 nt, Human
aggauguucugggaca

SEQ ID NO: 3172109 - RNA, 15 nt, Human
aggauguucugggac

SEQ ID NO: 3172110 - RNA, 17 nt, Human
aggcuacugucagcucc

SEQ ID NO: 3172111 - RNA, 21 nt, Human
aggcuagaaccaccugccuau

SEQ ID NO: 3172112 - RNA, 12 nt, Human
aggcuaaaaugu

SEQ ID NO: 3172113 - RNA, 13 nt, Human
aggcuaaaauguu

SEQ ID NO: 3172114 - RNA, 15 nt, Human
aggcuaaaauguuuu

SEQ ID NO: 3172115 - RNA, 14 nt, Human
aggcuaaaauguuu

SEQ ID NO: 3172116 - RNA, 19 nt, Human
aggcuaaaauguuuucagc

SEQ ID NO: 3172117 - RNA, 18 nt, Human
aggcuaaaauguuuucag

SEQ ID NO: 3172118 - RNA, 17 nt, Human
aggcuaaaauguuuuca

SEQ ID NO: 3172119 - RNA, 16 nt, Human
aggcuaaaauguuuuc

SEQ ID NO: 3172120 - RNA, 21 nt, Human
aggcgugagccaccgugccug

SEQ ID NO: 3172121 - RNA, 20 nt, Human
aggcccuucucuccagcccc

SEQ ID NO: 3172122 - RNA, 21 nt, Human
aggcccuucucuccagccccu

SEQ ID NO: 3172123 - RNA, 18 nt, Human
aggcccuuccucuccacu

SEQ ID NO: 3172124 - RNA, 17 nt, Human
aggcccuuccucuccac

SEQ ID NO: 3172125 - RNA, 15 nt, Human
aggcccuuccucucc

SEQ ID NO: 3172126 - RNA, 13 nt, Human
aggcccuuccucu

SEQ ID NO: 3172127 - RNA, 22 nt, Human
aggcccuucucuccagccccug

SEQ ID NO: 3172128 - RNA, 23 nt, Human
aggcccuucucuccagccccugg

SEQ ID NO: 3172129 - RNA, 20 nt, Human
aggcugucaguguuuggugc

SEQ ID NO: 3172130 - RNA, 21 nt, Human
aggcugucaauuacaggaagu

SEQ ID NO: 3172131 - RNA, 22 nt, Human
agggacagaggggguggccucc

SEQ ID NO: 3172132 - RNA, 22 nt, Human
aggcugucucagauaaauuaug

SEQ ID NO: 3172133 - RNA, 20 nt, Human
agggacagaggggguggccu

SEQ ID NO: 3172134 - RNA, 23 nt, Human
agggacagaggggguggccuccc

SEQ ID NO: 3172135 - RNA, 19 nt, Human
aggcugucaauuacaggaa

SEQ ID NO: 3172136 - RNA, 20 nt, Human
aggcugucaauuacaggaag

SEQ ID NO: 3172137 - RNA, 18 nt, Human
aggcuguaucccaugagc

SEQ ID NO: 3172138 - RNA, 13 nt, Human
aggcuguauccca

SEQ ID NO: 3172139 - RNA, 18 nt, Human
agguaaagggcaaauaau

SEQ ID NO: 3172140 - RNA, 19 nt, Human
agguaaagggcaaauaaug

SEQ ID NO: 3172141 - RNA, 23 nt, Human
agguaacaagaugagaacagaua

SEQ ID NO: 3172142 - RNA, 21 nt, Human
agguaaucgaccugccucggc

SEQ ID NO: 3172143 - RNA, 19 nt, Human
agguaaucgaccugccucg

SEQ ID NO: 3172144 - RNA, 17 nt, Human
agguacaaccuguucug

SEQ ID NO: 3172145 - RNA, 23 nt, Human
aggguuuugccauguuggccagg

SEQ ID NO: 3172146 - RNA, 12 nt, Human
agguaaaaaguu

SEQ ID NO: 3172147 - RNA, 23 nt, Human
aggucugaguuguuaccccaagc

SEQ ID NO: 3172148 - RNA, 20 nt, Human
aggucugaguuguuacccca

SEQ ID NO: 3172149 - RNA, 13 nt, Human
aggucugaguugu

SEQ ID NO: 3172150 - RNA, 22 nt, Human
aggugcuacaaaaacacagcaa

SEQ ID NO: 3172151 - RNA, 21 nt, Human
aggugcuacaaaaacacagca

SEQ ID NO: 3172152 - RNA, 20 nt, Human
aggugcuacaaaaacacagc

SEQ ID NO: 3172153 - RNA, 19 nt, Human
aggugcuacaaaaacacag

SEQ ID NO: 3172154 - RNA, 18 nt, Human
aggugcuacaaaaacaca

SEQ ID NO: 3172155 - RNA, 16 nt, Human
aggucuguuugcuguu

SEQ ID NO: 3172156 - RNA, 15 nt, Human
aggucuguuugcugu

SEQ ID NO: 3172157 - RNA, 14 nt, Human
aggucuguuugcug

SEQ ID NO: 3172158 - RNA, 21 nt, Human
agguggaauuauuuuaaaaga

SEQ ID NO: 3172159 - RNA, 17 nt, Human
agguggaauuauuuuaa

SEQ ID NO: 3172160 - RNA, 17 nt, Human
aggugcucaaaaugcaa

SEQ ID NO: 3172161 - RNA, 23 nt, Human
aggugcuaggaacacuccuucac

SEQ ID NO: 3172162 - RNA, 16 nt, Human
aggugcucaaaaugca

SEQ ID NO: 3172163 - RNA, 16 nt, Human
aggugcuacaaaaaca

SEQ ID NO: 3172164 - RNA, 17 nt, Human
aggucuguuugcuguug

SEQ ID NO: 3172165 - RNA, 24 nt, Human
aggugcuacaaaaacacagcaagg

SEQ ID NO: 3172166 - RNA, 23 nt, Human
aggugcuacaaaaacacagcaag

SEQ ID NO: 3172167 - RNA, 19 nt, Human
aggugcuaggaacacuccu

SEQ ID NO: 3172168 - RNA, 22 nt, Human
aggugcuaggaacacuccuuca

SEQ ID NO: 3172169 - RNA, 12 nt, Human
agguuaaaaaaa

SEQ ID NO: 3172170 - RNA, 18 nt, Human
agguuaaaaaaaaaaguc

SEQ ID NO: 3172171 - RNA, 19 nt, Human
agguuaaauguuuuguaaa

SEQ ID NO: 3172172 - RNA, 18 nt, Human
agguuaaauguuuuguaa

SEQ ID NO: 3172173 - RNA, 17 nt, Human
agguuaaauguuuugua

SEQ ID NO: 3172174 - RNA, 14 nt, Human
agguuaaauguuuu

SEQ ID NO: 3172175 - RNA, 13 nt, Human
agguuaaauguuu

SEQ ID NO: 3172176 - RNA, 12 nt, Human
agguuaaauguu

SEQ ID NO: 3172177 - RNA, 11 nt, Human
agguuaaaugu

SEQ ID NO: 3172178 - RNA, 22 nt, Human
agguuaaaagaccauaagcaaa

SEQ ID NO: 3172179 - RNA, 22 nt, Human
agguggagcguucaccagugac

SEQ ID NO: 3172180 - RNA, 13 nt, Human
agguguuugaaaa

SEQ ID NO: 3172181 - RNA, 22 nt, Human
agguguuugaacagaggccaca

SEQ ID NO: 3172182 - RNA, 14 nt, Human
agguguuugaaaau

SEQ ID NO: 3172183 - RNA, 15 nt, Human
agguguuugaaaaua

SEQ ID NO: 3172184 - RNA, 17 nt, Human
agguguuugaaaauagu

SEQ ID NO: 3172185 - RNA, 15 nt, Human
agguguuugaacaga

SEQ ID NO: 3172186 - RNA, 22 nt, Human
agguucccuuugacgccauccc

SEQ ID NO: 3172187 - RNA, 13 nt, Human
agguucccuuuga

SEQ ID NO: 3172188 - RNA, 21 nt, Human
agguuaggcaguauaaagaau

SEQ ID NO: 3172189 - RNA, 19 nt, Human
agguuaggcaguauaaaga

SEQ ID NO: 3172190 - RNA, 23 nt, Human
agguuagaaauaaugucaaaaau

SEQ ID NO: 3172191 - RNA, 20 nt, Human
agguuagaaauaaugucaaa

SEQ ID NO: 3172192 - RNA, 16 nt, Human
agguuauugcaauaaa

SEQ ID NO: 3172193 - RNA, 21 nt, Human
agguuauugcaauaaaguaua

SEQ ID NO: 3172194 - RNA, 23 nt, Human
agguuaggcaguauaaagaauag

SEQ ID NO: 3172195 - RNA, 23 nt, Human
agguucccuuugacgccauccca

SEQ ID NO: 3172196 - RNA, 21 nt, Human
aggguaucaggugcugccauc

SEQ ID NO: 3172197 - RNA, 18 nt, Human
aggguaucaggugcugcc

SEQ ID NO: 3172198 - RNA, 19 nt, Human
aggguaucaggugcugcca

SEQ ID NO: 3172199 - RNA, 19 nt, Human
aggggccucuuaugggcug

SEQ ID NO: 3172200 - RNA, 20 nt, Human
aggggccucuuaugggcugg

SEQ ID NO: 3172201 - RNA, 21 nt, Human
aggggccucuuaugggcuggg

SEQ ID NO: 3172202 - RNA, 11 nt, Human
agggucccugg

SEQ ID NO: 3172203 - RNA, 21 nt, Human
aggguccuggggaaccugacc

SEQ ID NO: 3172204 - RNA, 23 nt, Human
aggguccuggggaaccugacccc

SEQ ID NO: 3172205 - RNA, 12 nt, Human
aggguccugggg

SEQ ID NO: 3172206 - RNA, 15 nt, Human
aggguccuggggaac

SEQ ID NO: 3172207 - RNA, 22 nt, Human
aucuugaaggaaaaauucaaua

SEQ ID NO: 3172208 - RNA, 22 nt, Human
aucuucugaacuuggcgcugcc

SEQ ID NO: 3172209 - RNA, 18 nt, Human
aucuugaagacuuuucuu

SEQ ID NO: 3172210 - RNA, 17 nt, Human
aucuugaaggaaaaauu

SEQ ID NO: 3172211 - RNA, 20 nt, Human
aucuugaaggaaaaauucaa

SEQ ID NO: 3172212 - RNA, 18 nt, Human
aucuugaaggaaaaauuc

SEQ ID NO: 3172213 - RNA, 14 nt, Human
aucuucuuuauaau

SEQ ID NO: 3172214 - RNA, 19 nt, Human
aucuucuggacuauagcug

SEQ ID NO: 3172215 - RNA, 17 nt, Human
aucucugcuuuggaaau

SEQ ID NO: 3172216 - RNA, 20 nt, Human
aucucuuaagacagcaugug

SEQ ID NO: 3172217 - RNA, 16 nt, Human
aucucggcucacugca

SEQ ID NO: 3172218 - RNA, 15 nt, Human
aucucguauagaagu

SEQ ID NO: 3172219 - RNA, 19 nt, Human
aucucguauagaagucuuc

SEQ ID NO: 3172220 - RNA, 14 nt, Human
aucucggcucacug

SEQ ID NO: 3172221 - RNA, 15 nt, Human
aucucggcucacugc

SEQ ID NO: 3172222 - RNA, 16 nt, Human
aucuccuuagaaaagc

SEQ ID NO: 3172223 - RNA, 18 nt, Human
aucuccuuuguauucugu

SEQ ID NO: 3172224 - RNA, 22 nt, Human
aucugcuuuuuaaagaaugcuc

SEQ ID NO: 3172225 - RNA, 22 nt, Human
aucuggaccccaucugugaaua

SEQ ID NO: 3172226 - RNA, 18 nt, Human
aucuggacuccucugucc

SEQ ID NO: 3172227 - RNA, 17 nt, Human
aucuggacuccucuguc

SEQ ID NO: 3172228 - RNA, 16 nt, Human
aucuggacuccucugu

SEQ ID NO: 3172229 - RNA, 15 nt, Human
aucuggacuccucug

SEQ ID NO: 3172230 - RNA, 19 nt, Human
aucuggacuccucugucca

SEQ ID NO: 3172231 - RNA, 21 nt, Human
aucuggaccccaucugugaau

SEQ ID NO: 3172232 - RNA, 21 nt, Human
aucucccccagccccauccuc

SEQ ID NO: 3172233 - RNA, 16 nt, Human
aucuaucuggugauuu

SEQ ID NO: 3172234 - RNA, 19 nt, Human
aucuaucuggugauuucua

SEQ ID NO: 3172235 - RNA, 20 nt, Human
aucuaucuggugauuucuag

SEQ ID NO: 3172236 - RNA, 21 nt, Human
aucuaucuggugauuucuagc

SEQ ID NO: 3172237 - RNA, 23 nt, Human
aucuaucuggugauuucuagcuc

SEQ ID NO: 3172238 - RNA, 18 nt, Human
augaagguuuuuguaaag

SEQ ID NO: 3172239 - RNA, 17 nt, Human
augaagguuuuuguaaa

SEQ ID NO: 3172240 - RNA, 21 nt, Human
augaagguuuuuguaaagauu

SEQ ID NO: 3172241 - RNA, 17 nt, Human
augaaagacuguacaaa

SEQ ID NO: 3172242 - RNA, 16 nt, Human
augaaagacuguacaa

SEQ ID NO: 3172243 - RNA, 13 nt, Human
augaaagacugua

SEQ ID NO: 3172244 - RNA, 21 nt, Human
augaccuuucaauaggaaaaa

SEQ ID NO: 3172245 - RNA, 18 nt, Human
augaccuuucaauaggaa

SEQ ID NO: 3172246 - RNA, 22 nt, Human
augaccuuucaauaggaaaaac

SEQ ID NO: 3172247 - RNA, 23 nt, Human
augaccuuucaauaggaaaaacu

SEQ ID NO: 3172248 - RNA, 20 nt, Human
augaggcagcacgugcacaa

SEQ ID NO: 3172249 - RNA, 19 nt, Human
augaggaguaaaauucagu

SEQ ID NO: 3172250 - RNA, 14 nt, Human
aucagccugugcca

SEQ ID NO: 3172251 - RNA, 23 nt, Human
aucagcgccggccuccagaacuu

SEQ ID NO: 3172252 - RNA, 21 nt, Human
aucagcugcugaaacaacaaa

SEQ ID NO: 3172253 - RNA, 19 nt, Human
aucagccugcuccagcugu

SEQ ID NO: 3172254 - RNA, 17 nt, Human
aucagccugcuccagcu

SEQ ID NO: 3172255 - RNA, 18 nt, Human
aucagccugcuccagcug

SEQ ID NO: 3172256 - RNA, 19 nt, Human
aucaccgaaaacguggcug

SEQ ID NO: 3172257 - RNA, 14 nt, Human
aucaccgaaaacgu

SEQ ID NO: 3172258 - RNA, 19 nt, Human
aucaccaacgucugugcca

SEQ ID NO: 3172259 - RNA, 23 nt, Human
aucacccgcuaagagggagggag

SEQ ID NO: 3172260 - RNA, 18 nt, Human
aucaccaacgucugugcc

SEQ ID NO: 3172261 - RNA, 15 nt, Human
aucacauguggacuu

SEQ ID NO: 3172262 - RNA, 21 nt, Human
aucacagccucugaaaaccaa

SEQ ID NO: 3172263 - RNA, 13 nt, Human
aucacagccucug

SEQ ID NO: 3172264 - RNA, 23 nt, Human
aucacaggcugggcugggcacug

SEQ ID NO: 3172265 - RNA, 22 nt, Human
aucacaggcugggcugggcacu

SEQ ID NO: 3172266 - RNA, 21 nt, Human
aucacaggcugggcugggcac

SEQ ID NO: 3172267 - RNA, 20 nt, Human
aucacaggcugggcugggca

SEQ ID NO: 3172268 - RNA, 14 nt, Human
aucacagcuuguuu

SEQ ID NO: 3172269 - RNA, 18 nt, Human
aucacagcuuguuuugga

SEQ ID NO: 3172270 - RNA, 21 nt, Human
aucacagcuuguuuuggacuu

SEQ ID NO: 3172271 - RNA, 13 nt, Human
aucacaggcuggg

SEQ ID NO: 3172272 - RNA, 15 nt, Human
aucacaggcugggcu

SEQ ID NO: 3172273 - RNA, 14 nt, Human
aucacaggcugggc

SEQ ID NO: 3172274 - RNA, 18 nt, Human
aucaugugcgucagucca

SEQ ID NO: 3172275 - RNA, 13 nt, Human
aucagcugcuuug

SEQ ID NO: 3172276 - RNA, 16 nt, Human
aucagcugcuuuguua

SEQ ID NO: 3172277 - RNA, 19 nt, Human
aucagcugcuuuguuaccu

SEQ ID NO: 3172278 - RNA, 17 nt, Human
aucagcugcugaaacaa

SEQ ID NO: 3172279 - RNA, 18 nt, Human
aucagcugagccuucuga

SEQ ID NO: 3172280 - RNA, 23 nt, Human
aucagcugcugaaacaacaaaua

SEQ ID NO: 3172281 - RNA, 22 nt, Human
aucagcugcugaaacaacaaau

SEQ ID NO: 3172282 - RNA, 10 nt, Human
auccagaaac

SEQ ID NO: 3172283 - RNA, 20 nt, Human
auccagaaacuuguucuucc

SEQ ID NO: 3172284 - RNA, 19 nt, Human
auccagaaacuuguucuuc

SEQ ID NO: 3172285 - RNA, 14 nt, Human
aucccauuuaaaaa

SEQ ID NO: 3172286 - RNA, 15 nt, Human
aucccauuuaaaaaa

SEQ ID NO: 3172287 - RNA, 13 nt, Human
auccccaagccug

SEQ ID NO: 3172288 - RNA, 18 nt, Human
auccaggacccugccagg

SEQ ID NO: 3172289 - RNA, 15 nt, Human
auccaggacccugcc

SEQ ID NO: 3172290 - RNA, 13 nt, Human
auccaggacccug

SEQ ID NO: 3172291 - RNA, 11 nt, Human
auccaggaccc

SEQ ID NO: 3172292 - RNA, 21 nt, Human
auccagaaacuuguucuucca

SEQ ID NO: 3172293 - RNA, 23 nt, Human
auccaggacccugccaggcacag

SEQ ID NO: 3172294 - RNA, 22 nt, Human
auccaggacccugccaggcaca

SEQ ID NO: 3172295 - RNA, 20 nt, Human
auccaggacccugccaggca

SEQ ID NO: 3172296 - RNA, 19 nt, Human
auccaggacccugccaggc

SEQ ID NO: 3172297 - RNA, 18 nt, Human
auccccuuccuaccaccc

SEQ ID NO: 3172298 - RNA, 11 nt, Human
auccccuuccu

SEQ ID NO: 3172299 - RNA, 15 nt, Human
auccccuguagagug

SEQ ID NO: 3172300 - RNA, 23 nt, Human
auccucauacccacccccaccca

SEQ ID NO: 3172301 - RNA, 11 nt, Human
auccuccaggu

SEQ ID NO: 3172302 - RNA, 23 nt, Human
auccuccaggugcacaagcucca

SEQ ID NO: 3172303 - RNA, 13 nt, Human
auccuccagggcu

SEQ ID NO: 3172304 - RNA, 12 nt, Human
auccuccagggc

SEQ ID NO: 3172305 - RNA, 15 nt, Human
auccucccaccucag

SEQ ID NO: 3172306 - RNA, 19 nt, Human
auccucccaccucagccuc

SEQ ID NO: 3172307 - RNA, 18 nt, Human
auccucccaccucagccu

SEQ ID NO: 3172308 - RNA, 20 nt, Human
auccucccaccucagccucc

SEQ ID NO: 3172309 - RNA, 15 nt, Human
aucggcauuuguuuc

SEQ ID NO: 3172310 - RNA, 18 nt, Human
auguuugccucugccucu

SEQ ID NO: 3172311 - RNA, 15 nt, Human
auguuugccuucugc

SEQ ID NO: 3172312 - RNA, 22 nt, Human
auguuugccucugccucugaca

SEQ ID NO: 3172313 - RNA, 19 nt, Human
auguuugccucugccucug

SEQ ID NO: 3172314 - RNA, 15 nt, Human
auuaaaucauacucc

SEQ ID NO: 3172315 - RNA, 14 nt, Human
auuaaauauauuuu

SEQ ID NO: 3172316 - RNA, 18 nt, Human
auuaaaugaacaucuaua

SEQ ID NO: 3172317 - RNA, 19 nt, Human
auguuuucagcuaggaaca

SEQ ID NO: 3172318 - RNA, 12 nt, Human
auguuuucagcu

SEQ ID NO: 3172319 - RNA, 22 nt, Human
auguuuuaucguccagugacuu

SEQ ID NO: 3172320 - RNA, 15 nt, Human
auguuuucaaaugga

SEQ ID NO: 3172321 - RNA, 13 nt, Human
auguuuucaaaug

SEQ ID NO: 3172322 - RNA, 12 nt, Human
auguuuucaaau

SEQ ID NO: 3172323 - RNA, 17 nt, Human
auguuuuagcacagcgu

SEQ ID NO: 3172324 - RNA, 20 nt, Human
auguuugcugaacauuggag

SEQ ID NO: 3172325 - RNA, 17 nt, Human
auguucuaagaagugaa

SEQ ID NO: 3172326 - RNA, 21 nt, Human
augugugauucaaugccucug

SEQ ID NO: 3172327 - RNA, 15 nt, Human
augugugcccagcuu

SEQ ID NO: 3172328 - RNA, 14 nt, Human
augugugcccagcu

SEQ ID NO: 3172329 - RNA, 13 nt, Human
augugugcccagc

SEQ ID NO: 3172330 - RNA, 18 nt, Human
augugggcagugauguca

SEQ ID NO: 3172331 - RNA, 16 nt, Human
augugugagugcaugu

SEQ ID NO: 3172332 - RNA, 12 nt, Human
auguucugggac

SEQ ID NO: 3172333 - RNA, 11 nt, Human
auguucuggga

SEQ ID NO: 3172334 - RNA, 14 nt, Human
augugaaaggauau

SEQ ID NO: 3172335 - RNA, 18 nt, Human
augugaaaggauaugaau

SEQ ID NO: 3172336 - RNA, 20 nt, Human
augugaaaggauaugaaucu

SEQ ID NO: 3172337 - RNA, 14 nt, Human
augucuuuucuugc

SEQ ID NO: 3172338 - RNA, 18 nt, Human
augucuuuccaaauuauu

SEQ ID NO: 3172339 - RNA, 19 nt, Human
augucuuuccaaauuauuu

SEQ ID NO: 3172340 - RNA, 21 nt, Human
augucuuuccaaauuauuucu

SEQ ID NO: 3172341 - RNA, 13 nt, Human
augucuuccugga

SEQ ID NO: 3172342 - RNA, 15 nt, Human
augucaaaaguagaa

SEQ ID NO: 3172343 - RNA, 17 nt, Human
augucaaaaguagaacu

SEQ ID NO: 3172344 - RNA, 20 nt, Human
augucaaaaguagaacuuug

SEQ ID NO: 3172345 - RNA, 22 nt, Human
augucaaaaguagaacuuugua

SEQ ID NO: 3172346 - RNA, 23 nt, Human
augucaaaaguagaacuuuguau

SEQ ID NO: 3172347 - RNA, 20 nt, Human
augugaaggaccuucacucu

SEQ ID NO: 3172348 - RNA, 22 nt, Human
augugaauuacuaacuucuaaa

SEQ ID NO: 3172349 - RNA, 21 nt, Human
augugaauuacuaacuucuaa

SEQ ID NO: 3172350 - RNA, 14 nt, Human
augugaauuacuaa

SEQ ID NO: 3172351 - RNA, 13 nt, Human
augugaauuacua

SEQ ID NO: 3172352 - RNA, 20 nt, Human
augugaauuacuaacuucua

SEQ ID NO: 3172353 - RNA, 18 nt, Human
augugaauuacuaacuuc

SEQ ID NO: 3172354 - RNA, 17 nt, Human
augugaauuacuaacuu

SEQ ID NO: 3172355 - RNA, 16 nt, Human
augugaauuacuaacu

SEQ ID NO: 3172356 - RNA, 18 nt, Human
auguauucuguaaaagaa

SEQ ID NO: 3172357 - RNA, 21 nt, Human
auguauucauauuuguacuuu

SEQ ID NO: 3172358 - RNA, 23 nt, Human
augucaaaaauauuuaggaauuu

SEQ ID NO: 3172359 - RNA, 17 nt, Human
augucaaaaauauuuag

SEQ ID NO: 3172360 - RNA, 23 nt, Human
auguauuuugugaguuuguuucu

SEQ ID NO: 3172361 - RNA, 20 nt, Human
auguauuuugugaguuuguu

SEQ ID NO: 3172362 - RNA, 12 nt, Human
auguauuuugug

SEQ ID NO: 3172363 - RNA, 14 nt, Human
auguauuuugugag

SEQ ID NO: 3172364 - RNA, 13 nt, Human
auguauuuuguga

SEQ ID NO: 3172365 - RNA, 19 nt, Human
auguauuuugugaguuugu

SEQ ID NO: 3172366 - RNA, 17 nt, Human
auguauuuugugaguuu

SEQ ID NO: 3172367 - RNA, 16 nt, Human
auguauuuugugaguu

SEQ ID NO: 3172368 - RNA, 15 nt, Human
auguauuuugugagu

SEQ ID NO: 3172369 - RNA, 16 nt, Human
auguaagggaaacugc

SEQ ID NO: 3172370 - RNA, 14 nt, Human
auguaagggaaacu

SEQ ID NO: 3172371 - RNA, 19 nt, Human
auguaagggaaacugccag

SEQ ID NO: 3172372 - RNA, 18 nt, Human
auguaauuaaacuguuaa

SEQ ID NO: 3172373 - RNA, 19 nt, Human
auguaauuaaacuguuaac

SEQ ID NO: 3172374 - RNA, 17 nt, Human
auguaauuaaguacuau

SEQ ID NO: 3172375 - RNA, 15 nt, Human
auguaauuaaguacu

SEQ ID NO: 3172376 - RNA, 15 nt, Human
auggucauauuuaaa

SEQ ID NO: 3172377 - RNA, 19 nt, Human
auggucaccaaaucagcug

SEQ ID NO: 3172378 - RNA, 19 nt, Human
augguaugcacaauuccau

SEQ ID NO: 3172379 - RNA, 18 nt, Human
augguaugcacaauucca

SEQ ID NO: 3172380 - RNA, 14 nt, Human
augguauccagaau

SEQ ID NO: 3172381 - RNA, 18 nt, Human
augguaucaaaauuacau

SEQ ID NO: 3172382 - RNA, 21 nt, Human
augguaucaaaauuacauaua

SEQ ID NO: 3172383 - RNA, 20 nt, Human
augcauauauauaugugugu

SEQ ID NO: 3172384 - RNA, 12 nt, Human
augcaucuuuga

SEQ ID NO: 3172385 - RNA, 13 nt, Human
augcaucuuugau

SEQ ID NO: 3172386 - RNA, 14 nt, Human
augcauauuacugu

SEQ ID NO: 3172387 - RNA, 13 nt, Human
augcauauuacug

SEQ ID NO: 3172388 - RNA, 17 nt, Human
augccucucucaggcca

SEQ ID NO: 3172389 - RNA, 19 nt, Human
augccucucucaggccaaa

SEQ ID NO: 3172390 - RNA, 15 nt, Human
augcaucuuugaugu

SEQ ID NO: 3172391 - RNA, 16 nt, Human
augcaucuuugaugug

SEQ ID NO: 3172392 - RNA, 19 nt, Human
augcaucuuugauguguug

SEQ ID NO: 3172393 - RNA, 21 nt, Human
augcaucuuugauguguuguu

SEQ ID NO: 3172394 - RNA, 16 nt, Human
augcauauauauaugu

SEQ ID NO: 3172395 - RNA, 15 nt, Human
augcauauauauaug

SEQ ID NO: 3172396 - RNA, 16 nt, Human
augcacaaacagaggc

SEQ ID NO: 3172397 - RNA, 17 nt, Human
augcacaaacagaggcc

SEQ ID NO: 3172398 - RNA, 16 nt, Human
augaugccaugaggaa

SEQ ID NO: 3172399 - RNA, 17 nt, Human
augaugccaugaggaac

SEQ ID NO: 3172400 - RNA, 24 nt, Human
augauguuuuccaugaguccccug

SEQ ID NO: 3172401 - RNA, 17 nt, Human
augauguuaguuuuccu

SEQ ID NO: 3172402 - RNA, 19 nt, Human
augauguuaguuuuccuua

SEQ ID NO: 3172403 - RNA, 16 nt, Human
augaugcucuuuccca

SEQ ID NO: 3172404 - RNA, 15 nt, Human
augcacaaacagagg

SEQ ID NO: 3172405 - RNA, 17 nt, Human
augcaauuuuucuuucu

SEQ ID NO: 3172406 - RNA, 17 nt, Human
augauguuuuuaaaauc

SEQ ID NO: 3172407 - RNA, 13 nt, Human
augauguuuuuaa

SEQ ID NO: 3172408 - RNA, 17 nt, Human
augauuaaaaauaucaa

SEQ ID NO: 3172409 - RNA, 14 nt, Human
augauuaaaaauau

SEQ ID NO: 3172410 - RNA, 22 nt, Human
augauguuuuuaaaaucuuauu

SEQ ID NO: 3172411 - RNA, 21 nt, Human
augauguuuuuaaaaucuuau

SEQ ID NO: 3172412 - RNA, 20 nt, Human
augauguuuuuaaaaucuua

SEQ ID NO: 3172413 - RNA, 19 nt, Human
augauguuuuuaaaaucuu

SEQ ID NO: 3172414 - RNA, 18 nt, Human
augauguuuuuaaaaucu

SEQ ID NO: 3172415 - RNA, 16 nt, Human
auggcuguggagugug

SEQ ID NO: 3172416 - RNA, 20 nt, Human
auggcugugccucugccugu

SEQ ID NO: 3172417 - RNA, 19 nt, Human
auggcugugccucugccug

SEQ ID NO: 3172418 - RNA, 11 nt, Human
augcugcccug

SEQ ID NO: 3172419 - RNA, 15 nt, Human
augcugccccugccu

SEQ ID NO: 3172420 - RNA, 11 nt, Human
augcugccccu

SEQ ID NO: 3172421 - RNA, 16 nt, Human
augcucuuuacuucau

SEQ ID NO: 3172422 - RNA, 12 nt, Human
augcucuuuccc

SEQ ID NO: 3172423 - RNA, 21 nt, Human
augcucuuucccacccagccu

SEQ ID NO: 3172424 - RNA, 15 nt, Human
augcucuuucccacc

SEQ ID NO: 3172425 - RNA, 23 nt, Human
augcugaacauugcauauaacuu

SEQ ID NO: 3172426 - RNA, 17 nt, Human
augcugaacauugcaua

SEQ ID NO: 3172427 - RNA, 23 nt, Human
augcucuuucccacccagccugg

SEQ ID NO: 3172428 - RNA, 22 nt, Human
augcucuuucccacccagccug

SEQ ID NO: 3172429 - RNA, 22 nt, Human
augcugaaaauugccuuucugu

SEQ ID NO: 3172430 - RNA, 14 nt, Human
augcugaaaauugc

SEQ ID NO: 3172431 - RNA, 15 nt, Human
auggauuuccagcca

SEQ ID NO: 3172432 - RNA, 23 nt, Human
auggauuggguaucaaaaugaau

SEQ ID NO: 3172433 - RNA, 18 nt, Human
auggcugugccucugccu

SEQ ID NO: 3172434 - RNA, 17 nt, Human
auggaggagaguguuua

SEQ ID NO: 3172435 - RNA, 16 nt, Human
auggaggaaaaccaag

SEQ ID NO: 3172436 - RNA, 22 nt, Human
auggaggaaaaccaagccgugg

SEQ ID NO: 3172437 - RNA, 18 nt, Human
auggaggaagaacugaaa

SEQ ID NO: 3172438 - RNA, 20 nt, Human
auggaggaagaacugaaagg

SEQ ID NO: 3172439 - RNA, 22 nt, Human
auggaggaccacgucuauuuca

SEQ ID NO: 3172440 - RNA, 16 nt, Human
augcugccccugccuu

SEQ ID NO: 3172441 - RNA, 20 nt, Human
auggaaacagaggaccagca

SEQ ID NO: 3172442 - RNA, 18 nt, Human
auggaaacagaggaccag

SEQ ID NO: 3172443 - RNA, 20 nt, Human
auggaaaaugccaugaauua

SEQ ID NO: 3172444 - RNA, 16 nt, Human
aguggcuggaucugug

SEQ ID NO: 3172445 - RNA, 21 nt, Human
aguggcuccucccggugccca

SEQ ID NO: 3172446 - RNA, 17 nt, Human
aguggcuccucccggug

SEQ ID NO: 3172447 - RNA, 13 nt, Human
aguggcuccuccc

SEQ ID NO: 3172448 - RNA, 23 nt, Human
aguggcuuaaaacaacacucaca

SEQ ID NO: 3172449 - RNA, 23 nt, Human
aguggcgaaaucccugcucacug

SEQ ID NO: 3172450 - RNA, 21 nt, Human
aguggcgaaaucccugcucac

SEQ ID NO: 3172451 - RNA, 18 nt, Human
aguggcgaaaucccugcu

SEQ ID NO: 3172452 - RNA, 17 nt, Human
aguguauuaaaugaaca

SEQ ID NO: 3172453 - RNA, 14 nt, Human
aguguauuaaauga

SEQ ID NO: 3172454 - RNA, 14 nt, Human
agugggagcugccu

SEQ ID NO: 3172455 - RNA, 15 nt, Human
agugggagcugccug

SEQ ID NO: 3172456 - RNA, 15 nt, Human
agugucuuaauuaaa

SEQ ID NO: 3172457 - RNA, 18 nt, Human
agugucuuaauuaaaaga

SEQ ID NO: 3172458 - RNA, 17 nt, Human
agugucuuaauuaaaag

SEQ ID NO: 3172459 - RNA, 18 nt, Human
aguucauaaauuuauggu

SEQ ID NO: 3172460 - RNA, 19 nt, Human
aguucagguaacaggcaga

SEQ ID NO: 3172461 - RNA, 18 nt, Human
aguucagguaacaggcag

SEQ ID NO: 3172462 - RNA, 20 nt, Human
aguucagguaacaggcagau

SEQ ID NO: 3172463 - RNA, 22 nt, Human
aguucaucuugaauuguaagga

SEQ ID NO: 3172464 - RNA, 14 nt, Human
aguucauucauauu

SEQ ID NO: 3172465 - RNA, 16 nt, Human
aguucauucagggccg

SEQ ID NO: 3172466 - RNA, 21 nt, Human
aguugaaaagacuccaaagaa

SEQ ID NO: 3172467 - RNA, 23 nt, Human
aguucauucauauuacaauauuu

SEQ ID NO: 3172468 - RNA, 15 nt, Human
aguucauugcaauua

SEQ ID NO: 3172469 - RNA, 17 nt, Human
aguucauucauauuaca

SEQ ID NO: 3172470 - RNA, 16 nt, Human
aguucauucauauuac

SEQ ID NO: 3172471 - RNA, 15 nt, Human
aguucauucauauua

SEQ ID NO: 3172472 - RNA, 14 nt, Human
aguuacagacaaag

SEQ ID NO: 3172473 - RNA, 16 nt, Human
aguuacagacaaagcg

SEQ ID NO: 3172474 - RNA, 18 nt, Human
aguuacacuaaaagguga

SEQ ID NO: 3172475 - RNA, 15 nt, Human
aguuaauguauauaa

SEQ ID NO: 3172476 - RNA, 17 nt, Human
aguuaauguauauaaaa

SEQ ID NO: 3172477 - RNA, 18 nt, Human
aguuaauguauauaaaaa

SEQ ID NO: 3172478 - RNA, 13 nt, Human
aguuaaucuauaa

SEQ ID NO: 3172479 - RNA, 12 nt, Human
aguuaaauaaau

SEQ ID NO: 3172480 - RNA, 13 nt, Human
aguuaagccuuug

SEQ ID NO: 3172481 - RNA, 23 nt, Human
aguuaaagugaggccacugaaga

SEQ ID NO: 3172482 - RNA, 16 nt, Human
aguuaagauucuuggu

SEQ ID NO: 3172483 - RNA, 23 nt, Human
aguuaaagggaagaaaacacugu

SEQ ID NO: 3172484 - RNA, 18 nt, Human
aguuaaggagaaucaugu

SEQ ID NO: 3172485 - RNA, 22 nt, Human
aguuaaggagaaucauguuucu

SEQ ID NO: 3172486 - RNA, 21 nt, Human
aguuaaggagaaucauguuuc

SEQ ID NO: 3172487 - RNA, 14 nt, Human
aguuaagccuuugg

SEQ ID NO: 3172488 - RNA, 22 nt, Human
aguuaagucuaucugguauuaa

SEQ ID NO: 3172489 - RNA, 13 nt, Human
aguuaaagggaag

SEQ ID NO: 3172490 - RNA, 18 nt, Human
aguuaaagggaagaaaac

SEQ ID NO: 3172491 - RNA, 17 nt, Human
aguuaaagggaagaaaa

SEQ ID NO: 3172492 - RNA, 21 nt, Human
aguuaaagaagacauuugcca

SEQ ID NO: 3172493 - RNA, 13 nt, Human
aguuaaagaaagg

SEQ ID NO: 3172494 - RNA, 14 nt, Human
aguuaaagaaagga

SEQ ID NO: 3172495 - RNA, 16 nt, Human
aguuaaagaaaggaaa

SEQ ID NO: 3172496 - RNA, 18 nt, Human
aguuaaagaaaggaaaag

SEQ ID NO: 3172497 - RNA, 18 nt, Human
aguuaaaagcacaaagga

SEQ ID NO: 3172498 - RNA, 17 nt, Human
aguuaaaaguaaaagag

SEQ ID NO: 3172499 - RNA, 22 nt, Human
aguugaaaagacuccaaagaaa

SEQ ID NO: 3172500 - RNA, 14 nt, Human
aguugaagacagag

SEQ ID NO: 3172501 - RNA, 16 nt, Human
aguuguguguaugugu

SEQ ID NO: 3172502 - RNA, 18 nt, Human
aguuguguguaugugugu

SEQ ID NO: 3172503 - RNA, 23 nt, Human
aguuguuucuagacuauaaaugu

SEQ ID NO: 3172504 - RNA, 13 nt, Human
aguuguuugaugc

SEQ ID NO: 3172505 - RNA, 11 nt, Human
aguuguuugau

SEQ ID NO: 3172506 - RNA, 17 nt, Human
aguuguguuuuuuaaga

SEQ ID NO: 3172507 - RNA, 19 nt, Human
aguuguguuuuuuaagaug

SEQ ID NO: 3172508 - RNA, 21 nt, Human
aguuguguuuuuuaagauggc

SEQ ID NO: 3172509 - RNA, 20 nt, Human
aguuguuugauucagacagc

SEQ ID NO: 3172510 - RNA, 16 nt, Human
aguaugaauaaagaca

SEQ ID NO: 3172511 - RNA, 18 nt, Human
aguaugcacuauauacau

SEQ ID NO: 3172512 - RNA, 16 nt, Human
aguaugcauuauuaaa

SEQ ID NO: 3172513 - RNA, 19 nt, Human
aguaugcauuauuaaauug

SEQ ID NO: 3172514 - RNA, 21 nt, Human
aguaugcauuauuaaauugua

SEQ ID NO: 3172515 - RNA, 11 nt, Human
aguaucuugaa

SEQ ID NO: 3172516 - RNA, 14 nt, Human
aguaucugugaacu

SEQ ID NO: 3172517 - RNA, 12 nt, Human
aguaucuugaag

SEQ ID NO: 3172518 - RNA, 15 nt, Human
aguaucuugaagacu

SEQ ID NO: 3172519 - RNA, 15 nt, Human
aguaucucagggccu

SEQ ID NO: 3172520 - RNA, 22 nt, Human
agucaaauguaauguggcuucu

SEQ ID NO: 3172521 - RNA, 23 nt, Human
agucaaauguaauguggcuucug

SEQ ID NO: 3172522 - RNA, 22 nt, Human
agucaaacacuugugacuuuug

SEQ ID NO: 3172523 - RNA, 19 nt, Human
agucaaacacuugugacuu

SEQ ID NO: 3172524 - RNA, 17 nt, Human
aguaugggacuggccuc

SEQ ID NO: 3172525 - RNA, 20 nt, Human
aguaugggacuggccucugc

SEQ ID NO: 3172526 - RNA, 12 nt, Human
agucaacaguac

SEQ ID NO: 3172527 - RNA, 19 nt, Human
agucaacaguacccugguu

SEQ ID NO: 3172528 - RNA, 12 nt, Human
agucugaaggcu

SEQ ID NO: 3172529 - RNA, 16 nt, Human
agucugaaggcugggu

SEQ ID NO: 3172530 - RNA, 13 nt, Human
agucugaaggcug

SEQ ID NO: 3172531 - RNA, 15 nt, Human
agucugaaggcuggg

SEQ ID NO: 3172532 - RNA, 20 nt, Human
aguccuggcaugggaaugaa

SEQ ID NO: 3172533 - RNA, 21 nt, Human
aguccuggcaugggaaugaau

SEQ ID NO: 3172534 - RNA, 22 nt, Human
aguccuggcaugggaaugaaug

SEQ ID NO: 3172535 - RNA, 20 nt, Human
agugaacuugggccacugug

SEQ ID NO: 3172536 - RNA, 17 nt, Human
agucuggaaugcagugg

SEQ ID NO: 3172537 - RNA, 18 nt, Human
agucugauucccaagcuc

SEQ ID NO: 3172538 - RNA, 16 nt, Human
agucugauucccaagc

SEQ ID NO: 3172539 - RNA, 12 nt, Human
agucugcauaua

SEQ ID NO: 3172540 - RNA, 14 nt, Human
agucugcauauauu

SEQ ID NO: 3172541 - RNA, 15 nt, Human
agugaagacuccaga

SEQ ID NO: 3172542 - RNA, 16 nt, Human
agugaagacuccagaa

SEQ ID NO: 3172543 - RNA, 17 nt, Human
agugaagacuccagaaa

SEQ ID NO: 3172544 - RNA, 18 nt, Human
agugaccauacuaauuau

SEQ ID NO: 3172545 - RNA, 18 nt, Human
agugaccauugcaugccg

SEQ ID NO: 3172546 - RNA, 16 nt, Human
auaucaaaagacacag

SEQ ID NO: 3172547 - RNA, 14 nt, Human
auaucaaaagacac

SEQ ID NO: 3172548 - RNA, 21 nt, Human
auaucaaauuaauugugugaa

SEQ ID NO: 3172549 - RNA, 17 nt, Human
auaucaaaagacacagg

SEQ ID NO: 3172550 - RNA, 13 nt, Human
auaucaaauuaau

SEQ ID NO: 3172551 - RNA, 18 nt, Human
auaucaaauuaauugugu

SEQ ID NO: 3172552 - RNA, 19 nt, Human
auaucaaauuaauugugug

SEQ ID NO: 3172553 - RNA, 20 nt, Human
auaucaaauuaauuguguga

SEQ ID NO: 3172554 - RNA, 16 nt, Human
auauuauauuuggaug

SEQ ID NO: 3172555 - RNA, 15 nt, Human
auauuauauuuggau

SEQ ID NO: 3172556 - RNA, 22 nt, Human
auauuauauuuggaugcagagu

SEQ ID NO: 3172557 - RNA, 13 nt, Human
auauuauaucaga

SEQ ID NO: 3172558 - RNA, 20 nt, Human
auauuagaaaacuuuguuag

SEQ ID NO: 3172559 - RNA, 18 nt, Human
auauuagaaaacuuuguu

SEQ ID NO: 3172560 - RNA, 17 nt, Human
auauuagaaaacuuugu

SEQ ID NO: 3172561 - RNA, 16 nt, Human
auauuagaaaacuuug

SEQ ID NO: 3172562 - RNA, 14 nt, Human
auauuauauuugga

SEQ ID NO: 3172563 - RNA, 13 nt, Human
auauuauauuugg

SEQ ID NO: 3172564 - RNA, 12 nt, Human
auauuauauuug

SEQ ID NO: 3172565 - RNA, 13 nt, Human
auauuuauugacu

SEQ ID NO: 3172566 - RNA, 16 nt, Human
auauuuauugacucuu

SEQ ID NO: 3172567 - RNA, 18 nt, Human
auauuuauugacucuuga

SEQ ID NO: 3172568 - RNA, 19 nt, Human
auauuuacuucuuauacau

SEQ ID NO: 3172569 - RNA, 17 nt, Human
auauuauuuguguuucc

SEQ ID NO: 3172570 - RNA, 18 nt, Human
auauuauuuguguuuccu

SEQ ID NO: 3172571 - RNA, 21 nt, Human
auaugcuuauacacuuacacu

SEQ ID NO: 3172572 - RNA, 11 nt, Human
auauuacuuua

SEQ ID NO: 3172573 - RNA, 17 nt, Human
auauuacuuuaacaugc

SEQ ID NO: 3172574 - RNA, 21 nt, Human
auauuacuguacaugggacua

SEQ ID NO: 3172575 - RNA, 17 nt, Human
auauuacuguacauggg

SEQ ID NO: 3172576 - RNA, 15 nt, Human
auauuagaaaacuuu

SEQ ID NO: 3172577 - RNA, 14 nt, Human
auauuagaaaacuu

SEQ ID NO: 3172578 - RNA, 14 nt, Human
auauccacacauuu

SEQ ID NO: 3172579 - RNA, 12 nt, Human
auaucauuucuu

SEQ ID NO: 3172580 - RNA, 13 nt, Human
auaucauucuaaa

SEQ ID NO: 3172581 - RNA, 17 nt, Human
auaucauucuaaagaua

SEQ ID NO: 3172582 - RNA, 15 nt, Human
auaucauucuaaaga

SEQ ID NO: 3172583 - RNA, 20 nt, Human
auauacuuguuuuuguaaag

SEQ ID NO: 3172584 - RNA, 18 nt, Human
auauacuuguuuuuguaa

SEQ ID NO: 3172585 - RNA, 14 nt, Human
auauacuuguuuuu

SEQ ID NO: 3172586 - RNA, 15 nt, Human
auauagauuaaauca

SEQ ID NO: 3172587 - RNA, 17 nt, Human
auauagagucauuguaa

SEQ ID NO: 3172588 - RNA, 22 nt, Human
auauagagucauuguaauguug

SEQ ID NO: 3172589 - RNA, 19 nt, Human
auauagagucauuguaaug

SEQ ID NO: 3172590 - RNA, 18 nt, Human
auauagagucauuguaau

SEQ ID NO: 3172591 - RNA, 21 nt, Human
auauacuuguuuuuguaaaga

SEQ ID NO: 3172592 - RNA, 14 nt, Human
auaguauuugaaaa

SEQ ID NO: 3172593 - RNA, 13 nt, Human
auaguauuugaaa

SEQ ID NO: 3172594 - RNA, 22 nt, Human
auaguauuugaaaacagaaauu

SEQ ID NO: 3172595 - RNA, 20 nt, Human
auaguauuugaaaacagaaa

SEQ ID NO: 3172596 - RNA, 19 nt, Human
auaguauuugaaaacagaa

SEQ ID NO: 3172597 - RNA, 18 nt, Human
auaguauuugaaaacaga

SEQ ID NO: 3172598 - RNA, 18 nt, Human
auaguaugguggcugggu

SEQ ID NO: 3172599 - RNA, 17 nt, Human
auaguaugguggcuggg

SEQ ID NO: 3172600 - RNA, 16 nt, Human
auaguaugguggcugg

SEQ ID NO: 3172601 - RNA, 12 nt, Human
auagguuauuuu

SEQ ID NO: 3172602 - RNA, 17 nt, Human
auagguuagauauagag

SEQ ID NO: 3172603 - RNA, 12 nt, Human
auagguuucuaa

SEQ ID NO: 3172604 - RNA, 23 nt, Human
auaggugcuacaaaaacacagca

SEQ ID NO: 3172605 - RNA, 14 nt, Human
auagguuagauaua

SEQ ID NO: 3172606 - RNA, 21 nt, Human
auagguuaaaaaaaaaaguca

SEQ ID NO: 3172607 - RNA, 21 nt, Human
auaggugcuacaaaaacacag

SEQ ID NO: 3172608 - RNA, 15 nt, Human
auaggugcuacaaaa

SEQ ID NO: 3172609 - RNA, 14 nt, Human
auaggugcuacaaa

SEQ ID NO: 3172610 - RNA, 17 nt, Human
auagguccuuuagaaac

SEQ ID NO: 3172611 - RNA, 16 nt, Human
auagguccuuuagaaa

SEQ ID NO: 3172612 - RNA, 21 nt, Human
auagguauaaguggugugugu

SEQ ID NO: 3172613 - RNA, 15 nt, Human
auagccccucucccc

SEQ ID NO: 3172614 - RNA, 18 nt, Human
auagcagcuuauucacaa

SEQ ID NO: 3172615 - RNA, 16 nt, Human
auagcaguagucuuuu

SEQ ID NO: 3172616 - RNA, 18 nt, Human
auagcaguauauguuaau

SEQ ID NO: 3172617 - RNA, 22 nt, Human
auagcaguauauguuaauuugu

SEQ ID NO: 3172618 - RNA, 20 nt, Human
auagcaucacuuaaaacacg

SEQ ID NO: 3172619 - RNA, 15 nt, Human
auagcaucacuuaaa

SEQ ID NO: 3172620 - RNA, 16 nt, Human
auagcaucacuuaaaa

SEQ ID NO: 3172621 - RNA, 17 nt, Human
auagcaucacuuaaaac

SEQ ID NO: 3172622 - RNA, 18 nt, Human
auagcaucacuuaaaaca

SEQ ID NO: 3172623 - RNA, 13 nt, Human
auagcaucacuua

SEQ ID NO: 3172624 - RNA, 23 nt, Human
auagcauaugacaaauguuucua

SEQ ID NO: 3172625 - RNA, 22 nt, Human
auagcauaugacaaauguuucu

SEQ ID NO: 3172626 - RNA, 20 nt, Human
auagcauaugacaaauguuu

SEQ ID NO: 3172627 - RNA, 19 nt, Human
auagcauaugacaaauguu

SEQ ID NO: 3172628 - RNA, 18 nt, Human
auagcauaugacaaaugu

SEQ ID NO: 3172629 - RNA, 17 nt, Human
auagcauaugacaaaug

SEQ ID NO: 3172630 - RNA, 15 nt, Human
auagccaaggccaaa

SEQ ID NO: 3172631 - RNA, 21 nt, Human
auagccaaggccaaaggaagc

SEQ ID NO: 3172632 - RNA, 21 nt, Human
auagcccaggauauauuuuau

SEQ ID NO: 3172633 - RNA, 20 nt, Human
auagcccaggauauauuuua

SEQ ID NO: 3172634 - RNA, 18 nt, Human
auagcccaggauauauuu

SEQ ID NO: 3172635 - RNA, 18 nt, Human
auaauuaacacuuaaggu

SEQ ID NO: 3172636 - RNA, 12 nt, Human
auaauuaacacu

SEQ ID NO: 3172637 - RNA, 19 nt, Human
auaauuaacacuuaagguu

SEQ ID NO: 3172638 - RNA, 23 nt, Human
auaauguauucauauuuguacuu

SEQ ID NO: 3172639 - RNA, 15 nt, Human
auaauguaagcucua

SEQ ID NO: 3172640 - RNA, 19 nt, Human
auaauguacugauuucagu

SEQ ID NO: 3172641 - RNA, 20 nt, Human
auaauguacugauuucagua

SEQ ID NO: 3172642 - RNA, 15 nt, Human
auaauguauucauau

SEQ ID NO: 3172643 - RNA, 19 nt, Human
auaauguauucauauuugu

SEQ ID NO: 3172644 - RNA, 18 nt, Human
auaauguauucauauuug

SEQ ID NO: 3172645 - RNA, 18 nt, Human
auacacacucaaaucaag

SEQ ID NO: 3172646 - RNA, 17 nt, Human
auacacacucaaaucaa

SEQ ID NO: 3172647 - RNA, 11 nt, Human
auacacacgcu

SEQ ID NO: 3172648 - RNA, 15 nt, Human
auacacacgcugccu

SEQ ID NO: 3172649 - RNA, 14 nt, Human
auacacacgcugcc

SEQ ID NO: 3172650 - RNA, 15 nt, Human
auaccauuuccguaa

SEQ ID NO: 3172651 - RNA, 13 nt, Human
auaccauuuccgu

SEQ ID NO: 3172652 - RNA, 20 nt, Human
auaccauuauuaucaaguag

SEQ ID NO: 3172653 - RNA, 16 nt, Human
auacacacgcugccuu

SEQ ID NO: 3172654 - RNA, 23 nt, Human
auaccauuauauguucccccugu

SEQ ID NO: 3172655 - RNA, 16 nt, Human
auaaggccucauccuc

SEQ ID NO: 3172656 - RNA, 15 nt, Human
auaaggacuuccuga

SEQ ID NO: 3172657 - RNA, 14 nt, Human
auaauguaagcucu

SEQ ID NO: 3172658 - RNA, 16 nt, Human
auaauggaaaaugcca

SEQ ID NO: 3172659 - RNA, 22 nt, Human
auaauggaaaaugccaugaauu

SEQ ID NO: 3172660 - RNA, 12 nt, Human
auacccaccccc

SEQ ID NO: 3172661 - RNA, 11 nt, Human
auacccacccc

SEQ ID NO: 3172662 - RNA, 18 nt, Human
auaccugucccccugaca

SEQ ID NO: 3172663 - RNA, 17 nt, Human
auaccugucccccugac

SEQ ID NO: 3172664 - RNA, 12 nt, Human
auaccuguugcu

SEQ ID NO: 3172665 - RNA, 18 nt, Human
auaccuuaaaauuugaaa

SEQ ID NO: 3172666 - RNA, 17 nt, Human
auaccuuaaaauuugaa

SEQ ID NO: 3172667 - RNA, 16 nt, Human
auaccuuaaaauuuga

SEQ ID NO: 3172668 - RNA, 15 nt, Human
auaccuuaaaauuug

SEQ ID NO: 3172669 - RNA, 13 nt, Human
auaccuuaaaauu

SEQ ID NO: 3172670 - RNA, 17 nt, Human
auaccuguuuaaauugc

SEQ ID NO: 3172671 - RNA, 15 nt, Human
auaccuguuuaaauu

SEQ ID NO: 3172672 - RNA, 14 nt, Human
auaccuugcuuauu

SEQ ID NO: 3172673 - RNA, 14 nt, Human
auaccuuagaaggu

SEQ ID NO: 3172674 - RNA, 13 nt, Human
auaccuucuuauu

SEQ ID NO: 3172675 - RNA, 18 nt, Human
auaccuuauauaugcacu

SEQ ID NO: 3172676 - RNA, 23 nt, Human
auaccuuaaaauuugaaacauug

SEQ ID NO: 3172677 - RNA, 22 nt, Human
auaccuuaaaauuugaaacauu

SEQ ID NO: 3172678 - RNA, 21 nt, Human
auaccuuaaaauuugaaacau

SEQ ID NO: 3172679 - RNA, 19 nt, Human
auaccuuaaaauuugaaac

SEQ ID NO: 3172680 - RNA, 22 nt, Human
auaaagcucaaaugaaauguau

SEQ ID NO: 3172681 - RNA, 22 nt, Human
auaaagcgaaaaacucaaccaa

SEQ ID NO: 3172682 - RNA, 15 nt, Human
auaaaggaaucuagc

SEQ ID NO: 3172683 - RNA, 17 nt, Human
auaaagcagacaggugu

SEQ ID NO: 3172684 - RNA, 15 nt, Human
auaaagaauaggacu

SEQ ID NO: 3172685 - RNA, 12 nt, Human
auaaagacaccu

SEQ ID NO: 3172686 - RNA, 23 nt, Human
auaaagaauaggacuuguuuuug

SEQ ID NO: 3172687 - RNA, 19 nt, Human
auaaagaauaggacuuguu

SEQ ID NO: 3172688 - RNA, 14 nt, Human
auaaaaauacugac

SEQ ID NO: 3172689 - RNA, 22 nt, Human
auaaauuuugaaaaguaauauu

SEQ ID NO: 3172690 - RNA, 14 nt, Human
auaacaacuuuuuu

SEQ ID NO: 3172691 - RNA, 13 nt, Human
auaacaacuuuuu

SEQ ID NO: 3172692 - RNA, 15 nt, Human
auaacaguaguguua

SEQ ID NO: 3172693 - RNA, 23 nt, Human
auaacaaagaaccuaacauuuau

SEQ ID NO: 3172694 - RNA, 13 nt, Human
auaacaaagaacc

SEQ ID NO: 3172695 - RNA, 12 nt, Human
auaacauagaau

SEQ ID NO: 3172696 - RNA, 14 nt, Human
auaacaucuuuauu

SEQ ID NO: 3172697 - RNA, 18 nt, Human
auaacaucuuuauugaaa

SEQ ID NO: 3172698 - RNA, 20 nt, Human
auaacaucuuuauugaaauu

SEQ ID NO: 3172699 - RNA, 21 nt, Human
auaacaucuuuauugaaauuc

SEQ ID NO: 3172700 - RNA, 22 nt, Human
auaacauagaauugcaaucuau

SEQ ID NO: 3172701 - RNA, 15 nt, Human
caccagaagcccaga

SEQ ID NO: 3172702 - RNA, 14 nt, Human
caccagaagcccag

SEQ ID NO: 3172703 - RNA, 13 nt, Human
caccagaagccca

SEQ ID NO: 3172704 - RNA, 16 nt, Human
caccacucaagaccaa

SEQ ID NO: 3172705 - RNA, 17 nt, Human
caccagaagcccagaau

SEQ ID NO: 3172706 - RNA, 16 nt, Human
caccagaagcccagaa

SEQ ID NO: 3172707 - RNA, 16 nt, Human
cacccaagggccuggc

SEQ ID NO: 3172708 - RNA, 17 nt, Human
cacccaagggccuggcc

SEQ ID NO: 3172709 - RNA, 18 nt, Human
cacccaagggccuggccu

SEQ ID NO: 3172710 - RNA, 19 nt, Human
cacccaagggccuggccug

SEQ ID NO: 3172711 - RNA, 20 nt, Human
cacccaagggccuggccuga

SEQ ID NO: 3172712 - RNA, 21 nt, Human
cacccaagggccuggccugag

SEQ ID NO: 3172713 - RNA, 23 nt, Human
cacccaagggccuggccugagcu

SEQ ID NO: 3172714 - RNA, 15 nt, Human
cacccacaggcaugu

SEQ ID NO: 3172715 - RNA, 22 nt, Human
cacccaccaucaugucuggcua

SEQ ID NO: 3172716 - RNA, 20 nt, Human
cacccaccaucaugucuggc

SEQ ID NO: 3172717 - RNA, 16 nt, Human
cacccaccucagccuc

SEQ ID NO: 3172718 - RNA, 14 nt, Human
cacccaccucagcc

SEQ ID NO: 3172719 - RNA, 13 nt, Human
cacccaccucagc

SEQ ID NO: 3172720 - RNA, 12 nt, Human
cacccaccucag

SEQ ID NO: 3172721 - RNA, 12 nt, Human
caccccagcccc

SEQ ID NO: 3172722 - RNA, 13 nt, Human
caccccagcccca

SEQ ID NO: 3172723 - RNA, 15 nt, Human
caccccauggccggc

SEQ ID NO: 3172724 - RNA, 12 nt, Human
caccccauccuc

SEQ ID NO: 3172725 - RNA, 22 nt, Human
cacccccacccaagggccuggc

SEQ ID NO: 3172726 - RNA, 14 nt, Human
caccccggccaccu

SEQ ID NO: 3172727 - RNA, 15 nt, Human
caccccggccaccug

SEQ ID NO: 3172728 - RNA, 16 nt, Human
caccccggccaccugc

SEQ ID NO: 3172729 - RNA, 17 nt, Human
caccccggccaccugcg

SEQ ID NO: 3172730 - RNA, 14 nt, Human
caccccuaaagaga

SEQ ID NO: 3172731 - RNA, 14 nt, Human
caaauaugcaaagc

SEQ ID NO: 3172732 - RNA, 12 nt, Human
caaauaguguga

SEQ ID NO: 3172733 - RNA, 15 nt, Human
caaauagugugaaau

SEQ ID NO: 3172734 - RNA, 21 nt, Human
caaauagugugaaauauauua

SEQ ID NO: 3172735 - RNA, 13 nt, Human
caaauaguugcau

SEQ ID NO: 3172736 - RNA, 19 nt, Human
caaauaguugcauagcagu

SEQ ID NO: 3172737 - RNA, 23 nt, Human
caaauaguaggcaagauggcaca

SEQ ID NO: 3172738 - RNA, 21 nt, Human
caaauaggcaucaucaauaaa

SEQ ID NO: 3172739 - RNA, 17 nt, Human
caaauaggcuauuaaaa

SEQ ID NO: 3172740 - RNA, 20 nt, Human
caaauaggcuauuaaaaaag

SEQ ID NO: 3172741 - RNA, 23 nt, Human
caaauaggcuauuaaaaaagucu

SEQ ID NO: 3172742 - RNA, 18 nt, Human
caaauaauaccuuagaag

SEQ ID NO: 3172743 - RNA, 22 nt, Human
caaauaauauguuuccuucccu

SEQ ID NO: 3172744 - RNA, 19 nt, Human
caaauaauaccuuagaagg

SEQ ID NO: 3172745 - RNA, 22 nt, Human
caaauaaugaucgaaaaaauaa

SEQ ID NO: 3172746 - RNA, 23 nt, Human
caaauaaugaucgaaaaaauaau

SEQ ID NO: 3172747 - RNA, 19 nt, Human
caaauacauuuaaaacauu

SEQ ID NO: 3172748 - RNA, 21 nt, Human
caaaggaugcccaaagaugca

SEQ ID NO: 3172749 - RNA, 20 nt, Human
caaaguuuucaugugcucag

SEQ ID NO: 3172750 - RNA, 16 nt, Human
caaaguuucagaguau

SEQ ID NO: 3172751 - RNA, 17 nt, Human
caaaguuucagaguaua

SEQ ID NO: 3172752 - RNA, 18 nt, Human
caaaguuucagaguauau

SEQ ID NO: 3172753 - RNA, 20 nt, Human
caaaguuucagaguauauug

SEQ ID NO: 3172754 - RNA, 21 nt, Human
caaauguucaucaaugaauga

SEQ ID NO: 3172755 - RNA, 20 nt, Human
caaauguucaucaaugaaug

SEQ ID NO: 3172756 - RNA, 14 nt, Human
caaauguggcuccu

SEQ ID NO: 3172757 - RNA, 22 nt, Human
caaauucugcuugcuugcuuuu

SEQ ID NO: 3172758 - RNA, 23 nt, Human
caaauucauggcaugcuuaaauu

SEQ ID NO: 3172759 - RNA, 17 nt, Human
caaauguguuuuggucc

SEQ ID NO: 3172760 - RNA, 18 nt, Human
caaaugugugcccagcuu

SEQ ID NO: 3172761 - RNA, 17 nt, Human
caaaugugugcccagcu

SEQ ID NO: 3172762 - RNA, 16 nt, Human
caaaugugugcccagc

SEQ ID NO: 3172763 - RNA, 15 nt, Human
caaaugugugcccag

SEQ ID NO: 3172764 - RNA, 18 nt, Human
caaauaugcaaagcacug

SEQ ID NO: 3172765 - RNA, 17 nt, Human
caaauaugcaaagcacu

SEQ ID NO: 3172766 - RNA, 16 nt, Human
caaauaugcaaagcac

SEQ ID NO: 3172767 - RNA, 13 nt, Human
caaaucagcugcu

SEQ ID NO: 3172768 - RNA, 16 nt, Human
caaaucagcugcuacu

SEQ ID NO: 3172769 - RNA, 15 nt, Human
caaaugucuuccugg

SEQ ID NO: 3172770 - RNA, 18 nt, Human
caaaugucuuccuggauu

SEQ ID NO: 3172771 - RNA, 15 nt, Human
auuuuuuuagauuga

SEQ ID NO: 3172772 - RNA, 16 nt, Human
caaaaaaauccagaaa

SEQ ID NO: 3172773 - RNA, 19 nt, Human
caaaaaaucuuaauacugu

SEQ ID NO: 3172774 - RNA, 13 nt, Human
caaaaaaucuuaa

SEQ ID NO: 3172775 - RNA, 23 nt, Human
caaaaaauaucuaguaauauauu

SEQ ID NO: 3172776 - RNA, 19 nt, Human
caaaaaauaucuaguaaua

SEQ ID NO: 3172777 - RNA, 21 nt, Human
caaagaaaaaaaaaaaagcca

SEQ ID NO: 3172778 - RNA, 21 nt, Human
caaacuuuagguuuuuuuaau

SEQ ID NO: 3172779 - RNA, 23 nt, Human
caaacuuuagguuuuuuuaauga

SEQ ID NO: 3172780 - RNA, 17 nt, Human
caaagcauguuuugcau

SEQ ID NO: 3172781 - RNA, 18 nt, Human
caaagaggcacagagcca

SEQ ID NO: 3172782 - RNA, 23 nt, Human
caaagaggcaguugcccagccuc

SEQ ID NO: 3172783 - RNA, 15 nt, Human
caaagcuaggccugg

SEQ ID NO: 3172784 - RNA, 21 nt, Human
caaagccaaagcuaggccugg

SEQ ID NO: 3172785 - RNA, 20 nt, Human
caaagccaaagcuaggccug

SEQ ID NO: 3172786 - RNA, 20 nt, Human
caaagcauuugacuuucugu

SEQ ID NO: 3172787 - RNA, 17 nt, Human
caaagcuaggccuggcc

SEQ ID NO: 3172788 - RNA, 16 nt, Human
caaagcuaggccuggc

SEQ ID NO: 3172789 - RNA, 17 nt, Human
caaagcuguucuuccug

SEQ ID NO: 3172790 - RNA, 16 nt, Human
caaagcuguucuuccu

SEQ ID NO: 3172791 - RNA, 16 nt, Human
caaagcuuguuaagau

SEQ ID NO: 3172792 - RNA, 18 nt, Human
caaagcuguucuuccugg

SEQ ID NO: 3172793 - RNA, 20 nt, Human
caaagcuucccgauuaacug

SEQ ID NO: 3172794 - RNA, 14 nt, Human
caaagcuuuuugaa

SEQ ID NO: 3172795 - RNA, 20 nt, Human
caaagcuuuuugaaaaccaa

SEQ ID NO: 3172796 - RNA, 17 nt, Human
caaagcuuucuuuguuu

SEQ ID NO: 3172797 - RNA, 17 nt, Human
caacuuucaagaacuug

SEQ ID NO: 3172798 - RNA, 24 nt, Human
caacuuucacuauaaugugaaaug

SEQ ID NO: 3172799 - RNA, 12 nt, Human
caacuuuacugu

SEQ ID NO: 3172800 - RNA, 16 nt, Human
caacuuuacuguccua

SEQ ID NO: 3172801 - RNA, 15 nt, Human
caacuucaucuggaa

SEQ ID NO: 3172802 - RNA, 16 nt, Human
caacuucaucuggaag

SEQ ID NO: 3172803 - RNA, 17 nt, Human
caacuucaucuggaagu

SEQ ID NO: 3172804 - RNA, 17 nt, Human
caacuuacauaugucuu

SEQ ID NO: 3172805 - RNA, 20 nt, Human
caacucuccuccagagucag

SEQ ID NO: 3172806 - RNA, 16 nt, Human
caacugcauuggcuuu

SEQ ID NO: 3172807 - RNA, 15 nt, Human
caacucugcugaggg

SEQ ID NO: 3172808 - RNA, 16 nt, Human
caacucugcugagggu

SEQ ID NO: 3172809 - RNA, 21 nt, Human
caacucugcugaggguccaga

SEQ ID NO: 3172810 - RNA, 22 nt, Human
caacucugcugaggguccagaa

SEQ ID NO: 3172811 - RNA, 18 nt, Human
caacucuucccugaacuu

SEQ ID NO: 3172812 - RNA, 12 nt, Human
caacccucauca

SEQ ID NO: 3172813 - RNA, 15 nt, Human
caacccucaucacca

SEQ ID NO: 3172814 - RNA, 14 nt, Human
caaccucuuccucc

SEQ ID NO: 3172815 - RNA, 19 nt, Human
caacccuucuucauguuca

SEQ ID NO: 3172816 - RNA, 20 nt, Human
caaccucuuccuccugacac

SEQ ID NO: 3172817 - RNA, 16 nt, Human
caaccucuuccuccug

SEQ ID NO: 3172818 - RNA, 16 nt, Human
caaccugauugugucu

SEQ ID NO: 3172819 - RNA, 17 nt, Human
caacgagccuuuucacc

SEQ ID NO: 3172820 - RNA, 19 nt, Human
caacucuccuccagaguca

SEQ ID NO: 3172821 - RNA, 18 nt, Human
caacgcagcccugcuuug

SEQ ID NO: 3172822 - RNA, 20 nt, Human
caacgaucacaaaugacuuu

SEQ ID NO: 3172823 - RNA, 15 nt, Human
caacgcagcccugcu

SEQ ID NO: 3172824 - RNA, 13 nt, Human
caacgcagcccug

SEQ ID NO: 3172825 - RNA, 12 nt, Human
caacgcagcccu

SEQ ID NO: 3172826 - RNA, 18 nt, Human
caacgaucacaaaugacu

SEQ ID NO: 3172827 - RNA, 19 nt, Human
caacgaucacaaaugacuu

SEQ ID NO: 3172828 - RNA, 16 nt, Human
caacgaucacaaauga

SEQ ID NO: 3172829 - RNA, 14 nt, Human
caaauuuacagaga

SEQ ID NO: 3172830 - RNA, 15 nt, Human
caaauuuacagagac

SEQ ID NO: 3172831 - RNA, 23 nt, Human
caacaggcugggcuucaguggca

SEQ ID NO: 3172832 - RNA, 24 nt, Human
caacaggcugggcuucaguggcag

SEQ ID NO: 3172833 - RNA, 13 nt, Human
caaauuuaacagg

SEQ ID NO: 3172834 - RNA, 19 nt, Human
caacagguuuuccugaaga

SEQ ID NO: 3172835 - RNA, 21 nt, Human
caacagguagcauagcucugu

SEQ ID NO: 3172836 - RNA, 18 nt, Human
caacaggguuuuuuucca

SEQ ID NO: 3172837 - RNA, 15 nt, Human
caacagguuuuccug

SEQ ID NO: 3172838 - RNA, 22 nt, Human
caacaucuuggucagauuugaa

SEQ ID NO: 3172839 - RNA, 14 nt, Human
caacauccacucuc

SEQ ID NO: 3172840 - RNA, 13 nt, Human
caacauccacucu

SEQ ID NO: 3172841 - RNA, 12 nt, Human
caacaucagcuu

SEQ ID NO: 3172842 - RNA, 13 nt, Human
caacaucagcuug

SEQ ID NO: 3172843 - RNA, 14 nt, Human
caacaucagcuuga

SEQ ID NO: 3172844 - RNA, 15 nt, Human
caacaucagcuugac

SEQ ID NO: 3172845 - RNA, 19 nt, Human
caaccccuucgcuccugug

SEQ ID NO: 3172846 - RNA, 18 nt, Human
caaccccuucgcuccugu

SEQ ID NO: 3172847 - RNA, 21 nt, Human
caaccccuucgcuccuguguc

SEQ ID NO: 3172848 - RNA, 18 nt, Human
caacccucagagccaccc

SEQ ID NO: 3172849 - RNA, 21 nt, Human
caacccucagagccaccccua

SEQ ID NO: 3172850 - RNA, 16 nt, Human
caacauuguagccuca

SEQ ID NO: 3172851 - RNA, 12 nt, Human
caaccaaauggu

SEQ ID NO: 3172852 - RNA, 22 nt, Human
caaccaaguaugaaucuauuug

SEQ ID NO: 3172853 - RNA, 14 nt, Human
caaccaagugugcu

SEQ ID NO: 3172854 - RNA, 13 nt, Human
caaccacaaaacu

SEQ ID NO: 3172855 - RNA, 21 nt, Human
caaccacacuugucggcucca

SEQ ID NO: 3172856 - RNA, 20 nt, Human
caaccacacuugucggcucc

SEQ ID NO: 3172857 - RNA, 21 nt, Human
caacauggcuacuugcuuuga

SEQ ID NO: 3172858 - RNA, 22 nt, Human
caagcacuucaggccuauguuu

SEQ ID NO: 3172859 - RNA, 18 nt, Human
caagcaccuccugccucg

SEQ ID NO: 3172860 - RNA, 17 nt, Human
caagaaaggaaaccuuu

SEQ ID NO: 3172861 - RNA, 12 nt, Human
caagaaaagagu

SEQ ID NO: 3172862 - RNA, 20 nt, Human
caagaaacaaacaaaagcug

SEQ ID NO: 3172863 - RNA, 21 nt, Human
caagccaccaacauacuccca

SEQ ID NO: 3172864 - RNA, 16 nt, Human
caagcgugagccacug

SEQ ID NO: 3172865 - RNA, 23 nt, Human
caagcgcccuggcccccacaugg

SEQ ID NO: 3172866 - RNA, 19 nt, Human
caagcgcccuggcccccac

SEQ ID NO: 3172867 - RNA, 18 nt, Human
caagcgcccuggccccca

SEQ ID NO: 3172868 - RNA, 17 nt, Human
caagcgcccuggccccc

SEQ ID NO: 3172869 - RNA, 16 nt, Human
caagccguggcuuccc

SEQ ID NO: 3172870 - RNA, 15 nt, Human
caagccguggcuucc

SEQ ID NO: 3172871 - RNA, 14 nt, Human
caagccguggcuuc

SEQ ID NO: 3172872 - RNA, 17 nt, Human
caagcgugagccacugc

SEQ ID NO: 3172873 - RNA, 18 nt, Human
caaggaagaaauuaacuu

SEQ ID NO: 3172874 - RNA, 13 nt, Human
caaggaagaaauu

SEQ ID NO: 3172875 - RNA, 18 nt, Human
caaggacagccccuccuc

SEQ ID NO: 3172876 - RNA, 13 nt, Human
caaggauccugag

SEQ ID NO: 3172877 - RNA, 21 nt, Human
caaggaugaucuaggaagacu

SEQ ID NO: 3172878 - RNA, 22 nt, Human
caaggauccugagccagauuuc

SEQ ID NO: 3172879 - RNA, 19 nt, Human
caaggaugccccguccccc

SEQ ID NO: 3172880 - RNA, 21 nt, Human
caaggacgcuucacaggacag

SEQ ID NO: 3172881 - RNA, 20 nt, Human
caaggacgcuucacaggaca

SEQ ID NO: 3172882 - RNA, 15 nt, Human
caaggacgcuucaca

SEQ ID NO: 3172883 - RNA, 17 nt, Human
caagugauucuccugcc

SEQ ID NO: 3172884 - RNA, 16 nt, Human
caagugauucuccugc

SEQ ID NO: 3172885 - RNA, 19 nt, Human
caagugaaaaaggaggaag

SEQ ID NO: 3172886 - RNA, 21 nt, Human
caagugauucucaugccucag

SEQ ID NO: 3172887 - RNA, 22 nt, Human
caagugauucucaugccucagc

SEQ ID NO: 3172888 - RNA, 21 nt, Human
caagugauucuccugccucag

SEQ ID NO: 3172889 - RNA, 22 nt, Human
caagugauucuccugccucagc

SEQ ID NO: 3172890 - RNA, 21 nt, Human
caagucuuugcuauugugaau

SEQ ID NO: 3172891 - RNA, 22 nt, Human
caagugugguagagugugccug

SEQ ID NO: 3172892 - RNA, 23 nt, Human
caaggugggaggauugcuugagc

SEQ ID NO: 3172893 - RNA, 12 nt, Human
caaggugggagg

SEQ ID NO: 3172894 - RNA, 19 nt, Human
caaggugcaggcaggcugg

SEQ ID NO: 3172895 - RNA, 19 nt, Human
caagggccuggccugagcu

SEQ ID NO: 3172896 - RNA, 18 nt, Human
caaggauaccuucuuauu

SEQ ID NO: 3172897 - RNA, 16 nt, Human
caagggcggccuuucc

SEQ ID NO: 3172898 - RNA, 19 nt, Human
caagggcggccuuucccac

SEQ ID NO: 3172899 - RNA, 18 nt, Human
caagggcggccuuuccca

SEQ ID NO: 3172900 - RNA, 16 nt, Human
caagggccuggccuga

SEQ ID NO: 3172901 - RNA, 15 nt, Human
caaggauugcuacug

SEQ ID NO: 3172902 - RNA, 15 nt, Human
caaggucuugcucuc

SEQ ID NO: 3172903 - RNA, 13 nt, Human
caaggucuugcuc

SEQ ID NO: 3172904 - RNA, 17 nt, Human
caaggugcaggcaggcu

SEQ ID NO: 3172905 - RNA, 15 nt, Human
caaggugcaggcagg

SEQ ID NO: 3172906 - RNA, 14 nt, Human
caaggugcaggcag

SEQ ID NO: 3172907 - RNA, 13 nt, Human
caagggcuuuccu

SEQ ID NO: 3172908 - RNA, 21 nt, Human
caagggcuuuccugugccagg

SEQ ID NO: 3172909 - RNA, 18 nt, Human
caagggcuuuccugugcc

SEQ ID NO: 3172910 - RNA, 22 nt, Human
cacauggugacuuuugaaaaga

SEQ ID NO: 3172911 - RNA, 12 nt, Human
cacauggugaug

SEQ ID NO: 3172912 - RNA, 15 nt, Human
cacauggugauguug

SEQ ID NO: 3172913 - RNA, 23 nt, Human
cacauguccaagaagcccaggaa

SEQ ID NO: 3172914 - RNA, 14 nt, Human
cacaugguuuuccu

SEQ ID NO: 3172915 - RNA, 19 nt, Human
cacaugccucucucaggcc

SEQ ID NO: 3172916 - RNA, 15 nt, Human
cacauggaaugaggg

SEQ ID NO: 3172917 - RNA, 17 nt, Human
cacauggaaugaggguu

SEQ ID NO: 3172918 - RNA, 19 nt, Human
cacauggaaugaggguuug

SEQ ID NO: 3172919 - RNA, 14 nt, Human
cacauauuuuucca

SEQ ID NO: 3172920 - RNA, 13 nt, Human
cacaugccucucu

SEQ ID NO: 3172921 - RNA, 17 nt, Human
cacaugccucucucagg

SEQ ID NO: 3172922 - RNA, 18 nt, Human
cacaugccucucucaggc

SEQ ID NO: 3172923 - RNA, 17 nt, Human
cacauauuucagugagg

SEQ ID NO: 3172924 - RNA, 12 nt, Human
cacauaucuguc

SEQ ID NO: 3172925 - RNA, 15 nt, Human
cacaugugcacaugc

SEQ ID NO: 3172926 - RNA, 14 nt, Human
cacaugugcacaug

SEQ ID NO: 3172927 - RNA, 17 nt, Human
cacaugugcacaugcac

SEQ ID NO: 3172928 - RNA, 13 nt, Human
cacauguggacuu

SEQ ID NO: 3172929 - RNA, 15 nt, Human
cacauguuuucaaau

SEQ ID NO: 3172930 - RNA, 14 nt, Human
cacauguuuucaaa

SEQ ID NO: 3172931 - RNA, 13 nt, Human
cacauguuuucaa

SEQ ID NO: 3172932 - RNA, 12 nt, Human
cacauguuuuca

SEQ ID NO: 3172933 - RNA, 12 nt, Human
cacauguuacug

SEQ ID NO: 3172934 - RNA, 16 nt, Human
cacauuccugaugcuu

SEQ ID NO: 3172935 - RNA, 15 nt, Human
cacauuaucuucugg

SEQ ID NO: 3172936 - RNA, 18 nt, Human
cacauguuuucaaaugga

SEQ ID NO: 3172937 - RNA, 16 nt, Human
cacauguuuucaaaug

SEQ ID NO: 3172938 - RNA, 20 nt, Human
cacauuacuagaguuggcau

SEQ ID NO: 3172939 - RNA, 22 nt, Human
caccaagccuggucagcccaaa

SEQ ID NO: 3172940 - RNA, 21 nt, Human
cacauuggucuaucuacuggc

SEQ ID NO: 3172941 - RNA, 12 nt, Human
cacauugugcag

SEQ ID NO: 3172942 - RNA, 12 nt, Human
caccacaaaaua

SEQ ID NO: 3172943 - RNA, 15 nt, Human
caccacacccagccc

SEQ ID NO: 3172944 - RNA, 13 nt, Human
caccacacccagc

SEQ ID NO: 3172945 - RNA, 19 nt, Human
caccaagccuggucagccc

SEQ ID NO: 3172946 - RNA, 21 nt, Human
caccaagccuggucagcccaa

SEQ ID NO: 3172947 - RNA, 20 nt, Human
caccaagccuggucagccca

SEQ ID NO: 3172948 - RNA, 15 nt, Human
caccaagcccaguua

SEQ ID NO: 3172949 - RNA, 14 nt, Human
caccaccucuuugg

SEQ ID NO: 3172950 - RNA, 18 nt, Human
caccacaugugcacaugc

SEQ ID NO: 3172951 - RNA, 15 nt, Human
caccacaugugcaca

SEQ ID NO: 3172952 - RNA, 19 nt, Human
caccacaugugcacaugca

SEQ ID NO: 3172953 - RNA, 23 nt, Human
caccacauaaggucagcucagag

SEQ ID NO: 3172954 - RNA, 17 nt, Human
caccacccuccuuccca

SEQ ID NO: 3172955 - RNA, 21 nt, Human
cacauagugaugguuccccug

SEQ ID NO: 3172956 - RNA, 23 nt, Human
cacauauaaauugucuuaaugga

SEQ ID NO: 3172957 - RNA, 17 nt, Human
cacauacacacacacgc

SEQ ID NO: 3172958 - RNA, 20 nt, Human
cacauacacccaaacacuua

SEQ ID NO: 3172959 - RNA, 15 nt, Human
cacauaauuaacacu

SEQ ID NO: 3172960 - RNA, 14 nt, Human
cacaguuuucugag

SEQ ID NO: 3172961 - RNA, 22 nt, Human
cacauaauucaggaagcagcuu

SEQ ID NO: 3172962 - RNA, 23 nt, Human
cacaggcccggcuccaggcuccu

SEQ ID NO: 3172963 - RNA, 20 nt, Human
cacaggcccggcuccaggcu

SEQ ID NO: 3172964 - RNA, 18 nt, Human
cacagugagucgaggaca

SEQ ID NO: 3172965 - RNA, 18 nt, Human
cacaggcagggcaggacc

SEQ ID NO: 3172966 - RNA, 14 nt, Human
cacaggcagggcag

SEQ ID NO: 3172967 - RNA, 13 nt, Human
cacaggcagggca

SEQ ID NO: 3172968 - RNA, 12 nt, Human
cacaggcagggc

SEQ ID NO: 3172969 - RNA, 20 nt, Human
cacagugagucgaggacagg

SEQ ID NO: 3172970 - RNA, 19 nt, Human
cacagugagucgaggacag

SEQ ID NO: 3172971 - RNA, 10 nt, Human
cacaggcagg

SEQ ID NO: 3172972 - RNA, 19 nt, Human
cacaggcccggcuccaggc

SEQ ID NO: 3172973 - RNA, 18 nt, Human
cacaggcccggcuccagg

SEQ ID NO: 3172974 - RNA, 17 nt, Human
cacaggcccggcuccag

SEQ ID NO: 3172975 - RNA, 16 nt, Human
cacaggcccggcucca

SEQ ID NO: 3172976 - RNA, 16 nt, Human
cacaggaucagucuga

SEQ ID NO: 3172977 - RNA, 15 nt, Human
cacaggaucagucug

SEQ ID NO: 3172978 - RNA, 12 nt, Human
cacaggaucagu

SEQ ID NO: 3172979 - RNA, 22 nt, Human
cacagcaguugaaaagacucca

SEQ ID NO: 3172980 - RNA, 14 nt, Human
cacagcauuucaag

SEQ ID NO: 3172981 - RNA, 20 nt, Human
cacagaugggugcuuggagg

SEQ ID NO: 3172982 - RNA, 20 nt, Human
cacagcacgggggccaagga

SEQ ID NO: 3172983 - RNA, 21 nt, Human
cacagcacuugaguaaaauac

SEQ ID NO: 3172984 - RNA, 16 nt, Human
cacagcagccccugca

SEQ ID NO: 3172985 - RNA, 14 nt, Human
cacagaugggugcu

SEQ ID NO: 3172986 - RNA, 18 nt, Human
cacagaugggugcuugga

SEQ ID NO: 3172987 - RNA, 20 nt, Human
cacagagccaaauugguaga

SEQ ID NO: 3172988 - RNA, 14 nt, Human
cacacaccagagcc

SEQ ID NO: 3172989 - RNA, 12 nt, Human
cacacagcucug

SEQ ID NO: 3172990 - RNA, 19 nt, Human
cacacagaggcugccucuc

SEQ ID NO: 3172991 - RNA, 22 nt, Human
cacacagaaggggacugccacc

SEQ ID NO: 3172992 - RNA, 12 nt, Human
cacacagaaggg

SEQ ID NO: 3172993 - RNA, 13 nt, Human
cacaccuccuggg

SEQ ID NO: 3172994 - RNA, 23 nt, Human
cacaccuccucccacugcccacu

SEQ ID NO: 3172995 - RNA, 18 nt, Human
cacaccugcagccucccu

SEQ ID NO: 3172996 - RNA, 16 nt, Human
cacaccuguaauucca

SEQ ID NO: 3172997 - RNA, 15 nt, Human
cacaccccaccugcg

SEQ ID NO: 3172998 - RNA, 14 nt, Human
cacaccccaccugc

SEQ ID NO: 3172999 - RNA, 13 nt, Human
cacaccccaccug

SEQ ID NO: 3173000 - RNA, 12 nt, Human
cacaccccaccu

SEQ ID NO: 3173001 - RNA, 17 nt, Human
cacaccccaccugcgcu

SEQ ID NO: 3173002 - RNA, 16 nt, Human
cacaccccaccugcgc

SEQ ID NO: 3173003 - RNA, 19 nt, Human
cacaccccaccugcgcuuc

SEQ ID NO: 3173004 - RNA, 14 nt, Human
cacacccuguuuua

SEQ ID NO: 3173005 - RNA, 22 nt, Human
cacaccuccucccacugcccac

SEQ ID NO: 3173006 - RNA, 13 nt, Human
cacaccagagccc

SEQ ID NO: 3173007 - RNA, 12 nt, Human
cacaccagagcc

SEQ ID NO: 3173008 - RNA, 15 nt, Human
cacaccagagcccac

SEQ ID NO: 3173009 - RNA, 23 nt, Human
cacaccaaucuuacuuuguaaau

SEQ ID NO: 3173010 - RNA, 12 nt, Human
cacacuuagcug

SEQ ID NO: 3173011 - RNA, 16 nt, Human
cacacuuagcuggaga

SEQ ID NO: 3173012 - RNA, 17 nt, Human
cacacuucaggcucuuc

SEQ ID NO: 3173013 - RNA, 14 nt, Human
cacacuucaggcuc

SEQ ID NO: 3173014 - RNA, 22 nt, Human
cacacuucaggcucuucuccuu

SEQ ID NO: 3173015 - RNA, 21 nt, Human
cacacuucaggcucuucuccu

SEQ ID NO: 3173016 - RNA, 20 nt, Human
cacacuucaggcucuucucc

SEQ ID NO: 3173017 - RNA, 18 nt, Human
cacacuucaggcucuucu

SEQ ID NO: 3173018 - RNA, 19 nt, Human
cacacucaaaucaagaaac

SEQ ID NO: 3173019 - RNA, 21 nt, Human
cacacuugacaucaacugcau

SEQ ID NO: 3173020 - RNA, 22 nt, Human
cacagacccugcccugugggcc

SEQ ID NO: 3173021 - RNA, 23 nt, Human
cacacuugucggcuccagucccc

SEQ ID NO: 3173022 - RNA, 22 nt, Human
cacacuugucggcuccaguccc

SEQ ID NO: 3173023 - RNA, 18 nt, Human
cacacuugucggcuccag

SEQ ID NO: 3173024 - RNA, 17 nt, Human
cacacuugucggcucca

SEQ ID NO: 3173025 - RNA, 21 nt, Human
cacagagaaaguacuucucca

SEQ ID NO: 3173026 - RNA, 20 nt, Human
cacagacuuuagcuuucuga

SEQ ID NO: 3173027 - RNA, 11 nt, Human
cacaacagauu

SEQ ID NO: 3173028 - RNA, 15 nt, Human
cacaaauuucucugu

SEQ ID NO: 3173029 - RNA, 20 nt, Human
cacaaauuaugcuaagaauu

SEQ ID NO: 3173030 - RNA, 22 nt, Human
cacaacacacagauuugagcuc

SEQ ID NO: 3173031 - RNA, 14 nt, Human
cacaacccccagcu

SEQ ID NO: 3173032 - RNA, 18 nt, Human
cacaacccccagcucccg

SEQ ID NO: 3173033 - RNA, 17 nt, Human
cacaacccccagcuccc

SEQ ID NO: 3173034 - RNA, 16 nt, Human
cacaacccccagcucc

SEQ ID NO: 3173035 - RNA, 15 nt, Human
cacaacccccagcuc

SEQ ID NO: 3173036 - RNA, 23 nt, Human
cacaaccuucuguggcucacaga

SEQ ID NO: 3173037 - RNA, 19 nt, Human
cacaaccuucuguggcuca

SEQ ID NO: 3173038 - RNA, 18 nt, Human
cacaaccuucuguggcuc

SEQ ID NO: 3173039 - RNA, 17 nt, Human
cacaaccuucuguggcu

SEQ ID NO: 3173040 - RNA, 18 nt, Human
cacaaaaguuucucuuuu

SEQ ID NO: 3173041 - RNA, 16 nt, Human
cacaaaaguuucucuu

SEQ ID NO: 3173042 - RNA, 22 nt, Human
cacaaaaagauaccuuaaaauu

SEQ ID NO: 3173043 - RNA, 22 nt, Human
caauuuuaacuuagagcuuuuu

SEQ ID NO: 3173044 - RNA, 11 nt, Human
caauuuuccuu

SEQ ID NO: 3173045 - RNA, 21 nt, Human
caauuuuccuucagauauuuu

SEQ ID NO: 3173046 - RNA, 22 nt, Human
caauuuuauaaggacuuccuga

SEQ ID NO: 3173047 - RNA, 12 nt, Human
caauuuucagau

SEQ ID NO: 3173048 - RNA, 19 nt, Human
caauuuucagauuugcaca

SEQ ID NO: 3173049 - RNA, 16 nt, Human
caauuuucagauuugc

SEQ ID NO: 3173050 - RNA, 14 nt, Human
caauuuucagauuu

SEQ ID NO: 3173051 - RNA, 12 nt, Human
caaugugaaaaa

SEQ ID NO: 3173052 - RNA, 14 nt, Human
caaugugaaaaauc

SEQ ID NO: 3173053 - RNA, 18 nt, Human
caauuaaagaaauaauuu

SEQ ID NO: 3173054 - RNA, 17 nt, Human
caauuaaagaaauaauu

SEQ ID NO: 3173055 - RNA, 19 nt, Human
caauuaaacuuccaaagaa

SEQ ID NO: 3173056 - RNA, 15 nt, Human
caauuaaagaaauaa

SEQ ID NO: 3173057 - RNA, 13 nt, Human
caauuaaagaaau

SEQ ID NO: 3173058 - RNA, 21 nt, Human
caauaucuuuuuuuuaauaaa

SEQ ID NO: 3173059 - RNA, 21 nt, Human
caauaggaaaaacugauuuuu

SEQ ID NO: 3173060 - RNA, 21 nt, Human
caauaggaugggcuucugugc

SEQ ID NO: 3173061 - RNA, 15 nt, Human
caauaggcaaauuaa

SEQ ID NO: 3173062 - RNA, 17 nt, Human
caauaggcaaauuaauc

SEQ ID NO: 3173063 - RNA, 20 nt, Human
caauaggaaaaacugauuuu

SEQ ID NO: 3173064 - RNA, 18 nt, Human
caauaggaaaaacugauu

SEQ ID NO: 3173065 - RNA, 22 nt, Human
caaugaaugaaugaauggcuaa

SEQ ID NO: 3173066 - RNA, 17 nt, Human
caaugaauauacucauu

SEQ ID NO: 3173067 - RNA, 18 nt, Human
caaugaauauacucauua

SEQ ID NO: 3173068 - RNA, 19 nt, Human
caaugcaaaccaucauuga

SEQ ID NO: 3173069 - RNA, 22 nt, Human
caaugcacuuuguucuggcucu

SEQ ID NO: 3173070 - RNA, 23 nt, Human
caaugcacuuuguucuggcucuu

SEQ ID NO: 3173071 - RNA, 13 nt, Human
caaugcagaacuc

SEQ ID NO: 3173072 - RNA, 14 nt, Human
caaugcaaaccauc

SEQ ID NO: 3173073 - RNA, 13 nt, Human
caaugaauuauua

SEQ ID NO: 3173074 - RNA, 17 nt, Human
caaugcaaaccaucauu

SEQ ID NO: 3173075 - RNA, 18 nt, Human
caaugcaaaccaucauug

SEQ ID NO: 3173076 - RNA, 11 nt, Human
uuuguggggag

SEQ ID NO: 3173077 - RNA, 13 nt, Human
uuuguggugauuu

SEQ ID NO: 3173078 - RNA, 15 nt, Human
uuugugguuuggaau

SEQ ID NO: 3173079 - RNA, 16 nt, Human
uuugugguuuggaaua

SEQ ID NO: 3173080 - RNA, 23 nt, Human
uuuguguaauauuacuuuaacau

SEQ ID NO: 3173081 - RNA, 21 nt, Human
uuuguguaaauuauugaugaa

SEQ ID NO: 3173082 - RNA, 12 nt, Human
uuuguguaaauu

SEQ ID NO: 3173083 - RNA, 16 nt, Human
uuggcagcucuacucu

SEQ ID NO: 3173084 - RNA, 22 nt, Human
uuggcagaugcagcucuuccug

SEQ ID NO: 3173085 - RNA, 13 nt, Human
uuggcagaugcag

SEQ ID NO: 3173086 - RNA, 21 nt, Human
uuggcagaugcagcucuuccu

SEQ ID NO: 3173087 - RNA, 16 nt, Human
uuggcagaugcagcuc

SEQ ID NO: 3173088 - RNA, 19 nt, Human
uuggcacuugccauuccaa

SEQ ID NO: 3173089 - RNA, 20 nt, Human
uuggcacuugccauuccaaa

SEQ ID NO: 3173090 - RNA, 23 nt, Human
uuggcaccuucccccucccccag

SEQ ID NO: 3173091 - RNA, 16 nt, Human
uuggcaccuucccccu

SEQ ID NO: 3173092 - RNA, 20 nt, Human
uuggcaauaaauuuugaaaa

SEQ ID NO: 3173093 - RNA, 22 nt, Human
uuggcaauaaauuuugaaaagu

SEQ ID NO: 3173094 - RNA, 18 nt, Human
uuggcaauaaauuuugaa

SEQ ID NO: 3173095 - RNA, 24 nt, Human
uuggauuuuauguugacauuuguu

SEQ ID NO: 3173096 - RNA, 22 nt, Human
uuggauuuuauguugacauuug

SEQ ID NO: 3173097 - RNA, 19 nt, Human
uuggauuuggagagaaaua

SEQ ID NO: 3173098 - RNA, 14 nt, Human
uuggauuuggagag

SEQ ID NO: 3173099 - RNA, 20 nt, Human
uuggauuuuauguugacauu

SEQ ID NO: 3173100 - RNA, 18 nt, Human
uuggauuuuauguugaca

SEQ ID NO: 3173101 - RNA, 17 nt, Human
uuggauuuuauguugac

SEQ ID NO: 3173102 - RNA, 13 nt, Human
uuggauuuuaugu

SEQ ID NO: 3173103 - RNA, 14 nt, Human
uuggauuguccccg

SEQ ID NO: 3173104 - RNA, 15 nt, Human
uuggauuguccccga

SEQ ID NO: 3173105 - RNA, 15 nt, Human
uuggacccugaggcc

SEQ ID NO: 3173106 - RNA, 18 nt, Human
uuggacccugaggcccag

SEQ ID NO: 3173107 - RNA, 19 nt, Human
uuggacccugaggcccaga

SEQ ID NO: 3173108 - RNA, 21 nt, Human
uuggacccugaggcccagagg

SEQ ID NO: 3173109 - RNA, 22 nt, Human
uuggaagcacaccaaucuuacu

SEQ ID NO: 3173110 - RNA, 18 nt, Human
uuggaagcagguuaaaug

SEQ ID NO: 3173111 - RNA, 19 nt, Human
uuggaagcuccgcuuucua

SEQ ID NO: 3173112 - RNA, 18 nt, Human
uuggaagcuguuuggaaa

SEQ ID NO: 3173113 - RNA, 21 nt, Human
uuggaagcuguuuggaaaaga

SEQ ID NO: 3173114 - RNA, 21 nt, Human
uuggaagcagguuaaauguuu

SEQ ID NO: 3173115 - RNA, 20 nt, Human
uuggaagcagguuaaauguu

SEQ ID NO: 3173116 - RNA, 19 nt, Human
uuggaagcagguuaaaugu

SEQ ID NO: 3173117 - RNA, 19 nt, Human
uugcugugacagugauggc

SEQ ID NO: 3173118 - RNA, 21 nt, Human
uuggacauaacugacuuaguu

SEQ ID NO: 3173119 - RNA, 22 nt, Human
uuggacauaacugacuuaguuc

SEQ ID NO: 3173120 - RNA, 18 nt, Human
uuggacacuuaauucugu

SEQ ID NO: 3173121 - RNA, 19 nt, Human
uuggacacuuaauucuguu

SEQ ID NO: 3173122 - RNA, 23 nt, Human
uuggaauuagaacccuugcacag

SEQ ID NO: 3173123 - RNA, 13 nt, Human
uuggaauauuaaa

SEQ ID NO: 3173124 - RNA, 16 nt, Human
uuggaauauuaaaaaa

SEQ ID NO: 3173125 - RNA, 17 nt, Human
uuggaauauuaaaaaac

SEQ ID NO: 3173126 - RNA, 23 nt, Human
uuggaauauuaaaaaacuucaug

SEQ ID NO: 3173127 - RNA, 23 nt, Human
uuggaaugcacucagacuguaua

SEQ ID NO: 3173128 - RNA, 21 nt, Human
uuggaaugcacucagacugua

SEQ ID NO: 3173129 - RNA, 16 nt, Human
uugcggcaaaaggaaa

SEQ ID NO: 3173130 - RNA, 17 nt, Human
uugcggcaaaaggaaag

SEQ ID NO: 3173131 - RNA, 14 nt, Human
uugcugcuugaggc

SEQ ID NO: 3173132 - RNA, 16 nt, Human
uugcugcuugaggcaa

SEQ ID NO: 3173133 - RNA, 17 nt, Human
uugcugcugauaaugua

SEQ ID NO: 3173134 - RNA, 18 nt, Human
uugcugucccuuuuccuu

SEQ ID NO: 3173135 - RNA, 16 nt, Human
uugcugucccuuuucc

SEQ ID NO: 3173136 - RNA, 14 nt, Human
uugcuggaaagagc

SEQ ID NO: 3173137 - RNA, 21 nt, Human
uugcgaauauuuuguaaauua

SEQ ID NO: 3173138 - RNA, 17 nt, Human
uugccuuugaagaguga

SEQ ID NO: 3173139 - RNA, 14 nt, Human
uugccuuugaagag

SEQ ID NO: 3173140 - RNA, 19 nt, Human
uugccuuucuguguuuauu

SEQ ID NO: 3173141 - RNA, 17 nt, Human
uugccuuucuguguuua

SEQ ID NO: 3173142 - RNA, 14 nt, Human
uugccuuucugugu

SEQ ID NO: 3173143 - RNA, 12 nt, Human
uugccuuucugu

SEQ ID NO: 3173144 - RNA, 21 nt, Human
uugccauguuggccaggcugg

SEQ ID NO: 3173145 - RNA, 20 nt, Human
uugccauguuggccaggcug

SEQ ID NO: 3173146 - RNA, 13 nt, Human
uugccaugugcuu

SEQ ID NO: 3173147 - RNA, 20 nt, Human
uugccaugugcuucugccac

SEQ ID NO: 3173148 - RNA, 20 nt, Human
uugggaccccuggugguuca

SEQ ID NO: 3173149 - RNA, 16 nt, Human
uugggaccccuggugg

SEQ ID NO: 3173150 - RNA, 15 nt, Human
uugggaccccuggug

SEQ ID NO: 3173151 - RNA, 14 nt, Human
uugggaccccuggu

SEQ ID NO: 3173152 - RNA, 22 nt, Human
uugggaaguuaaagggaagaaa

SEQ ID NO: 3173153 - RNA, 18 nt, Human
uugggaagagcuuagaaa

SEQ ID NO: 3173154 - RNA, 17 nt, Human
uugggaagagcuuagaa

SEQ ID NO: 3173155 - RNA, 15 nt, Human
uugggacccaguggc

SEQ ID NO: 3173156 - RNA, 22 nt, Human
uugggacccaguggcagggcac

SEQ ID NO: 3173157 - RNA, 20 nt, Human
uugggacccaguggcagggc

SEQ ID NO: 3173158 - RNA, 14 nt, Human
uugggaauuuuauu

SEQ ID NO: 3173159 - RNA, 23 nt, Human
uuggcuucacggaagagccuugc

SEQ ID NO: 3173160 - RNA, 13 nt, Human
uuggcuuggcccu

SEQ ID NO: 3173161 - RNA, 16 nt, Human
uuggcuugccauuuuu

SEQ ID NO: 3173162 - RNA, 20 nt, Human
uuggcagguaggaauauuau

SEQ ID NO: 3173163 - RNA, 19 nt, Human
uuggcagguaggaauauua

SEQ ID NO: 3173164 - RNA, 22 nt, Human
uugggcaauauucucuguacau

SEQ ID NO: 3173165 - RNA, 21 nt, Human
uugggcaauauucucuguaca

SEQ ID NO: 3173166 - RNA, 19 nt, Human
uugggcaauauucucugua

SEQ ID NO: 3173167 - RNA, 19 nt, Human
uugggauccaggccccucc

SEQ ID NO: 3173168 - RNA, 21 nt, Human
uugggauccaggccccucccu

SEQ ID NO: 3173169 - RNA, 12 nt, Human
uuguaaaauggu

SEQ ID NO: 3173170 - RNA, 13 nt, Human
uuguaaaauggug

SEQ ID NO: 3173171 - RNA, 20 nt, Human
uuggucugacccacugcuuu

SEQ ID NO: 3173172 - RNA, 21 nt, Human
uuggucucccauaugcagaaa

SEQ ID NO: 3173173 - RNA, 13 nt, Human
uugguccugcugc

SEQ ID NO: 3173174 - RNA, 21 nt, Human
uugguccuggaggcucaaauu

SEQ ID NO: 3173175 - RNA, 15 nt, Human
uuguacuuuaaaaau

SEQ ID NO: 3173176 - RNA, 17 nt, Human
uuguacuuucuguuaaa

SEQ ID NO: 3173177 - RNA, 15 nt, Human
uuguacuuucuguua

SEQ ID NO: 3173178 - RNA, 13 nt, Human
uuguacuuucugu

SEQ ID NO: 3173179 - RNA, 15 nt, Human
uuguacuuuaucaug

SEQ ID NO: 3173180 - RNA, 19 nt, Human
uuguacuuuaucaugaaug

SEQ ID NO: 3173181 - RNA, 22 nt, Human
uuguacuuucuguuaaaaugca

SEQ ID NO: 3173182 - RNA, 20 nt, Human
uuguacuuucuguuaaaaug

SEQ ID NO: 3173183 - RNA, 14 nt, Human
uuguagauuugauu

SEQ ID NO: 3173184 - RNA, 15 nt, Human
uuguagauuugauuu

SEQ ID NO: 3173185 - RNA, 16 nt, Human
uuguaccgcaauguga

SEQ ID NO: 3173186 - RNA, 15 nt, Human
uuguaccaaaauuuu

SEQ ID NO: 3173187 - RNA, 18 nt, Human
uuguaccaaaauuuuaaa

SEQ ID NO: 3173188 - RNA, 21 nt, Human
uuguaaacuuugaaauauaug

SEQ ID NO: 3173189 - RNA, 19 nt, Human
uuguaaacuuugaaauaua

SEQ ID NO: 3173190 - RNA, 18 nt, Human
uuguaaacuuugaaauau

SEQ ID NO: 3173191 - RNA, 20 nt, Human
uuguaaaauggugugaccac

SEQ ID NO: 3173192 - RNA, 15 nt, Human
uuguaaaauguauua

SEQ ID NO: 3173193 - RNA, 18 nt, Human
uuguaaaauguauuaugu

SEQ ID NO: 3173194 - RNA, 12 nt, Human
uuguaaacuuug

SEQ ID NO: 3173195 - RNA, 17 nt, Human
uuguaaacuuugaaaua

SEQ ID NO: 3173196 - RNA, 15 nt, Human
uuguaaacuuugaaa

SEQ ID NO: 3173197 - RNA, 14 nt, Human
uuguaaacuuugaa

SEQ ID NO: 3173198 - RNA, 13 nt, Human
uuguaaacuuuga

SEQ ID NO: 3173199 - RNA, 22 nt, Human
uugucaagaauagcauuguaaa

SEQ ID NO: 3173200 - RNA, 20 nt, Human
uugucuaugggacucaaugc

SEQ ID NO: 3173201 - RNA, 23 nt, Human
uugucuauuuuucucuucauauu

SEQ ID NO: 3173202 - RNA, 22 nt, Human
uugucuuaaaaaguggaaaaau

SEQ ID NO: 3173203 - RNA, 18 nt, Human
uugucugaagucacugca

SEQ ID NO: 3173204 - RNA, 13 nt, Human
uugucuuaaugga

SEQ ID NO: 3173205 - RNA, 17 nt, Human
uugucugaagucacugc

SEQ ID NO: 3173206 - RNA, 15 nt, Human
uugucugaaacauuu

SEQ ID NO: 3173207 - RNA, 17 nt, Human
uugucugaaacauuuca

SEQ ID NO: 3173208 - RNA, 15 nt, Human
uugucucuucuccuu

SEQ ID NO: 3173209 - RNA, 22 nt, Human
uugucaaaguggugagaggcau

SEQ ID NO: 3173210 - RNA, 14 nt, Human
uugucuaugggacu

SEQ ID NO: 3173211 - RNA, 15 nt, Human
uuguauuuuuccaga

SEQ ID NO: 3173212 - RNA, 16 nt, Human
uuguauuuuuguuguu

SEQ ID NO: 3173213 - RNA, 19 nt, Human
uuguauuuuuguuguuggg

SEQ ID NO: 3173214 - RNA, 20 nt, Human
uuguauuuuacuaauaaaau

SEQ ID NO: 3173215 - RNA, 24 nt, Human
uuguaugcaagcaguuucaauaaa

SEQ ID NO: 3173216 - RNA, 22 nt, Human
uuguaugcaagcaguuucaaua

SEQ ID NO: 3173217 - RNA, 20 nt, Human
uuguaugcaagcaguuucaa

SEQ ID NO: 3173218 - RNA, 19 nt, Human
uuguaugcaagcaguuuca

SEQ ID NO: 3173219 - RNA, 22 nt, Human
uuguaugaaagauggcugugcc

SEQ ID NO: 3173220 - RNA, 17 nt, Human
uuguaugaaauauaugu

SEQ ID NO: 3173221 - RNA, 22 nt, Human
uuguaugaaauauaugugaaag

SEQ ID NO: 3173222 - RNA, 20 nt, Human
uuguaugauccuaaugaaug

SEQ ID NO: 3173223 - RNA, 12 nt, Human
uuguaugaaaac

SEQ ID NO: 3173224 - RNA, 19 nt, Human
uuguaugaucugugccuuu

SEQ ID NO: 3173225 - RNA, 13 nt, Human
uuguaugaucugu

SEQ ID NO: 3173226 - RNA, 22 nt, Human
uugaaugacuaagaggaaagua

SEQ ID NO: 3173227 - RNA, 12 nt, Human
uugaaugaugcc

SEQ ID NO: 3173228 - RNA, 16 nt, Human
uugaaugaugccauga

SEQ ID NO: 3173229 - RNA, 18 nt, Human
uugaagagcagcuccuuc

SEQ ID NO: 3173230 - RNA, 14 nt, Human
uugaagagugaaau

SEQ ID NO: 3173231 - RNA, 19 nt, Human
uugaagaggggagcucagu

SEQ ID NO: 3173232 - RNA, 16 nt, Human
uugaagcaaacaguug

SEQ ID NO: 3173233 - RNA, 21 nt, Human
uucuuuccugaggcugggcuc

SEQ ID NO: 3173234 - RNA, 11 nt, Human
uucuuuacaaa

SEQ ID NO: 3173235 - RNA, 16 nt, Human
uugaaaauugaaaagu

SEQ ID NO: 3173236 - RNA, 14 nt, Human
uucuuucccuuccu

SEQ ID NO: 3173237 - RNA, 14 nt, Human
uugaaaauaguuua

SEQ ID NO: 3173238 - RNA, 23 nt, Human
uugaaaauaguuuauuuuaaaac

SEQ ID NO: 3173239 - RNA, 11 nt, Human
uugaaacauug

SEQ ID NO: 3173240 - RNA, 14 nt, Human
uugaaacauugcuu

SEQ ID NO: 3173241 - RNA, 12 nt, Human
uugaaacauugc

SEQ ID NO: 3173242 - RNA, 19 nt, Human
uugaaacauugcuuuuaaa

SEQ ID NO: 3173243 - RNA, 18 nt, Human
uugaaacauugcuuuuaa

SEQ ID NO: 3173244 - RNA, 13 nt, Human
uucuucagagacu

SEQ ID NO: 3173245 - RNA, 17 nt, Human
uucuuauuacuagacug

SEQ ID NO: 3173246 - RNA, 17 nt, Human
uucuuauguugcccagu

SEQ ID NO: 3173247 - RNA, 15 nt, Human
uucuucauguucaau

SEQ ID NO: 3173248 - RNA, 17 nt, Human
uucuuauuccauauuag

SEQ ID NO: 3173249 - RNA, 21 nt, Human
uucuaaguaaaaccacagcag

SEQ ID NO: 3173250 - RNA, 24 nt, Human
uucuaaguaaaaccacagcaguug

SEQ ID NO: 3173251 - RNA, 20 nt, Human
uucuaaguugaguauauuau

SEQ ID NO: 3173252 - RNA, 23 nt, Human
uucuaagucaaacacuugugacu

SEQ ID NO: 3173253 - RNA, 20 nt, Human
uucuggcagaguugaagaca

SEQ ID NO: 3173254 - RNA, 15 nt, Human
uucuggcagaggagg

SEQ ID NO: 3173255 - RNA, 23 nt, Human
uucuguauagacaggagaagaaa

SEQ ID NO: 3173256 - RNA, 18 nt, Human
uucuguauagacaggaga

SEQ ID NO: 3173257 - RNA, 11 nt, Human
uucuguauuug

SEQ ID NO: 3173258 - RNA, 13 nt, Human
uucuguauuugaa

SEQ ID NO: 3173259 - RNA, 23 nt, Human
uucugugcuguuacaguuuucuu

SEQ ID NO: 3173260 - RNA, 24 nt, Human
uucugugcccagaauacugaugga

SEQ ID NO: 3173261 - RNA, 14 nt, Human
uucugugcaccugg

SEQ ID NO: 3173262 - RNA, 19 nt, Human
uucugugcccagaauacug

SEQ ID NO: 3173263 - RNA, 20 nt, Human
uucugugcccagaauacuga

SEQ ID NO: 3173264 - RNA, 23 nt, Human
uucugugcccagaauacugaugg

SEQ ID NO: 3173265 - RNA, 18 nt, Human
uugaucucccuuuccuau

SEQ ID NO: 3173266 - RNA, 12 nt, Human
uugaucucccca

SEQ ID NO: 3173267 - RNA, 14 nt, Human
uugaucucacauuu

SEQ ID NO: 3173268 - RNA, 16 nt, Human
uugauucagcucugca

SEQ ID NO: 3173269 - RNA, 23 nt, Human
uugauucagacagcugccuggga

SEQ ID NO: 3173270 - RNA, 17 nt, Human
uugauucagacagcugc

SEQ ID NO: 3173271 - RNA, 21 nt, Human
uugauucagacagcugccugg

SEQ ID NO: 3173272 - RNA, 20 nt, Human
uugaggcuuauauuugugua

SEQ ID NO: 3173273 - RNA, 16 nt, Human
uugauaugcuuauaca

SEQ ID NO: 3173274 - RNA, 18 nt, Human
uugaucaguaguuugcau

SEQ ID NO: 3173275 - RNA, 17 nt, Human
uugaucaguaguuugca

SEQ ID NO: 3173276 - RNA, 15 nt, Human
uugauauucuaagaa

SEQ ID NO: 3173277 - RNA, 18 nt, Human
uugauauucuaagaaaua

SEQ ID NO: 3173278 - RNA, 22 nt, Human
uugauauucuaagaaauaucug

SEQ ID NO: 3173279 - RNA, 23 nt, Human
uugauauucuaagaaauaucugu

SEQ ID NO: 3173280 - RNA, 15 nt, Human
uugauauuuguauuu

SEQ ID NO: 3173281 - RNA, 13 nt, Human
uugauauuuguau

SEQ ID NO: 3173282 - RNA, 22 nt, Human
uugauauuuucaacgcagcccu

SEQ ID NO: 3173283 - RNA, 22 nt, Human
uugauauuuguauuuauucuuu

SEQ ID NO: 3173284 - RNA, 14 nt, Human
uugagccugggagg

SEQ ID NO: 3173285 - RNA, 12 nt, Human
uugaauuaucag

SEQ ID NO: 3173286 - RNA, 20 nt, Human
uugaauuaucagcaaagaaa

SEQ ID NO: 3173287 - RNA, 19 nt, Human
uugagcuacuggauucuua

SEQ ID NO: 3173288 - RNA, 20 nt, Human
uugagcuacuggauucuuau

SEQ ID NO: 3173289 - RNA, 11 nt, Human
uugagcuauga

SEQ ID NO: 3173290 - RNA, 14 nt, Human
uugagcuaugacuu

SEQ ID NO: 3173291 - RNA, 13 nt, Human
uugagcucagccc

SEQ ID NO: 3173292 - RNA, 15 nt, Human
uugagcuaugacuua

SEQ ID NO: 3173293 - RNA, 16 nt, Human
uugagcuaugacuuaa

SEQ ID NO: 3173294 - RNA, 22 nt, Human
uugagcucccacuucugccaga

SEQ ID NO: 3173295 - RNA, 13 nt, Human
uugagcuccuggg

SEQ ID NO: 3173296 - RNA, 12 nt, Human
uugagcucccac

SEQ ID NO: 3173297 - RNA, 16 nt, Human
uugaggagugguuuuu

SEQ ID NO: 3173298 - RNA, 16 nt, Human
uugaggagcacugaaa

SEQ ID NO: 3173299 - RNA, 14 nt, Human
uugaggauuaguuu

SEQ ID NO: 3173300 - RNA, 17 nt, Human
uugaggauuaguuuaga

SEQ ID NO: 3173301 - RNA, 18 nt, Human
uugaggauuaguuuagaa

SEQ ID NO: 3173302 - RNA, 19 nt, Human
uugaggauuaguuuagaac

SEQ ID NO: 3173303 - RNA, 15 nt, Human
uugcaguuuuucauu

SEQ ID NO: 3173304 - RNA, 19 nt, Human
uugccaguaacacaggcca

SEQ ID NO: 3173305 - RNA, 17 nt, Human
uugccagcugcugagcc

SEQ ID NO: 3173306 - RNA, 22 nt, Human
uugccagcugcugagccgcaga

SEQ ID NO: 3173307 - RNA, 20 nt, Human
uugccagcugcugagccgca

SEQ ID NO: 3173308 - RNA, 12 nt, Human
uugccagcccau

SEQ ID NO: 3173309 - RNA, 20 nt, Human
uugccagcccauuugggcag

SEQ ID NO: 3173310 - RNA, 15 nt, Human
uugccagcccauuug

SEQ ID NO: 3173311 - RNA, 22 nt, Human
uugccaggaaaggagaguacuu

SEQ ID NO: 3173312 - RNA, 17 nt, Human
uugccaucucugcucca

SEQ ID NO: 3173313 - RNA, 15 nt, Human
uugccaucucugcuc

SEQ ID NO: 3173314 - RNA, 19 nt, Human
uugccauguuggccaggcu

SEQ ID NO: 3173315 - RNA, 18 nt, Human
uugccauguuggccaggc

SEQ ID NO: 3173316 - RNA, 17 nt, Human
uugccauguuggccagg

SEQ ID NO: 3173317 - RNA, 16 nt, Human
uugccauguuggccag

SEQ ID NO: 3173318 - RNA, 18 nt, Human
uugcagcucagaaccaca

SEQ ID NO: 3173319 - RNA, 17 nt, Human
uugcagcacagcugaga

SEQ ID NO: 3173320 - RNA, 23 nt, Human
uugcagacaggcaagcaccuccu

SEQ ID NO: 3173321 - RNA, 13 nt, Human
uugauucauaaug

SEQ ID NO: 3173322 - RNA, 17 nt, Human
uugauucauaaugacuu

SEQ ID NO: 3173323 - RNA, 22 nt, Human
uugcagacaggcaagcaccucc

SEQ ID NO: 3173324 - RNA, 21 nt, Human
uugcacuuucagacucucucu

SEQ ID NO: 3173325 - RNA, 22 nt, Human
uugcacuuuuucuuaaucauuu

SEQ ID NO: 3173326 - RNA, 17 nt, Human
uugcacuuuuucuuaau

SEQ ID NO: 3173327 - RNA, 15 nt, Human
uugcacuuucagacu

SEQ ID NO: 3173328 - RNA, 12 nt, Human
uugcacugaagu

SEQ ID NO: 3173329 - RNA, 11 nt, Human
uugcacugaag

SEQ ID NO: 3173330 - RNA, 16 nt, Human
uugcacugaaguuuga

SEQ ID NO: 3173331 - RNA, 13 nt, Human
uugcacugaaguu

SEQ ID NO: 3173332 - RNA, 16 nt, Human
uuucagccaagaauuc

SEQ ID NO: 3173333 - RNA, 17 nt, Human
uuucagccaagaauucu

SEQ ID NO: 3173334 - RNA, 14 nt, Human
uuucagccuaagag

SEQ ID NO: 3173335 - RNA, 16 nt, Human
uuucacagugugauuu

SEQ ID NO: 3173336 - RNA, 17 nt, Human
uuucacagcuaugaaga

SEQ ID NO: 3173337 - RNA, 20 nt, Human
uuucacagugugauuuugau

SEQ ID NO: 3173338 - RNA, 14 nt, Human
uuucaauguguaua

SEQ ID NO: 3173339 - RNA, 19 nt, Human
uuucaauguguauaaauug

SEQ ID NO: 3173340 - RNA, 23 nt, Human
uuucaaugugauauaaacagcuu

SEQ ID NO: 3173341 - RNA, 15 nt, Human
uuucaauguaauuaa

SEQ ID NO: 3173342 - RNA, 20 nt, Human
uuucaauguaauuaaacugu

SEQ ID NO: 3173343 - RNA, 19 nt, Human
uuuccacuccuccuagcca

SEQ ID NO: 3173344 - RNA, 18 nt, Human
uuuccacuccuccuagcc

SEQ ID NO: 3173345 - RNA, 14 nt, Human
uuuccaccuucuca

SEQ ID NO: 3173346 - RNA, 23 nt, Human
uuucauuuugcuuuaauuuuagc

SEQ ID NO: 3173347 - RNA, 15 nt, Human
uuuccaaaacaaaaa

SEQ ID NO: 3173348 - RNA, 22 nt, Human
uuuccaaaacaaaaagaugucu

SEQ ID NO: 3173349 - RNA, 15 nt, Human
uuucauuuugcuuua

SEQ ID NO: 3173350 - RNA, 20 nt, Human
uuucauuuugcuuuaauuuu

SEQ ID NO: 3173351 - RNA, 16 nt, Human
uuucauuuugcuuuaa

SEQ ID NO: 3173352 - RNA, 16 nt, Human
uuucaguaagaucaag

SEQ ID NO: 3173353 - RNA, 19 nt, Human
uuucaguaaaccugucuga

SEQ ID NO: 3173354 - RNA, 15 nt, Human
uuucagucaaaacuu

SEQ ID NO: 3173355 - RNA, 16 nt, Human
uuucagucaaaacuuu

SEQ ID NO: 3173356 - RNA, 21 nt, Human
uuucauuuuacaguuacuuuu

SEQ ID NO: 3173357 - RNA, 14 nt, Human
uuucauuuuaaaaa

SEQ ID NO: 3173358 - RNA, 16 nt, Human
uuucauuuuaaaaagu

SEQ ID NO: 3173359 - RNA, 17 nt, Human
uuucauuuuaaaaaguc

SEQ ID NO: 3173360 - RNA, 22 nt, Human
uuucagcuaggaacaaaucuuc

SEQ ID NO: 3173361 - RNA, 15 nt, Human
uuucagcuaggaaca

SEQ ID NO: 3173362 - RNA, 21 nt, Human
uuucagcuaggaacaaaucuu

SEQ ID NO: 3173363 - RNA, 19 nt, Human
uuucagcuaggaacaaauc

SEQ ID NO: 3173364 - RNA, 22 nt, Human
uuucaggugcucaaaaugcaaa

SEQ ID NO: 3173365 - RNA, 20 nt, Human
uuucaggugcucaaaaugca

SEQ ID NO: 3173366 - RNA, 19 nt, Human
uuucaggugcucaaaaugc

SEQ ID NO: 3173367 - RNA, 16 nt, Human
uuucaggugcucaaaa

SEQ ID NO: 3173368 - RNA, 14 nt, Human
uuucuaaaguacug

SEQ ID NO: 3173369 - RNA, 15 nt, Human
uuucuaaugugugaa

SEQ ID NO: 3173370 - RNA, 19 nt, Human
uuucuaauuggcuuuacua

SEQ ID NO: 3173371 - RNA, 14 nt, Human
uuucuaauuugcug

SEQ ID NO: 3173372 - RNA, 16 nt, Human
uuucuaauuugcugcu

SEQ ID NO: 3173373 - RNA, 17 nt, Human
uuucuaauuugcugcug

SEQ ID NO: 3173374 - RNA, 19 nt, Human
uuuccuggcacugcuucca

SEQ ID NO: 3173375 - RNA, 23 nt, Human
uuuccucugaggaugauguacuu

SEQ ID NO: 3173376 - RNA, 23 nt, Human
uuuccuggcacugcuuccaguga

SEQ ID NO: 3173377 - RNA, 17 nt, Human
uuuccucuuagaagaau

SEQ ID NO: 3173378 - RNA, 19 nt, Human
uuuccugggacaucuucug

SEQ ID NO: 3173379 - RNA, 19 nt, Human
uuucuccuuuuguguucca

SEQ ID NO: 3173380 - RNA, 16 nt, Human
uuucuccuuuuguguu

SEQ ID NO: 3173381 - RNA, 17 nt, Human
uuucuacucauuuuaau

SEQ ID NO: 3173382 - RNA, 13 nt, Human
uuucuacucauuu

SEQ ID NO: 3173383 - RNA, 18 nt, Human
uuucuacccagcgagccc

SEQ ID NO: 3173384 - RNA, 15 nt, Human
uuucuacccagcgag

SEQ ID NO: 3173385 - RNA, 22 nt, Human
uuucuacccagcgagcccuggu

SEQ ID NO: 3173386 - RNA, 19 nt, Human
uuucucucuauuucccccu

SEQ ID NO: 3173387 - RNA, 15 nt, Human
uuucucuuugaaaca

SEQ ID NO: 3173388 - RNA, 20 nt, Human
uuucucuuugaaacaugcuu

SEQ ID NO: 3173389 - RNA, 15 nt, Human
uuugauaagaaaacc

SEQ ID NO: 3173390 - RNA, 23 nt, Human
uuugauaacagggauugauuuua

SEQ ID NO: 3173391 - RNA, 14 nt, Human
uuugauaaauagug

SEQ ID NO: 3173392 - RNA, 13 nt, Human
uuugauaaauagu

SEQ ID NO: 3173393 - RNA, 23 nt, Human
uuugaggauuaguuuagaacagg

SEQ ID NO: 3173394 - RNA, 20 nt, Human
uuugaggcucaccagaauua

SEQ ID NO: 3173395 - RNA, 17 nt, Human
uuugaggauuaguuuag

SEQ ID NO: 3173396 - RNA, 18 nt, Human
uuugaggauuaguuuaga

SEQ ID NO: 3173397 - RNA, 19 nt, Human
uuugaggauuaguuuagaa

SEQ ID NO: 3173398 - RNA, 22 nt, Human
uuugaggauuaguuuagaacag

SEQ ID NO: 3173399 - RNA, 15 nt, Human
uuugaggagugguuu

SEQ ID NO: 3173400 - RNA, 19 nt, Human
uuugaggagugguuuuucu

SEQ ID NO: 3173401 - RNA, 16 nt, Human
uuugaggauuaguuua

SEQ ID NO: 3173402 - RNA, 18 nt, Human
uuugaggaaauuugcagc

SEQ ID NO: 3173403 - RNA, 21 nt, Human
uuugagaucuaaaaauaacug

SEQ ID NO: 3173404 - RNA, 18 nt, Human
uuugagaucuaaaaauaa

SEQ ID NO: 3173405 - RNA, 17 nt, Human
uuugagaucuaaaaaua

SEQ ID NO: 3173406 - RNA, 16 nt, Human
uuugagaucuaaaaau

SEQ ID NO: 3173407 - RNA, 14 nt, Human
uuugagaucuaaaa

SEQ ID NO: 3173408 - RNA, 16 nt, Human
uuugagaucagccugg

SEQ ID NO: 3173409 - RNA, 17 nt, Human
uuugagaucagccuggg

SEQ ID NO: 3173410 - RNA, 23 nt, Human
uuucugaucugaugcaagcaaga

SEQ ID NO: 3173411 - RNA, 13 nt, Human
uuucuugcucccu

SEQ ID NO: 3173412 - RNA, 18 nt, Human
uuucuugcucccugacug

SEQ ID NO: 3173413 - RNA, 19 nt, Human
uuucuuguguguuuauugu

SEQ ID NO: 3173414 - RNA, 21 nt, Human
uuucuuggacacuuaauucug

SEQ ID NO: 3173415 - RNA, 23 nt, Human
uuucuuggacacuuaauucuguu

SEQ ID NO: 3173416 - RNA, 14 nt, Human
uuucuuguaucugg

SEQ ID NO: 3173417 - RNA, 13 nt, Human
uuugaaccaauaa

SEQ ID NO: 3173418 - RNA, 19 nt, Human
uuugguagcugggaaagca

SEQ ID NO: 3173419 - RNA, 15 nt, Human
uuuggagagaaauau

SEQ ID NO: 3173420 - RNA, 14 nt, Human
uuuggagagaaaua

SEQ ID NO: 3173421 - RNA, 15 nt, Human
uuugguugaauaaac

SEQ ID NO: 3173422 - RNA, 14 nt, Human
uuugguugaauaaa

SEQ ID NO: 3173423 - RNA, 13 nt, Human
uuuguaaaaugua

SEQ ID NO: 3173424 - RNA, 15 nt, Human
uuuguaaaauguauu

SEQ ID NO: 3173425 - RNA, 16 nt, Human
uuuguaaaauguauua

SEQ ID NO: 3173426 - RNA, 17 nt, Human
uuugguugaauaaacua

SEQ ID NO: 3173427 - RNA, 22 nt, Human
uuuguauucaauuaaagaaaua

SEQ ID NO: 3173428 - RNA, 16 nt, Human
uuuguaugcacuuugu

SEQ ID NO: 3173429 - RNA, 15 nt, Human
uuuguauguauaauu

SEQ ID NO: 3173430 - RNA, 14 nt, Human
uuuguauguauaau

SEQ ID NO: 3173431 - RNA, 18 nt, Human
uuuguaaagauuucuguu

SEQ ID NO: 3173432 - RNA, 18 nt, Human
uuuguaaagaaaaauauu

SEQ ID NO: 3173433 - RNA, 17 nt, Human
uuuguaaagaaaaauau

SEQ ID NO: 3173434 - RNA, 16 nt, Human
uuuguaaagaaaaaua

SEQ ID NO: 3173435 - RNA, 15 nt, Human
uuuguaaagaaaaau

SEQ ID NO: 3173436 - RNA, 21 nt, Human
uuuguaaacuuugaaauauau

SEQ ID NO: 3173437 - RNA, 19 nt, Human
uuuguaaacuuugaaauau

SEQ ID NO: 3173438 - RNA, 16 nt, Human
uuuguaaacuuugaaa

SEQ ID NO: 3173439 - RNA, 15 nt, Human
uuuguaaacuuugaa

SEQ ID NO: 3173440 - RNA, 23 nt, Human
uuugcuuguggcuccacacacac

SEQ ID NO: 3173441 - RNA, 12 nt, Human
uuugcuuuaauu

SEQ ID NO: 3173442 - RNA, 15 nt, Human
uuuggacccugaggc

SEQ ID NO: 3173443 - RNA, 19 nt, Human
uuuggacccugaggcccag

SEQ ID NO: 3173444 - RNA, 13 nt, Human
uuuggacccugag

SEQ ID NO: 3173445 - RNA, 17 nt, Human
uuugcuuuaauuuuagc

SEQ ID NO: 3173446 - RNA, 15 nt, Human
uuuggacuuuguuac

SEQ ID NO: 3173447 - RNA, 13 nt, Human
uuugaucaugaau

SEQ ID NO: 3173448 - RNA, 12 nt, Human
uuugaucaugaa

SEQ ID NO: 3173449 - RNA, 15 nt, Human
uuugcauuucagaaa

SEQ ID NO: 3173450 - RNA, 21 nt, Human
uuugcauuucagaaagccuuu

SEQ ID NO: 3173451 - RNA, 19 nt, Human
uuugaucaugaauaacuga

SEQ ID NO: 3173452 - RNA, 10 nt, Human
uuugccagcc

SEQ ID NO: 3173453 - RNA, 17 nt, Human
uuugccagcccauuugg

SEQ ID NO: 3173454 - RNA, 20 nt, Human
uuuacagaggacaguauuug

SEQ ID NO: 3173455 - RNA, 21 nt, Human
uuuacagagaugucucuuaua

SEQ ID NO: 3173456 - RNA, 13 nt, Human
uuuacagagacag

SEQ ID NO: 3173457 - RNA, 12 nt, Human
uuuaaucagaaa

SEQ ID NO: 3173458 - RNA, 16 nt, Human
uuuaauaugaaauuuu

SEQ ID NO: 3173459 - RNA, 15 nt, Human
uuuaauaugaaauuu

SEQ ID NO: 3173460 - RNA, 13 nt, Human
uuuacagcugccu

SEQ ID NO: 3173461 - RNA, 14 nt, Human
uuuacauacuuuau

SEQ ID NO: 3173462 - RNA, 13 nt, Human
uuuacauagucug

SEQ ID NO: 3173463 - RNA, 23 nt, Human
uuuacauagucugaagugaagua

SEQ ID NO: 3173464 - RNA, 15 nt, Human
uuuacaguuacuuuu

SEQ ID NO: 3173465 - RNA, 21 nt, Human
uuuacaguuacuuuuccuugc

SEQ ID NO: 3173466 - RNA, 19 nt, Human
uuuacaguuacuuuuccuu

SEQ ID NO: 3173467 - RNA, 15 nt, Human
uuuacaguuauagaa

SEQ ID NO: 3173468 - RNA, 21 nt, Human
uuuaccaugcucaaugaaaag

SEQ ID NO: 3173469 - RNA, 13 nt, Human
uuuaauaaaccau

SEQ ID NO: 3173470 - RNA, 15 nt, Human
uuuaauaauuagaaa

SEQ ID NO: 3173471 - RNA, 16 nt, Human
uuuauaccuguuuaaa

SEQ ID NO: 3173472 - RNA, 17 nt, Human
uuuauaccuguuuaaau

SEQ ID NO: 3173473 - RNA, 15 nt, Human
uuuauacgagaacag

SEQ ID NO: 3173474 - RNA, 18 nt, Human
uuuauaccuguuuaaauu

SEQ ID NO: 3173475 - RNA, 18 nt, Human
uuuaucccuuaagaauga

SEQ ID NO: 3173476 - RNA, 16 nt, Human
uuuaucccuuaagaau

SEQ ID NO: 3173477 - RNA, 15 nt, Human
uuuaucccuuaagaa

SEQ ID NO: 3173478 - RNA, 21 nt, Human
uuuaucgcccuggcaggcagg

SEQ ID NO: 3173479 - RNA, 16 nt, Human
uuuaucucagauguua

SEQ ID NO: 3173480 - RNA, 18 nt, Human
uuuaucucagauguuaaa

SEQ ID NO: 3173481 - RNA, 19 nt, Human
uuuaucucagauguuaaaa

SEQ ID NO: 3173482 - RNA, 21 nt, Human
uuuaucucagauguuaaaaua

SEQ ID NO: 3173483 - RNA, 21 nt, Human
uuuaucuugaaggaaaaauuc

SEQ ID NO: 3173484 - RNA, 17 nt, Human
uuuaucuugaaggaaaa

SEQ ID NO: 3173485 - RNA, 22 nt, Human
uuuagacccuauugcugcuuga

SEQ ID NO: 3173486 - RNA, 21 nt, Human
uuuagacauguaauuugugua

SEQ ID NO: 3173487 - RNA, 19 nt, Human
uuuagacccuauugcugcu

SEQ ID NO: 3173488 - RNA, 15 nt, Human
uuuacccuauaucua

SEQ ID NO: 3173489 - RNA, 18 nt, Human
uuuacccuauaucuauaa

SEQ ID NO: 3173490 - RNA, 16 nt, Human
uuuacccuauaucuau

SEQ ID NO: 3173491 - RNA, 17 nt, Human
uuuauaacaucuuuauu

SEQ ID NO: 3173492 - RNA, 20 nt, Human
uuuauaacaucuuuauugaa

SEQ ID NO: 3173493 - RNA, 23 nt, Human
uuuauacagaugccauauagugu

SEQ ID NO: 3173494 - RNA, 15 nt, Human
uuguuuagaagaagu

SEQ ID NO: 3173495 - RNA, 18 nt, Human
uuguuuagaagaagugug

SEQ ID NO: 3173496 - RNA, 17 nt, Human
uuguuuaaaaucauuuc

SEQ ID NO: 3173497 - RNA, 18 nt, Human
uuguuuaaaaucauuucu

SEQ ID NO: 3173498 - RNA, 15 nt, Human
uugucuuuggacccu

SEQ ID NO: 3173499 - RNA, 12 nt, Human
uugucuuucugg

SEQ ID NO: 3173500 - RNA, 18 nt, Human
uugucuuguguauuucag

SEQ ID NO: 3173501 - RNA, 19 nt, Human
uugucuuccuauuucagaa

SEQ ID NO: 3173502 - RNA, 15 nt, Human
uugucuuauugacag

SEQ ID NO: 3173503 - RNA, 19 nt, Human
uugucuuaauggaugaaau

SEQ ID NO: 3173504 - RNA, 17 nt, Human
uugucuuaauggaugaa

SEQ ID NO: 3173505 - RNA, 23 nt, Human
uugucuuccuauuucagaaguuu

SEQ ID NO: 3173506 - RNA, 20 nt, Human
uugucuuuggacccugaggc

SEQ ID NO: 3173507 - RNA, 24 nt, Human
uugucuuuggacccugaggcccag

SEQ ID NO: 3173508 - RNA, 14 nt, Human
uugucuuucugggg

SEQ ID NO: 3173509 - RNA, 13 nt, Human
uuguuauuaaaug

SEQ ID NO: 3173510 - RNA, 14 nt, Human
uuguuauuaaaugu

SEQ ID NO: 3173511 - RNA, 15 nt, Human
uuguuauuaaaugua

SEQ ID NO: 3173512 - RNA, 22 nt, Human
uuguuuguauguauaauucaaa

SEQ ID NO: 3173513 - RNA, 21 nt, Human
uuguuugguuauagugcaaua

SEQ ID NO: 3173514 - RNA, 19 nt, Human
uuguuuguauguauaauuc

SEQ ID NO: 3173515 - RNA, 13 nt, Human
uuguuuguaugua

SEQ ID NO: 3173516 - RNA, 18 nt, Human
uuguuugguuauagugca

SEQ ID NO: 3173517 - RNA, 19 nt, Human
uuguuuguuaauaaagugc

SEQ ID NO: 3173518 - RNA, 13 nt, Human
uuguuuguuucaa

SEQ ID NO: 3173519 - RNA, 12 nt, Human
uuguuuguuuca

SEQ ID NO: 3173520 - RNA, 18 nt, Human
uuuaaaacaccuucuaua

SEQ ID NO: 3173521 - RNA, 19 nt, Human
uuguuuagauuuuguguuu

SEQ ID NO: 3173522 - RNA, 23 nt, Human
uuguuuagucuuuauacugcaaa

SEQ ID NO: 3173523 - RNA, 20 nt, Human
uuguuuagauuuuguguuua

SEQ ID NO: 3173524 - RNA, 19 nt, Human
uuguuuaucuagauguaaa

SEQ ID NO: 3173525 - RNA, 17 nt, Human
uuguuuaucuagaugua

SEQ ID NO: 3173526 - RNA, 20 nt, Human
uuguuuggggaugagaaagg

SEQ ID NO: 3173527 - RNA, 19 nt, Human
uuguuucuuucucugagga

SEQ ID NO: 3173528 - RNA, 16 nt, Human
uuguuucuuucucuga

SEQ ID NO: 3173529 - RNA, 17 nt, Human
uuguuucuuaauuugga

SEQ ID NO: 3173530 - RNA, 16 nt, Human
uuuaaaauugugaugu

SEQ ID NO: 3173531 - RNA, 19 nt, Human
uuuaaaauucucuuccaac

SEQ ID NO: 3173532 - RNA, 16 nt, Human
uuuaaaauuacaacua

SEQ ID NO: 3173533 - RNA, 21 nt, Human
uuuaaaauguacauguauuaa

SEQ ID NO: 3173534 - RNA, 20 nt, Human
uuuaaaauguacauguauua

SEQ ID NO: 3173535 - RNA, 13 nt, Human
uuuaaaauguaca

SEQ ID NO: 3173536 - RNA, 14 nt, Human
uuuaaaauuuuaag

SEQ ID NO: 3173537 - RNA, 13 nt, Human
uuuaaaauuucau

SEQ ID NO: 3173538 - RNA, 18 nt, Human
uuuaaaccuuuuauuaua

SEQ ID NO: 3173539 - RNA, 15 nt, Human
uuuaaacugucgugu

SEQ ID NO: 3173540 - RNA, 21 nt, Human
uuuaaacucugaauuuaucuu

SEQ ID NO: 3173541 - RNA, 18 nt, Human
uuuaaaagaugcaaugua

SEQ ID NO: 3173542 - RNA, 19 nt, Human
uuuaaaagcccuuuccaaa

SEQ ID NO: 3173543 - RNA, 20 nt, Human
uuuaaaagauaaauauuaua

SEQ ID NO: 3173544 - RNA, 16 nt, Human
uuuaaaacuacuuagc

SEQ ID NO: 3173545 - RNA, 20 nt, Human
uuuaaaacuaguuagauuca

SEQ ID NO: 3173546 - RNA, 13 nt, Human
uuuaaaacuacuu

SEQ ID NO: 3173547 - RNA, 16 nt, Human
uuuaaaaucauuucug

SEQ ID NO: 3173548 - RNA, 22 nt, Human
uuuaaaaucuuauuaaaguuuc

SEQ ID NO: 3173549 - RNA, 21 nt, Human
uuuaaaaucuuauuaaaguuu

SEQ ID NO: 3173550 - RNA, 20 nt, Human
uuuaaaaucuuauuaaaguu

SEQ ID NO: 3173551 - RNA, 16 nt, Human
uuuaaaaucuuauuaa

SEQ ID NO: 3173552 - RNA, 18 nt, Human
uuuaaaaucuccuaaaug

SEQ ID NO: 3173553 - RNA, 20 nt, Human
uuuaaaaucuccuaaaugcu

SEQ ID NO: 3173554 - RNA, 18 nt, Human
uuuaaaauacuguagaua

SEQ ID NO: 3173555 - RNA, 17 nt, Human
uuuaaaauacuguagau

SEQ ID NO: 3173556 - RNA, 19 nt, Human
uuuaaaauacacacucaaa

SEQ ID NO: 3173557 - RNA, 12 nt, Human
uuuaaaauacug

SEQ ID NO: 3173558 - RNA, 16 nt, Human
uuuaaaauacuguaga

SEQ ID NO: 3173559 - RNA, 15 nt, Human
uuuaaaauacuguag

SEQ ID NO: 3173560 - RNA, 13 nt, Human
uuuaaaauaaacu

SEQ ID NO: 3173561 - RNA, 13 nt, Human
uuuaaaaguaaaa

SEQ ID NO: 3173562 - RNA, 23 nt, Human
uuuaaaaguaaaaugucuuucca

SEQ ID NO: 3173563 - RNA, 20 nt, Human
uuuaaaagcccuuuccaaag

SEQ ID NO: 3173564 - RNA, 15 nt, Human
uuaugcagugcugcu

SEQ ID NO: 3173565 - RNA, 16 nt, Human
uuaugcagugcugcuu

SEQ ID NO: 3173566 - RNA, 19 nt, Human
uuaucuuggccuuacugua

SEQ ID NO: 3173567 - RNA, 11 nt, Human
uuaucuuugau

SEQ ID NO: 3173568 - RNA, 22 nt, Human
uuaugcaaggucuugcauuuaa

SEQ ID NO: 3173569 - RNA, 10 nt, Human
uuaugcuaag

SEQ ID NO: 3173570 - RNA, 20 nt, Human
uuaugcuaagaauuuuuuau

SEQ ID NO: 3173571 - RNA, 16 nt, Human
uuaugcuaagaauuuu

SEQ ID NO: 3173572 - RNA, 15 nt, Human
uuaugcuaagaauuu

SEQ ID NO: 3173573 - RNA, 18 nt, Human
uuaugcuguaaaagcaag

SEQ ID NO: 3173574 - RNA, 16 nt, Human
uuaugcuuaaauucaa

SEQ ID NO: 3173575 - RNA, 16 nt, Human
uuaugcuuccagaaac

SEQ ID NO: 3173576 - RNA, 15 nt, Human
uuaugcuuccagaaa

SEQ ID NO: 3173577 - RNA, 14 nt, Human
uuaugcuuccagaa

SEQ ID NO: 3173578 - RNA, 11 nt, Human
uuaguuuagaa

SEQ ID NO: 3173579 - RNA, 23 nt, Human
uuaguuccccaaauacaaaguua

SEQ ID NO: 3173580 - RNA, 16 nt, Human
uuaguuccucauuagc

SEQ ID NO: 3173581 - RNA, 14 nt, Human
uuaguuccuugagu

SEQ ID NO: 3173582 - RNA, 19 nt, Human
uuaucuagauguaaauuuu

SEQ ID NO: 3173583 - RNA, 18 nt, Human
uuaucuagauguaaauuu

SEQ ID NO: 3173584 - RNA, 17 nt, Human
uuaucuagauguaaauu

SEQ ID NO: 3173585 - RNA, 16 nt, Human
uuaucuagauguaaau

SEQ ID NO: 3173586 - RNA, 15 nt, Human
uuaucuagauguaaa

SEQ ID NO: 3173587 - RNA, 14 nt, Human
uuaucuagauguaa

SEQ ID NO: 3173588 - RNA, 14 nt, Human
uuaucuagcugcau

SEQ ID NO: 3173589 - RNA, 17 nt, Human
uuauugauauucuaaga

SEQ ID NO: 3173590 - RNA, 19 nt, Human
uuauugauauucuaagaaa

SEQ ID NO: 3173591 - RNA, 21 nt, Human
uuauugauauucuaagaaaua

SEQ ID NO: 3173592 - RNA, 22 nt, Human
uuauugaggaaaaauaugugaa

SEQ ID NO: 3173593 - RNA, 21 nt, Human
uuauugaggaaaaauauguga

SEQ ID NO: 3173594 - RNA, 19 nt, Human
uuauugaggaaaaauaugu

SEQ ID NO: 3173595 - RNA, 22 nt, Human
uuauugagagagauguguaauu

SEQ ID NO: 3173596 - RNA, 20 nt, Human
uuauugagagagauguguaa

SEQ ID NO: 3173597 - RNA, 19 nt, Human
uuauugagagagaugugua

SEQ ID NO: 3173598 - RNA, 18 nt, Human
uuauugagagagaugugu

SEQ ID NO: 3173599 - RNA, 16 nt, Human
uuauugacucuugagu

SEQ ID NO: 3173600 - RNA, 17 nt, Human
uuauugacucuugaguu

SEQ ID NO: 3173601 - RNA, 20 nt, Human
uuauugacucuugaguuguu

SEQ ID NO: 3173602 - RNA, 21 nt, Human
uuauugacucuugaguuguuu

SEQ ID NO: 3173603 - RNA, 15 nt, Human
uuauugcccacgcug

SEQ ID NO: 3173604 - RNA, 13 nt, Human
uuauugaugaaaa

SEQ ID NO: 3173605 - RNA, 23 nt, Human
uuauugaggaaaaauaugugaag

SEQ ID NO: 3173606 - RNA, 19 nt, Human
uuauugaguuccaguugaa

SEQ ID NO: 3173607 - RNA, 14 nt, Human
uuauugaugaaaau

SEQ ID NO: 3173608 - RNA, 17 nt, Human
uuauugcaauaaaguau

SEQ ID NO: 3173609 - RNA, 11 nt, Human
uuauucugcuc

SEQ ID NO: 3173610 - RNA, 19 nt, Human
uuauucugggaauguauag

SEQ ID NO: 3173611 - RNA, 20 nt, Human
uuauucugggaauguauagu

SEQ ID NO: 3173612 - RNA, 22 nt, Human
uuauucugggcaccacaaaaua

SEQ ID NO: 3173613 - RNA, 23 nt, Human
uuauucugggcaccacaaaauau

SEQ ID NO: 3173614 - RNA, 22 nt, Human
uuauucuuuuuuucucuagagu

SEQ ID NO: 3173615 - RNA, 17 nt, Human
uuauucuuugcacuuuu

SEQ ID NO: 3173616 - RNA, 15 nt, Human
uuauucuuucuccuu

SEQ ID NO: 3173617 - RNA, 15 nt, Human
uuauucuuugcacuu

SEQ ID NO: 3173618 - RNA, 14 nt, Human
uuauucuuugcacu

SEQ ID NO: 3173619 - RNA, 15 nt, Human
uuauucuugaugaaa

SEQ ID NO: 3173620 - RNA, 14 nt, Human
uuauucuugaugaa

SEQ ID NO: 3173621 - RNA, 13 nt, Human
uuauucuugauca

SEQ ID NO: 3173622 - RNA, 11 nt, Human
uuauucuugau

SEQ ID NO: 3173623 - RNA, 18 nt, Human
uuauugacaguugugcag

SEQ ID NO: 3173624 - RNA, 14 nt, Human
uuauugacucuuga

SEQ ID NO: 3173625 - RNA, 14 nt, Human
uuauuaaugcuuug

SEQ ID NO: 3173626 - RNA, 13 nt, Human
uuauuaaugcuuu

SEQ ID NO: 3173627 - RNA, 20 nt, Human
uuauuccugcccugcuguuu

SEQ ID NO: 3173628 - RNA, 12 nt, Human
uuauucuaauua

SEQ ID NO: 3173629 - RNA, 14 nt, Human
uuauuaaucacugu

SEQ ID NO: 3173630 - RNA, 16 nt, Human
uuauuaaucacugugu

SEQ ID NO: 3173631 - RNA, 18 nt, Human
uuauuaaucacuguguau

SEQ ID NO: 3173632 - RNA, 19 nt, Human
uuauuaaaguuucaaaaau

SEQ ID NO: 3173633 - RNA, 17 nt, Human
uuauuaaaguuucaaaa

SEQ ID NO: 3173634 - RNA, 15 nt, Human
uuauuaaaguuucaa

SEQ ID NO: 3173635 - RNA, 14 nt, Human
uuauuaaaguuuca

SEQ ID NO: 3173636 - RNA, 12 nt, Human
uuauuaaaauug

SEQ ID NO: 3173637 - RNA, 13 nt, Human
uuauuaaaauugu

SEQ ID NO: 3173638 - RNA, 17 nt, Human
uuauggcuauaggugcu

SEQ ID NO: 3173639 - RNA, 15 nt, Human
uuauggaaaaauaaa

SEQ ID NO: 3173640 - RNA, 17 nt, Human
uuauggaaaaauaaaac

SEQ ID NO: 3173641 - RNA, 22 nt, Human
uucacucuaagauguuauauuu

SEQ ID NO: 3173642 - RNA, 20 nt, Human
uucagacauagaauuaacac

SEQ ID NO: 3173643 - RNA, 19 nt, Human
uucagagacuccugcaggc

SEQ ID NO: 3173644 - RNA, 16 nt, Human
uucagacauagaauua

SEQ ID NO: 3173645 - RNA, 21 nt, Human
uucagacagcugccugggauc

SEQ ID NO: 3173646 - RNA, 13 nt, Human
uucacucuccuug

SEQ ID NO: 3173647 - RNA, 16 nt, Human
uucacucuaagauguu

SEQ ID NO: 3173648 - RNA, 18 nt, Human
uucacucuaagauguuau

SEQ ID NO: 3173649 - RNA, 17 nt, Human
uucacucuaagauguua

SEQ ID NO: 3173650 - RNA, 16 nt, Human
uucacuauaaugugaa

SEQ ID NO: 3173651 - RNA, 15 nt, Human
uucacgugguccuaa

SEQ ID NO: 3173652 - RNA, 18 nt, Human
uucacggaagagccuugc

SEQ ID NO: 3173653 - RNA, 19 nt, Human
uucacgucauaggaaguua

SEQ ID NO: 3173654 - RNA, 13 nt, Human
uucaauaggaaaa

SEQ ID NO: 3173655 - RNA, 15 nt, Human
uucaauaggaaaaac

SEQ ID NO: 3173656 - RNA, 18 nt, Human
uucaauaggaaaaacuga

SEQ ID NO: 3173657 - RNA, 17 nt, Human
uuauuuuaauucaguug

SEQ ID NO: 3173658 - RNA, 17 nt, Human
uucaaagucaugauguu

SEQ ID NO: 3173659 - RNA, 21 nt, Human
uucaaagucaugauguuuuua

SEQ ID NO: 3173660 - RNA, 11 nt, Human
uucaaagucuc

SEQ ID NO: 3173661 - RNA, 19 nt, Human
uucaaagucucaaugaaau

SEQ ID NO: 3173662 - RNA, 20 nt, Human
uucaaagucucaaugaaaua

SEQ ID NO: 3173663 - RNA, 19 nt, Human
uucaaagucaugauguuuu

SEQ ID NO: 3173664 - RNA, 18 nt, Human
uucaaagucaugauguuu

SEQ ID NO: 3173665 - RNA, 19 nt, Human
uucaaaggagcaagaacuu

SEQ ID NO: 3173666 - RNA, 23 nt, Human
uucaaaucaaucuguaaaacuaa

SEQ ID NO: 3173667 - RNA, 22 nt, Human
uucaaaucaaucuguaaaacua

SEQ ID NO: 3173668 - RNA, 15 nt, Human
uucaacgcagcccug

SEQ ID NO: 3173669 - RNA, 17 nt, Human
uucaacugaccagccuc

SEQ ID NO: 3173670 - RNA, 20 nt, Human
uucaacgcagcccugcuuug

SEQ ID NO: 3173671 - RNA, 19 nt, Human
uucaacgcagcccugcuuu

SEQ ID NO: 3173672 - RNA, 16 nt, Human
uucaacgcagcccugc

SEQ ID NO: 3173673 - RNA, 13 nt, Human
uuauugucuguaa

SEQ ID NO: 3173674 - RNA, 14 nt, Human
uuauugucuguaaa

SEQ ID NO: 3173675 - RNA, 15 nt, Human
uuauugucuguaaau

SEQ ID NO: 3173676 - RNA, 18 nt, Human
uuauugucaaagugguga

SEQ ID NO: 3173677 - RNA, 17 nt, Human
uuauugucaaaguggug

SEQ ID NO: 3173678 - RNA, 21 nt, Human
uuauugcccaugauauaacuu

SEQ ID NO: 3173679 - RNA, 20 nt, Human
uuauugccaaaacccagcug

SEQ ID NO: 3173680 - RNA, 22 nt, Human
uuauugccaaaacccagcugca

SEQ ID NO: 3173681 - RNA, 19 nt, Human
uuauugccaggaaaggaga

SEQ ID NO: 3173682 - RNA, 21 nt, Human
uuauugccaaaacccagcugc

SEQ ID NO: 3173683 - RNA, 19 nt, Human
uuauuggugaguuaggaac

SEQ ID NO: 3173684 - RNA, 16 nt, Human
uucccugaaggaacca

SEQ ID NO: 3173685 - RNA, 12 nt, Human
uucccugaggug

SEQ ID NO: 3173686 - RNA, 17 nt, Human
uucccucgucuuuccca

SEQ ID NO: 3173687 - RNA, 19 nt, Human
uucccucggaguucuucuu

SEQ ID NO: 3173688 - RNA, 18 nt, Human
uucccucggaguucuucu

SEQ ID NO: 3173689 - RNA, 17 nt, Human
uucccuuccuccauccu

SEQ ID NO: 3173690 - RNA, 14 nt, Human
uucccuuccuccau

SEQ ID NO: 3173691 - RNA, 13 nt, Human
uucccuuccucca

SEQ ID NO: 3173692 - RNA, 20 nt, Human
uucccuuugacgccauccca

SEQ ID NO: 3173693 - RNA, 21 nt, Human
uucccuuugacgccaucccag

SEQ ID NO: 3173694 - RNA, 22 nt, Human
uucccuuugacgccaucccagc

SEQ ID NO: 3173695 - RNA, 18 nt, Human
uuccuauaccauuuccgu

SEQ ID NO: 3173696 - RNA, 18 nt, Human
uucccuuugccacacugu

SEQ ID NO: 3173697 - RNA, 17 nt, Human
uuccuaucaaaaagaua

SEQ ID NO: 3173698 - RNA, 18 nt, Human
uuccuaucaaaaagauau

SEQ ID NO: 3173699 - RNA, 15 nt, Human
uuccuaucauguuaa

SEQ ID NO: 3173700 - RNA, 13 nt, Human
uuccucauuagca

SEQ ID NO: 3173701 - RNA, 18 nt, Human
uuccuccauccuccuccu

SEQ ID NO: 3173702 - RNA, 14 nt, Human
uuccuccauccucc

SEQ ID NO: 3173703 - RNA, 24 nt, Human
uuccuccauccuccuccuuccuag

SEQ ID NO: 3173704 - RNA, 22 nt, Human
uuccuccauccuccuccuuccu

SEQ ID NO: 3173705 - RNA, 15 nt, Human
uuccuauuucagaag

SEQ ID NO: 3173706 - RNA, 13 nt, Human
uuccuauuucaga

SEQ ID NO: 3173707 - RNA, 23 nt, Human
uuccuauuucagaaguuuaaaua

SEQ ID NO: 3173708 - RNA, 16 nt, Human
uuccuauuucagaagu

SEQ ID NO: 3173709 - RNA, 21 nt, Human
uuccucaacaguguuuucaga

SEQ ID NO: 3173710 - RNA, 22 nt, Human
uuccucaacaguguuuucagaa

SEQ ID NO: 3173711 - RNA, 20 nt, Human
uuccuucuuugcccuuuacu

SEQ ID NO: 3173712 - RNA, 15 nt, Human
uuccuucuuugcccu

SEQ ID NO: 3173713 - RNA, 14 nt, Human
uuccuggcacugcu

SEQ ID NO: 3173714 - RNA, 18 nt, Human
uuccuggacaggccaggu

SEQ ID NO: 3173715 - RNA, 18 nt, Human
uuccugaugcuucuucag

SEQ ID NO: 3173716 - RNA, 19 nt, Human
uuccugaugcuucuucaga

SEQ ID NO: 3173717 - RNA, 15 nt, Human
uuccugaugcuucuu

SEQ ID NO: 3173718 - RNA, 17 nt, Human
uuccugccaggcauggu

SEQ ID NO: 3173719 - RNA, 18 nt, Human
uuccugcauuugugaaau

SEQ ID NO: 3173720 - RNA, 16 nt, Human
uuccugcauuugugaa

SEQ ID NO: 3173721 - RNA, 15 nt, Human
uuccugcauuuguga

SEQ ID NO: 3173722 - RNA, 17 nt, Human
uuccuuggacucauuuu

SEQ ID NO: 3173723 - RNA, 22 nt, Human
uuccuugaggggagccaggagg

SEQ ID NO: 3173724 - RNA, 20 nt, Human
uuccuugaggggagccagga

SEQ ID NO: 3173725 - RNA, 20 nt, Human
uuccuuggacucauuuuaaa

SEQ ID NO: 3173726 - RNA, 23 nt, Human
uuccuugaggggagccaggaggg

SEQ ID NO: 3173727 - RNA, 22 nt, Human
uucggccuccauccugaggcuc

SEQ ID NO: 3173728 - RNA, 20 nt, Human
uucgggaggucgaggcagga

SEQ ID NO: 3173729 - RNA, 13 nt, Human
uucuaaagcugcc

SEQ ID NO: 3173730 - RNA, 17 nt, Human
uucuaaagcugccagcc

SEQ ID NO: 3173731 - RNA, 17 nt, Human
uucuaaaagcuuucaug

SEQ ID NO: 3173732 - RNA, 20 nt, Human
uucuaaaacuguacuuugau

SEQ ID NO: 3173733 - RNA, 19 nt, Human
uucuaaaacuguacuuuga

SEQ ID NO: 3173734 - RNA, 18 nt, Human
uucuaaaacuguacuuug

SEQ ID NO: 3173735 - RNA, 17 nt, Human
uucguuuguuuguuuca

SEQ ID NO: 3173736 - RNA, 14 nt, Human
uucguucucugcca

SEQ ID NO: 3173737 - RNA, 14 nt, Human
uucuaaaaagucag

SEQ ID NO: 3173738 - RNA, 15 nt, Human
uucuaaaaagucaga

SEQ ID NO: 3173739 - RNA, 18 nt, Human
uucuaaaaagucagaugu

SEQ ID NO: 3173740 - RNA, 20 nt, Human
uucuaaaaagucagauguuu

SEQ ID NO: 3173741 - RNA, 16 nt, Human
uucuaaaacuguacuu

SEQ ID NO: 3173742 - RNA, 15 nt, Human
uucuaaaacuguacu

SEQ ID NO: 3173743 - RNA, 13 nt, Human
uucuaaaacugua

SEQ ID NO: 3173744 - RNA, 12 nt, Human
uucuaaaacugu

SEQ ID NO: 3173745 - RNA, 13 nt, Human
uucauuugcuauc

SEQ ID NO: 3173746 - RNA, 12 nt, Human
uucauuugcuuu

SEQ ID NO: 3173747 - RNA, 16 nt, Human
uucauuugcacaagua

SEQ ID NO: 3173748 - RNA, 16 nt, Human
uucauuuccugugucu

SEQ ID NO: 3173749 - RNA, 15 nt, Human
uucauuuccuguguc

SEQ ID NO: 3173750 - RNA, 14 nt, Human
uucaugcaaguauu

SEQ ID NO: 3173751 - RNA, 11 nt, Human
uucaggaagcu

SEQ ID NO: 3173752 - RNA, 19 nt, Human
uucaggaaagcagcaguuu

SEQ ID NO: 3173753 - RNA, 13 nt, Human
uucaggaagcuca

SEQ ID NO: 3173754 - RNA, 17 nt, Human
uucaucuugaauuguaa

SEQ ID NO: 3173755 - RNA, 21 nt, Human
uucaucuugaauuguaaggaa

SEQ ID NO: 3173756 - RNA, 22 nt, Human
uuccaaacaugagguucucucu

SEQ ID NO: 3173757 - RNA, 14 nt, Human
uuccaaaauauuau

SEQ ID NO: 3173758 - RNA, 16 nt, Human
uucauuugcuuuggaa

SEQ ID NO: 3173759 - RNA, 12 nt, Human
uuccaaagaaag

SEQ ID NO: 3173760 - RNA, 14 nt, Human
uuccaaagaaaguu

SEQ ID NO: 3173761 - RNA, 14 nt, Human
uuccaaacaugguu

SEQ ID NO: 3173762 - RNA, 20 nt, Human
uuccaaauaauauguuuccu

SEQ ID NO: 3173763 - RNA, 15 nt, Human
uuccaaauucugcuu

SEQ ID NO: 3173764 - RNA, 23 nt, Human
uuccaaauaauauguuuccuucc

SEQ ID NO: 3173765 - RNA, 13 nt, Human
uuccaaauuauuu

SEQ ID NO: 3173766 - RNA, 16 nt, Human
uuccaaauuauuucuu

SEQ ID NO: 3173767 - RNA, 18 nt, Human
uuccaaauuauuucuuaa

SEQ ID NO: 3173768 - RNA, 19 nt, Human
uuccaaauuauuucuuaau

SEQ ID NO: 3173769 - RNA, 23 nt, Human
uuccaaauuauuucuuaauuauu

SEQ ID NO: 3173770 - RNA, 13 nt, Human
uuccaaauucaug

SEQ ID NO: 3173771 - RNA, 21 nt, Human
uuccacuccuccuagccaccc

SEQ ID NO: 3173772 - RNA, 20 nt, Human
uuccagagacaaauauuucu

SEQ ID NO: 3173773 - RNA, 18 nt, Human
uuccacuccuccuagcca

SEQ ID NO: 3173774 - RNA, 16 nt, Human
uuccacuccuccuagc

SEQ ID NO: 3173775 - RNA, 21 nt, Human
uuccagagaguggcuccuccc

SEQ ID NO: 3173776 - RNA, 10 nt, Human
uuccagagca

SEQ ID NO: 3173777 - RNA, 20 nt, Human
uuccagagaguggcuccucc

SEQ ID NO: 3173778 - RNA, 19 nt, Human
uuccagagaguggcuccuc

SEQ ID NO: 3173779 - RNA, 18 nt, Human
uuccagagaguggcuccu

SEQ ID NO: 3173780 - RNA, 17 nt, Human
uuccagagaguggcucc

SEQ ID NO: 3173781 - RNA, 17 nt, Human
uuccccaggaggccagc

SEQ ID NO: 3173782 - RNA, 18 nt, Human
uuccccaggaggccagcc

SEQ ID NO: 3173783 - RNA, 19 nt, Human
uuccccaggaggccagccu

SEQ ID NO: 3173784 - RNA, 20 nt, Human
uuccccaggaggccagccuu

SEQ ID NO: 3173785 - RNA, 21 nt, Human
uuccccaggaggccagccuug

SEQ ID NO: 3173786 - RNA, 11 nt, Human
uuccccauggg

SEQ ID NO: 3173787 - RNA, 19 nt, Human
uuccccaugucucgacuca

SEQ ID NO: 3173788 - RNA, 20 nt, Human
uucccucccuuccucuuucc

SEQ ID NO: 3173789 - RNA, 17 nt, Human
uucccucccuuccucuu

SEQ ID NO: 3173790 - RNA, 11 nt, Human
uucccucccuu

SEQ ID NO: 3173791 - RNA, 16 nt, Human
uucccccauuuuuccc

SEQ ID NO: 3173792 - RNA, 22 nt, Human
uuccccauuauaucacacuuau

SEQ ID NO: 3173793 - RNA, 16 nt, Human
uucccauuugcuccuu

SEQ ID NO: 3173794 - RNA, 22 nt, Human
uucccauuuagaauggugauuu

SEQ ID NO: 3173795 - RNA, 15 nt, Human
uucccauuuagaaug

SEQ ID NO: 3173796 - RNA, 14 nt, Human
uucccauuuagaau

SEQ ID NO: 3173797 - RNA, 13 nt, Human
uucccauuuagaa

SEQ ID NO: 3173798 - RNA, 15 nt, Human
uuccccaggaggcca

SEQ ID NO: 3173799 - RNA, 16 nt, Human
uuccccaggaggccag

SEQ ID NO: 3173800 - RNA, 13 nt, Human
uucccaucuccuu

SEQ ID NO: 3173801 - RNA, 21 nt, Human
uucccaucuccuuucucuggu

SEQ ID NO: 3173802 - RNA, 11 nt, Human
uucccauucca

SEQ ID NO: 3173803 - RNA, 14 nt, Human
uucccauucuugca

SEQ ID NO: 3173804 - RNA, 20 nt, Human
uuccagcaauucuccugccu

SEQ ID NO: 3173805 - RNA, 21 nt, Human
uuccagcaauucuccugccuc

SEQ ID NO: 3173806 - RNA, 22 nt, Human
uuccagcaauucuccugccuca

SEQ ID NO: 3173807 - RNA, 21 nt, Human
uuccagaugcugguuuuuccc

SEQ ID NO: 3173808 - RNA, 16 nt, Human
uguuuagaagaagugu

SEQ ID NO: 3173809 - RNA, 19 nt, Human
uguuuagaagaaguguguc

SEQ ID NO: 3173810 - RNA, 12 nt, Human
uguuuagaauug

SEQ ID NO: 3173811 - RNA, 14 nt, Human
uguuuagaauugaa

SEQ ID NO: 3173812 - RNA, 15 nt, Human
uguuuagaauugaag

SEQ ID NO: 3173813 - RNA, 17 nt, Human
uguuuagaauugaaggu

SEQ ID NO: 3173814 - RNA, 23 nt, Human
uguuuagaauugaagguuuuuga

SEQ ID NO: 3173815 - RNA, 22 nt, Human
uguuucaaguucacaccugcag

SEQ ID NO: 3173816 - RNA, 21 nt, Human
uguuucagaggcucagauugu

SEQ ID NO: 3173817 - RNA, 12 nt, Human
uguuucauccuu

SEQ ID NO: 3173818 - RNA, 20 nt, Human
uguuuuaagaggcagggucu

SEQ ID NO: 3173819 - RNA, 17 nt, Human
uguuugugcaguaacuu

SEQ ID NO: 3173820 - RNA, 15 nt, Human
uguuugucucuucug

SEQ ID NO: 3173821 - RNA, 14 nt, Human
uguuugucucuucu

SEQ ID NO: 3173822 - RNA, 18 nt, Human
uguuugguuauagugcaa

SEQ ID NO: 3173823 - RNA, 24 nt, Human
uguuugguuuuuuguucuugcgau

SEQ ID NO: 3173824 - RNA, 22 nt, Human
uguuugguuuuaaaauacugua

SEQ ID NO: 3173825 - RNA, 21 nt, Human
uguuugguuuuaaaauacugu

SEQ ID NO: 3173826 - RNA, 16 nt, Human
uguuugguuuuaaaau

SEQ ID NO: 3173827 - RNA, 14 nt, Human
uguuugguuauagu

SEQ ID NO: 3173828 - RNA, 15 nt, Human
uguuuguauguauaa

SEQ ID NO: 3173829 - RNA, 17 nt, Human
uguuuguacaagauugu

SEQ ID NO: 3173830 - RNA, 20 nt, Human
uguuuguacaagauugucau

SEQ ID NO: 3173831 - RNA, 18 nt, Human
uguuuguacaagauuguc

SEQ ID NO: 3173832 - RNA, 16 nt, Human
uguuuguaacaagaaa

SEQ ID NO: 3173833 - RNA, 16 nt, Human
uguuuguaaaaaugua

SEQ ID NO: 3173834 - RNA, 23 nt, Human
uguuuccuggcacugcuuccagu

SEQ ID NO: 3173835 - RNA, 23 nt, Human
uguuuccuugaggggagccagga

SEQ ID NO: 3173836 - RNA, 13 nt, Human
uguuuccuucccu

SEQ ID NO: 3173837 - RNA, 18 nt, Human
uguuucauccuucccacu

SEQ ID NO: 3173838 - RNA, 14 nt, Human
uguuucaucuaagu

SEQ ID NO: 3173839 - RNA, 15 nt, Human
uguuucauccuuccc

SEQ ID NO: 3173840 - RNA, 16 nt, Human
uguuucauuaacugug

SEQ ID NO: 3173841 - RNA, 19 nt, Human
uguuuggggaugagaaagg

SEQ ID NO: 3173842 - RNA, 18 nt, Human
uguuucuaauuugcugcu

SEQ ID NO: 3173843 - RNA, 20 nt, Human
uguuucuaccggagagagaa

SEQ ID NO: 3173844 - RNA, 16 nt, Human
uguuucuagaguuccu

SEQ ID NO: 3173845 - RNA, 22 nt, Human
uguuucuaagguaacaagauga

SEQ ID NO: 3173846 - RNA, 21 nt, Human
uuaaaagaugcaauguagagg

SEQ ID NO: 3173847 - RNA, 18 nt, Human
uuaaaagaugaaaauauu

SEQ ID NO: 3173848 - RNA, 15 nt, Human
uuaaaagaugaaaau

SEQ ID NO: 3173849 - RNA, 19 nt, Human
uuaaaauacacacucaaau

SEQ ID NO: 3173850 - RNA, 21 nt, Human
uuaaaagccuuggccucagag

SEQ ID NO: 3173851 - RNA, 16 nt, Human
uuaaaagcuaucuuca

SEQ ID NO: 3173852 - RNA, 19 nt, Human
uuaaaagcuaucuucaugu

SEQ ID NO: 3173853 - RNA, 21 nt, Human
uuaaaagcuaucuucauguaa

SEQ ID NO: 3173854 - RNA, 23 nt, Human
uuaaaagcuaucuucauguaaau

SEQ ID NO: 3173855 - RNA, 15 nt, Human
uuaaaaguaaaagag

SEQ ID NO: 3173856 - RNA, 15 nt, Human
uuaaaaguaaaaugu

SEQ ID NO: 3173857 - RNA, 17 nt, Human
uuaaaaguaaaaugucu

SEQ ID NO: 3173858 - RNA, 18 nt, Human
uuaaaaguaaaaugucuu

SEQ ID NO: 3173859 - RNA, 13 nt, Human
uuaaagaagacau

SEQ ID NO: 3173860 - RNA, 20 nt, Human
uuaaagaaauauguauucug

SEQ ID NO: 3173861 - RNA, 14 nt, Human
uuaaagaaaggaaa

SEQ ID NO: 3173862 - RNA, 16 nt, Human
uuaaagaaaggaaaag

SEQ ID NO: 3173863 - RNA, 17 nt, Human
uuaaagaaaggaaaaga

SEQ ID NO: 3173864 - RNA, 20 nt, Human
uuaaacugucgugucauacu

SEQ ID NO: 3173865 - RNA, 20 nt, Human
uuaaacucugaauuuaucuu

SEQ ID NO: 3173866 - RNA, 13 nt, Human
uuaaacucugaau

SEQ ID NO: 3173867 - RNA, 22 nt, Human
uuaaacucugaauuuaucuuug

SEQ ID NO: 3173868 - RNA, 11 nt, Human
uuaaaauacug

SEQ ID NO: 3173869 - RNA, 17 nt, Human
uuaaaauacuguagaua

SEQ ID NO: 3173870 - RNA, 16 nt, Human
uuaaaauacuguagau

SEQ ID NO: 3173871 - RNA, 13 nt, Human
uuaaaauacugua

SEQ ID NO: 3173872 - RNA, 12 nt, Human
uuaaaauacugu

SEQ ID NO: 3173873 - RNA, 20 nt, Human
uuaaaauacuguagauaauu

SEQ ID NO: 3173874 - RNA, 18 nt, Human
uuaaaauacuguagauaa

SEQ ID NO: 3173875 - RNA, 20 nt, Human
uuaaaagaaaggguucugua

SEQ ID NO: 3173876 - RNA, 21 nt, Human
uuaaaagaaaggguucuguaa

SEQ ID NO: 3173877 - RNA, 22 nt, Human
uuaaaagaaaggguucuguaaa

SEQ ID NO: 3173878 - RNA, 23 nt, Human
uuaaaagaaaggguucuguaaaa

SEQ ID NO: 3173879 - RNA, 23 nt, Human
uuaaaagaaaauaaaaaaaagaa

SEQ ID NO: 3173880 - RNA, 22 nt, Human
uuaaaagaaaauaaaaaaaaga

SEQ ID NO: 3173881 - RNA, 19 nt, Human
uguuuuuuuuuuccacuua

SEQ ID NO: 3173882 - RNA, 18 nt, Human
uguuuuuuuuuuccacuu

SEQ ID NO: 3173883 - RNA, 22 nt, Human
uuaaaagaauauuuuaacuucc

SEQ ID NO: 3173884 - RNA, 21 nt, Human
uuaaaagaauauuuuaacuuc

SEQ ID NO: 3173885 - RNA, 22 nt, Human
uguuuuaagaggcagggucuca

SEQ ID NO: 3173886 - RNA, 19 nt, Human
uguuuugugguuuggaaua

SEQ ID NO: 3173887 - RNA, 17 nt, Human
uguuuugugaauuuucu

SEQ ID NO: 3173888 - RNA, 23 nt, Human
uguuugugcaguaacuugggagu

SEQ ID NO: 3173889 - RNA, 16 nt, Human
uguuuuguacagaugu

SEQ ID NO: 3173890 - RNA, 15 nt, Human
uguuuuguacagaug

SEQ ID NO: 3173891 - RNA, 17 nt, Human
uguuuuguuuggagaca

SEQ ID NO: 3173892 - RNA, 20 nt, Human
uguuuuguugcacugaaguu

SEQ ID NO: 3173893 - RNA, 18 nt, Human
uguuuuguugcacugaag

SEQ ID NO: 3173894 - RNA, 14 nt, Human
uguuuuguugcacu

SEQ ID NO: 3173895 - RNA, 22 nt, Human
uguuuuguugcacugaaguuug

SEQ ID NO: 3173896 - RNA, 18 nt, Human
uguuuuuuguuuuucugc

SEQ ID NO: 3173897 - RNA, 21 nt, Human
uguuuuuuuaggguuucugau

SEQ ID NO: 3173898 - RNA, 12 nt, Human
uuaacucagucu

SEQ ID NO: 3173899 - RNA, 15 nt, Human
uuaacuccacugcuu

SEQ ID NO: 3173900 - RNA, 20 nt, Human
uuaacuccacugcuuaccua

SEQ ID NO: 3173901 - RNA, 22 nt, Human
uuaacuguccguaagcaguaua

SEQ ID NO: 3173902 - RNA, 17 nt, Human
uuaacugcucaguguuu

SEQ ID NO: 3173903 - RNA, 24 nt, Human
uuaacugcuuccuauaauuuugau

SEQ ID NO: 3173904 - RNA, 15 nt, Human
uuaacugcuuccuau

SEQ ID NO: 3173905 - RNA, 22 nt, Human
uuaagcagaauuggaaaagacu

SEQ ID NO: 3173906 - RNA, 18 nt, Human
uuaagcagaauuggaaaa

SEQ ID NO: 3173907 - RNA, 17 nt, Human
uuaagcagaauuggaaa

SEQ ID NO: 3173908 - RNA, 18 nt, Human
uuaacuuaguuuugcaua

SEQ ID NO: 3173909 - RNA, 17 nt, Human
uuaacuuaauaaucaag

SEQ ID NO: 3173910 - RNA, 17 nt, Human
uuaacuuaguuuugcau

SEQ ID NO: 3173911 - RNA, 14 nt, Human
uuaacuuaguuuug

SEQ ID NO: 3173912 - RNA, 14 nt, Human
uuaacuuaauaauc

SEQ ID NO: 3173913 - RNA, 16 nt, Human
uuaacuuaauaaucaa

SEQ ID NO: 3173914 - RNA, 18 nt, Human
uuaaauuacauuuguaau

SEQ ID NO: 3173915 - RNA, 17 nt, Human
uuaaauuacauuuguaa

SEQ ID NO: 3173916 - RNA, 14 nt, Human
uuaaauuagaaaau

SEQ ID NO: 3173917 - RNA, 15 nt, Human
uuaaauuagaaaaua

SEQ ID NO: 3173918 - RNA, 17 nt, Human
uuaaauuagaaaauauu

SEQ ID NO: 3173919 - RNA, 17 nt, Human
uuaaauuaguuugugaa

SEQ ID NO: 3173920 - RNA, 16 nt, Human
uuaaauuacauuugua

SEQ ID NO: 3173921 - RNA, 11 nt, Human
uuaaauuaaua

SEQ ID NO: 3173922 - RNA, 16 nt, Human
uuaaauuaauaucuuu

SEQ ID NO: 3173923 - RNA, 22 nt, Human
uuaaauuaauaucuuucugcac

SEQ ID NO: 3173924 - RNA, 23 nt, Human
uuaaauguuuuguaaacuuugaa

SEQ ID NO: 3173925 - RNA, 21 nt, Human
uuaaauguuuuguaaacuuug

SEQ ID NO: 3173926 - RNA, 11 nt, Human
uuaaauguuuu

SEQ ID NO: 3173927 - RNA, 14 nt, Human
uuaaauguuuugua

SEQ ID NO: 3173928 - RNA, 12 nt, Human
uuaaauguuuug

SEQ ID NO: 3173929 - RNA, 20 nt, Human
uuaaauguuuuguaaacuuu

SEQ ID NO: 3173930 - RNA, 19 nt, Human
uuaaauguuuuguaaacuu

SEQ ID NO: 3173931 - RNA, 18 nt, Human
uuaaauguuuuguaaacu

SEQ ID NO: 3173932 - RNA, 15 nt, Human
uuaaauguuuuguaa

SEQ ID NO: 3173933 - RNA, 17 nt, Human
uuaacuaaauuuuaaag

SEQ ID NO: 3173934 - RNA, 18 nt, Human
uuaacuaaauuuuaaagc

SEQ ID NO: 3173935 - RNA, 20 nt, Human
uuaacuaaauuuuaaagcca

SEQ ID NO: 3173936 - RNA, 15 nt, Human
uuaaccucugcuuuu

SEQ ID NO: 3173937 - RNA, 17 nt, Human
uuaaccacuucagcuga

SEQ ID NO: 3173938 - RNA, 18 nt, Human
uuaaccccauaauuagau

SEQ ID NO: 3173939 - RNA, 19 nt, Human
uuaaugauauacugaucuu

SEQ ID NO: 3173940 - RNA, 21 nt, Human
uuaaugauaugcuuguaacua

SEQ ID NO: 3173941 - RNA, 22 nt, Human
uuaauauugauaugcuuauaca

SEQ ID NO: 3173942 - RNA, 18 nt, Human
uuaauauugauaugcuua

SEQ ID NO: 3173943 - RNA, 15 nt, Human
uuaauaucacucauu

SEQ ID NO: 3173944 - RNA, 16 nt, Human
uuaauaucacucauua

SEQ ID NO: 3173945 - RNA, 17 nt, Human
uuaauaucacucauuaa

SEQ ID NO: 3173946 - RNA, 18 nt, Human
uuaauaucacucauuaau

SEQ ID NO: 3173947 - RNA, 20 nt, Human
uuaauaucacucauuaauua

SEQ ID NO: 3173948 - RNA, 13 nt, Human
uuaauauauuaaa

SEQ ID NO: 3173949 - RNA, 16 nt, Human
uuaauauauuaaaauu

SEQ ID NO: 3173950 - RNA, 18 nt, Human
uuaauauauuaaaauucc

SEQ ID NO: 3173951 - RNA, 20 nt, Human
uuaauauauuaaaauuccaa

SEQ ID NO: 3173952 - RNA, 15 nt, Human
uuaagccuuuggaaa

SEQ ID NO: 3173953 - RNA, 16 nt, Human
uuaagccuuuggaaac

SEQ ID NO: 3173954 - RNA, 17 nt, Human
uuaagcuguuacugucu

SEQ ID NO: 3173955 - RNA, 17 nt, Human
uuaagccuuuguugaac

SEQ ID NO: 3173956 - RNA, 19 nt, Human
uuaagcuaggaaaagaaau

SEQ ID NO: 3173957 - RNA, 18 nt, Human
uuaagccuuuguugaacu

SEQ ID NO: 3173958 - RNA, 22 nt, Human
uuaagcuaggaaaagaaaucua

SEQ ID NO: 3173959 - RNA, 11 nt, Human
uuaagcugcag

SEQ ID NO: 3173960 - RNA, 14 nt, Human
uuaauguauauaaa

SEQ ID NO: 3173961 - RNA, 17 nt, Human
uuaauguauauaaaaau

SEQ ID NO: 3173962 - RNA, 21 nt, Human
uuaauguauauaaaaauggcu

SEQ ID NO: 3173963 - RNA, 20 nt, Human
uuacaagcgugagccacugc

SEQ ID NO: 3173964 - RNA, 15 nt, Human
uuaauguugauuucu

SEQ ID NO: 3173965 - RNA, 14 nt, Human
uuaauguugauuuc

SEQ ID NO: 3173966 - RNA, 23 nt, Human
uuaauguugaacaaaauaaauug

SEQ ID NO: 3173967 - RNA, 17 nt, Human
uuaauguugaacaaaau

SEQ ID NO: 3173968 - RNA, 21 nt, Human
uuaauguugauuucuaguuau

SEQ ID NO: 3173969 - RNA, 17 nt, Human
uuaauguugauuucuag

SEQ ID NO: 3173970 - RNA, 21 nt, Human
uuacaagcgugagccacugca

SEQ ID NO: 3173971 - RNA, 11 nt, Human
uuacuguguua

SEQ ID NO: 3173972 - RNA, 21 nt, Human
uuacuuaaaccgccaaggcug

SEQ ID NO: 3173973 - RNA, 23 nt, Human
uuacuguucauuugauuuguaca

SEQ ID NO: 3173974 - RNA, 23 nt, Human
uuacuucuuauacauuugauaaa

SEQ ID NO: 3173975 - RNA, 12 nt, Human
uuacuucugcua

SEQ ID NO: 3173976 - RNA, 11 nt, Human
uuacuucugcu

SEQ ID NO: 3173977 - RNA, 18 nt, Human
uuacuuagguguggggga

SEQ ID NO: 3173978 - RNA, 21 nt, Human
uuacuaggugcccagaaugag

SEQ ID NO: 3173979 - RNA, 17 nt, Human
uuacuaguuucccuugc

SEQ ID NO: 3173980 - RNA, 19 nt, Human
uuacuaucaugucaaacgu

SEQ ID NO: 3173981 - RNA, 15 nt, Human
uuacuauagcaaagu

SEQ ID NO: 3173982 - RNA, 17 nt, Human
uuacuauagcaaaguag

SEQ ID NO: 3173983 - RNA, 18 nt, Human
uuacuauagcaaaguagu

SEQ ID NO: 3173984 - RNA, 22 nt, Human
uuacuauagcaaaguaguacuu

SEQ ID NO: 3173985 - RNA, 21 nt, Human
uuacuaucaugucaaacguga

SEQ ID NO: 3173986 - RNA, 17 nt, Human
uuacuaccuccucuccu

SEQ ID NO: 3173987 - RNA, 19 nt, Human
uuacuacaauauguacauu

SEQ ID NO: 3173988 - RNA, 18 nt, Human
uuacuacagccuuaauau

SEQ ID NO: 3173989 - RNA, 17 nt, Human
uuacuacaauauguaca

SEQ ID NO: 3173990 - RNA, 21 nt, Human
uuacuaacuucuaaaacugua

SEQ ID NO: 3173991 - RNA, 20 nt, Human
uuacuaacuucuaaaacugu

SEQ ID NO: 3173992 - RNA, 19 nt, Human
uuacuaacuucuaaaacug

SEQ ID NO: 3173993 - RNA, 17 nt, Human
uuacuaacuucuaaaac

SEQ ID NO: 3173994 - RNA, 15 nt, Human
uuacuaacuucuaaa

SEQ ID NO: 3173995 - RNA, 11 nt, Human
uuacuaacuuc

SEQ ID NO: 3173996 - RNA, 17 nt, Human
uuagacauguaauuugu

SEQ ID NO: 3173997 - RNA, 19 nt, Human
uuagaccagaggucuagau

SEQ ID NO: 3173998 - RNA, 16 nt, Human
uuagacagucccugcc

SEQ ID NO: 3173999 - RNA, 17 nt, Human
uuagacagucccugcca

SEQ ID NO: 3174000 - RNA, 18 nt, Human
uuagacagucccugccaa

SEQ ID NO: 3174001 - RNA, 14 nt, Human
uuagacagucccug

SEQ ID NO: 3174002 - RNA, 22 nt, Human
uuagaaaaggugauaaaaucau

SEQ ID NO: 3174003 - RNA, 13 nt, Human
uuagaaaagugaa

SEQ ID NO: 3174004 - RNA, 13 nt, Human
uuagagaacuaaa

SEQ ID NO: 3174005 - RNA, 22 nt, Human
uuagacuuuuccaauaugugau

SEQ ID NO: 3174006 - RNA, 21 nt, Human
uuagacuuuuccaauauguga

SEQ ID NO: 3174007 - RNA, 24 nt, Human
uuagagacagagcgacagagcagu

SEQ ID NO: 3174008 - RNA, 12 nt, Human
uuagacuugaaa

SEQ ID NO: 3174009 - RNA, 13 nt, Human
uuagacuugaaaa

SEQ ID NO: 3174010 - RNA, 19 nt, Human
uuagacuugaaaagagaca

SEQ ID NO: 3174011 - RNA, 20 nt, Human
uuagacuugaaaagagacag

SEQ ID NO: 3174012 - RNA, 14 nt, Human
uuagacuucuguuu

SEQ ID NO: 3174013 - RNA, 19 nt, Human
uuagacuucuguuuucaau

SEQ ID NO: 3174014 - RNA, 18 nt, Human
uuagacuucuguuuucaa

SEQ ID NO: 3174015 - RNA, 17 nt, Human
uuagacuucuguuuuca

SEQ ID NO: 3174016 - RNA, 15 nt, Human
uuagacuucuguuuu

SEQ ID NO: 3174017 - RNA, 14 nt, Human
uuagacugccagcu

SEQ ID NO: 3174018 - RNA, 17 nt, Human
uuagacugccagcucuu

SEQ ID NO: 3174019 - RNA, 16 nt, Human
uuagacugccagcucu

SEQ ID NO: 3174020 - RNA, 13 nt, Human
uuagacugccagc

SEQ ID NO: 3174021 - RNA, 15 nt, Human
uuagacagucccugc

SEQ ID NO: 3174022 - RNA, 20 nt, Human
uuacuuuuccuugcauacaa

SEQ ID NO: 3174023 - RNA, 13 nt, Human
uuagaaaacuuug

SEQ ID NO: 3174024 - RNA, 12 nt, Human
uuagaaaaggca

SEQ ID NO: 3174025 - RNA, 23 nt, Human
uuagaaaagggaguuuaaaaaug

SEQ ID NO: 3174026 - RNA, 21 nt, Human
uuagaaaaggugauaaaauca

SEQ ID NO: 3174027 - RNA, 20 nt, Human
uuagaaaaggugauaaaauc

SEQ ID NO: 3174028 - RNA, 16 nt, Human
uuagaaaacuuuguua

SEQ ID NO: 3174029 - RNA, 15 nt, Human
uuagaaaacuuuguu

SEQ ID NO: 3174030 - RNA, 14 nt, Human
uuagaaaacuuugu

SEQ ID NO: 3174031 - RNA, 14 nt, Human
uuacuuuguguuca

SEQ ID NO: 3174032 - RNA, 18 nt, Human
uuacuuuuccucuuagaa

SEQ ID NO: 3174033 - RNA, 19 nt, Human
uuacuuuuccuugcauaca

SEQ ID NO: 3174034 - RNA, 23 nt, Human
uuacuuuguaaauucugauuucu

SEQ ID NO: 3174035 - RNA, 18 nt, Human
uuacuuuaaaaggagcca

SEQ ID NO: 3174036 - RNA, 17 nt, Human
uuacuuuaaaaggagcc

SEQ ID NO: 3174037 - RNA, 18 nt, Human
uuacuugaauaguauugu

SEQ ID NO: 3174038 - RNA, 17 nt, Human
uuacuugauaagggacu

SEQ ID NO: 3174039 - RNA, 15 nt, Human
uuacuugauaaggga

SEQ ID NO: 3174040 - RNA, 17 nt, Human
uuacuuggaaauauuaa

SEQ ID NO: 3174041 - RNA, 18 nt, Human
uuacuuggaaauauuaaa

SEQ ID NO: 3174042 - RNA, 21 nt, Human
uuacuuggaaauauuaaaaga

SEQ ID NO: 3174043 - RNA, 21 nt, Human
uuacuugucuuucugggguuu

SEQ ID NO: 3174044 - RNA, 17 nt, Human
uuacuuguugccuauaa

SEQ ID NO: 3174045 - RNA, 23 nt, Human
uuacuuguugccuauaagccaaa

SEQ ID NO: 3174046 - RNA, 15 nt, Human
uuacuuuaacaugcc

SEQ ID NO: 3174047 - RNA, 22 nt, Human
uuacuuuaacuuaguuuugcau

SEQ ID NO: 3174048 - RNA, 14 nt, Human
uuacuuuccucuga

SEQ ID NO: 3174049 - RNA, 13 nt, Human
uuacuuuagaaaa

SEQ ID NO: 3174050 - RNA, 19 nt, Human
uuacuuuccaauucuccuu

SEQ ID NO: 3174051 - RNA, 11 nt, Human
uuacuuuguaa

SEQ ID NO: 3174052 - RNA, 13 nt, Human
uuacuuuguaaau

SEQ ID NO: 3174053 - RNA, 14 nt, Human
uuacuuuguaaauu

SEQ ID NO: 3174054 - RNA, 17 nt, Human
uuacuuuguaaauucug

SEQ ID NO: 3174055 - RNA, 18 nt, Human
uuacuuuguaaauucuga

SEQ ID NO: 3174056 - RNA, 19 nt, Human
uuacuuuguaaauucugau

SEQ ID NO: 3174057 - RNA, 20 nt, Human
uuacuuuguaaauucugauu

SEQ ID NO: 3174058 - RNA, 22 nt, Human
uuacuuuguaaauucugauuuc

SEQ ID NO: 3174059 - RNA, 14 nt, Human
uuaguguuauauga

SEQ ID NO: 3174060 - RNA, 15 nt, Human
uuaguguuauaugaa

SEQ ID NO: 3174061 - RNA, 13 nt, Human
uuaguauuaucuu

SEQ ID NO: 3174062 - RNA, 20 nt, Human
uuagucucaguucucuuaau

SEQ ID NO: 3174063 - RNA, 12 nt, Human
uuagugugauug

SEQ ID NO: 3174064 - RNA, 18 nt, Human
uuagugugguuuucuguu

SEQ ID NO: 3174065 - RNA, 19 nt, Human
uuagugugguuuucuguuu

SEQ ID NO: 3174066 - RNA, 22 nt, Human
uuaguuacuaccuccucuccug

SEQ ID NO: 3174067 - RNA, 16 nt, Human
uuaguuccacugagac

SEQ ID NO: 3174068 - RNA, 15 nt, Human
uuaguuccacugaga

SEQ ID NO: 3174069 - RNA, 22 nt, Human
uuaguaggauaugccugcucuu

SEQ ID NO: 3174070 - RNA, 18 nt, Human
uuaggauguugaaaaagu

SEQ ID NO: 3174071 - RNA, 15 nt, Human
uuaggaguuuugaga

SEQ ID NO: 3174072 - RNA, 12 nt, Human
uuaggacaaauc

SEQ ID NO: 3174073 - RNA, 17 nt, Human
uuaguagagacaggguu

SEQ ID NO: 3174074 - RNA, 19 nt, Human
uuaguaggauaugccugcu

SEQ ID NO: 3174075 - RNA, 16 nt, Human
uuaguaggauaugccu

SEQ ID NO: 3174076 - RNA, 18 nt, Human
uuaggcaguauaaagaau

SEQ ID NO: 3174077 - RNA, 19 nt, Human
uuaggccaaagacaaauag

SEQ ID NO: 3174078 - RNA, 18 nt, Human
uuaggccaaagacaaaua

SEQ ID NO: 3174079 - RNA, 15 nt, Human
uuaggccaaagacaa

SEQ ID NO: 3174080 - RNA, 18 nt, Human
uuaggcaugguuuugggc

SEQ ID NO: 3174081 - RNA, 20 nt, Human
uuaggcaguauaaagaauag

SEQ ID NO: 3174082 - RNA, 17 nt, Human
uuagcuguaacaguucu

SEQ ID NO: 3174083 - RNA, 18 nt, Human
uuagcuguguuauuauag

SEQ ID NO: 3174084 - RNA, 14 nt, Human
uuagcuguguuauu

SEQ ID NO: 3174085 - RNA, 20 nt, Human
uuagcuuucugagcaagagg

SEQ ID NO: 3174086 - RNA, 13 nt, Human
uuagcuguaacag

SEQ ID NO: 3174087 - RNA, 12 nt, Human
uuagcugggaga

SEQ ID NO: 3174088 - RNA, 18 nt, Human
uuagcugccugaaaauca

SEQ ID NO: 3174089 - RNA, 18 nt, Human
uuagcuacguuuacucac

SEQ ID NO: 3174090 - RNA, 14 nt, Human
uuagcggagacgga

SEQ ID NO: 3174091 - RNA, 16 nt, Human
uuagaucauaguuuua

SEQ ID NO: 3174092 - RNA, 17 nt, Human
uuagaucauaguuuuau

SEQ ID NO: 3174093 - RNA, 14 nt, Human
uuagauccauuaau

SEQ ID NO: 3174094 - RNA, 15 nt, Human
uuagauccauuaauu

SEQ ID NO: 3174095 - RNA, 20 nt, Human
uuagauccauuaauuuaaau

SEQ ID NO: 3174096 - RNA, 23 nt, Human
uuagauccauuaauuuaaaugau

SEQ ID NO: 3174097 - RNA, 15 nt, Human
uuagaucauaguuuu

SEQ ID NO: 3174098 - RNA, 15 nt, Human
uuagauaaauauuga

SEQ ID NO: 3174099 - RNA, 20 nt, Human
uuagagcaacuuucuggggc

SEQ ID NO: 3174100 - RNA, 22 nt, Human
uuagagcuuuuuuuuuuuaauu

SEQ ID NO: 3174101 - RNA, 22 nt, Human
uuagagucaacuacacaaagca

SEQ ID NO: 3174102 - RNA, 23 nt, Human
uaugagcuggggaugucucucau

SEQ ID NO: 3174103 - RNA, 14 nt, Human
uaugagauacuuug

SEQ ID NO: 3174104 - RNA, 16 nt, Human
uaugagauacuuugca

SEQ ID NO: 3174105 - RNA, 16 nt, Human
uaugacuccagaauuu

SEQ ID NO: 3174106 - RNA, 17 nt, Human
uaugacuccagaauuuc

SEQ ID NO: 3174107 - RNA, 23 nt, Human
uaugacuccagaauuucccaaag

SEQ ID NO: 3174108 - RNA, 12 nt, Human
uaugcaaagcac

SEQ ID NO: 3174109 - RNA, 14 nt, Human
uaugcaaagcacug

SEQ ID NO: 3174110 - RNA, 13 nt, Human
uaugcaaagcacu

SEQ ID NO: 3174111 - RNA, 17 nt, Human
uaugauuuaauuugaaa

SEQ ID NO: 3174112 - RNA, 18 nt, Human
uaugauuuaauuugaaau

SEQ ID NO: 3174113 - RNA, 17 nt, Human
uaugauuuggaaaauaa

SEQ ID NO: 3174114 - RNA, 15 nt, Human
uaugauuuggaaaau

SEQ ID NO: 3174115 - RNA, 18 nt, Human
uaugauuuggaaaauaaa

SEQ ID NO: 3174116 - RNA, 15 nt, Human
uaugcaaagcacuga

SEQ ID NO: 3174117 - RNA, 18 nt, Human
uaugcaaucaaaucugcu

SEQ ID NO: 3174118 - RNA, 13 nt, Human
uaugcaagcaguu

SEQ ID NO: 3174119 - RNA, 23 nt, Human
uaugcaagcaguuucaauaaagu

SEQ ID NO: 3174120 - RNA, 18 nt, Human
uaugcaagcaguuucaau

SEQ ID NO: 3174121 - RNA, 17 nt, Human
uaugcaagcaguuucaa

SEQ ID NO: 3174122 - RNA, 16 nt, Human
uaugcaagcaguuuca

SEQ ID NO: 3174123 - RNA, 20 nt, Human
uaugcacaauuccaugacaa

SEQ ID NO: 3174124 - RNA, 15 nt, Human
uaugcacaauuccau

SEQ ID NO: 3174125 - RNA, 17 nt, Human
uaugcuucauacaggga

SEQ ID NO: 3174126 - RNA, 23 nt, Human
uaugcuuccagaaacacccacag

SEQ ID NO: 3174127 - RNA, 17 nt, Human
uaugcuuccagaaacac

SEQ ID NO: 3174128 - RNA, 14 nt, Human
uaugcuuccagaaa

SEQ ID NO: 3174129 - RNA, 19 nt, Human
uaugcuugcauauauuuca

SEQ ID NO: 3174130 - RNA, 20 nt, Human
uaugcuuguaacuaaaauaa

SEQ ID NO: 3174131 - RNA, 18 nt, Human
uaugcuuguaacuaaaau

SEQ ID NO: 3174132 - RNA, 14 nt, Human
uauggaaaaauaaa

SEQ ID NO: 3174133 - RNA, 15 nt, Human
uauggaaaaauaaaa

SEQ ID NO: 3174134 - RNA, 20 nt, Human
uauggaaaaauaaaacuguc

SEQ ID NO: 3174135 - RNA, 14 nt, Human
uaugcuuuucucaa

SEQ ID NO: 3174136 - RNA, 13 nt, Human
uauggaacacucu

SEQ ID NO: 3174137 - RNA, 16 nt, Human
uauggaacacucugag

SEQ ID NO: 3174138 - RNA, 17 nt, Human
uauggaacacucugaga

SEQ ID NO: 3174139 - RNA, 18 nt, Human
uauggaacacucugagac

SEQ ID NO: 3174140 - RNA, 19 nt, Human
uauggaacacucugagacu

SEQ ID NO: 3174141 - RNA, 16 nt, Human
uauggaaaugcaaacu

SEQ ID NO: 3174142 - RNA, 19 nt, Human
uauggaagguggagcguuc

SEQ ID NO: 3174143 - RNA, 16 nt, Human
uauggaagguggagcg

SEQ ID NO: 3174144 - RNA, 13 nt, Human
uauggaagaaagu

SEQ ID NO: 3174145 - RNA, 14 nt, Human
uauggaagaaagua

SEQ ID NO: 3174146 - RNA, 17 nt, Human
uauggacaaugacccag

SEQ ID NO: 3174147 - RNA, 22 nt, Human
uauggacacuggugccauguca

SEQ ID NO: 3174148 - RNA, 20 nt, Human
uaugcauauauauaugugug

SEQ ID NO: 3174149 - RNA, 19 nt, Human
uaugcauauauauaugugu

SEQ ID NO: 3174150 - RNA, 17 nt, Human
uaugcauauauauaugu

SEQ ID NO: 3174151 - RNA, 24 nt, Human
uaugcauaauaauccugcaaagua

SEQ ID NO: 3174152 - RNA, 14 nt, Human
uaugcagugcugcu

SEQ ID NO: 3174153 - RNA, 15 nt, Human
uaugcagugcugcuu

SEQ ID NO: 3174154 - RNA, 18 nt, Human
uaugcaguguagauuuua

SEQ ID NO: 3174155 - RNA, 18 nt, Human
uaugcagagguccacaac

SEQ ID NO: 3174156 - RNA, 19 nt, Human
uaugcagaauggcauuugc

SEQ ID NO: 3174157 - RNA, 16 nt, Human
uaugcagaauggcauu

SEQ ID NO: 3174158 - RNA, 18 nt, Human
uaugcacuaagucucuuu

SEQ ID NO: 3174159 - RNA, 17 nt, Human
uaugcacuaagucucuu

SEQ ID NO: 3174160 - RNA, 16 nt, Human
uaugcacuaagucucu

SEQ ID NO: 3174161 - RNA, 18 nt, Human
uaugcagaaauagacaaa

SEQ ID NO: 3174162 - RNA, 20 nt, Human
uaugcagaaauagacaaaaa

SEQ ID NO: 3174163 - RNA, 21 nt, Human
uaugcagaaauagacaaaaag

SEQ ID NO: 3174164 - RNA, 22 nt, Human
uaugcagaaauagacaaaaagu

SEQ ID NO: 3174165 - RNA, 16 nt, Human
uaugcuucauacaggg

SEQ ID NO: 3174166 - RNA, 14 nt, Human
uaugcuucauacag

SEQ ID NO: 3174167 - RNA, 13 nt, Human
uaugcuucauaca

SEQ ID NO: 3174168 - RNA, 12 nt, Human
uaugcuucauac

SEQ ID NO: 3174169 - RNA, 22 nt, Human
uaugcuuauacacuuacacuuu

SEQ ID NO: 3174170 - RNA, 16 nt, Human
uaucuaaauguugaaa

SEQ ID NO: 3174171 - RNA, 16 nt, Human
uaucgguauaaaggca

SEQ ID NO: 3174172 - RNA, 18 nt, Human
uauccugagagcccagaa

SEQ ID NO: 3174173 - RNA, 12 nt, Human
uauccugaauaa

SEQ ID NO: 3174174 - RNA, 15 nt, Human
uauccuucagccuga

SEQ ID NO: 3174175 - RNA, 14 nt, Human
uauccuucagccug

SEQ ID NO: 3174176 - RNA, 19 nt, Human
uauauguuuuaagaggcag

SEQ ID NO: 3174177 - RNA, 19 nt, Human
uauauguuuuugaaggcag

SEQ ID NO: 3174178 - RNA, 13 nt, Human
uauauuaaaauuc

SEQ ID NO: 3174179 - RNA, 20 nt, Human
uaucuaccaacuuucaagaa

SEQ ID NO: 3174180 - RNA, 19 nt, Human
uaucuaccaacuuucaaga

SEQ ID NO: 3174181 - RNA, 18 nt, Human
uaucuaccaacuuucaag

SEQ ID NO: 3174182 - RNA, 17 nt, Human
uaucuaccaacuuucaa

SEQ ID NO: 3174183 - RNA, 16 nt, Human
uaucuaccaacuuuca

SEQ ID NO: 3174184 - RNA, 15 nt, Human
uaucuaauuuggauu

SEQ ID NO: 3174185 - RNA, 15 nt, Human
uaucuaccaacuuuc

SEQ ID NO: 3174186 - RNA, 21 nt, Human
uaucuaauauguaacaagcca

SEQ ID NO: 3174187 - RNA, 18 nt, Human
uaucguauucaccuucag

SEQ ID NO: 3174188 - RNA, 16 nt, Human
uaucguauucaccuuc

SEQ ID NO: 3174189 - RNA, 13 nt, Human
uaucuaagaauaa

SEQ ID NO: 3174190 - RNA, 15 nt, Human
uaucuaagaauaaua

SEQ ID NO: 3174191 - RNA, 19 nt, Human
uaucuaagaauaauaaaau

SEQ ID NO: 3174192 - RNA, 16 nt, Human
uaucuggauucaaauu

SEQ ID NO: 3174193 - RNA, 18 nt, Human
uaucuggauucaaauuua

SEQ ID NO: 3174194 - RNA, 19 nt, Human
uaucuggauucaaauuuau

SEQ ID NO: 3174195 - RNA, 19 nt, Human
uaucugcccaccucggccu

SEQ ID NO: 3174196 - RNA, 14 nt, Human
uaugaccacacucc

SEQ ID NO: 3174197 - RNA, 19 nt, Human
uaugaccacacuccagcug

SEQ ID NO: 3174198 - RNA, 17 nt, Human
uaugacaaauguuucua

SEQ ID NO: 3174199 - RNA, 13 nt, Human
uaugacaaauguu

SEQ ID NO: 3174200 - RNA, 16 nt, Human
uaugacaaauguuucu

SEQ ID NO: 3174201 - RNA, 14 nt, Human
uaugacaaauguuu

SEQ ID NO: 3174202 - RNA, 17 nt, Human
uaucuucugcucuuucu

SEQ ID NO: 3174203 - RNA, 15 nt, Human
uaucuucuggacuau

SEQ ID NO: 3174204 - RNA, 21 nt, Human
uaucuucuggacuauagcugu

SEQ ID NO: 3174205 - RNA, 15 nt, Human
uaugaauacuuugca

SEQ ID NO: 3174206 - RNA, 13 nt, Human
uaugaauacuuug

SEQ ID NO: 3174207 - RNA, 15 nt, Human
uaugaaucugagaga

SEQ ID NO: 3174208 - RNA, 21 nt, Human
uaugaaucugagagaugcugu

SEQ ID NO: 3174209 - RNA, 20 nt, Human
uaugaaucuauuugugggug

SEQ ID NO: 3174210 - RNA, 16 nt, Human
uaucuguuuacagugu

SEQ ID NO: 3174211 - RNA, 17 nt, Human
uaucuguuuacaguguu

SEQ ID NO: 3174212 - RNA, 14 nt, Human
uaucuuacuuuccu

SEQ ID NO: 3174213 - RNA, 18 nt, Human
uaugaauaaagacaccua

SEQ ID NO: 3174214 - RNA, 10 nt, Human
uaucuucauc

SEQ ID NO: 3174215 - RNA, 14 nt, Human
uaucuucauguaaa

SEQ ID NO: 3174216 - RNA, 15 nt, Human
uaucuucauguaaau

SEQ ID NO: 3174217 - RNA, 16 nt, Human
uaucuucauguaaauu

SEQ ID NO: 3174218 - RNA, 18 nt, Human
uaucuucauguaaauuga

SEQ ID NO: 3174219 - RNA, 23 nt, Human
uaucuucauguaaauugacugua

SEQ ID NO: 3174220 - RNA, 23 nt, Human
uaucuuaucucagauauuugcac

SEQ ID NO: 3174221 - RNA, 18 nt, Human
uaucuuaucucagauauu

SEQ ID NO: 3174222 - RNA, 20 nt, Human
uaucuucguuaguaaucugu

SEQ ID NO: 3174223 - RNA, 21 nt, Human
uaucuucguuaguaaucugua

SEQ ID NO: 3174224 - RNA, 23 nt, Human
uaucuucguuaguaaucuguaua

SEQ ID NO: 3174225 - RNA, 16 nt, Human
uaucugugaaauauca

SEQ ID NO: 3174226 - RNA, 17 nt, Human
uaucugugaaauaucau

SEQ ID NO: 3174227 - RNA, 15 nt, Human
uaucuguuagaugcu

SEQ ID NO: 3174228 - RNA, 23 nt, Human
uaucugucauuugagcagggcuc

SEQ ID NO: 3174229 - RNA, 21 nt, Human
uaucugucauuugagcagggc

SEQ ID NO: 3174230 - RNA, 20 nt, Human
uaucugucauuugagcaggg

SEQ ID NO: 3174231 - RNA, 15 nt, Human
uaucuguaagagugu

SEQ ID NO: 3174232 - RNA, 19 nt, Human
uaucugguauuaaaugcca

SEQ ID NO: 3174233 - RNA, 20 nt, Human
uaggcuccuucaacaaggcu

SEQ ID NO: 3174234 - RNA, 16 nt, Human
uaggcuauuaaaaaag

SEQ ID NO: 3174235 - RNA, 17 nt, Human
uaggcuauuaaaaaagu

SEQ ID NO: 3174236 - RNA, 20 nt, Human
uagggaaaaaccagcgugug

SEQ ID NO: 3174237 - RNA, 21 nt, Human
uagggaaaaaccagcguguga

SEQ ID NO: 3174238 - RNA, 19 nt, Human
uagggaaaaaccagcgugu

SEQ ID NO: 3174239 - RNA, 11 nt, Human
uagggaaaaac

SEQ ID NO: 3174240 - RNA, 15 nt, Human
uagguagagucugag

SEQ ID NO: 3174241 - RNA, 20 nt, Human
uagguauaaguggugugugu

SEQ ID NO: 3174242 - RNA, 20 nt, Human
uagguauaucucccagugcu

SEQ ID NO: 3174243 - RNA, 19 nt, Human
uaggucguuuuaaaaacaa

SEQ ID NO: 3174244 - RNA, 16 nt, Human
uagguccuuuagaaac

SEQ ID NO: 3174245 - RNA, 15 nt, Human
uagguccuuuagaaa

SEQ ID NO: 3174246 - RNA, 19 nt, Human
uaggacaagggaaaauaaa

SEQ ID NO: 3174247 - RNA, 19 nt, Human
uaggacaaggugcaggcag

SEQ ID NO: 3174248 - RNA, 15 nt, Human
uaggacaaggugcag

SEQ ID NO: 3174249 - RNA, 20 nt, Human
uaggacaaggugcaggcagg

SEQ ID NO: 3174250 - RNA, 12 nt, Human
uaggaauugacc

SEQ ID NO: 3174251 - RNA, 23 nt, Human
uaggaauauuauauuuggaugca

SEQ ID NO: 3174252 - RNA, 20 nt, Human
uaggaauauuauauuuggau

SEQ ID NO: 3174253 - RNA, 18 nt, Human
uaggaauauuauauuugg

SEQ ID NO: 3174254 - RNA, 17 nt, Human
uaggaauauuauauuug

SEQ ID NO: 3174255 - RNA, 16 nt, Human
uaggaauauuauauuu

SEQ ID NO: 3174256 - RNA, 15 nt, Human
uaggaauauuauauu

SEQ ID NO: 3174257 - RNA, 14 nt, Human
uaggaauauuauau

SEQ ID NO: 3174258 - RNA, 13 nt, Human
uaggaauauuaua

SEQ ID NO: 3174259 - RNA, 18 nt, Human
uaggccaugggacaggga

SEQ ID NO: 3174260 - RNA, 16 nt, Human
uaggccaugggacagg

SEQ ID NO: 3174261 - RNA, 15 nt, Human
uaggccuggccagau

SEQ ID NO: 3174262 - RNA, 15 nt, Human
uaggcccuuucagug

SEQ ID NO: 3174263 - RNA, 14 nt, Human
uaggcccuuucagu

SEQ ID NO: 3174264 - RNA, 18 nt, Human
uaggccuggccagaugca

SEQ ID NO: 3174265 - RNA, 22 nt, Human
uaguauuugaaaacagaaauug

SEQ ID NO: 3174266 - RNA, 17 nt, Human
uaguauuugaaaacaga

SEQ ID NO: 3174267 - RNA, 14 nt, Human
uaguauuugaaaac

SEQ ID NO: 3174268 - RNA, 12 nt, Human
uaguauuugaaa

SEQ ID NO: 3174269 - RNA, 13 nt, Human
uaguaucaaaaga

SEQ ID NO: 3174270 - RNA, 23 nt, Human
uaggugacagagugagacucugu

SEQ ID NO: 3174271 - RNA, 21 nt, Human
uaggugauccacucgccuuca

SEQ ID NO: 3174272 - RNA, 20 nt, Human
uaguagggguaccacugaau

SEQ ID NO: 3174273 - RNA, 13 nt, Human
uaguguuauauga

SEQ ID NO: 3174274 - RNA, 15 nt, Human
uaguguuauaugaac

SEQ ID NO: 3174275 - RNA, 16 nt, Human
uaguguuauaugaaca

SEQ ID NO: 3174276 - RNA, 17 nt, Human
uaguguuauaugaacau

SEQ ID NO: 3174277 - RNA, 18 nt, Human
uaguguuauaugaacaua

SEQ ID NO: 3174278 - RNA, 22 nt, Human
uaguguuauaugaacauacaaa

SEQ ID NO: 3174279 - RNA, 16 nt, Human
uaguguucagaaaaaa

SEQ ID NO: 3174280 - RNA, 22 nt, Human
uaguguuauugagagagaugug

SEQ ID NO: 3174281 - RNA, 14 nt, Human
uaguguuauugcca

SEQ ID NO: 3174282 - RNA, 12 nt, Human
uaguguguugug

SEQ ID NO: 3174283 - RNA, 20 nt, Human
uaguguguugugcuuucaag

SEQ ID NO: 3174284 - RNA, 18 nt, Human
uagugugguuuucuguuu

SEQ ID NO: 3174285 - RNA, 22 nt, Human
uagugugguuuucuguuucuaa

SEQ ID NO: 3174286 - RNA, 22 nt, Human
uaguguggaaauuaagaagaaa

SEQ ID NO: 3174287 - RNA, 18 nt, Human
uaguguggaaauuaagaa

SEQ ID NO: 3174288 - RNA, 18 nt, Human
uagugucuggaucaguaa

SEQ ID NO: 3174289 - RNA, 19 nt, Human
uagugucuggaucaguaaa

SEQ ID NO: 3174290 - RNA, 21 nt, Human
uagugucuggaucaguaaaau

SEQ ID NO: 3174291 - RNA, 11 nt, Human
uagugugaaau

SEQ ID NO: 3174292 - RNA, 17 nt, Human
uagugugaaauauauua

SEQ ID NO: 3174293 - RNA, 23 nt, Human
uagucaaauguaauguggcuucu

SEQ ID NO: 3174294 - RNA, 15 nt, Human
uagugcaauauauuu

SEQ ID NO: 3174295 - RNA, 14 nt, Human
uagugcaauauauu

SEQ ID NO: 3174296 - RNA, 15 nt, Human
uagugcagcagggca

SEQ ID NO: 3174297 - RNA, 23 nt, Human
uagugcaauauauuuuguaugca

SEQ ID NO: 3174298 - RNA, 22 nt, Human
uagugcaauauauuuuguaugc

SEQ ID NO: 3174299 - RNA, 19 nt, Human
uagugcaauauauuuugua

SEQ ID NO: 3174300 - RNA, 18 nt, Human
uagugcaauauauuuugu

SEQ ID NO: 3174301 - RNA, 17 nt, Human
uagugcaauauauuuug

SEQ ID NO: 3174302 - RNA, 16 nt, Human
uagugcaauauauuuu

SEQ ID NO: 3174303 - RNA, 15 nt, Human
uagugcagcugaaau

SEQ ID NO: 3174304 - RNA, 17 nt, Human
uagugcagcugaaauug

SEQ ID NO: 3174305 - RNA, 16 nt, Human
uagugcagcugaaauu

SEQ ID NO: 3174306 - RNA, 22 nt, Human
uagugcagcugaaauugaaaag

SEQ ID NO: 3174307 - RNA, 21 nt, Human
uagugcagcugaaauugaaaa

SEQ ID NO: 3174308 - RNA, 20 nt, Human
uagugcagcugaaauugaaa

SEQ ID NO: 3174309 - RNA, 18 nt, Human
uagugcagcugaaauuga

SEQ ID NO: 3174310 - RNA, 13 nt, Human
uauaccuguugcu

SEQ ID NO: 3174311 - RNA, 23 nt, Human
uauaauugugugauauuucagaa

SEQ ID NO: 3174312 - RNA, 12 nt, Human
uauaauugugug

SEQ ID NO: 3174313 - RNA, 22 nt, Human
uauaauugugugauauuucaga

SEQ ID NO: 3174314 - RNA, 20 nt, Human
uauaauugugugauauuuca

SEQ ID NO: 3174315 - RNA, 16 nt, Human
uauaauguugcccagu

SEQ ID NO: 3174316 - RNA, 16 nt, Human
uauaaugaacaaaauu

SEQ ID NO: 3174317 - RNA, 15 nt, Human
uauaaugugaaaugu

SEQ ID NO: 3174318 - RNA, 16 nt, Human
uauaaugugaaaugua

SEQ ID NO: 3174319 - RNA, 19 nt, Human
uauaaugugaaauguaacu

SEQ ID NO: 3174320 - RNA, 17 nt, Human
uauaauguuuauuaaau

SEQ ID NO: 3174321 - RNA, 18 nt, Human
uauaauguuuauuaaaug

SEQ ID NO: 3174322 - RNA, 20 nt, Human
uauaauguuuauuaaaugcu

SEQ ID NO: 3174323 - RNA, 22 nt, Human
uauaauccuugauaauauauug

SEQ ID NO: 3174324 - RNA, 15 nt, Human
uauaaucucuucuua

SEQ ID NO: 3174325 - RNA, 21 nt, Human
uauaaucucuucuuauacaga

SEQ ID NO: 3174326 - RNA, 14 nt, Human
uauaaucagaaugg

SEQ ID NO: 3174327 - RNA, 16 nt, Human
uauaaucaccagggcc

SEQ ID NO: 3174328 - RNA, 12 nt, Human
uauaaacuuuua

SEQ ID NO: 3174329 - RNA, 19 nt, Human
uaguugcauagcaguauau

SEQ ID NO: 3174330 - RNA, 20 nt, Human
uaguugcauagcaguauaug

SEQ ID NO: 3174331 - RNA, 18 nt, Human
uaguugaggaaagcacag

SEQ ID NO: 3174332 - RNA, 12 nt, Human
uauaaagaauag

SEQ ID NO: 3174333 - RNA, 21 nt, Human
uauaaagaauaggacuuguuu

SEQ ID NO: 3174334 - RNA, 17 nt, Human
uauaaagaauaggacuu

SEQ ID NO: 3174335 - RNA, 14 nt, Human
uauaauacuuugua

SEQ ID NO: 3174336 - RNA, 15 nt, Human
uauaauacuuuguau

SEQ ID NO: 3174337 - RNA, 19 nt, Human
uauaauacuuuguauacaa

SEQ ID NO: 3174338 - RNA, 20 nt, Human
uauaauacuuuguauacaag

SEQ ID NO: 3174339 - RNA, 21 nt, Human
uauaauacuuuguauacaagu

SEQ ID NO: 3174340 - RNA, 22 nt, Human
uauaauacuuuguauacaagua

SEQ ID NO: 3174341 - RNA, 23 nt, Human
uauaauacacaaaaucaaauaau

SEQ ID NO: 3174342 - RNA, 20 nt, Human
uauaauacagaaucuuguuu

SEQ ID NO: 3174343 - RNA, 18 nt, Human
uauaauacacaaaaucaa

SEQ ID NO: 3174344 - RNA, 16 nt, Human
uauaauacacaaaauc

SEQ ID NO: 3174345 - RNA, 15 nt, Human
uauaauacacaaaau

SEQ ID NO: 3174346 - RNA, 16 nt, Human
uauaauauugaaaauu

SEQ ID NO: 3174347 - RNA, 19 nt, Human
uauaauauugaaaauugaa

SEQ ID NO: 3174348 - RNA, 12 nt, Human
uauaaaugugug

SEQ ID NO: 3174349 - RNA, 13 nt, Human
uauaaaugugugu

SEQ ID NO: 3174350 - RNA, 14 nt, Human
uauaaaugugugua

SEQ ID NO: 3174351 - RNA, 16 nt, Human
uauaaauguguguaug

SEQ ID NO: 3174352 - RNA, 15 nt, Human
uauaaauuauauucc

SEQ ID NO: 3174353 - RNA, 19 nt, Human
uauaguuaaucuauaacua

SEQ ID NO: 3174354 - RNA, 17 nt, Human
uauaguuacuguccugu

SEQ ID NO: 3174355 - RNA, 15 nt, Human
uauagugcaauauau

SEQ ID NO: 3174356 - RNA, 19 nt, Human
uauagugcaauauauuuug

SEQ ID NO: 3174357 - RNA, 16 nt, Human
uauagugcaauauauu

SEQ ID NO: 3174358 - RNA, 14 nt, Human
uauaguguguugug

SEQ ID NO: 3174359 - RNA, 16 nt, Human
uauaguguguugugcu

SEQ ID NO: 3174360 - RNA, 16 nt, Human
uauaguuauguaaaua

SEQ ID NO: 3174361 - RNA, 20 nt, Human
uauaguuauguaaauaauuc

SEQ ID NO: 3174362 - RNA, 22 nt, Human
uauaguuauguaaauaauucuu

SEQ ID NO: 3174363 - RNA, 22 nt, Human
uauacugcaaacuauuuaaaga

SEQ ID NO: 3174364 - RNA, 23 nt, Human
uauacugaucuucauuaccaaua

SEQ ID NO: 3174365 - RNA, 21 nt, Human
uauaccuguuuaaauugcuca

SEQ ID NO: 3174366 - RNA, 19 nt, Human
uauaccuguuuaaauugcu

SEQ ID NO: 3174367 - RNA, 18 nt, Human
uauaccuguuuaaauugc

SEQ ID NO: 3174368 - RNA, 17 nt, Human
uauaccuguuuaaauug

SEQ ID NO: 3174369 - RNA, 23 nt, Human
uauaccuguugcuuaauuacaau

SEQ ID NO: 3174370 - RNA, 16 nt, Human
uauacgagaacaggca

SEQ ID NO: 3174371 - RNA, 13 nt, Human
uauacguuucaaa

SEQ ID NO: 3174372 - RNA, 14 nt, Human
uauauguauguguu

SEQ ID NO: 3174373 - RNA, 21 nt, Human
uauaugcucugcauguuacau

SEQ ID NO: 3174374 - RNA, 20 nt, Human
uauaugcucugcauguuaca

SEQ ID NO: 3174375 - RNA, 19 nt, Human
uauauguauguguuuagaa

SEQ ID NO: 3174376 - RNA, 22 nt, Human
uauauguauguguuuagaauug

SEQ ID NO: 3174377 - RNA, 15 nt, Human
uauauguauguguuu

SEQ ID NO: 3174378 - RNA, 16 nt, Human
uauauguauguguuua

SEQ ID NO: 3174379 - RNA, 18 nt, Human
uauauguauguguuuaga

SEQ ID NO: 3174380 - RNA, 18 nt, Human
uauaugugaaaggauaug

SEQ ID NO: 3174381 - RNA, 17 nt, Human
uauaugugccacauuuu

SEQ ID NO: 3174382 - RNA, 13 nt, Human
uauauguguccau

SEQ ID NO: 3174383 - RNA, 16 nt, Human
uauaucuccuuuguau

SEQ ID NO: 3174384 - RNA, 12 nt, Human
uauaucuccuuu

SEQ ID NO: 3174385 - RNA, 19 nt, Human
uauaucucaaauuguaauu

SEQ ID NO: 3174386 - RNA, 17 nt, Human
uauaucucaaauuguaa

SEQ ID NO: 3174387 - RNA, 16 nt, Human
uauauaaaguauucuu

SEQ ID NO: 3174388 - RNA, 19 nt, Human
uauauaaaguauucuuuuu

SEQ ID NO: 3174389 - RNA, 17 nt, Human
ucaccaacgucugugcc

SEQ ID NO: 3174390 - RNA, 18 nt, Human
ucaccaacgucugugcca

SEQ ID NO: 3174391 - RNA, 21 nt, Human
ucaccaaaucagcugcuacua

SEQ ID NO: 3174392 - RNA, 14 nt, Human
ucacauuuauucug

SEQ ID NO: 3174393 - RNA, 13 nt, Human
ucaccaagcccag

SEQ ID NO: 3174394 - RNA, 16 nt, Human
ucaccacaugugcaca

SEQ ID NO: 3174395 - RNA, 19 nt, Human
ucacauuuagaaaagugaa

SEQ ID NO: 3174396 - RNA, 18 nt, Human
ucacccgcuaagagggag

SEQ ID NO: 3174397 - RNA, 21 nt, Human
ucacccgaucgccagcaaaac

SEQ ID NO: 3174398 - RNA, 12 nt, Human
ucacccuuuucu

SEQ ID NO: 3174399 - RNA, 14 nt, Human
ucaccgaaaacgug

SEQ ID NO: 3174400 - RNA, 20 nt, Human
ucacccuggggcuaggaaau

SEQ ID NO: 3174401 - RNA, 19 nt, Human
ucacccgcuaagagggagg

SEQ ID NO: 3174402 - RNA, 16 nt, Human
ucacccggugaccucu

SEQ ID NO: 3174403 - RNA, 19 nt, Human
ucacccuaccaacuuuacu

SEQ ID NO: 3174404 - RNA, 15 nt, Human
ucaccgaaaacgugg

SEQ ID NO: 3174405 - RNA, 19 nt, Human
ucaccgaaaacguggcugc

SEQ ID NO: 3174406 - RNA, 20 nt, Human
ucaccgaaaacguggcugcu

SEQ ID NO: 3174407 - RNA, 21 nt, Human
ucaccgaaaacguggcugcuu

SEQ ID NO: 3174408 - RNA, 22 nt, Human
ucaccgaaaacguggcugcuuc

SEQ ID NO: 3174409 - RNA, 23 nt, Human
ucaccgaaaacguggcugcuuca

SEQ ID NO: 3174410 - RNA, 18 nt, Human
ucacaagacccaaaaggc

SEQ ID NO: 3174411 - RNA, 18 nt, Human
ucaauucccaccuaugag

SEQ ID NO: 3174412 - RNA, 22 nt, Human
ucacaagacccaaaaggcagaa

SEQ ID NO: 3174413 - RNA, 19 nt, Human
ucaaggauaccuucuuauu

SEQ ID NO: 3174414 - RNA, 15 nt, Human
ucaauuauuuccccc

SEQ ID NO: 3174415 - RNA, 17 nt, Human
ucaauuauuucccccau

SEQ ID NO: 3174416 - RNA, 22 nt, Human
ucaauuauacuacuucuaaggu

SEQ ID NO: 3174417 - RNA, 20 nt, Human
ucaauuagcguuuaagguga

SEQ ID NO: 3174418 - RNA, 19 nt, Human
ucaauuaaagaaauaauuu

SEQ ID NO: 3174419 - RNA, 17 nt, Human
ucaauuaaagaaauaau

SEQ ID NO: 3174420 - RNA, 22 nt, Human
ucacacaugagcaucaggccag

SEQ ID NO: 3174421 - RNA, 23 nt, Human
ucacacaugagcaucaggccagg

SEQ ID NO: 3174422 - RNA, 15 nt, Human
ucacacacuuuggcu

SEQ ID NO: 3174423 - RNA, 18 nt, Human
ucacaggacucugccucc

SEQ ID NO: 3174424 - RNA, 17 nt, Human
ucacaggacucugccuc

SEQ ID NO: 3174425 - RNA, 16 nt, Human
ucacaggacucugccu

SEQ ID NO: 3174426 - RNA, 15 nt, Human
ucacaguaaaaauaa

SEQ ID NO: 3174427 - RNA, 16 nt, Human
ucacaguaaaaauaaa

SEQ ID NO: 3174428 - RNA, 18 nt, Human
ucacaguaaaaauaaaau

SEQ ID NO: 3174429 - RNA, 21 nt, Human
ucacaguaaaaauaaaauacu

SEQ ID NO: 3174430 - RNA, 23 nt, Human
ucacaggacucugccuccucuuc

SEQ ID NO: 3174431 - RNA, 19 nt, Human
ucacaggacucugccuccu

SEQ ID NO: 3174432 - RNA, 19 nt, Human
ucacaggagggagggggaa

SEQ ID NO: 3174433 - RNA, 21 nt, Human
ucaaagaggcacagagccaaa

SEQ ID NO: 3174434 - RNA, 17 nt, Human
ucaaauaugcaaagcac

SEQ ID NO: 3174435 - RNA, 16 nt, Human
ucaaauaugcaaagca

SEQ ID NO: 3174436 - RNA, 12 nt, Human
ucaaagagguuu

SEQ ID NO: 3174437 - RNA, 23 nt, Human
ucaaagagguuuuaaaaaaaucc

SEQ ID NO: 3174438 - RNA, 19 nt, Human
ucaaauaugcaaagcacug

SEQ ID NO: 3174439 - RNA, 18 nt, Human
ucaaauaugcaaagcacu

SEQ ID NO: 3174440 - RNA, 16 nt, Human
ucaaauguguuuuggu

SEQ ID NO: 3174441 - RNA, 14 nt, Human
ucaaauguguuuug

SEQ ID NO: 3174442 - RNA, 22 nt, Human
ucaaauguaauguggcuucugg

SEQ ID NO: 3174443 - RNA, 18 nt, Human
ucaaaucuuaagaaauaa

SEQ ID NO: 3174444 - RNA, 15 nt, Human
ucaaauguaaaguuu

SEQ ID NO: 3174445 - RNA, 13 nt, Human
ucaaaugaaaugu

SEQ ID NO: 3174446 - RNA, 14 nt, Human
ucaaaugaaaugua

SEQ ID NO: 3174447 - RNA, 15 nt, Human
ucaaaugaaauguau

SEQ ID NO: 3174448 - RNA, 20 nt, Human
ucaaaugaaauguaugcauu

SEQ ID NO: 3174449 - RNA, 23 nt, Human
ucaaaugaaauguaugcauucac

SEQ ID NO: 3174450 - RNA, 19 nt, Human
ucaaaugaauaaugccuuu

SEQ ID NO: 3174451 - RNA, 21 nt, Human
ucaaaugaauaaugccuuugu

SEQ ID NO: 3174452 - RNA, 22 nt, Human
ucaaaugaauaaugccuuugua

SEQ ID NO: 3174453 - RNA, 22 nt, Human
ucaaaucucuacaaauuuuucu

SEQ ID NO: 3174454 - RNA, 17 nt, Human
ucaaaucuuaagaaaua

SEQ ID NO: 3174455 - RNA, 14 nt, Human
ucaaaucuuaagaa

SEQ ID NO: 3174456 - RNA, 23 nt, Human
uauuugaauguaugcuucauaca

SEQ ID NO: 3174457 - RNA, 22 nt, Human
uauuugaauguaugcuucauac

SEQ ID NO: 3174458 - RNA, 17 nt, Human
uauuugaauuauuucug

SEQ ID NO: 3174459 - RNA, 15 nt, Human
uauuugaaugacuaa

SEQ ID NO: 3174460 - RNA, 23 nt, Human
uauuugauuuauuaacuuaauaa

SEQ ID NO: 3174461 - RNA, 13 nt, Human
uauuugauuuauu

SEQ ID NO: 3174462 - RNA, 15 nt, Human
uauuugauuuauuaa

SEQ ID NO: 3174463 - RNA, 16 nt, Human
uauuugauuuauuaac

SEQ ID NO: 3174464 - RNA, 19 nt, Human
uauuugauuuauuaacuua

SEQ ID NO: 3174465 - RNA, 22 nt, Human
ucaaacagucucaggaaaucaa

SEQ ID NO: 3174466 - RNA, 11 nt, Human
uauuugcaguc

SEQ ID NO: 3174467 - RNA, 17 nt, Human
uauuugcagucauggag

SEQ ID NO: 3174468 - RNA, 18 nt, Human
uauuugcagucauggaga

SEQ ID NO: 3174469 - RNA, 23 nt, Human
uauuugcagucauggagaaccac

SEQ ID NO: 3174470 - RNA, 15 nt, Human
ucaaaccccugaccu

SEQ ID NO: 3174471 - RNA, 14 nt, Human
ucaaaccccugacc

SEQ ID NO: 3174472 - RNA, 23 nt, Human
ucaaaccccgaccaccugcccaa

SEQ ID NO: 3174473 - RNA, 13 nt, Human
ucaaaccugugaa

SEQ ID NO: 3174474 - RNA, 20 nt, Human
ucaaaccccgaccaccugcc

SEQ ID NO: 3174475 - RNA, 19 nt, Human
ucaaaccccgaccaccugc

SEQ ID NO: 3174476 - RNA, 15 nt, Human
ucaaacauuaguacu

SEQ ID NO: 3174477 - RNA, 19 nt, Human
ucaaacauuaguacuuuau

SEQ ID NO: 3174478 - RNA, 18 nt, Human
ucaaacauuaguacuuua

SEQ ID NO: 3174479 - RNA, 17 nt, Human
ucaaacauuaguacuuu

SEQ ID NO: 3174480 - RNA, 16 nt, Human
ucaaacauuaguacuu

SEQ ID NO: 3174481 - RNA, 20 nt, Human
ucaaacauuaguacuuuaua

SEQ ID NO: 3174482 - RNA, 14 nt, Human
ucaacucccugccc

SEQ ID NO: 3174483 - RNA, 15 nt, Human
ucaacucccugcccc

SEQ ID NO: 3174484 - RNA, 21 nt, Human
ucaacucccugccccccagcc

SEQ ID NO: 3174485 - RNA, 22 nt, Human
ucaacucccugccccccagccc

SEQ ID NO: 3174486 - RNA, 20 nt, Human
ucaacucuccuccagaguca

SEQ ID NO: 3174487 - RNA, 15 nt, Human
ucaacucugcugagg

SEQ ID NO: 3174488 - RNA, 17 nt, Human
ucaacucugcugagggu

SEQ ID NO: 3174489 - RNA, 18 nt, Human
ucaacucugcugaggguc

SEQ ID NO: 3174490 - RNA, 22 nt, Human
ucaacucugcugaggguccaga

SEQ ID NO: 3174491 - RNA, 18 nt, Human
ucaacugaccagccucca

SEQ ID NO: 3174492 - RNA, 19 nt, Human
ucaaccccuucgcuccugu

SEQ ID NO: 3174493 - RNA, 18 nt, Human
ucaaccccuucgcuccug

SEQ ID NO: 3174494 - RNA, 18 nt, Human
ucaaauguguuuuggucc

SEQ ID NO: 3174495 - RNA, 15 nt, Human
ucaaccuccugggcu

SEQ ID NO: 3174496 - RNA, 14 nt, Human
ucaaccuccugggc

SEQ ID NO: 3174497 - RNA, 16 nt, Human
ucaaccuccugggcua

SEQ ID NO: 3174498 - RNA, 13 nt, Human
ucaaggauccuga

SEQ ID NO: 3174499 - RNA, 14 nt, Human
ucaaggauccugag

SEQ ID NO: 3174500 - RNA, 15 nt, Human
ucaaggauccugagc

SEQ ID NO: 3174501 - RNA, 16 nt, Human
ucaaggauccugagcc

SEQ ID NO: 3174502 - RNA, 19 nt, Human
ucaagcgauucuucugcuu

SEQ ID NO: 3174503 - RNA, 18 nt, Human
ucaagcgauucuucugcu

SEQ ID NO: 3174504 - RNA, 14 nt, Human
ucaagcuuauuuug

SEQ ID NO: 3174505 - RNA, 12 nt, Human
ucaagccaccaa

SEQ ID NO: 3174506 - RNA, 20 nt, Human
ucaagccaccaacauacucc

SEQ ID NO: 3174507 - RNA, 17 nt, Human
ucaagcgauucuucugc

SEQ ID NO: 3174508 - RNA, 13 nt, Human
ucaagcccaggag

SEQ ID NO: 3174509 - RNA, 14 nt, Human
ucaagcccaggagg

SEQ ID NO: 3174510 - RNA, 16 nt, Human
ucaagccagacucugc

SEQ ID NO: 3174511 - RNA, 21 nt, Human
uauuugaauguaugcuucaua

SEQ ID NO: 3174512 - RNA, 14 nt, Human
uauuugaaagugcc

SEQ ID NO: 3174513 - RNA, 16 nt, Human
uauuugaaccaauaaa

SEQ ID NO: 3174514 - RNA, 15 nt, Human
uauuugaaagugccu

SEQ ID NO: 3174515 - RNA, 20 nt, Human
uauuugaaagugccuuugca

SEQ ID NO: 3174516 - RNA, 23 nt, Human
uauuucuucaaauaucucuauuu

SEQ ID NO: 3174517 - RNA, 18 nt, Human
uauuugaaaacagaaauu

SEQ ID NO: 3174518 - RNA, 14 nt, Human
uauuugaaaacaga

SEQ ID NO: 3174519 - RNA, 22 nt, Human
uauuugaaaacagaaauuggua

SEQ ID NO: 3174520 - RNA, 20 nt, Human
uauuugaaaacagaaauugg

SEQ ID NO: 3174521 - RNA, 19 nt, Human
uauuugaaaacagaaauug

SEQ ID NO: 3174522 - RNA, 11 nt, Human
uauuuauuaaa

SEQ ID NO: 3174523 - RNA, 22 nt, Human
uauuuauuaaaugcccagcccc

SEQ ID NO: 3174524 - RNA, 21 nt, Human
uauuuaugaagaaaauacuua

SEQ ID NO: 3174525 - RNA, 18 nt, Human
uauuuaaagggaaauuga

SEQ ID NO: 3174526 - RNA, 12 nt, Human
uauuuaaaggga

SEQ ID NO: 3174527 - RNA, 20 nt, Human
uauuguuuaaaaucauuucu

SEQ ID NO: 3174528 - RNA, 17 nt, Human
uauuuaugggauccugg

SEQ ID NO: 3174529 - RNA, 14 nt, Human
uauuuaugaagaaa

SEQ ID NO: 3174530 - RNA, 20 nt, Human
uauuuaugaagaaaauacuu

SEQ ID NO: 3174531 - RNA, 15 nt, Human
uauuuaugaagaaaa

SEQ ID NO: 3174532 - RNA, 16 nt, Human
uauuuaucuguucaaa

SEQ ID NO: 3174533 - RNA, 22 nt, Human
uauuuauauguauguguuuaga

SEQ ID NO: 3174534 - RNA, 15 nt, Human
uauuuauauuuauug

SEQ ID NO: 3174535 - RNA, 16 nt, Human
uauuuauauuuauuga

SEQ ID NO: 3174536 - RNA, 17 nt, Human
uauuuauauuuauugac

SEQ ID NO: 3174537 - RNA, 18 nt, Human
uauuuauauuuauugacu

SEQ ID NO: 3174538 - RNA, 12 nt, Human
uauuuauaugua

SEQ ID NO: 3174539 - RNA, 14 nt, Human
uauuuauauguaug

SEQ ID NO: 3174540 - RNA, 15 nt, Human
uauuuauauguaugu

SEQ ID NO: 3174541 - RNA, 16 nt, Human
uauuuauauguaugug

SEQ ID NO: 3174542 - RNA, 17 nt, Human
uauuuauauguaugugu

SEQ ID NO: 3174543 - RNA, 18 nt, Human
uauuuauauguauguguu

SEQ ID NO: 3174544 - RNA, 19 nt, Human
uauuuauauguauguguuu

SEQ ID NO: 3174545 - RNA, 21 nt, Human
uauuuauauguauguguuuag

SEQ ID NO: 3174546 - RNA, 20 nt, Human
uauugauaugcuuauacacu

SEQ ID NO: 3174547 - RNA, 18 nt, Human
uauucauuguggucauag

SEQ ID NO: 3174548 - RNA, 16 nt, Human
uauuccaaaccaaauu

SEQ ID NO: 3174549 - RNA, 17 nt, Human
uauuccaaaccaaauuu

SEQ ID NO: 3174550 - RNA, 21 nt, Human
uauuccaaaccaaauuuuaau

SEQ ID NO: 3174551 - RNA, 14 nt, Human
uauugcaauaaagu

SEQ ID NO: 3174552 - RNA, 16 nt, Human
uauugcaauaaaguau

SEQ ID NO: 3174553 - RNA, 18 nt, Human
uauugcaauaaaguauaa

SEQ ID NO: 3174554 - RNA, 22 nt, Human
uauugcaucuggguagcuguaa

SEQ ID NO: 3174555 - RNA, 17 nt, Human
uauugccaaacauuaau

SEQ ID NO: 3174556 - RNA, 15 nt, Human
uauugccaaacauua

SEQ ID NO: 3174557 - RNA, 14 nt, Human
uauugccaaacauu

SEQ ID NO: 3174558 - RNA, 22 nt, Human
uauugccaaaacccagcugcac

SEQ ID NO: 3174559 - RNA, 21 nt, Human
uauugccaaaacccagcugca

SEQ ID NO: 3174560 - RNA, 20 nt, Human
uauugccaaaacccagcugc

SEQ ID NO: 3174561 - RNA, 19 nt, Human
uauugccaaaacccagcug

SEQ ID NO: 3174562 - RNA, 18 nt, Human
uauugccaaaacccagcu

SEQ ID NO: 3174563 - RNA, 15 nt, Human
uauuguuuaaaauca

SEQ ID NO: 3174564 - RNA, 17 nt, Human
uauuguuuaaaaucauu

SEQ ID NO: 3174565 - RNA, 16 nt, Human
uauuguuuaaaaucau

SEQ ID NO: 3174566 - RNA, 17 nt, Human
uauuguguugacuuuau

SEQ ID NO: 3174567 - RNA, 22 nt, Human
uauuguguugacuuuauaaauu

SEQ ID NO: 3174568 - RNA, 15 nt, Human
uauugugcuguucua

SEQ ID NO: 3174569 - RNA, 15 nt, Human
uauugcccacgcugg

SEQ ID NO: 3174570 - RNA, 22 nt, Human
uauugccaggaaaggagaguac

SEQ ID NO: 3174571 - RNA, 20 nt, Human
uauugcccaugauauaacuu

SEQ ID NO: 3174572 - RNA, 22 nt, Human
uauugccaaacauuaauguuga

SEQ ID NO: 3174573 - RNA, 21 nt, Human
uauugccaaacauuaauguug

SEQ ID NO: 3174574 - RNA, 19 nt, Human
uauugccaaacauuaaugu

SEQ ID NO: 3174575 - RNA, 18 nt, Human
uauugccaaacauuaaug

SEQ ID NO: 3174576 - RNA, 14 nt, Human
uauugcccacgcug

SEQ ID NO: 3174577 - RNA, 13 nt, Human
uauugcccacgcu

SEQ ID NO: 3174578 - RNA, 23 nt, Human
uauugcugauggugcaaugaccu

SEQ ID NO: 3174579 - RNA, 22 nt, Human
uauugcugauggugcaaugacc

SEQ ID NO: 3174580 - RNA, 13 nt, Human
uauuauauuugga

SEQ ID NO: 3174581 - RNA, 12 nt, Human
uauuauauuugg

SEQ ID NO: 3174582 - RNA, 11 nt, Human
uauuauauuug

SEQ ID NO: 3174583 - RNA, 13 nt, Human
uauuauauacaua

SEQ ID NO: 3174584 - RNA, 22 nt, Human
uauuauagagcagaaauucugu

SEQ ID NO: 3174585 - RNA, 20 nt, Human
uauuauagagcagaaauucu

SEQ ID NO: 3174586 - RNA, 19 nt, Human
uauuauagagcagaaauuc

SEQ ID NO: 3174587 - RNA, 18 nt, Human
uauuauagagcagaaauu

SEQ ID NO: 3174588 - RNA, 17 nt, Human
uauuauagagcagaaau

SEQ ID NO: 3174589 - RNA, 16 nt, Human
uauuauagagcagaaa

SEQ ID NO: 3174590 - RNA, 20 nt, Human
uauuaagcaugacagaaaau

SEQ ID NO: 3174591 - RNA, 21 nt, Human
uauuaagcccacaguauauuu

SEQ ID NO: 3174592 - RNA, 13 nt, Human
uauuaagcuuuuu

SEQ ID NO: 3174593 - RNA, 16 nt, Human
uauuaagcuuuuugga

SEQ ID NO: 3174594 - RNA, 19 nt, Human
uauuaagcuuuuuggaauc

SEQ ID NO: 3174595 - RNA, 16 nt, Human
uauuaagcaugacaga

SEQ ID NO: 3174596 - RNA, 22 nt, Human
uauuaagauuauaauuguugca

SEQ ID NO: 3174597 - RNA, 18 nt, Human
uauuaagauuauaauugu

SEQ ID NO: 3174598 - RNA, 14 nt, Human
uauuaaggaagaca

SEQ ID NO: 3174599 - RNA, 13 nt, Human
uauuaauaaaaag

SEQ ID NO: 3174600 - RNA, 16 nt, Human
uauuaauaaaaagaca

SEQ ID NO: 3174601 - RNA, 18 nt, Human
uauuauaagucuuacaua

SEQ ID NO: 3174602 - RNA, 19 nt, Human
uauuauaagucuuacauaa

SEQ ID NO: 3174603 - RNA, 20 nt, Human
uauuaaguaagucucaaggu

SEQ ID NO: 3174604 - RNA, 19 nt, Human
uauuauguccugugagaug

SEQ ID NO: 3174605 - RNA, 21 nt, Human
uauuauguccugugagaugug

SEQ ID NO: 3174606 - RNA, 22 nt, Human
uauuauguccugugagaugugu

SEQ ID NO: 3174607 - RNA, 22 nt, Human
uauuauuuauuuuuuuuaauug

SEQ ID NO: 3174608 - RNA, 18 nt, Human
uauuaucuuguucaggaa

SEQ ID NO: 3174609 - RNA, 20 nt, Human
uauuaucuuguucaggaaaa

SEQ ID NO: 3174610 - RNA, 21 nt, Human
uauuaucuuguucaggaaaag

SEQ ID NO: 3174611 - RNA, 22 nt, Human
uauuaucaaguagacuacuguu

SEQ ID NO: 3174612 - RNA, 16 nt, Human
uauuaucaaguagacu

SEQ ID NO: 3174613 - RNA, 14 nt, Human
uauuaucaaguaga

SEQ ID NO: 3174614 - RNA, 17 nt, Human
uauuauauuuggaugca

SEQ ID NO: 3174615 - RNA, 16 nt, Human
uauuauauuuggaugc

SEQ ID NO: 3174616 - RNA, 15 nt, Human
uauuauauuuggaug

SEQ ID NO: 3174617 - RNA, 14 nt, Human
uauuauauuuggau

SEQ ID NO: 3174618 - RNA, 18 nt, Human
uauggacagcauugccag

SEQ ID NO: 3174619 - RNA, 16 nt, Human
uauguguguuucuguc

SEQ ID NO: 3174620 - RNA, 18 nt, Human
uauguguguuucuguccu

SEQ ID NO: 3174621 - RNA, 19 nt, Human
uauggaggcuuugcauaga

SEQ ID NO: 3174622 - RNA, 23 nt, Human
uauggaggagaguguuuaacuga

SEQ ID NO: 3174623 - RNA, 13 nt, Human
uauguguuuagaa

SEQ ID NO: 3174624 - RNA, 16 nt, Human
uauguguuuagaauug

SEQ ID NO: 3174625 - RNA, 14 nt, Human
uauguguuuuucuc

SEQ ID NO: 3174626 - RNA, 17 nt, Human
uauguguuuuucucaua

SEQ ID NO: 3174627 - RNA, 21 nt, Human
uauguguuuuucucauauuug

SEQ ID NO: 3174628 - RNA, 20 nt, Human
uauguuauacaaccuucauu

SEQ ID NO: 3174629 - RNA, 21 nt, Human
uauguuauacaaccuucauuu

SEQ ID NO: 3174630 - RNA, 22 nt, Human
uauguuauacaaccuucauuua

SEQ ID NO: 3174631 - RNA, 17 nt, Human
uauguucuaagaaguga

SEQ ID NO: 3174632 - RNA, 22 nt, Human
uauguucuuaguggauguucug

SEQ ID NO: 3174633 - RNA, 16 nt, Human
uauguugaaaaaauuu

SEQ ID NO: 3174634 - RNA, 21 nt, Human
uauguugcccaggcaggucuu

SEQ ID NO: 3174635 - RNA, 17 nt, Human
uauguugaagccuuugu

SEQ ID NO: 3174636 - RNA, 14 nt, Human
uauuaacaauuaau

SEQ ID NO: 3174637 - RNA, 15 nt, Human
uauuaacaauuaauu

SEQ ID NO: 3174638 - RNA, 19 nt, Human
uauuaacaauuaauugucu

SEQ ID NO: 3174639 - RNA, 20 nt, Human
uauuaacaauuaauugucuu

SEQ ID NO: 3174640 - RNA, 17 nt, Human
uauuaacacuacucaaa

SEQ ID NO: 3174641 - RNA, 23 nt, Human
uauuaaaugcuucauuuguaugu

SEQ ID NO: 3174642 - RNA, 12 nt, Human
uauuaaaugcca

SEQ ID NO: 3174643 - RNA, 16 nt, Human
uauuaagaaagacuau

SEQ ID NO: 3174644 - RNA, 15 nt, Human
uauuaacuuaauaau

SEQ ID NO: 3174645 - RNA, 22 nt, Human
uauuaacugcucaguguuucau

SEQ ID NO: 3174646 - RNA, 19 nt, Human
uauuaacugcucaguguuu

SEQ ID NO: 3174647 - RNA, 20 nt, Human
uauuaacuuaauaaucaaga

SEQ ID NO: 3174648 - RNA, 16 nt, Human
uauuaacuuaauaauc

SEQ ID NO: 3174649 - RNA, 18 nt, Human
uauuaacuuaauaaucaa

SEQ ID NO: 3174650 - RNA, 17 nt, Human
uauuaaaugcccagccc

SEQ ID NO: 3174651 - RNA, 19 nt, Human
uauuaaaugcccagccccu

SEQ ID NO: 3174652 - RNA, 15 nt, Human
uauuaaaugcccagc

SEQ ID NO: 3174653 - RNA, 23 nt, Human
ucucaguccaugaagauguagag

SEQ ID NO: 3174654 - RNA, 12 nt, Human
ucucagucucac

SEQ ID NO: 3174655 - RNA, 13 nt, Human
ucuaugggacuca

SEQ ID NO: 3174656 - RNA, 12 nt, Human
ucuaugggacuc

SEQ ID NO: 3174657 - RNA, 19 nt, Human
ucuaugggacucaaugcac

SEQ ID NO: 3174658 - RNA, 18 nt, Human
ucucauacucaccucacc

SEQ ID NO: 3174659 - RNA, 16 nt, Human
ucucauacucaccuca

SEQ ID NO: 3174660 - RNA, 13 nt, Human
ucucagucucaca

SEQ ID NO: 3174661 - RNA, 17 nt, Human
ucucaucuugacagagc

SEQ ID NO: 3174662 - RNA, 22 nt, Human
ucucaucuugacagagccugcc

SEQ ID NO: 3174663 - RNA, 14 nt, Human
ucuccaccugccag

SEQ ID NO: 3174664 - RNA, 15 nt, Human
ucuccaccugccagg

SEQ ID NO: 3174665 - RNA, 16 nt, Human
ucuccaccugccaggg

SEQ ID NO: 3174666 - RNA, 17 nt, Human
ucuccaccugccaggga

SEQ ID NO: 3174667 - RNA, 19 nt, Human
ucuccaccugccagggaca

SEQ ID NO: 3174668 - RNA, 22 nt, Human
ucuccaccugccagggacagag

SEQ ID NO: 3174669 - RNA, 13 nt, Human
ucuccacuccaga

SEQ ID NO: 3174670 - RNA, 16 nt, Human
ucuccacccugcucuc

SEQ ID NO: 3174671 - RNA, 14 nt, Human
ucuccacccugcuc

SEQ ID NO: 3174672 - RNA, 17 nt, Human
ucuccacccugcucucc

SEQ ID NO: 3174673 - RNA, 12 nt, Human
ucuccacccugc

SEQ ID NO: 3174674 - RNA, 13 nt, Human
ucuccacccugcu

SEQ ID NO: 3174675 - RNA, 16 nt, Human
ucucaugccucagccu

SEQ ID NO: 3174676 - RNA, 19 nt, Human
ucucaugccucagccuccu

SEQ ID NO: 3174677 - RNA, 13 nt, Human
ucucaugccucag

SEQ ID NO: 3174678 - RNA, 22 nt, Human
ucuccagccccuggaugcagcc

SEQ ID NO: 3174679 - RNA, 16 nt, Human
ucuccagccccuggau

SEQ ID NO: 3174680 - RNA, 18 nt, Human
ucuccagccccuggaugc

SEQ ID NO: 3174681 - RNA, 12 nt, Human
ucuccagccccu

SEQ ID NO: 3174682 - RNA, 13 nt, Human
ucuccagccccug

SEQ ID NO: 3174683 - RNA, 14 nt, Human
ucuccagccccugg

SEQ ID NO: 3174684 - RNA, 15 nt, Human
ucuccagccccugga

SEQ ID NO: 3174685 - RNA, 14 nt, Human
ucuccagcaggccc

SEQ ID NO: 3174686 - RNA, 11 nt, Human
ucuccagcagg

SEQ ID NO: 3174687 - RNA, 14 nt, Human
ucuccacugccuuc

SEQ ID NO: 3174688 - RNA, 14 nt, Human
ucucccucccuugg

SEQ ID NO: 3174689 - RNA, 23 nt, Human
ucucccucagucuggcccuuccu

SEQ ID NO: 3174690 - RNA, 18 nt, Human
ucucccucagucuggccc

SEQ ID NO: 3174691 - RNA, 12 nt, Human
ucucccccagcc

SEQ ID NO: 3174692 - RNA, 23 nt, Human
ucucccccacccuuguuccaguu

SEQ ID NO: 3174693 - RNA, 21 nt, Human
ucucccccacccuuguuccag

SEQ ID NO: 3174694 - RNA, 20 nt, Human
ucucccccacccuuguucca

SEQ ID NO: 3174695 - RNA, 13 nt, Human
ucucccccacccu

SEQ ID NO: 3174696 - RNA, 16 nt, Human
ucuccccgcaguguuu

SEQ ID NO: 3174697 - RNA, 19 nt, Human
ucuacugggagccuaccca

SEQ ID NO: 3174698 - RNA, 16 nt, Human
ucuacugggagccuac

SEQ ID NO: 3174699 - RNA, 20 nt, Human
ucuacuucauguaauccaaa

SEQ ID NO: 3174700 - RNA, 15 nt, Human
ucuacuuccaagacu

SEQ ID NO: 3174701 - RNA, 14 nt, Human
ucuaccuuccugca

SEQ ID NO: 3174702 - RNA, 14 nt, Human
ucuaccuucauaag

SEQ ID NO: 3174703 - RNA, 15 nt, Human
ucuacagaggccaug

SEQ ID NO: 3174704 - RNA, 21 nt, Human
ucuacacauauaaauugucuu

SEQ ID NO: 3174705 - RNA, 12 nt, Human
ucuacagaaaaa

SEQ ID NO: 3174706 - RNA, 13 nt, Human
ucuacagaaaaac

SEQ ID NO: 3174707 - RNA, 21 nt, Human
ucuacacugugcugagucuga

SEQ ID NO: 3174708 - RNA, 17 nt, Human
ucuacaaauuuuucugu

SEQ ID NO: 3174709 - RNA, 14 nt, Human
ucuaucaccaagga

SEQ ID NO: 3174710 - RNA, 13 nt, Human
ucuaucauuguug

SEQ ID NO: 3174711 - RNA, 23 nt, Human
ucuagugcugugaaaaaaaaaau

SEQ ID NO: 3174712 - RNA, 19 nt, Human
ucuagugcugugaaaaaaa

SEQ ID NO: 3174713 - RNA, 16 nt, Human
ucuagugcugugaaaa

SEQ ID NO: 3174714 - RNA, 15 nt, Human
ucuagugcugugaaa

SEQ ID NO: 3174715 - RNA, 14 nt, Human
ucuagugcugugaa

SEQ ID NO: 3174716 - RNA, 13 nt, Human
ucuagugcuguga

SEQ ID NO: 3174717 - RNA, 12 nt, Human
ucuaggaagacu

SEQ ID NO: 3174718 - RNA, 19 nt, Human
ucuaggaagacuuuggaaa

SEQ ID NO: 3174719 - RNA, 15 nt, Human
ucuaggaagacuuug

SEQ ID NO: 3174720 - RNA, 16 nt, Human
ucuaggaagacuuugg

SEQ ID NO: 3174721 - RNA, 16 nt, Human
uccuuagaaaagccau

SEQ ID NO: 3174722 - RNA, 18 nt, Human
ucggacuuagcugggaga

SEQ ID NO: 3174723 - RNA, 12 nt, Human
ucggagaagagc

SEQ ID NO: 3174724 - RNA, 16 nt, Human
ucggagaagagcuguu

SEQ ID NO: 3174725 - RNA, 14 nt, Human
ucggagaagagcug

SEQ ID NO: 3174726 - RNA, 13 nt, Human
ucgugacaacacu

SEQ ID NO: 3174727 - RNA, 18 nt, Human
ucgugacaauguuuacaa

SEQ ID NO: 3174728 - RNA, 15 nt, Human
ucgucuuucccaaag

SEQ ID NO: 3174729 - RNA, 14 nt, Human
ucggcacagccugg

SEQ ID NO: 3174730 - RNA, 13 nt, Human
ucggcacagccug

SEQ ID NO: 3174731 - RNA, 15 nt, Human
ucggauccccuuccu

SEQ ID NO: 3174732 - RNA, 14 nt, Human
ucggaucagcugag

SEQ ID NO: 3174733 - RNA, 13 nt, Human
ucggaguucuucu

SEQ ID NO: 3174734 - RNA, 12 nt, Human
ucggaguucuuc

SEQ ID NO: 3174735 - RNA, 16 nt, Human
ucggaucaggcuccca

SEQ ID NO: 3174736 - RNA, 19 nt, Human
ucggaucagcugagccuuc

SEQ ID NO: 3174737 - RNA, 13 nt, Human
ucggauccccuuc

SEQ ID NO: 3174738 - RNA, 16 nt, Human
ucuaaaguacugagca

SEQ ID NO: 3174739 - RNA, 17 nt, Human
ucuaaaguaauugguua

SEQ ID NO: 3174740 - RNA, 16 nt, Human
ucguguccccuauccu

SEQ ID NO: 3174741 - RNA, 22 nt, Human
ucgugucauacucgagucugag

SEQ ID NO: 3174742 - RNA, 13 nt, Human
uccuguagcccua

SEQ ID NO: 3174743 - RNA, 11 nt, Human
uccuguagccc

SEQ ID NO: 3174744 - RNA, 12 nt, Human
uccuggccucaa

SEQ ID NO: 3174745 - RNA, 19 nt, Human
uccuggccggugugggggc

SEQ ID NO: 3174746 - RNA, 22 nt, Human
uccuggcacuaccaaaggacac

SEQ ID NO: 3174747 - RNA, 13 nt, Human
uccuggcacugcu

SEQ ID NO: 3174748 - RNA, 16 nt, Human
uccuggcacugcuucc

SEQ ID NO: 3174749 - RNA, 22 nt, Human
uccuggcacccggccccugcug

SEQ ID NO: 3174750 - RNA, 23 nt, Human
uccuggcacccggccccugcugg

SEQ ID NO: 3174751 - RNA, 14 nt, Human
uccuggaguucugg

SEQ ID NO: 3174752 - RNA, 23 nt, Human
uccuggaggcucaaauuuugagu

SEQ ID NO: 3174753 - RNA, 16 nt, Human
uccugccuaaggcuga

SEQ ID NO: 3174754 - RNA, 19 nt, Human
uccugccuaaggcugaacu

SEQ ID NO: 3174755 - RNA, 17 nt, Human
uccuggacaggccaggu

SEQ ID NO: 3174756 - RNA, 15 nt, Human
uccuggacaggccag

SEQ ID NO: 3174757 - RNA, 17 nt, Human
uccugcccuuaccugcc

SEQ ID NO: 3174758 - RNA, 21 nt, Human
uccugcccugggaggcaguga

SEQ ID NO: 3174759 - RNA, 16 nt, Human
uccugcccugcuguuu

SEQ ID NO: 3174760 - RNA, 11 nt, Human
uccugcccugg

SEQ ID NO: 3174761 - RNA, 12 nt, Human
uccugcccuggg

SEQ ID NO: 3174762 - RNA, 14 nt, Human
uccugcccugggag

SEQ ID NO: 3174763 - RNA, 15 nt, Human
uccugcccugggagg

SEQ ID NO: 3174764 - RNA, 20 nt, Human
uccugcccuuaccugccagg

SEQ ID NO: 3174765 - RNA, 13 nt, Human
uccuccugacacc

SEQ ID NO: 3174766 - RNA, 22 nt, Human
uccucuguccaggcacugcugc

SEQ ID NO: 3174767 - RNA, 16 nt, Human
uccucuuaacuguggu

SEQ ID NO: 3174768 - RNA, 15 nt, Human
uccucuuagaagaau

SEQ ID NO: 3174769 - RNA, 20 nt, Human
uccucuuagaagaauauugu

SEQ ID NO: 3174770 - RNA, 18 nt, Human
uccuccuccuuccuaguu

SEQ ID NO: 3174771 - RNA, 16 nt, Human
uccuccuccuuccuag

SEQ ID NO: 3174772 - RNA, 21 nt, Human
uccugagccagauuucacucu

SEQ ID NO: 3174773 - RNA, 11 nt, Human
uccugagcccc

SEQ ID NO: 3174774 - RNA, 19 nt, Human
uccugagcccccagcuucc

SEQ ID NO: 3174775 - RNA, 18 nt, Human
uccugagcccccagcuuc

SEQ ID NO: 3174776 - RNA, 17 nt, Human
uccugagcccccagcuu

SEQ ID NO: 3174777 - RNA, 16 nt, Human
uccugagcccccagcu

SEQ ID NO: 3174778 - RNA, 13 nt, Human
uccugagccccca

SEQ ID NO: 3174779 - RNA, 18 nt, Human
uccugccccugagcccau

SEQ ID NO: 3174780 - RNA, 10 nt, Human
uccugcccug

SEQ ID NO: 3174781 - RNA, 17 nt, Human
uccugccccugagccca

SEQ ID NO: 3174782 - RNA, 15 nt, Human
uccugcccacugaua

SEQ ID NO: 3174783 - RNA, 17 nt, Human
uccugaggcuccacuug

SEQ ID NO: 3174784 - RNA, 16 nt, Human
uccugcauuugugaaa

SEQ ID NO: 3174785 - RNA, 19 nt, Human
uccugaggcuccacuuggu

SEQ ID NO: 3174786 - RNA, 20 nt, Human
uccugaggcuccacuugguc

SEQ ID NO: 3174787 - RNA, 13 nt, Human
uccugccaggcau

SEQ ID NO: 3174788 - RNA, 14 nt, Human
uccugccaggcaug

SEQ ID NO: 3174789 - RNA, 11 nt, Human
uccugccacca

SEQ ID NO: 3174790 - RNA, 16 nt, Human
uccugccaccacgccc

SEQ ID NO: 3174791 - RNA, 16 nt, Human
uccuacacaggacagg

SEQ ID NO: 3174792 - RNA, 15 nt, Human
uccuacacaggacag

SEQ ID NO: 3174793 - RNA, 14 nt, Human
uccuacacaggaca

SEQ ID NO: 3174794 - RNA, 12 nt, Human
uccuacacagga

SEQ ID NO: 3174795 - RNA, 23 nt, Human
uccuagugaaagaggcagcuuga

SEQ ID NO: 3174796 - RNA, 14 nt, Human
uccuagugaaagag

SEQ ID NO: 3174797 - RNA, 21 nt, Human
uccuauauuguuuucagugua

SEQ ID NO: 3174798 - RNA, 20 nt, Human
uccuaguucaucccuucucu

SEQ ID NO: 3174799 - RNA, 19 nt, Human
uccuaguucaucccuucuc

SEQ ID NO: 3174800 - RNA, 23 nt, Human
uccuauauuguuuucaguguaca

SEQ ID NO: 3174801 - RNA, 23 nt, Human
uccucauucccucgucuuuccca

SEQ ID NO: 3174802 - RNA, 22 nt, Human
uccucauucccucgucuuuccc

SEQ ID NO: 3174803 - RNA, 18 nt, Human
uccucauuagcauuuugc

SEQ ID NO: 3174804 - RNA, 17 nt, Human
uccucauuagcauuuug

SEQ ID NO: 3174805 - RNA, 14 nt, Human
uccuccaaggacag

SEQ ID NO: 3174806 - RNA, 19 nt, Human
uccuccagggcucaacacu

SEQ ID NO: 3174807 - RNA, 12 nt, Human
uccucccaccuc

SEQ ID NO: 3174808 - RNA, 15 nt, Human
uccuccauccuccuc

SEQ ID NO: 3174809 - RNA, 23 nt, Human
uccgaguguguuucauccuuccc

SEQ ID NO: 3174810 - RNA, 19 nt, Human
uccgaguguguuucauccu

SEQ ID NO: 3174811 - RNA, 13 nt, Human
uccgaguguguuu

SEQ ID NO: 3174812 - RNA, 14 nt, Human
uccgccucuugggu

SEQ ID NO: 3174813 - RNA, 21 nt, Human
uccuaagcuauucaguaauaa

SEQ ID NO: 3174814 - RNA, 20 nt, Human
uccuaagcuauucaguaaua

SEQ ID NO: 3174815 - RNA, 18 nt, Human
uccuaagcuauucaguaa

SEQ ID NO: 3174816 - RNA, 18 nt, Human
uccgcuuucuacccagcg

SEQ ID NO: 3174817 - RNA, 16 nt, Human
uccgcuuucuacccag

SEQ ID NO: 3174818 - RNA, 13 nt, Human
uccgcuucccugg

SEQ ID NO: 3174819 - RNA, 12 nt, Human
uccgcuucccug

SEQ ID NO: 3174820 - RNA, 16 nt, Human
uccgcuucccugguuc

SEQ ID NO: 3174821 - RNA, 20 nt, Human
uccgcuccccugcuccuguc

SEQ ID NO: 3174822 - RNA, 22 nt, Human
ucccuucaaccauuccccaugg

SEQ ID NO: 3174823 - RNA, 21 nt, Human
ucccccuguuucagaggcuca

SEQ ID NO: 3174824 - RNA, 15 nt, Human
ucccccuuccaugga

SEQ ID NO: 3174825 - RNA, 16 nt, Human
ucccuuccucuuucca

SEQ ID NO: 3174826 - RNA, 15 nt, Human
ucccuuccucuuucc

SEQ ID NO: 3174827 - RNA, 13 nt, Human
ucccuuccuccau

SEQ ID NO: 3174828 - RNA, 20 nt, Human
ucaggaauugcccauuguuu

SEQ ID NO: 3174829 - RNA, 19 nt, Human
ucagcuuccccaguagcug

SEQ ID NO: 3174830 - RNA, 18 nt, Human
ucagcuuccccaguagcu

SEQ ID NO: 3174831 - RNA, 21 nt, Human
ucaggccugggggcugggcag

SEQ ID NO: 3174832 - RNA, 20 nt, Human
ucaggccgggcagagcacag

SEQ ID NO: 3174833 - RNA, 18 nt, Human
ucaggccgggcagagcac

SEQ ID NO: 3174834 - RNA, 15 nt, Human
ucaggcucuucuccu

SEQ ID NO: 3174835 - RNA, 20 nt, Human
ucaggaucaaaccccgacca

SEQ ID NO: 3174836 - RNA, 23 nt, Human
ucaggaagcucagggccuggcuc

SEQ ID NO: 3174837 - RNA, 17 nt, Human
ucagcuuccccaguagc

SEQ ID NO: 3174838 - RNA, 13 nt, Human
ucagcuuccccag

SEQ ID NO: 3174839 - RNA, 15 nt, Human
ucagcuguucagauu

SEQ ID NO: 3174840 - RNA, 23 nt, Human
ucagcucugcaagaauugaagca

SEQ ID NO: 3174841 - RNA, 22 nt, Human
ucagcuccagcucaccagcccc

SEQ ID NO: 3174842 - RNA, 16 nt, Human
ucaccuaauuaauuuc

SEQ ID NO: 3174843 - RNA, 24 nt, Human
ucagcuccagcucaccagccccag

SEQ ID NO: 3174844 - RNA, 23 nt, Human
ucagcuccagcucaccagcccca

SEQ ID NO: 3174845 - RNA, 22 nt, Human
ucagucuuuaaucugagaggcc

SEQ ID NO: 3174846 - RNA, 16 nt, Human
ucagugaugugccuaa

SEQ ID NO: 3174847 - RNA, 15 nt, Human
ucagugaugugccua

SEQ ID NO: 3174848 - RNA, 22 nt, Human
ucagugaccuacuacgcagagg

SEQ ID NO: 3174849 - RNA, 23 nt, Human
ucagucugauucccaagcucugc

SEQ ID NO: 3174850 - RNA, 22 nt, Human
ucagucugauucccaagcucug

SEQ ID NO: 3174851 - RNA, 21 nt, Human
ucagucugauucccaagcucu

SEQ ID NO: 3174852 - RNA, 19 nt, Human
ucagucugauucccaagcu

SEQ ID NO: 3174853 - RNA, 20 nt, Human
ucagguggggcagcuugagg

SEQ ID NO: 3174854 - RNA, 16 nt, Human
ucagucucccucccuu

SEQ ID NO: 3174855 - RNA, 13 nt, Human
ucagucaaaacuu

SEQ ID NO: 3174856 - RNA, 14 nt, Human
ucagucaaaacuuu

SEQ ID NO: 3174857 - RNA, 15 nt, Human
ucagucaaaacuuua

SEQ ID NO: 3174858 - RNA, 16 nt, Human
ucagucaaaacuuuaa

SEQ ID NO: 3174859 - RNA, 23 nt, Human
ucagucgccuuucagcaggcagc

SEQ ID NO: 3174860 - RNA, 20 nt, Human
ucagucacuaaaaggaagac

SEQ ID NO: 3174861 - RNA, 19 nt, Human
ucagguggggcagcuugag

SEQ ID NO: 3174862 - RNA, 18 nt, Human
ucagguggggcagcuuga

SEQ ID NO: 3174863 - RNA, 17 nt, Human
ucagguggggcagcuug

SEQ ID NO: 3174864 - RNA, 23 nt, Human
ucaggugauccacccaccucagc

SEQ ID NO: 3174865 - RNA, 23 nt, Human
ucaggugagaagcagaggaagga

SEQ ID NO: 3174866 - RNA, 16 nt, Human
ucaggugauccaccca

SEQ ID NO: 3174867 - RNA, 21 nt, Human
ucaggugaaacuccagaugcc

SEQ ID NO: 3174868 - RNA, 14 nt, Human
ucagguccugcuca

SEQ ID NO: 3174869 - RNA, 18 nt, Human
ucagguccugcucagcag

SEQ ID NO: 3174870 - RNA, 16 nt, Human
ucagguccugcucagc

SEQ ID NO: 3174871 - RNA, 12 nt, Human
ucaggucccugc

SEQ ID NO: 3174872 - RNA, 17 nt, Human
ucagggaccaccagagg

SEQ ID NO: 3174873 - RNA, 21 nt, Human
ucaggcucuucuccuuucaca

SEQ ID NO: 3174874 - RNA, 16 nt, Human
ucaggcucuucuccuu

SEQ ID NO: 3174875 - RNA, 14 nt, Human
ucaggcugagcuga

SEQ ID NO: 3174876 - RNA, 20 nt, Human
ucagggaagauaaguuggaa

SEQ ID NO: 3174877 - RNA, 16 nt, Human
ucagggaagauaaguu

SEQ ID NO: 3174878 - RNA, 22 nt, Human
uccaaacaugagguucucucua

SEQ ID NO: 3174879 - RNA, 14 nt, Human
uccaaaagaaaaac

SEQ ID NO: 3174880 - RNA, 13 nt, Human
uccaaaagaaaaa

SEQ ID NO: 3174881 - RNA, 17 nt, Human
uccaaagaaauguaagg

SEQ ID NO: 3174882 - RNA, 14 nt, Human
uccaaagaaaugua

SEQ ID NO: 3174883 - RNA, 14 nt, Human
uccaaaccaaauuu

SEQ ID NO: 3174884 - RNA, 17 nt, Human
uccaaaccaaauuuuaa

SEQ ID NO: 3174885 - RNA, 22 nt, Human
uccaaacaugguuuauugguga

SEQ ID NO: 3174886 - RNA, 14 nt, Human
uccaaacacaggca

SEQ ID NO: 3174887 - RNA, 12 nt, Human
uccaaagaaaug

SEQ ID NO: 3174888 - RNA, 16 nt, Human
ucauuagcaaaaaaag

SEQ ID NO: 3174889 - RNA, 12 nt, Human
ucauuagcaaaa

SEQ ID NO: 3174890 - RNA, 17 nt, Human
ucauuagaauuaccauu

SEQ ID NO: 3174891 - RNA, 16 nt, Human
ucauuaggauggcuag

SEQ ID NO: 3174892 - RNA, 22 nt, Human
ucauuagcaaaaaaaguuguau

SEQ ID NO: 3174893 - RNA, 20 nt, Human
ucauuagcaaaaaaaguugu

SEQ ID NO: 3174894 - RNA, 18 nt, Human
ucauuagcaaaaaaaguu

SEQ ID NO: 3174895 - RNA, 17 nt, Human
ucauuagcaaaaaaagu

SEQ ID NO: 3174896 - RNA, 19 nt, Human
ucauuguaauguugugaau

SEQ ID NO: 3174897 - RNA, 21 nt, Human
ucauuuacaagacaacauugu

SEQ ID NO: 3174898 - RNA, 22 nt, Human
ucauuguccagagcugcuuccc

SEQ ID NO: 3174899 - RNA, 15 nt, Human
ucauuguccagagcu

SEQ ID NO: 3174900 - RNA, 18 nt, Human
ucauuguuggacauuugg

SEQ ID NO: 3174901 - RNA, 22 nt, Human
ucauuuaaaaagguuuaaaacu

SEQ ID NO: 3174902 - RNA, 19 nt, Human
ucaucuugaauuguaagga

SEQ ID NO: 3174903 - RNA, 21 nt, Human
ucaucuugacagagccugccc

SEQ ID NO: 3174904 - RNA, 19 nt, Human
ucaucuugacagagccugc

SEQ ID NO: 3174905 - RNA, 17 nt, Human
ucauccacugugccaug

SEQ ID NO: 3174906 - RNA, 14 nt, Human
ucauccacugugcc

SEQ ID NO: 3174907 - RNA, 16 nt, Human
ucaucucaguccucaa

SEQ ID NO: 3174908 - RNA, 19 nt, Human
ucauggggggagcacccug

SEQ ID NO: 3174909 - RNA, 20 nt, Human
ucauggggggagcacccuga

SEQ ID NO: 3174910 - RNA, 22 nt, Human
ucauggggggagcacccugagg

SEQ ID NO: 3174911 - RNA, 17 nt, Human
ucaucaaugaaugaaug

SEQ ID NO: 3174912 - RNA, 13 nt, Human
ucaucaauaaaac

SEQ ID NO: 3174913 - RNA, 14 nt, Human
ucaucauccuaagc

SEQ ID NO: 3174914 - RNA, 15 nt, Human
ucaucauguuuugau

SEQ ID NO: 3174915 - RNA, 13 nt, Human
ucaucauuauuau

SEQ ID NO: 3174916 - RNA, 14 nt, Human
ucaucauuauuauu

SEQ ID NO: 3174917 - RNA, 13 nt, Human
ucaucaugucuau

SEQ ID NO: 3174918 - RNA, 16 nt, Human
ucaucaugucuauugu

SEQ ID NO: 3174919 - RNA, 18 nt, Human
ucaucaugucuauugucc

SEQ ID NO: 3174920 - RNA, 11 nt, Human
ucauagcagcu

SEQ ID NO: 3174921 - RNA, 12 nt, Human
ucauagaauagc

SEQ ID NO: 3174922 - RNA, 16 nt, Human
ucauagaauagcaugu

SEQ ID NO: 3174923 - RNA, 18 nt, Human
ucauagaauagcauguug

SEQ ID NO: 3174924 - RNA, 21 nt, Human
ucauagaauagcauguuguag

SEQ ID NO: 3174925 - RNA, 22 nt, Human
ucauagaauagcauguuguaga

SEQ ID NO: 3174926 - RNA, 11 nt, Human
ucaguguacau

SEQ ID NO: 3174927 - RNA, 20 nt, Human
ucaguguacauggaauaaca

SEQ ID NO: 3174928 - RNA, 24 nt, Human
uccacuuuuuaacucguuugcuga

SEQ ID NO: 3174929 - RNA, 17 nt, Human
uccagaaacacccacag

SEQ ID NO: 3174930 - RNA, 15 nt, Human
uccagaaacuuguuc

SEQ ID NO: 3174931 - RNA, 18 nt, Human
uccacuuuuccaguauuu

SEQ ID NO: 3174932 - RNA, 20 nt, Human
uccagaaacuuguucuucca

SEQ ID NO: 3174933 - RNA, 17 nt, Human
uccagaaacuuguucuu

SEQ ID NO: 3174934 - RNA, 16 nt, Human
uccagaaacuuguucu

SEQ ID NO: 3174935 - RNA, 23 nt, Human
uccacuuggucugugagaugcua

SEQ ID NO: 3174936 - RNA, 19 nt, Human
uccacuuucuagccagagg

SEQ ID NO: 3174937 - RNA, 16 nt, Human
uccaaagguuucaacu

SEQ ID NO: 3174938 - RNA, 20 nt, Human
uccacuuucuagccagagga

SEQ ID NO: 3174939 - RNA, 21 nt, Human
uccacuuucuagccagaggag

SEQ ID NO: 3174940 - RNA, 21 nt, Human
uccacuuggucugugagaugc

SEQ ID NO: 3174941 - RNA, 17 nt, Human
uccacuuggucugugag

SEQ ID NO: 3174942 - RNA, 14 nt, Human
uccagcaccacacu

SEQ ID NO: 3174943 - RNA, 21 nt, Human
uccagcaauucuccugccuca

SEQ ID NO: 3174944 - RNA, 22 nt, Human
uccagcaauucuccugccucag

SEQ ID NO: 3174945 - RNA, 15 nt, Human
uccagcucuggcaug

SEQ ID NO: 3174946 - RNA, 21 nt, Human
uccagcacaaccuucaagcug

SEQ ID NO: 3174947 - RNA, 12 nt, Human
uccaggagcagc

SEQ ID NO: 3174948 - RNA, 13 nt, Human
uccaggagcagcc

SEQ ID NO: 3174949 - RNA, 14 nt, Human
uccaggagcagcca

SEQ ID NO: 3174950 - RNA, 15 nt, Human
uccaggagcagccac

SEQ ID NO: 3174951 - RNA, 19 nt, Human
uccaggggugggacacccu

SEQ ID NO: 3174952 - RNA, 20 nt, Human
uccaggggugggacacccug

SEQ ID NO: 3174953 - RNA, 21 nt, Human
uccauaaucuggacuccucug

SEQ ID NO: 3174954 - RNA, 14 nt, Human
uccauagagagcaa

SEQ ID NO: 3174955 - RNA, 22 nt, Human
uccaucaagccaagccuccugu

SEQ ID NO: 3174956 - RNA, 23 nt, Human
uccauauuuuuuuccuuacauaa

SEQ ID NO: 3174957 - RNA, 22 nt, Human
uccauauuuuuuuccuuacaua

SEQ ID NO: 3174958 - RNA, 18 nt, Human
uccauauuuuuuuccuua

SEQ ID NO: 3174959 - RNA, 17 nt, Human
uccauauuuuuuuccuu

SEQ ID NO: 3174960 - RNA, 16 nt, Human
uccauauuuuuuuccu

SEQ ID NO: 3174961 - RNA, 16 nt, Human
uccauauuuuuacaac

SEQ ID NO: 3174962 - RNA, 14 nt, Human
uccaucaggccacu

SEQ ID NO: 3174963 - RNA, 21 nt, Human
uccaucaggugaggugugcuc

SEQ ID NO: 3174964 - RNA, 23 nt, Human
uccauggcgaaaacaucuccuua

SEQ ID NO: 3174965 - RNA, 15 nt, Human
uccaugcugccucca

SEQ ID NO: 3174966 - RNA, 14 nt, Human
uccaugcugccucc

SEQ ID NO: 3174967 - RNA, 18 nt, Human
uccagguuuaagcuguua

SEQ ID NO: 3174968 - RNA, 21 nt, Human
uccaggguucucuuguuuuga

SEQ ID NO: 3174969 - RNA, 20 nt, Human
uccagguuuaagcuguuacu

SEQ ID NO: 3174970 - RNA, 17 nt, Human
uccaguaagaucacugu

SEQ ID NO: 3174971 - RNA, 18 nt, Human
uccaguaagaucacuguu

SEQ ID NO: 3174972 - RNA, 19 nt, Human
uccaguaagaucacuguuu

SEQ ID NO: 3174973 - RNA, 20 nt, Human
uccaguaagaucacuguuua

SEQ ID NO: 3174974 - RNA, 15 nt, Human
uccaguaagaucacu

SEQ ID NO: 3174975 - RNA, 14 nt, Human
uccaguaaaauaau

SEQ ID NO: 3174976 - RNA, 14 nt, Human
uccaguuuuucaua

SEQ ID NO: 3174977 - RNA, 19 nt, Human
uccaguuucagaguucuca

SEQ ID NO: 3174978 - RNA, 21 nt, Human
uccaguugaaguuaguggaaa

SEQ ID NO: 3174979 - RNA, 13 nt, Human
uccaguuuauucc

SEQ ID NO: 3174980 - RNA, 15 nt, Human
uccaguuuauuccag

SEQ ID NO: 3174981 - RNA, 16 nt, Human
uccaguuacuuuccaa

SEQ ID NO: 3174982 - RNA, 13 nt, Human
ucccaccuuggcu

SEQ ID NO: 3174983 - RNA, 20 nt, Human
ucccagcugugcucuggaca

SEQ ID NO: 3174984 - RNA, 17 nt, Human
ucccaccuuggcugcag

SEQ ID NO: 3174985 - RNA, 16 nt, Human
ucccaccuuggcugca

SEQ ID NO: 3174986 - RNA, 20 nt, Human
uccaugugggcuaguugggc

SEQ ID NO: 3174987 - RNA, 16 nt, Human
uccauguggacuuagg

SEQ ID NO: 3174988 - RNA, 19 nt, Human
uccauguggacuuaggaag

SEQ ID NO: 3174989 - RNA, 18 nt, Human
uccauguggacuuaggaa

SEQ ID NO: 3174990 - RNA, 20 nt, Human
uccauguggacuuaggaagg

SEQ ID NO: 3174991 - RNA, 22 nt, Human
ucccaccucucucacuccuuga

SEQ ID NO: 3174992 - RNA, 13 nt, Human
uccauuaauuuaa

SEQ ID NO: 3174993 - RNA, 15 nt, Human
uccauuaauuuaaau

SEQ ID NO: 3174994 - RNA, 17 nt, Human
uccauuaauuuaaauga

SEQ ID NO: 3174995 - RNA, 19 nt, Human
uccauuaauuuaaaugauu

SEQ ID NO: 3174996 - RNA, 21 nt, Human
uccauuaauuuaaaugauuua

SEQ ID NO: 3174997 - RNA, 22 nt, Human
uccauuaauuuaaaugauuuaa

SEQ ID NO: 3174998 - RNA, 19 nt, Human
ucccaugagccucagcauc

SEQ ID NO: 3174999 - RNA, 18 nt, Human
ucccaugagccucagcau

SEQ ID NO: 3175000 - RNA, 23 nt, Human
ucccaucuuuuuaaccucuguuc

SEQ ID NO: 3175001 - RNA, 21 nt, Human
ucccaucugugaaaggaaaga

SEQ ID NO: 3175002 - RNA, 15 nt, Human
ucccaucuuccaagg

SEQ ID NO: 3175003 - RNA, 16 nt, Human
ucccaggcgccccuuc

SEQ ID NO: 3175004 - RNA, 21 nt, Human
ucccaucuuuuuaaccucugu

SEQ ID NO: 3175005 - RNA, 22 nt, Human
ucccagcugugcucuggacagg

SEQ ID NO: 3175006 - RNA, 21 nt, Human
ucccagcugugcucuggacag

SEQ ID NO: 3175007 - RNA, 23 nt, Human
ucccagcugugcucuggacaggc

SEQ ID NO: 3175008 - RNA, 19 nt, Human
ucccagcuucggcauuuga

SEQ ID NO: 3175009 - RNA, 20 nt, Human
ucccaggaaagaagcauuuc

SEQ ID NO: 3175010 - RNA, 23 nt, Human
ucccaggcauuccccaggaggcc

SEQ ID NO: 3175011 - RNA, 24 nt, Human
ucccaggcauuccccaggaggcca

SEQ ID NO: 3175012 - RNA, 17 nt, Human
ucccaugagccucagca

SEQ ID NO: 3175013 - RNA, 20 nt, Human
ucccaugagccucagcaucc

SEQ ID NO: 3175014 - RNA, 18 nt, Human
uccccagauugcaacagg

SEQ ID NO: 3175015 - RNA, 13 nt, Human
uccccagauugca

SEQ ID NO: 3175016 - RNA, 22 nt, Human
uccccagcaagugagagcuggg

SEQ ID NO: 3175017 - RNA, 21 nt, Human
uccccagcaagugagagcugg

SEQ ID NO: 3175018 - RNA, 20 nt, Human
uccccagcaagugagagcug

SEQ ID NO: 3175019 - RNA, 23 nt, Human
uccccagauugcaacaggcuggg

SEQ ID NO: 3175020 - RNA, 22 nt, Human
uccccagauugcaacaggcugg

SEQ ID NO: 3175021 - RNA, 20 nt, Human
uccccagauugcaacaggcu

SEQ ID NO: 3175022 - RNA, 19 nt, Human
uccccagauugcaacaggc

SEQ ID NO: 3175023 - RNA, 13 nt, Human
uccccaggaggcc

SEQ ID NO: 3175024 - RNA, 17 nt, Human
ucccccagccccauccu

SEQ ID NO: 3175025 - RNA, 15 nt, Human
uccccaggaggccag

SEQ ID NO: 3175026 - RNA, 16 nt, Human
uccccaggaggccagc

SEQ ID NO: 3175027 - RNA, 20 nt, Human
ucccccagccccauccucug

SEQ ID NO: 3175028 - RNA, 21 nt, Human
ucccccagccccauccucugu

SEQ ID NO: 3175029 - RNA, 17 nt, Human
ucccccauuuuucccag

SEQ ID NO: 3175030 - RNA, 14 nt, Human
uccccaggaggcca

SEQ ID NO: 3175031 - RNA, 22 nt, Human
uccccagcccuuccucugcucc

SEQ ID NO: 3175032 - RNA, 21 nt, Human
uccccagcccuuccucugcuc

SEQ ID NO: 3175033 - RNA, 20 nt, Human
uccccagcccuuccucugcu

SEQ ID NO: 3175034 - RNA, 18 nt, Human
uccccagcccuuccucug

SEQ ID NO: 3175035 - RNA, 21 nt, Human
uccccagccagccuggcuggg

SEQ ID NO: 3175036 - RNA, 20 nt, Human
uccccagccagccuggcugg

SEQ ID NO: 3175037 - RNA, 19 nt, Human
uccccagccagccuggcug

SEQ ID NO: 3175038 - RNA, 13 nt, Human
uccccagccagcc

SEQ ID NO: 3175039 - RNA, 16 nt, Human
uccccagccagccugg

SEQ ID NO: 3175040 - RNA, 14 nt, Human
uccccagccagccu

SEQ ID NO: 3175041 - RNA, 12 nt, Human
ugagcuccuggg

SEQ ID NO: 3175042 - RNA, 15 nt, Human
ugagccucagcaucc

SEQ ID NO: 3175043 - RNA, 19 nt, Human
ugagcugcuuuuuuugaaa

SEQ ID NO: 3175044 - RNA, 18 nt, Human
ugagcugcuuuuuuugaa

SEQ ID NO: 3175045 - RNA, 17 nt, Human
ugagcugcuuuuuuuga

SEQ ID NO: 3175046 - RNA, 17 nt, Human
ugagccucagcauccug

SEQ ID NO: 3175047 - RNA, 21 nt, Human
ugagccgagaucacgccacug

SEQ ID NO: 3175048 - RNA, 19 nt, Human
ugagccgagaucacgccac

SEQ ID NO: 3175049 - RNA, 18 nt, Human
ugagcccuguccugccua

SEQ ID NO: 3175050 - RNA, 21 nt, Human
ugagccucagcauccuggcac

SEQ ID NO: 3175051 - RNA, 18 nt, Human
ugagccucagcauccugg

SEQ ID NO: 3175052 - RNA, 22 nt, Human
ugagccucagcauccuggcacc

SEQ ID NO: 3175053 - RNA, 14 nt, Human
ugagccucagucuc

SEQ ID NO: 3175054 - RNA, 16 nt, Human
ugagcccugaggaggc

SEQ ID NO: 3175055 - RNA, 15 nt, Human
ugagcccuuguuuca

SEQ ID NO: 3175056 - RNA, 24 nt, Human
ugagcccuucggaggaccagggcu

SEQ ID NO: 3175057 - RNA, 13 nt, Human
ugagccccaaaag

SEQ ID NO: 3175058 - RNA, 20 nt, Human
ugagcaucaggccaggcccu

SEQ ID NO: 3175059 - RNA, 18 nt, Human
ugagcaucaggccaggcc

SEQ ID NO: 3175060 - RNA, 19 nt, Human
ugagcaucaggccaggccc

SEQ ID NO: 3175061 - RNA, 15 nt, Human
ugagcccccagcuuc

SEQ ID NO: 3175062 - RNA, 13 nt, Human
ugagcccccagcu

SEQ ID NO: 3175063 - RNA, 22 nt, Human
ugagcccccagcuuccagcagg

SEQ ID NO: 3175064 - RNA, 17 nt, Human
ugagcccccagcuucca

SEQ ID NO: 3175065 - RNA, 16 nt, Human
ugagcccccagcuucc

SEQ ID NO: 3175066 - RNA, 16 nt, Human
ugagcaucaggccagg

SEQ ID NO: 3175067 - RNA, 23 nt, Human
ugagcagugauauucuuuguuaa

SEQ ID NO: 3175068 - RNA, 17 nt, Human
ugagcagggcucagcgg

SEQ ID NO: 3175069 - RNA, 16 nt, Human
ugagcagggcucagcg

SEQ ID NO: 3175070 - RNA, 19 nt, Human
ugagcagggcucagcgggg

SEQ ID NO: 3175071 - RNA, 22 nt, Human
ugagcagugauauucuuuguua

SEQ ID NO: 3175072 - RNA, 20 nt, Human
ugagcagugauauucuuugu

SEQ ID NO: 3175073 - RNA, 17 nt, Human
ugagcagugauauucuu

SEQ ID NO: 3175074 - RNA, 14 nt, Human
ugagcagugauauu

SEQ ID NO: 3175075 - RNA, 17 nt, Human
ugagaacagauaaagau

SEQ ID NO: 3175076 - RNA, 23 nt, Human
ugagaacagauaaagauugugug

SEQ ID NO: 3175077 - RNA, 18 nt, Human
ugagaacagauaaagauu

SEQ ID NO: 3175078 - RNA, 21 nt, Human
ugaccucaggugauccaccca

SEQ ID NO: 3175079 - RNA, 20 nt, Human
ugaccucaggugauccaccc

SEQ ID NO: 3175080 - RNA, 22 nt, Human
ugaccucagcuuugauauuuca

SEQ ID NO: 3175081 - RNA, 16 nt, Human
ugaccucagcuuugau

SEQ ID NO: 3175082 - RNA, 20 nt, Human
ugaccgacagcuuuccagua

SEQ ID NO: 3175083 - RNA, 19 nt, Human
ugagacucgcgacaaugca

SEQ ID NO: 3175084 - RNA, 16 nt, Human
ugagagugaacaaauu

SEQ ID NO: 3175085 - RNA, 20 nt, Human
ugagacucgcgacaaugcaa

SEQ ID NO: 3175086 - RNA, 21 nt, Human
ugagacucgcgacaaugcaaa

SEQ ID NO: 3175087 - RNA, 22 nt, Human
ugagacucgcgacaaugcaaac

SEQ ID NO: 3175088 - RNA, 23 nt, Human
ugagacucgcgacaaugcaaacc

SEQ ID NO: 3175089 - RNA, 15 nt, Human
ugagaucaaaacggu

SEQ ID NO: 3175090 - RNA, 14 nt, Human
ugagaucagccugg

SEQ ID NO: 3175091 - RNA, 15 nt, Human
ugagcagggcucagc

SEQ ID NO: 3175092 - RNA, 14 nt, Human
ugagcagggcucag

SEQ ID NO: 3175093 - RNA, 13 nt, Human
ugagcagggcuca

SEQ ID NO: 3175094 - RNA, 12 nt, Human
ugagcagggcuc

SEQ ID NO: 3175095 - RNA, 17 nt, Human
ugaggcagguccccaga

SEQ ID NO: 3175096 - RNA, 16 nt, Human
ugaggcagguccccag

SEQ ID NO: 3175097 - RNA, 14 nt, Human
ugaggcaggucccc

SEQ ID NO: 3175098 - RNA, 20 nt, Human
ugagcuggggaugucucuca

SEQ ID NO: 3175099 - RNA, 13 nt, Human
ugagcugggauga

SEQ ID NO: 3175100 - RNA, 23 nt, Human
ugaggcuagugugguguuuccug

SEQ ID NO: 3175101 - RNA, 17 nt, Human
ugaggcuaguguggugu

SEQ ID NO: 3175102 - RNA, 23 nt, Human
ugaggcaucgcaauguaagacuc

SEQ ID NO: 3175103 - RNA, 14 nt, Human
ugaggcaguuugag

SEQ ID NO: 3175104 - RNA, 14 nt, Human
ugaggugggagaug

SEQ ID NO: 3175105 - RNA, 12 nt, Human
ugaggugggagg

SEQ ID NO: 3175106 - RNA, 13 nt, Human
ugaggugggagga

SEQ ID NO: 3175107 - RNA, 18 nt, Human
ugaggcuccacuuggucu

SEQ ID NO: 3175108 - RNA, 20 nt, Human
ugaggcuccacuuggucugu

SEQ ID NO: 3175109 - RNA, 13 nt, Human
ugaggcucugccc

SEQ ID NO: 3175110 - RNA, 14 nt, Human
ugaggcucugcccu

SEQ ID NO: 3175111 - RNA, 17 nt, Human
ugagggaacagagaggu

SEQ ID NO: 3175112 - RNA, 23 nt, Human
ugaggcuccuuaggguuuucucu

SEQ ID NO: 3175113 - RNA, 21 nt, Human
ugagggaagaauaaagagcug

SEQ ID NO: 3175114 - RNA, 16 nt, Human
ugaguugauagcacag

SEQ ID NO: 3175115 - RNA, 20 nt, Human
ugaguugauagcacagaccc

SEQ ID NO: 3175116 - RNA, 23 nt, Human
ugaguuugggccccagaggcugg

SEQ ID NO: 3175117 - RNA, 22 nt, Human
ugaguuugggccccagaggcug

SEQ ID NO: 3175118 - RNA, 14 nt, Human
ugaguuucuuagac

SEQ ID NO: 3175119 - RNA, 13 nt, Human
ugaguuucuuaga

SEQ ID NO: 3175120 - RNA, 15 nt, Human
ugaguucuguguauu

SEQ ID NO: 3175121 - RNA, 15 nt, Human
ugaguucuuccugua

SEQ ID NO: 3175122 - RNA, 17 nt, Human
ugaguucuuccuguaau

SEQ ID NO: 3175123 - RNA, 21 nt, Human
ugauaacaauguuuuaacaag

SEQ ID NO: 3175124 - RNA, 20 nt, Human
ugauaacagggauugauuuu

SEQ ID NO: 3175125 - RNA, 20 nt, Human
ugauaaccauagcauuaaua

SEQ ID NO: 3175126 - RNA, 23 nt, Human
ugauaacagggauugauuuuaaa

SEQ ID NO: 3175127 - RNA, 22 nt, Human
ugauaacagggauugauuuuaa

SEQ ID NO: 3175128 - RNA, 21 nt, Human
ugauaacagggauugauuuua

SEQ ID NO: 3175129 - RNA, 20 nt, Human
ugauaacaauguuuuaacaa

SEQ ID NO: 3175130 - RNA, 17 nt, Human
ugauaacaauguuuuaa

SEQ ID NO: 3175131 - RNA, 19 nt, Human
ugaguuuugggaaguuaaa

SEQ ID NO: 3175132 - RNA, 22 nt, Human
ugaguuuugggaaguuaaaggg

SEQ ID NO: 3175133 - RNA, 20 nt, Human
ugaguuuguuucuuugaauu

SEQ ID NO: 3175134 - RNA, 19 nt, Human
ugaguuuguuucuuugaau

SEQ ID NO: 3175135 - RNA, 14 nt, Human
ugaguuuguuucuu

SEQ ID NO: 3175136 - RNA, 13 nt, Human
ugaguuuguuucu

SEQ ID NO: 3175137 - RNA, 13 nt, Human
ugagucugaaggc

SEQ ID NO: 3175138 - RNA, 15 nt, Human
ugagucugaaggcug

SEQ ID NO: 3175139 - RNA, 17 nt, Human
ugagucugaaggcuggg

SEQ ID NO: 3175140 - RNA, 18 nt, Human
ugagucugaaggcugggu

SEQ ID NO: 3175141 - RNA, 15 nt, Human
ugagugagaggggag

SEQ ID NO: 3175142 - RNA, 13 nt, Human
ugagugagaauau

SEQ ID NO: 3175143 - RNA, 22 nt, Human
ugagucuuuuuuuuuuaaguga

SEQ ID NO: 3175144 - RNA, 20 nt, Human
ugagucuuuuuuuuuuaagu

SEQ ID NO: 3175145 - RNA, 12 nt, Human
ugagucuuuuuu

SEQ ID NO: 3175146 - RNA, 17 nt, Human
ugagucuguucugguaa

SEQ ID NO: 3175147 - RNA, 14 nt, Human
ugagucuguucugg

SEQ ID NO: 3175148 - RNA, 16 nt, Human
ugagucuguucuggua

SEQ ID NO: 3175149 - RNA, 19 nt, Human
ugagucuucauguucccac

SEQ ID NO: 3175150 - RNA, 18 nt, Human
ugagucuucauguuccca

SEQ ID NO: 3175151 - RNA, 19 nt, Human
ugagucgaggacagggagg

SEQ ID NO: 3175152 - RNA, 18 nt, Human
ugagucgaggacagggag

SEQ ID NO: 3175153 - RNA, 13 nt, Human
ugaguccagaagu

SEQ ID NO: 3175154 - RNA, 19 nt, Human
ugaguccagaaguuugaga

SEQ ID NO: 3175155 - RNA, 15 nt, Human
ugagucccaggcuga

SEQ ID NO: 3175156 - RNA, 18 nt, Human
ugagguggcaugguccau

SEQ ID NO: 3175157 - RNA, 21 nt, Human
ugauuaguaagucuugccuau

SEQ ID NO: 3175158 - RNA, 14 nt, Human
ugauuaguaagucu

SEQ ID NO: 3175159 - RNA, 16 nt, Human
ugauuaccagggacug

SEQ ID NO: 3175160 - RNA, 19 nt, Human
ugauguugaugcaauccuu

SEQ ID NO: 3175161 - RNA, 15 nt, Human
ugauguugaugcaau

SEQ ID NO: 3175162 - RNA, 20 nt, Human
ugauguugacaucacuggca

SEQ ID NO: 3175163 - RNA, 14 nt, Human
ugauguugaugcaa

SEQ ID NO: 3175164 - RNA, 20 nt, Human
ugauguucuuucacccuuuu

SEQ ID NO: 3175165 - RNA, 20 nt, Human
ugauucaacagguuuuccug

SEQ ID NO: 3175166 - RNA, 13 nt, Human
ugauucagacagc

SEQ ID NO: 3175167 - RNA, 14 nt, Human
ugauucagacagcu

SEQ ID NO: 3175168 - RNA, 15 nt, Human
ugauucagacagcug

SEQ ID NO: 3175169 - RNA, 16 nt, Human
ugauucagacagcugc

SEQ ID NO: 3175170 - RNA, 21 nt, Human
ugauucacauguuuucaaaug

SEQ ID NO: 3175171 - RNA, 20 nt, Human
ugauucacauguuuucaaau

SEQ ID NO: 3175172 - RNA, 12 nt, Human
ugauucacagug

SEQ ID NO: 3175173 - RNA, 19 nt, Human
ugauucacauguuuucaaa

SEQ ID NO: 3175174 - RNA, 18 nt, Human
ugauucacauguuuucaa

SEQ ID NO: 3175175 - RNA, 17 nt, Human
ugauucacauguuuuca

SEQ ID NO: 3175176 - RNA, 16 nt, Human
ugauucacauguuuuc

SEQ ID NO: 3175177 - RNA, 15 nt, Human
ugauucacauguuuu

SEQ ID NO: 3175178 - RNA, 14 nt, Human
ugauucacauguuu

SEQ ID NO: 3175179 - RNA, 13 nt, Human
ugauucacauguu

SEQ ID NO: 3175180 - RNA, 14 nt, Human
ugauugaagaaaca

SEQ ID NO: 3175181 - RNA, 12 nt, Human
ugauugaagaaa

SEQ ID NO: 3175182 - RNA, 11 nt, Human
ugauucucucc

SEQ ID NO: 3175183 - RNA, 21 nt, Human
ugauugcagaauuguuuagau

SEQ ID NO: 3175184 - RNA, 20 nt, Human
ugauugcagaauuguuuaga

SEQ ID NO: 3175185 - RNA, 18 nt, Human
ugauugaagaaacagcua

SEQ ID NO: 3175186 - RNA, 18 nt, Human
ugauucagacagcugccu

SEQ ID NO: 3175187 - RNA, 19 nt, Human
ugauucagacagcugccug

SEQ ID NO: 3175188 - RNA, 20 nt, Human
ugauucagacagcugccugg

SEQ ID NO: 3175189 - RNA, 21 nt, Human
ugauucagacagcugccuggg

SEQ ID NO: 3175190 - RNA, 23 nt, Human
ugauucagacagcugccugggau

SEQ ID NO: 3175191 - RNA, 21 nt, Human
ugauucuccugccucagccuc

SEQ ID NO: 3175192 - RNA, 20 nt, Human
ugauucuccugccucagccu

SEQ ID NO: 3175193 - RNA, 16 nt, Human
ugauugugucucuugg

SEQ ID NO: 3175194 - RNA, 21 nt, Human
ugauuuaaacuucuuaacugg

SEQ ID NO: 3175195 - RNA, 13 nt, Human
ugauuuaaacuuc

SEQ ID NO: 3175196 - RNA, 17 nt, Human
ugauugguuucucuucu

SEQ ID NO: 3175197 - RNA, 13 nt, Human
ugauuggaggggg

SEQ ID NO: 3175198 - RNA, 20 nt, Human
ugauuggaagggcuuuucaa

SEQ ID NO: 3175199 - RNA, 19 nt, Human
ugauuggaagggcuuuuca

SEQ ID NO: 3175200 - RNA, 22 nt, Human
ugauugcuuuuaaaauuuuaag

SEQ ID NO: 3175201 - RNA, 20 nt, Human
ugauugcuuuuaaaauuuua

SEQ ID NO: 3175202 - RNA, 19 nt, Human
ugauugcuuuuaaaauuuu

SEQ ID NO: 3175203 - RNA, 17 nt, Human
ugauugcuuuuaaaauu

SEQ ID NO: 3175204 - RNA, 16 nt, Human
ugauugcuuuuaaaau

SEQ ID NO: 3175205 - RNA, 14 nt, Human
ugauugcuuuuaaa

SEQ ID NO: 3175206 - RNA, 21 nt, Human
ugauuggaggggggagguggg

SEQ ID NO: 3175207 - RNA, 23 nt, Human
ugauuggaagggcuuuucaaaau

SEQ ID NO: 3175208 - RNA, 22 nt, Human
ugauuggaagggcuuuucaaaa

SEQ ID NO: 3175209 - RNA, 20 nt, Human
ugauuggcaggaguuggaag

SEQ ID NO: 3175210 - RNA, 14 nt, Human
ugauguguuguucu

SEQ ID NO: 3175211 - RNA, 22 nt, Human
ugauguguuguucuuggcaaua

SEQ ID NO: 3175212 - RNA, 16 nt, Human
ugauguguuaucucuu

SEQ ID NO: 3175213 - RNA, 20 nt, Human
ugauguguugccacuuucca

SEQ ID NO: 3175214 - RNA, 18 nt, Human
ugauguguugccacuuuc

SEQ ID NO: 3175215 - RNA, 22 nt, Human
ugaugucagcaguugcugguaa

SEQ ID NO: 3175216 - RNA, 23 nt, Human
ugaugucagcaguugcugguaaa

SEQ ID NO: 3175217 - RNA, 18 nt, Human
ugaugucagcaguugcug

SEQ ID NO: 3175218 - RNA, 18 nt, Human
ugaugucaauaacaguau

SEQ ID NO: 3175219 - RNA, 14 nt, Human
ugaugguuccccug

SEQ ID NO: 3175220 - RNA, 13 nt, Human
ugaugcuguauuc

SEQ ID NO: 3175221 - RNA, 16 nt, Human
ugaugcuucuucagag

SEQ ID NO: 3175222 - RNA, 17 nt, Human
ugaugcuucuucagaga

SEQ ID NO: 3175223 - RNA, 15 nt, Human
ugaugccugugaacu

SEQ ID NO: 3175224 - RNA, 20 nt, Human
ugaugccugugaacugaacu

SEQ ID NO: 3175225 - RNA, 21 nt, Human
ugaugccugugaacugaacuc

SEQ ID NO: 3175226 - RNA, 16 nt, Human
ugaugcgcaguugcug

SEQ ID NO: 3175227 - RNA, 17 nt, Human
ugaucuuuaaaauacac

SEQ ID NO: 3175228 - RNA, 16 nt, Human
ugaucuuugcagacag

SEQ ID NO: 3175229 - RNA, 15 nt, Human
ugaugauuucagaaa

SEQ ID NO: 3175230 - RNA, 23 nt, Human
ugaugcaauccuuacaaaugauu

SEQ ID NO: 3175231 - RNA, 19 nt, Human
ugaugcaauccuuacaaau

SEQ ID NO: 3175232 - RNA, 18 nt, Human
ugaugcaauccuuacaaa

SEQ ID NO: 3175233 - RNA, 16 nt, Human
ugaugauuucagaaac

SEQ ID NO: 3175234 - RNA, 21 nt, Human
ugaugcauuaaaagaaaauaa

SEQ ID NO: 3175235 - RNA, 19 nt, Human
ugaugcauuaaaagaaaau

SEQ ID NO: 3175236 - RNA, 22 nt, Human
ugaugcaugcuauucacaauua

SEQ ID NO: 3175237 - RNA, 18 nt, Human
ugaugcauuaaaagaaaa

SEQ ID NO: 3175238 - RNA, 17 nt, Human
ugaugcauuaaaagaaa

SEQ ID NO: 3175239 - RNA, 14 nt, Human
ugaucuuuaaaaua

SEQ ID NO: 3175240 - RNA, 21 nt, Human
ugaucuuccucugcuaaauug

SEQ ID NO: 3175241 - RNA, 20 nt, Human
ugaucuuccucugcuaaauu

SEQ ID NO: 3175242 - RNA, 18 nt, Human
ugaucuuccucugcuaaa

SEQ ID NO: 3175243 - RNA, 20 nt, Human
ugaucuucuuuauaauucua

SEQ ID NO: 3175244 - RNA, 12 nt, Human
ugaucuucacua

SEQ ID NO: 3175245 - RNA, 17 nt, Human
ugaucuuccucugcuaa

SEQ ID NO: 3175246 - RNA, 16 nt, Human
ugaucuuccucugcua

SEQ ID NO: 3175247 - RNA, 15 nt, Human
ugaucuguuauaggu

SEQ ID NO: 3175248 - RNA, 15 nt, Human
ugaucugugggcaca

SEQ ID NO: 3175249 - RNA, 23 nt, Human
ugaucugugccuuuuuuauaucu

SEQ ID NO: 3175250 - RNA, 14 nt, Human
ugaucugugccuuu

SEQ ID NO: 3175251 - RNA, 18 nt, Human
ugauccacccaccucagc

SEQ ID NO: 3175252 - RNA, 17 nt, Human
ugauccacccaccucag

SEQ ID NO: 3175253 - RNA, 14 nt, Human
ugaucucauuguuc

SEQ ID NO: 3175254 - RNA, 19 nt, Human
ugaucauucaccaguacau

SEQ ID NO: 3175255 - RNA, 18 nt, Human
ugauagcaaauggccuca

SEQ ID NO: 3175256 - RNA, 17 nt, Human
ugauagcaaaaucaaga

SEQ ID NO: 3175257 - RNA, 19 nt, Human
ugaucaguaguuugcauuu

SEQ ID NO: 3175258 - RNA, 17 nt, Human
ugaucaguaguuugcau

SEQ ID NO: 3175259 - RNA, 12 nt, Human
ugauaagaaaac

SEQ ID NO: 3175260 - RNA, 16 nt, Human
ugauagcaaaaucaag

SEQ ID NO: 3175261 - RNA, 13 nt, Human
ugauagcacagac

SEQ ID NO: 3175262 - RNA, 16 nt, Human
ugauccacccaccuca

SEQ ID NO: 3175263 - RNA, 15 nt, Human
ugauccaagcugguc

SEQ ID NO: 3175264 - RNA, 14 nt, Human
ugauccaagcuggu

SEQ ID NO: 3175265 - RNA, 13 nt, Human
ugauccaagcugg

SEQ ID NO: 3175266 - RNA, 17 nt, Human
ugacauacauccaacau

SEQ ID NO: 3175267 - RNA, 19 nt, Human
ugacagagugagacucugu

SEQ ID NO: 3175268 - RNA, 22 nt, Human
ugacagagggauggaggaagaa

SEQ ID NO: 3175269 - RNA, 17 nt, Human
ugacagagugagacucu

SEQ ID NO: 3175270 - RNA, 14 nt, Human
ugacagagugagac

SEQ ID NO: 3175271 - RNA, 23 nt, Human
ugacagaggcagccccauucugc

SEQ ID NO: 3175272 - RNA, 18 nt, Human
ugacagaggcagccccau

SEQ ID NO: 3175273 - RNA, 17 nt, Human
ugacagaggcagcccca

SEQ ID NO: 3175274 - RNA, 16 nt, Human
ugacagaggcagcccc

SEQ ID NO: 3175275 - RNA, 15 nt, Human
ugacagaggcagccc

SEQ ID NO: 3175276 - RNA, 14 nt, Human
ugacagaggcagcc

SEQ ID NO: 3175277 - RNA, 23 nt, Human
ugacagacacaggcccggcucca

SEQ ID NO: 3175278 - RNA, 20 nt, Human
ugacagacacaggcccggcu

SEQ ID NO: 3175279 - RNA, 13 nt, Human
ugacagaggcagc

SEQ ID NO: 3175280 - RNA, 16 nt, Human
ugacagacagcccucc

SEQ ID NO: 3175281 - RNA, 23 nt, Human
ugacagaaaauauguauuaacac

SEQ ID NO: 3175282 - RNA, 20 nt, Human
ugacagaaaauauguauuaa

SEQ ID NO: 3175283 - RNA, 19 nt, Human
ugacacuuuucauaucauu

SEQ ID NO: 3175284 - RNA, 20 nt, Human
ugacacuuuucauaucauuu

SEQ ID NO: 3175285 - RNA, 19 nt, Human
ugacagaaaauauguauua

SEQ ID NO: 3175286 - RNA, 14 nt, Human
ugacagaaaauaug

SEQ ID NO: 3175287 - RNA, 14 nt, Human
ugacaauguuuaca

SEQ ID NO: 3175288 - RNA, 21 nt, Human
ugacaagaguuggggacagaa

SEQ ID NO: 3175289 - RNA, 14 nt, Human
ugaauuggaaugca

SEQ ID NO: 3175290 - RNA, 15 nt, Human
ugaauuggaaugcac

SEQ ID NO: 3175291 - RNA, 15 nt, Human
ugaauuguaaaagca

SEQ ID NO: 3175292 - RNA, 21 nt, Human
ugaauuguaaaagcaacauca

SEQ ID NO: 3175293 - RNA, 14 nt, Human
ugacaagcuggcuu

SEQ ID NO: 3175294 - RNA, 21 nt, Human
ugacaagcuggcuuacacugg

SEQ ID NO: 3175295 - RNA, 23 nt, Human
ugacaagcuggcuuacacuggca

SEQ ID NO: 3175296 - RNA, 18 nt, Human
ugaccacugcagaagaca

SEQ ID NO: 3175297 - RNA, 20 nt, Human
ugaccacugcagaagacagu

SEQ ID NO: 3175298 - RNA, 19 nt, Human
ugaccagcaccaucucucc

SEQ ID NO: 3175299 - RNA, 15 nt, Human
ugacaugucuuuucu

SEQ ID NO: 3175300 - RNA, 18 nt, Human
ugacauguauuuuuuccu

SEQ ID NO: 3175301 - RNA, 13 nt, Human
ugacaugucuuuu

SEQ ID NO: 3175302 - RNA, 14 nt, Human
ugaccauucuccac

SEQ ID NO: 3175303 - RNA, 14 nt, Human
ugaccaucauuuca

SEQ ID NO: 3175304 - RNA, 13 nt, Human
ugaccauaaaauu

SEQ ID NO: 3175305 - RNA, 18 nt, Human
ugaccgacagcuuuccag

SEQ ID NO: 3175306 - RNA, 13 nt, Human
ugaccgugaggcc

SEQ ID NO: 3175307 - RNA, 14 nt, Human
ugaccgugaggcca

SEQ ID NO: 3175308 - RNA, 16 nt, Human
ugaccgugaggccaga

SEQ ID NO: 3175309 - RNA, 20 nt, Human
ugaccgugaggccagagaca

SEQ ID NO: 3175310 - RNA, 17 nt, Human
ugaccauucuccaccug

SEQ ID NO: 3175311 - RNA, 18 nt, Human
ugaccauucuccaccugc

SEQ ID NO: 3175312 - RNA, 16 nt, Human
ugaccauucuccaccu

SEQ ID NO: 3175313 - RNA, 23 nt, Human
ugaccagccuccaugcugccucc

SEQ ID NO: 3175314 - RNA, 19 nt, Human
ugaccaguggcuauggccu

SEQ ID NO: 3175315 - RNA, 18 nt, Human
ugaccaguauaaaauuac

SEQ ID NO: 3175316 - RNA, 22 nt, Human
ugaccaggcaccuccccucccg

SEQ ID NO: 3175317 - RNA, 14 nt, Human
ugaauaaagacacc

SEQ ID NO: 3175318 - RNA, 13 nt, Human
ugaaucuuuaauu

SEQ ID NO: 3175319 - RNA, 18 nt, Human
ugaauccaacugcuuaaa

SEQ ID NO: 3175320 - RNA, 21 nt, Human
ugaauccaaaagaaaaacagc

SEQ ID NO: 3175321 - RNA, 18 nt, Human
ugaauccaaaagaaaaac

SEQ ID NO: 3175322 - RNA, 17 nt, Human
ugaauccaaaagaaaaa

SEQ ID NO: 3175323 - RNA, 20 nt, Human
ugaaugaauggcuaagcaaa

SEQ ID NO: 3175324 - RNA, 22 nt, Human
ugaaugacuuccccaauaucuu

SEQ ID NO: 3175325 - RNA, 21 nt, Human
ugaaugacuuccccaauaucu

SEQ ID NO: 3175326 - RNA, 17 nt, Human
ugaaugacuaagaggaa

SEQ ID NO: 3175327 - RNA, 18 nt, Human
ugaauuauuauauacaua

SEQ ID NO: 3175328 - RNA, 19 nt, Human
ugaauucaccacagacuuu

SEQ ID NO: 3175329 - RNA, 12 nt, Human
ugaauugaaguu

SEQ ID NO: 3175330 - RNA, 16 nt, Human
ugaauugaaguuucaa

SEQ ID NO: 3175331 - RNA, 17 nt, Human
ugaauugaaguuucaag

SEQ ID NO: 3175332 - RNA, 19 nt, Human
ugaauugaaguuucaaguu

SEQ ID NO: 3175333 - RNA, 13 nt, Human
ugaauugauuuug

SEQ ID NO: 3175334 - RNA, 20 nt, Human
ugaauugagccuaaaaauaa

SEQ ID NO: 3175335 - RNA, 18 nt, Human
ugaauugagccuaaaaau

SEQ ID NO: 3175336 - RNA, 17 nt, Human
ugaauugagccuaaaaa

SEQ ID NO: 3175337 - RNA, 17 nt, Human
ugaauugacuuauuuca

SEQ ID NO: 3175338 - RNA, 17 nt, Human
ugaauuaccuggauguu

SEQ ID NO: 3175339 - RNA, 15 nt, Human
ugaauuagugaguau

SEQ ID NO: 3175340 - RNA, 18 nt, Human
ugaauuagugaguauagu

SEQ ID NO: 3175341 - RNA, 15 nt, Human
ugaauuaucagcaaa

SEQ ID NO: 3175342 - RNA, 17 nt, Human
ugaauuaucagcaaaga

SEQ ID NO: 3175343 - RNA, 18 nt, Human
ugaauuaucagcaaagaa

SEQ ID NO: 3175344 - RNA, 19 nt, Human
ugaauuaucagcaaagaaa

SEQ ID NO: 3175345 - RNA, 20 nt, Human
ugaauuaucagcaaagaaaa

SEQ ID NO: 3175346 - RNA, 13 nt, Human
ugaauuacuaacu

SEQ ID NO: 3175347 - RNA, 16 nt, Human
ugaauuacuaacuucu

SEQ ID NO: 3175348 - RNA, 15 nt, Human
ugaauuacuaacuuc

SEQ ID NO: 3175349 - RNA, 21 nt, Human
ugaauuacuaacuucuaaaac

SEQ ID NO: 3175350 - RNA, 20 nt, Human
ugaauuacuaacuucuaaaa

SEQ ID NO: 3175351 - RNA, 19 nt, Human
ugaauuacuaacuucuaaa

SEQ ID NO: 3175352 - RNA, 18 nt, Human
ugaauuacuaacuucuaa

SEQ ID NO: 3175353 - RNA, 20 nt, Human
ugaauguugcaaugugaaaa

SEQ ID NO: 3175354 - RNA, 22 nt, Human
ugaagucaugcuccccugugcc

SEQ ID NO: 3175355 - RNA, 13 nt, Human
ugaagugccuuaa

SEQ ID NO: 3175356 - RNA, 21 nt, Human
ugaagucacugcacagugcau

SEQ ID NO: 3175357 - RNA, 16 nt, Human
ugaagucaugcucccc

SEQ ID NO: 3175358 - RNA, 16 nt, Human
ugaaggccacuugagu

SEQ ID NO: 3175359 - RNA, 18 nt, Human
ugaaggcagaaagcaaaa

SEQ ID NO: 3175360 - RNA, 17 nt, Human
ugaaggccccgcccagg

SEQ ID NO: 3175361 - RNA, 12 nt, Human
ugaaguuauauu

SEQ ID NO: 3175362 - RNA, 19 nt, Human
ugaaguuauguguauguga

SEQ ID NO: 3175363 - RNA, 16 nt, Human
ugaaguuauauuuccu

SEQ ID NO: 3175364 - RNA, 13 nt, Human
ugaaguuauauuu

SEQ ID NO: 3175365 - RNA, 15 nt, Human
ugaaguuaguggaaa

SEQ ID NO: 3175366 - RNA, 16 nt, Human
ugaaguuaguggaaau

SEQ ID NO: 3175367 - RNA, 21 nt, Human
ugaaguuaguggaaaucugaa

SEQ ID NO: 3175368 - RNA, 10 nt, Human
ugaaguguug

SEQ ID NO: 3175369 - RNA, 16 nt, Human
ugaagugccuuaaaua

SEQ ID NO: 3175370 - RNA, 20 nt, Human
ugaauaaacuagauuacauu

SEQ ID NO: 3175371 - RNA, 21 nt, Human
ugaaguucugccucugaugua

SEQ ID NO: 3175372 - RNA, 22 nt, Human
ugaaguucugccucugauguau

SEQ ID NO: 3175373 - RNA, 20 nt, Human
ugaaggacauugcggacagc

SEQ ID NO: 3175374 - RNA, 19 nt, Human
ugaaggacauugcggacag

SEQ ID NO: 3175375 - RNA, 22 nt, Human
ugaaggacauugcggacagcca

SEQ ID NO: 3175376 - RNA, 21 nt, Human
ugaaggaccuucacucuaaga

SEQ ID NO: 3175377 - RNA, 15 nt, Human
ugaaggccccgccca

SEQ ID NO: 3175378 - RNA, 16 nt, Human
ugaaggccccgcccag

SEQ ID NO: 3175379 - RNA, 16 nt, Human
ugaaggagagcccuuc

SEQ ID NO: 3175380 - RNA, 15 nt, Human
ugaaggcagaaagca

SEQ ID NO: 3175381 - RNA, 17 nt, Human
ugaacuccuggccucaa

SEQ ID NO: 3175382 - RNA, 15 nt, Human
ugaaccaaucuggau

SEQ ID NO: 3175383 - RNA, 16 nt, Human
ugaacucugacaacag

SEQ ID NO: 3175384 - RNA, 14 nt, Human
ugaacucugagaga

SEQ ID NO: 3175385 - RNA, 12 nt, Human
ugaacucugaga

SEQ ID NO: 3175386 - RNA, 14 nt, Human
ugaagauacuuugu

SEQ ID NO: 3175387 - RNA, 15 nt, Human
ugaagauacuuugua

SEQ ID NO: 3175388 - RNA, 12 nt, Human
ugaagauacuuu

SEQ ID NO: 3175389 - RNA, 20 nt, Human
ugaaggaauaaauugcuccu

SEQ ID NO: 3175390 - RNA, 16 nt, Human
ugaagauacuuuguau

SEQ ID NO: 3175391 - RNA, 17 nt, Human
ugaagauacuuuguauu

SEQ ID NO: 3175392 - RNA, 15 nt, Human
ugaacagcggcugga

SEQ ID NO: 3175393 - RNA, 21 nt, Human
ugaacagaugaccccugccca

SEQ ID NO: 3175394 - RNA, 19 nt, Human
ugaacagaggccacauuac

SEQ ID NO: 3175395 - RNA, 22 nt, Human
ugaacagcggcuggacuuggag

SEQ ID NO: 3175396 - RNA, 21 nt, Human
ugaacagcggcuggacuugga

SEQ ID NO: 3175397 - RNA, 12 nt, Human
ugaacagugcac

SEQ ID NO: 3175398 - RNA, 19 nt, Human
ugaacaggugggugucugc

SEQ ID NO: 3175399 - RNA, 15 nt, Human
ugaacaagcauucuc

SEQ ID NO: 3175400 - RNA, 15 nt, Human
ugaacaagucccugu

SEQ ID NO: 3175401 - RNA, 16 nt, Human
ugaacuccuggccuca

SEQ ID NO: 3175402 - RNA, 20 nt, Human
ugaaccaccacacccagccc

SEQ ID NO: 3175403 - RNA, 17 nt, Human
ugaaccaccacacccag

SEQ ID NO: 3175404 - RNA, 23 nt, Human
ugaaccacaucuugcucugcuga

SEQ ID NO: 3175405 - RNA, 22 nt, Human
ugaaccaagaacuuuccaggaa

SEQ ID NO: 3175406 - RNA, 22 nt, Human
ugaaccacaucuugcucugcug

SEQ ID NO: 3175407 - RNA, 22 nt, Human
ugaacaguuuaugcagugcugc

SEQ ID NO: 3175408 - RNA, 20 nt, Human
ugaacauugguucuuucauu

SEQ ID NO: 3175409 - RNA, 22 nt, Human
ugaacauugcauauaacuuaua

SEQ ID NO: 3175410 - RNA, 12 nt, Human
ugaacauugcau

SEQ ID NO: 3175411 - RNA, 14 nt, Human
ugaaauucacaaag

SEQ ID NO: 3175412 - RNA, 18 nt, Human
ugaaauucacaaaguuaa

SEQ ID NO: 3175413 - RNA, 13 nt, Human
ugaaauucuauuu

SEQ ID NO: 3175414 - RNA, 12 nt, Human
ugaaauuacccu

SEQ ID NO: 3175415 - RNA, 16 nt, Human
ugaaaucaguuacucu

SEQ ID NO: 3175416 - RNA, 17 nt, Human
ugaaaucaguuacucuu

SEQ ID NO: 3175417 - RNA, 17 nt, Human
ugaaaucaguaaacacu

SEQ ID NO: 3175418 - RNA, 17 nt, Human
ugaaaucauauuuggaa

SEQ ID NO: 3175419 - RNA, 22 nt, Human
ugaaaucaguaaacacugugua

SEQ ID NO: 3175420 - RNA, 20 nt, Human
ugaaaucaguaaacacugug

SEQ ID NO: 3175421 - RNA, 19 nt, Human
ugaaaucaguaaacacugu

SEQ ID NO: 3175422 - RNA, 17 nt, Human
ugaaaugugugugaugu

SEQ ID NO: 3175423 - RNA, 16 nt, Human
ugaaaugugugugaug

SEQ ID NO: 3175424 - RNA, 14 nt, Human
ugaaauguguguga

SEQ ID NO: 3175425 - RNA, 12 nt, Human
ugaaaugugugu

SEQ ID NO: 3175426 - RNA, 24 nt, Human
ugaaaugugugugaugugacauuu

SEQ ID NO: 3175427 - RNA, 15 nt, Human
ugaaauguuaacaau

SEQ ID NO: 3175428 - RNA, 21 nt, Human
ugaaauguuaacaaugccuau

SEQ ID NO: 3175429 - RNA, 22 nt, Human
ugaaaugugugugaugugacau

SEQ ID NO: 3175430 - RNA, 21 nt, Human
ugaaaugugugugaugugaca

SEQ ID NO: 3175431 - RNA, 20 nt, Human
ugaaaugugugugaugugac

SEQ ID NO: 3175432 - RNA, 19 nt, Human
ugaaaugugugugauguga

SEQ ID NO: 3175433 - RNA, 22 nt, Human
ugaaacaacaaauaggaauugu

SEQ ID NO: 3175434 - RNA, 14 nt, Human
ugaaacauuuuguc

SEQ ID NO: 3175435 - RNA, 18 nt, Human
ugaaacauugcuuuuaaa

SEQ ID NO: 3175436 - RNA, 21 nt, Human
ugaaacauugcuuuuaaaacu

SEQ ID NO: 3175437 - RNA, 19 nt, Human
ugaaacauugcuuuuaaaa

SEQ ID NO: 3175438 - RNA, 18 nt, Human
ugaaaccaaauguaacua

SEQ ID NO: 3175439 - RNA, 14 nt, Human
ugaaaagcaauauu

SEQ ID NO: 3175440 - RNA, 16 nt, Human
ugaaaagcaauauugu

SEQ ID NO: 3175441 - RNA, 19 nt, Human
ugaaaagcaauauuguaua

SEQ ID NO: 3175442 - RNA, 18 nt, Human
ugaaagaggcagcuugaa

SEQ ID NO: 3175443 - RNA, 20 nt, Human
ugaaaccccuguaggccuca

SEQ ID NO: 3175444 - RNA, 18 nt, Human
ugaaagaggaaugaagua

SEQ ID NO: 3175445 - RNA, 23 nt, Human
ugaaagaggccaaacaggcccuc

SEQ ID NO: 3175446 - RNA, 15 nt, Human
ugaaagagucuuucu

SEQ ID NO: 3175447 - RNA, 23 nt, Human
ugaaagcagggacuugaacccau

SEQ ID NO: 3175448 - RNA, 18 nt, Human
ugaaagauggcugugccu

SEQ ID NO: 3175449 - RNA, 18 nt, Human
ugaaagcccugagcuuuc

SEQ ID NO: 3175450 - RNA, 15 nt, Human
ugaaagguagacuuu

SEQ ID NO: 3175451 - RNA, 18 nt, Human
ugaaagguagacuuuuau

SEQ ID NO: 3175452 - RNA, 18 nt, Human
ugaaagggcccagagagg

SEQ ID NO: 3175453 - RNA, 13 nt, Human
ugaaagggcccag

SEQ ID NO: 3175454 - RNA, 11 nt, Human
ugaaaggcuuu

SEQ ID NO: 3175455 - RNA, 20 nt, Human
ugaaaggcaguagucauuuu

SEQ ID NO: 3175456 - RNA, 15 nt, Human
ugaaaggcuuuucaa

SEQ ID NO: 3175457 - RNA, 21 nt, Human
ugaaaggcuuuucaaccacaa

SEQ ID NO: 3175458 - RNA, 17 nt, Human
ucuuucaacucauugca

SEQ ID NO: 3175459 - RNA, 20 nt, Human
ucuuucaacaguuucaaaau

SEQ ID NO: 3175460 - RNA, 23 nt, Human
ucuuucacccuuuucuguuugcu

SEQ ID NO: 3175461 - RNA, 18 nt, Human
ucuuucaagggcuuuccu

SEQ ID NO: 3175462 - RNA, 21 nt, Human
ucuuucaagggcuuuccugug

SEQ ID NO: 3175463 - RNA, 20 nt, Human
ucuuucaagggcuuuccugu

SEQ ID NO: 3175464 - RNA, 23 nt, Human
ucuuguuuuuaaguuugcacuca

SEQ ID NO: 3175465 - RNA, 16 nt, Human
ucuuguuuuuaaguuu

SEQ ID NO: 3175466 - RNA, 16 nt, Human
ucuuguuuugcuuccc

SEQ ID NO: 3175467 - RNA, 21 nt, Human
ucuuguuuuuaaguuugcacu

SEQ ID NO: 3175468 - RNA, 17 nt, Human
ucuuguuuuuaaguuug

SEQ ID NO: 3175469 - RNA, 14 nt, Human
ucuugcuugaacuu

SEQ ID NO: 3175470 - RNA, 16 nt, Human
ucuuguguguuuauug

SEQ ID NO: 3175471 - RNA, 21 nt, Human
ucuuguguguuuauugucaaa

SEQ ID NO: 3175472 - RNA, 19 nt, Human
ucuuguuaugguagaaaaa

SEQ ID NO: 3175473 - RNA, 15 nt, Human
ucuuguucaggaaaa

SEQ ID NO: 3175474 - RNA, 14 nt, Human
ucuuguugauaaaa

SEQ ID NO: 3175475 - RNA, 16 nt, Human
ucuuguugauaaaaau

SEQ ID NO: 3175476 - RNA, 11 nt, Human
ucuuguugguu

SEQ ID NO: 3175477 - RNA, 13 nt, Human
ucuuguuuugcuu

SEQ ID NO: 3175478 - RNA, 13 nt, Human
ucuuguuuugaaa

SEQ ID NO: 3175479 - RNA, 16 nt, Human
ucuuguuuugaaaaua

SEQ ID NO: 3175480 - RNA, 14 nt, Human
ucuuguuucucccg

SEQ ID NO: 3175481 - RNA, 16 nt, Human
ucuccucuugccacug

SEQ ID NO: 3175482 - RNA, 13 nt, Human
ucuccucuugcca

SEQ ID NO: 3175483 - RNA, 16 nt, Human
ucucccuucauccuuc

SEQ ID NO: 3175484 - RNA, 20 nt, Human
ucuccucugcugcuggcugg

SEQ ID NO: 3175485 - RNA, 23 nt, Human
ucuugcaauggcagccuuggcaa

SEQ ID NO: 3175486 - RNA, 17 nt, Human
ucuccucuugccacugc

SEQ ID NO: 3175487 - RNA, 13 nt, Human
ucuuugauucugu

SEQ ID NO: 3175488 - RNA, 14 nt, Human
ucuuugcaguuccc

SEQ ID NO: 3175489 - RNA, 22 nt, Human
ucuuugcaaaaauccaaauauu

SEQ ID NO: 3175490 - RNA, 11 nt, Human
ucuuucuuuuu

SEQ ID NO: 3175491 - RNA, 19 nt, Human
ucuuugaaacaugcuugug

SEQ ID NO: 3175492 - RNA, 16 nt, Human
ucuuugauaacaggga

SEQ ID NO: 3175493 - RNA, 13 nt, Human
ucuuugauguguu

SEQ ID NO: 3175494 - RNA, 20 nt, Human
ucuuugaucaugaauaacug

SEQ ID NO: 3175495 - RNA, 14 nt, Human
ucuuugaucaugaa

SEQ ID NO: 3175496 - RNA, 14 nt, Human
ucuuugauguguug

SEQ ID NO: 3175497 - RNA, 16 nt, Human
ucuuugauguguuguu

SEQ ID NO: 3175498 - RNA, 17 nt, Human
ucuuuggacacucacac

SEQ ID NO: 3175499 - RNA, 21 nt, Human
ucuuuggaaaaggaagguagu

SEQ ID NO: 3175500 - RNA, 18 nt, Human
ucuuugcaguucccaucu

SEQ ID NO: 3175501 - RNA, 23 nt, Human
ucuuuuacuuuuuuuaguaaguu

SEQ ID NO: 3175502 - RNA, 12 nt, Human
ucuuuuauucuu

SEQ ID NO: 3175503 - RNA, 22 nt, Human
ucuuuccacuccuccuagccac

SEQ ID NO: 3175504 - RNA, 21 nt, Human
ucuuuccacuccuccuagcca

SEQ ID NO: 3175505 - RNA, 21 nt, Human
ucuuucauuugcuuuggaagu

SEQ ID NO: 3175506 - RNA, 20 nt, Human
ucuuucuugcucccugacug

SEQ ID NO: 3175507 - RNA, 19 nt, Human
ucuuucuugcucccugacu

SEQ ID NO: 3175508 - RNA, 18 nt, Human
ucuuucuugcucccugac

SEQ ID NO: 3175509 - RNA, 14 nt, Human
ucuuucuugcuccc

SEQ ID NO: 3175510 - RNA, 22 nt, Human
ucuuucuucuucaaaccuuugu

SEQ ID NO: 3175511 - RNA, 18 nt, Human
ucuuucuucuuccacaca

SEQ ID NO: 3175512 - RNA, 16 nt, Human
ucuuuccauauccaua

SEQ ID NO: 3175513 - RNA, 15 nt, Human
ucuuuccauauccau

SEQ ID NO: 3175514 - RNA, 16 nt, Human
ucuuucagccaagaau

SEQ ID NO: 3175515 - RNA, 19 nt, Human
ucuuucagccaagaauucu

SEQ ID NO: 3175516 - RNA, 20 nt, Human
ucuuucagccaagaauucuu

SEQ ID NO: 3175517 - RNA, 21 nt, Human
ucuuucagccaagaauucuua

SEQ ID NO: 3175518 - RNA, 20 nt, Human
ugggggaggggagacuuuga

SEQ ID NO: 3175519 - RNA, 16 nt, Human
ugggggaguggccaca

SEQ ID NO: 3175520 - RNA, 14 nt, Human
ugggggucugugug

SEQ ID NO: 3175521 - RNA, 18 nt, Human
uggguacuuguggacaca

SEQ ID NO: 3175522 - RNA, 17 nt, Human
uggguacuuguggacac

SEQ ID NO: 3175523 - RNA, 20 nt, Human
uggggguucuuucuuccucu

SEQ ID NO: 3175524 - RNA, 19 nt, Human
uggggguucuuucuuccuc

SEQ ID NO: 3175525 - RNA, 15 nt, Human
uggggguucuuucuu

SEQ ID NO: 3175526 - RNA, 22 nt, Human
uggggguguucagccacugagg

SEQ ID NO: 3175527 - RNA, 20 nt, Human
uggggccaguuggucccccu

SEQ ID NO: 3175528 - RNA, 23 nt, Human
uggggaugagaaagguugaagca

SEQ ID NO: 3175529 - RNA, 15 nt, Human
uggggaugagaaagg

SEQ ID NO: 3175530 - RNA, 16 nt, Human
uggggauagaugugug

SEQ ID NO: 3175531 - RNA, 17 nt, Human
uggggauagaugugugg

SEQ ID NO: 3175532 - RNA, 18 nt, Human
uggggauagaugugugga

SEQ ID NO: 3175533 - RNA, 20 nt, Human
uggggauagauguguggaca

SEQ ID NO: 3175534 - RNA, 14 nt, Human
ugggcuugcugugg

SEQ ID NO: 3175535 - RNA, 16 nt, Human
ugggcuucugugccca

SEQ ID NO: 3175536 - RNA, 22 nt, Human
ugggcuucauccuccucagauc

SEQ ID NO: 3175537 - RNA, 12 nt, Human
ugggccuucagg

SEQ ID NO: 3175538 - RNA, 12 nt, Human
ugggcuucugug

SEQ ID NO: 3175539 - RNA, 11 nt, Human
ugggagugugu

SEQ ID NO: 3175540 - RNA, 19 nt, Human
ugggaucacauguggacuu

SEQ ID NO: 3175541 - RNA, 18 nt, Human
ugggagugugguuucuuu

SEQ ID NO: 3175542 - RNA, 14 nt, Human
ugggagugggccca

SEQ ID NO: 3175543 - RNA, 16 nt, Human
ugggagugggcccaau

SEQ ID NO: 3175544 - RNA, 22 nt, Human
ugggagugaggaugucugggcc

SEQ ID NO: 3175545 - RNA, 20 nt, Human
uggcugggggccucagugcc

SEQ ID NO: 3175546 - RNA, 17 nt, Human
uggcugggggccucagu

SEQ ID NO: 3175547 - RNA, 16 nt, Human
uggcugggggccucag

SEQ ID NO: 3175548 - RNA, 22 nt, Human
ugggcagagcagagaccauccc

SEQ ID NO: 3175549 - RNA, 18 nt, Human
ugggcagagcagagacca

SEQ ID NO: 3175550 - RNA, 17 nt, Human
ugggauuacaggcguga

SEQ ID NO: 3175551 - RNA, 22 nt, Human
ugggauuacaagcgugagccac

SEQ ID NO: 3175552 - RNA, 12 nt, Human
ugggauccucca

SEQ ID NO: 3175553 - RNA, 13 nt, Human
ugggauccuccag

SEQ ID NO: 3175554 - RNA, 18 nt, Human
ugggauccaggccccucc

SEQ ID NO: 3175555 - RNA, 15 nt, Human
ugggauccaggcccc

SEQ ID NO: 3175556 - RNA, 20 nt, Human
ugggauccaggccccucccu

SEQ ID NO: 3175557 - RNA, 14 nt, Human
ugggccuggcuccc

SEQ ID NO: 3175558 - RNA, 19 nt, Human
ugggccuggcucccucacu

SEQ ID NO: 3175559 - RNA, 21 nt, Human
ugggccuggcucccucacucu

SEQ ID NO: 3175560 - RNA, 11 nt, Human
ugggccuucag

SEQ ID NO: 3175561 - RNA, 14 nt, Human
ugggcaggagacug

SEQ ID NO: 3175562 - RNA, 23 nt, Human
ugggcagagcagagaccaucccu

SEQ ID NO: 3175563 - RNA, 14 nt, Human
ugguccucacacuc

SEQ ID NO: 3175564 - RNA, 16 nt, Human
ugguccuaggcuggaa

SEQ ID NO: 3175565 - RNA, 18 nt, Human
ugguccuaggcuggaagg

SEQ ID NO: 3175566 - RNA, 19 nt, Human
ugguccuaggcuggaagga

SEQ ID NO: 3175567 - RNA, 23 nt, Human
ugguccuaggcuggaaggaggaa

SEQ ID NO: 3175568 - RNA, 17 nt, Human
ugguccuaaucuucuga

SEQ ID NO: 3175569 - RNA, 19 nt, Human
ugguccuaaucuucugaac

SEQ ID NO: 3175570 - RNA, 13 nt, Human
ugguccugcugca

SEQ ID NO: 3175571 - RNA, 15 nt, Human
ugguccugcugcagu

SEQ ID NO: 3175572 - RNA, 23 nt, Human
ugguccugcugcaguugccaguc

SEQ ID NO: 3175573 - RNA, 15 nt, Human
uggucccccuuccau

SEQ ID NO: 3175574 - RNA, 16 nt, Human
uggucccccuuccaug

SEQ ID NO: 3175575 - RNA, 18 nt, Human
uggucccccuuccaugga

SEQ ID NO: 3175576 - RNA, 23 nt, Human
uggucccccuuccauggacuuug

SEQ ID NO: 3175577 - RNA, 22 nt, Human
uggucacaggaaguagaggagg

SEQ ID NO: 3175578 - RNA, 18 nt, Human
uggucacaggacucugcc

SEQ ID NO: 3175579 - RNA, 17 nt, Human
uggucacaggaaguaga

SEQ ID NO: 3175580 - RNA, 19 nt, Human
uggucacaggacucugccu

SEQ ID NO: 3175581 - RNA, 13 nt, Human
uggucccacucag

SEQ ID NO: 3175582 - RNA, 14 nt, Human
uggucccccuucca

SEQ ID NO: 3175583 - RNA, 18 nt, Human
ugguauuuggauaucugu

SEQ ID NO: 3175584 - RNA, 18 nt, Human
ugguaugaucacggcuca

SEQ ID NO: 3175585 - RNA, 22 nt, Human
ugguaugcuugcauauauuuca

SEQ ID NO: 3175586 - RNA, 22 nt, Human
uggugaccuuccaagagccuga

SEQ ID NO: 3175587 - RNA, 21 nt, Human
uggugaccuuccaagagccug

SEQ ID NO: 3175588 - RNA, 19 nt, Human
uggugacuuuccucuuugg

SEQ ID NO: 3175589 - RNA, 22 nt, Human
uggugaccucugccugaaguca

SEQ ID NO: 3175590 - RNA, 17 nt, Human
uggugaccucugccuga

SEQ ID NO: 3175591 - RNA, 16 nt, Human
uggugaccucugccug

SEQ ID NO: 3175592 - RNA, 15 nt, Human
uggugaccucugccu

SEQ ID NO: 3175593 - RNA, 15 nt, Human
uggugaguuaggaac

SEQ ID NO: 3175594 - RNA, 14 nt, Human
uggugaugcagucu

SEQ ID NO: 3175595 - RNA, 18 nt, Human
uggugagcauuacaggca

SEQ ID NO: 3175596 - RNA, 12 nt, Human
uggugagcauua

SEQ ID NO: 3175597 - RNA, 16 nt, Human
uggugacuuugcuuca

SEQ ID NO: 3175598 - RNA, 21 nt, Human
uggugcaaugaccuuucaaua

SEQ ID NO: 3175599 - RNA, 20 nt, Human
uggugcaaugaccuuucaau

SEQ ID NO: 3175600 - RNA, 23 nt, Human
uggugcacgcuggggaagaauuu

SEQ ID NO: 3175601 - RNA, 21 nt, Human
uggucuaauguuuaagcagaa

SEQ ID NO: 3175602 - RNA, 19 nt, Human
uggucuaauguuuaagcag

SEQ ID NO: 3175603 - RNA, 15 nt, Human
uggucuaauguuuaa

SEQ ID NO: 3175604 - RNA, 14 nt, Human
uggugaccucugcc

SEQ ID NO: 3175605 - RNA, 13 nt, Human
uggugaccucugc

SEQ ID NO: 3175606 - RNA, 15 nt, Human
uggucuacacugugc

SEQ ID NO: 3175607 - RNA, 16 nt, Human
uggucuacacugugcu

SEQ ID NO: 3175608 - RNA, 17 nt, Human
uggucuacacugugcug

SEQ ID NO: 3175609 - RNA, 18 nt, Human
uggucuacacugugcuga

SEQ ID NO: 3175610 - RNA, 14 nt, Human
uggucuaauguuua

SEQ ID NO: 3175611 - RNA, 19 nt, Human
uggucguaaacaucucaga

SEQ ID NO: 3175612 - RNA, 18 nt, Human
uggucgccuuccaccucu

SEQ ID NO: 3175613 - RNA, 20 nt, Human
uggucgaaaguuaguaggau

SEQ ID NO: 3175614 - RNA, 20 nt, Human
ugguccuguaggaguucuau

SEQ ID NO: 3175615 - RNA, 13 nt, Human
ugguccuguagga

SEQ ID NO: 3175616 - RNA, 20 nt, Human
ugguccuggaggcucaaauu

SEQ ID NO: 3175617 - RNA, 20 nt, Human
uggcuccauugguguugaca

SEQ ID NO: 3175618 - RNA, 22 nt, Human
uggcguagcagaguuaaaucuc

SEQ ID NO: 3175619 - RNA, 20 nt, Human
uggcucccacaggcccuucc

SEQ ID NO: 3175620 - RNA, 17 nt, Human
uggcucccacaggcccu

SEQ ID NO: 3175621 - RNA, 14 nt, Human
uggcucccacaggc

SEQ ID NO: 3175622 - RNA, 15 nt, Human
uggcugcuucaagga

SEQ ID NO: 3175623 - RNA, 15 nt, Human
uggcugggggccuca

SEQ ID NO: 3175624 - RNA, 11 nt, Human
uggcugcuuca

SEQ ID NO: 3175625 - RNA, 16 nt, Human
uggcuccucccggugc

SEQ ID NO: 3175626 - RNA, 14 nt, Human
uggcuccucccggu

SEQ ID NO: 3175627 - RNA, 19 nt, Human
uggcuccucccggugccca

SEQ ID NO: 3175628 - RNA, 18 nt, Human
uggcuccucccggugccc

SEQ ID NO: 3175629 - RNA, 15 nt, Human
uggcgcugccccugg

SEQ ID NO: 3175630 - RNA, 23 nt, Human
uggcgcugccccuggcagccccu

SEQ ID NO: 3175631 - RNA, 16 nt, Human
uggcgcugccccuggc

SEQ ID NO: 3175632 - RNA, 22 nt, Human
uggcgcagcauauucaggaagc

SEQ ID NO: 3175633 - RNA, 23 nt, Human
uggcgcagcauauucaggaagcu

SEQ ID NO: 3175634 - RNA, 23 nt, Human
uggccucccaacucaccccagcc

SEQ ID NO: 3175635 - RNA, 22 nt, Human
uggccucagaggacccuuucca

SEQ ID NO: 3175636 - RNA, 12 nt, Human
uggcagaggagg

SEQ ID NO: 3175637 - RNA, 15 nt, Human
uggcagaguugaaga

SEQ ID NO: 3175638 - RNA, 21 nt, Human
uggcagaguggauucuugaac

SEQ ID NO: 3175639 - RNA, 17 nt, Human
uggcagaguugaagaca

SEQ ID NO: 3175640 - RNA, 19 nt, Human
uggcagaguugaagacaga

SEQ ID NO: 3175641 - RNA, 18 nt, Human
uggccagaugcaccagcc

SEQ ID NO: 3175642 - RNA, 17 nt, Human
uggccagaugcaccagc

SEQ ID NO: 3175643 - RNA, 15 nt, Human
uggccagaugcacca

SEQ ID NO: 3175644 - RNA, 19 nt, Human
uggccagaugcaccagccc

SEQ ID NO: 3175645 - RNA, 19 nt, Human
uggccaggaaguagcacag

SEQ ID NO: 3175646 - RNA, 20 nt, Human
uggccaggaaguagcacagg

SEQ ID NO: 3175647 - RNA, 16 nt, Human
uggccaggcugcucuu

SEQ ID NO: 3175648 - RNA, 17 nt, Human
uggccaggcugcucuug

SEQ ID NO: 3175649 - RNA, 22 nt, Human
uggccaggaaguagcacaggcu

SEQ ID NO: 3175650 - RNA, 21 nt, Human
uggccaggaaguagcacaggc

SEQ ID NO: 3175651 - RNA, 13 nt, Human
uggccaggcugcu

SEQ ID NO: 3175652 - RNA, 19 nt, Human
uggccaggcugcucucaaa

SEQ ID NO: 3175653 - RNA, 17 nt, Human
uggccaggcugcucuca

SEQ ID NO: 3175654 - RNA, 17 nt, Human
uggcccccacaugguga

SEQ ID NO: 3175655 - RNA, 13 nt, Human
uggccaggcuggu

SEQ ID NO: 3175656 - RNA, 20 nt, Human
uggccaggcugcucuugaac

SEQ ID NO: 3175657 - RNA, 23 nt, Human
uggcccagggugagguggcaugg

SEQ ID NO: 3175658 - RNA, 21 nt, Human
uggcccagggggcuuccugag

SEQ ID NO: 3175659 - RNA, 19 nt, Human
uggcccagggggcuuccug

SEQ ID NO: 3175660 - RNA, 16 nt, Human
uggccccugcccggcu

SEQ ID NO: 3175661 - RNA, 15 nt, Human
uggccccugcccggc

SEQ ID NO: 3175662 - RNA, 14 nt, Human
uggccccugcccgg

SEQ ID NO: 3175663 - RNA, 15 nt, Human
uggaucugugagggg

SEQ ID NO: 3175664 - RNA, 14 nt, Human
uggaucucuuaaga

SEQ ID NO: 3175665 - RNA, 11 nt, Human
uggaguuggag

SEQ ID NO: 3175666 - RNA, 19 nt, Human
uggaguuggggcagaggag

SEQ ID NO: 3175667 - RNA, 16 nt, Human
uggaguuggaguucau

SEQ ID NO: 3175668 - RNA, 15 nt, Human
uggauaacaccacca

SEQ ID NO: 3175669 - RNA, 15 nt, Human
uggauaaauuguuua

SEQ ID NO: 3175670 - RNA, 17 nt, Human
uggauaaauuguuuagu

SEQ ID NO: 3175671 - RNA, 21 nt, Human
uggaggaaggaaacccagcuc

SEQ ID NO: 3175672 - RNA, 23 nt, Human
uggaggaaggaaacccagcucug

SEQ ID NO: 3175673 - RNA, 14 nt, Human
uggagacugucuca

SEQ ID NO: 3175674 - RNA, 20 nt, Human
uggaggaaggaaacccagcu

SEQ ID NO: 3175675 - RNA, 19 nt, Human
uggcaaacucuccaccaca

SEQ ID NO: 3175676 - RNA, 23 nt, Human
uggcaaagcagcaacacacaugc

SEQ ID NO: 3175677 - RNA, 20 nt, Human
uggcaaagcuguucuuccug

SEQ ID NO: 3175678 - RNA, 19 nt, Human
uggcaaagcuguucuuccu

SEQ ID NO: 3175679 - RNA, 17 nt, Human
uggcaaagcuguucuuc

SEQ ID NO: 3175680 - RNA, 19 nt, Human
uggaucugugaggggcucu

SEQ ID NO: 3175681 - RNA, 12 nt, Human
uggcaaaaaggc

SEQ ID NO: 3175682 - RNA, 16 nt, Human
uggcaaaaaggcagga

SEQ ID NO: 3175683 - RNA, 17 nt, Human
uggcaauaaauuuugaa

SEQ ID NO: 3175684 - RNA, 18 nt, Human
uggcaauaaauuuugaaa

SEQ ID NO: 3175685 - RNA, 20 nt, Human
uggcaauaaauuuugaaaag

SEQ ID NO: 3175686 - RNA, 21 nt, Human
uggcaauaaauuuugaaaagu

SEQ ID NO: 3175687 - RNA, 12 nt, Human
uggcaauagacc

SEQ ID NO: 3175688 - RNA, 16 nt, Human
uggcacuauaauguaa

SEQ ID NO: 3175689 - RNA, 15 nt, Human
uggcacuauaaugua

SEQ ID NO: 3175690 - RNA, 18 nt, Human
uggacucagaaacuccau

SEQ ID NO: 3175691 - RNA, 13 nt, Human
uggacuccucugu

SEQ ID NO: 3175692 - RNA, 21 nt, Human
uggagaagcucccugaaguaa

SEQ ID NO: 3175693 - RNA, 22 nt, Human
uggagaaugcaccauacucaug

SEQ ID NO: 3175694 - RNA, 21 nt, Human
uggagaaugcaccauacucau

SEQ ID NO: 3175695 - RNA, 20 nt, Human
uggagaaucucaacaugucu

SEQ ID NO: 3175696 - RNA, 23 nt, Human
uggagaaucacaggcugggcugg

SEQ ID NO: 3175697 - RNA, 15 nt, Human
uggagaaucacaggc

SEQ ID NO: 3175698 - RNA, 17 nt, Human
uggagaaucacaggcug

SEQ ID NO: 3175699 - RNA, 16 nt, Human
uggagaaucacaggcu

SEQ ID NO: 3175700 - RNA, 22 nt, Human
uggagaaucacaggcugggcug

SEQ ID NO: 3175701 - RNA, 20 nt, Human
uggagaaucacaggcugggc

SEQ ID NO: 3175702 - RNA, 19 nt, Human
uggagaaucacaggcuggg

SEQ ID NO: 3175703 - RNA, 18 nt, Human
uggagaaucacaggcugg

SEQ ID NO: 3175704 - RNA, 20 nt, Human
uggagacugcuccugagccc

SEQ ID NO: 3175705 - RNA, 23 nt, Human
uggagacugcuccugagccccca

SEQ ID NO: 3175706 - RNA, 22 nt, Human
uggagacugcuccugagccccc

SEQ ID NO: 3175707 - RNA, 23 nt, Human
ugcuguuucccggggaggaaaca

SEQ ID NO: 3175708 - RNA, 22 nt, Human
ugcuguuuaucccuuaagaaug

SEQ ID NO: 3175709 - RNA, 17 nt, Human
ugcuguugcugauuuua

SEQ ID NO: 3175710 - RNA, 20 nt, Human
uggacauaacugacuuaguu

SEQ ID NO: 3175711 - RNA, 23 nt, Human
uggacaggcauguucucugagga

SEQ ID NO: 3175712 - RNA, 13 nt, Human
uggacacuuaauu

SEQ ID NO: 3175713 - RNA, 17 nt, Human
uggacacuuaauucugu

SEQ ID NO: 3175714 - RNA, 18 nt, Human
uggacacuuaauucuguu

SEQ ID NO: 3175715 - RNA, 20 nt, Human
uggacacuuaauucuguucu

SEQ ID NO: 3175716 - RNA, 19 nt, Human
ugcccagaaugaggcugcu

SEQ ID NO: 3175717 - RNA, 19 nt, Human
ugcccaggcuggcgugcag

SEQ ID NO: 3175718 - RNA, 18 nt, Human
ugcccaggcuggcgugca

SEQ ID NO: 3175719 - RNA, 16 nt, Human
ugccccaacccuucuu

SEQ ID NO: 3175720 - RNA, 17 nt, Human
ugccccaacccuucuuc

SEQ ID NO: 3175721 - RNA, 20 nt, Human
ugccccaacccuucuucaug

SEQ ID NO: 3175722 - RNA, 22 nt, Human
ugccccaaguuuugugaaauuu

SEQ ID NO: 3175723 - RNA, 20 nt, Human
ugcccaggcuggcgugcagu

SEQ ID NO: 3175724 - RNA, 13 nt, Human
ugcccaggcuggc

SEQ ID NO: 3175725 - RNA, 19 nt, Human
ugcccauuguuuuucugau

SEQ ID NO: 3175726 - RNA, 23 nt, Human
ugccccaaauggauuccuguuuc

SEQ ID NO: 3175727 - RNA, 14 nt, Human
ugcccggcugcgga

SEQ ID NO: 3175728 - RNA, 12 nt, Human
ugcccggcugcg

SEQ ID NO: 3175729 - RNA, 13 nt, Human
ugcccgccaccac

SEQ ID NO: 3175730 - RNA, 16 nt, Human
ugccccuggcagcccc

SEQ ID NO: 3175731 - RNA, 19 nt, Human
ugccccuccucucugcccu

SEQ ID NO: 3175732 - RNA, 20 nt, Human
ugccccuccucucugcccua

SEQ ID NO: 3175733 - RNA, 17 nt, Human
ugccccuccucucugcc

SEQ ID NO: 3175734 - RNA, 18 nt, Human
ugccccuccucucugccc

SEQ ID NO: 3175735 - RNA, 16 nt, Human
ugccccucccuucaac

SEQ ID NO: 3175736 - RNA, 15 nt, Human
ugccccucccuucaa

SEQ ID NO: 3175737 - RNA, 13 nt, Human
ugccccucccuuc

SEQ ID NO: 3175738 - RNA, 14 nt, Human
ugccucaagagaag

SEQ ID NO: 3175739 - RNA, 15 nt, Human
ugccucaagagaagg

SEQ ID NO: 3175740 - RNA, 15 nt, Human
ugccuauuguaauau

SEQ ID NO: 3175741 - RNA, 20 nt, Human
ugccuaaauaaguuauaaag

SEQ ID NO: 3175742 - RNA, 18 nt, Human
ugccuaaauccacucugc

SEQ ID NO: 3175743 - RNA, 12 nt, Human
ugccuaaaauaa

SEQ ID NO: 3175744 - RNA, 16 nt, Human
ugccuaacaaaauauu

SEQ ID NO: 3175745 - RNA, 21 nt, Human
ugccuauaagccaaaauuaag

SEQ ID NO: 3175746 - RNA, 15 nt, Human
ugccuauauuuuccu

SEQ ID NO: 3175747 - RNA, 16 nt, Human
ugccuauaagccaaaa

SEQ ID NO: 3175748 - RNA, 17 nt, Human
ugccuauaagccaaaau

SEQ ID NO: 3175749 - RNA, 20 nt, Human
ugccuauaagccaaaauuaa

SEQ ID NO: 3175750 - RNA, 19 nt, Human
ugccucacauuuuuuucua

SEQ ID NO: 3175751 - RNA, 16 nt, Human
ugccuccucuucaacu

SEQ ID NO: 3175752 - RNA, 22 nt, Human
ugccuccugacacaccugcagc

SEQ ID NO: 3175753 - RNA, 14 nt, Human
ugccuccucuucaa

SEQ ID NO: 3175754 - RNA, 16 nt, Human
ugccucggauccccuu

SEQ ID NO: 3175755 - RNA, 18 nt, Human
ugccucggauccccuucc

SEQ ID NO: 3175756 - RNA, 16 nt, Human
ugcccugucaggaggc

SEQ ID NO: 3175757 - RNA, 19 nt, Human
ugcccugucaggaggcaga

SEQ ID NO: 3175758 - RNA, 19 nt, Human
ugcccugguuuccugcccu

SEQ ID NO: 3175759 - RNA, 20 nt, Human
ugcccugguuuccugcccug

SEQ ID NO: 3175760 - RNA, 23 nt, Human
ugcccugguuuccugcccuggga

SEQ ID NO: 3175761 - RNA, 17 nt, Human
ugcccugguuuccugcc

SEQ ID NO: 3175762 - RNA, 18 nt, Human
ugcccugguuuccugccc

SEQ ID NO: 3175763 - RNA, 17 nt, Human
ugcccuggugcugccac

SEQ ID NO: 3175764 - RNA, 15 nt, Human
ugcccugguuuccug

SEQ ID NO: 3175765 - RNA, 16 nt, Human
ugcccuggugcugcca

SEQ ID NO: 3175766 - RNA, 14 nt, Human
ugcccuggugcugc

SEQ ID NO: 3175767 - RNA, 12 nt, Human
ugcccuggugcu

SEQ ID NO: 3175768 - RNA, 16 nt, Human
ugcccugcccaccugg

SEQ ID NO: 3175769 - RNA, 20 nt, Human
ugcccugcccaccuggccuc

SEQ ID NO: 3175770 - RNA, 15 nt, Human
ugcccugcccaccug

SEQ ID NO: 3175771 - RNA, 14 nt, Human
ugcccugcccaccu

SEQ ID NO: 3175772 - RNA, 15 nt, Human
ugcccugggaggcag

SEQ ID NO: 3175773 - RNA, 17 nt, Human
ugcccugggaggcagug

SEQ ID NO: 3175774 - RNA, 18 nt, Human
ugcccugggaggcaguga

SEQ ID NO: 3175775 - RNA, 13 nt, Human
ugcccugggaggc

SEQ ID NO: 3175776 - RNA, 20 nt, Human
ugcauagguuagauauagag

SEQ ID NO: 3175777 - RNA, 15 nt, Human
ugcauagcaguauau

SEQ ID NO: 3175778 - RNA, 16 nt, Human
ugcauagcaguauaug

SEQ ID NO: 3175779 - RNA, 15 nt, Human
ugcaguugccaguca

SEQ ID NO: 3175780 - RNA, 16 nt, Human
ugcaguugccagucac

SEQ ID NO: 3175781 - RNA, 22 nt, Human
ugcauauuacuguacaugggac

SEQ ID NO: 3175782 - RNA, 13 nt, Human
ugcauauuacugu

SEQ ID NO: 3175783 - RNA, 18 nt, Human
ugcauaguuguagacaaa

SEQ ID NO: 3175784 - RNA, 21 nt, Human
ugcauaguuguagacaaagua

SEQ ID NO: 3175785 - RNA, 14 nt, Human
ugcauaguauucca

SEQ ID NO: 3175786 - RNA, 22 nt, Human
ugcauaguaaauguaguucaua

SEQ ID NO: 3175787 - RNA, 14 nt, Human
ugcauauaacuuau

SEQ ID NO: 3175788 - RNA, 16 nt, Human
ugcauauaacuuauau

SEQ ID NO: 3175789 - RNA, 15 nt, Human
ugcauauaacuuaua

SEQ ID NO: 3175790 - RNA, 22 nt, Human
ugcaucaauuuuucuuauuuca

SEQ ID NO: 3175791 - RNA, 19 nt, Human
ugcaucaagaugugacaug

SEQ ID NO: 3175792 - RNA, 12 nt, Human
ugcaguugcugu

SEQ ID NO: 3175793 - RNA, 22 nt, Human
ugcauauucuaguaauaaagac

SEQ ID NO: 3175794 - RNA, 21 nt, Human
ugcaguuacacuaaaagguga

SEQ ID NO: 3175795 - RNA, 14 nt, Human
ugcaguguagauuu

SEQ ID NO: 3175796 - RNA, 15 nt, Human
ugcaguguagauuuu

SEQ ID NO: 3175797 - RNA, 18 nt, Human
ugcaguuacaaauuauaa

SEQ ID NO: 3175798 - RNA, 13 nt, Human
ugcaguuacaaau

SEQ ID NO: 3175799 - RNA, 21 nt, Human
ugcaguuacaaauuauaaugu

SEQ ID NO: 3175800 - RNA, 19 nt, Human
ugcaguuacaaauuauaau

SEQ ID NO: 3175801 - RNA, 23 nt, Human
ugcaguuccccuggaagcagugc

SEQ ID NO: 3175802 - RNA, 23 nt, Human
ugcaguuacaaauuauaauguau

SEQ ID NO: 3175803 - RNA, 13 nt, Human
ugcaguucccauc

SEQ ID NO: 3175804 - RNA, 21 nt, Human
ugcaguggugcgaucuggguu

SEQ ID NO: 3175805 - RNA, 20 nt, Human
ugcaguggugcgaucugggu

SEQ ID NO: 3175806 - RNA, 13 nt, Human
ugcagggaguccg

SEQ ID NO: 3175807 - RNA, 16 nt, Human
ugccacuaaauugaca

SEQ ID NO: 3175808 - RNA, 20 nt, Human
ugccaggaagccagcaggcu

SEQ ID NO: 3175809 - RNA, 22 nt, Human
ugccaggaagccagcaggcucu

SEQ ID NO: 3175810 - RNA, 10 nt, Human
ugccaggcau

SEQ ID NO: 3175811 - RNA, 14 nt, Human
ugccaggcauggug

SEQ ID NO: 3175812 - RNA, 20 nt, Human
ugccacccuggggagaaagu

SEQ ID NO: 3175813 - RNA, 13 nt, Human
ugccaccuccccu

SEQ ID NO: 3175814 - RNA, 10 nt, Human
ugccaccucc

SEQ ID NO: 3175815 - RNA, 22 nt, Human
ugccaccuccccuugccagcug

SEQ ID NO: 3175816 - RNA, 21 nt, Human
ugccaccuccccuugccagcu

SEQ ID NO: 3175817 - RNA, 18 nt, Human
ugccaccuccccuugcca

SEQ ID NO: 3175818 - RNA, 17 nt, Human
ugccaccuccccuugcc

SEQ ID NO: 3175819 - RNA, 13 nt, Human
ugcaucagcugcu

SEQ ID NO: 3175820 - RNA, 13 nt, Human
ugcauuuggaaca

SEQ ID NO: 3175821 - RNA, 14 nt, Human
ugcauuugcuuuug

SEQ ID NO: 3175822 - RNA, 20 nt, Human
ugccaaacauuaauguugau

SEQ ID NO: 3175823 - RNA, 19 nt, Human
ugccaaacauuaauguuga

SEQ ID NO: 3175824 - RNA, 12 nt, Human
ugccaaacauua

SEQ ID NO: 3175825 - RNA, 20 nt, Human
ugccaaauaaaguuaaaagu

SEQ ID NO: 3175826 - RNA, 11 nt, Human
ugccaaaguac

SEQ ID NO: 3175827 - RNA, 19 nt, Human
ugccaaaguacagaauuug

SEQ ID NO: 3175828 - RNA, 22 nt, Human
ugccaaaguacagaauuugaau

SEQ ID NO: 3175829 - RNA, 22 nt, Human
ugcuaagaauauuugaauguau

SEQ ID NO: 3175830 - RNA, 21 nt, Human
ugcuaagaauauuugaaugua

SEQ ID NO: 3175831 - RNA, 17 nt, Human
ugcuaagaauauuugaa

SEQ ID NO: 3175832 - RNA, 20 nt, Human
ugcuaagaauuuuuuauuuu

SEQ ID NO: 3175833 - RNA, 19 nt, Human
ugcuaagaauuuuuuauuu

SEQ ID NO: 3175834 - RNA, 16 nt, Human
ugcuaagaauuuuuua

SEQ ID NO: 3175835 - RNA, 22 nt, Human
ugcuacuguccuacccacccuc

SEQ ID NO: 3175836 - RNA, 21 nt, Human
ugcuacuguccuacccacccu

SEQ ID NO: 3175837 - RNA, 13 nt, Human
ugcuagaaaaauu

SEQ ID NO: 3175838 - RNA, 19 nt, Human
ugcgcuuguuuuaaagugg

SEQ ID NO: 3175839 - RNA, 22 nt, Human
ugcgcuucacuuggguccaggc

SEQ ID NO: 3175840 - RNA, 15 nt, Human
ugcguguucucagag

SEQ ID NO: 3175841 - RNA, 14 nt, Human
ugcuaagaaaccag

SEQ ID NO: 3175842 - RNA, 16 nt, Human
ugcuaaacguguaugu

SEQ ID NO: 3175843 - RNA, 15 nt, Human
ugcuaaacguguaug

SEQ ID NO: 3175844 - RNA, 23 nt, Human
ugcuaaaaaugagcuugauuaaa

SEQ ID NO: 3175845 - RNA, 19 nt, Human
ugccuugcccacuccugcu

SEQ ID NO: 3175846 - RNA, 16 nt, Human
ugccucggcuggcucc

SEQ ID NO: 3175847 - RNA, 20 nt, Human
ugccucggcuggcuccccug

SEQ ID NO: 3175848 - RNA, 21 nt, Human
ugccucggcuggcuccccugc

SEQ ID NO: 3175849 - RNA, 23 nt, Human
ugccucggcuggcuccccugcag

SEQ ID NO: 3175850 - RNA, 22 nt, Human
ugcgcaggcuggcccugcccug

SEQ ID NO: 3175851 - RNA, 23 nt, Human
ugcgcaggcuggcccugcccugg

SEQ ID NO: 3175852 - RNA, 21 nt, Human
ugcgcaggcuggcccugcccu

SEQ ID NO: 3175853 - RNA, 23 nt, Human
ugccuugcccacuccugcucugc

SEQ ID NO: 3175854 - RNA, 19 nt, Human
ugcgcaggcuggcccugcc

SEQ ID NO: 3175855 - RNA, 13 nt, Human
ugcgcaguugcug

SEQ ID NO: 3175856 - RNA, 20 nt, Human
ugcgcauaggccugcuuugu

SEQ ID NO: 3175857 - RNA, 15 nt, Human
ugcgcauaggccugc

SEQ ID NO: 3175858 - RNA, 16 nt, Human
ugcgcuucacuugggu

SEQ ID NO: 3175859 - RNA, 15 nt, Human
ugcgcuucacuuggg

SEQ ID NO: 3175860 - RNA, 14 nt, Human
ugcgcuucacuugg

SEQ ID NO: 3175861 - RNA, 11 nt, Human
ugcgcuucacu

SEQ ID NO: 3175862 - RNA, 18 nt, Human
ugcucuugggcaauauuc

SEQ ID NO: 3175863 - RNA, 17 nt, Human
ugcucuugggcaauauu

SEQ ID NO: 3175864 - RNA, 15 nt, Human
ugcucuugggcaaua

SEQ ID NO: 3175865 - RNA, 21 nt, Human
ugcucuugggcaauauucucu

SEQ ID NO: 3175866 - RNA, 19 nt, Human
ugcucuugggcaauauucu

SEQ ID NO: 3175867 - RNA, 24 nt, Human
ugcucuugggcaauauucucugua

SEQ ID NO: 3175868 - RNA, 21 nt, Human
ugcucuuucccacccagccug

SEQ ID NO: 3175869 - RNA, 20 nt, Human
ugcucuuucccacccagccu

SEQ ID NO: 3175870 - RNA, 19 nt, Human
ugcucuuucccacccagcc

SEQ ID NO: 3175871 - RNA, 16 nt, Human
ugcucuuucccaccca

SEQ ID NO: 3175872 - RNA, 23 nt, Human
ugcucuccgaccagacaccuuga

SEQ ID NO: 3175873 - RNA, 12 nt, Human
ugcucuccucuu

SEQ ID NO: 3175874 - RNA, 20 nt, Human
ugcucuaaaauauuuaugaa

SEQ ID NO: 3175875 - RNA, 19 nt, Human
ugcucuaaaauauuuauga

SEQ ID NO: 3175876 - RNA, 15 nt, Human
ugcucuaaaauauuu

SEQ ID NO: 3175877 - RNA, 14 nt, Human
ugcucuaaaauauu

SEQ ID NO: 3175878 - RNA, 13 nt, Human
ugcucuaaaauau

SEQ ID NO: 3175879 - RNA, 23 nt, Human
ugcucuaaaauauuuaugaagaa

SEQ ID NO: 3175880 - RNA, 12 nt, Human
ugcucuaaaaua

SEQ ID NO: 3175881 - RNA, 16 nt, Human
ugcucaguguuucaua

SEQ ID NO: 3175882 - RNA, 15 nt, Human
ugcucaguguuucau

SEQ ID NO: 3175883 - RNA, 19 nt, Human
ugcucagugucuggcugca

SEQ ID NO: 3175884 - RNA, 17 nt, Human
ugcucacauaucuguca

SEQ ID NO: 3175885 - RNA, 13 nt, Human
ugcuagaacuccc

SEQ ID NO: 3175886 - RNA, 14 nt, Human
ugcuagaacucccu

SEQ ID NO: 3175887 - RNA, 15 nt, Human
ugcuagaacucccuu

SEQ ID NO: 3175888 - RNA, 17 nt, Human
ugcuagaacucccuuuc

SEQ ID NO: 3175889 - RNA, 21 nt, Human
ugcuaggaacacuccuucaca

SEQ ID NO: 3175890 - RNA, 20 nt, Human
ugcuaggaacacuccuucac

SEQ ID NO: 3175891 - RNA, 22 nt, Human
ugcuaggaacacuccuucacag

SEQ ID NO: 3175892 - RNA, 19 nt, Human
ugcugcuugaggcaacuca

SEQ ID NO: 3175893 - RNA, 20 nt, Human
ugcugggauuacagguguga

SEQ ID NO: 3175894 - RNA, 12 nt, Human
ugcugcuugagg

SEQ ID NO: 3175895 - RNA, 15 nt, Human
ugcugcuucauguuu

SEQ ID NO: 3175896 - RNA, 20 nt, Human
ugcugccucggauccccuuc

SEQ ID NO: 3175897 - RNA, 19 nt, Human
ugcugccucggauccccuu

SEQ ID NO: 3175898 - RNA, 22 nt, Human
ugcugccucggauccccuuccu

SEQ ID NO: 3175899 - RNA, 15 nt, Human
ugcuguaaaagcaag

SEQ ID NO: 3175900 - RNA, 16 nt, Human
ugcuguuaucccugcc

SEQ ID NO: 3175901 - RNA, 13 nt, Human
ugcuguuacaugc

SEQ ID NO: 3175902 - RNA, 18 nt, Human
ugcuguuacaguuuucuu

SEQ ID NO: 3175903 - RNA, 21 nt, Human
ugcuguguguugccugggaca

SEQ ID NO: 3175904 - RNA, 18 nt, Human
ugcuguguguggcuucug

SEQ ID NO: 3175905 - RNA, 17 nt, Human
ugcuguuacaguuuucu

SEQ ID NO: 3175906 - RNA, 13 nt, Human
ugcuguguuugcu

SEQ ID NO: 3175907 - RNA, 22 nt, Human
ugcuguuaacugcaaccuuguu

SEQ ID NO: 3175908 - RNA, 20 nt, Human
ugcugggggggauuguaaaa

SEQ ID NO: 3175909 - RNA, 17 nt, Human
ugcugggcuugucugua

SEQ ID NO: 3175910 - RNA, 22 nt, Human
ugcuggugggcuugucauagcc

SEQ ID NO: 3175911 - RNA, 19 nt, Human
ugcugguaaaaugaagaau

SEQ ID NO: 3175912 - RNA, 14 nt, Human
ugcugguaaaauga

SEQ ID NO: 3175913 - RNA, 16 nt, Human
ugcugguaaaaugaag

SEQ ID NO: 3175914 - RNA, 17 nt, Human
ugcugguaaaaugaaga

SEQ ID NO: 3175915 - RNA, 18 nt, Human
ugcugguaaaaugaagaa

SEQ ID NO: 3175916 - RNA, 13 nt, Human
ugcuggguguggc

SEQ ID NO: 3175917 - RNA, 15 nt, Human
gugaggaugucuggg

SEQ ID NO: 3175918 - RNA, 23 nt, Human
gugaggauuaaauaauguaaaua

SEQ ID NO: 3175919 - RNA, 11 nt, Human
gugaggccaga

SEQ ID NO: 3175920 - RNA, 15 nt, Human
gugaggccacugaag

SEQ ID NO: 3175921 - RNA, 16 nt, Human
gugaggccacugaaga

SEQ ID NO: 3175922 - RNA, 20 nt, Human
gugaggccacugaagaggag

SEQ ID NO: 3175923 - RNA, 21 nt, Human
gugaggccacugaagaggagg

SEQ ID NO: 3175924 - RNA, 22 nt, Human
gugaggccacugaagaggagga

SEQ ID NO: 3175925 - RNA, 23 nt, Human
gugaggccacugaagaggaggag

SEQ ID NO: 3175926 - RNA, 20 nt, Human
gugauccacccaccucagcc

SEQ ID NO: 3175927 - RNA, 18 nt, Human
gugauccacccaccucag

SEQ ID NO: 3175928 - RNA, 15 nt, Human
gugauccacccaccu

SEQ ID NO: 3175929 - RNA, 18 nt, Human
gugauccucccaccucag

SEQ ID NO: 3175930 - RNA, 15 nt, Human
gugauccucccaccu

SEQ ID NO: 3175931 - RNA, 14 nt, Human
gugauccucccacc

SEQ ID NO: 3175932 - RNA, 14 nt, Human
gugauccacucgcc

SEQ ID NO: 3175933 - RNA, 22 nt, Human
gugauccucccaccucagccuc

SEQ ID NO: 3175934 - RNA, 20 nt, Human
gugauccucccaccucagcc

SEQ ID NO: 3175935 - RNA, 20 nt, Human
gugauucacagugugaaucu

SEQ ID NO: 3175936 - RNA, 12 nt, Human
gugauuuucauu

SEQ ID NO: 3175937 - RNA, 12 nt, Human
gugcaaagccac

SEQ ID NO: 3175938 - RNA, 23 nt, Human
gugauucuccugccucagccucc

SEQ ID NO: 3175939 - RNA, 22 nt, Human
gugauucuccugccucagccuc

SEQ ID NO: 3175940 - RNA, 20 nt, Human
gugauucuccugccucagcc

SEQ ID NO: 3175941 - RNA, 19 nt, Human
gugauucuccugccucagc

SEQ ID NO: 3175942 - RNA, 18 nt, Human
gugauucuccugccucag

SEQ ID NO: 3175943 - RNA, 17 nt, Human
gugauucuccugccuca

SEQ ID NO: 3175944 - RNA, 16 nt, Human
gugauucuccugccuc

SEQ ID NO: 3175945 - RNA, 14 nt, Human
gugauucuccugcc

SEQ ID NO: 3175946 - RNA, 20 nt, Human
gugauucucaugccucagcc

SEQ ID NO: 3175947 - RNA, 22 nt, Human
gugcaaaguucccuacuuccug

SEQ ID NO: 3175948 - RNA, 19 nt, Human
gugcauaaguuaacuucca

SEQ ID NO: 3175949 - RNA, 18 nt, Human
gugcaguaacuugggagu

SEQ ID NO: 3175950 - RNA, 13 nt, Human
gugcaguagugca

SEQ ID NO: 3175951 - RNA, 15 nt, Human
gugcaucucagccca

SEQ ID NO: 3175952 - RNA, 22 nt, Human
gugccagguuuuuggucugacc

SEQ ID NO: 3175953 - RNA, 20 nt, Human
gugccagguuuuuggucuga

SEQ ID NO: 3175954 - RNA, 18 nt, Human
gugcaugcagcaucuaag

SEQ ID NO: 3175955 - RNA, 18 nt, Human
gugcaucucagcccacau

SEQ ID NO: 3175956 - RNA, 14 nt, Human
gugcaucucagccc

SEQ ID NO: 3175957 - RNA, 20 nt, Human
gugcccacaggaucagucug

SEQ ID NO: 3175958 - RNA, 23 nt, Human
gugcccaagaauagaugcugacu

SEQ ID NO: 3175959 - RNA, 11 nt, Human
gugcccagcuu

SEQ ID NO: 3175960 - RNA, 19 nt, Human
gugaccuuccaagagccug

SEQ ID NO: 3175961 - RNA, 16 nt, Human
gugacaacacuugugu

SEQ ID NO: 3175962 - RNA, 15 nt, Human
gugaccucugccuga

SEQ ID NO: 3175963 - RNA, 19 nt, Human
gugaccuccggccaggugc

SEQ ID NO: 3175964 - RNA, 19 nt, Human
gugaccucuagcccugccc

SEQ ID NO: 3175965 - RNA, 20 nt, Human
gugaccucuagcccugcccg

SEQ ID NO: 3175966 - RNA, 16 nt, Human
gugaccucagcuuuga

SEQ ID NO: 3175967 - RNA, 22 nt, Human
gugagccaccgugccuggccac

SEQ ID NO: 3175968 - RNA, 19 nt, Human
gugagcugcugccaugaac

SEQ ID NO: 3175969 - RNA, 17 nt, Human
gugagcugcugccauga

SEQ ID NO: 3175970 - RNA, 13 nt, Human
gugagcugcacca

SEQ ID NO: 3175971 - RNA, 16 nt, Human
gugaggaagccgcugg

SEQ ID NO: 3175972 - RNA, 19 nt, Human
gugaggaagccgcuggggc

SEQ ID NO: 3175973 - RNA, 11 nt, Human
gugaggaagcc

SEQ ID NO: 3175974 - RNA, 14 nt, Human
gugaggaaaucaaa

SEQ ID NO: 3175975 - RNA, 18 nt, Human
gugaggaaaucaaagugc

SEQ ID NO: 3175976 - RNA, 22 nt, Human
gugaggaaaucaaagugcuauu

SEQ ID NO: 3175977 - RNA, 11 nt, Human
gugagcuggag

SEQ ID NO: 3175978 - RNA, 17 nt, Human
gugagcaggcugugagu

SEQ ID NO: 3175979 - RNA, 17 nt, Human
gugacugaucucucgug

SEQ ID NO: 3175980 - RNA, 13 nt, Human
gugagccacugca

SEQ ID NO: 3175981 - RNA, 17 nt, Human
gugagccaccgugccug

SEQ ID NO: 3175982 - RNA, 21 nt, Human
gugagccaccgugccuggcca

SEQ ID NO: 3175983 - RNA, 16 nt, Human
gugagccaccacgccc

SEQ ID NO: 3175984 - RNA, 15 nt, Human
gugagccaccgugcc

SEQ ID NO: 3175985 - RNA, 15 nt, Human
gugagccaccacgcc

SEQ ID NO: 3175986 - RNA, 12 nt, Human
gugaaauuuuuc

SEQ ID NO: 3175987 - RNA, 14 nt, Human
gugaauaauuacag

SEQ ID NO: 3175988 - RNA, 14 nt, Human
gugaaauguaacug

SEQ ID NO: 3175989 - RNA, 12 nt, Human
gugaaauaucau

SEQ ID NO: 3175990 - RNA, 19 nt, Human
gugaaaggauaugaaucug

SEQ ID NO: 3175991 - RNA, 19 nt, Human
gugaaaggaaagagggagg

SEQ ID NO: 3175992 - RNA, 16 nt, Human
gugaauuacuaacuuc

SEQ ID NO: 3175993 - RNA, 19 nt, Human
gugaauuacuaacuucuaa

SEQ ID NO: 3175994 - RNA, 18 nt, Human
gugaauuacuaacuucua

SEQ ID NO: 3175995 - RNA, 14 nt, Human
gugaaucagagcac

SEQ ID NO: 3175996 - RNA, 14 nt, Human
gugaauauaaaugu

SEQ ID NO: 3175997 - RNA, 16 nt, Human
gugaauauaaaugugu

SEQ ID NO: 3175998 - RNA, 17 nt, Human
gugaauauaaaugugug

SEQ ID NO: 3175999 - RNA, 22 nt, Human
gugaauacugcuugaauaaaca

SEQ ID NO: 3176000 - RNA, 16 nt, Human
gugaaaaugugugugu

SEQ ID NO: 3176001 - RNA, 12 nt, Human
gugaaaagaaua

SEQ ID NO: 3176002 - RNA, 13 nt, Human
gugaaaauaauug

SEQ ID NO: 3176003 - RNA, 22 nt, Human
gugaaaauaagccaugagaaug

SEQ ID NO: 3176004 - RNA, 14 nt, Human
gugaaaagaaaaau

SEQ ID NO: 3176005 - RNA, 23 nt, Human
gugaaaagaaaaaugagccuggc

SEQ ID NO: 3176006 - RNA, 15 nt, Human
guggcagugggagcu

SEQ ID NO: 3176007 - RNA, 17 nt, Human
guggcagugggagcugc

SEQ ID NO: 3176008 - RNA, 16 nt, Human
guggcagugggagcug

SEQ ID NO: 3176009 - RNA, 20 nt, Human
guggcagggcacagggccug

SEQ ID NO: 3176010 - RNA, 19 nt, Human
guggcagggcacagggccu

SEQ ID NO: 3176011 - RNA, 18 nt, Human
guggcagggcacagggcc

SEQ ID NO: 3176012 - RNA, 15 nt, Human
guggcagggcacagg

SEQ ID NO: 3176013 - RNA, 14 nt, Human
guggcagggcacag

SEQ ID NO: 3176014 - RNA, 17 nt, Human
guggcaggacacugcag

SEQ ID NO: 3176015 - RNA, 19 nt, Human
guggcagcugcuuuugucu

SEQ ID NO: 3176016 - RNA, 13 nt, Human
guggcagcugcuu

SEQ ID NO: 3176017 - RNA, 12 nt, Human
guggcagcugcu

SEQ ID NO: 3176018 - RNA, 23 nt, Human
guggcagcugcgguccacccagg

SEQ ID NO: 3176019 - RNA, 22 nt, Human
guggcagcugcgguccacccag

SEQ ID NO: 3176020 - RNA, 21 nt, Human
guggcagcugcgguccaccca

SEQ ID NO: 3176021 - RNA, 19 nt, Human
guggcagcugcgguccacc

SEQ ID NO: 3176022 - RNA, 15 nt, Human
guggcaguuuggcaa

SEQ ID NO: 3176023 - RNA, 21 nt, Human
guggcagugggagcugccugu

SEQ ID NO: 3176024 - RNA, 19 nt, Human
guggcagugggagcugccu

SEQ ID NO: 3176025 - RNA, 11 nt, Human
guggccccacc

SEQ ID NO: 3176026 - RNA, 21 nt, Human
guggccacuccagaccccugg

SEQ ID NO: 3176027 - RNA, 16 nt, Human
guggccaucauuucug

SEQ ID NO: 3176028 - RNA, 14 nt, Human
guggagucauuucu

SEQ ID NO: 3176029 - RNA, 22 nt, Human
guggagucagccucgcaggccu

SEQ ID NO: 3176030 - RNA, 20 nt, Human
guggagguugcugguacaca

SEQ ID NO: 3176031 - RNA, 17 nt, Human
guggaguucaucuugaa

SEQ ID NO: 3176032 - RNA, 17 nt, Human
guggauacgugucaaug

SEQ ID NO: 3176033 - RNA, 18 nt, Human
guggaugccugguggcag

SEQ ID NO: 3176034 - RNA, 16 nt, Human
guggaugccugguggc

SEQ ID NO: 3176035 - RNA, 16 nt, Human
guggaugcaauuuuuc

SEQ ID NO: 3176036 - RNA, 20 nt, Human
guggagaagcggcuggcagc

SEQ ID NO: 3176037 - RNA, 13 nt, Human
guggacuuuuauu

SEQ ID NO: 3176038 - RNA, 23 nt, Human
guggacuuaggaagguggccuuc

SEQ ID NO: 3176039 - RNA, 21 nt, Human
guggaaauuaagaagaaacua

SEQ ID NO: 3176040 - RNA, 17 nt, Human
guggagaaucacaggcu

SEQ ID NO: 3176041 - RNA, 14 nt, Human
guggagacugcucc

SEQ ID NO: 3176042 - RNA, 21 nt, Human
guggagaaucacaggcugggc

SEQ ID NO: 3176043 - RNA, 20 nt, Human
guggagaaucacaggcuggg

SEQ ID NO: 3176044 - RNA, 19 nt, Human
guggagaaucacaggcugg

SEQ ID NO: 3176045 - RNA, 18 nt, Human
guggagaaucacaggcug

SEQ ID NO: 3176046 - RNA, 22 nt, Human
guggagacugcuccugagcccc

SEQ ID NO: 3176047 - RNA, 15 nt, Human
guggagacugcuccu

SEQ ID NO: 3176048 - RNA, 18 nt, Human
guggagaggcccggccuc

SEQ ID NO: 3176049 - RNA, 23 nt, Human
guggagccugacagccagaacuc

SEQ ID NO: 3176050 - RNA, 16 nt, Human
guggagcguucaccag

SEQ ID NO: 3176051 - RNA, 19 nt, Human
guggagccugacagccaga

SEQ ID NO: 3176052 - RNA, 22 nt, Human
guggagccugacagccagaacu

SEQ ID NO: 3176053 - RNA, 21 nt, Human
guggagccugacagccagaac

SEQ ID NO: 3176054 - RNA, 15 nt, Human
guggagcccaggagu

SEQ ID NO: 3176055 - RNA, 14 nt, Human
guggagcccaggag

SEQ ID NO: 3176056 - RNA, 18 nt, Human
gugcuuauguaugaggua

SEQ ID NO: 3176057 - RNA, 21 nt, Human
gugcuuauugauauucuaaga

SEQ ID NO: 3176058 - RNA, 13 nt, Human
gugcuuggaggaa

SEQ ID NO: 3176059 - RNA, 15 nt, Human
gugcuuggaggaagg

SEQ ID NO: 3176060 - RNA, 12 nt, Human
gugcuuggagga

SEQ ID NO: 3176061 - RNA, 21 nt, Human
gugcuucugccacccugcuga

SEQ ID NO: 3176062 - RNA, 22 nt, Human
gugcuucugccacccugcugag

SEQ ID NO: 3176063 - RNA, 22 nt, Human
gugcuuagcaaaaaauaaugac

SEQ ID NO: 3176064 - RNA, 19 nt, Human
gugcuguguuugcuccccu

SEQ ID NO: 3176065 - RNA, 21 nt, Human
gugcugccacacuucaggcuc

SEQ ID NO: 3176066 - RNA, 22 nt, Human
gugcugccauccagguucagcu

SEQ ID NO: 3176067 - RNA, 11 nt, Human
gugcugcccug

SEQ ID NO: 3176068 - RNA, 23 nt, Human
guggaaaagccaagaggcugcag

SEQ ID NO: 3176069 - RNA, 18 nt, Human
guggaaaaauagccugcc

SEQ ID NO: 3176070 - RNA, 16 nt, Human
gugcuuuuuauaaaaa

SEQ ID NO: 3176071 - RNA, 18 nt, Human
gugcuuuuuauaaaaaga

SEQ ID NO: 3176072 - RNA, 20 nt, Human
guggaaauuaagaagaaacu

SEQ ID NO: 3176073 - RNA, 19 nt, Human
guggaaauuaagaagaaac

SEQ ID NO: 3176074 - RNA, 18 nt, Human
guggaaauuaagaagaaa

SEQ ID NO: 3176075 - RNA, 17 nt, Human
guggaaauuaagaagaa

SEQ ID NO: 3176076 - RNA, 18 nt, Human
gugcuugugaaagagguc

SEQ ID NO: 3176077 - RNA, 17 nt, Human
gugccuuugcagcucag

SEQ ID NO: 3176078 - RNA, 16 nt, Human
gugcucuggacaggca

SEQ ID NO: 3176079 - RNA, 15 nt, Human
gugcucuggacaggc

SEQ ID NO: 3176080 - RNA, 21 nt, Human
gugccuuggggacaagagcag

SEQ ID NO: 3176081 - RNA, 18 nt, Human
gugcucuggacaggcaug

SEQ ID NO: 3176082 - RNA, 17 nt, Human
gugcucuggacaggcau

SEQ ID NO: 3176083 - RNA, 23 nt, Human
gugcugaaugguuuucaaaauaa

SEQ ID NO: 3176084 - RNA, 20 nt, Human
gugcugaaugguuuucaaaa

SEQ ID NO: 3176085 - RNA, 19 nt, Human
gugcugaaugguuuucaaa

SEQ ID NO: 3176086 - RNA, 16 nt, Human
gugcugagucugaagg

SEQ ID NO: 3176087 - RNA, 17 nt, Human
gugcugagucugaaggc

SEQ ID NO: 3176088 - RNA, 18 nt, Human
gugcugagucugaaggcu

SEQ ID NO: 3176089 - RNA, 19 nt, Human
gugcugagucugaaggcug

SEQ ID NO: 3176090 - RNA, 12 nt, Human
gugcugagucug

SEQ ID NO: 3176091 - RNA, 19 nt, Human
gugcugccauccagguuca

SEQ ID NO: 3176092 - RNA, 18 nt, Human
gugcugccauccagguuc

SEQ ID NO: 3176093 - RNA, 15 nt, Human
gugcugccauccagg

SEQ ID NO: 3176094 - RNA, 12 nt, Human
gugcugccacac

SEQ ID NO: 3176095 - RNA, 13 nt, Human
gugcugcaguaug

SEQ ID NO: 3176096 - RNA, 22 nt, Human
gugcugcagggcuuuaaaauuc

SEQ ID NO: 3176097 - RNA, 22 nt, Human
gucagcccaaaccaccagaagc

SEQ ID NO: 3176098 - RNA, 23 nt, Human
gucagcccaaaccaccagaagcc

SEQ ID NO: 3176099 - RNA, 14 nt, Human
gucagcaguugcug

SEQ ID NO: 3176100 - RNA, 23 nt, Human
gucagcaguugcugguaaaauga

SEQ ID NO: 3176101 - RNA, 22 nt, Human
gucaccugggcgucaucugguc

SEQ ID NO: 3176102 - RNA, 17 nt, Human
gucaccugcuucucugc

SEQ ID NO: 3176103 - RNA, 23 nt, Human
gucaccucacucagcaccacuca

SEQ ID NO: 3176104 - RNA, 13 nt, Human
gucaccugcuucu

SEQ ID NO: 3176105 - RNA, 16 nt, Human
gucaccugcuucucug

SEQ ID NO: 3176106 - RNA, 14 nt, Human
gucaccugcuucuc

SEQ ID NO: 3176107 - RNA, 23 nt, Human
gucagccucgcaggccucccugc

SEQ ID NO: 3176108 - RNA, 16 nt, Human
gucagccucgcaggcc

SEQ ID NO: 3176109 - RNA, 19 nt, Human
gucauacucgagucugagg

SEQ ID NO: 3176110 - RNA, 20 nt, Human
gucauacucgagucugaggc

SEQ ID NO: 3176111 - RNA, 18 nt, Human
gucauacucgagucugag

SEQ ID NO: 3176112 - RNA, 13 nt, Human
gucauacauagga

SEQ ID NO: 3176113 - RNA, 19 nt, Human
gucaucugagaaugaacaa

SEQ ID NO: 3176114 - RNA, 15 nt, Human
gucaucugagaauga

SEQ ID NO: 3176115 - RNA, 13 nt, Human
gucaucugagaau

SEQ ID NO: 3176116 - RNA, 22 nt, Human
gucaugcagaguauuucuaaag

SEQ ID NO: 3176117 - RNA, 23 nt, Human
gucaugauguuuuuaaaaucuua

SEQ ID NO: 3176118 - RNA, 22 nt, Human
gucaugauguuuuuaaaaucuu

SEQ ID NO: 3176119 - RNA, 13 nt, Human
gucaugauguuuu

SEQ ID NO: 3176120 - RNA, 19 nt, Human
gucaugaugcucuuuccca

SEQ ID NO: 3176121 - RNA, 20 nt, Human
gucaugauguuuuuaaaauc

SEQ ID NO: 3176122 - RNA, 16 nt, Human
gucaugauguuuuuaa

SEQ ID NO: 3176123 - RNA, 15 nt, Human
gucaugauguuuuua

SEQ ID NO: 3176124 - RNA, 14 nt, Human
gucaugauguuuuu

SEQ ID NO: 3176125 - RNA, 14 nt, Human
gucaugaugaauca

SEQ ID NO: 3176126 - RNA, 19 nt, Human
gucaugaugaaucaguccu

SEQ ID NO: 3176127 - RNA, 16 nt, Human
gucaugaugcucuuuc

SEQ ID NO: 3176128 - RNA, 18 nt, Human
gucaucauguuuugauuu

SEQ ID NO: 3176129 - RNA, 16 nt, Human
gucaucucagcuggau

SEQ ID NO: 3176130 - RNA, 13 nt, Human
gucaucuagcauu

SEQ ID NO: 3176131 - RNA, 21 nt, Human
gucaucuagcauuagguauau

SEQ ID NO: 3176132 - RNA, 21 nt, Human
gucauauaagauucauauuua

SEQ ID NO: 3176133 - RNA, 16 nt, Human
gucauaggaaguuagc

SEQ ID NO: 3176134 - RNA, 15 nt, Human
gucauaggaaguuag

SEQ ID NO: 3176135 - RNA, 17 nt, Human
gucauauuuaaacagaa

SEQ ID NO: 3176136 - RNA, 14 nt, Human
gucauauguuugcu

SEQ ID NO: 3176137 - RNA, 20 nt, Human
gucccagaaugccuccugca

SEQ ID NO: 3176138 - RNA, 17 nt, Human
gucccagauacuugggg

SEQ ID NO: 3176139 - RNA, 14 nt, Human
gucccagcagccag

SEQ ID NO: 3176140 - RNA, 11 nt, Human
gucccagcagc

SEQ ID NO: 3176141 - RNA, 16 nt, Human
gucccagcagccagcc

SEQ ID NO: 3176142 - RNA, 15 nt, Human
gucccagcagccagc

SEQ ID NO: 3176143 - RNA, 17 nt, Human
gucccagcagccagcca

SEQ ID NO: 3176144 - RNA, 14 nt, Human
gucccacucagucc

SEQ ID NO: 3176145 - RNA, 15 nt, Human
gucccacucagucca

SEQ ID NO: 3176146 - RNA, 19 nt, Human
gucccacuccaagccagca

SEQ ID NO: 3176147 - RNA, 13 nt, Human
gucccacuccaag

SEQ ID NO: 3176148 - RNA, 22 nt, Human
guccaggacaggagaugcugug

SEQ ID NO: 3176149 - RNA, 24 nt, Human
guccaggccuacuccugucuucug

SEQ ID NO: 3176150 - RNA, 23 nt, Human
guccaggccuacuccugucuucu

SEQ ID NO: 3176151 - RNA, 21 nt, Human
guccaggccuacuccugucuu

SEQ ID NO: 3176152 - RNA, 20 nt, Human
guccaggccuacuccugucu

SEQ ID NO: 3176153 - RNA, 19 nt, Human
guccaggccuacuccuguc

SEQ ID NO: 3176154 - RNA, 15 nt, Human
guccaggccuacucc

SEQ ID NO: 3176155 - RNA, 16 nt, Human
guccacccaggagccc

SEQ ID NO: 3176156 - RNA, 15 nt, Human
guccacccaggagcc

SEQ ID NO: 3176157 - RNA, 13 nt, Human
guccacccaggag

SEQ ID NO: 3176158 - RNA, 14 nt, Human
guccacccaggagc

SEQ ID NO: 3176159 - RNA, 16 nt, Human
gucauggagaaccacc

SEQ ID NO: 3176160 - RNA, 18 nt, Human
gucauggagaaccaccua

SEQ ID NO: 3176161 - RNA, 22 nt, Human
gucauggagaaccaccuacccc

SEQ ID NO: 3176162 - RNA, 15 nt, Human
gucaugcuccccugu

SEQ ID NO: 3176163 - RNA, 23 nt, Human
gucaugcuccccugugccagccc

SEQ ID NO: 3176164 - RNA, 20 nt, Human
gucaugcuccccugugccag

SEQ ID NO: 3176165 - RNA, 19 nt, Human
gucaugcuccccugugcca

SEQ ID NO: 3176166 - RNA, 17 nt, Human
gucaugcuccccugugc

SEQ ID NO: 3176167 - RNA, 12 nt, Human
guccacuuuucc

SEQ ID NO: 3176168 - RNA, 22 nt, Human
guccacuuuuccaguauuuuag

SEQ ID NO: 3176169 - RNA, 21 nt, Human
guccacuuuuccaguauuuua

SEQ ID NO: 3176170 - RNA, 20 nt, Human
guccacuuuuccaguauuuu

SEQ ID NO: 3176171 - RNA, 19 nt, Human
guccacuuuuccaguauuu

SEQ ID NO: 3176172 - RNA, 18 nt, Human
guccacuuuuccaguauu

SEQ ID NO: 3176173 - RNA, 15 nt, Human
guccacuuuuccagu

SEQ ID NO: 3176174 - RNA, 14 nt, Human
guccacuuuuccag

SEQ ID NO: 3176175 - RNA, 17 nt, Human
guccagaaggagggggu

SEQ ID NO: 3176176 - RNA, 21 nt, Human
guccagaaggagggggugacc

SEQ ID NO: 3176177 - RNA, 20 nt, Human
guauuaucuuguucaggaaa

SEQ ID NO: 3176178 - RNA, 23 nt, Human
guauuauguccugugagaugugu

SEQ ID NO: 3176179 - RNA, 23 nt, Human
guauuauaaacaagaaugaaggu

SEQ ID NO: 3176180 - RNA, 15 nt, Human
guauuacuucugcua

SEQ ID NO: 3176181 - RNA, 14 nt, Human
guauuacuucugcu

SEQ ID NO: 3176182 - RNA, 13 nt, Human
guauuacuucugc

SEQ ID NO: 3176183 - RNA, 15 nt, Human
guagagugggagcug

SEQ ID NO: 3176184 - RNA, 14 nt, Human
guagagucugaggg

SEQ ID NO: 3176185 - RNA, 21 nt, Human
guagagucugagggcuuguag

SEQ ID NO: 3176186 - RNA, 12 nt, Human
guagagucugag

SEQ ID NO: 3176187 - RNA, 13 nt, Human
guagagugggagc

SEQ ID NO: 3176188 - RNA, 15 nt, Human
guagagguauaauug

SEQ ID NO: 3176189 - RNA, 19 nt, Human
guagagguauaauugugug

SEQ ID NO: 3176190 - RNA, 16 nt, Human
guagagguauaauugu

SEQ ID NO: 3176191 - RNA, 20 nt, Human
guauuugaaaacagaaauug

SEQ ID NO: 3176192 - RNA, 17 nt, Human
guauuugaaagugccuu

SEQ ID NO: 3176193 - RNA, 17 nt, Human
guauuuggaauuagaac

SEQ ID NO: 3176194 - RNA, 16 nt, Human
guauuuggauaucugu

SEQ ID NO: 3176195 - RNA, 15 nt, Human
guauuugaaaacaga

SEQ ID NO: 3176196 - RNA, 19 nt, Human
guauuugaaaacagaaauu

SEQ ID NO: 3176197 - RNA, 16 nt, Human
guauuugaaaacagaa

SEQ ID NO: 3176198 - RNA, 11 nt, Human
guauuuauuca

SEQ ID NO: 3176199 - RNA, 23 nt, Human
guauucauauuuguacuuucugu

SEQ ID NO: 3176200 - RNA, 23 nt, Human
guauucagcaaggcgcuaacuug

SEQ ID NO: 3176201 - RNA, 22 nt, Human
guauucaauuaaagaaauaauu

SEQ ID NO: 3176202 - RNA, 14 nt, Human
guauucauauuugu

SEQ ID NO: 3176203 - RNA, 19 nt, Human
guauucauauuuguacuuu

SEQ ID NO: 3176204 - RNA, 17 nt, Human
guauucauauuuguacu

SEQ ID NO: 3176205 - RNA, 19 nt, Human
guauuuauuuaguauuuau

SEQ ID NO: 3176206 - RNA, 12 nt, Human
guauuuauucuu

SEQ ID NO: 3176207 - RNA, 22 nt, Human
gucaaguggcaaagcuguucuu

SEQ ID NO: 3176208 - RNA, 20 nt, Human
gucaaguggcaaagcuguuc

SEQ ID NO: 3176209 - RNA, 14 nt, Human
gucaaguggcaaag

SEQ ID NO: 3176210 - RNA, 13 nt, Human
gucaauuacagga

SEQ ID NO: 3176211 - RNA, 15 nt, Human
gucaauuacaggaag

SEQ ID NO: 3176212 - RNA, 14 nt, Human
gucaaugugugcac

SEQ ID NO: 3176213 - RNA, 20 nt, Human
gucaccugaagacucauucu

SEQ ID NO: 3176214 - RNA, 21 nt, Human
gucaccucacucagcaccacu

SEQ ID NO: 3176215 - RNA, 19 nt, Human
gucaccucacucagcacca

SEQ ID NO: 3176216 - RNA, 16 nt, Human
gucaccucacucagca

SEQ ID NO: 3176217 - RNA, 15 nt, Human
gucaccucacucagc

SEQ ID NO: 3176218 - RNA, 13 nt, Human
gucaccucacuca

SEQ ID NO: 3176219 - RNA, 13 nt, Human
gucaccccggcca

SEQ ID NO: 3176220 - RNA, 14 nt, Human
gucacccaugacag

SEQ ID NO: 3176221 - RNA, 12 nt, Human
guauuuggguuu

SEQ ID NO: 3176222 - RNA, 19 nt, Human
gucaagagggucugaggaa

SEQ ID NO: 3176223 - RNA, 18 nt, Human
gucaagagggucugagga

SEQ ID NO: 3176224 - RNA, 19 nt, Human
gucaagugaaaaaggagga

SEQ ID NO: 3176225 - RNA, 16 nt, Human
gucaagugaaaaagga

SEQ ID NO: 3176226 - RNA, 18 nt, Human
gucaagugaaaaaggagg

SEQ ID NO: 3176227 - RNA, 21 nt, Human
gucaagaauagcauuguaaaa

SEQ ID NO: 3176228 - RNA, 13 nt, Human
guccucacacuca

SEQ ID NO: 3176229 - RNA, 21 nt, Human
guccuauuaguguuauaugaa

SEQ ID NO: 3176230 - RNA, 22 nt, Human
guccuauuaguguuauaugaac

SEQ ID NO: 3176231 - RNA, 17 nt, Human
guccuauuaguguuaua

SEQ ID NO: 3176232 - RNA, 20 nt, Human
guccuauuaguguuauauga

SEQ ID NO: 3176233 - RNA, 16 nt, Human
guccuaggcuggaagg

SEQ ID NO: 3176234 - RNA, 17 nt, Human
guccuaggcuggaagga

SEQ ID NO: 3176235 - RNA, 22 nt, Human
guccuaggcuggaaggaggaag

SEQ ID NO: 3176236 - RNA, 13 nt, Human
guccuccagaacu

SEQ ID NO: 3176237 - RNA, 12 nt, Human
guccuccagaac

SEQ ID NO: 3176238 - RNA, 15 nt, Human
gucccuggcuuccuu

SEQ ID NO: 3176239 - RNA, 12 nt, Human
gucccagugccg

SEQ ID NO: 3176240 - RNA, 21 nt, Human
gucccaggcugagccucaguc

SEQ ID NO: 3176241 - RNA, 18 nt, Human
guccuagaauguuucauu

SEQ ID NO: 3176242 - RNA, 17 nt, Human
guccuagacuucaggga

SEQ ID NO: 3176243 - RNA, 23 nt, Human
guccuagaaauuccccacccuga

SEQ ID NO: 3176244 - RNA, 23 nt, Human
guccuacucugugucaggugggg

SEQ ID NO: 3176245 - RNA, 15 nt, Human
guccuacucuguguc

SEQ ID NO: 3176246 - RNA, 16 nt, Human
gucccugguggcagcu

SEQ ID NO: 3176247 - RNA, 16 nt, Human
gucccuggcuuccuua

SEQ ID NO: 3176248 - RNA, 17 nt, Human
gucccugguggcagcuc

SEQ ID NO: 3176249 - RNA, 13 nt, Human
guccuacucugug

SEQ ID NO: 3176250 - RNA, 16 nt, Human
guccugugagaugugu

SEQ ID NO: 3176251 - RNA, 18 nt, Human
guccuguaggaguucuau

SEQ ID NO: 3176252 - RNA, 14 nt, Human
guccuguaaacacu

SEQ ID NO: 3176253 - RNA, 16 nt, Human
guccuguaaacacuca

SEQ ID NO: 3176254 - RNA, 21 nt, Human
guccuguaaacacucagcugu

SEQ ID NO: 3176255 - RNA, 20 nt, Human
guccuggggaaccugacccc

SEQ ID NO: 3176256 - RNA, 19 nt, Human
guccuggggaaccugaccc

SEQ ID NO: 3176257 - RNA, 18 nt, Human
guccugggagugagcugg

SEQ ID NO: 3176258 - RNA, 17 nt, Human
guccugggagugagcug

SEQ ID NO: 3176259 - RNA, 19 nt, Human
guccugggagugagcuggu

SEQ ID NO: 3176260 - RNA, 23 nt, Human
guccucccaucucacacaugagc

SEQ ID NO: 3176261 - RNA, 13 nt, Human
guccucccaucuc

SEQ ID NO: 3176262 - RNA, 14 nt, Human
guccucccaucuca

SEQ ID NO: 3176263 - RNA, 12 nt, Human
guccucccaucu

SEQ ID NO: 3176264 - RNA, 20 nt, Human
guccuccagaacucuuccuc

SEQ ID NO: 3176265 - RNA, 17 nt, Human
guccuggcaugggaaug

SEQ ID NO: 3176266 - RNA, 16 nt, Human
guccugggagugagcu

SEQ ID NO: 3176267 - RNA, 15 nt, Human
guccugggagugagc

SEQ ID NO: 3176268 - RNA, 17 nt, Human
gucuaauguuuaagcag

SEQ ID NO: 3176269 - RNA, 15 nt, Human
gucuaauguuuaagc

SEQ ID NO: 3176270 - RNA, 15 nt, Human
gucuacacugugcug

SEQ ID NO: 3176271 - RNA, 15 nt, Human
gucuacagcuccccc

SEQ ID NO: 3176272 - RNA, 13 nt, Human
gucuacagcuccc

SEQ ID NO: 3176273 - RNA, 21 nt, Human
gucuacagcucccccagcucc

SEQ ID NO: 3176274 - RNA, 17 nt, Human
gucuacagcucccccag

SEQ ID NO: 3176275 - RNA, 12 nt, Human
gucuacauuuca

SEQ ID NO: 3176276 - RNA, 23 nt, Human
gucuaccccucccggcccugccu

SEQ ID NO: 3176277 - RNA, 16 nt, Human
guccuuaccagcagag

SEQ ID NO: 3176278 - RNA, 17 nt, Human
guccuuaccagcagagc

SEQ ID NO: 3176279 - RNA, 15 nt, Human
guccuuaccagcaga

SEQ ID NO: 3176280 - RNA, 16 nt, Human
guccugugucaguuua

SEQ ID NO: 3176281 - RNA, 15 nt, Human
gucguuuuaaaaaca

SEQ ID NO: 3176282 - RNA, 23 nt, Human
gucguuaaaaacagauuuggaaa

SEQ ID NO: 3176283 - RNA, 22 nt, Human
guccugugucaguuuauguuuu

SEQ ID NO: 3176284 - RNA, 17 nt, Human
guccugugucaguuuau

SEQ ID NO: 3176285 - RNA, 22 nt, Human
gucucgcucuguugcccaggcu

SEQ ID NO: 3176286 - RNA, 23 nt, Human
gucucacuguugcccaggcuggc

SEQ ID NO: 3176287 - RNA, 22 nt, Human
gucucacuguugcccaggcugg

SEQ ID NO: 3176288 - RNA, 21 nt, Human
gucucacuguugcccaggcug

SEQ ID NO: 3176289 - RNA, 20 nt, Human
gucucacuguugcccaggcu

SEQ ID NO: 3176290 - RNA, 19 nt, Human
gucucacuguugcccaggc

SEQ ID NO: 3176291 - RNA, 18 nt, Human
gucucacuguugcccagg

SEQ ID NO: 3176292 - RNA, 17 nt, Human
gucucacuguugcccag

SEQ ID NO: 3176293 - RNA, 16 nt, Human
gucucacuguugccca

SEQ ID NO: 3176294 - RNA, 23 nt, Human
gucucacuauguugcccaggcag

SEQ ID NO: 3176295 - RNA, 13 nt, Human
gucucacuguugc

SEQ ID NO: 3176296 - RNA, 21 nt, Human
gucucacuauguugcccaggc

SEQ ID NO: 3176297 - RNA, 20 nt, Human
gucucacuauguugcccagg

SEQ ID NO: 3176298 - RNA, 20 nt, Human
gucucggaucaggcucccag

SEQ ID NO: 3176299 - RNA, 23 nt, Human
gucucggaaccugugagcugcac

SEQ ID NO: 3176300 - RNA, 19 nt, Human
gucucggaaccugugagcu

SEQ ID NO: 3176301 - RNA, 19 nt, Human
gucucucacagacaggacc

SEQ ID NO: 3176302 - RNA, 16 nt, Human
gucucucacagacagg

SEQ ID NO: 3176303 - RNA, 14 nt, Human
gucucucacagaca

SEQ ID NO: 3176304 - RNA, 12 nt, Human
gucucucacaga

SEQ ID NO: 3176305 - RNA, 12 nt, Human
gucucugugagg

SEQ ID NO: 3176306 - RNA, 17 nt, Human
gucucugguuccucccc

SEQ ID NO: 3176307 - RNA, 23 nt, Human
gucucucacagacaggaccccug

SEQ ID NO: 3176308 - RNA, 19 nt, Human
gucugaggaauccagaccc

SEQ ID NO: 3176309 - RNA, 18 nt, Human
gucugaggaauccagacc

SEQ ID NO: 3176310 - RNA, 15 nt, Human
gucugacccacugcu

SEQ ID NO: 3176311 - RNA, 11 nt, Human
gucucuucucc

SEQ ID NO: 3176312 - RNA, 14 nt, Human
gucugacccacugc

SEQ ID NO: 3176313 - RNA, 13 nt, Human
gucugacccacug

SEQ ID NO: 3176314 - RNA, 14 nt, Human
gucucuucuccacu

SEQ ID NO: 3176315 - RNA, 16 nt, Human
gucucuucuccacugg

SEQ ID NO: 3176316 - RNA, 15 nt, Human
gucucuucuccacug

SEQ ID NO: 3176317 - RNA, 21 nt, Human
gucugauucccaagcucugcu

SEQ ID NO: 3176318 - RNA, 20 nt, Human
gucugauucccaagcucugc

SEQ ID NO: 3176319 - RNA, 20 nt, Human
gucugcacaccuugaaucug

SEQ ID NO: 3176320 - RNA, 21 nt, Human
gucugaggaauccagacccgg

SEQ ID NO: 3176321 - RNA, 22 nt, Human
gucugaggccguugcugacuua

SEQ ID NO: 3176322 - RNA, 20 nt, Human
gucugagggcuuguaguucu

SEQ ID NO: 3176323 - RNA, 18 nt, Human
gucugaggccguugcuga

SEQ ID NO: 3176324 - RNA, 21 nt, Human
gucugagggcuuguaguucuu

SEQ ID NO: 3176325 - RNA, 21 nt, Human
gucugaguuguuaccccaagc

SEQ ID NO: 3176326 - RNA, 17 nt, Human
gucugagguugggagag

SEQ ID NO: 3176327 - RNA, 19 nt, Human
gucugauucccaagcucug

SEQ ID NO: 3176328 - RNA, 18 nt, Human
gucugauucccaagcucu

SEQ ID NO: 3176329 - RNA, 17 nt, Human
gucugauucccaagcuc

SEQ ID NO: 3176330 - RNA, 14 nt, Human
gucugauauucaaa

SEQ ID NO: 3176331 - RNA, 20 nt, Human
gggcgcgugaggcccguggg

SEQ ID NO: 3176332 - RNA, 16 nt, Human
gggcgcgguggcucac

SEQ ID NO: 3176333 - RNA, 13 nt, Human
gggcucccuuccc

SEQ ID NO: 3176334 - RNA, 14 nt, Human
gggcucccuuccca

SEQ ID NO: 3176335 - RNA, 17 nt, Human
gggcucccuucccaccu

SEQ ID NO: 3176336 - RNA, 18 nt, Human
gggcucccuucccaccuc

SEQ ID NO: 3176337 - RNA, 23 nt, Human
gggcucccuucccaccucucuca

SEQ ID NO: 3176338 - RNA, 18 nt, Human
gggccuggucguuuucaa

SEQ ID NO: 3176339 - RNA, 14 nt, Human
gggccuggcucagg

SEQ ID NO: 3176340 - RNA, 16 nt, Human
gggccuggcucaggug

SEQ ID NO: 3176341 - RNA, 12 nt, Human
gggccuggcuca

SEQ ID NO: 3176342 - RNA, 19 nt, Human
gggccuggccugagcuggg

SEQ ID NO: 3176343 - RNA, 14 nt, Human
gggccuggcccaug

SEQ ID NO: 3176344 - RNA, 10 nt, Human
gggccuggca

SEQ ID NO: 3176345 - RNA, 22 nt, Human
gggccuggcagccgugccuuca

SEQ ID NO: 3176346 - RNA, 22 nt, Human
ggcucccaaaacaccugacagc

SEQ ID NO: 3176347 - RNA, 21 nt, Human
ggcucccacaggcccuuccuc

SEQ ID NO: 3176348 - RNA, 20 nt, Human
ggcucccacaggcccuuccu

SEQ ID NO: 3176349 - RNA, 14 nt, Human
gggcuucaguggca

SEQ ID NO: 3176350 - RNA, 16 nt, Human
gggcugaggugggagg

SEQ ID NO: 3176351 - RNA, 14 nt, Human
gggcugcaccggcu

SEQ ID NO: 3176352 - RNA, 20 nt, Human
gggcugacugggccagggga

SEQ ID NO: 3176353 - RNA, 16 nt, Human
gggcugacugggccag

SEQ ID NO: 3176354 - RNA, 15 nt, Human
gggcugaauguaugu

SEQ ID NO: 3176355 - RNA, 15 nt, Human
gggcucugccuccca

SEQ ID NO: 3176356 - RNA, 16 nt, Human
gggcucugccucccau

SEQ ID NO: 3176357 - RNA, 17 nt, Human
gggcucugccucccauc

SEQ ID NO: 3176358 - RNA, 20 nt, Human
gggcucugccucccaucacc

SEQ ID NO: 3176359 - RNA, 13 nt, Human
gggcucugccucc

SEQ ID NO: 3176360 - RNA, 13 nt, Human
gggcuucauacac

SEQ ID NO: 3176361 - RNA, 19 nt, Human
gggcuucauccuccucaga

SEQ ID NO: 3176362 - RNA, 20 nt, Human
gggcuucaguggcagcugcu

SEQ ID NO: 3176363 - RNA, 19 nt, Human
gggcuucaguggcagcugc

SEQ ID NO: 3176364 - RNA, 18 nt, Human
gggcuucaguggcagcug

SEQ ID NO: 3176365 - RNA, 17 nt, Human
gggcuucaguggcagcu

SEQ ID NO: 3176366 - RNA, 16 nt, Human
gggcuucaguggcagc

SEQ ID NO: 3176367 - RNA, 15 nt, Human
gggcuucaguggcag

SEQ ID NO: 3176368 - RNA, 19 nt, Human
gggcuucauacacaugaga

SEQ ID NO: 3176369 - RNA, 20 nt, Human
gggcuucauccuccucagau

SEQ ID NO: 3176370 - RNA, 18 nt, Human
gggcuuccugaggggaga

SEQ ID NO: 3176371 - RNA, 20 nt, Human
gggcuuggggaccagagcug

SEQ ID NO: 3176372 - RNA, 16 nt, Human
gggcuucugugcccag

SEQ ID NO: 3176373 - RNA, 19 nt, Human
gggcuucugugcaccuggg

SEQ ID NO: 3176374 - RNA, 23 nt, Human
gggcuucugugcaccugggcucu

SEQ ID NO: 3176375 - RNA, 13 nt, Human
ggggauagaugug

SEQ ID NO: 3176376 - RNA, 17 nt, Human
ggggaucacagccucug

SEQ ID NO: 3176377 - RNA, 17 nt, Human
ggggcagagcccugcuc

SEQ ID NO: 3176378 - RNA, 12 nt, Human
ggggcagccucu

SEQ ID NO: 3176379 - RNA, 19 nt, Human
ggggcagccugccuugccc

SEQ ID NO: 3176380 - RNA, 14 nt, Human
ggggcagccugccu

SEQ ID NO: 3176381 - RNA, 13 nt, Human
ggggaguggccac

SEQ ID NO: 3176382 - RNA, 12 nt, Human
ggggagcuggac

SEQ ID NO: 3176383 - RNA, 19 nt, Human
ggggagguuuucuccccca

SEQ ID NO: 3176384 - RNA, 21 nt, Human
gggcuuggggaccagagcugc

SEQ ID NO: 3176385 - RNA, 11 nt, Human
ggggagaaagu

SEQ ID NO: 3176386 - RNA, 14 nt, Human
ggggagcacccuga

SEQ ID NO: 3176387 - RNA, 18 nt, Human
ggggagacuuugauguca

SEQ ID NO: 3176388 - RNA, 11 nt, Human
ggguacaugug

SEQ ID NO: 3176389 - RNA, 18 nt, Human
ggguacccacugcucugg

SEQ ID NO: 3176390 - RNA, 15 nt, Human
ggguacccacugcuc

SEQ ID NO: 3176391 - RNA, 13 nt, Human
ggguacccacugc

SEQ ID NO: 3176392 - RNA, 23 nt, Human
ggguagagcggagaaaggaaggg

SEQ ID NO: 3176393 - RNA, 23 nt, Human
ggguacuuguggacacagcucuu

SEQ ID NO: 3176394 - RNA, 22 nt, Human
ggguacuuguggacacagcucu

SEQ ID NO: 3176395 - RNA, 19 nt, Human
ggguacuuguggacacagc

SEQ ID NO: 3176396 - RNA, 14 nt, Human
ggggucuuaccuug

SEQ ID NO: 3176397 - RNA, 18 nt, Human
ggggugaccuccggccag

SEQ ID NO: 3176398 - RNA, 22 nt, Human
ggggugaccuccggccaggugc

SEQ ID NO: 3176399 - RNA, 23 nt, Human
gggguucccuuuuuuggcugcug

SEQ ID NO: 3176400 - RNA, 22 nt, Human
gggguucuuucuuccucugcug

SEQ ID NO: 3176401 - RNA, 20 nt, Human
gggguucuuucuuccucugc

SEQ ID NO: 3176402 - RNA, 18 nt, Human
gggguuccuucugggcau

SEQ ID NO: 3176403 - RNA, 13 nt, Human
ggggcugggacau

SEQ ID NO: 3176404 - RNA, 16 nt, Human
ggggcugggcagagga

SEQ ID NO: 3176405 - RNA, 17 nt, Human
ggggcugggcagaggaa

SEQ ID NO: 3176406 - RNA, 19 nt, Human
ggggcuucugugcaccugg

SEQ ID NO: 3176407 - RNA, 21 nt, Human
ggggcuucugugcaccugggc

SEQ ID NO: 3176408 - RNA, 22 nt, Human
ggggcuucugugcaccugggcu

SEQ ID NO: 3176409 - RNA, 20 nt, Human
gggggaacgcccacuucccu

SEQ ID NO: 3176410 - RNA, 23 nt, Human
ggggcugcaccggcuggccuggc

SEQ ID NO: 3176411 - RNA, 16 nt, Human
gguccccuccaggagu

SEQ ID NO: 3176412 - RNA, 14 nt, Human
ggucccugguggca

SEQ ID NO: 3176413 - RNA, 22 nt, Human
ggucucacuauguugcccaggc

SEQ ID NO: 3176414 - RNA, 21 nt, Human
gguccgaguguguuucauccu

SEQ ID NO: 3176415 - RNA, 22 nt, Human
ggucccugguggcagcucaccu

SEQ ID NO: 3176416 - RNA, 23 nt, Human
ggugaaggaggcuccaggcagca

SEQ ID NO: 3176417 - RNA, 22 nt, Human
ggugaaggaggcuccaggcagc

SEQ ID NO: 3176418 - RNA, 18 nt, Human
ggugaaggaggcuccagg

SEQ ID NO: 3176419 - RNA, 14 nt, Human
ggugaaggaggcuc

SEQ ID NO: 3176420 - RNA, 16 nt, Human
ggugaacuugguuccc

SEQ ID NO: 3176421 - RNA, 19 nt, Human
ggucugaggaauccagacc

SEQ ID NO: 3176422 - RNA, 12 nt, Human
ggucucacucug

SEQ ID NO: 3176423 - RNA, 21 nt, Human
ggucucacuauguugcccagg

SEQ ID NO: 3176424 - RNA, 19 nt, Human
ggucuccgaaaugcugucu

SEQ ID NO: 3176425 - RNA, 17 nt, Human
ggucuccgaaaugcugu

SEQ ID NO: 3176426 - RNA, 16 nt, Human
ggucugacccacugcu

SEQ ID NO: 3176427 - RNA, 15 nt, Human
ggucugacccacugc

SEQ ID NO: 3176428 - RNA, 19 nt, Human
ggucucgaacuccugaccu

SEQ ID NO: 3176429 - RNA, 19 nt, Human
ggucuccucaggaccaggg

SEQ ID NO: 3176430 - RNA, 15 nt, Human
ggucuccucaggacc

SEQ ID NO: 3176431 - RNA, 12 nt, Human
ggucuccucagg

SEQ ID NO: 3176432 - RNA, 20 nt, Human
ggucucgaacuccugaccuu

SEQ ID NO: 3176433 - RNA, 20 nt, Human
ggugcccagaaugaggcugc

SEQ ID NO: 3176434 - RNA, 22 nt, Human
ggugauagguauaaguggugug

SEQ ID NO: 3176435 - RNA, 22 nt, Human
ggugauaauagaagaguggcag

SEQ ID NO: 3176436 - RNA, 14 nt, Human
ggugauaagggaaa

SEQ ID NO: 3176437 - RNA, 15 nt, Human
ggugauaagggaaaa

SEQ ID NO: 3176438 - RNA, 14 nt, Human
ggugaccucugccu

SEQ ID NO: 3176439 - RNA, 18 nt, Human
ggugaccuccggccaggu

SEQ ID NO: 3176440 - RNA, 20 nt, Human
ggugaccuccggccaggugc

SEQ ID NO: 3176441 - RNA, 16 nt, Human
ggugaccucugccuga

SEQ ID NO: 3176442 - RNA, 21 nt, Human
ggugaccucuagcccugcccg

SEQ ID NO: 3176443 - RNA, 17 nt, Human
ggugaguccuccagaac

SEQ ID NO: 3176444 - RNA, 15 nt, Human
ggugaguccuccaga

SEQ ID NO: 3176445 - RNA, 19 nt, Human
ggugcuacaaaaacacagc

SEQ ID NO: 3176446 - RNA, 15 nt, Human
ggugcgaucuggguu

SEQ ID NO: 3176447 - RNA, 23 nt, Human
ggugcuaucucccccagccccau

SEQ ID NO: 3176448 - RNA, 21 nt, Human
ggugcuaucucccccagcccc

SEQ ID NO: 3176449 - RNA, 22 nt, Human
ggugcuaucucccccagcccca

SEQ ID NO: 3176450 - RNA, 13 nt, Human
gguggcagcugcg

SEQ ID NO: 3176451 - RNA, 12 nt, Human
gguggcagcugc

SEQ ID NO: 3176452 - RNA, 13 nt, Human
gguggcagcucac

SEQ ID NO: 3176453 - RNA, 11 nt, Human
gguggcagcug

SEQ ID NO: 3176454 - RNA, 23 nt, Human
gguggcagcugcgguccacccag

SEQ ID NO: 3176455 - RNA, 15 nt, Human
gguggcagcugcggu

SEQ ID NO: 3176456 - RNA, 19 nt, Human
ggguuccagcaccacacuc

SEQ ID NO: 3176457 - RNA, 22 nt, Human
ggguuccagcaauucuccugcc

SEQ ID NO: 3176458 - RNA, 16 nt, Human
gggugcuguuuugcca

SEQ ID NO: 3176459 - RNA, 22 nt, Human
ggguaccacugaaucuguacag

SEQ ID NO: 3176460 - RNA, 19 nt, Human
ggguuggccccugcccggc

SEQ ID NO: 3176461 - RNA, 14 nt, Human
ggguucuuucuucc

SEQ ID NO: 3176462 - RNA, 16 nt, Human
ggguuggccccugccc

SEQ ID NO: 3176463 - RNA, 15 nt, Human
ggguucuguaaaaug

SEQ ID NO: 3176464 - RNA, 22 nt, Human
ggguucuguaaaauggaaaacu

SEQ ID NO: 3176465 - RNA, 17 nt, Human
ggguucuacccaggugc

SEQ ID NO: 3176466 - RNA, 22 nt, Human
ggguucuacccaggugcuagga

SEQ ID NO: 3176467 - RNA, 23 nt, Human
ggguucccuuuuuuggcugcuga

SEQ ID NO: 3176468 - RNA, 12 nt, Human
gguaccuugcac

SEQ ID NO: 3176469 - RNA, 11 nt, Human
gguaccuugca

SEQ ID NO: 3176470 - RNA, 24 nt, Human
gguaccuugcacacaucaucugua

SEQ ID NO: 3176471 - RNA, 23 nt, Human
gguaccuugcacacaucaucugu

SEQ ID NO: 3176472 - RNA, 18 nt, Human
gguaccgucuacauuuca

SEQ ID NO: 3176473 - RNA, 17 nt, Human
gguacuguaauguuaau

SEQ ID NO: 3176474 - RNA, 21 nt, Human
gguacuuguggacacagcucu

SEQ ID NO: 3176475 - RNA, 22 nt, Human
gguacuuguggacacagcucuu

SEQ ID NO: 3176476 - RNA, 20 nt, Human
gguacuuguggacacagcuc

SEQ ID NO: 3176477 - RNA, 19 nt, Human
ggguuuacagugaagaaag

SEQ ID NO: 3176478 - RNA, 15 nt, Human
ggguugggcuggugu

SEQ ID NO: 3176479 - RNA, 12 nt, Human
ggguuggcuuuu

SEQ ID NO: 3176480 - RNA, 16 nt, Human
gguacccacugcucug

SEQ ID NO: 3176481 - RNA, 20 nt, Human
ggguuucaccauguuggcca

SEQ ID NO: 3176482 - RNA, 17 nt, Human
gguacccacugcucugg

SEQ ID NO: 3176483 - RNA, 23 nt, Human
ggucagcccaaaccaccagaagc

SEQ ID NO: 3176484 - RNA, 22 nt, Human
ggucccaccccacacacgccag

SEQ ID NO: 3176485 - RNA, 11 nt, Human
ggucagagccu

SEQ ID NO: 3176486 - RNA, 14 nt, Human
ggucccacucaguc

SEQ ID NO: 3176487 - RNA, 12 nt, Human
ggucccacucag

SEQ ID NO: 3176488 - RNA, 22 nt, Human
ggucccacucaguccauagcag

SEQ ID NO: 3176489 - RNA, 14 nt, Human
ggucagcucagagc

SEQ ID NO: 3176490 - RNA, 18 nt, Human
ggucccccuuccauggac

SEQ ID NO: 3176491 - RNA, 23 nt, Human
ggucccccuuccauggacuuugu

SEQ ID NO: 3176492 - RNA, 13 nt, Human
ggucccccuucca

SEQ ID NO: 3176493 - RNA, 23 nt, Human
gguccccagcccuuccucugcuc

SEQ ID NO: 3176494 - RNA, 22 nt, Human
gguccccagcccuuccucugcu

SEQ ID NO: 3176495 - RNA, 19 nt, Human
gguccccagcccuuccucu

SEQ ID NO: 3176496 - RNA, 20 nt, Human
gguagaaugaccuuguaaug

SEQ ID NO: 3176497 - RNA, 12 nt, Human
ggucacucuggc

SEQ ID NO: 3176498 - RNA, 17 nt, Human
ggucacagccaggcgcu

SEQ ID NO: 3176499 - RNA, 14 nt, Human
ggucacagccaggc

SEQ ID NO: 3176500 - RNA, 13 nt, Human
ggucacagccagg

SEQ ID NO: 3176501 - RNA, 16 nt, Human
ggucagagccugcagu

SEQ ID NO: 3176502 - RNA, 15 nt, Human
ggucagagccugcag

SEQ ID NO: 3176503 - RNA, 14 nt, Human
ggucagagccugca

SEQ ID NO: 3176504 - RNA, 13 nt, Human
ggucagagccugc

SEQ ID NO: 3176505 - RNA, 16 nt, Human
ggucacucuggcagcu

SEQ ID NO: 3176506 - RNA, 20 nt, Human
ggucacucuggcagcucaga

SEQ ID NO: 3176507 - RNA, 22 nt, Human
ggucacucuggcagcucagaga

SEQ ID NO: 3176508 - RNA, 12 nt, Human
ggucagagccug

SEQ ID NO: 3176509 - RNA, 13 nt, Human
guaauuauuugaa

SEQ ID NO: 3176510 - RNA, 15 nt, Human
guaauuauuugaaug

SEQ ID NO: 3176511 - RNA, 14 nt, Human
guaauuauuugaau

SEQ ID NO: 3176512 - RNA, 22 nt, Human
guaauucuuauuccauauuaga

SEQ ID NO: 3176513 - RNA, 16 nt, Human
guaauucuuauuccau

SEQ ID NO: 3176514 - RNA, 23 nt, Human
guaauuaauaauagauugugaau

SEQ ID NO: 3176515 - RNA, 21 nt, Human
guaauuaaguacuauguauca

SEQ ID NO: 3176516 - RNA, 13 nt, Human
guaauuaaacugu

SEQ ID NO: 3176517 - RNA, 16 nt, Human
guaauuaaacuguuaa

SEQ ID NO: 3176518 - RNA, 22 nt, Human
guaauuaaacuguuaacuuauu

SEQ ID NO: 3176519 - RNA, 20 nt, Human
guaauuaaguacuauguauc

SEQ ID NO: 3176520 - RNA, 17 nt, Human
guaauuaaguacuaugu

SEQ ID NO: 3176521 - RNA, 14 nt, Human
guaauuaaguacua

SEQ ID NO: 3176522 - RNA, 18 nt, Human
guaauguugugaauaauu

SEQ ID NO: 3176523 - RNA, 17 nt, Human
guaauguugugaauaau

SEQ ID NO: 3176524 - RNA, 15 nt, Human
guaauguugugaaua

SEQ ID NO: 3176525 - RNA, 14 nt, Human
guaauguugugaau

SEQ ID NO: 3176526 - RNA, 16 nt, Human
guaaugaaacuuggau

SEQ ID NO: 3176527 - RNA, 15 nt, Human
guaaugaaacuugga

SEQ ID NO: 3176528 - RNA, 17 nt, Human
guaaucuuguugguuca

SEQ ID NO: 3176529 - RNA, 16 nt, Human
guaaucuguauaauac

SEQ ID NO: 3176530 - RNA, 22 nt, Human
guaaucuguauaauacuuugua

SEQ ID NO: 3176531 - RNA, 17 nt, Human
guaaucgaccugccucg

SEQ ID NO: 3176532 - RNA, 15 nt, Human
guaaucguguccccu

SEQ ID NO: 3176533 - RNA, 18 nt, Human
guaaugaugucguuugaa

SEQ ID NO: 3176534 - RNA, 22 nt, Human
guaauggggcagaaaucugagg

SEQ ID NO: 3176535 - RNA, 14 nt, Human
guaauguaacugcu

SEQ ID NO: 3176536 - RNA, 12 nt, Human
guaauguaacug

SEQ ID NO: 3176537 - RNA, 19 nt, Human
guaauguaacugcucuugg

SEQ ID NO: 3176538 - RNA, 19 nt, Human
guaauguaucaaauacauu

SEQ ID NO: 3176539 - RNA, 15 nt, Human
guacagaauuugaau

SEQ ID NO: 3176540 - RNA, 17 nt, Human
guacagaauuugaauua

SEQ ID NO: 3176541 - RNA, 18 nt, Human
guacagaauuugaauuau

SEQ ID NO: 3176542 - RNA, 16 nt, Human
guacagacaacaaacc

SEQ ID NO: 3176543 - RNA, 22 nt, Human
guacacuucaguuaucuugauc

SEQ ID NO: 3176544 - RNA, 12 nt, Human
guacagagccca

SEQ ID NO: 3176545 - RNA, 18 nt, Human
guacagagcccacgcccc

SEQ ID NO: 3176546 - RNA, 22 nt, Human
guacagagcccacgcccccacu

SEQ ID NO: 3176547 - RNA, 20 nt, Human
guacagagccguaaaaacug

SEQ ID NO: 3176548 - RNA, 22 nt, Human
guacagcacuuucuucuuccca

SEQ ID NO: 3176549 - RNA, 15 nt, Human
guacauaauacugaa

SEQ ID NO: 3176550 - RNA, 16 nt, Human
guacauaauacugaac

SEQ ID NO: 3176551 - RNA, 18 nt, Human
guacauaauacugaacca

SEQ ID NO: 3176552 - RNA, 19 nt, Human
guacauaauacugaaccac

SEQ ID NO: 3176553 - RNA, 14 nt, Human
guacauaauacuga

SEQ ID NO: 3176554 - RNA, 15 nt, Human
guacccacugcucug

SEQ ID NO: 3176555 - RNA, 22 nt, Human
guacauauuagcgacaacagau

SEQ ID NO: 3176556 - RNA, 14 nt, Human
guacagguacuuug

SEQ ID NO: 3176557 - RNA, 16 nt, Human
guacagguacuuuguc

SEQ ID NO: 3176558 - RNA, 15 nt, Human
guacagguacuuugu

SEQ ID NO: 3176559 - RNA, 15 nt, Human
guacuucuucuguaa

SEQ ID NO: 3176560 - RNA, 16 nt, Human
guacuucuucuguaau

SEQ ID NO: 3176561 - RNA, 18 nt, Human
guacuucuucuguaauau

SEQ ID NO: 3176562 - RNA, 18 nt, Human
guacuucuugaauauaaa

SEQ ID NO: 3176563 - RNA, 19 nt, Human
guacuucuugaauauaaaa

SEQ ID NO: 3176564 - RNA, 20 nt, Human
guacuucuugaauauaaaaa

SEQ ID NO: 3176565 - RNA, 22 nt, Human
guacuugcccugaccaugcauu

SEQ ID NO: 3176566 - RNA, 23 nt, Human
guacuugcccugaccaugcauuu

SEQ ID NO: 3176567 - RNA, 21 nt, Human
guacuucuccacccugcucuc

SEQ ID NO: 3176568 - RNA, 20 nt, Human
guacuucuccacccugcucu

SEQ ID NO: 3176569 - RNA, 19 nt, Human
guacuucuccacccugcuc

SEQ ID NO: 3176570 - RNA, 18 nt, Human
guacuucuccacccugcu

SEQ ID NO: 3176571 - RNA, 17 nt, Human
guacuucuccacccugc

SEQ ID NO: 3176572 - RNA, 16 nt, Human
guacuucuccacccug

SEQ ID NO: 3176573 - RNA, 20 nt, Human
guacuuguggacacagcucu

SEQ ID NO: 3176574 - RNA, 16 nt, Human
guacuuguggacacag

SEQ ID NO: 3176575 - RNA, 21 nt, Human
guacuuguggacacagcucuu

SEQ ID NO: 3176576 - RNA, 22 nt, Human
guacuuuauagaagaaugcaug

SEQ ID NO: 3176577 - RNA, 15 nt, Human
guacuuuaucaugaa

SEQ ID NO: 3176578 - RNA, 20 nt, Human
guacuuuaucaugaaugcuu

SEQ ID NO: 3176579 - RNA, 23 nt, Human
guacuuugauucacauguuuuca

SEQ ID NO: 3176580 - RNA, 21 nt, Human
guacuuugauucacauguuuu

SEQ ID NO: 3176581 - RNA, 20 nt, Human
guacuuugauucacauguuu

SEQ ID NO: 3176582 - RNA, 17 nt, Human
guacuuugauucacaug

SEQ ID NO: 3176583 - RNA, 23 nt, Human
guacuuugucuaagaaacauugg

SEQ ID NO: 3176584 - RNA, 20 nt, Human
guacuuugucuaagaaacau

SEQ ID NO: 3176585 - RNA, 13 nt, Human
guacuuugauuca

SEQ ID NO: 3176586 - RNA, 16 nt, Human
guacuuugauucacau

SEQ ID NO: 3176587 - RNA, 15 nt, Human
guacuuugauucaca

SEQ ID NO: 3176588 - RNA, 21 nt, Human
guacuuucuguuaaaaugcau

SEQ ID NO: 3176589 - RNA, 19 nt, Human
guacuuucuguuaaaaugc

SEQ ID NO: 3176590 - RNA, 18 nt, Human
guacuuucuguuaaaaug

SEQ ID NO: 3176591 - RNA, 16 nt, Human
guacuuucuguuaaaa

SEQ ID NO: 3176592 - RNA, 15 nt, Human
guacuuucuguuaaa

SEQ ID NO: 3176593 - RNA, 14 nt, Human
guacuuucuguuaa

SEQ ID NO: 3176594 - RNA, 13 nt, Human
guacuuucuguua

SEQ ID NO: 3176595 - RNA, 12 nt, Human
guacuuucuguu

SEQ ID NO: 3176596 - RNA, 11 nt, Human
guacuuucugu

SEQ ID NO: 3176597 - RNA, 14 nt, Human
guacuuuaaaaauu

SEQ ID NO: 3176598 - RNA, 22 nt, Human
guacuuucauauuuuaaacaga

SEQ ID NO: 3176599 - RNA, 15 nt, Human
guagaggagaaacug

SEQ ID NO: 3176600 - RNA, 15 nt, Human
guagaggaaggaugc

SEQ ID NO: 3176601 - RNA, 18 nt, Human
guagagccagggucucac

SEQ ID NO: 3176602 - RNA, 16 nt, Human
guagagcggagaaagg

SEQ ID NO: 3176603 - RNA, 12 nt, Human
guagaaaaauuu

SEQ ID NO: 3176604 - RNA, 17 nt, Human
guagaaaauauguccca

SEQ ID NO: 3176605 - RNA, 19 nt, Human
guacgacgucagauguuua

SEQ ID NO: 3176606 - RNA, 21 nt, Human
guacgacucuuuuccaaacac

SEQ ID NO: 3176607 - RNA, 15 nt, Human
guacgucugacaggc

SEQ ID NO: 3176608 - RNA, 14 nt, Human
guacgucugacagg

SEQ ID NO: 3176609 - RNA, 17 nt, Human
guacgucugacaggcaa

SEQ ID NO: 3176610 - RNA, 20 nt, Human
guacuaaggauacaggcugg

SEQ ID NO: 3176611 - RNA, 15 nt, Human
guacuucuccacccu

SEQ ID NO: 3176612 - RNA, 14 nt, Human
guacuucuccaccc

SEQ ID NO: 3176613 - RNA, 23 nt, Human
guacuaaggaaucuuucugcuuu

SEQ ID NO: 3176614 - RNA, 15 nt, Human
guacuaaggaaucuu

SEQ ID NO: 3176615 - RNA, 16 nt, Human
guaccuggguccccag

SEQ ID NO: 3176616 - RNA, 23 nt, Human
guaccuugcacacaucaucugua

SEQ ID NO: 3176617 - RNA, 17 nt, Human
guaccuugcacacauca

SEQ ID NO: 3176618 - RNA, 15 nt, Human
guaccgcaaugugac

SEQ ID NO: 3176619 - RNA, 16 nt, Human
guacccacugcucugg

SEQ ID NO: 3176620 - RNA, 23 nt, Human
guaaaaaauuuaaaaagcccaac

SEQ ID NO: 3176621 - RNA, 12 nt, Human
guaaaaagaaaa

SEQ ID NO: 3176622 - RNA, 22 nt, Human
guaaaaacugaaguucugccuc

SEQ ID NO: 3176623 - RNA, 15 nt, Human
guaaaaacugaaguu

SEQ ID NO: 3176624 - RNA, 14 nt, Human
guaaaaacugaagu

SEQ ID NO: 3176625 - RNA, 13 nt, Human
guaaaaacugaag

SEQ ID NO: 3176626 - RNA, 13 nt, Human
guaaaaauaaaau

SEQ ID NO: 3176627 - RNA, 18 nt, Human
guaaaaauaaaauacuuu

SEQ ID NO: 3176628 - RNA, 20 nt, Human
guaaaaauaaaauacuuuga

SEQ ID NO: 3176629 - RNA, 14 nt, Human
guaaaaauaaaauu

SEQ ID NO: 3176630 - RNA, 14 nt, Human
guaaaaagaaaaca

SEQ ID NO: 3176631 - RNA, 23 nt, Human
guaaaaccacagcaguugaaaag

SEQ ID NO: 3176632 - RNA, 12 nt, Human
guaaaagaaaaa

SEQ ID NO: 3176633 - RNA, 18 nt, Human
guaaaaccacagcaguug

SEQ ID NO: 3176634 - RNA, 16 nt, Human
guaaaaccacagcagu

SEQ ID NO: 3176635 - RNA, 15 nt, Human
guaaaaccacagcag

SEQ ID NO: 3176636 - RNA, 14 nt, Human
guaaaaccacagca

SEQ ID NO: 3176637 - RNA, 23 nt, Human
gguuuugccauguuggccaggcu

SEQ ID NO: 3176638 - RNA, 19 nt, Human
gguuuuuauuucuccuuuu

SEQ ID NO: 3176639 - RNA, 18 nt, Human
gguuuuuauuucuccuuu

SEQ ID NO: 3176640 - RNA, 17 nt, Human
gguuuuuauuucuccuu

SEQ ID NO: 3176641 - RNA, 21 nt, Human
gguuuugcacucuuguuucuc

SEQ ID NO: 3176642 - RNA, 12 nt, Human
gguuuucuguuu

SEQ ID NO: 3176643 - RNA, 22 nt, Human
gguuuuccgcauucuuuguaca

SEQ ID NO: 3176644 - RNA, 17 nt, Human
gguucuuucuuccucug

SEQ ID NO: 3176645 - RNA, 14 nt, Human
gguugaagcaccaa

SEQ ID NO: 3176646 - RNA, 18 nt, Human
gguucuuucuuccucugc

SEQ ID NO: 3176647 - RNA, 23 nt, Human
gguucaagcgauucuucugcuuc

SEQ ID NO: 3176648 - RNA, 22 nt, Human
gguucaagcgauucuucugcuu

SEQ ID NO: 3176649 - RNA, 20 nt, Human
gguucacugcaaccuccgcc

SEQ ID NO: 3176650 - RNA, 13 nt, Human
gguucaaaugugu

SEQ ID NO: 3176651 - RNA, 17 nt, Human
gguggccucccaacuca

SEQ ID NO: 3176652 - RNA, 21 nt, Human
gguucaagcgauucuucugcu

SEQ ID NO: 3176653 - RNA, 13 nt, Human
gguggccucccaa

SEQ ID NO: 3176654 - RNA, 20 nt, Human
gguggcccgacagccuggca

SEQ ID NO: 3176655 - RNA, 19 nt, Human
gguggcccgacagccuggc

SEQ ID NO: 3176656 - RNA, 18 nt, Human
gguggcccgacagccugg

SEQ ID NO: 3176657 - RNA, 17 nt, Human
gguggcccgacagccug

SEQ ID NO: 3176658 - RNA, 16 nt, Human
gguggcccgacagccu

SEQ ID NO: 3176659 - RNA, 21 nt, Human
gguuuaaaacuaguuagauuc

SEQ ID NO: 3176660 - RNA, 16 nt, Human
gguuuaaaagaaaaaa

SEQ ID NO: 3176661 - RNA, 18 nt, Human
gguuguuagaaaaaugga

SEQ ID NO: 3176662 - RNA, 13 nt, Human
gguuuaagcuguu

SEQ ID NO: 3176663 - RNA, 16 nt, Human
gguuuaaguagauuuc

SEQ ID NO: 3176664 - RNA, 13 nt, Human
gguuggugggggc

SEQ ID NO: 3176665 - RNA, 11 nt, Human
gguugaauaaa

SEQ ID NO: 3176666 - RNA, 13 nt, Human
gguucuuugugua

SEQ ID NO: 3176667 - RNA, 14 nt, Human
gguugacaggaggu

SEQ ID NO: 3176668 - RNA, 14 nt, Human
gguugggcuggugu

SEQ ID NO: 3176669 - RNA, 16 nt, Human
guaaauaaaggaacca

SEQ ID NO: 3176670 - RNA, 14 nt, Human
guaaauaauucuuu

SEQ ID NO: 3176671 - RNA, 15 nt, Human
guaaauaauucuuuu

SEQ ID NO: 3176672 - RNA, 13 nt, Human
guaaauaauucuu

SEQ ID NO: 3176673 - RNA, 19 nt, Human
guaaaagcagcauaaagaa

SEQ ID NO: 3176674 - RNA, 16 nt, Human
guaaaagcauuuugua

SEQ ID NO: 3176675 - RNA, 17 nt, Human
guaaaagcaacaucagc

SEQ ID NO: 3176676 - RNA, 18 nt, Human
guaaaagcaacaucagcu

SEQ ID NO: 3176677 - RNA, 19 nt, Human
guaaaagcaacaucagcuu

SEQ ID NO: 3176678 - RNA, 20 nt, Human
guaaaagcaacaucagcuug

SEQ ID NO: 3176679 - RNA, 13 nt, Human
guaaauagguuuc

SEQ ID NO: 3176680 - RNA, 21 nt, Human
guaaauagguuucuaaaaagu

SEQ ID NO: 3176681 - RNA, 23 nt, Human
guaaauagguuucuaaaaaguca

SEQ ID NO: 3176682 - RNA, 12 nt, Human
guaaauauuaaa

SEQ ID NO: 3176683 - RNA, 20 nt, Human
guaaaucuaacauuauuacu

SEQ ID NO: 3176684 - RNA, 21 nt, Human
guaaaucuaacauuauuacuu

SEQ ID NO: 3176685 - RNA, 19 nt, Human
guaaaucucuucuguguuu

SEQ ID NO: 3176686 - RNA, 18 nt, Human
guaaaucucuucuguguu

SEQ ID NO: 3176687 - RNA, 15 nt, Human
guaaauguaguucau

SEQ ID NO: 3176688 - RNA, 16 nt, Human
guaaaugguaugucau

SEQ ID NO: 3176689 - RNA, 12 nt, Human
guaacuguuacc

SEQ ID NO: 3176690 - RNA, 17 nt, Human
guaacuguuaccauugg

SEQ ID NO: 3176691 - RNA, 13 nt, Human
guaacuguuacca

SEQ ID NO: 3176692 - RNA, 21 nt, Human
guaacuguuaccauuggaaau

SEQ ID NO: 3176693 - RNA, 20 nt, Human
guaacuguuaccauuggaaa

SEQ ID NO: 3176694 - RNA, 17 nt, Human
guaagaucucuuucuaa

SEQ ID NO: 3176695 - RNA, 13 nt, Human
guaagauauuugc

SEQ ID NO: 3176696 - RNA, 14 nt, Human
guaagaguguuuau

SEQ ID NO: 3176697 - RNA, 13 nt, Human
guaagaucacugu

SEQ ID NO: 3176698 - RNA, 18 nt, Human
guaagaucacuguuuaga

SEQ ID NO: 3176699 - RNA, 20 nt, Human
guaagaucacuguuuagauu

SEQ ID NO: 3176700 - RNA, 13 nt, Human
guaagauuguuau

SEQ ID NO: 3176701 - RNA, 21 nt, Human
guaagauuguuauuaaaugua

SEQ ID NO: 3176702 - RNA, 19 nt, Human
guaagagaaaagagagaaa

SEQ ID NO: 3176703 - RNA, 17 nt, Human
guaagaaauacuguaca

SEQ ID NO: 3176704 - RNA, 13 nt, Human
guaagaaauacug

SEQ ID NO: 3176705 - RNA, 12 nt, Human
guaagaaauacu

SEQ ID NO: 3176706 - RNA, 16 nt, Human
guaagaaauacagacu

SEQ ID NO: 3176707 - RNA, 13 nt, Human
guaagaaauacag

SEQ ID NO: 3176708 - RNA, 17 nt, Human
guaagggaaacugccag

SEQ ID NO: 3176709 - RNA, 14 nt, Human
guaaggcaugaagg

SEQ ID NO: 3176710 - RNA, 18 nt, Human
guaagggaaacugccagc

SEQ ID NO: 3176711 - RNA, 22 nt, Human
guaaguauucuuauuuaaugaa

SEQ ID NO: 3176712 - RNA, 18 nt, Human
guaaguauaucucaguuu

SEQ ID NO: 3176713 - RNA, 17 nt, Human
guaaggugcuuggaguu

SEQ ID NO: 3176714 - RNA, 19 nt, Human
guaagguauaucauucuaa

SEQ ID NO: 3176715 - RNA, 20 nt, Human
guaaggaauaccuguccccc

SEQ ID NO: 3176716 - RNA, 21 nt, Human
guaaggaauaccugucccccu

SEQ ID NO: 3176717 - RNA, 23 nt, Human
guaaggaauaccugucccccuga

SEQ ID NO: 3176718 - RNA, 13 nt, Human
guaaggaaugauu

SEQ ID NO: 3176719 - RNA, 18 nt, Human
guaaggaauaccuguccc

SEQ ID NO: 3176720 - RNA, 18 nt, Human
guaagcuguuugguuuua

SEQ ID NO: 3176721 - RNA, 22 nt, Human
guaagcuguuugguuuuaaaau

SEQ ID NO: 3176722 - RNA, 21 nt, Human
guaagcuguuugguuuuaaaa

SEQ ID NO: 3176723 - RNA, 23 nt, Human
guaagcauaagcuuaugcuuaaa

SEQ ID NO: 3176724 - RNA, 21 nt, Human
guaagcggcucaagcccagga

SEQ ID NO: 3176725 - RNA, 16 nt, Human
guaagcggcucaagcc

SEQ ID NO: 3176726 - RNA, 14 nt, Human
guaagcguauggcu

SEQ ID NO: 3176727 - RNA, 22 nt, Human
guaagcggcucaagcccaggag

SEQ ID NO: 3176728 - RNA, 20 nt, Human
guaagcguauggcuuuauuu

SEQ ID NO: 3176729 - RNA, 23 nt, Human
ggaagggacaccaagccuuggcu

SEQ ID NO: 3176730 - RNA, 17 nt, Human
ggaaggcugagaggaga

SEQ ID NO: 3176731 - RNA, 15 nt, Human
ggaaggcccagcacc

SEQ ID NO: 3176732 - RNA, 14 nt, Human
ggaaggcccagcac

SEQ ID NO: 3176733 - RNA, 23 nt, Human
ggaaggggagauaaggguaucug

SEQ ID NO: 3176734 - RNA, 19 nt, Human
ggaacgcccacuucccugg

SEQ ID NO: 3176735 - RNA, 15 nt, Human
ggaaggcagagaaau

SEQ ID NO: 3176736 - RNA, 14 nt, Human
ggaaggcagggagg

SEQ ID NO: 3176737 - RNA, 18 nt, Human
ggaaggcacuucugccug

SEQ ID NO: 3176738 - RNA, 18 nt, Human
ggaaccugugagcugcac

SEQ ID NO: 3176739 - RNA, 13 nt, Human
ggaacgcccacuu

SEQ ID NO: 3176740 - RNA, 13 nt, Human
ggaaccugacccc

SEQ ID NO: 3176741 - RNA, 14 nt, Human
ggaaugauuaauua

SEQ ID NO: 3176742 - RNA, 20 nt, Human
ggaagugacgguuuaauggg

SEQ ID NO: 3176743 - RNA, 19 nt, Human
ggaaguccuuaucuagcug

SEQ ID NO: 3176744 - RNA, 18 nt, Human
ggaaguagcacaggcuga

SEQ ID NO: 3176745 - RNA, 17 nt, Human
ggaaguagcacaggcug

SEQ ID NO: 3176746 - RNA, 12 nt, Human
ggaaguacugga

SEQ ID NO: 3176747 - RNA, 16 nt, Human
ggaaguacuggagaaa

SEQ ID NO: 3176748 - RNA, 18 nt, Human
ggaaguacuggagaaaau

SEQ ID NO: 3176749 - RNA, 15 nt, Human
ggaaguagcacaggc

SEQ ID NO: 3176750 - RNA, 14 nt, Human
ggaaguagcacagg

SEQ ID NO: 3176751 - RNA, 17 nt, Human
ggaaggggggucagaag

SEQ ID NO: 3176752 - RNA, 21 nt, Human
ggaagguaguucaagaaauga

SEQ ID NO: 3176753 - RNA, 20 nt, Human
ggaagguaguucaagaaaug

SEQ ID NO: 3176754 - RNA, 23 nt, Human
ggaauguauaguauuugaaaaca

SEQ ID NO: 3176755 - RNA, 21 nt, Human
ggaauguauaguauuugaaaa

SEQ ID NO: 3176756 - RNA, 16 nt, Human
ggaauguauaguauuu

SEQ ID NO: 3176757 - RNA, 24 nt, Human
ggaaugauuaauuaaaacacaaca

SEQ ID NO: 3176758 - RNA, 12 nt, Human
ggaaugcagugg

SEQ ID NO: 3176759 - RNA, 15 nt, Human
ggaauuauuuuaaaa

SEQ ID NO: 3176760 - RNA, 14 nt, Human
ggaauuauuuuaaa

SEQ ID NO: 3176761 - RNA, 19 nt, Human
ggaauguuugccucugccu

SEQ ID NO: 3176762 - RNA, 17 nt, Human
ggaauuauuuuaaaaga

SEQ ID NO: 3176763 - RNA, 16 nt, Human
ggaauuauuuuaaaag

SEQ ID NO: 3176764 - RNA, 13 nt, Human
ggaauuuuuuugu

SEQ ID NO: 3176765 - RNA, 22 nt, Human
ggacacuaaccacgcuggaccu

SEQ ID NO: 3176766 - RNA, 22 nt, Human
ggacaaccuuggcuuggcccug

SEQ ID NO: 3176767 - RNA, 17 nt, Human
ggacaaccuuggcuugg

SEQ ID NO: 3176768 - RNA, 23 nt, Human
ggaauuggguggggggcuucaua

SEQ ID NO: 3176769 - RNA, 19 nt, Human
ggaauuuggaaaucucuuu

SEQ ID NO: 3176770 - RNA, 23 nt, Human
ggaauuucucccagucauuuaau

SEQ ID NO: 3176771 - RNA, 21 nt, Human
ggagauagccccacaggaggu

SEQ ID NO: 3176772 - RNA, 20 nt, Human
ggagauagccccacaggagg

SEQ ID NO: 3176773 - RNA, 23 nt, Human
ggagauacuuggucacagccagg

SEQ ID NO: 3176774 - RNA, 22 nt, Human
ggagauacuuggucacagccag

SEQ ID NO: 3176775 - RNA, 18 nt, Human
ggagauccuuguguuuau

SEQ ID NO: 3176776 - RNA, 22 nt, Human
ggagaaugucaguauguggaag

SEQ ID NO: 3176777 - RNA, 17 nt, Human
ggagaaugcaccauacu

SEQ ID NO: 3176778 - RNA, 20 nt, Human
ggagaaucauguuucuuuga

SEQ ID NO: 3176779 - RNA, 19 nt, Human
ggagaaucauguuucuuug

SEQ ID NO: 3176780 - RNA, 18 nt, Human
ggagaaucauguuucuuu

SEQ ID NO: 3176781 - RNA, 22 nt, Human
ggagacagagcaaccccuggac

SEQ ID NO: 3176782 - RNA, 22 nt, Human
ggagaaucacaggcugggcugg

SEQ ID NO: 3176783 - RNA, 20 nt, Human
ggagaaugcaccauacucau

SEQ ID NO: 3176784 - RNA, 15 nt, Human
ggagaggagcccugc

SEQ ID NO: 3176785 - RNA, 12 nt, Human
ggagaggagccc

SEQ ID NO: 3176786 - RNA, 16 nt, Human
ggagaggagcccugcc

SEQ ID NO: 3176787 - RNA, 16 nt, Human
ggagagcuuagggucu

SEQ ID NO: 3176788 - RNA, 18 nt, Human
ggagagcuuagggucuca

SEQ ID NO: 3176789 - RNA, 19 nt, Human
ggagagcuuagggucucag

SEQ ID NO: 3176790 - RNA, 20 nt, Human
ggagagcuuagggucucagg

SEQ ID NO: 3176791 - RNA, 15 nt, Human
ggagaaucacuugaa

SEQ ID NO: 3176792 - RNA, 19 nt, Human
ggagaaucacuugaacccg

SEQ ID NO: 3176793 - RNA, 17 nt, Human
ggagaagcggcuggcag

SEQ ID NO: 3176794 - RNA, 18 nt, Human
ggagaagcggcuggcagc

SEQ ID NO: 3176795 - RNA, 22 nt, Human
ggacuguggguuugugggggga

SEQ ID NO: 3176796 - RNA, 20 nt, Human
ggacugugauuugaauccag

SEQ ID NO: 3176797 - RNA, 13 nt, Human
ggacgcucucugg

SEQ ID NO: 3176798 - RNA, 14 nt, Human
ggacgcucucuggc

SEQ ID NO: 3176799 - RNA, 17 nt, Human
ggacugggaacagaacu

SEQ ID NO: 3176800 - RNA, 18 nt, Human
ggacuggccucugcugau

SEQ ID NO: 3176801 - RNA, 20 nt, Human
ggacauugcggacagccacg

SEQ ID NO: 3176802 - RNA, 14 nt, Human
ggacauggacaagg

SEQ ID NO: 3176803 - RNA, 17 nt, Human
ggacagcauugccagua

SEQ ID NO: 3176804 - RNA, 21 nt, Human
ggacauggcuucugaaccugu

SEQ ID NO: 3176805 - RNA, 19 nt, Human
ggacaugggucgcccauga

SEQ ID NO: 3176806 - RNA, 20 nt, Human
ggacaugggucgcccaugag

SEQ ID NO: 3176807 - RNA, 21 nt, Human
ggacaugggucgcccaugaga

SEQ ID NO: 3176808 - RNA, 21 nt, Human
ggacagccacggccaggccag

SEQ ID NO: 3176809 - RNA, 20 nt, Human
ggacagccacggccaggcca

SEQ ID NO: 3176810 - RNA, 19 nt, Human
ggacagccacggccaggcc

SEQ ID NO: 3176811 - RNA, 15 nt, Human
ggacagccacggcca

SEQ ID NO: 3176812 - RNA, 20 nt, Human
ggacagaggggguggccucc

SEQ ID NO: 3176813 - RNA, 17 nt, Human
ggacacucaaaagcugg

SEQ ID NO: 3176814 - RNA, 19 nt, Human
ggacgcuacccgggaaggg

SEQ ID NO: 3176815 - RNA, 20 nt, Human
ggacgcuacccgggaagggg

SEQ ID NO: 3176816 - RNA, 17 nt, Human
ggacgcuacccgggaag

SEQ ID NO: 3176817 - RNA, 17 nt, Human
ggaccuugaacugggua

SEQ ID NO: 3176818 - RNA, 15 nt, Human
ggaccuugaacuggg

SEQ ID NO: 3176819 - RNA, 19 nt, Human
ggaccucaggugagaagca

SEQ ID NO: 3176820 - RNA, 20 nt, Human
ggaccucaggccugggggcu

SEQ ID NO: 3176821 - RNA, 23 nt, Human
ggaccacgucuauuucaucagaa

SEQ ID NO: 3176822 - RNA, 23 nt, Human
ggaccucaggugagaagcagagg

SEQ ID NO: 3176823 - RNA, 13 nt, Human
ggaccagagcugc

SEQ ID NO: 3176824 - RNA, 18 nt, Human
ggaccacaggugcccgcc

SEQ ID NO: 3176825 - RNA, 20 nt, Human
ggaccacaggugcccgccac

SEQ ID NO: 3176826 - RNA, 20 nt, Human
ggaaaagccaagaggcugca

SEQ ID NO: 3176827 - RNA, 11 nt, Human
ggaaaagcuga

SEQ ID NO: 3176828 - RNA, 14 nt, Human
ggaaaagcugcuga

SEQ ID NO: 3176829 - RNA, 18 nt, Human
ggaaaagauaaagaccag

SEQ ID NO: 3176830 - RNA, 22 nt, Human
ggaaaagauaaagaccagaaau

SEQ ID NO: 3176831 - RNA, 17 nt, Human
ggaaaacacccagggaa

SEQ ID NO: 3176832 - RNA, 20 nt, Human
ggaaaagcugcugacagugu

SEQ ID NO: 3176833 - RNA, 18 nt, Human
ggaaaagcugcugacagu

SEQ ID NO: 3176834 - RNA, 15 nt, Human
ggaaaagguugaaua

SEQ ID NO: 3176835 - RNA, 20 nt, Human
ggaaaagguugaauaauaua

SEQ ID NO: 3176836 - RNA, 11 nt, Human
ggaaaaggaag

SEQ ID NO: 3176837 - RNA, 15 nt, Human
ggaaaaggcauauau

SEQ ID NO: 3176838 - RNA, 23 nt, Human
ggaaaaggaagguaguucaagaa

SEQ ID NO: 3176839 - RNA, 19 nt, Human
ggaaaaaugccaucaaaug

SEQ ID NO: 3176840 - RNA, 11 nt, Human
ggaaaaauuca

SEQ ID NO: 3176841 - RNA, 23 nt, Human
gcuuuucacugcuggcugccuua

SEQ ID NO: 3176842 - RNA, 22 nt, Human
gcuuuucacugcuggcugccuu

SEQ ID NO: 3176843 - RNA, 21 nt, Human
gcuuuguuuguugucagcuga

SEQ ID NO: 3176844 - RNA, 14 nt, Human
gcuuuguuuguucu

SEQ ID NO: 3176845 - RNA, 23 nt, Human
gcuuuguugugugccucuagcug

SEQ ID NO: 3176846 - RNA, 22 nt, Human
gcuuuguugugugccucuagcu

SEQ ID NO: 3176847 - RNA, 21 nt, Human
gcuuuguugugugccucuagc

SEQ ID NO: 3176848 - RNA, 19 nt, Human
gcuuuguugugugccucua

SEQ ID NO: 3176849 - RNA, 18 nt, Human
gcuuuguugugugccucu

SEQ ID NO: 3176850 - RNA, 18 nt, Human
gcuuuucacugcuggcug

SEQ ID NO: 3176851 - RNA, 14 nt, Human
gcuuuucacugcug

SEQ ID NO: 3176852 - RNA, 15 nt, Human
gcuuuguuuguucuu

SEQ ID NO: 3176853 - RNA, 12 nt, Human
gcuuuucacugc

SEQ ID NO: 3176854 - RNA, 13 nt, Human
gcuuuucacugcu

SEQ ID NO: 3176855 - RNA, 15 nt, Human
gcuuucaggagcucc

SEQ ID NO: 3176856 - RNA, 18 nt, Human
gcuuugucuacuucaaaa

SEQ ID NO: 3176857 - RNA, 19 nt, Human
gcuuugucuccucuauccu

SEQ ID NO: 3176858 - RNA, 13 nt, Human
gcuuugucuccuc

SEQ ID NO: 3176859 - RNA, 17 nt, Human
gcuuuguuaccuuaaaa

SEQ ID NO: 3176860 - RNA, 19 nt, Human
gcuuuguuaccuuaaaacu

SEQ ID NO: 3176861 - RNA, 17 nt, Human
gcuuuguugugugccuc

SEQ ID NO: 3176862 - RNA, 15 nt, Human
gcuuuguugugugcc

SEQ ID NO: 3176863 - RNA, 15 nt, Human
gcuuuguaugcacuu

SEQ ID NO: 3176864 - RNA, 20 nt, Human
gcuugaggguugggcuggug

SEQ ID NO: 3176865 - RNA, 18 nt, Human
gcuugaggguugggcugg

SEQ ID NO: 3176866 - RNA, 16 nt, Human
gcuuuauuuuuuugaa

SEQ ID NO: 3176867 - RNA, 12 nt, Human
gcuuuagcuuau

SEQ ID NO: 3176868 - RNA, 21 nt, Human
gcuuuagacuugaaaagagac

SEQ ID NO: 3176869 - RNA, 24 nt, Human
gcuuuagacuugaaaagagacagg

SEQ ID NO: 3176870 - RNA, 21 nt, Human
gcuuuaguggccaucauuucu

SEQ ID NO: 3176871 - RNA, 20 nt, Human
gcuuuaggcauaugcuucuu

SEQ ID NO: 3176872 - RNA, 14 nt, Human
gcuuuagacuugaa

SEQ ID NO: 3176873 - RNA, 15 nt, Human
gcuuuagacuugaaa

SEQ ID NO: 3176874 - RNA, 17 nt, Human
gcuuuagacuugaaaag

SEQ ID NO: 3176875 - RNA, 18 nt, Human
gcuuuagacuugaaaaga

SEQ ID NO: 3176876 - RNA, 12 nt, Human
gcuuuagacuug

SEQ ID NO: 3176877 - RNA, 22 nt, Human
ggaaccaaagcgaauuuuaaaa

SEQ ID NO: 3176878 - RNA, 21 nt, Human
ggaaccaaagcgaauuuuaaa

SEQ ID NO: 3176879 - RNA, 16 nt, Human
ggaaaucaaauaugca

SEQ ID NO: 3176880 - RNA, 16 nt, Human
ggaaauaccaguucug

SEQ ID NO: 3176881 - RNA, 23 nt, Human
ggaaauaggcccaaccaccagau

SEQ ID NO: 3176882 - RNA, 17 nt, Human
ggaaaucaaauaugcaa

SEQ ID NO: 3176883 - RNA, 14 nt, Human
ggaaaucaccgaaa

SEQ ID NO: 3176884 - RNA, 21 nt, Human
ggaaaucaccgaaaacguggc

SEQ ID NO: 3176885 - RNA, 18 nt, Human
ggaaaucaaauguaaagu

SEQ ID NO: 3176886 - RNA, 17 nt, Human
ggaaaucaaauguaaag

SEQ ID NO: 3176887 - RNA, 12 nt, Human
ggaaauauuaaa

SEQ ID NO: 3176888 - RNA, 14 nt, Human
ggaaauauuaaaag

SEQ ID NO: 3176889 - RNA, 15 nt, Human
ggaaauauuaaaaga

SEQ ID NO: 3176890 - RNA, 22 nt, Human
ggaaaggcuccaggagcagcca

SEQ ID NO: 3176891 - RNA, 17 nt, Human
ggaaaggcuccaggagc

SEQ ID NO: 3176892 - RNA, 19 nt, Human
ggaaaggcuccaggagcag

SEQ ID NO: 3176893 - RNA, 20 nt, Human
ggaaaggcuccaggagcagc

SEQ ID NO: 3176894 - RNA, 21 nt, Human
ggaaaggcuccaggagcagcc

SEQ ID NO: 3176895 - RNA, 12 nt, Human
ggaaaggcucca

SEQ ID NO: 3176896 - RNA, 13 nt, Human
ggaaaggcuccag

SEQ ID NO: 3176897 - RNA, 14 nt, Human
ggaaaggcuccagg

SEQ ID NO: 3176898 - RNA, 19 nt, Human
ggaaaaucagccugcucca

SEQ ID NO: 3176899 - RNA, 23 nt, Human
ggaaaaucagccugcuccagcug

SEQ ID NO: 3176900 - RNA, 19 nt, Human
ggaaaaugccaugaauuac

SEQ ID NO: 3176901 - RNA, 22 nt, Human
ggaaaauuaguucccauucuuu

SEQ ID NO: 3176902 - RNA, 22 nt, Human
gcuucauacagggaugguguuc

SEQ ID NO: 3176903 - RNA, 11 nt, Human
gcuucauacac

SEQ ID NO: 3176904 - RNA, 11 nt, Human
gcuucauacag

SEQ ID NO: 3176905 - RNA, 18 nt, Human
gcuucaguggcagcugcu

SEQ ID NO: 3176906 - RNA, 17 nt, Human
gcuucaguggcagcugc

SEQ ID NO: 3176907 - RNA, 12 nt, Human
gcuucauccucc

SEQ ID NO: 3176908 - RNA, 15 nt, Human
gcuucauccuccuca

SEQ ID NO: 3176909 - RNA, 16 nt, Human
gcuucauuuccugugu

SEQ ID NO: 3176910 - RNA, 13 nt, Human
gcuucauuuccug

SEQ ID NO: 3176911 - RNA, 12 nt, Human
gcuuauacacuu

SEQ ID NO: 3176912 - RNA, 13 nt, Human
gcuuauaaaacag

SEQ ID NO: 3176913 - RNA, 19 nt, Human
gcuuauaaaacagaguaau

SEQ ID NO: 3176914 - RNA, 12 nt, Human
gcuuauaaaaca

SEQ ID NO: 3176915 - RNA, 13 nt, Human
gcuuaucucaggg

SEQ ID NO: 3176916 - RNA, 19 nt, Human
gcuuaucucaggggugugc

SEQ ID NO: 3176917 - RNA, 15 nt, Human
gcuucaguggcagcu

SEQ ID NO: 3176918 - RNA, 23 nt, Human
gcuuaugauagcaaauggccuca

SEQ ID NO: 3176919 - RNA, 18 nt, Human
gcuuaugcuuaaauucaa

SEQ ID NO: 3176920 - RNA, 16 nt, Human
gcuucaguggcagcug

SEQ ID NO: 3176921 - RNA, 17 nt, Human
gcuuaugagauacuuug

SEQ ID NO: 3176922 - RNA, 18 nt, Human
gcuuaugagauacuuugc

SEQ ID NO: 3176923 - RNA, 22 nt, Human
gcuuauaaaacagaguaaucuu

SEQ ID NO: 3176924 - RNA, 18 nt, Human
gcuuauaaccuaguuaaa

SEQ ID NO: 3176925 - RNA, 22 nt, Human
gcuuauaaccuaguuaaagaaa

SEQ ID NO: 3176926 - RNA, 16 nt, Human
gcuuccagugaggcuc

SEQ ID NO: 3176927 - RNA, 20 nt, Human
gcuuccagcaggagggacag

SEQ ID NO: 3176928 - RNA, 17 nt, Human
gcuucauuuccuguguc

SEQ ID NO: 3176929 - RNA, 15 nt, Human
gcuuccagugaggcu

SEQ ID NO: 3176930 - RNA, 12 nt, Human
gcuuccagcagg

SEQ ID NO: 3176931 - RNA, 14 nt, Human
gcuuccagcaggag

SEQ ID NO: 3176932 - RNA, 13 nt, Human
gcuuccagcagga

SEQ ID NO: 3176933 - RNA, 17 nt, Human
gcuuccagcaggaggga

SEQ ID NO: 3176934 - RNA, 15 nt, Human
gcuuccagcaggagg

SEQ ID NO: 3176935 - RNA, 16 nt, Human
gcuugaggguugggcu

SEQ ID NO: 3176936 - RNA, 15 nt, Human
gcugccaaugggagc

SEQ ID NO: 3176937 - RNA, 16 nt, Human
gcugccaaugggagcu

SEQ ID NO: 3176938 - RNA, 19 nt, Human
gcugccaaugggagcucau

SEQ ID NO: 3176939 - RNA, 14 nt, Human
gcuguucagcuggu

SEQ ID NO: 3176940 - RNA, 13 nt, Human
gcuguucagcugg

SEQ ID NO: 3176941 - RNA, 23 nt, Human
gcuguucuuuaguagcaacuaaa

SEQ ID NO: 3176942 - RNA, 14 nt, Human
gcuguucuuccugg

SEQ ID NO: 3176943 - RNA, 13 nt, Human
gcuguucuuccug

SEQ ID NO: 3176944 - RNA, 12 nt, Human
gcuguucuuccu

SEQ ID NO: 3176945 - RNA, 21 nt, Human
gcugugggcgugagaccugcc

SEQ ID NO: 3176946 - RNA, 22 nt, Human
gcugugggcgugagaccugccc

SEQ ID NO: 3176947 - RNA, 20 nt, Human
gcugugggcgugagaccugc

SEQ ID NO: 3176948 - RNA, 22 nt, Human
gcuguugacucuaguacuguga

SEQ ID NO: 3176949 - RNA, 23 nt, Human
gcuguugaccaggcaccuccccu

SEQ ID NO: 3176950 - RNA, 18 nt, Human
gcuguugaccaggcaccu

SEQ ID NO: 3176951 - RNA, 15 nt, Human
gcuguugaccaggca

SEQ ID NO: 3176952 - RNA, 13 nt, Human
gcuguugaccagg

SEQ ID NO: 3176953 - RNA, 18 nt, Human
gcuuagaggcaugggcuu

SEQ ID NO: 3176954 - RNA, 12 nt, Human
gcuuagaggcau

SEQ ID NO: 3176955 - RNA, 21 nt, Human
gcuuagaggcaugggcuugcu

SEQ ID NO: 3176956 - RNA, 15 nt, Human
gcuuagggucucagg

SEQ ID NO: 3176957 - RNA, 16 nt, Human
gcuuagggucucaggg

SEQ ID NO: 3176958 - RNA, 15 nt, Human
gcuuagucacugaga

SEQ ID NO: 3176959 - RNA, 17 nt, Human
gcuuagucacugagaca

SEQ ID NO: 3176960 - RNA, 21 nt, Human
gcuuagucacugagacagccc

SEQ ID NO: 3176961 - RNA, 19 nt, Human
gcuuagucacugagacagc

SEQ ID NO: 3176962 - RNA, 20 nt, Human
gcuuagucacugagacagcc

SEQ ID NO: 3176963 - RNA, 22 nt, Human
ggcgccucaacucugcugaggg

SEQ ID NO: 3176964 - RNA, 23 nt, Human
ggcgccucaacucugcugagggu

SEQ ID NO: 3176965 - RNA, 13 nt, Human
ggccugucuguga

SEQ ID NO: 3176966 - RNA, 19 nt, Human
ggccugucucggaaccugu

SEQ ID NO: 3176967 - RNA, 22 nt, Human
ggccugucugugaagagcaaga

SEQ ID NO: 3176968 - RNA, 18 nt, Human
ggcgcugccccuggcagc

SEQ ID NO: 3176969 - RNA, 19 nt, Human
ggcgcugccccuggcagcc

SEQ ID NO: 3176970 - RNA, 21 nt, Human
ggcgcugccccuggcagcccc

SEQ ID NO: 3176971 - RNA, 23 nt, Human
ggcgcugccccuggcagccccug

SEQ ID NO: 3176972 - RNA, 18 nt, Human
ggccuguccaacacaucu

SEQ ID NO: 3176973 - RNA, 14 nt, Human
ggccugggggcugg

SEQ ID NO: 3176974 - RNA, 20 nt, Human
ggccugggggcugggcagag

SEQ ID NO: 3176975 - RNA, 14 nt, Human
ggccuggcuugucu

SEQ ID NO: 3176976 - RNA, 23 nt, Human
ggccuggcucccucacucucagg

SEQ ID NO: 3176977 - RNA, 19 nt, Human
ggccuggccugagcuggga

SEQ ID NO: 3176978 - RNA, 14 nt, Human
ggccuggcucccuc

SEQ ID NO: 3176979 - RNA, 22 nt, Human
ggccugaauccaaaagaaaaac

SEQ ID NO: 3176980 - RNA, 16 nt, Human
ggccugaaauccuggu

SEQ ID NO: 3176981 - RNA, 20 nt, Human
ggccugaaauccugguuccu

SEQ ID NO: 3176982 - RNA, 18 nt, Human
ggccugaaccacaggaga

SEQ ID NO: 3176983 - RNA, 12 nt, Human
ggccugaaccac

SEQ ID NO: 3176984 - RNA, 16 nt, Human
ggccugaauccaaaag

SEQ ID NO: 3176985 - RNA, 21 nt, Human
ggccucuuucagugaauuugu

SEQ ID NO: 3176986 - RNA, 16 nt, Human
ggcuccaggccagggg

SEQ ID NO: 3176987 - RNA, 14 nt, Human
ggcuccaggccagg

SEQ ID NO: 3176988 - RNA, 18 nt, Human
ggcuccaggagcagccac

SEQ ID NO: 3176989 - RNA, 14 nt, Human
ggcuccaggcagca

SEQ ID NO: 3176990 - RNA, 13 nt, Human
ggcuccaggcagc

SEQ ID NO: 3176991 - RNA, 18 nt, Human
ggcuccaggccagggggc

SEQ ID NO: 3176992 - RNA, 15 nt, Human
ggcuccaggcuccuu

SEQ ID NO: 3176993 - RNA, 11 nt, Human
ggcuccaggcu

SEQ ID NO: 3176994 - RNA, 16 nt, Human
ggcuccaggcuccuuu

SEQ ID NO: 3176995 - RNA, 13 nt, Human
ggcuccaugccag

SEQ ID NO: 3176996 - RNA, 12 nt, Human
ggcuccaugcca

SEQ ID NO: 3176997 - RNA, 15 nt, Human
ggcuccaguccccag

SEQ ID NO: 3176998 - RNA, 19 nt, Human
ggcucccacaggcccuucc

SEQ ID NO: 3176999 - RNA, 18 nt, Human
ggcucccacaggcccuuc

SEQ ID NO: 3177000 - RNA, 14 nt, Human
ggcuccaugccagc

SEQ ID NO: 3177001 - RNA, 17 nt, Human
ggcucccacaggcccuu

SEQ ID NO: 3177002 - RNA, 19 nt, Human
ggcuccaggagcagccaca

SEQ ID NO: 3177003 - RNA, 12 nt, Human
ggcuccaggagc

SEQ ID NO: 3177004 - RNA, 12 nt, Human
ggcuccagcugg

SEQ ID NO: 3177005 - RNA, 18 nt, Human
ggcucaagcccaggaggg

SEQ ID NO: 3177006 - RNA, 21 nt, Human
ggcucaaguccucuuuucuga

SEQ ID NO: 3177007 - RNA, 15 nt, Human
ggcucaaguccucuu

SEQ ID NO: 3177008 - RNA, 21 nt, Human
ggcuauggggauagaugugug

SEQ ID NO: 3177009 - RNA, 19 nt, Human
ggcuaugggggcacugagg

SEQ ID NO: 3177010 - RNA, 17 nt, Human
ggcucaagcccaggagg

SEQ ID NO: 3177011 - RNA, 12 nt, Human
ggcucaaauuuu

SEQ ID NO: 3177012 - RNA, 23 nt, Human
ggcuagugugguguuuccuggca

SEQ ID NO: 3177013 - RNA, 15 nt, Human
ggcuaguugggcuuc

SEQ ID NO: 3177014 - RNA, 16 nt, Human
ggcuaguugggcuucc

SEQ ID NO: 3177015 - RNA, 15 nt, Human
ggcuagcuaagccaa

SEQ ID NO: 3177016 - RNA, 22 nt, Human
ggcuaggaccccuccauguggg

SEQ ID NO: 3177017 - RNA, 16 nt, Human
ggcuaggaccccucca

SEQ ID NO: 3177018 - RNA, 17 nt, Human
ggccuacaugcuuugug

SEQ ID NO: 3177019 - RNA, 13 nt, Human
ggccuaauaaaac

SEQ ID NO: 3177020 - RNA, 22 nt, Human
ggccuaauaaaacugaugugaa

SEQ ID NO: 3177021 - RNA, 23 nt, Human
ggccuaauaaaacugaugugaaa

SEQ ID NO: 3177022 - RNA, 23 nt, Human
ggccuacaugcuuugugaacaag

SEQ ID NO: 3177023 - RNA, 18 nt, Human
ggccuacaugcuuuguga

SEQ ID NO: 3177024 - RNA, 16 nt, Human
ggccuacaaaucagua

SEQ ID NO: 3177025 - RNA, 12 nt, Human
ggcccugugccu

SEQ ID NO: 3177026 - RNA, 22 nt, Human
ggccucggacuuagcugggaga

SEQ ID NO: 3177027 - RNA, 20 nt, Human
ggccucggacuuagcuggga

SEQ ID NO: 3177028 - RNA, 17 nt, Human
ggccucggacuuagcug

SEQ ID NO: 3177029 - RNA, 13 nt, Human
ggccucugcacuc

SEQ ID NO: 3177030 - RNA, 14 nt, Human
ggccucugcacucc

SEQ ID NO: 3177031 - RNA, 15 nt, Human
ggccucugcacuccc

SEQ ID NO: 3177032 - RNA, 18 nt, Human
ggccucuuaugggcuggg

SEQ ID NO: 3177033 - RNA, 16 nt, Human
ggccucuucucucaga

SEQ ID NO: 3177034 - RNA, 17 nt, Human
ggccucuucucucagac

SEQ ID NO: 3177035 - RNA, 18 nt, Human
ggccucuucucucagacc

SEQ ID NO: 3177036 - RNA, 17 nt, Human
ggccucuuaugggcugg

SEQ ID NO: 3177037 - RNA, 21 nt, Human
ggccucugcaaaggaaauacc

SEQ ID NO: 3177038 - RNA, 13 nt, Human
ggcccugccuccu

SEQ ID NO: 3177039 - RNA, 13 nt, Human
ggcccugcccugg

SEQ ID NO: 3177040 - RNA, 20 nt, Human
ggcccugcccugguuuccug

SEQ ID NO: 3177041 - RNA, 11 nt, Human
ggcccugcccu

SEQ ID NO: 3177042 - RNA, 12 nt, Human
ggcccugcagcu

SEQ ID NO: 3177043 - RNA, 11 nt, Human
ggcccugccca

SEQ ID NO: 3177044 - RNA, 12 nt, Human
ggcccugcccac

SEQ ID NO: 3177045 - RNA, 20 nt, Human
ggcccugcccacaccuccug

SEQ ID NO: 3177046 - RNA, 12 nt, Human
ggcccugcccug

SEQ ID NO: 3177047 - RNA, 13 nt, Human
ggcccuggcagcc

SEQ ID NO: 3177048 - RNA, 14 nt, Human
ggcccuggcagccc

SEQ ID NO: 3177049 - RNA, 13 nt, Human
ggcccuggcuccc

SEQ ID NO: 3177050 - RNA, 22 nt, Human
ggcccuggcucccacaggcccu

SEQ ID NO: 3177051 - RNA, 14 nt, Human
ggcccugccuccuu

SEQ ID NO: 3177052 - RNA, 15 nt, Human
ggcccugccuccuuu

SEQ ID NO: 3177053 - RNA, 13 nt, Human
ggcccugccugcu

SEQ ID NO: 3177054 - RNA, 11 nt, Human
ggcccugccug

SEQ ID NO: 3177055 - RNA, 22 nt, Human
ggcccugcccugguuuccugcc

SEQ ID NO: 3177056 - RNA, 21 nt, Human
ggcccucugcccacucccugc

SEQ ID NO: 3177057 - RNA, 23 nt, Human
ggcccucucugaaggaggccacc

SEQ ID NO: 3177058 - RNA, 19 nt, Human
ggcccucugcccacucccu

SEQ ID NO: 3177059 - RNA, 20 nt, Human
ggcccucugcccacucccug

SEQ ID NO: 3177060 - RNA, 13 nt, Human
ggcccucugccca

SEQ ID NO: 3177061 - RNA, 15 nt, Human
ggcccucugcccacu

SEQ ID NO: 3177062 - RNA, 16 nt, Human
ggcccucugcccacuc

SEQ ID NO: 3177063 - RNA, 17 nt, Human
ggcccucugcccacucc

SEQ ID NO: 3177064 - RNA, 11 nt, Human
ggcccagagag

SEQ ID NO: 3177065 - RNA, 20 nt, Human
ggcccagagagaagagcccc

SEQ ID NO: 3177066 - RNA, 18 nt, Human
ggcccagagagaagagcc

SEQ ID NO: 3177067 - RNA, 21 nt, Human
ggcccucucugaaggaggcca

SEQ ID NO: 3177068 - RNA, 20 nt, Human
ggcccucucugaaggaggcc

SEQ ID NO: 3177069 - RNA, 23 nt, Human
ggcccagagagaagagccccacu

SEQ ID NO: 3177070 - RNA, 22 nt, Human
ggcccagagagaagagccccac

SEQ ID NO: 3177071 - RNA, 22 nt, Human
ggcccaagagucuggggaccag

SEQ ID NO: 3177072 - RNA, 20 nt, Human
ggcccaagagucuggggacc

SEQ ID NO: 3177073 - RNA, 20 nt, Human
ggcccaaccaccagaugaga

SEQ ID NO: 3177074 - RNA, 19 nt, Human
ggcccaacaggggcuccau

SEQ ID NO: 3177075 - RNA, 16 nt, Human
ggaugcauggagauag

SEQ ID NO: 3177076 - RNA, 19 nt, Human
ggaugccaagaaguuuaag

SEQ ID NO: 3177077 - RNA, 19 nt, Human
ggaugcagccucacagucc

SEQ ID NO: 3177078 - RNA, 16 nt, Human
ggaugauugaagaaac

SEQ ID NO: 3177079 - RNA, 17 nt, Human
ggauggaaugauggguc

SEQ ID NO: 3177080 - RNA, 19 nt, Human
ggauuacaagcgugagcca

SEQ ID NO: 3177081 - RNA, 12 nt, Human
ggauccuccagg

SEQ ID NO: 3177082 - RNA, 14 nt, Human
ggauccccuuccua

SEQ ID NO: 3177083 - RNA, 13 nt, Human
ggauccuccaggu

SEQ ID NO: 3177084 - RNA, 15 nt, Human
ggaugauugaagaaa

SEQ ID NO: 3177085 - RNA, 21 nt, Human
ggaugauuggaggggggaggu

SEQ ID NO: 3177086 - RNA, 16 nt, Human
ggaugcagccucacag

SEQ ID NO: 3177087 - RNA, 17 nt, Human
ggaugcagccucacagu

SEQ ID NO: 3177088 - RNA, 22 nt, Human
ggaucccucauccucauaccca

SEQ ID NO: 3177089 - RNA, 13 nt, Human
ggaucccucaucc

SEQ ID NO: 3177090 - RNA, 17 nt, Human
ggaucccucauccucau

SEQ ID NO: 3177091 - RNA, 18 nt, Human
ggaucaaguauuacuaaa

SEQ ID NO: 3177092 - RNA, 13 nt, Human
ggauccccuuccu

SEQ ID NO: 3177093 - RNA, 22 nt, Human
ggaucaaaccccgaccaccugc

SEQ ID NO: 3177094 - RNA, 13 nt, Human
ggauaugaccagu

SEQ ID NO: 3177095 - RNA, 15 nt, Human
ggauaugaaaaauga

SEQ ID NO: 3177096 - RNA, 14 nt, Human
ggauaggggcagag

SEQ ID NO: 3177097 - RNA, 17 nt, Human
ggauaucuguuagaugc

SEQ ID NO: 3177098 - RNA, 22 nt, Human
ggauaucuguuagaugcuacua

SEQ ID NO: 3177099 - RNA, 23 nt, Human
ggagugaguugauagcacagacc

SEQ ID NO: 3177100 - RNA, 12 nt, Human
ggagugcaguga

SEQ ID NO: 3177101 - RNA, 14 nt, Human
ggagugcagugagc

SEQ ID NO: 3177102 - RNA, 17 nt, Human
ggauaccuucuuauuua

SEQ ID NO: 3177103 - RNA, 15 nt, Human
ggauacgugucaaug

SEQ ID NO: 3177104 - RNA, 16 nt, Human
ggcaauauucucugua

SEQ ID NO: 3177105 - RNA, 15 nt, Human
ggcaauauucucugu

SEQ ID NO: 3177106 - RNA, 19 nt, Human
ggcaauaaauuuugaaaag

SEQ ID NO: 3177107 - RNA, 20 nt, Human
ggcaauagaccgagacuccg

SEQ ID NO: 3177108 - RNA, 18 nt, Human
ggcaacccccagccugcu

SEQ ID NO: 3177109 - RNA, 16 nt, Human
ggcaauaaauuuugaa

SEQ ID NO: 3177110 - RNA, 17 nt, Human
ggcaauaaauuuugaaa

SEQ ID NO: 3177111 - RNA, 15 nt, Human
ggcaauaaauuuuga

SEQ ID NO: 3177112 - RNA, 23 nt, Human
ggcaaugcuggcuguuggcuggg

SEQ ID NO: 3177113 - RNA, 15 nt, Human
ggcaaugcuggcugu

SEQ ID NO: 3177114 - RNA, 14 nt, Human
ggcaaugcuggcug

SEQ ID NO: 3177115 - RNA, 20 nt, Human
ggcaauauucucuguacaua

SEQ ID NO: 3177116 - RNA, 20 nt, Human
ggcaaucaauaaacagcagg

SEQ ID NO: 3177117 - RNA, 19 nt, Human
ggcaauauucucuguacau

SEQ ID NO: 3177118 - RNA, 18 nt, Human
ggcaauauucucuguaca

SEQ ID NO: 3177119 - RNA, 22 nt, Human
ggcacccggccccugcugguuc

SEQ ID NO: 3177120 - RNA, 18 nt, Human
ggcaccggggccucggac

SEQ ID NO: 3177121 - RNA, 23 nt, Human
ggcacccaccaucaugucuggcu

SEQ ID NO: 3177122 - RNA, 16 nt, Human
ggcaaugguaguuucu

SEQ ID NO: 3177123 - RNA, 17 nt, Human
ggcaaugguaguuucug

SEQ ID NO: 3177124 - RNA, 18 nt, Human
ggcaaugguaguuucugu

SEQ ID NO: 3177125 - RNA, 20 nt, Human
ggcacccaccaucaugucug

SEQ ID NO: 3177126 - RNA, 17 nt, Human
ggauugggccccugcca

SEQ ID NO: 3177127 - RNA, 18 nt, Human
ggauugggccccugccag

SEQ ID NO: 3177128 - RNA, 17 nt, Human
ggauugcuacuguccua

SEQ ID NO: 3177129 - RNA, 17 nt, Human
ggcaacccccagccugc

SEQ ID NO: 3177130 - RNA, 16 nt, Human
ggcaacccccagccug

SEQ ID NO: 3177131 - RNA, 16 nt, Human
ggauucuuauggacaa

SEQ ID NO: 3177132 - RNA, 14 nt, Human
ggauugauuuuaaa

SEQ ID NO: 3177133 - RNA, 18 nt, Human
ggauugauuuuaaaaugu

SEQ ID NO: 3177134 - RNA, 17 nt, Human
ggauugauuuuaaaaug

SEQ ID NO: 3177135 - RNA, 23 nt, Human
ggauuacaagcgugagccacugc

SEQ ID NO: 3177136 - RNA, 19 nt, Human
ggauuacaggcuccugcca

SEQ ID NO: 3177137 - RNA, 12 nt, Human
ggcagcucagcu

SEQ ID NO: 3177138 - RNA, 13 nt, Human
ggcagcucagaga

SEQ ID NO: 3177139 - RNA, 21 nt, Human
ggcagcucagagaggguggga

SEQ ID NO: 3177140 - RNA, 16 nt, Human
ggcagcuguugucucu

SEQ ID NO: 3177141 - RNA, 17 nt, Human
ggcagcuugaggguugg

SEQ ID NO: 3177142 - RNA, 18 nt, Human
ggcagggucucacucugu

SEQ ID NO: 3177143 - RNA, 22 nt, Human
ggcagcugcuuuugucuauggg

SEQ ID NO: 3177144 - RNA, 12 nt, Human
ggcagcucaccu

SEQ ID NO: 3177145 - RNA, 14 nt, Human
ggcagcucaccucu

SEQ ID NO: 3177146 - RNA, 15 nt, Human
ggcagcuauaggaaa

SEQ ID NO: 3177147 - RNA, 22 nt, Human
ggcaccugucugcuccagcucu

SEQ ID NO: 3177148 - RNA, 21 nt, Human
ggcaccugucugcuccagcuc

SEQ ID NO: 3177149 - RNA, 13 nt, Human
ggcaccugucugc

SEQ ID NO: 3177150 - RNA, 19 nt, Human
ggcacgugguugagugggg

SEQ ID NO: 3177151 - RNA, 19 nt, Human
ggcaugaaaugaacacaaa

SEQ ID NO: 3177152 - RNA, 17 nt, Human
ggcaugaaaugaacaca

SEQ ID NO: 3177153 - RNA, 18 nt, Human
ggcaugacacgaauauug

SEQ ID NO: 3177154 - RNA, 13 nt, Human
ggcauggcagccc

SEQ ID NO: 3177155 - RNA, 18 nt, Human
ggcauggccagguggcca

SEQ ID NO: 3177156 - RNA, 17 nt, Human
ggcauggccagguggcc

SEQ ID NO: 3177157 - RNA, 16 nt, Human
ggcagugggagcugcc

SEQ ID NO: 3177158 - RNA, 21 nt, Human
ggcagugggacagggcauggc

SEQ ID NO: 3177159 - RNA, 14 nt, Human
ggcagugggagcug

SEQ ID NO: 3177160 - RNA, 13 nt, Human
ggcagugggagcu

SEQ ID NO: 3177161 - RNA, 20 nt, Human
ggcagggucucacucugucg

SEQ ID NO: 3177162 - RNA, 19 nt, Human
ggcagggucucacucuguc

SEQ ID NO: 3177163 - RNA, 19 nt, Human
ggcagggugucugcccccu

SEQ ID NO: 3177164 - RNA, 16 nt, Human
ggccaugggccuccug

SEQ ID NO: 3177165 - RNA, 17 nt, Human
ggccaggcugcucucaa

SEQ ID NO: 3177166 - RNA, 14 nt, Human
ggccaggcugcucu

SEQ ID NO: 3177167 - RNA, 15 nt, Human
ggccaggcugcucuu

SEQ ID NO: 3177168 - RNA, 11 nt, Human
ggccaggcugc

SEQ ID NO: 3177169 - RNA, 23 nt, Human
ggccagcugcuugggcuucaucc

SEQ ID NO: 3177170 - RNA, 11 nt, Human
ggccagcuccg

SEQ ID NO: 3177171 - RNA, 18 nt, Human
ggccaggcccucugccca

SEQ ID NO: 3177172 - RNA, 18 nt, Human
ggccaggaaguagcacag

SEQ ID NO: 3177173 - RNA, 22 nt, Human
ggccagccuugaccauucucca

SEQ ID NO: 3177174 - RNA, 17 nt, Human
ggccagcugcuugggcu

SEQ ID NO: 3177175 - RNA, 20 nt, Human
ggccagccuugaccauucuc

SEQ ID NO: 3177176 - RNA, 14 nt, Human
ggcauggcugggaa

SEQ ID NO: 3177177 - RNA, 18 nt, Human
ggcaugggaaugaauguc

SEQ ID NO: 3177178 - RNA, 22 nt, Human
ggcaugggaaugaaugucagug

SEQ ID NO: 3177179 - RNA, 17 nt, Human
ggcauuccccaggaggc

SEQ ID NO: 3177180 - RNA, 18 nt, Human
ggcauuccccaggaggcc

SEQ ID NO: 3177181 - RNA, 19 nt, Human
ggcauuccccaggaggcca

SEQ ID NO: 3177182 - RNA, 16 nt, Human
ggcauuccccaggagg

SEQ ID NO: 3177183 - RNA, 18 nt, Human
ggccacccugugcagaag

SEQ ID NO: 3177184 - RNA, 20 nt, Human
ggccaccacgccuagccuca

SEQ ID NO: 3177185 - RNA, 17 nt, Human
ggccacuccagaccccu

SEQ ID NO: 3177186 - RNA, 17 nt, Human
gcuaugagcuggggaug

SEQ ID NO: 3177187 - RNA, 18 nt, Human
gcucaccagccccagugc

SEQ ID NO: 3177188 - RNA, 19 nt, Human
gcucaccagccccagugcc

SEQ ID NO: 3177189 - RNA, 23 nt, Human
gcucaccagccccagugcccaca

SEQ ID NO: 3177190 - RNA, 20 nt, Human
gcucaccagccccagugccc

SEQ ID NO: 3177191 - RNA, 11 nt, Human
gcuaugacuua

SEQ ID NO: 3177192 - RNA, 18 nt, Human
gcucagcagugagagcag

SEQ ID NO: 3177193 - RNA, 15 nt, Human
gcucagcaaggccac

SEQ ID NO: 3177194 - RNA, 14 nt, Human
gcucagcaaggcca

SEQ ID NO: 3177195 - RNA, 21 nt, Human
gcucagaucccacuuuugcca

SEQ ID NO: 3177196 - RNA, 19 nt, Human
gcucagcaaggccaccucu

SEQ ID NO: 3177197 - RNA, 18 nt, Human
gcucagcaaggccaccuc

SEQ ID NO: 3177198 - RNA, 17 nt, Human
gcucagcaaggccaccu

SEQ ID NO: 3177199 - RNA, 16 nt, Human
gcucagcaaggccacc

SEQ ID NO: 3177200 - RNA, 17 nt, Human
gcucagcaaaagaugcu

SEQ ID NO: 3177201 - RNA, 20 nt, Human
gcucagcaaaagaugcuucu

SEQ ID NO: 3177202 - RNA, 22 nt, Human
gcucagcaaaagaugcuucuca

SEQ ID NO: 3177203 - RNA, 23 nt, Human
gcucagcaaaagaugcuucucac

SEQ ID NO: 3177204 - RNA, 22 nt, Human
gcucagugucuggcugcagagc

SEQ ID NO: 3177205 - RNA, 19 nt, Human
gcucaggugucccugcacu

SEQ ID NO: 3177206 - RNA, 17 nt, Human
gcucaggugucccugca

SEQ ID NO: 3177207 - RNA, 18 nt, Human
gcucaggugucccugcac

SEQ ID NO: 3177208 - RNA, 22 nt, Human
gcucagcggggacagcuccuuc

SEQ ID NO: 3177209 - RNA, 21 nt, Human
gcucagcggggacagcuccuu

SEQ ID NO: 3177210 - RNA, 15 nt, Human
gcucagcggggacag

SEQ ID NO: 3177211 - RNA, 19 nt, Human
gcucagcggggacagcucc

SEQ ID NO: 3177212 - RNA, 20 nt, Human
gcucagcggggacagcuccu

SEQ ID NO: 3177213 - RNA, 23 nt, Human
gcuccaggcuccuuuagcgccca

SEQ ID NO: 3177214 - RNA, 16 nt, Human
gcuccaggcuccuuua

SEQ ID NO: 3177215 - RNA, 11 nt, Human
gcuccagcugu

SEQ ID NO: 3177216 - RNA, 13 nt, Human
gcuccaggcuccu

SEQ ID NO: 3177217 - RNA, 14 nt, Human
gcuccaucuuauuu

SEQ ID NO: 3177218 - RNA, 14 nt, Human
gcuccaucuccacu

SEQ ID NO: 3177219 - RNA, 21 nt, Human
gcuccauacacacgcugccuu

SEQ ID NO: 3177220 - RNA, 20 nt, Human
gcuccauacacacgcugccu

SEQ ID NO: 3177221 - RNA, 17 nt, Human
gcuccauacacacgcug

SEQ ID NO: 3177222 - RNA, 18 nt, Human
gcucccucacucucagga

SEQ ID NO: 3177223 - RNA, 17 nt, Human
gcucccucacucucagg

SEQ ID NO: 3177224 - RNA, 16 nt, Human
gcucccucacucucag

SEQ ID NO: 3177225 - RNA, 15 nt, Human
gcucccucacucuca

SEQ ID NO: 3177226 - RNA, 14 nt, Human
gcucccucacucuc

SEQ ID NO: 3177227 - RNA, 19 nt, Human
gcucccucaaagaggcagu

SEQ ID NO: 3177228 - RNA, 17 nt, Human
gcucccucaaagaggca

SEQ ID NO: 3177229 - RNA, 16 nt, Human
gcucccucaaagaggc

SEQ ID NO: 3177230 - RNA, 12 nt, Human
gcucccugacug

SEQ ID NO: 3177231 - RNA, 20 nt, Human
gcucccuccgggucuuccua

SEQ ID NO: 3177232 - RNA, 16 nt, Human
gcuccaagcucccagg

SEQ ID NO: 3177233 - RNA, 17 nt, Human
gcuccaagcucccaggc

SEQ ID NO: 3177234 - RNA, 18 nt, Human
gcuccaagcucccaggca

SEQ ID NO: 3177235 - RNA, 19 nt, Human
gcuccaagcucccaggcau

SEQ ID NO: 3177236 - RNA, 21 nt, Human
gcuccaagcucccaggcauuc

SEQ ID NO: 3177237 - RNA, 16 nt, Human
gcuccacacacacaaa

SEQ ID NO: 3177238 - RNA, 17 nt, Human
gcuccagcuggccggga

SEQ ID NO: 3177239 - RNA, 23 nt, Human
gcuccagcuggccgggagccuga

SEQ ID NO: 3177240 - RNA, 17 nt, Human
gcuccacacacacaaaa

SEQ ID NO: 3177241 - RNA, 14 nt, Human
gcuccaagcuccca

SEQ ID NO: 3177242 - RNA, 15 nt, Human
gcuccaagcucccag

SEQ ID NO: 3177243 - RNA, 13 nt, Human
gcuccaagcuccc

SEQ ID NO: 3177244 - RNA, 16 nt, Human
gcuccaaaugcagcuu

SEQ ID NO: 3177245 - RNA, 20 nt, Human
gcuccaaccgggaugggagc

SEQ ID NO: 3177246 - RNA, 21 nt, Human
gcuccaacuccaacauccacu

SEQ ID NO: 3177247 - RNA, 13 nt, Human
gcuccaacuccaa

SEQ ID NO: 3177248 - RNA, 17 nt, Human
gccugugaacugaacuc

SEQ ID NO: 3177249 - RNA, 16 nt, Human
gcgguccacccaggag

SEQ ID NO: 3177250 - RNA, 13 nt, Human
gcggggacagcuc

SEQ ID NO: 3177251 - RNA, 15 nt, Human
gcgggcuuccuccug

SEQ ID NO: 3177252 - RNA, 12 nt, Human
gcggggacagcu

SEQ ID NO: 3177253 - RNA, 19 nt, Human
gcgguccacccaggagccc

SEQ ID NO: 3177254 - RNA, 18 nt, Human
gcgguccacccaggagcc

SEQ ID NO: 3177255 - RNA, 16 nt, Human
gcguagcagaguuaaa

SEQ ID NO: 3177256 - RNA, 14 nt, Human
gcgucaucuggucc

SEQ ID NO: 3177257 - RNA, 15 nt, Human
gcgucaucugguccu

SEQ ID NO: 3177258 - RNA, 18 nt, Human
gcguauggcuuuauuuuu

SEQ ID NO: 3177259 - RNA, 19 nt, Human
gcguagugcagcagggcag

SEQ ID NO: 3177260 - RNA, 19 nt, Human
gcguaugcaguguagauuu

SEQ ID NO: 3177261 - RNA, 23 nt, Human
gcgugagccacugcaccgggcca

SEQ ID NO: 3177262 - RNA, 21 nt, Human
gcuaaaguaaacaacucaagg

SEQ ID NO: 3177263 - RNA, 22 nt, Human
gcuaaagguuaccgauuucaaa

SEQ ID NO: 3177264 - RNA, 18 nt, Human
gcgugagccacugcaccg

SEQ ID NO: 3177265 - RNA, 16 nt, Human
gcgugagccacugcac

SEQ ID NO: 3177266 - RNA, 21 nt, Human
gcuaagagggagggagggcuc

SEQ ID NO: 3177267 - RNA, 22 nt, Human
gcuaagagggagggagggcucc

SEQ ID NO: 3177268 - RNA, 23 nt, Human
gcuaaauugauguugaugcaauc

SEQ ID NO: 3177269 - RNA, 21 nt, Human
gcuaaauugauguugaugcaa

SEQ ID NO: 3177270 - RNA, 20 nt, Human
gcuaaauugauguugaugca

SEQ ID NO: 3177271 - RNA, 13 nt, Human
gcuaaaugugaau

SEQ ID NO: 3177272 - RNA, 16 nt, Human
gcuaaaugugaaugau

SEQ ID NO: 3177273 - RNA, 18 nt, Human
gcuaaauugauguugaug

SEQ ID NO: 3177274 - RNA, 17 nt, Human
gcuaaauugauguugau

SEQ ID NO: 3177275 - RNA, 17 nt, Human
gcuaagcaaaaugugau

SEQ ID NO: 3177276 - RNA, 23 nt, Human
gcuaagagggagggagggcucca

SEQ ID NO: 3177277 - RNA, 14 nt, Human
gcuacccgggaagg

SEQ ID NO: 3177278 - RNA, 15 nt, Human
gcuacccgggaaggg

SEQ ID NO: 3177279 - RNA, 22 nt, Human
gcuacuaugauuuaauuugaaa

SEQ ID NO: 3177280 - RNA, 20 nt, Human
gcuacuaugauuuaauuuga

SEQ ID NO: 3177281 - RNA, 21 nt, Human
gcuacccgggaagggggcugg

SEQ ID NO: 3177282 - RNA, 16 nt, Human
gcuacccgugagcccu

SEQ ID NO: 3177283 - RNA, 16 nt, Human
gcuacguuuacucaca

SEQ ID NO: 3177284 - RNA, 16 nt, Human
gcuaucucccccagcc

SEQ ID NO: 3177285 - RNA, 19 nt, Human
gcuagcuaagccaagaggc

SEQ ID NO: 3177286 - RNA, 17 nt, Human
gcuaucucccccagccc

SEQ ID NO: 3177287 - RNA, 18 nt, Human
gcuaucucccccagcccc

SEQ ID NO: 3177288 - RNA, 22 nt, Human
gcuagcagcagggagggcuucu

SEQ ID NO: 3177289 - RNA, 19 nt, Human
gcuaucucccccagcccca

SEQ ID NO: 3177290 - RNA, 20 nt, Human
gcuaucucccccagccccau

SEQ ID NO: 3177291 - RNA, 21 nt, Human
gcuaucucccccagccccauc

SEQ ID NO: 3177292 - RNA, 22 nt, Human
gcuaucucccccagccccaucc

SEQ ID NO: 3177293 - RNA, 23 nt, Human
gcuaucucccccagccccauccu

SEQ ID NO: 3177294 - RNA, 15 nt, Human
gcuaucucccccagc

SEQ ID NO: 3177295 - RNA, 13 nt, Human
gcuaucuucaugu

SEQ ID NO: 3177296 - RNA, 14 nt, Human
gcuaucuucaugua

SEQ ID NO: 3177297 - RNA, 15 nt, Human
gcuaucuucauguaa

SEQ ID NO: 3177298 - RNA, 18 nt, Human
gcuaucuucauguaaauu

SEQ ID NO: 3177299 - RNA, 19 nt, Human
gcuaucuucauguaaauug

SEQ ID NO: 3177300 - RNA, 21 nt, Human
gcuaugaagagcuagagaaau

SEQ ID NO: 3177301 - RNA, 22 nt, Human
gcucuuccuggacaggccaggu

SEQ ID NO: 3177302 - RNA, 23 nt, Human
gcucuucuccuuucacaaccuuc

SEQ ID NO: 3177303 - RNA, 16 nt, Human
gcucuucuccaggcug

SEQ ID NO: 3177304 - RNA, 14 nt, Human
gcucuucuccaggc

SEQ ID NO: 3177305 - RNA, 21 nt, Human
gcucuucuccuuucacaaccu

SEQ ID NO: 3177306 - RNA, 17 nt, Human
gcucuucuccuuucaca

SEQ ID NO: 3177307 - RNA, 13 nt, Human
gcucuucuccuuu

SEQ ID NO: 3177308 - RNA, 19 nt, Human
gcucuuccaggcugggaga

SEQ ID NO: 3177309 - RNA, 18 nt, Human
gcucuuccaggcugggag

SEQ ID NO: 3177310 - RNA, 12 nt, Human
gcucuucuccag

SEQ ID NO: 3177311 - RNA, 22 nt, Human
gcucuuccaggcugggagagcc

SEQ ID NO: 3177312 - RNA, 19 nt, Human
gcucuuccuggacaggcca

SEQ ID NO: 3177313 - RNA, 20 nt, Human
gcucuuucccacccagccug

SEQ ID NO: 3177314 - RNA, 20 nt, Human
gcugacagacacaggcccgg

SEQ ID NO: 3177315 - RNA, 22 nt, Human
gcucuuucccacccagccuggg

SEQ ID NO: 3177316 - RNA, 21 nt, Human
gcugacagacacaggcccggc

SEQ ID NO: 3177317 - RNA, 17 nt, Human
gcugacagacagcccuc

SEQ ID NO: 3177318 - RNA, 19 nt, Human
gcugacagcacuaaacuug

SEQ ID NO: 3177319 - RNA, 16 nt, Human
gcugacuacagggccg

SEQ ID NO: 3177320 - RNA, 22 nt, Human
gcugacuauaaugccucuccuu

SEQ ID NO: 3177321 - RNA, 19 nt, Human
gcugacuguacuccuccca

SEQ ID NO: 3177322 - RNA, 18 nt, Human
gcugacuguacuccuccc

SEQ ID NO: 3177323 - RNA, 13 nt, Human
gcugacuccuggu

SEQ ID NO: 3177324 - RNA, 14 nt, Human
gcugacuccugguc

SEQ ID NO: 3177325 - RNA, 15 nt, Human
gcugacuccuggucc

SEQ ID NO: 3177326 - RNA, 16 nt, Human
gcugacuccugguccu

SEQ ID NO: 3177327 - RNA, 17 nt, Human
gcugacuacagggccgc

SEQ ID NO: 3177328 - RNA, 16 nt, Human
gcugacccaugggcag

SEQ ID NO: 3177329 - RNA, 14 nt, Human
gcugacccaugggc

SEQ ID NO: 3177330 - RNA, 21 nt, Human
gcugacccaugggcaggagac

SEQ ID NO: 3177331 - RNA, 20 nt, Human
gcugacccaugggcaggaga

SEQ ID NO: 3177332 - RNA, 19 nt, Human
gcugacccaugggcaggag

SEQ ID NO: 3177333 - RNA, 18 nt, Human
gcugacccaugggcagga

SEQ ID NO: 3177334 - RNA, 18 nt, Human
gcugauggugcaaugacc

SEQ ID NO: 3177335 - RNA, 21 nt, Human
gcugauggugcaaugaccuuu

SEQ ID NO: 3177336 - RNA, 18 nt, Human
gcugcaguugccagucac

SEQ ID NO: 3177337 - RNA, 20 nt, Human
gcugcaguugccagucaccc

SEQ ID NO: 3177338 - RNA, 21 nt, Human
gcugcaguugccagucacccc

SEQ ID NO: 3177339 - RNA, 17 nt, Human
gcugcaguugccaguca

SEQ ID NO: 3177340 - RNA, 19 nt, Human
gcugagucugaaggcuggg

SEQ ID NO: 3177341 - RNA, 22 nt, Human
gcugagugaggaauggcaguga

SEQ ID NO: 3177342 - RNA, 18 nt, Human
gcugagugcaggcccacc

SEQ ID NO: 3177343 - RNA, 16 nt, Human
gcugagugcaggccca

SEQ ID NO: 3177344 - RNA, 15 nt, Human
gcugagugcaggccc

SEQ ID NO: 3177345 - RNA, 14 nt, Human
gcugagugcaggcc

SEQ ID NO: 3177346 - RNA, 16 nt, Human
gcugagucugaaggcu

SEQ ID NO: 3177347 - RNA, 18 nt, Human
gcugagucugaaggcugg

SEQ ID NO: 3177348 - RNA, 15 nt, Human
gcugagucugaaggc

SEQ ID NO: 3177349 - RNA, 15 nt, Human
gcugaguccgaccug

SEQ ID NO: 3177350 - RNA, 16 nt, Human
gcugacugggccaggg

SEQ ID NO: 3177351 - RNA, 21 nt, Human
gcugagucccaggcugagccu

SEQ ID NO: 3177352 - RNA, 22 nt, Human
gcugagucccaggcugagccuc

SEQ ID NO: 3177353 - RNA, 17 nt, Human
gcugagucccaggcuga

SEQ ID NO: 3177354 - RNA, 21 nt, Human
gcugacuguacuccucccagg

SEQ ID NO: 3177355 - RNA, 15 nt, Human
gcugauggugcaaug

SEQ ID NO: 3177356 - RNA, 16 nt, Human
gcugauggugcaauga

SEQ ID NO: 3177357 - RNA, 22 nt, Human
gcugagugggggaucacagccu

SEQ ID NO: 3177358 - RNA, 23 nt, Human
gcugagugcaggcccacccugcu

SEQ ID NO: 3177359 - RNA, 22 nt, Human
gcugagugcaggcccacccugc

SEQ ID NO: 3177360 - RNA, 21 nt, Human
gcugagugcaggcccacccug

SEQ ID NO: 3177361 - RNA, 20 nt, Human
gcugagugcaggcccacccu

SEQ ID NO: 3177362 - RNA, 23 nt, Human
gcugagugggggaucacagccuc

SEQ ID NO: 3177363 - RNA, 14 nt, Human
gcucucuggccuuc

SEQ ID NO: 3177364 - RNA, 15 nt, Human
gcucucuggccuucg

SEQ ID NO: 3177365 - RNA, 19 nt, Human
gcucucuggccuucggccu

SEQ ID NO: 3177366 - RNA, 20 nt, Human
gcucucuggccuucggccuc

SEQ ID NO: 3177367 - RNA, 23 nt, Human
gcucugcccuugguuaggcauug

SEQ ID NO: 3177368 - RNA, 11 nt, Human
gcucugccucc

SEQ ID NO: 3177369 - RNA, 13 nt, Human
gcucugcccuugg

SEQ ID NO: 3177370 - RNA, 14 nt, Human
gcucugcccuuggu

SEQ ID NO: 3177371 - RNA, 13 nt, Human
gcucugccuccca

SEQ ID NO: 3177372 - RNA, 14 nt, Human
gcucugccucccau

SEQ ID NO: 3177373 - RNA, 15 nt, Human
gcucugccucccauc

SEQ ID NO: 3177374 - RNA, 22 nt, Human
gcucugccucccaucacccgcu

SEQ ID NO: 3177375 - RNA, 14 nt, Human
gcucugcuccucuc

SEQ ID NO: 3177376 - RNA, 13 nt, Human
gcucugcuccucu

SEQ ID NO: 3177377 - RNA, 16 nt, Human
gcucugccuuugcucu

SEQ ID NO: 3177378 - RNA, 16 nt, Human
gcucugccugacagag

SEQ ID NO: 3177379 - RNA, 23 nt, Human
gcucugcugacagacacaggccc

SEQ ID NO: 3177380 - RNA, 20 nt, Human
gcucugcugacagacacagg

SEQ ID NO: 3177381 - RNA, 19 nt, Human
gcucugcugacagacacag

SEQ ID NO: 3177382 - RNA, 18 nt, Human
gcucugcugacagacaca

SEQ ID NO: 3177383 - RNA, 14 nt, Human
gcucugcugacaga

SEQ ID NO: 3177384 - RNA, 13 nt, Human
gcucugcugacag

SEQ ID NO: 3177385 - RNA, 21 nt, Human
gcucugcuccucuccccagca

SEQ ID NO: 3177386 - RNA, 19 nt, Human
gcucugcuccucuccccag

SEQ ID NO: 3177387 - RNA, 22 nt, Human
gcucuggacaggcauguucucu

SEQ ID NO: 3177388 - RNA, 21 nt, Human
gcucuggacaggcauguucuc

SEQ ID NO: 3177389 - RNA, 16 nt, Human
gcucuggacaggcaug

SEQ ID NO: 3177390 - RNA, 15 nt, Human
gcucuggacaggcau

SEQ ID NO: 3177391 - RNA, 14 nt, Human
gcucuggacaggca

SEQ ID NO: 3177392 - RNA, 22 nt, Human
gcucugcugaugacccccccag

SEQ ID NO: 3177393 - RNA, 13 nt, Human
gcucugcucgccu

SEQ ID NO: 3177394 - RNA, 22 nt, Human
gcucugcuccccuaaagccuca

SEQ ID NO: 3177395 - RNA, 23 nt, Human
gcucugcugugggcacaggucag

SEQ ID NO: 3177396 - RNA, 12 nt, Human
gcucucuggccu

SEQ ID NO: 3177397 - RNA, 13 nt, Human
gcucucuggccuu

SEQ ID NO: 3177398 - RNA, 11 nt, Human
gcucucuggcc

SEQ ID NO: 3177399 - RNA, 16 nt, Human
gcucucgcggccucuu

SEQ ID NO: 3177400 - RNA, 17 nt, Human
gcucuccgaccagacac

SEQ ID NO: 3177401 - RNA, 13 nt, Human
gcucuccgaccag

SEQ ID NO: 3177402 - RNA, 19 nt, Human
gcucuccgaccagacaccu

SEQ ID NO: 3177403 - RNA, 20 nt, Human
gcucuccuagguagcccccu

SEQ ID NO: 3177404 - RNA, 15 nt, Human
gcucuccucuugcca

SEQ ID NO: 3177405 - RNA, 22 nt, Human
gcucuccucuugccacugccuc

SEQ ID NO: 3177406 - RNA, 19 nt, Human
gcucuccucuugccacugc

SEQ ID NO: 3177407 - RNA, 21 nt, Human
gcuccuucuguccuacucugu

SEQ ID NO: 3177408 - RNA, 15 nt, Human
gcuccuucuguccua

SEQ ID NO: 3177409 - RNA, 13 nt, Human
gcucccugacugg

SEQ ID NO: 3177410 - RNA, 16 nt, Human
gcucccuucccaccuc

SEQ ID NO: 3177411 - RNA, 18 nt, Human
gcucccuucccaccucuc

SEQ ID NO: 3177412 - RNA, 15 nt, Human
gcucccuucccaccu

SEQ ID NO: 3177413 - RNA, 16 nt, Human
gcucgagcaugccugg

SEQ ID NO: 3177414 - RNA, 18 nt, Human
gcuccuuuuccagagcau

SEQ ID NO: 3177415 - RNA, 16 nt, Human
gcccugggaggcagug

SEQ ID NO: 3177416 - RNA, 21 nt, Human
gcccuggugcugccacacuuc

SEQ ID NO: 3177417 - RNA, 17 nt, Human
gcccuggugcugccaca

SEQ ID NO: 3177418 - RNA, 16 nt, Human
gcccuggugcugccac

SEQ ID NO: 3177419 - RNA, 15 nt, Human
gcccuggugcugcca

SEQ ID NO: 3177420 - RNA, 11 nt, Human
gcccugggagg

SEQ ID NO: 3177421 - RNA, 14 nt, Human
gcccugggaggcag

SEQ ID NO: 3177422 - RNA, 19 nt, Human
gcccuggcucccacaggcc

SEQ ID NO: 3177423 - RNA, 15 nt, Human
gcccuggcucccaca

SEQ ID NO: 3177424 - RNA, 20 nt, Human
gcccuggcucccacaggccc

SEQ ID NO: 3177425 - RNA, 15 nt, Human
gcccuggcaggcagg

SEQ ID NO: 3177426 - RNA, 14 nt, Human
gcccuggcaggcag

SEQ ID NO: 3177427 - RNA, 12 nt, Human
gcccuggcagcc

SEQ ID NO: 3177428 - RNA, 16 nt, Human
gcccuggcaggcaggg

SEQ ID NO: 3177429 - RNA, 16 nt, Human
gcccuggcccaucaug

SEQ ID NO: 3177430 - RNA, 16 nt, Human
gcccuggcccccacau

SEQ ID NO: 3177431 - RNA, 13 nt, Human
gcccuggccccca

SEQ ID NO: 3177432 - RNA, 17 nt, Human
gcccuggcccccacaug

SEQ ID NO: 3177433 - RNA, 14 nt, Human
gcccugguuuccug

SEQ ID NO: 3177434 - RNA, 15 nt, Human
gcccugguuuccugc

SEQ ID NO: 3177435 - RNA, 17 nt, Human
gcccugguuuccugccc

SEQ ID NO: 3177436 - RNA, 18 nt, Human
gcccugguuuccugcccu

SEQ ID NO: 3177437 - RNA, 19 nt, Human
gcccugguuuccugcccug

SEQ ID NO: 3177438 - RNA, 20 nt, Human
gcccugguuuccugcccugg

SEQ ID NO: 3177439 - RNA, 21 nt, Human
gcccugguuuccugcccuggg

SEQ ID NO: 3177440 - RNA, 23 nt, Human
gcccugguuuccugcccugggag

SEQ ID NO: 3177441 - RNA, 18 nt, Human
gcccugucaggaggcaga

SEQ ID NO: 3177442 - RNA, 17 nt, Human
gcccugucaggaggcag

SEQ ID NO: 3177443 - RNA, 15 nt, Human
gcccugucaggaggc

SEQ ID NO: 3177444 - RNA, 23 nt, Human
gcccugguggcagugggagcugc

SEQ ID NO: 3177445 - RNA, 22 nt, Human
gcccugguggcagugggagcug

SEQ ID NO: 3177446 - RNA, 21 nt, Human
gcccugguggcagugggagcu

SEQ ID NO: 3177447 - RNA, 20 nt, Human
gcccugguggcagugggagc

SEQ ID NO: 3177448 - RNA, 19 nt, Human
gcccugguggcagugggag

SEQ ID NO: 3177449 - RNA, 18 nt, Human
gcccugguggcaguggga

SEQ ID NO: 3177450 - RNA, 17 nt, Human
gcccugguggcaguggg

SEQ ID NO: 3177451 - RNA, 14 nt, Human
gcccugguggcagu

SEQ ID NO: 3177452 - RNA, 18 nt, Human
gcccuucucuccagcccc

SEQ ID NO: 3177453 - RNA, 19 nt, Human
gcccuucucuccagccccu

SEQ ID NO: 3177454 - RNA, 19 nt, Human
gcccuuccucuccacugcc

SEQ ID NO: 3177455 - RNA, 18 nt, Human
gcccuuccucuccacugc

SEQ ID NO: 3177456 - RNA, 16 nt, Human
gcccuuccucuccacu

SEQ ID NO: 3177457 - RNA, 17 nt, Human
gcccuuccucuccacug

SEQ ID NO: 3177458 - RNA, 21 nt, Human
gcccuucucuccagccccugg

SEQ ID NO: 3177459 - RNA, 22 nt, Human
gcccuucucuccagccccugga

SEQ ID NO: 3177460 - RNA, 20 nt, Human
gcccuuccucuccacugccu

SEQ ID NO: 3177461 - RNA, 23 nt, Human
gcccuuuacuugucuuucugggg

SEQ ID NO: 3177462 - RNA, 21 nt, Human
gcccuuuacuugucuuucugg

SEQ ID NO: 3177463 - RNA, 17 nt, Human
gcccuuuacuugucuuu

SEQ ID NO: 3177464 - RNA, 20 nt, Human
gcccuuuacuugucuuucug

SEQ ID NO: 3177465 - RNA, 18 nt, Human
gccgagauugcaccacug

SEQ ID NO: 3177466 - RNA, 17 nt, Human
gccgagauugcaccacu

SEQ ID NO: 3177467 - RNA, 18 nt, Human
gccgagaucacgccacug

SEQ ID NO: 3177468 - RNA, 16 nt, Human
gccgagaucacgccac

SEQ ID NO: 3177469 - RNA, 22 nt, Human
gcccuuuguccuccugcugcca

SEQ ID NO: 3177470 - RNA, 18 nt, Human
gcccuuuguccuccugcu

SEQ ID NO: 3177471 - RNA, 18 nt, Human
gcccugaguuccuagcca

SEQ ID NO: 3177472 - RNA, 16 nt, Human
gcccugaguuccuagc

SEQ ID NO: 3177473 - RNA, 19 nt, Human
gcccugcuuugggcugccc

SEQ ID NO: 3177474 - RNA, 21 nt, Human
gcccugcuuugggcugcccug

SEQ ID NO: 3177475 - RNA, 20 nt, Human
gcccugcuuugggcugcccu

SEQ ID NO: 3177476 - RNA, 23 nt, Human
gcccugcuuugggcugcccuggu

SEQ ID NO: 3177477 - RNA, 22 nt, Human
gcccugcuuugggcugcccugg

SEQ ID NO: 3177478 - RNA, 20 nt, Human
gcccucucugaaggaggcca

SEQ ID NO: 3177479 - RNA, 23 nt, Human
gcccucucugaaggaggccaccu

SEQ ID NO: 3177480 - RNA, 22 nt, Human
gcccucucugaaggaggccacc

SEQ ID NO: 3177481 - RNA, 12 nt, Human
gcccucugccca

SEQ ID NO: 3177482 - RNA, 16 nt, Human
gcccugagcuuucugc

SEQ ID NO: 3177483 - RNA, 14 nt, Human
gcccugagcuuucu

SEQ ID NO: 3177484 - RNA, 16 nt, Human
gcccugaggaggccuu

SEQ ID NO: 3177485 - RNA, 18 nt, Human
gcccggcuccaggcuccu

SEQ ID NO: 3177486 - RNA, 17 nt, Human
gcccggcuccaggcucc

SEQ ID NO: 3177487 - RNA, 15 nt, Human
gcagacucuacagag

SEQ ID NO: 3177488 - RNA, 23 nt, Human
gccccucccucuccagcaggccc

SEQ ID NO: 3177489 - RNA, 18 nt, Human
gccccuccucucugcccu

SEQ ID NO: 3177490 - RNA, 15 nt, Human
gccccucccuucaac

SEQ ID NO: 3177491 - RNA, 14 nt, Human
gccccucccuucaa

SEQ ID NO: 3177492 - RNA, 12 nt, Human
gccccucccuuc

SEQ ID NO: 3177493 - RNA, 19 nt, Human
gccccuccucucugcccua

SEQ ID NO: 3177494 - RNA, 21 nt, Human
gccccuguucuggcagaguug

SEQ ID NO: 3177495 - RNA, 17 nt, Human
gccccuguucuggcaga

SEQ ID NO: 3177496 - RNA, 15 nt, Human
gccccugccacccug

SEQ ID NO: 3177497 - RNA, 14 nt, Human
gccccugccacccu

SEQ ID NO: 3177498 - RNA, 13 nt, Human
gccccugccaccc

SEQ ID NO: 3177499 - RNA, 20 nt, Human
gccccucuccccgcaguguu

SEQ ID NO: 3177500 - RNA, 16 nt, Human
gcccggcuccaggcuc

SEQ ID NO: 3177501 - RNA, 15 nt, Human
gcccggcuccaggcu

SEQ ID NO: 3177502 - RNA, 19 nt, Human
gcccgacagccuggcacag

SEQ ID NO: 3177503 - RNA, 17 nt, Human
gcccgacagccuggcac

SEQ ID NO: 3177504 - RNA, 16 nt, Human
gcccgacagccuggca

SEQ ID NO: 3177505 - RNA, 12 nt, Human
gccccuuccccc

SEQ ID NO: 3177506 - RNA, 12 nt, Human
gcccgccaccac

SEQ ID NO: 3177507 - RNA, 23 nt, Human
gccuggccagcagguccccagcu

SEQ ID NO: 3177508 - RNA, 22 nt, Human
gccuggccagaugcaccagccc

SEQ ID NO: 3177509 - RNA, 15 nt, Human
gccuggccagaugca

SEQ ID NO: 3177510 - RNA, 14 nt, Human
gccuggccagaugc

SEQ ID NO: 3177511 - RNA, 15 nt, Human
gccugggcagaagga

SEQ ID NO: 3177512 - RNA, 15 nt, Human
gccuggauggggcug

SEQ ID NO: 3177513 - RNA, 14 nt, Human
gccuggauggggcu

SEQ ID NO: 3177514 - RNA, 13 nt, Human
gccuggccacgcc

SEQ ID NO: 3177515 - RNA, 22 nt, Human
gccuggcagccgugccuucagc

SEQ ID NO: 3177516 - RNA, 16 nt, Human
gccugggcagaaggaa

SEQ ID NO: 3177517 - RNA, 17 nt, Human
gccugggcagaaggaag

SEQ ID NO: 3177518 - RNA, 20 nt, Human
gccugggggcugggcagagg

SEQ ID NO: 3177519 - RNA, 18 nt, Human
gccucugccucugacaca

SEQ ID NO: 3177520 - RNA, 12 nt, Human
gccucugccugu

SEQ ID NO: 3177521 - RNA, 22 nt, Human
gccugaagucacacagugaguc

SEQ ID NO: 3177522 - RNA, 19 nt, Human
gccucugcugauccuccca

SEQ ID NO: 3177523 - RNA, 18 nt, Human
gccucugcugauccuccc

SEQ ID NO: 3177524 - RNA, 13 nt, Human
gccucugccuguc

SEQ ID NO: 3177525 - RNA, 16 nt, Human
gccugacagccagaac

SEQ ID NO: 3177526 - RNA, 17 nt, Human
gccugacagccagaacu

SEQ ID NO: 3177527 - RNA, 22 nt, Human
gccugagugagaggggaggcca

SEQ ID NO: 3177528 - RNA, 19 nt, Human
gccugaugaccaauuuuaa

SEQ ID NO: 3177529 - RNA, 16 nt, Human
gccugcuccagcuguu

SEQ ID NO: 3177530 - RNA, 18 nt, Human
gccugcuccagcuguuca

SEQ ID NO: 3177531 - RNA, 17 nt, Human
gccugcuuugucuccuc

SEQ ID NO: 3177532 - RNA, 12 nt, Human
gccugcagagcu

SEQ ID NO: 3177533 - RNA, 15 nt, Human
gccugcuccagcugu

SEQ ID NO: 3177534 - RNA, 16 nt, Human
gccugauuuguuccuu

SEQ ID NO: 3177535 - RNA, 23 nt, Human
gccugcacuugggggcucagcaa

SEQ ID NO: 3177536 - RNA, 22 nt, Human
gccugcacuugggggcucagca

SEQ ID NO: 3177537 - RNA, 21 nt, Human
gccugcacuugggggcucagc

SEQ ID NO: 3177538 - RNA, 19 nt, Human
gccugcacuugggggcuca

SEQ ID NO: 3177539 - RNA, 24 nt, Human
gccucuccgccccugagcccacug

SEQ ID NO: 3177540 - RNA, 14 nt, Human
gccucuccuuaaau

SEQ ID NO: 3177541 - RNA, 23 nt, Human
gccucuccgccccugagcccacu

SEQ ID NO: 3177542 - RNA, 22 nt, Human
gccucuccgccccugagcccac

SEQ ID NO: 3177543 - RNA, 21 nt, Human
gccucuccgccccugagccca

SEQ ID NO: 3177544 - RNA, 20 nt, Human
gccucuccgccccugagccc

SEQ ID NO: 3177545 - RNA, 19 nt, Human
gccucuccgccccugagcc

SEQ ID NO: 3177546 - RNA, 19 nt, Human
gccucacauuuuuuucuac

SEQ ID NO: 3177547 - RNA, 13 nt, Human
gccucuagcugaa

SEQ ID NO: 3177548 - RNA, 11 nt, Human
gccucuagcug

SEQ ID NO: 3177549 - RNA, 22 nt, Human
gccucggauccccuuccuacca

SEQ ID NO: 3177550 - RNA, 18 nt, Human
gccucggauccccuuccu

SEQ ID NO: 3177551 - RNA, 17 nt, Human
gccucggauccccuucc

SEQ ID NO: 3177552 - RNA, 15 nt, Human
gccucggcuggcucc

SEQ ID NO: 3177553 - RNA, 16 nt, Human
gccucggcuggcuccc

SEQ ID NO: 3177554 - RNA, 17 nt, Human
gccucggcuggcucccc

SEQ ID NO: 3177555 - RNA, 18 nt, Human
gccucggcuggcuccccu

SEQ ID NO: 3177556 - RNA, 19 nt, Human
gccucggcuggcuccccug

SEQ ID NO: 3177557 - RNA, 20 nt, Human
gccucggcuggcuccccugc

SEQ ID NO: 3177558 - RNA, 22 nt, Human
gccucggcuggcuccccugcag

SEQ ID NO: 3177559 - RNA, 15 nt, Human
gccucccgaguagcu

SEQ ID NO: 3177560 - RNA, 23 nt, Human
gccucccgaauagcugggacuac

SEQ ID NO: 3177561 - RNA, 20 nt, Human
gccucggacuuagcugggag

SEQ ID NO: 3177562 - RNA, 21 nt, Human
gccucggacuuagcugggaga

SEQ ID NO: 3177563 - RNA, 21 nt, Human
gccucccaacucaccccagcc

SEQ ID NO: 3177564 - RNA, 15 nt, Human
gccucagugccacua

SEQ ID NO: 3177565 - RNA, 14 nt, Human
gccucccacagugc

SEQ ID NO: 3177566 - RNA, 22 nt, Human
gccucccaacucaccccagccc

SEQ ID NO: 3177567 - RNA, 23 nt, Human
gccucccaacucaccccagcccc

SEQ ID NO: 3177568 - RNA, 21 nt, Human
gccucccacgacugcccggca

SEQ ID NO: 3177569 - RNA, 14 nt, Human
gccucccacgacug

SEQ ID NO: 3177570 - RNA, 16 nt, Human
gccucccacagugcug

SEQ ID NO: 3177571 - RNA, 21 nt, Human
gccucccgaauagcugggacu

SEQ ID NO: 3177572 - RNA, 22 nt, Human
gccuauauuuuuuguuaaauga

SEQ ID NO: 3177573 - RNA, 15 nt, Human
gccuauauuuuccug

SEQ ID NO: 3177574 - RNA, 19 nt, Human
gccuauaagccaaaauuaa

SEQ ID NO: 3177575 - RNA, 22 nt, Human
gccuauaagccaaaauuaaggu

SEQ ID NO: 3177576 - RNA, 12 nt, Human
gccuaauaaaac

SEQ ID NO: 3177577 - RNA, 13 nt, Human
gccuaauaaaacu

SEQ ID NO: 3177578 - RNA, 15 nt, Human
gccuaauaaaacuga

SEQ ID NO: 3177579 - RNA, 16 nt, Human
gccuaauaaaacugau

SEQ ID NO: 3177580 - RNA, 17 nt, Human
gccuaauaaaacugaug

SEQ ID NO: 3177581 - RNA, 18 nt, Human
gccuaauaaaacugaugu

SEQ ID NO: 3177582 - RNA, 19 nt, Human
gccuaauaaaacugaugug

SEQ ID NO: 3177583 - RNA, 21 nt, Human
gccuaauaaaacugaugugaa

SEQ ID NO: 3177584 - RNA, 22 nt, Human
gccuaauaaaacugaugugaaa

SEQ ID NO: 3177585 - RNA, 23 nt, Human
gccuaauaaaacugaugugaaac

SEQ ID NO: 3177586 - RNA, 14 nt, Human
gccuaaggcugaac

SEQ ID NO: 3177587 - RNA, 17 nt, Human
gccuaagugcagccccg

SEQ ID NO: 3177588 - RNA, 16 nt, Human
gccuaaggcugaacuu

SEQ ID NO: 3177589 - RNA, 19 nt, Human
gccgagauagccaaggcca

SEQ ID NO: 3177590 - RNA, 21 nt, Human
gccgagcccuugcccaugcug

SEQ ID NO: 3177591 - RNA, 21 nt, Human
gccucaagugauucuccugcc

SEQ ID NO: 3177592 - RNA, 20 nt, Human
gccucaagugauucuccugc

SEQ ID NO: 3177593 - RNA, 19 nt, Human
gccucaagugauucuccug

SEQ ID NO: 3177594 - RNA, 16 nt, Human
gccucaaccuccuggg

SEQ ID NO: 3177595 - RNA, 14 nt, Human
gccucaaccuccug

SEQ ID NO: 3177596 - RNA, 16 nt, Human
gccuauccuaagagcu

SEQ ID NO: 3177597 - RNA, 21 nt, Human
gccucacaguccuuaccagca

SEQ ID NO: 3177598 - RNA, 22 nt, Human
gccucagccucccaaagugcug

SEQ ID NO: 3177599 - RNA, 23 nt, Human
gccucagccucccaaagugcugg

SEQ ID NO: 3177600 - RNA, 14 nt, Human
gccucagccucccg

SEQ ID NO: 3177601 - RNA, 14 nt, Human
gccucagugccacu

SEQ ID NO: 3177602 - RNA, 12 nt, Human
gccucagugcca

SEQ ID NO: 3177603 - RNA, 15 nt, Human
gccucagucucccuc

SEQ ID NO: 3177604 - RNA, 18 nt, Human
gccucagucucccucccu

SEQ ID NO: 3177605 - RNA, 17 nt, Human
gccucagcuuccccagu

SEQ ID NO: 3177606 - RNA, 16 nt, Human
gccucagcuuccccag

SEQ ID NO: 3177607 - RNA, 18 nt, Human
gagaugaugaaaauauuu

SEQ ID NO: 3177608 - RNA, 17 nt, Human
gagaugaggccgccaug

SEQ ID NO: 3177609 - RNA, 17 nt, Human
gagaugagaggggagag

SEQ ID NO: 3177610 - RNA, 16 nt, Human
gagaugaggaguaaaa

SEQ ID NO: 3177611 - RNA, 19 nt, Human
gagaugaggaguaaaauuc

SEQ ID NO: 3177612 - RNA, 20 nt, Human
gagaugaggaguaaaauuca

SEQ ID NO: 3177613 - RNA, 16 nt, Human
gagauagccaaggcca

SEQ ID NO: 3177614 - RNA, 23 nt, Human
gagaucaaccccuucgcuccugu

SEQ ID NO: 3177615 - RNA, 14 nt, Human
gagauagccaaggc

SEQ ID NO: 3177616 - RNA, 23 nt, Human
gagauacuuggucacagccaggc

SEQ ID NO: 3177617 - RNA, 18 nt, Human
gagaucacgccacugcac

SEQ ID NO: 3177618 - RNA, 19 nt, Human
gagaucacgccacugcacu

SEQ ID NO: 3177619 - RNA, 21 nt, Human
gagcaccuuagacagucccug

SEQ ID NO: 3177620 - RNA, 22 nt, Human
gagcaccuuagacagucccugc

SEQ ID NO: 3177621 - RNA, 15 nt, Human
gagcacuaaggugug

SEQ ID NO: 3177622 - RNA, 19 nt, Human
gagcaccuuagacaguccc

SEQ ID NO: 3177623 - RNA, 19 nt, Human
gagcacaacccccagcucc

SEQ ID NO: 3177624 - RNA, 18 nt, Human
gagcacaacccccagcuc

SEQ ID NO: 3177625 - RNA, 21 nt, Human
gagcacuaaggugugcucuga

SEQ ID NO: 3177626 - RNA, 20 nt, Human
gagcaccuuagacagucccu

SEQ ID NO: 3177627 - RNA, 16 nt, Human
gagcacaaaauucaaa

SEQ ID NO: 3177628 - RNA, 21 nt, Human
gagcacaaaauucaaagcaug

SEQ ID NO: 3177629 - RNA, 22 nt, Human
gagcacaaaauucaaagcaugg

SEQ ID NO: 3177630 - RNA, 11 nt, Human
gagcaagagga

SEQ ID NO: 3177631 - RNA, 18 nt, Human
gagcaagggcagggacag

SEQ ID NO: 3177632 - RNA, 21 nt, Human
gagcaaggaagguaaaaaguu

SEQ ID NO: 3177633 - RNA, 23 nt, Human
gagcaagacgcugugcugcccug

SEQ ID NO: 3177634 - RNA, 15 nt, Human
gagcaagagagcagc

SEQ ID NO: 3177635 - RNA, 14 nt, Human
gagcaagagagcag

SEQ ID NO: 3177636 - RNA, 21 nt, Human
gagcaaccccuggaccccagc

SEQ ID NO: 3177637 - RNA, 18 nt, Human
gagcaacaagaaucuaaa

SEQ ID NO: 3177638 - RNA, 22 nt, Human
gagcaaccccuggaccccagcc

SEQ ID NO: 3177639 - RNA, 19 nt, Human
gagccagggucucacuaug

SEQ ID NO: 3177640 - RNA, 23 nt, Human
gagccagauuucacucuccuugg

SEQ ID NO: 3177641 - RNA, 14 nt, Human
gagccagggucuca

SEQ ID NO: 3177642 - RNA, 18 nt, Human
gagcccugguggcagugg

SEQ ID NO: 3177643 - RNA, 21 nt, Human
gagcccaggagucccacucca

SEQ ID NO: 3177644 - RNA, 13 nt, Human
gagcccacugugc

SEQ ID NO: 3177645 - RNA, 18 nt, Human
gagcccagagucccccca

SEQ ID NO: 3177646 - RNA, 16 nt, Human
gagcccagaguccccc

SEQ ID NO: 3177647 - RNA, 19 nt, Human
gagccaauuuaaagaaaac

SEQ ID NO: 3177648 - RNA, 20 nt, Human
gagccagauuucacucuccu

SEQ ID NO: 3177649 - RNA, 15 nt, Human
gagcauuagauuucu

SEQ ID NO: 3177650 - RNA, 21 nt, Human
gagcauuagauuucucauuug

SEQ ID NO: 3177651 - RNA, 13 nt, Human
gagcauuccaguc

SEQ ID NO: 3177652 - RNA, 23 nt, Human
gagcauuauaaucaccagggcca

SEQ ID NO: 3177653 - RNA, 22 nt, Human
gagcauuauaaucaccagggcc

SEQ ID NO: 3177654 - RNA, 21 nt, Human
gagcauuauaaucaccagggc

SEQ ID NO: 3177655 - RNA, 21 nt, Human
gagcauuggggauguuuuucu

SEQ ID NO: 3177656 - RNA, 12 nt, Human
gagcagagacca

SEQ ID NO: 3177657 - RNA, 16 nt, Human
gagcagagaauucucu

SEQ ID NO: 3177658 - RNA, 16 nt, Human
gagcauuacaggcaag

SEQ ID NO: 3177659 - RNA, 15 nt, Human
gagcauuacaggcaa

SEQ ID NO: 3177660 - RNA, 14 nt, Human
gagcauuacaggca

SEQ ID NO: 3177661 - RNA, 17 nt, Human
gagaaugucaguaugug

SEQ ID NO: 3177662 - RNA, 18 nt, Human
gagacagcucugcauacu

SEQ ID NO: 3177663 - RNA, 20 nt, Human
gagacagcucugcauacuca

SEQ ID NO: 3177664 - RNA, 22 nt, Human
gagaaugcacaaacagaggccg

SEQ ID NO: 3177665 - RNA, 23 nt, Human
gagaaugcacaaacagaggccgc

SEQ ID NO: 3177666 - RNA, 22 nt, Human
gagaaugaacaaagaccaauuu

SEQ ID NO: 3177667 - RNA, 17 nt, Human
gagaaugaacaaagacc

SEQ ID NO: 3177668 - RNA, 18 nt, Human
gagaccaucccugaaggc

SEQ ID NO: 3177669 - RNA, 21 nt, Human
gagaccaucccugaaggcccc

SEQ ID NO: 3177670 - RNA, 14 nt, Human
gagaccaucccuga

SEQ ID NO: 3177671 - RNA, 12 nt, Human
gagaccaucccu

SEQ ID NO: 3177672 - RNA, 22 nt, Human
gagacaggguuuugccauguug

SEQ ID NO: 3177673 - RNA, 13 nt, Human
gagacagugaauu

SEQ ID NO: 3177674 - RNA, 16 nt, Human
gagacagugaauuugg

SEQ ID NO: 3177675 - RNA, 20 nt, Human
gagacaggguuucaccaugu

SEQ ID NO: 3177676 - RNA, 20 nt, Human
gagacucgcgacaaugcaaa

SEQ ID NO: 3177677 - RNA, 21 nt, Human
gagacucgcgacaaugcaaac

SEQ ID NO: 3177678 - RNA, 18 nt, Human
gagacucgcgacaaugca

SEQ ID NO: 3177679 - RNA, 20 nt, Human
gagacuccugcaggcagcca

SEQ ID NO: 3177680 - RNA, 21 nt, Human
gagacuccugcaggcagccag

SEQ ID NO: 3177681 - RNA, 19 nt, Human
gagacuccugcaggcagcc

SEQ ID NO: 3177682 - RNA, 18 nt, Human
gagacuccugcaggcagc

SEQ ID NO: 3177683 - RNA, 13 nt, Human
gagaguggcuccu

SEQ ID NO: 3177684 - RNA, 21 nt, Human
gagauacuuggucacagccag

SEQ ID NO: 3177685 - RNA, 13 nt, Human
gagauacucuggg

SEQ ID NO: 3177686 - RNA, 14 nt, Human
gagaguuuagcugu

SEQ ID NO: 3177687 - RNA, 21 nt, Human
gagaguggcuccucccggugc

SEQ ID NO: 3177688 - RNA, 16 nt, Human
gagaguggcuccuccc

SEQ ID NO: 3177689 - RNA, 14 nt, Human
gagagggugggagu

SEQ ID NO: 3177690 - RNA, 16 nt, Human
gagagggugggagugg

SEQ ID NO: 3177691 - RNA, 23 nt, Human
gagagggugaguccuccagaacu

SEQ ID NO: 3177692 - RNA, 13 nt, Human
gagaggggcacag

SEQ ID NO: 3177693 - RNA, 14 nt, Human
gagaggggaggcca

SEQ ID NO: 3177694 - RNA, 18 nt, Human
gagaggggagagcugaac

SEQ ID NO: 3177695 - RNA, 16 nt, Human
gagaggggaggccaag

SEQ ID NO: 3177696 - RNA, 18 nt, Human
gagaggggaacagacugg

SEQ ID NO: 3177697 - RNA, 19 nt, Human
gagaggggaacagacugga

SEQ ID NO: 3177698 - RNA, 13 nt, Human
gagagaaauauuu

SEQ ID NO: 3177699 - RNA, 11 nt, Human
gagagaaauau

SEQ ID NO: 3177700 - RNA, 19 nt, Human
gagagagcuucuguugcug

SEQ ID NO: 3177701 - RNA, 22 nt, Human
gagagagauguguaauuuuucu

SEQ ID NO: 3177702 - RNA, 14 nt, Human
gagagagcagccag

SEQ ID NO: 3177703 - RNA, 15 nt, Human
gagagagauguguaa

SEQ ID NO: 3177704 - RNA, 16 nt, Human
gagagcccuucauuug

SEQ ID NO: 3177705 - RNA, 18 nt, Human
gagagcccuagaaagcug

SEQ ID NO: 3177706 - RNA, 14 nt, Human
gagagcagccagga

SEQ ID NO: 3177707 - RNA, 19 nt, Human
gagagauguguaauuuuuc

SEQ ID NO: 3177708 - RNA, 18 nt, Human
gagagauguguaauuuuu

SEQ ID NO: 3177709 - RNA, 23 nt, Human
gagaaauguguagcugcaaaaau

SEQ ID NO: 3177710 - RNA, 14 nt, Human
gagaaauucuuguu

SEQ ID NO: 3177711 - RNA, 14 nt, Human
gagaaaugagcuug

SEQ ID NO: 3177712 - RNA, 16 nt, Human
gagaaagguugaagca

SEQ ID NO: 3177713 - RNA, 16 nt, Human
gagaaagcauauugac

SEQ ID NO: 3177714 - RNA, 20 nt, Human
gagaaagcauauugacuuuu

SEQ ID NO: 3177715 - RNA, 14 nt, Human
gagaaaagagagaa

SEQ ID NO: 3177716 - RNA, 20 nt, Human
gagaaaagaaaaaaaaagaa

SEQ ID NO: 3177717 - RNA, 19 nt, Human
gagaaaagaaaaaaaaaga

SEQ ID NO: 3177718 - RNA, 15 nt, Human
gagaaaagaaaaaaa

SEQ ID NO: 3177719 - RNA, 14 nt, Human
gagaaaagaaaaaa

SEQ ID NO: 3177720 - RNA, 13 nt, Human
gagaaaagaaaaa

SEQ ID NO: 3177721 - RNA, 12 nt, Human
gagaaaagaaaa

SEQ ID NO: 3177722 - RNA, 11 nt, Human
gagaaaagaaa

SEQ ID NO: 3177723 - RNA, 10 nt, Human
gagaaaagaa

SEQ ID NO: 3177724 - RNA, 22 nt, Human
gagaacuaaacuaguuuuuccu

SEQ ID NO: 3177725 - RNA, 14 nt, Human
gagaagagaaugca

SEQ ID NO: 3177726 - RNA, 16 nt, Human
gagaacuugcugccuc

SEQ ID NO: 3177727 - RNA, 14 nt, Human
gagaacuugcugcc

SEQ ID NO: 3177728 - RNA, 11 nt, Human
gagaagaaaau

SEQ ID NO: 3177729 - RNA, 21 nt, Human
gagaagagccccacucucaga

SEQ ID NO: 3177730 - RNA, 16 nt, Human
gagaagagaaugcaca

SEQ ID NO: 3177731 - RNA, 18 nt, Human
gagaagaaaauguucuuc

SEQ ID NO: 3177732 - RNA, 16 nt, Human
gagaagcagaggaagg

SEQ ID NO: 3177733 - RNA, 15 nt, Human
gagaagagccccacu

SEQ ID NO: 3177734 - RNA, 11 nt, Human
gagaagagccc

SEQ ID NO: 3177735 - RNA, 23 nt, Human
gacuucugucuucacaacagauu

SEQ ID NO: 3177736 - RNA, 20 nt, Human
gacuucugucuucacaacag

SEQ ID NO: 3177737 - RNA, 24 nt, Human
gacuucuaaguaaaaccacagcag

SEQ ID NO: 3177738 - RNA, 23 nt, Human
gacuucuaaguaaaaccacagca

SEQ ID NO: 3177739 - RNA, 19 nt, Human
gacuucuaaguaaaaccac

SEQ ID NO: 3177740 - RNA, 16 nt, Human
gacuucuaaguaaaac

SEQ ID NO: 3177741 - RNA, 18 nt, Human
gacuucuaaguaaaacca

SEQ ID NO: 3177742 - RNA, 17 nt, Human
gacuucuaaguaaaacc

SEQ ID NO: 3177743 - RNA, 19 nt, Human
gacuuaagcacacuugaca

SEQ ID NO: 3177744 - RNA, 21 nt, Human
gacuuaacauagccaaaaugu

SEQ ID NO: 3177745 - RNA, 23 nt, Human
gacuuaacauagccaaaauguga

SEQ ID NO: 3177746 - RNA, 19 nt, Human
gacuuaaaauauuccugca

SEQ ID NO: 3177747 - RNA, 17 nt, Human
gacuuaacauagccaaa

SEQ ID NO: 3177748 - RNA, 23 nt, Human
gacuuaaagggcccaaugaauua

SEQ ID NO: 3177749 - RNA, 23 nt, Human
gacuucuguuuucaaucucguau

SEQ ID NO: 3177750 - RNA, 18 nt, Human
gacuucuguuuucaaucu

SEQ ID NO: 3177751 - RNA, 14 nt, Human
gacuucuguuuuca

SEQ ID NO: 3177752 - RNA, 17 nt, Human
gacuucuguuuucaauc

SEQ ID NO: 3177753 - RNA, 16 nt, Human
gacuucuguuuucaau

SEQ ID NO: 3177754 - RNA, 11 nt, Human
gacuugaaaag

SEQ ID NO: 3177755 - RNA, 17 nt, Human
gacuugaaaagagacag

SEQ ID NO: 3177756 - RNA, 21 nt, Human
gacuugaaaagagacaggcag

SEQ ID NO: 3177757 - RNA, 22 nt, Human
gacuugaaaagagacaggcagg

SEQ ID NO: 3177758 - RNA, 13 nt, Human
gacuugcauuuuu

SEQ ID NO: 3177759 - RNA, 15 nt, Human
gacuugcauuuuugc

SEQ ID NO: 3177760 - RNA, 18 nt, Human
gacuuguauauucuauuu

SEQ ID NO: 3177761 - RNA, 21 nt, Human
gacuuguauauucuauuuuac

SEQ ID NO: 3177762 - RNA, 9 nt, Human
gagaaaaga

SEQ ID NO: 3177763 - RNA, 19 nt, Human
gacucuaguacugugaauc

SEQ ID NO: 3177764 - RNA, 18 nt, Human
gacucuaguacugugaau

SEQ ID NO: 3177765 - RNA, 17 nt, Human
gacucgcgacaaugcaa

SEQ ID NO: 3177766 - RNA, 23 nt, Human
gacucuaguacugugaauccagu

SEQ ID NO: 3177767 - RNA, 14 nt, Human
gacucuaguauuua

SEQ ID NO: 3177768 - RNA, 15 nt, Human
gacugcccggcaggg

SEQ ID NO: 3177769 - RNA, 13 nt, Human
gacugcccggcag

SEQ ID NO: 3177770 - RNA, 18 nt, Human
gacuggaagcacagcuuc

SEQ ID NO: 3177771 - RNA, 23 nt, Human
gacugggggcagacauggugggg

SEQ ID NO: 3177772 - RNA, 16 nt, Human
gacugggggcagacau

SEQ ID NO: 3177773 - RNA, 16 nt, Human
gacugggccaggggag

SEQ ID NO: 3177774 - RNA, 16 nt, Human
gacuggaagcacagcu

SEQ ID NO: 3177775 - RNA, 15 nt, Human
gacuggaagcacagc

SEQ ID NO: 3177776 - RNA, 14 nt, Human
gacuggaagcacag

SEQ ID NO: 3177777 - RNA, 22 nt, Human
gacugcuccugagcccccagcu

SEQ ID NO: 3177778 - RNA, 15 nt, Human
gacucauucuucugu

SEQ ID NO: 3177779 - RNA, 14 nt, Human
gacucauucuucug

SEQ ID NO: 3177780 - RNA, 21 nt, Human
gacuacaggugugagucacca

SEQ ID NO: 3177781 - RNA, 18 nt, Human
gacuacaggugugaguca

SEQ ID NO: 3177782 - RNA, 22 nt, Human
gaccucaaaugaugugccugcu

SEQ ID NO: 3177783 - RNA, 13 nt, Human
gacuacaggugug

SEQ ID NO: 3177784 - RNA, 16 nt, Human
gaccucaaaugaugug

SEQ ID NO: 3177785 - RNA, 16 nt, Human
gacuccaaagaaaugu

SEQ ID NO: 3177786 - RNA, 15 nt, Human
gacuccaaagaaaug

SEQ ID NO: 3177787 - RNA, 12 nt, Human
gacuccaaagaa

SEQ ID NO: 3177788 - RNA, 11 nt, Human
gacuccaaaga

SEQ ID NO: 3177789 - RNA, 21 nt, Human
gacucauuuuaaaaaauggaa

SEQ ID NO: 3177790 - RNA, 12 nt, Human
gacuccugcagg

SEQ ID NO: 3177791 - RNA, 14 nt, Human
gacuccucugucca

SEQ ID NO: 3177792 - RNA, 11 nt, Human
gacuccucugu

SEQ ID NO: 3177793 - RNA, 13 nt, Human
gacuccugcaggc

SEQ ID NO: 3177794 - RNA, 21 nt, Human
gacuccugcaggcagccaggc

SEQ ID NO: 3177795 - RNA, 23 nt, Human
gacuccugcacacgcuccuuccu

SEQ ID NO: 3177796 - RNA, 13 nt, Human
gacucgcgacaau

SEQ ID NO: 3177797 - RNA, 13 nt, Human
gacuccugguccu

SEQ ID NO: 3177798 - RNA, 18 nt, Human
gaaucuagccagugaaca

SEQ ID NO: 3177799 - RNA, 14 nt, Human
gaaucuacuuaacc

SEQ ID NO: 3177800 - RNA, 17 nt, Human
gaaucuagccagugaac

SEQ ID NO: 3177801 - RNA, 20 nt, Human
gaauccagacccggcugcgu

SEQ ID NO: 3177802 - RNA, 18 nt, Human
gaauccagacccggcugc

SEQ ID NO: 3177803 - RNA, 18 nt, Human
gaaucaguccuagaaugu

SEQ ID NO: 3177804 - RNA, 20 nt, Human
gaaucaguccuagaauguuu

SEQ ID NO: 3177805 - RNA, 17 nt, Human
gaaucauguuucuuuga

SEQ ID NO: 3177806 - RNA, 15 nt, Human
gaaucauguuucuuu

SEQ ID NO: 3177807 - RNA, 14 nt, Human
gaaucauguuucuu

SEQ ID NO: 3177808 - RNA, 13 nt, Human
gaaucauguuucu

SEQ ID NO: 3177809 - RNA, 21 nt, Human
gaaucaugugcgucaguccaa

SEQ ID NO: 3177810 - RNA, 16 nt, Human
gaaugaacaaagacca

SEQ ID NO: 3177811 - RNA, 20 nt, Human
gaaugcacaaacagaggccg

SEQ ID NO: 3177812 - RNA, 23 nt, Human
gaaucuggaccccaucugugaau

SEQ ID NO: 3177813 - RNA, 22 nt, Human
gaaucuggaccccaucugugaa

SEQ ID NO: 3177814 - RNA, 21 nt, Human
gaaugaaagggcccagagagg

SEQ ID NO: 3177815 - RNA, 23 nt, Human
gaaucugagagaugcuguagaca

SEQ ID NO: 3177816 - RNA, 21 nt, Human
gaaucuggaccccaucuguga

SEQ ID NO: 3177817 - RNA, 15 nt, Human
gaaugcuguauaugu

SEQ ID NO: 3177818 - RNA, 20 nt, Human
gaaugcacucagacuguaua

SEQ ID NO: 3177819 - RNA, 13 nt, Human
gaaugcacucaga

SEQ ID NO: 3177820 - RNA, 21 nt, Human
gaaugcaccauacucaugcau

SEQ ID NO: 3177821 - RNA, 21 nt, Human
gaaugcacaaacagaggccgc

SEQ ID NO: 3177822 - RNA, 13 nt, Human
gaauggcauuugc

SEQ ID NO: 3177823 - RNA, 16 nt, Human
gaaugucaguaugugg

SEQ ID NO: 3177824 - RNA, 18 nt, Human
gaaugucaguauguggaa

SEQ ID NO: 3177825 - RNA, 13 nt, Human
gaaugucaguaug

SEQ ID NO: 3177826 - RNA, 22 nt, Human
gaauguauaguauuugaaaaca

SEQ ID NO: 3177827 - RNA, 19 nt, Human
gaauguauaguauuugaaa

SEQ ID NO: 3177828 - RNA, 17 nt, Human
gaauguauaguauuuga

SEQ ID NO: 3177829 - RNA, 15 nt, Human
gaauguauaguauuu

SEQ ID NO: 3177830 - RNA, 22 nt, Human
gaauguaguuugaggaaauuug

SEQ ID NO: 3177831 - RNA, 17 nt, Human
gaauguaguuugaggaa

SEQ ID NO: 3177832 - RNA, 16 nt, Human
gaauguaguuugagga

SEQ ID NO: 3177833 - RNA, 14 nt, Human
gaauguaguuugag

SEQ ID NO: 3177834 - RNA, 22 nt, Human
gaauguaagguauaucauucua

SEQ ID NO: 3177835 - RNA, 18 nt, Human
gaauggcauuugcaauaa

SEQ ID NO: 3177836 - RNA, 19 nt, Human
gaaugucaguauguggaag

SEQ ID NO: 3177837 - RNA, 20 nt, Human
gaauguugcaaugugaaaaa

SEQ ID NO: 3177838 - RNA, 22 nt, Human
gaauguuccugccuccuugaua

SEQ ID NO: 3177839 - RNA, 21 nt, Human
gaauguuccugccuccuugau

SEQ ID NO: 3177840 - RNA, 15 nt, Human
gaauguuucauuugc

SEQ ID NO: 3177841 - RNA, 22 nt, Human
gaauguuucauuugcacaagua

SEQ ID NO: 3177842 - RNA, 14 nt, Human
gaauugaagcagga

SEQ ID NO: 3177843 - RNA, 11 nt, Human
gaauugaaggu

SEQ ID NO: 3177844 - RNA, 16 nt, Human
gaauugacccacaaga

SEQ ID NO: 3177845 - RNA, 21 nt, Human
gaauugacccacaagaaauga

SEQ ID NO: 3177846 - RNA, 15 nt, Human
gaauugccagucuuu

SEQ ID NO: 3177847 - RNA, 18 nt, Human
gaauugccagucuuuugu

SEQ ID NO: 3177848 - RNA, 21 nt, Human
gaauugcccauuguuuuucug

SEQ ID NO: 3177849 - RNA, 20 nt, Human
gaauugcccauuguuuuucu

SEQ ID NO: 3177850 - RNA, 18 nt, Human
gaauugaagguuuuugau

SEQ ID NO: 3177851 - RNA, 21 nt, Human
gaauugaccgacagcuuucca

SEQ ID NO: 3177852 - RNA, 23 nt, Human
gaauugauuuugaggagugguuu

SEQ ID NO: 3177853 - RNA, 19 nt, Human
gacacaggcccggcuccag

SEQ ID NO: 3177854 - RNA, 16 nt, Human
gacacaagccuucggc

SEQ ID NO: 3177855 - RNA, 15 nt, Human
gacacaaacugccaa

SEQ ID NO: 3177856 - RNA, 21 nt, Human
gacacaggcccggcuccaggc

SEQ ID NO: 3177857 - RNA, 20 nt, Human
gacacaggcccggcuccagg

SEQ ID NO: 3177858 - RNA, 22 nt, Human
gacacaacugugugauuaaaag

SEQ ID NO: 3177859 - RNA, 15 nt, Human
gacacauguccaaga

SEQ ID NO: 3177860 - RNA, 20 nt, Human
gacacauguccaagaagccc

SEQ ID NO: 3177861 - RNA, 23 nt, Human
gacacauguccaagaagcccagg

SEQ ID NO: 3177862 - RNA, 23 nt, Human
gacacauuuaagguguaguauua

SEQ ID NO: 3177863 - RNA, 22 nt, Human
gacaagcuguugaccaggcacc

SEQ ID NO: 3177864 - RNA, 21 nt, Human
gacaagcuguugaccaggcac

SEQ ID NO: 3177865 - RNA, 14 nt, Human
gacaagcuggcuua

SEQ ID NO: 3177866 - RNA, 20 nt, Human
gacaagcuggcuuacacugg

SEQ ID NO: 3177867 - RNA, 20 nt, Human
gacaagcuguugaccaggca

SEQ ID NO: 3177868 - RNA, 19 nt, Human
gacaaggauugcuacuguc

SEQ ID NO: 3177869 - RNA, 21 nt, Human
gacaaggaugaucuaggaaga

SEQ ID NO: 3177870 - RNA, 18 nt, Human
gacaaggauugcuacugu

SEQ ID NO: 3177871 - RNA, 12 nt, Human
gacaaugugaaa

SEQ ID NO: 3177872 - RNA, 18 nt, Human
gacaaugugaaaagaaaa

SEQ ID NO: 3177873 - RNA, 22 nt, Human
gacaaugcaaaccaucauugaa

SEQ ID NO: 3177874 - RNA, 19 nt, Human
gacaaugugaaaagaaaaa

SEQ ID NO: 3177875 - RNA, 20 nt, Human
gacaaugugaaaagaaaaau

SEQ ID NO: 3177876 - RNA, 12 nt, Human
gacaauguuuac

SEQ ID NO: 3177877 - RNA, 13 nt, Human
gacaauguuuaca

SEQ ID NO: 3177878 - RNA, 20 nt, Human
gaauuggguggggggcuuca

SEQ ID NO: 3177879 - RNA, 23 nt, Human
gaauuggguggggggcuucauac

SEQ ID NO: 3177880 - RNA, 22 nt, Human
gaauuggguggggggcuucaua

SEQ ID NO: 3177881 - RNA, 23 nt, Human
gaauuguaaaagcaacaucagcu

SEQ ID NO: 3177882 - RNA, 19 nt, Human
gaauuggaaugcacucaga

SEQ ID NO: 3177883 - RNA, 21 nt, Human
gaauuucuucaacucccugcc

SEQ ID NO: 3177884 - RNA, 15 nt, Human
gaauuugaagacuuc

SEQ ID NO: 3177885 - RNA, 21 nt, Human
gaauuugaagacuucaaaaua

SEQ ID NO: 3177886 - RNA, 17 nt, Human
gaauuugugaacagcag

SEQ ID NO: 3177887 - RNA, 20 nt, Human
gacaaccuuggcuuggcccu

SEQ ID NO: 3177888 - RNA, 22 nt, Human
gacaaccuuggcuuggcccugg

SEQ ID NO: 3177889 - RNA, 14 nt, Human
gacaacauuguaag

SEQ ID NO: 3177890 - RNA, 16 nt, Human
gacaacagacuucuga

SEQ ID NO: 3177891 - RNA, 19 nt, Human
gacaacagauuggauuuua

SEQ ID NO: 3177892 - RNA, 15 nt, Human
gacaaccauuaaagu

SEQ ID NO: 3177893 - RNA, 16 nt, Human
gacaaccauuaaaguc

SEQ ID NO: 3177894 - RNA, 18 nt, Human
gacaaccauuaaagucag

SEQ ID NO: 3177895 - RNA, 19 nt, Human
gacaaccauuaaagucaga

SEQ ID NO: 3177896 - RNA, 22 nt, Human
gacaacacucauugaccugagg

SEQ ID NO: 3177897 - RNA, 23 nt, Human
gacaacacucauugaccugaggc

SEQ ID NO: 3177898 - RNA, 14 nt, Human
gacaaauuuuaauu

SEQ ID NO: 3177899 - RNA, 14 nt, Human
gacaaauguuucua

SEQ ID NO: 3177900 - RNA, 15 nt, Human
gacaaaucugucugc

SEQ ID NO: 3177901 - RNA, 14 nt, Human
gacaaaucugucug

SEQ ID NO: 3177902 - RNA, 19 nt, Human
gaccauucuccaccugcca

SEQ ID NO: 3177903 - RNA, 20 nt, Human
gaccauucuccaccugccag

SEQ ID NO: 3177904 - RNA, 21 nt, Human
gaccauucuccaccugccagg

SEQ ID NO: 3177905 - RNA, 22 nt, Human
gaccauucuccaccugccaggg

SEQ ID NO: 3177906 - RNA, 17 nt, Human
gaccauucuccaccugc

SEQ ID NO: 3177907 - RNA, 19 nt, Human
gaccauuuuccugcauugg

SEQ ID NO: 3177908 - RNA, 14 nt, Human
gaccauuuuccugc

SEQ ID NO: 3177909 - RNA, 13 nt, Human
gaccauuuuccug

SEQ ID NO: 3177910 - RNA, 11 nt, Human
gaccauuuucc

SEQ ID NO: 3177911 - RNA, 13 nt, Human
gaccagagcugcc

SEQ ID NO: 3177912 - RNA, 14 nt, Human
gaccagagcugcca

SEQ ID NO: 3177913 - RNA, 15 nt, Human
gaccagagcugccac

SEQ ID NO: 3177914 - RNA, 17 nt, Human
gaccagagcugccaccu

SEQ ID NO: 3177915 - RNA, 18 nt, Human
gaccagagcugccaccug

SEQ ID NO: 3177916 - RNA, 20 nt, Human
gaccagccuccaugcugccu

SEQ ID NO: 3177917 - RNA, 17 nt, Human
gaccagacaagcuguug

SEQ ID NO: 3177918 - RNA, 22 nt, Human
gaccagccuccaugcugccucc

SEQ ID NO: 3177919 - RNA, 21 nt, Human
gaccagccuccaugcugccuc

SEQ ID NO: 3177920 - RNA, 18 nt, Human
gacaugggaaaggggaag

SEQ ID NO: 3177921 - RNA, 14 nt, Human
gaccaccugcccaa

SEQ ID NO: 3177922 - RNA, 13 nt, Human
gaccaccugccca

SEQ ID NO: 3177923 - RNA, 21 nt, Human
gaccacugcagaagacaguau

SEQ ID NO: 3177924 - RNA, 18 nt, Human
gaccacugcagaagacag

SEQ ID NO: 3177925 - RNA, 11 nt, Human
gaccagagcug

SEQ ID NO: 3177926 - RNA, 24 nt, Human
gaccagacaccuugacagggcaca

SEQ ID NO: 3177927 - RNA, 19 nt, Human
gaccacgucuauuucauca

SEQ ID NO: 3177928 - RNA, 20 nt, Human
gacccaaaaggcagaagcaa

SEQ ID NO: 3177929 - RNA, 16 nt, Human
gacccaaaaggcagaa

SEQ ID NO: 3177930 - RNA, 15 nt, Human
gacccacaagaaaug

SEQ ID NO: 3177931 - RNA, 21 nt, Human
gacccccaaccaaguggcucc

SEQ ID NO: 3177932 - RNA, 12 nt, Human
gacccccaacca

SEQ ID NO: 3177933 - RNA, 22 nt, Human
gacccugaggcccagagggccu

SEQ ID NO: 3177934 - RNA, 21 nt, Human
gaccccuccaugugggcuagu

SEQ ID NO: 3177935 - RNA, 18 nt, Human
gaccccuccaugugggcu

SEQ ID NO: 3177936 - RNA, 14 nt, Human
gaccccuccaugug

SEQ ID NO: 3177937 - RNA, 23 nt, Human
gacccugaggcccagagggccug

SEQ ID NO: 3177938 - RNA, 13 nt, Human
gaccccuccaugu

SEQ ID NO: 3177939 - RNA, 23 nt, Human
gacccugccaggcacaggcaggg

SEQ ID NO: 3177940 - RNA, 22 nt, Human
gacccugccaggcacaggcagg

SEQ ID NO: 3177941 - RNA, 21 nt, Human
gacccugccaggcacaggcag

SEQ ID NO: 3177942 - RNA, 20 nt, Human
gacccugccaggcacaggca

SEQ ID NO: 3177943 - RNA, 19 nt, Human
gacccugccaggcacaggc

SEQ ID NO: 3177944 - RNA, 18 nt, Human
gacccugccaggcacagg

SEQ ID NO: 3177945 - RNA, 17 nt, Human
gacccugccaggcacag

SEQ ID NO: 3177946 - RNA, 16 nt, Human
gacccugccaggcaca

SEQ ID NO: 3177947 - RNA, 15 nt, Human
gacccugccaggcac

SEQ ID NO: 3177948 - RNA, 14 nt, Human
gacccugccaggca

SEQ ID NO: 3177949 - RNA, 13 nt, Human
gacccugccaggc

SEQ ID NO: 3177950 - RNA, 12 nt, Human
gacccugccagg

SEQ ID NO: 3177951 - RNA, 15 nt, Human
gaccgugaggccaga

SEQ ID NO: 3177952 - RNA, 19 nt, Human
gaccgaacuguuguauaaa

SEQ ID NO: 3177953 - RNA, 18 nt, Human
gaccgugaggccagagac

SEQ ID NO: 3177954 - RNA, 17 nt, Human
gaccuacuacgcagagg

SEQ ID NO: 3177955 - RNA, 16 nt, Human
gaccgugaggccagag

SEQ ID NO: 3177956 - RNA, 17 nt, Human
gaccgugaggccagaga

SEQ ID NO: 3177957 - RNA, 15 nt, Human
gacccuugugguccc

SEQ ID NO: 3177958 - RNA, 21 nt, Human
gacccuuguggucccacccca

SEQ ID NO: 3177959 - RNA, 19 nt, Human
gacccuuguggucccaccc

SEQ ID NO: 3177960 - RNA, 20 nt, Human
gacccuuguggucccacccc

SEQ ID NO: 3177961 - RNA, 12 nt, Human
gacccugucuca

SEQ ID NO: 3177962 - RNA, 23 nt, Human
gacaccauuaccaaaauaauaaa

SEQ ID NO: 3177963 - RNA, 12 nt, Human
gacacccagaaa

SEQ ID NO: 3177964 - RNA, 21 nt, Human
gacagagagagauacucuggg

SEQ ID NO: 3177965 - RNA, 11 nt, Human
gacaccccacu

SEQ ID NO: 3177966 - RNA, 21 nt, Human
gacagagcaagugagacccug

SEQ ID NO: 3177967 - RNA, 16 nt, Human
gacagaggcagcccca

SEQ ID NO: 3177968 - RNA, 14 nt, Human
gacagaggcagccc

SEQ ID NO: 3177969 - RNA, 12 nt, Human
gacagaggcagc

SEQ ID NO: 3177970 - RNA, 20 nt, Human
gacagagcaaccccuggacc

SEQ ID NO: 3177971 - RNA, 21 nt, Human
gacagaggggguggccuccca

SEQ ID NO: 3177972 - RNA, 22 nt, Human
gacagaggggguggccucccaa

SEQ ID NO: 3177973 - RNA, 19 nt, Human
gacagagugagacucuguc

SEQ ID NO: 3177974 - RNA, 23 nt, Human
gacagaggggguggccucccaac

SEQ ID NO: 3177975 - RNA, 18 nt, Human
gacagaggggguggccuc

SEQ ID NO: 3177976 - RNA, 19 nt, Human
gacagaggggguggccucc

SEQ ID NO: 3177977 - RNA, 15 nt, Human
gacagaggggguggc

SEQ ID NO: 3177978 - RNA, 17 nt, Human
gacagaggcagccccau

SEQ ID NO: 3177979 - RNA, 16 nt, Human
gacagcugccugggau

SEQ ID NO: 3177980 - RNA, 17 nt, Human
gacagcugccugggauc

SEQ ID NO: 3177981 - RNA, 21 nt, Human
gacagccacggccaggccaga

SEQ ID NO: 3177982 - RNA, 20 nt, Human
gacagccacggccaggccag

SEQ ID NO: 3177983 - RNA, 18 nt, Human
gacagcugccugggaucc

SEQ ID NO: 3177984 - RNA, 13 nt, Human
gacagccagaacu

SEQ ID NO: 3177985 - RNA, 19 nt, Human
gacagccacggccaggcca

SEQ ID NO: 3177986 - RNA, 18 nt, Human
gacagccacggccaggcc

SEQ ID NO: 3177987 - RNA, 17 nt, Human
gacagccacggccaggc

SEQ ID NO: 3177988 - RNA, 14 nt, Human
gacagccacggcca

SEQ ID NO: 3177989 - RNA, 22 nt, Human
gacagagugagacucugucuca

SEQ ID NO: 3177990 - RNA, 20 nt, Human
gacagagugagacucugucu

SEQ ID NO: 3177991 - RNA, 13 nt, Human
gacagagggggug

SEQ ID NO: 3177992 - RNA, 13 nt, Human
gacagccacggcc

SEQ ID NO: 3177993 - RNA, 23 nt, Human
gacagggcacaccgggcacucag

SEQ ID NO: 3177994 - RNA, 18 nt, Human
gacagggaggacgcucuc

SEQ ID NO: 3177995 - RNA, 16 nt, Human
gacagggaggugaccc

SEQ ID NO: 3177996 - RNA, 24 nt, Human
gacagggcacaccgggcacucaga

SEQ ID NO: 3177997 - RNA, 14 nt, Human
gacaguuaagagaa

SEQ ID NO: 3177998 - RNA, 17 nt, Human
gacagggaggacgcucu

SEQ ID NO: 3177999 - RNA, 21 nt, Human
gacaggaccccugcaguuccc

SEQ ID NO: 3178000 - RNA, 17 nt, Human
gacaggaccccugcagu

SEQ ID NO: 3178001 - RNA, 14 nt, Human
gacaggaccccugc

SEQ ID NO: 3178002 - RNA, 15 nt, Human
gacaggaccagggau

SEQ ID NO: 3178003 - RNA, 23 nt, Human
gacaggaccagggauuuccauga

SEQ ID NO: 3178004 - RNA, 14 nt, Human
gacaggaccaggga

SEQ ID NO: 3178005 - RNA, 20 nt, Human
gacauagaauuaacacauga

SEQ ID NO: 3178006 - RNA, 18 nt, Human
gacauccccugcuggccg

SEQ ID NO: 3178007 - RNA, 17 nt, Human
gacauccccugcuggcc

SEQ ID NO: 3178008 - RNA, 24 nt, Human
gacauccugucaucugagaaugaa

SEQ ID NO: 3178009 - RNA, 23 nt, Human
gacauccugucaucugagaauga

SEQ ID NO: 3178010 - RNA, 21 nt, Human
gacauccugucaucugagaau

SEQ ID NO: 3178011 - RNA, 20 nt, Human
gacauccugucaucugagaa

SEQ ID NO: 3178012 - RNA, 14 nt, Human
gacaugggaaaggg

SEQ ID NO: 3178013 - RNA, 14 nt, Human
gacaugaucuucuu

SEQ ID NO: 3178014 - RNA, 16 nt, Human
gacaucucugacuuuc

SEQ ID NO: 3178015 - RNA, 15 nt, Human
gauaugaaaaaugag

SEQ ID NO: 3178016 - RNA, 12 nt, Human
gaucacaaauga

SEQ ID NO: 3178017 - RNA, 13 nt, Human
gaucacaaaugac

SEQ ID NO: 3178018 - RNA, 16 nt, Human
gaucacaaaugacuuu

SEQ ID NO: 3178019 - RNA, 20 nt, Human
gaucacaaaugacuuuauua

SEQ ID NO: 3178020 - RNA, 16 nt, Human
gaucacggcucacugc

SEQ ID NO: 3178021 - RNA, 15 nt, Human
gaucacggcucacug

SEQ ID NO: 3178022 - RNA, 18 nt, Human
gaucacggcucacugcag

SEQ ID NO: 3178023 - RNA, 12 nt, Human
gaucacggcuca

SEQ ID NO: 3178024 - RNA, 14 nt, Human
gaucacuuucugaa

SEQ ID NO: 3178025 - RNA, 14 nt, Human
gaucacuguuuaga

SEQ ID NO: 3178026 - RNA, 18 nt, Human
gaucacuguuuagauuug

SEQ ID NO: 3178027 - RNA, 21 nt, Human
gaucacuguuuagauuugcca

SEQ ID NO: 3178028 - RNA, 14 nt, Human
gauagaugugugga

SEQ ID NO: 3178029 - RNA, 19 nt, Human
gauacaggaaaagcugcug

SEQ ID NO: 3178030 - RNA, 22 nt, Human
gauagauguguggacacauugg

SEQ ID NO: 3178031 - RNA, 21 nt, Human
gauacaggaaaagcugcugac

SEQ ID NO: 3178032 - RNA, 22 nt, Human
gauaagaaccuuuugagugccu

SEQ ID NO: 3178033 - RNA, 20 nt, Human
gauacaggaaaagcugcuga

SEQ ID NO: 3178034 - RNA, 11 nt, Human
gauaagaaaac

SEQ ID NO: 3178035 - RNA, 12 nt, Human
gauaagaaaacc

SEQ ID NO: 3178036 - RNA, 22 nt, Human
gauagccaaggccaaaggaagc

SEQ ID NO: 3178037 - RNA, 14 nt, Human
gauagccaaggcca

SEQ ID NO: 3178038 - RNA, 15 nt, Human
gauagcacagacccu

SEQ ID NO: 3178039 - RNA, 16 nt, Human
gauauaacuuuagaaa

SEQ ID NO: 3178040 - RNA, 21 nt, Human
gagugguuuuucuuuucuugg

SEQ ID NO: 3178041 - RNA, 23 nt, Human
gagugggggaucacagccucuga

SEQ ID NO: 3178042 - RNA, 13 nt, Human
gagugggugaaua

SEQ ID NO: 3178043 - RNA, 13 nt, Human
gaguguguaauuu

SEQ ID NO: 3178044 - RNA, 19 nt, Human
gagugugguuucuuuuuga

SEQ ID NO: 3178045 - RNA, 15 nt, Human
gagugugguuucuuu

SEQ ID NO: 3178046 - RNA, 17 nt, Human
gagugugccugaagucc

SEQ ID NO: 3178047 - RNA, 20 nt, Human
gagugugccugaagucccag

SEQ ID NO: 3178048 - RNA, 13 nt, Human
gaguuaaaaugca

SEQ ID NO: 3178049 - RNA, 12 nt, Human
gaguuacagaca

SEQ ID NO: 3178050 - RNA, 13 nt, Human
gaguuaagucuau

SEQ ID NO: 3178051 - RNA, 15 nt, Human
gaguuacagccuggg

SEQ ID NO: 3178052 - RNA, 13 nt, Human
gaguuacagacaa

SEQ ID NO: 3178053 - RNA, 15 nt, Human
gaguuacagacaaag

SEQ ID NO: 3178054 - RNA, 19 nt, Human
gaguucaucuugaauugua

SEQ ID NO: 3178055 - RNA, 14 nt, Human
gaguucaucuugaa

SEQ ID NO: 3178056 - RNA, 20 nt, Human
gaguucauacccuguuacca

SEQ ID NO: 3178057 - RNA, 17 nt, Human
gauaaaucauaaaguca

SEQ ID NO: 3178058 - RNA, 18 nt, Human
gauaaaucauaaagucag

SEQ ID NO: 3178059 - RNA, 19 nt, Human
gauaaaucauaaagucagu

SEQ ID NO: 3178060 - RNA, 20 nt, Human
gauaaaugauucaaaaaguc

SEQ ID NO: 3178061 - RNA, 15 nt, Human
gauaaaugauucaaa

SEQ ID NO: 3178062 - RNA, 15 nt, Human
gaguugaagacagag

SEQ ID NO: 3178063 - RNA, 17 nt, Human
gaguugaagacagagcu

SEQ ID NO: 3178064 - RNA, 21 nt, Human
gaguugaagacagagcuacac

SEQ ID NO: 3178065 - RNA, 14 nt, Human
gaguugaagacaga

SEQ ID NO: 3178066 - RNA, 12 nt, Human
gaguauucuaau

SEQ ID NO: 3178067 - RNA, 20 nt, Human
gaguauucuaauaagcuagu

SEQ ID NO: 3178068 - RNA, 11 nt, Human
gaguauauguc

SEQ ID NO: 3178069 - RNA, 15 nt, Human
gaguauauuauaaua

SEQ ID NO: 3178070 - RNA, 18 nt, Human
gaguaggaagacuuugga

SEQ ID NO: 3178071 - RNA, 19 nt, Human
gaguaggaagacuuuggaa

SEQ ID NO: 3178072 - RNA, 21 nt, Human
gaguagugaagacuccagaaa

SEQ ID NO: 3178073 - RNA, 14 nt, Human
gagucgaggacagg

SEQ ID NO: 3178074 - RNA, 22 nt, Human
gaguccuccagaacucuuccuc

SEQ ID NO: 3178075 - RNA, 21 nt, Human
gaguccuccagaacucuuccu

SEQ ID NO: 3178076 - RNA, 15 nt, Human
gaguccuccagaacu

SEQ ID NO: 3178077 - RNA, 14 nt, Human
gaguccuccagaac

SEQ ID NO: 3178078 - RNA, 22 nt, Human
gaguccgaccuggccugucugu

SEQ ID NO: 3178079 - RNA, 19 nt, Human
gaguccgaaagggacuugg

SEQ ID NO: 3178080 - RNA, 15 nt, Human
gagucgaggacaggg

SEQ ID NO: 3178081 - RNA, 23 nt, Human
gagugaacaaauuuacagagaca

SEQ ID NO: 3178082 - RNA, 17 nt, Human
gagugaagcugggagaa

SEQ ID NO: 3178083 - RNA, 16 nt, Human
gagugacagaggcagc

SEQ ID NO: 3178084 - RNA, 15 nt, Human
gagugacagaggcag

SEQ ID NO: 3178085 - RNA, 14 nt, Human
gagugacagaggca

SEQ ID NO: 3178086 - RNA, 12 nt, Human
gagucugaaggc

SEQ ID NO: 3178087 - RNA, 13 nt, Human
gagucugaaggcu

SEQ ID NO: 3178088 - RNA, 14 nt, Human
gagucugaaggcug

SEQ ID NO: 3178089 - RNA, 19 nt, Human
gagucuagcguagugcagc

SEQ ID NO: 3178090 - RNA, 20 nt, Human
gagucuuacucugccgccca

SEQ ID NO: 3178091 - RNA, 11 nt, Human
gagucuucaug

SEQ ID NO: 3178092 - RNA, 16 nt, Human
gagucuguucugguaa

SEQ ID NO: 3178093 - RNA, 15 nt, Human
gagguugggaggcca

SEQ ID NO: 3178094 - RNA, 17 nt, Human
gagguugggaggccauu

SEQ ID NO: 3178095 - RNA, 18 nt, Human
gagguuuauaguuaaucu

SEQ ID NO: 3178096 - RNA, 16 nt, Human
gagguuucaaaccucc

SEQ ID NO: 3178097 - RNA, 20 nt, Human
gaggucagagccugcaguua

SEQ ID NO: 3178098 - RNA, 17 nt, Human
gaggucagagccugcag

SEQ ID NO: 3178099 - RNA, 20 nt, Human
gaguacuacaguccucccau

SEQ ID NO: 3178100 - RNA, 17 nt, Human
gaguaaucuuguugguu

SEQ ID NO: 3178101 - RNA, 18 nt, Human
gaguaauugcauuugcuu

SEQ ID NO: 3178102 - RNA, 21 nt, Human
gaguacuacaguccucccauc

SEQ ID NO: 3178103 - RNA, 23 nt, Human
gaguacuacaguccucccaucuc

SEQ ID NO: 3178104 - RNA, 13 nt, Human
gaguaggaagacu

SEQ ID NO: 3178105 - RNA, 17 nt, Human
gaguaggaagacuuugg

SEQ ID NO: 3178106 - RNA, 12 nt, Human
gaguaggaagac

SEQ ID NO: 3178107 - RNA, 22 nt, Human
gaguagcugggacuacaggcac

SEQ ID NO: 3178108 - RNA, 19 nt, Human
gaguagcugggacuacagg

SEQ ID NO: 3178109 - RNA, 17 nt, Human
gaguagagguauaauug

SEQ ID NO: 3178110 - RNA, 15 nt, Human
gaguagaauguaguu

SEQ ID NO: 3178111 - RNA, 12 nt, Human
gaguagaaugua

SEQ ID NO: 3178112 - RNA, 22 nt, Human
gaggccucucauuccagaggaa

SEQ ID NO: 3178113 - RNA, 21 nt, Human
gaggccguugcugacuuagaa

SEQ ID NO: 3178114 - RNA, 16 nt, Human
gaggccuucucugaag

SEQ ID NO: 3178115 - RNA, 23 nt, Human
gaggccuccuguggccugccagu

SEQ ID NO: 3178116 - RNA, 20 nt, Human
gaggccuugggcucugcuga

SEQ ID NO: 3178117 - RNA, 19 nt, Human
gaggccuugggcucugcug

SEQ ID NO: 3178118 - RNA, 14 nt, Human
gaggccuucucuga

SEQ ID NO: 3178119 - RNA, 18 nt, Human
gaggccugaaauccuggu

SEQ ID NO: 3178120 - RNA, 22 nt, Human
gaggccugaaauccugguuccu

SEQ ID NO: 3178121 - RNA, 19 nt, Human
gaggccuucucugaaggac

SEQ ID NO: 3178122 - RNA, 18 nt, Human
gaggccuucucugaagga

SEQ ID NO: 3178123 - RNA, 14 nt, Human
gaggcugccucucc

SEQ ID NO: 3178124 - RNA, 16 nt, Human
gaggcugggcucccuu

SEQ ID NO: 3178125 - RNA, 19 nt, Human
gaggcuggaguuggggcag

SEQ ID NO: 3178126 - RNA, 11 nt, Human
gaggcccagag

SEQ ID NO: 3178127 - RNA, 13 nt, Human
gaggcccagaggg

SEQ ID NO: 3178128 - RNA, 14 nt, Human
gaggcccagagggc

SEQ ID NO: 3178129 - RNA, 19 nt, Human
gaggcccagagggccugca

SEQ ID NO: 3178130 - RNA, 15 nt, Human
gaggcccagagggcc

SEQ ID NO: 3178131 - RNA, 16 nt, Human
gaggcccagagggccu

SEQ ID NO: 3178132 - RNA, 21 nt, Human
gaggcccuucucuccagcccc

SEQ ID NO: 3178133 - RNA, 15 nt, Human
gaggcccuucucucc

SEQ ID NO: 3178134 - RNA, 20 nt, Human
gaggcccuucucuccagccc

SEQ ID NO: 3178135 - RNA, 14 nt, Human
gaggcccuucucuc

SEQ ID NO: 3178136 - RNA, 19 nt, Human
gaggccccaauaccccaug

SEQ ID NO: 3178137 - RNA, 9 nt, Human
gaggcaggg

SEQ ID NO: 3178138 - RNA, 20 nt, Human
gaggcagccccauucugccu

SEQ ID NO: 3178139 - RNA, 18 nt, Human
gaggcagccccauucugc

SEQ ID NO: 3178140 - RNA, 19 nt, Human
gaggcagccccauucugcc

SEQ ID NO: 3178141 - RNA, 23 nt, Human
gaggccaugggccuccugugugu

SEQ ID NO: 3178142 - RNA, 21 nt, Human
gaggccaugggccuccugugu

SEQ ID NO: 3178143 - RNA, 20 nt, Human
gaggccaugggccuccugug

SEQ ID NO: 3178144 - RNA, 18 nt, Human
gaggccaugggccuccug

SEQ ID NO: 3178145 - RNA, 17 nt, Human
gaggccaugggccuccu

SEQ ID NO: 3178146 - RNA, 14 nt, Human
gaggccaugggccu

SEQ ID NO: 3178147 - RNA, 16 nt, Human
gaggccauaaaauaag

SEQ ID NO: 3178148 - RNA, 14 nt, Human
gaggccaucuggag

SEQ ID NO: 3178149 - RNA, 12 nt, Human
gaggccaucugg

SEQ ID NO: 3178150 - RNA, 22 nt, Human
gaggccaucuggagagcccaga

SEQ ID NO: 3178151 - RNA, 19 nt, Human
gaggccaucuggagagccc

SEQ ID NO: 3178152 - RNA, 18 nt, Human
gaggccaucuggagagcc

SEQ ID NO: 3178153 - RNA, 16 nt, Human
gaggccaucuggagag

SEQ ID NO: 3178154 - RNA, 22 nt, Human
gagcccuguccugccuaaggcu

SEQ ID NO: 3178155 - RNA, 13 nt, Human
gaggaucucuuga

SEQ ID NO: 3178156 - RNA, 24 nt, Human
gagcccuucggaggaccagggcug

SEQ ID NO: 3178157 - RNA, 16 nt, Human
gaggaucucuugagcc

SEQ ID NO: 3178158 - RNA, 19 nt, Human
gaggaucucuugagccugg

SEQ ID NO: 3178159 - RNA, 22 nt, Human
gaggaucucuugagccugggag

SEQ ID NO: 3178160 - RNA, 17 nt, Human
gaggcaagcugaaauuu

SEQ ID NO: 3178161 - RNA, 16 nt, Human
gaggauugcuugagcu

SEQ ID NO: 3178162 - RNA, 20 nt, Human
gaggauuggcucccaucuuu

SEQ ID NO: 3178163 - RNA, 20 nt, Human
gaggauugcuugagcucagg

SEQ ID NO: 3178164 - RNA, 17 nt, Human
gaggggcugugggcgug

SEQ ID NO: 3178165 - RNA, 13 nt, Human
gaggguaaggcug

SEQ ID NO: 3178166 - RNA, 15 nt, Human
gaggggguggccucc

SEQ ID NO: 3178167 - RNA, 17 nt, Human
gaggggguggccuccca

SEQ ID NO: 3178168 - RNA, 13 nt, Human
gagggggcaaagg

SEQ ID NO: 3178169 - RNA, 20 nt, Human
gaggcugggcucccuuccca

SEQ ID NO: 3178170 - RNA, 19 nt, Human
gagggagggcuccagacac

SEQ ID NO: 3178171 - RNA, 12 nt, Human
gagggagcugag

SEQ ID NO: 3178172 - RNA, 15 nt, Human
gagggagcugagaag

SEQ ID NO: 3178173 - RNA, 16 nt, Human
gagggagcugagaaga

SEQ ID NO: 3178174 - RNA, 17 nt, Human
gagggagcacaaccccc

SEQ ID NO: 3178175 - RNA, 20 nt, Human
gagggagggcuccagacaca

SEQ ID NO: 3178176 - RNA, 16 nt, Human
gagggagggcuccaga

SEQ ID NO: 3178177 - RNA, 20 nt, Human
gagggagggggaaggcaggg

SEQ ID NO: 3178178 - RNA, 16 nt, Human
gagggagugacagagg

SEQ ID NO: 3178179 - RNA, 18 nt, Human
gagggagugacagaggca

SEQ ID NO: 3178180 - RNA, 22 nt, Human
gagggagugacagaggcagccc

SEQ ID NO: 3178181 - RNA, 21 nt, Human
gagggagugacagaggcagcc

SEQ ID NO: 3178182 - RNA, 23 nt, Human
gagggucuugguuccagccugcc

SEQ ID NO: 3178183 - RNA, 13 nt, Human
gagggugaagccu

SEQ ID NO: 3178184 - RNA, 17 nt, Human
gagggucuagaggccug

SEQ ID NO: 3178185 - RNA, 14 nt, Human
gagggucugaggaa

SEQ ID NO: 3178186 - RNA, 13 nt, Human
gagggucugagga

SEQ ID NO: 3178187 - RNA, 22 nt, Human
gaggguccagaaggagggggug

SEQ ID NO: 3178188 - RNA, 19 nt, Human
gaggguaauaaccagacac

SEQ ID NO: 3178189 - RNA, 22 nt, Human
gagggugucccaaaaagaaagg

SEQ ID NO: 3178190 - RNA, 21 nt, Human
gaggguggugaccucugccug

SEQ ID NO: 3178191 - RNA, 15 nt, Human
gagggugggaguggg

SEQ ID NO: 3178192 - RNA, 14 nt, Human
gaggguggugaccu

SEQ ID NO: 3178193 - RNA, 19 nt, Human
gagggugaguccuccagaa

SEQ ID NO: 3178194 - RNA, 12 nt, Human
gaggguggaaua

SEQ ID NO: 3178195 - RNA, 21 nt, Human
gagguagcuuugagguggaag

SEQ ID NO: 3178196 - RNA, 15 nt, Human
gagguauaauugugu

SEQ ID NO: 3178197 - RNA, 17 nt, Human
gaggucaaggcugcagu

SEQ ID NO: 3178198 - RNA, 18 nt, Human
gagguaucuuacuuuccu

SEQ ID NO: 3178199 - RNA, 13 nt, Human
gaggucagagccu

SEQ ID NO: 3178200 - RNA, 12 nt, Human
gaggucagagcc

SEQ ID NO: 3178201 - RNA, 14 nt, Human
gaggguugggcugg

SEQ ID NO: 3178202 - RNA, 15 nt, Human
gaggguugggcuggu

SEQ ID NO: 3178203 - RNA, 16 nt, Human
gaggguucagagagga

SEQ ID NO: 3178204 - RNA, 21 nt, Human
gagguaaggaauaccuguccc

SEQ ID NO: 3178205 - RNA, 23 nt, Human
gaggguuuuuaaaaauaaagcaa

SEQ ID NO: 3178206 - RNA, 22 nt, Human
gaggguuugagagagcagccag

SEQ ID NO: 3178207 - RNA, 24 nt, Human
gagguaaggaauaccugucccccu

SEQ ID NO: 3178208 - RNA, 12 nt, Human
gcaccauaacuu

SEQ ID NO: 3178209 - RNA, 17 nt, Human
gcaccauccccuccggc

SEQ ID NO: 3178210 - RNA, 14 nt, Human
gcaccauccccucc

SEQ ID NO: 3178211 - RNA, 13 nt, Human
gcaccauccccuc

SEQ ID NO: 3178212 - RNA, 13 nt, Human
gcaccauacucau

SEQ ID NO: 3178213 - RNA, 20 nt, Human
gcaccuuagacagucccugc

SEQ ID NO: 3178214 - RNA, 21 nt, Human
gcaccuuagacagucccugcc

SEQ ID NO: 3178215 - RNA, 21 nt, Human
gcaccugucugcuccagcucu

SEQ ID NO: 3178216 - RNA, 18 nt, Human
gcaccugucugcuccagc

SEQ ID NO: 3178217 - RNA, 16 nt, Human
gcaccugucugcucca

SEQ ID NO: 3178218 - RNA, 12 nt, Human
gcaccugucugc

SEQ ID NO: 3178219 - RNA, 15 nt, Human
gcaccugucugcucc

SEQ ID NO: 3178220 - RNA, 14 nt, Human
gcaccugucugcuc

SEQ ID NO: 3178221 - RNA, 19 nt, Human
gcaccuuagacagucccug

SEQ ID NO: 3178222 - RNA, 19 nt, Human
gcaccuucccccuccccca

SEQ ID NO: 3178223 - RNA, 14 nt, Human
gcaccuucccccuc

SEQ ID NO: 3178224 - RNA, 12 nt, Human
gcacagaggccu

SEQ ID NO: 3178225 - RNA, 14 nt, Human
gcacagucagguug

SEQ ID NO: 3178226 - RNA, 13 nt, Human
gcacagugcaucu

SEQ ID NO: 3178227 - RNA, 18 nt, Human
gcacagugcaucucagcc

SEQ ID NO: 3178228 - RNA, 15 nt, Human
gcacagugcaucuca

SEQ ID NO: 3178229 - RNA, 17 nt, Human
gcaccaaaauaagaaaa

SEQ ID NO: 3178230 - RNA, 14 nt, Human
gcacugguggcccg

SEQ ID NO: 3178231 - RNA, 23 nt, Human
gcacugcuuccagugaggcucug

SEQ ID NO: 3178232 - RNA, 22 nt, Human
gcacugcuuccagugaggcucu

SEQ ID NO: 3178233 - RNA, 18 nt, Human
gcacugacuucuaaguaa

SEQ ID NO: 3178234 - RNA, 19 nt, Human
gcacugagagagcgcagcc

SEQ ID NO: 3178235 - RNA, 15 nt, Human
gcacugacuucuaag

SEQ ID NO: 3178236 - RNA, 20 nt, Human
gcacugcugcccagccucca

SEQ ID NO: 3178237 - RNA, 18 nt, Human
gcacugcugcccagccuc

SEQ ID NO: 3178238 - RNA, 15 nt, Human
gcacugcugcccagc

SEQ ID NO: 3178239 - RNA, 14 nt, Human
gcacugcugcccag

SEQ ID NO: 3178240 - RNA, 12 nt, Human
gcacugcugccc

SEQ ID NO: 3178241 - RNA, 21 nt, Human
gcacugagagagcgcagccgc

SEQ ID NO: 3178242 - RNA, 19 nt, Human
gcagacacccuuggagcuc

SEQ ID NO: 3178243 - RNA, 18 nt, Human
gcagacaggaccagggau

SEQ ID NO: 3178244 - RNA, 12 nt, Human
gcagacaggcaa

SEQ ID NO: 3178245 - RNA, 13 nt, Human
gcagacaggcaag

SEQ ID NO: 3178246 - RNA, 18 nt, Human
gcagaaggaagacuucau

SEQ ID NO: 3178247 - RNA, 22 nt, Human
gcagaagggagcuggcuccagc

SEQ ID NO: 3178248 - RNA, 20 nt, Human
gcagaagggagcuggcucca

SEQ ID NO: 3178249 - RNA, 18 nt, Human
gcagaagggagcuggcuc

SEQ ID NO: 3178250 - RNA, 20 nt, Human
gcagaaguaggggaagaaua

SEQ ID NO: 3178251 - RNA, 22 nt, Human
gcaauguagaggggaaaagaga

SEQ ID NO: 3178252 - RNA, 14 nt, Human
gcaaugugauaaaa

SEQ ID NO: 3178253 - RNA, 14 nt, Human
gcaaugugaaaaau

SEQ ID NO: 3178254 - RNA, 17 nt, Human
gcaaugugaaaaaucug

SEQ ID NO: 3178255 - RNA, 15 nt, Human
gcaauguuuugcuuu

SEQ ID NO: 3178256 - RNA, 14 nt, Human
gcaauguuuugcuu

SEQ ID NO: 3178257 - RNA, 17 nt, Human
gcaauguuuugcuuuug

SEQ ID NO: 3178258 - RNA, 21 nt, Human
gcaauuaaacuuccaaagaaa

SEQ ID NO: 3178259 - RNA, 22 nt, Human
gcaauuaaacuuccaaagaaag

SEQ ID NO: 3178260 - RNA, 14 nt, Human
gcaacucaucuuag

SEQ ID NO: 3178261 - RNA, 23 nt, Human
gcaacgaucacaaaugacuuuau

SEQ ID NO: 3178262 - RNA, 16 nt, Human
gcaacgaucacaaaug

SEQ ID NO: 3178263 - RNA, 20 nt, Human
gcaacgaucacaaaugacuu

SEQ ID NO: 3178264 - RNA, 21 nt, Human
gcaacgaucacaaaugacuuu

SEQ ID NO: 3178265 - RNA, 22 nt, Human
gcaacgaucacaaaugacuuua

SEQ ID NO: 3178266 - RNA, 14 nt, Human
gcaacacacaugcu

SEQ ID NO: 3178267 - RNA, 15 nt, Human
gcaauggcagccuug

SEQ ID NO: 3178268 - RNA, 17 nt, Human
gcaaugguaguuucugu

SEQ ID NO: 3178269 - RNA, 19 nt, Human
gcaaugguaguuucugugg

SEQ ID NO: 3178270 - RNA, 14 nt, Human
gcaauucuccugcc

SEQ ID NO: 3178271 - RNA, 15 nt, Human
gcaauucuccugccu

SEQ ID NO: 3178272 - RNA, 16 nt, Human
gcaauucuccugccuc

SEQ ID NO: 3178273 - RNA, 17 nt, Human
gcaauucuccugccuca

SEQ ID NO: 3178274 - RNA, 18 nt, Human
gcaauucuccugccucag

SEQ ID NO: 3178275 - RNA, 19 nt, Human
gcaauucuccugccucagc

SEQ ID NO: 3178276 - RNA, 20 nt, Human
gcaauucuccugccucagcc

SEQ ID NO: 3178277 - RNA, 14 nt, Human
gcacaaacagaggc

SEQ ID NO: 3178278 - RNA, 23 nt, Human
gcacaaaaagauaccuuaaaauu

SEQ ID NO: 3178279 - RNA, 23 nt, Human
gcaauuuuauaaggacuuccuga

SEQ ID NO: 3178280 - RNA, 15 nt, Human
gcacaaacagaggcc

SEQ ID NO: 3178281 - RNA, 16 nt, Human
gcacaaacagaggccg

SEQ ID NO: 3178282 - RNA, 18 nt, Human
gcacaaccuucaagcugc

SEQ ID NO: 3178283 - RNA, 18 nt, Human
gcacaacccccagcuccc

SEQ ID NO: 3178284 - RNA, 17 nt, Human
gcacaacccccagcucc

SEQ ID NO: 3178285 - RNA, 18 nt, Human
gcacaagcuccaagcucc

SEQ ID NO: 3178286 - RNA, 15 nt, Human
gcacaagcuccaagc

SEQ ID NO: 3178287 - RNA, 17 nt, Human
gcacaagcuccaagcuc

SEQ ID NO: 3178288 - RNA, 20 nt, Human
gcacagaaaauggaagacag

SEQ ID NO: 3178289 - RNA, 20 nt, Human
gcacaccgggcacucagaag

SEQ ID NO: 3178290 - RNA, 20 nt, Human
gcacaccuccucccacugcc

SEQ ID NO: 3178291 - RNA, 19 nt, Human
gcacaccuccucccacugc

SEQ ID NO: 3178292 - RNA, 15 nt, Human
gcacaccuccuccca

SEQ ID NO: 3178293 - RNA, 12 nt, Human
gcacacgcugcu

SEQ ID NO: 3178294 - RNA, 22 nt, Human
gcacaccuccucccacugccca

SEQ ID NO: 3178295 - RNA, 21 nt, Human
gcacacgcugcucugccccag

SEQ ID NO: 3178296 - RNA, 18 nt, Human
gcacacgcugcucugccc

SEQ ID NO: 3178297 - RNA, 17 nt, Human
gcacacgcugcucugcc

SEQ ID NO: 3178298 - RNA, 15 nt, Human
gcacacgcugcucug

SEQ ID NO: 3178299 - RNA, 14 nt, Human
gcacacgcugcucu

SEQ ID NO: 3178300 - RNA, 13 nt, Human
gcacacgcugcuc

SEQ ID NO: 3178301 - RNA, 22 nt, Human
gcacagacccugcccugugggc

SEQ ID NO: 3178302 - RNA, 18 nt, Human
gcacagacccugcccugu

SEQ ID NO: 3178303 - RNA, 19 nt, Human
gcacagacccugcccugug

SEQ ID NO: 3178304 - RNA, 20 nt, Human
gcacagacccugcccugugg

SEQ ID NO: 3178305 - RNA, 21 nt, Human
gcacagacccugcccuguggg

SEQ ID NO: 3178306 - RNA, 14 nt, Human
gcacagacccugcc

SEQ ID NO: 3178307 - RNA, 15 nt, Human
gcacagacccugccc

SEQ ID NO: 3178308 - RNA, 16 nt, Human
gcacagacccugcccu

SEQ ID NO: 3178309 - RNA, 17 nt, Human
gcacagacccugcccug

SEQ ID NO: 3178310 - RNA, 21 nt, Human
gcacagaaaauggaagacagc

SEQ ID NO: 3178311 - RNA, 22 nt, Human
gcacagaaaauggaagacagcu

SEQ ID NO: 3178312 - RNA, 23 nt, Human
gcacagaaaauggaagacagcuc

SEQ ID NO: 3178313 - RNA, 23 nt, Human
gauugcaggagucccugccauca

SEQ ID NO: 3178314 - RNA, 19 nt, Human
gauugccggucuugacagc

SEQ ID NO: 3178315 - RNA, 20 nt, Human
gauugauuuuaaaauguaca

SEQ ID NO: 3178316 - RNA, 18 nt, Human
gauugauuuuaaaaugua

SEQ ID NO: 3178317 - RNA, 17 nt, Human
gauugauuuuaaaaugu

SEQ ID NO: 3178318 - RNA, 16 nt, Human
gauugauuuuaaaaug

SEQ ID NO: 3178319 - RNA, 16 nt, Human
gauucucaugccucag

SEQ ID NO: 3178320 - RNA, 18 nt, Human
gauuacaggcuccugcca

SEQ ID NO: 3178321 - RNA, 21 nt, Human
gauuacaggcuccugccacca

SEQ ID NO: 3178322 - RNA, 18 nt, Human
gauucacaccccaccugc

SEQ ID NO: 3178323 - RNA, 17 nt, Human
gauucacaccccaccug

SEQ ID NO: 3178324 - RNA, 16 nt, Human
gauucacaccccaccu

SEQ ID NO: 3178325 - RNA, 18 nt, Human
gauucaaugccucuggcu

SEQ ID NO: 3178326 - RNA, 23 nt, Human
gauuacaggcaugggccaccacg

SEQ ID NO: 3178327 - RNA, 15 nt, Human
gauucucaccagcug

SEQ ID NO: 3178328 - RNA, 17 nt, Human
gauugggccccugccag

SEQ ID NO: 3178329 - RNA, 21 nt, Human
gauugguuucucuucuccccu

SEQ ID NO: 3178330 - RNA, 17 nt, Human
gauugguuucucuucuc

SEQ ID NO: 3178331 - RNA, 16 nt, Human
gauugguuucucuucu

SEQ ID NO: 3178332 - RNA, 15 nt, Human
gauugguuucucuuc

SEQ ID NO: 3178333 - RNA, 12 nt, Human
gauuuaaaucag

SEQ ID NO: 3178334 - RNA, 14 nt, Human
gauuuaaauuuaag

SEQ ID NO: 3178335 - RNA, 14 nt, Human
gauuuccucuugaa

SEQ ID NO: 3178336 - RNA, 21 nt, Human
gauuuccucuugaaccagaac

SEQ ID NO: 3178337 - RNA, 20 nt, Human
gauuucuaguuauuuauucu

SEQ ID NO: 3178338 - RNA, 15 nt, Human
gauuucuaguuauuu

SEQ ID NO: 3178339 - RNA, 16 nt, Human
gauuugagcucagccc

SEQ ID NO: 3178340 - RNA, 13 nt, Human
gauuugaauccag

SEQ ID NO: 3178341 - RNA, 19 nt, Human
gcaaagcggguuauaauga

SEQ ID NO: 3178342 - RNA, 21 nt, Human
gcaaagcacccauuucaaugu

SEQ ID NO: 3178343 - RNA, 14 nt, Human
gcaaaggaaauacc

SEQ ID NO: 3178344 - RNA, 19 nt, Human
gcaaagcuguucuuccugg

SEQ ID NO: 3178345 - RNA, 18 nt, Human
gcaaagcuguucuuccug

SEQ ID NO: 3178346 - RNA, 17 nt, Human
gcaaagcuguucuuccu

SEQ ID NO: 3178347 - RNA, 12 nt, Human
gcaaagcuguuc

SEQ ID NO: 3178348 - RNA, 15 nt, Human
gcaaauguggcuccu

SEQ ID NO: 3178349 - RNA, 23 nt, Human
gcaacaaacugcacaugauuuca

SEQ ID NO: 3178350 - RNA, 22 nt, Human
gcaacaaacugcacaugauuuc

SEQ ID NO: 3178351 - RNA, 21 nt, Human
gcaacaaacugcacaugauuu

SEQ ID NO: 3178352 - RNA, 15 nt, Human
gcaacaaacugcaca

SEQ ID NO: 3178353 - RNA, 14 nt, Human
gcaacaaacugcac

SEQ ID NO: 3178354 - RNA, 14 nt, Human
gcaacaaaauacau

SEQ ID NO: 3178355 - RNA, 23 nt, Human
gcaacaauucucccgggacucug

SEQ ID NO: 3178356 - RNA, 16 nt, Human
gcaacaauuuucagau

SEQ ID NO: 3178357 - RNA, 15 nt, Human
gcaacaauuuucaga

SEQ ID NO: 3178358 - RNA, 14 nt, Human
gcaacaauuuucag

SEQ ID NO: 3178359 - RNA, 12 nt, Human
gcaaaccaucau

SEQ ID NO: 3178360 - RNA, 20 nt, Human
gcaaaccaacaagaauaaag

SEQ ID NO: 3178361 - RNA, 13 nt, Human
gcaaaccaacaag

SEQ ID NO: 3178362 - RNA, 15 nt, Human
gcaaacauuuucucu

SEQ ID NO: 3178363 - RNA, 21 nt, Human
gcaaacauuuucucuuagaaa

SEQ ID NO: 3178364 - RNA, 20 nt, Human
gcaaacauuuucucuuagaa

SEQ ID NO: 3178365 - RNA, 21 nt, Human
gauuuuguguuuauucuugau

SEQ ID NO: 3178366 - RNA, 13 nt, Human
gauuuuguguuua

SEQ ID NO: 3178367 - RNA, 12 nt, Human
gauuuugaucuc

SEQ ID NO: 3178368 - RNA, 21 nt, Human
gauuuugaaauuuuuauuaaa

SEQ ID NO: 3178369 - RNA, 19 nt, Human
gauuuugauccaagcuggu

SEQ ID NO: 3178370 - RNA, 15 nt, Human
gauuuuaguuuuauu

SEQ ID NO: 3178371 - RNA, 22 nt, Human
gauuuuaguuuuauuuucuaaa

SEQ ID NO: 3178372 - RNA, 19 nt, Human
gauuuuaguuuuauuuucu

SEQ ID NO: 3178373 - RNA, 15 nt, Human
gaugggucaguugua

SEQ ID NO: 3178374 - RNA, 21 nt, Human
gaugggucaguuguaucagca

SEQ ID NO: 3178375 - RNA, 19 nt, Human
gaugggugcuuggaggaag

SEQ ID NO: 3178376 - RNA, 14 nt, Human
gaugguaagagaaa

SEQ ID NO: 3178377 - RNA, 15 nt, Human
gaugguaagagaaaa

SEQ ID NO: 3178378 - RNA, 18 nt, Human
gaugguaagagaaaagag

SEQ ID NO: 3178379 - RNA, 22 nt, Human
gaugguaagagaaaagagagaa

SEQ ID NO: 3178380 - RNA, 15 nt, Human
gauggggcugcaccg

SEQ ID NO: 3178381 - RNA, 13 nt, Human
gauggggcugcac

SEQ ID NO: 3178382 - RNA, 20 nt, Human
gaugggaugauugaagaaac

SEQ ID NO: 3178383 - RNA, 24 nt, Human
gauggggcccugccuccuuuguga

SEQ ID NO: 3178384 - RNA, 21 nt, Human
gaugggcaacccccagccugc

SEQ ID NO: 3178385 - RNA, 20 nt, Human
gaugggcaacccccagccug

SEQ ID NO: 3178386 - RNA, 19 nt, Human
gaugggaugauugaagaaa

SEQ ID NO: 3178387 - RNA, 18 nt, Human
gaugcuagaacucccuuu

SEQ ID NO: 3178388 - RNA, 16 nt, Human
gaugccccgucccccu

SEQ ID NO: 3178389 - RNA, 20 nt, Human
gaugcuagaacucccuuuca

SEQ ID NO: 3178390 - RNA, 12 nt, Human
gaugcucuuucc

SEQ ID NO: 3178391 - RNA, 20 nt, Human
gaugcugacuguacuccucc

SEQ ID NO: 3178392 - RNA, 17 nt, Human
gaugcugacuguacucc

SEQ ID NO: 3178393 - RNA, 14 nt, Human
gaugcucuuuccca

SEQ ID NO: 3178394 - RNA, 13 nt, Human
gaugcucuuuccc

SEQ ID NO: 3178395 - RNA, 20 nt, Human
gaucagaccaaacagugcug

SEQ ID NO: 3178396 - RNA, 19 nt, Human
gaugcccaaagaugcagcc

SEQ ID NO: 3178397 - RNA, 20 nt, Human
gaugcccaaagaugcagccg

SEQ ID NO: 3178398 - RNA, 24 nt, Human
gaugguguucaaaaaacuuguaaa

SEQ ID NO: 3178399 - RNA, 17 nt, Human
gauggugcaaugaccuu

SEQ ID NO: 3178400 - RNA, 15 nt, Human
gauggugcaaugacc

SEQ ID NO: 3178401 - RNA, 16 nt, Human
gauggugcaaugaccu

SEQ ID NO: 3178402 - RNA, 12 nt, Human
gauggugcaaug

SEQ ID NO: 3178403 - RNA, 14 nt, Human
gauggugcaaugac

SEQ ID NO: 3178404 - RNA, 19 nt, Human
gaugguaugcacaauucca

SEQ ID NO: 3178405 - RNA, 23 nt, Human
gaugguaucuauagucaagacga

SEQ ID NO: 3178406 - RNA, 19 nt, Human
gaugugggccaccauugca

SEQ ID NO: 3178407 - RNA, 21 nt, Human
gaugguuccccuguucacucu

SEQ ID NO: 3178408 - RNA, 18 nt, Human
gaugguuccccuguucac

SEQ ID NO: 3178409 - RNA, 13 nt, Human
gaugguuccccug

SEQ ID NO: 3178410 - RNA, 13 nt, Human
gauguuuuuaaaa

SEQ ID NO: 3178411 - RNA, 14 nt, Human
gauguugaugcaau

SEQ ID NO: 3178412 - RNA, 23 nt, Human
gauguugaugcaauccuuacaaa

SEQ ID NO: 3178413 - RNA, 21 nt, Human
gauguugaugcaauccuuaca

SEQ ID NO: 3178414 - RNA, 14 nt, Human
gauguuuaaaacac

SEQ ID NO: 3178415 - RNA, 22 nt, Human
gauguuuaaaacaccuucuaua

SEQ ID NO: 3178416 - RNA, 23 nt, Human
gauguuuaaaacaccuucuauag

SEQ ID NO: 3178417 - RNA, 19 nt, Human
gauguugaaaaaguucugc

SEQ ID NO: 3178418 - RNA, 19 nt, Human
gauguugacaucacuggca

SEQ ID NO: 3178419 - RNA, 15 nt, Human
gauguucaccuccug

SEQ ID NO: 3178420 - RNA, 21 nt, Human
gauguuauauuuuucuuaaaa

SEQ ID NO: 3178421 - RNA, 20 nt, Human
gauguuauauuuuucuuaaa

SEQ ID NO: 3178422 - RNA, 16 nt, Human
gauguuauauuuuucu

SEQ ID NO: 3178423 - RNA, 13 nt, Human
gauguuauauuuu

SEQ ID NO: 3178424 - RNA, 17 nt, Human
gauguuaguuuuccuua

SEQ ID NO: 3178425 - RNA, 16 nt, Human
gauguuaguuuuccuu

SEQ ID NO: 3178426 - RNA, 23 nt, Human
gauuacaagcgugagccacugca

SEQ ID NO: 3178427 - RNA, 20 nt, Human
gauuacaggcgugagccacc

SEQ ID NO: 3178428 - RNA, 17 nt, Human
gauuacaggcuccugcc

SEQ ID NO: 3178429 - RNA, 15 nt, Human
gauguuuuuaaaauc

SEQ ID NO: 3178430 - RNA, 15 nt, Human
gauguuuuucuuacc

SEQ ID NO: 3178431 - RNA, 17 nt, Human
gauguuuuuaaaaucuu

SEQ ID NO: 3178432 - RNA, 16 nt, Human
gauguuuuuaaaaucu

SEQ ID NO: 3178433 - RNA, 22 nt, Human
gauuacaagcgugagccacugc

SEQ ID NO: 3178434 - RNA, 20 nt, Human
gauuaaagaugagcuuuguc

SEQ ID NO: 3178435 - RNA, 22 nt, Human
gauuaaaaauaucaaauuaauu

SEQ ID NO: 3178436 - RNA, 22 nt, Human
gauuaaaagguauacuuuagua

SEQ ID NO: 3178437 - RNA, 19 nt, Human
cuuuggcuaugagggccuu

SEQ ID NO: 3178438 - RNA, 19 nt, Human
cuuuggcuauuagagauca

SEQ ID NO: 3178439 - RNA, 14 nt, Human
cuuuguccccaccg

SEQ ID NO: 3178440 - RNA, 22 nt, Human
cuuuguauuguccuauuagugu

SEQ ID NO: 3178441 - RNA, 22 nt, Human
cuuuggccugaugaccaauuuu

SEQ ID NO: 3178442 - RNA, 12 nt, Human
cuuuguauuguc

SEQ ID NO: 3178443 - RNA, 15 nt, Human
cuuuguauuguccua

SEQ ID NO: 3178444 - RNA, 16 nt, Human
cuuuguauuguccuau

SEQ ID NO: 3178445 - RNA, 23 nt, Human
cuuugucuaagaaacauuggaag

SEQ ID NO: 3178446 - RNA, 21 nt, Human
cuuugucuaagaaacauugga

SEQ ID NO: 3178447 - RNA, 23 nt, Human
cuuugucuacuucaaaaguuugu

SEQ ID NO: 3178448 - RNA, 19 nt, Human
cuuugucuccucuauccug

SEQ ID NO: 3178449 - RNA, 20 nt, Human
cuuugucuaagaaacauugg

SEQ ID NO: 3178450 - RNA, 15 nt, Human
cuuuguccccaccgc

SEQ ID NO: 3178451 - RNA, 15 nt, Human
cuuugugaggaagcc

SEQ ID NO: 3178452 - RNA, 15 nt, Human
cuuucuuccucugcu

SEQ ID NO: 3178453 - RNA, 14 nt, Human
cuuucuuccucugc

SEQ ID NO: 3178454 - RNA, 13 nt, Human
cuuucuuccucug

SEQ ID NO: 3178455 - RNA, 12 nt, Human
cuuucuuccucu

SEQ ID NO: 3178456 - RNA, 16 nt, Human
cuuugcagacaggcaa

SEQ ID NO: 3178457 - RNA, 20 nt, Human
cuuugcagacaggcaagcac

SEQ ID NO: 3178458 - RNA, 21 nt, Human
cuuugcaguucccaucuccuu

SEQ ID NO: 3178459 - RNA, 21 nt, Human
cuuucucuucauauucagcuu

SEQ ID NO: 3178460 - RNA, 15 nt, Human
cuuucucugaggaca

SEQ ID NO: 3178461 - RNA, 14 nt, Human
cuuucucugaggac

SEQ ID NO: 3178462 - RNA, 13 nt, Human
cuuuccugaggcu

SEQ ID NO: 3178463 - RNA, 15 nt, Human
cuuuccugaggcugg

SEQ ID NO: 3178464 - RNA, 15 nt, Human
cuuucccuuccucca

SEQ ID NO: 3178465 - RNA, 12 nt, Human
cuuucucugagg

SEQ ID NO: 3178466 - RNA, 11 nt, Human
cuuucuuccuc

SEQ ID NO: 3178467 - RNA, 21 nt, Human
cuuucuuccucauucccucgu

SEQ ID NO: 3178468 - RNA, 17 nt, Human
cuuucuuccucauuccc

SEQ ID NO: 3178469 - RNA, 12 nt, Human
cuuucuuccuca

SEQ ID NO: 3178470 - RNA, 18 nt, Human
cuuucugggguuuuucug

SEQ ID NO: 3178471 - RNA, 17 nt, Human
cuuucugggguuuuucu

SEQ ID NO: 3178472 - RNA, 20 nt, Human
cuuucugggguuuuucuguu

SEQ ID NO: 3178473 - RNA, 19 nt, Human
cuuucugggguuuuucugu

SEQ ID NO: 3178474 - RNA, 20 nt, Human
cuuucugggcaccggggccu

SEQ ID NO: 3178475 - RNA, 19 nt, Human
cuuucuggggccuaauaaa

SEQ ID NO: 3178476 - RNA, 20 nt, Human
cuuucuggggccuaauaaaa

SEQ ID NO: 3178477 - RNA, 22 nt, Human
cuuucuggggccuaauaaaacu

SEQ ID NO: 3178478 - RNA, 23 nt, Human
cuuucuggggccuaauaaaacug

SEQ ID NO: 3178479 - RNA, 15 nt, Human
cuuucccaaaggcau

SEQ ID NO: 3178480 - RNA, 15 nt, Human
cuuuccaucuacccu

SEQ ID NO: 3178481 - RNA, 15 nt, Human
cuuuccaggaaggcu

SEQ ID NO: 3178482 - RNA, 23 nt, Human
cuuuccauauccauagugacuuu

SEQ ID NO: 3178483 - RNA, 16 nt, Human
cuuucccucccuuccu

SEQ ID NO: 3178484 - RNA, 14 nt, Human
cuuucccucccuuc

SEQ ID NO: 3178485 - RNA, 13 nt, Human
cuuucccucccuu

SEQ ID NO: 3178486 - RNA, 11 nt, Human
cuuucccuccc

SEQ ID NO: 3178487 - RNA, 12 nt, Human
cuuuccugaggc

SEQ ID NO: 3178488 - RNA, 16 nt, Human
cuuuccucuuuggucu

SEQ ID NO: 3178489 - RNA, 14 nt, Human
cuuucccuuccucc

SEQ ID NO: 3178490 - RNA, 14 nt, Human
cuuucccuuccagu

SEQ ID NO: 3178491 - RNA, 13 nt, Human
cuuucccuuccag

SEQ ID NO: 3178492 - RNA, 12 nt, Human
cuuucccuucca

SEQ ID NO: 3178493 - RNA, 14 nt, Human
cuuuaucaaugugu

SEQ ID NO: 3178494 - RNA, 20 nt, Human
cuuuaucaaugugucuuucu

SEQ ID NO: 3178495 - RNA, 22 nt, Human
cuuuaucagggaaacuaagauu

SEQ ID NO: 3178496 - RNA, 21 nt, Human
cuuuaucaugaaugcuuuuag

SEQ ID NO: 3178497 - RNA, 22 nt, Human
cuuuaucuaccaacuuucaaga

SEQ ID NO: 3178498 - RNA, 21 nt, Human
cuuuaucuaccaacuuucaag

SEQ ID NO: 3178499 - RNA, 20 nt, Human
cuuuaucuaccaacuuucaa

SEQ ID NO: 3178500 - RNA, 19 nt, Human
cuuuaucuaccaacuuuca

SEQ ID NO: 3178501 - RNA, 15 nt, Human
cuuuaugcacaaaau

SEQ ID NO: 3178502 - RNA, 19 nt, Human
cuuuauaauucuacuuuga

SEQ ID NO: 3178503 - RNA, 13 nt, Human
cuuuauaauucua

SEQ ID NO: 3178504 - RNA, 14 nt, Human
cuuuagcgcccagu

SEQ ID NO: 3178505 - RNA, 18 nt, Human
cuuguuaugguagaaaaa

SEQ ID NO: 3178506 - RNA, 19 nt, Human
cuuguuaugguagaaaaau

SEQ ID NO: 3178507 - RNA, 14 nt, Human
cuuguucaggaaaa

SEQ ID NO: 3178508 - RNA, 19 nt, Human
cuuguucaggaaaagguug

SEQ ID NO: 3178509 - RNA, 16 nt, Human
cuuguuauucaacagc

SEQ ID NO: 3178510 - RNA, 20 nt, Human
cuuuaaaauuacaacuaagu

SEQ ID NO: 3178511 - RNA, 19 nt, Human
cuuuaaaauuacaacuaag

SEQ ID NO: 3178512 - RNA, 17 nt, Human
cuuuaaaauuacaacua

SEQ ID NO: 3178513 - RNA, 12 nt, Human
cuuuaaaauucu

SEQ ID NO: 3178514 - RNA, 22 nt, Human
cuuuaaaccuguagaaucaauu

SEQ ID NO: 3178515 - RNA, 16 nt, Human
cuuuagcaaagaacuc

SEQ ID NO: 3178516 - RNA, 20 nt, Human
cuuuagauagcagccuggcu

SEQ ID NO: 3178517 - RNA, 23 nt, Human
cuuuagauagcagccuggcuccc

SEQ ID NO: 3178518 - RNA, 15 nt, Human
cuugucauuuugguc

SEQ ID NO: 3178519 - RNA, 15 nt, Human
cuuguauauucuauu

SEQ ID NO: 3178520 - RNA, 12 nt, Human
cuuguauaauau

SEQ ID NO: 3178521 - RNA, 22 nt, Human
cuuguaguuuagugugguuuuc

SEQ ID NO: 3178522 - RNA, 15 nt, Human
cuuguaguucuuuaa

SEQ ID NO: 3178523 - RNA, 20 nt, Human
cuuguaguucuuuaaacugu

SEQ ID NO: 3178524 - RNA, 13 nt, Human
cuuguaguucuuu

SEQ ID NO: 3178525 - RNA, 23 nt, Human
cuuggggggcugaggugggagga

SEQ ID NO: 3178526 - RNA, 18 nt, Human
cuugaguuguuuuuguau

SEQ ID NO: 3178527 - RNA, 21 nt, Human
cuugaguuggggccauugcuu

SEQ ID NO: 3178528 - RNA, 19 nt, Human
cuugaguuguuuuuguaua

SEQ ID NO: 3178529 - RNA, 20 nt, Human
cuugaguuguuuuuguauau

SEQ ID NO: 3178530 - RNA, 21 nt, Human
cuugaguuguuuuuguauauu

SEQ ID NO: 3178531 - RNA, 22 nt, Human
cuugaguuguuuuuguauauug

SEQ ID NO: 3178532 - RNA, 22 nt, Human
cuuggggggcugaggugggagg

SEQ ID NO: 3178533 - RNA, 16 nt, Human
cuuguaaauagcucag

SEQ ID NO: 3178534 - RNA, 23 nt, Human
cuugaguuguuuuuguauauugg

SEQ ID NO: 3178535 - RNA, 18 nt, Human
cuuguaaauagcucaggu

SEQ ID NO: 3178536 - RNA, 17 nt, Human
cuuguaaauagcucagg

SEQ ID NO: 3178537 - RNA, 22 nt, Human
cuuuuguucauuucauccuuuc

SEQ ID NO: 3178538 - RNA, 15 nt, Human
cuuuuucuuaaucau

SEQ ID NO: 3178539 - RNA, 12 nt, Human
cuuuuucuuaau

SEQ ID NO: 3178540 - RNA, 13 nt, Human
cuuuuuauuuaua

SEQ ID NO: 3178541 - RNA, 14 nt, Human
cuuuuuauuuauau

SEQ ID NO: 3178542 - RNA, 17 nt, Human
cuuuuuauuuauaugua

SEQ ID NO: 3178543 - RNA, 18 nt, Human
cuuuuuauuuauauguau

SEQ ID NO: 3178544 - RNA, 19 nt, Human
cuuuuuauuuauauguaug

SEQ ID NO: 3178545 - RNA, 18 nt, Human
cuuuguuaguuucuccaa

SEQ ID NO: 3178546 - RNA, 16 nt, Human
cuuuuguucauuucau

SEQ ID NO: 3178547 - RNA, 19 nt, Human
cuuuuguucauuucauccu

SEQ ID NO: 3178548 - RNA, 18 nt, Human
cuuuuguucauuucaucc

SEQ ID NO: 3178549 - RNA, 16 nt, Human
cuuuguuaccuuaaaa

SEQ ID NO: 3178550 - RNA, 19 nt, Human
cuuuguuaccuuaaaacua

SEQ ID NO: 3178551 - RNA, 20 nt, Human
cuuuguuaccuuaaaacuag

SEQ ID NO: 3178552 - RNA, 15 nt, Human
cuuuguuaauuugga

SEQ ID NO: 3178553 - RNA, 13 nt, Human
cuuuguuacacug

SEQ ID NO: 3178554 - RNA, 21 nt, Human
cuuuguuacacuguuauuuuc

SEQ ID NO: 3178555 - RNA, 16 nt, Human
cuuuuugaaaguaauu

SEQ ID NO: 3178556 - RNA, 20 nt, Human
cuuuuuuggcugcugaaggc

SEQ ID NO: 3178557 - RNA, 22 nt, Human
cuuuuuuggcugcugaaggcuc

SEQ ID NO: 3178558 - RNA, 17 nt, Human
cuuuuuuggcugcugaa

SEQ ID NO: 3178559 - RNA, 12 nt, Human
gaaaaaggagga

SEQ ID NO: 3178560 - RNA, 15 nt, Human
gaaaaaggaggaaga

SEQ ID NO: 3178561 - RNA, 16 nt, Human
cuuuuuuggcugcuga

SEQ ID NO: 3178562 - RNA, 13 nt, Human
gaaaauauuuaaa

SEQ ID NO: 3178563 - RNA, 13 nt, Human
gaaaauauucucu

SEQ ID NO: 3178564 - RNA, 19 nt, Human
gaaaauauucucuauuuga

SEQ ID NO: 3178565 - RNA, 20 nt, Human
gaaaauauucucuauuugaa

SEQ ID NO: 3178566 - RNA, 18 nt, Human
gaaaauauuuguaucaca

SEQ ID NO: 3178567 - RNA, 16 nt, Human
gaaaauaaaaaaaaga

SEQ ID NO: 3178568 - RNA, 19 nt, Human
gaaaauaaaaaaagaaaaa

SEQ ID NO: 3178569 - RNA, 22 nt, Human
gaaaauaaaaaaaagaaaaaag

SEQ ID NO: 3178570 - RNA, 21 nt, Human
gaaaauaaaaaaaagaaaaaa

SEQ ID NO: 3178571 - RNA, 19 nt, Human
gaaaauaaaaaaaagaaaa

SEQ ID NO: 3178572 - RNA, 18 nt, Human
gaaaauaaaaaaaagaaa

SEQ ID NO: 3178573 - RNA, 17 nt, Human
gaaaauaaaaaaaagaa

SEQ ID NO: 3178574 - RNA, 17 nt, Human
gaaaaucugaauuggaa

SEQ ID NO: 3178575 - RNA, 20 nt, Human
gaaaaucugaauuggaaugc

SEQ ID NO: 3178576 - RNA, 18 nt, Human
gaaaaucugaauuggaau

SEQ ID NO: 3178577 - RNA, 22 nt, Human
gaaaaucuacacuccagugaga

SEQ ID NO: 3178578 - RNA, 18 nt, Human
gaaaaucagccugcucca

SEQ ID NO: 3178579 - RNA, 20 nt, Human
gaaaaucagccugcuccagc

SEQ ID NO: 3178580 - RNA, 22 nt, Human
gaaaaucagccugcuccagcug

SEQ ID NO: 3178581 - RNA, 16 nt, Human
gaaaagugaauugaag

SEQ ID NO: 3178582 - RNA, 16 nt, Human
gaaaaggccaagaggu

SEQ ID NO: 3178583 - RNA, 22 nt, Human
gaaaagcuuuguuuguucuugu

SEQ ID NO: 3178584 - RNA, 16 nt, Human
gaaaagcuuuguuugu

SEQ ID NO: 3178585 - RNA, 19 nt, Human
gaaaaggaagguaguucaa

SEQ ID NO: 3178586 - RNA, 14 nt, Human
gaaaagcuuuguuu

SEQ ID NO: 3178587 - RNA, 12 nt, Human
gaaaacuaaguu

SEQ ID NO: 3178588 - RNA, 20 nt, Human
gaaaacguggcugcuucaag

SEQ ID NO: 3178589 - RNA, 22 nt, Human
gaaaacguggcugcuucaagga

SEQ ID NO: 3178590 - RNA, 19 nt, Human
gaaaacguggcugcuucaa

SEQ ID NO: 3178591 - RNA, 19 nt, Human
gaaaagcugcugacagugu

SEQ ID NO: 3178592 - RNA, 22 nt, Human
gaaaacacuguucucugcccuc

SEQ ID NO: 3178593 - RNA, 22 nt, Human
gaaaacacuguuaucauuuuuu

SEQ ID NO: 3178594 - RNA, 15 nt, Human
gaaaacacuguuauc

SEQ ID NO: 3178595 - RNA, 17 nt, Human
gaaaacacccagggaac

SEQ ID NO: 3178596 - RNA, 24 nt, Human
gaaaacacuguucucugcccucca

SEQ ID NO: 3178597 - RNA, 20 nt, Human
gaaaacagaaauugguaccu

SEQ ID NO: 3178598 - RNA, 15 nt, Human
gaaaacagaaauugg

SEQ ID NO: 3178599 - RNA, 14 nt, Human
gaaaacagaaauug

SEQ ID NO: 3178600 - RNA, 13 nt, Human
gaaaacagaaauu

SEQ ID NO: 3178601 - RNA, 14 nt, Human
gaaacaauuucugu

SEQ ID NO: 3178602 - RNA, 15 nt, Human
gaaacccagcucugg

SEQ ID NO: 3178603 - RNA, 16 nt, Human
gaaacccagcucuggu

SEQ ID NO: 3178604 - RNA, 18 nt, Human
gaaacccagcucuggucc

SEQ ID NO: 3178605 - RNA, 19 nt, Human
gaaacccagcucuggucca

SEQ ID NO: 3178606 - RNA, 13 nt, Human
gaaacccagcucu

SEQ ID NO: 3178607 - RNA, 14 nt, Human
gaaacccagcucug

SEQ ID NO: 3178608 - RNA, 14 nt, Human
gaaacccugucucu

SEQ ID NO: 3178609 - RNA, 23 nt, Human
gaaacccagcucugguccauaga

SEQ ID NO: 3178610 - RNA, 19 nt, Human
gaaaccccuguaggccuca

SEQ ID NO: 3178611 - RNA, 15 nt, Human
gaaacuccagaugcc

SEQ ID NO: 3178612 - RNA, 18 nt, Human
gaaacuaggucugauauu

SEQ ID NO: 3178613 - RNA, 21 nt, Human
gaaacuagcuguuuaaaguuu

SEQ ID NO: 3178614 - RNA, 13 nt, Human
gaaacuaggucug

SEQ ID NO: 3178615 - RNA, 13 nt, Human
gaaaccugucuga

SEQ ID NO: 3178616 - RNA, 17 nt, Human
gaaacuaagauucuuuu

SEQ ID NO: 3178617 - RNA, 12 nt, Human
gaaacuaauaaa

SEQ ID NO: 3178618 - RNA, 13 nt, Human
gaaacuaauaaaa

SEQ ID NO: 3178619 - RNA, 14 nt, Human
gaaacuaauaaaau

SEQ ID NO: 3178620 - RNA, 15 nt, Human
gaaacuaauaaaaua

SEQ ID NO: 3178621 - RNA, 16 nt, Human
gaaacuaauaaaauau

SEQ ID NO: 3178622 - RNA, 17 nt, Human
gaaacuaauaaaauauu

SEQ ID NO: 3178623 - RNA, 18 nt, Human
gaaacuaauaaaauauuu

SEQ ID NO: 3178624 - RNA, 19 nt, Human
gaaacuaauaaaauauuuu

SEQ ID NO: 3178625 - RNA, 20 nt, Human
gaaacuaauaaaauauuuuc

SEQ ID NO: 3178626 - RNA, 21 nt, Human
gaaacuaauaaaauauuuucu

SEQ ID NO: 3178627 - RNA, 22 nt, Human
gaaacuaauaaaauauuuucug

SEQ ID NO: 3178628 - RNA, 23 nt, Human
gaaacuaauaaaauauuuucugu

SEQ ID NO: 3178629 - RNA, 19 nt, Human
gaaagaggcacccuuccau

SEQ ID NO: 3178630 - RNA, 18 nt, Human
gaaagaggcacccuucca

SEQ ID NO: 3178631 - RNA, 15 nt, Human
gaaagaguaggaaga

SEQ ID NO: 3178632 - RNA, 22 nt, Human
gaaagcagaacagugauuacca

SEQ ID NO: 3178633 - RNA, 14 nt, Human
gaaagcagaacagu

SEQ ID NO: 3178634 - RNA, 22 nt, Human
gaaagaggguaauaaccagaca

SEQ ID NO: 3178635 - RNA, 17 nt, Human
gaaagcagaacagugau

SEQ ID NO: 3178636 - RNA, 15 nt, Human
gaaagaggaaaagaa

SEQ ID NO: 3178637 - RNA, 21 nt, Human
gaaagaggaaugaaguacuca

SEQ ID NO: 3178638 - RNA, 20 nt, Human
gaaagaggcagcuugaaacu

SEQ ID NO: 3178639 - RNA, 16 nt, Human
gaaagaggaaaagaaa

SEQ ID NO: 3178640 - RNA, 19 nt, Human
gaaagacuuuuccaacccu

SEQ ID NO: 3178641 - RNA, 17 nt, Human
gaaagacuguacaaagu

SEQ ID NO: 3178642 - RNA, 17 nt, Human
gaaacucuauggucuua

SEQ ID NO: 3178643 - RNA, 14 nt, Human
gaaagcagggacuu

SEQ ID NO: 3178644 - RNA, 14 nt, Human
gaaagcauauugac

SEQ ID NO: 3178645 - RNA, 18 nt, Human
gaaagcauauugacuuuu

SEQ ID NO: 3178646 - RNA, 18 nt, Human
gaaagcauaaagcucaaa

SEQ ID NO: 3178647 - RNA, 22 nt, Human
gaaagcauaaagcucaaaugaa

SEQ ID NO: 3178648 - RNA, 21 nt, Human
gaaagcccugagcuuucugcu

SEQ ID NO: 3178649 - RNA, 22 nt, Human
gaaagcccugagcuuucugcua

SEQ ID NO: 3178650 - RNA, 17 nt, Human
gaaagcccugagcuuuc

SEQ ID NO: 3178651 - RNA, 15 nt, Human
gaaagcuguguuuau

SEQ ID NO: 3178652 - RNA, 20 nt, Human
gaaagcuguguuuauaugga

SEQ ID NO: 3178653 - RNA, 21 nt, Human
gaaagcugcugugaucccagu

SEQ ID NO: 3178654 - RNA, 19 nt, Human
gaaagccuuaagcugcagg

SEQ ID NO: 3178655 - RNA, 18 nt, Human
gaaagccuuaagcugcag

SEQ ID NO: 3178656 - RNA, 21 nt, Human
gaaagccuuucauuuugcuuu

SEQ ID NO: 3178657 - RNA, 17 nt, Human
gaaagccuuucauuuug

SEQ ID NO: 3178658 - RNA, 14 nt, Human
gaaagccuuucauu

SEQ ID NO: 3178659 - RNA, 23 nt, Human
gaaagccuuucauuuugcuuuaa

SEQ ID NO: 3178660 - RNA, 22 nt, Human
gaaagccuuucauuuugcuuua

SEQ ID NO: 3178661 - RNA, 22 nt, Human
cuucccuucucucucucucaaa

SEQ ID NO: 3178662 - RNA, 20 nt, Human
cuucccugguucaagcgauu

SEQ ID NO: 3178663 - RNA, 19 nt, Human
cuucccgcucagcccuccc

SEQ ID NO: 3178664 - RNA, 14 nt, Human
cuuccccuuccuuc

SEQ ID NO: 3178665 - RNA, 18 nt, Human
cuucccgcucagcccucc

SEQ ID NO: 3178666 - RNA, 23 nt, Human
cuucccgcucagcccucccugcc

SEQ ID NO: 3178667 - RNA, 21 nt, Human
cuucccuugcuaccacggccu

SEQ ID NO: 3178668 - RNA, 13 nt, Human
cuuccuaauucca

SEQ ID NO: 3178669 - RNA, 17 nt, Human
cuuccuaauuccacagc

SEQ ID NO: 3178670 - RNA, 18 nt, Human
cuuccuaauuccacagcu

SEQ ID NO: 3178671 - RNA, 19 nt, Human
cuuccuaauuccacagcug

SEQ ID NO: 3178672 - RNA, 14 nt, Human
cuuccuccaaggac

SEQ ID NO: 3178673 - RNA, 23 nt, Human
cuuccucauucccucgucuuucc

SEQ ID NO: 3178674 - RNA, 13 nt, Human
cuuccuccaaccc

SEQ ID NO: 3178675 - RNA, 14 nt, Human
cuuccuccauccuc

SEQ ID NO: 3178676 - RNA, 23 nt, Human
cuuccuccauccuccuccuuccu

SEQ ID NO: 3178677 - RNA, 17 nt, Human
cuuccuccauccuccuc

SEQ ID NO: 3178678 - RNA, 13 nt, Human
cuuccucccucau

SEQ ID NO: 3178679 - RNA, 15 nt, Human
cuuccaggcugggag

SEQ ID NO: 3178680 - RNA, 16 nt, Human
cuuccaggcugggaga

SEQ ID NO: 3178681 - RNA, 19 nt, Human
cuuccaggcugggagagcc

SEQ ID NO: 3178682 - RNA, 13 nt, Human
cuuccaggcagcc

SEQ ID NO: 3178683 - RNA, 12 nt, Human
cuuccaggcagc

SEQ ID NO: 3178684 - RNA, 14 nt, Human
cuuccagggguggg

SEQ ID NO: 3178685 - RNA, 15 nt, Human
cuuccagggguggga

SEQ ID NO: 3178686 - RNA, 17 nt, Human
cuuccaggggugggaca

SEQ ID NO: 3178687 - RNA, 13 nt, Human
cuucccccucccc

SEQ ID NO: 3178688 - RNA, 16 nt, Human
cuucaguaagccguga

SEQ ID NO: 3178689 - RNA, 23 nt, Human
cuucaguaagccgugauuuucau

SEQ ID NO: 3178690 - RNA, 22 nt, Human
cuucagggcagauuuuaguuuu

SEQ ID NO: 3178691 - RNA, 17 nt, Human
cuucagggcagauuuua

SEQ ID NO: 3178692 - RNA, 15 nt, Human
cuucagggagugagg

SEQ ID NO: 3178693 - RNA, 20 nt, Human
cuucagggagucagcuguuu

SEQ ID NO: 3178694 - RNA, 16 nt, Human
cuucagggcagauuuu

SEQ ID NO: 3178695 - RNA, 15 nt, Human
cuucagggcagauuu

SEQ ID NO: 3178696 - RNA, 19 nt, Human
cuucaggcucuucuccuuu

SEQ ID NO: 3178697 - RNA, 22 nt, Human
cuucaggcucuucuccuuucac

SEQ ID NO: 3178698 - RNA, 18 nt, Human
cuucagggagucagcugu

SEQ ID NO: 3178699 - RNA, 17 nt, Human
cuucagggagucagcug

SEQ ID NO: 3178700 - RNA, 16 nt, Human
cuucaguggcagcugc

SEQ ID NO: 3178701 - RNA, 15 nt, Human
cuucaguggcagcug

SEQ ID NO: 3178702 - RNA, 14 nt, Human
cuucaguggcagcu

SEQ ID NO: 3178703 - RNA, 13 nt, Human
cuucaguggcagc

SEQ ID NO: 3178704 - RNA, 18 nt, Human
cuucagugccuuauggaa

SEQ ID NO: 3178705 - RNA, 22 nt, Human
cuucagugccuuauggaacacu

SEQ ID NO: 3178706 - RNA, 15 nt, Human
cuucaguaagccgug

SEQ ID NO: 3178707 - RNA, 20 nt, Human
cuucauucaacccaccugcg

SEQ ID NO: 3178708 - RNA, 19 nt, Human
cuuccacaagagcccaggc

SEQ ID NO: 3178709 - RNA, 21 nt, Human
cuuccacaagagcccaggccu

SEQ ID NO: 3178710 - RNA, 17 nt, Human
cuuccacaagagcccag

SEQ ID NO: 3178711 - RNA, 12 nt, Human
cuucauuuaaaa

SEQ ID NO: 3178712 - RNA, 16 nt, Human
cuuccacaagagccca

SEQ ID NO: 3178713 - RNA, 18 nt, Human
cuuccaccugcucugcug

SEQ ID NO: 3178714 - RNA, 17 nt, Human
cuuccaccugcucugcu

SEQ ID NO: 3178715 - RNA, 16 nt, Human
cuuccaccugcucugc

SEQ ID NO: 3178716 - RNA, 15 nt, Human
cuuccaccugcucug

SEQ ID NO: 3178717 - RNA, 14 nt, Human
cuuccaccugcucu

SEQ ID NO: 3178718 - RNA, 12 nt, Human
cuuccaggcugg

SEQ ID NO: 3178719 - RNA, 14 nt, Human
cuuccaggcuggga

SEQ ID NO: 3178720 - RNA, 11 nt, Human
cuuccaggcag

SEQ ID NO: 3178721 - RNA, 20 nt, Human
cuuauaucuaaaucugucca

SEQ ID NO: 3178722 - RNA, 17 nt, Human
cuuaucaguuugcuaau

SEQ ID NO: 3178723 - RNA, 20 nt, Human
cuuauccacgagagcgcagc

SEQ ID NO: 3178724 - RNA, 21 nt, Human
cuuauccacgagagcgcagca

SEQ ID NO: 3178725 - RNA, 15 nt, Human
cuuauacauuugaua

SEQ ID NO: 3178726 - RNA, 12 nt, Human
cuuauaaaacag

SEQ ID NO: 3178727 - RNA, 14 nt, Human
cuuauaaaacagag

SEQ ID NO: 3178728 - RNA, 13 nt, Human
cuuaguuugugaa

SEQ ID NO: 3178729 - RNA, 22 nt, Human
cuuaguuugugaauugauuuug

SEQ ID NO: 3178730 - RNA, 14 nt, Human
cuuauagacaacau

SEQ ID NO: 3178731 - RNA, 17 nt, Human
cuuauauaugcacuuaa

SEQ ID NO: 3178732 - RNA, 22 nt, Human
cuuauauaugcacuuaauuugu

SEQ ID NO: 3178733 - RNA, 23 nt, Human
cuuauauaugcacuuaauuuguu

SEQ ID NO: 3178734 - RNA, 20 nt, Human
cuuagugggguuuuauaucc

SEQ ID NO: 3178735 - RNA, 18 nt, Human
cuuagugggguuuuauau

SEQ ID NO: 3178736 - RNA, 12 nt, Human
cuuaguggacag

SEQ ID NO: 3178737 - RNA, 18 nt, Human
cuuagucacugagacagc

SEQ ID NO: 3178738 - RNA, 19 nt, Human
cuuagucacugagacagcc

SEQ ID NO: 3178739 - RNA, 14 nt, Human
cuuagucacugaga

SEQ ID NO: 3178740 - RNA, 13 nt, Human
cuuagauguauau

SEQ ID NO: 3178741 - RNA, 16 nt, Human
cuuagucacugagaca

SEQ ID NO: 3178742 - RNA, 13 nt, Human
cuguucugguaau

SEQ ID NO: 3178743 - RNA, 16 nt, Human
cuguucuggcagaguu

SEQ ID NO: 3178744 - RNA, 18 nt, Human
cuguucugauauuaauuu

SEQ ID NO: 3178745 - RNA, 20 nt, Human
cuguucugauauuaauuuau

SEQ ID NO: 3178746 - RNA, 16 nt, Human
cuguucugcacacagc

SEQ ID NO: 3178747 - RNA, 15 nt, Human
cuuauuucauuucuu

SEQ ID NO: 3178748 - RNA, 18 nt, Human
cuuauuuguauuuuuccu

SEQ ID NO: 3178749 - RNA, 21 nt, Human
cuucaaaaguuuguuugcuua

SEQ ID NO: 3178750 - RNA, 21 nt, Human
cuucaaaauauaaaaugccaa

SEQ ID NO: 3178751 - RNA, 14 nt, Human
cuucaaaauauuga

SEQ ID NO: 3178752 - RNA, 22 nt, Human
cuucaaaauauugagcagaauu

SEQ ID NO: 3178753 - RNA, 17 nt, Human
cuucaaagcaaaugucu

SEQ ID NO: 3178754 - RNA, 13 nt, Human
cuucaaagucuca

SEQ ID NO: 3178755 - RNA, 16 nt, Human
cuucaaagucucaaug

SEQ ID NO: 3178756 - RNA, 20 nt, Human
cuucaaagucucaaugaaau

SEQ ID NO: 3178757 - RNA, 22 nt, Human
cuucaaagucucaaugaaauag

SEQ ID NO: 3178758 - RNA, 14 nt, Human
cuuauuucauuucu

SEQ ID NO: 3178759 - RNA, 23 nt, Human
cuuauuucacuuuaguuuuugaa

SEQ ID NO: 3178760 - RNA, 20 nt, Human
cuuaucucagauauuugcac

SEQ ID NO: 3178761 - RNA, 18 nt, Human
cuuauuuaaugaaagacu

SEQ ID NO: 3178762 - RNA, 17 nt, Human
cuuauuuaaugaaagac

SEQ ID NO: 3178763 - RNA, 15 nt, Human
cuuaucuagcugcau

SEQ ID NO: 3178764 - RNA, 19 nt, Human
cuuaucucagauauuugca

SEQ ID NO: 3178765 - RNA, 15 nt, Human
cuuaucucagauauu

SEQ ID NO: 3178766 - RNA, 20 nt, Human
cuuaucuagcugcauaucuu

SEQ ID NO: 3178767 - RNA, 23 nt, Human
cuucaaucaauaacagccgcucc

SEQ ID NO: 3178768 - RNA, 20 nt, Human
cuucaaucaauaacagccgc

SEQ ID NO: 3178769 - RNA, 23 nt, Human
cuucacagaugggugcuuggagg

SEQ ID NO: 3178770 - RNA, 13 nt, Human
cuucaaggauccu

SEQ ID NO: 3178771 - RNA, 15 nt, Human
cuucaaggauccuga

SEQ ID NO: 3178772 - RNA, 10 nt, Human
cuucaaggau

SEQ ID NO: 3178773 - RNA, 18 nt, Human
cuucaagcugcuuuuugu

SEQ ID NO: 3178774 - RNA, 16 nt, Human
cuucaaccauucccca

SEQ ID NO: 3178775 - RNA, 20 nt, Human
cuucaaccauuccccauggg

SEQ ID NO: 3178776 - RNA, 21 nt, Human
cuucuggugaccuuccaagag

SEQ ID NO: 3178777 - RNA, 14 nt, Human
cuucugguugaugc

SEQ ID NO: 3178778 - RNA, 20 nt, Human
cuucuggugaccuuccaaga

SEQ ID NO: 3178779 - RNA, 18 nt, Human
cuucuggugaccuuccaa

SEQ ID NO: 3178780 - RNA, 16 nt, Human
cuucuggguuccuucc

SEQ ID NO: 3178781 - RNA, 17 nt, Human
cuucuggguuccuuccu

SEQ ID NO: 3178782 - RNA, 23 nt, Human
cuucuggguuccuuccucugagc

SEQ ID NO: 3178783 - RNA, 23 nt, Human
cuucugccugaggggcagccugc

SEQ ID NO: 3178784 - RNA, 22 nt, Human
cuucugucuucacaacagauua

SEQ ID NO: 3178785 - RNA, 21 nt, Human
cuucugucuucacaacagauu

SEQ ID NO: 3178786 - RNA, 18 nt, Human
cuucugucuucacaacag

SEQ ID NO: 3178787 - RNA, 21 nt, Human
cuucuguccuacucuguguca

SEQ ID NO: 3178788 - RNA, 19 nt, Human
cuucuguccuacucugugu

SEQ ID NO: 3178789 - RNA, 18 nt, Human
cuucuguccuacucugug

SEQ ID NO: 3178790 - RNA, 17 nt, Human
cuucuguccuacucugu

SEQ ID NO: 3178791 - RNA, 16 nt, Human
cuucuguccuacucug

SEQ ID NO: 3178792 - RNA, 20 nt, Human
cuucuguacgucugacaggc

SEQ ID NO: 3178793 - RNA, 18 nt, Human
cuucuguacgucugacag

SEQ ID NO: 3178794 - RNA, 15 nt, Human
cuucuguacgucuga

SEQ ID NO: 3178795 - RNA, 14 nt, Human
cuucuguacgucug

SEQ ID NO: 3178796 - RNA, 21 nt, Human
cuucuguacgucugacaggca

SEQ ID NO: 3178797 - RNA, 14 nt, Human
cuucuguaauauuu

SEQ ID NO: 3178798 - RNA, 23 nt, Human
cuucucucucucucaaaauuaua

SEQ ID NO: 3178799 - RNA, 20 nt, Human
cuucugccauuucugagauc

SEQ ID NO: 3178800 - RNA, 13 nt, Human
cuucucugaagga

SEQ ID NO: 3178801 - RNA, 14 nt, Human
cuucucucugcucu

SEQ ID NO: 3178802 - RNA, 13 nt, Human
cuucucucugcuc

SEQ ID NO: 3178803 - RNA, 13 nt, Human
cuucucuccagcc

SEQ ID NO: 3178804 - RNA, 15 nt, Human
cuucucuccagcccc

SEQ ID NO: 3178805 - RNA, 17 nt, Human
cuucucuccagccccug

SEQ ID NO: 3178806 - RNA, 19 nt, Human
cuucucuccagccccugga

SEQ ID NO: 3178807 - RNA, 12 nt, Human
cuucucuccagc

SEQ ID NO: 3178808 - RNA, 20 nt, Human
cuucuccccuuccauuucug

SEQ ID NO: 3178809 - RNA, 19 nt, Human
cuucuccccuuccauuucu

SEQ ID NO: 3178810 - RNA, 14 nt, Human
cuucuccccuucca

SEQ ID NO: 3178811 - RNA, 15 nt, Human
cuucuccccuuccau

SEQ ID NO: 3178812 - RNA, 13 nt, Human
cuucuccaggcug

SEQ ID NO: 3178813 - RNA, 17 nt, Human
cuucucccccauccuac

SEQ ID NO: 3178814 - RNA, 12 nt, Human
cuucuccaggcu

SEQ ID NO: 3178815 - RNA, 17 nt, Human
cuucuccacuggaugga

SEQ ID NO: 3178816 - RNA, 11 nt, Human
cuucuccacuu

SEQ ID NO: 3178817 - RNA, 20 nt, Human
cuucuccacuuucuagccag

SEQ ID NO: 3178818 - RNA, 15 nt, Human
cuucuccacuggaug

SEQ ID NO: 3178819 - RNA, 14 nt, Human
cuucuccacuggau

SEQ ID NO: 3178820 - RNA, 13 nt, Human
cuucuccacugga

SEQ ID NO: 3178821 - RNA, 18 nt, Human
cuuccuggggcccaaaug

SEQ ID NO: 3178822 - RNA, 23 nt, Human
cuuccugggcacacgcugcucug

SEQ ID NO: 3178823 - RNA, 22 nt, Human
cuuccugggcacacgcugcucu

SEQ ID NO: 3178824 - RNA, 21 nt, Human
cuuccugggcacacgcugcuc

SEQ ID NO: 3178825 - RNA, 20 nt, Human
cuuccugggcacacgcugcu

SEQ ID NO: 3178826 - RNA, 21 nt, Human
cuuccugucaagcaaucaaga

SEQ ID NO: 3178827 - RNA, 17 nt, Human
cuuccuggucgaaaguu

SEQ ID NO: 3178828 - RNA, 23 nt, Human
cuuccuggccggugugggggccc

SEQ ID NO: 3178829 - RNA, 19 nt, Human
cuuccugggcacacgcugc

SEQ ID NO: 3178830 - RNA, 18 nt, Human
cuuccugggcacacgcug

SEQ ID NO: 3178831 - RNA, 17 nt, Human
cuucuuuuuuugugaug

SEQ ID NO: 3178832 - RNA, 14 nt, Human
cuugaaaacacugu

SEQ ID NO: 3178833 - RNA, 23 nt, Human
cuugaaaacacuguucucugccc

SEQ ID NO: 3178834 - RNA, 21 nt, Human
cuugaaaagagacaggcaggu

SEQ ID NO: 3178835 - RNA, 15 nt, Human
cuugaaaagagacag

SEQ ID NO: 3178836 - RNA, 18 nt, Human
cuugaaaagagacaggca

SEQ ID NO: 3178837 - RNA, 16 nt, Human
cuugaacauuaaucca

SEQ ID NO: 3178838 - RNA, 23 nt, Human
cuugaacauuaauccacauguuu

SEQ ID NO: 3178839 - RNA, 15 nt, Human
cuucuguccaagcag

SEQ ID NO: 3178840 - RNA, 13 nt, Human
cuucuguggcuca

SEQ ID NO: 3178841 - RNA, 20 nt, Human
cuucugugcccagaauacug

SEQ ID NO: 3178842 - RNA, 21 nt, Human
cuucugugcccagaauacuga

SEQ ID NO: 3178843 - RNA, 14 nt, Human
cuucugugcccaga

SEQ ID NO: 3178844 - RNA, 19 nt, Human
cuucugugcccagaauacu

SEQ ID NO: 3178845 - RNA, 14 nt, Human
cuucugugcaccug

SEQ ID NO: 3178846 - RNA, 15 nt, Human
cuucugugcaccugg

SEQ ID NO: 3178847 - RNA, 17 nt, Human
cuucugugcaccugggc

SEQ ID NO: 3178848 - RNA, 18 nt, Human
cuucugugcaccugggcu

SEQ ID NO: 3178849 - RNA, 21 nt, Human
cuucugugcaccugggcucuc

SEQ ID NO: 3178850 - RNA, 14 nt, Human
cuucuguggguuuc

SEQ ID NO: 3178851 - RNA, 21 nt, Human
cuucuguggguuucuaaagcu

SEQ ID NO: 3178852 - RNA, 13 nt, Human
cuucuguggguuu

SEQ ID NO: 3178853 - RNA, 22 nt, Human
cuucuguggcucacagaacccu

SEQ ID NO: 3178854 - RNA, 15 nt, Human
cuucuguggcucaca

SEQ ID NO: 3178855 - RNA, 17 nt, Human
cuucuguguuugaacug

SEQ ID NO: 3178856 - RNA, 23 nt, Human
cuucugugcccagaauacugaug

SEQ ID NO: 3178857 - RNA, 20 nt, Human
cuugaggguugggcuggugu

SEQ ID NO: 3178858 - RNA, 19 nt, Human
cuugaggguugggcuggug

SEQ ID NO: 3178859 - RNA, 21 nt, Human
cuugaguugauucagcucugc

SEQ ID NO: 3178860 - RNA, 21 nt, Human
cuugaggguugggcugguguc

SEQ ID NO: 3178861 - RNA, 13 nt, Human
cuugagcucagga

SEQ ID NO: 3178862 - RNA, 16 nt, Human
cuugagccugggaggu

SEQ ID NO: 3178863 - RNA, 19 nt, Human
cuugacguauuauuguccu

SEQ ID NO: 3178864 - RNA, 16 nt, Human
cuugaccugcugaagu

SEQ ID NO: 3178865 - RNA, 18 nt, Human
cuugaccucacucagaag

SEQ ID NO: 3178866 - RNA, 17 nt, Human
cuugaccgugaggccag

SEQ ID NO: 3178867 - RNA, 22 nt, Human
cuugaccauucuccaccugcca

SEQ ID NO: 3178868 - RNA, 23 nt, Human
cuugaccauucuccaccugccag

SEQ ID NO: 3178869 - RNA, 18 nt, Human
cuugaccgugaggccaga

SEQ ID NO: 3178870 - RNA, 20 nt, Human
cuugaccgugaggccagaga

SEQ ID NO: 3178871 - RNA, 21 nt, Human
cuugaccgugaggccagagac

SEQ ID NO: 3178872 - RNA, 13 nt, Human
cuugaccucaggu

SEQ ID NO: 3178873 - RNA, 13 nt, Human
cuugaacuccugg

SEQ ID NO: 3178874 - RNA, 13 nt, Human
cuugaacuccuga

SEQ ID NO: 3178875 - RNA, 16 nt, Human
cuugaacuccugaccu

SEQ ID NO: 3178876 - RNA, 14 nt, Human
cuugaaccauaaaa

SEQ ID NO: 3178877 - RNA, 17 nt, Human
cuugaaccauaaaaugu

SEQ ID NO: 3178878 - RNA, 20 nt, Human
cuugaacccgggaggcagag

SEQ ID NO: 3178879 - RNA, 18 nt, Human
cuugaacuccugaccuca

SEQ ID NO: 3178880 - RNA, 22 nt, Human
cugugucuugcaauggcagccu

SEQ ID NO: 3178881 - RNA, 20 nt, Human
cugugucuugcaauggcagc

SEQ ID NO: 3178882 - RNA, 21 nt, Human
cugugucuugcaauggcagcc

SEQ ID NO: 3178883 - RNA, 23 nt, Human
cugugggcgugagaccugccccu

SEQ ID NO: 3178884 - RNA, 21 nt, Human
cuguguguguguauguggggg

SEQ ID NO: 3178885 - RNA, 20 nt, Human
cugugugugcgccuacagga

SEQ ID NO: 3178886 - RNA, 18 nt, Human
cugugugugcgccuacag

SEQ ID NO: 3178887 - RNA, 16 nt, Human
cuguguguuuaugugu

SEQ ID NO: 3178888 - RNA, 17 nt, Human
cuguguguuuaugugug

SEQ ID NO: 3178889 - RNA, 17 nt, Human
cuguguuuacagagaug

SEQ ID NO: 3178890 - RNA, 16 nt, Human
cuguguguugccuggg

SEQ ID NO: 3178891 - RNA, 12 nt, Human
cuguguguuccu

SEQ ID NO: 3178892 - RNA, 13 nt, Human
cuguguguuccug

SEQ ID NO: 3178893 - RNA, 14 nt, Human
cuguguguuccugg

SEQ ID NO: 3178894 - RNA, 15 nt, Human
cuguguguuccuggc

SEQ ID NO: 3178895 - RNA, 23 nt, Human
cuguuaaaagaugaaaauauuug

SEQ ID NO: 3178896 - RNA, 21 nt, Human
cuguuaaaagaugaaaauauu

SEQ ID NO: 3178897 - RNA, 17 nt, Human
cuguuacaaaauguaac

SEQ ID NO: 3178898 - RNA, 23 nt, Human
cuguuaaaaugcaugauugcaga

SEQ ID NO: 3178899 - RNA, 14 nt, Human
cuguuaaaaugcau

SEQ ID NO: 3178900 - RNA, 13 nt, Human
cuguuaaaaugca

SEQ ID NO: 3178901 - RNA, 12 nt, Human
cuguuaaaaugc

SEQ ID NO: 3178902 - RNA, 11 nt, Human
cuguuaaaaug

SEQ ID NO: 3178903 - RNA, 20 nt, Human
cuguuaaaagaugaaaauau

SEQ ID NO: 3178904 - RNA, 19 nt, Human
cuguguuugcuccccuucc

SEQ ID NO: 3178905 - RNA, 14 nt, Human
cuguguuugcuccc

SEQ ID NO: 3178906 - RNA, 22 nt, Human
cuguguuugcuccccuuccccu

SEQ ID NO: 3178907 - RNA, 16 nt, Human
cuguguuuauauggaa

SEQ ID NO: 3178908 - RNA, 22 nt, Human
cuguguuuauauggaagaaagu

SEQ ID NO: 3178909 - RNA, 21 nt, Human
cuguguuuauucaaacugaaa

SEQ ID NO: 3178910 - RNA, 12 nt, Human
cuguguuuauuc

SEQ ID NO: 3178911 - RNA, 19 nt, Human
cuguguuugaacugaaguc

SEQ ID NO: 3178912 - RNA, 13 nt, Human
cuguucucugccc

SEQ ID NO: 3178913 - RNA, 14 nt, Human
cuguucucugcccu

SEQ ID NO: 3178914 - RNA, 15 nt, Human
cuguucucugcccuc

SEQ ID NO: 3178915 - RNA, 16 nt, Human
cuguucucugcccucc

SEQ ID NO: 3178916 - RNA, 17 nt, Human
cuguucucugcccucca

SEQ ID NO: 3178917 - RNA, 18 nt, Human
cuguucucugcccuccaa

SEQ ID NO: 3178918 - RNA, 19 nt, Human
cuguucucugcccuccaag

SEQ ID NO: 3178919 - RNA, 20 nt, Human
cuguucucugcccuccaaga

SEQ ID NO: 3178920 - RNA, 18 nt, Human
cuguucagcugguugagg

SEQ ID NO: 3178921 - RNA, 19 nt, Human
cuguucagcuuuuauuccu

SEQ ID NO: 3178922 - RNA, 17 nt, Human
cuguucagcuuuuauuc

SEQ ID NO: 3178923 - RNA, 13 nt, Human
cuguucagcuuuu

SEQ ID NO: 3178924 - RNA, 20 nt, Human
cuguuacucaaugugugccg

SEQ ID NO: 3178925 - RNA, 20 nt, Human
cuguucagcuuuuauuccug

SEQ ID NO: 3178926 - RNA, 19 nt, Human
cuguucagcugguugaggu

SEQ ID NO: 3178927 - RNA, 21 nt, Human
cuguucagcugguugagguuu

SEQ ID NO: 3178928 - RNA, 18 nt, Human
cuguuacacuuuuuggaa

SEQ ID NO: 3178929 - RNA, 22 nt, Human
cuguuacaaaauguaacuguua

SEQ ID NO: 3178930 - RNA, 19 nt, Human
cuguuacaaaauguaacug

SEQ ID NO: 3178931 - RNA, 18 nt, Human
cuguuacaaaauguaacu

SEQ ID NO: 3178932 - RNA, 19 nt, Human
cuguuacacuuuuuggaag

SEQ ID NO: 3178933 - RNA, 14 nt, Human
cuguuacaguaaug

SEQ ID NO: 3178934 - RNA, 15 nt, Human
cuguuacaguaaugu

SEQ ID NO: 3178935 - RNA, 20 nt, Human
cuguuacaguaaugucauaa

SEQ ID NO: 3178936 - RNA, 16 nt, Human
cuguuaccauuggaaa

SEQ ID NO: 3178937 - RNA, 19 nt, Human
cuguuaccauuggaaauuu

SEQ ID NO: 3178938 - RNA, 17 nt, Human
cuguuaccauuggaaau

SEQ ID NO: 3178939 - RNA, 21 nt, Human
cuguuaccucaacaagaagaa

SEQ ID NO: 3178940 - RNA, 22 nt, Human
cuguuaccucaacaagaagaau

SEQ ID NO: 3178941 - RNA, 22 nt, Human
cuguuaccauuggaaauuucac

SEQ ID NO: 3178942 - RNA, 21 nt, Human
cuguuaccauuggaaauuuca

SEQ ID NO: 3178943 - RNA, 18 nt, Human
cuguucccauucuugcau

SEQ ID NO: 3178944 - RNA, 18 nt, Human
cugucuccauguuugaug

SEQ ID NO: 3178945 - RNA, 19 nt, Human
cugugaggggcucucucau

SEQ ID NO: 3178946 - RNA, 23 nt, Human
cugucucaagagggcacuggugg

SEQ ID NO: 3178947 - RNA, 18 nt, Human
cugugauggggcccugcc

SEQ ID NO: 3178948 - RNA, 17 nt, Human
cugugauggggcccugc

SEQ ID NO: 3178949 - RNA, 20 nt, Human
cugugaguacuacaguccuc

SEQ ID NO: 3178950 - RNA, 21 nt, Human
cugugaguacuacaguccucc

SEQ ID NO: 3178951 - RNA, 23 nt, Human
cugugaguacuacaguccuccca

SEQ ID NO: 3178952 - RNA, 18 nt, Human
cugugccaugugccaggu

SEQ ID NO: 3178953 - RNA, 16 nt, Human
cugugccaugugccag

SEQ ID NO: 3178954 - RNA, 14 nt, Human
cugugccauuuugu

SEQ ID NO: 3178955 - RNA, 19 nt, Human
cugugauggggcccugccu

SEQ ID NO: 3178956 - RNA, 22 nt, Human
cugugaucccaguagaaaauau

SEQ ID NO: 3178957 - RNA, 17 nt, Human
cuguggaugauaaaaca

SEQ ID NO: 3178958 - RNA, 21 nt, Human
cugugggcgugagaccugccc

SEQ ID NO: 3178959 - RNA, 22 nt, Human
cugugggcgugagaccugcccc

SEQ ID NO: 3178960 - RNA, 14 nt, Human
cugugggcccccaa

SEQ ID NO: 3178961 - RNA, 16 nt, Human
cugugccucugggacu

SEQ ID NO: 3178962 - RNA, 14 nt, Human
cugugccucuggga

SEQ ID NO: 3178963 - RNA, 17 nt, Human
cugugccucugccuguc

SEQ ID NO: 3178964 - RNA, 21 nt, Human
cugugcugcccugcccaccug

SEQ ID NO: 3178965 - RNA, 17 nt, Human
cugugccucugggacug

SEQ ID NO: 3178966 - RNA, 22 nt, Human
cugugcugcccugcccaccugg

SEQ ID NO: 3178967 - RNA, 24 nt, Human
cuggggucaggccgggcagagcac

SEQ ID NO: 3178968 - RNA, 21 nt, Human
cuggggucaggccgggcagag

SEQ ID NO: 3178969 - RNA, 22 nt, Human
cuggguaacuagggaagauaau

SEQ ID NO: 3178970 - RNA, 20 nt, Human
cuggguaacuagggaagaua

SEQ ID NO: 3178971 - RNA, 14 nt, Human
cuggguucuaccca

SEQ ID NO: 3178972 - RNA, 15 nt, Human
cuggguucuacccag

SEQ ID NO: 3178973 - RNA, 16 nt, Human
cuggguucuacccagg

SEQ ID NO: 3178974 - RNA, 17 nt, Human
cuggguucuacccaggu

SEQ ID NO: 3178975 - RNA, 20 nt, Human
cugguacaauuucuuuuggu

SEQ ID NO: 3178976 - RNA, 19 nt, Human
cugguacaauuucuuuugg

SEQ ID NO: 3178977 - RNA, 21 nt, Human
cugguacaauuucuuuugguu

SEQ ID NO: 3178978 - RNA, 22 nt, Human
cugggggggauuguaaaauggu

SEQ ID NO: 3178979 - RNA, 18 nt, Human
cugggggcugggcagagg

SEQ ID NO: 3178980 - RNA, 19 nt, Human
cugggggcugggcagagga

SEQ ID NO: 3178981 - RNA, 15 nt, Human
cugggggaagaagcu

SEQ ID NO: 3178982 - RNA, 13 nt, Human
cugggggaugggc

SEQ ID NO: 3178983 - RNA, 18 nt, Human
cugggggaugggccugag

SEQ ID NO: 3178984 - RNA, 16 nt, Human
cugggggaugggccug

SEQ ID NO: 3178985 - RNA, 24 nt, Human
cugggcuucaguggcagcugcuuu

SEQ ID NO: 3178986 - RNA, 23 nt, Human
cugggcuucaguggcagcugcuu

SEQ ID NO: 3178987 - RNA, 13 nt, Human
cugggggaagaag

SEQ ID NO: 3178988 - RNA, 15 nt, Human
cuggggcugcuguga

SEQ ID NO: 3178989 - RNA, 13 nt, Human
cugguuccucccc

SEQ ID NO: 3178990 - RNA, 23 nt, Human
cuguaaucacagcuacuugggag

SEQ ID NO: 3178991 - RNA, 17 nt, Human
cuggugcugcaguaugu

SEQ ID NO: 3178992 - RNA, 16 nt, Human
cugguuccuaggggaa

SEQ ID NO: 3178993 - RNA, 20 nt, Human
cugguuccuaggggaaugag

SEQ ID NO: 3178994 - RNA, 23 nt, Human
cugguuccuaggggaaugagggg

SEQ ID NO: 3178995 - RNA, 12 nt, Human
cugguuccuccc

SEQ ID NO: 3178996 - RNA, 13 nt, Human
cuguacaaaguag

SEQ ID NO: 3178997 - RNA, 14 nt, Human
cuguaauuauuuga

SEQ ID NO: 3178998 - RNA, 15 nt, Human
cuguacaaaguagaa

SEQ ID NO: 3178999 - RNA, 20 nt, Human
cuguaauccuagcacuuugg

SEQ ID NO: 3179000 - RNA, 19 nt, Human
cuguaauccuagcacuuug

SEQ ID NO: 3179001 - RNA, 13 nt, Human
cuguaauauuuac

SEQ ID NO: 3179002 - RNA, 14 nt, Human
cuguaauauuuaca

SEQ ID NO: 3179003 - RNA, 15 nt, Human
cuguaauauuuacaa

SEQ ID NO: 3179004 - RNA, 18 nt, Human
cuguaauauuuacaaugu

SEQ ID NO: 3179005 - RNA, 21 nt, Human
cuguaauauuuacaauguauu

SEQ ID NO: 3179006 - RNA, 22 nt, Human
cuguaauauuuacaauguauua

SEQ ID NO: 3179007 - RNA, 21 nt, Human
cuguaauaacuagaacaaaua

SEQ ID NO: 3179008 - RNA, 17 nt, Human
cuguaaucuuguugaua

SEQ ID NO: 3179009 - RNA, 16 nt, Human
cuguaauguuaauaau

SEQ ID NO: 3179010 - RNA, 13 nt, Human
cugguggcagcug

SEQ ID NO: 3179011 - RNA, 23 nt, Human
cugguggcccgacagccuggcac

SEQ ID NO: 3179012 - RNA, 22 nt, Human
cugguggcccgacagccuggca

SEQ ID NO: 3179013 - RNA, 21 nt, Human
cugguggcccgacagccuggc

SEQ ID NO: 3179014 - RNA, 20 nt, Human
cugguggcccgacagccugg

SEQ ID NO: 3179015 - RNA, 21 nt, Human
cugguggcagcucaccucucc

SEQ ID NO: 3179016 - RNA, 23 nt, Human
cugguggcagcucaccucucccu

SEQ ID NO: 3179017 - RNA, 22 nt, Human
cuggugcugccacacuucaggc

SEQ ID NO: 3179018 - RNA, 20 nt, Human
cuggugcugccacacuucag

SEQ ID NO: 3179019 - RNA, 13 nt, Human
cuggugcugccac

SEQ ID NO: 3179020 - RNA, 12 nt, Human
cuggugcugcca

SEQ ID NO: 3179021 - RNA, 18 nt, Human
cuggucacaggacucugc

SEQ ID NO: 3179022 - RNA, 19 nt, Human
cugguccuaggcuggaagg

SEQ ID NO: 3179023 - RNA, 20 nt, Human
cugguccuaggcuggaagga

SEQ ID NO: 3179024 - RNA, 17 nt, Human
cuguccccgcacugggc

SEQ ID NO: 3179025 - RNA, 18 nt, Human
cuguccccgcacugggcu

SEQ ID NO: 3179026 - RNA, 19 nt, Human
cuguccccgcacugggcuu

SEQ ID NO: 3179027 - RNA, 22 nt, Human
cuguccccgcacugggcuuggg

SEQ ID NO: 3179028 - RNA, 14 nt, Human
cuguccgagcuuug

SEQ ID NO: 3179029 - RNA, 20 nt, Human
cugucccuuacgugaguccu

SEQ ID NO: 3179030 - RNA, 15 nt, Human
cuguccgagcuuuga

SEQ ID NO: 3179031 - RNA, 14 nt, Human
cuguccuacccacc

SEQ ID NO: 3179032 - RNA, 22 nt, Human
cuguccguaguaucagagaugu

SEQ ID NO: 3179033 - RNA, 18 nt, Human
cugucucaaaaaaagaaa

SEQ ID NO: 3179034 - RNA, 22 nt, Human
cugucucaagagggcacuggug

SEQ ID NO: 3179035 - RNA, 16 nt, Human
cugucucaaaaaaaga

SEQ ID NO: 3179036 - RNA, 23 nt, Human
cugucucaaaaaaacacaaaagu

SEQ ID NO: 3179037 - RNA, 17 nt, Human
cugucuagcacuuccuu

SEQ ID NO: 3179038 - RNA, 16 nt, Human
cugucuagcacuuccu

SEQ ID NO: 3179039 - RNA, 23 nt, Human
cugucuagcacuuccuugccagu

SEQ ID NO: 3179040 - RNA, 21 nt, Human
cugucuagcacuuccuugcca

SEQ ID NO: 3179041 - RNA, 20 nt, Human
cugucuagcacuuccuugcc

SEQ ID NO: 3179042 - RNA, 18 nt, Human
cugucuagcacuuccuug

SEQ ID NO: 3179043 - RNA, 22 nt, Human
cuguaucccaugagccucagca

SEQ ID NO: 3179044 - RNA, 23 nt, Human
cuguaucccaugagccucagcau

SEQ ID NO: 3179045 - RNA, 13 nt, Human
cuguaucugugcu

SEQ ID NO: 3179046 - RNA, 23 nt, Human
cuguccaggcacugcugcccagc

SEQ ID NO: 3179047 - RNA, 14 nt, Human
cugucaaggcucag

SEQ ID NO: 3179048 - RNA, 13 nt, Human
cugucaaggcuca

SEQ ID NO: 3179049 - RNA, 23 nt, Human
cugucaaacauuaguacuuuaua

SEQ ID NO: 3179050 - RNA, 22 nt, Human
cugucaaacauuaguacuuuau

SEQ ID NO: 3179051 - RNA, 21 nt, Human
cugucaaacauuaguacuuua

SEQ ID NO: 3179052 - RNA, 20 nt, Human
cugucaaacauuaguacuuu

SEQ ID NO: 3179053 - RNA, 15 nt, Human
cugucaaacauuagu

SEQ ID NO: 3179054 - RNA, 13 nt, Human
cugucaaacauua

SEQ ID NO: 3179055 - RNA, 12 nt, Human
cugucaaacauu

SEQ ID NO: 3179056 - RNA, 16 nt, Human
cuguauacguuucaaa

SEQ ID NO: 3179057 - RNA, 21 nt, Human
cuguauaauacuuuguauaca

SEQ ID NO: 3179058 - RNA, 21 nt, Human
cuguauagacaggagaagaaa

SEQ ID NO: 3179059 - RNA, 12 nt, Human
cuguauauuugu

SEQ ID NO: 3179060 - RNA, 21 nt, Human
cuguauaucaggguacaaaaa

SEQ ID NO: 3179061 - RNA, 15 nt, Human
cuguauauuuguaug

SEQ ID NO: 3179062 - RNA, 16 nt, Human
cuguauauuuguauga

SEQ ID NO: 3179063 - RNA, 19 nt, Human
cuguauauuuguaugauau

SEQ ID NO: 3179064 - RNA, 21 nt, Human
cuguauauuuguaugauauuu

SEQ ID NO: 3179065 - RNA, 13 nt, Human
cuguacagagccc

SEQ ID NO: 3179066 - RNA, 15 nt, Human
cuguacaaugacuuu

SEQ ID NO: 3179067 - RNA, 11 nt, Human
cugcugggcuu

SEQ ID NO: 3179068 - RNA, 23 nt, Human
cugcugguucaggguuggccccu

SEQ ID NO: 3179069 - RNA, 15 nt, Human
cugcugguucagggu

SEQ ID NO: 3179070 - RNA, 13 nt, Human
cugcugguucagg

SEQ ID NO: 3179071 - RNA, 19 nt, Human
cugcuuccagugaggcucu

SEQ ID NO: 3179072 - RNA, 20 nt, Human
cugcuuccagugaggcucug

SEQ ID NO: 3179073 - RNA, 21 nt, Human
cugcuuccagugaggcucugc

SEQ ID NO: 3179074 - RNA, 23 nt, Human
cugcuuccagugaggcucugccc

SEQ ID NO: 3179075 - RNA, 16 nt, Human
cugcuuccagugaggc

SEQ ID NO: 3179076 - RNA, 18 nt, Human
cugcuuccagugaggcuc

SEQ ID NO: 3179077 - RNA, 15 nt, Human
cugcuuccagugagg

SEQ ID NO: 3179078 - RNA, 14 nt, Human
cugcugcuggcugg

SEQ ID NO: 3179079 - RNA, 15 nt, Human
cugcugcuggcuggu

SEQ ID NO: 3179080 - RNA, 17 nt, Human
cugcugcuucauguuug

SEQ ID NO: 3179081 - RNA, 20 nt, Human
cugcuggccggacacccgac

SEQ ID NO: 3179082 - RNA, 18 nt, Human
cugcugaaacaacaaaua

SEQ ID NO: 3179083 - RNA, 21 nt, Human
cugcucuccucuugccacugc

SEQ ID NO: 3179084 - RNA, 18 nt, Human
cugcugaaggaauaaauu

SEQ ID NO: 3179085 - RNA, 17 nt, Human
cugcugaaggaauaaau

SEQ ID NO: 3179086 - RNA, 11 nt, Human
cugcugaaggc

SEQ ID NO: 3179087 - RNA, 14 nt, Human
cugcugcagagcag

SEQ ID NO: 3179088 - RNA, 15 nt, Human
cugcugcagagcagu

SEQ ID NO: 3179089 - RNA, 21 nt, Human
cugcugcagagcaguaaggga

SEQ ID NO: 3179090 - RNA, 15 nt, Human
cugcugcaguugcca

SEQ ID NO: 3179091 - RNA, 16 nt, Human
cugcugccaugaacug

SEQ ID NO: 3179092 - RNA, 18 nt, Human
cugcugccaguaccagcc

SEQ ID NO: 3179093 - RNA, 11 nt, Human
cugcugccagu

SEQ ID NO: 3179094 - RNA, 21 nt, Human
cugcugccaugaacugucaag

SEQ ID NO: 3179095 - RNA, 15 nt, Human
cugcugcccagccuc

SEQ ID NO: 3179096 - RNA, 12 nt, Human
cugcugcccagc

SEQ ID NO: 3179097 - RNA, 22 nt, Human
cugcugcccagccuccaagcuc

SEQ ID NO: 3179098 - RNA, 19 nt, Human
cugcucuccgaccagacac

SEQ ID NO: 3179099 - RNA, 20 nt, Human
cugcucuccucuugccacug

SEQ ID NO: 3179100 - RNA, 14 nt, Human
cugcucuccucuug

SEQ ID NO: 3179101 - RNA, 19 nt, Human
cugcuccagcuguucagcu

SEQ ID NO: 3179102 - RNA, 16 nt, Human
cugcgaggcuaugagu

SEQ ID NO: 3179103 - RNA, 20 nt, Human
cugcuccagcuguucagcug

SEQ ID NO: 3179104 - RNA, 15 nt, Human
cugcuccagcuguuc

SEQ ID NO: 3179105 - RNA, 19 nt, Human
cugcgaccacaagaaggau

SEQ ID NO: 3179106 - RNA, 20 nt, Human
cugccuuggggucagguuga

SEQ ID NO: 3179107 - RNA, 19 nt, Human
cugccuuggggucagguug

SEQ ID NO: 3179108 - RNA, 22 nt, Human
cugccuuggggucagguugaca

SEQ ID NO: 3179109 - RNA, 14 nt, Human
cugccgcagcccug

SEQ ID NO: 3179110 - RNA, 15 nt, Human
cugccgcagcccugc

SEQ ID NO: 3179111 - RNA, 21 nt, Human
cugcccuuucugggcaccggg

SEQ ID NO: 3179112 - RNA, 14 nt, Human
cugcccuuuguccu

SEQ ID NO: 3179113 - RNA, 23 nt, Human
cugcccuuuguccuccugcugcc

SEQ ID NO: 3179114 - RNA, 20 nt, Human
cugcccuuuguccuccugcu

SEQ ID NO: 3179115 - RNA, 18 nt, Human
cugcccuuuguccuccug

SEQ ID NO: 3179116 - RNA, 17 nt, Human
cugccgcagcccugcag

SEQ ID NO: 3179117 - RNA, 18 nt, Human
cugccgcagcccugcaga

SEQ ID NO: 3179118 - RNA, 20 nt, Human
cugcccugcgggucacagga

SEQ ID NO: 3179119 - RNA, 14 nt, Human
cugcccugcuguuu

SEQ ID NO: 3179120 - RNA, 22 nt, Human
cugcccugcugagucccaggcu

SEQ ID NO: 3179121 - RNA, 12 nt, Human
cugcccuccaag

SEQ ID NO: 3179122 - RNA, 14 nt, Human
cucccuucccaccu

SEQ ID NO: 3179123 - RNA, 15 nt, Human
cucccuucccaccuc

SEQ ID NO: 3179124 - RNA, 16 nt, Human
cucccuucccaccucu

SEQ ID NO: 3179125 - RNA, 17 nt, Human
cucccuucccaccucuc

SEQ ID NO: 3179126 - RNA, 15 nt, Human
cugccucuucucuac

SEQ ID NO: 3179127 - RNA, 14 nt, Human
cugccucuucucua

SEQ ID NO: 3179128 - RNA, 17 nt, Human
cugccugcccaggcccc

SEQ ID NO: 3179129 - RNA, 16 nt, Human
cugccugcccaggccc

SEQ ID NO: 3179130 - RNA, 15 nt, Human
cugccugcccaggcc

SEQ ID NO: 3179131 - RNA, 15 nt, Human
cugccugaagucaca

SEQ ID NO: 3179132 - RNA, 21 nt, Human
cugccugggaucccucauccu

SEQ ID NO: 3179133 - RNA, 17 nt, Human
cugccuugcccacuccu

SEQ ID NO: 3179134 - RNA, 20 nt, Human
cugccuugcccacuccugcu

SEQ ID NO: 3179135 - RNA, 18 nt, Human
cugccuugcccacuccug

SEQ ID NO: 3179136 - RNA, 22 nt, Human
cugccuugcccacuccugcucu

SEQ ID NO: 3179137 - RNA, 20 nt, Human
cugccugcccaggccccugc

SEQ ID NO: 3179138 - RNA, 23 nt, Human
cugccucugacacacagcucugu

SEQ ID NO: 3179139 - RNA, 22 nt, Human
cugccucugacacacagcucug

SEQ ID NO: 3179140 - RNA, 14 nt, Human
cugccuaacaaaau

SEQ ID NO: 3179141 - RNA, 20 nt, Human
cugccuaaauccacucugca

SEQ ID NO: 3179142 - RNA, 11 nt, Human
cugccucccau

SEQ ID NO: 3179143 - RNA, 12 nt, Human
cugccucccauc

SEQ ID NO: 3179144 - RNA, 14 nt, Human
cugccucccaucac

SEQ ID NO: 3179145 - RNA, 16 nt, Human
cugccucccaucaccc

SEQ ID NO: 3179146 - RNA, 19 nt, Human
cugccucccaucacccgcu

SEQ ID NO: 3179147 - RNA, 16 nt, Human
cugcuuccuauaauuu

SEQ ID NO: 3179148 - RNA, 14 nt, Human
cugcuuccucagag

SEQ ID NO: 3179149 - RNA, 20 nt, Human
cugcuuccuauaauuuugau

SEQ ID NO: 3179150 - RNA, 12 nt, Human
cuggaccccagc

SEQ ID NO: 3179151 - RNA, 18 nt, Human
cuggaccccaucugugaa

SEQ ID NO: 3179152 - RNA, 17 nt, Human
cuggaccccaucuguga

SEQ ID NO: 3179153 - RNA, 16 nt, Human
cuggaccccagccuca

SEQ ID NO: 3179154 - RNA, 15 nt, Human
cuggaccccagccuc

SEQ ID NO: 3179155 - RNA, 14 nt, Human
cuggaccccagccu

SEQ ID NO: 3179156 - RNA, 13 nt, Human
cuggaccccagcc

SEQ ID NO: 3179157 - RNA, 17 nt, Human
cuggacaggcauguucu

SEQ ID NO: 3179158 - RNA, 14 nt, Human
cuggacaggcaugu

SEQ ID NO: 3179159 - RNA, 23 nt, Human
cuggacaggcauguucucugagg

SEQ ID NO: 3179160 - RNA, 14 nt, Human
cuggacaggccagg

SEQ ID NO: 3179161 - RNA, 20 nt, Human
cuggaccuugaacuggguac

SEQ ID NO: 3179162 - RNA, 17 nt, Human
cuggaccuugaacuggg

SEQ ID NO: 3179163 - RNA, 21 nt, Human
cuggaccuugaacuggguacu

SEQ ID NO: 3179164 - RNA, 19 nt, Human
cuggacuccucuguccagg

SEQ ID NO: 3179165 - RNA, 18 nt, Human
cuggacuccucuguccag

SEQ ID NO: 3179166 - RNA, 17 nt, Human
cuggacuccucugucca

SEQ ID NO: 3179167 - RNA, 14 nt, Human
cuggacuccucugu

SEQ ID NO: 3179168 - RNA, 15 nt, Human
cuggacccuguggau

SEQ ID NO: 3179169 - RNA, 17 nt, Human
cuggaccccagccucaa

SEQ ID NO: 3179170 - RNA, 22 nt, Human
cuggaccccaucugugaauaag

SEQ ID NO: 3179171 - RNA, 20 nt, Human
cuggaccccaucugugaaua

SEQ ID NO: 3179172 - RNA, 19 nt, Human
cuggaccccaucugugaau

SEQ ID NO: 3179173 - RNA, 16 nt, Human
cuggaccuugaacugg

SEQ ID NO: 3179174 - RNA, 12 nt, Human
cuggagguuugu

SEQ ID NO: 3179175 - RNA, 17 nt, Human
cuggagguuuguuuaga

SEQ ID NO: 3179176 - RNA, 17 nt, Human
cuggagugcagugagcc

SEQ ID NO: 3179177 - RNA, 16 nt, Human
cuggagugcagugagc

SEQ ID NO: 3179178 - RNA, 15 nt, Human
cuggagugcagugag

SEQ ID NO: 3179179 - RNA, 14 nt, Human
cuggagugcaguga

SEQ ID NO: 3179180 - RNA, 17 nt, Human
cuggagguacgaaaaga

SEQ ID NO: 3179181 - RNA, 22 nt, Human
cuggagguacgaaaagagggga

SEQ ID NO: 3179182 - RNA, 12 nt, Human
cuggagcucugc

SEQ ID NO: 3179183 - RNA, 13 nt, Human
cuggagcucugcc

SEQ ID NO: 3179184 - RNA, 16 nt, Human
cuggagcucugcccau

SEQ ID NO: 3179185 - RNA, 15 nt, Human
cuggacucccucaag

SEQ ID NO: 3179186 - RNA, 21 nt, Human
cuggccaguggcuggaucugu

SEQ ID NO: 3179187 - RNA, 15 nt, Human
cuggcccacugcauc

SEQ ID NO: 3179188 - RNA, 14 nt, Human
cuggccagaugcac

SEQ ID NO: 3179189 - RNA, 22 nt, Human
cuggcacaguuuucugagaaag

SEQ ID NO: 3179190 - RNA, 21 nt, Human
cuggcacaguuuucugagaaa

SEQ ID NO: 3179191 - RNA, 20 nt, Human
cuggcacaguuuucugagaa

SEQ ID NO: 3179192 - RNA, 20 nt, Human
cuggagugcagugagccgag

SEQ ID NO: 3179193 - RNA, 19 nt, Human
cuggcacccggccccugcu

SEQ ID NO: 3179194 - RNA, 21 nt, Human
cuggcacccggccccugcugg

SEQ ID NO: 3179195 - RNA, 20 nt, Human
cuggcacccggccccugcug

SEQ ID NO: 3179196 - RNA, 19 nt, Human
cuggcacugcuuccaguga

SEQ ID NO: 3179197 - RNA, 20 nt, Human
cuggcacugcuuccagugag

SEQ ID NO: 3179198 - RNA, 23 nt, Human
cuggcacugcuuccagugaggcu

SEQ ID NO: 3179199 - RNA, 18 nt, Human
cuggcacugcuuccagug

SEQ ID NO: 3179200 - RNA, 14 nt, Human
cuggcacuuggaga

SEQ ID NO: 3179201 - RNA, 21 nt, Human
cuggcacuuggagacuuguau

SEQ ID NO: 3179202 - RNA, 23 nt, Human
cuggcugcagagcagugggccug

SEQ ID NO: 3179203 - RNA, 20 nt, Human
cuggcucuuccaggcuggga

SEQ ID NO: 3179204 - RNA, 24 nt, Human
cuggcucuuccaggcugggagagc

SEQ ID NO: 3179205 - RNA, 21 nt, Human
cuggcucuuccaggcugggag

SEQ ID NO: 3179206 - RNA, 22 nt, Human
cuggcucuuccaggcugggaga

SEQ ID NO: 3179207 - RNA, 23 nt, Human
cuggccuucggccuccauccuga

SEQ ID NO: 3179208 - RNA, 20 nt, Human
cuggccuugggauccaggcc

SEQ ID NO: 3179209 - RNA, 19 nt, Human
cuggccuugggauccaggc

SEQ ID NO: 3179210 - RNA, 15 nt, Human
cuggccuuguggucc

SEQ ID NO: 3179211 - RNA, 22 nt, Human
cuggccuugggauccaggcccc

SEQ ID NO: 3179212 - RNA, 15 nt, Human
cuggcgugcaguggu

SEQ ID NO: 3179213 - RNA, 14 nt, Human
cuggcgugcagugg

SEQ ID NO: 3179214 - RNA, 22 nt, Human
cuggccuucggccuccauccug

SEQ ID NO: 3179215 - RNA, 18 nt, Human
cuggccugucugugaaga

SEQ ID NO: 3179216 - RNA, 13 nt, Human
cuggccugucugu

SEQ ID NO: 3179217 - RNA, 18 nt, Human
cuggccuggggucaggcc

SEQ ID NO: 3179218 - RNA, 16 nt, Human
cuggccuggggucagg

SEQ ID NO: 3179219 - RNA, 24 nt, Human
cuggccuggccccucagggucccu

SEQ ID NO: 3179220 - RNA, 19 nt, Human
cuggccuggccccucaggg

SEQ ID NO: 3179221 - RNA, 18 nt, Human
cuggccucugcacucccc

SEQ ID NO: 3179222 - RNA, 20 nt, Human
cuggccucugcacuccccug

SEQ ID NO: 3179223 - RNA, 21 nt, Human
cuggccucugcacuccccugc

SEQ ID NO: 3179224 - RNA, 16 nt, Human
cuggccucugcacucc

SEQ ID NO: 3179225 - RNA, 13 nt, Human
cuggcccaucaug

SEQ ID NO: 3179226 - RNA, 17 nt, Human
cuggccccacaccagcc

SEQ ID NO: 3179227 - RNA, 12 nt, Human
cuggccccacac

SEQ ID NO: 3179228 - RNA, 21 nt, Human
cuggcccauguauggccagga

SEQ ID NO: 3179229 - RNA, 19 nt, Human
cuggcccauguauggccag

SEQ ID NO: 3179230 - RNA, 20 nt, Human
ccauuuuuuauauuucaagu

SEQ ID NO: 3179231 - RNA, 13 nt, Human
cccaacacgggua

SEQ ID NO: 3179232 - RNA, 14 nt, Human
ccauuuuuuauauu

SEQ ID NO: 3179233 - RNA, 17 nt, Human
ccauuuuuuauauuuca

SEQ ID NO: 3179234 - RNA, 16 nt, Human
ccauuuuuuauauuuc

SEQ ID NO: 3179235 - RNA, 14 nt, Human
ccauuuuuacaagu

SEQ ID NO: 3179236 - RNA, 23 nt, Human
ccauuuuucccaggcaaauaaaa

SEQ ID NO: 3179237 - RNA, 20 nt, Human
ccauuuugcugucccuuuuc

SEQ ID NO: 3179238 - RNA, 13 nt, Human
ccauuuuccugca

SEQ ID NO: 3179239 - RNA, 21 nt, Human
ccauuuuguauuuuacuaaua

SEQ ID NO: 3179240 - RNA, 12 nt, Human
cccaagggccug

SEQ ID NO: 3179241 - RNA, 14 nt, Human
cccaagggccuggc

SEQ ID NO: 3179242 - RNA, 16 nt, Human
cccaagggccuggccu

SEQ ID NO: 3179243 - RNA, 22 nt, Human
cccaagguucugggugcaggag

SEQ ID NO: 3179244 - RNA, 21 nt, Human
cccaagguucugggugcagga

SEQ ID NO: 3179245 - RNA, 13 nt, Human
cccacaggaucag

SEQ ID NO: 3179246 - RNA, 17 nt, Human
cccacaggaucagucug

SEQ ID NO: 3179247 - RNA, 19 nt, Human
cccacauagugaugguucc

SEQ ID NO: 3179248 - RNA, 18 nt, Human
cccacaggcccuuccucu

SEQ ID NO: 3179249 - RNA, 16 nt, Human
cccacaggcccuuccu

SEQ ID NO: 3179250 - RNA, 23 nt, Human
cccacaguauauuuuauuucaau

SEQ ID NO: 3179251 - RNA, 16 nt, Human
cccagaaugaggcugc

SEQ ID NO: 3179252 - RNA, 14 nt, Human
cccagaauacugau

SEQ ID NO: 3179253 - RNA, 14 nt, Human
cccagaagugcaga

SEQ ID NO: 3179254 - RNA, 22 nt, Human
cccagaauaaacuggcagcuca

SEQ ID NO: 3179255 - RNA, 24 nt, Human
cccagaauaaacuggcagcucagc

SEQ ID NO: 3179256 - RNA, 21 nt, Human
cccacgcuggagugcagugag

SEQ ID NO: 3179257 - RNA, 21 nt, Human
cccacgcugacuacagggccg

SEQ ID NO: 3179258 - RNA, 15 nt, Human
cccaccuuggcugca

SEQ ID NO: 3179259 - RNA, 14 nt, Human
cccaccuuggcugc

SEQ ID NO: 3179260 - RNA, 22 nt, Human
cccaccuuggcucaaguccucu

SEQ ID NO: 3179261 - RNA, 15 nt, Human
cccaccuuggcucaa

SEQ ID NO: 3179262 - RNA, 15 nt, Human
cccacgcccccacug

SEQ ID NO: 3179263 - RNA, 14 nt, Human
cccacgcugacuac

SEQ ID NO: 3179264 - RNA, 20 nt, Human
cccacgcugacuacagggcc

SEQ ID NO: 3179265 - RNA, 19 nt, Human
cccacgcugacuacagggc

SEQ ID NO: 3179266 - RNA, 16 nt, Human
cccacgcugacuacag

SEQ ID NO: 3179267 - RNA, 17 nt, Human
cccacgcccccacuggu

SEQ ID NO: 3179268 - RNA, 19 nt, Human
cccacgcccccacugguga

SEQ ID NO: 3179269 - RNA, 14 nt, Human
cccaccucucucac

SEQ ID NO: 3179270 - RNA, 17 nt, Human
cccaccucucucacucc

SEQ ID NO: 3179271 - RNA, 13 nt, Human
cccaccucucuca

SEQ ID NO: 3179272 - RNA, 21 nt, Human
cccaccucagccucccaaagu

SEQ ID NO: 3179273 - RNA, 12 nt, Human
cccaccuuggcu

SEQ ID NO: 3179274 - RNA, 15 nt, Human
cccaccucagccucc

SEQ ID NO: 3179275 - RNA, 14 nt, Human
cccaccucagccuc

SEQ ID NO: 3179276 - RNA, 12 nt, Human
cccaccucagcc

SEQ ID NO: 3179277 - RNA, 22 nt, Human
cccacauccggggccagcuccg

SEQ ID NO: 3179278 - RNA, 19 nt, Human
cccacauggugauguugac

SEQ ID NO: 3179279 - RNA, 18 nt, Human
cccacaugccaggggccu

SEQ ID NO: 3179280 - RNA, 12 nt, Human
cccacaugccag

SEQ ID NO: 3179281 - RNA, 13 nt, Human
ccauuugcuccuu

SEQ ID NO: 3179282 - RNA, 11 nt, Human
ccauuuuccug

SEQ ID NO: 3179283 - RNA, 18 nt, Human
ccauuuggagggccuggg

SEQ ID NO: 3179284 - RNA, 15 nt, Human
ccauucugccugccc

SEQ ID NO: 3179285 - RNA, 13 nt, Human
ccauuucugccuu

SEQ ID NO: 3179286 - RNA, 14 nt, Human
ccauuucugccuuu

SEQ ID NO: 3179287 - RNA, 20 nt, Human
ccauucguacauaauacuga

SEQ ID NO: 3179288 - RNA, 21 nt, Human
ccauuauuaucaaguagacua

SEQ ID NO: 3179289 - RNA, 21 nt, Human
ccauucguacauaauacugaa

SEQ ID NO: 3179290 - RNA, 18 nt, Human
ccauguuuuguuuacggu

SEQ ID NO: 3179291 - RNA, 12 nt, Human
ccauuaauuuaa

SEQ ID NO: 3179292 - RNA, 15 nt, Human
ccauuaauuuaaaug

SEQ ID NO: 3179293 - RNA, 14 nt, Human
ccauuaccaaaaua

SEQ ID NO: 3179294 - RNA, 14 nt, Human
ccauuaacugcuuc

SEQ ID NO: 3179295 - RNA, 14 nt, Human
ccauuaaagucaga

SEQ ID NO: 3179296 - RNA, 19 nt, Human
ccauuaaagucagaaguuu

SEQ ID NO: 3179297 - RNA, 18 nt, Human
ccauuaaaauaugcacua

SEQ ID NO: 3179298 - RNA, 14 nt, Human
ccaucucugcucca

SEQ ID NO: 3179299 - RNA, 13 nt, Human
ccaucucugcucc

SEQ ID NO: 3179300 - RNA, 15 nt, Human
ccaucugugaauaag

SEQ ID NO: 3179301 - RNA, 14 nt, Human
ccaucugugaauaa

SEQ ID NO: 3179302 - RNA, 16 nt, Human
ccaucugguuuucucu

SEQ ID NO: 3179303 - RNA, 12 nt, Human
ccaucugugaau

SEQ ID NO: 3179304 - RNA, 15 nt, Human
ccaggcccucugccc

SEQ ID NO: 3179305 - RNA, 23 nt, Human
ccaggcugggagagccuuccagg

SEQ ID NO: 3179306 - RNA, 22 nt, Human
ccaggcuuagucacugagacag

SEQ ID NO: 3179307 - RNA, 23 nt, Human
ccaggcuuagucacugagacagc

SEQ ID NO: 3179308 - RNA, 21 nt, Human
ccaggcuuagucacugagaca

SEQ ID NO: 3179309 - RNA, 16 nt, Human
ccaggccacuggcccc

SEQ ID NO: 3179310 - RNA, 21 nt, Human
ccaggccacaagacccuugug

SEQ ID NO: 3179311 - RNA, 20 nt, Human
ccaggaggccagccuugacc

SEQ ID NO: 3179312 - RNA, 15 nt, Human
ccaggaggccagccu

SEQ ID NO: 3179313 - RNA, 18 nt, Human
ccaggaggccagccuuga

SEQ ID NO: 3179314 - RNA, 14 nt, Human
ccaggaggccagcc

SEQ ID NO: 3179315 - RNA, 23 nt, Human
ccaggccacuggccccugagauc

SEQ ID NO: 3179316 - RNA, 13 nt, Human
ccaggcccucugc

SEQ ID NO: 3179317 - RNA, 14 nt, Human
ccaggcccucugcc

SEQ ID NO: 3179318 - RNA, 16 nt, Human
ccaggccccugccacc

SEQ ID NO: 3179319 - RNA, 15 nt, Human
ccaggccccugccac

SEQ ID NO: 3179320 - RNA, 14 nt, Human
ccaggccccugcca

SEQ ID NO: 3179321 - RNA, 16 nt, Human
ccagggcccgggaagc

SEQ ID NO: 3179322 - RNA, 23 nt, Human
ccagguuuuguuccgcccagugg

SEQ ID NO: 3179323 - RNA, 20 nt, Human
ccagguuuuguuccgcccag

SEQ ID NO: 3179324 - RNA, 23 nt, Human
ccagguuuugcacucuuguuucu

SEQ ID NO: 3179325 - RNA, 23 nt, Human
ccagugaccuggaaggcccagca

SEQ ID NO: 3179326 - RNA, 20 nt, Human
ccagugaccuggaaggccca

SEQ ID NO: 3179327 - RNA, 12 nt, Human
ccagugaccugg

SEQ ID NO: 3179328 - RNA, 15 nt, Human
ccaguggcagggcac

SEQ ID NO: 3179329 - RNA, 18 nt, Human
ccaguggcagggcacagg

SEQ ID NO: 3179330 - RNA, 16 nt, Human
ccaguggcagggcaca

SEQ ID NO: 3179331 - RNA, 18 nt, Human
ccaguggcuauggccugu

SEQ ID NO: 3179332 - RNA, 14 nt, Human
ccaguggcagggca

SEQ ID NO: 3179333 - RNA, 22 nt, Human
ccaguggcggaagugaccgcac

SEQ ID NO: 3179334 - RNA, 23 nt, Human
ccaguggcagggcacagggccug

SEQ ID NO: 3179335 - RNA, 22 nt, Human
ccaguggcagggcacagggccu

SEQ ID NO: 3179336 - RNA, 21 nt, Human
ccaguggcagggcacagggcc

SEQ ID NO: 3179337 - RNA, 20 nt, Human
ccaguggcagggcacagggc

SEQ ID NO: 3179338 - RNA, 19 nt, Human
ccaguggcagggcacaggg

SEQ ID NO: 3179339 - RNA, 12 nt, Human
ccaggugccagu

SEQ ID NO: 3179340 - RNA, 21 nt, Human
ccaggugcuaggaacacuccu

SEQ ID NO: 3179341 - RNA, 21 nt, Human
ccagguggccacuccagaccc

SEQ ID NO: 3179342 - RNA, 16 nt, Human
ccagguggccacucca

SEQ ID NO: 3179343 - RNA, 17 nt, Human
ccagguagaacgccagg

SEQ ID NO: 3179344 - RNA, 19 nt, Human
ccagguuuaaguagauuuc

SEQ ID NO: 3179345 - RNA, 22 nt, Human
ccagguuuaaguagauuucaug

SEQ ID NO: 3179346 - RNA, 18 nt, Human
ccagguuuugcacucuug

SEQ ID NO: 3179347 - RNA, 13 nt, Human
ccagguuuaagcu

SEQ ID NO: 3179348 - RNA, 16 nt, Human
ccagguuucuaugugu

SEQ ID NO: 3179349 - RNA, 20 nt, Human
ccagguggagguggcauccc

SEQ ID NO: 3179350 - RNA, 17 nt, Human
ccagguugucacugaga

SEQ ID NO: 3179351 - RNA, 16 nt, Human
ccauccugaggcucca

SEQ ID NO: 3179352 - RNA, 20 nt, Human
ccauccugaggcuccacuug

SEQ ID NO: 3179353 - RNA, 13 nt, Human
ccaucuacccucc

SEQ ID NO: 3179354 - RNA, 18 nt, Human
ccauccugaggcuccacu

SEQ ID NO: 3179355 - RNA, 14 nt, Human
ccaucauugaaauc

SEQ ID NO: 3179356 - RNA, 16 nt, Human
ccaucauugaaaucuu

SEQ ID NO: 3179357 - RNA, 14 nt, Human
ccaucucacacaug

SEQ ID NO: 3179358 - RNA, 15 nt, Human
ccaucucacacauga

SEQ ID NO: 3179359 - RNA, 17 nt, Human
ccaucucacacaugagc

SEQ ID NO: 3179360 - RNA, 18 nt, Human
ccaucucacacaugagca

SEQ ID NO: 3179361 - RNA, 20 nt, Human
ccaucucacacaugagcauc

SEQ ID NO: 3179362 - RNA, 21 nt, Human
ccaucucacacaugagcauca

SEQ ID NO: 3179363 - RNA, 15 nt, Human
ccaucucuccuccuu

SEQ ID NO: 3179364 - RNA, 21 nt, Human
ccaucuaggggagccuugauu

SEQ ID NO: 3179365 - RNA, 23 nt, Human
ccagugugacaaggauugcuacu

SEQ ID NO: 3179366 - RNA, 14 nt, Human
ccagugugacaagg

SEQ ID NO: 3179367 - RNA, 13 nt, Human
ccauaugccuggg

SEQ ID NO: 3179368 - RNA, 12 nt, Human
ccaucaagccac

SEQ ID NO: 3179369 - RNA, 22 nt, Human
ccauauuaaguaagucucaagg

SEQ ID NO: 3179370 - RNA, 15 nt, Human
ccauaugccugggca

SEQ ID NO: 3179371 - RNA, 16 nt, Human
ccaucaagccaccaac

SEQ ID NO: 3179372 - RNA, 13 nt, Human
ccaucaagccacc

SEQ ID NO: 3179373 - RNA, 14 nt, Human
ccaucaagccacca

SEQ ID NO: 3179374 - RNA, 12 nt, Human
ccaucauugaaa

SEQ ID NO: 3179375 - RNA, 13 nt, Human
ccaucaugucugg

SEQ ID NO: 3179376 - RNA, 12 nt, Human
ccaucaugucug

SEQ ID NO: 3179377 - RNA, 19 nt, Human
ccaucauggggggagcacc

SEQ ID NO: 3179378 - RNA, 22 nt, Human
ccaucauggggggagcacccug

SEQ ID NO: 3179379 - RNA, 23 nt, Human
ccaucauggggggagcacccuga

SEQ ID NO: 3179380 - RNA, 18 nt, Human
ccagcccugaguuccuag

SEQ ID NO: 3179381 - RNA, 14 nt, Human
ccagcccugaguuc

SEQ ID NO: 3179382 - RNA, 17 nt, Human
ccagcccauuugggcag

SEQ ID NO: 3179383 - RNA, 22 nt, Human
ccagcccauuugggcagagagg

SEQ ID NO: 3179384 - RNA, 18 nt, Human
ccagcccauuugggcaga

SEQ ID NO: 3179385 - RNA, 20 nt, Human
ccagccgagauagccaaggc

SEQ ID NO: 3179386 - RNA, 22 nt, Human
ccagccgagauagccaaggcca

SEQ ID NO: 3179387 - RNA, 17 nt, Human
ccagccgagauagccaa

SEQ ID NO: 3179388 - RNA, 19 nt, Human
ccagccgccaugcuccugg

SEQ ID NO: 3179389 - RNA, 19 nt, Human
ccagcaggcucucaggcca

SEQ ID NO: 3179390 - RNA, 20 nt, Human
ccagcaggcucucaggccag

SEQ ID NO: 3179391 - RNA, 21 nt, Human
ccagcaggcucucaggccagc

SEQ ID NO: 3179392 - RNA, 23 nt, Human
ccagcaggcucucaggccagcug

SEQ ID NO: 3179393 - RNA, 17 nt, Human
ccagcccacuucugcca

SEQ ID NO: 3179394 - RNA, 16 nt, Human
ccagcccacuucugcc

SEQ ID NO: 3179395 - RNA, 17 nt, Human
ccagcccaccccauggc

SEQ ID NO: 3179396 - RNA, 15 nt, Human
ccagcccaccccaug

SEQ ID NO: 3179397 - RNA, 18 nt, Human
ccagcccaccccauggcc

SEQ ID NO: 3179398 - RNA, 13 nt, Human
ccagcccacgcug

SEQ ID NO: 3179399 - RNA, 16 nt, Human
ccagcccagaggccga

SEQ ID NO: 3179400 - RNA, 13 nt, Human
ccagcccagaggc

SEQ ID NO: 3179401 - RNA, 21 nt, Human
ccagcccacgcugacuacagg

SEQ ID NO: 3179402 - RNA, 10 nt, Human
ccagccugcc

SEQ ID NO: 3179403 - RNA, 19 nt, Human
ccagccugagcgacaguga

SEQ ID NO: 3179404 - RNA, 21 nt, Human
ccagccugggauaggggcaga

SEQ ID NO: 3179405 - RNA, 20 nt, Human
ccagccuggcugggacuggg

SEQ ID NO: 3179406 - RNA, 13 nt, Human
ccagccuggguga

SEQ ID NO: 3179407 - RNA, 21 nt, Human
ccagccuggaaaccugucuga

SEQ ID NO: 3179408 - RNA, 20 nt, Human
ccagccuggaaaccugucug

SEQ ID NO: 3179409 - RNA, 23 nt, Human
ccagccuugaccauucuccaccu

SEQ ID NO: 3179410 - RNA, 22 nt, Human
ccagccuugaccauucuccacc

SEQ ID NO: 3179411 - RNA, 18 nt, Human
ccagauuucacucuccuu

SEQ ID NO: 3179412 - RNA, 19 nt, Human
ccagauuucacucuccuug

SEQ ID NO: 3179413 - RNA, 15 nt, Human
ccagauuucacucuc

SEQ ID NO: 3179414 - RNA, 22 nt, Human
ccagauugcaacaggcugggcu

SEQ ID NO: 3179415 - RNA, 23 nt, Human
ccagauugcaacaggcugggcuu

SEQ ID NO: 3179416 - RNA, 14 nt, Human
ccagagcccaccuu

SEQ ID NO: 3179417 - RNA, 16 nt, Human
ccagauugcaacaggc

SEQ ID NO: 3179418 - RNA, 14 nt, Human
ccagauugcaacag

SEQ ID NO: 3179419 - RNA, 17 nt, Human
ccagcaggcucucaggc

SEQ ID NO: 3179420 - RNA, 18 nt, Human
ccagcaggcucucaggcc

SEQ ID NO: 3179421 - RNA, 16 nt, Human
ccagcaggcucucagg

SEQ ID NO: 3179422 - RNA, 17 nt, Human
ccagcaccaucucuccu

SEQ ID NO: 3179423 - RNA, 18 nt, Human
ccagcaccaucucuccuc

SEQ ID NO: 3179424 - RNA, 20 nt, Human
ccagcaccacccuccuuccc

SEQ ID NO: 3179425 - RNA, 13 nt, Human
ccagcaccacccu

SEQ ID NO: 3179426 - RNA, 16 nt, Human
ccagcaagugagagcu

SEQ ID NO: 3179427 - RNA, 21 nt, Human
ccagcaauucuccugccucag

SEQ ID NO: 3179428 - RNA, 23 nt, Human
ccagcacaaccuucaagcugcuu

SEQ ID NO: 3179429 - RNA, 13 nt, Human
ccagcacacuccc

SEQ ID NO: 3179430 - RNA, 12 nt, Human
ccagcacacucc

SEQ ID NO: 3179431 - RNA, 17 nt, Human
ccagcacacucccgaga

SEQ ID NO: 3179432 - RNA, 16 nt, Human
ccagcacacucccgag

SEQ ID NO: 3179433 - RNA, 15 nt, Human
ccagcacacucccga

SEQ ID NO: 3179434 - RNA, 14 nt, Human
ccagcacacucccg

SEQ ID NO: 3179435 - RNA, 19 nt, Human
ccagcaagugagagcuggg

SEQ ID NO: 3179436 - RNA, 18 nt, Human
ccagcaagugagagcugg

SEQ ID NO: 3179437 - RNA, 17 nt, Human
ccagcaagugagagcug

SEQ ID NO: 3179438 - RNA, 24 nt, Human
ccagauuuuuuacagcugccugca

SEQ ID NO: 3179439 - RNA, 18 nt, Human
ccagaaacgccacauccc

SEQ ID NO: 3179440 - RNA, 21 nt, Human
ccagaaacacccacaggcaug

SEQ ID NO: 3179441 - RNA, 15 nt, Human
ccagaagcccagaau

SEQ ID NO: 3179442 - RNA, 17 nt, Human
ccagaacuuagccuuua

SEQ ID NO: 3179443 - RNA, 24 nt, Human
ccagaacucuuccuccaaggacag

SEQ ID NO: 3179444 - RNA, 15 nt, Human
ccagaacucuuccuc

SEQ ID NO: 3179445 - RNA, 14 nt, Human
ccagaacucuuccu

SEQ ID NO: 3179446 - RNA, 15 nt, Human
ccagaacucuguguc

SEQ ID NO: 3179447 - RNA, 20 nt, Human
ccagaacucugccugcccuu

SEQ ID NO: 3179448 - RNA, 19 nt, Human
ccagaacucugccugcccu

SEQ ID NO: 3179449 - RNA, 17 nt, Human
ccagaacucugccugcc

SEQ ID NO: 3179450 - RNA, 16 nt, Human
ccagaacucugccugc

SEQ ID NO: 3179451 - RNA, 16 nt, Human
ccacugugccaugugc

SEQ ID NO: 3179452 - RNA, 15 nt, Human
ccacugugccaugug

SEQ ID NO: 3179453 - RNA, 19 nt, Human
ccacugugccaugugccag

SEQ ID NO: 3179454 - RNA, 19 nt, Human
ccacugugcguggggcucc

SEQ ID NO: 3179455 - RNA, 15 nt, Human
ccacugguucuucuu

SEQ ID NO: 3179456 - RNA, 21 nt, Human
ccacugggguggccugacucc

SEQ ID NO: 3179457 - RNA, 23 nt, Human
ccacuggugacaugucuuuucuu

SEQ ID NO: 3179458 - RNA, 14 nt, Human
ccacugugaagaga

SEQ ID NO: 3179459 - RNA, 15 nt, Human
ccacugugaagagaa

SEQ ID NO: 3179460 - RNA, 15 nt, Human
ccacugcucugguua

SEQ ID NO: 3179461 - RNA, 13 nt, Human
ccacugcucuggu

SEQ ID NO: 3179462 - RNA, 12 nt, Human
ccacugcucugg

SEQ ID NO: 3179463 - RNA, 11 nt, Human
ccacugcucug

SEQ ID NO: 3179464 - RNA, 20 nt, Human
ccacugcuuuuggucugugu

SEQ ID NO: 3179465 - RNA, 21 nt, Human
ccacugccuucgauacaccgg

SEQ ID NO: 3179466 - RNA, 22 nt, Human
ccacugcuuuuggucuguguga

SEQ ID NO: 3179467 - RNA, 14 nt, Human
ccacugcuuaccua

SEQ ID NO: 3179468 - RNA, 21 nt, Human
ccacugcaucguuucaucuuc

SEQ ID NO: 3179469 - RNA, 23 nt, Human
ccacugcaucguuucaucuucca

SEQ ID NO: 3179470 - RNA, 14 nt, Human
ccaccuucccaugc

SEQ ID NO: 3179471 - RNA, 21 nt, Human
ccaccuucucacauggaauga

SEQ ID NO: 3179472 - RNA, 13 nt, Human
ccacugccucuuc

SEQ ID NO: 3179473 - RNA, 16 nt, Human
ccacugccucuuccuc

SEQ ID NO: 3179474 - RNA, 15 nt, Human
ccagaaugaggcugc

SEQ ID NO: 3179475 - RNA, 11 nt, Human
ccagaaugaag

SEQ ID NO: 3179476 - RNA, 22 nt, Human
ccagaauaaacuggcagcucag

SEQ ID NO: 3179477 - RNA, 13 nt, Human
ccagaagucaaca

SEQ ID NO: 3179478 - RNA, 12 nt, Human
ccagaauacuga

SEQ ID NO: 3179479 - RNA, 15 nt, Human
ccagaauacugaugg

SEQ ID NO: 3179480 - RNA, 21 nt, Human
ccagaauacugauggaauuuu

SEQ ID NO: 3179481 - RNA, 23 nt, Human
ccagaauacugauggaauuuuuu

SEQ ID NO: 3179482 - RNA, 23 nt, Human
ccagaaggagggggugaccuccg

SEQ ID NO: 3179483 - RNA, 17 nt, Human
ccagaaguagcuuugca

SEQ ID NO: 3179484 - RNA, 16 nt, Human
ccagaaguagcuuugc

SEQ ID NO: 3179485 - RNA, 15 nt, Human
ccagaaguagcuuug

SEQ ID NO: 3179486 - RNA, 18 nt, Human
ccagaccccuggcuuuuc

SEQ ID NO: 3179487 - RNA, 24 nt, Human
ccagaccccuggcuuuucacugcu

SEQ ID NO: 3179488 - RNA, 14 nt, Human
ccagacaucaacag

SEQ ID NO: 3179489 - RNA, 17 nt, Human
ccagacacauguccaag

SEQ ID NO: 3179490 - RNA, 20 nt, Human
ccagacacauguccaagaag

SEQ ID NO: 3179491 - RNA, 22 nt, Human
ccagacacauguccaagaagcc

SEQ ID NO: 3179492 - RNA, 15 nt, Human
ccagacccggcugcg

SEQ ID NO: 3179493 - RNA, 14 nt, Human
ccagacccggcugc

SEQ ID NO: 3179494 - RNA, 16 nt, Human
ccagagaguggcuccu

SEQ ID NO: 3179495 - RNA, 15 nt, Human
ccagagaguggcucc

SEQ ID NO: 3179496 - RNA, 14 nt, Human
ccagagaguggcuc

SEQ ID NO: 3179497 - RNA, 22 nt, Human
ccagagaguggcuccucccggu

SEQ ID NO: 3179498 - RNA, 18 nt, Human
ccagagaguggcuccucc

SEQ ID NO: 3179499 - RNA, 19 nt, Human
ccacccccaggaccccuga

SEQ ID NO: 3179500 - RNA, 18 nt, Human
ccacccccaggaccccug

SEQ ID NO: 3179501 - RNA, 16 nt, Human
ccacccccaggacccc

SEQ ID NO: 3179502 - RNA, 19 nt, Human
ccacccccacccaagggcc

SEQ ID NO: 3179503 - RNA, 19 nt, Human
ccaccccucaacaccucug

SEQ ID NO: 3179504 - RNA, 18 nt, Human
ccacccugaaagcccuga

SEQ ID NO: 3179505 - RNA, 14 nt, Human
ccacccuccuuccc

SEQ ID NO: 3179506 - RNA, 14 nt, Human
ccacccuccuuuca

SEQ ID NO: 3179507 - RNA, 18 nt, Human
ccaccuccuaaaaggccc

SEQ ID NO: 3179508 - RNA, 21 nt, Human
ccaccuccuaaaaggcccaga

SEQ ID NO: 3179509 - RNA, 20 nt, Human
ccaccuccuaaaaggcccag

SEQ ID NO: 3179510 - RNA, 23 nt, Human
ccaccuccuaaaaggcccagaga

SEQ ID NO: 3179511 - RNA, 22 nt, Human
ccaccuccuaaaaggcccagag

SEQ ID NO: 3179512 - RNA, 12 nt, Human
ccacccugcucu

SEQ ID NO: 3179513 - RNA, 11 nt, Human
ccacccugcuc

SEQ ID NO: 3179514 - RNA, 14 nt, Human
ccaccucucucacu

SEQ ID NO: 3179515 - RNA, 16 nt, Human
ccaccucucucacucc

SEQ ID NO: 3179516 - RNA, 19 nt, Human
ccaccucucucacuccuug

SEQ ID NO: 3179517 - RNA, 20 nt, Human
ccaccucucucacuccuuga

SEQ ID NO: 3179518 - RNA, 13 nt, Human
ccaccuggccucu

SEQ ID NO: 3179519 - RNA, 17 nt, Human
ccaccuggcccucucug

SEQ ID NO: 3179520 - RNA, 12 nt, Human
ccaccuggcccu

SEQ ID NO: 3179521 - RNA, 18 nt, Human
ccaccuggccucugcacu

SEQ ID NO: 3179522 - RNA, 20 nt, Human
ccaccuggccucugcacucc

SEQ ID NO: 3179523 - RNA, 18 nt, Human
ccaccuggcccucucuga

SEQ ID NO: 3179524 - RNA, 13 nt, Human
ccaccugccaggg

SEQ ID NO: 3179525 - RNA, 14 nt, Human
ccaccugccaggga

SEQ ID NO: 3179526 - RNA, 17 nt, Human
ccaccucuuccuggccg

SEQ ID NO: 3179527 - RNA, 13 nt, Human
ccaccucuuccug

SEQ ID NO: 3179528 - RNA, 12 nt, Human
ccaccugccagg

SEQ ID NO: 3179529 - RNA, 15 nt, Human
ccaccugcucugcug

SEQ ID NO: 3179530 - RNA, 15 nt, Human
ccaccugccagggac

SEQ ID NO: 3179531 - RNA, 17 nt, Human
cccagaaugaggcugcu

SEQ ID NO: 3179532 - RNA, 17 nt, Human
cccagagagaagagccc

SEQ ID NO: 3179533 - RNA, 19 nt, Human
cccaucucuacaaaaagca

SEQ ID NO: 3179534 - RNA, 14 nt, Human
cccaguugggugga

SEQ ID NO: 3179535 - RNA, 16 nt, Human
cccaucugccagauca

SEQ ID NO: 3179536 - RNA, 14 nt, Human
cccaucucuucugg

SEQ ID NO: 3179537 - RNA, 22 nt, Human
cccaugagccucagcauccugg

SEQ ID NO: 3179538 - RNA, 19 nt, Human
cccaugagagcgcagcccg

SEQ ID NO: 3179539 - RNA, 20 nt, Human
cccaugagagcgcagcccgc

SEQ ID NO: 3179540 - RNA, 14 nt, Human
cccaugagccucag

SEQ ID NO: 3179541 - RNA, 17 nt, Human
cccauggaaaaaugcca

SEQ ID NO: 3179542 - RNA, 18 nt, Human
cccaugcugcccugugag

SEQ ID NO: 3179543 - RNA, 18 nt, Human
cccaugcugggcucccgu

SEQ ID NO: 3179544 - RNA, 16 nt, Human
ccccaauaccccaugg

SEQ ID NO: 3179545 - RNA, 16 nt, Human
ccccaauaucuugcuu

SEQ ID NO: 3179546 - RNA, 19 nt, Human
ccccaauaccccauggacc

SEQ ID NO: 3179547 - RNA, 21 nt, Human
ccccacccaagggccuggccu

SEQ ID NO: 3179548 - RNA, 15 nt, Human
ccccaccgcagacag

SEQ ID NO: 3179549 - RNA, 19 nt, Human
ccccaccgcagacaggacc

SEQ ID NO: 3179550 - RNA, 11 nt, Human
ccccaccugcg

SEQ ID NO: 3179551 - RNA, 20 nt, Human
ccccaccuggcccucucuga

SEQ ID NO: 3179552 - RNA, 14 nt, Human
ccccaccuggcccu

SEQ ID NO: 3179553 - RNA, 17 nt, Human
ccccaccugcgcuucac

SEQ ID NO: 3179554 - RNA, 14 nt, Human
ccccaccugcgcuu

SEQ ID NO: 3179555 - RNA, 14 nt, Human
ccccacuggugaca

SEQ ID NO: 3179556 - RNA, 20 nt, Human
ccccacucucagaggcccca

SEQ ID NO: 3179557 - RNA, 17 nt, Human
ccccacucucagaggcc

SEQ ID NO: 3179558 - RNA, 15 nt, Human
ccccagaacucugcc

SEQ ID NO: 3179559 - RNA, 17 nt, Human
ccccagaacucugccug

SEQ ID NO: 3179560 - RNA, 11 nt, Human
ccccacucuca

SEQ ID NO: 3179561 - RNA, 16 nt, Human
ccccacucucagaggc

SEQ ID NO: 3179562 - RNA, 14 nt, Human
ccccacucucagag

SEQ ID NO: 3179563 - RNA, 13 nt, Human
ccccacucucaga

SEQ ID NO: 3179564 - RNA, 12 nt, Human
ccccacucucag

SEQ ID NO: 3179565 - RNA, 15 nt, Human
ccccacucccagcau

SEQ ID NO: 3179566 - RNA, 13 nt, Human
ccccacucccagc

SEQ ID NO: 3179567 - RNA, 13 nt, Human
ccccugccugccc

SEQ ID NO: 3179568 - RNA, 19 nt, Human
ccccugcccggcugcggaa

SEQ ID NO: 3179569 - RNA, 17 nt, Human
ccccugcccggcugcgg

SEQ ID NO: 3179570 - RNA, 18 nt, Human
ccccugccccugcuacug

SEQ ID NO: 3179571 - RNA, 13 nt, Human
ccccucugcccug

SEQ ID NO: 3179572 - RNA, 12 nt, Human
ccccucugcccu

SEQ ID NO: 3179573 - RNA, 20 nt, Human
ccccugcugguucaggguug

SEQ ID NO: 3179574 - RNA, 15 nt, Human
ccccugcugguucag

SEQ ID NO: 3179575 - RNA, 13 nt, Human
ccccugcugguuc

SEQ ID NO: 3179576 - RNA, 11 nt, Human
ccccugcuggu

SEQ ID NO: 3179577 - RNA, 14 nt, Human
ccccugcugggugu

SEQ ID NO: 3179578 - RNA, 17 nt, Human
ccccugcuggguguggc

SEQ ID NO: 3179579 - RNA, 19 nt, Human
ccccugccugcccugucag

SEQ ID NO: 3179580 - RNA, 15 nt, Human
ccccugcuacugcca

SEQ ID NO: 3179581 - RNA, 18 nt, Human
ccccuggaugcagccuca

SEQ ID NO: 3179582 - RNA, 19 nt, Human
ccccuggaugcagccucac

SEQ ID NO: 3179583 - RNA, 15 nt, Human
ccccuggaugcagcc

SEQ ID NO: 3179584 - RNA, 19 nt, Human
ccccuggaccccagccuca

SEQ ID NO: 3179585 - RNA, 18 nt, Human
ccccuggaccccagccuc

SEQ ID NO: 3179586 - RNA, 16 nt, Human
ccccuggaccccagcc

SEQ ID NO: 3179587 - RNA, 14 nt, Human
ccccuggaccccag

SEQ ID NO: 3179588 - RNA, 11 nt, Human
ccccuggaccc

SEQ ID NO: 3179589 - RNA, 23 nt, Human
ccccuggaagcagugcccaggug

SEQ ID NO: 3179590 - RNA, 21 nt, Human
ccccuggaagcagugcccagg

SEQ ID NO: 3179591 - RNA, 20 nt, Human
ccccuggaagcagugcccag

SEQ ID NO: 3179592 - RNA, 19 nt, Human
ccccuggaagcagugccca

SEQ ID NO: 3179593 - RNA, 18 nt, Human
ccccuggaagcagugccc

SEQ ID NO: 3179594 - RNA, 17 nt, Human
ccccuggaagcagugcc

SEQ ID NO: 3179595 - RNA, 12 nt, Human
ccccuggugguu

SEQ ID NO: 3179596 - RNA, 15 nt, Human
ccccuggucuuugag

SEQ ID NO: 3179597 - RNA, 20 nt, Human
ccccuggcuccaggccaggg

SEQ ID NO: 3179598 - RNA, 15 nt, Human
ccccuggccuuggga

SEQ ID NO: 3179599 - RNA, 11 nt, Human
ccccuggccuu

SEQ ID NO: 3179600 - RNA, 18 nt, Human
ccccuggcuuuucacugc

SEQ ID NO: 3179601 - RNA, 16 nt, Human
ccccuggggugcaggc

SEQ ID NO: 3179602 - RNA, 20 nt, Human
ccccuggcuuuucacugcug

SEQ ID NO: 3179603 - RNA, 15 nt, Human
ccccuguucacucua

SEQ ID NO: 3179604 - RNA, 13 nt, Human
ccccuuccaugga

SEQ ID NO: 3179605 - RNA, 20 nt, Human
ccccuuccauggacuuuguu

SEQ ID NO: 3179606 - RNA, 22 nt, Human
cccgaauagcugggacuacagg

SEQ ID NO: 3179607 - RNA, 14 nt, Human
cccgacagccuggc

SEQ ID NO: 3179608 - RNA, 11 nt, Human
ccccuucccau

SEQ ID NO: 3179609 - RNA, 17 nt, Human
ccccuuccauuucugcc

SEQ ID NO: 3179610 - RNA, 22 nt, Human
cccgcuaagagggagggagggc

SEQ ID NO: 3179611 - RNA, 23 nt, Human
cccgcuaagagggagggagggcu

SEQ ID NO: 3179612 - RNA, 20 nt, Human
cccgcccaggcuuagucacu

SEQ ID NO: 3179613 - RNA, 19 nt, Human
cccgcccaaaccuuucccc

SEQ ID NO: 3179614 - RNA, 17 nt, Human
cccgacaccggccagug

SEQ ID NO: 3179615 - RNA, 18 nt, Human
cccgacagccuggcacag

SEQ ID NO: 3179616 - RNA, 15 nt, Human
cccgacagccuggca

SEQ ID NO: 3179617 - RNA, 12 nt, Human
cccgacuccagu

SEQ ID NO: 3179618 - RNA, 18 nt, Human
cccgagacggcacugaga

SEQ ID NO: 3179619 - RNA, 14 nt, Human
ccccauccucugua

SEQ ID NO: 3179620 - RNA, 13 nt, Human
cccccacccaagg

SEQ ID NO: 3179621 - RNA, 24 nt, Human
cccccacccaagggccuggccuga

SEQ ID NO: 3179622 - RNA, 16 nt, Human
cccccacauggugaug

SEQ ID NO: 3179623 - RNA, 15 nt, Human
cccccacuggugaca

SEQ ID NO: 3179624 - RNA, 11 nt, Human
cccccacuggu

SEQ ID NO: 3179625 - RNA, 13 nt, Human
cccccacugguga

SEQ ID NO: 3179626 - RNA, 19 nt, Human
cccccacugaaucccugua

SEQ ID NO: 3179627 - RNA, 11 nt, Human
ccccagggcac

SEQ ID NO: 3179628 - RNA, 22 nt, Human
ccccaggugguuauggagaggg

SEQ ID NO: 3179629 - RNA, 17 nt, Human
ccccaguccccuucccg

SEQ ID NO: 3179630 - RNA, 17 nt, Human
ccccaguagcugggacc

SEQ ID NO: 3179631 - RNA, 22 nt, Human
ccccauaauuuuuuuuuuccuu

SEQ ID NO: 3179632 - RNA, 20 nt, Human
ccccagugcccacaggauca

SEQ ID NO: 3179633 - RNA, 16 nt, Human
ccccagugcccacagg

SEQ ID NO: 3179634 - RNA, 15 nt, Human
ccccagugcccacag

SEQ ID NO: 3179635 - RNA, 14 nt, Human
ccccagugcccaca

SEQ ID NO: 3179636 - RNA, 13 nt, Human
ccccuccaccugc

SEQ ID NO: 3179637 - RNA, 22 nt, Human
ccccucagggucccugguggca

SEQ ID NO: 3179638 - RNA, 20 nt, Human
ccccucauagcccucacccu

SEQ ID NO: 3179639 - RNA, 23 nt, Human
ccccuccaaucccaccaacccuc

SEQ ID NO: 3179640 - RNA, 12 nt, Human
ccccuccaugug

SEQ ID NO: 3179641 - RNA, 15 nt, Human
ccccucccucuccag

SEQ ID NO: 3179642 - RNA, 14 nt, Human
ccccucccucucca

SEQ ID NO: 3179643 - RNA, 15 nt, Human
ccccucccuucaacc

SEQ ID NO: 3179644 - RNA, 15 nt, Human
ccccuccucucugcc

SEQ ID NO: 3179645 - RNA, 17 nt, Human
ccccuccucucugcccu

SEQ ID NO: 3179646 - RNA, 22 nt, Human
ccccuccuccuggacuccugca

SEQ ID NO: 3179647 - RNA, 18 nt, Human
ccccuccuccuggacucc

SEQ ID NO: 3179648 - RNA, 15 nt, Human
ccccucggagaagag

SEQ ID NO: 3179649 - RNA, 14 nt, Human
ccccucgcccaguc

SEQ ID NO: 3179650 - RNA, 23 nt, Human
ccccucgcccagucccagcagcc

SEQ ID NO: 3179651 - RNA, 22 nt, Human
ccccucgcccagucccagcagc

SEQ ID NO: 3179652 - RNA, 15 nt, Human
ccccucaacaccucu

SEQ ID NO: 3179653 - RNA, 16 nt, Human
ccccucaacaccucug

SEQ ID NO: 3179654 - RNA, 23 nt, Human
ccccucaacucuccuccagaguc

SEQ ID NO: 3179655 - RNA, 12 nt, Human
cccccagccugc

SEQ ID NO: 3179656 - RNA, 19 nt, Human
cccccucccccagccacuc

SEQ ID NO: 3179657 - RNA, 18 nt, Human
cccccucccccagccacu

SEQ ID NO: 3179658 - RNA, 22 nt, Human
cccccgucuaaccacagcuccu

SEQ ID NO: 3179659 - RNA, 12 nt, Human
cccccagcuccc

SEQ ID NO: 3179660 - RNA, 19 nt, Human
cccccugacaacacucauu

SEQ ID NO: 3179661 - RNA, 18 nt, Human
cccccugcaaagcccagc

SEQ ID NO: 3179662 - RNA, 19 nt, Human
cccccugcaaagcccagcu

SEQ ID NO: 3179663 - RNA, 21 nt, Human
cccccugcaaagcccagcuug

SEQ ID NO: 3179664 - RNA, 14 nt, Human
cccccucuucccug

SEQ ID NO: 3179665 - RNA, 17 nt, Human
cccccugacaacacuca

SEQ ID NO: 3179666 - RNA, 21 nt, Human
cccccucuggcuccagcuggc

SEQ ID NO: 3179667 - RNA, 12 nt, Human
cccccucuggcu

SEQ ID NO: 3179668 - RNA, 19 nt, Human
cccccucuggcuccagcug

SEQ ID NO: 3179669 - RNA, 11 nt, Human
ccguggcuucc

SEQ ID NO: 3179670 - RNA, 16 nt, Human
ccgugaggccagagac

SEQ ID NO: 3179671 - RNA, 18 nt, Human
ccuacaggagugagcacu

SEQ ID NO: 3179672 - RNA, 17 nt, Human
ccguugcugacuuagaa

SEQ ID NO: 3179673 - RNA, 14 nt, Human
ccguugcugacuua

SEQ ID NO: 3179674 - RNA, 15 nt, Human
ccguugcugacuuag

SEQ ID NO: 3179675 - RNA, 12 nt, Human
ccuaacccuggc

SEQ ID NO: 3179676 - RNA, 19 nt, Human
ccuaacccagaaaaucuga

SEQ ID NO: 3179677 - RNA, 18 nt, Human
ccuaaccagggccagaag

SEQ ID NO: 3179678 - RNA, 18 nt, Human
ccuaggugacagagugag

SEQ ID NO: 3179679 - RNA, 23 nt, Human
ccuaggcauuugcugaauacaga

SEQ ID NO: 3179680 - RNA, 13 nt, Human
ccuacucuucucu

SEQ ID NO: 3179681 - RNA, 19 nt, Human
ccuacucuucucucugcuc

SEQ ID NO: 3179682 - RNA, 18 nt, Human
ccuacucuucucucugcu

SEQ ID NO: 3179683 - RNA, 16 nt, Human
ccuacuccugucuucu

SEQ ID NO: 3179684 - RNA, 15 nt, Human
ccuacuccugucuuc

SEQ ID NO: 3179685 - RNA, 22 nt, Human
ccuacuccugucuucugcuuug

SEQ ID NO: 3179686 - RNA, 20 nt, Human
ccuacuccugucuucugcuu

SEQ ID NO: 3179687 - RNA, 19 nt, Human
ccuacuccugucuucugcu

SEQ ID NO: 3179688 - RNA, 18 nt, Human
ccuacuccugucuucugc

SEQ ID NO: 3179689 - RNA, 21 nt, Human
ccuacucuucucucugcucug

SEQ ID NO: 3179690 - RNA, 20 nt, Human
ccuacucuucucucugcucu

SEQ ID NO: 3179691 - RNA, 17 nt, Human
ccuaccgagucucuucu

SEQ ID NO: 3179692 - RNA, 16 nt, Human
ccuaccgagucucuuc

SEQ ID NO: 3179693 - RNA, 20 nt, Human
ccuaccgagucucuucucca

SEQ ID NO: 3179694 - RNA, 19 nt, Human
ccuaccgagucucuucucc

SEQ ID NO: 3179695 - RNA, 14 nt, Human
ccguggcuucccgc

SEQ ID NO: 3179696 - RNA, 15 nt, Human
ccgagauugcaccac

SEQ ID NO: 3179697 - RNA, 19 nt, Human
ccgagauugcaccacugca

SEQ ID NO: 3179698 - RNA, 21 nt, Human
ccgagauugcaccacugcacu

SEQ ID NO: 3179699 - RNA, 14 nt, Human
ccgacuagacacac

SEQ ID NO: 3179700 - RNA, 22 nt, Human
ccgaccugaggacauggcuucu

SEQ ID NO: 3179701 - RNA, 18 nt, Human
ccgaccuggccugucugu

SEQ ID NO: 3179702 - RNA, 17 nt, Human
ccgacuagacacacaaa

SEQ ID NO: 3179703 - RNA, 16 nt, Human
ccgacuagacacacaa

SEQ ID NO: 3179704 - RNA, 20 nt, Human
ccgacuagacacacaaagca

SEQ ID NO: 3179705 - RNA, 22 nt, Human
ccgccggcaauaaaagcccagg

SEQ ID NO: 3179706 - RNA, 21 nt, Human
ccgccggcaauaaaagcccag

SEQ ID NO: 3179707 - RNA, 20 nt, Human
ccgccggcaauaaaagccca

SEQ ID NO: 3179708 - RNA, 23 nt, Human
ccgcacugggcuuggggaccaga

SEQ ID NO: 3179709 - RNA, 19 nt, Human
ccgcacugggcuuggggac

SEQ ID NO: 3179710 - RNA, 20 nt, Human
ccgagucucuucuccacugg

SEQ ID NO: 3179711 - RNA, 19 nt, Human
ccgagucucuucuccacug

SEQ ID NO: 3179712 - RNA, 14 nt, Human
ccgaguagcuggga

SEQ ID NO: 3179713 - RNA, 18 nt, Human
ccgagucucuucuccacu

SEQ ID NO: 3179714 - RNA, 16 nt, Human
ccgagucucuucucca

SEQ ID NO: 3179715 - RNA, 20 nt, Human
ccgaguagcugagauuauag

SEQ ID NO: 3179716 - RNA, 14 nt, Human
ccgagucucuucuc

SEQ ID NO: 3179717 - RNA, 19 nt, Human
ccgagcuuugaaaauucag

SEQ ID NO: 3179718 - RNA, 18 nt, Human
ccgugaggccagagacac

SEQ ID NO: 3179719 - RNA, 18 nt, Human
ccgggcucugccucccau

SEQ ID NO: 3179720 - RNA, 13 nt, Human
ccgggcucugccu

SEQ ID NO: 3179721 - RNA, 14 nt, Human
ccgggcucugccuc

SEQ ID NO: 3179722 - RNA, 15 nt, Human
ccgggcucugccucc

SEQ ID NO: 3179723 - RNA, 13 nt, Human
ccgggccacagag

SEQ ID NO: 3179724 - RNA, 22 nt, Human
ccgggcacucagaagacacuga

SEQ ID NO: 3179725 - RNA, 20 nt, Human
ccgggcacucagaagacacu

SEQ ID NO: 3179726 - RNA, 20 nt, Human
ccgggcagagcacagcgggg

SEQ ID NO: 3179727 - RNA, 13 nt, Human
ccgggcagagcac

SEQ ID NO: 3179728 - RNA, 21 nt, Human
ccggcuccaggcuccuuuagc

SEQ ID NO: 3179729 - RNA, 16 nt, Human
ccggcuccaggcuccu

SEQ ID NO: 3179730 - RNA, 15 nt, Human
ccggcuccaggcucc

SEQ ID NO: 3179731 - RNA, 17 nt, Human
ccgccuccuacagccca

SEQ ID NO: 3179732 - RNA, 12 nt, Human
ccgccucuuccc

SEQ ID NO: 3179733 - RNA, 11 nt, Human
ccgcuggggcc

SEQ ID NO: 3179734 - RNA, 14 nt, Human
ccggaggggccugg

SEQ ID NO: 3179735 - RNA, 16 nt, Human
ccggaggggccuggca

SEQ ID NO: 3179736 - RNA, 15 nt, Human
ccggaggggccuggc

SEQ ID NO: 3179737 - RNA, 16 nt, Human
cccugccucuccgccc

SEQ ID NO: 3179738 - RNA, 14 nt, Human
cccugccucuccgc

SEQ ID NO: 3179739 - RNA, 13 nt, Human
cccugccucuccg

SEQ ID NO: 3179740 - RNA, 23 nt, Human
cccugccucuccgccccugagcc

SEQ ID NO: 3179741 - RNA, 22 nt, Human
cccugccucuccgccccugagc

SEQ ID NO: 3179742 - RNA, 21 nt, Human
cccugccucuccgccccugag

SEQ ID NO: 3179743 - RNA, 13 nt, Human
cccugcucacugc

SEQ ID NO: 3179744 - RNA, 22 nt, Human
cccugcuacugccaaccucgcu

SEQ ID NO: 3179745 - RNA, 11 nt, Human
cccugcucccu

SEQ ID NO: 3179746 - RNA, 10 nt, Human
cccugcuccc

SEQ ID NO: 3179747 - RNA, 19 nt, Human
cccugcgggucacaggagg

SEQ ID NO: 3179748 - RNA, 21 nt, Human
cccugcgggucacaggaggga

SEQ ID NO: 3179749 - RNA, 21 nt, Human
cccugcucuccgaccagacac

SEQ ID NO: 3179750 - RNA, 23 nt, Human
cccugcucccuccgggucuuccu

SEQ ID NO: 3179751 - RNA, 22 nt, Human
cccugcucuccgaccagacacc

SEQ ID NO: 3179752 - RNA, 21 nt, Human
cccugcugagucccaggcuga

SEQ ID NO: 3179753 - RNA, 23 nt, Human
cccugcugagucccaggcugagc

SEQ ID NO: 3179754 - RNA, 11 nt, Human
cccugccuccu

SEQ ID NO: 3179755 - RNA, 21 nt, Human
cccugcccugugggcccccaa

SEQ ID NO: 3179756 - RNA, 22 nt, Human
cccugcaguuccccuggaagca

SEQ ID NO: 3179757 - RNA, 21 nt, Human
cccugcaguuccccuggaagc

SEQ ID NO: 3179758 - RNA, 17 nt, Human
cccugcaguuccccugg

SEQ ID NO: 3179759 - RNA, 17 nt, Human
cccugaggcaggucccc

SEQ ID NO: 3179760 - RNA, 20 nt, Human
cccugaggcagguccccaga

SEQ ID NO: 3179761 - RNA, 18 nt, Human
cccugaggcaggucccca

SEQ ID NO: 3179762 - RNA, 12 nt, Human
cccugaggccca

SEQ ID NO: 3179763 - RNA, 21 nt, Human
cccugaggcagguccccagac

SEQ ID NO: 3179764 - RNA, 20 nt, Human
cccugcagagggcacagaaa

SEQ ID NO: 3179765 - RNA, 13 nt, Human
cccugcagcccug

SEQ ID NO: 3179766 - RNA, 14 nt, Human
cccugcagcccugg

SEQ ID NO: 3179767 - RNA, 15 nt, Human
cccugcagcccuggc

SEQ ID NO: 3179768 - RNA, 18 nt, Human
cccugcagcccuggccca

SEQ ID NO: 3179769 - RNA, 21 nt, Human
cccugcagcucucaugcugcc

SEQ ID NO: 3179770 - RNA, 13 nt, Human
cccugcagcucuc

SEQ ID NO: 3179771 - RNA, 14 nt, Human
cccuucaaccauuc

SEQ ID NO: 3179772 - RNA, 18 nt, Human
cccuucaaccauucccca

SEQ ID NO: 3179773 - RNA, 12 nt, Human
cccuuccaugga

SEQ ID NO: 3179774 - RNA, 20 nt, Human
cccuuccaugucgccucugc

SEQ ID NO: 3179775 - RNA, 20 nt, Human
cccuuccauuucugccuuuu

SEQ ID NO: 3179776 - RNA, 18 nt, Human
cccuuccauuucugccuu

SEQ ID NO: 3179777 - RNA, 23 nt, Human
cccuuccaucugauuccagcaca

SEQ ID NO: 3179778 - RNA, 17 nt, Human
cccuuccaucugauucc

SEQ ID NO: 3179779 - RNA, 17 nt, Human
cccuuccaccugcucug

SEQ ID NO: 3179780 - RNA, 16 nt, Human
cccuuccaccugcucu

SEQ ID NO: 3179781 - RNA, 19 nt, Human
cccuuccaccugcucugcu

SEQ ID NO: 3179782 - RNA, 18 nt, Human
cccuuccaguuuauucca

SEQ ID NO: 3179783 - RNA, 15 nt, Human
cccuuacgugagucc

SEQ ID NO: 3179784 - RNA, 17 nt, Human
cccuuacgugaguccug

SEQ ID NO: 3179785 - RNA, 14 nt, Human
cccuuagcagggaa

SEQ ID NO: 3179786 - RNA, 20 nt, Human
cccuuagaaguuuguuguga

SEQ ID NO: 3179787 - RNA, 23 nt, Human
cccuuaagaaugaguuucuuaga

SEQ ID NO: 3179788 - RNA, 23 nt, Human
cccuuagcagggaaacagcuaau

SEQ ID NO: 3179789 - RNA, 19 nt, Human
cccuugcccaugcugggcu

SEQ ID NO: 3179790 - RNA, 21 nt, Human
cccuugccagcugcugagccg

SEQ ID NO: 3179791 - RNA, 14 nt, Human
cccuugccagcugc

SEQ ID NO: 3179792 - RNA, 13 nt, Human
cccuugccagcug

SEQ ID NO: 3179793 - RNA, 20 nt, Human
cccuugccagcugcugagcc

SEQ ID NO: 3179794 - RNA, 18 nt, Human
cccuugccagcugcugag

SEQ ID NO: 3179795 - RNA, 22 nt, Human
cccuugccgucuaccugagggg

SEQ ID NO: 3179796 - RNA, 22 nt, Human
cccuugcuaccacggccuccuu

SEQ ID NO: 3179797 - RNA, 14 nt, Human
cccuuccccuuccu

SEQ ID NO: 3179798 - RNA, 18 nt, Human
cccuuccccuuccuucuu

SEQ ID NO: 3179799 - RNA, 15 nt, Human
cccuuccccuuccuu

SEQ ID NO: 3179800 - RNA, 20 nt, Human
cccuuaccugccaggaagcc

SEQ ID NO: 3179801 - RNA, 23 nt, Human
cccuuaccugccaggaagccagc

SEQ ID NO: 3179802 - RNA, 17 nt, Human
cccuuaccugccaggaa

SEQ ID NO: 3179803 - RNA, 19 nt, Human
cccuuaccucggugccuuc

SEQ ID NO: 3179804 - RNA, 19 nt, Human
cccuguuuguuucugaaag

SEQ ID NO: 3179805 - RNA, 16 nt, Human
cccuguuuguuucuga

SEQ ID NO: 3179806 - RNA, 13 nt, Human
cccuguucuggca

SEQ ID NO: 3179807 - RNA, 14 nt, Human
cccuguucuggcag

SEQ ID NO: 3179808 - RNA, 14 nt, Human
cccuguaggccuca

SEQ ID NO: 3179809 - RNA, 15 nt, Human
cccuggugcugccac

SEQ ID NO: 3179810 - RNA, 15 nt, Human
cccuguaggccucag

SEQ ID NO: 3179811 - RNA, 15 nt, Human
cccugucaaacauua

SEQ ID NO: 3179812 - RNA, 20 nt, Human
cccugguggcagcucaccuc

SEQ ID NO: 3179813 - RNA, 14 nt, Human
cccugucaggaggc

SEQ ID NO: 3179814 - RNA, 21 nt, Human
cccuggugaccagcaccaucu

SEQ ID NO: 3179815 - RNA, 14 nt, Human
cccuggugcugcca

SEQ ID NO: 3179816 - RNA, 13 nt, Human
cccuggugcugcc

SEQ ID NO: 3179817 - RNA, 21 nt, Human
cccugguggcagcucaccucu

SEQ ID NO: 3179818 - RNA, 13 nt, Human
cccugguggcagu

SEQ ID NO: 3179819 - RNA, 21 nt, Human
cccuguagagugggagcugag

SEQ ID NO: 3179820 - RNA, 14 nt, Human
cccugguggcagug

SEQ ID NO: 3179821 - RNA, 18 nt, Human
cccugcuuggcccagggg

SEQ ID NO: 3179822 - RNA, 16 nt, Human
cccugcuuggcccagg

SEQ ID NO: 3179823 - RNA, 14 nt, Human
cccugcuuggccca

SEQ ID NO: 3179824 - RNA, 13 nt, Human
cccugcuguuuau

SEQ ID NO: 3179825 - RNA, 14 nt, Human
cccugcuguuuauc

SEQ ID NO: 3179826 - RNA, 19 nt, Human
cccugcugucauugcuucu

SEQ ID NO: 3179827 - RNA, 20 nt, Human
cccugcugucauugcuucuu

SEQ ID NO: 3179828 - RNA, 14 nt, Human
cccgcucagcccuc

SEQ ID NO: 3179829 - RNA, 13 nt, Human
cccgcucagcccu

SEQ ID NO: 3179830 - RNA, 12 nt, Human
cccgcucagccc

SEQ ID NO: 3179831 - RNA, 23 nt, Human
cccucccucuuucccucccuucc

SEQ ID NO: 3179832 - RNA, 17 nt, Human
cccucccggcccugccu

SEQ ID NO: 3179833 - RNA, 14 nt, Human
cccucccugccccu

SEQ ID NO: 3179834 - RNA, 21 nt, Human
cccucgucuuucccaaaggca

SEQ ID NO: 3179835 - RNA, 11 nt, Human
cccucugccca

SEQ ID NO: 3179836 - RNA, 15 nt, Human
cccucugcccacucc

SEQ ID NO: 3179837 - RNA, 18 nt, Human
cccucugcccacucccug

SEQ ID NO: 3179838 - RNA, 19 nt, Human
cccucugcccacucccugc

SEQ ID NO: 3179839 - RNA, 12 nt, Human
cccucugcccug

SEQ ID NO: 3179840 - RNA, 13 nt, Human
cccucugcccugc

SEQ ID NO: 3179841 - RNA, 14 nt, Human
cccucugcccugcg

SEQ ID NO: 3179842 - RNA, 13 nt, Human
cccucuccagcag

SEQ ID NO: 3179843 - RNA, 12 nt, Human
cccucuuucccu

SEQ ID NO: 3179844 - RNA, 16 nt, Human
cccucuucuucucaag

SEQ ID NO: 3179845 - RNA, 20 nt, Human
cccucuuucccucccuuccu

SEQ ID NO: 3179846 - RNA, 17 nt, Human
cccucuuucccucccuu

SEQ ID NO: 3179847 - RNA, 22 nt, Human
cccucuggcuccagcuggccgg

SEQ ID NO: 3179848 - RNA, 16 nt, Human
cccucuggcuccagcu

SEQ ID NO: 3179849 - RNA, 17 nt, Human
cccucuggcuccagcug

SEQ ID NO: 3179850 - RNA, 12 nt, Human
cccucuggcucc

SEQ ID NO: 3179851 - RNA, 20 nt, Human
cccucuguucugcacacagc

SEQ ID NO: 3179852 - RNA, 21 nt, Human
cccucuguucugcacacagca

SEQ ID NO: 3179853 - RNA, 22 nt, Human
cccucuucccugguaagaaaaa

SEQ ID NO: 3179854 - RNA, 14 nt, Human
cccucuucccuggu

SEQ ID NO: 3179855 - RNA, 16 nt, Human
cgagacggcacugaga

SEQ ID NO: 3179856 - RNA, 22 nt, Human
cgaaugaaaauaacugaauuug

SEQ ID NO: 3179857 - RNA, 15 nt, Human
cgaauauugcugaug

SEQ ID NO: 3179858 - RNA, 17 nt, Human
cgaauauugcugauggu

SEQ ID NO: 3179859 - RNA, 15 nt, Human
cgaaucucaaaauua

SEQ ID NO: 3179860 - RNA, 17 nt, Human
cgaaucauuuguucaaa

SEQ ID NO: 3179861 - RNA, 14 nt, Human
cgaaucauuuguuc

SEQ ID NO: 3179862 - RNA, 17 nt, Human
cgaauauugagcaauau

SEQ ID NO: 3179863 - RNA, 12 nt, Human
cgaauauugcug

SEQ ID NO: 3179864 - RNA, 14 nt, Human
cgaauauugcugau

SEQ ID NO: 3179865 - RNA, 11 nt, Human
cgaauauugcu

SEQ ID NO: 3179866 - RNA, 16 nt, Human
cgaauagcugggacua

SEQ ID NO: 3179867 - RNA, 15 nt, Human
cgaauagcugggacu

SEQ ID NO: 3179868 - RNA, 18 nt, Human
cgaaaugcugucuuucuu

SEQ ID NO: 3179869 - RNA, 18 nt, Human
cgaagauuucauccagaa

SEQ ID NO: 3179870 - RNA, 23 nt, Human
cgaacauguuuuucuucucccuc

SEQ ID NO: 3179871 - RNA, 21 nt, Human
cgaacauguuuuucuucuccc

SEQ ID NO: 3179872 - RNA, 17 nt, Human
ccuuuuuuggcugcuga

SEQ ID NO: 3179873 - RNA, 18 nt, Human
ccuuuuuuggcugcugaa

SEQ ID NO: 3179874 - RNA, 20 nt, Human
ccuuuuuuggcugcugaagg

SEQ ID NO: 3179875 - RNA, 22 nt, Human
ccuuuuuuggcugcugaaggcu

SEQ ID NO: 3179876 - RNA, 23 nt, Human
cgaaagggacuuggaagcuccgc

SEQ ID NO: 3179877 - RNA, 21 nt, Human
cgaaaggucaccucacucagc

SEQ ID NO: 3179878 - RNA, 18 nt, Human
cgaaaggucaccucacuc

SEQ ID NO: 3179879 - RNA, 16 nt, Human
cgaaaggucaccucac

SEQ ID NO: 3179880 - RNA, 15 nt, Human
cgaaaggucaccuca

SEQ ID NO: 3179881 - RNA, 16 nt, Human
cgaaaguuaguaggau

SEQ ID NO: 3179882 - RNA, 23 nt, Human
cgaaaggucaccucacucagcac

SEQ ID NO: 3179883 - RNA, 13 nt, Human
cgaaaugcugucu

SEQ ID NO: 3179884 - RNA, 22 nt, Human
cgaaaucccugcucacugcagc

SEQ ID NO: 3179885 - RNA, 16 nt, Human
cgaaaucccugcucac

SEQ ID NO: 3179886 - RNA, 15 nt, Human
cgaaaucccugcuca

SEQ ID NO: 3179887 - RNA, 14 nt, Human
ccuuugucccagaa

SEQ ID NO: 3179888 - RNA, 14 nt, Human
ccuuuguccccacc

SEQ ID NO: 3179889 - RNA, 16 nt, Human
ccuuuguccccaccgc

SEQ ID NO: 3179890 - RNA, 18 nt, Human
ccuuuguccccaccgcag

SEQ ID NO: 3179891 - RNA, 22 nt, Human
ccuuuguauucugucuucaucc

SEQ ID NO: 3179892 - RNA, 14 nt, Human
ccuuuguauucugu

SEQ ID NO: 3179893 - RNA, 20 nt, Human
ccuugugaucacuuucugaa

SEQ ID NO: 3179894 - RNA, 18 nt, Human
ccuugugaucacuuucug

SEQ ID NO: 3179895 - RNA, 20 nt, Human
ccuugugggugugagcagca

SEQ ID NO: 3179896 - RNA, 11 nt, Human
ccuuguggucc

SEQ ID NO: 3179897 - RNA, 13 nt, Human
ccuugugguccaa

SEQ ID NO: 3179898 - RNA, 16 nt, Human
ccuugugguccaaaua

SEQ ID NO: 3179899 - RNA, 17 nt, Human
ccuugugguccaaauag

SEQ ID NO: 3179900 - RNA, 21 nt, Human
ccuuugggugcuguuuugcca

SEQ ID NO: 3179901 - RNA, 19 nt, Human
ccuuugggugcuguuuugc

SEQ ID NO: 3179902 - RNA, 16 nt, Human
ccuuugggugcuguuu

SEQ ID NO: 3179903 - RNA, 21 nt, Human
ccuuuguaaauugucagaugc

SEQ ID NO: 3179904 - RNA, 15 nt, Human
ccuuuuuuggcugcu

SEQ ID NO: 3179905 - RNA, 14 nt, Human
ccuuuuuuccuuuc

SEQ ID NO: 3179906 - RNA, 16 nt, Human
ccuuuuuuccuuucca

SEQ ID NO: 3179907 - RNA, 18 nt, Human
ccuuuuuuccuuuccacc

SEQ ID NO: 3179908 - RNA, 15 nt, Human
ccuuuuuuauaucuu

SEQ ID NO: 3179909 - RNA, 22 nt, Human
ccuuuuuuauaucuuggcaggu

SEQ ID NO: 3179910 - RNA, 20 nt, Human
ccuuuguugaacuguuagaa

SEQ ID NO: 3179911 - RNA, 17 nt, Human
ccuuuguugaacuguua

SEQ ID NO: 3179912 - RNA, 15 nt, Human
ccuuugugaggaagc

SEQ ID NO: 3179913 - RNA, 16 nt, Human
ccuuugugaggaagcc

SEQ ID NO: 3179914 - RNA, 17 nt, Human
ccuuugugaggaagccg

SEQ ID NO: 3179915 - RNA, 23 nt, Human
ccuuugugaggaagccgcugggg

SEQ ID NO: 3179916 - RNA, 22 nt, Human
ccuuuguccccaccgcagacag

SEQ ID NO: 3179917 - RNA, 23 nt, Human
ccuuuguccccaccgcagacagg

SEQ ID NO: 3179918 - RNA, 14 nt, Human
ccuuugugaggaag

SEQ ID NO: 3179919 - RNA, 21 nt, Human
ccuuuguccuccugcugccag

SEQ ID NO: 3179920 - RNA, 16 nt, Human
ccuuuguccuccugcu

SEQ ID NO: 3179921 - RNA, 13 nt, Human
ccuuuguccuccu

SEQ ID NO: 3179922 - RNA, 20 nt, Human
ccuguggaugauaaaacaca

SEQ ID NO: 3179923 - RNA, 16 nt, Human
ccuguggccugccagu

SEQ ID NO: 3179924 - RNA, 20 nt, Human
ccugugggcccccaaaugga

SEQ ID NO: 3179925 - RNA, 17 nt, Human
ccugugccuuuugccau

SEQ ID NO: 3179926 - RNA, 19 nt, Human
ccugugccucugggacugg

SEQ ID NO: 3179927 - RNA, 20 nt, Human
ccugugccucugggacugga

SEQ ID NO: 3179928 - RNA, 11 nt, Human
ccuucauuuaa

SEQ ID NO: 3179929 - RNA, 16 nt, Human
ccuucggccuccaucc

SEQ ID NO: 3179930 - RNA, 17 nt, Human
ccuucggccuccauccu

SEQ ID NO: 3179931 - RNA, 23 nt, Human
ccuuccugggcacacgcugcucu

SEQ ID NO: 3179932 - RNA, 22 nt, Human
ccuuccugggcacacgcugcuc

SEQ ID NO: 3179933 - RNA, 21 nt, Human
ccuuccugggcacacgcugcu

SEQ ID NO: 3179934 - RNA, 17 nt, Human
ccuuccugggcacacgc

SEQ ID NO: 3179935 - RNA, 18 nt, Human
ccuucggccuccauccug

SEQ ID NO: 3179936 - RNA, 15 nt, Human
ccuucgguacccacc

SEQ ID NO: 3179937 - RNA, 17 nt, Human
ccuuccauggacuuugu

SEQ ID NO: 3179938 - RNA, 16 nt, Human
ccuuccaucugauucc

SEQ ID NO: 3179939 - RNA, 18 nt, Human
ccuuccaugucgccucug

SEQ ID NO: 3179940 - RNA, 13 nt, Human
ccuuccugggcac

SEQ ID NO: 3179941 - RNA, 22 nt, Human
ccuuccaggggugggacacccu

SEQ ID NO: 3179942 - RNA, 13 nt, Human
ccuuccaggggug

SEQ ID NO: 3179943 - RNA, 12 nt, Human
ccuucucuccag

SEQ ID NO: 3179944 - RNA, 13 nt, Human
ccuucucuccagc

SEQ ID NO: 3179945 - RNA, 15 nt, Human
ccuucucuccagccc

SEQ ID NO: 3179946 - RNA, 16 nt, Human
ccuucucuccagcccc

SEQ ID NO: 3179947 - RNA, 22 nt, Human
ccuucucacauggaaugagggu

SEQ ID NO: 3179948 - RNA, 20 nt, Human
ccuucgugacaauguuuaca

SEQ ID NO: 3179949 - RNA, 19 nt, Human
ccuucgugacaauguuuac

SEQ ID NO: 3179950 - RNA, 17 nt, Human
ccuucgguacccaccac

SEQ ID NO: 3179951 - RNA, 21 nt, Human
ccuuguaauguaacugcucuu

SEQ ID NO: 3179952 - RNA, 18 nt, Human
ccuuguauaauauugaaa

SEQ ID NO: 3179953 - RNA, 18 nt, Human
ccuuguaauguaacugcu

SEQ ID NO: 3179954 - RNA, 16 nt, Human
ccuuguaauguaacug

SEQ ID NO: 3179955 - RNA, 15 nt, Human
ccuuguaauguaacu

SEQ ID NO: 3179956 - RNA, 17 nt, Human
ccuugguuccuggggca

SEQ ID NO: 3179957 - RNA, 12 nt, Human
ccuugguuccug

SEQ ID NO: 3179958 - RNA, 13 nt, Human
ccuugguuggaag

SEQ ID NO: 3179959 - RNA, 19 nt, Human
ccuuggugucgggcaugac

SEQ ID NO: 3179960 - RNA, 20 nt, Human
ccuuggugucgggcaugaca

SEQ ID NO: 3179961 - RNA, 19 nt, Human
ccuuggggacaaccuuggc

SEQ ID NO: 3179962 - RNA, 14 nt, Human
ccuuggggagcagg

SEQ ID NO: 3179963 - RNA, 16 nt, Human
ccuugggcucugcuga

SEQ ID NO: 3179964 - RNA, 18 nt, Human
ccuuggcuuggcccuggc

SEQ ID NO: 3179965 - RNA, 16 nt, Human
ccuuggcuuggcccug

SEQ ID NO: 3179966 - RNA, 15 nt, Human
ccuugggcucugcug

SEQ ID NO: 3179967 - RNA, 16 nt, Human
ccuuggcugcagggag

SEQ ID NO: 3179968 - RNA, 14 nt, Human
ccuuggcugcaggg

SEQ ID NO: 3179969 - RNA, 15 nt, Human
ccuuggacucauuuu

SEQ ID NO: 3179970 - RNA, 15 nt, Human
ccuuggauugucccc

SEQ ID NO: 3179971 - RNA, 22 nt, Human
ccuuggcucaaguccucuuuuc

SEQ ID NO: 3179972 - RNA, 17 nt, Human
ccuucucuccagccccu

SEQ ID NO: 3179973 - RNA, 18 nt, Human
ccuucucuccagccccug

SEQ ID NO: 3179974 - RNA, 21 nt, Human
ccuugacagggcacaccgggc

SEQ ID NO: 3179975 - RNA, 18 nt, Human
ccuugacagggcacaccg

SEQ ID NO: 3179976 - RNA, 23 nt, Human
ccuugacauuguagagcuucugg

SEQ ID NO: 3179977 - RNA, 19 nt, Human
ccuucucuccagccccugg

SEQ ID NO: 3179978 - RNA, 19 nt, Human
cgcgguggcucacgccugu

SEQ ID NO: 3179979 - RNA, 14 nt, Human
cgcgacaaugcaaa

SEQ ID NO: 3179980 - RNA, 18 nt, Human
cgccuuucagcaggcagc

SEQ ID NO: 3179981 - RNA, 17 nt, Human
cgcuacccgggaagggg

SEQ ID NO: 3179982 - RNA, 18 nt, Human
cgcuaacuugcuuaaaug

SEQ ID NO: 3179983 - RNA, 20 nt, Human
cgcuaacuugcuuaaaugug

SEQ ID NO: 3179984 - RNA, 19 nt, Human
cgcuaacuugcuuaaaugu

SEQ ID NO: 3179985 - RNA, 18 nt, Human
cgcuacccgggaaggggg

SEQ ID NO: 3179986 - RNA, 21 nt, Human
cgcuacccgggaagggggcug

SEQ ID NO: 3179987 - RNA, 24 nt, Human
cgcuacccgggaagggggcuggga

SEQ ID NO: 3179988 - RNA, 12 nt, Human
cgcccagucugg

SEQ ID NO: 3179989 - RNA, 13 nt, Human
cgccccuuccccc

SEQ ID NO: 3179990 - RNA, 21 nt, Human
cgcccagucuggaaugcagug

SEQ ID NO: 3179991 - RNA, 18 nt, Human
cgcccggcuaauuuuugu

SEQ ID NO: 3179992 - RNA, 19 nt, Human
cgcccagucuggaaugcag

SEQ ID NO: 3179993 - RNA, 13 nt, Human
cgcccagucugga

SEQ ID NO: 3179994 - RNA, 18 nt, Human
cgcccaacuaauuuuugu

SEQ ID NO: 3179995 - RNA, 18 nt, Human
cgcagcccugcagagggc

SEQ ID NO: 3179996 - RNA, 19 nt, Human
cgcagcccugcagagggca

SEQ ID NO: 3179997 - RNA, 24 nt, Human
cgcagcccugcuuugggcugcccu

SEQ ID NO: 3179998 - RNA, 15 nt, Human
cgcagcccugcuuug

SEQ ID NO: 3179999 - RNA, 13 nt, Human
cgcagcccugcuu

SEQ ID NO: 3180000 - RNA, 18 nt, Human
cgcagcauccgaccaggu

SEQ ID NO: 3180001 - RNA, 20 nt, Human
cgcccaaaccuuucccccau

SEQ ID NO: 3180002 - RNA, 20 nt, Human
cggacagccacggccaggcc

SEQ ID NO: 3180003 - RNA, 14 nt, Human
cggaauaguuggcu

SEQ ID NO: 3180004 - RNA, 17 nt, Human
cggaauaguuggcuagg

SEQ ID NO: 3180005 - RNA, 16 nt, Human
cggaauaguuggcuag

SEQ ID NO: 3180006 - RNA, 16 nt, Human
cgcuuucuacccagcg

SEQ ID NO: 3180007 - RNA, 14 nt, Human
cgcuuucuacccag

SEQ ID NO: 3180008 - RNA, 22 nt, Human
cggacagccacggccaggccag

SEQ ID NO: 3180009 - RNA, 21 nt, Human
cggacagccacggccaggcca

SEQ ID NO: 3180010 - RNA, 16 nt, Human
cggacuuagcugggag

SEQ ID NO: 3180011 - RNA, 15 nt, Human
cggagaaaggaaggg

SEQ ID NO: 3180012 - RNA, 17 nt, Human
cggacuuagcugggaga

SEQ ID NO: 3180013 - RNA, 13 nt, Human
cgcugugcugccc

SEQ ID NO: 3180014 - RNA, 14 nt, Human
cgcugugcugcccu

SEQ ID NO: 3180015 - RNA, 11 nt, Human
cgcugugcugc

SEQ ID NO: 3180016 - RNA, 21 nt, Human
cgcuaacuugcuuaaauguga

SEQ ID NO: 3180017 - RNA, 16 nt, Human
cgcucccuugaccugc

SEQ ID NO: 3180018 - RNA, 20 nt, Human
cgcuccgggacguggcaccu

SEQ ID NO: 3180019 - RNA, 21 nt, Human
cgcugugcugcccugcccacc

SEQ ID NO: 3180020 - RNA, 23 nt, Human
cgcugugcugcccugcccaccug

SEQ ID NO: 3180021 - RNA, 19 nt, Human
cgcugugcugcccugccca

SEQ ID NO: 3180022 - RNA, 18 nt, Human
cgcugugcugcccugccc

SEQ ID NO: 3180023 - RNA, 11 nt, Human
cgcuucacagg

SEQ ID NO: 3180024 - RNA, 22 nt, Human
cgcuucccugguucaagcgauu

SEQ ID NO: 3180025 - RNA, 20 nt, Human
cgcuucccugguucaagcga

SEQ ID NO: 3180026 - RNA, 19 nt, Human
cgggaagggggcugggaca

SEQ ID NO: 3180027 - RNA, 20 nt, Human
cgggaagggggcugggacau

SEQ ID NO: 3180028 - RNA, 16 nt, Human
cgggaagggggcuggg

SEQ ID NO: 3180029 - RNA, 23 nt, Human
cggcuggcagcccaccccucaac

SEQ ID NO: 3180030 - RNA, 13 nt, Human
cggcuggccuggc

SEQ ID NO: 3180031 - RNA, 14 nt, Human
cggcuggcagccca

SEQ ID NO: 3180032 - RNA, 13 nt, Human
cggccucuucucu

SEQ ID NO: 3180033 - RNA, 17 nt, Human
cggccucuucucucaga

SEQ ID NO: 3180034 - RNA, 18 nt, Human
cggccucuucucucagac

SEQ ID NO: 3180035 - RNA, 19 nt, Human
cggccucuucucucagacc

SEQ ID NO: 3180036 - RNA, 11 nt, Human
cggccaggcca

SEQ ID NO: 3180037 - RNA, 17 nt, Human
cggaucaggcucccagg

SEQ ID NO: 3180038 - RNA, 16 nt, Human
cggaucaggcucccag

SEQ ID NO: 3180039 - RNA, 14 nt, Human
cggaucagcugagc

SEQ ID NO: 3180040 - RNA, 14 nt, Human
cggauccccuuccu

SEQ ID NO: 3180041 - RNA, 20 nt, Human
cggccaggccagagggagug

SEQ ID NO: 3180042 - RNA, 12 nt, Human
cggccaggccag

SEQ ID NO: 3180043 - RNA, 16 nt, Human
cgaggacagggaggug

SEQ ID NO: 3180044 - RNA, 19 nt, Human
cgagcccugguggcagugg

SEQ ID NO: 3180045 - RNA, 12 nt, Human
cgagagcgcagc

SEQ ID NO: 3180046 - RNA, 14 nt, Human
cgaggacagggagg

SEQ ID NO: 3180047 - RNA, 21 nt, Human
cgagccuuuucacccuucuac

SEQ ID NO: 3180048 - RNA, 18 nt, Human
cgagcccugguggcagug

SEQ ID NO: 3180049 - RNA, 22 nt, Human
cgagcccuugcccaugcugggc

SEQ ID NO: 3180050 - RNA, 13 nt, Human
cgcacugggcuug

SEQ ID NO: 3180051 - RNA, 18 nt, Human
cgauggauauauguuuuu

SEQ ID NO: 3180052 - RNA, 15 nt, Human
cgaugcagacagggg

SEQ ID NO: 3180053 - RNA, 19 nt, Human
cgaugcaaacauuggaaga

SEQ ID NO: 3180054 - RNA, 23 nt, Human
cgaugcagacagggggccagaac

SEQ ID NO: 3180055 - RNA, 19 nt, Human
cgcagcauauucaggaagc

SEQ ID NO: 3180056 - RNA, 20 nt, Human
cgcagcauauucaggaagcu

SEQ ID NO: 3180057 - RNA, 15 nt, Human
cgcagcccugcagag

SEQ ID NO: 3180058 - RNA, 17 nt, Human
cgcagcccugcagaggg

SEQ ID NO: 3180059 - RNA, 17 nt, Human
cgcacugggcuugggga

SEQ ID NO: 3180060 - RNA, 13 nt, Human
cgcacucuggcag

SEQ ID NO: 3180061 - RNA, 19 nt, Human
cgcagagggaauuuuuccc

SEQ ID NO: 3180062 - RNA, 15 nt, Human
ccucuuccaggcccc

SEQ ID NO: 3180063 - RNA, 16 nt, Human
ccuaugaccauaaaau

SEQ ID NO: 3180064 - RNA, 12 nt, Human
ccugaaaauauc

SEQ ID NO: 3180065 - RNA, 11 nt, Human
ccucuuccuga

SEQ ID NO: 3180066 - RNA, 14 nt, Human
ccucuuccuggccg

SEQ ID NO: 3180067 - RNA, 19 nt, Human
ccugaagagaagggcaggg

SEQ ID NO: 3180068 - RNA, 19 nt, Human
ccugaaaugugugugaugu

SEQ ID NO: 3180069 - RNA, 21 nt, Human
ccugaagacucauucuucugu

SEQ ID NO: 3180070 - RNA, 15 nt, Human
ccugaaauccugguu

SEQ ID NO: 3180071 - RNA, 17 nt, Human
ccugaaauccugguucc

SEQ ID NO: 3180072 - RNA, 12 nt, Human
ccugaaaugugu

SEQ ID NO: 3180073 - RNA, 18 nt, Human
ccugaaaugugugugaug

SEQ ID NO: 3180074 - RNA, 17 nt, Human
ccugaaaugugugugau

SEQ ID NO: 3180075 - RNA, 18 nt, Human
ccugaaagcccugagcuu

SEQ ID NO: 3180076 - RNA, 13 nt, Human
ccugaaagcccug

SEQ ID NO: 3180077 - RNA, 14 nt, Human
ccugaaagcccuga

SEQ ID NO: 3180078 - RNA, 22 nt, Human
ccugaaggccccgcccaggcuu

SEQ ID NO: 3180079 - RNA, 16 nt, Human
ccugaagggguuuucu

SEQ ID NO: 3180080 - RNA, 20 nt, Human
ccugaaggccccgcccaggc

SEQ ID NO: 3180081 - RNA, 21 nt, Human
ccugaaggccccgcccaggcu

SEQ ID NO: 3180082 - RNA, 18 nt, Human
ccugaaggccccgcccag

SEQ ID NO: 3180083 - RNA, 19 nt, Human
ccugaaggccccgcccagg

SEQ ID NO: 3180084 - RNA, 14 nt, Human
ccugaaggccccgc

SEQ ID NO: 3180085 - RNA, 15 nt, Human
ccugagcugggauga

SEQ ID NO: 3180086 - RNA, 15 nt, Human
ccugcacugacucug

SEQ ID NO: 3180087 - RNA, 18 nt, Human
ccugcacugacucuggaa

SEQ ID NO: 3180088 - RNA, 16 nt, Human
ccugcacugacucugg

SEQ ID NO: 3180089 - RNA, 21 nt, Human
ccugcacacgcuccuuccucu

SEQ ID NO: 3180090 - RNA, 23 nt, Human
ccugcacaaagcccuuccauguc

SEQ ID NO: 3180091 - RNA, 15 nt, Human
ccugcaaagcccagc

SEQ ID NO: 3180092 - RNA, 16 nt, Human
ccugcaaagcccagcu

SEQ ID NO: 3180093 - RNA, 14 nt, Human
ccugcaaagcccag

SEQ ID NO: 3180094 - RNA, 17 nt, Human
ccugcaaagcccagcuu

SEQ ID NO: 3180095 - RNA, 18 nt, Human
ccugcaaagcccagcuug

SEQ ID NO: 3180096 - RNA, 20 nt, Human
ccugcacaaagcccuuccau

SEQ ID NO: 3180097 - RNA, 22 nt, Human
ccugcacaaagcccuuccaugu

SEQ ID NO: 3180098 - RNA, 21 nt, Human
ccugaucccugaucccuucca

SEQ ID NO: 3180099 - RNA, 22 nt, Human
ccugaucccuuccaccugcucu

SEQ ID NO: 3180100 - RNA, 19 nt, Human
ccugaucccuuccaccugc

SEQ ID NO: 3180101 - RNA, 23 nt, Human
ccugaucccuuccaccugcucug

SEQ ID NO: 3180102 - RNA, 13 nt, Human
ccugccacccugg

SEQ ID NO: 3180103 - RNA, 12 nt, Human
ccugccacccug

SEQ ID NO: 3180104 - RNA, 14 nt, Human
ccugccacccuggg

SEQ ID NO: 3180105 - RNA, 22 nt, Human
ccugccacccuggggagaaagu

SEQ ID NO: 3180106 - RNA, 16 nt, Human
ccugccacccugggga

SEQ ID NO: 3180107 - RNA, 19 nt, Human
ccugccaauggacuaacuu

SEQ ID NO: 3180108 - RNA, 15 nt, Human
ccugccaccacgccc

SEQ ID NO: 3180109 - RNA, 19 nt, Human
ccugccaccacgcccggcu

SEQ ID NO: 3180110 - RNA, 23 nt, Human
ccugcauuugugaaaugauggug

SEQ ID NO: 3180111 - RNA, 13 nt, Human
ccugaggcuccac

SEQ ID NO: 3180112 - RNA, 14 nt, Human
ccugaggcuccacu

SEQ ID NO: 3180113 - RNA, 13 nt, Human
ccugaggcugggc

SEQ ID NO: 3180114 - RNA, 14 nt, Human
ccugaggcugggcu

SEQ ID NO: 3180115 - RNA, 15 nt, Human
ccugaggcugggcuc

SEQ ID NO: 3180116 - RNA, 12 nt, Human
ccugagcuggga

SEQ ID NO: 3180117 - RNA, 15 nt, Human
ccugaggcccagagg

SEQ ID NO: 3180118 - RNA, 16 nt, Human
ccugaggcccagaggg

SEQ ID NO: 3180119 - RNA, 17 nt, Human
ccugaggcccagagggc

SEQ ID NO: 3180120 - RNA, 15 nt, Human
ccugagccagauuuc

SEQ ID NO: 3180121 - RNA, 12 nt, Human
ccugagccagau

SEQ ID NO: 3180122 - RNA, 16 nt, Human
ccugagccagauuuca

SEQ ID NO: 3180123 - RNA, 18 nt, Human
ccugagccagauuucacu

SEQ ID NO: 3180124 - RNA, 19 nt, Human
ccugaagucacacagugag

SEQ ID NO: 3180125 - RNA, 20 nt, Human
ccugaagucacacagugagu

SEQ ID NO: 3180126 - RNA, 22 nt, Human
ccugaagucuuuguacagacaa

SEQ ID NO: 3180127 - RNA, 20 nt, Human
ccugaaguuauguguaugug

SEQ ID NO: 3180128 - RNA, 17 nt, Human
ccugaagggguuuucuu

SEQ ID NO: 3180129 - RNA, 19 nt, Human
ccugaaguaagcaaagacu

SEQ ID NO: 3180130 - RNA, 13 nt, Human
ccugagcccccag

SEQ ID NO: 3180131 - RNA, 15 nt, Human
ccugagcccccagcu

SEQ ID NO: 3180132 - RNA, 14 nt, Human
ccugagcccccagc

SEQ ID NO: 3180133 - RNA, 18 nt, Human
ccugagcccccagcuucc

SEQ ID NO: 3180134 - RNA, 21 nt, Human
ccugcccuuuguccuccugcu

SEQ ID NO: 3180135 - RNA, 19 nt, Human
ccugcccuuuguccuccug

SEQ ID NO: 3180136 - RNA, 15 nt, Human
ccugcccugugggcc

SEQ ID NO: 3180137 - RNA, 19 nt, Human
ccugcccuuaccugccagg

SEQ ID NO: 3180138 - RNA, 21 nt, Human
ccugcccuuaccugccaggaa

SEQ ID NO: 3180139 - RNA, 22 nt, Human
ccugcccuuaccugccaggaag

SEQ ID NO: 3180140 - RNA, 14 nt, Human
ccugccuguugggc

SEQ ID NO: 3180141 - RNA, 22 nt, Human
ccugccuguucccauucuugca

SEQ ID NO: 3180142 - RNA, 11 nt, Human
ccugccucagc

SEQ ID NO: 3180143 - RNA, 12 nt, Human
ccugccucagcc

SEQ ID NO: 3180144 - RNA, 14 nt, Human
ccugccucagccuc

SEQ ID NO: 3180145 - RNA, 13 nt, Human
ccugccucagccu

SEQ ID NO: 3180146 - RNA, 12 nt, Human
ccugcccugugg

SEQ ID NO: 3180147 - RNA, 14 nt, Human
ccugcccugugggc

SEQ ID NO: 3180148 - RNA, 11 nt, Human
ccugcccugug

SEQ ID NO: 3180149 - RNA, 23 nt, Human
ccugcccugguuuccugcccugg

SEQ ID NO: 3180150 - RNA, 21 nt, Human
ccugcccugucaggaggcaga

SEQ ID NO: 3180151 - RNA, 18 nt, Human
ccugcccugucaggaggc

SEQ ID NO: 3180152 - RNA, 19 nt, Human
ccugcccugguuuccugcc

SEQ ID NO: 3180153 - RNA, 20 nt, Human
ccugcccugguuuccugccc

SEQ ID NO: 3180154 - RNA, 21 nt, Human
ccugcccugguuuccugcccu

SEQ ID NO: 3180155 - RNA, 22 nt, Human
ccugcccugguuuccugcccug

SEQ ID NO: 3180156 - RNA, 20 nt, Human
ccugcccugggaggcaguga

SEQ ID NO: 3180157 - RNA, 22 nt, Human
ccugcccugggaggcagugaug

SEQ ID NO: 3180158 - RNA, 14 nt, Human
ccugcccugguuuc

SEQ ID NO: 3180159 - RNA, 10 nt, Human
ccugcccugg

SEQ ID NO: 3180160 - RNA, 12 nt, Human
ccugcccuggga

SEQ ID NO: 3180161 - RNA, 14 nt, Human
ccugcccugggagg

SEQ ID NO: 3180162 - RNA, 15 nt, Human
ccugcccugggaggc

SEQ ID NO: 3180163 - RNA, 17 nt, Human
ccugccccugagcccau

SEQ ID NO: 3180164 - RNA, 19 nt, Human
ccugccccuccucucugcc

SEQ ID NO: 3180165 - RNA, 20 nt, Human
ccugccccuccucucugccc

SEQ ID NO: 3180166 - RNA, 21 nt, Human
ccugccccuccucucugcccu

SEQ ID NO: 3180167 - RNA, 22 nt, Human
ccugccccuccucucugcccua

SEQ ID NO: 3180168 - RNA, 14 nt, Human
ccugccccucccuu

SEQ ID NO: 3180169 - RNA, 18 nt, Human
ccugccccuccucucugc

SEQ ID NO: 3180170 - RNA, 18 nt, Human
ccugccccucccuucaac

SEQ ID NO: 3180171 - RNA, 16 nt, Human
ccugccccucccuuca

SEQ ID NO: 3180172 - RNA, 15 nt, Human
ccugccccucccuuc

SEQ ID NO: 3180173 - RNA, 16 nt, Human
ccugcccggcugcgga

SEQ ID NO: 3180174 - RNA, 14 nt, Human
ccugcccggcugcg

SEQ ID NO: 3180175 - RNA, 16 nt, Human
ccugccccugcuacug

SEQ ID NO: 3180176 - RNA, 20 nt, Human
ccugcccggauggagcgggg

SEQ ID NO: 3180177 - RNA, 12 nt, Human
ccugccaggcau

SEQ ID NO: 3180178 - RNA, 21 nt, Human
ccugccaggcacaggcagggc

SEQ ID NO: 3180179 - RNA, 20 nt, Human
ccugccaggcacaggcaggg

SEQ ID NO: 3180180 - RNA, 19 nt, Human
ccugccaggcacaggcagg

SEQ ID NO: 3180181 - RNA, 18 nt, Human
ccugccaggcacaggcag

SEQ ID NO: 3180182 - RNA, 16 nt, Human
ccugccaggcacaggc

SEQ ID NO: 3180183 - RNA, 15 nt, Human
ccugccaggcacagg

SEQ ID NO: 3180184 - RNA, 14 nt, Human
ccugccaggcacag

SEQ ID NO: 3180185 - RNA, 13 nt, Human
ccugccaggcaca

SEQ ID NO: 3180186 - RNA, 22 nt, Human
ccugccagggacagagggggug

SEQ ID NO: 3180187 - RNA, 23 nt, Human
ccugccaggcacaggcagggcag

SEQ ID NO: 3180188 - RNA, 22 nt, Human
ccugccaggcacaggcagggca

SEQ ID NO: 3180189 - RNA, 14 nt, Human
ccugccccccagcc

SEQ ID NO: 3180190 - RNA, 22 nt, Human
ccugccuguugggccaggagcc

SEQ ID NO: 3180191 - RNA, 20 nt, Human
ccugguccucacacucaccc

SEQ ID NO: 3180192 - RNA, 19 nt, Human
ccugguccuaggcuggaag

SEQ ID NO: 3180193 - RNA, 24 nt, Human
ccugguccuaggcuggaaggagga

SEQ ID NO: 3180194 - RNA, 16 nt, Human
ccuggucgccuuccac

SEQ ID NO: 3180195 - RNA, 21 nt, Human
ccuggucgccuuccaccucug

SEQ ID NO: 3180196 - RNA, 19 nt, Human
ccuggguuagacugccagc

SEQ ID NO: 3180197 - RNA, 17 nt, Human
ccuggguuagacugcca

SEQ ID NO: 3180198 - RNA, 22 nt, Human
ccuggguuagacugccagcucu

SEQ ID NO: 3180199 - RNA, 21 nt, Human
ccuggguuagacugccagcuc

SEQ ID NO: 3180200 - RNA, 20 nt, Human
ccuggguuagacugccagcu

SEQ ID NO: 3180201 - RNA, 18 nt, Human
ccugguggcagcugcggu

SEQ ID NO: 3180202 - RNA, 17 nt, Human
ccugguggcagcugcgg

SEQ ID NO: 3180203 - RNA, 16 nt, Human
ccugguggcagcugcg

SEQ ID NO: 3180204 - RNA, 15 nt, Human
ccugguggcagcugc

SEQ ID NO: 3180205 - RNA, 19 nt, Human
ccugguggcagcucaccuc

SEQ ID NO: 3180206 - RNA, 21 nt, Human
ccugguggcagcucaccucuc

SEQ ID NO: 3180207 - RNA, 22 nt, Human
ccugguggcagcucaccucucc

SEQ ID NO: 3180208 - RNA, 14 nt, Human
ccugguggcagcug

SEQ ID NO: 3180209 - RNA, 12 nt, Human
ccugucccccug

SEQ ID NO: 3180210 - RNA, 13 nt, Human
ccugucccccuga

SEQ ID NO: 3180211 - RNA, 14 nt, Human
ccugucccccugac

SEQ ID NO: 3180212 - RNA, 15 nt, Human
ccugucccccugaca

SEQ ID NO: 3180213 - RNA, 21 nt, Human
ccugucaucugagaaugaaca

SEQ ID NO: 3180214 - RNA, 16 nt, Human
ccugucaggaggcaga

SEQ ID NO: 3180215 - RNA, 13 nt, Human
ccugucaggaggc

SEQ ID NO: 3180216 - RNA, 13 nt, Human
ccuguagcccuaa

SEQ ID NO: 3180217 - RNA, 15 nt, Human
ccuguagagugggag

SEQ ID NO: 3180218 - RNA, 16 nt, Human
ccuguagagugggagc

SEQ ID NO: 3180219 - RNA, 14 nt, Human
ccugguggcagugg

SEQ ID NO: 3180220 - RNA, 13 nt, Human
ccugguggcagug

SEQ ID NO: 3180221 - RNA, 13 nt, Human
ccuggucuuugag

SEQ ID NO: 3180222 - RNA, 20 nt, Human
ccuggucuuugagcucccac

SEQ ID NO: 3180223 - RNA, 19 nt, Human
ccugggggcugggcagagg

SEQ ID NO: 3180224 - RNA, 20 nt, Human
ccugggggcugggcagagga

SEQ ID NO: 3180225 - RNA, 21 nt, Human
ccugggggcugggcagaggaa

SEQ ID NO: 3180226 - RNA, 18 nt, Human
ccugggggcugggcagag

SEQ ID NO: 3180227 - RNA, 20 nt, Human
ccuggggucaggccgggcag

SEQ ID NO: 3180228 - RNA, 22 nt, Human
ccuggggucaggccgggcagag

SEQ ID NO: 3180229 - RNA, 14 nt, Human
ccuggggugcaggc

SEQ ID NO: 3180230 - RNA, 15 nt, Human
ccugggcagaaggaa

SEQ ID NO: 3180231 - RNA, 18 nt, Human
ccugggagugagcugguu

SEQ ID NO: 3180232 - RNA, 16 nt, Human
ccugggcagaaggaag

SEQ ID NO: 3180233 - RNA, 22 nt, Human
ccugggaggucaaggcugcagu

SEQ ID NO: 3180234 - RNA, 16 nt, Human
ccugggagugagcugg

SEQ ID NO: 3180235 - RNA, 16 nt, Human
ccuggcccacugcauc

SEQ ID NO: 3180236 - RNA, 11 nt, Human
ccuggcucccc

SEQ ID NO: 3180237 - RNA, 13 nt, Human
ccuggcuccccug

SEQ ID NO: 3180238 - RNA, 14 nt, Human
ccuggcuccccugg

SEQ ID NO: 3180239 - RNA, 15 nt, Human
ccuggcuccccuggg

SEQ ID NO: 3180240 - RNA, 16 nt, Human
ccuggcuccccugggg

SEQ ID NO: 3180241 - RNA, 12 nt, Human
ccuggcucccuc

SEQ ID NO: 3180242 - RNA, 14 nt, Human
ccuggcucccucac

SEQ ID NO: 3180243 - RNA, 22 nt, Human
ccuggcucccucacucucagga

SEQ ID NO: 3180244 - RNA, 21 nt, Human
ccuggcucccucacucucagg

SEQ ID NO: 3180245 - RNA, 20 nt, Human
ccuggcucccucacucucag

SEQ ID NO: 3180246 - RNA, 19 nt, Human
ccuggcucccucacucuca

SEQ ID NO: 3180247 - RNA, 21 nt, Human
ccuggcccauguauggccagg

SEQ ID NO: 3180248 - RNA, 15 nt, Human
ccuggcccauguaug

SEQ ID NO: 3180249 - RNA, 13 nt, Human
ccuggcccaugua

SEQ ID NO: 3180250 - RNA, 19 nt, Human
ccugggacagggagcagcc

SEQ ID NO: 3180251 - RNA, 16 nt, Human
ccuggcuuuucacugc

SEQ ID NO: 3180252 - RNA, 17 nt, Human
ccuggcuuuucacugcu

SEQ ID NO: 3180253 - RNA, 19 nt, Human
ccugggaaagagauuuaaa

SEQ ID NO: 3180254 - RNA, 13 nt, Human
ccuggcacugcuu

SEQ ID NO: 3180255 - RNA, 16 nt, Human
ccuggcacugcuucca

SEQ ID NO: 3180256 - RNA, 13 nt, Human
ccuggcaggcagg

SEQ ID NO: 3180257 - RNA, 12 nt, Human
ccuggcaggcag

SEQ ID NO: 3180258 - RNA, 23 nt, Human
ccuggcaggcaggggcccugcag

SEQ ID NO: 3180259 - RNA, 21 nt, Human
ccuggcaggcaggggcccugc

SEQ ID NO: 3180260 - RNA, 15 nt, Human
ccuggcaggcagggg

SEQ ID NO: 3180261 - RNA, 14 nt, Human
ccuggcaggcaggg

SEQ ID NO: 3180262 - RNA, 13 nt, Human
ccuggcaugggaa

SEQ ID NO: 3180263 - RNA, 21 nt, Human
ccuggcagguuguuagaaaaa

SEQ ID NO: 3180264 - RNA, 23 nt, Human
ccuggcaugggaaugaaugucag

SEQ ID NO: 3180265 - RNA, 20 nt, Human
ccuggccagaugcaccagcc

SEQ ID NO: 3180266 - RNA, 23 nt, Human
ccuggccagaugcaccagcccuu

SEQ ID NO: 3180267 - RNA, 21 nt, Human
ccuggccagaugcaccagccc

SEQ ID NO: 3180268 - RNA, 13 nt, Human
ccuggcccacugc

SEQ ID NO: 3180269 - RNA, 14 nt, Human
ccuggcccacugca

SEQ ID NO: 3180270 - RNA, 13 nt, Human
ccuggccacgccc

SEQ ID NO: 3180271 - RNA, 12 nt, Human
ccuggcacugcu

SEQ ID NO: 3180272 - RNA, 22 nt, Human
ccuggcacuauaauguaagcuc

SEQ ID NO: 3180273 - RNA, 18 nt, Human
ccuggcacccggccccug

SEQ ID NO: 3180274 - RNA, 20 nt, Human
ccuggcacccggccccugcu

SEQ ID NO: 3180275 - RNA, 19 nt, Human
ccuggcacccggccccugc

SEQ ID NO: 3180276 - RNA, 16 nt, Human
ccuggagaacuagaga

SEQ ID NO: 3180277 - RNA, 13 nt, Human
ccuggagaacuag

SEQ ID NO: 3180278 - RNA, 12 nt, Human
ccuggagaacua

SEQ ID NO: 3180279 - RNA, 18 nt, Human
ccugccuguugggccagg

SEQ ID NO: 3180280 - RNA, 19 nt, Human
ccugccuguugggccagga

SEQ ID NO: 3180281 - RNA, 20 nt, Human
ccugccuguugggccaggag

SEQ ID NO: 3180282 - RNA, 21 nt, Human
ccugcuaauuccccagauugc

SEQ ID NO: 3180283 - RNA, 17 nt, Human
ccugcuaauuccccaga

SEQ ID NO: 3180284 - RNA, 13 nt, Human
ccugcuacugcca

SEQ ID NO: 3180285 - RNA, 21 nt, Human
ccugcuacugccaaccucgcu

SEQ ID NO: 3180286 - RNA, 18 nt, Human
ccugcuacugccaaccuc

SEQ ID NO: 3180287 - RNA, 15 nt, Human
ccugcuacugccaac

SEQ ID NO: 3180288 - RNA, 14 nt, Human
cuccacucuccucu

SEQ ID NO: 3180289 - RNA, 13 nt, Human
cuccacugccuuc

SEQ ID NO: 3180290 - RNA, 13 nt, Human
cuccacuggaugg

SEQ ID NO: 3180291 - RNA, 16 nt, Human
cuccacugccuucgau

SEQ ID NO: 3180292 - RNA, 15 nt, Human
cuccacugccuucga

SEQ ID NO: 3180293 - RNA, 14 nt, Human
cuccacugccuucg

SEQ ID NO: 3180294 - RNA, 18 nt, Human
cuccaaggugauguugua

SEQ ID NO: 3180295 - RNA, 20 nt, Human
cuccaaggccaggccuuggg

SEQ ID NO: 3180296 - RNA, 19 nt, Human
cuccaaggccaggccuugg

SEQ ID NO: 3180297 - RNA, 14 nt, Human
cuccaaggccaggc

SEQ ID NO: 3180298 - RNA, 16 nt, Human
cuccagagucagaagu

SEQ ID NO: 3180299 - RNA, 21 nt, Human
cuccagagcugcggugucucc

SEQ ID NO: 3180300 - RNA, 14 nt, Human
cuccacuggaugga

SEQ ID NO: 3180301 - RNA, 21 nt, Human
cuccagaccccuggcuuuuca

SEQ ID NO: 3180302 - RNA, 13 nt, Human
cuccagccccugg

SEQ ID NO: 3180303 - RNA, 14 nt, Human
cuccagccccugga

SEQ ID NO: 3180304 - RNA, 11 nt, Human
cuccagccccu

SEQ ID NO: 3180305 - RNA, 18 nt, Human
cuccagcucaccagcccc

SEQ ID NO: 3180306 - RNA, 16 nt, Human
cuccagcucaccagcc

SEQ ID NO: 3180307 - RNA, 15 nt, Human
cuccagcucaccagc

SEQ ID NO: 3180308 - RNA, 14 nt, Human
cuccagcucaccag

SEQ ID NO: 3180309 - RNA, 17 nt, Human
cucaguucucuucacuc

SEQ ID NO: 3180310 - RNA, 16 nt, Human
cucaguucucuucacu

SEQ ID NO: 3180311 - RNA, 14 nt, Human
cucaguuuuucuua

SEQ ID NO: 3180312 - RNA, 12 nt, Human
cucaguuuuucu

SEQ ID NO: 3180313 - RNA, 15 nt, Human
cucaguuuuuuuccu

SEQ ID NO: 3180314 - RNA, 17 nt, Human
cucauugaccugaggcc

SEQ ID NO: 3180315 - RNA, 18 nt, Human
cucauucugaauuaauua

SEQ ID NO: 3180316 - RNA, 19 nt, Human
cucauugaccugaggcccu

SEQ ID NO: 3180317 - RNA, 21 nt, Human
cucauugaccugaggcccuuc

SEQ ID NO: 3180318 - RNA, 13 nt, Human
cucauuuugcuug

SEQ ID NO: 3180319 - RNA, 17 nt, Human
cuccaagcucccaggca

SEQ ID NO: 3180320 - RNA, 17 nt, Human
cuccaaggacagaaggc

SEQ ID NO: 3180321 - RNA, 20 nt, Human
cuccaaggacagaaggcucc

SEQ ID NO: 3180322 - RNA, 18 nt, Human
cucauuugucacacacuu

SEQ ID NO: 3180323 - RNA, 21 nt, Human
cucauuugucacacacuuugg

SEQ ID NO: 3180324 - RNA, 18 nt, Human
cucauuuuaaugauuguu

SEQ ID NO: 3180325 - RNA, 21 nt, Human
cucauuuuaaugauuguuuaa

SEQ ID NO: 3180326 - RNA, 20 nt, Human
cucauuuuaaugauuguuua

SEQ ID NO: 3180327 - RNA, 20 nt, Human
cuccccagccagccuggcug

SEQ ID NO: 3180328 - RNA, 18 nt, Human
cuccccagccagccuggc

SEQ ID NO: 3180329 - RNA, 17 nt, Human
cuccccagccagccugg

SEQ ID NO: 3180330 - RNA, 16 nt, Human
cuccccagccagccug

SEQ ID NO: 3180331 - RNA, 15 nt, Human
cuccccagccagccu

SEQ ID NO: 3180332 - RNA, 14 nt, Human
cuccccucggagaa

SEQ ID NO: 3180333 - RNA, 14 nt, Human
cuccccugcugggu

SEQ ID NO: 3180334 - RNA, 21 nt, Human
cuccccugcuggguguggcgc

SEQ ID NO: 3180335 - RNA, 23 nt, Human
cuccccugcuggguguggcgcag

SEQ ID NO: 3180336 - RNA, 15 nt, Human
cuccccugcagcccu

SEQ ID NO: 3180337 - RNA, 18 nt, Human
cuccccugcagcccuggc

SEQ ID NO: 3180338 - RNA, 21 nt, Human
cucccuggcagcacaggaaaa

SEQ ID NO: 3180339 - RNA, 21 nt, Human
cucccuucaaccauuccccau

SEQ ID NO: 3180340 - RNA, 15 nt, Human
cucccuucauccuuc

SEQ ID NO: 3180341 - RNA, 23 nt, Human
cucccuucaaccauuccccaugg

SEQ ID NO: 3180342 - RNA, 22 nt, Human
cucccuucaaccauuccccaug

SEQ ID NO: 3180343 - RNA, 19 nt, Human
cucccgaauagcugggacu

SEQ ID NO: 3180344 - RNA, 14 nt, Human
cuccccuggacucc

SEQ ID NO: 3180345 - RNA, 18 nt, Human
cuccccuggggugcaggc

SEQ ID NO: 3180346 - RNA, 12 nt, Human
cuccccuggacu

SEQ ID NO: 3180347 - RNA, 23 nt, Human
cucccgaauagcugggacuacag

SEQ ID NO: 3180348 - RNA, 20 nt, Human
cucccgaauagcugggacua

SEQ ID NO: 3180349 - RNA, 22 nt, Human
cucccucaagccagacucugcc

SEQ ID NO: 3180350 - RNA, 14 nt, Human
cucccucacucuca

SEQ ID NO: 3180351 - RNA, 18 nt, Human
cucccucacucucaggaa

SEQ ID NO: 3180352 - RNA, 17 nt, Human
cucccucacucucagga

SEQ ID NO: 3180353 - RNA, 16 nt, Human
cucccucacucucagg

SEQ ID NO: 3180354 - RNA, 15 nt, Human
cucccucacucucag

SEQ ID NO: 3180355 - RNA, 14 nt, Human
cuccccugugccag

SEQ ID NO: 3180356 - RNA, 20 nt, Human
cucccgagacggcacugaga

SEQ ID NO: 3180357 - RNA, 22 nt, Human
cuccagcucuggcauggcuagg

SEQ ID NO: 3180358 - RNA, 16 nt, Human
cuccagcucuggcaug

SEQ ID NO: 3180359 - RNA, 22 nt, Human
cuccagcuggccgggagccuga

SEQ ID NO: 3180360 - RNA, 23 nt, Human
cuccagcuggccgggagccugau

SEQ ID NO: 3180361 - RNA, 17 nt, Human
cuccaugcugccuccag

SEQ ID NO: 3180362 - RNA, 16 nt, Human
cuccaugcugccucca

SEQ ID NO: 3180363 - RNA, 15 nt, Human
cuccaugcugccucc

SEQ ID NO: 3180364 - RNA, 14 nt, Human
cuccaugcugccuc

SEQ ID NO: 3180365 - RNA, 13 nt, Human
cuccaugcugccu

SEQ ID NO: 3180366 - RNA, 22 nt, Human
cucccaaaagcuagaacacugc

SEQ ID NO: 3180367 - RNA, 16 nt, Human
cucccaaaagcuagaa

SEQ ID NO: 3180368 - RNA, 22 nt, Human
cuccauuuuggugucuuucucu

SEQ ID NO: 3180369 - RNA, 21 nt, Human
cuccauuuuggugucuuucuc

SEQ ID NO: 3180370 - RNA, 16 nt, Human
cuccauuucacuggcu

SEQ ID NO: 3180371 - RNA, 23 nt, Human
cucccaaagugcugggauuacag

SEQ ID NO: 3180372 - RNA, 16 nt, Human
cucccaaagugcuggg

SEQ ID NO: 3180373 - RNA, 14 nt, Human
cucccaacucaccc

SEQ ID NO: 3180374 - RNA, 15 nt, Human
cucccaacucacccc

SEQ ID NO: 3180375 - RNA, 15 nt, Human
cucccacaaaggaga

SEQ ID NO: 3180376 - RNA, 16 nt, Human
cucccaucacuucccu

SEQ ID NO: 3180377 - RNA, 14 nt, Human
cucccaucacccgc

SEQ ID NO: 3180378 - RNA, 22 nt, Human
cucccagggagcaagggcaggg

SEQ ID NO: 3180379 - RNA, 22 nt, Human
cucccaggcgccccuucccccu

SEQ ID NO: 3180380 - RNA, 20 nt, Human
cucccaggcgccccuucccc

SEQ ID NO: 3180381 - RNA, 20 nt, Human
cucccagggagcaagggcag

SEQ ID NO: 3180382 - RNA, 19 nt, Human
cucccaggcgccccuuccc

SEQ ID NO: 3180383 - RNA, 17 nt, Human
cucccaggcgccccuuc

SEQ ID NO: 3180384 - RNA, 12 nt, Human
cucaggaccagg

SEQ ID NO: 3180385 - RNA, 23 nt, Human
cucaggaaaugcugacccauggg

SEQ ID NO: 3180386 - RNA, 22 nt, Human
cucaggaaaugcugacccaugg

SEQ ID NO: 3180387 - RNA, 21 nt, Human
cucaggaaaugcugacccaug

SEQ ID NO: 3180388 - RNA, 20 nt, Human
cucaggaaaugcugacccau

SEQ ID NO: 3180389 - RNA, 22 nt, Human
cucaggaaaucaaauaugcaaa

SEQ ID NO: 3180390 - RNA, 19 nt, Human
cucaggaaaugcugaccca

SEQ ID NO: 3180391 - RNA, 15 nt, Human
cucaggaaaugcuga

SEQ ID NO: 3180392 - RNA, 19 nt, Human
cucagcuuccccaguagcu

SEQ ID NO: 3180393 - RNA, 18 nt, Human
cucagcuuccccaguagc

SEQ ID NO: 3180394 - RNA, 14 nt, Human
cucagcuuccccag

SEQ ID NO: 3180395 - RNA, 19 nt, Human
cucagcugucaaggcucag

SEQ ID NO: 3180396 - RNA, 18 nt, Human
cucagcugucaaggcuca

SEQ ID NO: 3180397 - RNA, 19 nt, Human
cucagcuguucagauugga

SEQ ID NO: 3180398 - RNA, 22 nt, Human
cucagcuguucagauuggacau

SEQ ID NO: 3180399 - RNA, 18 nt, Human
cucaggcaggugggaugg

SEQ ID NO: 3180400 - RNA, 15 nt, Human
cucaggcagguggga

SEQ ID NO: 3180401 - RNA, 18 nt, Human
cucagggccuggcucagg

SEQ ID NO: 3180402 - RNA, 19 nt, Human
cucagggccuggcucaggu

SEQ ID NO: 3180403 - RNA, 20 nt, Human
cucagggccuggcucaggug

SEQ ID NO: 3180404 - RNA, 23 nt, Human
cucaggugauccacccaccucag

SEQ ID NO: 3180405 - RNA, 22 nt, Human
cucaggugauccacccaccuca

SEQ ID NO: 3180406 - RNA, 19 nt, Human
cucagguggggucacucug

SEQ ID NO: 3180407 - RNA, 20 nt, Human
cucagguggggucacucugg

SEQ ID NO: 3180408 - RNA, 21 nt, Human
cucagguggggucacucuggc

SEQ ID NO: 3180409 - RNA, 20 nt, Human
cucagggucccugguggcag

SEQ ID NO: 3180410 - RNA, 21 nt, Human
cucagggucccugguggcagc

SEQ ID NO: 3180411 - RNA, 22 nt, Human
cucagggucccugguggcagcu

SEQ ID NO: 3180412 - RNA, 24 nt, Human
cucagggucccugguggcagcuca

SEQ ID NO: 3180413 - RNA, 18 nt, Human
cucagggucccugguggc

SEQ ID NO: 3180414 - RNA, 22 nt, Human
cucagguaaucgaccugccucg

SEQ ID NO: 3180415 - RNA, 24 nt, Human
cucagguaaucgaccugccucggc

SEQ ID NO: 3180416 - RNA, 20 nt, Human
cucagguaaucgaccugccu

SEQ ID NO: 3180417 - RNA, 14 nt, Human
cucaggguguccca

SEQ ID NO: 3180418 - RNA, 21 nt, Human
cucagcccacauagugauggu

SEQ ID NO: 3180419 - RNA, 22 nt, Human
cucagcauuaccucuuuggaaa

SEQ ID NO: 3180420 - RNA, 20 nt, Human
cucagcauuaccucuuugga

SEQ ID NO: 3180421 - RNA, 19 nt, Human
cucagcauuaccucuuugg

SEQ ID NO: 3180422 - RNA, 15 nt, Human
cucagcauuaccucu

SEQ ID NO: 3180423 - RNA, 21 nt, Human
cucagcccucccugccccucc

SEQ ID NO: 3180424 - RNA, 20 nt, Human
cucagcccucccugccccuc

SEQ ID NO: 3180425 - RNA, 19 nt, Human
cucagcccucccugccccu

SEQ ID NO: 3180426 - RNA, 14 nt, Human
cucagcccucccug

SEQ ID NO: 3180427 - RNA, 16 nt, Human
cucagcaggggagggu

SEQ ID NO: 3180428 - RNA, 19 nt, Human
cucagcaaaagaugcuucu

SEQ ID NO: 3180429 - RNA, 20 nt, Human
cucagcaaaagaugcuucuc

SEQ ID NO: 3180430 - RNA, 22 nt, Human
cucagcauccuggcacccggcc

SEQ ID NO: 3180431 - RNA, 21 nt, Human
cucagcauccuggcacccggc

SEQ ID NO: 3180432 - RNA, 13 nt, Human
cucagcauccugg

SEQ ID NO: 3180433 - RNA, 17 nt, Human
cucagcagugagagcag

SEQ ID NO: 3180434 - RNA, 21 nt, Human
cucagcggggacagcuccuuc

SEQ ID NO: 3180435 - RNA, 20 nt, Human
cucagcggggacagcuccuu

SEQ ID NO: 3180436 - RNA, 19 nt, Human
cucagcggggacagcuccu

SEQ ID NO: 3180437 - RNA, 18 nt, Human
cucagcggggacagcucc

SEQ ID NO: 3180438 - RNA, 16 nt, Human
cucagcggggacagcu

SEQ ID NO: 3180439 - RNA, 15 nt, Human
cucagcggggacagc

SEQ ID NO: 3180440 - RNA, 14 nt, Human
cucagcggggacag

SEQ ID NO: 3180441 - RNA, 23 nt, Human
cucagcggggacagcuccuucug

SEQ ID NO: 3180442 - RNA, 13 nt, Human
cucagcggggaca

SEQ ID NO: 3180443 - RNA, 15 nt, Human
cucagcucccaaggc

SEQ ID NO: 3180444 - RNA, 19 nt, Human
cucagcucccaaggcucug

SEQ ID NO: 3180445 - RNA, 18 nt, Human
cucagaggacccuuucca

SEQ ID NO: 3180446 - RNA, 12 nt, Human
cucagaggcccc

SEQ ID NO: 3180447 - RNA, 19 nt, Human
cucagaggacccuuuccag

SEQ ID NO: 3180448 - RNA, 23 nt, Human
cucagaggccccaauaccccaug

SEQ ID NO: 3180449 - RNA, 22 nt, Human
cucagaggccccaauaccccau

SEQ ID NO: 3180450 - RNA, 21 nt, Human
cucagaggccccaauacccca

SEQ ID NO: 3180451 - RNA, 13 nt, Human
cucagaggcccca

SEQ ID NO: 3180452 - RNA, 16 nt, Human
cucagaucuucugugg

SEQ ID NO: 3180453 - RNA, 13 nt, Human
cucagauguuaaa

SEQ ID NO: 3180454 - RNA, 14 nt, Human
cucagauguuaaaa

SEQ ID NO: 3180455 - RNA, 16 nt, Human
cucagauguuaaaaua

SEQ ID NO: 3180456 - RNA, 17 nt, Human
cucagauguuaaaauaa

SEQ ID NO: 3180457 - RNA, 19 nt, Human
cucagauguuaaaauaaau

SEQ ID NO: 3180458 - RNA, 23 nt, Human
cucagauguuaaaauaaaugguu

SEQ ID NO: 3180459 - RNA, 18 nt, Human
cucacuguugcccaggcu

SEQ ID NO: 3180460 - RNA, 17 nt, Human
cucacuguugcccaggc

SEQ ID NO: 3180461 - RNA, 16 nt, Human
cucacuguugcccagg

SEQ ID NO: 3180462 - RNA, 23 nt, Human
cucagagagggugggagugggcc

SEQ ID NO: 3180463 - RNA, 15 nt, Human
cucagagccaccccu

SEQ ID NO: 3180464 - RNA, 19 nt, Human
cucagagagggugggagug

SEQ ID NO: 3180465 - RNA, 18 nt, Human
cucagagagggugggagu

SEQ ID NO: 3180466 - RNA, 23 nt, Human
cucacugcuaagaauauuugaau

SEQ ID NO: 3180467 - RNA, 22 nt, Human
cucacugcuaagaauauuugaa

SEQ ID NO: 3180468 - RNA, 21 nt, Human
cucacugcuaagaauauuuga

SEQ ID NO: 3180469 - RNA, 20 nt, Human
cucacugcuaagaauauuug

SEQ ID NO: 3180470 - RNA, 14 nt, Human
cucacugcagccuc

SEQ ID NO: 3180471 - RNA, 20 nt, Human
cucacugcauccuccgccuc

SEQ ID NO: 3180472 - RNA, 13 nt, Human
cucacugccuccc

SEQ ID NO: 3180473 - RNA, 14 nt, Human
cucacugccucccc

SEQ ID NO: 3180474 - RNA, 16 nt, Human
cucacugcagccucaa

SEQ ID NO: 3180475 - RNA, 15 nt, Human
cucacugcagccuca

SEQ ID NO: 3180476 - RNA, 23 nt, Human
cucacagacaggaccccugcagu

SEQ ID NO: 3180477 - RNA, 22 nt, Human
cucacagacaggaccccugcag

SEQ ID NO: 3180478 - RNA, 20 nt, Human
cucacagacaggaccccugc

SEQ ID NO: 3180479 - RNA, 20 nt, Human
cucacuguggugucuguguu

SEQ ID NO: 3180480 - RNA, 15 nt, Human
cucacuguugcccag

SEQ ID NO: 3180481 - RNA, 14 nt, Human
cucacuguugccca

SEQ ID NO: 3180482 - RNA, 15 nt, Human
cuacugggagccuac

SEQ ID NO: 3180483 - RNA, 14 nt, Human
cuacugggagccua

SEQ ID NO: 3180484 - RNA, 21 nt, Human
cuacuggcagcugauacguuu

SEQ ID NO: 3180485 - RNA, 14 nt, Human
cuacuggauucuua

SEQ ID NO: 3180486 - RNA, 15 nt, Human
cuacuggauucuuau

SEQ ID NO: 3180487 - RNA, 16 nt, Human
cuacuggauucuuauu

SEQ ID NO: 3180488 - RNA, 16 nt, Human
cuacugcauuuaggga

SEQ ID NO: 3180489 - RNA, 17 nt, Human
cuacugcauuuagggag

SEQ ID NO: 3180490 - RNA, 19 nt, Human
cuacugcauuuagggagua

SEQ ID NO: 3180491 - RNA, 23 nt, Human
cuacugccaaccucgcuccaacu

SEQ ID NO: 3180492 - RNA, 22 nt, Human
cuacugccaaccucgcuccaac

SEQ ID NO: 3180493 - RNA, 19 nt, Human
cuacugccaaccucgcucc

SEQ ID NO: 3180494 - RNA, 14 nt, Human
cuacugccaaccuc

SEQ ID NO: 3180495 - RNA, 18 nt, Human
cuacugggagccuaccca

SEQ ID NO: 3180496 - RNA, 19 nt, Human
cuacugguccucuuaacug

SEQ ID NO: 3180497 - RNA, 17 nt, Human
cuacuggguguagacug

SEQ ID NO: 3180498 - RNA, 19 nt, Human
cuacuguccuacccacccu

SEQ ID NO: 3180499 - RNA, 22 nt, Human
cuacucuggagguuuguuuaga

SEQ ID NO: 3180500 - RNA, 22 nt, Human
cuacucuagagaaguggacugg

SEQ ID NO: 3180501 - RNA, 22 nt, Human
cuacuccugucuucugcuuugu

SEQ ID NO: 3180502 - RNA, 21 nt, Human
cuacuccugucuucugcuuug

SEQ ID NO: 3180503 - RNA, 20 nt, Human
cuacuccugucuucugcuuu

SEQ ID NO: 3180504 - RNA, 19 nt, Human
cuacuccugucuucugcuu

SEQ ID NO: 3180505 - RNA, 12 nt, Human
cuacucuguguc

SEQ ID NO: 3180506 - RNA, 14 nt, Human
cuacugaggugcua

SEQ ID NO: 3180507 - RNA, 14 nt, Human
cuaccuaacccaga

SEQ ID NO: 3180508 - RNA, 19 nt, Human
cuaccgagucucuucucca

SEQ ID NO: 3180509 - RNA, 17 nt, Human
cuaccgagucucuucuc

SEQ ID NO: 3180510 - RNA, 22 nt, Human
cuaccgagucucuucuccacug

SEQ ID NO: 3180511 - RNA, 21 nt, Human
cuaccgagucucuucuccacu

SEQ ID NO: 3180512 - RNA, 23 nt, Human
cuaccgagucucuucuccacugg

SEQ ID NO: 3180513 - RNA, 16 nt, Human
cuacucgaguuacaga

SEQ ID NO: 3180514 - RNA, 19 nt, Human
cuacucgaguuacagacaa

SEQ ID NO: 3180515 - RNA, 15 nt, Human
cuacucgaguuacag

SEQ ID NO: 3180516 - RNA, 17 nt, Human
cuacuccugucuucugc

SEQ ID NO: 3180517 - RNA, 16 nt, Human
cuacuccugucuucug

SEQ ID NO: 3180518 - RNA, 14 nt, Human
cuacuccugucuuc

SEQ ID NO: 3180519 - RNA, 13 nt, Human
cuacuccugucuu

SEQ ID NO: 3180520 - RNA, 16 nt, Human
cuacucauuuuaauga

SEQ ID NO: 3180521 - RNA, 12 nt, Human
cuacucauuuua

SEQ ID NO: 3180522 - RNA, 16 nt, Human
cuagaguagagguaua

SEQ ID NO: 3180523 - RNA, 20 nt, Human
cuagaguagagguauaauug

SEQ ID NO: 3180524 - RNA, 23 nt, Human
cuagaggccuuuaguuauaaagg

SEQ ID NO: 3180525 - RNA, 15 nt, Human
cuagagauauuuugu

SEQ ID NO: 3180526 - RNA, 17 nt, Human
cuagagauauuuuguaa

SEQ ID NO: 3180527 - RNA, 18 nt, Human
cuagagauauuuuguaaa

SEQ ID NO: 3180528 - RNA, 19 nt, Human
cuagagauauuuuguaaaa

SEQ ID NO: 3180529 - RNA, 20 nt, Human
cuagagagugugauguucac

SEQ ID NO: 3180530 - RNA, 21 nt, Human
cuagagaaguggacuggagga

SEQ ID NO: 3180531 - RNA, 23 nt, Human
cuagagaaguggacuggaggagc

SEQ ID NO: 3180532 - RNA, 22 nt, Human
cuagagaaguggacuggaggag

SEQ ID NO: 3180533 - RNA, 22 nt, Human
cuagaggccugaaauccugguu

SEQ ID NO: 3180534 - RNA, 18 nt, Human
cuagacugccacaaggaa

SEQ ID NO: 3180535 - RNA, 16 nt, Human
cuagagaaauucuugu

SEQ ID NO: 3180536 - RNA, 18 nt, Human
cuagagaaauucuuguua

SEQ ID NO: 3180537 - RNA, 18 nt, Human
cuagacucccaagcugga

SEQ ID NO: 3180538 - RNA, 20 nt, Human
cuacuguccuacccacccuc

SEQ ID NO: 3180539 - RNA, 23 nt, Human
cuacuguucagcuuuuauuccug

SEQ ID NO: 3180540 - RNA, 18 nt, Human
cuacuguuuaagugaauu

SEQ ID NO: 3180541 - RNA, 15 nt, Human
cuacuuuuuaacaga

SEQ ID NO: 3180542 - RNA, 16 nt, Human
cuacuuagcacuucag

SEQ ID NO: 3180543 - RNA, 17 nt, Human
cuacuuagcaugucccu

SEQ ID NO: 3180544 - RNA, 19 nt, Human
cuacuuagcacuucagggc

SEQ ID NO: 3180545 - RNA, 22 nt, Human
cuagcguagugcagcagggcag

SEQ ID NO: 3180546 - RNA, 20 nt, Human
cuagcguagugcagcagggc

SEQ ID NO: 3180547 - RNA, 19 nt, Human
cuagcguagugcagcaggg

SEQ ID NO: 3180548 - RNA, 16 nt, Human
cuagcguagugcagca

SEQ ID NO: 3180549 - RNA, 23 nt, Human
cuagccuuagaagucacacagua

SEQ ID NO: 3180550 - RNA, 22 nt, Human
cuagccuuagaagucacacagu

SEQ ID NO: 3180551 - RNA, 19 nt, Human
cuagccugugccucuggga

SEQ ID NO: 3180552 - RNA, 21 nt, Human
cuagccugugccucugggacu

SEQ ID NO: 3180553 - RNA, 22 nt, Human
cuagccugugccucugggacug

SEQ ID NO: 3180554 - RNA, 21 nt, Human
cuagccuuagaagucacacag

SEQ ID NO: 3180555 - RNA, 14 nt, Human
cuagcuuuuuaauu

SEQ ID NO: 3180556 - RNA, 11 nt, Human
cuaggaaaaaa

SEQ ID NO: 3180557 - RNA, 19 nt, Human
cuaggaaaagaaaucuaua

SEQ ID NO: 3180558 - RNA, 14 nt, Human
cuaggaaaagaaau

SEQ ID NO: 3180559 - RNA, 21 nt, Human
cuagcuggagaggagcccugc

SEQ ID NO: 3180560 - RNA, 19 nt, Human
cuagcuggagaggagcccu

SEQ ID NO: 3180561 - RNA, 18 nt, Human
cuagcuggagaggagccc

SEQ ID NO: 3180562 - RNA, 13 nt, Human
cuagcuggagagg

SEQ ID NO: 3180563 - RNA, 23 nt, Human
cuagcuggagaggagcccugccu

SEQ ID NO: 3180564 - RNA, 22 nt, Human
cuagcuggagaggagcccugcc

SEQ ID NO: 3180565 - RNA, 18 nt, Human
cuagcuaugcuguaucug

SEQ ID NO: 3180566 - RNA, 19 nt, Human
cuagcuaugcuguaucugu

SEQ ID NO: 3180567 - RNA, 21 nt, Human
cuagcuaugcuguaucugugc

SEQ ID NO: 3180568 - RNA, 10 nt, Human
cuagcugaau

SEQ ID NO: 3180569 - RNA, 13 nt, Human
cucacacucaccc

SEQ ID NO: 3180570 - RNA, 22 nt, Human
cucaaguccccgucugccuggc

SEQ ID NO: 3180571 - RNA, 23 nt, Human
cucacacggacacucaaaagcug

SEQ ID NO: 3180572 - RNA, 17 nt, Human
cucacagaacccuugga

SEQ ID NO: 3180573 - RNA, 12 nt, Human
cucacagacagg

SEQ ID NO: 3180574 - RNA, 18 nt, Human
cucacagacaggaccccu

SEQ ID NO: 3180575 - RNA, 16 nt, Human
cucacagacaggaccc

SEQ ID NO: 3180576 - RNA, 15 nt, Human
cucacagacaggacc

SEQ ID NO: 3180577 - RNA, 13 nt, Human
cucacagacagga

SEQ ID NO: 3180578 - RNA, 14 nt, Human
cucacacuccuuua

SEQ ID NO: 3180579 - RNA, 16 nt, Human
cucaacucuccuccag

SEQ ID NO: 3180580 - RNA, 18 nt, Human
cucaacucuccuccagag

SEQ ID NO: 3180581 - RNA, 16 nt, Human
cucaagcccaggaggg

SEQ ID NO: 3180582 - RNA, 15 nt, Human
cucaagcccaggagg

SEQ ID NO: 3180583 - RNA, 19 nt, Human
cucaagccagacucugcca

SEQ ID NO: 3180584 - RNA, 21 nt, Human
cucaagccaccagaugugaca

SEQ ID NO: 3180585 - RNA, 13 nt, Human
cucaagccaccag

SEQ ID NO: 3180586 - RNA, 18 nt, Human
cuauuucaacuucaggaa

SEQ ID NO: 3180587 - RNA, 11 nt, Human
cuauuucuuga

SEQ ID NO: 3180588 - RNA, 22 nt, Human
cucaacaugucuccuacugagg

SEQ ID NO: 3180589 - RNA, 14 nt, Human
cucaacucuccucc

SEQ ID NO: 3180590 - RNA, 20 nt, Human
cucaaccaaaugguacaaaa

SEQ ID NO: 3180591 - RNA, 14 nt, Human
cucaaccaaauggu

SEQ ID NO: 3180592 - RNA, 18 nt, Human
cuauuguuagucucuuga

SEQ ID NO: 3180593 - RNA, 11 nt, Human
cuauugguaaa

SEQ ID NO: 3180594 - RNA, 22 nt, Human
cuauuuaugugauccuuuugga

SEQ ID NO: 3180595 - RNA, 13 nt, Human
cuauuuaaagaaa

SEQ ID NO: 3180596 - RNA, 21 nt, Human
cuauuuaaagaaauauguauu

SEQ ID NO: 3180597 - RNA, 16 nt, Human
cuauugcugcuugagg

SEQ ID NO: 3180598 - RNA, 19 nt, Human
cuauuggggaacucauugu

SEQ ID NO: 3180599 - RNA, 19 nt, Human
cuauggggauagaugugug

SEQ ID NO: 3180600 - RNA, 20 nt, Human
cuauggggauagaugugugg

SEQ ID NO: 3180601 - RNA, 21 nt, Human
cuauggggauagaugugugga

SEQ ID NO: 3180602 - RNA, 18 nt, Human
cuauguagugccgcucuu

SEQ ID NO: 3180603 - RNA, 17 nt, Human
cuauucaguaauaacuc

SEQ ID NO: 3180604 - RNA, 13 nt, Human
cuauguaucaaug

SEQ ID NO: 3180605 - RNA, 18 nt, Human
cuauuaguguuauaugaa

SEQ ID NO: 3180606 - RNA, 19 nt, Human
cuauuaguguuauaugaac

SEQ ID NO: 3180607 - RNA, 17 nt, Human
cuauuaguguuauauga

SEQ ID NO: 3180608 - RNA, 23 nt, Human
cuauucaguaauaacucuacccu

SEQ ID NO: 3180609 - RNA, 16 nt, Human
cuauugagucuucaug

SEQ ID NO: 3180610 - RNA, 17 nt, Human
cuauugagucuucaugu

SEQ ID NO: 3180611 - RNA, 20 nt, Human
cuaugaagagcuagagaaau

SEQ ID NO: 3180612 - RNA, 20 nt, Human
cuaugauguuaguuuuccuu

SEQ ID NO: 3180613 - RNA, 14 nt, Human
cuaugcaaaaagcu

SEQ ID NO: 3180614 - RNA, 19 nt, Human
cuaugauuuggaaaauaaa

SEQ ID NO: 3180615 - RNA, 15 nt, Human
cuaugauuuggaaaa

SEQ ID NO: 3180616 - RNA, 20 nt, Human
cuaugauuuaauuugaaaua

SEQ ID NO: 3180617 - RNA, 19 nt, Human
cuaugauuuaauuugaaau

SEQ ID NO: 3180618 - RNA, 22 nt, Human
cuauauacaucacguuaaagua

SEQ ID NO: 3180619 - RNA, 22 nt, Human
cuauagcuguucuaauggauua

SEQ ID NO: 3180620 - RNA, 12 nt, Human
cuauauaaaaua

SEQ ID NO: 3180621 - RNA, 14 nt, Human
cuauauaaaauaac

SEQ ID NO: 3180622 - RNA, 17 nt, Human
cuauauaaaauaacuaa

SEQ ID NO: 3180623 - RNA, 22 nt, Human
cuauauaaaauaacuaaaaugu

SEQ ID NO: 3180624 - RNA, 13 nt, Human
cuauaguuacugu

SEQ ID NO: 3180625 - RNA, 16 nt, Human
cuauaguuacuguccu

SEQ ID NO: 3180626 - RNA, 18 nt, Human
cuauaguuacuguccugu

SEQ ID NO: 3180627 - RNA, 18 nt, Human
cuauaauuauuauucaga

SEQ ID NO: 3180628 - RNA, 14 nt, Human
cuauaaugugaaau

SEQ ID NO: 3180629 - RNA, 17 nt, Human
cuauaaugugaaaugua

SEQ ID NO: 3180630 - RNA, 21 nt, Human
cuauaaugugaaauguaacug

SEQ ID NO: 3180631 - RNA, 22 nt, Human
cuauaaugugaaauguaacugu

SEQ ID NO: 3180632 - RNA, 20 nt, Human
cuaggaacacuccuucacag

SEQ ID NO: 3180633 - RNA, 15 nt, Human
cuaggaagacuuugg

SEQ ID NO: 3180634 - RNA, 17 nt, Human
cuaggaagacuuuggaa

SEQ ID NO: 3180635 - RNA, 21 nt, Human
cuauagccuaggugacagagu

SEQ ID NO: 3180636 - RNA, 20 nt, Human
cuauagccuaggugacagag

SEQ ID NO: 3180637 - RNA, 18 nt, Human
cuauagccuaggugacag

SEQ ID NO: 3180638 - RNA, 19 nt, Human
cuauagccuaggugacaga

SEQ ID NO: 3180639 - RNA, 21 nt, Human
cuauaccauuuccguaauucu

SEQ ID NO: 3180640 - RNA, 22 nt, Human
cuaagcuauucaguaauaacuc

SEQ ID NO: 3180641 - RNA, 18 nt, Human
cuaagauguguucuuauu

SEQ ID NO: 3180642 - RNA, 20 nt, Human
cuaagauguguucuuauuuu

SEQ ID NO: 3180643 - RNA, 20 nt, Human
cuaagauguuauauuuuucu

SEQ ID NO: 3180644 - RNA, 19 nt, Human
cuaagauguuauauuuuuc

SEQ ID NO: 3180645 - RNA, 14 nt, Human
cuaagauguuauau

SEQ ID NO: 3180646 - RNA, 13 nt, Human
cuaagauguuaua

SEQ ID NO: 3180647 - RNA, 21 nt, Human
cuaaggacaagguaaggaggg

SEQ ID NO: 3180648 - RNA, 18 nt, Human
cuaauaaucauuggauuc

SEQ ID NO: 3180649 - RNA, 17 nt, Human
cuaauaagcuaguugaa

SEQ ID NO: 3180650 - RNA, 22 nt, Human
cuaauaagcuaguugaauacuu

SEQ ID NO: 3180651 - RNA, 21 nt, Human
cuaauacagccccuuuucccu

SEQ ID NO: 3180652 - RNA, 17 nt, Human
cuaauaacaugugaaaa

SEQ ID NO: 3180653 - RNA, 19 nt, Human
cuaaguaaaaccacagcag

SEQ ID NO: 3180654 - RNA, 18 nt, Human
cuaaguaaaaccacagca

SEQ ID NO: 3180655 - RNA, 14 nt, Human
cuaaguaaaaccac

SEQ ID NO: 3180656 - RNA, 19 nt, Human
cuaauagcuacaucuacuu

SEQ ID NO: 3180657 - RNA, 16 nt, Human
cuaauauccacuuguc

SEQ ID NO: 3180658 - RNA, 23 nt, Human
cuacacgguucaaaccugugaag

SEQ ID NO: 3180659 - RNA, 14 nt, Human
cuaauuccacagcu

SEQ ID NO: 3180660 - RNA, 15 nt, Human
cuaauuccacagcug

SEQ ID NO: 3180661 - RNA, 16 nt, Human
cuaauuccacagcugc

SEQ ID NO: 3180662 - RNA, 21 nt, Human
cuacacaggggaaaagaggag

SEQ ID NO: 3180663 - RNA, 13 nt, Human
cuacacaggacag

SEQ ID NO: 3180664 - RNA, 21 nt, Human
cuacacauauaaauugucuua

SEQ ID NO: 3180665 - RNA, 22 nt, Human
cuacacaggacagggguuccuu

SEQ ID NO: 3180666 - RNA, 15 nt, Human
cuacacaggacaggg

SEQ ID NO: 3180667 - RNA, 22 nt, Human
cuaauuauacccccugcaaagc

SEQ ID NO: 3180668 - RNA, 17 nt, Human
cuaauuaauuucaguaa

SEQ ID NO: 3180669 - RNA, 15 nt, Human
cuaauuaauuucagu

SEQ ID NO: 3180670 - RNA, 14 nt, Human
cuaauuaauuucag

SEQ ID NO: 3180671 - RNA, 13 nt, Human
cuaaugggacacu

SEQ ID NO: 3180672 - RNA, 12 nt, Human
cuaaugggacac

SEQ ID NO: 3180673 - RNA, 22 nt, Human
cuaaugcgcaggcuggcccugc

SEQ ID NO: 3180674 - RNA, 23 nt, Human
cuaaugcgcaggcuggcccugcc

SEQ ID NO: 3180675 - RNA, 21 nt, Human
cuaauggauuauaaucagaau

SEQ ID NO: 3180676 - RNA, 22 nt, Human
cuaauauccacuuguccaugug

SEQ ID NO: 3180677 - RNA, 21 nt, Human
cuaaucagcauucucacuccu

SEQ ID NO: 3180678 - RNA, 20 nt, Human
cuaaucagcauucucacucc

SEQ ID NO: 3180679 - RNA, 15 nt, Human
cuaaugcgcaggcug

SEQ ID NO: 3180680 - RNA, 16 nt, Human
cuaaugcgcaggcugg

SEQ ID NO: 3180681 - RNA, 19 nt, Human
cuaaugcgcaggcuggccc

SEQ ID NO: 3180682 - RNA, 20 nt, Human
cuaaugcgcaggcuggcccu

SEQ ID NO: 3180683 - RNA, 15 nt, Human
cgggacguggcaccu

SEQ ID NO: 3180684 - RNA, 21 nt, Human
cgggaggauguucugggacac

SEQ ID NO: 3180685 - RNA, 23 nt, Human
cgggaggauguucugggacacag

SEQ ID NO: 3180686 - RNA, 20 nt, Human
cguuuguuccccaagacauu

SEQ ID NO: 3180687 - RNA, 19 nt, Human
cguuugauuugucacugcu

SEQ ID NO: 3180688 - RNA, 20 nt, Human
cgggaggcagagguugcagu

SEQ ID NO: 3180689 - RNA, 18 nt, Human
cuaaaauaauuuuguaau

SEQ ID NO: 3180690 - RNA, 17 nt, Human
cuaaaauaauuuuguaa

SEQ ID NO: 3180691 - RNA, 15 nt, Human
cuaaaauaauuuugu

SEQ ID NO: 3180692 - RNA, 14 nt, Human
cuaaaauaagaaua

SEQ ID NO: 3180693 - RNA, 14 nt, Human
cuaaaaauaaagca

SEQ ID NO: 3180694 - RNA, 13 nt, Human
cuaaaaauaaagc

SEQ ID NO: 3180695 - RNA, 23 nt, Human
cuaaaaauaacuguaauuauuug

SEQ ID NO: 3180696 - RNA, 22 nt, Human
cuaaaaauaacuguaauuauuu

SEQ ID NO: 3180697 - RNA, 17 nt, Human
cuaaaaauaacuguaau

SEQ ID NO: 3180698 - RNA, 15 nt, Human
cuaaaaauaaagcac

SEQ ID NO: 3180699 - RNA, 13 nt, Human
cguuuuaaggacu

SEQ ID NO: 3180700 - RNA, 16 nt, Human
cguuuuaaggacugac

SEQ ID NO: 3180701 - RNA, 23 nt, Human
cguuuuaaggacugacugaggca

SEQ ID NO: 3180702 - RNA, 20 nt, Human
cuaaaaaagcugaaucagac

SEQ ID NO: 3180703 - RNA, 18 nt, Human
cuaaaaagucagauguuu

SEQ ID NO: 3180704 - RNA, 13 nt, Human
cuaaaauguaucu

SEQ ID NO: 3180705 - RNA, 17 nt, Human
cuaaacuaggcuccuuc

SEQ ID NO: 3180706 - RNA, 16 nt, Human
cuaaacuaguuuuucc

SEQ ID NO: 3180707 - RNA, 15 nt, Human
cuaaacuaggcuccu

SEQ ID NO: 3180708 - RNA, 12 nt, Human
cuaaacugcccc

SEQ ID NO: 3180709 - RNA, 13 nt, Human
cuaaacugccccc

SEQ ID NO: 3180710 - RNA, 16 nt, Human
cuaaacucugaauaag

SEQ ID NO: 3180711 - RNA, 22 nt, Human
cuaaaauauuuaugaagaaaau

SEQ ID NO: 3180712 - RNA, 21 nt, Human
cuaaaauauuuaugaagaaaa

SEQ ID NO: 3180713 - RNA, 20 nt, Human
cuaaaauauuuaugaagaaa

SEQ ID NO: 3180714 - RNA, 16 nt, Human
cuaaaauauuuaugaa

SEQ ID NO: 3180715 - RNA, 15 nt, Human
cuaaaauauuuauga

SEQ ID NO: 3180716 - RNA, 10 nt, Human
cuaaaauauu

SEQ ID NO: 3180717 - RNA, 22 nt, Human
cuaaaauaucuggguggcuuaa

SEQ ID NO: 3180718 - RNA, 22 nt, Human
cuaaaugaaaaucgugacaaca

SEQ ID NO: 3180719 - RNA, 21 nt, Human
cuaaacugcccccucugcccu

SEQ ID NO: 3180720 - RNA, 18 nt, Human
cuaaauaaguuauaaaga

SEQ ID NO: 3180721 - RNA, 23 nt, Human
cuaacaaacagauucuuuuaugu

SEQ ID NO: 3180722 - RNA, 20 nt, Human
cuaacaacauuguagccuca

SEQ ID NO: 3180723 - RNA, 14 nt, Human
cuaaauuuuaaagc

SEQ ID NO: 3180724 - RNA, 16 nt, Human
cuaaauuuuaaagcca

SEQ ID NO: 3180725 - RNA, 17 nt, Human
cuaaauuuuaaagccau

SEQ ID NO: 3180726 - RNA, 19 nt, Human
cuaaauugacacuuaaaaa

SEQ ID NO: 3180727 - RNA, 16 nt, Human
cuaaauucaugcugcu

SEQ ID NO: 3180728 - RNA, 21 nt, Human
cuaacagcaguuucagguaga

SEQ ID NO: 3180729 - RNA, 15 nt, Human
cuaaccacagcuccu

SEQ ID NO: 3180730 - RNA, 14 nt, Human
cuaaccacgcugga

SEQ ID NO: 3180731 - RNA, 12 nt, Human
cuaaccacgcug

SEQ ID NO: 3180732 - RNA, 23 nt, Human
cuaagagggagggagggcuccag

SEQ ID NO: 3180733 - RNA, 21 nt, Human
cuaagaucgguuaacaaauaa

SEQ ID NO: 3180734 - RNA, 20 nt, Human
cuaagaucgguuaacaaaua

SEQ ID NO: 3180735 - RNA, 18 nt, Human
cuaagauauacuuguuuu

SEQ ID NO: 3180736 - RNA, 18 nt, Human
cuaagaucgguuaacaaa

SEQ ID NO: 3180737 - RNA, 17 nt, Human
cuaagaucgguuaacaa

SEQ ID NO: 3180738 - RNA, 23 nt, Human
cuaagauauacuuguuuuuguaa

SEQ ID NO: 3180739 - RNA, 22 nt, Human
cuaagauauacuuguuuuugua

SEQ ID NO: 3180740 - RNA, 15 nt, Human
cuaagagggagggag

SEQ ID NO: 3180741 - RNA, 22 nt, Human
cuaagagggagggagggcucca

SEQ ID NO: 3180742 - RNA, 13 nt, Human
cuaagagggaggg

SEQ ID NO: 3180743 - RNA, 18 nt, Human
cuaagaggaaaguacauu

SEQ ID NO: 3180744 - RNA, 12 nt, Human
cuaaccagggcc

SEQ ID NO: 3180745 - RNA, 22 nt, Human
cuacauuauaaaugucucuuua

SEQ ID NO: 3180746 - RNA, 17 nt, Human
cuacaugcuuugugaac

SEQ ID NO: 3180747 - RNA, 22 nt, Human
cuacauggggucuggguggggg

SEQ ID NO: 3180748 - RNA, 19 nt, Human
cuacaugcuuguugacaga

SEQ ID NO: 3180749 - RNA, 14 nt, Human
cuacauuuccgcca

SEQ ID NO: 3180750 - RNA, 18 nt, Human
cuaccauccccuguagag

SEQ ID NO: 3180751 - RNA, 21 nt, Human
cuaccacggccuccuuuccgu

SEQ ID NO: 3180752 - RNA, 19 nt, Human
cuaccacggccuccuuucc

SEQ ID NO: 3180753 - RNA, 18 nt, Human
cuaccacggccuccuuuc

SEQ ID NO: 3180754 - RNA, 23 nt, Human
cuaccaacuuucaagaacuuguu

SEQ ID NO: 3180755 - RNA, 15 nt, Human
cuaccaaaggacacu

SEQ ID NO: 3180756 - RNA, 16 nt, Human
cuaccaacuuuacugu

SEQ ID NO: 3180757 - RNA, 14 nt, Human
cuaccaacuuucaa

SEQ ID NO: 3180758 - RNA, 13 nt, Human
cuaccaacuuuca

SEQ ID NO: 3180759 - RNA, 17 nt, Human
cuacccagcgagcccug

SEQ ID NO: 3180760 - RNA, 15 nt, Human
cuacccagcgagccc

SEQ ID NO: 3180761 - RNA, 12 nt, Human
cuacccaggugc

SEQ ID NO: 3180762 - RNA, 13 nt, Human
cuacccaggugcu

SEQ ID NO: 3180763 - RNA, 18 nt, Human
cuacccagcgagcccugg

SEQ ID NO: 3180764 - RNA, 17 nt, Human
cuacccucuuagaaaaa

SEQ ID NO: 3180765 - RNA, 13 nt, Human
cuacacugugcug

SEQ ID NO: 3180766 - RNA, 14 nt, Human
cuacacugugcuga

SEQ ID NO: 3180767 - RNA, 17 nt, Human
cuacacugugcugaguc

SEQ ID NO: 3180768 - RNA, 17 nt, Human
cuacagaggccaugggc

SEQ ID NO: 3180769 - RNA, 20 nt, Human
cuacagaggccaugggccuc

SEQ ID NO: 3180770 - RNA, 18 nt, Human
cuacagaggccaugggcc

SEQ ID NO: 3180771 - RNA, 22 nt, Human
cuacagaggccaugggccuccu

SEQ ID NO: 3180772 - RNA, 19 nt, Human
cuacagcuugaccgugagg

SEQ ID NO: 3180773 - RNA, 22 nt, Human
cuacagcuugaccgugaggcca

SEQ ID NO: 3180774 - RNA, 23 nt, Human
cuacagcuugaccgugaggccag

SEQ ID NO: 3180775 - RNA, 19 nt, Human
cuacagcuaaucagcauuc

SEQ ID NO: 3180776 - RNA, 18 nt, Human
cuacagcuaaucagcauu

SEQ ID NO: 3180777 - RNA, 19 nt, Human
cuacagcucccccagcucc

SEQ ID NO: 3180778 - RNA, 14 nt, Human
cuacagcuccccca

SEQ ID NO: 3180779 - RNA, 22 nt, Human
cuacagcuaaucagcauucuca

SEQ ID NO: 3180780 - RNA, 21 nt, Human
cuacagcuaaucagcauucuc

SEQ ID NO: 3180781 - RNA, 16 nt, Human
cuacaggagugagcac

SEQ ID NO: 3180782 - RNA, 15 nt, Human
cuacaggagugagca

SEQ ID NO: 3180783 - RNA, 14 nt, Human
cuacaggagugagc

SEQ ID NO: 3180784 - RNA, 17 nt, Human
cuacaggcacccaccau

SEQ ID NO: 3180785 - RNA, 15 nt, Human
cuacaggcacccacc

SEQ ID NO: 3180786 - RNA, 11 nt, Human
cuacagggccg

SEQ ID NO: 3180787 - RNA, 20 nt, Human
cuacauggaguauaugucaa

SEQ ID NO: 3180788 - RNA, 18 nt, Human
cuacauggaguauauguc

SEQ ID NO: 3180789 - RNA, 13 nt, Human
cuacaguccuccc

SEQ ID NO: 3180790 - RNA, 14 nt, Human
cuacaggugugagu

SEQ ID NO: 3180791 - RNA, 16 nt, Human
cuacaggugugaguca

SEQ ID NO: 3180792 - RNA, 18 nt, Human
cuacagucaagauagaaa

SEQ ID NO: 3180793 - RNA, 11 nt, Human
aaaaacagcuu

SEQ ID NO: 3180794 - RNA, 14 nt, Human
aaaaacacaaaagu

SEQ ID NO: 3180795 - RNA, 12 nt, Human
aaaaaauuuguc

SEQ ID NO: 3180796 - RNA, 11 nt, Human
aaaaacaaaag

SEQ ID NO: 3180797 - RNA, 15 nt, Human
aaaaacaaauaauau

SEQ ID NO: 3180798 - RNA, 12 nt, Human
aaaaacaaagag

SEQ ID NO: 3180799 - RNA, 13 nt, Human
aaaaacugaaguu

SEQ ID NO: 3180800 - RNA, 15 nt, Human
aaaaacugauuuuuu

SEQ ID NO: 3180801 - RNA, 22 nt, Human
aaaaacuucauguaauuuuauu

SEQ ID NO: 3180802 - RNA, 23 nt, Human
aaaaacuucauguaauuuuauuu

SEQ ID NO: 3180803 - RNA, 18 nt, Human
aaaaacuuucuacucauu

SEQ ID NO: 3180804 - RNA, 19 nt, Human
aaaaacuuucuacucauuu

SEQ ID NO: 3180805 - RNA, 19 nt, Human
aaaaacauucuaucuacug

SEQ ID NO: 3180806 - RNA, 23 nt, Human
aaaaacauucuaucuacugauuu

SEQ ID NO: 3180807 - RNA, 13 nt, Human
aaaaacugauuuu

SEQ ID NO: 3180808 - RNA, 12 nt, Human
aaaaagaggcua

SEQ ID NO: 3180809 - RNA, 19 nt, Human
aaaaauucaauaguaauau

SEQ ID NO: 3180810 - RNA, 18 nt, Human
aaaaauucaauaguaaua

SEQ ID NO: 3180811 - RNA, 17 nt, Human
aaaaauucaauaguaau

SEQ ID NO: 3180812 - RNA, 15 nt, Human
aaaaauucaauagua

SEQ ID NO: 3180813 - RNA, 17 nt, Human
aaaaagauaccuuaaaa

SEQ ID NO: 3180814 - RNA, 16 nt, Human
aaaacaaauaauaucu

SEQ ID NO: 3180815 - RNA, 13 nt, Human
aaaacaaauaaua

SEQ ID NO: 3180816 - RNA, 13 nt, Human
aaaacaaaaccaa

SEQ ID NO: 3180817 - RNA, 13 nt, Human
aaaacaaaaggca

SEQ ID NO: 3180818 - RNA, 15 nt, Human
aaaacaaaaagaugu

SEQ ID NO: 3180819 - RNA, 11 nt, Human
aaaacaaaaag

SEQ ID NO: 3180820 - RNA, 21 nt, Human
aaaaauuuacuacaauaugua

SEQ ID NO: 3180821 - RNA, 11 nt, Human
aaaaauuuaaa

SEQ ID NO: 3180822 - RNA, 15 nt, Human
aaaaauuuaaaagua

SEQ ID NO: 3180823 - RNA, 11 nt, Human
aaaaauuucac

SEQ ID NO: 3180824 - RNA, 13 nt, Human
aaaaauuucacga

SEQ ID NO: 3180825 - RNA, 23 nt, Human
aaaaauuugucugaaacauuuca

SEQ ID NO: 3180826 - RNA, 16 nt, Human
aaaaauuuguuuaaag

SEQ ID NO: 3180827 - RNA, 14 nt, Human
aaaaauuuguuuaa

SEQ ID NO: 3180828 - RNA, 10 nt, Human
aaaacaaaaa

SEQ ID NO: 3180829 - RNA, 17 nt, Human
aaaacaauaggaugggc

SEQ ID NO: 3180830 - RNA, 18 nt, Human
aaaacaauaggaugggcu

SEQ ID NO: 3180831 - RNA, 19 nt, Human
aaaacaaugguaacauuuu

SEQ ID NO: 3180832 - RNA, 13 nt, Human
aaaacacagcaag

SEQ ID NO: 3180833 - RNA, 12 nt, Human
aaaacacagcaa

SEQ ID NO: 3180834 - RNA, 18 nt, Human
aaaacacagcaaggguga

SEQ ID NO: 3180835 - RNA, 23 nt, Human
auguuugagcaguggccuacaaa

SEQ ID NO: 3180836 - RNA, 14 nt, Human
auguucuuccaguu

SEQ ID NO: 3180837 - RNA, 21 nt, Human
auguuucuuugaucaugaaua

SEQ ID NO: 3180838 - RNA, 13 nt, Human
auguuucuuugau

SEQ ID NO: 3180839 - RNA, 13 nt, Human
auguucuuccagu

SEQ ID NO: 3180840 - RNA, 11 nt, Human
auguucuucca

SEQ ID NO: 3180841 - RNA, 22 nt, Human
auguucugacccugcuucaaau

SEQ ID NO: 3180842 - RNA, 20 nt, Human
auguucuuaguggauguucu

SEQ ID NO: 3180843 - RNA, 17 nt, Human
auguucucugaggacac

SEQ ID NO: 3180844 - RNA, 12 nt, Human
augugucuuuau

SEQ ID NO: 3180845 - RNA, 14 nt, Human
augugucuuucuaa

SEQ ID NO: 3180846 - RNA, 19 nt, Human
augugucuuucuaagaaau

SEQ ID NO: 3180847 - RNA, 19 nt, Human
augugucugccacauuaac

SEQ ID NO: 3180848 - RNA, 18 nt, Human
auguucucugaggacacu

SEQ ID NO: 3180849 - RNA, 15 nt, Human
auguguccauuuccu

SEQ ID NO: 3180850 - RNA, 19 nt, Human
auguguaugugaguauucu

SEQ ID NO: 3180851 - RNA, 12 nt, Human
auguguauguga

SEQ ID NO: 3180852 - RNA, 12 nt, Human
auguguaauuuu

SEQ ID NO: 3180853 - RNA, 18 nt, Human
auguguaauuuuucugua

SEQ ID NO: 3180854 - RNA, 15 nt, Human
auguguaauuuuucu

SEQ ID NO: 3180855 - RNA, 20 nt, Human
auguguaauuuuucuguaua

SEQ ID NO: 3180856 - RNA, 19 nt, Human
auguguaauuuuucuguau

SEQ ID NO: 3180857 - RNA, 22 nt, Human
auguguaauuuuucuguauaga

SEQ ID NO: 3180858 - RNA, 18 nt, Human
auguuuuaagaggcaggg

SEQ ID NO: 3180859 - RNA, 16 nt, Human
auguuuuaagaggcag

SEQ ID NO: 3180860 - RNA, 15 nt, Human
auuaaaguuucaaaa

SEQ ID NO: 3180861 - RNA, 14 nt, Human
auuaaaguuucaaa

SEQ ID NO: 3180862 - RNA, 13 nt, Human
auuaaaguuucaa

SEQ ID NO: 3180863 - RNA, 12 nt, Human
auuaaaguuuca

SEQ ID NO: 3180864 - RNA, 14 nt, Human
auuaaaugcccagc

SEQ ID NO: 3180865 - RNA, 15 nt, Human
auuaaaugcccagcc

SEQ ID NO: 3180866 - RNA, 23 nt, Human
auuaaaguuucaaaaaucugaag

SEQ ID NO: 3180867 - RNA, 21 nt, Human
auuaaaguuucaaaaaucuga

SEQ ID NO: 3180868 - RNA, 20 nt, Human
auuaaaguuucaaaaaucug

SEQ ID NO: 3180869 - RNA, 19 nt, Human
auuaaaguuucaaaaaucu

SEQ ID NO: 3180870 - RNA, 18 nt, Human
auuaaaguuucaaaaauc

SEQ ID NO: 3180871 - RNA, 16 nt, Human
auuaaaguuucaaaaa

SEQ ID NO: 3180872 - RNA, 16 nt, Human
auuaaaugcccagccc

SEQ ID NO: 3180873 - RNA, 11 nt, Human
auuaaauuaug

SEQ ID NO: 3180874 - RNA, 16 nt, Human
augugggggucugugu

SEQ ID NO: 3180875 - RNA, 20 nt, Human
augugggcuaguugggcuuc

SEQ ID NO: 3180876 - RNA, 17 nt, Human
augugggggucugugug

SEQ ID NO: 3180877 - RNA, 18 nt, Human
augugggggucugugugu

SEQ ID NO: 3180878 - RNA, 23 nt, Human
auguggucguuagagacagagcg

SEQ ID NO: 3180879 - RNA, 19 nt, Human
auguggucguuagagacag

SEQ ID NO: 3180880 - RNA, 21 nt, Human
augugguuaauuuugcauauc

SEQ ID NO: 3180881 - RNA, 14 nt, Human
auguguaaguauuc

SEQ ID NO: 3180882 - RNA, 23 nt, Human
auggugacuuuugaaaagaggug

SEQ ID NO: 3180883 - RNA, 16 nt, Human
auggugaacugucauu

SEQ ID NO: 3180884 - RNA, 18 nt, Human
auggucuuauauuuacaa

SEQ ID NO: 3180885 - RNA, 16 nt, Human
auggucuaauguuuaa

SEQ ID NO: 3180886 - RNA, 14 nt, Human
auggucuaauguuu

SEQ ID NO: 3180887 - RNA, 13 nt, Human
auguaagguauau

SEQ ID NO: 3180888 - RNA, 22 nt, Human
auguaagguauaucauucuaaa

SEQ ID NO: 3180889 - RNA, 22 nt, Human
auguaagggaaacugccagcaa

SEQ ID NO: 3180890 - RNA, 21 nt, Human
auguaagggaaacugccagca

SEQ ID NO: 3180891 - RNA, 20 nt, Human
auguaagggaaacugccagc

SEQ ID NO: 3180892 - RNA, 17 nt, Human
auguaagcucuacugag

SEQ ID NO: 3180893 - RNA, 16 nt, Human
augucacaggcagguc

SEQ ID NO: 3180894 - RNA, 14 nt, Human
augucacaggcagg

SEQ ID NO: 3180895 - RNA, 15 nt, Human
augucacaggcaggu

SEQ ID NO: 3180896 - RNA, 13 nt, Human
augucagcaguug

SEQ ID NO: 3180897 - RNA, 16 nt, Human
augucagcaguugcug

SEQ ID NO: 3180898 - RNA, 16 nt, Human
augucaauaacaguau

SEQ ID NO: 3180899 - RNA, 14 nt, Human
augucaaaugugaa

SEQ ID NO: 3180900 - RNA, 23 nt, Human
augucaaccagguccagaugugc

SEQ ID NO: 3180901 - RNA, 23 nt, Human
augucaaauauuuagauguaauu

SEQ ID NO: 3180902 - RNA, 19 nt, Human
augucaaauauuuagaugu

SEQ ID NO: 3180903 - RNA, 13 nt, Human
augccuuuguaac

SEQ ID NO: 3180904 - RNA, 21 nt, Human
augccuggauggggcugcacc

SEQ ID NO: 3180905 - RNA, 23 nt, Human
augccuggauggggcugcaccgg

SEQ ID NO: 3180906 - RNA, 14 nt, Human
augccugguggcag

SEQ ID NO: 3180907 - RNA, 17 nt, Human
augccuggugagcauua

SEQ ID NO: 3180908 - RNA, 17 nt, Human
augccugggcagaagga

SEQ ID NO: 3180909 - RNA, 17 nt, Human
augccugguggcagcug

SEQ ID NO: 3180910 - RNA, 16 nt, Human
augccugguggcagcu

SEQ ID NO: 3180911 - RNA, 15 nt, Human
augccugguggcagc

SEQ ID NO: 3180912 - RNA, 21 nt, Human
augcaugcuuuccauauuuuu

SEQ ID NO: 3180913 - RNA, 20 nt, Human
augcaugcuuuccauauuuu

SEQ ID NO: 3180914 - RNA, 19 nt, Human
augcaugcuuuccauauuu

SEQ ID NO: 3180915 - RNA, 20 nt, Human
augcaugauugcagaauugu

SEQ ID NO: 3180916 - RNA, 15 nt, Human
augcaugcuuuccau

SEQ ID NO: 3180917 - RNA, 17 nt, Human
augcaugcuuuccauau

SEQ ID NO: 3180918 - RNA, 16 nt, Human
augcaugcuuuccaua

SEQ ID NO: 3180919 - RNA, 14 nt, Human
augcacagcuaaca

SEQ ID NO: 3180920 - RNA, 21 nt, Human
augcacagcuaacauggaagu

SEQ ID NO: 3180921 - RNA, 16 nt, Human
augcaauccuuacaaa

SEQ ID NO: 3180922 - RNA, 15 nt, Human
augcaauccuuacaa

SEQ ID NO: 3180923 - RNA, 21 nt, Human
augcaauccuuacaaaugauu

SEQ ID NO: 3180924 - RNA, 19 nt, Human
augcaauccuuacaaauga

SEQ ID NO: 3180925 - RNA, 18 nt, Human
augcaauccuuacaaaug

SEQ ID NO: 3180926 - RNA, 17 nt, Human
augcaauccuuacaaau

SEQ ID NO: 3180927 - RNA, 16 nt, Human
augaugugugaaaacu

SEQ ID NO: 3180928 - RNA, 23 nt, Human
augauguauguugaagccuuugu

SEQ ID NO: 3180929 - RNA, 18 nt, Human
augaugugccugcuucag

SEQ ID NO: 3180930 - RNA, 14 nt, Human
augaugugccugcu

SEQ ID NO: 3180931 - RNA, 18 nt, Human
auggagcuauuuuaaacc

SEQ ID NO: 3180932 - RNA, 16 nt, Human
auggaugaacugaaag

SEQ ID NO: 3180933 - RNA, 20 nt, Human
auggaucgauauuaauguau

SEQ ID NO: 3180934 - RNA, 18 nt, Human
auggauuauaaucagaau

SEQ ID NO: 3180935 - RNA, 16 nt, Human
auggauucaguuucua

SEQ ID NO: 3180936 - RNA, 19 nt, Human
auggauucaguuucuaaaa

SEQ ID NO: 3180937 - RNA, 23 nt, Human
auggcugccaaugggagcucaug

SEQ ID NO: 3180938 - RNA, 17 nt, Human
auggcugcauaguauuc

SEQ ID NO: 3180939 - RNA, 15 nt, Human
augggaaugaauguc

SEQ ID NO: 3180940 - RNA, 22 nt, Human
augggaauauaauauugucucu

SEQ ID NO: 3180941 - RNA, 22 nt, Human
augcuucuucagagacuccugc

SEQ ID NO: 3180942 - RNA, 12 nt, Human
augcuucuuuaa

SEQ ID NO: 3180943 - RNA, 14 nt, Human
augcuucuuuaaaa

SEQ ID NO: 3180944 - RNA, 18 nt, Human
augcuugcggcaaaagga

SEQ ID NO: 3180945 - RNA, 20 nt, Human
augcuugcggcaaaaggaaa

SEQ ID NO: 3180946 - RNA, 22 nt, Human
augcuugcggcaaaaggaaagc

SEQ ID NO: 3180947 - RNA, 23 nt, Human
augcuugcggcaaaaggaaagcu

SEQ ID NO: 3180948 - RNA, 19 nt, Human
augcuugcauauauuucau

SEQ ID NO: 3180949 - RNA, 19 nt, Human
auggaaaugggcagagcag

SEQ ID NO: 3180950 - RNA, 20 nt, Human
auggaaaugggcagagcaga

SEQ ID NO: 3180951 - RNA, 13 nt, Human
auggaaauguuua

SEQ ID NO: 3180952 - RNA, 15 nt, Human
auggaaaacuuaguu

SEQ ID NO: 3180953 - RNA, 16 nt, Human
auggaaaacuuaguuu

SEQ ID NO: 3180954 - RNA, 17 nt, Human
auggaaaacuuaguuug

SEQ ID NO: 3180955 - RNA, 21 nt, Human
auggaaaacuuaguuugugaa

SEQ ID NO: 3180956 - RNA, 18 nt, Human
auggaaaugcaaacuggg

SEQ ID NO: 3180957 - RNA, 15 nt, Human
augcuuugugaacaa

SEQ ID NO: 3180958 - RNA, 14 nt, Human
augcuuuucucaaa

SEQ ID NO: 3180959 - RNA, 13 nt, Human
auggaaaaauaaa

SEQ ID NO: 3180960 - RNA, 17 nt, Human
auggaaaaauaaaacug

SEQ ID NO: 3180961 - RNA, 14 nt, Human
auggaaaaaugcca

SEQ ID NO: 3180962 - RNA, 22 nt, Human
auggaaaaaugccaucaaauga

SEQ ID NO: 3180963 - RNA, 19 nt, Human
auccuuuuagucugcauau

SEQ ID NO: 3180964 - RNA, 17 nt, Human
auccuuuuagucugcau

SEQ ID NO: 3180965 - RNA, 13 nt, Human
aucgaugcagugc

SEQ ID NO: 3180966 - RNA, 12 nt, Human
auccuuuucugu

SEQ ID NO: 3180967 - RNA, 16 nt, Human
auccuuuucuguguuu

SEQ ID NO: 3180968 - RNA, 21 nt, Human
aucgagugccgcaucucacag

SEQ ID NO: 3180969 - RNA, 22 nt, Human
aucgagugccgcaucucacagc

SEQ ID NO: 3180970 - RNA, 13 nt, Human
auccuccaggugc

SEQ ID NO: 3180971 - RNA, 14 nt, Human
auccuccaggugca

SEQ ID NO: 3180972 - RNA, 19 nt, Human
auccuccaggugcacaagc

SEQ ID NO: 3180973 - RNA, 22 nt, Human
auccuccaggugcacaagcucc

SEQ ID NO: 3180974 - RNA, 11 nt, Human
auccuccucag

SEQ ID NO: 3180975 - RNA, 12 nt, Human
auccucccaggc

SEQ ID NO: 3180976 - RNA, 15 nt, Human
auccuccccuggacu

SEQ ID NO: 3180977 - RNA, 22 nt, Human
auccuccccuggacucccgugu

SEQ ID NO: 3180978 - RNA, 16 nt, Human
auccuccccuggacuc

SEQ ID NO: 3180979 - RNA, 16 nt, Human
auccacccaccucagc

SEQ ID NO: 3180980 - RNA, 20 nt, Human
auccacccaccucagccucc

SEQ ID NO: 3180981 - RNA, 18 nt, Human
auccacccaccucagccu

SEQ ID NO: 3180982 - RNA, 16 nt, Human
auccacccauguuauc

SEQ ID NO: 3180983 - RNA, 18 nt, Human
auccucauacccaccccc

SEQ ID NO: 3180984 - RNA, 17 nt, Human
auccucauacccacccc

SEQ ID NO: 3180985 - RNA, 19 nt, Human
auccucauacccaccccca

SEQ ID NO: 3180986 - RNA, 22 nt, Human
auccucauacccacccccaccc

SEQ ID NO: 3180987 - RNA, 14 nt, Human
aucccggcugcccu

SEQ ID NO: 3180988 - RNA, 17 nt, Human
aucgcacucuggcagca

SEQ ID NO: 3180989 - RNA, 20 nt, Human
aucgcacucuggcagcaccg

SEQ ID NO: 3180990 - RNA, 12 nt, Human
aucaccugcccu

SEQ ID NO: 3180991 - RNA, 13 nt, Human
aucaccugcccug

SEQ ID NO: 3180992 - RNA, 11 nt, Human
aucagccuggg

SEQ ID NO: 3180993 - RNA, 20 nt, Human
aucagccugggcaaugugau

SEQ ID NO: 3180994 - RNA, 21 nt, Human
aucagccugggcaaugugaua

SEQ ID NO: 3180995 - RNA, 12 nt, Human
aucagcugcuac

SEQ ID NO: 3180996 - RNA, 20 nt, Human
aucagcccaaucccugaucc

SEQ ID NO: 3180997 - RNA, 23 nt, Human
aucagcugcuacuacuccuguag

SEQ ID NO: 3180998 - RNA, 13 nt, Human
aucagcugcuacu

SEQ ID NO: 3180999 - RNA, 20 nt, Human
aucagccugcuccagcuguu

SEQ ID NO: 3181000 - RNA, 19 nt, Human
aucauggagguuugaagau

SEQ ID NO: 3181001 - RNA, 15 nt, Human
aucaucuugaacauu

SEQ ID NO: 3181002 - RNA, 21 nt, Human
aucaucuugaacauuaaucca

SEQ ID NO: 3181003 - RNA, 16 nt, Human
aucaucuguaagcugu

SEQ ID NO: 3181004 - RNA, 14 nt, Human
aucaucuguaagcu

SEQ ID NO: 3181005 - RNA, 17 nt, Human
aucaucuguaagcuguu

SEQ ID NO: 3181006 - RNA, 24 nt, Human
aucauggggggagcacccugaggg

SEQ ID NO: 3181007 - RNA, 12 nt, Human
augacccagugg

SEQ ID NO: 3181008 - RNA, 16 nt, Human
augacccccccagcuu

SEQ ID NO: 3181009 - RNA, 13 nt, Human
augacccccccag

SEQ ID NO: 3181010 - RNA, 14 nt, Human
augaccccugccca

SEQ ID NO: 3181011 - RNA, 12 nt, Human
augacuccagaa

SEQ ID NO: 3181012 - RNA, 16 nt, Human
augacuccagaauuuc

SEQ ID NO: 3181013 - RNA, 17 nt, Human
augacuccagaauuucc

SEQ ID NO: 3181014 - RNA, 12 nt, Human
augagccuggca

SEQ ID NO: 3181015 - RNA, 15 nt, Human
augaaaauuguguua

SEQ ID NO: 3181016 - RNA, 18 nt, Human
augaaaauaacugaauuu

SEQ ID NO: 3181017 - RNA, 19 nt, Human
augaaaauaacugaauuug

SEQ ID NO: 3181018 - RNA, 22 nt, Human
augaaaauaacugaauuuggag

SEQ ID NO: 3181019 - RNA, 23 nt, Human
augaaaagcuuuguuuguucuug

SEQ ID NO: 3181020 - RNA, 18 nt, Human
augaaaaggugauuguca

SEQ ID NO: 3181021 - RNA, 18 nt, Human
augaaaagcuuuguuugu

SEQ ID NO: 3181022 - RNA, 13 nt, Human
augagccuggcaa

SEQ ID NO: 3181023 - RNA, 14 nt, Human
augagccuggcaag

SEQ ID NO: 3181024 - RNA, 18 nt, Human
augacucuugacucuugc

SEQ ID NO: 3181025 - RNA, 14 nt, Human
augacucuuuauug

SEQ ID NO: 3181026 - RNA, 14 nt, Human
aucuuaucucagau

SEQ ID NO: 3181027 - RNA, 13 nt, Human
aucuuauuaaagu

SEQ ID NO: 3181028 - RNA, 21 nt, Human
aucuuaucucagauauuugca

SEQ ID NO: 3181029 - RNA, 20 nt, Human
aucuuaucucagauauuugc

SEQ ID NO: 3181030 - RNA, 19 nt, Human
aucuuaucucagauauuug

SEQ ID NO: 3181031 - RNA, 18 nt, Human
aucuuaucucagauauuu

SEQ ID NO: 3181032 - RNA, 14 nt, Human
aucuucauguaaau

SEQ ID NO: 3181033 - RNA, 18 nt, Human
aucuucauguaaauugac

SEQ ID NO: 3181034 - RNA, 15 nt, Human
aucuucauuaccaau

SEQ ID NO: 3181035 - RNA, 23 nt, Human
aucuucaucugagagaggcuaaa

SEQ ID NO: 3181036 - RNA, 19 nt, Human
aucuuccaacucaaacucu

SEQ ID NO: 3181037 - RNA, 17 nt, Human
aucugggccagaauuuc

SEQ ID NO: 3181038 - RNA, 15 nt, Human
aucugggccagaauu

SEQ ID NO: 3181039 - RNA, 19 nt, Human
aucuggaccccaucuguga

SEQ ID NO: 3181040 - RNA, 21 nt, Human
aucuggaagagcuaggcaggg

SEQ ID NO: 3181041 - RNA, 13 nt, Human
aucuggaagagcu

SEQ ID NO: 3181042 - RNA, 10 nt, Human
aucuggaagu

SEQ ID NO: 3181043 - RNA, 21 nt, Human
aucuggaauugguuuagccca

SEQ ID NO: 3181044 - RNA, 22 nt, Human
aucucucgugauugauaagaac

SEQ ID NO: 3181045 - RNA, 17 nt, Human
aucucuauuccccaccc

SEQ ID NO: 3181046 - RNA, 17 nt, Human
aucucuauuauuggaaa

SEQ ID NO: 3181047 - RNA, 16 nt, Human
aucugcugcagagcag

SEQ ID NO: 3181048 - RNA, 17 nt, Human
aucugcugcagagcagu

SEQ ID NO: 3181049 - RNA, 22 nt, Human
aucugcugucuuuucuuugcca

SEQ ID NO: 3181050 - RNA, 21 nt, Human
aucugcugucuuuucuuugcc

SEQ ID NO: 3181051 - RNA, 13 nt, Human
aucugcugucuuu

SEQ ID NO: 3181052 - RNA, 12 nt, Human
aucugcugucuu

SEQ ID NO: 3181053 - RNA, 17 nt, Human
aucuugaagacuuuucu

SEQ ID NO: 3181054 - RNA, 17 nt, Human
aucuucuuuauaauucu

SEQ ID NO: 3181055 - RNA, 20 nt, Human
aguuguaucagcacgugugg

SEQ ID NO: 3181056 - RNA, 23 nt, Human
aguuguaucagcacguguggccu

SEQ ID NO: 3181057 - RNA, 22 nt, Human
aguuguaggcgaaucauuuguu

SEQ ID NO: 3181058 - RNA, 21 nt, Human
aguuguaggcgaaucauuugu

SEQ ID NO: 3181059 - RNA, 14 nt, Human
aguuguagacaaag

SEQ ID NO: 3181060 - RNA, 16 nt, Human
aguuguagacaaagua

SEQ ID NO: 3181061 - RNA, 18 nt, Human
aguuguagacaaaguaca

SEQ ID NO: 3181062 - RNA, 23 nt, Human
aguuguagacaaaguacauucug

SEQ ID NO: 3181063 - RNA, 17 nt, Human
aguuguaugaucugugc

SEQ ID NO: 3181064 - RNA, 15 nt, Human
aguuguaugaucugu

SEQ ID NO: 3181065 - RNA, 18 nt, Human
aguuguaugaucugugcc

SEQ ID NO: 3181066 - RNA, 19 nt, Human
aguuguaccgcaaugugac

SEQ ID NO: 3181067 - RNA, 23 nt, Human
aguuguacuuuaaaaauuuacua

SEQ ID NO: 3181068 - RNA, 20 nt, Human
aguuguacuuuaaaaauuua

SEQ ID NO: 3181069 - RNA, 19 nt, Human
aguuguacuuuaaaaauuu

SEQ ID NO: 3181070 - RNA, 13 nt, Human
aguuguacuuuaa

SEQ ID NO: 3181071 - RNA, 18 nt, Human
aguuguaccgcaauguga

SEQ ID NO: 3181072 - RNA, 17 nt, Human
aguuacagacaaagcgu

SEQ ID NO: 3181073 - RNA, 18 nt, Human
aguuacagacaaagcgug

SEQ ID NO: 3181074 - RNA, 21 nt, Human
aguuacauauguauacaugug

SEQ ID NO: 3181075 - RNA, 20 nt, Human
aguuacauauguauacaugu

SEQ ID NO: 3181076 - RNA, 22 nt, Human
aguugaauguugcaaugugaaa

SEQ ID NO: 3181077 - RNA, 16 nt, Human
agugucuuuccacucc

SEQ ID NO: 3181078 - RNA, 14 nt, Human
agugugaaauauau

SEQ ID NO: 3181079 - RNA, 16 nt, Human
agugugaaauauauua

SEQ ID NO: 3181080 - RNA, 21 nt, Human
agugucuuaauuaaaagaaua

SEQ ID NO: 3181081 - RNA, 19 nt, Human
agugauucucaugccucag

SEQ ID NO: 3181082 - RNA, 18 nt, Human
agugauucucaugccuca

SEQ ID NO: 3181083 - RNA, 18 nt, Human
agugauuaccagggacug

SEQ ID NO: 3181084 - RNA, 15 nt, Human
agugauuaccaggga

SEQ ID NO: 3181085 - RNA, 23 nt, Human
agugugacaaggauugcuacugu

SEQ ID NO: 3181086 - RNA, 13 nt, Human
agugugaauacug

SEQ ID NO: 3181087 - RNA, 14 nt, Human
agugugaauacugc

SEQ ID NO: 3181088 - RNA, 16 nt, Human
agugugaauacugcuu

SEQ ID NO: 3181089 - RNA, 14 nt, Human
agugugaauauaaa

SEQ ID NO: 3181090 - RNA, 18 nt, Human
agugugaauauaaaugug

SEQ ID NO: 3181091 - RNA, 21 nt, Human
agugugaauauaaaugugugu

SEQ ID NO: 3181092 - RNA, 11 nt, Human
aguccaagcau

SEQ ID NO: 3181093 - RNA, 23 nt, Human
aguccaagggguccccuccagga

SEQ ID NO: 3181094 - RNA, 22 nt, Human
aguccaagggguccccuccagg

SEQ ID NO: 3181095 - RNA, 21 nt, Human
aguccaagggguccccuccag

SEQ ID NO: 3181096 - RNA, 16 nt, Human
agucauuaaauuacua

SEQ ID NO: 3181097 - RNA, 17 nt, Human
agucauuaaauuacuau

SEQ ID NO: 3181098 - RNA, 18 nt, Human
agucauuaaauuacuaua

SEQ ID NO: 3181099 - RNA, 23 nt, Human
agucauuaaauuacuauagcaaa

SEQ ID NO: 3181100 - RNA, 21 nt, Human
agucaacuacacaaagcaggc

SEQ ID NO: 3181101 - RNA, 17 nt, Human
agucaagauagaaaggg

SEQ ID NO: 3181102 - RNA, 19 nt, Human
agucaagacgaacauguag

SEQ ID NO: 3181103 - RNA, 18 nt, Human
agucaaggguaggguggg

SEQ ID NO: 3181104 - RNA, 16 nt, Human
agucaagugaaaaagg

SEQ ID NO: 3181105 - RNA, 20 nt, Human
agucaagugaaaaaggagga

SEQ ID NO: 3181106 - RNA, 20 nt, Human
agugauauucuuuguuaauu

SEQ ID NO: 3181107 - RNA, 12 nt, Human
agugauauucuu

SEQ ID NO: 3181108 - RNA, 19 nt, Human
agugauauucuuuguuaau

SEQ ID NO: 3181109 - RNA, 18 nt, Human
agugauauucuuuguuaa

SEQ ID NO: 3181110 - RNA, 17 nt, Human
agugauauucuuuguua

SEQ ID NO: 3181111 - RNA, 15 nt, Human
agugauauucuuugu

SEQ ID NO: 3181112 - RNA, 20 nt, Human
auaauuaaccaagguagaau

SEQ ID NO: 3181113 - RNA, 14 nt, Human
auaaguauuuggaa

SEQ ID NO: 3181114 - RNA, 16 nt, Human
auaaguauuuggaauu

SEQ ID NO: 3181115 - RNA, 15 nt, Human
auaaguggugugugu

SEQ ID NO: 3181116 - RNA, 17 nt, Human
auaacagccgcuccaga

SEQ ID NO: 3181117 - RNA, 16 nt, Human
auaacagccgcuccag

SEQ ID NO: 3181118 - RNA, 22 nt, Human
auaacagggauugauuuuaaaa

SEQ ID NO: 3181119 - RNA, 21 nt, Human
auaacagggauugauuuuaaa

SEQ ID NO: 3181120 - RNA, 20 nt, Human
auaacagggauugauuuuaa

SEQ ID NO: 3181121 - RNA, 19 nt, Human
auaacagggauugauuuua

SEQ ID NO: 3181122 - RNA, 17 nt, Human
auaacacugugaagagc

SEQ ID NO: 3181123 - RNA, 21 nt, Human
auaacacucuaggauguauau

SEQ ID NO: 3181124 - RNA, 23 nt, Human
auaacacucuaggauguauauuu

SEQ ID NO: 3181125 - RNA, 16 nt, Human
auaacacugugaagag

SEQ ID NO: 3181126 - RNA, 18 nt, Human
auaacaccaccauucaca

SEQ ID NO: 3181127 - RNA, 19 nt, Human
auaacaccaccauucacaa

SEQ ID NO: 3181128 - RNA, 14 nt, Human
auaauuacuauguc

SEQ ID NO: 3181129 - RNA, 19 nt, Human
auaauuagauccauuaauu

SEQ ID NO: 3181130 - RNA, 21 nt, Human
auaauuagauccauuaauuua

SEQ ID NO: 3181131 - RNA, 22 nt, Human
auaauuagauccauuaauuuaa

SEQ ID NO: 3181132 - RNA, 22 nt, Human
auaauuacagugccuaaaauaa

SEQ ID NO: 3181133 - RNA, 21 nt, Human
auaauuaaccaagguagaaug

SEQ ID NO: 3181134 - RNA, 18 nt, Human
auacaauuuuuauuucuu

SEQ ID NO: 3181135 - RNA, 16 nt, Human
auacacaaaaucaaau

SEQ ID NO: 3181136 - RNA, 14 nt, Human
auacacaaaaucaa

SEQ ID NO: 3181137 - RNA, 21 nt, Human
auacccccugcaaagcccagc

SEQ ID NO: 3181138 - RNA, 22 nt, Human
auacccccugcaaagcccagcu

SEQ ID NO: 3181139 - RNA, 18 nt, Human
auacacaaaaucaaauaa

SEQ ID NO: 3181140 - RNA, 12 nt, Human
auaccugucccc

SEQ ID NO: 3181141 - RNA, 21 nt, Human
auacuuaaauguuauguauau

SEQ ID NO: 3181142 - RNA, 20 nt, Human
auacuuaaauguuauguaua

SEQ ID NO: 3181143 - RNA, 17 nt, Human
auacuuaaauguuaugu

SEQ ID NO: 3181144 - RNA, 14 nt, Human
auacuuaaauguua

SEQ ID NO: 3181145 - RNA, 15 nt, Human
auaguaugguggcug

SEQ ID NO: 3181146 - RNA, 20 nt, Human
auaguaugcacuauauacau

SEQ ID NO: 3181147 - RNA, 13 nt, Human
auauacucauuag

SEQ ID NO: 3181148 - RNA, 15 nt, Human
auauacucauuagaa

SEQ ID NO: 3181149 - RNA, 19 nt, Human
auauacucauuagaauuac

SEQ ID NO: 3181150 - RNA, 23 nt, Human
auauacauuuuuagccuguguca

SEQ ID NO: 3181151 - RNA, 20 nt, Human
auauagcauuuaugguaauc

SEQ ID NO: 3181152 - RNA, 18 nt, Human
auauagcauuuaugguaa

SEQ ID NO: 3181153 - RNA, 18 nt, Human
auauacauacugcaucuu

SEQ ID NO: 3181154 - RNA, 16 nt, Human
auauacauguuuaugu

SEQ ID NO: 3181155 - RNA, 15 nt, Human
auauacauguuuaug

SEQ ID NO: 3181156 - RNA, 21 nt, Human
auauacauguuuauguaaaca

SEQ ID NO: 3181157 - RNA, 18 nt, Human
auauacauguuuauguaa

SEQ ID NO: 3181158 - RNA, 14 nt, Human
auauaccaaauuaa

SEQ ID NO: 3181159 - RNA, 16 nt, Human
auauaccaaauuaaaa

SEQ ID NO: 3181160 - RNA, 19 nt, Human
auauaccaaauuaaaaaaa

SEQ ID NO: 3181161 - RNA, 20 nt, Human
auauaccacucuuuaccuuu

SEQ ID NO: 3181162 - RNA, 22 nt, Human
auauaccacucuuuaccuuuau

SEQ ID NO: 3181163 - RNA, 15 nt, Human
auaugcauauauaua

SEQ ID NO: 3181164 - RNA, 14 nt, Human
auaugccuuguaua

SEQ ID NO: 3181165 - RNA, 15 nt, Human
auaugccugcucuuu

SEQ ID NO: 3181166 - RNA, 22 nt, Human
auaugccugggcagaaggaaga

SEQ ID NO: 3181167 - RNA, 19 nt, Human
auaugcauauauauaugug

SEQ ID NO: 3181168 - RNA, 18 nt, Human
auaugcauauauauaugu

SEQ ID NO: 3181169 - RNA, 14 nt, Human
auaugccugcucuu

SEQ ID NO: 3181170 - RNA, 22 nt, Human
auaugcauauauauaugugugu

SEQ ID NO: 3181171 - RNA, 19 nt, Human
auaugcuuauacacuuaca

SEQ ID NO: 3181172 - RNA, 16 nt, Human
auaugcuuauacacuu

SEQ ID NO: 3181173 - RNA, 14 nt, Human
auaugcuuauacac

SEQ ID NO: 3181174 - RNA, 21 nt, Human
auauuagacuucuguuuucaa

SEQ ID NO: 3181175 - RNA, 20 nt, Human
auauuagacuucuguuuuca

SEQ ID NO: 3181176 - RNA, 16 nt, Human
auauuagacuucuguu

SEQ ID NO: 3181177 - RNA, 15 nt, Human
auauuagacuucugu

SEQ ID NO: 3181178 - RNA, 14 nt, Human
auauggaagaaagu

SEQ ID NO: 3181179 - RNA, 15 nt, Human
auauggaagaaagua

SEQ ID NO: 3181180 - RNA, 16 nt, Human
auauggaagaaaguaa

SEQ ID NO: 3181181 - RNA, 19 nt, Human
auaugcuuguaacuaaaau

SEQ ID NO: 3181182 - RNA, 15 nt, Human
auaugcuucuuuaaa

SEQ ID NO: 3181183 - RNA, 13 nt, Human
auaugcuucuuua

SEQ ID NO: 3181184 - RNA, 21 nt, Human
auauccacuuguccaugugaa

SEQ ID NO: 3181185 - RNA, 17 nt, Human
auauccauagugacuuu

SEQ ID NO: 3181186 - RNA, 18 nt, Human
auauccccuauuuaacag

SEQ ID NO: 3181187 - RNA, 14 nt, Human
auaucacucauuaa

SEQ ID NO: 3181188 - RNA, 15 nt, Human
auaucacucauuaau

SEQ ID NO: 3181189 - RNA, 16 nt, Human
auaucacucauuaauu

SEQ ID NO: 3181190 - RNA, 17 nt, Human
auaucacucauuaauua

SEQ ID NO: 3181191 - RNA, 19 nt, Human
auaucaccaggacuguuac

SEQ ID NO: 3181192 - RNA, 15 nt, Human
auaucaauuuaaaaa

SEQ ID NO: 3181193 - RNA, 14 nt, Human
auauucaggaagcu

SEQ ID NO: 3181194 - RNA, 16 nt, Human
auauucaggaagcuca

SEQ ID NO: 3181195 - RNA, 20 nt, Human
auauuuagauguaauuuugu

SEQ ID NO: 3181196 - RNA, 22 nt, Human
auauuuagauguaauuuugugu

SEQ ID NO: 3181197 - RNA, 13 nt, Human
auauucaggaagc

SEQ ID NO: 3181198 - RNA, 19 nt, Human
auauuaguauuaucuuguu

SEQ ID NO: 3181199 - RNA, 22 nt, Human
auauuagcgacaacagauugga

SEQ ID NO: 3181200 - RNA, 19 nt, Human
auauuagcgacaacagauu

SEQ ID NO: 3181201 - RNA, 22 nt, Human
auauuagacuucuguuuucaau

SEQ ID NO: 3181202 - RNA, 13 nt, Human
auauuagaucaaa

SEQ ID NO: 3181203 - RNA, 15 nt, Human
auauuuauuaaauuu

SEQ ID NO: 3181204 - RNA, 13 nt, Human
auauuuauuuuua

SEQ ID NO: 3181205 - RNA, 18 nt, Human
auauuucaaguacacuga

SEQ ID NO: 3181206 - RNA, 17 nt, Human
auauuucaaguacacug

SEQ ID NO: 3181207 - RNA, 20 nt, Human
auauuucagaaauacagaua

SEQ ID NO: 3181208 - RNA, 15 nt, Human
auauuucagaaauac

SEQ ID NO: 3181209 - RNA, 14 nt, Human
auauuucagaaaua

SEQ ID NO: 3181210 - RNA, 12 nt, Human
auauuucagaaa

SEQ ID NO: 3181211 - RNA, 19 nt, Human
auauuucaaguacacugaa

SEQ ID NO: 3181212 - RNA, 16 nt, Human
agguaccgucuacauu

SEQ ID NO: 3181213 - RNA, 17 nt, Human
agguaaggaauaccugu

SEQ ID NO: 3181214 - RNA, 18 nt, Human
agguaaucgaccugccuc

SEQ ID NO: 3181215 - RNA, 17 nt, Human
agguaaucgaccugccu

SEQ ID NO: 3181216 - RNA, 16 nt, Human
agguggaagagggcug

SEQ ID NO: 3181217 - RNA, 14 nt, Human
aggucgaggcagga

SEQ ID NO: 3181218 - RNA, 20 nt, Human
aggucgcuugggaauuuuau

SEQ ID NO: 3181219 - RNA, 14 nt, Human
agguccuuuagaaa

SEQ ID NO: 3181220 - RNA, 19 nt, Human
agguccugcucagcaguga

SEQ ID NO: 3181221 - RNA, 16 nt, Human
aggugcugccauccag

SEQ ID NO: 3181222 - RNA, 15 nt, Human
agguccuuuagaaac

SEQ ID NO: 3181223 - RNA, 17 nt, Human
aggugcugccauccagg

SEQ ID NO: 3181224 - RNA, 22 nt, Human
agguggcaucagugucuuucca

SEQ ID NO: 3181225 - RNA, 23 nt, Human
agguggcaucagugucuuuccac

SEQ ID NO: 3181226 - RNA, 17 nt, Human
agguggcaggugagcaa

SEQ ID NO: 3181227 - RNA, 15 nt, Human
agguuaauaaaguaa

SEQ ID NO: 3181228 - RNA, 14 nt, Human
agguuaauguucau

SEQ ID NO: 3181229 - RNA, 13 nt, Human
agguucagcuugu

SEQ ID NO: 3181230 - RNA, 18 nt, Human
agguuccacagaggacac

SEQ ID NO: 3181231 - RNA, 18 nt, Human
aggcugcagccaggccac

SEQ ID NO: 3181232 - RNA, 14 nt, Human
aggcugagugcagg

SEQ ID NO: 3181233 - RNA, 17 nt, Human
aggcugagugcaggccc

SEQ ID NO: 3181234 - RNA, 15 nt, Human
aggcugagugcaggc

SEQ ID NO: 3181235 - RNA, 24 nt, Human
aggcugagugcaggcccacccugc

SEQ ID NO: 3181236 - RNA, 23 nt, Human
aggcugagugcaggcccacccug

SEQ ID NO: 3181237 - RNA, 21 nt, Human
aggcugagugcaggcccaccc

SEQ ID NO: 3181238 - RNA, 20 nt, Human
aggcugagugcaggcccacc

SEQ ID NO: 3181239 - RNA, 19 nt, Human
aggcugagugcaggcccac

SEQ ID NO: 3181240 - RNA, 18 nt, Human
aggcugagugcaggccca

SEQ ID NO: 3181241 - RNA, 20 nt, Human
aggcugaacuuguuuucugg

SEQ ID NO: 3181242 - RNA, 21 nt, Human
aggcugaacuuguuuucuggg

SEQ ID NO: 3181243 - RNA, 14 nt, Human
aggcucuucuccuu

SEQ ID NO: 3181244 - RNA, 21 nt, Human
aggcuauggggauagaugugu

SEQ ID NO: 3181245 - RNA, 22 nt, Human
aggcuauggggauagaugugug

SEQ ID NO: 3181246 - RNA, 19 nt, Human
aggcuauggggauagaugu

SEQ ID NO: 3181247 - RNA, 16 nt, Human
aggcuaugagugggau

SEQ ID NO: 3181248 - RNA, 23 nt, Human
aggcuagugugguguuuccuggc

SEQ ID NO: 3181249 - RNA, 16 nt, Human
aggcugucuguuguau

SEQ ID NO: 3181250 - RNA, 18 nt, Human
aggcugccucucccauca

SEQ ID NO: 3181251 - RNA, 12 nt, Human
agggacagaggg

SEQ ID NO: 3181252 - RNA, 13 nt, Human
agggacagagggg

SEQ ID NO: 3181253 - RNA, 21 nt, Human
agggacgcuacccgggaaggg

SEQ ID NO: 3181254 - RNA, 17 nt, Human
agggacgcuacccggga

SEQ ID NO: 3181255 - RNA, 15 nt, Human
aggggcacagggucu

SEQ ID NO: 3181256 - RNA, 13 nt, Human
aggggcagccugc

SEQ ID NO: 3181257 - RNA, 15 nt, Human
aggggcagaggaggc

SEQ ID NO: 3181258 - RNA, 12 nt, Human
aggggcccugca

SEQ ID NO: 3181259 - RNA, 18 nt, Human
aggggcagccugccuugc

SEQ ID NO: 3181260 - RNA, 14 nt, Human
aggggcagccugcc

SEQ ID NO: 3181261 - RNA, 21 nt, Human
aggggauagagagagaccacu

SEQ ID NO: 3181262 - RNA, 16 nt, Human
aggggauagagagaga

SEQ ID NO: 3181263 - RNA, 21 nt, Human
agggcggggugucugucuucc

SEQ ID NO: 3181264 - RNA, 22 nt, Human
agggcggggugucugucuuccu

SEQ ID NO: 3181265 - RNA, 23 nt, Human
agggcggggugucugucuuccuu

SEQ ID NO: 3181266 - RNA, 15 nt, Human
aggggauuacaguuc

SEQ ID NO: 3181267 - RNA, 17 nt, Human
aggggaugugugugugc

SEQ ID NO: 3181268 - RNA, 19 nt, Human
agggcgggaggauguucug

SEQ ID NO: 3181269 - RNA, 14 nt, Human
agggccuggccuga

SEQ ID NO: 3181270 - RNA, 17 nt, Human
agggcacagggccuggc

SEQ ID NO: 3181271 - RNA, 16 nt, Human
agggcacagggccugg

SEQ ID NO: 3181272 - RNA, 15 nt, Human
agggccuggccugag

SEQ ID NO: 3181273 - RNA, 13 nt, Human
agggcacagggcc

SEQ ID NO: 3181274 - RNA, 15 nt, Human
agggcacagggccug

SEQ ID NO: 3181275 - RNA, 14 nt, Human
agggcacagggccu

SEQ ID NO: 3181276 - RNA, 16 nt, Human
agggccuggccugagc

SEQ ID NO: 3181277 - RNA, 17 nt, Human
agggccuggccugagcu

SEQ ID NO: 3181278 - RNA, 22 nt, Human
agggcacagaaaauggaagaca

SEQ ID NO: 3181279 - RNA, 21 nt, Human
agggcacaccgggcacucaga

SEQ ID NO: 3181280 - RNA, 20 nt, Human
agggcacaccgggcacucag

SEQ ID NO: 3181281 - RNA, 17 nt, Human
agggcacaccgggcacu

SEQ ID NO: 3181282 - RNA, 18 nt, Human
aggagaggggcacagggu

SEQ ID NO: 3181283 - RNA, 14 nt, Human
aggagaggggcaca

SEQ ID NO: 3181284 - RNA, 16 nt, Human
aggagaggggcacagg

SEQ ID NO: 3181285 - RNA, 15 nt, Human
aggagagcuagcagc

SEQ ID NO: 3181286 - RNA, 20 nt, Human
aggaccccugcaguuccccu

SEQ ID NO: 3181287 - RNA, 16 nt, Human
aggagaacuugcugcc

SEQ ID NO: 3181288 - RNA, 15 nt, Human
aggagaacuugcugc

SEQ ID NO: 3181289 - RNA, 13 nt, Human
aggagaagaaaau

SEQ ID NO: 3181290 - RNA, 19 nt, Human
aggagaacuugcugccucg

SEQ ID NO: 3181291 - RNA, 18 nt, Human
aggagaacuugcugccuc

SEQ ID NO: 3181292 - RNA, 17 nt, Human
aggagaacuugcugccu

SEQ ID NO: 3181293 - RNA, 14 nt, Human
aggaccucagguga

SEQ ID NO: 3181294 - RNA, 20 nt, Human
aggaccucaggugagaagca

SEQ ID NO: 3181295 - RNA, 17 nt, Human
aggacccggaggggccu

SEQ ID NO: 3181296 - RNA, 20 nt, Human
aggaccccuccaugugggcu

SEQ ID NO: 3181297 - RNA, 18 nt, Human
aggaccagcccacgcuga

SEQ ID NO: 3181298 - RNA, 14 nt, Human
aggaccagcccacg

SEQ ID NO: 3181299 - RNA, 13 nt, Human
aggaccagcccac

SEQ ID NO: 3181300 - RNA, 12 nt, Human
aggaccagccca

SEQ ID NO: 3181301 - RNA, 18 nt, Human
aggaccagcacacucccg

SEQ ID NO: 3181302 - RNA, 14 nt, Human
aggauguugaaaaa

SEQ ID NO: 3181303 - RNA, 20 nt, Human
aggauguucugggacacagu

SEQ ID NO: 3181304 - RNA, 18 nt, Human
aggauguucugggacaca

SEQ ID NO: 3181305 - RNA, 19 nt, Human
aggauucacaccccaccug

SEQ ID NO: 3181306 - RNA, 18 nt, Human
aggauucacaccccaccu

SEQ ID NO: 3181307 - RNA, 17 nt, Human
aggauucacaccccacc

SEQ ID NO: 3181308 - RNA, 17 nt, Human
aggaggggauagagaga

SEQ ID NO: 3181309 - RNA, 20 nt, Human
aggagaggugauaaugaaug

SEQ ID NO: 3181310 - RNA, 12 nt, Human
aggauucuuccu

SEQ ID NO: 3181311 - RNA, 22 nt, Human
aggauucacaccccaccugcgc

SEQ ID NO: 3181312 - RNA, 21 nt, Human
aggauucacaccccaccugcg

SEQ ID NO: 3181313 - RNA, 20 nt, Human
aggauucacaccccaccugc

SEQ ID NO: 3181314 - RNA, 20 nt, Human
aggauucucaccagcugugu

SEQ ID NO: 3181315 - RNA, 18 nt, Human
aggauucucaccagcugu

SEQ ID NO: 3181316 - RNA, 22 nt, Human
aggauucucaccagcugugucc

SEQ ID NO: 3181317 - RNA, 17 nt, Human
aggcagaaggaagcagg

SEQ ID NO: 3181318 - RNA, 22 nt, Human
aggcacugcugcccagccucca

SEQ ID NO: 3181319 - RNA, 16 nt, Human
aggcacugcugcccag

SEQ ID NO: 3181320 - RNA, 14 nt, Human
aggcacugcugccc

SEQ ID NO: 3181321 - RNA, 20 nt, Human
aggaaauggcuguggagugu

SEQ ID NO: 3181322 - RNA, 21 nt, Human
aggaaaugcugacccaugggc

SEQ ID NO: 3181323 - RNA, 23 nt, Human
aggaaaugcugacccaugggcag

SEQ ID NO: 3181324 - RNA, 22 nt, Human
aggaaaugcugacccaugggca

SEQ ID NO: 3181325 - RNA, 22 nt, Human
aggaacguaaucguguccccua

SEQ ID NO: 3181326 - RNA, 13 nt, Human
aggaaaaauaugu

SEQ ID NO: 3181327 - RNA, 17 nt, Human
aggaaaaauaugugaag

SEQ ID NO: 3181328 - RNA, 16 nt, Human
aggaaaaauaugugaa

SEQ ID NO: 3181329 - RNA, 15 nt, Human
aggaaaaauauguga

SEQ ID NO: 3181330 - RNA, 14 nt, Human
aggaaaaauaugug

SEQ ID NO: 3181331 - RNA, 15 nt, Human
aggaaauccagggug

SEQ ID NO: 3181332 - RNA, 17 nt, Human
aggaaauccaggguggu

SEQ ID NO: 3181333 - RNA, 14 nt, Human
agcuuuucauugcu

SEQ ID NO: 3181334 - RNA, 13 nt, Human
agcuuuucccuuc

SEQ ID NO: 3181335 - RNA, 23 nt, Human
agcuucuguugcugccucaugcu

SEQ ID NO: 3181336 - RNA, 16 nt, Human
agcuuuucccuucuuu

SEQ ID NO: 3181337 - RNA, 13 nt, Human
aggaaaaacugau

SEQ ID NO: 3181338 - RNA, 15 nt, Human
aggaaaaacugauuu

SEQ ID NO: 3181339 - RNA, 19 nt, Human
agcuucagucauuaaauua

SEQ ID NO: 3181340 - RNA, 21 nt, Human
agcuucuguugcugccucaug

SEQ ID NO: 3181341 - RNA, 22 nt, Human
agcuucuguugcugccucaugc

SEQ ID NO: 3181342 - RNA, 20 nt, Human
agcuucuguugcugccucau

SEQ ID NO: 3181343 - RNA, 23 nt, Human
agcuucacuucugacucuucccc

SEQ ID NO: 3181344 - RNA, 14 nt, Human
agcuucacuucuga

SEQ ID NO: 3181345 - RNA, 13 nt, Human
agcuucacuucug

SEQ ID NO: 3181346 - RNA, 17 nt, Human
agcuguaaggcaugaag

SEQ ID NO: 3181347 - RNA, 13 nt, Human
agcuguaaggcau

SEQ ID NO: 3181348 - RNA, 19 nt, Human
agcuguaaggcaugaagga

SEQ ID NO: 3181349 - RNA, 18 nt, Human
agcuguaaggcaugaagg

SEQ ID NO: 3181350 - RNA, 19 nt, Human
agcuguacuucuugaauau

SEQ ID NO: 3181351 - RNA, 20 nt, Human
agcuguacuucuugaauaua

SEQ ID NO: 3181352 - RNA, 19 nt, Human
agcuggucccacucagucc

SEQ ID NO: 3181353 - RNA, 21 nt, Human
agcuggucccacucaguccau

SEQ ID NO: 3181354 - RNA, 22 nt, Human
agcugggugucaagagggucug

SEQ ID NO: 3181355 - RNA, 17 nt, Human
agcugggugucaagagg

SEQ ID NO: 3181356 - RNA, 21 nt, Human
agcugaauugagccuaaaaau

SEQ ID NO: 3181357 - RNA, 20 nt, Human
agcugaauugagccuaaaaa

SEQ ID NO: 3181358 - RNA, 15 nt, Human
agcugaauugagccu

SEQ ID NO: 3181359 - RNA, 13 nt, Human
agaccaucccuga

SEQ ID NO: 3181360 - RNA, 16 nt, Human
agaccagugcuuagca

SEQ ID NO: 3181361 - RNA, 14 nt, Human
agaccaucccugaa

SEQ ID NO: 3181362 - RNA, 17 nt, Human
agaccaucccugaaggc

SEQ ID NO: 3181363 - RNA, 18 nt, Human
agaccaucccugaaggcc

SEQ ID NO: 3181364 - RNA, 21 nt, Human
agaccaucccugaaggccccg

SEQ ID NO: 3181365 - RNA, 16 nt, Human
agacagcccgggcucu

SEQ ID NO: 3181366 - RNA, 17 nt, Human
agacagcccgggcucug

SEQ ID NO: 3181367 - RNA, 18 nt, Human
agacagcccgggcucugc

SEQ ID NO: 3181368 - RNA, 20 nt, Human
agacagcccgggcucugccu

SEQ ID NO: 3181369 - RNA, 22 nt, Human
agaccaauuuuuugugugugaa

SEQ ID NO: 3181370 - RNA, 18 nt, Human
agacgggggcagagaggg

SEQ ID NO: 3181371 - RNA, 18 nt, Human
agacggagucccaccuug

SEQ ID NO: 3181372 - RNA, 18 nt, Human
agacgggaggccuggccu

SEQ ID NO: 3181373 - RNA, 19 nt, Human
agacggagucccaccuugg

SEQ ID NO: 3181374 - RNA, 15 nt, Human
agacuacuguucagc

SEQ ID NO: 3181375 - RNA, 22 nt, Human
agacuacuguucagcuuuuauu

SEQ ID NO: 3181376 - RNA, 22 nt, Human
agacuaagaucgguuaacaaau

SEQ ID NO: 3181377 - RNA, 21 nt, Human
agacuaagaucgguuaacaaa

SEQ ID NO: 3181378 - RNA, 15 nt, Human
agacaaucuucuguu

SEQ ID NO: 3181379 - RNA, 14 nt, Human
agacaaucuucugu

SEQ ID NO: 3181380 - RNA, 13 nt, Human
agacaaucuucug

SEQ ID NO: 3181381 - RNA, 19 nt, Human
agagaaagcauauugacuu

SEQ ID NO: 3181382 - RNA, 10 nt, Human
agagaagaga

SEQ ID NO: 3181383 - RNA, 21 nt, Human
agagaagagauugugguuuca

SEQ ID NO: 3181384 - RNA, 21 nt, Human
agagaagauggauaugaccag

SEQ ID NO: 3181385 - RNA, 21 nt, Human
agagaagagccccacucucag

SEQ ID NO: 3181386 - RNA, 18 nt, Human
agagaagagccccacucu

SEQ ID NO: 3181387 - RNA, 16 nt, Human
agagaagagccccacu

SEQ ID NO: 3181388 - RNA, 15 nt, Human
agagaagagccccac

SEQ ID NO: 3181389 - RNA, 14 nt, Human
agagaagagcccca

SEQ ID NO: 3181390 - RNA, 13 nt, Human
agagaagagcccc

SEQ ID NO: 3181391 - RNA, 20 nt, Human
agagagcuucuguugcugcc

SEQ ID NO: 3181392 - RNA, 23 nt, Human
agagagcuucuguugcugccuca

SEQ ID NO: 3181393 - RNA, 16 nt, Human
agagagcuucuguugc

SEQ ID NO: 3181394 - RNA, 23 nt, Human
agagaggguggugaccucugccu

SEQ ID NO: 3181395 - RNA, 16 nt, Human
agagaguggcuccucc

SEQ ID NO: 3181396 - RNA, 14 nt, Human
agagaguggcuccu

SEQ ID NO: 3181397 - RNA, 13 nt, Human
agagccccacucu

SEQ ID NO: 3181398 - RNA, 23 nt, Human
agagccccacucucagaggcccc

SEQ ID NO: 3181399 - RNA, 22 nt, Human
agagccccacucucagaggccc

SEQ ID NO: 3181400 - RNA, 21 nt, Human
agagccccacucucagaggcc

SEQ ID NO: 3181401 - RNA, 20 nt, Human
agagccccacucucagaggc

SEQ ID NO: 3181402 - RNA, 17 nt, Human
agagccccacucucaga

SEQ ID NO: 3181403 - RNA, 16 nt, Human
agagccccacucucag

SEQ ID NO: 3181404 - RNA, 15 nt, Human
agagccccacucuca

SEQ ID NO: 3181405 - RNA, 14 nt, Human
agagcccugcuccc

SEQ ID NO: 3181406 - RNA, 13 nt, Human
agagcccugcucc

SEQ ID NO: 3181407 - RNA, 18 nt, Human
agagcccugcucccuccg

SEQ ID NO: 3181408 - RNA, 16 nt, Human
agagcccugcucccuc

SEQ ID NO: 3181409 - RNA, 13 nt, Human
agagccuuaaaac

SEQ ID NO: 3181410 - RNA, 15 nt, Human
agagccuuaaaacau

SEQ ID NO: 3181411 - RNA, 16 nt, Human
agagccuuaaaacauc

SEQ ID NO: 3181412 - RNA, 14 nt, Human
agagccuuaaaaca

SEQ ID NO: 3181413 - RNA, 11 nt, Human
agacugaucuc

SEQ ID NO: 3181414 - RNA, 13 nt, Human
agaggggaggcca

SEQ ID NO: 3181415 - RNA, 18 nt, Human
agaggggagagcugaaca

SEQ ID NO: 3181416 - RNA, 15 nt, Human
agaggggaggccaag

SEQ ID NO: 3181417 - RNA, 23 nt, Human
agaggguggugaccucugccuga

SEQ ID NO: 3181418 - RNA, 22 nt, Human
agauacuuggggggcugaggug

SEQ ID NO: 3181419 - RNA, 13 nt, Human
agauagccaaggc

SEQ ID NO: 3181420 - RNA, 16 nt, Human
agauagcagccuggcu

SEQ ID NO: 3181421 - RNA, 23 nt, Human
agauagcagccuggcuccccugg

SEQ ID NO: 3181422 - RNA, 20 nt, Human
agauacuuuguauuguccua

SEQ ID NO: 3181423 - RNA, 22 nt, Human
agauacuuuguauuguccuauu

SEQ ID NO: 3181424 - RNA, 20 nt, Human
agauagaaagggugcugcca

SEQ ID NO: 3181425 - RNA, 12 nt, Human
agauacuuugua

SEQ ID NO: 3181426 - RNA, 13 nt, Human
agauacuuuguau

SEQ ID NO: 3181427 - RNA, 15 nt, Human
agauacuuuguauug

SEQ ID NO: 3181428 - RNA, 16 nt, Human
agauacuuuguauugu

SEQ ID NO: 3181429 - RNA, 11 nt, Human
agauacuuugu

SEQ ID NO: 3181430 - RNA, 22 nt, Human
agauacuuggucacagccaggc

SEQ ID NO: 3181431 - RNA, 14 nt, Human
agauacuuugcauu

SEQ ID NO: 3181432 - RNA, 16 nt, Human
agauacuuugcauugu

SEQ ID NO: 3181433 - RNA, 19 nt, Human
agauacuuugcauugucug

SEQ ID NO: 3181434 - RNA, 21 nt, Human
agauacuuggucacagccagg

SEQ ID NO: 3181435 - RNA, 16 nt, Human
agaggggaaaagagau

SEQ ID NO: 3181436 - RNA, 19 nt, Human
agaggauuaguaagaucuc

SEQ ID NO: 3181437 - RNA, 19 nt, Human
agaggauggcccaggguga

SEQ ID NO: 3181438 - RNA, 22 nt, Human
agaggauuuugcgucagagaaa

SEQ ID NO: 3181439 - RNA, 14 nt, Human
agaggauuuugcgu

SEQ ID NO: 3181440 - RNA, 22 nt, Human
agaggauuggcucccaucuuuu

SEQ ID NO: 3181441 - RNA, 18 nt, Human
agaggggaaaagagauga

SEQ ID NO: 3181442 - RNA, 19 nt, Human
agaggggaaaagcugaaca

SEQ ID NO: 3181443 - RNA, 18 nt, Human
agaggggaaaagcugaac

SEQ ID NO: 3181444 - RNA, 22 nt, Human
agaggggaacagacuggaagca

SEQ ID NO: 3181445 - RNA, 16 nt, Human
agaggggaagagacuu

SEQ ID NO: 3181446 - RNA, 13 nt, Human
agaggagaggggc

SEQ ID NO: 3181447 - RNA, 13 nt, Human
agaggagcccugc

SEQ ID NO: 3181448 - RNA, 12 nt, Human
agaggagcccug

SEQ ID NO: 3181449 - RNA, 23 nt, Human
agaggagcccugccucuccgccc

SEQ ID NO: 3181450 - RNA, 15 nt, Human
agaggagcccugccu

SEQ ID NO: 3181451 - RNA, 14 nt, Human
agaggagcccugcc

SEQ ID NO: 3181452 - RNA, 15 nt, Human
agauagccaaggcca

SEQ ID NO: 3181453 - RNA, 16 nt, Human
agauagccaaggccaa

SEQ ID NO: 3181454 - RNA, 21 nt, Human
agauaguaugcacuauauaca

SEQ ID NO: 3181455 - RNA, 21 nt, Human
agauaguccauaauguucugc

SEQ ID NO: 3181456 - RNA, 20 nt, Human
agauaguccauaauguucug

SEQ ID NO: 3181457 - RNA, 23 nt, Human
agauaguccauaauguucugcua

SEQ ID NO: 3181458 - RNA, 21 nt, Human
agauagucuuggaagcuguuu

SEQ ID NO: 3181459 - RNA, 23 nt, Human
agaugagaggggagagcugaaca

SEQ ID NO: 3181460 - RNA, 21 nt, Human
agaugagaacagauaaagauu

SEQ ID NO: 3181461 - RNA, 13 nt, Human
agaugagaauuag

SEQ ID NO: 3181462 - RNA, 17 nt, Human
agaugagaacagauaaa

SEQ ID NO: 3181463 - RNA, 20 nt, Human
agaugaccccugcccagauc

SEQ ID NO: 3181464 - RNA, 23 nt, Human
agaugaccccugcccagaucagc

SEQ ID NO: 3181465 - RNA, 22 nt, Human
agauggcugugccucugccugu

SEQ ID NO: 3181466 - RNA, 23 nt, Human
agauggcugugccucugccuguc

SEQ ID NO: 3181467 - RNA, 14 nt, Human
agaugagcacuucu

SEQ ID NO: 3181468 - RNA, 16 nt, Human
agaugagcuuucuuuu

SEQ ID NO: 3181469 - RNA, 20 nt, Human
agaugagcuuucuuuuuaaa

SEQ ID NO: 3181470 - RNA, 19 nt, Human
agaugagcacuucuaaguu

SEQ ID NO: 3181471 - RNA, 18 nt, Human
agaugaggaguaaaauuc

SEQ ID NO: 3181472 - RNA, 20 nt, Human
agaugaggaguaaaauucag

SEQ ID NO: 3181473 - RNA, 22 nt, Human
agaucuguuuugugguuuggaa

SEQ ID NO: 3181474 - RNA, 23 nt, Human
agaucuguuuugugguuuggaau

SEQ ID NO: 3181475 - RNA, 13 nt, Human
agccagaggucug

SEQ ID NO: 3181476 - RNA, 22 nt, Human
agccagauuucacucuccuugg

SEQ ID NO: 3181477 - RNA, 18 nt, Human
agccagaggagagaggac

SEQ ID NO: 3181478 - RNA, 20 nt, Human
agccagaggagagaggaccc

SEQ ID NO: 3181479 - RNA, 23 nt, Human
agccaaggccaaaggaagcacau

SEQ ID NO: 3181480 - RNA, 17 nt, Human
agcaugccaauuucucu

SEQ ID NO: 3181481 - RNA, 22 nt, Human
agccaaggccaaaggaagcaca

SEQ ID NO: 3181482 - RNA, 20 nt, Human
agccaaggccaaaggaagca

SEQ ID NO: 3181483 - RNA, 17 nt, Human
agccauucugacucaua

SEQ ID NO: 3181484 - RNA, 12 nt, Human
agcaugccugga

SEQ ID NO: 3181485 - RNA, 20 nt, Human
agcaugagagggaugaggca

SEQ ID NO: 3181486 - RNA, 23 nt, Human
agcaugaggcagcacgugcacaa

SEQ ID NO: 3181487 - RNA, 18 nt, Human
agcaugagguaucuaagg

SEQ ID NO: 3181488 - RNA, 20 nt, Human
agcaugauuuauacucauuu

SEQ ID NO: 3181489 - RNA, 20 nt, Human
agccaaagcuaggccuggcc

SEQ ID NO: 3181490 - RNA, 19 nt, Human
agccaaagcuaggccuggc

SEQ ID NO: 3181491 - RNA, 18 nt, Human
agccaaagcuaggccugg

SEQ ID NO: 3181492 - RNA, 16 nt, Human
agcaugaacagugcac

SEQ ID NO: 3181493 - RNA, 17 nt, Human
agcaugaaaaugugugu

SEQ ID NO: 3181494 - RNA, 21 nt, Human
agcagugauauucuuuguuaa

SEQ ID NO: 3181495 - RNA, 16 nt, Human
agcaguugcugguaaa

SEQ ID NO: 3181496 - RNA, 17 nt, Human
agcaguugcugguaaaa

SEQ ID NO: 3181497 - RNA, 20 nt, Human
agcaguugcugguaaaauga

SEQ ID NO: 3181498 - RNA, 21 nt, Human
agcaguugcugguaaaaugaa

SEQ ID NO: 3181499 - RNA, 22 nt, Human
agcaguugcugguaaaaugaag

SEQ ID NO: 3181500 - RNA, 23 nt, Human
agcaguugcugguaaaaugaaga

SEQ ID NO: 3181501 - RNA, 13 nt, Human
agcaguuucaaua

SEQ ID NO: 3181502 - RNA, 12 nt, Human
agcaguuucaau

SEQ ID NO: 3181503 - RNA, 21 nt, Human
agaugggagaaucacuugaac

SEQ ID NO: 3181504 - RNA, 13 nt, Human
agauguaauuuug

SEQ ID NO: 3181505 - RNA, 14 nt, Human
agauguagaggaga

SEQ ID NO: 3181506 - RNA, 19 nt, Human
agauguaauuuuguguaag

SEQ ID NO: 3181507 - RNA, 17 nt, Human
agauguaauuuugugua

SEQ ID NO: 3181508 - RNA, 15 nt, Human
agauguaauuuugug

SEQ ID NO: 3181509 - RNA, 14 nt, Human
agauguaauuuugu

SEQ ID NO: 3181510 - RNA, 15 nt, Human
agauguacuauaaca

SEQ ID NO: 3181511 - RNA, 22 nt, Human
agauguacuauaacauagaauu

SEQ ID NO: 3181512 - RNA, 21 nt, Human
agcaguugaaaagacuccaaa

SEQ ID NO: 3181513 - RNA, 23 nt, Human
agcaguugaaaagacuccaaaga

SEQ ID NO: 3181514 - RNA, 16 nt, Human
agcagugagagcagau

SEQ ID NO: 3181515 - RNA, 19 nt, Human
agcagugauauucuuuguu

SEQ ID NO: 3181516 - RNA, 15 nt, Human
agcagugauauucuu

SEQ ID NO: 3181517 - RNA, 13 nt, Human
agcagucugccug

SEQ ID NO: 3181518 - RNA, 19 nt, Human
agcagucuuaugcuuccag

SEQ ID NO: 3181519 - RNA, 15 nt, Human
agcagucugccugga

SEQ ID NO: 3181520 - RNA, 22 nt, Human
agcagucuuaugcuuccagaaa

SEQ ID NO: 3181521 - RNA, 20 nt, Human
agcagucuuaugcuuccaga

SEQ ID NO: 3181522 - RNA, 14 nt, Human
agcagccaggagag

SEQ ID NO: 3181523 - RNA, 15 nt, Human
agcagccacauuccu

SEQ ID NO: 3181524 - RNA, 12 nt, Human
agcagccagcca

SEQ ID NO: 3181525 - RNA, 21 nt, Human
agcagccagccaaacacacag

SEQ ID NO: 3181526 - RNA, 19 nt, Human
agcacuaaggugugcucug

SEQ ID NO: 3181527 - RNA, 21 nt, Human
agcagccacauuccugaugcu

SEQ ID NO: 3181528 - RNA, 19 nt, Human
agcacuaaacuuggugcuu

SEQ ID NO: 3181529 - RNA, 11 nt, Human
agcccaaccuc

SEQ ID NO: 3181530 - RNA, 16 nt, Human
agcccaaccucuuccu

SEQ ID NO: 3181531 - RNA, 15 nt, Human
agcccaaccucuucc

SEQ ID NO: 3181532 - RNA, 19 nt, Human
agccccacucucagaggcc

SEQ ID NO: 3181533 - RNA, 17 nt, Human
agccccacucucagagg

SEQ ID NO: 3181534 - RNA, 16 nt, Human
agccccacucucagag

SEQ ID NO: 3181535 - RNA, 15 nt, Human
agccccacucucaga

SEQ ID NO: 3181536 - RNA, 14 nt, Human
agccccacucucag

SEQ ID NO: 3181537 - RNA, 22 nt, Human
agccccacucucagaggcccca

SEQ ID NO: 3181538 - RNA, 21 nt, Human
agccccacucucagaggcccc

SEQ ID NO: 3181539 - RNA, 20 nt, Human
agccgagaucacgccacugc

SEQ ID NO: 3181540 - RNA, 19 nt, Human
agccgagaucacgccacug

SEQ ID NO: 3181541 - RNA, 15 nt, Human
agcccugagcuuucu

SEQ ID NO: 3181542 - RNA, 17 nt, Human
agcccugaggaggccuu

SEQ ID NO: 3181543 - RNA, 20 nt, Human
agccccaucccaaacccuuc

SEQ ID NO: 3181544 - RNA, 16 nt, Human
agccccagugcccaca

SEQ ID NO: 3181545 - RNA, 23 nt, Human
agccccauaauuuuuuuuuuccu

SEQ ID NO: 3181546 - RNA, 21 nt, Human
agccgggcgugguggugagug

SEQ ID NO: 3181547 - RNA, 19 nt, Human
agccucccaaagugcuggg

SEQ ID NO: 3181548 - RNA, 18 nt, Human
agccucccaaagugcugg

SEQ ID NO: 3181549 - RNA, 16 nt, Human
agccguaaaaacugaa

SEQ ID NO: 3181550 - RNA, 20 nt, Human
agccguaaaaacugaaguuc

SEQ ID NO: 3181551 - RNA, 17 nt, Human
agccguaaaaacugaag

SEQ ID NO: 3181552 - RNA, 14 nt, Human
agccgcuggggcca

SEQ ID NO: 3181553 - RNA, 22 nt, Human
agccgcuggggccaguuggucc

SEQ ID NO: 3181554 - RNA, 18 nt, Human
agccgagaucacgccacu

SEQ ID NO: 3181555 - RNA, 22 nt, Human
agcccugagguuugaaucugac

SEQ ID NO: 3181556 - RNA, 18 nt, Human
agcccugaggaggccuug

SEQ ID NO: 3181557 - RNA, 20 nt, Human
agccgagauugcaccacugc

SEQ ID NO: 3181558 - RNA, 19 nt, Human
agccgagauugcaccacug

SEQ ID NO: 3181559 - RNA, 21 nt, Human
agccgagaucacgccacugca

SEQ ID NO: 3181560 - RNA, 17 nt, Human
agccucccgaguagcug

SEQ ID NO: 3181561 - RNA, 22 nt, Human
agccucccgaauagcugggacu

SEQ ID NO: 3181562 - RNA, 20 nt, Human
agccucccgaauagcuggga

SEQ ID NO: 3181563 - RNA, 19 nt, Human
agccucccgaauagcuggg

SEQ ID NO: 3181564 - RNA, 18 nt, Human
agccucccgaauagcugg

SEQ ID NO: 3181565 - RNA, 17 nt, Human
agccucccaaagugcug

SEQ ID NO: 3181566 - RNA, 22 nt, Human
agccucccgaguagcugggacu

SEQ ID NO: 3181567 - RNA, 13 nt, Human
agccucccuccgc

SEQ ID NO: 3181568 - RNA, 18 nt, Human
accccgaccaccugccca

SEQ ID NO: 3181569 - RNA, 22 nt, Human
accccgcaagcaccauccccuc

SEQ ID NO: 3181570 - RNA, 15 nt, Human
accccggccaccugc

SEQ ID NO: 3181571 - RNA, 22 nt, Human
accccuaaagagauacuuugau

SEQ ID NO: 3181572 - RNA, 16 nt, Human
acccaaguccaagcau

SEQ ID NO: 3181573 - RNA, 23 nt, Human
acccaagggccuggccugagcug

SEQ ID NO: 3181574 - RNA, 13 nt, Human
acccaagggccug

SEQ ID NO: 3181575 - RNA, 16 nt, Human
acccaagggccuggcc

SEQ ID NO: 3181576 - RNA, 16 nt, Human
acccaugaaagaaaac

SEQ ID NO: 3181577 - RNA, 17 nt, Human
acccaugcugcccugug

SEQ ID NO: 3181578 - RNA, 18 nt, Human
acccaugcugcccuguga

SEQ ID NO: 3181579 - RNA, 22 nt, Human
acccaugaaagaaaacuuuuau

SEQ ID NO: 3181580 - RNA, 19 nt, Human
acccaugcugcccugugag

SEQ ID NO: 3181581 - RNA, 16 nt, Human
acccaugcugcccugu

SEQ ID NO: 3181582 - RNA, 18 nt, Human
acccauggaaaaaugcca

SEQ ID NO: 3181583 - RNA, 13 nt, Human
acccaugggcagg

SEQ ID NO: 3181584 - RNA, 14 nt, Human
accaucaugucugg

SEQ ID NO: 3181585 - RNA, 18 nt, Human
accaucccugaaggcccc

SEQ ID NO: 3181586 - RNA, 16 nt, Human
accaucccugaaggcc

SEQ ID NO: 3181587 - RNA, 17 nt, Human
accaucaugucuggcua

SEQ ID NO: 3181588 - RNA, 16 nt, Human
accaucaugucuggcu

SEQ ID NO: 3181589 - RNA, 21 nt, Human
accaucccugaaggccccgcc

SEQ ID NO: 3181590 - RNA, 22 nt, Human
accaucccugaaggccccgccc

SEQ ID NO: 3181591 - RNA, 15 nt, Human
acccaagcaggaggc

SEQ ID NO: 3181592 - RNA, 15 nt, Human
acccaagcuccaacc

SEQ ID NO: 3181593 - RNA, 18 nt, Human
acagguuugggaccccug

SEQ ID NO: 3181594 - RNA, 15 nt, Human
acagguuugggaccc

SEQ ID NO: 3181595 - RNA, 18 nt, Human
acagguuuuaaaagccuu

SEQ ID NO: 3181596 - RNA, 11 nt, Human
acauaaacauc

SEQ ID NO: 3181597 - RNA, 12 nt, Human
acauaaacauca

SEQ ID NO: 3181598 - RNA, 16 nt, Human
acauaaaccauuuuug

SEQ ID NO: 3181599 - RNA, 21 nt, Human
acauaaaccauuuuuguuacu

SEQ ID NO: 3181600 - RNA, 22 nt, Human
acauaaaccauuuuuguuacuc

SEQ ID NO: 3181601 - RNA, 19 nt, Human
acauccacagucuccccca

SEQ ID NO: 3181602 - RNA, 15 nt, Human
acauccacagucucc

SEQ ID NO: 3181603 - RNA, 13 nt, Human
acauccacucucu

SEQ ID NO: 3181604 - RNA, 22 nt, Human
acauccacucucucuuguucuu

SEQ ID NO: 3181605 - RNA, 19 nt, Human
acauccacucucucuuguu

SEQ ID NO: 3181606 - RNA, 21 nt, Human
acaucccaccccauccuccag

SEQ ID NO: 3181607 - RNA, 20 nt, Human
acaucccaccccauccucca

SEQ ID NO: 3181608 - RNA, 23 nt, Human
acauccugucaucugagaaugaa

SEQ ID NO: 3181609 - RNA, 20 nt, Human
acauccugucaucugagaau

SEQ ID NO: 3181610 - RNA, 22 nt, Human
acauccugucaucugagaauga

SEQ ID NO: 3181611 - RNA, 13 nt, Human
acauguuacaaca

SEQ ID NO: 3181612 - RNA, 19 nt, Human
acauguuacuggauaaauu

SEQ ID NO: 3181613 - RNA, 21 nt, Human
acauguuacuggauaaauugu

SEQ ID NO: 3181614 - RNA, 22 nt, Human
acauguuacuggauaaauuguu

SEQ ID NO: 3181615 - RNA, 11 nt, Human
acauguuacug

SEQ ID NO: 3181616 - RNA, 21 nt, Human
acauguuuuucuucucccuca

SEQ ID NO: 3181617 - RNA, 20 nt, Human
acaugcacagcuaacaugga

SEQ ID NO: 3181618 - RNA, 15 nt, Human
acaugcacacucaug

SEQ ID NO: 3181619 - RNA, 19 nt, Human
acauguuuuucuucucccu

SEQ ID NO: 3181620 - RNA, 23 nt, Human
acauuaaaaaaaaucaucauuau

SEQ ID NO: 3181621 - RNA, 18 nt, Human
accaagccuggucagccc

SEQ ID NO: 3181622 - RNA, 20 nt, Human
accaagccuggucagcccaa

SEQ ID NO: 3181623 - RNA, 19 nt, Human
accaagccuggucagccca

SEQ ID NO: 3181624 - RNA, 20 nt, Human
accaacugugaugucacuga

SEQ ID NO: 3181625 - RNA, 13 nt, Human
accaacuuucaag

SEQ ID NO: 3181626 - RNA, 12 nt, Human
accaacuuucaa

SEQ ID NO: 3181627 - RNA, 20 nt, Human
accaacuuucaagaacuugu

SEQ ID NO: 3181628 - RNA, 15 nt, Human
accaacuuucaagaa

SEQ ID NO: 3181629 - RNA, 14 nt, Human
accaacuuucaaga

SEQ ID NO: 3181630 - RNA, 14 nt, Human
accacgcccggcua

SEQ ID NO: 3181631 - RNA, 20 nt, Human
accacgcccggcuaauuuuu

SEQ ID NO: 3181632 - RNA, 13 nt, Human
accagcagccugg

SEQ ID NO: 3181633 - RNA, 14 nt, Human
accagcagccugga

SEQ ID NO: 3181634 - RNA, 17 nt, Human
accagcagccuggaccc

SEQ ID NO: 3181635 - RNA, 18 nt, Human
accagcagucugccugga

SEQ ID NO: 3181636 - RNA, 21 nt, Human
accaacgucugugccauuuug

SEQ ID NO: 3181637 - RNA, 19 nt, Human
acauuugguaauguuuuua

SEQ ID NO: 3181638 - RNA, 17 nt, Human
acauuugguaauguuuu

SEQ ID NO: 3181639 - RNA, 15 nt, Human
accaacugucacugu

SEQ ID NO: 3181640 - RNA, 14 nt, Human
acauuugguaaugu

SEQ ID NO: 3181641 - RNA, 22 nt, Human
acaacuuucacuauaaugugaa

SEQ ID NO: 3181642 - RNA, 15 nt, Human
acaaguaauuucagu

SEQ ID NO: 3181643 - RNA, 16 nt, Human
acaaguaauuucagug

SEQ ID NO: 3181644 - RNA, 11 nt, Human
acaaguacugg

SEQ ID NO: 3181645 - RNA, 18 nt, Human
acaaguacugguaagauu

SEQ ID NO: 3181646 - RNA, 16 nt, Human
acaaguaguucuguau

SEQ ID NO: 3181647 - RNA, 23 nt, Human
acaaguaguucuguauuugaaag

SEQ ID NO: 3181648 - RNA, 21 nt, Human
acaaguaguucuguauuugaa

SEQ ID NO: 3181649 - RNA, 22 nt, Human
acaaguaguucuguauuugaaa

SEQ ID NO: 3181650 - RNA, 17 nt, Human
acaaguaguucuguauu

SEQ ID NO: 3181651 - RNA, 18 nt, Human
acaaguaguucuguauuu

SEQ ID NO: 3181652 - RNA, 19 nt, Human
acaaguaguucuguauuug

SEQ ID NO: 3181653 - RNA, 20 nt, Human
acaaguaguucuguauuuga

SEQ ID NO: 3181654 - RNA, 23 nt, Human
acaaguaugaauaaagacaccua

SEQ ID NO: 3181655 - RNA, 21 nt, Human
acaaguaugaauaaagacacc

SEQ ID NO: 3181656 - RNA, 17 nt, Human
acaagucccuguaauug

SEQ ID NO: 3181657 - RNA, 16 nt, Human
acaagucccuguaauu

SEQ ID NO: 3181658 - RNA, 21 nt, Human
aauuuuauaaggacuuccuga

SEQ ID NO: 3181659 - RNA, 15 nt, Human
aauuuuagaaauauu

SEQ ID NO: 3181660 - RNA, 16 nt, Human
aauuuuagaaauauuc

SEQ ID NO: 3181661 - RNA, 17 nt, Human
aauuuuagaaauauuca

SEQ ID NO: 3181662 - RNA, 13 nt, Human
aauuauaauguau

SEQ ID NO: 3181663 - RNA, 12 nt, Human
aauuauaaugua

SEQ ID NO: 3181664 - RNA, 20 nt, Human
aauuauaaacucauuuugcu

SEQ ID NO: 3181665 - RNA, 16 nt, Human
aauuuugauaguggga

SEQ ID NO: 3181666 - RNA, 20 nt, Human
aauuuugaaaaguaauauuu

SEQ ID NO: 3181667 - RNA, 21 nt, Human
aauuuugaaaaguaauauuua

SEQ ID NO: 3181668 - RNA, 13 nt, Human
aauuuugaaaagu

SEQ ID NO: 3181669 - RNA, 12 nt, Human
aauuuucuuuca

SEQ ID NO: 3181670 - RNA, 22 nt, Human
aauuuugaaaaguaauauuuau

SEQ ID NO: 3181671 - RNA, 12 nt, Human
aauuuugacacu

SEQ ID NO: 3181672 - RNA, 13 nt, Human
acaaaauguaacu

SEQ ID NO: 3181673 - RNA, 12 nt, Human
acaaaauguaac

SEQ ID NO: 3181674 - RNA, 20 nt, Human
acaaaauguaacuguuacca

SEQ ID NO: 3181675 - RNA, 17 nt, Human
acaaaauguaacuguua

SEQ ID NO: 3181676 - RNA, 16 nt, Human
acaaaauguaacuguu

SEQ ID NO: 3181677 - RNA, 14 nt, Human
acaaaauguaacug

SEQ ID NO: 3181678 - RNA, 23 nt, Human
acaaaauguaacuguuaccauug

SEQ ID NO: 3181679 - RNA, 18 nt, Human
acaacuaugauuuggaaa

SEQ ID NO: 3181680 - RNA, 20 nt, Human
acaaagagcguugaaguuga

SEQ ID NO: 3181681 - RNA, 15 nt, Human
acaaacgggcucagc

SEQ ID NO: 3181682 - RNA, 21 nt, Human
acaaaccuguuucugcagcca

SEQ ID NO: 3181683 - RNA, 22 nt, Human
acaauuuucagauuugcacaaa

SEQ ID NO: 3181684 - RNA, 21 nt, Human
acaauuuucagauuugcacaa

SEQ ID NO: 3181685 - RNA, 20 nt, Human
acaauuuucagauuugcaca

SEQ ID NO: 3181686 - RNA, 19 nt, Human
acaauuuucagauuugcac

SEQ ID NO: 3181687 - RNA, 18 nt, Human
acaauuuucagauuugca

SEQ ID NO: 3181688 - RNA, 17 nt, Human
acaauuuucagauuugc

SEQ ID NO: 3181689 - RNA, 16 nt, Human
acaauuuucagauuug

SEQ ID NO: 3181690 - RNA, 15 nt, Human
acaauuuucagauuu

SEQ ID NO: 3181691 - RNA, 14 nt, Human
acaauuuucagauu

SEQ ID NO: 3181692 - RNA, 13 nt, Human
acaauuuucagau

SEQ ID NO: 3181693 - RNA, 18 nt, Human
acacaaacgggcucagca

SEQ ID NO: 3181694 - RNA, 16 nt, Human
acaauguuuuaacaag

SEQ ID NO: 3181695 - RNA, 13 nt, Human
acaauguuuacaa

SEQ ID NO: 3181696 - RNA, 16 nt, Human
acaauuacuuuagaaa

SEQ ID NO: 3181697 - RNA, 13 nt, Human
acaauuucugugu

SEQ ID NO: 3181698 - RNA, 16 nt, Human
acaauuucuuuugguu

SEQ ID NO: 3181699 - RNA, 13 nt, Human
acaauuucuuuug

SEQ ID NO: 3181700 - RNA, 20 nt, Human
acaaugugacuuugaaaaua

SEQ ID NO: 3181701 - RNA, 17 nt, Human
acaaugugacuuugaaa

SEQ ID NO: 3181702 - RNA, 12 nt, Human
acaccagagccc

SEQ ID NO: 3181703 - RNA, 16 nt, Human
acacgcuccuuccucu

SEQ ID NO: 3181704 - RNA, 17 nt, Human
acacgcuccuuccucug

SEQ ID NO: 3181705 - RNA, 19 nt, Human
acacgcuccuuccucugag

SEQ ID NO: 3181706 - RNA, 22 nt, Human
acacgcugcucugccccagcuu

SEQ ID NO: 3181707 - RNA, 18 nt, Human
acacgcugcucugcccca

SEQ ID NO: 3181708 - RNA, 17 nt, Human
acacgcugcucugcccc

SEQ ID NO: 3181709 - RNA, 12 nt, Human
acacgcugccuu

SEQ ID NO: 3181710 - RNA, 23 nt, Human
acacgcugcucugccccagcuug

SEQ ID NO: 3181711 - RNA, 12 nt, Human
acacagcucugu

SEQ ID NO: 3181712 - RNA, 11 nt, Human
acacagcucug

SEQ ID NO: 3181713 - RNA, 22 nt, Human
acaccaaucuuacuuuguaaau

SEQ ID NO: 3181714 - RNA, 23 nt, Human
acaccaaucuuacuuuguaaauu

SEQ ID NO: 3181715 - RNA, 20 nt, Human
acaccaaucuuacuuuguaa

SEQ ID NO: 3181716 - RNA, 18 nt, Human
acaccaaucuuacuuugu

SEQ ID NO: 3181717 - RNA, 23 nt, Human
acacagaaggggacugccaccuc

SEQ ID NO: 3181718 - RNA, 14 nt, Human
acacuaaccacgcu

SEQ ID NO: 3181719 - RNA, 15 nt, Human
acacggacacucaaa

SEQ ID NO: 3181720 - RNA, 21 nt, Human
acacuaaauguuaaagaugua

SEQ ID NO: 3181721 - RNA, 20 nt, Human
acacuaaauguuaaagaugu

SEQ ID NO: 3181722 - RNA, 19 nt, Human
acacuaaauguuaaagaug

SEQ ID NO: 3181723 - RNA, 18 nt, Human
acacuaaauguuaaagau

SEQ ID NO: 3181724 - RNA, 12 nt, Human
acacuaaauguu

SEQ ID NO: 3181725 - RNA, 15 nt, Human
acacuaaauguuaaa

SEQ ID NO: 3181726 - RNA, 13 nt, Human
acacuaaauguua

SEQ ID NO: 3181727 - RNA, 23 nt, Human
acacggagcggauugcaaagcaa

SEQ ID NO: 3181728 - RNA, 15 nt, Human
acaggggcaggagga

SEQ ID NO: 3181729 - RNA, 16 nt, Human
acagggggccagaaca

SEQ ID NO: 3181730 - RNA, 21 nt, Human
acagggguuccuucugggcau

SEQ ID NO: 3181731 - RNA, 16 nt, Human
acagggguuccuucug

SEQ ID NO: 3181732 - RNA, 13 nt, Human
acagggguuccuu

SEQ ID NO: 3181733 - RNA, 12 nt, Human
acagggguuccu

SEQ ID NO: 3181734 - RNA, 16 nt, Human
acaggcaagcaccucc

SEQ ID NO: 3181735 - RNA, 15 nt, Human
acaggcaagcaccuc

SEQ ID NO: 3181736 - RNA, 18 nt, Human
acaggcaagcaccuccug

SEQ ID NO: 3181737 - RNA, 21 nt, Human
acagcugcucaauaaaguaca

SEQ ID NO: 3181738 - RNA, 15 nt, Human
acagguacuuugucu

SEQ ID NO: 3181739 - RNA, 15 nt, Human
acagguaccaguucu

SEQ ID NO: 3181740 - RNA, 14 nt, Human
acagguacuuuguc

SEQ ID NO: 3181741 - RNA, 17 nt, Human
acagguaccaguucuuu

SEQ ID NO: 3181742 - RNA, 21 nt, Human
acagggucucuagugcuguga

SEQ ID NO: 3181743 - RNA, 19 nt, Human
acagggucucuagugcugu

SEQ ID NO: 3181744 - RNA, 23 nt, Human
acaggugugaaccaccacaccca

SEQ ID NO: 3181745 - RNA, 20 nt, Human
acaggugugaaccaccacac

SEQ ID NO: 3181746 - RNA, 22 nt, Human
acaggugugagccaccacgccc

SEQ ID NO: 3181747 - RNA, 21 nt, Human
acaggugugagccaccacgcc

SEQ ID NO: 3181748 - RNA, 20 nt, Human
acagcucugcauacucauua

SEQ ID NO: 3181749 - RNA, 15 nt, Human
acagcuccuuuucca

SEQ ID NO: 3181750 - RNA, 21 nt, Human
acagcuccuuuuccagagcau

SEQ ID NO: 3181751 - RNA, 20 nt, Human
acagcuccuuuuccagagca

SEQ ID NO: 3181752 - RNA, 23 nt, Human
acagcuccuucuguccuacucug

SEQ ID NO: 3181753 - RNA, 14 nt, Human
acagcugccuggga

SEQ ID NO: 3181754 - RNA, 13 nt, Human
acagcugccuggg

SEQ ID NO: 3181755 - RNA, 23 nt, Human
acagcugccugggaucccucauc

SEQ ID NO: 3181756 - RNA, 14 nt, Human
acagcuccuucugu

SEQ ID NO: 3181757 - RNA, 13 nt, Human
acagcuccuucug

SEQ ID NO: 3181758 - RNA, 12 nt, Human
acagcuccuucu

SEQ ID NO: 3181759 - RNA, 21 nt, Human
acagaggggguggccucccaa

SEQ ID NO: 3181760 - RNA, 16 nt, Human
acagaagugacugaug

SEQ ID NO: 3181761 - RNA, 14 nt, Human
acagagucucacug

SEQ ID NO: 3181762 - RNA, 12 nt, Human
acagagucucac

SEQ ID NO: 3181763 - RNA, 22 nt, Human
acagaggggguggccucccaac

SEQ ID NO: 3181764 - RNA, 15 nt, Human
acagaguaaucuugu

SEQ ID NO: 3181765 - RNA, 15 nt, Human
acagcaguugaaaag

SEQ ID NO: 3181766 - RNA, 19 nt, Human
acagagucucacuguugcc

SEQ ID NO: 3181767 - RNA, 17 nt, Human
acagagucucacuguug

SEQ ID NO: 3181768 - RNA, 22 nt, Human
acagcagucuuaugcuuccaga

SEQ ID NO: 3181769 - RNA, 20 nt, Human
acagcagucuuaugcuucca

SEQ ID NO: 3181770 - RNA, 16 nt, Human
acagccagacuggcac

SEQ ID NO: 3181771 - RNA, 20 nt, Human
acagccagaacucugugucc

SEQ ID NO: 3181772 - RNA, 14 nt, Human
acagccacucagaa

SEQ ID NO: 3181773 - RNA, 15 nt, Human
acagccagacuggca

SEQ ID NO: 3181774 - RNA, 13 nt, Human
acagccagacugg

SEQ ID NO: 3181775 - RNA, 19 nt, Human
acagccacggccaggccag

SEQ ID NO: 3181776 - RNA, 12 nt, Human
acagccacucag

SEQ ID NO: 3181777 - RNA, 23 nt, Human
acagcauuuguguguuacaaugu

SEQ ID NO: 3181778 - RNA, 14 nt, Human
acagcauguguuaa

SEQ ID NO: 3181779 - RNA, 16 nt, Human
acagcauguguuaauc

SEQ ID NO: 3181780 - RNA, 21 nt, Human
acagcauguguuaaucuuaau

SEQ ID NO: 3181781 - RNA, 17 nt, Human
acagcauuuguguguua

SEQ ID NO: 3181782 - RNA, 15 nt, Human
acagccaugauucuu

SEQ ID NO: 3181783 - RNA, 20 nt, Human
acagccauaggcccuuucag

SEQ ID NO: 3181784 - RNA, 15 nt, Human
acacugauccagccc

SEQ ID NO: 3181785 - RNA, 19 nt, Human
acacugagagccuuuuuga

SEQ ID NO: 3181786 - RNA, 17 nt, Human
acacugaagucaguucu

SEQ ID NO: 3181787 - RNA, 22 nt, Human
acacugaauuuuuaugugugau

SEQ ID NO: 3181788 - RNA, 21 nt, Human
acacugaauuuuuauguguga

SEQ ID NO: 3181789 - RNA, 20 nt, Human
acacugaauuuuuaugugug

SEQ ID NO: 3181790 - RNA, 16 nt, Human
acacugaauuuuuaug

SEQ ID NO: 3181791 - RNA, 16 nt, Human
acacugccugccuuaa

SEQ ID NO: 3181792 - RNA, 20 nt, Human
acacugccugccuuaaguga

SEQ ID NO: 3181793 - RNA, 15 nt, Human
acacugccugccuua

SEQ ID NO: 3181794 - RNA, 22 nt, Human
acacugugaagagcuggacucc

SEQ ID NO: 3181795 - RNA, 21 nt, Human
acacugugacaucucuauucc

SEQ ID NO: 3181796 - RNA, 16 nt, Human
acacugugacaucucu

SEQ ID NO: 3181797 - RNA, 23 nt, Human
acagaaauugguaccuugcacac

SEQ ID NO: 3181798 - RNA, 21 nt, Human
acagaacacauaauucaggaa

SEQ ID NO: 3181799 - RNA, 15 nt, Human
acgcugugcugcccu

SEQ ID NO: 3181800 - RNA, 16 nt, Human
acgcugugcugcccug

SEQ ID NO: 3181801 - RNA, 17 nt, Human
acgcugugcugcccugc

SEQ ID NO: 3181802 - RNA, 18 nt, Human
acgcugugcugcccugcc

SEQ ID NO: 3181803 - RNA, 11 nt, Human
acguggcugcu

SEQ ID NO: 3181804 - RNA, 19 nt, Human
acgugcacaaauucaugug

SEQ ID NO: 3181805 - RNA, 21 nt, Human
acuaagaggaaaguacauuuu

SEQ ID NO: 3181806 - RNA, 20 nt, Human
acuaagaggaaaguacauuu

SEQ ID NO: 3181807 - RNA, 22 nt, Human
acuaagaucgguuaacaaauaa

SEQ ID NO: 3181808 - RNA, 21 nt, Human
acuaagaucgguuaacaaaua

SEQ ID NO: 3181809 - RNA, 20 nt, Human
acuaagaucgguuaacaaau

SEQ ID NO: 3181810 - RNA, 19 nt, Human
acuaagaucgguuaacaaa

SEQ ID NO: 3181811 - RNA, 17 nt, Human
acuaagaucgguuaaca

SEQ ID NO: 3181812 - RNA, 13 nt, Human
acguggcugcuuc

SEQ ID NO: 3181813 - RNA, 14 nt, Human
acguggcugcuuca

SEQ ID NO: 3181814 - RNA, 15 nt, Human
acguggcugcuucaa

SEQ ID NO: 3181815 - RNA, 12 nt, Human
acuaauaaaaua

SEQ ID NO: 3181816 - RNA, 13 nt, Human
acuaauaaaauau

SEQ ID NO: 3181817 - RNA, 14 nt, Human
acuaauaaaauauu

SEQ ID NO: 3181818 - RNA, 15 nt, Human
acuaauaaaauauuu

SEQ ID NO: 3181819 - RNA, 16 nt, Human
acuaauaaaauauuuu

SEQ ID NO: 3181820 - RNA, 17 nt, Human
acuaauaaaauauuuuc

SEQ ID NO: 3181821 - RNA, 18 nt, Human
acuaauaaaauauuuucu

SEQ ID NO: 3181822 - RNA, 19 nt, Human
acuaauaaaauauuuucug

SEQ ID NO: 3181823 - RNA, 20 nt, Human
acuaauaaaauauuuucugu

SEQ ID NO: 3181824 - RNA, 21 nt, Human
acuaauaaaauauuuucugug

SEQ ID NO: 3181825 - RNA, 22 nt, Human
acuaauaaaauauuuucugugu

SEQ ID NO: 3181826 - RNA, 23 nt, Human
acuaauaaaauauuuucugugug

SEQ ID NO: 3181827 - RNA, 13 nt, Human
acuaagauucuuu

SEQ ID NO: 3181828 - RNA, 17 nt, Human
acuaagauucuuuuaaa

SEQ ID NO: 3181829 - RNA, 21 nt, Human
acuaagauucuuuuaaauuag

SEQ ID NO: 3181830 - RNA, 18 nt, Human
acgccacugcacuauagc

SEQ ID NO: 3181831 - RNA, 14 nt, Human
acgauuuaauuuau

SEQ ID NO: 3181832 - RNA, 13 nt, Human
acgauuuaauuua

SEQ ID NO: 3181833 - RNA, 19 nt, Human
acgauucauuuuugaaacu

SEQ ID NO: 3181834 - RNA, 20 nt, Human
acgauucauuuuugaaacug

SEQ ID NO: 3181835 - RNA, 14 nt, Human
acgauccuucaaag

SEQ ID NO: 3181836 - RNA, 15 nt, Human
acgauccuucaaagu

SEQ ID NO: 3181837 - RNA, 16 nt, Human
acgauccuucaaaguc

SEQ ID NO: 3181838 - RNA, 19 nt, Human
acgaucacaaaugacuuua

SEQ ID NO: 3181839 - RNA, 12 nt, Human
accuuggcugca

SEQ ID NO: 3181840 - RNA, 14 nt, Human
accuuggcucaagu

SEQ ID NO: 3181841 - RNA, 12 nt, Human
accuuggcucaa

SEQ ID NO: 3181842 - RNA, 20 nt, Human
accugccccuccucucugcc

SEQ ID NO: 3181843 - RNA, 20 nt, Human
accuguaaugacaggccugu

SEQ ID NO: 3181844 - RNA, 15 nt, Human
accuguaaugacagg

SEQ ID NO: 3181845 - RNA, 16 nt, Human
accuuucaauaggaaa

SEQ ID NO: 3181846 - RNA, 12 nt, Human
accuuuauucug

SEQ ID NO: 3181847 - RNA, 13 nt, Human
accuuuauucugg

SEQ ID NO: 3181848 - RNA, 15 nt, Human
accuuguaauguaac

SEQ ID NO: 3181849 - RNA, 18 nt, Human
accuugucauuuuggucu

SEQ ID NO: 3181850 - RNA, 22 nt, Human
accuuguaauguaacugcucuu

SEQ ID NO: 3181851 - RNA, 17 nt, Human
accuuguaauguaacug

SEQ ID NO: 3181852 - RNA, 16 nt, Human
accuuguaauguaacu

SEQ ID NO: 3181853 - RNA, 17 nt, Human
accuuucaauaggaaaa

SEQ ID NO: 3181854 - RNA, 21 nt, Human
accuuucaauaggaaaaacug

SEQ ID NO: 3181855 - RNA, 23 nt, Human
accuuucaauaggaaaaacugau

SEQ ID NO: 3181856 - RNA, 16 nt, Human
accucugcacaagcug

SEQ ID NO: 3181857 - RNA, 18 nt, Human
accucugcacaagcugca

SEQ ID NO: 3181858 - RNA, 21 nt, Human
accucugcacaagcugcaccc

SEQ ID NO: 3181859 - RNA, 23 nt, Human
accugccccucaacucuccucca

SEQ ID NO: 3181860 - RNA, 14 nt, Human
accugccccuccuc

SEQ ID NO: 3181861 - RNA, 18 nt, Human
accugccccuccucucug

SEQ ID NO: 3181862 - RNA, 20 nt, Human
accugccccucaacucuccu

SEQ ID NO: 3181863 - RNA, 21 nt, Human
accugcccaaccugcucuccu

SEQ ID NO: 3181864 - RNA, 17 nt, Human
accucuuccuggccggu

SEQ ID NO: 3181865 - RNA, 13 nt, Human
accugcccaaccu

SEQ ID NO: 3181866 - RNA, 13 nt, Human
acuccccugcugg

SEQ ID NO: 3181867 - RNA, 17 nt, Human
acuccccugcugggugu

SEQ ID NO: 3181868 - RNA, 19 nt, Human
acuccccgccguacaguuc

SEQ ID NO: 3181869 - RNA, 21 nt, Human
acuccccagccagccuggcug

SEQ ID NO: 3181870 - RNA, 17 nt, Human
acuccccagccagccug

SEQ ID NO: 3181871 - RNA, 14 nt, Human
acucccccaggugg

SEQ ID NO: 3181872 - RNA, 16 nt, Human
acucaggcccaaagcc

SEQ ID NO: 3181873 - RNA, 17 nt, Human
acucaggcccaaagccu

SEQ ID NO: 3181874 - RNA, 13 nt, Human
acucagucuuuaa

SEQ ID NO: 3181875 - RNA, 14 nt, Human
acucaguggggagg

SEQ ID NO: 3181876 - RNA, 17 nt, Human
acucaaacucuuaaaac

SEQ ID NO: 3181877 - RNA, 16 nt, Human
acucaaacucuuaaaa

SEQ ID NO: 3181878 - RNA, 18 nt, Human
acucaaaagcugggcagg

SEQ ID NO: 3181879 - RNA, 14 nt, Human
acuaguuuuuccua

SEQ ID NO: 3181880 - RNA, 21 nt, Human
acuaguuuuuccuaucauguu

SEQ ID NO: 3181881 - RNA, 23 nt, Human
acuauaacauagaauugcaaucu

SEQ ID NO: 3181882 - RNA, 19 nt, Human
acuauaacauagaauugca

SEQ ID NO: 3181883 - RNA, 22 nt, Human
acucagcaccacucaagaccaa

SEQ ID NO: 3181884 - RNA, 21 nt, Human
acucagcaccacucaagacca

SEQ ID NO: 3181885 - RNA, 17 nt, Human
acucagcaccacucaag

SEQ ID NO: 3181886 - RNA, 14 nt, Human
acucagcaccacuc

SEQ ID NO: 3181887 - RNA, 19 nt, Human
acucaaagcaaaagugcug

SEQ ID NO: 3181888 - RNA, 23 nt, Human
acuagccaacggccccagcuucu

SEQ ID NO: 3181889 - RNA, 21 nt, Human
acuagccaacggccccagcuu

SEQ ID NO: 3181890 - RNA, 15 nt, Human
acuaggguccugggg

SEQ ID NO: 3181891 - RNA, 16 nt, Human
acuaggguccugggga

SEQ ID NO: 3181892 - RNA, 16 nt, Human
acuaggcauuuguaaa

SEQ ID NO: 3181893 - RNA, 23 nt, Human
acuaggcauuuguaaauauuaaa

SEQ ID NO: 3181894 - RNA, 15 nt, Human
acuaggaaggcacuu

SEQ ID NO: 3181895 - RNA, 21 nt, Human
acucuacccucuuagaaaaac

SEQ ID NO: 3181896 - RNA, 13 nt, Human
acucuacccucuu

SEQ ID NO: 3181897 - RNA, 18 nt, Human
acucuacccucuuagaaa

SEQ ID NO: 3181898 - RNA, 16 nt, Human
acucugugucaggugg

SEQ ID NO: 3181899 - RNA, 11 nt, Human
acucuuaaaac

SEQ ID NO: 3181900 - RNA, 18 nt, Human
acucuuaaaacccaagug

SEQ ID NO: 3181901 - RNA, 20 nt, Human
acucuggcagcucagagagg

SEQ ID NO: 3181902 - RNA, 22 nt, Human
acucuauaagcaaauugcuuuu

SEQ ID NO: 3181903 - RNA, 11 nt, Human
acucugggaac

SEQ ID NO: 3181904 - RNA, 22 nt, Human
acucugggaacuucuuugcagu

SEQ ID NO: 3181905 - RNA, 12 nt, Human
acucccuuucaa

SEQ ID NO: 3181906 - RNA, 13 nt, Human
acucccuuucaac

SEQ ID NO: 3181907 - RNA, 21 nt, Human
acucccgagacggcacugaga

SEQ ID NO: 3181908 - RNA, 22 nt, Human
acucccguguaggaaccugcac

SEQ ID NO: 3181909 - RNA, 18 nt, Human
acuucugccauauucugu

SEQ ID NO: 3181910 - RNA, 12 nt, Human
acuucugccaga

SEQ ID NO: 3181911 - RNA, 19 nt, Human
acuucugccagauguccua

SEQ ID NO: 3181912 - RNA, 16 nt, Human
acuucugacucuuccc

SEQ ID NO: 3181913 - RNA, 18 nt, Human
acuucugacucuucccca

SEQ ID NO: 3181914 - RNA, 17 nt, Human
acuucuuucccuuccuc

SEQ ID NO: 3181915 - RNA, 12 nt, Human
acuucuuucccu

SEQ ID NO: 3181916 - RNA, 14 nt, Human
acuucuuugcaguu

SEQ ID NO: 3181917 - RNA, 19 nt, Human
acuucuuucccuuccucca

SEQ ID NO: 3181918 - RNA, 18 nt, Human
acuucuuucccuuccucc

SEQ ID NO: 3181919 - RNA, 21 nt, Human
acuucuuugcaguucccaucu

SEQ ID NO: 3181920 - RNA, 15 nt, Human
acuuggucugugaga

SEQ ID NO: 3181921 - RNA, 14 nt, Human
acuuggucugugag

SEQ ID NO: 3181922 - RNA, 13 nt, Human
acuuggucuguga

SEQ ID NO: 3181923 - RNA, 18 nt, Human
acuuguaaaugugguaaa

SEQ ID NO: 3181924 - RNA, 20 nt, Human
acuuguaaaugugguaaaga

SEQ ID NO: 3181925 - RNA, 13 nt, Human
acuguuuagauuu

SEQ ID NO: 3181926 - RNA, 16 nt, Human
acuguuuaagacacuu

SEQ ID NO: 3181927 - RNA, 13 nt, Human
acuguuguauaaa

SEQ ID NO: 3181928 - RNA, 19 nt, Human
acuguuguauaaauuuauu

SEQ ID NO: 3181929 - RNA, 15 nt, Human
acuguuguauaaauu

SEQ ID NO: 3181930 - RNA, 19 nt, Human
acuguuuagauuugccaua

SEQ ID NO: 3181931 - RNA, 20 nt, Human
acuguuuagauuugccauag

SEQ ID NO: 3181932 - RNA, 22 nt, Human
acuguuuguuccagaaucugua

SEQ ID NO: 3181933 - RNA, 12 nt, Human
acuggaacucuc

SEQ ID NO: 3181934 - RNA, 14 nt, Human
acuggaagcacagc

SEQ ID NO: 3181935 - RNA, 15 nt, Human
acuggaagcacagcu

SEQ ID NO: 3181936 - RNA, 20 nt, Human
acugcccccucugcccugcg

SEQ ID NO: 3181937 - RNA, 19 nt, Human
acugcccccucugcccugc

SEQ ID NO: 3181938 - RNA, 18 nt, Human
acugcccccucugcccug

SEQ ID NO: 3181939 - RNA, 23 nt, Human
acugccaccuccccuugccagcu

SEQ ID NO: 3181940 - RNA, 11 nt, Human
acugccaccuc

SEQ ID NO: 3181941 - RNA, 13 nt, Human
acugccaccuccc

SEQ ID NO: 3181942 - RNA, 12 nt, Human
acugccaccucc

SEQ ID NO: 3181943 - RNA, 15 nt, Human
acugaagucaguucu

SEQ ID NO: 3181944 - RNA, 21 nt, Human
acugaaggccacuugaguugg

SEQ ID NO: 3181945 - RNA, 13 nt, Human
acugaaggccacu

SEQ ID NO: 3181946 - RNA, 14 nt, Human
acugcauuuaggga

SEQ ID NO: 3181947 - RNA, 19 nt, Human
acugcauuuagggaguauu

SEQ ID NO: 3181948 - RNA, 12 nt, Human
acugcauuugug

SEQ ID NO: 3181949 - RNA, 18 nt, Human
acugccaaccucgcucca

SEQ ID NO: 3181950 - RNA, 14 nt, Human
acugccaaccucgc

SEQ ID NO: 3181951 - RNA, 16 nt, Human
acugcauuuagggagu

SEQ ID NO: 3181952 - RNA, 20 nt, Human
acugccacaaggaagaaauu

SEQ ID NO: 3181953 - RNA, 18 nt, Human
acugccacaaggaagaaa

SEQ ID NO: 3181954 - RNA, 17 nt, Human
acugccacaaggaagaa

SEQ ID NO: 3181955 - RNA, 15 nt, Human
acugccacaaggaag

SEQ ID NO: 3181956 - RNA, 17 nt, Human
acugccaacugaucugu

SEQ ID NO: 3181957 - RNA, 19 nt, Human
acugccaacugaucuguua

SEQ ID NO: 3181958 - RNA, 12 nt, Human
acugucuucagu

SEQ ID NO: 3181959 - RNA, 12 nt, Human
acugucugucug

SEQ ID NO: 3181960 - RNA, 16 nt, Human
acugugcaguugcugu

SEQ ID NO: 3181961 - RNA, 13 nt, Human
acugugauuugaa

SEQ ID NO: 3181962 - RNA, 16 nt, Human
acugguaagauuguua

SEQ ID NO: 3181963 - RNA, 17 nt, Human
acugguaagauuguuau

SEQ ID NO: 3181964 - RNA, 18 nt, Human
acugguaagauuguuauu

SEQ ID NO: 3181965 - RNA, 20 nt, Human
acugguggcccgacagccug

SEQ ID NO: 3181966 - RNA, 22 nt, Human
acugguggcccgacagccuggc

SEQ ID NO: 3181967 - RNA, 21 nt, Human
acugguggcccgacagccugg

SEQ ID NO: 3181968 - RNA, 23 nt, Human
acugguggcccgacagccuggca

SEQ ID NO: 3181969 - RNA, 17 nt, Human
acuguccuguugauuaa

SEQ ID NO: 3181970 - RNA, 22 nt, Human
acuguccuguugauuaauuucu

SEQ ID NO: 3181971 - RNA, 24 nt, Human
acugucuagcacuuccuugccagu

SEQ ID NO: 3181972 - RNA, 21 nt, Human
acugucuagcacuuccuugcc

SEQ ID NO: 3181973 - RNA, 19 nt, Human
acugucuagcacuuccuug

SEQ ID NO: 3181974 - RNA, 18 nt, Human
acugucuagcacuuccuu

SEQ ID NO: 3181975 - RNA, 17 nt, Human
acugucuagcacuuccu

SEQ ID NO: 3181976 - RNA, 11 nt, Human
agaaaauauuc

SEQ ID NO: 3181977 - RNA, 14 nt, Human
agaaaauauucucu

SEQ ID NO: 3181978 - RNA, 16 nt, Human
agaaaauguucuucca

SEQ ID NO: 3181979 - RNA, 22 nt, Human
agaaaauggacguguuaugacu

SEQ ID NO: 3181980 - RNA, 23 nt, Human
agaaaauggacguguuaugacuc

SEQ ID NO: 3181981 - RNA, 15 nt, Human
agaaacaaacaaaag

SEQ ID NO: 3181982 - RNA, 23 nt, Human
agaaaauggaagacagcucuuau

SEQ ID NO: 3181983 - RNA, 22 nt, Human
agaaaauaugucccagaaaugu

SEQ ID NO: 3181984 - RNA, 14 nt, Human
agaaaauauguauu

SEQ ID NO: 3181985 - RNA, 15 nt, Human
agaaaauggacgugu

SEQ ID NO: 3181986 - RNA, 20 nt, Human
agaaaauggacguguuauga

SEQ ID NO: 3181987 - RNA, 23 nt, Human
acuuuucuaaacuaggcuccuuc

SEQ ID NO: 3181988 - RNA, 22 nt, Human
acuuuuccuugcauacaaacaa

SEQ ID NO: 3181989 - RNA, 21 nt, Human
acuuuuccuugcauacaaaca

SEQ ID NO: 3181990 - RNA, 18 nt, Human
acuuuuccuugcauacaa

SEQ ID NO: 3181991 - RNA, 15 nt, Human
acuuuuccuugcaua

SEQ ID NO: 3181992 - RNA, 14 nt, Human
acuuuuccuugcau

SEQ ID NO: 3181993 - RNA, 13 nt, Human
acuuuuccucuua

SEQ ID NO: 3181994 - RNA, 20 nt, Human
acuuuuccucuuagaagaau

SEQ ID NO: 3181995 - RNA, 12 nt, Human
agaaaagugaau

SEQ ID NO: 3181996 - RNA, 14 nt, Human
agaaaagugaauug

SEQ ID NO: 3181997 - RNA, 15 nt, Human
agaaaagugaauuga

SEQ ID NO: 3181998 - RNA, 19 nt, Human
agaaaagugaauugaaguu

SEQ ID NO: 3181999 - RNA, 21 nt, Human
agaaaaggugauaaaaucaua

SEQ ID NO: 3182000 - RNA, 16 nt, Human
agaaaaggugauaaaa

SEQ ID NO: 3182001 - RNA, 13 nt, Human
agaaaaggucuug

SEQ ID NO: 3182002 - RNA, 22 nt, Human
agaaaauaaaaaaaagaaaaaa

SEQ ID NO: 3182003 - RNA, 21 nt, Human
agaaaauaaaaaaaagaaaaa

SEQ ID NO: 3182004 - RNA, 16 nt, Human
agaaaauaaaaaaaag

SEQ ID NO: 3182005 - RNA, 20 nt, Human
agaaaauaaaaaaaagaaaa

SEQ ID NO: 3182006 - RNA, 19 nt, Human
agaaaauaaaaaaaagaaa

SEQ ID NO: 3182007 - RNA, 18 nt, Human
agaaaauaaaaaaaagaa

SEQ ID NO: 3182008 - RNA, 17 nt, Human
agaaaauaaaaaaaaga

SEQ ID NO: 3182009 - RNA, 20 nt, Human
acuuuagguuuuuuuaauga

SEQ ID NO: 3182010 - RNA, 22 nt, Human
acuuucauauuuuaaacagagg

SEQ ID NO: 3182011 - RNA, 12 nt, Human
acuuuauaaauu

SEQ ID NO: 3182012 - RNA, 13 nt, Human
acuuuauaaauuu

SEQ ID NO: 3182013 - RNA, 14 nt, Human
acuuuauaaauuuc

SEQ ID NO: 3182014 - RNA, 17 nt, Human
acuuuagugcuacagaa

SEQ ID NO: 3182015 - RNA, 23 nt, Human
acuuuccuucauucaacccaccu

SEQ ID NO: 3182016 - RNA, 19 nt, Human
acuuuccaauucuccuuua

SEQ ID NO: 3182017 - RNA, 18 nt, Human
acuuuccaauucuccuuu

SEQ ID NO: 3182018 - RNA, 17 nt, Human
acuuuccaauucuccuu

SEQ ID NO: 3182019 - RNA, 20 nt, Human
acuuuguucuggcucuucca

SEQ ID NO: 3182020 - RNA, 17 nt, Human
acuuucuacucauuuua

SEQ ID NO: 3182021 - RNA, 23 nt, Human
acuuuguucuggcucuuccaggc

SEQ ID NO: 3182022 - RNA, 19 nt, Human
acuuucuacucauuuuaau

SEQ ID NO: 3182023 - RNA, 14 nt, Human
agaaauaaaccuua

SEQ ID NO: 3182024 - RNA, 16 nt, Human
agaaauaaaccuuaau

SEQ ID NO: 3182025 - RNA, 17 nt, Human
agaaauaaaccuuaaua

SEQ ID NO: 3182026 - RNA, 23 nt, Human
agaaauaaaccuuaauauuucuu

SEQ ID NO: 3182027 - RNA, 18 nt, Human
agaaauaaaguuucuguu

SEQ ID NO: 3182028 - RNA, 15 nt, Human
agaaauaaaguuucu

SEQ ID NO: 3182029 - RNA, 23 nt, Human
agaaaggaggggauagagagaga

SEQ ID NO: 3182030 - RNA, 20 nt, Human
agaaaggaggggauagagag

SEQ ID NO: 3182031 - RNA, 16 nt, Human
agaaaggaccugcaaa

SEQ ID NO: 3182032 - RNA, 13 nt, Human
aauuaaagaaaua

SEQ ID NO: 3182033 - RNA, 18 nt, Human
aauguuugccucugccuc

SEQ ID NO: 3182034 - RNA, 16 nt, Human
aauguuugccucugcc

SEQ ID NO: 3182035 - RNA, 19 nt, Human
aauguuugccucugccucu

SEQ ID NO: 3182036 - RNA, 16 nt, Human
aauguuuuaacaagaa

SEQ ID NO: 3182037 - RNA, 14 nt, Human
aauguuuucagcua

SEQ ID NO: 3182038 - RNA, 18 nt, Human
aauuaaaacacaacaucu

SEQ ID NO: 3182039 - RNA, 16 nt, Human
aauuaaacuuccaaag

SEQ ID NO: 3182040 - RNA, 21 nt, Human
aauuaaacuuccaaagaaagu

SEQ ID NO: 3182041 - RNA, 22 nt, Human
aauuaaacuuccaaagaaaguu

SEQ ID NO: 3182042 - RNA, 17 nt, Human
aauguuuuguaaacuuu

SEQ ID NO: 3182043 - RNA, 15 nt, Human
aauguuuuguaaacu

SEQ ID NO: 3182044 - RNA, 13 nt, Human
aauguuuuguaaa

SEQ ID NO: 3182045 - RNA, 14 nt, Human
aauguuuuguaaac

SEQ ID NO: 3182046 - RNA, 14 nt, Human
aauguuuugcuuuu

SEQ ID NO: 3182047 - RNA, 22 nt, Human
aauguuuuuaagaugaucaucu

SEQ ID NO: 3182048 - RNA, 23 nt, Human
aauguuuuguaaacuuugaaaua

SEQ ID NO: 3182049 - RNA, 22 nt, Human
aauguuuuguaaacuuugaaau

SEQ ID NO: 3182050 - RNA, 21 nt, Human
aauguuuuguaaacuuugaaa

SEQ ID NO: 3182051 - RNA, 20 nt, Human
aauguuuuguaaacuuugaa

SEQ ID NO: 3182052 - RNA, 19 nt, Human
aauguuuuguaaacuuuga

SEQ ID NO: 3182053 - RNA, 18 nt, Human
aauguuuuguaaacuuug

SEQ ID NO: 3182054 - RNA, 16 nt, Human
aaugucaguaugugga

SEQ ID NO: 3182055 - RNA, 22 nt, Human
aaugucaguauguggaagugug

SEQ ID NO: 3182056 - RNA, 13 nt, Human
aaugucaguguga

SEQ ID NO: 3182057 - RNA, 15 nt, Human
aaugucagugugacu

SEQ ID NO: 3182058 - RNA, 16 nt, Human
aaugucagugugacug

SEQ ID NO: 3182059 - RNA, 22 nt, Human
aauggugaacugucauuacaga

SEQ ID NO: 3182060 - RNA, 22 nt, Human
aauggucuuucuaaugugugaa

SEQ ID NO: 3182061 - RNA, 12 nt, Human
aauggugauuuu

SEQ ID NO: 3182062 - RNA, 15 nt, Human
aauggugauuuuaaa

SEQ ID NO: 3182063 - RNA, 19 nt, Human
aauggugcauuguauagau

SEQ ID NO: 3182064 - RNA, 13 nt, Human
aauggugauuuua

SEQ ID NO: 3182065 - RNA, 20 nt, Human
aaugucucuuuaaugucaca

SEQ ID NO: 3182066 - RNA, 17 nt, Human
aaugucagugugacuga

SEQ ID NO: 3182067 - RNA, 21 nt, Human
aaugucagugugacugaucuc

SEQ ID NO: 3182068 - RNA, 22 nt, Human
aaugucuaguuguaacaccaug

SEQ ID NO: 3182069 - RNA, 15 nt, Human
aaugggcagagcaga

SEQ ID NO: 3182070 - RNA, 13 nt, Human
aaugggcagagca

SEQ ID NO: 3182071 - RNA, 14 nt, Human
aaugguaguuucug

SEQ ID NO: 3182072 - RNA, 17 nt, Human
aaugguaguuucugugg

SEQ ID NO: 3182073 - RNA, 18 nt, Human
aaugguaguuucuguggu

SEQ ID NO: 3182074 - RNA, 20 nt, Human
aaugguaguuucugugguug

SEQ ID NO: 3182075 - RNA, 12 nt, Human
aaugguaguuuc

SEQ ID NO: 3182076 - RNA, 13 nt, Human
aaugguaguuucu

SEQ ID NO: 3182077 - RNA, 20 nt, Human
aaugguacuccacauauuuc

SEQ ID NO: 3182078 - RNA, 22 nt, Human
aaugguacaaaaccacagugua

SEQ ID NO: 3182079 - RNA, 20 nt, Human
aaugguaacauuuuucaaua

SEQ ID NO: 3182080 - RNA, 18 nt, Human
aauccaggguggugguga

SEQ ID NO: 3182081 - RNA, 21 nt, Human
aaugaugauccuaggcauuug

SEQ ID NO: 3182082 - RNA, 17 nt, Human
aaugaagaauuuaaaga

SEQ ID NO: 3182083 - RNA, 18 nt, Human
aaugaagaauuuaaagaa

SEQ ID NO: 3182084 - RNA, 20 nt, Human
aaugaagagcuguugauggg

SEQ ID NO: 3182085 - RNA, 13 nt, Human
aaugaagaauuua

SEQ ID NO: 3182086 - RNA, 14 nt, Human
aaugaagaauuuaa

SEQ ID NO: 3182087 - RNA, 15 nt, Human
aaugaagaauuuaaa

SEQ ID NO: 3182088 - RNA, 16 nt, Human
aaugaagaauuuaaag

SEQ ID NO: 3182089 - RNA, 15 nt, Human
aaugaagaauucaga

SEQ ID NO: 3182090 - RNA, 23 nt, Human
aaugaaccacaucuugcucugcu

SEQ ID NO: 3182091 - RNA, 17 nt, Human
aaugaaccacaucuugc

SEQ ID NO: 3182092 - RNA, 16 nt, Human
aaugaaccacaucuug

SEQ ID NO: 3182093 - RNA, 22 nt, Human
aaucuggaccccaucugugaau

SEQ ID NO: 3182094 - RNA, 14 nt, Human
aaugaacauuaaca

SEQ ID NO: 3182095 - RNA, 22 nt, Human
aaucugcuuuuuaaagaaugcu

SEQ ID NO: 3182096 - RNA, 21 nt, Human
aaucuggaccccaucugugaa

SEQ ID NO: 3182097 - RNA, 23 nt, Human
aaucugcaaagcauguuuugcau

SEQ ID NO: 3182098 - RNA, 21 nt, Human
aaucugcaaagcauguuuugc

SEQ ID NO: 3182099 - RNA, 19 nt, Human
aaucugcaaagcauguuuu

SEQ ID NO: 3182100 - RNA, 16 nt, Human
aaucugcaaagcaugu

SEQ ID NO: 3182101 - RNA, 19 nt, Human
aaugaugccaugaggaaca

SEQ ID NO: 3182102 - RNA, 19 nt, Human
aauauuauuuguguuuccu

SEQ ID NO: 3182103 - RNA, 20 nt, Human
aauauuauuuguguuuccua

SEQ ID NO: 3182104 - RNA, 16 nt, Human
aaucaacuaguauuug

SEQ ID NO: 3182105 - RNA, 21 nt, Human
aaucaacauggcuacuugcuu

SEQ ID NO: 3182106 - RNA, 20 nt, Human
aaucaaccaccuauuuuuga

SEQ ID NO: 3182107 - RNA, 13 nt, Human
aauaugggagaaa

SEQ ID NO: 3182108 - RNA, 18 nt, Human
aauauggucuuuugguua

SEQ ID NO: 3182109 - RNA, 18 nt, Human
aauauguacauuucuaag

SEQ ID NO: 3182110 - RNA, 16 nt, Human
aauauguacauuucua

SEQ ID NO: 3182111 - RNA, 15 nt, Human
aauauguacauuucu

SEQ ID NO: 3182112 - RNA, 14 nt, Human
aauauguacauuuc

SEQ ID NO: 3182113 - RNA, 19 nt, Human
aauauguacauuucuaagu

SEQ ID NO: 3182114 - RNA, 16 nt, Human
aauauguauuaacacu

SEQ ID NO: 3182115 - RNA, 21 nt, Human
aauauguauucuguaaaagaa

SEQ ID NO: 3182116 - RNA, 14 nt, Human
aaucaagaaacaaa

SEQ ID NO: 3182117 - RNA, 12 nt, Human
aaucaauuuaag

SEQ ID NO: 3182118 - RNA, 13 nt, Human
aaucacaggcugg

SEQ ID NO: 3182119 - RNA, 12 nt, Human
aaucacaggcug

SEQ ID NO: 3182120 - RNA, 21 nt, Human
aaucacaggcugggcugggca

SEQ ID NO: 3182121 - RNA, 14 nt, Human
aauauacaaaacuu

SEQ ID NO: 3182122 - RNA, 14 nt, Human
aauauaauauuguc

SEQ ID NO: 3182123 - RNA, 13 nt, Human
aauauaauauugu

SEQ ID NO: 3182124 - RNA, 17 nt, Human
aauauaauacacaaaau

SEQ ID NO: 3182125 - RNA, 18 nt, Human
aaguaugcauuauuaaau

SEQ ID NO: 3182126 - RNA, 20 nt, Human
aaguaugcauuauuaaauug

SEQ ID NO: 3182127 - RNA, 21 nt, Human
aaguaugcauuauuaaauugu

SEQ ID NO: 3182128 - RNA, 22 nt, Human
aaguaugcauuauuaaauugua

SEQ ID NO: 3182129 - RNA, 11 nt, Human
aaguacuucuu

SEQ ID NO: 3182130 - RNA, 12 nt, Human
aaguauauuaaa

SEQ ID NO: 3182131 - RNA, 14 nt, Human
aaguauauuaaaca

SEQ ID NO: 3182132 - RNA, 16 nt, Human
aaguagaacuuuguau

SEQ ID NO: 3182133 - RNA, 15 nt, Human
aaguagaacuuugua

SEQ ID NO: 3182134 - RNA, 11 nt, Human
aaggugggagg

SEQ ID NO: 3182135 - RNA, 16 nt, Human
aaggugcuuggaguuu

SEQ ID NO: 3182136 - RNA, 16 nt, Human
aagguuaauaaaguaa

SEQ ID NO: 3182137 - RNA, 15 nt, Human
aagguuaauaaagua

SEQ ID NO: 3182138 - RNA, 13 nt, Human
aagguguuugaaa

SEQ ID NO: 3182139 - RNA, 20 nt, Human
aagguguuugaaaauaguuu

SEQ ID NO: 3182140 - RNA, 21 nt, Human
aagguguuugaaaauaguuua

SEQ ID NO: 3182141 - RNA, 15 nt, Human
aagguguuugaaaau

SEQ ID NO: 3182142 - RNA, 20 nt, Human
aagguuaauguucaucaucc

SEQ ID NO: 3182143 - RNA, 13 nt, Human
aagguugaauaau

SEQ ID NO: 3182144 - RNA, 17 nt, Human
aagguugaauaauauau

SEQ ID NO: 3182145 - RNA, 18 nt, Human
aagguuuaaaacuaguua

SEQ ID NO: 3182146 - RNA, 16 nt, Human
aagucuuagauguaua

SEQ ID NO: 3182147 - RNA, 18 nt, Human
aauaaacuggcagcucag

SEQ ID NO: 3182148 - RNA, 17 nt, Human
aauaagugccaggaugg

SEQ ID NO: 3182149 - RNA, 23 nt, Human
aauaaaauuaaagcugaaaacug

SEQ ID NO: 3182150 - RNA, 18 nt, Human
aauaaaauucccuaaagc

SEQ ID NO: 3182151 - RNA, 19 nt, Human
aauaaaauucccuaaagcc

SEQ ID NO: 3182152 - RNA, 19 nt, Human
aagugcuuauuacauuuua

SEQ ID NO: 3182153 - RNA, 14 nt, Human
aagugguuuuaaua

SEQ ID NO: 3182154 - RNA, 22 nt, Human
aaguuguaggcauaaagucagg

SEQ ID NO: 3182155 - RNA, 22 nt, Human
aaguuguaugaucugugccuuu

SEQ ID NO: 3182156 - RNA, 16 nt, Human
aauaaugccuuuguaa

SEQ ID NO: 3182157 - RNA, 18 nt, Human
aauaaugccuuuguaacc

SEQ ID NO: 3182158 - RNA, 22 nt, Human
aauaaugccuuuguaaccacaa

SEQ ID NO: 3182159 - RNA, 13 nt, Human
aauaaucauugga

SEQ ID NO: 3182160 - RNA, 20 nt, Human
aauaauaaagaauagcuuua

SEQ ID NO: 3182161 - RNA, 13 nt, Human
aauaaucaagagc

SEQ ID NO: 3182162 - RNA, 15 nt, Human
aauaaucaagagccu

SEQ ID NO: 3182163 - RNA, 11 nt, Human
aauaaucaaga

SEQ ID NO: 3182164 - RNA, 13 nt, Human
aauaauaaaauca

SEQ ID NO: 3182165 - RNA, 12 nt, Human
aauaauaaagaa

SEQ ID NO: 3182166 - RNA, 17 nt, Human
aauaauaaaaaauuuca

SEQ ID NO: 3182167 - RNA, 19 nt, Human
aauaauccugcaaaguaca

SEQ ID NO: 3182168 - RNA, 14 nt, Human
aauaauccugcaaa

SEQ ID NO: 3182169 - RNA, 14 nt, Human
aauaaucucauugg

SEQ ID NO: 3182170 - RNA, 15 nt, Human
aauaaugagaaaugu

SEQ ID NO: 3182171 - RNA, 22 nt, Human
aagugcugggauuacaggugug

SEQ ID NO: 3182172 - RNA, 21 nt, Human
aagaaauuagggcucuaauuu

SEQ ID NO: 3182173 - RNA, 13 nt, Human
aagaaauuaacuu

SEQ ID NO: 3182174 - RNA, 17 nt, Human
aagauugucauuaguga

SEQ ID NO: 3182175 - RNA, 17 nt, Human
aagauugugugguguuu

SEQ ID NO: 3182176 - RNA, 19 nt, Human
aagauuguuauuaaaugua

SEQ ID NO: 3182177 - RNA, 20 nt, Human
aagauuguuauuaaauguag

SEQ ID NO: 3182178 - RNA, 19 nt, Human
aagauuguuuaucuagaug

SEQ ID NO: 3182179 - RNA, 15 nt, Human
aagauuguuuaucua

SEQ ID NO: 3182180 - RNA, 13 nt, Human
aagauuguuuauc

SEQ ID NO: 3182181 - RNA, 23 nt, Human
aagauuggucucccauaugcaga

SEQ ID NO: 3182182 - RNA, 22 nt, Human
aagauuguuuaucuagauguaa

SEQ ID NO: 3182183 - RNA, 20 nt, Human
aagauuguuuaucuagaugu

SEQ ID NO: 3182184 - RNA, 21 nt, Human
aagcaggcuugcccaguacau

SEQ ID NO: 3182185 - RNA, 23 nt, Human
aagccagacucugccaaaaccaa

SEQ ID NO: 3182186 - RNA, 14 nt, Human
aagcagaggaagga

SEQ ID NO: 3182187 - RNA, 21 nt, Human
aagcagaauuggaaaagacua

SEQ ID NO: 3182188 - RNA, 19 nt, Human
aagcagaauuggaaaagac

SEQ ID NO: 3182189 - RNA, 16 nt, Human
aagcagaauuggaaaa

SEQ ID NO: 3182190 - RNA, 23 nt, Human
aagcaggcgcaagggaggcccag

SEQ ID NO: 3182191 - RNA, 11 nt, Human
aagcaggaggc

SEQ ID NO: 3182192 - RNA, 18 nt, Human
aagccauaauuguucuua

SEQ ID NO: 3182193 - RNA, 16 nt, Human
aagccaugagaauguu

SEQ ID NO: 3182194 - RNA, 14 nt, Human
aagccaugagaaug

SEQ ID NO: 3182195 - RNA, 21 nt, Human
aagcgugagccacugcaccgg

SEQ ID NO: 3182196 - RNA, 12 nt, Human
aagcguggugga

SEQ ID NO: 3182197 - RNA, 22 nt, Human
aagcugcacccucaggcaggug

SEQ ID NO: 3182198 - RNA, 21 nt, Human
aagcugcacccucaggcaggu

SEQ ID NO: 3182199 - RNA, 20 nt, Human
aagcugcacccucaggcagg

SEQ ID NO: 3182200 - RNA, 17 nt, Human
aagcuaagguuuagaua

SEQ ID NO: 3182201 - RNA, 22 nt, Human
aagcuaacagcaguuucaggua

SEQ ID NO: 3182202 - RNA, 21 nt, Human
aagcuaacagcaguuucaggu

SEQ ID NO: 3182203 - RNA, 18 nt, Human
aaggacauugcggacagc

SEQ ID NO: 3182204 - RNA, 13 nt, Human
aagcugggcaggu

SEQ ID NO: 3182205 - RNA, 18 nt, Human
aagcuggcuuacacuggc

SEQ ID NO: 3182206 - RNA, 11 nt, Human
aagcugggcag

SEQ ID NO: 3182207 - RNA, 15 nt, Human
aaggacuaggguccu

SEQ ID NO: 3182208 - RNA, 18 nt, Human
aaggacccggaggggccu

SEQ ID NO: 3182209 - RNA, 18 nt, Human
aaggacuaggguccuggg

SEQ ID NO: 3182210 - RNA, 20 nt, Human
aaggacuaggguccugggga

SEQ ID NO: 3182211 - RNA, 12 nt, Human
aaggacugacug

SEQ ID NO: 3182212 - RNA, 19 nt, Human
aaggacugacugaggcagu

SEQ ID NO: 3182213 - RNA, 16 nt, Human
aaggauuuguguuuua

SEQ ID NO: 3182214 - RNA, 14 nt, Human
aaggcaaaaacaaa

SEQ ID NO: 3182215 - RNA, 17 nt, Human
aaggcaaggcugucaau

SEQ ID NO: 3182216 - RNA, 18 nt, Human
aaggcaaggcugucaauu

SEQ ID NO: 3182217 - RNA, 16 nt, Human
aaggcaaggcugucaa

SEQ ID NO: 3182218 - RNA, 21 nt, Human
aacaucauagaaacugucuag

SEQ ID NO: 3182219 - RNA, 22 nt, Human
aacaucagguuaggcaguauaa

SEQ ID NO: 3182220 - RNA, 21 nt, Human
aacaucagguuaggcaguaua

SEQ ID NO: 3182221 - RNA, 14 nt, Human
aacaucagcuugac

SEQ ID NO: 3182222 - RNA, 16 nt, Human
aacaugguuuaaaaga

SEQ ID NO: 3182223 - RNA, 20 nt, Human
aacaugguuuaaaagaaaaa

SEQ ID NO: 3182224 - RNA, 13 nt, Human
aacaucauuccuu

SEQ ID NO: 3182225 - RNA, 17 nt, Human
aacaugagguucucucu

SEQ ID NO: 3182226 - RNA, 14 nt, Human
aacaucaacaucuu

SEQ ID NO: 3182227 - RNA, 13 nt, Human
aacagcucgacuu

SEQ ID NO: 3182228 - RNA, 19 nt, Human
aaccacugcaauaucuucg

SEQ ID NO: 3182229 - RNA, 17 nt, Human
aaccacugaaucuggac

SEQ ID NO: 3182230 - RNA, 13 nt, Human
aaccacugaaucu

SEQ ID NO: 3182231 - RNA, 11 nt, Human
aaccacugaau

SEQ ID NO: 3182232 - RNA, 21 nt, Human
aacauguaauuaaguacuaug

SEQ ID NO: 3182233 - RNA, 14 nt, Human
aacauguaauuaag

SEQ ID NO: 3182234 - RNA, 21 nt, Human
aaccagucuuucaacucauug

SEQ ID NO: 3182235 - RNA, 14 nt, Human
aacccuggugacca

SEQ ID NO: 3182236 - RNA, 23 nt, Human
aacccugucaaacauuaguacuu

SEQ ID NO: 3182237 - RNA, 19 nt, Human
aacccugucaaacauuagu

SEQ ID NO: 3182238 - RNA, 17 nt, Human
aacccugucaaacauua

SEQ ID NO: 3182239 - RNA, 15 nt, Human
aaauugauguugaug

SEQ ID NO: 3182240 - RNA, 14 nt, Human
aaauugauguugau

SEQ ID NO: 3182241 - RNA, 13 nt, Human
aaauugauguuga

SEQ ID NO: 3182242 - RNA, 12 nt, Human
aaauugauguug

SEQ ID NO: 3182243 - RNA, 18 nt, Human
aaauugauguugaugcaa

SEQ ID NO: 3182244 - RNA, 23 nt, Human
aaauuggaguuggaguagaaugu

SEQ ID NO: 3182245 - RNA, 18 nt, Human
aaauugcauuuccugaca

SEQ ID NO: 3182246 - RNA, 13 nt, Human
aaauugcuuuuga

SEQ ID NO: 3182247 - RNA, 12 nt, Human
aaauugcuuuuu

SEQ ID NO: 3182248 - RNA, 18 nt, Human
aacaaaauacauucuuuu

SEQ ID NO: 3182249 - RNA, 15 nt, Human
aacaaaauuauuugu

SEQ ID NO: 3182250 - RNA, 22 nt, Human
aacaaacugcacaugauuucac

SEQ ID NO: 3182251 - RNA, 21 nt, Human
aacaaacugcacaugauuuca

SEQ ID NO: 3182252 - RNA, 24 nt, Human
aacaaacugcacaugauuucacaa

SEQ ID NO: 3182253 - RNA, 13 nt, Human
aacaaaaagaugu

SEQ ID NO: 3182254 - RNA, 17 nt, Human
aacaaaauacauucuuu

SEQ ID NO: 3182255 - RNA, 14 nt, Human
aacaaaauacauuc

SEQ ID NO: 3182256 - RNA, 13 nt, Human
aacaaaauacauu

SEQ ID NO: 3182257 - RNA, 11 nt, Human
aacaaaaggca

SEQ ID NO: 3182258 - RNA, 21 nt, Human
aacaaaaccaaaaguuauuaa

SEQ ID NO: 3182259 - RNA, 15 nt, Human
aacacgagcaggcua

SEQ ID NO: 3182260 - RNA, 18 nt, Human
aacaccugacagccccuc

SEQ ID NO: 3182261 - RNA, 15 nt, Human
aacaccugacagccc

SEQ ID NO: 3182262 - RNA, 19 nt, Human
aacaccucugcacaagcug

SEQ ID NO: 3182263 - RNA, 17 nt, Human
aacaccaaaaaauaucu

SEQ ID NO: 3182264 - RNA, 16 nt, Human
aacaccaaaaaauauc

SEQ ID NO: 3182265 - RNA, 15 nt, Human
aacaccaaaaaauau

SEQ ID NO: 3182266 - RNA, 22 nt, Human
aacaccaaaaaaauccagaaac

SEQ ID NO: 3182267 - RNA, 23 nt, Human
aacaagaauaaaggcagcuguug

SEQ ID NO: 3182268 - RNA, 14 nt, Human
aacaagaagaauuu

SEQ ID NO: 3182269 - RNA, 17 nt, Human
aacaagaagaauuugaa

SEQ ID NO: 3182270 - RNA, 15 nt, Human
aacaacuuuuuuuuc

SEQ ID NO: 3182271 - RNA, 14 nt, Human
aacaaagaccaauu

SEQ ID NO: 3182272 - RNA, 21 nt, Human
aacaaagaccaauuuuuugug

SEQ ID NO: 3182273 - RNA, 16 nt, Human
aacaaagaccaauuuu

SEQ ID NO: 3182274 - RNA, 22 nt, Human
aacaaagcauuugacuuucugu

SEQ ID NO: 3182275 - RNA, 19 nt, Human
aacaccuucuauagcauca

SEQ ID NO: 3182276 - RNA, 16 nt, Human
aacuuugagaucuaaa

SEQ ID NO: 3182277 - RNA, 16 nt, Human
aacuuugaaauauaug

SEQ ID NO: 3182278 - RNA, 13 nt, Human
aacuuuguauagu

SEQ ID NO: 3182279 - RNA, 14 nt, Human
aacuuuguauaguu

SEQ ID NO: 3182280 - RNA, 15 nt, Human
aacuuuguauaguua

SEQ ID NO: 3182281 - RNA, 20 nt, Human
aacuuuguauaguuauguaa

SEQ ID NO: 3182282 - RNA, 21 nt, Human
aacuuuguauaguuauguaaa

SEQ ID NO: 3182283 - RNA, 22 nt, Human
aacuuuguauaguuauguaaau

SEQ ID NO: 3182284 - RNA, 20 nt, Human
aacuuuguuaggccaaagac

SEQ ID NO: 3182285 - RNA, 11 nt, Human
aacuuugaaau

SEQ ID NO: 3182286 - RNA, 14 nt, Human
aacuuugaaauaua

SEQ ID NO: 3182287 - RNA, 13 nt, Human
aacuuugaaauau

SEQ ID NO: 3182288 - RNA, 21 nt, Human
aacuuucuuaauauuuuuaca

SEQ ID NO: 3182289 - RNA, 16 nt, Human
aacuuuuuuuucuuuu

SEQ ID NO: 3182290 - RNA, 18 nt, Human
aacuuuuuuuucuuuuuu

SEQ ID NO: 3182291 - RNA, 17 nt, Human
aacuuuuuuuucuuuuu

SEQ ID NO: 3182292 - RNA, 21 nt, Human
aagaaaaaaaaaaagaaagaa

SEQ ID NO: 3182293 - RNA, 20 nt, Human
aagaaaaaaaaaaagaaaga

SEQ ID NO: 3182294 - RNA, 18 nt, Human
aagaaaaaaaaaaaagcc

SEQ ID NO: 3182295 - RNA, 14 nt, Human
aagaaauguaaggg

SEQ ID NO: 3182296 - RNA, 13 nt, Human
aagaaauguaagg

SEQ ID NO: 3182297 - RNA, 14 nt, Human
aagaaaucuauaga

SEQ ID NO: 3182298 - RNA, 13 nt, Human
aagaaaugaagag

SEQ ID NO: 3182299 - RNA, 12 nt, Human
aagaaaugaaga

SEQ ID NO: 3182300 - RNA, 20 nt, Human
aagaaaucuauagaaagugu

SEQ ID NO: 3182301 - RNA, 16 nt, Human
aagaaaucuauagaaa

SEQ ID NO: 3182302 - RNA, 14 nt, Human
aacugaccagccuc

SEQ ID NO: 3182303 - RNA, 17 nt, Human
aacugauuuuuuuuucc

SEQ ID NO: 3182304 - RNA, 13 nt, Human
aacugaucuguua

SEQ ID NO: 3182305 - RNA, 15 nt, Human
aacugaucuguuaua

SEQ ID NO: 3182306 - RNA, 13 nt, Human
aacugaugugaaa

SEQ ID NO: 3182307 - RNA, 14 nt, Human
aacugaugugaaac

SEQ ID NO: 3182308 - RNA, 15 nt, Human
aacugaugugaaacu

SEQ ID NO: 3182309 - RNA, 18 nt, Human
aacugauuaguaagucuu

SEQ ID NO: 3182310 - RNA, 19 nt, Human
aacugauuuuuuuuuccuu

SEQ ID NO: 3182311 - RNA, 15 nt, Human
aacuuaguuugugaa

SEQ ID NO: 3182312 - RNA, 16 nt, Human
aacuuaguuugugaau

SEQ ID NO: 3182313 - RNA, 23 nt, Human
aacuuaguuugugaauugauuuu

SEQ ID NO: 3182314 - RNA, 14 nt, Human
aacuuauucaaaga

SEQ ID NO: 3182315 - RNA, 22 nt, Human
aacuuauucaaagagaaaacau

SEQ ID NO: 3182316 - RNA, 16 nt, Human
aacuuaguuuugcaua

SEQ ID NO: 3182317 - RNA, 12 nt, Human
aacuuaguuuug

SEQ ID NO: 3182318 - RNA, 21 nt, Human
aacuuauauuguaagaaauac

SEQ ID NO: 3182319 - RNA, 20 nt, Human
aacuuauauuguaagaaaua

SEQ ID NO: 3182320 - RNA, 19 nt, Human
aacuuauauuguaagaaau

SEQ ID NO: 3182321 - RNA, 15 nt, Human
aacuuauauuguaag

SEQ ID NO: 3182322 - RNA, 12 nt, Human
aacucaccccag

SEQ ID NO: 3182323 - RNA, 23 nt, Human
aacucaaggauaccuucuuauuu

SEQ ID NO: 3182324 - RNA, 15 nt, Human
aacucaccugccccu

SEQ ID NO: 3182325 - RNA, 16 nt, Human
aacucaccugccccuc

SEQ ID NO: 3182326 - RNA, 23 nt, Human
aacugaacucugacaacagacuu

SEQ ID NO: 3182327 - RNA, 19 nt, Human
aacugaacucugacaacag

SEQ ID NO: 3182328 - RNA, 20 nt, Human
aacugaacucugacaacaga

SEQ ID NO: 3182329 - RNA, 14 nt, Human
aacugaacucugac

SEQ ID NO: 3182330 - RNA, 16 nt, Human
aacugaacucugacaa

SEQ ID NO: 3182331 - RNA, 16 nt, Human
aaauaguaaaaauaaa

SEQ ID NO: 3182332 - RNA, 13 nt, Human
aaauaguaaaaau

SEQ ID NO: 3182333 - RNA, 14 nt, Human
aaauagacaaaaag

SEQ ID NO: 3182334 - RNA, 18 nt, Human
aaauagacaaaaaguaua

SEQ ID NO: 3182335 - RNA, 19 nt, Human
aaauagacaaaaaguauau

SEQ ID NO: 3182336 - RNA, 19 nt, Human
aaauagagaugagcuuucu

SEQ ID NO: 3182337 - RNA, 17 nt, Human
aaauagacagcaugaga

SEQ ID NO: 3182338 - RNA, 19 nt, Human
aaauacuuaacuacuguuu

SEQ ID NO: 3182339 - RNA, 20 nt, Human
aaauacuuaaauguuaugua

SEQ ID NO: 3182340 - RNA, 19 nt, Human
aaauacuuaaauguuaugu

SEQ ID NO: 3182341 - RNA, 18 nt, Human
aaauacuuaaauguuaug

SEQ ID NO: 3182342 - RNA, 16 nt, Human
aaauacuuaaauguua

SEQ ID NO: 3182343 - RNA, 15 nt, Human
aaauacuuaaauguu

SEQ ID NO: 3182344 - RNA, 22 nt, Human
aaauauuuuaauuuuuaaaugc

SEQ ID NO: 3182345 - RNA, 21 nt, Human
aaauauuuuaauuuuuaaaug

SEQ ID NO: 3182346 - RNA, 20 nt, Human
aaauauuuuaauuuuuaaau

SEQ ID NO: 3182347 - RNA, 22 nt, Human
aaauaguaggcaagauggcaca

SEQ ID NO: 3182348 - RNA, 13 nt, Human
aaauaguaggcaa

SEQ ID NO: 3182349 - RNA, 23 nt, Human
aaauaguaggcaagauggcacag

SEQ ID NO: 3182350 - RNA, 23 nt, Human
aaauacuguagauaauuaaccaa

SEQ ID NO: 3182351 - RNA, 20 nt, Human
aaauacuguagauaauuaac

SEQ ID NO: 3182352 - RNA, 18 nt, Human
aaauacuguagauaauua

SEQ ID NO: 3182353 - RNA, 17 nt, Human
aaauacuguagauaauu

SEQ ID NO: 3182354 - RNA, 16 nt, Human
aaauacuguagauaau

SEQ ID NO: 3182355 - RNA, 15 nt, Human
aaauacuguagauaa

SEQ ID NO: 3182356 - RNA, 13 nt, Human
aaauacuuaaaug

SEQ ID NO: 3182357 - RNA, 22 nt, Human
aaauacuguuuuuaacaacuau

SEQ ID NO: 3182358 - RNA, 14 nt, Human
aaauacuguagaua

SEQ ID NO: 3182359 - RNA, 11 nt, Human
aaauacuguag

SEQ ID NO: 3182360 - RNA, 15 nt, Human
aaauacuguacaaug

SEQ ID NO: 3182361 - RNA, 16 nt, Human
aaaucaaauaugcaaa

SEQ ID NO: 3182362 - RNA, 13 nt, Human
aaauauuuucugu

SEQ ID NO: 3182363 - RNA, 14 nt, Human
aaauauuuucugug

SEQ ID NO: 3182364 - RNA, 15 nt, Human
aaauauuuucugugu

SEQ ID NO: 3182365 - RNA, 16 nt, Human
aaauauuuucugugug

SEQ ID NO: 3182366 - RNA, 17 nt, Human
aaauauuuucugugugu

SEQ ID NO: 3182367 - RNA, 18 nt, Human
aaauauuuucuguguguu

SEQ ID NO: 3182368 - RNA, 19 nt, Human
aaauauuuucuguguguuc

SEQ ID NO: 3182369 - RNA, 20 nt, Human
aaauauuuucuguguguucc

SEQ ID NO: 3182370 - RNA, 21 nt, Human
aaauauuuucuguguguuccu

SEQ ID NO: 3182371 - RNA, 22 nt, Human
aaauauuuucuguguguuccug

SEQ ID NO: 3182372 - RNA, 23 nt, Human
aaauauuuucuguguguuccugg

SEQ ID NO: 3182373 - RNA, 19 nt, Human
aaaucaaauaugcaaagca

SEQ ID NO: 3182374 - RNA, 18 nt, Human
aaaucaaauaugcaaagc

SEQ ID NO: 3182375 - RNA, 22 nt, Human
aaaucuuauuaaaguuucaaaa

SEQ ID NO: 3182376 - RNA, 21 nt, Human
aaaucuuauuaaaguuucaaa

SEQ ID NO: 3182377 - RNA, 20 nt, Human
aaaucuuauuaaaguuucaa

SEQ ID NO: 3182378 - RNA, 19 nt, Human
aaaucuuauuaaaguuuca

SEQ ID NO: 3182379 - RNA, 22 nt, Human
aaaucaaauguaaaguuuaauu

SEQ ID NO: 3182380 - RNA, 16 nt, Human
aaaucaaauguaaagu

SEQ ID NO: 3182381 - RNA, 23 nt, Human
aaaucuuccuggucgaaaguuag

SEQ ID NO: 3182382 - RNA, 21 nt, Human
aaauggacguguuaugacucc

SEQ ID NO: 3182383 - RNA, 22 nt, Human
aaauggacguguuaugacucca

SEQ ID NO: 3182384 - RNA, 20 nt, Human
aaauggacguguuaugacuc

SEQ ID NO: 3182385 - RNA, 14 nt, Human
aaauggaaacagag

SEQ ID NO: 3182386 - RNA, 16 nt, Human
aaauggaaaugggcag

SEQ ID NO: 3182387 - RNA, 18 nt, Human
aaauggaagacagcucuu

SEQ ID NO: 3182388 - RNA, 18 nt, Human
aaaucuuuccauauccau

SEQ ID NO: 3182389 - RNA, 13 nt, Human
aaagggaaauuga

SEQ ID NO: 3182390 - RNA, 17 nt, Human
aaaggcuugcagaacuu

SEQ ID NO: 3182391 - RNA, 17 nt, Human
aaaggcuuauaaaacag

SEQ ID NO: 3182392 - RNA, 14 nt, Human
aaaggcuuauaaaa

SEQ ID NO: 3182393 - RNA, 18 nt, Human
aaagucuguugauuaaag

SEQ ID NO: 3182394 - RNA, 20 nt, Human
aaagucuguugauuaaagau

SEQ ID NO: 3182395 - RNA, 19 nt, Human
aaagucuguugauuaaaga

SEQ ID NO: 3182396 - RNA, 14 nt, Human
aaagucuuuuaaaa

SEQ ID NO: 3182397 - RNA, 13 nt, Human
aaagucuuuuaaa

SEQ ID NO: 3182398 - RNA, 21 nt, Human
aaagucuuuuaaaaaguauug

SEQ ID NO: 3182399 - RNA, 20 nt, Human
aaagucuuuuaaaaaguauu

SEQ ID NO: 3182400 - RNA, 16 nt, Human
aaagucuuuuaaaaag

SEQ ID NO: 3182401 - RNA, 15 nt, Human
aaagucuuuuaaaaa

SEQ ID NO: 3182402 - RNA, 18 nt, Human
aaagucuugaauguugaa

SEQ ID NO: 3182403 - RNA, 13 nt, Human
aaauaaaggaacc

SEQ ID NO: 3182404 - RNA, 21 nt, Human
aaauaaacuuucuuaauauuu

SEQ ID NO: 3182405 - RNA, 13 nt, Human
aaauaaacuuucu

SEQ ID NO: 3182406 - RNA, 22 nt, Human
aaauaaaauuaaagcugaaaac

SEQ ID NO: 3182407 - RNA, 12 nt, Human
aaauaaaauucc

SEQ ID NO: 3182408 - RNA, 11 nt, Human
aaagugcuggg

SEQ ID NO: 3182409 - RNA, 20 nt, Human
aaagugcugcagggcuuuaa

SEQ ID NO: 3182410 - RNA, 19 nt, Human
aaagugagaaaacugugac

SEQ ID NO: 3182411 - RNA, 19 nt, Human
aaagugaggccacugaaga

SEQ ID NO: 3182412 - RNA, 20 nt, Human
aaagugaggccacugaagag

SEQ ID NO: 3182413 - RNA, 22 nt, Human
aaagugcugcagggcuuuaaaa

SEQ ID NO: 3182414 - RNA, 21 nt, Human
aaagugcugcagggcuuuaaa

SEQ ID NO: 3182415 - RNA, 19 nt, Human
aaauaaaaggacugugauu

SEQ ID NO: 3182416 - RNA, 13 nt, Human
aaauaaaauacuu

SEQ ID NO: 3182417 - RNA, 20 nt, Human
aaauaacaacuuuuuuuucu

SEQ ID NO: 3182418 - RNA, 19 nt, Human
aaacugccagcaacgcagg

SEQ ID NO: 3182419 - RNA, 11 nt, Human
aaacugcauuu

SEQ ID NO: 3182420 - RNA, 12 nt, Human
aaacugcauuug

SEQ ID NO: 3182421 - RNA, 14 nt, Human
aaacugcauuugug

SEQ ID NO: 3182422 - RNA, 20 nt, Human
aaacugccaguuuuguuucc

SEQ ID NO: 3182423 - RNA, 13 nt, Human
aaagaaaaauauu

SEQ ID NO: 3182424 - RNA, 10 nt, Human
aaagaaagaa

SEQ ID NO: 3182425 - RNA, 21 nt, Human
aaagaaaauaaaaaaaagaaa

SEQ ID NO: 3182426 - RNA, 14 nt, Human
aaagaaaacaaaac

SEQ ID NO: 3182427 - RNA, 18 nt, Human
aaagaaaaauauuuaaug

SEQ ID NO: 3182428 - RNA, 14 nt, Human
aaagaaaacaaaaa

SEQ ID NO: 3182429 - RNA, 19 nt, Human
aaagaaaacaaaaaacgaa

SEQ ID NO: 3182430 - RNA, 12 nt, Human
aaagaaaauaaa

SEQ ID NO: 3182431 - RNA, 15 nt, Human
aaacugccagcaacg

SEQ ID NO: 3182432 - RNA, 14 nt, Human
aaacugccagcaac

SEQ ID NO: 3182433 - RNA, 16 nt, Human
aaagauaccuuaaaau

SEQ ID NO: 3182434 - RNA, 22 nt, Human
aaagauaccuuaaaauuugaaa

SEQ ID NO: 3182435 - RNA, 21 nt, Human
aaagauaccuuaaaauuugaa

SEQ ID NO: 3182436 - RNA, 20 nt, Human
aaagauaccuuaaaauuuga

SEQ ID NO: 3182437 - RNA, 19 nt, Human
aaagauaccuuaaaauuug

SEQ ID NO: 3182438 - RNA, 18 nt, Human
aaagauaccuuaaaauuu

SEQ ID NO: 3182439 - RNA, 17 nt, Human
aaagauaccuuaaaauu

SEQ ID NO: 3182440 - RNA, 15 nt, Human
aaagaaauguaaggg

SEQ ID NO: 3182441 - RNA, 22 nt, Human
aaagaaauuagggcucuaauuu

SEQ ID NO: 3182442 - RNA, 11 nt, Human
aaagagguuuu

SEQ ID NO: 3182443 - RNA, 13 nt, Human
aaagaaauaauuu

SEQ ID NO: 3182444 - RNA, 12 nt, Human
aaagaaauaauu

SEQ ID NO: 3182445 - RNA, 12 nt, Human
aaagaaaggaaa

SEQ ID NO: 3182446 - RNA, 17 nt, Human
aaagaaaggguucugua

SEQ ID NO: 3182447 - RNA, 16 nt, Human
aaagaaagaggaaaag

SEQ ID NO: 3182448 - RNA, 15 nt, Human
aaagaaagaggaaaa

SEQ ID NO: 3182449 - RNA, 17 nt, Human
aaagaugaaaauauuug

SEQ ID NO: 3182450 - RNA, 16 nt, Human
aaagaugaaaauauuu

SEQ ID NO: 3182451 - RNA, 13 nt, Human
aaagaugaaaaua

SEQ ID NO: 3182452 - RNA, 18 nt, Human
aaacacuguucucugccc

SEQ ID NO: 3182453 - RNA, 16 nt, Human
aaacacugaaaagaag

SEQ ID NO: 3182454 - RNA, 22 nt, Human
aaaauugcuuuugagagaacau

SEQ ID NO: 3182455 - RNA, 22 nt, Human
aaaauugccuuucuguguuuau

SEQ ID NO: 3182456 - RNA, 12 nt, Human
aaaauugccuuu

SEQ ID NO: 3182457 - RNA, 15 nt, Human
aaaauucaaagcaug

SEQ ID NO: 3182458 - RNA, 21 nt, Human
aaaauucaaagcauggacauu

SEQ ID NO: 3182459 - RNA, 22 nt, Human
aaaauucaaagcauggacauuu

SEQ ID NO: 3182460 - RNA, 13 nt, Human
aaaauucagugga

SEQ ID NO: 3182461 - RNA, 19 nt, Human
aaacacuguucucugcccu

SEQ ID NO: 3182462 - RNA, 22 nt, Human
aaacacuguucucugcccucca

SEQ ID NO: 3182463 - RNA, 22 nt, Human
aaacagacuuguauauucuauu

SEQ ID NO: 3182464 - RNA, 18 nt, Human
aaacacuucauugaaaau

SEQ ID NO: 3182465 - RNA, 23 nt, Human
aaacacuguuuguuccagaaucu

SEQ ID NO: 3182466 - RNA, 14 nt, Human
aaacagaugcucug

SEQ ID NO: 3182467 - RNA, 17 nt, Human
aaacagaguaaucuugu

SEQ ID NO: 3182468 - RNA, 18 nt, Human
aaacagaguaaucuuguu

SEQ ID NO: 3182469 - RNA, 16 nt, Human
aaacagaggaccagca

SEQ ID NO: 3182470 - RNA, 13 nt, Human
aaacagaggacca

SEQ ID NO: 3182471 - RNA, 17 nt, Human
aaacagauuuggaaaga

SEQ ID NO: 3182472 - RNA, 21 nt, Human
ggagggugacgggggugaacu

SEQ ID NO: 3182473 - RNA, 19 nt, Human
ggagggucuagaggccuga

SEQ ID NO: 3182474 - RNA, 22 nt, Human
ggagguaaggaauaccuguccc

SEQ ID NO: 3182475 - RNA, 22 nt, Human
ggaggugggauccuccaggugc

SEQ ID NO: 3182476 - RNA, 23 nt, Human
ggaggugggauccuccaggugca

SEQ ID NO: 3182477 - RNA, 14 nt, Human
ggagguggcauccc

SEQ ID NO: 3182478 - RNA, 13 nt, Human
ggagggggcaaag

SEQ ID NO: 3182479 - RNA, 13 nt, Human
ggaggggggaggu

SEQ ID NO: 3182480 - RNA, 14 nt, Human
ggaggggggaggug

SEQ ID NO: 3182481 - RNA, 16 nt, Human
ggaggcuccaggcagc

SEQ ID NO: 3182482 - RNA, 15 nt, Human
ggaggcuccaggcag

SEQ ID NO: 3182483 - RNA, 13 nt, Human
ggauuguccccga

SEQ ID NO: 3182484 - RNA, 14 nt, Human
ggaugaaaaaauaa

SEQ ID NO: 3182485 - RNA, 16 nt, Human
ggauuguccccgaccc

SEQ ID NO: 3182486 - RNA, 20 nt, Human
ggauuguccccgacccuugc

SEQ ID NO: 3182487 - RNA, 15 nt, Human
ggauuguaaaauggu

SEQ ID NO: 3182488 - RNA, 17 nt, Human
ggaucucuuaagacagc

SEQ ID NO: 3182489 - RNA, 18 nt, Human
ggaucucuuaagacagca

SEQ ID NO: 3182490 - RNA, 20 nt, Human
ggauccugcacugacucugg

SEQ ID NO: 3182491 - RNA, 16 nt, Human
ggaguucaucuugaau

SEQ ID NO: 3182492 - RNA, 20 nt, Human
ggaguucauucauauuacaa

SEQ ID NO: 3182493 - RNA, 19 nt, Human
ggaguucauucauauuaca

SEQ ID NO: 3182494 - RNA, 15 nt, Human
ggauccugagccaga

SEQ ID NO: 3182495 - RNA, 16 nt, Human
ggauccugagccagau

SEQ ID NO: 3182496 - RNA, 18 nt, Human
ggauccugagccagauuu

SEQ ID NO: 3182497 - RNA, 19 nt, Human
ggauccugagccagauuuc

SEQ ID NO: 3182498 - RNA, 20 nt, Human
ggauccugagccagauuuca

SEQ ID NO: 3182499 - RNA, 23 nt, Human
ggauccugagccagauuucacuc

SEQ ID NO: 3182500 - RNA, 11 nt, Human
ggaguguguaa

SEQ ID NO: 3182501 - RNA, 22 nt, Human
ggaguguguaauuuaaaauugu

SEQ ID NO: 3182502 - RNA, 17 nt, Human
ggagugggucuggagga

SEQ ID NO: 3182503 - RNA, 15 nt, Human
ggaguggccacagaa

SEQ ID NO: 3182504 - RNA, 16 nt, Human
ggaguggccacagaaa

SEQ ID NO: 3182505 - RNA, 12 nt, Human
ggagugggccca

SEQ ID NO: 3182506 - RNA, 22 nt, Human
ggagugggcccaaugcacuuug

SEQ ID NO: 3182507 - RNA, 14 nt, Human
ggcauuugcugaau

SEQ ID NO: 3182508 - RNA, 15 nt, Human
ggcauuugcaauaaa

SEQ ID NO: 3182509 - RNA, 19 nt, Human
ggcauuuguaaauauuaaa

SEQ ID NO: 3182510 - RNA, 22 nt, Human
ggcauuuguaaauauuaaacca

SEQ ID NO: 3182511 - RNA, 17 nt, Human
ggcaucaucaauaaaac

SEQ ID NO: 3182512 - RNA, 20 nt, Human
ggcaucaucaauaaaacagu

SEQ ID NO: 3182513 - RNA, 20 nt, Human
ggcaucgcaauguaagacuc

SEQ ID NO: 3182514 - RNA, 12 nt, Human
ggcaucauucca

SEQ ID NO: 3182515 - RNA, 15 nt, Human
ggcauccacuucaca

SEQ ID NO: 3182516 - RNA, 17 nt, Human
ggccagagacacaagcc

SEQ ID NO: 3182517 - RNA, 22 nt, Human
ggccaagaguggccccaccugg

SEQ ID NO: 3182518 - RNA, 21 nt, Human
ggccaagaguggccccaccug

SEQ ID NO: 3182519 - RNA, 20 nt, Human
ggccaagaguggccccaccu

SEQ ID NO: 3182520 - RNA, 18 nt, Human
ggccagagacacaagccu

SEQ ID NO: 3182521 - RNA, 19 nt, Human
ggccagagggagugacaga

SEQ ID NO: 3182522 - RNA, 17 nt, Human
ggccagagggagugaca

SEQ ID NO: 3182523 - RNA, 13 nt, Human
ggccaaaggaagc

SEQ ID NO: 3182524 - RNA, 14 nt, Human
ggccaaaggaagca

SEQ ID NO: 3182525 - RNA, 16 nt, Human
ggccaaaggaagcaca

SEQ ID NO: 3182526 - RNA, 19 nt, Human
ggccaaaggaagcacaugc

SEQ ID NO: 3182527 - RNA, 23 nt, Human
ggcauuuguuucuuucucugagg

SEQ ID NO: 3182528 - RNA, 17 nt, Human
ggcauuuguuucuuucu

SEQ ID NO: 3182529 - RNA, 19 nt, Human
ggccaagaguggccccacc

SEQ ID NO: 3182530 - RNA, 17 nt, Human
ggccaagaguggcccca

SEQ ID NO: 3182531 - RNA, 14 nt, Human
ggccaagaguggcc

SEQ ID NO: 3182532 - RNA, 23 nt, Human
ggccaagagguuuggcuccugcc

SEQ ID NO: 3182533 - RNA, 18 nt, Human
ggcaggaggaucacuuga

SEQ ID NO: 3182534 - RNA, 20 nt, Human
ggcaggggcccugcagcucu

SEQ ID NO: 3182535 - RNA, 19 nt, Human
ggcaggggcccugcagcuc

SEQ ID NO: 3182536 - RNA, 21 nt, Human
ggcaggggcccugcagcucuc

SEQ ID NO: 3182537 - RNA, 16 nt, Human
ggcaggggaggccauc

SEQ ID NO: 3182538 - RNA, 20 nt, Human
ggcaggggaggccaucugga

SEQ ID NO: 3182539 - RNA, 19 nt, Human
ggcaggggaggccaucugg

SEQ ID NO: 3182540 - RNA, 16 nt, Human
ggcagggcaggaccag

SEQ ID NO: 3182541 - RNA, 15 nt, Human
ggcagggcaggacca

SEQ ID NO: 3182542 - RNA, 23 nt, Human
ggcagggcacagggccuggccca

SEQ ID NO: 3182543 - RNA, 22 nt, Human
ggcagggcacagggccuggccc

SEQ ID NO: 3182544 - RNA, 19 nt, Human
ggcagggcacagggccugg

SEQ ID NO: 3182545 - RNA, 18 nt, Human
ggcagggcacagggccug

SEQ ID NO: 3182546 - RNA, 19 nt, Human
ggcagggagggccugggcc

SEQ ID NO: 3182547 - RNA, 20 nt, Human
ggcagggagggccugggccc

SEQ ID NO: 3182548 - RNA, 16 nt, Human
ggcagggacagggccg

SEQ ID NO: 3182549 - RNA, 17 nt, Human
ggcagggcacagggccu

SEQ ID NO: 3182550 - RNA, 16 nt, Human
ggcagggcacagggcc

SEQ ID NO: 3182551 - RNA, 15 nt, Human
ggcagggcacagggc

SEQ ID NO: 3182552 - RNA, 14 nt, Human
ggcagggcacaggg

SEQ ID NO: 3182553 - RNA, 17 nt, Human
ggcagggagggccuggg

SEQ ID NO: 3182554 - RNA, 18 nt, Human
ggcagggagggccugggc

SEQ ID NO: 3182555 - RNA, 10 nt, Human
ggcagggagg

SEQ ID NO: 3182556 - RNA, 20 nt, Human
ggcacugcuuccagugaggc

SEQ ID NO: 3182557 - RNA, 13 nt, Human
ggcagccaggcca

SEQ ID NO: 3182558 - RNA, 22 nt, Human
ggcagccccauucugccugccc

SEQ ID NO: 3182559 - RNA, 23 nt, Human
ggcagccucugggcccacauccg

SEQ ID NO: 3182560 - RNA, 16 nt, Human
ggcagccucuucaaaa

SEQ ID NO: 3182561 - RNA, 14 nt, Human
ggcagccugagagu

SEQ ID NO: 3182562 - RNA, 13 nt, Human
ggcagccugagag

SEQ ID NO: 3182563 - RNA, 23 nt, Human
ggcagccugccuugcccacuccu

SEQ ID NO: 3182564 - RNA, 19 nt, Human
ggcagccugccuugcccac

SEQ ID NO: 3182565 - RNA, 21 nt, Human
ggcagccccauucugccugcc

SEQ ID NO: 3182566 - RNA, 20 nt, Human
ggcagccccauucugccugc

SEQ ID NO: 3182567 - RNA, 16 nt, Human
ggcagccccauucugc

SEQ ID NO: 3182568 - RNA, 15 nt, Human
ggcaaaaaggcagga

SEQ ID NO: 3182569 - RNA, 13 nt, Human
ggcaaaaacaaag

SEQ ID NO: 3182570 - RNA, 11 nt, Human
ggcaaaaacaa

SEQ ID NO: 3182571 - RNA, 18 nt, Human
ggcacaccgggcacucag

SEQ ID NO: 3182572 - RNA, 16 nt, Human
ggcacaccuccuccca

SEQ ID NO: 3182573 - RNA, 22 nt, Human
ggcacaccuccucccacugccc

SEQ ID NO: 3182574 - RNA, 21 nt, Human
ggcacaccuccucccacugcc

SEQ ID NO: 3182575 - RNA, 20 nt, Human
ggcacaccuccucccacugc

SEQ ID NO: 3182576 - RNA, 17 nt, Human
ggcacaccuccucccac

SEQ ID NO: 3182577 - RNA, 16 nt, Human
ggcacugcuuccagug

SEQ ID NO: 3182578 - RNA, 11 nt, Human
ggcacugcucu

SEQ ID NO: 3182579 - RNA, 22 nt, Human
ggcacacgcugcucugccccag

SEQ ID NO: 3182580 - RNA, 21 nt, Human
ggcacacgcugcucugcccca

SEQ ID NO: 3182581 - RNA, 20 nt, Human
ggcacacgcugcucugcccc

SEQ ID NO: 3182582 - RNA, 18 nt, Human
ggcacacgcugcucugcc

SEQ ID NO: 3182583 - RNA, 21 nt, Human
aaaaaguuguaugaucugugc

SEQ ID NO: 3182584 - RNA, 23 nt, Human
aaaaaguuguaugaucugugccu

SEQ ID NO: 3182585 - RNA, 14 nt, Human
aaaaaggaggaaga

SEQ ID NO: 3182586 - RNA, 12 nt, Human
aaaaaggcagga

SEQ ID NO: 3182587 - RNA, 13 nt, Human
aaaaauacaaaaa

SEQ ID NO: 3182588 - RNA, 14 nt, Human
aaaaauaaaacugu

SEQ ID NO: 3182589 - RNA, 12 nt, Human
aaaaauaaaaua

SEQ ID NO: 3182590 - RNA, 17 nt, Human
aaaaauacaauuuuuau

SEQ ID NO: 3182591 - RNA, 22 nt, Human
ggcuggguucuacccaggugcu

SEQ ID NO: 3182592 - RNA, 14 nt, Human
ggcuggguuggagg

SEQ ID NO: 3182593 - RNA, 11 nt, Human
aaaaaacucuu

SEQ ID NO: 3182594 - RNA, 9 nt, Human
aaaaaagaa

SEQ ID NO: 3182595 - RNA, 14 nt, Human
aaaaagcaguucuu

SEQ ID NO: 3182596 - RNA, 22 nt, Human
aaaaaacugcugacuguuuucu

SEQ ID NO: 3182597 - RNA, 13 nt, Human
aaaaaaaugcuga

SEQ ID NO: 3182598 - RNA, 12 nt, Human
aaaaaaaguugu

SEQ ID NO: 3182599 - RNA, 12 nt, Human
aaaaaaauacaa

SEQ ID NO: 3182600 - RNA, 12 nt, Human
aaaaaaacucuu

SEQ ID NO: 3182601 - RNA, 13 nt, Human
aaaaaaacauucu

SEQ ID NO: 3182602 - RNA, 13 nt, Human
aaaaaaacacaaa

SEQ ID NO: 3182603 - RNA, 10 nt, Human
aaaaaaagaa

SEQ ID NO: 3182604 - RNA, 9 nt, Human
aaaaaaaga

SEQ ID NO: 3182605 - RNA, 11 nt, Human
aaaaaaagaaa

SEQ ID NO: 3182606 - RNA, 14 nt, Human
ggcuggccuggccc

SEQ ID NO: 3182607 - RNA, 15 nt, Human
ggcuggccuggcccc

SEQ ID NO: 3182608 - RNA, 13 nt, Human
ggcuggccuggcc

SEQ ID NO: 3182609 - RNA, 17 nt, Human
ggcuggcccugcccugg

SEQ ID NO: 3182610 - RNA, 20 nt, Human
ggcucuugaacugagcuugg

SEQ ID NO: 3182611 - RNA, 19 nt, Human
ggcucuugaacugagcuug

SEQ ID NO: 3182612 - RNA, 18 nt, Human
ggcucuugaacugagcuu

SEQ ID NO: 3182613 - RNA, 23 nt, Human
ggcucuucuccuuucacaaccuu

SEQ ID NO: 3182614 - RNA, 14 nt, Human
ggcucuacacauau

SEQ ID NO: 3182615 - RNA, 12 nt, Human
ggcucuacacau

SEQ ID NO: 3182616 - RNA, 13 nt, Human
ggcucuaauuucc

SEQ ID NO: 3182617 - RNA, 14 nt, Human
ggcucuuccaggcu

SEQ ID NO: 3182618 - RNA, 15 nt, Human
ggcucuuccaggcug

SEQ ID NO: 3182619 - RNA, 17 nt, Human
ggcucuuccaggcuggg

SEQ ID NO: 3182620 - RNA, 18 nt, Human
ggcucuuccaggcuggga

SEQ ID NO: 3182621 - RNA, 21 nt, Human
ggcucccgccuccaaccccuc

SEQ ID NO: 3182622 - RNA, 15 nt, Human
ggcucccgccuccaa

SEQ ID NO: 3182623 - RNA, 20 nt, Human
ggcucccgccuccaaccccu

SEQ ID NO: 3182624 - RNA, 17 nt, Human
ggcucccgccuccaacc

SEQ ID NO: 3182625 - RNA, 19 nt, Human
ggcucccucacucucagga

SEQ ID NO: 3182626 - RNA, 18 nt, Human
ggcucccucacucucagg

SEQ ID NO: 3182627 - RNA, 17 nt, Human
ggcucccucacucucag

SEQ ID NO: 3182628 - RNA, 16 nt, Human
ggcucccucacucuca

SEQ ID NO: 3182629 - RNA, 15 nt, Human
ggcucccucacucuc

SEQ ID NO: 3182630 - RNA, 22 nt, Human
ggcucccguguaucuggacacu

SEQ ID NO: 3182631 - RNA, 13 nt, Human
ggcucccuuccca

SEQ ID NO: 3182632 - RNA, 16 nt, Human
ggcugacugggccagg

SEQ ID NO: 3182633 - RNA, 14 nt, Human
ggcugacugggcca

SEQ ID NO: 3182634 - RNA, 10 nt, Human
ggcugcccuu

SEQ ID NO: 3182635 - RNA, 11 nt, Human
ggcugcccuuu

SEQ ID NO: 3182636 - RNA, 22 nt, Human
ggcugcccuggugcugccacac

SEQ ID NO: 3182637 - RNA, 14 nt, Human
ggcugcccuuucug

SEQ ID NO: 3182638 - RNA, 18 nt, Human
ggcugcccuuucugggca

SEQ ID NO: 3182639 - RNA, 15 nt, Human
ggcucacugcagccu

SEQ ID NO: 3182640 - RNA, 14 nt, Human
ggcucacugcagcc

SEQ ID NO: 3182641 - RNA, 13 nt, Human
ggcucacugcagc

SEQ ID NO: 3182642 - RNA, 13 nt, Human
ggcuccccugggg

SEQ ID NO: 3182643 - RNA, 18 nt, Human
ggcuaaaauguuuucagc

SEQ ID NO: 3182644 - RNA, 21 nt, Human
ggcuaaaaaagcugaaucaga

SEQ ID NO: 3182645 - RNA, 22 nt, Human
ggcuaaaaaagcugaaucagac

SEQ ID NO: 3182646 - RNA, 14 nt, Human
ggcgugagaccugc

SEQ ID NO: 3182647 - RNA, 16 nt, Human
ggcgugagaccugccc

SEQ ID NO: 3182648 - RNA, 17 nt, Human
ggcgugagaccugcccc

SEQ ID NO: 3182649 - RNA, 18 nt, Human
ggcgugagaccugccccu

SEQ ID NO: 3182650 - RNA, 18 nt, Human
ggccuucggccuccaucc

SEQ ID NO: 3182651 - RNA, 16 nt, Human
ggccuucggccuccau

SEQ ID NO: 3182652 - RNA, 18 nt, Human
ggcgaggacgacuucugc

SEQ ID NO: 3182653 - RNA, 15 nt, Human
ggcuacuugcuuuga

SEQ ID NO: 3182654 - RNA, 17 nt, Human
ggcuacccgugagcccu

SEQ ID NO: 3182655 - RNA, 22 nt, Human
ggcuacaccuuagccugcccuc

SEQ ID NO: 3182656 - RNA, 23 nt, Human
ggcuacaccuuagccugcccucc

SEQ ID NO: 3182657 - RNA, 16 nt, Human
ggcuaauguacugcau

SEQ ID NO: 3182658 - RNA, 20 nt, Human
ggcuaagugauccucccacc

SEQ ID NO: 3182659 - RNA, 18 nt, Human
ggcuaauuuuuguuuugu

SEQ ID NO: 3182660 - RNA, 16 nt, Human
ggccugcaagggagug

SEQ ID NO: 3182661 - RNA, 15 nt, Human
ggccuggccagaugc

SEQ ID NO: 3182662 - RNA, 12 nt, Human
ggccuggccaga

SEQ ID NO: 3182663 - RNA, 15 nt, Human
ggccuggcagccgug

SEQ ID NO: 3182664 - RNA, 14 nt, Human
ggccuggcagccgu

SEQ ID NO: 3182665 - RNA, 17 nt, Human
ggccuucagggagugag

SEQ ID NO: 3182666 - RNA, 11 nt, Human
ggccugccugu

SEQ ID NO: 3182667 - RNA, 23 nt, Human
ggcccguggggccggggcuucug

SEQ ID NO: 3182668 - RNA, 16 nt, Human
ggccagaugcaccagc

SEQ ID NO: 3182669 - RNA, 15 nt, Human
ggccagaugcaccag

SEQ ID NO: 3182670 - RNA, 18 nt, Human
ggccucccaacucacccc

SEQ ID NO: 3182671 - RNA, 19 nt, Human
ggccucccaacucacccca

SEQ ID NO: 3182672 - RNA, 17 nt, Human
ggccucccaacucaccc

SEQ ID NO: 3182673 - RNA, 13 nt, Human
ggccucagugcca

SEQ ID NO: 3182674 - RNA, 20 nt, Human
ggccucccaacucaccccag

SEQ ID NO: 3182675 - RNA, 22 nt, Human
ggccucccaacucaccccagcc

SEQ ID NO: 3182676 - RNA, 23 nt, Human
ggccucccaacucaccccagccc

SEQ ID NO: 3182677 - RNA, 16 nt, Human
ggccgcgggggcaggg

SEQ ID NO: 3182678 - RNA, 23 nt, Human
ggccgccggcaauaaaagcccag

SEQ ID NO: 3182679 - RNA, 22 nt, Human
ggccgccggcaauaaaagccca

SEQ ID NO: 3182680 - RNA, 20 nt, Human
gguuccuuccucugagccuu

SEQ ID NO: 3182681 - RNA, 16 nt, Human
gguuccuucugggcau

SEQ ID NO: 3182682 - RNA, 22 nt, Human
gguucccuuuuuuggcugcuga

SEQ ID NO: 3182683 - RNA, 23 nt, Human
gguucccuuugacgccaucccag

SEQ ID NO: 3182684 - RNA, 22 nt, Human
gguucccuuugacgccauccca

SEQ ID NO: 3182685 - RNA, 16 nt, Human
gguuccagccugccac

SEQ ID NO: 3182686 - RNA, 15 nt, Human
gguuccagccugcca

SEQ ID NO: 3182687 - RNA, 14 nt, Human
gguuccagccugcc

SEQ ID NO: 3182688 - RNA, 13 nt, Human
gguguuugaaaau

SEQ ID NO: 3182689 - RNA, 14 nt, Human
gguguuugaaaaua

SEQ ID NO: 3182690 - RNA, 17 nt, Human
gguucccauuugcuccu

SEQ ID NO: 3182691 - RNA, 20 nt, Human
gguguuugaaaauaguuuau

SEQ ID NO: 3182692 - RNA, 17 nt, Human
gguguuuccuggcacug

SEQ ID NO: 3182693 - RNA, 19 nt, Human
gguguuuccuggcacugcu

SEQ ID NO: 3182694 - RNA, 18 nt, Human
gguggggggcuucauaca

SEQ ID NO: 3182695 - RNA, 16 nt, Human
gguggggggcuucaua

SEQ ID NO: 3182696 - RNA, 13 nt, Human
ggugggggccucg

SEQ ID NO: 3182697 - RNA, 22 nt, Human
ggugggcuugucauagccagug

SEQ ID NO: 3182698 - RNA, 19 nt, Human
ggugggggggcagagcccu

SEQ ID NO: 3182699 - RNA, 15 nt, Human
ggugggggggcagag

SEQ ID NO: 3182700 - RNA, 12 nt, Human
gguguggagaag

SEQ ID NO: 3182701 - RNA, 14 nt, Human
gguguggagaagcg

SEQ ID NO: 3182702 - RNA, 23 nt, Human
gguguggagaagcggcuggcagc

SEQ ID NO: 3182703 - RNA, 11 nt, Human
gguguggggga

SEQ ID NO: 3182704 - RNA, 13 nt, Human
ggugugggggaag

SEQ ID NO: 3182705 - RNA, 15 nt, Human
ggugugggggccccg

SEQ ID NO: 3182706 - RNA, 23 nt, Human
ggugugggggccccgucucaggu

SEQ ID NO: 3182707 - RNA, 22 nt, Human
gguuuguuuagaagaagugugu

SEQ ID NO: 3182708 - RNA, 20 nt, Human
gguuuuaaaauacuguagau

SEQ ID NO: 3182709 - RNA, 12 nt, Human
gguuuuaaaaua

SEQ ID NO: 3182710 - RNA, 19 nt, Human
gguuugguuuuguuuuuug

SEQ ID NO: 3182711 - RNA, 16 nt, Human
gguuuguggggggagg

SEQ ID NO: 3182712 - RNA, 17 nt, Human
gguuuguggggggaggc

SEQ ID NO: 3182713 - RNA, 14 nt, Human
gguuuggugcuuuu

SEQ ID NO: 3182714 - RNA, 19 nt, Human
gguuuuauuguuuaaaauc

SEQ ID NO: 3182715 - RNA, 11 nt, Human
gguuuuaugau

SEQ ID NO: 3182716 - RNA, 17 nt, Human
gguuuuauuuauuucuu

SEQ ID NO: 3182717 - RNA, 14 nt, Human
gguuugggaccccu

SEQ ID NO: 3182718 - RNA, 22 nt, Human
gguuucuaaagcugccagccga

SEQ ID NO: 3182719 - RNA, 16 nt, Human
gguuucuaaagcugcc

SEQ ID NO: 3182720 - RNA, 16 nt, Human
gguuuccugcccuggg

SEQ ID NO: 3182721 - RNA, 19 nt, Human
gguuuccugcccugggagg

SEQ ID NO: 3182722 - RNA, 18 nt, Human
gguuuccaacaauucagc

SEQ ID NO: 3182723 - RNA, 13 nt, Human
gguuuccugcccu

SEQ ID NO: 3182724 - RNA, 15 nt, Human
gguuuccugcccugg

SEQ ID NO: 3182725 - RNA, 12 nt, Human
gguuuccugccc

SEQ ID NO: 3182726 - RNA, 20 nt, Human
gguuuccaacaauucagcau

SEQ ID NO: 3182727 - RNA, 15 nt, Human
aaaguagaacuuugu

SEQ ID NO: 3182728 - RNA, 18 nt, Human
aaaguaauauuuauuaaa

SEQ ID NO: 3182729 - RNA, 15 nt, Human
aaaguaauauuuauu

SEQ ID NO: 3182730 - RNA, 21 nt, Human
aaaguaaggugcuuggaguuu

SEQ ID NO: 3182731 - RNA, 22 nt, Human
aaaguagaagucuuagauguau

SEQ ID NO: 3182732 - RNA, 20 nt, Human
aaaguagaagucuuagaugu

SEQ ID NO: 3182733 - RNA, 23 nt, Human
aaaguagaacuuuguauaguuau

SEQ ID NO: 3182734 - RNA, 16 nt, Human
aaaguagaacuuugua

SEQ ID NO: 3182735 - RNA, 17 nt, Human
aaaguagaacuuuguau

SEQ ID NO: 3182736 - RNA, 18 nt, Human
aaaguagaacuuuguaua

SEQ ID NO: 3182737 - RNA, 21 nt, Human
aaaguagaacuuuguauaguu

SEQ ID NO: 3182738 - RNA, 14 nt, Human
aaaguaugcauuau

SEQ ID NO: 3182739 - RNA, 18 nt, Human
aaaguaugcauuauuaaa

SEQ ID NO: 3182740 - RNA, 19 nt, Human
aaaguaugcauuauuaaau

SEQ ID NO: 3182741 - RNA, 20 nt, Human
aaaguaugcauuauuaaauu

SEQ ID NO: 3182742 - RNA, 21 nt, Human
aaagugggcccucauacacaa

SEQ ID NO: 3182743 - RNA, 19 nt, Human
aaaguaaaagcagcauaaa

SEQ ID NO: 3182744 - RNA, 14 nt, Human
aaaguaaaaugucu

SEQ ID NO: 3182745 - RNA, 15 nt, Human
aaaguaaaagcagca

SEQ ID NO: 3182746 - RNA, 12 nt, Human
aaaguaaaagag

SEQ ID NO: 3182747 - RNA, 16 nt, Human
aaagguuuauuuuucu

SEQ ID NO: 3182748 - RNA, 21 nt, Human
aaagguuuauuuuucuguuac

SEQ ID NO: 3182749 - RNA, 12 nt, Human
gguggcuggguu

SEQ ID NO: 3182750 - RNA, 18 nt, Human
gguggcuggguuggaggg

SEQ ID NO: 3182751 - RNA, 17 nt, Human
ggugggacacccuguga

SEQ ID NO: 3182752 - RNA, 13 nt, Human
ggugggacacccu

SEQ ID NO: 3182753 - RNA, 16 nt, Human
ggugggacacccugug

SEQ ID NO: 3182754 - RNA, 19 nt, Human
gguggggaccucaggccug

SEQ ID NO: 3182755 - RNA, 13 nt, Human
aaaggugugcugu

SEQ ID NO: 3182756 - RNA, 16 nt, Human
aaagguucuuugugua

SEQ ID NO: 3182757 - RNA, 16 nt, Human
aaagguugaauaauau

SEQ ID NO: 3182758 - RNA, 17 nt, Human
aaagguugaauaauaua

SEQ ID NO: 3182759 - RNA, 19 nt, Human
aaagguugaauaauauaug

SEQ ID NO: 3182760 - RNA, 15 nt, Human
aaaggugauugucac

SEQ ID NO: 3182761 - RNA, 17 nt, Human
aaaggugauaaaaucau

SEQ ID NO: 3182762 - RNA, 14 nt, Human
aaaggugauaaaau

SEQ ID NO: 3182763 - RNA, 18 nt, Human
aaaggugauaaaaucaua

SEQ ID NO: 3182764 - RNA, 13 nt, Human
aaaggugauaaaa

SEQ ID NO: 3182765 - RNA, 20 nt, Human
aaagggauggcaagaugugg

SEQ ID NO: 3182766 - RNA, 17 nt, Human
aaagcuguucuuccugg

SEQ ID NO: 3182767 - RNA, 16 nt, Human
aaagcuguucuuccug

SEQ ID NO: 3182768 - RNA, 14 nt, Human
aaagcuguucuucc

SEQ ID NO: 3182769 - RNA, 19 nt, Human
aaagggcccaaugaauuau

SEQ ID NO: 3182770 - RNA, 20 nt, Human
aaagggcccagagagggugg

SEQ ID NO: 3182771 - RNA, 14 nt, Human
aaagcuguguuuau

SEQ ID NO: 3182772 - RNA, 13 nt, Human
aaagcuguucuuc

SEQ ID NO: 3182773 - RNA, 12 nt, Human
aaagcugccagc

SEQ ID NO: 3182774 - RNA, 13 nt, Human
aaagcugccagcc

SEQ ID NO: 3182775 - RNA, 23 nt, Human
aaagcugaacacauuucuuuuua

SEQ ID NO: 3182776 - RNA, 19 nt, Human
aaagcuagaacacugccaa

SEQ ID NO: 3182777 - RNA, 15 nt, Human
aaagcugaaaacugc

SEQ ID NO: 3182778 - RNA, 13 nt, Human
aaagcagugcaug

SEQ ID NO: 3182779 - RNA, 16 nt, Human
aaagcuaggccuggcc

SEQ ID NO: 3182780 - RNA, 14 nt, Human
aaagcuaggccugg

SEQ ID NO: 3182781 - RNA, 16 nt, Human
aaagcagaacagugau

SEQ ID NO: 3182782 - RNA, 14 nt, Human
gguggagaaaggag

SEQ ID NO: 3182783 - RNA, 14 nt, Human
gguggcaccagcag

SEQ ID NO: 3182784 - RNA, 20 nt, Human
gguggcaccagcagccugga

SEQ ID NO: 3182785 - RNA, 12 nt, Human
aaacuuuaugcu

SEQ ID NO: 3182786 - RNA, 19 nt, Human
aaacuuuaugcuaagugaa

SEQ ID NO: 3182787 - RNA, 21 nt, Human
ggugcugccauccagguucag

SEQ ID NO: 3182788 - RNA, 22 nt, Human
ggugcugcuaauucuuugcaaa

SEQ ID NO: 3182789 - RNA, 20 nt, Human
ggugcugcuaauucuuugca

SEQ ID NO: 3182790 - RNA, 12 nt, Human
guaauauuuaca

SEQ ID NO: 3182791 - RNA, 17 nt, Human
guaauauuuacaaugua

SEQ ID NO: 3182792 - RNA, 18 nt, Human
guaauauuuacaauguau

SEQ ID NO: 3182793 - RNA, 19 nt, Human
guaauauuuacaauguauu

SEQ ID NO: 3182794 - RNA, 21 nt, Human
guaauauuuacaauguauuaa

SEQ ID NO: 3182795 - RNA, 23 nt, Human
guaauauuuacaauguauuaagc

SEQ ID NO: 3182796 - RNA, 13 nt, Human
guaauauuuauua

SEQ ID NO: 3182797 - RNA, 14 nt, Human
guaauauuuauuaa

SEQ ID NO: 3182798 - RNA, 15 nt, Human
guaauauuuauuaaa

SEQ ID NO: 3182799 - RNA, 16 nt, Human
guaauauuuauuaaau

SEQ ID NO: 3182800 - RNA, 17 nt, Human
guaauauuuauuaaauu

SEQ ID NO: 3182801 - RNA, 18 nt, Human
guaauauuuauuaaauuu

SEQ ID NO: 3182802 - RNA, 21 nt, Human
guaauauuuauuaaauuuuuu

SEQ ID NO: 3182803 - RNA, 19 nt, Human
guaauaagggaaaaaucaa

SEQ ID NO: 3182804 - RNA, 18 nt, Human
guaauaagggaaaaauca

SEQ ID NO: 3182805 - RNA, 16 nt, Human
guaauaauaaagaaua

SEQ ID NO: 3182806 - RNA, 12 nt, Human
guaauaauaaag

SEQ ID NO: 3182807 - RNA, 18 nt, Human
guaaguuaauguauauaa

SEQ ID NO: 3182808 - RNA, 14 nt, Human
guaacuauguuuua

SEQ ID NO: 3182809 - RNA, 18 nt, Human
guaacgugugcuguguuu

SEQ ID NO: 3182810 - RNA, 22 nt, Human
guaacuaaaauaauuuuguaau

SEQ ID NO: 3182811 - RNA, 20 nt, Human
guaacuaaaauaauuuugua

SEQ ID NO: 3182812 - RNA, 15 nt, Human
guaacuaaaauaauu

SEQ ID NO: 3182813 - RNA, 13 nt, Human
guaacuaaaauaa

SEQ ID NO: 3182814 - RNA, 22 nt, Human
guacaaaaaauucagugaugug

SEQ ID NO: 3182815 - RNA, 22 nt, Human
guacaaccuguucugcuuuccu

SEQ ID NO: 3182816 - RNA, 22 nt, Human
guacaaguaguucuguauuuga

SEQ ID NO: 3182817 - RNA, 17 nt, Human
guacaaguaguucugua

SEQ ID NO: 3182818 - RNA, 21 nt, Human
guacaaguaguucuguauuug

SEQ ID NO: 3182819 - RNA, 15 nt, Human
guacaagaucucagg

SEQ ID NO: 3182820 - RNA, 13 nt, Human
guacaaguaguuc

SEQ ID NO: 3182821 - RNA, 14 nt, Human
guacaaguaguucu

SEQ ID NO: 3182822 - RNA, 15 nt, Human
guacaaguaguucug

SEQ ID NO: 3182823 - RNA, 16 nt, Human
guacaaguaguucugu

SEQ ID NO: 3182824 - RNA, 23 nt, Human
guaauccuagcacuuugggaggc

SEQ ID NO: 3182825 - RNA, 15 nt, Human
guaaucgaccugccu

SEQ ID NO: 3182826 - RNA, 12 nt, Human
guaaucauauua

SEQ ID NO: 3182827 - RNA, 15 nt, Human
guaaucauauuagac

SEQ ID NO: 3182828 - RNA, 11 nt, Human
guaaacacugu

SEQ ID NO: 3182829 - RNA, 15 nt, Human
guaaacacucagcug

SEQ ID NO: 3182830 - RNA, 13 nt, Human
guaaaauuuuagg

SEQ ID NO: 3182831 - RNA, 12 nt, Human
aaauaauuauuu

SEQ ID NO: 3182832 - RNA, 20 nt, Human
aaauaauuauuuauuacaua

SEQ ID NO: 3182833 - RNA, 13 nt, Human
aaauaauucuuuu

SEQ ID NO: 3182834 - RNA, 14 nt, Human
aaauaauucuuuuu

SEQ ID NO: 3182835 - RNA, 18 nt, Human
aaauaauucuuuuuuauu

SEQ ID NO: 3182836 - RNA, 19 nt, Human
aaauaauucuuuuuuauua

SEQ ID NO: 3182837 - RNA, 20 nt, Human
aaaguguucuguuacaaaau

SEQ ID NO: 3182838 - RNA, 22 nt, Human
aaaguuaacaggcaaacauuuu

SEQ ID NO: 3182839 - RNA, 12 nt, Human
aaaguuaacauu

SEQ ID NO: 3182840 - RNA, 15 nt, Human
aaaguuaacauuaau

SEQ ID NO: 3182841 - RNA, 20 nt, Human
aaaguuaaacgugaugugcu

SEQ ID NO: 3182842 - RNA, 12 nt, Human
aaaguuaaaagu

SEQ ID NO: 3182843 - RNA, 16 nt, Human
guaacaagccacccca

SEQ ID NO: 3182844 - RNA, 19 nt, Human
guaacaggaaaauuuuaaa

SEQ ID NO: 3182845 - RNA, 15 nt, Human
guaacauuuuucaau

SEQ ID NO: 3182846 - RNA, 17 nt, Human
guaacauucuauuucaa

SEQ ID NO: 3182847 - RNA, 15 nt, Human
guaaagggcaaauaa

SEQ ID NO: 3182848 - RNA, 18 nt, Human
guaaagggcaaauaauga

SEQ ID NO: 3182849 - RNA, 23 nt, Human
guaaagguuuauuuuucuguuac

SEQ ID NO: 3182850 - RNA, 23 nt, Human
aaaucagccugcuccagcuguuc

SEQ ID NO: 3182851 - RNA, 19 nt, Human
aaaucagccugcuccagcu

SEQ ID NO: 3182852 - RNA, 21 nt, Human
aaaucagccugcuccagcugu

SEQ ID NO: 3182853 - RNA, 21 nt, Human
aaauauugaaaggcaaacauu

SEQ ID NO: 3182854 - RNA, 21 nt, Human
aaauauugagcagaauucauu

SEQ ID NO: 3182855 - RNA, 15 nt, Human
aaauauucucuauuu

SEQ ID NO: 3182856 - RNA, 23 nt, Human
aaauauucuucuauaaaugaauc

SEQ ID NO: 3182857 - RNA, 20 nt, Human
aaauauuccugcauuuguga

SEQ ID NO: 3182858 - RNA, 22 nt, Human
aaauauuaaaaagucuuuuaaa

SEQ ID NO: 3182859 - RNA, 13 nt, Human
aaauauuaaaaga

SEQ ID NO: 3182860 - RNA, 18 nt, Human
aaauauuaaaagaaaggg

SEQ ID NO: 3182861 - RNA, 15 nt, Human
aaauauuccugcauu

SEQ ID NO: 3182862 - RNA, 12 nt, Human
aaauauuaaaaa

SEQ ID NO: 3182863 - RNA, 17 nt, Human
aaauauuaaaaagucuu

SEQ ID NO: 3182864 - RNA, 14 nt, Human
aaauauuaaaaagu

SEQ ID NO: 3182865 - RNA, 20 nt, Human
aaauaugugaaggaccuuca

SEQ ID NO: 3182866 - RNA, 15 nt, Human
aaauaugugaaggac

SEQ ID NO: 3182867 - RNA, 12 nt, Human
aaauaugugaag

SEQ ID NO: 3182868 - RNA, 18 nt, Human
aaauaugucccagaaaug

SEQ ID NO: 3182869 - RNA, 19 nt, Human
aaauauggucuuuugguua

SEQ ID NO: 3182870 - RNA, 13 nt, Human
aaauauguauuaa

SEQ ID NO: 3182871 - RNA, 12 nt, Human
aaauauguauua

SEQ ID NO: 3182872 - RNA, 21 nt, Human
aaauaugcacuaagucucuuu

SEQ ID NO: 3182873 - RNA, 19 nt, Human
aaauaugcacuaagucucu

SEQ ID NO: 3182874 - RNA, 16 nt, Human
aaauaugcacuaaguc

SEQ ID NO: 3182875 - RNA, 13 nt, Human
aaauaugcacuaa

SEQ ID NO: 3182876 - RNA, 17 nt, Human
aaauaugcaaagcacug

SEQ ID NO: 3182877 - RNA, 16 nt, Human
aaauaugcaaagcacu

SEQ ID NO: 3182878 - RNA, 15 nt, Human
aaauaugcaaagcac

SEQ ID NO: 3182879 - RNA, 13 nt, Human
aaauaugcaaagc

SEQ ID NO: 3182880 - RNA, 15 nt, Human
aaauaucugugaaau

SEQ ID NO: 3182881 - RNA, 21 nt, Human
aaauaucugugaaauaucauc

SEQ ID NO: 3182882 - RNA, 21 nt, Human
aaauaucuaguaauauauuua

SEQ ID NO: 3182883 - RNA, 23 nt, Human
aaauaucuguaagaguguuuaua

SEQ ID NO: 3182884 - RNA, 23 nt, Human
aaauaucugaaaauguaugugua

SEQ ID NO: 3182885 - RNA, 22 nt, Human
aaauaucugaaaauguaugugu

SEQ ID NO: 3182886 - RNA, 21 nt, Human
aaauaucugaaaauguaugug

SEQ ID NO: 3182887 - RNA, 19 nt, Human
aaauaucugaaaauguaug

SEQ ID NO: 3182888 - RNA, 18 nt, Human
aaauaucugaaaauguau

SEQ ID NO: 3182889 - RNA, 17 nt, Human
aaauaucugaaaaugua

SEQ ID NO: 3182890 - RNA, 14 nt, Human
aaauaucugaaaau

SEQ ID NO: 3182891 - RNA, 12 nt, Human
aaauaucugaaa

SEQ ID NO: 3182892 - RNA, 18 nt, Human
aaauauauuacuuaacug

SEQ ID NO: 3182893 - RNA, 19 nt, Human
aaauauauuacuuaacugu

SEQ ID NO: 3182894 - RNA, 20 nt, Human
aaauauauggucuaauguuu

SEQ ID NO: 3182895 - RNA, 22 nt, Human
aaauauauggucuaauguuuaa

SEQ ID NO: 3182896 - RNA, 21 nt, Human
aaauauauggucuaauguuua

SEQ ID NO: 3182897 - RNA, 12 nt, Human
aaauaucaaauu

SEQ ID NO: 3182898 - RNA, 13 nt, Human
aaauaucaaauua

SEQ ID NO: 3182899 - RNA, 16 nt, Human
aaauaucaaauuaauu

SEQ ID NO: 3182900 - RNA, 20 nt, Human
aaauaucaaauuaauugugu

SEQ ID NO: 3182901 - RNA, 23 nt, Human
aaauaucaaauuaauugugugaa

SEQ ID NO: 3182902 - RNA, 21 nt, Human
aaauaucauauaaauauugag

SEQ ID NO: 3182903 - RNA, 20 nt, Human
aaauaucuaguaauauauuu

SEQ ID NO: 3182904 - RNA, 19 nt, Human
aaauaucuaguaauauauu

SEQ ID NO: 3182905 - RNA, 16 nt, Human
aaauaucucuauuuaa

SEQ ID NO: 3182906 - RNA, 17 nt, Human
aaauaucucuauuuaau

SEQ ID NO: 3182907 - RNA, 15 nt, Human
aaauaucucugaguu

SEQ ID NO: 3182908 - RNA, 21 nt, Human
aaauaccaugccauuuaaagc

SEQ ID NO: 3182909 - RNA, 22 nt, Human
guacaaugugacuuugaaaaua

SEQ ID NO: 3182910 - RNA, 16 nt, Human
guacacacacauacac

SEQ ID NO: 3182911 - RNA, 21 nt, Human
guacaaugacuuuauugcauc

SEQ ID NO: 3182912 - RNA, 20 nt, Human
guacaaugacuuuauugcau

SEQ ID NO: 3182913 - RNA, 17 nt, Human
aaauaccauuauuauca

SEQ ID NO: 3182914 - RNA, 15 nt, Human
aaauaccauuauuau

SEQ ID NO: 3182915 - RNA, 18 nt, Human
gguaacuagggaagauaa

SEQ ID NO: 3182916 - RNA, 12 nt, Human
gguaaaaugaag

SEQ ID NO: 3182917 - RNA, 14 nt, Human
gguaaaaugaagaa

SEQ ID NO: 3182918 - RNA, 20 nt, Human
gguaaaaugaagaauuuaaa

SEQ ID NO: 3182919 - RNA, 13 nt, Human
gguaaaaugaaga

SEQ ID NO: 3182920 - RNA, 13 nt, Human
gguaaaauuuugu

SEQ ID NO: 3182921 - RNA, 13 nt, Human
gggugucccagac

SEQ ID NO: 3182922 - RNA, 17 nt, Human
gggugucccagaccccg

SEQ ID NO: 3182923 - RNA, 12 nt, Human
ggguggugaccu

SEQ ID NO: 3182924 - RNA, 15 nt, Human
gggugguggugauag

SEQ ID NO: 3182925 - RNA, 20 nt, Human
ggguuuuauuguuuaaaauc

SEQ ID NO: 3182926 - RNA, 20 nt, Human
ggguuuugccauguuggcca

SEQ ID NO: 3182927 - RNA, 23 nt, Human
ggguuuugccauguuggccaggc

SEQ ID NO: 3182928 - RNA, 12 nt, Human
ggguuuucucuc

SEQ ID NO: 3182929 - RNA, 10 nt, Human
ggguuuuucu

SEQ ID NO: 3182930 - RNA, 20 nt, Human
aaacuuagcaucuaauuuca

SEQ ID NO: 3182931 - RNA, 15 nt, Human
aaacuuaguuuguga

SEQ ID NO: 3182932 - RNA, 16 nt, Human
aaacuuaguuugugaa

SEQ ID NO: 3182933 - RNA, 15 nt, Human
gggugggacacccug

SEQ ID NO: 3182934 - RNA, 18 nt, Human
gggugggacacccuguga

SEQ ID NO: 3182935 - RNA, 14 nt, Human
ggguggccucccaa

SEQ ID NO: 3182936 - RNA, 18 nt, Human
ggguggcgcuagaggcca

SEQ ID NO: 3182937 - RNA, 19 nt, Human
aaacuguuaauaguucagg

SEQ ID NO: 3182938 - RNA, 20 nt, Human
aaacuguuuuagaccuauaa

SEQ ID NO: 3182939 - RNA, 20 nt, Human
aaacguggcugcuucaagga

SEQ ID NO: 3182940 - RNA, 16 nt, Human
aaacguguauguuuuu

SEQ ID NO: 3182941 - RNA, 20 nt, Human
aaacguguauguuuuucagu

SEQ ID NO: 3182942 - RNA, 18 nt, Human
aaacguguauguuuuuca

SEQ ID NO: 3182943 - RNA, 21 nt, Human
aaacguggcugcuucaaggau

SEQ ID NO: 3182944 - RNA, 18 nt, Human
gguaggaacugcugggcu

SEQ ID NO: 3182945 - RNA, 21 nt, Human
gguaggaauauuauauuugga

SEQ ID NO: 3182946 - RNA, 14 nt, Human
gguagggcucugac

SEQ ID NO: 3182947 - RNA, 16 nt, Human
gguaggaacugcuggg

SEQ ID NO: 3182948 - RNA, 20 nt, Human
gguaaggaauaccugucccc

SEQ ID NO: 3182949 - RNA, 12 nt, Human
gguaagaaaaag

SEQ ID NO: 3182950 - RNA, 15 nt, Human
gguaagauuguuauu

SEQ ID NO: 3182951 - RNA, 18 nt, Human
gguaagauuguuauuaaa

SEQ ID NO: 3182952 - RNA, 21 nt, Human
gguaagaaaaagcaaaaggca

SEQ ID NO: 3182953 - RNA, 14 nt, Human
gguaucaggugcug

SEQ ID NO: 3182954 - RNA, 14 nt, Human
gguaucaaaauuac

SEQ ID NO: 3182955 - RNA, 19 nt, Human
gguauaauugugugauauu

SEQ ID NO: 3182956 - RNA, 17 nt, Human
gguauaucauucuaaag

SEQ ID NO: 3182957 - RNA, 21 nt, Human
gguauauccuuuucuguguuu

SEQ ID NO: 3182958 - RNA, 19 nt, Human
gguauauccuuuucugugu

SEQ ID NO: 3182959 - RNA, 20 nt, Human
gguaggguaagugagagagg

SEQ ID NO: 3182960 - RNA, 11 nt, Human
gguaggguggg

SEQ ID NO: 3182961 - RNA, 23 nt, Human
gguagggugggccuucagggagu

SEQ ID NO: 3182962 - RNA, 22 nt, Human
aaacuugauguguuaucucuua

SEQ ID NO: 3182963 - RNA, 16 nt, Human
aaacuuuagguuuuuu

SEQ ID NO: 3182964 - RNA, 24 nt, Human
aaacuuuagguuuuuuuaaugaua

SEQ ID NO: 3182965 - RNA, 20 nt, Human
gguccaggccuacuccuguc

SEQ ID NO: 3182966 - RNA, 22 nt, Human
gguccaggccuacuccugucuu

SEQ ID NO: 3182967 - RNA, 22 nt, Human
ggucauauguuugcuuguauuu

SEQ ID NO: 3182968 - RNA, 19 nt, Human
gguaucaggugcugccauc

SEQ ID NO: 3182969 - RNA, 19 nt, Human
aaaccaccagaagcccaga

SEQ ID NO: 3182970 - RNA, 14 nt, Human
aaaccaccagaagc

SEQ ID NO: 3182971 - RNA, 20 nt, Human
aaacauuuucucuuagaaaa

SEQ ID NO: 3182972 - RNA, 19 nt, Human
aaacauuuucucuuagaaa

SEQ ID NO: 3182973 - RNA, 18 nt, Human
aaaccaccagaagcccag

SEQ ID NO: 3182974 - RNA, 15 nt, Human
aaaccaccagaagcc

SEQ ID NO: 3182975 - RNA, 16 nt, Human
aaaccuguagaaucaa

SEQ ID NO: 3182976 - RNA, 17 nt, Human
aaaccaggcuuucuaga

SEQ ID NO: 3182977 - RNA, 22 nt, Human
aaaccugugucucugagaguag

SEQ ID NO: 3182978 - RNA, 12 nt, Human
aaaccugugaag

SEQ ID NO: 3182979 - RNA, 12 nt, Human
aaaccugucuga

SEQ ID NO: 3182980 - RNA, 18 nt, Human
aaaccugggauuauauau

SEQ ID NO: 3182981 - RNA, 13 nt, Human
aaaccuuaauauu

SEQ ID NO: 3182982 - RNA, 14 nt, Human
aaaccuuaauauuu

SEQ ID NO: 3182983 - RNA, 15 nt, Human
aaaccuuaauauuuc

SEQ ID NO: 3182984 - RNA, 19 nt, Human
aaaccuuaauauuucuuca

SEQ ID NO: 3182985 - RNA, 21 nt, Human
aaaccuuaauauuucuucaaa

SEQ ID NO: 3182986 - RNA, 23 nt, Human
aaaccuuaauauuucuucaaaua

SEQ ID NO: 3182987 - RNA, 17 nt, Human
aaaccuucacuuaggaa

SEQ ID NO: 3182988 - RNA, 19 nt, Human
aaacgacaaaucugucugc

SEQ ID NO: 3182989 - RNA, 18 nt, Human
aaacgacaaaucugucug

SEQ ID NO: 3182990 - RNA, 21 nt, Human
gggucaucuguaccucugccu

SEQ ID NO: 3182991 - RNA, 20 nt, Human
gggucagguugacaggaggu

SEQ ID NO: 3182992 - RNA, 19 nt, Human
gggucagguugacaggagg

SEQ ID NO: 3182993 - RNA, 18 nt, Human
gggucauucauggccugg

SEQ ID NO: 3182994 - RNA, 18 nt, Human
gggucagguugacaggag

SEQ ID NO: 3182995 - RNA, 14 nt, Human
gggucacucuggca

SEQ ID NO: 3182996 - RNA, 20 nt, Human
gggucacucuggcagcucag

SEQ ID NO: 3182997 - RNA, 18 nt, Human
gggguccccuccaggagu

SEQ ID NO: 3182998 - RNA, 19 nt, Human
aaacauuuugucauauaag

SEQ ID NO: 3182999 - RNA, 18 nt, Human
aaacauuucauaauuugu

SEQ ID NO: 3183000 - RNA, 21 nt, Human
aaacauuucauaauuuguuuc

SEQ ID NO: 3183001 - RNA, 22 nt, Human
aaacauuucauaauuuguuucc

SEQ ID NO: 3183002 - RNA, 23 nt, Human
aaacauuucauaauuuguuucca

SEQ ID NO: 3183003 - RNA, 16 nt, Human
gggggcucagcaaggc

SEQ ID NO: 3183004 - RNA, 20 nt, Human
gggggcucagcaaggccacc

SEQ ID NO: 3183005 - RNA, 20 nt, Human
gggggcucaguucuggacug

SEQ ID NO: 3183006 - RNA, 19 nt, Human
gggggcucagcaaggccac

SEQ ID NO: 3183007 - RNA, 11 nt, Human
gggggcuggga

SEQ ID NO: 3183008 - RNA, 17 nt, Human
gggggaucacagccucu

SEQ ID NO: 3183009 - RNA, 15 nt, Human
gggggcugggcagag

SEQ ID NO: 3183010 - RNA, 13 nt, Human
ggggguggccucc

SEQ ID NO: 3183011 - RNA, 22 nt, Human
ggggucaggccgggcagagcac

SEQ ID NO: 3183012 - RNA, 21 nt, Human
ggggucacucuggcagcucag

SEQ ID NO: 3183013 - RNA, 19 nt, Human
ggggccaguuggucccccu

SEQ ID NO: 3183014 - RNA, 14 nt, Human
ggggaccagagcug

SEQ ID NO: 3183015 - RNA, 18 nt, Human
ggggccauauucuuccug

SEQ ID NO: 3183016 - RNA, 20 nt, Human
ggggccccgucucaggucug

SEQ ID NO: 3183017 - RNA, 16 nt, Human
ggggccccgucucagg

SEQ ID NO: 3183018 - RNA, 20 nt, Human
ggggcccaaaugcuggcugg

SEQ ID NO: 3183019 - RNA, 18 nt, Human
aaaauguauguguaagua

SEQ ID NO: 3183020 - RNA, 18 nt, Human
aaaauguaacuguuacca

SEQ ID NO: 3183021 - RNA, 16 nt, Human
aaaauguaacuguuac

SEQ ID NO: 3183022 - RNA, 15 nt, Human
aaaauguaacuguua

SEQ ID NO: 3183023 - RNA, 13 nt, Human
aaaauguaacugu

SEQ ID NO: 3183024 - RNA, 12 nt, Human
aaaauguaacug

SEQ ID NO: 3183025 - RNA, 12 nt, Human
ggggaccagagc

SEQ ID NO: 3183026 - RNA, 13 nt, Human
ggggaccagagcu

SEQ ID NO: 3183027 - RNA, 23 nt, Human
aaaauguccaguaagaucacugu

SEQ ID NO: 3183028 - RNA, 23 nt, Human
aaaaugucaaaaguagaacuuug

SEQ ID NO: 3183029 - RNA, 21 nt, Human
aaaaugucaaaaguagaacuu

SEQ ID NO: 3183030 - RNA, 22 nt, Human
aaaaugucaaaaguagaacuuu

SEQ ID NO: 3183031 - RNA, 14 nt, Human
aaaaugucaaaagu

SEQ ID NO: 3183032 - RNA, 15 nt, Human
aaaaugucaaaagua

SEQ ID NO: 3183033 - RNA, 19 nt, Human
aaaaugacaccaucuuuua

SEQ ID NO: 3183034 - RNA, 15 nt, Human
aaaaucugcuguuaa

SEQ ID NO: 3183035 - RNA, 17 nt, Human
aaaaucugcuguuaacu

SEQ ID NO: 3183036 - RNA, 14 nt, Human
aaaaucugaagauu

SEQ ID NO: 3183037 - RNA, 13 nt, Human
aaaaucugaagau

SEQ ID NO: 3183038 - RNA, 22 nt, Human
aaaaucugaagauuguuuaucu

SEQ ID NO: 3183039 - RNA, 18 nt, Human
aaaaucugaagauuguuu

SEQ ID NO: 3183040 - RNA, 16 nt, Human
aaaaucugaagauugu

SEQ ID NO: 3183041 - RNA, 15 nt, Human
aaaaucugaagauug

SEQ ID NO: 3183042 - RNA, 12 nt, Human
aaaauauuuucu

SEQ ID NO: 3183043 - RNA, 11 nt, Human
aaaaucuccua

SEQ ID NO: 3183044 - RNA, 14 nt, Human
aaaaucuccuaaau

SEQ ID NO: 3183045 - RNA, 19 nt, Human
aaaaucucucauuugugug

SEQ ID NO: 3183046 - RNA, 21 nt, Human
aaaaugcuguauuagucacag

SEQ ID NO: 3183047 - RNA, 23 nt, Human
aaaaugcuguauuagucacagag

SEQ ID NO: 3183048 - RNA, 17 nt, Human
aaaaugcaaaaaaucuu

SEQ ID NO: 3183049 - RNA, 16 nt, Human
aaaaugcaaaaaaucu

SEQ ID NO: 3183050 - RNA, 17 nt, Human
aaaaugccaucaaauga

SEQ ID NO: 3183051 - RNA, 16 nt, Human
aaaaugccaugaauua

SEQ ID NO: 3183052 - RNA, 16 nt, Human
aaaaugcauguaauca

SEQ ID NO: 3183053 - RNA, 16 nt, Human
aaaaugcaugauugca

SEQ ID NO: 3183054 - RNA, 17 nt, Human
aaaauagagaugagcuu

SEQ ID NO: 3183055 - RNA, 21 nt, Human
aaaauagagaugagcuuucuu

SEQ ID NO: 3183056 - RNA, 15 nt, Human
aaaauacuuugaguu

SEQ ID NO: 3183057 - RNA, 18 nt, Human
aaaauacuuugaguuuug

SEQ ID NO: 3183058 - RNA, 12 nt, Human
aaaauacuucuu

SEQ ID NO: 3183059 - RNA, 20 nt, Human
aaaauacuuaaauguuaugu

SEQ ID NO: 3183060 - RNA, 15 nt, Human
aaaauacuuaaaugu

SEQ ID NO: 3183061 - RNA, 14 nt, Human
aaaauacuuaaaug

SEQ ID NO: 3183062 - RNA, 15 nt, Human
aaaauacuguagaua

SEQ ID NO: 3183063 - RNA, 11 nt, Human
aaaauacugua

SEQ ID NO: 3183064 - RNA, 13 nt, Human
aaaauaucaaauu

SEQ ID NO: 3183065 - RNA, 19 nt, Human
aaaauaucuaguaauauau

SEQ ID NO: 3183066 - RNA, 15 nt, Human
aaaauauuccugcau

SEQ ID NO: 3183067 - RNA, 14 nt, Human
aaaauauucucuau

SEQ ID NO: 3183068 - RNA, 21 nt, Human
aaaauauugagcagaauucau

SEQ ID NO: 3183069 - RNA, 22 nt, Human
aaaauaugaccacacuccagcu

SEQ ID NO: 3183070 - RNA, 14 nt, Human
aaaauauuuaaagg

SEQ ID NO: 3183071 - RNA, 14 nt, Human
aaaauaugcacuaa

SEQ ID NO: 3183072 - RNA, 12 nt, Human
aaaauaugcacu

SEQ ID NO: 3183073 - RNA, 20 nt, Human
aaaauauuuaugaagaaaau

SEQ ID NO: 3183074 - RNA, 14 nt, Human
aaaauauuuaaugu

SEQ ID NO: 3183075 - RNA, 14 nt, Human
aaaauauuuaugaa

SEQ ID NO: 3183076 - RNA, 17 nt, Human
aaaauauuuaugaagaa

SEQ ID NO: 3183077 - RNA, 15 nt, Human
aaaauauuuaugaag

SEQ ID NO: 3183078 - RNA, 13 nt, Human
aaaauauuuucug

SEQ ID NO: 3183079 - RNA, 14 nt, Human
aaaauauuuucugu

SEQ ID NO: 3183080 - RNA, 15 nt, Human
aaaauauuuucugug

SEQ ID NO: 3183081 - RNA, 16 nt, Human
aaaauauuuucugugu

SEQ ID NO: 3183082 - RNA, 17 nt, Human
aaaauauuuucugugug

SEQ ID NO: 3183083 - RNA, 18 nt, Human
aaaauauuuucugugugu

SEQ ID NO: 3183084 - RNA, 19 nt, Human
aaaauauuuucuguguguu

SEQ ID NO: 3183085 - RNA, 20 nt, Human
aaaauauuuucuguguguuc

SEQ ID NO: 3183086 - RNA, 21 nt, Human
aaaauauuuucuguguguucc

SEQ ID NO: 3183087 - RNA, 22 nt, Human
aaaauauuuucuguguguuccu

SEQ ID NO: 3183088 - RNA, 23 nt, Human
aaaauauuuucuguguguuccug

SEQ ID NO: 3183089 - RNA, 16 nt, Human
aaaauauuuuccugcc

SEQ ID NO: 3183090 - RNA, 14 nt, Human
aaaauaauuauuua

SEQ ID NO: 3183091 - RNA, 19 nt, Human
aaaauaauuauuuauuaca

SEQ ID NO: 3183092 - RNA, 22 nt, Human
aaaauaagaaaagauguagauu

SEQ ID NO: 3183093 - RNA, 12 nt, Human
aaaauaagaaaa

SEQ ID NO: 3183094 - RNA, 15 nt, Human
aaaauaagaaaagau

SEQ ID NO: 3183095 - RNA, 14 nt, Human
aaaauaagaaaaga

SEQ ID NO: 3183096 - RNA, 15 nt, Human
aaaauaacuguaauu

SEQ ID NO: 3183097 - RNA, 18 nt, Human
aaaauaacuuagacucua

SEQ ID NO: 3183098 - RNA, 14 nt, Human
aaaauaacuguaau

SEQ ID NO: 3183099 - RNA, 13 nt, Human
aaaauaacuguaa

SEQ ID NO: 3183100 - RNA, 17 nt, Human
aaaauaaccuaauuaau

SEQ ID NO: 3183101 - RNA, 18 nt, Human
aaaauaaccuaauuaaua

SEQ ID NO: 3183102 - RNA, 12 nt, Human
aaaauaacugua

SEQ ID NO: 3183103 - RNA, 17 nt, Human
aaaauaacuaaaaugua

SEQ ID NO: 3183104 - RNA, 15 nt, Human
aaaauaacugaauuu

SEQ ID NO: 3183105 - RNA, 14 nt, Human
aaaauacacacuca

SEQ ID NO: 3183106 - RNA, 14 nt, Human
aaaauaauuuugua

SEQ ID NO: 3183107 - RNA, 13 nt, Human
aaaauaauuuugu

SEQ ID NO: 3183108 - RNA, 14 nt, Human
aaaauacucuuuuu

SEQ ID NO: 3183109 - RNA, 22 nt, Human
aaaauacugacuccaaccauuc

SEQ ID NO: 3183110 - RNA, 15 nt, Human
aaaauacaauuuuua

SEQ ID NO: 3183111 - RNA, 16 nt, Human
aaaauacaauuuuuau

SEQ ID NO: 3183112 - RNA, 12 nt, Human
aaaauacauucu

SEQ ID NO: 3183113 - RNA, 16 nt, Human
aaaagguuaauaaagu

SEQ ID NO: 3183114 - RNA, 11 nt, Human
aaaaggcccag

SEQ ID NO: 3183115 - RNA, 18 nt, Human
aaaaggugauaaaaucau

SEQ ID NO: 3183116 - RNA, 17 nt, Human
aaaagguuaauaaagua

SEQ ID NO: 3183117 - RNA, 13 nt, Human
aaaagguugaaua

SEQ ID NO: 3183118 - RNA, 11 nt, Human
aaaaggcagga

SEQ ID NO: 3183119 - RNA, 19 nt, Human
aaaagguaugcaaucaaau

SEQ ID NO: 3183120 - RNA, 22 nt, Human
aaaaggagccaauuuaaagaaa

SEQ ID NO: 3183121 - RNA, 21 nt, Human
aaaaggaagguaguucaagaa

SEQ ID NO: 3183122 - RNA, 14 nt, Human
gggccucagugcca

SEQ ID NO: 3183123 - RNA, 13 nt, Human
gggccucagugcc

SEQ ID NO: 3183124 - RNA, 22 nt, Human
gggccucggacuuagcugggag

SEQ ID NO: 3183125 - RNA, 22 nt, Human
gggccucgguguggagaagcgg

SEQ ID NO: 3183126 - RNA, 18 nt, Human
gggccucuuaugggcugg

SEQ ID NO: 3183127 - RNA, 21 nt, Human
gggcggugagaggggaacaga

SEQ ID NO: 3183128 - RNA, 18 nt, Human
gggcgugagaccugcccc

SEQ ID NO: 3183129 - RNA, 19 nt, Human
gggcgugagaccugccccu

SEQ ID NO: 3183130 - RNA, 12 nt, Human
gggccaggagcc

SEQ ID NO: 3183131 - RNA, 13 nt, Human
gggccaggagccu

SEQ ID NO: 3183132 - RNA, 14 nt, Human
gggccaggagccuc

SEQ ID NO: 3183133 - RNA, 19 nt, Human
gggccauugaacucugaga

SEQ ID NO: 3183134 - RNA, 14 nt, Human
gggccgccuguccu

SEQ ID NO: 3183135 - RNA, 17 nt, Human
gggccggggcuucugug

SEQ ID NO: 3183136 - RNA, 16 nt, Human
aaaaugguuuaaaugg

SEQ ID NO: 3183137 - RNA, 18 nt, Human
aaaaugguuuaaaugguc

SEQ ID NO: 3183138 - RNA, 13 nt, Human
aaaaugguaucaa

SEQ ID NO: 3183139 - RNA, 18 nt, Human
aaaaugguaucaaaauua

SEQ ID NO: 3183140 - RNA, 24 nt, Human
aaaaugguaucaaaauuacauaua

SEQ ID NO: 3183141 - RNA, 14 nt, Human
aaaaugggagaucu

SEQ ID NO: 3183142 - RNA, 21 nt, Human
gggcugggggaugggccugag

SEQ ID NO: 3183143 - RNA, 19 nt, Human
gggcugggggaugggccug

SEQ ID NO: 3183144 - RNA, 17 nt, Human
gggcuggguucuaccca

SEQ ID NO: 3183145 - RNA, 22 nt, Human
gggcugggcccacccaagcagg

SEQ ID NO: 3183146 - RNA, 12 nt, Human
gggcugggcaga

SEQ ID NO: 3183147 - RNA, 15 nt, Human
gggcugggcagagga

SEQ ID NO: 3183148 - RNA, 20 nt, Human
gggcugcaccggcuggccug

SEQ ID NO: 3183149 - RNA, 21 nt, Human
gggcugcaccggcuggccugg

SEQ ID NO: 3183150 - RNA, 21 nt, Human
gggcugcccuggugcugccac

SEQ ID NO: 3183151 - RNA, 20 nt, Human
gggcucagcaaggccaccuc

SEQ ID NO: 3183152 - RNA, 19 nt, Human
gggcucagcaaggccaccu

SEQ ID NO: 3183153 - RNA, 13 nt, Human
gggcucagcaagg

SEQ ID NO: 3183154 - RNA, 18 nt, Human
gggcucagcaaggccacc

SEQ ID NO: 3183155 - RNA, 17 nt, Human
gggcucagcaaggccac

SEQ ID NO: 3183156 - RNA, 16 nt, Human
gggcucagcaaggcca

SEQ ID NO: 3183157 - RNA, 15 nt, Human
gggcucagcaaggcc

SEQ ID NO: 3183158 - RNA, 19 nt, Human
gggcucagcggggacagcu

SEQ ID NO: 3183159 - RNA, 17 nt, Human
gggcucagcggggacag

SEQ ID NO: 3183160 - RNA, 15 nt, Human
gggcuaguugggcuu

SEQ ID NO: 3183161 - RNA, 20 nt, Human
gggcuaggaaauccagggug

SEQ ID NO: 3183162 - RNA, 18 nt, Human
gggcucagcaaaagaugc

SEQ ID NO: 3183163 - RNA, 22 nt, Human
gggcucagcaaaagaugcuucu

SEQ ID NO: 3183164 - RNA, 21 nt, Human
gggcucagcaaggccaccucu

SEQ ID NO: 3183165 - RNA, 21 nt, Human
gggcucagcggggacagcucc

SEQ ID NO: 3183166 - RNA, 10 nt, Human
gggcuccaga

SEQ ID NO: 3183167 - RNA, 13 nt, Human
gggcuccagacac

SEQ ID NO: 3183168 - RNA, 19 nt, Human
gggcucccgccuccaaccc

SEQ ID NO: 3183169 - RNA, 17 nt, Human
gggcugcaccggcuggc

SEQ ID NO: 3183170 - RNA, 19 nt, Human
gggcugcaccggcuggccu

SEQ ID NO: 3183171 - RNA, 18 nt, Human
gggcucaguucuggacug

SEQ ID NO: 3183172 - RNA, 18 nt, Human
gggcucccgccuccaacc

SEQ ID NO: 3183173 - RNA, 13 nt, Human
gggcucccgccuc

SEQ ID NO: 3183174 - RNA, 16 nt, Human
gcggcuggacuuggag

SEQ ID NO: 3183175 - RNA, 15 nt, Human
gcggcuggcagccca

SEQ ID NO: 3183176 - RNA, 17 nt, Human
gcguucaccagugaccu

SEQ ID NO: 3183177 - RNA, 15 nt, Human
gcguguucucagagg

SEQ ID NO: 3183178 - RNA, 15 nt, Human
gcggcuggacuugga

SEQ ID NO: 3183179 - RNA, 18 nt, Human
gcggcucaagcccaggag

SEQ ID NO: 3183180 - RNA, 16 nt, Human
gcggccuuuggcuuca

SEQ ID NO: 3183181 - RNA, 14 nt, Human
gcggcaaaaggaaa

SEQ ID NO: 3183182 - RNA, 16 nt, Human
gcggcaaaaggaaagc

SEQ ID NO: 3183183 - RNA, 22 nt, Human
gcggcaaucaauaaacagcagg

SEQ ID NO: 3183184 - RNA, 22 nt, Human
gccugggcaauaaagugagacc

SEQ ID NO: 3183185 - RNA, 15 nt, Human
gccugggcaauaaag

SEQ ID NO: 3183186 - RNA, 19 nt, Human
gccugugccucugggacug

SEQ ID NO: 3183187 - RNA, 23 nt, Human
gccugggaucccucauccucaua

SEQ ID NO: 3183188 - RNA, 21 nt, Human
gccugggaucccucauccuca

SEQ ID NO: 3183189 - RNA, 11 nt, Human
gccugggcaga

SEQ ID NO: 3183190 - RNA, 22 nt, Human
gccuggcucccucacucucagg

SEQ ID NO: 3183191 - RNA, 21 nt, Human
gccuggcucccucacucucag

SEQ ID NO: 3183192 - RNA, 19 nt, Human
gccuggcucccucacucuc

SEQ ID NO: 3183193 - RNA, 16 nt, Human
gccuggcucccucacu

SEQ ID NO: 3183194 - RNA, 12 nt, Human
gccuggcucccu

SEQ ID NO: 3183195 - RNA, 13 nt, Human
gccuggcuccccu

SEQ ID NO: 3183196 - RNA, 14 nt, Human
gccuggcuccccug

SEQ ID NO: 3183197 - RNA, 15 nt, Human
gccuggcuccccugg

SEQ ID NO: 3183198 - RNA, 16 nt, Human
gccuggcuccccuggg

SEQ ID NO: 3183199 - RNA, 17 nt, Human
gccuggcuccccugggg

SEQ ID NO: 3183200 - RNA, 23 nt, Human
gccuggcucccucacucucagga

SEQ ID NO: 3183201 - RNA, 23 nt, Human
gccuucggccuccauccugaggc

SEQ ID NO: 3183202 - RNA, 18 nt, Human
gccuucgguacccaccac

SEQ ID NO: 3183203 - RNA, 19 nt, Human
gccuucgguacccaccaca

SEQ ID NO: 3183204 - RNA, 16 nt, Human
gccuucucugaaggac

SEQ ID NO: 3183205 - RNA, 15 nt, Human
gccuucucugaagga

SEQ ID NO: 3183206 - RNA, 16 nt, Human
gccuguucagcuccag

SEQ ID NO: 3183207 - RNA, 14 nt, Human
gccuguucagcucc

SEQ ID NO: 3183208 - RNA, 15 nt, Human
gccuguucagcucca

SEQ ID NO: 3183209 - RNA, 16 nt, Human
gccuucugaugaaaug

SEQ ID NO: 3183210 - RNA, 17 nt, Human
gccuucugaugaaaugu

SEQ ID NO: 3183211 - RNA, 21 nt, Human
gccuugaccauucuccaccug

SEQ ID NO: 3183212 - RNA, 22 nt, Human
gccuugaccauucuccaccugc

SEQ ID NO: 3183213 - RNA, 17 nt, Human
gcgauucuucugcuuca

SEQ ID NO: 3183214 - RNA, 22 nt, Human
gcgauucuucugcuucagccuc

SEQ ID NO: 3183215 - RNA, 23 nt, Human
gccuugaccauucuccaccugcc

SEQ ID NO: 3183216 - RNA, 20 nt, Human
gccuugauucccuuguuauu

SEQ ID NO: 3183217 - RNA, 23 nt, Human
gcgauucuucugcuucagccucc

SEQ ID NO: 3183218 - RNA, 20 nt, Human
gcgcagcauauucaggaagc

SEQ ID NO: 3183219 - RNA, 21 nt, Human
gcgcagcauauucaggaagcu

SEQ ID NO: 3183220 - RNA, 14 nt, Human
gcgcaggcuggccc

SEQ ID NO: 3183221 - RNA, 16 nt, Human
gcgcagcccgcggcaa

SEQ ID NO: 3183222 - RNA, 17 nt, Human
gcgcagcauccgaccag

SEQ ID NO: 3183223 - RNA, 15 nt, Human
gcgcaggcuggcccu

SEQ ID NO: 3183224 - RNA, 16 nt, Human
gcgcaggcuggcccug

SEQ ID NO: 3183225 - RNA, 22 nt, Human
gcuaagugauccucccaccuca

SEQ ID NO: 3183226 - RNA, 18 nt, Human
gcuaagugauccucccac

SEQ ID NO: 3183227 - RNA, 19 nt, Human
gcuaaguaaaucucuucug

SEQ ID NO: 3183228 - RNA, 18 nt, Human
gcuaaguaaaucucuucu

SEQ ID NO: 3183229 - RNA, 19 nt, Human
gcuaguguucuuucucuuu

SEQ ID NO: 3183230 - RNA, 13 nt, Human
gcuaguugaauac

SEQ ID NO: 3183231 - RNA, 15 nt, Human
gcuaguugaauacuu

SEQ ID NO: 3183232 - RNA, 16 nt, Human
gcuaguugaauacuug

SEQ ID NO: 3183233 - RNA, 18 nt, Human
gcuaguugaauacuugaa

SEQ ID NO: 3183234 - RNA, 16 nt, Human
gcuaguugggcuuccu

SEQ ID NO: 3183235 - RNA, 14 nt, Human
gcuaguugggcuuc

SEQ ID NO: 3183236 - RNA, 12 nt, Human
gcuauuaaaaaa

SEQ ID NO: 3183237 - RNA, 15 nt, Human
gcuauuaaaaaaguc

SEQ ID NO: 3183238 - RNA, 16 nt, Human
gcuauuaaaaaagucu

SEQ ID NO: 3183239 - RNA, 23 nt, Human
gcuauuacgaaguucaagaucaa

SEQ ID NO: 3183240 - RNA, 19 nt, Human
gcuauuaacaauuaauugu

SEQ ID NO: 3183241 - RNA, 12 nt, Human
gcuauuaauauu

SEQ ID NO: 3183242 - RNA, 15 nt, Human
gcuauuaauauuugu

SEQ ID NO: 3183243 - RNA, 19 nt, Human
gcuaguugaauacuugaac

SEQ ID NO: 3183244 - RNA, 22 nt, Human
gcuaguugaauacuugaaccau

SEQ ID NO: 3183245 - RNA, 16 nt, Human
gcuaggaaugaaaucu

SEQ ID NO: 3183246 - RNA, 18 nt, Human
gcuaggaauauagauuaa

SEQ ID NO: 3183247 - RNA, 20 nt, Human
gcuaggaccccuccaugugg

SEQ ID NO: 3183248 - RNA, 20 nt, Human
gcucagggccuggcucaggu

SEQ ID NO: 3183249 - RNA, 21 nt, Human
gcucacugcuaagaauauuug

SEQ ID NO: 3183250 - RNA, 17 nt, Human
gcucacuguggugucug

SEQ ID NO: 3183251 - RNA, 19 nt, Human
gcucacuguggugucugug

SEQ ID NO: 3183252 - RNA, 18 nt, Human
gcucacuguggugucugu

SEQ ID NO: 3183253 - RNA, 15 nt, Human
gcucaaaugaaaugu

SEQ ID NO: 3183254 - RNA, 22 nt, Human
gcucagagagggugggaguggg

SEQ ID NO: 3183255 - RNA, 17 nt, Human
gcucagaaccacagcaa

SEQ ID NO: 3183256 - RNA, 15 nt, Human
gcucagaaccacagc

SEQ ID NO: 3183257 - RNA, 18 nt, Human
gcucagggccuggcucag

SEQ ID NO: 3183258 - RNA, 19 nt, Human
gcucagggccuggcucagg

SEQ ID NO: 3183259 - RNA, 13 nt, Human
gcucaggaguuug

SEQ ID NO: 3183260 - RNA, 17 nt, Human
gcucagggccuggcuca

SEQ ID NO: 3183261 - RNA, 17 nt, Human
gccuacaggagugagca

SEQ ID NO: 3183262 - RNA, 19 nt, Human
gccucaugucaaauauuua

SEQ ID NO: 3183263 - RNA, 22 nt, Human
gccucauguccacugguucuuc

SEQ ID NO: 3183264 - RNA, 19 nt, Human
gccucaugcuaagacucag

SEQ ID NO: 3183265 - RNA, 13 nt, Human
gccuccauccuga

SEQ ID NO: 3183266 - RNA, 14 nt, Human
gccuccauccugag

SEQ ID NO: 3183267 - RNA, 20 nt, Human
gccuccugacacaccugcag

SEQ ID NO: 3183268 - RNA, 21 nt, Human
gccuccugacacaccugcagc

SEQ ID NO: 3183269 - RNA, 23 nt, Human
gccuccugacacaccugcagccu

SEQ ID NO: 3183270 - RNA, 12 nt, Human
gccuccauccug

SEQ ID NO: 3183271 - RNA, 19 nt, Human
gccuccugaguagcuggga

SEQ ID NO: 3183272 - RNA, 22 nt, Human
gccuccuuugugaggaagccgc

SEQ ID NO: 3183273 - RNA, 13 nt, Human
gccucgaacuggc

SEQ ID NO: 3183274 - RNA, 16 nt, Human
gccucgaacuggcugc

SEQ ID NO: 3183275 - RNA, 14 nt, Human
gccucugggacugg

SEQ ID NO: 3183276 - RNA, 16 nt, Human
gccccuggcagccccu

SEQ ID NO: 3183277 - RNA, 17 nt, Human
gccccuggcagccccug

SEQ ID NO: 3183278 - RNA, 16 nt, Human
gccgcuccagagucag

SEQ ID NO: 3183279 - RNA, 13 nt, Human
gccgcuccagagu

SEQ ID NO: 3183280 - RNA, 12 nt, Human
gccgcuccagag

SEQ ID NO: 3183281 - RNA, 22 nt, Human
gccggacacccgacuccagucc

SEQ ID NO: 3183282 - RNA, 16 nt, Human
gccuacaggagugagc

SEQ ID NO: 3183283 - RNA, 16 nt, Human
gccuacaaaucaguaa

SEQ ID NO: 3183284 - RNA, 17 nt, Human
gccuacaaaucaguaau

SEQ ID NO: 3183285 - RNA, 23 nt, Human
gccggcaauaaaagcccaggagc

SEQ ID NO: 3183286 - RNA, 22 nt, Human
gccggcaauaaaagcccaggag

SEQ ID NO: 3183287 - RNA, 21 nt, Human
gccggcaauaaaagcccagga

SEQ ID NO: 3183288 - RNA, 20 nt, Human
gccggcaauaaaagcccagg

SEQ ID NO: 3183289 - RNA, 19 nt, Human
gccggcaauaaaagcccag

SEQ ID NO: 3183290 - RNA, 18 nt, Human
gccggcaauaaaagccca

SEQ ID NO: 3183291 - RNA, 15 nt, Human
gcccuuccucuccac

SEQ ID NO: 3183292 - RNA, 14 nt, Human
gcccuuccucucca

SEQ ID NO: 3183293 - RNA, 11 nt, Human
gccgcuccaga

SEQ ID NO: 3183294 - RNA, 13 nt, Human
gccgcuagguaga

SEQ ID NO: 3183295 - RNA, 23 nt, Human
gccgcuagguagagucugagggc

SEQ ID NO: 3183296 - RNA, 21 nt, Human
gcccuuccaugucgccucugc

SEQ ID NO: 3183297 - RNA, 12 nt, Human
gcccuuccaugu

SEQ ID NO: 3183298 - RNA, 22 nt, Human
gcccuuccaugucgccucugca

SEQ ID NO: 3183299 - RNA, 12 nt, Human
gcccuuccucuc

SEQ ID NO: 3183300 - RNA, 16 nt, Human
gcccugugggccccca

SEQ ID NO: 3183301 - RNA, 17 nt, Human
gcccugugggcccccaa

SEQ ID NO: 3183302 - RNA, 21 nt, Human
gcccuuaccugccaggaagcc

SEQ ID NO: 3183303 - RNA, 22 nt, Human
gcccuuaccugccaggaagcca

SEQ ID NO: 3183304 - RNA, 23 nt, Human
gcccuuaccugccaggaagccag

SEQ ID NO: 3183305 - RNA, 14 nt, Human
gcccugcccaccug

SEQ ID NO: 3183306 - RNA, 13 nt, Human
gcccugcccacac

SEQ ID NO: 3183307 - RNA, 20 nt, Human
gcccugcccacaccuccugg

SEQ ID NO: 3183308 - RNA, 20 nt, Human
gcccugcgggucacaggagg

SEQ ID NO: 3183309 - RNA, 11 nt, Human
gcccacuggcc

SEQ ID NO: 3183310 - RNA, 21 nt, Human
gcccacgcuggagugcaguga

SEQ ID NO: 3183311 - RNA, 19 nt, Human
gcccacgcuggagugcagu

SEQ ID NO: 3183312 - RNA, 23 nt, Human
gcccacgcuggagugcagugagc

SEQ ID NO: 3183313 - RNA, 15 nt, Human
gccauugcuuaccuu

SEQ ID NO: 3183314 - RNA, 24 nt, Human
gcccaggaaaggcuccaggagcag

SEQ ID NO: 3183315 - RNA, 21 nt, Human
gcccaggaaaggcuccaggag

SEQ ID NO: 3183316 - RNA, 15 nt, Human
gcccacuucccuggg

SEQ ID NO: 3183317 - RNA, 11 nt, Human
gcccacuuccc

SEQ ID NO: 3183318 - RNA, 16 nt, Human
gcccacuucccugggu

SEQ ID NO: 3183319 - RNA, 22 nt, Human
gcccaggaaaggcuccaggagc

SEQ ID NO: 3183320 - RNA, 23 nt, Human
gcccaggaaaggcuccaggagca

SEQ ID NO: 3183321 - RNA, 13 nt, Human
gcccacuucugcc

SEQ ID NO: 3183322 - RNA, 23 nt, Human
gcccacugugcguggggcucccg

SEQ ID NO: 3183323 - RNA, 16 nt, Human
gcccacugugcguggg

SEQ ID NO: 3183324 - RNA, 17 nt, Human
gccauugacuucuuccc

SEQ ID NO: 3183325 - RNA, 15 nt, Human
gcccacgcccccacu

SEQ ID NO: 3183326 - RNA, 16 nt, Human
gcccacgcccccacug

SEQ ID NO: 3183327 - RNA, 17 nt, Human
gcccacgcccccacugg

SEQ ID NO: 3183328 - RNA, 21 nt, Human
gcccacgcccccacuggugac

SEQ ID NO: 3183329 - RNA, 19 nt, Human
gcauuuaggccaugggaca

SEQ ID NO: 3183330 - RNA, 18 nt, Human
gcauuuacuuuguguuca

SEQ ID NO: 3183331 - RNA, 18 nt, Human
gcauuuagggaguauucu

SEQ ID NO: 3183332 - RNA, 17 nt, Human
gcccaggagaaugcugc

SEQ ID NO: 3183333 - RNA, 18 nt, Human
gcccaggauauauuuuau

SEQ ID NO: 3183334 - RNA, 16 nt, Human
gcccaggauauauuuu

SEQ ID NO: 3183335 - RNA, 11 nt, Human
gcccaggcagg

SEQ ID NO: 3183336 - RNA, 16 nt, Human
gcccaggcaggucuug

SEQ ID NO: 3183337 - RNA, 12 nt, Human
gcccaggccccu

SEQ ID NO: 3183338 - RNA, 11 nt, Human
gcccaggcccc

SEQ ID NO: 3183339 - RNA, 21 nt, Human
gcccaggccccugccacccug

SEQ ID NO: 3183340 - RNA, 20 nt, Human
gcccaggccccugccacccu

SEQ ID NO: 3183341 - RNA, 18 nt, Human
gcccaggccccugccacc

SEQ ID NO: 3183342 - RNA, 20 nt, Human
gccccaaaacucuccucugc

SEQ ID NO: 3183343 - RNA, 11 nt, Human
gccccaaaagg

SEQ ID NO: 3183344 - RNA, 21 nt, Human
gccccaaaacucuccucugcu

SEQ ID NO: 3183345 - RNA, 19 nt, Human
gccccaaaacucuccucug

SEQ ID NO: 3183346 - RNA, 14 nt, Human
gccccaacccuucu

SEQ ID NO: 3183347 - RNA, 15 nt, Human
gccccaacccuucuu

SEQ ID NO: 3183348 - RNA, 16 nt, Human
gccccaacccuucuuc

SEQ ID NO: 3183349 - RNA, 17 nt, Human
gccccaacccuucuuca

SEQ ID NO: 3183350 - RNA, 22 nt, Human
gccccaaauugucaccugcuuc

SEQ ID NO: 3183351 - RNA, 12 nt, Human
gcccccacuggu

SEQ ID NO: 3183352 - RNA, 12 nt, Human
gccccuggcagc

SEQ ID NO: 3183353 - RNA, 15 nt, Human
gccccuggcagcccc

SEQ ID NO: 3183354 - RNA, 16 nt, Human
gccccugcugguucag

SEQ ID NO: 3183355 - RNA, 15 nt, Human
gccccugcugguuca

SEQ ID NO: 3183356 - RNA, 12 nt, Human
gccccugcuggu

SEQ ID NO: 3183357 - RNA, 14 nt, Human
gcccccucugcccu

SEQ ID NO: 3183358 - RNA, 17 nt, Human
gcccccucuucccuggu

SEQ ID NO: 3183359 - RNA, 17 nt, Human
gcccccucugcccugcg

SEQ ID NO: 3183360 - RNA, 15 nt, Human
gcccccucugcccug

SEQ ID NO: 3183361 - RNA, 16 nt, Human
gcccccucugcccugc

SEQ ID NO: 3183362 - RNA, 12 nt, Human
gcccccagcuuc

SEQ ID NO: 3183363 - RNA, 19 nt, Human
gcccccagcuuccagcagg

SEQ ID NO: 3183364 - RNA, 18 nt, Human
gcccccagcuuccagcag

SEQ ID NO: 3183365 - RNA, 14 nt, Human
gcuuuggaaguuuu

SEQ ID NO: 3183366 - RNA, 16 nt, Human
gcuuugccaugugcuu

SEQ ID NO: 3183367 - RNA, 22 nt, Human
gcuguuuacuugaauaguauug

SEQ ID NO: 3183368 - RNA, 12 nt, Human
gcuguuuggaaa

SEQ ID NO: 3183369 - RNA, 14 nt, Human
gcuguuuggaaaag

SEQ ID NO: 3183370 - RNA, 19 nt, Human
gcuguuuaucccuuaagaa

SEQ ID NO: 3183371 - RNA, 16 nt, Human
gcuucuucagagacuc

SEQ ID NO: 3183372 - RNA, 17 nt, Human
gcuguuuggguuuccaa

SEQ ID NO: 3183373 - RNA, 13 nt, Human
gcuuaagaaaaaa

SEQ ID NO: 3183374 - RNA, 12 nt, Human
gcuuaagaaaaa

SEQ ID NO: 3183375 - RNA, 19 nt, Human
gcuucuucagagacuccug

SEQ ID NO: 3183376 - RNA, 21 nt, Human
gcuucuucagagacuccugca

SEQ ID NO: 3183377 - RNA, 16 nt, Human
gcuugaccgugaggcc

SEQ ID NO: 3183378 - RNA, 17 nt, Human
gcuugaccgugaggcca

SEQ ID NO: 3183379 - RNA, 18 nt, Human
gcuugaccgugaggccag

SEQ ID NO: 3183380 - RNA, 19 nt, Human
gcuugaccgugaggccaga

SEQ ID NO: 3183381 - RNA, 23 nt, Human
gcuugggcuucauccuccucaga

SEQ ID NO: 3183382 - RNA, 16 nt, Human
gcuuggggaccagagc

SEQ ID NO: 3183383 - RNA, 22 nt, Human
gcuuucuacccagcgagcccug

SEQ ID NO: 3183384 - RNA, 19 nt, Human
gcuuucuacccagcgagcc

SEQ ID NO: 3183385 - RNA, 13 nt, Human
gcuuucuacccag

SEQ ID NO: 3183386 - RNA, 18 nt, Human
gcuuuccuguuucucagu

SEQ ID NO: 3183387 - RNA, 18 nt, Human
gcuuuccugugccaggug

SEQ ID NO: 3183388 - RNA, 17 nt, Human
gcuuuccugugccaggu

SEQ ID NO: 3183389 - RNA, 14 nt, Human
gcuuuccugugcca

SEQ ID NO: 3183390 - RNA, 13 nt, Human
gcuuugcacuuuu

SEQ ID NO: 3183391 - RNA, 17 nt, Human
gcuuggggaccagagcu

SEQ ID NO: 3183392 - RNA, 18 nt, Human
gcuuggggaccagagcug

SEQ ID NO: 3183393 - RNA, 20 nt, Human
gcuuggggaccagagcugcc

SEQ ID NO: 3183394 - RNA, 21 nt, Human
gcuuggggaccagagcugcca

SEQ ID NO: 3183395 - RNA, 22 nt, Human
gcuuggggaccagagcugccac

SEQ ID NO: 3183396 - RNA, 19 nt, Human
gcuugggcuucauccuccu

SEQ ID NO: 3183397 - RNA, 16 nt, Human
gcuuuccucuuccuga

SEQ ID NO: 3183398 - RNA, 13 nt, Human
gcuuuccugugcc

SEQ ID NO: 3183399 - RNA, 17 nt, Human
gcuuuucuuucuaccaa

SEQ ID NO: 3183400 - RNA, 15 nt, Human
gcuuuuccugggaca

SEQ ID NO: 3183401 - RNA, 22 nt, Human
gcuuuuccucaaagggagagag

SEQ ID NO: 3183402 - RNA, 19 nt, Human
ggaaacuauguguuuuucu

SEQ ID NO: 3183403 - RNA, 23 nt, Human
ggaaacuauguguuuuucucaua

SEQ ID NO: 3183404 - RNA, 13 nt, Human
gcuuuuuuugaaa

SEQ ID NO: 3183405 - RNA, 13 nt, Human
ggaaacugccagc

SEQ ID NO: 3183406 - RNA, 15 nt, Human
ggaaacccagcucug

SEQ ID NO: 3183407 - RNA, 20 nt, Human
ggaaacagcuaaugggacac

SEQ ID NO: 3183408 - RNA, 17 nt, Human
ggaaacagaggaccagc

SEQ ID NO: 3183409 - RNA, 20 nt, Human
gcuuuuuuugaaacuuugag

SEQ ID NO: 3183410 - RNA, 16 nt, Human
gcuuuuguuuugcuuu

SEQ ID NO: 3183411 - RNA, 21 nt, Human
gcuuuuuuugaaacuuugaga

SEQ ID NO: 3183412 - RNA, 20 nt, Human
gcuuuuuuuuuuuaauuuug

SEQ ID NO: 3183413 - RNA, 14 nt, Human
gcuuuuguuuugcu

SEQ ID NO: 3183414 - RNA, 15 nt, Human
gcuuuuuaauauuga

SEQ ID NO: 3183415 - RNA, 19 nt, Human
ggaaagcaaaggagauugg

SEQ ID NO: 3183416 - RNA, 16 nt, Human
ggaaagaguaggaaga

SEQ ID NO: 3183417 - RNA, 17 nt, Human
ggaaagaguaggaagac

SEQ ID NO: 3183418 - RNA, 20 nt, Human
ggaaagacuuuuccaacccu

SEQ ID NO: 3183419 - RNA, 14 nt, Human
ggaaagaggcucug

SEQ ID NO: 3183420 - RNA, 21 nt, Human
ggaaacuugauuugagauuuu

SEQ ID NO: 3183421 - RNA, 21 nt, Human
ggaaagcacagaggccuccug

SEQ ID NO: 3183422 - RNA, 14 nt, Human
ggaaagcacagagg

SEQ ID NO: 3183423 - RNA, 12 nt, Human
ggaaagcacaga

SEQ ID NO: 3183424 - RNA, 21 nt, Human
ggaagccagcaggcucucagg

SEQ ID NO: 3183425 - RNA, 18 nt, Human
ggaagccgcuggggccag

SEQ ID NO: 3183426 - RNA, 15 nt, Human
ggaagccgcuggggc

SEQ ID NO: 3183427 - RNA, 22 nt, Human
ggaagccagcaggcucucaggc

SEQ ID NO: 3183428 - RNA, 23 nt, Human
ggaagccagcaggcucucaggcc

SEQ ID NO: 3183429 - RNA, 23 nt, Human
ggaaaucaccgaaaacguggcug

SEQ ID NO: 3183430 - RNA, 16 nt, Human
ggaaauccaggguggu

SEQ ID NO: 3183431 - RNA, 19 nt, Human
ggaaugaaugucaguguga

SEQ ID NO: 3183432 - RNA, 21 nt, Human
ggaauauuauauuuggaugca

SEQ ID NO: 3183433 - RNA, 12 nt, Human
ggacacagcucu

SEQ ID NO: 3183434 - RNA, 12 nt, Human
ggaaugaggggg

SEQ ID NO: 3183435 - RNA, 17 nt, Human
ggaaugagggggcucag

SEQ ID NO: 3183436 - RNA, 21 nt, Human
ggacaccauuaccaaaauaau

SEQ ID NO: 3183437 - RNA, 12 nt, Human
ggacacccugug

SEQ ID NO: 3183438 - RNA, 21 nt, Human
ggacacagcucuucuccaggc

SEQ ID NO: 3183439 - RNA, 13 nt, Human
ggacacagcucuu

SEQ ID NO: 3183440 - RNA, 16 nt, Human
ggaagcucagggccug

SEQ ID NO: 3183441 - RNA, 17 nt, Human
ggaagcucagggccugg

SEQ ID NO: 3183442 - RNA, 21 nt, Human
ggaagcucagggccuggcuca

SEQ ID NO: 3183443 - RNA, 15 nt, Human
ggaauaccugucccc

SEQ ID NO: 3183444 - RNA, 15 nt, Human
ggaagcucagggccu

SEQ ID NO: 3183445 - RNA, 16 nt, Human
ggaauaccuguccccc

SEQ ID NO: 3183446 - RNA, 19 nt, Human
ggaauaccugucccccuga

SEQ ID NO: 3183447 - RNA, 17 nt, Human
ggaauaugggagaaaua

SEQ ID NO: 3183448 - RNA, 15 nt, Human
ggaauauuaaaaaac

SEQ ID NO: 3183449 - RNA, 19 nt, Human
ggaauauuauauuuggaug

SEQ ID NO: 3183450 - RNA, 15 nt, Human
ggaauauuauauuug

SEQ ID NO: 3183451 - RNA, 13 nt, Human
ggacacccuguga

SEQ ID NO: 3183452 - RNA, 23 nt, Human
ggacacccugugauggggcccug

SEQ ID NO: 3183453 - RNA, 17 nt, Human
ggacagggaggugaccc

SEQ ID NO: 3183454 - RNA, 23 nt, Human
ggacaggcauguucucugaggac

SEQ ID NO: 3183455 - RNA, 17 nt, Human
ggacaggggcaggagga

SEQ ID NO: 3183456 - RNA, 18 nt, Human
ggacaguauuugugggga

SEQ ID NO: 3183457 - RNA, 22 nt, Human
ggacagggcauggccagguggc

SEQ ID NO: 3183458 - RNA, 15 nt, Human
ggacagggcauggcc

SEQ ID NO: 3183459 - RNA, 19 nt, Human
ggacaguauuuguggggag

SEQ ID NO: 3183460 - RNA, 15 nt, Human
ggacagggguuccuu

SEQ ID NO: 3183461 - RNA, 13 nt, Human
ggacauggacaag

SEQ ID NO: 3183462 - RNA, 21 nt, Human
ggacauccugucaucugagaa

SEQ ID NO: 3183463 - RNA, 20 nt, Human
ggacauccccugcuggccgg

SEQ ID NO: 3183464 - RNA, 19 nt, Human
ggacauaacugacuuaguu

SEQ ID NO: 3183465 - RNA, 14 nt, Human
ggacauccccugcu

SEQ ID NO: 3183466 - RNA, 22 nt, Human
ggacaguggagugcaaaaggcu

SEQ ID NO: 3183467 - RNA, 17 nt, Human
gcuguaucccaugagcc

SEQ ID NO: 3183468 - RNA, 15 nt, Human
gcugugcugcccugc

SEQ ID NO: 3183469 - RNA, 16 nt, Human
gcugugcugcccugcc

SEQ ID NO: 3183470 - RNA, 15 nt, Human
gcuguuggcuggggg

SEQ ID NO: 3183471 - RNA, 20 nt, Human
gcuguuggcugggggccuca

SEQ ID NO: 3183472 - RNA, 16 nt, Human
gcuguuggcugggggc

SEQ ID NO: 3183473 - RNA, 14 nt, Human
gcuguuggcugggg

SEQ ID NO: 3183474 - RNA, 16 nt, Human
gcuguugucucuucuc

SEQ ID NO: 3183475 - RNA, 17 nt, Human
gcuguugucucuucucc

SEQ ID NO: 3183476 - RNA, 16 nt, Human
gcugugcucuggacag

SEQ ID NO: 3183477 - RNA, 15 nt, Human
gcugugcucuggaca

SEQ ID NO: 3183478 - RNA, 14 nt, Human
gcugugcugcccug

SEQ ID NO: 3183479 - RNA, 13 nt, Human
gcugugcucugga

SEQ ID NO: 3183480 - RNA, 15 nt, Human
gcugugccucugccu

SEQ ID NO: 3183481 - RNA, 14 nt, Human
gcugugccucugcc

SEQ ID NO: 3183482 - RNA, 16 nt, Human
gcugugccucugccug

SEQ ID NO: 3183483 - RNA, 22 nt, Human
gcugggguggggaccucaggcc

SEQ ID NO: 3183484 - RNA, 18 nt, Human
gcuggguucuacccaggu

SEQ ID NO: 3183485 - RNA, 17 nt, Human
gcuggguucuacccagg

SEQ ID NO: 3183486 - RNA, 20 nt, Human
gcuggguucuacccaggugc

SEQ ID NO: 3183487 - RNA, 21 nt, Human
gcuggguucuacccaggugcu

SEQ ID NO: 3183488 - RNA, 23 nt, Human
gcugguaaaaugaagaauuuaaa

SEQ ID NO: 3183489 - RNA, 16 nt, Human
gcugguaaaaugaaga

SEQ ID NO: 3183490 - RNA, 18 nt, Human
gcugguaaaaugaagaau

SEQ ID NO: 3183491 - RNA, 14 nt, Human
gcugguaaaaugaa

SEQ ID NO: 3183492 - RNA, 20 nt, Human
gcugggcccacccaagcagg

SEQ ID NO: 3183493 - RNA, 17 nt, Human
gcugggguggggaccuc

SEQ ID NO: 3183494 - RNA, 19 nt, Human
gcugggguggggaccucag

SEQ ID NO: 3183495 - RNA, 20 nt, Human
gcugggaauaagugccagga

SEQ ID NO: 3183496 - RNA, 14 nt, Human
gcugggcagguugg

SEQ ID NO: 3183497 - RNA, 23 nt, Human
gcuggcuguuggcugggggccuc

SEQ ID NO: 3183498 - RNA, 20 nt, Human
gcuggcuguuggcugggggc

SEQ ID NO: 3183499 - RNA, 17 nt, Human
gcuggcuguuggcuggg

SEQ ID NO: 3183500 - RNA, 14 nt, Human
gcugggaaagcaua

SEQ ID NO: 3183501 - RNA, 13 nt, Human
gcuggacuuggag

SEQ ID NO: 3183502 - RNA, 14 nt, Human
gcuggcgugcagug

SEQ ID NO: 3183503 - RNA, 15 nt, Human
gcuggagaggagccc

SEQ ID NO: 3183504 - RNA, 14 nt, Human
gcuggagaaaaaua

SEQ ID NO: 3183505 - RNA, 19 nt, Human
gcuggcuguuggcuggggg

SEQ ID NO: 3183506 - RNA, 18 nt, Human
gcuggcuguuggcugggg

SEQ ID NO: 3183507 - RNA, 11 nt, Human
gcuggcugccu

SEQ ID NO: 3183508 - RNA, 20 nt, Human
gcuggcugccuuagaaccuu

SEQ ID NO: 3183509 - RNA, 14 nt, Human
gcuggcugccuuag

SEQ ID NO: 3183510 - RNA, 18 nt, Human
gcuggcgugcaguggugc

SEQ ID NO: 3183511 - RNA, 15 nt, Human
gcuggcgugcagugg

SEQ ID NO: 3183512 - RNA, 16 nt, Human
gcuggagaggagcccu

SEQ ID NO: 3183513 - RNA, 17 nt, Human
gcuggagaggagcccug

SEQ ID NO: 3183514 - RNA, 13 nt, Human
gcugcugaaacaa

SEQ ID NO: 3183515 - RNA, 23 nt, Human
gcugcaaaggguaucaggugcug

SEQ ID NO: 3183516 - RNA, 16 nt, Human
gcugcacccucaggca

SEQ ID NO: 3183517 - RNA, 18 nt, Human
gcugcacccucaggcagg

SEQ ID NO: 3183518 - RNA, 19 nt, Human
gcugcacccucaggcaggu

SEQ ID NO: 3183519 - RNA, 13 nt, Human
gcugcaccggcug

SEQ ID NO: 3183520 - RNA, 15 nt, Human
gcugcagccaggcca

SEQ ID NO: 3183521 - RNA, 22 nt, Human
gcugcagauacuacugaccaga

SEQ ID NO: 3183522 - RNA, 20 nt, Human
gcugcagauaaguggccuug

SEQ ID NO: 3183523 - RNA, 23 nt, Human
gcugcagccaggccacuggcccc

SEQ ID NO: 3183524 - RNA, 17 nt, Human
gcugccuaggauucaca

SEQ ID NO: 3183525 - RNA, 17 nt, Human
gcugccccuggcagccc

SEQ ID NO: 3183526 - RNA, 20 nt, Human
gcugccccuggcagccccug

SEQ ID NO: 3183527 - RNA, 18 nt, Human
gcugccccuggcagcccc

SEQ ID NO: 3183528 - RNA, 19 nt, Human
gcugccccuggcagccccu

SEQ ID NO: 3183529 - RNA, 23 nt, Human
gcugcucuugaacuccugaccuc

SEQ ID NO: 3183530 - RNA, 17 nt, Human
gcugccuguucagcucc

SEQ ID NO: 3183531 - RNA, 13 nt, Human
gcugccuguucag

SEQ ID NO: 3183532 - RNA, 12 nt, Human
gcugccuguuca

SEQ ID NO: 3183533 - RNA, 21 nt, Human
gcugccugggaucccucaucc

SEQ ID NO: 3183534 - RNA, 16 nt, Human
gcugccucucccauca

SEQ ID NO: 3183535 - RNA, 19 nt, Human
gcugccucggauccccuuc

SEQ ID NO: 3183536 - RNA, 21 nt, Human
gcugccucggauccccuuccu

SEQ ID NO: 3183537 - RNA, 20 nt, Human
gcugccucggauccccuucc

SEQ ID NO: 3183538 - RNA, 22 nt, Human
gcugccucggauccccuuccua

SEQ ID NO: 3183539 - RNA, 20 nt, Human
gcugccugggaucccucauc

SEQ ID NO: 3183540 - RNA, 16 nt, Human
gcugccugaaaaucaa

SEQ ID NO: 3183541 - RNA, 13 nt, Human
gcugccucaugcu

SEQ ID NO: 3183542 - RNA, 21 nt, Human
gcugagcacccagcucugucu

SEQ ID NO: 3183543 - RNA, 16 nt, Human
gcugagaggagagaga

SEQ ID NO: 3183544 - RNA, 18 nt, Human
gcugagggugagugggug

SEQ ID NO: 3183545 - RNA, 23 nt, Human
gcugagggugagugggugaauaa

SEQ ID NO: 3183546 - RNA, 14 nt, Human
gcugaggugggagg

SEQ ID NO: 3183547 - RNA, 14 nt, Human
gaacaaggcaaggc

SEQ ID NO: 3183548 - RNA, 15 nt, Human
gaacaaggcaaggcu

SEQ ID NO: 3183549 - RNA, 17 nt, Human
gaacaaggcaaggcugu

SEQ ID NO: 3183550 - RNA, 18 nt, Human
gaacaaggcaaggcuguc

SEQ ID NO: 3183551 - RNA, 21 nt, Human
gaacaaggcaaggcugucaau

SEQ ID NO: 3183552 - RNA, 22 nt, Human
gaaacugucuagcacuuccuug

SEQ ID NO: 3183553 - RNA, 11 nt, Human
gaaacuuggau

SEQ ID NO: 3183554 - RNA, 17 nt, Human
gaaagaacuaucuucau

SEQ ID NO: 3183555 - RNA, 21 nt, Human
gaaagaacuaucuucaucuga

SEQ ID NO: 3183556 - RNA, 20 nt, Human
gaaagaacuaucuucaucug

SEQ ID NO: 3183557 - RNA, 22 nt, Human
gaaacuuguucuuccaaagcag

SEQ ID NO: 3183558 - RNA, 16 nt, Human
gaaacuuguucuucca

SEQ ID NO: 3183559 - RNA, 16 nt, Human
gaaagaacuaucuuca

SEQ ID NO: 3183560 - RNA, 18 nt, Human
gaaagaaguggggacaga

SEQ ID NO: 3183561 - RNA, 15 nt, Human
gaaagaauguaaagc

SEQ ID NO: 3183562 - RNA, 14 nt, Human
gaaagaauguaaag

SEQ ID NO: 3183563 - RNA, 22 nt, Human
gaaauauuuuaauuuuuaaaug

SEQ ID NO: 3183564 - RNA, 16 nt, Human
gaaaucaaauaugcaa

SEQ ID NO: 3183565 - RNA, 21 nt, Human
gaaaucaaauaugcaaagcac

SEQ ID NO: 3183566 - RNA, 12 nt, Human
gaaaucaaagug

SEQ ID NO: 3183567 - RNA, 23 nt, Human
gaaauauuuuaauuuuuaaaugc

SEQ ID NO: 3183568 - RNA, 14 nt, Human
gaaaucaaagugcu

SEQ ID NO: 3183569 - RNA, 16 nt, Human
gaaaucaaagugcuau

SEQ ID NO: 3183570 - RNA, 13 nt, Human
gaaauauuuuaau

SEQ ID NO: 3183571 - RNA, 21 nt, Human
gaaaguacuucuccacccugc

SEQ ID NO: 3183572 - RNA, 19 nt, Human
gaaaguaaauaaaaggacu

SEQ ID NO: 3183573 - RNA, 20 nt, Human
gaaaguacauuuuuugaaau

SEQ ID NO: 3183574 - RNA, 13 nt, Human
gaaaguacauuuu

SEQ ID NO: 3183575 - RNA, 17 nt, Human
gaaaggcuccaggagca

SEQ ID NO: 3183576 - RNA, 18 nt, Human
gaaaggcuccaggagcag

SEQ ID NO: 3183577 - RNA, 19 nt, Human
gaaaggcuccaggagcagc

SEQ ID NO: 3183578 - RNA, 16 nt, Human
gaaaggcuccaggagc

SEQ ID NO: 3183579 - RNA, 18 nt, Human
gaaagacuaucuaaaugu

SEQ ID NO: 3183580 - RNA, 15 nt, Human
gaacaacauauacaa

SEQ ID NO: 3183581 - RNA, 23 nt, Human
gaacaaauuuacagagacagaaa

SEQ ID NO: 3183582 - RNA, 19 nt, Human
gaaauuuuucauauuuuaa

SEQ ID NO: 3183583 - RNA, 17 nt, Human
gaaauuuuucauauuuu

SEQ ID NO: 3183584 - RNA, 16 nt, Human
gaaauuuuucauauuu

SEQ ID NO: 3183585 - RNA, 15 nt, Human
gaaauuuuucauauu

SEQ ID NO: 3183586 - RNA, 13 nt, Human
gaaauuuuucaua

SEQ ID NO: 3183587 - RNA, 17 nt, Human
gaacaaauuuacagaga

SEQ ID NO: 3183588 - RNA, 18 nt, Human
gaacaaauuuacagagac

SEQ ID NO: 3183589 - RNA, 19 nt, Human
gaaauuuuuauuaaauuau

SEQ ID NO: 3183590 - RNA, 12 nt, Human
gaaauuuuucau

SEQ ID NO: 3183591 - RNA, 18 nt, Human
gaaaugaaagcagggacu

SEQ ID NO: 3183592 - RNA, 15 nt, Human
gaaaugaacacaaau

SEQ ID NO: 3183593 - RNA, 14 nt, Human
gaaaugaacacaaa

SEQ ID NO: 3183594 - RNA, 18 nt, Human
gaaauuuuuauuaaauua

SEQ ID NO: 3183595 - RNA, 18 nt, Human
gaaaugaagagcuguuga

SEQ ID NO: 3183596 - RNA, 13 nt, Human
gaaaugaagagcu

SEQ ID NO: 3183597 - RNA, 17 nt, Human
gaaaugaacacaaauua

SEQ ID NO: 3183598 - RNA, 23 nt, Human
gaaaucaaauaugcaaagcacug

SEQ ID NO: 3183599 - RNA, 17 nt, Human
gaaaucaaagugcuauu

SEQ ID NO: 3183600 - RNA, 16 nt, Human
gaaaucaaauguaaag

SEQ ID NO: 3183601 - RNA, 23 nt, Human
gaaaucaauaauuuguggugauu

SEQ ID NO: 3183602 - RNA, 19 nt, Human
gaaaucaauaguugaauua

SEQ ID NO: 3183603 - RNA, 17 nt, Human
gaaaucaaauguaaagu

SEQ ID NO: 3183604 - RNA, 17 nt, Human
gaaaugaaagcagggac

SEQ ID NO: 3183605 - RNA, 17 nt, Human
gaaaucaccgaaaacgu

SEQ ID NO: 3183606 - RNA, 22 nt, Human
cuuuuauuccugcccugcuguu

SEQ ID NO: 3183607 - RNA, 14 nt, Human
cuuuugucccagaa

SEQ ID NO: 3183608 - RNA, 17 nt, Human
cuuuugucuaugggacu

SEQ ID NO: 3183609 - RNA, 16 nt, Human
cuuuuggucuguguga

SEQ ID NO: 3183610 - RNA, 15 nt, Human
cuuuuggucugugug

SEQ ID NO: 3183611 - RNA, 22 nt, Human
cuuuugcucgaugcagacaggg

SEQ ID NO: 3183612 - RNA, 20 nt, Human
cuuuugcuugccaaaguaca

SEQ ID NO: 3183613 - RNA, 18 nt, Human
cuuuugcuuuaauuccau

SEQ ID NO: 3183614 - RNA, 14 nt, Human
cuuuugcuuuaauu

SEQ ID NO: 3183615 - RNA, 19 nt, Human
gaaaaaauauuuuccugcc

SEQ ID NO: 3183616 - RNA, 18 nt, Human
gaaaaaaaaagaaaaaag

SEQ ID NO: 3183617 - RNA, 17 nt, Human
gaaaaaaaaagaaaaaa

SEQ ID NO: 3183618 - RNA, 16 nt, Human
gaaaaaaaaagaaaaa

SEQ ID NO: 3183619 - RNA, 15 nt, Human
gaaaaaaaaagaaaa

SEQ ID NO: 3183620 - RNA, 15 nt, Human
gaaaaaaaaaaaagc

SEQ ID NO: 3183621 - RNA, 17 nt, Human
gaaaaaaaaaaagaaag

SEQ ID NO: 3183622 - RNA, 19 nt, Human
gaaaaaaaaaaugcugaac

SEQ ID NO: 3183623 - RNA, 18 nt, Human
gaaaaaaaaaaugcugaa

SEQ ID NO: 3183624 - RNA, 19 nt, Human
gaaaaaaaaaaagaaagaa

SEQ ID NO: 3183625 - RNA, 20 nt, Human
gaaaaaaaaaaugcugaaca

SEQ ID NO: 3183626 - RNA, 13 nt, Human
gaaaaaaaaagaa

SEQ ID NO: 3183627 - RNA, 12 nt, Human
gaaaaaaaaaga

SEQ ID NO: 3183628 - RNA, 13 nt, Human
cuuuuuuugaaac

SEQ ID NO: 3183629 - RNA, 22 nt, Human
cuuuuuuugagcgacaucucug

SEQ ID NO: 3183630 - RNA, 20 nt, Human
cuuuuguuacucuugggaca

SEQ ID NO: 3183631 - RNA, 18 nt, Human
cuuuuguuacucuuggga

SEQ ID NO: 3183632 - RNA, 23 nt, Human
cuuuuuuuugacagcuuccuguc

SEQ ID NO: 3183633 - RNA, 22 nt, Human
cuuuuuuuugacagcuuccugu

SEQ ID NO: 3183634 - RNA, 13 nt, Human
cuuuuguccugca

SEQ ID NO: 3183635 - RNA, 21 nt, Human
cuuuuguccugcaucaucuug

SEQ ID NO: 3183636 - RNA, 14 nt, Human
cuuuuguguuccaa

SEQ ID NO: 3183637 - RNA, 18 nt, Human
gaaaauuaggauuucaug

SEQ ID NO: 3183638 - RNA, 18 nt, Human
gaaaagagacaggcaggu

SEQ ID NO: 3183639 - RNA, 13 nt, Human
gaaaagagagaaa

SEQ ID NO: 3183640 - RNA, 21 nt, Human
gaaaagacuccaaagaaaugu

SEQ ID NO: 3183641 - RNA, 13 nt, Human
gaaaagagacagg

SEQ ID NO: 3183642 - RNA, 17 nt, Human
gaaaagagacaggcagg

SEQ ID NO: 3183643 - RNA, 18 nt, Human
gaaaagacuccaaagaaa

SEQ ID NO: 3183644 - RNA, 20 nt, Human
gaaaagacuccaaagaaaug

SEQ ID NO: 3183645 - RNA, 14 nt, Human
gaaaaaauuuaaaa

SEQ ID NO: 3183646 - RNA, 12 nt, Human
gaaaacuuaguu

SEQ ID NO: 3183647 - RNA, 13 nt, Human
gaaaacuuaguuu

SEQ ID NO: 3183648 - RNA, 13 nt, Human
gaaaacucuauuu

SEQ ID NO: 3183649 - RNA, 19 nt, Human
gaaaacugcaacuuguaaa

SEQ ID NO: 3183650 - RNA, 14 nt, Human
gaaaauuuuaaaaa

SEQ ID NO: 3183651 - RNA, 23 nt, Human
gaaacaaacaaaagcugaacaca

SEQ ID NO: 3183652 - RNA, 12 nt, Human
cuugauucauaa

SEQ ID NO: 3183653 - RNA, 15 nt, Human
cuugauggauuuuca

SEQ ID NO: 3183654 - RNA, 18 nt, Human
cuugccgucuaccugagg

SEQ ID NO: 3183655 - RNA, 19 nt, Human
cuugauucauaaugacuua

SEQ ID NO: 3183656 - RNA, 17 nt, Human
cuugauucccuuguuau

SEQ ID NO: 3183657 - RNA, 22 nt, Human
cuugauucguagauuuaauaac

SEQ ID NO: 3183658 - RNA, 13 nt, Human
cuugauuggaagg

SEQ ID NO: 3183659 - RNA, 12 nt, Human
cuugauuggaag

SEQ ID NO: 3183660 - RNA, 16 nt, Human
cuuggcccuggcagcc

SEQ ID NO: 3183661 - RNA, 13 nt, Human
cuuggcccuggca

SEQ ID NO: 3183662 - RNA, 15 nt, Human
cuuggcccagggggc

SEQ ID NO: 3183663 - RNA, 23 nt, Human
cuuggcccagggggcuuccugag

SEQ ID NO: 3183664 - RNA, 22 nt, Human
cuuggcccagggggcuuccuga

SEQ ID NO: 3183665 - RNA, 21 nt, Human
cuuggcccagggggcuuccug

SEQ ID NO: 3183666 - RNA, 18 nt, Human
cuuggcccagggggcuuc

SEQ ID NO: 3183667 - RNA, 20 nt, Human
cuuggcgcugccccuggcag

SEQ ID NO: 3183668 - RNA, 23 nt, Human
cuuggcgcugccccuggcagccc

SEQ ID NO: 3183669 - RNA, 21 nt, Human
cuuggcgcugccccuggcagc

SEQ ID NO: 3183670 - RNA, 22 nt, Human
cuuggcgcugccccuggcagcc

SEQ ID NO: 3183671 - RNA, 14 nt, Human
cuuggauugucccc

SEQ ID NO: 3183672 - RNA, 18 nt, Human
cuuggauuguccccgacc

SEQ ID NO: 3183673 - RNA, 20 nt, Human
cuuggauuguccccgacccu

SEQ ID NO: 3183674 - RNA, 15 nt, Human
cuuggauuguccccg

SEQ ID NO: 3183675 - RNA, 20 nt, Human
cuugccucagcuuccccagu

SEQ ID NO: 3183676 - RNA, 17 nt, Human
cuuucaauaggaaaaac

SEQ ID NO: 3183677 - RNA, 16 nt, Human
cuuucacaaccuucug

SEQ ID NO: 3183678 - RNA, 20 nt, Human
cuuuaaugucacaggcaggu

SEQ ID NO: 3183679 - RNA, 19 nt, Human
cuuuaaugucacaggcagg

SEQ ID NO: 3183680 - RNA, 18 nt, Human
cuuuaaugucacaggcag

SEQ ID NO: 3183681 - RNA, 17 nt, Human
cuuuaaugucacaggca

SEQ ID NO: 3183682 - RNA, 14 nt, Human
cuuucaauaggaaa

SEQ ID NO: 3183683 - RNA, 15 nt, Human
cuuucaauaggaaaa

SEQ ID NO: 3183684 - RNA, 22 nt, Human
cuuuaaugucacaggcaggucc

SEQ ID NO: 3183685 - RNA, 21 nt, Human
cuugucuuuggacccugaggc

SEQ ID NO: 3183686 - RNA, 22 nt, Human
cuugucuuuggacccugaggcc

SEQ ID NO: 3183687 - RNA, 18 nt, Human
cuuuaacuuaguuuugca

SEQ ID NO: 3183688 - RNA, 21 nt, Human
cuugucuuccuauuucagaag

SEQ ID NO: 3183689 - RNA, 19 nt, Human
cuugucuuccuauuucaga

SEQ ID NO: 3183690 - RNA, 16 nt, Human
cuugugaaaauaauug

SEQ ID NO: 3183691 - RNA, 15 nt, Human
cuugugaaaauaauu

SEQ ID NO: 3183692 - RNA, 22 nt, Human
cuuuaaugauaugcuuguaacu

SEQ ID NO: 3183693 - RNA, 21 nt, Human
cuuuaaugauaugcuuguaac

SEQ ID NO: 3183694 - RNA, 16 nt, Human
cuuuaaugauaugcuu

SEQ ID NO: 3183695 - RNA, 20 nt, Human
cuugguuccagccugccacu

SEQ ID NO: 3183696 - RNA, 20 nt, Human
cuugguucccauuugcuccu

SEQ ID NO: 3183697 - RNA, 19 nt, Human
cuugguuccagccugccac

SEQ ID NO: 3183698 - RNA, 17 nt, Human
cuugguuccagccugcc

SEQ ID NO: 3183699 - RNA, 16 nt, Human
cuugguucccauuugc

SEQ ID NO: 3183700 - RNA, 23 nt, Human
cuuggucucagugucaaugcagc

SEQ ID NO: 3183701 - RNA, 22 nt, Human
cuugguccugcugcaguugcca

SEQ ID NO: 3183702 - RNA, 20 nt, Human
cuuggugucgggcaugacac

SEQ ID NO: 3183703 - RNA, 13 nt, Human
cuugguuauauuu

SEQ ID NO: 3183704 - RNA, 13 nt, Human
cuugguuccuggg

SEQ ID NO: 3183705 - RNA, 19 nt, Human
cuugguuccuggggcaucc

SEQ ID NO: 3183706 - RNA, 18 nt, Human
cuugguuccuggggcauc

SEQ ID NO: 3183707 - RNA, 17 nt, Human
cuugguuccuggggcau

SEQ ID NO: 3183708 - RNA, 16 nt, Human
cuugguuccuggggca

SEQ ID NO: 3183709 - RNA, 15 nt, Human
cuugguuccuggggc

SEQ ID NO: 3183710 - RNA, 19 nt, Human
cuugucuuuggacccugag

SEQ ID NO: 3183711 - RNA, 21 nt, Human
cuugucuguagcgucuguaua

SEQ ID NO: 3183712 - RNA, 17 nt, Human
cuugucuuccuauuuca

SEQ ID NO: 3183713 - RNA, 20 nt, Human
cuugucuuuggacccugagg

SEQ ID NO: 3183714 - RNA, 13 nt, Human
cuugucuguagau

SEQ ID NO: 3183715 - RNA, 16 nt, Human
cuugguccugcugcag

SEQ ID NO: 3183716 - RNA, 17 nt, Human
cuugguccugcugcagu

SEQ ID NO: 3183717 - RNA, 18 nt, Human
cuugguccugcugcaguu

SEQ ID NO: 3183718 - RNA, 20 nt, Human
cuugguccugcugcaguugc

SEQ ID NO: 3183719 - RNA, 15 nt, Human
cuugguccugcugca

SEQ ID NO: 3183720 - RNA, 18 nt, Human
cuucccacaaagaauaua

SEQ ID NO: 3183721 - RNA, 23 nt, Human
cuucccaaaugugugcccagcuu

SEQ ID NO: 3183722 - RNA, 17 nt, Human
cuucccaacuugccuuu

SEQ ID NO: 3183723 - RNA, 20 nt, Human
cuucccaaaugugugcccag

SEQ ID NO: 3183724 - RNA, 15 nt, Human
cuuccauuucugccu

SEQ ID NO: 3183725 - RNA, 20 nt, Human
cuuccauuucugccuuuugu

SEQ ID NO: 3183726 - RNA, 16 nt, Human
cuuccauuucugccuu

SEQ ID NO: 3183727 - RNA, 19 nt, Human
cuuacauaaacaucagguu

SEQ ID NO: 3183728 - RNA, 20 nt, Human
cuuacauaaaccauuuuugu

SEQ ID NO: 3183729 - RNA, 17 nt, Human
cuuacauaaacaucagg

SEQ ID NO: 3183730 - RNA, 14 nt, Human
cuuacaggugauua

SEQ ID NO: 3183731 - RNA, 15 nt, Human
cuuaaauauagcagu

SEQ ID NO: 3183732 - RNA, 21 nt, Human
cuuccaucugauuccagcaca

SEQ ID NO: 3183733 - RNA, 20 nt, Human
cuuacauuagcaguuugcuu

SEQ ID NO: 3183734 - RNA, 22 nt, Human
cuucuugaauggcaauguuuug

SEQ ID NO: 3183735 - RNA, 13 nt, Human
cuucuugaauaua

SEQ ID NO: 3183736 - RNA, 16 nt, Human
cuucuugaauauaaaa

SEQ ID NO: 3183737 - RNA, 19 nt, Human
cuucuugaauauaaaaaau

SEQ ID NO: 3183738 - RNA, 13 nt, Human
cuucuugaaaucc

SEQ ID NO: 3183739 - RNA, 12 nt, Human
cuucuucuguaa

SEQ ID NO: 3183740 - RNA, 13 nt, Human
cuucuucuguaau

SEQ ID NO: 3183741 - RNA, 15 nt, Human
cuucuucuguaauau

SEQ ID NO: 3183742 - RNA, 17 nt, Human
cuucuucuguaauauuu

SEQ ID NO: 3183743 - RNA, 18 nt, Human
cuucuucuguaauauuua

SEQ ID NO: 3183744 - RNA, 22 nt, Human
cuucuucuguaauauuuacaau

SEQ ID NO: 3183745 - RNA, 19 nt, Human
cuucuucuguccaagcaga

SEQ ID NO: 3183746 - RNA, 13 nt, Human
cuucuucugucca

SEQ ID NO: 3183747 - RNA, 21 nt, Human
cuucuucuguccaagcagauu

SEQ ID NO: 3183748 - RNA, 18 nt, Human
cuucugacccaugcugcc

SEQ ID NO: 3183749 - RNA, 16 nt, Human
cuucugacccaugcug

SEQ ID NO: 3183750 - RNA, 17 nt, Human
cuucugacccaugcugc

SEQ ID NO: 3183751 - RNA, 16 nt, Human
cuucuuauacauuuga

SEQ ID NO: 3183752 - RNA, 13 nt, Human
cuucuuauacauu

SEQ ID NO: 3183753 - RNA, 15 nt, Human
cuuccucccucauuc

SEQ ID NO: 3183754 - RNA, 11 nt, Human
cuuccucugcu

SEQ ID NO: 3183755 - RNA, 21 nt, Human
cuuccucuccacugccuucga

SEQ ID NO: 3183756 - RNA, 19 nt, Human
cuuccucuccacugccuuc

SEQ ID NO: 3183757 - RNA, 17 nt, Human
cuuccucuccacugccu

SEQ ID NO: 3183758 - RNA, 16 nt, Human
cuuccucuccacugcc

SEQ ID NO: 3183759 - RNA, 13 nt, Human
cuuccucugcuga

SEQ ID NO: 3183760 - RNA, 12 nt, Human
cuuccucugcug

SEQ ID NO: 3183761 - RNA, 16 nt, Human
cuuccucugcuaaauu

SEQ ID NO: 3183762 - RNA, 14 nt, Human
cuuccucugcuaaa

SEQ ID NO: 3183763 - RNA, 15 nt, Human
cuuccucugcucccc

SEQ ID NO: 3183764 - RNA, 14 nt, Human
cuuccucugcuccc

SEQ ID NO: 3183765 - RNA, 13 nt, Human
cuuccucugcucc

SEQ ID NO: 3183766 - RNA, 12 nt, Human
cuuccucugcuc

SEQ ID NO: 3183767 - RNA, 14 nt, Human
cuuccucccucccu

SEQ ID NO: 3183768 - RNA, 15 nt, Human
cuuccucuccacugc

SEQ ID NO: 3183769 - RNA, 13 nt, Human
cuuccucccuccc

SEQ ID NO: 3183770 - RNA, 12 nt, Human
cuuccucccucc

SEQ ID NO: 3183771 - RNA, 17 nt, Human
cuucuaccucuuggcug

SEQ ID NO: 3183772 - RNA, 16 nt, Human
cuucuauagcaucacu

SEQ ID NO: 3183773 - RNA, 18 nt, Human
cuucuauagcaucacuua

SEQ ID NO: 3183774 - RNA, 12 nt, Human
cuucucugccca

SEQ ID NO: 3183775 - RNA, 19 nt, Human
cuucucugcccagcuuuuc

SEQ ID NO: 3183776 - RNA, 15 nt, Human
cuucugacccaugcu

SEQ ID NO: 3183777 - RNA, 22 nt, Human
cuucugaacuuggcgcugcccc

SEQ ID NO: 3183778 - RNA, 19 nt, Human
cuucugaacuuggcgcugc

SEQ ID NO: 3183779 - RNA, 24 nt, Human
cugccuccucuucaacugaccagc

SEQ ID NO: 3183780 - RNA, 14 nt, Human
cugccuccuuugug

SEQ ID NO: 3183781 - RNA, 19 nt, Human
cugccuccuugauauuugu

SEQ ID NO: 3183782 - RNA, 17 nt, Human
cugccuccuuugugagg

SEQ ID NO: 3183783 - RNA, 21 nt, Human
cugccuccuuugugaggaagc

SEQ ID NO: 3183784 - RNA, 23 nt, Human
cugccuccuuugugaggaagccg

SEQ ID NO: 3183785 - RNA, 14 nt, Human
cugccucgaacugg

SEQ ID NO: 3183786 - RNA, 20 nt, Human
cugccucgaacuggcugcaa

SEQ ID NO: 3183787 - RNA, 19 nt, Human
cugccucgaacuggcugca

SEQ ID NO: 3183788 - RNA, 20 nt, Human
cugccucggauccccuuccu

SEQ ID NO: 3183789 - RNA, 11 nt, Human
cugcugagggu

SEQ ID NO: 3183790 - RNA, 13 nt, Human
cugcugagccgca

SEQ ID NO: 3183791 - RNA, 15 nt, Human
cugcugagccgcaga

SEQ ID NO: 3183792 - RNA, 14 nt, Human
cugcugagccgcag

SEQ ID NO: 3183793 - RNA, 18 nt, Human
cugcugagccgcagagaa

SEQ ID NO: 3183794 - RNA, 20 nt, Human
cugcugagacugcugaguga

SEQ ID NO: 3183795 - RNA, 17 nt, Human
cugcuacugccaaccuc

SEQ ID NO: 3183796 - RNA, 15 nt, Human
cugcuacugccaacc

SEQ ID NO: 3183797 - RNA, 14 nt, Human
cugcuaccuugccc

SEQ ID NO: 3183798 - RNA, 17 nt, Human
cugcuaccuugccccaa

SEQ ID NO: 3183799 - RNA, 12 nt, Human
cugcuacugcca

SEQ ID NO: 3183800 - RNA, 19 nt, Human
cugccuguucccauucuug

SEQ ID NO: 3183801 - RNA, 15 nt, Human
cugccuguucccauu

SEQ ID NO: 3183802 - RNA, 23 nt, Human
cugccuguucagcuccagcucac

SEQ ID NO: 3183803 - RNA, 20 nt, Human
cugccuguucagcuccagcu

SEQ ID NO: 3183804 - RNA, 24 nt, Human
cugcugaaggcucgagcaugccug

SEQ ID NO: 3183805 - RNA, 23 nt, Human
cugcugaaggcucgagcaugccu

SEQ ID NO: 3183806 - RNA, 18 nt, Human
cugcugaaggcucgagca

SEQ ID NO: 3183807 - RNA, 17 nt, Human
cugcuaucaaagagguu

SEQ ID NO: 3183808 - RNA, 19 nt, Human
cugcuauuuuccuguucua

SEQ ID NO: 3183809 - RNA, 19 nt, Human
cugcccuuaccugccagga

SEQ ID NO: 3183810 - RNA, 20 nt, Human
cugcccugguuuccugcccu

SEQ ID NO: 3183811 - RNA, 17 nt, Human
cugcccuuaccugccag

SEQ ID NO: 3183812 - RNA, 12 nt, Human
cugcccuguggg

SEQ ID NO: 3183813 - RNA, 11 nt, Human
cugcccugugg

SEQ ID NO: 3183814 - RNA, 22 nt, Human
cugcccuuaccugccaggaagc

SEQ ID NO: 3183815 - RNA, 23 nt, Human
cugcccuuaccugccaggaagcc

SEQ ID NO: 3183816 - RNA, 24 nt, Human
cugcccugugaguacuacaguccu

SEQ ID NO: 3183817 - RNA, 13 nt, Human
cugcccugugagu

SEQ ID NO: 3183818 - RNA, 18 nt, Human
cugcccugguuuccugcc

SEQ ID NO: 3183819 - RNA, 19 nt, Human
cugcccugguuuccugccc

SEQ ID NO: 3183820 - RNA, 17 nt, Human
cugcccugguuuccugc

SEQ ID NO: 3183821 - RNA, 23 nt, Human
cugcccuggugcugccacacuuc

SEQ ID NO: 3183822 - RNA, 15 nt, Human
cugcccuggugcugc

SEQ ID NO: 3183823 - RNA, 14 nt, Human
cugcccuggugcug

SEQ ID NO: 3183824 - RNA, 13 nt, Human
cugcccuggugcu

SEQ ID NO: 3183825 - RNA, 12 nt, Human
cugcccuggugc

SEQ ID NO: 3183826 - RNA, 19 nt, Human
cugcccccucugcccugcg

SEQ ID NO: 3183827 - RNA, 19 nt, Human
cuggauccaucaggccacu

SEQ ID NO: 3183828 - RNA, 20 nt, Human
cuggaucuccauucucucag

SEQ ID NO: 3183829 - RNA, 16 nt, Human
cuggaugcagccucac

SEQ ID NO: 3183830 - RNA, 17 nt, Human
cuggaugcagccucaca

SEQ ID NO: 3183831 - RNA, 18 nt, Human
cuggaugcagccucacag

SEQ ID NO: 3183832 - RNA, 15 nt, Human
cuggaugcagccuca

SEQ ID NO: 3183833 - RNA, 19 nt, Human
cugcuucaaggauccugag

SEQ ID NO: 3183834 - RNA, 13 nt, Human
cugcuucaaggau

SEQ ID NO: 3183835 - RNA, 14 nt, Human
cugcuucaaggauc

SEQ ID NO: 3183836 - RNA, 16 nt, Human
cugcuucaaggauccu

SEQ ID NO: 3183837 - RNA, 16 nt, Human
cuggaaaccugucuga

SEQ ID NO: 3183838 - RNA, 14 nt, Human
cugcuuccagugag

SEQ ID NO: 3183839 - RNA, 23 nt, Human
cugcuucagccucccgaguagcu

SEQ ID NO: 3183840 - RNA, 14 nt, Human
cuggagaaaaugga

SEQ ID NO: 3183841 - RNA, 15 nt, Human
cuggagaacuagaga

SEQ ID NO: 3183842 - RNA, 14 nt, Human
cuggagaacuagag

SEQ ID NO: 3183843 - RNA, 12 nt, Human
cuggaucaguaa

SEQ ID NO: 3183844 - RNA, 13 nt, Human
cuggaucaguaaa

SEQ ID NO: 3183845 - RNA, 14 nt, Human
cuggaucaguaaaa

SEQ ID NO: 3183846 - RNA, 23 nt, Human
cuggaucaguaaaauuauacugu

SEQ ID NO: 3183847 - RNA, 17 nt, Human
cuggauccaucaggcca

SEQ ID NO: 3183848 - RNA, 21 nt, Human
cuggagaaaauggacguguua

SEQ ID NO: 3183849 - RNA, 23 nt, Human
cuggacucuaaagucuguugauu

SEQ ID NO: 3183850 - RNA, 23 nt, Human
cuggacuccucuguccaggcacu

SEQ ID NO: 3183851 - RNA, 22 nt, Human
cuggacuccucuguccaggcac

SEQ ID NO: 3183852 - RNA, 20 nt, Human
cuggacuccucuguccaggc

SEQ ID NO: 3183853 - RNA, 19 nt, Human
cuggcagaguugaagacag

SEQ ID NO: 3183854 - RNA, 20 nt, Human
cuggcagaguugaagacaga

SEQ ID NO: 3183855 - RNA, 21 nt, Human
cuggcagaguugaagacagag

SEQ ID NO: 3183856 - RNA, 13 nt, Human
cuggcagccccug

SEQ ID NO: 3183857 - RNA, 15 nt, Human
cuggcagcaccgccu

SEQ ID NO: 3183858 - RNA, 22 nt, Human
cuggcagaguugaagacagagc

SEQ ID NO: 3183859 - RNA, 23 nt, Human
cuggcagccccuguucuggcaga

SEQ ID NO: 3183860 - RNA, 13 nt, Human
cuggcagccgugc

SEQ ID NO: 3183861 - RNA, 18 nt, Human
cuggcagcccgcaucagc

SEQ ID NO: 3183862 - RNA, 13 nt, Human
cuggcagcccgca

SEQ ID NO: 3183863 - RNA, 20 nt, Human
cuggcagcaccgccucuucc

SEQ ID NO: 3183864 - RNA, 19 nt, Human
cuggcagcaccgccucuuc

SEQ ID NO: 3183865 - RNA, 23 nt, Human
cuggcccuaugcuuccggccucc

SEQ ID NO: 3183866 - RNA, 15 nt, Human
cuggcagcucagaga

SEQ ID NO: 3183867 - RNA, 19 nt, Human
cuggcagcccgcaucagcu

SEQ ID NO: 3183868 - RNA, 17 nt, Human
cuggcagcucagagagg

SEQ ID NO: 3183869 - RNA, 19 nt, Human
cuggcagcucagagagggu

SEQ ID NO: 3183870 - RNA, 16 nt, Human
cuggcagcucagagag

SEQ ID NO: 3183871 - RNA, 18 nt, Human
cuggcagccgugccuuca

SEQ ID NO: 3183872 - RNA, 17 nt, Human
cuggcagccgugccuuc

SEQ ID NO: 3183873 - RNA, 18 nt, Human
cuggcucccacaggcccu

SEQ ID NO: 3183874 - RNA, 19 nt, Human
cuggcucccacaggcccuu

SEQ ID NO: 3183875 - RNA, 22 nt, Human
cuggcucccacaggcccuuccu

SEQ ID NO: 3183876 - RNA, 14 nt, Human
cuggcucccucacu

SEQ ID NO: 3183877 - RNA, 13 nt, Human
cuggcucccucac

SEQ ID NO: 3183878 - RNA, 13 nt, Human
cuggcuccccugc

SEQ ID NO: 3183879 - RNA, 15 nt, Human
cuggcuccccugcag

SEQ ID NO: 3183880 - RNA, 16 nt, Human
cuggcuccccugcagc

SEQ ID NO: 3183881 - RNA, 17 nt, Human
cuggcuccccugcagcc

SEQ ID NO: 3183882 - RNA, 19 nt, Human
cuggcuccccugcagcccu

SEQ ID NO: 3183883 - RNA, 21 nt, Human
cuggcuccccugcagcccugg

SEQ ID NO: 3183884 - RNA, 13 nt, Human
cuggcuccccugg

SEQ ID NO: 3183885 - RNA, 14 nt, Human
cuggcuccccuggg

SEQ ID NO: 3183886 - RNA, 15 nt, Human
cuggcuccccugggg

SEQ ID NO: 3183887 - RNA, 16 nt, Human
cuggcuccccuggggu

SEQ ID NO: 3183888 - RNA, 16 nt, Human
cuggcccucucugaag

SEQ ID NO: 3183889 - RNA, 15 nt, Human
cuggcccucucugaa

SEQ ID NO: 3183890 - RNA, 17 nt, Human
cugggacuacaggugug

SEQ ID NO: 3183891 - RNA, 21 nt, Human
cugggacuacaggcacccacc

SEQ ID NO: 3183892 - RNA, 17 nt, Human
cugggacuacaggcacc

SEQ ID NO: 3183893 - RNA, 16 nt, Human
cugggacuacaggcac

SEQ ID NO: 3183894 - RNA, 14 nt, Human
cuggcucuuccagg

SEQ ID NO: 3183895 - RNA, 15 nt, Human
cuggcucuuccaggc

SEQ ID NO: 3183896 - RNA, 13 nt, Human
cuggcucuuccag

SEQ ID NO: 3183897 - RNA, 21 nt, Human
cuggcucccucacucucagga

SEQ ID NO: 3183898 - RNA, 20 nt, Human
cuggcucccucacucucagg

SEQ ID NO: 3183899 - RNA, 18 nt, Human
cuggcucccucacucuca

SEQ ID NO: 3183900 - RNA, 18 nt, Human
cuguugcccaggcuggcg

SEQ ID NO: 3183901 - RNA, 12 nt, Human
cuguuggccagu

SEQ ID NO: 3183902 - RNA, 21 nt, Human
cuguugcugauuuuauucuug

SEQ ID NO: 3183903 - RNA, 16 nt, Human
cuguugcugauuuuau

SEQ ID NO: 3183904 - RNA, 22 nt, Human
cuguugcugauuuuauucuuga

SEQ ID NO: 3183905 - RNA, 15 nt, Human
cuguugcugauuuua

SEQ ID NO: 3183906 - RNA, 14 nt, Human
cuguugcugauuuu

SEQ ID NO: 3183907 - RNA, 18 nt, Human
cuguugucucuucuccuu

SEQ ID NO: 3183908 - RNA, 17 nt, Human
cuguugucucuucuccu

SEQ ID NO: 3183909 - RNA, 15 nt, Human
cuguugucucuucuc

SEQ ID NO: 3183910 - RNA, 14 nt, Human
cuguugucucuucu

SEQ ID NO: 3183911 - RNA, 13 nt, Human
cuuaaaaaugguu

SEQ ID NO: 3183912 - RNA, 20 nt, Human
cuuaaaaaugguuuaaaugg

SEQ ID NO: 3183913 - RNA, 12 nt, Human
cuuaaaaauggu

SEQ ID NO: 3183914 - RNA, 21 nt, Human
cuuaaaagcuaucuucaugua

SEQ ID NO: 3183915 - RNA, 22 nt, Human
cuuaaaagcuaucuucauguaa

SEQ ID NO: 3183916 - RNA, 24 nt, Human
cuuaaaagcuaucuucauguaaau

SEQ ID NO: 3183917 - RNA, 23 nt, Human
cuuaaaauaaaacacuguuuccc

SEQ ID NO: 3183918 - RNA, 18 nt, Human
cuuaaaagaggaaaauga

SEQ ID NO: 3183919 - RNA, 12 nt, Human
cuuaaaacuagg

SEQ ID NO: 3183920 - RNA, 21 nt, Human
cuuaaaacuaggcauuuguaa

SEQ ID NO: 3183921 - RNA, 22 nt, Human
cuuaaaacuaggcauuuguaaa

SEQ ID NO: 3183922 - RNA, 23 nt, Human
cuuaaaacuaggcauuuguaaau

SEQ ID NO: 3183923 - RNA, 19 nt, Human
cuguuaucccugccugguc

SEQ ID NO: 3183924 - RNA, 21 nt, Human
cuguuaucauuuuuuccuguu

SEQ ID NO: 3183925 - RNA, 20 nt, Human
cuguuaucauuuuuuccugu

SEQ ID NO: 3183926 - RNA, 19 nt, Human
cuguuaucauuuuuuccug

SEQ ID NO: 3183927 - RNA, 19 nt, Human
cuguucacagccagacugg

SEQ ID NO: 3183928 - RNA, 12 nt, Human
cuguucacagcc

SEQ ID NO: 3183929 - RNA, 22 nt, Human
cuguucacagccagacuggcac

SEQ ID NO: 3183930 - RNA, 15 nt, Human
cuguucagcuccagc

SEQ ID NO: 3183931 - RNA, 14 nt, Human
cuguucagcuccag

SEQ ID NO: 3183932 - RNA, 12 nt, Human
cuguucagcugg

SEQ ID NO: 3183933 - RNA, 22 nt, Human
cuguucagcuccagcucaccag

SEQ ID NO: 3183934 - RNA, 19 nt, Human
cuguucagcuccagcucac

SEQ ID NO: 3183935 - RNA, 18 nt, Human
cuguucagcuccagcuca

SEQ ID NO: 3183936 - RNA, 16 nt, Human
cuguucagcuccagcu

SEQ ID NO: 3183937 - RNA, 21 nt, Human
cuguuauagguccuuuagaaa

SEQ ID NO: 3183938 - RNA, 18 nt, Human
cuguuauagguccuuuag

SEQ ID NO: 3183939 - RNA, 13 nt, Human
cuguuacugucuu

SEQ ID NO: 3183940 - RNA, 20 nt, Human
cuguuagaugcuacuaagaa

SEQ ID NO: 3183941 - RNA, 17 nt, Human
cuguuacugucuucagu

SEQ ID NO: 3183942 - RNA, 20 nt, Human
cugugucaguuuauguuuug

SEQ ID NO: 3183943 - RNA, 19 nt, Human
cugugucaguuuauguuuu

SEQ ID NO: 3183944 - RNA, 22 nt, Human
cugugucagguggggcagcuug

SEQ ID NO: 3183945 - RNA, 16 nt, Human
cugugucaguuuaugu

SEQ ID NO: 3183946 - RNA, 15 nt, Human
cugugucaguuuaug

SEQ ID NO: 3183947 - RNA, 22 nt, Human
cuguguauauuugauuuauuaa

SEQ ID NO: 3183948 - RNA, 18 nt, Human
cuguguauauuugauuua

SEQ ID NO: 3183949 - RNA, 20 nt, Human
cuguguauauuugauuuauu

SEQ ID NO: 3183950 - RNA, 12 nt, Human
cuguguauauuu

SEQ ID NO: 3183951 - RNA, 15 nt, Human
cuguguauauuugau

SEQ ID NO: 3183952 - RNA, 16 nt, Human
cuguguauauuugauu

SEQ ID NO: 3183953 - RNA, 18 nt, Human
cugugcucuggacaggca

SEQ ID NO: 3183954 - RNA, 16 nt, Human
cugugaacugaacucu

SEQ ID NO: 3183955 - RNA, 13 nt, Human
cugugaacugaac

SEQ ID NO: 3183956 - RNA, 15 nt, Human
cugugaacugaacuc

SEQ ID NO: 3183957 - RNA, 21 nt, Human
cugugagaugcuagaacuccc

SEQ ID NO: 3183958 - RNA, 17 nt, Human
cugugaauccagugaaa

SEQ ID NO: 3183959 - RNA, 23 nt, Human
cugugagaugcuagaacucccuu

SEQ ID NO: 3183960 - RNA, 13 nt, Human
cugugagaugugu

SEQ ID NO: 3183961 - RNA, 15 nt, Human
cugugcucuggacag

SEQ ID NO: 3183962 - RNA, 17 nt, Human
cugugcucuggacaggc

SEQ ID NO: 3183963 - RNA, 23 nt, Human
cuggugaccuuccaagagccuga

SEQ ID NO: 3183964 - RNA, 22 nt, Human
cuggugaccuuccaagagccug

SEQ ID NO: 3183965 - RNA, 22 nt, Human
cuggugacaugucuuuucuugc

SEQ ID NO: 3183966 - RNA, 21 nt, Human
cuggucucgaacuccugaccu

SEQ ID NO: 3183967 - RNA, 16 nt, Human
cuguacuucuugaaua

SEQ ID NO: 3183968 - RNA, 17 nt, Human
cuguacuucuugaauau

SEQ ID NO: 3183969 - RNA, 15 nt, Human
cuguagagugggagc

SEQ ID NO: 3183970 - RNA, 17 nt, Human
cuguagauaauuaacca

SEQ ID NO: 3183971 - RNA, 16 nt, Human
cuguagauaauuaacc

SEQ ID NO: 3183972 - RNA, 17 nt, Human
cuguaaaucuaacauua

SEQ ID NO: 3183973 - RNA, 20 nt, Human
cuguaaaucuaacauuauua

SEQ ID NO: 3183974 - RNA, 20 nt, Human
cugguuuuuggauuaaauua

SEQ ID NO: 3183975 - RNA, 22 nt, Human
cugucuaaugaaaccugugucu

SEQ ID NO: 3183976 - RNA, 15 nt, Human
cugucguuaaaaaca

SEQ ID NO: 3183977 - RNA, 16 nt, Human
cuguccuguugauuaa

SEQ ID NO: 3183978 - RNA, 20 nt, Human
cuguccuguugauuaauuuc

SEQ ID NO: 3183979 - RNA, 19 nt, Human
cugucauugcuucuucuga

SEQ ID NO: 3183980 - RNA, 15 nt, Human
cugucaggaggcaga

SEQ ID NO: 3183981 - RNA, 12 nt, Human
cugucaggaggc

SEQ ID NO: 3183982 - RNA, 20 nt, Human
cugucagggcaguacaaugu

SEQ ID NO: 3183983 - RNA, 21 nt, Human
cuguagccuauuuuuuuagau

SEQ ID NO: 3183984 - RNA, 14 nt, Human
cugucauuugagca

SEQ ID NO: 3183985 - RNA, 22 nt, Human
cugucaucugagaaugaacaaa

SEQ ID NO: 3183986 - RNA, 14 nt, Human
cuguccugggagug

SEQ ID NO: 3183987 - RNA, 13 nt, Human
cuguccugggagu

SEQ ID NO: 3183988 - RNA, 20 nt, Human
cuguccugggagugagcugg

SEQ ID NO: 3183989 - RNA, 14 nt, Human
cugucauugcuucu

SEQ ID NO: 3183990 - RNA, 18 nt, Human
cugucauugcuucuucug

SEQ ID NO: 3183991 - RNA, 16 nt, Human
cugucauugcuucuuc

SEQ ID NO: 3183992 - RNA, 23 nt, Human
gacauugcggacagccacggcca

SEQ ID NO: 3183993 - RNA, 17 nt, Human
gacauugcggacagcca

SEQ ID NO: 3183994 - RNA, 12 nt, Human
gacauuugucau

SEQ ID NO: 3183995 - RNA, 16 nt, Human
gacauuugucauuuuc

SEQ ID NO: 3183996 - RNA, 15 nt, Human
gacauuugucauuuu

SEQ ID NO: 3183997 - RNA, 13 nt, Human
gacauuuguuugg

SEQ ID NO: 3183998 - RNA, 20 nt, Human
gacauuugucauuuucauua

SEQ ID NO: 3183999 - RNA, 19 nt, Human
gacauuugucauuuucauu

SEQ ID NO: 3184000 - RNA, 17 nt, Human
gacauuugucauuuuca

SEQ ID NO: 3184001 - RNA, 20 nt, Human
gacacuuccgucacauccca

SEQ ID NO: 3184002 - RNA, 20 nt, Human
gacacuggugccaugucagc

SEQ ID NO: 3184003 - RNA, 14 nt, Human
gacagcccgggcuc

SEQ ID NO: 3184004 - RNA, 17 nt, Human
gacacuuuucauaucau

SEQ ID NO: 3184005 - RNA, 21 nt, Human
gacacuuuucauaucauuucu

SEQ ID NO: 3184006 - RNA, 18 nt, Human
gacagcuccuucuguccu

SEQ ID NO: 3184007 - RNA, 17 nt, Human
gacagcuccuucugucc

SEQ ID NO: 3184008 - RNA, 16 nt, Human
gacagcccgggcucug

SEQ ID NO: 3184009 - RNA, 16 nt, Human
gacagcuccuucuguc

SEQ ID NO: 3184010 - RNA, 14 nt, Human
gacagucccugcca

SEQ ID NO: 3184011 - RNA, 15 nt, Human
gacagucccugccaa

SEQ ID NO: 3184012 - RNA, 16 nt, Human
gacagucccugccaau

SEQ ID NO: 3184013 - RNA, 20 nt, Human
gacagucccugccaauggac

SEQ ID NO: 3184014 - RNA, 12 nt, Human
gacagucccugc

SEQ ID NO: 3184015 - RNA, 11 nt, Human
gacagcucuua

SEQ ID NO: 3184016 - RNA, 12 nt, Human
gacagcucugca

SEQ ID NO: 3184017 - RNA, 19 nt, Human
gacagcuccuucuguccua

SEQ ID NO: 3184018 - RNA, 10 nt, Human
gacagcucuu

SEQ ID NO: 3184019 - RNA, 15 nt, Human
gacagccccucccuc

SEQ ID NO: 3184020 - RNA, 24 nt, Human
gacagcccgauccuccccuggacu

SEQ ID NO: 3184021 - RNA, 19 nt, Human
gacagcccgauccuccccu

SEQ ID NO: 3184022 - RNA, 17 nt, Human
gacagccccucccuccu

SEQ ID NO: 3184023 - RNA, 19 nt, Human
gacccggaggggccuggca

SEQ ID NO: 3184024 - RNA, 18 nt, Human
gacccggaggggccuggc

SEQ ID NO: 3184025 - RNA, 20 nt, Human
gacccggaggggccuggcag

SEQ ID NO: 3184026 - RNA, 17 nt, Human
gacccggaggggccugg

SEQ ID NO: 3184027 - RNA, 20 nt, Human
gaccccugcaguuccccugg

SEQ ID NO: 3184028 - RNA, 23 nt, Human
gaccccugcccagaucagccaga

SEQ ID NO: 3184029 - RNA, 12 nt, Human
gaccccugccca

SEQ ID NO: 3184030 - RNA, 16 nt, Human
gaccccugagcuugca

SEQ ID NO: 3184031 - RNA, 15 nt, Human
gacccuccaaggcca

SEQ ID NO: 3184032 - RNA, 13 nt, Human
gacccuccaaggc

SEQ ID NO: 3184033 - RNA, 11 nt, Human
gacccuccaag

SEQ ID NO: 3184034 - RNA, 14 nt, Human
gaccucaggccugg

SEQ ID NO: 3184035 - RNA, 13 nt, Human
gaccucaggccug

SEQ ID NO: 3184036 - RNA, 20 nt, Human
gacccugaaaugugugugau

SEQ ID NO: 3184037 - RNA, 16 nt, Human
gacccugaaaugugug

SEQ ID NO: 3184038 - RNA, 15 nt, Human
gacccugaaaugugu

SEQ ID NO: 3184039 - RNA, 14 nt, Human
gacccugaaaugug

SEQ ID NO: 3184040 - RNA, 13 nt, Human
gacccugaaaugu

SEQ ID NO: 3184041 - RNA, 18 nt, Human
gaccucaggugagaagca

SEQ ID NO: 3184042 - RNA, 19 nt, Human
gaccucaggugagaagcag

SEQ ID NO: 3184043 - RNA, 19 nt, Human
gaccucaggccugggggcu

SEQ ID NO: 3184044 - RNA, 22 nt, Human
gaccucagguaaucgaccugcc

SEQ ID NO: 3184045 - RNA, 23 nt, Human
gaccucagguaaucgaccugccu

SEQ ID NO: 3184046 - RNA, 21 nt, Human
gaccucaggugauccacccac

SEQ ID NO: 3184047 - RNA, 20 nt, Human
gaccucaggugauccaccca

SEQ ID NO: 3184048 - RNA, 21 nt, Human
gaccucaggugagaagcagag

SEQ ID NO: 3184049 - RNA, 19 nt, Human
gaccucaggugauccaccc

SEQ ID NO: 3184050 - RNA, 14 nt, Human
gacgcucucuggcc

SEQ ID NO: 3184051 - RNA, 23 nt, Human
gacgcuacccgggaagggggcug

SEQ ID NO: 3184052 - RNA, 22 nt, Human
gacgcuacccgggaagggggcu

SEQ ID NO: 3184053 - RNA, 19 nt, Human
gacgcuacccgggaagggg

SEQ ID NO: 3184054 - RNA, 16 nt, Human
gacgcugugcugcccu

SEQ ID NO: 3184055 - RNA, 17 nt, Human
gacgcugugcugcccug

SEQ ID NO: 3184056 - RNA, 18 nt, Human
gacgcugugcugcccugc

SEQ ID NO: 3184057 - RNA, 15 nt, Human
gacgcugugcugccc

SEQ ID NO: 3184058 - RNA, 22 nt, Human
gaccuccggccaggugccuccu

SEQ ID NO: 3184059 - RNA, 12 nt, Human
gacgccauccca

SEQ ID NO: 3184060 - RNA, 13 nt, Human
gacgccaucccag

SEQ ID NO: 3184061 - RNA, 19 nt, Human
gacgccaucccagccccaa

SEQ ID NO: 3184062 - RNA, 21 nt, Human
gacgccaucccagccccaaug

SEQ ID NO: 3184063 - RNA, 20 nt, Human
gaauauacucauuagaauua

SEQ ID NO: 3184064 - RNA, 17 nt, Human
gaauauagauuaaauca

SEQ ID NO: 3184065 - RNA, 12 nt, Human
gaauauugcuga

SEQ ID NO: 3184066 - RNA, 13 nt, Human
gaauauugcugau

SEQ ID NO: 3184067 - RNA, 11 nt, Human
gaauauugcug

SEQ ID NO: 3184068 - RNA, 12 nt, Human
gaauauugagca

SEQ ID NO: 3184069 - RNA, 20 nt, Human
gaauauugagcaauauguca

SEQ ID NO: 3184070 - RNA, 20 nt, Human
gaauaugaaagucuuauuaa

SEQ ID NO: 3184071 - RNA, 17 nt, Human
gaauaugggagaaauag

SEQ ID NO: 3184072 - RNA, 19 nt, Human
gaauaugauuaaaaauauc

SEQ ID NO: 3184073 - RNA, 21 nt, Human
gaauaugauuaaaaauaucaa

SEQ ID NO: 3184074 - RNA, 20 nt, Human
gaauauugcugauggugcaa

SEQ ID NO: 3184075 - RNA, 19 nt, Human
gaauauugccauuaugcuu

SEQ ID NO: 3184076 - RNA, 24 nt, Human
gaauauugcugauggugcaaugac

SEQ ID NO: 3184077 - RNA, 22 nt, Human
gaauauugcugauggugcaaug

SEQ ID NO: 3184078 - RNA, 23 nt, Human
gaauauugcugauggugcaauga

SEQ ID NO: 3184079 - RNA, 14 nt, Human
gaaugaauggcuaa

SEQ ID NO: 3184080 - RNA, 18 nt, Human
gaauuauuuuaaaagaua

SEQ ID NO: 3184081 - RNA, 16 nt, Human
gaauuauuuuaaaaga

SEQ ID NO: 3184082 - RNA, 13 nt, Human
gaauuauuuuaaa

SEQ ID NO: 3184083 - RNA, 23 nt, Human
gaauuacuaacuucuaaaacugu

SEQ ID NO: 3184084 - RNA, 18 nt, Human
gaauuacuaacuucuaaa

SEQ ID NO: 3184085 - RNA, 14 nt, Human
gaauuacuaacuuc

SEQ ID NO: 3184086 - RNA, 16 nt, Human
gaauuacuaacuucua

SEQ ID NO: 3184087 - RNA, 15 nt, Human
gaauuacuaacuucu

SEQ ID NO: 3184088 - RNA, 14 nt, Human
gaauuauuucuguc

SEQ ID NO: 3184089 - RNA, 21 nt, Human
gaauuauuucugucacaguaa

SEQ ID NO: 3184090 - RNA, 17 nt, Human
gacaaacugccaguuuu

SEQ ID NO: 3184091 - RNA, 20 nt, Human
gacaaacugccaguuuuguu

SEQ ID NO: 3184092 - RNA, 13 nt, Human
gaauuuuuuugua

SEQ ID NO: 3184093 - RNA, 15 nt, Human
gacaaagucaagcca

SEQ ID NO: 3184094 - RNA, 14 nt, Human
gacaaauaguaggc

SEQ ID NO: 3184095 - RNA, 21 nt, Human
gacaaauaguaggcaagaugg

SEQ ID NO: 3184096 - RNA, 17 nt, Human
gacaaauaguaggcaag

SEQ ID NO: 3184097 - RNA, 15 nt, Human
gacaaauaguaggca

SEQ ID NO: 3184098 - RNA, 20 nt, Human
gacacagcucuucuccaggc

SEQ ID NO: 3184099 - RNA, 19 nt, Human
gacacagcucuucuccagg

SEQ ID NO: 3184100 - RNA, 12 nt, Human
gacacagcucuu

SEQ ID NO: 3184101 - RNA, 21 nt, Human
gacacagcucuucuccaggcu

SEQ ID NO: 3184102 - RNA, 17 nt, Human
gacacagcucuucucca

SEQ ID NO: 3184103 - RNA, 14 nt, Human
gaauuaccauuugu

SEQ ID NO: 3184104 - RNA, 18 nt, Human
gaauuaccauuuguuaau

SEQ ID NO: 3184105 - RNA, 23 nt, Human
gaauuacaauuacuccuuuuauu

SEQ ID NO: 3184106 - RNA, 17 nt, Human
gaauuaauuaauuugga

SEQ ID NO: 3184107 - RNA, 18 nt, Human
gaauuaauuaauuuggag

SEQ ID NO: 3184108 - RNA, 14 nt, Human
gaauuaacacauga

SEQ ID NO: 3184109 - RNA, 15 nt, Human
gaauuaacacaugau

SEQ ID NO: 3184110 - RNA, 19 nt, Human
gaauguuugccucugccuc

SEQ ID NO: 3184111 - RNA, 18 nt, Human
gaauguuugccucugccu

SEQ ID NO: 3184112 - RNA, 20 nt, Human
gaauguuuuagcacagcguu

SEQ ID NO: 3184113 - RNA, 17 nt, Human
gaauguuuuagcacagc

SEQ ID NO: 3184114 - RNA, 15 nt, Human
gaaugaauggcuaag

SEQ ID NO: 3184115 - RNA, 21 nt, Human
gaaugaagguuuuuguaaaga

SEQ ID NO: 3184116 - RNA, 18 nt, Human
gaaugaguuucuuagacu

SEQ ID NO: 3184117 - RNA, 16 nt, Human
gaaugaguuucuuaga

SEQ ID NO: 3184118 - RNA, 14 nt, Human
gaaugaguuucuua

SEQ ID NO: 3184119 - RNA, 14 nt, Human
gaaugauuaauuaa

SEQ ID NO: 3184120 - RNA, 20 nt, Human
gaaugaugauccuaggcauu

SEQ ID NO: 3184121 - RNA, 14 nt, Human
gaaugaugccauga

SEQ ID NO: 3184122 - RNA, 18 nt, Human
gaaugcacaaacagaggc

SEQ ID NO: 3184123 - RNA, 21 nt, Human
gaaugaugguuuccaauuuca

SEQ ID NO: 3184124 - RNA, 17 nt, Human
gaauguuugccucugcc

SEQ ID NO: 3184125 - RNA, 16 nt, Human
gaauguuugccucugc

SEQ ID NO: 3184126 - RNA, 19 nt, Human
gaaugcacaaacagaggcc

SEQ ID NO: 3184127 - RNA, 15 nt, Human
gaauguuugccucug

SEQ ID NO: 3184128 - RNA, 22 nt, Human
gagcuguucacagccagacugg

SEQ ID NO: 3184129 - RNA, 18 nt, Human
gagcuguugaugggauga

SEQ ID NO: 3184130 - RNA, 19 nt, Human
gagcuggcuccagccugga

SEQ ID NO: 3184131 - RNA, 20 nt, Human
gagcuguucacagccagacu

SEQ ID NO: 3184132 - RNA, 17 nt, Human
gagcuguucacagccag

SEQ ID NO: 3184133 - RNA, 14 nt, Human
gagcuggcuccagc

SEQ ID NO: 3184134 - RNA, 14 nt, Human
gagcccugguggca

SEQ ID NO: 3184135 - RNA, 13 nt, Human
gagcccugguggc

SEQ ID NO: 3184136 - RNA, 14 nt, Human
gagcccugcucccu

SEQ ID NO: 3184137 - RNA, 18 nt, Human
gagcccugccucuccgcc

SEQ ID NO: 3184138 - RNA, 22 nt, Human
gagcccugccucuccgccccug

SEQ ID NO: 3184139 - RNA, 14 nt, Human
gagccccgaggccu

SEQ ID NO: 3184140 - RNA, 13 nt, Human
gagccccgaggcc

SEQ ID NO: 3184141 - RNA, 17 nt, Human
gagccccgaggccuucu

SEQ ID NO: 3184142 - RNA, 21 nt, Human
gagcagggcucagcggggaca

SEQ ID NO: 3184143 - RNA, 16 nt, Human
gagcaguaucaugaag

SEQ ID NO: 3184144 - RNA, 14 nt, Human
gagcaucaggccag

SEQ ID NO: 3184145 - RNA, 17 nt, Human
gagcaguaucaugaagc

SEQ ID NO: 3184146 - RNA, 13 nt, Human
gagcaugccugga

SEQ ID NO: 3184147 - RNA, 18 nt, Human
gagcccauuuggagggcc

SEQ ID NO: 3184148 - RNA, 15 nt, Human
gagcaucaggccagg

SEQ ID NO: 3184149 - RNA, 16 nt, Human
gagcaucaggccaggc

SEQ ID NO: 3184150 - RNA, 13 nt, Human
gagcaucaggcca

SEQ ID NO: 3184151 - RNA, 17 nt, Human
gagggccugcaagggag

SEQ ID NO: 3184152 - RNA, 21 nt, Human
gagggccugcaagggagugag

SEQ ID NO: 3184153 - RNA, 14 nt, Human
gagggccugcaagg

SEQ ID NO: 3184154 - RNA, 12 nt, Human
gagggccugggc

SEQ ID NO: 3184155 - RNA, 20 nt, Human
gaggggagacuuugauguca

SEQ ID NO: 3184156 - RNA, 17 nt, Human
gaggggagccaggaggg

SEQ ID NO: 3184157 - RNA, 14 nt, Human
gaggggagccagga

SEQ ID NO: 3184158 - RNA, 17 nt, Human
gaggggauggggcuggg

SEQ ID NO: 3184159 - RNA, 23 nt, Human
gaggggaugugugugugcagagc

SEQ ID NO: 3184160 - RNA, 21 nt, Human
gaggggaugugugugugcaga

SEQ ID NO: 3184161 - RNA, 12 nt, Human
gaggcugacucc

SEQ ID NO: 3184162 - RNA, 15 nt, Human
gaggcugacuccugg

SEQ ID NO: 3184163 - RNA, 16 nt, Human
gaggcugacuccuggu

SEQ ID NO: 3184164 - RNA, 19 nt, Human
gaggcugacuccugguccu

SEQ ID NO: 3184165 - RNA, 18 nt, Human
gaggcugagaugggagaa

SEQ ID NO: 3184166 - RNA, 17 nt, Human
gaggcuccacuuggucu

SEQ ID NO: 3184167 - RNA, 22 nt, Human
gaggccaagaguggccccaccu

SEQ ID NO: 3184168 - RNA, 21 nt, Human
gaggccaagaguggccccacc

SEQ ID NO: 3184169 - RNA, 20 nt, Human
gaggccaagaguggccccac

SEQ ID NO: 3184170 - RNA, 19 nt, Human
gaggccaagaguggcccca

SEQ ID NO: 3184171 - RNA, 15 nt, Human
gaggcuccacuuggu

SEQ ID NO: 3184172 - RNA, 12 nt, Human
gaggcuccacuu

SEQ ID NO: 3184173 - RNA, 17 nt, Human
gaggccaaacaggcccu

SEQ ID NO: 3184174 - RNA, 18 nt, Human
gaggccaaacaggcccuc

SEQ ID NO: 3184175 - RNA, 17 nt, Human
gaggccaagaguggccc

SEQ ID NO: 3184176 - RNA, 16 nt, Human
gaggccaagaguggcc

SEQ ID NO: 3184177 - RNA, 22 nt, Human
gaggcaugugaugagaggaaau

SEQ ID NO: 3184178 - RNA, 20 nt, Human
gaggcaugugaugagaggaa

SEQ ID NO: 3184179 - RNA, 21 nt, Human
gaggcaugugaugagaggaaa

SEQ ID NO: 3184180 - RNA, 22 nt, Human
gaggacaguauuuguggggagg

SEQ ID NO: 3184181 - RNA, 23 nt, Human
gaggacagggaggugaccccagg

SEQ ID NO: 3184182 - RNA, 16 nt, Human
gaggacauggcuucug

SEQ ID NO: 3184183 - RNA, 21 nt, Human
gaggacgcucucuggccuucg

SEQ ID NO: 3184184 - RNA, 20 nt, Human
gaggacgcucucuggccuuc

SEQ ID NO: 3184185 - RNA, 13 nt, Human
gaggaccagggcu

SEQ ID NO: 3184186 - RNA, 14 nt, Human
gaggaccagcacac

SEQ ID NO: 3184187 - RNA, 13 nt, Human
gaggaccagcaca

SEQ ID NO: 3184188 - RNA, 16 nt, Human
gaggacuuuucuuugu

SEQ ID NO: 3184189 - RNA, 23 nt, Human
gaggacuuuucuuuguggcuucc

SEQ ID NO: 3184190 - RNA, 20 nt, Human
gaggacuuuucuuuguggcu

SEQ ID NO: 3184191 - RNA, 12 nt, Human
gaggagaaacug

SEQ ID NO: 3184192 - RNA, 14 nt, Human
gaggagaaacugga

SEQ ID NO: 3184193 - RNA, 16 nt, Human
gaggagaacuugcugc

SEQ ID NO: 3184194 - RNA, 14 nt, Human
gaggagaagaaaau

SEQ ID NO: 3184195 - RNA, 18 nt, Human
gaggagaacuugcugccu

SEQ ID NO: 3184196 - RNA, 14 nt, Human
gaggagagaggacc

SEQ ID NO: 3184197 - RNA, 15 nt, Human
gaggagagaggaccc

SEQ ID NO: 3184198 - RNA, 12 nt, Human
gaggagagagga

SEQ ID NO: 3184199 - RNA, 20 nt, Human
gaggcagggucucacucugu

SEQ ID NO: 3184200 - RNA, 19 nt, Human
gaggcagggucucacucug

SEQ ID NO: 3184201 - RNA, 17 nt, Human
gaggcaucgcaauguaa

SEQ ID NO: 3184202 - RNA, 18 nt, Human
gaggcagggucucacucu

SEQ ID NO: 3184203 - RNA, 17 nt, Human
gagaaaaccccuuccca

SEQ ID NO: 3184204 - RNA, 20 nt, Human
gagaaaacaucucaucaugu

SEQ ID NO: 3184205 - RNA, 22 nt, Human
gacuuuucaaguauuuaagccu

SEQ ID NO: 3184206 - RNA, 19 nt, Human
gacuuuuccaacccucauc

SEQ ID NO: 3184207 - RNA, 14 nt, Human
gacuuuuccaaccc

SEQ ID NO: 3184208 - RNA, 18 nt, Human
gacuuuuauuuccaguga

SEQ ID NO: 3184209 - RNA, 19 nt, Human
gacuuuucaaguauuuaag

SEQ ID NO: 3184210 - RNA, 14 nt, Human
gacuuuucaaguau

SEQ ID NO: 3184211 - RNA, 23 nt, Human
gagaaggacccggaggggccugg

SEQ ID NO: 3184212 - RNA, 21 nt, Human
gagaagggcagaguuacuuga

SEQ ID NO: 3184213 - RNA, 20 nt, Human
gagaccgugaagauacuuug

SEQ ID NO: 3184214 - RNA, 22 nt, Human
gagaccgugaagauacuuugua

SEQ ID NO: 3184215 - RNA, 14 nt, Human
gagacggaguccca

SEQ ID NO: 3184216 - RNA, 13 nt, Human
gagaccugccccu

SEQ ID NO: 3184217 - RNA, 19 nt, Human
gagacggagucccaccuug

SEQ ID NO: 3184218 - RNA, 16 nt, Human
gagacggagucccacc

SEQ ID NO: 3184219 - RNA, 18 nt, Human
gagacgggggcagagagg

SEQ ID NO: 3184220 - RNA, 21 nt, Human
gagacccugucucaaaaaaag

SEQ ID NO: 3184221 - RNA, 11 nt, Human
gagaaugaaca

SEQ ID NO: 3184222 - RNA, 17 nt, Human
gagaaucucaacauguc

SEQ ID NO: 3184223 - RNA, 13 nt, Human
gagaaugaacaaa

SEQ ID NO: 3184224 - RNA, 23 nt, Human
gagaaugaaagggcccagagagg

SEQ ID NO: 3184225 - RNA, 15 nt, Human
gagaaugaaagggcc

SEQ ID NO: 3184226 - RNA, 14 nt, Human
gagaaucacaggcu

SEQ ID NO: 3184227 - RNA, 15 nt, Human
gagaaucacaggcug

SEQ ID NO: 3184228 - RNA, 21 nt, Human
gagauugugccccugcacucc

SEQ ID NO: 3184229 - RNA, 14 nt, Human
gagauuggaaggaa

SEQ ID NO: 3184230 - RNA, 16 nt, Human
gagauuggaucaagua

SEQ ID NO: 3184231 - RNA, 19 nt, Human
gagauuggaucaaguauua

SEQ ID NO: 3184232 - RNA, 21 nt, Human
gagauuggaucaaguauuacu

SEQ ID NO: 3184233 - RNA, 23 nt, Human
gagauugcuguguguugccuggg

SEQ ID NO: 3184234 - RNA, 20 nt, Human
gagaugcuagaacucccuuu

SEQ ID NO: 3184235 - RNA, 16 nt, Human
gagaugcuagaacucc

SEQ ID NO: 3184236 - RNA, 21 nt, Human
gagauugcaccacugcacucc

SEQ ID NO: 3184237 - RNA, 15 nt, Human
gagauuauguucuuu

SEQ ID NO: 3184238 - RNA, 23 nt, Human
gagauuauuuacaagaagaacuc

SEQ ID NO: 3184239 - RNA, 17 nt, Human
gagauguguaauuuuuc

SEQ ID NO: 3184240 - RNA, 20 nt, Human
gagauguguaauuuuucugu

SEQ ID NO: 3184241 - RNA, 16 nt, Human
gagauguguaucagug

SEQ ID NO: 3184242 - RNA, 17 nt, Human
gagauguguaucagugu

SEQ ID NO: 3184243 - RNA, 13 nt, Human
gagacuccugcag

SEQ ID NO: 3184244 - RNA, 14 nt, Human
gagagccuuccagg

SEQ ID NO: 3184245 - RNA, 15 nt, Human
gagagccuuccaggg

SEQ ID NO: 3184246 - RNA, 16 nt, Human
gagagccuuccagggg

SEQ ID NO: 3184247 - RNA, 18 nt, Human
gagagccuuccaggggug

SEQ ID NO: 3184248 - RNA, 20 nt, Human
gagagccuuccagggguggg

SEQ ID NO: 3184249 - RNA, 14 nt, Human
gagagcgcagcccg

SEQ ID NO: 3184250 - RNA, 15 nt, Human
gagagcuagcagcag

SEQ ID NO: 3184251 - RNA, 21 nt, Human
gagagcuagcagcagggaggg

SEQ ID NO: 3184252 - RNA, 13 nt, Human
gagagcugggugu

SEQ ID NO: 3184253 - RNA, 23 nt, Human
gagagcuauggacagcauugcca

SEQ ID NO: 3184254 - RNA, 15 nt, Human
gagaggacccccuga

SEQ ID NO: 3184255 - RNA, 19 nt, Human
gagagcuuagggucucagg

SEQ ID NO: 3184256 - RNA, 20 nt, Human
gagagcugggugucaagagg

SEQ ID NO: 3184257 - RNA, 12 nt, Human
gagaggaaauca

SEQ ID NO: 3184258 - RNA, 22 nt, Human
gagagcuucuguugcugccuca

SEQ ID NO: 3184259 - RNA, 15 nt, Human
gagaggagcccugcc

SEQ ID NO: 3184260 - RNA, 13 nt, Human
gagaggccgggac

SEQ ID NO: 3184261 - RNA, 16 nt, Human
gagaggcuaaaauguu

SEQ ID NO: 3184262 - RNA, 22 nt, Human
gagaggcuaaaauguuuucagc

SEQ ID NO: 3184263 - RNA, 21 nt, Human
gagaggcuaaaauguuuucag

SEQ ID NO: 3184264 - RNA, 20 nt, Human
gagaggcuaaaauguuuuca

SEQ ID NO: 3184265 - RNA, 21 nt, Human
gagaggcugugguuuggggga

SEQ ID NO: 3184266 - RNA, 13 nt, Human
gagaggcuguggu

SEQ ID NO: 3184267 - RNA, 16 nt, Human
gaucugcugcagagca

SEQ ID NO: 3184268 - RNA, 17 nt, Human
gaucugcugcagagcag

SEQ ID NO: 3184269 - RNA, 18 nt, Human
gaucugcugcagagcagu

SEQ ID NO: 3184270 - RNA, 12 nt, Human
gaucucugcagg

SEQ ID NO: 3184271 - RNA, 23 nt, Human
gaucucugcaggaaauggcugug

SEQ ID NO: 3184272 - RNA, 18 nt, Human
gaucucuugagccuggga

SEQ ID NO: 3184273 - RNA, 19 nt, Human
gaucucuugagccugggag

SEQ ID NO: 3184274 - RNA, 20 nt, Human
gaucucuuucuaaagacagg

SEQ ID NO: 3184275 - RNA, 12 nt, Human
gaucucuuaaga

SEQ ID NO: 3184276 - RNA, 17 nt, Human
gaucugaugcaagcaag

SEQ ID NO: 3184277 - RNA, 23 nt, Human
gauccagcccugaguuccuagcc

SEQ ID NO: 3184278 - RNA, 15 nt, Human
gaucccaguagaaaa

SEQ ID NO: 3184279 - RNA, 21 nt, Human
gaugcuucuucagagacuccu

SEQ ID NO: 3184280 - RNA, 23 nt, Human
gaugcuucucacugccaugccag

SEQ ID NO: 3184281 - RNA, 14 nt, Human
gaugauuuccaagc

SEQ ID NO: 3184282 - RNA, 17 nt, Human
gaugcuucuucagagac

SEQ ID NO: 3184283 - RNA, 20 nt, Human
gaugcuucuucagagacucc

SEQ ID NO: 3184284 - RNA, 22 nt, Human
gaugauuggaggggggaggugg

SEQ ID NO: 3184285 - RNA, 12 nt, Human
gaugauuucaga

SEQ ID NO: 3184286 - RNA, 19 nt, Human
gaugauugaagaaacagcu

SEQ ID NO: 3184287 - RNA, 13 nt, Human
gaugauccuaggc

SEQ ID NO: 3184288 - RNA, 15 nt, Human
gaugauugaagaaac

SEQ ID NO: 3184289 - RNA, 22 nt, Human
gauacuuggucacagccaggcg

SEQ ID NO: 3184290 - RNA, 18 nt, Human
gauacuuugauauuuuca

SEQ ID NO: 3184291 - RNA, 16 nt, Human
gauacuuuguauuguc

SEQ ID NO: 3184292 - RNA, 19 nt, Human
gauacuuuguauuguccua

SEQ ID NO: 3184293 - RNA, 23 nt, Human
gauacuuuguauuguccuauuag

SEQ ID NO: 3184294 - RNA, 18 nt, Human
gauauuugcaguuuuuca

SEQ ID NO: 3184295 - RNA, 20 nt, Human
gauauuugcaguuuuucauu

SEQ ID NO: 3184296 - RNA, 11 nt, Human
gauauuucaga

SEQ ID NO: 3184297 - RNA, 17 nt, Human
gauauuucagaaauaca

SEQ ID NO: 3184298 - RNA, 16 nt, Human
gauauuucagaaauac

SEQ ID NO: 3184299 - RNA, 19 nt, Human
gauauuuucaacgcagccc

SEQ ID NO: 3184300 - RNA, 20 nt, Human
gauauuuuauuuugaaaugg

SEQ ID NO: 3184301 - RNA, 20 nt, Human
gauauuuguauuuauucuuu

SEQ ID NO: 3184302 - RNA, 20 nt, Human
gaucaaaagguuaauaaagu

SEQ ID NO: 3184303 - RNA, 23 nt, Human
gauauuuucaacgcagcccugcu

SEQ ID NO: 3184304 - RNA, 22 nt, Human
gauauuuucaacgcagcccugc

SEQ ID NO: 3184305 - RNA, 21 nt, Human
gauauuuucaacgcagcccug

SEQ ID NO: 3184306 - RNA, 23 nt, Human
gaucaaaagguuaauaaaguaau

SEQ ID NO: 3184307 - RNA, 20 nt, Human
gaucaaaaaggcuuauaaaa

SEQ ID NO: 3184308 - RNA, 23 nt, Human
gaucaaaaaggcuuauaaaacag

SEQ ID NO: 3184309 - RNA, 14 nt, Human
gaucaaaaaggcuu

SEQ ID NO: 3184310 - RNA, 22 nt, Human
gaucaaaccccgaccaccugcc

SEQ ID NO: 3184311 - RNA, 16 nt, Human
gaucaaauaguugcau

SEQ ID NO: 3184312 - RNA, 19 nt, Human
gauccacccaccucagccu

SEQ ID NO: 3184313 - RNA, 18 nt, Human
gauccacccaccucagcc

SEQ ID NO: 3184314 - RNA, 21 nt, Human
gauccaagcuggucccacuca

SEQ ID NO: 3184315 - RNA, 21 nt, Human
gauccacccaccucagccucc

SEQ ID NO: 3184316 - RNA, 20 nt, Human
gauccacccaccucagccuc

SEQ ID NO: 3184317 - RNA, 22 nt, Human
gauccacccaccucagccuccc

SEQ ID NO: 3184318 - RNA, 19 nt, Human
gauccaagcuggucccacu

SEQ ID NO: 3184319 - RNA, 17 nt, Human
gauccaagcugguccca

SEQ ID NO: 3184320 - RNA, 16 nt, Human
gauccaagcugguccc

SEQ ID NO: 3184321 - RNA, 12 nt, Human
gauccaagcugg

SEQ ID NO: 3184322 - RNA, 13 nt, Human
gauacugccuccc

SEQ ID NO: 3184323 - RNA, 17 nt, Human
gauacugccucccccag

SEQ ID NO: 3184324 - RNA, 23 nt, Human
gauacaggaaaagcugcugacag

SEQ ID NO: 3184325 - RNA, 20 nt, Human
gcaaccuccgccucuugggu

SEQ ID NO: 3184326 - RNA, 20 nt, Human
gcaaccuucgccaccugggu

SEQ ID NO: 3184327 - RNA, 19 nt, Human
gcaaccuccgccucuuggg

SEQ ID NO: 3184328 - RNA, 16 nt, Human
gcaacccccagccugc

SEQ ID NO: 3184329 - RNA, 15 nt, Human
gcaacccccagccug

SEQ ID NO: 3184330 - RNA, 14 nt, Human
gcaacccccagccu

SEQ ID NO: 3184331 - RNA, 18 nt, Human
gcaaccauauagaaagcu

SEQ ID NO: 3184332 - RNA, 14 nt, Human
gcaaccauuugaaa

SEQ ID NO: 3184333 - RNA, 15 nt, Human
gcaaccaaacuccca

SEQ ID NO: 3184334 - RNA, 13 nt, Human
gcaaaauuccuga

SEQ ID NO: 3184335 - RNA, 13 nt, Human
gcaacaggcuggg

SEQ ID NO: 3184336 - RNA, 15 nt, Human
gcaacaggcugggcu

SEQ ID NO: 3184337 - RNA, 14 nt, Human
gcaacaggcugggc

SEQ ID NO: 3184338 - RNA, 15 nt, Human
gcaaaaucaagagau

SEQ ID NO: 3184339 - RNA, 21 nt, Human
gcaaaauacaugaugauuuca

SEQ ID NO: 3184340 - RNA, 18 nt, Human
gcaaaauacaugaugauu

SEQ ID NO: 3184341 - RNA, 23 nt, Human
gcaaaagugcugcagggcuuuaa

SEQ ID NO: 3184342 - RNA, 19 nt, Human
gcaacaggcugggcuucag

SEQ ID NO: 3184343 - RNA, 16 nt, Human
gcaacaggcugggcuu

SEQ ID NO: 3184344 - RNA, 16 nt, Human
gcaaccaccaccaacc

SEQ ID NO: 3184345 - RNA, 18 nt, Human
gcaaccaccaccaaccac

SEQ ID NO: 3184346 - RNA, 13 nt, Human
gcaaccaccacca

SEQ ID NO: 3184347 - RNA, 15 nt, Human
gcaaccaaaaagaaa

SEQ ID NO: 3184348 - RNA, 15 nt, Human
gcaagugagagcugg

SEQ ID NO: 3184349 - RNA, 16 nt, Human
gcaagugagagcuggg

SEQ ID NO: 3184350 - RNA, 13 nt, Human
gauggaaugaugg

SEQ ID NO: 3184351 - RNA, 13 nt, Human
gauggaauuuuuu

SEQ ID NO: 3184352 - RNA, 15 nt, Human
gauucuucugcuuca

SEQ ID NO: 3184353 - RNA, 13 nt, Human
gauucuucugcuu

SEQ ID NO: 3184354 - RNA, 12 nt, Human
gauucuucugcu

SEQ ID NO: 3184355 - RNA, 21 nt, Human
gauuuuuuuuuccuucagugc

SEQ ID NO: 3184356 - RNA, 15 nt, Human
gcaaaaaauaaugac

SEQ ID NO: 3184357 - RNA, 19 nt, Human
gauuucacaaauauuaaaa

SEQ ID NO: 3184358 - RNA, 13 nt, Human
gauuucacaaaua

SEQ ID NO: 3184359 - RNA, 15 nt, Human
gauuucacaaauauu

SEQ ID NO: 3184360 - RNA, 14 nt, Human
gauuucacaaauau

SEQ ID NO: 3184361 - RNA, 14 nt, Human
gcaaaaaggcagga

SEQ ID NO: 3184362 - RNA, 22 nt, Human
gcaaaaaaucuuaauacuguua

SEQ ID NO: 3184363 - RNA, 12 nt, Human
gcaaaaaaucuu

SEQ ID NO: 3184364 - RNA, 22 nt, Human
gcaaaagaugcuucucacugcc

SEQ ID NO: 3184365 - RNA, 11 nt, Human
gcaaaaggaaa

SEQ ID NO: 3184366 - RNA, 13 nt, Human
gcaaaaauaauca

SEQ ID NO: 3184367 - RNA, 17 nt, Human
gcaaaagaugcuucuca

SEQ ID NO: 3184368 - RNA, 16 nt, Human
gauuuuuuuuuccuuc

SEQ ID NO: 3184369 - RNA, 12 nt, Human
gauuucacucuc

SEQ ID NO: 3184370 - RNA, 17 nt, Human
gauuuuuuuuuccuuca

SEQ ID NO: 3184371 - RNA, 18 nt, Human
gauuuuuuuuuccuucag

SEQ ID NO: 3184372 - RNA, 11 nt, Human
gauuucacucu

SEQ ID NO: 3184373 - RNA, 21 nt, Human
gauuuauuuuguaugaaauau

SEQ ID NO: 3184374 - RNA, 22 nt, Human
gauuuauuucaucauauuauac

SEQ ID NO: 3184375 - RNA, 18 nt, Human
gauuuauuucaucauauu

SEQ ID NO: 3184376 - RNA, 16 nt, Human
gauuuaauuugaaaua

SEQ ID NO: 3184377 - RNA, 20 nt, Human
gauuuauuaacuuaauaauc

SEQ ID NO: 3184378 - RNA, 12 nt, Human
gcagcucccuca

SEQ ID NO: 3184379 - RNA, 20 nt, Human
gcagcuccuuccuagccuug

SEQ ID NO: 3184380 - RNA, 20 nt, Human
gcagccaggccacuggcccc

SEQ ID NO: 3184381 - RNA, 16 nt, Human
gcagccaggccacaag

SEQ ID NO: 3184382 - RNA, 21 nt, Human
gcagccagccaaacacacaga

SEQ ID NO: 3184383 - RNA, 19 nt, Human
gcagagcugcgggcugggu

SEQ ID NO: 3184384 - RNA, 17 nt, Human
gcagagcugcgggcugg

SEQ ID NO: 3184385 - RNA, 19 nt, Human
gcagaacugcagucacugc

SEQ ID NO: 3184386 - RNA, 18 nt, Human
gcagaacagugauuacca

SEQ ID NO: 3184387 - RNA, 22 nt, Human
gcagaacagugauuaccaggga

SEQ ID NO: 3184388 - RNA, 13 nt, Human
gcagaggaaagca

SEQ ID NO: 3184389 - RNA, 14 nt, Human
gcagaggaaagcaa

SEQ ID NO: 3184390 - RNA, 18 nt, Human
gcagaggaaagcaaagga

SEQ ID NO: 3184391 - RNA, 20 nt, Human
gcagaggaaagcaaaggaga

SEQ ID NO: 3184392 - RNA, 21 nt, Human
gcagaggaaagcaaaggagau

SEQ ID NO: 3184393 - RNA, 22 nt, Human
gcagaggagaacuugcugccuc

SEQ ID NO: 3184394 - RNA, 21 nt, Human
gcagaggagaacuugcugccu

SEQ ID NO: 3184395 - RNA, 19 nt, Human
gcagaggagaacuugcugc

SEQ ID NO: 3184396 - RNA, 14 nt, Human
gcagagggcacaga

SEQ ID NO: 3184397 - RNA, 17 nt, Human
gcagcauaaagaauuug

SEQ ID NO: 3184398 - RNA, 17 nt, Human
gcagcauauucaggaag

SEQ ID NO: 3184399 - RNA, 18 nt, Human
gcagcauauucaggaagc

SEQ ID NO: 3184400 - RNA, 19 nt, Human
gcagcauauucaggaagcu

SEQ ID NO: 3184401 - RNA, 23 nt, Human
gcagcauauucaggaagcucagg

SEQ ID NO: 3184402 - RNA, 18 nt, Human
gcaagugagagcugggug

SEQ ID NO: 3184403 - RNA, 20 nt, Human
gcacucagaagacacugaug

SEQ ID NO: 3184404 - RNA, 17 nt, Human
gcacucagaagacacug

SEQ ID NO: 3184405 - RNA, 12 nt, Human
gcagaacaguga

SEQ ID NO: 3184406 - RNA, 13 nt, Human
gcagaacagugau

SEQ ID NO: 3184407 - RNA, 20 nt, Human
gcagaaagcaaaauuauguu

SEQ ID NO: 3184408 - RNA, 22 nt, Human
gcacuuuguucuggcucuucca

SEQ ID NO: 3184409 - RNA, 16 nt, Human
gcacuuuuuaaaaaac

SEQ ID NO: 3184410 - RNA, 23 nt, Human
gcacuuuucuaaacuaggcuccu

SEQ ID NO: 3184411 - RNA, 22 nt, Human
gcacuuuuucuuaaucauuuuu

SEQ ID NO: 3184412 - RNA, 12 nt, Human
gcacuccccugc

SEQ ID NO: 3184413 - RNA, 15 nt, Human
gcacuccccugcugg

SEQ ID NO: 3184414 - RNA, 18 nt, Human
gcacuuuguucuggcucu

SEQ ID NO: 3184415 - RNA, 19 nt, Human
gcacuuuguucuggcucuu

SEQ ID NO: 3184416 - RNA, 13 nt, Human
gcacuccccugcu

SEQ ID NO: 3184417 - RNA, 14 nt, Human
gcacuccccugcug

SEQ ID NO: 3184418 - RNA, 14 nt, Human
gcacuccagccugg

SEQ ID NO: 3184419 - RNA, 13 nt, Human
gcagugaugucac

SEQ ID NO: 3184420 - RNA, 15 nt, Human
gcaguugcccagccu

SEQ ID NO: 3184421 - RNA, 17 nt, Human
gcagugauauucuuugu

SEQ ID NO: 3184422 - RNA, 18 nt, Human
gcagugauauucuuuguu

SEQ ID NO: 3184423 - RNA, 18 nt, Human
gcaguugcugguaaaaug

SEQ ID NO: 3184424 - RNA, 19 nt, Human
gcaguugcugguaaaauga

SEQ ID NO: 3184425 - RNA, 23 nt, Human
gcaguugcccagccucuuucccu

SEQ ID NO: 3184426 - RNA, 16 nt, Human
gcaguugcccagccuc

SEQ ID NO: 3184427 - RNA, 13 nt, Human
gcaguuguuaagu

SEQ ID NO: 3184428 - RNA, 23 nt, Human
gcaguugcugguaaaaugaagaa

SEQ ID NO: 3184429 - RNA, 22 nt, Human
gcagucuuaugcuuccagaaac

SEQ ID NO: 3184430 - RNA, 21 nt, Human
gcagucuuaugcuuccagaaa

SEQ ID NO: 3184431 - RNA, 19 nt, Human
gcagucuuaugcuuccaga

SEQ ID NO: 3184432 - RNA, 18 nt, Human
gcagucuuaugcuuccag

SEQ ID NO: 3184433 - RNA, 17 nt, Human
gcagucuuaugcuucca

SEQ ID NO: 3184434 - RNA, 14 nt, Human
gcagucugccugga

SEQ ID NO: 3184435 - RNA, 12 nt, Human
gcagucugccug

SEQ ID NO: 3184436 - RNA, 14 nt, Human
gcagugagagcaga

SEQ ID NO: 3184437 - RNA, 18 nt, Human
gcagcugaaauugaaaag

SEQ ID NO: 3184438 - RNA, 12 nt, Human
gcagcugaaauu

SEQ ID NO: 3184439 - RNA, 23 nt, Human
gcagcucuuccuggacaggccag

SEQ ID NO: 3184440 - RNA, 14 nt, Human
gcagcucuuccugg

SEQ ID NO: 3184441 - RNA, 13 nt, Human
gcagcucuuccug

SEQ ID NO: 3184442 - RNA, 12 nt, Human
gcagcucuuccu

SEQ ID NO: 3184443 - RNA, 13 nt, Human
gcauccuggcacc

SEQ ID NO: 3184444 - RNA, 17 nt, Human
gcauccuccgccucccg

SEQ ID NO: 3184445 - RNA, 21 nt, Human
gcauggcugccaaugggagcu

SEQ ID NO: 3184446 - RNA, 15 nt, Human
gcaugguccauucuc

SEQ ID NO: 3184447 - RNA, 22 nt, Human
gcaugguccauucucaagggac

SEQ ID NO: 3184448 - RNA, 13 nt, Human
gcauggugguugg

SEQ ID NO: 3184449 - RNA, 22 nt, Human
gcauggugguugggacccagug

SEQ ID NO: 3184450 - RNA, 20 nt, Human
gcauggugguugggacccag

SEQ ID NO: 3184451 - RNA, 16 nt, Human
gcauugugggaagggg

SEQ ID NO: 3184452 - RNA, 18 nt, Human
gcauugugggaaggggag

SEQ ID NO: 3184453 - RNA, 15 nt, Human
gcauuuacuuugugu

SEQ ID NO: 3184454 - RNA, 14 nt, Human
gcauuuaagaauug

SEQ ID NO: 3184455 - RNA, 23 nt, Human
gcauuuaagaauugccagucuuu

SEQ ID NO: 3184456 - RNA, 13 nt, Human
gcauugugggaag

SEQ ID NO: 3184457 - RNA, 15 nt, Human
gcauugugggaaggg

SEQ ID NO: 3184458 - RNA, 21 nt, Human
gcaugugaugagaggaaauca

SEQ ID NO: 3184459 - RNA, 18 nt, Human
gcaugugaugagaggaaa

SEQ ID NO: 3184460 - RNA, 19 nt, Human
gcaugugaugagaggaaau

SEQ ID NO: 3184461 - RNA, 22 nt, Human
gcauguaaaagccuaggucuau

SEQ ID NO: 3184462 - RNA, 14 nt, Human
gcauccaguaucuu

SEQ ID NO: 3184463 - RNA, 17 nt, Human
gcauccaguaucuugaa

SEQ ID NO: 3184464 - RNA, 18 nt, Human
gcauccaguaucuugaag

SEQ ID NO: 3184465 - RNA, 23 nt, Human
gcauccauggggucucucacaga

SEQ ID NO: 3184466 - RNA, 22 nt, Human
gcauccauggggucucucacag

SEQ ID NO: 3184467 - RNA, 21 nt, Human
gcauccauggggucucucaca

SEQ ID NO: 3184468 - RNA, 12 nt, Human
gcauccaugggg

SEQ ID NO: 3184469 - RNA, 11 nt, Human
gcauccauggg

SEQ ID NO: 3184470 - RNA, 14 nt, Human
gcauccgaccaggu

SEQ ID NO: 3184471 - RNA, 16 nt, Human
gcauccgaccagguug

SEQ ID NO: 3184472 - RNA, 18 nt, Human
cugagaucucugcaggaa

SEQ ID NO: 3184473 - RNA, 17 nt, Human
cugagaucucugcagga

SEQ ID NO: 3184474 - RNA, 16 nt, Human
cugagaucucugcagg

SEQ ID NO: 3184475 - RNA, 21 nt, Human
cugagaucaaaacgguuuuac

SEQ ID NO: 3184476 - RNA, 14 nt, Human
cugagcuuucugcu

SEQ ID NO: 3184477 - RNA, 20 nt, Human
cugagaugccuggugagcau

SEQ ID NO: 3184478 - RNA, 21 nt, Human
cugagaugagaggggagagcu

SEQ ID NO: 3184479 - RNA, 15 nt, Human
cugagcuuucugcua

SEQ ID NO: 3184480 - RNA, 14 nt, Human
cugaggaauccaga

SEQ ID NO: 3184481 - RNA, 20 nt, Human
cugaggaauccagacccggc

SEQ ID NO: 3184482 - RNA, 17 nt, Human
cugaggaauccagaccc

SEQ ID NO: 3184483 - RNA, 20 nt, Human
cugaggacacuaaccacgcu

SEQ ID NO: 3184484 - RNA, 23 nt, Human
cugaggacacuaaccacgcugga

SEQ ID NO: 3184485 - RNA, 23 nt, Human
cugaggacaagagaaaaaagcca

SEQ ID NO: 3184486 - RNA, 22 nt, Human
cugaggugaugaagacagcccg

SEQ ID NO: 3184487 - RNA, 14 nt, Human
cugaggaccagcca

SEQ ID NO: 3184488 - RNA, 22 nt, Human
cugaggacuuaaaauauuccug

SEQ ID NO: 3184489 - RNA, 19 nt, Human
cugaggacauggcuucuga

SEQ ID NO: 3184490 - RNA, 23 nt, Human
cugaggaggccuugggcucugcu

SEQ ID NO: 3184491 - RNA, 15 nt, Human
cugaguagcugggau

SEQ ID NO: 3184492 - RNA, 20 nt, Human
cugaguagcugggauuacag

SEQ ID NO: 3184493 - RNA, 14 nt, Human
cugaguagcuggga

SEQ ID NO: 3184494 - RNA, 18 nt, Human
cugaguagcucugccuuu

SEQ ID NO: 3184495 - RNA, 17 nt, Human
cugaguagcucugccuu

SEQ ID NO: 3184496 - RNA, 12 nt, Human
cugagaggccac

SEQ ID NO: 3184497 - RNA, 14 nt, Human
cugagaggcugucu

SEQ ID NO: 3184498 - RNA, 22 nt, Human
cugagaggacuuuucuuugugg

SEQ ID NO: 3184499 - RNA, 21 nt, Human
cugagaggacuuuucuuugug

SEQ ID NO: 3184500 - RNA, 17 nt, Human
cugagaguagagucacu

SEQ ID NO: 3184501 - RNA, 15 nt, Human
cugagagucuagagg

SEQ ID NO: 3184502 - RNA, 22 nt, Human
cugagacucgcgacaaugcaaa

SEQ ID NO: 3184503 - RNA, 21 nt, Human
cugagagaggcuaaaauguuu

SEQ ID NO: 3184504 - RNA, 20 nt, Human
cugagagaggcuaaaauguu

SEQ ID NO: 3184505 - RNA, 19 nt, Human
cugagagaggcuaaaaugu

SEQ ID NO: 3184506 - RNA, 16 nt, Human
cugagagagcgcagcc

SEQ ID NO: 3184507 - RNA, 17 nt, Human
cugagagcccagaaaag

SEQ ID NO: 3184508 - RNA, 11 nt, Human
cugagagcaaa

SEQ ID NO: 3184509 - RNA, 23 nt, Human
cugagagaggcuaaaauguuuuc

SEQ ID NO: 3184510 - RNA, 23 nt, Human
cugagacagcccgggcucugccu

SEQ ID NO: 3184511 - RNA, 22 nt, Human
cugagacagcccgggcucugcc

SEQ ID NO: 3184512 - RNA, 21 nt, Human
cugagacucgcgacaaugcaa

SEQ ID NO: 3184513 - RNA, 20 nt, Human
cugagacucgcgacaaugca

SEQ ID NO: 3184514 - RNA, 16 nt, Human
cugagacagugaauuu

SEQ ID NO: 3184515 - RNA, 21 nt, Human
cugacccaugcugcccuguga

SEQ ID NO: 3184516 - RNA, 22 nt, Human
cugacccaugcugcccugugag

SEQ ID NO: 3184517 - RNA, 20 nt, Human
cugacccaugcugcccugug

SEQ ID NO: 3184518 - RNA, 17 nt, Human
cugacccaugggcagga

SEQ ID NO: 3184519 - RNA, 13 nt, Human
cugacccaugggc

SEQ ID NO: 3184520 - RNA, 19 nt, Human
cugacccaugggcaggaga

SEQ ID NO: 3184521 - RNA, 18 nt, Human
cugacaaccauuaaaguc

SEQ ID NO: 3184522 - RNA, 19 nt, Human
cugacaaccauuaaaguca

SEQ ID NO: 3184523 - RNA, 20 nt, Human
cugacaaccauuaaagucag

SEQ ID NO: 3184524 - RNA, 22 nt, Human
cugacaaccauuaaagucagaa

SEQ ID NO: 3184525 - RNA, 17 nt, Human
cugacaauacuguaugu

SEQ ID NO: 3184526 - RNA, 15 nt, Human
cugacaacagacuuc

SEQ ID NO: 3184527 - RNA, 18 nt, Human
cugacaacagacuucuga

SEQ ID NO: 3184528 - RNA, 19 nt, Human
cugacaacagacuucugaa

SEQ ID NO: 3184529 - RNA, 21 nt, Human
cugaaggacauugcggacagc

SEQ ID NO: 3184530 - RNA, 23 nt, Human
cugaaggacauugcggacagcca

SEQ ID NO: 3184531 - RNA, 18 nt, Human
cugaaggccccgcccagg

SEQ ID NO: 3184532 - RNA, 13 nt, Human
cugaaggaggcca

SEQ ID NO: 3184533 - RNA, 19 nt, Human
cugaaggccccgcccaggc

SEQ ID NO: 3184534 - RNA, 21 nt, Human
cugaaggccccgcccaggcuu

SEQ ID NO: 3184535 - RNA, 22 nt, Human
cugacaacacucauugaccuga

SEQ ID NO: 3184536 - RNA, 23 nt, Human
cugacaacacucauugaccugag

SEQ ID NO: 3184537 - RNA, 20 nt, Human
cugaauuuuuaugugugauu

SEQ ID NO: 3184538 - RNA, 18 nt, Human
cugaauuuuuauguguga

SEQ ID NO: 3184539 - RNA, 14 nt, Human
cugacaaauuuuaa

SEQ ID NO: 3184540 - RNA, 17 nt, Human
cugacaaauuuuaauua

SEQ ID NO: 3184541 - RNA, 16 nt, Human
cugaauuuuuaugugu

SEQ ID NO: 3184542 - RNA, 11 nt, Human
cucuuuuccua

SEQ ID NO: 3184543 - RNA, 13 nt, Human
cucuuuuguuguu

SEQ ID NO: 3184544 - RNA, 17 nt, Human
cucuuuuguuguuucuu

SEQ ID NO: 3184545 - RNA, 21 nt, Human
cucuuuugcuugccaaaguac

SEQ ID NO: 3184546 - RNA, 13 nt, Human
cugaaacauuuca

SEQ ID NO: 3184547 - RNA, 15 nt, Human
cugaaacaacaaaua

SEQ ID NO: 3184548 - RNA, 20 nt, Human
cugaaaauugccuuucugug

SEQ ID NO: 3184549 - RNA, 19 nt, Human
cugaaaauugccuuucugu

SEQ ID NO: 3184550 - RNA, 15 nt, Human
cugaaaauugccuuu

SEQ ID NO: 3184551 - RNA, 16 nt, Human
cucuugagccugggag

SEQ ID NO: 3184552 - RNA, 18 nt, Human
cucugcuccucuccccag

SEQ ID NO: 3184553 - RNA, 13 nt, Human
cucugcuccucuc

SEQ ID NO: 3184554 - RNA, 21 nt, Human
cucugcacuccccugcugggu

SEQ ID NO: 3184555 - RNA, 20 nt, Human
cucugcacuccccugcuggg

SEQ ID NO: 3184556 - RNA, 18 nt, Human
cucugcacuccccugcug

SEQ ID NO: 3184557 - RNA, 12 nt, Human
cucuguccaggc

SEQ ID NO: 3184558 - RNA, 16 nt, Human
cucuggugcugcagua

SEQ ID NO: 3184559 - RNA, 22 nt, Human
cucugguacaauuucuuuuggu

SEQ ID NO: 3184560 - RNA, 20 nt, Human
cucugguacaauuucuuuug

SEQ ID NO: 3184561 - RNA, 17 nt, Human
cucugguacaauuucuu

SEQ ID NO: 3184562 - RNA, 13 nt, Human
cucugcucuugca

SEQ ID NO: 3184563 - RNA, 16 nt, Human
cucugcucccccuuuu

SEQ ID NO: 3184564 - RNA, 14 nt, Human
cucugguccauaga

SEQ ID NO: 3184565 - RNA, 16 nt, Human
cucugcugacagacac

SEQ ID NO: 3184566 - RNA, 14 nt, Human
cucugcugacagac

SEQ ID NO: 3184567 - RNA, 13 nt, Human
cucugcugacaga

SEQ ID NO: 3184568 - RNA, 13 nt, Human
cucugcucccccu

SEQ ID NO: 3184569 - RNA, 12 nt, Human
cucugcuccccc

SEQ ID NO: 3184570 - RNA, 13 nt, Human
cucuuauugccca

SEQ ID NO: 3184571 - RNA, 16 nt, Human
cucuuagcccaugcug

SEQ ID NO: 3184572 - RNA, 20 nt, Human
cucuuauugcccacgcugga

SEQ ID NO: 3184573 - RNA, 19 nt, Human
cucuuauugcccacgcugg

SEQ ID NO: 3184574 - RNA, 15 nt, Human
cucuuauugcccacg

SEQ ID NO: 3184575 - RNA, 14 nt, Human
cucuuauugcccac

SEQ ID NO: 3184576 - RNA, 14 nt, Human
cucuucaaucucuu

SEQ ID NO: 3184577 - RNA, 17 nt, Human
cucuucaacugaccagc

SEQ ID NO: 3184578 - RNA, 16 nt, Human
cucuucaacugaccag

SEQ ID NO: 3184579 - RNA, 20 nt, Human
cucuucaacugaccagccuc

SEQ ID NO: 3184580 - RNA, 13 nt, Human
cucuucagcacaa

SEQ ID NO: 3184581 - RNA, 23 nt, Human
cucguguuauuuuaaucucagaa

SEQ ID NO: 3184582 - RNA, 20 nt, Human
cucucacagacaggaccccu

SEQ ID NO: 3184583 - RNA, 18 nt, Human
cucucacagacaggaccc

SEQ ID NO: 3184584 - RNA, 22 nt, Human
cucucaauuuuugguugaauaa

SEQ ID NO: 3184585 - RNA, 17 nt, Human
cucucacagacaggacc

SEQ ID NO: 3184586 - RNA, 14 nt, Human
cucucacagacagg

SEQ ID NO: 3184587 - RNA, 19 nt, Human
cucucaauuuuugguugaa

SEQ ID NO: 3184588 - RNA, 14 nt, Human
cucucaauuuuugg

SEQ ID NO: 3184589 - RNA, 13 nt, Human
cucucaauuuuug

SEQ ID NO: 3184590 - RNA, 19 nt, Human
cucucaaugcuguuugggu

SEQ ID NO: 3184591 - RNA, 23 nt, Human
cucucaccuugguuccuggggca

SEQ ID NO: 3184592 - RNA, 18 nt, Human
cucucaccuugguuccug

SEQ ID NO: 3184593 - RNA, 19 nt, Human
cucucaggaaaugcugacc

SEQ ID NO: 3184594 - RNA, 21 nt, Human
cucucaggaaaugcugaccca

SEQ ID NO: 3184595 - RNA, 20 nt, Human
cucucaggaaaugcugaccc

SEQ ID NO: 3184596 - RNA, 16 nt, Human
cucuauccugggcuuu

SEQ ID NO: 3184597 - RNA, 15 nt, Human
cucuauccugggcuu

SEQ ID NO: 3184598 - RNA, 15 nt, Human
cucuaucaccaagga

SEQ ID NO: 3184599 - RNA, 19 nt, Human
cucuaaaauauuuaugaag

SEQ ID NO: 3184600 - RNA, 11 nt, Human
cucuaaaauau

SEQ ID NO: 3184601 - RNA, 21 nt, Human
cucuaaaauauuuaugaagaa

SEQ ID NO: 3184602 - RNA, 14 nt, Human
cucgaacuggcugc

SEQ ID NO: 3184603 - RNA, 13 nt, Human
cucgaacuggcug

SEQ ID NO: 3184604 - RNA, 15 nt, Human
cucgaacuggcugca

SEQ ID NO: 3184605 - RNA, 22 nt, Human
cuccuggggguucuuucuuccu

SEQ ID NO: 3184606 - RNA, 20 nt, Human
cuccuggggguucuuucuuc

SEQ ID NO: 3184607 - RNA, 18 nt, Human
cuccuggggguucuuucu

SEQ ID NO: 3184608 - RNA, 14 nt, Human
cuccuggggguucu

SEQ ID NO: 3184609 - RNA, 23 nt, Human
cuccuggggguucuuucuuccuc

SEQ ID NO: 3184610 - RNA, 17 nt, Human
cucgaacuccugaccuu

SEQ ID NO: 3184611 - RNA, 12 nt, Human
cuccuacagccc

SEQ ID NO: 3184612 - RNA, 21 nt, Human
cuccucuccugacaauacugu

SEQ ID NO: 3184613 - RNA, 19 nt, Human
cuccuaaaaggcccagaga

SEQ ID NO: 3184614 - RNA, 18 nt, Human
cuccuaaaaggcccagag

SEQ ID NO: 3184615 - RNA, 17 nt, Human
cuccuaaaaggcccaga

SEQ ID NO: 3184616 - RNA, 13 nt, Human
cuccucucugccc

SEQ ID NO: 3184617 - RNA, 14 nt, Human
cuccucucugcccu

SEQ ID NO: 3184618 - RNA, 15 nt, Human
cuccucucugcccua

SEQ ID NO: 3184619 - RNA, 18 nt, Human
cuccucugcugcuggcug

SEQ ID NO: 3184620 - RNA, 15 nt, Human
cuccucugcugcugg

SEQ ID NO: 3184621 - RNA, 19 nt, Human
cuccucucugcccuaaugc

SEQ ID NO: 3184622 - RNA, 16 nt, Human
cuccucugcugcuggc

SEQ ID NO: 3184623 - RNA, 16 nt, Human
cuccuaaaaggcccag

SEQ ID NO: 3184624 - RNA, 23 nt, Human
cuccucuucaacugaccagccuc

SEQ ID NO: 3184625 - RNA, 18 nt, Human
cuccucuucaacugacca

SEQ ID NO: 3184626 - RNA, 12 nt, Human
cuccuggacucc

SEQ ID NO: 3184627 - RNA, 15 nt, Human
cuccuggacuccugc

SEQ ID NO: 3184628 - RNA, 16 nt, Human
cuccuggcccacugca

SEQ ID NO: 3184629 - RNA, 18 nt, Human
cuccuggcccacugcauc

SEQ ID NO: 3184630 - RNA, 15 nt, Human
cucccccagccccau

SEQ ID NO: 3184631 - RNA, 20 nt, Human
cucccccagccccauccucu

SEQ ID NO: 3184632 - RNA, 13 nt, Human
cucccccagccac

SEQ ID NO: 3184633 - RNA, 22 nt, Human
cucccccagccccauccucugu

SEQ ID NO: 3184634 - RNA, 16 nt, Human
cucccccagccacucc

SEQ ID NO: 3184635 - RNA, 14 nt, Human
cucccccagccacu

SEQ ID NO: 3184636 - RNA, 12 nt, Human
cucccccauccu

SEQ ID NO: 3184637 - RNA, 13 nt, Human
cucccccauccua

SEQ ID NO: 3184638 - RNA, 13 nt, Human
cucccccaucucu

SEQ ID NO: 3184639 - RNA, 12 nt, Human
cucaugccucag

SEQ ID NO: 3184640 - RNA, 18 nt, Human
cuccaacuccaacaucca

SEQ ID NO: 3184641 - RNA, 12 nt, Human
cuccaacuccaa

SEQ ID NO: 3184642 - RNA, 14 nt, Human
cucaugugauuuac

SEQ ID NO: 3184643 - RNA, 13 nt, Human
cuccaagcaggac

SEQ ID NO: 3184644 - RNA, 14 nt, Human
cuccaagcaggaca

SEQ ID NO: 3184645 - RNA, 22 nt, Human
cuccaagcaggacauggacaag

SEQ ID NO: 3184646 - RNA, 24 nt, Human
cuccaagcaggacauggacaagga

SEQ ID NO: 3184647 - RNA, 22 nt, Human
cuccaagaccuucuccuucacc

SEQ ID NO: 3184648 - RNA, 21 nt, Human
cuccaagaccuucuccuucac

SEQ ID NO: 3184649 - RNA, 23 nt, Human
cuccaagcccaguucagcuuggg

SEQ ID NO: 3184650 - RNA, 16 nt, Human
cuccaagccagcaagc

SEQ ID NO: 3184651 - RNA, 15 nt, Human
cuccaagccagcaag

SEQ ID NO: 3184652 - RNA, 13 nt, Human
cuccaagccagca

SEQ ID NO: 3184653 - RNA, 19 nt, Human
cuccaagcuccaucuccac

SEQ ID NO: 3184654 - RNA, 18 nt, Human
cuccaagcuccaucucca

SEQ ID NO: 3184655 - RNA, 14 nt, Human
cuccaagcuccauc

SEQ ID NO: 3184656 - RNA, 13 nt, Human
cuccaagcuccca

SEQ ID NO: 3184657 - RNA, 14 nt, Human
cuccaagcucccag

SEQ ID NO: 3184658 - RNA, 15 nt, Human
cuccaagcucccagg

SEQ ID NO: 3184659 - RNA, 16 nt, Human
cuccaagcucccaggc

SEQ ID NO: 3184660 - RNA, 13 nt, Human
cuccacuuggucu

SEQ ID NO: 3184661 - RNA, 15 nt, Human
cuccacuuggucugu

SEQ ID NO: 3184662 - RNA, 16 nt, Human
cuccacuggauggagg

SEQ ID NO: 3184663 - RNA, 16 nt, Human
cuccacuuggucugug

SEQ ID NO: 3184664 - RNA, 17 nt, Human
cuccacuuggucuguga

SEQ ID NO: 3184665 - RNA, 21 nt, Human
cuccacuuggucugugagaug

SEQ ID NO: 3184666 - RNA, 22 nt, Human
cuccacuuggucugugagaugc

SEQ ID NO: 3184667 - RNA, 13 nt, Human
cucagucucccuc

SEQ ID NO: 3184668 - RNA, 22 nt, Human
cucagguugucugaagucacug

SEQ ID NO: 3184669 - RNA, 15 nt, Human
cucagguuuguuuug

SEQ ID NO: 3184670 - RNA, 15 nt, Human
cucagucucccuccc

SEQ ID NO: 3184671 - RNA, 16 nt, Human
cucagucucccucccu

SEQ ID NO: 3184672 - RNA, 17 nt, Human
cucagucucccucccuu

SEQ ID NO: 3184673 - RNA, 14 nt, Human
cucagucucacauu

SEQ ID NO: 3184674 - RNA, 21 nt, Human
cucaucuggaguucucaaaga

SEQ ID NO: 3184675 - RNA, 17 nt, Human
cucaucuggaguucuca

SEQ ID NO: 3184676 - RNA, 23 nt, Human
cuccacuuggucugugagaugcu

SEQ ID NO: 3184677 - RNA, 16 nt, Human
cuccacuuucuagcca

SEQ ID NO: 3184678 - RNA, 19 nt, Human
cuccacuuucuagccagag

SEQ ID NO: 3184679 - RNA, 15 nt, Human
cucccaccuuuaauc

SEQ ID NO: 3184680 - RNA, 21 nt, Human
cuccagggcucaacacuguga

SEQ ID NO: 3184681 - RNA, 10 nt, Human
cuccagggcu

SEQ ID NO: 3184682 - RNA, 21 nt, Human
cuaauucuuugaccuguuggg

SEQ ID NO: 3184683 - RNA, 22 nt, Human
cuaauucuuugaccuguuggga

SEQ ID NO: 3184684 - RNA, 15 nt, Human
cuaauucuaugccug

SEQ ID NO: 3184685 - RNA, 14 nt, Human
cuaauucuuugcaa

SEQ ID NO: 3184686 - RNA, 12 nt, Human
cuaauucuuugc

SEQ ID NO: 3184687 - RNA, 18 nt, Human
cuaauucuuugcaaaaau

SEQ ID NO: 3184688 - RNA, 17 nt, Human
cuaauucuuugcaaaaa

SEQ ID NO: 3184689 - RNA, 16 nt, Human
cuaauucuuugcaaaa

SEQ ID NO: 3184690 - RNA, 15 nt, Human
cuaauucuuugcaaa

SEQ ID NO: 3184691 - RNA, 23 nt, Human
cuaaguaaaaccacagcaguuga

SEQ ID NO: 3184692 - RNA, 22 nt, Human
cuaaguaaaaccacagcaguug

SEQ ID NO: 3184693 - RNA, 23 nt, Human
cuaagugauccucccaccucagc

SEQ ID NO: 3184694 - RNA, 17 nt, Human
cuaaguaaaucucuucu

SEQ ID NO: 3184695 - RNA, 17 nt, Human
cuaagugcuaagugcuu

SEQ ID NO: 3184696 - RNA, 17 nt, Human
cuaagugcuuauuacau

SEQ ID NO: 3184697 - RNA, 21 nt, Human
cuaagugcuuauuacauuuua

SEQ ID NO: 3184698 - RNA, 21 nt, Human
cuaagugguacuaacuuuccu

SEQ ID NO: 3184699 - RNA, 19 nt, Human
cguguguagauaguaugca

SEQ ID NO: 3184700 - RNA, 11 nt, Human
cgugugugugu

SEQ ID NO: 3184701 - RNA, 20 nt, Human
cuaaguaaaaccacagcagu

SEQ ID NO: 3184702 - RNA, 18 nt, Human
cuacauacuauggaauuu

SEQ ID NO: 3184703 - RNA, 18 nt, Human
cuacauacaauuccaaac

SEQ ID NO: 3184704 - RNA, 22 nt, Human
cuacaguugaaaaacagcugag

SEQ ID NO: 3184705 - RNA, 19 nt, Human
cuacaguugaaaaacagcu

SEQ ID NO: 3184706 - RNA, 21 nt, Human
cuacaguugaaaaacagcuga

SEQ ID NO: 3184707 - RNA, 20 nt, Human
cuacaguccucccaucucac

SEQ ID NO: 3184708 - RNA, 18 nt, Human
cuacaguccucccaucuc

SEQ ID NO: 3184709 - RNA, 15 nt, Human
cuacaaaaacacagc

SEQ ID NO: 3184710 - RNA, 17 nt, Human
cuacaaaaacacagcaa

SEQ ID NO: 3184711 - RNA, 16 nt, Human
cuacaaaaacacagca

SEQ ID NO: 3184712 - RNA, 18 nt, Human
cuacaaaaacacagcaag

SEQ ID NO: 3184713 - RNA, 19 nt, Human
cuacaguccucccaucuca

SEQ ID NO: 3184714 - RNA, 20 nt, Human
cuacaugagguacugagagu

SEQ ID NO: 3184715 - RNA, 18 nt, Human
cuacaugagguacugaga

SEQ ID NO: 3184716 - RNA, 14 nt, Human
cuacauauugaaua

SEQ ID NO: 3184717 - RNA, 12 nt, Human
cuacauauugaa

SEQ ID NO: 3184718 - RNA, 23 nt, Human
cuacgaguaauugcauuugcuuu

SEQ ID NO: 3184719 - RNA, 21 nt, Human
cuacguuuacucacagccagc

SEQ ID NO: 3184720 - RNA, 17 nt, Human
cuacguuaccaggcagg

SEQ ID NO: 3184721 - RNA, 12 nt, Human
cuagaacucccu

SEQ ID NO: 3184722 - RNA, 22 nt, Human
cuagaagauuuugaaauuuuua

SEQ ID NO: 3184723 - RNA, 22 nt, Human
cuagaaguaacuggugauauau

SEQ ID NO: 3184724 - RNA, 14 nt, Human
cuagacacacaaag

SEQ ID NO: 3184725 - RNA, 13 nt, Human
cuagacacacaaa

SEQ ID NO: 3184726 - RNA, 15 nt, Human
cuagcauauaugugu

SEQ ID NO: 3184727 - RNA, 17 nt, Human
cuagacacacaaagcag

SEQ ID NO: 3184728 - RNA, 12 nt, Human
cuagacacacaa

SEQ ID NO: 3184729 - RNA, 16 nt, Human
cuagaauuuuaagccu

SEQ ID NO: 3184730 - RNA, 15 nt, Human
cuagaauuuuaagcc

SEQ ID NO: 3184731 - RNA, 14 nt, Human
cuagaauuuuaagc

SEQ ID NO: 3184732 - RNA, 12 nt, Human
cuagaauuuuaa

SEQ ID NO: 3184733 - RNA, 14 nt, Human
cuaucuaaauguug

SEQ ID NO: 3184734 - RNA, 15 nt, Human
cuaucucccccagcc

SEQ ID NO: 3184735 - RNA, 14 nt, Human
cuaucucccccagc

SEQ ID NO: 3184736 - RNA, 18 nt, Human
cuaucaugucaaacguga

SEQ ID NO: 3184737 - RNA, 19 nt, Human
cuagccaccgccuccuaca

SEQ ID NO: 3184738 - RNA, 12 nt, Human
cuagccagagga

SEQ ID NO: 3184739 - RNA, 13 nt, Human
cuagccagaggag

SEQ ID NO: 3184740 - RNA, 15 nt, Human
cuagccagaggagag

SEQ ID NO: 3184741 - RNA, 22 nt, Human
cuaguuguuugauucagacagc

SEQ ID NO: 3184742 - RNA, 23 nt, Human
cuaguuguuugauucagacagcu

SEQ ID NO: 3184743 - RNA, 17 nt, Human
cucaaaacugcacuguc

SEQ ID NO: 3184744 - RNA, 13 nt, Human
cuauuuuuuuaga

SEQ ID NO: 3184745 - RNA, 17 nt, Human
cuauuuuuuuagauuga

SEQ ID NO: 3184746 - RNA, 22 nt, Human
cuauuuuuuuagauugagaaau

SEQ ID NO: 3184747 - RNA, 23 nt, Human
cucaaaauaccaugccauuuaaa

SEQ ID NO: 3184748 - RNA, 18 nt, Human
cucaaaagcugggcaggu

SEQ ID NO: 3184749 - RNA, 13 nt, Human
cucaaaauuagau

SEQ ID NO: 3184750 - RNA, 11 nt, Human
cucaaaauuau

SEQ ID NO: 3184751 - RNA, 16 nt, Human
cuaucucccccagccc

SEQ ID NO: 3184752 - RNA, 17 nt, Human
cuaucucccccagcccc

SEQ ID NO: 3184753 - RNA, 19 nt, Human
cuauuaacaauuaauuguc

SEQ ID NO: 3184754 - RNA, 20 nt, Human
cuauuaacaauuaauugucu

SEQ ID NO: 3184755 - RNA, 21 nt, Human
cuauuaacaauuaauugucuu

SEQ ID NO: 3184756 - RNA, 15 nt, Human
cucaaugcacugaca

SEQ ID NO: 3184757 - RNA, 13 nt, Human
cucaaugcacuga

SEQ ID NO: 3184758 - RNA, 14 nt, Human
cucaaugcuguuug

SEQ ID NO: 3184759 - RNA, 12 nt, Human
cucaauuucaau

SEQ ID NO: 3184760 - RNA, 17 nt, Human
cucaaugcuguuugggu

SEQ ID NO: 3184761 - RNA, 14 nt, Human
cucaauuucucuau

SEQ ID NO: 3184762 - RNA, 11 nt, Human
cucacaaaaga

SEQ ID NO: 3184763 - RNA, 21 nt, Human
cucaauuuuugguugaauaaa

SEQ ID NO: 3184764 - RNA, 12 nt, Human
cucaauuuuugg

SEQ ID NO: 3184765 - RNA, 20 nt, Human
cucaaacucuugaccucagg

SEQ ID NO: 3184766 - RNA, 17 nt, Human
cucaaacuccauucucc

SEQ ID NO: 3184767 - RNA, 12 nt, Human
cucaaaccccug

SEQ ID NO: 3184768 - RNA, 16 nt, Human
cucaaaccccugaccu

SEQ ID NO: 3184769 - RNA, 14 nt, Human
cucaauaaaguaca

SEQ ID NO: 3184770 - RNA, 17 nt, Human
cguaaaaacugaaguuc

SEQ ID NO: 3184771 - RNA, 16 nt, Human
cgguuuuacugcagcu

SEQ ID NO: 3184772 - RNA, 16 nt, Human
cguaaaaacugaaguu

SEQ ID NO: 3184773 - RNA, 19 nt, Human
cgguuaacaaauaacaacu

SEQ ID NO: 3184774 - RNA, 14 nt, Human
cgguuaacaaauaa

SEQ ID NO: 3184775 - RNA, 23 nt, Human
cgguguuuaagacauuuuuggaa

SEQ ID NO: 3184776 - RNA, 22 nt, Human
cgguuuaucgcccuggcaggca

SEQ ID NO: 3184777 - RNA, 20 nt, Human
cgguuuaucgcccuggcagg

SEQ ID NO: 3184778 - RNA, 21 nt, Human
cgugguugggaacacagcauu

SEQ ID NO: 3184779 - RNA, 20 nt, Human
cguguaaccauggacccaau

SEQ ID NO: 3184780 - RNA, 14 nt, Human
cgugugcuguguuu

SEQ ID NO: 3184781 - RNA, 12 nt, Human
cgugugcugugu

SEQ ID NO: 3184782 - RNA, 17 nt, Human
cgugaggccagagacac

SEQ ID NO: 3184783 - RNA, 16 nt, Human
cgugaguccuggcaug

SEQ ID NO: 3184784 - RNA, 17 nt, Human
cgugaguccuggcaugg

SEQ ID NO: 3184785 - RNA, 16 nt, Human
cgugaggccagagaca

SEQ ID NO: 3184786 - RNA, 15 nt, Human
cgugaggcccguggg

SEQ ID NO: 3184787 - RNA, 23 nt, Human
cgccuggugaugcgcaguugcug

SEQ ID NO: 3184788 - RNA, 13 nt, Human
cgcugauguucac

SEQ ID NO: 3184789 - RNA, 16 nt, Human
cggagucccaccuugg

SEQ ID NO: 3184790 - RNA, 15 nt, Human
cggaggaccagggcu

SEQ ID NO: 3184791 - RNA, 13 nt, Human
cggaggaccaggg

SEQ ID NO: 3184792 - RNA, 11 nt, Human
cgggcucagca

SEQ ID NO: 3184793 - RNA, 14 nt, Human
cgggcucugccucc

SEQ ID NO: 3184794 - RNA, 16 nt, Human
cgggcucugccuccca

SEQ ID NO: 3184795 - RNA, 15 nt, Human
cgggcucagcaaaag

SEQ ID NO: 3184796 - RNA, 13 nt, Human
cgggcucugccuc

SEQ ID NO: 3184797 - RNA, 17 nt, Human
cgggcucugccucccau

SEQ ID NO: 3184798 - RNA, 14 nt, Human
cggggacagcuccu

SEQ ID NO: 3184799 - RNA, 18 nt, Human
cgguguggagaagcggcu

SEQ ID NO: 3184800 - RNA, 23 nt, Human
cggugugggggccccgucucagg

SEQ ID NO: 3184801 - RNA, 20 nt, Human
cggugugggggccccgucuc

SEQ ID NO: 3184802 - RNA, 13 nt, Human
cggugugggggcc

SEQ ID NO: 3184803 - RNA, 13 nt, Human
cgguguggagaag

SEQ ID NO: 3184804 - RNA, 15 nt, Human
cggggacagcuccuu

SEQ ID NO: 3184805 - RNA, 14 nt, Human
cggcucacugcagc

SEQ ID NO: 3184806 - RNA, 15 nt, Human
cggcucacugcagcc

SEQ ID NO: 3184807 - RNA, 20 nt, Human
cggagucccaccuuggcugc

SEQ ID NO: 3184808 - RNA, 18 nt, Human
cggagucccaccuuggcu

SEQ ID NO: 3184809 - RNA, 16 nt, Human
cggcucacugcagccu

SEQ ID NO: 3184810 - RNA, 21 nt, Human
cggcucacugcauccuccgcc

SEQ ID NO: 3184811 - RNA, 14 nt, Human
cggagucccaccuu

SEQ ID NO: 3184812 - RNA, 12 nt, Human
cggcuccaggcu

SEQ ID NO: 3184813 - RNA, 16 nt, Human
cggcuccaggcuccuu

SEQ ID NO: 3184814 - RNA, 15 nt, Human
cggcuccaggcuccu

SEQ ID NO: 3184815 - RNA, 14 nt, Human
cggcuccaggcucc

SEQ ID NO: 3184816 - RNA, 13 nt, Human
cggcuccaggcuc

SEQ ID NO: 3184817 - RNA, 14 nt, Human
cgggccacagagaa

SEQ ID NO: 3184818 - RNA, 12 nt, Human
cgggccacagag

SEQ ID NO: 3184819 - RNA, 19 nt, Human
cggcuccaguccccagaac

SEQ ID NO: 3184820 - RNA, 20 nt, Human
cggcuccaguccccagaacu

SEQ ID NO: 3184821 - RNA, 18 nt, Human
cgacagagcaguugagag

SEQ ID NO: 3184822 - RNA, 11 nt, Human
cgacagagcag

SEQ ID NO: 3184823 - RNA, 13 nt, Human
cgacagccuggca

SEQ ID NO: 3184824 - RNA, 12 nt, Human
cgacagccuggc

SEQ ID NO: 3184825 - RNA, 14 nt, Human
cgacagccuggcac

SEQ ID NO: 3184826 - RNA, 12 nt, Human
cgacaaugcaaa

SEQ ID NO: 3184827 - RNA, 15 nt, Human
cgacaaaucugucug

SEQ ID NO: 3184828 - RNA, 14 nt, Human
cgacaaaucugucu

SEQ ID NO: 3184829 - RNA, 20 nt, Human
cgacaacagauuggauuuua

SEQ ID NO: 3184830 - RNA, 17 nt, Human
cgacaacagauuggauu

SEQ ID NO: 3184831 - RNA, 16 nt, Human
cgacaaaucugucugc

SEQ ID NO: 3184832 - RNA, 13 nt, Human
cgacaaugcaaac

SEQ ID NO: 3184833 - RNA, 16 nt, Human
cgacaagcacagucag

SEQ ID NO: 3184834 - RNA, 18 nt, Human
cgacacggucucggauca

SEQ ID NO: 3184835 - RNA, 16 nt, Human
cgaauuuuaaaagaug

SEQ ID NO: 3184836 - RNA, 13 nt, Human
ccuuuuuauuuau

SEQ ID NO: 3184837 - RNA, 12 nt, Human
ccuuuuuauuua

SEQ ID NO: 3184838 - RNA, 16 nt, Human
ccuuuuuauuuauaug

SEQ ID NO: 3184839 - RNA, 18 nt, Human
ccuuuuuauuuauaugua

SEQ ID NO: 3184840 - RNA, 20 nt, Human
ccuuuuuauuuauauguaug

SEQ ID NO: 3184841 - RNA, 22 nt, Human
ccuuuuuauuuauauguaugug

SEQ ID NO: 3184842 - RNA, 13 nt, Human
ccuuuuugcuuga

SEQ ID NO: 3184843 - RNA, 19 nt, Human
cgacccuugccgucuaccu

SEQ ID NO: 3184844 - RNA, 20 nt, Human
cgacccuugccgucuaccug

SEQ ID NO: 3184845 - RNA, 20 nt, Human
cgacuagacacacaaagcag

SEQ ID NO: 3184846 - RNA, 15 nt, Human
cgacuagacacacaa

SEQ ID NO: 3184847 - RNA, 17 nt, Human
cgacuagacacacaaag

SEQ ID NO: 3184848 - RNA, 16 nt, Human
cgacuagacacacaaa

SEQ ID NO: 3184849 - RNA, 17 nt, Human
cgacugcccggcagggu

SEQ ID NO: 3184850 - RNA, 15 nt, Human
ccuuucauuuugcuu

SEQ ID NO: 3184851 - RNA, 19 nt, Human
ccuuucauuugcuaucucu

SEQ ID NO: 3184852 - RNA, 17 nt, Human
ccuuucagcaggcagcc

SEQ ID NO: 3184853 - RNA, 15 nt, Human
ccuuuugagugccuu

SEQ ID NO: 3184854 - RNA, 17 nt, Human
ccuuuugagugccuuac

SEQ ID NO: 3184855 - RNA, 21 nt, Human
ccuuucaauaggaaaaacuga

SEQ ID NO: 3184856 - RNA, 18 nt, Human
ccuuuacuugucuuucug

SEQ ID NO: 3184857 - RNA, 17 nt, Human
ccuuuacuugucuuucu

SEQ ID NO: 3184858 - RNA, 18 nt, Human
ccuuucaauaggaaaaac

SEQ ID NO: 3184859 - RNA, 15 nt, Human
ccuuucacaaccuuc

SEQ ID NO: 3184860 - RNA, 22 nt, Human
ccuuucacuucuuucccuuccu

SEQ ID NO: 3184861 - RNA, 18 nt, Human
ccuuucacuucuuucccu

SEQ ID NO: 3184862 - RNA, 17 nt, Human
ccuuucacuucuuuccc

SEQ ID NO: 3184863 - RNA, 15 nt, Human
ccuuucacuucuuuc

SEQ ID NO: 3184864 - RNA, 16 nt, Human
ccuuucagcaggcagc

SEQ ID NO: 3184865 - RNA, 20 nt, Human
ccuugccccaacccuucuuc

SEQ ID NO: 3184866 - RNA, 14 nt, Human
ccuuuaagagaaau

SEQ ID NO: 3184867 - RNA, 19 nt, Human
ccuuuaaucagguccugcu

SEQ ID NO: 3184868 - RNA, 21 nt, Human
ccuuuaaucagguccugcuca

SEQ ID NO: 3184869 - RNA, 20 nt, Human
ccuuuaaucagguccugcuc

SEQ ID NO: 3184870 - RNA, 16 nt, Human
ccuugccgucuaccug

SEQ ID NO: 3184871 - RNA, 14 nt, Human
cgccuacaggagug

SEQ ID NO: 3184872 - RNA, 21 nt, Human
cgccuccaaccccucgcccag

SEQ ID NO: 3184873 - RNA, 19 nt, Human
cgccuccaaccccucgccc

SEQ ID NO: 3184874 - RNA, 13 nt, Human
cgccucugcauuc

SEQ ID NO: 3184875 - RNA, 22 nt, Human
cgccuccaaccccucgcccagu

SEQ ID NO: 3184876 - RNA, 18 nt, Human
cgcaggcccccaggugcc

SEQ ID NO: 3184877 - RNA, 22 nt, Human
cgcaggauucuuccucccuccc

SEQ ID NO: 3184878 - RNA, 13 nt, Human
cgcaggcuggccc

SEQ ID NO: 3184879 - RNA, 19 nt, Human
cgcaggccucccugccagu

SEQ ID NO: 3184880 - RNA, 18 nt, Human
cgcaggccucccugccag

SEQ ID NO: 3184881 - RNA, 16 nt, Human
cgcaggccucccugcc

SEQ ID NO: 3184882 - RNA, 14 nt, Human
cgauagugguggug

SEQ ID NO: 3184883 - RNA, 16 nt, Human
cgauaguuuacugaga

SEQ ID NO: 3184884 - RNA, 14 nt, Human
cgaucacaaaugac

SEQ ID NO: 3184885 - RNA, 15 nt, Human
cgaucacaaaugacu

SEQ ID NO: 3184886 - RNA, 17 nt, Human
cgaucacaaaugacuuu

SEQ ID NO: 3184887 - RNA, 18 nt, Human
cgaucacaaaugacuuua

SEQ ID NO: 3184888 - RNA, 19 nt, Human
cgaucacaaaugacuuuau

SEQ ID NO: 3184889 - RNA, 21 nt, Human
cgaucacaaaugacuuuauua

SEQ ID NO: 3184890 - RNA, 16 nt, Human
cgaguagcugggacua

SEQ ID NO: 3184891 - RNA, 17 nt, Human
cgagucauccagaaugu

SEQ ID NO: 3184892 - RNA, 22 nt, Human
ccagggggccagucccugaggc

SEQ ID NO: 3184893 - RNA, 12 nt, Human
ccagucaccccg

SEQ ID NO: 3184894 - RNA, 20 nt, Human
ccagucaccccggccaccug

SEQ ID NO: 3184895 - RNA, 21 nt, Human
ccagucaccccggccaccugc

SEQ ID NO: 3184896 - RNA, 19 nt, Human
ccagucaccccggccaccu

SEQ ID NO: 3184897 - RNA, 14 nt, Human
ccaguauuuuuaaa

SEQ ID NO: 3184898 - RNA, 14 nt, Human
ccagucccagcagc

SEQ ID NO: 3184899 - RNA, 13 nt, Human
ccagucccagcag

SEQ ID NO: 3184900 - RNA, 20 nt, Human
ccagucccagcagccagcca

SEQ ID NO: 3184901 - RNA, 18 nt, Human
ccagucccagcagccagc

SEQ ID NO: 3184902 - RNA, 17 nt, Human
ccagucccagcagccag

SEQ ID NO: 3184903 - RNA, 15 nt, Human
ccagucccagcagcc

SEQ ID NO: 3184904 - RNA, 21 nt, Human
ccaguccccagaacucugccu

SEQ ID NO: 3184905 - RNA, 16 nt, Human
ccaguccccagaacuc

SEQ ID NO: 3184906 - RNA, 15 nt, Human
ccaguccccagaacu

SEQ ID NO: 3184907 - RNA, 19 nt, Human
ccaggcuggcgugcagugg

SEQ ID NO: 3184908 - RNA, 22 nt, Human
ccaggcugggagagccuuccag

SEQ ID NO: 3184909 - RNA, 23 nt, Human
ccaggggccuuugggugcuguuu

SEQ ID NO: 3184910 - RNA, 16 nt, Human
ccaggggccuuugggu

SEQ ID NO: 3184911 - RNA, 15 nt, Human
ccaggcugggagagc

SEQ ID NO: 3184912 - RNA, 17 nt, Human
ccaggcugggagagccu

SEQ ID NO: 3184913 - RNA, 18 nt, Human
ccaggcugggagagccuu

SEQ ID NO: 3184914 - RNA, 21 nt, Human
ccaggcugggagagccuucca

SEQ ID NO: 3184915 - RNA, 13 nt, Human
ccaggcugggaga

SEQ ID NO: 3184916 - RNA, 14 nt, Human
ccaggcugggagag

SEQ ID NO: 3184917 - RNA, 17 nt, Human
ccaggcaacuugggaac

SEQ ID NO: 3184918 - RNA, 16 nt, Human
ccaggcaaauaaaauu

SEQ ID NO: 3184919 - RNA, 18 nt, Human
ccaggcaaauaaaauucc

SEQ ID NO: 3184920 - RNA, 19 nt, Human
ccaggcaaauaaaauuccc

SEQ ID NO: 3184921 - RNA, 22 nt, Human
ccaggauguacaaggacagccc

SEQ ID NO: 3184922 - RNA, 23 nt, Human
ccaggagucccacuccaagccag

SEQ ID NO: 3184923 - RNA, 19 nt, Human
ccaggagucccacuccaag

SEQ ID NO: 3184924 - RNA, 17 nt, Human
ccaggagggagcagagg

SEQ ID NO: 3184925 - RNA, 21 nt, Human
ccagccccuggaugcagccuc

SEQ ID NO: 3184926 - RNA, 10 nt, Human
ccagccccuu

SEQ ID NO: 3184927 - RNA, 19 nt, Human
ccagcagccuggacccugu

SEQ ID NO: 3184928 - RNA, 18 nt, Human
ccagccccuggaugcagc

SEQ ID NO: 3184929 - RNA, 15 nt, Human
ccagcagccuggacc

SEQ ID NO: 3184930 - RNA, 14 nt, Human
ccagcagccuggac

SEQ ID NO: 3184931 - RNA, 22 nt, Human
ccaggaaaggcuccaggagcag

SEQ ID NO: 3184932 - RNA, 23 nt, Human
ccaggaaaggcuccaggagcagc

SEQ ID NO: 3184933 - RNA, 21 nt, Human
ccaggaaaggcuccaggagca

SEQ ID NO: 3184934 - RNA, 18 nt, Human
ccagcuugaaaccuucac

SEQ ID NO: 3184935 - RNA, 20 nt, Human
ccaggaaaggcuccaggagc

SEQ ID NO: 3184936 - RNA, 16 nt, Human
ccagcuuaucucaggg

SEQ ID NO: 3184937 - RNA, 19 nt, Human
ccagcuucacuucugacuc

SEQ ID NO: 3184938 - RNA, 16 nt, Human
ccagcuucacuucuga

SEQ ID NO: 3184939 - RNA, 15 nt, Human
ccagcuucacuucug

SEQ ID NO: 3184940 - RNA, 14 nt, Human
ccagcuucacuucu

SEQ ID NO: 3184941 - RNA, 15 nt, Human
ccagcuuccagcagg

SEQ ID NO: 3184942 - RNA, 14 nt, Human
ccagcuuccagcag

SEQ ID NO: 3184943 - RNA, 20 nt, Human
ccagcuucacuucugacucu

SEQ ID NO: 3184944 - RNA, 13 nt, Human
ccagcuuccagca

SEQ ID NO: 3184945 - RNA, 17 nt, Human
ccagcuuccagcaggag

SEQ ID NO: 3184946 - RNA, 16 nt, Human
ccagcuuccagcagga

SEQ ID NO: 3184947 - RNA, 23 nt, Human
ccagcagagcaccuuagacaguc

SEQ ID NO: 3184948 - RNA, 19 nt, Human
ccagcagagcaccuuagac

SEQ ID NO: 3184949 - RNA, 22 nt, Human
ccacucucucuuguucuuacuu

SEQ ID NO: 3184950 - RNA, 21 nt, Human
ccacucucucuuguucuuacu

SEQ ID NO: 3184951 - RNA, 22 nt, Human
ccauuuaaagcuuauuaaaacu

SEQ ID NO: 3184952 - RNA, 23 nt, Human
ccauuuacugcauucuucugauc

SEQ ID NO: 3184953 - RNA, 16 nt, Human
ccauuuacugcauucu

SEQ ID NO: 3184954 - RNA, 20 nt, Human
ccauuuaauggggaggacaa

SEQ ID NO: 3184955 - RNA, 13 nt, Human
ccauuuaaagcuu

SEQ ID NO: 3184956 - RNA, 22 nt, Human
ccauugagaccgugaagauacu

SEQ ID NO: 3184957 - RNA, 22 nt, Human
ccauuuagaauggugauuuuaa

SEQ ID NO: 3184958 - RNA, 13 nt, Human
ccauuuagaaugg

SEQ ID NO: 3184959 - RNA, 16 nt, Human
ccauuuccccagggca

SEQ ID NO: 3184960 - RNA, 15 nt, Human
ccauuuccccagggc

SEQ ID NO: 3184961 - RNA, 13 nt, Human
ccauuuccuuaug

SEQ ID NO: 3184962 - RNA, 17 nt, Human
ccauuuccccagggcac

SEQ ID NO: 3184963 - RNA, 17 nt, Human
ccauuuccuuaugcugu

SEQ ID NO: 3184964 - RNA, 15 nt, Human
ccauugaacucugag

SEQ ID NO: 3184965 - RNA, 15 nt, Human
ccaugggccuccugu

SEQ ID NO: 3184966 - RNA, 14 nt, Human
ccaugggccuccug

SEQ ID NO: 3184967 - RNA, 14 nt, Human
ccaugggcaggaga

SEQ ID NO: 3184968 - RNA, 13 nt, Human
ccaugggcaggag

SEQ ID NO: 3184969 - RNA, 20 nt, Human
ccaucccaaacccuucagug

SEQ ID NO: 3184970 - RNA, 20 nt, Human
ccauacacacgcugccuucg

SEQ ID NO: 3184971 - RNA, 18 nt, Human
ccauacacacgcugccuu

SEQ ID NO: 3184972 - RNA, 14 nt, Human
ccauacacacgcug

SEQ ID NO: 3184973 - RNA, 12 nt, Human
ccauacacacgc

SEQ ID NO: 3184974 - RNA, 19 nt, Human
ccauaagcaacaauuuuca

SEQ ID NO: 3184975 - RNA, 20 nt, Human
ccauaauuuuuuuuuuccuu

SEQ ID NO: 3184976 - RNA, 12 nt, Human
ccaucccagccc

SEQ ID NO: 3184977 - RNA, 23 nt, Human
ccaucccaaacccuucagugcca

SEQ ID NO: 3184978 - RNA, 13 nt, Human
ccaugagccucag

SEQ ID NO: 3184979 - RNA, 20 nt, Human
ccaucccugaaggccccgcc

SEQ ID NO: 3184980 - RNA, 16 nt, Human
ccauccccuguagagu

SEQ ID NO: 3184981 - RNA, 11 nt, Human
ccauccccucc

SEQ ID NO: 3184982 - RNA, 14 nt, Human
ccaugaguccccug

SEQ ID NO: 3184983 - RNA, 15 nt, Human
ccaugaguccccugu

SEQ ID NO: 3184984 - RNA, 16 nt, Human
ccaugaguccccuguu

SEQ ID NO: 3184985 - RNA, 13 nt, Human
ccaugggccuccu

SEQ ID NO: 3184986 - RNA, 13 nt, Human
ccaugaguccccu

SEQ ID NO: 3184987 - RNA, 19 nt, Human
ccaugagccucagcauccu

SEQ ID NO: 3184988 - RNA, 18 nt, Human
ccaugagccucagcaucc

SEQ ID NO: 3184989 - RNA, 14 nt, Human
ccaugagccucagc

SEQ ID NO: 3184990 - RNA, 18 nt, Human
ccccugcacuccagccug

SEQ ID NO: 3184991 - RNA, 16 nt, Human
ccccugcaaagcccag

SEQ ID NO: 3184992 - RNA, 13 nt, Human
ccccugcacucca

SEQ ID NO: 3184993 - RNA, 13 nt, Human
ccccugcagcccu

SEQ ID NO: 3184994 - RNA, 14 nt, Human
ccccugcagcccug

SEQ ID NO: 3184995 - RNA, 15 nt, Human
ccccugagcccacug

SEQ ID NO: 3184996 - RNA, 15 nt, Human
ccccugcaaagccca

SEQ ID NO: 3184997 - RNA, 14 nt, Human
ccccugagcccacu

SEQ ID NO: 3184998 - RNA, 13 nt, Human
ccccugagcccac

SEQ ID NO: 3184999 - RNA, 12 nt, Human
ccccugagccca

SEQ ID NO: 3185000 - RNA, 11 nt, Human
ccccugagccc

SEQ ID NO: 3185001 - RNA, 17 nt, Human
ccccuucgcuccugugu

SEQ ID NO: 3185002 - RNA, 15 nt, Human
ccccuucgcuccugu

SEQ ID NO: 3185003 - RNA, 14 nt, Human
ccccuucgcuccug

SEQ ID NO: 3185004 - RNA, 20 nt, Human
ccccugcaguuccccuggaa

SEQ ID NO: 3185005 - RNA, 19 nt, Human
ccccuucgcuccugugucu

SEQ ID NO: 3185006 - RNA, 14 nt, Human
ccccuuccugggca

SEQ ID NO: 3185007 - RNA, 19 nt, Human
ccccuuccuguguccaugu

SEQ ID NO: 3185008 - RNA, 14 nt, Human
ccccauucugccug

SEQ ID NO: 3185009 - RNA, 13 nt, Human
ccccauucugccu

SEQ ID NO: 3185010 - RNA, 15 nt, Human
ccccauucugccugc

SEQ ID NO: 3185011 - RNA, 14 nt, Human
ccccaucugugaau

SEQ ID NO: 3185012 - RNA, 13 nt, Human
ccccaucugugaa

SEQ ID NO: 3185013 - RNA, 12 nt, Human
cccggcugcgga

SEQ ID NO: 3185014 - RNA, 12 nt, Human
cccggcugcccu

SEQ ID NO: 3185015 - RNA, 13 nt, Human
cccggcugcccuu

SEQ ID NO: 3185016 - RNA, 14 nt, Human
ccccuugccagcug

SEQ ID NO: 3185017 - RNA, 22 nt, Human
cccuauccuacuuccccuuccu

SEQ ID NO: 3185018 - RNA, 15 nt, Human
cccgggaagcaaaug

SEQ ID NO: 3185019 - RNA, 12 nt, Human
cccgggaagcaa

SEQ ID NO: 3185020 - RNA, 16 nt, Human
ccccuucugacccaug

SEQ ID NO: 3185021 - RNA, 17 nt, Human
ccccuucugacccaugc

SEQ ID NO: 3185022 - RNA, 12 nt, Human
ccccuugccagc

SEQ ID NO: 3185023 - RNA, 20 nt, Human
cccucaacucuccuccagag

SEQ ID NO: 3185024 - RNA, 21 nt, Human
cccucagaaggucuguuuuga

SEQ ID NO: 3185025 - RNA, 20 nt, Human
cccucagaaaaugaguaaca

SEQ ID NO: 3185026 - RNA, 13 nt, Human
cccucagagccac

SEQ ID NO: 3185027 - RNA, 13 nt, Human
cccaguuguauuu

SEQ ID NO: 3185028 - RNA, 23 nt, Human
cccauaauuuuuuuuuuccuuuu

SEQ ID NO: 3185029 - RNA, 22 nt, Human
cccauaauuuuuuuuuuccuuu

SEQ ID NO: 3185030 - RNA, 22 nt, Human
cccauucugccugcccaggccc

SEQ ID NO: 3185031 - RNA, 21 nt, Human
cccauucugccugcccaggcc

SEQ ID NO: 3185032 - RNA, 20 nt, Human
cccauucugccugcccaggc

SEQ ID NO: 3185033 - RNA, 19 nt, Human
ccccauccucuguacagag

SEQ ID NO: 3185034 - RNA, 21 nt, Human
ccccauccucuguacagagcc

SEQ ID NO: 3185035 - RNA, 22 nt, Human
ccccauccucuguacagagccc

SEQ ID NO: 3185036 - RNA, 12 nt, Human
ccccaucuguga

SEQ ID NO: 3185037 - RNA, 17 nt, Human
ccccauccucuguacag

SEQ ID NO: 3185038 - RNA, 20 nt, Human
ccccagcaagugagagcugg

SEQ ID NO: 3185039 - RNA, 19 nt, Human
ccccagcaagugagagcug

SEQ ID NO: 3185040 - RNA, 17 nt, Human
ccccagcaagugagagc

SEQ ID NO: 3185041 - RNA, 23 nt, Human
ccccagauugcaacaggcugggc

SEQ ID NO: 3185042 - RNA, 22 nt, Human
ccccagauugcaacaggcuggg

SEQ ID NO: 3185043 - RNA, 21 nt, Human
ccccagauugcaacaggcugg

SEQ ID NO: 3185044 - RNA, 14 nt, Human
cccauuucaaugug

SEQ ID NO: 3185045 - RNA, 22 nt, Human
cccauuuagaauggugauuuua

SEQ ID NO: 3185046 - RNA, 12 nt, Human
cccauuuagaau

SEQ ID NO: 3185047 - RNA, 15 nt, Human
cccaggcuuagucac

SEQ ID NO: 3185048 - RNA, 21 nt, Human
cccaggcuggcgugcaguggu

SEQ ID NO: 3185049 - RNA, 19 nt, Human
cccaggaaaggcuccagga

SEQ ID NO: 3185050 - RNA, 23 nt, Human
cccagcugugcucuggacaggca

SEQ ID NO: 3185051 - RNA, 21 nt, Human
cccagcugugcucuggacagg

SEQ ID NO: 3185052 - RNA, 21 nt, Human
cccaggaaaggcuccaggagc

SEQ ID NO: 3185053 - RNA, 22 nt, Human
cccaggaaaggcuccaggagca

SEQ ID NO: 3185054 - RNA, 23 nt, Human
cccaggaaaggcuccaggagcag

SEQ ID NO: 3185055 - RNA, 14 nt, Human
cccagcccacuucu

SEQ ID NO: 3185056 - RNA, 16 nt, Human
cccagcccaccccaug

SEQ ID NO: 3185057 - RNA, 12 nt, Human
cccagcagccag

SEQ ID NO: 3185058 - RNA, 15 nt, Human
cccagcagccagcca

SEQ ID NO: 3185059 - RNA, 14 nt, Human
cccagcagccagcc

SEQ ID NO: 3185060 - RNA, 15 nt, Human
ccugggggcuggagc

SEQ ID NO: 3185061 - RNA, 15 nt, Human
ccugguuuccugccc

SEQ ID NO: 3185062 - RNA, 13 nt, Human
ccugguuuccugc

SEQ ID NO: 3185063 - RNA, 14 nt, Human
ccugguuuccugcc

SEQ ID NO: 3185064 - RNA, 16 nt, Human
ccugguuguguguccc

SEQ ID NO: 3185065 - RNA, 19 nt, Human
ccuguccugccuaaggcug

SEQ ID NO: 3185066 - RNA, 15 nt, Human
ccuguaaucacagcu

SEQ ID NO: 3185067 - RNA, 17 nt, Human
ccuguccugccuaaggc

SEQ ID NO: 3185068 - RNA, 17 nt, Human
ccuggggcgcgugaggc

SEQ ID NO: 3185069 - RNA, 18 nt, Human
ccuggggcgcgugaggcc

SEQ ID NO: 3185070 - RNA, 21 nt, Human
ccugguggcagugggagcugc

SEQ ID NO: 3185071 - RNA, 20 nt, Human
ccugguggcagugggagcug

SEQ ID NO: 3185072 - RNA, 16 nt, Human
ccuggggcccaaaugc

SEQ ID NO: 3185073 - RNA, 21 nt, Human
ccuggggcauccauggggucu

SEQ ID NO: 3185074 - RNA, 18 nt, Human
ccuggggcauccaugggg

SEQ ID NO: 3185075 - RNA, 17 nt, Human
ccuggggcauccauggg

SEQ ID NO: 3185076 - RNA, 12 nt, Human
ccuggggcaucc

SEQ ID NO: 3185077 - RNA, 14 nt, Human
ccugggccuggcuc

SEQ ID NO: 3185078 - RNA, 13 nt, Human
ccugggccuggcu

SEQ ID NO: 3185079 - RNA, 12 nt, Human
ccugggccuggc

SEQ ID NO: 3185080 - RNA, 16 nt, Human
ccugggccuggcuccc

SEQ ID NO: 3185081 - RNA, 15 nt, Human
ccugggccuggcucc

SEQ ID NO: 3185082 - RNA, 19 nt, Human
ccugggccuggcucccuca

SEQ ID NO: 3185083 - RNA, 19 nt, Human
ccugucugaauguaccugu

SEQ ID NO: 3185084 - RNA, 15 nt, Human
ccugucuaaugaaac

SEQ ID NO: 3185085 - RNA, 22 nt, Human
ccugucuaaugaaaccuguguc

SEQ ID NO: 3185086 - RNA, 13 nt, Human
ccugucugcucca

SEQ ID NO: 3185087 - RNA, 14 nt, Human
ccugucugcuccag

SEQ ID NO: 3185088 - RNA, 18 nt, Human
ccugucugcuccagcucu

SEQ ID NO: 3185089 - RNA, 15 nt, Human
ccugucugcuccagc

SEQ ID NO: 3185090 - RNA, 19 nt, Human
ccugucugugaagagcaag

SEQ ID NO: 3185091 - RNA, 17 nt, Human
ccugucuucugcuuugu

SEQ ID NO: 3185092 - RNA, 16 nt, Human
ccugucuucugcuuug

SEQ ID NO: 3185093 - RNA, 15 nt, Human
ccugucuucugcuuu

SEQ ID NO: 3185094 - RNA, 14 nt, Human
ccugucuucugcuu

SEQ ID NO: 3185095 - RNA, 13 nt, Human
ccugucuucugcu

SEQ ID NO: 3185096 - RNA, 21 nt, Human
ccugucuucugcuuuguugug

SEQ ID NO: 3185097 - RNA, 16 nt, Human
ccugugaacugaacuc

SEQ ID NO: 3185098 - RNA, 17 nt, Human
ccugugaacugaacucu

SEQ ID NO: 3185099 - RNA, 21 nt, Human
ccugugaagaaaggaccugca

SEQ ID NO: 3185100 - RNA, 16 nt, Human
ccuggccucugcacuc

SEQ ID NO: 3185101 - RNA, 20 nt, Human
ccuggccucugcacuccccu

SEQ ID NO: 3185102 - RNA, 21 nt, Human
ccuggccucugcacuccccug

SEQ ID NO: 3185103 - RNA, 22 nt, Human
ccuggccucugcacuccccugc

SEQ ID NO: 3185104 - RNA, 22 nt, Human
ccuggccggugugggggccccg

SEQ ID NO: 3185105 - RNA, 21 nt, Human
ccuggccggugugggggcccc

SEQ ID NO: 3185106 - RNA, 23 nt, Human
ccuggccggugugggggccccgu

SEQ ID NO: 3185107 - RNA, 20 nt, Human
ccugggccccaguuguauuu

SEQ ID NO: 3185108 - RNA, 18 nt, Human
ccuggccggugugggggc

SEQ ID NO: 3185109 - RNA, 13 nt, Human
ccugcccaggccc

SEQ ID NO: 3185110 - RNA, 14 nt, Human
ccugcccagaucag

SEQ ID NO: 3185111 - RNA, 19 nt, Human
ccugcccaccuggccucug

SEQ ID NO: 3185112 - RNA, 18 nt, Human
ccugcccagcccccuggu

SEQ ID NO: 3185113 - RNA, 22 nt, Human
ccugcccagaucagccagaagc

SEQ ID NO: 3185114 - RNA, 19 nt, Human
ccugcccagaucagccaga

SEQ ID NO: 3185115 - RNA, 17 nt, Human
ccugccccagggcuccc

SEQ ID NO: 3185116 - RNA, 13 nt, Human
ccugccccagcgc

SEQ ID NO: 3185117 - RNA, 12 nt, Human
ccugccccagcg

SEQ ID NO: 3185118 - RNA, 14 nt, Human
ccugccccagcgcu

SEQ ID NO: 3185119 - RNA, 12 nt, Human
ccugcccaccug

SEQ ID NO: 3185120 - RNA, 14 nt, Human
ccugcccaccuggc

SEQ ID NO: 3185121 - RNA, 20 nt, Human
ccugcccaccuggccucugc

SEQ ID NO: 3185122 - RNA, 13 nt, Human
ccugcccaccugg

SEQ ID NO: 3185123 - RNA, 18 nt, Human
ccugcccacaccuccugg

SEQ ID NO: 3185124 - RNA, 19 nt, Human
ccugcccacaccuccuggg

SEQ ID NO: 3185125 - RNA, 17 nt, Human
ccugcugcaguugccag

SEQ ID NO: 3185126 - RNA, 19 nt, Human
ccugcugcaguugccaguc

SEQ ID NO: 3185127 - RNA, 23 nt, Human
ccugccucgaacuggcugcaaag

SEQ ID NO: 3185128 - RNA, 21 nt, Human
ccugccucgaacuggcugcaa

SEQ ID NO: 3185129 - RNA, 19 nt, Human
ccugccucgaacuggcugc

SEQ ID NO: 3185130 - RNA, 20 nt, Human
ccugcugcaguugccaguca

SEQ ID NO: 3185131 - RNA, 13 nt, Human
ccucuuucccucc

SEQ ID NO: 3185132 - RNA, 11 nt, Human
ccucuuucagu

SEQ ID NO: 3185133 - RNA, 21 nt, Human
ccugaguagcugggauuacag

SEQ ID NO: 3185134 - RNA, 17 nt, Human
ccugcacuugcagacuc

SEQ ID NO: 3185135 - RNA, 16 nt, Human
ccugcacuugcagacu

SEQ ID NO: 3185136 - RNA, 14 nt, Human
ccugcagagggcac

SEQ ID NO: 3185137 - RNA, 18 nt, Human
ccugcacuugcagacucu

SEQ ID NO: 3185138 - RNA, 13 nt, Human
ccugcagcccugg

SEQ ID NO: 3185139 - RNA, 17 nt, Human
ccugcagcccuggccca

SEQ ID NO: 3185140 - RNA, 12 nt, Human
ccugcagccucc

SEQ ID NO: 3185141 - RNA, 14 nt, Human
ccugcagccucccu

SEQ ID NO: 3185142 - RNA, 16 nt, Human
ccugcagccucccucc

SEQ ID NO: 3185143 - RNA, 17 nt, Human
ccugcagccucccuccg

SEQ ID NO: 3185144 - RNA, 23 nt, Human
ccugcagccucccuccgcggcgg

SEQ ID NO: 3185145 - RNA, 11 nt, Human
ccucuuucccu

SEQ ID NO: 3185146 - RNA, 17 nt, Human
cccugugauggggcccu

SEQ ID NO: 3185147 - RNA, 18 nt, Human
cccugugauggggcccug

SEQ ID NO: 3185148 - RNA, 19 nt, Human
cccugugauggggcccugc

SEQ ID NO: 3185149 - RNA, 13 nt, Human
cccuucgcuccug

SEQ ID NO: 3185150 - RNA, 20 nt, Human
cccugucucaaaaaaagaaa

SEQ ID NO: 3185151 - RNA, 23 nt, Human
cccugucucaaaaaaagaaaaag

SEQ ID NO: 3185152 - RNA, 16 nt, Human
cccugucuaaugaaac

SEQ ID NO: 3185153 - RNA, 13 nt, Human
cccugucuaauga

SEQ ID NO: 3185154 - RNA, 13 nt, Human
ccggccccugcug

SEQ ID NO: 3185155 - RNA, 22 nt, Human
cccuucucuccagccccuggau

SEQ ID NO: 3185156 - RNA, 23 nt, Human
ccgcagcccugcagagggcacag

SEQ ID NO: 3185157 - RNA, 21 nt, Human
cccuucucuccagccccugga

SEQ ID NO: 3185158 - RNA, 19 nt, Human
cccuucucuccagccccug

SEQ ID NO: 3185159 - RNA, 15 nt, Human
cccuucgcuccugug

SEQ ID NO: 3185160 - RNA, 14 nt, Human
cccuucgcuccugu

SEQ ID NO: 3185161 - RNA, 19 nt, Human
ccgcaucagcugcucagau

SEQ ID NO: 3185162 - RNA, 16 nt, Human
ccgcaguguuugugug

SEQ ID NO: 3185163 - RNA, 11 nt, Human
ccgcaguguuu

SEQ ID NO: 3185164 - RNA, 14 nt, Human
ccgcaucucacagc

SEQ ID NO: 3185165 - RNA, 13 nt, Human
ccucaaagcuuuu

SEQ ID NO: 3185166 - RNA, 14 nt, Human
ccucaaagaggcag

SEQ ID NO: 3185167 - RNA, 23 nt, Human
ccuauuuuuuuagauugagaaau

SEQ ID NO: 3185168 - RNA, 14 nt, Human
ccucaaaacaaagg

SEQ ID NO: 3185169 - RNA, 23 nt, Human
ccuauuuuugacauggaaaugaa

SEQ ID NO: 3185170 - RNA, 18 nt, Human
ccucagcuuccccaguag

SEQ ID NO: 3185171 - RNA, 15 nt, Human
ccucagcuuccccag

SEQ ID NO: 3185172 - RNA, 21 nt, Human
ccucagcuuccccaguagcug

SEQ ID NO: 3185173 - RNA, 13 nt, Human
ccucaggaccagg

SEQ ID NO: 3185174 - RNA, 11 nt, Human
ccucaggacca

SEQ ID NO: 3185175 - RNA, 13 nt, Human
ccucagcuucccc

SEQ ID NO: 3185176 - RNA, 23 nt, Human
ccucauuuuugaauacaggcaua

SEQ ID NO: 3185177 - RNA, 20 nt, Human
ccuccaaccccucgcccagu

SEQ ID NO: 3185178 - RNA, 16 nt, Human
ccuccaaccccucgcc

SEQ ID NO: 3185179 - RNA, 15 nt, Human
ccucccaccucagcc

SEQ ID NO: 3185180 - RNA, 21 nt, Human
ccuccccaaggcccccugccu

SEQ ID NO: 3185181 - RNA, 20 nt, Human
ccuccccaaggcccccugcc

SEQ ID NO: 3185182 - RNA, 22 nt, Human
ccuccccaaggcccccugccug

SEQ ID NO: 3185183 - RNA, 13 nt, Human
ccucccaucucac

SEQ ID NO: 3185184 - RNA, 16 nt, Human
ccucccaucucacaca

SEQ ID NO: 3185185 - RNA, 14 nt, Human
ccggccccugcugg

SEQ ID NO: 3185186 - RNA, 19 nt, Human
auucuuugaccuguuggga

SEQ ID NO: 3185187 - RNA, 13 nt, Human
auucuuuccugag

SEQ ID NO: 3185188 - RNA, 14 nt, Human
auucuuucuccuuu

SEQ ID NO: 3185189 - RNA, 17 nt, Human
auucuuuccugaggcug

SEQ ID NO: 3185190 - RNA, 22 nt, Human
auucuuuccugaggcugggcuc

SEQ ID NO: 3185191 - RNA, 17 nt, Human
auucuugguauuuggau

SEQ ID NO: 3185192 - RNA, 14 nt, Human
auucugagagcugu

SEQ ID NO: 3185193 - RNA, 13 nt, Human
auucugagagcug

SEQ ID NO: 3185194 - RNA, 18 nt, Human
auucugaccuuaaaugca

SEQ ID NO: 3185195 - RNA, 14 nt, Human
auucugaccuuaaa

SEQ ID NO: 3185196 - RNA, 23 nt, Human
auucugauuauugaguuccaguu

SEQ ID NO: 3185197 - RNA, 21 nt, Human
auuccugaugcuucuucagag

SEQ ID NO: 3185198 - RNA, 22 nt, Human
auuccugacgagauaagcaguu

SEQ ID NO: 3185199 - RNA, 22 nt, Human
auugagccuaaaaauaaagcac

SEQ ID NO: 3185200 - RNA, 14 nt, Human
auugauauucuaag

SEQ ID NO: 3185201 - RNA, 16 nt, Human
auugauauucuaagaa

SEQ ID NO: 3185202 - RNA, 23 nt, Human
auugauauucuaagaaauaucug

SEQ ID NO: 3185203 - RNA, 23 nt, Human
auugagaccgugaagauacuuug

SEQ ID NO: 3185204 - RNA, 21 nt, Human
auugagaccgugaagauacuu

SEQ ID NO: 3185205 - RNA, 22 nt, Human
auugagaccgugaagauacuuu

SEQ ID NO: 3185206 - RNA, 19 nt, Human
auugagagagauguguaau

SEQ ID NO: 3185207 - RNA, 17 nt, Human
auugagagagaugugua

SEQ ID NO: 3185208 - RNA, 17 nt, Human
auugagaccgugaagau

SEQ ID NO: 3185209 - RNA, 20 nt, Human
auugagaccgugaagauacu

SEQ ID NO: 3185210 - RNA, 15 nt, Human
auugagccuaaaaau

SEQ ID NO: 3185211 - RNA, 21 nt, Human
auugagccuaaaaauaaagca

SEQ ID NO: 3185212 - RNA, 17 nt, Human
auugagccuaaaaauaa

SEQ ID NO: 3185213 - RNA, 18 nt, Human
auugagcagaauucauuc

SEQ ID NO: 3185214 - RNA, 20 nt, Human
auugagcagaauucauucau

SEQ ID NO: 3185215 - RNA, 21 nt, Human
auugagcagaauucauucaua

SEQ ID NO: 3185216 - RNA, 21 nt, Human
auugagagagauguguaauuu

SEQ ID NO: 3185217 - RNA, 20 nt, Human
auugagagagauguguaauu

SEQ ID NO: 3185218 - RNA, 13 nt, Human
auugagaaaugug

SEQ ID NO: 3185219 - RNA, 15 nt, Human
auuaaauuguaaaac

SEQ ID NO: 3185220 - RNA, 21 nt, Human
auucaacuuuccaaauaaaag

SEQ ID NO: 3185221 - RNA, 16 nt, Human
auucaacuuuccaaau

SEQ ID NO: 3185222 - RNA, 12 nt, Human
auucaagaacau

SEQ ID NO: 3185223 - RNA, 18 nt, Human
auucacaagacccaaaag

SEQ ID NO: 3185224 - RNA, 22 nt, Human
auucauuuuugaaacugcauuu

SEQ ID NO: 3185225 - RNA, 15 nt, Human
auucauuuucucuuu

SEQ ID NO: 3185226 - RNA, 16 nt, Human
auucauuuucucuuua

SEQ ID NO: 3185227 - RNA, 14 nt, Human
auuccaaacauggu

SEQ ID NO: 3185228 - RNA, 14 nt, Human
auuccaaaccaaau

SEQ ID NO: 3185229 - RNA, 18 nt, Human
auuccaaaccaaauuuua

SEQ ID NO: 3185230 - RNA, 21 nt, Human
auuccaaaccaaauuuuaauu

SEQ ID NO: 3185231 - RNA, 12 nt, Human
auuccaaaauau

SEQ ID NO: 3185232 - RNA, 13 nt, Human
auuccaaaauauu

SEQ ID NO: 3185233 - RNA, 14 nt, Human
auuccaaaauauua

SEQ ID NO: 3185234 - RNA, 15 nt, Human
auuccaaaauauuau

SEQ ID NO: 3185235 - RNA, 20 nt, Human
auucauggcaugcuuaaauu

SEQ ID NO: 3185236 - RNA, 19 nt, Human
auucauauuuacuucuuau

SEQ ID NO: 3185237 - RNA, 18 nt, Human
auucauauuuacuucuua

SEQ ID NO: 3185238 - RNA, 20 nt, Human
auucauauuuacuucuuaua

SEQ ID NO: 3185239 - RNA, 13 nt, Human
auucauauuugua

SEQ ID NO: 3185240 - RNA, 12 nt, Human
auucauauuugu

SEQ ID NO: 3185241 - RNA, 23 nt, Human
auucauauuuguacuuucuguua

SEQ ID NO: 3185242 - RNA, 22 nt, Human
auucauauuuguacuuucuguu

SEQ ID NO: 3185243 - RNA, 21 nt, Human
auucauauuuguacuuucugu

SEQ ID NO: 3185244 - RNA, 19 nt, Human
auucauauuuguacuuucu

SEQ ID NO: 3185245 - RNA, 17 nt, Human
auucauauuuguacuuu

SEQ ID NO: 3185246 - RNA, 15 nt, Human
auucauauuuguacu

SEQ ID NO: 3185247 - RNA, 23 nt, Human
auuguaaaagcauuuuguaauaa

SEQ ID NO: 3185248 - RNA, 21 nt, Human
auuguaaaagcauuuuguaau

SEQ ID NO: 3185249 - RNA, 20 nt, Human
auuguaaaagcauuuuguaa

SEQ ID NO: 3185250 - RNA, 19 nt, Human
auuguaaaagcauuuugua

SEQ ID NO: 3185251 - RNA, 13 nt, Human
auuguaaaagcau

SEQ ID NO: 3185252 - RNA, 20 nt, Human
auugaugcaugcuauucaca

SEQ ID NO: 3185253 - RNA, 17 nt, Human
auuguaagcguauggcu

SEQ ID NO: 3185254 - RNA, 15 nt, Human
auuguaaggaaugau

SEQ ID NO: 3185255 - RNA, 16 nt, Human
auuguaaggaaugauu

SEQ ID NO: 3185256 - RNA, 17 nt, Human
auuguaaaugugcuuuu

SEQ ID NO: 3185257 - RNA, 15 nt, Human
auuguaaaugugcuu

SEQ ID NO: 3185258 - RNA, 14 nt, Human
auuguaaaugugcu

SEQ ID NO: 3185259 - RNA, 19 nt, Human
auuguuuaaaaucauuucu

SEQ ID NO: 3185260 - RNA, 13 nt, Human
auuguuuagauuu

SEQ ID NO: 3185261 - RNA, 22 nt, Human
auuguuuaucuagauguaaauu

SEQ ID NO: 3185262 - RNA, 21 nt, Human
auuguuuaucuagauguaaau

SEQ ID NO: 3185263 - RNA, 20 nt, Human
auuguuuaucuagauguaaa

SEQ ID NO: 3185264 - RNA, 19 nt, Human
auuguuuaucuagauguaa

SEQ ID NO: 3185265 - RNA, 17 nt, Human
auuguuuaucuagaugu

SEQ ID NO: 3185266 - RNA, 16 nt, Human
auuguuuaucuagaug

SEQ ID NO: 3185267 - RNA, 16 nt, Human
auuguuuagauuuugu

SEQ ID NO: 3185268 - RNA, 16 nt, Human
auuguuuaguggaaaa

SEQ ID NO: 3185269 - RNA, 15 nt, Human
auuguuuaaaaucau

SEQ ID NO: 3185270 - RNA, 14 nt, Human
auuguucuuuucaa

SEQ ID NO: 3185271 - RNA, 19 nt, Human
auuguucuuaguuugcagu

SEQ ID NO: 3185272 - RNA, 16 nt, Human
auuguuccagagacaa

SEQ ID NO: 3185273 - RNA, 18 nt, Human
auuguaagcguauggcuu

SEQ ID NO: 3185274 - RNA, 19 nt, Human
auuguaagcguauggcuuu

SEQ ID NO: 3185275 - RNA, 14 nt, Human
auuuaaugaaagac

SEQ ID NO: 3185276 - RNA, 19 nt, Human
auuuaaucuuuucuuauuu

SEQ ID NO: 3185277 - RNA, 14 nt, Human
auuuaauguugaac

SEQ ID NO: 3185278 - RNA, 12 nt, Human
auuuaauguuga

SEQ ID NO: 3185279 - RNA, 17 nt, Human
auuuaauggggaggaca

SEQ ID NO: 3185280 - RNA, 19 nt, Human
auuuaauguugaacaaaau

SEQ ID NO: 3185281 - RNA, 15 nt, Human
auuuaauguugaaca

SEQ ID NO: 3185282 - RNA, 15 nt, Human
auuuauauuuauuga

SEQ ID NO: 3185283 - RNA, 16 nt, Human
auuuauauuuauugac

SEQ ID NO: 3185284 - RNA, 20 nt, Human
auuuauauuuauugacucuu

SEQ ID NO: 3185285 - RNA, 22 nt, Human
auuuauauuuauugacucuuga

SEQ ID NO: 3185286 - RNA, 22 nt, Human
auuucaagcuuauuuuggagag

SEQ ID NO: 3185287 - RNA, 21 nt, Human
auuucaagcuuauuuuggaga

SEQ ID NO: 3185288 - RNA, 14 nt, Human
auuucaagcuuauu

SEQ ID NO: 3185289 - RNA, 12 nt, Human
auuucaagcuua

SEQ ID NO: 3185290 - RNA, 15 nt, Human
auuuaucagauugcu

SEQ ID NO: 3185291 - RNA, 14 nt, Human
auuucauccagaag

SEQ ID NO: 3185292 - RNA, 20 nt, Human
auuucaucauauuauacaga

SEQ ID NO: 3185293 - RNA, 18 nt, Human
auuucaucauauuauaca

SEQ ID NO: 3185294 - RNA, 19 nt, Human
auuucaucagaacagcugu

SEQ ID NO: 3185295 - RNA, 17 nt, Human
auuucaucagaacagcu

SEQ ID NO: 3185296 - RNA, 22 nt, Human
auuucauccuuucacuucuuuc

SEQ ID NO: 3185297 - RNA, 20 nt, Human
auuucauccuuucacuucuu

SEQ ID NO: 3185298 - RNA, 19 nt, Human
auuucauccuuucacuucu

SEQ ID NO: 3185299 - RNA, 17 nt, Human
auuucaaguacacugaa

SEQ ID NO: 3185300 - RNA, 13 nt, Human
auuucaauguaau

SEQ ID NO: 3185301 - RNA, 16 nt, Human
auuucaauguaauuaa

SEQ ID NO: 3185302 - RNA, 20 nt, Human
auuucaauguaauuaaacug

SEQ ID NO: 3185303 - RNA, 22 nt, Human
auuucaauguaauuaaacuguu

SEQ ID NO: 3185304 - RNA, 23 nt, Human
auuucaauguaauuaaacuguua

SEQ ID NO: 3185305 - RNA, 14 nt, Human
auuucaauguguau

SEQ ID NO: 3185306 - RNA, 15 nt, Human
auuucaauguguaua

SEQ ID NO: 3185307 - RNA, 20 nt, Human
auuucaauguguauaaauug

SEQ ID NO: 3185308 - RNA, 22 nt, Human
auuucaauguguauaaauuguc

SEQ ID NO: 3185309 - RNA, 19 nt, Human
auuucagagagaaucaaga

SEQ ID NO: 3185310 - RNA, 23 nt, Human
auuucucacacucuaacuguaua

SEQ ID NO: 3185311 - RNA, 20 nt, Human
auuucuccugcguguucuca

SEQ ID NO: 3185312 - RNA, 11 nt, Human
auuucuccuuu

SEQ ID NO: 3185313 - RNA, 10 nt, Human
auuucuccuu

SEQ ID NO: 3185314 - RNA, 13 nt, Human
auuucuguucagc

SEQ ID NO: 3185315 - RNA, 22 nt, Human
caaaccaccagaagcccagaau

SEQ ID NO: 3185316 - RNA, 20 nt, Human
caaaccaccagaagcccaga

SEQ ID NO: 3185317 - RNA, 16 nt, Human
caaaccaccagaagcc

SEQ ID NO: 3185318 - RNA, 15 nt, Human
caaaccaccagaagc

SEQ ID NO: 3185319 - RNA, 13 nt, Human
caaaaguggucag

SEQ ID NO: 3185320 - RNA, 17 nt, Human
caaaccaaauuuuaauu

SEQ ID NO: 3185321 - RNA, 15 nt, Human
caaaagcugggcagg

SEQ ID NO: 3185322 - RNA, 14 nt, Human
caaaaguagaacuu

SEQ ID NO: 3185323 - RNA, 21 nt, Human
caaaagcugaacacauuucuu

SEQ ID NO: 3185324 - RNA, 18 nt, Human
caaaaguagaacuuugua

SEQ ID NO: 3185325 - RNA, 19 nt, Human
caaaaguagaacuuuguau

SEQ ID NO: 3185326 - RNA, 20 nt, Human
caaaaguagaacuuuguaua

SEQ ID NO: 3185327 - RNA, 21 nt, Human
caaaaguagaacuuuguauag

SEQ ID NO: 3185328 - RNA, 22 nt, Human
caaaaguagaacuuuguauagu

SEQ ID NO: 3185329 - RNA, 22 nt, Human
caaaaaaaguuguaugaucugu

SEQ ID NO: 3185330 - RNA, 12 nt, Human
caaaaaaaguug

SEQ ID NO: 3185331 - RNA, 14 nt, Human
caaaaaaaguugua

SEQ ID NO: 3185332 - RNA, 13 nt, Human
caaaaaaaguugu

SEQ ID NO: 3185333 - RNA, 21 nt, Human
caaaaaaaguuguaugaucug

SEQ ID NO: 3185334 - RNA, 18 nt, Human
caaaaaaaguuguaugau

SEQ ID NO: 3185335 - RNA, 16 nt, Human
caaaaaaaguuguaug

SEQ ID NO: 3185336 - RNA, 15 nt, Human
caaaaaaaguuguau

SEQ ID NO: 3185337 - RNA, 20 nt, Human
caaaagcugaacacauuucu

SEQ ID NO: 3185338 - RNA, 16 nt, Human
caaaagcugaacacau

SEQ ID NO: 3185339 - RNA, 16 nt, Human
auuuuuacaaguuaua

SEQ ID NO: 3185340 - RNA, 16 nt, Human
auuuuuacaguuauag

SEQ ID NO: 3185341 - RNA, 13 nt, Human
auuuuuuuuuccu

SEQ ID NO: 3185342 - RNA, 16 nt, Human
auuuuuuuuuccuuca

SEQ ID NO: 3185343 - RNA, 12 nt, Human
auuuuuuuuucc

SEQ ID NO: 3185344 - RNA, 14 nt, Human
auuuuuacauuuaa

SEQ ID NO: 3185345 - RNA, 21 nt, Human
auuuuuacauuuaaaccuuuu

SEQ ID NO: 3185346 - RNA, 18 nt, Human
auuuguuucuuucucuga

SEQ ID NO: 3185347 - RNA, 20 nt, Human
auuuguuucuuucucugagg

SEQ ID NO: 3185348 - RNA, 20 nt, Human
auuuuauaaggacuuccuga

SEQ ID NO: 3185349 - RNA, 18 nt, Human
auuuuauaaggacuuccu

SEQ ID NO: 3185350 - RNA, 15 nt, Human
auuuuauaaauguau

SEQ ID NO: 3185351 - RNA, 16 nt, Human
auuuugacacugaaau

SEQ ID NO: 3185352 - RNA, 18 nt, Human
auuuugacacugaaauaa

SEQ ID NO: 3185353 - RNA, 14 nt, Human
auuuugauaguggg

SEQ ID NO: 3185354 - RNA, 15 nt, Human
auuuuuaaaggcauu

SEQ ID NO: 3185355 - RNA, 11 nt, Human
auuuuuaaaug

SEQ ID NO: 3185356 - RNA, 20 nt, Human
auuuuuaaaugcaguuacaa

SEQ ID NO: 3185357 - RNA, 19 nt, Human
auuuuuaaaugcaguuaca

SEQ ID NO: 3185358 - RNA, 20 nt, Human
caacaccucugcacaagcug

SEQ ID NO: 3185359 - RNA, 13 nt, Human
caacacaaagauu

SEQ ID NO: 3185360 - RNA, 22 nt, Human
caacaccucugcacaagcugca

SEQ ID NO: 3185361 - RNA, 20 nt, Human
caacaccuuguuucccucuc

SEQ ID NO: 3185362 - RNA, 22 nt, Human
caaaugagggucuugguuccag

SEQ ID NO: 3185363 - RNA, 20 nt, Human
caaaucugcaaagcauguuu

SEQ ID NO: 3185364 - RNA, 18 nt, Human
caaaucugcaaagcaugu

SEQ ID NO: 3185365 - RNA, 20 nt, Human
caaauccaggacccugccag

SEQ ID NO: 3185366 - RNA, 18 nt, Human
caaauccaggacccugcc

SEQ ID NO: 3185367 - RNA, 17 nt, Human
caaauccaggacccugc

SEQ ID NO: 3185368 - RNA, 13 nt, Human
caaaugcagcuuu

SEQ ID NO: 3185369 - RNA, 23 nt, Human
caaaugauugcuuuuaaaauuuu

SEQ ID NO: 3185370 - RNA, 22 nt, Human
caaaugauugcuuuuaaaauuu

SEQ ID NO: 3185371 - RNA, 17 nt, Human
caaaugaugugccugcu

SEQ ID NO: 3185372 - RNA, 21 nt, Human
caaaugaugugccugcuucag

SEQ ID NO: 3185373 - RNA, 20 nt, Human
caaaugaugugccugcuuca

SEQ ID NO: 3185374 - RNA, 21 nt, Human
caaaugauugcuuuuaaaauu

SEQ ID NO: 3185375 - RNA, 20 nt, Human
caaaugauugcuuuuaaaau

SEQ ID NO: 3185376 - RNA, 19 nt, Human
caaaugauugcuuuuaaaa

SEQ ID NO: 3185377 - RNA, 18 nt, Human
caaaugauugcuuuuaaa

SEQ ID NO: 3185378 - RNA, 17 nt, Human
caaaugauugcuuuuaa

SEQ ID NO: 3185379 - RNA, 15 nt, Human
caaaugauugcuuuu

SEQ ID NO: 3185380 - RNA, 14 nt, Human
caaaugauugcuuu

SEQ ID NO: 3185381 - RNA, 12 nt, Human
caaaugauugcu

SEQ ID NO: 3185382 - RNA, 23 nt, Human
caacaaaccuguuucugcagcca

SEQ ID NO: 3185383 - RNA, 23 nt, Human
caacaauucucccgggacucugc

SEQ ID NO: 3185384 - RNA, 22 nt, Human
caacaaacugcacaugauuuca

SEQ ID NO: 3185385 - RNA, 21 nt, Human
caacaaacugcacaugauuuc

SEQ ID NO: 3185386 - RNA, 17 nt, Human
caacaaacugcacauga

SEQ ID NO: 3185387 - RNA, 16 nt, Human
caacaaacugcacaug

SEQ ID NO: 3185388 - RNA, 14 nt, Human
caacaaaauacauu

SEQ ID NO: 3185389 - RNA, 13 nt, Human
caacaaaauacau

SEQ ID NO: 3185390 - RNA, 21 nt, Human
caaauuuuggcgaaucucaaa

SEQ ID NO: 3185391 - RNA, 12 nt, Human
caacaaaauaca

SEQ ID NO: 3185392 - RNA, 12 nt, Human
caacaauuuuca

SEQ ID NO: 3185393 - RNA, 20 nt, Human
caacaauuuagaaggaaaac

SEQ ID NO: 3185394 - RNA, 19 nt, Human
caacaauuuucagauuugc

SEQ ID NO: 3185395 - RNA, 18 nt, Human
caacaauuuucagauuug

SEQ ID NO: 3185396 - RNA, 15 nt, Human
caacaauuuucagau

SEQ ID NO: 3185397 - RNA, 13 nt, Human
caacaauuuucag

SEQ ID NO: 3185398 - RNA, 23 nt, Human
caacaauuuucagauuugcacaa

SEQ ID NO: 3185399 - RNA, 20 nt, Human
caaauccuugugggaaaaga

SEQ ID NO: 3185400 - RNA, 14 nt, Human
caaauccaggaccc

SEQ ID NO: 3185401 - RNA, 17 nt, Human
caaaucagcugcuacua

SEQ ID NO: 3185402 - RNA, 13 nt, Human
caaagaugcagcc

SEQ ID NO: 3185403 - RNA, 19 nt, Human
caacuaugauuuggaaaau

SEQ ID NO: 3185404 - RNA, 18 nt, Human
caacuaugauuuggaaaa

SEQ ID NO: 3185405 - RNA, 14 nt, Human
caacccccagcucc

SEQ ID NO: 3185406 - RNA, 14 nt, Human
caacccccagccug

SEQ ID NO: 3185407 - RNA, 17 nt, Human
caacuaugauuuggaaa

SEQ ID NO: 3185408 - RNA, 17 nt, Human
caacccccagccugcua

SEQ ID NO: 3185409 - RNA, 16 nt, Human
caacccccagccugcu

SEQ ID NO: 3185410 - RNA, 15 nt, Human
caacccccagccugc

SEQ ID NO: 3185411 - RNA, 19 nt, Human
caacccaaauguucaucaa

SEQ ID NO: 3185412 - RNA, 14 nt, Human
caaccauuccccau

SEQ ID NO: 3185413 - RNA, 22 nt, Human
caaccauuuaucuugaaggaaa

SEQ ID NO: 3185414 - RNA, 17 nt, Human
caaccauuuaucuugaa

SEQ ID NO: 3185415 - RNA, 16 nt, Human
caaccauuuaucuuga

SEQ ID NO: 3185416 - RNA, 13 nt, Human
caaccauuuaucu

SEQ ID NO: 3185417 - RNA, 14 nt, Human
caaccauuugaaac

SEQ ID NO: 3185418 - RNA, 14 nt, Human
caaccauuaaaguc

SEQ ID NO: 3185419 - RNA, 17 nt, Human
caaccauuaaagucaga

SEQ ID NO: 3185420 - RNA, 21 nt, Human
caaccacguugggacagggag

SEQ ID NO: 3185421 - RNA, 18 nt, Human
caagacccuugugguccc

SEQ ID NO: 3185422 - RNA, 19 nt, Human
caagacccuugugguccca

SEQ ID NO: 3185423 - RNA, 22 nt, Human
caagacccuuguggucccaccc

SEQ ID NO: 3185424 - RNA, 13 nt, Human
caagacacaguga

SEQ ID NO: 3185425 - RNA, 16 nt, Human
caagacaacauuguaa

SEQ ID NO: 3185426 - RNA, 22 nt, Human
caagaauaaaggcagcuguugu

SEQ ID NO: 3185427 - RNA, 16 nt, Human
caacucaccccagccc

SEQ ID NO: 3185428 - RNA, 16 nt, Human
caacccccagcucccg

SEQ ID NO: 3185429 - RNA, 15 nt, Human
caacccccagcuccc

SEQ ID NO: 3185430 - RNA, 13 nt, Human
caacucaccccag

SEQ ID NO: 3185431 - RNA, 15 nt, Human
caacucaccccagcc

SEQ ID NO: 3185432 - RNA, 21 nt, Human
caagaauaaaggcagcuguug

SEQ ID NO: 3185433 - RNA, 19 nt, Human
caagaauaaaggcagcugu

SEQ ID NO: 3185434 - RNA, 15 nt, Human
caagaauaaaggcag

SEQ ID NO: 3185435 - RNA, 18 nt, Human
caagaauaaaggcagcug

SEQ ID NO: 3185436 - RNA, 17 nt, Human
caagaauaaaggcagcu

SEQ ID NO: 3185437 - RNA, 15 nt, Human
caagaaguuuaagga

SEQ ID NO: 3185438 - RNA, 21 nt, Human
caagaaguucuuugauucugu

SEQ ID NO: 3185439 - RNA, 18 nt, Human
caaccacugcgaccacaa

SEQ ID NO: 3185440 - RNA, 21 nt, Human
cagaauaaacuggcagcucag

SEQ ID NO: 3185441 - RNA, 23 nt, Human
cagaaguuugagaucagccuggg

SEQ ID NO: 3185442 - RNA, 22 nt, Human
cagaaguuuaaauauuaagcau

SEQ ID NO: 3185443 - RNA, 16 nt, Human
cagaaguuuaaauauu

SEQ ID NO: 3185444 - RNA, 22 nt, Human
cagaaguuucugccgcagcccu

SEQ ID NO: 3185445 - RNA, 20 nt, Human
cagaaguuucugccgcagcc

SEQ ID NO: 3185446 - RNA, 21 nt, Human
cagaaguuucugccgcagccc

SEQ ID NO: 3185447 - RNA, 15 nt, Human
cagaauacugaugga

SEQ ID NO: 3185448 - RNA, 22 nt, Human
cagaauauuagugaccucagcu

SEQ ID NO: 3185449 - RNA, 22 nt, Human
cagaaauucuguuuuuaaaaau

SEQ ID NO: 3185450 - RNA, 20 nt, Human
cagaaauucuguuuuuaaaa

SEQ ID NO: 3185451 - RNA, 19 nt, Human
cagaaauucuguuuuuaaa

SEQ ID NO: 3185452 - RNA, 14 nt, Human
cagaaauucuguuu

SEQ ID NO: 3185453 - RNA, 18 nt, Human
cagaaauucuguuuuuaa

SEQ ID NO: 3185454 - RNA, 17 nt, Human
cagaaauucuguuuuua

SEQ ID NO: 3185455 - RNA, 15 nt, Human
cagaaauugguaccu

SEQ ID NO: 3185456 - RNA, 11 nt, Human
cagaaauuggu

SEQ ID NO: 3185457 - RNA, 21 nt, Human
cagaaauugguaccuugcaca

SEQ ID NO: 3185458 - RNA, 20 nt, Human
cagaaauugguaccuugcac

SEQ ID NO: 3185459 - RNA, 19 nt, Human
cagaaauugguaccuugca

SEQ ID NO: 3185460 - RNA, 17 nt, Human
cagaaauugguaccuug

SEQ ID NO: 3185461 - RNA, 23 nt, Human
cagaaauugguaccuugcacaca

SEQ ID NO: 3185462 - RNA, 19 nt, Human
cagaaguuucugccgcagc

SEQ ID NO: 3185463 - RNA, 14 nt, Human
cagaaguuuaaaua

SEQ ID NO: 3185464 - RNA, 13 nt, Human
cagaagugacuga

SEQ ID NO: 3185465 - RNA, 16 nt, Human
cagaaguccagagucu

SEQ ID NO: 3185466 - RNA, 15 nt, Human
cagaacacauaauuc

SEQ ID NO: 3185467 - RNA, 18 nt, Human
cacuggggauugggcccc

SEQ ID NO: 3185468 - RNA, 17 nt, Human
cacuggggauugggccc

SEQ ID NO: 3185469 - RNA, 16 nt, Human
cacuggggauugggcc

SEQ ID NO: 3185470 - RNA, 15 nt, Human
cacuggggauugggc

SEQ ID NO: 3185471 - RNA, 23 nt, Human
cacugggcuuggggaccagagcu

SEQ ID NO: 3185472 - RNA, 22 nt, Human
cacugggcuuggggaccagagc

SEQ ID NO: 3185473 - RNA, 20 nt, Human
cacugggcuuggggaccaga

SEQ ID NO: 3185474 - RNA, 23 nt, Human
cacuggggauugggccccugcca

SEQ ID NO: 3185475 - RNA, 17 nt, Human
cacuggugacaugucuu

SEQ ID NO: 3185476 - RNA, 16 nt, Human
cacuguugcccaggcu

SEQ ID NO: 3185477 - RNA, 15 nt, Human
cacuguugcccaggc

SEQ ID NO: 3185478 - RNA, 14 nt, Human
cacuguugcccagg

SEQ ID NO: 3185479 - RNA, 22 nt, Human
cacugguggcccgacagccugg

SEQ ID NO: 3185480 - RNA, 21 nt, Human
cacugguggcccgacagccug

SEQ ID NO: 3185481 - RNA, 13 nt, Human
cacugguggcccg

SEQ ID NO: 3185482 - RNA, 17 nt, Human
cacuuggucugugagau

SEQ ID NO: 3185483 - RNA, 20 nt, Human
cacuuggucugugagaugcu

SEQ ID NO: 3185484 - RNA, 20 nt, Human
cacuuagaaauugcauuucc

SEQ ID NO: 3185485 - RNA, 17 nt, Human
cacuugucggcuccagu

SEQ ID NO: 3185486 - RNA, 16 nt, Human
cacuuguccaugugaa

SEQ ID NO: 3185487 - RNA, 13 nt, Human
cacuugugacuuu

SEQ ID NO: 3185488 - RNA, 21 nt, Human
cacuugucggcuccagucccc

SEQ ID NO: 3185489 - RNA, 20 nt, Human
cacuugugacuuuugcuuua

SEQ ID NO: 3185490 - RNA, 18 nt, Human
cacuugugacuuuugcuu

SEQ ID NO: 3185491 - RNA, 17 nt, Human
cacuugugacuuuugcu

SEQ ID NO: 3185492 - RNA, 14 nt, Human
cacuugugacuuuu

SEQ ID NO: 3185493 - RNA, 21 nt, Human
cacuugugacuuuugcuuuaa

SEQ ID NO: 3185494 - RNA, 23 nt, Human
cacuguuuagauuugccauagag

SEQ ID NO: 3185495 - RNA, 15 nt, Human
cacuguuuagauuug

SEQ ID NO: 3185496 - RNA, 20 nt, Human
cacuguuuagauuugccaua

SEQ ID NO: 3185497 - RNA, 17 nt, Human
cacuggugccaugucag

SEQ ID NO: 3185498 - RNA, 12 nt, Human
cacuguuuagau

SEQ ID NO: 3185499 - RNA, 19 nt, Human
cacuuagaaauugcauuuc

SEQ ID NO: 3185500 - RNA, 17 nt, Human
cacuuagaaauugcauu

SEQ ID NO: 3185501 - RNA, 13 nt, Human
cacuuuauugcca

SEQ ID NO: 3185502 - RNA, 20 nt, Human
cacuuuauugccaaaaccca

SEQ ID NO: 3185503 - RNA, 14 nt, Human
cacuuuccaaguca

SEQ ID NO: 3185504 - RNA, 15 nt, Human
cacuuucauaaucuu

SEQ ID NO: 3185505 - RNA, 19 nt, Human
cacucuuggagccugcaga

SEQ ID NO: 3185506 - RNA, 17 nt, Human
cacucuuggagccugca

SEQ ID NO: 3185507 - RNA, 23 nt, Human
cacugaaauaaccguaaagguuu

SEQ ID NO: 3185508 - RNA, 20 nt, Human
cacugaaccugggaaagaga

SEQ ID NO: 3185509 - RNA, 14 nt, Human
cacucuuggagccu

SEQ ID NO: 3185510 - RNA, 16 nt, Human
cacucuuggagccugc

SEQ ID NO: 3185511 - RNA, 15 nt, Human
cacucuuggagccug

SEQ ID NO: 3185512 - RNA, 22 nt, Human
cacucuuagcccaugcuguuuu

SEQ ID NO: 3185513 - RNA, 20 nt, Human
cacuccccgccguacaguuc

SEQ ID NO: 3185514 - RNA, 17 nt, Human
cacucuuauugcccacg

SEQ ID NO: 3185515 - RNA, 18 nt, Human
cacucuuauugcccacgc

SEQ ID NO: 3185516 - RNA, 12 nt, Human
cacucccagcau

SEQ ID NO: 3185517 - RNA, 22 nt, Human
cacuccccagccagccuggcug

SEQ ID NO: 3185518 - RNA, 21 nt, Human
cacuccccagccagccuggcu

SEQ ID NO: 3185519 - RNA, 16 nt, Human
cacuccccagccagcc

SEQ ID NO: 3185520 - RNA, 14 nt, Human
cacuccccagccag

SEQ ID NO: 3185521 - RNA, 23 nt, Human
cacuacggaauaguuggcuagga

SEQ ID NO: 3185522 - RNA, 13 nt, Human
cacuaccuggcug

SEQ ID NO: 3185523 - RNA, 13 nt, Human
cacggccaggcca

SEQ ID NO: 3185524 - RNA, 16 nt, Human
cacggccaggccagag

SEQ ID NO: 3185525 - RNA, 15 nt, Human
cacggccaggccaga

SEQ ID NO: 3185526 - RNA, 14 nt, Human
cacggccaggccag

SEQ ID NO: 3185527 - RNA, 20 nt, Human
cacggagggugacgggggug

SEQ ID NO: 3185528 - RNA, 22 nt, Human
cacggagcggauugcaaagcaa

SEQ ID NO: 3185529 - RNA, 18 nt, Human
caccuugacagggcacac

SEQ ID NO: 3185530 - RNA, 17 nt, Human
caccugccagggacaga

SEQ ID NO: 3185531 - RNA, 19 nt, Human
caccuugacagggcacacc

SEQ ID NO: 3185532 - RNA, 13 nt, Human
caccuuggcucaa

SEQ ID NO: 3185533 - RNA, 14 nt, Human
caccuuugucccca

SEQ ID NO: 3185534 - RNA, 15 nt, Human
caccuuuguccccac

SEQ ID NO: 3185535 - RNA, 14 nt, Human
caccuuugaagaag

SEQ ID NO: 3185536 - RNA, 22 nt, Human
caccuugguuccuggggcaucc

SEQ ID NO: 3185537 - RNA, 14 nt, Human
caccuugguuccug

SEQ ID NO: 3185538 - RNA, 21 nt, Human
caccuacaugagguacugaga

SEQ ID NO: 3185539 - RNA, 23 nt, Human
caccucaaaauaccaugccauuu

SEQ ID NO: 3185540 - RNA, 13 nt, Human
caccugccaggga

SEQ ID NO: 3185541 - RNA, 14 nt, Human
caccucacacuccu

SEQ ID NO: 3185542 - RNA, 17 nt, Human
caccucacacuccuuua

SEQ ID NO: 3185543 - RNA, 14 nt, Human
caccugccagggac

SEQ ID NO: 3185544 - RNA, 16 nt, Human
caccugccagggacag

SEQ ID NO: 3185545 - RNA, 16 nt, Human
caccuaccccugacuu

SEQ ID NO: 3185546 - RNA, 20 nt, Human
caccuaccaccacgcccggc

SEQ ID NO: 3185547 - RNA, 17 nt, Human
caccaggccccccuguc

SEQ ID NO: 3185548 - RNA, 17 nt, Human
cacccagcccacuucug

SEQ ID NO: 3185549 - RNA, 16 nt, Human
cacccagcccacuucu

SEQ ID NO: 3185550 - RNA, 14 nt, Human
caccagcugugucc

SEQ ID NO: 3185551 - RNA, 16 nt, Human
caccaggccccccugu

SEQ ID NO: 3185552 - RNA, 23 nt, Human
caccaacauacucccaucuguga

SEQ ID NO: 3185553 - RNA, 17 nt, Human
caccaaaaaauaucuag

SEQ ID NO: 3185554 - RNA, 14 nt, Human
caccaaaaaauauc

SEQ ID NO: 3185555 - RNA, 13 nt, Human
caccaaaaaauau

SEQ ID NO: 3185556 - RNA, 12 nt, Human
caccaaaaaaua

SEQ ID NO: 3185557 - RNA, 20 nt, Human
caccaaaaaaauccagaaac

SEQ ID NO: 3185558 - RNA, 19 nt, Human
caccaaaaaaauccagaaa

SEQ ID NO: 3185559 - RNA, 14 nt, Human
caccagcagccugg

SEQ ID NO: 3185560 - RNA, 12 nt, Human
caccagcagccu

SEQ ID NO: 3185561 - RNA, 15 nt, Human
caccagcagccugga

SEQ ID NO: 3185562 - RNA, 21 nt, Human
caccagcccuuagcagggaaa

SEQ ID NO: 3185563 - RNA, 23 nt, Human
cacccaggagccccgaggccuuc

SEQ ID NO: 3185564 - RNA, 20 nt, Human
cacccaggagccccgaggcc

SEQ ID NO: 3185565 - RNA, 19 nt, Human
cacccagcccacuucugcc

SEQ ID NO: 3185566 - RNA, 24 nt, Human
cacccaggagccccgaggccuucu

SEQ ID NO: 3185567 - RNA, 20 nt, Human
caccaacauacucccaucug

SEQ ID NO: 3185568 - RNA, 21 nt, Human
caccaacauacucccaucugu

SEQ ID NO: 3185569 - RNA, 17 nt, Human
caccaacauacucccau

SEQ ID NO: 3185570 - RNA, 14 nt, Human
cacauuuuuuucua

SEQ ID NO: 3185571 - RNA, 19 nt, Human
cacauuuuaaaaaauuugu

SEQ ID NO: 3185572 - RNA, 17 nt, Human
cacauuuuuauaccugu

SEQ ID NO: 3185573 - RNA, 23 nt, Human
cacauuuuuauaccuguuuaaau

SEQ ID NO: 3185574 - RNA, 21 nt, Human
cacauuuuuauaccuguuuaa

SEQ ID NO: 3185575 - RNA, 21 nt, Human
cacauuuucuuaauccagucu

SEQ ID NO: 3185576 - RNA, 18 nt, Human
cacaucuugcucugcuga

SEQ ID NO: 3185577 - RNA, 13 nt, Human
cacauuucuuuuu

SEQ ID NO: 3185578 - RNA, 18 nt, Human
cacauuucucaacaaggc

SEQ ID NO: 3185579 - RNA, 21 nt, Human
cacauuucuuuuuaaaaaaag

SEQ ID NO: 3185580 - RNA, 20 nt, Human
cacauuugguaauguuuuua

SEQ ID NO: 3185581 - RNA, 18 nt, Human
cacauuugguaauguuuu

SEQ ID NO: 3185582 - RNA, 20 nt, Human
cacauccggggccagcuccg

SEQ ID NO: 3185583 - RNA, 19 nt, Human
cacauccggggccagcucc

SEQ ID NO: 3185584 - RNA, 17 nt, Human
cacaucuugcucugcug

SEQ ID NO: 3185585 - RNA, 16 nt, Human
cacaucuugcucugcu

SEQ ID NO: 3185586 - RNA, 21 nt, Human
cacauccuugacuuuuuagau

SEQ ID NO: 3185587 - RNA, 19 nt, Human
cacauccuugacuuuuuag

SEQ ID NO: 3185588 - RNA, 18 nt, Human
cacaguauuacuucugcu

SEQ ID NO: 3185589 - RNA, 16 nt, Human
cacaguauuacuucug

SEQ ID NO: 3185590 - RNA, 13 nt, Human
cacaguauauuuu

SEQ ID NO: 3185591 - RNA, 16 nt, Human
cacaguauauuuuauu

SEQ ID NO: 3185592 - RNA, 19 nt, Human
cacaguauauuuuauuuca

SEQ ID NO: 3185593 - RNA, 20 nt, Human
cacagacccugcccuguggg

SEQ ID NO: 3185594 - RNA, 21 nt, Human
cacagacccugcccugugggc

SEQ ID NO: 3185595 - RNA, 19 nt, Human
cacagacccugcccugugg

SEQ ID NO: 3185596 - RNA, 22 nt, Human
cacagacaggaccccugcaguu

SEQ ID NO: 3185597 - RNA, 17 nt, Human
cacagacaggaccccug

SEQ ID NO: 3185598 - RNA, 15 nt, Human
cacagacaggacccc

SEQ ID NO: 3185599 - RNA, 14 nt, Human
cacagacaggaccc

SEQ ID NO: 3185600 - RNA, 13 nt, Human
cacagacaggacc

SEQ ID NO: 3185601 - RNA, 10 nt, Human
cacagacagg

SEQ ID NO: 3185602 - RNA, 15 nt, Human
cacagcuaacaugga

SEQ ID NO: 3185603 - RNA, 16 nt, Human
cacagcuaacauggaa

SEQ ID NO: 3185604 - RNA, 18 nt, Human
cacagacccugcccugug

SEQ ID NO: 3185605 - RNA, 23 nt, Human
cacagaaggggacugccaccucc

SEQ ID NO: 3185606 - RNA, 22 nt, Human
cacagaaggggacugccaccuc

SEQ ID NO: 3185607 - RNA, 19 nt, Human
cacagaaggggacugccac

SEQ ID NO: 3185608 - RNA, 18 nt, Human
cacagaaggggacugcca

SEQ ID NO: 3185609 - RNA, 19 nt, Human
cacagcucuguccugggag

SEQ ID NO: 3185610 - RNA, 17 nt, Human
cacagcucccuucuguu

SEQ ID NO: 3185611 - RNA, 16 nt, Human
cacagcucccuucugu

SEQ ID NO: 3185612 - RNA, 23 nt, Human
cacagcucuguccugggagugag

SEQ ID NO: 3185613 - RNA, 20 nt, Human
cacagcucuguccugggagu

SEQ ID NO: 3185614 - RNA, 22 nt, Human
cacagcuaacauggaaguacua

SEQ ID NO: 3185615 - RNA, 22 nt, Human
cacagcguuaugugucugccac

SEQ ID NO: 3185616 - RNA, 13 nt, Human
cacagcucccuuc

SEQ ID NO: 3185617 - RNA, 17 nt, Human
cacagggcaugaaauga

SEQ ID NO: 3185618 - RNA, 18 nt, Human
cacagggccuggcccaug

SEQ ID NO: 3185619 - RNA, 17 nt, Human
cacagggccuggcccau

SEQ ID NO: 3185620 - RNA, 16 nt, Human
cacagggccuggccca

SEQ ID NO: 3185621 - RNA, 15 nt, Human
cacagggccuggccc

SEQ ID NO: 3185622 - RNA, 14 nt, Human
cacagggccuggcc

SEQ ID NO: 3185623 - RNA, 13 nt, Human
cacagggccuggc

SEQ ID NO: 3185624 - RNA, 14 nt, Human
cacaggucaggcua

SEQ ID NO: 3185625 - RNA, 13 nt, Human
cacaggucaggcu

SEQ ID NO: 3185626 - RNA, 19 nt, Human
cacagggccuggcccaugu

SEQ ID NO: 3185627 - RNA, 23 nt, Human
cacaagacccaaaaggcagaagc

SEQ ID NO: 3185628 - RNA, 12 nt, Human
caauuuaaaaaa

SEQ ID NO: 3185629 - RNA, 17 nt, Human
caauuuaaaauauagau

SEQ ID NO: 3185630 - RNA, 14 nt, Human
cacaagacccuugu

SEQ ID NO: 3185631 - RNA, 16 nt, Human
cacaagacccuugugg

SEQ ID NO: 3185632 - RNA, 14 nt, Human
cacaagccuucggc

SEQ ID NO: 3185633 - RNA, 23 nt, Human
caaugcuggcuguuggcuggggg

SEQ ID NO: 3185634 - RNA, 22 nt, Human
caaugcuggcuguuggcugggg

SEQ ID NO: 3185635 - RNA, 17 nt, Human
caauucuccugccucag

SEQ ID NO: 3185636 - RNA, 16 nt, Human
caauucuccugccuca

SEQ ID NO: 3185637 - RNA, 19 nt, Human
caauggacaagcaguggau

SEQ ID NO: 3185638 - RNA, 19 nt, Human
caauucuccugccucagcc

SEQ ID NO: 3185639 - RNA, 13 nt, Human
caauucuccuuua

SEQ ID NO: 3185640 - RNA, 17 nt, Human
caaguauuacuaaauug

SEQ ID NO: 3185641 - RNA, 19 nt, Human
caaguauuacuaaauugac

SEQ ID NO: 3185642 - RNA, 23 nt, Human
caaguauuacuaaauugaccuuu

SEQ ID NO: 3185643 - RNA, 24 nt, Human
caaguauuacuaaauugaccuuua

SEQ ID NO: 3185644 - RNA, 22 nt, Human
caaguauuauaaacaagaauga

SEQ ID NO: 3185645 - RNA, 12 nt, Human
caaguauuauaa

SEQ ID NO: 3185646 - RNA, 22 nt, Human
caaguuuugugaaauuuuucau

SEQ ID NO: 3185647 - RNA, 21 nt, Human
caaguuuugugaaauuuuuca

SEQ ID NO: 3185648 - RNA, 20 nt, Human
caaguuuugugaaauuuuuc

SEQ ID NO: 3185649 - RNA, 19 nt, Human
caaguuuugugaaauuuuu

SEQ ID NO: 3185650 - RNA, 18 nt, Human
caaguuuugugaaauuuu

SEQ ID NO: 3185651 - RNA, 17 nt, Human
caaguuuugugaaauuu

SEQ ID NO: 3185652 - RNA, 16 nt, Human
caaguuuugugaaauu

SEQ ID NO: 3185653 - RNA, 14 nt, Human
caaguuuugugaaa

SEQ ID NO: 3185654 - RNA, 13 nt, Human
caaguuuugugaa

SEQ ID NO: 3185655 - RNA, 11 nt, Human
caaguuuugug

SEQ ID NO: 3185656 - RNA, 19 nt, Human
caaguugagcuaugacuua

SEQ ID NO: 3185657 - RNA, 17 nt, Human
caaguagacuacuguuc

SEQ ID NO: 3185658 - RNA, 16 nt, Human
caaguagaccaugguc

SEQ ID NO: 3185659 - RNA, 14 nt, Human
caaguaauuucagu

SEQ ID NO: 3185660 - RNA, 23 nt, Human
caaguaauuucaguguaaagugu

SEQ ID NO: 3185661 - RNA, 15 nt, Human
caaguacacugagag

SEQ ID NO: 3185662 - RNA, 16 nt, Human
caaguacaguacuuug

SEQ ID NO: 3185663 - RNA, 15 nt, Human
cagugggccuggcca

SEQ ID NO: 3185664 - RNA, 14 nt, Human
cagugggccuggcc

SEQ ID NO: 3185665 - RNA, 21 nt, Human
cagugggccuggccagcaggu

SEQ ID NO: 3185666 - RNA, 21 nt, Human
caguggugcgaucuggguuca

SEQ ID NO: 3185667 - RNA, 20 nt, Human
caguggugcgaucuggguuc

SEQ ID NO: 3185668 - RNA, 21 nt, Human
caguggggccugaggcuccuu

SEQ ID NO: 3185669 - RNA, 20 nt, Human
caguggggccugaggcuccu

SEQ ID NO: 3185670 - RNA, 20 nt, Human
caguggggaggggcuguggg

SEQ ID NO: 3185671 - RNA, 23 nt, Human
cagugggagcugccuguucagcu

SEQ ID NO: 3185672 - RNA, 20 nt, Human
cagugggagcugccuguuca

SEQ ID NO: 3185673 - RNA, 17 nt, Human
cagugcccacaggauca

SEQ ID NO: 3185674 - RNA, 16 nt, Human
cagugcaugcuguccc

SEQ ID NO: 3185675 - RNA, 17 nt, Human
cagugcaugcugucccu

SEQ ID NO: 3185676 - RNA, 15 nt, Human
cagugcccacaggau

SEQ ID NO: 3185677 - RNA, 13 nt, Human
cagugcccacagg

SEQ ID NO: 3185678 - RNA, 17 nt, Human
cagucuggaaugcagug

SEQ ID NO: 3185679 - RNA, 12 nt, Human
cagugcaucuca

SEQ ID NO: 3185680 - RNA, 21 nt, Human
cagugcauaguuguagacaaa

SEQ ID NO: 3185681 - RNA, 22 nt, Human
cagugcauaguuguagacaaag

SEQ ID NO: 3185682 - RNA, 23 nt, Human
cagugcauaguuguagacaaagu

SEQ ID NO: 3185683 - RNA, 15 nt, Human
cagucuggaaugcag

SEQ ID NO: 3185684 - RNA, 13 nt, Human
cagugcaugcugu

SEQ ID NO: 3185685 - RNA, 14 nt, Human
cagugcaugcuguc

SEQ ID NO: 3185686 - RNA, 18 nt, Human
cagugcaucucagcccac

SEQ ID NO: 3185687 - RNA, 17 nt, Human
cagugcaucucagccca

SEQ ID NO: 3185688 - RNA, 16 nt, Human
cagugcaucucagccc

SEQ ID NO: 3185689 - RNA, 15 nt, Human
cagugcaucucagcc

SEQ ID NO: 3185690 - RNA, 21 nt, Human
caguaaacacuguguauuguu

SEQ ID NO: 3185691 - RNA, 15 nt, Human
caguaaacacugugu

SEQ ID NO: 3185692 - RNA, 14 nt, Human
caguaaacacugug

SEQ ID NO: 3185693 - RNA, 12 nt, Human
caguaaacacug

SEQ ID NO: 3185694 - RNA, 14 nt, Human
cagguuuugcacuc

SEQ ID NO: 3185695 - RNA, 23 nt, Human
cagguuugggaccccuggugguu

SEQ ID NO: 3185696 - RNA, 17 nt, Human
cagguuuuaaaagccuu

SEQ ID NO: 3185697 - RNA, 16 nt, Human
cagguuuuccugaaga

SEQ ID NO: 3185698 - RNA, 14 nt, Human
cagguuuaagcugu

SEQ ID NO: 3185699 - RNA, 12 nt, Human
cagguuuuccug

SEQ ID NO: 3185700 - RNA, 19 nt, Human
caggugccaguuauggcua

SEQ ID NO: 3185701 - RNA, 21 nt, Human
caggugcacaagcuccaagcu

SEQ ID NO: 3185702 - RNA, 18 nt, Human
caggugcccgccaccaca

SEQ ID NO: 3185703 - RNA, 14 nt, Human
caggugcccgccac

SEQ ID NO: 3185704 - RNA, 21 nt, Human
cagguuggugggggccucggu

SEQ ID NO: 3185705 - RNA, 23 nt, Human
cagguugucugaagucacugcac

SEQ ID NO: 3185706 - RNA, 20 nt, Human
cagguuguuagaaaaaugga

SEQ ID NO: 3185707 - RNA, 15 nt, Human
caggugccuccugac

SEQ ID NO: 3185708 - RNA, 22 nt, Human
cagguugucugaagucacugca

SEQ ID NO: 3185709 - RNA, 20 nt, Human
caggugauccacccaccuca

SEQ ID NO: 3185710 - RNA, 21 nt, Human
caggugauccacccaccucag

SEQ ID NO: 3185711 - RNA, 17 nt, Human
caggugcacaagcucca

SEQ ID NO: 3185712 - RNA, 18 nt, Human
caggugcacaagcuccaa

SEQ ID NO: 3185713 - RNA, 19 nt, Human
caggugcacaagcuccaag

SEQ ID NO: 3185714 - RNA, 20 nt, Human
caggugcacaagcuccaagc

SEQ ID NO: 3185715 - RNA, 23 nt, Human
caggugauccacccaccucagcc

SEQ ID NO: 3185716 - RNA, 22 nt, Human
caggugauccacccaccucagc

SEQ ID NO: 3185717 - RNA, 15 nt, Human
caggugcacaagcuc

SEQ ID NO: 3185718 - RNA, 23 nt, Human
caggugaucugcugcagagcagu

SEQ ID NO: 3185719 - RNA, 16 nt, Human
cagucacaaauuucuc

SEQ ID NO: 3185720 - RNA, 15 nt, Human
cagucacauuccaag

SEQ ID NO: 3185721 - RNA, 14 nt, Human
cagucaauuacaug

SEQ ID NO: 3185722 - RNA, 17 nt, Human
caguaaacuuagaguuu

SEQ ID NO: 3185723 - RNA, 16 nt, Human
caguaaaccugucuga

SEQ ID NO: 3185724 - RNA, 13 nt, Human
caguaaaccuguc

SEQ ID NO: 3185725 - RNA, 16 nt, Human
cagggaugguguucaa

SEQ ID NO: 3185726 - RNA, 20 nt, Human
cagggcucagcggggacagc

SEQ ID NO: 3185727 - RNA, 23 nt, Human
cagggcucagcggggacagcucc

SEQ ID NO: 3185728 - RNA, 21 nt, Human
cagggcucagcggggacagcu

SEQ ID NO: 3185729 - RNA, 18 nt, Human
cagggauaacaaagaacc

SEQ ID NO: 3185730 - RNA, 16 nt, Human
cagggcugaggccucu

SEQ ID NO: 3185731 - RNA, 18 nt, Human
cagggcugaggccucuca

SEQ ID NO: 3185732 - RNA, 19 nt, Human
caggggaaaaucagccugc

SEQ ID NO: 3185733 - RNA, 17 nt, Human
caggggaaaaucagccu

SEQ ID NO: 3185734 - RNA, 20 nt, Human
caggggaaaaucagccugcu

SEQ ID NO: 3185735 - RNA, 12 nt, Human
caggcugggaga

SEQ ID NO: 3185736 - RNA, 14 nt, Human
caggcugggagagc

SEQ ID NO: 3185737 - RNA, 20 nt, Human
caggcugggcuucaguggca

SEQ ID NO: 3185738 - RNA, 19 nt, Human
caggcugggcuucaguggc

SEQ ID NO: 3185739 - RNA, 22 nt, Human
caggcugggcuucaguggcagc

SEQ ID NO: 3185740 - RNA, 21 nt, Human
caggcugggcuucaguggcag

SEQ ID NO: 3185741 - RNA, 16 nt, Human
caggggacacccagaa

SEQ ID NO: 3185742 - RNA, 13 nt, Human
caggcacaggcag

SEQ ID NO: 3185743 - RNA, 12 nt, Human
caggcacaggca

SEQ ID NO: 3185744 - RNA, 17 nt, Human
caggcacaggcagggca

SEQ ID NO: 3185745 - RNA, 16 nt, Human
caggcacaggcagggc

SEQ ID NO: 3185746 - RNA, 15 nt, Human
caggcacaggcaggg

SEQ ID NO: 3185747 - RNA, 14 nt, Human
caggcacaggcagg

SEQ ID NO: 3185748 - RNA, 15 nt, Human
caggccagagggagu

SEQ ID NO: 3185749 - RNA, 13 nt, Human
caggccagaggga

SEQ ID NO: 3185750 - RNA, 18 nt, Human
caggcagauacaggaaaa

SEQ ID NO: 3185751 - RNA, 15 nt, Human
caggccacuugauga

SEQ ID NO: 3185752 - RNA, 19 nt, Human
caggcacaggcagggcagg

SEQ ID NO: 3185753 - RNA, 18 nt, Human
caggcacaggcagggcag

SEQ ID NO: 3185754 - RNA, 14 nt, Human
caggcagagcccag

SEQ ID NO: 3185755 - RNA, 19 nt, Human
caggccaggcccucugccc

SEQ ID NO: 3185756 - RNA, 17 nt, Human
caggccaggcccucugc

SEQ ID NO: 3185757 - RNA, 18 nt, Human
caggccaggcccucugcc

SEQ ID NO: 3185758 - RNA, 17 nt, Human
caggccagcugcuuggg

SEQ ID NO: 3185759 - RNA, 19 nt, Human
caggccagcugcuugggcu

SEQ ID NO: 3185760 - RNA, 21 nt, Human
caggccagcugcuugggcuuc

SEQ ID NO: 3185761 - RNA, 22 nt, Human
cagaggggguggccucccaacu

SEQ ID NO: 3185762 - RNA, 23 nt, Human
cagaggggguggccucccaacuc

SEQ ID NO: 3185763 - RNA, 19 nt, Human
cagaucaagggccuaucuu

SEQ ID NO: 3185764 - RNA, 17 nt, Human
cagagguugcagugagc

SEQ ID NO: 3185765 - RNA, 16 nt, Human
cagagguugcagugag

SEQ ID NO: 3185766 - RNA, 15 nt, Human
cagagguccacaaca

SEQ ID NO: 3185767 - RNA, 20 nt, Human
cagagguccacaacacacag

SEQ ID NO: 3185768 - RNA, 19 nt, Human
cagauccccaagccuggca

SEQ ID NO: 3185769 - RNA, 15 nt, Human
cagauccccaagccu

SEQ ID NO: 3185770 - RNA, 15 nt, Human
cagaucagccagaag

SEQ ID NO: 3185771 - RNA, 13 nt, Human
cagaucagccaga

SEQ ID NO: 3185772 - RNA, 15 nt, Human
cagauucuuuccuga

SEQ ID NO: 3185773 - RNA, 17 nt, Human
cagauucuuuccugagg

SEQ ID NO: 3185774 - RNA, 18 nt, Human
cagauucuuuccugaggc

SEQ ID NO: 3185775 - RNA, 19 nt, Human
cagauucuuuccugaggcu

SEQ ID NO: 3185776 - RNA, 20 nt, Human
cagcaguugcugguaaaaug

SEQ ID NO: 3185777 - RNA, 21 nt, Human
cagcaguugcugguaaaauga

SEQ ID NO: 3185778 - RNA, 22 nt, Human
cagcaguugcugguaaaaugaa

SEQ ID NO: 3185779 - RNA, 23 nt, Human
cagcaguugcugguaaaaugaag

SEQ ID NO: 3185780 - RNA, 21 nt, Human
cagcaguuuucuuuuaauuuu

SEQ ID NO: 3185781 - RNA, 12 nt, Human
cagcauaaagaa

SEQ ID NO: 3185782 - RNA, 22 nt, Human
cagcaguugaaaagacuccaaa

SEQ ID NO: 3185783 - RNA, 17 nt, Human
cagcaguugcugguaaa

SEQ ID NO: 3185784 - RNA, 16 nt, Human
cagcagugagagcaga

SEQ ID NO: 3185785 - RNA, 18 nt, Human
cagauucuuuuaugugau

SEQ ID NO: 3185786 - RNA, 12 nt, Human
cagauucuuuua

SEQ ID NO: 3185787 - RNA, 20 nt, Human
cagauucuuuccugaggcug

SEQ ID NO: 3185788 - RNA, 22 nt, Human
cagauucuuuccugaggcuggg

SEQ ID NO: 3185789 - RNA, 16 nt, Human
cagccagccuggcugg

SEQ ID NO: 3185790 - RNA, 15 nt, Human
cagccagccuggcug

SEQ ID NO: 3185791 - RNA, 14 nt, Human
cagccagccuggcu

SEQ ID NO: 3185792 - RNA, 23 nt, Human
cagccagggaaagacuggcaaga

SEQ ID NO: 3185793 - RNA, 22 nt, Human
cagccagggaaagacuggcaag

SEQ ID NO: 3185794 - RNA, 15 nt, Human
cagccaggagagcuu

SEQ ID NO: 3185795 - RNA, 18 nt, Human
cagccaggagagcuuagg

SEQ ID NO: 3185796 - RNA, 23 nt, Human
cagccaggagagcuuagggucuc

SEQ ID NO: 3185797 - RNA, 20 nt, Human
cagcaucauggagguuugaa

SEQ ID NO: 3185798 - RNA, 13 nt, Human
cagccagccuggc

SEQ ID NO: 3185799 - RNA, 19 nt, Human
cagccgagauagccaaggc

SEQ ID NO: 3185800 - RNA, 17 nt, Human
cagccucugaaaaccaa

SEQ ID NO: 3185801 - RNA, 12 nt, Human
cagccugcucca

SEQ ID NO: 3185802 - RNA, 19 nt, Human
cagccugcuaauuccccag

SEQ ID NO: 3185803 - RNA, 21 nt, Human
cagccucugggcccacauccg

SEQ ID NO: 3185804 - RNA, 13 nt, Human
cagccucugggcc

SEQ ID NO: 3185805 - RNA, 21 nt, Human
cagcggggacagcuccuucug

SEQ ID NO: 3185806 - RNA, 19 nt, Human
cagcggggacagcuccuuc

SEQ ID NO: 3185807 - RNA, 18 nt, Human
cagcggggacagcuccuu

SEQ ID NO: 3185808 - RNA, 20 nt, Human
cagcuccccucggagaagag

SEQ ID NO: 3185809 - RNA, 20 nt, Human
cagcucccgcuccgggcucc

SEQ ID NO: 3185810 - RNA, 21 nt, Human
cagcucccucaaagaggcagu

SEQ ID NO: 3185811 - RNA, 23 nt, Human
cagcucccgcuccgggcuccgac

SEQ ID NO: 3185812 - RNA, 22 nt, Human
cagcuccccucggagaagagcu

SEQ ID NO: 3185813 - RNA, 21 nt, Human
cagcuccccucggagaagagc

SEQ ID NO: 3185814 - RNA, 22 nt, Human
cagcuccggcguguguucagug

SEQ ID NO: 3185815 - RNA, 17 nt, Human
cagcucccuucuguuga

SEQ ID NO: 3185816 - RNA, 15 nt, Human
cagcucccuucuguu

SEQ ID NO: 3185817 - RNA, 14 nt, Human
cagcucccuucugu

SEQ ID NO: 3185818 - RNA, 13 nt, Human
cagcucccuucug

SEQ ID NO: 3185819 - RNA, 12 nt, Human
cagcucccuucu

SEQ ID NO: 3185820 - RNA, 14 nt, Human
cagcucccccagcu

SEQ ID NO: 3185821 - RNA, 16 nt, Human
cagcucccccagcucc

SEQ ID NO: 3185822 - RNA, 15 nt, Human
cagcucccccagcuc

SEQ ID NO: 3185823 - RNA, 23 nt, Human
cagcuguugacucuaguacugug

SEQ ID NO: 3185824 - RNA, 19 nt, Human
cagcuguugacucuaguac

SEQ ID NO: 3185825 - RNA, 14 nt, Human
cagcuguugacucu

SEQ ID NO: 3185826 - RNA, 21 nt, Human
cagcuguugucucuucuccuu

SEQ ID NO: 3185827 - RNA, 19 nt, Human
cagcuguugucucuucucc

SEQ ID NO: 3185828 - RNA, 17 nt, Human
cagcuguugucucuucu

SEQ ID NO: 3185829 - RNA, 14 nt, Human
cagcuguugucucu

SEQ ID NO: 3185830 - RNA, 23 nt, Human
cagcuguuucuagaguuccuacc

SEQ ID NO: 3185831 - RNA, 22 nt, Human
cagcuguugucucuucuccuua

SEQ ID NO: 3185832 - RNA, 24 nt, Human
cagcuguuucuagaguuccuacca

SEQ ID NO: 3185833 - RNA, 19 nt, Human
cagcuguucagcugguuga

SEQ ID NO: 3185834 - RNA, 24 nt, Human
cagcugugcucuggacaggcaugu

SEQ ID NO: 3185835 - RNA, 20 nt, Human
cagcugugcucuggacaggc

SEQ ID NO: 3185836 - RNA, 19 nt, Human
cagcugugcucuggacagg

SEQ ID NO: 3185837 - RNA, 13 nt, Human
cagcugccuggga

SEQ ID NO: 3185838 - RNA, 14 nt, Human
cagcugccugggau

SEQ ID NO: 3185839 - RNA, 12 nt, Human
cagcugccuggg

SEQ ID NO: 3185840 - RNA, 12 nt, Human
cagcugccugca

SEQ ID NO: 3185841 - RNA, 19 nt, Human
cagcugagggugagugggu

SEQ ID NO: 3185842 - RNA, 16 nt, Human
caggaaaagcugcuga

SEQ ID NO: 3185843 - RNA, 15 nt, Human
caggaaaagcugcug

SEQ ID NO: 3185844 - RNA, 18 nt, Human
caggaaaagcugcugaca

SEQ ID NO: 3185845 - RNA, 14 nt, Human
ccacuccuccuagc

SEQ ID NO: 3185846 - RNA, 18 nt, Human
ccacucucagaggcccca

SEQ ID NO: 3185847 - RNA, 11 nt, Human
ccacucucaga

SEQ ID NO: 3185848 - RNA, 17 nt, Human
ccacucucagaggcccc

SEQ ID NO: 3185849 - RNA, 16 nt, Human
ccacucucagaggccc

SEQ ID NO: 3185850 - RNA, 15 nt, Human
ccacucucagaggcc

SEQ ID NO: 3185851 - RNA, 13 nt, Human
ccacucucagagg

SEQ ID NO: 3185852 - RNA, 17 nt, Human
ccacucccugcaaccug

SEQ ID NO: 3185853 - RNA, 13 nt, Human
ccaccgccuccua

SEQ ID NO: 3185854 - RNA, 21 nt, Human
ccaccuuugaagaaguaagga

SEQ ID NO: 3185855 - RNA, 22 nt, Human
ccaccgcagacaggaccaggga

SEQ ID NO: 3185856 - RNA, 19 nt, Human
ccaccgcagacaggaccag

SEQ ID NO: 3185857 - RNA, 12 nt, Human
ccacccuuucua

SEQ ID NO: 3185858 - RNA, 16 nt, Human
ccacgcccccacuggu

SEQ ID NO: 3185859 - RNA, 17 nt, Human
ccacgcccccacuggug

SEQ ID NO: 3185860 - RNA, 18 nt, Human
ccacgcccccacugguga

SEQ ID NO: 3185861 - RNA, 19 nt, Human
ccacgcccccacuggugac

SEQ ID NO: 3185862 - RNA, 13 nt, Human
ccacgcccccacu

SEQ ID NO: 3185863 - RNA, 13 nt, Human
ccacgcccggcua

SEQ ID NO: 3185864 - RNA, 21 nt, Human
ccaccacacugauccagcccu

SEQ ID NO: 3185865 - RNA, 17 nt, Human
ccaccacacccagccca

SEQ ID NO: 3185866 - RNA, 14 nt, Human
ccacagcuccuuuu

SEQ ID NO: 3185867 - RNA, 16 nt, Human
ccacagcuccuuuucc

SEQ ID NO: 3185868 - RNA, 15 nt, Human
ccacagcuccuuuuc

SEQ ID NO: 3185869 - RNA, 20 nt, Human
ccaccacaguccccagagug

SEQ ID NO: 3185870 - RNA, 13 nt, Human
ccaccaucaagcc

SEQ ID NO: 3185871 - RNA, 14 nt, Human
ccaccaucaagcca

SEQ ID NO: 3185872 - RNA, 15 nt, Human
ccacccuuguuccag

SEQ ID NO: 3185873 - RNA, 15 nt, Human
ccacccugugcagaa

SEQ ID NO: 3185874 - RNA, 23 nt, Human
ccacagcaguugaaaagacucca

SEQ ID NO: 3185875 - RNA, 18 nt, Human
ccacagcaguugaaaaga

SEQ ID NO: 3185876 - RNA, 17 nt, Human
ccacagcaguugaaaag

SEQ ID NO: 3185877 - RNA, 12 nt, Human
ccacagcaguug

SEQ ID NO: 3185878 - RNA, 22 nt, Human
ccacagcaacgaucacaaauga

SEQ ID NO: 3185879 - RNA, 17 nt, Human
ccaaauguucaucaaug

SEQ ID NO: 3185880 - RNA, 14 nt, Human
ccaacucaccccag

SEQ ID NO: 3185881 - RNA, 23 nt, Human
ccaaauggaaaugggcagagcag

SEQ ID NO: 3185882 - RNA, 14 nt, Human
ccaaaugguacaaa

SEQ ID NO: 3185883 - RNA, 19 nt, Human
ccaaauggauuccuguuuc

SEQ ID NO: 3185884 - RNA, 15 nt, Human
ccaacugaucuguua

SEQ ID NO: 3185885 - RNA, 16 nt, Human
ccaacucaccccagcc

SEQ ID NO: 3185886 - RNA, 17 nt, Human
ccaacucaccccagccc

SEQ ID NO: 3185887 - RNA, 18 nt, Human
ccaacucaccccagcccc

SEQ ID NO: 3185888 - RNA, 20 nt, Human
ccaaaugugugcccagcuua

SEQ ID NO: 3185889 - RNA, 19 nt, Human
ccaaaugugugcccagcuu

SEQ ID NO: 3185890 - RNA, 17 nt, Human
ccaagcucugcuccucu

SEQ ID NO: 3185891 - RNA, 12 nt, Human
ccaagcucugcu

SEQ ID NO: 3185892 - RNA, 18 nt, Human
ccaagcucugcuccucuc

SEQ ID NO: 3185893 - RNA, 14 nt, Human
ccaaugcacuuugu

SEQ ID NO: 3185894 - RNA, 15 nt, Human
ccaaugauggucacc

SEQ ID NO: 3185895 - RNA, 17 nt, Human
ccaauauuuaccagacc

SEQ ID NO: 3185896 - RNA, 22 nt, Human
ccaaucaguagcuuaagaaaaa

SEQ ID NO: 3185897 - RNA, 12 nt, Human
ccaaugaauaau

SEQ ID NO: 3185898 - RNA, 23 nt, Human
ccaaugaauaauggaaaaugcca

SEQ ID NO: 3185899 - RNA, 18 nt, Human
ccaaugaauuauuauaua

SEQ ID NO: 3185900 - RNA, 17 nt, Human
ccaaugggagcucaugg

SEQ ID NO: 3185901 - RNA, 14 nt, Human
ccaaugggagcuca

SEQ ID NO: 3185902 - RNA, 16 nt, Human
cauuugugcguaugca

SEQ ID NO: 3185903 - RNA, 16 nt, Human
cauuugugaaaugaug

SEQ ID NO: 3185904 - RNA, 19 nt, Human
cauuuguaugucaaagcuu

SEQ ID NO: 3185905 - RNA, 20 nt, Human
cauuuguaugucaaagcuuu

SEQ ID NO: 3185906 - RNA, 22 nt, Human
cauuuuuuauggcugcauagua

SEQ ID NO: 3185907 - RNA, 20 nt, Human
cauuuuuuauauauaugcau

SEQ ID NO: 3185908 - RNA, 16 nt, Human
cauuuuuuccuguuug

SEQ ID NO: 3185909 - RNA, 20 nt, Human
cauuuuuugaaaugcugaaa

SEQ ID NO: 3185910 - RNA, 14 nt, Human
cauuuuuugaaaug

SEQ ID NO: 3185911 - RNA, 16 nt, Human
cauuuuuuucuaccua

SEQ ID NO: 3185912 - RNA, 18 nt, Human
cauuuuuuucuaccuaua

SEQ ID NO: 3185913 - RNA, 23 nt, Human
cauuuuuuucuaccuauaacacu

SEQ ID NO: 3185914 - RNA, 12 nt, Human
ccaaaagaaaaa

SEQ ID NO: 3185915 - RNA, 11 nt, Human
ccaaaagaaaa

SEQ ID NO: 3185916 - RNA, 21 nt, Human
ccaaaacucuccucugcugcu

SEQ ID NO: 3185917 - RNA, 20 nt, Human
ccaaaacucuccucugcugc

SEQ ID NO: 3185918 - RNA, 15 nt, Human
cauaugcuucuuuaa

SEQ ID NO: 3185919 - RNA, 15 nt, Human
cauauuacaauauuu

SEQ ID NO: 3185920 - RNA, 17 nt, Human
cauauuacaauauuugu

SEQ ID NO: 3185921 - RNA, 16 nt, Human
cauauuacaauauuug

SEQ ID NO: 3185922 - RNA, 21 nt, Human
cauauuaaguaagucucaagg

SEQ ID NO: 3185923 - RNA, 17 nt, Human
cauauucuguuggccag

SEQ ID NO: 3185924 - RNA, 22 nt, Human
cauauucaggaagcucagggcc

SEQ ID NO: 3185925 - RNA, 22 nt, Human
cauauuacaauauuugugugcu

SEQ ID NO: 3185926 - RNA, 19 nt, Human
cauauuacaauauuugugu

SEQ ID NO: 3185927 - RNA, 14 nt, Human
caucacuggcaugg

SEQ ID NO: 3185928 - RNA, 13 nt, Human
caucacuuaaaac

SEQ ID NO: 3185929 - RNA, 14 nt, Human
caucacuuaaaaca

SEQ ID NO: 3185930 - RNA, 15 nt, Human
cauccuggcacccgg

SEQ ID NO: 3185931 - RNA, 14 nt, Human
caucacuucccuac

SEQ ID NO: 3185932 - RNA, 12 nt, Human
caucacuucccu

SEQ ID NO: 3185933 - RNA, 21 nt, Human
cauccccuguagagugggagc

SEQ ID NO: 3185934 - RNA, 15 nt, Human
caucacuuaaaacac

SEQ ID NO: 3185935 - RNA, 22 nt, Human
cauccuggcacccggccccugc

SEQ ID NO: 3185936 - RNA, 12 nt, Human
caucgcaaugua

SEQ ID NO: 3185937 - RNA, 12 nt, Human
caucugcugucu

SEQ ID NO: 3185938 - RNA, 21 nt, Human
caucugcugucuuuucuuugc

SEQ ID NO: 3185939 - RNA, 14 nt, Human
caucugcugucuuu

SEQ ID NO: 3185940 - RNA, 22 nt, Human
caucuggaaguuaaagugaggc

SEQ ID NO: 3185941 - RNA, 13 nt, Human
caucugugaauaa

SEQ ID NO: 3185942 - RNA, 14 nt, Human
caucugugaauaag

SEQ ID NO: 3185943 - RNA, 22 nt, Human
caucuggaagagcuaggcaggg

SEQ ID NO: 3185944 - RNA, 17 nt, Human
cauggcucccccuccac

SEQ ID NO: 3185945 - RNA, 18 nt, Human
cauggcuacuugcuuuga

SEQ ID NO: 3185946 - RNA, 14 nt, Human
caugggaaugaaug

SEQ ID NO: 3185947 - RNA, 15 nt, Human
caugggaaugaaugu

SEQ ID NO: 3185948 - RNA, 16 nt, Human
caugggaaugaauguc

SEQ ID NO: 3185949 - RNA, 17 nt, Human
caugggaaugaauguca

SEQ ID NO: 3185950 - RNA, 20 nt, Human
caugcuccuggcccacugca

SEQ ID NO: 3185951 - RNA, 13 nt, Human
caugcuccuuaau

SEQ ID NO: 3185952 - RNA, 22 nt, Human
caugcuccuuaauggcgccaug

SEQ ID NO: 3185953 - RNA, 13 nt, Human
caugauguuuucc

SEQ ID NO: 3185954 - RNA, 12 nt, Human
caugauuucaca

SEQ ID NO: 3185955 - RNA, 17 nt, Human
caugauuucacaaauau

SEQ ID NO: 3185956 - RNA, 16 nt, Human
caugauuucacaaaua

SEQ ID NO: 3185957 - RNA, 15 nt, Human
caugauuucacaaau

SEQ ID NO: 3185958 - RNA, 14 nt, Human
caugauuucacaaa

SEQ ID NO: 3185959 - RNA, 19 nt, Human
caugauuucacaaauauua

SEQ ID NO: 3185960 - RNA, 18 nt, Human
caugauuucacaaauauu

SEQ ID NO: 3185961 - RNA, 22 nt, Human
caugauuucacaaauauuaaaa

SEQ ID NO: 3185962 - RNA, 23 nt, Human
caugucccuaccgagucucuucu

SEQ ID NO: 3185963 - RNA, 17 nt, Human
cauguuacuggauaaau

SEQ ID NO: 3185964 - RNA, 21 nt, Human
cauguuacuggauaaauuguu

SEQ ID NO: 3185965 - RNA, 22 nt, Human
caugucccuaccgagucucuuc

SEQ ID NO: 3185966 - RNA, 16 nt, Human
caugucccuaccgagu

SEQ ID NO: 3185967 - RNA, 19 nt, Human
caugucaaacgugaaaaug

SEQ ID NO: 3185968 - RNA, 14 nt, Human
caugucaaacguga

SEQ ID NO: 3185969 - RNA, 13 nt, Human
cauguuggccagg

SEQ ID NO: 3185970 - RNA, 15 nt, Human
cauguuggccaggcu

SEQ ID NO: 3185971 - RNA, 14 nt, Human
cauguuggccaggc

SEQ ID NO: 3185972 - RNA, 16 nt, Human
cauguuggccaggcug

SEQ ID NO: 3185973 - RNA, 19 nt, Human
cauguuggccaggcugguc

SEQ ID NO: 3185974 - RNA, 23 nt, Human
cauguuguagauacaaucagcug

SEQ ID NO: 3185975 - RNA, 14 nt, Human
cauucuccaccugc

SEQ ID NO: 3185976 - RNA, 16 nt, Human
cauucuccaccugcca

SEQ ID NO: 3185977 - RNA, 13 nt, Human
cauucuccaccug

SEQ ID NO: 3185978 - RNA, 18 nt, Human
cauuauaaucaccagggc

SEQ ID NO: 3185979 - RNA, 23 nt, Human
cauucgggccccaccugcagcuc

SEQ ID NO: 3185980 - RNA, 17 nt, Human
cauucguacauaauacu

SEQ ID NO: 3185981 - RNA, 19 nt, Human
cauucguacauaauacuga

SEQ ID NO: 3185982 - RNA, 17 nt, Human
ugugauggggcccugcc

SEQ ID NO: 3185983 - RNA, 11 nt, Human
ugugauguguc

SEQ ID NO: 3185984 - RNA, 18 nt, Human
ugugaugugacauuuguc

SEQ ID NO: 3185985 - RNA, 17 nt, Human
ugugaugugacauuugu

SEQ ID NO: 3185986 - RNA, 16 nt, Human
ugugaugugacauuug

SEQ ID NO: 3185987 - RNA, 15 nt, Human
ugugaugugacauuu

SEQ ID NO: 3185988 - RNA, 19 nt, Human
ugugaugugacauuuguca

SEQ ID NO: 3185989 - RNA, 16 nt, Human
agugagccgagauugu

SEQ ID NO: 3185990 - RNA, 15 nt, Human
ugugauggggcccug

SEQ ID NO: 3185991 - RNA, 16 nt, Human
ugugauggggcccugc

SEQ ID NO: 3185992 - RNA, 22 nt, Human
agugagcacuaaggugugcucu

SEQ ID NO: 3185993 - RNA, 14 nt, Human
agugagagcagaug

SEQ ID NO: 3185994 - RNA, 12 nt, Human
agugagagcaga

SEQ ID NO: 3185995 - RNA, 16 nt, Human
agugaaagaggcagcu

SEQ ID NO: 3185996 - RNA, 14 nt, Human
agugagacagcucu

SEQ ID NO: 3185997 - RNA, 22 nt, Human
agugaaagaggcagcuugaaac

SEQ ID NO: 3185998 - RNA, 17 nt, Human
agucuuuuuuuuuuaag

SEQ ID NO: 3185999 - RNA, 18 nt, Human
agucuuuuuuuuuuaagu

SEQ ID NO: 3186000 - RNA, 20 nt, Human
agugaaaaauguuaggacau

SEQ ID NO: 3186001 - RNA, 16 nt, Human
agugaaaacuuuguag

SEQ ID NO: 3186002 - RNA, 15 nt, Human
agugaaaacuuugua

SEQ ID NO: 3186003 - RNA, 14 nt, Human
agugaaaauauagc

SEQ ID NO: 3186004 - RNA, 18 nt, Human
agugaaacaucauagaaa

SEQ ID NO: 3186005 - RNA, 17 nt, Human
agugagacucugucuca

SEQ ID NO: 3186006 - RNA, 16 nt, Human
agugagacucugucuc

SEQ ID NO: 3186007 - RNA, 22 nt, Human
agugagacucugucucaaaaaa

SEQ ID NO: 3186008 - RNA, 17 nt, Human
agugagacccugucuca

SEQ ID NO: 3186009 - RNA, 13 nt, Human
agugagacagacu

SEQ ID NO: 3186010 - RNA, 21 nt, Human
agugagacccugucucaaaaa

SEQ ID NO: 3186011 - RNA, 13 nt, Human
agugagacucugu

SEQ ID NO: 3186012 - RNA, 15 nt, Human
ugugagcagcaccca

SEQ ID NO: 3186013 - RNA, 23 nt, Human
agucucccccacccuuguuccag

SEQ ID NO: 3186014 - RNA, 14 nt, Human
agucucccucccuu

SEQ ID NO: 3186015 - RNA, 22 nt, Human
ugugagaugcuagaacucccuu

SEQ ID NO: 3186016 - RNA, 19 nt, Human
ugugagcacaaagguagcu

SEQ ID NO: 3186017 - RNA, 13 nt, Human
ugugagaugugua

SEQ ID NO: 3186018 - RNA, 18 nt, Human
ugugagauguguaucagu

SEQ ID NO: 3186019 - RNA, 14 nt, Human
ugugaagagaacca

SEQ ID NO: 3186020 - RNA, 14 nt, Human
ugugaacugaacuc

SEQ ID NO: 3186021 - RNA, 23 nt, Human
ugugaacugaacucugacaacag

SEQ ID NO: 3186022 - RNA, 11 nt, Human
agugaaaaagg

SEQ ID NO: 3186023 - RNA, 17 nt, Human
agugaaaaaggaggaag

SEQ ID NO: 3186024 - RNA, 20 nt, Human
agugaaaaaggaggaagaga

SEQ ID NO: 3186025 - RNA, 23 nt, Human
agugaaaaaggaggaagagaaaa

SEQ ID NO: 3186026 - RNA, 18 nt, Human
agucuuuuaaaaaguauu

SEQ ID NO: 3186027 - RNA, 13 nt, Human
agucuuuuaaaaa

SEQ ID NO: 3186028 - RNA, 11 nt, Human
agucuuuuguc

SEQ ID NO: 3186029 - RNA, 20 nt, Human
agucuuuuaaaaaguauugc

SEQ ID NO: 3186030 - RNA, 19 nt, Human
agucuuuuaaaaaguauug

SEQ ID NO: 3186031 - RNA, 19 nt, Human
agucuuagaucauaguuuu

SEQ ID NO: 3186032 - RNA, 20 nt, Human
agucuuagaucauaguuuua

SEQ ID NO: 3186033 - RNA, 13 nt, Human
agucuuagaucau

SEQ ID NO: 3186034 - RNA, 18 nt, Human
agucuuagaucauaguuu

SEQ ID NO: 3186035 - RNA, 22 nt, Human
agucuuacauaaaccauuuuug

SEQ ID NO: 3186036 - RNA, 12 nt, Human
agucucugugag

SEQ ID NO: 3186037 - RNA, 13 nt, Human
agucuuaagaacu

SEQ ID NO: 3186038 - RNA, 12 nt, Human
agucccugccaa

SEQ ID NO: 3186039 - RNA, 16 nt, Human
ugucuccuacugagga

SEQ ID NO: 3186040 - RNA, 17 nt, Human
ugucuccuacugaggau

SEQ ID NO: 3186041 - RNA, 17 nt, Human
ugucuccucuucuuugu

SEQ ID NO: 3186042 - RNA, 21 nt, Human
ugucuccucuauccugggcuu

SEQ ID NO: 3186043 - RNA, 17 nt, Human
ugucuccuugguuauau

SEQ ID NO: 3186044 - RNA, 23 nt, Human
aguccccuguuuguuucugaaag

SEQ ID NO: 3186045 - RNA, 13 nt, Human
agucccugccaau

SEQ ID NO: 3186046 - RNA, 14 nt, Human
agucccugccaaug

SEQ ID NO: 3186047 - RNA, 16 nt, Human
agucccugccaaugga

SEQ ID NO: 3186048 - RNA, 13 nt, Human
ugucucugagagu

SEQ ID NO: 3186049 - RNA, 17 nt, Human
ugucucuacuaaaaaua

SEQ ID NO: 3186050 - RNA, 19 nt, Human
ugucucggaaccugugagc

SEQ ID NO: 3186051 - RNA, 12 nt, Human
ugucuuaauuaa

SEQ ID NO: 3186052 - RNA, 13 nt, Human
ugucugaaacauu

SEQ ID NO: 3186053 - RNA, 19 nt, Human
ugucugaaacauuucauaa

SEQ ID NO: 3186054 - RNA, 14 nt, Human
ugucuuaauuaaaa

SEQ ID NO: 3186055 - RNA, 18 nt, Human
ugucuuaauuuucuuuca

SEQ ID NO: 3186056 - RNA, 14 nt, Human
ugucuuauugacag

SEQ ID NO: 3186057 - RNA, 22 nt, Human
ugucucuugguccugcugcagu

SEQ ID NO: 3186058 - RNA, 21 nt, Human
ugucucuuuaaugucacaggc

SEQ ID NO: 3186059 - RNA, 22 nt, Human
ugucucuuuaaugucacaggca

SEQ ID NO: 3186060 - RNA, 17 nt, Human
ugucucuuuuuuaaguu

SEQ ID NO: 3186061 - RNA, 16 nt, Human
ugucucuuuuuuaagu

SEQ ID NO: 3186062 - RNA, 18 nt, Human
ugucucuugguccugcug

SEQ ID NO: 3186063 - RNA, 19 nt, Human
ugucucuugguccugcugc

SEQ ID NO: 3186064 - RNA, 20 nt, Human
ugucucuugguccugcugca

SEQ ID NO: 3186065 - RNA, 21 nt, Human
ugucucuugguccugcugcag

SEQ ID NO: 3186066 - RNA, 12 nt, Human
ugucucuucugg

SEQ ID NO: 3186067 - RNA, 14 nt, Human
ugucucuucuccuu

SEQ ID NO: 3186068 - RNA, 13 nt, Human
ugucucuucuccu

SEQ ID NO: 3186069 - RNA, 14 nt, Human
ugucuucacaacag

SEQ ID NO: 3186070 - RNA, 19 nt, Human
ugucuuauugacaguugug

SEQ ID NO: 3186071 - RNA, 17 nt, Human
ugucuuccuuugcuucc

SEQ ID NO: 3186072 - RNA, 20 nt, Human
ugucuuccuauuucagaagu

SEQ ID NO: 3186073 - RNA, 19 nt, Human
ugucuuccuauuucagaag

SEQ ID NO: 3186074 - RNA, 22 nt, Human
ugucuuccuaucaaaaagauau

SEQ ID NO: 3186075 - RNA, 17 nt, Human
ugucuuccuauuucaga

SEQ ID NO: 3186076 - RNA, 16 nt, Human
ugucuuccuauuucag

SEQ ID NO: 3186077 - RNA, 21 nt, Human
ugucuugcaauggcagccuug

SEQ ID NO: 3186078 - RNA, 20 nt, Human
ugucuugcaauggcagccuu

SEQ ID NO: 3186079 - RNA, 18 nt, Human
ugucuugcaauggcagcc

SEQ ID NO: 3186080 - RNA, 17 nt, Human
ugucuugcaauggcagc

SEQ ID NO: 3186081 - RNA, 15 nt, Human
ugucuugcaauggca

SEQ ID NO: 3186082 - RNA, 23 nt, Human
ugucuucugcuuuguugugugcc

SEQ ID NO: 3186083 - RNA, 15 nt, Human
ugucuucugcuuugu

SEQ ID NO: 3186084 - RNA, 11 nt, Human
ugucuucugcu

SEQ ID NO: 3186085 - RNA, 14 nt, Human
ugucuucugcuuug

SEQ ID NO: 3186086 - RNA, 13 nt, Human
ugucuucugcuuu

SEQ ID NO: 3186087 - RNA, 14 nt, Human
ugucuugcugucau

SEQ ID NO: 3186088 - RNA, 19 nt, Human
ugucuugcacuggccuucu

SEQ ID NO: 3186089 - RNA, 22 nt, Human
ugucuugcacuggccuucugau

SEQ ID NO: 3186090 - RNA, 14 nt, Human
ugucuuuaaaaacu

SEQ ID NO: 3186091 - RNA, 22 nt, Human
ugucuuuaaaaacuguuuuaga

SEQ ID NO: 3186092 - RNA, 15 nt, Human
ugugaaccaccacac

SEQ ID NO: 3186093 - RNA, 23 nt, Human
ugugaaccaccacacccagccca

SEQ ID NO: 3186094 - RNA, 22 nt, Human
ugugaaccaccacacccagccc

SEQ ID NO: 3186095 - RNA, 21 nt, Human
ugugaaccaccacacccagcc

SEQ ID NO: 3186096 - RNA, 16 nt, Human
ugugaaccaccacacc

SEQ ID NO: 3186097 - RNA, 14 nt, Human
ugugaacuauguuu

SEQ ID NO: 3186098 - RNA, 20 nt, Human
agucccaccuuggcugcagg

SEQ ID NO: 3186099 - RNA, 23 nt, Human
agucccaccuuggcugcagggag

SEQ ID NO: 3186100 - RNA, 21 nt, Human
agucccaccuuggcugcaggg

SEQ ID NO: 3186101 - RNA, 15 nt, Human
aguccauaccuuaua

SEQ ID NO: 3186102 - RNA, 14 nt, Human
aguccccuguuugu

SEQ ID NO: 3186103 - RNA, 19 nt, Human
aguccccuguuuguuucug

SEQ ID NO: 3186104 - RNA, 14 nt, Human
aguccccagaacuc

SEQ ID NO: 3186105 - RNA, 13 nt, Human
aguccccagaacu

SEQ ID NO: 3186106 - RNA, 14 nt, Human
agucccacuccaag

SEQ ID NO: 3186107 - RNA, 20 nt, Human
agucccaggcugagccucag

SEQ ID NO: 3186108 - RNA, 19 nt, Human
agucccacuccaagccagc

SEQ ID NO: 3186109 - RNA, 18 nt, Human
agucccacuccaagccag

SEQ ID NO: 3186110 - RNA, 14 nt, Human
ugucuaagaaacau

SEQ ID NO: 3186111 - RNA, 16 nt, Human
ugucuaagaaacauug

SEQ ID NO: 3186112 - RNA, 15 nt, Human
ugucuaagaaacauu

SEQ ID NO: 3186113 - RNA, 19 nt, Human
ugucuaagaaacauuggaa

SEQ ID NO: 3186114 - RNA, 12 nt, Human
agucagauguuu

SEQ ID NO: 3186115 - RNA, 21 nt, Human
agucagauguuugagcagugg

SEQ ID NO: 3186116 - RNA, 19 nt, Human
agucagggguucccuuuuu

SEQ ID NO: 3186117 - RNA, 23 nt, Human
agucagucgccuuucagcaggca

SEQ ID NO: 3186118 - RNA, 22 nt, Human
agucagucgccuuucagcaggc

SEQ ID NO: 3186119 - RNA, 17 nt, Human
agucaucgaguggccca

SEQ ID NO: 3186120 - RNA, 20 nt, Human
ugucccuaccgagucucuuc

SEQ ID NO: 3186121 - RNA, 22 nt, Human
ugucccuaccgagucucuucuc

SEQ ID NO: 3186122 - RNA, 21 nt, Human
ugucccuaccgagucucuucu

SEQ ID NO: 3186123 - RNA, 21 nt, Human
uguccaggcacugcugcccag

SEQ ID NO: 3186124 - RNA, 20 nt, Human
uguccaggcacugcugccca

SEQ ID NO: 3186125 - RNA, 19 nt, Human
uguccaggcacugcugccc

SEQ ID NO: 3186126 - RNA, 23 nt, Human
ugucagcuccccucggagaagag

SEQ ID NO: 3186127 - RNA, 21 nt, Human
ugucagcuccccucggagaag

SEQ ID NO: 3186128 - RNA, 20 nt, Human
ugucagcuccccucggagaa

SEQ ID NO: 3186129 - RNA, 16 nt, Human
ugucagccauuccugu

SEQ ID NO: 3186130 - RNA, 22 nt, Human
ugucagcgcucuggugcugcag

SEQ ID NO: 3186131 - RNA, 12 nt, Human
ugucccuuuucc

SEQ ID NO: 3186132 - RNA, 15 nt, Human
uguccuguaaacacu

SEQ ID NO: 3186133 - RNA, 20 nt, Human
uguccuguaaacacucagcu

SEQ ID NO: 3186134 - RNA, 22 nt, Human
uguccuguaaacacucagcugu

SEQ ID NO: 3186135 - RNA, 23 nt, Human
uguccuguaaacacucagcuguu

SEQ ID NO: 3186136 - RNA, 16 nt, Human
uguccuguaacuguua

SEQ ID NO: 3186137 - RNA, 18 nt, Human
uguccuguaacuguuaca

SEQ ID NO: 3186138 - RNA, 20 nt, Human
uguccuguaacuguuacagu

SEQ ID NO: 3186139 - RNA, 19 nt, Human
uguccugugucaguuuaug

SEQ ID NO: 3186140 - RNA, 21 nt, Human
uguccugugucaguuuauguu

SEQ ID NO: 3186141 - RNA, 15 nt, Human
uguccuguugauuaa

SEQ ID NO: 3186142 - RNA, 19 nt, Human
uguccuguugauuaauuuc

SEQ ID NO: 3186143 - RNA, 18 nt, Human
uguccugugucaguuuau

SEQ ID NO: 3186144 - RNA, 17 nt, Human
uguccugugucaguuua

SEQ ID NO: 3186145 - RNA, 16 nt, Human
uguccugugucaguuu

SEQ ID NO: 3186146 - RNA, 15 nt, Human
uguccugugagaugu

SEQ ID NO: 3186147 - RNA, 18 nt, Human
uguccugugagaugugua

SEQ ID NO: 3186148 - RNA, 20 nt, Human
uguccugugagauguguauc

SEQ ID NO: 3186149 - RNA, 23 nt, Human
uguccugugagauguguaucagu

SEQ ID NO: 3186150 - RNA, 12 nt, Human
ugucccuuucuu

SEQ ID NO: 3186151 - RNA, 17 nt, Human
ugucccuuucuucuccc

SEQ ID NO: 3186152 - RNA, 16 nt, Human
ugucccuuucuucucc

SEQ ID NO: 3186153 - RNA, 15 nt, Human
ugucccuuucuucuc

SEQ ID NO: 3186154 - RNA, 14 nt, Human
ugucccuuucuucu

SEQ ID NO: 3186155 - RNA, 22 nt, Human
uguauuaagcccacaguauauu

SEQ ID NO: 3186156 - RNA, 15 nt, Human
uguauuagucacaga

SEQ ID NO: 3186157 - RNA, 14 nt, Human
ugucaaagugguga

SEQ ID NO: 3186158 - RNA, 15 nt, Human
ugucaaaguggugag

SEQ ID NO: 3186159 - RNA, 19 nt, Human
uguauuauacuuagucaaa

SEQ ID NO: 3186160 - RNA, 17 nt, Human
uguauuauauguaacua

SEQ ID NO: 3186161 - RNA, 15 nt, Human
uguauuauguccugu

SEQ ID NO: 3186162 - RNA, 20 nt, Human
uguauuauguccugugagau

SEQ ID NO: 3186163 - RNA, 14 nt, Human
aguagcugggacua

SEQ ID NO: 3186164 - RNA, 13 nt, Human
aguagcugggacu

SEQ ID NO: 3186165 - RNA, 22 nt, Human
aguagcucugccuuugcucugg

SEQ ID NO: 3186166 - RNA, 14 nt, Human
aguagcucugccuu

SEQ ID NO: 3186167 - RNA, 16 nt, Human
ugucaaaguggugaga

SEQ ID NO: 3186168 - RNA, 19 nt, Human
ugucaaaguggugagaggc

SEQ ID NO: 3186169 - RNA, 19 nt, Human
ugucaaauauuuagaugua

SEQ ID NO: 3186170 - RNA, 13 nt, Human
ugucaaagcuuug

SEQ ID NO: 3186171 - RNA, 20 nt, Human
uguaugugggggucugugug

SEQ ID NO: 3186172 - RNA, 15 nt, Human
uguaucccaugagcc

SEQ ID NO: 3186173 - RNA, 21 nt, Human
uguaugugggggucugugugu

SEQ ID NO: 3186174 - RNA, 22 nt, Human
uguaugugggggucuguguguu

SEQ ID NO: 3186175 - RNA, 14 nt, Human
uguauguguaagua

SEQ ID NO: 3186176 - RNA, 23 nt, Human
uguauuaaauuacauuuguaauu

SEQ ID NO: 3186177 - RNA, 21 nt, Human
uguauuaaauuacauuuguaa

SEQ ID NO: 3186178 - RNA, 19 nt, Human
uguauuaaauuacauuugu

SEQ ID NO: 3186179 - RNA, 18 nt, Human
uguauuaaauuacauuug

SEQ ID NO: 3186180 - RNA, 17 nt, Human
uguauuaaauuacauuu

SEQ ID NO: 3186181 - RNA, 14 nt, Human
uguauuaaauuaca

SEQ ID NO: 3186182 - RNA, 22 nt, Human
uguauuaacacuacucaaagca

SEQ ID NO: 3186183 - RNA, 21 nt, Human
uguauuaacacuacucaaagc

SEQ ID NO: 3186184 - RNA, 21 nt, Human
agguuugggaccccugguggu

SEQ ID NO: 3186185 - RNA, 19 nt, Human
agguuuggugcaaaguauu

SEQ ID NO: 3186186 - RNA, 16 nt, Human
agguuugggaccccug

SEQ ID NO: 3186187 - RNA, 20 nt, Human
agguuuggcuccugcccacu

SEQ ID NO: 3186188 - RNA, 18 nt, Human
agguuuggcuccugccca

SEQ ID NO: 3186189 - RNA, 16 nt, Human
agguuuggcuccugcc

SEQ ID NO: 3186190 - RNA, 14 nt, Human
agguuuggcuccug

SEQ ID NO: 3186191 - RNA, 22 nt, Human
uguauccauccauggggcugau

SEQ ID NO: 3186192 - RNA, 15 nt, Human
uguagagccaggguc

SEQ ID NO: 3186193 - RNA, 12 nt, Human
uguagagccagg

SEQ ID NO: 3186194 - RNA, 12 nt, Human
agguuugaaucu

SEQ ID NO: 3186195 - RNA, 22 nt, Human
aguagcugggacuacaggcacc

SEQ ID NO: 3186196 - RNA, 21 nt, Human
aguagcugggacuacaggcac

SEQ ID NO: 3186197 - RNA, 19 nt, Human
aguagcugggacuacaggc

SEQ ID NO: 3186198 - RNA, 11 nt, Human
aguauuguaca

SEQ ID NO: 3186199 - RNA, 16 nt, Human
aguauuguaaugagug

SEQ ID NO: 3186200 - RNA, 14 nt, Human
aguauugccaaaca

SEQ ID NO: 3186201 - RNA, 18 nt, Human
aguauugccaaacauuaa

SEQ ID NO: 3186202 - RNA, 17 nt, Human
aguauugccaaacauua

SEQ ID NO: 3186203 - RNA, 16 nt, Human
aguauugccaaacauu

SEQ ID NO: 3186204 - RNA, 15 nt, Human
aguauugccaaacau

SEQ ID NO: 3186205 - RNA, 13 nt, Human
aguauuauaaaca

SEQ ID NO: 3186206 - RNA, 22 nt, Human
agucacagagauaauucuagcu

SEQ ID NO: 3186207 - RNA, 20 nt, Human
aguauuuaagccuaaagauu

SEQ ID NO: 3186208 - RNA, 19 nt, Human
aguauuuaagccuaaagau

SEQ ID NO: 3186209 - RNA, 18 nt, Human
aguauuuaagccuaaaga

SEQ ID NO: 3186210 - RNA, 14 nt, Human
aguauuuaagccua

SEQ ID NO: 3186211 - RNA, 22 nt, Human
aguauugccaaacauuaauguu

SEQ ID NO: 3186212 - RNA, 20 nt, Human
agucacauuccaagccucau

SEQ ID NO: 3186213 - RNA, 21 nt, Human
aguauuuaagccuaaagauuu

SEQ ID NO: 3186214 - RNA, 15 nt, Human
ugucagcauagaagu

SEQ ID NO: 3186215 - RNA, 17 nt, Human
agucacugagacagccc

SEQ ID NO: 3186216 - RNA, 15 nt, Human
agucacugagacagc

SEQ ID NO: 3186217 - RNA, 16 nt, Human
agucacugagacagcc

SEQ ID NO: 3186218 - RNA, 23 nt, Human
ugggaauaagugccaggauggaa

SEQ ID NO: 3186219 - RNA, 20 nt, Human
ugggaauauaauauugucuc

SEQ ID NO: 3186220 - RNA, 12 nt, Human
aggggaggccaa

SEQ ID NO: 3186221 - RNA, 13 nt, Human
agggggcugggac

SEQ ID NO: 3186222 - RNA, 17 nt, Human
aggggagggggcaaagg

SEQ ID NO: 3186223 - RNA, 20 nt, Human
aggggaggccaucuggagag

SEQ ID NO: 3186224 - RNA, 16 nt, Human
aggggaggccaucugg

SEQ ID NO: 3186225 - RNA, 15 nt, Human
aggggaggccaucug

SEQ ID NO: 3186226 - RNA, 21 nt, Human
agggucuugguuccagccugc

SEQ ID NO: 3186227 - RNA, 22 nt, Human
agggucuugguuccagccugcc

SEQ ID NO: 3186228 - RNA, 16 nt, Human
aggguaucaggugcug

SEQ ID NO: 3186229 - RNA, 12 nt, Human
aggguagggugg

SEQ ID NO: 3186230 - RNA, 18 nt, Human
aggguaggcagccugaga

SEQ ID NO: 3186231 - RNA, 21 nt, Human
aggguacaaaaaauucaguga

SEQ ID NO: 3186232 - RNA, 22 nt, Human
aggguaauaaccagacacaaac

SEQ ID NO: 3186233 - RNA, 12 nt, Human
aggguacaugug

SEQ ID NO: 3186234 - RNA, 19 nt, Human
aggguacuaaggaaucuuu

SEQ ID NO: 3186235 - RNA, 20 nt, Human
agggguccccuccaggagua

SEQ ID NO: 3186236 - RNA, 22 nt, Human
aggggucuugcaaaauuccuga

SEQ ID NO: 3186237 - RNA, 12 nt, Human
aggguaaguauu

SEQ ID NO: 3186238 - RNA, 12 nt, Human
agggggcuuccu

SEQ ID NO: 3186239 - RNA, 15 nt, Human
ugggucugugugugu

SEQ ID NO: 3186240 - RNA, 13 nt, Human
ugggucugugugu

SEQ ID NO: 3186241 - RNA, 21 nt, Human
agggugaguccuccagaacuc

SEQ ID NO: 3186242 - RNA, 18 nt, Human
agggugaguccuccagaa

SEQ ID NO: 3186243 - RNA, 12 nt, Human
agggugagccca

SEQ ID NO: 3186244 - RNA, 22 nt, Human
agggugaugggaaagcauugua

SEQ ID NO: 3186245 - RNA, 21 nt, Human
agggugaugggaaagcauugu

SEQ ID NO: 3186246 - RNA, 14 nt, Human
uggguggaugccug

SEQ ID NO: 3186247 - RNA, 22 nt, Human
ugggucuuguuuuuuuuuucca

SEQ ID NO: 3186248 - RNA, 23 nt, Human
uggguggaugccugguggcagcu

SEQ ID NO: 3186249 - RNA, 15 nt, Human
ugguaaaaugaagaa

SEQ ID NO: 3186250 - RNA, 18 nt, Human
ugguaaaaugaagaauuu

SEQ ID NO: 3186251 - RNA, 16 nt, Human
uggguuuuguucuugu

SEQ ID NO: 3186252 - RNA, 15 nt, Human
ugguccauagagagc

SEQ ID NO: 3186253 - RNA, 16 nt, Human
ugguccauagagagca

SEQ ID NO: 3186254 - RNA, 16 nt, Human
ugguccacuuuuccag

SEQ ID NO: 3186255 - RNA, 15 nt, Human
ugguccacuuuucca

SEQ ID NO: 3186256 - RNA, 14 nt, Human
ugguccacuuuucc

SEQ ID NO: 3186257 - RNA, 11 nt, Human
ugguccaaaua

SEQ ID NO: 3186258 - RNA, 15 nt, Human
ugguccaaauaggca

SEQ ID NO: 3186259 - RNA, 21 nt, Human
uggucaccaaaucagcugcua

SEQ ID NO: 3186260 - RNA, 23 nt, Human
uggucaccaaaucagcugcuacu

SEQ ID NO: 3186261 - RNA, 20 nt, Human
uggucaccaaaucagcugcu

SEQ ID NO: 3186262 - RNA, 22 nt, Human
ugguaauuuaagauuccagaga

SEQ ID NO: 3186263 - RNA, 19 nt, Human
ugguaaaaugaagaauuua

SEQ ID NO: 3186264 - RNA, 19 nt, Human
ugguccauagagagcaaga

SEQ ID NO: 3186265 - RNA, 20 nt, Human
ugguccaucugguuuucucu

SEQ ID NO: 3186266 - RNA, 20 nt, Human
uggucucgaacuccugaccu

SEQ ID NO: 3186267 - RNA, 21 nt, Human
uggucucgaacuccugaccuu

SEQ ID NO: 3186268 - RNA, 15 nt, Human
uggucucgaacuccu

SEQ ID NO: 3186269 - RNA, 19 nt, Human
uggucucgaacuccugacc

SEQ ID NO: 3186270 - RNA, 16 nt, Human
uggucugggacucucu

SEQ ID NO: 3186271 - RNA, 18 nt, Human
uggucugacccacugcuu

SEQ ID NO: 3186272 - RNA, 22 nt, Human
uggucugugagaugcuagaacu

SEQ ID NO: 3186273 - RNA, 12 nt, Human
uggucuguguga

SEQ ID NO: 3186274 - RNA, 15 nt, Human
aggguugggcuggug

SEQ ID NO: 3186275 - RNA, 13 nt, Human
aggguugggcugg

SEQ ID NO: 3186276 - RNA, 14 nt, Human
aggguuggccccug

SEQ ID NO: 3186277 - RNA, 13 nt, Human
aggguuggccccu

SEQ ID NO: 3186278 - RNA, 19 nt, Human
aggguggugaccucugccu

SEQ ID NO: 3186279 - RNA, 18 nt, Human
aggguggugaccucugcc

SEQ ID NO: 3186280 - RNA, 17 nt, Human
aggguggugaccucugc

SEQ ID NO: 3186281 - RNA, 19 nt, Human
uggugaacagaacaaaagg

SEQ ID NO: 3186282 - RNA, 20 nt, Human
uggucuuuuccucgcuucuu

SEQ ID NO: 3186283 - RNA, 19 nt, Human
uggucuuuuccucgcuucu

SEQ ID NO: 3186284 - RNA, 17 nt, Human
uggucuuuuccucgcuu

SEQ ID NO: 3186285 - RNA, 14 nt, Human
uggucuuuugguua

SEQ ID NO: 3186286 - RNA, 12 nt, Human
uggucuuuuccu

SEQ ID NO: 3186287 - RNA, 13 nt, Human
uggucuuauauuu

SEQ ID NO: 3186288 - RNA, 23 nt, Human
agguagcuuugagguggaagagg

SEQ ID NO: 3186289 - RNA, 20 nt, Human
agguaggaauauuauauuug

SEQ ID NO: 3186290 - RNA, 23 nt, Human
agguagcugcagauaaguggccu

SEQ ID NO: 3186291 - RNA, 17 nt, Human
agguauacuuuaguaga

SEQ ID NO: 3186292 - RNA, 21 nt, Human
agguauacuuuaguagacauu

SEQ ID NO: 3186293 - RNA, 19 nt, Human
agguauaucauucuaaaga

SEQ ID NO: 3186294 - RNA, 18 nt, Human
agguauaucauucuaaag

SEQ ID NO: 3186295 - RNA, 15 nt, Human
agguauaucauucua

SEQ ID NO: 3186296 - RNA, 21 nt, Human
agguauaucauucuaaagaua

SEQ ID NO: 3186297 - RNA, 20 nt, Human
agguauaucauucuaaagau

SEQ ID NO: 3186298 - RNA, 22 nt, Human
agguauaucauucuaaagauag

SEQ ID NO: 3186299 - RNA, 20 nt, Human
aggguuuauguuuaggaugu

SEQ ID NO: 3186300 - RNA, 17 nt, Human
aggguugggcugguguc

SEQ ID NO: 3186301 - RNA, 20 nt, Human
aggguuggcaccuucccccu

SEQ ID NO: 3186302 - RNA, 17 nt, Human
aggguuggcaccuuccc

SEQ ID NO: 3186303 - RNA, 15 nt, Human
agguagagucugagg

SEQ ID NO: 3186304 - RNA, 19 nt, Human
agguagacuuuuaugagaa

SEQ ID NO: 3186305 - RNA, 20 nt, Human
agguagacuuuuaugagaac

SEQ ID NO: 3186306 - RNA, 18 nt, Human
agguagcccccucuuccc

SEQ ID NO: 3186307 - RNA, 20 nt, Human
agguagcauucuuuggaguu

SEQ ID NO: 3186308 - RNA, 17 nt, Human
agguagcccccucuucc

SEQ ID NO: 3186309 - RNA, 22 nt, Human
aggguuugagagagcagccagg

SEQ ID NO: 3186310 - RNA, 11 nt, Human
aggguuucuga

SEQ ID NO: 3186311 - RNA, 17 nt, Human
aggguuucagagagccu

SEQ ID NO: 3186312 - RNA, 21 nt, Human
aggucaaggcugcagugagcc

SEQ ID NO: 3186313 - RNA, 19 nt, Human
aggucaguuguguuuuuua

SEQ ID NO: 3186314 - RNA, 21 nt, Human
aggucuugaacuccuggccuc

SEQ ID NO: 3186315 - RNA, 20 nt, Human
aggucuugaacuccuggccu

SEQ ID NO: 3186316 - RNA, 17 nt, Human
agguccacaacacacag

SEQ ID NO: 3186317 - RNA, 18 nt, Human
aggucuugaacuccuggc

SEQ ID NO: 3186318 - RNA, 22 nt, Human
aggugaaacuccagaugccaca

SEQ ID NO: 3186319 - RNA, 21 nt, Human
aggugaaacuccagaugccac

SEQ ID NO: 3186320 - RNA, 20 nt, Human
aggugaaacuccagaugcca

SEQ ID NO: 3186321 - RNA, 19 nt, Human
aggugaaacuccagaugcc

SEQ ID NO: 3186322 - RNA, 12 nt, Human
ugguuuuaugau

SEQ ID NO: 3186323 - RNA, 23 nt, Human
ugguuugaaaauauuuucauuau

SEQ ID NO: 3186324 - RNA, 15 nt, Human
ugguuucuuuuugaa

SEQ ID NO: 3186325 - RNA, 21 nt, Human
ugguuuuaaaauacuguagau

SEQ ID NO: 3186326 - RNA, 16 nt, Human
ugguuuuaaaauacug

SEQ ID NO: 3186327 - RNA, 14 nt, Human
ugguuuuaaaauac

SEQ ID NO: 3186328 - RNA, 13 nt, Human
ugguuuuaaaaua

SEQ ID NO: 3186329 - RNA, 12 nt, Human
ugguuuuaaaau

SEQ ID NO: 3186330 - RNA, 20 nt, Human
ugguuuccugcccugggagg

SEQ ID NO: 3186331 - RNA, 19 nt, Human
ugguuucucuucuccccuu

SEQ ID NO: 3186332 - RNA, 15 nt, Human
ugguuucucuucucc

SEQ ID NO: 3186333 - RNA, 14 nt, Human
ugguuucucuucuc

SEQ ID NO: 3186334 - RNA, 13 nt, Human
ugguuucucuucu

SEQ ID NO: 3186335 - RNA, 22 nt, Human
ugguuuauuggugaguuaggaa

SEQ ID NO: 3186336 - RNA, 13 nt, Human
uguaaauauuaaa

SEQ ID NO: 3186337 - RNA, 23 nt, Human
aggugauccacccaccucagccu

SEQ ID NO: 3186338 - RNA, 21 nt, Human
aggugauccacccaccucagc

SEQ ID NO: 3186339 - RNA, 19 nt, Human
uguaaagauuucuguucag

SEQ ID NO: 3186340 - RNA, 15 nt, Human
uguaaagauuucugu

SEQ ID NO: 3186341 - RNA, 18 nt, Human
uguaaagauuucuguuca

SEQ ID NO: 3186342 - RNA, 16 nt, Human
uguaaagauuucuguu

SEQ ID NO: 3186343 - RNA, 17 nt, Human
ugguucacucuuggagc

SEQ ID NO: 3186344 - RNA, 14 nt, Human
ugguuauggagagg

SEQ ID NO: 3186345 - RNA, 19 nt, Human
ugguguuuuggauuuggag

SEQ ID NO: 3186346 - RNA, 15 nt, Human
ugguguuuccuggca

SEQ ID NO: 3186347 - RNA, 17 nt, Human
ugguguuuccuggcacu

SEQ ID NO: 3186348 - RNA, 18 nt, Human
ugguguuuuggauuugga

SEQ ID NO: 3186349 - RNA, 22 nt, Human
ugguucacucuuggagccugca

SEQ ID NO: 3186350 - RNA, 21 nt, Human
ugguucaaauguguuuugguc

SEQ ID NO: 3186351 - RNA, 21 nt, Human
ugguucacucuuggagccugc

SEQ ID NO: 3186352 - RNA, 20 nt, Human
ugguucacucuuggagccug

SEQ ID NO: 3186353 - RNA, 22 nt, Human
ugguucaggguuggccccugcc

SEQ ID NO: 3186354 - RNA, 20 nt, Human
ugguucaggguuggccccug

SEQ ID NO: 3186355 - RNA, 15 nt, Human
ugguuuaaaagaaaa

SEQ ID NO: 3186356 - RNA, 18 nt, Human
ugguuuaaaagaaaaaau

SEQ ID NO: 3186357 - RNA, 21 nt, Human
ugguguucaaaaaacuuguaa

SEQ ID NO: 3186358 - RNA, 22 nt, Human
ugguguucaaaaaacuuguaaa

SEQ ID NO: 3186359 - RNA, 15 nt, Human
ugguguguguaugcg

SEQ ID NO: 3186360 - RNA, 23 nt, Human
uggugugaccacugcagaagaca

SEQ ID NO: 3186361 - RNA, 12 nt, Human
ugguggcagcug

SEQ ID NO: 3186362 - RNA, 15 nt, Human
ugguggcagagugga

SEQ ID NO: 3186363 - RNA, 12 nt, Human
ugguggcagcuc

SEQ ID NO: 3186364 - RNA, 21 nt, Human
aggugaaggaggcuccaggca

SEQ ID NO: 3186365 - RNA, 19 nt, Human
aggugaaggaggcuccagg

SEQ ID NO: 3186366 - RNA, 18 nt, Human
aggugaaggaggcuccag

SEQ ID NO: 3186367 - RNA, 13 nt, Human
aggugaaggaggc

SEQ ID NO: 3186368 - RNA, 21 nt, Human
aggugaacauugguucuuuca

SEQ ID NO: 3186369 - RNA, 16 nt, Human
aggugaacaaucaacu

SEQ ID NO: 3186370 - RNA, 14 nt, Human
aggugaacauuggu

SEQ ID NO: 3186371 - RNA, 16 nt, Human
ugguggcagcucaccu

SEQ ID NO: 3186372 - RNA, 19 nt, Human
ugguggcagcucaccucuc

SEQ ID NO: 3186373 - RNA, 20 nt, Human
ugguggcagcucaccucucc

SEQ ID NO: 3186374 - RNA, 23 nt, Human
ugguggcagcucaccucucccuu

SEQ ID NO: 3186375 - RNA, 16 nt, Human
uguacuucuugaauau

SEQ ID NO: 3186376 - RNA, 23 nt, Human
uguacuugcccugaccaugcauu

SEQ ID NO: 3186377 - RNA, 16 nt, Human
uguagacaaaguacau

SEQ ID NO: 3186378 - RNA, 19 nt, Human
uguagacaaaguacauucu

SEQ ID NO: 3186379 - RNA, 19 nt, Human
uguacauuucuaagucaaa

SEQ ID NO: 3186380 - RNA, 15 nt, Human
uguacauuucuaagu

SEQ ID NO: 3186381 - RNA, 12 nt, Human
uguacauuucua

SEQ ID NO: 3186382 - RNA, 18 nt, Human
uguaaggaaugauuaauu

SEQ ID NO: 3186383 - RNA, 16 nt, Human
uguaagcuguguccua

SEQ ID NO: 3186384 - RNA, 23 nt, Human
uguaagcuguuugguuuuaaaau

SEQ ID NO: 3186385 - RNA, 17 nt, Human
uguaauuuuauuuuaaa

SEQ ID NO: 3186386 - RNA, 20 nt, Human
uguaauuuuauuuuaaaauu

SEQ ID NO: 3186387 - RNA, 23 nt, Human
uguaauuuuauuuuaaaauuuca

SEQ ID NO: 3186388 - RNA, 15 nt, Human
uguaaggcaugaagg

SEQ ID NO: 3186389 - RNA, 14 nt, Human
uguaaggcaugaag

SEQ ID NO: 3186390 - RNA, 23 nt, Human
uguacaaaguagaagucuuagau

SEQ ID NO: 3186391 - RNA, 19 nt, Human
uguacaaaguagaagucuu

SEQ ID NO: 3186392 - RNA, 22 nt, Human
uguacauauuagcgacaacaga

SEQ ID NO: 3186393 - RNA, 21 nt, Human
uguacauauuagcgacaacag

SEQ ID NO: 3186394 - RNA, 22 nt, Human
uguaagcucuacugaggugcua

SEQ ID NO: 3186395 - RNA, 18 nt, Human
uguaagaaauacuguaca

SEQ ID NO: 3186396 - RNA, 17 nt, Human
uguaagaaauacagacu

SEQ ID NO: 3186397 - RNA, 12 nt, Human
uguaagaaauac

SEQ ID NO: 3186398 - RNA, 15 nt, Human
uguaagaaauacaga

SEQ ID NO: 3186399 - RNA, 14 nt, Human
uguaaggaaugauu

SEQ ID NO: 3186400 - RNA, 15 nt, Human
uguaaggaaugauua

SEQ ID NO: 3186401 - RNA, 13 nt, Human
uguaaggaaugau

SEQ ID NO: 3186402 - RNA, 20 nt, Human
agguugucugaagucacugc

SEQ ID NO: 3186403 - RNA, 16 nt, Human
agguugucugaaguca

SEQ ID NO: 3186404 - RNA, 16 nt, Human
agguuguuagaaaaau

SEQ ID NO: 3186405 - RNA, 13 nt, Human
agguuuaaaacua

SEQ ID NO: 3186406 - RNA, 17 nt, Human
agguugucacugagaag

SEQ ID NO: 3186407 - RNA, 17 nt, Human
aggugugaggcaggaga

SEQ ID NO: 3186408 - RNA, 15 nt, Human
aggugugaggcagga

SEQ ID NO: 3186409 - RNA, 14 nt, Human
aggugugagucacc

SEQ ID NO: 3186410 - RNA, 20 nt, Human
aggugugagccaccacgccc

SEQ ID NO: 3186411 - RNA, 22 nt, Human
aggugugaaccaccacacccag

SEQ ID NO: 3186412 - RNA, 23 nt, Human
aggugugaaccaccacacccagc

SEQ ID NO: 3186413 - RNA, 13 nt, Human
agguggggcagcu

SEQ ID NO: 3186414 - RNA, 22 nt, Human
aggugauccacucgccuucauc

SEQ ID NO: 3186415 - RNA, 16 nt, Human
aggugauuaacuugga

SEQ ID NO: 3186416 - RNA, 22 nt, Human
aggugaucugcugcagagcagu

SEQ ID NO: 3186417 - RNA, 16 nt, Human
aggugaugaagacagc

SEQ ID NO: 3186418 - RNA, 23 nt, Human
agguggggucacucuggcagcuc

SEQ ID NO: 3186419 - RNA, 14 nt, Human
agguggggcagcuu

SEQ ID NO: 3186420 - RNA, 15 nt, Human
aggugggugucugcg

SEQ ID NO: 3186421 - RNA, 14 nt, Human
uuaucaugaauuuu

SEQ ID NO: 3186422 - RNA, 18 nt, Human
uuaucaugaauuuuaaag

SEQ ID NO: 3186423 - RNA, 19 nt, Human
uuaucaugaauuuuaaagu

SEQ ID NO: 3186424 - RNA, 19 nt, Human
uuaucaguuugcuaauguu

SEQ ID NO: 3186425 - RNA, 20 nt, Human
uuaucaguuugcuaauguuu

SEQ ID NO: 3186426 - RNA, 14 nt, Human
uuaucaacauuugu

SEQ ID NO: 3186427 - RNA, 21 nt, Human
uuaucagauugcuuuugugca

SEQ ID NO: 3186428 - RNA, 15 nt, Human
uuaucagagucauga

SEQ ID NO: 3186429 - RNA, 14 nt, Human
uuaucagcaaagaa

SEQ ID NO: 3186430 - RNA, 18 nt, Human
auacaucacguuaaagua

SEQ ID NO: 3186431 - RNA, 22 nt, Human
auacuagauuugggagaagggc

SEQ ID NO: 3186432 - RNA, 15 nt, Human
auacuagauuuggga

SEQ ID NO: 3186433 - RNA, 21 nt, Human
auacauucuuuuugcucuaaa

SEQ ID NO: 3186434 - RNA, 21 nt, Human
auacauuuaaaacauuaaaau

SEQ ID NO: 3186435 - RNA, 16 nt, Human
auacauuuaaaacauu

SEQ ID NO: 3186436 - RNA, 16 nt, Human
auacauuugauaaagu

SEQ ID NO: 3186437 - RNA, 17 nt, Human
auaccaagcauguggau

SEQ ID NO: 3186438 - RNA, 17 nt, Human
auaccaaauuaaaaaaa

SEQ ID NO: 3186439 - RNA, 16 nt, Human
auacauucuuuuugcu

SEQ ID NO: 3186440 - RNA, 12 nt, Human
auacauucuuuu

SEQ ID NO: 3186441 - RNA, 16 nt, Human
auacagggaugguguu

SEQ ID NO: 3186442 - RNA, 20 nt, Human
auacaggaaaagcugcugac

SEQ ID NO: 3186443 - RNA, 19 nt, Human
auacaggaaaagcugcuga

SEQ ID NO: 3186444 - RNA, 14 nt, Human
auacaggaaaagcu

SEQ ID NO: 3186445 - RNA, 23 nt, Human
auacagcaaaccuaauugcacaa

SEQ ID NO: 3186446 - RNA, 15 nt, Human
auacaaaugcaucuu

SEQ ID NO: 3186447 - RNA, 19 nt, Human
auacaaaguuagagaacua

SEQ ID NO: 3186448 - RNA, 16 nt, Human
auacaaacaagcauau

SEQ ID NO: 3186449 - RNA, 21 nt, Human
auacaaaugcaucuuugaugu

SEQ ID NO: 3186450 - RNA, 22 nt, Human
auacaaaugcaucuuugaugug

SEQ ID NO: 3186451 - RNA, 17 nt, Human
auacaaaugcaucuuug

SEQ ID NO: 3186452 - RNA, 18 nt, Human
auacaaaugcaucuuuga

SEQ ID NO: 3186453 - RNA, 19 nt, Human
auacaaaugcaucuuugau

SEQ ID NO: 3186454 - RNA, 20 nt, Human
auacaaaugcaucuuugaug

SEQ ID NO: 3186455 - RNA, 23 nt, Human
uuauagagcagaaauucuguuuu

SEQ ID NO: 3186456 - RNA, 22 nt, Human
uuauagagcagaaauucuguuu

SEQ ID NO: 3186457 - RNA, 17 nt, Human
uuauagagcagaaauuc

SEQ ID NO: 3186458 - RNA, 15 nt, Human
uuauagagcagaaau

SEQ ID NO: 3186459 - RNA, 15 nt, Human
uuauagaagaaugca

SEQ ID NO: 3186460 - RNA, 12 nt, Human
uuauagaagaau

SEQ ID NO: 3186461 - RNA, 22 nt, Human
uuauagaagaaugcaugcuuuc

SEQ ID NO: 3186462 - RNA, 19 nt, Human
uuauagaagaaugcaugcu

SEQ ID NO: 3186463 - RNA, 17 nt, Human
uuauagaagaaugcaug

SEQ ID NO: 3186464 - RNA, 15 nt, Human
uuauaccuguuuaaa

SEQ ID NO: 3186465 - RNA, 14 nt, Human
uuauaccuguuuaa

SEQ ID NO: 3186466 - RNA, 12 nt, Human
uuauaccuguuu

SEQ ID NO: 3186467 - RNA, 14 nt, Human
uuauaccuguugcu

SEQ ID NO: 3186468 - RNA, 24 nt, Human
uuauacugggacaccauuaccaaa

SEQ ID NO: 3186469 - RNA, 17 nt, Human
uuauaguacuagagaua

SEQ ID NO: 3186470 - RNA, 18 nt, Human
uuauaguacugacagaua

SEQ ID NO: 3186471 - RNA, 16 nt, Human
uuauaguacugacaga

SEQ ID NO: 3186472 - RNA, 18 nt, Human
uuauagguccuuuagaaa

SEQ ID NO: 3186473 - RNA, 13 nt, Human
uuauaguuaaucu

SEQ ID NO: 3186474 - RNA, 22 nt, Human
uuauagugcaauauauuuugua

SEQ ID NO: 3186475 - RNA, 19 nt, Human
uuauagugcaauauauuuu

SEQ ID NO: 3186476 - RNA, 17 nt, Human
uuauagugcaauauauu

SEQ ID NO: 3186477 - RNA, 15 nt, Human
uuauagugcaauaua

SEQ ID NO: 3186478 - RNA, 14 nt, Human
uuauagugcaauau

SEQ ID NO: 3186479 - RNA, 13 nt, Human
uuauagugcaaua

SEQ ID NO: 3186480 - RNA, 18 nt, Human
uuauacccccugcaaagc

SEQ ID NO: 3186481 - RNA, 23 nt, Human
uuauaaccuaguuaaagaaagga

SEQ ID NO: 3186482 - RNA, 21 nt, Human
uuauaaauuggugaugcuugu

SEQ ID NO: 3186483 - RNA, 12 nt, Human
uuauaaauuucg

SEQ ID NO: 3186484 - RNA, 14 nt, Human
uuagccccauaauu

SEQ ID NO: 3186485 - RNA, 19 nt, Human
uuagccuaagauauacuug

SEQ ID NO: 3186486 - RNA, 16 nt, Human
uuagccuaagauauac

SEQ ID NO: 3186487 - RNA, 15 nt, Human
uuagccuaagauaua

SEQ ID NO: 3186488 - RNA, 14 nt, Human
uuagccggagaucc

SEQ ID NO: 3186489 - RNA, 19 nt, Human
uuauauauauauauauuuc

SEQ ID NO: 3186490 - RNA, 19 nt, Human
uuauauaucccugauaaau

SEQ ID NO: 3186491 - RNA, 18 nt, Human
uuauauaucccugauaaa

SEQ ID NO: 3186492 - RNA, 13 nt, Human
uuauauaucccug

SEQ ID NO: 3186493 - RNA, 14 nt, Human
uuauauauauaucu

SEQ ID NO: 3186494 - RNA, 22 nt, Human
auaauuuuccuuuaauaugaaa

SEQ ID NO: 3186495 - RNA, 12 nt, Human
auaauuuuacaa

SEQ ID NO: 3186496 - RNA, 12 nt, Human
auaauuuuccuu

SEQ ID NO: 3186497 - RNA, 19 nt, Human
auaauuuuccuuuaauaug

SEQ ID NO: 3186498 - RNA, 13 nt, Human
auaauuuuccuuu

SEQ ID NO: 3186499 - RNA, 17 nt, Human
uuauaguuaaucuauaa

SEQ ID NO: 3186500 - RNA, 14 nt, Human
uuauaguuaaucua

SEQ ID NO: 3186501 - RNA, 14 nt, Human
uuauauaaaguauu

SEQ ID NO: 3186502 - RNA, 16 nt, Human
uuauauaaaguauucu

SEQ ID NO: 3186503 - RNA, 18 nt, Human
uuauauaaaguauucuuu

SEQ ID NO: 3186504 - RNA, 22 nt, Human
uuauauaaaguauucuuuuucu

SEQ ID NO: 3186505 - RNA, 13 nt, Human
auaauuuugauag

SEQ ID NO: 3186506 - RNA, 23 nt, Human
auaauuuuguaauguaucaaaua

SEQ ID NO: 3186507 - RNA, 13 nt, Human
auaauuuuguaau

SEQ ID NO: 3186508 - RNA, 12 nt, Human
auaauuuuguaa

SEQ ID NO: 3186509 - RNA, 22 nt, Human
auacaaaaaaaaaaaaaaauua

SEQ ID NO: 3186510 - RNA, 12 nt, Human
auaaugaagccc

SEQ ID NO: 3186511 - RNA, 14 nt, Human
auaauucuacuuug

SEQ ID NO: 3186512 - RNA, 20 nt, Human
auaauucaggaagcagcuuu

SEQ ID NO: 3186513 - RNA, 16 nt, Human
auaaugaacaaaauua

SEQ ID NO: 3186514 - RNA, 17 nt, Human
auaauccaguaaaauaa

SEQ ID NO: 3186515 - RNA, 19 nt, Human
auaauacaguaucucaggg

SEQ ID NO: 3186516 - RNA, 18 nt, Human
auaauacagaaucuuguu

SEQ ID NO: 3186517 - RNA, 21 nt, Human
auaauacagaaucuuguuuug

SEQ ID NO: 3186518 - RNA, 14 nt, Human
auaauaaucucagu

SEQ ID NO: 3186519 - RNA, 15 nt, Human
auaaucaccagggcc

SEQ ID NO: 3186520 - RNA, 19 nt, Human
auaaucagaauggaagaga

SEQ ID NO: 3186521 - RNA, 21 nt, Human
uuagcagcugacuuucaaagu

SEQ ID NO: 3186522 - RNA, 21 nt, Human
uuagcacuucagggcagauuu

SEQ ID NO: 3186523 - RNA, 12 nt, Human
uuagcaccaggg

SEQ ID NO: 3186524 - RNA, 21 nt, Human
uuagauuugccauagaguaca

SEQ ID NO: 3186525 - RNA, 23 nt, Human
uuagauuugccauagaguacacu

SEQ ID NO: 3186526 - RNA, 13 nt, Human
uuagauugagaaa

SEQ ID NO: 3186527 - RNA, 15 nt, Human
uuagauugagaaaug

SEQ ID NO: 3186528 - RNA, 19 nt, Human
uuagauugagaaaugugua

SEQ ID NO: 3186529 - RNA, 15 nt, Human
uuagauucacuuuga

SEQ ID NO: 3186530 - RNA, 16 nt, Human
uuagauuugccauaga

SEQ ID NO: 3186531 - RNA, 21 nt, Human
uuagauuucucacacucuaac

SEQ ID NO: 3186532 - RNA, 15 nt, Human
uuagaugugagaaaa

SEQ ID NO: 3186533 - RNA, 19 nt, Human
uuagauuaagaaauagaca

SEQ ID NO: 3186534 - RNA, 16 nt, Human
uuagauguaauuuugu

SEQ ID NO: 3186535 - RNA, 19 nt, Human
uuagaugcauauuacugua

SEQ ID NO: 3186536 - RNA, 17 nt, Human
uuagaugcuacuaagaa

SEQ ID NO: 3186537 - RNA, 16 nt, Human
uuagaugcauauuacu

SEQ ID NO: 3186538 - RNA, 22 nt, Human
auaauugacaggcgaaagaaaa

SEQ ID NO: 3186539 - RNA, 22 nt, Human
auaauucugaaguuauauuucc

SEQ ID NO: 3186540 - RNA, 20 nt, Human
auaauucugaaguuauauuu

SEQ ID NO: 3186541 - RNA, 19 nt, Human
auaauucugaaguuauauu

SEQ ID NO: 3186542 - RNA, 18 nt, Human
auaauucugaaguuauau

SEQ ID NO: 3186543 - RNA, 17 nt, Human
auaauucugaaguuaua

SEQ ID NO: 3186544 - RNA, 13 nt, Human
auaaguuggaaac

SEQ ID NO: 3186545 - RNA, 17 nt, Human
auaaguuggaaacacua

SEQ ID NO: 3186546 - RNA, 16 nt, Human
auaaguuggaaacacu

SEQ ID NO: 3186547 - RNA, 22 nt, Human
auaaguuggaaacacuaaaugu

SEQ ID NO: 3186548 - RNA, 21 nt, Human
auaaguuggaaacacuaaaug

SEQ ID NO: 3186549 - RNA, 19 nt, Human
auaaguuggaaacacuaaa

SEQ ID NO: 3186550 - RNA, 18 nt, Human
auaaguuggaaacacuaa

SEQ ID NO: 3186551 - RNA, 22 nt, Human
auaaguuaacuuccaauuuaca

SEQ ID NO: 3186552 - RNA, 17 nt, Human
auaauaaaaaauuucag

SEQ ID NO: 3186553 - RNA, 23 nt, Human
auaaguuggaaacacuaaauguu

SEQ ID NO: 3186554 - RNA, 15 nt, Human
uuaccucucugucau

SEQ ID NO: 3186555 - RNA, 17 nt, Human
uuaccucucugucaugu

SEQ ID NO: 3186556 - RNA, 13 nt, Human
uuaccucuuugga

SEQ ID NO: 3186557 - RNA, 16 nt, Human
uuaccucuuuggaaaa

SEQ ID NO: 3186558 - RNA, 15 nt, Human
uuaccucuuuggaaa

SEQ ID NO: 3186559 - RNA, 22 nt, Human
auaagaaccuuuugagugccuu

SEQ ID NO: 3186560 - RNA, 16 nt, Human
uuaccuggaaucaaau

SEQ ID NO: 3186561 - RNA, 15 nt, Human
uuaccuggauguucu

SEQ ID NO: 3186562 - RNA, 21 nt, Human
uuaccuggcuuauuuaauaug

SEQ ID NO: 3186563 - RNA, 18 nt, Human
uuaccugaguugaagagg

SEQ ID NO: 3186564 - RNA, 22 nt, Human
uuaccugaagggguuuucuuga

SEQ ID NO: 3186565 - RNA, 21 nt, Human
uuaccugaagggguuuucuug

SEQ ID NO: 3186566 - RNA, 17 nt, Human
auaaguuaacuuccaau

SEQ ID NO: 3186567 - RNA, 12 nt, Human
auaagcaacaau

SEQ ID NO: 3186568 - RNA, 17 nt, Human
auaagcaacaauuuuca

SEQ ID NO: 3186569 - RNA, 13 nt, Human
auaagcaacaauu

SEQ ID NO: 3186570 - RNA, 22 nt, Human
auaagcaacaauuuucagauuu

SEQ ID NO: 3186571 - RNA, 20 nt, Human
auaagcaacaauuuucagau

SEQ ID NO: 3186572 - RNA, 19 nt, Human
auaagcaacaauuuucaga

SEQ ID NO: 3186573 - RNA, 18 nt, Human
auaagcaacaauuuucag

SEQ ID NO: 3186574 - RNA, 23 nt, Human
auaagaaccuuuugagugccuua

SEQ ID NO: 3186575 - RNA, 18 nt, Human
auaagcaaauugcuuuuu

SEQ ID NO: 3186576 - RNA, 22 nt, Human
auaacuguaauuauuugaauga

SEQ ID NO: 3186577 - RNA, 19 nt, Human
auaacuguaauuauuugaa

SEQ ID NO: 3186578 - RNA, 18 nt, Human
auaacuguaauuauuuga

SEQ ID NO: 3186579 - RNA, 17 nt, Human
auaacuguaauuauuug

SEQ ID NO: 3186580 - RNA, 15 nt, Human
uuacaggaaguacug

SEQ ID NO: 3186581 - RNA, 16 nt, Human
uuacaggaaguacugg

SEQ ID NO: 3186582 - RNA, 18 nt, Human
uuacaggaaguacuggag

SEQ ID NO: 3186583 - RNA, 22 nt, Human
uuacaggaaguacuggagaaaa

SEQ ID NO: 3186584 - RNA, 23 nt, Human
uuaccauuuugggguacccacug

SEQ ID NO: 3186585 - RNA, 13 nt, Human
uuaccauuggaaa

SEQ ID NO: 3186586 - RNA, 22 nt, Human
uuacaugcagccacuuaggaca

SEQ ID NO: 3186587 - RNA, 18 nt, Human
uuaccauuggaaauuuca

SEQ ID NO: 3186588 - RNA, 16 nt, Human
uuaccauuggaaauuu

SEQ ID NO: 3186589 - RNA, 15 nt, Human
uuaccauuggaaauu

SEQ ID NO: 3186590 - RNA, 19 nt, Human
uuaccauuuguuaauauca

SEQ ID NO: 3186591 - RNA, 20 nt, Human
uuaccgacaagcacagucag

SEQ ID NO: 3186592 - RNA, 19 nt, Human
auaaaugugccuucauuuu

SEQ ID NO: 3186593 - RNA, 14 nt, Human
auaaauguguguau

SEQ ID NO: 3186594 - RNA, 17 nt, Human
auaaauguguguaugug

SEQ ID NO: 3186595 - RNA, 20 nt, Human
auaaauguguguaugugugu

SEQ ID NO: 3186596 - RNA, 20 nt, Human
auaacauguaauuaaguacu

SEQ ID NO: 3186597 - RNA, 19 nt, Human
auaacaugugaaaagaaua

SEQ ID NO: 3186598 - RNA, 13 nt, Human
auaaauuauggua

SEQ ID NO: 3186599 - RNA, 14 nt, Human
auaaauuauauucc

SEQ ID NO: 3186600 - RNA, 21 nt, Human
auaaauuaugguaaaauuuug

SEQ ID NO: 3186601 - RNA, 15 nt, Human
auaacugaauuugga

SEQ ID NO: 3186602 - RNA, 15 nt, Human
auaacugacuuaguu

SEQ ID NO: 3186603 - RNA, 16 nt, Human
auaacugacuuaguuc

SEQ ID NO: 3186604 - RNA, 14 nt, Human
auaaccagacacaa

SEQ ID NO: 3186605 - RNA, 16 nt, Human
auaaccagacacaaac

SEQ ID NO: 3186606 - RNA, 12 nt, Human
auaaacacuguu

SEQ ID NO: 3186607 - RNA, 22 nt, Human
auaaacauacgugugcaugugu

SEQ ID NO: 3186608 - RNA, 20 nt, Human
auaaacauacgugugcaugu

SEQ ID NO: 3186609 - RNA, 22 nt, Human
auaaacaucagguuaggcagua

SEQ ID NO: 3186610 - RNA, 19 nt, Human
auaaacaucagguuaggca

SEQ ID NO: 3186611 - RNA, 19 nt, Human
auaaaccauuuuuguuacu

SEQ ID NO: 3186612 - RNA, 20 nt, Human
auaaaccauuuuuguuacuc

SEQ ID NO: 3186613 - RNA, 18 nt, Human
auaaaccuuaauauuucu

SEQ ID NO: 3186614 - RNA, 17 nt, Human
aguuuucugagaaagac

SEQ ID NO: 3186615 - RNA, 14 nt, Human
aguuuucugagaaa

SEQ ID NO: 3186616 - RNA, 13 nt, Human
aguuuucugagaa

SEQ ID NO: 3186617 - RNA, 12 nt, Human
aguuuucugaga

SEQ ID NO: 3186618 - RNA, 16 nt, Human
aguuuucccugaaguu

SEQ ID NO: 3186619 - RNA, 20 nt, Human
auaaagugagaaaacuguga

SEQ ID NO: 3186620 - RNA, 14 nt, Human
auaaaguauucuuu

SEQ ID NO: 3186621 - RNA, 15 nt, Human
auaaaguauucuuuu

SEQ ID NO: 3186622 - RNA, 17 nt, Human
auaaaguauaauguuua

SEQ ID NO: 3186623 - RNA, 16 nt, Human
auaaaguaguaaaaga

SEQ ID NO: 3186624 - RNA, 18 nt, Human
auaaacuggcagcucagc

SEQ ID NO: 3186625 - RNA, 13 nt, Human
auaaacucuuuua

SEQ ID NO: 3186626 - RNA, 17 nt, Human
auaaacucauuuugcuu

SEQ ID NO: 3186627 - RNA, 19 nt, Human
auaaacuagauuacauuca

SEQ ID NO: 3186628 - RNA, 17 nt, Human
auaaacuagauuacauu

SEQ ID NO: 3186629 - RNA, 22 nt, Human
auaaacguggagaaucacaggc

SEQ ID NO: 3186630 - RNA, 18 nt, Human
uguugggagugaggaugu

SEQ ID NO: 3186631 - RNA, 13 nt, Human
uguugggccagga

SEQ ID NO: 3186632 - RNA, 16 nt, Human
uguugggccaggagcc

SEQ ID NO: 3186633 - RNA, 13 nt, Human
uguuguaaaaugu

SEQ ID NO: 3186634 - RNA, 16 nt, Human
uguugggccuuuuucc

SEQ ID NO: 3186635 - RNA, 13 nt, Human
uguugucagcuga

SEQ ID NO: 3186636 - RNA, 20 nt, Human
uguugucaagaauagcauug

SEQ ID NO: 3186637 - RNA, 16 nt, Human
uguugucaagaauagc

SEQ ID NO: 3186638 - RNA, 11 nt, Human
uguugucaaga

SEQ ID NO: 3186639 - RNA, 14 nt, Human
uguuguauaaauuu

SEQ ID NO: 3186640 - RNA, 14 nt, Human
uguuguauucauug

SEQ ID NO: 3186641 - RNA, 20 nt, Human
uguuguagauacaaucagcu

SEQ ID NO: 3186642 - RNA, 21 nt, Human
uguuguagauacaaucagcug

SEQ ID NO: 3186643 - RNA, 22 nt, Human
uguuguagauacaaucagcugc

SEQ ID NO: 3186644 - RNA, 13 nt, Human
uguuguauaaauu

SEQ ID NO: 3186645 - RNA, 11 nt, Human
uguuguauaaa

SEQ ID NO: 3186646 - RNA, 14 nt, Human
aguuccugucccug

SEQ ID NO: 3186647 - RNA, 17 nt, Human
aguuccuagagaacugu

SEQ ID NO: 3186648 - RNA, 17 nt, Human
aguucccuacuuccugu

SEQ ID NO: 3186649 - RNA, 15 nt, Human
aguucccuacuuccu

SEQ ID NO: 3186650 - RNA, 22 nt, Human
aguucaaagucaugauguuuuu

SEQ ID NO: 3186651 - RNA, 13 nt, Human
aguucaagaaaug

SEQ ID NO: 3186652 - RNA, 14 nt, Human
aguucaagaaauga

SEQ ID NO: 3186653 - RNA, 21 nt, Human
aguuauuuuuauuuauuuaaa

SEQ ID NO: 3186654 - RNA, 20 nt, Human
aguucaaagucaugauguuu

SEQ ID NO: 3186655 - RNA, 15 nt, Human
aguucaaagucauga

SEQ ID NO: 3186656 - RNA, 23 nt, Human
aguuauugucccuggcuuccuua

SEQ ID NO: 3186657 - RNA, 22 nt, Human
aguuauugucccuggcuuccuu

SEQ ID NO: 3186658 - RNA, 19 nt, Human
aguuauuucccuuuagcug

SEQ ID NO: 3186659 - RNA, 22 nt, Human
aguuauguguaugugaguauuc

SEQ ID NO: 3186660 - RNA, 14 nt, Human
aguuauuaaaauug

SEQ ID NO: 3186661 - RNA, 13 nt, Human
aguuauuaaaauu

SEQ ID NO: 3186662 - RNA, 18 nt, Human
aguuauuaaaauuguugu

SEQ ID NO: 3186663 - RNA, 17 nt, Human
aguuauuaaaauuguug

SEQ ID NO: 3186664 - RNA, 16 nt, Human
aguuauuaaaauuguu

SEQ ID NO: 3186665 - RNA, 15 nt, Human
aguuauuaaaauugu

SEQ ID NO: 3186666 - RNA, 13 nt, Human
aguuauguaaaua

SEQ ID NO: 3186667 - RNA, 14 nt, Human
aguuauguaaauaa

SEQ ID NO: 3186668 - RNA, 17 nt, Human
aguuauguaaauaauuc

SEQ ID NO: 3186669 - RNA, 18 nt, Human
aguuauguaaauaauucu

SEQ ID NO: 3186670 - RNA, 20 nt, Human
aguuauguaaauaauucuuu

SEQ ID NO: 3186671 - RNA, 12 nt, Human
aguuauguguau

SEQ ID NO: 3186672 - RNA, 19 nt, Human
aguuauguguaugugagua

SEQ ID NO: 3186673 - RNA, 14 nt, Human
aguuauguguaugu

SEQ ID NO: 3186674 - RNA, 19 nt, Human
aguuauggcuauaggugcu

SEQ ID NO: 3186675 - RNA, 15 nt, Human
aguuauagaaagcaa

SEQ ID NO: 3186676 - RNA, 18 nt, Human
aguuauacaguuauaaaa

SEQ ID NO: 3186677 - RNA, 19 nt, Human
aguuauacaguuauaaaau

SEQ ID NO: 3186678 - RNA, 20 nt, Human
aguuauacaguuauaaaauu

SEQ ID NO: 3186679 - RNA, 21 nt, Human
aguuauacaguuauaaaauua

SEQ ID NO: 3186680 - RNA, 21 nt, Human
aguuacuaccuccucuccuga

SEQ ID NO: 3186681 - RNA, 16 nt, Human
aguuacuaccuccucu

SEQ ID NO: 3186682 - RNA, 14 nt, Human
aguuaguggaaauc

SEQ ID NO: 3186683 - RNA, 17 nt, Human
aguuaguggaaaucuga

SEQ ID NO: 3186684 - RNA, 13 nt, Human
aguuaguguagau

SEQ ID NO: 3186685 - RNA, 16 nt, Human
aguuaggcuuucucuu

SEQ ID NO: 3186686 - RNA, 19 nt, Human
aguuaguuccacugagacc

SEQ ID NO: 3186687 - RNA, 17 nt, Human
aguuaguuccacugaga

SEQ ID NO: 3186688 - RNA, 15 nt, Human
aguuaguuccacuga

SEQ ID NO: 3186689 - RNA, 14 nt, Human
aguuauaaaauuaa

SEQ ID NO: 3186690 - RNA, 15 nt, Human
aguuauaaaauuaaa

SEQ ID NO: 3186691 - RNA, 18 nt, Human
aguuauaaaauuaaaagu

SEQ ID NO: 3186692 - RNA, 19 nt, Human
aguuauaaaauuaaaaguu

SEQ ID NO: 3186693 - RNA, 20 nt, Human
aguuauaaaauuaaaaguuu

SEQ ID NO: 3186694 - RNA, 12 nt, Human
aguguuuaaaug

SEQ ID NO: 3186695 - RNA, 13 nt, Human
aguguuuaugugc

SEQ ID NO: 3186696 - RNA, 16 nt, Human
aguguuuaugugcuau

SEQ ID NO: 3186697 - RNA, 16 nt, Human
aguuaccagugccuua

SEQ ID NO: 3186698 - RNA, 15 nt, Human
aguuaccagugccuu

SEQ ID NO: 3186699 - RNA, 20 nt, Human
aguuaccuggaaucaaauaa

SEQ ID NO: 3186700 - RNA, 13 nt, Human
uguucugggacac

SEQ ID NO: 3186701 - RNA, 12 nt, Human
uguucugggaca

SEQ ID NO: 3186702 - RNA, 14 nt, Human
uguucugggacaca

SEQ ID NO: 3186703 - RNA, 19 nt, Human
uguucuuucacccuuuucu

SEQ ID NO: 3186704 - RNA, 16 nt, Human
uguucuuggcaauaaa

SEQ ID NO: 3186705 - RNA, 17 nt, Human
uguucuuggcaauaaau

SEQ ID NO: 3186706 - RNA, 20 nt, Human
uguucuuggcaauaaauuuu

SEQ ID NO: 3186707 - RNA, 22 nt, Human
uguucuuggcaauaaauuuuga

SEQ ID NO: 3186708 - RNA, 23 nt, Human
uguucuuggcaauaaauuuugaa

SEQ ID NO: 3186709 - RNA, 23 nt, Human
aguguacauggaauaacauguaa

SEQ ID NO: 3186710 - RNA, 12 nt, Human
aguguaccauua

SEQ ID NO: 3186711 - RNA, 19 nt, Human
aguguaccauuaaaauaug

SEQ ID NO: 3186712 - RNA, 18 nt, Human
aguguaccauuaaaauau

SEQ ID NO: 3186713 - RNA, 20 nt, Human
aguguagauuccauuuacug

SEQ ID NO: 3186714 - RNA, 21 nt, Human
aguguaccauuaaaauaugca

SEQ ID NO: 3186715 - RNA, 14 nt, Human
aguguagauuuuau

SEQ ID NO: 3186716 - RNA, 15 nt, Human
aguguagauuuuaua

SEQ ID NO: 3186717 - RNA, 13 nt, Human
uguuaugagccag

SEQ ID NO: 3186718 - RNA, 15 nt, Human
uguuaugguagaaaa

SEQ ID NO: 3186719 - RNA, 16 nt, Human
uguuaugguagaaaaa

SEQ ID NO: 3186720 - RNA, 17 nt, Human
uguuaugguagaaaaau

SEQ ID NO: 3186721 - RNA, 15 nt, Human
uguuauguauauggu

SEQ ID NO: 3186722 - RNA, 15 nt, Human
uguuauuuucagcau

SEQ ID NO: 3186723 - RNA, 22 nt, Human
uguuauuuucagcaugaaaaug

SEQ ID NO: 3186724 - RNA, 19 nt, Human
uguuauuuuaaucucagaa

SEQ ID NO: 3186725 - RNA, 20 nt, Human
uguuauuuuuauaagaaaac

SEQ ID NO: 3186726 - RNA, 16 nt, Human
uguucccauucuugca

SEQ ID NO: 3186727 - RNA, 22 nt, Human
aguguacauggaauaacaugua

SEQ ID NO: 3186728 - RNA, 21 nt, Human
aguguacauggaauaacaugu

SEQ ID NO: 3186729 - RNA, 16 nt, Human
agugguuuuaauaaaa

SEQ ID NO: 3186730 - RNA, 13 nt, Human
agugguugaauau

SEQ ID NO: 3186731 - RNA, 14 nt, Human
agugguugaauaug

SEQ ID NO: 3186732 - RNA, 15 nt, Human
agugguugaauauga

SEQ ID NO: 3186733 - RNA, 18 nt, Human
agugguugaauaugauua

SEQ ID NO: 3186734 - RNA, 21 nt, Human
agugguuccuaauccucuagg

SEQ ID NO: 3186735 - RNA, 19 nt, Human
agugggugaauaauacagu

SEQ ID NO: 3186736 - RNA, 20 nt, Human
aguggcagcugcuuuugucu

SEQ ID NO: 3186737 - RNA, 14 nt, Human
aguggcagcugcuu

SEQ ID NO: 3186738 - RNA, 22 nt, Human
aguggcagggcacagggccugg

SEQ ID NO: 3186739 - RNA, 20 nt, Human
aguggcagggcacagggccu

SEQ ID NO: 3186740 - RNA, 17 nt, Human
aguggcagggcacaggg

SEQ ID NO: 3186741 - RNA, 16 nt, Human
aguggcagggcacagg

SEQ ID NO: 3186742 - RNA, 15 nt, Human
aguggcagggcacag

SEQ ID NO: 3186743 - RNA, 13 nt, Human
aguggcagggcac

SEQ ID NO: 3186744 - RNA, 12 nt, Human
aguggcagggca

SEQ ID NO: 3186745 - RNA, 13 nt, Human
aguggcagcugcu

SEQ ID NO: 3186746 - RNA, 12 nt, Human
aguggcagcugc

SEQ ID NO: 3186747 - RNA, 11 nt, Human
aguggcagcug

SEQ ID NO: 3186748 - RNA, 13 nt, Human
agugggugaauaa

SEQ ID NO: 3186749 - RNA, 18 nt, Human
agugggugaauaauacag

SEQ ID NO: 3186750 - RNA, 19 nt, Human
agugggggaguggccacag

SEQ ID NO: 3186751 - RNA, 20 nt, Human
agugggggaguggccacaga

SEQ ID NO: 3186752 - RNA, 20 nt, Human
uuaaaaaugguuuaaauggu

SEQ ID NO: 3186753 - RNA, 19 nt, Human
uuaaaaauaucaaauuaau

SEQ ID NO: 3186754 - RNA, 13 nt, Human
uuaaaaauaucaa

SEQ ID NO: 3186755 - RNA, 18 nt, Human
uuaaaaauaucaaauuaa

SEQ ID NO: 3186756 - RNA, 17 nt, Human
uuaaaacaacacucaca

SEQ ID NO: 3186757 - RNA, 18 nt, Human
uuaaaaaguggaaaaaua

SEQ ID NO: 3186758 - RNA, 13 nt, Human
uuaaaaaacuuca

SEQ ID NO: 3186759 - RNA, 20 nt, Human
uuaaaaaacuucauguaauu

SEQ ID NO: 3186760 - RNA, 23 nt, Human
uuaaaaaguccauaccuuauaua

SEQ ID NO: 3186761 - RNA, 15 nt, Human
uuaaaaauaaagcaa

SEQ ID NO: 3186762 - RNA, 13 nt, Human
uuaaaaaguguuu

SEQ ID NO: 3186763 - RNA, 23 nt, Human
uuaaaaagucuuuuaaaaaguau

SEQ ID NO: 3186764 - RNA, 17 nt, Human
uuaaaaagucuuuuaaa

SEQ ID NO: 3186765 - RNA, 16 nt, Human
uuaaaaagucuuuuaa

SEQ ID NO: 3186766 - RNA, 22 nt, Human
uuaaaaaacuuucuacucauuu

SEQ ID NO: 3186767 - RNA, 17 nt, Human
uuaaaccgccaaggcug

SEQ ID NO: 3186768 - RNA, 13 nt, Human
uuaaaccuuuuau

SEQ ID NO: 3186769 - RNA, 14 nt, Human
uuaaaccuuuuauu

SEQ ID NO: 3186770 - RNA, 19 nt, Human
uuaaaauaugcacuaaguc

SEQ ID NO: 3186771 - RNA, 16 nt, Human
uuaaaauaugcacuaa

SEQ ID NO: 3186772 - RNA, 19 nt, Human
uuaaaauauuccugcauuu

SEQ ID NO: 3186773 - RNA, 16 nt, Human
uuaaaauauuccugca

SEQ ID NO: 3186774 - RNA, 22 nt, Human
uuaaaauauagauguguuuuau

SEQ ID NO: 3186775 - RNA, 15 nt, Human
uuaaaauaugcacua

SEQ ID NO: 3186776 - RNA, 14 nt, Human
uuaaaauaugcacu

SEQ ID NO: 3186777 - RNA, 12 nt, Human
uuaaaauauaau

SEQ ID NO: 3186778 - RNA, 23 nt, Human
uuaaaaauuuacuacaauaugua

SEQ ID NO: 3186779 - RNA, 15 nt, Human
uuaaaaauuuacuac

SEQ ID NO: 3186780 - RNA, 15 nt, Human
uuaaauaaaucauaa

SEQ ID NO: 3186781 - RNA, 13 nt, Human
uuaaauaaaucau

SEQ ID NO: 3186782 - RNA, 13 nt, Human
aguuucuaaaauu

SEQ ID NO: 3186783 - RNA, 20 nt, Human
aguuucuaaaauugaguucu

SEQ ID NO: 3186784 - RNA, 15 nt, Human
aguuucucagcuccc

SEQ ID NO: 3186785 - RNA, 16 nt, Human
aguuucucagcuccca

SEQ ID NO: 3186786 - RNA, 13 nt, Human
aguuucuccaagc

SEQ ID NO: 3186787 - RNA, 15 nt, Human
aguuucuccaagcag

SEQ ID NO: 3186788 - RNA, 23 nt, Human
aguuucaauaaaguuugaucuuc

SEQ ID NO: 3186789 - RNA, 15 nt, Human
aguuucaauaaaguu

SEQ ID NO: 3186790 - RNA, 15 nt, Human
aguuucaaguuuuaa

SEQ ID NO: 3186791 - RNA, 18 nt, Human
aguuucaaguuuuaaagu

SEQ ID NO: 3186792 - RNA, 20 nt, Human
aguuucaaguuuuaaaguuc

SEQ ID NO: 3186793 - RNA, 22 nt, Human
aguuucaaguuuuaaaguucau

SEQ ID NO: 3186794 - RNA, 21 nt, Human
aguuucaauaaaguuugaucu

SEQ ID NO: 3186795 - RNA, 18 nt, Human
aguuucaauaaaguuuga

SEQ ID NO: 3186796 - RNA, 17 nt, Human
aguuucaauaaaguuug

SEQ ID NO: 3186797 - RNA, 16 nt, Human
aguuucaauaaaguuu

SEQ ID NO: 3186798 - RNA, 14 nt, Human
aguuucaacaugaa

SEQ ID NO: 3186799 - RNA, 23 nt, Human
aguuucaaaaaucugaagauugu

SEQ ID NO: 3186800 - RNA, 22 nt, Human
aguuucaaaaaucugaagauug

SEQ ID NO: 3186801 - RNA, 21 nt, Human
aguuucaaaaaucugaagauu

SEQ ID NO: 3186802 - RNA, 18 nt, Human
aguuucaaaaaucugaag

SEQ ID NO: 3186803 - RNA, 16 nt, Human
aguuucaaaaaucuga

SEQ ID NO: 3186804 - RNA, 15 nt, Human
aguuucaaaaaucug

SEQ ID NO: 3186805 - RNA, 14 nt, Human
aguuucaaaaaucu

SEQ ID NO: 3186806 - RNA, 23 nt, Human
aguuuauuuuaaaacaauaggau

SEQ ID NO: 3186807 - RNA, 16 nt, Human
aguuuauuuuaaaaca

SEQ ID NO: 3186808 - RNA, 22 nt, Human
aguuuucacucuuauugcccac

SEQ ID NO: 3186809 - RNA, 21 nt, Human
aguuuuauuuucuaaaguacu

SEQ ID NO: 3186810 - RNA, 20 nt, Human
aguuuuauuuucuaaaguac

SEQ ID NO: 3186811 - RNA, 13 nt, Human
aguuuuauuuucu

SEQ ID NO: 3186812 - RNA, 23 nt, Human
aguuuuauuuauauuuauugacu

SEQ ID NO: 3186813 - RNA, 20 nt, Human
aguuuuauuuauauuuauug

SEQ ID NO: 3186814 - RNA, 22 nt, Human
aguuuuauuuauauuuauugac

SEQ ID NO: 3186815 - RNA, 15 nt, Human
aguuuuauuuauauu

SEQ ID NO: 3186816 - RNA, 17 nt, Human
aguuuuauuuauauuua

SEQ ID NO: 3186817 - RNA, 18 nt, Human
aguuuuauuuauauuuau

SEQ ID NO: 3186818 - RNA, 19 nt, Human
aguuuuauuuauauuuauu

SEQ ID NO: 3186819 - RNA, 14 nt, Human
aguuuuauuuauau

SEQ ID NO: 3186820 - RNA, 22 nt, Human
aguuuucaugugcucagaauua

SEQ ID NO: 3186821 - RNA, 14 nt, Human
aguuuucaugugcu

SEQ ID NO: 3186822 - RNA, 20 nt, Human
aguucucuucacucaaggau

SEQ ID NO: 3186823 - RNA, 16 nt, Human
aguucucuccuucuuc

SEQ ID NO: 3186824 - RNA, 13 nt, Human
aguucucuccuuc

SEQ ID NO: 3186825 - RNA, 12 nt, Human
aguucucuccuu

SEQ ID NO: 3186826 - RNA, 15 nt, Human
uguuuucucuugaga

SEQ ID NO: 3186827 - RNA, 21 nt, Human
uguuuuauuuuaauucaguug

SEQ ID NO: 3186828 - RNA, 14 nt, Human
uguuuucaaaugga

SEQ ID NO: 3186829 - RNA, 13 nt, Human
uguuuucaaaugg

SEQ ID NO: 3186830 - RNA, 16 nt, Human
uguuuuagcacagcgu

SEQ ID NO: 3186831 - RNA, 15 nt, Human
uguuuucaguguaca

SEQ ID NO: 3186832 - RNA, 22 nt, Human
uguuuucaaucucguauagaag

SEQ ID NO: 3186833 - RNA, 14 nt, Human
uguuugccucugcc

SEQ ID NO: 3186834 - RNA, 16 nt, Human
uguuugccucugccuc

SEQ ID NO: 3186835 - RNA, 14 nt, Human
uguugucagcugaa

SEQ ID NO: 3186836 - RNA, 17 nt, Human
uguuguccgguuuacuu

SEQ ID NO: 3186837 - RNA, 13 nt, Human
uguuuggagacag

SEQ ID NO: 3186838 - RNA, 23 nt, Human
uguuugcuccccuuccccuuccu

SEQ ID NO: 3186839 - RNA, 12 nt, Human
uguuugcucccc

SEQ ID NO: 3186840 - RNA, 22 nt, Human
uguuuggcguagcagaguuaaa

SEQ ID NO: 3186841 - RNA, 15 nt, Human
uguuuggggaugaga

SEQ ID NO: 3186842 - RNA, 20 nt, Human
uguuugggaagagcuuagaa

SEQ ID NO: 3186843 - RNA, 23 nt, Human
aguugauucagcucugcaagaau

SEQ ID NO: 3186844 - RNA, 14 nt, Human
aguugauucagcuc

SEQ ID NO: 3186845 - RNA, 15 nt, Human
aguugauucagcucu

SEQ ID NO: 3186846 - RNA, 17 nt, Human
aguugauucagcucugc

SEQ ID NO: 3186847 - RNA, 18 nt, Human
aguugauucagcucugca

SEQ ID NO: 3186848 - RNA, 22 nt, Human
aguugauagcacagacccugcc

SEQ ID NO: 3186849 - RNA, 23 nt, Human
aguugauagcacagacccugccc

SEQ ID NO: 3186850 - RNA, 13 nt, Human
aguugauucagcu

SEQ ID NO: 3186851 - RNA, 14 nt, Human
aguugaucucccca

SEQ ID NO: 3186852 - RNA, 19 nt, Human
aguucugugacuaggaaaa

SEQ ID NO: 3186853 - RNA, 11 nt, Human
aguucugugac

SEQ ID NO: 3186854 - RNA, 18 nt, Human
aguucuguguauuuucag

SEQ ID NO: 3186855 - RNA, 21 nt, Human
aguucugugacuaggaaaaaa

SEQ ID NO: 3186856 - RNA, 13 nt, Human
aguucuguauuug

SEQ ID NO: 3186857 - RNA, 14 nt, Human
aguucuguauuuga

SEQ ID NO: 3186858 - RNA, 15 nt, Human
aguucuguauuugaa

SEQ ID NO: 3186859 - RNA, 16 nt, Human
aguucuguauuugaaa

SEQ ID NO: 3186860 - RNA, 17 nt, Human
aguucuguauuugaaag

SEQ ID NO: 3186861 - RNA, 18 nt, Human
aguucuguauuugaaagu

SEQ ID NO: 3186862 - RNA, 20 nt, Human
aguucuguauuugaaagugc

SEQ ID NO: 3186863 - RNA, 21 nt, Human
aguucuguauuugaaagugcc

SEQ ID NO: 3186864 - RNA, 22 nt, Human
aguucuguauuugaaagugccu

SEQ ID NO: 3186865 - RNA, 23 nt, Human
aguucuguauuugaaagugccuu

SEQ ID NO: 3186866 - RNA, 15 nt, Human
aguugauagcacaga

SEQ ID NO: 3186867 - RNA, 19 nt, Human
aguugauagcacagacccu

SEQ ID NO: 3186868 - RNA, 20 nt, Human
aguugauagcacagacccug

SEQ ID NO: 3186869 - RNA, 21 nt, Human
aguugauagcacagacccugc

SEQ ID NO: 3186870 - RNA, 14 nt, Human
aguugauagcacag

SEQ ID NO: 3186871 - RNA, 15 nt, Human
aguucuuuaaacugu

SEQ ID NO: 3186872 - RNA, 18 nt, Human
aguucuuugauucuguaa

SEQ ID NO: 3186873 - RNA, 16 nt, Human
aguucuuugauucugu

SEQ ID NO: 3186874 - RNA, 14 nt, Human
aguucuugaacagu

SEQ ID NO: 3186875 - RNA, 11 nt, Human
ugccucugccu

SEQ ID NO: 3186876 - RNA, 19 nt, Human
ugccucugauguauuuugu

SEQ ID NO: 3186877 - RNA, 17 nt, Human
ugccucugauguauuuu

SEQ ID NO: 3186878 - RNA, 16 nt, Human
ugccucugacacacag

SEQ ID NO: 3186879 - RNA, 14 nt, Human
ugccucugacacac

SEQ ID NO: 3186880 - RNA, 19 nt, Human
ugccugcccaggccccugc

SEQ ID NO: 3186881 - RNA, 18 nt, Human
ugccugcccaggccccug

SEQ ID NO: 3186882 - RNA, 17 nt, Human
ugccugcccaggccccu

SEQ ID NO: 3186883 - RNA, 11 nt, Human
ugccugccuua

SEQ ID NO: 3186884 - RNA, 19 nt, Human
ugccugccuuaagugagga

SEQ ID NO: 3186885 - RNA, 22 nt, Human
ugccucugauguauuuugugag

SEQ ID NO: 3186886 - RNA, 23 nt, Human
ugccugcucuuuggccugaugac

SEQ ID NO: 3186887 - RNA, 12 nt, Human
ugccugcucuuu

SEQ ID NO: 3186888 - RNA, 11 nt, Human
ugccugcucuu

SEQ ID NO: 3186889 - RNA, 14 nt, Human
agcugccugugccu

SEQ ID NO: 3186890 - RNA, 23 nt, Human
agcugcuuuuuuugaaacuuuga

SEQ ID NO: 3186891 - RNA, 22 nt, Human
agcugcuuuuuuugaaacuuug

SEQ ID NO: 3186892 - RNA, 17 nt, Human
agcugcuuuuuuugaaa

SEQ ID NO: 3186893 - RNA, 21 nt, Human
agcuggagaggagcccugccu

SEQ ID NO: 3186894 - RNA, 23 nt, Human
agcuggagaggagcccugccucu

SEQ ID NO: 3186895 - RNA, 22 nt, Human
agcuggagaggagcccugccuc

SEQ ID NO: 3186896 - RNA, 24 nt, Human
agcugcuuuugucuaugggacuca

SEQ ID NO: 3186897 - RNA, 23 nt, Human
agcugcuuuugucuaugggacuc

SEQ ID NO: 3186898 - RNA, 15 nt, Human
agcugggacuacagg

SEQ ID NO: 3186899 - RNA, 22 nt, Human
agcugcuuuugucuaugggacu

SEQ ID NO: 3186900 - RNA, 13 nt, Human
agcugccuguuca

SEQ ID NO: 3186901 - RNA, 21 nt, Human
ugccugcuucagccucccaca

SEQ ID NO: 3186902 - RNA, 12 nt, Human
ugccugcuucag

SEQ ID NO: 3186903 - RNA, 10 nt, Human
agcugccugu

SEQ ID NO: 3186904 - RNA, 17 nt, Human
ugccucucucaggccaa

SEQ ID NO: 3186905 - RNA, 16 nt, Human
ugccucucucaggcca

SEQ ID NO: 3186906 - RNA, 15 nt, Human
ugccucagccucccg

SEQ ID NO: 3186907 - RNA, 15 nt, Human
ugccucagccuccug

SEQ ID NO: 3186908 - RNA, 22 nt, Human
ugccucccaucacccgcuaaga

SEQ ID NO: 3186909 - RNA, 19 nt, Human
ugccucccaucacccgcua

SEQ ID NO: 3186910 - RNA, 17 nt, Human
ugccucagcuuccccag

SEQ ID NO: 3186911 - RNA, 15 nt, Human
ugccucagcuucccc

SEQ ID NO: 3186912 - RNA, 18 nt, Human
ugccucagcuuccccagu

SEQ ID NO: 3186913 - RNA, 15 nt, Human
ugccucaccccuugc

SEQ ID NO: 3186914 - RNA, 22 nt, Human
ugccgccgcuagguagagucug

SEQ ID NO: 3186915 - RNA, 16 nt, Human
ugccgcaucucacagc

SEQ ID NO: 3186916 - RNA, 18 nt, Human
ugccgccgcuagguagag

SEQ ID NO: 3186917 - RNA, 14 nt, Human
ugccgcagcccugc

SEQ ID NO: 3186918 - RNA, 20 nt, Human
ugccgcagcccugcagaggg

SEQ ID NO: 3186919 - RNA, 19 nt, Human
ugcccuuaccugccaggaa

SEQ ID NO: 3186920 - RNA, 23 nt, Human
ugcccugugaguacuacaguccu

SEQ ID NO: 3186921 - RNA, 16 nt, Human
agcucuucuccaggcu

SEQ ID NO: 3186922 - RNA, 15 nt, Human
agcucuucuccaggc

SEQ ID NO: 3186923 - RNA, 12 nt, Human
agcucuuccugg

SEQ ID NO: 3186924 - RNA, 14 nt, Human
agcucuuccuagcu

SEQ ID NO: 3186925 - RNA, 22 nt, Human
agcucuuccuggacaggccagg

SEQ ID NO: 3186926 - RNA, 20 nt, Human
agcucuuccuggacaggcca

SEQ ID NO: 3186927 - RNA, 15 nt, Human
ugcccugugggcccc

SEQ ID NO: 3186928 - RNA, 18 nt, Human
ugcccugugggcccccaa

SEQ ID NO: 3186929 - RNA, 22 nt, Human
ugcccuuaccugccaggaagcc

SEQ ID NO: 3186930 - RNA, 23 nt, Human
agcucugcccauccugccccuga

SEQ ID NO: 3186931 - RNA, 21 nt, Human
agcucugcagagcaggaaaca

SEQ ID NO: 3186932 - RNA, 23 nt, Human
agcucugaguuccggcaccagua

SEQ ID NO: 3186933 - RNA, 23 nt, Human
agcucuguccugggagugagcug

SEQ ID NO: 3186934 - RNA, 19 nt, Human
agcuccagcucaccagccc

SEQ ID NO: 3186935 - RNA, 18 nt, Human
agcuccagcucaccagcc

SEQ ID NO: 3186936 - RNA, 21 nt, Human
agcuccagcucaccagcccca

SEQ ID NO: 3186937 - RNA, 21 nt, Human
agcuccaucuccacuccagau

SEQ ID NO: 3186938 - RNA, 17 nt, Human
agcucccacuucugcca

SEQ ID NO: 3186939 - RNA, 18 nt, Human
agcucccacuucugccag

SEQ ID NO: 3186940 - RNA, 19 nt, Human
agcucccacuucugccaga

SEQ ID NO: 3186941 - RNA, 23 nt, Human
agcuccuucuguccuacucugug

SEQ ID NO: 3186942 - RNA, 22 nt, Human
agcuccuucuguccuacucugu

SEQ ID NO: 3186943 - RNA, 14 nt, Human
agcucccccagcuc

SEQ ID NO: 3186944 - RNA, 15 nt, Human
agcuccccccaccuc

SEQ ID NO: 3186945 - RNA, 14 nt, Human
agcuccccccaccu

SEQ ID NO: 3186946 - RNA, 16 nt, Human
agcucccccagcuccc

SEQ ID NO: 3186947 - RNA, 15 nt, Human
agcucccccagcucc

SEQ ID NO: 3186948 - RNA, 20 nt, Human
agcuccccccaccuccccca

SEQ ID NO: 3186949 - RNA, 20 nt, Human
ugcccuaaugcgcaggcugg

SEQ ID NO: 3186950 - RNA, 23 nt, Human
ugcccuaaugcgcaggcuggccc

SEQ ID NO: 3186951 - RNA, 17 nt, Human
agcuccaagcucccagg

SEQ ID NO: 3186952 - RNA, 16 nt, Human
agcuccaagcucccag

SEQ ID NO: 3186953 - RNA, 18 nt, Human
agcuccaagcucccaggc

SEQ ID NO: 3186954 - RNA, 19 nt, Human
agcuccaagcucccaggca

SEQ ID NO: 3186955 - RNA, 18 nt, Human
ugcccugaccaugcauuu

SEQ ID NO: 3186956 - RNA, 19 nt, Human
ugcccugaccaugcauuuu

SEQ ID NO: 3186957 - RNA, 17 nt, Human
agcuccagcucaccagc

SEQ ID NO: 3186958 - RNA, 13 nt, Human
agcuccagcucac

SEQ ID NO: 3186959 - RNA, 21 nt, Human
agcuccaccccgcaagcacca

SEQ ID NO: 3186960 - RNA, 21 nt, Human
agcggcuggacuuggagguag

SEQ ID NO: 3186961 - RNA, 23 nt, Human
agcggcuggcagcccaccccuca

SEQ ID NO: 3186962 - RNA, 20 nt, Human
agcggggacagcuccuucug

SEQ ID NO: 3186963 - RNA, 19 nt, Human
agcggggacagcuccuucu

SEQ ID NO: 3186964 - RNA, 22 nt, Human
agcggggacagcuccuucuguc

SEQ ID NO: 3186965 - RNA, 16 nt, Human
agcguauggcuuuauu

SEQ ID NO: 3186966 - RNA, 20 nt, Human
agcguagugcagcagggcag

SEQ ID NO: 3186967 - RNA, 17 nt, Human
agcguagugcagcaggg

SEQ ID NO: 3186968 - RNA, 17 nt, Human
agcggcuggacuuggag

SEQ ID NO: 3186969 - RNA, 13 nt, Human
agcggcuggcagc

SEQ ID NO: 3186970 - RNA, 18 nt, Human
ugccagcuuaucucaggg

SEQ ID NO: 3186971 - RNA, 22 nt, Human
ugccaggaaaggagaguacuuu

SEQ ID NO: 3186972 - RNA, 20 nt, Human
ugccagcugcugagccgcag

SEQ ID NO: 3186973 - RNA, 19 nt, Human
ugccagcugcugagccgca

SEQ ID NO: 3186974 - RNA, 20 nt, Human
ugccagucccccugccccag

SEQ ID NO: 3186975 - RNA, 15 nt, Human
ugccagcugcugagc

SEQ ID NO: 3186976 - RNA, 17 nt, Human
ugccagcugcugagccg

SEQ ID NO: 3186977 - RNA, 16 nt, Human
ugccagcugcugagcc

SEQ ID NO: 3186978 - RNA, 23 nt, Human
ugccagcucuuccuagcuggaga

SEQ ID NO: 3186979 - RNA, 22 nt, Human
ugccagcucuuccuagcuggag

SEQ ID NO: 3186980 - RNA, 20 nt, Human
ugccagcucuuccuagcugg

SEQ ID NO: 3186981 - RNA, 18 nt, Human
ugccagcucuuccuagcu

SEQ ID NO: 3186982 - RNA, 15 nt, Human
ugccagcucuuccua

SEQ ID NO: 3186983 - RNA, 21 nt, Human
ugccagauguccuaaugguga

SEQ ID NO: 3186984 - RNA, 17 nt, Human
ugccacugccucuuccu

SEQ ID NO: 3186985 - RNA, 13 nt, Human
ugccacugccucu

SEQ ID NO: 3186986 - RNA, 21 nt, Human
ugcauuuagggaguauucuaa

SEQ ID NO: 3186987 - RNA, 12 nt, Human
ugcauuucagaa

SEQ ID NO: 3186988 - RNA, 17 nt, Human
ugcauuucagaaagccu

SEQ ID NO: 3186989 - RNA, 19 nt, Human
ugccacugccucuuccucc

SEQ ID NO: 3186990 - RNA, 18 nt, Human
ugccacugccucuuccuc

SEQ ID NO: 3186991 - RNA, 20 nt, Human
ugccacugccucuuccuccc

SEQ ID NO: 3186992 - RNA, 18 nt, Human
ugcagcucagaaccacag

SEQ ID NO: 3186993 - RNA, 19 nt, Human
ugcagcucagaaccacagc

SEQ ID NO: 3186994 - RNA, 20 nt, Human
ugcagcucagaaccacagca

SEQ ID NO: 3186995 - RNA, 14 nt, Human
ugcagcucuuccug

SEQ ID NO: 3186996 - RNA, 16 nt, Human
ugcagcucuuccugga

SEQ ID NO: 3186997 - RNA, 15 nt, Human
ugcagcucuuccugg

SEQ ID NO: 3186998 - RNA, 18 nt, Human
agccuuccagggguggga

SEQ ID NO: 3186999 - RNA, 22 nt, Human
ugcagcugaaauugaaaaguua

SEQ ID NO: 3187000 - RNA, 21 nt, Human
ugcagcugaaauugaaaaguu

SEQ ID NO: 3187001 - RNA, 19 nt, Human
ugcagcugaaauugaaaag

SEQ ID NO: 3187002 - RNA, 18 nt, Human
ugcagcugaaauugaaaa

SEQ ID NO: 3187003 - RNA, 15 nt, Human
ugcagcugaaauuga

SEQ ID NO: 3187004 - RNA, 18 nt, Human
ugcagcucuuccuggaca

SEQ ID NO: 3187005 - RNA, 22 nt, Human
agccuugaccauucuccaccug

SEQ ID NO: 3187006 - RNA, 23 nt, Human
agccuugaccauucuccaccugc

SEQ ID NO: 3187007 - RNA, 21 nt, Human
agccuugauucccuuguuauu

SEQ ID NO: 3187008 - RNA, 22 nt, Human
agcgauucuucugcuucagccu

SEQ ID NO: 3187009 - RNA, 15 nt, Human
ugcauuauuaaauug

SEQ ID NO: 3187010 - RNA, 17 nt, Human
ugcauuauuaaauugua

SEQ ID NO: 3187011 - RNA, 18 nt, Human
ugcauuauuaaauuguaa

SEQ ID NO: 3187012 - RNA, 21 nt, Human
agcgcagccgccuucacagca

SEQ ID NO: 3187013 - RNA, 15 nt, Human
agcgcacagcugcuc

SEQ ID NO: 3187014 - RNA, 14 nt, Human
agcgcacagcugcu

SEQ ID NO: 3187015 - RNA, 13 nt, Human
agcgcacagcugc

SEQ ID NO: 3187016 - RNA, 11 nt, Human
agcgcagcccg

SEQ ID NO: 3187017 - RNA, 23 nt, Human
ugcauucacauuuagaaaaguga

SEQ ID NO: 3187018 - RNA, 19 nt, Human
ugcauuuagggaguauucu

SEQ ID NO: 3187019 - RNA, 20 nt, Human
agcuauuacuggaucucuua

SEQ ID NO: 3187020 - RNA, 15 nt, Human
agcuaguugaauacu

SEQ ID NO: 3187021 - RNA, 16 nt, Human
agcuaguugaauacuu

SEQ ID NO: 3187022 - RNA, 17 nt, Human
agcuaguugaauacuug

SEQ ID NO: 3187023 - RNA, 16 nt, Human
agcuaggccuggccag

SEQ ID NO: 3187024 - RNA, 18 nt, Human
agcuacagugcauaguug

SEQ ID NO: 3187025 - RNA, 16 nt, Human
agcuacaucuacuuaa

SEQ ID NO: 3187026 - RNA, 21 nt, Human
agcuaggccuggccagaugca

SEQ ID NO: 3187027 - RNA, 14 nt, Human
agcuagucaacagu

SEQ ID NO: 3187028 - RNA, 19 nt, Human
agcgugaagccagggcccg

SEQ ID NO: 3187029 - RNA, 22 nt, Human
ugccauuuaaagcuuauuaaaa

SEQ ID NO: 3187030 - RNA, 15 nt, Human
ugccauuucaugucc

SEQ ID NO: 3187031 - RNA, 15 nt, Human
agcuccaagcuccca

SEQ ID NO: 3187032 - RNA, 20 nt, Human
agcucagggccuggcucagg

SEQ ID NO: 3187033 - RNA, 18 nt, Human
agcucagggccuggcuca

SEQ ID NO: 3187034 - RNA, 19 nt, Human
agcucagggccuggcucag

SEQ ID NO: 3187035 - RNA, 12 nt, Human
agcucagggccu

SEQ ID NO: 3187036 - RNA, 13 nt, Human
agcucagggccug

SEQ ID NO: 3187037 - RNA, 19 nt, Human
agcuauucaguaauaacuc

SEQ ID NO: 3187038 - RNA, 22 nt, Human
ugcccccaauaguagucucugu

SEQ ID NO: 3187039 - RNA, 23 nt, Human
ugccccgaacauguuuuucuucu

SEQ ID NO: 3187040 - RNA, 14 nt, Human
ugcccccucugccc

SEQ ID NO: 3187041 - RNA, 15 nt, Human
ugcccccucugcccu

SEQ ID NO: 3187042 - RNA, 16 nt, Human
ugcccccucugcccug

SEQ ID NO: 3187043 - RNA, 17 nt, Human
ugcccccucugcccugc

SEQ ID NO: 3187044 - RNA, 18 nt, Human
ugcccccucugcccugcg

SEQ ID NO: 3187045 - RNA, 18 nt, Human
ugcccaggccccugccac

SEQ ID NO: 3187046 - RNA, 17 nt, Human
ugcccaggccccugcca

SEQ ID NO: 3187047 - RNA, 15 nt, Human
ugcccaggccccugc

SEQ ID NO: 3187048 - RNA, 14 nt, Human
ugcccaggccccug

SEQ ID NO: 3187049 - RNA, 20 nt, Human
ugcccagcuuuucauugcug

SEQ ID NO: 3187050 - RNA, 19 nt, Human
ugcccagcuuuucauugcu

SEQ ID NO: 3187051 - RNA, 23 nt, Human
ugcccagcuuuucauugcuguga

SEQ ID NO: 3187052 - RNA, 13 nt, Human
ugcccagccccuu

SEQ ID NO: 3187053 - RNA, 12 nt, Human
ugcccagccccu

SEQ ID NO: 3187054 - RNA, 16 nt, Human
ugcccagccccuucug

SEQ ID NO: 3187055 - RNA, 17 nt, Human
ugcccagccccuucuga

SEQ ID NO: 3187056 - RNA, 17 nt, Human
ugcccaaagaugcagcc

SEQ ID NO: 3187057 - RNA, 20 nt, Human
ugcccaaagaugcagccggu

SEQ ID NO: 3187058 - RNA, 15 nt, Human
ugccauuuuucaaaa

SEQ ID NO: 3187059 - RNA, 14 nt, Human
agccaugagaaugu

SEQ ID NO: 3187060 - RNA, 15 nt, Human
agcccacuucugcca

SEQ ID NO: 3187061 - RNA, 14 nt, Human
agcccacuucugcc

SEQ ID NO: 3187062 - RNA, 13 nt, Human
agcccacuucugc

SEQ ID NO: 3187063 - RNA, 20 nt, Human
agcccagaguccccccacuc

SEQ ID NO: 3187064 - RNA, 17 nt, Human
agcccagagucccccca

SEQ ID NO: 3187065 - RNA, 16 nt, Human
agccagggaaagacug

SEQ ID NO: 3187066 - RNA, 21 nt, Human
agccagggaaagacuggcaag

SEQ ID NO: 3187067 - RNA, 21 nt, Human
agccagggcccgggaagcaaa

SEQ ID NO: 3187068 - RNA, 19 nt, Human
agccagggcccgggaagca

SEQ ID NO: 3187069 - RNA, 18 nt, Human
agccagguuccacagagg

SEQ ID NO: 3187070 - RNA, 17 nt, Human
ugauuucagcucacugc

SEQ ID NO: 3187071 - RNA, 14 nt, Human
ugauuucaguaagu

SEQ ID NO: 3187072 - RNA, 16 nt, Human
ugauuucaguaagucu

SEQ ID NO: 3187073 - RNA, 19 nt, Human
ugauuucaguaagucucau

SEQ ID NO: 3187074 - RNA, 23 nt, Human
ugauuucuaguuauuuauucugg

SEQ ID NO: 3187075 - RNA, 23 nt, Human
ugauuucuuuucaccauucguac

SEQ ID NO: 3187076 - RNA, 12 nt, Human
ugauuuggaaaa

SEQ ID NO: 3187077 - RNA, 20 nt, Human
ugauuugggcugaauguaug

SEQ ID NO: 3187078 - RNA, 21 nt, Human
ugauuugggcugaauguaugu

SEQ ID NO: 3187079 - RNA, 18 nt, Human
ugauuuggggauucagau

SEQ ID NO: 3187080 - RNA, 22 nt, Human
ugauuuggggauucagauuucu

SEQ ID NO: 3187081 - RNA, 21 nt, Human
ugauuuggggauucagauuuc

SEQ ID NO: 3187082 - RNA, 23 nt, Human
ugauuuguacagauucuuuauua

SEQ ID NO: 3187083 - RNA, 14 nt, Human
agcccaggaaaggc

SEQ ID NO: 3187084 - RNA, 23 nt, Human
agcccagcuugaaaccuucacuu

SEQ ID NO: 3187085 - RNA, 15 nt, Human
ugauucauaaugacu

SEQ ID NO: 3187086 - RNA, 16 nt, Human
ugauucauaaugacuu

SEQ ID NO: 3187087 - RNA, 21 nt, Human
ugauucauaaugacuuaagca

SEQ ID NO: 3187088 - RNA, 21 nt, Human
agcccagcuuuuccugggaca

SEQ ID NO: 3187089 - RNA, 23 nt, Human
ugauucccaagcucugcuccucu

SEQ ID NO: 3187090 - RNA, 22 nt, Human
ugauucccaagcucugcuccuc

SEQ ID NO: 3187091 - RNA, 18 nt, Human
ugauucccuuguuauuca

SEQ ID NO: 3187092 - RNA, 19 nt, Human
ugauucccuuguuauucaa

SEQ ID NO: 3187093 - RNA, 20 nt, Human
ugauucccuuguuauucaac

SEQ ID NO: 3187094 - RNA, 13 nt, Human
ugauucucaugcc

SEQ ID NO: 3187095 - RNA, 14 nt, Human
ugauucucaugccu

SEQ ID NO: 3187096 - RNA, 15 nt, Human
ugauucucaugccuc

SEQ ID NO: 3187097 - RNA, 16 nt, Human
ugauucucaugccuca

SEQ ID NO: 3187098 - RNA, 15 nt, Human
ugauuuaauuugaaa

SEQ ID NO: 3187099 - RNA, 19 nt, Human
ugaugggaugauugaagaa

SEQ ID NO: 3187100 - RNA, 21 nt, Human
ugaugggaugauugaagaaac

SEQ ID NO: 3187101 - RNA, 20 nt, Human
ugaugggaugauugaagaaa

SEQ ID NO: 3187102 - RNA, 19 nt, Human
ugaugggaaagcauuguaa

SEQ ID NO: 3187103 - RNA, 14 nt, Human
ugauggggcccugc

SEQ ID NO: 3187104 - RNA, 15 nt, Human
ugauggggcccugcc

SEQ ID NO: 3187105 - RNA, 16 nt, Human
ugauggggcccugccu

SEQ ID NO: 3187106 - RNA, 19 nt, Human
ugauggggcccugccuccu

SEQ ID NO: 3187107 - RNA, 14 nt, Human
ugaugggaaagcau

SEQ ID NO: 3187108 - RNA, 23 nt, Human
ugaugcuucuucagagacuccug

SEQ ID NO: 3187109 - RNA, 20 nt, Human
ugauggaauuuuuuuguacg

SEQ ID NO: 3187110 - RNA, 13 nt, Human
ugaugagaggaaa

SEQ ID NO: 3187111 - RNA, 14 nt, Human
ugaugagaggaaau

SEQ ID NO: 3187112 - RNA, 15 nt, Human
ugaugagaggaaauc

SEQ ID NO: 3187113 - RNA, 16 nt, Human
ugaugagaggaaauca

SEQ ID NO: 3187114 - RNA, 18 nt, Human
ugaugaaauguaaauacu

SEQ ID NO: 3187115 - RNA, 16 nt, Human
ugaugaccaauuuuaa

SEQ ID NO: 3187116 - RNA, 18 nt, Human
ugaugaccaauuuuaacu

SEQ ID NO: 3187117 - RNA, 19 nt, Human
ugaugacguacaaguaguu

SEQ ID NO: 3187118 - RNA, 18 nt, Human
ugaugacccccccagcuu

SEQ ID NO: 3187119 - RNA, 21 nt, Human
ugaugacguacaaguaguucu

SEQ ID NO: 3187120 - RNA, 22 nt, Human
ugaugacguacaaguaguucug

SEQ ID NO: 3187121 - RNA, 22 nt, Human
ugaugacuaugcuuugcuauca

SEQ ID NO: 3187122 - RNA, 16 nt, Human
ugauccuaguuccacc

SEQ ID NO: 3187123 - RNA, 15 nt, Human
ugauccucccaccuc

SEQ ID NO: 3187124 - RNA, 22 nt, Human
ugauccuaaugaaugcauaaaa

SEQ ID NO: 3187125 - RNA, 21 nt, Human
ugauccucccaccucagccuc

SEQ ID NO: 3187126 - RNA, 22 nt, Human
ugauccucccaccucagccucc

SEQ ID NO: 3187127 - RNA, 17 nt, Human
ugauuaauggaaauguu

SEQ ID NO: 3187128 - RNA, 16 nt, Human
agccacugcaccgggc

SEQ ID NO: 3187129 - RNA, 23 nt, Human
agccacuccccagccagccuggc

SEQ ID NO: 3187130 - RNA, 22 nt, Human
agccacuccccagccagccugg

SEQ ID NO: 3187131 - RNA, 17 nt, Human
agccacuccccagccag

SEQ ID NO: 3187132 - RNA, 11 nt, Human
agccacucccc

SEQ ID NO: 3187133 - RNA, 14 nt, Human
agccacuccccagc

SEQ ID NO: 3187134 - RNA, 13 nt, Human
agccacuccccag

SEQ ID NO: 3187135 - RNA, 19 nt, Human
ugauuaaccacuucagcug

SEQ ID NO: 3187136 - RNA, 17 nt, Human
ugauggugaugaaaugu

SEQ ID NO: 3187137 - RNA, 13 nt, Human
ugauggugcaaug

SEQ ID NO: 3187138 - RNA, 16 nt, Human
ugauggugaugaaaug

SEQ ID NO: 3187139 - RNA, 15 nt, Human
ugauggugaugaaau

SEQ ID NO: 3187140 - RNA, 14 nt, Human
agccagcaucggaa

SEQ ID NO: 3187141 - RNA, 22 nt, Human
agccagccaaacacacagaagg

SEQ ID NO: 3187142 - RNA, 23 nt, Human
agccagccaaacacacagaaggg

SEQ ID NO: 3187143 - RNA, 19 nt, Human
agccagccaagcuuuaaau

SEQ ID NO: 3187144 - RNA, 20 nt, Human
agccagccaagcuuuaaauu

SEQ ID NO: 3187145 - RNA, 24 nt, Human
agccagccaagcuuuaaauuaugu

SEQ ID NO: 3187146 - RNA, 17 nt, Human
agccagccuggcuggga

SEQ ID NO: 3187147 - RNA, 15 nt, Human
agccagccuggcugg

SEQ ID NO: 3187148 - RNA, 22 nt, Human
agccagccuggcugggacuggg

SEQ ID NO: 3187149 - RNA, 19 nt, Human
agccagacuggcacaguuu

SEQ ID NO: 3187150 - RNA, 19 nt, Human
agccacugcaccgggccac

SEQ ID NO: 3187151 - RNA, 18 nt, Human
agccacugcaccgggcca

SEQ ID NO: 3187152 - RNA, 10 nt, Human
agccagagga

SEQ ID NO: 3187153 - RNA, 11 nt, Human
agccagaggag

SEQ ID NO: 3187154 - RNA, 16 nt, Human
agcccuuagcagggaa

SEQ ID NO: 3187155 - RNA, 17 nt, Human
ugcagacucuacagagg

SEQ ID NO: 3187156 - RNA, 16 nt, Human
ugcagacucuacagag

SEQ ID NO: 3187157 - RNA, 20 nt, Human
agccgagauagccaaggcca

SEQ ID NO: 3187158 - RNA, 21 nt, Human
agccgagauagccaaggccaa

SEQ ID NO: 3187159 - RNA, 17 nt, Human
agccgagaucacgccac

SEQ ID NO: 3187160 - RNA, 21 nt, Human
agcccuuagcagggaaacagc

SEQ ID NO: 3187161 - RNA, 22 nt, Human
agcccuugcccaugcugggcuc

SEQ ID NO: 3187162 - RNA, 14 nt, Human
ugcagaagacagua

SEQ ID NO: 3187163 - RNA, 15 nt, Human
ugcagaacucccaag

SEQ ID NO: 3187164 - RNA, 14 nt, Human
ugcagaacucccaa

SEQ ID NO: 3187165 - RNA, 15 nt, Human
ugcagaagacaguau

SEQ ID NO: 3187166 - RNA, 22 nt, Human
ugcagacaggcaagcaccuccu

SEQ ID NO: 3187167 - RNA, 22 nt, Human
ugcagacagggggccagaacac

SEQ ID NO: 3187168 - RNA, 14 nt, Human
ugcagacccucaga

SEQ ID NO: 3187169 - RNA, 21 nt, Human
ugcagaacuugaagccugcuc

SEQ ID NO: 3187170 - RNA, 23 nt, Human
ugcagaacuugaagccugcuccu

SEQ ID NO: 3187171 - RNA, 22 nt, Human
ugcagaacuugaagccugcucc

SEQ ID NO: 3187172 - RNA, 21 nt, Human
ugcagacagggggccagaaca

SEQ ID NO: 3187173 - RNA, 16 nt, Human
ugcacuccccugcugg

SEQ ID NO: 3187174 - RNA, 17 nt, Human
ugcacuccccugcuggg

SEQ ID NO: 3187175 - RNA, 19 nt, Human
ugcacuccccugcugggug

SEQ ID NO: 3187176 - RNA, 15 nt, Human
ugcacuccccugcug

SEQ ID NO: 3187177 - RNA, 20 nt, Human
agccucauguccacugguuc

SEQ ID NO: 3187178 - RNA, 21 nt, Human
agccuccaagcuccaucucca

SEQ ID NO: 3187179 - RNA, 14 nt, Human
agccuccaauuuuu

SEQ ID NO: 3187180 - RNA, 17 nt, Human
agccuccaugcugccuc

SEQ ID NO: 3187181 - RNA, 23 nt, Human
agccuccacuuuggaucaggaaa

SEQ ID NO: 3187182 - RNA, 23 nt, Human
agccucugaaaaccaauguucuc

SEQ ID NO: 3187183 - RNA, 21 nt, Human
ugcagccucaaccuccugggc

SEQ ID NO: 3187184 - RNA, 20 nt, Human
ugcagccucaaccuccuggg

SEQ ID NO: 3187185 - RNA, 22 nt, Human
ugcagccucaaccuccugggcu

SEQ ID NO: 3187186 - RNA, 15 nt, Human
ugcagcucagaacca

SEQ ID NO: 3187187 - RNA, 13 nt, Human
agccucugggccc

SEQ ID NO: 3187188 - RNA, 22 nt, Human
agccucagucucccucccuugg

SEQ ID NO: 3187189 - RNA, 13 nt, Human
agccucagucucc

SEQ ID NO: 3187190 - RNA, 16 nt, Human
agccucagucucccuc

SEQ ID NO: 3187191 - RNA, 19 nt, Human
agccucagucucccucccu

SEQ ID NO: 3187192 - RNA, 20 nt, Human
agccucagucucccucccuu

SEQ ID NO: 3187193 - RNA, 19 nt, Human
agccucaaccuccugggcu

SEQ ID NO: 3187194 - RNA, 20 nt, Human
agccucaaccuccugggcua

SEQ ID NO: 3187195 - RNA, 17 nt, Human
agccucacaguccuuac

SEQ ID NO: 3187196 - RNA, 18 nt, Human
agccucacaguccuuacc

SEQ ID NO: 3187197 - RNA, 20 nt, Human
agccucacccggugaccucu

SEQ ID NO: 3187198 - RNA, 23 nt, Human
agccucacgcuccuuucugaucu

SEQ ID NO: 3187199 - RNA, 21 nt, Human
agccucacgcuccuuucugau

SEQ ID NO: 3187200 - RNA, 15 nt, Human
agcccgcaucagcug

SEQ ID NO: 3187201 - RNA, 14 nt, Human
agcccgcaucagcu

SEQ ID NO: 3187202 - RNA, 21 nt, Human
agcccgauccuccccuggacu

SEQ ID NO: 3187203 - RNA, 21 nt, Human
agcccccagcuuccagcagga

SEQ ID NO: 3187204 - RNA, 22 nt, Human
agcccccagcuuccagcaggag

SEQ ID NO: 3187205 - RNA, 23 nt, Human
agcccauuugggcagagaggcug

SEQ ID NO: 3187206 - RNA, 22 nt, Human
agcccauuugggcagagaggcu

SEQ ID NO: 3187207 - RNA, 21 nt, Human
agcccauuuggagggccuggg

SEQ ID NO: 3187208 - RNA, 15 nt, Human
agcccccucuucccu

SEQ ID NO: 3187209 - RNA, 14 nt, Human
agcccccucuuccc

SEQ ID NO: 3187210 - RNA, 18 nt, Human
ugcacacaccagagccca

SEQ ID NO: 3187211 - RNA, 17 nt, Human
ugcacacaccagagccc

SEQ ID NO: 3187212 - RNA, 21 nt, Human
ugcacacaccagagcccaccu

SEQ ID NO: 3187213 - RNA, 16 nt, Human
agcccugguggcagug

SEQ ID NO: 3187214 - RNA, 15 nt, Human
agcccugguggcagu

SEQ ID NO: 3187215 - RNA, 14 nt, Human
agcccugguggcag

SEQ ID NO: 3187216 - RNA, 11 nt, Human
agcccugcucc

SEQ ID NO: 3187217 - RNA, 17 nt, Human
agcccugcuuugggcug

SEQ ID NO: 3187218 - RNA, 14 nt, Human
agcccugcucccuc

SEQ ID NO: 3187219 - RNA, 13 nt, Human
agcccugcucccu

SEQ ID NO: 3187220 - RNA, 12 nt, Human
agcccugcuccc

SEQ ID NO: 3187221 - RNA, 11 nt, Human
agcccuggccc

SEQ ID NO: 3187222 - RNA, 17 nt, Human
agcccuggcccaucaug

SEQ ID NO: 3187223 - RNA, 19 nt, Human
agcccugcuuugggcugcc

SEQ ID NO: 3187224 - RNA, 22 nt, Human
agccccauucugccugcccagg

SEQ ID NO: 3187225 - RNA, 21 nt, Human
agccccauucugccugcccag

SEQ ID NO: 3187226 - RNA, 18 nt, Human
agccccaaaacucuccuc

SEQ ID NO: 3187227 - RNA, 20 nt, Human
agccccauucugccugccca

SEQ ID NO: 3187228 - RNA, 16 nt, Human
agccccaaaacucucc

SEQ ID NO: 3187229 - RNA, 17 nt, Human
agccccaaaacucuccu

SEQ ID NO: 3187230 - RNA, 20 nt, Human
agcccauuuggagggccugg

SEQ ID NO: 3187231 - RNA, 19 nt, Human
agcccauuuggagggccug

SEQ ID NO: 3187232 - RNA, 17 nt, Human
agcccauuuggagggcc

SEQ ID NO: 3187233 - RNA, 21 nt, Human
agcccaggccuccuacagcuu

SEQ ID NO: 3187234 - RNA, 18 nt, Human
agcccaggauauauuuua

SEQ ID NO: 3187235 - RNA, 20 nt, Human
agcccaggagucccacucca

SEQ ID NO: 3187236 - RNA, 22 nt, Human
agcccaggagucccacuccaag

SEQ ID NO: 3187237 - RNA, 18 nt, Human
agcccauggcacucuaug

SEQ ID NO: 3187238 - RNA, 21 nt, Human
agcccauguggagucagccuc

SEQ ID NO: 3187239 - RNA, 19 nt, Human
agcccauguggcuaaaaaa

SEQ ID NO: 3187240 - RNA, 21 nt, Human
ugcaaaccaucauugaaaucu

SEQ ID NO: 3187241 - RNA, 13 nt, Human
ugauuuuaaaaug

SEQ ID NO: 3187242 - RNA, 15 nt, Human
ugauuugucacugcu

SEQ ID NO: 3187243 - RNA, 20 nt, Human
ugcaaaccaucauugaaauc

SEQ ID NO: 3187244 - RNA, 22 nt, Human
ugauuuuaaaauguacauguau

SEQ ID NO: 3187245 - RNA, 20 nt, Human
ugauuuuaaaauguacaugu

SEQ ID NO: 3187246 - RNA, 17 nt, Human
ugauuuuaaaauguaca

SEQ ID NO: 3187247 - RNA, 14 nt, Human
ugauuuuaaaaugu

SEQ ID NO: 3187248 - RNA, 19 nt, Human
ugcaaacugggcuggaaga

SEQ ID NO: 3187249 - RNA, 14 nt, Human
ugcaaguauucuca

SEQ ID NO: 3187250 - RNA, 15 nt, Human
ugcaaguauucucau

SEQ ID NO: 3187251 - RNA, 12 nt, Human
agcccaggagcc

SEQ ID NO: 3187252 - RNA, 15 nt, Human
agcccaggagcccau

SEQ ID NO: 3187253 - RNA, 14 nt, Human
agcccaggagccca

SEQ ID NO: 3187254 - RNA, 16 nt, Human
agcccaggagcccauu

SEQ ID NO: 3187255 - RNA, 12 nt, Human
agcccaggaggg

SEQ ID NO: 3187256 - RNA, 20 nt, Human
agcccaggagggagcagagg

SEQ ID NO: 3187257 - RNA, 19 nt, Human
agcccaggagggagcagag

SEQ ID NO: 3187258 - RNA, 17 nt, Human
uggacccugaaaugugu

SEQ ID NO: 3187259 - RNA, 15 nt, Human
uggaccauuuuccug

SEQ ID NO: 3187260 - RNA, 22 nt, Human
uggaccaugcugucuggcacag

SEQ ID NO: 3187261 - RNA, 14 nt, Human
uggaccauuuuccu

SEQ ID NO: 3187262 - RNA, 16 nt, Human
uggacacagcucuucu

SEQ ID NO: 3187263 - RNA, 15 nt, Human
uggacacagcucuuc

SEQ ID NO: 3187264 - RNA, 18 nt, Human
uggacacagcucuucucc

SEQ ID NO: 3187265 - RNA, 14 nt, Human
uggacccugaggcc

SEQ ID NO: 3187266 - RNA, 18 nt, Human
uggacccugaaaugugug

SEQ ID NO: 3187267 - RNA, 12 nt, Human
uggacccugagg

SEQ ID NO: 3187268 - RNA, 13 nt, Human
uggacccugaggc

SEQ ID NO: 3187269 - RNA, 22 nt, Human
uggaauuggguggggggcuuca

SEQ ID NO: 3187270 - RNA, 17 nt, Human
aggcaacucaucuuagg

SEQ ID NO: 3187271 - RNA, 14 nt, Human
aggaugcccaaaga

SEQ ID NO: 3187272 - RNA, 19 nt, Human
aggaugcccaaagaugcag

SEQ ID NO: 3187273 - RNA, 19 nt, Human
aggauuuugauccaagcug

SEQ ID NO: 3187274 - RNA, 17 nt, Human
aggaugccccguccccc

SEQ ID NO: 3187275 - RNA, 15 nt, Human
aggcaaaaacaaaga

SEQ ID NO: 3187276 - RNA, 15 nt, Human
aggcaaaaaaggaug

SEQ ID NO: 3187277 - RNA, 21 nt, Human
aggagggagcaucagugcccu

SEQ ID NO: 3187278 - RNA, 15 nt, Human
aggauccugagccag

SEQ ID NO: 3187279 - RNA, 16 nt, Human
aggauccugagccaga

SEQ ID NO: 3187280 - RNA, 21 nt, Human
aggaucucuugagccugggag

SEQ ID NO: 3187281 - RNA, 22 nt, Human
aggaucucuugagccugggagg

SEQ ID NO: 3187282 - RNA, 17 nt, Human
aggauccugagccagau

SEQ ID NO: 3187283 - RNA, 16 nt, Human
aggaugaucuaggaag

SEQ ID NO: 3187284 - RNA, 17 nt, Human
aggaugaucuaggaaga

SEQ ID NO: 3187285 - RNA, 23 nt, Human
uggaaaugggcagagcagagacc

SEQ ID NO: 3187286 - RNA, 20 nt, Human
uggaaauuaagaagaaacua

SEQ ID NO: 3187287 - RNA, 18 nt, Human
uggaaauuaagaagaaac

SEQ ID NO: 3187288 - RNA, 18 nt, Human
uggaaaugggcagagcag

SEQ ID NO: 3187289 - RNA, 13 nt, Human
uggaaauauuaaa

SEQ ID NO: 3187290 - RNA, 16 nt, Human
uggaaauauuaaaaga

SEQ ID NO: 3187291 - RNA, 20 nt, Human
uggaaauauuaagaaagacu

SEQ ID NO: 3187292 - RNA, 12 nt, Human
aggaggaggagg

SEQ ID NO: 3187293 - RNA, 14 nt, Human
aggaggaggagggu

SEQ ID NO: 3187294 - RNA, 15 nt, Human
aggagggaaaccuuu

SEQ ID NO: 3187295 - RNA, 21 nt, Human
aggaggcugggacgcucugcu

SEQ ID NO: 3187296 - RNA, 11 nt, Human
aggaggccacc

SEQ ID NO: 3187297 - RNA, 19 nt, Human
aggagggacagucucacca

SEQ ID NO: 3187298 - RNA, 22 nt, Human
aggaggcugggacgcucugcug

SEQ ID NO: 3187299 - RNA, 17 nt, Human
aggagccccgaggccuu

SEQ ID NO: 3187300 - RNA, 11 nt, Human
aggagcccugc

SEQ ID NO: 3187301 - RNA, 14 nt, Human
aggagcccugccuc

SEQ ID NO: 3187302 - RNA, 13 nt, Human
aggagcccugccu

SEQ ID NO: 3187303 - RNA, 22 nt, Human
aggagccccgaggccuucucug

SEQ ID NO: 3187304 - RNA, 14 nt, Human
aggagcagccacau

SEQ ID NO: 3187305 - RNA, 19 nt, Human
aggagcaguaucaugaagc

SEQ ID NO: 3187306 - RNA, 18 nt, Human
aggagcauauguccuaga

SEQ ID NO: 3187307 - RNA, 11 nt, Human
aggagaaacug

SEQ ID NO: 3187308 - RNA, 23 nt, Human
aggacuuuucuuuguggcuuccu

SEQ ID NO: 3187309 - RNA, 17 nt, Human
aggagauuggaaggaac

SEQ ID NO: 3187310 - RNA, 22 nt, Human
aggacuguuacucaaugugugc

SEQ ID NO: 3187311 - RNA, 18 nt, Human
aggacugacugaggcagu

SEQ ID NO: 3187312 - RNA, 22 nt, Human
aggacugacugaggcaguuuga

SEQ ID NO: 3187313 - RNA, 16 nt, Human
aggacugacugaggca

SEQ ID NO: 3187314 - RNA, 17 nt, Human
aggacugacugaggcag

SEQ ID NO: 3187315 - RNA, 15 nt, Human
aggacugacugaggc

SEQ ID NO: 3187316 - RNA, 18 nt, Human
aggacauugcggacagcc

SEQ ID NO: 3187317 - RNA, 17 nt, Human
aggacauugcggacagc

SEQ ID NO: 3187318 - RNA, 15 nt, Human
aggacauugcggaca

SEQ ID NO: 3187319 - RNA, 23 nt, Human
aggacauugcggacagccacggc

SEQ ID NO: 3187320 - RNA, 19 nt, Human
aggacauugcggacagcca

SEQ ID NO: 3187321 - RNA, 22 nt, Human
aggacauugauuugauuuuuau

SEQ ID NO: 3187322 - RNA, 19 nt, Human
aggacucugccuccucuuc

SEQ ID NO: 3187323 - RNA, 17 nt, Human
aggagccuccugcccuu

SEQ ID NO: 3187324 - RNA, 14 nt, Human
aggagccugcccag

SEQ ID NO: 3187325 - RNA, 17 nt, Human
aggagcccugccucucc

SEQ ID NO: 3187326 - RNA, 15 nt, Human
aggagcccugccucu

SEQ ID NO: 3187327 - RNA, 22 nt, Human
aggagcgcucccuugaccugcu

SEQ ID NO: 3187328 - RNA, 14 nt, Human
aggagcgcucccuu

SEQ ID NO: 3187329 - RNA, 16 nt, Human
ugcuuggaggaaggaa

SEQ ID NO: 3187330 - RNA, 14 nt, Human
ugcuuggcccaggg

SEQ ID NO: 3187331 - RNA, 13 nt, Human
ugcuuggcccagg

SEQ ID NO: 3187332 - RNA, 15 nt, Human
ugcuuggcccagggg

SEQ ID NO: 3187333 - RNA, 12 nt, Human
ugcuugggcuuc

SEQ ID NO: 3187334 - RNA, 16 nt, Human
ugcuugggcuucaucc

SEQ ID NO: 3187335 - RNA, 21 nt, Human
ugcuuggaggaaggaaaccca

SEQ ID NO: 3187336 - RNA, 17 nt, Human
ugcuugcggcaaaagga

SEQ ID NO: 3187337 - RNA, 18 nt, Human
ugcuugcggcaaaaggaa

SEQ ID NO: 3187338 - RNA, 19 nt, Human
ugcuugcggcaaaaggaaa

SEQ ID NO: 3187339 - RNA, 21 nt, Human
ugcuugcggcaaaaggaaagc

SEQ ID NO: 3187340 - RNA, 17 nt, Human
ugcuuuuaaaaaaaaau

SEQ ID NO: 3187341 - RNA, 13 nt, Human
ugcuuuuaaaacu

SEQ ID NO: 3187342 - RNA, 12 nt, Human
ugcuuugucucc

SEQ ID NO: 3187343 - RNA, 17 nt, Human
ugcuuuuaaaauuuuaa

SEQ ID NO: 3187344 - RNA, 13 nt, Human
ugcuuuuaaaauu

SEQ ID NO: 3187345 - RNA, 17 nt, Human
ugcuuuuaaaacuacuu

SEQ ID NO: 3187346 - RNA, 14 nt, Human
ugcuuuuaaaacua

SEQ ID NO: 3187347 - RNA, 21 nt, Human
ugcuuuggucacuuuuagaug

SEQ ID NO: 3187348 - RNA, 19 nt, Human
ugcuuuggucacuuuuaga

SEQ ID NO: 3187349 - RNA, 19 nt, Human
ugcuuuuaaaauuuuaagc

SEQ ID NO: 3187350 - RNA, 19 nt, Human
ugcuuuuaaggaaaggcaa

SEQ ID NO: 3187351 - RNA, 13 nt, Human
ugcuuuuagaaaa

SEQ ID NO: 3187352 - RNA, 19 nt, Human
ugcuuuuagugugugcaua

SEQ ID NO: 3187353 - RNA, 19 nt, Human
ugcuugggcuucauccucc

SEQ ID NO: 3187354 - RNA, 17 nt, Human
ugcuuugggcugcccug

SEQ ID NO: 3187355 - RNA, 21 nt, Human
ugcuuugggcugcccuggugc

SEQ ID NO: 3187356 - RNA, 20 nt, Human
ugcuuugggcugcccuggug

SEQ ID NO: 3187357 - RNA, 19 nt, Human
ugcuuugggcugcccuggu

SEQ ID NO: 3187358 - RNA, 18 nt, Human
ugcuuugggcugcccugg

SEQ ID NO: 3187359 - RNA, 15 nt, Human
uggaaauauuaagaa

SEQ ID NO: 3187360 - RNA, 15 nt, Human
uggaaauacuagauu

SEQ ID NO: 3187361 - RNA, 22 nt, Human
ugcuauuguagagccagagguc

SEQ ID NO: 3187362 - RNA, 16 nt, Human
ugcuauugugaauagu

SEQ ID NO: 3187363 - RNA, 18 nt, Human
ugcuauuguagagccaga

SEQ ID NO: 3187364 - RNA, 18 nt, Human
agcugggacuacaggcac

SEQ ID NO: 3187365 - RNA, 16 nt, Human
agcugggacuacaggc

SEQ ID NO: 3187366 - RNA, 16 nt, Human
ugcuccagcuguucag

SEQ ID NO: 3187367 - RNA, 19 nt, Human
ugcuccagcuguucagcug

SEQ ID NO: 3187368 - RNA, 19 nt, Human
ugcuccagcucuggcaugg

SEQ ID NO: 3187369 - RNA, 17 nt, Human
ugcuccagcucuggcau

SEQ ID NO: 3187370 - RNA, 13 nt, Human
ugcuccagcucug

SEQ ID NO: 3187371 - RNA, 12 nt, Human
ugcuccagcucu

SEQ ID NO: 3187372 - RNA, 21 nt, Human
ugcucccuccgggucuuccua

SEQ ID NO: 3187373 - RNA, 22 nt, Human
ugcucugcugacagacacaggc

SEQ ID NO: 3187374 - RNA, 21 nt, Human
ugcucugcugacagacacagg

SEQ ID NO: 3187375 - RNA, 13 nt, Human
ugcucccugacug

SEQ ID NO: 3187376 - RNA, 21 nt, Human
ugcucccugacugggggcaga

SEQ ID NO: 3187377 - RNA, 14 nt, Human
ugcucccugacugg

SEQ ID NO: 3187378 - RNA, 15 nt, Human
ugcugagucugaagg

SEQ ID NO: 3187379 - RNA, 14 nt, Human
ugcugagucugaag

SEQ ID NO: 3187380 - RNA, 16 nt, Human
ugcucugcugacagac

SEQ ID NO: 3187381 - RNA, 15 nt, Human
ugcucugcugaugac

SEQ ID NO: 3187382 - RNA, 16 nt, Human
ugcugacccaugggca

SEQ ID NO: 3187383 - RNA, 15 nt, Human
ugcugacccaugggc

SEQ ID NO: 3187384 - RNA, 23 nt, Human
ugcugacccaugggcaggagacu

SEQ ID NO: 3187385 - RNA, 21 nt, Human
ugcugacccaugggcaggaga

SEQ ID NO: 3187386 - RNA, 19 nt, Human
ugcugacccaugggcagga

SEQ ID NO: 3187387 - RNA, 18 nt, Human
ugcugacccaugggcagg

SEQ ID NO: 3187388 - RNA, 23 nt, Human
aggaauugacccacaagaaauga

SEQ ID NO: 3187389 - RNA, 18 nt, Human
aggaaggaaacccagcuc

SEQ ID NO: 3187390 - RNA, 17 nt, Human
aggaagccagcaggcuc

SEQ ID NO: 3187391 - RNA, 13 nt, Human
aggaagccagcag

SEQ ID NO: 3187392 - RNA, 19 nt, Human
aggaaggaaacccagcucu

SEQ ID NO: 3187393 - RNA, 15 nt, Human
aggaaggagaggaga

SEQ ID NO: 3187394 - RNA, 16 nt, Human
ugcugagucugaaggc

SEQ ID NO: 3187395 - RNA, 17 nt, Human
ugcugagucugaaggcu

SEQ ID NO: 3187396 - RNA, 18 nt, Human
ugcugagucugaaggcug

SEQ ID NO: 3187397 - RNA, 21 nt, Human
ugcugagucugaaggcugggu

SEQ ID NO: 3187398 - RNA, 22 nt, Human
ugcugagucugaaggcuggguu

SEQ ID NO: 3187399 - RNA, 13 nt, Human
aggaagacuucau

SEQ ID NO: 3187400 - RNA, 19 nt, Human
aggaagacuucaucccucu

SEQ ID NO: 3187401 - RNA, 13 nt, Human
aggaagacuuugg

SEQ ID NO: 3187402 - RNA, 14 nt, Human
aggaagacuuugga

SEQ ID NO: 3187403 - RNA, 23 nt, Human
aggaagcacaugccucucucagg

SEQ ID NO: 3187404 - RNA, 24 nt, Human
aggaagcacaugccucucucaggc

SEQ ID NO: 3187405 - RNA, 14 nt, Human
aggaagccagcagg

SEQ ID NO: 3187406 - RNA, 15 nt, Human
aggaagccagcaggc

SEQ ID NO: 3187407 - RNA, 22 nt, Human
aggaagcacaugccucucucag

SEQ ID NO: 3187408 - RNA, 16 nt, Human
ugcuucauacagggau

SEQ ID NO: 3187409 - RNA, 15 nt, Human
ugcuucauacaggga

SEQ ID NO: 3187410 - RNA, 14 nt, Human
ugcuucauacaggg

SEQ ID NO: 3187411 - RNA, 11 nt, Human
ugcuucauaca

SEQ ID NO: 3187412 - RNA, 12 nt, Human
aggacacucccg

SEQ ID NO: 3187413 - RNA, 19 nt, Human
aggacacuaaccacgcugg

SEQ ID NO: 3187414 - RNA, 23 nt, Human
aggacacuaaccacgcuggaccu

SEQ ID NO: 3187415 - RNA, 22 nt, Human
aggacaggaaaguggcaccugu

SEQ ID NO: 3187416 - RNA, 20 nt, Human
aggacaggaaaguggcaccu

SEQ ID NO: 3187417 - RNA, 22 nt, Human
aggacagggaggugaccccagg

SEQ ID NO: 3187418 - RNA, 16 nt, Human
aggacaggagaugcug

SEQ ID NO: 3187419 - RNA, 14 nt, Human
aggacauggcuucu

SEQ ID NO: 3187420 - RNA, 21 nt, Human
aggacauggcuucugaaccug

SEQ ID NO: 3187421 - RNA, 15 nt, Human
aggacauggcuucug

SEQ ID NO: 3187422 - RNA, 16 nt, Human
ugcuucaaggauccug

SEQ ID NO: 3187423 - RNA, 12 nt, Human
ugcuuauguugu

SEQ ID NO: 3187424 - RNA, 19 nt, Human
ugcuuauguuguuuuguac

SEQ ID NO: 3187425 - RNA, 18 nt, Human
ugcuucaaggauccugag

SEQ ID NO: 3187426 - RNA, 19 nt, Human
ugcuucaaggauccugagc

SEQ ID NO: 3187427 - RNA, 14 nt, Human
ugcuucagccuccc

SEQ ID NO: 3187428 - RNA, 13 nt, Human
ugcuucagccucc

SEQ ID NO: 3187429 - RNA, 12 nt, Human
ugcuucaaggau

SEQ ID NO: 3187430 - RNA, 13 nt, Human
ugcuuauugauau

SEQ ID NO: 3187431 - RNA, 13 nt, Human
ugcuuauacacuu

SEQ ID NO: 3187432 - RNA, 17 nt, Human
ugcuuauauuguuuuca

SEQ ID NO: 3187433 - RNA, 19 nt, Human
ugcuuauaaccuaguuaaa

SEQ ID NO: 3187434 - RNA, 23 nt, Human
ugcuuauaaccuaguuaaagaaa

SEQ ID NO: 3187435 - RNA, 13 nt, Human
ugcugucuuucuu

SEQ ID NO: 3187436 - RNA, 13 nt, Human
ugcugugaaaaaa

SEQ ID NO: 3187437 - RNA, 12 nt, Human
ugcugugaaaaa

SEQ ID NO: 3187438 - RNA, 23 nt, Human
ugcugucuuuucuuugccaucuc

SEQ ID NO: 3187439 - RNA, 22 nt, Human
ugcugucuuuucuuugccaucu

SEQ ID NO: 3187440 - RNA, 14 nt, Human
ugcugucuuuucuu

SEQ ID NO: 3187441 - RNA, 21 nt, Human
ugcugucuuucuugcucccug

SEQ ID NO: 3187442 - RNA, 18 nt, Human
ugcugugaagcuggaacu

SEQ ID NO: 3187443 - RNA, 17 nt, Human
ugcugugaagcuggaac

SEQ ID NO: 3187444 - RNA, 22 nt, Human
ugcugugaaaaaaaaaaugcug

SEQ ID NO: 3187445 - RNA, 14 nt, Human
ugcugugaaaaaaa

SEQ ID NO: 3187446 - RNA, 12 nt, Human
ugcugcccugug

SEQ ID NO: 3187447 - RNA, 13 nt, Human
ugcugcccuguga

SEQ ID NO: 3187448 - RNA, 14 nt, Human
ugcugcccugugag

SEQ ID NO: 3187449 - RNA, 13 nt, Human
ugcuggagcucug

SEQ ID NO: 3187450 - RNA, 14 nt, Human
ugcuggagcucugc

SEQ ID NO: 3187451 - RNA, 15 nt, Human
ugcugcccugugagu

SEQ ID NO: 3187452 - RNA, 16 nt, Human
ugcuggcugguuagag

SEQ ID NO: 3187453 - RNA, 21 nt, Human
ugcuggcugccuuagaaccuu

SEQ ID NO: 3187454 - RNA, 14 nt, Human
ugcuggcugccuua

SEQ ID NO: 3187455 - RNA, 15 nt, Human
ugcuggcugccuuag

SEQ ID NO: 3187456 - RNA, 19 nt, Human
ugcugucuggcacagccug

SEQ ID NO: 3187457 - RNA, 15 nt, Human
ugcugucuggcacag

SEQ ID NO: 3187458 - RNA, 16 nt, Human
ugcuguagacaucugu

SEQ ID NO: 3187459 - RNA, 24 nt, Human
ugcugucauugcuucuucugaggc

SEQ ID NO: 3187460 - RNA, 21 nt, Human
ugcugucauugcuucuucuga

SEQ ID NO: 3187461 - RNA, 20 nt, Human
ugcugucauugcuucuucug

SEQ ID NO: 3187462 - RNA, 14 nt, Human
ugcugucauugcuu

SEQ ID NO: 3187463 - RNA, 13 nt, Human
ugcugucauugcu

SEQ ID NO: 3187464 - RNA, 18 nt, Human
ugcugucagucuugaccu

SEQ ID NO: 3187465 - RNA, 16 nt, Human
uggccaguggcuggau

SEQ ID NO: 3187466 - RNA, 20 nt, Human
uggccccugcccggcugcgg

SEQ ID NO: 3187467 - RNA, 14 nt, Human
uggccaguggcugg

SEQ ID NO: 3187468 - RNA, 15 nt, Human
uggccaguggcugga

SEQ ID NO: 3187469 - RNA, 21 nt, Human
uggccccugcccggcugcgga

SEQ ID NO: 3187470 - RNA, 17 nt, Human
uggcccgacagccuggc

SEQ ID NO: 3187471 - RNA, 16 nt, Human
uggcccgacagccugg

SEQ ID NO: 3187472 - RNA, 15 nt, Human
uggcccgacagccug

SEQ ID NO: 3187473 - RNA, 14 nt, Human
uggcccgacagccu

SEQ ID NO: 3187474 - RNA, 19 nt, Human
uggcccgacagccuggcac

SEQ ID NO: 3187475 - RNA, 18 nt, Human
uggcccgacagccuggca

SEQ ID NO: 3187476 - RNA, 15 nt, Human
uggccgggagccuga

SEQ ID NO: 3187477 - RNA, 16 nt, Human
uggccggacacccgac

SEQ ID NO: 3187478 - RNA, 14 nt, Human
uggccucugcacuc

SEQ ID NO: 3187479 - RNA, 15 nt, Human
uggccucugcacucc

SEQ ID NO: 3187480 - RNA, 17 nt, Human
uggccucugcacucccc

SEQ ID NO: 3187481 - RNA, 13 nt, Human
uggccucugcacu

SEQ ID NO: 3187482 - RNA, 21 nt, Human
aggccuggccagaugcaccag

SEQ ID NO: 3187483 - RNA, 17 nt, Human
aggccuggccagaugca

SEQ ID NO: 3187484 - RNA, 16 nt, Human
aggccuggccagaugc

SEQ ID NO: 3187485 - RNA, 15 nt, Human
aggccuggccagaug

SEQ ID NO: 3187486 - RNA, 23 nt, Human
aggccugggggcugggcagagga

SEQ ID NO: 3187487 - RNA, 23 nt, Human
aggccuggccagaugcaccagcc

SEQ ID NO: 3187488 - RNA, 22 nt, Human
aggccuggccagaugcaccagc

SEQ ID NO: 3187489 - RNA, 15 nt, Human
aggcccaaagccucg

SEQ ID NO: 3187490 - RNA, 13 nt, Human
aggcccaaagccu

SEQ ID NO: 3187491 - RNA, 14 nt, Human
aggccauuuuuggu

SEQ ID NO: 3187492 - RNA, 12 nt, Human
aggcccaaagcc

SEQ ID NO: 3187493 - RNA, 13 nt, Human
aggcccucugccc

SEQ ID NO: 3187494 - RNA, 14 nt, Human
aggcccucugccca

SEQ ID NO: 3187495 - RNA, 21 nt, Human
aggccucucauuccagaggaa

SEQ ID NO: 3187496 - RNA, 23 nt, Human
aggccuccuguggccugccaguc

SEQ ID NO: 3187497 - RNA, 22 nt, Human
aggccuccuguggccugccagu

SEQ ID NO: 3187498 - RNA, 17 nt, Human
aggccucccugccagua

SEQ ID NO: 3187499 - RNA, 21 nt, Human
aggccuccuguggccugccag

SEQ ID NO: 3187500 - RNA, 18 nt, Human
aggccucugccucacaac

SEQ ID NO: 3187501 - RNA, 14 nt, Human
aggccucccugcca

SEQ ID NO: 3187502 - RNA, 16 nt, Human
aggccucccugccagu

SEQ ID NO: 3187503 - RNA, 15 nt, Human
aggccucccugccag

SEQ ID NO: 3187504 - RNA, 12 nt, Human
uggcaugggaau

SEQ ID NO: 3187505 - RNA, 15 nt, Human
uggcaugggaaugaa

SEQ ID NO: 3187506 - RNA, 13 nt, Human
uggcaugcauccc

SEQ ID NO: 3187507 - RNA, 20 nt, Human
aggccugcuuugucuccucu

SEQ ID NO: 3187508 - RNA, 16 nt, Human
uggcaugcuuaaauuu

SEQ ID NO: 3187509 - RNA, 17 nt, Human
uggcaugcuuaaauuuu

SEQ ID NO: 3187510 - RNA, 18 nt, Human
uggcaugcuuaaauuuua

SEQ ID NO: 3187511 - RNA, 19 nt, Human
aggccugcuuugucuccuc

SEQ ID NO: 3187512 - RNA, 13 nt, Human
aggccugccuguu

SEQ ID NO: 3187513 - RNA, 17 nt, Human
uggccaggcuggucuca

SEQ ID NO: 3187514 - RNA, 15 nt, Human
uggccaggcuggucu

SEQ ID NO: 3187515 - RNA, 20 nt, Human
uggccaggcuggucucgaac

SEQ ID NO: 3187516 - RNA, 22 nt, Human
uggaccuuuccugaggaagagg

SEQ ID NO: 3187517 - RNA, 20 nt, Human
uggaccuugaacuggguacu

SEQ ID NO: 3187518 - RNA, 16 nt, Human
aggccaaacucaccug

SEQ ID NO: 3187519 - RNA, 17 nt, Human
aggccaaacaggcccuc

SEQ ID NO: 3187520 - RNA, 21 nt, Human
aggcauuuucccccuuggcuc

SEQ ID NO: 3187521 - RNA, 19 nt, Human
aggcauuuguaaauauuaa

SEQ ID NO: 3187522 - RNA, 20 nt, Human
aggcauuuguaaauauuaaa

SEQ ID NO: 3187523 - RNA, 14 nt, Human
aggccaaaggaagc

SEQ ID NO: 3187524 - RNA, 19 nt, Human
aggccaaagacaaauagua

SEQ ID NO: 3187525 - RNA, 18 nt, Human
aggccaaagacaaauagu

SEQ ID NO: 3187526 - RNA, 17 nt, Human
aggccaaagacaaauag

SEQ ID NO: 3187527 - RNA, 15 nt, Human
aggccaaagacaaau

SEQ ID NO: 3187528 - RNA, 20 nt, Human
aggccaaacucaccugcccc

SEQ ID NO: 3187529 - RNA, 13 nt, Human
aggccaaagacaa

SEQ ID NO: 3187530 - RNA, 23 nt, Human
aggccaaaggaagcacaugccuc

SEQ ID NO: 3187531 - RNA, 20 nt, Human
aggccaaaggaagcacaugc

SEQ ID NO: 3187532 - RNA, 18 nt, Human
aggccaaggugggaggau

SEQ ID NO: 3187533 - RNA, 19 nt, Human
uggaugccugguggcagcu

SEQ ID NO: 3187534 - RNA, 18 nt, Human
uggaugccugguggcagc

SEQ ID NO: 3187535 - RNA, 17 nt, Human
uggaguucauucauauu

SEQ ID NO: 3187536 - RNA, 20 nt, Human
uggaguucauucauauuaca

SEQ ID NO: 3187537 - RNA, 18 nt, Human
uggaguucauucauauua

SEQ ID NO: 3187538 - RNA, 16 nt, Human
uggaguucaucuugaa

SEQ ID NO: 3187539 - RNA, 17 nt, Human
uggaguucaucuugaau

SEQ ID NO: 3187540 - RNA, 20 nt, Human
uggaguucaucuugaauugu

SEQ ID NO: 3187541 - RNA, 15 nt, Human
uggaugccugguggc

SEQ ID NO: 3187542 - RNA, 15 nt, Human
aggccacaagacccu

SEQ ID NO: 3187543 - RNA, 20 nt, Human
aggccaaucagaagcuaaca

SEQ ID NO: 3187544 - RNA, 16 nt, Human
aggccaaucagaagcu

SEQ ID NO: 3187545 - RNA, 14 nt, Human
uggaguauauguca

SEQ ID NO: 3187546 - RNA, 19 nt, Human
aggccaaguacacugagag

SEQ ID NO: 3187547 - RNA, 19 nt, Human
uggagucagacagaugugg

SEQ ID NO: 3187548 - RNA, 14 nt, Human
uggagucagccucg

SEQ ID NO: 3187549 - RNA, 16 nt, Human
uggagucauuucugau

SEQ ID NO: 3187550 - RNA, 22 nt, Human
uggaguccaggacaggagaugc

SEQ ID NO: 3187551 - RNA, 17 nt, Human
uggagucauuucugauu

SEQ ID NO: 3187552 - RNA, 12 nt, Human
aggccacugaag

SEQ ID NO: 3187553 - RNA, 13 nt, Human
aggccacugaaga

SEQ ID NO: 3187554 - RNA, 14 nt, Human
aggccacugaagag

SEQ ID NO: 3187555 - RNA, 16 nt, Human
aggccacugaagagga

SEQ ID NO: 3187556 - RNA, 17 nt, Human
aggccacugaagaggag

SEQ ID NO: 3187557 - RNA, 18 nt, Human
aggccacugaagaggagg

SEQ ID NO: 3187558 - RNA, 20 nt, Human
aggccacugaagaggaggag

SEQ ID NO: 3187559 - RNA, 24 nt, Human
aggccacauuacuagaguuggcau

SEQ ID NO: 3187560 - RNA, 15 nt, Human
aggccacccugugca

SEQ ID NO: 3187561 - RNA, 22 nt, Human
aggccacccugugcagaaggga

SEQ ID NO: 3187562 - RNA, 20 nt, Human
aggccacccugugcagaagg

SEQ ID NO: 3187563 - RNA, 20 nt, Human
aggccacauccacagucucc

SEQ ID NO: 3187564 - RNA, 20 nt, Human
aggccacaagacccuugugg

SEQ ID NO: 3187565 - RNA, 15 nt, Human
uggcagccucuucaa

SEQ ID NO: 3187566 - RNA, 16 nt, Human
uggcagccucuucaaa

SEQ ID NO: 3187567 - RNA, 23 nt, Human
uggcagccgugccuucagcucua

SEQ ID NO: 3187568 - RNA, 22 nt, Human
uggcagccgugccuucagcucu

SEQ ID NO: 3187569 - RNA, 12 nt, Human
uggcagccccug

SEQ ID NO: 3187570 - RNA, 20 nt, Human
uggcagcccgcaucagcugc

SEQ ID NO: 3187571 - RNA, 17 nt, Human
uggcagcccgcaucagc

SEQ ID NO: 3187572 - RNA, 20 nt, Human
uggcacaguuuucugagaaa

SEQ ID NO: 3187573 - RNA, 12 nt, Human
uggauguucuga

SEQ ID NO: 3187574 - RNA, 22 nt, Human
uggcacaguuuucugagaaaga

SEQ ID NO: 3187575 - RNA, 18 nt, Human
uggcaccagcagccugga

SEQ ID NO: 3187576 - RNA, 21 nt, Human
uggcagaguugaagacagagc

SEQ ID NO: 3187577 - RNA, 15 nt, Human
uggcacccggccccu

SEQ ID NO: 3187578 - RNA, 22 nt, Human
uggcagaguugaagacagagcu

SEQ ID NO: 3187579 - RNA, 14 nt, Human
aggcugcuuuccaa

SEQ ID NO: 3187580 - RNA, 13 nt, Human
aggcugcuuucca

SEQ ID NO: 3187581 - RNA, 23 nt, Human
aggcugcucuugaacuccugacc

SEQ ID NO: 3187582 - RNA, 21 nt, Human
aggcugcuuuccaaagccaau

SEQ ID NO: 3187583 - RNA, 11 nt, Human
aggcuggaagg

SEQ ID NO: 3187584 - RNA, 13 nt, Human
aggcuggaaggag

SEQ ID NO: 3187585 - RNA, 15 nt, Human
aggcuggaaggagga

SEQ ID NO: 3187586 - RNA, 16 nt, Human
aggcuggaaggaggaa

SEQ ID NO: 3187587 - RNA, 17 nt, Human
aggcuggaaggaggaag

SEQ ID NO: 3187588 - RNA, 18 nt, Human
aggcuggaaggaggaaga

SEQ ID NO: 3187589 - RNA, 19 nt, Human
aggcugcuuuccaaagcca

SEQ ID NO: 3187590 - RNA, 18 nt, Human
aggcugcuuuccaaagcc

SEQ ID NO: 3187591 - RNA, 17 nt, Human
aggcugcuuuccaaagc

SEQ ID NO: 3187592 - RNA, 15 nt, Human
aggcugcuuuccaaa

SEQ ID NO: 3187593 - RNA, 16 nt, Human
aggcucugcccuuggu

SEQ ID NO: 3187594 - RNA, 17 nt, Human
aggcuggcgugcagugg

SEQ ID NO: 3187595 - RNA, 13 nt, Human
aggcuggcgugca

SEQ ID NO: 3187596 - RNA, 19 nt, Human
aggcuggcccugcccuggu

SEQ ID NO: 3187597 - RNA, 15 nt, Human
aggcuggcccugccc

SEQ ID NO: 3187598 - RNA, 16 nt, Human
aggcuggcccugcccu

SEQ ID NO: 3187599 - RNA, 17 nt, Human
aggcuggcccugcccug

SEQ ID NO: 3187600 - RNA, 18 nt, Human
aggcuggcccugcccugg

SEQ ID NO: 3187601 - RNA, 12 nt, Human
aggcuggcccug

SEQ ID NO: 3187602 - RNA, 14 nt, Human
aggcuggcccugcc

SEQ ID NO: 3187603 - RNA, 17 nt, Human
aggcuggaguuggggca

SEQ ID NO: 3187604 - RNA, 21 nt, Human
aggcucgagcaugccuggaug

SEQ ID NO: 3187605 - RNA, 20 nt, Human
aggcuccuucaacaaggcuu

SEQ ID NO: 3187606 - RNA, 15 nt, Human
aggcucgagcaugcc

SEQ ID NO: 3187607 - RNA, 17 nt, Human
aggcucgagcaugccug

SEQ ID NO: 3187608 - RNA, 18 nt, Human
aggcucgagcaugccugg

SEQ ID NO: 3187609 - RNA, 19 nt, Human
aggcucgagcaugccugga

SEQ ID NO: 3187610 - RNA, 12 nt, Human
aggcucgagcau

SEQ ID NO: 3187611 - RNA, 19 nt, Human
aggcuccuuuagcgcccag

SEQ ID NO: 3187612 - RNA, 20 nt, Human
aggcuccugccaccacgccc

SEQ ID NO: 3187613 - RNA, 13 nt, Human
aggcuccugccac

SEQ ID NO: 3187614 - RNA, 13 nt, Human
aggcuccugcccc

SEQ ID NO: 3187615 - RNA, 23 nt, Human
aggcuccuuaggguuuucucucu

SEQ ID NO: 3187616 - RNA, 22 nt, Human
aggcuccuuaggguuuucucuc

SEQ ID NO: 3187617 - RNA, 14 nt, Human
aggcuccugccacc

SEQ ID NO: 3187618 - RNA, 11 nt, Human
aggcucucagg

SEQ ID NO: 3187619 - RNA, 12 nt, Human
aggcucucaggc

SEQ ID NO: 3187620 - RNA, 14 nt, Human
aggcucucaggcca

SEQ ID NO: 3187621 - RNA, 15 nt, Human
aggcucucaggccag

SEQ ID NO: 3187622 - RNA, 16 nt, Human
aggcucucaggccagc

SEQ ID NO: 3187623 - RNA, 18 nt, Human
aggcucucaggccagcug

SEQ ID NO: 3187624 - RNA, 19 nt, Human
aggcucucaggccagcugc

SEQ ID NO: 3187625 - RNA, 20 nt, Human
aggcucucaggccagcugcu

SEQ ID NO: 3187626 - RNA, 14 nt, Human
aggcucugcccuug

SEQ ID NO: 3187627 - RNA, 15 nt, Human
aggcucugcccuugg

SEQ ID NO: 3187628 - RNA, 13 nt, Human
aggcucugcccuu

SEQ ID NO: 3187629 - RNA, 12 nt, Human
aggcucugcccu

SEQ ID NO: 3187630 - RNA, 11 nt, Human
aggcucugccc

SEQ ID NO: 3187631 - RNA, 21 nt, Human
aggcucucaggccagcugcuu

SEQ ID NO: 3187632 - RNA, 15 nt, Human
aggcucucugggcug

SEQ ID NO: 3187633 - RNA, 22 nt, Human
uggcucuugaacugagcuugga

SEQ ID NO: 3187634 - RNA, 16 nt, Human
uggcucuugaacugag

SEQ ID NO: 3187635 - RNA, 12 nt, Human
uggcugcaaagg

SEQ ID NO: 3187636 - RNA, 20 nt, Human
uggcucuuccaggcugggag

SEQ ID NO: 3187637 - RNA, 21 nt, Human
uggcucuuccaggcugggaga

SEQ ID NO: 3187638 - RNA, 19 nt, Human
uggcucuuccaggcuggga

SEQ ID NO: 3187639 - RNA, 18 nt, Human
uggcucaaguccucuuuu

SEQ ID NO: 3187640 - RNA, 18 nt, Human
uggcugccaaugggagcu

SEQ ID NO: 3187641 - RNA, 20 nt, Human
uggcugccaaugggagcuca

SEQ ID NO: 3187642 - RNA, 14 nt, Human
uggcugcagggagu

SEQ ID NO: 3187643 - RNA, 13 nt, Human
uggcugcagggag

SEQ ID NO: 3187644 - RNA, 15 nt, Human
uggcugcagggaguc

SEQ ID NO: 3187645 - RNA, 19 nt, Human
uggcugaguagcucugccu

SEQ ID NO: 3187646 - RNA, 16 nt, Human
uggcuaugagggccuu

SEQ ID NO: 3187647 - RNA, 22 nt, Human
uggcuauuagagaucaaccccu

SEQ ID NO: 3187648 - RNA, 20 nt, Human
aggcuggcgugcaguggugc

SEQ ID NO: 3187649 - RNA, 18 nt, Human
aggcuggcgugcaguggu

SEQ ID NO: 3187650 - RNA, 14 nt, Human
aggcugggagagcc

SEQ ID NO: 3187651 - RNA, 18 nt, Human
aggcugggacgcucugcu

SEQ ID NO: 3187652 - RNA, 19 nt, Human
aggcugggacgcucugcug

SEQ ID NO: 3187653 - RNA, 22 nt, Human
uggcugccuugugaaggaauua

SEQ ID NO: 3187654 - RNA, 22 nt, Human
uggcugcggggcgggcacaccu

SEQ ID NO: 3187655 - RNA, 17 nt, Human
uggcuuaaaacaacacu

SEQ ID NO: 3187656 - RNA, 15 nt, Human
uggcuguuggcuggg

SEQ ID NO: 3187657 - RNA, 14 nt, Human
uggcugugucuccc

SEQ ID NO: 3187658 - RNA, 13 nt, Human
uggcuguuggcug

SEQ ID NO: 3187659 - RNA, 22 nt, Human
uggcuucacggaagagccuugc

SEQ ID NO: 3187660 - RNA, 19 nt, Human
uggcuuauuuaauaugcuu

SEQ ID NO: 3187661 - RNA, 19 nt, Human
uggcuuaaaaaaaacucuu

SEQ ID NO: 3187662 - RNA, 18 nt, Human
uggcuuaaaaaaaacucu

SEQ ID NO: 3187663 - RNA, 13 nt, Human
uggcuuacacugg

SEQ ID NO: 3187664 - RNA, 11 nt, Human
uggcuuaauuc

SEQ ID NO: 3187665 - RNA, 23 nt, Human
uggcuucacggaagagccuugcg

SEQ ID NO: 3187666 - RNA, 21 nt, Human
ugggaaagcauuguaaaugug

SEQ ID NO: 3187667 - RNA, 17 nt, Human
uggcuucccgcucagcc

SEQ ID NO: 3187668 - RNA, 23 nt, Human
uggcuucccaaaugugugcccag

SEQ ID NO: 3187669 - RNA, 16 nt, Human
uggcuucccgcucagc

SEQ ID NO: 3187670 - RNA, 15 nt, Human
uggcuucccgcucag

SEQ ID NO: 3187671 - RNA, 16 nt, Human
ugggaaaggggaaguu

SEQ ID NO: 3187672 - RNA, 13 nt, Human
ugggaacuagacu

SEQ ID NO: 3187673 - RNA, 20 nt, Human
ugggaagagcuuagaaacug

SEQ ID NO: 3187674 - RNA, 17 nt, Human
ugggaagagcuuagaaa

SEQ ID NO: 3187675 - RNA, 23 nt, Human
ugggaaguuaaagggaagaaaac

SEQ ID NO: 3187676 - RNA, 15 nt, Human
ugggaaguuaaaggg

SEQ ID NO: 3187677 - RNA, 19 nt, Human
uugucaccugcuucucugc

SEQ ID NO: 3187678 - RNA, 15 nt, Human
uugucaccugcuucu

SEQ ID NO: 3187679 - RNA, 14 nt, Human
uugucacugcuuca

SEQ ID NO: 3187680 - RNA, 17 nt, Human
uugucacugagaagaug

SEQ ID NO: 3187681 - RNA, 16 nt, Human
uuguccccgacccuug

SEQ ID NO: 3187682 - RNA, 20 nt, Human
uugucauuuucauuagcaaa

SEQ ID NO: 3187683 - RNA, 13 nt, Human
uugucauuuucau

SEQ ID NO: 3187684 - RNA, 19 nt, Human
uugucauuuucauuagcaa

SEQ ID NO: 3187685 - RNA, 14 nt, Human
uugucauuuucauu

SEQ ID NO: 3187686 - RNA, 15 nt, Human
uuguccuuugauucc

SEQ ID NO: 3187687 - RNA, 19 nt, Human
uuguccuccugcugccagu

SEQ ID NO: 3187688 - RNA, 17 nt, Human
uuguccuccugcugcca

SEQ ID NO: 3187689 - RNA, 16 nt, Human
uuguccuccugcugcc

SEQ ID NO: 3187690 - RNA, 20 nt, Human
uuguccuauuaguguuauau

SEQ ID NO: 3187691 - RNA, 17 nt, Human
uuguccuauuaguguua

SEQ ID NO: 3187692 - RNA, 19 nt, Human
uuguccuauuaguguuaua

SEQ ID NO: 3187693 - RNA, 15 nt, Human
uuguccuccugcugc

SEQ ID NO: 3187694 - RNA, 13 nt, Human
uuguccuccugcu

SEQ ID NO: 3187695 - RNA, 18 nt, Human
uugucccugaagagaagg

SEQ ID NO: 3187696 - RNA, 19 nt, Human
uugucccuggcuuccuuac

SEQ ID NO: 3187697 - RNA, 18 nt, Human
uugucccuggcuuccuua

SEQ ID NO: 3187698 - RNA, 16 nt, Human
uuguccuauuaguguu

SEQ ID NO: 3187699 - RNA, 21 nt, Human
uuguccgguuuacuuuaacuu

SEQ ID NO: 3187700 - RNA, 17 nt, Human
uuguccgguuuacuuua

SEQ ID NO: 3187701 - RNA, 15 nt, Human
uuguccgguuuacuu

SEQ ID NO: 3187702 - RNA, 18 nt, Human
uugucacacacuuuggcu

SEQ ID NO: 3187703 - RNA, 15 nt, Human
augauaaaacacaaa

SEQ ID NO: 3187704 - RNA, 13 nt, Human
augagugagaaua

SEQ ID NO: 3187705 - RNA, 18 nt, Human
augagccucagcauccug

SEQ ID NO: 3187706 - RNA, 17 nt, Human
augagccucagcauccu

SEQ ID NO: 3187707 - RNA, 22 nt, Human
augaggucagagccugcaguua

SEQ ID NO: 3187708 - RNA, 23 nt, Human
augaguccccuguuuguuucuga

SEQ ID NO: 3187709 - RNA, 12 nt, Human
augagaggaaau

SEQ ID NO: 3187710 - RNA, 13 nt, Human
augagaggaaauc

SEQ ID NO: 3187711 - RNA, 14 nt, Human
augagaggaaauca

SEQ ID NO: 3187712 - RNA, 15 nt, Human
augagaggaaaucac

SEQ ID NO: 3187713 - RNA, 16 nt, Human
augagaggaaaucacc

SEQ ID NO: 3187714 - RNA, 20 nt, Human
augagaggggagagcugaac

SEQ ID NO: 3187715 - RNA, 15 nt, Human
augagauacuuugca

SEQ ID NO: 3187716 - RNA, 16 nt, Human
augagauacuuugcau

SEQ ID NO: 3187717 - RNA, 22 nt, Human
augagauacuuugcauugucug

SEQ ID NO: 3187718 - RNA, 16 nt, Human
augagccucagcaucc

SEQ ID NO: 3187719 - RNA, 15 nt, Human
augagccucagcauc

SEQ ID NO: 3187720 - RNA, 12 nt, Human
augagccucagc

SEQ ID NO: 3187721 - RNA, 22 nt, Human
augagcaucaggccaggcccuc

SEQ ID NO: 3187722 - RNA, 17 nt, Human
augagcaauaucugcua

SEQ ID NO: 3187723 - RNA, 14 nt, Human
augagcacuucuaa

SEQ ID NO: 3187724 - RNA, 13 nt, Human
augagcacuucua

SEQ ID NO: 3187725 - RNA, 18 nt, Human
augagcaucaggccaggc

SEQ ID NO: 3187726 - RNA, 19 nt, Human
augagcaucaggccaggcc

SEQ ID NO: 3187727 - RNA, 20 nt, Human
augagcaucaggccaggccc

SEQ ID NO: 3187728 - RNA, 21 nt, Human
augagcaucaggccaggcccu

SEQ ID NO: 3187729 - RNA, 16 nt, Human
augagcaucaggccag

SEQ ID NO: 3187730 - RNA, 17 nt, Human
augagcaucaggccagg

SEQ ID NO: 3187731 - RNA, 15 nt, Human
augagcaucaggcca

SEQ ID NO: 3187732 - RNA, 10 nt, Human
uugugugugg

SEQ ID NO: 3187733 - RNA, 13 nt, Human
uugugugugggag

SEQ ID NO: 3187734 - RNA, 16 nt, Human
uuguguguccccuugc

SEQ ID NO: 3187735 - RNA, 16 nt, Human
uugugugugggagugu

SEQ ID NO: 3187736 - RNA, 16 nt, Human
uugugaauaaugauuu

SEQ ID NO: 3187737 - RNA, 23 nt, Human
uugugaagugaaggauuuguguu

SEQ ID NO: 3187738 - RNA, 18 nt, Human
uugugaaggauuauggaa

SEQ ID NO: 3187739 - RNA, 21 nt, Human
uugugaaggauuauggaaaaa

SEQ ID NO: 3187740 - RNA, 19 nt, Human
uugugaacaagucccugua

SEQ ID NO: 3187741 - RNA, 23 nt, Human
uugugaaauuuuucauauuuuaa

SEQ ID NO: 3187742 - RNA, 21 nt, Human
uugugaaauuuuucauauuuu

SEQ ID NO: 3187743 - RNA, 19 nt, Human
uugugaaauuuuucauauu

SEQ ID NO: 3187744 - RNA, 17 nt, Human
uugugaaauuuuucaua

SEQ ID NO: 3187745 - RNA, 15 nt, Human
uugugaaauuuuuca

SEQ ID NO: 3187746 - RNA, 14 nt, Human
uugugaaauuuuuc

SEQ ID NO: 3187747 - RNA, 20 nt, Human
uugucggcuccaguccccag

SEQ ID NO: 3187748 - RNA, 14 nt, Human
uugucggcuccagu

SEQ ID NO: 3187749 - RNA, 14 nt, Human
augaucuucuuuau

SEQ ID NO: 3187750 - RNA, 15 nt, Human
augauccuaaugaau

SEQ ID NO: 3187751 - RNA, 22 nt, Human
augaucgaaaaaauaauuauuu

SEQ ID NO: 3187752 - RNA, 16 nt, Human
augauccuaggcauuu

SEQ ID NO: 3187753 - RNA, 23 nt, Human
augaucacggcucacugcagccu

SEQ ID NO: 3187754 - RNA, 19 nt, Human
augaucacuuaucaguuug

SEQ ID NO: 3187755 - RNA, 15 nt, Human
augaucacggcucac

SEQ ID NO: 3187756 - RNA, 19 nt, Human
augaucacggcucacugca

SEQ ID NO: 3187757 - RNA, 18 nt, Human
augaucacggcucacugc

SEQ ID NO: 3187758 - RNA, 17 nt, Human
augauauugcugaagaa

SEQ ID NO: 3187759 - RNA, 23 nt, Human
augauauugcugaagaaucuacu

SEQ ID NO: 3187760 - RNA, 17 nt, Human
augauauuuuaaaaucu

SEQ ID NO: 3187761 - RNA, 15 nt, Human
uuguugauucucucc

SEQ ID NO: 3187762 - RNA, 17 nt, Human
uuguugauucucuccau

SEQ ID NO: 3187763 - RNA, 20 nt, Human
uuguugcacugaaguuugau

SEQ ID NO: 3187764 - RNA, 17 nt, Human
uuguugcacugaaguuu

SEQ ID NO: 3187765 - RNA, 15 nt, Human
uuguugcacugaagu

SEQ ID NO: 3187766 - RNA, 14 nt, Human
uuguugcacugaag

SEQ ID NO: 3187767 - RNA, 23 nt, Human
augaucugugccuuuuuuauauc

SEQ ID NO: 3187768 - RNA, 19 nt, Human
augaucugugccuuuuuua

SEQ ID NO: 3187769 - RNA, 15 nt, Human
augaucugugccuuu

SEQ ID NO: 3187770 - RNA, 16 nt, Human
augcaaguauucucau

SEQ ID NO: 3187771 - RNA, 15 nt, Human
augaucuucuuuaua

SEQ ID NO: 3187772 - RNA, 16 nt, Human
augcaaaccaucauug

SEQ ID NO: 3187773 - RNA, 18 nt, Human
augcaaaccaucauugaa

SEQ ID NO: 3187774 - RNA, 19 nt, Human
augcaaaccaucauugaaa

SEQ ID NO: 3187775 - RNA, 20 nt, Human
augcaaaccaucauugaaau

SEQ ID NO: 3187776 - RNA, 21 nt, Human
augcaaaccaucauugaaauc

SEQ ID NO: 3187777 - RNA, 22 nt, Human
augcaaaccaucauugaaaucu

SEQ ID NO: 3187778 - RNA, 19 nt, Human
uuguuuuuaaguuugcacu

SEQ ID NO: 3187779 - RNA, 18 nt, Human
uuguuuuuuuuuuccacu

SEQ ID NO: 3187780 - RNA, 15 nt, Human
uuguuuuuguauauu

SEQ ID NO: 3187781 - RNA, 12 nt, Human
uuguuuuuugaa

SEQ ID NO: 3187782 - RNA, 16 nt, Human
uuguuuuuugaagugu

SEQ ID NO: 3187783 - RNA, 14 nt, Human
uuguuuuuugaagu

SEQ ID NO: 3187784 - RNA, 13 nt, Human
uuguuuuuguaua

SEQ ID NO: 3187785 - RNA, 15 nt, Human
uuguuuuuguaaaga

SEQ ID NO: 3187786 - RNA, 18 nt, Human
uuguuuuucugcuuuaga

SEQ ID NO: 3187787 - RNA, 12 nt, Human
uuguuuuucugc

SEQ ID NO: 3187788 - RNA, 13 nt, Human
uuguuuuucugau

SEQ ID NO: 3187789 - RNA, 16 nt, Human
augcaaguuuuuuuuc

SEQ ID NO: 3187790 - RNA, 13 nt, Human
uuguuuuguacag

SEQ ID NO: 3187791 - RNA, 21 nt, Human
uuguuuuguugcacugaaguu

SEQ ID NO: 3187792 - RNA, 14 nt, Human
uuguuuuguugcac

SEQ ID NO: 3187793 - RNA, 13 nt, Human
uuguuuuuugagu

SEQ ID NO: 3187794 - RNA, 12 nt, Human
uuguuuuuugag

SEQ ID NO: 3187795 - RNA, 17 nt, Human
uuguuuuuugaaguguu

SEQ ID NO: 3187796 - RNA, 19 nt, Human
uuguuuuuuuuuuccacuu

SEQ ID NO: 3187797 - RNA, 17 nt, Human
uuuaaaaaauuaaucug

SEQ ID NO: 3187798 - RNA, 18 nt, Human
uuuaaacuucuuaacugg

SEQ ID NO: 3187799 - RNA, 17 nt, Human
uuuaaagaaaaaaaugu

SEQ ID NO: 3187800 - RNA, 18 nt, Human
uuuaaagaaaaaaauguc

SEQ ID NO: 3187801 - RNA, 12 nt, Human
uugcuuuaauuu

SEQ ID NO: 3187802 - RNA, 21 nt, Human
uugcuuuaauuccaugaaugu

SEQ ID NO: 3187803 - RNA, 18 nt, Human
uugcuuuuaaaauuuuaa

SEQ ID NO: 3187804 - RNA, 13 nt, Human
uugcuuuuagaaa

SEQ ID NO: 3187805 - RNA, 14 nt, Human
uugcuuuuagaaaa

SEQ ID NO: 3187806 - RNA, 15 nt, Human
uugcuuuuaaaauuu

SEQ ID NO: 3187807 - RNA, 17 nt, Human
uuggaaagaguaggaag

SEQ ID NO: 3187808 - RNA, 21 nt, Human
uuggaaacacuaaauguuaaa

SEQ ID NO: 3187809 - RNA, 20 nt, Human
uuggaaacacuaaauguuaa

SEQ ID NO: 3187810 - RNA, 19 nt, Human
uuggaaacacuaaauguua

SEQ ID NO: 3187811 - RNA, 18 nt, Human
uuggaaacacuaaauguu

SEQ ID NO: 3187812 - RNA, 15 nt, Human
uugcuuuuuuccaaa

SEQ ID NO: 3187813 - RNA, 12 nt, Human
uugcuuuugugc

SEQ ID NO: 3187814 - RNA, 15 nt, Human
uugcuuuugagagaa

SEQ ID NO: 3187815 - RNA, 14 nt, Human
uugcuuuugagaga

SEQ ID NO: 3187816 - RNA, 17 nt, Human
uugcugauggugcaaug

SEQ ID NO: 3187817 - RNA, 18 nt, Human
uugcugauggugcaauga

SEQ ID NO: 3187818 - RNA, 20 nt, Human
uugcugaccccacuuggacu

SEQ ID NO: 3187819 - RNA, 23 nt, Human
uugcugacaaccauuaaagucag

SEQ ID NO: 3187820 - RNA, 12 nt, Human
uugcugacuuag

SEQ ID NO: 3187821 - RNA, 14 nt, Human
uugcugacuuagaa

SEQ ID NO: 3187822 - RNA, 15 nt, Human
uugcugacuuagaau

SEQ ID NO: 3187823 - RNA, 16 nt, Human
uugcuugccaaaguac

SEQ ID NO: 3187824 - RNA, 22 nt, Human
uugcuccccuuccccuuccuuc

SEQ ID NO: 3187825 - RNA, 21 nt, Human
uugcuccccuuccccuuccuu

SEQ ID NO: 3187826 - RNA, 20 nt, Human
uugcuccccuuccccuuccu

SEQ ID NO: 3187827 - RNA, 17 nt, Human
uugcuccccuuccccuu

SEQ ID NO: 3187828 - RNA, 16 nt, Human
uugcuccccuuccccu

SEQ ID NO: 3187829 - RNA, 14 nt, Human
uugcuccccuuccc

SEQ ID NO: 3187830 - RNA, 19 nt, Human
uugcugaauacagaggcaa

SEQ ID NO: 3187831 - RNA, 18 nt, Human
uugcugaacauuggagaa

SEQ ID NO: 3187832 - RNA, 17 nt, Human
uugcugaacauuggaga

SEQ ID NO: 3187833 - RNA, 20 nt, Human
uugcuaugagcuggggaugu

SEQ ID NO: 3187834 - RNA, 13 nt, Human
uugcuaucauugu

SEQ ID NO: 3187835 - RNA, 14 nt, Human
uugcuaucucuauu

SEQ ID NO: 3187836 - RNA, 23 nt, Human
uugcuaccacggccuccuuuccg

SEQ ID NO: 3187837 - RNA, 20 nt, Human
uugcuaagugaggaugaaaa

SEQ ID NO: 3187838 - RNA, 17 nt, Human
uugcuaaguaaaucucu

SEQ ID NO: 3187839 - RNA, 21 nt, Human
uugcuaaguaaaucucuucug

SEQ ID NO: 3187840 - RNA, 19 nt, Human
uugcuaaguaaaucucuuc

SEQ ID NO: 3187841 - RNA, 22 nt, Human
uugcuaaguaaaucucuucugu

SEQ ID NO: 3187842 - RNA, 16 nt, Human
augaaaugaacacaaa

SEQ ID NO: 3187843 - RNA, 14 nt, Human
augaaaugaacaca

SEQ ID NO: 3187844 - RNA, 19 nt, Human
augaaagacuguacaaagu

SEQ ID NO: 3187845 - RNA, 19 nt, Human
augaaagauggcugugccu

SEQ ID NO: 3187846 - RNA, 23 nt, Human
augaaagauggcugugccucugc

SEQ ID NO: 3187847 - RNA, 20 nt, Human
augaaagauggcugugccuc

SEQ ID NO: 3187848 - RNA, 20 nt, Human
augaaagacuguacaaagua

SEQ ID NO: 3187849 - RNA, 13 nt, Human
aucuuuuauucuu

SEQ ID NO: 3187850 - RNA, 14 nt, Human
aucuuuuauucuuu

SEQ ID NO: 3187851 - RNA, 14 nt, Human
aucuuucugcacac

SEQ ID NO: 3187852 - RNA, 21 nt, Human
aucuuucugcacacaaauauu

SEQ ID NO: 3187853 - RNA, 17 nt, Human
aucuuuccauauccaua

SEQ ID NO: 3187854 - RNA, 13 nt, Human
aucuuuauugaaa

SEQ ID NO: 3187855 - RNA, 15 nt, Human
aucuuuauugaaauu

SEQ ID NO: 3187856 - RNA, 16 nt, Human
aucuuuauugaaauuc

SEQ ID NO: 3187857 - RNA, 11 nt, Human
uuggcugcuga

SEQ ID NO: 3187858 - RNA, 15 nt, Human
uuggcugcugaaggc

SEQ ID NO: 3187859 - RNA, 14 nt, Human
uuggcugcagggag

SEQ ID NO: 3187860 - RNA, 13 nt, Human
uuggcugcaggga

SEQ ID NO: 3187861 - RNA, 22 nt, Human
uuggcuaggaccccuccaugug

SEQ ID NO: 3187862 - RNA, 18 nt, Human
uuggcgaaucucaaaauu

SEQ ID NO: 3187863 - RNA, 18 nt, Human
uuggaaagaguaggaaga

SEQ ID NO: 3187864 - RNA, 14 nt, Human
uuggaaacuaauaa

SEQ ID NO: 3187865 - RNA, 15 nt, Human
uuggaaacuaauaaa

SEQ ID NO: 3187866 - RNA, 16 nt, Human
uuggaaacuaauaaaa

SEQ ID NO: 3187867 - RNA, 17 nt, Human
uuggaaacuaauaaaau

SEQ ID NO: 3187868 - RNA, 18 nt, Human
uuggaaacuaauaaaaua

SEQ ID NO: 3187869 - RNA, 19 nt, Human
uuggaaacuaauaaaauau

SEQ ID NO: 3187870 - RNA, 20 nt, Human
uuggaaacuaauaaaauauu

SEQ ID NO: 3187871 - RNA, 22 nt, Human
uuggaaacuaauaaaauauuuu

SEQ ID NO: 3187872 - RNA, 23 nt, Human
uuggaaacuaauaaaauauuuuc

SEQ ID NO: 3187873 - RNA, 14 nt, Human
uuguaauguaacug

SEQ ID NO: 3187874 - RNA, 13 nt, Human
uuguaauguaacu

SEQ ID NO: 3187875 - RNA, 20 nt, Human
uuguaaggaaugauuaauua

SEQ ID NO: 3187876 - RNA, 16 nt, Human
uuguaagcguauggcu

SEQ ID NO: 3187877 - RNA, 17 nt, Human
uuguaagcguauggcuu

SEQ ID NO: 3187878 - RNA, 18 nt, Human
uuguaagcguauggcuuu

SEQ ID NO: 3187879 - RNA, 22 nt, Human
uuguaagcguauggcuuuauuu

SEQ ID NO: 3187880 - RNA, 21 nt, Human
uuguaauuaauaauagauugu

SEQ ID NO: 3187881 - RNA, 15 nt, Human
uuguaguucuuuaaa

SEQ ID NO: 3187882 - RNA, 23 nt, Human
uuguaauguugugaauaauuaca

SEQ ID NO: 3187883 - RNA, 21 nt, Human
uuguaauguugugaauaauua

SEQ ID NO: 3187884 - RNA, 19 nt, Human
uuguaauguugugaauaau

SEQ ID NO: 3187885 - RNA, 12 nt, Human
uuguaauguugu

SEQ ID NO: 3187886 - RNA, 20 nt, Human
uuguaauguaacugcucuug

SEQ ID NO: 3187887 - RNA, 15 nt, Human
uuguaauguaacugc

SEQ ID NO: 3187888 - RNA, 21 nt, Human
uuguauaguuauguaaauaau

SEQ ID NO: 3187889 - RNA, 22 nt, Human
uuguauaguuauguaaauaauu

SEQ ID NO: 3187890 - RNA, 15 nt, Human
uuguauaauauugaa

SEQ ID NO: 3187891 - RNA, 16 nt, Human
uuguauaauauugaaa

SEQ ID NO: 3187892 - RNA, 23 nt, Human
uuguauaaauuuauuuacugcua

SEQ ID NO: 3187893 - RNA, 17 nt, Human
uuguaguucuuuaaacu

SEQ ID NO: 3187894 - RNA, 19 nt, Human
uuguauaaauuuauuuacu

SEQ ID NO: 3187895 - RNA, 12 nt, Human
uuguauaaauuu

SEQ ID NO: 3187896 - RNA, 16 nt, Human
augacaaauguuucua

SEQ ID NO: 3187897 - RNA, 16 nt, Human
augacaaaauucuuuc

SEQ ID NO: 3187898 - RNA, 15 nt, Human
augacaaauguuucu

SEQ ID NO: 3187899 - RNA, 13 nt, Human
augacaaauguuu

SEQ ID NO: 3187900 - RNA, 19 nt, Human
augacacgaauauugcuga

SEQ ID NO: 3187901 - RNA, 20 nt, Human
augacacgaauauugcugau

SEQ ID NO: 3187902 - RNA, 20 nt, Human
augacagaaaauauguauua

SEQ ID NO: 3187903 - RNA, 19 nt, Human
augacagaaaauauguauu

SEQ ID NO: 3187904 - RNA, 18 nt, Human
augacagaaaauauguau

SEQ ID NO: 3187905 - RNA, 14 nt, Human
augacagaaaauau

SEQ ID NO: 3187906 - RNA, 23 nt, Human
augacagaaaauauguauuaaca

SEQ ID NO: 3187907 - RNA, 15 nt, Human
augacaggccugucc

SEQ ID NO: 3187908 - RNA, 20 nt, Human
augacaggcauccaaggaag

SEQ ID NO: 3187909 - RNA, 13 nt, Human
uuguaagaaauac

SEQ ID NO: 3187910 - RNA, 14 nt, Human
uuguaaggaaugau

SEQ ID NO: 3187911 - RNA, 22 nt, Human
uuguaacuauguuuaaaguaau

SEQ ID NO: 3187912 - RNA, 23 nt, Human
uuguaacuaaaauaauuuuguaa

SEQ ID NO: 3187913 - RNA, 22 nt, Human
uuguaacuaaaauaauuuugua

SEQ ID NO: 3187914 - RNA, 11 nt, Human
uuguaagaaau

SEQ ID NO: 3187915 - RNA, 13 nt, Human
uuguaaaaaugua

SEQ ID NO: 3187916 - RNA, 17 nt, Human
uuguaacuaaaauaauu

SEQ ID NO: 3187917 - RNA, 21 nt, Human
uuguaacuaaaauaauuuugu

SEQ ID NO: 3187918 - RNA, 18 nt, Human
uuguaacuaaaauaauuu

SEQ ID NO: 3187919 - RNA, 19 nt, Human
uugguuuuuauuucuccuu

SEQ ID NO: 3187920 - RNA, 19 nt, Human
uugguuaggcauuguggga

SEQ ID NO: 3187921 - RNA, 15 nt, Human
uugguucaaaugugu

SEQ ID NO: 3187922 - RNA, 13 nt, Human
uugguucaaaugu

SEQ ID NO: 3187923 - RNA, 23 nt, Human
uugguuauagugcaauauauuuu

SEQ ID NO: 3187924 - RNA, 20 nt, Human
uugguuauagugcaauauau

SEQ ID NO: 3187925 - RNA, 18 nt, Human
uugguucauuuucagauu

SEQ ID NO: 3187926 - RNA, 22 nt, Human
uugguuccaagucuuugcuauu

SEQ ID NO: 3187927 - RNA, 21 nt, Human
uugguuccaagucuuugcuau

SEQ ID NO: 3187928 - RNA, 22 nt, Human
uugggguacccacugcucuggu

SEQ ID NO: 3187929 - RNA, 15 nt, Human
augaacauguuuuag

SEQ ID NO: 3187930 - RNA, 20 nt, Human
augaaccacaucuugcucug

SEQ ID NO: 3187931 - RNA, 13 nt, Human
augaaccacaucu

SEQ ID NO: 3187932 - RNA, 16 nt, Human
augaacauacaaaugc

SEQ ID NO: 3187933 - RNA, 13 nt, Human
augaacagugcac

SEQ ID NO: 3187934 - RNA, 12 nt, Human
augaacagacuu

SEQ ID NO: 3187935 - RNA, 15 nt, Human
uugggcagagaggcu

SEQ ID NO: 3187936 - RNA, 19 nt, Human
uuggggaagaacgaagcca

SEQ ID NO: 3187937 - RNA, 17 nt, Human
uugggguacccacugcu

SEQ ID NO: 3187938 - RNA, 13 nt, Human
uugggcucugcug

SEQ ID NO: 3187939 - RNA, 17 nt, Human
uugggcugaauguaugu

SEQ ID NO: 3187940 - RNA, 22 nt, Human
uugggcugaauguauguaaaua

SEQ ID NO: 3187941 - RNA, 12 nt, Human
uugggcucccaa

SEQ ID NO: 3187942 - RNA, 15 nt, Human
uuugaaaauaguuua

SEQ ID NO: 3187943 - RNA, 18 nt, Human
uuugaaaauaguuuauuu

SEQ ID NO: 3187944 - RNA, 11 nt, Human
uuugaaaagua

SEQ ID NO: 3187945 - RNA, 12 nt, Human
uuugaaaaguaa

SEQ ID NO: 3187946 - RNA, 14 nt, Human
uuugaaaaguaaua

SEQ ID NO: 3187947 - RNA, 17 nt, Human
uuugaaaaguaauauuu

SEQ ID NO: 3187948 - RNA, 22 nt, Human
uuugaaaaguaauauuuauuaa

SEQ ID NO: 3187949 - RNA, 11 nt, Human
uuugaaaauag

SEQ ID NO: 3187950 - RNA, 14 nt, Human
uuugaaaauaguuu

SEQ ID NO: 3187951 - RNA, 23 nt, Human
uuugaaacauugcuuuuaaaacu

SEQ ID NO: 3187952 - RNA, 21 nt, Human
uuugaaacaugcuuguguuuc

SEQ ID NO: 3187953 - RNA, 13 nt, Human
uuugaaacauugc

SEQ ID NO: 3187954 - RNA, 12 nt, Human
uuugaaacauug

SEQ ID NO: 3187955 - RNA, 18 nt, Human
uuugaaacauugcuuuua

SEQ ID NO: 3187956 - RNA, 15 nt, Human
uuugaaacauugcuu

SEQ ID NO: 3187957 - RNA, 22 nt, Human
uuugaaaccccuguaggccuca

SEQ ID NO: 3187958 - RNA, 14 nt, Human
uuugaaagugccuu

SEQ ID NO: 3187959 - RNA, 18 nt, Human
uuugaaagugccuuugca

SEQ ID NO: 3187960 - RNA, 21 nt, Human
uuugaaagugccuuugcagcu

SEQ ID NO: 3187961 - RNA, 23 nt, Human
uuugaaagugccuuugcagcuca

SEQ ID NO: 3187962 - RNA, 22 nt, Human
uuugaaauauauggucuaaugu

SEQ ID NO: 3187963 - RNA, 21 nt, Human
uuugaaauauauggucuaaug

SEQ ID NO: 3187964 - RNA, 13 nt, Human
uuugaaauauaug

SEQ ID NO: 3187965 - RNA, 23 nt, Human
augggcuggguucuacccaggug

SEQ ID NO: 3187966 - RNA, 16 nt, Human
uuugaaauauggucuu

SEQ ID NO: 3187967 - RNA, 14 nt, Human
auggggcccugccu

SEQ ID NO: 3187968 - RNA, 13 nt, Human
auggggcccugcc

SEQ ID NO: 3187969 - RNA, 17 nt, Human
auggggaggacaaaaug

SEQ ID NO: 3187970 - RNA, 13 nt, Human
auggggaggacaa

SEQ ID NO: 3187971 - RNA, 13 nt, Human
uuucuuuguggcu

SEQ ID NO: 3187972 - RNA, 23 nt, Human
uuugaaaagcaauauuguauauu

SEQ ID NO: 3187973 - RNA, 17 nt, Human
uuucugcuuuagacuug

SEQ ID NO: 3187974 - RNA, 19 nt, Human
uuucugcuuuagacuugaa

SEQ ID NO: 3187975 - RNA, 20 nt, Human
uuucugcuuuagacuugaaa

SEQ ID NO: 3187976 - RNA, 16 nt, Human
uuucugccuuuuguuc

SEQ ID NO: 3187977 - RNA, 14 nt, Human
uuucugcaucagcu

SEQ ID NO: 3187978 - RNA, 22 nt, Human
uuucucauuugccaauaauaau

SEQ ID NO: 3187979 - RNA, 21 nt, Human
uuucugcagccacuauuguua

SEQ ID NO: 3187980 - RNA, 14 nt, Human
uuucugccgcagcc

SEQ ID NO: 3187981 - RNA, 16 nt, Human
uuucugccgcagcccu

SEQ ID NO: 3187982 - RNA, 19 nt, Human
uuucucacacucuaacugu

SEQ ID NO: 3187983 - RNA, 22 nt, Human
uuucucacacucuaacuguaua

SEQ ID NO: 3187984 - RNA, 22 nt, Human
uuucucaaagccccauuaacug

SEQ ID NO: 3187985 - RNA, 16 nt, Human
uuucuauuuucucuga

SEQ ID NO: 3187986 - RNA, 15 nt, Human
uuucucauauuugag

SEQ ID NO: 3187987 - RNA, 14 nt, Human
uuucuauuuucucu

SEQ ID NO: 3187988 - RNA, 18 nt, Human
uuucuauaauuuuacaag

SEQ ID NO: 3187989 - RNA, 15 nt, Human
uuucuaguuauuuau

SEQ ID NO: 3187990 - RNA, 14 nt, Human
uuucuaguuauuua

SEQ ID NO: 3187991 - RNA, 20 nt, Human
uuucuaggccuacaugcuuu

SEQ ID NO: 3187992 - RNA, 15 nt, Human
auggcuauaggugcu

SEQ ID NO: 3187993 - RNA, 15 nt, Human
augggacuggccucu

SEQ ID NO: 3187994 - RNA, 13 nt, Human
augggagcucaug

SEQ ID NO: 3187995 - RNA, 12 nt, Human
augggagccggg

SEQ ID NO: 3187996 - RNA, 21 nt, Human
augggcaacccccagccugcu

SEQ ID NO: 3187997 - RNA, 19 nt, Human
augggcaacccccagccug

SEQ ID NO: 3187998 - RNA, 18 nt, Human
augggcaacccccagccu

SEQ ID NO: 3187999 - RNA, 15 nt, Human
augggagccgggcaa

SEQ ID NO: 3188000 - RNA, 13 nt, Human
augggcagagcag

SEQ ID NO: 3188001 - RNA, 14 nt, Human
augggcagagcaga

SEQ ID NO: 3188002 - RNA, 15 nt, Human
augggcagagcagag

SEQ ID NO: 3188003 - RNA, 15 nt, Human
augggccuccugugu

SEQ ID NO: 3188004 - RNA, 15 nt, Human
augggcaguuucagu

SEQ ID NO: 3188005 - RNA, 12 nt, Human
augggcaggaga

SEQ ID NO: 3188006 - RNA, 20 nt, Human
augggcagucauuuugcaga

SEQ ID NO: 3188007 - RNA, 13 nt, Human
augggcaggagac

SEQ ID NO: 3188008 - RNA, 17 nt, Human
auggaauuucucccagu

SEQ ID NO: 3188009 - RNA, 21 nt, Human
uuuccaguaaggaaugauauu

SEQ ID NO: 3188010 - RNA, 19 nt, Human
auggacaugaucuucuuua

SEQ ID NO: 3188011 - RNA, 17 nt, Human
auggacauuuagaagaa

SEQ ID NO: 3188012 - RNA, 18 nt, Human
auggacauuuagaagaaa

SEQ ID NO: 3188013 - RNA, 20 nt, Human
auggacauuuagaagaaaga

SEQ ID NO: 3188014 - RNA, 23 nt, Human
auggaccaugcugucuggcacag

SEQ ID NO: 3188015 - RNA, 21 nt, Human
auggacccaauauuuaccaga

SEQ ID NO: 3188016 - RNA, 21 nt, Human
auggcuauaggugcuacaaaa

SEQ ID NO: 3188017 - RNA, 19 nt, Human
auggcuauaggugcuacaa

SEQ ID NO: 3188018 - RNA, 16 nt, Human
auggcuauaggugcua

SEQ ID NO: 3188019 - RNA, 18 nt, Human
uuucgcaggauucuuccu

SEQ ID NO: 3188020 - RNA, 15 nt, Human
uuucgauguuuuuga

SEQ ID NO: 3188021 - RNA, 19 nt, Human
uuucgacuugcauuuuugc

SEQ ID NO: 3188022 - RNA, 15 nt, Human
uuucgacuugcauuu

SEQ ID NO: 3188023 - RNA, 22 nt, Human
uuucgcaggauucuuccucccu

SEQ ID NO: 3188024 - RNA, 13 nt, Human
uuucuaaaagcuu

SEQ ID NO: 3188025 - RNA, 16 nt, Human
uuucuaaaagcuuuca

SEQ ID NO: 3188026 - RNA, 19 nt, Human
uuucuaaaagcuuucaugu

SEQ ID NO: 3188027 - RNA, 14 nt, Human
uuucuaaaaaguca

SEQ ID NO: 3188028 - RNA, 15 nt, Human
uuucuaaaaagucag

SEQ ID NO: 3188029 - RNA, 17 nt, Human
uuucuaaaaagucagau

SEQ ID NO: 3188030 - RNA, 20 nt, Human
uuucuaaaaagucagauguu

SEQ ID NO: 3188031 - RNA, 14 nt, Human
uuucguuuguuugu

SEQ ID NO: 3188032 - RNA, 13 nt, Human
uuucguggcuuca

SEQ ID NO: 3188033 - RNA, 20 nt, Human
uuuccuugaggggagccagg

SEQ ID NO: 3188034 - RNA, 19 nt, Human
uuuccuugcauacaaacaa

SEQ ID NO: 3188035 - RNA, 16 nt, Human
uuuccuugcauacaaa

SEQ ID NO: 3188036 - RNA, 17 nt, Human
uuuccuuuaauaugaaa

SEQ ID NO: 3188037 - RNA, 21 nt, Human
uuuccuuuuaaaacacuucca

SEQ ID NO: 3188038 - RNA, 21 nt, Human
uuuccuucauucaacccaccu

SEQ ID NO: 3188039 - RNA, 22 nt, Human
uuuccuucagugccuuauggaa

SEQ ID NO: 3188040 - RNA, 18 nt, Human
uuuccuucagugccuuau

SEQ ID NO: 3188041 - RNA, 21 nt, Human
uuuccuucagugccuuaugga

SEQ ID NO: 3188042 - RNA, 23 nt, Human
uuuccuucauucaacccaccugc

SEQ ID NO: 3188043 - RNA, 18 nt, Human
uuuccuuacauaaacauc

SEQ ID NO: 3188044 - RNA, 11 nt, Human
uuuccuucccu

SEQ ID NO: 3188045 - RNA, 12 nt, Human
uuuccugugucu

SEQ ID NO: 3188046 - RNA, 15 nt, Human
uuuccuguuugggaa

SEQ ID NO: 3188047 - RNA, 12 nt, Human
uuuccuucagug

SEQ ID NO: 3188048 - RNA, 15 nt, Human
uuuccuucagugccu

SEQ ID NO: 3188049 - RNA, 11 nt, Human
uuuccuucagu

SEQ ID NO: 3188050 - RNA, 17 nt, Human
uuuccuuacauaaacau

SEQ ID NO: 3188051 - RNA, 16 nt, Human
uuuccuuacauaaaca

SEQ ID NO: 3188052 - RNA, 17 nt, Human
uuuaaaggcccuaucug

SEQ ID NO: 3188053 - RNA, 18 nt, Human
uuuaaaggcauuagaguc

SEQ ID NO: 3188054 - RNA, 24 nt, Human
uuuaaagcuuauuaaaacucauuu

SEQ ID NO: 3188055 - RNA, 12 nt, Human
uuuaaagcuuuu

SEQ ID NO: 3188056 - RNA, 18 nt, Human
uuuaaagaaacaugguuu

SEQ ID NO: 3188057 - RNA, 18 nt, Human
uuuaaagccauucugauu

SEQ ID NO: 3188058 - RNA, 20 nt, Human
uuuaaagaaaaaaaugucaa

SEQ ID NO: 3188059 - RNA, 13 nt, Human
augcuaagugaaa

SEQ ID NO: 3188060 - RNA, 23 nt, Human
augcgcaggcuggcccugcccug

SEQ ID NO: 3188061 - RNA, 15 nt, Human
augcgcaguugcugu

SEQ ID NO: 3188062 - RNA, 12 nt, Human
augccuauugua

SEQ ID NO: 3188063 - RNA, 17 nt, Human
uuuaccuugucauuuug

SEQ ID NO: 3188064 - RNA, 22 nt, Human
uuuaccugaagucuuuguacag

SEQ ID NO: 3188065 - RNA, 21 nt, Human
uuuaccuggcuuauuuaauau

SEQ ID NO: 3188066 - RNA, 17 nt, Human
augcuaaucuugugaaa

SEQ ID NO: 3188067 - RNA, 16 nt, Human
uuuaccuucaaacuuu

SEQ ID NO: 3188068 - RNA, 18 nt, Human
uuuaccuucaaacuuuag

SEQ ID NO: 3188069 - RNA, 13 nt, Human
uuuauuaaauuuu

SEQ ID NO: 3188070 - RNA, 12 nt, Human
uuuauuaaauuu

SEQ ID NO: 3188071 - RNA, 17 nt, Human
uuuauuaacuuaauaau

SEQ ID NO: 3188072 - RNA, 23 nt, Human
uuuauuaaauuuuuuuguaugaa

SEQ ID NO: 3188073 - RNA, 19 nt, Human
uuuauuaaaugcccagccc

SEQ ID NO: 3188074 - RNA, 21 nt, Human
uuuauaucuuggcagguagga

SEQ ID NO: 3188075 - RNA, 14 nt, Human
uuuauaucuuggca

SEQ ID NO: 3188076 - RNA, 14 nt, Human
uuuauauauaugca

SEQ ID NO: 3188077 - RNA, 15 nt, Human
uuuauauauauaucu

SEQ ID NO: 3188078 - RNA, 21 nt, Human
uuuauaucuccuuuguauucu

SEQ ID NO: 3188079 - RNA, 16 nt, Human
uuuauauccauuuuua

SEQ ID NO: 3188080 - RNA, 13 nt, Human
uuuauauccauuu

SEQ ID NO: 3188081 - RNA, 21 nt, Human
uuuacuacaauauguacauuu

SEQ ID NO: 3188082 - RNA, 19 nt, Human
uuuacuacaauauguacau

SEQ ID NO: 3188083 - RNA, 19 nt, Human
uuuagauagcagccuggcu

SEQ ID NO: 3188084 - RNA, 22 nt, Human
uuuagccugugucauugcccca

SEQ ID NO: 3188085 - RNA, 13 nt, Human
uuuagccuguguc

SEQ ID NO: 3188086 - RNA, 14 nt, Human
uuuagcuauuacug

SEQ ID NO: 3188087 - RNA, 14 nt, Human
uuuaggugaaaaua

SEQ ID NO: 3188088 - RNA, 15 nt, Human
augcugggcucccgu

SEQ ID NO: 3188089 - RNA, 20 nt, Human
uuuauuaacuuaauaaucaa

SEQ ID NO: 3188090 - RNA, 22 nt, Human
augcuggcuguuggcugggggc

SEQ ID NO: 3188091 - RNA, 20 nt, Human
augcuguagacaucuguccu

SEQ ID NO: 3188092 - RNA, 16 nt, Human
augcugucuggcacag

SEQ ID NO: 3188093 - RNA, 19 nt, Human
augcugucuggcacagccu

SEQ ID NO: 3188094 - RNA, 17 nt, Human
augcugucuggcacagc

SEQ ID NO: 3188095 - RNA, 14 nt, Human
augcuguauauguu

SEQ ID NO: 3188096 - RNA, 14 nt, Human
augcuguaucugug

SEQ ID NO: 3188097 - RNA, 15 nt, Human
augcuguaucugugc

SEQ ID NO: 3188098 - RNA, 23 nt, Human
augcugucuuucuugcucccuga

SEQ ID NO: 3188099 - RNA, 21 nt, Human
augcugucuuucuugcucccu

SEQ ID NO: 3188100 - RNA, 20 nt, Human
augcugucuuucuugcuccc

SEQ ID NO: 3188101 - RNA, 18 nt, Human
augcugucuuucuugcuc

SEQ ID NO: 3188102 - RNA, 22 nt, Human
augcugucuggcacagccugca

SEQ ID NO: 3188103 - RNA, 18 nt, Human
augcugugccccuggccu

SEQ ID NO: 3188104 - RNA, 17 nt, Human
augcugugccccuggcc

SEQ ID NO: 3188105 - RNA, 14 nt, Human
augcugugccccug

SEQ ID NO: 3188106 - RNA, 13 nt, Human
augcugugccccu

SEQ ID NO: 3188107 - RNA, 16 nt, Human
auggaacauaaaauac

SEQ ID NO: 3188108 - RNA, 21 nt, Human
auggaaguacuauaauuuacc

SEQ ID NO: 3188109 - RNA, 18 nt, Human
auggaacacucugagacu

SEQ ID NO: 3188110 - RNA, 17 nt, Human
auggaacacucugagac

SEQ ID NO: 3188111 - RNA, 20 nt, Human
uuuauuuuaaaauuucauag

SEQ ID NO: 3188112 - RNA, 15 nt, Human
auggaauaacaugua

SEQ ID NO: 3188113 - RNA, 14 nt, Human
auggaauaacaugu

SEQ ID NO: 3188114 - RNA, 18 nt, Human
uuuauuuugaaauggaaa

SEQ ID NO: 3188115 - RNA, 15 nt, Human
uuuauuuuguaugaa

SEQ ID NO: 3188116 - RNA, 21 nt, Human
uuuauuuuguaugaaauauau

SEQ ID NO: 3188117 - RNA, 13 nt, Human
uuuauuuuuuggg

SEQ ID NO: 3188118 - RNA, 16 nt, Human
uuuauuuuuugggaaa

SEQ ID NO: 3188119 - RNA, 13 nt, Human
uuuauuuuuuggu

SEQ ID NO: 3188120 - RNA, 23 nt, Human
uuucaaaaacaccccccccccac

SEQ ID NO: 3188121 - RNA, 21 nt, Human
uuuauuuuuuuuaauuguauu

SEQ ID NO: 3188122 - RNA, 14 nt, Human
uuucacucuccuug

SEQ ID NO: 3188123 - RNA, 15 nt, Human
uuucacccuucuacu

SEQ ID NO: 3188124 - RNA, 21 nt, Human
uuucaccccaucccuccuuaa

SEQ ID NO: 3188125 - RNA, 15 nt, Human
uuucacugucugucu

SEQ ID NO: 3188126 - RNA, 13 nt, Human
uuucacugucugu

SEQ ID NO: 3188127 - RNA, 23 nt, Human
uuucacuucuuucccuuccucca

SEQ ID NO: 3188128 - RNA, 16 nt, Human
uuucacuucuuucccu

SEQ ID NO: 3188129 - RNA, 14 nt, Human
uuucacuucuuucc

SEQ ID NO: 3188130 - RNA, 15 nt, Human
uuucacucuccuugg

SEQ ID NO: 3188131 - RNA, 24 nt, Human
uuucacucuuauugcccacgcugg

SEQ ID NO: 3188132 - RNA, 23 nt, Human
uuucacuggccacaguuguuuga

SEQ ID NO: 3188133 - RNA, 24 nt, Human
uuucacugcuggcugccuuagaac

SEQ ID NO: 3188134 - RNA, 17 nt, Human
uuucccaggcaaauaaa

SEQ ID NO: 3188135 - RNA, 19 nt, Human
uuuccauauuuuuuuccuu

SEQ ID NO: 3188136 - RNA, 17 nt, Human
uuuccauauuuuuacaa

SEQ ID NO: 3188137 - RNA, 21 nt, Human
uuuccauauccauagugacuu

SEQ ID NO: 3188138 - RNA, 11 nt, Human
uuucccacccu

SEQ ID NO: 3188139 - RNA, 23 nt, Human
uuucccacucauucugaauuaau

SEQ ID NO: 3188140 - RNA, 17 nt, Human
uuuccaguuccucuuuu

SEQ ID NO: 3188141 - RNA, 18 nt, Human
uuuccagguucugaaaga

SEQ ID NO: 3188142 - RNA, 17 nt, Human
uuuccaguauuuuagug

SEQ ID NO: 3188143 - RNA, 16 nt, Human
uuuccaguauuuuagu

SEQ ID NO: 3188144 - RNA, 15 nt, Human
uuuccaguauuuuag

SEQ ID NO: 3188145 - RNA, 12 nt, Human
uuuccaguauuu

SEQ ID NO: 3188146 - RNA, 19 nt, Human
uuuccagguuuaagcuguu

SEQ ID NO: 3188147 - RNA, 23 nt, Human
uuucauauaggaauagaaacaug

SEQ ID NO: 3188148 - RNA, 12 nt, Human
uuucauaucauu

SEQ ID NO: 3188149 - RNA, 15 nt, Human
uuucauaucauuucu

SEQ ID NO: 3188150 - RNA, 21 nt, Human
uuucauauaggaauagaaaca

SEQ ID NO: 3188151 - RNA, 14 nt, Human
uuucauaggaagac

SEQ ID NO: 3188152 - RNA, 19 nt, Human
uuucauaggaagacacauu

SEQ ID NO: 3188153 - RNA, 21 nt, Human
uuucaguuuauuugaaccaau

SEQ ID NO: 3188154 - RNA, 15 nt, Human
uuucauaagauauuu

SEQ ID NO: 3188155 - RNA, 19 nt, Human
uuucauaagauauuuuauu

SEQ ID NO: 3188156 - RNA, 18 nt, Human
uuucauaagauauuuuau

SEQ ID NO: 3188157 - RNA, 13 nt, Human
uuucauaauuugu

SEQ ID NO: 3188158 - RNA, 23 nt, Human
aucgguuaacaaauaacaacuuu

SEQ ID NO: 3188159 - RNA, 16 nt, Human
aucgguuaacaaauaa

SEQ ID NO: 3188160 - RNA, 15 nt, Human
aucgguuaacaaaua

SEQ ID NO: 3188161 - RNA, 21 nt, Human
aucggggagguuuucuccccc

SEQ ID NO: 3188162 - RNA, 12 nt, Human
auccuuacaaau

SEQ ID NO: 3188163 - RNA, 20 nt, Human
auccugucaucugagaauga

SEQ ID NO: 3188164 - RNA, 18 nt, Human
auccugucaucugagaau

SEQ ID NO: 3188165 - RNA, 17 nt, Human
auccugucaucugagaa

SEQ ID NO: 3188166 - RNA, 16 nt, Human
auccugucaucugaga

SEQ ID NO: 3188167 - RNA, 21 nt, Human
auccuggcacccggccccugc

SEQ ID NO: 3188168 - RNA, 20 nt, Human
auccuggcacccggccccug

SEQ ID NO: 3188169 - RNA, 19 nt, Human
auccuggcacccggccccu

SEQ ID NO: 3188170 - RNA, 17 nt, Human
auccuggcacccggccc

SEQ ID NO: 3188171 - RNA, 15 nt, Human
auccuggaguucugg

SEQ ID NO: 3188172 - RNA, 23 nt, Human
auccuggcacccggccccugcug

SEQ ID NO: 3188173 - RNA, 22 nt, Human
auccuggcacccggccccugcu

SEQ ID NO: 3188174 - RNA, 22 nt, Human
auccugguuccuaggggaauga

SEQ ID NO: 3188175 - RNA, 23 nt, Human
auccugguuccuaggggaaugag

SEQ ID NO: 3188176 - RNA, 22 nt, Human
auccugggcuuuuguuuugcuu

SEQ ID NO: 3188177 - RNA, 21 nt, Human
auccugggcuuuuguuuugcu

SEQ ID NO: 3188178 - RNA, 13 nt, Human
auccugccccuga

SEQ ID NO: 3188179 - RNA, 19 nt, Human
auccugcacugacucugga

SEQ ID NO: 3188180 - RNA, 18 nt, Human
auccugcacugacucugg

SEQ ID NO: 3188181 - RNA, 22 nt, Human
auccugaggcuccacuuggucu

SEQ ID NO: 3188182 - RNA, 16 nt, Human
auccugcaauuccacu

SEQ ID NO: 3188183 - RNA, 15 nt, Human
auccugcacugacuc

SEQ ID NO: 3188184 - RNA, 17 nt, Human
auccugcacugacucug

SEQ ID NO: 3188185 - RNA, 16 nt, Human
auccugcacugacucu

SEQ ID NO: 3188186 - RNA, 11 nt, Human
auccugaggcu

SEQ ID NO: 3188187 - RNA, 13 nt, Human
auccugaggcucc

SEQ ID NO: 3188188 - RNA, 16 nt, Human
auccugaggcuccacu

SEQ ID NO: 3188189 - RNA, 18 nt, Human
auccugaggcuccacuug

SEQ ID NO: 3188190 - RNA, 14 nt, Human
auccugagccagau

SEQ ID NO: 3188191 - RNA, 15 nt, Human
auccugagccagauu

SEQ ID NO: 3188192 - RNA, 17 nt, Human
auccugagccagauuuc

SEQ ID NO: 3188193 - RNA, 21 nt, Human
auccugagccagauuucacuc

SEQ ID NO: 3188194 - RNA, 19 nt, Human
uucuuugccaucucugcuc

SEQ ID NO: 3188195 - RNA, 18 nt, Human
uucuuugccaucucugcu

SEQ ID NO: 3188196 - RNA, 15 nt, Human
uucuuugccaucucu

SEQ ID NO: 3188197 - RNA, 20 nt, Human
uucuuuucuucacucaaauu

SEQ ID NO: 3188198 - RNA, 18 nt, Human
auccucuguacagagccc

SEQ ID NO: 3188199 - RNA, 20 nt, Human
auccucuguacagagcccac

SEQ ID NO: 3188200 - RNA, 17 nt, Human
auccucuuugagugaag

SEQ ID NO: 3188201 - RNA, 12 nt, Human
auccugagccag

SEQ ID NO: 3188202 - RNA, 13 nt, Human
auccugagccaga

SEQ ID NO: 3188203 - RNA, 11 nt, Human
auccugagcca

SEQ ID NO: 3188204 - RNA, 20 nt, Human
uugauaagggacugauguuu

SEQ ID NO: 3188205 - RNA, 21 nt, Human
uugauaagggacugauguuug

SEQ ID NO: 3188206 - RNA, 22 nt, Human
uugauaacagggauugauuuua

SEQ ID NO: 3188207 - RNA, 18 nt, Human
uugauaacaauguuuuaa

SEQ ID NO: 3188208 - RNA, 15 nt, Human
uugauaaauaguguu

SEQ ID NO: 3188209 - RNA, 13 nt, Human
uugauaaauagug

SEQ ID NO: 3188210 - RNA, 22 nt, Human
uugauaaauaguguuauugaga

SEQ ID NO: 3188211 - RNA, 17 nt, Human
aucuaagaauaauaaaa

SEQ ID NO: 3188212 - RNA, 18 nt, Human
aucuaagaauaauaaaau

SEQ ID NO: 3188213 - RNA, 22 nt, Human
uugauaagggacugauguuugu

SEQ ID NO: 3188214 - RNA, 21 nt, Human
aucuaagugccucacauuuuu

SEQ ID NO: 3188215 - RNA, 12 nt, Human
uugauaaaguaa

SEQ ID NO: 3188216 - RNA, 15 nt, Human
uugauaaaaauacug

SEQ ID NO: 3188217 - RNA, 23 nt, Human
uugagagagauguguaauuuuuc

SEQ ID NO: 3188218 - RNA, 16 nt, Human
uugagagagcagccag

SEQ ID NO: 3188219 - RNA, 22 nt, Human
uugagagagauguguaauuuuu

SEQ ID NO: 3188220 - RNA, 21 nt, Human
uugagagagauguguaauuuu

SEQ ID NO: 3188221 - RNA, 18 nt, Human
uugagagagauguguaau

SEQ ID NO: 3188222 - RNA, 15 nt, Human
uugagagagaugugu

SEQ ID NO: 3188223 - RNA, 14 nt, Human
uugagagagaugug

SEQ ID NO: 3188224 - RNA, 13 nt, Human
uugagagagaugu

SEQ ID NO: 3188225 - RNA, 24 nt, Human
uugaccauucuccaccugccaggg

SEQ ID NO: 3188226 - RNA, 21 nt, Human
uugagaacuaccuggauuugu

SEQ ID NO: 3188227 - RNA, 19 nt, Human
uugacacuuaaaaaugguu

SEQ ID NO: 3188228 - RNA, 19 nt, Human
uugacagggcacaccgggc

SEQ ID NO: 3188229 - RNA, 17 nt, Human
uugaccauucuccaccu

SEQ ID NO: 3188230 - RNA, 18 nt, Human
uugaccauucuccaccug

SEQ ID NO: 3188231 - RNA, 19 nt, Human
uugaccauucuccaccugc

SEQ ID NO: 3188232 - RNA, 12 nt, Human
aucuaagaauaa

SEQ ID NO: 3188233 - RNA, 16 nt, Human
aucuaagaauaauaaa

SEQ ID NO: 3188234 - RNA, 15 nt, Human
aucuaaauguugaaa

SEQ ID NO: 3188235 - RNA, 14 nt, Human
aucuaacauuauua

SEQ ID NO: 3188236 - RNA, 16 nt, Human
aucuaacauuauuacu

SEQ ID NO: 3188237 - RNA, 19 nt, Human
aucuaacauuauuacuuuu

SEQ ID NO: 3188238 - RNA, 15 nt, Human
aucuaaacugccccc

SEQ ID NO: 3188239 - RNA, 23 nt, Human
aucuaaaaauauacauguuuaug

SEQ ID NO: 3188240 - RNA, 18 nt, Human
aucuaaaaauauacaugu

SEQ ID NO: 3188241 - RNA, 17 nt, Human
aucuaaaaauauacaug

SEQ ID NO: 3188242 - RNA, 16 nt, Human
aucuaaaaauauacau

SEQ ID NO: 3188243 - RNA, 14 nt, Human
aucuaaaaauauac

SEQ ID NO: 3188244 - RNA, 13 nt, Human
aucuaaaaauaua

SEQ ID NO: 3188245 - RNA, 16 nt, Human
aucguauucaccuuca

SEQ ID NO: 3188246 - RNA, 15 nt, Human
aucgugacaacacuu

SEQ ID NO: 3188247 - RNA, 14 nt, Human
aucgugacaacacu

SEQ ID NO: 3188248 - RNA, 16 nt, Human
uugaaggaaaaauuca

SEQ ID NO: 3188249 - RNA, 16 nt, Human
uugaagguuuuugaua

SEQ ID NO: 3188250 - RNA, 14 nt, Human
uugaagguuuuuga

SEQ ID NO: 3188251 - RNA, 22 nt, Human
uugaaggugauaagggaaaaga

SEQ ID NO: 3188252 - RNA, 15 nt, Human
uugaagucaugcucc

SEQ ID NO: 3188253 - RNA, 17 nt, Human
uugacacuuaaaaaugg

SEQ ID NO: 3188254 - RNA, 23 nt, Human
uugaauaugauuaaaaauaucaa

SEQ ID NO: 3188255 - RNA, 14 nt, Human
uugaauaugauuaa

SEQ ID NO: 3188256 - RNA, 15 nt, Human
uugaauaugauuaaa

SEQ ID NO: 3188257 - RNA, 23 nt, Human
uugaaguugacucugcucuugca

SEQ ID NO: 3188258 - RNA, 23 nt, Human
uugaauagggcuaggaauauaga

SEQ ID NO: 3188259 - RNA, 15 nt, Human
uugaauaguauugug

SEQ ID NO: 3188260 - RNA, 16 nt, Human
uugaauaguauugugu

SEQ ID NO: 3188261 - RNA, 13 nt, Human
uugaauauaaaaa

SEQ ID NO: 3188262 - RNA, 17 nt, Human
uugaauauaaaaaauca

SEQ ID NO: 3188263 - RNA, 19 nt, Human
uugaaguuucaaguuuuaa

SEQ ID NO: 3188264 - RNA, 22 nt, Human
uugaaguuucaaguuuuaaagu

SEQ ID NO: 3188265 - RNA, 22 nt, Human
uugaaguuaguggaaaucugaa

SEQ ID NO: 3188266 - RNA, 20 nt, Human
uugaagugagaaaaugaaca

SEQ ID NO: 3188267 - RNA, 23 nt, Human
aucauaguggcuuaaaacaacac

SEQ ID NO: 3188268 - RNA, 15 nt, Human
aucauaaaacuugau

SEQ ID NO: 3188269 - RNA, 19 nt, Human
aucauauauaauaaauuaa

SEQ ID NO: 3188270 - RNA, 13 nt, Human
aucauauaaauau

SEQ ID NO: 3188271 - RNA, 13 nt, Human
aucauaaagucag

SEQ ID NO: 3188272 - RNA, 14 nt, Human
aucauaaagucagu

SEQ ID NO: 3188273 - RNA, 14 nt, Human
aucauaguuuuauu

SEQ ID NO: 3188274 - RNA, 16 nt, Human
aucauaguuuuauuua

SEQ ID NO: 3188275 - RNA, 17 nt, Human
aucauaguuuuauuuau

SEQ ID NO: 3188276 - RNA, 19 nt, Human
aucauaguuuuauuuauau

SEQ ID NO: 3188277 - RNA, 23 nt, Human
aucauaguuuuauuuauauuuau

SEQ ID NO: 3188278 - RNA, 20 nt, Human
aucauuaucagccugugcca

SEQ ID NO: 3188279 - RNA, 15 nt, Human
aucauucuaaagaua

SEQ ID NO: 3188280 - RNA, 14 nt, Human
aucauucuaaagau

SEQ ID NO: 3188281 - RNA, 21 nt, Human
aucauccacugugccaugugc

SEQ ID NO: 3188282 - RNA, 14 nt, Human
aucaucauuauuau

SEQ ID NO: 3188283 - RNA, 15 nt, Human
aucaucauuauuauu

SEQ ID NO: 3188284 - RNA, 16 nt, Human
aucaucauuauuauua

SEQ ID NO: 3188285 - RNA, 17 nt, Human
aucagugcccuccagga

SEQ ID NO: 3188286 - RNA, 13 nt, Human
aucagugcccucc

SEQ ID NO: 3188287 - RNA, 15 nt, Human
aucagugcccuccag

SEQ ID NO: 3188288 - RNA, 19 nt, Human
aucagucugauucccaagc

SEQ ID NO: 3188289 - RNA, 14 nt, Human
aucaggugcugcca

SEQ ID NO: 3188290 - RNA, 14 nt, Human
aucaguguuuaugu

SEQ ID NO: 3188291 - RNA, 22 nt, Human
aucaguguuuaugugcuauuaa

SEQ ID NO: 3188292 - RNA, 22 nt, Human
aucaguuauacaguuauaaaau

SEQ ID NO: 3188293 - RNA, 23 nt, Human
aucacuugaacccgggaggcaga

SEQ ID NO: 3188294 - RNA, 15 nt, Human
aucaggugcugccau

SEQ ID NO: 3188295 - RNA, 17 nt, Human
aucaggugcugccaucc

SEQ ID NO: 3188296 - RNA, 22 nt, Human
aucacuguuuagauuugccaua

SEQ ID NO: 3188297 - RNA, 12 nt, Human
aucacuuaaaac

SEQ ID NO: 3188298 - RNA, 13 nt, Human
aucacuuaaaaca

SEQ ID NO: 3188299 - RNA, 18 nt, Human
aucacuuaaaacacguuu

SEQ ID NO: 3188300 - RNA, 14 nt, Human
aucacuuaaaacac

SEQ ID NO: 3188301 - RNA, 15 nt, Human
aucacuuaaaacacg

SEQ ID NO: 3188302 - RNA, 12 nt, Human
aucacugaaaua

SEQ ID NO: 3188303 - RNA, 18 nt, Human
aucacuguuuagauuugc

SEQ ID NO: 3188304 - RNA, 17 nt, Human
aucacuguuuagauuug

SEQ ID NO: 3188305 - RNA, 13 nt, Human
aucauucuaaaga

SEQ ID NO: 3188306 - RNA, 19 nt, Human
aucauuguuggacauuugg

SEQ ID NO: 3188307 - RNA, 18 nt, Human
aucauuguucuuuucaau

SEQ ID NO: 3188308 - RNA, 23 nt, Human
aucauuguccagagcugcuuccc

SEQ ID NO: 3188309 - RNA, 12 nt, Human
aucauugaaauc

SEQ ID NO: 3188310 - RNA, 17 nt, Human
aucauucuaaagauaga

SEQ ID NO: 3188311 - RNA, 16 nt, Human
aucauuguccagagcu

SEQ ID NO: 3188312 - RNA, 14 nt, Human
aucauuguccagag

SEQ ID NO: 3188313 - RNA, 17 nt, Human
uucuccuuucacaaccu

SEQ ID NO: 3188314 - RNA, 17 nt, Human
uucucccgggacucugc

SEQ ID NO: 3188315 - RNA, 22 nt, Human
uucuccccuuccauuucugccu

SEQ ID NO: 3188316 - RNA, 18 nt, Human
uucuccccuuccauuucu

SEQ ID NO: 3188317 - RNA, 13 nt, Human
uucuccccuucca

SEQ ID NO: 3188318 - RNA, 19 nt, Human
uucugaagguagcauucuu

SEQ ID NO: 3188319 - RNA, 11 nt, Human
uucucucagac

SEQ ID NO: 3188320 - RNA, 21 nt, Human
uucucucagaccgucuuccuc

SEQ ID NO: 3188321 - RNA, 22 nt, Human
uucucucagaccgucuuccucc

SEQ ID NO: 3188322 - RNA, 23 nt, Human
uucucucagaccgucuuccucca

SEQ ID NO: 3188323 - RNA, 22 nt, Human
uucuccuuucacaaccuucugu

SEQ ID NO: 3188324 - RNA, 18 nt, Human
uucuccuuucacaaccuu

SEQ ID NO: 3188325 - RNA, 19 nt, Human
uucugcagccacuauuguu

SEQ ID NO: 3188326 - RNA, 16 nt, Human
uucugaaucuucugaa

SEQ ID NO: 3188327 - RNA, 13 nt, Human
uucugaaguuaua

SEQ ID NO: 3188328 - RNA, 17 nt, Human
uucugaaguuauauuuc

SEQ ID NO: 3188329 - RNA, 15 nt, Human
uucugaaguuauauu

SEQ ID NO: 3188330 - RNA, 22 nt, Human
uucugaaguuauauuuccuaua

SEQ ID NO: 3188331 - RNA, 20 nt, Human
uucugaaguuauauuuccua

SEQ ID NO: 3188332 - RNA, 19 nt, Human
uucugaaguuauauuuccu

SEQ ID NO: 3188333 - RNA, 18 nt, Human
uucugaaguuauauuucc

SEQ ID NO: 3188334 - RNA, 20 nt, Human
auccauggggcugauuguau

SEQ ID NO: 3188335 - RNA, 18 nt, Human
auccauggggucucucac

SEQ ID NO: 3188336 - RNA, 16 nt, Human
aucccaugagccucag

SEQ ID NO: 3188337 - RNA, 13 nt, Human
aucccaugagccu

SEQ ID NO: 3188338 - RNA, 11 nt, Human
aucccagcccc

SEQ ID NO: 3188339 - RNA, 17 nt, Human
aucccugaaggccccgc

SEQ ID NO: 3188340 - RNA, 22 nt, Human
aucccugaaggccccgcccagg

SEQ ID NO: 3188341 - RNA, 18 nt, Human
aucccaugagccucagca

SEQ ID NO: 3188342 - RNA, 17 nt, Human
aucccaugagccucagc

SEQ ID NO: 3188343 - RNA, 15 nt, Human
auccaaccauuuuca

SEQ ID NO: 3188344 - RNA, 17 nt, Human
auccaaccauuuucauu

SEQ ID NO: 3188345 - RNA, 16 nt, Human
uucugccugcccaggc

SEQ ID NO: 3188346 - RNA, 15 nt, Human
uucugccugcccagg

SEQ ID NO: 3188347 - RNA, 13 nt, Human
auccaaauauugu

SEQ ID NO: 3188348 - RNA, 19 nt, Human
auccaaaguccccauucag

SEQ ID NO: 3188349 - RNA, 15 nt, Human
auccaguaaaauaau

SEQ ID NO: 3188350 - RNA, 14 nt, Human
auccaguaucuuga

SEQ ID NO: 3188351 - RNA, 17 nt, Human
auccagguucagcuugu

SEQ ID NO: 3188352 - RNA, 20 nt, Human
auccacagucucccccaccc

SEQ ID NO: 3188353 - RNA, 16 nt, Human
auccacauguuucaga

SEQ ID NO: 3188354 - RNA, 18 nt, Human
auccacauguuucagagc

SEQ ID NO: 3188355 - RNA, 14 nt, Human
uucuguuuucaauc

SEQ ID NO: 3188356 - RNA, 16 nt, Human
uucuuaccgacaagca

SEQ ID NO: 3188357 - RNA, 15 nt, Human
uucuuagaacagugg

SEQ ID NO: 3188358 - RNA, 20 nt, Human
uucuuagaacaguggaaacu

SEQ ID NO: 3188359 - RNA, 22 nt, Human
uucuuagaacaguggaaacuau

SEQ ID NO: 3188360 - RNA, 14 nt, Human
uucuuacugcuuaa

SEQ ID NO: 3188361 - RNA, 13 nt, Human
uucuguuuucaau

SEQ ID NO: 3188362 - RNA, 12 nt, Human
uucuguuuucaa

SEQ ID NO: 3188363 - RNA, 21 nt, Human
uucuguuucuaauuugcugcu

SEQ ID NO: 3188364 - RNA, 23 nt, Human
uucuguuucuaauuugcugcuga

SEQ ID NO: 3188365 - RNA, 21 nt, Human
uucuguuggccagugugacaa

SEQ ID NO: 3188366 - RNA, 15 nt, Human
aucccugaucccuuc

SEQ ID NO: 3188367 - RNA, 22 nt, Human
aucccugauaaauauucacacu

SEQ ID NO: 3188368 - RNA, 17 nt, Human
uucuucucccccauccu

SEQ ID NO: 3188369 - RNA, 22 nt, Human
uucuucuccacuuucuagccag

SEQ ID NO: 3188370 - RNA, 18 nt, Human
uucuuagacuuuuccaau

SEQ ID NO: 3188371 - RNA, 22 nt, Human
uucuugcgauaguuuacugaga

SEQ ID NO: 3188372 - RNA, 15 nt, Human
uucuuugaucaugaa

SEQ ID NO: 3188373 - RNA, 17 nt, Human
uucuuugaucaugaaua

SEQ ID NO: 3188374 - RNA, 16 nt, Human
uucuuugaucaugaau

SEQ ID NO: 3188375 - RNA, 22 nt, Human
uucuuugaucaugaauaacuga

SEQ ID NO: 3188376 - RNA, 19 nt, Human
uucuuugcacuuuuucuua

SEQ ID NO: 3188377 - RNA, 16 nt, Human
uucuuugcaaaaaucc

SEQ ID NO: 3188378 - RNA, 15 nt, Human
uucuuugcaaaaauc

SEQ ID NO: 3188379 - RNA, 14 nt, Human
uucuuugauucugu

SEQ ID NO: 3188380 - RNA, 16 nt, Human
uucuuugaauuuucau

SEQ ID NO: 3188381 - RNA, 15 nt, Human
uucuuugaauuuuca

SEQ ID NO: 3188382 - RNA, 22 nt, Human
uucuuugaauuuucauuuuaca

SEQ ID NO: 3188383 - RNA, 18 nt, Human
uucuuugaauuuucauuu

SEQ ID NO: 3188384 - RNA, 17 nt, Human
uucuuugaauuuucauu

SEQ ID NO: 3188385 - RNA, 16 nt, Human
uucagauuugccuuau

SEQ ID NO: 3188386 - RNA, 21 nt, Human
uucagauucaggcauuuuccc

SEQ ID NO: 3188387 - RNA, 17 nt, Human
uucagauuucucuuuga

SEQ ID NO: 3188388 - RNA, 15 nt, Human
uucagauuugcacaa

SEQ ID NO: 3188389 - RNA, 19 nt, Human
uucagauuucucuuugaaa

SEQ ID NO: 3188390 - RNA, 19 nt, Human
uucagauuugcacaaaaag

SEQ ID NO: 3188391 - RNA, 18 nt, Human
uucagauuugcacaaaaa

SEQ ID NO: 3188392 - RNA, 17 nt, Human
uucagauuugcacaaaa

SEQ ID NO: 3188393 - RNA, 16 nt, Human
uucagauuugcacaaa

SEQ ID NO: 3188394 - RNA, 15 nt, Human
uucagauuggacaua

SEQ ID NO: 3188395 - RNA, 19 nt, Human
uucagauuggacauaacug

SEQ ID NO: 3188396 - RNA, 15 nt, Human
uucagauuucucuuu

SEQ ID NO: 3188397 - RNA, 16 nt, Human
uucagaagaaauaaau

SEQ ID NO: 3188398 - RNA, 22 nt, Human
uucagaaaacugagcugcaauc

SEQ ID NO: 3188399 - RNA, 11 nt, Human
uucagaaaaaa

SEQ ID NO: 3188400 - RNA, 19 nt, Human
uucacuucugacucuuccc

SEQ ID NO: 3188401 - RNA, 22 nt, Human
uucacuucuuucccuuccucca

SEQ ID NO: 3188402 - RNA, 16 nt, Human
uucacuucuuucccuu

SEQ ID NO: 3188403 - RNA, 15 nt, Human
uucacuucuuucccu

SEQ ID NO: 3188404 - RNA, 13 nt, Human
uucacuucuuucc

SEQ ID NO: 3188405 - RNA, 14 nt, Human
uucacuuugacacu

SEQ ID NO: 3188406 - RNA, 16 nt, Human
uucagcguuuugcaag

SEQ ID NO: 3188407 - RNA, 21 nt, Human
uucagcaucugaccucuaccu

SEQ ID NO: 3188408 - RNA, 22 nt, Human
uucagcaugaaaauguguguuu

SEQ ID NO: 3188409 - RNA, 13 nt, Human
uucagcaggcagc

SEQ ID NO: 3188410 - RNA, 12 nt, Human
uucagcaggcag

SEQ ID NO: 3188411 - RNA, 13 nt, Human
uucagcaucugac

SEQ ID NO: 3188412 - RNA, 12 nt, Human
uucagcaucuga

SEQ ID NO: 3188413 - RNA, 16 nt, Human
uucagguaacaggcag

SEQ ID NO: 3188414 - RNA, 15 nt, Human
uucagguaacaggca

SEQ ID NO: 3188415 - RNA, 22 nt, Human
uucaggguuggccccugcccgg

SEQ ID NO: 3188416 - RNA, 19 nt, Human
uucaggguuggccccugcc

SEQ ID NO: 3188417 - RNA, 17 nt, Human
uucaggguuggccccug

SEQ ID NO: 3188418 - RNA, 16 nt, Human
uucaggguuggccccu

SEQ ID NO: 3188419 - RNA, 14 nt, Human
uucaggguuggccc

SEQ ID NO: 3188420 - RNA, 22 nt, Human
uucagcuaggaacaaaucuucc

SEQ ID NO: 3188421 - RNA, 20 nt, Human
uucagcuaggaacaaaucuu

SEQ ID NO: 3188422 - RNA, 14 nt, Human
uucagcuaggaaca

SEQ ID NO: 3188423 - RNA, 9 nt, Human
auauauuuc

SEQ ID NO: 3188424 - RNA, 22 nt, Human
auauauguuuuaagaggcaggg

SEQ ID NO: 3188425 - RNA, 21 nt, Human
auauauguuuuaagaggcagg

SEQ ID NO: 3188426 - RNA, 15 nt, Human
uucaucaaugaauga

SEQ ID NO: 3188427 - RNA, 22 nt, Human
uucaucagaacagcuguugacu

SEQ ID NO: 3188428 - RNA, 16 nt, Human
uucaucagaacagcug

SEQ ID NO: 3188429 - RNA, 18 nt, Human
auauauggucuaauguuu

SEQ ID NO: 3188430 - RNA, 16 nt, Human
auauauggucuaaugu

SEQ ID NO: 3188431 - RNA, 20 nt, Human
auauaugcauauauauaugu

SEQ ID NO: 3188432 - RNA, 16 nt, Human
auauaugcauauauau

SEQ ID NO: 3188433 - RNA, 19 nt, Human
uucaucauauuauacagac

SEQ ID NO: 3188434 - RNA, 13 nt, Human
auauaugcauaua

SEQ ID NO: 3188435 - RNA, 14 nt, Human
uucaguaagccgug

SEQ ID NO: 3188436 - RNA, 23 nt, Human
uucaguaagucucauagguuaaa

SEQ ID NO: 3188437 - RNA, 13 nt, Human
uucagucauuaaa

SEQ ID NO: 3188438 - RNA, 15 nt, Human
uucagucauuaaauu

SEQ ID NO: 3188439 - RNA, 16 nt, Human
uucagucauuaaauua

SEQ ID NO: 3188440 - RNA, 17 nt, Human
uucagguaacaggcaga

SEQ ID NO: 3188441 - RNA, 20 nt, Human
uucagguagaggugcaugcc

SEQ ID NO: 3188442 - RNA, 14 nt, Human
uucagguagaggug

SEQ ID NO: 3188443 - RNA, 22 nt, Human
uucagguaaagggcaaauaaug

SEQ ID NO: 3188444 - RNA, 22 nt, Human
uucauauuuuaaacagaggaua

SEQ ID NO: 3188445 - RNA, 20 nt, Human
uucauauuuuaauuucaagc

SEQ ID NO: 3188446 - RNA, 18 nt, Human
uucauauuuuaauuucaa

SEQ ID NO: 3188447 - RNA, 17 nt, Human
uucauauuuuaauuuca

SEQ ID NO: 3188448 - RNA, 19 nt, Human
uucauauuuuucaaaauag

SEQ ID NO: 3188449 - RNA, 17 nt, Human
uucauauuuuucaaaau

SEQ ID NO: 3188450 - RNA, 22 nt, Human
uucauauuuuaauuucaagcuu

SEQ ID NO: 3188451 - RNA, 11 nt, Human
uucauaucauu

SEQ ID NO: 3188452 - RNA, 15 nt, Human
uucagugaugugccu

SEQ ID NO: 3188453 - RNA, 23 nt, Human
uucagugcauuaucuacuugugu

SEQ ID NO: 3188454 - RNA, 23 nt, Human
auaugaccaaauaucaccaggac

SEQ ID NO: 3188455 - RNA, 14 nt, Human
auaugcaaagcacu

SEQ ID NO: 3188456 - RNA, 13 nt, Human
auaugcaaagcac

SEQ ID NO: 3188457 - RNA, 16 nt, Human
auaugaacauacaaau

SEQ ID NO: 3188458 - RNA, 20 nt, Human
auaugaaagucuuauuaaaa

SEQ ID NO: 3188459 - RNA, 11 nt, Human
auauauuuuag

SEQ ID NO: 3188460 - RNA, 22 nt, Human
auauauuuuauuuuuagaauuu

SEQ ID NO: 3188461 - RNA, 18 nt, Human
auauauuuuauuuuuaga

SEQ ID NO: 3188462 - RNA, 23 nt, Human
auauauuuuguaugcaagcaguu

SEQ ID NO: 3188463 - RNA, 22 nt, Human
auauauuuuguaugcaagcagu

SEQ ID NO: 3188464 - RNA, 20 nt, Human
auauauuuuguaugcaagca

SEQ ID NO: 3188465 - RNA, 19 nt, Human
auauauuuuguaugcaagc

SEQ ID NO: 3188466 - RNA, 17 nt, Human
auauauuuuguaugcaa

SEQ ID NO: 3188467 - RNA, 16 nt, Human
auauauuuuguaugca

SEQ ID NO: 3188468 - RNA, 14 nt, Human
auauauuuuguaug

SEQ ID NO: 3188469 - RNA, 13 nt, Human
auauauuuuguau

SEQ ID NO: 3188470 - RNA, 14 nt, Human
auaugacaaauguu

SEQ ID NO: 3188471 - RNA, 17 nt, Human
auaugacaaauguuucu

SEQ ID NO: 3188472 - RNA, 16 nt, Human
auaugacaaauguuuc

SEQ ID NO: 3188473 - RNA, 18 nt, Human
auaugacaaauguuucua

SEQ ID NO: 3188474 - RNA, 19 nt, Human
auaugaacauacaaaugca

SEQ ID NO: 3188475 - RNA, 14 nt, Human
auaugaacuuaaca

SEQ ID NO: 3188476 - RNA, 17 nt, Human
auaugaacuuaacaugc

SEQ ID NO: 3188477 - RNA, 17 nt, Human
auaugaacauacaaaug

SEQ ID NO: 3188478 - RNA, 18 nt, Human
auaugaacauacaaaugc

SEQ ID NO: 3188479 - RNA, 23 nt, Human
auauguaccuaacgaaguauccu

SEQ ID NO: 3188480 - RNA, 14 nt, Human
auaugggagaaaua

SEQ ID NO: 3188481 - RNA, 15 nt, Human
auaugggagaaauag

SEQ ID NO: 3188482 - RNA, 20 nt, Human
auauguggaguucaucuuga

SEQ ID NO: 3188483 - RNA, 21 nt, Human
auauguggaguucaucuugaa

SEQ ID NO: 3188484 - RNA, 19 nt, Human
auauguagccuuuacuguu

SEQ ID NO: 3188485 - RNA, 16 nt, Human
uucauuaauucaggca

SEQ ID NO: 3188486 - RNA, 14 nt, Human
uucaugcuuuauca

SEQ ID NO: 3188487 - RNA, 23 nt, Human
auauguguguguguguguugcuu

SEQ ID NO: 3188488 - RNA, 13 nt, Human
uucauugcuguga

SEQ ID NO: 3188489 - RNA, 22 nt, Human
uucauugguacugccuuaaaga

SEQ ID NO: 3188490 - RNA, 19 nt, Human
uucauugguacugccuuaa

SEQ ID NO: 3188491 - RNA, 22 nt, Human
uuccaauuuacauacucugcuu

SEQ ID NO: 3188492 - RNA, 13 nt, Human
uuccaauguuuca

SEQ ID NO: 3188493 - RNA, 14 nt, Human
uuccaauuuuccuu

SEQ ID NO: 3188494 - RNA, 13 nt, Human
uuccaauuuuccu

SEQ ID NO: 3188495 - RNA, 14 nt, Human
uucauuaucucaaa

SEQ ID NO: 3188496 - RNA, 22 nt, Human
uucauuagcaaaaaaaguugua

SEQ ID NO: 3188497 - RNA, 21 nt, Human
uucauuagcaaaaaaaguugu

SEQ ID NO: 3188498 - RNA, 20 nt, Human
uucauuagcaaaaaaaguug

SEQ ID NO: 3188499 - RNA, 16 nt, Human
uucauugcaauuaaac

SEQ ID NO: 3188500 - RNA, 21 nt, Human
uuccacaagagcccaggccuc

SEQ ID NO: 3188501 - RNA, 22 nt, Human
uuccacagaggacacagagaag

SEQ ID NO: 3188502 - RNA, 13 nt, Human
uuccacagaggac

SEQ ID NO: 3188503 - RNA, 14 nt, Human
uuccacagaggaca

SEQ ID NO: 3188504 - RNA, 15 nt, Human
uuccacauguuacug

SEQ ID NO: 3188505 - RNA, 15 nt, Human
uuccaccuucccaug

SEQ ID NO: 3188506 - RNA, 17 nt, Human
uuccaccugcucugcug

SEQ ID NO: 3188507 - RNA, 13 nt, Human
uuccaccugcucu

SEQ ID NO: 3188508 - RNA, 16 nt, Human
uuccaccugcucugcu

SEQ ID NO: 3188509 - RNA, 15 nt, Human
uuccaccugcucugc

SEQ ID NO: 3188510 - RNA, 13 nt, Human
uuccaggcuggga

SEQ ID NO: 3188511 - RNA, 15 nt, Human
uuccaggcugggaga

SEQ ID NO: 3188512 - RNA, 17 nt, Human
uuccaggcugggagagc

SEQ ID NO: 3188513 - RNA, 18 nt, Human
uuccagguuuaagcuguu

SEQ ID NO: 3188514 - RNA, 17 nt, Human
uuccagguuuaagcugu

SEQ ID NO: 3188515 - RNA, 12 nt, Human
uuccaguauuuu

SEQ ID NO: 3188516 - RNA, 11 nt, Human
uuccaguauuu

SEQ ID NO: 3188517 - RNA, 15 nt, Human
uuccagguuuaagua

SEQ ID NO: 3188518 - RNA, 21 nt, Human
uuccaguaaggaaugauauug

SEQ ID NO: 3188519 - RNA, 17 nt, Human
auauguuauuuuaaaca

SEQ ID NO: 3188520 - RNA, 16 nt, Human
auauguuaauuugugu

SEQ ID NO: 3188521 - RNA, 15 nt, Human
uuccagugaggcucu

SEQ ID NO: 3188522 - RNA, 16 nt, Human
uuccagugaggcucug

SEQ ID NO: 3188523 - RNA, 22 nt, Human
uuccagucgggggaacugaggc

SEQ ID NO: 3188524 - RNA, 22 nt, Human
uuccagucaggcucucugggcu

SEQ ID NO: 3188525 - RNA, 14 nt, Human
uuccaguauuuuag

SEQ ID NO: 3188526 - RNA, 22 nt, Human
uuccagugaaaucaguuacucu

SEQ ID NO: 3188527 - RNA, 16 nt, Human
uucccaggcaaauaaa

SEQ ID NO: 3188528 - RNA, 18 nt, Human
uucccaggcaaauaaaau

SEQ ID NO: 3188529 - RNA, 19 nt, Human
uucccaggcaaauaaaauu

SEQ ID NO: 3188530 - RNA, 20 nt, Human
uucccaggcaaauaaaauuc

SEQ ID NO: 3188531 - RNA, 22 nt, Human
uucccaggcaaauaaaauuccc

SEQ ID NO: 3188532 - RNA, 19 nt, Human
uucccaggaaagaagcauu

SEQ ID NO: 3188533 - RNA, 14 nt, Human
auauuaaaagaaag

SEQ ID NO: 3188534 - RNA, 23 nt, Human
auauuaaaagaaaggguucugua

SEQ ID NO: 3188535 - RNA, 19 nt, Human
auauuaaaccauaagaugg

SEQ ID NO: 3188536 - RNA, 15 nt, Human
auauuaaaauuccaa

SEQ ID NO: 3188537 - RNA, 21 nt, Human
auauuaaaauuccaaauucau

SEQ ID NO: 3188538 - RNA, 22 nt, Human
auauuaaaauuccaaauucaug

SEQ ID NO: 3188539 - RNA, 12 nt, Human
auauuaaacaaa

SEQ ID NO: 3188540 - RNA, 18 nt, Human
auauuaaacaaaguuuca

SEQ ID NO: 3188541 - RNA, 20 nt, Human
auauuaaacaaaguuucaga

SEQ ID NO: 3188542 - RNA, 22 nt, Human
auauuaaacaaaguuucagagu

SEQ ID NO: 3188543 - RNA, 20 nt, Human
auauuaaaaagucuuuuaaa

SEQ ID NO: 3188544 - RNA, 19 nt, Human
auauuaaaaagucuuuuaa

SEQ ID NO: 3188545 - RNA, 17 nt, Human
auauuaaaaagucuuuu

SEQ ID NO: 3188546 - RNA, 16 nt, Human
auauuaaaaagucuuu

SEQ ID NO: 3188547 - RNA, 12 nt, Human
auauuaaaaagu

SEQ ID NO: 3188548 - RNA, 15 nt, Human
auauuaaaaagucuu

SEQ ID NO: 3188549 - RNA, 13 nt, Human
auauuaaaaaguc

SEQ ID NO: 3188550 - RNA, 12 nt, Human
auauuaaaaaac

SEQ ID NO: 3188551 - RNA, 17 nt, Human
auauuaaaaaacuucau

SEQ ID NO: 3188552 - RNA, 24 nt, Human
auauuaaaaaacuucauguaauuu

SEQ ID NO: 3188553 - RNA, 20 nt, Human
auauuaauuuaucagauugc

SEQ ID NO: 3188554 - RNA, 13 nt, Human
auauuacaauauu

SEQ ID NO: 3188555 - RNA, 17 nt, Human
auauuacaauauuugug

SEQ ID NO: 3188556 - RNA, 15 nt, Human
auauuacaauauuug

SEQ ID NO: 3188557 - RNA, 17 nt, Human
auauuaagaaagacuau

SEQ ID NO: 3188558 - RNA, 15 nt, Human
auauuaagaaagacu

SEQ ID NO: 3188559 - RNA, 16 nt, Human
auauuaagaaagacua

SEQ ID NO: 3188560 - RNA, 12 nt, Human
auauuuaaaggg

SEQ ID NO: 3188561 - RNA, 13 nt, Human
auauuuaaagucu

SEQ ID NO: 3188562 - RNA, 19 nt, Human
auauuuaaagggaaauuga

SEQ ID NO: 3188563 - RNA, 14 nt, Human
auauuuaaagggaa

SEQ ID NO: 3188564 - RNA, 13 nt, Human
auauuuacaaccu

SEQ ID NO: 3188565 - RNA, 16 nt, Human
auauuuacaauguauu

SEQ ID NO: 3188566 - RNA, 17 nt, Human
auauuuacaauguauua

SEQ ID NO: 3188567 - RNA, 21 nt, Human
auauuuacaauguauuaagcc

SEQ ID NO: 3188568 - RNA, 22 nt, Human
auauuuacaacacuuuaauggg

SEQ ID NO: 3188569 - RNA, 22 nt, Human
auauuuaauguugaacaaaaua

SEQ ID NO: 3188570 - RNA, 21 nt, Human
auauuuaauguugaacaaaau

SEQ ID NO: 3188571 - RNA, 20 nt, Human
auauuuaauguugaacaaaa

SEQ ID NO: 3188572 - RNA, 16 nt, Human
auauuuaauguugaac

SEQ ID NO: 3188573 - RNA, 15 nt, Human
auauuuaauguugaa

SEQ ID NO: 3188574 - RNA, 22 nt, Human
auauuuaaaggcccuaucuguu

SEQ ID NO: 3188575 - RNA, 13 nt, Human
auauuguuuucag

SEQ ID NO: 3188576 - RNA, 22 nt, Human
auauuguauuguuagauguuug

SEQ ID NO: 3188577 - RNA, 20 nt, Human
auauugucucuuuuuuaagu

SEQ ID NO: 3188578 - RNA, 15 nt, Human
auauugauaugcuua

SEQ ID NO: 3188579 - RNA, 14 nt, Human
auauugagcaauau

SEQ ID NO: 3188580 - RNA, 18 nt, Human
auauugagcaauauguca

SEQ ID NO: 3188581 - RNA, 20 nt, Human
auauugagcaauaugucagu

SEQ ID NO: 3188582 - RNA, 13 nt, Human
auauugagcagaa

SEQ ID NO: 3188583 - RNA, 14 nt, Human
auauugagcagaau

SEQ ID NO: 3188584 - RNA, 16 nt, Human
auauugagcagaauuc

SEQ ID NO: 3188585 - RNA, 21 nt, Human
auauugacaaguuuaaaggcu

SEQ ID NO: 3188586 - RNA, 14 nt, Human
auauucuauuuuac

SEQ ID NO: 3188587 - RNA, 16 nt, Human
auauucuauuuuacaa

SEQ ID NO: 3188588 - RNA, 19 nt, Human
auauucuaguaauaaagac

SEQ ID NO: 3188589 - RNA, 21 nt, Human
auauucuaguaauaaagacuc

SEQ ID NO: 3188590 - RNA, 13 nt, Human
auauucuauuuua

SEQ ID NO: 3188591 - RNA, 21 nt, Human
auauuccugcauuugugaaau

SEQ ID NO: 3188592 - RNA, 18 nt, Human
auauucuaagaaauaucu

SEQ ID NO: 3188593 - RNA, 22 nt, Human
auauucuaagaaauaucuguga

SEQ ID NO: 3188594 - RNA, 23 nt, Human
auauucuaagaaauaucugugaa

SEQ ID NO: 3188595 - RNA, 22 nt, Human
auauugcugauggugcaaugac

SEQ ID NO: 3188596 - RNA, 21 nt, Human
auauugcugauggugcaauga

SEQ ID NO: 3188597 - RNA, 21 nt, Human
auauugaggagcacugaaagu

SEQ ID NO: 3188598 - RNA, 21 nt, Human
auauugguauauccuuuucug

SEQ ID NO: 3188599 - RNA, 12 nt, Human
auauugguuuua

SEQ ID NO: 3188600 - RNA, 13 nt, Human
auauugguuuuau

SEQ ID NO: 3188601 - RNA, 15 nt, Human
auauugguuuuauga

SEQ ID NO: 3188602 - RNA, 17 nt, Human
auauugguuuuaugaug

SEQ ID NO: 3188603 - RNA, 18 nt, Human
auauugguuuuaugauga

SEQ ID NO: 3188604 - RNA, 12 nt, Human
auauuguaagaa

SEQ ID NO: 3188605 - RNA, 19 nt, Human
auauugguuuuaugaugac

SEQ ID NO: 3188606 - RNA, 16 nt, Human
auauuguaagaaauac

SEQ ID NO: 3188607 - RNA, 15 nt, Human
auauuguaagaaaua

SEQ ID NO: 3188608 - RNA, 14 nt, Human
auauuguaagaaau

SEQ ID NO: 3188609 - RNA, 13 nt, Human
auauuguaagaaa

SEQ ID NO: 3188610 - RNA, 18 nt, Human
uuccucuccacugccuuc

SEQ ID NO: 3188611 - RNA, 16 nt, Human
uuccucuccacugccu

SEQ ID NO: 3188612 - RNA, 19 nt, Human
uuccucuccacugccuucg

SEQ ID NO: 3188613 - RNA, 13 nt, Human
uuccucugagccu

SEQ ID NO: 3188614 - RNA, 22 nt, Human
uuccucuuuuuauuuaguuccu

SEQ ID NO: 3188615 - RNA, 21 nt, Human
uuccucuuuugugcugcuucu

SEQ ID NO: 3188616 - RNA, 19 nt, Human
uuccuggcacugcuuccag

SEQ ID NO: 3188617 - RNA, 20 nt, Human
uuccuggcacugcuuccagu

SEQ ID NO: 3188618 - RNA, 22 nt, Human
uuccuggcacugcuuccaguga

SEQ ID NO: 3188619 - RNA, 17 nt, Human
uuccuguuugggaagag

SEQ ID NO: 3188620 - RNA, 13 nt, Human
uuccuguuucaag

SEQ ID NO: 3188621 - RNA, 17 nt, Human
uuccuguugucaagaau

SEQ ID NO: 3188622 - RNA, 21 nt, Human
auauuugaauguaugcuucau

SEQ ID NO: 3188623 - RNA, 17 nt, Human
auauuugaggaguguua

SEQ ID NO: 3188624 - RNA, 12 nt, Human
auauuugauuua

SEQ ID NO: 3188625 - RNA, 14 nt, Human
auauuugauuuauu

SEQ ID NO: 3188626 - RNA, 15 nt, Human
auauuugauuuauua

SEQ ID NO: 3188627 - RNA, 16 nt, Human
auauuugauuuauuaa

SEQ ID NO: 3188628 - RNA, 18 nt, Human
auauuugauuuauuaacu

SEQ ID NO: 3188629 - RNA, 14 nt, Human
auauuuggaauaaa

SEQ ID NO: 3188630 - RNA, 23 nt, Human
auauuugauuuauuaacuuaaua

SEQ ID NO: 3188631 - RNA, 19 nt, Human
auauuugcaguuuuucauu

SEQ ID NO: 3188632 - RNA, 23 nt, Human
auauuugcaguuuuucauuuuaa

SEQ ID NO: 3188633 - RNA, 19 nt, Human
uucccgccgcccagcccac

SEQ ID NO: 3188634 - RNA, 12 nt, Human
uucccgcucagc

SEQ ID NO: 3188635 - RNA, 14 nt, Human
uucccgcucagccc

SEQ ID NO: 3188636 - RNA, 20 nt, Human
auauuuggaugcagaguuca

SEQ ID NO: 3188637 - RNA, 17 nt, Human
auauuuggaugcagagu

SEQ ID NO: 3188638 - RNA, 23 nt, Human
auauuuggaauaaaaauuccaga

SEQ ID NO: 3188639 - RNA, 18 nt, Human
uuccgcauucuuuguaca

SEQ ID NO: 3188640 - RNA, 20 nt, Human
uucccuuuuuuggcugcuga

SEQ ID NO: 3188641 - RNA, 11 nt, Human
uucccuaaagc

SEQ ID NO: 3188642 - RNA, 12 nt, Human
uucccuaaagcc

SEQ ID NO: 3188643 - RNA, 14 nt, Human
auauuuuucuuaaa

SEQ ID NO: 3188644 - RNA, 13 nt, Human
auauuuuucuuaa

SEQ ID NO: 3188645 - RNA, 17 nt, Human
uuccuuacauaaacauc

SEQ ID NO: 3188646 - RNA, 16 nt, Human
uuccuuacauaaacau

SEQ ID NO: 3188647 - RNA, 13 nt, Human
uuccuuacauaaa

SEQ ID NO: 3188648 - RNA, 17 nt, Human
uuccuguuuguugaagg

SEQ ID NO: 3188649 - RNA, 19 nt, Human
auauuuuucuuaaaaagua

SEQ ID NO: 3188650 - RNA, 18 nt, Human
auauuuuucuuaaaaagu

SEQ ID NO: 3188651 - RNA, 17 nt, Human
auauuuuucuuaaaaag

SEQ ID NO: 3188652 - RNA, 15 nt, Human
auauuuuucuuaaaa

SEQ ID NO: 3188653 - RNA, 15 nt, Human
aucaaauaugcaaag

SEQ ID NO: 3188654 - RNA, 18 nt, Human
aucaaauaugcaaagcac

SEQ ID NO: 3188655 - RNA, 12 nt, Human
aucaacuaaagu

SEQ ID NO: 3188656 - RNA, 20 nt, Human
aucaacuaaaguuguacuuu

SEQ ID NO: 3188657 - RNA, 18 nt, Human
aucaacuaaaguuguacu

SEQ ID NO: 3188658 - RNA, 15 nt, Human
aucaacuaguauuug

SEQ ID NO: 3188659 - RNA, 22 nt, Human
aucaacuaaaguuguacuuuaa

SEQ ID NO: 3188660 - RNA, 21 nt, Human
aucaacuaaaguuguacuuua

SEQ ID NO: 3188661 - RNA, 17 nt, Human
aucaaauaugcaaagca

SEQ ID NO: 3188662 - RNA, 16 nt, Human
aucaaauaugcaaagc

SEQ ID NO: 3188663 - RNA, 21 nt, Human
aucaacugcaucaagauguga

SEQ ID NO: 3188664 - RNA, 13 nt, Human
aucaacucauguu

SEQ ID NO: 3188665 - RNA, 14 nt, Human
aucaaugugucuuu

SEQ ID NO: 3188666 - RNA, 17 nt, Human
aucaaugugucuuucua

SEQ ID NO: 3188667 - RNA, 22 nt, Human
aucaaugugucuuucuaagaaa

SEQ ID NO: 3188668 - RNA, 19 nt, Human
aucaaguagacuacuguuc

SEQ ID NO: 3188669 - RNA, 18 nt, Human
aucaaguagacuacuguu

SEQ ID NO: 3188670 - RNA, 17 nt, Human
aucaaguagacuacugu

SEQ ID NO: 3188671 - RNA, 13 nt, Human
aucaaguaaugaa

SEQ ID NO: 3188672 - RNA, 13 nt, Human
aucaauuuaaaaa

SEQ ID NO: 3188673 - RNA, 14 nt, Human
aucaauuuuucuua

SEQ ID NO: 3188674 - RNA, 12 nt, Human
aucaauuuaagu

SEQ ID NO: 3188675 - RNA, 17 nt, Human
aucaauuuaaguguugg

SEQ ID NO: 3188676 - RNA, 17 nt, Human
aucacgccacugcacua

SEQ ID NO: 3188677 - RNA, 15 nt, Human
aucacgccacugcac

SEQ ID NO: 3188678 - RNA, 14 nt, Human
aucacgccacugca

SEQ ID NO: 3188679 - RNA, 14 nt, Human
aucacucagagcag

SEQ ID NO: 3188680 - RNA, 18 nt, Human
aucacucagagcagucug

SEQ ID NO: 3188681 - RNA, 13 nt, Human
aucacucauuaau

SEQ ID NO: 3188682 - RNA, 15 nt, Human
aucacucauuaauua

SEQ ID NO: 3188683 - RNA, 16 nt, Human
aucacucauuaauuaa

SEQ ID NO: 3188684 - RNA, 17 nt, Human
auuuccccuaaucuuuu

SEQ ID NO: 3188685 - RNA, 22 nt, Human
auuucccuuuagcuguguuauu

SEQ ID NO: 3188686 - RNA, 21 nt, Human
auuucccuuuagcuguguuau

SEQ ID NO: 3188687 - RNA, 20 nt, Human
auuucccuuuagcuguguua

SEQ ID NO: 3188688 - RNA, 16 nt, Human
auuucccuuuagcugu

SEQ ID NO: 3188689 - RNA, 23 nt, Human
auuucccuuuagcuguguuauua

SEQ ID NO: 3188690 - RNA, 16 nt, Human
auuuccguaauucuua

SEQ ID NO: 3188691 - RNA, 14 nt, Human
auuuccguaauucu

SEQ ID NO: 3188692 - RNA, 18 nt, Human
auuuccguaauucuuauu

SEQ ID NO: 3188693 - RNA, 16 nt, Human
auuucuagcuuuuuaa

SEQ ID NO: 3188694 - RNA, 18 nt, Human
auuucuagcuuuuuaauu

SEQ ID NO: 3188695 - RNA, 16 nt, Human
auuugaaagugccuuu

SEQ ID NO: 3188696 - RNA, 17 nt, Human
auuugaaagugccuuug

SEQ ID NO: 3188697 - RNA, 18 nt, Human
auuugaaaaugauaaaag

SEQ ID NO: 3188698 - RNA, 14 nt, Human
auuugaaccaauaa

SEQ ID NO: 3188699 - RNA, 20 nt, Human
auuugaaagugccuuugcag

SEQ ID NO: 3188700 - RNA, 22 nt, Human
auuugaaagugccuuugcagcu

SEQ ID NO: 3188701 - RNA, 20 nt, Human
auuugaaaacagaaauuggu

SEQ ID NO: 3188702 - RNA, 19 nt, Human
auuugaaaacagaaauugg

SEQ ID NO: 3188703 - RNA, 17 nt, Human
auuugaaaacagaaauu

SEQ ID NO: 3188704 - RNA, 12 nt, Human
auuucauuucuu

SEQ ID NO: 3188705 - RNA, 21 nt, Human
auuucauucgggccccaccug

SEQ ID NO: 3188706 - RNA, 16 nt, Human
auuucaaacggccuca

SEQ ID NO: 3188707 - RNA, 17 nt, Human
auuuccagccaaagccu

SEQ ID NO: 3188708 - RNA, 22 nt, Human
auuucauuugugccagaaugcu

SEQ ID NO: 3188709 - RNA, 20 nt, Human
auuuccagugaaaucaguua

SEQ ID NO: 3188710 - RNA, 15 nt, Human
auuuccccagggcac

SEQ ID NO: 3188711 - RNA, 14 nt, Human
auuuccccagggca

SEQ ID NO: 3188712 - RNA, 20 nt, Human
auuucccccauuuuucccag

SEQ ID NO: 3188713 - RNA, 17 nt, Human
auuucccccuuucuucc

SEQ ID NO: 3188714 - RNA, 14 nt, Human
auuucccccuuucu

SEQ ID NO: 3188715 - RNA, 16 nt, Human
auuuccccuaaucuuu

SEQ ID NO: 3188716 - RNA, 20 nt, Human
auuucccccuuucuuccuca

SEQ ID NO: 3188717 - RNA, 19 nt, Human
auuucccccuuucuuccuc

SEQ ID NO: 3188718 - RNA, 18 nt, Human
auuucccccuuucuuccu

SEQ ID NO: 3188719 - RNA, 17 nt, Human
auuuauuuacugcuagu

SEQ ID NO: 3188720 - RNA, 13 nt, Human
auuuauucugcuc

SEQ ID NO: 3188721 - RNA, 14 nt, Human
auuuauucuaauua

SEQ ID NO: 3188722 - RNA, 22 nt, Human
auuuauuaaaugcccagccccu

SEQ ID NO: 3188723 - RNA, 13 nt, Human
auuuauuaacuua

SEQ ID NO: 3188724 - RNA, 22 nt, Human
auuuauuaacugcucaguguuu

SEQ ID NO: 3188725 - RNA, 14 nt, Human
auuuauuaacuuaa

SEQ ID NO: 3188726 - RNA, 16 nt, Human
auuuauuaacuuaaua

SEQ ID NO: 3188727 - RNA, 21 nt, Human
auuuauuaaauuuuuuuguau

SEQ ID NO: 3188728 - RNA, 24 nt, Human
auuuauuaaauuuuuuuguaugaa

SEQ ID NO: 3188729 - RNA, 14 nt, Human
auuuauuaaauuuu

SEQ ID NO: 3188730 - RNA, 20 nt, Human
auuuauuaagguuacagauu

SEQ ID NO: 3188731 - RNA, 17 nt, Human
auuuauuaacuuaauaa

SEQ ID NO: 3188732 - RNA, 20 nt, Human
auuuauuaacuuaauaauca

SEQ ID NO: 3188733 - RNA, 21 nt, Human
auuuauuaacuuaauaaucaa

SEQ ID NO: 3188734 - RNA, 23 nt, Human
auuuauuaacuuaauaaucaaga

SEQ ID NO: 3188735 - RNA, 16 nt, Human
auuuagaugcauauua

SEQ ID NO: 3188736 - RNA, 17 nt, Human
auuuagaauggugauuu

SEQ ID NO: 3188737 - RNA, 11 nt, Human
auuuagaaugg

SEQ ID NO: 3188738 - RNA, 21 nt, Human
auuuagaauggugauuuuaaa

SEQ ID NO: 3188739 - RNA, 14 nt, Human
auuuagaagaaaga

SEQ ID NO: 3188740 - RNA, 15 nt, Human
auuuagaagaaagau

SEQ ID NO: 3188741 - RNA, 18 nt, Human
auuuagaagaaagauguu

SEQ ID NO: 3188742 - RNA, 15 nt, Human
auuuagaaauauaau

SEQ ID NO: 3188743 - RNA, 16 nt, Human
auuuacuucuuauaca

SEQ ID NO: 3188744 - RNA, 14 nt, Human
auuuacuucuuaua

SEQ ID NO: 3188745 - RNA, 21 nt, Human
auuuagaaaagugaauugaag

SEQ ID NO: 3188746 - RNA, 21 nt, Human
auuuacugcuagucuuaagaa

SEQ ID NO: 3188747 - RNA, 21 nt, Human
auuuacugcauucuucugauc

SEQ ID NO: 3188748 - RNA, 17 nt, Human
auuuacugcauucuucu

SEQ ID NO: 3188749 - RNA, 15 nt, Human
auuuaaaaagcccaa

SEQ ID NO: 3188750 - RNA, 20 nt, Human
auuuaaaaacaaaaggcaau

SEQ ID NO: 3188751 - RNA, 18 nt, Human
auuuaaaaagcccaaccu

SEQ ID NO: 3188752 - RNA, 16 nt, Human
auuuaaaaagcccaac

SEQ ID NO: 3188753 - RNA, 19 nt, Human
auuuaaaaagcccaaccuc

SEQ ID NO: 3188754 - RNA, 21 nt, Human
auuuaaaaagguuuaaaacua

SEQ ID NO: 3188755 - RNA, 16 nt, Human
auuuaaauuuaaguaa

SEQ ID NO: 3188756 - RNA, 14 nt, Human
auuuauucugcuca

SEQ ID NO: 3188757 - RNA, 13 nt, Human
auugugauguguc

SEQ ID NO: 3188758 - RNA, 14 nt, Human
auugugaugugucc

SEQ ID NO: 3188759 - RNA, 15 nt, Human
auugugauguguccu

SEQ ID NO: 3188760 - RNA, 17 nt, Human
auugugaauaaugauuu

SEQ ID NO: 3188761 - RNA, 17 nt, Human
auuguccccgacccuug

SEQ ID NO: 3188762 - RNA, 23 nt, Human
auuguccagagcugcuuccccgu

SEQ ID NO: 3188763 - RNA, 19 nt, Human
auuguccagagcugcuucc

SEQ ID NO: 3188764 - RNA, 13 nt, Human
auuguccagagcu

SEQ ID NO: 3188765 - RNA, 19 nt, Human
auuguccccgacccuugcc

SEQ ID NO: 3188766 - RNA, 20 nt, Human
auuguccccgacccuugccg

SEQ ID NO: 3188767 - RNA, 13 nt, Human
auuguauuguuag

SEQ ID NO: 3188768 - RNA, 12 nt, Human
auugguguugac

SEQ ID NO: 3188769 - RNA, 19 nt, Human
auugguguaagguacuuuc

SEQ ID NO: 3188770 - RNA, 18 nt, Human
auuggucuaucuacuggc

SEQ ID NO: 3188771 - RNA, 17 nt, Human
auuggugaguuaggaac

SEQ ID NO: 3188772 - RNA, 18 nt, Human
auugugucucuugguccu

SEQ ID NO: 3188773 - RNA, 14 nt, Human
auuuaaaaaaaauc

SEQ ID NO: 3188774 - RNA, 14 nt, Human
auugugucucuugg

SEQ ID NO: 3188775 - RNA, 21 nt, Human
auucuguuggccagugugaca

SEQ ID NO: 3188776 - RNA, 23 nt, Human
auucugucuucauccccucagaa

SEQ ID NO: 3188777 - RNA, 19 nt, Human
auucuguuuuuaaaaauua

SEQ ID NO: 3188778 - RNA, 15 nt, Human
auucugggaauguau

SEQ ID NO: 3188779 - RNA, 19 nt, Human
auucugggaauguauagua

SEQ ID NO: 3188780 - RNA, 22 nt, Human
auucugggaauguauaguauuu

SEQ ID NO: 3188781 - RNA, 22 nt, Human
auucugggcaccacaaaauaua

SEQ ID NO: 3188782 - RNA, 24 nt, Human
auucugggcaccacaaaauauaca

SEQ ID NO: 3188783 - RNA, 22 nt, Human
auucuggggaaacaacauuuau

SEQ ID NO: 3188784 - RNA, 17 nt, Human
auucugggaauguauag

SEQ ID NO: 3188785 - RNA, 16 nt, Human
auucugggaauguaua

SEQ ID NO: 3188786 - RNA, 14 nt, Human
auucugauuucuuu

SEQ ID NO: 3188787 - RNA, 20 nt, Human
auucugauuucuuuucacca

SEQ ID NO: 3188788 - RNA, 10 nt, Human
auucuucaaa

SEQ ID NO: 3188789 - RNA, 23 nt, Human
auucuuauuccauauuagaaaac

SEQ ID NO: 3188790 - RNA, 18 nt, Human
auucuuauuuaaugaaag

SEQ ID NO: 3188791 - RNA, 14 nt, Human
auucuuauuuaaug

SEQ ID NO: 3188792 - RNA, 13 nt, Human
auucuuauuuaau

SEQ ID NO: 3188793 - RNA, 13 nt, Human
auucuuauuacua

SEQ ID NO: 3188794 - RNA, 13 nt, Human
auucuuauuccau

SEQ ID NO: 3188795 - RNA, 22 nt, Human
auucuuauuccauauuagaaaa

SEQ ID NO: 3188796 - RNA, 21 nt, Human
auucuuauuccauauuagaaa

SEQ ID NO: 3188797 - RNA, 22 nt, Human
auucuuccucccucccucuuuc

SEQ ID NO: 3188798 - RNA, 13 nt, Human
auucuuccucccu

SEQ ID NO: 3188799 - RNA, 13 nt, Human
auucuucuccacu

SEQ ID NO: 3188800 - RNA, 21 nt, Human
auucuuugcacuuuuucuuaa

SEQ ID NO: 3188801 - RNA, 17 nt, Human
auucuuuguuaauuugg

SEQ ID NO: 3188802 - RNA, 15 nt, Human
auucuuugcaaaaau

SEQ ID NO: 3188803 - RNA, 21 nt, Human
auucuuuggaguuaaaaugca

SEQ ID NO: 3188804 - RNA, 14 nt, Human
auucuuuuaaauua

SEQ ID NO: 3188805 - RNA, 18 nt, Human
auucuuuuaaauuagaaa

SEQ ID NO: 3188806 - RNA, 19 nt, Human
auucuuuuaaauuagaaaa

SEQ ID NO: 3188807 - RNA, 23 nt, Human
auucuuuuaaauuagaaaauauu

SEQ ID NO: 3188808 - RNA, 18 nt, Human
auucuuuucugaaguugu

SEQ ID NO: 3188809 - RNA, 21 nt, Human
auuggguggggggcuucauac

SEQ ID NO: 3188810 - RNA, 20 nt, Human
auuggguggggggcuucaua

SEQ ID NO: 3188811 - RNA, 15 nt, Human
auugggccccugcca

SEQ ID NO: 3188812 - RNA, 16 nt, Human
auugggccccugccag

SEQ ID NO: 3188813 - RNA, 18 nt, Human
auugacccacaagaaaug

SEQ ID NO: 3188814 - RNA, 18 nt, Human
auugacaggauuauugga

SEQ ID NO: 3188815 - RNA, 17 nt, Human
auugacaggcgaaagaa

SEQ ID NO: 3188816 - RNA, 15 nt, Human
auugaaaaaccauuu

SEQ ID NO: 3188817 - RNA, 16 nt, Human
auucuuuuucuuuuuu

SEQ ID NO: 3188818 - RNA, 22 nt, Human
auucuuuuucuuuuuuaaauua

SEQ ID NO: 3188819 - RNA, 20 nt, Human
auugaaaagaaguagugucu

SEQ ID NO: 3188820 - RNA, 12 nt, Human
auugaaaaguac

SEQ ID NO: 3188821 - RNA, 13 nt, Human
auugaaagaaugu

SEQ ID NO: 3188822 - RNA, 17 nt, Human
auugaaagaauguaaag

SEQ ID NO: 3188823 - RNA, 14 nt, Human
auugaaagaaugua

SEQ ID NO: 3188824 - RNA, 20 nt, Human
auugaaagaauguaaagcaa

SEQ ID NO: 3188825 - RNA, 18 nt, Human
auugaaagaauguaaagc

SEQ ID NO: 3188826 - RNA, 21 nt, Human
auugaaaaguuauuucccuuu

SEQ ID NO: 3188827 - RNA, 20 nt, Human
auugaaaauuauuaaucaga

SEQ ID NO: 3188828 - RNA, 22 nt, Human
auugaaaauuauuaaucagaag

SEQ ID NO: 3188829 - RNA, 16 nt, Human
auugaaaauugaaaag

SEQ ID NO: 3188830 - RNA, 18 nt, Human
auugaaaauugaaaagua

SEQ ID NO: 3188831 - RNA, 18 nt, Human
auuuuauuuuuagaauuu

SEQ ID NO: 3188832 - RNA, 23 nt, Human
auuuuagcaaagcggguuauaau

SEQ ID NO: 3188833 - RNA, 11 nt, Human
auuuuauucuu

SEQ ID NO: 3188834 - RNA, 15 nt, Human
auuuuauuuuuagaa

SEQ ID NO: 3188835 - RNA, 14 nt, Human
auuuuauucuugau

SEQ ID NO: 3188836 - RNA, 13 nt, Human
auuuuauucuuga

SEQ ID NO: 3188837 - RNA, 12 nt, Human
auuuuauucuug

SEQ ID NO: 3188838 - RNA, 13 nt, Human
auuuuagaaauau

SEQ ID NO: 3188839 - RNA, 15 nt, Human
auuuuagaaauauuc

SEQ ID NO: 3188840 - RNA, 17 nt, Human
auuuuagaaauauucac

SEQ ID NO: 3188841 - RNA, 20 nt, Human
auuuucaagacugaauucca

SEQ ID NO: 3188842 - RNA, 20 nt, Human
auuuucaacgcagcccugcu

SEQ ID NO: 3188843 - RNA, 18 nt, Human
auuuucaacgcagcccug

SEQ ID NO: 3188844 - RNA, 14 nt, Human
auuuucaaugugau

SEQ ID NO: 3188845 - RNA, 13 nt, Human
auuuucagauuug

SEQ ID NO: 3188846 - RNA, 12 nt, Human
auuuucagauuu

SEQ ID NO: 3188847 - RNA, 13 nt, Human
auuuucagauuca

SEQ ID NO: 3188848 - RNA, 20 nt, Human
auuuucagauuugcacaaaa

SEQ ID NO: 3188849 - RNA, 18 nt, Human
auuuucagcaugaaaaug

SEQ ID NO: 3188850 - RNA, 23 nt, Human
auuuucagcaugaaaaugugugu

SEQ ID NO: 3188851 - RNA, 19 nt, Human
auuuucagauuugcacaaa

SEQ ID NO: 3188852 - RNA, 18 nt, Human
auuuucagauuugcacaa

SEQ ID NO: 3188853 - RNA, 17 nt, Human
auuuucagauuugcaca

SEQ ID NO: 3188854 - RNA, 16 nt, Human
auuuucagauuugcac

SEQ ID NO: 3188855 - RNA, 15 nt, Human
auuuucagauuugca

SEQ ID NO: 3188856 - RNA, 14 nt, Human
auuuucagauuugc

SEQ ID NO: 3188857 - RNA, 20 nt, Human
auuuucagucaaaacuuuaa

SEQ ID NO: 3188858 - RNA, 18 nt, Human
auuuuccaucuaaaaaua

SEQ ID NO: 3188859 - RNA, 15 nt, Human
auuuuccaucuaaaa

SEQ ID NO: 3188860 - RNA, 16 nt, Human
auuuucauuagcaaaa

SEQ ID NO: 3188861 - RNA, 15 nt, Human
auuuucauuagcaaa

SEQ ID NO: 3188862 - RNA, 14 nt, Human
auuuucauuagcaa

SEQ ID NO: 3188863 - RNA, 13 nt, Human
auuuucauuagca

SEQ ID NO: 3188864 - RNA, 17 nt, Human
auuuucauuuuacaguu

SEQ ID NO: 3188865 - RNA, 14 nt, Human
auuuucauuuuaca

SEQ ID NO: 3188866 - RNA, 22 nt, Human
auuuucauuagcaaaaaaaguu

SEQ ID NO: 3188867 - RNA, 17 nt, Human
auuuucauuagcaaaaa

SEQ ID NO: 3188868 - RNA, 16 nt, Human
auuugaagacuucaaa

SEQ ID NO: 3188869 - RNA, 17 nt, Human
auuugaagacuucaaaa

SEQ ID NO: 3188870 - RNA, 12 nt, Human
auuuuaaaaaag

SEQ ID NO: 3188871 - RNA, 13 nt, Human
auuuuaaaaaagg

SEQ ID NO: 3188872 - RNA, 14 nt, Human
auuuuaaaaaaggg

SEQ ID NO: 3188873 - RNA, 23 nt, Human
auuuuaaaaaguccauaccuuau

SEQ ID NO: 3188874 - RNA, 22 nt, Human
auuuuaaaauguacauguauua

SEQ ID NO: 3188875 - RNA, 13 nt, Human
auuuuaaaauuuc

SEQ ID NO: 3188876 - RNA, 14 nt, Human
auuuuaaaauuuca

SEQ ID NO: 3188877 - RNA, 15 nt, Human
auuuuaaaauuucau

SEQ ID NO: 3188878 - RNA, 16 nt, Human
auuuuaaaauuucaua

SEQ ID NO: 3188879 - RNA, 15 nt, Human
auuuuaaacagagga

SEQ ID NO: 3188880 - RNA, 15 nt, Human
auuuuaauucaguug

SEQ ID NO: 3188881 - RNA, 16 nt, Human
auuuuaauguaauuga

SEQ ID NO: 3188882 - RNA, 21 nt, Human
auuuuacuuuaaaaggagcca

SEQ ID NO: 3188883 - RNA, 21 nt, Human
auuuuaccaucacacauguuc

SEQ ID NO: 3188884 - RNA, 14 nt, Human
auucaggaagcuca

SEQ ID NO: 3188885 - RNA, 19 nt, Human
auucagacagcugccuggg

SEQ ID NO: 3188886 - RNA, 17 nt, Human
auucaggaagcucaggg

SEQ ID NO: 3188887 - RNA, 19 nt, Human
auucaggaagcucagggcc

SEQ ID NO: 3188888 - RNA, 19 nt, Human
auucaguaauaacucuacc

SEQ ID NO: 3188889 - RNA, 15 nt, Human
auucaguaauaacuc

SEQ ID NO: 3188890 - RNA, 15 nt, Human
auucccaagcucugc

SEQ ID NO: 3188891 - RNA, 14 nt, Human
auucccaagcucug

SEQ ID NO: 3188892 - RNA, 16 nt, Human
auucccaagcucugcu

SEQ ID NO: 3188893 - RNA, 18 nt, Human
auucccucgucuuuccca

SEQ ID NO: 3188894 - RNA, 17 nt, Human
auucccucgucuuuccc

SEQ ID NO: 3188895 - RNA, 13 nt, Human
auuccaaauucau

SEQ ID NO: 3188896 - RNA, 16 nt, Human
auuccagguuuaagua

SEQ ID NO: 3188897 - RNA, 23 nt, Human
auuccauauuagaaaacuuuguu

SEQ ID NO: 3188898 - RNA, 22 nt, Human
auuccauauuagaaaacuuugu

SEQ ID NO: 3188899 - RNA, 21 nt, Human
auuccauauuagaaaacuuug

SEQ ID NO: 3188900 - RNA, 20 nt, Human
auuccauauuagaaaacuuu

SEQ ID NO: 3188901 - RNA, 19 nt, Human
auuccauauuagaaaacuu

SEQ ID NO: 3188902 - RNA, 15 nt, Human
auuccauauuagaaa

SEQ ID NO: 3188903 - RNA, 20 nt, Human
auuccagucaggcucucugg

SEQ ID NO: 3188904 - RNA, 17 nt, Human
auucucccgggacucug

SEQ ID NO: 3188905 - RNA, 23 nt, Human
auucucccgggacucugcauauu

SEQ ID NO: 3188906 - RNA, 18 nt, Human
auucucccgggacucugc

SEQ ID NO: 3188907 - RNA, 18 nt, Human
auucuccaccugccaggg

SEQ ID NO: 3188908 - RNA, 18 nt, Human
auucucaguuuuucuuaa

SEQ ID NO: 3188909 - RNA, 14 nt, Human
auucucaguuuuuc

SEQ ID NO: 3188910 - RNA, 21 nt, Human
auucuccagggguuuacagug

SEQ ID NO: 3188911 - RNA, 21 nt, Human
auucuccaccugccagggaca

SEQ ID NO: 3188912 - RNA, 13 nt, Human
auucuccugccuc

SEQ ID NO: 3188913 - RNA, 14 nt, Human
auucuccugccuca

SEQ ID NO: 3188914 - RNA, 11 nt, Human
auucuccugcc

SEQ ID NO: 3188915 - RNA, 12 nt, Human
auucuccugccu

SEQ ID NO: 3188916 - RNA, 17 nt, Human
auucuccugccucagcc

SEQ ID NO: 3188917 - RNA, 15 nt, Human
auucuccugccucag

SEQ ID NO: 3188918 - RNA, 19 nt, Human
auucuccugccucagccuc

SEQ ID NO: 3188919 - RNA, 20 nt, Human
auucuccugccucagccucc

SEQ ID NO: 3188920 - RNA, 19 nt, Human
auucuccaccugccaggga

SEQ ID NO: 3188921 - RNA, 20 nt, Human
auucuccaccugccagggac

SEQ ID NO: 3188922 - RNA, 14 nt, Human
auucucaugccuca

SEQ ID NO: 3188923 - RNA, 15 nt, Human
auucucaugccucag

SEQ ID NO: 3188924 - RNA, 13 nt, Human
auucucaguuuuu

SEQ ID NO: 3188925 - RNA, 21 nt, Human
auucucaagggacguccucca

SEQ ID NO: 3188926 - RNA, 21 nt, Human
auucuauuucaacuucaggaa

SEQ ID NO: 3188927 - RNA, 12 nt, Human
auucuauuucaa

SEQ ID NO: 3188928 - RNA, 13 nt, Human
auucuauuuuaca

SEQ ID NO: 3188929 - RNA, 17 nt, Human
auucuauggagcuauuu

SEQ ID NO: 3188930 - RNA, 15 nt, Human
auucuaucuacugau

SEQ ID NO: 3188931 - RNA, 17 nt, Human
auucuaucuacugauuu

SEQ ID NO: 3188932 - RNA, 12 nt, Human
auucuaaagaua

SEQ ID NO: 3188933 - RNA, 23 nt, Human
uuuugagucuuuuuuuuuuaagu

SEQ ID NO: 3188934 - RNA, 17 nt, Human
uuuugauccaagcuggu

SEQ ID NO: 3188935 - RNA, 15 nt, Human
uuuugauaguugugu

SEQ ID NO: 3188936 - RNA, 19 nt, Human
uuuugauagcauuguaagc

SEQ ID NO: 3188937 - RNA, 17 nt, Human
uuuugagugccuuacac

SEQ ID NO: 3188938 - RNA, 16 nt, Human
uuuugagcccuuguuu

SEQ ID NO: 3188939 - RNA, 19 nt, Human
uuuugagcgacaucucuga

SEQ ID NO: 3188940 - RNA, 21 nt, Human
uuuugagcuacuggauucuua

SEQ ID NO: 3188941 - RNA, 22 nt, Human
auuaagcaugacagaaaauaug

SEQ ID NO: 3188942 - RNA, 18 nt, Human
auuaagcccacaguauau

SEQ ID NO: 3188943 - RNA, 19 nt, Human
auuaagcccacaguauauu

SEQ ID NO: 3188944 - RNA, 20 nt, Human
auuaagcaugacagaaaaua

SEQ ID NO: 3188945 - RNA, 18 nt, Human
auuaagauuauaauuguu

SEQ ID NO: 3188946 - RNA, 17 nt, Human
auuaagauuauaauugu

SEQ ID NO: 3188947 - RNA, 16 nt, Human
auuaagauuauaauug

SEQ ID NO: 3188948 - RNA, 15 nt, Human
auuaagauuauaauu

SEQ ID NO: 3188949 - RNA, 13 nt, Human
auuaagauuauaa

SEQ ID NO: 3188950 - RNA, 16 nt, Human
auuaaagaaauaauuu

SEQ ID NO: 3188951 - RNA, 19 nt, Human
auuaaagaaauaauuuuau

SEQ ID NO: 3188952 - RNA, 23 nt, Human
uuuugccauguuggccaggcugg

SEQ ID NO: 3188953 - RNA, 13 nt, Human
uuuugccagccca

SEQ ID NO: 3188954 - RNA, 21 nt, Human
uuuugcauaguucuagugcag

SEQ ID NO: 3188955 - RNA, 13 nt, Human
uuuugcaggagca

SEQ ID NO: 3188956 - RNA, 18 nt, Human
uuuugcaagguaaaauuu

SEQ ID NO: 3188957 - RNA, 17 nt, Human
uuuugcaagguaaaauu

SEQ ID NO: 3188958 - RNA, 21 nt, Human
uuuugcaagguaaaauuuuag

SEQ ID NO: 3188959 - RNA, 16 nt, Human
uuuugauguaaagaug

SEQ ID NO: 3188960 - RNA, 18 nt, Human
uuuugauguaaagauguu

SEQ ID NO: 3188961 - RNA, 14 nt, Human
uuuugaucucacau

SEQ ID NO: 3188962 - RNA, 21 nt, Human
uuuugugaugucccaacuugu

SEQ ID NO: 3188963 - RNA, 22 nt, Human
uuuugcucuaaaauauuuauga

SEQ ID NO: 3188964 - RNA, 16 nt, Human
uuuugcucuaaaauau

SEQ ID NO: 3188965 - RNA, 15 nt, Human
uuuugcucuaaaaua

SEQ ID NO: 3188966 - RNA, 13 nt, Human
uuuugcucuaaaa

SEQ ID NO: 3188967 - RNA, 22 nt, Human
uuuugcuaaguaaaucucuucu

SEQ ID NO: 3188968 - RNA, 24 nt, Human
uuuuguucauuucauccuuucacu

SEQ ID NO: 3188969 - RNA, 15 nt, Human
uuuuguuccacaagu

SEQ ID NO: 3188970 - RNA, 18 nt, Human
uuuuuaucuauauaaaau

SEQ ID NO: 3188971 - RNA, 22 nt, Human
uuuuuaucuauauaaaauaacu

SEQ ID NO: 3188972 - RNA, 22 nt, Human
uuuuuaguaaguuaauguauau

SEQ ID NO: 3188973 - RNA, 20 nt, Human
uuuuuagaugugcugcuuug

SEQ ID NO: 3188974 - RNA, 19 nt, Human
uuuuuagauugagaaaugu

SEQ ID NO: 3188975 - RNA, 20 nt, Human
uuuuuagauugagaaaugug

SEQ ID NO: 3188976 - RNA, 12 nt, Human
uuuuuauaaaaa

SEQ ID NO: 3188977 - RNA, 23 nt, Human
uuuuuauaacaucuuuauugaaa

SEQ ID NO: 3188978 - RNA, 22 nt, Human
uuuuuagacagagucucacugu

SEQ ID NO: 3188979 - RNA, 12 nt, Human
uuuuuagaauuu

SEQ ID NO: 3188980 - RNA, 20 nt, Human
auuauauacauacugcaucu

SEQ ID NO: 3188981 - RNA, 13 nt, Human
auuagucccuggc

SEQ ID NO: 3188982 - RNA, 21 nt, Human
auuaguacuuuauagaagaau

SEQ ID NO: 3188983 - RNA, 18 nt, Human
auuaguacuuuauagaag

SEQ ID NO: 3188984 - RNA, 14 nt, Human
auuacuagaguugg

SEQ ID NO: 3188985 - RNA, 21 nt, Human
auuacuagacugccacaagga

SEQ ID NO: 3188986 - RNA, 17 nt, Human
auuacgaaguucaagau

SEQ ID NO: 3188987 - RNA, 22 nt, Human
auuacgaaguucaagaucaaaa

SEQ ID NO: 3188988 - RNA, 18 nt, Human
auuacguacuaaggauac

SEQ ID NO: 3188989 - RNA, 22 nt, Human
auuacuaacuucuaaaacugua

SEQ ID NO: 3188990 - RNA, 21 nt, Human
auuacuaacuucuaaaacugu

SEQ ID NO: 3188991 - RNA, 16 nt, Human
auuacuaacuucuaaa

SEQ ID NO: 3188992 - RNA, 15 nt, Human
auuacuaacuucuaa

SEQ ID NO: 3188993 - RNA, 14 nt, Human
auuacuaacuucua

SEQ ID NO: 3188994 - RNA, 12 nt, Human
auuacuaacuuc

SEQ ID NO: 3188995 - RNA, 20 nt, Human
uuuuuguagagccagggucu
